United States Patent Application Publication US 2014/0004565 A1 - sequence listing, part 100

SEQ ID NO: 2486299 - RNA, 19 nt, Artificial Sequence
  Description of Artificial Sequence: Synthetic oligonucleotide
aaaucucuauagcaaagau

SEQ ID NO: 2486300 - RNA, 19 nt, Artificial Sequence
  Description of Artificial Sequence: Synthetic oligonucleotide
gcaaugauauucuucaugc

SEQ ID NO: 2486301 - RNA, 19 nt, Artificial Sequence
  Description of Artificial Sequence: Synthetic oligonucleotide
ucuaaugaucggucgaggc

SEQ ID NO: 2486302 - RNA, 19 nt, Artificial Sequence
  Description of Artificial Sequence: Synthetic oligonucleotide
uguuuucugccucugcuug

SEQ ID NO: 2486303 - RNA, 19 nt, Artificial Sequence
  Description of Artificial Sequence: Synthetic oligonucleotide
uuugccgguucucagauuc

SEQ ID NO: 2486304 - RNA, 19 nt, Artificial Sequence
  Description of Artificial Sequence: Synthetic oligonucleotide
ucugugaccuuuccaaagc

SEQ ID NO: 2486305 - RNA, 19 nt, Artificial Sequence
  Description of Artificial Sequence: Synthetic oligonucleotide
uaauguccaaaucugcuuc

SEQ ID NO: 2486306 - RNA, 19 nt, Artificial Sequence
  Description of Artificial Sequence: Synthetic oligonucleotide
auccguuuguaucugugac

SEQ ID NO: 2486307 - RNA, 19 nt, Artificial Sequence
  Description of Artificial Sequence: Synthetic oligonucleotide
ugucagaaaucucuauagc

SEQ ID NO: 2486308 - RNA, 19 nt, Artificial Sequence
  Description of Artificial Sequence: Synthetic oligonucleotide
acucaaaugauaaacauua

SEQ ID NO: 2486309 - RNA, 19 nt, Artificial Sequence
  Description of Artificial Sequence: Synthetic oligonucleotide
uacguuugaagguagacuu

SEQ ID NO: 2486310 - RNA, 19 nt, Artificial Sequence
  Description of Artificial Sequence: Synthetic oligonucleotide
caaauucguauccuggacc

SEQ ID NO: 2486311 - RNA, 19 nt, Artificial Sequence
  Description of Artificial Sequence: Synthetic oligonucleotide
ucuuguucgcacauaauua

SEQ ID NO: 2486312 - RNA, 19 nt, Artificial Sequence
  Description of Artificial Sequence: Synthetic oligonucleotide
uccucugacuuuaauauau

SEQ ID NO: 2486313 - RNA, 19 nt, Artificial Sequence
  Description of Artificial Sequence: Synthetic oligonucleotide
aagaugucucuuucccugg

SEQ ID NO: 2486314 - RNA, 19 nt, Artificial Sequence
  Description of Artificial Sequence: Synthetic oligonucleotide
uuagagcuucaguagacug

SEQ ID NO: 2486315 - RNA, 19 nt, Artificial Sequence
  Description of Artificial Sequence: Synthetic oligonucleotide
aaucguucugucccuagcu

SEQ ID NO: 2486316 - RNA, 19 nt, Artificial Sequence
  Description of Artificial Sequence: Synthetic oligonucleotide
auuacucgaauaauucugg

SEQ ID NO: 2486317 - RNA, 19 nt, Artificial Sequence
  Description of Artificial Sequence: Synthetic oligonucleotide
uuaugaguaucauucaauu

SEQ ID NO: 2486318 - RNA, 19 nt, Artificial Sequence
  Description of Artificial Sequence: Synthetic oligonucleotide
ucuucuaaugaucggucga

SEQ ID NO: 2486319 - RNA, 19 nt, Artificial Sequence
  Description of Artificial Sequence: Synthetic oligonucleotide
auaucauugaguucauuau

SEQ ID NO: 2486320 - RNA, 19 nt, Artificial Sequence
  Description of Artificial Sequence: Synthetic oligonucleotide
ugagguuauuguuuucugc

SEQ ID NO: 2486321 - RNA, 19 nt, Artificial Sequence
  Description of Artificial Sequence: Synthetic oligonucleotide
ugauaaacauuacucgaau

SEQ ID NO: 2486322 - RNA, 19 nt, Artificial Sequence
  Description of Artificial Sequence: Synthetic oligonucleotide
ugaauuuggcuucacugaa

SEQ ID NO: 2486323 - RNA, 19 nt, Artificial Sequence
  Description of Artificial Sequence: Synthetic oligonucleotide
auuauuugccgguucucag

SEQ ID NO: 2486324 - RNA, 19 nt, Artificial Sequence
  Description of Artificial Sequence: Synthetic oligonucleotide
aguagacugucuugaugcc

SEQ ID NO: 2486325 - RNA, 19 nt, Artificial Sequence
  Description of Artificial Sequence: Synthetic oligonucleotide
aagauucucuucuaaugau

SEQ ID NO: 2486326 - RNA, 19 nt, Artificial Sequence
  Description of Artificial Sequence: Synthetic oligonucleotide
aauaauucuggcggcgaag

SEQ ID NO: 2486327 - RNA, 19 nt, Artificial Sequence
  Description of Artificial Sequence: Synthetic oligonucleotide
uuuuaguaauguccaaauc

SEQ ID NO: 2486328 - RNA, 19 nt, Artificial Sequence
  Description of Artificial Sequence: Synthetic oligonucleotide
cuaaugaucggucgaggcc

SEQ ID NO: 2486329 - RNA, 19 nt, Artificial Sequence
  Description of Artificial Sequence: Synthetic oligonucleotide
uaguaauguccaaaucugc

SEQ ID NO: 2486330 - RNA, 19 nt, Artificial Sequence
  Description of Artificial Sequence: Synthetic oligonucleotide
ccaguuuucagcaucuucg

SEQ ID NO: 2486331 - RNA, 19 nt, Artificial Sequence
  Description of Artificial Sequence: Synthetic oligonucleotide
ucauugaguucauuaugag

SEQ ID NO: 2486332 - RNA, 19 nt, Artificial Sequence
  Description of Artificial Sequence: Synthetic oligonucleotide
aauccguuuguaucuguga

SEQ ID NO: 2486333 - RNA, 19 nt, Artificial Sequence
  Description of Artificial Sequence: Synthetic oligonucleotide
ucaguagacugucuugaug

SEQ ID NO: 2486334 - RNA, 19 nt, Artificial Sequence
  Description of Artificial Sequence: Synthetic oligonucleotide
uggaccuucuguuuuauau

SEQ ID NO: 2486335 - RNA, 19 nt, Artificial Sequence
  Description of Artificial Sequence: Synthetic oligonucleotide
guuguuccauuauuugccg

SEQ ID NO: 2486336 - RNA, 19 nt, Artificial Sequence
  Description of Artificial Sequence: Synthetic oligonucleotide
gaagguuaugucagguugg

SEQ ID NO: 2486337 - RNA, 19 nt, Artificial Sequence
  Description of Artificial Sequence: Synthetic oligonucleotide
uguuuggcuuuauuaaacu

SEQ ID NO: 2486338 - RNA, 19 nt, Artificial Sequence
  Description of Artificial Sequence: Synthetic oligonucleotide
uguaucugugaccuuucca

SEQ ID NO: 2486339 - RNA, 19 nt, Artificial Sequence
  Description of Artificial Sequence: Synthetic oligonucleotide
cuccaaauucguauccugg

SEQ ID NO: 2486340 - RNA, 19 nt, Artificial Sequence
  Description of Artificial Sequence: Synthetic oligonucleotide
uguuccauuauuugccggu

SEQ ID NO: 2486341 - RNA, 19 nt, Artificial Sequence
  Description of Artificial Sequence: Synthetic oligonucleotide
gaagguagacuugugggcc

SEQ ID NO: 2486342 - RNA, 19 nt, Artificial Sequence
  Description of Artificial Sequence: Synthetic oligonucleotide
guuucauccaauugccggc

SEQ ID NO: 2486343 - RNA, 19 nt, Artificial Sequence
  Description of Artificial Sequence: Synthetic oligonucleotide
ucgauggugagcacggucu

SEQ ID NO: 2486344 - RNA, 19 nt, Artificial Sequence
  Description of Artificial Sequence: Synthetic oligonucleotide
uuguuucauccaauugccg

SEQ ID NO: 2486345 - RNA, 19 nt, Artificial Sequence
  Description of Artificial Sequence: Synthetic oligonucleotide
uguggagaaucuuuucaca

SEQ ID NO: 2486346 - RNA, 19 nt, Artificial Sequence
  Description of Artificial Sequence: Synthetic oligonucleotide
uccauuauuugccgguucu

SEQ ID NO: 2486347 - RNA, 19 nt, Artificial Sequence
  Description of Artificial Sequence: Synthetic oligonucleotide
acauaauuagagcuucagu

SEQ ID NO: 2486348 - RNA, 19 nt, Artificial Sequence
  Description of Artificial Sequence: Synthetic oligonucleotide
uaaugaucggucgaggccu

SEQ ID NO: 2486349 - RNA, 19 nt, Artificial Sequence
  Description of Artificial Sequence: Synthetic oligonucleotide
aucuucguuggcuuuucgg

SEQ ID NO: 2486350 - RNA, 19 nt, Artificial Sequence
  Description of Artificial Sequence: Synthetic oligonucleotide
aaaucugcuuccaacugug

SEQ ID NO: 2486351 - RNA, 19 nt, Artificial Sequence
  Description of Artificial Sequence: Synthetic oligonucleotide
ucaugagccaagaugucuc

SEQ ID NO: 2486352 - RNA, 19 nt, Artificial Sequence
  Description of Artificial Sequence: Synthetic oligonucleotide
uucacugaacucaaaugau

SEQ ID NO: 2486353 - RNA, 19 nt, Artificial Sequence
  Description of Artificial Sequence: Synthetic oligonucleotide
aaacauuacucgaauaauu

SEQ ID NO: 2486354 - RNA, 19 nt, Artificial Sequence
  Description of Artificial Sequence: Synthetic oligonucleotide
uuauuugccgguucucaga

SEQ ID NO: 2486355 - RNA, 19 nt, Artificial Sequence
  Description of Artificial Sequence: Synthetic oligonucleotide
agcuuguuaaccuccaaau

SEQ ID NO: 2486356 - RNA, 19 nt, Artificial Sequence
  Description of Artificial Sequence: Synthetic oligonucleotide
guuacgacauuucugaggu

SEQ ID NO: 2486357 - RNA, 19 nt, Artificial Sequence
  Description of Artificial Sequence: Synthetic oligonucleotide
acuguguuacgacauuucu

SEQ ID NO: 2486358 - RNA, 19 nt, Artificial Sequence
  Description of Artificial Sequence: Synthetic oligonucleotide
ucugcuuccaacuguguua

SEQ ID NO: 2486359 - RNA, 19 nt, Artificial Sequence
  Description of Artificial Sequence: Synthetic oligonucleotide
gagaucgauggugagcacg

SEQ ID NO: 2486360 - RNA, 19 nt, Artificial Sequence
  Description of Artificial Sequence: Synthetic oligonucleotide
aacuguguuacgacauuuc

SEQ ID NO: 2486361 - RNA, 19 nt, Artificial Sequence
  Description of Artificial Sequence: Synthetic oligonucleotide
uucucuucuaaugaucggu

SEQ ID NO: 2486362 - RNA, 19 nt, Artificial Sequence
  Description of Artificial Sequence: Synthetic oligonucleotide
auucucuucuaaugaucgg

SEQ ID NO: 2486363 - RNA, 19 nt, Artificial Sequence
  Description of Artificial Sequence: Synthetic oligonucleotide
uuucauccaauugccggcg

SEQ ID NO: 2486364 - RNA, 19 nt, Artificial Sequence
  Description of Artificial Sequence: Synthetic oligonucleotide
uuacucgaauaauucuggc

SEQ ID NO: 2486365 - RNA, 19 nt, Artificial Sequence
  Description of Artificial Sequence: Synthetic oligonucleotide
ucgaauaauucuggcggcg

SEQ ID NO: 2486366 - RNA, 19 nt, Artificial Sequence
  Description of Artificial Sequence: Synthetic oligonucleotide
cuggaaaugucuuguucgc

SEQ ID NO: 2486367 - RNA, 19 nt, Artificial Sequence
  Description of Artificial Sequence: Synthetic oligonucleotide
augauauucuucaugccug

SEQ ID NO: 2486368 - RNA, 19 nt, Artificial Sequence
  Description of Artificial Sequence: Synthetic oligonucleotide
agugacacuuugaauuugg

SEQ ID NO: 2486369 - RNA, 19 nt, Artificial Sequence
  Description of Artificial Sequence: Synthetic oligonucleotide
uuaauauauucuucagcuu

SEQ ID NO: 2486370 - RNA, 19 nt, Artificial Sequence
  Description of Artificial Sequence: Synthetic oligonucleotide
aaaauccguuuguaucugu

SEQ ID NO: 2486371 - RNA, 19 nt, Artificial Sequence
  Description of Artificial Sequence: Synthetic oligonucleotide
uuguuccauuauuugccgg

SEQ ID NO: 2486372 - RNA, 19 nt, Artificial Sequence
  Description of Artificial Sequence: Synthetic oligonucleotide
uaugaguaucauucaauuu

SEQ ID NO: 2486373 - RNA, 19 nt, Artificial Sequence
  Description of Artificial Sequence: Synthetic oligonucleotide
uccguuuguaucugugacc

SEQ ID NO: 2486374 - RNA, 19 nt, Artificial Sequence
  Description of Artificial Sequence: Synthetic oligonucleotide
uauuugccgguucucagau

SEQ ID NO: 2486375 - RNA, 19 nt, Artificial Sequence
  Description of Artificial Sequence: Synthetic oligonucleotide
uuguucgcacauaauuaga

SEQ ID NO: 2486376 - RNA, 19 nt, Artificial Sequence
  Description of Artificial Sequence: Synthetic oligonucleotide
auucguauccuggaccuuc

SEQ ID NO: 2486377 - RNA, 19 nt, Artificial Sequence
  Description of Artificial Sequence: Synthetic oligonucleotide
agauucucuucuaaugauc

SEQ ID NO: 2486378 - RNA, 19 nt, Artificial Sequence
  Description of Artificial Sequence: Synthetic oligonucleotide
gaccuuuccaaagcugugg

SEQ ID NO: 2486379 - RNA, 19 nt, Artificial Sequence
  Description of Artificial Sequence: Synthetic oligonucleotide
guucgcacauaauuagagc

SEQ ID NO: 2486380 - RNA, 19 nt, Artificial Sequence
  Description of Artificial Sequence: Synthetic oligonucleotide
aucgauggugagcacgguc

SEQ ID NO: 2486381 - RNA, 19 nt, Artificial Sequence
  Description of Artificial Sequence: Synthetic oligonucleotide
ugauauucuucaugccuga

SEQ ID NO: 2486382 - RNA, 19 nt, Artificial Sequence
  Description of Artificial Sequence: Synthetic oligonucleotide
gaaaucucuauagcaaaga

SEQ ID NO: 2486383 - RNA, 19 nt, Artificial Sequence
  Description of Artificial Sequence: Synthetic oligonucleotide
cuguguuacgacauuucug

SEQ ID NO: 2486384 - RNA, 19 nt, Artificial Sequence
  Description of Artificial Sequence: Synthetic oligonucleotide
ucuucaugccugaaugguc

SEQ ID NO: 2486385 - RNA, 19 nt, Artificial Sequence
  Description of Artificial Sequence: Synthetic oligonucleotide
cuucguuggcuuuucggag

SEQ ID NO: 2486386 - RNA, 19 nt, Artificial Sequence
  Description of Artificial Sequence: Synthetic oligonucleotide
gacuugugggccauggaag

SEQ ID NO: 2486387 - RNA, 19 nt, Artificial Sequence
  Description of Artificial Sequence: Synthetic oligonucleotide
cucuauagcaaagauucuc

SEQ ID NO: 2486388 - RNA, 19 nt, Artificial Sequence
  Description of Artificial Sequence: Synthetic oligonucleotide
ucauuuguuucauccaauu

SEQ ID NO: 2486389 - RNA, 19 nt, Artificial Sequence
  Description of Artificial Sequence: Synthetic oligonucleotide
uacgacauuucugagguua

SEQ ID NO: 2486390 - RNA, 19 nt, Artificial Sequence
  Description of Artificial Sequence: Synthetic oligonucleotide
agcccuuucccuuucaaau

SEQ ID NO: 2486391 - RNA, 19 nt, Artificial Sequence
  Description of Artificial Sequence: Synthetic oligonucleotide
cucgaauaauucuggcggc

SEQ ID NO: 2486392 - RNA, 19 nt, Artificial Sequence
  Description of Artificial Sequence: Synthetic oligonucleotide
uucuaaugaucggucgagg

SEQ ID NO: 2486393 - RNA, 19 nt, Artificial Sequence
  Description of Artificial Sequence: Synthetic oligonucleotide
uucaugagccaagaugucu

SEQ ID NO: 2486394 - RNA, 19 nt, Artificial Sequence
  Description of Artificial Sequence: Synthetic oligonucleotide
uguuaaccuccaaauucgu

SEQ ID NO: 2486395 - RNA, 19 nt, Artificial Sequence
  Description of Artificial Sequence: Synthetic oligonucleotide
gaaaugucuuguucgcaca

SEQ ID NO: 2486396 - RNA, 19 nt, Artificial Sequence
  Description of Artificial Sequence: Synthetic oligonucleotide
agacuugugggccauggaa

SEQ ID NO: 2486397 - RNA, 19 nt, Artificial Sequence
  Description of Artificial Sequence: Synthetic oligonucleotide
agaucgauggugagcacgg

SEQ ID NO: 2486398 - RNA, 19 nt, Artificial Sequence
  Description of Artificial Sequence: Synthetic oligonucleotide
uuggcgggcuuuauuuucc

SEQ ID NO: 2486399 - RNA, 19 nt, Artificial Sequence
  Description of Artificial Sequence: Synthetic oligonucleotide
cuuccaacuguguuacgac

SEQ ID NO: 2486400 - RNA, 19 nt, Artificial Sequence
  Description of Artificial Sequence: Synthetic oligonucleotide
cauggaagguuaugucagg

SEQ ID NO: 2486401 - RNA, 19 nt, Artificial Sequence
  Description of Artificial Sequence: Synthetic oligonucleotide
uuuguaucugugaccuuuc

SEQ ID NO: 2486402 - RNA, 19 nt, Artificial Sequence
  Description of Artificial Sequence: Synthetic oligonucleotide
uuccaacuguguuacgaca

SEQ ID NO: 2486403 - RNA, 19 nt, Artificial Sequence
  Description of Artificial Sequence: Synthetic oligonucleotide
cuucuaaugaucggucgag

SEQ ID NO: 2486404 - RNA, 19 nt, Artificial Sequence
  Description of Artificial Sequence: Synthetic oligonucleotide
gguuaugucagguugguua

SEQ ID NO: 2486405 - RNA, 19 nt, Artificial Sequence
  Description of Artificial Sequence: Synthetic oligonucleotide
cuggcggcgaaguucuugg

SEQ ID NO: 2486406 - RNA, 19 nt, Artificial Sequence
  Description of Artificial Sequence: Synthetic oligonucleotide
uuuauaucauugaguucau

SEQ ID NO: 2486407 - RNA, 19 nt, Artificial Sequence
  Description of Artificial Sequence: Synthetic oligonucleotide
ucagauuccucugacuuua

SEQ ID NO: 2486408 - RNA, 19 nt, Artificial Sequence
  Description of Artificial Sequence: Synthetic oligonucleotide
uucaaaucguucugucccu

SEQ ID NO: 2486409 - RNA, 19 nt, Artificial Sequence
  Description of Artificial Sequence: Synthetic oligonucleotide
ugaccuuuccaaagcugug

SEQ ID NO: 2486410 - RNA, 19 nt, Artificial Sequence
  Description of Artificial Sequence: Synthetic oligonucleotide
ggaaaugucuuguucgcac

SEQ ID NO: 2486411 - RNA, 19 nt, Artificial Sequence
  Description of Artificial Sequence: Synthetic oligonucleotide
gaacucaaaugauaaacau

SEQ ID NO: 2486412 - RNA, 19 nt, Artificial Sequence
  Description of Artificial Sequence: Synthetic oligonucleotide
uuguaucugugaccuuucc

SEQ ID NO: 2486413 - RNA, 19 nt, Artificial Sequence
  Description of Artificial Sequence: Synthetic oligonucleotide
agcuguggagaaucuuuuc

SEQ ID NO: 2486414 - RNA, 19 nt, Artificial Sequence
  Description of Artificial Sequence: Synthetic oligonucleotide
ggaguuguuccauuauuug

SEQ ID NO: 2486415 - RNA, 19 nt, Artificial Sequence
  Description of Artificial Sequence: Synthetic oligonucleotide
uucguuggcuuuucggagu

SEQ ID NO: 2486416 - RNA, 19 nt, Artificial Sequence
  Description of Artificial Sequence: Synthetic oligonucleotide
uucccaguuuucagcaucu

SEQ ID NO: 2486417 - RNA, 19 nt, Artificial Sequence
  Description of Artificial Sequence: Synthetic oligonucleotide
auaauucuggcggcgaagu

SEQ ID NO: 2486418 - RNA, 19 nt, Artificial Sequence
  Description of Artificial Sequence: Synthetic oligonucleotide
uucacaugucagaaaucuc

SEQ ID NO: 2486419 - RNA, 19 nt, Artificial Sequence
  Description of Artificial Sequence: Synthetic oligonucleotide
guuaugucagguugguuaa

SEQ ID NO: 2486420 - RNA, 19 nt, Artificial Sequence
  Description of Artificial Sequence: Synthetic oligonucleotide
augauaaacauuacucgaa

SEQ ID NO: 2486421 - RNA, 19 nt, Artificial Sequence
  Description of Artificial Sequence: Synthetic oligonucleotide
ucguucugucccuagcugu

SEQ ID NO: 2486422 - RNA, 19 nt, Artificial Sequence
  Description of Artificial Sequence: Synthetic oligonucleotide
uugaguucauuaugaguau

SEQ ID NO: 2486423 - RNA, 19 nt, Artificial Sequence
  Description of Artificial Sequence: Synthetic oligonucleotide
gugagcacggucuggugag

SEQ ID NO: 2486424 - RNA, 19 nt, Artificial Sequence
  Description of Artificial Sequence: Synthetic oligonucleotide
ggcgucauuuucaugagcc

SEQ ID NO: 2486425 - RNA, 19 nt, Artificial Sequence
  Description of Artificial Sequence: Synthetic oligonucleotide
ucauccaauugccggcgca

SEQ ID NO: 2486426 - RNA, 19 nt, Artificial Sequence
  Description of Artificial Sequence: Synthetic oligonucleotide
gucccuagcugucuuuuag

SEQ ID NO: 2486427 - RNA, 19 nt, Artificial Sequence
  Description of Artificial Sequence: Synthetic oligonucleotide
uaugucagguugguuaaaa

SEQ ID NO: 2486428 - RNA, 19 nt, Artificial Sequence
  Description of Artificial Sequence: Synthetic oligonucleotide
aucguucugucccuagcug

SEQ ID NO: 2486429 - RNA, 19 nt, Artificial Sequence
  Description of Artificial Sequence: Synthetic oligonucleotide
aagguuaugucagguuggu

SEQ ID NO: 2486430 - RNA, 19 nt, Artificial Sequence
  Description of Artificial Sequence: Synthetic oligonucleotide
cugagguuauuguuuucug

SEQ ID NO: 2486431 - RNA, 19 nt, Artificial Sequence
  Description of Artificial Sequence: Synthetic oligonucleotide
ugcuuggcgggcuuuauuu

SEQ ID NO: 2486432 - RNA, 19 nt, Artificial Sequence
  Description of Artificial Sequence: Synthetic oligonucleotide
uaucugugaccuuuccaaa

SEQ ID NO: 2486433 - RNA, 19 nt, Artificial Sequence
  Description of Artificial Sequence: Synthetic oligonucleotide
cauuaugaguaucauucaa

SEQ ID NO: 2486434 - RNA, 19 nt, Artificial Sequence
  Description of Artificial Sequence: Synthetic oligonucleotide
ugagccaagaugucucuuu

SEQ ID NO: 2486435 - RNA, 19 nt, Artificial Sequence
  Description of Artificial Sequence: Synthetic oligonucleotide
ucgcacauaauuagagcuu

SEQ ID NO: 2486436 - RNA, 19 nt, Artificial Sequence
  Description of Artificial Sequence: Synthetic oligonucleotide
ccauggaagguuaugucag

SEQ ID NO: 2486437 - RNA, 19 nt, Artificial Sequence
  Description of Artificial Sequence: Synthetic oligonucleotide
auuagagcuucaguagacu

SEQ ID NO: 2486438 - RNA, 19 nt, Artificial Sequence
  Description of Artificial Sequence: Synthetic oligonucleotide
caaaucguucugucccuag

SEQ ID NO: 2486439 - RNA, 19 nt, Artificial Sequence
  Description of Artificial Sequence: Synthetic oligonucleotide
uuauuguuuucugccucug

SEQ ID NO: 2486440 - RNA, 19 nt, Artificial Sequence
  Description of Artificial Sequence: Synthetic oligonucleotide
ugaagggcgucauuuucau

SEQ ID NO: 2486441 - RNA, 19 nt, Artificial Sequence
  Description of Artificial Sequence: Synthetic oligonucleotide
cagaaaucucuauagcaaa

SEQ ID NO: 2486442 - RNA, 19 nt, Artificial Sequence
  Description of Artificial Sequence: Synthetic oligonucleotide
acggucuggugagugacac

SEQ ID NO: 2486443 - RNA, 19 nt, Artificial Sequence
  Description of Artificial Sequence: Synthetic oligonucleotide
aauugccggcgcauucugg

SEQ ID NO: 2486444 - RNA, 19 nt, Artificial Sequence
  Description of Artificial Sequence: Synthetic oligonucleotide
uuccauuauuugccgguuc

SEQ ID NO: 2486445 - RNA, 19 nt, Artificial Sequence
  Description of Artificial Sequence: Synthetic oligonucleotide
uccaauugccggcgcauuc

SEQ ID NO: 2486446 - RNA, 19 nt, Artificial Sequence
  Description of Artificial Sequence: Synthetic oligonucleotide
uuucggaguuguuccauua

SEQ ID NO: 2486447 - RNA, 19 nt, Artificial Sequence
  Description of Artificial Sequence: Synthetic oligonucleotide
gaauuuggcuucacugaac

SEQ ID NO: 2486448 - RNA, 19 nt, Artificial Sequence
  Description of Artificial Sequence: Synthetic oligonucleotide
gaauaauucuggcggcgaa

SEQ ID NO: 2486449 - RNA, 19 nt, Artificial Sequence
  Description of Artificial Sequence: Synthetic oligonucleotide
agcuucaguagacugucuu

SEQ ID NO: 2486450 - RNA, 19 nt, Artificial Sequence
  Description of Artificial Sequence: Synthetic oligonucleotide
uggaaaugucuuguucgca

SEQ ID NO: 2486451 - RNA, 19 nt, Artificial Sequence
  Description of Artificial Sequence: Synthetic oligonucleotide
uucguauccuggaccuucu

SEQ ID NO: 2486452 - RNA, 19 nt, Artificial Sequence
  Description of Artificial Sequence: Synthetic oligonucleotide
cuucaguagacugucuuga

SEQ ID NO: 2486453 - RNA, 19 nt, Artificial Sequence
  Description of Artificial Sequence: Synthetic oligonucleotide
gguuauuguuuucugccuc

SEQ ID NO: 2486454 - RNA, 19 nt, Artificial Sequence
  Description of Artificial Sequence: Synthetic oligonucleotide
cccuuucccuuucaaaucg

SEQ ID NO: 2486455 - RNA, 19 nt, Artificial Sequence
  Description of Artificial Sequence: Synthetic oligonucleotide
uggcuuuucggaguuguuc

SEQ ID NO: 2486456 - RNA, 19 nt, Artificial Sequence
  Description of Artificial Sequence: Synthetic oligonucleotide
uucauccaauugccggcgc

SEQ ID NO: 2486457 - RNA, 19 nt, Artificial Sequence
  Description of Artificial Sequence: Synthetic oligonucleotide
ucccuagcugucuuuuagu

SEQ ID NO: 2486458 - RNA, 19 nt, Artificial Sequence
  Description of Artificial Sequence: Synthetic oligonucleotide
aaugaucggucgaggccuc

SEQ ID NO: 2486459 - RNA, 19 nt, Artificial Sequence
  Description of Artificial Sequence: Synthetic oligonucleotide
uccuacguuugaagguaga

SEQ ID NO: 2486460 - RNA, 19 nt, Artificial Sequence
  Description of Artificial Sequence: Synthetic oligonucleotide
uucaguagacugucuugau

SEQ ID NO: 2486461 - RNA, 19 nt, Artificial Sequence
  Description of Artificial Sequence: Synthetic oligonucleotide
uagacuugugggccaugga

SEQ ID NO: 2486462 - RNA, 19 nt, Artificial Sequence
  Description of Artificial Sequence: Synthetic oligonucleotide
auucuggcggcgaaguucu

SEQ ID NO: 2486463 - RNA, 19 nt, Artificial Sequence
  Description of Artificial Sequence: Synthetic oligonucleotide
cauuauuugccgguucuca

SEQ ID NO: 2486464 - RNA, 19 nt, Artificial Sequence
  Description of Artificial Sequence: Synthetic oligonucleotide
uggaagguuaugucagguu

SEQ ID NO: 2486465 - RNA, 19 nt, Artificial Sequence
  Description of Artificial Sequence: Synthetic oligonucleotide
cauugaguucauuaugagu

SEQ ID NO: 2486466 - RNA, 19 nt, Artificial Sequence
  Description of Artificial Sequence: Synthetic oligonucleotide
guguuacgacauuucugag

SEQ ID NO: 2486467 - RNA, 19 nt, Artificial Sequence
  Description of Artificial Sequence: Synthetic oligonucleotide
cuucaugccugaauggucu

SEQ ID NO: 2486468 - RNA, 19 nt, Artificial Sequence
  Description of Artificial Sequence: Synthetic oligonucleotide
cugcuuccaacuguguuac

SEQ ID NO: 2486469 - RNA, 19 nt, Artificial Sequence
  Description of Artificial Sequence: Synthetic oligonucleotide
aucggucgaggccucuguc

SEQ ID NO: 2486470 - RNA, 19 nt, Artificial Sequence
  Description of Artificial Sequence: Synthetic oligonucleotide
uguucuugaagggcgucau

SEQ ID NO: 2486471 - RNA, 19 nt, Artificial Sequence
  Description of Artificial Sequence: Synthetic oligonucleotide
ucagcuuguuaaccuccaa

SEQ ID NO: 2486472 - RNA, 19 nt, Artificial Sequence
  Description of Artificial Sequence: Synthetic oligonucleotide
ucuggcggcgaaguucuug

SEQ ID NO: 2486473 - RNA, 19 nt, Artificial Sequence
  Description of Artificial Sequence: Synthetic oligonucleotide
gcgggcuuuauuuucccag

SEQ ID NO: 2486474 - RNA, 19 nt, Artificial Sequence
  Description of Artificial Sequence: Synthetic oligonucleotide
ugugggccauggaagguua

SEQ ID NO: 2486475 - RNA, 19 nt, Artificial Sequence
  Description of Artificial Sequence: Synthetic oligonucleotide
cuccuacguuugaagguag

SEQ ID NO: 2486476 - RNA, 19 nt, Artificial Sequence
  Description of Artificial Sequence: Synthetic oligonucleotide
gaagggcgucauuuucaug

SEQ ID NO: 2486477 - RNA, 19 nt, Artificial Sequence
  Description of Artificial Sequence: Synthetic oligonucleotide
uugccgguucucagauucc

SEQ ID NO: 2486478 - RNA, 19 nt, Artificial Sequence
  Description of Artificial Sequence: Synthetic oligonucleotide
caucuucguuggcuuuucg

SEQ ID NO: 2486479 - RNA, 19 nt, Artificial Sequence
  Description of Artificial Sequence: Synthetic oligonucleotide
gcgaaguucuuggacagcc

SEQ ID NO: 2486480 - RNA, 19 nt, Artificial Sequence
  Description of Artificial Sequence: Synthetic oligonucleotide
agauuccucugacuuuaau

SEQ ID NO: 2486481 - RNA, 19 nt, Artificial Sequence
  Description of Artificial Sequence: Synthetic oligonucleotide
uuucagcaucuucguuggc

SEQ ID NO: 2486482 - RNA, 19 nt, Artificial Sequence
  Description of Artificial Sequence: Synthetic oligonucleotide
ccaaauucguauccuggac

SEQ ID NO: 2486483 - RNA, 19 nt, Artificial Sequence
  Description of Artificial Sequence: Synthetic oligonucleotide
uagcaaagauucucuucua

SEQ ID NO: 2486484 - RNA, 19 nt, Artificial Sequence
  Description of Artificial Sequence: Synthetic oligonucleotide
aucauuuguuucauccaau

SEQ ID NO: 2486485 - RNA, 19 nt, Artificial Sequence
  Description of Artificial Sequence: Synthetic oligonucleotide
gugacacuuugaauuuggc

SEQ ID NO: 2486486 - RNA, 19 nt, Artificial Sequence
  Description of Artificial Sequence: Synthetic oligonucleotide
auggugagcacggucuggu

SEQ ID NO: 2486487 - RNA, 19 nt, Artificial Sequence
  Description of Artificial Sequence: Synthetic oligonucleotide
ugccggcgcauucuggaaa

SEQ ID NO: 2486488 - RNA, 19 nt, Artificial Sequence
  Description of Artificial Sequence: Synthetic oligonucleotide
uaauucuggcggcgaaguu

SEQ ID NO: 2486489 - RNA, 19 nt, Artificial Sequence
  Description of Artificial Sequence: Synthetic oligonucleotide
caauugccggcgcauucug

SEQ ID NO: 2486490 - RNA, 19 nt, Artificial Sequence
  Description of Artificial Sequence: Synthetic oligonucleotide
ucguauccuggaccuucug

SEQ ID NO: 2486491 - RNA, 19 nt, Artificial Sequence
  Description of Artificial Sequence: Synthetic oligonucleotide
ucguuggcuuuucggaguu

SEQ ID NO: 2486492 - RNA, 19 nt, Artificial Sequence
  Description of Artificial Sequence: Synthetic oligonucleotide
uggcaaucugagccaguuc

SEQ ID NO: 2486493 - RNA, 19 nt, Artificial Sequence
  Description of Artificial Sequence: Synthetic oligonucleotide
cacaugucagaaaucucua

SEQ ID NO: 2486494 - RNA, 19 nt, Artificial Sequence
  Description of Artificial Sequence: Synthetic oligonucleotide
agcacggucuggugaguga

SEQ ID NO: 2486495 - RNA, 19 nt, Artificial Sequence
  Description of Artificial Sequence: Synthetic oligonucleotide
ugcuuccaacuguguuacg

SEQ ID NO: 2486496 - RNA, 19 nt, Artificial Sequence
  Description of Artificial Sequence: Synthetic oligonucleotide
ggugagcacggucugguga

SEQ ID NO: 2486497 - RNA, 19 nt, Artificial Sequence
  Description of Artificial Sequence: Synthetic oligonucleotide
accuccaaauucguauccu

SEQ ID NO: 2486498 - RNA, 19 nt, Artificial Sequence
  Description of Artificial Sequence: Synthetic oligonucleotide
uggcgggcuuuauuuuccc

SEQ ID NO: 2486499 - RNA, 19 nt, Artificial Sequence
  Description of Artificial Sequence: Synthetic oligonucleotide
cagcuuguuaaccuccaaa

SEQ ID NO: 2486500 - RNA, 19 nt, Artificial Sequence
  Description of Artificial Sequence: Synthetic oligonucleotide
gugaccuuuccaaagcugu

SEQ ID NO: 2486501 - RNA, 19 nt, Artificial Sequence
  Description of Artificial Sequence: Synthetic oligonucleotide
ugccgguucucagauuccu

SEQ ID NO: 2486502 - RNA, 19 nt, Artificial Sequence
  Description of Artificial Sequence: Synthetic oligonucleotide
ugaucggucgaggccucug

SEQ ID NO: 2486503 - RNA, 19 nt, Artificial Sequence
  Description of Artificial Sequence: Synthetic oligonucleotide
uuauaucauugaguucauu

SEQ ID NO: 2486504 - RNA, 19 nt, Artificial Sequence
  Description of Artificial Sequence: Synthetic oligonucleotide
cuuugaauuuggcuucacu

SEQ ID NO: 2486505 - RNA, 19 nt, Artificial Sequence
  Description of Artificial Sequence: Synthetic oligonucleotide
ucaaaucguucugucccua

SEQ ID NO: 2486506 - RNA, 19 nt, Artificial Sequence
  Description of Artificial Sequence: Synthetic oligonucleotide
uucugucccuagcugucuu

SEQ ID NO: 2486507 - RNA, 19 nt, Artificial Sequence
  Description of Artificial Sequence: Synthetic oligonucleotide
gauauucuucaugccugaa

SEQ ID NO: 2486508 - RNA, 19 nt, Artificial Sequence
  Description of Artificial Sequence: Synthetic oligonucleotide
uuaugucagguugguuaaa

SEQ ID NO: 2486509 - RNA, 19 nt, Artificial Sequence
  Description of Artificial Sequence: Synthetic oligonucleotide
uugugggccauggaagguu

SEQ ID NO: 2486510 - RNA, 19 nt, Artificial Sequence
  Description of Artificial Sequence: Synthetic oligonucleotide
gcuuccaacuguguuacga

SEQ ID NO: 2486511 - RNA, 19 nt, Artificial Sequence
  Description of Artificial Sequence: Synthetic oligonucleotide
gucgaggccucugucagga

SEQ ID NO: 2486512 - RNA, 19 nt, Artificial Sequence
  Description of Artificial Sequence: Synthetic oligonucleotide
agacugucuugaugccugu

SEQ ID NO: 2486513 - RNA, 19 nt, Artificial Sequence
  Description of Artificial Sequence: Synthetic oligonucleotide
cuggugagugacacuuuga

SEQ ID NO: 2486514 - RNA, 19 nt, Artificial Sequence
  Description of Artificial Sequence: Synthetic oligonucleotide
gcggcgaaguucuuggaca

SEQ ID NO: 2486515 - RNA, 19 nt, Artificial Sequence
  Description of Artificial Sequence: Synthetic oligonucleotide
ucugucccuagcugucuuu

SEQ ID NO: 2486516 - RNA, 19 nt, Artificial Sequence
  Description of Artificial Sequence: Synthetic oligonucleotide
gagcacggucuggugagug

SEQ ID NO: 2486517 - RNA, 19 nt, Artificial Sequence
  Description of Artificial Sequence: Synthetic oligonucleotide
ugucccuagcugucuuuua

SEQ ID NO: 2486518 - RNA, 19 nt, Artificial Sequence
  Description of Artificial Sequence: Synthetic oligonucleotide
guuaaccuccaaauucgua

SEQ ID NO: 2486519 - RNA, 19 nt, Artificial Sequence
  Description of Artificial Sequence: Synthetic oligonucleotide
uucaugccugaauggucuu

SEQ ID NO: 2486520 - RNA, 19 nt, Artificial Sequence
  Description of Artificial Sequence: Synthetic oligonucleotide
ccuacguuugaagguagac

SEQ ID NO: 2486521 - RNA, 19 nt, Artificial Sequence
  Description of Artificial Sequence: Synthetic oligonucleotide
ggcggcgaaguucuuggac

SEQ ID NO: 2486522 - RNA, 19 nt, Artificial Sequence
  Description of Artificial Sequence: Synthetic oligonucleotide
guuggcuuuucggaguugu

SEQ ID NO: 2486523 - RNA, 19 nt, Artificial Sequence
  Description of Artificial Sequence: Synthetic oligonucleotide
uugccggcgcauucuggaa

SEQ ID NO: 2486524 - RNA, 19 nt, Artificial Sequence
  Description of Artificial Sequence: Synthetic oligonucleotide
ucaugccugaauggucuuu

SEQ ID NO: 2486525 - RNA, 19 nt, Artificial Sequence
  Description of Artificial Sequence: Synthetic oligonucleotide
ggucgaggccucugucagg

SEQ ID NO: 2486526 - RNA, 19 nt, Artificial Sequence
  Description of Artificial Sequence: Synthetic oligonucleotide
acgacauuucugagguuau

SEQ ID NO: 2486527 - RNA, 19 nt, Artificial Sequence
  Description of Artificial Sequence: Synthetic oligonucleotide
ucgaggccucugucaggag

SEQ ID NO: 2486528 - RNA, 19 nt, Artificial Sequence
  Description of Artificial Sequence: Synthetic oligonucleotide
gccuguuccaucucagcaa

SEQ ID NO: 2486529 - RNA, 19 nt, Artificial Sequence
  Description of Artificial Sequence: Synthetic oligonucleotide
uuacgacauuucugagguu

SEQ ID NO: 2486530 - RNA, 19 nt, Artificial Sequence
  Description of Artificial Sequence: Synthetic oligonucleotide
gaucggucgaggccucugu

SEQ ID NO: 2486531 - RNA, 19 nt, Artificial Sequence
  Description of Artificial Sequence: Synthetic oligonucleotide
uggcuucacugaacucaaa

SEQ ID NO: 2486532 - RNA, 19 nt, Artificial Sequence
  Description of Artificial Sequence: Synthetic oligonucleotide
uggcggcgaaguucuugga

SEQ ID NO: 2486533 - RNA, 19 nt, Artificial Sequence
  Description of Artificial Sequence: Synthetic oligonucleotide
ucugcuuggcgggcuuuau

SEQ ID NO: 2486534 - RNA, 19 nt, Artificial Sequence
  Description of Artificial Sequence: Synthetic oligonucleotide
gggcgucauuuucaugagc

SEQ ID NO: 2486535 - RNA, 19 nt, Artificial Sequence
  Description of Artificial Sequence: Synthetic oligonucleotide
ggcgcauucuggaaauguc

SEQ ID NO: 2486536 - RNA, 19 nt, Artificial Sequence
  Description of Artificial Sequence: Synthetic oligonucleotide
cagcccuuucccuuucaaa

SEQ ID NO: 2486537 - RNA, 19 nt, Artificial Sequence
  Description of Artificial Sequence: Synthetic oligonucleotide
cugugaccuuuccaaagcu

SEQ ID NO: 2486538 - RNA, 19 nt, Artificial Sequence
  Description of Artificial Sequence: Synthetic oligonucleotide
cgcacauaauuagagcuuc

SEQ ID NO: 2486539 - RNA, 19 nt, Artificial Sequence
  Description of Artificial Sequence: Synthetic oligonucleotide
ugagcacggucuggugagu

SEQ ID NO: 2486540 - RNA, 19 nt, Artificial Sequence
  Description of Artificial Sequence: Synthetic oligonucleotide
ccuagcugucuuuuaguaa

SEQ ID NO: 2486541 - RNA, 19 nt, Artificial Sequence
  Description of Artificial Sequence: Synthetic oligonucleotide
guuccaucucagcaaugau

SEQ ID NO: 2486542 - RNA, 19 nt, Artificial Sequence
  Description of Artificial Sequence: Synthetic oligonucleotide
gaggccucugucaggagau

SEQ ID NO: 2486543 - RNA, 19 nt, Artificial Sequence
  Description of Artificial Sequence: Synthetic oligonucleotide
ggucuggugagugacacuu

SEQ ID NO: 2486544 - RNA, 19 nt, Artificial Sequence
  Description of Artificial Sequence: Synthetic oligonucleotide
cacggucuggugagugaca

SEQ ID NO: 2486545 - RNA, 19 nt, Artificial Sequence
  Description of Artificial Sequence: Synthetic oligonucleotide
cauuuucaugagccaagau

SEQ ID NO: 2486546 - RNA, 19 nt, Artificial Sequence
  Description of Artificial Sequence: Synthetic oligonucleotide
gcuuguuaaccuccaaauu

SEQ ID NO: 2486547 - RNA, 19 nt, Artificial Sequence
  Description of Artificial Sequence: Synthetic oligonucleotide
agguagacuugugggccau

SEQ ID NO: 2486548 - RNA, 19 nt, Artificial Sequence
  Description of Artificial Sequence: Synthetic oligonucleotide
gcacggucuggugagugac

SEQ ID NO: 2486549 - RNA, 19 nt, Artificial Sequence
  Description of Artificial Sequence: Synthetic oligonucleotide
agguuaugucagguugguu

SEQ ID NO: 2486550 - RNA, 19 nt, Artificial Sequence
  Description of Artificial Sequence: Synthetic oligonucleotide
ggcuuuauuuucccaguuu

SEQ ID NO: 2486551 - RNA, 19 nt, Artificial Sequence
  Description of Artificial Sequence: Synthetic oligonucleotide
cugccucugcuuggcgggc

SEQ ID NO: 2486552 - RNA, 19 nt, Artificial Sequence
  Description of Artificial Sequence: Synthetic oligonucleotide
cuuuucggaguuguuccau

SEQ ID NO: 2486553 - RNA, 19 nt, Artificial Sequence
  Description of Artificial Sequence: Synthetic oligonucleotide
ggcgggcuuuauuuuccca

SEQ ID NO: 2486554 - RNA, 19 nt, Artificial Sequence
  Description of Artificial Sequence: Synthetic oligonucleotide
augaucggucgaggccucu

SEQ ID NO: 2486555 - RNA, 19 nt, Artificial Sequence
  Description of Artificial Sequence: Synthetic oligonucleotide
caacuguguuacgacauuu

SEQ ID NO: 2486556 - RNA, 19 nt, Artificial Sequence
  Description of Artificial Sequence: Synthetic oligonucleotide
gggccauggaagguuaugu

SEQ ID NO: 2486557 - RNA, 19 nt, Artificial Sequence
  Description of Artificial Sequence: Synthetic oligonucleotide
gcgcauucuggaaaugucu

SEQ ID NO: 2486558 - RNA, 19 nt, Artificial Sequence
  Description of Artificial Sequence: Synthetic oligonucleotide
cgguucucagauuccucug

SEQ ID NO: 2486559 - RNA, 19 nt, Artificial Sequence
  Description of Artificial Sequence: Synthetic oligonucleotide
caugccugaauggucuuuu

SEQ ID NO: 2486560 - RNA, 19 nt, Artificial Sequence
  Description of Artificial Sequence: Synthetic oligonucleotide
ccgguucucagauuccucu

SEQ ID NO: 2486561 - RNA, 19 nt, Artificial Sequence
  Description of Artificial Sequence: Synthetic oligonucleotide
cugucaggagaucgauggu

SEQ ID NO: 2486562 - RNA, 19 nt, Artificial Sequence
  Description of Artificial Sequence: Synthetic oligonucleotide
cuugugggccauggaaggu

SEQ ID NO: 2486563 - RNA, 19 nt, Artificial Sequence
  Description of Artificial Sequence: Synthetic oligonucleotide
gcaucuucguuggcuuuuc

SEQ ID NO: 2486564 - RNA, 19 nt, Artificial Sequence
  Description of Artificial Sequence: Synthetic oligonucleotide
ccaagaugucucuuucccu

SEQ ID NO: 2486565 - RNA, 19 nt, Artificial Sequence
  Description of Artificial Sequence: Synthetic oligonucleotide
cauccaauugccggcgcau

SEQ ID NO: 2486566 - RNA, 19 nt, Artificial Sequence
  Description of Artificial Sequence: Synthetic oligonucleotide
guucuugaagggcgucauu

SEQ ID NO: 2486567 - RNA, 19 nt, Artificial Sequence
  Description of Artificial Sequence: Synthetic oligonucleotide
cgaauaauucuggcggcga

SEQ ID NO: 2486568 - RNA, 19 nt, Artificial Sequence
  Description of Artificial Sequence: Synthetic oligonucleotide
uucuggcggcgaaguucuu

SEQ ID NO: 2486569 - RNA, 19 nt, Artificial Sequence
  Description of Artificial Sequence: Synthetic oligonucleotide
cucugcuuggcgggcuuua

SEQ ID NO: 2486570 - RNA, 19 nt, Artificial Sequence
  Description of Artificial Sequence: Synthetic oligonucleotide
cugucccuagcugucuuuu

SEQ ID NO: 2486571 - RNA, 19 nt, Artificial Sequence
  Description of Artificial Sequence: Synthetic oligonucleotide
ccaauugccggcgcauucu

SEQ ID NO: 2486572 - RNA, 19 nt, Artificial Sequence
  Description of Artificial Sequence: Synthetic oligonucleotide
cccuuucaaaucguucugu

SEQ ID NO: 2486573 - RNA, 19 nt, Artificial Sequence
  Description of Artificial Sequence: Synthetic oligonucleotide
cugcuuggcgggcuuuauu

SEQ ID NO: 2486574 - RNA, 19 nt, Artificial Sequence
  Description of Artificial Sequence: Synthetic oligonucleotide
ccucugacuuuaauauauu

SEQ ID NO: 2486575 - RNA, 19 nt, Artificial Sequence
  Description of Artificial Sequence: Synthetic oligonucleotide
cgggcuuuauuuucccagu

SEQ ID NO: 2486576 - RNA, 19 nt, Artificial Sequence
  Description of Artificial Sequence: Synthetic oligonucleotide
ccggcgcauucuggaaaug

SEQ ID NO: 2486577 - RNA, 19 nt, Artificial Sequence
  Description of Artificial Sequence: Synthetic oligonucleotide
cguuggcuuuucggaguug

SEQ ID NO: 2486578 - RNA, 19 nt, Artificial Sequence
  Description of Artificial Sequence: Synthetic oligonucleotide
gugggccauggaagguuau

SEQ ID NO: 2486579 - RNA, 19 nt, Artificial Sequence
  Description of Artificial Sequence: Synthetic oligonucleotide
ccuggcaaucugagccagu

SEQ ID NO: 2486580 - RNA, 19 nt, Artificial Sequence
  Description of Artificial Sequence: Synthetic oligonucleotide
cggucuggugagugacacu

SEQ ID NO: 2486581 - RNA, 19 nt, Artificial Sequence
  Description of Artificial Sequence: Synthetic oligonucleotide
cgacauuucugagguuauu

SEQ ID NO: 2486582 - RNA, 19 nt, Artificial Sequence
  Description of Artificial Sequence: Synthetic oligonucleotide
aaauuuuccggaaagagag

SEQ ID NO: 2486583 - RNA, 19 nt, Artificial Sequence
  Description of Artificial Sequence: Synthetic oligonucleotide
agugaagcggugcagagcc

SEQ ID NO: 2486584 - RNA, 19 nt, Artificial Sequence
  Description of Artificial Sequence: Synthetic oligonucleotide
ucuaacaugguguccagcg

SEQ ID NO: 2486585 - RNA, 19 nt, Artificial Sequence
  Description of Artificial Sequence: Synthetic oligonucleotide
uuugguggaaauuuuccgg

SEQ ID NO: 2486586 - RNA, 19 nt, Artificial Sequence
  Description of Artificial Sequence: Synthetic oligonucleotide
guuucuuugagucaagggc

SEQ ID NO: 2486587 - RNA, 19 nt, Artificial Sequence
  Description of Artificial Sequence: Synthetic oligonucleotide
uuugucuccacacagacua

SEQ ID NO: 2486588 - RNA, 19 nt, Artificial Sequence
  Description of Artificial Sequence: Synthetic oligonucleotide
aaauucuccgcugucaagg

SEQ ID NO: 2486589 - RNA, 19 nt, Artificial Sequence
  Description of Artificial Sequence: Synthetic oligonucleotide
acauguaacauccaggagu

SEQ ID NO: 2486590 - RNA, 19 nt, Artificial Sequence
  Description of Artificial Sequence: Synthetic oligonucleotide
uuuugguggaaauuuuccg

SEQ ID NO: 2486591 - RNA, 19 nt, Artificial Sequence
  Description of Artificial Sequence: Synthetic oligonucleotide
cagacuaggaucuucuugg

SEQ ID NO: 2486592 - RNA, 19 nt, Artificial Sequence
  Description of Artificial Sequence: Synthetic oligonucleotide
uuucuuugagucaagggcu

SEQ ID NO: 2486593 - RNA, 19 nt, Artificial Sequence
  Description of Artificial Sequence: Synthetic oligonucleotide
auuuuccggaaagagagcc

SEQ ID NO: 2486594 - RNA, 19 nt, Artificial Sequence
  Description of Artificial Sequence: Synthetic oligonucleotide
uuugauauccacucuccag

SEQ ID NO: 2486595 - RNA, 19 nt, Artificial Sequence
  Description of Artificial Sequence: Synthetic oligonucleotide
agaaagaauggcaaugggc

SEQ ID NO: 2486596 - RNA, 19 nt, Artificial Sequence
  Description of Artificial Sequence: Synthetic oligonucleotide
ucuccaaguagauaugugc

SEQ ID NO: 2486597 - RNA, 19 nt, Artificial Sequence
  Description of Artificial Sequence: Synthetic oligonucleotide
uacagcagaaagcuggucc

SEQ ID NO: 2486598 - RNA, 19 nt, Artificial Sequence
  Description of Artificial Sequence: Synthetic oligonucleotide
aauucuccgcugucaaggc

SEQ ID NO: 2486599 - RNA, 19 nt, Artificial Sequence
  Description of Artificial Sequence: Synthetic oligonucleotide
uggaucuucaucuggagca

SEQ ID NO: 2486600 - RNA, 19 nt, Artificial Sequence
  Description of Artificial Sequence: Synthetic oligonucleotide
agagagccagaauugauuc

SEQ ID NO: 2486601 - RNA, 19 nt, Artificial Sequence
  Description of Artificial Sequence: Synthetic oligonucleotide
ucugacgacaucuuucgag

SEQ ID NO: 2486602 - RNA, 19 nt, Artificial Sequence
  Description of Artificial Sequence: Synthetic oligonucleotide
uucggcagaggacagauca

SEQ ID NO: 2486603 - RNA, 19 nt, Artificial Sequence
  Description of Artificial Sequence: Synthetic oligonucleotide
uggaacauguaacauccag

SEQ ID NO: 2486604 - RNA, 19 nt, Artificial Sequence
  Description of Artificial Sequence: Synthetic oligonucleotide
ugucugacgacaucuuucg

SEQ ID NO: 2486605 - RNA, 19 nt, Artificial Sequence
  Description of Artificial Sequence: Synthetic oligonucleotide
ucugaggagguuuugauau

SEQ ID NO: 2486606 - RNA, 19 nt, Artificial Sequence
  Description of Artificial Sequence: Synthetic oligonucleotide
gaacauguaacauccagga

SEQ ID NO: 2486607 - RNA, 19 nt, Artificial Sequence
  Description of Artificial Sequence: Synthetic oligonucleotide
aagagaaagaauggcaaug

SEQ ID NO: 2486608 - RNA, 19 nt, Artificial Sequence
  Description of Artificial Sequence: Synthetic oligonucleotide
uucuccgcugucaaggccg

SEQ ID NO: 2486609 - RNA, 19 nt, Artificial Sequence
  Description of Artificial Sequence: Synthetic oligonucleotide
acggccaugcggcugaugc

SEQ ID NO: 2486610 - RNA, 19 nt, Artificial Sequence
  Description of Artificial Sequence: Synthetic oligonucleotide
agagaaagaauggcaaugg

SEQ ID NO: 2486611 - RNA, 19 nt, Artificial Sequence
  Description of Artificial Sequence: Synthetic oligonucleotide
ugggcuuccgaaaagcagc

SEQ ID NO: 2486612 - RNA, 19 nt, Artificial Sequence
  Description of Artificial Sequence: Synthetic oligonucleotide
gagguuuugauauccacuc

SEQ ID NO: 2486613 - RNA, 19 nt, Artificial Sequence
  Description of Artificial Sequence: Synthetic oligonucleotide
gaauugauucggcagagga

SEQ ID NO: 2486614 - RNA, 19 nt, Artificial Sequence
  Description of Artificial Sequence: Synthetic oligonucleotide
uucaucuggagcaggcagg

SEQ ID NO: 2486615 - RNA, 19 nt, Artificial Sequence
  Description of Artificial Sequence: Synthetic oligonucleotide
cugacgacaucuuucgagg

SEQ ID NO: 2486616 - RNA, 19 nt, Artificial Sequence
  Description of Artificial Sequence: Synthetic oligonucleotide
uccuugcucaguuccaugg

SEQ ID NO: 2486617 - RNA, 19 nt, Artificial Sequence
  Description of Artificial Sequence: Synthetic oligonucleotide
aaaauucuccgcugucaag

SEQ ID NO: 2486618 - RNA, 19 nt, Artificial Sequence
  Description of Artificial Sequence: Synthetic oligonucleotide
aguagauaugugcuccagg

SEQ ID NO: 2486619 - RNA, 19 nt, Artificial Sequence
  Description of Artificial Sequence: Synthetic oligonucleotide
cuuccgaaaagcagcagcc

SEQ ID NO: 2486620 - RNA, 19 nt, Artificial Sequence
  Description of Artificial Sequence: Synthetic oligonucleotide
agcuggaacauguaacauc

SEQ ID NO: 2486621 - RNA, 19 nt, Artificial Sequence
  Description of Artificial Sequence: Synthetic oligonucleotide
agauggaggguuugucucc

SEQ ID NO: 2486622 - RNA, 19 nt, Artificial Sequence
  Description of Artificial Sequence: Synthetic oligonucleotide
gagaaagaauggcaauggg

SEQ ID NO: 2486623 - RNA, 19 nt, Artificial Sequence
  Description of Artificial Sequence: Synthetic oligonucleotide
auugauucggcagaggaca

SEQ ID NO: 2486624 - RNA, 19 nt, Artificial Sequence
  Description of Artificial Sequence: Synthetic oligonucleotide
agcgccucaaaauucuccg

SEQ ID NO: 2486625 - RNA, 19 nt, Artificial Sequence
  Description of Artificial Sequence: Synthetic oligonucleotide
uucgaggaggccuucagca

SEQ ID NO: 2486626 - RNA, 19 nt, Artificial Sequence
  Description of Artificial Sequence: Synthetic oligonucleotide
acaagcuggaacauguaac

SEQ ID NO: 2486627 - RNA, 19 nt, Artificial Sequence
  Description of Artificial Sequence: Synthetic oligonucleotide
aauuuuccggaaagagagc

SEQ ID NO: 2486628 - RNA, 19 nt, Artificial Sequence
  Description of Artificial Sequence: Synthetic oligonucleotide
uccgaaaagcagcagcccc

SEQ ID NO: 2486629 - RNA, 19 nt, Artificial Sequence
  Description of Artificial Sequence: Synthetic oligonucleotide
guagauaugugcuccagga

SEQ ID NO: 2486630 - RNA, 19 nt, Artificial Sequence
  Description of Artificial Sequence: Synthetic oligonucleotide
guggaaauuuuccggaaag

SEQ ID NO: 2486631 - RNA, 19 nt, Artificial Sequence
  Description of Artificial Sequence: Synthetic oligonucleotide
uuuugauauccacucucca

SEQ ID NO: 2486632 - RNA, 19 nt, Artificial Sequence
  Description of Artificial Sequence: Synthetic oligonucleotide
gaaagaauggcaaugggcu

SEQ ID NO: 2486633 - RNA, 19 nt, Artificial Sequence
  Description of Artificial Sequence: Synthetic oligonucleotide
uguaacauccaggaguuuc

SEQ ID NO: 2486634 - RNA, 19 nt, Artificial Sequence
  Description of Artificial Sequence: Synthetic oligonucleotide
agagaucugguuugcuugg

SEQ ID NO: 2486635 - RNA, 19 nt, Artificial Sequence
  Description of Artificial Sequence: Synthetic oligonucleotide
aaacaaaaugaggaagaga

SEQ ID NO: 2486636 - RNA, 19 nt, Artificial Sequence
  Description of Artificial Sequence: Synthetic oligonucleotide
ugggcuucaguucuccaag

SEQ ID NO: 2486637 - RNA, 19 nt, Artificial Sequence
  Description of Artificial Sequence: Synthetic oligonucleotide
acagacuaggaucuucuug

SEQ ID NO: 2486638 - RNA, 19 nt, Artificial Sequence
  Description of Artificial Sequence: Synthetic oligonucleotide
agcucuguagcucguuggc

SEQ ID NO: 2486639 - RNA, 19 nt, Artificial Sequence
  Description of Artificial Sequence: Synthetic oligonucleotide
uuggaucuucaucuggagc

SEQ ID NO: 2486640 - RNA, 19 nt, Artificial Sequence
  Description of Artificial Sequence: Synthetic oligonucleotide
uugguggaaauuuuccgga

SEQ ID NO: 2486641 - RNA, 19 nt, Artificial Sequence
  Description of Artificial Sequence: Synthetic oligonucleotide
caucaccaggaaaagaaac

SEQ ID NO: 2486642 - RNA, 19 nt, Artificial Sequence
  Description of Artificial Sequence: Synthetic oligonucleotide
ucaaaauucuccgcuguca

SEQ ID NO: 2486643 - RNA, 19 nt, Artificial Sequence
  Description of Artificial Sequence: Synthetic oligonucleotide
gaaauuuuccggaaagaga

SEQ ID NO: 2486644 - RNA, 19 nt, Artificial Sequence
  Description of Artificial Sequence: Synthetic oligonucleotide
uugagucaagggcugaacu

SEQ ID NO: 2486645 - RNA, 19 nt, Artificial Sequence
  Description of Artificial Sequence: Synthetic oligonucleotide
uccugggucacagacaagc

SEQ ID NO: 2486646 - RNA, 19 nt, Artificial Sequence
  Description of Artificial Sequence: Synthetic oligonucleotide
ucguuggccuauuuauugg

SEQ ID NO: 2486647 - RNA, 19 nt, Artificial Sequence
  Description of Artificial Sequence: Synthetic oligonucleotide
uuuccggaaagagagccag

SEQ ID NO: 2486648 - RNA, 19 nt, Artificial Sequence
  Description of Artificial Sequence: Synthetic oligonucleotide
auauccacucuccagucca

SEQ ID NO: 2486649 - RNA, 19 nt, Artificial Sequence
  Description of Artificial Sequence: Synthetic oligonucleotide
ucacggaaugccaccaacc

SEQ ID NO: 2486650 - RNA, 19 nt, Artificial Sequence
  Description of Artificial Sequence: Synthetic oligonucleotide
aucacggaaugccaccaac

SEQ ID NO: 2486651 - RNA, 19 nt, Artificial Sequence
  Description of Artificial Sequence: Synthetic oligonucleotide
ugaggagguuuugauaucc

SEQ ID NO: 2486652 - RNA, 19 nt, Artificial Sequence
  Description of Artificial Sequence: Synthetic oligonucleotide
acugaaccagcacagcucu

SEQ ID NO: 2486653 - RNA, 19 nt, Artificial Sequence
  Description of Artificial Sequence: Synthetic oligonucleotide
uugucugacgacaucuuuc

SEQ ID NO: 2486654 - RNA, 19 nt, Artificial Sequence
  Description of Artificial Sequence: Synthetic oligonucleotide
cucguuggccuauuuauug

SEQ ID NO: 2486655 - RNA, 19 nt, Artificial Sequence
  Description of Artificial Sequence: Synthetic oligonucleotide
guuuugguggaaauuuucc

SEQ ID NO: 2486656 - RNA, 19 nt, Artificial Sequence
  Description of Artificial Sequence: Synthetic oligonucleotide
cucaguuccauggucacag

SEQ ID NO: 2486657 - RNA, 19 nt, Artificial Sequence
  Description of Artificial Sequence: Synthetic oligonucleotide
cagaccaucuaacauggug

SEQ ID NO: 2486658 - RNA, 19 nt, Artificial Sequence
  Description of Artificial Sequence: Synthetic oligonucleotide
gagagccagaauugauucg

SEQ ID NO: 2486659 - RNA, 19 nt, Artificial Sequence
  Description of Artificial Sequence: Synthetic oligonucleotide
ucuggagcgccucaaaauu

SEQ ID NO: 2486660 - RNA, 19 nt, Artificial Sequence
  Description of Artificial Sequence: Synthetic oligonucleotide
gacgacaucuuucgaggag

SEQ ID NO: 2486661 - RNA, 19 nt, Artificial Sequence
  Description of Artificial Sequence: Synthetic oligonucleotide
uccagcguuuccuugcuca

SEQ ID NO: 2486662 - RNA, 19 nt, Artificial Sequence
  Description of Artificial Sequence: Synthetic oligonucleotide
auucuccgcugucaaggcc

SEQ ID NO: 2486663 - RNA, 19 nt, Artificial Sequence
  Description of Artificial Sequence: Synthetic oligonucleotide
acaucuuucgaggaggccu

SEQ ID NO: 2486664 - RNA, 19 nt, Artificial Sequence
  Description of Artificial Sequence: Synthetic oligonucleotide
ucaagggcugaacuggaaa

SEQ ID NO: 2486665 - RNA, 19 nt, Artificial Sequence
  Description of Artificial Sequence: Synthetic oligonucleotide
aaagaauggcaaugggcuu

SEQ ID NO: 2486666 - RNA, 19 nt, Artificial Sequence
  Description of Artificial Sequence: Synthetic oligonucleotide
gauauccacucuccagucc

SEQ ID NO: 2486667 - RNA, 19 nt, Artificial Sequence
  Description of Artificial Sequence: Synthetic oligonucleotide
cacucuccaguccaggucc

SEQ ID NO: 2486668 - RNA, 19 nt, Artificial Sequence
  Description of Artificial Sequence: Synthetic oligonucleotide
aaccuagugaagcggugca

SEQ ID NO: 2486669 - RNA, 19 nt, Artificial Sequence
  Description of Artificial Sequence: Synthetic oligonucleotide
gauaugugcuccaggauga

SEQ ID NO: 2486670 - RNA, 19 nt, Artificial Sequence
  Description of Artificial Sequence: Synthetic oligonucleotide
guuuugauauccacucucc

SEQ ID NO: 2486671 - RNA, 19 nt, Artificial Sequence
  Description of Artificial Sequence: Synthetic oligonucleotide
acgacaucuuucgaggagg

SEQ ID NO: 2486672 - RNA, 19 nt, Artificial Sequence
  Description of Artificial Sequence: Synthetic oligonucleotide
gaggacagaucacggaaug

SEQ ID NO: 2486673 - RNA, 19 nt, Artificial Sequence
  Description of Artificial Sequence: Synthetic oligonucleotide
ggaacauguaacauccagg

SEQ ID NO: 2486674 - RNA, 19 nt, Artificial Sequence
  Description of Artificial Sequence: Synthetic oligonucleotide
cuggaaaagcuuucuuggc

SEQ ID NO: 2486675 - RNA, 19 nt, Artificial Sequence
  Description of Artificial Sequence: Synthetic oligonucleotide
uugcuugggcuucaguucu

SEQ ID NO: 2486676 - RNA, 19 nt, Artificial Sequence
  Description of Artificial Sequence: Synthetic oligonucleotide
gagauggaggguuugucuc

SEQ ID NO: 2486677 - RNA, 19 nt, Artificial Sequence
  Description of Artificial Sequence: Synthetic oligonucleotide
uuucgaggaggccuucagc

SEQ ID NO: 2486678 - RNA, 19 nt, Artificial Sequence
  Description of Artificial Sequence: Synthetic oligonucleotide
gcuggaacauguaacaucc

SEQ ID NO: 2486679 - RNA, 19 nt, Artificial Sequence
  Description of Artificial Sequence: Synthetic oligonucleotide
agcucguuggccuauuuau

SEQ ID NO: 2486680 - RNA, 19 nt, Artificial Sequence
  Description of Artificial Sequence: Synthetic oligonucleotide
uggcacaguugucugacga

SEQ ID NO: 2486681 - RNA, 19 nt, Artificial Sequence
  Description of Artificial Sequence: Synthetic oligonucleotide
agaccaucuaacauggugu

SEQ ID NO: 2486682 - RNA, 19 nt, Artificial Sequence
  Description of Artificial Sequence: Synthetic oligonucleotide
agaacugaaccagcacagc

SEQ ID NO: 2486683 - RNA, 19 nt, Artificial Sequence
  Description of Artificial Sequence: Synthetic oligonucleotide
gucacagccgagauggagg

SEQ ID NO: 2486684 - RNA, 19 nt, Artificial Sequence
  Description of Artificial Sequence: Synthetic oligonucleotide
ucaucaccaggaaaagaaa

SEQ ID NO: 2486685 - RNA, 19 nt, Artificial Sequence
  Description of Artificial Sequence: Synthetic oligonucleotide
caagcuggaacauguaaca

SEQ ID NO: 2486686 - RNA, 19 nt, Artificial Sequence
  Description of Artificial Sequence: Synthetic oligonucleotide
gaguuucuuugagucaagg

SEQ ID NO: 2486687 - RNA, 19 nt, Artificial Sequence
  Description of Artificial Sequence: Synthetic oligonucleotide
uuuuccggaaagagagcca

SEQ ID NO: 2486688 - RNA, 19 nt, Artificial Sequence
  Description of Artificial Sequence: Synthetic oligonucleotide
ucugcucaucaccaggaaa

SEQ ID NO: 2486689 - RNA, 19 nt, Artificial Sequence
  Description of Artificial Sequence: Synthetic oligonucleotide
aaguagauaugugcuccag

SEQ ID NO: 2486690 - RNA, 19 nt, Artificial Sequence
  Description of Artificial Sequence: Synthetic oligonucleotide
uccaaguagauaugugcuc

SEQ ID NO: 2486691 - RNA, 19 nt, Artificial Sequence
  Description of Artificial Sequence: Synthetic oligonucleotide
acagaucacggaaugccac

SEQ ID NO: 2486692 - RNA, 19 nt, Artificial Sequence
  Description of Artificial Sequence: Synthetic oligonucleotide
cuuggaucuucaucuggag

SEQ ID NO: 2486693 - RNA, 19 nt, Artificial Sequence
  Description of Artificial Sequence: Synthetic oligonucleotide
uggagcgccucaaaauucu

SEQ ID NO: 2486694 - RNA, 19 nt, Artificial Sequence
  Description of Artificial Sequence: Synthetic oligonucleotide
uucaguucuccaaguagau

SEQ ID NO: 2486695 - RNA, 19 nt, Artificial Sequence
  Description of Artificial Sequence: Synthetic oligonucleotide
uugauucggcagaggacag

SEQ ID NO: 2486696 - RNA, 19 nt, Artificial Sequence
  Description of Artificial Sequence: Synthetic oligonucleotide
cuagugaagcggugcagag

SEQ ID NO: 2486697 - RNA, 19 nt, Artificial Sequence
  Description of Artificial Sequence: Synthetic oligonucleotide
ucagcccuugugcugagaa

SEQ ID NO: 2486698 - RNA, 19 nt, Artificial Sequence
  Description of Artificial Sequence: Synthetic oligonucleotide
uggccuauuuauuggcuac

SEQ ID NO: 2486699 - RNA, 19 nt, Artificial Sequence
  Description of Artificial Sequence: Synthetic oligonucleotide
aggacagaucacggaaugc

SEQ ID NO: 2486700 - RNA, 19 nt, Artificial Sequence
  Description of Artificial Sequence: Synthetic oligonucleotide
ugaaccagcacagcucugu

SEQ ID NO: 2486701 - RNA, 19 nt, Artificial Sequence
  Description of Artificial Sequence: Synthetic oligonucleotide
gaaagagagccagaauuga

SEQ ID NO: 2486702 - RNA, 19 nt, Artificial Sequence
  Description of Artificial Sequence: Synthetic oligonucleotide
gguuuugauauccacucuc

SEQ ID NO: 2486703 - RNA, 19 nt, Artificial Sequence
  Description of Artificial Sequence: Synthetic oligonucleotide
accaucuaacauggugucc

SEQ ID NO: 2486704 - RNA, 19 nt, Artificial Sequence
  Description of Artificial Sequence: Synthetic oligonucleotide
cugggcuuccgaaaagcag

SEQ ID NO: 2486705 - RNA, 19 nt, Artificial Sequence
  Description of Artificial Sequence: Synthetic oligonucleotide
ugauauccacucuccaguc

SEQ ID NO: 2486706 - RNA, 19 nt, Artificial Sequence
  Description of Artificial Sequence: Synthetic oligonucleotide
gacaagcuggaacauguaa

SEQ ID NO: 2486707 - RNA, 19 nt, Artificial Sequence
  Description of Artificial Sequence: Synthetic oligonucleotide
aucaccaggaaaagaaaca

SEQ ID NO: 2486708 - RNA, 19 nt, Artificial Sequence
  Description of Artificial Sequence: Synthetic oligonucleotide
cagaucacggaaugccacc

SEQ ID NO: 2486709 - RNA, 19 nt, Artificial Sequence
  Description of Artificial Sequence: Synthetic oligonucleotide
aaagagagccagaauugau

SEQ ID NO: 2486710 - RNA, 19 nt, Artificial Sequence
  Description of Artificial Sequence: Synthetic oligonucleotide
ugccaugugcccacuguca

SEQ ID NO: 2486711 - RNA, 19 nt, Artificial Sequence
  Description of Artificial Sequence: Synthetic oligonucleotide
agagagaucugguuugcuu

SEQ ID NO: 2486712 - RNA, 19 nt, Artificial Sequence
  Description of Artificial Sequence: Synthetic oligonucleotide
ugucugaggagguuuugau

SEQ ID NO: 2486713 - RNA, 19 nt, Artificial Sequence
  Description of Artificial Sequence: Synthetic oligonucleotide
uagauaugugcuccaggau

SEQ ID NO: 2486714 - RNA, 19 nt, Artificial Sequence
  Description of Artificial Sequence: Synthetic oligonucleotide
ggaaagagagccagaauug

SEQ ID NO: 2486715 - RNA, 19 nt, Artificial Sequence
  Description of Artificial Sequence: Synthetic oligonucleotide
gaccaucuaacaugguguc

SEQ ID NO: 2486716 - RNA, 19 nt, Artificial Sequence
  Description of Artificial Sequence: Synthetic oligonucleotide
cugcucaucaccaggaaaa

SEQ ID NO: 2486717 - RNA, 19 nt, Artificial Sequence
  Description of Artificial Sequence: Synthetic oligonucleotide
ucuccacacagacuaggau

SEQ ID NO: 2486718 - RNA, 19 nt, Artificial Sequence
  Description of Artificial Sequence: Synthetic oligonucleotide
aucuaacaugguguccagc

SEQ ID NO: 2486719 - RNA, 19 nt, Artificial Sequence
  Description of Artificial Sequence: Synthetic oligonucleotide
aggcguggcagagagaucu

SEQ ID NO: 2486720 - RNA, 19 nt, Artificial Sequence
  Description of Artificial Sequence: Synthetic oligonucleotide
cugaacuggaaaagcuuuc

SEQ ID NO: 2486721 - RNA, 19 nt, Artificial Sequence
  Description of Artificial Sequence: Synthetic oligonucleotide
ugaagcggugcagagccug

SEQ ID NO: 2486722 - RNA, 19 nt, Artificial Sequence
  Description of Artificial Sequence: Synthetic oligonucleotide
ucacugggcuuccgaaaag

SEQ ID NO: 2486723 - RNA, 19 nt, Artificial Sequence
  Description of Artificial Sequence: Synthetic oligonucleotide
acagcucuguagcucguug

SEQ ID NO: 2486724 - RNA, 19 nt, Artificial Sequence
  Description of Artificial Sequence: Synthetic oligonucleotide
gguuugucuccacacagac

SEQ ID NO: 2486725 - RNA, 19 nt, Artificial Sequence
  Description of Artificial Sequence: Synthetic oligonucleotide
gcuuccgaaaagcagcagc

SEQ ID NO: 2486726 - RNA, 19 nt, Artificial Sequence
  Description of Artificial Sequence: Synthetic oligonucleotide
cagcucuguagcucguugg

SEQ ID NO: 2486727 - RNA, 19 nt, Artificial Sequence
  Description of Artificial Sequence: Synthetic oligonucleotide
uuugagucaagggcugaac

SEQ ID NO: 2486728 - RNA, 19 nt, Artificial Sequence
  Description of Artificial Sequence: Synthetic oligonucleotide
agaauugauucggcagagg

SEQ ID NO: 2486729 - RNA, 19 nt, Artificial Sequence
  Description of Artificial Sequence: Synthetic oligonucleotide
uauccacucuccaguccag

SEQ ID NO: 2486730 - RNA, 19 nt, Artificial Sequence
  Description of Artificial Sequence: Synthetic oligonucleotide
uuggccuauuuauuggcua

SEQ ID NO: 2486731 - RNA, 19 nt, Artificial Sequence
  Description of Artificial Sequence: Synthetic oligonucleotide
cuuucgaggaggccuucag

SEQ ID NO: 2486732 - RNA, 19 nt, Artificial Sequence
  Description of Artificial Sequence: Synthetic oligonucleotide
uugagguuuugguggaaau

SEQ ID NO: 2486733 - RNA, 19 nt, Artificial Sequence
  Description of Artificial Sequence: Synthetic oligonucleotide
ggacagaucacggaaugcc

SEQ ID NO: 2486734 - RNA, 19 nt, Artificial Sequence
  Description of Artificial Sequence: Synthetic oligonucleotide
ugacgacaucuuucgagga

SEQ ID NO: 2486735 - RNA, 19 nt, Artificial Sequence
  Description of Artificial Sequence: Synthetic oligonucleotide
caccauccugccaugugcc

SEQ ID NO: 2486736 - RNA, 19 nt, Artificial Sequence
  Description of Artificial Sequence: Synthetic oligonucleotide
cccagaccaucuaacaugg

SEQ ID NO: 2486737 - RNA, 19 nt, Artificial Sequence
  Description of Artificial Sequence: Synthetic oligonucleotide
ggcagagagaucugguuug

SEQ ID NO: 2486738 - RNA, 19 nt, Artificial Sequence
  Description of Artificial Sequence: Synthetic oligonucleotide
guguccagcguuuccuugc

SEQ ID NO: 2486739 - RNA, 19 nt, Artificial Sequence
  Description of Artificial Sequence: Synthetic oligonucleotide
caaccuagugaagcggugc

SEQ ID NO: 2486740 - RNA, 19 nt, Artificial Sequence
  Description of Artificial Sequence: Synthetic oligonucleotide
gcuucugcucaucaccagg

SEQ ID NO: 2486741 - RNA, 19 nt, Artificial Sequence
  Description of Artificial Sequence: Synthetic oligonucleotide
cggaaugccaccaaccuag

SEQ ID NO: 2486742 - RNA, 19 nt, Artificial Sequence
  Description of Artificial Sequence: Synthetic oligonucleotide
cagaauugauucggcagag

SEQ ID NO: 2486743 - RNA, 19 nt, Artificial Sequence
  Description of Artificial Sequence: Synthetic oligonucleotide
cucaaaauucuccgcuguc

SEQ ID NO: 2486744 - RNA, 19 nt, Artificial Sequence
  Description of Artificial Sequence: Synthetic oligonucleotide
agccagaauugauucggca

SEQ ID NO: 2486745 - RNA, 19 nt, Artificial Sequence
  Description of Artificial Sequence: Synthetic oligonucleotide
agguuuugauauccacucu

SEQ ID NO: 2486746 - RNA, 19 nt, Artificial Sequence
  Description of Artificial Sequence: Synthetic oligonucleotide
uugucuccacacagacuag

SEQ ID NO: 2486747 - RNA, 19 nt, Artificial Sequence
  Description of Artificial Sequence: Synthetic oligonucleotide
uuggcacaguugucugacg

SEQ ID NO: 2486748 - RNA, 19 nt, Artificial Sequence
  Description of Artificial Sequence: Synthetic oligonucleotide
agccccaccauccugccau

SEQ ID NO: 2486749 - RNA, 19 nt, Artificial Sequence
  Description of Artificial Sequence: Synthetic oligonucleotide
uuccgaaaagcagcagccc

SEQ ID NO: 2486750 - RNA, 19 nt, Artificial Sequence
  Description of Artificial Sequence: Synthetic oligonucleotide
agcguuuccuugcucaguu

SEQ ID NO: 2486751 - RNA, 19 nt, Artificial Sequence
  Description of Artificial Sequence: Synthetic oligonucleotide
ucggcccagaccaucuaac

SEQ ID NO: 2486752 - RNA, 19 nt, Artificial Sequence
  Description of Artificial Sequence: Synthetic oligonucleotide
gaucugguuugcuugggcu

SEQ ID NO: 2486753 - RNA, 19 nt, Artificial Sequence
  Description of Artificial Sequence: Synthetic oligonucleotide
ucugguuugcuugggcuuc

SEQ ID NO: 2486754 - RNA, 19 nt, Artificial Sequence
  Description of Artificial Sequence: Synthetic oligonucleotide
gagcaguugcucugccucc

SEQ ID NO: 2486755 - RNA, 19 nt, Artificial Sequence
  Description of Artificial Sequence: Synthetic oligonucleotide
caucuaacaugguguccag

SEQ ID NO: 2486756 - RNA, 19 nt, Artificial Sequence
  Description of Artificial Sequence: Synthetic oligonucleotide
cuaggaucuucuuggaucu

SEQ ID NO: 2486757 - RNA, 19 nt, Artificial Sequence
  Description of Artificial Sequence: Synthetic oligonucleotide
uccuccugggucacagaca

SEQ ID NO: 2486758 - RNA, 19 nt, Artificial Sequence
  Description of Artificial Sequence: Synthetic oligonucleotide
ggggcuucugcucaucacc

SEQ ID NO: 2486759 - RNA, 19 nt, Artificial Sequence
  Description of Artificial Sequence: Synthetic oligonucleotide
ugcucaguuccauggucac

SEQ ID NO: 2486760 - RNA, 19 nt, Artificial Sequence
  Description of Artificial Sequence: Synthetic oligonucleotide
ugguggaaauuuuccggaa

SEQ ID NO: 2486761 - RNA, 19 nt, Artificial Sequence
  Description of Artificial Sequence: Synthetic oligonucleotide
cuccuccugggucacagac

SEQ ID NO: 2486762 - RNA, 19 nt, Artificial Sequence
  Description of Artificial Sequence: Synthetic oligonucleotide
cuggagcgccucaaaauuc

SEQ ID NO: 2486763 - RNA, 19 nt, Artificial Sequence
  Description of Artificial Sequence: Synthetic oligonucleotide
gagaucugguuugcuuggg

SEQ ID NO: 2486764 - RNA, 19 nt, Artificial Sequence
  Description of Artificial Sequence: Synthetic oligonucleotide
uguccagcguuuccuugcu

SEQ ID NO: 2486765 - RNA, 19 nt, Artificial Sequence
  Description of Artificial Sequence: Synthetic oligonucleotide
gagcgccucaaaauucucc

SEQ ID NO: 2486766 - RNA, 19 nt, Artificial Sequence
  Description of Artificial Sequence: Synthetic oligonucleotide
guuugcuugggcuucaguu

SEQ ID NO: 2486767 - RNA, 19 nt, Artificial Sequence
  Description of Artificial Sequence: Synthetic oligonucleotide
uagugaagcggugcagagc

SEQ ID NO: 2486768 - RNA, 19 nt, Artificial Sequence
  Description of Artificial Sequence: Synthetic oligonucleotide
gacagaucacggaaugcca

SEQ ID NO: 2486769 - RNA, 19 nt, Artificial Sequence
  Description of Artificial Sequence: Synthetic oligonucleotide
uuccuugcucaguuccaug

SEQ ID NO: 2486770 - RNA, 19 nt, Artificial Sequence
  Description of Artificial Sequence: Synthetic oligonucleotide
agaaagcuggucccggauu

SEQ ID NO: 2486771 - RNA, 19 nt, Artificial Sequence
  Description of Artificial Sequence: Synthetic oligonucleotide
cagaggacagaucacggaa

SEQ ID NO: 2486772 - RNA, 19 nt, Artificial Sequence
  Description of Artificial Sequence: Synthetic oligonucleotide
uucggcccagaccaucuaa

SEQ ID NO: 2486773 - RNA, 19 nt, Artificial Sequence
  Description of Artificial Sequence: Synthetic oligonucleotide
agacuaggaucuucuugga

SEQ ID NO: 2486774 - RNA, 19 nt, Artificial Sequence
  Description of Artificial Sequence: Synthetic oligonucleotide
aucugguuugcuugggcuu

SEQ ID NO: 2486775 - RNA, 19 nt, Artificial Sequence
  Description of Artificial Sequence: Synthetic oligonucleotide
caccaaccuagugaagcgg

SEQ ID NO: 2486776 - RNA, 19 nt, Artificial Sequence
  Description of Artificial Sequence: Synthetic oligonucleotide
uuccuucccuucacugggc

SEQ ID NO: 2486777 - RNA, 19 nt, Artificial Sequence
  Description of Artificial Sequence: Synthetic oligonucleotide
gaagcggugcagagccugg

SEQ ID NO: 2486778 - RNA, 19 nt, Artificial Sequence
  Description of Artificial Sequence: Synthetic oligonucleotide
uccaccaggcguggcagag

SEQ ID NO: 2486779 - RNA, 19 nt, Artificial Sequence
  Description of Artificial Sequence: Synthetic oligonucleotide
agaucacggaaugccacca

SEQ ID NO: 2486780 - RNA, 19 nt, Artificial Sequence
  Description of Artificial Sequence: Synthetic oligonucleotide
ucggcagaggacagaucac

SEQ ID NO: 2486781 - RNA, 19 nt, Artificial Sequence
  Description of Artificial Sequence: Synthetic oligonucleotide
gagguuuugguggaaauuu

SEQ ID NO: 2486782 - RNA, 19 nt, Artificial Sequence
  Description of Artificial Sequence: Synthetic oligonucleotide
uagcucguuggccuauuua

SEQ ID NO: 2486783 - RNA, 19 nt, Artificial Sequence
  Description of Artificial Sequence: Synthetic oligonucleotide
cauguaacauccaggaguu

SEQ ID NO: 2486784 - RNA, 19 nt, Artificial Sequence
  Description of Artificial Sequence: Synthetic oligonucleotide
uuuccuugcucaguuccau

SEQ ID NO: 2486785 - RNA, 19 nt, Artificial Sequence
  Description of Artificial Sequence: Synthetic oligonucleotide
agcggugcagagccuggag

SEQ ID NO: 2486786 - RNA, 19 nt, Artificial Sequence
  Description of Artificial Sequence: Synthetic oligonucleotide
ccuauuuauuggcuacagc

SEQ ID NO: 2486787 - RNA, 19 nt, Artificial Sequence
  Description of Artificial Sequence: Synthetic oligonucleotide
uggcuacagcagaaagcug

SEQ ID NO: 2486788 - RNA, 19 nt, Artificial Sequence
  Description of Artificial Sequence: Synthetic oligonucleotide
caaguagauaugugcucca

SEQ ID NO: 2486789 - RNA, 19 nt, Artificial Sequence
  Description of Artificial Sequence: Synthetic oligonucleotide
gaggaggccuucagcaggc

SEQ ID NO: 2486790 - RNA, 19 nt, Artificial Sequence
  Description of Artificial Sequence: Synthetic oligonucleotide
uccgcugucaaggccgcca

SEQ ID NO: 2486791 - RNA, 19 nt, Artificial Sequence
  Description of Artificial Sequence: Synthetic oligonucleotide
gacaucuuucgaggaggcc

SEQ ID NO: 2486792 - RNA, 19 nt, Artificial Sequence
  Description of Artificial Sequence: Synthetic oligonucleotide
ccaccaaccuagugaagcg

SEQ ID NO: 2486793 - RNA, 19 nt, Artificial Sequence
  Description of Artificial Sequence: Synthetic oligonucleotide
ucuguagcucguuggccua

SEQ ID NO: 2486794 - RNA, 19 nt, Artificial Sequence
  Description of Artificial Sequence: Synthetic oligonucleotide
ucuccgcugucaaggccgc

SEQ ID NO: 2486795 - RNA, 19 nt, Artificial Sequence
  Description of Artificial Sequence: Synthetic oligonucleotide
uuccggaaagagagccaga

SEQ ID NO: 2486796 - RNA, 19 nt, Artificial Sequence
  Description of Artificial Sequence: Synthetic oligonucleotide
caguugcucugccuccucc

SEQ ID NO: 2486797 - RNA, 19 nt, Artificial Sequence
  Description of Artificial Sequence: Synthetic oligonucleotide
accaaccuagugaagcggu

SEQ ID NO: 2486798 - RNA, 19 nt, Artificial Sequence
  Description of Artificial Sequence: Synthetic oligonucleotide
ccggauucggcccagacca

SEQ ID NO: 2486799 - RNA, 19 nt, Artificial Sequence
  Description of Artificial Sequence: Synthetic oligonucleotide
gagcaggcagguggggacg

SEQ ID NO: 2486800 - RNA, 19 nt, Artificial Sequence
  Description of Artificial Sequence: Synthetic oligonucleotide
gauggaggguuugucucca

SEQ ID NO: 2486801 - RNA, 19 nt, Artificial Sequence
  Description of Artificial Sequence: Synthetic oligonucleotide
ucuuucgaggaggccuuca

SEQ ID NO: 2486802 - RNA, 19 nt, Artificial Sequence
  Description of Artificial Sequence: Synthetic oligonucleotide
cugaggagguuuugauauc

SEQ ID NO: 2486803 - RNA, 19 nt, Artificial Sequence
  Description of Artificial Sequence: Synthetic oligonucleotide
gagccagaauugauucggc

SEQ ID NO: 2486804 - RNA, 19 nt, Artificial Sequence
  Description of Artificial Sequence: Synthetic oligonucleotide
cacacagacuaggaucuuc

SEQ ID NO: 2486805 - RNA, 19 nt, Artificial Sequence
  Description of Artificial Sequence: Synthetic oligonucleotide
acggaaugccaccaaccua

SEQ ID NO: 2486806 - RNA, 19 nt, Artificial Sequence
  Description of Artificial Sequence: Synthetic oligonucleotide
ugauucggcagaggacaga

SEQ ID NO: 2486807 - RNA, 19 nt, Artificial Sequence
  Description of Artificial Sequence: Synthetic oligonucleotide
ccaccauccugccaugugc

SEQ ID NO: 2486808 - RNA, 19 nt, Artificial Sequence
  Description of Artificial Sequence: Synthetic oligonucleotide
caggaguuucuuugaguca

SEQ ID NO: 2486809 - RNA, 19 nt, Artificial Sequence
  Description of Artificial Sequence: Synthetic oligonucleotide
auccacucuccaguccagg

SEQ ID NO: 2486810 - RNA, 19 nt, Artificial Sequence
  Description of Artificial Sequence: Synthetic oligonucleotide
cugccaugugcccacuguc

SEQ ID NO: 2486811 - RNA, 19 nt, Artificial Sequence
  Description of Artificial Sequence: Synthetic oligonucleotide
gguggaaauuuuccggaaa

SEQ ID NO: 2486812 - RNA, 19 nt, Artificial Sequence
  Description of Artificial Sequence: Synthetic oligonucleotide
cucuguagcucguuggccu

SEQ ID NO: 2486813 - RNA, 19 nt, Artificial Sequence
  Description of Artificial Sequence: Synthetic oligonucleotide
gucugaggagguuuugaua

SEQ ID NO: 2486814 - RNA, 19 nt, Artificial Sequence
  Description of Artificial Sequence: Synthetic oligonucleotide
uggucccggauucggccca

SEQ ID NO: 2486815 - RNA, 19 nt, Artificial Sequence
  Description of Artificial Sequence: Synthetic oligonucleotide
agaggacagaucacggaau

SEQ ID NO: 2486816 - RNA, 19 nt, Artificial Sequence
  Description of Artificial Sequence: Synthetic oligonucleotide
gauucggcagaggacagau

SEQ ID NO: 2486817 - RNA, 19 nt, Artificial Sequence
  Description of Artificial Sequence: Synthetic oligonucleotide
ucccggauucggcccagac

SEQ ID NO: 2486818 - RNA, 19 nt, Artificial Sequence
  Description of Artificial Sequence: Synthetic oligonucleotide
caaugggcuuggcugcuuc

SEQ ID NO: 2486819 - RNA, 19 nt, Artificial Sequence
  Description of Artificial Sequence: Synthetic oligonucleotide
ggucacagccgagauggag

SEQ ID NO: 2486820 - RNA, 19 nt, Artificial Sequence
  Description of Artificial Sequence: Synthetic oligonucleotide
agcuuucuuggcacaguug

SEQ ID NO: 2486821 - RNA, 19 nt, Artificial Sequence
  Description of Artificial Sequence: Synthetic oligonucleotide
ccaucuaacauggugucca

SEQ ID NO: 2486822 - RNA, 19 nt, Artificial Sequence
  Description of Artificial Sequence: Synthetic oligonucleotide
gaggagguuuugauaucca

SEQ ID NO: 2486823 - RNA, 19 nt, Artificial Sequence
  Description of Artificial Sequence: Synthetic oligonucleotide
ggcacaguugucugacgac

SEQ ID NO: 2486824 - RNA, 19 nt, Artificial Sequence
  Description of Artificial Sequence: Synthetic oligonucleotide
gaucacggaaugccaccaa

SEQ ID NO: 2486825 - RNA, 19 nt, Artificial Sequence
  Description of Artificial Sequence: Synthetic oligonucleotide
uccugccaugugcccacug

SEQ ID NO: 2486826 - RNA, 19 nt, Artificial Sequence
  Description of Artificial Sequence: Synthetic oligonucleotide
ugcggcugaugcugucuga

SEQ ID NO: 2486827 - RNA, 19 nt, Artificial Sequence
  Description of Artificial Sequence: Synthetic oligonucleotide
cguuggccuauuuauuggc

SEQ ID NO: 2486828 - RNA, 19 nt, Artificial Sequence
  Description of Artificial Sequence: Synthetic oligonucleotide
uaugugcuccaggaugauu

SEQ ID NO: 2486829 - RNA, 19 nt, Artificial Sequence
  Description of Artificial Sequence: Synthetic oligonucleotide
agucaagggcugaacugga

SEQ ID NO: 2486830 - RNA, 19 nt, Artificial Sequence
  Description of Artificial Sequence: Synthetic oligonucleotide
ugucagcccuugugcugag

SEQ ID NO: 2486831 - RNA, 19 nt, Artificial Sequence
  Description of Artificial Sequence: Synthetic oligonucleotide
guucuccaaguagauaugu

SEQ ID NO: 2486832 - RNA, 19 nt, Artificial Sequence
  Description of Artificial Sequence: Synthetic oligonucleotide
cagcccuugugcugagaac

SEQ ID NO: 2486833 - RNA, 19 nt, Artificial Sequence
  Description of Artificial Sequence: Synthetic oligonucleotide
gucuccacacagacuagga

SEQ ID NO: 2486834 - RNA, 19 nt, Artificial Sequence
  Description of Artificial Sequence: Synthetic oligonucleotide
cugucagcccuugugcuga

SEQ ID NO: 2486835 - RNA, 19 nt, Artificial Sequence
  Description of Artificial Sequence: Synthetic oligonucleotide
cacggaaugccaccaaccu

SEQ ID NO: 2486836 - RNA, 19 nt, Artificial Sequence
  Description of Artificial Sequence: Synthetic oligonucleotide
auucggcagaggacagauc

SEQ ID NO: 2486837 - RNA, 19 nt, Artificial Sequence
  Description of Artificial Sequence: Synthetic oligonucleotide
ggccaugcggcugaugcug

SEQ ID NO: 2486838 - RNA, 19 nt, Artificial Sequence
  Description of Artificial Sequence: Synthetic oligonucleotide
aucuuucgaggaggccuuc

SEQ ID NO: 2486839 - RNA, 19 nt, Artificial Sequence
  Description of Artificial Sequence: Synthetic oligonucleotide
gauucggcccagaccaucu

SEQ ID NO: 2486840 - RNA, 19 nt, Artificial Sequence
  Description of Artificial Sequence: Synthetic oligonucleotide
ugcuugggcuucaguucuc

SEQ ID NO: 2486841 - RNA, 19 nt, Artificial Sequence
  Description of Artificial Sequence: Synthetic oligonucleotide
aagcggugcagagccugga

SEQ ID NO: 2486842 - RNA, 19 nt, Artificial Sequence
  Description of Artificial Sequence: Synthetic oligonucleotide
cugaaccagcacagcucug

SEQ ID NO: 2486843 - RNA, 19 nt, Artificial Sequence
  Description of Artificial Sequence: Synthetic oligonucleotide
ggaucuucuuggaucuuca

SEQ ID NO: 2486844 - RNA, 19 nt, Artificial Sequence
  Description of Artificial Sequence: Synthetic oligonucleotide
cagcacagcucuguagcuc

SEQ ID NO: 2486845 - RNA, 19 nt, Artificial Sequence
  Description of Artificial Sequence: Synthetic oligonucleotide
cuaacaugguguccagcgu

SEQ ID NO: 2486846 - RNA, 19 nt, Artificial Sequence
  Description of Artificial Sequence: Synthetic oligonucleotide
cuacagcagaaagcugguc

SEQ ID NO: 2486847 - RNA, 19 nt, Artificial Sequence
  Description of Artificial Sequence: Synthetic oligonucleotide
augcugucugaggagguuu

SEQ ID NO: 2486848 - RNA, 19 nt, Artificial Sequence
  Description of Artificial Sequence: Synthetic oligonucleotide
ugguuugcuugggcuucag

SEQ ID NO: 2486849 - RNA, 19 nt, Artificial Sequence
  Description of Artificial Sequence: Synthetic oligonucleotide
cuuugagucaagggcugaa

SEQ ID NO: 2486850 - RNA, 19 nt, Artificial Sequence
  Description of Artificial Sequence: Synthetic oligonucleotide
cuggaacauguaacaucca

SEQ ID NO: 2486851 - RNA, 19 nt, Artificial Sequence
  Description of Artificial Sequence: Synthetic oligonucleotide
gcacaguugucugacgaca

SEQ ID NO: 2486852 - RNA, 19 nt, Artificial Sequence
  Description of Artificial Sequence: Synthetic oligonucleotide
cucuggagcgccucaaaau

SEQ ID NO: 2486853 - RNA, 19 nt, Artificial Sequence
  Description of Artificial Sequence: Synthetic oligonucleotide
uggucacagccgagaugga

SEQ ID NO: 2486854 - RNA, 19 nt, Artificial Sequence
  Description of Artificial Sequence: Synthetic oligonucleotide
guuggccuauuuauuggcu

SEQ ID NO: 2486855 - RNA, 19 nt, Artificial Sequence
  Description of Artificial Sequence: Synthetic oligonucleotide
ccaaccuagugaagcggug

SEQ ID NO: 2486856 - RNA, 19 nt, Artificial Sequence
  Description of Artificial Sequence: Synthetic oligonucleotide
agguggggacggccaugcg

SEQ ID NO: 2486857 - RNA, 19 nt, Artificial Sequence
  Description of Artificial Sequence: Synthetic oligonucleotide
gucugacgacaucuuucga

SEQ ID NO: 2486858 - RNA, 19 nt, Artificial Sequence
  Description of Artificial Sequence: Synthetic oligonucleotide
ccagcguuuccuugcucag

SEQ ID NO: 2486859 - RNA, 19 nt, Artificial Sequence
  Description of Artificial Sequence: Synthetic oligonucleotide
cccggauucggcccagacc

SEQ ID NO: 2486860 - RNA, 19 nt, Artificial Sequence
  Description of Artificial Sequence: Synthetic oligonucleotide
gcagagagaucugguuugc

SEQ ID NO: 2486861 - RNA, 19 nt, Artificial Sequence
  Description of Artificial Sequence: Synthetic oligonucleotide
ggugcagagccuggagcag

SEQ ID NO: 2486862 - RNA, 19 nt, Artificial Sequence
  Description of Artificial Sequence: Synthetic oligonucleotide
gcucuguagcucguuggcc

SEQ ID NO: 2486863 - RNA, 19 nt, Artificial Sequence
  Description of Artificial Sequence: Synthetic oligonucleotide
gcgccucaaaauucuccgc

SEQ ID NO: 2486864 - RNA, 19 nt, Artificial Sequence
  Description of Artificial Sequence: Synthetic oligonucleotide
gcggcugaugcugucugag

SEQ ID NO: 2486865 - RNA, 19 nt, Artificial Sequence
  Description of Artificial Sequence: Synthetic oligonucleotide
auaugugcuccaggaugau

SEQ ID NO: 2486866 - RNA, 19 nt, Artificial Sequence
  Description of Artificial Sequence: Synthetic oligonucleotide
ccuccugggucacagacaa

SEQ ID NO: 2486867 - RNA, 19 nt, Artificial Sequence
  Description of Artificial Sequence: Synthetic oligonucleotide
gcguggcagagagaucugg

SEQ ID NO: 2486868 - RNA, 19 nt, Artificial Sequence
  Description of Artificial Sequence: Synthetic oligonucleotide
cgacaucuuucgaggaggc

SEQ ID NO: 2486869 - RNA, 19 nt, Artificial Sequence
  Description of Artificial Sequence: Synthetic oligonucleotide
auucggcccagaccaucua

SEQ ID NO: 2486870 - RNA, 19 nt, Artificial Sequence
  Description of Artificial Sequence: Synthetic oligonucleotide
uguagcucguuggccuauu

SEQ ID NO: 2486871 - RNA, 19 nt, Artificial Sequence
  Description of Artificial Sequence: Synthetic oligonucleotide
gaauggcaaugggcuuggc

SEQ ID NO: 2486872 - RNA, 19 nt, Artificial Sequence
  Description of Artificial Sequence: Synthetic oligonucleotide
ucccuucacugggcuuccg

SEQ ID NO: 2486873 - RNA, 19 nt, Artificial Sequence
  Description of Artificial Sequence: Synthetic oligonucleotide
agccgagauggaggguuug

SEQ ID NO: 2486874 - RNA, 19 nt, Artificial Sequence
  Description of Artificial Sequence: Synthetic oligonucleotide
cggcagaggacagaucacg

SEQ ID NO: 2486875 - RNA, 19 nt, Artificial Sequence
  Description of Artificial Sequence: Synthetic oligonucleotide
guuugucuccacacagacu

SEQ ID NO: 2486876 - RNA, 19 nt, Artificial Sequence
  Description of Artificial Sequence: Synthetic oligonucleotide
ccuagugaagcggugcaga

SEQ ID NO: 2486877 - RNA, 19 nt, Artificial Sequence
  Description of Artificial Sequence: Synthetic oligonucleotide
ggaggccuucagcaggcuc

SEQ ID NO: 2486878 - RNA, 19 nt, Artificial Sequence
  Description of Artificial Sequence: Synthetic oligonucleotide
gggacggccaugcggcuga

SEQ ID NO: 2486879 - RNA, 19 nt, Artificial Sequence
  Description of Artificial Sequence: Synthetic oligonucleotide
ggcuucaguucuccaagua

SEQ ID NO: 2486880 - RNA, 19 nt, Artificial Sequence
  Description of Artificial Sequence: Synthetic oligonucleotide
gcucuggagcgccucaaaa

SEQ ID NO: 2486881 - RNA, 19 nt, Artificial Sequence
  Description of Artificial Sequence: Synthetic oligonucleotide
caucuuucgaggaggccuu

SEQ ID NO: 2486882 - RNA, 19 nt, Artificial Sequence
  Description of Artificial Sequence: Synthetic oligonucleotide
agacaagcuggaacaugua

SEQ ID NO: 2486883 - RNA, 19 nt, Artificial Sequence
  Description of Artificial Sequence: Synthetic oligonucleotide
ggguuugucuccacacaga

SEQ ID NO: 2486884 - RNA, 19 nt, Artificial Sequence
  Description of Artificial Sequence: Synthetic oligonucleotide
gcugaacuggaaaagcuuu

SEQ ID NO: 2486885 - RNA, 19 nt, Artificial Sequence
  Description of Artificial Sequence: Synthetic oligonucleotide
gucaagggcugaacuggaa

SEQ ID NO: 2486886 - RNA, 19 nt, Artificial Sequence
  Description of Artificial Sequence: Synthetic oligonucleotide
caucuggagcaggcaggug

SEQ ID NO: 2486887 - RNA, 19 nt, Artificial Sequence
  Description of Artificial Sequence: Synthetic oligonucleotide
caggcguggcagagagauc

SEQ ID NO: 2486888 - RNA, 19 nt, Artificial Sequence
  Description of Artificial Sequence: Synthetic oligonucleotide
ggauucggcccagaccauc

SEQ ID NO: 2486889 - RNA, 19 nt, Artificial Sequence
  Description of Artificial Sequence: Synthetic oligonucleotide
gggccuucccagagguggg

SEQ ID NO: 2486890 - RNA, 19 nt, Artificial Sequence
  Description of Artificial Sequence: Synthetic oligonucleotide
ggccuucccagaggugggg

SEQ ID NO: 2486891 - RNA, 19 nt, Artificial Sequence
  Description of Artificial Sequence: Synthetic oligonucleotide
gggcuuccgaaaagcagca

SEQ ID NO: 2486892 - RNA, 19 nt, Artificial Sequence
  Description of Artificial Sequence: Synthetic oligonucleotide
guccagcguuuccuugcuc

SEQ ID NO: 2486893 - RNA, 19 nt, Artificial Sequence
  Description of Artificial Sequence: Synthetic oligonucleotide
ggcuuccgaaaagcagcag

SEQ ID NO: 2486894 - RNA, 19 nt, Artificial Sequence
  Description of Artificial Sequence: Synthetic oligonucleotide
gggcugaacuggaaaagcu

SEQ ID NO: 2486895 - RNA, 19 nt, Artificial Sequence
  Description of Artificial Sequence: Synthetic oligonucleotide
ggcccagaccaucuaacau

SEQ ID NO: 2486896 - RNA, 19 nt, Artificial Sequence
  Description of Artificial Sequence: Synthetic oligonucleotide
cggcugaugcugucugagg

SEQ ID NO: 2486897 - RNA, 19 nt, Artificial Sequence
  Description of Artificial Sequence: Synthetic oligonucleotide
gcccuugugcugagaacug

SEQ ID NO: 2486898 - RNA, 19 nt, Artificial Sequence
  Description of Artificial Sequence: Synthetic oligonucleotide
cgaaaagcagcagccccac

SEQ ID NO: 2486899 - RNA, 19 nt, Artificial Sequence
  Description of Artificial Sequence: Synthetic oligonucleotide
auguaacauccaggaguuu

SEQ ID NO: 2486900 - RNA, 19 nt, Artificial Sequence
  Description of Artificial Sequence: Synthetic oligonucleotide
gacggccaugcggcugaug

SEQ ID NO: 2486901 - RNA, 19 nt, Artificial Sequence
  Description of Artificial Sequence: Synthetic oligonucleotide
ccgagauggaggguuuguc

SEQ ID NO: 2486902 - RNA, 19 nt, Artificial Sequence
  Description of Artificial Sequence: Synthetic oligonucleotide
cagguccaccaggcguggc

SEQ ID NO: 2486903 - RNA, 19 nt, Artificial Sequence
  Description of Artificial Sequence: Synthetic oligonucleotide
gggucacagacaagcugga

SEQ ID NO: 2486904 - RNA, 19 nt, Artificial Sequence
  Description of Artificial Sequence: Synthetic oligonucleotide
cacagacuaggaucuucuu

SEQ ID NO: 2486905 - RNA, 19 nt, Artificial Sequence
  Description of Artificial Sequence: Synthetic oligonucleotide
gguuugcuugggcuucagu

SEQ ID NO: 2486906 - RNA, 19 nt, Artificial Sequence
  Description of Artificial Sequence: Synthetic oligonucleotide
ccaggcguggcagagagau

SEQ ID NO: 2486907 - RNA, 19 nt, Artificial Sequence
  Description of Artificial Sequence: Synthetic oligonucleotide
aggaggccuucagcaggcu

SEQ ID NO: 2486908 - RNA, 19 nt, Artificial Sequence
  Description of Artificial Sequence: Synthetic oligonucleotide
ccauccugccaugugccca

SEQ ID NO: 2486909 - RNA, 19 nt, Artificial Sequence
  Description of Artificial Sequence: Synthetic oligonucleotide
guagcucguuggccuauuu

SEQ ID NO: 2486910 - RNA, 19 nt, Artificial Sequence
  Description of Artificial Sequence: Synthetic oligonucleotide
ggggacggccaugcggcug

SEQ ID NO: 2486911 - RNA, 19 nt, Artificial Sequence
  Description of Artificial Sequence: Synthetic oligonucleotide
cugccuccuccugggucac

SEQ ID NO: 2486912 - RNA, 19 nt, Artificial Sequence
  Description of Artificial Sequence: Synthetic oligonucleotide
ggcucuggagcgccucaaa

SEQ ID NO: 2486913 - RNA, 19 nt, Artificial Sequence
  Description of Artificial Sequence: Synthetic oligonucleotide
cacagacaagcuggaacau

SEQ ID NO: 2486914 - RNA, 19 nt, Artificial Sequence
  Description of Artificial Sequence: Synthetic oligonucleotide
gggcuucaguucuccaagu

SEQ ID NO: 2486915 - RNA, 19 nt, Artificial Sequence
  Description of Artificial Sequence: Synthetic oligonucleotide
ggcguggcagagagaucug

SEQ ID NO: 2486916 - RNA, 19 nt, Artificial Sequence
  Description of Artificial Sequence: Synthetic oligonucleotide
cuccgcugucaaggccgcc

SEQ ID NO: 2486917 - RNA, 19 nt, Artificial Sequence
  Description of Artificial Sequence: Synthetic oligonucleotide
cagagagaucugguuugcu

SEQ ID NO: 2486918 - RNA, 19 nt, Artificial Sequence
  Description of Artificial Sequence: Synthetic oligonucleotide
auccugccaugugcccacu

SEQ ID NO: 2486919 - RNA, 19 nt, Artificial Sequence
  Description of Artificial Sequence: Synthetic oligonucleotide
gucagcccuugugcugaga

SEQ ID NO: 2486920 - RNA, 19 nt, Artificial Sequence
  Description of Artificial Sequence: Synthetic oligonucleotide
ccaugcggcugaugcuguc

SEQ ID NO: 2486921 - RNA, 19 nt, Artificial Sequence
  Description of Artificial Sequence: Synthetic oligonucleotide
ccugggucacagacaagcu

SEQ ID NO: 2486922 - RNA, 19 nt, Artificial Sequence
  Description of Artificial Sequence: Synthetic oligonucleotide
ccugccaugugcccacugu

SEQ ID NO: 2486923 - RNA, 19 nt, Artificial Sequence
  Description of Artificial Sequence: Synthetic oligonucleotide
ggucccggauucggcccag

SEQ ID NO: 2486924 - RNA, 19 nt, Artificial Sequence
  Description of Artificial Sequence: Synthetic oligonucleotide
cagccccaccauccugcca

SEQ ID NO: 2486925 - RNA, 19 nt, Artificial Sequence
  Description of Artificial Sequence: Synthetic oligonucleotide
cagcguuuccuugcucagu

SEQ ID NO: 2486926 - RNA, 19 nt, Artificial Sequence
  Description of Artificial Sequence: Synthetic oligonucleotide
cccuugugcugagaacuga

SEQ ID NO: 2486927 - RNA, 19 nt, Artificial Sequence
  Description of Artificial Sequence: Synthetic oligonucleotide
ccuugcucaguuccauggu

SEQ ID NO: 2486928 - RNA, 19 nt, Artificial Sequence
  Description of Artificial Sequence: Synthetic oligonucleotide
gccccaccauccugccaug

SEQ ID NO: 2486929 - RNA, 19 nt, Artificial Sequence
  Description of Artificial Sequence: Synthetic oligonucleotide
cguggcagagagaucuggu

SEQ ID NO: 2486930 - RNA, 19 nt, Artificial Sequence
  Description of Artificial Sequence: Synthetic oligonucleotide
ggaaugccaccaaccuagu

SEQ ID NO: 2486931 - RNA, 19 nt, Artificial Sequence
  Description of Artificial Sequence: Synthetic oligonucleotide
gcucguuggccuauuuauu

SEQ ID NO: 2486932 - RNA, 19 nt, Artificial Sequence
  Description of Artificial Sequence: Synthetic oligonucleotide
gugaagcggugcagagccu

SEQ ID NO: 2486933 - RNA, 19 nt, Artificial Sequence
  Description of Artificial Sequence: Synthetic oligonucleotide
gccgagauggaggguuugu

SEQ ID NO: 2486934 - RNA, 19 nt, Artificial Sequence
  Description of Artificial Sequence: Synthetic oligonucleotide
cagccgagauggaggguuu

SEQ ID NO: 2486935 - RNA, 19 nt, Artificial Sequence
  Description of Artificial Sequence: Synthetic oligonucleotide
cuguagcucguuggccuau

SEQ ID NO: 2486936 - RNA, 19 nt, Artificial Sequence
  Description of Artificial Sequence: Synthetic oligonucleotide
ggcagguggggacggccau

SEQ ID NO: 2486937 - RNA, 19 nt, Artificial Sequence
  Description of Artificial Sequence: Synthetic oligonucleotide
cacagcucuguagcucguu

SEQ ID NO: 2486938 - RNA, 19 nt, Artificial Sequence
  Description of Artificial Sequence: Synthetic oligonucleotide
ccggaaagagagccagaau

SEQ ID NO: 2486939 - RNA, 19 nt, Artificial Sequence
  Description of Artificial Sequence: Synthetic oligonucleotide
cacagccgagauggagggu

SEQ ID NO: 2486940 - RNA, 19 nt, Artificial Sequence
  Description of Artificial Sequence: Synthetic oligonucleotide
ccagaccaucuaacauggu

SEQ ID NO: 2486941 - RNA, 19 nt, Artificial Sequence
  Description of Artificial Sequence: Synthetic oligonucleotide
gcaaugggcuuggcugcuu

SEQ ID NO: 2486942 - RNA, 19 nt, Artificial Sequence
  Description of Artificial Sequence: Synthetic oligonucleotide
cggccaugcggcugaugcu

SEQ ID NO: 2486943 - RNA, 19 nt, Artificial Sequence
  Description of Artificial Sequence: Synthetic oligonucleotide
ccccaccauccugccaugu

SEQ ID NO: 2486944 - RNA, 19 nt, Artificial Sequence
  Description of Artificial Sequence: Synthetic oligonucleotide
ccacacagacuaggaucuu

SEQ ID NO: 2486945 - RNA, 19 nt, Artificial Sequence
  Description of Artificial Sequence: Synthetic oligonucleotide
cggauucggcccagaccau

SEQ ID NO: 2486946 - RNA, 19 nt, Artificial Sequence
  Description of Artificial Sequence: Synthetic oligonucleotide
ggacggccaugcggcugau

SEQ ID NO: 2486947 - RNA, 19 nt, Artificial Sequence
  Description of Artificial Sequence: Synthetic oligonucleotide
aauuagaaagaauaauugg

SEQ ID NO: 2486948 - RNA, 19 nt, Artificial Sequence
  Description of Artificial Sequence: Synthetic oligonucleotide
uuaagaauuagaaagaaua

SEQ ID NO: 2486949 - RNA, 19 nt, Artificial Sequence
  Description of Artificial Sequence: Synthetic oligonucleotide
uuuaaugaaggguaggccc

SEQ ID NO: 2486950 - RNA, 19 nt, Artificial Sequence
  Description of Artificial Sequence: Synthetic oligonucleotide
aaagacaacuucauggccc

SEQ ID NO: 2486951 - RNA, 19 nt, Artificial Sequence
  Description of Artificial Sequence: Synthetic oligonucleotide
aagugaaugagcgagaucu

SEQ ID NO: 2486952 - RNA, 19 nt, Artificial Sequence
  Description of Artificial Sequence: Synthetic oligonucleotide
uaaauaaacauuucugugu

SEQ ID NO: 2486953 - RNA, 19 nt, Artificial Sequence
  Description of Artificial Sequence: Synthetic oligonucleotide
aaacucauucugcaguggc

SEQ ID NO: 2486954 - RNA, 19 nt, Artificial Sequence
  Description of Artificial Sequence: Synthetic oligonucleotide
uuuacaacccacaaagcca

SEQ ID NO: 2486955 - RNA, 19 nt, Artificial Sequence
  Description of Artificial Sequence: Synthetic oligonucleotide
uuagggacauauaaaauga

SEQ ID NO: 2486956 - RNA, 19 nt, Artificial Sequence
  Description of Artificial Sequence: Synthetic oligonucleotide
aauggguccgacaagcugc

SEQ ID NO: 2486957 - RNA, 19 nt, Artificial Sequence
  Description of Artificial Sequence: Synthetic oligonucleotide
aauuacuccguuauucccc

SEQ ID NO: 2486958 - RNA, 19 nt, Artificial Sequence
  Description of Artificial Sequence: Synthetic oligonucleotide
uuaaugaaggguaggcccg

SEQ ID NO: 2486959 - RNA, 19 nt, Artificial Sequence
  Description of Artificial Sequence: Synthetic oligonucleotide
gaauuagaaagaauaauug

SEQ ID NO: 2486960 - RNA, 19 nt, Artificial Sequence
  Description of Artificial Sequence: Synthetic oligonucleotide
aauaauugguaucugugaa

SEQ ID NO: 2486961 - RNA, 19 nt, Artificial Sequence
  Description of Artificial Sequence: Synthetic oligonucleotide
aguaauuacuccguuauuc

SEQ ID NO: 2486962 - RNA, 19 nt, Artificial Sequence
  Description of Artificial Sequence: Synthetic oligonucleotide
gaguacaguaauuacuccg

SEQ ID NO: 2486963 - RNA, 19 nt, Artificial Sequence
  Description of Artificial Sequence: Synthetic oligonucleotide
cuuuacaacccacaaagcc

SEQ ID NO: 2486964 - RNA, 19 nt, Artificial Sequence
  Description of Artificial Sequence: Synthetic oligonucleotide
aaugagcgagaucuccucc

SEQ ID NO: 2486965 - RNA, 19 nt, Artificial Sequence
  Description of Artificial Sequence: Synthetic oligonucleotide
auguaguuuugucuuaggc

SEQ ID NO: 2486966 - RNA, 19 nt, Artificial Sequence
  Description of Artificial Sequence: Synthetic oligonucleotide
agaagaguacaguaauuac

SEQ ID NO: 2486967 - RNA, 19 nt, Artificial Sequence
  Description of Artificial Sequence: Synthetic oligonucleotide
uuaagaaacucauucugca

SEQ ID NO: 2486968 - RNA, 19 nt, Artificial Sequence
  Description of Artificial Sequence: Synthetic oligonucleotide
aaucccauuuaauauauuu

SEQ ID NO: 2486969 - RNA, 19 nt, Artificial Sequence
  Description of Artificial Sequence: Synthetic oligonucleotide
gacaacaccacagaugggg

SEQ ID NO: 2486970 - RNA, 19 nt, Artificial Sequence
  Description of Artificial Sequence: Synthetic oligonucleotide
ugcuaaggccuucugaccg

SEQ ID NO: 2486971 - RNA, 19 nt, Artificial Sequence
  Description of Artificial Sequence: Synthetic oligonucleotide
uaauugguaucugugaaag

SEQ ID NO: 2486972 - RNA, 19 nt, Artificial Sequence
  Description of Artificial Sequence: Synthetic oligonucleotide
cuuagaugcgcugagagag

SEQ ID NO: 2486973 - RNA, 19 nt, Artificial Sequence
  Description of Artificial Sequence: Synthetic oligonucleotide
ucugugaaagaaaauccca

SEQ ID NO: 2486974 - RNA, 19 nt, Artificial Sequence
  Description of Artificial Sequence: Synthetic oligonucleotide
gauccuuuggugcuaaggc

SEQ ID NO: 2486975 - RNA, 19 nt, Artificial Sequence
  Description of Artificial Sequence: Synthetic oligonucleotide
ugacuucucacucugcacc

SEQ ID NO: 2486976 - RNA, 19 nt, Artificial Sequence
  Description of Artificial Sequence: Synthetic oligonucleotide
ugaggaguaauuagggaca

SEQ ID NO: 2486977 - RNA, 19 nt, Artificial Sequence
  Description of Artificial Sequence: Synthetic oligonucleotide
acuccaguaaaaccagccc

SEQ ID NO: 2486978 - RNA, 19 nt, Artificial Sequence
  Description of Artificial Sequence: Synthetic oligonucleotide
acauauaaaaugauuaaga

SEQ ID NO: 2486979 - RNA, 19 nt, Artificial Sequence
  Description of Artificial Sequence: Synthetic oligonucleotide
ucccauuuaauauauuuaa

SEQ ID NO: 2486980 - RNA, 19 nt, Artificial Sequence
  Description of Artificial Sequence: Synthetic oligonucleotide
auuggauguaguuuugucu

SEQ ID NO: 2486981 - RNA, 19 nt, Artificial Sequence
  Description of Artificial Sequence: Synthetic oligonucleotide
guaauuacuccguuauucc

SEQ ID NO: 2486982 - RNA, 19 nt, Artificial Sequence
  Description of Artificial Sequence: Synthetic oligonucleotide
uuuaagaauuagaaagaau

SEQ ID NO: 2486983 - RNA, 19 nt, Artificial Sequence
  Description of Artificial Sequence: Synthetic oligonucleotide
aaccagcccacguaggagg

SEQ ID NO: 2486984 - RNA, 19 nt, Artificial Sequence
  Description of Artificial Sequence: Synthetic oligonucleotide
cuugacuccuuuaaugaag

SEQ ID NO: 2486985 - RNA, 19 nt, Artificial Sequence
  Description of Artificial Sequence: Synthetic oligonucleotide
ucaaguacaguuuuauuuu

SEQ ID NO: 2486986 - RNA, 19 nt, Artificial Sequence
  Description of Artificial Sequence: Synthetic oligonucleotide
gaauaauugguaucuguga

SEQ ID NO: 2486987 - RNA, 19 nt, Artificial Sequence
  Description of Artificial Sequence: Synthetic oligonucleotide
cauucugaggaguaauuag

SEQ ID NO: 2486988 - RNA, 19 nt, Artificial Sequence
  Description of Artificial Sequence: Synthetic oligonucleotide
guaaaaccagcccacguag

SEQ ID NO: 2486989 - RNA, 19 nt, Artificial Sequence
  Description of Artificial Sequence: Synthetic oligonucleotide
acaguaauuacuccguuau

SEQ ID NO: 2486990 - RNA, 19 nt, Artificial Sequence
  Description of Artificial Sequence: Synthetic oligonucleotide
uugucuuaggcugugcagg

SEQ ID NO: 2486991 - RNA, 19 nt, Artificial Sequence
  Description of Artificial Sequence: Synthetic oligonucleotide
aaagugaaugagcgagauc

SEQ ID NO: 2486992 - RNA, 19 nt, Artificial Sequence
  Description of Artificial Sequence: Synthetic oligonucleotide
guaucugugaaagaaaauc

SEQ ID NO: 2486993 - RNA, 19 nt, Artificial Sequence
  Description of Artificial Sequence: Synthetic oligonucleotide
uuuugucuuaggcugugca

SEQ ID NO: 2486994 - RNA, 19 nt, Artificial Sequence
  Description of Artificial Sequence: Synthetic oligonucleotide
agagagccggguaugaucc

SEQ ID NO: 2486995 - RNA, 19 nt, Artificial Sequence
  Description of Artificial Sequence: Synthetic oligonucleotide
agaauuagaaagaauaauu

SEQ ID NO: 2486996 - RNA, 19 nt, Artificial Sequence
  Description of Artificial Sequence: Synthetic oligonucleotide
aagaagaguacaguaauua

SEQ ID NO: 2486997 - RNA, 19 nt, Artificial Sequence
  Description of Artificial Sequence: Synthetic oligonucleotide
uuacaacccacaaagccaa

SEQ ID NO: 2486998 - RNA, 19 nt, Artificial Sequence
  Description of Artificial Sequence: Synthetic oligonucleotide
agaauaauugguaucugug

SEQ ID NO: 2486999 - RNA, 19 nt, Artificial Sequence
  Description of Artificial Sequence: Synthetic oligonucleotide
ucucgggugacauucugag

SEQ ID NO: 2487000 - RNA, 19 nt, Artificial Sequence
  Description of Artificial Sequence: Synthetic oligonucleotide
ugguaucugugaaagaaaa

SEQ ID NO: 2487001 - RNA, 19 nt, Artificial Sequence
  Description of Artificial Sequence: Synthetic oligonucleotide
aacucauucugcaguggcc

SEQ ID NO: 2487002 - RNA, 19 nt, Artificial Sequence
  Description of Artificial Sequence: Synthetic oligonucleotide
agcuuagaugcgcugagag

SEQ ID NO: 2487003 - RNA, 19 nt, Artificial Sequence
  Description of Artificial Sequence: Synthetic oligonucleotide
aagacaacuucauggcccu

SEQ ID NO: 2487004 - RNA, 19 nt, Artificial Sequence
  Description of Artificial Sequence: Synthetic oligonucleotide
uccaguaaaaccagcccac

SEQ ID NO: 2487005 - RNA, 19 nt, Artificial Sequence
  Description of Artificial Sequence: Synthetic oligonucleotide
aggagggugacaucaaaug

SEQ ID NO: 2487006 - RNA, 19 nt, Artificial Sequence
  Description of Artificial Sequence: Synthetic oligonucleotide
ugauccuuuggugcuaagg

SEQ ID NO: 2487007 - RNA, 19 nt, Artificial Sequence
  Description of Artificial Sequence: Synthetic oligonucleotide
ugcgcugagagagagccgg

SEQ ID NO: 2487008 - RNA, 19 nt, Artificial Sequence
  Description of Artificial Sequence: Synthetic oligonucleotide
ugaaugagcgagaucuccu

SEQ ID NO: 2487009 - RNA, 19 nt, Artificial Sequence
  Description of Artificial Sequence: Synthetic oligonucleotide
ugucuuaggcugugcaggg

SEQ ID NO: 2487010 - RNA, 19 nt, Artificial Sequence
  Description of Artificial Sequence: Synthetic oligonucleotide
aaggccuucugaccguuag

SEQ ID NO: 2487011 - RNA, 19 nt, Artificial Sequence
  Description of Artificial Sequence: Synthetic oligonucleotide
agaaccgccacaccgucag

SEQ ID NO: 2487012 - RNA, 19 nt, Artificial Sequence
  Description of Artificial Sequence: Synthetic oligonucleotide
aaagaauaauugguaucug

SEQ ID NO: 2487013 - RNA, 19 nt, Artificial Sequence
  Description of Artificial Sequence: Synthetic oligonucleotide
cuuuaaugaaggguaggcc

SEQ ID NO: 2487014 - RNA, 19 nt, Artificial Sequence
  Description of Artificial Sequence: Synthetic oligonucleotide
uguucuccauccaucaaaa

SEQ ID NO: 2487015 - RNA, 19 nt, Artificial Sequence
  Description of Artificial Sequence: Synthetic oligonucleotide
caggcauacaccccgcucg

SEQ ID NO: 2487016 - RNA, 19 nt, Artificial Sequence
  Description of Artificial Sequence: Synthetic oligonucleotide
aagggcugucauuagcugu

SEQ ID NO: 2487017 - RNA, 19 nt, Artificial Sequence
  Description of Artificial Sequence: Synthetic oligonucleotide
aauuagggacauauaaaau

SEQ ID NO: 2487018 - RNA, 19 nt, Artificial Sequence
  Description of Artificial Sequence: Synthetic oligonucleotide
aguaaaaccagcccacgua

SEQ ID NO: 2487019 - RNA, 19 nt, Artificial Sequence
  Description of Artificial Sequence: Synthetic oligonucleotide
aauugguaucugugaaaga

SEQ ID NO: 2487020 - RNA, 19 nt, Artificial Sequence
  Description of Artificial Sequence: Synthetic oligonucleotide
uuagcuguucuccauccau

SEQ ID NO: 2487021 - RNA, 19 nt, Artificial Sequence
  Description of Artificial Sequence: Synthetic oligonucleotide
ugugaaagaaaaucccauu

SEQ ID NO: 2487022 - RNA, 19 nt, Artificial Sequence
  Description of Artificial Sequence: Synthetic oligonucleotide
auaauugguaucugugaaa

SEQ ID NO: 2487023 - RNA, 19 nt, Artificial Sequence
  Description of Artificial Sequence: Synthetic oligonucleotide
cugucauuagcuguucucc

SEQ ID NO: 2487024 - RNA, 19 nt, Artificial Sequence
  Description of Artificial Sequence: Synthetic oligonucleotide
uccuuuaaugaaggguagg

SEQ ID NO: 2487025 - RNA, 19 nt, Artificial Sequence
  Description of Artificial Sequence: Synthetic oligonucleotide
aucaaaugccggcauucag

SEQ ID NO: 2487026 - RNA, 19 nt, Artificial Sequence
  Description of Artificial Sequence: Synthetic oligonucleotide
ugaccguuaggucucgggu

SEQ ID NO: 2487027 - RNA, 19 nt, Artificial Sequence
  Description of Artificial Sequence: Synthetic oligonucleotide
ugucauuagcuguucucca

SEQ ID NO: 2487028 - RNA, 19 nt, Artificial Sequence
  Description of Artificial Sequence: Synthetic oligonucleotide
caccuugacuccuuuaaug

SEQ ID NO: 2487029 - RNA, 19 nt, Artificial Sequence
  Description of Artificial Sequence: Synthetic oligonucleotide
ucauuagcuguucuccauc

SEQ ID NO: 2487030 - RNA, 19 nt, Artificial Sequence
  Description of Artificial Sequence: Synthetic oligonucleotide
auaaacauuucugugugua

SEQ ID NO: 2487031 - RNA, 19 nt, Artificial Sequence
  Description of Artificial Sequence: Synthetic oligonucleotide
aguacaguaauuacuccgu

SEQ ID NO: 2487032 - RNA, 19 nt, Artificial Sequence
  Description of Artificial Sequence: Synthetic oligonucleotide
aaccgccacaccgucaggg

SEQ ID NO: 2487033 - RNA, 19 nt, Artificial Sequence
  Description of Artificial Sequence: Synthetic oligonucleotide
accgucagggcguagacaa

SEQ ID NO: 2487034 - RNA, 19 nt, Artificial Sequence
  Description of Artificial Sequence: Synthetic oligonucleotide
uacaguaauuacuccguua

SEQ ID NO: 2487035 - RNA, 19 nt, Artificial Sequence
  Description of Artificial Sequence: Synthetic oligonucleotide
ucauagcuccaccuugacu

SEQ ID NO: 2487036 - RNA, 19 nt, Artificial Sequence
  Description of Artificial Sequence: Synthetic oligonucleotide
acaacccacaaagccaagg

SEQ ID NO: 2487037 - RNA, 19 nt, Artificial Sequence
  Description of Artificial Sequence: Synthetic oligonucleotide
ugacuccuuuaaugaaggg

SEQ ID NO: 2487038 - RNA, 19 nt, Artificial Sequence
  Description of Artificial Sequence: Synthetic oligonucleotide
gaccguuaggucucgggug

SEQ ID NO: 2487039 - RNA, 19 nt, Artificial Sequence
  Description of Artificial Sequence: Synthetic oligonucleotide
acagaugggguuacacagc

SEQ ID NO: 2487040 - RNA, 19 nt, Artificial Sequence
  Description of Artificial Sequence: Synthetic oligonucleotide
acuccuuuaaugaagggua

SEQ ID NO: 2487041 - RNA, 19 nt, Artificial Sequence
  Description of Artificial Sequence: Synthetic oligonucleotide
ggguaugauccuuuggugc

SEQ ID NO: 2487042 - RNA, 19 nt, Artificial Sequence
  Description of Artificial Sequence: Synthetic oligonucleotide
ggagggugacaucaaaugc

SEQ ID NO: 2487043 - RNA, 19 nt, Artificial Sequence
  Description of Artificial Sequence: Synthetic oligonucleotide
aaagccaagggcugucauu

SEQ ID NO: 2487044 - RNA, 19 nt, Artificial Sequence
  Description of Artificial Sequence: Synthetic oligonucleotide
cuccuuuaaugaaggguag

SEQ ID NO: 2487045 - RNA, 19 nt, Artificial Sequence
  Description of Artificial Sequence: Synthetic oligonucleotide
gaaugagcgagaucuccuc

SEQ ID NO: 2487046 - RNA, 19 nt, Artificial Sequence
  Description of Artificial Sequence: Synthetic oligonucleotide
uuagaugcgcugagagaga

SEQ ID NO: 2487047 - RNA, 19 nt, Artificial Sequence
  Description of Artificial Sequence: Synthetic oligonucleotide
uggugcuaaggccuucuga

SEQ ID NO: 2487048 - RNA, 19 nt, Artificial Sequence
  Description of Artificial Sequence: Synthetic oligonucleotide
agcuguucuccauccauca

SEQ ID NO: 2487049 - RNA, 19 nt, Artificial Sequence
  Description of Artificial Sequence: Synthetic oligonucleotide
gagagagccggguaugauc

SEQ ID NO: 2487050 - RNA, 19 nt, Artificial Sequence
  Description of Artificial Sequence: Synthetic oligonucleotide
uaguuuugucuuaggcugu

SEQ ID NO: 2487051 - RNA, 19 nt, Artificial Sequence
  Description of Artificial Sequence: Synthetic oligonucleotide
ucacggaagaaccgccaca

SEQ ID NO: 2487052 - RNA, 19 nt, Artificial Sequence
  Description of Artificial Sequence: Synthetic oligonucleotide
cugaccguuaggucucggg

SEQ ID NO: 2487053 - RNA, 19 nt, Artificial Sequence
  Description of Artificial Sequence: Synthetic oligonucleotide
ucagggcguagacaacacc

SEQ ID NO: 2487054 - RNA, 19 nt, Artificial Sequence
  Description of Artificial Sequence: Synthetic oligonucleotide
gagaucuccuccucuucug

SEQ ID NO: 2487055 - RNA, 19 nt, Artificial Sequence
  Description of Artificial Sequence: Synthetic oligonucleotide
uagggacauauaaaaugau

SEQ ID NO: 2487056 - RNA, 19 nt, Artificial Sequence
  Description of Artificial Sequence: Synthetic oligonucleotide
cuccaguaaaaccagccca

SEQ ID NO: 2487057 - RNA, 19 nt, Artificial Sequence
  Description of Artificial Sequence: Synthetic oligonucleotide
cacguaggagggaugccgg

SEQ ID NO: 2487058 - RNA, 19 nt, Artificial Sequence
  Description of Artificial Sequence: Synthetic oligonucleotide
gugaaugagcgagaucucc

SEQ ID NO: 2487059 - RNA, 19 nt, Artificial Sequence
  Description of Artificial Sequence: Synthetic oligonucleotide
ggacauauaaaaugauuaa

SEQ ID NO: 2487060 - RNA, 19 nt, Artificial Sequence
  Description of Artificial Sequence: Synthetic oligonucleotide
aacaccacagaugggguua

SEQ ID NO: 2487061 - RNA, 19 nt, Artificial Sequence
  Description of Artificial Sequence: Synthetic oligonucleotide
auacaccccgcucgucacc

SEQ ID NO: 2487062 - RNA, 19 nt, Artificial Sequence
  Description of Artificial Sequence: Synthetic oligonucleotide
cagggcguagacaacacca

SEQ ID NO: 2487063 - RNA, 19 nt, Artificial Sequence
  Description of Artificial Sequence: Synthetic oligonucleotide
agugugggugucugacuuc

SEQ ID NO: 2487064 - RNA, 19 nt, Artificial Sequence
  Description of Artificial Sequence: Synthetic oligonucleotide
cuucugaccguuaggucuc

SEQ ID NO: 2487065 - RNA, 19 nt, Artificial Sequence
  Description of Artificial Sequence: Synthetic oligonucleotide
accguuaggucucggguga

SEQ ID NO: 2487066 - RNA, 19 nt, Artificial Sequence
  Description of Artificial Sequence: Synthetic oligonucleotide
acaccgucagggcguagac

SEQ ID NO: 2487067 - RNA, 19 nt, Artificial Sequence
  Description of Artificial Sequence: Synthetic oligonucleotide
acggaagaaccgccacacc

SEQ ID NO: 2487068 - RNA, 19 nt, Artificial Sequence
  Description of Artificial Sequence: Synthetic oligonucleotide
gggacauauaaaaugauua

SEQ ID NO: 2487069 - RNA, 19 nt, Artificial Sequence
  Description of Artificial Sequence: Synthetic oligonucleotide
ccuuuaaugaaggguaggc

SEQ ID NO: 2487070 - RNA, 19 nt, Artificial Sequence
  Description of Artificial Sequence: Synthetic oligonucleotide
aggguaggcccguggguac

SEQ ID NO: 2487071 - RNA, 19 nt, Artificial Sequence
  Description of Artificial Sequence: Synthetic oligonucleotide
gaagaaccgccacaccguc

SEQ ID NO: 2487072 - RNA, 19 nt, Artificial Sequence
  Description of Artificial Sequence: Synthetic oligonucleotide
uuuggugcuaaggccuucu

SEQ ID NO: 2487073 - RNA, 19 nt, Artificial Sequence
  Description of Artificial Sequence: Synthetic oligonucleotide
ucugugcggucacggaaga

SEQ ID NO: 2487074 - RNA, 19 nt, Artificial Sequence
  Description of Artificial Sequence: Synthetic oligonucleotide
cacggaagaaccgccacac

SEQ ID NO: 2487075 - RNA, 19 nt, Artificial Sequence
  Description of Artificial Sequence: Synthetic oligonucleotide
guaggagggaugccggaac

SEQ ID NO: 2487076 - RNA, 19 nt, Artificial Sequence
  Description of Artificial Sequence: Synthetic oligonucleotide
gacuccuuuaaugaagggu

SEQ ID NO: 2487077 - RNA, 19 nt, Artificial Sequence
  Description of Artificial Sequence: Synthetic oligonucleotide
gccggaaccaggcauacac

SEQ ID NO: 2487078 - RNA, 19 nt, Artificial Sequence
  Description of Artificial Sequence: Synthetic oligonucleotide
ucccgauacuccaguaaaa

SEQ ID NO: 2487079 - RNA, 19 nt, Artificial Sequence
  Description of Artificial Sequence: Synthetic oligonucleotide
cgauacuccaguaaaacca

SEQ ID NO: 2487080 - RNA, 19 nt, Artificial Sequence
  Description of Artificial Sequence: Synthetic oligonucleotide
uggccaauuggauguaguu

SEQ ID NO: 2487081 - RNA, 19 nt, Artificial Sequence
  Description of Artificial Sequence: Synthetic oligonucleotide
gugcuaaggccuucugacc

SEQ ID NO: 2487082 - RNA, 19 nt, Artificial Sequence
  Description of Artificial Sequence: Synthetic oligonucleotide
aucccauuuaauauauuua

SEQ ID NO: 2487083 - RNA, 19 nt, Artificial Sequence
  Description of Artificial Sequence: Synthetic oligonucleotide
ggcguagacaacaccacag

SEQ ID NO: 2487084 - RNA, 19 nt, Artificial Sequence
  Description of Artificial Sequence: Synthetic oligonucleotide
ggcaauggguccgacaagc

SEQ ID NO: 2487085 - RNA, 19 nt, Artificial Sequence
  Description of Artificial Sequence: Synthetic oligonucleotide
agugaaugagcgagaucuc

SEQ ID NO: 2487086 - RNA, 19 nt, Artificial Sequence
  Description of Artificial Sequence: Synthetic oligonucleotide
agggcguagacaacaccac

SEQ ID NO: 2487087 - RNA, 19 nt, Artificial Sequence
  Description of Artificial Sequence: Synthetic oligonucleotide
cauacaccccgcucgucac

SEQ ID NO: 2487088 - RNA, 19 nt, Artificial Sequence
  Description of Artificial Sequence: Synthetic oligonucleotide
agagugugggugucugacu

SEQ ID NO: 2487089 - RNA, 19 nt, Artificial Sequence
  Description of Artificial Sequence: Synthetic oligonucleotide
cagagugugggugucugac

SEQ ID NO: 2487090 - RNA, 19 nt, Artificial Sequence
  Description of Artificial Sequence: Synthetic oligonucleotide
gggguuacacagcaucacc

SEQ ID NO: 2487091 - RNA, 19 nt, Artificial Sequence
  Description of Artificial Sequence: Synthetic oligonucleotide
agggacauauaaaaugauu

SEQ ID NO: 2487092 - RNA, 19 nt, Artificial Sequence
  Description of Artificial Sequence: Synthetic oligonucleotide
ugggguuacacagcaucac

SEQ ID NO: 2487093 - RNA, 19 nt, Artificial Sequence
  Description of Artificial Sequence: Synthetic oligonucleotide
gguccgacaagcugccucc

SEQ ID NO: 2487094 - RNA, 19 nt, Artificial Sequence
  Description of Artificial Sequence: Synthetic oligonucleotide
uuggugcuaaggccuucug

SEQ ID NO: 2487095 - RNA, 19 nt, Artificial Sequence
  Description of Artificial Sequence: Synthetic oligonucleotide
cggaagaaccgccacaccg

SEQ ID NO: 2487096 - RNA, 19 nt, Artificial Sequence
  Description of Artificial Sequence: Synthetic oligonucleotide
auggguccgacaagcugcc

SEQ ID NO: 2487097 - RNA, 19 nt, Artificial Sequence
  Description of Artificial Sequence: Synthetic oligonucleotide
uggauguaguuuugucuua

SEQ ID NO: 2487098 - RNA, 19 nt, Artificial Sequence
  Description of Artificial Sequence: Synthetic oligonucleotide
ugggucccgauacuccagu

SEQ ID NO: 2487099 - RNA, 19 nt, Artificial Sequence
  Description of Artificial Sequence: Synthetic oligonucleotide
ggugucugacuucucacuc

SEQ ID NO: 2487100 - RNA, 19 nt, Artificial Sequence
  Description of Artificial Sequence: Synthetic oligonucleotide
caaaugccggcauucagcu

SEQ ID NO: 2487101 - RNA, 19 nt, Artificial Sequence
  Description of Artificial Sequence: Synthetic oligonucleotide
uuaggcugugcagggccag

SEQ ID NO: 2487102 - RNA, 19 nt, Artificial Sequence
  Description of Artificial Sequence: Synthetic oligonucleotide
gucacggaagaaccgccac

SEQ ID NO: 2487103 - RNA, 19 nt, Artificial Sequence
  Description of Artificial Sequence: Synthetic oligonucleotide
caaguacaguuuuauuuua

SEQ ID NO: 2487104 - RNA, 19 nt, Artificial Sequence
  Description of Artificial Sequence: Synthetic oligonucleotide
agagacugccuggucccac

SEQ ID NO: 2487105 - RNA, 19 nt, Artificial Sequence
  Description of Artificial Sequence: Synthetic oligonucleotide
gcugugcagggccagagac

SEQ ID NO: 2487106 - RNA, 19 nt, Artificial Sequence
  Description of Artificial Sequence: Synthetic oligonucleotide
ggaguaauuagggacauau

SEQ ID NO: 2487107 - RNA, 19 nt, Artificial Sequence
  Description of Artificial Sequence: Synthetic oligonucleotide
auucugcaguggccaauug

SEQ ID NO: 2487108 - RNA, 19 nt, Artificial Sequence
  Description of Artificial Sequence: Synthetic oligonucleotide
gcauucagcuuuacaaccc

SEQ ID NO: 2487109 - RNA, 19 nt, Artificial Sequence
  Description of Artificial Sequence: Synthetic oligonucleotide
gguaugauccuuuggugcu

SEQ ID NO: 2487110 - RNA, 19 nt, Artificial Sequence
  Description of Artificial Sequence: Synthetic oligonucleotide
agcgagaucuccuccucuu

SEQ ID NO: 2487111 - RNA, 19 nt, Artificial Sequence
  Description of Artificial Sequence: Synthetic oligonucleotide
gacaagcugccuccacuca

SEQ ID NO: 2487112 - RNA, 19 nt, Artificial Sequence
  Description of Artificial Sequence: Synthetic oligonucleotide
acaccacagaugggguuac

SEQ ID NO: 2487113 - RNA, 19 nt, Artificial Sequence
  Description of Artificial Sequence: Synthetic oligonucleotide
agaugcgcugagagagagc

SEQ ID NO: 2487114 - RNA, 19 nt, Artificial Sequence
  Description of Artificial Sequence: Synthetic oligonucleotide
augggguuacacagcauca

SEQ ID NO: 2487115 - RNA, 19 nt, Artificial Sequence
  Description of Artificial Sequence: Synthetic oligonucleotide
uacaccccgcucgucacca

SEQ ID NO: 2487116 - RNA, 19 nt, Artificial Sequence
  Description of Artificial Sequence: Synthetic oligonucleotide
gcugucauuagcuguucuc

SEQ ID NO: 2487117 - RNA, 19 nt, Artificial Sequence
  Description of Artificial Sequence: Synthetic oligonucleotide
ccggcauucagcuuuacaa

SEQ ID NO: 2487118 - RNA, 19 nt, Artificial Sequence
  Description of Artificial Sequence: Synthetic oligonucleotide
guggguacccucuucuugu

SEQ ID NO: 2487119 - RNA, 19 nt, Artificial Sequence
  Description of Artificial Sequence: Synthetic oligonucleotide
uccgacaagcugccuccac

SEQ ID NO: 2487120 - RNA, 19 nt, Artificial Sequence
  Description of Artificial Sequence: Synthetic oligonucleotide
augccggaaccaggcauac

SEQ ID NO: 2487121 - RNA, 19 nt, Artificial Sequence
  Description of Artificial Sequence: Synthetic oligonucleotide
ucugcccucauagcuccac

SEQ ID NO: 2487122 - RNA, 19 nt, Artificial Sequence
  Description of Artificial Sequence: Synthetic oligonucleotide
gagacugccuggucccaca

SEQ ID NO: 2487123 - RNA, 19 nt, Artificial Sequence
  Description of Artificial Sequence: Synthetic oligonucleotide
aggcauacaccccgcucgu

SEQ ID NO: 2487124 - RNA, 19 nt, Artificial Sequence
  Description of Artificial Sequence: Synthetic oligonucleotide
uucugaccguuaggucucg

SEQ ID NO: 2487125 - RNA, 19 nt, Artificial Sequence
  Description of Artificial Sequence: Synthetic oligonucleotide
aaaucccauuuaauauauu

SEQ ID NO: 2487126 - RNA, 19 nt, Artificial Sequence
  Description of Artificial Sequence: Synthetic oligonucleotide
ucugaccguuaggucucgg

SEQ ID NO: 2487127 - RNA, 19 nt, Artificial Sequence
  Description of Artificial Sequence: Synthetic oligonucleotide
augauccuuuggugcuaag

SEQ ID NO: 2487128 - RNA, 19 nt, Artificial Sequence
  Description of Artificial Sequence: Synthetic oligonucleotide
acaaagccaagggcuguca

SEQ ID NO: 2487129 - RNA, 19 nt, Artificial Sequence
  Description of Artificial Sequence: Synthetic oligonucleotide
gagugugggugucugacuu

SEQ ID NO: 2487130 - RNA, 19 nt, Artificial Sequence
  Description of Artificial Sequence: Synthetic oligonucleotide
aagaaccgccacaccguca

SEQ ID NO: 2487131 - RNA, 19 nt, Artificial Sequence
  Description of Artificial Sequence: Synthetic oligonucleotide
gaugccggaaccaggcaua

SEQ ID NO: 2487132 - RNA, 19 nt, Artificial Sequence
  Description of Artificial Sequence: Synthetic oligonucleotide
gccaauuggauguaguuuu

SEQ ID NO: 2487133 - RNA, 19 nt, Artificial Sequence
  Description of Artificial Sequence: Synthetic oligonucleotide
ccacguaggagggaugccg

SEQ ID NO: 2487134 - RNA, 19 nt, Artificial Sequence
  Description of Artificial Sequence: Synthetic oligonucleotide
cagcccagcuuagaugcgc

SEQ ID NO: 2487135 - RNA, 19 nt, Artificial Sequence
  Description of Artificial Sequence: Synthetic oligonucleotide
gaaccgccacaccgucagg

SEQ ID NO: 2487136 - RNA, 19 nt, Artificial Sequence
  Description of Artificial Sequence: Synthetic oligonucleotide
gcauacaccccgcucguca

SEQ ID NO: 2487137 - RNA, 19 nt, Artificial Sequence
  Description of Artificial Sequence: Synthetic oligonucleotide
agccggguaugauccuuug

SEQ ID NO: 2487138 - RNA, 19 nt, Artificial Sequence
  Description of Artificial Sequence: Synthetic oligonucleotide
cugcccucauagcuccacc

SEQ ID NO: 2487139 - RNA, 19 nt, Artificial Sequence
  Description of Artificial Sequence: Synthetic oligonucleotide
ccaauuggauguaguuuug

SEQ ID NO: 2487140 - RNA, 19 nt, Artificial Sequence
  Description of Artificial Sequence: Synthetic oligonucleotide
uuaggucucgggugacauu

SEQ ID NO: 2487141 - RNA, 19 nt, Artificial Sequence
  Description of Artificial Sequence: Synthetic oligonucleotide
gaguaauuagggacauaua

SEQ ID NO: 2487142 - RNA, 19 nt, Artificial Sequence
  Description of Artificial Sequence: Synthetic oligonucleotide
agacaacaccacagauggg

SEQ ID NO: 2487143 - RNA, 19 nt, Artificial Sequence
  Description of Artificial Sequence: Synthetic oligonucleotide
gucaccagagugugggugu

SEQ ID NO: 2487144 - RNA, 19 nt, Artificial Sequence
  Description of Artificial Sequence: Synthetic oligonucleotide
gcuuuacaacccacaaagc

SEQ ID NO: 2487145 - RNA, 19 nt, Artificial Sequence
  Description of Artificial Sequence: Synthetic oligonucleotide
cccgauacuccaguaaaac

SEQ ID NO: 2487146 - RNA, 19 nt, Artificial Sequence
  Description of Artificial Sequence: Synthetic oligonucleotide
caucaaaugccggcauuca

SEQ ID NO: 2487147 - RNA, 19 nt, Artificial Sequence
  Description of Artificial Sequence: Synthetic oligonucleotide
gaaggguaggcccgugggu

SEQ ID NO: 2487148 - RNA, 19 nt, Artificial Sequence
  Description of Artificial Sequence: Synthetic oligonucleotide
acguaggagggaugccgga

SEQ ID NO: 2487149 - RNA, 19 nt, Artificial Sequence
  Description of Artificial Sequence: Synthetic oligonucleotide
ccuucugaccguuaggucu

SEQ ID NO: 2487150 - RNA, 19 nt, Artificial Sequence
  Description of Artificial Sequence: Synthetic oligonucleotide
gguacccucuucuuguacu

SEQ ID NO: 2487151 - RNA, 19 nt, Artificial Sequence
  Description of Artificial Sequence: Synthetic oligonucleotide
accaggcauacaccccgcu

SEQ ID NO: 2487152 - RNA, 19 nt, Artificial Sequence
  Description of Artificial Sequence: Synthetic oligonucleotide
cccauuuaauauauuuaaa

SEQ ID NO: 2487153 - RNA, 19 nt, Artificial Sequence
  Description of Artificial Sequence: Synthetic oligonucleotide
gccggguaugauccuuugg

SEQ ID NO: 2487154 - RNA, 19 nt, Artificial Sequence
  Description of Artificial Sequence: Synthetic oligonucleotide
gucauuagcuguucuccau

SEQ ID NO: 2487155 - RNA, 19 nt, Artificial Sequence
  Description of Artificial Sequence: Synthetic oligonucleotide
agggcugucauuagcuguu

SEQ ID NO: 2487156 - RNA, 19 nt, Artificial Sequence
  Description of Artificial Sequence: Synthetic oligonucleotide
agcaucaccugggucccga

SEQ ID NO: 2487157 - RNA, 19 nt, Artificial Sequence
  Description of Artificial Sequence: Synthetic oligonucleotide
cccucauagcuccaccuug

SEQ ID NO: 2487158 - RNA, 19 nt, Artificial Sequence
  Description of Artificial Sequence: Synthetic oligonucleotide
gugucugacuucucacucu

SEQ ID NO: 2487159 - RNA, 19 nt, Artificial Sequence
  Description of Artificial Sequence: Synthetic oligonucleotide
gcguagacaacaccacaga

SEQ ID NO: 2487160 - RNA, 19 nt, Artificial Sequence
  Description of Artificial Sequence: Synthetic oligonucleotide
ggguccgacaagcugccuc

SEQ ID NO: 2487161 - RNA, 19 nt, Artificial Sequence
  Description of Artificial Sequence: Synthetic oligonucleotide
gucuuaggcugugcagggc

SEQ ID NO: 2487162 - RNA, 19 nt, Artificial Sequence
  Description of Artificial Sequence: Synthetic oligonucleotide
gugacauucugaggaguaa

SEQ ID NO: 2487163 - RNA, 19 nt, Artificial Sequence
  Description of Artificial Sequence: Synthetic oligonucleotide
uggguacccucuucuugua

SEQ ID NO: 2487164 - RNA, 19 nt, Artificial Sequence
  Description of Artificial Sequence: Synthetic oligonucleotide
caguaaaaccagcccacgu

SEQ ID NO: 2487165 - RNA, 19 nt, Artificial Sequence
  Description of Artificial Sequence: Synthetic oligonucleotide
gucucgggugacauucuga

SEQ ID NO: 2487166 - RNA, 19 nt, Artificial Sequence
  Description of Artificial Sequence: Synthetic oligonucleotide
cugagagagagccggguau

SEQ ID NO: 2487167 - RNA, 19 nt, Artificial Sequence
  Description of Artificial Sequence: Synthetic oligonucleotide
ccuccuggcaauggguccg

SEQ ID NO: 2487168 - RNA, 19 nt, Artificial Sequence
  Description of Artificial Sequence: Synthetic oligonucleotide
ggugacauucugaggagua

SEQ ID NO: 2487169 - RNA, 19 nt, Artificial Sequence
  Description of Artificial Sequence: Synthetic oligonucleotide
ccggaaccaggcauacacc

SEQ ID NO: 2487170 - RNA, 19 nt, Artificial Sequence
  Description of Artificial Sequence: Synthetic oligonucleotide
accccgcucgucaccagag

SEQ ID NO: 2487171 - RNA, 19 nt, Artificial Sequence
  Description of Artificial Sequence: Synthetic oligonucleotide
gggcguagacaacaccaca

SEQ ID NO: 2487172 - RNA, 19 nt, Artificial Sequence
  Description of Artificial Sequence: Synthetic oligonucleotide
cacaccgucagggcguaga

SEQ ID NO: 2487173 - RNA, 19 nt, Artificial Sequence
  Description of Artificial Sequence: Synthetic oligonucleotide
gaggaguaauuagggacau

SEQ ID NO: 2487174 - RNA, 19 nt, Artificial Sequence
  Description of Artificial Sequence: Synthetic oligonucleotide
cuccacucaggagggugac

SEQ ID NO: 2487175 - RNA, 19 nt, Artificial Sequence
  Description of Artificial Sequence: Synthetic oligonucleotide
agagccggguaugauccuu

SEQ ID NO: 2487176 - RNA, 19 nt, Artificial Sequence
  Description of Artificial Sequence: Synthetic oligonucleotide
cggguaugauccuuuggug

SEQ ID NO: 2487177 - RNA, 19 nt, Artificial Sequence
  Description of Artificial Sequence: Synthetic oligonucleotide
caggagggugacaucaaau

SEQ ID NO: 2487178 - RNA, 19 nt, Artificial Sequence
  Description of Artificial Sequence: Synthetic oligonucleotide
guuaggucucgggugacau

SEQ ID NO: 2487179 - RNA, 19 nt, Artificial Sequence
  Description of Artificial Sequence: Synthetic oligonucleotide
guacaguaauuacuccguu

SEQ ID NO: 2487180 - RNA, 19 nt, Artificial Sequence
  Description of Artificial Sequence: Synthetic oligonucleotide
ccucauagcuccaccuuga

SEQ ID NO: 2487181 - RNA, 19 nt, Artificial Sequence
  Description of Artificial Sequence: Synthetic oligonucleotide
caauuggauguaguuuugu

SEQ ID NO: 2487182 - RNA, 19 nt, Artificial Sequence
  Description of Artificial Sequence: Synthetic oligonucleotide
cccgcucgucaccagagug

SEQ ID NO: 2487183 - RNA, 19 nt, Artificial Sequence
  Description of Artificial Sequence: Synthetic oligonucleotide
ggguuacacagcaucaccu

SEQ ID NO: 2487184 - RNA, 19 nt, Artificial Sequence
  Description of Artificial Sequence: Synthetic oligonucleotide
uaggcccguggguacccuc

SEQ ID NO: 2487185 - RNA, 19 nt, Artificial Sequence
  Description of Artificial Sequence: Synthetic oligonucleotide
guaugauccuuuggugcua

SEQ ID NO: 2487186 - RNA, 19 nt, Artificial Sequence
  Description of Artificial Sequence: Synthetic oligonucleotide
ccgccacaccgucagggcg

SEQ ID NO: 2487187 - RNA, 19 nt, Artificial Sequence
  Description of Artificial Sequence: Synthetic oligonucleotide
gcugagagagagccgggua

SEQ ID NO: 2487188 - RNA, 19 nt, Artificial Sequence
  Description of Artificial Sequence: Synthetic oligonucleotide
ugccggaaccaggcauaca

SEQ ID NO: 2487189 - RNA, 19 nt, Artificial Sequence
  Description of Artificial Sequence: Synthetic oligonucleotide
ggccuucugaccguuaggu

SEQ ID NO: 2487190 - RNA, 19 nt, Artificial Sequence
  Description of Artificial Sequence: Synthetic oligonucleotide
ggucacggaagaaccgcca

SEQ ID NO: 2487191 - RNA, 19 nt, Artificial Sequence
  Description of Artificial Sequence: Synthetic oligonucleotide
ggaugccggaaccaggcau

SEQ ID NO: 2487192 - RNA, 19 nt, Artificial Sequence
  Description of Artificial Sequence: Synthetic oligonucleotide
aggaguaauuagggacaua

SEQ ID NO: 2487193 - RNA, 19 nt, Artificial Sequence
  Description of Artificial Sequence: Synthetic oligonucleotide
guggccaauuggauguagu

SEQ ID NO: 2487194 - RNA, 19 nt, Artificial Sequence
  Description of Artificial Sequence: Synthetic oligonucleotide
gcgagaucuccuccucuuc

SEQ ID NO: 2487195 - RNA, 19 nt, Artificial Sequence
  Description of Artificial Sequence: Synthetic oligonucleotide
gguaucugugaaagaaaau

SEQ ID NO: 2487196 - RNA, 19 nt, Artificial Sequence
  Description of Artificial Sequence: Synthetic oligonucleotide
cggucacggaagaaccgcc

SEQ ID NO: 2487197 - RNA, 19 nt, Artificial Sequence
  Description of Artificial Sequence: Synthetic oligonucleotide
ccagcccagcuuagaugcg

SEQ ID NO: 2487198 - RNA, 19 nt, Artificial Sequence
  Description of Artificial Sequence: Synthetic oligonucleotide
gccggcauucagcuuuaca

SEQ ID NO: 2487199 - RNA, 19 nt, Artificial Sequence
  Description of Artificial Sequence: Synthetic oligonucleotide
gguaggcccguggguaccc

SEQ ID NO: 2487200 - RNA, 19 nt, Artificial Sequence
  Description of Artificial Sequence: Synthetic oligonucleotide
agaugggguuacacagcau

SEQ ID NO: 2487201 - RNA, 19 nt, Artificial Sequence
  Description of Artificial Sequence: Synthetic oligonucleotide
cgggugacauucugaggag

SEQ ID NO: 2487202 - RNA, 19 nt, Artificial Sequence
  Description of Artificial Sequence: Synthetic oligonucleotide
gcuguucuccauccaucaa

SEQ ID NO: 2487203 - RNA, 19 nt, Artificial Sequence
  Description of Artificial Sequence: Synthetic oligonucleotide
ccuccacucaggaggguga

SEQ ID NO: 2487204 - RNA, 19 nt, Artificial Sequence
  Description of Artificial Sequence: Synthetic oligonucleotide
caucaccugggucccgaua

SEQ ID NO: 2487205 - RNA, 19 nt, Artificial Sequence
  Description of Artificial Sequence: Synthetic oligonucleotide
caaagccaagggcugucau

SEQ ID NO: 2487206 - RNA, 19 nt, Artificial Sequence
  Description of Artificial Sequence: Synthetic oligonucleotide
cuccaccuugacuccuuua

SEQ ID NO: 2487207 - RNA, 19 nt, Artificial Sequence
  Description of Artificial Sequence: Synthetic oligonucleotide
cgucaccagagugugggug

SEQ ID NO: 2487208 - RNA, 19 nt, Artificial Sequence
  Description of Artificial Sequence: Synthetic oligonucleotide
cugcaguggccaauuggau

SEQ ID NO: 2487209 - RNA, 19 nt, Artificial Sequence
  Description of Artificial Sequence: Synthetic oligonucleotide
gcccagcuuagaugcgcug

SEQ ID NO: 2487210 - RNA, 19 nt, Artificial Sequence
  Description of Artificial Sequence: Synthetic oligonucleotide
caguaauuacuccguuauu

SEQ ID NO: 2487211 - RNA, 19 nt, Artificial Sequence
  Description of Artificial Sequence: Synthetic oligonucleotide
uccuggcaauggguccgac

SEQ ID NO: 2487212 - RNA, 19 nt, Artificial Sequence
  Description of Artificial Sequence: Synthetic oligonucleotide
gcucgucaccagagugugg

SEQ ID NO: 2487213 - RNA, 19 nt, Artificial Sequence
  Description of Artificial Sequence: Synthetic oligonucleotide
ggguaggcccguggguacc

SEQ ID NO: 2487214 - RNA, 19 nt, Artificial Sequence
  Description of Artificial Sequence: Synthetic oligonucleotide
uggguccgacaagcugccu

SEQ ID NO: 2487215 - RNA, 19 nt, Artificial Sequence
  Description of Artificial Sequence: Synthetic oligonucleotide
cgcucgucaccagagugug

SEQ ID NO: 2487216 - RNA, 19 nt, Artificial Sequence
  Description of Artificial Sequence: Synthetic oligonucleotide
ugccggcauucagcuuuac

SEQ ID NO: 2487217 - RNA, 19 nt, Artificial Sequence
  Description of Artificial Sequence: Synthetic oligonucleotide
cccacguaggagggaugcc

SEQ ID NO: 2487218 - RNA, 19 nt, Artificial Sequence
  Description of Artificial Sequence: Synthetic oligonucleotide
guccgacaagcugccucca

SEQ ID NO: 2487219 - RNA, 19 nt, Artificial Sequence
  Description of Artificial Sequence: Synthetic oligonucleotide
gagccggguaugauccuuu

SEQ ID NO: 2487220 - RNA, 19 nt, Artificial Sequence
  Description of Artificial Sequence: Synthetic oligonucleotide
gggugacauucugaggagu

SEQ ID NO: 2487221 - RNA, 19 nt, Artificial Sequence
  Description of Artificial Sequence: Synthetic oligonucleotide
augccggcauucagcuuua

SEQ ID NO: 2487222 - RNA, 19 nt, Artificial Sequence
  Description of Artificial Sequence: Synthetic oligonucleotide
ccgacaagcugccuccacu

SEQ ID NO: 2487223 - RNA, 19 nt, Artificial Sequence
  Description of Artificial Sequence: Synthetic oligonucleotide
cagcccacguaggagggau

SEQ ID NO: 2487224 - RNA, 19 nt, Artificial Sequence
  Description of Artificial Sequence: Synthetic oligonucleotide
ggcauacaccccgcucguc

SEQ ID NO: 2487225 - RNA, 19 nt, Artificial Sequence
  Description of Artificial Sequence: Synthetic oligonucleotide
gcaauggguccgacaagcu

SEQ ID NO: 2487226 - RNA, 19 nt, Artificial Sequence
  Description of Artificial Sequence: Synthetic oligonucleotide
cugugcggucacggaagaa

SEQ ID NO: 2487227 - RNA, 19 nt, Artificial Sequence
  Description of Artificial Sequence: Synthetic oligonucleotide
gcccguggguacccucuuc

SEQ ID NO: 2487228 - RNA, 19 nt, Artificial Sequence
  Description of Artificial Sequence: Synthetic oligonucleotide
cccguggguacccucuucu

SEQ ID NO: 2487229 - RNA, 19 nt, Artificial Sequence
  Description of Artificial Sequence: Synthetic oligonucleotide
ccgcucgucaccagagugu

SEQ ID NO: 2487230 - RNA, 19 nt, Artificial Sequence
  Description of Artificial Sequence: Synthetic oligonucleotide
gcccucauagcuccaccuu

SEQ ID NO: 2487231 - RNA, 19 nt, Artificial Sequence
  Description of Artificial Sequence: Synthetic oligonucleotide
ccaccuugacuccuuuaau

SEQ ID NO: 2487232 - RNA, 19 nt, Artificial Sequence
  Description of Artificial Sequence: Synthetic oligonucleotide
ccguuaggucucgggugac

SEQ ID NO: 2487233 - RNA, 19 nt, Artificial Sequence
  Description of Artificial Sequence: Synthetic oligonucleotide
caccagagugugggugucu

SEQ ID NO: 2487234 - RNA, 19 nt, Artificial Sequence
  Description of Artificial Sequence: Synthetic oligonucleotide
guaggcccguggguacccu

SEQ ID NO: 2487235 - RNA, 19 nt, Artificial Sequence
  Description of Artificial Sequence: Synthetic oligonucleotide
ccuuuggugcuaaggccuu

SEQ ID NO: 2487236 - RNA, 19 nt, Artificial Sequence
  Description of Artificial Sequence: Synthetic oligonucleotide
cguuaggucucgggugaca

SEQ ID NO: 2487237 - RNA, 19 nt, Artificial Sequence
  Description of Artificial Sequence: Synthetic oligonucleotide
cgccacaccgucagggcgu

SEQ ID NO: 2487238 - RNA, 19 nt, Artificial Sequence
  Description of Artificial Sequence: Synthetic oligonucleotide
gccacaccgucagggcgua

SEQ ID NO: 2487239 - RNA, 19 nt, Artificial Sequence
  Description of Artificial Sequence: Synthetic oligonucleotide
ccacaccgucagggcguag

SEQ ID NO: 2487240 - RNA, 19 nt, Artificial Sequence
  Description of Artificial Sequence: Synthetic oligonucleotide
ccguggguacccucuucuu

SEQ ID NO: 2487241 - RNA, 19 nt, Artificial Sequence
  Description of Artificial Sequence: Synthetic oligonucleotide
ccccgcucgucaccagagu

SEQ ID NO: 2487242 - RNA, 19 nt, Artificial Sequence
  Description of Artificial Sequence: Synthetic oligonucleotide
aaagcagcgacacagcacg

SEQ ID NO: 2487243 - RNA, 19 nt, Artificial Sequence
  Description of Artificial Sequence: Synthetic oligonucleotide
aauaccaccugucuccgcc

SEQ ID NO: 2487244 - RNA, 19 nt, Artificial Sequence
  Description of Artificial Sequence: Synthetic oligonucleotide
gaugcgaaggcuuuagggg

SEQ ID NO: 2487245 - RNA, 19 nt, Artificial Sequence
  Description of Artificial Sequence: Synthetic oligonucleotide
uucaauaccaccugucucc

SEQ ID NO: 2487246 - RNA, 19 nt, Artificial Sequence
  Description of Artificial Sequence: Synthetic oligonucleotide
uguucggucagcgagagcc

SEQ ID NO: 2487247 - RNA, 19 nt, Artificial Sequence
  Description of Artificial Sequence: Synthetic oligonucleotide
ucaccguacagcaaaagca

SEQ ID NO: 2487248 - RNA, 19 nt, Artificial Sequence
  Description of Artificial Sequence: Synthetic oligonucleotide
agaugcgaaggcuuuaggg

SEQ ID NO: 2487249 - RNA, 19 nt, Artificial Sequence
  Description of Artificial Sequence: Synthetic oligonucleotide
cucucaaggauucauuucc

SEQ ID NO: 2487250 - RNA, 19 nt, Artificial Sequence
  Description of Artificial Sequence: Synthetic oligonucleotide
uuuucaauaccaccugucu

SEQ ID NO: 2487251 - RNA, 19 nt, Artificial Sequence
  Description of Artificial Sequence: Synthetic oligonucleotide
acgaagggcgaucagcugc

SEQ ID NO: 2487252 - RNA, 19 nt, Artificial Sequence
  Description of Artificial Sequence: Synthetic oligonucleotide
aggagcaagggacagggac

SEQ ID NO: 2487253 - RNA, 19 nt, Artificial Sequence
  Description of Artificial Sequence: Synthetic oligonucleotide
aaggauucauuuccuuuuc

SEQ ID NO: 2487254 - RNA, 19 nt, Artificial Sequence
  Description of Artificial Sequence: Synthetic oligonucleotide
agggaaacgaacugggguc

SEQ ID NO: 2487255 - RNA, 19 nt, Artificial Sequence
  Description of Artificial Sequence: Synthetic oligonucleotide
gaaggagcaagggacaggg

SEQ ID NO: 2487256 - RNA, 19 nt, Artificial Sequence
  Description of Artificial Sequence: Synthetic oligonucleotide
guaacuccggaacacgugg

SEQ ID NO: 2487257 - RNA, 19 nt, Artificial Sequence
  Description of Artificial Sequence: Synthetic oligonucleotide
aaccccgggcaucucaagc

SEQ ID NO: 2487258 - RNA, 19 nt, Artificial Sequence
  Description of Artificial Sequence: Synthetic oligonucleotide
aaacgaacuggggucaccg

SEQ ID NO: 2487259 - RNA, 19 nt, Artificial Sequence
  Description of Artificial Sequence: Synthetic oligonucleotide
uuucaauaccaccugucuc

SEQ ID NO: 2487260 - RNA, 19 nt, Artificial Sequence
  Description of Artificial Sequence: Synthetic oligonucleotide
aaaagcagggagagcggcc

SEQ ID NO: 2487261 - RNA, 19 nt, Artificial Sequence
  Description of Artificial Sequence: Synthetic oligonucleotide
ugcgcagacagcuccauug

SEQ ID NO: 2487262 - RNA, 19 nt, Artificial Sequence
  Description of Artificial Sequence: Synthetic oligonucleotide
uuuaggggcaguguccggg

SEQ ID NO: 2487263 - RNA, 19 nt, Artificial Sequence
  Description of Artificial Sequence: Synthetic oligonucleotide
agcgacacagcacgaaggg

SEQ ID NO: 2487264 - RNA, 19 nt, Artificial Sequence
  Description of Artificial Sequence: Synthetic oligonucleotide
uccauugccagccgcagcu

SEQ ID NO: 2487265 - RNA, 19 nt, Artificial Sequence
  Description of Artificial Sequence: Synthetic oligonucleotide
ugggaaguuacuccacgcc

SEQ ID NO: 2487266 - RNA, 19 nt, Artificial Sequence
  Description of Artificial Sequence: Synthetic oligonucleotide
agcugcucgucguaacucc

SEQ ID NO: 2487267 - RNA, 19 nt, Artificial Sequence
  Description of Artificial Sequence: Synthetic oligonucleotide
gacagaucugagcccaggg

SEQ ID NO: 2487268 - RNA, 19 nt, Artificial Sequence
  Description of Artificial Sequence: Synthetic oligonucleotide
agagccgcaggauacgcuc

SEQ ID NO: 2487269 - RNA, 19 nt, Artificial Sequence
  Description of Artificial Sequence: Synthetic oligonucleotide
ucuguugaggguacguccu

SEQ ID NO: 2487270 - RNA, 19 nt, Artificial Sequence
  Description of Artificial Sequence: Synthetic oligonucleotide
ugggacaccugucuguuga

SEQ ID NO: 2487271 - RNA, 19 nt, Artificial Sequence
  Description of Artificial Sequence: Synthetic oligonucleotide
caccguacagcaaaagcag

SEQ ID NO: 2487272 - RNA, 19 nt, Artificial Sequence
  Description of Artificial Sequence: Synthetic oligonucleotide
ugaugugcugguuuguguc

SEQ ID NO: 2487273 - RNA, 19 nt, Artificial Sequence
  Description of Artificial Sequence: Synthetic oligonucleotide
gucaccguacagcaaaagc

SEQ ID NO: 2487274 - RNA, 19 nt, Artificial Sequence
  Description of Artificial Sequence: Synthetic oligonucleotide
guuugugucugggacaaag

SEQ ID NO: 2487275 - RNA, 19 nt, Artificial Sequence
  Description of Artificial Sequence: Synthetic oligonucleotide
ugaagagcugagaugcgaa

SEQ ID NO: 2487276 - RNA, 19 nt, Artificial Sequence
  Description of Artificial Sequence: Synthetic oligonucleotide
guacagcaaaagcagggag

SEQ ID NO: 2487277 - RNA, 19 nt, Artificial Sequence
  Description of Artificial Sequence: Synthetic oligonucleotide
aggcuuuaggggcaguguc

SEQ ID NO: 2487278 - RNA, 19 nt, Artificial Sequence
  Description of Artificial Sequence: Synthetic oligonucleotide
uugggaaguuacuccacgc

SEQ ID NO: 2487279 - RNA, 19 nt, Artificial Sequence
  Description of Artificial Sequence: Synthetic oligonucleotide
gucuguugaggguacgucc

SEQ ID NO: 2487280 - RNA, 19 nt, Artificial Sequence
  Description of Artificial Sequence: Synthetic oligonucleotide
ucaauaccaccugucuccg

SEQ ID NO: 2487281 - RNA, 19 nt, Artificial Sequence
  Description of Artificial Sequence: Synthetic oligonucleotide
gugucugggacaaagcagc

SEQ ID NO: 2487282 - RNA, 19 nt, Artificial Sequence
  Description of Artificial Sequence: Synthetic oligonucleotide
cacgccuguaucaaacccc

SEQ ID NO: 2487283 - RNA, 19 nt, Artificial Sequence
  Description of Artificial Sequence: Synthetic oligonucleotide
ugagaugcgaaggcuuuag

SEQ ID NO: 2487284 - RNA, 19 nt, Artificial Sequence
  Description of Artificial Sequence: Synthetic oligonucleotide
ucucaaggauucauuuccu

SEQ ID NO: 2487285 - RNA, 19 nt, Artificial Sequence
  Description of Artificial Sequence: Synthetic oligonucleotide
cucgucguaacuccggaac

SEQ ID NO: 2487286 - RNA, 19 nt, Artificial Sequence
  Description of Artificial Sequence: Synthetic oligonucleotide
gauacgcuccagcucuucc

SEQ ID NO: 2487287 - RNA, 19 nt, Artificial Sequence
  Description of Artificial Sequence: Synthetic oligonucleotide
auuugucgagcgcuccccg

SEQ ID NO: 2487288 - RNA, 19 nt, Artificial Sequence
  Description of Artificial Sequence: Synthetic oligonucleotide
uguugaggguacguccugg

SEQ ID NO: 2487289 - RNA, 19 nt, Artificial Sequence
  Description of Artificial Sequence: Synthetic oligonucleotide
uuacuccacgccuguauca

SEQ ID NO: 2487290 - RNA, 19 nt, Artificial Sequence
  Description of Artificial Sequence: Synthetic oligonucleotide
caaagcagcgacacagcac

SEQ ID NO: 2487291 - RNA, 19 nt, Artificial Sequence
  Description of Artificial Sequence: Synthetic oligonucleotide
aacuccggaacacguggcu

SEQ ID NO: 2487292 - RNA, 19 nt, Artificial Sequence
  Description of Artificial Sequence: Synthetic oligonucleotide
ucgucguaacuccggaaca

SEQ ID NO: 2487293 - RNA, 19 nt, Artificial Sequence
  Description of Artificial Sequence: Synthetic oligonucleotide
agggugaagagcugagaug

SEQ ID NO: 2487294 - RNA, 19 nt, Artificial Sequence
  Description of Artificial Sequence: Synthetic oligonucleotide
ucguaacuccggaacacgu

SEQ ID NO: 2487295 - RNA, 19 nt, Artificial Sequence
  Description of Artificial Sequence: Synthetic oligonucleotide
aguuacuccacgccuguau

SEQ ID NO: 2487296 - RNA, 19 nt, Artificial Sequence
  Description of Artificial Sequence: Synthetic oligonucleotide
uugaugugcugguuugugu

SEQ ID NO: 2487297 - RNA, 19 nt, Artificial Sequence
  Description of Artificial Sequence: Synthetic oligonucleotide
ugggacaaagcagcgacac

SEQ ID NO: 2487298 - RNA, 19 nt, Artificial Sequence
  Description of Artificial Sequence: Synthetic oligonucleotide
uacuguucggucagcgaga

SEQ ID NO: 2487299 - RNA, 19 nt, Artificial Sequence
  Description of Artificial Sequence: Synthetic oligonucleotide
agcaaggaggaggaccggc

SEQ ID NO: 2487300 - RNA, 19 nt, Artificial Sequence
  Description of Artificial Sequence: Synthetic oligonucleotide
uggagcacuggccacccac

SEQ ID NO: 2487301 - RNA, 19 nt, Artificial Sequence
  Description of Artificial Sequence: Synthetic oligonucleotide
cagagggcgcuacuguucg

SEQ ID NO: 2487302 - RNA, 19 nt, Artificial Sequence
  Description of Artificial Sequence: Synthetic oligonucleotide
uaacuccggaacacguggc

SEQ ID NO: 2487303 - RNA, 19 nt, Artificial Sequence
  Description of Artificial Sequence: Synthetic oligonucleotide
ugagcccagggaaacgaac

SEQ ID NO: 2487304 - RNA, 19 nt, Artificial Sequence
  Description of Artificial Sequence: Synthetic oligonucleotide
uccucucaaggauucauuu

SEQ ID NO: 2487305 - RNA, 19 nt, Artificial Sequence
  Description of Artificial Sequence: Synthetic oligonucleotide
gauuugucgagcgcucccc

SEQ ID NO: 2487306 - RNA, 19 nt, Artificial Sequence
  Description of Artificial Sequence: Synthetic oligonucleotide
augccucuagggcucuggc

SEQ ID NO: 2487307 - RNA, 19 nt, Artificial Sequence
  Description of Artificial Sequence: Synthetic oligonucleotide
aggauuugucgagcgcucc

SEQ ID NO: 2487308 - RNA, 19 nt, Artificial Sequence
  Description of Artificial Sequence: Synthetic oligonucleotide
gccuguaucaaaccccggg

SEQ ID NO: 2487309 - RNA, 19 nt, Artificial Sequence
  Description of Artificial Sequence: Synthetic oligonucleotide
agggagagcggccaugccu

SEQ ID NO: 2487310 - RNA, 19 nt, Artificial Sequence
  Description of Artificial Sequence: Synthetic oligonucleotide
agcgagagccgcaggauac

SEQ ID NO: 2487311 - RNA, 19 nt, Artificial Sequence
  Description of Artificial Sequence: Synthetic oligonucleotide
acguccugggaguuagguc

SEQ ID NO: 2487312 - RNA, 19 nt, Artificial Sequence
  Description of Artificial Sequence: Synthetic oligonucleotide
uaucaaaccccgggcaucu

SEQ ID NO: 2487313 - RNA, 19 nt, Artificial Sequence
  Description of Artificial Sequence: Synthetic oligonucleotide
acaccugggacaccugucu

SEQ ID NO: 2487314 - RNA, 19 nt, Artificial Sequence
  Description of Artificial Sequence: Synthetic oligonucleotide
cuccggaacacguggcugc

SEQ ID NO: 2487315 - RNA, 19 nt, Artificial Sequence
  Description of Artificial Sequence: Synthetic oligonucleotide
cuccacgccuguaucaaac

SEQ ID NO: 2487316 - RNA, 19 nt, Artificial Sequence
  Description of Artificial Sequence: Synthetic oligonucleotide
uccacgccuguaucaaacc

SEQ ID NO: 2487317 - RNA, 19 nt, Artificial Sequence
  Description of Artificial Sequence: Synthetic oligonucleotide
aggaccggccagaaggagc

SEQ ID NO: 2487318 - RNA, 19 nt, Artificial Sequence
  Description of Artificial Sequence: Synthetic oligonucleotide
cguccugggaguuaggucc

SEQ ID NO: 2487319 - RNA, 19 nt, Artificial Sequence
  Description of Artificial Sequence: Synthetic oligonucleotide
uuaggucccugcucucugc

SEQ ID NO: 2487320 - RNA, 19 nt, Artificial Sequence
  Description of Artificial Sequence: Synthetic oligonucleotide
auacgcuccagcucuuccu

SEQ ID NO: 2487321 - RNA, 19 nt, Artificial Sequence
  Description of Artificial Sequence: Synthetic oligonucleotide
gaacacguggcugcuggag

SEQ ID NO: 2487322 - RNA, 19 nt, Artificial Sequence
  Description of Artificial Sequence: Synthetic oligonucleotide
uuugucgagcgcuccccgc

SEQ ID NO: 2487323 - RNA, 19 nt, Artificial Sequence
  Description of Artificial Sequence: Synthetic oligonucleotide
aaaccccgggcaucucaag

SEQ ID NO: 2487324 - RNA, 19 nt, Artificial Sequence
  Description of Artificial Sequence: Synthetic oligonucleotide
gucguaacuccggaacacg

SEQ ID NO: 2487325 - RNA, 19 nt, Artificial Sequence
  Description of Artificial Sequence: Synthetic oligonucleotide
ugguuugugucugggacaa

SEQ ID NO: 2487326 - RNA, 19 nt, Artificial Sequence
  Description of Artificial Sequence: Synthetic oligonucleotide
ugcucgucguaacuccgga

SEQ ID NO: 2487327 - RNA, 19 nt, Artificial Sequence
  Description of Artificial Sequence: Synthetic oligonucleotide
ggagcaagggacagggacg

SEQ ID NO: 2487328 - RNA, 19 nt, Artificial Sequence
  Description of Artificial Sequence: Synthetic oligonucleotide
acgccuguaucaaaccccg

SEQ ID NO: 2487329 - RNA, 19 nt, Artificial Sequence
  Description of Artificial Sequence: Synthetic oligonucleotide
uugucgagcgcuccccgcu

SEQ ID NO: 2487330 - RNA, 19 nt, Artificial Sequence
  Description of Artificial Sequence: Synthetic oligonucleotide
ccguacagcaaaagcaggg

SEQ ID NO: 2487331 - RNA, 19 nt, Artificial Sequence
  Description of Artificial Sequence: Synthetic oligonucleotide
guuaggucccugcucucug

SEQ ID NO: 2487332 - RNA, 19 nt, Artificial Sequence
  Description of Artificial Sequence: Synthetic oligonucleotide
ucaagccuggugcgcagac

SEQ ID NO: 2487333 - RNA, 19 nt, Artificial Sequence
  Description of Artificial Sequence: Synthetic oligonucleotide
aacgaacuggggucaccgu

SEQ ID NO: 2487334 - RNA, 19 nt, Artificial Sequence
  Description of Artificial Sequence: Synthetic oligonucleotide
gccagaaggagcaagggac

SEQ ID NO: 2487335 - RNA, 19 nt, Artificial Sequence
  Description of Artificial Sequence: Synthetic oligonucleotide
uuaggggcaguguccggga

SEQ ID NO: 2487336 - RNA, 19 nt, Artificial Sequence
  Description of Artificial Sequence: Synthetic oligonucleotide
aggugcgcagacccggguc

SEQ ID NO: 2487337 - RNA, 19 nt, Artificial Sequence
  Description of Artificial Sequence: Synthetic oligonucleotide
accguacagcaaaagcagg

SEQ ID NO: 2487338 - RNA, 19 nt, Artificial Sequence
  Description of Artificial Sequence: Synthetic oligonucleotide
cagaucugagcccagggaa

SEQ ID NO: 2487339 - RNA, 19 nt, Artificial Sequence
  Description of Artificial Sequence: Synthetic oligonucleotide
ccuguaucaaaccccgggc

SEQ ID NO: 2487340 - RNA, 19 nt, Artificial Sequence
  Description of Artificial Sequence: Synthetic oligonucleotide
ucucaagccuggugcgcag

SEQ ID NO: 2487341 - RNA, 19 nt, Artificial Sequence
  Description of Artificial Sequence: Synthetic oligonucleotide
gcaucucaagccuggugcg

SEQ ID NO: 2487342 - RNA, 19 nt, Artificial Sequence
  Description of Artificial Sequence: Synthetic oligonucleotide
acuguucggucagcgagag

SEQ ID NO: 2487343 - RNA, 19 nt, Artificial Sequence
  Description of Artificial Sequence: Synthetic oligonucleotide
acgaugcuccucucaagga

SEQ ID NO: 2487344 - RNA, 19 nt, Artificial Sequence
  Description of Artificial Sequence: Synthetic oligonucleotide
cugcucgucguaacuccgg

SEQ ID NO: 2487345 - RNA, 19 nt, Artificial Sequence
  Description of Artificial Sequence: Synthetic oligonucleotide
ugcugguuugugucuggga

SEQ ID NO: 2487346 - RNA, 19 nt, Artificial Sequence
  Description of Artificial Sequence: Synthetic oligonucleotide
gaaacgaacuggggucacc

SEQ ID NO: 2487347 - RNA, 19 nt, Artificial Sequence
  Description of Artificial Sequence: Synthetic oligonucleotide
gcuuuaggggcaguguccg

SEQ ID NO: 2487348 - RNA, 19 nt, Artificial Sequence
  Description of Artificial Sequence: Synthetic oligonucleotide
uacguccugggaguuaggu

SEQ ID NO: 2487349 - RNA, 19 nt, Artificial Sequence
  Description of Artificial Sequence: Synthetic oligonucleotide
gguacguccugggaguuag

SEQ ID NO: 2487350 - RNA, 19 nt, Artificial Sequence
  Description of Artificial Sequence: Synthetic oligonucleotide
cuuuaggggcaguguccgg

SEQ ID NO: 2487351 - RNA, 19 nt, Artificial Sequence
  Description of Artificial Sequence: Synthetic oligonucleotide
ggggaggauuugucgagcg

SEQ ID NO: 2487352 - RNA, 19 nt, Artificial Sequence
  Description of Artificial Sequence: Synthetic oligonucleotide
gugcgcagacuccagcagc

SEQ ID NO: 2487353 - RNA, 19 nt, Artificial Sequence
  Description of Artificial Sequence: Synthetic oligonucleotide
cagacccggguccugcgcg

SEQ ID NO: 2487354 - RNA, 19 nt, Artificial Sequence
  Description of Artificial Sequence: Synthetic oligonucleotide
gggacagggacgaugcucc

SEQ ID NO: 2487355 - RNA, 19 nt, Artificial Sequence
  Description of Artificial Sequence: Synthetic oligonucleotide
ggaaguuacuccacgccug

SEQ ID NO: 2487356 - RNA, 19 nt, Artificial Sequence
  Description of Artificial Sequence: Synthetic oligonucleotide
gcucucugcacaugccugg

SEQ ID NO: 2487357 - RNA, 19 nt, Artificial Sequence
  Description of Artificial Sequence: Synthetic oligonucleotide
uccgggagaggggucagug

SEQ ID NO: 2487358 - RNA, 19 nt, Artificial Sequence
  Description of Artificial Sequence: Synthetic oligonucleotide
caggauacgcuccagcucu

SEQ ID NO: 2487359 - RNA, 19 nt, Artificial Sequence
  Description of Artificial Sequence: Synthetic oligonucleotide
aggguccgagcagagggcg

SEQ ID NO: 2487360 - RNA, 19 nt, Artificial Sequence
  Description of Artificial Sequence: Synthetic oligonucleotide
acgaacuggggucaccgua

SEQ ID NO: 2487361 - RNA, 19 nt, Artificial Sequence
  Description of Artificial Sequence: Synthetic oligonucleotide
cugguuugugucugggaca

SEQ ID NO: 2487362 - RNA, 19 nt, Artificial Sequence
  Description of Artificial Sequence: Synthetic oligonucleotide
agggcgcuacuguucgguc

SEQ ID NO: 2487363 - RNA, 19 nt, Artificial Sequence
  Description of Artificial Sequence: Synthetic oligonucleotide
gaugugcugguuugugucu

SEQ ID NO: 2487364 - RNA, 19 nt, Artificial Sequence
  Description of Artificial Sequence: Synthetic oligonucleotide
ggcgcuacuguucggucag

SEQ ID NO: 2487365 - RNA, 19 nt, Artificial Sequence
  Description of Artificial Sequence: Synthetic oligonucleotide
gcagcgacacagcacgaag

SEQ ID NO: 2487366 - RNA, 19 nt, Artificial Sequence
  Description of Artificial Sequence: Synthetic oligonucleotide
cucuuggcgugcucgccgc

SEQ ID NO: 2487367 - RNA, 19 nt, Artificial Sequence
  Description of Artificial Sequence: Synthetic oligonucleotide
gaaguuacuccacgccugu

SEQ ID NO: 2487368 - RNA, 19 nt, Artificial Sequence
  Description of Artificial Sequence: Synthetic oligonucleotide
uacuccacgccuguaucaa

SEQ ID NO: 2487369 - RNA, 19 nt, Artificial Sequence
  Description of Artificial Sequence: Synthetic oligonucleotide
caaggauucauuuccuuuu

SEQ ID NO: 2487370 - RNA, 19 nt, Artificial Sequence
  Description of Artificial Sequence: Synthetic oligonucleotide
acagcacgaagggcgauca

SEQ ID NO: 2487371 - RNA, 19 nt, Artificial Sequence
  Description of Artificial Sequence: Synthetic oligonucleotide
ggauuugucgagcgcuccc

SEQ ID NO: 2487372 - RNA, 19 nt, Artificial Sequence
  Description of Artificial Sequence: Synthetic oligonucleotide
agggacgaugcuccucuca

SEQ ID NO: 2487373 - RNA, 19 nt, Artificial Sequence
  Description of Artificial Sequence: Synthetic oligonucleotide
uucggucagcgagagccgc

SEQ ID NO: 2487374 - RNA, 19 nt, Artificial Sequence
  Description of Artificial Sequence: Synthetic oligonucleotide
aucucaagccuggugcgca

SEQ ID NO: 2487375 - RNA, 19 nt, Artificial Sequence
  Description of Artificial Sequence: Synthetic oligonucleotide
gaggguacguccugggagu

SEQ ID NO: 2487376 - RNA, 19 nt, Artificial Sequence
  Description of Artificial Sequence: Synthetic oligonucleotide
guaucaaaccccgggcauc

SEQ ID NO: 2487377 - RNA, 19 nt, Artificial Sequence
  Description of Artificial Sequence: Synthetic oligonucleotide
agugagcaaggaggaggac

SEQ ID NO: 2487378 - RNA, 19 nt, Artificial Sequence
  Description of Artificial Sequence: Synthetic oligonucleotide
uccugcgcggaguggguga

SEQ ID NO: 2487379 - RNA, 19 nt, Artificial Sequence
  Description of Artificial Sequence: Synthetic oligonucleotide
ggcgcugcggcgugggugg

SEQ ID NO: 2487380 - RNA, 19 nt, Artificial Sequence
  Description of Artificial Sequence: Synthetic oligonucleotide
cagggaaacgaacuggggu

SEQ ID NO: 2487381 - RNA, 19 nt, Artificial Sequence
  Description of Artificial Sequence: Synthetic oligonucleotide
uuggcgugcucgccgccgc

SEQ ID NO: 2487382 - RNA, 19 nt, Artificial Sequence
  Description of Artificial Sequence: Synthetic oligonucleotide
ucggucagcgagagccgca

SEQ ID NO: 2487383 - RNA, 19 nt, Artificial Sequence
  Description of Artificial Sequence: Synthetic oligonucleotide
cuggugcgcagacuccagc

SEQ ID NO: 2487384 - RNA, 19 nt, Artificial Sequence
  Description of Artificial Sequence: Synthetic oligonucleotide
caucucaagccuggugcgc

SEQ ID NO: 2487385 - RNA, 19 nt, Artificial Sequence
  Description of Artificial Sequence: Synthetic oligonucleotide
cuuggcgugcucgccgccg

SEQ ID NO: 2487386 - RNA, 19 nt, Artificial Sequence
  Description of Artificial Sequence: Synthetic oligonucleotide
ucuagggcucuggcuuggg

SEQ ID NO: 2487387 - RNA, 19 nt, Artificial Sequence
  Description of Artificial Sequence: Synthetic oligonucleotide
cacaccugggacaccuguc

SEQ ID NO: 2487388 - RNA, 19 nt, Artificial Sequence
  Description of Artificial Sequence: Synthetic oligonucleotide
ucccggcacaccugggaca

SEQ ID NO: 2487389 - RNA, 19 nt, Artificial Sequence
  Description of Artificial Sequence: Synthetic oligonucleotide
gaggauuugucgagcgcuc

SEQ ID NO: 2487390 - RNA, 19 nt, Artificial Sequence
  Description of Artificial Sequence: Synthetic oligonucleotide
ggugcgcagacuccagcag

SEQ ID NO: 2487391 - RNA, 19 nt, Artificial Sequence
  Description of Artificial Sequence: Synthetic oligonucleotide
uaccaccugucuccgcccu

SEQ ID NO: 2487392 - RNA, 19 nt, Artificial Sequence
  Description of Artificial Sequence: Synthetic oligonucleotide
gcggccaugccucuagggc

SEQ ID NO: 2487393 - RNA, 19 nt, Artificial Sequence
  Description of Artificial Sequence: Synthetic oligonucleotide
gaacuggggucaccguaca

SEQ ID NO: 2487394 - RNA, 19 nt, Artificial Sequence
  Description of Artificial Sequence: Synthetic oligonucleotide
cuccauugccagccgcagc

SEQ ID NO: 2487395 - RNA, 19 nt, Artificial Sequence
  Description of Artificial Sequence: Synthetic oligonucleotide
agcacuggccacccacccu

SEQ ID NO: 2487396 - RNA, 19 nt, Artificial Sequence
  Description of Artificial Sequence: Synthetic oligonucleotide
ucagcgagagccgcaggau

SEQ ID NO: 2487397 - RNA, 19 nt, Artificial Sequence
  Description of Artificial Sequence: Synthetic oligonucleotide
gagcgcuccccgcucccgg

SEQ ID NO: 2487398 - RNA, 19 nt, Artificial Sequence
  Description of Artificial Sequence: Synthetic oligonucleotide
agagggcgcuacuguucgg

SEQ ID NO: 2487399 - RNA, 19 nt, Artificial Sequence
  Description of Artificial Sequence: Synthetic oligonucleotide
cucccggcacaccugggac

SEQ ID NO: 2487400 - RNA, 19 nt, Artificial Sequence
  Description of Artificial Sequence: Synthetic oligonucleotide
accugucuguugaggguac

SEQ ID NO: 2487401 - RNA, 19 nt, Artificial Sequence
  Description of Artificial Sequence: Synthetic oligonucleotide
cuguugaggguacguccug

SEQ ID NO: 2487402 - RNA, 19 nt, Artificial Sequence
  Description of Artificial Sequence: Synthetic oligonucleotide
gcaaaagcagggagagcgg

SEQ ID NO: 2487403 - RNA, 19 nt, Artificial Sequence
  Description of Artificial Sequence: Synthetic oligonucleotide
cacgaagggcgaucagcug

SEQ ID NO: 2487404 - RNA, 19 nt, Artificial Sequence
  Description of Artificial Sequence: Synthetic oligonucleotide
ucuuggcgugcucgccgcc

SEQ ID NO: 2487405 - RNA, 19 nt, Artificial Sequence
  Description of Artificial Sequence: Synthetic oligonucleotide
ggggucaccguacagcaaa

SEQ ID NO: 2487406 - RNA, 19 nt, Artificial Sequence
  Description of Artificial Sequence: Synthetic oligonucleotide
aggggcaguguccgggaga

SEQ ID NO: 2487407 - RNA, 19 nt, Artificial Sequence
  Description of Artificial Sequence: Synthetic oligonucleotide
gugcugguuugugucuggg

SEQ ID NO: 2487408 - RNA, 19 nt, Artificial Sequence
  Description of Artificial Sequence: Synthetic oligonucleotide
ugucgagcgcuccccgcuc

SEQ ID NO: 2487409 - RNA, 19 nt, Artificial Sequence
  Description of Artificial Sequence: Synthetic oligonucleotide
cagcagcacggcaggugcg

SEQ ID NO: 2487410 - RNA, 19 nt, Artificial Sequence
  Description of Artificial Sequence: Synthetic oligonucleotide
uccucuuggcgugcucgcc

SEQ ID NO: 2487411 - RNA, 19 nt, Artificial Sequence
  Description of Artificial Sequence: Synthetic oligonucleotide
ccucucaaggauucauuuc

SEQ ID NO: 2487412 - RNA, 19 nt, Artificial Sequence
  Description of Artificial Sequence: Synthetic oligonucleotide
gcaagggacagggacgaug

SEQ ID NO: 2487413 - RNA, 19 nt, Artificial Sequence
  Description of Artificial Sequence: Synthetic oligonucleotide
ggcaggugcgcagacccgg

SEQ ID NO: 2487414 - RNA, 19 nt, Artificial Sequence
  Description of Artificial Sequence: Synthetic oligonucleotide
gggaggauuugucgagcgc

SEQ ID NO: 2487415 - RNA, 19 nt, Artificial Sequence
  Description of Artificial Sequence: Synthetic oligonucleotide
agccgcaggauacgcucca

SEQ ID NO: 2487416 - RNA, 19 nt, Artificial Sequence
  Description of Artificial Sequence: Synthetic oligonucleotide
ggagccgggacccgggcug

SEQ ID NO: 2487417 - RNA, 19 nt, Artificial Sequence
  Description of Artificial Sequence: Synthetic oligonucleotide
gcgaucagcugccucccag

SEQ ID NO: 2487418 - RNA, 19 nt, Artificial Sequence
  Description of Artificial Sequence: Synthetic oligonucleotide
gggaaguuacuccacgccu

SEQ ID NO: 2487419 - RNA, 19 nt, Artificial Sequence
  Description of Artificial Sequence: Synthetic oligonucleotide
ucgagcgcuccccgcuccc

SEQ ID NO: 2487420 - RNA, 19 nt, Artificial Sequence
  Description of Artificial Sequence: Synthetic oligonucleotide
caccugggacaccugucug

SEQ ID NO: 2487421 - RNA, 19 nt, Artificial Sequence
  Description of Artificial Sequence: Synthetic oligonucleotide
agcuccauugccagccgca

SEQ ID NO: 2487422 - RNA, 19 nt, Artificial Sequence
  Description of Artificial Sequence: Synthetic oligonucleotide
gagccgcaggauacgcucc

SEQ ID NO: 2487423 - RNA, 19 nt, Artificial Sequence
  Description of Artificial Sequence: Synthetic oligonucleotide
ccucuuggcgugcucgccg

SEQ ID NO: 2487424 - RNA, 19 nt, Artificial Sequence
  Description of Artificial Sequence: Synthetic oligonucleotide
ccguugaugugcugguuug

SEQ ID NO: 2487425 - RNA, 19 nt, Artificial Sequence
  Description of Artificial Sequence: Synthetic oligonucleotide
caaaccccgggcaucucaa

SEQ ID NO: 2487426 - RNA, 19 nt, Artificial Sequence
  Description of Artificial Sequence: Synthetic oligonucleotide
uggggucaccguacagcaa

SEQ ID NO: 2487427 - RNA, 19 nt, Artificial Sequence
  Description of Artificial Sequence: Synthetic oligonucleotide
cggaacacguggcugcugg

SEQ ID NO: 2487428 - RNA, 19 nt, Artificial Sequence
  Description of Artificial Sequence: Synthetic oligonucleotide
ggaggauuugucgagcgcu

SEQ ID NO: 2487429 - RNA, 19 nt, Artificial Sequence
  Description of Artificial Sequence: Synthetic oligonucleotide
cacagcacgaagggcgauc

SEQ ID NO: 2487430 - RNA, 19 nt, Artificial Sequence
  Description of Artificial Sequence: Synthetic oligonucleotide
cugggacaaagcagcgaca

SEQ ID NO: 2487431 - RNA, 19 nt, Artificial Sequence
  Description of Artificial Sequence: Synthetic oligonucleotide
gggacgaugcuccucucaa

SEQ ID NO: 2487432 - RNA, 19 nt, Artificial Sequence
  Description of Artificial Sequence: Synthetic oligonucleotide
gcgcagacagcuccauugc

SEQ ID NO: 2487433 - RNA, 19 nt, Artificial Sequence
  Description of Artificial Sequence: Synthetic oligonucleotide
gucgagcgcuccccgcucc

SEQ ID NO: 2487434 - RNA, 19 nt, Artificial Sequence
  Description of Artificial Sequence: Synthetic oligonucleotide
uguccgggagaggggucag

SEQ ID NO: 2487435 - RNA, 19 nt, Artificial Sequence
  Description of Artificial Sequence: Synthetic oligonucleotide
cagcacggcaggugcgcag

SEQ ID NO: 2487436 - RNA, 19 nt, Artificial Sequence
  Description of Artificial Sequence: Synthetic oligonucleotide
uccggaacacguggcugcu

SEQ ID NO: 2487437 - RNA, 19 nt, Artificial Sequence
  Description of Artificial Sequence: Synthetic oligonucleotide
gcugcucgucguaacuccg

SEQ ID NO: 2487438 - RNA, 19 nt, Artificial Sequence
  Description of Artificial Sequence: Synthetic oligonucleotide
aguguccgggagagggguc

SEQ ID NO: 2487439 - RNA, 19 nt, Artificial Sequence
  Description of Artificial Sequence: Synthetic oligonucleotide
agcacggcaggugcgcaga

SEQ ID NO: 2487440 - RNA, 19 nt, Artificial Sequence
  Description of Artificial Sequence: Synthetic oligonucleotide
agcagcgacacagcacgaa

SEQ ID NO: 2487441 - RNA, 19 nt, Artificial Sequence
  Description of Artificial Sequence: Synthetic oligonucleotide
acguggcugcuggagccgg

SEQ ID NO: 2487442 - RNA, 19 nt, Artificial Sequence
  Description of Artificial Sequence: Synthetic oligonucleotide
ccgggcaucucaagccugg

SEQ ID NO: 2487443 - RNA, 19 nt, Artificial Sequence
  Description of Artificial Sequence: Synthetic oligonucleotide
cugccucccagggugaaga

SEQ ID NO: 2487444 - RNA, 19 nt, Artificial Sequence
  Description of Artificial Sequence: Synthetic oligonucleotide
gcuacuguucggucagcga

SEQ ID NO: 2487445 - RNA, 19 nt, Artificial Sequence
  Description of Artificial Sequence: Synthetic oligonucleotide
cguaacuccggaacacgug

SEQ ID NO: 2487446 - RNA, 19 nt, Artificial Sequence
  Description of Artificial Sequence: Synthetic oligonucleotide
ugcuccucucaaggauuca

SEQ ID NO: 2487447 - RNA, 19 nt, Artificial Sequence
  Description of Artificial Sequence: Synthetic oligonucleotide
ucuccgcccuuggacagau

SEQ ID NO: 2487448 - RNA, 19 nt, Artificial Sequence
  Description of Artificial Sequence: Synthetic oligonucleotide
ggucaccguacagcaaaag

SEQ ID NO: 2487449 - RNA, 19 nt, Artificial Sequence
  Description of Artificial Sequence: Synthetic oligonucleotide
cgaagggcgaucagcugcc

SEQ ID NO: 2487450 - RNA, 19 nt, Artificial Sequence
  Description of Artificial Sequence: Synthetic oligonucleotide
aaguuacuccacgccugua

SEQ ID NO: 2487451 - RNA, 19 nt, Artificial Sequence
  Description of Artificial Sequence: Synthetic oligonucleotide
gggagagcggccaugccuc

SEQ ID NO: 2487452 - RNA, 19 nt, Artificial Sequence
  Description of Artificial Sequence: Synthetic oligonucleotide
gggacaccugucuguugag

SEQ ID NO: 2487453 - RNA, 19 nt, Artificial Sequence
  Description of Artificial Sequence: Synthetic oligonucleotide
caccggcuggcgcugcggc

SEQ ID NO: 2487454 - RNA, 19 nt, Artificial Sequence
  Description of Artificial Sequence: Synthetic oligonucleotide
accugucuccgcccuugga

SEQ ID NO: 2487455 - RNA, 19 nt, Artificial Sequence
  Description of Artificial Sequence: Synthetic oligonucleotide
caccugucuccgcccuugg

SEQ ID NO: 2487456 - RNA, 19 nt, Artificial Sequence
  Description of Artificial Sequence: Synthetic oligonucleotide
cgaucagcugccucccagg

SEQ ID NO: 2487457 - RNA, 19 nt, Artificial Sequence
  Description of Artificial Sequence: Synthetic oligonucleotide
aucaaaccccgggcaucuc

SEQ ID NO: 2487458 - RNA, 19 nt, Artificial Sequence
  Description of Artificial Sequence: Synthetic oligonucleotide
uccgagcagagggcgcuac

SEQ ID NO: 2487459 - RNA, 19 nt, Artificial Sequence
  Description of Artificial Sequence: Synthetic oligonucleotide
gggaaacgaacugggguca

SEQ ID NO: 2487460 - RNA, 19 nt, Artificial Sequence
  Description of Artificial Sequence: Synthetic oligonucleotide
cacaugccuggagcacugg

SEQ ID NO: 2487461 - RNA, 19 nt, Artificial Sequence
  Description of Artificial Sequence: Synthetic oligonucleotide
gcagggagagcggccaugc

SEQ ID NO: 2487462 - RNA, 19 nt, Artificial Sequence
  Description of Artificial Sequence: Synthetic oligonucleotide
cagggagagcggccaugcc

SEQ ID NO: 2487463 - RNA, 19 nt, Artificial Sequence
  Description of Artificial Sequence: Synthetic oligonucleotide
cuagggcucuggcuuggga

SEQ ID NO: 2487464 - RNA, 19 nt, Artificial Sequence
  Description of Artificial Sequence: Synthetic oligonucleotide
cacggcaggugcgcagacc

SEQ ID NO: 2487465 - RNA, 19 nt, Artificial Sequence
  Description of Artificial Sequence: Synthetic oligonucleotide
aagcagcgacacagcacga

SEQ ID NO: 2487466 - RNA, 19 nt, Artificial Sequence
  Description of Artificial Sequence: Synthetic oligonucleotide
uggcgugcucgccgccgcc

SEQ ID NO: 2487467 - RNA, 19 nt, Artificial Sequence
  Description of Artificial Sequence: Synthetic oligonucleotide
guguccgggagagggguca

SEQ ID NO: 2487468 - RNA, 19 nt, Artificial Sequence
  Description of Artificial Sequence: Synthetic oligonucleotide
cuguucggucagcgagagc

SEQ ID NO: 2487469 - RNA, 19 nt, Artificial Sequence
  Description of Artificial Sequence: Synthetic oligonucleotide
guacguccugggaguuagg

SEQ ID NO: 2487470 - RNA, 19 nt, Artificial Sequence
  Description of Artificial Sequence: Synthetic oligonucleotide
gagggcgcuacuguucggu

SEQ ID NO: 2487471 - RNA, 19 nt, Artificial Sequence
  Description of Artificial Sequence: Synthetic oligonucleotide
cagcacgaagggcgaucag

SEQ ID NO: 2487472 - RNA, 19 nt, Artificial Sequence
  Description of Artificial Sequence: Synthetic oligonucleotide
caccugucuguugagggua

SEQ ID NO: 2487473 - RNA, 19 nt, Artificial Sequence
  Description of Artificial Sequence: Synthetic oligonucleotide
gggcgcuacuguucgguca

SEQ ID NO: 2487474 - RNA, 19 nt, Artificial Sequence
  Description of Artificial Sequence: Synthetic oligonucleotide
gcgagagccgcaggauacg

SEQ ID NO: 2487475 - RNA, 19 nt, Artificial Sequence
  Description of Artificial Sequence: Synthetic oligonucleotide
gcgacacagcacgaagggc

SEQ ID NO: 2487476 - RNA, 19 nt, Artificial Sequence
  Description of Artificial Sequence: Synthetic oligonucleotide
acccggguccugcgcggag

SEQ ID NO: 2487477 - RNA, 19 nt, Artificial Sequence
  Description of Artificial Sequence: Synthetic oligonucleotide
ggaaacgaacuggggucac

SEQ ID NO: 2487478 - RNA, 19 nt, Artificial Sequence
  Description of Artificial Sequence: Synthetic oligonucleotide
guccugcgcggagugggug

SEQ ID NO: 2487479 - RNA, 19 nt, Artificial Sequence
  Description of Artificial Sequence: Synthetic oligonucleotide
gcagacccggguccugcgc

SEQ ID NO: 2487480 - RNA, 19 nt, Artificial Sequence
  Description of Artificial Sequence: Synthetic oligonucleotide
ccuggugcgcagacuccag

SEQ ID NO: 2487481 - RNA, 19 nt, Artificial Sequence
  Description of Artificial Sequence: Synthetic oligonucleotide
gcacaugccuggagcacug

SEQ ID NO: 2487482 - RNA, 19 nt, Artificial Sequence
  Description of Artificial Sequence: Synthetic oligonucleotide
ccgcaggauacgcuccagc

SEQ ID NO: 2487483 - RNA, 19 nt, Artificial Sequence
  Description of Artificial Sequence: Synthetic oligonucleotide
cagcgagagccgcaggaua

SEQ ID NO: 2487484 - RNA, 19 nt, Artificial Sequence
  Description of Artificial Sequence: Synthetic oligonucleotide
ggaacacguggcugcugga

SEQ ID NO: 2487485 - RNA, 19 nt, Artificial Sequence
  Description of Artificial Sequence: Synthetic oligonucleotide
gcaggugcgcagacccggg

SEQ ID NO: 2487486 - RNA, 19 nt, Artificial Sequence
  Description of Artificial Sequence: Synthetic oligonucleotide
gcucccggcacaccuggga

SEQ ID NO: 2487487 - RNA, 19 nt, Artificial Sequence
  Description of Artificial Sequence: Synthetic oligonucleotide
cugcggcguggguggggcg

SEQ ID NO: 2487488 - RNA, 19 nt, Artificial Sequence
  Description of Artificial Sequence: Synthetic oligonucleotide
cgucguaacuccggaacac

SEQ ID NO: 2487489 - RNA, 19 nt, Artificial Sequence
  Description of Artificial Sequence: Synthetic oligonucleotide
gcggagugggugagggucc

SEQ ID NO: 2487490 - RNA, 19 nt, Artificial Sequence
  Description of Artificial Sequence: Synthetic oligonucleotide
cagggacgaugcuccucuc

SEQ ID NO: 2487491 - RNA, 19 nt, Artificial Sequence
  Description of Artificial Sequence: Synthetic oligonucleotide
cgcuacuguucggucagcg

SEQ ID NO: 2487492 - RNA, 19 nt, Artificial Sequence
  Description of Artificial Sequence: Synthetic oligonucleotide
ccuggagcacuggccaccc

SEQ ID NO: 2487493 - RNA, 19 nt, Artificial Sequence
  Description of Artificial Sequence: Synthetic oligonucleotide
cguacagcaaaagcaggga

SEQ ID NO: 2487494 - RNA, 19 nt, Artificial Sequence
  Description of Artificial Sequence: Synthetic oligonucleotide
cugagaugcgaaggcuuua

SEQ ID NO: 2487495 - RNA, 19 nt, Artificial Sequence
  Description of Artificial Sequence: Synthetic oligonucleotide
gacccgggcugggccgagg

SEQ ID NO: 2487496 - RNA, 19 nt, Artificial Sequence
  Description of Artificial Sequence: Synthetic oligonucleotide
gcgaaggcuuuaggggcag

SEQ ID NO: 2487497 - RNA, 19 nt, Artificial Sequence
  Description of Artificial Sequence: Synthetic oligonucleotide
acacagcacgaagggcgau

SEQ ID NO: 2487498 - RNA, 19 nt, Artificial Sequence
  Description of Artificial Sequence: Synthetic oligonucleotide
cucaagccuggugcgcaga

SEQ ID NO: 2487499 - RNA, 19 nt, Artificial Sequence
  Description of Artificial Sequence: Synthetic oligonucleotide
gcagcugcucgucguaacu

SEQ ID NO: 2487500 - RNA, 19 nt, Artificial Sequence
  Description of Artificial Sequence: Synthetic oligonucleotide
cgcggagugggugaggguc

SEQ ID NO: 2487501 - RNA, 19 nt, Artificial Sequence
  Description of Artificial Sequence: Synthetic oligonucleotide
aggguacguccugggaguu

SEQ ID NO: 2487502 - RNA, 19 nt, Artificial Sequence
  Description of Artificial Sequence: Synthetic oligonucleotide
ggauacgcuccagcucuuc

SEQ ID NO: 2487503 - RNA, 19 nt, Artificial Sequence
  Description of Artificial Sequence: Synthetic oligonucleotide
gcucgucguaacuccggaa

SEQ ID NO: 2487504 - RNA, 19 nt, Artificial Sequence
  Description of Artificial Sequence: Synthetic oligonucleotide
cccgggcaucucaagccug

SEQ ID NO: 2487505 - RNA, 19 nt, Artificial Sequence
  Description of Artificial Sequence: Synthetic oligonucleotide
cugcuggagccgggacccg

SEQ ID NO: 2487506 - RNA, 19 nt, Artificial Sequence
  Description of Artificial Sequence: Synthetic oligonucleotide
gcugccucccagggugaag

SEQ ID NO: 2487507 - RNA, 19 nt, Artificial Sequence
  Description of Artificial Sequence: Synthetic oligonucleotide
gucuccgcccuuggacaga

SEQ ID NO: 2487508 - RNA, 19 nt, Artificial Sequence
  Description of Artificial Sequence: Synthetic oligonucleotide
agcaagggacagggacgau

SEQ ID NO: 2487509 - RNA, 19 nt, Artificial Sequence
  Description of Artificial Sequence: Synthetic oligonucleotide
cgcagcugcucgucguaac

SEQ ID NO: 2487510 - RNA, 19 nt, Artificial Sequence
  Description of Artificial Sequence: Synthetic oligonucleotide
gagagcggccaugccucua

SEQ ID NO: 2487511 - RNA, 19 nt, Artificial Sequence
  Description of Artificial Sequence: Synthetic oligonucleotide
gacccggguccugcgcgga

SEQ ID NO: 2487512 - RNA, 19 nt, Artificial Sequence
  Description of Artificial Sequence: Synthetic oligonucleotide
agccgggacccgggcuggg

SEQ ID NO: 2487513 - RNA, 19 nt, Artificial Sequence
  Description of Artificial Sequence: Synthetic oligonucleotide
ggcccguugaugugcuggu

SEQ ID NO: 2487514 - RNA, 19 nt, Artificial Sequence
  Description of Artificial Sequence: Synthetic oligonucleotide
gcgcagacuccagcagcag

SEQ ID NO: 2487515 - RNA, 19 nt, Artificial Sequence
  Description of Artificial Sequence: Synthetic oligonucleotide
ccugcgcggagugggugag

SEQ ID NO: 2487516 - RNA, 19 nt, Artificial Sequence
  Description of Artificial Sequence: Synthetic oligonucleotide
aggauacgcuccagcucuu

SEQ ID NO: 2487517 - RNA, 19 nt, Artificial Sequence
  Description of Artificial Sequence: Synthetic oligonucleotide
cgcaggauacgcuccagcu

SEQ ID NO: 2487518 - RNA, 19 nt, Artificial Sequence
  Description of Artificial Sequence: Synthetic oligonucleotide
cgcccuuggacagaucuga

SEQ ID NO: 2487519 - RNA, 19 nt, Artificial Sequence
  Description of Artificial Sequence: Synthetic oligonucleotide
cgcagacccggguccugcg

SEQ ID NO: 2487520 - RNA, 19 nt, Artificial Sequence
  Description of Artificial Sequence: Synthetic oligonucleotide
cgccuguaucaaaccccgg

SEQ ID NO: 2487521 - RNA, 19 nt, Artificial Sequence
  Description of Artificial Sequence: Synthetic oligonucleotide
gaagggcgaucagcugccu

SEQ ID NO: 2487522 - RNA, 19 nt, Artificial Sequence
  Description of Artificial Sequence: Synthetic oligonucleotide
cgggacccgggcugggccg

SEQ ID NO: 2487523 - RNA, 19 nt, Artificial Sequence
  Description of Artificial Sequence: Synthetic oligonucleotide
gcuccucucaaggauucau

SEQ ID NO: 2487524 - RNA, 19 nt, Artificial Sequence
  Description of Artificial Sequence: Synthetic oligonucleotide
gcacggcaggugcgcagac

SEQ ID NO: 2487525 - RNA, 19 nt, Artificial Sequence
  Description of Artificial Sequence: Synthetic oligonucleotide
ggcgaucagcugccuccca

SEQ ID NO: 2487526 - RNA, 19 nt, Artificial Sequence
  Description of Artificial Sequence: Synthetic oligonucleotide
cuggagcacuggccaccca

SEQ ID NO: 2487527 - RNA, 19 nt, Artificial Sequence
  Description of Artificial Sequence: Synthetic oligonucleotide
ggcguggguggggcgcucc

SEQ ID NO: 2487528 - RNA, 19 nt, Artificial Sequence
  Description of Artificial Sequence: Synthetic oligonucleotide
gggucaccguacagcaaaa

SEQ ID NO: 2487529 - RNA, 19 nt, Artificial Sequence
  Description of Artificial Sequence: Synthetic oligonucleotide
cuccgcccuuggacagauc

SEQ ID NO: 2487530 - RNA, 19 nt, Artificial Sequence
  Description of Artificial Sequence: Synthetic oligonucleotide
cggcaggugcgcagacccg

SEQ ID NO: 2487531 - RNA, 19 nt, Artificial Sequence
  Description of Artificial Sequence: Synthetic oligonucleotide
caggugcgcagacccgggu

SEQ ID NO: 2487532 - RNA, 19 nt, Artificial Sequence
  Description of Artificial Sequence: Synthetic oligonucleotide
gcagcacggcaggugcgca

SEQ ID NO: 2487533 - RNA, 19 nt, Artificial Sequence
  Description of Artificial Sequence: Synthetic oligonucleotide
ggacagggacgaugcuccu

SEQ ID NO: 2487534 - RNA, 19 nt, Artificial Sequence
  Description of Artificial Sequence: Synthetic oligonucleotide
gcgcuacuguucggucagc

SEQ ID NO: 2487535 - RNA, 19 nt, Artificial Sequence
  Description of Artificial Sequence: Synthetic oligonucleotide
gugcgcagacccggguccu

SEQ ID NO: 2487536 - RNA, 19 nt, Artificial Sequence
  Description of Artificial Sequence: Synthetic oligonucleotide
gguuugugucugggacaaa

SEQ ID NO: 2487537 - RNA, 19 nt, Artificial Sequence
  Description of Artificial Sequence: Synthetic oligonucleotide
cgagcgcuccccgcucccg

SEQ ID NO: 2487538 - RNA, 19 nt, Artificial Sequence
  Description of Artificial Sequence: Synthetic oligonucleotide
ggguacguccugggaguua

SEQ ID NO: 2487539 - RNA, 19 nt, Artificial Sequence
  Description of Artificial Sequence: Synthetic oligonucleotide
ccggaacacguggcugcug

SEQ ID NO: 2487540 - RNA, 19 nt, Artificial Sequence
  Description of Artificial Sequence: Synthetic oligonucleotide
guccgagcagagggcgcua

SEQ ID NO: 2487541 - RNA, 19 nt, Artificial Sequence
  Description of Artificial Sequence: Synthetic oligonucleotide
cgcucccggcacaccuggg

SEQ ID NO: 2487542 - RNA, 19 nt, Artificial Sequence
  Description of Artificial Sequence: Synthetic oligonucleotide
gggacccgggcugggccga

SEQ ID NO: 2487543 - RNA, 19 nt, Artificial Sequence
  Description of Artificial Sequence: Synthetic oligonucleotide
ggacccgggcugggccgag

SEQ ID NO: 2487544 - RNA, 19 nt, Artificial Sequence
  Description of Artificial Sequence: Synthetic oligonucleotide
ccccgggcaucucaagccu

SEQ ID NO: 2487545 - RNA, 19 nt, Artificial Sequence
  Description of Artificial Sequence: Synthetic oligonucleotide
gggccgagggcugggcacu

SEQ ID NO: 2487546 - RNA, 19 nt, Artificial Sequence
  Description of Artificial Sequence: Synthetic oligonucleotide
ggcucuggcuugggaaguu

SEQ ID NO: 2487547 - RNA, 19 nt, Artificial Sequence
  Description of Artificial Sequence: Synthetic oligonucleotide
cuggcgcugcggcgugggu

SEQ ID NO: 2487548 - RNA, 19 nt, Artificial Sequence
  Description of Artificial Sequence: Synthetic oligonucleotide
cggcacaccugggacaccu

SEQ ID NO: 2487549 - RNA, 19 nt, Artificial Sequence
  Description of Artificial Sequence: Synthetic oligonucleotide
gcgcggagugggugagggu

SEQ ID NO: 2487550 - RNA, 19 nt, Artificial Sequence
  Description of Artificial Sequence: Synthetic oligonucleotide
gcccguugaugugcugguu

SEQ ID NO: 2487551 - RNA, 19 nt, Artificial Sequence
  Description of Artificial Sequence: Synthetic oligonucleotide
gcggcguggguggggcgcu

SEQ ID NO: 2487552 - RNA, 19 nt, Artificial Sequence
  Description of Artificial Sequence: Synthetic oligonucleotide
cggcguggguggggcgcuc

SEQ ID NO: 2487553 - RNA, 19 nt, Artificial Sequence
  Description of Artificial Sequence: Synthetic oligonucleotide
ucauuauucagcaagaagg

SEQ ID NO: 2487554 - RNA, 19 nt, Artificial Sequence
  Description of Artificial Sequence: Synthetic oligonucleotide
ucuaauuucagaaacagag

SEQ ID NO: 2487555 - RNA, 19 nt, Artificial Sequence
  Description of Artificial Sequence: Synthetic oligonucleotide
auucacuugauuuugcucc

SEQ ID NO: 2487556 - RNA, 19 nt, Artificial Sequence
  Description of Artificial Sequence: Synthetic oligonucleotide
aacuugaggaguuucauuc

SEQ ID NO: 2487557 - RNA, 19 nt, Artificial Sequence
  Description of Artificial Sequence: Synthetic oligonucleotide
aaaucugggcacuacaugg

SEQ ID NO: 2487558 - RNA, 19 nt, Artificial Sequence
  Description of Artificial Sequence: Synthetic oligonucleotide
aauaacuacauucuaauuu

SEQ ID NO: 2487559 - RNA, 19 nt, Artificial Sequence
  Description of Artificial Sequence: Synthetic oligonucleotide
uaaacugguagaauugugg

SEQ ID NO: 2487560 - RNA, 19 nt, Artificial Sequence
  Description of Artificial Sequence: Synthetic oligonucleotide
aaacugguagaauuguggg

SEQ ID NO: 2487561 - RNA, 19 nt, Artificial Sequence
  Description of Artificial Sequence: Synthetic oligonucleotide
auagccuugaugcggaugc

SEQ ID NO: 2487562 - RNA, 19 nt, Artificial Sequence
  Description of Artificial Sequence: Synthetic oligonucleotide
uguagauaacuacaucugg

SEQ ID NO: 2487563 - RNA, 19 nt, Artificial Sequence
  Description of Artificial Sequence: Synthetic oligonucleotide
agcauagugaaucucagag

SEQ ID NO: 2487564 - RNA, 19 nt, Artificial Sequence
  Description of Artificial Sequence: Synthetic oligonucleotide
ugagugaacacacuagucc

SEQ ID NO: 2487565 - RNA, 19 nt, Artificial Sequence
  Description of Artificial Sequence: Synthetic oligonucleotide
aagcugaacacuugguagc

SEQ ID NO: 2487566 - RNA, 19 nt, Artificial Sequence
  Description of Artificial Sequence: Synthetic oligonucleotide
aaggugaagaagacgaucc

SEQ ID NO: 2487567 - RNA, 19 nt, Artificial Sequence
  Description of Artificial Sequence: Synthetic oligonucleotide
aaaugcacuucauaaaagu

SEQ ID NO: 2487568 - RNA, 19 nt, Artificial Sequence
  Description of Artificial Sequence: Synthetic oligonucleotide
auugcugggagauugcacg

SEQ ID NO: 2487569 - RNA, 19 nt, Artificial Sequence
  Description of Artificial Sequence: Synthetic oligonucleotide
gacaguagaaaauaacuac

SEQ ID NO: 2487570 - RNA, 19 nt, Artificial Sequence
  Description of Artificial Sequence: Synthetic oligonucleotide
ggagagauagccuugaugc

SEQ ID NO: 2487571 - RNA, 19 nt, Artificial Sequence
  Description of Artificial Sequence: Synthetic oligonucleotide
cauuauucagcaagaaggg

SEQ ID NO: 2487572 - RNA, 19 nt, Artificial Sequence
  Description of Artificial Sequence: Synthetic oligonucleotide
cauaucuagaugaggagcc

SEQ ID NO: 2487573 - RNA, 19 nt, Artificial Sequence
  Description of Artificial Sequence: Synthetic oligonucleotide
uagauaacuacaucuggag

SEQ ID NO: 2487574 - RNA, 19 nt, Artificial Sequence
  Description of Artificial Sequence: Synthetic oligonucleotide
acauaucuagaugaggagc

SEQ ID NO: 2487575 - RNA, 19 nt, Artificial Sequence
  Description of Artificial Sequence: Synthetic oligonucleotide
uggguaacaacucacggga

SEQ ID NO: 2487576 - RNA, 19 nt, Artificial Sequence
  Description of Artificial Sequence: Synthetic oligonucleotide
uuuugcuccgaguagccgg

SEQ ID NO: 2487577 - RNA, 19 nt, Artificial Sequence
  Description of Artificial Sequence: Synthetic oligonucleotide
gaugccacauucuguaacg

SEQ ID NO: 2487578 - RNA, 19 nt, Artificial Sequence
  Description of Artificial Sequence: Synthetic oligonucleotide
aaaguuauauuuguacuga

SEQ ID NO: 2487579 - RNA, 19 nt, Artificial Sequence
  Description of Artificial Sequence: Synthetic oligonucleotide
uauauuuguacugacagua

SEQ ID NO: 2487580 - RNA, 19 nt, Artificial Sequence
  Description of Artificial Sequence: Synthetic oligonucleotide
acuacaucuggagagauag

SEQ ID NO: 2487581 - RNA, 19 nt, Artificial Sequence
  Description of Artificial Sequence: Synthetic oligonucleotide
agaaacagaguuuucagaa

SEQ ID NO: 2487582 - RNA, 19 nt, Artificial Sequence
  Description of Artificial Sequence: Synthetic oligonucleotide
uuggguaacaacucacggg

SEQ ID NO: 2487583 - RNA, 19 nt, Artificial Sequence
  Description of Artificial Sequence: Synthetic oligonucleotide
guagaauugugggagaacg

SEQ ID NO: 2487584 - RNA, 19 nt, Artificial Sequence
  Description of Artificial Sequence: Synthetic oligonucleotide
accgggaucacauaucuag

SEQ ID NO: 2487585 - RNA, 19 nt, Artificial Sequence
  Description of Artificial Sequence: Synthetic oligonucleotide
acauaagguggacaacugc

SEQ ID NO: 2487586 - RNA, 19 nt, Artificial Sequence
  Description of Artificial Sequence: Synthetic oligonucleotide
uguacugacaguagaaaau

SEQ ID NO: 2487587 - RNA, 19 nt, Artificial Sequence
  Description of Artificial Sequence: Synthetic oligonucleotide
ugaaccaaucgguugagca

SEQ ID NO: 2487588 - RNA, 19 nt, Artificial Sequence
  Description of Artificial Sequence: Synthetic oligonucleotide
uauucagcaagaaggggug

SEQ ID NO: 2487589 - RNA, 19 nt, Artificial Sequence
  Description of Artificial Sequence: Synthetic oligonucleotide
cucacgggaggcaagaagg

SEQ ID NO: 2487590 - RNA, 19 nt, Artificial Sequence
  Description of Artificial Sequence: Synthetic oligonucleotide
uccucauaucaucugagug

SEQ ID NO: 2487591 - RNA, 19 nt, Artificial Sequence
  Description of Artificial Sequence: Synthetic oligonucleotide
aagacgaucccuccuagga

SEQ ID NO: 2487592 - RNA, 19 nt, Artificial Sequence
  Description of Artificial Sequence: Synthetic oligonucleotide
gagugaacacacuaguccc

SEQ ID NO: 2487593 - RNA, 19 nt, Artificial Sequence
  Description of Artificial Sequence: Synthetic oligonucleotide
gaaauaucaguggagucag

SEQ ID NO: 2487594 - RNA, 19 nt, Artificial Sequence
  Description of Artificial Sequence: Synthetic oligonucleotide
aguggagucagaugacuac

SEQ ID NO: 2487595 - RNA, 19 nt, Artificial Sequence
  Description of Artificial Sequence: Synthetic oligonucleotide
acugguagaauugugggag

SEQ ID NO: 2487596 - RNA, 19 nt, Artificial Sequence
  Description of Artificial Sequence: Synthetic oligonucleotide
agaugacuacacaagaugg

SEQ ID NO: 2487597 - RNA, 19 nt, Artificial Sequence
  Description of Artificial Sequence: Synthetic oligonucleotide
ucugagugaacacacuagu

SEQ ID NO: 2487598 - RNA, 19 nt, Artificial Sequence
  Description of Artificial Sequence: Synthetic oligonucleotide
gaaacagaguuuucagaag

SEQ ID NO: 2487599 - RNA, 19 nt, Artificial Sequence
  Description of Artificial Sequence: Synthetic oligonucleotide
uugauuuugcuccgaguag

SEQ ID NO: 2487600 - RNA, 19 nt, Artificial Sequence
  Description of Artificial Sequence: Synthetic oligonucleotide
agaaauaucaguggaguca

SEQ ID NO: 2487601 - RNA, 19 nt, Artificial Sequence
  Description of Artificial Sequence: Synthetic oligonucleotide
ugacaguagaaaauaacua

SEQ ID NO: 2487602 - RNA, 19 nt, Artificial Sequence
  Description of Artificial Sequence: Synthetic oligonucleotide
cugaacacuugguagcucg

SEQ ID NO: 2487603 - RNA, 19 nt, Artificial Sequence
  Description of Artificial Sequence: Synthetic oligonucleotide
agaguuuucagaagucccc

SEQ ID NO: 2487604 - RNA, 19 nt, Artificial Sequence
  Description of Artificial Sequence: Synthetic oligonucleotide
ugaaucucagagcuguaga

SEQ ID NO: 2487605 - RNA, 19 nt, Artificial Sequence
  Description of Artificial Sequence: Synthetic oligonucleotide
gaugacuacacaagauggg

SEQ ID NO: 2487606 - RNA, 19 nt, Artificial Sequence
  Description of Artificial Sequence: Synthetic oligonucleotide
ucuguaacgcgguagguaa

SEQ ID NO: 2487607 - RNA, 19 nt, Artificial Sequence
  Description of Artificial Sequence: Synthetic oligonucleotide
guuggguaacaacucacgg

SEQ ID NO: 2487608 - RNA, 19 nt, Artificial Sequence
  Description of Artificial Sequence: Synthetic oligonucleotide
cauucuguaacgcgguagg

SEQ ID NO: 2487609 - RNA, 19 nt, Artificial Sequence
  Description of Artificial Sequence: Synthetic oligonucleotide
ucuugcuugaagacauaag

SEQ ID NO: 2487610 - RNA, 19 nt, Artificial Sequence
  Description of Artificial Sequence: Synthetic oligonucleotide
ugacuacacaagaugggcc

SEQ ID NO: 2487611 - RNA, 19 nt, Artificial Sequence
  Description of Artificial Sequence: Synthetic oligonucleotide
aaauaacuacauucuaauu

SEQ ID NO: 2487612 - RNA, 19 nt, Artificial Sequence
  Description of Artificial Sequence: Synthetic oligonucleotide
gaauugugggagaacgugg

SEQ ID NO: 2487613 - RNA, 19 nt, Artificial Sequence
  Description of Artificial Sequence: Synthetic oligonucleotide
ugggagauugcacggagug

SEQ ID NO: 2487614 - RNA, 19 nt, Artificial Sequence
  Description of Artificial Sequence: Synthetic oligonucleotide
cuacauucuaauuucagaa

SEQ ID NO: 2487615 - RNA, 19 nt, Artificial Sequence
  Description of Artificial Sequence: Synthetic oligonucleotide
uucacuugauuuugcuccg

SEQ ID NO: 2487616 - RNA, 19 nt, Artificial Sequence
  Description of Artificial Sequence: Synthetic oligonucleotide
aaucgguugagcacagcac

SEQ ID NO: 2487617 - RNA, 19 nt, Artificial Sequence
  Description of Artificial Sequence: Synthetic oligonucleotide
uucuaauuucagaaacaga

SEQ ID NO: 2487618 - RNA, 19 nt, Artificial Sequence
  Description of Artificial Sequence: Synthetic oligonucleotide
uagguaaacugguagaauu

SEQ ID NO: 2487619 - RNA, 19 nt, Artificial Sequence
  Description of Artificial Sequence: Synthetic oligonucleotide
agcaagaaggggugaacgg

SEQ ID NO: 2487620 - RNA, 19 nt, Artificial Sequence
  Description of Artificial Sequence: Synthetic oligonucleotide
aaguccccaaaucugggca

SEQ ID NO: 2487621 - RNA, 19 nt, Artificial Sequence
  Description of Artificial Sequence: Synthetic oligonucleotide
cagaugacuacacaagaug

SEQ ID NO: 2487622 - RNA, 19 nt, Artificial Sequence
  Description of Artificial Sequence: Synthetic oligonucleotide
uggagagauagccuugaug

SEQ ID NO: 2487623 - RNA, 19 nt, Artificial Sequence
  Description of Artificial Sequence: Synthetic oligonucleotide
ugauuuugcuccgaguagc

SEQ ID NO: 2487624 - RNA, 19 nt, Artificial Sequence
  Description of Artificial Sequence: Synthetic oligonucleotide
uccccagaaauaucagugg

SEQ ID NO: 2487625 - RNA, 19 nt, Artificial Sequence
  Description of Artificial Sequence: Synthetic oligonucleotide
auuauucagcaagaagggg

SEQ ID NO: 2487626 - RNA, 19 nt, Artificial Sequence
  Description of Artificial Sequence: Synthetic oligonucleotide
uagcucguaucauuccucg

SEQ ID NO: 2487627 - RNA, 19 nt, Artificial Sequence
  Description of Artificial Sequence: Synthetic oligonucleotide
gagagauagccuugaugcg

SEQ ID NO: 2487628 - RNA, 19 nt, Artificial Sequence
  Description of Artificial Sequence: Synthetic oligonucleotide
agauaacuacaucuggaga

SEQ ID NO: 2487629 - RNA, 19 nt, Artificial Sequence
  Description of Artificial Sequence: Synthetic oligonucleotide
uuucagaaguccccaaauc

SEQ ID NO: 2487630 - RNA, 19 nt, Artificial Sequence
  Description of Artificial Sequence: Synthetic oligonucleotide
cauaagguggacaacugca

SEQ ID NO: 2487631 - RNA, 19 nt, Artificial Sequence
  Description of Artificial Sequence: Synthetic oligonucleotide
aagacauaagguggacaac

SEQ ID NO: 2487632 - RNA, 19 nt, Artificial Sequence
  Description of Artificial Sequence: Synthetic oligonucleotide
ugaagaagacgaucccucc

SEQ ID NO: 2487633 - RNA, 19 nt, Artificial Sequence
  Description of Artificial Sequence: Synthetic oligonucleotide
ggaucacauaucuagauga

SEQ ID NO: 2487634 - RNA, 19 nt, Artificial Sequence
  Description of Artificial Sequence: Synthetic oligonucleotide
ugccacauucuguaacgcg

SEQ ID NO: 2487635 - RNA, 19 nt, Artificial Sequence
  Description of Artificial Sequence: Synthetic oligonucleotide
agaauugugggagaacgug

SEQ ID NO: 2487636 - RNA, 19 nt, Artificial Sequence
  Description of Artificial Sequence: Synthetic oligonucleotide
gaaccaaucgguugagcac

SEQ ID NO: 2487637 - RNA, 19 nt, Artificial Sequence
  Description of Artificial Sequence: Synthetic oligonucleotide
aucacauaucuagaugagg

SEQ ID NO: 2487638 - RNA, 19 nt, Artificial Sequence
  Description of Artificial Sequence: Synthetic oligonucleotide
agacauaagguggacaacu

SEQ ID NO: 2487639 - RNA, 19 nt, Artificial Sequence
  Description of Artificial Sequence: Synthetic oligonucleotide
uaacgcgguagguaaacug

SEQ ID NO: 2487640 - RNA, 19 nt, Artificial Sequence
  Description of Artificial Sequence: Synthetic oligonucleotide
aaccaaucgguugagcaca

SEQ ID NO: 2487641 - RNA, 19 nt, Artificial Sequence
  Description of Artificial Sequence: Synthetic oligonucleotide
accaugaaccaaucgguug

SEQ ID NO: 2487642 - RNA, 19 nt, Artificial Sequence
  Description of Artificial Sequence: Synthetic oligonucleotide
uggacauacacaucauuau

SEQ ID NO: 2487643 - RNA, 19 nt, Artificial Sequence
  Description of Artificial Sequence: Synthetic oligonucleotide
cauagugaaucucagagcu

SEQ ID NO: 2487644 - RNA, 19 nt, Artificial Sequence
  Description of Artificial Sequence: Synthetic oligonucleotide
aacacuugguagcucguau

SEQ ID NO: 2487645 - RNA, 19 nt, Artificial Sequence
  Description of Artificial Sequence: Synthetic oligonucleotide
agcuguagauaacuacauc

SEQ ID NO: 2487646 - RNA, 19 nt, Artificial Sequence
  Description of Artificial Sequence: Synthetic oligonucleotide
aaucugggcacuacauggg

SEQ ID NO: 2487647 - RNA, 19 nt, Artificial Sequence
  Description of Artificial Sequence: Synthetic oligonucleotide
gguaacaacucacgggagg

SEQ ID NO: 2487648 - RNA, 19 nt, Artificial Sequence
  Description of Artificial Sequence: Synthetic oligonucleotide
ucauaaaaguggacauaca

SEQ ID NO: 2487649 - RNA, 19 nt, Artificial Sequence
  Description of Artificial Sequence: Synthetic oligonucleotide
gaugcucucuugcuugaag

SEQ ID NO: 2487650 - RNA, 19 nt, Artificial Sequence
  Description of Artificial Sequence: Synthetic oligonucleotide
aucgguugagcacagcaca

SEQ ID NO: 2487651 - RNA, 19 nt, Artificial Sequence
  Description of Artificial Sequence: Synthetic oligonucleotide
gacgaucccuccuaggaac

SEQ ID NO: 2487652 - RNA, 19 nt, Artificial Sequence
  Description of Artificial Sequence: Synthetic oligonucleotide
aagaagacgaucccuccua

SEQ ID NO: 2487653 - RNA, 19 nt, Artificial Sequence
  Description of Artificial Sequence: Synthetic oligonucleotide
uugguagcucguaucauuc

SEQ ID NO: 2487654 - RNA, 19 nt, Artificial Sequence
  Description of Artificial Sequence: Synthetic oligonucleotide
gaagcauagugaaucucag

SEQ ID NO: 2487655 - RNA, 19 nt, Artificial Sequence
  Description of Artificial Sequence: Synthetic oligonucleotide
ggaguuucauucuugcagc

SEQ ID NO: 2487656 - RNA, 19 nt, Artificial Sequence
  Description of Artificial Sequence: Synthetic oligonucleotide
gagucagaugacuacacaa

SEQ ID NO: 2487657 - RNA, 19 nt, Artificial Sequence
  Description of Artificial Sequence: Synthetic oligonucleotide
cucguaucauuccucgggg

SEQ ID NO: 2487658 - RNA, 19 nt, Artificial Sequence
  Description of Artificial Sequence: Synthetic oligonucleotide
agugaacacacuagucccc

SEQ ID NO: 2487659 - RNA, 19 nt, Artificial Sequence
  Description of Artificial Sequence: Synthetic oligonucleotide
aauugugggagaacguggu

SEQ ID NO: 2487660 - RNA, 19 nt, Artificial Sequence
  Description of Artificial Sequence: Synthetic oligonucleotide
agucagaugacuacacaag

SEQ ID NO: 2487661 - RNA, 19 nt, Artificial Sequence
  Description of Artificial Sequence: Synthetic oligonucleotide
cuuagugagccaaggggac

SEQ ID NO: 2487662 - RNA, 19 nt, Artificial Sequence
  Description of Artificial Sequence: Synthetic oligonucleotide
cauucuugcagcggguugg

SEQ ID NO: 2487663 - RNA, 19 nt, Artificial Sequence
  Description of Artificial Sequence: Synthetic oligonucleotide
ggagauugcacggaguggg

SEQ ID NO: 2487664 - RNA, 19 nt, Artificial Sequence
  Description of Artificial Sequence: Synthetic oligonucleotide
ugaugcggaugccacauuc

SEQ ID NO: 2487665 - RNA, 19 nt, Artificial Sequence
  Description of Artificial Sequence: Synthetic oligonucleotide
gaucacauaucuagaugag

SEQ ID NO: 2487666 - RNA, 19 nt, Artificial Sequence
  Description of Artificial Sequence: Synthetic oligonucleotide
gaagacgaucccuccuagg

SEQ ID NO: 2487667 - RNA, 19 nt, Artificial Sequence
  Description of Artificial Sequence: Synthetic oligonucleotide
aagcauagugaaucucaga

SEQ ID NO: 2487668 - RNA, 19 nt, Artificial Sequence
  Description of Artificial Sequence: Synthetic oligonucleotide
uagugagccaaggggaccg

SEQ ID NO: 2487669 - RNA, 19 nt, Artificial Sequence
  Description of Artificial Sequence: Synthetic oligonucleotide
cagagcuguagauaacuac

SEQ ID NO: 2487670 - RNA, 19 nt, Artificial Sequence
  Description of Artificial Sequence: Synthetic oligonucleotide
guaacaacucacgggaggc

SEQ ID NO: 2487671 - RNA, 19 nt, Artificial Sequence
  Description of Artificial Sequence: Synthetic oligonucleotide
auuccucggggccgaagcc

SEQ ID NO: 2487672 - RNA, 19 nt, Artificial Sequence
  Description of Artificial Sequence: Synthetic oligonucleotide
uggguuuccucauaucauc

SEQ ID NO: 2487673 - RNA, 19 nt, Artificial Sequence
  Description of Artificial Sequence: Synthetic oligonucleotide
guagauaacuacaucugga

SEQ ID NO: 2487674 - RNA, 19 nt, Artificial Sequence
  Description of Artificial Sequence: Synthetic oligonucleotide
aagccauguuauugcuggg

SEQ ID NO: 2487675 - RNA, 19 nt, Artificial Sequence
  Description of Artificial Sequence: Synthetic oligonucleotide
aguuauauuuguacugaca

SEQ ID NO: 2487676 - RNA, 19 nt, Artificial Sequence
  Description of Artificial Sequence: Synthetic oligonucleotide
caaaucugggcacuacaug

SEQ ID NO: 2487677 - RNA, 19 nt, Artificial Sequence
  Description of Artificial Sequence: Synthetic oligonucleotide
gcucguaucauuccucggg

SEQ ID NO: 2487678 - RNA, 19 nt, Artificial Sequence
  Description of Artificial Sequence: Synthetic oligonucleotide
agauugcacggaguggggc

SEQ ID NO: 2487679 - RNA, 19 nt, Artificial Sequence
  Description of Artificial Sequence: Synthetic oligonucleotide
acucacgggaggcaagaag

SEQ ID NO: 2487680 - RNA, 19 nt, Artificial Sequence
  Description of Artificial Sequence: Synthetic oligonucleotide
aguuucauucuugcagcgg

SEQ ID NO: 2487681 - RNA, 19 nt, Artificial Sequence
  Description of Artificial Sequence: Synthetic oligonucleotide
uggagucagaugacuacac

SEQ ID NO: 2487682 - RNA, 19 nt, Artificial Sequence
  Description of Artificial Sequence: Synthetic oligonucleotide
agccggaaaacaugaaggu

SEQ ID NO: 2487683 - RNA, 19 nt, Artificial Sequence
  Description of Artificial Sequence: Synthetic oligonucleotide
gaaggugaagaagacgauc

SEQ ID NO: 2487684 - RNA, 19 nt, Artificial Sequence
  Description of Artificial Sequence: Synthetic oligonucleotide
uuugcuccgaguagccgga

SEQ ID NO: 2487685 - RNA, 19 nt, Artificial Sequence
  Description of Artificial Sequence: Synthetic oligonucleotide
acaccgggaucacauaucu

SEQ ID NO: 2487686 - RNA, 19 nt, Artificial Sequence
  Description of Artificial Sequence: Synthetic oligonucleotide
cauuccucggggccgaagc

SEQ ID NO: 2487687 - RNA, 19 nt, Artificial Sequence
  Description of Artificial Sequence: Synthetic oligonucleotide
agaagacgaucccuccuag

SEQ ID NO: 2487688 - RNA, 19 nt, Artificial Sequence
  Description of Artificial Sequence: Synthetic oligonucleotide
cuuggcuccggcaagcuga

SEQ ID NO: 2487689 - RNA, 19 nt, Artificial Sequence
  Description of Artificial Sequence: Synthetic oligonucleotide
augcucucuugcuugaaga

SEQ ID NO: 2487690 - RNA, 19 nt, Artificial Sequence
  Description of Artificial Sequence: Synthetic oligonucleotide
auaacuacaucuggagaga

SEQ ID NO: 2487691 - RNA, 19 nt, Artificial Sequence
  Description of Artificial Sequence: Synthetic oligonucleotide
gauuuugcuccgaguagcc

SEQ ID NO: 2487692 - RNA, 19 nt, Artificial Sequence
  Description of Artificial Sequence: Synthetic oligonucleotide
acauucuguaacgcgguag

SEQ ID NO: 2487693 - RNA, 19 nt, Artificial Sequence
  Description of Artificial Sequence: Synthetic oligonucleotide
gcuguagauaacuacaucu

SEQ ID NO: 2487694 - RNA, 19 nt, Artificial Sequence
  Description of Artificial Sequence: Synthetic oligonucleotide
agacucugccuggugaugg

SEQ ID NO: 2487695 - RNA, 19 nt, Artificial Sequence
  Description of Artificial Sequence: Synthetic oligonucleotide
cugagugaacacacuaguc

SEQ ID NO: 2487696 - RNA, 19 nt, Artificial Sequence
  Description of Artificial Sequence: Synthetic oligonucleotide
ucacgggaggcaagaaggc

SEQ ID NO: 2487697 - RNA, 19 nt, Artificial Sequence
  Description of Artificial Sequence: Synthetic oligonucleotide
aucugagugaacacacuag

SEQ ID NO: 2487698 - RNA, 19 nt, Artificial Sequence
  Description of Artificial Sequence: Synthetic oligonucleotide
ucuugcagcggguugggua

SEQ ID NO: 2487699 - RNA, 19 nt, Artificial Sequence
  Description of Artificial Sequence: Synthetic oligonucleotide
uguaacgcgguagguaaac

SEQ ID NO: 2487700 - RNA, 19 nt, Artificial Sequence
  Description of Artificial Sequence: Synthetic oligonucleotide
ccuccuaggaacuugagga

SEQ ID NO: 2487701 - RNA, 19 nt, Artificial Sequence
  Description of Artificial Sequence: Synthetic oligonucleotide
agguaaacugguagaauug

SEQ ID NO: 2487702 - RNA, 19 nt, Artificial Sequence
  Description of Artificial Sequence: Synthetic oligonucleotide
guaaacugguagaauugug

SEQ ID NO: 2487703 - RNA, 19 nt, Artificial Sequence
  Description of Artificial Sequence: Synthetic oligonucleotide
acuacauggguuuccucau

SEQ ID NO: 2487704 - RNA, 19 nt, Artificial Sequence
  Description of Artificial Sequence: Synthetic oligonucleotide
uuauugcugggagauugca

SEQ ID NO: 2487705 - RNA, 19 nt, Artificial Sequence
  Description of Artificial Sequence: Synthetic oligonucleotide
cuccuaggaacuugaggag

SEQ ID NO: 2487706 - RNA, 19 nt, Artificial Sequence
  Description of Artificial Sequence: Synthetic oligonucleotide
caaucgguugagcacagca

SEQ ID NO: 2487707 - RNA, 19 nt, Artificial Sequence
  Description of Artificial Sequence: Synthetic oligonucleotide
ucagagcuguagauaacua

SEQ ID NO: 2487708 - RNA, 19 nt, Artificial Sequence
  Description of Artificial Sequence: Synthetic oligonucleotide
agcggguuggguaacaacu

SEQ ID NO: 2487709 - RNA, 19 nt, Artificial Sequence
  Description of Artificial Sequence: Synthetic oligonucleotide
gacuacacaagaugggccu

SEQ ID NO: 2487710 - RNA, 19 nt, Artificial Sequence
  Description of Artificial Sequence: Synthetic oligonucleotide
aacaacucacgggaggcaa

SEQ ID NO: 2487711 - RNA, 19 nt, Artificial Sequence
  Description of Artificial Sequence: Synthetic oligonucleotide
ucuagaugaggagccuuug

SEQ ID NO: 2487712 - RNA, 19 nt, Artificial Sequence
  Description of Artificial Sequence: Synthetic oligonucleotide
augcggaugccacauucug

SEQ ID NO: 2487713 - RNA, 19 nt, Artificial Sequence
  Description of Artificial Sequence: Synthetic oligonucleotide
gagaacgugguugggagga

SEQ ID NO: 2487714 - RNA, 19 nt, Artificial Sequence
  Description of Artificial Sequence: Synthetic oligonucleotide
ucuggagagauagccuuga

SEQ ID NO: 2487715 - RNA, 19 nt, Artificial Sequence
  Description of Artificial Sequence: Synthetic oligonucleotide
ugcggaugccacauucugu

SEQ ID NO: 2487716 - RNA, 19 nt, Artificial Sequence
  Description of Artificial Sequence: Synthetic oligonucleotide
auuuugcuccgaguagccg

SEQ ID NO: 2487717 - RNA, 19 nt, Artificial Sequence
  Description of Artificial Sequence: Synthetic oligonucleotide
gaacacacuaguccccaga

SEQ ID NO: 2487718 - RNA, 19 nt, Artificial Sequence
  Description of Artificial Sequence: Synthetic oligonucleotide
gccacauucuguaacgcgg

SEQ ID NO: 2487719 - RNA, 19 nt, Artificial Sequence
  Description of Artificial Sequence: Synthetic oligonucleotide
ucguaucauuccucggggc

SEQ ID NO: 2487720 - RNA, 19 nt, Artificial Sequence
  Description of Artificial Sequence: Synthetic oligonucleotide
ugaacacuugguagcucgu

SEQ ID NO: 2487721 - RNA, 19 nt, Artificial Sequence
  Description of Artificial Sequence: Synthetic oligonucleotide
uccgaguagccggaaaaca

SEQ ID NO: 2487722 - RNA, 19 nt, Artificial Sequence
  Description of Artificial Sequence: Synthetic oligonucleotide
gggagaacgugguugggag

SEQ ID NO: 2487723 - RNA, 19 nt, Artificial Sequence
  Description of Artificial Sequence: Synthetic oligonucleotide
ggugaccaugaaccaaucg

SEQ ID NO: 2487724 - RNA, 19 nt, Artificial Sequence
  Description of Artificial Sequence: Synthetic oligonucleotide
gugaacggugaccaugaac

SEQ ID NO: 2487725 - RNA, 19 nt, Artificial Sequence
  Description of Artificial Sequence: Synthetic oligonucleotide
ucaguggagucagaugacu

SEQ ID NO: 2487726 - RNA, 19 nt, Artificial Sequence
  Description of Artificial Sequence: Synthetic oligonucleotide
augccacauucuguaacgc

SEQ ID NO: 2487727 - RNA, 19 nt, Artificial Sequence
  Description of Artificial Sequence: Synthetic oligonucleotide
agaaguccccaaaucuggg

SEQ ID NO: 2487728 - RNA, 19 nt, Artificial Sequence
  Description of Artificial Sequence: Synthetic oligonucleotide
ugguugggaggacaaccca

SEQ ID NO: 2487729 - RNA, 19 nt, Artificial Sequence
  Description of Artificial Sequence: Synthetic oligonucleotide
cacggaguggggcuuagug

SEQ ID NO: 2487730 - RNA, 19 nt, Artificial Sequence
  Description of Artificial Sequence: Synthetic oligonucleotide
caaagacucugccugguga

SEQ ID NO: 2487731 - RNA, 19 nt, Artificial Sequence
  Description of Artificial Sequence: Synthetic oligonucleotide
augaaccaaucgguugagc

SEQ ID NO: 2487732 - RNA, 19 nt, Artificial Sequence
  Description of Artificial Sequence: Synthetic oligonucleotide
agcucguaucauuccucgg

SEQ ID NO: 2487733 - RNA, 19 nt, Artificial Sequence
  Description of Artificial Sequence: Synthetic oligonucleotide
gcauagugaaucucagagc

SEQ ID NO: 2487734 - RNA, 19 nt, Artificial Sequence
  Description of Artificial Sequence: Synthetic oligonucleotide
gguuggguaacaacucacg

SEQ ID NO: 2487735 - RNA, 19 nt, Artificial Sequence
  Description of Artificial Sequence: Synthetic oligonucleotide
acggaguggggcuuaguga

SEQ ID NO: 2487736 - RNA, 19 nt, Artificial Sequence
  Description of Artificial Sequence: Synthetic oligonucleotide
gaguagccggaaaacauga

SEQ ID NO: 2487737 - RNA, 19 nt, Artificial Sequence
  Description of Artificial Sequence: Synthetic oligonucleotide
agcgcaugacaccgggauc

SEQ ID NO: 2487738 - RNA, 19 nt, Artificial Sequence
  Description of Artificial Sequence: Synthetic oligonucleotide
uccggcaagcugaacacuu

SEQ ID NO: 2487739 - RNA, 19 nt, Artificial Sequence
  Description of Artificial Sequence: Synthetic oligonucleotide
gacucugccuggugauggg

SEQ ID NO: 2487740 - RNA, 19 nt, Artificial Sequence
  Description of Artificial Sequence: Synthetic oligonucleotide
acuacacaagaugggccuc

SEQ ID NO: 2487741 - RNA, 19 nt, Artificial Sequence
  Description of Artificial Sequence: Synthetic oligonucleotide
guggacauacacaucauua

SEQ ID NO: 2487742 - RNA, 19 nt, Artificial Sequence
  Description of Artificial Sequence: Synthetic oligonucleotide
aacggugaccaugaaccaa

SEQ ID NO: 2487743 - RNA, 19 nt, Artificial Sequence
  Description of Artificial Sequence: Synthetic oligonucleotide
acuaguccccagaaauauc

SEQ ID NO: 2487744 - RNA, 19 nt, Artificial Sequence
  Description of Artificial Sequence: Synthetic oligonucleotide
guuauugcugggagauugc

SEQ ID NO: 2487745 - RNA, 19 nt, Artificial Sequence
  Description of Artificial Sequence: Synthetic oligonucleotide
gaaucucagagcuguagau

SEQ ID NO: 2487746 - RNA, 19 nt, Artificial Sequence
  Description of Artificial Sequence: Synthetic oligonucleotide
gguugagcacagcacauuc

SEQ ID NO: 2487747 - RNA, 19 nt, Artificial Sequence
  Description of Artificial Sequence: Synthetic oligonucleotide
ccucauaucaucugaguga

SEQ ID NO: 2487748 - RNA, 19 nt, Artificial Sequence
  Description of Artificial Sequence: Synthetic oligonucleotide
cucauaucaucugagugaa

SEQ ID NO: 2487749 - RNA, 19 nt, Artificial Sequence
  Description of Artificial Sequence: Synthetic oligonucleotide
uggggcuuagugagccaag

SEQ ID NO: 2487750 - RNA, 19 nt, Artificial Sequence
  Description of Artificial Sequence: Synthetic oligonucleotide
ucgguugagcacagcacau

SEQ ID NO: 2487751 - RNA, 19 nt, Artificial Sequence
  Description of Artificial Sequence: Synthetic oligonucleotide
gagauagccuugaugcgga

SEQ ID NO: 2487752 - RNA, 19 nt, Artificial Sequence
  Description of Artificial Sequence: Synthetic oligonucleotide
gaucccuccuaggaacuug

SEQ ID NO: 2487753 - RNA, 19 nt, Artificial Sequence
  Description of Artificial Sequence: Synthetic oligonucleotide
gaagaagacgaucccuccu

SEQ ID NO: 2487754 - RNA, 19 nt, Artificial Sequence
  Description of Artificial Sequence: Synthetic oligonucleotide
caagaugggccuccaaaga

SEQ ID NO: 2487755 - RNA, 19 nt, Artificial Sequence
  Description of Artificial Sequence: Synthetic oligonucleotide
cacaagaugggccuccaaa

SEQ ID NO: 2487756 - RNA, 19 nt, Artificial Sequence
  Description of Artificial Sequence: Synthetic oligonucleotide
agacgaucccuccuaggaa

SEQ ID NO: 2487757 - RNA, 19 nt, Artificial Sequence
  Description of Artificial Sequence: Synthetic oligonucleotide
cacacuaguccccagaaau

SEQ ID NO: 2487758 - RNA, 19 nt, Artificial Sequence
  Description of Artificial Sequence: Synthetic oligonucleotide
cuugcagcggguuggguaa

SEQ ID NO: 2487759 - RNA, 19 nt, Artificial Sequence
  Description of Artificial Sequence: Synthetic oligonucleotide
gaacggugaccaugaacca

SEQ ID NO: 2487760 - RNA, 19 nt, Artificial Sequence
  Description of Artificial Sequence: Synthetic oligonucleotide
gauccuuggcuuggcuccg

SEQ ID NO: 2487761 - RNA, 19 nt, Artificial Sequence
  Description of Artificial Sequence: Synthetic oligonucleotide
uaacaacucacgggaggca

SEQ ID NO: 2487762 - RNA, 19 nt, Artificial Sequence
  Description of Artificial Sequence: Synthetic oligonucleotide
ucauaucaucugagugaac

SEQ ID NO: 2487763 - RNA, 19 nt, Artificial Sequence
  Description of Artificial Sequence: Synthetic oligonucleotide
agaugggccuccaaagacu

SEQ ID NO: 2487764 - RNA, 19 nt, Artificial Sequence
  Description of Artificial Sequence: Synthetic oligonucleotide
gcccaaaugcacuucauaa

SEQ ID NO: 2487765 - RNA, 19 nt, Artificial Sequence
  Description of Artificial Sequence: Synthetic oligonucleotide
caucugagugaacacacua

SEQ ID NO: 2487766 - RNA, 19 nt, Artificial Sequence
  Description of Artificial Sequence: Synthetic oligonucleotide
auaucuagaugaggagccu

SEQ ID NO: 2487767 - RNA, 19 nt, Artificial Sequence
  Description of Artificial Sequence: Synthetic oligonucleotide
uaacuacaucuggagagau

SEQ ID NO: 2487768 - RNA, 19 nt, Artificial Sequence
  Description of Artificial Sequence: Synthetic oligonucleotide
caugaaccaaucgguugag

SEQ ID NO: 2487769 - RNA, 19 nt, Artificial Sequence
  Description of Artificial Sequence: Synthetic oligonucleotide
auucuugcagcggguuggg

SEQ ID NO: 2487770 - RNA, 19 nt, Artificial Sequence
  Description of Artificial Sequence: Synthetic oligonucleotide
cacgggaggcaagaaggcg

SEQ ID NO: 2487771 - RNA, 19 nt, Artificial Sequence
  Description of Artificial Sequence: Synthetic oligonucleotide
ggcaagaaggcguccaaga

SEQ ID NO: 2487772 - RNA, 19 nt, Artificial Sequence
  Description of Artificial Sequence: Synthetic oligonucleotide
caacccaggcccaaaugca

SEQ ID NO: 2487773 - RNA, 19 nt, Artificial Sequence
  Description of Artificial Sequence: Synthetic oligonucleotide
auagugaaucucagagcug

SEQ ID NO: 2487774 - RNA, 19 nt, Artificial Sequence
  Description of Artificial Sequence: Synthetic oligonucleotide
uggaagcauagugaaucuc

SEQ ID NO: 2487775 - RNA, 19 nt, Artificial Sequence
  Description of Artificial Sequence: Synthetic oligonucleotide
acaacugcaguuggauccu

SEQ ID NO: 2487776 - RNA, 19 nt, Artificial Sequence
  Description of Artificial Sequence: Synthetic oligonucleotide
ggagaacgugguugggagg

SEQ ID NO: 2487777 - RNA, 19 nt, Artificial Sequence
  Description of Artificial Sequence: Synthetic oligonucleotide
cuuggcuuggcuccggcaa

SEQ ID NO: 2487778 - RNA, 19 nt, Artificial Sequence
  Description of Artificial Sequence: Synthetic oligonucleotide
cauguuauugcugggagau

SEQ ID NO: 2487779 - RNA, 19 nt, Artificial Sequence
  Description of Artificial Sequence: Synthetic oligonucleotide
accgucgaggggcagcgca

SEQ ID NO: 2487780 - RNA, 19 nt, Artificial Sequence
  Description of Artificial Sequence: Synthetic oligonucleotide
agccauguuauugcuggga

SEQ ID NO: 2487781 - RNA, 19 nt, Artificial Sequence
  Description of Artificial Sequence: Synthetic oligonucleotide
gcuuagugagccaagggga

SEQ ID NO: 2487782 - RNA, 19 nt, Artificial Sequence
  Description of Artificial Sequence: Synthetic oligonucleotide
gggcuuagugagccaaggg

SEQ ID NO: 2487783 - RNA, 19 nt, Artificial Sequence
  Description of Artificial Sequence: Synthetic oligonucleotide
ggggcagcgcaugacaccg

SEQ ID NO: 2487784 - RNA, 19 nt, Artificial Sequence
  Description of Artificial Sequence: Synthetic oligonucleotide
aacgugguugggaggacaa

SEQ ID NO: 2487785 - RNA, 19 nt, Artificial Sequence
  Description of Artificial Sequence: Synthetic oligonucleotide
caguuggauccuuggcuug

SEQ ID NO: 2487786 - RNA, 19 nt, Artificial Sequence
  Description of Artificial Sequence: Synthetic oligonucleotide
ucccuccuaggaacuugag

SEQ ID NO: 2487787 - RNA, 19 nt, Artificial Sequence
  Description of Artificial Sequence: Synthetic oligonucleotide
acgggaggcaagaaggcgu

SEQ ID NO: 2487788 - RNA, 19 nt, Artificial Sequence
  Description of Artificial Sequence: Synthetic oligonucleotide
gcacauucacuugauuuug

SEQ ID NO: 2487789 - RNA, 19 nt, Artificial Sequence
  Description of Artificial Sequence: Synthetic oligonucleotide
cguaucauuccucggggcc

SEQ ID NO: 2487790 - RNA, 19 nt, Artificial Sequence
  Description of Artificial Sequence: Synthetic oligonucleotide
gguagguaaacugguagaa

SEQ ID NO: 2487791 - RNA, 19 nt, Artificial Sequence
  Description of Artificial Sequence: Synthetic oligonucleotide
gacaccgggaucacauauc

SEQ ID NO: 2487792 - RNA, 19 nt, Artificial Sequence
  Description of Artificial Sequence: Synthetic oligonucleotide
ggcagcgcaugacaccggg

SEQ ID NO: 2487793 - RNA, 19 nt, Artificial Sequence
  Description of Artificial Sequence: Synthetic oligonucleotide
guagcucguaucauuccuc

SEQ ID NO: 2487794 - RNA, 19 nt, Artificial Sequence
  Description of Artificial Sequence: Synthetic oligonucleotide
uccuuggcuuggcuccggc

SEQ ID NO: 2487795 - RNA, 19 nt, Artificial Sequence
  Description of Artificial Sequence: Synthetic oligonucleotide
acggugaccaugaaccaau

SEQ ID NO: 2487796 - RNA, 19 nt, Artificial Sequence
  Description of Artificial Sequence: Synthetic oligonucleotide
cggaguggggcuuagugag

SEQ ID NO: 2487797 - RNA, 19 nt, Artificial Sequence
  Description of Artificial Sequence: Synthetic oligonucleotide
aacuacaucuggagagaua

SEQ ID NO: 2487798 - RNA, 19 nt, Artificial Sequence
  Description of Artificial Sequence: Synthetic oligonucleotide
guugagcacagcacauuca

SEQ ID NO: 2487799 - RNA, 19 nt, Artificial Sequence
  Description of Artificial Sequence: Synthetic oligonucleotide
gugaacacacuagucccca

SEQ ID NO: 2487800 - RNA, 19 nt, Artificial Sequence
  Description of Artificial Sequence: Synthetic oligonucleotide
aucuggagagauagccuug

SEQ ID NO: 2487801 - RNA, 19 nt, Artificial Sequence
  Description of Artificial Sequence: Synthetic oligonucleotide
gagccaaggggaccgucga

SEQ ID NO: 2487802 - RNA, 19 nt, Artificial Sequence
  Description of Artificial Sequence: Synthetic oligonucleotide
cuccgaguagccggaaaac

SEQ ID NO: 2487803 - RNA, 19 nt, Artificial Sequence
  Description of Artificial Sequence: Synthetic oligonucleotide
ucacuugauuuugcuccga

SEQ ID NO: 2487804 - RNA, 19 nt, Artificial Sequence
  Description of Artificial Sequence: Synthetic oligonucleotide
agccaaggggaccgucgag

SEQ ID NO: 2487805 - RNA, 19 nt, Artificial Sequence
  Description of Artificial Sequence: Synthetic oligonucleotide
ggagucagaugacuacaca

SEQ ID NO: 2487806 - RNA, 19 nt, Artificial Sequence
  Description of Artificial Sequence: Synthetic oligonucleotide
ugcuccgaguagccggaaa

SEQ ID NO: 2487807 - RNA, 19 nt, Artificial Sequence
  Description of Artificial Sequence: Synthetic oligonucleotide
gggagauugcacggagugg

SEQ ID NO: 2487808 - RNA, 19 nt, Artificial Sequence
  Description of Artificial Sequence: Synthetic oligonucleotide
ucucuugcuugaagacaua

SEQ ID NO: 2487809 - RNA, 19 nt, Artificial Sequence
  Description of Artificial Sequence: Synthetic oligonucleotide
uuggcuccggcaagcugaa

SEQ ID NO: 2487810 - RNA, 19 nt, Artificial Sequence
  Description of Artificial Sequence: Synthetic oligonucleotide
ggggcuuagugagccaagg

SEQ ID NO: 2487811 - RNA, 19 nt, Artificial Sequence
  Description of Artificial Sequence: Synthetic oligonucleotide
cagcggguuggguaacaac

SEQ ID NO: 2487812 - RNA, 19 nt, Artificial Sequence
  Description of Artificial Sequence: Synthetic oligonucleotide
gaggcaagaaggcguccaa

SEQ ID NO: 2487813 - RNA, 19 nt, Artificial Sequence
  Description of Artificial Sequence: Synthetic oligonucleotide
ggccgaagccauguuauug

SEQ ID NO: 2487814 - RNA, 19 nt, Artificial Sequence
  Description of Artificial Sequence: Synthetic oligonucleotide
cugguagaauugugggaga

SEQ ID NO: 2487815 - RNA, 19 nt, Artificial Sequence
  Description of Artificial Sequence: Synthetic oligonucleotide
aucuagaugaggagccuuu

SEQ ID NO: 2487816 - RNA, 19 nt, Artificial Sequence
  Description of Artificial Sequence: Synthetic oligonucleotide
gccggaaaacaugaaggug

SEQ ID NO: 2487817 - RNA, 19 nt, Artificial Sequence
  Description of Artificial Sequence: Synthetic oligonucleotide
caucuggagagauagccuu

SEQ ID NO: 2487818 - RNA, 19 nt, Artificial Sequence
  Description of Artificial Sequence: Synthetic oligonucleotide
acgugguugggaggacaac

SEQ ID NO: 2487819 - RNA, 19 nt, Artificial Sequence
  Description of Artificial Sequence: Synthetic oligonucleotide
ggacaacugcaguuggauc

SEQ ID NO: 2487820 - RNA, 19 nt, Artificial Sequence
  Description of Artificial Sequence: Synthetic oligonucleotide
agccuugaugcggaugcca

SEQ ID NO: 2487821 - RNA, 19 nt, Artificial Sequence
  Description of Artificial Sequence: Synthetic oligonucleotide
gguagcucguaucauuccu

SEQ ID NO: 2487822 - RNA, 19 nt, Artificial Sequence
  Description of Artificial Sequence: Synthetic oligonucleotide
cgaguagccggaaaacaug

SEQ ID NO: 2487823 - RNA, 19 nt, Artificial Sequence
  Description of Artificial Sequence: Synthetic oligonucleotide
gcaagaaggcguccaagaa

SEQ ID NO: 2487824 - RNA, 19 nt, Artificial Sequence
  Description of Artificial Sequence: Synthetic oligonucleotide
ggggugaacggugaccaug

SEQ ID NO: 2487825 - RNA, 19 nt, Artificial Sequence
  Description of Artificial Sequence: Synthetic oligonucleotide
ggaaaacaugaaggugaag

SEQ ID NO: 2487826 - RNA, 19 nt, Artificial Sequence
  Description of Artificial Sequence: Synthetic oligonucleotide
gguaaacugguagaauugu

SEQ ID NO: 2487827 - RNA, 19 nt, Artificial Sequence
  Description of Artificial Sequence: Synthetic oligonucleotide
acacuaguccccagaaaua

SEQ ID NO: 2487828 - RNA, 19 nt, Artificial Sequence
  Description of Artificial Sequence: Synthetic oligonucleotide
caguggagucagaugacua

SEQ ID NO: 2487829 - RNA, 19 nt, Artificial Sequence
  Description of Artificial Sequence: Synthetic oligonucleotide
aacucacgggaggcaagaa

SEQ ID NO: 2487830 - RNA, 19 nt, Artificial Sequence
  Description of Artificial Sequence: Synthetic oligonucleotide
cgugguugggaggacaacc

SEQ ID NO: 2487831 - RNA, 19 nt, Artificial Sequence
  Description of Artificial Sequence: Synthetic oligonucleotide
gcggaugccacauucugua

SEQ ID NO: 2487832 - RNA, 19 nt, Artificial Sequence
  Description of Artificial Sequence: Synthetic oligonucleotide
accaaucgguugagcacag

SEQ ID NO: 2487833 - RNA, 19 nt, Artificial Sequence
  Description of Artificial Sequence: Synthetic oligonucleotide
gaugcggaugccacauucu

SEQ ID NO: 2487834 - RNA, 19 nt, Artificial Sequence
  Description of Artificial Sequence: Synthetic oligonucleotide
gagcuguagauaacuacau

SEQ ID NO: 2487835 - RNA, 19 nt, Artificial Sequence
  Description of Artificial Sequence: Synthetic oligonucleotide
augacaccgggaucacaua

SEQ ID NO: 2487836 - RNA, 19 nt, Artificial Sequence
  Description of Artificial Sequence: Synthetic oligonucleotide
ggaccgucgaggggcagcg

SEQ ID NO: 2487837 - RNA, 19 nt, Artificial Sequence
  Description of Artificial Sequence: Synthetic oligonucleotide
gaacacuugguagcucgua

SEQ ID NO: 2487838 - RNA, 19 nt, Artificial Sequence
  Description of Artificial Sequence: Synthetic oligonucleotide
uugaugcggaugccacauu

SEQ ID NO: 2487839 - RNA, 19 nt, Artificial Sequence
  Description of Artificial Sequence: Synthetic oligonucleotide
ucgaggggcagcgcaugac

SEQ ID NO: 2487840 - RNA, 19 nt, Artificial Sequence
  Description of Artificial Sequence: Synthetic oligonucleotide
gugggagaacgugguuggg

SEQ ID NO: 2487841 - RNA, 19 nt, Artificial Sequence
  Description of Artificial Sequence: Synthetic oligonucleotide
gcgcaugacaccgggauca

SEQ ID NO: 2487842 - RNA, 19 nt, Artificial Sequence
  Description of Artificial Sequence: Synthetic oligonucleotide
acacaagaugggccuccaa

SEQ ID NO: 2487843 - RNA, 19 nt, Artificial Sequence
  Description of Artificial Sequence: Synthetic oligonucleotide
caacucacgggaggcaaga

SEQ ID NO: 2487844 - RNA, 19 nt, Artificial Sequence
  Description of Artificial Sequence: Synthetic oligonucleotide
gcuuagaugcucucuugcu

SEQ ID NO: 2487845 - RNA, 19 nt, Artificial Sequence
  Description of Artificial Sequence: Synthetic oligonucleotide
cuugaugcggaugccacau

SEQ ID NO: 2487846 - RNA, 19 nt, Artificial Sequence
  Description of Artificial Sequence: Synthetic oligonucleotide
ugcacggaguggggcuuag

SEQ ID NO: 2487847 - RNA, 19 nt, Artificial Sequence
  Description of Artificial Sequence: Synthetic oligonucleotide
gcuccgaguagccggaaaa

SEQ ID NO: 2487848 - RNA, 19 nt, Artificial Sequence
  Description of Artificial Sequence: Synthetic oligonucleotide
auugcacggaguggggcuu

SEQ ID NO: 2487849 - RNA, 19 nt, Artificial Sequence
  Description of Artificial Sequence: Synthetic oligonucleotide
aguagccggaaaacaugaa

SEQ ID NO: 2487850 - RNA, 19 nt, Artificial Sequence
  Description of Artificial Sequence: Synthetic oligonucleotide
acgaucccuccuaggaacu

SEQ ID NO: 2487851 - RNA, 19 nt, Artificial Sequence
  Description of Artificial Sequence: Synthetic oligonucleotide
guagguaaacugguagaau

SEQ ID NO: 2487852 - RNA, 19 nt, Artificial Sequence
  Description of Artificial Sequence: Synthetic oligonucleotide
ugggcacuacauggguuuc

SEQ ID NO: 2487853 - RNA, 19 nt, Artificial Sequence
  Description of Artificial Sequence: Synthetic oligonucleotide
gggugaacggugaccauga

SEQ ID NO: 2487854 - RNA, 19 nt, Artificial Sequence
  Description of Artificial Sequence: Synthetic oligonucleotide
ggguaacaacucacgggag

SEQ ID NO: 2487855 - RNA, 19 nt, Artificial Sequence
  Description of Artificial Sequence: Synthetic oligonucleotide
cacuaguccccagaaauau

SEQ ID NO: 2487856 - RNA, 19 nt, Artificial Sequence
  Description of Artificial Sequence: Synthetic oligonucleotide
guggacaacugcaguugga

SEQ ID NO: 2487857 - RNA, 19 nt, Artificial Sequence
  Description of Artificial Sequence: Synthetic oligonucleotide
ccccagaaauaucagugga

SEQ ID NO: 2487858 - RNA, 19 nt, Artificial Sequence
  Description of Artificial Sequence: Synthetic oligonucleotide
auccuuggcuuggcuccgg

SEQ ID NO: 2487859 - RNA, 19 nt, Artificial Sequence
  Description of Artificial Sequence: Synthetic oligonucleotide
cuguaacgcgguagguaaa

SEQ ID NO: 2487860 - RNA, 19 nt, Artificial Sequence
  Description of Artificial Sequence: Synthetic oligonucleotide
gaccaugaaccaaucgguu

SEQ ID NO: 2487861 - RNA, 19 nt, Artificial Sequence
  Description of Artificial Sequence: Synthetic oligonucleotide
gccuugaugcggaugccac

SEQ ID NO: 2487862 - RNA, 19 nt, Artificial Sequence
  Description of Artificial Sequence: Synthetic oligonucleotide
cuacauggguuuccucaua

SEQ ID NO: 2487863 - RNA, 19 nt, Artificial Sequence
  Description of Artificial Sequence: Synthetic oligonucleotide
gcaagaaggggugaacggu

SEQ ID NO: 2487864 - RNA, 19 nt, Artificial Sequence
  Description of Artificial Sequence: Synthetic oligonucleotide
ggcccaaaugcacuucaua

SEQ ID NO: 2487865 - RNA, 19 nt, Artificial Sequence
  Description of Artificial Sequence: Synthetic oligonucleotide
cccaaaucugggcacuaca

SEQ ID NO: 2487866 - RNA, 19 nt, Artificial Sequence
  Description of Artificial Sequence: Synthetic oligonucleotide
aggcguccaagaaggaauu

SEQ ID NO: 2487867 - RNA, 19 nt, Artificial Sequence
  Description of Artificial Sequence: Synthetic oligonucleotide
cagcgcaugacaccgggau

SEQ ID NO: 2487868 - RNA, 19 nt, Artificial Sequence
  Description of Artificial Sequence: Synthetic oligonucleotide
gcaguuggauccuuggcuu

SEQ ID NO: 2487869 - RNA, 19 nt, Artificial Sequence
  Description of Artificial Sequence: Synthetic oligonucleotide
agugaaucucagagcugua

SEQ ID NO: 2487870 - RNA, 19 nt, Artificial Sequence
  Description of Artificial Sequence: Synthetic oligonucleotide
cacauucuguaacgcggua

SEQ ID NO: 2487871 - RNA, 19 nt, Artificial Sequence
  Description of Artificial Sequence: Synthetic oligonucleotide
gaggacaacccaggcccaa

SEQ ID NO: 2487872 - RNA, 19 nt, Artificial Sequence
  Description of Artificial Sequence: Synthetic oligonucleotide
ggaguggggcuuagugagc

SEQ ID NO: 2487873 - RNA, 19 nt, Artificial Sequence
  Description of Artificial Sequence: Synthetic oligonucleotide
agugagccaaggggaccgu

SEQ ID NO: 2487874 - RNA, 19 nt, Artificial Sequence
  Description of Artificial Sequence: Synthetic oligonucleotide
gggcacuacauggguuucc

SEQ ID NO: 2487875 - RNA, 19 nt, Artificial Sequence
  Description of Artificial Sequence: Synthetic oligonucleotide
guaacgcgguagguaaacu

SEQ ID NO: 2487876 - RNA, 19 nt, Artificial Sequence
  Description of Artificial Sequence: Synthetic oligonucleotide
cgguagguaaacugguaga

SEQ ID NO: 2487877 - RNA, 19 nt, Artificial Sequence
  Description of Artificial Sequence: Synthetic oligonucleotide
uugcagcggguuggguaac

SEQ ID NO: 2487878 - RNA, 19 nt, Artificial Sequence
  Description of Artificial Sequence: Synthetic oligonucleotide
gcggguuggguaacaacuc

SEQ ID NO: 2487879 - RNA, 19 nt, Artificial Sequence
  Description of Artificial Sequence: Synthetic oligonucleotide
ccaaaucugggcacuacau

SEQ ID NO: 2487880 - RNA, 19 nt, Artificial Sequence
  Description of Artificial Sequence: Synthetic oligonucleotide
ccgggaucacauaucuaga

SEQ ID NO: 2487881 - RNA, 19 nt, Artificial Sequence
  Description of Artificial Sequence: Synthetic oligonucleotide
gcguccaagaaggaauucu

SEQ ID NO: 2487882 - RNA, 19 nt, Artificial Sequence
  Description of Artificial Sequence: Synthetic oligonucleotide
ggguuuccucauaucaucu

SEQ ID NO: 2487883 - RNA, 19 nt, Artificial Sequence
  Description of Artificial Sequence: Synthetic oligonucleotide
ucggggccgaagccauguu

SEQ ID NO: 2487884 - RNA, 19 nt, Artificial Sequence
  Description of Artificial Sequence: Synthetic oligonucleotide
gggaccgucgaggggcagc

SEQ ID NO: 2487885 - RNA, 19 nt, Artificial Sequence
  Description of Artificial Sequence: Synthetic oligonucleotide
ccuugaugcggaugccaca

SEQ ID NO: 2487886 - RNA, 19 nt, Artificial Sequence
  Description of Artificial Sequence: Synthetic oligonucleotide
uugcacggaguggggcuua

SEQ ID NO: 2487887 - RNA, 19 nt, Artificial Sequence
  Description of Artificial Sequence: Synthetic oligonucleotide
gcacuacauggguuuccuc

SEQ ID NO: 2487888 - RNA, 19 nt, Artificial Sequence
  Description of Artificial Sequence: Synthetic oligonucleotide
ggcacuacauggguuuccu

SEQ ID NO: 2487889 - RNA, 19 nt, Artificial Sequence
  Description of Artificial Sequence: Synthetic oligonucleotide
cggaaaacaugaaggugaa

SEQ ID NO: 2487890 - RNA, 19 nt, Artificial Sequence
  Description of Artificial Sequence: Synthetic oligonucleotide
ccgaguagccggaaaacau

SEQ ID NO: 2487891 - RNA, 19 nt, Artificial Sequence
  Description of Artificial Sequence: Synthetic oligonucleotide
gggaggcaagaaggcgucc

SEQ ID NO: 2487892 - RNA, 19 nt, Artificial Sequence
  Description of Artificial Sequence: Synthetic oligonucleotide
ggcguccaagaaggaauuc

SEQ ID NO: 2487893 - RNA, 19 nt, Artificial Sequence
  Description of Artificial Sequence: Synthetic oligonucleotide
ggcaagcugaacacuuggu

SEQ ID NO: 2487894 - RNA, 19 nt, Artificial Sequence
  Description of Artificial Sequence: Synthetic oligonucleotide
ccuaggaacuugaggaguu

SEQ ID NO: 2487895 - RNA, 19 nt, Artificial Sequence
  Description of Artificial Sequence: Synthetic oligonucleotide
uugcuccgaguagccggaa

SEQ ID NO: 2487896 - RNA, 19 nt, Artificial Sequence
  Description of Artificial Sequence: Synthetic oligonucleotide
caccgggaucacauaucua

SEQ ID NO: 2487897 - RNA, 19 nt, Artificial Sequence
  Description of Artificial Sequence: Synthetic oligonucleotide
gaccgucgaggggcagcgc

SEQ ID NO: 2487898 - RNA, 19 nt, Artificial Sequence
  Description of Artificial Sequence: Synthetic oligonucleotide
ggggccgaagccauguuau

SEQ ID NO: 2487899 - RNA, 19 nt, Artificial Sequence
  Description of Artificial Sequence: Synthetic oligonucleotide
ggugaugggcuuagaugcu

SEQ ID NO: 2487900 - RNA, 19 nt, Artificial Sequence
  Description of Artificial Sequence: Synthetic oligonucleotide
ggugaacggugaccaugaa

SEQ ID NO: 2487901 - RNA, 19 nt, Artificial Sequence
  Description of Artificial Sequence: Synthetic oligonucleotide
cggguuggguaacaacuca

SEQ ID NO: 2487902 - RNA, 19 nt, Artificial Sequence
  Description of Artificial Sequence: Synthetic oligonucleotide
ccaaucgguugagcacagc

SEQ ID NO: 2487903 - RNA, 19 nt, Artificial Sequence
  Description of Artificial Sequence: Synthetic oligonucleotide
ccccaaaucugggcacuac

SEQ ID NO: 2487904 - RNA, 19 nt, Artificial Sequence
  Description of Artificial Sequence: Synthetic oligonucleotide
cgaggggcagcgcaugaca

SEQ ID NO: 2487905 - RNA, 19 nt, Artificial Sequence
  Description of Artificial Sequence: Synthetic oligonucleotide
gggcagcgcaugacaccgg

SEQ ID NO: 2487906 - RNA, 19 nt, Artificial Sequence
  Description of Artificial Sequence: Synthetic oligonucleotide
cuggagagauagccuugau

SEQ ID NO: 2487907 - RNA, 19 nt, Artificial Sequence
  Description of Artificial Sequence: Synthetic oligonucleotide
aucauuccucggggccgaa

SEQ ID NO: 2487908 - RNA, 19 nt, Artificial Sequence
  Description of Artificial Sequence: Synthetic oligonucleotide
ccgaagccauguuauugcu

SEQ ID NO: 2487909 - RNA, 19 nt, Artificial Sequence
  Description of Artificial Sequence: Synthetic oligonucleotide
cgggaucacauaucuagau

SEQ ID NO: 2487910 - RNA, 19 nt, Artificial Sequence
  Description of Artificial Sequence: Synthetic oligonucleotide
gcagcggguuggguaacaa

SEQ ID NO: 2487911 - RNA, 19 nt, Artificial Sequence
  Description of Artificial Sequence: Synthetic oligonucleotide
gcagcgcaugacaccggga

SEQ ID NO: 2487912 - RNA, 19 nt, Artificial Sequence
  Description of Artificial Sequence: Synthetic oligonucleotide
cgucgaggggcagcgcaug

SEQ ID NO: 2487913 - RNA, 19 nt, Artificial Sequence
  Description of Artificial Sequence: Synthetic oligonucleotide
cgcgguagguaaacuggua

SEQ ID NO: 2487914 - RNA, 19 nt, Artificial Sequence
  Description of Artificial Sequence: Synthetic oligonucleotide
ggggaccgucgaggggcag

SEQ ID NO: 2487915 - RNA, 19 nt, Artificial Sequence
  Description of Artificial Sequence: Synthetic oligonucleotide
cgcaugacaccgggaucac

SEQ ID NO: 2487916 - RNA, 19 nt, Artificial Sequence
  Description of Artificial Sequence: Synthetic oligonucleotide
cggaugccacauucuguaa

SEQ ID NO: 2487917 - RNA, 19 nt, Artificial Sequence
  Description of Artificial Sequence: Synthetic oligonucleotide
gggccgaagccauguuauu

SEQ ID NO: 2487918 - RNA, 19 nt, Artificial Sequence
  Description of Artificial Sequence: Synthetic oligonucleotide
cggggccgaagccauguua

SEQ ID NO: 2487919 - RNA, 19 nt, Artificial Sequence
  Description of Artificial Sequence: Synthetic oligonucleotide
ccgucgaggggcagcgcau

SEQ ID NO: 2487920 - RNA, 19 nt, Artificial Sequence
  Description of Artificial Sequence: Synthetic oligonucleotide
gcacggaguggggcuuagu

SEQ ID NO: 2487921 - RNA, 19 nt, Artificial Sequence
  Description of Artificial Sequence: Synthetic oligonucleotide
aauaacacagacuugcaac

SEQ ID NO: 2487922 - RNA, 19 nt, Artificial Sequence
  Description of Artificial Sequence: Synthetic oligonucleotide
auaaauaacacagacuugc

SEQ ID NO: 2487923 - RNA, 19 nt, Artificial Sequence
  Description of Artificial Sequence: Synthetic oligonucleotide
aguaacuucacgcucaggg

SEQ ID NO: 2487924 - RNA, 19 nt, Artificial Sequence
  Description of Artificial Sequence: Synthetic oligonucleotide
uguggcucaaucuugaccc

SEQ ID NO: 2487925 - RNA, 19 nt, Artificial Sequence
  Description of Artificial Sequence: Synthetic oligonucleotide
augaccacgauguuggggc

SEQ ID NO: 2487926 - RNA, 19 nt, Artificial Sequence
  Description of Artificial Sequence: Synthetic oligonucleotide
ucaaucuugaccccaacgc

SEQ ID NO: 2487927 - RNA, 19 nt, Artificial Sequence
  Description of Artificial Sequence: Synthetic oligonucleotide
uuauaugucucucggcugg

SEQ ID NO: 2487928 - RNA, 19 nt, Artificial Sequence
  Description of Artificial Sequence: Synthetic oligonucleotide
cauacugaauuccugagcc

SEQ ID NO: 2487929 - RNA, 19 nt, Artificial Sequence
  Description of Artificial Sequence: Synthetic oligonucleotide
aauuccugagcccauccuc

SEQ ID NO: 2487930 - RNA, 19 nt, Artificial Sequence
  Description of Artificial Sequence: Synthetic oligonucleotide
gaauaguuagccaagucag

SEQ ID NO: 2487931 - RNA, 19 nt, Artificial Sequence
  Description of Artificial Sequence: Synthetic oligonucleotide
aucuuauugaggauggugc

SEQ ID NO: 2487932 - RNA, 19 nt, Artificial Sequence
  Description of Artificial Sequence: Synthetic oligonucleotide
uacaucaccauacugaauu

SEQ ID NO: 2487933 - RNA, 19 nt, Artificial Sequence
  Description of Artificial Sequence: Synthetic oligonucleotide
aagagauuggggccguagc

SEQ ID NO: 2487934 - RNA, 19 nt, Artificial Sequence
  Description of Artificial Sequence: Synthetic oligonucleotide
aguuauaugucucucggcu

SEQ ID NO: 2487935 - RNA, 19 nt, Artificial Sequence
  Description of Artificial Sequence: Synthetic oligonucleotide
cuuguuaccacagaggaug

SEQ ID NO: 2487936 - RNA, 19 nt, Artificial Sequence
  Description of Artificial Sequence: Synthetic oligonucleotide
ucuuauugaggauggugcg

SEQ ID NO: 2487937 - RNA, 19 nt, Artificial Sequence
  Description of Artificial Sequence: Synthetic oligonucleotide
uucagguacgguuaggggc

SEQ ID NO: 2487938 - RNA, 19 nt, Artificial Sequence
  Description of Artificial Sequence: Synthetic oligonucleotide
ucgaucuuauugaggaugg

SEQ ID NO: 2487939 - RNA, 19 nt, Artificial Sequence
  Description of Artificial Sequence: Synthetic oligonucleotide
agagauuggggccguagcc

SEQ ID NO: 2487940 - RNA, 19 nt, Artificial Sequence
  Description of Artificial Sequence: Synthetic oligonucleotide
gaacagaugagcuggcucc

SEQ ID NO: 2487941 - RNA, 19 nt, Artificial Sequence
  Description of Artificial Sequence: Synthetic oligonucleotide
uuauugaggauggugcgcg

SEQ ID NO: 2487942 - RNA, 19 nt, Artificial Sequence
  Description of Artificial Sequence: Synthetic oligonucleotide
aguuagccaagucagagga

SEQ ID NO: 2487943 - RNA, 19 nt, Artificial Sequence
  Description of Artificial Sequence: Synthetic oligonucleotide
gucuaguucaccugagucg

SEQ ID NO: 2487944 - RNA, 19 nt, Artificial Sequence
  Description of Artificial Sequence: Synthetic oligonucleotide
gagucgaucuuauugagga

SEQ ID NO: 2487945 - RNA, 19 nt, Artificial Sequence
  Description of Artificial Sequence: Synthetic oligonucleotide
cagacuugcaacagcaggg

SEQ ID NO: 2487946 - RNA, 19 nt, Artificial Sequence
  Description of Artificial Sequence: Synthetic oligonucleotide
ccgguaauaaauaacacag

SEQ ID NO: 2487947 - RNA, 19 nt, Artificial Sequence
  Description of Artificial Sequence: Synthetic oligonucleotide
ugagucgaucuuauugagg

SEQ ID NO: 2487948 - RNA, 19 nt, Artificial Sequence
  Description of Artificial Sequence: Synthetic oligonucleotide
ucuucagguacgguuaggg

SEQ ID NO: 2487949 - RNA, 19 nt, Artificial Sequence
  Description of Artificial Sequence: Synthetic oligonucleotide
uuaccacagaggaugacca

SEQ ID NO: 2487950 - RNA, 19 nt, Artificial Sequence
  Description of Artificial Sequence: Synthetic oligonucleotide
aacuccgcgucaccgaccg

SEQ ID NO: 2487951 - RNA, 19 nt, Artificial Sequence
  Description of Artificial Sequence: Synthetic oligonucleotide
aaagcgggaggccucuagg

SEQ ID NO: 2487952 - RNA, 19 nt, Artificial Sequence
  Description of Artificial Sequence: Synthetic oligonucleotide
cuaggaaaguaacuucacg

SEQ ID NO: 2487953 - RNA, 19 nt, Artificial Sequence
  Description of Artificial Sequence: Synthetic oligonucleotide
ucgggcaucagucagccac

SEQ ID NO: 2487954 - RNA, 19 nt, Artificial Sequence
  Description of Artificial Sequence: Synthetic oligonucleotide
uaauaacuccgcgucaccg

SEQ ID NO: 2487955 - RNA, 19 nt, Artificial Sequence
  Description of Artificial Sequence: Synthetic oligonucleotide
aacuucacgcucagggucc

SEQ ID NO: 2487956 - RNA, 19 nt, Artificial Sequence
  Description of Artificial Sequence: Synthetic oligonucleotide
aacggcccuggucucaagc

SEQ ID NO: 2487957 - RNA, 19 nt, Artificial Sequence
  Description of Artificial Sequence: Synthetic oligonucleotide
ucgguaauaacuccgcguc

SEQ ID NO: 2487958 - RNA, 19 nt, Artificial Sequence
  Description of Artificial Sequence: Synthetic oligonucleotide
auaguuagccaagucagag

SEQ ID NO: 2487959 - RNA, 19 nt, Artificial Sequence
  Description of Artificial Sequence: Synthetic oligonucleotide
aggaaaguaacuucacgcu

SEQ ID NO: 2487960 - RNA, 19 nt, Artificial Sequence
  Description of Artificial Sequence: Synthetic oligonucleotide
aauaacuccgcgucaccga

SEQ ID NO: 2487961 - RNA, 19 nt, Artificial Sequence
  Description of Artificial Sequence: Synthetic oligonucleotide
auacugaauuccugagccc

SEQ ID NO: 2487962 - RNA, 19 nt, Artificial Sequence
  Description of Artificial Sequence: Synthetic oligonucleotide
aacgccaggccccaccagg

SEQ ID NO: 2487963 - RNA, 19 nt, Artificial Sequence
  Description of Artificial Sequence: Synthetic oligonucleotide
uaguuagccaagucagagg

SEQ ID NO: 2487964 - RNA, 19 nt, Artificial Sequence
  Description of Artificial Sequence: Synthetic oligonucleotide
gauacaucaccauacugaa

SEQ ID NO: 2487965 - RNA, 19 nt, Artificial Sequence
  Description of Artificial Sequence: Synthetic oligonucleotide
ucagguacgguuaggggcu

SEQ ID NO: 2487966 - RNA, 19 nt, Artificial Sequence
  Description of Artificial Sequence: Synthetic oligonucleotide
ucuaguucaccugagucga

SEQ ID NO: 2487967 - RNA, 19 nt, Artificial Sequence
  Description of Artificial Sequence: Synthetic oligonucleotide
auaacuccgcgucaccgac

SEQ ID NO: 2487968 - RNA, 19 nt, Artificial Sequence
  Description of Artificial Sequence: Synthetic oligonucleotide
aggaggaauaguuagccaa

SEQ ID NO: 2487969 - RNA, 19 nt, Artificial Sequence
  Description of Artificial Sequence: Synthetic oligonucleotide
ugaauuccugagcccaucc

SEQ ID NO: 2487970 - RNA, 19 nt, Artificial Sequence
  Description of Artificial Sequence: Synthetic oligonucleotide
cucaaucuugaccccaacg

SEQ ID NO: 2487971 - RNA, 19 nt, Artificial Sequence
  Description of Artificial Sequence: Synthetic oligonucleotide
ggaauaguuagccaaguca

SEQ ID NO: 2487972 - RNA, 19 nt, Artificial Sequence
  Description of Artificial Sequence: Synthetic oligonucleotide
aggaauaguuagccaaguc

SEQ ID NO: 2487973 - RNA, 19 nt, Artificial Sequence
  Description of Artificial Sequence: Synthetic oligonucleotide
gcaucagucagccacgccg

SEQ ID NO: 2487974 - RNA, 19 nt, Artificial Sequence
  Description of Artificial Sequence: Synthetic oligonucleotide
uccaggagaacagaugagc

SEQ ID NO: 2487975 - RNA, 19 nt, Artificial Sequence
  Description of Artificial Sequence: Synthetic oligonucleotide
gaaaguaacuucacgcuca

SEQ ID NO: 2487976 - RNA, 19 nt, Artificial Sequence
  Description of Artificial Sequence: Synthetic oligonucleotide
uacgguuaggggcucagga

SEQ ID NO: 2487977 - RNA, 19 nt, Artificial Sequence
  Description of Artificial Sequence: Synthetic oligonucleotide
caaucuugaccccaacgcc

SEQ ID NO: 2487978 - RNA, 19 nt, Artificial Sequence
  Description of Artificial Sequence: Synthetic oligonucleotide
guuaccacagaggaugacc

SEQ ID NO: 2487979 - RNA, 19 nt, Artificial Sequence
  Description of Artificial Sequence: Synthetic oligonucleotide
gagggauacaucaccauac

SEQ ID NO: 2487980 - RNA, 19 nt, Artificial Sequence
  Description of Artificial Sequence: Synthetic oligonucleotide
aggaagguggggccaaacg

SEQ ID NO: 2487981 - RNA, 19 nt, Artificial Sequence
  Description of Artificial Sequence: Synthetic oligonucleotide
agacuugcaacagcagggc

SEQ ID NO: 2487982 - RNA, 19 nt, Artificial Sequence
  Description of Artificial Sequence: Synthetic oligonucleotide
cucccgguaauaaauaaca

SEQ ID NO: 2487983 - RNA, 19 nt, Artificial Sequence
  Description of Artificial Sequence: Synthetic oligonucleotide
uccagguccuucuuguuac

SEQ ID NO: 2487984 - RNA, 19 nt, Artificial Sequence
  Description of Artificial Sequence: Synthetic oligonucleotide
ucaccauacugaauuccug

SEQ ID NO: 2487985 - RNA, 19 nt, Artificial Sequence
  Description of Artificial Sequence: Synthetic oligonucleotide
cucuaggaaaguaacuuca

SEQ ID NO: 2487986 - RNA, 19 nt, Artificial Sequence
  Description of Artificial Sequence: Synthetic oligonucleotide
gaugaccacgauguugggg

SEQ ID NO: 2487987 - RNA, 19 nt, Artificial Sequence
  Description of Artificial Sequence: Synthetic oligonucleotide
gaguuauaugucucucggc

SEQ ID NO: 2487988 - RNA, 19 nt, Artificial Sequence
  Description of Artificial Sequence: Synthetic oligonucleotide
cuggucuccaggaacauca

SEQ ID NO: 2487989 - RNA, 19 nt, Artificial Sequence
  Description of Artificial Sequence: Synthetic oligonucleotide
cuagcgaguuauaugucuc

SEQ ID NO: 2487990 - RNA, 19 nt, Artificial Sequence
  Description of Artificial Sequence: Synthetic oligonucleotide
cuuauugaggauggugcgc

SEQ ID NO: 2487991 - RNA, 19 nt, Artificial Sequence
  Description of Artificial Sequence: Synthetic oligonucleotide
aguucaccugagucgaucu

SEQ ID NO: 2487992 - RNA, 19 nt, Artificial Sequence
  Description of Artificial Sequence: Synthetic oligonucleotide
ucccgguaauaaauaacac

SEQ ID NO: 2487993 - RNA, 19 nt, Artificial Sequence
  Description of Artificial Sequence: Synthetic oligonucleotide
uccacguucucacccguga

SEQ ID NO: 2487994 - RNA, 19 nt, Artificial Sequence
  Description of Artificial Sequence: Synthetic oligonucleotide
cuguggcucaaucuugacc

SEQ ID NO: 2487995 - RNA, 19 nt, Artificial Sequence
  Description of Artificial Sequence: Synthetic oligonucleotide
cugagucgaucuuauugag

SEQ ID NO: 2487996 - RNA, 19 nt, Artificial Sequence
  Description of Artificial Sequence: Synthetic oligonucleotide
gagagcgcuggucuccagg

SEQ ID NO: 2487997 - RNA, 19 nt, Artificial Sequence
  Description of Artificial Sequence: Synthetic oligonucleotide
caucagucagccacgccgc

SEQ ID NO: 2487998 - RNA, 19 nt, Artificial Sequence
  Description of Artificial Sequence: Synthetic oligonucleotide
gcucaggaggaauaguuag

SEQ ID NO: 2487999 - RNA, 19 nt, Artificial Sequence
  Description of Artificial Sequence: Synthetic oligonucleotide
acgguuaggggcucaggag

SEQ ID NO: 2488000 - RNA, 19 nt, Artificial Sequence
  Description of Artificial Sequence: Synthetic oligonucleotide
uugaggauggugcgcgcgc

SEQ ID NO: 2488001 - RNA, 19 nt, Artificial Sequence
  Description of Artificial Sequence: Synthetic oligonucleotide
acgauguuggggcuggcca

SEQ ID NO: 2488002 - RNA, 19 nt, Artificial Sequence
  Description of Artificial Sequence: Synthetic oligonucleotide
gaagagauuggggccguag

SEQ ID NO: 2488003 - RNA, 19 nt, Artificial Sequence
  Description of Artificial Sequence: Synthetic oligonucleotide
ucuuguuaccacagaggau

SEQ ID NO: 2488004 - RNA, 19 nt, Artificial Sequence
  Description of Artificial Sequence: Synthetic oligonucleotide
aagcgggaggccucuagga

SEQ ID NO: 2488005 - RNA, 19 nt, Artificial Sequence
  Description of Artificial Sequence: Synthetic oligonucleotide
aaccgcuccugccagcagu

SEQ ID NO: 2488006 - RNA, 19 nt, Artificial Sequence
  Description of Artificial Sequence: Synthetic oligonucleotide
ucagccacgccgcuagcga

SEQ ID NO: 2488007 - RNA, 19 nt, Artificial Sequence
  Description of Artificial Sequence: Synthetic oligonucleotide
caucaccauacugaauucc

SEQ ID NO: 2488008 - RNA, 19 nt, Artificial Sequence
  Description of Artificial Sequence: Synthetic oligonucleotide
auugaggauggugcgcgcg

SEQ ID NO: 2488009 - RNA, 19 nt, Artificial Sequence
  Description of Artificial Sequence: Synthetic oligonucleotide
uuguuaccacagaggauga

SEQ ID NO: 2488010 - RNA, 19 nt, Artificial Sequence
  Description of Artificial Sequence: Synthetic oligonucleotide
ugccccucgguaauaacuc

SEQ ID NO: 2488011 - RNA, 19 nt, Artificial Sequence
  Description of Artificial Sequence: Synthetic oligonucleotide
guaauaacuccgcgucacc

SEQ ID NO: 2488012 - RNA, 19 nt, Artificial Sequence
  Description of Artificial Sequence: Synthetic oligonucleotide
cuggcggagggauacauca

SEQ ID NO: 2488013 - RNA, 19 nt, Artificial Sequence
  Description of Artificial Sequence: Synthetic oligonucleotide
cuugcaacagcagggccag

SEQ ID NO: 2488014 - RNA, 19 nt, Artificial Sequence
  Description of Artificial Sequence: Synthetic oligonucleotide
agggauacaucaccauacu

SEQ ID NO: 2488015 - RNA, 19 nt, Artificial Sequence
  Description of Artificial Sequence: Synthetic oligonucleotide
ggaaaguaacuucacgcuc

SEQ ID NO: 2488016 - RNA, 19 nt, Artificial Sequence
  Description of Artificial Sequence: Synthetic oligonucleotide
agcgaguuauaugucucuc

SEQ ID NO: 2488017 - RNA, 19 nt, Artificial Sequence
  Description of Artificial Sequence: Synthetic oligonucleotide
gacuugcaacagcagggcc

SEQ ID NO: 2488018 - RNA, 19 nt, Artificial Sequence
  Description of Artificial Sequence: Synthetic oligonucleotide
uagcgaguuauaugucucu

SEQ ID NO: 2488019 - RNA, 19 nt, Artificial Sequence
  Description of Artificial Sequence: Synthetic oligonucleotide
ugaccccaacgccaggccc

SEQ ID NO: 2488020 - RNA, 19 nt, Artificial Sequence
  Description of Artificial Sequence: Synthetic oligonucleotide
aggccucuaggaaaguaac

SEQ ID NO: 2488021 - RNA, 19 nt, Artificial Sequence
  Description of Artificial Sequence: Synthetic oligonucleotide
gcgaguuauaugucucucg

SEQ ID NO: 2488022 - RNA, 19 nt, Artificial Sequence
  Description of Artificial Sequence: Synthetic oligonucleotide
cuucgggcagggcuggucc

SEQ ID NO: 2488023 - RNA, 19 nt, Artificial Sequence
  Description of Artificial Sequence: Synthetic oligonucleotide
acuugcaacagcagggcca

SEQ ID NO: 2488024 - RNA, 19 nt, Artificial Sequence
  Description of Artificial Sequence: Synthetic oligonucleotide
uugaccccaacgccaggcc

SEQ ID NO: 2488025 - RNA, 19 nt, Artificial Sequence
  Description of Artificial Sequence: Synthetic oligonucleotide
cagcguucgggcaucaguc

SEQ ID NO: 2488026 - RNA, 19 nt, Artificial Sequence
  Description of Artificial Sequence: Synthetic oligonucleotide
agagcgcuggucuccagga

SEQ ID NO: 2488027 - RNA, 19 nt, Artificial Sequence
  Description of Artificial Sequence: Synthetic oligonucleotide
ucugggucccagccuucgg

SEQ ID NO: 2488028 - RNA, 19 nt, Artificial Sequence
  Description of Artificial Sequence: Synthetic oligonucleotide
ucaccugagucgaucuuau

SEQ ID NO: 2488029 - RNA, 19 nt, Artificial Sequence
  Description of Artificial Sequence: Synthetic oligonucleotide
cgaguuauaugucucucgg

SEQ ID NO: 2488030 - RNA, 19 nt, Artificial Sequence
  Description of Artificial Sequence: Synthetic oligonucleotide
cagucagccacgccgcuag

SEQ ID NO: 2488031 - RNA, 19 nt, Artificial Sequence
  Description of Artificial Sequence: Synthetic oligonucleotide
gguaauaacuccgcgucac

SEQ ID NO: 2488032 - RNA, 19 nt, Artificial Sequence
  Description of Artificial Sequence: Synthetic oligonucleotide
gaccgaaaccgcuccugcc

SEQ ID NO: 2488033 - RNA, 19 nt, Artificial Sequence
  Description of Artificial Sequence: Synthetic oligonucleotide
uucaccugagucgaucuua

SEQ ID NO: 2488034 - RNA, 19 nt, Artificial Sequence
  Description of Artificial Sequence: Synthetic oligonucleotide
uauugaggauggugcgcgc

SEQ ID NO: 2488035 - RNA, 19 nt, Artificial Sequence
  Description of Artificial Sequence: Synthetic oligonucleotide
ucaccgaccgaaaccgcuc

SEQ ID NO: 2488036 - RNA, 19 nt, Artificial Sequence
  Description of Artificial Sequence: Synthetic oligonucleotide
uucuucagguacgguuagg

SEQ ID NO: 2488037 - RNA, 19 nt, Artificial Sequence
  Description of Artificial Sequence: Synthetic oligonucleotide
ugccgcagcuggcggaggg

SEQ ID NO: 2488038 - RNA, 19 nt, Artificial Sequence
  Description of Artificial Sequence: Synthetic oligonucleotide
ugggucccagccuucgggc

SEQ ID NO: 2488039 - RNA, 19 nt, Artificial Sequence
  Description of Artificial Sequence: Synthetic oligonucleotide
uucugggucccagccuucg

SEQ ID NO: 2488040 - RNA, 19 nt, Artificial Sequence
  Description of Artificial Sequence: Synthetic oligonucleotide
ucggggucuaguucaccug

SEQ ID NO: 2488041 - RNA, 19 nt, Artificial Sequence
  Description of Artificial Sequence: Synthetic oligonucleotide
gaguucuucagguacgguu

SEQ ID NO: 2488042 - RNA, 19 nt, Artificial Sequence
  Description of Artificial Sequence: Synthetic oligonucleotide
accacgauguuggggcugg

SEQ ID NO: 2488043 - RNA, 19 nt, Artificial Sequence
  Description of Artificial Sequence: Synthetic oligonucleotide
uccucucggggucuaguuc

SEQ ID NO: 2488044 - RNA, 19 nt, Artificial Sequence
  Description of Artificial Sequence: Synthetic oligonucleotide
aaaccgcuccugccagcag

SEQ ID NO: 2488045 - RNA, 19 nt, Artificial Sequence
  Description of Artificial Sequence: Synthetic oligonucleotide
caaagcgggaggccucuag

SEQ ID NO: 2488046 - RNA, 19 nt, Artificial Sequence
  Description of Artificial Sequence: Synthetic oligonucleotide
guucgggcaucagucagcc

SEQ ID NO: 2488047 - RNA, 19 nt, Artificial Sequence
  Description of Artificial Sequence: Synthetic oligonucleotide
uaacuccgcgucaccgacc

SEQ ID NO: 2488048 - RNA, 19 nt, Artificial Sequence
  Description of Artificial Sequence: Synthetic oligonucleotide
ggcggagggauacaucacc

SEQ ID NO: 2488049 - RNA, 19 nt, Artificial Sequence
  Description of Artificial Sequence: Synthetic oligonucleotide
ccauacugaauuccugagc

SEQ ID NO: 2488050 - RNA, 19 nt, Artificial Sequence
  Description of Artificial Sequence: Synthetic oligonucleotide
ccugagucgaucuuauuga

SEQ ID NO: 2488051 - RNA, 19 nt, Artificial Sequence
  Description of Artificial Sequence: Synthetic oligonucleotide
guaacuucacgcucagggu

SEQ ID NO: 2488052 - RNA, 19 nt, Artificial Sequence
  Description of Artificial Sequence: Synthetic oligonucleotide
gaaaccgcuccugccagca

SEQ ID NO: 2488053 - RNA, 19 nt, Artificial Sequence
  Description of Artificial Sequence: Synthetic oligonucleotide
uaguucaccugagucgauc

SEQ ID NO: 2488054 - RNA, 19 nt, Artificial Sequence
  Description of Artificial Sequence: Synthetic oligonucleotide
ggccguagccucuuggggc

SEQ ID NO: 2488055 - RNA, 19 nt, Artificial Sequence
  Description of Artificial Sequence: Synthetic oligonucleotide
gcgucaccgaccgaaaccg

SEQ ID NO: 2488056 - RNA, 19 nt, Artificial Sequence
  Description of Artificial Sequence: Synthetic oligonucleotide
gaggccucuaggaaaguaa

SEQ ID NO: 2488057 - RNA, 19 nt, Artificial Sequence
  Description of Artificial Sequence: Synthetic oligonucleotide
cccgguaauaaauaacaca

SEQ ID NO: 2488058 - RNA, 19 nt, Artificial Sequence
  Description of Artificial Sequence: Synthetic oligonucleotide
agcguucgggcaucaguca

SEQ ID NO: 2488059 - RNA, 19 nt, Artificial Sequence
  Description of Artificial Sequence: Synthetic oligonucleotide
agucgaucuuauugaggau

SEQ ID NO: 2488060 - RNA, 19 nt, Artificial Sequence
  Description of Artificial Sequence: Synthetic oligonucleotide
uauaugucucucggcuggu

SEQ ID NO: 2488061 - RNA, 19 nt, Artificial Sequence
  Description of Artificial Sequence: Synthetic oligonucleotide
gucagccacgccgcuagcg

SEQ ID NO: 2488062 - RNA, 19 nt, Artificial Sequence
  Description of Artificial Sequence: Synthetic oligonucleotide
caggucucagcagccacag

SEQ ID NO: 2488063 - RNA, 19 nt, Artificial Sequence
  Description of Artificial Sequence: Synthetic oligonucleotide
ccucuaggaaaguaacuuc

SEQ ID NO: 2488064 - RNA, 19 nt, Artificial Sequence
  Description of Artificial Sequence: Synthetic oligonucleotide
uggcucaaucuugacccca

SEQ ID NO: 2488065 - RNA, 19 nt, Artificial Sequence
  Description of Artificial Sequence: Synthetic oligonucleotide
cucgguaauaacuccgcgu

SEQ ID NO: 2488066 - RNA, 19 nt, Artificial Sequence
  Description of Artificial Sequence: Synthetic oligonucleotide
uguuaccacagaggaugac

SEQ ID NO: 2488067 - RNA, 19 nt, Artificial Sequence
  Description of Artificial Sequence: Synthetic oligonucleotide
aaacggcccuggucucaag

SEQ ID NO: 2488068 - RNA, 19 nt, Artificial Sequence
  Description of Artificial Sequence: Synthetic oligonucleotide
caccgaccgaaaccgcucc

SEQ ID NO: 2488069 - RNA, 19 nt, Artificial Sequence
  Description of Artificial Sequence: Synthetic oligonucleotide
gccgcuagcgaguuauaug

SEQ ID NO: 2488070 - RNA, 19 nt, Artificial Sequence
  Description of Artificial Sequence: Synthetic oligonucleotide
cagccuucgggcagggcug

SEQ ID NO: 2488071 - RNA, 19 nt, Artificial Sequence
  Description of Artificial Sequence: Synthetic oligonucleotide
agcgggaggccucuaggaa

SEQ ID NO: 2488072 - RNA, 19 nt, Artificial Sequence
  Description of Artificial Sequence: Synthetic oligonucleotide
ugaccacgauguuggggcu

SEQ ID NO: 2488073 - RNA, 19 nt, Artificial Sequence
  Description of Artificial Sequence: Synthetic oligonucleotide
uggcggagggauacaucac

SEQ ID NO: 2488074 - RNA, 19 nt, Artificial Sequence
  Description of Artificial Sequence: Synthetic oligonucleotide
guccaggagaacagaugag

SEQ ID NO: 2488075 - RNA, 19 nt, Artificial Sequence
  Description of Artificial Sequence: Synthetic oligonucleotide
ggcgcugcgaggcugccgc

SEQ ID NO: 2488076 - RNA, 19 nt, Artificial Sequence
  Description of Artificial Sequence: Synthetic oligonucleotide
ccucccgguaauaaauaac

SEQ ID NO: 2488077 - RNA, 19 nt, Artificial Sequence
  Description of Artificial Sequence: Synthetic oligonucleotide
cgguuaggggcucaggagg

SEQ ID NO: 2488078 - RNA, 19 nt, Artificial Sequence
  Description of Artificial Sequence: Synthetic oligonucleotide
acgccaggccccaccaggc

SEQ ID NO: 2488079 - RNA, 19 nt, Artificial Sequence
  Description of Artificial Sequence: Synthetic oligonucleotide
uggugcgcgcgcacuucag

SEQ ID NO: 2488080 - RNA, 19 nt, Artificial Sequence
  Description of Artificial Sequence: Synthetic oligonucleotide
ggagggauacaucaccaua

SEQ ID NO: 2488081 - RNA, 19 nt, Artificial Sequence
  Description of Artificial Sequence: Synthetic oligonucleotide
auggugcgcgcgcacuuca

SEQ ID NO: 2488082 - RNA, 19 nt, Artificial Sequence
  Description of Artificial Sequence: Synthetic oligonucleotide
ccccucgguaauaacuccg

SEQ ID NO: 2488083 - RNA, 19 nt, Artificial Sequence
  Description of Artificial Sequence: Synthetic oligonucleotide
acccgugagagcgcugguc

SEQ ID NO: 2488084 - RNA, 19 nt, Artificial Sequence
  Description of Artificial Sequence: Synthetic oligonucleotide
ugcgcgcgcacuucaggaa

SEQ ID NO: 2488085 - RNA, 19 nt, Artificial Sequence
  Description of Artificial Sequence: Synthetic oligonucleotide
ggugcgcgcgcacuucagg

SEQ ID NO: 2488086 - RNA, 19 nt, Artificial Sequence
  Description of Artificial Sequence: Synthetic oligonucleotide
uuggggcuggccagcguuc

SEQ ID NO: 2488087 - RNA, 19 nt, Artificial Sequence
  Description of Artificial Sequence: Synthetic oligonucleotide
gcuagcgaguuauaugucu

SEQ ID NO: 2488088 - RNA, 19 nt, Artificial Sequence
  Description of Artificial Sequence: Synthetic oligonucleotide
cagccacgccgcuagcgag

SEQ ID NO: 2488089 - RNA, 19 nt, Artificial Sequence
  Description of Artificial Sequence: Synthetic oligonucleotide
uuccugagcccauccucuc

SEQ ID NO: 2488090 - RNA, 19 nt, Artificial Sequence
  Description of Artificial Sequence: Synthetic oligonucleotide
auaugucucucggcuggug

SEQ ID NO: 2488091 - RNA, 19 nt, Artificial Sequence
  Description of Artificial Sequence: Synthetic oligonucleotide
ucucacccgugagagcgcu

SEQ ID NO: 2488092 - RNA, 19 nt, Artificial Sequence
  Description of Artificial Sequence: Synthetic oligonucleotide
aggucucagcagccacagg

SEQ ID NO: 2488093 - RNA, 19 nt, Artificial Sequence
  Description of Artificial Sequence: Synthetic oligonucleotide
gagcccauccucucggggu

SEQ ID NO: 2488094 - RNA, 19 nt, Artificial Sequence
  Description of Artificial Sequence: Synthetic oligonucleotide
guacgguuaggggcucagg

SEQ ID NO: 2488095 - RNA, 19 nt, Artificial Sequence
  Description of Artificial Sequence: Synthetic oligonucleotide
ggccaaacggcccuggucu

SEQ ID NO: 2488096 - RNA, 19 nt, Artificial Sequence
  Description of Artificial Sequence: Synthetic oligonucleotide
uucgggcagggcuggucca

SEQ ID NO: 2488097 - RNA, 19 nt, Artificial Sequence
  Description of Artificial Sequence: Synthetic oligonucleotide
cugaauuccugagcccauc

SEQ ID NO: 2488098 - RNA, 19 nt, Artificial Sequence
  Description of Artificial Sequence: Synthetic oligonucleotide
ugagagcgcuggucuccag

SEQ ID NO: 2488099 - RNA, 19 nt, Artificial Sequence
  Description of Artificial Sequence: Synthetic oligonucleotide
gaggauggugcgcgcgcac

SEQ ID NO: 2488100 - RNA, 19 nt, Artificial Sequence
  Description of Artificial Sequence: Synthetic oligonucleotide
ggccagggaagagauuggg

SEQ ID NO: 2488101 - RNA, 19 nt, Artificial Sequence
  Description of Artificial Sequence: Synthetic oligonucleotide
cccucgguaauaacuccgc

SEQ ID NO: 2488102 - RNA, 19 nt, Artificial Sequence
  Description of Artificial Sequence: Synthetic oligonucleotide
gaccacgauguuggggcug

SEQ ID NO: 2488103 - RNA, 19 nt, Artificial Sequence
  Description of Artificial Sequence: Synthetic oligonucleotide
ccucgguaauaacuccgcg

SEQ ID NO: 2488104 - RNA, 19 nt, Artificial Sequence
  Description of Artificial Sequence: Synthetic oligonucleotide
gugcgcgcgcacuucagga

SEQ ID NO: 2488105 - RNA, 19 nt, Artificial Sequence
  Description of Artificial Sequence: Synthetic oligonucleotide
aggccucccgguaauaaau

SEQ ID NO: 2488106 - RNA, 19 nt, Artificial Sequence
  Description of Artificial Sequence: Synthetic oligonucleotide
gcguucgggcaucagucag

SEQ ID NO: 2488107 - RNA, 19 nt, Artificial Sequence
  Description of Artificial Sequence: Synthetic oligonucleotide
agaggaugaccacgauguu

SEQ ID NO: 2488108 - RNA, 19 nt, Artificial Sequence
  Description of Artificial Sequence: Synthetic oligonucleotide
uagccucuuggggccgugg

SEQ ID NO: 2488109 - RNA, 19 nt, Artificial Sequence
  Description of Artificial Sequence: Synthetic oligonucleotide
uccgcgucaccgaccgaaa

SEQ ID NO: 2488110 - RNA, 19 nt, Artificial Sequence
  Description of Artificial Sequence: Synthetic oligonucleotide
gauggugcgcgcgcacuuc

SEQ ID NO: 2488111 - RNA, 19 nt, Artificial Sequence
  Description of Artificial Sequence: Synthetic oligonucleotide
agcagccacagggcugagg

SEQ ID NO: 2488112 - RNA, 19 nt, Artificial Sequence
  Description of Artificial Sequence: Synthetic oligonucleotide
ucucggggucuaguucacc

SEQ ID NO: 2488113 - RNA, 19 nt, Artificial Sequence
  Description of Artificial Sequence: Synthetic oligonucleotide
ccugccagcagugucccag

SEQ ID NO: 2488114 - RNA, 19 nt, Artificial Sequence
  Description of Artificial Sequence: Synthetic oligonucleotide
uggggccaaacggcccugg

SEQ ID NO: 2488115 - RNA, 19 nt, Artificial Sequence
  Description of Artificial Sequence: Synthetic oligonucleotide
cugccccucgguaauaacu

SEQ ID NO: 2488116 - RNA, 19 nt, Artificial Sequence
  Description of Artificial Sequence: Synthetic oligonucleotide
ucgggcagggcugguccag

SEQ ID NO: 2488117 - RNA, 19 nt, Artificial Sequence
  Description of Artificial Sequence: Synthetic oligonucleotide
cucggggucuaguucaccu

SEQ ID NO: 2488118 - RNA, 19 nt, Artificial Sequence
  Description of Artificial Sequence: Synthetic oligonucleotide
acugaauuccugagcccau

SEQ ID NO: 2488119 - RNA, 19 nt, Artificial Sequence
  Description of Artificial Sequence: Synthetic oligonucleotide
auacaucaccauacugaau

SEQ ID NO: 2488120 - RNA, 19 nt, Artificial Sequence
  Description of Artificial Sequence: Synthetic oligonucleotide
gguacgguuaggggcucag

SEQ ID NO: 2488121 - RNA, 19 nt, Artificial Sequence
  Description of Artificial Sequence: Synthetic oligonucleotide
accgaccgaaaccgcuccu

SEQ ID NO: 2488122 - RNA, 19 nt, Artificial Sequence
  Description of Artificial Sequence: Synthetic oligonucleotide
cacgcucaggguccagguc

SEQ ID NO: 2488123 - RNA, 19 nt, Artificial Sequence
  Description of Artificial Sequence: Synthetic oligonucleotide
gcagcuggcggagggauac

SEQ ID NO: 2488124 - RNA, 19 nt, Artificial Sequence
  Description of Artificial Sequence: Synthetic oligonucleotide
ggagaacagaugagcuggc

SEQ ID NO: 2488125 - RNA, 19 nt, Artificial Sequence
  Description of Artificial Sequence: Synthetic oligonucleotide
gcgcgcgcacuucaggaag

SEQ ID NO: 2488126 - RNA, 19 nt, Artificial Sequence
  Description of Artificial Sequence: Synthetic oligonucleotide
ccgcuagcgaguuauaugu

SEQ ID NO: 2488127 - RNA, 19 nt, Artificial Sequence
  Description of Artificial Sequence: Synthetic oligonucleotide
gguuaggggcucaggagga

SEQ ID NO: 2488128 - RNA, 19 nt, Artificial Sequence
  Description of Artificial Sequence: Synthetic oligonucleotide
accgcuccugccagcagug

SEQ ID NO: 2488129 - RNA, 19 nt, Artificial Sequence
  Description of Artificial Sequence: Synthetic oligonucleotide
caggaagguggggccaaac

SEQ ID NO: 2488130 - RNA, 19 nt, Artificial Sequence
  Description of Artificial Sequence: Synthetic oligonucleotide
cgcgucaccgaccgaaacc

SEQ ID NO: 2488131 - RNA, 19 nt, Artificial Sequence
  Description of Artificial Sequence: Synthetic oligonucleotide
gccccucgguaauaacucc

SEQ ID NO: 2488132 - RNA, 19 nt, Artificial Sequence
  Description of Artificial Sequence: Synthetic oligonucleotide
caggccucccgguaauaaa

SEQ ID NO: 2488133 - RNA, 19 nt, Artificial Sequence
  Description of Artificial Sequence: Synthetic oligonucleotide
cgauguuggggcuggccag

SEQ ID NO: 2488134 - RNA, 19 nt, Artificial Sequence
  Description of Artificial Sequence: Synthetic oligonucleotide
caacgccaggccccaccag

SEQ ID NO: 2488135 - RNA, 19 nt, Artificial Sequence
  Description of Artificial Sequence: Synthetic oligonucleotide
agcuggcggagggauacau

SEQ ID NO: 2488136 - RNA, 19 nt, Artificial Sequence
  Description of Artificial Sequence: Synthetic oligonucleotide
cgcacuucaggaaggcuuc

SEQ ID NO: 2488137 - RNA, 19 nt, Artificial Sequence
  Description of Artificial Sequence: Synthetic oligonucleotide
ggcaucagucagccacgcc

SEQ ID NO: 2488138 - RNA, 19 nt, Artificial Sequence
  Description of Artificial Sequence: Synthetic oligonucleotide
gggccgugguucugggucc

SEQ ID NO: 2488139 - RNA, 19 nt, Artificial Sequence
  Description of Artificial Sequence: Synthetic oligonucleotide
guuggggcuggccagcguu

SEQ ID NO: 2488140 - RNA, 19 nt, Artificial Sequence
  Description of Artificial Sequence: Synthetic oligonucleotide
cguucgggcaucagucagc

SEQ ID NO: 2488141 - RNA, 19 nt, Artificial Sequence
  Description of Artificial Sequence: Synthetic oligonucleotide
ggucucaagcucugggagu

SEQ ID NO: 2488142 - RNA, 19 nt, Artificial Sequence
  Description of Artificial Sequence: Synthetic oligonucleotide
gcugcgaggcugccgcagc

SEQ ID NO: 2488143 - RNA, 19 nt, Artificial Sequence
  Description of Artificial Sequence: Synthetic oligonucleotide
ggggucuaguucaccugag

SEQ ID NO: 2488144 - RNA, 19 nt, Artificial Sequence
  Description of Artificial Sequence: Synthetic oligonucleotide
gucaccgaccgaaaccgcu

SEQ ID NO: 2488145 - RNA, 19 nt, Artificial Sequence
  Description of Artificial Sequence: Synthetic oligonucleotide
gggccaaacggcccugguc

SEQ ID NO: 2488146 - RNA, 19 nt, Artificial Sequence
  Description of Artificial Sequence: Synthetic oligonucleotide
gcgggaggccucuaggaaa

SEQ ID NO: 2488147 - RNA, 19 nt, Artificial Sequence
  Description of Artificial Sequence: Synthetic oligonucleotide
gccucccgguaauaaauaa

SEQ ID NO: 2488148 - RNA, 19 nt, Artificial Sequence
  Description of Artificial Sequence: Synthetic oligonucleotide
gcucaaucuugaccccaac

SEQ ID NO: 2488149 - RNA, 19 nt, Artificial Sequence
  Description of Artificial Sequence: Synthetic oligonucleotide
cgggcaucagucagccacg

SEQ ID NO: 2488150 - RNA, 19 nt, Artificial Sequence
  Description of Artificial Sequence: Synthetic oligonucleotide
gugagagcgcuggucucca

SEQ ID NO: 2488151 - RNA, 19 nt, Artificial Sequence
  Description of Artificial Sequence: Synthetic oligonucleotide
gagcgcuggucuccaggaa

SEQ ID NO: 2488152 - RNA, 19 nt, Artificial Sequence
  Description of Artificial Sequence: Synthetic oligonucleotide
agcugccccucgguaauaa

SEQ ID NO: 2488153 - RNA, 19 nt, Artificial Sequence
  Description of Artificial Sequence: Synthetic oligonucleotide
gccucuaggaaaguaacuu

SEQ ID NO: 2488154 - RNA, 19 nt, Artificial Sequence
  Description of Artificial Sequence: Synthetic oligonucleotide
cccaacgccaggccccacc

SEQ ID NO: 2488155 - RNA, 19 nt, Artificial Sequence
  Description of Artificial Sequence: Synthetic oligonucleotide
ccuguggcucaaucuugac

SEQ ID NO: 2488156 - RNA, 19 nt, Artificial Sequence
  Description of Artificial Sequence: Synthetic oligonucleotide
auuggggccguagccucuu

SEQ ID NO: 2488157 - RNA, 19 nt, Artificial Sequence
  Description of Artificial Sequence: Synthetic oligonucleotide
gcggagggauacaucacca

SEQ ID NO: 2488158 - RNA, 19 nt, Artificial Sequence
  Description of Artificial Sequence: Synthetic oligonucleotide
agccacgccgcuagcgagu

SEQ ID NO: 2488159 - RNA, 19 nt, Artificial Sequence
  Description of Artificial Sequence: Synthetic oligonucleotide
cgaccgaaaccgcuccugc

SEQ ID NO: 2488160 - RNA, 19 nt, Artificial Sequence
  Description of Artificial Sequence: Synthetic oligonucleotide
ggccugggcgcugcgaggc

SEQ ID NO: 2488161 - RNA, 19 nt, Artificial Sequence
  Description of Artificial Sequence: Synthetic oligonucleotide
cgugagagcgcuggucucc

SEQ ID NO: 2488162 - RNA, 19 nt, Artificial Sequence
  Description of Artificial Sequence: Synthetic oligonucleotide
ggcucaggaggaauaguua

SEQ ID NO: 2488163 - RNA, 19 nt, Artificial Sequence
  Description of Artificial Sequence: Synthetic oligonucleotide
caaacggcccuggucucaa

SEQ ID NO: 2488164 - RNA, 19 nt, Artificial Sequence
  Description of Artificial Sequence: Synthetic oligonucleotide
cccuguggcucaaucuuga

SEQ ID NO: 2488165 - RNA, 19 nt, Artificial Sequence
  Description of Artificial Sequence: Synthetic oligonucleotide
cuucacgcucaggguccag

SEQ ID NO: 2488166 - RNA, 19 nt, Artificial Sequence
  Description of Artificial Sequence: Synthetic oligonucleotide
ggggcuggccagcguucgg

SEQ ID NO: 2488167 - RNA, 19 nt, Artificial Sequence
  Description of Artificial Sequence: Synthetic oligonucleotide
cacgccgcuagcgaguuau

SEQ ID NO: 2488168 - RNA, 19 nt, Artificial Sequence
  Description of Artificial Sequence: Synthetic oligonucleotide
gauuggggccguagccucu

SEQ ID NO: 2488169 - RNA, 19 nt, Artificial Sequence
  Description of Artificial Sequence: Synthetic oligonucleotide
cgcgcgcacuucaggaagg

SEQ ID NO: 2488170 - RNA, 19 nt, Artificial Sequence
  Description of Artificial Sequence: Synthetic oligonucleotide
uggccagcguucgggcauc

SEQ ID NO: 2488171 - RNA, 19 nt, Artificial Sequence
  Description of Artificial Sequence: Synthetic oligonucleotide
gcugccccucgguaauaac

SEQ ID NO: 2488172 - RNA, 19 nt, Artificial Sequence
  Description of Artificial Sequence: Synthetic oligonucleotide
guagccucuuggggccgug

SEQ ID NO: 2488173 - RNA, 19 nt, Artificial Sequence
  Description of Artificial Sequence: Synthetic oligonucleotide
agguacgguuaggggcuca

SEQ ID NO: 2488174 - RNA, 19 nt, Artificial Sequence
  Description of Artificial Sequence: Synthetic oligonucleotide
guucaccugagucgaucuu

SEQ ID NO: 2488175 - RNA, 19 nt, Artificial Sequence
  Description of Artificial Sequence: Synthetic oligonucleotide
accccaacgccaggcccca

SEQ ID NO: 2488176 - RNA, 19 nt, Artificial Sequence
  Description of Artificial Sequence: Synthetic oligonucleotide
gggucuaguucaccugagu

SEQ ID NO: 2488177 - RNA, 19 nt, Artificial Sequence
  Description of Artificial Sequence: Synthetic oligonucleotide
ggcucaaucuugaccccaa

SEQ ID NO: 2488178 - RNA, 19 nt, Artificial Sequence
  Description of Artificial Sequence: Synthetic oligonucleotide
cuggccagcguucgggcau

SEQ ID NO: 2488179 - RNA, 19 nt, Artificial Sequence
  Description of Artificial Sequence: Synthetic oligonucleotide
gcuggccagcguucgggca

SEQ ID NO: 2488180 - RNA, 19 nt, Artificial Sequence
  Description of Artificial Sequence: Synthetic oligonucleotide
ggaggccucuaggaaagua

SEQ ID NO: 2488181 - RNA, 19 nt, Artificial Sequence
  Description of Artificial Sequence: Synthetic oligonucleotide
gccaaacggcccuggucuc

SEQ ID NO: 2488182 - RNA, 19 nt, Artificial Sequence
  Description of Artificial Sequence: Synthetic oligonucleotide
guggggccaaacggcccug

SEQ ID NO: 2488183 - RNA, 19 nt, Artificial Sequence
  Description of Artificial Sequence: Synthetic oligonucleotide
gggcucaggaggaauaguu

SEQ ID NO: 2488184 - RNA, 19 nt, Artificial Sequence
  Description of Artificial Sequence: Synthetic oligonucleotide
cgaaaccgcuccugccagc

SEQ ID NO: 2488185 - RNA, 19 nt, Artificial Sequence
  Description of Artificial Sequence: Synthetic oligonucleotide
cagguacgguuaggggcuc

SEQ ID NO: 2488186 - RNA, 19 nt, Artificial Sequence
  Description of Artificial Sequence: Synthetic oligonucleotide
ccaacgccaggccccacca

SEQ ID NO: 2488187 - RNA, 19 nt, Artificial Sequence
  Description of Artificial Sequence: Synthetic oligonucleotide
cgcuagcgaguuauauguc

SEQ ID NO: 2488188 - RNA, 19 nt, Artificial Sequence
  Description of Artificial Sequence: Synthetic oligonucleotide
cggggucuaguucaccuga

SEQ ID NO: 2488189 - RNA, 19 nt, Artificial Sequence
  Description of Artificial Sequence: Synthetic oligonucleotide
ggccucuaggaaaguaacu

SEQ ID NO: 2488190 - RNA, 19 nt, Artificial Sequence
  Description of Artificial Sequence: Synthetic oligonucleotide
acuccgcgucaccgaccga

SEQ ID NO: 2488191 - RNA, 19 nt, Artificial Sequence
  Description of Artificial Sequence: Synthetic oligonucleotide
cuaguucaccugagucgau

SEQ ID NO: 2488192 - RNA, 19 nt, Artificial Sequence
  Description of Artificial Sequence: Synthetic oligonucleotide
gcuggcggagggauacauc

SEQ ID NO: 2488193 - RNA, 19 nt, Artificial Sequence
  Description of Artificial Sequence: Synthetic oligonucleotide
cccgugagagcgcuggucu

SEQ ID NO: 2488194 - RNA, 19 nt, Artificial Sequence
  Description of Artificial Sequence: Synthetic oligonucleotide
cgucaccgaccgaaaccgc

SEQ ID NO: 2488195 - RNA, 19 nt, Artificial Sequence
  Description of Artificial Sequence: Synthetic oligonucleotide
gcgcacuucaggaaggcuu

SEQ ID NO: 2488196 - RNA, 19 nt, Artificial Sequence
  Description of Artificial Sequence: Synthetic oligonucleotide
gcgcgcacuucaggaaggc

SEQ ID NO: 2488197 - RNA, 19 nt, Artificial Sequence
  Description of Artificial Sequence: Synthetic oligonucleotide
cgguaauaacuccgcguca

SEQ ID NO: 2488198 - RNA, 19 nt, Artificial Sequence
  Description of Artificial Sequence: Synthetic oligonucleotide
ccgcgucaccgaccgaaac

SEQ ID NO: 2488199 - RNA, 19 nt, Artificial Sequence
  Description of Artificial Sequence: Synthetic oligonucleotide
gggcaaagcgggaggccuc

SEQ ID NO: 2488200 - RNA, 19 nt, Artificial Sequence
  Description of Artificial Sequence: Synthetic oligonucleotide
ggccucccgguaauaaaua

SEQ ID NO: 2488201 - RNA, 19 nt, Artificial Sequence
  Description of Artificial Sequence: Synthetic oligonucleotide
cgcuccugccagcaguguc

SEQ ID NO: 2488202 - RNA, 19 nt, Artificial Sequence
  Description of Artificial Sequence: Synthetic oligonucleotide
ggccgugguucuggguccc

SEQ ID NO: 2488203 - RNA, 19 nt, Artificial Sequence
  Description of Artificial Sequence: Synthetic oligonucleotide
cacagaggaugaccacgau

SEQ ID NO: 2488204 - RNA, 19 nt, Artificial Sequence
  Description of Artificial Sequence: Synthetic oligonucleotide
gggcgcugcgaggcugccg

SEQ ID NO: 2488205 - RNA, 19 nt, Artificial Sequence
  Description of Artificial Sequence: Synthetic oligonucleotide
gccacggccugggcgcugc

SEQ ID NO: 2488206 - RNA, 19 nt, Artificial Sequence
  Description of Artificial Sequence: Synthetic oligonucleotide
cugcgaggcugccgcagcu

SEQ ID NO: 2488207 - RNA, 19 nt, Artificial Sequence
  Description of Artificial Sequence: Synthetic oligonucleotide
ggcaaagcgggaggccucu

SEQ ID NO: 2488208 - RNA, 19 nt, Artificial Sequence
  Description of Artificial Sequence: Synthetic oligonucleotide
ccaaacggcccuggucuca

SEQ ID NO: 2488209 - RNA, 19 nt, Artificial Sequence
  Description of Artificial Sequence: Synthetic oligonucleotide
ggauggugcgcgcgcacuu

SEQ ID NO: 2488210 - RNA, 19 nt, Artificial Sequence
  Description of Artificial Sequence: Synthetic oligonucleotide
gccagcguucgggcaucag

SEQ ID NO: 2488211 - RNA, 19 nt, Artificial Sequence
  Description of Artificial Sequence: Synthetic oligonucleotide
cacggccugggcgcugcga

SEQ ID NO: 2488212 - RNA, 19 nt, Artificial Sequence
  Description of Artificial Sequence: Synthetic oligonucleotide
ccguagccucuuggggccg

SEQ ID NO: 2488213 - RNA, 19 nt, Artificial Sequence
  Description of Artificial Sequence: Synthetic oligonucleotide
ggggccaaacggcccuggu

SEQ ID NO: 2488214 - RNA, 19 nt, Artificial Sequence
  Description of Artificial Sequence: Synthetic oligonucleotide
acgccgcuagcgaguuaua

SEQ ID NO: 2488215 - RNA, 19 nt, Artificial Sequence
  Description of Artificial Sequence: Synthetic oligonucleotide
cacccgugagagcgcuggu

SEQ ID NO: 2488216 - RNA, 19 nt, Artificial Sequence
  Description of Artificial Sequence: Synthetic oligonucleotide
gcacuucaggaaggcuucu

SEQ ID NO: 2488217 - RNA, 19 nt, Artificial Sequence
  Description of Artificial Sequence: Synthetic oligonucleotide
ccacgauguuggggcuggc

SEQ ID NO: 2488218 - RNA, 19 nt, Artificial Sequence
  Description of Artificial Sequence: Synthetic oligonucleotide
ccacggccugggcgcugcg

SEQ ID NO: 2488219 - RNA, 19 nt, Artificial Sequence
  Description of Artificial Sequence: Synthetic oligonucleotide
cagcugccccucgguaaua

SEQ ID NO: 2488220 - RNA, 19 nt, Artificial Sequence
  Description of Artificial Sequence: Synthetic oligonucleotide
gcgcugcgaggcugccgca

SEQ ID NO: 2488221 - RNA, 19 nt, Artificial Sequence
  Description of Artificial Sequence: Synthetic oligonucleotide
gcaaagcgggaggccucua

SEQ ID NO: 2488222 - RNA, 19 nt, Artificial Sequence
  Description of Artificial Sequence: Synthetic oligonucleotide
gccgugguucuggguccca

SEQ ID NO: 2488223 - RNA, 19 nt, Artificial Sequence
  Description of Artificial Sequence: Synthetic oligonucleotide
gggaggccucuaggaaagu

SEQ ID NO: 2488224 - RNA, 19 nt, Artificial Sequence
  Description of Artificial Sequence: Synthetic oligonucleotide
gccacgccgcuagcgaguu

SEQ ID NO: 2488225 - RNA, 19 nt, Artificial Sequence
  Description of Artificial Sequence: Synthetic oligonucleotide
gccugggcgcugcgaggcu

SEQ ID NO: 2488226 - RNA, 19 nt, Artificial Sequence
  Description of Artificial Sequence: Synthetic oligonucleotide
cgcagcuggcggagggaua

SEQ ID NO: 2488227 - RNA, 19 nt, Artificial Sequence
  Description of Artificial Sequence: Synthetic oligonucleotide
ccgcagcuggcggagggau

SEQ ID NO: 2488228 - RNA, 19 nt, Artificial Sequence
  Description of Artificial Sequence: Synthetic oligonucleotide
cgccgcuagcgaguuauau

SEQ ID NO: 2488229 - RNA, 19 nt, Artificial Sequence
  Description of Artificial Sequence: Synthetic oligonucleotide
cccauccucucggggucua

SEQ ID NO: 2488230 - RNA, 19 nt, Artificial Sequence
  Description of Artificial Sequence: Synthetic oligonucleotide
ccccaacgccaggccccac

SEQ ID NO: 2488231 - RNA, 19 nt, Artificial Sequence
  Description of Artificial Sequence: Synthetic oligonucleotide
cgcgcacuucaggaaggcu

SEQ ID NO: 2488232 - RNA, 19 nt, Artificial Sequence
  Description of Artificial Sequence: Synthetic oligonucleotide
ccacgccgcuagcgaguua

SEQ ID NO: 2488233 - RNA, 19 nt, Artificial Sequence
  Description of Artificial Sequence: Synthetic oligonucleotide
cguagccucuuggggccgu

SEQ ID NO: 2488234 - RNA, 19 nt, Artificial Sequence
  Description of Artificial Sequence: Synthetic oligonucleotide
gccuucgggcagggcuggu

SEQ ID NO: 2488235 - RNA, 19 nt, Artificial Sequence
  Description of Artificial Sequence: Synthetic oligonucleotide
ccgcuccugccagcagugu

SEQ ID NO: 2488236 - RNA, 19 nt, Artificial Sequence
  Description of Artificial Sequence: Synthetic oligonucleotide
aaauagaugguuuuguaac

SEQ ID NO: 2488237 - RNA, 19 nt, Artificial Sequence
  Description of Artificial Sequence: Synthetic oligonucleotide
aauucaaugaaaguucccc

SEQ ID NO: 2488238 - RNA, 19 nt, Artificial Sequence
  Description of Artificial Sequence: Synthetic oligonucleotide
auaaucguauuucucaacc

SEQ ID NO: 2488239 - RNA, 19 nt, Artificial Sequence
  Description of Artificial Sequence: Synthetic oligonucleotide
aaauacauaaucguauuuc

SEQ ID NO: 2488240 - RNA, 19 nt, Artificial Sequence
  Description of Artificial Sequence: Synthetic oligonucleotide
aaucguauuucucaaccac

SEQ ID NO: 2488241 - RNA, 19 nt, Artificial Sequence
  Description of Artificial Sequence: Synthetic oligonucleotide
guucauagaacucaauucg

SEQ ID NO: 2488242 - RNA, 19 nt, Artificial Sequence
  Description of Artificial Sequence: Synthetic oligonucleotide
ucuuuuguaauuuucugcc

SEQ ID NO: 2488243 - RNA, 19 nt, Artificial Sequence
  Description of Artificial Sequence: Synthetic oligonucleotide
aguucauagaacucaauuc

SEQ ID NO: 2488244 - RNA, 19 nt, Artificial Sequence
  Description of Artificial Sequence: Synthetic oligonucleotide
aauacauaaucguauuucu

SEQ ID NO: 2488245 - RNA, 19 nt, Artificial Sequence
  Description of Artificial Sequence: Synthetic oligonucleotide
aauaccgcuugucccaucc

SEQ ID NO: 2488246 - RNA, 19 nt, Artificial Sequence
  Description of Artificial Sequence: Synthetic oligonucleotide
aauucguucuucuuggcug

SEQ ID NO: 2488247 - RNA, 19 nt, Artificial Sequence
  Description of Artificial Sequence: Synthetic oligonucleotide
acgucgaagagacagagcg

SEQ ID NO: 2488248 - RNA, 19 nt, Artificial Sequence
  Description of Artificial Sequence: Synthetic oligonucleotide
agucuuguuggccaggccc

SEQ ID NO: 2488249 - RNA, 19 nt, Artificial Sequence
  Description of Artificial Sequence: Synthetic oligonucleotide
uuuuguaauuuucugccgc

SEQ ID NO: 2488250 - RNA, 19 nt, Artificial Sequence
  Description of Artificial Sequence: Synthetic oligonucleotide
uuucggaauucaaugaaag

SEQ ID NO: 2488251 - RNA, 19 nt, Artificial Sequence
  Description of Artificial Sequence: Synthetic oligonucleotide
uuuuaucaaguucauagaa

SEQ ID NO: 2488252 - RNA, 19 nt, Artificial Sequence
  Description of Artificial Sequence: Synthetic oligonucleotide
uuugcaauguagcucagac

SEQ ID NO: 2488253 - RNA, 19 nt, Artificial Sequence
  Description of Artificial Sequence: Synthetic oligonucleotide
guaaccaucaugcucuagg

SEQ ID NO: 2488254 - RNA, 19 nt, Artificial Sequence
  Description of Artificial Sequence: Synthetic oligonucleotide
acucugcuuacacaaaagc

SEQ ID NO: 2488255 - RNA, 19 nt, Artificial Sequence
  Description of Artificial Sequence: Synthetic oligonucleotide
agguguuucaggcaauacc

SEQ ID NO: 2488256 - RNA, 19 nt, Artificial Sequence
  Description of Artificial Sequence: Synthetic oligonucleotide
aaugaaaguuccccuuuuc

SEQ ID NO: 2488257 - RNA, 19 nt, Artificial Sequence
  Description of Artificial Sequence: Synthetic oligonucleotide
uucuuuuguaauuuucugc

SEQ ID NO: 2488258 - RNA, 19 nt, Artificial Sequence
  Description of Artificial Sequence: Synthetic oligonucleotide
uccaauaggggacacauuc

SEQ ID NO: 2488259 - RNA, 19 nt, Artificial Sequence
  Description of Artificial Sequence: Synthetic oligonucleotide
ucuggaaauacauaaucgu

SEQ ID NO: 2488260 - RNA, 19 nt, Artificial Sequence
  Description of Artificial Sequence: Synthetic oligonucleotide
uccaauuuuggucuucugc

SEQ ID NO: 2488261 - RNA, 19 nt, Artificial Sequence
  Description of Artificial Sequence: Synthetic oligonucleotide
uuuguaauuuucugccgcg

SEQ ID NO: 2488262 - RNA, 19 nt, Artificial Sequence
  Description of Artificial Sequence: Synthetic oligonucleotide
cucuggaaauacauaaucg

SEQ ID NO: 2488263 - RNA, 19 nt, Artificial Sequence
  Description of Artificial Sequence: Synthetic oligonucleotide
uguaauuuucugccgcggg

SEQ ID NO: 2488264 - RNA, 19 nt, Artificial Sequence
  Description of Artificial Sequence: Synthetic oligonucleotide
uuuuguaaccaucaugcuc

SEQ ID NO: 2488265 - RNA, 19 nt, Artificial Sequence
  Description of Artificial Sequence: Synthetic oligonucleotide
ucaggaaagacgucaaagc

SEQ ID NO: 2488266 - RNA, 19 nt, Artificial Sequence
  Description of Artificial Sequence: Synthetic oligonucleotide
aagucauccauuucuuuug

SEQ ID NO: 2488267 - RNA, 19 nt, Artificial Sequence
  Description of Artificial Sequence: Synthetic oligonucleotide
aagacgucaaagcugauuu

SEQ ID NO: 2488268 - RNA, 19 nt, Artificial Sequence
  Description of Artificial Sequence: Synthetic oligonucleotide
aaucugacccaccuaccac

SEQ ID NO: 2488269 - RNA, 19 nt, Artificial Sequence
  Description of Artificial Sequence: Synthetic oligonucleotide
cauucaacaugccauuucg

SEQ ID NO: 2488270 - RNA, 19 nt, Artificial Sequence
  Description of Artificial Sequence: Synthetic oligonucleotide
uggaaauacauaaucguau

SEQ ID NO: 2488271 - RNA, 19 nt, Artificial Sequence
  Description of Artificial Sequence: Synthetic oligonucleotide
gauuuggccgccuauggag

SEQ ID NO: 2488272 - RNA, 19 nt, Artificial Sequence
  Description of Artificial Sequence: Synthetic oligonucleotide
aaaguuccccuuuucuuag

SEQ ID NO: 2488273 - RNA, 19 nt, Artificial Sequence
  Description of Artificial Sequence: Synthetic oligonucleotide
acaguaguugaucaggucu

SEQ ID NO: 2488274 - RNA, 19 nt, Artificial Sequence
  Description of Artificial Sequence: Synthetic oligonucleotide
ucugcuuacacaaaagcuu

SEQ ID NO: 2488275 - RNA, 19 nt, Artificial Sequence
  Description of Artificial Sequence: Synthetic oligonucleotide
aaguucauagaacucaauu

SEQ ID NO: 2488276 - RNA, 19 nt, Artificial Sequence
  Description of Artificial Sequence: Synthetic oligonucleotide
auaggggacacauucaaca

SEQ ID NO: 2488277 - RNA, 19 nt, Artificial Sequence
  Description of Artificial Sequence: Synthetic oligonucleotide
caaaaucugacccaccuac

SEQ ID NO: 2488278 - RNA, 19 nt, Artificial Sequence
  Description of Artificial Sequence: Synthetic oligonucleotide
gguuuuguaaccaucaugc

SEQ ID NO: 2488279 - RNA, 19 nt, Artificial Sequence
  Description of Artificial Sequence: Synthetic oligonucleotide
cuuuguaugccaccaagcc

SEQ ID NO: 2488280 - RNA, 19 nt, Artificial Sequence
  Description of Artificial Sequence: Synthetic oligonucleotide
aaugugaggccuuucccug

SEQ ID NO: 2488281 - RNA, 19 nt, Artificial Sequence
  Description of Artificial Sequence: Synthetic oligonucleotide
aagaucucauggucauugc

SEQ ID NO: 2488282 - RNA, 19 nt, Artificial Sequence
  Description of Artificial Sequence: Synthetic oligonucleotide
auagaacucaauucguucu

SEQ ID NO: 2488283 - RNA, 19 nt, Artificial Sequence
  Description of Artificial Sequence: Synthetic oligonucleotide
accaucaugcucuaggugu

SEQ ID NO: 2488284 - RNA, 19 nt, Artificial Sequence
  Description of Artificial Sequence: Synthetic oligonucleotide
agaucucauggucauugcc

SEQ ID NO: 2488285 - RNA, 19 nt, Artificial Sequence
  Description of Artificial Sequence: Synthetic oligonucleotide
uuuguaugccaccaagcca

SEQ ID NO: 2488286 - RNA, 19 nt, Artificial Sequence
  Description of Artificial Sequence: Synthetic oligonucleotide
aaaucugacccaccuacca

SEQ ID NO: 2488287 - RNA, 19 nt, Artificial Sequence
  Description of Artificial Sequence: Synthetic oligonucleotide
cacaucauuucccaguugc

SEQ ID NO: 2488288 - RNA, 19 nt, Artificial Sequence
  Description of Artificial Sequence: Synthetic oligonucleotide
uuugcuggguccucuaucc

SEQ ID NO: 2488289 - RNA, 19 nt, Artificial Sequence
  Description of Artificial Sequence: Synthetic oligonucleotide
auugccacccggcauaguc

SEQ ID NO: 2488290 - RNA, 19 nt, Artificial Sequence
  Description of Artificial Sequence: Synthetic oligonucleotide
ugcucuagguguuucaggc

SEQ ID NO: 2488291 - RNA, 19 nt, Artificial Sequence
  Description of Artificial Sequence: Synthetic oligonucleotide
uucaacaugccauuucgga

SEQ ID NO: 2488292 - RNA, 19 nt, Artificial Sequence
  Description of Artificial Sequence: Synthetic oligonucleotide
uuuuguagaaagucaucca

SEQ ID NO: 2488293 - RNA, 19 nt, Artificial Sequence
  Description of Artificial Sequence: Synthetic oligonucleotide
ugguuuuguaaccaucaug

SEQ ID NO: 2488294 - RNA, 19 nt, Artificial Sequence
  Description of Artificial Sequence: Synthetic oligonucleotide
gacgucaaagcugauuugg

SEQ ID NO: 2488295 - RNA, 19 nt, Artificial Sequence
  Description of Artificial Sequence: Synthetic oligonucleotide
ugguguuaauggaagagcu

SEQ ID NO: 2488296 - RNA, 19 nt, Artificial Sequence
  Description of Artificial Sequence: Synthetic oligonucleotide
gaagaucucauggucauug

SEQ ID NO: 2488297 - RNA, 19 nt, Artificial Sequence
  Description of Artificial Sequence: Synthetic oligonucleotide
uugcacuuucucaaaaucu

SEQ ID NO: 2488298 - RNA, 19 nt, Artificial Sequence
  Description of Artificial Sequence: Synthetic oligonucleotide
aauggaagagcuccucaca

SEQ ID NO: 2488299 - RNA, 19 nt, Artificial Sequence
  Description of Artificial Sequence: Synthetic oligonucleotide
aaaaucugacccaccuacc

SEQ ID NO: 2488300 - RNA, 19 nt, Artificial Sequence
  Description of Artificial Sequence: Synthetic oligonucleotide
gguguuucaggcaauaccg

SEQ ID NO: 2488301 - RNA, 19 nt, Artificial Sequence
  Description of Artificial Sequence: Synthetic oligonucleotide
ucauccauuucuuuuguaa

SEQ ID NO: 2488302 - RNA, 19 nt, Artificial Sequence
  Description of Artificial Sequence: Synthetic oligonucleotide
accacuccaauuuuggucu

SEQ ID NO: 2488303 - RNA, 19 nt, Artificial Sequence
  Description of Artificial Sequence: Synthetic oligonucleotide
uuaauggaagagcuccuca

SEQ ID NO: 2488304 - RNA, 19 nt, Artificial Sequence
  Description of Artificial Sequence: Synthetic oligonucleotide
aucucauggucauugccac

SEQ ID NO: 2488305 - RNA, 19 nt, Artificial Sequence
  Description of Artificial Sequence: Synthetic oligonucleotide
cuuuuguaauuuucugccg

SEQ ID NO: 2488306 - RNA, 19 nt, Artificial Sequence
  Description of Artificial Sequence: Synthetic oligonucleotide
aggcaauaccgcuuguccc

SEQ ID NO: 2488307 - RNA, 19 nt, Artificial Sequence
  Description of Artificial Sequence: Synthetic oligonucleotide
gaaauagaugguuuuguaa

SEQ ID NO: 2488308 - RNA, 19 nt, Artificial Sequence
  Description of Artificial Sequence: Synthetic oligonucleotide
ugucccauccaucaggaaa

SEQ ID NO: 2488309 - RNA, 19 nt, Artificial Sequence
  Description of Artificial Sequence: Synthetic oligonucleotide
uucuuagggaguuuaauuu

SEQ ID NO: 2488310 - RNA, 19 nt, Artificial Sequence
  Description of Artificial Sequence: Synthetic oligonucleotide
guaauuuucugccgcgggg

SEQ ID NO: 2488311 - RNA, 19 nt, Artificial Sequence
  Description of Artificial Sequence: Synthetic oligonucleotide
uguagaaagucauccauuu

SEQ ID NO: 2488312 - RNA, 19 nt, Artificial Sequence
  Description of Artificial Sequence: Synthetic oligonucleotide
uuucucaaccacaucauuu

SEQ ID NO: 2488313 - RNA, 19 nt, Artificial Sequence
  Description of Artificial Sequence: Synthetic oligonucleotide
uucauagaacucaauucgu

SEQ ID NO: 2488314 - RNA, 19 nt, Artificial Sequence
  Description of Artificial Sequence: Synthetic oligonucleotide
acauucaacaugccauuuc

SEQ ID NO: 2488315 - RNA, 19 nt, Artificial Sequence
  Description of Artificial Sequence: Synthetic oligonucleotide
uuucaggcaauaccgcuug

SEQ ID NO: 2488316 - RNA, 19 nt, Artificial Sequence
  Description of Artificial Sequence: Synthetic oligonucleotide
guguuaauggaagagcucc

SEQ ID NO: 2488317 - RNA, 19 nt, Artificial Sequence
  Description of Artificial Sequence: Synthetic oligonucleotide
gagaaugugaggccuuucc

SEQ ID NO: 2488318 - RNA, 19 nt, Artificial Sequence
  Description of Artificial Sequence: Synthetic oligonucleotide
ucggaauucaaugaaaguu

SEQ ID NO: 2488319 - RNA, 19 nt, Artificial Sequence
  Description of Artificial Sequence: Synthetic oligonucleotide
aucuuuguaugccaccaag

SEQ ID NO: 2488320 - RNA, 19 nt, Artificial Sequence
  Description of Artificial Sequence: Synthetic oligonucleotide
gucgaagagacagagcgcg

SEQ ID NO: 2488321 - RNA, 19 nt, Artificial Sequence
  Description of Artificial Sequence: Synthetic oligonucleotide
ucugugaagaucucauggu

SEQ ID NO: 2488322 - RNA, 19 nt, Artificial Sequence
  Description of Artificial Sequence: Synthetic oligonucleotide
uuucuuagggaguuuaauu

SEQ ID NO: 2488323 - RNA, 19 nt, Artificial Sequence
  Description of Artificial Sequence: Synthetic oligonucleotide
ugaccuugaauacucugcu

SEQ ID NO: 2488324 - RNA, 19 nt, Artificial Sequence
  Description of Artificial Sequence: Synthetic oligonucleotide
uucucaaccacaucauuuc

SEQ ID NO: 2488325 - RNA, 19 nt, Artificial Sequence
  Description of Artificial Sequence: Synthetic oligonucleotide
aauaggggacacauucaac

SEQ ID NO: 2488326 - RNA, 19 nt, Artificial Sequence
  Description of Artificial Sequence: Synthetic oligonucleotide
  modified_base (13)..(13): a, c, u, g, unknown or other
uccucuauccccncccucc

SEQ ID NO: 2488327 - RNA, 19 nt, Artificial Sequence
  Description of Artificial Sequence: Synthetic oligonucleotide
auucaaugaaaguuccccu

SEQ ID NO: 2488328 - RNA, 19 nt, Artificial Sequence
  Description of Artificial Sequence: Synthetic oligonucleotide
auggaagagcuccucacag

SEQ ID NO: 2488329 - RNA, 19 nt, Artificial Sequence
  Description of Artificial Sequence: Synthetic oligonucleotide
gaugaccuugaauacucug

SEQ ID NO: 2488330 - RNA, 19 nt, Artificial Sequence
  Description of Artificial Sequence: Synthetic oligonucleotide
uaaucguauuucucaacca

SEQ ID NO: 2488331 - RNA, 19 nt, Artificial Sequence
  Description of Artificial Sequence: Synthetic oligonucleotide
ucaaguucauagaacucaa

SEQ ID NO: 2488332 - RNA, 19 nt, Artificial Sequence
  Description of Artificial Sequence: Synthetic oligonucleotide
uguuucaggcaauaccgcu

SEQ ID NO: 2488333 - RNA, 19 nt, Artificial Sequence
  Description of Artificial Sequence: Synthetic oligonucleotide
uauuucucaaccacaucau

SEQ ID NO: 2488334 - RNA, 19 nt, Artificial Sequence
  Description of Artificial Sequence: Synthetic oligonucleotide
ucucaaccacaucauuucc

SEQ ID NO: 2488335 - RNA, 19 nt, Artificial Sequence
  Description of Artificial Sequence: Synthetic oligonucleotide
uaauggaagagcuccucac

SEQ ID NO: 2488336 - RNA, 19 nt, Artificial Sequence
  Description of Artificial Sequence: Synthetic oligonucleotide
uagucuugucuccaaagaa

SEQ ID NO: 2488337 - RNA, 19 nt, Artificial Sequence
  Description of Artificial Sequence: Synthetic oligonucleotide
augaaaguuccccuuuucu

SEQ ID NO: 2488338 - RNA, 19 nt, Artificial Sequence
  Description of Artificial Sequence: Synthetic oligonucleotide
ccauccaucaggaaagacg

SEQ ID NO: 2488339 - RNA, 19 nt, Artificial Sequence
  Description of Artificial Sequence: Synthetic oligonucleotide
uuugucguauauuuucuuu

SEQ ID NO: 2488340 - RNA, 19 nt, Artificial Sequence
  Description of Artificial Sequence: Synthetic oligonucleotide
ucguauuucucaaccacau

SEQ ID NO: 2488341 - RNA, 19 nt, Artificial Sequence
  Description of Artificial Sequence: Synthetic oligonucleotide
gaaaguuccccuuuucuua

SEQ ID NO: 2488342 - RNA, 19 nt, Artificial Sequence
  Description of Artificial Sequence: Synthetic oligonucleotide
uaauuuucugccgcggggc

SEQ ID NO: 2488343 - RNA, 19 nt, Artificial Sequence
  Description of Artificial Sequence: Synthetic oligonucleotide
uaccacuccaauuuugguc

SEQ ID NO: 2488344 - RNA, 19 nt, Artificial Sequence
  Description of Artificial Sequence: Synthetic oligonucleotide
aaccaucaugcucuaggug

SEQ ID NO: 2488345 - RNA, 19 nt, Artificial Sequence
  Description of Artificial Sequence: Synthetic oligonucleotide
ugaaaguuccccuuuucuu

SEQ ID NO: 2488346 - RNA, 19 nt, Artificial Sequence
  Description of Artificial Sequence: Synthetic oligonucleotide
auccacgucgaagagacag

SEQ ID NO: 2488347 - RNA, 19 nt, Artificial Sequence
  Description of Artificial Sequence: Synthetic oligonucleotide
uucggaauucaaugaaagu

SEQ ID NO: 2488348 - RNA, 19 nt, Artificial Sequence
  Description of Artificial Sequence: Synthetic oligonucleotide
cuugcacuuucucaaaauc

SEQ ID NO: 2488349 - RNA, 19 nt, Artificial Sequence
  Description of Artificial Sequence: Synthetic oligonucleotide
cagaugaccuugaauacuc

SEQ ID NO: 2488350 - RNA, 19 nt, Artificial Sequence
  Description of Artificial Sequence: Synthetic oligonucleotide
cugcuuacacaaaagcuuc

SEQ ID NO: 2488351 - RNA, 19 nt, Artificial Sequence
  Description of Artificial Sequence: Synthetic oligonucleotide
uaucaaguucauagaacuc

SEQ ID NO: 2488352 - RNA, 19 nt, Artificial Sequence
  Description of Artificial Sequence: Synthetic oligonucleotide
uccucacagauccugcgug

SEQ ID NO: 2488353 - RNA, 19 nt, Artificial Sequence
  Description of Artificial Sequence: Synthetic oligonucleotide
ucauagaacucaauucguu

SEQ ID NO: 2488354 - RNA, 19 nt, Artificial Sequence
  Description of Artificial Sequence: Synthetic oligonucleotide
uauggagaaugugaggccu

SEQ ID NO: 2488355 - RNA, 19 nt, Artificial Sequence
  Description of Artificial Sequence: Synthetic oligonucleotide
cuauggagaaugugaggcc

SEQ ID NO: 2488356 - RNA, 19 nt, Artificial Sequence
  Description of Artificial Sequence: Synthetic oligonucleotide
uguuaauggaagagcuccu

SEQ ID NO: 2488357 - RNA, 19 nt, Artificial Sequence
  Description of Artificial Sequence: Synthetic oligonucleotide
auacauaaucguauuucuc

SEQ ID NO: 2488358 - RNA, 19 nt, Artificial Sequence
  Description of Artificial Sequence: Synthetic oligonucleotide
cucauggucauugccaccc

SEQ ID NO: 2488359 - RNA, 19 nt, Artificial Sequence
  Description of Artificial Sequence: Synthetic oligonucleotide
ucuuagggaguuuaauuuu

SEQ ID NO: 2488360 - RNA, 19 nt, Artificial Sequence
  Description of Artificial Sequence: Synthetic oligonucleotide
uaguugaucaggucuugga

SEQ ID NO: 2488361 - RNA, 19 nt, Artificial Sequence
  Description of Artificial Sequence: Synthetic oligonucleotide
ucaaugaaaguuccccuuu

SEQ ID NO: 2488362 - RNA, 19 nt, Artificial Sequence
  Description of Artificial Sequence: Synthetic oligonucleotide
uagcccacaguucuggggu

SEQ ID NO: 2488363 - RNA, 19 nt, Artificial Sequence
  Description of Artificial Sequence: Synthetic oligonucleotide
caggcaauaccgcuugucc

SEQ ID NO: 2488364 - RNA, 19 nt, Artificial Sequence
  Description of Artificial Sequence: Synthetic oligonucleotide
aauuuucugccgcggggca

SEQ ID NO: 2488365 - RNA, 19 nt, Artificial Sequence
  Description of Artificial Sequence: Synthetic oligonucleotide
uuguaauuuucugccgcgg

SEQ ID NO: 2488366 - RNA, 19 nt, Artificial Sequence
  Description of Artificial Sequence: Synthetic oligonucleotide
cauaaucguauuucucaac

SEQ ID NO: 2488367 - RNA, 19 nt, Artificial Sequence
  Description of Artificial Sequence: Synthetic oligonucleotide
acauaaucguauuucucaa

SEQ ID NO: 2488368 - RNA, 19 nt, Artificial Sequence
  Description of Artificial Sequence: Synthetic oligonucleotide
accuugaauacucugcuua

SEQ ID NO: 2488369 - RNA, 19 nt, Artificial Sequence
  Description of Artificial Sequence: Synthetic oligonucleotide
gccauuucggaauucaaug

SEQ ID NO: 2488370 - RNA, 19 nt, Artificial Sequence
  Description of Artificial Sequence: Synthetic oligonucleotide
uucaaugaaaguuccccuu

SEQ ID NO: 2488371 - RNA, 19 nt, Artificial Sequence
  Description of Artificial Sequence: Synthetic oligonucleotide
ucugccgcggggcagucag

SEQ ID NO: 2488372 - RNA, 19 nt, Artificial Sequence
  Description of Artificial Sequence: Synthetic oligonucleotide
aguugaucaggucuuggau

SEQ ID NO: 2488373 - RNA, 19 nt, Artificial Sequence
  Description of Artificial Sequence: Synthetic oligonucleotide
cugauuuggccgccuaugg

SEQ ID NO: 2488374 - RNA, 19 nt, Artificial Sequence
  Description of Artificial Sequence: Synthetic oligonucleotide
gaucucauggucauugcca

SEQ ID NO: 2488375 - RNA, 19 nt, Artificial Sequence
  Description of Artificial Sequence: Synthetic oligonucleotide
agaaauagaugguuuugua

SEQ ID NO: 2488376 - RNA, 19 nt, Artificial Sequence
  Description of Artificial Sequence: Synthetic oligonucleotide
ugacccaccuaccacucca

SEQ ID NO: 2488377 - RNA, 19 nt, Artificial Sequence
  Description of Artificial Sequence: Synthetic oligonucleotide
uguagcucagacaguaguu

SEQ ID NO: 2488378 - RNA, 19 nt, Artificial Sequence
  Description of Artificial Sequence: Synthetic oligonucleotide
uugucguauauuuucuuuu

SEQ ID NO: 2488379 - RNA, 19 nt, Artificial Sequence
  Description of Artificial Sequence: Synthetic oligonucleotide
cuuucagucuuguuggcca

SEQ ID NO: 2488380 - RNA, 19 nt, Artificial Sequence
  Description of Artificial Sequence: Synthetic oligonucleotide
uucccaguugcucuugcac

SEQ ID NO: 2488381 - RNA, 19 nt, Artificial Sequence
  Description of Artificial Sequence: Synthetic oligonucleotide
ccuauggagaaugugaggc

SEQ ID NO: 2488382 - RNA, 19 nt, Artificial Sequence
  Description of Artificial Sequence: Synthetic oligonucleotide
ugauuuggccgccuaugga

SEQ ID NO: 2488383 - RNA, 19 nt, Artificial Sequence
  Description of Artificial Sequence: Synthetic oligonucleotide
ugcuuacacaaaagcuucc

SEQ ID NO: 2488384 - RNA, 19 nt, Artificial Sequence
  Description of Artificial Sequence: Synthetic oligonucleotide
gaagagacagagcgcggcc

SEQ ID NO: 2488385 - RNA, 19 nt, Artificial Sequence
  Description of Artificial Sequence: Synthetic oligonucleotide
aggaaagacgucaaagcug

SEQ ID NO: 2488386 - RNA, 19 nt, Artificial Sequence
  Description of Artificial Sequence: Synthetic oligonucleotide
aaguuccccuuuucuuagg

SEQ ID NO: 2488387 - RNA, 19 nt, Artificial Sequence
  Description of Artificial Sequence: Synthetic oligonucleotide
ugccauuucggaauucaau

SEQ ID NO: 2488388 - RNA, 19 nt, Artificial Sequence
  Description of Artificial Sequence: Synthetic oligonucleotide
auagaugguuuuguaacca

SEQ ID NO: 2488389 - RNA, 19 nt, Artificial Sequence
  Description of Artificial Sequence: Synthetic oligonucleotide
uuggucuucugccucaauu

SEQ ID NO: 2488390 - RNA, 19 nt, Artificial Sequence
  Description of Artificial Sequence: Synthetic oligonucleotide
gaauucaaugaaaguuccc

SEQ ID NO: 2488391 - RNA, 19 nt, Artificial Sequence
  Description of Artificial Sequence: Synthetic oligonucleotide
augugaggccuuucccugc

SEQ ID NO: 2488392 - RNA, 19 nt, Artificial Sequence
  Description of Artificial Sequence: Synthetic oligonucleotide
uuuucuuagggaguuuaau

SEQ ID NO: 2488393 - RNA, 19 nt, Artificial Sequence
  Description of Artificial Sequence: Synthetic oligonucleotide
guagcccacaguucugggg

SEQ ID NO: 2488394 - RNA, 19 nt, Artificial Sequence
  Description of Artificial Sequence: Synthetic oligonucleotide
aucugacccaccuaccacu

SEQ ID NO: 2488395 - RNA, 19 nt, Artificial Sequence
  Description of Artificial Sequence: Synthetic oligonucleotide
uucaggucugccacgaauu

SEQ ID NO: 2488396 - RNA, 19 nt, Artificial Sequence
  Description of Artificial Sequence: Synthetic oligonucleotide
gauccugcguguguccucg

SEQ ID NO: 2488397 - RNA, 19 nt, Artificial Sequence
  Description of Artificial Sequence: Synthetic oligonucleotide
ucucaaaaucugacccacc

SEQ ID NO: 2488398 - RNA, 19 nt, Artificial Sequence
  Description of Artificial Sequence: Synthetic oligonucleotide
uagcucagacaguaguuga

SEQ ID NO: 2488399 - RNA, 19 nt, Artificial Sequence
  Description of Artificial Sequence: Synthetic oligonucleotide
caaaagcuucccaucuuug

SEQ ID NO: 2488400 - RNA, 19 nt, Artificial Sequence
  Description of Artificial Sequence: Synthetic oligonucleotide
ucaaaaucugacccaccua

SEQ ID NO: 2488401 - RNA, 19 nt, Artificial Sequence
  Description of Artificial Sequence: Synthetic oligonucleotide
gucccauccaucaggaaag

SEQ ID NO: 2488402 - RNA, 19 nt, Artificial Sequence
  Description of Artificial Sequence: Synthetic oligonucleotide
agaacucaauucguucuuc

SEQ ID NO: 2488403 - RNA, 19 nt, Artificial Sequence
  Description of Artificial Sequence: Synthetic oligonucleotide
uugcaauguagcucagaca

SEQ ID NO: 2488404 - RNA, 19 nt, Artificial Sequence
  Description of Artificial Sequence: Synthetic oligonucleotide
gucuuggaucacuugcucc

SEQ ID NO: 2488405 - RNA, 19 nt, Artificial Sequence
  Description of Artificial Sequence: Synthetic oligonucleotide
aaagacgucaaagcugauu

SEQ ID NO: 2488406 - RNA, 19 nt, Artificial Sequence
  Description of Artificial Sequence: Synthetic oligonucleotide
agaugguuuuguaaccauc

SEQ ID NO: 2488407 - RNA, 19 nt, Artificial Sequence
  Description of Artificial Sequence: Synthetic oligonucleotide
cugugaagaucucaugguc

SEQ ID NO: 2488408 - RNA, 19 nt, Artificial Sequence
  Description of Artificial Sequence: Synthetic oligonucleotide
guagcucagacaguaguug

SEQ ID NO: 2488409 - RNA, 19 nt, Artificial Sequence
  Description of Artificial Sequence: Synthetic oligonucleotide
ucaauucguucuucuuggc

SEQ ID NO: 2488410 - RNA, 19 nt, Artificial Sequence
  Description of Artificial Sequence: Synthetic oligonucleotide
ggaauucaaugaaaguucc

SEQ ID NO: 2488411 - RNA, 19 nt, Artificial Sequence
  Description of Artificial Sequence: Synthetic oligonucleotide
auggucauugccacccggc

SEQ ID NO: 2488412 - RNA, 19 nt, Artificial Sequence
  Description of Artificial Sequence: Synthetic oligonucleotide
acgucaaagcugauuuggc

SEQ ID NO: 2488413 - RNA, 19 nt, Artificial Sequence
  Description of Artificial Sequence: Synthetic oligonucleotide
augccaccaagccauucuc

SEQ ID NO: 2488414 - RNA, 19 nt, Artificial Sequence
  Description of Artificial Sequence: Synthetic oligonucleotide
cauccaucaggaaagacgu

SEQ ID NO: 2488415 - RNA, 19 nt, Artificial Sequence
  Description of Artificial Sequence: Synthetic oligonucleotide
uuuugucguauauuuucuu

SEQ ID NO: 2488416 - RNA, 19 nt, Artificial Sequence
  Description of Artificial Sequence: Synthetic oligonucleotide
uagaacucaauucguucuu

SEQ ID NO: 2488417 - RNA, 19 nt, Artificial Sequence
  Description of Artificial Sequence: Synthetic oligonucleotide
  modified_base (10)..(10): a, c, u, g, unknown or other
ucuauccccncccucccuu

SEQ ID NO: 2488418 - RNA, 19 nt, Artificial Sequence
  Description of Artificial Sequence: Synthetic oligonucleotide
uccucgggugcugucaccg

SEQ ID NO: 2488419 - RNA, 19 nt, Artificial Sequence
  Description of Artificial Sequence: Synthetic oligonucleotide
gcuugucccauccaucagg

SEQ ID NO: 2488420 - RNA, 19 nt, Artificial Sequence
  Description of Artificial Sequence: Synthetic oligonucleotide
ccuaccacuccaauuuugg

SEQ ID NO: 2488421 - RNA, 19 nt, Artificial Sequence
  Description of Artificial Sequence: Synthetic oligonucleotide
auucaacaugccauuucgg

SEQ ID NO: 2488422 - RNA, 19 nt, Artificial Sequence
  Description of Artificial Sequence: Synthetic oligonucleotide
ggggacacauucaacaugc

SEQ ID NO: 2488423 - RNA, 19 nt, Artificial Sequence
  Description of Artificial Sequence: Synthetic oligonucleotide
uggucauugccacccggca

SEQ ID NO: 2488424 - RNA, 19 nt, Artificial Sequence
  Description of Artificial Sequence: Synthetic oligonucleotide
cucagacaguaguugauca

SEQ ID NO: 2488425 - RNA, 19 nt, Artificial Sequence
  Description of Artificial Sequence: Synthetic oligonucleotide
agucauccauuucuuuugu

SEQ ID NO: 2488426 - RNA, 19 nt, Artificial Sequence
  Description of Artificial Sequence: Synthetic oligonucleotide
ggaaagacgucaaagcuga

SEQ ID NO: 2488427 - RNA, 19 nt, Artificial Sequence
  Description of Artificial Sequence: Synthetic oligonucleotide
ccauccacgucgaagagac

SEQ ID NO: 2488428 - RNA, 19 nt, Artificial Sequence
  Description of Artificial Sequence: Synthetic oligonucleotide
cuuacacaaaagcuuccca

SEQ ID NO: 2488429 - RNA, 19 nt, Artificial Sequence
  Description of Artificial Sequence: Synthetic oligonucleotide
cauuucggaauucaaugaa

SEQ ID NO: 2488430 - RNA, 19 nt, Artificial Sequence
  Description of Artificial Sequence: Synthetic oligonucleotide
gacaguaguugaucagguc

SEQ ID NO: 2488431 - RNA, 19 nt, Artificial Sequence
  Description of Artificial Sequence: Synthetic oligonucleotide
uagaugguuuuguaaccau

SEQ ID NO: 2488432 - RNA, 19 nt, Artificial Sequence
  Description of Artificial Sequence: Synthetic oligonucleotide
ucacagauccugcgugugu

SEQ ID NO: 2488433 - RNA, 19 nt, Artificial Sequence
  Description of Artificial Sequence: Synthetic oligonucleotide
uccacgucgaagagacaga

SEQ ID NO: 2488434 - RNA, 19 nt, Artificial Sequence
  Description of Artificial Sequence: Synthetic oligonucleotide
agcuucccaucuuuguaug

SEQ ID NO: 2488435 - RNA, 19 nt, Artificial Sequence
  Description of Artificial Sequence: Synthetic oligonucleotide
caugcucuagguguuucag

SEQ ID NO: 2488436 - RNA, 19 nt, Artificial Sequence
  Description of Artificial Sequence: Synthetic oligonucleotide
auuucucaaccacaucauu

SEQ ID NO: 2488437 - RNA, 19 nt, Artificial Sequence
  Description of Artificial Sequence: Synthetic oligonucleotide
guagaaagucauccauuuc

SEQ ID NO: 2488438 - RNA, 19 nt, Artificial Sequence
  Description of Artificial Sequence: Synthetic oligonucleotide
cauggucauugccacccgg

SEQ ID NO: 2488439 - RNA, 19 nt, Artificial Sequence
  Description of Artificial Sequence: Synthetic oligonucleotide
agacgucaaagcugauuug

SEQ ID NO: 2488440 - RNA, 19 nt, Artificial Sequence
  Description of Artificial Sequence: Synthetic oligonucleotide
aucguauuucucaaccaca

SEQ ID NO: 2488441 - RNA, 19 nt, Artificial Sequence
  Description of Artificial Sequence: Synthetic oligonucleotide
uccugcguguguccucggg

SEQ ID NO: 2488442 - RNA, 19 nt, Artificial Sequence
  Description of Artificial Sequence: Synthetic oligonucleotide
aagagacagagcgcggcca

SEQ ID NO: 2488443 - RNA, 19 nt, Artificial Sequence
  Description of Artificial Sequence: Synthetic oligonucleotide
guugcucuugcacuuucuc

SEQ ID NO: 2488444 - RNA, 19 nt, Artificial Sequence
  Description of Artificial Sequence: Synthetic oligonucleotide
aucaugcucuagguguuuc

SEQ ID NO: 2488445 - RNA, 19 nt, Artificial Sequence
  Description of Artificial Sequence: Synthetic oligonucleotide
auuucggaauucaaugaaa

SEQ ID NO: 2488446 - RNA, 19 nt, Artificial Sequence
  Description of Artificial Sequence: Synthetic oligonucleotide
ucugacccaccuaccacuc

SEQ ID NO: 2488447 - RNA, 19 nt, Artificial Sequence
  Description of Artificial Sequence: Synthetic oligonucleotide
cuugucccauccaucagga

SEQ ID NO: 2488448 - RNA, 19 nt, Artificial Sequence
  Description of Artificial Sequence: Synthetic oligonucleotide
gucaccguguagcccacag

SEQ ID NO: 2488449 - RNA, 19 nt, Artificial Sequence
  Description of Artificial Sequence: Synthetic oligonucleotide
cuuugcuggguccucuauc

SEQ ID NO: 2488450 - RNA, 19 nt, Artificial Sequence
  Description of Artificial Sequence: Synthetic oligonucleotide
agauccugcguguguccuc

SEQ ID NO: 2488451 - RNA, 19 nt, Artificial Sequence
  Description of Artificial Sequence: Synthetic oligonucleotide
cucugcuuacacaaaagcu

SEQ ID NO: 2488452 - RNA, 19 nt, Artificial Sequence
  Description of Artificial Sequence: Synthetic oligonucleotide
uugccacccggcauagucu

SEQ ID NO: 2488453 - RNA, 19 nt, Artificial Sequence
  Description of Artificial Sequence: Synthetic oligonucleotide
ugcguguguccucgggugc

SEQ ID NO: 2488454 - RNA, 19 nt, Artificial Sequence
  Description of Artificial Sequence: Synthetic oligonucleotide
guguagcccacaguucugg

SEQ ID NO: 2488455 - RNA, 19 nt, Artificial Sequence
  Description of Artificial Sequence: Synthetic oligonucleotide
caauaggggacacauucaa

SEQ ID NO: 2488456 - RNA, 19 nt, Artificial Sequence
  Description of Artificial Sequence: Synthetic oligonucleotide
cggaauucaaugaaaguuc

SEQ ID NO: 2488457 - RNA, 19 nt, Artificial Sequence
  Description of Artificial Sequence: Synthetic oligonucleotide
guuaauggaagagcuccuc

SEQ ID NO: 2488458 - RNA, 19 nt, Artificial Sequence
  Description of Artificial Sequence: Synthetic oligonucleotide
ucuagguguuucaggcaau

SEQ ID NO: 2488459 - RNA, 19 nt, Artificial Sequence
  Description of Artificial Sequence: Synthetic oligonucleotide
aguaguugaucaggucuug

SEQ ID NO: 2488460 - RNA, 19 nt, Artificial Sequence
  Description of Artificial Sequence: Synthetic oligonucleotide
uaccgcuugucccauccau

SEQ ID NO: 2488461 - RNA, 19 nt, Artificial Sequence
  Description of Artificial Sequence: Synthetic oligonucleotide
uguaaccaucaugcucuag

SEQ ID NO: 2488462 - RNA, 19 nt, Artificial Sequence
  Description of Artificial Sequence: Synthetic oligonucleotide
caauguagcucagacagua

SEQ ID NO: 2488463 - RNA, 19 nt, Artificial Sequence
  Description of Artificial Sequence: Synthetic oligonucleotide
ucaggcaauaccgcuuguc

SEQ ID NO: 2488464 - RNA, 19 nt, Artificial Sequence
  Description of Artificial Sequence: Synthetic oligonucleotide
agacaguaguugaucaggu

SEQ ID NO: 2488465 - RNA, 19 nt, Artificial Sequence
  Description of Artificial Sequence: Synthetic oligonucleotide
ucgggugcugucaccgugu

SEQ ID NO: 2488466 - RNA, 19 nt, Artificial Sequence
  Description of Artificial Sequence: Synthetic oligonucleotide
ucuuccaauaggggacaca

SEQ ID NO: 2488467 - RNA, 19 nt, Artificial Sequence
  Description of Artificial Sequence: Synthetic oligonucleotide
ggcaauaccgcuuguccca

SEQ ID NO: 2488468 - RNA, 19 nt, Artificial Sequence
  Description of Artificial Sequence: Synthetic oligonucleotide
uguccucgggugcugucac

SEQ ID NO: 2488469 - RNA, 19 nt, Artificial Sequence
  Description of Artificial Sequence: Synthetic oligonucleotide
caggaaagacgucaaagcu

SEQ ID NO: 2488470 - RNA, 19 nt, Artificial Sequence
  Description of Artificial Sequence: Synthetic oligonucleotide
ggacacauucaacaugcca

SEQ ID NO: 2488471 - RNA, 19 nt, Artificial Sequence
  Description of Artificial Sequence: Synthetic oligonucleotide
uugcuggguccucuauccc

SEQ ID NO: 2488472 - RNA, 19 nt, Artificial Sequence
  Description of Artificial Sequence: Synthetic oligonucleotide
uuuggccgccuauggagaa

SEQ ID NO: 2488473 - RNA, 19 nt, Artificial Sequence
  Description of Artificial Sequence: Synthetic oligonucleotide
uuuucugccgcggggcagu

SEQ ID NO: 2488474 - RNA, 19 nt, Artificial Sequence
  Description of Artificial Sequence: Synthetic oligonucleotide
cuuggaucacuugcucccc

SEQ ID NO: 2488475 - RNA, 19 nt, Artificial Sequence
  Description of Artificial Sequence: Synthetic oligonucleotide
agaaagucauccauuucuu

SEQ ID NO: 2488476 - RNA, 19 nt, Artificial Sequence
  Description of Artificial Sequence: Synthetic oligonucleotide
aagccauucucuggaaaua

SEQ ID NO: 2488477 - RNA, 19 nt, Artificial Sequence
  Description of Artificial Sequence: Synthetic oligonucleotide
  modified_base (16)..(16): a, c, u, g, unknown or other
ggguccucuauccccnccc

SEQ ID NO: 2488478 - RNA, 19 nt, Artificial Sequence
  Description of Artificial Sequence: Synthetic oligonucleotide
cacgucgaagagacagagc

SEQ ID NO: 2488479 - RNA, 19 nt, Artificial Sequence
  Description of Artificial Sequence: Synthetic oligonucleotide
  modified_base (6)..(6): a, c, u, g, unknown or other
uccccncccucccuuucag

SEQ ID NO: 2488480 - RNA, 19 nt, Artificial Sequence
  Description of Artificial Sequence: Synthetic oligonucleotide
ucauugccacccggcauag

SEQ ID NO: 2488481 - RNA, 19 nt, Artificial Sequence
  Description of Artificial Sequence: Synthetic oligonucleotide
caccaagccauucucugga

SEQ ID NO: 2488482 - RNA, 19 nt, Artificial Sequence
  Description of Artificial Sequence: Synthetic oligonucleotide
ccucugguguuaauggaag

SEQ ID NO: 2488483 - RNA, 19 nt, Artificial Sequence
  Description of Artificial Sequence: Synthetic oligonucleotide
ucaccguguagcccacagu

SEQ ID NO: 2488484 - RNA, 19 nt, Artificial Sequence
  Description of Artificial Sequence: Synthetic oligonucleotide
gcuuacacaaaagcuuccc

SEQ ID NO: 2488485 - RNA, 19 nt, Artificial Sequence
  Description of Artificial Sequence: Synthetic oligonucleotide
gccuauggagaaugugagg

SEQ ID NO: 2488486 - RNA, 19 nt, Artificial Sequence
  Description of Artificial Sequence: Synthetic oligonucleotide
guguuucaggcaauaccgc

SEQ ID NO: 2488487 - RNA, 19 nt, Artificial Sequence
  Description of Artificial Sequence: Synthetic oligonucleotide
ccuugaauacucugcuuac

SEQ ID NO: 2488488 - RNA, 19 nt, Artificial Sequence
  Description of Artificial Sequence: Synthetic oligonucleotide
uagguguuucaggcaauac

SEQ ID NO: 2488489 - RNA, 19 nt, Artificial Sequence
  Description of Artificial Sequence: Synthetic oligonucleotide
auuuucugccgcggggcag

SEQ ID NO: 2488490 - RNA, 19 nt, Artificial Sequence
  Description of Artificial Sequence: Synthetic oligonucleotide
cuuuucuuagggaguuuaa

SEQ ID NO: 2488491 - RNA, 19 nt, Artificial Sequence
  Description of Artificial Sequence: Synthetic oligonucleotide
caacaugccauuucggaau

SEQ ID NO: 2488492 - RNA, 19 nt, Artificial Sequence
  Description of Artificial Sequence: Synthetic oligonucleotide
  modified_base (17)..(17): a, c, u, g, unknown or other
uggguccucuauccccncc

SEQ ID NO: 2488493 - RNA, 19 nt, Artificial Sequence
  Description of Artificial Sequence: Synthetic oligonucleotide
agagacagagcgcggccau

SEQ ID NO: 2488494 - RNA, 19 nt, Artificial Sequence
  Description of Artificial Sequence: Synthetic oligonucleotide
cuggggucugugaagaucu

SEQ ID NO: 2488495 - RNA, 19 nt, Artificial Sequence
  Description of Artificial Sequence: Synthetic oligonucleotide
uggccgccuauggagaaug

SEQ ID NO: 2488496 - RNA, 19 nt, Artificial Sequence
  Description of Artificial Sequence: Synthetic oligonucleotide
ucagggucccauccacguc

SEQ ID NO: 2488497 - RNA, 19 nt, Artificial Sequence
  Description of Artificial Sequence: Synthetic oligonucleotide
cacagauccugcguguguc

SEQ ID NO: 2488498 - RNA, 19 nt, Artificial Sequence
  Description of Artificial Sequence: Synthetic oligonucleotide
cgucaaagcugauuuggcc

SEQ ID NO: 2488499 - RNA, 19 nt, Artificial Sequence
  Description of Artificial Sequence: Synthetic oligonucleotide
agucagggucccauccacg

SEQ ID NO: 2488500 - RNA, 19 nt, Artificial Sequence
  Description of Artificial Sequence: Synthetic oligonucleotide
  modified_base (7)..(7): a, c, u, g, unknown or other
auccccncccucccuuuca

SEQ ID NO: 2488501 - RNA, 19 nt, Artificial Sequence
  Description of Artificial Sequence: Synthetic oligonucleotide
agcccacaguucugggguc

SEQ ID NO: 2488502 - RNA, 19 nt, Artificial Sequence
  Description of Artificial Sequence: Synthetic oligonucleotide
acaucauuucccaguugcu

SEQ ID NO: 2488503 - RNA, 19 nt, Artificial Sequence
  Description of Artificial Sequence: Synthetic oligonucleotide
auuuggccgccuauggaga

SEQ ID NO: 2488504 - RNA, 19 nt, Artificial Sequence
  Description of Artificial Sequence: Synthetic oligonucleotide
cuccaauuuuggucuucug

SEQ ID NO: 2488505 - RNA, 19 nt, Artificial Sequence
  Description of Artificial Sequence: Synthetic oligonucleotide
ucguucuucuuggcugcag

SEQ ID NO: 2488506 - RNA, 19 nt, Artificial Sequence
  Description of Artificial Sequence: Synthetic oligonucleotide
ggucccauccacgucgaag

SEQ ID NO: 2488507 - RNA, 19 nt, Artificial Sequence
  Description of Artificial Sequence: Synthetic oligonucleotide
uucaggcaauaccgcuugu

SEQ ID NO: 2488508 - RNA, 19 nt, Artificial Sequence
  Description of Artificial Sequence: Synthetic oligonucleotide
caauuuuggucuucugccu

SEQ ID NO: 2488509 - RNA, 19 nt, Artificial Sequence
  Description of Artificial Sequence: Synthetic oligonucleotide
accguguagcccacaguuc

SEQ ID NO: 2488510 - RNA, 19 nt, Artificial Sequence
  Description of Artificial Sequence: Synthetic oligonucleotide
guuccccuuuucuuaggga

SEQ ID NO: 2488511 - RNA, 19 nt, Artificial Sequence
  Description of Artificial Sequence: Synthetic oligonucleotide
ugcugucaccguguagccc

SEQ ID NO: 2488512 - RNA, 19 nt, Artificial Sequence
  Description of Artificial Sequence: Synthetic oligonucleotide
gugaagaucucauggucau

SEQ ID NO: 2488513 - RNA, 19 nt, Artificial Sequence
  Description of Artificial Sequence: Synthetic oligonucleotide
cucgggugcugucaccgug

SEQ ID NO: 2488514 - RNA, 19 nt, Artificial Sequence
  Description of Artificial Sequence: Synthetic oligonucleotide
cccggcauagucuugucuc

SEQ ID NO: 2488515 - RNA, 19 nt, Artificial Sequence
  Description of Artificial Sequence: Synthetic oligonucleotide
cucugguguuaauggaaga

SEQ ID NO: 2488516 - RNA, 19 nt, Artificial Sequence
  Description of Artificial Sequence: Synthetic oligonucleotide
ccaccaagccauucucugg

SEQ ID NO: 2488517 - RNA, 19 nt, Artificial Sequence
  Description of Artificial Sequence: Synthetic oligonucleotide
uuccaauaggggacacauu

SEQ ID NO: 2488518 - RNA, 19 nt, Artificial Sequence
  Description of Artificial Sequence: Synthetic oligonucleotide
agcugauuuggccgccuau

SEQ ID NO: 2488519 - RNA, 19 nt, Artificial Sequence
  Description of Artificial Sequence: Synthetic oligonucleotide
cucacagauccugcgugug

SEQ ID NO: 2488520 - RNA, 19 nt, Artificial Sequence
  Description of Artificial Sequence: Synthetic oligonucleotide
acccggcauagucuugucu

SEQ ID NO: 2488521 - RNA, 19 nt, Artificial Sequence
  Description of Artificial Sequence: Synthetic oligonucleotide
  modified_base (8)..(8): a, c, u, g, unknown or other
uauccccncccucccuuuc

SEQ ID NO: 2488522 - RNA, 19 nt, Artificial Sequence
  Description of Artificial Sequence: Synthetic oligonucleotide
gaagagcuccucacagauc

SEQ ID NO: 2488523 - RNA, 19 nt, Artificial Sequence
  Description of Artificial Sequence: Synthetic oligonucleotide
ugccacccggcauagucuu

SEQ ID NO: 2488524 - RNA, 19 nt, Artificial Sequence
  Description of Artificial Sequence: Synthetic oligonucleotide
gucuuguuggccaggccca

SEQ ID NO: 2488525 - RNA, 19 nt, Artificial Sequence
  Description of Artificial Sequence: Synthetic oligonucleotide
caauucguucuucuuggcu

SEQ ID NO: 2488526 - RNA, 19 nt, Artificial Sequence
  Description of Artificial Sequence: Synthetic oligonucleotide
ggucuuggaucacuugcuc

SEQ ID NO: 2488527 - RNA, 19 nt, Artificial Sequence
  Description of Artificial Sequence: Synthetic oligonucleotide
cagucuuguuggccaggcc

SEQ ID NO: 2488528 - RNA, 19 nt, Artificial Sequence
  Description of Artificial Sequence: Synthetic oligonucleotide
gguguuaauggaagagcuc

SEQ ID NO: 2488529 - RNA, 19 nt, Artificial Sequence
  Description of Artificial Sequence: Synthetic oligonucleotide
cugacccaccuaccacucc

SEQ ID NO: 2488530 - RNA, 19 nt, Artificial Sequence
  Description of Artificial Sequence: Synthetic oligonucleotide
auaccgcuugucccaucca

SEQ ID NO: 2488531 - RNA, 19 nt, Artificial Sequence
  Description of Artificial Sequence: Synthetic oligonucleotide
caguugcucuugcacuuuc

SEQ ID NO: 2488532 - RNA, 19 nt, Artificial Sequence
  Description of Artificial Sequence: Synthetic oligonucleotide
uguaugccaccaagccauu

SEQ ID NO: 2488533 - RNA, 19 nt, Artificial Sequence
  Description of Artificial Sequence: Synthetic oligonucleotide
uuguaaccaucaugcucua

SEQ ID NO: 2488534 - RNA, 19 nt, Artificial Sequence
  Description of Artificial Sequence: Synthetic oligonucleotide
uucuuccaauaggggacac

SEQ ID NO: 2488535 - RNA, 19 nt, Artificial Sequence
  Description of Artificial Sequence: Synthetic oligonucleotide
agaugaccuugaauacucu

SEQ ID NO: 2488536 - RNA, 19 nt, Artificial Sequence
  Description of Artificial Sequence: Synthetic oligonucleotide
uggagaaugugaggccuuu

SEQ ID NO: 2488537 - RNA, 19 nt, Artificial Sequence
  Description of Artificial Sequence: Synthetic oligonucleotide
gucagggucccauccacgu

SEQ ID NO: 2488538 - RNA, 19 nt, Artificial Sequence
  Description of Artificial Sequence: Synthetic oligonucleotide
aguugcucuugcacuuucu

SEQ ID NO: 2488539 - RNA, 19 nt, Artificial Sequence
  Description of Artificial Sequence: Synthetic oligonucleotide
accaagccauucucuggaa

SEQ ID NO: 2488540 - RNA, 19 nt, Artificial Sequence
  Description of Artificial Sequence: Synthetic oligonucleotide
ccuuucagucuuguuggcc

SEQ ID NO: 2488541 - RNA, 19 nt, Artificial Sequence
  Description of Artificial Sequence: Synthetic oligonucleotide
  modified_base (4)..(4): a, c, u, g, unknown or other
cccncccucccuuucaguc

SEQ ID NO: 2488542 - RNA, 19 nt, Artificial Sequence
  Description of Artificial Sequence: Synthetic oligonucleotide
ccgccuauggagaauguga

SEQ ID NO: 2488543 - RNA, 19 nt, Artificial Sequence
  Description of Artificial Sequence: Synthetic oligonucleotide
ugcuuugcuggguccucua

SEQ ID NO: 2488544 - RNA, 19 nt, Artificial Sequence
  Description of Artificial Sequence: Synthetic oligonucleotide
ucccauccaucaggaaaga

SEQ ID NO: 2488545 - RNA, 19 nt, Artificial Sequence
  Description of Artificial Sequence: Synthetic oligonucleotide
ccggcauagucuugucucc

SEQ ID NO: 2488546 - RNA, 19 nt, Artificial Sequence
  Description of Artificial Sequence: Synthetic oligonucleotide
caucuuuguaugccaccaa

SEQ ID NO: 2488547 - RNA, 19 nt, Artificial Sequence
  Description of Artificial Sequence: Synthetic oligonucleotide
ccacgucgaagagacagag

SEQ ID NO: 2488548 - RNA, 19 nt, Artificial Sequence
  Description of Artificial Sequence: Synthetic oligonucleotide
caccguguagcccacaguu

SEQ ID NO: 2488549 - RNA, 19 nt, Artificial Sequence
  Description of Artificial Sequence: Synthetic oligonucleotide
cguucuucuuggcugcagc

SEQ ID NO: 2488550 - RNA, 19 nt, Artificial Sequence
  Description of Artificial Sequence: Synthetic oligonucleotide
ccaauaggggacacauuca

SEQ ID NO: 2488551 - RNA, 19 nt, Artificial Sequence
  Description of Artificial Sequence: Synthetic oligonucleotide
uggggucugugaagaucuc

SEQ ID NO: 2488552 - RNA, 19 nt, Artificial Sequence
  Description of Artificial Sequence: Synthetic oligonucleotide
gcucagacaguaguugauc

SEQ ID NO: 2488553 - RNA, 19 nt, Artificial Sequence
  Description of Artificial Sequence: Synthetic oligonucleotide
guuggccaggcccauuccu

SEQ ID NO: 2488554 - RNA, 19 nt, Artificial Sequence
  Description of Artificial Sequence: Synthetic oligonucleotide
ucccugcaaacuccuucuu

SEQ ID NO: 2488555 - RNA, 19 nt, Artificial Sequence
  Description of Artificial Sequence: Synthetic oligonucleotide
cuaccacuccaauuuuggu

SEQ ID NO: 2488556 - RNA, 19 nt, Artificial Sequence
  Description of Artificial Sequence: Synthetic oligonucleotide
augccauuucggaauucaa

SEQ ID NO: 2488557 - RNA, 19 nt, Artificial Sequence
  Description of Artificial Sequence: Synthetic oligonucleotide
ccaucuuuguaugccacca

SEQ ID NO: 2488558 - RNA, 19 nt, Artificial Sequence
  Description of Artificial Sequence: Synthetic oligonucleotide
auccugcguguguccucgg

SEQ ID NO: 2488559 - RNA, 19 nt, Artificial Sequence
  Description of Artificial Sequence: Synthetic oligonucleotide
guaugccaccaagccauuc

SEQ ID NO: 2488560 - RNA, 19 nt, Artificial Sequence
  Description of Artificial Sequence: Synthetic oligonucleotide
guuucaggcaauaccgcuu

SEQ ID NO: 2488561 - RNA, 19 nt, Artificial Sequence
  Description of Artificial Sequence: Synthetic oligonucleotide
  modified_base (12)..(12): a, c, u, g, unknown or other
ccucuauccccncccuccc

SEQ ID NO: 2488562 - RNA, 19 nt, Artificial Sequence
  Description of Artificial Sequence: Synthetic oligonucleotide
gcucuagguguuucaggca

SEQ ID NO: 2488563 - RNA, 19 nt, Artificial Sequence
  Description of Artificial Sequence: Synthetic oligonucleotide
caauaccgcuugucccauc

SEQ ID NO: 2488564 - RNA, 19 nt, Artificial Sequence
  Description of Artificial Sequence: Synthetic oligonucleotide
acccaccuaccacuccaau

SEQ ID NO: 2488565 - RNA, 19 nt, Artificial Sequence
  Description of Artificial Sequence: Synthetic oligonucleotide
cgucgaagagacagagcgc

SEQ ID NO: 2488566 - RNA, 19 nt, Artificial Sequence
  Description of Artificial Sequence: Synthetic oligonucleotide
caggcccauuccucuggug

SEQ ID NO: 2488567 - RNA, 19 nt, Artificial Sequence
  Description of Artificial Sequence: Synthetic oligonucleotide
gaccuugaauacucugcuu

SEQ ID NO: 2488568 - RNA, 19 nt, Artificial Sequence
  Description of Artificial Sequence: Synthetic oligonucleotide
caaguucauagaacucaau

SEQ ID NO: 2488569 - RNA, 19 nt, Artificial Sequence
  Description of Artificial Sequence: Synthetic oligonucleotide
caaugaaaguuccccuuuu

SEQ ID NO: 2488570 - RNA, 19 nt, Artificial Sequence
  Description of Artificial Sequence: Synthetic oligonucleotide
ggcauagucuugucuccaa

SEQ ID NO: 2488571 - RNA, 19 nt, Artificial Sequence
  Description of Artificial Sequence: Synthetic oligonucleotide
auggagaaugugaggccuu

SEQ ID NO: 2488572 - RNA, 19 nt, Artificial Sequence
  Description of Artificial Sequence: Synthetic oligonucleotide
uuggccgccuauggagaau

SEQ ID NO: 2488573 - RNA, 19 nt, Artificial Sequence
  Description of Artificial Sequence: Synthetic oligonucleotide
cguauuucucaaccacauc

SEQ ID NO: 2488574 - RNA, 19 nt, Artificial Sequence
  Description of Artificial Sequence: Synthetic oligonucleotide
ugucaccguguagcccaca

SEQ ID NO: 2488575 - RNA, 19 nt, Artificial Sequence
  Description of Artificial Sequence: Synthetic oligonucleotide
gccgccuauggagaaugug

SEQ ID NO: 2488576 - RNA, 19 nt, Artificial Sequence
  Description of Artificial Sequence: Synthetic oligonucleotide
cuccucacagauccugcgu

SEQ ID NO: 2488577 - RNA, 19 nt, Artificial Sequence
  Description of Artificial Sequence: Synthetic oligonucleotide
cacccggcauagucuuguc

SEQ ID NO: 2488578 - RNA, 19 nt, Artificial Sequence
  Description of Artificial Sequence: Synthetic oligonucleotide
ggagaaugugaggccuuuc

SEQ ID NO: 2488579 - RNA, 19 nt, Artificial Sequence
  Description of Artificial Sequence: Synthetic oligonucleotide
ccuuuucuuagggaguuua

SEQ ID NO: 2488580 - RNA, 19 nt, Artificial Sequence
  Description of Artificial Sequence: Synthetic oligonucleotide
cugccgcggggcagucagg

SEQ ID NO: 2488581 - RNA, 19 nt, Artificial Sequence
  Description of Artificial Sequence: Synthetic oligonucleotide
gacccaccuaccacuccaa

SEQ ID NO: 2488582 - RNA, 19 nt, Artificial Sequence
  Description of Artificial Sequence: Synthetic oligonucleotide
ccacaucauuucccaguug

SEQ ID NO: 2488583 - RNA, 19 nt, Artificial Sequence
  Description of Artificial Sequence: Synthetic oligonucleotide
ccgcggggcagucaggguc

SEQ ID NO: 2488584 - RNA, 19 nt, Artificial Sequence
  Description of Artificial Sequence: Synthetic oligonucleotide
uucugccgcggggcaguca

SEQ ID NO: 2488585 - RNA, 19 nt, Artificial Sequence
  Description of Artificial Sequence: Synthetic oligonucleotide
ccguguagcccacaguucu

SEQ ID NO: 2488586 - RNA, 19 nt, Artificial Sequence
  Description of Artificial Sequence: Synthetic oligonucleotide
cguguagcccacaguucug

SEQ ID NO: 2488587 - RNA, 19 nt, Artificial Sequence
  Description of Artificial Sequence: Synthetic oligonucleotide
gggucugugaagaucucau

SEQ ID NO: 2488588 - RNA, 19 nt, Artificial Sequence
  Description of Artificial Sequence: Synthetic oligonucleotide
cgcggggcagucagggucc

SEQ ID NO: 2488589 - RNA, 19 nt, Artificial Sequence
  Description of Artificial Sequence: Synthetic oligonucleotide
cauccacgucgaagagaca

SEQ ID NO: 2488590 - RNA, 19 nt, Artificial Sequence
  Description of Artificial Sequence: Synthetic oligonucleotide
uuucugccgcggggcaguc

SEQ ID NO: 2488591 - RNA, 19 nt, Artificial Sequence
  Description of Artificial Sequence: Synthetic oligonucleotide
agggucccauccacgucga

SEQ ID NO: 2488592 - RNA, 19 nt, Artificial Sequence
  Description of Artificial Sequence: Synthetic oligonucleotide
ccaagccauucucuggaaa

SEQ ID NO: 2488593 - RNA, 19 nt, Artificial Sequence
  Description of Artificial Sequence: Synthetic oligonucleotide
ccagaugaccuugaauacu

SEQ ID NO: 2488594 - RNA, 19 nt, Artificial Sequence
  Description of Artificial Sequence: Synthetic oligonucleotide
cagauccugcguguguccu

SEQ ID NO: 2488595 - RNA, 19 nt, Artificial Sequence
  Description of Artificial Sequence: Synthetic oligonucleotide
  modified_base (11)..(11): a, c, u, g, unknown or other
cucuauccccncccucccu

SEQ ID NO: 2488596 - RNA, 19 nt, Artificial Sequence
  Description of Artificial Sequence: Synthetic oligonucleotide
  modified_base (15)..(15): a, c, u, g, unknown or other
gguccucuauccccncccu

SEQ ID NO: 2488597 - RNA, 19 nt, Artificial Sequence
  Description of Artificial Sequence: Synthetic oligonucleotide
  modified_base (2)..(2): a, c, u, g, unknown or other
cncccucccuuucagucuu

SEQ ID NO: 2488598 - RNA, 19 nt, Artificial Sequence
  Description of Artificial Sequence: Synthetic oligonucleotide
gaaagacgucaaagcugau

SEQ ID NO: 2488599 - RNA, 19 nt, Artificial Sequence
  Description of Artificial Sequence: Synthetic oligonucleotide
cuuucccugcaaacuccuu

SEQ ID NO: 2488600 - RNA, 19 nt, Artificial Sequence
  Description of Artificial Sequence: Synthetic oligonucleotide
  modified_base (9)..(9): a, c, u, g, unknown or other
cuauccccncccucccuuu

SEQ ID NO: 2488601 - RNA, 19 nt, Artificial Sequence
  Description of Artificial Sequence: Synthetic oligonucleotide
cccauccacgucgaagaga

SEQ ID NO: 2488602 - RNA, 19 nt, Artificial Sequence
  Description of Artificial Sequence: Synthetic oligonucleotide
gcaauguagcucagacagu

SEQ ID NO: 2488603 - RNA, 19 nt, Artificial Sequence
  Description of Artificial Sequence: Synthetic oligonucleotide
ccauuucuuuuguaauuuu

SEQ ID NO: 2488604 - RNA, 19 nt, Artificial Sequence
  Description of Artificial Sequence: Synthetic oligonucleotide
ccucacagauccugcgugu

SEQ ID NO: 2488605 - RNA, 19 nt, Artificial Sequence
  Description of Artificial Sequence: Synthetic oligonucleotide
caccuaccacuccaauuuu

SEQ ID NO: 2488606 - RNA, 19 nt, Artificial Sequence
  Description of Artificial Sequence: Synthetic oligonucleotide
ggcccauuccucugguguu

SEQ ID NO: 2488607 - RNA, 19 nt, Artificial Sequence
  Description of Artificial Sequence: Synthetic oligonucleotide
gcuuugcuggguccucuau

SEQ ID NO: 2488608 - RNA, 19 nt, Artificial Sequence
  Description of Artificial Sequence: Synthetic oligonucleotide
caggucugccacgaauuuu

SEQ ID NO: 2488609 - RNA, 19 nt, Artificial Sequence
  Description of Artificial Sequence: Synthetic oligonucleotide
  modified_base (3)..(3): a, c, u, g, unknown or other
ccncccucccuuucagucu

SEQ ID NO: 2488610 - RNA, 19 nt, Artificial Sequence
  Description of Artificial Sequence: Synthetic oligonucleotide
ccugcguguguccucgggu

SEQ ID NO: 2488611 - RNA, 19 nt, Artificial Sequence
  Description of Artificial Sequence: Synthetic oligonucleotide
ccaucaugcucuagguguu

SEQ ID NO: 2488612 - RNA, 19 nt, Artificial Sequence
  Description of Artificial Sequence: Synthetic oligonucleotide
caucaugcucuagguguuu

SEQ ID NO: 2488613 - RNA, 19 nt, Artificial Sequence
  Description of Artificial Sequence: Synthetic oligonucleotide
gccacccggcauagucuug

SEQ ID NO: 2488614 - RNA, 19 nt, Artificial Sequence
  Description of Artificial Sequence: Synthetic oligonucleotide
gcaauaccgcuugucccau

SEQ ID NO: 2488615 - RNA, 19 nt, Artificial Sequence
  Description of Artificial Sequence: Synthetic oligonucleotide
cuuguuggccaggcccauu

SEQ ID NO: 2488616 - RNA, 19 nt, Artificial Sequence
  Description of Artificial Sequence: Synthetic oligonucleotide
cggcauagucuugucucca

SEQ ID NO: 2488617 - RNA, 19 nt, Artificial Sequence
  Description of Artificial Sequence: Synthetic oligonucleotide
gcccacaguucuggggucu

SEQ ID NO: 2488618 - RNA, 19 nt, Artificial Sequence
  Description of Artificial Sequence: Synthetic oligonucleotide
cauugccacccggcauagu

SEQ ID NO: 2488619 - RNA, 19 nt, Artificial Sequence
  Description of Artificial Sequence: Synthetic oligonucleotide
gggucccauccacgucgaa

SEQ ID NO: 2488620 - RNA, 19 nt, Artificial Sequence
  Description of Artificial Sequence: Synthetic oligonucleotide
ggccgccuauggagaaugu

SEQ ID NO: 2488621 - RNA, 19 nt, Artificial Sequence
  Description of Artificial Sequence: Synthetic oligonucleotide
gccgcggggcagucagggu

SEQ ID NO: 2488622 - RNA, 19 nt, Artificial Sequence
  Description of Artificial Sequence: Synthetic oligonucleotide
ccucccuuucagucuuguu

SEQ ID NO: 2488623 - RNA, 19 nt, Artificial Sequence
  Description of Artificial Sequence: Synthetic oligonucleotide
ccucgggugcugucaccgu

SEQ ID NO: 2488624 - RNA, 19 nt, Artificial Sequence
  Description of Artificial Sequence: Synthetic oligonucleotide
  modified_base (5)..(5): a, c, u, g, unknown or other
ccccncccucccuuucagu

SEQ ID NO: 2488625 - RNA, 19 nt, Artificial Sequence
  Description of Artificial Sequence: Synthetic oligonucleotide
ccacuccaauuuuggucuu

SEQ ID NO: 2488626 - RNA, 19 nt, Artificial Sequence
  Description of Artificial Sequence: Synthetic oligonucleotide
ccaguugcucuugcacuuu

SEQ ID NO: 2488627 - RNA, 19 nt, Artificial Sequence
  Description of Artificial Sequence: Synthetic oligonucleotide
cccucccuuucagucuugu

SEQ ID NO: 2488628 - RNA, 19 nt, Artificial Sequence
  Description of Artificial Sequence: Synthetic oligonucleotide
ccacaguucuggggucugu

SEQ ID NO: 2488629 - RNA, 19 nt, Artificial Sequence
  Description of Artificial Sequence: Synthetic oligonucleotide
cgggugcugucaccgugua

SEQ ID NO: 2488630 - RNA, 19 nt, Artificial Sequence
  Description of Artificial Sequence: Synthetic oligonucleotide
cccuuuucuuagggaguuu

SEQ ID NO: 2488631 - RNA, 19 nt, Artificial Sequence
  Description of Artificial Sequence: Synthetic oligonucleotide
cggggcagucaggguccca

SEQ ID NO: 2488632 - RNA, 19 nt, Artificial Sequence
  Description of Artificial Sequence: Synthetic oligonucleotide
ugucaucaaauucugagcg

SEQ ID NO: 2488633 - RNA, 19 nt, Artificial Sequence
  Description of Artificial Sequence: Synthetic oligonucleotide
ucucauuccacacugcugg

SEQ ID NO: 2488634 - RNA, 19 nt, Artificial Sequence
  Description of Artificial Sequence: Synthetic oligonucleotide
uguucuuauaggaaaagcc

SEQ ID NO: 2488635 - RNA, 19 nt, Artificial Sequence
  Description of Artificial Sequence: Synthetic oligonucleotide
ugagcuuccaccccuaugg

SEQ ID NO: 2488636 - RNA, 19 nt, Artificial Sequence
  Description of Artificial Sequence: Synthetic oligonucleotide
ucaucgccgaucaugaugg

SEQ ID NO: 2488637 - RNA, 19 nt, Artificial Sequence
  Description of Artificial Sequence: Synthetic oligonucleotide
aaaucccagucgcugaagc

SEQ ID NO: 2488638 - RNA, 19 nt, Artificial Sequence
  Description of Artificial Sequence: Synthetic oligonucleotide
aaucacaacacaguuuggg

SEQ ID NO: 2488639 - RNA, 19 nt, Artificial Sequence
  Description of Artificial Sequence: Synthetic oligonucleotide
aauggggacugcuucaguc

SEQ ID NO: 2488640 - RNA, 19 nt, Artificial Sequence
  Description of Artificial Sequence: Synthetic oligonucleotide
agaaucucaccuucaaugg

SEQ ID NO: 2488641 - RNA, 19 nt, Artificial Sequence
  Description of Artificial Sequence: Synthetic oligonucleotide
cauguagccuccaacaucc

SEQ ID NO: 2488642 - RNA, 19 nt, Artificial Sequence
  Description of Artificial Sequence: Synthetic oligonucleotide
ucuguucauguucuuauag

SEQ ID NO: 2488643 - RNA, 19 nt, Artificial Sequence
  Description of Artificial Sequence: Synthetic oligonucleotide
uuucccagugauaugagca

SEQ ID NO: 2488644 - RNA, 19 nt, Artificial Sequence
  Description of Artificial Sequence: Synthetic oligonucleotide
gaugucaaaucccagucgc

SEQ ID NO: 2488645 - RNA, 19 nt, Artificial Sequence
  Description of Artificial Sequence: Synthetic oligonucleotide
uguucauguucuuauagga

SEQ ID NO: 2488646 - RNA, 19 nt, Artificial Sequence
  Description of Artificial Sequence: Synthetic oligonucleotide
ucaaauucugagcggaccc

SEQ ID NO: 2488647 - RNA, 19 nt, Artificial Sequence
  Description of Artificial Sequence: Synthetic oligonucleotide
gaugaugcucaucacuagg

SEQ ID NO: 2488648 - RNA, 19 nt, Artificial Sequence
  Description of Artificial Sequence: Synthetic oligonucleotide
cagaaucucaccuucaaug

SEQ ID NO: 2488649 - RNA, 19 nt, Artificial Sequence
  Description of Artificial Sequence: Synthetic oligonucleotide
ugagcggaccccuucaugg

SEQ ID NO: 2488650 - RNA, 19 nt, Artificial Sequence
  Description of Artificial Sequence: Synthetic oligonucleotide
aaucucaccuucaaugggg

SEQ ID NO: 2488651 - RNA, 19 nt, Artificial Sequence
  Description of Artificial Sequence: Synthetic oligonucleotide
ucaagugccuucauguagc

SEQ ID NO: 2488652 - RNA, 19 nt, Artificial Sequence
  Description of Artificial Sequence: Synthetic oligonucleotide
ucaucacuaggccugaacu

SEQ ID NO: 2488653 - RNA, 19 nt, Artificial Sequence
  Description of Artificial Sequence: Synthetic oligonucleotide
uacucaagugccuucaugu

SEQ ID NO: 2488654 - RNA, 19 nt, Artificial Sequence
  Description of Artificial Sequence: Synthetic oligonucleotide
aauaccacaggcauacuca

SEQ ID NO: 2488655 - RNA, 19 nt, Artificial Sequence
  Description of Artificial Sequence: Synthetic oligonucleotide
ucuuauaggaaaagccuuc

SEQ ID NO: 2488656 - RNA, 19 nt, Artificial Sequence
  Description of Artificial Sequence: Synthetic oligonucleotide
aagaccucgcuccuucagg

SEQ ID NO: 2488657 - RNA, 19 nt, Artificial Sequence
  Description of Artificial Sequence: Synthetic oligonucleotide
gaaagaagcaugggcacgg

SEQ ID NO: 2488658 - RNA, 19 nt, Artificial Sequence
  Description of Artificial Sequence: Synthetic oligonucleotide
uugguacagaaucucaccu

SEQ ID NO: 2488659 - RNA, 19 nt, Artificial Sequence
  Description of Artificial Sequence: Synthetic oligonucleotide
uaggaaaagccuucaccgg

SEQ ID NO: 2488660 - RNA, 19 nt, Artificial Sequence
  Description of Artificial Sequence: Synthetic oligonucleotide
ugaagcaaccccaccagcu

SEQ ID NO: 2488661 - RNA, 19 nt, Artificial Sequence
  Description of Artificial Sequence: Synthetic oligonucleotide
aagguuguccacauacccg

SEQ ID NO: 2488662 - RNA, 19 nt, Artificial Sequence
  Description of Artificial Sequence: Synthetic oligonucleotide
aagguuuccccaccacuuc

SEQ ID NO: 2488663 - RNA, 19 nt, Artificial Sequence
  Description of Artificial Sequence: Synthetic oligonucleotide
caagguuguccacauaccc

SEQ ID NO: 2488664 - RNA, 19 nt, Artificial Sequence
  Description of Artificial Sequence: Synthetic oligonucleotide
uucuuauaggaaaagccuu

SEQ ID NO: 2488665 - RNA, 19 nt, Artificial Sequence
  Description of Artificial Sequence: Synthetic oligonucleotide
ucaucaaauucugagcgga

SEQ ID NO: 2488666 - RNA, 19 nt, Artificial Sequence
  Description of Artificial Sequence: Synthetic oligonucleotide
accugcagugcucucauuc

SEQ ID NO: 2488667 - RNA, 19 nt, Artificial Sequence
  Description of Artificial Sequence: Synthetic oligonucleotide
ucauugguacagaaucuca

SEQ ID NO: 2488668 - RNA, 19 nt, Artificial Sequence
  Description of Artificial Sequence: Synthetic oligonucleotide
augaugcucaucacuaggc

SEQ ID NO: 2488669 - RNA, 19 nt, Artificial Sequence
  Description of Artificial Sequence: Synthetic oligonucleotide
aguagcgucccuuucccag

SEQ ID NO: 2488670 - RNA, 19 nt, Artificial Sequence
  Description of Artificial Sequence: Synthetic oligonucleotide
uccauugucucugaagggc

SEQ ID NO: 2488671 - RNA, 19 nt, Artificial Sequence
  Description of Artificial Sequence: Synthetic oligonucleotide
uccgcaaucacaacacagu

SEQ ID NO: 2488672 - RNA, 19 nt, Artificial Sequence
  Description of Artificial Sequence: Synthetic oligonucleotide
aagaagcaugggcacgggg

SEQ ID NO: 2488673 - RNA, 19 nt, Artificial Sequence
  Description of Artificial Sequence: Synthetic oligonucleotide
ucuccuuguaguagcgucc

SEQ ID NO: 2488674 - RNA, 19 nt, Artificial Sequence
  Description of Artificial Sequence: Synthetic oligonucleotide
cagugauaugagcacaggg

SEQ ID NO: 2488675 - RNA, 19 nt, Artificial Sequence
  Description of Artificial Sequence: Synthetic oligonucleotide
gaucaugauggccugguga

SEQ ID NO: 2488676 - RNA, 19 nt, Artificial Sequence
  Description of Artificial Sequence: Synthetic oligonucleotide
cuaggccugaacuuuccgg

SEQ ID NO: 2488677 - RNA, 19 nt, Artificial Sequence
  Description of Artificial Sequence: Synthetic oligonucleotide
gguggaaagaagcaugggc

SEQ ID NO: 2488678 - RNA, 19 nt, Artificial Sequence
  Description of Artificial Sequence: Synthetic oligonucleotide
cucaagugccuucauguag

SEQ ID NO: 2488679 - RNA, 19 nt, Artificial Sequence
  Description of Artificial Sequence: Synthetic oligonucleotide
gaaggcucuguucauguuc

SEQ ID NO: 2488680 - RNA, 19 nt, Artificial Sequence
  Description of Artificial Sequence: Synthetic oligonucleotide
uggaaagaagcaugggcac

SEQ ID NO: 2488681 - RNA, 19 nt, Artificial Sequence
  Description of Artificial Sequence: Synthetic oligonucleotide
uucugggacucauugguac

SEQ ID NO: 2488682 - RNA, 19 nt, Artificial Sequence
  Description of Artificial Sequence: Synthetic oligonucleotide
uuguccacauacccgucag

SEQ ID NO: 2488683 - RNA, 19 nt, Artificial Sequence
  Description of Artificial Sequence: Synthetic oligonucleotide
agguuguccacauacccgu

SEQ ID NO: 2488684 - RNA, 19 nt, Artificial Sequence
  Description of Artificial Sequence: Synthetic oligonucleotide
cuccaugagcacuuggaag

SEQ ID NO: 2488685 - RNA, 19 nt, Artificial Sequence
  Description of Artificial Sequence: Synthetic oligonucleotide
uggccgaagaccucgcucc

SEQ ID NO: 2488686 - RNA, 19 nt, Artificial Sequence
  Description of Artificial Sequence: Synthetic oligonucleotide
ugagcacaggguuuuccag

SEQ ID NO: 2488687 - RNA, 19 nt, Artificial Sequence
  Description of Artificial Sequence: Synthetic oligonucleotide
gaucuggcagguguggccg

SEQ ID NO: 2488688 - RNA, 19 nt, Artificial Sequence
  Description of Artificial Sequence: Synthetic oligonucleotide
aaucccagucgcugaagca

SEQ ID NO: 2488689 - RNA, 19 nt, Artificial Sequence
  Description of Artificial Sequence: Synthetic oligonucleotide
cacaggguuuuccagcucc

SEQ ID NO: 2488690 - RNA, 19 nt, Artificial Sequence
  Description of Artificial Sequence: Synthetic oligonucleotide
aacucaggggaagguuucc

SEQ ID NO: 2488691 - RNA, 19 nt, Artificial Sequence
  Description of Artificial Sequence: Synthetic oligonucleotide
gucaucgccgaucaugaug

SEQ ID NO: 2488692 - RNA, 19 nt, Artificial Sequence
  Description of Artificial Sequence: Synthetic oligonucleotide
uaggccugaacuuuccggu

SEQ ID NO: 2488693 - RNA, 19 nt, Artificial Sequence
  Description of Artificial Sequence: Synthetic oligonucleotide
uacagaaucucaccuucaa

SEQ ID NO: 2488694 - RNA, 19 nt, Artificial Sequence
  Description of Artificial Sequence: Synthetic oligonucleotide
ugaacuuuccgguccgcac

SEQ ID NO: 2488695 - RNA, 19 nt, Artificial Sequence
  Description of Artificial Sequence: Synthetic oligonucleotide
guggaaagaagcaugggca

SEQ ID NO: 2488696 - RNA, 19 nt, Artificial Sequence
  Description of Artificial Sequence: Synthetic oligonucleotide
uggcaguauggggagaggg

SEQ ID NO: 2488697 - RNA, 19 nt, Artificial Sequence
  Description of Artificial Sequence: Synthetic oligonucleotide
cuuucccagugauaugagc

SEQ ID NO: 2488698 - RNA, 19 nt, Artificial Sequence
  Description of Artificial Sequence: Synthetic oligonucleotide
auacucaagugccuucaug

SEQ ID NO: 2488699 - RNA, 19 nt, Artificial Sequence
  Description of Artificial Sequence: Synthetic oligonucleotide
guaguagcgucccuuuccc

SEQ ID NO: 2488700 - RNA, 19 nt, Artificial Sequence
  Description of Artificial Sequence: Synthetic oligonucleotide
ugauaugagcacaggguuu

SEQ ID NO: 2488701 - RNA, 19 nt, Artificial Sequence
  Description of Artificial Sequence: Synthetic oligonucleotide
agugcucucauuccacacu

SEQ ID NO: 2488702 - RNA, 19 nt, Artificial Sequence
  Description of Artificial Sequence: Synthetic oligonucleotide
caauaccacaggcauacuc

SEQ ID NO: 2488703 - RNA, 19 nt, Artificial Sequence
  Description of Artificial Sequence: Synthetic oligonucleotide
cugucacuuguccaugugc

SEQ ID NO: 2488704 - RNA, 19 nt, Artificial Sequence
  Description of Artificial Sequence: Synthetic oligonucleotide
gucacccacgaugucaucg

SEQ ID NO: 2488705 - RNA, 19 nt, Artificial Sequence
  Description of Artificial Sequence: Synthetic oligonucleotide
aacuuuccgguccgcaccu

SEQ ID NO: 2488706 - RNA, 19 nt, Artificial Sequence
  Description of Artificial Sequence: Synthetic oligonucleotide
ucaaaucccagucgcugaa

SEQ ID NO: 2488707 - RNA, 19 nt, Artificial Sequence
  Description of Artificial Sequence: Synthetic oligonucleotide
acuaggccugaacuuuccg

SEQ ID NO: 2488708 - RNA, 19 nt, Artificial Sequence
  Description of Artificial Sequence: Synthetic oligonucleotide
ucuucgggucuucugggac

SEQ ID NO: 2488709 - RNA, 19 nt, Artificial Sequence
  Description of Artificial Sequence: Synthetic oligonucleotide
gaagaccucgcuccuucag

SEQ ID NO: 2488710 - RNA, 19 nt, Artificial Sequence
  Description of Artificial Sequence: Synthetic oligonucleotide
accucgcuccuucaggauc

SEQ ID NO: 2488711 - RNA, 19 nt, Artificial Sequence
  Description of Artificial Sequence: Synthetic oligonucleotide
uucccagugauaugagcac

SEQ ID NO: 2488712 - RNA, 19 nt, Artificial Sequence
  Description of Artificial Sequence: Synthetic oligonucleotide
aucgccgaucaugauggcc

SEQ ID NO: 2488713 - RNA, 19 nt, Artificial Sequence
  Description of Artificial Sequence: Synthetic oligonucleotide
augagcacaggguuuucca

SEQ ID NO: 2488714 - RNA, 19 nt, Artificial Sequence
  Description of Artificial Sequence: Synthetic oligonucleotide
aaagaagcaugggcacggg

SEQ ID NO: 2488715 - RNA, 19 nt, Artificial Sequence
  Description of Artificial Sequence: Synthetic oligonucleotide
ucugggacucauugguaca

SEQ ID NO: 2488716 - RNA, 19 nt, Artificial Sequence
  Description of Artificial Sequence: Synthetic oligonucleotide
ucacccacgaugucaucgc

SEQ ID NO: 2488717 - RNA, 19 nt, Artificial Sequence
  Description of Artificial Sequence: Synthetic oligonucleotide
agucaccucuucuucugag

SEQ ID NO: 2488718 - RNA, 19 nt, Artificial Sequence
  Description of Artificial Sequence: Synthetic oligonucleotide
acgaugucaucgccgauca

SEQ ID NO: 2488719 - RNA, 19 nt, Artificial Sequence
  Description of Artificial Sequence: Synthetic oligonucleotide
agcacaggguuuuccagcu

SEQ ID NO: 2488720 - RNA, 19 nt, Artificial Sequence
  Description of Artificial Sequence: Synthetic oligonucleotide
gccaacgucacccacgaug

SEQ ID NO: 2488721 - RNA, 19 nt, Artificial Sequence
  Description of Artificial Sequence: Synthetic oligonucleotide
guccacauacccgucagcc

SEQ ID NO: 2488722 - RNA, 19 nt, Artificial Sequence
  Description of Artificial Sequence: Synthetic oligonucleotide
uggguuggacaugucaaug

SEQ ID NO: 2488723 - RNA, 19 nt, Artificial Sequence
  Description of Artificial Sequence: Synthetic oligonucleotide
caacauccagcaucaggcc

SEQ ID NO: 2488724 - RNA, 19 nt, Artificial Sequence
  Description of Artificial Sequence: Synthetic oligonucleotide
gugcucucauuccacacug

SEQ ID NO: 2488725 - RNA, 19 nt, Artificial Sequence
  Description of Artificial Sequence: Synthetic oligonucleotide
uucugagcggaccccuuca

SEQ ID NO: 2488726 - RNA, 19 nt, Artificial Sequence
  Description of Artificial Sequence: Synthetic oligonucleotide
caaucacaacacaguuugg

SEQ ID NO: 2488727 - RNA, 19 nt, Artificial Sequence
  Description of Artificial Sequence: Synthetic oligonucleotide
augagcacuuggaaggcuc

SEQ ID NO: 2488728 - RNA, 19 nt, Artificial Sequence
  Description of Artificial Sequence: Synthetic oligonucleotide
agaagcaugggcacggggu

SEQ ID NO: 2488729 - RNA, 19 nt, Artificial Sequence
  Description of Artificial Sequence: Synthetic oligonucleotide
ugagcacuuggaaggcucu

SEQ ID NO: 2488730 - RNA, 19 nt, Artificial Sequence
  Description of Artificial Sequence: Synthetic oligonucleotide
ggaucuggcagguggcugg

SEQ ID NO: 2488731 - RNA, 19 nt, Artificial Sequence
  Description of Artificial Sequence: Synthetic oligonucleotide
auggggacugcuucagucu

SEQ ID NO: 2488732 - RNA, 19 nt, Artificial Sequence
  Description of Artificial Sequence: Synthetic oligonucleotide
cucauugguacagaaucuc

SEQ ID NO: 2488733 - RNA, 19 nt, Artificial Sequence
  Description of Artificial Sequence: Synthetic oligonucleotide
gaugcucaucacuaggccu

SEQ ID NO: 2488734 - RNA, 19 nt, Artificial Sequence
  Description of Artificial Sequence: Synthetic oligonucleotide
auccgcaaucacaacacag

SEQ ID NO: 2488735 - RNA, 19 nt, Artificial Sequence
  Description of Artificial Sequence: Synthetic oligonucleotide
acagaaucucaccuucaau

SEQ ID NO: 2488736 - RNA, 19 nt, Artificial Sequence
  Description of Artificial Sequence: Synthetic oligonucleotide
cauggaucuggcaggugug

SEQ ID NO: 2488737 - RNA, 19 nt, Artificial Sequence
  Description of Artificial Sequence: Synthetic oligonucleotide
agaccucgcuccuucagga

SEQ ID NO: 2488738 - RNA, 19 nt, Artificial Sequence
  Description of Artificial Sequence: Synthetic oligonucleotide
caucaaauucugagcggac

SEQ ID NO: 2488739 - RNA, 19 nt, Artificial Sequence
  Description of Artificial Sequence: Synthetic oligonucleotide
cugggcaccgccaacguca

SEQ ID NO: 2488740 - RNA, 19 nt, Artificial Sequence
  Description of Artificial Sequence: Synthetic oligonucleotide
uacccgucagccuucacuu

SEQ ID NO: 2488741 - RNA, 19 nt, Artificial Sequence
  Description of Artificial Sequence: Synthetic oligonucleotide
ucugaagggcugucacuug

SEQ ID NO: 2488742 - RNA, 19 nt, Artificial Sequence
  Description of Artificial Sequence: Synthetic oligonucleotide
caaauucugagcggacccc

SEQ ID NO: 2488743 - RNA, 19 nt, Artificial Sequence
  Description of Artificial Sequence: Synthetic oligonucleotide
cagccuucacuucuggaug

SEQ ID NO: 2488744 - RNA, 19 nt, Artificial Sequence
  Description of Artificial Sequence: Synthetic oligonucleotide
cucaucacuaggccugaac

SEQ ID NO: 2488745 - RNA, 19 nt, Artificial Sequence
  Description of Artificial Sequence: Synthetic oligonucleotide
aagaacucaggggaagguu

SEQ ID NO: 2488746 - RNA, 19 nt, Artificial Sequence
  Description of Artificial Sequence: Synthetic oligonucleotide
augcucaucacuaggccug

SEQ ID NO: 2488747 - RNA, 19 nt, Artificial Sequence
  Description of Artificial Sequence: Synthetic oligonucleotide
uguccacauacccgucagc

SEQ ID NO: 2488748 - RNA, 19 nt, Artificial Sequence
  Description of Artificial Sequence: Synthetic oligonucleotide
ggaaagaagcaugggcacg

SEQ ID NO: 2488749 - RNA, 19 nt, Artificial Sequence
  Description of Artificial Sequence: Synthetic oligonucleotide
cauugucucugaagggcug

SEQ ID NO: 2488750 - RNA, 19 nt, Artificial Sequence
  Description of Artificial Sequence: Synthetic oligonucleotide
ucacuucuggaugaugcuc

SEQ ID NO: 2488751 - RNA, 19 nt, Artificial Sequence
  Description of Artificial Sequence: Synthetic oligonucleotide
cucauuccacacugcuggg

SEQ ID NO: 2488752 - RNA, 19 nt, Artificial Sequence
  Description of Artificial Sequence: Synthetic oligonucleotide
cuuauaggaaaagccuuca

SEQ ID NO: 2488753 - RNA, 19 nt, Artificial Sequence
  Description of Artificial Sequence: Synthetic oligonucleotide
aggccugaacuuuccgguc

SEQ ID NO: 2488754 - RNA, 19 nt, Artificial Sequence
  Description of Artificial Sequence: Synthetic oligonucleotide
caagugccuucauguagcc

SEQ ID NO: 2488755 - RNA, 19 nt, Artificial Sequence
  Description of Artificial Sequence: Synthetic oligonucleotide
gucaaaucccagucgcuga

SEQ ID NO: 2488756 - RNA, 19 nt, Artificial Sequence
  Description of Artificial Sequence: Synthetic oligonucleotide
ugguacagaaucucaccuu

SEQ ID NO: 2488757 - RNA, 19 nt, Artificial Sequence
  Description of Artificial Sequence: Synthetic oligonucleotide
uuuccgguccgcaccugca

SEQ ID NO: 2488758 - RNA, 19 nt, Artificial Sequence
  Description of Artificial Sequence: Synthetic oligonucleotide
cugaagcaaccccaccagc

SEQ ID NO: 2488759 - RNA, 19 nt, Artificial Sequence
  Description of Artificial Sequence: Synthetic oligonucleotide
ugaagggcugucacuuguc

SEQ ID NO: 2488760 - RNA, 19 nt, Artificial Sequence
  Description of Artificial Sequence: Synthetic oligonucleotide
augucaucgccgaucauga

SEQ ID NO: 2488761 - RNA, 19 nt, Artificial Sequence
  Description of Artificial Sequence: Synthetic oligonucleotide
uggggacugcuucagucuc

SEQ ID NO: 2488762 - RNA, 19 nt, Artificial Sequence
  Description of Artificial Sequence: Synthetic oligonucleotide
aucacuaggccugaacuuu

SEQ ID NO: 2488763 - RNA, 19 nt, Artificial Sequence
  Description of Artificial Sequence: Synthetic oligonucleotide
uuccgguccgcaccugcag

SEQ ID NO: 2488764 - RNA, 19 nt, Artificial Sequence
  Description of Artificial Sequence: Synthetic oligonucleotide
cacuuguccauugucucug

SEQ ID NO: 2488765 - RNA, 19 nt, Artificial Sequence
  Description of Artificial Sequence: Synthetic oligonucleotide
acucauugguacagaaucu

SEQ ID NO: 2488766 - RNA, 19 nt, Artificial Sequence
  Description of Artificial Sequence: Synthetic oligonucleotide
cagucgcugaagcaacccc

SEQ ID NO: 2488767 - RNA, 19 nt, Artificial Sequence
  Description of Artificial Sequence: Synthetic oligonucleotide
cuuuccgguccgcaccugc

SEQ ID NO: 2488768 - RNA, 19 nt, Artificial Sequence
  Description of Artificial Sequence: Synthetic oligonucleotide
ugcucucauuccacacugc

SEQ ID NO: 2488769 - RNA, 19 nt, Artificial Sequence
  Description of Artificial Sequence: Synthetic oligonucleotide
ggaugaugcucaucacuag

SEQ ID NO: 2488770 - RNA, 19 nt, Artificial Sequence
  Description of Artificial Sequence: Synthetic oligonucleotide
cacuaggccugaacuuucc

SEQ ID NO: 2488771 - RNA, 19 nt, Artificial Sequence
  Description of Artificial Sequence: Synthetic oligonucleotide
caggccagaggucuccuug

SEQ ID NO: 2488772 - RNA, 19 nt, Artificial Sequence
  Description of Artificial Sequence: Synthetic oligonucleotide
ggcauccgcaaucacaaca

SEQ ID NO: 2488773 - RNA, 19 nt, Artificial Sequence
  Description of Artificial Sequence: Synthetic oligonucleotide
ucccagugauaugagcaca

SEQ ID NO: 2488774 - RNA, 19 nt, Artificial Sequence
  Description of Artificial Sequence: Synthetic oligonucleotide
cuccuuguaguagcguccc

SEQ ID NO: 2488775 - RNA, 19 nt, Artificial Sequence
  Description of Artificial Sequence: Synthetic oligonucleotide
gguuggacaugucaauguc

SEQ ID NO: 2488776 - RNA, 19 nt, Artificial Sequence
  Description of Artificial Sequence: Synthetic oligonucleotide
uccacagccuccgcaaggu

SEQ ID NO: 2488777 - RNA, 19 nt, Artificial Sequence
  Description of Artificial Sequence: Synthetic oligonucleotide
cuuccaccccuauggcccg

SEQ ID NO: 2488778 - RNA, 19 nt, Artificial Sequence
  Description of Artificial Sequence: Synthetic oligonucleotide
uccgcaagguuguccacau

SEQ ID NO: 2488779 - RNA, 19 nt, Artificial Sequence
  Description of Artificial Sequence: Synthetic oligonucleotide
uagcgucccuuucccagug

SEQ ID NO: 2488780 - RNA, 19 nt, Artificial Sequence
  Description of Artificial Sequence: Synthetic oligonucleotide
acucaagugccuucaugua

SEQ ID NO: 2488781 - RNA, 19 nt, Artificial Sequence
  Description of Artificial Sequence: Synthetic oligonucleotide
accccuucauggaucuggc

SEQ ID NO: 2488782 - RNA, 19 nt, Artificial Sequence
  Description of Artificial Sequence: Synthetic oligonucleotide
uggugcacuuguccauugu

SEQ ID NO: 2488783 - RNA, 19 nt, Artificial Sequence
  Description of Artificial Sequence: Synthetic oligonucleotide
aguauggggagagggcaca

SEQ ID NO: 2488784 - RNA, 19 nt, Artificial Sequence
  Description of Artificial Sequence: Synthetic oligonucleotide
accgccaacgucacccacg

SEQ ID NO: 2488785 - RNA, 19 nt, Artificial Sequence
  Description of Artificial Sequence: Synthetic oligonucleotide
ucaccggcauccgcaauca

SEQ ID NO: 2488786 - RNA, 19 nt, Artificial Sequence
  Description of Artificial Sequence: Synthetic oligonucleotide
aucccagucgcugaagcaa

SEQ ID NO: 2488787 - RNA, 19 nt, Artificial Sequence
  Description of Artificial Sequence: Synthetic oligonucleotide
ggccuggugagcuuccacc

SEQ ID NO: 2488788 - RNA, 19 nt, Artificial Sequence
  Description of Artificial Sequence: Synthetic oligonucleotide
gauaugagcacaggguuuu

SEQ ID NO: 2488789 - RNA, 19 nt, Artificial Sequence
  Description of Artificial Sequence: Synthetic oligonucleotide
cugcugggcaccgccaacg

SEQ ID NO: 2488790 - RNA, 19 nt, Artificial Sequence
  Description of Artificial Sequence: Synthetic oligonucleotide
agccuccgcaagguugucc

SEQ ID NO: 2488791 - RNA, 19 nt, Artificial Sequence
  Description of Artificial Sequence: Synthetic oligonucleotide
acccacgaugucaucgccg

SEQ ID NO: 2488792 - RNA, 19 nt, Artificial Sequence
  Description of Artificial Sequence: Synthetic oligonucleotide
ucugagcggaccccuucau

SEQ ID NO: 2488793 - RNA, 19 nt, Artificial Sequence
  Description of Artificial Sequence: Synthetic oligonucleotide
gucaccucuucuucugaga

SEQ ID NO: 2488794 - RNA, 19 nt, Artificial Sequence
  Description of Artificial Sequence: Synthetic oligonucleotide
caccucuucuucugagaug

SEQ ID NO: 2488795 - RNA, 19 nt, Artificial Sequence
  Description of Artificial Sequence: Synthetic oligonucleotide
uccgguccgcaccugcagu

SEQ ID NO: 2488796 - RNA, 19 nt, Artificial Sequence
  Description of Artificial Sequence: Synthetic oligonucleotide
uggggccuggcaguauggg

SEQ ID NO: 2488797 - RNA, 19 nt, Artificial Sequence
  Description of Artificial Sequence: Synthetic oligonucleotide
auaugagcacaggguuuuc

SEQ ID NO: 2488798 - RNA, 19 nt, Artificial Sequence
  Description of Artificial Sequence: Synthetic oligonucleotide
caucaggccagaggucucc

SEQ ID NO: 2488799 - RNA, 19 nt, Artificial Sequence
  Description of Artificial Sequence: Synthetic oligonucleotide
ggccugaacuuuccggucc

SEQ ID NO: 2488800 - RNA, 19 nt, Artificial Sequence
  Description of Artificial Sequence: Synthetic oligonucleotide
cuggagcaggagcagucac

SEQ ID NO: 2488801 - RNA, 19 nt, Artificial Sequence
  Description of Artificial Sequence: Synthetic oligonucleotide
ggugcacuuguccauuguc

SEQ ID NO: 2488802 - RNA, 19 nt, Artificial Sequence
  Description of Artificial Sequence: Synthetic oligonucleotide
uggacaugucaaugucauc

SEQ ID NO: 2488803 - RNA, 19 nt, Artificial Sequence
  Description of Artificial Sequence: Synthetic oligonucleotide
augggcacgggguggugca

SEQ ID NO: 2488804 - RNA, 19 nt, Artificial Sequence
  Description of Artificial Sequence: Synthetic oligonucleotide
ccuucauguagccuccaac

SEQ ID NO: 2488805 - RNA, 19 nt, Artificial Sequence
  Description of Artificial Sequence: Synthetic oligonucleotide
aagugccuucauguagccu

SEQ ID NO: 2488806 - RNA, 19 nt, Artificial Sequence
  Description of Artificial Sequence: Synthetic oligonucleotide
agccucaauaccacaggca

SEQ ID NO: 2488807 - RNA, 19 nt, Artificial Sequence
  Description of Artificial Sequence: Synthetic oligonucleotide
cccagugauaugagcacag

SEQ ID NO: 2488808 - RNA, 19 nt, Artificial Sequence
  Description of Artificial Sequence: Synthetic oligonucleotide
acagccuccgcaagguugu

SEQ ID NO: 2488809 - RNA, 19 nt, Artificial Sequence
  Description of Artificial Sequence: Synthetic oligonucleotide
caaaucccagucgcugaag

SEQ ID NO: 2488810 - RNA, 19 nt, Artificial Sequence
  Description of Artificial Sequence: Synthetic oligonucleotide
guggccgaagaccucgcuc

SEQ ID NO: 2488811 - RNA, 19 nt, Artificial Sequence
  Description of Artificial Sequence: Synthetic oligonucleotide
cugagcggaccccuucaug

SEQ ID NO: 2488812 - RNA, 19 nt, Artificial Sequence
  Description of Artificial Sequence: Synthetic oligonucleotide
uauggcccgcagugcagac

SEQ ID NO: 2488813 - RNA, 19 nt, Artificial Sequence
  Description of Artificial Sequence: Synthetic oligonucleotide
cacauacccgucagccuuc

SEQ ID NO: 2488814 - RNA, 19 nt, Artificial Sequence
  Description of Artificial Sequence: Synthetic oligonucleotide
gcauccgcaaucacaacac

SEQ ID NO: 2488815 - RNA, 19 nt, Artificial Sequence
  Description of Artificial Sequence: Synthetic oligonucleotide
acccgucagccuucacuuc

SEQ ID NO: 2488816 - RNA, 19 nt, Artificial Sequence
  Description of Artificial Sequence: Synthetic oligonucleotide
guggugcacuuguccauug

SEQ ID NO: 2488817 - RNA, 19 nt, Artificial Sequence
  Description of Artificial Sequence: Synthetic oligonucleotide
aggaucuggcagguggcug

SEQ ID NO: 2488818 - RNA, 19 nt, Artificial Sequence
  Description of Artificial Sequence: Synthetic oligonucleotide
ugcugggcaccgccaacgu

SEQ ID NO: 2488819 - RNA, 19 nt, Artificial Sequence
  Description of Artificial Sequence: Synthetic oligonucleotide
uauggggagagggcacagu

SEQ ID NO: 2488820 - RNA, 19 nt, Artificial Sequence
  Description of Artificial Sequence: Synthetic oligonucleotide
aucucaccuucaaugggga

SEQ ID NO: 2488821 - RNA, 19 nt, Artificial Sequence
  Description of Artificial Sequence: Synthetic oligonucleotide
cagcuccaugagcacuugg

SEQ ID NO: 2488822 - RNA, 19 nt, Artificial Sequence
  Description of Artificial Sequence: Synthetic oligonucleotide
ugggacucauugguacaga

SEQ ID NO: 2488823 - RNA, 19 nt, Artificial Sequence
  Description of Artificial Sequence: Synthetic oligonucleotide
uccuuguaguagcgucccu

SEQ ID NO: 2488824 - RNA, 19 nt, Artificial Sequence
  Description of Artificial Sequence: Synthetic oligonucleotide
gccugaacuuuccgguccg

SEQ ID NO: 2488825 - RNA, 19 nt, Artificial Sequence
  Description of Artificial Sequence: Synthetic oligonucleotide
uggccuggugagcuuccac

SEQ ID NO: 2488826 - RNA, 19 nt, Artificial Sequence
  Description of Artificial Sequence: Synthetic oligonucleotide
agcggaccccuucauggau

SEQ ID NO: 2488827 - RNA, 19 nt, Artificial Sequence
  Description of Artificial Sequence: Synthetic oligonucleotide
gucccuuucccagugauau

SEQ ID NO: 2488828 - RNA, 19 nt, Artificial Sequence
  Description of Artificial Sequence: Synthetic oligonucleotide
cacccacgaugucaucgcc

SEQ ID NO: 2488829 - RNA, 19 nt, Artificial Sequence
  Description of Artificial Sequence: Synthetic oligonucleotide
augucaaaucccagucgcu

SEQ ID NO: 2488830 - RNA, 19 nt, Artificial Sequence
  Description of Artificial Sequence: Synthetic oligonucleotide
ggcacagugguggaaagaa

SEQ ID NO: 2488831 - RNA, 19 nt, Artificial Sequence
  Description of Artificial Sequence: Synthetic oligonucleotide
gcaagguuguccacauacc

SEQ ID NO: 2488832 - RNA, 19 nt, Artificial Sequence
  Description of Artificial Sequence: Synthetic oligonucleotide
gagcggaccccuucaugga

SEQ ID NO: 2488833 - RNA, 19 nt, Artificial Sequence
  Description of Artificial Sequence: Synthetic oligonucleotide
ugcucaucacuaggccuga

SEQ ID NO: 2488834 - RNA, 19 nt, Artificial Sequence
  Description of Artificial Sequence: Synthetic oligonucleotide
cucaccuucaauggggacu

SEQ ID NO: 2488835 - RNA, 19 nt, Artificial Sequence
  Description of Artificial Sequence: Synthetic oligonucleotide
gcaguauggggagagggca

SEQ ID NO: 2488836 - RNA, 19 nt, Artificial Sequence
  Description of Artificial Sequence: Synthetic oligonucleotide
caccagcucucuucggguc

SEQ ID NO: 2488837 - RNA, 19 nt, Artificial Sequence
  Description of Artificial Sequence: Synthetic oligonucleotide
gggguggugcacuugucca

SEQ ID NO: 2488838 - RNA, 19 nt, Artificial Sequence
  Description of Artificial Sequence: Synthetic oligonucleotide
ggcauacucaagugccuuc

SEQ ID NO: 2488839 - RNA, 19 nt, Artificial Sequence
  Description of Artificial Sequence: Synthetic oligonucleotide
ugucaucgccgaucaugau

SEQ ID NO: 2488840 - RNA, 19 nt, Artificial Sequence
  Description of Artificial Sequence: Synthetic oligonucleotide
ggaagguuuccccaccacu

SEQ ID NO: 2488841 - RNA, 19 nt, Artificial Sequence
  Description of Artificial Sequence: Synthetic oligonucleotide
cauccgcaaucacaacaca

SEQ ID NO: 2488842 - RNA, 19 nt, Artificial Sequence
  Description of Artificial Sequence: Synthetic oligonucleotide
ggccuggcaguauggggag

SEQ ID NO: 2488843 - RNA, 19 nt, Artificial Sequence
  Description of Artificial Sequence: Synthetic oligonucleotide
cucuguucauguucuuaua

SEQ ID NO: 2488844 - RNA, 19 nt, Artificial Sequence
  Description of Artificial Sequence: Synthetic oligonucleotide
cuucugggacucauuggua

SEQ ID NO: 2488845 - RNA, 19 nt, Artificial Sequence
  Description of Artificial Sequence: Synthetic oligonucleotide
aggcauacucaagugccuu

SEQ ID NO: 2488846 - RNA, 19 nt, Artificial Sequence
  Description of Artificial Sequence: Synthetic oligonucleotide
gggacucauugguacagaa

SEQ ID NO: 2488847 - RNA, 19 nt, Artificial Sequence
  Description of Artificial Sequence: Synthetic oligonucleotide
aguuuggguuggacauguc

SEQ ID NO: 2488848 - RNA, 19 nt, Artificial Sequence
  Description of Artificial Sequence: Synthetic oligonucleotide
gcauacucaagugccuuca

SEQ ID NO: 2488849 - RNA, 19 nt, Artificial Sequence
  Description of Artificial Sequence: Synthetic oligonucleotide
ccagugauaugagcacagg

SEQ ID NO: 2488850 - RNA, 19 nt, Artificial Sequence
  Description of Artificial Sequence: Synthetic oligonucleotide
acgucacccacgaugucau

SEQ ID NO: 2488851 - RNA, 19 nt, Artificial Sequence
  Description of Artificial Sequence: Synthetic oligonucleotide
agcaugggcacgggguggu

SEQ ID NO: 2488852 - RNA, 19 nt, Artificial Sequence
  Description of Artificial Sequence: Synthetic oligonucleotide
gccuccgcaagguugucca

SEQ ID NO: 2488853 - RNA, 19 nt, Artificial Sequence
  Description of Artificial Sequence: Synthetic oligonucleotide
ccuggcaguauggggagag

SEQ ID NO: 2488854 - RNA, 19 nt, Artificial Sequence
  Description of Artificial Sequence: Synthetic oligonucleotide
caucgccgaucaugauggc

SEQ ID NO: 2488855 - RNA, 19 nt, Artificial Sequence
  Description of Artificial Sequence: Synthetic oligonucleotide
caucacuaggccugaacuu

SEQ ID NO: 2488856 - RNA, 19 nt, Artificial Sequence
  Description of Artificial Sequence: Synthetic oligonucleotide
guagcgucccuuucccagu

SEQ ID NO: 2488857 - RNA, 19 nt, Artificial Sequence
  Description of Artificial Sequence: Synthetic oligonucleotide
gugcagacuugaagaacuc

SEQ ID NO: 2488858 - RNA, 19 nt, Artificial Sequence
  Description of Artificial Sequence: Synthetic oligonucleotide
ggggacugcuucagucucg

SEQ ID NO: 2488859 - RNA, 19 nt, Artificial Sequence
  Description of Artificial Sequence: Synthetic oligonucleotide
ccuggugagcuuccacccc

SEQ ID NO: 2488860 - RNA, 19 nt, Artificial Sequence
  Description of Artificial Sequence: Synthetic oligonucleotide
ggagcagucaccucuucuu

SEQ ID NO: 2488861 - RNA, 19 nt, Artificial Sequence
  Description of Artificial Sequence: Synthetic oligonucleotide
gggaagguuuccccaccac

SEQ ID NO: 2488862 - RNA, 19 nt, Artificial Sequence
  Description of Artificial Sequence: Synthetic oligonucleotide
cuauggcccgcagugcaga

SEQ ID NO: 2488863 - RNA, 19 nt, Artificial Sequence
  Description of Artificial Sequence: Synthetic oligonucleotide
ucuggcagguguggccgaa

SEQ ID NO: 2488864 - RNA, 19 nt, Artificial Sequence
  Description of Artificial Sequence: Synthetic oligonucleotide
ccaacgucacccacgaugu

SEQ ID NO: 2488865 - RNA, 19 nt, Artificial Sequence
  Description of Artificial Sequence: Synthetic oligonucleotide
agcgucccuuucccaguga

SEQ ID NO: 2488866 - RNA, 19 nt, Artificial Sequence
  Description of Artificial Sequence: Synthetic oligonucleotide
cccacgaugucaucgccga

SEQ ID NO: 2488867 - RNA, 19 nt, Artificial Sequence
  Description of Artificial Sequence: Synthetic oligonucleotide
ggagcaggagcagucaccu

SEQ ID NO: 2488868 - RNA, 19 nt, Artificial Sequence
  Description of Artificial Sequence: Synthetic oligonucleotide
caguuuggguuggacaugu

SEQ ID NO: 2488869 - RNA, 19 nt, Artificial Sequence
  Description of Artificial Sequence: Synthetic oligonucleotide
caggcauacucaagugccu

SEQ ID NO: 2488870 - RNA, 19 nt, Artificial Sequence
  Description of Artificial Sequence: Synthetic oligonucleotide
ugccuucauguagccucca

SEQ ID NO: 2488871 - RNA, 19 nt, Artificial Sequence
  Description of Artificial Sequence: Synthetic oligonucleotide
cccagucgcugaagcaacc

SEQ ID NO: 2488872 - RNA, 19 nt, Artificial Sequence
  Description of Artificial Sequence: Synthetic oligonucleotide
caacgucacccacgauguc

SEQ ID NO: 2488873 - RNA, 19 nt, Artificial Sequence
  Description of Artificial Sequence: Synthetic oligonucleotide
cauacccgucagccuucac

SEQ ID NO: 2488874 - RNA, 19 nt, Artificial Sequence
  Description of Artificial Sequence: Synthetic oligonucleotide
cuucauggaucuggcaggu

SEQ ID NO: 2488875 - RNA, 19 nt, Artificial Sequence
  Description of Artificial Sequence: Synthetic oligonucleotide
cuggcagguguggccgaag

SEQ ID NO: 2488876 - RNA, 19 nt, Artificial Sequence
  Description of Artificial Sequence: Synthetic oligonucleotide
caccgccaacgucacccac

SEQ ID NO: 2488877 - RNA, 19 nt, Artificial Sequence
  Description of Artificial Sequence: Synthetic oligonucleotide
cacgggguggugcacuugu

SEQ ID NO: 2488878 - RNA, 19 nt, Artificial Sequence
  Description of Artificial Sequence: Synthetic oligonucleotide
ccuucacuucuggaugaug

SEQ ID NO: 2488879 - RNA, 19 nt, Artificial Sequence
  Description of Artificial Sequence: Synthetic oligonucleotide
cauacucaagugccuucau

SEQ ID NO: 2488880 - RNA, 19 nt, Artificial Sequence
  Description of Artificial Sequence: Synthetic oligonucleotide
ccauugucucugaagggcu

SEQ ID NO: 2488881 - RNA, 19 nt, Artificial Sequence
  Description of Artificial Sequence: Synthetic oligonucleotide
ggacugcuucagucucgcc

SEQ ID NO: 2488882 - RNA, 19 nt, Artificial Sequence
  Description of Artificial Sequence: Synthetic oligonucleotide
cgucagccuucacuucugg

SEQ ID NO: 2488883 - RNA, 19 nt, Artificial Sequence
  Description of Artificial Sequence: Synthetic oligonucleotide
caccggcauccgcaaucac

SEQ ID NO: 2488884 - RNA, 19 nt, Artificial Sequence
  Description of Artificial Sequence: Synthetic oligonucleotide
gaccucgcuccuucaggau

SEQ ID NO: 2488885 - RNA, 19 nt, Artificial Sequence
  Description of Artificial Sequence: Synthetic oligonucleotide
ugggcacgggguggugcac

SEQ ID NO: 2488886 - RNA, 19 nt, Artificial Sequence
  Description of Artificial Sequence: Synthetic oligonucleotide
gguuguccacauacccguc

SEQ ID NO: 2488887 - RNA, 19 nt, Artificial Sequence
  Description of Artificial Sequence: Synthetic oligonucleotide
ccucaauaccacaggcaua

SEQ ID NO: 2488888 - RNA, 19 nt, Artificial Sequence
  Description of Artificial Sequence: Synthetic oligonucleotide
caauggggacugcuucagu

SEQ ID NO: 2488889 - RNA, 19 nt, Artificial Sequence
  Description of Artificial Sequence: Synthetic oligonucleotide
ggacucauugguacagaau

SEQ ID NO: 2488890 - RNA, 19 nt, Artificial Sequence
  Description of Artificial Sequence: Synthetic oligonucleotide
gccuucauguagccuccaa

SEQ ID NO: 2488891 - RNA, 19 nt, Artificial Sequence
  Description of Artificial Sequence: Synthetic oligonucleotide
ccacauacccgucagccuu

SEQ ID NO: 2488892 - RNA, 19 nt, Artificial Sequence
  Description of Artificial Sequence: Synthetic oligonucleotide
gcggaccccuucauggauc

SEQ ID NO: 2488893 - RNA, 19 nt, Artificial Sequence
  Description of Artificial Sequence: Synthetic oligonucleotide
ccgccaacgucacccacga

SEQ ID NO: 2488894 - RNA, 19 nt, Artificial Sequence
  Description of Artificial Sequence: Synthetic oligonucleotide
ccuccgcaagguuguccac

SEQ ID NO: 2488895 - RNA, 19 nt, Artificial Sequence
  Description of Artificial Sequence: Synthetic oligonucleotide
ggguggugcacuuguccau

SEQ ID NO: 2488896 - RNA, 19 nt, Artificial Sequence
  Description of Artificial Sequence: Synthetic oligonucleotide
gguccgcaccugcagugcu

SEQ ID NO: 2488897 - RNA, 19 nt, Artificial Sequence
  Description of Artificial Sequence: Synthetic oligonucleotide
gcaccugcagugcucucau

SEQ ID NO: 2488898 - RNA, 19 nt, Artificial Sequence
  Description of Artificial Sequence: Synthetic oligonucleotide
cagcucucuucgggucuuc

SEQ ID NO: 2488899 - RNA, 19 nt, Artificial Sequence
  Description of Artificial Sequence: Synthetic oligonucleotide
ccgcaaucacaacacaguu

SEQ ID NO: 2488900 - RNA, 19 nt, Artificial Sequence
  Description of Artificial Sequence: Synthetic oligonucleotide
ccagcuccaugagcacuug

SEQ ID NO: 2488901 - RNA, 19 nt, Artificial Sequence
  Description of Artificial Sequence: Synthetic oligonucleotide
cgccgaucaugauggccug

SEQ ID NO: 2488902 - RNA, 19 nt, Artificial Sequence
  Description of Artificial Sequence: Synthetic oligonucleotide
gcgucccuuucccagugau

SEQ ID NO: 2488903 - RNA, 19 nt, Artificial Sequence
  Description of Artificial Sequence: Synthetic oligonucleotide
ggugagcuuccaccccuau

SEQ ID NO: 2488904 - RNA, 19 nt, Artificial Sequence
  Description of Artificial Sequence: Synthetic oligonucleotide
cuucaccggcauccgcaau

SEQ ID NO: 2488905 - RNA, 19 nt, Artificial Sequence
  Description of Artificial Sequence: Synthetic oligonucleotide
cgcaaucacaacacaguuu

SEQ ID NO: 2488906 - RNA, 19 nt, Artificial Sequence
  Description of Artificial Sequence: Synthetic oligonucleotide
ccccuucauggaucuggca

SEQ ID NO: 2488907 - RNA, 19 nt, Artificial Sequence
  Description of Artificial Sequence: Synthetic oligonucleotide
ccuuguaguagcgucccuu

SEQ ID NO: 2488908 - RNA, 19 nt, Artificial Sequence
  Description of Artificial Sequence: Synthetic oligonucleotide
cagccuccgcaagguuguc

SEQ ID NO: 2488909 - RNA, 19 nt, Artificial Sequence
  Description of Artificial Sequence: Synthetic oligonucleotide
gcacgggguggugcacuug

SEQ ID NO: 2488910 - RNA, 19 nt, Artificial Sequence
  Description of Artificial Sequence: Synthetic oligonucleotide
ggccgaagaccucgcuccu

SEQ ID NO: 2488911 - RNA, 19 nt, Artificial Sequence
  Description of Artificial Sequence: Synthetic oligonucleotide
cgguccgcaccugcagugc

SEQ ID NO: 2488912 - RNA, 19 nt, Artificial Sequence
  Description of Artificial Sequence: Synthetic oligonucleotide
ggcccgcagugcagacuug

SEQ ID NO: 2488913 - RNA, 19 nt, Artificial Sequence
  Description of Artificial Sequence: Synthetic oligonucleotide
cgucccuuucccagugaua

SEQ ID NO: 2488914 - RNA, 19 nt, Artificial Sequence
  Description of Artificial Sequence: Synthetic oligonucleotide
ggcacgggguggugcacuu

SEQ ID NO: 2488915 - RNA, 19 nt, Artificial Sequence
  Description of Artificial Sequence: Synthetic oligonucleotide
gcucaucacuaggccugaa

SEQ ID NO: 2488916 - RNA, 19 nt, Artificial Sequence
  Description of Artificial Sequence: Synthetic oligonucleotide
cgucacccacgaugucauc

SEQ ID NO: 2488917 - RNA, 19 nt, Artificial Sequence
  Description of Artificial Sequence: Synthetic oligonucleotide
cggaccccuucauggaucu

SEQ ID NO: 2488918 - RNA, 19 nt, Artificial Sequence
  Description of Artificial Sequence: Synthetic oligonucleotide
gcaaccccaccagcucucu

SEQ ID NO: 2488919 - RNA, 19 nt, Artificial Sequence
  Description of Artificial Sequence: Synthetic oligonucleotide
gggcacgggguggugcacu

SEQ ID NO: 2488920 - RNA, 19 nt, Artificial Sequence
  Description of Artificial Sequence: Synthetic oligonucleotide
caccugcagugcucucauu

SEQ ID NO: 2488921 - RNA, 19 nt, Artificial Sequence
  Description of Artificial Sequence: Synthetic oligonucleotide
ccgcaagguuguccacaua

SEQ ID NO: 2488922 - RNA, 19 nt, Artificial Sequence
  Description of Artificial Sequence: Synthetic oligonucleotide
gccgaagaccucgcuccuu

SEQ ID NO: 2488923 - RNA, 19 nt, Artificial Sequence
  Description of Artificial Sequence: Synthetic oligonucleotide
ccacgaugucaucgccgau

SEQ ID NO: 2488924 - RNA, 19 nt, Artificial Sequence
  Description of Artificial Sequence: Synthetic oligonucleotide
ccaccacuucagccucaau

SEQ ID NO: 2488925 - RNA, 19 nt, Artificial Sequence
  Description of Artificial Sequence: Synthetic oligonucleotide
cgaugucaucgccgaucau

SEQ ID NO: 2488926 - RNA, 19 nt, Artificial Sequence
  Description of Artificial Sequence: Synthetic oligonucleotide
cgccaacgucacccacgau

SEQ ID NO: 2488927 - RNA, 19 nt, Artificial Sequence
  Description of Artificial Sequence: Synthetic oligonucleotide
aacacgagaaagcaaaucc

SEQ ID NO: 2488928 - RNA, 19 nt, Artificial Sequence
  Description of Artificial Sequence: Synthetic oligonucleotide
uuugaaacaauucaguuca

SEQ ID NO: 2488929 - RNA, 19 nt, Artificial Sequence
  Description of Artificial Sequence: Synthetic oligonucleotide
guuccuagaacuuuuagcg

SEQ ID NO: 2488930 - RNA, 19 nt, Artificial Sequence
  Description of Artificial Sequence: Synthetic oligonucleotide
agaaaauagaauaauuccc

SEQ ID NO: 2488931 - RNA, 19 nt, Artificial Sequence
  Description of Artificial Sequence: Synthetic oligonucleotide
aaacaauucaguucaucac

SEQ ID NO: 2488932 - RNA, 19 nt, Artificial Sequence
  Description of Artificial Sequence: Synthetic oligonucleotide
auauaggugguuuaaacuc

SEQ ID NO: 2488933 - RNA, 19 nt, Artificial Sequence
  Description of Artificial Sequence: Synthetic oligonucleotide
ugauuggcggagaagaucg

SEQ ID NO: 2488934 - RNA, 19 nt, Artificial Sequence
  Description of Artificial Sequence: Synthetic oligonucleotide
agaagaucgacaauaaagc

SEQ ID NO: 2488935 - RNA, 19 nt, Artificial Sequence
  Description of Artificial Sequence: Synthetic oligonucleotide
uagaauaauucccugaaac

SEQ ID NO: 2488936 - RNA, 19 nt, Artificial Sequence
  Description of Artificial Sequence: Synthetic oligonucleotide
aauagaauaauucccugaa

SEQ ID NO: 2488937 - RNA, 19 nt, Artificial Sequence
  Description of Artificial Sequence: Synthetic oligonucleotide
aacaauucaguucaucaca

SEQ ID NO: 2488938 - RNA, 19 nt, Artificial Sequence
  Description of Artificial Sequence: Synthetic oligonucleotide
ucacagaggaacaaaagca

SEQ ID NO: 2488939 - RNA, 19 nt, Artificial Sequence
  Description of Artificial Sequence: Synthetic oligonucleotide
uuguaauccaucugggugg

SEQ ID NO: 2488940 - RNA, 19 nt, Artificial Sequence
  Description of Artificial Sequence: Synthetic oligonucleotide
aaauagaauaauucccuga

SEQ ID NO: 2488941 - RNA, 19 nt, Artificial Sequence
  Description of Artificial Sequence: Synthetic oligonucleotide
gaagaucgacaauaaagcg

SEQ ID NO: 2488942 - RNA, 19 nt, Artificial Sequence
  Description of Artificial Sequence: Synthetic oligonucleotide
uguuccagcaugauuggcg

SEQ ID NO: 2488943 - RNA, 19 nt, Artificial Sequence
  Description of Artificial Sequence: Synthetic oligonucleotide
aaaagcaggugcugaaccg

SEQ ID NO: 2488944 - RNA, 19 nt, Artificial Sequence
  Description of Artificial Sequence: Synthetic oligonucleotide
aagaucgacaauaaagcgg

SEQ ID NO: 2488945 - RNA, 19 nt, Artificial Sequence
  Description of Artificial Sequence: Synthetic oligonucleotide
ugugccuaagucuugaaca

SEQ ID NO: 2488946 - RNA, 19 nt, Artificial Sequence
  Description of Artificial Sequence: Synthetic oligonucleotide
aauaaagcggggauagucg

SEQ ID NO: 2488947 - RNA, 19 nt, Artificial Sequence
  Description of Artificial Sequence: Synthetic oligonucleotide
ugguuuugaaacaauucag

SEQ ID NO: 2488948 - RNA, 19 nt, Artificial Sequence
  Description of Artificial Sequence: Synthetic oligonucleotide
aauaauucccugaaacauc

SEQ ID NO: 2488949 - RNA, 19 nt, Artificial Sequence
  Description of Artificial Sequence: Synthetic oligonucleotide
ucagcaaacacgagaaagc

SEQ ID NO: 2488950 - RNA, 19 nt, Artificial Sequence
  Description of Artificial Sequence: Synthetic oligonucleotide
uaaggaauaugguuuucgg

SEQ ID NO: 2488951 - RNA, 19 nt, Artificial Sequence
  Description of Artificial Sequence: Synthetic oligonucleotide
uuuagcaugucucuuaauu

SEQ ID NO: 2488952 - RNA, 19 nt, Artificial Sequence
  Description of Artificial Sequence: Synthetic oligonucleotide
uuaaggaauaugguuuucg

SEQ ID NO: 2488953 - RNA, 19 nt, Artificial Sequence
  Description of Artificial Sequence: Synthetic oligonucleotide
gaauauaggugguuuaaac

SEQ ID NO: 2488954 - RNA, 19 nt, Artificial Sequence
  Description of Artificial Sequence: Synthetic oligonucleotide
agaucgacaauaaagcggg

SEQ ID NO: 2488955 - RNA, 19 nt, Artificial Sequence
  Description of Artificial Sequence: Synthetic oligonucleotide
agauguuccagcaugauug

SEQ ID NO: 2488956 - RNA, 19 nt, Artificial Sequence
  Description of Artificial Sequence: Synthetic oligonucleotide
cuuguaauccaucugggug

SEQ ID NO: 2488957 - RNA, 19 nt, Artificial Sequence
  Description of Artificial Sequence: Synthetic oligonucleotide
ugcuguuaagaauauaggu

SEQ ID NO: 2488958 - RNA, 19 nt, Artificial Sequence
  Description of Artificial Sequence: Synthetic oligonucleotide
acuauguagacaguccacc

SEQ ID NO: 2488959 - RNA, 19 nt, Artificial Sequence
  Description of Artificial Sequence: Synthetic oligonucleotide
ggauagucgauucuuaagg

SEQ ID NO: 2488960 - RNA, 19 nt, Artificial Sequence
  Description of Artificial Sequence: Synthetic oligonucleotide
ucuugaacagguaaccacu

SEQ ID NO: 2488961 - RNA, 19 nt, Artificial Sequence
  Description of Artificial Sequence: Synthetic oligonucleotide
aauaugguuuucggggagc

SEQ ID NO: 2488962 - RNA, 19 nt, Artificial Sequence
  Description of Artificial Sequence: Synthetic oligonucleotide
uuuucggggagcgacaccg

SEQ ID NO: 2488963 - RNA, 19 nt, Artificial Sequence
  Description of Artificial Sequence: Synthetic oligonucleotide
aagcggaugucuccgacgg

SEQ ID NO: 2488964 - RNA, 19 nt, Artificial Sequence
  Description of Artificial Sequence: Synthetic oligonucleotide
agaauaauucccugaaaca

SEQ ID NO: 2488965 - RNA, 19 nt, Artificial Sequence
  Description of Artificial Sequence: Synthetic oligonucleotide
agaacuuuuagcgcacugc

SEQ ID NO: 2488966 - RNA, 19 nt, Artificial Sequence
  Description of Artificial Sequence: Synthetic oligonucleotide
agcaaauccggccauaacu

SEQ ID NO: 2488967 - RNA, 19 nt, Artificial Sequence
  Description of Artificial Sequence: Synthetic oligonucleotide
gccauaacuauguagacag

SEQ ID NO: 2488968 - RNA, 19 nt, Artificial Sequence
  Description of Artificial Sequence: Synthetic oligonucleotide
uaagucuugaacagguaac

SEQ ID NO: 2488969 - RNA, 19 nt, Artificial Sequence
  Description of Artificial Sequence: Synthetic oligonucleotide
uccuagaacuuuuagcgca

SEQ ID NO: 2488970 - RNA, 19 nt, Artificial Sequence
  Description of Artificial Sequence: Synthetic oligonucleotide
agcgacaccgaacguagcc

SEQ ID NO: 2488971 - RNA, 19 nt, Artificial Sequence
  Description of Artificial Sequence: Synthetic oligonucleotide
aaacacgagaaagcaaauc

SEQ ID NO: 2488972 - RNA, 19 nt, Artificial Sequence
  Description of Artificial Sequence: Synthetic oligonucleotide
cacgagaaagcaaauccgg

SEQ ID NO: 2488973 - RNA, 19 nt, Artificial Sequence
  Description of Artificial Sequence: Synthetic oligonucleotide
guggaaaucacuugcgggc

SEQ ID NO: 2488974 - RNA, 19 nt, Artificial Sequence
  Description of Artificial Sequence: Synthetic oligonucleotide
auucuuaaggaauaugguu

SEQ ID NO: 2488975 - RNA, 19 nt, Artificial Sequence
  Description of Artificial Sequence: Synthetic oligonucleotide
aaccgugaaagcuccgauc

SEQ ID NO: 2488976 - RNA, 19 nt, Artificial Sequence
  Description of Artificial Sequence: Synthetic oligonucleotide
ggaagugucagcaaacacg

SEQ ID NO: 2488977 - RNA, 19 nt, Artificial Sequence
  Description of Artificial Sequence: Synthetic oligonucleotide
aguccacccaaacuguaac

SEQ ID NO: 2488978 - RNA, 19 nt, Artificial Sequence
  Description of Artificial Sequence: Synthetic oligonucleotide
auagcgacggccuuucuca

SEQ ID NO: 2488979 - RNA, 19 nt, Artificial Sequence
  Description of Artificial Sequence: Synthetic oligonucleotide
ggagguacgucccuaaagg

SEQ ID NO: 2488980 - RNA, 19 nt, Artificial Sequence
  Description of Artificial Sequence: Synthetic oligonucleotide
aggugguuuaaacucaugu

SEQ ID NO: 2488981 - RNA, 19 nt, Artificial Sequence
  Description of Artificial Sequence: Synthetic oligonucleotide
aacuauguagacaguccac

SEQ ID NO: 2488982 - RNA, 19 nt, Artificial Sequence
  Description of Artificial Sequence: Synthetic oligonucleotide
gauguuccagcaugauugg

SEQ ID NO: 2488983 - RNA, 19 nt, Artificial Sequence
  Description of Artificial Sequence: Synthetic oligonucleotide
uagucgauucuuaaggaau

SEQ ID NO: 2488984 - RNA, 19 nt, Artificial Sequence
  Description of Artificial Sequence: Synthetic oligonucleotide
uucagcuagcuucugcccc

SEQ ID NO: 2488985 - RNA, 19 nt, Artificial Sequence
  Description of Artificial Sequence: Synthetic oligonucleotide
acuauugcagaaaauagaa

SEQ ID NO: 2488986 - RNA, 19 nt, Artificial Sequence
  Description of Artificial Sequence: Synthetic oligonucleotide
cucucgaggacugaggccg

SEQ ID NO: 2488987 - RNA, 19 nt, Artificial Sequence
  Description of Artificial Sequence: Synthetic oligonucleotide
gauagucgauucuuaagga

SEQ ID NO: 2488988 - RNA, 19 nt, Artificial Sequence
  Description of Artificial Sequence: Synthetic oligonucleotide
aagcaaauccggccauaac

SEQ ID NO: 2488989 - RNA, 19 nt, Artificial Sequence
  Description of Artificial Sequence: Synthetic oligonucleotide
guuccagcaugauuggcgg

SEQ ID NO: 2488990 - RNA, 19 nt, Artificial Sequence
  Description of Artificial Sequence: Synthetic oligonucleotide
guaacuauugcagaaaaua

SEQ ID NO: 2488991 - RNA, 19 nt, Artificial Sequence
  Description of Artificial Sequence: Synthetic oligonucleotide
gaagugucagcaaacacga

SEQ ID NO: 2488992 - RNA, 19 nt, Artificial Sequence
  Description of Artificial Sequence: Synthetic oligonucleotide
uuaagaauauaggugguuu

SEQ ID NO: 2488993 - RNA, 19 nt, Artificial Sequence
  Description of Artificial Sequence: Synthetic oligonucleotide
ucgacaauaaagcggggau

SEQ ID NO: 2488994 - RNA, 19 nt, Artificial Sequence
  Description of Artificial Sequence: Synthetic oligonucleotide
cgauucuuaaggaauaugg

SEQ ID NO: 2488995 - RNA, 19 nt, Artificial Sequence
  Description of Artificial Sequence: Synthetic oligonucleotide
uuuaacggccgccggcacg

SEQ ID NO: 2488996 - RNA, 19 nt, Artificial Sequence
  Description of Artificial Sequence: Synthetic oligonucleotide
ugguuuaaacucauguuuu

SEQ ID NO: 2488997 - RNA, 19 nt, Artificial Sequence
  Description of Artificial Sequence: Synthetic oligonucleotide
aauccaucugggugggcag

SEQ ID NO: 2488998 - RNA, 19 nt, Artificial Sequence
  Description of Artificial Sequence: Synthetic oligonucleotide
ugugcuacuggcugcccgg

SEQ ID NO: 2488999 - RNA, 19 nt, Artificial Sequence
  Description of Artificial Sequence: Synthetic oligonucleotide
uuagcaugucucuuaauuu

SEQ ID NO: 2489000 - RNA, 19 nt, Artificial Sequence
  Description of Artificial Sequence: Synthetic oligonucleotide
augucggcgguagauaggc

SEQ ID NO: 2489001 - RNA, 19 nt, Artificial Sequence
  Description of Artificial Sequence: Synthetic oligonucleotide
augguuuucggggagcgac

SEQ ID NO: 2489002 - RNA, 19 nt, Artificial Sequence
  Description of Artificial Sequence: Synthetic oligonucleotide
ugaaacaucuguucagcua

SEQ ID NO: 2489003 - RNA, 19 nt, Artificial Sequence
  Description of Artificial Sequence: Synthetic oligonucleotide
aguccgacggccguggccc

SEQ ID NO: 2489004 - RNA, 19 nt, Artificial Sequence
  Description of Artificial Sequence: Synthetic oligonucleotide
uagcgcacugcucucgagg

SEQ ID NO: 2489005 - RNA, 19 nt, Artificial Sequence
  Description of Artificial Sequence: Synthetic oligonucleotide
gcuguuaagaauauaggug

SEQ ID NO: 2489006 - RNA, 19 nt, Artificial Sequence
  Description of Artificial Sequence: Synthetic oligonucleotide
uguaacuauugcagaaaau

SEQ ID NO: 2489007 - RNA, 19 nt, Artificial Sequence
  Description of Artificial Sequence: Synthetic oligonucleotide
aauccggccauaacuaugu

SEQ ID NO: 2489008 - RNA, 19 nt, Artificial Sequence
  Description of Artificial Sequence: Synthetic oligonucleotide
uuccuagaacuuuuagcgc

SEQ ID NO: 2489009 - RNA, 19 nt, Artificial Sequence
  Description of Artificial Sequence: Synthetic oligonucleotide
uccggccauaacuauguag

SEQ ID NO: 2489010 - RNA, 19 nt, Artificial Sequence
  Description of Artificial Sequence: Synthetic oligonucleotide
acacgagaaagcaaauccg

SEQ ID NO: 2489011 - RNA, 19 nt, Artificial Sequence
  Description of Artificial Sequence: Synthetic oligonucleotide
caucgcaaaaggagguacg

SEQ ID NO: 2489012 - RNA, 19 nt, Artificial Sequence
  Description of Artificial Sequence: Synthetic oligonucleotide
auaaagcggggauagucga

SEQ ID NO: 2489013 - RNA, 19 nt, Artificial Sequence
  Description of Artificial Sequence: Synthetic oligonucleotide
acgagaaagcaaauccggc

SEQ ID NO: 2489014 - RNA, 19 nt, Artificial Sequence
  Description of Artificial Sequence: Synthetic oligonucleotide
aggugcugaaccgugaaag

SEQ ID NO: 2489015 - RNA, 19 nt, Artificial Sequence
  Description of Artificial Sequence: Synthetic oligonucleotide
uaauccaucugggugggca

SEQ ID NO: 2489016 - RNA, 19 nt, Artificial Sequence
  Description of Artificial Sequence: Synthetic oligonucleotide
acaauucaguucaucacag

SEQ ID NO: 2489017 - RNA, 19 nt, Artificial Sequence
  Description of Artificial Sequence: Synthetic oligonucleotide
gucuugaacagguaaccac

SEQ ID NO: 2489018 - RNA, 19 nt, Artificial Sequence
  Description of Artificial Sequence: Synthetic oligonucleotide
cuuggccagagcaucgugc

SEQ ID NO: 2489019 - RNA, 19 nt, Artificial Sequence
  Description of Artificial Sequence: Synthetic oligonucleotide
aaucacuugcgggcuggcc

SEQ ID NO: 2489020 - RNA, 19 nt, Artificial Sequence
  Description of Artificial Sequence: Synthetic oligonucleotide
aaacaucuguucagcuagc

SEQ ID NO: 2489021 - RNA, 19 nt, Artificial Sequence
  Description of Artificial Sequence: Synthetic oligonucleotide
acaaaagcaggugcugaac

SEQ ID NO: 2489022 - RNA, 19 nt, Artificial Sequence
  Description of Artificial Sequence: Synthetic oligonucleotide
gaaaucacuugcgggcugg

SEQ ID NO: 2489023 - RNA, 19 nt, Artificial Sequence
  Description of Artificial Sequence: Synthetic oligonucleotide
auagucgauucuuaaggaa

SEQ ID NO: 2489024 - RNA, 19 nt, Artificial Sequence
  Description of Artificial Sequence: Synthetic oligonucleotide
uagaacuuuuagcgcacug

SEQ ID NO: 2489025 - RNA, 19 nt, Artificial Sequence
  Description of Artificial Sequence: Synthetic oligonucleotide
uguaauccaucuggguggg

SEQ ID NO: 2489026 - RNA, 19 nt, Artificial Sequence
  Description of Artificial Sequence: Synthetic oligonucleotide
uuggcggagaagaucgaca

SEQ ID NO: 2489027 - RNA, 19 nt, Artificial Sequence
  Description of Artificial Sequence: Synthetic oligonucleotide
uuuuagcgcacugcucucg

SEQ ID NO: 2489028 - RNA, 19 nt, Artificial Sequence
  Description of Artificial Sequence: Synthetic oligonucleotide
ucccuaaagguuccuagaa

SEQ ID NO: 2489029 - RNA, 19 nt, Artificial Sequence
  Description of Artificial Sequence: Synthetic oligonucleotide
caauaaagcggggauaguc

SEQ ID NO: 2489030 - RNA, 19 nt, Artificial Sequence
  Description of Artificial Sequence: Synthetic oligonucleotide
ugcugaaccgugaaagcuc

SEQ ID NO: 2489031 - RNA, 19 nt, Artificial Sequence
  Description of Artificial Sequence: Synthetic oligonucleotide
aagcggggauagucgauuc

SEQ ID NO: 2489032 - RNA, 19 nt, Artificial Sequence
  Description of Artificial Sequence: Synthetic oligonucleotide
augauuggcggagaagauc

SEQ ID NO: 2489033 - RNA, 19 nt, Artificial Sequence
  Description of Artificial Sequence: Synthetic oligonucleotide
gugccuaagucuugaacag

SEQ ID NO: 2489034 - RNA, 19 nt, Artificial Sequence
  Description of Artificial Sequence: Synthetic oligonucleotide
accgaacguagccuggccg

SEQ ID NO: 2489035 - RNA, 19 nt, Artificial Sequence
  Description of Artificial Sequence: Synthetic oligonucleotide
uccagcaugauuggcggag

SEQ ID NO: 2489036 - RNA, 19 nt, Artificial Sequence
  Description of Artificial Sequence: Synthetic oligonucleotide
guagauaggccacggagga

SEQ ID NO: 2489037 - RNA, 19 nt, Artificial Sequence
  Description of Artificial Sequence: Synthetic oligonucleotide
gaaagcuccgaucaguuau

SEQ ID NO: 2489038 - RNA, 19 nt, Artificial Sequence
  Description of Artificial Sequence: Synthetic oligonucleotide
aaauccggccauaacuaug

SEQ ID NO: 2489039 - RNA, 19 nt, Artificial Sequence
  Description of Artificial Sequence: Synthetic oligonucleotide
uugucuucugugccuaagu

SEQ ID NO: 2489040 - RNA, 19 nt, Artificial Sequence
  Description of Artificial Sequence: Synthetic oligonucleotide
cuucaggggaugucggcgg

SEQ ID NO: 2489041 - RNA, 19 nt, Artificial Sequence
  Description of Artificial Sequence: Synthetic oligonucleotide
gguagauaggccacggagg

SEQ ID NO: 2489042 - RNA, 19 nt, Artificial Sequence
  Description of Artificial Sequence: Synthetic oligonucleotide
aaaggagguacgucccuaa

SEQ ID NO: 2489043 - RNA, 19 nt, Artificial Sequence
  Description of Artificial Sequence: Synthetic oligonucleotide
auaugguuuucggggagcg

SEQ ID NO: 2489044 - RNA, 19 nt, Artificial Sequence
  Description of Artificial Sequence: Synthetic oligonucleotide
cuaagucuugaacagguaa

SEQ ID NO: 2489045 - RNA, 19 nt, Artificial Sequence
  Description of Artificial Sequence: Synthetic oligonucleotide
uucucagggaggacccggg

SEQ ID NO: 2489046 - RNA, 19 nt, Artificial Sequence
  Description of Artificial Sequence: Synthetic oligonucleotide
auagaauaauucccugaaa

SEQ ID NO: 2489047 - RNA, 19 nt, Artificial Sequence
  Description of Artificial Sequence: Synthetic oligonucleotide
agaggaacaaaagcaggug

SEQ ID NO: 2489048 - RNA, 19 nt, Artificial Sequence
  Description of Artificial Sequence: Synthetic oligonucleotide
auguagacaguccacccaa

SEQ ID NO: 2489049 - RNA, 19 nt, Artificial Sequence
  Description of Artificial Sequence: Synthetic oligonucleotide
auuggcggagaagaucgac

SEQ ID NO: 2489050 - RNA, 19 nt, Artificial Sequence
  Description of Artificial Sequence: Synthetic oligonucleotide
aaaucacuugcgggcuggc

SEQ ID NO: 2489051 - RNA, 19 nt, Artificial Sequence
  Description of Artificial Sequence: Synthetic oligonucleotide
ugaaacaauucaguucauc

SEQ ID NO: 2489052 - RNA, 19 nt, Artificial Sequence
  Description of Artificial Sequence: Synthetic oligonucleotide
aaagcaaauccggccauaa

SEQ ID NO: 2489053 - RNA, 19 nt, Artificial Sequence
  Description of Artificial Sequence: Synthetic oligonucleotide
uuuagcgcacugcucucga

SEQ ID NO: 2489054 - RNA, 19 nt, Artificial Sequence
  Description of Artificial Sequence: Synthetic oligonucleotide
gacggccuuucucagggag

SEQ ID NO: 2489055 - RNA, 19 nt, Artificial Sequence
  Description of Artificial Sequence: Synthetic oligonucleotide
ucgauucuuaaggaauaug

SEQ ID NO: 2489056 - RNA, 19 nt, Artificial Sequence
  Description of Artificial Sequence: Synthetic oligonucleotide
agguuccuagaacuuuuag

SEQ ID NO: 2489057 - RNA, 19 nt, Artificial Sequence
  Description of Artificial Sequence: Synthetic oligonucleotide
gaacuuuuagcgcacugcu

SEQ ID NO: 2489058 - RNA, 19 nt, Artificial Sequence
  Description of Artificial Sequence: Synthetic oligonucleotide
aacucagauguuccagcau

SEQ ID NO: 2489059 - RNA, 19 nt, Artificial Sequence
  Description of Artificial Sequence: Synthetic oligonucleotide
uuaacggccgccggcacgc

SEQ ID NO: 2489060 - RNA, 19 nt, Artificial Sequence
  Description of Artificial Sequence: Synthetic oligonucleotide
ugccuaagucuugaacagg

SEQ ID NO: 2489061 - RNA, 19 nt, Artificial Sequence
  Description of Artificial Sequence: Synthetic oligonucleotide
ugaaccgugaaagcuccga

SEQ ID NO: 2489062 - RNA, 19 nt, Artificial Sequence
  Description of Artificial Sequence: Synthetic oligonucleotide
ucuccgacgggcacagaca

SEQ ID NO: 2489063 - RNA, 19 nt, Artificial Sequence
  Description of Artificial Sequence: Synthetic oligonucleotide
gggauagucgauucuuaag

SEQ ID NO: 2489064 - RNA, 19 nt, Artificial Sequence
  Description of Artificial Sequence: Synthetic oligonucleotide
gauucuuaaggaauauggu

SEQ ID NO: 2489065 - RNA, 19 nt, Artificial Sequence
  Description of Artificial Sequence: Synthetic oligonucleotide
cgcaaaaggagguacgucc

SEQ ID NO: 2489066 - RNA, 19 nt, Artificial Sequence
  Description of Artificial Sequence: Synthetic oligonucleotide
gugguuuaaacucauguuu

SEQ ID NO: 2489067 - RNA, 19 nt, Artificial Sequence
  Description of Artificial Sequence: Synthetic oligonucleotide
guagacaguccacccaaac

SEQ ID NO: 2489068 - RNA, 19 nt, Artificial Sequence
  Description of Artificial Sequence: Synthetic oligonucleotide
aucgacaauaaagcgggga

SEQ ID NO: 2489069 - RNA, 19 nt, Artificial Sequence
  Description of Artificial Sequence: Synthetic oligonucleotide
ggaugucggcgguagauag

SEQ ID NO: 2489070 - RNA, 19 nt, Artificial Sequence
  Description of Artificial Sequence: Synthetic oligonucleotide
uggaaaucacuugcgggcu

SEQ ID NO: 2489071 - RNA, 19 nt, Artificial Sequence
  Description of Artificial Sequence: Synthetic oligonucleotide
acugcaguggaaaucacuu

SEQ ID NO: 2489072 - RNA, 19 nt, Artificial Sequence
  Description of Artificial Sequence: Synthetic oligonucleotide
gaugucggcgguagauagg

SEQ ID NO: 2489073 - RNA, 19 nt, Artificial Sequence
  Description of Artificial Sequence: Synthetic oligonucleotide
acuguaacuauugcagaaa

SEQ ID NO: 2489074 - RNA, 19 nt, Artificial Sequence
  Description of Artificial Sequence: Synthetic oligonucleotide
cauagcgacggccuuucuc

SEQ ID NO: 2489075 - RNA, 19 nt, Artificial Sequence
  Description of Artificial Sequence: Synthetic oligonucleotide
auguuccagcaugauuggc

SEQ ID NO: 2489076 - RNA, 19 nt, Artificial Sequence
  Description of Artificial Sequence: Synthetic oligonucleotide
cugugccuaagucuugaac

SEQ ID NO: 2489077 - RNA, 19 nt, Artificial Sequence
  Description of Artificial Sequence: Synthetic oligonucleotide
agaauauaggugguuuaaa

SEQ ID NO: 2489078 - RNA, 19 nt, Artificial Sequence
  Description of Artificial Sequence: Synthetic oligonucleotide
ucgugcgccggucugugcu

SEQ ID NO: 2489079 - RNA, 19 nt, Artificial Sequence
  Description of Artificial Sequence: Synthetic oligonucleotide
acaccgaacguagccuggc

SEQ ID NO: 2489080 - RNA, 19 nt, Artificial Sequence
  Description of Artificial Sequence: Synthetic oligonucleotide
uaggugguuuaaacucaug

SEQ ID NO: 2489081 - RNA, 19 nt, Artificial Sequence
  Description of Artificial Sequence: Synthetic oligonucleotide
ucugggugggcagcgaacu

SEQ ID NO: 2489082 - RNA, 19 nt, Artificial Sequence
  Description of Artificial Sequence: Synthetic oligonucleotide
acccaaacuguaacuauug

SEQ ID NO: 2489083 - RNA, 19 nt, Artificial Sequence
  Description of Artificial Sequence: Synthetic oligonucleotide
aaaaggagguacgucccua

SEQ ID NO: 2489084 - RNA, 19 nt, Artificial Sequence
  Description of Artificial Sequence: Synthetic oligonucleotide
ggaauaugguuuucgggga

SEQ ID NO: 2489085 - RNA, 19 nt, Artificial Sequence
  Description of Artificial Sequence: Synthetic oligonucleotide
gacugaggccgcgacuugg

SEQ ID NO: 2489086 - RNA, 19 nt, Artificial Sequence
  Description of Artificial Sequence: Synthetic oligonucleotide
uucugugccuaagucuuga

SEQ ID NO: 2489087 - RNA, 19 nt, Artificial Sequence
  Description of Artificial Sequence: Synthetic oligonucleotide
gcaaacacgagaaagcaaa

SEQ ID NO: 2489088 - RNA, 19 nt, Artificial Sequence
  Description of Artificial Sequence: Synthetic oligonucleotide
ugguuuucggggagcgaca

SEQ ID NO: 2489089 - RNA, 19 nt, Artificial Sequence
  Description of Artificial Sequence: Synthetic oligonucleotide
gucuccgacgggcacagac

SEQ ID NO: 2489090 - RNA, 19 nt, Artificial Sequence
  Description of Artificial Sequence: Synthetic oligonucleotide
acugcucucgaggacugag

SEQ ID NO: 2489091 - RNA, 19 nt, Artificial Sequence
  Description of Artificial Sequence: Synthetic oligonucleotide
ucggcgguagauaggccac

SEQ ID NO: 2489092 - RNA, 19 nt, Artificial Sequence
  Description of Artificial Sequence: Synthetic oligonucleotide
agcgcacugcucucgagga

SEQ ID NO: 2489093 - RNA, 19 nt, Artificial Sequence
  Description of Artificial Sequence: Synthetic oligonucleotide
cgagaaagcaaauccggcc

SEQ ID NO: 2489094 - RNA, 19 nt, Artificial Sequence
  Description of Artificial Sequence: Synthetic oligonucleotide
gguacgucccuaaagguuc

SEQ ID NO: 2489095 - RNA, 19 nt, Artificial Sequence
  Description of Artificial Sequence: Synthetic oligonucleotide
agcgaacucagauguucca

SEQ ID NO: 2489096 - RNA, 19 nt, Artificial Sequence
  Description of Artificial Sequence: Synthetic oligonucleotide
gucggcgguagauaggcca

SEQ ID NO: 2489097 - RNA, 19 nt, Artificial Sequence
  Description of Artificial Sequence: Synthetic oligonucleotide
uuuuaacggccgccggcac

SEQ ID NO: 2489098 - RNA, 19 nt, Artificial Sequence
  Description of Artificial Sequence: Synthetic oligonucleotide
cugugcuacuggcugcccg

SEQ ID NO: 2489099 - RNA, 19 nt, Artificial Sequence
  Description of Artificial Sequence: Synthetic oligonucleotide
cuguaacuauugcagaaaa

SEQ ID NO: 2489100 - RNA, 19 nt, Artificial Sequence
  Description of Artificial Sequence: Synthetic oligonucleotide
cugcaguggaaaucacuug

SEQ ID NO: 2489101 - RNA, 19 nt, Artificial Sequence
  Description of Artificial Sequence: Synthetic oligonucleotide
uggccgaccagccgagccc

SEQ ID NO: 2489102 - RNA, 19 nt, Artificial Sequence
  Description of Artificial Sequence: Synthetic oligonucleotide
aaggagguacgucccuaaa

SEQ ID NO: 2489103 - RNA, 19 nt, Artificial Sequence
  Description of Artificial Sequence: Synthetic oligonucleotide
aucgcaaaaggagguacgu

SEQ ID NO: 2489104 - RNA, 19 nt, Artificial Sequence
  Description of Artificial Sequence: Synthetic oligonucleotide
uuagcgcacugcucucgag

SEQ ID NO: 2489105 - RNA, 19 nt, Artificial Sequence
  Description of Artificial Sequence: Synthetic oligonucleotide
ugaaagcuccgaucaguua

SEQ ID NO: 2489106 - RNA, 19 nt, Artificial Sequence
  Description of Artificial Sequence: Synthetic oligonucleotide
acggccguggccccggaag

SEQ ID NO: 2489107 - RNA, 19 nt, Artificial Sequence
  Description of Artificial Sequence: Synthetic oligonucleotide
gacaccgaacguagccugg

SEQ ID NO: 2489108 - RNA, 19 nt, Artificial Sequence
  Description of Artificial Sequence: Synthetic oligonucleotide
ggugcugaaccgugaaagc

SEQ ID NO: 2489109 - RNA, 19 nt, Artificial Sequence
  Description of Artificial Sequence: Synthetic oligonucleotide
gcgacggccuuucucaggg

SEQ ID NO: 2489110 - RNA, 19 nt, Artificial Sequence
  Description of Artificial Sequence: Synthetic oligonucleotide
ugucagcaaacacgagaaa

SEQ ID NO: 2489111 - RNA, 19 nt, Artificial Sequence
  Description of Artificial Sequence: Synthetic oligonucleotide
uguagacaguccacccaaa

SEQ ID NO: 2489112 - RNA, 19 nt, Artificial Sequence
  Description of Artificial Sequence: Synthetic oligonucleotide
guaaccacuucaggggaug

SEQ ID NO: 2489113 - RNA, 19 nt, Artificial Sequence
  Description of Artificial Sequence: Synthetic oligonucleotide
aacucauguuuugguuuug

SEQ ID NO: 2489114 - RNA, 19 nt, Artificial Sequence
  Description of Artificial Sequence: Synthetic oligonucleotide
cuugucuucugugccuaag

SEQ ID NO: 2489115 - RNA, 19 nt, Artificial Sequence
  Description of Artificial Sequence: Synthetic oligonucleotide
agcgacggccuuucucagg

SEQ ID NO: 2489116 - RNA, 19 nt, Artificial Sequence
  Description of Artificial Sequence: Synthetic oligonucleotide
cuuuuagcgcacugcucuc

SEQ ID NO: 2489117 - RNA, 19 nt, Artificial Sequence
  Description of Artificial Sequence: Synthetic oligonucleotide
cuccgacgggcacagacac

SEQ ID NO: 2489118 - RNA, 19 nt, Artificial Sequence
  Description of Artificial Sequence: Synthetic oligonucleotide
ggagcgacaccgaacguag

SEQ ID NO: 2489119 - RNA, 19 nt, Artificial Sequence
  Description of Artificial Sequence: Synthetic oligonucleotide
gucccuaaagguuccuaga

SEQ ID NO: 2489120 - RNA, 19 nt, Artificial Sequence
  Description of Artificial Sequence: Synthetic oligonucleotide
gaucgacaauaaagcgggg

SEQ ID NO: 2489121 - RNA, 19 nt, Artificial Sequence
  Description of Artificial Sequence: Synthetic oligonucleotide
aagcaggugcugaaccgug

SEQ ID NO: 2489122 - RNA, 19 nt, Artificial Sequence
  Description of Artificial Sequence: Synthetic oligonucleotide
ccggccauaacuauguaga

SEQ ID NO: 2489123 - RNA, 19 nt, Artificial Sequence
  Description of Artificial Sequence: Synthetic oligonucleotide
cagcaaacacgagaaagca

SEQ ID NO: 2489124 - RNA, 19 nt, Artificial Sequence
  Description of Artificial Sequence: Synthetic oligonucleotide
acucauguuuugguuuuga

SEQ ID NO: 2489125 - RNA, 19 nt, Artificial Sequence
  Description of Artificial Sequence: Synthetic oligonucleotide
agagcaucgugcgccgguc

SEQ ID NO: 2489126 - RNA, 19 nt, Artificial Sequence
  Description of Artificial Sequence: Synthetic oligonucleotide
cuggccgaccagccgagcc

SEQ ID NO: 2489127 - RNA, 19 nt, Artificial Sequence
  Description of Artificial Sequence: Synthetic oligonucleotide
ggugccgcgacugcagugg

SEQ ID NO: 2489128 - RNA, 19 nt, Artificial Sequence
  Description of Artificial Sequence: Synthetic oligonucleotide
agucgauucuuaaggaaua

SEQ ID NO: 2489129 - RNA, 19 nt, Artificial Sequence
  Description of Artificial Sequence: Synthetic oligonucleotide
ccuaaagguuccuagaacu

SEQ ID NO: 2489130 - RNA, 19 nt, Artificial Sequence
  Description of Artificial Sequence: Synthetic oligonucleotide
aaagcuccgaucaguuauu

SEQ ID NO: 2489131 - RNA, 19 nt, Artificial Sequence
  Description of Artificial Sequence: Synthetic oligonucleotide
uucggggagcgacaccgaa

SEQ ID NO: 2489132 - RNA, 19 nt, Artificial Sequence
  Description of Artificial Sequence: Synthetic oligonucleotide
gcuacuggcugcccggugc

SEQ ID NO: 2489133 - RNA, 19 nt, Artificial Sequence
  Description of Artificial Sequence: Synthetic oligonucleotide
uucugccccuuguaaucca

SEQ ID NO: 2489134 - RNA, 19 nt, Artificial Sequence
  Description of Artificial Sequence: Synthetic oligonucleotide
uucaggggaugucggcggu

SEQ ID NO: 2489135 - RNA, 19 nt, Artificial Sequence
  Description of Artificial Sequence: Synthetic oligonucleotide
uccccugauuucuugucuu

SEQ ID NO: 2489136 - RNA, 19 nt, Artificial Sequence
  Description of Artificial Sequence: Synthetic oligonucleotide
cgcgccaucgcaaaaggag

SEQ ID NO: 2489137 - RNA, 19 nt, Artificial Sequence
  Description of Artificial Sequence: Synthetic oligonucleotide
caauucaguucaucacaga

SEQ ID NO: 2489138 - RNA, 19 nt, Artificial Sequence
  Description of Artificial Sequence: Synthetic oligonucleotide
aucgugcgccggucugugc

SEQ ID NO: 2489139 - RNA, 19 nt, Artificial Sequence
  Description of Artificial Sequence: Synthetic oligonucleotide
aagugucagcaaacacgag

SEQ ID NO: 2489140 - RNA, 19 nt, Artificial Sequence
  Description of Artificial Sequence: Synthetic oligonucleotide
aucugggugggcagcgaac

SEQ ID NO: 2489141 - RNA, 19 nt, Artificial Sequence
  Description of Artificial Sequence: Synthetic oligonucleotide
uccauagcgacggccuuuc

SEQ ID NO: 2489142 - RNA, 19 nt, Artificial Sequence
  Description of Artificial Sequence: Synthetic oligonucleotide
uaugguuuucggggagcga

SEQ ID NO: 2489143 - RNA, 19 nt, Artificial Sequence
  Description of Artificial Sequence: Synthetic oligonucleotide
aggacugaggccgcgacuu

SEQ ID NO: 2489144 - RNA, 19 nt, Artificial Sequence
  Description of Artificial Sequence: Synthetic oligonucleotide
cugaaccgugaaagcuccg

SEQ ID NO: 2489145 - RNA, 19 nt, Artificial Sequence
  Description of Artificial Sequence: Synthetic oligonucleotide
uagcgacggccuuucucag

SEQ ID NO: 2489146 - RNA, 19 nt, Artificial Sequence
  Description of Artificial Sequence: Synthetic oligonucleotide
gagguacgucccuaaaggu

SEQ ID NO: 2489147 - RNA, 19 nt, Artificial Sequence
  Description of Artificial Sequence: Synthetic oligonucleotide
agcggggauagucgauucu

SEQ ID NO: 2489148 - RNA, 19 nt, Artificial Sequence
  Description of Artificial Sequence: Synthetic oligonucleotide
ugucggcgguagauaggcc

SEQ ID NO: 2489149 - RNA, 19 nt, Artificial Sequence
  Description of Artificial Sequence: Synthetic oligonucleotide
ucgcaaaaggagguacguc

SEQ ID NO: 2489150 - RNA, 19 nt, Artificial Sequence
  Description of Artificial Sequence: Synthetic oligonucleotide
gcugaaccgugaaagcucc

SEQ ID NO: 2489151 - RNA, 19 nt, Artificial Sequence
  Description of Artificial Sequence: Synthetic oligonucleotide
uuccagcaugauuggcgga

SEQ ID NO: 2489152 - RNA, 19 nt, Artificial Sequence
  Description of Artificial Sequence: Synthetic oligonucleotide
guuuucggggagcgacacc

SEQ ID NO: 2489153 - RNA, 19 nt, Artificial Sequence
  Description of Artificial Sequence: Synthetic oligonucleotide
agcggaugucuccgacggg

SEQ ID NO: 2489154 - RNA, 19 nt, Artificial Sequence
  Description of Artificial Sequence: Synthetic oligonucleotide
ccuagaacuuuuagcgcac

SEQ ID NO: 2489155 - RNA, 19 nt, Artificial Sequence
  Description of Artificial Sequence: Synthetic oligonucleotide
acggccuuucucagggagg

SEQ ID NO: 2489156 - RNA, 19 nt, Artificial Sequence
  Description of Artificial Sequence: Synthetic oligonucleotide
cacagcugugcuguuaaga

SEQ ID NO: 2489157 - RNA, 19 nt, Artificial Sequence
  Description of Artificial Sequence: Synthetic oligonucleotide
agcaaacacgagaaagcaa

SEQ ID NO: 2489158 - RNA, 19 nt, Artificial Sequence
  Description of Artificial Sequence: Synthetic oligonucleotide
gaacguagccuggccgacc

SEQ ID NO: 2489159 - RNA, 19 nt, Artificial Sequence
  Description of Artificial Sequence: Synthetic oligonucleotide
acaauaaagcggggauagu

SEQ ID NO: 2489160 - RNA, 19 nt, Artificial Sequence
  Description of Artificial Sequence: Synthetic oligonucleotide
agguacgucccuaaagguu

SEQ ID NO: 2489161 - RNA, 19 nt, Artificial Sequence
  Description of Artificial Sequence: Synthetic oligonucleotide
gcgccaucgcaaaaggagg

SEQ ID NO: 2489162 - RNA, 19 nt, Artificial Sequence
  Description of Artificial Sequence: Synthetic oligonucleotide
ggaaaucacuugcgggcug

SEQ ID NO: 2489163 - RNA, 19 nt, Artificial Sequence
  Description of Artificial Sequence: Synthetic oligonucleotide
ucuugucuucugugccuaa

SEQ ID NO: 2489164 - RNA, 19 nt, Artificial Sequence
  Description of Artificial Sequence: Synthetic oligonucleotide
ccgacgggcacagacaccc

SEQ ID NO: 2489165 - RNA, 19 nt, Artificial Sequence
  Description of Artificial Sequence: Synthetic oligonucleotide
caggggaugucggcgguag

SEQ ID NO: 2489166 - RNA, 19 nt, Artificial Sequence
  Description of Artificial Sequence: Synthetic oligonucleotide
caccgaacguagccuggcc

SEQ ID NO: 2489167 - RNA, 19 nt, Artificial Sequence
  Description of Artificial Sequence: Synthetic oligonucleotide
cccuaaagguuccuagaac

SEQ ID NO: 2489168 - RNA, 19 nt, Artificial Sequence
  Description of Artificial Sequence: Synthetic oligonucleotide
gcgaacucagauguuccag

SEQ ID NO: 2489169 - RNA, 19 nt, Artificial Sequence
  Description of Artificial Sequence: Synthetic oligonucleotide
gcgacugcaguggaaauca

SEQ ID NO: 2489170 - RNA, 19 nt, Artificial Sequence
  Description of Artificial Sequence: Synthetic oligonucleotide
gaccagccgagccccucag

SEQ ID NO: 2489171 - RNA, 19 nt, Artificial Sequence
  Description of Artificial Sequence: Synthetic oligonucleotide
cuaaagguuccuagaacuu

SEQ ID NO: 2489172 - RNA, 19 nt, Artificial Sequence
  Description of Artificial Sequence: Synthetic oligonucleotide
caguccgacggccguggcc

SEQ ID NO: 2489173 - RNA, 19 nt, Artificial Sequence
  Description of Artificial Sequence: Synthetic oligonucleotide
cacccucuggccccgcccc

SEQ ID NO: 2489174 - RNA, 19 nt, Artificial Sequence
  Description of Artificial Sequence: Synthetic oligonucleotide
ggagaagaucgacaauaaa

SEQ ID NO: 2489175 - RNA, 19 nt, Artificial Sequence
  Description of Artificial Sequence: Synthetic oligonucleotide
guacgucccuaaagguucc

SEQ ID NO: 2489176 - RNA, 19 nt, Artificial Sequence
  Description of Artificial Sequence: Synthetic oligonucleotide
guucaucacagaggaacaa

SEQ ID NO: 2489177 - RNA, 19 nt, Artificial Sequence
  Description of Artificial Sequence: Synthetic oligonucleotide
ggccauaacuauguagaca

SEQ ID NO: 2489178 - RNA, 19 nt, Artificial Sequence
  Description of Artificial Sequence: Synthetic oligonucleotide
cgucccuaaagguuccuag

SEQ ID NO: 2489179 - RNA, 19 nt, Artificial Sequence
  Description of Artificial Sequence: Synthetic oligonucleotide
gcggagaagaucgacaaua

SEQ ID NO: 2489180 - RNA, 19 nt, Artificial Sequence
  Description of Artificial Sequence: Synthetic oligonucleotide
acgcgccgcgucuccauag

SEQ ID NO: 2489181 - RNA, 19 nt, Artificial Sequence
  Description of Artificial Sequence: Synthetic oligonucleotide
guuaagaauauaggugguu

SEQ ID NO: 2489182 - RNA, 19 nt, Artificial Sequence
  Description of Artificial Sequence: Synthetic oligonucleotide
ccacuucaggggaugucgg

SEQ ID NO: 2489183 - RNA, 19 nt, Artificial Sequence
  Description of Artificial Sequence: Synthetic oligonucleotide
gaaagcaaauccggccaua

SEQ ID NO: 2489184 - RNA, 19 nt, Artificial Sequence
  Description of Artificial Sequence: Synthetic oligonucleotide
gaaccgugaaagcuccgau

SEQ ID NO: 2489185 - RNA, 19 nt, Artificial Sequence
  Description of Artificial Sequence: Synthetic oligonucleotide
ggggauagucgauucuuaa

SEQ ID NO: 2489186 - RNA, 19 nt, Artificial Sequence
  Description of Artificial Sequence: Synthetic oligonucleotide
gcaaauccggccauaacua

SEQ ID NO: 2489187 - RNA, 19 nt, Artificial Sequence
  Description of Artificial Sequence: Synthetic oligonucleotide
uagauaggccacggaggaa

SEQ ID NO: 2489188 - RNA, 19 nt, Artificial Sequence
  Description of Artificial Sequence: Synthetic oligonucleotide
gacacccucuggccccgcc

SEQ ID NO: 2489189 - RNA, 19 nt, Artificial Sequence
  Description of Artificial Sequence: Synthetic oligonucleotide
agcuccgaucaguuauuuu

SEQ ID NO: 2489190 - RNA, 19 nt, Artificial Sequence
  Description of Artificial Sequence: Synthetic oligonucleotide
caguccacccaaacuguaa

SEQ ID NO: 2489191 - RNA, 19 nt, Artificial Sequence
  Description of Artificial Sequence: Synthetic oligonucleotide
ggcgguagauaggccacgg

SEQ ID NO: 2489192 - RNA, 19 nt, Artificial Sequence
  Description of Artificial Sequence: Synthetic oligonucleotide
ccaucgcaaaaggagguac

SEQ ID NO: 2489193 - RNA, 19 nt, Artificial Sequence
  Description of Artificial Sequence: Synthetic oligonucleotide
gugcugaaccgugaaagcu

SEQ ID NO: 2489194 - RNA, 19 nt, Artificial Sequence
  Description of Artificial Sequence: Synthetic oligonucleotide
gggcagcgaacucagaugu

SEQ ID NO: 2489195 - RNA, 19 nt, Artificial Sequence
  Description of Artificial Sequence: Synthetic oligonucleotide
gccggucugugcuacuggc

SEQ ID NO: 2489196 - RNA, 19 nt, Artificial Sequence
  Description of Artificial Sequence: Synthetic oligonucleotide
gccgcgucuccauagcgac

SEQ ID NO: 2489197 - RNA, 19 nt, Artificial Sequence
  Description of Artificial Sequence: Synthetic oligonucleotide
cugccccuuguaauccauc

SEQ ID NO: 2489198 - RNA, 19 nt, Artificial Sequence
  Description of Artificial Sequence: Synthetic oligonucleotide
acgggcacagacacccucu

SEQ ID NO: 2489199 - RNA, 19 nt, Artificial Sequence
  Description of Artificial Sequence: Synthetic oligonucleotide
gguuuucggggagcgacac

SEQ ID NO: 2489200 - RNA, 19 nt, Artificial Sequence
  Description of Artificial Sequence: Synthetic oligonucleotide
guccacccaaacuguaacu

SEQ ID NO: 2489201 - RNA, 19 nt, Artificial Sequence
  Description of Artificial Sequence: Synthetic oligonucleotide
cgcgucuccauagcgacgg

SEQ ID NO: 2489202 - RNA, 19 nt, Artificial Sequence
  Description of Artificial Sequence: Synthetic oligonucleotide
cucgaggacugaggccgcg

SEQ ID NO: 2489203 - RNA, 19 nt, Artificial Sequence
  Description of Artificial Sequence: Synthetic oligonucleotide
gauuggcggagaagaucga

SEQ ID NO: 2489204 - RNA, 19 nt, Artificial Sequence
  Description of Artificial Sequence: Synthetic oligonucleotide
ccagccgagccccucaguc

SEQ ID NO: 2489205 - RNA, 19 nt, Artificial Sequence
  Description of Artificial Sequence: Synthetic oligonucleotide
agcuagcuucugccccuug

SEQ ID NO: 2489206 - RNA, 19 nt, Artificial Sequence
  Description of Artificial Sequence: Synthetic oligonucleotide
caucgugcgccggucugug

SEQ ID NO: 2489207 - RNA, 19 nt, Artificial Sequence
  Description of Artificial Sequence: Synthetic oligonucleotide
ggaugucuccgacgggcac

SEQ ID NO: 2489208 - RNA, 19 nt, Artificial Sequence
  Description of Artificial Sequence: Synthetic oligonucleotide
ccggaagcggaugucuccg

SEQ ID NO: 2489209 - RNA, 19 nt, Artificial Sequence
  Description of Artificial Sequence: Synthetic oligonucleotide
caaauccggccauaacuau

SEQ ID NO: 2489210 - RNA, 19 nt, Artificial Sequence
  Description of Artificial Sequence: Synthetic oligonucleotide
uacgucccuaaagguuccu

SEQ ID NO: 2489211 - RNA, 19 nt, Artificial Sequence
  Description of Artificial Sequence: Synthetic oligonucleotide
cagacacccucuggccccg

SEQ ID NO: 2489212 - RNA, 19 nt, Artificial Sequence
  Description of Artificial Sequence: Synthetic oligonucleotide
uccgacggccguggccccg

SEQ ID NO: 2489213 - RNA, 19 nt, Artificial Sequence
  Description of Artificial Sequence: Synthetic oligonucleotide
gagcgacaccgaacguagc

SEQ ID NO: 2489214 - RNA, 19 nt, Artificial Sequence
  Description of Artificial Sequence: Synthetic oligonucleotide
gaggacugaggccgcgacu

SEQ ID NO: 2489215 - RNA, 19 nt, Artificial Sequence
  Description of Artificial Sequence: Synthetic oligonucleotide
gccuaagucuugaacaggu

SEQ ID NO: 2489216 - RNA, 19 nt, Artificial Sequence
  Description of Artificial Sequence: Synthetic oligonucleotide
gcgacuuggccagagcauc

SEQ ID NO: 2489217 - RNA, 19 nt, Artificial Sequence
  Description of Artificial Sequence: Synthetic oligonucleotide
acguagccuggccgaccag

SEQ ID NO: 2489218 - RNA, 19 nt, Artificial Sequence
  Description of Artificial Sequence: Synthetic oligonucleotide
cccgcgccaucgcaaaagg

SEQ ID NO: 2489219 - RNA, 19 nt, Artificial Sequence
  Description of Artificial Sequence: Synthetic oligonucleotide
accagccgagccccucagu

SEQ ID NO: 2489220 - RNA, 19 nt, Artificial Sequence
  Description of Artificial Sequence: Synthetic oligonucleotide
guaauccaucugggugggc

SEQ ID NO: 2489221 - RNA, 19 nt, Artificial Sequence
  Description of Artificial Sequence: Synthetic oligonucleotide
ucaggggaugucggcggua

SEQ ID NO: 2489222 - RNA, 19 nt, Artificial Sequence
  Description of Artificial Sequence: Synthetic oligonucleotide
gcgccgcgucuccauagcg

SEQ ID NO: 2489223 - RNA, 19 nt, Artificial Sequence
  Description of Artificial Sequence: Synthetic oligonucleotide
caggugcugaaccgugaaa

SEQ ID NO: 2489224 - RNA, 19 nt, Artificial Sequence
  Description of Artificial Sequence: Synthetic oligonucleotide
ccgaacguagccuggccga

SEQ ID NO: 2489225 - RNA, 19 nt, Artificial Sequence
  Description of Artificial Sequence: Synthetic oligonucleotide
gggagcgacaccgaacgua

SEQ ID NO: 2489226 - RNA, 19 nt, Artificial Sequence
  Description of Artificial Sequence: Synthetic oligonucleotide
uaacggccgccggcacgcg

SEQ ID NO: 2489227 - RNA, 19 nt, Artificial Sequence
  Description of Artificial Sequence: Synthetic oligonucleotide
ccgugaaagcuccgaucag

SEQ ID NO: 2489228 - RNA, 19 nt, Artificial Sequence
  Description of Artificial Sequence: Synthetic oligonucleotide
ggacugaggccgcgacuug

SEQ ID NO: 2489229 - RNA, 19 nt, Artificial Sequence
  Description of Artificial Sequence: Synthetic oligonucleotide
acgucccuaaagguuccua

SEQ ID NO: 2489230 - RNA, 19 nt, Artificial Sequence
  Description of Artificial Sequence: Synthetic oligonucleotide
agacacccucuggccccgc

SEQ ID NO: 2489231 - RNA, 19 nt, Artificial Sequence
  Description of Artificial Sequence: Synthetic oligonucleotide
gagcaucgugcgccggucu

SEQ ID NO: 2489232 - RNA, 19 nt, Artificial Sequence
  Description of Artificial Sequence: Synthetic oligonucleotide
cuagaacuuuuagcgcacu

SEQ ID NO: 2489233 - RNA, 19 nt, Artificial Sequence
  Description of Artificial Sequence: Synthetic oligonucleotide
ccuuguaauccaucugggu

SEQ ID NO: 2489234 - RNA, 19 nt, Artificial Sequence
  Description of Artificial Sequence: Synthetic oligonucleotide
cccggugccgcgacugcag

SEQ ID NO: 2489235 - RNA, 19 nt, Artificial Sequence
  Description of Artificial Sequence: Synthetic oligonucleotide
ggccgaccagccgagcccc

SEQ ID NO: 2489236 - RNA, 19 nt, Artificial Sequence
  Description of Artificial Sequence: Synthetic oligonucleotide
ccgcgacuuggccagagca

SEQ ID NO: 2489237 - RNA, 19 nt, Artificial Sequence
  Description of Artificial Sequence: Synthetic oligonucleotide
ccccucaguccgacggccg

SEQ ID NO: 2489238 - RNA, 19 nt, Artificial Sequence
  Description of Artificial Sequence: Synthetic oligonucleotide
cagagcaucgugcgccggu

SEQ ID NO: 2489239 - RNA, 19 nt, Artificial Sequence
  Description of Artificial Sequence: Synthetic oligonucleotide
gccgcgacugcaguggaaa

SEQ ID NO: 2489240 - RNA, 19 nt, Artificial Sequence
  Description of Artificial Sequence: Synthetic oligonucleotide
gugccgcgacugcagugga

SEQ ID NO: 2489241 - RNA, 19 nt, Artificial Sequence
  Description of Artificial Sequence: Synthetic oligonucleotide
cggagaagaucgacaauaa

SEQ ID NO: 2489242 - RNA, 19 nt, Artificial Sequence
  Description of Artificial Sequence: Synthetic oligonucleotide
cugugcuguuaagaauaua

SEQ ID NO: 2489243 - RNA, 19 nt, Artificial Sequence
  Description of Artificial Sequence: Synthetic oligonucleotide
gccgcgacuuggccagagc

SEQ ID NO: 2489244 - RNA, 19 nt, Artificial Sequence
  Description of Artificial Sequence: Synthetic oligonucleotide
ccccgcgccaucgcaaaag

SEQ ID NO: 2489245 - RNA, 19 nt, Artificial Sequence
  Description of Artificial Sequence: Synthetic oligonucleotide
gggaugucggcgguagaua

SEQ ID NO: 2489246 - RNA, 19 nt, Artificial Sequence
  Description of Artificial Sequence: Synthetic oligonucleotide
cgaggacugaggccgcgac

SEQ ID NO: 2489247 - RNA, 19 nt, Artificial Sequence
  Description of Artificial Sequence: Synthetic oligonucleotide
ccccggaagcggaugucuc

SEQ ID NO: 2489248 - RNA, 19 nt, Artificial Sequence
  Description of Artificial Sequence: Synthetic oligonucleotide
gcgcacugcucucgaggac

SEQ ID NO: 2489249 - RNA, 19 nt, Artificial Sequence
  Description of Artificial Sequence: Synthetic oligonucleotide
ggggaugucggcgguagau

SEQ ID NO: 2489250 - RNA, 19 nt, Artificial Sequence
  Description of Artificial Sequence: Synthetic oligonucleotide
cgcgacugcaguggaaauc

SEQ ID NO: 2489251 - RNA, 19 nt, Artificial Sequence
  Description of Artificial Sequence: Synthetic oligonucleotide
gcgccggucugugcuacug

SEQ ID NO: 2489252 - RNA, 19 nt, Artificial Sequence
  Description of Artificial Sequence: Synthetic oligonucleotide
cgccggucugugcuacugg

SEQ ID NO: 2489253 - RNA, 19 nt, Artificial Sequence
  Description of Artificial Sequence: Synthetic oligonucleotide
gcgacaccgaacguagccu

SEQ ID NO: 2489254 - RNA, 19 nt, Artificial Sequence
  Description of Artificial Sequence: Synthetic oligonucleotide
gacggccguggccccggaa

SEQ ID NO: 2489255 - RNA, 19 nt, Artificial Sequence
  Description of Artificial Sequence: Synthetic oligonucleotide
gguaaccacuucaggggau

SEQ ID NO: 2489256 - RNA, 19 nt, Artificial Sequence
  Description of Artificial Sequence: Synthetic oligonucleotide
ccacccaaacuguaacuau

SEQ ID NO: 2489257 - RNA, 19 nt, Artificial Sequence
  Description of Artificial Sequence: Synthetic oligonucleotide
ggccgcgacuuggccagag

SEQ ID NO: 2489258 - RNA, 19 nt, Artificial Sequence
  Description of Artificial Sequence: Synthetic oligonucleotide
ccucuggccccgccccgcg

SEQ ID NO: 2489259 - RNA, 19 nt, Artificial Sequence
  Description of Artificial Sequence: Synthetic oligonucleotide
gccaucgcaaaaggaggua

SEQ ID NO: 2489260 - RNA, 19 nt, Artificial Sequence
  Description of Artificial Sequence: Synthetic oligonucleotide
cgugaaagcuccgaucagu

SEQ ID NO: 2489261 - RNA, 19 nt, Artificial Sequence
  Description of Artificial Sequence: Synthetic oligonucleotide
ggcggagaagaucgacaau

SEQ ID NO: 2489262 - RNA, 19 nt, Artificial Sequence
  Description of Artificial Sequence: Synthetic oligonucleotide
cgaacguagccuggccgac

SEQ ID NO: 2489263 - RNA, 19 nt, Artificial Sequence
  Description of Artificial Sequence: Synthetic oligonucleotide
cgacaauaaagcggggaua

SEQ ID NO: 2489264 - RNA, 19 nt, Artificial Sequence
  Description of Artificial Sequence: Synthetic oligonucleotide
cgagccccucaguccgacg

SEQ ID NO: 2489265 - RNA, 19 nt, Artificial Sequence
  Description of Artificial Sequence: Synthetic oligonucleotide
gcggggauagucgauucuu

SEQ ID NO: 2489266 - RNA, 19 nt, Artificial Sequence
  Description of Artificial Sequence: Synthetic oligonucleotide
cgcgccgcgucuccauagc

SEQ ID NO: 2489267 - RNA, 19 nt, Artificial Sequence
  Description of Artificial Sequence: Synthetic oligonucleotide
cacgcgccgcgucuccaua

SEQ ID NO: 2489268 - RNA, 19 nt, Artificial Sequence
  Description of Artificial Sequence: Synthetic oligonucleotide
cggaugucuccgacgggca

SEQ ID NO: 2489269 - RNA, 19 nt, Artificial Sequence
  Description of Artificial Sequence: Synthetic oligonucleotide
cggccuuucucagggagga

SEQ ID NO: 2489270 - RNA, 19 nt, Artificial Sequence
  Description of Artificial Sequence: Synthetic oligonucleotide
ccgcgccaucgcaaaagga

SEQ ID NO: 2489271 - RNA, 19 nt, Artificial Sequence
  Description of Artificial Sequence: Synthetic oligonucleotide
cggcgguagauaggccacg

SEQ ID NO: 2489272 - RNA, 19 nt, Artificial Sequence
  Description of Artificial Sequence: Synthetic oligonucleotide
cgccgcgucuccauagcga

SEQ ID NO: 2489273 - RNA, 19 nt, Artificial Sequence
  Description of Artificial Sequence: Synthetic oligonucleotide
cggugccgcgacugcagug

SEQ ID NO: 2489274 - RNA, 19 nt, Artificial Sequence
  Description of Artificial Sequence: Synthetic oligonucleotide
ccgacggccguggccccgg

SEQ ID NO: 2489275 - RNA, 19 nt, Artificial Sequence
  Description of Artificial Sequence: Synthetic oligonucleotide
ccggucugugcuacuggcu

SEQ ID NO: 2489276 - RNA, 19 nt, Artificial Sequence
  Description of Artificial Sequence: Synthetic oligonucleotide
gccccggaagcggaugucu

SEQ ID NO: 2489277 - RNA, 19 nt, Artificial Sequence
  Description of Artificial Sequence: Synthetic oligonucleotide
ccgagccccucaguccgac

SEQ ID NO: 2489278 - RNA, 19 nt, Artificial Sequence
  Description of Artificial Sequence: Synthetic oligonucleotide
ggccccggaagcggauguc

SEQ ID NO: 2489279 - RNA, 19 nt, Artificial Sequence
  Description of Artificial Sequence: Synthetic oligonucleotide
ggcacgcgccgcgucucca

SEQ ID NO: 2489280 - RNA, 19 nt, Artificial Sequence
  Description of Artificial Sequence: Synthetic oligonucleotide
gccggcacgcgccgcgucu

SEQ ID NO: 2489281 - RNA, 19 nt, Artificial Sequence
  Description of Artificial Sequence: Synthetic oligonucleotide
gcccggugccgcgacugca

SEQ ID NO: 2489282 - RNA, 19 nt, Artificial Sequence
  Description of Artificial Sequence: Synthetic oligonucleotide
ccgaccagccgagccccuc

SEQ ID NO: 2489283 - RNA, 19 nt, Artificial Sequence
  Description of Artificial Sequence: Synthetic oligonucleotide
aggccgcgacuuggccaga

SEQ ID NO: 2489284 - RNA, 19 nt, Artificial Sequence
  Description of Artificial Sequence: Synthetic oligonucleotide
cgcgacuuggccagagcau

SEQ ID NO: 2489285 - RNA, 19 nt, Artificial Sequence
  Description of Artificial Sequence: Synthetic oligonucleotide
cccucaguccgacggccgu

SEQ ID NO: 2489286 - RNA, 19 nt, Artificial Sequence
  Description of Artificial Sequence: Synthetic oligonucleotide
ccggcacgcgccgcgucuc

SEQ ID NO: 2489287 - RNA, 19 nt, Artificial Sequence
  Description of Artificial Sequence: Synthetic oligonucleotide
cggcacgcgccgcgucucc

SEQ ID NO: 2489288 - RNA, 19 nt, Artificial Sequence
  Description of Artificial Sequence: Synthetic oligonucleotide
gccccgcgccaucgcaaaa

SEQ ID NO: 2489289 - RNA, 19 nt, Artificial Sequence
  Description of Artificial Sequence: Synthetic oligonucleotide
gcacgcgccgcgucuccau

SEQ ID NO: 2489290 - RNA, 19 nt, Artificial Sequence
  Description of Artificial Sequence: Synthetic oligonucleotide
ccgccccgcgccaucgcaa

SEQ ID NO: 2489291 - RNA, 19 nt, Artificial Sequence
  Description of Artificial Sequence: Synthetic oligonucleotide
cggccgccggcacgcgccg

SEQ ID NO: 2489292 - RNA, 19 nt, Artificial Sequence
  Description of Artificial Sequence: Synthetic oligonucleotide
cgugcgccggucugugcua

SEQ ID NO: 2489293 - RNA, 19 nt, Artificial Sequence
  Description of Artificial Sequence: Synthetic oligonucleotide
cgacggccuuucucaggga

SEQ ID NO: 2489294 - RNA, 19 nt, Artificial Sequence
  Description of Artificial Sequence: Synthetic oligonucleotide
ccgcgacugcaguggaaau

SEQ ID NO: 2489295 - RNA, 19 nt, Artificial Sequence
  Description of Artificial Sequence: Synthetic oligonucleotide
ccauagcgacggccuuucu

SEQ ID NO: 2489296 - RNA, 19 nt, Artificial Sequence
  Description of Artificial Sequence: Synthetic oligonucleotide
ccggugccgcgacugcagu

SEQ ID NO: 2489297 - RNA, 19 nt, Artificial Sequence
  Description of Artificial Sequence: Synthetic oligonucleotide
cgccggcacgcgccgcguc

SEQ ID NO: 2489298 - RNA, 19 nt, Artificial Sequence
  Description of Artificial Sequence: Synthetic oligonucleotide
cgacgggcacagacacccu

SEQ ID NO: 2489299 - RNA, 19 nt, Artificial Sequence
  Description of Artificial Sequence: Synthetic oligonucleotide
gccgaccagccgagccccu

SEQ ID NO: 2489300 - RNA, 19 nt, Artificial Sequence
  Description of Artificial Sequence: Synthetic oligonucleotide
cgacggccguggccccgga

SEQ ID NO: 2489301 - RNA, 19 nt, Artificial Sequence
  Description of Artificial Sequence: Synthetic oligonucleotide
uaaucuuuaguguugaugg

SEQ ID NO: 2489302 - RNA, 19 nt, Artificial Sequence
  Description of Artificial Sequence: Synthetic oligonucleotide
aguagaauaaucuuuagug

SEQ ID NO: 2489303 - RNA, 19 nt, Artificial Sequence
  Description of Artificial Sequence: Synthetic oligonucleotide
cauuaucacaaauagaugg

SEQ ID NO: 2489304 - RNA, 19 nt, Artificial Sequence
  Description of Artificial Sequence: Synthetic oligonucleotide
uucauuaucacaaauagau

SEQ ID NO: 2489305 - RNA, 19 nt, Artificial Sequence
  Description of Artificial Sequence: Synthetic oligonucleotide
uucaacuugaugaaaaugc

SEQ ID NO: 2489306 - RNA, 19 nt, Artificial Sequence
  Description of Artificial Sequence: Synthetic oligonucleotide
ucuucauuaucacaaauag

SEQ ID NO: 2489307 - RNA, 19 nt, Artificial Sequence
  Description of Artificial Sequence: Synthetic oligonucleotide
uuuaguuuauucaacuuag

SEQ ID NO: 2489308 - RNA, 19 nt, Artificial Sequence
  Description of Artificial Sequence: Synthetic oligonucleotide
aagaagaugauuuaguuua

SEQ ID NO: 2489309 - RNA, 19 nt, Artificial Sequence
  Description of Artificial Sequence: Synthetic oligonucleotide
ucaacuuagauucaacuug

SEQ ID NO: 2489310 - RNA, 19 nt, Artificial Sequence
  Description of Artificial Sequence: Synthetic oligonucleotide
cuuagauucaacuugauga

SEQ ID NO: 2489311 - RNA, 19 nt, Artificial Sequence
  Description of Artificial Sequence: Synthetic oligonucleotide
ucuaaaaguugauaaagcc

SEQ ID NO: 2489312 - RNA, 19 nt, Artificial Sequence
  Description of Artificial Sequence: Synthetic oligonucleotide
agcaucacaaagcaugucc

SEQ ID NO: 2489313 - RNA, 19 nt, Artificial Sequence
  Description of Artificial Sequence: Synthetic oligonucleotide
aacaucuuguuucaauuuc

SEQ ID NO: 2489314 - RNA, 19 nt, Artificial Sequence
  Description of Artificial Sequence: Synthetic oligonucleotide
uuucuaaucgcugacagag

SEQ ID NO: 2489315 - RNA, 19 nt, Artificial Sequence
  Description of Artificial Sequence: Synthetic oligonucleotide
uugacuaaguuguugaacc

SEQ ID NO: 2489316 - RNA, 19 nt, Artificial Sequence
  Description of Artificial Sequence: Synthetic oligonucleotide
ucucaauucaauuucauau

SEQ ID NO: 2489317 - RNA, 19 nt, Artificial Sequence
  Description of Artificial Sequence: Synthetic oligonucleotide
auaugauaacugcacaagc

SEQ ID NO: 2489318 - RNA, 19 nt, Artificial Sequence
  Description of Artificial Sequence: Synthetic oligonucleotide
uuucaaguugccaauaugu

SEQ ID NO: 2489319 - RNA, 19 nt, Artificial Sequence
  Description of Artificial Sequence: Synthetic oligonucleotide
caaagcaucacaaagcaug

SEQ ID NO: 2489320 - RNA, 19 nt, Artificial Sequence
  Description of Artificial Sequence: Synthetic oligonucleotide
uaaaaguugauaaagccua

SEQ ID NO: 2489321 - RNA, 19 nt, Artificial Sequence
  Description of Artificial Sequence: Synthetic oligonucleotide
uuuacacuugacuucaugc

SEQ ID NO: 2489322 - RNA, 19 nt, Artificial Sequence
  Description of Artificial Sequence: Synthetic oligonucleotide
augaaaaugcuccauuaac

SEQ ID NO: 2489323 - RNA, 19 nt, Artificial Sequence
  Description of Artificial Sequence: Synthetic oligonucleotide
ucaugcuugaauuacuugc

SEQ ID NO: 2489324 - RNA, 19 nt, Artificial Sequence
  Description of Artificial Sequence: Synthetic oligonucleotide
aguuuaacugcucgggugc

SEQ ID NO: 2489325 - RNA, 19 nt, Artificial Sequence
  Description of Artificial Sequence: Synthetic oligonucleotide
cuugcuuuaaaguauauga

SEQ ID NO: 2489326 - RNA, 19 nt, Artificial Sequence
  Description of Artificial Sequence: Synthetic oligonucleotide
aaguugccaauauguaucc

SEQ ID NO: 2489327 - RNA, 19 nt, Artificial Sequence
  Description of Artificial Sequence: Synthetic oligonucleotide
aaguuguugaaccaaauuu

SEQ ID NO: 2489328 - RNA, 19 nt, Artificial Sequence
  Description of Artificial Sequence: Synthetic oligonucleotide
auucaguuuggacagaaag

SEQ ID NO: 2489329 - RNA, 19 nt, Artificial Sequence
  Description of Artificial Sequence: Synthetic oligonucleotide
uauuagagaaacaucuugu

SEQ ID NO: 2489330 - RNA, 19 nt, Artificial Sequence
  Description of Artificial Sequence: Synthetic oligonucleotide
ugaaaaugcuccauuaacu

SEQ ID NO: 2489331 - RNA, 19 nt, Artificial Sequence
  Description of Artificial Sequence: Synthetic oligonucleotide
aaagcaauagcugguuccc

SEQ ID NO: 2489332 - RNA, 19 nt, Artificial Sequence
  Description of Artificial Sequence: Synthetic oligonucleotide
ucaauucaauuucauauga

SEQ ID NO: 2489333 - RNA, 19 nt, Artificial Sequence
  Description of Artificial Sequence: Synthetic oligonucleotide
aucauuauucaguuuggac

SEQ ID NO: 2489334 - RNA, 19 nt, Artificial Sequence
  Description of Artificial Sequence: Synthetic oligonucleotide
uauaucuaagagcugaaaa

SEQ ID NO: 2489335 - RNA, 19 nt, Artificial Sequence
  Description of Artificial Sequence: Synthetic oligonucleotide
uguucauggguuauaaaca

SEQ ID NO: 2489336 - RNA, 19 nt, Artificial Sequence
  Description of Artificial Sequence: Synthetic oligonucleotide
aaguugauaaagccuauga

SEQ ID NO: 2489337 - RNA, 19 nt, Artificial Sequence
  Description of Artificial Sequence: Synthetic oligonucleotide
uaugauaacugcacaagcu

SEQ ID NO: 2489338 - RNA, 19 nt, Artificial Sequence
  Description of Artificial Sequence: Synthetic oligonucleotide
ugaucacaaagcaauagcu

SEQ ID NO: 2489339 - RNA, 19 nt, Artificial Sequence
  Description of Artificial Sequence: Synthetic oligonucleotide
augauaacugcacaagcuc

SEQ ID NO: 2489340 - RNA, 19 nt, Artificial Sequence
  Description of Artificial Sequence: Synthetic oligonucleotide
ucaagcuagaaauuuuagc

SEQ ID NO: 2489341 - RNA, 19 nt, Artificial Sequence
  Description of Artificial Sequence: Synthetic oligonucleotide
auguaugcagucugcagcc

SEQ ID NO: 2489342 - RNA, 19 nt, Artificial Sequence
  Description of Artificial Sequence: Synthetic oligonucleotide
agcuagaaauuuuagcauc

SEQ ID NO: 2489343 - RNA, 19 nt, Artificial Sequence
  Description of Artificial Sequence: Synthetic oligonucleotide
ucuaaucgcugacagagca

SEQ ID NO: 2489344 - RNA, 19 nt, Artificial Sequence
  Description of Artificial Sequence: Synthetic oligonucleotide
aaggauuucuucauuauca

SEQ ID NO: 2489345 - RNA, 19 nt, Artificial Sequence
  Description of Artificial Sequence: Synthetic oligonucleotide
agaugauuuaguuuauuca

SEQ ID NO: 2489346 - RNA, 19 nt, Artificial Sequence
  Description of Artificial Sequence: Synthetic oligonucleotide
ugauuuaguuuauucaacu

SEQ ID NO: 2489347 - RNA, 19 nt, Artificial Sequence
  Description of Artificial Sequence: Synthetic oligonucleotide
uaugaguagaauaaucuuu

SEQ ID NO: 2489348 - RNA, 19 nt, Artificial Sequence
  Description of Artificial Sequence: Synthetic oligonucleotide
aaagccuaugaguagaaua

SEQ ID NO: 2489349 - RNA, 19 nt, Artificial Sequence
  Description of Artificial Sequence: Synthetic oligonucleotide
aguugauaaagccuaugag

SEQ ID NO: 2489350 - RNA, 19 nt, Artificial Sequence
  Description of Artificial Sequence: Synthetic oligonucleotide
uucaauuucauaugauaac

SEQ ID NO: 2489351 - RNA, 19 nt, Artificial Sequence
  Description of Artificial Sequence: Synthetic oligonucleotide
gauuguguauuagagaaac

SEQ ID NO: 2489352 - RNA, 19 nt, Artificial Sequence
  Description of Artificial Sequence: Synthetic oligonucleotide
guauuagagaaacaucuug

SEQ ID NO: 2489353 - RNA, 19 nt, Artificial Sequence
  Description of Artificial Sequence: Synthetic oligonucleotide
uuuaaaguauaugaucugu

SEQ ID NO: 2489354 - RNA, 19 nt, Artificial Sequence
  Description of Artificial Sequence: Synthetic oligonucleotide
uaugaagauucucuucugc

SEQ ID NO: 2489355 - RNA, 19 nt, Artificial Sequence
  Description of Artificial Sequence: Synthetic oligonucleotide
auaucuaagagcugaaaau

SEQ ID NO: 2489356 - RNA, 19 nt, Artificial Sequence
  Description of Artificial Sequence: Synthetic oligonucleotide
uccuucuaaaaguugauaa

SEQ ID NO: 2489357 - RNA, 19 nt, Artificial Sequence
  Description of Artificial Sequence: Synthetic oligonucleotide
uguugaaccaaauuuucaa

SEQ ID NO: 2489358 - RNA, 19 nt, Artificial Sequence
  Description of Artificial Sequence: Synthetic oligonucleotide
aacugauuguguauuagag

SEQ ID NO: 2489359 - RNA, 19 nt, Artificial Sequence
  Description of Artificial Sequence: Synthetic oligonucleotide
gaugguuaggcuaugaaga

SEQ ID NO: 2489360 - RNA, 19 nt, Artificial Sequence
  Description of Artificial Sequence: Synthetic oligonucleotide
uuguauaucuaagagcuga

SEQ ID NO: 2489361 - RNA, 19 nt, Artificial Sequence
  Description of Artificial Sequence: Synthetic oligonucleotide
ugcuuuaaaguauaugauc

SEQ ID NO: 2489362 - RNA, 19 nt, Artificial Sequence
  Description of Artificial Sequence: Synthetic oligonucleotide
ugaagauucucuucugccc

SEQ ID NO: 2489363 - RNA, 19 nt, Artificial Sequence
  Description of Artificial Sequence: Synthetic oligonucleotide
ugauaacugcacaagcuca

SEQ ID NO: 2489364 - RNA, 19 nt, Artificial Sequence
  Description of Artificial Sequence: Synthetic oligonucleotide
ugaaucucacuguucaagc

SEQ ID NO: 2489365 - RNA, 19 nt, Artificial Sequence
  Description of Artificial Sequence: Synthetic oligonucleotide
ugcacaagcucaaaugaug

SEQ ID NO: 2489366 - RNA, 19 nt, Artificial Sequence
  Description of Artificial Sequence: Synthetic oligonucleotide
ucauuaucacaaauagaug

SEQ ID NO: 2489367 - RNA, 19 nt, Artificial Sequence
  Description of Artificial Sequence: Synthetic oligonucleotide
aauauguaucccaaugucu

SEQ ID NO: 2489368 - RNA, 19 nt, Artificial Sequence
  Description of Artificial Sequence: Synthetic oligonucleotide
agauacugccaacugauug

SEQ ID NO: 2489369 - RNA, 19 nt, Artificial Sequence
  Description of Artificial Sequence: Synthetic oligonucleotide
aaguauaugaucuguuguu

SEQ ID NO: 2489370 - RNA, 19 nt, Artificial Sequence
  Description of Artificial Sequence: Synthetic oligonucleotide
guguuuguauaucuaagag

SEQ ID NO: 2489371 - RNA, 19 nt, Artificial Sequence
  Description of Artificial Sequence: Synthetic oligonucleotide
uucaagcuagaaauuuuag

SEQ ID NO: 2489372 - RNA, 19 nt, Artificial Sequence
  Description of Artificial Sequence: Synthetic oligonucleotide
uaauguuucuaaucgcuga

SEQ ID NO: 2489373 - RNA, 19 nt, Artificial Sequence
  Description of Artificial Sequence: Synthetic oligonucleotide
auucaacuuagauucaacu

SEQ ID NO: 2489374 - RNA, 19 nt, Artificial Sequence
  Description of Artificial Sequence: Synthetic oligonucleotide
uaguuuauucaacuuagau

SEQ ID NO: 2489375 - RNA, 19 nt, Artificial Sequence
  Description of Artificial Sequence: Synthetic oligonucleotide
uaucacaaauagauggugu

SEQ ID NO: 2489376 - RNA, 19 nt, Artificial Sequence
  Description of Artificial Sequence: Synthetic oligonucleotide
uuagauucaacuugaugaa

SEQ ID NO: 2489377 - RNA, 19 nt, Artificial Sequence
  Description of Artificial Sequence: Synthetic oligonucleotide
uguguauuagagaaacauc

SEQ ID NO: 2489378 - RNA, 19 nt, Artificial Sequence
  Description of Artificial Sequence: Synthetic oligonucleotide
ugguguuuguauaucuaag

SEQ ID NO: 2489379 - RNA, 19 nt, Artificial Sequence
  Description of Artificial Sequence: Synthetic oligonucleotide
cugauuguguauuagagaa

SEQ ID NO: 2489380 - RNA, 19 nt, Artificial Sequence
  Description of Artificial Sequence: Synthetic oligonucleotide
caaauuuucaaguugccaa

SEQ ID NO: 2489381 - RNA, 19 nt, Artificial Sequence
  Description of Artificial Sequence: Synthetic oligonucleotide
ucauaugauaacugcacaa

SEQ ID NO: 2489382 - RNA, 19 nt, Artificial Sequence
  Description of Artificial Sequence: Synthetic oligonucleotide
uuuuacacuugacuucaug

SEQ ID NO: 2489383 - RNA, 19 nt, Artificial Sequence
  Description of Artificial Sequence: Synthetic oligonucleotide
uguccuggaguuuaacugc

SEQ ID NO: 2489384 - RNA, 19 nt, Artificial Sequence
  Description of Artificial Sequence: Synthetic oligonucleotide
auaaucuuuaguguugaug

SEQ ID NO: 2489385 - RNA, 19 nt, Artificial Sequence
  Description of Artificial Sequence: Synthetic oligonucleotide
acugccucgaugguuaggc

SEQ ID NO: 2489386 - RNA, 19 nt, Artificial Sequence
  Description of Artificial Sequence: Synthetic oligonucleotide
uuguguauuagagaaacau

SEQ ID NO: 2489387 - RNA, 19 nt, Artificial Sequence
  Description of Artificial Sequence: Synthetic oligonucleotide
cugaucacaaagcaauagc

SEQ ID NO: 2489388 - RNA, 19 nt, Artificial Sequence
  Description of Artificial Sequence: Synthetic oligonucleotide
uuacacuugacuucaugcu

SEQ ID NO: 2489389 - RNA, 19 nt, Artificial Sequence
  Description of Artificial Sequence: Synthetic oligonucleotide
uaugaucuguuguugggca

SEQ ID NO: 2489390 - RNA, 19 nt, Artificial Sequence
  Description of Artificial Sequence: Synthetic oligonucleotide
acugcacaagcucaaauga

SEQ ID NO: 2489391 - RNA, 19 nt, Artificial Sequence
  Description of Artificial Sequence: Synthetic oligonucleotide
auggguuauaaacaauucu

SEQ ID NO: 2489392 - RNA, 19 nt, Artificial Sequence
  Description of Artificial Sequence: Synthetic oligonucleotide
uggaguuuaacugcucggg

SEQ ID NO: 2489393 - RNA, 19 nt, Artificial Sequence
  Description of Artificial Sequence: Synthetic oligonucleotide
cucuugaguagauacugcc

SEQ ID NO: 2489394 - RNA, 19 nt, Artificial Sequence
  Description of Artificial Sequence: Synthetic oligonucleotide
ucaaguugccaauauguau

SEQ ID NO: 2489395 - RNA, 19 nt, Artificial Sequence
  Description of Artificial Sequence: Synthetic oligonucleotide
uuguugaaccaaauuuuca

SEQ ID NO: 2489396 - RNA, 19 nt, Artificial Sequence
  Description of Artificial Sequence: Synthetic oligonucleotide
uuagcauccaaauuuucuu

SEQ ID NO: 2489397 - RNA, 19 nt, Artificial Sequence
  Description of Artificial Sequence: Synthetic oligonucleotide
cauaugauaacugcacaag

SEQ ID NO: 2489398 - RNA, 19 nt, Artificial Sequence
  Description of Artificial Sequence: Synthetic oligonucleotide
aguagauacugccaacuga

SEQ ID NO: 2489399 - RNA, 19 nt, Artificial Sequence
  Description of Artificial Sequence: Synthetic oligonucleotide
gaaauuuuagcauccaaau

SEQ ID NO: 2489400 - RNA, 19 nt, Artificial Sequence
  Description of Artificial Sequence: Synthetic oligonucleotide
caagaauaucaguaagaag

SEQ ID NO: 2489401 - RNA, 19 nt, Artificial Sequence
  Description of Artificial Sequence: Synthetic oligonucleotide
caauuucauaugauaacug

SEQ ID NO: 2489402 - RNA, 19 nt, Artificial Sequence
  Description of Artificial Sequence: Synthetic oligonucleotide
uuaucacaaauagauggug

SEQ ID NO: 2489403 - RNA, 19 nt, Artificial Sequence
  Description of Artificial Sequence: Synthetic oligonucleotide
acaaagcauguccacauca

SEQ ID NO: 2489404 - RNA, 19 nt, Artificial Sequence
  Description of Artificial Sequence: Synthetic oligonucleotide
gaguuuaacugcucgggug

SEQ ID NO: 2489405 - RNA, 19 nt, Artificial Sequence
  Description of Artificial Sequence: Synthetic oligonucleotide
uauucaacuuagauucaac

SEQ ID NO: 2489406 - RNA, 19 nt, Artificial Sequence
  Description of Artificial Sequence: Synthetic oligonucleotide
aaucucacuguucaagcua

SEQ ID NO: 2489407 - RNA, 19 nt, Artificial Sequence
  Description of Artificial Sequence: Synthetic oligonucleotide
agagcaucacauuuccuug

SEQ ID NO: 2489408 - RNA, 19 nt, Artificial Sequence
  Description of Artificial Sequence: Synthetic oligonucleotide
acugauuguguauuagaga

SEQ ID NO: 2489409 - RNA, 19 nt, Artificial Sequence
  Description of Artificial Sequence: Synthetic oligonucleotide
ugaguagaauaaucuuuag

SEQ ID NO: 2489410 - RNA, 19 nt, Artificial Sequence
  Description of Artificial Sequence: Synthetic oligonucleotide
ucuaagagcugaaaauuuu

SEQ ID NO: 2489411 - RNA, 19 nt, Artificial Sequence
  Description of Artificial Sequence: Synthetic oligonucleotide
cuaauguuucuaaucgcug

SEQ ID NO: 2489412 - RNA, 19 nt, Artificial Sequence
  Description of Artificial Sequence: Synthetic oligonucleotide
ucacauuuccuugacuaag

SEQ ID NO: 2489413 - RNA, 19 nt, Artificial Sequence
  Description of Artificial Sequence: Synthetic oligonucleotide
gaucacaaagcaauagcug

SEQ ID NO: 2489414 - RNA, 19 nt, Artificial Sequence
  Description of Artificial Sequence: Synthetic oligonucleotide
caauauguaucccaauguc

SEQ ID NO: 2489415 - RNA, 19 nt, Artificial Sequence
  Description of Artificial Sequence: Synthetic oligonucleotide
uugcuuuaaaguauaugau

SEQ ID NO: 2489416 - RNA, 19 nt, Artificial Sequence
  Description of Artificial Sequence: Synthetic oligonucleotide
uuaguuuauucaacuuaga

SEQ ID NO: 2489417 - RNA, 19 nt, Artificial Sequence
  Description of Artificial Sequence: Synthetic oligonucleotide
ugaaccaaauuuucaaguu

SEQ ID NO: 2489418 - RNA, 19 nt, Artificial Sequence
  Description of Artificial Sequence: Synthetic oligonucleotide
gaagauucucuucugccca

SEQ ID NO: 2489419 - RNA, 19 nt, Artificial Sequence
  Description of Artificial Sequence: Synthetic oligonucleotide
uaugcagucugcagccuag

SEQ ID NO: 2489420 - RNA, 19 nt, Artificial Sequence
  Description of Artificial Sequence: Synthetic oligonucleotide
aagccuaugaguagaauaa

SEQ ID NO: 2489421 - RNA, 19 nt, Artificial Sequence
  Description of Artificial Sequence: Synthetic oligonucleotide
uaaguuguugaaccaaauu

SEQ ID NO: 2489422 - RNA, 19 nt, Artificial Sequence
  Description of Artificial Sequence: Synthetic oligonucleotide
ugaugaaaaugcuccauua

SEQ ID NO: 2489423 - RNA, 19 nt, Artificial Sequence
  Description of Artificial Sequence: Synthetic oligonucleotide
agcaauagcugguucccuc

SEQ ID NO: 2489424 - RNA, 19 nt, Artificial Sequence
  Description of Artificial Sequence: Synthetic oligonucleotide
uaucuaagagcugaaaauu

SEQ ID NO: 2489425 - RNA, 19 nt, Artificial Sequence
  Description of Artificial Sequence: Synthetic oligonucleotide
uuuguauaucuaagagcug

SEQ ID NO: 2489426 - RNA, 19 nt, Artificial Sequence
  Description of Artificial Sequence: Synthetic oligonucleotide
agccuagccaucuccaguc

SEQ ID NO: 2489427 - RNA, 19 nt, Artificial Sequence
  Description of Artificial Sequence: Synthetic oligonucleotide
ugcucuugaguagauacug

SEQ ID NO: 2489428 - RNA, 19 nt, Artificial Sequence
  Description of Artificial Sequence: Synthetic oligonucleotide
agaaauuuuagcauccaaa

SEQ ID NO: 2489429 - RNA, 19 nt, Artificial Sequence
  Description of Artificial Sequence: Synthetic oligonucleotide
uguauuagagaaacaucuu

SEQ ID NO: 2489430 - RNA, 19 nt, Artificial Sequence
  Description of Artificial Sequence: Synthetic oligonucleotide
ucacuguucaagcuagaaa

SEQ ID NO: 2489431 - RNA, 19 nt, Artificial Sequence
  Description of Artificial Sequence: Synthetic oligonucleotide
auagaugguguuuguauau

SEQ ID NO: 2489432 - RNA, 19 nt, Artificial Sequence
  Description of Artificial Sequence: Synthetic oligonucleotide
auuacuugcuuuaaaguau

SEQ ID NO: 2489433 - RNA, 19 nt, Artificial Sequence
  Description of Artificial Sequence: Synthetic oligonucleotide
guugccaauauguauccca

SEQ ID NO: 2489434 - RNA, 19 nt, Artificial Sequence
  Description of Artificial Sequence: Synthetic oligonucleotide
ucggcuaauguuucuaauc

SEQ ID NO: 2489435 - RNA, 19 nt, Artificial Sequence
  Description of Artificial Sequence: Synthetic oligonucleotide
uucaugcuugaauuacuug

SEQ ID NO: 2489436 - RNA, 19 nt, Artificial Sequence
  Description of Artificial Sequence: Synthetic oligonucleotide
gaugaaaaugcuccauuaa

SEQ ID NO: 2489437 - RNA, 19 nt, Artificial Sequence
  Description of Artificial Sequence: Synthetic oligonucleotide
cauccaaauuuucuucacc

SEQ ID NO: 2489438 - RNA, 19 nt, Artificial Sequence
  Description of Artificial Sequence: Synthetic oligonucleotide
uguauaucuaagagcugaa

SEQ ID NO: 2489439 - RNA, 19 nt, Artificial Sequence
  Description of Artificial Sequence: Synthetic oligonucleotide
agaugguguuuguauaucu

SEQ ID NO: 2489440 - RNA, 19 nt, Artificial Sequence
  Description of Artificial Sequence: Synthetic oligonucleotide
acaagcucaaaugaugccu

SEQ ID NO: 2489441 - RNA, 19 nt, Artificial Sequence
  Description of Artificial Sequence: Synthetic oligonucleotide
ugauacaaagcaucacaaa

SEQ ID NO: 2489442 - RNA, 19 nt, Artificial Sequence
  Description of Artificial Sequence: Synthetic oligonucleotide
uguuucaauuucucagcca

SEQ ID NO: 2489443 - RNA, 19 nt, Artificial Sequence
  Description of Artificial Sequence: Synthetic oligonucleotide
ugaguagauacugccaacu

SEQ ID NO: 2489444 - RNA, 19 nt, Artificial Sequence
  Description of Artificial Sequence: Synthetic oligonucleotide
uguucaagcuagaaauuuu

SEQ ID NO: 2489445 - RNA, 19 nt, Artificial Sequence
  Description of Artificial Sequence: Synthetic oligonucleotide
uuacuugcuuuaaaguaua

SEQ ID NO: 2489446 - RNA, 19 nt, Artificial Sequence
  Description of Artificial Sequence: Synthetic oligonucleotide
cauggguuauaaacaauuc

SEQ ID NO: 2489447 - RNA, 19 nt, Artificial Sequence
  Description of Artificial Sequence: Synthetic oligonucleotide
aagcucaaaugaugccuuc

SEQ ID NO: 2489448 - RNA, 19 nt, Artificial Sequence
  Description of Artificial Sequence: Synthetic oligonucleotide
auuaucacaaauagauggu

SEQ ID NO: 2489449 - RNA, 19 nt, Artificial Sequence
  Description of Artificial Sequence: Synthetic oligonucleotide
uuaguguugaugggugucc

SEQ ID NO: 2489450 - RNA, 19 nt, Artificial Sequence
  Description of Artificial Sequence: Synthetic oligonucleotide
cuggaguuuaacugcucgg

SEQ ID NO: 2489451 - RNA, 19 nt, Artificial Sequence
  Description of Artificial Sequence: Synthetic oligonucleotide
ucaguaagaagaugauuua

SEQ ID NO: 2489452 - RNA, 19 nt, Artificial Sequence
  Description of Artificial Sequence: Synthetic oligonucleotide
uccauuaacuccugaucac

SEQ ID NO: 2489453 - RNA, 19 nt, Artificial Sequence
  Description of Artificial Sequence: Synthetic oligonucleotide
uucccuccgugauacaaag

SEQ ID NO: 2489454 - RNA, 19 nt, Artificial Sequence
  Description of Artificial Sequence: Synthetic oligonucleotide
guguauuagagaaacaucu

SEQ ID NO: 2489455 - RNA, 19 nt, Artificial Sequence
  Description of Artificial Sequence: Synthetic oligonucleotide
uacacuugacuucaugcuu

SEQ ID NO: 2489456 - RNA, 19 nt, Artificial Sequence
  Description of Artificial Sequence: Synthetic oligonucleotide
ugacagagcaucacauuuc

SEQ ID NO: 2489457 - RNA, 19 nt, Artificial Sequence
  Description of Artificial Sequence: Synthetic oligonucleotide
uugauggguguccuggagu

SEQ ID NO: 2489458 - RNA, 19 nt, Artificial Sequence
  Description of Artificial Sequence: Synthetic oligonucleotide
augaucuguuguugggcac

SEQ ID NO: 2489459 - RNA, 19 nt, Artificial Sequence
  Description of Artificial Sequence: Synthetic oligonucleotide
accaaauuuucaaguugcc

SEQ ID NO: 2489460 - RNA, 19 nt, Artificial Sequence
  Description of Artificial Sequence: Synthetic oligonucleotide
ugacuaaguuguugaacca

SEQ ID NO: 2489461 - RNA, 19 nt, Artificial Sequence
  Description of Artificial Sequence: Synthetic oligonucleotide
cuuacugucuccuucuaaa

SEQ ID NO: 2489462 - RNA, 19 nt, Artificial Sequence
  Description of Artificial Sequence: Synthetic oligonucleotide
cuugacuaaguuguugaac

SEQ ID NO: 2489463 - RNA, 19 nt, Artificial Sequence
  Description of Artificial Sequence: Synthetic oligonucleotide
uuauucaacuuagauucaa

SEQ ID NO: 2489464 - RNA, 19 nt, Artificial Sequence
  Description of Artificial Sequence: Synthetic oligonucleotide
augguguuuguauaucuaa

SEQ ID NO: 2489465 - RNA, 19 nt, Artificial Sequence
  Description of Artificial Sequence: Synthetic oligonucleotide
aauaaucuuuaguguugau

SEQ ID NO: 2489466 - RNA, 19 nt, Artificial Sequence
  Description of Artificial Sequence: Synthetic oligonucleotide
gacuucaugcuugaauuac

SEQ ID NO: 2489467 - RNA, 19 nt, Artificial Sequence
  Description of Artificial Sequence: Synthetic oligonucleotide
uugccaauauguaucccaa

SEQ ID NO: 2489468 - RNA, 19 nt, Artificial Sequence
  Description of Artificial Sequence: Synthetic oligonucleotide
caucacauuuccuugacua

SEQ ID NO: 2489469 - RNA, 19 nt, Artificial Sequence
  Description of Artificial Sequence: Synthetic oligonucleotide
cuccgugauacaaagcauc

SEQ ID NO: 2489470 - RNA, 19 nt, Artificial Sequence
  Description of Artificial Sequence: Synthetic oligonucleotide
acuugaugaaaaugcucca

SEQ ID NO: 2489471 - RNA, 19 nt, Artificial Sequence
  Description of Artificial Sequence: Synthetic oligonucleotide
ugauuguguauuagagaaa

SEQ ID NO: 2489472 - RNA, 19 nt, Artificial Sequence
  Description of Artificial Sequence: Synthetic oligonucleotide
uguccacaucauuauucag

SEQ ID NO: 2489473 - RNA, 19 nt, Artificial Sequence
  Description of Artificial Sequence: Synthetic oligonucleotide
caaggauuucuucauuauc

SEQ ID NO: 2489474 - RNA, 19 nt, Artificial Sequence
  Description of Artificial Sequence: Synthetic oligonucleotide
caacuuagauucaacuuga

SEQ ID NO: 2489475 - RNA, 19 nt, Artificial Sequence
  Description of Artificial Sequence: Synthetic oligonucleotide
aauagcugguucccuccgu

SEQ ID NO: 2489476 - RNA, 19 nt, Artificial Sequence
  Description of Artificial Sequence: Synthetic oligonucleotide
guugggcacagauguaugc

SEQ ID NO: 2489477 - RNA, 19 nt, Artificial Sequence
  Description of Artificial Sequence: Synthetic oligonucleotide
acuugcuuuaaaguauaug

SEQ ID NO: 2489478 - RNA, 19 nt, Artificial Sequence
  Description of Artificial Sequence: Synthetic oligonucleotide
uucuaaucgcugacagagc

SEQ ID NO: 2489479 - RNA, 19 nt, Artificial Sequence
  Description of Artificial Sequence: Synthetic oligonucleotide
agcaagaauaucaguaaga

SEQ ID NO: 2489480 - RNA, 19 nt, Artificial Sequence
  Description of Artificial Sequence: Synthetic oligonucleotide
uaaucgcugacagagcauc

SEQ ID NO: 2489481 - RNA, 19 nt, Artificial Sequence
  Description of Artificial Sequence: Synthetic oligonucleotide
uuauucaguuuggacagaa

SEQ ID NO: 2489482 - RNA, 19 nt, Artificial Sequence
  Description of Artificial Sequence: Synthetic oligonucleotide
cauuuuacacuugacuuca

SEQ ID NO: 2489483 - RNA, 19 nt, Artificial Sequence
  Description of Artificial Sequence: Synthetic oligonucleotide
cacuguucaagcuagaaau

SEQ ID NO: 2489484 - RNA, 19 nt, Artificial Sequence
  Description of Artificial Sequence: Synthetic oligonucleotide
cuaugaagauucucuucug

SEQ ID NO: 2489485 - RNA, 19 nt, Artificial Sequence
  Description of Artificial Sequence: Synthetic oligonucleotide
gaaacaucuuguuucaauu

SEQ ID NO: 2489486 - RNA, 19 nt, Artificial Sequence
  Description of Artificial Sequence: Synthetic oligonucleotide
auauguaucccaaugucuu

SEQ ID NO: 2489487 - RNA, 19 nt, Artificial Sequence
  Description of Artificial Sequence: Synthetic oligonucleotide
agcauguccacaucauuau

SEQ ID NO: 2489488 - RNA, 19 nt, Artificial Sequence
  Description of Artificial Sequence: Synthetic oligonucleotide
gguguuuguauaucuaaga

SEQ ID NO: 2489489 - RNA, 19 nt, Artificial Sequence
  Description of Artificial Sequence: Synthetic oligonucleotide
gaguagaauaaucuuuagu

SEQ ID NO: 2489490 - RNA, 19 nt, Artificial Sequence
  Description of Artificial Sequence: Synthetic oligonucleotide
uuuaacugcucgggugccg

SEQ ID NO: 2489491 - RNA, 19 nt, Artificial Sequence
  Description of Artificial Sequence: Synthetic oligonucleotide
gguuaggcuaugaagauuc

SEQ ID NO: 2489492 - RNA, 19 nt, Artificial Sequence
  Description of Artificial Sequence: Synthetic oligonucleotide
ugcuccauuaacuccugau

SEQ ID NO: 2489493 - RNA, 19 nt, Artificial Sequence
  Description of Artificial Sequence: Synthetic oligonucleotide
ucgaugguuaggcuaugaa

SEQ ID NO: 2489494 - RNA, 19 nt, Artificial Sequence
  Description of Artificial Sequence: Synthetic oligonucleotide
auagcugguucccuccgug

SEQ ID NO: 2489495 - RNA, 19 nt, Artificial Sequence
  Description of Artificial Sequence: Synthetic oligonucleotide
gaugccuucugaaucucac

SEQ ID NO: 2489496 - RNA, 19 nt, Artificial Sequence
  Description of Artificial Sequence: Synthetic oligonucleotide
cucgggugccgauggaucg

SEQ ID NO: 2489497 - RNA, 19 nt, Artificial Sequence
  Description of Artificial Sequence: Synthetic oligonucleotide
guugauggguguccuggag

SEQ ID NO: 2489498 - RNA, 19 nt, Artificial Sequence
  Description of Artificial Sequence: Synthetic oligonucleotide
ugaucuguuguugggcaca

SEQ ID NO: 2489499 - RNA, 19 nt, Artificial Sequence
  Description of Artificial Sequence: Synthetic oligonucleotide
ugcagccuagccaucucca

SEQ ID NO: 2489500 - RNA, 19 nt, Artificial Sequence
  Description of Artificial Sequence: Synthetic oligonucleotide
ugcagucugcagccuagcc

SEQ ID NO: 2489501 - RNA, 19 nt, Artificial Sequence
  Description of Artificial Sequence: Synthetic oligonucleotide
ccaaauuuucuucaccaac

SEQ ID NO: 2489502 - RNA, 19 nt, Artificial Sequence
  Description of Artificial Sequence: Synthetic oligonucleotide
aucacauuuccuugacuaa

SEQ ID NO: 2489503 - RNA, 19 nt, Artificial Sequence
  Description of Artificial Sequence: Synthetic oligonucleotide
augguuaggcuaugaagau

SEQ ID NO: 2489504 - RNA, 19 nt, Artificial Sequence
  Description of Artificial Sequence: Synthetic oligonucleotide
ucgcugacagagcaucaca

SEQ ID NO: 2489505 - RNA, 19 nt, Artificial Sequence
  Description of Artificial Sequence: Synthetic oligonucleotide
aguugccaauauguauccc

SEQ ID NO: 2489506 - RNA, 19 nt, Artificial Sequence
  Description of Artificial Sequence: Synthetic oligonucleotide
ugauggguguccuggaguu

SEQ ID NO: 2489507 - RNA, 19 nt, Artificial Sequence
  Description of Artificial Sequence: Synthetic oligonucleotide
acacuugacuucaugcuug

SEQ ID NO: 2489508 - RNA, 19 nt, Artificial Sequence
  Description of Artificial Sequence: Synthetic oligonucleotide
aucgcugacagagcaucac

SEQ ID NO: 2489509 - RNA, 19 nt, Artificial Sequence
  Description of Artificial Sequence: Synthetic oligonucleotide
ucgucucuccccaaggauu

SEQ ID NO: 2489510 - RNA, 19 nt, Artificial Sequence
  Description of Artificial Sequence: Synthetic oligonucleotide
caauagcugguucccuccg

SEQ ID NO: 2489511 - RNA, 19 nt, Artificial Sequence
  Description of Artificial Sequence: Synthetic oligonucleotide
uuaacugcucgggugccga

SEQ ID NO: 2489512 - RNA, 19 nt, Artificial Sequence
  Description of Artificial Sequence: Synthetic oligonucleotide
gcuaugaagauucucuucu

SEQ ID NO: 2489513 - RNA, 19 nt, Artificial Sequence
  Description of Artificial Sequence: Synthetic oligonucleotide
uagauucaacuugaugaaa

SEQ ID NO: 2489514 - RNA, 19 nt, Artificial Sequence
  Description of Artificial Sequence: Synthetic oligonucleotide
cggcuaauguuucuaaucg

SEQ ID NO: 2489515 - RNA, 19 nt, Artificial Sequence
  Description of Artificial Sequence: Synthetic oligonucleotide
ggcuaauguuucuaaucgc

SEQ ID NO: 2489516 - RNA, 19 nt, Artificial Sequence
  Description of Artificial Sequence: Synthetic oligonucleotide
acuaaguuguugaaccaaa

SEQ ID NO: 2489517 - RNA, 19 nt, Artificial Sequence
  Description of Artificial Sequence: Synthetic oligonucleotide
cugguucccuccgugauac

SEQ ID NO: 2489518 - RNA, 19 nt, Artificial Sequence
  Description of Artificial Sequence: Synthetic oligonucleotide
aucccaaugucuucucaau

SEQ ID NO: 2489519 - RNA, 19 nt, Artificial Sequence
  Description of Artificial Sequence: Synthetic oligonucleotide
gaaucucacuguucaagcu

SEQ ID NO: 2489520 - RNA, 19 nt, Artificial Sequence
  Description of Artificial Sequence: Synthetic oligonucleotide
aguguugauggguguccug

SEQ ID NO: 2489521 - RNA, 19 nt, Artificial Sequence
  Description of Artificial Sequence: Synthetic oligonucleotide
gacuaaguuguugaaccaa

SEQ ID NO: 2489522 - RNA, 19 nt, Artificial Sequence
  Description of Artificial Sequence: Synthetic oligonucleotide
auaucaguaagaagaugau

SEQ ID NO: 2489523 - RNA, 19 nt, Artificial Sequence
  Description of Artificial Sequence: Synthetic oligonucleotide
gaucggcuaauguuucuaa

SEQ ID NO: 2489524 - RNA, 19 nt, Artificial Sequence
  Description of Artificial Sequence: Synthetic oligonucleotide
gaucuguuguugggcacag

SEQ ID NO: 2489525 - RNA, 19 nt, Artificial Sequence
  Description of Artificial Sequence: Synthetic oligonucleotide
cuccugaucacaaagcaau

SEQ ID NO: 2489526 - RNA, 19 nt, Artificial Sequence
  Description of Artificial Sequence: Synthetic oligonucleotide
ucuucacaucagcaagaau

SEQ ID NO: 2489527 - RNA, 19 nt, Artificial Sequence
  Description of Artificial Sequence: Synthetic oligonucleotide
agucgucucuccccaagga

SEQ ID NO: 2489528 - RNA, 19 nt, Artificial Sequence
  Description of Artificial Sequence: Synthetic oligonucleotide
uccugaucacaaagcaaua

SEQ ID NO: 2489529 - RNA, 19 nt, Artificial Sequence
  Description of Artificial Sequence: Synthetic oligonucleotide
uagaugguguuuguauauc

SEQ ID NO: 2489530 - RNA, 19 nt, Artificial Sequence
  Description of Artificial Sequence: Synthetic oligonucleotide
gauggaucggcuaauguuu

SEQ ID NO: 2489531 - RNA, 19 nt, Artificial Sequence
  Description of Artificial Sequence: Synthetic oligonucleotide
auggaucggcuaauguuuc

SEQ ID NO: 2489532 - RNA, 19 nt, Artificial Sequence
  Description of Artificial Sequence: Synthetic oligonucleotide
ugccucgaugguuaggcua

SEQ ID NO: 2489533 - RNA, 19 nt, Artificial Sequence
  Description of Artificial Sequence: Synthetic oligonucleotide
aucggcuaauguuucuaau

SEQ ID NO: 2489534 - RNA, 19 nt, Artificial Sequence
  Description of Artificial Sequence: Synthetic oligonucleotide
gcacaagcucaaaugaugc

SEQ ID NO: 2489535 - RNA, 19 nt, Artificial Sequence
  Description of Artificial Sequence: Synthetic oligonucleotide
aacugccucgaugguuagg

SEQ ID NO: 2489536 - RNA, 19 nt, Artificial Sequence
  Description of Artificial Sequence: Synthetic oligonucleotide
uacuugcuuuaaaguauau

SEQ ID NO: 2489537 - RNA, 19 nt, Artificial Sequence
  Description of Artificial Sequence: Synthetic oligonucleotide
guucaagcuagaaauuuua

SEQ ID NO: 2489538 - RNA, 19 nt, Artificial Sequence
  Description of Artificial Sequence: Synthetic oligonucleotide
gcaauagcugguucccucc

SEQ ID NO: 2489539 - RNA, 19 nt, Artificial Sequence
  Description of Artificial Sequence: Synthetic oligonucleotide
auguuucuaaucgcugaca

SEQ ID NO: 2489540 - RNA, 19 nt, Artificial Sequence
  Description of Artificial Sequence: Synthetic oligonucleotide
ucuucaccaacugccucga

SEQ ID NO: 2489541 - RNA, 19 nt, Artificial Sequence
  Description of Artificial Sequence: Synthetic oligonucleotide
cgaugguuaggcuaugaag

SEQ ID NO: 2489542 - RNA, 19 nt, Artificial Sequence
  Description of Artificial Sequence: Synthetic oligonucleotide
aggcuaugaagauucucuu

SEQ ID NO: 2489543 - RNA, 19 nt, Artificial Sequence
  Description of Artificial Sequence: Synthetic oligonucleotide
cugcagccuagccaucucc

SEQ ID NO: 2489544 - RNA, 19 nt, Artificial Sequence
  Description of Artificial Sequence: Synthetic oligonucleotide
ccuaugaguagaauaaucu

SEQ ID NO: 2489545 - RNA, 19 nt, Artificial Sequence
  Description of Artificial Sequence: Synthetic oligonucleotide
gaugguguuuguauaucua

SEQ ID NO: 2489546 - RNA, 19 nt, Artificial Sequence
  Description of Artificial Sequence: Synthetic oligonucleotide
uuuccuugacuaaguuguu

SEQ ID NO: 2489547 - RNA, 19 nt, Artificial Sequence
  Description of Artificial Sequence: Synthetic oligonucleotide
aaucgcugacagagcauca

SEQ ID NO: 2489548 - RNA, 19 nt, Artificial Sequence
  Description of Artificial Sequence: Synthetic oligonucleotide
uggaucggcuaauguuucu

SEQ ID NO: 2489549 - RNA, 19 nt, Artificial Sequence
  Description of Artificial Sequence: Synthetic oligonucleotide
aagcaauagcugguucccu

SEQ ID NO: 2489550 - RNA, 19 nt, Artificial Sequence
  Description of Artificial Sequence: Synthetic oligonucleotide
cuaugaguagaauaaucuu

SEQ ID NO: 2489551 - RNA, 19 nt, Artificial Sequence
  Description of Artificial Sequence: Synthetic oligonucleotide
aacugcucgggugccgaug

SEQ ID NO: 2489552 - RNA, 19 nt, Artificial Sequence
  Description of Artificial Sequence: Synthetic oligonucleotide
augaugccuucugaaucuc

SEQ ID NO: 2489553 - RNA, 19 nt, Artificial Sequence
  Description of Artificial Sequence: Synthetic oligonucleotide
augcuugaauuacuugcuu

SEQ ID NO: 2489554 - RNA, 19 nt, Artificial Sequence
  Description of Artificial Sequence: Synthetic oligonucleotide
uaaagccuaugaguagaau

SEQ ID NO: 2489555 - RNA, 19 nt, Artificial Sequence
  Description of Artificial Sequence: Synthetic oligonucleotide
guuuaacugcucgggugcc

SEQ ID NO: 2489556 - RNA, 19 nt, Artificial Sequence
  Description of Artificial Sequence: Synthetic oligonucleotide
ccugaucacaaagcaauag

SEQ ID NO: 2489557 - RNA, 19 nt, Artificial Sequence
  Description of Artificial Sequence: Synthetic oligonucleotide
caaaugaugccuucugaau

SEQ ID NO: 2489558 - RNA, 19 nt, Artificial Sequence
  Description of Artificial Sequence: Synthetic oligonucleotide
ugccaauauguaucccaau

SEQ ID NO: 2489559 - RNA, 19 nt, Artificial Sequence
  Description of Artificial Sequence: Synthetic oligonucleotide
ucccuccgugauacaaagc

SEQ ID NO: 2489560 - RNA, 19 nt, Artificial Sequence
  Description of Artificial Sequence: Synthetic oligonucleotide
guaucccaaugucuucuca

SEQ ID NO: 2489561 - RNA, 19 nt, Artificial Sequence
  Description of Artificial Sequence: Synthetic oligonucleotide
uaguguugauggguguccu

SEQ ID NO: 2489562 - RNA, 19 nt, Artificial Sequence
  Description of Artificial Sequence: Synthetic oligonucleotide
cacaaagcauguccacauc

SEQ ID NO: 2489563 - RNA, 19 nt, Artificial Sequence
  Description of Artificial Sequence: Synthetic oligonucleotide
augcagucugcagccuagc

SEQ ID NO: 2489564 - RNA, 19 nt, Artificial Sequence
  Description of Artificial Sequence: Synthetic oligonucleotide
cuugaauuacuugcuuuaa

SEQ ID NO: 2489565 - RNA, 19 nt, Artificial Sequence
  Description of Artificial Sequence: Synthetic oligonucleotide
guauaucuaagagcugaaa

SEQ ID NO: 2489566 - RNA, 19 nt, Artificial Sequence
  Description of Artificial Sequence: Synthetic oligonucleotide
uccagguguucauggguua

SEQ ID NO: 2489567 - RNA, 19 nt, Artificial Sequence
  Description of Artificial Sequence: Synthetic oligonucleotide
agguguucauggguuauaa

SEQ ID NO: 2489568 - RNA, 19 nt, Artificial Sequence
  Description of Artificial Sequence: Synthetic oligonucleotide
caucauuauucaguuugga

SEQ ID NO: 2489569 - RNA, 19 nt, Artificial Sequence
  Description of Artificial Sequence: Synthetic oligonucleotide
cccuccgugauacaaagca

SEQ ID NO: 2489570 - RNA, 19 nt, Artificial Sequence
  Description of Artificial Sequence: Synthetic oligonucleotide
uguaugcagucugcagccu

SEQ ID NO: 2489571 - RNA, 19 nt, Artificial Sequence
  Description of Artificial Sequence: Synthetic oligonucleotide
auaacugcacaagcucaaa

SEQ ID NO: 2489572 - RNA, 19 nt, Artificial Sequence
  Description of Artificial Sequence: Synthetic oligonucleotide
uccuggaguuuaacugcuc

SEQ ID NO: 2489573 - RNA, 19 nt, Artificial Sequence
  Description of Artificial Sequence: Synthetic oligonucleotide
ugguuaggcuaugaagauu

SEQ ID NO: 2489574 - RNA, 19 nt, Artificial Sequence
  Description of Artificial Sequence: Synthetic oligonucleotide
acuguucaagcuagaaauu

SEQ ID NO: 2489575 - RNA, 19 nt, Artificial Sequence
  Description of Artificial Sequence: Synthetic oligonucleotide
caauucaauuucauaugau

SEQ ID NO: 2489576 - RNA, 19 nt, Artificial Sequence
  Description of Artificial Sequence: Synthetic oligonucleotide
ccaacugauuguguauuag

SEQ ID NO: 2489577 - RNA, 19 nt, Artificial Sequence
  Description of Artificial Sequence: Synthetic oligonucleotide
caucuccagucgucucucc

SEQ ID NO: 2489578 - RNA, 19 nt, Artificial Sequence
  Description of Artificial Sequence: Synthetic oligonucleotide
gccuaugaguagaauaauc

SEQ ID NO: 2489579 - RNA, 19 nt, Artificial Sequence
  Description of Artificial Sequence: Synthetic oligonucleotide
agccuaugaguagaauaau

SEQ ID NO: 2489580 - RNA, 19 nt, Artificial Sequence
  Description of Artificial Sequence: Synthetic oligonucleotide
gcaucacaaagcaugucca

SEQ ID NO: 2489581 - RNA, 19 nt, Artificial Sequence
  Description of Artificial Sequence: Synthetic oligonucleotide
gugccgauggaucggcuaa

SEQ ID NO: 2489582 - RNA, 19 nt, Artificial Sequence
  Description of Artificial Sequence: Synthetic oligonucleotide
cuucaugcuugaauuacuu

SEQ ID NO: 2489583 - RNA, 19 nt, Artificial Sequence
  Description of Artificial Sequence: Synthetic oligonucleotide
cacuugacuucaugcuuga

SEQ ID NO: 2489584 - RNA, 19 nt, Artificial Sequence
  Description of Artificial Sequence: Synthetic oligonucleotide
guaugcagucugcagccua

SEQ ID NO: 2489585 - RNA, 19 nt, Artificial Sequence
  Description of Artificial Sequence: Synthetic oligonucleotide
cagauguaugcagucugca

SEQ ID NO: 2489586 - RNA, 19 nt, Artificial Sequence
  Description of Artificial Sequence: Synthetic oligonucleotide
cuuuaguguugaugggugu

SEQ ID NO: 2489587 - RNA, 19 nt, Artificial Sequence
  Description of Artificial Sequence: Synthetic oligonucleotide
caaagcauguccacaucau

SEQ ID NO: 2489588 - RNA, 19 nt, Artificial Sequence
  Description of Artificial Sequence: Synthetic oligonucleotide
ccaaauuuucaaguugcca

SEQ ID NO: 2489589 - RNA, 19 nt, Artificial Sequence
  Description of Artificial Sequence: Synthetic oligonucleotide
gguguccuggaguuuaacu

SEQ ID NO: 2489590 - RNA, 19 nt, Artificial Sequence
  Description of Artificial Sequence: Synthetic oligonucleotide
accaacugccucgaugguu

SEQ ID NO: 2489591 - RNA, 19 nt, Artificial Sequence
  Description of Artificial Sequence: Synthetic oligonucleotide
uggguguccuggaguuuaa

SEQ ID NO: 2489592 - RNA, 19 nt, Artificial Sequence
  Description of Artificial Sequence: Synthetic oligonucleotide
gcucuugaguagauacugc

SEQ ID NO: 2489593 - RNA, 19 nt, Artificial Sequence
  Description of Artificial Sequence: Synthetic oligonucleotide
gcagccuagccaucuccag

SEQ ID NO: 2489594 - RNA, 19 nt, Artificial Sequence
  Description of Artificial Sequence: Synthetic oligonucleotide
caucagcaagaauaucagu

SEQ ID NO: 2489595 - RNA, 19 nt, Artificial Sequence
  Description of Artificial Sequence: Synthetic oligonucleotide
ccaauauguaucccaaugu

SEQ ID NO: 2489596 - RNA, 19 nt, Artificial Sequence
  Description of Artificial Sequence: Synthetic oligonucleotide
cuugaugaaaaugcuccau

SEQ ID NO: 2489597 - RNA, 19 nt, Artificial Sequence
  Description of Artificial Sequence: Synthetic oligonucleotide
caagcucaaaugaugccuu

SEQ ID NO: 2489598 - RNA, 19 nt, Artificial Sequence
  Description of Artificial Sequence: Synthetic oligonucleotide
ggaguuuaacugcucgggu

SEQ ID NO: 2489599 - RNA, 19 nt, Artificial Sequence
  Description of Artificial Sequence: Synthetic oligonucleotide
ccaacugccucgaugguua

SEQ ID NO: 2489600 - RNA, 19 nt, Artificial Sequence
  Description of Artificial Sequence: Synthetic oligonucleotide
gccuagccaucuccagucg

SEQ ID NO: 2489601 - RNA, 19 nt, Artificial Sequence
  Description of Artificial Sequence: Synthetic oligonucleotide
cuccuucuaaaaguugaua

SEQ ID NO: 2489602 - RNA, 19 nt, Artificial Sequence
  Description of Artificial Sequence: Synthetic oligonucleotide
guucccuccgugauacaaa

SEQ ID NO: 2489603 - RNA, 19 nt, Artificial Sequence
  Description of Artificial Sequence: Synthetic oligonucleotide
cugcucuugaguagauacu

SEQ ID NO: 2489604 - RNA, 19 nt, Artificial Sequence
  Description of Artificial Sequence: Synthetic oligonucleotide
cugcacaagcucaaaugau

SEQ ID NO: 2489605 - RNA, 19 nt, Artificial Sequence
  Description of Artificial Sequence: Synthetic oligonucleotide
gguguucauggguuauaaa

SEQ ID NO: 2489606 - RNA, 19 nt, Artificial Sequence
  Description of Artificial Sequence: Synthetic oligonucleotide
uaacugcucgggugccgau

SEQ ID NO: 2489607 - RNA, 19 nt, Artificial Sequence
  Description of Artificial Sequence: Synthetic oligonucleotide
ccauuaacuccugaucaca

SEQ ID NO: 2489608 - RNA, 19 nt, Artificial Sequence
  Description of Artificial Sequence: Synthetic oligonucleotide
ccagucgucucuccccaag

SEQ ID NO: 2489609 - RNA, 19 nt, Artificial Sequence
  Description of Artificial Sequence: Synthetic oligonucleotide
cuaaucgcugacagagcau

SEQ ID NO: 2489610 - RNA, 19 nt, Artificial Sequence
  Description of Artificial Sequence: Synthetic oligonucleotide
gucgucucuccccaaggau

SEQ ID NO: 2489611 - RNA, 19 nt, Artificial Sequence
  Description of Artificial Sequence: Synthetic oligonucleotide
agauucucuucugcccauu

SEQ ID NO: 2489612 - RNA, 19 nt, Artificial Sequence
  Description of Artificial Sequence: Synthetic oligonucleotide
ugccgauggaucggcuaau

SEQ ID NO: 2489613 - RNA, 19 nt, Artificial Sequence
  Description of Artificial Sequence: Synthetic oligonucleotide
cugccaacugauuguguau

SEQ ID NO: 2489614 - RNA, 19 nt, Artificial Sequence
  Description of Artificial Sequence: Synthetic oligonucleotide
ggugccgauggaucggcua

SEQ ID NO: 2489615 - RNA, 19 nt, Artificial Sequence
  Description of Artificial Sequence: Synthetic oligonucleotide
ugguucccuccgugauaca

SEQ ID NO: 2489616 - RNA, 19 nt, Artificial Sequence
  Description of Artificial Sequence: Synthetic oligonucleotide
ggaucggcuaauguuucua

SEQ ID NO: 2489617 - RNA, 19 nt, Artificial Sequence
  Description of Artificial Sequence: Synthetic oligonucleotide
gccaacugauuguguauua

SEQ ID NO: 2489618 - RNA, 19 nt, Artificial Sequence
  Description of Artificial Sequence: Synthetic oligonucleotide
ccuugacuaaguuguugaa

SEQ ID NO: 2489619 - RNA, 19 nt, Artificial Sequence
  Description of Artificial Sequence: Synthetic oligonucleotide
cagccuagccaucuccagu

SEQ ID NO: 2489620 - RNA, 19 nt, Artificial Sequence
  Description of Artificial Sequence: Synthetic oligonucleotide
guuaggcuaugaagauucu

SEQ ID NO: 2489621 - RNA, 19 nt, Artificial Sequence
  Description of Artificial Sequence: Synthetic oligonucleotide
gucugcagccuagccaucu

SEQ ID NO: 2489622 - RNA, 19 nt, Artificial Sequence
  Description of Artificial Sequence: Synthetic oligonucleotide
gccgauggaucggcuaaug

SEQ ID NO: 2489623 - RNA, 19 nt, Artificial Sequence
  Description of Artificial Sequence: Synthetic oligonucleotide
ccaaggauuucuucauuau

SEQ ID NO: 2489624 - RNA, 19 nt, Artificial Sequence
  Description of Artificial Sequence: Synthetic oligonucleotide
gcucgggugccgauggauc

SEQ ID NO: 2489625 - RNA, 19 nt, Artificial Sequence
  Description of Artificial Sequence: Synthetic oligonucleotide
gcugguucccuccgugaua

SEQ ID NO: 2489626 - RNA, 19 nt, Artificial Sequence
  Description of Artificial Sequence: Synthetic oligonucleotide
ccaucuccagucgucucuc

SEQ ID NO: 2489627 - RNA, 19 nt, Artificial Sequence
  Description of Artificial Sequence: Synthetic oligonucleotide
ggguguccuggaguuuaac

SEQ ID NO: 2489628 - RNA, 19 nt, Artificial Sequence
  Description of Artificial Sequence: Synthetic oligonucleotide
gcauguccacaucauuauu

SEQ ID NO: 2489629 - RNA, 19 nt, Artificial Sequence
  Description of Artificial Sequence: Synthetic oligonucleotide
cugccucgaugguuaggcu

SEQ ID NO: 2489630 - RNA, 19 nt, Artificial Sequence
  Description of Artificial Sequence: Synthetic oligonucleotide
ccuccgugauacaaagcau

SEQ ID NO: 2489631 - RNA, 19 nt, Artificial Sequence
  Description of Artificial Sequence: Synthetic oligonucleotide
cugcucgggugccgaugga

SEQ ID NO: 2489632 - RNA, 19 nt, Artificial Sequence
  Description of Artificial Sequence: Synthetic oligonucleotide
caccaacugccucgauggu

SEQ ID NO: 2489633 - RNA, 19 nt, Artificial Sequence
  Description of Artificial Sequence: Synthetic oligonucleotide
ccgauggaucggcuaaugu

SEQ ID NO: 2489634 - RNA, 19 nt, Artificial Sequence
  Description of Artificial Sequence: Synthetic oligonucleotide
ccuagccaucuccagucgu

SEQ ID NO: 2489635 - RNA, 19 nt, Artificial Sequence
  Description of Artificial Sequence: Synthetic oligonucleotide
ccucgaugguuaggcuaug

SEQ ID NO: 2489636 - RNA, 19 nt, Artificial Sequence
  Description of Artificial Sequence: Synthetic oligonucleotide
cgggugccgauggaucggc

SEQ ID NO: 2489637 - RNA, 19 nt, Artificial Sequence
  Description of Artificial Sequence: Synthetic oligonucleotide
cgucucuccccaaggauuu

SEQ ID NO: 2489638 - RNA, 19 nt, Artificial Sequence
  Description of Artificial Sequence: Synthetic oligonucleotide
ccagguguucauggguuau

SEQ ID NO: 2489639 - RNA, 19 nt, Artificial Sequence
  Description of Artificial Sequence: Synthetic oligonucleotide
ccccaaggauuucuucauu

SEQ ID NO: 2489640 - RNA, 19 nt, Artificial Sequence
  Description of Artificial Sequence: Synthetic oligonucleotide
gggugccgauggaucggcu

SEQ ID NO: 2489641 - RNA, 19 nt, Artificial Sequence
  Description of Artificial Sequence: Synthetic oligonucleotide
uaggucagaacacaggucg

SEQ ID NO: 2489642 - RNA, 19 nt, Artificial Sequence
  Description of Artificial Sequence: Synthetic oligonucleotide
aguuguuccucccagggcc

SEQ ID NO: 2489643 - RNA, 19 nt, Artificial Sequence
  Description of Artificial Sequence: Synthetic oligonucleotide
auuuaguucagccuccggg

SEQ ID NO: 2489644 - RNA, 19 nt, Artificial Sequence
  Description of Artificial Sequence: Synthetic oligonucleotide
gaaacgguggcgucgaugg

SEQ ID NO: 2489645 - RNA, 19 nt, Artificial Sequence
  Description of Artificial Sequence: Synthetic oligonucleotide
ugacacguggacacgaacg

SEQ ID NO: 2489646 - RNA, 19 nt, Artificial Sequence
  Description of Artificial Sequence: Synthetic oligonucleotide
ucuaggucagaacacaggu

SEQ ID NO: 2489647 - RNA, 19 nt, Artificial Sequence
  Description of Artificial Sequence: Synthetic oligonucleotide
aauuccaguaccucggcgu

SEQ ID NO: 2489648 - RNA, 19 nt, Artificial Sequence
  Description of Artificial Sequence: Synthetic oligonucleotide
gauguagguaccaaauccg

SEQ ID NO: 2489649 - RNA, 19 nt, Artificial Sequence
  Description of Artificial Sequence: Synthetic oligonucleotide
aaccgucaauuccaguacc

SEQ ID NO: 2489650 - RNA, 19 nt, Artificial Sequence
  Description of Artificial Sequence: Synthetic oligonucleotide
gaacguguguaccucaugc

SEQ ID NO: 2489651 - RNA, 19 nt, Artificial Sequence
  Description of Artificial Sequence: Synthetic oligonucleotide
agacuuaggaauggcagcc

SEQ ID NO: 2489652 - RNA, 19 nt, Artificial Sequence
  Description of Artificial Sequence: Synthetic oligonucleotide
uccacuaggggcuuccggg

SEQ ID NO: 2489653 - RNA, 19 nt, Artificial Sequence
  Description of Artificial Sequence: Synthetic oligonucleotide
uucuaggucagaacacagg

SEQ ID NO: 2489654 - RNA, 19 nt, Artificial Sequence
  Description of Artificial Sequence: Synthetic oligonucleotide
guagguaccaaauccggcc

SEQ ID NO: 2489655 - RNA, 19 nt, Artificial Sequence
  Description of Artificial Sequence: Synthetic oligonucleotide
aauggggacccuggaaucc

SEQ ID NO: 2489656 - RNA, 19 nt, Artificial Sequence
  Description of Artificial Sequence: Synthetic oligonucleotide
cacaucaucugacacuugg

SEQ ID NO: 2489657 - RNA, 19 nt, Artificial Sequence
  Description of Artificial Sequence: Synthetic oligonucleotide
ugccuaaggauguagguac

SEQ ID NO: 2489658 - RNA, 19 nt, Artificial Sequence
  Description of Artificial Sequence: Synthetic oligonucleotide
uggagacucucguugaucc

SEQ ID NO: 2489659 - RNA, 19 nt, Artificial Sequence
  Description of Artificial Sequence: Synthetic oligonucleotide
uggacaauggggacccugg

SEQ ID NO: 2489660 - RNA, 19 nt, Artificial Sequence
  Description of Artificial Sequence: Synthetic oligonucleotide
ggauguagguaccaaaucc

SEQ ID NO: 2489661 - RNA, 19 nt, Artificial Sequence
  Description of Artificial Sequence: Synthetic oligonucleotide
uguagguaccaaauccggc

SEQ ID NO: 2489662 - RNA, 19 nt, Artificial Sequence
  Description of Artificial Sequence: Synthetic oligonucleotide
guagacuuaggaauggcag

SEQ ID NO: 2489663 - RNA, 19 nt, Artificial Sequence
  Description of Artificial Sequence: Synthetic oligonucleotide
ucuagcuuggucugcaccu

SEQ ID NO: 2489664 - RNA, 19 nt, Artificial Sequence
  Description of Artificial Sequence: Synthetic oligonucleotide
ucaggaguucagcugaaac

SEQ ID NO: 2489665 - RNA, 19 nt, Artificial Sequence
  Description of Artificial Sequence: Synthetic oligonucleotide
uuggucugcaccucggugc

SEQ ID NO: 2489666 - RNA, 19 nt, Artificial Sequence
  Description of Artificial Sequence: Synthetic oligonucleotide
aggauguagguaccaaauc

SEQ ID NO: 2489667 - RNA, 19 nt, Artificial Sequence
  Description of Artificial Sequence: Synthetic oligonucleotide
ucuagcaggugguucagga

SEQ ID NO: 2489668 - RNA, 19 nt, Artificial Sequence
  Description of Artificial Sequence: Synthetic oligonucleotide
ugguuaguguuguugguca

SEQ ID NO: 2489669 - RNA, 19 nt, Artificial Sequence
  Description of Artificial Sequence: Synthetic oligonucleotide
ucgauggcuugacacgugg

SEQ ID NO: 2489670 - RNA, 19 nt, Artificial Sequence
  Description of Artificial Sequence: Synthetic oligonucleotide
agacacccgauuuaguuca

SEQ ID NO: 2489671 - RNA, 19 nt, Artificial Sequence
  Description of Artificial Sequence: Synthetic oligonucleotide
gucaauuccaguaccucgg

SEQ ID NO: 2489672 - RNA, 19 nt, Artificial Sequence
  Description of Artificial Sequence: Synthetic oligonucleotide
aauccggccccucagcaga

SEQ ID NO: 2489673 - RNA, 19 nt, Artificial Sequence
  Description of Artificial Sequence: Synthetic oligonucleotide
uguaccucaugcaugcaau

SEQ ID NO: 2489674 - RNA, 19 nt, Artificial Sequence
  Description of Artificial Sequence: Synthetic oligonucleotide
uagguaccaaauccggccc

SEQ ID NO: 2489675 - RNA, 19 nt, Artificial Sequence
  Description of Artificial Sequence: Synthetic oligonucleotide
gauggcuugacacguggac

SEQ ID NO: 2489676 - RNA, 19 nt, Artificial Sequence
  Description of Artificial Sequence: Synthetic oligonucleotide
uaccucaugcaugcaaugg

SEQ ID NO: 2489677 - RNA, 19 nt, Artificial Sequence
  Description of Artificial Sequence: Synthetic oligonucleotide
aaauccggccccucagcag

SEQ ID NO: 2489678 - RNA, 19 nt, Artificial Sequence
  Description of Artificial Sequence: Synthetic oligonucleotide
aacguguguaccucaugca

SEQ ID NO: 2489679 - RNA, 19 nt, Artificial Sequence
  Description of Artificial Sequence: Synthetic oligonucleotide
guguguaccucaugcaugc

SEQ ID NO: 2489680 - RNA, 19 nt, Artificial Sequence
  Description of Artificial Sequence: Synthetic oligonucleotide
uaaggauguagguaccaaa

SEQ ID NO: 2489681 - RNA, 19 nt, Artificial Sequence
  Description of Artificial Sequence: Synthetic oligonucleotide
guuguuggucaccaaggcc

SEQ ID NO: 2489682 - RNA, 19 nt, Artificial Sequence
  Description of Artificial Sequence: Synthetic oligonucleotide
gaaccgucaauuccaguac

SEQ ID NO: 2489683 - RNA, 19 nt, Artificial Sequence
  Description of Artificial Sequence: Synthetic oligonucleotide
gauguagccagcagcgaag

SEQ ID NO: 2489684 - RNA, 19 nt, Artificial Sequence
  Description of Artificial Sequence: Synthetic oligonucleotide
ucaauuccaguaccucggc

SEQ ID NO: 2489685 - RNA, 19 nt, Artificial Sequence
  Description of Artificial Sequence: Synthetic oligonucleotide
uucccagcgguccucgucc

SEQ ID NO: 2489686 - RNA, 19 nt, Artificial Sequence
  Description of Artificial Sequence: Synthetic oligonucleotide
agcggcauggacucuagca

SEQ ID NO: 2489687 - RNA, 19 nt, Artificial Sequence
  Description of Artificial Sequence: Synthetic oligonucleotide
cuucuaggucagaacacag

SEQ ID NO: 2489688 - RNA, 19 nt, Artificial Sequence
  Description of Artificial Sequence: Synthetic oligonucleotide
aguucagcugaaacggugg

SEQ ID NO: 2489689 - RNA, 19 nt, Artificial Sequence
  Description of Artificial Sequence: Synthetic oligonucleotide
ucggcguucucuagcuugg

SEQ ID NO: 2489690 - RNA, 19 nt, Artificial Sequence
  Description of Artificial Sequence: Synthetic oligonucleotide
acucucguugauccgcgcg

SEQ ID NO: 2489691 - RNA, 19 nt, Artificial Sequence
  Description of Artificial Sequence: Synthetic oligonucleotide
cacccgauuuaguucagcc

SEQ ID NO: 2489692 - RNA, 19 nt, Artificial Sequence
  Description of Artificial Sequence: Synthetic oligonucleotide
gacucuagcaggugguuca

SEQ ID NO: 2489693 - RNA, 19 nt, Artificial Sequence
  Description of Artificial Sequence: Synthetic oligonucleotide
agguaccaaauccggcccc

SEQ ID NO: 2489694 - RNA, 19 nt, Artificial Sequence
  Description of Artificial Sequence: Synthetic oligonucleotide
aaacgguggcgucgauggc

SEQ ID NO: 2489695 - RNA, 19 nt, Artificial Sequence
  Description of Artificial Sequence: Synthetic oligonucleotide
aacacaggucguccccggg

SEQ ID NO: 2489696 - RNA, 19 nt, Artificial Sequence
  Description of Artificial Sequence: Synthetic oligonucleotide
uuaguucagccuccgggac

SEQ ID NO: 2489697 - RNA, 19 nt, Artificial Sequence
  Description of Artificial Sequence: Synthetic oligonucleotide
uggcuugacacguggacac

SEQ ID NO: 2489698 - RNA, 19 nt, Artificial Sequence
  Description of Artificial Sequence: Synthetic oligonucleotide
gagggagugguagacuuag

SEQ ID NO: 2489699 - RNA, 19 nt, Artificial Sequence
  Description of Artificial Sequence: Synthetic oligonucleotide
ucaggcugccuaaggaugu

SEQ ID NO: 2489700 - RNA, 19 nt, Artificial Sequence
  Description of Artificial Sequence: Synthetic oligonucleotide
guagccagcagcgaagcgc

SEQ ID NO: 2489701 - RNA, 19 nt, Artificial Sequence
  Description of Artificial Sequence: Synthetic oligonucleotide
gaagcgcucgcucgcuucg

SEQ ID NO: 2489702 - RNA, 19 nt, Artificial Sequence
  Description of Artificial Sequence: Synthetic oligonucleotide
ugucugcacaucaucugac

SEQ ID NO: 2489703 - RNA, 19 nt, Artificial Sequence
  Description of Artificial Sequence: Synthetic oligonucleotide
uguagccagcagcgaagcg

SEQ ID NO: 2489704 - RNA, 19 nt, Artificial Sequence
  Description of Artificial Sequence: Synthetic oligonucleotide
gagacucucguugauccgc

SEQ ID NO: 2489705 - RNA, 19 nt, Artificial Sequence
  Description of Artificial Sequence: Synthetic oligonucleotide
accucaugcaugcaaugga

SEQ ID NO: 2489706 - RNA, 19 nt, Artificial Sequence
  Description of Artificial Sequence: Synthetic oligonucleotide
caugcaauggauguagcca

SEQ ID NO: 2489707 - RNA, 19 nt, Artificial Sequence
  Description of Artificial Sequence: Synthetic oligonucleotide
acuuaggaauggcagccca

SEQ ID NO: 2489708 - RNA, 19 nt, Artificial Sequence
  Description of Artificial Sequence: Synthetic oligonucleotide
gaccaguuguuccucccag

SEQ ID NO: 2489709 - RNA, 19 nt, Artificial Sequence
  Description of Artificial Sequence: Synthetic oligonucleotide
uaguucagccuccgggacc

SEQ ID NO: 2489710 - RNA, 19 nt, Artificial Sequence
  Description of Artificial Sequence: Synthetic oligonucleotide
acacaggucguccccgggg

SEQ ID NO: 2489711 - RNA, 19 nt, Artificial Sequence
  Description of Artificial Sequence: Synthetic oligonucleotide
gacacuuggggagggagug

SEQ ID NO: 2489712 - RNA, 19 nt, Artificial Sequence
  Description of Artificial Sequence: Synthetic oligonucleotide
cucaugcaugcaauggaug

SEQ ID NO: 2489713 - RNA, 19 nt, Artificial Sequence
  Description of Artificial Sequence: Synthetic oligonucleotide
ugcaauggauguagccagc

SEQ ID NO: 2489714 - RNA, 19 nt, Artificial Sequence
  Description of Artificial Sequence: Synthetic oligonucleotide
caauuccaguaccucggcg

SEQ ID NO: 2489715 - RNA, 19 nt, Artificial Sequence
  Description of Artificial Sequence: Synthetic oligonucleotide
uccacaggucccugguuag

SEQ ID NO: 2489716 - RNA, 19 nt, Artificial Sequence
  Description of Artificial Sequence: Synthetic oligonucleotide
cagacacccgauuuaguuc

SEQ ID NO: 2489717 - RNA, 19 nt, Artificial Sequence
  Description of Artificial Sequence: Synthetic oligonucleotide
cuccuggagacucucguug

SEQ ID NO: 2489718 - RNA, 19 nt, Artificial Sequence
  Description of Artificial Sequence: Synthetic oligonucleotide
gaguucagcugaaacggug

SEQ ID NO: 2489719 - RNA, 19 nt, Artificial Sequence
  Description of Artificial Sequence: Synthetic oligonucleotide
gaacacaggucguccccgg

SEQ ID NO: 2489720 - RNA, 19 nt, Artificial Sequence
  Description of Artificial Sequence: Synthetic oligonucleotide
agcagcgaagcgcucgcuc

SEQ ID NO: 2489721 - RNA, 19 nt, Artificial Sequence
  Description of Artificial Sequence: Synthetic oligonucleotide
cucucguugauccgcgcgc

SEQ ID NO: 2489722 - RNA, 19 nt, Artificial Sequence
  Description of Artificial Sequence: Synthetic oligonucleotide
ugcaugcaauggauguagc

SEQ ID NO: 2489723 - RNA, 19 nt, Artificial Sequence
  Description of Artificial Sequence: Synthetic oligonucleotide
ugacacuuggggagggagu

SEQ ID NO: 2489724 - RNA, 19 nt, Artificial Sequence
  Description of Artificial Sequence: Synthetic oligonucleotide
aucccggaagcugcuaccc

SEQ ID NO: 2489725 - RNA, 19 nt, Artificial Sequence
  Description of Artificial Sequence: Synthetic oligonucleotide
agcccagcuagggaguccc

SEQ ID NO: 2489726 - RNA, 19 nt, Artificial Sequence
  Description of Artificial Sequence: Synthetic oligonucleotide
cuaggucagaacacagguc

SEQ ID NO: 2489727 - RNA, 19 nt, Artificial Sequence
  Description of Artificial Sequence: Synthetic oligonucleotide
gaucccggaagcugcuacc

SEQ ID NO: 2489728 - RNA, 19 nt, Artificial Sequence
  Description of Artificial Sequence: Synthetic oligonucleotide
acguguguaccucaugcau

SEQ ID NO: 2489729 - RNA, 19 nt, Artificial Sequence
  Description of Artificial Sequence: Synthetic oligonucleotide
agcugaaacgguggcgucg

SEQ ID NO: 2489730 - RNA, 19 nt, Artificial Sequence
  Description of Artificial Sequence: Synthetic oligonucleotide
ugaaacgguggcgucgaug

SEQ ID NO: 2489731 - RNA, 19 nt, Artificial Sequence
  Description of Artificial Sequence: Synthetic oligonucleotide
ucucguugauccgcgcgcg

SEQ ID NO: 2489732 - RNA, 19 nt, Artificial Sequence
  Description of Artificial Sequence: Synthetic oligonucleotide
acccgauuuaguucagccu

SEQ ID NO: 2489733 - RNA, 19 nt, Artificial Sequence
  Description of Artificial Sequence: Synthetic oligonucleotide
uaccucggcguucucuagc

SEQ ID NO: 2489734 - RNA, 19 nt, Artificial Sequence
  Description of Artificial Sequence: Synthetic oligonucleotide
ucaccaaggccuccacaca

SEQ ID NO: 2489735 - RNA, 19 nt, Artificial Sequence
  Description of Artificial Sequence: Synthetic oligonucleotide
cuuggucugcaccucggug

SEQ ID NO: 2489736 - RNA, 19 nt, Artificial Sequence
  Description of Artificial Sequence: Synthetic oligonucleotide
ucgcgcagcggcauggacu

SEQ ID NO: 2489737 - RNA, 19 nt, Artificial Sequence
  Description of Artificial Sequence: Synthetic oligonucleotide
aguaccucggcguucucua

SEQ ID NO: 2489738 - RNA, 19 nt, Artificial Sequence
  Description of Artificial Sequence: Synthetic oligonucleotide
gucagaacacaggucgucc

SEQ ID NO: 2489739 - RNA, 19 nt, Artificial Sequence
  Description of Artificial Sequence: Synthetic oligonucleotide
uccuggagacucucguuga

SEQ ID NO: 2489740 - RNA, 19 nt, Artificial Sequence
  Description of Artificial Sequence: Synthetic oligonucleotide
caccaaggccuccacacac

SEQ ID NO: 2489741 - RNA, 19 nt, Artificial Sequence
  Description of Artificial Sequence: Synthetic oligonucleotide
gacacgaacguguguaccu

SEQ ID NO: 2489742 - RNA, 19 nt, Artificial Sequence
  Description of Artificial Sequence: Synthetic oligonucleotide
caauggggacccuggaauc

SEQ ID NO: 2489743 - RNA, 19 nt, Artificial Sequence
  Description of Artificial Sequence: Synthetic oligonucleotide
gcaugcaauggauguagcc

SEQ ID NO: 2489744 - RNA, 19 nt, Artificial Sequence
  Description of Artificial Sequence: Synthetic oligonucleotide
agcuccuggagacucucgu

SEQ ID NO: 2489745 - RNA, 19 nt, Artificial Sequence
  Description of Artificial Sequence: Synthetic oligonucleotide
cccgauuuaguucagccuc

SEQ ID NO: 2489746 - RNA, 19 nt, Artificial Sequence
  Description of Artificial Sequence: Synthetic oligonucleotide
acacgaacguguguaccuc

SEQ ID NO: 2489747 - RNA, 19 nt, Artificial Sequence
  Description of Artificial Sequence: Synthetic oligonucleotide
cccugguuaguguuguugg

SEQ ID NO: 2489748 - RNA, 19 nt, Artificial Sequence
  Description of Artificial Sequence: Synthetic oligonucleotide
cugguuaguguuguugguc

SEQ ID NO: 2489749 - RNA, 19 nt, Artificial Sequence
  Description of Artificial Sequence: Synthetic oligonucleotide
gcagcgaagcgcucgcucg

SEQ ID NO: 2489750 - RNA, 19 nt, Artificial Sequence
  Description of Artificial Sequence: Synthetic oligonucleotide
agaccaguuguuccuccca

SEQ ID NO: 2489751 - RNA, 19 nt, Artificial Sequence
  Description of Artificial Sequence: Synthetic oligonucleotide
cgucaauuccaguaccucg

SEQ ID NO: 2489752 - RNA, 19 nt, Artificial Sequence
  Description of Artificial Sequence: Synthetic oligonucleotide
gucaggcugccuaaggaug

SEQ ID NO: 2489753 - RNA, 19 nt, Artificial Sequence
  Description of Artificial Sequence: Synthetic oligonucleotide
ccaguuguuccucccaggg

SEQ ID NO: 2489754 - RNA, 19 nt, Artificial Sequence
  Description of Artificial Sequence: Synthetic oligonucleotide
gcggcauggacucuagcag

SEQ ID NO: 2489755 - RNA, 19 nt, Artificial Sequence
  Description of Artificial Sequence: Synthetic oligonucleotide
caguuguuccucccagggc

SEQ ID NO: 2489756 - RNA, 19 nt, Artificial Sequence
  Description of Artificial Sequence: Synthetic oligonucleotide
acacccgauuuaguucagc

SEQ ID NO: 2489757 - RNA, 19 nt, Artificial Sequence
  Description of Artificial Sequence: Synthetic oligonucleotide
gacuuaggaauggcagccc

SEQ ID NO: 2489758 - RNA, 19 nt, Artificial Sequence
  Description of Artificial Sequence: Synthetic oligonucleotide
ggcgucgauggcuugacac

SEQ ID NO: 2489759 - RNA, 19 nt, Artificial Sequence
  Description of Artificial Sequence: Synthetic oligonucleotide
gggagugguagacuuagga

SEQ ID NO: 2489760 - RNA, 19 nt, Artificial Sequence
  Description of Artificial Sequence: Synthetic oligonucleotide
gaaucccuccgggagacca

SEQ ID NO: 2489761 - RNA, 19 nt, Artificial Sequence
  Description of Artificial Sequence: Synthetic oligonucleotide
aagcugcuacccucgcgca

SEQ ID NO: 2489762 - RNA, 19 nt, Artificial Sequence
  Description of Artificial Sequence: Synthetic oligonucleotide
cugacacuuggggagggag

SEQ ID NO: 2489763 - RNA, 19 nt, Artificial Sequence
  Description of Artificial Sequence: Synthetic oligonucleotide
cacacacugggccaggcga

SEQ ID NO: 2489764 - RNA, 19 nt, Artificial Sequence
  Description of Artificial Sequence: Synthetic oligonucleotide
cacaggucguccccggggc

SEQ ID NO: 2489765 - RNA, 19 nt, Artificial Sequence
  Description of Artificial Sequence: Synthetic oligonucleotide
gacacguggacacgaacgu

SEQ ID NO: 2489766 - RNA, 19 nt, Artificial Sequence
  Description of Artificial Sequence: Synthetic oligonucleotide
cuccgggaccucuucuagg

SEQ ID NO: 2489767 - RNA, 19 nt, Artificial Sequence
  Description of Artificial Sequence: Synthetic oligonucleotide
ccuggaaucccuccgggag

SEQ ID NO: 2489768 - RNA, 19 nt, Artificial Sequence
  Description of Artificial Sequence: Synthetic oligonucleotide
uguacgcgccgaaccguca

SEQ ID NO: 2489769 - RNA, 19 nt, Artificial Sequence
  Description of Artificial Sequence: Synthetic oligonucleotide
ggagugguagacuuaggaa

SEQ ID NO: 2489770 - RNA, 19 nt, Artificial Sequence
  Description of Artificial Sequence: Synthetic oligonucleotide
gcgucgauggcuugacacg

SEQ ID NO: 2489771 - RNA, 19 nt, Artificial Sequence
  Description of Artificial Sequence: Synthetic oligonucleotide
accucggcguucucuagcu

SEQ ID NO: 2489772 - RNA, 19 nt, Artificial Sequence
  Description of Artificial Sequence: Synthetic oligonucleotide
ucguugauccgcgcgcgcc

SEQ ID NO: 2489773 - RNA, 19 nt, Artificial Sequence
  Description of Artificial Sequence: Synthetic oligonucleotide
auuccaguaccucggcguu

SEQ ID NO: 2489774 - RNA, 19 nt, Artificial Sequence
  Description of Artificial Sequence: Synthetic oligonucleotide
agacucucguugauccgcg

SEQ ID NO: 2489775 - RNA, 19 nt, Artificial Sequence
  Description of Artificial Sequence: Synthetic oligonucleotide
ggaauggcagcccacccuc

SEQ ID NO: 2489776 - RNA, 19 nt, Artificial Sequence
  Description of Artificial Sequence: Synthetic oligonucleotide
acuaggggcuuccgggccu

SEQ ID NO: 2489777 - RNA, 19 nt, Artificial Sequence
  Description of Artificial Sequence: Synthetic oligonucleotide
gucugcaccucggugccgg

SEQ ID NO: 2489778 - RNA, 19 nt, Artificial Sequence
  Description of Artificial Sequence: Synthetic oligonucleotide
gagacaugguccgcagcgc

SEQ ID NO: 2489779 - RNA, 19 nt, Artificial Sequence
  Description of Artificial Sequence: Synthetic oligonucleotide
ggagacucucguugauccg

SEQ ID NO: 2489780 - RNA, 19 nt, Artificial Sequence
  Description of Artificial Sequence: Synthetic oligonucleotide
ccucuucuaggucagaaca

SEQ ID NO: 2489781 - RNA, 19 nt, Artificial Sequence
  Description of Artificial Sequence: Synthetic oligonucleotide
cacuaggggcuuccgggcc

SEQ ID NO: 2489782 - RNA, 19 nt, Artificial Sequence
  Description of Artificial Sequence: Synthetic oligonucleotide
gcuacccucgcgcagcggc

SEQ ID NO: 2489783 - RNA, 19 nt, Artificial Sequence
  Description of Artificial Sequence: Synthetic oligonucleotide
gguagacuuaggaauggca

SEQ ID NO: 2489784 - RNA, 19 nt, Artificial Sequence
  Description of Artificial Sequence: Synthetic oligonucleotide
guguaccucaugcaugcaa

SEQ ID NO: 2489785 - RNA, 19 nt, Artificial Sequence
  Description of Artificial Sequence: Synthetic oligonucleotide
aaucccuccgggagaccag

SEQ ID NO: 2489786 - RNA, 19 nt, Artificial Sequence
  Description of Artificial Sequence: Synthetic oligonucleotide
gcucgcuucggccugcagc

SEQ ID NO: 2489787 - RNA, 19 nt, Artificial Sequence
  Description of Artificial Sequence: Synthetic oligonucleotide
gcggcggagacaugguccg

SEQ ID NO: 2489788 - RNA, 19 nt, Artificial Sequence
  Description of Artificial Sequence: Synthetic oligonucleotide
ccgauuuaguucagccucc

SEQ ID NO: 2489789 - RNA, 19 nt, Artificial Sequence
  Description of Artificial Sequence: Synthetic oligonucleotide
cuguacgcgccgaaccguc

SEQ ID NO: 2489790 - RNA, 19 nt, Artificial Sequence
  Description of Artificial Sequence: Synthetic oligonucleotide
gacucucguugauccgcgc

SEQ ID NO: 2489791 - RNA, 19 nt, Artificial Sequence
  Description of Artificial Sequence: Synthetic oligonucleotide
accgucaauuccaguaccu

SEQ ID NO: 2489792 - RNA, 19 nt, Artificial Sequence
  Description of Artificial Sequence: Synthetic oligonucleotide
guaccucggcguucucuag

SEQ ID NO: 2489793 - RNA, 19 nt, Artificial Sequence
  Description of Artificial Sequence: Synthetic oligonucleotide
acccuccacaggucccugg

SEQ ID NO: 2489794 - RNA, 19 nt, Artificial Sequence
  Description of Artificial Sequence: Synthetic oligonucleotide
gucccuccguccuucccag

SEQ ID NO: 2489795 - RNA, 19 nt, Artificial Sequence
  Description of Artificial Sequence: Synthetic oligonucleotide
ggcugccuaaggauguagg

SEQ ID NO: 2489796 - RNA, 19 nt, Artificial Sequence
  Description of Artificial Sequence: Synthetic oligonucleotide
cuggacaauggggacccug

SEQ ID NO: 2489797 - RNA, 19 nt, Artificial Sequence
  Description of Artificial Sequence: Synthetic oligonucleotide
uccgggagaccaguuguuc

SEQ ID NO: 2489798 - RNA, 19 nt, Artificial Sequence
  Description of Artificial Sequence: Synthetic oligonucleotide
ggcuggacaauggggaccc

SEQ ID NO: 2489799 - RNA, 19 nt, Artificial Sequence
  Description of Artificial Sequence: Synthetic oligonucleotide
cacggucccggcugggcgc

SEQ ID NO: 2489800 - RNA, 19 nt, Artificial Sequence
  Description of Artificial Sequence: Synthetic oligonucleotide
cuggagacucucguugauc

SEQ ID NO: 2489801 - RNA, 19 nt, Artificial Sequence
  Description of Artificial Sequence: Synthetic oligonucleotide
cucgcuucggccugcagcu

SEQ ID NO: 2489802 - RNA, 19 nt, Artificial Sequence
  Description of Artificial Sequence: Synthetic oligonucleotide
aagcgcucgcucgcuucgg

SEQ ID NO: 2489803 - RNA, 19 nt, Artificial Sequence
  Description of Artificial Sequence: Synthetic oligonucleotide
gaauggcagcccacccucc

SEQ ID NO: 2489804 - RNA, 19 nt, Artificial Sequence
  Description of Artificial Sequence: Synthetic oligonucleotide
cuaaggauguagguaccaa

SEQ ID NO: 2489805 - RNA, 19 nt, Artificial Sequence
  Description of Artificial Sequence: Synthetic oligonucleotide
cagcgaagcgcucgcucgc

SEQ ID NO: 2489806 - RNA, 19 nt, Artificial Sequence
  Description of Artificial Sequence: Synthetic oligonucleotide
cuggaaucccuccgggaga

SEQ ID NO: 2489807 - RNA, 19 nt, Artificial Sequence
  Description of Artificial Sequence: Synthetic oligonucleotide
ggccccucagcagacaccc

SEQ ID NO: 2489808 - RNA, 19 nt, Artificial Sequence
  Description of Artificial Sequence: Synthetic oligonucleotide
cguguguaccucaugcaug

SEQ ID NO: 2489809 - RNA, 19 nt, Artificial Sequence
  Description of Artificial Sequence: Synthetic oligonucleotide
gcgccgaaccgucaauucc

SEQ ID NO: 2489810 - RNA, 19 nt, Artificial Sequence
  Description of Artificial Sequence: Synthetic oligonucleotide
cacgaacguguguaccuca

SEQ ID NO: 2489811 - RNA, 19 nt, Artificial Sequence
  Description of Artificial Sequence: Synthetic oligonucleotide
cuugacacguggacacgaa

SEQ ID NO: 2489812 - RNA, 19 nt, Artificial Sequence
  Description of Artificial Sequence: Synthetic oligonucleotide
uccggucaggcugccuaag

SEQ ID NO: 2489813 - RNA, 19 nt, Artificial Sequence
  Description of Artificial Sequence: Synthetic oligonucleotide
aggcugccuaaggauguag

SEQ ID NO: 2489814 - RNA, 19 nt, Artificial Sequence
  Description of Artificial Sequence: Synthetic oligonucleotide
cucguugauccgcgcgcgc

SEQ ID NO: 2489815 - RNA, 19 nt, Artificial Sequence
  Description of Artificial Sequence: Synthetic oligonucleotide
gcguucucuagcuuggucu

SEQ ID NO: 2489816 - RNA, 19 nt, Artificial Sequence
  Description of Artificial Sequence: Synthetic oligonucleotide
uaguguuguuggucaccaa

SEQ ID NO: 2489817 - RNA, 19 nt, Artificial Sequence
  Description of Artificial Sequence: Synthetic oligonucleotide
cagcgcgcccuguacgcgc

SEQ ID NO: 2489818 - RNA, 19 nt, Artificial Sequence
  Description of Artificial Sequence: Synthetic oligonucleotide
cccuguacgcgccgaaccg

SEQ ID NO: 2489819 - RNA, 19 nt, Artificial Sequence
  Description of Artificial Sequence: Synthetic oligonucleotide
ugcacggucccggcugggc

SEQ ID NO: 2489820 - RNA, 19 nt, Artificial Sequence
  Description of Artificial Sequence: Synthetic oligonucleotide
ucguccccggggccugggg

SEQ ID NO: 2489821 - RNA, 19 nt, Artificial Sequence
  Description of Artificial Sequence: Synthetic oligonucleotide
cugcuacccucgcgcagcg

SEQ ID NO: 2489822 - RNA, 19 nt, Artificial Sequence
  Description of Artificial Sequence: Synthetic oligonucleotide
gacacccgauuuaguucag

SEQ ID NO: 2489823 - RNA, 19 nt, Artificial Sequence
  Description of Artificial Sequence: Synthetic oligonucleotide
gccagcagcgaagcgcucg

SEQ ID NO: 2489824 - RNA, 19 nt, Artificial Sequence
  Description of Artificial Sequence: Synthetic oligonucleotide
uacgcgccgaaccgucaau

SEQ ID NO: 2489825 - RNA, 19 nt, Artificial Sequence
  Description of Artificial Sequence: Synthetic oligonucleotide
gcugcuacccucgcgcagc

SEQ ID NO: 2489826 - RNA, 19 nt, Artificial Sequence
  Description of Artificial Sequence: Synthetic oligonucleotide
gcccuguacgcgccgaacc

SEQ ID NO: 2489827 - RNA, 19 nt, Artificial Sequence
  Description of Artificial Sequence: Synthetic oligonucleotide
cugccuaaggauguaggua

SEQ ID NO: 2489828 - RNA, 19 nt, Artificial Sequence
  Description of Artificial Sequence: Synthetic oligonucleotide
agggagugguagacuuagg

SEQ ID NO: 2489829 - RNA, 19 nt, Artificial Sequence
  Description of Artificial Sequence: Synthetic oligonucleotide
gguccucguccucuuggcc

SEQ ID NO: 2489830 - RNA, 19 nt, Artificial Sequence
  Description of Artificial Sequence: Synthetic oligonucleotide
ucguccucuuggccugcac

SEQ ID NO: 2489831 - RNA, 19 nt, Artificial Sequence
  Description of Artificial Sequence: Synthetic oligonucleotide
ugggccaggcgagcuccgg

SEQ ID NO: 2489832 - RNA, 19 nt, Artificial Sequence
  Description of Artificial Sequence: Synthetic oligonucleotide
uggcgucgauggcuugaca

SEQ ID NO: 2489833 - RNA, 19 nt, Artificial Sequence
  Description of Artificial Sequence: Synthetic oligonucleotide
guugauccgcgcgcgccgc

SEQ ID NO: 2489834 - RNA, 19 nt, Artificial Sequence
  Description of Artificial Sequence: Synthetic oligonucleotide
ggucccuccguccuuccca

SEQ ID NO: 2489835 - RNA, 19 nt, Artificial Sequence
  Description of Artificial Sequence: Synthetic oligonucleotide
acguggacacgaacgugug

SEQ ID NO: 2489836 - RNA, 19 nt, Artificial Sequence
  Description of Artificial Sequence: Synthetic oligonucleotide
guuggucaccaaggccucc

SEQ ID NO: 2489837 - RNA, 19 nt, Artificial Sequence
  Description of Artificial Sequence: Synthetic oligonucleotide
cacacugggccaggcgagc

SEQ ID NO: 2489838 - RNA, 19 nt, Artificial Sequence
  Description of Artificial Sequence: Synthetic oligonucleotide
ccacuaggggcuuccgggc

SEQ ID NO: 2489839 - RNA, 19 nt, Artificial Sequence
  Description of Artificial Sequence: Synthetic oligonucleotide
ucgcgugcccguccccgca

SEQ ID NO: 2489840 - RNA, 19 nt, Artificial Sequence
  Description of Artificial Sequence: Synthetic oligonucleotide
ucugcaccucggugccggc

SEQ ID NO: 2489841 - RNA, 19 nt, Artificial Sequence
  Description of Artificial Sequence: Synthetic oligonucleotide
uggacucuagcaggugguu

SEQ ID NO: 2489842 - RNA, 19 nt, Artificial Sequence
  Description of Artificial Sequence: Synthetic oligonucleotide
aggucccugguuaguguug

SEQ ID NO: 2489843 - RNA, 19 nt, Artificial Sequence
  Description of Artificial Sequence: Synthetic oligonucleotide
uugauccgcgcgcgccgcu

SEQ ID NO: 2489844 - RNA, 19 nt, Artificial Sequence
  Description of Artificial Sequence: Synthetic oligonucleotide
gcagacacccgauuuaguu

SEQ ID NO: 2489845 - RNA, 19 nt, Artificial Sequence
  Description of Artificial Sequence: Synthetic oligonucleotide
cguccucuuggccugcacg

SEQ ID NO: 2489846 - RNA, 19 nt, Artificial Sequence
  Description of Artificial Sequence: Synthetic oligonucleotide
gucgauggcuugacacgug

SEQ ID NO: 2489847 - RNA, 19 nt, Artificial Sequence
  Description of Artificial Sequence: Synthetic oligonucleotide
ccaaggccuccacacacac

SEQ ID NO: 2489848 - RNA, 19 nt, Artificial Sequence
  Description of Artificial Sequence: Synthetic oligonucleotide
caugguccgcagcgcccgg

SEQ ID NO: 2489849 - RNA, 19 nt, Artificial Sequence
  Description of Artificial Sequence: Synthetic oligonucleotide
gccugcacggucccggcug

SEQ ID NO: 2489850 - RNA, 19 nt, Artificial Sequence
  Description of Artificial Sequence: Synthetic oligonucleotide
caggcgagcuccggucagg

SEQ ID NO: 2489851 - RNA, 19 nt, Artificial Sequence
  Description of Artificial Sequence: Synthetic oligonucleotide
cagcccacccuccacaggu

SEQ ID NO: 2489852 - RNA, 19 nt, Artificial Sequence
  Description of Artificial Sequence: Synthetic oligonucleotide
uccguccuucccagcgguc

SEQ ID NO: 2489853 - RNA, 19 nt, Artificial Sequence
  Description of Artificial Sequence: Synthetic oligonucleotide
agcagacacccgauuuagu

SEQ ID NO: 2489854 - RNA, 19 nt, Artificial Sequence
  Description of Artificial Sequence: Synthetic oligonucleotide
cucgcgcagcggcauggac

SEQ ID NO: 2489855 - RNA, 19 nt, Artificial Sequence
  Description of Artificial Sequence: Synthetic oligonucleotide
ggcuugacacguggacacg

SEQ ID NO: 2489856 - RNA, 19 nt, Artificial Sequence
  Description of Artificial Sequence: Synthetic oligonucleotide
guacgcgccgaaccgucaa

SEQ ID NO: 2489857 - RNA, 19 nt, Artificial Sequence
  Description of Artificial Sequence: Synthetic oligonucleotide
ugcggucccuccguccuuc

SEQ ID NO: 2489858 - RNA, 19 nt, Artificial Sequence
  Description of Artificial Sequence: Synthetic oligonucleotide
caggcagcccagcuaggga

SEQ ID NO: 2489859 - RNA, 19 nt, Artificial Sequence
  Description of Artificial Sequence: Synthetic oligonucleotide
ggcguucucuagcuugguc

SEQ ID NO: 2489860 - RNA, 19 nt, Artificial Sequence
  Description of Artificial Sequence: Synthetic oligonucleotide
acgaacguguguaccucau

SEQ ID NO: 2489861 - RNA, 19 nt, Artificial Sequence
  Description of Artificial Sequence: Synthetic oligonucleotide
gauccgcgcgcgccgcuuc

SEQ ID NO: 2489862 - RNA, 19 nt, Artificial Sequence
  Description of Artificial Sequence: Synthetic oligonucleotide
ccaggcagcccagcuaggg

SEQ ID NO: 2489863 - RNA, 19 nt, Artificial Sequence
  Description of Artificial Sequence: Synthetic oligonucleotide
ugcuacccucgcgcagcgg

SEQ ID NO: 2489864 - RNA, 19 nt, Artificial Sequence
  Description of Artificial Sequence: Synthetic oligonucleotide
ucccagcgguccucguccu

SEQ ID NO: 2489865 - RNA, 19 nt, Artificial Sequence
  Description of Artificial Sequence: Synthetic oligonucleotide
cuacccucgcgcagcggca

SEQ ID NO: 2489866 - RNA, 19 nt, Artificial Sequence
  Description of Artificial Sequence: Synthetic oligonucleotide
guggcgucgauggcuugac

SEQ ID NO: 2489867 - RNA, 19 nt, Artificial Sequence
  Description of Artificial Sequence: Synthetic oligonucleotide
cugggcgccagcggcggag

SEQ ID NO: 2489868 - RNA, 19 nt, Artificial Sequence
  Description of Artificial Sequence: Synthetic oligonucleotide
gcuugacacguggacacga

SEQ ID NO: 2489869 - RNA, 19 nt, Artificial Sequence
  Description of Artificial Sequence: Synthetic oligonucleotide
gcugaaacgguggcgucga

SEQ ID NO: 2489870 - RNA, 19 nt, Artificial Sequence
  Description of Artificial Sequence: Synthetic oligonucleotide
ggacucuagcaggugguuc

SEQ ID NO: 2489871 - RNA, 19 nt, Artificial Sequence
  Description of Artificial Sequence: Synthetic oligonucleotide
cagcggcauggacucuagc

SEQ ID NO: 2489872 - RNA, 19 nt, Artificial Sequence
  Description of Artificial Sequence: Synthetic oligonucleotide
auccggccccucagcagac

SEQ ID NO: 2489873 - RNA, 19 nt, Artificial Sequence
  Description of Artificial Sequence: Synthetic oligonucleotide
agcgaagcgcucgcucgcu

SEQ ID NO: 2489874 - RNA, 19 nt, Artificial Sequence
  Description of Artificial Sequence: Synthetic oligonucleotide
gccuaaggauguagguacc

SEQ ID NO: 2489875 - RNA, 19 nt, Artificial Sequence
  Description of Artificial Sequence: Synthetic oligonucleotide
ccuccgggaccucuucuag

SEQ ID NO: 2489876 - RNA, 19 nt, Artificial Sequence
  Description of Artificial Sequence: Synthetic oligonucleotide
cacugggccaggcgagcuc

SEQ ID NO: 2489877 - RNA, 19 nt, Artificial Sequence
  Description of Artificial Sequence: Synthetic oligonucleotide
ccggucaggcugccuaagg

SEQ ID NO: 2489878 - RNA, 19 nt, Artificial Sequence
  Description of Artificial Sequence: Synthetic oligonucleotide
cugcaccucggugccggcc

SEQ ID NO: 2489879 - RNA, 19 nt, Artificial Sequence
  Description of Artificial Sequence: Synthetic oligonucleotide
cgauuuaguucagccuccg

SEQ ID NO: 2489880 - RNA, 19 nt, Artificial Sequence
  Description of Artificial Sequence: Synthetic oligonucleotide
cguugauccgcgcgcgccg

SEQ ID NO: 2489881 - RNA, 19 nt, Artificial Sequence
  Description of Artificial Sequence: Synthetic oligonucleotide
cgagcuccggucaggcugc

SEQ ID NO: 2489882 - RNA, 19 nt, Artificial Sequence
  Description of Artificial Sequence: Synthetic oligonucleotide
ucccuccguccuucccagc

SEQ ID NO: 2489883 - RNA, 19 nt, Artificial Sequence
  Description of Artificial Sequence: Synthetic oligonucleotide
ccguccuucccagcggucc

SEQ ID NO: 2489884 - RNA, 19 nt, Artificial Sequence
  Description of Artificial Sequence: Synthetic oligonucleotide
gccgaaccgucaauuccag

SEQ ID NO: 2489885 - RNA, 19 nt, Artificial Sequence
  Description of Artificial Sequence: Synthetic oligonucleotide
ggccaggcgagcuccgguc

SEQ ID NO: 2489886 - RNA, 19 nt, Artificial Sequence
  Description of Artificial Sequence: Synthetic oligonucleotide
gcuccggucaggcugccua

SEQ ID NO: 2489887 - RNA, 19 nt, Artificial Sequence
  Description of Artificial Sequence: Synthetic oligonucleotide
ccugcacggucccggcugg

SEQ ID NO: 2489888 - RNA, 19 nt, Artificial Sequence
  Description of Artificial Sequence: Synthetic oligonucleotide
guaccaaauccggccccuc

SEQ ID NO: 2489889 - RNA, 19 nt, Artificial Sequence
  Description of Artificial Sequence: Synthetic oligonucleotide
guucaggaguucagcugaa

SEQ ID NO: 2489890 - RNA, 19 nt, Artificial Sequence
  Description of Artificial Sequence: Synthetic oligonucleotide
ggcggagacaugguccgca

SEQ ID NO: 2489891 - RNA, 19 nt, Artificial Sequence
  Description of Artificial Sequence: Synthetic oligonucleotide
acccucgcgcagcggcaug

SEQ ID NO: 2489892 - RNA, 19 nt, Artificial Sequence
  Description of Artificial Sequence: Synthetic oligonucleotide
cccacccuccacagguccc

SEQ ID NO: 2489893 - RNA, 19 nt, Artificial Sequence
  Description of Artificial Sequence: Synthetic oligonucleotide
gguggcgucgauggcuuga

SEQ ID NO: 2489894 - RNA, 19 nt, Artificial Sequence
  Description of Artificial Sequence: Synthetic oligonucleotide
uugcggucccuccguccuu

SEQ ID NO: 2489895 - RNA, 19 nt, Artificial Sequence
  Description of Artificial Sequence: Synthetic oligonucleotide
auccgcgcgcgccgcuucu

SEQ ID NO: 2489896 - RNA, 19 nt, Artificial Sequence
  Description of Artificial Sequence: Synthetic oligonucleotide
ccgucaauuccaguaccuc

SEQ ID NO: 2489897 - RNA, 19 nt, Artificial Sequence
  Description of Artificial Sequence: Synthetic oligonucleotide
cucgcucgcuucggccugc

SEQ ID NO: 2489898 - RNA, 19 nt, Artificial Sequence
  Description of Artificial Sequence: Synthetic oligonucleotide
acgguggcgucgauggcuu

SEQ ID NO: 2489899 - RNA, 19 nt, Artificial Sequence
  Description of Artificial Sequence: Synthetic oligonucleotide
cgccgaaccgucaauucca

SEQ ID NO: 2489900 - RNA, 19 nt, Artificial Sequence
  Description of Artificial Sequence: Synthetic oligonucleotide
ugggcgccagcggcggaga

SEQ ID NO: 2489901 - RNA, 19 nt, Artificial Sequence
  Description of Artificial Sequence: Synthetic oligonucleotide
acgcgccgaaccgucaauu

SEQ ID NO: 2489902 - RNA, 19 nt, Artificial Sequence
  Description of Artificial Sequence: Synthetic oligonucleotide
cuccggucaggcugccuaa

SEQ ID NO: 2489903 - RNA, 19 nt, Artificial Sequence
  Description of Artificial Sequence: Synthetic oligonucleotide
gugcccguccccgcagcgc

SEQ ID NO: 2489904 - RNA, 19 nt, Artificial Sequence
  Description of Artificial Sequence: Synthetic oligonucleotide
ccgcagcgcgcccuguacg

SEQ ID NO: 2489905 - RNA, 19 nt, Artificial Sequence
  Description of Artificial Sequence: Synthetic oligonucleotide
ugauccgcgcgcgccgcuu

SEQ ID NO: 2489906 - RNA, 19 nt, Artificial Sequence
  Description of Artificial Sequence: Synthetic oligonucleotide
gcagcgcgcccuguacgcg

SEQ ID NO: 2489907 - RNA, 19 nt, Artificial Sequence
  Description of Artificial Sequence: Synthetic oligonucleotide
uccggccccucagcagaca

SEQ ID NO: 2489908 - RNA, 19 nt, Artificial Sequence
  Description of Artificial Sequence: Synthetic oligonucleotide
gguccgcagcgcccggagc

SEQ ID NO: 2489909 - RNA, 19 nt, Artificial Sequence
  Description of Artificial Sequence: Synthetic oligonucleotide
cgaacguguguaccucaug

SEQ ID NO: 2489910 - RNA, 19 nt, Artificial Sequence
  Description of Artificial Sequence: Synthetic oligonucleotide
ccaggcgagcuccggucag

SEQ ID NO: 2489911 - RNA, 19 nt, Artificial Sequence
  Description of Artificial Sequence: Synthetic oligonucleotide
augguccgcagcgcccgga

SEQ ID NO: 2489912 - RNA, 19 nt, Artificial Sequence
  Description of Artificial Sequence: Synthetic oligonucleotide
gccaggcgagcuccgguca

SEQ ID NO: 2489913 - RNA, 19 nt, Artificial Sequence
  Description of Artificial Sequence: Synthetic oligonucleotide
caggucccugguuaguguu

SEQ ID NO: 2489914 - RNA, 19 nt, Artificial Sequence
  Description of Artificial Sequence: Synthetic oligonucleotide
cgguccucguccucuuggc

SEQ ID NO: 2489915 - RNA, 19 nt, Artificial Sequence
  Description of Artificial Sequence: Synthetic oligonucleotide
cugcacggucccggcuggg

SEQ ID NO: 2489916 - RNA, 19 nt, Artificial Sequence
  Description of Artificial Sequence: Synthetic oligonucleotide
gucguccccggggccuggg

SEQ ID NO: 2489917 - RNA, 19 nt, Artificial Sequence
  Description of Artificial Sequence: Synthetic oligonucleotide
cugcucccgcucgcgugcc

SEQ ID NO: 2489918 - RNA, 19 nt, Artificial Sequence
  Description of Artificial Sequence: Synthetic oligonucleotide
ggaguucagcugaaacggu

SEQ ID NO: 2489919 - RNA, 19 nt, Artificial Sequence
  Description of Artificial Sequence: Synthetic oligonucleotide
cccucgcgcagcggcaugg

SEQ ID NO: 2489920 - RNA, 19 nt, Artificial Sequence
  Description of Artificial Sequence: Synthetic oligonucleotide
cacccuccacaggucccug

SEQ ID NO: 2489921 - RNA, 19 nt, Artificial Sequence
  Description of Artificial Sequence: Synthetic oligonucleotide
gcaccucggugccggccag

SEQ ID NO: 2489922 - RNA, 19 nt, Artificial Sequence
  Description of Artificial Sequence: Synthetic oligonucleotide
ucgcucgcuucggccugca

SEQ ID NO: 2489923 - RNA, 19 nt, Artificial Sequence
  Description of Artificial Sequence: Synthetic oligonucleotide
cgcgccgaaccgucaauuc

SEQ ID NO: 2489924 - RNA, 19 nt, Artificial Sequence
  Description of Artificial Sequence: Synthetic oligonucleotide
ccuccgggagaccaguugu

SEQ ID NO: 2489925 - RNA, 19 nt, Artificial Sequence
  Description of Artificial Sequence: Synthetic oligonucleotide
cccgcagcgcgcccuguac

SEQ ID NO: 2489926 - RNA, 19 nt, Artificial Sequence
  Description of Artificial Sequence: Synthetic oligonucleotide
ggaaucccuccgggagacc

SEQ ID NO: 2489927 - RNA, 19 nt, Artificial Sequence
  Description of Artificial Sequence: Synthetic oligonucleotide
gagcuccggucaggcugcc

SEQ ID NO: 2489928 - RNA, 19 nt, Artificial Sequence
  Description of Artificial Sequence: Synthetic oligonucleotide
gcuuggucugcaccucggu

SEQ ID NO: 2489929 - RNA, 19 nt, Artificial Sequence
  Description of Artificial Sequence: Synthetic oligonucleotide
cccggcugggcgccagcgg

SEQ ID NO: 2489930 - RNA, 19 nt, Artificial Sequence
  Description of Artificial Sequence: Synthetic oligonucleotide
ucccgcucgcgugcccguc

SEQ ID NO: 2489931 - RNA, 19 nt, Artificial Sequence
  Description of Artificial Sequence: Synthetic oligonucleotide
gcagcccagcuagggaguc

SEQ ID NO: 2489932 - RNA, 19 nt, Artificial Sequence
  Description of Artificial Sequence: Synthetic oligonucleotide
cuccgggagaccaguuguu

SEQ ID NO: 2489933 - RNA, 19 nt, Artificial Sequence
  Description of Artificial Sequence: Synthetic oligonucleotide
cgugcccguccccgcagcg

SEQ ID NO: 2489934 - RNA, 19 nt, Artificial Sequence
  Description of Artificial Sequence: Synthetic oligonucleotide
ccgggaccucuucuagguc

SEQ ID NO: 2489935 - RNA, 19 nt, Artificial Sequence
  Description of Artificial Sequence: Synthetic oligonucleotide
cgcgcgccgcuucuucucc

SEQ ID NO: 2489936 - RNA, 19 nt, Artificial Sequence
  Description of Artificial Sequence: Synthetic oligonucleotide
gcgcgcgccgcuucuucuc

SEQ ID NO: 2489937 - RNA, 19 nt, Artificial Sequence
  Description of Artificial Sequence: Synthetic oligonucleotide
caggcugccuaaggaugua

SEQ ID NO: 2489938 - RNA, 19 nt, Artificial Sequence
  Description of Artificial Sequence: Synthetic oligonucleotide
cucguccucuuggccugca

SEQ ID NO: 2489939 - RNA, 19 nt, Artificial Sequence
  Description of Artificial Sequence: Synthetic oligonucleotide
ccgcucgcgugcccguccc

SEQ ID NO: 2489940 - RNA, 19 nt, Artificial Sequence
  Description of Artificial Sequence: Synthetic oligonucleotide
gccuugcggucccuccguc

SEQ ID NO: 2489941 - RNA, 19 nt, Artificial Sequence
  Description of Artificial Sequence: Synthetic oligonucleotide
gcggucccuccguccuucc

SEQ ID NO: 2489942 - RNA, 19 nt, Artificial Sequence
  Description of Artificial Sequence: Synthetic oligonucleotide
ggccuugcggucccuccgu

SEQ ID NO: 2489943 - RNA, 19 nt, Artificial Sequence
  Description of Artificial Sequence: Synthetic oligonucleotide
cgggagaccaguuguuccu

SEQ ID NO: 2489944 - RNA, 19 nt, Artificial Sequence
  Description of Artificial Sequence: Synthetic oligonucleotide
gccccucagcagacacccg

SEQ ID NO: 2489945 - RNA, 19 nt, Artificial Sequence
  Description of Artificial Sequence: Synthetic oligonucleotide
uccgcgcgcgccgcuucuu

SEQ ID NO: 2489946 - RNA, 19 nt, Artificial Sequence
  Description of Artificial Sequence: Synthetic oligonucleotide
ccucggugccggccagcag

SEQ ID NO: 2489947 - RNA, 19 nt, Artificial Sequence
  Description of Artificial Sequence: Synthetic oligonucleotide
gcgccagcggcggagacau

SEQ ID NO: 2489948 - RNA, 19 nt, Artificial Sequence
  Description of Artificial Sequence: Synthetic oligonucleotide
gcgcgcccuguacgcgccg

SEQ ID NO: 2489949 - RNA, 19 nt, Artificial Sequence
  Description of Artificial Sequence: Synthetic oligonucleotide
gggccaggcgagcuccggu

SEQ ID NO: 2489950 - RNA, 19 nt, Artificial Sequence
  Description of Artificial Sequence: Synthetic oligonucleotide
gggcgccagcggcggagac

SEQ ID NO: 2489951 - RNA, 19 nt, Artificial Sequence
  Description of Artificial Sequence: Synthetic oligonucleotide
ggcgagcuccggucaggcu

SEQ ID NO: 2489952 - RNA, 19 nt, Artificial Sequence
  Description of Artificial Sequence: Synthetic oligonucleotide
gcccagcuagggagucccc

SEQ ID NO: 2489953 - RNA, 19 nt, Artificial Sequence
  Description of Artificial Sequence: Synthetic oligonucleotide
cgccgcuucuucuccacua

SEQ ID NO: 2489954 - RNA, 19 nt, Artificial Sequence
  Description of Artificial Sequence: Synthetic oligonucleotide
ccuggagacucucguugau

SEQ ID NO: 2489955 - RNA, 19 nt, Artificial Sequence
  Description of Artificial Sequence: Synthetic oligonucleotide
cgcgugcccguccccgcag

SEQ ID NO: 2489956 - RNA, 19 nt, Artificial Sequence
  Description of Artificial Sequence: Synthetic oligonucleotide
ccuguacgcgccgaaccgu

SEQ ID NO: 2489957 - RNA, 19 nt, Artificial Sequence
  Description of Artificial Sequence: Synthetic oligonucleotide
gcuucggccugcagcugcu

SEQ ID NO: 2489958 - RNA, 19 nt, Artificial Sequence
  Description of Artificial Sequence: Synthetic oligonucleotide
cugaaacgguggcgucgau

SEQ ID NO: 2489959 - RNA, 19 nt, Artificial Sequence
  Description of Artificial Sequence: Synthetic oligonucleotide
ccgcgcgcgccgcuucuuc

SEQ ID NO: 2489960 - RNA, 19 nt, Artificial Sequence
  Description of Artificial Sequence: Synthetic oligonucleotide
cgcccuguacgcgccgaac

SEQ ID NO: 2489961 - RNA, 19 nt, Artificial Sequence
  Description of Artificial Sequence: Synthetic oligonucleotide
cuaggggcuuccgggccuu

SEQ ID NO: 2489962 - RNA, 19 nt, Artificial Sequence
  Description of Artificial Sequence: Synthetic oligonucleotide
ccgaaccgucaauuccagu

SEQ ID NO: 2489963 - RNA, 19 nt, Artificial Sequence
  Description of Artificial Sequence: Synthetic oligonucleotide
gcugggcgccagcggcgga

SEQ ID NO: 2489964 - RNA, 19 nt, Artificial Sequence
  Description of Artificial Sequence: Synthetic oligonucleotide
gcgcccuguacgcgccgaa

SEQ ID NO: 2489965 - RNA, 19 nt, Artificial Sequence
  Description of Artificial Sequence: Synthetic oligonucleotide
cagcagcgaagcgcucgcu

SEQ ID NO: 2489966 - RNA, 19 nt, Artificial Sequence
  Description of Artificial Sequence: Synthetic oligonucleotide
cguggacacgaacgugugu

SEQ ID NO: 2489967 - RNA, 19 nt, Artificial Sequence
  Description of Artificial Sequence: Synthetic oligonucleotide
cgcucgcgugcccgucccc

SEQ ID NO: 2489968 - RNA, 19 nt, Artificial Sequence
  Description of Artificial Sequence: Synthetic oligonucleotide
cgguggcgucgauggcuug

SEQ ID NO: 2489969 - RNA, 19 nt, Artificial Sequence
  Description of Artificial Sequence: Synthetic oligonucleotide
cgcagcggcauggacucua

SEQ ID NO: 2489970 - RNA, 19 nt, Artificial Sequence
  Description of Artificial Sequence: Synthetic oligonucleotide
gcgaagcgcucgcucgcuu

SEQ ID NO: 2489971 - RNA, 19 nt, Artificial Sequence
  Description of Artificial Sequence: Synthetic oligonucleotide
ccacaggucccugguuagu

SEQ ID NO: 2489972 - RNA, 19 nt, Artificial Sequence
  Description of Artificial Sequence: Synthetic oligonucleotide
ccccgcagcgcgcccugua

SEQ ID NO: 2489973 - RNA, 19 nt, Artificial Sequence
  Description of Artificial Sequence: Synthetic oligonucleotide
ccucggcguucucuagcuu

SEQ ID NO: 2489974 - RNA, 19 nt, Artificial Sequence
  Description of Artificial Sequence: Synthetic oligonucleotide
cgcgcccuguacgcgccga

SEQ ID NO: 2489975 - RNA, 19 nt, Artificial Sequence
  Description of Artificial Sequence: Synthetic oligonucleotide
cggcguucucuagcuuggu

SEQ ID NO: 2489976 - RNA, 19 nt, Artificial Sequence
  Description of Artificial Sequence: Synthetic oligonucleotide
aaguagacaauauugcgag

SEQ ID NO: 2489977 - RNA, 19 nt, Artificial Sequence
  Description of Artificial Sequence: Synthetic oligonucleotide
aauauugcgagaacgggcc

SEQ ID NO: 2489978 - RNA, 19 nt, Artificial Sequence
  Description of Artificial Sequence: Synthetic oligonucleotide
ucuaguagaaccacugcgg

SEQ ID NO: 2489979 - RNA, 19 nt, Artificial Sequence
  Description of Artificial Sequence: Synthetic oligonucleotide
aaugagacgaaagugaagu

SEQ ID NO: 2489980 - RNA, 19 nt, Artificial Sequence
  Description of Artificial Sequence: Synthetic oligonucleotide
gaaagugaaguucucacag

SEQ ID NO: 2489981 - RNA, 19 nt, Artificial Sequence
  Description of Artificial Sequence: Synthetic oligonucleotide
aguaauagggcugucgucc

SEQ ID NO: 2489982 - RNA, 19 nt, Artificial Sequence
  Description of Artificial Sequence: Synthetic oligonucleotide
uuacucagaacccacagcu

SEQ ID NO: 2489983 - RNA, 19 nt, Artificial Sequence
  Description of Artificial Sequence: Synthetic oligonucleotide
uaaauuggggacaauuccc

SEQ ID NO: 2489984 - RNA, 19 nt, Artificial Sequence
  Description of Artificial Sequence: Synthetic oligonucleotide
auacaucagaucugcaugc

SEQ ID NO: 2489985 - RNA, 19 nt, Artificial Sequence
  Description of Artificial Sequence: Synthetic oligonucleotide
aaauuggggacaauucccc

SEQ ID NO: 2489986 - RNA, 19 nt, Artificial Sequence
  Description of Artificial Sequence: Synthetic oligonucleotide
caugaagugagguagccag

SEQ ID NO: 2489987 - RNA, 19 nt, Artificial Sequence
  Description of Artificial Sequence: Synthetic oligonucleotide
acgaaagugaaguucucac

SEQ ID NO: 2489988 - RNA, 19 nt, Artificial Sequence
  Description of Artificial Sequence: Synthetic oligonucleotide
agcuaugggagcuaagccg

SEQ ID NO: 2489989 - RNA, 19 nt, Artificial Sequence
  Description of Artificial Sequence: Synthetic oligonucleotide
ucagaaagggagaaguaga

SEQ ID NO: 2489990 - RNA, 19 nt, Artificial Sequence
  Description of Artificial Sequence: Synthetic oligonucleotide
agauuuucccaugacacac

SEQ ID NO: 2489991 - RNA, 19 nt, Artificial Sequence
  Description of Artificial Sequence: Synthetic oligonucleotide
ugagugaaugagacgaaag

SEQ ID NO: 2489992 - RNA, 19 nt, Artificial Sequence
  Description of Artificial Sequence: Synthetic oligonucleotide
uuguagaggaggcaguaag

SEQ ID NO: 2489993 - RNA, 19 nt, Artificial Sequence
  Description of Artificial Sequence: Synthetic oligonucleotide
uguagaggaggcaguaagg

SEQ ID NO: 2489994 - RNA, 19 nt, Artificial Sequence
  Description of Artificial Sequence: Synthetic oligonucleotide
gacaauauugcgagaacgg

SEQ ID NO: 2489995 - RNA, 19 nt, Artificial Sequence
  Description of Artificial Sequence: Synthetic oligonucleotide
acaguuguccagcuugacc

SEQ ID NO: 2489996 - RNA, 19 nt, Artificial Sequence
  Description of Artificial Sequence: Synthetic oligonucleotide
gaccuuucuggcuaaauug

SEQ ID NO: 2489997 - RNA, 19 nt, Artificial Sequence
  Description of Artificial Sequence: Synthetic oligonucleotide
uguacuugaccacugugga

SEQ ID NO: 2489998 - RNA, 19 nt, Artificial Sequence
  Description of Artificial Sequence: Synthetic oligonucleotide
cucuaguagaaccacugcg

SEQ ID NO: 2489999 - RNA, 19 nt, Artificial Sequence
  Description of Artificial Sequence: Synthetic oligonucleotide
aguagaaccacugcggcuc

SEQ ID NO: 2490000 - RNA, 19 nt, Artificial Sequence
  Description of Artificial Sequence: Synthetic oligonucleotide
agcuaagccgccuggagac

SEQ ID NO: 2490001 - RNA, 19 nt, Artificial Sequence
  Description of Artificial Sequence: Synthetic oligonucleotide
caauauugcgagaacgggc

SEQ ID NO: 2490002 - RNA, 19 nt, Artificial Sequence
  Description of Artificial Sequence: Synthetic oligonucleotide
agacaauauugcgagaacg

SEQ ID NO: 2490003 - RNA, 19 nt, Artificial Sequence
  Description of Artificial Sequence: Synthetic oligonucleotide
ucucgcuugacacugucug

SEQ ID NO: 2490004 - RNA, 19 nt, Artificial Sequence
  Description of Artificial Sequence: Synthetic oligonucleotide
uccccuggaaugcucaugg

SEQ ID NO: 2490005 - RNA, 19 nt, Artificial Sequence
  Description of Artificial Sequence: Synthetic oligonucleotide
ucauaccacacauugcccc

SEQ ID NO: 2490006 - RNA, 19 nt, Artificial Sequence
  Description of Artificial Sequence: Synthetic oligonucleotide
gaaguucucacaguugucc

SEQ ID NO: 2490007 - RNA, 19 nt, Artificial Sequence
  Description of Artificial Sequence: Synthetic oligonucleotide
ucaucagaaagggagaagu

SEQ ID NO: 2490008 - RNA, 19 nt, Artificial Sequence
  Description of Artificial Sequence: Synthetic oligonucleotide
cuuucuggcuaaauugggg

SEQ ID NO: 2490009 - RNA, 19 nt, Artificial Sequence
  Description of Artificial Sequence: Synthetic oligonucleotide
ugaaugagacgaaagugaa

SEQ ID NO: 2490010 - RNA, 19 nt, Artificial Sequence
  Description of Artificial Sequence: Synthetic oligonucleotide
uugaguuucuugguggagg

SEQ ID NO: 2490011 - RNA, 19 nt, Artificial Sequence
  Description of Artificial Sequence: Synthetic oligonucleotide
acucuaguagaaccacugc

SEQ ID NO: 2490012 - RNA, 19 nt, Artificial Sequence
  Description of Artificial Sequence: Synthetic oligonucleotide
gauggaaaagcccacaccu

SEQ ID NO: 2490013 - RNA, 19 nt, Artificial Sequence
  Description of Artificial Sequence: Synthetic oligonucleotide
caacaagacaaaagggugc

SEQ ID NO: 2490014 - RNA, 19 nt, Artificial Sequence
  Description of Artificial Sequence: Synthetic oligonucleotide
ugggucuuugagcaacucg

SEQ ID NO: 2490015 - RNA, 19 nt, Artificial Sequence
  Description of Artificial Sequence: Synthetic oligonucleotide
accacugcggcucucucgc

SEQ ID NO: 2490016 - RNA, 19 nt, Artificial Sequence
  Description of Artificial Sequence: Synthetic oligonucleotide
uacuugaccacuguggaca

SEQ ID NO: 2490017 - RNA, 19 nt, Artificial Sequence
  Description of Artificial Sequence: Synthetic oligonucleotide
ucuguccgggcaaaguagg

SEQ ID NO: 2490018 - RNA, 19 nt, Artificial Sequence
  Description of Artificial Sequence: Synthetic oligonucleotide
agaguaauagggcugucgu

SEQ ID NO: 2490019 - RNA, 19 nt, Artificial Sequence
  Description of Artificial Sequence: Synthetic oligonucleotide
guuuguguccccuggaaug

SEQ ID NO: 2490020 - RNA, 19 nt, Artificial Sequence
  Description of Artificial Sequence: Synthetic oligonucleotide
auuggggacaauuccccgg

SEQ ID NO: 2490021 - RNA, 19 nt, Artificial Sequence
  Description of Artificial Sequence: Synthetic oligonucleotide
acaauauugcgagaacggg

SEQ ID NO: 2490022 - RNA, 19 nt, Artificial Sequence
  Description of Artificial Sequence: Synthetic oligonucleotide
gaaguagacaauauugcga

SEQ ID NO: 2490023 - RNA, 19 nt, Artificial Sequence
  Description of Artificial Sequence: Synthetic oligonucleotide
uaagguagaagggagacuu

SEQ ID NO: 2490024 - RNA, 19 nt, Artificial Sequence
  Description of Artificial Sequence: Synthetic oligonucleotide
aacaagacaaaagggugcu

SEQ ID NO: 2490025 - RNA, 19 nt, Artificial Sequence
  Description of Artificial Sequence: Synthetic oligonucleotide
gucaccauacaucagaucu

SEQ ID NO: 2490026 - RNA, 19 nt, Artificial Sequence
  Description of Artificial Sequence: Synthetic oligonucleotide
uguaagguagaagggagac

SEQ ID NO: 2490027 - RNA, 19 nt, Artificial Sequence
  Description of Artificial Sequence: Synthetic oligonucleotide
caagacaaaagggugcugc

SEQ ID NO: 2490028 - RNA, 19 nt, Artificial Sequence
  Description of Artificial Sequence: Synthetic oligonucleotide
agaccugagugaaugagac

SEQ ID NO: 2490029 - RNA, 19 nt, Artificial Sequence
  Description of Artificial Sequence: Synthetic oligonucleotide
accugagugaaugagacga

SEQ ID NO: 2490030 - RNA, 19 nt, Artificial Sequence
  Description of Artificial Sequence: Synthetic oligonucleotide
guagaggaggcaguaaggg

SEQ ID NO: 2490031 - RNA, 19 nt, Artificial Sequence
  Description of Artificial Sequence: Synthetic oligonucleotide
cuaguagaaccacugcggc

SEQ ID NO: 2490032 - RNA, 19 nt, Artificial Sequence
  Description of Artificial Sequence: Synthetic oligonucleotide
gagaguaauagggcugucg

SEQ ID NO: 2490033 - RNA, 19 nt, Artificial Sequence
  Description of Artificial Sequence: Synthetic oligonucleotide
uccucauauucagauauug

SEQ ID NO: 2490034 - RNA, 19 nt, Artificial Sequence
  Description of Artificial Sequence: Synthetic oligonucleotide
aguagggcugguucugugg

SEQ ID NO: 2490035 - RNA, 19 nt, Artificial Sequence
  Description of Artificial Sequence: Synthetic oligonucleotide
aaguucucacaguugucca

SEQ ID NO: 2490036 - RNA, 19 nt, Artificial Sequence
  Description of Artificial Sequence: Synthetic oligonucleotide
agauauuggcuguuguacu

SEQ ID NO: 2490037 - RNA, 19 nt, Artificial Sequence
  Description of Artificial Sequence: Synthetic oligonucleotide
uugagcaacucgaugucac

SEQ ID NO: 2490038 - RNA, 19 nt, Artificial Sequence
  Description of Artificial Sequence: Synthetic oligonucleotide
aaccacugcggcucucucg

SEQ ID NO: 2490039 - RNA, 19 nt, Artificial Sequence
  Description of Artificial Sequence: Synthetic oligonucleotide
ugagacgaaagugaaguuc

SEQ ID NO: 2490040 - RNA, 19 nt, Artificial Sequence
  Description of Artificial Sequence: Synthetic oligonucleotide
ggacaggagaguaauaggg

SEQ ID NO: 2490041 - RNA, 19 nt, Artificial Sequence
  Description of Artificial Sequence: Synthetic oligonucleotide
accugcauucuucaggaug

SEQ ID NO: 2490042 - RNA, 19 nt, Artificial Sequence
  Description of Artificial Sequence: Synthetic oligonucleotide
auauucagauauuggcugu

SEQ ID NO: 2490043 - RNA, 19 nt, Artificial Sequence
  Description of Artificial Sequence: Synthetic oligonucleotide
cuugacacugucuguccgg

SEQ ID NO: 2490044 - RNA, 19 nt, Artificial Sequence
  Description of Artificial Sequence: Synthetic oligonucleotide
cacucuaguagaaccacug

SEQ ID NO: 2490045 - RNA, 19 nt, Artificial Sequence
  Description of Artificial Sequence: Synthetic oligonucleotide
ucccaugacacacucuagu

SEQ ID NO: 2490046 - RNA, 19 nt, Artificial Sequence
  Description of Artificial Sequence: Synthetic oligonucleotide
cuuacucagaacccacagc

SEQ ID NO: 2490047 - RNA, 19 nt, Artificial Sequence
  Description of Artificial Sequence: Synthetic oligonucleotide
auauugcgagaacgggccc

SEQ ID NO: 2490048 - RNA, 19 nt, Artificial Sequence
  Description of Artificial Sequence: Synthetic oligonucleotide
auccauuuggguagguggc

SEQ ID NO: 2490049 - RNA, 19 nt, Artificial Sequence
  Description of Artificial Sequence: Synthetic oligonucleotide
aguaagggcacuguuugug

SEQ ID NO: 2490050 - RNA, 19 nt, Artificial Sequence
  Description of Artificial Sequence: Synthetic oligonucleotide
aagucugagccaucacucu

SEQ ID NO: 2490051 - RNA, 19 nt, Artificial Sequence
  Description of Artificial Sequence: Synthetic oligonucleotide
gacaggagaguaauagggc

SEQ ID NO: 2490052 - RNA, 19 nt, Artificial Sequence
  Description of Artificial Sequence: Synthetic oligonucleotide
guacuuguagaggaggcag

SEQ ID NO: 2490053 - RNA, 19 nt, Artificial Sequence
  Description of Artificial Sequence: Synthetic oligonucleotide
uagacaauauugcgagaac

SEQ ID NO: 2490054 - RNA, 19 nt, Artificial Sequence
  Description of Artificial Sequence: Synthetic oligonucleotide
guagggcugguucuguggg

SEQ ID NO: 2490055 - RNA, 19 nt, Artificial Sequence
  Description of Artificial Sequence: Synthetic oligonucleotide
agguagaagggagacuugg

SEQ ID NO: 2490056 - RNA, 19 nt, Artificial Sequence
  Description of Artificial Sequence: Synthetic oligonucleotide
gggacaauuccccggaggg

SEQ ID NO: 2490057 - RNA, 19 nt, Artificial Sequence
  Description of Artificial Sequence: Synthetic oligonucleotide
uccucaucagaaagggaga

SEQ ID NO: 2490058 - RNA, 19 nt, Artificial Sequence
  Description of Artificial Sequence: Synthetic oligonucleotide
uuuguguccccuggaaugc

SEQ ID NO: 2490059 - RNA, 19 nt, Artificial Sequence
  Description of Artificial Sequence: Synthetic oligonucleotide
uccugcagcguccucauau

SEQ ID NO: 2490060 - RNA, 19 nt, Artificial Sequence
  Description of Artificial Sequence: Synthetic oligonucleotide
gacaauuccccggagggac

SEQ ID NO: 2490061 - RNA, 19 nt, Artificial Sequence
  Description of Artificial Sequence: Synthetic oligonucleotide
guagaagggagacuuggca

SEQ ID NO: 2490062 - RNA, 19 nt, Artificial Sequence
  Description of Artificial Sequence: Synthetic oligonucleotide
agggaccgcagccccaucc

SEQ ID NO: 2490063 - RNA, 19 nt, Artificial Sequence
  Description of Artificial Sequence: Synthetic oligonucleotide
agaacccacagcuucuccu

SEQ ID NO: 2490064 - RNA, 19 nt, Artificial Sequence
  Description of Artificial Sequence: Synthetic oligonucleotide
ugaccuuucuggcuaaauu

SEQ ID NO: 2490065 - RNA, 19 nt, Artificial Sequence
  Description of Artificial Sequence: Synthetic oligonucleotide
agcguccucauauucagau

SEQ ID NO: 2490066 - RNA, 19 nt, Artificial Sequence
  Description of Artificial Sequence: Synthetic oligonucleotide
guagccaggaagucugagc

SEQ ID NO: 2490067 - RNA, 19 nt, Artificial Sequence
  Description of Artificial Sequence: Synthetic oligonucleotide
ucuggcuaaauuggggaca

SEQ ID NO: 2490068 - RNA, 19 nt, Artificial Sequence
  Description of Artificial Sequence: Synthetic oligonucleotide
ccaacaagacaaaagggug

SEQ ID NO: 2490069 - RNA, 19 nt, Artificial Sequence
  Description of Artificial Sequence: Synthetic oligonucleotide
ccugcauucuucaggaugc

SEQ ID NO: 2490070 - RNA, 19 nt, Artificial Sequence
  Description of Artificial Sequence: Synthetic oligonucleotide
guagacaauauugcgagaa

SEQ ID NO: 2490071 - RNA, 19 nt, Artificial Sequence
  Description of Artificial Sequence: Synthetic oligonucleotide
uguuuguguccccuggaau

SEQ ID NO: 2490072 - RNA, 19 nt, Artificial Sequence
  Description of Artificial Sequence: Synthetic oligonucleotide
gcugucguccccuagacac

SEQ ID NO: 2490073 - RNA, 19 nt, Artificial Sequence
  Description of Artificial Sequence: Synthetic oligonucleotide
ugucuguccgggcaaagua

SEQ ID NO: 2490074 - RNA, 19 nt, Artificial Sequence
  Description of Artificial Sequence: Synthetic oligonucleotide
uauuggcuguuguacuuga

SEQ ID NO: 2490075 - RNA, 19 nt, Artificial Sequence
  Description of Artificial Sequence: Synthetic oligonucleotide
cuuggcauccauuugggua

SEQ ID NO: 2490076 - RNA, 19 nt, Artificial Sequence
  Description of Artificial Sequence: Synthetic oligonucleotide
gagacuuggcauccauuug

SEQ ID NO: 2490077 - RNA, 19 nt, Artificial Sequence
  Description of Artificial Sequence: Synthetic oligonucleotide
gaccugagugaaugagacg

SEQ ID NO: 2490078 - RNA, 19 nt, Artificial Sequence
  Description of Artificial Sequence: Synthetic oligonucleotide
gcaguaagggcacuguuug

SEQ ID NO: 2490079 - RNA, 19 nt, Artificial Sequence
  Description of Artificial Sequence: Synthetic oligonucleotide
caggagaguaauagggcug

SEQ ID NO: 2490080 - RNA, 19 nt, Artificial Sequence
  Description of Artificial Sequence: Synthetic oligonucleotide
ucguccccuagacaccccg

SEQ ID NO: 2490081 - RNA, 19 nt, Artificial Sequence
  Description of Artificial Sequence: Synthetic oligonucleotide
ugagguagccaggaagucu

SEQ ID NO: 2490082 - RNA, 19 nt, Artificial Sequence
  Description of Artificial Sequence: Synthetic oligonucleotide
aauagggcugucguccccu

SEQ ID NO: 2490083 - RNA, 19 nt, Artificial Sequence
  Description of Artificial Sequence: Synthetic oligonucleotide
ugggagcuaagccgccugg

SEQ ID NO: 2490084 - RNA, 19 nt, Artificial Sequence
  Description of Artificial Sequence: Synthetic oligonucleotide
uacuuguagaggaggcagu

SEQ ID NO: 2490085 - RNA, 19 nt, Artificial Sequence
  Description of Artificial Sequence: Synthetic oligonucleotide
uauugcgagaacgggcccc

SEQ ID NO: 2490086 - RNA, 19 nt, Artificial Sequence
  Description of Artificial Sequence: Synthetic oligonucleotide
ugcauucuucaggaugcgg

SEQ ID NO: 2490087 - RNA, 19 nt, Artificial Sequence
  Description of Artificial Sequence: Synthetic oligonucleotide
ccucauauucagauauugg

SEQ ID NO: 2490088 - RNA, 19 nt, Artificial Sequence
  Description of Artificial Sequence: Synthetic oligonucleotide
cuggagaccugagugaaug

SEQ ID NO: 2490089 - RNA, 19 nt, Artificial Sequence
  Description of Artificial Sequence: Synthetic oligonucleotide
guaauagggcugucguccc

SEQ ID NO: 2490090 - RNA, 19 nt, Artificial Sequence
  Description of Artificial Sequence: Synthetic oligonucleotide
ucugagccaucacucuucu

SEQ ID NO: 2490091 - RNA, 19 nt, Artificial Sequence
  Description of Artificial Sequence: Synthetic oligonucleotide
cagcuaugggagcuaagcc

SEQ ID NO: 2490092 - RNA, 19 nt, Artificial Sequence
  Description of Artificial Sequence: Synthetic oligonucleotide
gugaaguucucacaguugu

SEQ ID NO: 2490093 - RNA, 19 nt, Artificial Sequence
  Description of Artificial Sequence: Synthetic oligonucleotide
uaguagaaccacugcggcu

SEQ ID NO: 2490094 - RNA, 19 nt, Artificial Sequence
  Description of Artificial Sequence: Synthetic oligonucleotide
cauuuggguagguggccgg

SEQ ID NO: 2490095 - RNA, 19 nt, Artificial Sequence
  Description of Artificial Sequence: Synthetic oligonucleotide
agggcacuguuuguguccc

SEQ ID NO: 2490096 - RNA, 19 nt, Artificial Sequence
  Description of Artificial Sequence: Synthetic oligonucleotide
gaaugcucaugguagauuu

SEQ ID NO: 2490097 - RNA, 19 nt, Artificial Sequence
  Description of Artificial Sequence: Synthetic oligonucleotide
auauuggcuguuguacuug

SEQ ID NO: 2490098 - RNA, 19 nt, Artificial Sequence
  Description of Artificial Sequence: Synthetic oligonucleotide
gagacgaaagugaaguucu

SEQ ID NO: 2490099 - RNA, 19 nt, Artificial Sequence
  Description of Artificial Sequence: Synthetic oligonucleotide
uaauagggcugucgucccc

SEQ ID NO: 2490100 - RNA, 19 nt, Artificial Sequence
  Description of Artificial Sequence: Synthetic oligonucleotide
uguccgggcaaaguagggc

SEQ ID NO: 2490101 - RNA, 19 nt, Artificial Sequence
  Description of Artificial Sequence: Synthetic oligonucleotide
agcuugaccuuucuggcua

SEQ ID NO: 2490102 - RNA, 19 nt, Artificial Sequence
  Description of Artificial Sequence: Synthetic oligonucleotide
guggauguacauguacuug

SEQ ID NO: 2490103 - RNA, 19 nt, Artificial Sequence
  Description of Artificial Sequence: Synthetic oligonucleotide
aguagacaauauugcgaga

SEQ ID NO: 2490104 - RNA, 19 nt, Artificial Sequence
  Description of Artificial Sequence: Synthetic oligonucleotide
aaagggagaaguagacaau

SEQ ID NO: 2490105 - RNA, 19 nt, Artificial Sequence
  Description of Artificial Sequence: Synthetic oligonucleotide
gacgaaagugaaguucuca

SEQ ID NO: 2490106 - RNA, 19 nt, Artificial Sequence
  Description of Artificial Sequence: Synthetic oligonucleotide
gaguaauagggcugucguc

SEQ ID NO: 2490107 - RNA, 19 nt, Artificial Sequence
  Description of Artificial Sequence: Synthetic oligonucleotide
acggcgaauggcaugaagu

SEQ ID NO: 2490108 - RNA, 19 nt, Artificial Sequence
  Description of Artificial Sequence: Synthetic oligonucleotide
gcgaauggcaugaagugag

SEQ ID NO: 2490109 - RNA, 19 nt, Artificial Sequence
  Description of Artificial Sequence: Synthetic oligonucleotide
caggaugcgguccaggcca

SEQ ID NO: 2490110 - RNA, 19 nt, Artificial Sequence
  Description of Artificial Sequence: Synthetic oligonucleotide
ugucguccccuagacaccc

SEQ ID NO: 2490111 - RNA, 19 nt, Artificial Sequence
  Description of Artificial Sequence: Synthetic oligonucleotide
ugugggucuuugagcaacu

SEQ ID NO: 2490112 - RNA, 19 nt, Artificial Sequence
  Description of Artificial Sequence: Synthetic oligonucleotide
uccauuuggguagguggcc

SEQ ID NO: 2490113 - RNA, 19 nt, Artificial Sequence
  Description of Artificial Sequence: Synthetic oligonucleotide
acacauugccccaugucug

SEQ ID NO: 2490114 - RNA, 19 nt, Artificial Sequence
  Description of Artificial Sequence: Synthetic oligonucleotide
gagcuaagccgccuggaga

SEQ ID NO: 2490115 - RNA, 19 nt, Artificial Sequence
  Description of Artificial Sequence: Synthetic oligonucleotide
acaauuccccggagggacc

SEQ ID NO: 2490116 - RNA, 19 nt, Artificial Sequence
  Description of Artificial Sequence: Synthetic oligonucleotide
gcuaugggagcuaagccgc

SEQ ID NO: 2490117 - RNA, 19 nt, Artificial Sequence
  Description of Artificial Sequence: Synthetic oligonucleotide
cacacucuaguagaaccac

SEQ ID NO: 2490118 - RNA, 19 nt, Artificial Sequence
  Description of Artificial Sequence: Synthetic oligonucleotide
augcgguccaggccacggc

SEQ ID NO: 2490119 - RNA, 19 nt, Artificial Sequence
  Description of Artificial Sequence: Synthetic oligonucleotide
gagaccugagugaaugaga

SEQ ID NO: 2490120 - RNA, 19 nt, Artificial Sequence
  Description of Artificial Sequence: Synthetic oligonucleotide
gcuaaauuggggacaauuc

SEQ ID NO: 2490121 - RNA, 19 nt, Artificial Sequence
  Description of Artificial Sequence: Synthetic oligonucleotide
cuguccgggcaaaguaggg

SEQ ID NO: 2490122 - RNA, 19 nt, Artificial Sequence
  Description of Artificial Sequence: Synthetic oligonucleotide
agcaacucgaugucaccau

SEQ ID NO: 2490123 - RNA, 19 nt, Artificial Sequence
  Description of Artificial Sequence: Synthetic oligonucleotide
ccaugacacacucuaguag

SEQ ID NO: 2490124 - RNA, 19 nt, Artificial Sequence
  Description of Artificial Sequence: Synthetic oligonucleotide
gucuguccgggcaaaguag

SEQ ID NO: 2490125 - RNA, 19 nt, Artificial Sequence
  Description of Artificial Sequence: Synthetic oligonucleotide
cuugaguuucuugguggag

SEQ ID NO: 2490126 - RNA, 19 nt, Artificial Sequence
  Description of Artificial Sequence: Synthetic oligonucleotide
acugcggcucucucgcuug

SEQ ID NO: 2490127 - RNA, 19 nt, Artificial Sequence
  Description of Artificial Sequence: Synthetic oligonucleotide
cauaccacacauugcccca

SEQ ID NO: 2490128 - RNA, 19 nt, Artificial Sequence
  Description of Artificial Sequence: Synthetic oligonucleotide
uccgggcaaaguagggcug

SEQ ID NO: 2490129 - RNA, 19 nt, Artificial Sequence
  Description of Artificial Sequence: Synthetic oligonucleotide
ugucaccauacaucagauc

SEQ ID NO: 2490130 - RNA, 19 nt, Artificial Sequence
  Description of Artificial Sequence: Synthetic oligonucleotide
gauauuggcuguuguacuu

SEQ ID NO: 2490131 - RNA, 19 nt, Artificial Sequence
  Description of Artificial Sequence: Synthetic oligonucleotide
augaagugagguagccagg

SEQ ID NO: 2490132 - RNA, 19 nt, Artificial Sequence
  Description of Artificial Sequence: Synthetic oligonucleotide
guacuugaccacuguggac

SEQ ID NO: 2490133 - RNA, 19 nt, Artificial Sequence
  Description of Artificial Sequence: Synthetic oligonucleotide
ucgcuugacacugucuguc

SEQ ID NO: 2490134 - RNA, 19 nt, Artificial Sequence
  Description of Artificial Sequence: Synthetic oligonucleotide
cacacauugccccaugucu

SEQ ID NO: 2490135 - RNA, 19 nt, Artificial Sequence
  Description of Artificial Sequence: Synthetic oligonucleotide
aauuccccggagggaccgc

SEQ ID NO: 2490136 - RNA, 19 nt, Artificial Sequence
  Description of Artificial Sequence: Synthetic oligonucleotide
uacaucagaucugcaugcu

SEQ ID NO: 2490137 - RNA, 19 nt, Artificial Sequence
  Description of Artificial Sequence: Synthetic oligonucleotide
uggagaccugagugaauga

SEQ ID NO: 2490138 - RNA, 19 nt, Artificial Sequence
  Description of Artificial Sequence: Synthetic oligonucleotide
gcuugacacugucuguccg

SEQ ID NO: 2490139 - RNA, 19 nt, Artificial Sequence
  Description of Artificial Sequence: Synthetic oligonucleotide
ggagaccugagugaaugag

SEQ ID NO: 2490140 - RNA, 19 nt, Artificial Sequence
  Description of Artificial Sequence: Synthetic oligonucleotide
ugaaggugcugcuggugau

SEQ ID NO: 2490141 - RNA, 19 nt, Artificial Sequence
  Description of Artificial Sequence: Synthetic oligonucleotide
ucucucgcuugacacuguc

SEQ ID NO: 2490142 - RNA, 19 nt, Artificial Sequence
  Description of Artificial Sequence: Synthetic oligonucleotide
augggagcuaagccgccug

SEQ ID NO: 2490143 - RNA, 19 nt, Artificial Sequence
  Description of Artificial Sequence: Synthetic oligonucleotide
cugugggucuuugagcaac

SEQ ID NO: 2490144 - RNA, 19 nt, Artificial Sequence
  Description of Artificial Sequence: Synthetic oligonucleotide
uauucagauauuggcuguu

SEQ ID NO: 2490145 - RNA, 19 nt, Artificial Sequence
  Description of Artificial Sequence: Synthetic oligonucleotide
aagguagaagggagacuug

SEQ ID NO: 2490146 - RNA, 19 nt, Artificial Sequence
  Description of Artificial Sequence: Synthetic oligonucleotide
cuaugggagcuaagccgcc

SEQ ID NO: 2490147 - RNA, 19 nt, Artificial Sequence
  Description of Artificial Sequence: Synthetic oligonucleotide
uguggacaggagaguaaua

SEQ ID NO: 2490148 - RNA, 19 nt, Artificial Sequence
  Description of Artificial Sequence: Synthetic oligonucleotide
caauuccccggagggaccg

SEQ ID NO: 2490149 - RNA, 19 nt, Artificial Sequence
  Description of Artificial Sequence: Synthetic oligonucleotide
ccugccuuacucagaaccc

SEQ ID NO: 2490150 - RNA, 19 nt, Artificial Sequence
  Description of Artificial Sequence: Synthetic oligonucleotide
auuggcuguuguacuugac

SEQ ID NO: 2490151 - RNA, 19 nt, Artificial Sequence
  Description of Artificial Sequence: Synthetic oligonucleotide
gggucuuugagcaacucga

SEQ ID NO: 2490152 - RNA, 19 nt, Artificial Sequence
  Description of Artificial Sequence: Synthetic oligonucleotide
uaccacacauugccccaug

SEQ ID NO: 2490153 - RNA, 19 nt, Artificial Sequence
  Description of Artificial Sequence: Synthetic oligonucleotide
cugucguccccuagacacc

SEQ ID NO: 2490154 - RNA, 19 nt, Artificial Sequence
  Description of Artificial Sequence: Synthetic oligonucleotide
auggaaaagcccacaccug

SEQ ID NO: 2490155 - RNA, 19 nt, Artificial Sequence
  Description of Artificial Sequence: Synthetic oligonucleotide
ugucuguggccuccuuccu

SEQ ID NO: 2490156 - RNA, 19 nt, Artificial Sequence
  Description of Artificial Sequence: Synthetic oligonucleotide
augagacgaaagugaaguu

SEQ ID NO: 2490157 - RNA, 19 nt, Artificial Sequence
  Description of Artificial Sequence: Synthetic oligonucleotide
uccccuagacaccccgccu

SEQ ID NO: 2490158 - RNA, 19 nt, Artificial Sequence
  Description of Artificial Sequence: Synthetic oligonucleotide
uggaaugcucaugguagau

SEQ ID NO: 2490159 - RNA, 19 nt, Artificial Sequence
  Description of Artificial Sequence: Synthetic oligonucleotide
guccccuagacaccccgcc

SEQ ID NO: 2490160 - RNA, 19 nt, Artificial Sequence
  Description of Artificial Sequence: Synthetic oligonucleotide
agacgaaagugaaguucuc

SEQ ID NO: 2490161 - RNA, 19 nt, Artificial Sequence
  Description of Artificial Sequence: Synthetic oligonucleotide
uaugggagcuaagccgccu

SEQ ID NO: 2490162 - RNA, 19 nt, Artificial Sequence
  Description of Artificial Sequence: Synthetic oligonucleotide
aagcccacaccugcauucu

SEQ ID NO: 2490163 - RNA, 19 nt, Artificial Sequence
  Description of Artificial Sequence: Synthetic oligonucleotide
ugacacugucuguccgggc

SEQ ID NO: 2490164 - RNA, 19 nt, Artificial Sequence
  Description of Artificial Sequence: Synthetic oligonucleotide
cacggcgaauggcaugaag

SEQ ID NO: 2490165 - RNA, 19 nt, Artificial Sequence
  Description of Artificial Sequence: Synthetic oligonucleotide
uagggcugucguccccuag

SEQ ID NO: 2490166 - RNA, 19 nt, Artificial Sequence
  Description of Artificial Sequence: Synthetic oligonucleotide
ggaagucugagccaucacu

SEQ ID NO: 2490167 - RNA, 19 nt, Artificial Sequence
  Description of Artificial Sequence: Synthetic oligonucleotide
uaagccgccuggagaccug

SEQ ID NO: 2490168 - RNA, 19 nt, Artificial Sequence
  Description of Artificial Sequence: Synthetic oligonucleotide
gaggaggcaguaagggcac

SEQ ID NO: 2490169 - RNA, 19 nt, Artificial Sequence
  Description of Artificial Sequence: Synthetic oligonucleotide
acuuguagaggaggcagua

SEQ ID NO: 2490170 - RNA, 19 nt, Artificial Sequence
  Description of Artificial Sequence: Synthetic oligonucleotide
cuggaaugcucaugguaga

SEQ ID NO: 2490171 - RNA, 19 nt, Artificial Sequence
  Description of Artificial Sequence: Synthetic oligonucleotide
gguagaagggagacuuggc

SEQ ID NO: 2490172 - RNA, 19 nt, Artificial Sequence
  Description of Artificial Sequence: Synthetic oligonucleotide
uugaccuuucuggcuaaau

SEQ ID NO: 2490173 - RNA, 19 nt, Artificial Sequence
  Description of Artificial Sequence: Synthetic oligonucleotide
aaugcucaugguagauuuu

SEQ ID NO: 2490174 - RNA, 19 nt, Artificial Sequence
  Description of Artificial Sequence: Synthetic oligonucleotide
uggccgguggauguacaug

SEQ ID NO: 2490175 - RNA, 19 nt, Artificial Sequence
  Description of Artificial Sequence: Synthetic oligonucleotide
caucagaaagggagaagua

SEQ ID NO: 2490176 - RNA, 19 nt, Artificial Sequence
  Description of Artificial Sequence: Synthetic oligonucleotide
guaagggcacuguuugugu

SEQ ID NO: 2490177 - RNA, 19 nt, Artificial Sequence
  Description of Artificial Sequence: Synthetic oligonucleotide
ucucacaguuguccagcuu

SEQ ID NO: 2490178 - RNA, 19 nt, Artificial Sequence
  Description of Artificial Sequence: Synthetic oligonucleotide
ggaggguucacuggcagca

SEQ ID NO: 2490179 - RNA, 19 nt, Artificial Sequence
  Description of Artificial Sequence: Synthetic oligonucleotide
guccaggccacggcgaaug

SEQ ID NO: 2490180 - RNA, 19 nt, Artificial Sequence
  Description of Artificial Sequence: Synthetic oligonucleotide
agggagacuuggcauccau

SEQ ID NO: 2490181 - RNA, 19 nt, Artificial Sequence
  Description of Artificial Sequence: Synthetic oligonucleotide
augucaccauacaucagau

SEQ ID NO: 2490182 - RNA, 19 nt, Artificial Sequence
  Description of Artificial Sequence: Synthetic oligonucleotide
acacucuaguagaaccacu

SEQ ID NO: 2490183 - RNA, 19 nt, Artificial Sequence
  Description of Artificial Sequence: Synthetic oligonucleotide
ggcaugaagugagguagcc

SEQ ID NO: 2490184 - RNA, 19 nt, Artificial Sequence
  Description of Artificial Sequence: Synthetic oligonucleotide
auuuggguagguggccggu

SEQ ID NO: 2490185 - RNA, 19 nt, Artificial Sequence
  Description of Artificial Sequence: Synthetic oligonucleotide
guccgggcaaaguagggcu

SEQ ID NO: 2490186 - RNA, 19 nt, Artificial Sequence
  Description of Artificial Sequence: Synthetic oligonucleotide
agguggccgguggauguac

SEQ ID NO: 2490187 - RNA, 19 nt, Artificial Sequence
  Description of Artificial Sequence: Synthetic oligonucleotide
gcucucucgcuugacacug

SEQ ID NO: 2490188 - RNA, 19 nt, Artificial Sequence
  Description of Artificial Sequence: Synthetic oligonucleotide
gauuuucccaugacacacu

SEQ ID NO: 2490189 - RNA, 19 nt, Artificial Sequence
  Description of Artificial Sequence: Synthetic oligonucleotide
uugccccaugucuguggcc

SEQ ID NO: 2490190 - RNA, 19 nt, Artificial Sequence
  Description of Artificial Sequence: Synthetic oligonucleotide
gcugcuggugauggaaaag

SEQ ID NO: 2490191 - RNA, 19 nt, Artificial Sequence
  Description of Artificial Sequence: Synthetic oligonucleotide
cugagugaaugagacgaaa

SEQ ID NO: 2490192 - RNA, 19 nt, Artificial Sequence
  Description of Artificial Sequence: Synthetic oligonucleotide
ccauuuggguagguggccg

SEQ ID NO: 2490193 - RNA, 19 nt, Artificial Sequence
  Description of Artificial Sequence: Synthetic oligonucleotide
guagguggccgguggaugu

SEQ ID NO: 2490194 - RNA, 19 nt, Artificial Sequence
  Description of Artificial Sequence: Synthetic oligonucleotide
acauugccccaugucugug

SEQ ID NO: 2490195 - RNA, 19 nt, Artificial Sequence
  Description of Artificial Sequence: Synthetic oligonucleotide
ccgccuggagaccugagug

SEQ ID NO: 2490196 - RNA, 19 nt, Artificial Sequence
  Description of Artificial Sequence: Synthetic oligonucleotide
cugccuuacucagaaccca

SEQ ID NO: 2490197 - RNA, 19 nt, Artificial Sequence
  Description of Artificial Sequence: Synthetic oligonucleotide
agacaccccgccugccaca

SEQ ID NO: 2490198 - RNA, 19 nt, Artificial Sequence
  Description of Artificial Sequence: Synthetic oligonucleotide
ggcgaauggcaugaaguga

SEQ ID NO: 2490199 - RNA, 19 nt, Artificial Sequence
  Description of Artificial Sequence: Synthetic oligonucleotide
ccgguggauguacauguac

SEQ ID NO: 2490200 - RNA, 19 nt, Artificial Sequence
  Description of Artificial Sequence: Synthetic oligonucleotide
gugagguagccaggaaguc

SEQ ID NO: 2490201 - RNA, 19 nt, Artificial Sequence
  Description of Artificial Sequence: Synthetic oligonucleotide
cuuguagaggaggcaguaa

SEQ ID NO: 2490202 - RNA, 19 nt, Artificial Sequence
  Description of Artificial Sequence: Synthetic oligonucleotide
auaccacacauugccccau

SEQ ID NO: 2490203 - RNA, 19 nt, Artificial Sequence
  Description of Artificial Sequence: Synthetic oligonucleotide
aagccgccuggagaccuga

SEQ ID NO: 2490204 - RNA, 19 nt, Artificial Sequence
  Description of Artificial Sequence: Synthetic oligonucleotide
guaagguagaagggagacu

SEQ ID NO: 2490205 - RNA, 19 nt, Artificial Sequence
  Description of Artificial Sequence: Synthetic oligonucleotide
cggcgaauggcaugaagug

SEQ ID NO: 2490206 - RNA, 19 nt, Artificial Sequence
  Description of Artificial Sequence: Synthetic oligonucleotide
aggaugcgguccaggccac

SEQ ID NO: 2490207 - RNA, 19 nt, Artificial Sequence
  Description of Artificial Sequence: Synthetic oligonucleotide
cacauugccccaugucugu

SEQ ID NO: 2490208 - RNA, 19 nt, Artificial Sequence
  Description of Artificial Sequence: Synthetic oligonucleotide
accauacaucagaucugca

SEQ ID NO: 2490209 - RNA, 19 nt, Artificial Sequence
  Description of Artificial Sequence: Synthetic oligonucleotide
cacuguggacaggagagua

SEQ ID NO: 2490210 - RNA, 19 nt, Artificial Sequence
  Description of Artificial Sequence: Synthetic oligonucleotide
cuguggccuccuuccuggc

SEQ ID NO: 2490211 - RNA, 19 nt, Artificial Sequence
  Description of Artificial Sequence: Synthetic oligonucleotide
auuccccggagggaccgca

SEQ ID NO: 2490212 - RNA, 19 nt, Artificial Sequence
  Description of Artificial Sequence: Synthetic oligonucleotide
gaggcaguaagggcacugu

SEQ ID NO: 2490213 - RNA, 19 nt, Artificial Sequence
  Description of Artificial Sequence: Synthetic oligonucleotide
ccauacaucagaucugcau

SEQ ID NO: 2490214 - RNA, 19 nt, Artificial Sequence
  Description of Artificial Sequence: Synthetic oligonucleotide
gcuguuguacuugaccacu

SEQ ID NO: 2490215 - RNA, 19 nt, Artificial Sequence
  Description of Artificial Sequence: Synthetic oligonucleotide
uccuggcuguaagguagaa

SEQ ID NO: 2490216 - RNA, 19 nt, Artificial Sequence
  Description of Artificial Sequence: Synthetic oligonucleotide
gggcugucguccccuagac

SEQ ID NO: 2490217 - RNA, 19 nt, Artificial Sequence
  Description of Artificial Sequence: Synthetic oligonucleotide
gccacggcgaauggcauga

SEQ ID NO: 2490218 - RNA, 19 nt, Artificial Sequence
  Description of Artificial Sequence: Synthetic oligonucleotide
auagggcugucguccccua

SEQ ID NO: 2490219 - RNA, 19 nt, Artificial Sequence
  Description of Artificial Sequence: Synthetic oligonucleotide
cgcuugacacugucugucc

SEQ ID NO: 2490220 - RNA, 19 nt, Artificial Sequence
  Description of Artificial Sequence: Synthetic oligonucleotide
cucgcuugacacugucugu

SEQ ID NO: 2490221 - RNA, 19 nt, Artificial Sequence
  Description of Artificial Sequence: Synthetic oligonucleotide
ccccuagacaccccgccug

SEQ ID NO: 2490222 - RNA, 19 nt, Artificial Sequence
  Description of Artificial Sequence: Synthetic oligonucleotide
ggccacggcgaauggcaug

SEQ ID NO: 2490223 - RNA, 19 nt, Artificial Sequence
  Description of Artificial Sequence: Synthetic oligonucleotide
cccuagacaccccgccugc

SEQ ID NO: 2490224 - RNA, 19 nt, Artificial Sequence
  Description of Artificial Sequence: Synthetic oligonucleotide
cccaugacacacucuagua

SEQ ID NO: 2490225 - RNA, 19 nt, Artificial Sequence
  Description of Artificial Sequence: Synthetic oligonucleotide
cuguggacaggagaguaau

SEQ ID NO: 2490226 - RNA, 19 nt, Artificial Sequence
  Description of Artificial Sequence: Synthetic oligonucleotide
ggacaauuccccggaggga

SEQ ID NO: 2490227 - RNA, 19 nt, Artificial Sequence
  Description of Artificial Sequence: Synthetic oligonucleotide
guagaaccacugcggcucu

SEQ ID NO: 2490228 - RNA, 19 nt, Artificial Sequence
  Description of Artificial Sequence: Synthetic oligonucleotide
gcaacucgaugucaccaua

SEQ ID NO: 2490229 - RNA, 19 nt, Artificial Sequence
  Description of Artificial Sequence: Synthetic oligonucleotide
ugcuggccuuggaggguuc

SEQ ID NO: 2490230 - RNA, 19 nt, Artificial Sequence
  Description of Artificial Sequence: Synthetic oligonucleotide
ugcggcucucucgcuugac

SEQ ID NO: 2490231 - RNA, 19 nt, Artificial Sequence
  Description of Artificial Sequence: Synthetic oligonucleotide
cuaagccgccuggagaccu

SEQ ID NO: 2490232 - RNA, 19 nt, Artificial Sequence
  Description of Artificial Sequence: Synthetic oligonucleotide
cagcguccucauauucaga

SEQ ID NO: 2490233 - RNA, 19 nt, Artificial Sequence
  Description of Artificial Sequence: Synthetic oligonucleotide
cguccucauauucagauau

SEQ ID NO: 2490234 - RNA, 19 nt, Artificial Sequence
  Description of Artificial Sequence: Synthetic oligonucleotide
agcccacaccugcauucuu

SEQ ID NO: 2490235 - RNA, 19 nt, Artificial Sequence
  Description of Artificial Sequence: Synthetic oligonucleotide
acaccccgccugccacauc

SEQ ID NO: 2490236 - RNA, 19 nt, Artificial Sequence
  Description of Artificial Sequence: Synthetic oligonucleotide
caguaagggcacuguuugu

SEQ ID NO: 2490237 - RNA, 19 nt, Artificial Sequence
  Description of Artificial Sequence: Synthetic oligonucleotide
ccggagggaccgcagcccc

SEQ ID NO: 2490238 - RNA, 19 nt, Artificial Sequence
  Description of Artificial Sequence: Synthetic oligonucleotide
cgacaucccugccuuacuc

SEQ ID NO: 2490239 - RNA, 19 nt, Artificial Sequence
  Description of Artificial Sequence: Synthetic oligonucleotide
cccuggaaugcucauggua

SEQ ID NO: 2490240 - RNA, 19 nt, Artificial Sequence
  Description of Artificial Sequence: Synthetic oligonucleotide
gcccacaccugcauucuuc

SEQ ID NO: 2490241 - RNA, 19 nt, Artificial Sequence
  Description of Artificial Sequence: Synthetic oligonucleotide
uggcuaaauuggggacaau

SEQ ID NO: 2490242 - RNA, 19 nt, Artificial Sequence
  Description of Artificial Sequence: Synthetic oligonucleotide
gcuaagccgccuggagacc

SEQ ID NO: 2490243 - RNA, 19 nt, Artificial Sequence
  Description of Artificial Sequence: Synthetic oligonucleotide
gccuggagaccugagugaa

SEQ ID NO: 2490244 - RNA, 19 nt, Artificial Sequence
  Description of Artificial Sequence: Synthetic oligonucleotide
ggcucucucgcuugacacu

SEQ ID NO: 2490245 - RNA, 19 nt, Artificial Sequence
  Description of Artificial Sequence: Synthetic oligonucleotide
ggcaguaagggcacuguuu

SEQ ID NO: 2490246 - RNA, 19 nt, Artificial Sequence
  Description of Artificial Sequence: Synthetic oligonucleotide
gcuugaccuuucuggcuaa

SEQ ID NO: 2490247 - RNA, 19 nt, Artificial Sequence
  Description of Artificial Sequence: Synthetic oligonucleotide
gucguccccuagacacccc

SEQ ID NO: 2490248 - RNA, 19 nt, Artificial Sequence
  Description of Artificial Sequence: Synthetic oligonucleotide
gagggaccgcagccccauc

SEQ ID NO: 2490249 - RNA, 19 nt, Artificial Sequence
  Description of Artificial Sequence: Synthetic oligonucleotide
cugucuguccgggcaaagu

SEQ ID NO: 2490250 - RNA, 19 nt, Artificial Sequence
  Description of Artificial Sequence: Synthetic oligonucleotide
ccuagacaccccgccugcc

SEQ ID NO: 2490251 - RNA, 19 nt, Artificial Sequence
  Description of Artificial Sequence: Synthetic oligonucleotide
gcguccucauauucagaua

SEQ ID NO: 2490252 - RNA, 19 nt, Artificial Sequence
  Description of Artificial Sequence: Synthetic oligonucleotide
ggaaugcucaugguagauu

SEQ ID NO: 2490253 - RNA, 19 nt, Artificial Sequence
  Description of Artificial Sequence: Synthetic oligonucleotide
guggccgguggauguacau

SEQ ID NO: 2490254 - RNA, 19 nt, Artificial Sequence
  Description of Artificial Sequence: Synthetic oligonucleotide
caugcuccugcagcguccu

SEQ ID NO: 2490255 - RNA, 19 nt, Artificial Sequence
  Description of Artificial Sequence: Synthetic oligonucleotide
gguucacuggcagcagcua

SEQ ID NO: 2490256 - RNA, 19 nt, Artificial Sequence
  Description of Artificial Sequence: Synthetic oligonucleotide
cacugucuguccgggcaaa

SEQ ID NO: 2490257 - RNA, 19 nt, Artificial Sequence
  Description of Artificial Sequence: Synthetic oligonucleotide
cugcggcucucucgcuuga

SEQ ID NO: 2490258 - RNA, 19 nt, Artificial Sequence
  Description of Artificial Sequence: Synthetic oligonucleotide
gacaccccgccugccacau

SEQ ID NO: 2490259 - RNA, 19 nt, Artificial Sequence
  Description of Artificial Sequence: Synthetic oligonucleotide
guccucauauucagauauu

SEQ ID NO: 2490260 - RNA, 19 nt, Artificial Sequence
  Description of Artificial Sequence: Synthetic oligonucleotide
gggaccgcagccccauccu

SEQ ID NO: 2490261 - RNA, 19 nt, Artificial Sequence
  Description of Artificial Sequence: Synthetic oligonucleotide
gguggccgguggauguaca

SEQ ID NO: 2490262 - RNA, 19 nt, Artificial Sequence
  Description of Artificial Sequence: Synthetic oligonucleotide
cgccuggagaccugaguga

SEQ ID NO: 2490263 - RNA, 19 nt, Artificial Sequence
  Description of Artificial Sequence: Synthetic oligonucleotide
gccgccuggagaccugagu

SEQ ID NO: 2490264 - RNA, 19 nt, Artificial Sequence
  Description of Artificial Sequence: Synthetic oligonucleotide
cacugcggcucucucgcuu

SEQ ID NO: 2490265 - RNA, 19 nt, Artificial Sequence
  Description of Artificial Sequence: Synthetic oligonucleotide
cgccugccacaucuccucc

SEQ ID NO: 2490266 - RNA, 19 nt, Artificial Sequence
  Description of Artificial Sequence: Synthetic oligonucleotide
gccuccuuccuggcuguaa

SEQ ID NO: 2490267 - RNA, 19 nt, Artificial Sequence
  Description of Artificial Sequence: Synthetic oligonucleotide
caccugcauucuucaggau

SEQ ID NO: 2490268 - RNA, 19 nt, Artificial Sequence
  Description of Artificial Sequence: Synthetic oligonucleotide
cugagccaucacucuucuu

SEQ ID NO: 2490269 - RNA, 19 nt, Artificial Sequence
  Description of Artificial Sequence: Synthetic oligonucleotide
ccugcagcguccucauauu

SEQ ID NO: 2490270 - RNA, 19 nt, Artificial Sequence
  Description of Artificial Sequence: Synthetic oligonucleotide
gccgguggauguacaugua

SEQ ID NO: 2490271 - RNA, 19 nt, Artificial Sequence
  Description of Artificial Sequence: Synthetic oligonucleotide
ccgacaucccugccuuacu

SEQ ID NO: 2490272 - RNA, 19 nt, Artificial Sequence
  Description of Artificial Sequence: Synthetic oligonucleotide
ccuggagaccugagugaau

SEQ ID NO: 2490273 - RNA, 19 nt, Artificial Sequence
  Description of Artificial Sequence: Synthetic oligonucleotide
gguccaggccacggcgaau

SEQ ID NO: 2490274 - RNA, 19 nt, Artificial Sequence
  Description of Artificial Sequence: Synthetic oligonucleotide
ccccuggaaugcucauggu

SEQ ID NO: 2490275 - RNA, 19 nt, Artificial Sequence
  Description of Artificial Sequence: Synthetic oligonucleotide
ccacugcggcucucucgcu

SEQ ID NO: 2490276 - RNA, 19 nt, Artificial Sequence
  Description of Artificial Sequence: Synthetic oligonucleotide
ccccgacaucccugccuua

SEQ ID NO: 2490277 - RNA, 19 nt, Artificial Sequence
  Description of Artificial Sequence: Synthetic oligonucleotide
ccacggcgaauggcaugaa

SEQ ID NO: 2490278 - RNA, 19 nt, Artificial Sequence
  Description of Artificial Sequence: Synthetic oligonucleotide
ugaucgacaagacauaucg

SEQ ID NO: 2490279 - RNA, 19 nt, Artificial Sequence
  Description of Artificial Sequence: Synthetic oligonucleotide
aaauuggcgaguuagcaac

SEQ ID NO: 2490280 - RNA, 19 nt, Artificial Sequence
  Description of Artificial Sequence: Synthetic oligonucleotide
accucaaacacauugacac

SEQ ID NO: 2490281 - RNA, 19 nt, Artificial Sequence
  Description of Artificial Sequence: Synthetic oligonucleotide
gaaaauaucccuucaagcc

SEQ ID NO: 2490282 - RNA, 19 nt, Artificial Sequence
  Description of Artificial Sequence: Synthetic oligonucleotide
aaagaguugagaaaguccg

SEQ ID NO: 2490283 - RNA, 19 nt, Artificial Sequence
  Description of Artificial Sequence: Synthetic oligonucleotide
uuuucuggcaaccacacug

SEQ ID NO: 2490284 - RNA, 19 nt, Artificial Sequence
  Description of Artificial Sequence: Synthetic oligonucleotide
uuuuaaccuaauuaaauac

SEQ ID NO: 2490285 - RNA, 19 nt, Artificial Sequence
  Description of Artificial Sequence: Synthetic oligonucleotide
cacauugacacauaguucc

SEQ ID NO: 2490286 - RNA, 19 nt, Artificial Sequence
  Description of Artificial Sequence: Synthetic oligonucleotide
uuaaccuaauuaaauacug

SEQ ID NO: 2490287 - RNA, 19 nt, Artificial Sequence
  Description of Artificial Sequence: Synthetic oligonucleotide
acacaaucagugcagaggc

SEQ ID NO: 2490288 - RNA, 19 nt, Artificial Sequence
  Description of Artificial Sequence: Synthetic oligonucleotide
aaggggaauugccuaaugc

SEQ ID NO: 2490289 - RNA, 19 nt, Artificial Sequence
  Description of Artificial Sequence: Synthetic oligonucleotide
aacuagaaaauaucccuuc

SEQ ID NO: 2490290 - RNA, 19 nt, Artificial Sequence
  Description of Artificial Sequence: Synthetic oligonucleotide
aaaauaucccuucaagcca

SEQ ID NO: 2490291 - RNA, 19 nt, Artificial Sequence
  Description of Artificial Sequence: Synthetic oligonucleotide
aaauacugaaucuuuaauu

SEQ ID NO: 2490292 - RNA, 19 nt, Artificial Sequence
  Description of Artificial Sequence: Synthetic oligonucleotide
uuuaaccuaauuaaauacu

SEQ ID NO: 2490293 - RNA, 19 nt, Artificial Sequence
  Description of Artificial Sequence: Synthetic oligonucleotide
aauugccuaaugcuguuuc

SEQ ID NO: 2490294 - RNA, 19 nt, Artificial Sequence
  Description of Artificial Sequence: Synthetic oligonucleotide
uguagggaaagucugagaa

SEQ ID NO: 2490295 - RNA, 19 nt, Artificial Sequence
  Description of Artificial Sequence: Synthetic oligonucleotide
uccgagauuuucuugaugc

SEQ ID NO: 2490296 - RNA, 19 nt, Artificial Sequence
  Description of Artificial Sequence: Synthetic oligonucleotide
guuagcaacauuuucuggc

SEQ ID NO: 2490297 - RNA, 19 nt, Artificial Sequence
  Description of Artificial Sequence: Synthetic oligonucleotide
agaacaagaaauuggcgag

SEQ ID NO: 2490298 - RNA, 19 nt, Artificial Sequence
  Description of Artificial Sequence: Synthetic oligonucleotide
aaccuaauuaaauacugaa

SEQ ID NO: 2490299 - RNA, 19 nt, Artificial Sequence
  Description of Artificial Sequence: Synthetic oligonucleotide
aguguugcgagucuugauc

SEQ ID NO: 2490300 - RNA, 19 nt, Artificial Sequence
  Description of Artificial Sequence: Synthetic oligonucleotide
uauucuccguucaagagcu

SEQ ID NO: 2490301 - RNA, 19 nt, Artificial Sequence
  Description of Artificial Sequence: Synthetic oligonucleotide
aucgaaagaguugagaaag

SEQ ID NO: 2490302 - RNA, 19 nt, Artificial Sequence
  Description of Artificial Sequence: Synthetic oligonucleotide
gaacaccucaaacacauug

SEQ ID NO: 2490303 - RNA, 19 nt, Artificial Sequence
  Description of Artificial Sequence: Synthetic oligonucleotide
ugacacauaguuccaaaca

SEQ ID NO: 2490304 - RNA, 19 nt, Artificial Sequence
  Description of Artificial Sequence: Synthetic oligonucleotide
acagcgacuucccagcagc

SEQ ID NO: 2490305 - RNA, 19 nt, Artificial Sequence
  Description of Artificial Sequence: Synthetic oligonucleotide
gacacaaucagugcagagg

SEQ ID NO: 2490306 - RNA, 19 nt, Artificial Sequence
  Description of Artificial Sequence: Synthetic oligonucleotide
agagaagacagacuguuga

SEQ ID NO: 2490307 - RNA, 19 nt, Artificial Sequence
  Description of Artificial Sequence: Synthetic oligonucleotide
aaguccgagauuuucuuga

SEQ ID NO: 2490308 - RNA, 19 nt, Artificial Sequence
  Description of Artificial Sequence: Synthetic oligonucleotide
agacuguugacacaaucag

SEQ ID NO: 2490309 - RNA, 19 nt, Artificial Sequence
  Description of Artificial Sequence: Synthetic oligonucleotide
acaauguuacugaaaaggg

SEQ ID NO: 2490310 - RNA, 19 nt, Artificial Sequence
  Description of Artificial Sequence: Synthetic oligonucleotide
gaaagaguugagaaagucc

SEQ ID NO: 2490311 - RNA, 19 nt, Artificial Sequence
  Description of Artificial Sequence: Synthetic oligonucleotide
caagaaauuggcgaguuag

SEQ ID NO: 2490312 - RNA, 19 nt, Artificial Sequence
  Description of Artificial Sequence: Synthetic oligonucleotide
aagaaauuggcgaguuagc

SEQ ID NO: 2490313 - RNA, 19 nt, Artificial Sequence
  Description of Artificial Sequence: Synthetic oligonucleotide
uaaugcuguuuccaagagg

SEQ ID NO: 2490314 - RNA, 19 nt, Artificial Sequence
  Description of Artificial Sequence: Synthetic oligonucleotide
ccuaauuaaauacugaauc

SEQ ID NO: 2490315 - RNA, 19 nt, Artificial Sequence
  Description of Artificial Sequence: Synthetic oligonucleotide
ucugagaaagagagugagg

SEQ ID NO: 2490316 - RNA, 19 nt, Artificial Sequence
  Description of Artificial Sequence: Synthetic oligonucleotide
acuuaacagagucccggcc

SEQ ID NO: 2490317 - RNA, 19 nt, Artificial Sequence
  Description of Artificial Sequence: Synthetic oligonucleotide
uguacagcgacuucccagc

SEQ ID NO: 2490318 - RNA, 19 nt, Artificial Sequence
  Description of Artificial Sequence: Synthetic oligonucleotide
uaaccuaauuaaauacuga

SEQ ID NO: 2490319 - RNA, 19 nt, Artificial Sequence
  Description of Artificial Sequence: Synthetic oligonucleotide
aauguacucucgauucgcc

SEQ ID NO: 2490320 - RNA, 19 nt, Artificial Sequence
  Description of Artificial Sequence: Synthetic oligonucleotide
uuccaaacaauguuacuga

SEQ ID NO: 2490321 - RNA, 19 nt, Artificial Sequence
  Description of Artificial Sequence: Synthetic oligonucleotide
gaggacuuaacagaguccc

SEQ ID NO: 2490322 - RNA, 19 nt, Artificial Sequence
  Description of Artificial Sequence: Synthetic oligonucleotide
auugccuaaugcuguuucc

SEQ ID NO: 2490323 - RNA, 19 nt, Artificial Sequence
  Description of Artificial Sequence: Synthetic oligonucleotide
cuauucuccguucaagagc

SEQ ID NO: 2490324 - RNA, 19 nt, Artificial Sequence
  Description of Artificial Sequence: Synthetic oligonucleotide
caauguacucuauucuccg

SEQ ID NO: 2490325 - RNA, 19 nt, Artificial Sequence
  Description of Artificial Sequence: Synthetic oligonucleotide
acaccucaaacacauugac

SEQ ID NO: 2490326 - RNA, 19 nt, Artificial Sequence
  Description of Artificial Sequence: Synthetic oligonucleotide
uaucccuucaagccaacug

SEQ ID NO: 2490327 - RNA, 19 nt, Artificial Sequence
  Description of Artificial Sequence: Synthetic oligonucleotide
gagauuuucuugaugcugc

SEQ ID NO: 2490328 - RNA, 19 nt, Artificial Sequence
  Description of Artificial Sequence: Synthetic oligonucleotide
gacauaucgaaagaguuga

SEQ ID NO: 2490329 - RNA, 19 nt, Artificial Sequence
  Description of Artificial Sequence: Synthetic oligonucleotide
aaaguccgagauuuucuug

SEQ ID NO: 2490330 - RNA, 19 nt, Artificial Sequence
  Description of Artificial Sequence: Synthetic oligonucleotide
aucgacaagacauaucgaa

SEQ ID NO: 2490331 - RNA, 19 nt, Artificial Sequence
  Description of Artificial Sequence: Synthetic oligonucleotide
uuuaguguugcgagucuug

SEQ ID NO: 2490332 - RNA, 19 nt, Artificial Sequence
  Description of Artificial Sequence: Synthetic oligonucleotide
uugagaaaguccgagauuu

SEQ ID NO: 2490333 - RNA, 19 nt, Artificial Sequence
  Description of Artificial Sequence: Synthetic oligonucleotide
uguacucucgauucgccca

SEQ ID NO: 2490334 - RNA, 19 nt, Artificial Sequence
  Description of Artificial Sequence: Synthetic oligonucleotide
auguacucucgauucgccc

SEQ ID NO: 2490335 - RNA, 19 nt, Artificial Sequence
  Description of Artificial Sequence: Synthetic oligonucleotide
uugaccucccagaacaaga

SEQ ID NO: 2490336 - RNA, 19 nt, Artificial Sequence
  Description of Artificial Sequence: Synthetic oligonucleotide
acugcagagcacgagaguc

SEQ ID NO: 2490337 - RNA, 19 nt, Artificial Sequence
  Description of Artificial Sequence: Synthetic oligonucleotide
guguugcgagucuugaucg

SEQ ID NO: 2490338 - RNA, 19 nt, Artificial Sequence
  Description of Artificial Sequence: Synthetic oligonucleotide
uaguuccaaacaauguuac

SEQ ID NO: 2490339 - RNA, 19 nt, Artificial Sequence
  Description of Artificial Sequence: Synthetic oligonucleotide
uuucuggcaaccacacugc

SEQ ID NO: 2490340 - RNA, 19 nt, Artificial Sequence
  Description of Artificial Sequence: Synthetic oligonucleotide
ugcuguuuccaagaggugc

SEQ ID NO: 2490341 - RNA, 19 nt, Artificial Sequence
  Description of Artificial Sequence: Synthetic oligonucleotide
gacacauaguuccaaacaa

SEQ ID NO: 2490342 - RNA, 19 nt, Artificial Sequence
  Description of Artificial Sequence: Synthetic oligonucleotide
aggggaauugccuaaugcu

SEQ ID NO: 2490343 - RNA, 19 nt, Artificial Sequence
  Description of Artificial Sequence: Synthetic oligonucleotide
ugaucucaauguacucucg

SEQ ID NO: 2490344 - RNA, 19 nt, Artificial Sequence
  Description of Artificial Sequence: Synthetic oligonucleotide
uucucauuuaguguugcga

SEQ ID NO: 2490345 - RNA, 19 nt, Artificial Sequence
  Description of Artificial Sequence: Synthetic oligonucleotide
agucucacccuuugucacc

SEQ ID NO: 2490346 - RNA, 19 nt, Artificial Sequence
  Description of Artificial Sequence: Synthetic oligonucleotide
uaucgaaagaguugagaaa

SEQ ID NO: 2490347 - RNA, 19 nt, Artificial Sequence
  Description of Artificial Sequence: Synthetic oligonucleotide
ucugaacaccucaaacaca

SEQ ID NO: 2490348 - RNA, 19 nt, Artificial Sequence
  Description of Artificial Sequence: Synthetic oligonucleotide
agagucucacccuuuguca

SEQ ID NO: 2490349 - RNA, 19 nt, Artificial Sequence
  Description of Artificial Sequence: Synthetic oligonucleotide
cauuuucuggcaaccacac

SEQ ID NO: 2490350 - RNA, 19 nt, Artificial Sequence
  Description of Artificial Sequence: Synthetic oligonucleotide
uugacacauaguuccaaac

SEQ ID NO: 2490351 - RNA, 19 nt, Artificial Sequence
  Description of Artificial Sequence: Synthetic oligonucleotide
aaaggggaauugccuaaug

SEQ ID NO: 2490352 - RNA, 19 nt, Artificial Sequence
  Description of Artificial Sequence: Synthetic oligonucleotide
agcccuguugcucuggaag

SEQ ID NO: 2490353 - RNA, 19 nt, Artificial Sequence
  Description of Artificial Sequence: Synthetic oligonucleotide
ucgacaagacauaucgaaa

SEQ ID NO: 2490354 - RNA, 19 nt, Artificial Sequence
  Description of Artificial Sequence: Synthetic oligonucleotide
ucauuuaguguugcgaguc

SEQ ID NO: 2490355 - RNA, 19 nt, Artificial Sequence
  Description of Artificial Sequence: Synthetic oligonucleotide
cacggcagagcccaaaggc

SEQ ID NO: 2490356 - RNA, 19 nt, Artificial Sequence
  Description of Artificial Sequence: Synthetic oligonucleotide
cucaugccacaucacaucc

SEQ ID NO: 2490357 - RNA, 19 nt, Artificial Sequence
  Description of Artificial Sequence: Synthetic oligonucleotide
auaggcgcagagaagacag

SEQ ID NO: 2490358 - RNA, 19 nt, Artificial Sequence
  Description of Artificial Sequence: Synthetic oligonucleotide
guugacacaaucagugcag

SEQ ID NO: 2490359 - RNA, 19 nt, Artificial Sequence
  Description of Artificial Sequence: Synthetic oligonucleotide
uggcgaguuagcaacauuu

SEQ ID NO: 2490360 - RNA, 19 nt, Artificial Sequence
  Description of Artificial Sequence: Synthetic oligonucleotide
aaagagagugaggugggga

SEQ ID NO: 2490361 - RNA, 19 nt, Artificial Sequence
  Description of Artificial Sequence: Synthetic oligonucleotide
agaaauuggcgaguuagca

SEQ ID NO: 2490362 - RNA, 19 nt, Artificial Sequence
  Description of Artificial Sequence: Synthetic oligonucleotide
uuacugaaaaggggaauug

SEQ ID NO: 2490363 - RNA, 19 nt, Artificial Sequence
  Description of Artificial Sequence: Synthetic oligonucleotide
ugucauaggcgcagagaag

SEQ ID NO: 2490364 - RNA, 19 nt, Artificial Sequence
  Description of Artificial Sequence: Synthetic oligonucleotide
gaaauuggcgaguuagcaa

SEQ ID NO: 2490365 - RNA, 19 nt, Artificial Sequence
  Description of Artificial Sequence: Synthetic oligonucleotide
auucgcccaguccuggugg

SEQ ID NO: 2490366 - RNA, 19 nt, Artificial Sequence
  Description of Artificial Sequence: Synthetic oligonucleotide
aacaccucaaacacauuga

SEQ ID NO: 2490367 - RNA, 19 nt, Artificial Sequence
  Description of Artificial Sequence: Synthetic oligonucleotide
gagagucucacccuuuguc

SEQ ID NO: 2490368 - RNA, 19 nt, Artificial Sequence
  Description of Artificial Sequence: Synthetic oligonucleotide
gacuuaacagagucccggc

SEQ ID NO: 2490369 - RNA, 19 nt, Artificial Sequence
  Description of Artificial Sequence: Synthetic oligonucleotide
cuguacagcgacuucccag

SEQ ID NO: 2490370 - RNA, 19 nt, Artificial Sequence
  Description of Artificial Sequence: Synthetic oligonucleotide
acaaucagugcagaggcca

SEQ ID NO: 2490371 - RNA, 19 nt, Artificial Sequence
  Description of Artificial Sequence: Synthetic oligonucleotide
uguacucuauucuccguuc

SEQ ID NO: 2490372 - RNA, 19 nt, Artificial Sequence
  Description of Artificial Sequence: Synthetic oligonucleotide
aaauaucccuucaagccaa

SEQ ID NO: 2490373 - RNA, 19 nt, Artificial Sequence
  Description of Artificial Sequence: Synthetic oligonucleotide
ugacacaaucagugcagag

SEQ ID NO: 2490374 - RNA, 19 nt, Artificial Sequence
  Description of Artificial Sequence: Synthetic oligonucleotide
cccagaacaagaaauuggc

SEQ ID NO: 2490375 - RNA, 19 nt, Artificial Sequence
  Description of Artificial Sequence: Synthetic oligonucleotide
gccaguguucuguacagcg

SEQ ID NO: 2490376 - RNA, 19 nt, Artificial Sequence
  Description of Artificial Sequence: Synthetic oligonucleotide
aaacacauugacacauagu

SEQ ID NO: 2490377 - RNA, 19 nt, Artificial Sequence
  Description of Artificial Sequence: Synthetic oligonucleotide
gaaaaggggaauugccuaa

SEQ ID NO: 2490378 - RNA, 19 nt, Artificial Sequence
  Description of Artificial Sequence: Synthetic oligonucleotide
agaaagagagugagguggg

SEQ ID NO: 2490379 - RNA, 19 nt, Artificial Sequence
  Description of Artificial Sequence: Synthetic oligonucleotide
ucuugaucgacaagacaua

SEQ ID NO: 2490380 - RNA, 19 nt, Artificial Sequence
  Description of Artificial Sequence: Synthetic oligonucleotide
aggcgcagaaggcugcugg

SEQ ID NO: 2490381 - RNA, 19 nt, Artificial Sequence
  Description of Artificial Sequence: Synthetic oligonucleotide
ucgaaagaguugagaaagu

SEQ ID NO: 2490382 - RNA, 19 nt, Artificial Sequence
  Description of Artificial Sequence: Synthetic oligonucleotide
ucuaggugagagucucacc

SEQ ID NO: 2490383 - RNA, 19 nt, Artificial Sequence
  Description of Artificial Sequence: Synthetic oligonucleotide
gaucucaauguacucucga

SEQ ID NO: 2490384 - RNA, 19 nt, Artificial Sequence
  Description of Artificial Sequence: Synthetic oligonucleotide
agucuugaucgacaagaca

SEQ ID NO: 2490385 - RNA, 19 nt, Artificial Sequence
  Description of Artificial Sequence: Synthetic oligonucleotide
aacaagaaauuggcgaguu

SEQ ID NO: 2490386 - RNA, 19 nt, Artificial Sequence
  Description of Artificial Sequence: Synthetic oligonucleotide
uuaguguugcgagucuuga

SEQ ID NO: 2490387 - RNA, 19 nt, Artificial Sequence
  Description of Artificial Sequence: Synthetic oligonucleotide
agaagacagacuguugaca

SEQ ID NO: 2490388 - RNA, 19 nt, Artificial Sequence
  Description of Artificial Sequence: Synthetic oligonucleotide
ucacccuuugucacccuug

SEQ ID NO: 2490389 - RNA, 19 nt, Artificial Sequence
  Description of Artificial Sequence: Synthetic oligonucleotide
gagucucacccuuugucac

SEQ ID NO: 2490390 - RNA, 19 nt, Artificial Sequence
  Description of Artificial Sequence: Synthetic oligonucleotide
ugaccucccagaacaagaa

SEQ ID NO: 2490391 - RNA, 19 nt, Artificial Sequence
  Description of Artificial Sequence: Synthetic oligonucleotide
acucuauucuccguucaag

SEQ ID NO: 2490392 - RNA, 19 nt, Artificial Sequence
  Description of Artificial Sequence: Synthetic oligonucleotide
cacccuugcuucaauguac

SEQ ID NO: 2490393 - RNA, 19 nt, Artificial Sequence
  Description of Artificial Sequence: Synthetic oligonucleotide
auaguuccaaacaauguua

SEQ ID NO: 2490394 - RNA, 19 nt, Artificial Sequence
  Description of Artificial Sequence: Synthetic oligonucleotide
aggcgcagagaagacagac

SEQ ID NO: 2490395 - RNA, 19 nt, Artificial Sequence
  Description of Artificial Sequence: Synthetic oligonucleotide
agaaaguccgagauuuucu

SEQ ID NO: 2490396 - RNA, 19 nt, Artificial Sequence
  Description of Artificial Sequence: Synthetic oligonucleotide
uugaucgacaagacauauc

SEQ ID NO: 2490397 - RNA, 19 nt, Artificial Sequence
  Description of Artificial Sequence: Synthetic oligonucleotide
acauaguuccaaacaaugu

SEQ ID NO: 2490398 - RNA, 19 nt, Artificial Sequence
  Description of Artificial Sequence: Synthetic oligonucleotide
gagaaaguccgagauuuuc

SEQ ID NO: 2490399 - RNA, 19 nt, Artificial Sequence
  Description of Artificial Sequence: Synthetic oligonucleotide
aaaagcccuguugcucugg

SEQ ID NO: 2490400 - RNA, 19 nt, Artificial Sequence
  Description of Artificial Sequence: Synthetic oligonucleotide
uacagcgacuucccagcag

SEQ ID NO: 2490401 - RNA, 19 nt, Artificial Sequence
  Description of Artificial Sequence: Synthetic oligonucleotide
aucucaauguacucucgau

SEQ ID NO: 2490402 - RNA, 19 nt, Artificial Sequence
  Description of Artificial Sequence: Synthetic oligonucleotide
cugucauaggcgcagagaa

SEQ ID NO: 2490403 - RNA, 19 nt, Artificial Sequence
  Description of Artificial Sequence: Synthetic oligonucleotide
ugucacccuugcuucaaug

SEQ ID NO: 2490404 - RNA, 19 nt, Artificial Sequence
  Description of Artificial Sequence: Synthetic oligonucleotide
cucuauucuccguucaaga

SEQ ID NO: 2490405 - RNA, 19 nt, Artificial Sequence
  Description of Artificial Sequence: Synthetic oligonucleotide
ucacccuugcuucaaugua

SEQ ID NO: 2490406 - RNA, 19 nt, Artificial Sequence
  Description of Artificial Sequence: Synthetic oligonucleotide
agagcacgagagucucagc

SEQ ID NO: 2490407 - RNA, 19 nt, Artificial Sequence
  Description of Artificial Sequence: Synthetic oligonucleotide
agucucagccaggacugcc

SEQ ID NO: 2490408 - RNA, 19 nt, Artificial Sequence
  Description of Artificial Sequence: Synthetic oligonucleotide
gauucgcccaguccuggug

SEQ ID NO: 2490409 - RNA, 19 nt, Artificial Sequence
  Description of Artificial Sequence: Synthetic oligonucleotide
uugcgagucuugaucgaca

SEQ ID NO: 2490410 - RNA, 19 nt, Artificial Sequence
  Description of Artificial Sequence: Synthetic oligonucleotide
aauaucccuucaagccaac

SEQ ID NO: 2490411 - RNA, 19 nt, Artificial Sequence
  Description of Artificial Sequence: Synthetic oligonucleotide
agcacgagagucucagcca

SEQ ID NO: 2490412 - RNA, 19 nt, Artificial Sequence
  Description of Artificial Sequence: Synthetic oligonucleotide
ucauaggcgcagagaagac

SEQ ID NO: 2490413 - RNA, 19 nt, Artificial Sequence
  Description of Artificial Sequence: Synthetic oligonucleotide
acacggcagagcccaaagg

SEQ ID NO: 2490414 - RNA, 19 nt, Artificial Sequence
  Description of Artificial Sequence: Synthetic oligonucleotide
gauuuucuugaugcugcug

SEQ ID NO: 2490415 - RNA, 19 nt, Artificial Sequence
  Description of Artificial Sequence: Synthetic oligonucleotide
gucuugaucgacaagacau

SEQ ID NO: 2490416 - RNA, 19 nt, Artificial Sequence
  Description of Artificial Sequence: Synthetic oligonucleotide
aguccugguggaucucccg

SEQ ID NO: 2490417 - RNA, 19 nt, Artificial Sequence
  Description of Artificial Sequence: Synthetic oligonucleotide
auguacucuauucuccguu

SEQ ID NO: 2490418 - RNA, 19 nt, Artificial Sequence
  Description of Artificial Sequence: Synthetic oligonucleotide
aaaaggggaauugccuaau

SEQ ID NO: 2490419 - RNA, 19 nt, Artificial Sequence
  Description of Artificial Sequence: Synthetic oligonucleotide
cauaucgaaagaguugaga

SEQ ID NO: 2490420 - RNA, 19 nt, Artificial Sequence
  Description of Artificial Sequence: Synthetic oligonucleotide
ugagagucucacccuuugu

SEQ ID NO: 2490421 - RNA, 19 nt, Artificial Sequence
  Description of Artificial Sequence: Synthetic oligonucleotide
uccugucauaggcgcagag

SEQ ID NO: 2490422 - RNA, 19 nt, Artificial Sequence
  Description of Artificial Sequence: Synthetic oligonucleotide
ugcuucaauguacucuauu

SEQ ID NO: 2490423 - RNA, 19 nt, Artificial Sequence
  Description of Artificial Sequence: Synthetic oligonucleotide
ccagaacaagaaauuggcg

SEQ ID NO: 2490424 - RNA, 19 nt, Artificial Sequence
  Description of Artificial Sequence: Synthetic oligonucleotide
ugcgagucuugaucgacaa

SEQ ID NO: 2490425 - RNA, 19 nt, Artificial Sequence
  Description of Artificial Sequence: Synthetic oligonucleotide
cgacaagacauaucgaaag

SEQ ID NO: 2490426 - RNA, 19 nt, Artificial Sequence
  Description of Artificial Sequence: Synthetic oligonucleotide
guacucucgauucgcccag

SEQ ID NO: 2490427 - RNA, 19 nt, Artificial Sequence
  Description of Artificial Sequence: Synthetic oligonucleotide
uucuccguucaagagcugu

SEQ ID NO: 2490428 - RNA, 19 nt, Artificial Sequence
  Description of Artificial Sequence: Synthetic oligonucleotide
caugccacaucacauccca

SEQ ID NO: 2490429 - RNA, 19 nt, Artificial Sequence
  Description of Artificial Sequence: Synthetic oligonucleotide
caccuccugucauaggcgc

SEQ ID NO: 2490430 - RNA, 19 nt, Artificial Sequence
  Description of Artificial Sequence: Synthetic oligonucleotide
aaucagugcagaggccaug

SEQ ID NO: 2490431 - RNA, 19 nt, Artificial Sequence
  Description of Artificial Sequence: Synthetic oligonucleotide
gggaggacuuaacagaguc

SEQ ID NO: 2490432 - RNA, 19 nt, Artificial Sequence
  Description of Artificial Sequence: Synthetic oligonucleotide
cucucgauucgcccagucc

SEQ ID NO: 2490433 - RNA, 19 nt, Artificial Sequence
  Description of Artificial Sequence: Synthetic oligonucleotide
uaggugagagucucacccu

SEQ ID NO: 2490434 - RNA, 19 nt, Artificial Sequence
  Description of Artificial Sequence: Synthetic oligonucleotide
ugccuaaugcuguuuccaa

SEQ ID NO: 2490435 - RNA, 19 nt, Artificial Sequence
  Description of Artificial Sequence: Synthetic oligonucleotide
agagucccggccuuugccu

SEQ ID NO: 2490436 - RNA, 19 nt, Artificial Sequence
  Description of Artificial Sequence: Synthetic oligonucleotide
cagagcacgagagucucag

SEQ ID NO: 2490437 - RNA, 19 nt, Artificial Sequence
  Description of Artificial Sequence: Synthetic oligonucleotide
uugacacaaucagugcaga

SEQ ID NO: 2490438 - RNA, 19 nt, Artificial Sequence
  Description of Artificial Sequence: Synthetic oligonucleotide
aagaguugagaaaguccga

SEQ ID NO: 2490439 - RNA, 19 nt, Artificial Sequence
  Description of Artificial Sequence: Synthetic oligonucleotide
uguugcgagucuugaucga

SEQ ID NO: 2490440 - RNA, 19 nt, Artificial Sequence
  Description of Artificial Sequence: Synthetic oligonucleotide
aauuggcgaguuagcaaca

SEQ ID NO: 2490441 - RNA, 19 nt, Artificial Sequence
  Description of Artificial Sequence: Synthetic oligonucleotide
cagagaagacagacuguug

SEQ ID NO: 2490442 - RNA, 19 nt, Artificial Sequence
  Description of Artificial Sequence: Synthetic oligonucleotide
cacaaucagugcagaggcc

SEQ ID NO: 2490443 - RNA, 19 nt, Artificial Sequence
  Description of Artificial Sequence: Synthetic oligonucleotide
uucuggcaaccacacugca

SEQ ID NO: 2490444 - RNA, 19 nt, Artificial Sequence
  Description of Artificial Sequence: Synthetic oligonucleotide
auuuucuggcaaccacacu

SEQ ID NO: 2490445 - RNA, 19 nt, Artificial Sequence
  Description of Artificial Sequence: Synthetic oligonucleotide
acucucgauucgcccaguc

SEQ ID NO: 2490446 - RNA, 19 nt, Artificial Sequence
  Description of Artificial Sequence: Synthetic oligonucleotide
agcugucaauuucucauuu

SEQ ID NO: 2490447 - RNA, 19 nt, Artificial Sequence
  Description of Artificial Sequence: Synthetic oligonucleotide
cucuaggugagagucucac

SEQ ID NO: 2490448 - RNA, 19 nt, Artificial Sequence
  Description of Artificial Sequence: Synthetic oligonucleotide
ugguggaucucccgcugca

SEQ ID NO: 2490449 - RNA, 19 nt, Artificial Sequence
  Description of Artificial Sequence: Synthetic oligonucleotide
accucccagaacaagaaau

SEQ ID NO: 2490450 - RNA, 19 nt, Artificial Sequence
  Description of Artificial Sequence: Synthetic oligonucleotide
ucgauucgcccaguccugg

SEQ ID NO: 2490451 - RNA, 19 nt, Artificial Sequence
  Description of Artificial Sequence: Synthetic oligonucleotide
ugggccuuucccacauggc

SEQ ID NO: 2490452 - RNA, 19 nt, Artificial Sequence
  Description of Artificial Sequence: Synthetic oligonucleotide
aagaggugcccuggacuuc

SEQ ID NO: 2490453 - RNA, 19 nt, Artificial Sequence
  Description of Artificial Sequence: Synthetic oligonucleotide
gagucuugaucgacaagac

SEQ ID NO: 2490454 - RNA, 19 nt, Artificial Sequence
  Description of Artificial Sequence: Synthetic oligonucleotide
ggggaauugccuaaugcug

SEQ ID NO: 2490455 - RNA, 19 nt, Artificial Sequence
  Description of Artificial Sequence: Synthetic oligonucleotide
cacacggcagagcccaaag

SEQ ID NO: 2490456 - RNA, 19 nt, Artificial Sequence
  Description of Artificial Sequence: Synthetic oligonucleotide
agcguggcacagcucuagg

SEQ ID NO: 2490457 - RNA, 19 nt, Artificial Sequence
  Description of Artificial Sequence: Synthetic oligonucleotide
cuuaacagagucccggccu

SEQ ID NO: 2490458 - RNA, 19 nt, Artificial Sequence
  Description of Artificial Sequence: Synthetic oligonucleotide
cacacugcagagcacgaga

SEQ ID NO: 2490459 - RNA, 19 nt, Artificial Sequence
  Description of Artificial Sequence: Synthetic oligonucleotide
ugagaaaguccgagauuuu

SEQ ID NO: 2490460 - RNA, 19 nt, Artificial Sequence
  Description of Artificial Sequence: Synthetic oligonucleotide
guacucuauucuccguuca

SEQ ID NO: 2490461 - RNA, 19 nt, Artificial Sequence
  Description of Artificial Sequence: Synthetic oligonucleotide
acacauaguuccaaacaau

SEQ ID NO: 2490462 - RNA, 19 nt, Artificial Sequence
  Description of Artificial Sequence: Synthetic oligonucleotide
cucgauucgcccaguccug

SEQ ID NO: 2490463 - RNA, 19 nt, Artificial Sequence
  Description of Artificial Sequence: Synthetic oligonucleotide
ccuaaugcuguuuccaaga

SEQ ID NO: 2490464 - RNA, 19 nt, Artificial Sequence
  Description of Artificial Sequence: Synthetic oligonucleotide
ugagguggggaggacuuaa

SEQ ID NO: 2490465 - RNA, 19 nt, Artificial Sequence
  Description of Artificial Sequence: Synthetic oligonucleotide
guugcgagucuugaucgac

SEQ ID NO: 2490466 - RNA, 19 nt, Artificial Sequence
  Description of Artificial Sequence: Synthetic oligonucleotide
ccucugaacaccucaaaca

SEQ ID NO: 2490467 - RNA, 19 nt, Artificial Sequence
  Description of Artificial Sequence: Synthetic oligonucleotide
gccuaaugcuguuuccaag

SEQ ID NO: 2490468 - RNA, 19 nt, Artificial Sequence
  Description of Artificial Sequence: Synthetic oligonucleotide
aggacuuaacagagucccg

SEQ ID NO: 2490469 - RNA, 19 nt, Artificial Sequence
  Description of Artificial Sequence: Synthetic oligonucleotide
caucccaggugcacacggc

SEQ ID NO: 2490470 - RNA, 19 nt, Artificial Sequence
  Description of Artificial Sequence: Synthetic oligonucleotide
acaagaaauuggcgaguua

SEQ ID NO: 2490471 - RNA, 19 nt, Artificial Sequence
  Description of Artificial Sequence: Synthetic oligonucleotide
ccaaaggccacuuuugaaa

SEQ ID NO: 2490472 - RNA, 19 nt, Artificial Sequence
  Description of Artificial Sequence: Synthetic oligonucleotide
ugccucugaacaccucaaa

SEQ ID NO: 2490473 - RNA, 19 nt, Artificial Sequence
  Description of Artificial Sequence: Synthetic oligonucleotide
auuuaguguugcgagucuu

SEQ ID NO: 2490474 - RNA, 19 nt, Artificial Sequence
  Description of Artificial Sequence: Synthetic oligonucleotide
acauaucgaaagaguugag

SEQ ID NO: 2490475 - RNA, 19 nt, Artificial Sequence
  Description of Artificial Sequence: Synthetic oligonucleotide
gcuguagggaaagucugag

SEQ ID NO: 2490476 - RNA, 19 nt, Artificial Sequence
  Description of Artificial Sequence: Synthetic oligonucleotide
gccucugaacaccucaaac

SEQ ID NO: 2490477 - RNA, 19 nt, Artificial Sequence
  Description of Artificial Sequence: Synthetic oligonucleotide
gaucgacaagacauaucga

SEQ ID NO: 2490478 - RNA, 19 nt, Artificial Sequence
  Description of Artificial Sequence: Synthetic oligonucleotide
agaggugcccuggacuucu

SEQ ID NO: 2490479 - RNA, 19 nt, Artificial Sequence
  Description of Artificial Sequence: Synthetic oligonucleotide
uuggcgaguuagcaacauu

SEQ ID NO: 2490480 - RNA, 19 nt, Artificial Sequence
  Description of Artificial Sequence: Synthetic oligonucleotide
auguuacugaaaaggggaa

SEQ ID NO: 2490481 - RNA, 19 nt, Artificial Sequence
  Description of Artificial Sequence: Synthetic oligonucleotide
gcgaguuagcaacauuuuc

SEQ ID NO: 2490482 - RNA, 19 nt, Artificial Sequence
  Description of Artificial Sequence: Synthetic oligonucleotide
cucaaacacauugacacau

SEQ ID NO: 2490483 - RNA, 19 nt, Artificial Sequence
  Description of Artificial Sequence: Synthetic oligonucleotide
aggugcccuggacuucuuc

SEQ ID NO: 2490484 - RNA, 19 nt, Artificial Sequence
  Description of Artificial Sequence: Synthetic oligonucleotide
cugguggaucucccgcugc

SEQ ID NO: 2490485 - RNA, 19 nt, Artificial Sequence
  Description of Artificial Sequence: Synthetic oligonucleotide
caucacaucccaggugcac

SEQ ID NO: 2490486 - RNA, 19 nt, Artificial Sequence
  Description of Artificial Sequence: Synthetic oligonucleotide
agcgacuucccagcagcag

SEQ ID NO: 2490487 - RNA, 19 nt, Artificial Sequence
  Description of Artificial Sequence: Synthetic oligonucleotide
ggaggacuuaacagagucc

SEQ ID NO: 2490488 - RNA, 19 nt, Artificial Sequence
  Description of Artificial Sequence: Synthetic oligonucleotide
gucacccuugcuucaaugu

SEQ ID NO: 2490489 - RNA, 19 nt, Artificial Sequence
  Description of Artificial Sequence: Synthetic oligonucleotide
agagugagguggggaggac

SEQ ID NO: 2490490 - RNA, 19 nt, Artificial Sequence
  Description of Artificial Sequence: Synthetic oligonucleotide
cuguagggaaagucugaga

SEQ ID NO: 2490491 - RNA, 19 nt, Artificial Sequence
  Description of Artificial Sequence: Synthetic oligonucleotide
gugcacacggcagagccca

SEQ ID NO: 2490492 - RNA, 19 nt, Artificial Sequence
  Description of Artificial Sequence: Synthetic oligonucleotide
cuguugcucuggaaggaga

SEQ ID NO: 2490493 - RNA, 19 nt, Artificial Sequence
  Description of Artificial Sequence: Synthetic oligonucleotide
cauaggcgcagagaagaca

SEQ ID NO: 2490494 - RNA, 19 nt, Artificial Sequence
  Description of Artificial Sequence: Synthetic oligonucleotide
uucgcccaguccuggugga

SEQ ID NO: 2490495 - RNA, 19 nt, Artificial Sequence
  Description of Artificial Sequence: Synthetic oligonucleotide
ggcgcagaaggcugcuggg

SEQ ID NO: 2490496 - RNA, 19 nt, Artificial Sequence
  Description of Artificial Sequence: Synthetic oligonucleotide
auaucccuucaagccaacu

SEQ ID NO: 2490497 - RNA, 19 nt, Artificial Sequence
  Description of Artificial Sequence: Synthetic oligonucleotide
uugucacccuugcuucaau

SEQ ID NO: 2490498 - RNA, 19 nt, Artificial Sequence
  Description of Artificial Sequence: Synthetic oligonucleotide
gccuuucccacauggccag

SEQ ID NO: 2490499 - RNA, 19 nt, Artificial Sequence
  Description of Artificial Sequence: Synthetic oligonucleotide
agugagguggggaggacuu

SEQ ID NO: 2490500 - RNA, 19 nt, Artificial Sequence
  Description of Artificial Sequence: Synthetic oligonucleotide
auuggcgaguuagcaacau

SEQ ID NO: 2490501 - RNA, 19 nt, Artificial Sequence
  Description of Artificial Sequence: Synthetic oligonucleotide
cucauuuaguguugcgagu

SEQ ID NO: 2490502 - RNA, 19 nt, Artificial Sequence
  Description of Artificial Sequence: Synthetic oligonucleotide
acccuugcuucaauguacu

SEQ ID NO: 2490503 - RNA, 19 nt, Artificial Sequence
  Description of Artificial Sequence: Synthetic oligonucleotide
gagucccggccuuugccuc

SEQ ID NO: 2490504 - RNA, 19 nt, Artificial Sequence
  Description of Artificial Sequence: Synthetic oligonucleotide
ccaccuccugucauaggcg

SEQ ID NO: 2490505 - RNA, 19 nt, Artificial Sequence
  Description of Artificial Sequence: Synthetic oligonucleotide
gaccucccagaacaagaaa

SEQ ID NO: 2490506 - RNA, 19 nt, Artificial Sequence
  Description of Artificial Sequence: Synthetic oligonucleotide
agucccggccuuugccucu

SEQ ID NO: 2490507 - RNA, 19 nt, Artificial Sequence
  Description of Artificial Sequence: Synthetic oligonucleotide
guugagaaaguccgagauu

SEQ ID NO: 2490508 - RNA, 19 nt, Artificial Sequence
  Description of Artificial Sequence: Synthetic oligonucleotide
ggagcuguagggaaagucu

SEQ ID NO: 2490509 - RNA, 19 nt, Artificial Sequence
  Description of Artificial Sequence: Synthetic oligonucleotide
ccaaacaauguuacugaaa

SEQ ID NO: 2490510 - RNA, 19 nt, Artificial Sequence
  Description of Artificial Sequence: Synthetic oligonucleotide
cgacuucccagcagcagcg

SEQ ID NO: 2490511 - RNA, 19 nt, Artificial Sequence
  Description of Artificial Sequence: Synthetic oligonucleotide
cgaguuagcaacauuuucu

SEQ ID NO: 2490512 - RNA, 19 nt, Artificial Sequence
  Description of Artificial Sequence: Synthetic oligonucleotide
caaccacacugcagagcac

SEQ ID NO: 2490513 - RNA, 19 nt, Artificial Sequence
  Description of Artificial Sequence: Synthetic oligonucleotide
acccuuugucacccuugcu

SEQ ID NO: 2490514 - RNA, 19 nt, Artificial Sequence
  Description of Artificial Sequence: Synthetic oligonucleotide
cuccguucaagagcuguca

SEQ ID NO: 2490515 - RNA, 19 nt, Artificial Sequence
  Description of Artificial Sequence: Synthetic oligonucleotide
caagaggugcccuggacuu

SEQ ID NO: 2490516 - RNA, 19 nt, Artificial Sequence
  Description of Artificial Sequence: Synthetic oligonucleotide
cuugaucgacaagacauau

SEQ ID NO: 2490517 - RNA, 19 nt, Artificial Sequence
  Description of Artificial Sequence: Synthetic oligonucleotide
gcacagcucuaggugagag

SEQ ID NO: 2490518 - RNA, 19 nt, Artificial Sequence
  Description of Artificial Sequence: Synthetic oligonucleotide
gagguggggaggacuuaac

SEQ ID NO: 2490519 - RNA, 19 nt, Artificial Sequence
  Description of Artificial Sequence: Synthetic oligonucleotide
cauuuaguguugcgagucu

SEQ ID NO: 2490520 - RNA, 19 nt, Artificial Sequence
  Description of Artificial Sequence: Synthetic oligonucleotide
gggagcuguagggaaaguc

SEQ ID NO: 2490521 - RNA, 19 nt, Artificial Sequence
  Description of Artificial Sequence: Synthetic oligonucleotide
agagcccaaaggccacuuu

SEQ ID NO: 2490522 - RNA, 19 nt, Artificial Sequence
  Description of Artificial Sequence: Synthetic oligonucleotide
gagucucagccaggacugc

SEQ ID NO: 2490523 - RNA, 19 nt, Artificial Sequence
  Description of Artificial Sequence: Synthetic oligonucleotide
gggaauugccuaaugcugu

SEQ ID NO: 2490524 - RNA, 19 nt, Artificial Sequence
  Description of Artificial Sequence: Synthetic oligonucleotide
gcgagucuugaucgacaag

SEQ ID NO: 2490525 - RNA, 19 nt, Artificial Sequence
  Description of Artificial Sequence: Synthetic oligonucleotide
gcccaaaggccacuuuuga

SEQ ID NO: 2490526 - RNA, 19 nt, Artificial Sequence
  Description of Artificial Sequence: Synthetic oligonucleotide
ucucacccuuugucacccu

SEQ ID NO: 2490527 - RNA, 19 nt, Artificial Sequence
  Description of Artificial Sequence: Synthetic oligonucleotide
caggugcacacggcagagc

SEQ ID NO: 2490528 - RNA, 19 nt, Artificial Sequence
  Description of Artificial Sequence: Synthetic oligonucleotide
cggccuuugccucugaaca

SEQ ID NO: 2490529 - RNA, 19 nt, Artificial Sequence
  Description of Artificial Sequence: Synthetic oligonucleotide
ccggccuuugccucugaac

SEQ ID NO: 2490530 - RNA, 19 nt, Artificial Sequence
  Description of Artificial Sequence: Synthetic oligonucleotide
gagugagguggggaggacu

SEQ ID NO: 2490531 - RNA, 19 nt, Artificial Sequence
  Description of Artificial Sequence: Synthetic oligonucleotide
uaacagagucccggccuuu

SEQ ID NO: 2490532 - RNA, 19 nt, Artificial Sequence
  Description of Artificial Sequence: Synthetic oligonucleotide
ggugcacacggcagagccc

SEQ ID NO: 2490533 - RNA, 19 nt, Artificial Sequence
  Description of Artificial Sequence: Synthetic oligonucleotide
ccaguguucuguacagcga

SEQ ID NO: 2490534 - RNA, 19 nt, Artificial Sequence
  Description of Artificial Sequence: Synthetic oligonucleotide
uacucucgauucgcccagu

SEQ ID NO: 2490535 - RNA, 19 nt, Artificial Sequence
  Description of Artificial Sequence: Synthetic oligonucleotide
gcagagaagacagacuguu

SEQ ID NO: 2490536 - RNA, 19 nt, Artificial Sequence
  Description of Artificial Sequence: Synthetic oligonucleotide
ccugguggaucucccgcug

SEQ ID NO: 2490537 - RNA, 19 nt, Artificial Sequence
  Description of Artificial Sequence: Synthetic oligonucleotide
gaauugccuaaugcuguuu

SEQ ID NO: 2490538 - RNA, 19 nt, Artificial Sequence
  Description of Artificial Sequence: Synthetic oligonucleotide
cacagcucuaggugagagu

SEQ ID NO: 2490539 - RNA, 19 nt, Artificial Sequence
  Description of Artificial Sequence: Synthetic oligonucleotide
accuccugucauaggcgca

SEQ ID NO: 2490540 - RNA, 19 nt, Artificial Sequence
  Description of Artificial Sequence: Synthetic oligonucleotide
caaucagugcagaggccau

SEQ ID NO: 2490541 - RNA, 19 nt, Artificial Sequence
  Description of Artificial Sequence: Synthetic oligonucleotide
cagcgacuucccagcagca

SEQ ID NO: 2490542 - RNA, 19 nt, Artificial Sequence
  Description of Artificial Sequence: Synthetic oligonucleotide
ccaggugcacacggcagag

SEQ ID NO: 2490543 - RNA, 19 nt, Artificial Sequence
  Description of Artificial Sequence: Synthetic oligonucleotide
ggaauugccuaaugcuguu

SEQ ID NO: 2490544 - RNA, 19 nt, Artificial Sequence
  Description of Artificial Sequence: Synthetic oligonucleotide
auucuccguucaagagcug

SEQ ID NO: 2490545 - RNA, 19 nt, Artificial Sequence
  Description of Artificial Sequence: Synthetic oligonucleotide
ccaagaggugcccuggacu

SEQ ID NO: 2490546 - RNA, 19 nt, Artificial Sequence
  Description of Artificial Sequence: Synthetic oligonucleotide
ggccaguguucuguacagc

SEQ ID NO: 2490547 - RNA, 19 nt, Artificial Sequence
  Description of Artificial Sequence: Synthetic oligonucleotide
ccugucauaggcgcagaga

SEQ ID NO: 2490548 - RNA, 19 nt, Artificial Sequence
  Description of Artificial Sequence: Synthetic oligonucleotide
cccuuugucacccuugcuu

SEQ ID NO: 2490549 - RNA, 19 nt, Artificial Sequence
  Description of Artificial Sequence: Synthetic oligonucleotide
cccuugcuucaauguacuc

SEQ ID NO: 2490550 - RNA, 19 nt, Artificial Sequence
  Description of Artificial Sequence: Synthetic oligonucleotide
ucccggccuuugccucuga

SEQ ID NO: 2490551 - RNA, 19 nt, Artificial Sequence
  Description of Artificial Sequence: Synthetic oligonucleotide
gucccggccuuugccucug

SEQ ID NO: 2490552 - RNA, 19 nt, Artificial Sequence
  Description of Artificial Sequence: Synthetic oligonucleotide
ucgcccaguccugguggau

SEQ ID NO: 2490553 - RNA, 19 nt, Artificial Sequence
  Description of Artificial Sequence: Synthetic oligonucleotide
ccucccagaacaagaaauu

SEQ ID NO: 2490554 - RNA, 19 nt, Artificial Sequence
  Description of Artificial Sequence: Synthetic oligonucleotide
ggcgcagagaagacagacu

SEQ ID NO: 2490555 - RNA, 19 nt, Artificial Sequence
  Description of Artificial Sequence: Synthetic oligonucleotide
cucacccuuugucacccuu

SEQ ID NO: 2490556 - RNA, 19 nt, Artificial Sequence
  Description of Artificial Sequence: Synthetic oligonucleotide
ccgagauuuucuugaugcu

SEQ ID NO: 2490557 - RNA, 19 nt, Artificial Sequence
  Description of Artificial Sequence: Synthetic oligonucleotide
ggcgaguuagcaacauuuu

SEQ ID NO: 2490558 - RNA, 19 nt, Artificial Sequence
  Description of Artificial Sequence: Synthetic oligonucleotide
cguucaagagcugucaauu

SEQ ID NO: 2490559 - RNA, 19 nt, Artificial Sequence
  Description of Artificial Sequence: Synthetic oligonucleotide
ggcacagcucuaggugaga

SEQ ID NO: 2490560 - RNA, 19 nt, Artificial Sequence
  Description of Artificial Sequence: Synthetic oligonucleotide
gugagguggggaggacuua

SEQ ID NO: 2490561 - RNA, 19 nt, Artificial Sequence
  Description of Artificial Sequence: Synthetic oligonucleotide
gcucuaggugagagucuca

SEQ ID NO: 2490562 - RNA, 19 nt, Artificial Sequence
  Description of Artificial Sequence: Synthetic oligonucleotide
aucucccgcugcaccggau

SEQ ID NO: 2490563 - RNA, 19 nt, Artificial Sequence
  Description of Artificial Sequence: Synthetic oligonucleotide
ccguucaagagcugucaau

SEQ ID NO: 2490564 - RNA, 19 nt, Artificial Sequence
  Description of Artificial Sequence: Synthetic oligonucleotide
ggugagagucucacccuuu

SEQ ID NO: 2490565 - RNA, 19 nt, Artificial Sequence
  Description of Artificial Sequence: Synthetic oligonucleotide
gcacacggcagagcccaaa

SEQ ID NO: 2490566 - RNA, 19 nt, Artificial Sequence
  Description of Artificial Sequence: Synthetic oligonucleotide
gcagcguggcacagcucua

SEQ ID NO: 2490567 - RNA, 19 nt, Artificial Sequence
  Description of Artificial Sequence: Synthetic oligonucleotide
cccggccuuugccucugaa

SEQ ID NO: 2490568 - RNA, 19 nt, Artificial Sequence
  Description of Artificial Sequence: Synthetic oligonucleotide
gaggugcccuggacuucuu

SEQ ID NO: 2490569 - RNA, 19 nt, Artificial Sequence
  Description of Artificial Sequence: Synthetic oligonucleotide
cgauucgcccaguccuggu

SEQ ID NO: 2490570 - RNA, 19 nt, Artificial Sequence
  Description of Artificial Sequence: Synthetic oligonucleotide
gaauuauaacuguagaagg

SEQ ID NO: 2490571 - RNA, 19 nt, Artificial Sequence
  Description of Artificial Sequence: Synthetic oligonucleotide
aaauuguuuguuccgaagg

SEQ ID NO: 2490572 - RNA, 19 nt, Artificial Sequence
  Description of Artificial Sequence: Synthetic oligonucleotide
uaaaggauggacuuuauug

SEQ ID NO: 2490573 - RNA, 19 nt, Artificial Sequence
  Description of Artificial Sequence: Synthetic oligonucleotide
accuguuucacauaggagg

SEQ ID NO: 2490574 - RNA, 19 nt, Artificial Sequence
  Description of Artificial Sequence: Synthetic oligonucleotide
acacucauagccuucaccc

SEQ ID NO: 2490575 - RNA, 19 nt, Artificial Sequence
  Description of Artificial Sequence: Synthetic oligonucleotide
uuugugugagucuaguucg

SEQ ID NO: 2490576 - RNA, 19 nt, Artificial Sequence
  Description of Artificial Sequence: Synthetic oligonucleotide
ucuaguucguaaaggaugg

SEQ ID NO: 2490577 - RNA, 19 nt, Artificial Sequence
  Description of Artificial Sequence: Synthetic oligonucleotide
acuggggugauuuuguagc

SEQ ID NO: 2490578 - RNA, 19 nt, Artificial Sequence
  Description of Artificial Sequence: Synthetic oligonucleotide
uuuucauauaggucguucg

SEQ ID NO: 2490579 - RNA, 19 nt, Artificial Sequence
  Description of Artificial Sequence: Synthetic oligonucleotide
uuuuauagacuucaguguc

SEQ ID NO: 2490580 - RNA, 19 nt, Artificial Sequence
  Description of Artificial Sequence: Synthetic oligonucleotide
uuuuguagccaacaaguug

SEQ ID NO: 2490581 - RNA, 19 nt, Artificial Sequence
  Description of Artificial Sequence: Synthetic oligonucleotide
ucguaaaugagaaucuggc

SEQ ID NO: 2490582 - RNA, 19 nt, Artificial Sequence
  Description of Artificial Sequence: Synthetic oligonucleotide
uuuugugugagucuaguuc

SEQ ID NO: 2490583 - RNA, 19 nt, Artificial Sequence
  Description of Artificial Sequence: Synthetic oligonucleotide
uaaaugagaaucuggcaag

SEQ ID NO: 2490584 - RNA, 19 nt, Artificial Sequence
  Description of Artificial Sequence: Synthetic oligonucleotide
uccauagcuuuucauauag

SEQ ID NO: 2490585 - RNA, 19 nt, Artificial Sequence
  Description of Artificial Sequence: Synthetic oligonucleotide
agaaaugcaagugaugggg

SEQ ID NO: 2490586 - RNA, 19 nt, Artificial Sequence
  Description of Artificial Sequence: Synthetic oligonucleotide
aguuguuccucagugaggc

SEQ ID NO: 2490587 - RNA, 19 nt, Artificial Sequence
  Description of Artificial Sequence: Synthetic oligonucleotide
uguucaacuagccaacaga

SEQ ID NO: 2490588 - RNA, 19 nt, Artificial Sequence
  Description of Artificial Sequence: Synthetic oligonucleotide
ucgucaucugcuuuuauag

SEQ ID NO: 2490589 - RNA, 19 nt, Artificial Sequence
  Description of Artificial Sequence: Synthetic oligonucleotide
auuauaacuguagaagguc

SEQ ID NO: 2490590 - RNA, 19 nt, Artificial Sequence
  Description of Artificial Sequence: Synthetic oligonucleotide
aauuguuuguuccgaaggu

SEQ ID NO: 2490591 - RNA, 19 nt, Artificial Sequence
  Description of Artificial Sequence: Synthetic oligonucleotide
auagacaaaauggcuaggc

SEQ ID NO: 2490592 - RNA, 19 nt, Artificial Sequence
  Description of Artificial Sequence: Synthetic oligonucleotide
augagaaucuggcaagugg

SEQ ID NO: 2490593 - RNA, 19 nt, Artificial Sequence
  Description of Artificial Sequence: Synthetic oligonucleotide
uuauaacuguagaagguca

SEQ ID NO: 2490594 - RNA, 19 nt, Artificial Sequence
  Description of Artificial Sequence: Synthetic oligonucleotide
aucuccuuagugcugggcc

SEQ ID NO: 2490595 - RNA, 19 nt, Artificial Sequence
  Description of Artificial Sequence: Synthetic oligonucleotide
gcuuuuauagacuucagug

SEQ ID NO: 2490596 - RNA, 19 nt, Artificial Sequence
  Description of Artificial Sequence: Synthetic oligonucleotide
ugagaaucuggcaagugga

SEQ ID NO: 2490597 - RNA, 19 nt, Artificial Sequence
  Description of Artificial Sequence: Synthetic oligonucleotide
gaaggauagacaaaauggc

SEQ ID NO: 2490598 - RNA, 19 nt, Artificial Sequence
  Description of Artificial Sequence: Synthetic oligonucleotide
aagcggagcaaauuguuug

SEQ ID NO: 2490599 - RNA, 19 nt, Artificial Sequence
  Description of Artificial Sequence: Synthetic oligonucleotide
aauagcuaagaaugaauua

SEQ ID NO: 2490600 - RNA, 19 nt, Artificial Sequence
  Description of Artificial Sequence: Synthetic oligonucleotide
aauuauaacuguagaaggu

SEQ ID NO: 2490601 - RNA, 19 nt, Artificial Sequence
  Description of Artificial Sequence: Synthetic oligonucleotide
agcucuggcacacucauag

SEQ ID NO: 2490602 - RNA, 19 nt, Artificial Sequence
  Description of Artificial Sequence: Synthetic oligonucleotide
acaguuguuccucagugag

SEQ ID NO: 2490603 - RNA, 19 nt, Artificial Sequence
  Description of Artificial Sequence: Synthetic oligonucleotide
guaaaugagaaucuggcaa

SEQ ID NO: 2490604 - RNA, 19 nt, Artificial Sequence
  Description of Artificial Sequence: Synthetic oligonucleotide
ggagaaaugcaagugaugg

SEQ ID NO: 2490605 - RNA, 19 nt, Artificial Sequence
  Description of Artificial Sequence: Synthetic oligonucleotide
guagccaacaaguugugug

SEQ ID NO: 2490606 - RNA, 19 nt, Artificial Sequence
  Description of Artificial Sequence: Synthetic oligonucleotide
uguagaaggucauauuuau

SEQ ID NO: 2490607 - RNA, 19 nt, Artificial Sequence
  Description of Artificial Sequence: Synthetic oligonucleotide
uuguuuguuccgaaggucu

SEQ ID NO: 2490608 - RNA, 19 nt, Artificial Sequence
  Description of Artificial Sequence: Synthetic oligonucleotide
uucacauaggaggagagcu

SEQ ID NO: 2490609 - RNA, 19 nt, Artificial Sequence
  Description of Artificial Sequence: Synthetic oligonucleotide
uuuacuggggugauuuugu

SEQ ID NO: 2490610 - RNA, 19 nt, Artificial Sequence
  Description of Artificial Sequence: Synthetic oligonucleotide
ugagucuaguucguaaagg

SEQ ID NO: 2490611 - RNA, 19 nt, Artificial Sequence
  Description of Artificial Sequence: Synthetic oligonucleotide
gagaaaugcaagugauggg

SEQ ID NO: 2490612 - RNA, 19 nt, Artificial Sequence
  Description of Artificial Sequence: Synthetic oligonucleotide
auagcuaagaaugaauuau

SEQ ID NO: 2490613 - RNA, 19 nt, Artificial Sequence
  Description of Artificial Sequence: Synthetic oligonucleotide
aaauagcuaagaaugaauu

SEQ ID NO: 2490614 - RNA, 19 nt, Artificial Sequence
  Description of Artificial Sequence: Synthetic oligonucleotide
uccacaaaauagcuaagaa

SEQ ID NO: 2490615 - RNA, 19 nt, Artificial Sequence
  Description of Artificial Sequence: Synthetic oligonucleotide
aagugauggggagugagag

SEQ ID NO: 2490616 - RNA, 19 nt, Artificial Sequence
  Description of Artificial Sequence: Synthetic oligonucleotide
uuucauauaggucguucgu

SEQ ID NO: 2490617 - RNA, 19 nt, Artificial Sequence
  Description of Artificial Sequence: Synthetic oligonucleotide
aguggagaaaugcaaguga

SEQ ID NO: 2490618 - RNA, 19 nt, Artificial Sequence
  Description of Artificial Sequence: Synthetic oligonucleotide
ucguucguaaaugagaauc

SEQ ID NO: 2490619 - RNA, 19 nt, Artificial Sequence
  Description of Artificial Sequence: Synthetic oligonucleotide
ugauccucgaagaguuugg

SEQ ID NO: 2490620 - RNA, 19 nt, Artificial Sequence
  Description of Artificial Sequence: Synthetic oligonucleotide
ccaacuaucuccuuagugc

SEQ ID NO: 2490621 - RNA, 19 nt, Artificial Sequence
  Description of Artificial Sequence: Synthetic oligonucleotide
uuggcaauuauuucgucau

SEQ ID NO: 2490622 - RNA, 19 nt, Artificial Sequence
  Description of Artificial Sequence: Synthetic oligonucleotide
uagacaaaauggcuaggca

SEQ ID NO: 2490623 - RNA, 19 nt, Artificial Sequence
  Description of Artificial Sequence: Synthetic oligonucleotide
ucauauaggucguucguaa

SEQ ID NO: 2490624 - RNA, 19 nt, Artificial Sequence
  Description of Artificial Sequence: Synthetic oligonucleotide
guucaacuagccaacagag

SEQ ID NO: 2490625 - RNA, 19 nt, Artificial Sequence
  Description of Artificial Sequence: Synthetic oligonucleotide
uuggagaagccaacuaucu

SEQ ID NO: 2490626 - RNA, 19 nt, Artificial Sequence
  Description of Artificial Sequence: Synthetic oligonucleotide
aaggauagacaaaauggcu

SEQ ID NO: 2490627 - RNA, 19 nt, Artificial Sequence
  Description of Artificial Sequence: Synthetic oligonucleotide
uauaggucguucguaaaug

SEQ ID NO: 2490628 - RNA, 19 nt, Artificial Sequence
  Description of Artificial Sequence: Synthetic oligonucleotide
uggcuaggcaaucuugucc

SEQ ID NO: 2490629 - RNA, 19 nt, Artificial Sequence
  Description of Artificial Sequence: Synthetic oligonucleotide
acuuuauugccugguagac

SEQ ID NO: 2490630 - RNA, 19 nt, Artificial Sequence
  Description of Artificial Sequence: Synthetic oligonucleotide
agugauggggagugagagc

SEQ ID NO: 2490631 - RNA, 19 nt, Artificial Sequence
  Description of Artificial Sequence: Synthetic oligonucleotide
acuaucuccuuagugcugg

SEQ ID NO: 2490632 - RNA, 19 nt, Artificial Sequence
  Description of Artificial Sequence: Synthetic oligonucleotide
ggauagacaaaauggcuag

SEQ ID NO: 2490633 - RNA, 19 nt, Artificial Sequence
  Description of Artificial Sequence: Synthetic oligonucleotide
aaccaguuggggccgaucu

SEQ ID NO: 2490634 - RNA, 19 nt, Artificial Sequence
  Description of Artificial Sequence: Synthetic oligonucleotide
uuguucaacuagccaacag

SEQ ID NO: 2490635 - RNA, 19 nt, Artificial Sequence
  Description of Artificial Sequence: Synthetic oligonucleotide
aaguggagaaaugcaagug

SEQ ID NO: 2490636 - RNA, 19 nt, Artificial Sequence
  Description of Artificial Sequence: Synthetic oligonucleotide
ggagcaaauuguuuguucc

SEQ ID NO: 2490637 - RNA, 19 nt, Artificial Sequence
  Description of Artificial Sequence: Synthetic oligonucleotide
uuagugcugggccuguggc

SEQ ID NO: 2490638 - RNA, 19 nt, Artificial Sequence
  Description of Artificial Sequence: Synthetic oligonucleotide
gucuaguucguaaaggaug

SEQ ID NO: 2490639 - RNA, 19 nt, Artificial Sequence
  Description of Artificial Sequence: Synthetic oligonucleotide
uauaacuguagaaggucau

SEQ ID NO: 2490640 - RNA, 19 nt, Artificial Sequence
  Description of Artificial Sequence: Synthetic oligonucleotide
aagaguuuggagaagccaa

SEQ ID NO: 2490641 - RNA, 19 nt, Artificial Sequence
  Description of Artificial Sequence: Synthetic oligonucleotide
uaggucguucguaaaugag

SEQ ID NO: 2490642 - RNA, 19 nt, Artificial Sequence
  Description of Artificial Sequence: Synthetic oligonucleotide
cugggauaggaguacuucc

SEQ ID NO: 2490643 - RNA, 19 nt, Artificial Sequence
  Description of Artificial Sequence: Synthetic oligonucleotide
ugugagucuaguucguaaa

SEQ ID NO: 2490644 - RNA, 19 nt, Artificial Sequence
  Description of Artificial Sequence: Synthetic oligonucleotide
auugucucuugucuccguc

SEQ ID NO: 2490645 - RNA, 19 nt, Artificial Sequence
  Description of Artificial Sequence: Synthetic oligonucleotide
ugggauaggaguacuuccu

SEQ ID NO: 2490646 - RNA, 19 nt, Artificial Sequence
  Description of Artificial Sequence: Synthetic oligonucleotide
aauggcuaggcaaucuugu

SEQ ID NO: 2490647 - RNA, 19 nt, Artificial Sequence
  Description of Artificial Sequence: Synthetic oligonucleotide
guuggggccgaucuaagug

SEQ ID NO: 2490648 - RNA, 19 nt, Artificial Sequence
  Description of Artificial Sequence: Synthetic oligonucleotide
uggagaaaugcaagugaug

SEQ ID NO: 2490649 - RNA, 19 nt, Artificial Sequence
  Description of Artificial Sequence: Synthetic oligonucleotide
gaucuaaguguuccagggc

SEQ ID NO: 2490650 - RNA, 19 nt, Artificial Sequence
  Description of Artificial Sequence: Synthetic oligonucleotide
gucauugucucuugucucc

SEQ ID NO: 2490651 - RNA, 19 nt, Artificial Sequence
  Description of Artificial Sequence: Synthetic oligonucleotide
ucgaagaguuuggagaagc

SEQ ID NO: 2490652 - RNA, 19 nt, Artificial Sequence
  Description of Artificial Sequence: Synthetic oligonucleotide
uguuucacauaggaggaga

SEQ ID NO: 2490653 - RNA, 19 nt, Artificial Sequence
  Description of Artificial Sequence: Synthetic oligonucleotide
ucagugaggcccaaugauc

SEQ ID NO: 2490654 - RNA, 19 nt, Artificial Sequence
  Description of Artificial Sequence: Synthetic oligonucleotide
auauaggucguucguaaau

SEQ ID NO: 2490655 - RNA, 19 nt, Artificial Sequence
  Description of Artificial Sequence: Synthetic oligonucleotide
cuggaagcggagcaaauug

SEQ ID NO: 2490656 - RNA, 19 nt, Artificial Sequence
  Description of Artificial Sequence: Synthetic oligonucleotide
uacuggggugauuuuguag

SEQ ID NO: 2490657 - RNA, 19 nt, Artificial Sequence
  Description of Artificial Sequence: Synthetic oligonucleotide
gauagacaaaauggcuagg

SEQ ID NO: 2490658 - RNA, 19 nt, Artificial Sequence
  Description of Artificial Sequence: Synthetic oligonucleotide
aaugagaaucuggcaagug

SEQ ID NO: 2490659 - RNA, 19 nt, Artificial Sequence
  Description of Artificial Sequence: Synthetic oligonucleotide
aaugcaagugauggggagu

SEQ ID NO: 2490660 - RNA, 19 nt, Artificial Sequence
  Description of Artificial Sequence: Synthetic oligonucleotide
acaaguuguguguaguuuu

SEQ ID NO: 2490661 - RNA, 19 nt, Artificial Sequence
  Description of Artificial Sequence: Synthetic oligonucleotide
aaauggcuaggcaaucuug

SEQ ID NO: 2490662 - RNA, 19 nt, Artificial Sequence
  Description of Artificial Sequence: Synthetic oligonucleotide
gaaggucugcaauuccagc

SEQ ID NO: 2490663 - RNA, 19 nt, Artificial Sequence
  Description of Artificial Sequence: Synthetic oligonucleotide
cacucugagaguugcugcg

SEQ ID NO: 2490664 - RNA, 19 nt, Artificial Sequence
  Description of Artificial Sequence: Synthetic oligonucleotide
uucaacuagccaacagaga

SEQ ID NO: 2490665 - RNA, 19 nt, Artificial Sequence
  Description of Artificial Sequence: Synthetic oligonucleotide
cuggcaaguggagaaaugc

SEQ ID NO: 2490666 - RNA, 19 nt, Artificial Sequence
  Description of Artificial Sequence: Synthetic oligonucleotide
uagccaacaaguugugugu

SEQ ID NO: 2490667 - RNA, 19 nt, Artificial Sequence
  Description of Artificial Sequence: Synthetic oligonucleotide
uguuccgaaggucugcaau

SEQ ID NO: 2490668 - RNA, 19 nt, Artificial Sequence
  Description of Artificial Sequence: Synthetic oligonucleotide
cuuggcuagguucucucgc

SEQ ID NO: 2490669 - RNA, 19 nt, Artificial Sequence
  Description of Artificial Sequence: Synthetic oligonucleotide
uaggaguacuuccugcuuc

SEQ ID NO: 2490670 - RNA, 19 nt, Artificial Sequence
  Description of Artificial Sequence: Synthetic oligonucleotide
uauuucgucaucugcuuuu

SEQ ID NO: 2490671 - RNA, 19 nt, Artificial Sequence
  Description of Artificial Sequence: Synthetic oligonucleotide
gaucucaucccucgugccc

SEQ ID NO: 2490672 - RNA, 19 nt, Artificial Sequence
  Description of Artificial Sequence: Synthetic oligonucleotide
uguccacaaaauagcuaag

SEQ ID NO: 2490673 - RNA, 19 nt, Artificial Sequence
  Description of Artificial Sequence: Synthetic oligonucleotide
uauugccugguagacuggg

SEQ ID NO: 2490674 - RNA, 19 nt, Artificial Sequence
  Description of Artificial Sequence: Synthetic oligonucleotide
auuauuucgucaucugcuu

SEQ ID NO: 2490675 - RNA, 19 nt, Artificial Sequence
  Description of Artificial Sequence: Synthetic oligonucleotide
uagcuaagaaugaauuaua

SEQ ID NO: 2490676 - RNA, 19 nt, Artificial Sequence
  Description of Artificial Sequence: Synthetic oligonucleotide
ucugucauugucucuuguc

SEQ ID NO: 2490677 - RNA, 19 nt, Artificial Sequence
  Description of Artificial Sequence: Synthetic oligonucleotide
gucucagcuccuuugggag

SEQ ID NO: 2490678 - RNA, 19 nt, Artificial Sequence
  Description of Artificial Sequence: Synthetic oligonucleotide
aaaugagaaucuggcaagu

SEQ ID NO: 2490679 - RNA, 19 nt, Artificial Sequence
  Description of Artificial Sequence: Synthetic oligonucleotide
uggcaaguggagaaaugca

SEQ ID NO: 2490680 - RNA, 19 nt, Artificial Sequence
  Description of Artificial Sequence: Synthetic oligonucleotide
ugggauuugcucuggcuga

SEQ ID NO: 2490681 - RNA, 19 nt, Artificial Sequence
  Description of Artificial Sequence: Synthetic oligonucleotide
uguagcucuggcacacuca

SEQ ID NO: 2490682 - RNA, 19 nt, Artificial Sequence
  Description of Artificial Sequence: Synthetic oligonucleotide
auaggucguucguaaauga

SEQ ID NO: 2490683 - RNA, 19 nt, Artificial Sequence
  Description of Artificial Sequence: Synthetic oligonucleotide
uaacuguagaaggucauau

SEQ ID NO: 2490684 - RNA, 19 nt, Artificial Sequence
  Description of Artificial Sequence: Synthetic oligonucleotide
uaacugauccucgaagagu

SEQ ID NO: 2490685 - RNA, 19 nt, Artificial Sequence
  Description of Artificial Sequence: Synthetic oligonucleotide
uggaagcggagcaaauugu

SEQ ID NO: 2490686 - RNA, 19 nt, Artificial Sequence
  Description of Artificial Sequence: Synthetic oligonucleotide
aguucguaaaggauggacu

SEQ ID NO: 2490687 - RNA, 19 nt, Artificial Sequence
  Description of Artificial Sequence: Synthetic oligonucleotide
cuuuuauagacuucagugu

SEQ ID NO: 2490688 - RNA, 19 nt, Artificial Sequence
  Description of Artificial Sequence: Synthetic oligonucleotide
gugagucuaguucguaaag

SEQ ID NO: 2490689 - RNA, 19 nt, Artificial Sequence
  Description of Artificial Sequence: Synthetic oligonucleotide
ucauugucucuugucuccg

SEQ ID NO: 2490690 - RNA, 19 nt, Artificial Sequence
  Description of Artificial Sequence: Synthetic oligonucleotide
aacuguagaaggucauauu

SEQ ID NO: 2490691 - RNA, 19 nt, Artificial Sequence
  Description of Artificial Sequence: Synthetic oligonucleotide
uaguucguaaaggauggac

SEQ ID NO: 2490692 - RNA, 19 nt, Artificial Sequence
  Description of Artificial Sequence: Synthetic oligonucleotide
cuuagugcugggccugugg

SEQ ID NO: 2490693 - RNA, 19 nt, Artificial Sequence
  Description of Artificial Sequence: Synthetic oligonucleotide
auggcuaggcaaucuuguc

SEQ ID NO: 2490694 - RNA, 19 nt, Artificial Sequence
  Description of Artificial Sequence: Synthetic oligonucleotide
uuucacauaggaggagagc

SEQ ID NO: 2490695 - RNA, 19 nt, Artificial Sequence
  Description of Artificial Sequence: Synthetic oligonucleotide
gaagaguuuggagaagcca

SEQ ID NO: 2490696 - RNA, 19 nt, Artificial Sequence
  Description of Artificial Sequence: Synthetic oligonucleotide
uguuuggaccuguuucaca

SEQ ID NO: 2490697 - RNA, 19 nt, Artificial Sequence
  Description of Artificial Sequence: Synthetic oligonucleotide
cacacucauagccuucacc

SEQ ID NO: 2490698 - RNA, 19 nt, Artificial Sequence
  Description of Artificial Sequence: Synthetic oligonucleotide
agaguuuggagaagccaac

SEQ ID NO: 2490699 - RNA, 19 nt, Artificial Sequence
  Description of Artificial Sequence: Synthetic oligonucleotide
guuuacuggggugauuuug

SEQ ID NO: 2490700 - RNA, 19 nt, Artificial Sequence
  Description of Artificial Sequence: Synthetic oligonucleotide
uuggggccgaucuaagugu

SEQ ID NO: 2490701 - RNA, 19 nt, Artificial Sequence
  Description of Artificial Sequence: Synthetic oligonucleotide
aucucaucccucgugcccg

SEQ ID NO: 2490702 - RNA, 19 nt, Artificial Sequence
  Description of Artificial Sequence: Synthetic oligonucleotide
cuuuucauauaggucguuc

SEQ ID NO: 2490703 - RNA, 19 nt, Artificial Sequence
  Description of Artificial Sequence: Synthetic oligonucleotide
cacagggcaaccaguuggg

SEQ ID NO: 2490704 - RNA, 19 nt, Artificial Sequence
  Description of Artificial Sequence: Synthetic oligonucleotide
uggaccuguuucacauagg

SEQ ID NO: 2490705 - RNA, 19 nt, Artificial Sequence
  Description of Artificial Sequence: Synthetic oligonucleotide
gggagugagagcaggaagg

SEQ ID NO: 2490706 - RNA, 19 nt, Artificial Sequence
  Description of Artificial Sequence: Synthetic oligonucleotide
gagaaucuggcaaguggag

SEQ ID NO: 2490707 - RNA, 19 nt, Artificial Sequence
  Description of Artificial Sequence: Synthetic oligonucleotide
uggagaagccaacuaucuc

SEQ ID NO: 2490708 - RNA, 19 nt, Artificial Sequence
  Description of Artificial Sequence: Synthetic oligonucleotide
uuauuucgucaucugcuuu

SEQ ID NO: 2490709 - RNA, 19 nt, Artificial Sequence
  Description of Artificial Sequence: Synthetic oligonucleotide
agcaaauuguuuguuccga

SEQ ID NO: 2490710 - RNA, 19 nt, Artificial Sequence
  Description of Artificial Sequence: Synthetic oligonucleotide
aggauagacaaaauggcua

SEQ ID NO: 2490711 - RNA, 19 nt, Artificial Sequence
  Description of Artificial Sequence: Synthetic oligonucleotide
agagcugugaggaggcguc

SEQ ID NO: 2490712 - RNA, 19 nt, Artificial Sequence
  Description of Artificial Sequence: Synthetic oligonucleotide
uucauauaggucguucgua

SEQ ID NO: 2490713 - RNA, 19 nt, Artificial Sequence
  Description of Artificial Sequence: Synthetic oligonucleotide
ucuaaguguuccagggcua

SEQ ID NO: 2490714 - RNA, 19 nt, Artificial Sequence
  Description of Artificial Sequence: Synthetic oligonucleotide
agugagagcaggaaggaua

SEQ ID NO: 2490715 - RNA, 19 nt, Artificial Sequence
  Description of Artificial Sequence: Synthetic oligonucleotide
agcggagcaaauuguuugu

SEQ ID NO: 2490716 - RNA, 19 nt, Artificial Sequence
  Description of Artificial Sequence: Synthetic oligonucleotide
uuguagccaacaaguugug

SEQ ID NO: 2490717 - RNA, 19 nt, Artificial Sequence
  Description of Artificial Sequence: Synthetic oligonucleotide
agugaggcccaaugaucuc

SEQ ID NO: 2490718 - RNA, 19 nt, Artificial Sequence
  Description of Artificial Sequence: Synthetic oligonucleotide
gacaguuguuccucaguga

SEQ ID NO: 2490719 - RNA, 19 nt, Artificial Sequence
  Description of Artificial Sequence: Synthetic oligonucleotide
ucguaaaggauggacuuua

SEQ ID NO: 2490720 - RNA, 19 nt, Artificial Sequence
  Description of Artificial Sequence: Synthetic oligonucleotide
agggcucguuggcuuaggc

SEQ ID NO: 2490721 - RNA, 19 nt, Artificial Sequence
  Description of Artificial Sequence: Synthetic oligonucleotide
cuggggugauuuuguagcc

SEQ ID NO: 2490722 - RNA, 19 nt, Artificial Sequence
  Description of Artificial Sequence: Synthetic oligonucleotide
gaaaugcaagugaugggga

SEQ ID NO: 2490723 - RNA, 19 nt, Artificial Sequence
  Description of Artificial Sequence: Synthetic oligonucleotide
ugcacagggcaaccaguug

SEQ ID NO: 2490724 - RNA, 19 nt, Artificial Sequence
  Description of Artificial Sequence: Synthetic oligonucleotide
cgaucuaaguguuccaggg

SEQ ID NO: 2490725 - RNA, 19 nt, Artificial Sequence
  Description of Artificial Sequence: Synthetic oligonucleotide
caaaauagcuaagaaugaa

SEQ ID NO: 2490726 - RNA, 19 nt, Artificial Sequence
  Description of Artificial Sequence: Synthetic oligonucleotide
cugauccucgaagaguuug

SEQ ID NO: 2490727 - RNA, 19 nt, Artificial Sequence
  Description of Artificial Sequence: Synthetic oligonucleotide
cagggcuaacugauccucg

SEQ ID NO: 2490728 - RNA, 19 nt, Artificial Sequence
  Description of Artificial Sequence: Synthetic oligonucleotide
uggacuuuauugccuggua

SEQ ID NO: 2490729 - RNA, 19 nt, Artificial Sequence
  Description of Artificial Sequence: Synthetic oligonucleotide
ggauggacuuuauugccug

SEQ ID NO: 2490730 - RNA, 19 nt, Artificial Sequence
  Description of Artificial Sequence: Synthetic oligonucleotide
ggcccaaugaucucauccc

SEQ ID NO: 2490731 - RNA, 19 nt, Artificial Sequence
  Description of Artificial Sequence: Synthetic oligonucleotide
uucugucauugucucuugu

SEQ ID NO: 2490732 - RNA, 19 nt, Artificial Sequence
  Description of Artificial Sequence: Synthetic oligonucleotide
ggaggcgucucccagcuug

SEQ ID NO: 2490733 - RNA, 19 nt, Artificial Sequence
  Description of Artificial Sequence: Synthetic oligonucleotide
aggucguucguaaaugaga

SEQ ID NO: 2490734 - RNA, 19 nt, Artificial Sequence
  Description of Artificial Sequence: Synthetic oligonucleotide
ggaccuguuucacauagga

SEQ ID NO: 2490735 - RNA, 19 nt, Artificial Sequence
  Description of Artificial Sequence: Synthetic oligonucleotide
gcuaacugauccucgaaga

SEQ ID NO: 2490736 - RNA, 19 nt, Artificial Sequence
  Description of Artificial Sequence: Synthetic oligonucleotide
ugcgacaguuguuccucag

SEQ ID NO: 2490737 - RNA, 19 nt, Artificial Sequence
  Description of Artificial Sequence: Synthetic oligonucleotide
gugauuuuguagccaacaa

SEQ ID NO: 2490738 - RNA, 19 nt, Artificial Sequence
  Description of Artificial Sequence: Synthetic oligonucleotide
agguuuacuggggugauuu

SEQ ID NO: 2490739 - RNA, 19 nt, Artificial Sequence
  Description of Artificial Sequence: Synthetic oligonucleotide
guuuggagaagccaacuau

SEQ ID NO: 2490740 - RNA, 19 nt, Artificial Sequence
  Description of Artificial Sequence: Synthetic oligonucleotide
uugcacagggcaaccaguu

SEQ ID NO: 2490741 - RNA, 19 nt, Artificial Sequence
  Description of Artificial Sequence: Synthetic oligonucleotide
guuuggaccuguuucacau

SEQ ID NO: 2490742 - RNA, 19 nt, Artificial Sequence
  Description of Artificial Sequence: Synthetic oligonucleotide
guuuguuccgaaggucugc

SEQ ID NO: 2490743 - RNA, 19 nt, Artificial Sequence
  Description of Artificial Sequence: Synthetic oligonucleotide
gacaaaauggcuaggcaau

SEQ ID NO: 2490744 - RNA, 19 nt, Artificial Sequence
  Description of Artificial Sequence: Synthetic oligonucleotide
ggcuaggcaaucuugucca

SEQ ID NO: 2490745 - RNA, 19 nt, Artificial Sequence
  Description of Artificial Sequence: Synthetic oligonucleotide
cuuccauagcuuuucauau

SEQ ID NO: 2490746 - RNA, 19 nt, Artificial Sequence
  Description of Artificial Sequence: Synthetic oligonucleotide
agggcuaacugauccucga

SEQ ID NO: 2490747 - RNA, 19 nt, Artificial Sequence
  Description of Artificial Sequence: Synthetic oligonucleotide
gccaacuaucuccuuagug

SEQ ID NO: 2490748 - RNA, 19 nt, Artificial Sequence
  Description of Artificial Sequence: Synthetic oligonucleotide
aguuggggccgaucuaagu

SEQ ID NO: 2490749 - RNA, 19 nt, Artificial Sequence
  Description of Artificial Sequence: Synthetic oligonucleotide
ugagaguugcugcgacagu

SEQ ID NO: 2490750 - RNA, 19 nt, Artificial Sequence
  Description of Artificial Sequence: Synthetic oligonucleotide
auaggaguacuuccugcuu

SEQ ID NO: 2490751 - RNA, 19 nt, Artificial Sequence
  Description of Artificial Sequence: Synthetic oligonucleotide
aaucuggcaaguggagaaa

SEQ ID NO: 2490752 - RNA, 19 nt, Artificial Sequence
  Description of Artificial Sequence: Synthetic oligonucleotide
ggggagugagagcaggaag

SEQ ID NO: 2490753 - RNA, 19 nt, Artificial Sequence
  Description of Artificial Sequence: Synthetic oligonucleotide
uggcuagguucucucgcca

SEQ ID NO: 2490754 - RNA, 19 nt, Artificial Sequence
  Description of Artificial Sequence: Synthetic oligonucleotide
uguagccaacaaguugugu

SEQ ID NO: 2490755 - RNA, 19 nt, Artificial Sequence
  Description of Artificial Sequence: Synthetic oligonucleotide
guucucucgccauucuguc

SEQ ID NO: 2490756 - RNA, 19 nt, Artificial Sequence
  Description of Artificial Sequence: Synthetic oligonucleotide
caacuaucuccuuagugcu

SEQ ID NO: 2490757 - RNA, 19 nt, Artificial Sequence
  Description of Artificial Sequence: Synthetic oligonucleotide
cucugagaguugcugcgac

SEQ ID NO: 2490758 - RNA, 19 nt, Artificial Sequence
  Description of Artificial Sequence: Synthetic oligonucleotide
auggacuuuauugccuggu

SEQ ID NO: 2490759 - RNA, 19 nt, Artificial Sequence
  Description of Artificial Sequence: Synthetic oligonucleotide
ugaggcccaaugaucucau

SEQ ID NO: 2490760 - RNA, 19 nt, Artificial Sequence
  Description of Artificial Sequence: Synthetic oligonucleotide
ucucgccauucugucauug

SEQ ID NO: 2490761 - RNA, 19 nt, Artificial Sequence
  Description of Artificial Sequence: Synthetic oligonucleotide
aggauggacuuuauugccu

SEQ ID NO: 2490762 - RNA, 19 nt, Artificial Sequence
  Description of Artificial Sequence: Synthetic oligonucleotide
cuaucuccuuagugcuggg

SEQ ID NO: 2490763 - RNA, 19 nt, Artificial Sequence
  Description of Artificial Sequence: Synthetic oligonucleotide
cuccgucucagcuccuuug

SEQ ID NO: 2490764 - RNA, 19 nt, Artificial Sequence
  Description of Artificial Sequence: Synthetic oligonucleotide
uuccgaaggucugcaauuc

SEQ ID NO: 2490765 - RNA, 19 nt, Artificial Sequence
  Description of Artificial Sequence: Synthetic oligonucleotide
guucguaaaggauggacuu

SEQ ID NO: 2490766 - RNA, 19 nt, Artificial Sequence
  Description of Artificial Sequence: Synthetic oligonucleotide
uggggugauuuuguagcca

SEQ ID NO: 2490767 - RNA, 19 nt, Artificial Sequence
  Description of Artificial Sequence: Synthetic oligonucleotide
caaguggagaaaugcaagu

SEQ ID NO: 2490768 - RNA, 19 nt, Artificial Sequence
  Description of Artificial Sequence: Synthetic oligonucleotide
ucaucccucgugcccggca

SEQ ID NO: 2490769 - RNA, 19 nt, Artificial Sequence
  Description of Artificial Sequence: Synthetic oligonucleotide
caagugauggggagugaga

SEQ ID NO: 2490770 - RNA, 19 nt, Artificial Sequence
  Description of Artificial Sequence: Synthetic oligonucleotide
gguagacugggauaggagu

SEQ ID NO: 2490771 - RNA, 19 nt, Artificial Sequence
  Description of Artificial Sequence: Synthetic oligonucleotide
gugugagucuaguucguaa

SEQ ID NO: 2490772 - RNA, 19 nt, Artificial Sequence
  Description of Artificial Sequence: Synthetic oligonucleotide
uuacuggggugauuuugua

SEQ ID NO: 2490773 - RNA, 19 nt, Artificial Sequence
  Description of Artificial Sequence: Synthetic oligonucleotide
ccgaucuaaguguuccagg

SEQ ID NO: 2490774 - RNA, 19 nt, Artificial Sequence
  Description of Artificial Sequence: Synthetic oligonucleotide
gggauaggaguacuuccug

SEQ ID NO: 2490775 - RNA, 19 nt, Artificial Sequence
  Description of Artificial Sequence: Synthetic oligonucleotide
cauaggaggagagcuguga

SEQ ID NO: 2490776 - RNA, 19 nt, Artificial Sequence
  Description of Artificial Sequence: Synthetic oligonucleotide
uuuggaccuguuucacaua

SEQ ID NO: 2490777 - RNA, 19 nt, Artificial Sequence
  Description of Artificial Sequence: Synthetic oligonucleotide
cauauaggucguucguaaa

SEQ ID NO: 2490778 - RNA, 19 nt, Artificial Sequence
  Description of Artificial Sequence: Synthetic oligonucleotide
guagacugggauaggagua

SEQ ID NO: 2490779 - RNA, 19 nt, Artificial Sequence
  Description of Artificial Sequence: Synthetic oligonucleotide
uuucgucaucugcuuuuau

SEQ ID NO: 2490780 - RNA, 19 nt, Artificial Sequence
  Description of Artificial Sequence: Synthetic oligonucleotide
gccugguagacugggauag

SEQ ID NO: 2490781 - RNA, 19 nt, Artificial Sequence
  Description of Artificial Sequence: Synthetic oligonucleotide
gcuuggcuagguucucucg

SEQ ID NO: 2490782 - RNA, 19 nt, Artificial Sequence
  Description of Artificial Sequence: Synthetic oligonucleotide
ugccugguagacugggaua

SEQ ID NO: 2490783 - RNA, 19 nt, Artificial Sequence
  Description of Artificial Sequence: Synthetic oligonucleotide
caucccucgugcccggcag

SEQ ID NO: 2490784 - RNA, 19 nt, Artificial Sequence
  Description of Artificial Sequence: Synthetic oligonucleotide
gauccucgaagaguuugga

SEQ ID NO: 2490785 - RNA, 19 nt, Artificial Sequence
  Description of Artificial Sequence: Synthetic oligonucleotide
ccauagcuuuucauauagg

SEQ ID NO: 2490786 - RNA, 19 nt, Artificial Sequence
  Description of Artificial Sequence: Synthetic oligonucleotide
ggucguucguaaaugagaa

SEQ ID NO: 2490787 - RNA, 19 nt, Artificial Sequence
  Description of Artificial Sequence: Synthetic oligonucleotide
cuguuuggaccuguuucac

SEQ ID NO: 2490788 - RNA, 19 nt, Artificial Sequence
  Description of Artificial Sequence: Synthetic oligonucleotide
gaggcgucucccagcuugg

SEQ ID NO: 2490789 - RNA, 19 nt, Artificial Sequence
  Description of Artificial Sequence: Synthetic oligonucleotide
cuucaccccuccuuuggca

SEQ ID NO: 2490790 - RNA, 19 nt, Artificial Sequence
  Description of Artificial Sequence: Synthetic oligonucleotide
ggucugcaauuccagcagc

SEQ ID NO: 2490791 - RNA, 19 nt, Artificial Sequence
  Description of Artificial Sequence: Synthetic oligonucleotide
ugugugagucuaguucgua

SEQ ID NO: 2490792 - RNA, 19 nt, Artificial Sequence
  Description of Artificial Sequence: Synthetic oligonucleotide
caguuggggccgaucuaag

SEQ ID NO: 2490793 - RNA, 19 nt, Artificial Sequence
  Description of Artificial Sequence: Synthetic oligonucleotide
aucuggcaaguggagaaau

SEQ ID NO: 2490794 - RNA, 19 nt, Artificial Sequence
  Description of Artificial Sequence: Synthetic oligonucleotide
uggcacacucauagccuuc

SEQ ID NO: 2490795 - RNA, 19 nt, Artificial Sequence
  Description of Artificial Sequence: Synthetic oligonucleotide
aucccucgugcccggcagg

SEQ ID NO: 2490796 - RNA, 19 nt, Artificial Sequence
  Description of Artificial Sequence: Synthetic oligonucleotide
gugcccggcaggcagccug

SEQ ID NO: 2490797 - RNA, 19 nt, Artificial Sequence
  Description of Artificial Sequence: Synthetic oligonucleotide
ggcaauuauuucgucaucu

SEQ ID NO: 2490798 - RNA, 19 nt, Artificial Sequence
  Description of Artificial Sequence: Synthetic oligonucleotide
gggccgaucuaaguguucc

SEQ ID NO: 2490799 - RNA, 19 nt, Artificial Sequence
  Description of Artificial Sequence: Synthetic oligonucleotide
gccgaucuaaguguuccag

SEQ ID NO: 2490800 - RNA, 19 nt, Artificial Sequence
  Description of Artificial Sequence: Synthetic oligonucleotide
gcuccuuugggaggcagag

SEQ ID NO: 2490801 - RNA, 19 nt, Artificial Sequence
  Description of Artificial Sequence: Synthetic oligonucleotide
uggggccgaucuaaguguu

SEQ ID NO: 2490802 - RNA, 19 nt, Artificial Sequence
  Description of Artificial Sequence: Synthetic oligonucleotide
ucuccgucucagcuccuuu

SEQ ID NO: 2490803 - RNA, 19 nt, Artificial Sequence
  Description of Artificial Sequence: Synthetic oligonucleotide
cgaaggucugcaauuccag

SEQ ID NO: 2490804 - RNA, 19 nt, Artificial Sequence
  Description of Artificial Sequence: Synthetic oligonucleotide
gcaaauuguuuguuccgaa

SEQ ID NO: 2490805 - RNA, 19 nt, Artificial Sequence
  Description of Artificial Sequence: Synthetic oligonucleotide
cgacaguuguuccucagug

SEQ ID NO: 2490806 - RNA, 19 nt, Artificial Sequence
  Description of Artificial Sequence: Synthetic oligonucleotide
ccggcaggcagccuguagc

SEQ ID NO: 2490807 - RNA, 19 nt, Artificial Sequence
  Description of Artificial Sequence: Synthetic oligonucleotide
cuccuuagugcugggccug

SEQ ID NO: 2490808 - RNA, 19 nt, Artificial Sequence
  Description of Artificial Sequence: Synthetic oligonucleotide
cuaaguguuccagggcuaa

SEQ ID NO: 2490809 - RNA, 19 nt, Artificial Sequence
  Description of Artificial Sequence: Synthetic oligonucleotide
cgaagaguuuggagaagcc

SEQ ID NO: 2490810 - RNA, 19 nt, Artificial Sequence
  Description of Artificial Sequence: Synthetic oligonucleotide
guuccgaaggucugcaauu

SEQ ID NO: 2490811 - RNA, 19 nt, Artificial Sequence
  Description of Artificial Sequence: Synthetic oligonucleotide
cucgugcccggcaggcagc

SEQ ID NO: 2490812 - RNA, 19 nt, Artificial Sequence
  Description of Artificial Sequence: Synthetic oligonucleotide
ugcaagugauggggaguga

SEQ ID NO: 2490813 - RNA, 19 nt, Artificial Sequence
  Description of Artificial Sequence: Synthetic oligonucleotide
cguaaaugagaaucuggca

SEQ ID NO: 2490814 - RNA, 19 nt, Artificial Sequence
  Description of Artificial Sequence: Synthetic oligonucleotide
ugagagcaggaaggauaga

SEQ ID NO: 2490815 - RNA, 19 nt, Artificial Sequence
  Description of Artificial Sequence: Synthetic oligonucleotide
caaaauggcuaggcaaucu

SEQ ID NO: 2490816 - RNA, 19 nt, Artificial Sequence
  Description of Artificial Sequence: Synthetic oligonucleotide
gagggcucguuggcuuagg

SEQ ID NO: 2490817 - RNA, 19 nt, Artificial Sequence
  Description of Artificial Sequence: Synthetic oligonucleotide
ccucgaagaguuuggagaa

SEQ ID NO: 2490818 - RNA, 19 nt, Artificial Sequence
  Description of Artificial Sequence: Synthetic oligonucleotide
cccaaugaucucaucccuc

SEQ ID NO: 2490819 - RNA, 19 nt, Artificial Sequence
  Description of Artificial Sequence: Synthetic oligonucleotide
auugccugguagacuggga

SEQ ID NO: 2490820 - RNA, 19 nt, Artificial Sequence
  Description of Artificial Sequence: Synthetic oligonucleotide
cuuuauugccugguagacu

SEQ ID NO: 2490821 - RNA, 19 nt, Artificial Sequence
  Description of Artificial Sequence: Synthetic oligonucleotide
ggagugagagcaggaagga

SEQ ID NO: 2490822 - RNA, 19 nt, Artificial Sequence
  Description of Artificial Sequence: Synthetic oligonucleotide
ggauuugcucuggcugagg

SEQ ID NO: 2490823 - RNA, 19 nt, Artificial Sequence
  Description of Artificial Sequence: Synthetic oligonucleotide
accaguuggggccgaucua

SEQ ID NO: 2490824 - RNA, 19 nt, Artificial Sequence
  Description of Artificial Sequence: Synthetic oligonucleotide
aggcgucucccagcuuggc

SEQ ID NO: 2490825 - RNA, 19 nt, Artificial Sequence
  Description of Artificial Sequence: Synthetic oligonucleotide
ugcccggcaggcagccugu

SEQ ID NO: 2490826 - RNA, 19 nt, Artificial Sequence
  Description of Artificial Sequence: Synthetic oligonucleotide
gaagcggagcaaauuguuu

SEQ ID NO: 2490827 - RNA, 19 nt, Artificial Sequence
  Description of Artificial Sequence: Synthetic oligonucleotide
gcagccuguagcucuggca

SEQ ID NO: 2490828 - RNA, 19 nt, Artificial Sequence
  Description of Artificial Sequence: Synthetic oligonucleotide
gagcuggaagcggagcaaa

SEQ ID NO: 2490829 - RNA, 19 nt, Artificial Sequence
  Description of Artificial Sequence: Synthetic oligonucleotide
gggauuugcucuggcugag

SEQ ID NO: 2490830 - RNA, 19 nt, Artificial Sequence
  Description of Artificial Sequence: Synthetic oligonucleotide
gagagcugugaggaggcgu

SEQ ID NO: 2490831 - RNA, 19 nt, Artificial Sequence
  Description of Artificial Sequence: Synthetic oligonucleotide
uagcucuggcacacucaua

SEQ ID NO: 2490832 - RNA, 19 nt, Artificial Sequence
  Description of Artificial Sequence: Synthetic oligonucleotide
uccuuagugcugggccugu

SEQ ID NO: 2490833 - RNA, 19 nt, Artificial Sequence
  Description of Artificial Sequence: Synthetic oligonucleotide
agccaacaaguugugugua

SEQ ID NO: 2490834 - RNA, 19 nt, Artificial Sequence
  Description of Artificial Sequence: Synthetic oligonucleotide
ccuucaccccuccuuuggc

SEQ ID NO: 2490835 - RNA, 19 nt, Artificial Sequence
  Description of Artificial Sequence: Synthetic oligonucleotide
gguucucucgccauucugu

SEQ ID NO: 2490836 - RNA, 19 nt, Artificial Sequence
  Description of Artificial Sequence: Synthetic oligonucleotide
gaggcccaaugaucucauc

SEQ ID NO: 2490837 - RNA, 19 nt, Artificial Sequence
  Description of Artificial Sequence: Synthetic oligonucleotide
ucgugcccggcaggcagcc

SEQ ID NO: 2490838 - RNA, 19 nt, Artificial Sequence
  Description of Artificial Sequence: Synthetic oligonucleotide
gcucuggcacacucauagc

SEQ ID NO: 2490839 - RNA, 19 nt, Artificial Sequence
  Description of Artificial Sequence: Synthetic oligonucleotide
cuaguucguaaaggaugga

SEQ ID NO: 2490840 - RNA, 19 nt, Artificial Sequence
  Description of Artificial Sequence: Synthetic oligonucleotide
gcaggcagccuguagcucu

SEQ ID NO: 2490841 - RNA, 19 nt, Artificial Sequence
  Description of Artificial Sequence: Synthetic oligonucleotide
gcgucucccagcuuggcua

SEQ ID NO: 2490842 - RNA, 19 nt, Artificial Sequence
  Description of Artificial Sequence: Synthetic oligonucleotide
ugucuccgucucagcuccu

SEQ ID NO: 2490843 - RNA, 19 nt, Artificial Sequence
  Description of Artificial Sequence: Synthetic oligonucleotide
ggagagcugugaggaggcg

SEQ ID NO: 2490844 - RNA, 19 nt, Artificial Sequence
  Description of Artificial Sequence: Synthetic oligonucleotide
uggccuguuuggaccuguu

SEQ ID NO: 2490845 - RNA, 19 nt, Artificial Sequence
  Description of Artificial Sequence: Synthetic oligonucleotide
gccuguggccuguuuggac

SEQ ID NO: 2490846 - RNA, 19 nt, Artificial Sequence
  Description of Artificial Sequence: Synthetic oligonucleotide
caaccaguuggggccgauc

SEQ ID NO: 2490847 - RNA, 19 nt, Artificial Sequence
  Description of Artificial Sequence: Synthetic oligonucleotide
gcuaggcaaucuuguccac

SEQ ID NO: 2490848 - RNA, 19 nt, Artificial Sequence
  Description of Artificial Sequence: Synthetic oligonucleotide
ccagggcuaacugauccuc

SEQ ID NO: 2490849 - RNA, 19 nt, Artificial Sequence
  Description of Artificial Sequence: Synthetic oligonucleotide
cugcgacaguuguuccuca

SEQ ID NO: 2490850 - RNA, 19 nt, Artificial Sequence
  Description of Artificial Sequence: Synthetic oligonucleotide
cucgccauucugucauugu

SEQ ID NO: 2490851 - RNA, 19 nt, Artificial Sequence
  Description of Artificial Sequence: Synthetic oligonucleotide
gggcaaccaguuggggccg

SEQ ID NO: 2490852 - RNA, 19 nt, Artificial Sequence
  Description of Artificial Sequence: Synthetic oligonucleotide
gucguucguaaaugagaau

SEQ ID NO: 2490853 - RNA, 19 nt, Artificial Sequence
  Description of Artificial Sequence: Synthetic oligonucleotide
cauugucucuugucuccgu

SEQ ID NO: 2490854 - RNA, 19 nt, Artificial Sequence
  Description of Artificial Sequence: Synthetic oligonucleotide
cguucguaaaugagaaucu

SEQ ID NO: 2490855 - RNA, 19 nt, Artificial Sequence
  Description of Artificial Sequence: Synthetic oligonucleotide
cuguggccuguuuggaccu

SEQ ID NO: 2490856 - RNA, 19 nt, Artificial Sequence
  Description of Artificial Sequence: Synthetic oligonucleotide
ggccgaucuaaguguucca

SEQ ID NO: 2490857 - RNA, 19 nt, Artificial Sequence
  Description of Artificial Sequence: Synthetic oligonucleotide
gggcuaacugauccucgaa

SEQ ID NO: 2490858 - RNA, 19 nt, Artificial Sequence
  Description of Artificial Sequence: Synthetic oligonucleotide
cgucaucugcuuuuauaga

SEQ ID NO: 2490859 - RNA, 19 nt, Artificial Sequence
  Description of Artificial Sequence: Synthetic oligonucleotide
ucguuggcuuaggcuuuuc

SEQ ID NO: 2490860 - RNA, 19 nt, Artificial Sequence
  Description of Artificial Sequence: Synthetic oligonucleotide
gcacacucauagccuucac

SEQ ID NO: 2490861 - RNA, 19 nt, Artificial Sequence
  Description of Artificial Sequence: Synthetic oligonucleotide
gcccaaugaucucaucccu

SEQ ID NO: 2490862 - RNA, 19 nt, Artificial Sequence
  Description of Artificial Sequence: Synthetic oligonucleotide
gggcucguuggcuuaggcu

SEQ ID NO: 2490863 - RNA, 19 nt, Artificial Sequence
  Description of Artificial Sequence: Synthetic oligonucleotide
ccaguuggggccgaucuaa

SEQ ID NO: 2490864 - RNA, 19 nt, Artificial Sequence
  Description of Artificial Sequence: Synthetic oligonucleotide
ggaagcggagcaaauuguu

SEQ ID NO: 2490865 - RNA, 19 nt, Artificial Sequence
  Description of Artificial Sequence: Synthetic oligonucleotide
gcgacaguuguuccucagu

SEQ ID NO: 2490866 - RNA, 19 nt, Artificial Sequence
  Description of Artificial Sequence: Synthetic oligonucleotide
ccaacaaguuguguguagu

SEQ ID NO: 2490867 - RNA, 19 nt, Artificial Sequence
  Description of Artificial Sequence: Synthetic oligonucleotide
ggaguacuuccugcuucca

SEQ ID NO: 2490868 - RNA, 19 nt, Artificial Sequence
  Description of Artificial Sequence: Synthetic oligonucleotide
ggcgucucccagcuuggcu

SEQ ID NO: 2490869 - RNA, 19 nt, Artificial Sequence
  Description of Artificial Sequence: Synthetic oligonucleotide
ggcuagguucucucgccau

SEQ ID NO: 2490870 - RNA, 19 nt, Artificial Sequence
  Description of Artificial Sequence: Synthetic oligonucleotide
cccggcaggcagccuguag

SEQ ID NO: 2490871 - RNA, 19 nt, Artificial Sequence
  Description of Artificial Sequence: Synthetic oligonucleotide
gcagagggcucguuggcuu

SEQ ID NO: 2490872 - RNA, 19 nt, Artificial Sequence
  Description of Artificial Sequence: Synthetic oligonucleotide
gcuagguucucucgccauu

SEQ ID NO: 2490873 - RNA, 19 nt, Artificial Sequence
  Description of Artificial Sequence: Synthetic oligonucleotide
gguuuacuggggugauuuu

SEQ ID NO: 2490874 - RNA, 19 nt, Artificial Sequence
  Description of Artificial Sequence: Synthetic oligonucleotide
aggaggcgucucccagcuu

SEQ ID NO: 2490875 - RNA, 19 nt, Artificial Sequence
  Description of Artificial Sequence: Synthetic oligonucleotide
guggccuguuuggaccugu

SEQ ID NO: 2490876 - RNA, 19 nt, Artificial Sequence
  Description of Artificial Sequence: Synthetic oligonucleotide
gcuggaagcggagcaaauu

SEQ ID NO: 2490877 - RNA, 19 nt, Artificial Sequence
  Description of Artificial Sequence: Synthetic oligonucleotide
ccuuagugcugggccugug

SEQ ID NO: 2490878 - RNA, 19 nt, Artificial Sequence
  Description of Artificial Sequence: Synthetic oligonucleotide
ggccuguuuggaccuguuu

SEQ ID NO: 2490879 - RNA, 19 nt, Artificial Sequence
  Description of Artificial Sequence: Synthetic oligonucleotide
gucuccgucucagcuccuu

SEQ ID NO: 2490880 - RNA, 19 nt, Artificial Sequence
  Description of Artificial Sequence: Synthetic oligonucleotide
cguuggcuuaggcuuuucu

SEQ ID NO: 2490881 - RNA, 19 nt, Artificial Sequence
  Description of Artificial Sequence: Synthetic oligonucleotide
cucguuggcuuaggcuuuu

SEQ ID NO: 2490882 - RNA, 19 nt, Artificial Sequence
  Description of Artificial Sequence: Synthetic oligonucleotide
gcggagcaaauuguuuguu

SEQ ID NO: 2490883 - RNA, 19 nt, Artificial Sequence
  Description of Artificial Sequence: Synthetic oligonucleotide
gcucguuggcuuaggcuuu

SEQ ID NO: 2490884 - RNA, 19 nt, Artificial Sequence
  Description of Artificial Sequence: Synthetic oligonucleotide
caccccuccuuuggcaauu

SEQ ID NO: 2490885 - RNA, 19 nt, Artificial Sequence
  Description of Artificial Sequence: Synthetic oligonucleotide
gcaaccaguuggggccgau

SEQ ID NO: 2490886 - RNA, 19 nt, Artificial Sequence
  Description of Artificial Sequence: Synthetic oligonucleotide
ccccuccuuuggcaauuau

SEQ ID NO: 2490887 - RNA, 19 nt, Artificial Sequence
  Description of Artificial Sequence: Synthetic oligonucleotide
gcccggcaggcagccugua

SEQ ID NO: 2490888 - RNA, 19 nt, Artificial Sequence
  Description of Artificial Sequence: Synthetic oligonucleotide
agcaacaacaaucacgccc

SEQ ID NO: 2490889 - RNA, 19 nt, Artificial Sequence
  Description of Artificial Sequence: Synthetic oligonucleotide
acaacaaucacgcccaagc

SEQ ID NO: 2490890 - RNA, 19 nt, Artificial Sequence
  Description of Artificial Sequence: Synthetic oligonucleotide
acaaagcuaaccuaagccc

SEQ ID NO: 2490891 - RNA, 19 nt, Artificial Sequence
  Description of Artificial Sequence: Synthetic oligonucleotide
aaagcaugcauaaaccagc

SEQ ID NO: 2490892 - RNA, 19 nt, Artificial Sequence
  Description of Artificial Sequence: Synthetic oligonucleotide
uucuuggacacccacauag

SEQ ID NO: 2490893 - RNA, 19 nt, Artificial Sequence
  Description of Artificial Sequence: Synthetic oligonucleotide
aaagugaccgagcaacaac

SEQ ID NO: 2490894 - RNA, 19 nt, Artificial Sequence
  Description of Artificial Sequence: Synthetic oligonucleotide
aacaaucacgcccaagcuc

SEQ ID NO: 2490895 - RNA, 19 nt, Artificial Sequence
  Description of Artificial Sequence: Synthetic oligonucleotide
aaagggucgaauccccagc

SEQ ID NO: 2490896 - RNA, 19 nt, Artificial Sequence
  Description of Artificial Sequence: Synthetic oligonucleotide
aaaaucucgaagaugguug

SEQ ID NO: 2490897 - RNA, 19 nt, Artificial Sequence
  Description of Artificial Sequence: Synthetic oligonucleotide
gaaacuaaggcacaaagcu

SEQ ID NO: 2490898 - RNA, 19 nt, Artificial Sequence
  Description of Artificial Sequence: Synthetic oligonucleotide
aaaguccuaaucaaggcag

SEQ ID NO: 2490899 - RNA, 19 nt, Artificial Sequence
  Description of Artificial Sequence: Synthetic oligonucleotide
aacaugacacagauggagc

SEQ ID NO: 2490900 - RNA, 19 nt, Artificial Sequence
  Description of Artificial Sequence: Synthetic oligonucleotide
cacaaagcuaaccuaagcc

SEQ ID NO: 2490901 - RNA, 19 nt, Artificial Sequence
  Description of Artificial Sequence: Synthetic oligonucleotide
uacaucauggcucuuggcu

SEQ ID NO: 2490902 - RNA, 19 nt, Artificial Sequence
  Description of Artificial Sequence: Synthetic oligonucleotide
aagggucgaauccccagcc

SEQ ID NO: 2490903 - RNA, 19 nt, Artificial Sequence
  Description of Artificial Sequence: Synthetic oligonucleotide
augguuguguccucaaugg

SEQ ID NO: 2490904 - RNA, 19 nt, Artificial Sequence
  Description of Artificial Sequence: Synthetic oligonucleotide
agcucugacaaccuagcac

SEQ ID NO: 2490905 - RNA, 19 nt, Artificial Sequence
  Description of Artificial Sequence: Synthetic oligonucleotide
uaacacucuagccuggagc

SEQ ID NO: 2490906 - RNA, 19 nt, Artificial Sequence
  Description of Artificial Sequence: Synthetic oligonucleotide
agguugaugauccugggug

SEQ ID NO: 2490907 - RNA, 19 nt, Artificial Sequence
  Description of Artificial Sequence: Synthetic oligonucleotide
cuaaccuaagcccacuggg

SEQ ID NO: 2490908 - RNA, 19 nt, Artificial Sequence
  Description of Artificial Sequence: Synthetic oligonucleotide
gacaaccuagcacaagacg

SEQ ID NO: 2490909 - RNA, 19 nt, Artificial Sequence
  Description of Artificial Sequence: Synthetic oligonucleotide
gauguaggccaccagcagg

SEQ ID NO: 2490910 - RNA, 19 nt, Artificial Sequence
  Description of Artificial Sequence: Synthetic oligonucleotide
aaaagggucgaauccccag

SEQ ID NO: 2490911 - RNA, 19 nt, Artificial Sequence
  Description of Artificial Sequence: Synthetic oligonucleotide
ugaccgagcaacaacaauc

SEQ ID NO: 2490912 - RNA, 19 nt, Artificial Sequence
  Description of Artificial Sequence: Synthetic oligonucleotide
uccuaaucaaggcaguaca

SEQ ID NO: 2490913 - RNA, 19 nt, Artificial Sequence
  Description of Artificial Sequence: Synthetic oligonucleotide
agcagcuggacauuggguc

SEQ ID NO: 2490914 - RNA, 19 nt, Artificial Sequence
  Description of Artificial Sequence: Synthetic oligonucleotide
gaugguuguguccucaaug

SEQ ID NO: 2490915 - RNA, 19 nt, Artificial Sequence
  Description of Artificial Sequence: Synthetic oligonucleotide
cugcaaaucgcaaagugac

SEQ ID NO: 2490916 - RNA, 19 nt, Artificial Sequence
  Description of Artificial Sequence: Synthetic oligonucleotide
uguaaauucuggccguccc

SEQ ID NO: 2490917 - RNA, 19 nt, Artificial Sequence
  Description of Artificial Sequence: Synthetic oligonucleotide
agggacuguaaauucuggc

SEQ ID NO: 2490918 - RNA, 19 nt, Artificial Sequence
  Description of Artificial Sequence: Synthetic oligonucleotide
ugcauaaaccagccagucg

SEQ ID NO: 2490919 - RNA, 19 nt, Artificial Sequence
  Description of Artificial Sequence: Synthetic oligonucleotide
acaagcgaaaggaaaaggg

SEQ ID NO: 2490920 - RNA, 19 nt, Artificial Sequence
  Description of Artificial Sequence: Synthetic oligonucleotide
auagcugccgguucggcgg

SEQ ID NO: 2490921 - RNA, 19 nt, Artificial Sequence
  Description of Artificial Sequence: Synthetic oligonucleotide
ugccugaaaaucucgaaga

SEQ ID NO: 2490922 - RNA, 19 nt, Artificial Sequence
  Description of Artificial Sequence: Synthetic oligonucleotide
cuacaaggccucuagagac

SEQ ID NO: 2490923 - RNA, 19 nt, Artificial Sequence
  Description of Artificial Sequence: Synthetic oligonucleotide
acagagggacuguaaauuc

SEQ ID NO: 2490924 - RNA, 19 nt, Artificial Sequence
  Description of Artificial Sequence: Synthetic oligonucleotide
aaaucucgaagaugguugu

SEQ ID NO: 2490925 - RNA, 19 nt, Artificial Sequence
  Description of Artificial Sequence: Synthetic oligonucleotide
aaggcagagguucucggug

SEQ ID NO: 2490926 - RNA, 19 nt, Artificial Sequence
  Description of Artificial Sequence: Synthetic oligonucleotide
ugggccagagaaacuaagg

SEQ ID NO: 2490927 - RNA, 19 nt, Artificial Sequence
  Description of Artificial Sequence: Synthetic oligonucleotide
ugagguggguacaggaucc

SEQ ID NO: 2490928 - RNA, 19 nt, Artificial Sequence
  Description of Artificial Sequence: Synthetic oligonucleotide
aaauucuggccgucccuac

SEQ ID NO: 2490929 - RNA, 19 nt, Artificial Sequence
  Description of Artificial Sequence: Synthetic oligonucleotide
ggacuguaaauucuggccg

SEQ ID NO: 2490930 - RNA, 19 nt, Artificial Sequence
  Description of Artificial Sequence: Synthetic oligonucleotide
uagcacaagacgaaaguuc

SEQ ID NO: 2490931 - RNA, 19 nt, Artificial Sequence
  Description of Artificial Sequence: Synthetic oligonucleotide
uacaagcgaaaggaaaagg

SEQ ID NO: 2490932 - RNA, 19 nt, Artificial Sequence
  Description of Artificial Sequence: Synthetic oligonucleotide
gcaugcauaaaccagccag

SEQ ID NO: 2490933 - RNA, 19 nt, Artificial Sequence
  Description of Artificial Sequence: Synthetic oligonucleotide
ucuagccuggagcccaugg

SEQ ID NO: 2490934 - RNA, 19 nt, Artificial Sequence
  Description of Artificial Sequence: Synthetic oligonucleotide
ucuuggacacccacauagg

SEQ ID NO: 2490935 - RNA, 19 nt, Artificial Sequence
  Description of Artificial Sequence: Synthetic oligonucleotide
ggcaaaagcaugcauaaac

SEQ ID NO: 2490936 - RNA, 19 nt, Artificial Sequence
  Description of Artificial Sequence: Synthetic oligonucleotide
ugagcuacaucauggcucu

SEQ ID NO: 2490937 - RNA, 19 nt, Artificial Sequence
  Description of Artificial Sequence: Synthetic oligonucleotide
aaaucgcaaagugaccgag

SEQ ID NO: 2490938 - RNA, 19 nt, Artificial Sequence
  Description of Artificial Sequence: Synthetic oligonucleotide
cugagcuacaucauggcuc

SEQ ID NO: 2490939 - RNA, 19 nt, Artificial Sequence
  Description of Artificial Sequence: Synthetic oligonucleotide
gauggagccgcccaccgcc

SEQ ID NO: 2490940 - RNA, 19 nt, Artificial Sequence
  Description of Artificial Sequence: Synthetic oligonucleotide
caacaugacacagauggag

SEQ ID NO: 2490941 - RNA, 19 nt, Artificial Sequence
  Description of Artificial Sequence: Synthetic oligonucleotide
aaucgcaaagugaccgagc

SEQ ID NO: 2490942 - RNA, 19 nt, Artificial Sequence
  Description of Artificial Sequence: Synthetic oligonucleotide
guuggaggacccuucaccc

SEQ ID NO: 2490943 - RNA, 19 nt, Artificial Sequence
  Description of Artificial Sequence: Synthetic oligonucleotide
acaagacgaaaguucaggu

SEQ ID NO: 2490944 - RNA, 19 nt, Artificial Sequence
  Description of Artificial Sequence: Synthetic oligonucleotide
ugaacuccaagcacucggc

SEQ ID NO: 2490945 - RNA, 19 nt, Artificial Sequence
  Description of Artificial Sequence: Synthetic oligonucleotide
cuaaucaaggcaguacaag

SEQ ID NO: 2490946 - RNA, 19 nt, Artificial Sequence
  Description of Artificial Sequence: Synthetic oligonucleotide
uggcuaacacucuagccug

SEQ ID NO: 2490947 - RNA, 19 nt, Artificial Sequence
  Description of Artificial Sequence: Synthetic oligonucleotide
acuccaagcacucggcgag

SEQ ID NO: 2490948 - RNA, 19 nt, Artificial Sequence
  Description of Artificial Sequence: Synthetic oligonucleotide
ucgaagaugguuguguccu

SEQ ID NO: 2490949 - RNA, 19 nt, Artificial Sequence
  Description of Artificial Sequence: Synthetic oligonucleotide
cucaaugggacucugggca

SEQ ID NO: 2490950 - RNA, 19 nt, Artificial Sequence
  Description of Artificial Sequence: Synthetic oligonucleotide
ucggcggugaacuccaagc

SEQ ID NO: 2490951 - RNA, 19 nt, Artificial Sequence
  Description of Artificial Sequence: Synthetic oligonucleotide
augacacagauggagccgc

SEQ ID NO: 2490952 - RNA, 19 nt, Artificial Sequence
  Description of Artificial Sequence: Synthetic oligonucleotide
acaaccuagcacaagacga

SEQ ID NO: 2490953 - RNA, 19 nt, Artificial Sequence
  Description of Artificial Sequence: Synthetic oligonucleotide
ugggcaaaagcaugcauaa

SEQ ID NO: 2490954 - RNA, 19 nt, Artificial Sequence
  Description of Artificial Sequence: Synthetic oligonucleotide
gcaaaucgcaaagugaccg

SEQ ID NO: 2490955 - RNA, 19 nt, Artificial Sequence
  Description of Artificial Sequence: Synthetic oligonucleotide
aucgcaaagugaccgagca

SEQ ID NO: 2490956 - RNA, 19 nt, Artificial Sequence
  Description of Artificial Sequence: Synthetic oligonucleotide
ugcaaaucgcaaagugacc

SEQ ID NO: 2490957 - RNA, 19 nt, Artificial Sequence
  Description of Artificial Sequence: Synthetic oligonucleotide
aucaaggcaguacaagcga

SEQ ID NO: 2490958 - RNA, 19 nt, Artificial Sequence
  Description of Artificial Sequence: Synthetic oligonucleotide
ucuggccgucccuacaagg

SEQ ID NO: 2490959 - RNA, 19 nt, Artificial Sequence
  Description of Artificial Sequence: Synthetic oligonucleotide
aagugaccgagcaacaaca

SEQ ID NO: 2490960 - RNA, 19 nt, Artificial Sequence
  Description of Artificial Sequence: Synthetic oligonucleotide
cgagcaacaacaaucacgc

SEQ ID NO: 2490961 - RNA, 19 nt, Artificial Sequence
  Description of Artificial Sequence: Synthetic oligonucleotide
aagaacccuggcuaacacu

SEQ ID NO: 2490962 - RNA, 19 nt, Artificial Sequence
  Description of Artificial Sequence: Synthetic oligonucleotide
acaaucacgcccaagcucu

SEQ ID NO: 2490963 - RNA, 19 nt, Artificial Sequence
  Description of Artificial Sequence: Synthetic oligonucleotide
cugccugaaaaucucgaag

SEQ ID NO: 2490964 - RNA, 19 nt, Artificial Sequence
  Description of Artificial Sequence: Synthetic oligonucleotide
uaaccuaagcccacugggu

SEQ ID NO: 2490965 - RNA, 19 nt, Artificial Sequence
  Description of Artificial Sequence: Synthetic oligonucleotide
gaacuccaagcacucggcg

SEQ ID NO: 2490966 - RNA, 19 nt, Artificial Sequence
  Description of Artificial Sequence: Synthetic oligonucleotide
acccuucaccccuggaugc

SEQ ID NO: 2490967 - RNA, 19 nt, Artificial Sequence
  Description of Artificial Sequence: Synthetic oligonucleotide
aauccccauggacagcuga

SEQ ID NO: 2490968 - RNA, 19 nt, Artificial Sequence
  Description of Artificial Sequence: Synthetic oligonucleotide
uggacauuggguccagccu

SEQ ID NO: 2490969 - RNA, 19 nt, Artificial Sequence
  Description of Artificial Sequence: Synthetic oligonucleotide
acagcugagggaugauggg

SEQ ID NO: 2490970 - RNA, 19 nt, Artificial Sequence
  Description of Artificial Sequence: Synthetic oligonucleotide
uugggccagagaaacuaag

SEQ ID NO: 2490971 - RNA, 19 nt, Artificial Sequence
  Description of Artificial Sequence: Synthetic oligonucleotide
ucccuaucugcaaaucgca

SEQ ID NO: 2490972 - RNA, 19 nt, Artificial Sequence
  Description of Artificial Sequence: Synthetic oligonucleotide
aaggcacaaagcuaaccua

SEQ ID NO: 2490973 - RNA, 19 nt, Artificial Sequence
  Description of Artificial Sequence: Synthetic oligonucleotide
aauucuggccgucccuaca

SEQ ID NO: 2490974 - RNA, 19 nt, Artificial Sequence
  Description of Artificial Sequence: Synthetic oligonucleotide
ccgagcaacaacaaucacg

SEQ ID NO: 2490975 - RNA, 19 nt, Artificial Sequence
  Description of Artificial Sequence: Synthetic oligonucleotide
gagguucucggugauguag

SEQ ID NO: 2490976 - RNA, 19 nt, Artificial Sequence
  Description of Artificial Sequence: Synthetic oligonucleotide
agccuccuaagguuggagg

SEQ ID NO: 2490977 - RNA, 19 nt, Artificial Sequence
  Description of Artificial Sequence: Synthetic oligonucleotide
gacccuucaccccuggaug

SEQ ID NO: 2490978 - RNA, 19 nt, Artificial Sequence
  Description of Artificial Sequence: Synthetic oligonucleotide
aaccuaagcccacugggua

SEQ ID NO: 2490979 - RNA, 19 nt, Artificial Sequence
  Description of Artificial Sequence: Synthetic oligonucleotide
ugacaaccuagcacaagac

SEQ ID NO: 2490980 - RNA, 19 nt, Artificial Sequence
  Description of Artificial Sequence: Synthetic oligonucleotide
uggcucuugacagagggac

SEQ ID NO: 2490981 - RNA, 19 nt, Artificial Sequence
  Description of Artificial Sequence: Synthetic oligonucleotide
aucacgcccaagcucugac

SEQ ID NO: 2490982 - RNA, 19 nt, Artificial Sequence
  Description of Artificial Sequence: Synthetic oligonucleotide
uagagacagggaagaaccc

SEQ ID NO: 2490983 - RNA, 19 nt, Artificial Sequence
  Description of Artificial Sequence: Synthetic oligonucleotide
cuggguaaggugagguggg

SEQ ID NO: 2490984 - RNA, 19 nt, Artificial Sequence
  Description of Artificial Sequence: Synthetic oligonucleotide
cugacaaccuagcacaaga

SEQ ID NO: 2490985 - RNA, 19 nt, Artificial Sequence
  Description of Artificial Sequence: Synthetic oligonucleotide
ucaaggcaguacaagcgaa

SEQ ID NO: 2490986 - RNA, 19 nt, Artificial Sequence
  Description of Artificial Sequence: Synthetic oligonucleotide
agcacaagacgaaaguuca

SEQ ID NO: 2490987 - RNA, 19 nt, Artificial Sequence
  Description of Artificial Sequence: Synthetic oligonucleotide
aacaacaaucacgcccaag

SEQ ID NO: 2490988 - RNA, 19 nt, Artificial Sequence
  Description of Artificial Sequence: Synthetic oligonucleotide
aagguuggaggacccuuca

SEQ ID NO: 2490989 - RNA, 19 nt, Artificial Sequence
  Description of Artificial Sequence: Synthetic oligonucleotide
gaagaacccuggcuaacac

SEQ ID NO: 2490990 - RNA, 19 nt, Artificial Sequence
  Description of Artificial Sequence: Synthetic oligonucleotide
cuaaggcacaaagcuaacc

SEQ ID NO: 2490991 - RNA, 19 nt, Artificial Sequence
  Description of Artificial Sequence: Synthetic oligonucleotide
gcaaaagcaugcauaaacc

SEQ ID NO: 2490992 - RNA, 19 nt, Artificial Sequence
  Description of Artificial Sequence: Synthetic oligonucleotide
guuguguccucaaugggac

SEQ ID NO: 2490993 - RNA, 19 nt, Artificial Sequence
  Description of Artificial Sequence: Synthetic oligonucleotide
gguaaggugagguggguac

SEQ ID NO: 2490994 - RNA, 19 nt, Artificial Sequence
  Description of Artificial Sequence: Synthetic oligonucleotide
aaacuaaggcacaaagcua

SEQ ID NO: 2490995 - RNA, 19 nt, Artificial Sequence
  Description of Artificial Sequence: Synthetic oligonucleotide
accgaucuccugcauagcu

SEQ ID NO: 2490996 - RNA, 19 nt, Artificial Sequence
  Description of Artificial Sequence: Synthetic oligonucleotide
acagauggagccgcccacc

SEQ ID NO: 2490997 - RNA, 19 nt, Artificial Sequence
  Description of Artificial Sequence: Synthetic oligonucleotide
ugagucuggaaggcagagg

SEQ ID NO: 2490998 - RNA, 19 nt, Artificial Sequence
  Description of Artificial Sequence: Synthetic oligonucleotide
cuggccgucccuacaaggc

SEQ ID NO: 2490999 - RNA, 19 nt, Artificial Sequence
  Description of Artificial Sequence: Synthetic oligonucleotide
gaugaccaccaacaugaca

SEQ ID NO: 2491000 - RNA, 19 nt, Artificial Sequence
  Description of Artificial Sequence: Synthetic oligonucleotide
agauggagccgcccaccgc

SEQ ID NO: 2491001 - RNA, 19 nt, Artificial Sequence
  Description of Artificial Sequence: Synthetic oligonucleotide
aagcucugacaaccuagca

SEQ ID NO: 2491002 - RNA, 19 nt, Artificial Sequence
  Description of Artificial Sequence: Synthetic oligonucleotide
gucccuaucugcaaaucgc

SEQ ID NO: 2491003 - RNA, 19 nt, Artificial Sequence
  Description of Artificial Sequence: Synthetic oligonucleotide
uguguccucaaugggacuc

SEQ ID NO: 2491004 - RNA, 19 nt, Artificial Sequence
  Description of Artificial Sequence: Synthetic oligonucleotide
uccuaagguuggaggaccc

SEQ ID NO: 2491005 - RNA, 19 nt, Artificial Sequence
  Description of Artificial Sequence: Synthetic oligonucleotide
ucugacaaccuagcacaag

SEQ ID NO: 2491006 - RNA, 19 nt, Artificial Sequence
  Description of Artificial Sequence: Synthetic oligonucleotide
agggccacaaauccccaug

SEQ ID NO: 2491007 - RNA, 19 nt, Artificial Sequence
  Description of Artificial Sequence: Synthetic oligonucleotide
agacaaacagggccuguga

SEQ ID NO: 2491008 - RNA, 19 nt, Artificial Sequence
  Description of Artificial Sequence: Synthetic oligonucleotide
ucauggccaccaccgaucu

SEQ ID NO: 2491009 - RNA, 19 nt, Artificial Sequence
  Description of Artificial Sequence: Synthetic oligonucleotide
ggacauuggguccagccug

SEQ ID NO: 2491010 - RNA, 19 nt, Artificial Sequence
  Description of Artificial Sequence: Synthetic oligonucleotide
gaauccccagccuccuaag

SEQ ID NO: 2491011 - RNA, 19 nt, Artificial Sequence
  Description of Artificial Sequence: Synthetic oligonucleotide
aggcagaugaccaccaaca

SEQ ID NO: 2491012 - RNA, 19 nt, Artificial Sequence
  Description of Artificial Sequence: Synthetic oligonucleotide
accgagcaacaacaaucac

SEQ ID NO: 2491013 - RNA, 19 nt, Artificial Sequence
  Description of Artificial Sequence: Synthetic oligonucleotide
aggucacucgucccuaucu

SEQ ID NO: 2491014 - RNA, 19 nt, Artificial Sequence
  Description of Artificial Sequence: Synthetic oligonucleotide
gcuaaccuaagcccacugg

SEQ ID NO: 2491015 - RNA, 19 nt, Artificial Sequence
  Description of Artificial Sequence: Synthetic oligonucleotide
aagaugguuguguccucaa

SEQ ID NO: 2491016 - RNA, 19 nt, Artificial Sequence
  Description of Artificial Sequence: Synthetic oligonucleotide
gccagagaaacuaaggcac

SEQ ID NO: 2491017 - RNA, 19 nt, Artificial Sequence
  Description of Artificial Sequence: Synthetic oligonucleotide
uggccgucccuacaaggcc

SEQ ID NO: 2491018 - RNA, 19 nt, Artificial Sequence
  Description of Artificial Sequence: Synthetic oligonucleotide
gucccuacaaggccucuag

SEQ ID NO: 2491019 - RNA, 19 nt, Artificial Sequence
  Description of Artificial Sequence: Synthetic oligonucleotide
gugagguggguacaggauc

SEQ ID NO: 2491020 - RNA, 19 nt, Artificial Sequence
  Description of Artificial Sequence: Synthetic oligonucleotide
cuagccuggagcccauggc

SEQ ID NO: 2491021 - RNA, 19 nt, Artificial Sequence
  Description of Artificial Sequence: Synthetic oligonucleotide
uucggcggugaacuccaag

SEQ ID NO: 2491022 - RNA, 19 nt, Artificial Sequence
  Description of Artificial Sequence: Synthetic oligonucleotide
gaccgagcaacaacaauca

SEQ ID NO: 2491023 - RNA, 19 nt, Artificial Sequence
  Description of Artificial Sequence: Synthetic oligonucleotide
aaccccugccugaaaaucu

SEQ ID NO: 2491024 - RNA, 19 nt, Artificial Sequence
  Description of Artificial Sequence: Synthetic oligonucleotide
acaaggccucuagagacag

SEQ ID NO: 2491025 - RNA, 19 nt, Artificial Sequence
  Description of Artificial Sequence: Synthetic oligonucleotide
agguuggaggacccuucac

SEQ ID NO: 2491026 - RNA, 19 nt, Artificial Sequence
  Description of Artificial Sequence: Synthetic oligonucleotide
gacaaacagggccugugaa

SEQ ID NO: 2491027 - RNA, 19 nt, Artificial Sequence
  Description of Artificial Sequence: Synthetic oligonucleotide
acuguaaauucuggccguc

SEQ ID NO: 2491028 - RNA, 19 nt, Artificial Sequence
  Description of Artificial Sequence: Synthetic oligonucleotide
acaaauccccauggacagc

SEQ ID NO: 2491029 - RNA, 19 nt, Artificial Sequence
  Description of Artificial Sequence: Synthetic oligonucleotide
uuggaggacccuucacccc

SEQ ID NO: 2491030 - RNA, 19 nt, Artificial Sequence
  Description of Artificial Sequence: Synthetic oligonucleotide
agucgcagggccacaaauc

SEQ ID NO: 2491031 - RNA, 19 nt, Artificial Sequence
  Description of Artificial Sequence: Synthetic oligonucleotide
cuuggacacccacauagga

SEQ ID NO: 2491032 - RNA, 19 nt, Artificial Sequence
  Description of Artificial Sequence: Synthetic oligonucleotide
caguacaagcgaaaggaaa

SEQ ID NO: 2491033 - RNA, 19 nt, Artificial Sequence
  Description of Artificial Sequence: Synthetic oligonucleotide
cuaacacucuagccuggag

SEQ ID NO: 2491034 - RNA, 19 nt, Artificial Sequence
  Description of Artificial Sequence: Synthetic oligonucleotide
ucaaugggacucugggcaa

SEQ ID NO: 2491035 - RNA, 19 nt, Artificial Sequence
  Description of Artificial Sequence: Synthetic oligonucleotide
ggguacaggauccagaggu

SEQ ID NO: 2491036 - RNA, 19 nt, Artificial Sequence
  Description of Artificial Sequence: Synthetic oligonucleotide
uaucugcaaaucgcaaagu

SEQ ID NO: 2491037 - RNA, 19 nt, Artificial Sequence
  Description of Artificial Sequence: Synthetic oligonucleotide
agcuaaccuaagcccacug

SEQ ID NO: 2491038 - RNA, 19 nt, Artificial Sequence
  Description of Artificial Sequence: Synthetic oligonucleotide
cuccuaagguuggaggacc

SEQ ID NO: 2491039 - RNA, 19 nt, Artificial Sequence
  Description of Artificial Sequence: Synthetic oligonucleotide
caagcgaaaggaaaagggu

SEQ ID NO: 2491040 - RNA, 19 nt, Artificial Sequence
  Description of Artificial Sequence: Synthetic oligonucleotide
ccaagcucugacaaccuag

SEQ ID NO: 2491041 - RNA, 19 nt, Artificial Sequence
  Description of Artificial Sequence: Synthetic oligonucleotide
auucuggccgucccuacaa

SEQ ID NO: 2491042 - RNA, 19 nt, Artificial Sequence
  Description of Artificial Sequence: Synthetic oligonucleotide
gcagaugaccaccaacaug

SEQ ID NO: 2491043 - RNA, 19 nt, Artificial Sequence
  Description of Artificial Sequence: Synthetic oligonucleotide
ugaaccccugccugaaaau

SEQ ID NO: 2491044 - RNA, 19 nt, Artificial Sequence
  Description of Artificial Sequence: Synthetic oligonucleotide
cugggcaaaagcaugcaua

SEQ ID NO: 2491045 - RNA, 19 nt, Artificial Sequence
  Description of Artificial Sequence: Synthetic oligonucleotide
cuguaaauucuggccgucc

SEQ ID NO: 2491046 - RNA, 19 nt, Artificial Sequence
  Description of Artificial Sequence: Synthetic oligonucleotide
cccuacaaggccucuagag

SEQ ID NO: 2491047 - RNA, 19 nt, Artificial Sequence
  Description of Artificial Sequence: Synthetic oligonucleotide
uucuggccgucccuacaag

SEQ ID NO: 2491048 - RNA, 19 nt, Artificial Sequence
  Description of Artificial Sequence: Synthetic oligonucleotide
cagauggagccgcccaccg

SEQ ID NO: 2491049 - RNA, 19 nt, Artificial Sequence
  Description of Artificial Sequence: Synthetic oligonucleotide
gcacaaagcuaaccuaagc

SEQ ID NO: 2491050 - RNA, 19 nt, Artificial Sequence
  Description of Artificial Sequence: Synthetic oligonucleotide
uccugcauugggccagaga

SEQ ID NO: 2491051 - RNA, 19 nt, Artificial Sequence
  Description of Artificial Sequence: Synthetic oligonucleotide
gacauuggguccagccugc

SEQ ID NO: 2491052 - RNA, 19 nt, Artificial Sequence
  Description of Artificial Sequence: Synthetic oligonucleotide
gccacaaauccccauggac

SEQ ID NO: 2491053 - RNA, 19 nt, Artificial Sequence
  Description of Artificial Sequence: Synthetic oligonucleotide
ccugcauugggccagagaa

SEQ ID NO: 2491054 - RNA, 19 nt, Artificial Sequence
  Description of Artificial Sequence: Synthetic oligonucleotide
gaaaaucucgaagaugguu

SEQ ID NO: 2491055 - RNA, 19 nt, Artificial Sequence
  Description of Artificial Sequence: Synthetic oligonucleotide
accuaagcccacuggguaa

SEQ ID NO: 2491056 - RNA, 19 nt, Artificial Sequence
  Description of Artificial Sequence: Synthetic oligonucleotide
gacuguaaauucuggccgu

SEQ ID NO: 2491057 - RNA, 19 nt, Artificial Sequence
  Description of Artificial Sequence: Synthetic oligonucleotide
gaaccccugccugaaaauc

SEQ ID NO: 2491058 - RNA, 19 nt, Artificial Sequence
  Description of Artificial Sequence: Synthetic oligonucleotide
gacacccacauaggaagac

SEQ ID NO: 2491059 - RNA, 19 nt, Artificial Sequence
  Description of Artificial Sequence: Synthetic oligonucleotide
gaccucggcgcgcagcggc

SEQ ID NO: 2491060 - RNA, 19 nt, Artificial Sequence
  Description of Artificial Sequence: Synthetic oligonucleotide
gccgucauggccaccaccg

SEQ ID NO: 2491061 - RNA, 19 nt, Artificial Sequence
  Description of Artificial Sequence: Synthetic oligonucleotide
cauaaaccagccagucgca

SEQ ID NO: 2491062 - RNA, 19 nt, Artificial Sequence
  Description of Artificial Sequence: Synthetic oligonucleotide
cucggcgagcucuggcugg

SEQ ID NO: 2491063 - RNA, 19 nt, Artificial Sequence
  Description of Artificial Sequence: Synthetic oligonucleotide
caaaucgcaaagugaccga

SEQ ID NO: 2491064 - RNA, 19 nt, Artificial Sequence
  Description of Artificial Sequence: Synthetic oligonucleotide
agcaugcauaaaccagcca

SEQ ID NO: 2491065 - RNA, 19 nt, Artificial Sequence
  Description of Artificial Sequence: Synthetic oligonucleotide
agggaagaacccuggcuaa

SEQ ID NO: 2491066 - RNA, 19 nt, Artificial Sequence
  Description of Artificial Sequence: Synthetic oligonucleotide
ggaaaagggucgaaucccc

SEQ ID NO: 2491067 - RNA, 19 nt, Artificial Sequence
  Description of Artificial Sequence: Synthetic oligonucleotide
cuucaccccuggaugcagc

SEQ ID NO: 2491068 - RNA, 19 nt, Artificial Sequence
  Description of Artificial Sequence: Synthetic oligonucleotide
acgaaaguucagguugaug

SEQ ID NO: 2491069 - RNA, 19 nt, Artificial Sequence
  Description of Artificial Sequence: Synthetic oligonucleotide
acgcccaagcucugacaac

SEQ ID NO: 2491070 - RNA, 19 nt, Artificial Sequence
  Description of Artificial Sequence: Synthetic oligonucleotide
ccaccgaucuccugcauag

SEQ ID NO: 2491071 - RNA, 19 nt, Artificial Sequence
  Description of Artificial Sequence: Synthetic oligonucleotide
ccuggcuaacacucuagcc

SEQ ID NO: 2491072 - RNA, 19 nt, Artificial Sequence
  Description of Artificial Sequence: Synthetic oligonucleotide
ucccuacaaggccucuaga

SEQ ID NO: 2491073 - RNA, 19 nt, Artificial Sequence
  Description of Artificial Sequence: Synthetic oligonucleotide
aagcuaaccuaagcccacu

SEQ ID NO: 2491074 - RNA, 19 nt, Artificial Sequence
  Description of Artificial Sequence: Synthetic oligonucleotide
caaccuagcacaagacgaa

SEQ ID NO: 2491075 - RNA, 19 nt, Artificial Sequence
  Description of Artificial Sequence: Synthetic oligonucleotide
agagaaacuaaggcacaaa

SEQ ID NO: 2491076 - RNA, 19 nt, Artificial Sequence
  Description of Artificial Sequence: Synthetic oligonucleotide
cacuggguaaggugaggug

SEQ ID NO: 2491077 - RNA, 19 nt, Artificial Sequence
  Description of Artificial Sequence: Synthetic oligonucleotide
gguuguguccucaauggga

SEQ ID NO: 2491078 - RNA, 19 nt, Artificial Sequence
  Description of Artificial Sequence: Synthetic oligonucleotide
acucggcgagcucuggcug

SEQ ID NO: 2491079 - RNA, 19 nt, Artificial Sequence
  Description of Artificial Sequence: Synthetic oligonucleotide
gaaaagggucgaaucccca

SEQ ID NO: 2491080 - RNA, 19 nt, Artificial Sequence
  Description of Artificial Sequence: Synthetic oligonucleotide
ucacgcccaagcucugaca

SEQ ID NO: 2491081 - RNA, 19 nt, Artificial Sequence
  Description of Artificial Sequence: Synthetic oligonucleotide
gagcaacaacaaucacgcc

SEQ ID NO: 2491082 - RNA, 19 nt, Artificial Sequence
  Description of Artificial Sequence: Synthetic oligonucleotide
guacaggauccagagguca

SEQ ID NO: 2491083 - RNA, 19 nt, Artificial Sequence
  Description of Artificial Sequence: Synthetic oligonucleotide
agaugguuguguccucaau

SEQ ID NO: 2491084 - RNA, 19 nt, Artificial Sequence
  Description of Artificial Sequence: Synthetic oligonucleotide
caugcauaaaccagccagu

SEQ ID NO: 2491085 - RNA, 19 nt, Artificial Sequence
  Description of Artificial Sequence: Synthetic oligonucleotide
agacgaaaguucagguuga

SEQ ID NO: 2491086 - RNA, 19 nt, Artificial Sequence
  Description of Artificial Sequence: Synthetic oligonucleotide
aaucacgcccaagcucuga

SEQ ID NO: 2491087 - RNA, 19 nt, Artificial Sequence
  Description of Artificial Sequence: Synthetic oligonucleotide
gugaaccccugccugaaaa

SEQ ID NO: 2491088 - RNA, 19 nt, Artificial Sequence
  Description of Artificial Sequence: Synthetic oligonucleotide
augauccugggugccagug

SEQ ID NO: 2491089 - RNA, 19 nt, Artificial Sequence
  Description of Artificial Sequence: Synthetic oligonucleotide
gacagagggacuguaaauu

SEQ ID NO: 2491090 - RNA, 19 nt, Artificial Sequence
  Description of Artificial Sequence: Synthetic oligonucleotide
cauggcucuuggcuucuug

SEQ ID NO: 2491091 - RNA, 19 nt, Artificial Sequence
  Description of Artificial Sequence: Synthetic oligonucleotide
ccagucugaggccugaguc

SEQ ID NO: 2491092 - RNA, 19 nt, Artificial Sequence
  Description of Artificial Sequence: Synthetic oligonucleotide
acucgucccuaucugcaaa

SEQ ID NO: 2491093 - RNA, 19 nt, Artificial Sequence
  Description of Artificial Sequence: Synthetic oligonucleotide
uuguguccucaaugggacu

SEQ ID NO: 2491094 - RNA, 19 nt, Artificial Sequence
  Description of Artificial Sequence: Synthetic oligonucleotide
gaaggcagagguucucggu

SEQ ID NO: 2491095 - RNA, 19 nt, Artificial Sequence
  Description of Artificial Sequence: Synthetic oligonucleotide
ccacauaggaagacaaaca

SEQ ID NO: 2491096 - RNA, 19 nt, Artificial Sequence
  Description of Artificial Sequence: Synthetic oligonucleotide
ucuugacagagggacugua

SEQ ID NO: 2491097 - RNA, 19 nt, Artificial Sequence
  Description of Artificial Sequence: Synthetic oligonucleotide
accccugccugaaaaucuc

SEQ ID NO: 2491098 - RNA, 19 nt, Artificial Sequence
  Description of Artificial Sequence: Synthetic oligonucleotide
gucauggccaccaccgauc

SEQ ID NO: 2491099 - RNA, 19 nt, Artificial Sequence
  Description of Artificial Sequence: Synthetic oligonucleotide
ugugaaccccugccugaaa

SEQ ID NO: 2491100 - RNA, 19 nt, Artificial Sequence
  Description of Artificial Sequence: Synthetic oligonucleotide
ggcacaaagcuaaccuaag

SEQ ID NO: 2491101 - RNA, 19 nt, Artificial Sequence
  Description of Artificial Sequence: Synthetic oligonucleotide
ccucaaugggacucugggc

SEQ ID NO: 2491102 - RNA, 19 nt, Artificial Sequence
  Description of Artificial Sequence: Synthetic oligonucleotide
ggcggugaacuccaagcac

SEQ ID NO: 2491103 - RNA, 19 nt, Artificial Sequence
  Description of Artificial Sequence: Synthetic oligonucleotide
cauuggguccagccugcug

SEQ ID NO: 2491104 - RNA, 19 nt, Artificial Sequence
  Description of Artificial Sequence: Synthetic oligonucleotide
uggguggcuccugcauugg

SEQ ID NO: 2491105 - RNA, 19 nt, Artificial Sequence
  Description of Artificial Sequence: Synthetic oligonucleotide
accaccgaucuccugcaua

SEQ ID NO: 2491106 - RNA, 19 nt, Artificial Sequence
  Description of Artificial Sequence: Synthetic oligonucleotide
ggccucuagagacagggaa

SEQ ID NO: 2491107 - RNA, 19 nt, Artificial Sequence
  Description of Artificial Sequence: Synthetic oligonucleotide
cacgcccaagcucugacaa

SEQ ID NO: 2491108 - RNA, 19 nt, Artificial Sequence
  Description of Artificial Sequence: Synthetic oligonucleotide
uccaagcacucggcgagcu

SEQ ID NO: 2491109 - RNA, 19 nt, Artificial Sequence
  Description of Artificial Sequence: Synthetic oligonucleotide
ucggcgagcucuggcuggg

SEQ ID NO: 2491110 - RNA, 19 nt, Artificial Sequence
  Description of Artificial Sequence: Synthetic oligonucleotide
agggucgaauccccagccu

SEQ ID NO: 2491111 - RNA, 19 nt, Artificial Sequence
  Description of Artificial Sequence: Synthetic oligonucleotide
cgucccuaucugcaaaucg

SEQ ID NO: 2491112 - RNA, 19 nt, Artificial Sequence
  Description of Artificial Sequence: Synthetic oligonucleotide
ccuacaaggccucuagaga

SEQ ID NO: 2491113 - RNA, 19 nt, Artificial Sequence
  Description of Artificial Sequence: Synthetic oligonucleotide
gccuccuaagguuggagga

SEQ ID NO: 2491114 - RNA, 19 nt, Artificial Sequence
  Description of Artificial Sequence: Synthetic oligonucleotide
ccccauggacagcugaggg

SEQ ID NO: 2491115 - RNA, 19 nt, Artificial Sequence
  Description of Artificial Sequence: Synthetic oligonucleotide
guaaggugagguggguaca

SEQ ID NO: 2491116 - RNA, 19 nt, Artificial Sequence
  Description of Artificial Sequence: Synthetic oligonucleotide
ggcgagcucuggcugggcg

SEQ ID NO: 2491117 - RNA, 19 nt, Artificial Sequence
  Description of Artificial Sequence: Synthetic oligonucleotide
aguccuaaucaaggcagua

SEQ ID NO: 2491118 - RNA, 19 nt, Artificial Sequence
  Description of Artificial Sequence: Synthetic oligonucleotide
ggucgaauccccagccucc

SEQ ID NO: 2491119 - RNA, 19 nt, Artificial Sequence
  Description of Artificial Sequence: Synthetic oligonucleotide
agguggguacaggauccag

SEQ ID NO: 2491120 - RNA, 19 nt, Artificial Sequence
  Description of Artificial Sequence: Synthetic oligonucleotide
gggucgaauccccagccuc

SEQ ID NO: 2491121 - RNA, 19 nt, Artificial Sequence
  Description of Artificial Sequence: Synthetic oligonucleotide
ggugccaguggcucuugac

SEQ ID NO: 2491122 - RNA, 19 nt, Artificial Sequence
  Description of Artificial Sequence: Synthetic oligonucleotide
gcgaccucggcgcgcagcg

SEQ ID NO: 2491123 - RNA, 19 nt, Artificial Sequence
  Description of Artificial Sequence: Synthetic oligonucleotide
ccuaucugcaaaucgcaaa

SEQ ID NO: 2491124 - RNA, 19 nt, Artificial Sequence
  Description of Artificial Sequence: Synthetic oligonucleotide
gcgagcucuggcugggcgg

SEQ ID NO: 2491125 - RNA, 19 nt, Artificial Sequence
  Description of Artificial Sequence: Synthetic oligonucleotide
ucuggcugggcggcggcga

SEQ ID NO: 2491126 - RNA, 19 nt, Artificial Sequence
  Description of Artificial Sequence: Synthetic oligonucleotide
agaggucacucgucccuau

SEQ ID NO: 2491127 - RNA, 19 nt, Artificial Sequence
  Description of Artificial Sequence: Synthetic oligonucleotide
caagacgaaaguucagguu

SEQ ID NO: 2491128 - RNA, 19 nt, Artificial Sequence
  Description of Artificial Sequence: Synthetic oligonucleotide
acccuggcuaacacucuag

SEQ ID NO: 2491129 - RNA, 19 nt, Artificial Sequence
  Description of Artificial Sequence: Synthetic oligonucleotide
auugggccagagaaacuaa

SEQ ID NO: 2491130 - RNA, 19 nt, Artificial Sequence
  Description of Artificial Sequence: Synthetic oligonucleotide
caaucacgcccaagcucug

SEQ ID NO: 2491131 - RNA, 19 nt, Artificial Sequence
  Description of Artificial Sequence: Synthetic oligonucleotide
aagcacucggcgagcucug

SEQ ID NO: 2491132 - RNA, 19 nt, Artificial Sequence
  Description of Artificial Sequence: Synthetic oligonucleotide
agcccauggccagucugag

SEQ ID NO: 2491133 - RNA, 19 nt, Artificial Sequence
  Description of Artificial Sequence: Synthetic oligonucleotide
agugaccgagcaacaacaa

SEQ ID NO: 2491134 - RNA, 19 nt, Artificial Sequence
  Description of Artificial Sequence: Synthetic oligonucleotide
ucgucccuaucugcaaauc

SEQ ID NO: 2491135 - RNA, 19 nt, Artificial Sequence
  Description of Artificial Sequence: Synthetic oligonucleotide
cucggugauguaggccacc

SEQ ID NO: 2491136 - RNA, 19 nt, Artificial Sequence
  Description of Artificial Sequence: Synthetic oligonucleotide
gguggguacaggauccaga

SEQ ID NO: 2491137 - RNA, 19 nt, Artificial Sequence
  Description of Artificial Sequence: Synthetic oligonucleotide
uccagccugcugagcuaca

SEQ ID NO: 2491138 - RNA, 19 nt, Artificial Sequence
  Description of Artificial Sequence: Synthetic oligonucleotide
guccagccugcugagcuac

SEQ ID NO: 2491139 - RNA, 19 nt, Artificial Sequence
  Description of Artificial Sequence: Synthetic oligonucleotide
cccuggcuaacacucuagc

SEQ ID NO: 2491140 - RNA, 19 nt, Artificial Sequence
  Description of Artificial Sequence: Synthetic oligonucleotide
cagccugcugagcuacauc

SEQ ID NO: 2491141 - RNA, 19 nt, Artificial Sequence
  Description of Artificial Sequence: Synthetic oligonucleotide
ccuaaucaaggcaguacaa

SEQ ID NO: 2491142 - RNA, 19 nt, Artificial Sequence
  Description of Artificial Sequence: Synthetic oligonucleotide
ggcuaacacucuagccugg

SEQ ID NO: 2491143 - RNA, 19 nt, Artificial Sequence
  Description of Artificial Sequence: Synthetic oligonucleotide
agcacucggcgagcucugg

SEQ ID NO: 2491144 - RNA, 19 nt, Artificial Sequence
  Description of Artificial Sequence: Synthetic oligonucleotide
gcacaagacgaaaguucag

SEQ ID NO: 2491145 - RNA, 19 nt, Artificial Sequence
  Description of Artificial Sequence: Synthetic oligonucleotide
cucugacaaccuagcacaa

SEQ ID NO: 2491146 - RNA, 19 nt, Artificial Sequence
  Description of Artificial Sequence: Synthetic oligonucleotide
ucgaauccccagccuccua

SEQ ID NO: 2491147 - RNA, 19 nt, Artificial Sequence
  Description of Artificial Sequence: Synthetic oligonucleotide
cuagcacaagacgaaaguu

SEQ ID NO: 2491148 - RNA, 19 nt, Artificial Sequence
  Description of Artificial Sequence: Synthetic oligonucleotide
gguacaggauccagagguc

SEQ ID NO: 2491149 - RNA, 19 nt, Artificial Sequence
  Description of Artificial Sequence: Synthetic oligonucleotide
cuccaagcacucggcgagc

SEQ ID NO: 2491150 - RNA, 19 nt, Artificial Sequence
  Description of Artificial Sequence: Synthetic oligonucleotide
cgcccaagcucugacaacc

SEQ ID NO: 2491151 - RNA, 19 nt, Artificial Sequence
  Description of Artificial Sequence: Synthetic oligonucleotide
gugaccgagcaacaacaau

SEQ ID NO: 2491152 - RNA, 19 nt, Artificial Sequence
  Description of Artificial Sequence: Synthetic oligonucleotide
auggagccgcccaccgccg

SEQ ID NO: 2491153 - RNA, 19 nt, Artificial Sequence
  Description of Artificial Sequence: Synthetic oligonucleotide
gguucggcggugaacucca

SEQ ID NO: 2491154 - RNA, 19 nt, Artificial Sequence
  Description of Artificial Sequence: Synthetic oligonucleotide
gaugauccugggugccagu

SEQ ID NO: 2491155 - RNA, 19 nt, Artificial Sequence
  Description of Artificial Sequence: Synthetic oligonucleotide
ccuagcacaagacgaaagu

SEQ ID NO: 2491156 - RNA, 19 nt, Artificial Sequence
  Description of Artificial Sequence: Synthetic oligonucleotide
cagccagucgcagggccac

SEQ ID NO: 2491157 - RNA, 19 nt, Artificial Sequence
  Description of Artificial Sequence: Synthetic oligonucleotide
ccccugccugaaaaucucg

SEQ ID NO: 2491158 - RNA, 19 nt, Artificial Sequence
  Description of Artificial Sequence: Synthetic oligonucleotide
ugccgguucggcggugaac

SEQ ID NO: 2491159 - RNA, 19 nt, Artificial Sequence
  Description of Artificial Sequence: Synthetic oligonucleotide
uggagccgcccaccgccgu

SEQ ID NO: 2491160 - RNA, 19 nt, Artificial Sequence
  Description of Artificial Sequence: Synthetic oligonucleotide
ccucuagagacagggaaga

SEQ ID NO: 2491161 - RNA, 19 nt, Artificial Sequence
  Description of Artificial Sequence: Synthetic oligonucleotide
gcugagcuacaucauggcu

SEQ ID NO: 2491162 - RNA, 19 nt, Artificial Sequence
  Description of Artificial Sequence: Synthetic oligonucleotide
cacucgucccuaucugcaa

SEQ ID NO: 2491163 - RNA, 19 nt, Artificial Sequence
  Description of Artificial Sequence: Synthetic oligonucleotide
uggccagucugaggccuga

SEQ ID NO: 2491164 - RNA, 19 nt, Artificial Sequence
  Description of Artificial Sequence: Synthetic oligonucleotide
caccgaucuccugcauagc

SEQ ID NO: 2491165 - RNA, 19 nt, Artificial Sequence
  Description of Artificial Sequence: Synthetic oligonucleotide
gcccauggccagucugagg

SEQ ID NO: 2491166 - RNA, 19 nt, Artificial Sequence
  Description of Artificial Sequence: Synthetic oligonucleotide
cacucggcgagcucuggcu

SEQ ID NO: 2491167 - RNA, 19 nt, Artificial Sequence
  Description of Artificial Sequence: Synthetic oligonucleotide
gcacucggcgagcucuggc

SEQ ID NO: 2491168 - RNA, 19 nt, Artificial Sequence
  Description of Artificial Sequence: Synthetic oligonucleotide
acauuggguccagccugcu

SEQ ID NO: 2491169 - RNA, 19 nt, Artificial Sequence
  Description of Artificial Sequence: Synthetic oligonucleotide
ccccagccuccuaagguug

SEQ ID NO: 2491170 - RNA, 19 nt, Artificial Sequence
  Description of Artificial Sequence: Synthetic oligonucleotide
cuaagguuggaggacccuu

SEQ ID NO: 2491171 - RNA, 19 nt, Artificial Sequence
  Description of Artificial Sequence: Synthetic oligonucleotide
cccauggacagcugaggga

SEQ ID NO: 2491172 - RNA, 19 nt, Artificial Sequence
  Description of Artificial Sequence: Synthetic oligonucleotide
cauggccaccaccgaucuc

SEQ ID NO: 2491173 - RNA, 19 nt, Artificial Sequence
  Description of Artificial Sequence: Synthetic oligonucleotide
gcggugaacuccaagcacu

SEQ ID NO: 2491174 - RNA, 19 nt, Artificial Sequence
  Description of Artificial Sequence: Synthetic oligonucleotide
gcuaacacucuagccugga

SEQ ID NO: 2491175 - RNA, 19 nt, Artificial Sequence
  Description of Artificial Sequence: Synthetic oligonucleotide
ugggugccaguggcucuug

SEQ ID NO: 2491176 - RNA, 19 nt, Artificial Sequence
  Description of Artificial Sequence: Synthetic oligonucleotide
aggccucuagagacaggga

SEQ ID NO: 2491177 - RNA, 19 nt, Artificial Sequence
  Description of Artificial Sequence: Synthetic oligonucleotide
cugugaaccccugccugaa

SEQ ID NO: 2491178 - RNA, 19 nt, Artificial Sequence
  Description of Artificial Sequence: Synthetic oligonucleotide
ccaccaacaugacacagau

SEQ ID NO: 2491179 - RNA, 19 nt, Artificial Sequence
  Description of Artificial Sequence: Synthetic oligonucleotide
cucgucccuaucugcaaau

SEQ ID NO: 2491180 - RNA, 19 nt, Artificial Sequence
  Description of Artificial Sequence: Synthetic oligonucleotide
ggacacccacauaggaaga

SEQ ID NO: 2491181 - RNA, 19 nt, Artificial Sequence
  Description of Artificial Sequence: Synthetic oligonucleotide
cagcugagggaugaugggu

SEQ ID NO: 2491182 - RNA, 19 nt, Artificial Sequence
  Description of Artificial Sequence: Synthetic oligonucleotide
cagucgcagggccacaaau

SEQ ID NO: 2491183 - RNA, 19 nt, Artificial Sequence
  Description of Artificial Sequence: Synthetic oligonucleotide
ggcagaugaccaccaacau

SEQ ID NO: 2491184 - RNA, 19 nt, Artificial Sequence
  Description of Artificial Sequence: Synthetic oligonucleotide
gacgaaaguucagguugau

SEQ ID NO: 2491185 - RNA, 19 nt, Artificial Sequence
  Description of Artificial Sequence: Synthetic oligonucleotide
ccuucaccccuggaugcag

SEQ ID NO: 2491186 - RNA, 19 nt, Artificial Sequence
  Description of Artificial Sequence: Synthetic oligonucleotide
gccgguucggcggugaacu

SEQ ID NO: 2491187 - RNA, 19 nt, Artificial Sequence
  Description of Artificial Sequence: Synthetic oligonucleotide
cccuaucugcaaaucgcaa

SEQ ID NO: 2491188 - RNA, 19 nt, Artificial Sequence
  Description of Artificial Sequence: Synthetic oligonucleotide
cggugaacuccaagcacuc

SEQ ID NO: 2491189 - RNA, 19 nt, Artificial Sequence
  Description of Artificial Sequence: Synthetic oligonucleotide
ggugagguggguacaggau

SEQ ID NO: 2491190 - RNA, 19 nt, Artificial Sequence
  Description of Artificial Sequence: Synthetic oligonucleotide
ccauggacagcugagggau

SEQ ID NO: 2491191 - RNA, 19 nt, Artificial Sequence
  Description of Artificial Sequence: Synthetic oligonucleotide
gucgaauccccagccuccu

SEQ ID NO: 2491192 - RNA, 19 nt, Artificial Sequence
  Description of Artificial Sequence: Synthetic oligonucleotide
ggaggacccuucaccccug

SEQ ID NO: 2491193 - RNA, 19 nt, Artificial Sequence
  Description of Artificial Sequence: Synthetic oligonucleotide
cgguucggcggugaacucc

SEQ ID NO: 2491194 - RNA, 19 nt, Artificial Sequence
  Description of Artificial Sequence: Synthetic oligonucleotide
cagaggucacucgucccua

SEQ ID NO: 2491195 - RNA, 19 nt, Artificial Sequence
  Description of Artificial Sequence: Synthetic oligonucleotide
cuccugcauugggccagag

SEQ ID NO: 2491196 - RNA, 19 nt, Artificial Sequence
  Description of Artificial Sequence: Synthetic oligonucleotide
ggcgaccucggcgcgcagc

SEQ ID NO: 2491197 - RNA, 19 nt, Artificial Sequence
  Description of Artificial Sequence: Synthetic oligonucleotide
ccagaggucacucgucccu

SEQ ID NO: 2491198 - RNA, 19 nt, Artificial Sequence
  Description of Artificial Sequence: Synthetic oligonucleotide
gguccagccugcugagcua

SEQ ID NO: 2491199 - RNA, 19 nt, Artificial Sequence
  Description of Artificial Sequence: Synthetic oligonucleotide
ccaccaccgaucuccugca

SEQ ID NO: 2491200 - RNA, 19 nt, Artificial Sequence
  Description of Artificial Sequence: Synthetic oligonucleotide
cgagcucuggcugggcggc

SEQ ID NO: 2491201 - RNA, 19 nt, Artificial Sequence
  Description of Artificial Sequence: Synthetic oligonucleotide
ggccugugaaccccugccu

SEQ ID NO: 2491202 - RNA, 19 nt, Artificial Sequence
  Description of Artificial Sequence: Synthetic oligonucleotide
cgaagaugguuguguccuc

SEQ ID NO: 2491203 - RNA, 19 nt, Artificial Sequence
  Description of Artificial Sequence: Synthetic oligonucleotide
cgaauccccagccuccuaa

SEQ ID NO: 2491204 - RNA, 19 nt, Artificial Sequence
  Description of Artificial Sequence: Synthetic oligonucleotide
gggcaaaagcaugcauaaa

SEQ ID NO: 2491205 - RNA, 19 nt, Artificial Sequence
  Description of Artificial Sequence: Synthetic oligonucleotide
gcuggacauuggguccagc

SEQ ID NO: 2491206 - RNA, 19 nt, Artificial Sequence
  Description of Artificial Sequence: Synthetic oligonucleotide
ggccugagucuggaaggca

SEQ ID NO: 2491207 - RNA, 19 nt, Artificial Sequence
  Description of Artificial Sequence: Synthetic oligonucleotide
ggccaccaccgaucuccug

SEQ ID NO: 2491208 - RNA, 19 nt, Artificial Sequence
  Description of Artificial Sequence: Synthetic oligonucleotide
agccagucgcagggccaca

SEQ ID NO: 2491209 - RNA, 19 nt, Artificial Sequence
  Description of Artificial Sequence: Synthetic oligonucleotide
cgccgucauggccaccacc

SEQ ID NO: 2491210 - RNA, 19 nt, Artificial Sequence
  Description of Artificial Sequence: Synthetic oligonucleotide
ggccgucccuacaaggccu

SEQ ID NO: 2491211 - RNA, 19 nt, Artificial Sequence
  Description of Artificial Sequence: Synthetic oligonucleotide
agcugccgguucggcggug

SEQ ID NO: 2491212 - RNA, 19 nt, Artificial Sequence
  Description of Artificial Sequence: Synthetic oligonucleotide
gccgucccuacaaggccuc

SEQ ID NO: 2491213 - RNA, 19 nt, Artificial Sequence
  Description of Artificial Sequence: Synthetic oligonucleotide
gcugccgguucggcgguga

SEQ ID NO: 2491214 - RNA, 19 nt, Artificial Sequence
  Description of Artificial Sequence: Synthetic oligonucleotide
cugccgguucggcggugaa

SEQ ID NO: 2491215 - RNA, 19 nt, Artificial Sequence
  Description of Artificial Sequence: Synthetic oligonucleotide
gcauugggccagagaaacu

SEQ ID NO: 2491216 - RNA, 19 nt, Artificial Sequence
  Description of Artificial Sequence: Synthetic oligonucleotide
gccagucgcagggccacaa

SEQ ID NO: 2491217 - RNA, 19 nt, Artificial Sequence
  Description of Artificial Sequence: Synthetic oligonucleotide
ccgguucggcggugaacuc

SEQ ID NO: 2491218 - RNA, 19 nt, Artificial Sequence
  Description of Artificial Sequence: Synthetic oligonucleotide
ggcggcgaccucggcgcgc

SEQ ID NO: 2491219 - RNA, 19 nt, Artificial Sequence
  Description of Artificial Sequence: Synthetic oligonucleotide
ccgucauggccaccaccga

SEQ ID NO: 2491220 - RNA, 19 nt, Artificial Sequence
  Description of Artificial Sequence: Synthetic oligonucleotide
cccuucaccccuggaugca

SEQ ID NO: 2491221 - RNA, 19 nt, Artificial Sequence
  Description of Artificial Sequence: Synthetic oligonucleotide
gcggcgaccucggcgcgca

SEQ ID NO: 2491222 - RNA, 19 nt, Artificial Sequence
  Description of Artificial Sequence: Synthetic oligonucleotide
guucggcggugaacuccaa

SEQ ID NO: 2491223 - RNA, 19 nt, Artificial Sequence
  Description of Artificial Sequence: Synthetic oligonucleotide
ggcugggcggcggcgaccu

SEQ ID NO: 2491224 - RNA, 19 nt, Artificial Sequence
  Description of Artificial Sequence: Synthetic oligonucleotide
caccgccgucauggccacc

SEQ ID NO: 2491225 - RNA, 19 nt, Artificial Sequence
  Description of Artificial Sequence: Synthetic oligonucleotide
ccucggcgcgcagcggcag

SEQ ID NO: 2491226 - RNA, 19 nt, Artificial Sequence
  Description of Artificial Sequence: Synthetic oligonucleotide
ccuaagguuggaggacccu

SEQ ID NO: 2491227 - RNA, 19 nt, Artificial Sequence
  Description of Artificial Sequence: Synthetic oligonucleotide
gccgcccaccgccgucaug

SEQ ID NO: 2491228 - RNA, 19 nt, Artificial Sequence
  Description of Artificial Sequence: Synthetic oligonucleotide
ccgccgucauggccaccac

SEQ ID NO: 2491229 - RNA, 19 nt, Artificial Sequence
  Description of Artificial Sequence: Synthetic oligonucleotide
caccaccgaucuccugcau

SEQ ID NO: 2491230 - RNA, 19 nt, Artificial Sequence
  Description of Artificial Sequence: Synthetic oligonucleotide
cgcccaccgccgucauggc

SEQ ID NO: 2491231 - RNA, 19 nt, Artificial Sequence
  Description of Artificial Sequence: Synthetic oligonucleotide
cgaccucggcgcgcagcgg

SEQ ID NO: 2491232 - RNA, 19 nt, Artificial Sequence
  Description of Artificial Sequence: Synthetic oligonucleotide
cgucccuacaaggccucua

SEQ ID NO: 2491233 - RNA, 19 nt, Artificial Sequence
  Description of Artificial Sequence: Synthetic oligonucleotide
cggcgaccucggcgcgcag

SEQ ID NO: 2491234 - RNA, 19 nt, Artificial Sequence
  Description of Artificial Sequence: Synthetic oligonucleotide
ccgucccuacaaggccucu

SEQ ID NO: 2491235 - RNA, 19 nt, Artificial Sequence
  Description of Artificial Sequence: Synthetic oligonucleotide
uccuuaagcgcaaagcccg

SEQ ID NO: 2491236 - RNA, 19 nt, Artificial Sequence
  Description of Artificial Sequence: Synthetic oligonucleotide
ucaaagaauauguucugcc

SEQ ID NO: 2491237 - RNA, 19 nt, Artificial Sequence
  Description of Artificial Sequence: Synthetic oligonucleotide
uggaugagccuguagagcg

SEQ ID NO: 2491238 - RNA, 19 nt, Artificial Sequence
  Description of Artificial Sequence: Synthetic oligonucleotide
uugggaucaaagaauaugu

SEQ ID NO: 2491239 - RNA, 19 nt, Artificial Sequence
  Description of Artificial Sequence: Synthetic oligonucleotide
aagaaucggacucagccca

SEQ ID NO: 2491240 - RNA, 19 nt, Artificial Sequence
  Description of Artificial Sequence: Synthetic oligonucleotide
gaagugauaggcgaacucg

SEQ ID NO: 2491241 - RNA, 19 nt, Artificial Sequence
  Description of Artificial Sequence: Synthetic oligonucleotide
uccauguggaacaaggcug

SEQ ID NO: 2491242 - RNA, 19 nt, Artificial Sequence
  Description of Artificial Sequence: Synthetic oligonucleotide
uuugggaucaaagaauaug

SEQ ID NO: 2491243 - RNA, 19 nt, Artificial Sequence
  Description of Artificial Sequence: Synthetic oligonucleotide
gagucgaucccgcaaaggg

SEQ ID NO: 2491244 - RNA, 19 nt, Artificial Sequence
  Description of Artificial Sequence: Synthetic oligonucleotide
ugagaagaccaccagucgc

SEQ ID NO: 2491245 - RNA, 19 nt, Artificial Sequence
  Description of Artificial Sequence: Synthetic oligonucleotide
uugagcacguggaugagcc

SEQ ID NO: 2491246 - RNA, 19 nt, Artificial Sequence
  Description of Artificial Sequence: Synthetic oligonucleotide
ucagcccaagagaagaaag

SEQ ID NO: 2491247 - RNA, 19 nt, Artificial Sequence
  Description of Artificial Sequence: Synthetic oligonucleotide
aagugauaggcgaacucgc

SEQ ID NO: 2491248 - RNA, 19 nt, Artificial Sequence
  Description of Artificial Sequence: Synthetic oligonucleotide
agcccgauccaacaauucc

SEQ ID NO: 2491249 - RNA, 19 nt, Artificial Sequence
  Description of Artificial Sequence: Synthetic oligonucleotide
gaagaaucggacucagccc

SEQ ID NO: 2491250 - RNA, 19 nt, Artificial Sequence
  Description of Artificial Sequence: Synthetic oligonucleotide
uguucugccuccaugugga

SEQ ID NO: 2491251 - RNA, 19 nt, Artificial Sequence
  Description of Artificial Sequence: Synthetic oligonucleotide
uacuugagcacguggauga

SEQ ID NO: 2491252 - RNA, 19 nt, Artificial Sequence
  Description of Artificial Sequence: Synthetic oligonucleotide
uugucgaagaaucggacuc

SEQ ID NO: 2491253 - RNA, 19 nt, Artificial Sequence
  Description of Artificial Sequence: Synthetic oligonucleotide
acugagaagaccaccaguc

SEQ ID NO: 2491254 - RNA, 19 nt, Artificial Sequence
  Description of Artificial Sequence: Synthetic oligonucleotide
gaucaaagaauauguucug

SEQ ID NO: 2491255 - RNA, 19 nt, Artificial Sequence
  Description of Artificial Sequence: Synthetic oligonucleotide
gauccaacaauuccuguuc

SEQ ID NO: 2491256 - RNA, 19 nt, Artificial Sequence
  Description of Artificial Sequence: Synthetic oligonucleotide
caccauuugucgaagaauc

SEQ ID NO: 2491257 - RNA, 19 nt, Artificial Sequence
  Description of Artificial Sequence: Synthetic oligonucleotide
ugauaggcgaacucgcgug

SEQ ID NO: 2491258 - RNA, 19 nt, Artificial Sequence
  Description of Artificial Sequence: Synthetic oligonucleotide
uuugucgaagaaucggacu

SEQ ID NO: 2491259 - RNA, 19 nt, Artificial Sequence
  Description of Artificial Sequence: Synthetic oligonucleotide
auccuuaagcgcaaagccc

SEQ ID NO: 2491260 - RNA, 19 nt, Artificial Sequence
  Description of Artificial Sequence: Synthetic oligonucleotide
uggcuaguggcucaucuug

SEQ ID NO: 2491261 - RNA, 19 nt, Artificial Sequence
  Description of Artificial Sequence: Synthetic oligonucleotide
gaggugccauccuuaagcg

SEQ ID NO: 2491262 - RNA, 19 nt, Artificial Sequence
  Description of Artificial Sequence: Synthetic oligonucleotide
uacguagcuguacuugagc

SEQ ID NO: 2491263 - RNA, 19 nt, Artificial Sequence
  Description of Artificial Sequence: Synthetic oligonucleotide
gauaggcgaacucgcgugg

SEQ ID NO: 2491264 - RNA, 19 nt, Artificial Sequence
  Description of Artificial Sequence: Synthetic oligonucleotide
accagcaguacguagcugu

SEQ ID NO: 2491265 - RNA, 19 nt, Artificial Sequence
  Description of Artificial Sequence: Synthetic oligonucleotide
uggugaugcggacuggcag

SEQ ID NO: 2491266 - RNA, 19 nt, Artificial Sequence
  Description of Artificial Sequence: Synthetic oligonucleotide
aguacguagcuguacuuga

SEQ ID NO: 2491267 - RNA, 19 nt, Artificial Sequence
  Description of Artificial Sequence: Synthetic oligonucleotide
ucggacucagcccaagaga

SEQ ID NO: 2491268 - RNA, 19 nt, Artificial Sequence
  Description of Artificial Sequence: Synthetic oligonucleotide
uuggccagcaaguggcccg

SEQ ID NO: 2491269 - RNA, 19 nt, Artificial Sequence
  Description of Artificial Sequence: Synthetic oligonucleotide
auuugucgaagaaucggac

SEQ ID NO: 2491270 - RNA, 19 nt, Artificial Sequence
  Description of Artificial Sequence: Synthetic oligonucleotide
ucggaacuuggcuaguggc

SEQ ID NO: 2491271 - RNA, 19 nt, Artificial Sequence
  Description of Artificial Sequence: Synthetic oligonucleotide
gaugcggacuggcaggcag

SEQ ID NO: 2491272 - RNA, 19 nt, Artificial Sequence
  Description of Artificial Sequence: Synthetic oligonucleotide
uugcacaccagcaguacgu

SEQ ID NO: 2491273 - RNA, 19 nt, Artificial Sequence
  Description of Artificial Sequence: Synthetic oligonucleotide
uaagcgcaaagcccgcucc

SEQ ID NO: 2491274 - RNA, 19 nt, Artificial Sequence
  Description of Artificial Sequence: Synthetic oligonucleotide
ucucugagcagguccaugu

SEQ ID NO: 2491275 - RNA, 19 nt, Artificial Sequence
  Description of Artificial Sequence: Synthetic oligonucleotide
gacaccacgagucgauccc

SEQ ID NO: 2491276 - RNA, 19 nt, Artificial Sequence
  Description of Artificial Sequence: Synthetic oligonucleotide
ugaggagacgcgcagcaaa

SEQ ID NO: 2491277 - RNA, 19 nt, Artificial Sequence
  Description of Artificial Sequence: Synthetic oligonucleotide
uggcucaucuuguugguga

SEQ ID NO: 2491278 - RNA, 19 nt, Artificial Sequence
  Description of Artificial Sequence: Synthetic oligonucleotide
ucacugagaagaccaccag

SEQ ID NO: 2491279 - RNA, 19 nt, Artificial Sequence
  Description of Artificial Sequence: Synthetic oligonucleotide
aucggacucagcccaagag

SEQ ID NO: 2491280 - RNA, 19 nt, Artificial Sequence
  Description of Artificial Sequence: Synthetic oligonucleotide
agguccauguggaacaagg

SEQ ID NO: 2491281 - RNA, 19 nt, Artificial Sequence
  Description of Artificial Sequence: Synthetic oligonucleotide
acucagacaccacgagucg

SEQ ID NO: 2491282 - RNA, 19 nt, Artificial Sequence
  Description of Artificial Sequence: Synthetic oligonucleotide
cauguggaggguagcaggc

SEQ ID NO: 2491283 - RNA, 19 nt, Artificial Sequence
  Description of Artificial Sequence: Synthetic oligonucleotide
caaagagguguccugccag

SEQ ID NO: 2491284 - RNA, 19 nt, Artificial Sequence
  Description of Artificial Sequence: Synthetic oligonucleotide
aguggaaaccucggguccc

SEQ ID NO: 2491285 - RNA, 19 nt, Artificial Sequence
  Description of Artificial Sequence: Synthetic oligonucleotide
agucgaucccgcaaagggc

SEQ ID NO: 2491286 - RNA, 19 nt, Artificial Sequence
  Description of Artificial Sequence: Synthetic oligonucleotide
agcaguacguagcuguacu

SEQ ID NO: 2491287 - RNA, 19 nt, Artificial Sequence
  Description of Artificial Sequence: Synthetic oligonucleotide
aagcgcaaagcccgcuccg

SEQ ID NO: 2491288 - RNA, 19 nt, Artificial Sequence
  Description of Artificial Sequence: Synthetic oligonucleotide
caagaagaagucugaggug

SEQ ID NO: 2491289 - RNA, 19 nt, Artificial Sequence
  Description of Artificial Sequence: Synthetic oligonucleotide
gggaucaaagaauauguuc

SEQ ID NO: 2491290 - RNA, 19 nt, Artificial Sequence
  Description of Artificial Sequence: Synthetic oligonucleotide
cauuugucgaagaaucgga

SEQ ID NO: 2491291 - RNA, 19 nt, Artificial Sequence
  Description of Artificial Sequence: Synthetic oligonucleotide
gaugagccuguagagcggg

SEQ ID NO: 2491292 - RNA, 19 nt, Artificial Sequence
  Description of Artificial Sequence: Synthetic oligonucleotide
gagacgcgcagcaaagagg

SEQ ID NO: 2491293 - RNA, 19 nt, Artificial Sequence
  Description of Artificial Sequence: Synthetic oligonucleotide
acugguugggcacgcgcac

SEQ ID NO: 2491294 - RNA, 19 nt, Artificial Sequence
  Description of Artificial Sequence: Synthetic oligonucleotide
cauccuugcacaccagcag

SEQ ID NO: 2491295 - RNA, 19 nt, Artificial Sequence
  Description of Artificial Sequence: Synthetic oligonucleotide
aacucgcgugggcaggcgg

SEQ ID NO: 2491296 - RNA, 19 nt, Artificial Sequence
  Description of Artificial Sequence: Synthetic oligonucleotide
ggauugagcagcugcagug

SEQ ID NO: 2491297 - RNA, 19 nt, Artificial Sequence
  Description of Artificial Sequence: Synthetic oligonucleotide
ggugaugcggacuggcagg

SEQ ID NO: 2491298 - RNA, 19 nt, Artificial Sequence
  Description of Artificial Sequence: Synthetic oligonucleotide
ucuucacugagaagaccac

SEQ ID NO: 2491299 - RNA, 19 nt, Artificial Sequence
  Description of Artificial Sequence: Synthetic oligonucleotide
uuaagcgcaaagcccgcuc

SEQ ID NO: 2491300 - RNA, 19 nt, Artificial Sequence
  Description of Artificial Sequence: Synthetic oligonucleotide
aaucggacucagcccaaga

SEQ ID NO: 2491301 - RNA, 19 nt, Artificial Sequence
  Description of Artificial Sequence: Synthetic oligonucleotide
ucagacaccacgagucgau

SEQ ID NO: 2491302 - RNA, 19 nt, Artificial Sequence
  Description of Artificial Sequence: Synthetic oligonucleotide
cugcuggcaccauuugucg

SEQ ID NO: 2491303 - RNA, 19 nt, Artificial Sequence
  Description of Artificial Sequence: Synthetic oligonucleotide
aagugcacagggucagggu

SEQ ID NO: 2491304 - RNA, 19 nt, Artificial Sequence
  Description of Artificial Sequence: Synthetic oligonucleotide
agugauaggcgaacucgcg

SEQ ID NO: 2491305 - RNA, 19 nt, Artificial Sequence
  Description of Artificial Sequence: Synthetic oligonucleotide
accauuugucgaagaaucg

SEQ ID NO: 2491306 - RNA, 19 nt, Artificial Sequence
  Description of Artificial Sequence: Synthetic oligonucleotide
cagcuugacagugaugaag

SEQ ID NO: 2491307 - RNA, 19 nt, Artificial Sequence
  Description of Artificial Sequence: Synthetic oligonucleotide
auccuugcacaccagcagu

SEQ ID NO: 2491308 - RNA, 19 nt, Artificial Sequence
  Description of Artificial Sequence: Synthetic oligonucleotide
uucugccuccauguggagg

SEQ ID NO: 2491309 - RNA, 19 nt, Artificial Sequence
  Description of Artificial Sequence: Synthetic oligonucleotide
aagucugaggugccauccu

SEQ ID NO: 2491310 - RNA, 19 nt, Artificial Sequence
  Description of Artificial Sequence: Synthetic oligonucleotide
ucccgcaaagggcucagcu

SEQ ID NO: 2491311 - RNA, 19 nt, Artificial Sequence
  Description of Artificial Sequence: Synthetic oligonucleotide
cuucacugagaagaccacc

SEQ ID NO: 2491312 - RNA, 19 nt, Artificial Sequence
  Description of Artificial Sequence: Synthetic oligonucleotide
uggcagcauggauugagca

SEQ ID NO: 2491313 - RNA, 19 nt, Artificial Sequence
  Description of Artificial Sequence: Synthetic oligonucleotide
cauggauugagcagcugca

SEQ ID NO: 2491314 - RNA, 19 nt, Artificial Sequence
  Description of Artificial Sequence: Synthetic oligonucleotide
agacgcgcagcaaagaggu

SEQ ID NO: 2491315 - RNA, 19 nt, Artificial Sequence
  Description of Artificial Sequence: Synthetic oligonucleotide
acauggguggagcucuuca

SEQ ID NO: 2491316 - RNA, 19 nt, Artificial Sequence
  Description of Artificial Sequence: Synthetic oligonucleotide
agugcacagggucaggguu

SEQ ID NO: 2491317 - RNA, 19 nt, Artificial Sequence
  Description of Artificial Sequence: Synthetic oligonucleotide
caguggaaaccucgggucc

SEQ ID NO: 2491318 - RNA, 19 nt, Artificial Sequence
  Description of Artificial Sequence: Synthetic oligonucleotide
ggcauuggccagcaagugg

SEQ ID NO: 2491319 - RNA, 19 nt, Artificial Sequence
  Description of Artificial Sequence: Synthetic oligonucleotide
aaaccucgggucccgugcu

SEQ ID NO: 2491320 - RNA, 19 nt, Artificial Sequence
  Description of Artificial Sequence: Synthetic oligonucleotide
ugucgaagaaucggacuca

SEQ ID NO: 2491321 - RNA, 19 nt, Artificial Sequence
  Description of Artificial Sequence: Synthetic oligonucleotide
agaaagcccgauccaacaa

SEQ ID NO: 2491322 - RNA, 19 nt, Artificial Sequence
  Description of Artificial Sequence: Synthetic oligonucleotide
ucuuguuggugaugcggac

SEQ ID NO: 2491323 - RNA, 19 nt, Artificial Sequence
  Description of Artificial Sequence: Synthetic oligonucleotide
gcaaaggccagcuccucgg

SEQ ID NO: 2491324 - RNA, 19 nt, Artificial Sequence
  Description of Artificial Sequence: Synthetic oligonucleotide
gagcacguggaugagccug

SEQ ID NO: 2491325 - RNA, 19 nt, Artificial Sequence
  Description of Artificial Sequence: Synthetic oligonucleotide
cugcucggaacuuggcuag

SEQ ID NO: 2491326 - RNA, 19 nt, Artificial Sequence
  Description of Artificial Sequence: Synthetic oligonucleotide
ggagacgcgcagcaaagag

SEQ ID NO: 2491327 - RNA, 19 nt, Artificial Sequence
  Description of Artificial Sequence: Synthetic oligonucleotide
gcagcauggauugagcagc

SEQ ID NO: 2491328 - RNA, 19 nt, Artificial Sequence
  Description of Artificial Sequence: Synthetic oligonucleotide
gaggagacgcgcagcaaag

SEQ ID NO: 2491329 - RNA, 19 nt, Artificial Sequence
  Description of Artificial Sequence: Synthetic oligonucleotide
ccauuugucgaagaaucgg

SEQ ID NO: 2491330 - RNA, 19 nt, Artificial Sequence
  Description of Artificial Sequence: Synthetic oligonucleotide
cagcaaguggcccgggcgg

SEQ ID NO: 2491331 - RNA, 19 nt, Artificial Sequence
  Description of Artificial Sequence: Synthetic oligonucleotide
caaucucugagcaggucca

SEQ ID NO: 2491332 - RNA, 19 nt, Artificial Sequence
  Description of Artificial Sequence: Synthetic oligonucleotide
uggaacaaggcugccccug

SEQ ID NO: 2491333 - RNA, 19 nt, Artificial Sequence
  Description of Artificial Sequence: Synthetic oligonucleotide
guccaguggaaaccucggg

SEQ ID NO: 2491334 - RNA, 19 nt, Artificial Sequence
  Description of Artificial Sequence: Synthetic oligonucleotide
caguacguagcuguacuug

SEQ ID NO: 2491335 - RNA, 19 nt, Artificial Sequence
  Description of Artificial Sequence: Synthetic oligonucleotide
ggggcuccgggccacaugg

SEQ ID NO: 2491336 - RNA, 19 nt, Artificial Sequence
  Description of Artificial Sequence: Synthetic oligonucleotide
auggauugagcagcugcag

SEQ ID NO: 2491337 - RNA, 19 nt, Artificial Sequence
  Description of Artificial Sequence: Synthetic oligonucleotide
guuggugaugcggacuggc

SEQ ID NO: 2491338 - RNA, 19 nt, Artificial Sequence
  Description of Artificial Sequence: Synthetic oligonucleotide
aaagcccgauccaacaauu

SEQ ID NO: 2491339 - RNA, 19 nt, Artificial Sequence
  Description of Artificial Sequence: Synthetic oligonucleotide
uaggucugccagcucuggc

SEQ ID NO: 2491340 - RNA, 19 nt, Artificial Sequence
  Description of Artificial Sequence: Synthetic oligonucleotide
uaggcgaacucgcgugggc

SEQ ID NO: 2491341 - RNA, 19 nt, Artificial Sequence
  Description of Artificial Sequence: Synthetic oligonucleotide
gugaugaaggcugggcagc

SEQ ID NO: 2491342 - RNA, 19 nt, Artificial Sequence
  Description of Artificial Sequence: Synthetic oligonucleotide
cuugagcacguggaugagc

SEQ ID NO: 2491343 - RNA, 19 nt, Artificial Sequence
  Description of Artificial Sequence: Synthetic oligonucleotide
acgcgcagcaaagaggugu

SEQ ID NO: 2491344 - RNA, 19 nt, Artificial Sequence
  Description of Artificial Sequence: Synthetic oligonucleotide
ccauguggaacaaggcugc

SEQ ID NO: 2491345 - RNA, 19 nt, Artificial Sequence
  Description of Artificial Sequence: Synthetic oligonucleotide
gguggagcucuucacugag

SEQ ID NO: 2491346 - RNA, 19 nt, Artificial Sequence
  Description of Artificial Sequence: Synthetic oligonucleotide
gugugucagggccccaucc

SEQ ID NO: 2491347 - RNA, 19 nt, Artificial Sequence
  Description of Artificial Sequence: Synthetic oligonucleotide
cagggccccauccaagaag

SEQ ID NO: 2491348 - RNA, 19 nt, Artificial Sequence
  Description of Artificial Sequence: Synthetic oligonucleotide
ccaagaagaagucugaggu

SEQ ID NO: 2491349 - RNA, 19 nt, Artificial Sequence
  Description of Artificial Sequence: Synthetic oligonucleotide
auaggcgaacucgcguggg

SEQ ID NO: 2491350 - RNA, 19 nt, Artificial Sequence
  Description of Artificial Sequence: Synthetic oligonucleotide
ugcuggcaccauuugucga

SEQ ID NO: 2491351 - RNA, 19 nt, Artificial Sequence
  Description of Artificial Sequence: Synthetic oligonucleotide
guacguagcuguacuugag

SEQ ID NO: 2491352 - RNA, 19 nt, Artificial Sequence
  Description of Artificial Sequence: Synthetic oligonucleotide
acgagucgaucccgcaaag

SEQ ID NO: 2491353 - RNA, 19 nt, Artificial Sequence
  Description of Artificial Sequence: Synthetic oligonucleotide
ccauccuuaagcgcaaagc

SEQ ID NO: 2491354 - RNA, 19 nt, Artificial Sequence
  Description of Artificial Sequence: Synthetic oligonucleotide
agggucaggguuccuggga

SEQ ID NO: 2491355 - RNA, 19 nt, Artificial Sequence
  Description of Artificial Sequence: Synthetic oligonucleotide
gaaucggacucagcccaag

SEQ ID NO: 2491356 - RNA, 19 nt, Artificial Sequence
  Description of Artificial Sequence: Synthetic oligonucleotide
ggaagugauaggcgaacuc

SEQ ID NO: 2491357 - RNA, 19 nt, Artificial Sequence
  Description of Artificial Sequence: Synthetic oligonucleotide
accucgggucccgugcugc

SEQ ID NO: 2491358 - RNA, 19 nt, Artificial Sequence
  Description of Artificial Sequence: Synthetic oligonucleotide
ucgggucccgugcugccug

SEQ ID NO: 2491359 - RNA, 19 nt, Artificial Sequence
  Description of Artificial Sequence: Synthetic oligonucleotide
gaaagcccgauccaacaau

SEQ ID NO: 2491360 - RNA, 19 nt, Artificial Sequence
  Description of Artificial Sequence: Synthetic oligonucleotide
cacgcgcacauccuugcac

SEQ ID NO: 2491361 - RNA, 19 nt, Artificial Sequence
  Description of Artificial Sequence: Synthetic oligonucleotide
caaaggccagcuccucggc

SEQ ID NO: 2491362 - RNA, 19 nt, Artificial Sequence
  Description of Artificial Sequence: Synthetic oligonucleotide
ggcgugcuagcccaggggc

SEQ ID NO: 2491363 - RNA, 19 nt, Artificial Sequence
  Description of Artificial Sequence: Synthetic oligonucleotide
aaguggcccgggcggaagu

SEQ ID NO: 2491364 - RNA, 19 nt, Artificial Sequence
  Description of Artificial Sequence: Synthetic oligonucleotide
gagaagaccaccagucgcu

SEQ ID NO: 2491365 - RNA, 19 nt, Artificial Sequence
  Description of Artificial Sequence: Synthetic oligonucleotide
uugggcacgcgcacauccu

SEQ ID NO: 2491366 - RNA, 19 nt, Artificial Sequence
  Description of Artificial Sequence: Synthetic oligonucleotide
cuccgguccaguggaaacc

SEQ ID NO: 2491367 - RNA, 19 nt, Artificial Sequence
  Description of Artificial Sequence: Synthetic oligonucleotide
ugguugggcacgcgcacau

SEQ ID NO: 2491368 - RNA, 19 nt, Artificial Sequence
  Description of Artificial Sequence: Synthetic oligonucleotide
agcgcaaagcccgcuccgg

SEQ ID NO: 2491369 - RNA, 19 nt, Artificial Sequence
  Description of Artificial Sequence: Synthetic oligonucleotide
cuaggucugccagcucugg

SEQ ID NO: 2491370 - RNA, 19 nt, Artificial Sequence
  Description of Artificial Sequence: Synthetic oligonucleotide
aggguagcaggcagaagug

SEQ ID NO: 2491371 - RNA, 19 nt, Artificial Sequence
  Description of Artificial Sequence: Synthetic oligonucleotide
cugaggugccauccuuaag

SEQ ID NO: 2491372 - RNA, 19 nt, Artificial Sequence
  Description of Artificial Sequence: Synthetic oligonucleotide
aaccucgggucccgugcug

SEQ ID NO: 2491373 - RNA, 19 nt, Artificial Sequence
  Description of Artificial Sequence: Synthetic oligonucleotide
gacugguugggcacgcgca

SEQ ID NO: 2491374 - RNA, 19 nt, Artificial Sequence
  Description of Artificial Sequence: Synthetic oligonucleotide
agggccccauccaagaaga

SEQ ID NO: 2491375 - RNA, 19 nt, Artificial Sequence
  Description of Artificial Sequence: Synthetic oligonucleotide
caccacgagucgaucccgc

SEQ ID NO: 2491376 - RNA, 19 nt, Artificial Sequence
  Description of Artificial Sequence: Synthetic oligonucleotide
ugcggacuggcaggcaggc

SEQ ID NO: 2491377 - RNA, 19 nt, Artificial Sequence
  Description of Artificial Sequence: Synthetic oligonucleotide
ugagcacguggaugagccu

SEQ ID NO: 2491378 - RNA, 19 nt, Artificial Sequence
  Description of Artificial Sequence: Synthetic oligonucleotide
ggagcucuucacugagaag

SEQ ID NO: 2491379 - RNA, 19 nt, Artificial Sequence
  Description of Artificial Sequence: Synthetic oligonucleotide
gugaugcggacuggcaggc

SEQ ID NO: 2491380 - RNA, 19 nt, Artificial Sequence
  Description of Artificial Sequence: Synthetic oligonucleotide
cuuggcuaguggcucaucu

SEQ ID NO: 2491381 - RNA, 19 nt, Artificial Sequence
  Description of Artificial Sequence: Synthetic oligonucleotide
gcugcuggcaccauuuguc

SEQ ID NO: 2491382 - RNA, 19 nt, Artificial Sequence
  Description of Artificial Sequence: Synthetic oligonucleotide
gugauaggcgaacucgcgu

SEQ ID NO: 2491383 - RNA, 19 nt, Artificial Sequence
  Description of Artificial Sequence: Synthetic oligonucleotide
gaggccacgcuggggacug

SEQ ID NO: 2491384 - RNA, 19 nt, Artificial Sequence
  Description of Artificial Sequence: Synthetic oligonucleotide
uggcaccauuugucgaaga

SEQ ID NO: 2491385 - RNA, 19 nt, Artificial Sequence
  Description of Artificial Sequence: Synthetic oligonucleotide
acucgcgugggcaggcggg

SEQ ID NO: 2491386 - RNA, 19 nt, Artificial Sequence
  Description of Artificial Sequence: Synthetic oligonucleotide
accacgagucgaucccgca

SEQ ID NO: 2491387 - RNA, 19 nt, Artificial Sequence
  Description of Artificial Sequence: Synthetic oligonucleotide
caccagucgcugcuggcac

SEQ ID NO: 2491388 - RNA, 19 nt, Artificial Sequence
  Description of Artificial Sequence: Synthetic oligonucleotide
caggcauuggccagcaagu

SEQ ID NO: 2491389 - RNA, 19 nt, Artificial Sequence
  Description of Artificial Sequence: Synthetic oligonucleotide
aggcauuggccagcaagug

SEQ ID NO: 2491390 - RNA, 19 nt, Artificial Sequence
  Description of Artificial Sequence: Synthetic oligonucleotide
gguccauguggaacaaggc

SEQ ID NO: 2491391 - RNA, 19 nt, Artificial Sequence
  Description of Artificial Sequence: Synthetic oligonucleotide
aacuuggcuaguggcucau

SEQ ID NO: 2491392 - RNA, 19 nt, Artificial Sequence
  Description of Artificial Sequence: Synthetic oligonucleotide
cauguggaacaaggcugcc

SEQ ID NO: 2491393 - RNA, 19 nt, Artificial Sequence
  Description of Artificial Sequence: Synthetic oligonucleotide
ggacugguugggcacgcgc

SEQ ID NO: 2491394 - RNA, 19 nt, Artificial Sequence
  Description of Artificial Sequence: Synthetic oligonucleotide
cacgagucgaucccgcaaa

SEQ ID NO: 2491395 - RNA, 19 nt, Artificial Sequence
  Description of Artificial Sequence: Synthetic oligonucleotide
cuggcaccauuugucgaag

SEQ ID NO: 2491396 - RNA, 19 nt, Artificial Sequence
  Description of Artificial Sequence: Synthetic oligonucleotide
gucgaucccgcaaagggcu

SEQ ID NO: 2491397 - RNA, 19 nt, Artificial Sequence
  Description of Artificial Sequence: Synthetic oligonucleotide
caaagggcucagcuugaca

SEQ ID NO: 2491398 - RNA, 19 nt, Artificial Sequence
  Description of Artificial Sequence: Synthetic oligonucleotide
ggaugagccuguagagcgg

SEQ ID NO: 2491399 - RNA, 19 nt, Artificial Sequence
  Description of Artificial Sequence: Synthetic oligonucleotide
gccauccuuaagcgcaaag

SEQ ID NO: 2491400 - RNA, 19 nt, Artificial Sequence
  Description of Artificial Sequence: Synthetic oligonucleotide
ucccgugcugccuggcaaa

SEQ ID NO: 2491401 - RNA, 19 nt, Artificial Sequence
  Description of Artificial Sequence: Synthetic oligonucleotide
gaacucgcgugggcaggcg

SEQ ID NO: 2491402 - RNA, 19 nt, Artificial Sequence
  Description of Artificial Sequence: Synthetic oligonucleotide
ggcgaacucgcgugggcag

SEQ ID NO: 2491403 - RNA, 19 nt, Artificial Sequence
  Description of Artificial Sequence: Synthetic oligonucleotide
ugggcacgcgcacauccuu

SEQ ID NO: 2491404 - RNA, 19 nt, Artificial Sequence
  Description of Artificial Sequence: Synthetic oligonucleotide
gcaggcgucuggcagcaug

SEQ ID NO: 2491405 - RNA, 19 nt, Artificial Sequence
  Description of Artificial Sequence: Synthetic oligonucleotide
ucgaucccgcaaagggcuc

SEQ ID NO: 2491406 - RNA, 19 nt, Artificial Sequence
  Description of Artificial Sequence: Synthetic oligonucleotide
ggcaccauuugucgaagaa

SEQ ID NO: 2491407 - RNA, 19 nt, Artificial Sequence
  Description of Artificial Sequence: Synthetic oligonucleotide
gcugcucggaacuuggcua

SEQ ID NO: 2491408 - RNA, 19 nt, Artificial Sequence
  Description of Artificial Sequence: Synthetic oligonucleotide
cgguccaguggaaaccucg

SEQ ID NO: 2491409 - RNA, 19 nt, Artificial Sequence
  Description of Artificial Sequence: Synthetic oligonucleotide
gggcggaagugauaggcga

SEQ ID NO: 2491410 - RNA, 19 nt, Artificial Sequence
  Description of Artificial Sequence: Synthetic oligonucleotide
gaauauguucugccuccau

SEQ ID NO: 2491411 - RNA, 19 nt, Artificial Sequence
  Description of Artificial Sequence: Synthetic oligonucleotide
aaagcccgcuccgguccag

SEQ ID NO: 2491412 - RNA, 19 nt, Artificial Sequence
  Description of Artificial Sequence: Synthetic oligonucleotide
aggcgaacucgcgugggca

SEQ ID NO: 2491413 - RNA, 19 nt, Artificial Sequence
  Description of Artificial Sequence: Synthetic oligonucleotide
ggcacgcgcacauccuugc

SEQ ID NO: 2491414 - RNA, 19 nt, Artificial Sequence
  Description of Artificial Sequence: Synthetic oligonucleotide
gcuggcaccauuugucgaa

SEQ ID NO: 2491415 - RNA, 19 nt, Artificial Sequence
  Description of Artificial Sequence: Synthetic oligonucleotide
cagcaguacguagcuguac

SEQ ID NO: 2491416 - RNA, 19 nt, Artificial Sequence
  Description of Artificial Sequence: Synthetic oligonucleotide
gcacaccagcaguacguag

SEQ ID NO: 2491417 - RNA, 19 nt, Artificial Sequence
  Description of Artificial Sequence: Synthetic oligonucleotide
gggcgugcuagcccagggg

SEQ ID NO: 2491418 - RNA, 19 nt, Artificial Sequence
  Description of Artificial Sequence: Synthetic oligonucleotide
ggugcgagugggucagcug

SEQ ID NO: 2491419 - RNA, 19 nt, Artificial Sequence
  Description of Artificial Sequence: Synthetic oligonucleotide
cgucuggcagcauggauug

SEQ ID NO: 2491420 - RNA, 19 nt, Artificial Sequence
  Description of Artificial Sequence: Synthetic oligonucleotide
gugucagggccccauccaa

SEQ ID NO: 2491421 - RNA, 19 nt, Artificial Sequence
  Description of Artificial Sequence: Synthetic oligonucleotide
cacugagaagaccaccagu

SEQ ID NO: 2491422 - RNA, 19 nt, Artificial Sequence
  Description of Artificial Sequence: Synthetic oligonucleotide
ccuuaagcgcaaagcccgc

SEQ ID NO: 2491423 - RNA, 19 nt, Artificial Sequence
  Description of Artificial Sequence: Synthetic oligonucleotide
cucagacaccacgagucga

SEQ ID NO: 2491424 - RNA, 19 nt, Artificial Sequence
  Description of Artificial Sequence: Synthetic oligonucleotide
ccgggcggaagugauaggc

SEQ ID NO: 2491425 - RNA, 19 nt, Artificial Sequence
  Description of Artificial Sequence: Synthetic oligonucleotide
aggagacgcgcagcaaaga

SEQ ID NO: 2491426 - RNA, 19 nt, Artificial Sequence
  Description of Artificial Sequence: Synthetic oligonucleotide
agcacguggaugagccugu

SEQ ID NO: 2491427 - RNA, 19 nt, Artificial Sequence
  Description of Artificial Sequence: Synthetic oligonucleotide
gcuccgguccaguggaaac

SEQ ID NO: 2491428 - RNA, 19 nt, Artificial Sequence
  Description of Artificial Sequence: Synthetic oligonucleotide
ggguagcaggcagaagugc

SEQ ID NO: 2491429 - RNA, 19 nt, Artificial Sequence
  Description of Artificial Sequence: Synthetic oligonucleotide
ggggcgugcuagcccaggg

SEQ ID NO: 2491430 - RNA, 19 nt, Artificial Sequence
  Description of Artificial Sequence: Synthetic oligonucleotide
cucgcgugggcaggcgggg

SEQ ID NO: 2491431 - RNA, 19 nt, Artificial Sequence
  Description of Artificial Sequence: Synthetic oligonucleotide
gcccgggcggaagugauag

SEQ ID NO: 2491432 - RNA, 19 nt, Artificial Sequence
  Description of Artificial Sequence: Synthetic oligonucleotide
uggcccgggcggaagugau

SEQ ID NO: 2491433 - RNA, 19 nt, Artificial Sequence
  Description of Artificial Sequence: Synthetic oligonucleotide
agucgcugcuggcaccauu

SEQ ID NO: 2491434 - RNA, 19 nt, Artificial Sequence
  Description of Artificial Sequence: Synthetic oligonucleotide
ggacucagcccaagagaag

SEQ ID NO: 2491435 - RNA, 19 nt, Artificial Sequence
  Description of Artificial Sequence: Synthetic oligonucleotide
ugaugcggacuggcaggca

SEQ ID NO: 2491436 - RNA, 19 nt, Artificial Sequence
  Description of Artificial Sequence: Synthetic oligonucleotide
ccacgcuggggacugguug

SEQ ID NO: 2491437 - RNA, 19 nt, Artificial Sequence
  Description of Artificial Sequence: Synthetic oligonucleotide
agcaaguggcccgggcgga

SEQ ID NO: 2491438 - RNA, 19 nt, Artificial Sequence
  Description of Artificial Sequence: Synthetic oligonucleotide
agcccgcuccgguccagug

SEQ ID NO: 2491439 - RNA, 19 nt, Artificial Sequence
  Description of Artificial Sequence: Synthetic oligonucleotide
cagguccauguggaacaag

SEQ ID NO: 2491440 - RNA, 19 nt, Artificial Sequence
  Description of Artificial Sequence: Synthetic oligonucleotide
cagacaccacgagucgauc

SEQ ID NO: 2491441 - RNA, 19 nt, Artificial Sequence
  Description of Artificial Sequence: Synthetic oligonucleotide
gucccgugcugccuggcaa

SEQ ID NO: 2491442 - RNA, 19 nt, Artificial Sequence
  Description of Artificial Sequence: Synthetic oligonucleotide
caagagaagaaagcccgau

SEQ ID NO: 2491443 - RNA, 19 nt, Artificial Sequence
  Description of Artificial Sequence: Synthetic oligonucleotide
gcggaagugauaggcgaac

SEQ ID NO: 2491444 - RNA, 19 nt, Artificial Sequence
  Description of Artificial Sequence: Synthetic oligonucleotide
gacgcgcagcaaagaggug

SEQ ID NO: 2491445 - RNA, 19 nt, Artificial Sequence
  Description of Artificial Sequence: Synthetic oligonucleotide
agaaucggacucagcccaa

SEQ ID NO: 2491446 - RNA, 19 nt, Artificial Sequence
  Description of Artificial Sequence: Synthetic oligonucleotide
guguccugccagggcaggc

SEQ ID NO: 2491447 - RNA, 19 nt, Artificial Sequence
  Description of Artificial Sequence: Synthetic oligonucleotide
gcgaacucgcgugggcagg

SEQ ID NO: 2491448 - RNA, 19 nt, Artificial Sequence
  Description of Artificial Sequence: Synthetic oligonucleotide
cggacucagcccaagagaa

SEQ ID NO: 2491449 - RNA, 19 nt, Artificial Sequence
  Description of Artificial Sequence: Synthetic oligonucleotide
aagcccgcuccgguccagu

SEQ ID NO: 2491450 - RNA, 19 nt, Artificial Sequence
  Description of Artificial Sequence: Synthetic oligonucleotide
cacauggguggagcucuuc

SEQ ID NO: 2491451 - RNA, 19 nt, Artificial Sequence
  Description of Artificial Sequence: Synthetic oligonucleotide
caaagcccgcuccggucca

SEQ ID NO: 2491452 - RNA, 19 nt, Artificial Sequence
  Description of Artificial Sequence: Synthetic oligonucleotide
ccuugcacaccagcaguac

SEQ ID NO: 2491453 - RNA, 19 nt, Artificial Sequence
  Description of Artificial Sequence: Synthetic oligonucleotide
cucggccacuaggucugcc

SEQ ID NO: 2491454 - RNA, 19 nt, Artificial Sequence
  Description of Artificial Sequence: Synthetic oligonucleotide
gccagcaaguggcccgggc

SEQ ID NO: 2491455 - RNA, 19 nt, Artificial Sequence
  Description of Artificial Sequence: Synthetic oligonucleotide
gugcuagcccaggggcucc

SEQ ID NO: 2491456 - RNA, 19 nt, Artificial Sequence
  Description of Artificial Sequence: Synthetic oligonucleotide
ugccauccuuaagcgcaaa

SEQ ID NO: 2491457 - RNA, 19 nt, Artificial Sequence
  Description of Artificial Sequence: Synthetic oligonucleotide
ggaacaaggcugccccugu

SEQ ID NO: 2491458 - RNA, 19 nt, Artificial Sequence
  Description of Artificial Sequence: Synthetic oligonucleotide
cuuaagcgcaaagcccgcu

SEQ ID NO: 2491459 - RNA, 19 nt, Artificial Sequence
  Description of Artificial Sequence: Synthetic oligonucleotide
cgagucgaucccgcaaagg

SEQ ID NO: 2491460 - RNA, 19 nt, Artificial Sequence
  Description of Artificial Sequence: Synthetic oligonucleotide
cagcauggauugagcagcu

SEQ ID NO: 2491461 - RNA, 19 nt, Artificial Sequence
  Description of Artificial Sequence: Synthetic oligonucleotide
gcaaagggcucagcuugac

SEQ ID NO: 2491462 - RNA, 19 nt, Artificial Sequence
  Description of Artificial Sequence: Synthetic oligonucleotide
ccccagcaaucucugagca

SEQ ID NO: 2491463 - RNA, 19 nt, Artificial Sequence
  Description of Artificial Sequence: Synthetic oligonucleotide
gcccgauccaacaauuccu

SEQ ID NO: 2491464 - RNA, 19 nt, Artificial Sequence
  Description of Artificial Sequence: Synthetic oligonucleotide
gggcacgcgcacauccuug

SEQ ID NO: 2491465 - RNA, 19 nt, Artificial Sequence
  Description of Artificial Sequence: Synthetic oligonucleotide
cugccccugugaggagacg

SEQ ID NO: 2491466 - RNA, 19 nt, Artificial Sequence
  Description of Artificial Sequence: Synthetic oligonucleotide
gccacuaggucugccagcu

SEQ ID NO: 2491467 - RNA, 19 nt, Artificial Sequence
  Description of Artificial Sequence: Synthetic oligonucleotide
aggcgucuggcagcaugga

SEQ ID NO: 2491468 - RNA, 19 nt, Artificial Sequence
  Description of Artificial Sequence: Synthetic oligonucleotide
uccgggccacaugggugga

SEQ ID NO: 2491469 - RNA, 19 nt, Artificial Sequence
  Description of Artificial Sequence: Synthetic oligonucleotide
ggcaggcggggugcgagug

SEQ ID NO: 2491470 - RNA, 19 nt, Artificial Sequence
  Description of Artificial Sequence: Synthetic oligonucleotide
gggacugguugggcacgcg

SEQ ID NO: 2491471 - RNA, 19 nt, Artificial Sequence
  Description of Artificial Sequence: Synthetic oligonucleotide
ggcggaagugauaggcgaa

SEQ ID NO: 2491472 - RNA, 19 nt, Artificial Sequence
  Description of Artificial Sequence: Synthetic oligonucleotide
gugccauccuuaagcgcaa

SEQ ID NO: 2491473 - RNA, 19 nt, Artificial Sequence
  Description of Artificial Sequence: Synthetic oligonucleotide
cgcgcagcaaagagguguc

SEQ ID NO: 2491474 - RNA, 19 nt, Artificial Sequence
  Description of Artificial Sequence: Synthetic oligonucleotide
ccuccauguggaggguagc

SEQ ID NO: 2491475 - RNA, 19 nt, Artificial Sequence
  Description of Artificial Sequence: Synthetic oligonucleotide
guggcccgggcggaaguga

SEQ ID NO: 2491476 - RNA, 19 nt, Artificial Sequence
  Description of Artificial Sequence: Synthetic oligonucleotide
ucgcgugggcaggcggggu

SEQ ID NO: 2491477 - RNA, 19 nt, Artificial Sequence
  Description of Artificial Sequence: Synthetic oligonucleotide
gcggggugcgaguggguca

SEQ ID NO: 2491478 - RNA, 19 nt, Artificial Sequence
  Description of Artificial Sequence: Synthetic oligonucleotide
guccugccagggcaggcgu

SEQ ID NO: 2491479 - RNA, 19 nt, Artificial Sequence
  Description of Artificial Sequence: Synthetic oligonucleotide
ccucgggucccgugcugcc

SEQ ID NO: 2491480 - RNA, 19 nt, Artificial Sequence
  Description of Artificial Sequence: Synthetic oligonucleotide
cccugugaggagacgcgca

SEQ ID NO: 2491481 - RNA, 19 nt, Artificial Sequence
  Description of Artificial Sequence: Synthetic oligonucleotide
ggcucaucuuguuggugau

SEQ ID NO: 2491482 - RNA, 19 nt, Artificial Sequence
  Description of Artificial Sequence: Synthetic oligonucleotide
gcuaguggcucaucuuguu

SEQ ID NO: 2491483 - RNA, 19 nt, Artificial Sequence
  Description of Artificial Sequence: Synthetic oligonucleotide
ggcuaguggcucaucuugu

SEQ ID NO: 2491484 - RNA, 19 nt, Artificial Sequence
  Description of Artificial Sequence: Synthetic oligonucleotide
gcgucuggcagcauggauu

SEQ ID NO: 2491485 - RNA, 19 nt, Artificial Sequence
  Description of Artificial Sequence: Synthetic oligonucleotide
ggcuccgggccacaugggu

SEQ ID NO: 2491486 - RNA, 19 nt, Artificial Sequence
  Description of Artificial Sequence: Synthetic oligonucleotide
gcuggcacucagacaccac

SEQ ID NO: 2491487 - RNA, 19 nt, Artificial Sequence
  Description of Artificial Sequence: Synthetic oligonucleotide
gcaguacguagcuguacuu

SEQ ID NO: 2491488 - RNA, 19 nt, Artificial Sequence
  Description of Artificial Sequence: Synthetic oligonucleotide
ccacgagucgaucccgcaa

SEQ ID NO: 2491489 - RNA, 19 nt, Artificial Sequence
  Description of Artificial Sequence: Synthetic oligonucleotide
cgggccacauggguggagc

SEQ ID NO: 2491490 - RNA, 19 nt, Artificial Sequence
  Description of Artificial Sequence: Synthetic oligonucleotide
gcacgcgcacauccuugca

SEQ ID NO: 2491491 - RNA, 19 nt, Artificial Sequence
  Description of Artificial Sequence: Synthetic oligonucleotide
cgugcuagcccaggggcuc

SEQ ID NO: 2491492 - RNA, 19 nt, Artificial Sequence
  Description of Artificial Sequence: Synthetic oligonucleotide
cgaacucgcgugggcaggc

SEQ ID NO: 2491493 - RNA, 19 nt, Artificial Sequence
  Description of Artificial Sequence: Synthetic oligonucleotide
gcgcagcaaagaggugucc

SEQ ID NO: 2491494 - RNA, 19 nt, Artificial Sequence
  Description of Artificial Sequence: Synthetic oligonucleotide
cccgggcggaagugauagg

SEQ ID NO: 2491495 - RNA, 19 nt, Artificial Sequence
  Description of Artificial Sequence: Synthetic oligonucleotide
cgauccaacaauuccuguu

SEQ ID NO: 2491496 - RNA, 19 nt, Artificial Sequence
  Description of Artificial Sequence: Synthetic oligonucleotide
ccagcaguacguagcugua

SEQ ID NO: 2491497 - RNA, 19 nt, Artificial Sequence
  Description of Artificial Sequence: Synthetic oligonucleotide
ccgugcugccuggcaaagg

SEQ ID NO: 2491498 - RNA, 19 nt, Artificial Sequence
  Description of Artificial Sequence: Synthetic oligonucleotide
ccagucgcugcuggcacca

SEQ ID NO: 2491499 - RNA, 19 nt, Artificial Sequence
  Description of Artificial Sequence: Synthetic oligonucleotide
aggccacgcuggggacugg

SEQ ID NO: 2491500 - RNA, 19 nt, Artificial Sequence
  Description of Artificial Sequence: Synthetic oligonucleotide
cggggugcgagugggucag

SEQ ID NO: 2491501 - RNA, 19 nt, Artificial Sequence
  Description of Artificial Sequence: Synthetic oligonucleotide
cccgugcugccuggcaaag

SEQ ID NO: 2491502 - RNA, 19 nt, Artificial Sequence
  Description of Artificial Sequence: Synthetic oligonucleotide
gguugggcacgcgcacauc

SEQ ID NO: 2491503 - RNA, 19 nt, Artificial Sequence
  Description of Artificial Sequence: Synthetic oligonucleotide
gcagguccauguggaacaa

SEQ ID NO: 2491504 - RNA, 19 nt, Artificial Sequence
  Description of Artificial Sequence: Synthetic oligonucleotide
ccgguccaguggaaaccuc

SEQ ID NO: 2491505 - RNA, 19 nt, Artificial Sequence
  Description of Artificial Sequence: Synthetic oligonucleotide
cagugugucagggccccau

SEQ ID NO: 2491506 - RNA, 19 nt, Artificial Sequence
  Description of Artificial Sequence: Synthetic oligonucleotide
gggccacauggguggagcu

SEQ ID NO: 2491507 - RNA, 19 nt, Artificial Sequence
  Description of Artificial Sequence: Synthetic oligonucleotide
ccgauccaacaauuccugu

SEQ ID NO: 2491508 - RNA, 19 nt, Artificial Sequence
  Description of Artificial Sequence: Synthetic oligonucleotide
cggacuggcaggcaggcau

SEQ ID NO: 2491509 - RNA, 19 nt, Artificial Sequence
  Description of Artificial Sequence: Synthetic oligonucleotide
gcgcaaagcccgcuccggu

SEQ ID NO: 2491510 - RNA, 19 nt, Artificial Sequence
  Description of Artificial Sequence: Synthetic oligonucleotide
cgcgugggcaggcggggug

SEQ ID NO: 2491511 - RNA, 19 nt, Artificial Sequence
  Description of Artificial Sequence: Synthetic oligonucleotide
gggugcgagugggucagcu

SEQ ID NO: 2491512 - RNA, 19 nt, Artificial Sequence
  Description of Artificial Sequence: Synthetic oligonucleotide
cucgggucccgugcugccu

SEQ ID NO: 2491513 - RNA, 19 nt, Artificial Sequence
  Description of Artificial Sequence: Synthetic oligonucleotide
gcaaguggcccgggcggaa

SEQ ID NO: 2491514 - RNA, 19 nt, Artificial Sequence
  Description of Artificial Sequence: Synthetic oligonucleotide
gcgugcuagcccaggggcu

SEQ ID NO: 2491515 - RNA, 19 nt, Artificial Sequence
  Description of Artificial Sequence: Synthetic oligonucleotide
ccgggccacauggguggag

SEQ ID NO: 2491516 - RNA, 19 nt, Artificial Sequence
  Description of Artificial Sequence: Synthetic oligonucleotide
gcggacuggcaggcaggca

SEQ ID NO: 2491517 - RNA, 19 nt, Artificial Sequence
  Description of Artificial Sequence: Synthetic oligonucleotide
ggggugcgagugggucagc

SEQ ID NO: 2491518 - RNA, 19 nt, Artificial Sequence
  Description of Artificial Sequence: Synthetic oligonucleotide
ccucggccacuaggucugc

SEQ ID NO: 2491519 - RNA, 19 nt, Artificial Sequence
  Description of Artificial Sequence: Synthetic oligonucleotide
gcagugugucagggcccca

SEQ ID NO: 2491520 - RNA, 19 nt, Artificial Sequence
  Description of Artificial Sequence: Synthetic oligonucleotide
gggccccauccaagaagaa

SEQ ID NO: 2491521 - RNA, 19 nt, Artificial Sequence
  Description of Artificial Sequence: Synthetic oligonucleotide
cggaagugauaggcgaacu

SEQ ID NO: 2491522 - RNA, 19 nt, Artificial Sequence
  Description of Artificial Sequence: Synthetic oligonucleotide
ggccacgcuggggacuggu

SEQ ID NO: 2491523 - RNA, 19 nt, Artificial Sequence
  Description of Artificial Sequence: Synthetic oligonucleotide
ggcccgggcggaagugaua

SEQ ID NO: 2491524 - RNA, 19 nt, Artificial Sequence
  Description of Artificial Sequence: Synthetic oligonucleotide
cgcuccgguccaguggaaa

SEQ ID NO: 2491525 - RNA, 19 nt, Artificial Sequence
  Description of Artificial Sequence: Synthetic oligonucleotide
gccacgcuggggacugguu

SEQ ID NO: 2491526 - RNA, 19 nt, Artificial Sequence
  Description of Artificial Sequence: Synthetic oligonucleotide
cagucgcugcuggcaccau

SEQ ID NO: 2491527 - RNA, 19 nt, Artificial Sequence
  Description of Artificial Sequence: Synthetic oligonucleotide
ccacauggguggagcucuu

SEQ ID NO: 2491528 - RNA, 19 nt, Artificial Sequence
  Description of Artificial Sequence: Synthetic oligonucleotide
ccgcuccgguccaguggaa

SEQ ID NO: 2491529 - RNA, 19 nt, Artificial Sequence
  Description of Artificial Sequence: Synthetic oligonucleotide
aauaaauaaugccugaguc

SEQ ID NO: 2491530 - RNA, 19 nt, Artificial Sequence
  Description of Artificial Sequence: Synthetic oligonucleotide
aauaccaaauaaauaaugc

SEQ ID NO: 2491531 - RNA, 19 nt, Artificial Sequence
  Description of Artificial Sequence: Synthetic oligonucleotide
uauaguucauccaugauug

SEQ ID NO: 2491532 - RNA, 19 nt, Artificial Sequence
  Description of Artificial Sequence: Synthetic oligonucleotide
aggacaaccaccuacacac

SEQ ID NO: 2491533 - RNA, 19 nt, Artificial Sequence
  Description of Artificial Sequence: Synthetic oligonucleotide
auaccaaauaaauaaugcc

SEQ ID NO: 2491534 - RNA, 19 nt, Artificial Sequence
  Description of Artificial Sequence: Synthetic oligonucleotide
aacuaaauuaugucuuagc

SEQ ID NO: 2491535 - RNA, 19 nt, Artificial Sequence
  Description of Artificial Sequence: Synthetic oligonucleotide
gauuuguuuucacugaugg

SEQ ID NO: 2491536 - RNA, 19 nt, Artificial Sequence
  Description of Artificial Sequence: Synthetic oligonucleotide
auccauauauaguucaucc

SEQ ID NO: 2491537 - RNA, 19 nt, Artificial Sequence
  Description of Artificial Sequence: Synthetic oligonucleotide
uaaauuaugucuuagcaaa

SEQ ID NO: 2491538 - RNA, 19 nt, Artificial Sequence
  Description of Artificial Sequence: Synthetic oligonucleotide
cuuauuacggaacagcucc

SEQ ID NO: 2491539 - RNA, 19 nt, Artificial Sequence
  Description of Artificial Sequence: Synthetic oligonucleotide
aucacuacaacagucaagc

SEQ ID NO: 2491540 - RNA, 19 nt, Artificial Sequence
  Description of Artificial Sequence: Synthetic oligonucleotide
aauuaugucuuagcaaagc

SEQ ID NO: 2491541 - RNA, 19 nt, Artificial Sequence
  Description of Artificial Sequence: Synthetic oligonucleotide
uuuggaacuaggaagugag

SEQ ID NO: 2491542 - RNA, 19 nt, Artificial Sequence
  Description of Artificial Sequence: Synthetic oligonucleotide
uauaaaacuaaauuauguc

SEQ ID NO: 2491543 - RNA, 19 nt, Artificial Sequence
  Description of Artificial Sequence: Synthetic oligonucleotide
aaguuauccauauauaguu

SEQ ID NO: 2491544 - RNA, 19 nt, Artificial Sequence
  Description of Artificial Sequence: Synthetic oligonucleotide
acuaaauuaugucuuagca

SEQ ID NO: 2491545 - RNA, 19 nt, Artificial Sequence
  Description of Artificial Sequence: Synthetic oligonucleotide
ugcacaagcauucugggug

SEQ ID NO: 2491546 - RNA, 19 nt, Artificial Sequence
  Description of Artificial Sequence: Synthetic oligonucleotide
acagucaagccuuucuucc

SEQ ID NO: 2491547 - RNA, 19 nt, Artificial Sequence
  Description of Artificial Sequence: Synthetic oligonucleotide
ucaagcaaauaccaaauaa

SEQ ID NO: 2491548 - RNA, 19 nt, Artificial Sequence
  Description of Artificial Sequence: Synthetic oligonucleotide
aaauaccaaauaaauaaug

SEQ ID NO: 2491549 - RNA, 19 nt, Artificial Sequence
  Description of Artificial Sequence: Synthetic oligonucleotide
aacagucaagccuuucuuc

SEQ ID NO: 2491550 - RNA, 19 nt, Artificial Sequence
  Description of Artificial Sequence: Synthetic oligonucleotide
uccaugauugacuauaaaa

SEQ ID NO: 2491551 - RNA, 19 nt, Artificial Sequence
  Description of Artificial Sequence: Synthetic oligonucleotide
uacacacccacccacaggc

SEQ ID NO: 2491552 - RNA, 19 nt, Artificial Sequence
  Description of Artificial Sequence: Synthetic oligonucleotide
ucauuaugcccuaccaagg

SEQ ID NO: 2491553 - RNA, 19 nt, Artificial Sequence
  Description of Artificial Sequence: Synthetic oligonucleotide
ugauugacuauaaaacuaa

SEQ ID NO: 2491554 - RNA, 19 nt, Artificial Sequence
  Description of Artificial Sequence: Synthetic oligonucleotide
uguuuugugguccagucuc

SEQ ID NO: 2491555 - RNA, 19 nt, Artificial Sequence
  Description of Artificial Sequence: Synthetic oligonucleotide
acucuuauuacggaacagc

SEQ ID NO: 2491556 - RNA, 19 nt, Artificial Sequence
  Description of Artificial Sequence: Synthetic oligonucleotide
auaauguguuuuguggucc

SEQ ID NO: 2491557 - RNA, 19 nt, Artificial Sequence
  Description of Artificial Sequence: Synthetic oligonucleotide
uaaauaaugccugagucuc

SEQ ID NO: 2491558 - RNA, 19 nt, Artificial Sequence
  Description of Artificial Sequence: Synthetic oligonucleotide
ugagccaacagucgugggg

SEQ ID NO: 2491559 - RNA, 19 nt, Artificial Sequence
  Description of Artificial Sequence: Synthetic oligonucleotide
uugugguccagucucauga

SEQ ID NO: 2491560 - RNA, 19 nt, Artificial Sequence
  Description of Artificial Sequence: Synthetic oligonucleotide
ucuuagcaaagccugcucc

SEQ ID NO: 2491561 - RNA, 19 nt, Artificial Sequence
  Description of Artificial Sequence: Synthetic oligonucleotide
auauauaguucauccauga

SEQ ID NO: 2491562 - RNA, 19 nt, Artificial Sequence
  Description of Artificial Sequence: Synthetic oligonucleotide
auauaguucauccaugauu

SEQ ID NO: 2491563 - RNA, 19 nt, Artificial Sequence
  Description of Artificial Sequence: Synthetic oligonucleotide
uccagucucaugaagggug

SEQ ID NO: 2491564 - RNA, 19 nt, Artificial Sequence
  Description of Artificial Sequence: Synthetic oligonucleotide
aucacacuggcucucacuc

SEQ ID NO: 2491565 - RNA, 19 nt, Artificial Sequence
  Description of Artificial Sequence: Synthetic oligonucleotide
ucuucauuaugcccuacca

SEQ ID NO: 2491566 - RNA, 19 nt, Artificial Sequence
  Description of Artificial Sequence: Synthetic oligonucleotide
aaaacgccugucugccucc

SEQ ID NO: 2491567 - RNA, 19 nt, Artificial Sequence
  Description of Artificial Sequence: Synthetic oligonucleotide
uuacggaacagcucccugg

SEQ ID NO: 2491568 - RNA, 19 nt, Artificial Sequence
  Description of Artificial Sequence: Synthetic oligonucleotide
aaacuaaauuaugucuuag

SEQ ID NO: 2491569 - RNA, 19 nt, Artificial Sequence
  Description of Artificial Sequence: Synthetic oligonucleotide
uggaacuaggaagugagcc

SEQ ID NO: 2491570 - RNA, 19 nt, Artificial Sequence
  Description of Artificial Sequence: Synthetic oligonucleotide
cuaccaaggaaucugagca

SEQ ID NO: 2491571 - RNA, 19 nt, Artificial Sequence
  Description of Artificial Sequence: Synthetic oligonucleotide
gucuuagggucucagaaag

SEQ ID NO: 2491572 - RNA, 19 nt, Artificial Sequence
  Description of Artificial Sequence: Synthetic oligonucleotide
cagcauucaagcaaauacc

SEQ ID NO: 2491573 - RNA, 19 nt, Artificial Sequence
  Description of Artificial Sequence: Synthetic oligonucleotide
agucaagccuuucuuccgc

SEQ ID NO: 2491574 - RNA, 19 nt, Artificial Sequence
  Description of Artificial Sequence: Synthetic oligonucleotide
ugugcacaagcauucuggg

SEQ ID NO: 2491575 - RNA, 19 nt, Artificial Sequence
  Description of Artificial Sequence: Synthetic oligonucleotide
cauauauaguucauccaug

SEQ ID NO: 2491576 - RNA, 19 nt, Artificial Sequence
  Description of Artificial Sequence: Synthetic oligonucleotide
acagugguuucccaccggc

SEQ ID NO: 2491577 - RNA, 19 nt, Artificial Sequence
  Description of Artificial Sequence: Synthetic oligonucleotide
aagcaaauaccaaauaaau

SEQ ID NO: 2491578 - RNA, 19 nt, Artificial Sequence
  Description of Artificial Sequence: Synthetic oligonucleotide
guuauccauauauaguuca

SEQ ID NO: 2491579 - RNA, 19 nt, Artificial Sequence
  Description of Artificial Sequence: Synthetic oligonucleotide
aaaggcuacugccggucac

SEQ ID NO: 2491580 - RNA, 19 nt, Artificial Sequence
  Description of Artificial Sequence: Synthetic oligonucleotide
cuuagggucucagaaaggc

SEQ ID NO: 2491581 - RNA, 19 nt, Artificial Sequence
  Description of Artificial Sequence: Synthetic oligonucleotide
ugagcagccaucacuacaa

SEQ ID NO: 2491582 - RNA, 19 nt, Artificial Sequence
  Description of Artificial Sequence: Synthetic oligonucleotide
accaaauaaauaaugccug

SEQ ID NO: 2491583 - RNA, 19 nt, Artificial Sequence
  Description of Artificial Sequence: Synthetic oligonucleotide
gaccacugaaucuuccuag

SEQ ID NO: 2491584 - RNA, 19 nt, Artificial Sequence
  Description of Artificial Sequence: Synthetic oligonucleotide
ugauuuguuuucacugaug

SEQ ID NO: 2491585 - RNA, 19 nt, Artificial Sequence
  Description of Artificial Sequence: Synthetic oligonucleotide
cacugaaucuuccuagugc

SEQ ID NO: 2491586 - RNA, 19 nt, Artificial Sequence
  Description of Artificial Sequence: Synthetic oligonucleotide
uccauauauaguucaucca

SEQ ID NO: 2491587 - RNA, 19 nt, Artificial Sequence
  Description of Artificial Sequence: Synthetic oligonucleotide
aaauuaugucuuagcaaag

SEQ ID NO: 2491588 - RNA, 19 nt, Artificial Sequence
  Description of Artificial Sequence: Synthetic oligonucleotide
cacacaguccucaucacac

SEQ ID NO: 2491589 - RNA, 19 nt, Artificial Sequence
  Description of Artificial Sequence: Synthetic oligonucleotide
accaaggaaucugagcagc

SEQ ID NO: 2491590 - RNA, 19 nt, Artificial Sequence
  Description of Artificial Sequence: Synthetic oligonucleotide
augcccaagaagcuuuugg

SEQ ID NO: 2491591 - RNA, 19 nt, Artificial Sequence
  Description of Artificial Sequence: Synthetic oligonucleotide
ccaaguuauccauauauag

SEQ ID NO: 2491592 - RNA, 19 nt, Artificial Sequence
  Description of Artificial Sequence: Synthetic oligonucleotide
aagggugaccacugaaucu

SEQ ID NO: 2491593 - RNA, 19 nt, Artificial Sequence
  Description of Artificial Sequence: Synthetic oligonucleotide
ucuuauuacggaacagcuc

SEQ ID NO: 2491594 - RNA, 19 nt, Artificial Sequence
  Description of Artificial Sequence: Synthetic oligonucleotide
gaaagcucacugcugcugc

SEQ ID NO: 2491595 - RNA, 19 nt, Artificial Sequence
  Description of Artificial Sequence: Synthetic oligonucleotide
ucuuagggucucagaaagg

SEQ ID NO: 2491596 - RNA, 19 nt, Artificial Sequence
  Description of Artificial Sequence: Synthetic oligonucleotide
ucaugaagggugaccacug

SEQ ID NO: 2491597 - RNA, 19 nt, Artificial Sequence
  Description of Artificial Sequence: Synthetic oligonucleotide
gaagccucuucauuaugcc

SEQ ID NO: 2491598 - RNA, 19 nt, Artificial Sequence
  Description of Artificial Sequence: Synthetic oligonucleotide
cauaauguguuuugugguc

SEQ ID NO: 2491599 - RNA, 19 nt, Artificial Sequence
  Description of Artificial Sequence: Synthetic oligonucleotide
caagcaaauaccaaauaaa

SEQ ID NO: 2491600 - RNA, 19 nt, Artificial Sequence
  Description of Artificial Sequence: Synthetic oligonucleotide
uuaugcccuaccaaggaau

SEQ ID NO: 2491601 - RNA, 19 nt, Artificial Sequence
  Description of Artificial Sequence: Synthetic oligonucleotide
gacaaccaccuacacaccc

SEQ ID NO: 2491602 - RNA, 19 nt, Artificial Sequence
  Description of Artificial Sequence: Synthetic oligonucleotide
gcuacugccggucacacag

SEQ ID NO: 2491603 - RNA, 19 nt, Artificial Sequence
  Description of Artificial Sequence: Synthetic oligonucleotide
aacagcacauuuccacaug

SEQ ID NO: 2491604 - RNA, 19 nt, Artificial Sequence
  Description of Artificial Sequence: Synthetic oligonucleotide
uugcaggacaaccaccuac

SEQ ID NO: 2491605 - RNA, 19 nt, Artificial Sequence
  Description of Artificial Sequence: Synthetic oligonucleotide
ugcaggacaaccaccuaca

SEQ ID NO: 2491606 - RNA, 19 nt, Artificial Sequence
  Description of Artificial Sequence: Synthetic oligonucleotide
gacuauaaaacuaaauuau

SEQ ID NO: 2491607 - RNA, 19 nt, Artificial Sequence
  Description of Artificial Sequence: Synthetic oligonucleotide
ucauccaugauugacuaua

SEQ ID NO: 2491608 - RNA, 19 nt, Artificial Sequence
  Description of Artificial Sequence: Synthetic oligonucleotide
cucacucuuauuacggaac

SEQ ID NO: 2491609 - RNA, 19 nt, Artificial Sequence
  Description of Artificial Sequence: Synthetic oligonucleotide
uuguuuucacugaugggaa

SEQ ID NO: 2491610 - RNA, 19 nt, Artificial Sequence
  Description of Artificial Sequence: Synthetic oligonucleotide
ugaagggugaccacugaau

SEQ ID NO: 2491611 - RNA, 19 nt, Artificial Sequence
  Description of Artificial Sequence: Synthetic oligonucleotide
ccagcauucaagcaaauac

SEQ ID NO: 2491612 - RNA, 19 nt, Artificial Sequence
  Description of Artificial Sequence: Synthetic oligonucleotide
guggaaagcucacugcugc

SEQ ID NO: 2491613 - RNA, 19 nt, Artificial Sequence
  Description of Artificial Sequence: Synthetic oligonucleotide
accguuguggccagaagcc

SEQ ID NO: 2491614 - RNA, 19 nt, Artificial Sequence
  Description of Artificial Sequence: Synthetic oligonucleotide
gaagggugaccacugaauc

SEQ ID NO: 2491615 - RNA, 19 nt, Artificial Sequence
  Description of Artificial Sequence: Synthetic oligonucleotide
uagggucucagaaaggcua

SEQ ID NO: 2491616 - RNA, 19 nt, Artificial Sequence
  Description of Artificial Sequence: Synthetic oligonucleotide
uuuuggaacuaggaaguga

SEQ ID NO: 2491617 - RNA, 19 nt, Artificial Sequence
  Description of Artificial Sequence: Synthetic oligonucleotide
ugcccaagaagcuuuugga

SEQ ID NO: 2491618 - RNA, 19 nt, Artificial Sequence
  Description of Artificial Sequence: Synthetic oligonucleotide
acucuucucagucugcgga

SEQ ID NO: 2491619 - RNA, 19 nt, Artificial Sequence
  Description of Artificial Sequence: Synthetic oligonucleotide
agugguuucccaccggcug

SEQ ID NO: 2491620 - RNA, 19 nt, Artificial Sequence
  Description of Artificial Sequence: Synthetic oligonucleotide
auaaugccugagucucugc

SEQ ID NO: 2491621 - RNA, 19 nt, Artificial Sequence
  Description of Artificial Sequence: Synthetic oligonucleotide
aguuauccauauauaguuc

SEQ ID NO: 2491622 - RNA, 19 nt, Artificial Sequence
  Description of Artificial Sequence: Synthetic oligonucleotide
uauauaguucauccaugau

SEQ ID NO: 2491623 - RNA, 19 nt, Artificial Sequence
  Description of Artificial Sequence: Synthetic oligonucleotide
uuauuacggaacagcuccc

SEQ ID NO: 2491624 - RNA, 19 nt, Artificial Sequence
  Description of Artificial Sequence: Synthetic oligonucleotide
acagucguggggaugcugc

SEQ ID NO: 2491625 - RNA, 19 nt, Artificial Sequence
  Description of Artificial Sequence: Synthetic oligonucleotide
uuauccauauauaguucau

SEQ ID NO: 2491626 - RNA, 19 nt, Artificial Sequence
  Description of Artificial Sequence: Synthetic oligonucleotide
uguugaaccucuggcuugg

SEQ ID NO: 2491627 - RNA, 19 nt, Artificial Sequence
  Description of Artificial Sequence: Synthetic oligonucleotide
guccucaucacacuggcuc

SEQ ID NO: 2491628 - RNA, 19 nt, Artificial Sequence
  Description of Artificial Sequence: Synthetic oligonucleotide
uuuucacugaugggaaccc

SEQ ID NO: 2491629 - RNA, 19 nt, Artificial Sequence
  Description of Artificial Sequence: Synthetic oligonucleotide
caucacuacaacagucaag

SEQ ID NO: 2491630 - RNA, 19 nt, Artificial Sequence
  Description of Artificial Sequence: Synthetic oligonucleotide
agugagccaacagucgugg

SEQ ID NO: 2491631 - RNA, 19 nt, Artificial Sequence
  Description of Artificial Sequence: Synthetic oligonucleotide
acuacaacagucaagccuu

SEQ ID NO: 2491632 - RNA, 19 nt, Artificial Sequence
  Description of Artificial Sequence: Synthetic oligonucleotide
caugauugacuauaaaacu

SEQ ID NO: 2491633 - RNA, 19 nt, Artificial Sequence
  Description of Artificial Sequence: Synthetic oligonucleotide
uucaagcaaauaccaaaua

SEQ ID NO: 2491634 - RNA, 19 nt, Artificial Sequence
  Description of Artificial Sequence: Synthetic oligonucleotide
caccguuguggccagaagc

SEQ ID NO: 2491635 - RNA, 19 nt, Artificial Sequence
  Description of Artificial Sequence: Synthetic oligonucleotide
ucucacucuuauuacggaa

SEQ ID NO: 2491636 - RNA, 19 nt, Artificial Sequence
  Description of Artificial Sequence: Synthetic oligonucleotide
acagcacauuuccacaugu

SEQ ID NO: 2491637 - RNA, 19 nt, Artificial Sequence
  Description of Artificial Sequence: Synthetic oligonucleotide
ugcuccuccauaauguguu

SEQ ID NO: 2491638 - RNA, 19 nt, Artificial Sequence
  Description of Artificial Sequence: Synthetic oligonucleotide
uuagggucucagaaaggcu

SEQ ID NO: 2491639 - RNA, 19 nt, Artificial Sequence
  Description of Artificial Sequence: Synthetic oligonucleotide
agcauucaagcaaauacca

SEQ ID NO: 2491640 - RNA, 19 nt, Artificial Sequence
  Description of Artificial Sequence: Synthetic oligonucleotide
ugaaucuuccuagugcaaa

SEQ ID NO: 2491641 - RNA, 19 nt, Artificial Sequence
  Description of Artificial Sequence: Synthetic oligonucleotide
ugucuuagggucucagaaa

SEQ ID NO: 2491642 - RNA, 19 nt, Artificial Sequence
  Description of Artificial Sequence: Synthetic oligonucleotide
cuccauaauguguuuugug

SEQ ID NO: 2491643 - RNA, 19 nt, Artificial Sequence
  Description of Artificial Sequence: Synthetic oligonucleotide
uuucucuggaguggaaagc

SEQ ID NO: 2491644 - RNA, 19 nt, Artificial Sequence
  Description of Artificial Sequence: Synthetic oligonucleotide
gucucagaaaggcuacugc

SEQ ID NO: 2491645 - RNA, 19 nt, Artificial Sequence
  Description of Artificial Sequence: Synthetic oligonucleotide
uaauguguuuuguggucca

SEQ ID NO: 2491646 - RNA, 19 nt, Artificial Sequence
  Description of Artificial Sequence: Synthetic oligonucleotide
auugacuauaaaacuaaau

SEQ ID NO: 2491647 - RNA, 19 nt, Artificial Sequence
  Description of Artificial Sequence: Synthetic oligonucleotide
ugcggauugcaggacaacc

SEQ ID NO: 2491648 - RNA, 19 nt, Artificial Sequence
  Description of Artificial Sequence: Synthetic oligonucleotide
agaaaggcuacugccgguc

SEQ ID NO: 2491649 - RNA, 19 nt, Artificial Sequence
  Description of Artificial Sequence: Synthetic oligonucleotide
augauugacuauaaaacua

SEQ ID NO: 2491650 - RNA, 19 nt, Artificial Sequence
  Description of Artificial Sequence: Synthetic oligonucleotide
cucuucauuaugcccuacc

SEQ ID NO: 2491651 - RNA, 19 nt, Artificial Sequence
  Description of Artificial Sequence: Synthetic oligonucleotide
uaugcccuaccaaggaauc

SEQ ID NO: 2491652 - RNA, 19 nt, Artificial Sequence
  Description of Artificial Sequence: Synthetic oligonucleotide
uauccauauauaguucauc

SEQ ID NO: 2491653 - RNA, 19 nt, Artificial Sequence
  Description of Artificial Sequence: Synthetic oligonucleotide
acccacagugguuucccac

SEQ ID NO: 2491654 - RNA, 19 nt, Artificial Sequence
  Description of Artificial Sequence: Synthetic oligonucleotide
uuggaacuaggaagugagc

SEQ ID NO: 2491655 - RNA, 19 nt, Artificial Sequence
  Description of Artificial Sequence: Synthetic oligonucleotide
ucuggaguggaaagcucac

SEQ ID NO: 2491656 - RNA, 19 nt, Artificial Sequence
  Description of Artificial Sequence: Synthetic oligonucleotide
auuacggaacagcucccug

SEQ ID NO: 2491657 - RNA, 19 nt, Artificial Sequence
  Description of Artificial Sequence: Synthetic oligonucleotide
gguccagucucaugaaggg

SEQ ID NO: 2491658 - RNA, 19 nt, Artificial Sequence
  Description of Artificial Sequence: Synthetic oligonucleotide
aauguguuuugugguccag

SEQ ID NO: 2491659 - RNA, 19 nt, Artificial Sequence
  Description of Artificial Sequence: Synthetic oligonucleotide
ucugucuuagggucucaga

SEQ ID NO: 2491660 - RNA, 19 nt, Artificial Sequence
  Description of Artificial Sequence: Synthetic oligonucleotide
caagccuuucuuccgcugc

SEQ ID NO: 2491661 - RNA, 19 nt, Artificial Sequence
  Description of Artificial Sequence: Synthetic oligonucleotide
ggucacacaguccucauca

SEQ ID NO: 2491662 - RNA, 19 nt, Artificial Sequence
  Description of Artificial Sequence: Synthetic oligonucleotide
gaaucuuccuagugcaaaa

SEQ ID NO: 2491663 - RNA, 19 nt, Artificial Sequence
  Description of Artificial Sequence: Synthetic oligonucleotide
ugcccuaccaaggaaucug

SEQ ID NO: 2491664 - RNA, 19 nt, Artificial Sequence
  Description of Artificial Sequence: Synthetic oligonucleotide
caaguuauccauauauagu

SEQ ID NO: 2491665 - RNA, 19 nt, Artificial Sequence
  Description of Artificial Sequence: Synthetic oligonucleotide
uguuuucacugaugggaac

SEQ ID NO: 2491666 - RNA, 19 nt, Artificial Sequence
  Description of Artificial Sequence: Synthetic oligonucleotide
aagaagcuuuuggaacuag

SEQ ID NO: 2491667 - RNA, 19 nt, Artificial Sequence
  Description of Artificial Sequence: Synthetic oligonucleotide
auuaugcccuaccaaggaa

SEQ ID NO: 2491668 - RNA, 19 nt, Artificial Sequence
  Description of Artificial Sequence: Synthetic oligonucleotide
gugaccacucuucucaguc

SEQ ID NO: 2491669 - RNA, 19 nt, Artificial Sequence
  Description of Artificial Sequence: Synthetic oligonucleotide
aaagcucacugcugcugcu

SEQ ID NO: 2491670 - RNA, 19 nt, Artificial Sequence
  Description of Artificial Sequence: Synthetic oligonucleotide
ugaccacugaaucuuccua

SEQ ID NO: 2491671 - RNA, 19 nt, Artificial Sequence
  Description of Artificial Sequence: Synthetic oligonucleotide
uccuagugaccacucuucu

SEQ ID NO: 2491672 - RNA, 19 nt, Artificial Sequence
  Description of Artificial Sequence: Synthetic oligonucleotide
ugucuuagcaaagccugcu

SEQ ID NO: 2491673 - RNA, 19 nt, Artificial Sequence
  Description of Artificial Sequence: Synthetic oligonucleotide
gucguggggaugcugccgg

SEQ ID NO: 2491674 - RNA, 19 nt, Artificial Sequence
  Description of Artificial Sequence: Synthetic oligonucleotide
ggcucucacucuuauuacg

SEQ ID NO: 2491675 - RNA, 19 nt, Artificial Sequence
  Description of Artificial Sequence: Synthetic oligonucleotide
ucacuacaacagucaagcc

SEQ ID NO: 2491676 - RNA, 19 nt, Artificial Sequence
  Description of Artificial Sequence: Synthetic oligonucleotide
agcagccaucacuacaaca

SEQ ID NO: 2491677 - RNA, 19 nt, Artificial Sequence
  Description of Artificial Sequence: Synthetic oligonucleotide
cuccuagugaccacucuuc

SEQ ID NO: 2491678 - RNA, 19 nt, Artificial Sequence
  Description of Artificial Sequence: Synthetic oligonucleotide
caugugcacaagcauucug

SEQ ID NO: 2491679 - RNA, 19 nt, Artificial Sequence
  Description of Artificial Sequence: Synthetic oligonucleotide
accacugaaucuuccuagu

SEQ ID NO: 2491680 - RNA, 19 nt, Artificial Sequence
  Description of Artificial Sequence: Synthetic oligonucleotide
gaagugagccaacagucgu

SEQ ID NO: 2491681 - RNA, 19 nt, Artificial Sequence
  Description of Artificial Sequence: Synthetic oligonucleotide
cuggcucucacucuuauua

SEQ ID NO: 2491682 - RNA, 19 nt, Artificial Sequence
  Description of Artificial Sequence: Synthetic oligonucleotide
cugucuuagggucucagaa

SEQ ID NO: 2491683 - RNA, 19 nt, Artificial Sequence
  Description of Artificial Sequence: Synthetic oligonucleotide
caguccucaucacacuggc

SEQ ID NO: 2491684 - RNA, 19 nt, Artificial Sequence
  Description of Artificial Sequence: Synthetic oligonucleotide
acaguccucaucacacugg

SEQ ID NO: 2491685 - RNA, 19 nt, Artificial Sequence
  Description of Artificial Sequence: Synthetic oligonucleotide
cuacacacccacccacagg

SEQ ID NO: 2491686 - RNA, 19 nt, Artificial Sequence
  Description of Artificial Sequence: Synthetic oligonucleotide
aagugagccaacagucgug

SEQ ID NO: 2491687 - RNA, 19 nt, Artificial Sequence
  Description of Artificial Sequence: Synthetic oligonucleotide
gaacuaggaagugagccaa

SEQ ID NO: 2491688 - RNA, 19 nt, Artificial Sequence
  Description of Artificial Sequence: Synthetic oligonucleotide
aaauaaugccugagucucu

SEQ ID NO: 2491689 - RNA, 19 nt, Artificial Sequence
  Description of Artificial Sequence: Synthetic oligonucleotide
cauuaugcccuaccaagga

SEQ ID NO: 2491690 - RNA, 19 nt, Artificial Sequence
  Description of Artificial Sequence: Synthetic oligonucleotide
uauuacggaacagcucccu

SEQ ID NO: 2491691 - RNA, 19 nt, Artificial Sequence
  Description of Artificial Sequence: Synthetic oligonucleotide
uagugaccacucuucucag

SEQ ID NO: 2491692 - RNA, 19 nt, Artificial Sequence
  Description of Artificial Sequence: Synthetic oligonucleotide
gucucaugaagggugacca

SEQ ID NO: 2491693 - RNA, 19 nt, Artificial Sequence
  Description of Artificial Sequence: Synthetic oligonucleotide
cuggccucaccguuguggc

SEQ ID NO: 2491694 - RNA, 19 nt, Artificial Sequence
  Description of Artificial Sequence: Synthetic oligonucleotide
ccuaccaaggaaucugagc

SEQ ID NO: 2491695 - RNA, 19 nt, Artificial Sequence
  Description of Artificial Sequence: Synthetic oligonucleotide
cucuggaguggaaagcuca

SEQ ID NO: 2491696 - RNA, 19 nt, Artificial Sequence
  Description of Artificial Sequence: Synthetic oligonucleotide
cacuacaacagucaagccu

SEQ ID NO: 2491697 - RNA, 19 nt, Artificial Sequence
  Description of Artificial Sequence: Synthetic oligonucleotide
ggaacuaggaagugagcca

SEQ ID NO: 2491698 - RNA, 19 nt, Artificial Sequence
  Description of Artificial Sequence: Synthetic oligonucleotide
cucuuauuacggaacagcu

SEQ ID NO: 2491699 - RNA, 19 nt, Artificial Sequence
  Description of Artificial Sequence: Synthetic oligonucleotide
acuaggaagugagccaaca

SEQ ID NO: 2491700 - RNA, 19 nt, Artificial Sequence
  Description of Artificial Sequence: Synthetic oligonucleotide
gcucucacucuuauuacgg

SEQ ID NO: 2491701 - RNA, 19 nt, Artificial Sequence
  Description of Artificial Sequence: Synthetic oligonucleotide
ucaccguuguggccagaag

SEQ ID NO: 2491702 - RNA, 19 nt, Artificial Sequence
  Description of Artificial Sequence: Synthetic oligonucleotide
cuccaaguuauccauauau

SEQ ID NO: 2491703 - RNA, 19 nt, Artificial Sequence
  Description of Artificial Sequence: Synthetic oligonucleotide
uggcucucacucuuauuac

SEQ ID NO: 2491704 - RNA, 19 nt, Artificial Sequence
  Description of Artificial Sequence: Synthetic oligonucleotide
ugaccacucuucucagucu

SEQ ID NO: 2491705 - RNA, 19 nt, Artificial Sequence
  Description of Artificial Sequence: Synthetic oligonucleotide
cucagucugcggauugcag

SEQ ID NO: 2491706 - RNA, 19 nt, Artificial Sequence
  Description of Artificial Sequence: Synthetic oligonucleotide
cucccuggccuucaugccc

SEQ ID NO: 2491707 - RNA, 19 nt, Artificial Sequence
  Description of Artificial Sequence: Synthetic oligonucleotide
cacucuucucagucugcgg

SEQ ID NO: 2491708 - RNA, 19 nt, Artificial Sequence
  Description of Artificial Sequence: Synthetic oligonucleotide
ugcccaacucugucuuagg

SEQ ID NO: 2491709 - RNA, 19 nt, Artificial Sequence
  Description of Artificial Sequence: Synthetic oligonucleotide
cacacccacccacaggcag

SEQ ID NO: 2491710 - RNA, 19 nt, Artificial Sequence
  Description of Artificial Sequence: Synthetic oligonucleotide
uuucacugaugggaacccc

SEQ ID NO: 2491711 - RNA, 19 nt, Artificial Sequence
  Description of Artificial Sequence: Synthetic oligonucleotide
gauugacuauaaaacuaaa

SEQ ID NO: 2491712 - RNA, 19 nt, Artificial Sequence
  Description of Artificial Sequence: Synthetic oligonucleotide
agggucucagaaaggcuac

SEQ ID NO: 2491713 - RNA, 19 nt, Artificial Sequence
  Description of Artificial Sequence: Synthetic oligonucleotide
aaccaccuacacacccacc

SEQ ID NO: 2491714 - RNA, 19 nt, Artificial Sequence
  Description of Artificial Sequence: Synthetic oligonucleotide
gagccaacagucgugggga

SEQ ID NO: 2491715 - RNA, 19 nt, Artificial Sequence
  Description of Artificial Sequence: Synthetic oligonucleotide
cuucucagucugcggauug

SEQ ID NO: 2491716 - RNA, 19 nt, Artificial Sequence
  Description of Artificial Sequence: Synthetic oligonucleotide
ucacccacagugguuuccc

SEQ ID NO: 2491717 - RNA, 19 nt, Artificial Sequence
  Description of Artificial Sequence: Synthetic oligonucleotide
aggaaucugagcagccauc

SEQ ID NO: 2491718 - RNA, 19 nt, Artificial Sequence
  Description of Artificial Sequence: Synthetic oligonucleotide
gugguccagucucaugaag

SEQ ID NO: 2491719 - RNA, 19 nt, Artificial Sequence
  Description of Artificial Sequence: Synthetic oligonucleotide
aaggcuacugccggucaca

SEQ ID NO: 2491720 - RNA, 19 nt, Artificial Sequence
  Description of Artificial Sequence: Synthetic oligonucleotide
ucucaugaagggugaccac

SEQ ID NO: 2491721 - RNA, 19 nt, Artificial Sequence
  Description of Artificial Sequence: Synthetic oligonucleotide
caaccaccuacacacccac

SEQ ID NO: 2491722 - RNA, 19 nt, Artificial Sequence
  Description of Artificial Sequence: Synthetic oligonucleotide
ugccuccacagcuggcccg

SEQ ID NO: 2491723 - RNA, 19 nt, Artificial Sequence
  Description of Artificial Sequence: Synthetic oligonucleotide
ugccggagggcucacccac

SEQ ID NO: 2491724 - RNA, 19 nt, Artificial Sequence
  Description of Artificial Sequence: Synthetic oligonucleotide
acacccacccacaggcagc

SEQ ID NO: 2491725 - RNA, 19 nt, Artificial Sequence
  Description of Artificial Sequence: Synthetic oligonucleotide
agggcucacccacaguggu

SEQ ID NO: 2491726 - RNA, 19 nt, Artificial Sequence
  Description of Artificial Sequence: Synthetic oligonucleotide
uacugccggucacacaguc

SEQ ID NO: 2491727 - RNA, 19 nt, Artificial Sequence
  Description of Artificial Sequence: Synthetic oligonucleotide
gaaaggcuacugccgguca

SEQ ID NO: 2491728 - RNA, 19 nt, Artificial Sequence
  Description of Artificial Sequence: Synthetic oligonucleotide
uggaaagcucacugcugcu

SEQ ID NO: 2491729 - RNA, 19 nt, Artificial Sequence
  Description of Artificial Sequence: Synthetic oligonucleotide
ugugguccagucucaugaa

SEQ ID NO: 2491730 - RNA, 19 nt, Artificial Sequence
  Description of Artificial Sequence: Synthetic oligonucleotide
ucaucacacuggcucucac

SEQ ID NO: 2491731 - RNA, 19 nt, Artificial Sequence
  Description of Artificial Sequence: Synthetic oligonucleotide
cuuuuggaacuaggaagug

SEQ ID NO: 2491732 - RNA, 19 nt, Artificial Sequence
  Description of Artificial Sequence: Synthetic oligonucleotide
caccuacacacccacccac

SEQ ID NO: 2491733 - RNA, 19 nt, Artificial Sequence
  Description of Artificial Sequence: Synthetic oligonucleotide
cacucuuauuacggaacag

SEQ ID NO: 2491734 - RNA, 19 nt, Artificial Sequence
  Description of Artificial Sequence: Synthetic oligonucleotide
uucucagucugcggauugc

SEQ ID NO: 2491735 - RNA, 19 nt, Artificial Sequence
  Description of Artificial Sequence: Synthetic oligonucleotide
ucccaccggcuguugaacc

SEQ ID NO: 2491736 - RNA, 19 nt, Artificial Sequence
  Description of Artificial Sequence: Synthetic oligonucleotide
acacaguccucaucacacu

SEQ ID NO: 2491737 - RNA, 19 nt, Artificial Sequence
  Description of Artificial Sequence: Synthetic oligonucleotide
aacagucguggggaugcug

SEQ ID NO: 2491738 - RNA, 19 nt, Artificial Sequence
  Description of Artificial Sequence: Synthetic oligonucleotide
cagucugcggauugcagga

SEQ ID NO: 2491739 - RNA, 19 nt, Artificial Sequence
  Description of Artificial Sequence: Synthetic oligonucleotide
agggugaccacugaaucuu

SEQ ID NO: 2491740 - RNA, 19 nt, Artificial Sequence
  Description of Artificial Sequence: Synthetic oligonucleotide
cagcacauuuccacaugug

SEQ ID NO: 2491741 - RNA, 19 nt, Artificial Sequence
  Description of Artificial Sequence: Synthetic oligonucleotide
gcccaacucugucuuaggg

SEQ ID NO: 2491742 - RNA, 19 nt, Artificial Sequence
  Description of Artificial Sequence: Synthetic oligonucleotide
agucguggggaugcugccg

SEQ ID NO: 2491743 - RNA, 19 nt, Artificial Sequence
  Description of Artificial Sequence: Synthetic oligonucleotide
aucugagcagccaucacua

SEQ ID NO: 2491744 - RNA, 19 nt, Artificial Sequence
  Description of Artificial Sequence: Synthetic oligonucleotide
gaugcugccggagggcuca

SEQ ID NO: 2491745 - RNA, 19 nt, Artificial Sequence
  Description of Artificial Sequence: Synthetic oligonucleotide
cugcccaacucugucuuag

SEQ ID NO: 2491746 - RNA, 19 nt, Artificial Sequence
  Description of Artificial Sequence: Synthetic oligonucleotide
auccaugauugacuauaaa

SEQ ID NO: 2491747 - RNA, 19 nt, Artificial Sequence
  Description of Artificial Sequence: Synthetic oligonucleotide
ccacccacaggcagcaugg

SEQ ID NO: 2491748 - RNA, 19 nt, Artificial Sequence
  Description of Artificial Sequence: Synthetic oligonucleotide
cugagucucugcccaacuc

SEQ ID NO: 2491749 - RNA, 19 nt, Artificial Sequence
  Description of Artificial Sequence: Synthetic oligonucleotide
ccaacagucguggggaugc

SEQ ID NO: 2491750 - RNA, 19 nt, Artificial Sequence
  Description of Artificial Sequence: Synthetic oligonucleotide
uucauccaugauugacuau

SEQ ID NO: 2491751 - RNA, 19 nt, Artificial Sequence
  Description of Artificial Sequence: Synthetic oligonucleotide
aacgccugucugccuccag

SEQ ID NO: 2491752 - RNA, 19 nt, Artificial Sequence
  Description of Artificial Sequence: Synthetic oligonucleotide
acaaccaccuacacaccca

SEQ ID NO: 2491753 - RNA, 19 nt, Artificial Sequence
  Description of Artificial Sequence: Synthetic oligonucleotide
ucugggugccccuccuagu

SEQ ID NO: 2491754 - RNA, 19 nt, Artificial Sequence
  Description of Artificial Sequence: Synthetic oligonucleotide
cuuagcaaagccugcuccu

SEQ ID NO: 2491755 - RNA, 19 nt, Artificial Sequence
  Description of Artificial Sequence: Synthetic oligonucleotide
ugggugccccuccuaguga

SEQ ID NO: 2491756 - RNA, 19 nt, Artificial Sequence
  Description of Artificial Sequence: Synthetic oligonucleotide
auguguuuugugguccagu

SEQ ID NO: 2491757 - RNA, 19 nt, Artificial Sequence
  Description of Artificial Sequence: Synthetic oligonucleotide
cacagugguuucccaccgg

SEQ ID NO: 2491758 - RNA, 19 nt, Artificial Sequence
  Description of Artificial Sequence: Synthetic oligonucleotide
gcacaagcauucugggugc

SEQ ID NO: 2491759 - RNA, 19 nt, Artificial Sequence
  Description of Artificial Sequence: Synthetic oligonucleotide
acugcugcugcugcugcug

SEQ ID NO: 2491760 - RNA, 19 nt, Artificial Sequence
  Description of Artificial Sequence: Synthetic oligonucleotide
caggacaaccaccuacaca

SEQ ID NO: 2491761 - RNA, 19 nt, Artificial Sequence
  Description of Artificial Sequence: Synthetic oligonucleotide
gucucugcccaacucuguc

SEQ ID NO: 2491762 - RNA, 19 nt, Artificial Sequence
  Description of Artificial Sequence: Synthetic oligonucleotide
cucucacucuuauuacgga

SEQ ID NO: 2491763 - RNA, 19 nt, Artificial Sequence
  Description of Artificial Sequence: Synthetic oligonucleotide
agucugcggauugcaggac

SEQ ID NO: 2491764 - RNA, 19 nt, Artificial Sequence
  Description of Artificial Sequence: Synthetic oligonucleotide
aagccugcuccuccauaau

SEQ ID NO: 2491765 - RNA, 19 nt, Artificial Sequence
  Description of Artificial Sequence: Synthetic oligonucleotide
gugagccaacagucguggg

SEQ ID NO: 2491766 - RNA, 19 nt, Artificial Sequence
  Description of Artificial Sequence: Synthetic oligonucleotide
cauccaugauugacuauaa

SEQ ID NO: 2491767 - RNA, 19 nt, Artificial Sequence
  Description of Artificial Sequence: Synthetic oligonucleotide
ggaaagcucacugcugcug

SEQ ID NO: 2491768 - RNA, 19 nt, Artificial Sequence
  Description of Artificial Sequence: Synthetic oligonucleotide
cccacagugguuucccacc

SEQ ID NO: 2491769 - RNA, 19 nt, Artificial Sequence
  Description of Artificial Sequence: Synthetic oligonucleotide
aggcuacugccggucacac

SEQ ID NO: 2491770 - RNA, 19 nt, Artificial Sequence
  Description of Artificial Sequence: Synthetic oligonucleotide
ccaaggaaucugagcagcc

SEQ ID NO: 2491771 - RNA, 19 nt, Artificial Sequence
  Description of Artificial Sequence: Synthetic oligonucleotide
cauuuccacaugugcacaa

SEQ ID NO: 2491772 - RNA, 19 nt, Artificial Sequence
  Description of Artificial Sequence: Synthetic oligonucleotide
ggaaucugagcagccauca

SEQ ID NO: 2491773 - RNA, 19 nt, Artificial Sequence
  Description of Artificial Sequence: Synthetic oligonucleotide
ugguccuggccucaccguu

SEQ ID NO: 2491774 - RNA, 19 nt, Artificial Sequence
  Description of Artificial Sequence: Synthetic oligonucleotide
cagucguggggaugcugcc

SEQ ID NO: 2491775 - RNA, 19 nt, Artificial Sequence
  Description of Artificial Sequence: Synthetic oligonucleotide
cucugucuuagggucucag

SEQ ID NO: 2491776 - RNA, 19 nt, Artificial Sequence
  Description of Artificial Sequence: Synthetic oligonucleotide
ggauugcaggacaaccacc

SEQ ID NO: 2491777 - RNA, 19 nt, Artificial Sequence
  Description of Artificial Sequence: Synthetic oligonucleotide
ugcugcugcugcugcugcc

SEQ ID NO: 2491778 - RNA, 19 nt, Artificial Sequence
  Description of Artificial Sequence: Synthetic oligonucleotide
ggucucagaaaggcuacug

SEQ ID NO: 2491779 - RNA, 19 nt, Artificial Sequence
  Description of Artificial Sequence: Synthetic oligonucleotide
caaggaaucugagcagcca

SEQ ID NO: 2491780 - RNA, 19 nt, Artificial Sequence
  Description of Artificial Sequence: Synthetic oligonucleotide
gcuuuuggaacuaggaagu

SEQ ID NO: 2491781 - RNA, 19 nt, Artificial Sequence
  Description of Artificial Sequence: Synthetic oligonucleotide
auugcaggacaaccaccua

SEQ ID NO: 2491782 - RNA, 19 nt, Artificial Sequence
  Description of Artificial Sequence: Synthetic oligonucleotide
ucuucucagucugcggauu

SEQ ID NO: 2491783 - RNA, 19 nt, Artificial Sequence
  Description of Artificial Sequence: Synthetic oligonucleotide
ccauauauaguucauccau

SEQ ID NO: 2491784 - RNA, 19 nt, Artificial Sequence
  Description of Artificial Sequence: Synthetic oligonucleotide
cugccggucacacaguccu

SEQ ID NO: 2491785 - RNA, 19 nt, Artificial Sequence
  Description of Artificial Sequence: Synthetic oligonucleotide
gcugccggagggcucaccc

SEQ ID NO: 2491786 - RNA, 19 nt, Artificial Sequence
  Description of Artificial Sequence: Synthetic oligonucleotide
guuuugugguccagucuca

SEQ ID NO: 2491787 - RNA, 19 nt, Artificial Sequence
  Description of Artificial Sequence: Synthetic oligonucleotide
agcauggugccagcauuca

SEQ ID NO: 2491788 - RNA, 19 nt, Artificial Sequence
  Description of Artificial Sequence: Synthetic oligonucleotide
caugaagggugaccacuga

SEQ ID NO: 2491789 - RNA, 19 nt, Artificial Sequence
  Description of Artificial Sequence: Synthetic oligonucleotide
cugcugcugcugcugcugc

SEQ ID NO: 2491790 - RNA, 19 nt, Artificial Sequence
  Description of Artificial Sequence: Synthetic oligonucleotide
ggugaccacugaaucuucc

SEQ ID NO: 2491791 - RNA, 19 nt, Artificial Sequence
  Description of Artificial Sequence: Synthetic oligonucleotide
caccccaacuccaaguuau

SEQ ID NO: 2491792 - RNA, 19 nt, Artificial Sequence
  Description of Artificial Sequence: Synthetic oligonucleotide
ccuacacacccacccacag

SEQ ID NO: 2491793 - RNA, 19 nt, Artificial Sequence
  Description of Artificial Sequence: Synthetic oligonucleotide
cugauuuguuuucacugau

SEQ ID NO: 2491794 - RNA, 19 nt, Artificial Sequence
  Description of Artificial Sequence: Synthetic oligonucleotide
acuggcucucacucuuauu

SEQ ID NO: 2491795 - RNA, 19 nt, Artificial Sequence
  Description of Artificial Sequence: Synthetic oligonucleotide
ccaagaagcuuuuggaacu

SEQ ID NO: 2491796 - RNA, 19 nt, Artificial Sequence
  Description of Artificial Sequence: Synthetic oligonucleotide
augcccuaccaaggaaucu

SEQ ID NO: 2491797 - RNA, 19 nt, Artificial Sequence
  Description of Artificial Sequence: Synthetic oligonucleotide
ucugcccaacucugucuua

SEQ ID NO: 2491798 - RNA, 19 nt, Artificial Sequence
  Description of Artificial Sequence: Synthetic oligonucleotide
aaacgccugucugccucca

SEQ ID NO: 2491799 - RNA, 19 nt, Artificial Sequence
  Description of Artificial Sequence: Synthetic oligonucleotide
cacaagcauucugggugcc

SEQ ID NO: 2491800 - RNA, 19 nt, Artificial Sequence
  Description of Artificial Sequence: Synthetic oligonucleotide
ccuagugaccacucuucuc

SEQ ID NO: 2491801 - RNA, 19 nt, Artificial Sequence
  Description of Artificial Sequence: Synthetic oligonucleotide
ccacucuucucagucugcg

SEQ ID NO: 2491802 - RNA, 19 nt, Artificial Sequence
  Description of Artificial Sequence: Synthetic oligonucleotide
ccacugaaucuuccuagug

SEQ ID NO: 2491803 - RNA, 19 nt, Artificial Sequence
  Description of Artificial Sequence: Synthetic oligonucleotide
caugcccaagaagcuuuug

SEQ ID NO: 2491804 - RNA, 19 nt, Artificial Sequence
  Description of Artificial Sequence: Synthetic oligonucleotide
guugaaccucuggcuuggg

SEQ ID NO: 2491805 - RNA, 19 nt, Artificial Sequence
  Description of Artificial Sequence: Synthetic oligonucleotide
accccaacuccaaguuauc

SEQ ID NO: 2491806 - RNA, 19 nt, Artificial Sequence
  Description of Artificial Sequence: Synthetic oligonucleotide
ccauaauguguuuuguggu

SEQ ID NO: 2491807 - RNA, 19 nt, Artificial Sequence
  Description of Artificial Sequence: Synthetic oligonucleotide
ugccagcauucaagcaaau

SEQ ID NO: 2491808 - RNA, 19 nt, Artificial Sequence
  Description of Artificial Sequence: Synthetic oligonucleotide
caacagcacauuuccacau

SEQ ID NO: 2491809 - RNA, 19 nt, Artificial Sequence
  Description of Artificial Sequence: Synthetic oligonucleotide
gccuccagccaacagcaca

SEQ ID NO: 2491810 - RNA, 19 nt, Artificial Sequence
  Description of Artificial Sequence: Synthetic oligonucleotide
ggcuguugaaccucuggcu

SEQ ID NO: 2491811 - RNA, 19 nt, Artificial Sequence
  Description of Artificial Sequence: Synthetic oligonucleotide
gguuucucuggaguggaaa

SEQ ID NO: 2491812 - RNA, 19 nt, Artificial Sequence
  Description of Artificial Sequence: Synthetic oligonucleotide
ugucugccuccagccaaca

SEQ ID NO: 2491813 - RNA, 19 nt, Artificial Sequence
  Description of Artificial Sequence: Synthetic oligonucleotide
caucacacuggcucucacu

SEQ ID NO: 2491814 - RNA, 19 nt, Artificial Sequence
  Description of Artificial Sequence: Synthetic oligonucleotide
cggauugcaggacaaccac

SEQ ID NO: 2491815 - RNA, 19 nt, Artificial Sequence
  Description of Artificial Sequence: Synthetic oligonucleotide
caacuccaaguuauccaua

SEQ ID NO: 2491816 - RNA, 19 nt, Artificial Sequence
  Description of Artificial Sequence: Synthetic oligonucleotide
cggcuguugaaccucuggc

SEQ ID NO: 2491817 - RNA, 19 nt, Artificial Sequence
  Description of Artificial Sequence: Synthetic oligonucleotide
gugcacaagcauucugggu

SEQ ID NO: 2491818 - RNA, 19 nt, Artificial Sequence
  Description of Artificial Sequence: Synthetic oligonucleotide
gggugccccuccuagugac

SEQ ID NO: 2491819 - RNA, 19 nt, Artificial Sequence
  Description of Artificial Sequence: Synthetic oligonucleotide
ccccaacuccaaguuaucc

SEQ ID NO: 2491820 - RNA, 19 nt, Artificial Sequence
  Description of Artificial Sequence: Synthetic oligonucleotide
guuguggccagaagccucu

SEQ ID NO: 2491821 - RNA, 19 nt, Artificial Sequence
  Description of Artificial Sequence: Synthetic oligonucleotide
ugcugccuccagugcuucu

SEQ ID NO: 2491822 - RNA, 19 nt, Artificial Sequence
  Description of Artificial Sequence: Synthetic oligonucleotide
gcggauugcaggacaacca

SEQ ID NO: 2491823 - RNA, 19 nt, Artificial Sequence
  Description of Artificial Sequence: Synthetic oligonucleotide
gcaggacaaccaccuacac

SEQ ID NO: 2491824 - RNA, 19 nt, Artificial Sequence
  Description of Artificial Sequence: Synthetic oligonucleotide
ggccucaccguuguggcca

SEQ ID NO: 2491825 - RNA, 19 nt, Artificial Sequence
  Description of Artificial Sequence: Synthetic oligonucleotide
cccuaccaaggaaucugag

SEQ ID NO: 2491826 - RNA, 19 nt, Artificial Sequence
  Description of Artificial Sequence: Synthetic oligonucleotide
ucguggggaugcugccgga

SEQ ID NO: 2491827 - RNA, 19 nt, Artificial Sequence
  Description of Artificial Sequence: Synthetic oligonucleotide
caagaagcuuuuggaacua

SEQ ID NO: 2491828 - RNA, 19 nt, Artificial Sequence
  Description of Artificial Sequence: Synthetic oligonucleotide
gcauucaagcaaauaccaa

SEQ ID NO: 2491829 - RNA, 19 nt, Artificial Sequence
  Description of Artificial Sequence: Synthetic oligonucleotide
gugccccuccuagugacca

SEQ ID NO: 2491830 - RNA, 19 nt, Artificial Sequence
  Description of Artificial Sequence: Synthetic oligonucleotide
gcucccuggccuucaugcc

SEQ ID NO: 2491831 - RNA, 19 nt, Artificial Sequence
  Description of Artificial Sequence: Synthetic oligonucleotide
cagucucaugaagggugac

SEQ ID NO: 2491832 - RNA, 19 nt, Artificial Sequence
  Description of Artificial Sequence: Synthetic oligonucleotide
cugcuccuccauaaugugu

SEQ ID NO: 2491833 - RNA, 19 nt, Artificial Sequence
  Description of Artificial Sequence: Synthetic oligonucleotide
ugccugagucucugcccaa

SEQ ID NO: 2491834 - RNA, 19 nt, Artificial Sequence
  Description of Artificial Sequence: Synthetic oligonucleotide
ugccggucacacaguccuc

SEQ ID NO: 2491835 - RNA, 19 nt, Artificial Sequence
  Description of Artificial Sequence: Synthetic oligonucleotide
ugccccuccuagugaccac

SEQ ID NO: 2491836 - RNA, 19 nt, Artificial Sequence
  Description of Artificial Sequence: Synthetic oligonucleotide
cccacccacaggcagcaug

SEQ ID NO: 2491837 - RNA, 19 nt, Artificial Sequence
  Description of Artificial Sequence: Synthetic oligonucleotide
gguccuggccucaccguug

SEQ ID NO: 2491838 - RNA, 19 nt, Artificial Sequence
  Description of Artificial Sequence: Synthetic oligonucleotide
uccuggccucaccguugug

SEQ ID NO: 2491839 - RNA, 19 nt, Artificial Sequence
  Description of Artificial Sequence: Synthetic oligonucleotide
cguuguggccagaagccuc

SEQ ID NO: 2491840 - RNA, 19 nt, Artificial Sequence
  Description of Artificial Sequence: Synthetic oligonucleotide
ccagucucaugaaggguga

SEQ ID NO: 2491841 - RNA, 19 nt, Artificial Sequence
  Description of Artificial Sequence: Synthetic oligonucleotide
cucaccguuguggccagaa

SEQ ID NO: 2491842 - RNA, 19 nt, Artificial Sequence
  Description of Artificial Sequence: Synthetic oligonucleotide
cacacuggcucucacucuu

SEQ ID NO: 2491843 - RNA, 19 nt, Artificial Sequence
  Description of Artificial Sequence: Synthetic oligonucleotide
ccacuaggccugguggucc

SEQ ID NO: 2491844 - RNA, 19 nt, Artificial Sequence
  Description of Artificial Sequence: Synthetic oligonucleotide
ggacaaccaccuacacacc

SEQ ID NO: 2491845 - RNA, 19 nt, Artificial Sequence
  Description of Artificial Sequence: Synthetic oligonucleotide
cucuucucagucugcggau

SEQ ID NO: 2491846 - RNA, 19 nt, Artificial Sequence
  Description of Artificial Sequence: Synthetic oligonucleotide
cagaaaggcuacugccggu

SEQ ID NO: 2491847 - RNA, 19 nt, Artificial Sequence
  Description of Artificial Sequence: Synthetic oligonucleotide
acuaggccuggugguccug

SEQ ID NO: 2491848 - RNA, 19 nt, Artificial Sequence
  Description of Artificial Sequence: Synthetic oligonucleotide
acucugucuuagggucuca

SEQ ID NO: 2491849 - RNA, 19 nt, Artificial Sequence
  Description of Artificial Sequence: Synthetic oligonucleotide
cuucaugcccaagaagcuu

SEQ ID NO: 2491850 - RNA, 19 nt, Artificial Sequence
  Description of Artificial Sequence: Synthetic oligonucleotide
aggcagcauggugccagca

SEQ ID NO: 2491851 - RNA, 19 nt, Artificial Sequence
  Description of Artificial Sequence: Synthetic oligonucleotide
cugccggagggcucaccca

SEQ ID NO: 2491852 - RNA, 19 nt, Artificial Sequence
  Description of Artificial Sequence: Synthetic oligonucleotide
cacccacccacaggcagca

SEQ ID NO: 2491853 - RNA, 19 nt, Artificial Sequence
  Description of Artificial Sequence: Synthetic oligonucleotide
cccaacucugucuuagggu

SEQ ID NO: 2491854 - RNA, 19 nt, Artificial Sequence
  Description of Artificial Sequence: Synthetic oligonucleotide
ccugucugccuccagccaa

SEQ ID NO: 2491855 - RNA, 19 nt, Artificial Sequence
  Description of Artificial Sequence: Synthetic oligonucleotide
guccagucucaugaagggu

SEQ ID NO: 2491856 - RNA, 19 nt, Artificial Sequence
  Description of Artificial Sequence: Synthetic oligonucleotide
cagugguuucccaccggcu

SEQ ID NO: 2491857 - RNA, 19 nt, Artificial Sequence
  Description of Artificial Sequence: Synthetic oligonucleotide
cucugcccaacucugucuu

SEQ ID NO: 2491858 - RNA, 19 nt, Artificial Sequence
  Description of Artificial Sequence: Synthetic oligonucleotide
cacccacagugguuuccca

SEQ ID NO: 2491859 - RNA, 19 nt, Artificial Sequence
  Description of Artificial Sequence: Synthetic oligonucleotide
gccggucacacaguccuca

SEQ ID NO: 2491860 - RNA, 19 nt, Artificial Sequence
  Description of Artificial Sequence: Synthetic oligonucleotide
cuggugguccuggccucac

SEQ ID NO: 2491861 - RNA, 19 nt, Artificial Sequence
  Description of Artificial Sequence: Synthetic oligonucleotide
ugcugccggagggcucacc

SEQ ID NO: 2491862 - RNA, 19 nt, Artificial Sequence
  Description of Artificial Sequence: Synthetic oligonucleotide
gcauggugccagcauucaa

SEQ ID NO: 2491863 - RNA, 19 nt, Artificial Sequence
  Description of Artificial Sequence: Synthetic oligonucleotide
guccuggccucaccguugu

SEQ ID NO: 2491864 - RNA, 19 nt, Artificial Sequence
  Description of Artificial Sequence: Synthetic oligonucleotide
gugguccuggccucaccgu

SEQ ID NO: 2491865 - RNA, 19 nt, Artificial Sequence
  Description of Artificial Sequence: Synthetic oligonucleotide
gccacuaggccuggugguc

SEQ ID NO: 2491866 - RNA, 19 nt, Artificial Sequence
  Description of Artificial Sequence: Synthetic oligonucleotide
cuggaguggaaagcucacu

SEQ ID NO: 2491867 - RNA, 19 nt, Artificial Sequence
  Description of Artificial Sequence: Synthetic oligonucleotide
ccaccuacacacccaccca

SEQ ID NO: 2491868 - RNA, 19 nt, Artificial Sequence
  Description of Artificial Sequence: Synthetic oligonucleotide
gcccuaccaaggaaucuga

SEQ ID NO: 2491869 - RNA, 19 nt, Artificial Sequence
  Description of Artificial Sequence: Synthetic oligonucleotide
gccucaccguuguggccag

SEQ ID NO: 2491870 - RNA, 19 nt, Artificial Sequence
  Description of Artificial Sequence: Synthetic oligonucleotide
ggccacuaggccugguggu

SEQ ID NO: 2491871 - RNA, 19 nt, Artificial Sequence
  Description of Artificial Sequence: Synthetic oligonucleotide
ggcuacugccggucacaca

SEQ ID NO: 2491872 - RNA, 19 nt, Artificial Sequence
  Description of Artificial Sequence: Synthetic oligonucleotide
augcugccggagggcucac

SEQ ID NO: 2491873 - RNA, 19 nt, Artificial Sequence
  Description of Artificial Sequence: Synthetic oligonucleotide
gccugucugccuccagcca

SEQ ID NO: 2491874 - RNA, 19 nt, Artificial Sequence
  Description of Artificial Sequence: Synthetic oligonucleotide
gccugagucucugcccaac

SEQ ID NO: 2491875 - RNA, 19 nt, Artificial Sequence
  Description of Artificial Sequence: Synthetic oligonucleotide
ccucaucacacuggcucuc

SEQ ID NO: 2491876 - RNA, 19 nt, Artificial Sequence
  Description of Artificial Sequence: Synthetic oligonucleotide
gggugaccacugaaucuuc

SEQ ID NO: 2491877 - RNA, 19 nt, Artificial Sequence
  Description of Artificial Sequence: Synthetic oligonucleotide
cacuaggccuggugguccu

SEQ ID NO: 2491878 - RNA, 19 nt, Artificial Sequence
  Description of Artificial Sequence: Synthetic oligonucleotide
uuguggccagaagccucuu

SEQ ID NO: 2491879 - RNA, 19 nt, Artificial Sequence
  Description of Artificial Sequence: Synthetic oligonucleotide
cuacugccggucacacagu

SEQ ID NO: 2491880 - RNA, 19 nt, Artificial Sequence
  Description of Artificial Sequence: Synthetic oligonucleotide
cacuggcucucacucuuau

SEQ ID NO: 2491881 - RNA, 19 nt, Artificial Sequence
  Description of Artificial Sequence: Synthetic oligonucleotide
ggcucacccacagugguuu

SEQ ID NO: 2491882 - RNA, 19 nt, Artificial Sequence
  Description of Artificial Sequence: Synthetic oligonucleotide
gcucacccacagugguuuc

SEQ ID NO: 2491883 - RNA, 19 nt, Artificial Sequence
  Description of Artificial Sequence: Synthetic oligonucleotide
ccaccggcuguugaaccuc

SEQ ID NO: 2491884 - RNA, 19 nt, Artificial Sequence
  Description of Artificial Sequence: Synthetic oligonucleotide
ggccagaagccucuucauu

SEQ ID NO: 2491885 - RNA, 19 nt, Artificial Sequence
  Description of Artificial Sequence: Synthetic oligonucleotide
caccggcuguugaaccucu

SEQ ID NO: 2491886 - RNA, 19 nt, Artificial Sequence
  Description of Artificial Sequence: Synthetic oligonucleotide
cacugcugcugcugcugcu

SEQ ID NO: 2491887 - RNA, 19 nt, Artificial Sequence
  Description of Artificial Sequence: Synthetic oligonucleotide
gcugcugcugcugcugccu

SEQ ID NO: 2491888 - RNA, 19 nt, Artificial Sequence
  Description of Artificial Sequence: Synthetic oligonucleotide
cguggggaugcugccggag

SEQ ID NO: 2491889 - RNA, 19 nt, Artificial Sequence
  Description of Artificial Sequence: Synthetic oligonucleotide
ccuccuagugaccacucuu

SEQ ID NO: 2491890 - RNA, 19 nt, Artificial Sequence
  Description of Artificial Sequence: Synthetic oligonucleotide
ccuccauaauguguuuugu

SEQ ID NO: 2491891 - RNA, 19 nt, Artificial Sequence
  Description of Artificial Sequence: Synthetic oligonucleotide
ccaccccaacuccaaguua

SEQ ID NO: 2491892 - RNA, 19 nt, Artificial Sequence
  Description of Artificial Sequence: Synthetic oligonucleotide
ggguuucucuggaguggaa

SEQ ID NO: 2491893 - RNA, 19 nt, Artificial Sequence
  Description of Artificial Sequence: Synthetic oligonucleotide
gggucucagaaaggcuacu

SEQ ID NO: 2491894 - RNA, 19 nt, Artificial Sequence
  Description of Artificial Sequence: Synthetic oligonucleotide
gcuccuccauaauguguuu

SEQ ID NO: 2491895 - RNA, 19 nt, Artificial Sequence
  Description of Artificial Sequence: Synthetic oligonucleotide
caacagucguggggaugcu

SEQ ID NO: 2491896 - RNA, 19 nt, Artificial Sequence
  Description of Artificial Sequence: Synthetic oligonucleotide
gccccuccuagugaccacu

SEQ ID NO: 2491897 - RNA, 19 nt, Artificial Sequence
  Description of Artificial Sequence: Synthetic oligonucleotide
ccuggugguccuggccuca

SEQ ID NO: 2491898 - RNA, 19 nt, Artificial Sequence
  Description of Artificial Sequence: Synthetic oligonucleotide
gccggagggcucacccaca

SEQ ID NO: 2491899 - RNA, 19 nt, Artificial Sequence
  Description of Artificial Sequence: Synthetic oligonucleotide
cacccacaggcagcauggu

SEQ ID NO: 2491900 - RNA, 19 nt, Artificial Sequence
  Description of Artificial Sequence: Synthetic oligonucleotide
cccuccuagugaccacucu

SEQ ID NO: 2491901 - RNA, 19 nt, Artificial Sequence
  Description of Artificial Sequence: Synthetic oligonucleotide
gggcucacccacagugguu

SEQ ID NO: 2491902 - RNA, 19 nt, Artificial Sequence
  Description of Artificial Sequence: Synthetic oligonucleotide
ccggucacacaguccucau

SEQ ID NO: 2491903 - RNA, 19 nt, Artificial Sequence
  Description of Artificial Sequence: Synthetic oligonucleotide
ccucaccguuguggccaga

SEQ ID NO: 2491904 - RNA, 19 nt, Artificial Sequence
  Description of Artificial Sequence: Synthetic oligonucleotide
aacuuuaacagucaauggg

SEQ ID NO: 2491905 - RNA, 19 nt, Artificial Sequence
  Description of Artificial Sequence: Synthetic oligonucleotide
aaagacuccauguaacagc

SEQ ID NO: 2491906 - RNA, 19 nt, Artificial Sequence
  Description of Artificial Sequence: Synthetic oligonucleotide
aaaggugcaaucucugucc

SEQ ID NO: 2491907 - RNA, 19 nt, Artificial Sequence
  Description of Artificial Sequence: Synthetic oligonucleotide
guuaaaacccaacagaaag

SEQ ID NO: 2491908 - RNA, 19 nt, Artificial Sequence
  Description of Artificial Sequence: Synthetic oligonucleotide
uuaaaacccaacagaaagg

SEQ ID NO: 2491909 - RNA, 19 nt, Artificial Sequence
  Description of Artificial Sequence: Synthetic oligonucleotide
agaaaauccagcugcuugc

SEQ ID NO: 2491910 - RNA, 19 nt, Artificial Sequence
  Description of Artificial Sequence: Synthetic oligonucleotide
aaagggacacuuaugaccg

SEQ ID NO: 2491911 - RNA, 19 nt, Artificial Sequence
  Description of Artificial Sequence: Synthetic oligonucleotide
aucaccaagguuaaaaccc

SEQ ID NO: 2491912 - RNA, 19 nt, Artificial Sequence
  Description of Artificial Sequence: Synthetic oligonucleotide
uacacuaacuuuaacaguc

SEQ ID NO: 2491913 - RNA, 19 nt, Artificial Sequence
  Description of Artificial Sequence: Synthetic oligonucleotide
uuuacagaaaucuuguuua

SEQ ID NO: 2491914 - RNA, 19 nt, Artificial Sequence
  Description of Artificial Sequence: Synthetic oligonucleotide
caaagggacacuuaugacc

SEQ ID NO: 2491915 - RNA, 19 nt, Artificial Sequence
  Description of Artificial Sequence: Synthetic oligonucleotide
agcagaaucaggaaagugc

SEQ ID NO: 2491916 - RNA, 19 nt, Artificial Sequence
  Description of Artificial Sequence: Synthetic oligonucleotide
uguguauacacuaacuuua

SEQ ID NO: 2491917 - RNA, 19 nt, Artificial Sequence
  Description of Artificial Sequence: Synthetic oligonucleotide
aaauccagcugcuugcaag

SEQ ID NO: 2491918 - RNA, 19 nt, Artificial Sequence
  Description of Artificial Sequence: Synthetic oligonucleotide
gagacuuuuccauaaagac

SEQ ID NO: 2491919 - RNA, 19 nt, Artificial Sequence
  Description of Artificial Sequence: Synthetic oligonucleotide
aaugcaaagggacacuuau

SEQ ID NO: 2491920 - RNA, 19 nt, Artificial Sequence
  Description of Artificial Sequence: Synthetic oligonucleotide
aauaaagugugugugugug

SEQ ID NO: 2491921 - RNA, 19 nt, Artificial Sequence
  Description of Artificial Sequence: Synthetic oligonucleotide
acagaaaggaguuggugcg

SEQ ID NO: 2491922 - RNA, 19 nt, Artificial Sequence
  Description of Artificial Sequence: Synthetic oligonucleotide
guauacacuaacuuuaaca

SEQ ID NO: 2491923 - RNA, 19 nt, Artificial Sequence
  Description of Artificial Sequence: Synthetic oligonucleotide
uuaacagucaaugggagac

SEQ ID NO: 2491924 - RNA, 19 nt, Artificial Sequence
  Description of Artificial Sequence: Synthetic oligonucleotide
uguuacuggcagaaaaucc

SEQ ID NO: 2491925 - RNA, 19 nt, Artificial Sequence
  Description of Artificial Sequence: Synthetic oligonucleotide
auggggacauuacagaggg

SEQ ID NO: 2491926 - RNA, 19 nt, Artificial Sequence
  Description of Artificial Sequence: Synthetic oligonucleotide
uggcagaaaauccagcugc

SEQ ID NO: 2491927 - RNA, 19 nt, Artificial Sequence
  Description of Artificial Sequence: Synthetic oligonucleotide
aaaucuuguuuacaugcgu

SEQ ID NO: 2491928 - RNA, 19 nt, Artificial Sequence
  Description of Artificial Sequence: Synthetic oligonucleotide
aaacccaacagaaaggagu

SEQ ID NO: 2491929 - RNA, 19 nt, Artificial Sequence
  Description of Artificial Sequence: Synthetic oligonucleotide
aaucuuguuuacaugcguc

SEQ ID NO: 2491930 - RNA, 19 nt, Artificial Sequence
  Description of Artificial Sequence: Synthetic oligonucleotide
agaaucaggaaagugccgg

SEQ ID NO: 2491931 - RNA, 19 nt, Artificial Sequence
  Description of Artificial Sequence: Synthetic oligonucleotide
aaauaaagugugugugugu

SEQ ID NO: 2491932 - RNA, 19 nt, Artificial Sequence
  Description of Artificial Sequence: Synthetic oligonucleotide
ugugugaaaaccuucuuuu

SEQ ID NO: 2491933 - RNA, 19 nt, Artificial Sequence
  Description of Artificial Sequence: Synthetic oligonucleotide
cauggcauugugcacaagc

SEQ ID NO: 2491934 - RNA, 19 nt, Artificial Sequence
  Description of Artificial Sequence: Synthetic oligonucleotide
ucuugaaugcaaagggaca

SEQ ID NO: 2491935 - RNA, 19 nt, Artificial Sequence
  Description of Artificial Sequence: Synthetic oligonucleotide
uggugcgagguccagacag

SEQ ID NO: 2491936 - RNA, 19 nt, Artificial Sequence
  Description of Artificial Sequence: Synthetic oligonucleotide
uguguguauacacuaacuu

SEQ ID NO: 2491937 - RNA, 19 nt, Artificial Sequence
  Description of Artificial Sequence: Synthetic oligonucleotide
gaaaucuuguuuacaugcg

SEQ ID NO: 2491938 - RNA, 19 nt, Artificial Sequence
  Description of Artificial Sequence: Synthetic oligonucleotide
ucaggaaagugccggaggc

SEQ ID NO: 2491939 - RNA, 19 nt, Artificial Sequence
  Description of Artificial Sequence: Synthetic oligonucleotide
uuuugagcaucgaugugug

SEQ ID NO: 2491940 - RNA, 19 nt, Artificial Sequence
  Description of Artificial Sequence: Synthetic oligonucleotide
acacuuaugaccggcauag

SEQ ID NO: 2491941 - RNA, 19 nt, Artificial Sequence
  Description of Artificial Sequence: Synthetic oligonucleotide
uuacuggcagaaaauccag

SEQ ID NO: 2491942 - RNA, 19 nt, Artificial Sequence
  Description of Artificial Sequence: Synthetic oligonucleotide
cuuuaacagucaaugggag

SEQ ID NO: 2491943 - RNA, 19 nt, Artificial Sequence
  Description of Artificial Sequence: Synthetic oligonucleotide
uguguguguauacacuaac

SEQ ID NO: 2491944 - RNA, 19 nt, Artificial Sequence
  Description of Artificial Sequence: Synthetic oligonucleotide
gucaaugggagacuuuucc

SEQ ID NO: 2491945 - RNA, 19 nt, Artificial Sequence
  Description of Artificial Sequence: Synthetic oligonucleotide
uaaagugugugugugugug

SEQ ID NO: 2491946 - RNA, 19 nt, Artificial Sequence
  Description of Artificial Sequence: Synthetic oligonucleotide
ucuccaaccaccacaucug

SEQ ID NO: 2491947 - RNA, 19 nt, Artificial Sequence
  Description of Artificial Sequence: Synthetic oligonucleotide
uuuaacagucaaugggaga

SEQ ID NO: 2491948 - RNA, 19 nt, Artificial Sequence
  Description of Artificial Sequence: Synthetic oligonucleotide
uccauguaacagcagaauc

SEQ ID NO: 2491949 - RNA, 19 nt, Artificial Sequence
  Description of Artificial Sequence: Synthetic oligonucleotide
auggucuuuacagaaaucu

SEQ ID NO: 2491950 - RNA, 19 nt, Artificial Sequence
  Description of Artificial Sequence: Synthetic oligonucleotide
acaucugggaucucgccuc

SEQ ID NO: 2491951 - RNA, 19 nt, Artificial Sequence
  Description of Artificial Sequence: Synthetic oligonucleotide
acuggcagaaaauccagcu

SEQ ID NO: 2491952 - RNA, 19 nt, Artificial Sequence
  Description of Artificial Sequence: Synthetic oligonucleotide
gugaaauaaagugugugug

SEQ ID NO: 2491953 - RNA, 19 nt, Artificial Sequence
  Description of Artificial Sequence: Synthetic oligonucleotide
uguguguguguguauacac

SEQ ID NO: 2491954 - RNA, 19 nt, Artificial Sequence
  Description of Artificial Sequence: Synthetic oligonucleotide
aggaguuggugcgaggucc

SEQ ID NO: 2491955 - RNA, 19 nt, Artificial Sequence
  Description of Artificial Sequence: Synthetic oligonucleotide
acuuaugaccggcauagga

SEQ ID NO: 2491956 - RNA, 19 nt, Artificial Sequence
  Description of Artificial Sequence: Synthetic oligonucleotide
gaaaggugcaaucucuguc

SEQ ID NO: 2491957 - RNA, 19 nt, Artificial Sequence
  Description of Artificial Sequence: Synthetic oligonucleotide
aaggucucucuuugcuggc

SEQ ID NO: 2491958 - RNA, 19 nt, Artificial Sequence
  Description of Artificial Sequence: Synthetic oligonucleotide
acauguuacuggcagaaaa

SEQ ID NO: 2491959 - RNA, 19 nt, Artificial Sequence
  Description of Artificial Sequence: Synthetic oligonucleotide
agaggggacacacgggaac

SEQ ID NO: 2491960 - RNA, 19 nt, Artificial Sequence
  Description of Artificial Sequence: Synthetic oligonucleotide
ucaaugggagacuuuucca

SEQ ID NO: 2491961 - RNA, 19 nt, Artificial Sequence
  Description of Artificial Sequence: Synthetic oligonucleotide
acuuuaacagucaauggga

SEQ ID NO: 2491962 - RNA, 19 nt, Artificial Sequence
  Description of Artificial Sequence: Synthetic oligonucleotide
aucaggaaagugccggagg

SEQ ID NO: 2491963 - RNA, 19 nt, Artificial Sequence
  Description of Artificial Sequence: Synthetic oligonucleotide
ucuuuucauagggaugggg

SEQ ID NO: 2491964 - RNA, 19 nt, Artificial Sequence
  Description of Artificial Sequence: Synthetic oligonucleotide
uuaugaccggcauaggaaa

SEQ ID NO: 2491965 - RNA, 19 nt, Artificial Sequence
  Description of Artificial Sequence: Synthetic oligonucleotide
cuuuucauagggaugggga

SEQ ID NO: 2491966 - RNA, 19 nt, Artificial Sequence
  Description of Artificial Sequence: Synthetic oligonucleotide
cucgccucuuuucauaggg

SEQ ID NO: 2491967 - RNA, 19 nt, Artificial Sequence
  Description of Artificial Sequence: Synthetic oligonucleotide
acugauuccugacggcuuc

SEQ ID NO: 2491968 - RNA, 19 nt, Artificial Sequence
  Description of Artificial Sequence: Synthetic oligonucleotide
guuuacaugcgucacaugu

SEQ ID NO: 2491969 - RNA, 19 nt, Artificial Sequence
  Description of Artificial Sequence: Synthetic oligonucleotide
uuacaugcgucacauguua

SEQ ID NO: 2491970 - RNA, 19 nt, Artificial Sequence
  Description of Artificial Sequence: Synthetic oligonucleotide
ugcgucacauguuacuggc

SEQ ID NO: 2491971 - RNA, 19 nt, Artificial Sequence
  Description of Artificial Sequence: Synthetic oligonucleotide
ugcagaaguugccauggca

SEQ ID NO: 2491972 - RNA, 19 nt, Artificial Sequence
  Description of Artificial Sequence: Synthetic oligonucleotide
uguauacacuaacuuuaac

SEQ ID NO: 2491973 - RNA, 19 nt, Artificial Sequence
  Description of Artificial Sequence: Synthetic oligonucleotide
auguuacuggcagaaaauc

SEQ ID NO: 2491974 - RNA, 19 nt, Artificial Sequence
  Description of Artificial Sequence: Synthetic oligonucleotide
aaggaguuggugcgagguc

SEQ ID NO: 2491975 - RNA, 19 nt, Artificial Sequence
  Description of Artificial Sequence: Synthetic oligonucleotide
gaaugcagaaguugccaug

SEQ ID NO: 2491976 - RNA, 19 nt, Artificial Sequence
  Description of Artificial Sequence: Synthetic oligonucleotide
agugccggaggccacauca

SEQ ID NO: 2491977 - RNA, 19 nt, Artificial Sequence
  Description of Artificial Sequence: Synthetic oligonucleotide
aagacuccauguaacagca

SEQ ID NO: 2491978 - RNA, 19 nt, Artificial Sequence
  Description of Artificial Sequence: Synthetic oligonucleotide
uccugcaucccucuuuuga

SEQ ID NO: 2491979 - RNA, 19 nt, Artificial Sequence
  Description of Artificial Sequence: Synthetic oligonucleotide
ugcugaaggucucucuuug

SEQ ID NO: 2491980 - RNA, 19 nt, Artificial Sequence
  Description of Artificial Sequence: Synthetic oligonucleotide
aucuuguuuacaugcguca

SEQ ID NO: 2491981 - RNA, 19 nt, Artificial Sequence
  Description of Artificial Sequence: Synthetic oligonucleotide
aaugggagacuuuuccaua

SEQ ID NO: 2491982 - RNA, 19 nt, Artificial Sequence
  Description of Artificial Sequence: Synthetic oligonucleotide
agcaucgaugugugaaaac

SEQ ID NO: 2491983 - RNA, 19 nt, Artificial Sequence
  Description of Artificial Sequence: Synthetic oligonucleotide
uugagcaucgaugugugaa

SEQ ID NO: 2491984 - RNA, 19 nt, Artificial Sequence
  Description of Artificial Sequence: Synthetic oligonucleotide
ugggccagccaacugauuc

SEQ ID NO: 2491985 - RNA, 19 nt, Artificial Sequence
  Description of Artificial Sequence: Synthetic oligonucleotide
aagugugugugugugugug

SEQ ID NO: 2491986 - RNA, 19 nt, Artificial Sequence
  Description of Artificial Sequence: Synthetic oligonucleotide
auuccugacggcuucugcu

SEQ ID NO: 2491987 - RNA, 19 nt, Artificial Sequence
  Description of Artificial Sequence: Synthetic oligonucleotide
guuacuggcagaaaaucca

SEQ ID NO: 2491988 - RNA, 19 nt, Artificial Sequence
  Description of Artificial Sequence: Synthetic oligonucleotide
uuucauagggauggggaca

SEQ ID NO: 2491989 - RNA, 19 nt, Artificial Sequence
  Description of Artificial Sequence: Synthetic oligonucleotide
ugcaucccucuuuugagca

SEQ ID NO: 2491990 - RNA, 19 nt, Artificial Sequence
  Description of Artificial Sequence: Synthetic oligonucleotide
ugucacuucacgguucgcc

SEQ ID NO: 2491991 - RNA, 19 nt, Artificial Sequence
  Description of Artificial Sequence: Synthetic oligonucleotide
aaccugcacauccuucuug

SEQ ID NO: 2491992 - RNA, 19 nt, Artificial Sequence
  Description of Artificial Sequence: Synthetic oligonucleotide
ugaaaggugcaaucucugu

SEQ ID NO: 2491993 - RNA, 19 nt, Artificial Sequence
  Description of Artificial Sequence: Synthetic oligonucleotide
ucuuuugagcaucgaugug

SEQ ID NO: 2491994 - RNA, 19 nt, Artificial Sequence
  Description of Artificial Sequence: Synthetic oligonucleotide
cagugcuuccccaagucag

SEQ ID NO: 2491995 - RNA, 19 nt, Artificial Sequence
  Description of Artificial Sequence: Synthetic oligonucleotide
gcaguugugguccagagga

SEQ ID NO: 2491996 - RNA, 19 nt, Artificial Sequence
  Description of Artificial Sequence: Synthetic oligonucleotide
uuuacaugcgucacauguu

SEQ ID NO: 2491997 - RNA, 19 nt, Artificial Sequence
  Description of Artificial Sequence: Synthetic oligonucleotide
ugagcagugcuuccccaag

SEQ ID NO: 2491998 - RNA, 19 nt, Artificial Sequence
  Description of Artificial Sequence: Synthetic oligonucleotide
ucuuugcuggccgagcugc

SEQ ID NO: 2491999 - RNA, 19 nt, Artificial Sequence
  Description of Artificial Sequence: Synthetic oligonucleotide
uugcaagucgguucugagc

SEQ ID NO: 2492000 - RNA, 19 nt, Artificial Sequence
  Description of Artificial Sequence: Synthetic oligonucleotide
cuuaugaccggcauaggaa

SEQ ID NO: 2492001 - RNA, 19 nt, Artificial Sequence
  Description of Artificial Sequence: Synthetic oligonucleotide
cacgggaaccugcacaucc

SEQ ID NO: 2492002 - RNA, 19 nt, Artificial Sequence
  Description of Artificial Sequence: Synthetic oligonucleotide
uucacgguucgccugaguu

SEQ ID NO: 2492003 - RNA, 19 nt, Artificial Sequence
  Description of Artificial Sequence: Synthetic oligonucleotide
uagggauggggacauuaca

SEQ ID NO: 2492004 - RNA, 19 nt, Artificial Sequence
  Description of Artificial Sequence: Synthetic oligonucleotide
agccaacugauuccugacg

SEQ ID NO: 2492005 - RNA, 19 nt, Artificial Sequence
  Description of Artificial Sequence: Synthetic oligonucleotide
aaagugugugugugugugu

SEQ ID NO: 2492006 - RNA, 19 nt, Artificial Sequence
  Description of Artificial Sequence: Synthetic oligonucleotide
augcgucacauguuacugg

SEQ ID NO: 2492007 - RNA, 19 nt, Artificial Sequence
  Description of Artificial Sequence: Synthetic oligonucleotide
ugaaugcagaaguugccau

SEQ ID NO: 2492008 - RNA, 19 nt, Artificial Sequence
  Description of Artificial Sequence: Synthetic oligonucleotide
ucgaugugugaaaaccuuc

SEQ ID NO: 2492009 - RNA, 19 nt, Artificial Sequence
  Description of Artificial Sequence: Synthetic oligonucleotide
gccaacugauuccugacgg

SEQ ID NO: 2492010 - RNA, 19 nt, Artificial Sequence
  Description of Artificial Sequence: Synthetic oligonucleotide
guuggugcgagguccagac

SEQ ID NO: 2492011 - RNA, 19 nt, Artificial Sequence
  Description of Artificial Sequence: Synthetic oligonucleotide
uuguuuacaugcgucacau

SEQ ID NO: 2492012 - RNA, 19 nt, Artificial Sequence
  Description of Artificial Sequence: Synthetic oligonucleotide
agggacacuuaugaccggc

SEQ ID NO: 2492013 - RNA, 19 nt, Artificial Sequence
  Description of Artificial Sequence: Synthetic oligonucleotide
uacagaaaucuuguuuaca

SEQ ID NO: 2492014 - RNA, 19 nt, Artificial Sequence
  Description of Artificial Sequence: Synthetic oligonucleotide
gaaaggaguuggugcgagg

SEQ ID NO: 2492015 - RNA, 19 nt, Artificial Sequence
  Description of Artificial Sequence: Synthetic oligonucleotide
uacuggcagaaaauccagc

SEQ ID NO: 2492016 - RNA, 19 nt, Artificial Sequence
  Description of Artificial Sequence: Synthetic oligonucleotide
uguccaugugcucuccaac

SEQ ID NO: 2492017 - RNA, 19 nt, Artificial Sequence
  Description of Artificial Sequence: Synthetic oligonucleotide
aaggugcaaucucugucca

SEQ ID NO: 2492018 - RNA, 19 nt, Artificial Sequence
  Description of Artificial Sequence: Synthetic oligonucleotide
ucacauguuacuggcagaa

SEQ ID NO: 2492019 - RNA, 19 nt, Artificial Sequence
  Description of Artificial Sequence: Synthetic oligonucleotide
aucucgccucuuuucauag

SEQ ID NO: 2492020 - RNA, 19 nt, Artificial Sequence
  Description of Artificial Sequence: Synthetic oligonucleotide
augugugaaaaccuucuuu

SEQ ID NO: 2492021 - RNA, 19 nt, Artificial Sequence
  Description of Artificial Sequence: Synthetic oligonucleotide
cuugcaagucgguucugag

SEQ ID NO: 2492022 - RNA, 19 nt, Artificial Sequence
  Description of Artificial Sequence: Synthetic oligonucleotide
agguuaaaacccaacagaa

SEQ ID NO: 2492023 - RNA, 19 nt, Artificial Sequence
  Description of Artificial Sequence: Synthetic oligonucleotide
acaugcgucacauguuacu

SEQ ID NO: 2492024 - RNA, 19 nt, Artificial Sequence
  Description of Artificial Sequence: Synthetic oligonucleotide
ccucuuuucauagggaugg

SEQ ID NO: 2492025 - RNA, 19 nt, Artificial Sequence
  Description of Artificial Sequence: Synthetic oligonucleotide
guccaugugcucuccaacc

SEQ ID NO: 2492026 - RNA, 19 nt, Artificial Sequence
  Description of Artificial Sequence: Synthetic oligonucleotide
uguguguguguguguauac

SEQ ID NO: 2492027 - RNA, 19 nt, Artificial Sequence
  Description of Artificial Sequence: Synthetic oligonucleotide
agggauggggacauuacag

SEQ ID NO: 2492028 - RNA, 19 nt, Artificial Sequence
  Description of Artificial Sequence: Synthetic oligonucleotide
ucuuguuuacaugcgucac

SEQ ID NO: 2492029 - RNA, 19 nt, Artificial Sequence
  Description of Artificial Sequence: Synthetic oligonucleotide
ugugguccagaggaugccg

SEQ ID NO: 2492030 - RNA, 19 nt, Artificial Sequence
  Description of Artificial Sequence: Synthetic oligonucleotide
ucacgguucgccugaguug

SEQ ID NO: 2492031 - RNA, 19 nt, Artificial Sequence
  Description of Artificial Sequence: Synthetic oligonucleotide
ugagcaucgaugugugaaa

SEQ ID NO: 2492032 - RNA, 19 nt, Artificial Sequence
  Description of Artificial Sequence: Synthetic oligonucleotide
auaaagugugugugugugu

SEQ ID NO: 2492033 - RNA, 19 nt, Artificial Sequence
  Description of Artificial Sequence: Synthetic oligonucleotide
cagaaucaggaaagugccg

SEQ ID NO: 2492034 - RNA, 19 nt, Artificial Sequence
  Description of Artificial Sequence: Synthetic oligonucleotide
acacacgggaaccugcaca

SEQ ID NO: 2492035 - RNA, 19 nt, Artificial Sequence
  Description of Artificial Sequence: Synthetic oligonucleotide
cuucuugaaugcaaaggga

SEQ ID NO: 2492036 - RNA, 19 nt, Artificial Sequence
  Description of Artificial Sequence: Synthetic oligonucleotide
gauuccugacggcuucugc

SEQ ID NO: 2492037 - RNA, 19 nt, Artificial Sequence
  Description of Artificial Sequence: Synthetic oligonucleotide
aaaauccagcugcuugcaa

SEQ ID NO: 2492038 - RNA, 19 nt, Artificial Sequence
  Description of Artificial Sequence: Synthetic oligonucleotide
ccucuuuugagcaucgaug

SEQ ID NO: 2492039 - RNA, 19 nt, Artificial Sequence
  Description of Artificial Sequence: Synthetic oligonucleotide
aagggacacuuaugaccgg

SEQ ID NO: 2492040 - RNA, 19 nt, Artificial Sequence
  Description of Artificial Sequence: Synthetic oligonucleotide
gcaucgaugugugaaaacc

SEQ ID NO: 2492041 - RNA, 19 nt, Artificial Sequence
  Description of Artificial Sequence: Synthetic oligonucleotide
ugcucuccaaccaccacau

SEQ ID NO: 2492042 - RNA, 19 nt, Artificial Sequence
  Description of Artificial Sequence: Synthetic oligonucleotide
augcagaaguugccauggc

SEQ ID NO: 2492043 - RNA, 19 nt, Artificial Sequence
  Description of Artificial Sequence: Synthetic oligonucleotide
gacggcuucugcucaggag

SEQ ID NO: 2492044 - RNA, 19 nt, Artificial Sequence
  Description of Artificial Sequence: Synthetic oligonucleotide
aggaugccggugcugaaug

SEQ ID NO: 2492045 - RNA, 19 nt, Artificial Sequence
  Description of Artificial Sequence: Synthetic oligonucleotide
caugcgucacauguuacug

SEQ ID NO: 2492046 - RNA, 19 nt, Artificial Sequence
  Description of Artificial Sequence: Synthetic oligonucleotide
cacgguucgccugaguugc

SEQ ID NO: 2492047 - RNA, 19 nt, Artificial Sequence
  Description of Artificial Sequence: Synthetic oligonucleotide
ucugcucaggagcucugga

SEQ ID NO: 2492048 - RNA, 19 nt, Artificial Sequence
  Description of Artificial Sequence: Synthetic oligonucleotide
agucaggaaacuccauuau

SEQ ID NO: 2492049 - RNA, 19 nt, Artificial Sequence
  Description of Artificial Sequence: Synthetic oligonucleotide
uaugaccggcauaggaaaa

SEQ ID NO: 2492050 - RNA, 19 nt, Artificial Sequence
  Description of Artificial Sequence: Synthetic oligonucleotide
acaagccagcugcagcauc

SEQ ID NO: 2492051 - RNA, 19 nt, Artificial Sequence
  Description of Artificial Sequence: Synthetic oligonucleotide
ggcauugugcacaagccag

SEQ ID NO: 2492052 - RNA, 19 nt, Artificial Sequence
  Description of Artificial Sequence: Synthetic oligonucleotide
ucgccugaguugcugggcc

SEQ ID NO: 2492053 - RNA, 19 nt, Artificial Sequence
  Description of Artificial Sequence: Synthetic oligonucleotide
augggagacuuuuccauaa

SEQ ID NO: 2492054 - RNA, 19 nt, Artificial Sequence
  Description of Artificial Sequence: Synthetic oligonucleotide
cuggcagaaaauccagcug

SEQ ID NO: 2492055 - RNA, 19 nt, Artificial Sequence
  Description of Artificial Sequence: Synthetic oligonucleotide
aacccaacagaaaggaguu

SEQ ID NO: 2492056 - RNA, 19 nt, Artificial Sequence
  Description of Artificial Sequence: Synthetic oligonucleotide
uacaugcgucacauguuac

SEQ ID NO: 2492057 - RNA, 19 nt, Artificial Sequence
  Description of Artificial Sequence: Synthetic oligonucleotide
aguugugguccagaggaug

SEQ ID NO: 2492058 - RNA, 19 nt, Artificial Sequence
  Description of Artificial Sequence: Synthetic oligonucleotide
uggcaguugugguccagag

SEQ ID NO: 2492059 - RNA, 19 nt, Artificial Sequence
  Description of Artificial Sequence: Synthetic oligonucleotide
cugcaucccucuuuugagc

SEQ ID NO: 2492060 - RNA, 19 nt, Artificial Sequence
  Description of Artificial Sequence: Synthetic oligonucleotide
ucacuucacgguucgccug

SEQ ID NO: 2492061 - RNA, 19 nt, Artificial Sequence
  Description of Artificial Sequence: Synthetic oligonucleotide
gggagacuuuuccauaaag

SEQ ID NO: 2492062 - RNA, 19 nt, Artificial Sequence
  Description of Artificial Sequence: Synthetic oligonucleotide
ugugcacaagccagcugca

SEQ ID NO: 2492063 - RNA, 19 nt, Artificial Sequence
  Description of Artificial Sequence: Synthetic oligonucleotide
gaaucaggaaagugccgga

SEQ ID NO: 2492064 - RNA, 19 nt, Artificial Sequence
  Description of Artificial Sequence: Synthetic oligonucleotide
cucuuuugagcaucgaugu

SEQ ID NO: 2492065 - RNA, 19 nt, Artificial Sequence
  Description of Artificial Sequence: Synthetic oligonucleotide
caacagaaaggaguuggug

SEQ ID NO: 2492066 - RNA, 19 nt, Artificial Sequence
  Description of Artificial Sequence: Synthetic oligonucleotide
aacagucaaugggagacuu

SEQ ID NO: 2492067 - RNA, 19 nt, Artificial Sequence
  Description of Artificial Sequence: Synthetic oligonucleotide
ucucgccucuuuucauagg

SEQ ID NO: 2492068 - RNA, 19 nt, Artificial Sequence
  Description of Artificial Sequence: Synthetic oligonucleotide
cuuguuuacaugcgucaca

SEQ ID NO: 2492069 - RNA, 19 nt, Artificial Sequence
  Description of Artificial Sequence: Synthetic oligonucleotide
cuuuacagaaaucuuguuu

SEQ ID NO: 2492070 - RNA, 19 nt, Artificial Sequence
  Description of Artificial Sequence: Synthetic oligonucleotide
gcgagguccagacaggagc

SEQ ID NO: 2492071 - RNA, 19 nt, Artificial Sequence
  Description of Artificial Sequence: Synthetic oligonucleotide
uucauagggauggggacau

SEQ ID NO: 2492072 - RNA, 19 nt, Artificial Sequence
  Description of Artificial Sequence: Synthetic oligonucleotide
cccaacagaaaggaguugg

SEQ ID NO: 2492073 - RNA, 19 nt, Artificial Sequence
  Description of Artificial Sequence: Synthetic oligonucleotide
auugugcacaagccagcug

SEQ ID NO: 2492074 - RNA, 19 nt, Artificial Sequence
  Description of Artificial Sequence: Synthetic oligonucleotide
ugcgagguccagacaggag

SEQ ID NO: 2492075 - RNA, 19 nt, Artificial Sequence
  Description of Artificial Sequence: Synthetic oligonucleotide
acuaacuuuaacagucaau

SEQ ID NO: 2492076 - RNA, 19 nt, Artificial Sequence
  Description of Artificial Sequence: Synthetic oligonucleotide
uguuuacaugcgucacaug

SEQ ID NO: 2492077 - RNA, 19 nt, Artificial Sequence
  Description of Artificial Sequence: Synthetic oligonucleotide
ggugaaauaaagugugugu

SEQ ID NO: 2492078 - RNA, 19 nt, Artificial Sequence
  Description of Artificial Sequence: Synthetic oligonucleotide
ucugagcagugcuucccca

SEQ ID NO: 2492079 - RNA, 19 nt, Artificial Sequence
  Description of Artificial Sequence: Synthetic oligonucleotide
agugcuuccccaagucagg

SEQ ID NO: 2492080 - RNA, 19 nt, Artificial Sequence
  Description of Artificial Sequence: Synthetic oligonucleotide
ggugcaaucucuguccaug

SEQ ID NO: 2492081 - RNA, 19 nt, Artificial Sequence
  Description of Artificial Sequence: Synthetic oligonucleotide
agggugaaaggugcaaucu

SEQ ID NO: 2492082 - RNA, 19 nt, Artificial Sequence
  Description of Artificial Sequence: Synthetic oligonucleotide
caccacaucugggaucucg

SEQ ID NO: 2492083 - RNA, 19 nt, Artificial Sequence
  Description of Artificial Sequence: Synthetic oligonucleotide
ugccggaggccacaucacc

SEQ ID NO: 2492084 - RNA, 19 nt, Artificial Sequence
  Description of Artificial Sequence: Synthetic oligonucleotide
cagggugaaaggugcaauc

SEQ ID NO: 2492085 - RNA, 19 nt, Artificial Sequence
  Description of Artificial Sequence: Synthetic oligonucleotide
cuuuugagcaucgaugugu

SEQ ID NO: 2492086 - RNA, 19 nt, Artificial Sequence
  Description of Artificial Sequence: Synthetic oligonucleotide
uucugcucaggagcucugg

SEQ ID NO: 2492087 - RNA, 19 nt, Artificial Sequence
  Description of Artificial Sequence: Synthetic oligonucleotide
ugggaucucgccucuuuuc

SEQ ID NO: 2492088 - RNA, 19 nt, Artificial Sequence
  Description of Artificial Sequence: Synthetic oligonucleotide
uuccugacggcuucugcuc

SEQ ID NO: 2492089 - RNA, 19 nt, Artificial Sequence
  Description of Artificial Sequence: Synthetic oligonucleotide
gaaaauccagcugcuugca

SEQ ID NO: 2492090 - RNA, 19 nt, Artificial Sequence
  Description of Artificial Sequence: Synthetic oligonucleotide
cacaucaccaagguuaaaa

SEQ ID NO: 2492091 - RNA, 19 nt, Artificial Sequence
  Description of Artificial Sequence: Synthetic oligonucleotide
gggugaaauaaagugugug

SEQ ID NO: 2492092 - RNA, 19 nt, Artificial Sequence
  Description of Artificial Sequence: Synthetic oligonucleotide
ugugugugugugugugugu

SEQ ID NO: 2492093 - RNA, 19 nt, Artificial Sequence
  Description of Artificial Sequence: Synthetic oligonucleotide
ugugcucuccaaccaccac

SEQ ID NO: 2492094 - RNA, 19 nt, Artificial Sequence
  Description of Artificial Sequence: Synthetic oligonucleotide
gaggggacacacgggaacc

SEQ ID NO: 2492095 - RNA, 19 nt, Artificial Sequence
  Description of Artificial Sequence: Synthetic oligonucleotide
gugaaaggugcaaucucug

SEQ ID NO: 2492096 - RNA, 19 nt, Artificial Sequence
  Description of Artificial Sequence: Synthetic oligonucleotide
gcugucacuucacgguucg

SEQ ID NO: 2492097 - RNA, 19 nt, Artificial Sequence
  Description of Artificial Sequence: Synthetic oligonucleotide
ggagacuuuuccauaaaga

SEQ ID NO: 2492098 - RNA, 19 nt, Artificial Sequence
  Description of Artificial Sequence: Synthetic oligonucleotide
agcucuggaugcugaaggu

SEQ ID NO: 2492099 - RNA, 19 nt, Artificial Sequence
  Description of Artificial Sequence: Synthetic oligonucleotide
ggggacauuacagagggga

SEQ ID NO: 2492100 - RNA, 19 nt, Artificial Sequence
  Description of Artificial Sequence: Synthetic oligonucleotide
agguccagacaggagccac

SEQ ID NO: 2492101 - RNA, 19 nt, Artificial Sequence
  Description of Artificial Sequence: Synthetic oligonucleotide
uuugagcaucgauguguga

SEQ ID NO: 2492102 - RNA, 19 nt, Artificial Sequence
  Description of Artificial Sequence: Synthetic oligonucleotide
gugcucuccaaccaccaca

SEQ ID NO: 2492103 - RNA, 19 nt, Artificial Sequence
  Description of Artificial Sequence: Synthetic oligonucleotide
ucgccucuuuucauaggga

SEQ ID NO: 2492104 - RNA, 19 nt, Artificial Sequence
  Description of Artificial Sequence: Synthetic oligonucleotide
gacacuuaugaccggcaua

SEQ ID NO: 2492105 - RNA, 19 nt, Artificial Sequence
  Description of Artificial Sequence: Synthetic oligonucleotide
agucaaugggagacuuuuc

SEQ ID NO: 2492106 - RNA, 19 nt, Artificial Sequence
  Description of Artificial Sequence: Synthetic oligonucleotide
gugugugugugugugugug

SEQ ID NO: 2492107 - RNA, 19 nt, Artificial Sequence
  Description of Artificial Sequence: Synthetic oligonucleotide
gguucgccugaguugcugg

SEQ ID NO: 2492108 - RNA, 19 nt, Artificial Sequence
  Description of Artificial Sequence: Synthetic oligonucleotide
ggucucucuuugcuggccg

SEQ ID NO: 2492109 - RNA, 19 nt, Artificial Sequence
  Description of Artificial Sequence: Synthetic oligonucleotide
agugugugugugugugugu

SEQ ID NO: 2492110 - RNA, 19 nt, Artificial Sequence
  Description of Artificial Sequence: Synthetic oligonucleotide
ucucucuuugcuggccgag

SEQ ID NO: 2492111 - RNA, 19 nt, Artificial Sequence
  Description of Artificial Sequence: Synthetic oligonucleotide
cugaaugcagaaguugcca

SEQ ID NO: 2492112 - RNA, 19 nt, Artificial Sequence
  Description of Artificial Sequence: Synthetic oligonucleotide
guucugagcagugcuuccc

SEQ ID NO: 2492113 - RNA, 19 nt, Artificial Sequence
  Description of Artificial Sequence: Synthetic oligonucleotide
ucugggaucucgccucuuu

SEQ ID NO: 2492114 - RNA, 19 nt, Artificial Sequence
  Description of Artificial Sequence: Synthetic oligonucleotide
guguguauacacuaacuuu

SEQ ID NO: 2492115 - RNA, 19 nt, Artificial Sequence
  Description of Artificial Sequence: Synthetic oligonucleotide
uaacagucaaugggagacu

SEQ ID NO: 2492116 - RNA, 19 nt, Artificial Sequence
  Description of Artificial Sequence: Synthetic oligonucleotide
gaugccggugcugaaugca

SEQ ID NO: 2492117 - RNA, 19 nt, Artificial Sequence
  Description of Artificial Sequence: Synthetic oligonucleotide
uggggacauuacagagggg

SEQ ID NO: 2492118 - RNA, 19 nt, Artificial Sequence
  Description of Artificial Sequence: Synthetic oligonucleotide
cagccaacugauuccugac

SEQ ID NO: 2492119 - RNA, 19 nt, Artificial Sequence
  Description of Artificial Sequence: Synthetic oligonucleotide
ccugcaucccucuuuugag

SEQ ID NO: 2492120 - RNA, 19 nt, Artificial Sequence
  Description of Artificial Sequence: Synthetic oligonucleotide
ugggagacuuuuccauaaa

SEQ ID NO: 2492121 - RNA, 19 nt, Artificial Sequence
  Description of Artificial Sequence: Synthetic oligonucleotide
gaucucgccucuuuucaua

SEQ ID NO: 2492122 - RNA, 19 nt, Artificial Sequence
  Description of Artificial Sequence: Synthetic oligonucleotide
ggccacaucaccaagguua

SEQ ID NO: 2492123 - RNA, 19 nt, Artificial Sequence
  Description of Artificial Sequence: Synthetic oligonucleotide
ggcaguugugguccagagg

SEQ ID NO: 2492124 - RNA, 19 nt, Artificial Sequence
  Description of Artificial Sequence: Synthetic oligonucleotide
ccaagguuaaaacccaaca

SEQ ID NO: 2492125 - RNA, 19 nt, Artificial Sequence
  Description of Artificial Sequence: Synthetic oligonucleotide
cucuggaugcugaaggucu

SEQ ID NO: 2492126 - RNA, 19 nt, Artificial Sequence
  Description of Artificial Sequence: Synthetic oligonucleotide
uguguguguguguguguau

SEQ ID NO: 2492127 - RNA, 19 nt, Artificial Sequence
  Description of Artificial Sequence: Synthetic oligonucleotide
uugugguccagaggaugcc

SEQ ID NO: 2492128 - RNA, 19 nt, Artificial Sequence
  Description of Artificial Sequence: Synthetic oligonucleotide
aagugccggaggccacauc

SEQ ID NO: 2492129 - RNA, 19 nt, Artificial Sequence
  Description of Artificial Sequence: Synthetic oligonucleotide
gaugcugaaggucucucuu

SEQ ID NO: 2492130 - RNA, 19 nt, Artificial Sequence
  Description of Artificial Sequence: Synthetic oligonucleotide
uuggcaguugugguccaga

SEQ ID NO: 2492131 - RNA, 19 nt, Artificial Sequence
  Description of Artificial Sequence: Synthetic oligonucleotide
ggaggccacaucaccaagg

SEQ ID NO: 2492132 - RNA, 19 nt, Artificial Sequence
  Description of Artificial Sequence: Synthetic oligonucleotide
acacuaacuuuaacaguca

SEQ ID NO: 2492133 - RNA, 19 nt, Artificial Sequence
  Description of Artificial Sequence: Synthetic oligonucleotide
uucgccugaguugcugggc

SEQ ID NO: 2492134 - RNA, 19 nt, Artificial Sequence
  Description of Artificial Sequence: Synthetic oligonucleotide
aagucgguucugagcagug

SEQ ID NO: 2492135 - RNA, 19 nt, Artificial Sequence
  Description of Artificial Sequence: Synthetic oligonucleotide
gucacauguuacuggcaga

SEQ ID NO: 2492136 - RNA, 19 nt, Artificial Sequence
  Description of Artificial Sequence: Synthetic oligonucleotide
uuccccaagucaggaaacu

SEQ ID NO: 2492137 - RNA, 19 nt, Artificial Sequence
  Description of Artificial Sequence: Synthetic oligonucleotide
gaguugcugggccagccaa

SEQ ID NO: 2492138 - RNA, 19 nt, Artificial Sequence
  Description of Artificial Sequence: Synthetic oligonucleotide
gcaaagggacacuuaugac

SEQ ID NO: 2492139 - RNA, 19 nt, Artificial Sequence
  Description of Artificial Sequence: Synthetic oligonucleotide
ugauuccugacggcuucug

SEQ ID NO: 2492140 - RNA, 19 nt, Artificial Sequence
  Description of Artificial Sequence: Synthetic oligonucleotide
ucgguucugagcagugcuu

SEQ ID NO: 2492141 - RNA, 19 nt, Artificial Sequence
  Description of Artificial Sequence: Synthetic oligonucleotide
aacugauuccugacggcuu

SEQ ID NO: 2492142 - RNA, 19 nt, Artificial Sequence
  Description of Artificial Sequence: Synthetic oligonucleotide
aucgaugugugaaaaccuu

SEQ ID NO: 2492143 - RNA, 19 nt, Artificial Sequence
  Description of Artificial Sequence: Synthetic oligonucleotide
acuccauguaacagcagaa

SEQ ID NO: 2492144 - RNA, 19 nt, Artificial Sequence
  Description of Artificial Sequence: Synthetic oligonucleotide
caucgaugugugaaaaccu

SEQ ID NO: 2492145 - RNA, 19 nt, Artificial Sequence
  Description of Artificial Sequence: Synthetic oligonucleotide
gacacacgggaaccugcac

SEQ ID NO: 2492146 - RNA, 19 nt, Artificial Sequence
  Description of Artificial Sequence: Synthetic oligonucleotide
cgucacauguuacuggcag

SEQ ID NO: 2492147 - RNA, 19 nt, Artificial Sequence
  Description of Artificial Sequence: Synthetic oligonucleotide
augcugaaggucucucuuu

SEQ ID NO: 2492148 - RNA, 19 nt, Artificial Sequence
  Description of Artificial Sequence: Synthetic oligonucleotide
caucccucuuuugagcauc

SEQ ID NO: 2492149 - RNA, 19 nt, Artificial Sequence
  Description of Artificial Sequence: Synthetic oligonucleotide
gguucugagcagugcuucc

SEQ ID NO: 2492150 - RNA, 19 nt, Artificial Sequence
  Description of Artificial Sequence: Synthetic oligonucleotide
augcaaagggacacuuaug

SEQ ID NO: 2492151 - RNA, 19 nt, Artificial Sequence
  Description of Artificial Sequence: Synthetic oligonucleotide
ccaaccaccacaucuggga

SEQ ID NO: 2492152 - RNA, 19 nt, Artificial Sequence
  Description of Artificial Sequence: Synthetic oligonucleotide
gggauggggacauuacaga

SEQ ID NO: 2492153 - RNA, 19 nt, Artificial Sequence
  Description of Artificial Sequence: Synthetic oligonucleotide
gcugaaugcagaaguugcc

SEQ ID NO: 2492154 - RNA, 19 nt, Artificial Sequence
  Description of Artificial Sequence: Synthetic oligonucleotide
gcacaagccagcugcagca

SEQ ID NO: 2492155 - RNA, 19 nt, Artificial Sequence
  Description of Artificial Sequence: Synthetic oligonucleotide
ucccagggugaaaggugca

SEQ ID NO: 2492156 - RNA, 19 nt, Artificial Sequence
  Description of Artificial Sequence: Synthetic oligonucleotide
uuggugcgagguccagaca

SEQ ID NO: 2492157 - RNA, 19 nt, Artificial Sequence
  Description of Artificial Sequence: Synthetic oligonucleotide
guccagacaggagccacgc

SEQ ID NO: 2492158 - RNA, 19 nt, Artificial Sequence
  Description of Artificial Sequence: Synthetic oligonucleotide
gaaagugccggaggccaca

SEQ ID NO: 2492159 - RNA, 19 nt, Artificial Sequence
  Description of Artificial Sequence: Synthetic oligonucleotide
caaugggagacuuuuccau

SEQ ID NO: 2492160 - RNA, 19 nt, Artificial Sequence
  Description of Artificial Sequence: Synthetic oligonucleotide
aucccucuuuugagcaucg

SEQ ID NO: 2492161 - RNA, 19 nt, Artificial Sequence
  Description of Artificial Sequence: Synthetic oligonucleotide
cucucuuugcuggccgagc

SEQ ID NO: 2492162 - RNA, 19 nt, Artificial Sequence
  Description of Artificial Sequence: Synthetic oligonucleotide
uccccaagucaggaaacuc

SEQ ID NO: 2492163 - RNA, 19 nt, Artificial Sequence
  Description of Artificial Sequence: Synthetic oligonucleotide
cacuaacuuuaacagucaa

SEQ ID NO: 2492164 - RNA, 19 nt, Artificial Sequence
  Description of Artificial Sequence: Synthetic oligonucleotide
cacgcugucacuucacggu

SEQ ID NO: 2492165 - RNA, 19 nt, Artificial Sequence
  Description of Artificial Sequence: Synthetic oligonucleotide
gggugaaaggugcaaucuc

SEQ ID NO: 2492166 - RNA, 19 nt, Artificial Sequence
  Description of Artificial Sequence: Synthetic oligonucleotide
ccaacugauuccugacggc

SEQ ID NO: 2492167 - RNA, 19 nt, Artificial Sequence
  Description of Artificial Sequence: Synthetic oligonucleotide
gucacuucacgguucgccu

SEQ ID NO: 2492168 - RNA, 19 nt, Artificial Sequence
  Description of Artificial Sequence: Synthetic oligonucleotide
gucgguucugagcagugcu

SEQ ID NO: 2492169 - RNA, 19 nt, Artificial Sequence
  Description of Artificial Sequence: Synthetic oligonucleotide
gggaucucgccucuuuuca

SEQ ID NO: 2492170 - RNA, 19 nt, Artificial Sequence
  Description of Artificial Sequence: Synthetic oligonucleotide
gaugugugaaaaccuucuu

SEQ ID NO: 2492171 - RNA, 19 nt, Artificial Sequence
  Description of Artificial Sequence: Synthetic oligonucleotide
gaaguugccauggcauugu

SEQ ID NO: 2492172 - RNA, 19 nt, Artificial Sequence
  Description of Artificial Sequence: Synthetic oligonucleotide
ugcuuccccaagucaggaa

SEQ ID NO: 2492173 - RNA, 19 nt, Artificial Sequence
  Description of Artificial Sequence: Synthetic oligonucleotide
uggaugcugaaggucucuc

SEQ ID NO: 2492174 - RNA, 19 nt, Artificial Sequence
  Description of Artificial Sequence: Synthetic oligonucleotide
ggacauuacagaggggaca

SEQ ID NO: 2492175 - RNA, 19 nt, Artificial Sequence
  Description of Artificial Sequence: Synthetic oligonucleotide
ccacgcugucacuucacgg

SEQ ID NO: 2492176 - RNA, 19 nt, Artificial Sequence
  Description of Artificial Sequence: Synthetic oligonucleotide
ggaaccugcacauccuucu

SEQ ID NO: 2492177 - RNA, 19 nt, Artificial Sequence
  Description of Artificial Sequence: Synthetic oligonucleotide
uccagacaggagccacgcu

SEQ ID NO: 2492178 - RNA, 19 nt, Artificial Sequence
  Description of Artificial Sequence: Synthetic oligonucleotide
gcuuccccaagucaggaaa

SEQ ID NO: 2492179 - RNA, 19 nt, Artificial Sequence
  Description of Artificial Sequence: Synthetic oligonucleotide
gguuaaaacccaacagaaa

SEQ ID NO: 2492180 - RNA, 19 nt, Artificial Sequence
  Description of Artificial Sequence: Synthetic oligonucleotide
guguguguguguguauaca

SEQ ID NO: 2492181 - RNA, 19 nt, Artificial Sequence
  Description of Artificial Sequence: Synthetic oligonucleotide
aaagugccggaggccacau

SEQ ID NO: 2492182 - RNA, 19 nt, Artificial Sequence
  Description of Artificial Sequence: Synthetic oligonucleotide
gaaugcaaagggacacuua

SEQ ID NO: 2492183 - RNA, 19 nt, Artificial Sequence
  Description of Artificial Sequence: Synthetic oligonucleotide
gccacgcugucacuucacg

SEQ ID NO: 2492184 - RNA, 19 nt, Artificial Sequence
  Description of Artificial Sequence: Synthetic oligonucleotide
gagcaucgaugugugaaaa

SEQ ID NO: 2492185 - RNA, 19 nt, Artificial Sequence
  Description of Artificial Sequence: Synthetic oligonucleotide
acgcugucacuucacgguu

SEQ ID NO: 2492186 - RNA, 19 nt, Artificial Sequence
  Description of Artificial Sequence: Synthetic oligonucleotide
cagaggaugccggugcuga

SEQ ID NO: 2492187 - RNA, 19 nt, Artificial Sequence
  Description of Artificial Sequence: Synthetic oligonucleotide
aguuggugcgagguccaga

SEQ ID NO: 2492188 - RNA, 19 nt, Artificial Sequence
  Description of Artificial Sequence: Synthetic oligonucleotide
cacuuaugaccggcauagg

SEQ ID NO: 2492189 - RNA, 19 nt, Artificial Sequence
  Description of Artificial Sequence: Synthetic oligonucleotide
cacuucacgguucgccuga

SEQ ID NO: 2492190 - RNA, 19 nt, Artificial Sequence
  Description of Artificial Sequence: Synthetic oligonucleotide
ccucccagggugaaaggug

SEQ ID NO: 2492191 - RNA, 19 nt, Artificial Sequence
  Description of Artificial Sequence: Synthetic oligonucleotide
gguccagacaggagccacg

SEQ ID NO: 2492192 - RNA, 19 nt, Artificial Sequence
  Description of Artificial Sequence: Synthetic oligonucleotide
ggugcgagguccagacagg

SEQ ID NO: 2492193 - RNA, 19 nt, Artificial Sequence
  Description of Artificial Sequence: Synthetic oligonucleotide
ucccagcuuggcaguugug

SEQ ID NO: 2492194 - RNA, 19 nt, Artificial Sequence
  Description of Artificial Sequence: Synthetic oligonucleotide
cgagguccagacaggagcc

SEQ ID NO: 2492195 - RNA, 19 nt, Artificial Sequence
  Description of Artificial Sequence: Synthetic oligonucleotide
cacaucugggaucucgccu

SEQ ID NO: 2492196 - RNA, 19 nt, Artificial Sequence
  Description of Artificial Sequence: Synthetic oligonucleotide
cuguccaugugcucuccaa

SEQ ID NO: 2492197 - RNA, 19 nt, Artificial Sequence
  Description of Artificial Sequence: Synthetic oligonucleotide
acccaacagaaaggaguug

SEQ ID NO: 2492198 - RNA, 19 nt, Artificial Sequence
  Description of Artificial Sequence: Synthetic oligonucleotide
agccacgcugucacuucac

SEQ ID NO: 2492199 - RNA, 19 nt, Artificial Sequence
  Description of Artificial Sequence: Synthetic oligonucleotide
gcauugugcacaagccagc

SEQ ID NO: 2492200 - RNA, 19 nt, Artificial Sequence
  Description of Artificial Sequence: Synthetic oligonucleotide
gccucuuuucauagggaug

SEQ ID NO: 2492201 - RNA, 19 nt, Artificial Sequence
  Description of Artificial Sequence: Synthetic oligonucleotide
cuuggcaguugugguccag

SEQ ID NO: 2492202 - RNA, 19 nt, Artificial Sequence
  Description of Artificial Sequence: Synthetic oligonucleotide
gaguuggugcgagguccag

SEQ ID NO: 2492203 - RNA, 19 nt, Artificial Sequence
  Description of Artificial Sequence: Synthetic oligonucleotide
cugagcagugcuuccccaa

SEQ ID NO: 2492204 - RNA, 19 nt, Artificial Sequence
  Description of Artificial Sequence: Synthetic oligonucleotide
aggugcaaucucuguccau

SEQ ID NO: 2492205 - RNA, 19 nt, Artificial Sequence
  Description of Artificial Sequence: Synthetic oligonucleotide
gggacauuacagaggggac

SEQ ID NO: 2492206 - RNA, 19 nt, Artificial Sequence
  Description of Artificial Sequence: Synthetic oligonucleotide
cagacaggagccacgcugu

SEQ ID NO: 2492207 - RNA, 19 nt, Artificial Sequence
  Description of Artificial Sequence: Synthetic oligonucleotide
uucuuccugcaucccucuu

SEQ ID NO: 2492208 - RNA, 19 nt, Artificial Sequence
  Description of Artificial Sequence: Synthetic oligonucleotide
guguguguguguguguaua

SEQ ID NO: 2492209 - RNA, 19 nt, Artificial Sequence
  Description of Artificial Sequence: Synthetic oligonucleotide
ccagccaacugauuccuga

SEQ ID NO: 2492210 - RNA, 19 nt, Artificial Sequence
  Description of Artificial Sequence: Synthetic oligonucleotide
caacugauuccugacggcu

SEQ ID NO: 2492211 - RNA, 19 nt, Artificial Sequence
  Description of Artificial Sequence: Synthetic oligonucleotide
ccgagcugcucccagcuug

SEQ ID NO: 2492212 - RNA, 19 nt, Artificial Sequence
  Description of Artificial Sequence: Synthetic oligonucleotide
gugugugugugugugugua

SEQ ID NO: 2492213 - RNA, 19 nt, Artificial Sequence
  Description of Artificial Sequence: Synthetic oligonucleotide
ccacaucugggaucucgcc

SEQ ID NO: 2492214 - RNA, 19 nt, Artificial Sequence
  Description of Artificial Sequence: Synthetic oligonucleotide
gcaagucgguucugagcag

SEQ ID NO: 2492215 - RNA, 19 nt, Artificial Sequence
  Description of Artificial Sequence: Synthetic oligonucleotide
ggaugccggugcugaaugc

SEQ ID NO: 2492216 - RNA, 19 nt, Artificial Sequence
  Description of Artificial Sequence: Synthetic oligonucleotide
acacgggaaccugcacauc

SEQ ID NO: 2492217 - RNA, 19 nt, Artificial Sequence
  Description of Artificial Sequence: Synthetic oligonucleotide
aggagccacgcugucacuu

SEQ ID NO: 2492218 - RNA, 19 nt, Artificial Sequence
  Description of Artificial Sequence: Synthetic oligonucleotide
guguguguguguauacacu

SEQ ID NO: 2492219 - RNA, 19 nt, Artificial Sequence
  Description of Artificial Sequence: Synthetic oligonucleotide
uguuccucccagggugaaa

SEQ ID NO: 2492220 - RNA, 19 nt, Artificial Sequence
  Description of Artificial Sequence: Synthetic oligonucleotide
cacacgggaaccugcacau

SEQ ID NO: 2492221 - RNA, 19 nt, Artificial Sequence
  Description of Artificial Sequence: Synthetic oligonucleotide
caccaagguuaaaacccaa

SEQ ID NO: 2492222 - RNA, 19 nt, Artificial Sequence
  Description of Artificial Sequence: Synthetic oligonucleotide
acuucacgguucgccugag

SEQ ID NO: 2492223 - RNA, 19 nt, Artificial Sequence
  Description of Artificial Sequence: Synthetic oligonucleotide
gagcagugcuuccccaagu

SEQ ID NO: 2492224 - RNA, 19 nt, Artificial Sequence
  Description of Artificial Sequence: Synthetic oligonucleotide
gugcaaucucuguccaugu

SEQ ID NO: 2492225 - RNA, 19 nt, Artificial Sequence
  Description of Artificial Sequence: Synthetic oligonucleotide
agcugcuugcaagucgguu

SEQ ID NO: 2492226 - RNA, 19 nt, Artificial Sequence
  Description of Artificial Sequence: Synthetic oligonucleotide
cagaaaggaguuggugcga

SEQ ID NO: 2492227 - RNA, 19 nt, Artificial Sequence
  Description of Artificial Sequence: Synthetic oligonucleotide
ggagccacgcugucacuuc

SEQ ID NO: 2492228 - RNA, 19 nt, Artificial Sequence
  Description of Artificial Sequence: Synthetic oligonucleotide
ugcuugcaagucgguucug

SEQ ID NO: 2492229 - RNA, 19 nt, Artificial Sequence
  Description of Artificial Sequence: Synthetic oligonucleotide
gcagaaguugccauggcau

SEQ ID NO: 2492230 - RNA, 19 nt, Artificial Sequence
  Description of Artificial Sequence: Synthetic oligonucleotide
uuguuccucccagggugaa

SEQ ID NO: 2492231 - RNA, 19 nt, Artificial Sequence
  Description of Artificial Sequence: Synthetic oligonucleotide
ucccucuuuugagcaucga

SEQ ID NO: 2492232 - RNA, 19 nt, Artificial Sequence
  Description of Artificial Sequence: Synthetic oligonucleotide
gagguccagacaggagcca

SEQ ID NO: 2492233 - RNA, 19 nt, Artificial Sequence
  Description of Artificial Sequence: Synthetic oligonucleotide
cauugugcacaagccagcu

SEQ ID NO: 2492234 - RNA, 19 nt, Artificial Sequence
  Description of Artificial Sequence: Synthetic oligonucleotide
gugcgagguccagacagga

SEQ ID NO: 2492235 - RNA, 19 nt, Artificial Sequence
  Description of Artificial Sequence: Synthetic oligonucleotide
gugcuuccccaagucagga

SEQ ID NO: 2492236 - RNA, 19 nt, Artificial Sequence
  Description of Artificial Sequence: Synthetic oligonucleotide
guugcugggccagccaacu

SEQ ID NO: 2492237 - RNA, 19 nt, Artificial Sequence
  Description of Artificial Sequence: Synthetic oligonucleotide
acagucaaugggagacuuu

SEQ ID NO: 2492238 - RNA, 19 nt, Artificial Sequence
  Description of Artificial Sequence: Synthetic oligonucleotide
cagaaguugccauggcauu

SEQ ID NO: 2492239 - RNA, 19 nt, Artificial Sequence
  Description of Artificial Sequence: Synthetic oligonucleotide
cugucacuucacgguucgc

SEQ ID NO: 2492240 - RNA, 19 nt, Artificial Sequence
  Description of Artificial Sequence: Synthetic oligonucleotide
ccugacggcuucugcucag

SEQ ID NO: 2492241 - RNA, 19 nt, Artificial Sequence
  Description of Artificial Sequence: Synthetic oligonucleotide
ggaugcugaaggucucucu

SEQ ID NO: 2492242 - RNA, 19 nt, Artificial Sequence
  Description of Artificial Sequence: Synthetic oligonucleotide
gcuugcaagucgguucuga

SEQ ID NO: 2492243 - RNA, 19 nt, Artificial Sequence
  Description of Artificial Sequence: Synthetic oligonucleotide
caagucgguucugagcagu

SEQ ID NO: 2492244 - RNA, 19 nt, Artificial Sequence
  Description of Artificial Sequence: Synthetic oligonucleotide
ggacacacgggaaccugca

SEQ ID NO: 2492245 - RNA, 19 nt, Artificial Sequence
  Description of Artificial Sequence: Synthetic oligonucleotide
gaggaugccggugcugaau

SEQ ID NO: 2492246 - RNA, 19 nt, Artificial Sequence
  Description of Artificial Sequence: Synthetic oligonucleotide
ggaaagugccggaggccac

SEQ ID NO: 2492247 - RNA, 19 nt, Artificial Sequence
  Description of Artificial Sequence: Synthetic oligonucleotide
cugcucaggagcucuggau

SEQ ID NO: 2492248 - RNA, 19 nt, Artificial Sequence
  Description of Artificial Sequence: Synthetic oligonucleotide
cacauguuacuggcagaaa

SEQ ID NO: 2492249 - RNA, 19 nt, Artificial Sequence
  Description of Artificial Sequence: Synthetic oligonucleotide
gggacacuuaugaccggca

SEQ ID NO: 2492250 - RNA, 19 nt, Artificial Sequence
  Description of Artificial Sequence: Synthetic oligonucleotide
ggaguuggugcgaggucca

SEQ ID NO: 2492251 - RNA, 19 nt, Artificial Sequence
  Description of Artificial Sequence: Synthetic oligonucleotide
gugccggaggccacaucac

SEQ ID NO: 2492252 - RNA, 19 nt, Artificial Sequence
  Description of Artificial Sequence: Synthetic oligonucleotide
gccacaucaccaagguuaa

SEQ ID NO: 2492253 - RNA, 19 nt, Artificial Sequence
  Description of Artificial Sequence: Synthetic oligonucleotide
gccggaggccacaucacca

SEQ ID NO: 2492254 - RNA, 19 nt, Artificial Sequence
  Description of Artificial Sequence: Synthetic oligonucleotide
cucccagcuuggcaguugu

SEQ ID NO: 2492255 - RNA, 19 nt, Artificial Sequence
  Description of Artificial Sequence: Synthetic oligonucleotide
ggacacuuaugaccggcau

SEQ ID NO: 2492256 - RNA, 19 nt, Artificial Sequence
  Description of Artificial Sequence: Synthetic oligonucleotide
ugcucccagcuuggcaguu

SEQ ID NO: 2492257 - RNA, 19 nt, Artificial Sequence
  Description of Artificial Sequence: Synthetic oligonucleotide
ggaucucgccucuuuucau

SEQ ID NO: 2492258 - RNA, 19 nt, Artificial Sequence
  Description of Artificial Sequence: Synthetic oligonucleotide
cuuugcuggccgagcugcu

SEQ ID NO: 2492259 - RNA, 19 nt, Artificial Sequence
  Description of Artificial Sequence: Synthetic oligonucleotide
ggugcugaaugcagaaguu

SEQ ID NO: 2492260 - RNA, 19 nt, Artificial Sequence
  Description of Artificial Sequence: Synthetic oligonucleotide
caucugggaucucgccucu

SEQ ID NO: 2492261 - RNA, 19 nt, Artificial Sequence
  Description of Artificial Sequence: Synthetic oligonucleotide
cuggaugcugaaggucucu

SEQ ID NO: 2492262 - RNA, 19 nt, Artificial Sequence
  Description of Artificial Sequence: Synthetic oligonucleotide
cggugcugaaugcagaagu

SEQ ID NO: 2492263 - RNA, 19 nt, Artificial Sequence
  Description of Artificial Sequence: Synthetic oligonucleotide
gcucccagcuuggcaguug

SEQ ID NO: 2492264 - RNA, 19 nt, Artificial Sequence
  Description of Artificial Sequence: Synthetic oligonucleotide
cgcugucacuucacgguuc

SEQ ID NO: 2492265 - RNA, 19 nt, Artificial Sequence
  Description of Artificial Sequence: Synthetic oligonucleotide
caguugugguccagaggau

SEQ ID NO: 2492266 - RNA, 19 nt, Artificial Sequence
  Description of Artificial Sequence: Synthetic oligonucleotide
cugcucccagcuuggcagu

SEQ ID NO: 2492267 - RNA, 19 nt, Artificial Sequence
  Description of Artificial Sequence: Synthetic oligonucleotide
aucugggaucucgccucuu

SEQ ID NO: 2492268 - RNA, 19 nt, Artificial Sequence
  Description of Artificial Sequence: Synthetic oligonucleotide
cccucuuuugagcaucgau

SEQ ID NO: 2492269 - RNA, 19 nt, Artificial Sequence
  Description of Artificial Sequence: Synthetic oligonucleotide
gcgucacauguuacuggca

SEQ ID NO: 2492270 - RNA, 19 nt, Artificial Sequence
  Description of Artificial Sequence: Synthetic oligonucleotide
cuucacgguucgccugagu

SEQ ID NO: 2492271 - RNA, 19 nt, Artificial Sequence
  Description of Artificial Sequence: Synthetic oligonucleotide
ggccagccaacugauuccu

SEQ ID NO: 2492272 - RNA, 19 nt, Artificial Sequence
  Description of Artificial Sequence: Synthetic oligonucleotide
acgguucgccugaguugcu

SEQ ID NO: 2492273 - RNA, 19 nt, Artificial Sequence
  Description of Artificial Sequence: Synthetic oligonucleotide
caucuccuucuuccugcau

SEQ ID NO: 2492274 - RNA, 19 nt, Artificial Sequence
  Description of Artificial Sequence: Synthetic oligonucleotide
cgccucuuuucauagggau

SEQ ID NO: 2492275 - RNA, 19 nt, Artificial Sequence
  Description of Artificial Sequence: Synthetic oligonucleotide
cacaagccagcugcagcau

SEQ ID NO: 2492276 - RNA, 19 nt, Artificial Sequence
  Description of Artificial Sequence: Synthetic oligonucleotide
cccagggugaaaggugcaa

SEQ ID NO: 2492277 - RNA, 19 nt, Artificial Sequence
  Description of Artificial Sequence: Synthetic oligonucleotide
cagcugcuugcaagucggu

SEQ ID NO: 2492278 - RNA, 19 nt, Artificial Sequence
  Description of Artificial Sequence: Synthetic oligonucleotide
caggagccacgcugucacu

SEQ ID NO: 2492279 - RNA, 19 nt, Artificial Sequence
  Description of Artificial Sequence: Synthetic oligonucleotide
cgguucgccugaguugcug

SEQ ID NO: 2492280 - RNA, 19 nt, Artificial Sequence
  Description of Artificial Sequence: Synthetic oligonucleotide
ccagggugaaaggugcaau

SEQ ID NO: 2492281 - RNA, 19 nt, Artificial Sequence
  Description of Artificial Sequence: Synthetic oligonucleotide
cgccugaguugcugggcca

SEQ ID NO: 2492282 - RNA, 19 nt, Artificial Sequence
  Description of Artificial Sequence: Synthetic oligonucleotide
cugggccagccaacugauu

SEQ ID NO: 2492283 - RNA, 19 nt, Artificial Sequence
  Description of Artificial Sequence: Synthetic oligonucleotide
ccacaucaccaagguuaaa

SEQ ID NO: 2492284 - RNA, 19 nt, Artificial Sequence
  Description of Artificial Sequence: Synthetic oligonucleotide
gccgagcugcucccagcuu

SEQ ID NO: 2492285 - RNA, 19 nt, Artificial Sequence
  Description of Artificial Sequence: Synthetic oligonucleotide
ccaccacaucugggaucuc

SEQ ID NO: 2492286 - RNA, 19 nt, Artificial Sequence
  Description of Artificial Sequence: Synthetic oligonucleotide
uguuauuuugacaaagggg

SEQ ID NO: 2492287 - RNA, 19 nt, Artificial Sequence
  Description of Artificial Sequence: Synthetic oligonucleotide
aauuucauagguagaaacc

SEQ ID NO: 2492288 - RNA, 19 nt, Artificial Sequence
  Description of Artificial Sequence: Synthetic oligonucleotide
ucauauguuauuuugacaa

SEQ ID NO: 2492289 - RNA, 19 nt, Artificial Sequence
  Description of Artificial Sequence: Synthetic oligonucleotide
aaauguacaguugccaagc

SEQ ID NO: 2492290 - RNA, 19 nt, Artificial Sequence
  Description of Artificial Sequence: Synthetic oligonucleotide
auagauaccuguuucauug

SEQ ID NO: 2492291 - RNA, 19 nt, Artificial Sequence
  Description of Artificial Sequence: Synthetic oligonucleotide
auuccuuuauggcugaagc

SEQ ID NO: 2492292 - RNA, 19 nt, Artificial Sequence
  Description of Artificial Sequence: Synthetic oligonucleotide
uauguuauuuugacaaagg

SEQ ID NO: 2492293 - RNA, 19 nt, Artificial Sequence
  Description of Artificial Sequence: Synthetic oligonucleotide
aguguuuaucaucaauucc

SEQ ID NO: 2492294 - RNA, 19 nt, Artificial Sequence
  Description of Artificial Sequence: Synthetic oligonucleotide
acaaaggggaauuucauag

SEQ ID NO: 2492295 - RNA, 19 nt, Artificial Sequence
  Description of Artificial Sequence: Synthetic oligonucleotide
aagaaauauucuuguauag

SEQ ID NO: 2492296 - RNA, 19 nt, Artificial Sequence
  Description of Artificial Sequence: Synthetic oligonucleotide
auaaaauuccuuuauggcu

SEQ ID NO: 2492297 - RNA, 19 nt, Artificial Sequence
  Description of Artificial Sequence: Synthetic oligonucleotide
aaauuuugaacagucguag

SEQ ID NO: 2492298 - RNA, 19 nt, Artificial Sequence
  Description of Artificial Sequence: Synthetic oligonucleotide
aaagaaauauucuuguaua

SEQ ID NO: 2492299 - RNA, 19 nt, Artificial Sequence
  Description of Artificial Sequence: Synthetic oligonucleotide
uguacaguugccaagcuga

SEQ ID NO: 2492300 - RNA, 19 nt, Artificial Sequence
  Description of Artificial Sequence: Synthetic oligonucleotide
cauaaaauuccuuuauggc

SEQ ID NO: 2492301 - RNA, 19 nt, Artificial Sequence
  Description of Artificial Sequence: Synthetic oligonucleotide
uguaaagaaauauucuugu

SEQ ID NO: 2492302 - RNA, 19 nt, Artificial Sequence
  Description of Artificial Sequence: Synthetic oligonucleotide
ucucauauguccuuaacac

SEQ ID NO: 2492303 - RNA, 19 nt, Artificial Sequence
  Description of Artificial Sequence: Synthetic oligonucleotide
uaggauucaaaccaugucu

SEQ ID NO: 2492304 - RNA, 19 nt, Artificial Sequence
  Description of Artificial Sequence: Synthetic oligonucleotide
guuauuuugacaaagggga

SEQ ID NO: 2492305 - RNA, 19 nt, Artificial Sequence
  Description of Artificial Sequence: Synthetic oligonucleotide
aauuuugaacagucguagg

SEQ ID NO: 2492306 - RNA, 19 nt, Artificial Sequence
  Description of Artificial Sequence: Synthetic oligonucleotide
auguuauuuugacaaaggg

SEQ ID NO: 2492307 - RNA, 19 nt, Artificial Sequence
  Description of Artificial Sequence: Synthetic oligonucleotide
uauggcugaagcaagaguc

SEQ ID NO: 2492308 - RNA, 19 nt, Artificial Sequence
  Description of Artificial Sequence: Synthetic oligonucleotide
cuugguuacaccagaacgg

SEQ ID NO: 2492309 - RNA, 19 nt, Artificial Sequence
  Description of Artificial Sequence: Synthetic oligonucleotide
uauaaaacagguagaacuc

SEQ ID NO: 2492310 - RNA, 19 nt, Artificial Sequence
  Description of Artificial Sequence: Synthetic oligonucleotide
acaaauuuugaacagucgu

SEQ ID NO: 2492311 - RNA, 19 nt, Artificial Sequence
  Description of Artificial Sequence: Synthetic oligonucleotide
acagucguaggauucaaac

SEQ ID NO: 2492312 - RNA, 19 nt, Artificial Sequence
  Description of Artificial Sequence: Synthetic oligonucleotide
ucacaggucaggaagugcg

SEQ ID NO: 2492313 - RNA, 19 nt, Artificial Sequence
  Description of Artificial Sequence: Synthetic oligonucleotide
agagacucaacagaaauuc

SEQ ID NO: 2492314 - RNA, 19 nt, Artificial Sequence
  Description of Artificial Sequence: Synthetic oligonucleotide
uuucaagagacucaacaga

SEQ ID NO: 2492315 - RNA, 19 nt, Artificial Sequence
  Description of Artificial Sequence: Synthetic oligonucleotide
aaguaaguagguucuccac

SEQ ID NO: 2492316 - RNA, 19 nt, Artificial Sequence
  Description of Artificial Sequence: Synthetic oligonucleotide
agucguaggauucaaacca

SEQ ID NO: 2492317 - RNA, 19 nt, Artificial Sequence
  Description of Artificial Sequence: Synthetic oligonucleotide
ucaacagaaauucuuuagu

SEQ ID NO: 2492318 - RNA, 19 nt, Artificial Sequence
  Description of Artificial Sequence: Synthetic oligonucleotide
aagggagucccucauaugu

SEQ ID NO: 2492319 - RNA, 19 nt, Artificial Sequence
  Description of Artificial Sequence: Synthetic oligonucleotide
auagguagaaaccaauacu

SEQ ID NO: 2492320 - RNA, 19 nt, Artificial Sequence
  Description of Artificial Sequence: Synthetic oligonucleotide
auaguuuguuucuaucuuc

SEQ ID NO: 2492321 - RNA, 19 nt, Artificial Sequence
  Description of Artificial Sequence: Synthetic oligonucleotide
aggggaauuucauagguag

SEQ ID NO: 2492322 - RNA, 19 nt, Artificial Sequence
  Description of Artificial Sequence: Synthetic oligonucleotide
aauucagccaguuucucau

SEQ ID NO: 2492323 - RNA, 19 nt, Artificial Sequence
  Description of Artificial Sequence: Synthetic oligonucleotide
uuaaauguguuuccugaca

SEQ ID NO: 2492324 - RNA, 19 nt, Artificial Sequence
  Description of Artificial Sequence: Synthetic oligonucleotide
ugucucauaauagauaccu

SEQ ID NO: 2492325 - RNA, 19 nt, Artificial Sequence
  Description of Artificial Sequence: Synthetic oligonucleotide
agauguuucauuucccaag

SEQ ID NO: 2492326 - RNA, 19 nt, Artificial Sequence
  Description of Artificial Sequence: Synthetic oligonucleotide
acagaugugguuugaagag

SEQ ID NO: 2492327 - RNA, 19 nt, Artificial Sequence
  Description of Artificial Sequence: Synthetic oligonucleotide
uuuuguuaaauguguuucc

SEQ ID NO: 2492328 - RNA, 19 nt, Artificial Sequence
  Description of Artificial Sequence: Synthetic oligonucleotide
uucucauauguccuuaaca

SEQ ID NO: 2492329 - RNA, 19 nt, Artificial Sequence
  Description of Artificial Sequence: Synthetic oligonucleotide
ucucugugcauaaucacug

SEQ ID NO: 2492330 - RNA, 19 nt, Artificial Sequence
  Description of Artificial Sequence: Synthetic oligonucleotide
uucaagagacucaacagaa

SEQ ID NO: 2492331 - RNA, 19 nt, Artificial Sequence
  Description of Artificial Sequence: Synthetic oligonucleotide
cauaauagauaccuguuuc

SEQ ID NO: 2492332 - RNA, 19 nt, Artificial Sequence
  Description of Artificial Sequence: Synthetic oligonucleotide
auuuugaacagucguagga

SEQ ID NO: 2492333 - RNA, 19 nt, Artificial Sequence
  Description of Artificial Sequence: Synthetic oligonucleotide
auuguguaauucuugccag

SEQ ID NO: 2492334 - RNA, 19 nt, Artificial Sequence
  Description of Artificial Sequence: Synthetic oligonucleotide
aaauucuuuaguugacaga

SEQ ID NO: 2492335 - RNA, 19 nt, Artificial Sequence
  Description of Artificial Sequence: Synthetic oligonucleotide
cauuucccaaguaaguagg

SEQ ID NO: 2492336 - RNA, 19 nt, Artificial Sequence
  Description of Artificial Sequence: Synthetic oligonucleotide
ucauuguccuguuucaccc

SEQ ID NO: 2492337 - RNA, 19 nt, Artificial Sequence
  Description of Artificial Sequence: Synthetic oligonucleotide
uucuccacuguaaagaaau

SEQ ID NO: 2492338 - RNA, 19 nt, Artificial Sequence
  Description of Artificial Sequence: Synthetic oligonucleotide
agggaaagugaagaaaggc

SEQ ID NO: 2492339 - RNA, 19 nt, Artificial Sequence
  Description of Artificial Sequence: Synthetic oligonucleotide
uccauuguguaauucuugc

SEQ ID NO: 2492340 - RNA, 19 nt, Artificial Sequence
  Description of Artificial Sequence: Synthetic oligonucleotide
ugcauaaucacugaaucaa

SEQ ID NO: 2492341 - RNA, 19 nt, Artificial Sequence
  Description of Artificial Sequence: Synthetic oligonucleotide
auguccuuaacacaaauuu

SEQ ID NO: 2492342 - RNA, 19 nt, Artificial Sequence
  Description of Artificial Sequence: Synthetic oligonucleotide
aaugucccguuuucccucc

SEQ ID NO: 2492343 - RNA, 19 nt, Artificial Sequence
  Description of Artificial Sequence: Synthetic oligonucleotide
cucaacagaaauucuuuag

SEQ ID NO: 2492344 - RNA, 19 nt, Artificial Sequence
  Description of Artificial Sequence: Synthetic oligonucleotide
agugaagaaaggcacgaug

SEQ ID NO: 2492345 - RNA, 19 nt, Artificial Sequence
  Description of Artificial Sequence: Synthetic oligonucleotide
auauguuauuuugacaaag

SEQ ID NO: 2492346 - RNA, 19 nt, Artificial Sequence
  Description of Artificial Sequence: Synthetic oligonucleotide
auaauagauaccuguuuca

SEQ ID NO: 2492347 - RNA, 19 nt, Artificial Sequence
  Description of Artificial Sequence: Synthetic oligonucleotide
cauagguagaaaccaauac

SEQ ID NO: 2492348 - RNA, 19 nt, Artificial Sequence
  Description of Artificial Sequence: Synthetic oligonucleotide
uuuaguugacagauguggu

SEQ ID NO: 2492349 - RNA, 19 nt, Artificial Sequence
  Description of Artificial Sequence: Synthetic oligonucleotide
uucuuguauaguuuguuuc

SEQ ID NO: 2492350 - RNA, 19 nt, Artificial Sequence
  Description of Artificial Sequence: Synthetic oligonucleotide
auuucauagguagaaacca

SEQ ID NO: 2492351 - RNA, 19 nt, Artificial Sequence
  Description of Artificial Sequence: Synthetic oligonucleotide
gacagaugugguuugaaga

SEQ ID NO: 2492352 - RNA, 19 nt, Artificial Sequence
  Description of Artificial Sequence: Synthetic oligonucleotide
aaagugaagaaaggcacga

SEQ ID NO: 2492353 - RNA, 19 nt, Artificial Sequence
  Description of Artificial Sequence: Synthetic oligonucleotide
cacaaauuuugaacagucg

SEQ ID NO: 2492354 - RNA, 19 nt, Artificial Sequence
  Description of Artificial Sequence: Synthetic oligonucleotide
aguaaguagguucuccacu

SEQ ID NO: 2492355 - RNA, 19 nt, Artificial Sequence
  Description of Artificial Sequence: Synthetic oligonucleotide
agggaaagcaaagugucac

SEQ ID NO: 2492356 - RNA, 19 nt, Artificial Sequence
  Description of Artificial Sequence: Synthetic oligonucleotide
aaauguguuuccugacaug

SEQ ID NO: 2492357 - RNA, 19 nt, Artificial Sequence
  Description of Artificial Sequence: Synthetic oligonucleotide
guaaguagguucuccacug

SEQ ID NO: 2492358 - RNA, 19 nt, Artificial Sequence
  Description of Artificial Sequence: Synthetic oligonucleotide
uucccaaguaaguagguuc

SEQ ID NO: 2492359 - RNA, 19 nt, Artificial Sequence
  Description of Artificial Sequence: Synthetic oligonucleotide
aauagauaccuguuucauu

SEQ ID NO: 2492360 - RNA, 19 nt, Artificial Sequence
  Description of Artificial Sequence: Synthetic oligonucleotide
uguuuccugacaugguugc

SEQ ID NO: 2492361 - RNA, 19 nt, Artificial Sequence
  Description of Artificial Sequence: Synthetic oligonucleotide
ugacagaugugguuugaag

SEQ ID NO: 2492362 - RNA, 19 nt, Artificial Sequence
  Description of Artificial Sequence: Synthetic oligonucleotide
ucauaauagauaccuguuu

SEQ ID NO: 2492363 - RNA, 19 nt, Artificial Sequence
  Description of Artificial Sequence: Synthetic oligonucleotide
uuuguuaaauguguuuccu

SEQ ID NO: 2492364 - RNA, 19 nt, Artificial Sequence
  Description of Artificial Sequence: Synthetic oligonucleotide
acucaaaguuauaaaacag

SEQ ID NO: 2492365 - RNA, 19 nt, Artificial Sequence
  Description of Artificial Sequence: Synthetic oligonucleotide
uaaaacagguagaacucuc

SEQ ID NO: 2492366 - RNA, 19 nt, Artificial Sequence
  Description of Artificial Sequence: Synthetic oligonucleotide
ucccucauauguuauuuug

SEQ ID NO: 2492367 - RNA, 19 nt, Artificial Sequence
  Description of Artificial Sequence: Synthetic oligonucleotide
uuguuaaauguguuuccug

SEQ ID NO: 2492368 - RNA, 19 nt, Artificial Sequence
  Description of Artificial Sequence: Synthetic oligonucleotide
agugcggugcgucugguag

SEQ ID NO: 2492369 - RNA, 19 nt, Artificial Sequence
  Description of Artificial Sequence: Synthetic oligonucleotide
agagaauggcugcaggcag

SEQ ID NO: 2492370 - RNA, 19 nt, Artificial Sequence
  Description of Artificial Sequence: Synthetic oligonucleotide
cauuguguaauucuugcca

SEQ ID NO: 2492371 - RNA, 19 nt, Artificial Sequence
  Description of Artificial Sequence: Synthetic oligonucleotide
gagucuuguuuccuuuugg

SEQ ID NO: 2492372 - RNA, 19 nt, Artificial Sequence
  Description of Artificial Sequence: Synthetic oligonucleotide
aaaccaauacucaaaguua

SEQ ID NO: 2492373 - RNA, 19 nt, Artificial Sequence
  Description of Artificial Sequence: Synthetic oligonucleotide
uugaauucugcuccaaauu

SEQ ID NO: 2492374 - RNA, 19 nt, Artificial Sequence
  Description of Artificial Sequence: Synthetic oligonucleotide
agauaccuguuucauuguc

SEQ ID NO: 2492375 - RNA, 19 nt, Artificial Sequence
  Description of Artificial Sequence: Synthetic oligonucleotide
ucuuuaguugacagaugug

SEQ ID NO: 2492376 - RNA, 19 nt, Artificial Sequence
  Description of Artificial Sequence: Synthetic oligonucleotide
uuuauggcugaagcaagag

SEQ ID NO: 2492377 - RNA, 19 nt, Artificial Sequence
  Description of Artificial Sequence: Synthetic oligonucleotide
gaacggagcauccauuuca

SEQ ID NO: 2492378 - RNA, 19 nt, Artificial Sequence
  Description of Artificial Sequence: Synthetic oligonucleotide
cuccauucccuuuuccugg

SEQ ID NO: 2492379 - RNA, 19 nt, Artificial Sequence
  Description of Artificial Sequence: Synthetic oligonucleotide
uccuuuauggcugaagcaa

SEQ ID NO: 2492380 - RNA, 19 nt, Artificial Sequence
  Description of Artificial Sequence: Synthetic oligonucleotide
uuauuuugacaaaggggaa

SEQ ID NO: 2492381 - RNA, 19 nt, Artificial Sequence
  Description of Artificial Sequence: Synthetic oligonucleotide
aaguuauaaaacagguaga

SEQ ID NO: 2492382 - RNA, 19 nt, Artificial Sequence
  Description of Artificial Sequence: Synthetic oligonucleotide
aagagaauggcugcaggca

SEQ ID NO: 2492383 - RNA, 19 nt, Artificial Sequence
  Description of Artificial Sequence: Synthetic oligonucleotide
agaugugguuugaagaggg

SEQ ID NO: 2492384 - RNA, 19 nt, Artificial Sequence
  Description of Artificial Sequence: Synthetic oligonucleotide
ucauagguagaaaccaaua

SEQ ID NO: 2492385 - RNA, 19 nt, Artificial Sequence
  Description of Artificial Sequence: Synthetic oligonucleotide
uugaacagucguaggauuc

SEQ ID NO: 2492386 - RNA, 19 nt, Artificial Sequence
  Description of Artificial Sequence: Synthetic oligonucleotide
ucccaaguaaguagguucu

SEQ ID NO: 2492387 - RNA, 19 nt, Artificial Sequence
  Description of Artificial Sequence: Synthetic oligonucleotide
aacuggagcuaaugucccg

SEQ ID NO: 2492388 - RNA, 19 nt, Artificial Sequence
  Description of Artificial Sequence: Synthetic oligonucleotide
aggauucaaaccaugucuc

SEQ ID NO: 2492389 - RNA, 19 nt, Artificial Sequence
  Description of Artificial Sequence: Synthetic oligonucleotide
cagucguaggauucaaacc

SEQ ID NO: 2492390 - RNA, 19 nt, Artificial Sequence
  Description of Artificial Sequence: Synthetic oligonucleotide
guuaaauguguuuccugac

SEQ ID NO: 2492391 - RNA, 19 nt, Artificial Sequence
  Description of Artificial Sequence: Synthetic oligonucleotide
uuuugaacagucguaggau

SEQ ID NO: 2492392 - RNA, 19 nt, Artificial Sequence
  Description of Artificial Sequence: Synthetic oligonucleotide
uguccuuaacacaaauuuu

SEQ ID NO: 2492393 - RNA, 19 nt, Artificial Sequence
  Description of Artificial Sequence: Synthetic oligonucleotide
aauguacaguugccaagcu

SEQ ID NO: 2492394 - RNA, 19 nt, Artificial Sequence
  Description of Artificial Sequence: Synthetic oligonucleotide
uuucucauauguccuuaac

SEQ ID NO: 2492395 - RNA, 19 nt, Artificial Sequence
  Description of Artificial Sequence: Synthetic oligonucleotide
aaaacagguagaacucucu

SEQ ID NO: 2492396 - RNA, 19 nt, Artificial Sequence
  Description of Artificial Sequence: Synthetic oligonucleotide
caaagugucacaggucagg

SEQ ID NO: 2492397 - RNA, 19 nt, Artificial Sequence
  Description of Artificial Sequence: Synthetic oligonucleotide
ucugguagguaaagggagu

SEQ ID NO: 2492398 - RNA, 19 nt, Artificial Sequence
  Description of Artificial Sequence: Synthetic oligonucleotide
aaccaauacucaaaguuau

SEQ ID NO: 2492399 - RNA, 19 nt, Artificial Sequence
  Description of Artificial Sequence: Synthetic oligonucleotide
uuugacaaaggggaauuuc

SEQ ID NO: 2492400 - RNA, 19 nt, Artificial Sequence
  Description of Artificial Sequence: Synthetic oligonucleotide
aaaacagcccuggaagaga

SEQ ID NO: 2492401 - RNA, 19 nt, Artificial Sequence
  Description of Artificial Sequence: Synthetic oligonucleotide
aaagggagucccucauaug

SEQ ID NO: 2492402 - RNA, 19 nt, Artificial Sequence
  Description of Artificial Sequence: Synthetic oligonucleotide
uuccuuuauggcugaagca

SEQ ID NO: 2492403 - RNA, 19 nt, Artificial Sequence
  Description of Artificial Sequence: Synthetic oligonucleotide
uuaguugacagaugugguu

SEQ ID NO: 2492404 - RNA, 19 nt, Artificial Sequence
  Description of Artificial Sequence: Synthetic oligonucleotide
gaaggugaggaaauguaca

SEQ ID NO: 2492405 - RNA, 19 nt, Artificial Sequence
  Description of Artificial Sequence: Synthetic oligonucleotide
uauguccuuaacacaaauu

SEQ ID NO: 2492406 - RNA, 19 nt, Artificial Sequence
  Description of Artificial Sequence: Synthetic oligonucleotide
uccaguguuuaucaucaau

SEQ ID NO: 2492407 - RNA, 19 nt, Artificial Sequence
  Description of Artificial Sequence: Synthetic oligonucleotide
uguuucuaucuucuugaau

SEQ ID NO: 2492408 - RNA, 19 nt, Artificial Sequence
  Description of Artificial Sequence: Synthetic oligonucleotide
uugcaacuggagcuaaugu

SEQ ID NO: 2492409 - RNA, 19 nt, Artificial Sequence
  Description of Artificial Sequence: Synthetic oligonucleotide
uaauagauaccuguuucau

SEQ ID NO: 2492410 - RNA, 19 nt, Artificial Sequence
  Description of Artificial Sequence: Synthetic oligonucleotide
cugacaugguugcaacugg

SEQ ID NO: 2492411 - RNA, 19 nt, Artificial Sequence
  Description of Artificial Sequence: Synthetic oligonucleotide
uucauuucccaaguaagua

SEQ ID NO: 2492412 - RNA, 19 nt, Artificial Sequence
  Description of Artificial Sequence: Synthetic oligonucleotide
ucuugaauucugcuccaaa

SEQ ID NO: 2492413 - RNA, 19 nt, Artificial Sequence
  Description of Artificial Sequence: Synthetic oligonucleotide
agaacggagcauccauuuc

SEQ ID NO: 2492414 - RNA, 19 nt, Artificial Sequence
  Description of Artificial Sequence: Synthetic oligonucleotide
cauuucaggucgaagguga

SEQ ID NO: 2492415 - RNA, 19 nt, Artificial Sequence
  Description of Artificial Sequence: Synthetic oligonucleotide
ggaaagugaagaaaggcac

SEQ ID NO: 2492416 - RNA, 19 nt, Artificial Sequence
  Description of Artificial Sequence: Synthetic oligonucleotide
auaaaacagguagaacucu

SEQ ID NO: 2492417 - RNA, 19 nt, Artificial Sequence
  Description of Artificial Sequence: Synthetic oligonucleotide
uguguaauucuugccaguc

SEQ ID NO: 2492418 - RNA, 19 nt, Artificial Sequence
  Description of Artificial Sequence: Synthetic oligonucleotide
agagucuuguuuccuuuug

SEQ ID NO: 2492419 - RNA, 19 nt, Artificial Sequence
  Description of Artificial Sequence: Synthetic oligonucleotide
agaaaccaauacucaaagu

SEQ ID NO: 2492420 - RNA, 19 nt, Artificial Sequence
  Description of Artificial Sequence: Synthetic oligonucleotide
agcuaaugucccguuuucc

SEQ ID NO: 2492421 - RNA, 19 nt, Artificial Sequence
  Description of Artificial Sequence: Synthetic oligonucleotide
auucaaaccaugucuccau

SEQ ID NO: 2492422 - RNA, 19 nt, Artificial Sequence
  Description of Artificial Sequence: Synthetic oligonucleotide
ucaaaccaugucuccauuc

SEQ ID NO: 2492423 - RNA, 19 nt, Artificial Sequence
  Description of Artificial Sequence: Synthetic oligonucleotide
uagauguuucauuucccaa

SEQ ID NO: 2492424 - RNA, 19 nt, Artificial Sequence
  Description of Artificial Sequence: Synthetic oligonucleotide
gauucaaaccaugucucca

SEQ ID NO: 2492425 - RNA, 19 nt, Artificial Sequence
  Description of Artificial Sequence: Synthetic oligonucleotide
gucugguagguaaagggag

SEQ ID NO: 2492426 - RNA, 19 nt, Artificial Sequence
  Description of Artificial Sequence: Synthetic oligonucleotide
ugacaugguugcaacugga

SEQ ID NO: 2492427 - RNA, 19 nt, Artificial Sequence
  Description of Artificial Sequence: Synthetic oligonucleotide
ucauaccauuccauugugu

SEQ ID NO: 2492428 - RNA, 19 nt, Artificial Sequence
  Description of Artificial Sequence: Synthetic oligonucleotide
ucguaggauucaaaccaug

SEQ ID NO: 2492429 - RNA, 19 nt, Artificial Sequence
  Description of Artificial Sequence: Synthetic oligonucleotide
aagcucauaccauuccauu

SEQ ID NO: 2492430 - RNA, 19 nt, Artificial Sequence
  Description of Artificial Sequence: Synthetic oligonucleotide
auguacaguugccaagcug

SEQ ID NO: 2492431 - RNA, 19 nt, Artificial Sequence
  Description of Artificial Sequence: Synthetic oligonucleotide
caaauuuugaacagucgua

SEQ ID NO: 2492432 - RNA, 19 nt, Artificial Sequence
  Description of Artificial Sequence: Synthetic oligonucleotide
guguuuaucaucaauuccu

SEQ ID NO: 2492433 - RNA, 19 nt, Artificial Sequence
  Description of Artificial Sequence: Synthetic oligonucleotide
cauaaucacugaaucaaaa

SEQ ID NO: 2492434 - RNA, 19 nt, Artificial Sequence
  Description of Artificial Sequence: Synthetic oligonucleotide
ugaacagucguaggauuca

SEQ ID NO: 2492435 - RNA, 19 nt, Artificial Sequence
  Description of Artificial Sequence: Synthetic oligonucleotide
uccuugguuacaccagaac

SEQ ID NO: 2492436 - RNA, 19 nt, Artificial Sequence
  Description of Artificial Sequence: Synthetic oligonucleotide
cauaccauuccauugugua

SEQ ID NO: 2492437 - RNA, 19 nt, Artificial Sequence
  Description of Artificial Sequence: Synthetic oligonucleotide
aaagcucauaccauuccau

SEQ ID NO: 2492438 - RNA, 19 nt, Artificial Sequence
  Description of Artificial Sequence: Synthetic oligonucleotide
gagagcagggaaagcaaag

SEQ ID NO: 2492439 - RNA, 19 nt, Artificial Sequence
  Description of Artificial Sequence: Synthetic oligonucleotide
auucccuuuuccugggcug

SEQ ID NO: 2492440 - RNA, 19 nt, Artificial Sequence
  Description of Artificial Sequence: Synthetic oligonucleotide
uucagccaguuucucauau

SEQ ID NO: 2492441 - RNA, 19 nt, Artificial Sequence
  Description of Artificial Sequence: Synthetic oligonucleotide
guuacaccagaacggagca

SEQ ID NO: 2492442 - RNA, 19 nt, Artificial Sequence
  Description of Artificial Sequence: Synthetic oligonucleotide
ggcauaaaauuccuuuaug

SEQ ID NO: 2492443 - RNA, 19 nt, Artificial Sequence
  Description of Artificial Sequence: Synthetic oligonucleotide
gcgucugguagguaaaggg

SEQ ID NO: 2492444 - RNA, 19 nt, Artificial Sequence
  Description of Artificial Sequence: Synthetic oligonucleotide
uaaugucccguuuucccuc

SEQ ID NO: 2492445 - RNA, 19 nt, Artificial Sequence
  Description of Artificial Sequence: Synthetic oligonucleotide
caaguaaguagguucucca

SEQ ID NO: 2492446 - RNA, 19 nt, Artificial Sequence
  Description of Artificial Sequence: Synthetic oligonucleotide
ugguuacaccagaacggag

SEQ ID NO: 2492447 - RNA, 19 nt, Artificial Sequence
  Description of Artificial Sequence: Synthetic oligonucleotide
cucauauguuauuuugaca

SEQ ID NO: 2492448 - RNA, 19 nt, Artificial Sequence
  Description of Artificial Sequence: Synthetic oligonucleotide
ucccguuuucccuccagug

SEQ ID NO: 2492449 - RNA, 19 nt, Artificial Sequence
  Description of Artificial Sequence: Synthetic oligonucleotide
gguuacaccagaacggagc

SEQ ID NO: 2492450 - RNA, 19 nt, Artificial Sequence
  Description of Artificial Sequence: Synthetic oligonucleotide
uaaguagguucuccacugu

SEQ ID NO: 2492451 - RNA, 19 nt, Artificial Sequence
  Description of Artificial Sequence: Synthetic oligonucleotide
guugcaacuggagcuaaug

SEQ ID NO: 2492452 - RNA, 19 nt, Artificial Sequence
  Description of Artificial Sequence: Synthetic oligonucleotide
caugguugcaacuggagcu

SEQ ID NO: 2492453 - RNA, 19 nt, Artificial Sequence
  Description of Artificial Sequence: Synthetic oligonucleotide
uuguguaauucuugccagu

SEQ ID NO: 2492454 - RNA, 19 nt, Artificial Sequence
  Description of Artificial Sequence: Synthetic oligonucleotide
uucccuuuuccugggcugg

SEQ ID NO: 2492455 - RNA, 19 nt, Artificial Sequence
  Description of Artificial Sequence: Synthetic oligonucleotide
agaaaggcacgauguaaaa

SEQ ID NO: 2492456 - RNA, 19 nt, Artificial Sequence
  Description of Artificial Sequence: Synthetic oligonucleotide
aagagggcauaaaauuccu

SEQ ID NO: 2492457 - RNA, 19 nt, Artificial Sequence
  Description of Artificial Sequence: Synthetic oligonucleotide
acucaacagaaauucuuua

SEQ ID NO: 2492458 - RNA, 19 nt, Artificial Sequence
  Description of Artificial Sequence: Synthetic oligonucleotide
uccugggcuggccuggacc

SEQ ID NO: 2492459 - RNA, 19 nt, Artificial Sequence
  Description of Artificial Sequence: Synthetic oligonucleotide
agggcauaaaauuccuuua

SEQ ID NO: 2492460 - RNA, 19 nt, Artificial Sequence
  Description of Artificial Sequence: Synthetic oligonucleotide
ugcgucugguagguaaagg

SEQ ID NO: 2492461 - RNA, 19 nt, Artificial Sequence
  Description of Artificial Sequence: Synthetic oligonucleotide
ccucauauguuauuuugac

SEQ ID NO: 2492462 - RNA, 19 nt, Artificial Sequence
  Description of Artificial Sequence: Synthetic oligonucleotide
gguagguaaagggaguccc

SEQ ID NO: 2492463 - RNA, 19 nt, Artificial Sequence
  Description of Artificial Sequence: Synthetic oligonucleotide
aagagacucaacagaaauu

SEQ ID NO: 2492464 - RNA, 19 nt, Artificial Sequence
  Description of Artificial Sequence: Synthetic oligonucleotide
uuccugacaugguugcaac

SEQ ID NO: 2492465 - RNA, 19 nt, Artificial Sequence
  Description of Artificial Sequence: Synthetic oligonucleotide
gacaaaggggaauuucaua

SEQ ID NO: 2492466 - RNA, 19 nt, Artificial Sequence
  Description of Artificial Sequence: Synthetic oligonucleotide
cucauaccauuccauugug

SEQ ID NO: 2492467 - RNA, 19 nt, Artificial Sequence
  Description of Artificial Sequence: Synthetic oligonucleotide
cuuuauggcugaagcaaga

SEQ ID NO: 2492468 - RNA, 19 nt, Artificial Sequence
  Description of Artificial Sequence: Synthetic oligonucleotide
ggagcauccauuucagguc

SEQ ID NO: 2492469 - RNA, 19 nt, Artificial Sequence
  Description of Artificial Sequence: Synthetic oligonucleotide
gagggcauaaaauuccuuu

SEQ ID NO: 2492470 - RNA, 19 nt, Artificial Sequence
  Description of Artificial Sequence: Synthetic oligonucleotide
ggauucaaaccaugucucc

SEQ ID NO: 2492471 - RNA, 19 nt, Artificial Sequence
  Description of Artificial Sequence: Synthetic oligonucleotide
ugguagguaaagggagucc

SEQ ID NO: 2492472 - RNA, 19 nt, Artificial Sequence
  Description of Artificial Sequence: Synthetic oligonucleotide
gggaaagugaagaaaggca

SEQ ID NO: 2492473 - RNA, 19 nt, Artificial Sequence
  Description of Artificial Sequence: Synthetic oligonucleotide
aaacagcccuggaagagaa

SEQ ID NO: 2492474 - RNA, 19 nt, Artificial Sequence
  Description of Artificial Sequence: Synthetic oligonucleotide
cauauguuauuuugacaaa

SEQ ID NO: 2492475 - RNA, 19 nt, Artificial Sequence
  Description of Artificial Sequence: Synthetic oligonucleotide
agguagaaaccaauacuca

SEQ ID NO: 2492476 - RNA, 19 nt, Artificial Sequence
  Description of Artificial Sequence: Synthetic oligonucleotide
gagcuaaugucccguuuuc

SEQ ID NO: 2492477 - RNA, 19 nt, Artificial Sequence
  Description of Artificial Sequence: Synthetic oligonucleotide
cugccauuuuguuaaaugu

SEQ ID NO: 2492478 - RNA, 19 nt, Artificial Sequence
  Description of Artificial Sequence: Synthetic oligonucleotide
cuugaauucugcuccaaau

SEQ ID NO: 2492479 - RNA, 19 nt, Artificial Sequence
  Description of Artificial Sequence: Synthetic oligonucleotide
gugaggaaauguacaguug

SEQ ID NO: 2492480 - RNA, 19 nt, Artificial Sequence
  Description of Artificial Sequence: Synthetic oligonucleotide
acggagcauccauuucagg

SEQ ID NO: 2492481 - RNA, 19 nt, Artificial Sequence
  Description of Artificial Sequence: Synthetic oligonucleotide
ucuccacuguaaagaaaua

SEQ ID NO: 2492482 - RNA, 19 nt, Artificial Sequence
  Description of Artificial Sequence: Synthetic oligonucleotide
auuccauuguguaauucuu

SEQ ID NO: 2492483 - RNA, 19 nt, Artificial Sequence
  Description of Artificial Sequence: Synthetic oligonucleotide
aagugaagaaaggcacgau

SEQ ID NO: 2492484 - RNA, 19 nt, Artificial Sequence
  Description of Artificial Sequence: Synthetic oligonucleotide
uuucccaaguaaguagguu

SEQ ID NO: 2492485 - RNA, 19 nt, Artificial Sequence
  Description of Artificial Sequence: Synthetic oligonucleotide
uccugacaugguugcaacu

SEQ ID NO: 2492486 - RNA, 19 nt, Artificial Sequence
  Description of Artificial Sequence: Synthetic oligonucleotide
gucucauaauagauaccug

SEQ ID NO: 2492487 - RNA, 19 nt, Artificial Sequence
  Description of Artificial Sequence: Synthetic oligonucleotide
ggaagugcggugcgucugg

SEQ ID NO: 2492488 - RNA, 19 nt, Artificial Sequence
  Description of Artificial Sequence: Synthetic oligonucleotide
caggucaggaagugcggug

SEQ ID NO: 2492489 - RNA, 19 nt, Artificial Sequence
  Description of Artificial Sequence: Synthetic oligonucleotide
agucccucauauguuauuu

SEQ ID NO: 2492490 - RNA, 19 nt, Artificial Sequence
  Description of Artificial Sequence: Synthetic oligonucleotide
aaggggaauuucauaggua

SEQ ID NO: 2492491 - RNA, 19 nt, Artificial Sequence
  Description of Artificial Sequence: Synthetic oligonucleotide
uugacagaugugguuugaa

SEQ ID NO: 2492492 - RNA, 19 nt, Artificial Sequence
  Description of Artificial Sequence: Synthetic oligonucleotide
agccaguuucucauauguc

SEQ ID NO: 2492493 - RNA, 19 nt, Artificial Sequence
  Description of Artificial Sequence: Synthetic oligonucleotide
cugguagguaaagggaguc

SEQ ID NO: 2492494 - RNA, 19 nt, Artificial Sequence
  Description of Artificial Sequence: Synthetic oligonucleotide
ugguuugaagagggcauaa

SEQ ID NO: 2492495 - RNA, 19 nt, Artificial Sequence
  Description of Artificial Sequence: Synthetic oligonucleotide
cuaaugucccguuuucccu

SEQ ID NO: 2492496 - RNA, 19 nt, Artificial Sequence
  Description of Artificial Sequence: Synthetic oligonucleotide
agcaagagucuuguuuccu

SEQ ID NO: 2492497 - RNA, 19 nt, Artificial Sequence
  Description of Artificial Sequence: Synthetic oligonucleotide
ccaaguaaguagguucucc

SEQ ID NO: 2492498 - RNA, 19 nt, Artificial Sequence
  Description of Artificial Sequence: Synthetic oligonucleotide
aacagucguaggauucaaa

SEQ ID NO: 2492499 - RNA, 19 nt, Artificial Sequence
  Description of Artificial Sequence: Synthetic oligonucleotide
ccugacaugguugcaacug

SEQ ID NO: 2492500 - RNA, 19 nt, Artificial Sequence
  Description of Artificial Sequence: Synthetic oligonucleotide
gaccguccaugucucauaa

SEQ ID NO: 2492501 - RNA, 19 nt, Artificial Sequence
  Description of Artificial Sequence: Synthetic oligonucleotide
cgaaggugaggaaauguac

SEQ ID NO: 2492502 - RNA, 19 nt, Artificial Sequence
  Description of Artificial Sequence: Synthetic oligonucleotide
cagggaaagcaaaguguca

SEQ ID NO: 2492503 - RNA, 19 nt, Artificial Sequence
  Description of Artificial Sequence: Synthetic oligonucleotide
uggccuggaccguccaugu

SEQ ID NO: 2492504 - RNA, 19 nt, Artificial Sequence
  Description of Artificial Sequence: Synthetic oligonucleotide
cacccacucugccauuuug

SEQ ID NO: 2492505 - RNA, 19 nt, Artificial Sequence
  Description of Artificial Sequence: Synthetic oligonucleotide
uuuucccuccaguguuuau

SEQ ID NO: 2492506 - RNA, 19 nt, Artificial Sequence
  Description of Artificial Sequence: Synthetic oligonucleotide
cucugugcauaaucacuga

SEQ ID NO: 2492507 - RNA, 19 nt, Artificial Sequence
  Description of Artificial Sequence: Synthetic oligonucleotide
uucuugaauucugcuccaa

SEQ ID NO: 2492508 - RNA, 19 nt, Artificial Sequence
  Description of Artificial Sequence: Synthetic oligonucleotide
aggaagugcggugcgucug

SEQ ID NO: 2492509 - RNA, 19 nt, Artificial Sequence
  Description of Artificial Sequence: Synthetic oligonucleotide
ccaauacucaaaguuauaa

SEQ ID NO: 2492510 - RNA, 19 nt, Artificial Sequence
  Description of Artificial Sequence: Synthetic oligonucleotide
cagccaguuucucauaugu

SEQ ID NO: 2492511 - RNA, 19 nt, Artificial Sequence
  Description of Artificial Sequence: Synthetic oligonucleotide
cuuguauaguuuguuucua

SEQ ID NO: 2492512 - RNA, 19 nt, Artificial Sequence
  Description of Artificial Sequence: Synthetic oligonucleotide
ugcggugcgucugguaggu

SEQ ID NO: 2492513 - RNA, 19 nt, Artificial Sequence
  Description of Artificial Sequence: Synthetic oligonucleotide
uggaccguccaugucucau

SEQ ID NO: 2492514 - RNA, 19 nt, Artificial Sequence
  Description of Artificial Sequence: Synthetic oligonucleotide
gggaaagcaaagugucaca

SEQ ID NO: 2492515 - RNA, 19 nt, Artificial Sequence
  Description of Artificial Sequence: Synthetic oligonucleotide
gcucauaccauuccauugu

SEQ ID NO: 2492516 - RNA, 19 nt, Artificial Sequence
  Description of Artificial Sequence: Synthetic oligonucleotide
aggucgaaggugaggaaau

SEQ ID NO: 2492517 - RNA, 19 nt, Artificial Sequence
  Description of Artificial Sequence: Synthetic oligonucleotide
caggccgcuccuugguuac

SEQ ID NO: 2492518 - RNA, 19 nt, Artificial Sequence
  Description of Artificial Sequence: Synthetic oligonucleotide
guaaagggagucccucaua

SEQ ID NO: 2492519 - RNA, 19 nt, Artificial Sequence
  Description of Artificial Sequence: Synthetic oligonucleotide
augguugcaacuggagcua

SEQ ID NO: 2492520 - RNA, 19 nt, Artificial Sequence
  Description of Artificial Sequence: Synthetic oligonucleotide
aagugcggugcgucuggua

SEQ ID NO: 2492521 - RNA, 19 nt, Artificial Sequence
  Description of Artificial Sequence: Synthetic oligonucleotide
gaacagucguaggauucaa

SEQ ID NO: 2492522 - RNA, 19 nt, Artificial Sequence
  Description of Artificial Sequence: Synthetic oligonucleotide
cuggaagagaauggcugca

SEQ ID NO: 2492523 - RNA, 19 nt, Artificial Sequence
  Description of Artificial Sequence: Synthetic oligonucleotide
cccucauauguuauuuuga

SEQ ID NO: 2492524 - RNA, 19 nt, Artificial Sequence
  Description of Artificial Sequence: Synthetic oligonucleotide
gucgaaggugaggaaaugu

SEQ ID NO: 2492525 - RNA, 19 nt, Artificial Sequence
  Description of Artificial Sequence: Synthetic oligonucleotide
caggucgaaggugaggaaa

SEQ ID NO: 2492526 - RNA, 19 nt, Artificial Sequence
  Description of Artificial Sequence: Synthetic oligonucleotide
ucccuuuuccugggcuggc

SEQ ID NO: 2492527 - RNA, 19 nt, Artificial Sequence
  Description of Artificial Sequence: Synthetic oligonucleotide
gcaaagugucacaggucag

SEQ ID NO: 2492528 - RNA, 19 nt, Artificial Sequence
  Description of Artificial Sequence: Synthetic oligonucleotide
ugguugcaacuggagcuaa

SEQ ID NO: 2492529 - RNA, 19 nt, Artificial Sequence
  Description of Artificial Sequence: Synthetic oligonucleotide
cauucccuuuuccugggcu

SEQ ID NO: 2492530 - RNA, 19 nt, Artificial Sequence
  Description of Artificial Sequence: Synthetic oligonucleotide
caugucuccauucccuuuu

SEQ ID NO: 2492531 - RNA, 19 nt, Artificial Sequence
  Description of Artificial Sequence: Synthetic oligonucleotide
guucuccacuguaaagaaa

SEQ ID NO: 2492532 - RNA, 19 nt, Artificial Sequence
  Description of Artificial Sequence: Synthetic oligonucleotide
gggagucccucauauguua

SEQ ID NO: 2492533 - RNA, 19 nt, Artificial Sequence
  Description of Artificial Sequence: Synthetic oligonucleotide
ccguccaugucucauaaua

SEQ ID NO: 2492534 - RNA, 19 nt, Artificial Sequence
  Description of Artificial Sequence: Synthetic oligonucleotide
ucccuccaguguuuaucau

SEQ ID NO: 2492535 - RNA, 19 nt, Artificial Sequence
  Description of Artificial Sequence: Synthetic oligonucleotide
ggagcuaaugucccguuuu

SEQ ID NO: 2492536 - RNA, 19 nt, Artificial Sequence
  Description of Artificial Sequence: Synthetic oligonucleotide
cagaacggagcauccauuu

SEQ ID NO: 2492537 - RNA, 19 nt, Artificial Sequence
  Description of Artificial Sequence: Synthetic oligonucleotide
agagggcauaaaauuccuu

SEQ ID NO: 2492538 - RNA, 19 nt, Artificial Sequence
  Description of Artificial Sequence: Synthetic oligonucleotide
gcauaaucacugaaucaaa

SEQ ID NO: 2492539 - RNA, 19 nt, Artificial Sequence
  Description of Artificial Sequence: Synthetic oligonucleotide
ggucgaaggugaggaaaug

SEQ ID NO: 2492540 - RNA, 19 nt, Artificial Sequence
  Description of Artificial Sequence: Synthetic oligonucleotide
gguaaagggagucccucau

SEQ ID NO: 2492541 - RNA, 19 nt, Artificial Sequence
  Description of Artificial Sequence: Synthetic oligonucleotide
uuucacccacucugccauu

SEQ ID NO: 2492542 - RNA, 19 nt, Artificial Sequence
  Description of Artificial Sequence: Synthetic oligonucleotide
ggggaauuucauagguaga

SEQ ID NO: 2492543 - RNA, 19 nt, Artificial Sequence
  Description of Artificial Sequence: Synthetic oligonucleotide
guagguaaagggagucccu

SEQ ID NO: 2492544 - RNA, 19 nt, Artificial Sequence
  Description of Artificial Sequence: Synthetic oligonucleotide
gcugaagcaagagucuugu

SEQ ID NO: 2492545 - RNA, 19 nt, Artificial Sequence
  Description of Artificial Sequence: Synthetic oligonucleotide
gccuggaccguccaugucu

SEQ ID NO: 2492546 - RNA, 19 nt, Artificial Sequence
  Description of Artificial Sequence: Synthetic oligonucleotide
agggagucccucauauguu

SEQ ID NO: 2492547 - RNA, 19 nt, Artificial Sequence
  Description of Artificial Sequence: Synthetic oligonucleotide
cgucugguagguaaaggga

SEQ ID NO: 2492548 - RNA, 19 nt, Artificial Sequence
  Description of Artificial Sequence: Synthetic oligonucleotide
accguccaugucucauaau

SEQ ID NO: 2492549 - RNA, 19 nt, Artificial Sequence
  Description of Artificial Sequence: Synthetic oligonucleotide
guacaguugccaagcugaa

SEQ ID NO: 2492550 - RNA, 19 nt, Artificial Sequence
  Description of Artificial Sequence: Synthetic oligonucleotide
ccuggaccguccaugucuc

SEQ ID NO: 2492551 - RNA, 19 nt, Artificial Sequence
  Description of Artificial Sequence: Synthetic oligonucleotide
gguagaacucucugugcau

SEQ ID NO: 2492552 - RNA, 19 nt, Artificial Sequence
  Description of Artificial Sequence: Synthetic oligonucleotide
guuuucccuccaguguuua

SEQ ID NO: 2492553 - RNA, 19 nt, Artificial Sequence
  Description of Artificial Sequence: Synthetic oligonucleotide
gagucccucauauguuauu

SEQ ID NO: 2492554 - RNA, 19 nt, Artificial Sequence
  Description of Artificial Sequence: Synthetic oligonucleotide
agcauccauuucaggucga

SEQ ID NO: 2492555 - RNA, 19 nt, Artificial Sequence
  Description of Artificial Sequence: Synthetic oligonucleotide
cggagcauccauuucaggu

SEQ ID NO: 2492556 - RNA, 19 nt, Artificial Sequence
  Description of Artificial Sequence: Synthetic oligonucleotide
ccauuccauuguguaauuc

SEQ ID NO: 2492557 - RNA, 19 nt, Artificial Sequence
  Description of Artificial Sequence: Synthetic oligonucleotide
gucguaggauucaaaccau

SEQ ID NO: 2492558 - RNA, 19 nt, Artificial Sequence
  Description of Artificial Sequence: Synthetic oligonucleotide
cguaggauucaaaccaugu

SEQ ID NO: 2492559 - RNA, 19 nt, Artificial Sequence
  Description of Artificial Sequence: Synthetic oligonucleotide
gcaagagucuuguuuccuu

SEQ ID NO: 2492560 - RNA, 19 nt, Artificial Sequence
  Description of Artificial Sequence: Synthetic oligonucleotide
ccgcuccuugguuacacca

SEQ ID NO: 2492561 - RNA, 19 nt, Artificial Sequence
  Description of Artificial Sequence: Synthetic oligonucleotide
ggugcgucugguagguaaa

SEQ ID NO: 2492562 - RNA, 19 nt, Artificial Sequence
  Description of Artificial Sequence: Synthetic oligonucleotide
ccacucugccauuuuguua

SEQ ID NO: 2492563 - RNA, 19 nt, Artificial Sequence
  Description of Artificial Sequence: Synthetic oligonucleotide
gcaggccgcuccuugguua

SEQ ID NO: 2492564 - RNA, 19 nt, Artificial Sequence
  Description of Artificial Sequence: Synthetic oligonucleotide
cuggaccguccaugucuca

SEQ ID NO: 2492565 - RNA, 19 nt, Artificial Sequence
  Description of Artificial Sequence: Synthetic oligonucleotide
gaagugcggugcgucuggu

SEQ ID NO: 2492566 - RNA, 19 nt, Artificial Sequence
  Description of Artificial Sequence: Synthetic oligonucleotide
cccaaguaaguagguucuc

SEQ ID NO: 2492567 - RNA, 19 nt, Artificial Sequence
  Description of Artificial Sequence: Synthetic oligonucleotide
cccguuuucccuccagugu

SEQ ID NO: 2492568 - RNA, 19 nt, Artificial Sequence
  Description of Artificial Sequence: Synthetic oligonucleotide
cggugcgucugguagguaa

SEQ ID NO: 2492569 - RNA, 19 nt, Artificial Sequence
  Description of Artificial Sequence: Synthetic oligonucleotide
ggagucccucauauguuau

SEQ ID NO: 2492570 - RNA, 19 nt, Artificial Sequence
  Description of Artificial Sequence: Synthetic oligonucleotide
ggccuggaccguccauguc

SEQ ID NO: 2492571 - RNA, 19 nt, Artificial Sequence
  Description of Artificial Sequence: Synthetic oligonucleotide
ccguuuucccuccaguguu

SEQ ID NO: 2492572 - RNA, 19 nt, Artificial Sequence
  Description of Artificial Sequence: Synthetic oligonucleotide
aggccgcuccuugguuaca

SEQ ID NO: 2492573 - RNA, 19 nt, Artificial Sequence
  Description of Artificial Sequence: Synthetic oligonucleotide
ccagaacggagcauccauu

SEQ ID NO: 2492574 - RNA, 19 nt, Artificial Sequence
  Description of Artificial Sequence: Synthetic oligonucleotide
gguugcaacuggagcuaau

SEQ ID NO: 2492575 - RNA, 19 nt, Artificial Sequence
  Description of Artificial Sequence: Synthetic oligonucleotide
ccaugucuccauucccuuu

SEQ ID NO: 2492576 - RNA, 19 nt, Artificial Sequence
  Description of Artificial Sequence: Synthetic oligonucleotide
cugggcuggccuggaccgu

SEQ ID NO: 2492577 - RNA, 19 nt, Artificial Sequence
  Description of Artificial Sequence: Synthetic oligonucleotide
cguuuucccuccaguguuu

SEQ ID NO: 2492578 - RNA, 19 nt, Artificial Sequence
  Description of Artificial Sequence: Synthetic oligonucleotide
gcggugcgucugguaggua

SEQ ID NO: 2492579 - RNA, 19 nt, Artificial Sequence
  Description of Artificial Sequence: Synthetic oligonucleotide
aauauugaaccccugaccc

SEQ ID NO: 2492580 - RNA, 19 nt, Artificial Sequence
  Description of Artificial Sequence: Synthetic oligonucleotide
uguacuaaaauauugaacc

SEQ ID NO: 2492581 - RNA, 19 nt, Artificial Sequence
  Description of Artificial Sequence: Synthetic oligonucleotide
agcagaaagacccagaugc

SEQ ID NO: 2492582 - RNA, 19 nt, Artificial Sequence
  Description of Artificial Sequence: Synthetic oligonucleotide
aaauauugaaccccugacc

SEQ ID NO: 2492583 - RNA, 19 nt, Artificial Sequence
  Description of Artificial Sequence: Synthetic oligonucleotide
aaauauauuucucucaugu

SEQ ID NO: 2492584 - RNA, 19 nt, Artificial Sequence
  Description of Artificial Sequence: Synthetic oligonucleotide
ucaaaggugacacuggucg

SEQ ID NO: 2492585 - RNA, 19 nt, Artificial Sequence
  Description of Artificial Sequence: Synthetic oligonucleotide
aaaacaaaacaaaacaaac

SEQ ID NO: 2492586 - RNA, 19 nt, Artificial Sequence
  Description of Artificial Sequence: Synthetic oligonucleotide
aacaaaucaaagcccaacc

SEQ ID NO: 2492587 - RNA, 19 nt, Artificial Sequence
  Description of Artificial Sequence: Synthetic oligonucleotide
aaaauauugaaccccugac

SEQ ID NO: 2492588 - RNA, 19 nt, Artificial Sequence
  Description of Artificial Sequence: Synthetic oligonucleotide
aaagguuccaaguugcacg

SEQ ID NO: 2492589 - RNA, 19 nt, Artificial Sequence
  Description of Artificial Sequence: Synthetic oligonucleotide
aagggugucagacaggaac

SEQ ID NO: 2492590 - RNA, 19 nt, Artificial Sequence
  Description of Artificial Sequence: Synthetic oligonucleotide
uaaagaagagaauaaagca

SEQ ID NO: 2492591 - RNA, 19 nt, Artificial Sequence
  Description of Artificial Sequence: Synthetic oligonucleotide
aaacaaaacaaaacaaaac

SEQ ID NO: 2492592 - RNA, 19 nt, Artificial Sequence
  Description of Artificial Sequence: Synthetic oligonucleotide
uucaagaccagccugaugu

SEQ ID NO: 2492593 - RNA, 19 nt, Artificial Sequence
  Description of Artificial Sequence: Synthetic oligonucleotide
aagagaauaaagcauuugu

SEQ ID NO: 2492594 - RNA, 19 nt, Artificial Sequence
  Description of Artificial Sequence: Synthetic oligonucleotide
ugcacgagcagaaagaccc

SEQ ID NO: 2492595 - RNA, 19 nt, Artificial Sequence
  Description of Artificial Sequence: Synthetic oligonucleotide
auaagaaagccccuuuacc

SEQ ID NO: 2492596 - RNA, 19 nt, Artificial Sequence
  Description of Artificial Sequence: Synthetic oligonucleotide
uuuuguacuaaaauauuga

SEQ ID NO: 2492597 - RNA, 19 nt, Artificial Sequence
  Description of Artificial Sequence: Synthetic oligonucleotide
ucauguauacuucaaaggu

SEQ ID NO: 2492598 - RNA, 19 nt, Artificial Sequence
  Description of Artificial Sequence: Synthetic oligonucleotide
acagauugaguucuaggcc

SEQ ID NO: 2492599 - RNA, 19 nt, Artificial Sequence
  Description of Artificial Sequence: Synthetic oligonucleotide
uaagaaagccccuuuaccc

SEQ ID NO: 2492600 - RNA, 19 nt, Artificial Sequence
  Description of Artificial Sequence: Synthetic oligonucleotide
ugcuugauaagaaagcccc

SEQ ID NO: 2492601 - RNA, 19 nt, Artificial Sequence
  Description of Artificial Sequence: Synthetic oligonucleotide
uagaugacaccuuuaaucc

SEQ ID NO: 2492602 - RNA, 19 nt, Artificial Sequence
  Description of Artificial Sequence: Synthetic oligonucleotide
ucaugucucaaacaaaaca

SEQ ID NO: 2492603 - RNA, 19 nt, Artificial Sequence
  Description of Artificial Sequence: Synthetic oligonucleotide
aaacuuuuguacuaaaaua

SEQ ID NO: 2492604 - RNA, 19 nt, Artificial Sequence
  Description of Artificial Sequence: Synthetic oligonucleotide
uauacuucaaaggugacac

SEQ ID NO: 2492605 - RNA, 19 nt, Artificial Sequence
  Description of Artificial Sequence: Synthetic oligonucleotide
uguaaauauauuucucuca

SEQ ID NO: 2492606 - RNA, 19 nt, Artificial Sequence
  Description of Artificial Sequence: Synthetic oligonucleotide
uaaaauauugaaccccuga

SEQ ID NO: 2492607 - RNA, 19 nt, Artificial Sequence
  Description of Artificial Sequence: Synthetic oligonucleotide
caaaacaaaacaaacaaaa

SEQ ID NO: 2492608 - RNA, 19 nt, Artificial Sequence
  Description of Artificial Sequence: Synthetic oligonucleotide
ucuuagacaaagcuggacu

SEQ ID NO: 2492609 - RNA, 19 nt, Artificial Sequence
  Description of Artificial Sequence: Synthetic oligonucleotide
aaucaggaugcacaggcag

SEQ ID NO: 2492610 - RNA, 19 nt, Artificial Sequence
  Description of Artificial Sequence: Synthetic oligonucleotide
guagaugacaccuuuaauc

SEQ ID NO: 2492611 - RNA, 19 nt, Artificial Sequence
  Description of Artificial Sequence: Synthetic oligonucleotide
cucauguauacuucaaagg

SEQ ID NO: 2492612 - RNA, 19 nt, Artificial Sequence
  Description of Artificial Sequence: Synthetic oligonucleotide
aaagcauuuguaaauauau

SEQ ID NO: 2492613 - RNA, 19 nt, Artificial Sequence
  Description of Artificial Sequence: Synthetic oligonucleotide
uggaaagggugucagacag

SEQ ID NO: 2492614 - RNA, 19 nt, Artificial Sequence
  Description of Artificial Sequence: Synthetic oligonucleotide
aaaggagguagaugacacc

SEQ ID NO: 2492615 - RNA, 19 nt, Artificial Sequence
  Description of Artificial Sequence: Synthetic oligonucleotide
uacccuagaugacagagag

SEQ ID NO: 2492616 - RNA, 19 nt, Artificial Sequence
  Description of Artificial Sequence: Synthetic oligonucleotide
auauuucucucauguauac

SEQ ID NO: 2492617 - RNA, 19 nt, Artificial Sequence
  Description of Artificial Sequence: Synthetic oligonucleotide
agagcaggcauucuguagg

SEQ ID NO: 2492618 - RNA, 19 nt, Artificial Sequence
  Description of Artificial Sequence: Synthetic oligonucleotide
cuagaugacagagagauuc

SEQ ID NO: 2492619 - RNA, 19 nt, Artificial Sequence
  Description of Artificial Sequence: Synthetic oligonucleotide
gagaauaaagcauuuguaa

SEQ ID NO: 2492620 - RNA, 19 nt, Artificial Sequence
  Description of Artificial Sequence: Synthetic oligonucleotide
uuuacccuagaugacagag

SEQ ID NO: 2492621 - RNA, 19 nt, Artificial Sequence
  Description of Artificial Sequence: Synthetic oligonucleotide
uacuaaaauauugaacccc

SEQ ID NO: 2492622 - RNA, 19 nt, Artificial Sequence
  Description of Artificial Sequence: Synthetic oligonucleotide
aaaggugacacuggucggc

SEQ ID NO: 2492623 - RNA, 19 nt, Artificial Sequence
  Description of Artificial Sequence: Synthetic oligonucleotide
agcagaggcagucaccgcc

SEQ ID NO: 2492624 - RNA, 19 nt, Artificial Sequence
  Description of Artificial Sequence: Synthetic oligonucleotide
ugucagacaugcuugauaa

SEQ ID NO: 2492625 - RNA, 19 nt, Artificial Sequence
  Description of Artificial Sequence: Synthetic oligonucleotide
gauaagaaagccccuuuac

SEQ ID NO: 2492626 - RNA, 19 nt, Artificial Sequence
  Description of Artificial Sequence: Synthetic oligonucleotide
gagaaaucaugucucaaac

SEQ ID NO: 2492627 - RNA, 19 nt, Artificial Sequence
  Description of Artificial Sequence: Synthetic oligonucleotide
aagcuggacuugcugaaac

SEQ ID NO: 2492628 - RNA, 19 nt, Artificial Sequence
  Description of Artificial Sequence: Synthetic oligonucleotide
gacaugcuugauaagaaag

SEQ ID NO: 2492629 - RNA, 19 nt, Artificial Sequence
  Description of Artificial Sequence: Synthetic oligonucleotide
ucagacaugcuugauaaga

SEQ ID NO: 2492630 - RNA, 19 nt, Artificial Sequence
  Description of Artificial Sequence: Synthetic oligonucleotide
agaugacaccuuuaauccc

SEQ ID NO: 2492631 - RNA, 19 nt, Artificial Sequence
  Description of Artificial Sequence: Synthetic oligonucleotide
uguaggaacaugggaaagg

SEQ ID NO: 2492632 - RNA, 19 nt, Artificial Sequence
  Description of Artificial Sequence: Synthetic oligonucleotide
aagaaagccccuuuaccca

SEQ ID NO: 2492633 - RNA, 19 nt, Artificial Sequence
  Description of Artificial Sequence: Synthetic oligonucleotide
uuguaaauauauuucucuc

SEQ ID NO: 2492634 - RNA, 19 nt, Artificial Sequence
  Description of Artificial Sequence: Synthetic oligonucleotide
acaugcuugauaagaaagc

SEQ ID NO: 2492635 - RNA, 19 nt, Artificial Sequence
  Description of Artificial Sequence: Synthetic oligonucleotide
aaggacgaaagguuccaag

SEQ ID NO: 2492636 - RNA, 19 nt, Artificial Sequence
  Description of Artificial Sequence: Synthetic oligonucleotide
caaaacaaaacaaaacaaa

SEQ ID NO: 2492637 - RNA, 19 nt, Artificial Sequence
  Description of Artificial Sequence: Synthetic oligonucleotide
auuucucucauguauacuu

SEQ ID NO: 2492638 - RNA, 19 nt, Artificial Sequence
  Description of Artificial Sequence: Synthetic oligonucleotide
gauucuauggcuccuuuga

SEQ ID NO: 2492639 - RNA, 19 nt, Artificial Sequence
  Description of Artificial Sequence: Synthetic oligonucleotide
uaaagagcaggcauucugu

SEQ ID NO: 2492640 - RNA, 19 nt, Artificial Sequence
  Description of Artificial Sequence: Synthetic oligonucleotide
auuuguaaauauauuucuc

SEQ ID NO: 2492641 - RNA, 19 nt, Artificial Sequence
  Description of Artificial Sequence: Synthetic oligonucleotide
caaacaaaacaaaacaaaa

SEQ ID NO: 2492642 - RNA, 19 nt, Artificial Sequence
  Description of Artificial Sequence: Synthetic oligonucleotide
gauucagagggcccggagg

SEQ ID NO: 2492643 - RNA, 19 nt, Artificial Sequence
  Description of Artificial Sequence: Synthetic oligonucleotide
gacgaaagguuccaaguug

SEQ ID NO: 2492644 - RNA, 19 nt, Artificial Sequence
  Description of Artificial Sequence: Synthetic oligonucleotide
ugaaacuuuuguacuaaaa

SEQ ID NO: 2492645 - RNA, 19 nt, Artificial Sequence
  Description of Artificial Sequence: Synthetic oligonucleotide
guacuaaaauauugaaccc

SEQ ID NO: 2492646 - RNA, 19 nt, Artificial Sequence
  Description of Artificial Sequence: Synthetic oligonucleotide
agaacugggagugaacagg

SEQ ID NO: 2492647 - RNA, 19 nt, Artificial Sequence
  Description of Artificial Sequence: Synthetic oligonucleotide
guaaagagcaggcauucug

SEQ ID NO: 2492648 - RNA, 19 nt, Artificial Sequence
  Description of Artificial Sequence: Synthetic oligonucleotide
aaggugggagguaaagagc

SEQ ID NO: 2492649 - RNA, 19 nt, Artificial Sequence
  Description of Artificial Sequence: Synthetic oligonucleotide
ucuauggcuccuuugauuu

SEQ ID NO: 2492650 - RNA, 19 nt, Artificial Sequence
  Description of Artificial Sequence: Synthetic oligonucleotide
gagugaacaggguugagca

SEQ ID NO: 2492651 - RNA, 19 nt, Artificial Sequence
  Description of Artificial Sequence: Synthetic oligonucleotide
gaaccccugacccagguug

SEQ ID NO: 2492652 - RNA, 19 nt, Artificial Sequence
  Description of Artificial Sequence: Synthetic oligonucleotide
caugucucaaacaaaacaa

SEQ ID NO: 2492653 - RNA, 19 nt, Artificial Sequence
  Description of Artificial Sequence: Synthetic oligonucleotide
cccuuuacccauaagaagg

SEQ ID NO: 2492654 - RNA, 19 nt, Artificial Sequence
  Description of Artificial Sequence: Synthetic oligonucleotide
caugcuugauaagaaagcc

SEQ ID NO: 2492655 - RNA, 19 nt, Artificial Sequence
  Description of Artificial Sequence: Synthetic oligonucleotide
acaaaucaaagcccaacca

SEQ ID NO: 2492656 - RNA, 19 nt, Artificial Sequence
  Description of Artificial Sequence: Synthetic oligonucleotide
caucucuuagacaaagcug

SEQ ID NO: 2492657 - RNA, 19 nt, Artificial Sequence
  Description of Artificial Sequence: Synthetic oligonucleotide
gaaacuuuuguacuaaaau

SEQ ID NO: 2492658 - RNA, 19 nt, Artificial Sequence
  Description of Artificial Sequence: Synthetic oligonucleotide
agaaaucaugucucaaaca

SEQ ID NO: 2492659 - RNA, 19 nt, Artificial Sequence
  Description of Artificial Sequence: Synthetic oligonucleotide
caagguugcuucuccaggg

SEQ ID NO: 2492660 - RNA, 19 nt, Artificial Sequence
  Description of Artificial Sequence: Synthetic oligonucleotide
acgaaagguuccaaguugc

SEQ ID NO: 2492661 - RNA, 19 nt, Artificial Sequence
  Description of Artificial Sequence: Synthetic oligonucleotide
aagguuccaaguugcacga

SEQ ID NO: 2492662 - RNA, 19 nt, Artificial Sequence
  Description of Artificial Sequence: Synthetic oligonucleotide
cacagugucaccuggagca

SEQ ID NO: 2492663 - RNA, 19 nt, Artificial Sequence
  Description of Artificial Sequence: Synthetic oligonucleotide
cuuggaaagggugucagac

SEQ ID NO: 2492664 - RNA, 19 nt, Artificial Sequence
  Description of Artificial Sequence: Synthetic oligonucleotide
aaaucaaagcccaaccaaa

SEQ ID NO: 2492665 - RNA, 19 nt, Artificial Sequence
  Description of Artificial Sequence: Synthetic oligonucleotide
agccccuuuacccauaaga

SEQ ID NO: 2492666 - RNA, 19 nt, Artificial Sequence
  Description of Artificial Sequence: Synthetic oligonucleotide
gaaaggagguagaugacac

SEQ ID NO: 2492667 - RNA, 19 nt, Artificial Sequence
  Description of Artificial Sequence: Synthetic oligonucleotide
ucuggggucuuggaaaggg

SEQ ID NO: 2492668 - RNA, 19 nt, Artificial Sequence
  Description of Artificial Sequence: Synthetic oligonucleotide
acuaaaauauugaaccccu

SEQ ID NO: 2492669 - RNA, 19 nt, Artificial Sequence
  Description of Artificial Sequence: Synthetic oligonucleotide
augcuugauaagaaagccc

SEQ ID NO: 2492670 - RNA, 19 nt, Artificial Sequence
  Description of Artificial Sequence: Synthetic oligonucleotide
gacaggaaccagaagcccg

SEQ ID NO: 2492671 - RNA, 19 nt, Artificial Sequence
  Description of Artificial Sequence: Synthetic oligonucleotide
auguauacuucaaagguga

SEQ ID NO: 2492672 - RNA, 19 nt, Artificial Sequence
  Description of Artificial Sequence: Synthetic oligonucleotide
ugcuacagaacugggagug

SEQ ID NO: 2492673 - RNA, 19 nt, Artificial Sequence
  Description of Artificial Sequence: Synthetic oligonucleotide
gagagauucagagggcccg

SEQ ID NO: 2492674 - RNA, 19 nt, Artificial Sequence
  Description of Artificial Sequence: Synthetic oligonucleotide
gcaaucaggaugcacaggc

SEQ ID NO: 2492675 - RNA, 19 nt, Artificial Sequence
  Description of Artificial Sequence: Synthetic oligonucleotide
auucuguaggaacauggga

SEQ ID NO: 2492676 - RNA, 19 nt, Artificial Sequence
  Description of Artificial Sequence: Synthetic oligonucleotide
ucuguaggaacaugggaaa

SEQ ID NO: 2492677 - RNA, 19 nt, Artificial Sequence
  Description of Artificial Sequence: Synthetic oligonucleotide
ugggagguaaagagcaggc

SEQ ID NO: 2492678 - RNA, 19 nt, Artificial Sequence
  Description of Artificial Sequence: Synthetic oligonucleotide
gaacugggagugaacaggg

SEQ ID NO: 2492679 - RNA, 19 nt, Artificial Sequence
  Description of Artificial Sequence: Synthetic oligonucleotide
cagguuggaccucaaaagc

SEQ ID NO: 2492680 - RNA, 19 nt, Artificial Sequence
  Description of Artificial Sequence: Synthetic oligonucleotide
aggacgaaagguuccaagu

SEQ ID NO: 2492681 - RNA, 19 nt, Artificial Sequence
  Description of Artificial Sequence: Synthetic oligonucleotide
uucucucauguauacuuca

SEQ ID NO: 2492682 - RNA, 19 nt, Artificial Sequence
  Description of Artificial Sequence: Synthetic oligonucleotide
uugcugaaacuuuuguacu

SEQ ID NO: 2492683 - RNA, 19 nt, Artificial Sequence
  Description of Artificial Sequence: Synthetic oligonucleotide
gucaccuggagcaagguug

SEQ ID NO: 2492684 - RNA, 19 nt, Artificial Sequence
  Description of Artificial Sequence: Synthetic oligonucleotide
cagccugauguacagauug

SEQ ID NO: 2492685 - RNA, 19 nt, Artificial Sequence
  Description of Artificial Sequence: Synthetic oligonucleotide
ugauaagaaagccccuuua

SEQ ID NO: 2492686 - RNA, 19 nt, Artificial Sequence
  Description of Artificial Sequence: Synthetic oligonucleotide
gaugacaccuuuaauccca

SEQ ID NO: 2492687 - RNA, 19 nt, Artificial Sequence
  Description of Artificial Sequence: Synthetic oligonucleotide
ugaacaggguugagcagcc

SEQ ID NO: 2492688 - RNA, 19 nt, Artificial Sequence
  Description of Artificial Sequence: Synthetic oligonucleotide
cugggcaucucuuagacaa

SEQ ID NO: 2492689 - RNA, 19 nt, Artificial Sequence
  Description of Artificial Sequence: Synthetic oligonucleotide
cauuuguaaauauauuucu

SEQ ID NO: 2492690 - RNA, 19 nt, Artificial Sequence
  Description of Artificial Sequence: Synthetic oligonucleotide
uuagacaaagcuggacuug

SEQ ID NO: 2492691 - RNA, 19 nt, Artificial Sequence
  Description of Artificial Sequence: Synthetic oligonucleotide
uuucucucauguauacuuc

SEQ ID NO: 2492692 - RNA, 19 nt, Artificial Sequence
  Description of Artificial Sequence: Synthetic oligonucleotide
auucagagggcccggaggu

SEQ ID NO: 2492693 - RNA, 19 nt, Artificial Sequence
  Description of Artificial Sequence: Synthetic oligonucleotide
uggggucuuggaaagggug

SEQ ID NO: 2492694 - RNA, 19 nt, Artificial Sequence
  Description of Artificial Sequence: Synthetic oligonucleotide
cagauugaguucuaggcca

SEQ ID NO: 2492695 - RNA, 19 nt, Artificial Sequence
  Description of Artificial Sequence: Synthetic oligonucleotide
cugggagugaacaggguug

SEQ ID NO: 2492696 - RNA, 19 nt, Artificial Sequence
  Description of Artificial Sequence: Synthetic oligonucleotide
ucuggcgucacagugucac

SEQ ID NO: 2492697 - RNA, 19 nt, Artificial Sequence
  Description of Artificial Sequence: Synthetic oligonucleotide
uuacccuagaugacagaga

SEQ ID NO: 2492698 - RNA, 19 nt, Artificial Sequence
  Description of Artificial Sequence: Synthetic oligonucleotide
uccuuuacccuagaugaca

SEQ ID NO: 2492699 - RNA, 19 nt, Artificial Sequence
  Description of Artificial Sequence: Synthetic oligonucleotide
uaggaacaugggaaaggag

SEQ ID NO: 2492700 - RNA, 19 nt, Artificial Sequence
  Description of Artificial Sequence: Synthetic oligonucleotide
guaaauauauuucucucau

SEQ ID NO: 2492701 - RNA, 19 nt, Artificial Sequence
  Description of Artificial Sequence: Synthetic oligonucleotide
agguuggaccucaaaagcg

SEQ ID NO: 2492702 - RNA, 19 nt, Artificial Sequence
  Description of Artificial Sequence: Synthetic oligonucleotide
ucaccuggagcaagguugc

SEQ ID NO: 2492703 - RNA, 19 nt, Artificial Sequence
  Description of Artificial Sequence: Synthetic oligonucleotide
agagagauucagagggccc

SEQ ID NO: 2492704 - RNA, 19 nt, Artificial Sequence
  Description of Artificial Sequence: Synthetic oligonucleotide
uaaggcaugaggguuccca

SEQ ID NO: 2492705 - RNA, 19 nt, Artificial Sequence
  Description of Artificial Sequence: Synthetic oligonucleotide
uccaaguugcacgagcaga

SEQ ID NO: 2492706 - RNA, 19 nt, Artificial Sequence
  Description of Artificial Sequence: Synthetic oligonucleotide
agcaagguugcuucuccag

SEQ ID NO: 2492707 - RNA, 19 nt, Artificial Sequence
  Description of Artificial Sequence: Synthetic oligonucleotide
acaggguugagcagccucc

SEQ ID NO: 2492708 - RNA, 19 nt, Artificial Sequence
  Description of Artificial Sequence: Synthetic oligonucleotide
uguauacuucaaaggugac

SEQ ID NO: 2492709 - RNA, 19 nt, Artificial Sequence
  Description of Artificial Sequence: Synthetic oligonucleotide
ggaaccagaagcccggaag

SEQ ID NO: 2492710 - RNA, 19 nt, Artificial Sequence
  Description of Artificial Sequence: Synthetic oligonucleotide
agguaaagagcaggcauuc

SEQ ID NO: 2492711 - RNA, 19 nt, Artificial Sequence
  Description of Artificial Sequence: Synthetic oligonucleotide
accgccucccacuggauuc

SEQ ID NO: 2492712 - RNA, 19 nt, Artificial Sequence
  Description of Artificial Sequence: Synthetic oligonucleotide
gugaacaggguugagcagc

SEQ ID NO: 2492713 - RNA, 19 nt, Artificial Sequence
  Description of Artificial Sequence: Synthetic oligonucleotide
agguagaugacaccuuuaa

SEQ ID NO: 2492714 - RNA, 19 nt, Artificial Sequence
  Description of Artificial Sequence: Synthetic oligonucleotide
aaucaaagcccaaccaaaa

SEQ ID NO: 2492715 - RNA, 19 nt, Artificial Sequence
  Description of Artificial Sequence: Synthetic oligonucleotide
caugaggguucccauuggg

SEQ ID NO: 2492716 - RNA, 19 nt, Artificial Sequence
  Description of Artificial Sequence: Synthetic oligonucleotide
uuggaaagggugucagaca

SEQ ID NO: 2492717 - RNA, 19 nt, Artificial Sequence
  Description of Artificial Sequence: Synthetic oligonucleotide
acagaacugggagugaaca

SEQ ID NO: 2492718 - RNA, 19 nt, Artificial Sequence
  Description of Artificial Sequence: Synthetic oligonucleotide
augaggguucccauugggc

SEQ ID NO: 2492719 - RNA, 19 nt, Artificial Sequence
  Description of Artificial Sequence: Synthetic oligonucleotide
gaaagguuccaaguugcac

SEQ ID NO: 2492720 - RNA, 19 nt, Artificial Sequence
  Description of Artificial Sequence: Synthetic oligonucleotide
uuggaccucaaaagcgccc

SEQ ID NO: 2492721 - RNA, 19 nt, Artificial Sequence
  Description of Artificial Sequence: Synthetic oligonucleotide
gacugcugaaggcaagcug

SEQ ID NO: 2492722 - RNA, 19 nt, Artificial Sequence
  Description of Artificial Sequence: Synthetic oligonucleotide
agccccaaaggacgaaagg

SEQ ID NO: 2492723 - RNA, 19 nt, Artificial Sequence
  Description of Artificial Sequence: Synthetic oligonucleotide
guucccauugggcugccag

SEQ ID NO: 2492724 - RNA, 19 nt, Artificial Sequence
  Description of Artificial Sequence: Synthetic oligonucleotide
acccagaugcccucuggcg

SEQ ID NO: 2492725 - RNA, 19 nt, Artificial Sequence
  Description of Artificial Sequence: Synthetic oligonucleotide
aucaugucucaaacaaaac

SEQ ID NO: 2492726 - RNA, 19 nt, Artificial Sequence
  Description of Artificial Sequence: Synthetic oligonucleotide
aagguugcuucuccaggga

SEQ ID NO: 2492727 - RNA, 19 nt, Artificial Sequence
  Description of Artificial Sequence: Synthetic oligonucleotide
accagccugauguacagau

SEQ ID NO: 2492728 - RNA, 19 nt, Artificial Sequence
  Description of Artificial Sequence: Synthetic oligonucleotide
ucucucauguauacuucaa

SEQ ID NO: 2492729 - RNA, 19 nt, Artificial Sequence
  Description of Artificial Sequence: Synthetic oligonucleotide
agugaacaggguugagcag

SEQ ID NO: 2492730 - RNA, 19 nt, Artificial Sequence
  Description of Artificial Sequence: Synthetic oligonucleotide
aaaucaugucucaaacaaa

SEQ ID NO: 2492731 - RNA, 19 nt, Artificial Sequence
  Description of Artificial Sequence: Synthetic oligonucleotide
uugcacgagcagaaagacc

SEQ ID NO: 2492732 - RNA, 19 nt, Artificial Sequence
  Description of Artificial Sequence: Synthetic oligonucleotide
ugcugaaacuuuuguacua

SEQ ID NO: 2492733 - RNA, 19 nt, Artificial Sequence
  Description of Artificial Sequence: Synthetic oligonucleotide
ccuccuuuacccuagauga

SEQ ID NO: 2492734 - RNA, 19 nt, Artificial Sequence
  Description of Artificial Sequence: Synthetic oligonucleotide
agagaauaaagcauuugua

SEQ ID NO: 2492735 - RNA, 19 nt, Artificial Sequence
  Description of Artificial Sequence: Synthetic oligonucleotide
gucacagugucaccuggag

SEQ ID NO: 2492736 - RNA, 19 nt, Artificial Sequence
  Description of Artificial Sequence: Synthetic oligonucleotide
uucuauggcuccuuugauu

SEQ ID NO: 2492737 - RNA, 19 nt, Artificial Sequence
  Description of Artificial Sequence: Synthetic oligonucleotide
gaggguucccauugggcug

SEQ ID NO: 2492738 - RNA, 19 nt, Artificial Sequence
  Description of Artificial Sequence: Synthetic oligonucleotide
agacaugcuugauaagaaa

SEQ ID NO: 2492739 - RNA, 19 nt, Artificial Sequence
  Description of Artificial Sequence: Synthetic oligonucleotide
cacuggauucuauggcucc

SEQ ID NO: 2492740 - RNA, 19 nt, Artificial Sequence
  Description of Artificial Sequence: Synthetic oligonucleotide
cagagagauucagagggcc

SEQ ID NO: 2492741 - RNA, 19 nt, Artificial Sequence
  Description of Artificial Sequence: Synthetic oligonucleotide
cuuuacccauaagaagggg

SEQ ID NO: 2492742 - RNA, 19 nt, Artificial Sequence
  Description of Artificial Sequence: Synthetic oligonucleotide
acugggagugaacaggguu

SEQ ID NO: 2492743 - RNA, 19 nt, Artificial Sequence
  Description of Artificial Sequence: Synthetic oligonucleotide
cauugggcugccagcagag

SEQ ID NO: 2492744 - RNA, 19 nt, Artificial Sequence
  Description of Artificial Sequence: Synthetic oligonucleotide
gagcagaaagacccagaug

SEQ ID NO: 2492745 - RNA, 19 nt, Artificial Sequence
  Description of Artificial Sequence: Synthetic oligonucleotide
agaugacagagagauucag

SEQ ID NO: 2492746 - RNA, 19 nt, Artificial Sequence
  Description of Artificial Sequence: Synthetic oligonucleotide
uacagaacugggagugaac

SEQ ID NO: 2492747 - RNA, 19 nt, Artificial Sequence
  Description of Artificial Sequence: Synthetic oligonucleotide
aguugcacgagcagaaaga

SEQ ID NO: 2492748 - RNA, 19 nt, Artificial Sequence
  Description of Artificial Sequence: Synthetic oligonucleotide
cagaacugggagugaacag

SEQ ID NO: 2492749 - RNA, 19 nt, Artificial Sequence
  Description of Artificial Sequence: Synthetic oligonucleotide
uggaccucaaaagcgcccc

SEQ ID NO: 2492750 - RNA, 19 nt, Artificial Sequence
  Description of Artificial Sequence: Synthetic oligonucleotide
ccagguuggaccucaaaag

SEQ ID NO: 2492751 - RNA, 19 nt, Artificial Sequence
  Description of Artificial Sequence: Synthetic oligonucleotide
uauuucucucauguauacu

SEQ ID NO: 2492752 - RNA, 19 nt, Artificial Sequence
  Description of Artificial Sequence: Synthetic oligonucleotide
aaggcaugaggguucccau

SEQ ID NO: 2492753 - RNA, 19 nt, Artificial Sequence
  Description of Artificial Sequence: Synthetic oligonucleotide
aggguucccauugggcugc

SEQ ID NO: 2492754 - RNA, 19 nt, Artificial Sequence
  Description of Artificial Sequence: Synthetic oligonucleotide
gcaagguugcuucuccagg

SEQ ID NO: 2492755 - RNA, 19 nt, Artificial Sequence
  Description of Artificial Sequence: Synthetic oligonucleotide
caggcauucuguaggaaca

SEQ ID NO: 2492756 - RNA, 19 nt, Artificial Sequence
  Description of Artificial Sequence: Synthetic oligonucleotide
ucuuggaaagggugucaga

SEQ ID NO: 2492757 - RNA, 19 nt, Artificial Sequence
  Description of Artificial Sequence: Synthetic oligonucleotide
uucccauugggcugccagc

SEQ ID NO: 2492758 - RNA, 19 nt, Artificial Sequence
  Description of Artificial Sequence: Synthetic oligonucleotide
guaggaacaugggaaagga

SEQ ID NO: 2492759 - RNA, 19 nt, Artificial Sequence
  Description of Artificial Sequence: Synthetic oligonucleotide
augucagacaugcuugaua

SEQ ID NO: 2492760 - RNA, 19 nt, Artificial Sequence
  Description of Artificial Sequence: Synthetic oligonucleotide
gguuccaaguugcacgagc

SEQ ID NO: 2492761 - RNA, 19 nt, Artificial Sequence
  Description of Artificial Sequence: Synthetic oligonucleotide
guauacuucaaaggugaca

SEQ ID NO: 2492762 - RNA, 19 nt, Artificial Sequence
  Description of Artificial Sequence: Synthetic oligonucleotide
ugauuucuggggucuugga

SEQ ID NO: 2492763 - RNA, 19 nt, Artificial Sequence
  Description of Artificial Sequence: Synthetic oligonucleotide
guugcacgagcagaaagac

SEQ ID NO: 2492764 - RNA, 19 nt, Artificial Sequence
  Description of Artificial Sequence: Synthetic oligonucleotide
aaagccccuuuacccauaa

SEQ ID NO: 2492765 - RNA, 19 nt, Artificial Sequence
  Description of Artificial Sequence: Synthetic oligonucleotide
aagcauuuguaaauauauu

SEQ ID NO: 2492766 - RNA, 19 nt, Artificial Sequence
  Description of Artificial Sequence: Synthetic oligonucleotide
aagacccagaugcccucug

SEQ ID NO: 2492767 - RNA, 19 nt, Artificial Sequence
  Description of Artificial Sequence: Synthetic oligonucleotide
agaaagccccuuuacccau

SEQ ID NO: 2492768 - RNA, 19 nt, Artificial Sequence
  Description of Artificial Sequence: Synthetic oligonucleotide
ggcaugaggguucccauug

SEQ ID NO: 2492769 - RNA, 19 nt, Artificial Sequence
  Description of Artificial Sequence: Synthetic oligonucleotide
gacacuggucggcugcuac

SEQ ID NO: 2492770 - RNA, 19 nt, Artificial Sequence
  Description of Artificial Sequence: Synthetic oligonucleotide
gaaagacccagaugcccuc

SEQ ID NO: 2492771 - RNA, 19 nt, Artificial Sequence
  Description of Artificial Sequence: Synthetic oligonucleotide
aagcuggggaccugggcau

SEQ ID NO: 2492772 - RNA, 19 nt, Artificial Sequence
  Description of Artificial Sequence: Synthetic oligonucleotide
ccaaaggacgaaagguucc

SEQ ID NO: 2492773 - RNA, 19 nt, Artificial Sequence
  Description of Artificial Sequence: Synthetic oligonucleotide
gguuggaccucaaaagcgc

SEQ ID NO: 2492774 - RNA, 19 nt, Artificial Sequence
  Description of Artificial Sequence: Synthetic oligonucleotide
ccagggaugucagacaugc

SEQ ID NO: 2492775 - RNA, 19 nt, Artificial Sequence
  Description of Artificial Sequence: Synthetic oligonucleotide
agagauucagagggcccgg

SEQ ID NO: 2492776 - RNA, 19 nt, Artificial Sequence
  Description of Artificial Sequence: Synthetic oligonucleotide
gucuuggaaagggugucag

SEQ ID NO: 2492777 - RNA, 19 nt, Artificial Sequence
  Description of Artificial Sequence: Synthetic oligonucleotide
aaggugacacuggucggcu

SEQ ID NO: 2492778 - RNA, 19 nt, Artificial Sequence
  Description of Artificial Sequence: Synthetic oligonucleotide
uagaauacuggugcauuuu

SEQ ID NO: 2492779 - RNA, 19 nt, Artificial Sequence
  Description of Artificial Sequence: Synthetic oligonucleotide
ggagcaagguugcuucucc

SEQ ID NO: 2492780 - RNA, 19 nt, Artificial Sequence
  Description of Artificial Sequence: Synthetic oligonucleotide
agcuggacuugcugaaacu

SEQ ID NO: 2492781 - RNA, 19 nt, Artificial Sequence
  Description of Artificial Sequence: Synthetic oligonucleotide
agcaaucaggaugcacagg

SEQ ID NO: 2492782 - RNA, 19 nt, Artificial Sequence
  Description of Artificial Sequence: Synthetic oligonucleotide
ugcugaaggcaagcugggg

SEQ ID NO: 2492783 - RNA, 19 nt, Artificial Sequence
  Description of Artificial Sequence: Synthetic oligonucleotide
aggugcccagccccaaagg

SEQ ID NO: 2492784 - RNA, 19 nt, Artificial Sequence
  Description of Artificial Sequence: Synthetic oligonucleotide
guuggaccucaaaagcgcc

SEQ ID NO: 2492785 - RNA, 19 nt, Artificial Sequence
  Description of Artificial Sequence: Synthetic oligonucleotide
cuguaggaacaugggaaag

SEQ ID NO: 2492786 - RNA, 19 nt, Artificial Sequence
  Description of Artificial Sequence: Synthetic oligonucleotide
aaccccugacccagguugg

SEQ ID NO: 2492787 - RNA, 19 nt, Artificial Sequence
  Description of Artificial Sequence: Synthetic oligonucleotide
auacuucaaaggugacacu

SEQ ID NO: 2492788 - RNA, 19 nt, Artificial Sequence
  Description of Artificial Sequence: Synthetic oligonucleotide
ggugacacuggucggcugc

SEQ ID NO: 2492789 - RNA, 19 nt, Artificial Sequence
  Description of Artificial Sequence: Synthetic oligonucleotide
ucccauugggcugccagca

SEQ ID NO: 2492790 - RNA, 19 nt, Artificial Sequence
  Description of Artificial Sequence: Synthetic oligonucleotide
ugggagugaacaggguuga

SEQ ID NO: 2492791 - RNA, 19 nt, Artificial Sequence
  Description of Artificial Sequence: Synthetic oligonucleotide
gggaugucagacaugcuug

SEQ ID NO: 2492792 - RNA, 19 nt, Artificial Sequence
  Description of Artificial Sequence: Synthetic oligonucleotide
ggagugaacaggguugagc

SEQ ID NO: 2492793 - RNA, 19 nt, Artificial Sequence
  Description of Artificial Sequence: Synthetic oligonucleotide
aaagacccagaugcccucu

SEQ ID NO: 2492794 - RNA, 19 nt, Artificial Sequence
  Description of Artificial Sequence: Synthetic oligonucleotide
cagacaugcuugauaagaa

SEQ ID NO: 2492795 - RNA, 19 nt, Artificial Sequence
  Description of Artificial Sequence: Synthetic oligonucleotide
agauugaguucuaggccag

SEQ ID NO: 2492796 - RNA, 19 nt, Artificial Sequence
  Description of Artificial Sequence: Synthetic oligonucleotide
cagaagcccggaaggacug

SEQ ID NO: 2492797 - RNA, 19 nt, Artificial Sequence
  Description of Artificial Sequence: Synthetic oligonucleotide
ugccagcagaggcagucac

SEQ ID NO: 2492798 - RNA, 19 nt, Artificial Sequence
  Description of Artificial Sequence: Synthetic oligonucleotide
aaagcuggacuugcugaaa

SEQ ID NO: 2492799 - RNA, 19 nt, Artificial Sequence
  Description of Artificial Sequence: Synthetic oligonucleotide
uccagggaugucagacaug

SEQ ID NO: 2492800 - RNA, 19 nt, Artificial Sequence
  Description of Artificial Sequence: Synthetic oligonucleotide
ccuuuacccuagaugacag

SEQ ID NO: 2492801 - RNA, 19 nt, Artificial Sequence
  Description of Artificial Sequence: Synthetic oligonucleotide
gucagacaugcuugauaag

SEQ ID NO: 2492802 - RNA, 19 nt, Artificial Sequence
  Description of Artificial Sequence: Synthetic oligonucleotide
guuccaaguugcacgagca

SEQ ID NO: 2492803 - RNA, 19 nt, Artificial Sequence
  Description of Artificial Sequence: Synthetic oligonucleotide
cuccuuuacccuagaugac

SEQ ID NO: 2492804 - RNA, 19 nt, Artificial Sequence
  Description of Artificial Sequence: Synthetic oligonucleotide
ugucaccuggagcaagguu

SEQ ID NO: 2492805 - RNA, 19 nt, Artificial Sequence
  Description of Artificial Sequence: Synthetic oligonucleotide
uggcgucacagugucaccu

SEQ ID NO: 2492806 - RNA, 19 nt, Artificial Sequence
  Description of Artificial Sequence: Synthetic oligonucleotide
gcugaaggcaagcugggga

SEQ ID NO: 2492807 - RNA, 19 nt, Artificial Sequence
  Description of Artificial Sequence: Synthetic oligonucleotide
uggucggcugcuacagaac

SEQ ID NO: 2492808 - RNA, 19 nt, Artificial Sequence
  Description of Artificial Sequence: Synthetic oligonucleotide
aaaggacgaaagguuccaa

SEQ ID NO: 2492809 - RNA, 19 nt, Artificial Sequence
  Description of Artificial Sequence: Synthetic oligonucleotide
ggauucuauggcuccuuug

SEQ ID NO: 2492810 - RNA, 19 nt, Artificial Sequence
  Description of Artificial Sequence: Synthetic oligonucleotide
agcccggaaggacugcuga

SEQ ID NO: 2492811 - RNA, 19 nt, Artificial Sequence
  Description of Artificial Sequence: Synthetic oligonucleotide
uggauucuauggcuccuuu

SEQ ID NO: 2492812 - RNA, 19 nt, Artificial Sequence
  Description of Artificial Sequence: Synthetic oligonucleotide
cagccccaaaggacgaaag

SEQ ID NO: 2492813 - RNA, 19 nt, Artificial Sequence
  Description of Artificial Sequence: Synthetic oligonucleotide
agaagcccggaaggacugc

SEQ ID NO: 2492814 - RNA, 19 nt, Artificial Sequence
  Description of Artificial Sequence: Synthetic oligonucleotide
gcaucucuuagacaaagcu

SEQ ID NO: 2492815 - RNA, 19 nt, Artificial Sequence
  Description of Artificial Sequence: Synthetic oligonucleotide
ggaaaggagguagaugaca

SEQ ID NO: 2492816 - RNA, 19 nt, Artificial Sequence
  Description of Artificial Sequence: Synthetic oligonucleotide
ggaaggacugcugaaggca

SEQ ID NO: 2492817 - RNA, 19 nt, Artificial Sequence
  Description of Artificial Sequence: Synthetic oligonucleotide
cucucauguauacuucaaa

SEQ ID NO: 2492818 - RNA, 19 nt, Artificial Sequence
  Description of Artificial Sequence: Synthetic oligonucleotide
ccccuuuacccauaagaag

SEQ ID NO: 2492819 - RNA, 19 nt, Artificial Sequence
  Description of Artificial Sequence: Synthetic oligonucleotide
ccuggagcaagguugcuuc

SEQ ID NO: 2492820 - RNA, 19 nt, Artificial Sequence
  Description of Artificial Sequence: Synthetic oligonucleotide
aagccccuuuacccauaag

SEQ ID NO: 2492821 - RNA, 19 nt, Artificial Sequence
  Description of Artificial Sequence: Synthetic oligonucleotide
augcacaggcagguggauc

SEQ ID NO: 2492822 - RNA, 19 nt, Artificial Sequence
  Description of Artificial Sequence: Synthetic oligonucleotide
cccaaaggacgaaagguuc

SEQ ID NO: 2492823 - RNA, 19 nt, Artificial Sequence
  Description of Artificial Sequence: Synthetic oligonucleotide
acacuggucggcugcuaca

SEQ ID NO: 2492824 - RNA, 19 nt, Artificial Sequence
  Description of Artificial Sequence: Synthetic oligonucleotide
ggaccugggcaucucuuag

SEQ ID NO: 2492825 - RNA, 19 nt, Artificial Sequence
  Description of Artificial Sequence: Synthetic oligonucleotide
gugucagacaggaaccaga

SEQ ID NO: 2492826 - RNA, 19 nt, Artificial Sequence
  Description of Artificial Sequence: Synthetic oligonucleotide
gaaggacugcugaaggcaa

SEQ ID NO: 2492827 - RNA, 19 nt, Artificial Sequence
  Description of Artificial Sequence: Synthetic oligonucleotide
cacgagcagaaagacccag

SEQ ID NO: 2492828 - RNA, 19 nt, Artificial Sequence
  Description of Artificial Sequence: Synthetic oligonucleotide
gucaccgccucccacugga

SEQ ID NO: 2492829 - RNA, 19 nt, Artificial Sequence
  Description of Artificial Sequence: Synthetic oligonucleotide
agguugcuucuccagggau

SEQ ID NO: 2492830 - RNA, 19 nt, Artificial Sequence
  Description of Artificial Sequence: Synthetic oligonucleotide
cacuggucggcugcuacag

SEQ ID NO: 2492831 - RNA, 19 nt, Artificial Sequence
  Description of Artificial Sequence: Synthetic oligonucleotide
acuggauucuauggcuccu

SEQ ID NO: 2492832 - RNA, 19 nt, Artificial Sequence
  Description of Artificial Sequence: Synthetic oligonucleotide
cuauggcuccuuugauuuc

SEQ ID NO: 2492833 - RNA, 19 nt, Artificial Sequence
  Description of Artificial Sequence: Synthetic oligonucleotide
caaaggacgaaagguucca

SEQ ID NO: 2492834 - RNA, 19 nt, Artificial Sequence
  Description of Artificial Sequence: Synthetic oligonucleotide
ggagguaaagagcaggcau

SEQ ID NO: 2492835 - RNA, 19 nt, Artificial Sequence
  Description of Artificial Sequence: Synthetic oligonucleotide
gagcaagguugcuucucca

SEQ ID NO: 2492836 - RNA, 19 nt, Artificial Sequence
  Description of Artificial Sequence: Synthetic oligonucleotide
cuggucggcugcuacagaa

SEQ ID NO: 2492837 - RNA, 19 nt, Artificial Sequence
  Description of Artificial Sequence: Synthetic oligonucleotide
caaucaggaugcacaggca

SEQ ID NO: 2492838 - RNA, 19 nt, Artificial Sequence
  Description of Artificial Sequence: Synthetic oligonucleotide
guugagcagccuccuuuac

SEQ ID NO: 2492839 - RNA, 19 nt, Artificial Sequence
  Description of Artificial Sequence: Synthetic oligonucleotide
cugaaacuuuuguacuaaa

SEQ ID NO: 2492840 - RNA, 19 nt, Artificial Sequence
  Description of Artificial Sequence: Synthetic oligonucleotide
ugggcaucucuuagacaaa

SEQ ID NO: 2492841 - RNA, 19 nt, Artificial Sequence
  Description of Artificial Sequence: Synthetic oligonucleotide
augacaccuuuaaucccag

SEQ ID NO: 2492842 - RNA, 19 nt, Artificial Sequence
  Description of Artificial Sequence: Synthetic oligonucleotide
gggcaucucuuagacaaag

SEQ ID NO: 2492843 - RNA, 19 nt, Artificial Sequence
  Description of Artificial Sequence: Synthetic oligonucleotide
uggagcaagguugcuucuc

SEQ ID NO: 2492844 - RNA, 19 nt, Artificial Sequence
  Description of Artificial Sequence: Synthetic oligonucleotide
gguugcuucuccagggaug

SEQ ID NO: 2492845 - RNA, 19 nt, Artificial Sequence
  Description of Artificial Sequence: Synthetic oligonucleotide
auugaaccccugacccagg

SEQ ID NO: 2492846 - RNA, 19 nt, Artificial Sequence
  Description of Artificial Sequence: Synthetic oligonucleotide
agcagccuccuuuacccua

SEQ ID NO: 2492847 - RNA, 19 nt, Artificial Sequence
  Description of Artificial Sequence: Synthetic oligonucleotide
cuuuacccuagaugacaga

SEQ ID NO: 2492848 - RNA, 19 nt, Artificial Sequence
  Description of Artificial Sequence: Synthetic oligonucleotide
ggaugucagacaugcuuga

SEQ ID NO: 2492849 - RNA, 19 nt, Artificial Sequence
  Description of Artificial Sequence: Synthetic oligonucleotide
gcaugaggguucccauugg

SEQ ID NO: 2492850 - RNA, 19 nt, Artificial Sequence
  Description of Artificial Sequence: Synthetic oligonucleotide
aacugggagugaacagggu

SEQ ID NO: 2492851 - RNA, 19 nt, Artificial Sequence
  Description of Artificial Sequence: Synthetic oligonucleotide
ugaaccccugacccagguu

SEQ ID NO: 2492852 - RNA, 19 nt, Artificial Sequence
  Description of Artificial Sequence: Synthetic oligonucleotide
guugcuucuccagggaugu

SEQ ID NO: 2492853 - RNA, 19 nt, Artificial Sequence
  Description of Artificial Sequence: Synthetic oligonucleotide
gguaaggcaugaggguucc

SEQ ID NO: 2492854 - RNA, 19 nt, Artificial Sequence
  Description of Artificial Sequence: Synthetic oligonucleotide
cuggcgucacagugucacc

SEQ ID NO: 2492855 - RNA, 19 nt, Artificial Sequence
  Description of Artificial Sequence: Synthetic oligonucleotide
ggugucagacaggaaccag

SEQ ID NO: 2492856 - RNA, 19 nt, Artificial Sequence
  Description of Artificial Sequence: Synthetic oligonucleotide
uucagagggcccggaggug

SEQ ID NO: 2492857 - RNA, 19 nt, Artificial Sequence
  Description of Artificial Sequence: Synthetic oligonucleotide
ggugcccagccccaaagga

SEQ ID NO: 2492858 - RNA, 19 nt, Artificial Sequence
  Description of Artificial Sequence: Synthetic oligonucleotide
aggaaccagaagcccggaa

SEQ ID NO: 2492859 - RNA, 19 nt, Artificial Sequence
  Description of Artificial Sequence: Synthetic oligonucleotide
cuacagaacugggagugaa

SEQ ID NO: 2492860 - RNA, 19 nt, Artificial Sequence
  Description of Artificial Sequence: Synthetic oligonucleotide
cccugacccagguuggacc

SEQ ID NO: 2492861 - RNA, 19 nt, Artificial Sequence
  Description of Artificial Sequence: Synthetic oligonucleotide
gcagaaagacccagaugcc

SEQ ID NO: 2492862 - RNA, 19 nt, Artificial Sequence
  Description of Artificial Sequence: Synthetic oligonucleotide
gagguaaagagcaggcauu

SEQ ID NO: 2492863 - RNA, 19 nt, Artificial Sequence
  Description of Artificial Sequence: Synthetic oligonucleotide
aggugacacuggucggcug

SEQ ID NO: 2492864 - RNA, 19 nt, Artificial Sequence
  Description of Artificial Sequence: Synthetic oligonucleotide
cagucaccgccucccacug

SEQ ID NO: 2492865 - RNA, 19 nt, Artificial Sequence
  Description of Artificial Sequence: Synthetic oligonucleotide
aagcccggaaggacugcug

SEQ ID NO: 2492866 - RNA, 19 nt, Artificial Sequence
  Description of Artificial Sequence: Synthetic oligonucleotide
acuggucggcugcuacaga

SEQ ID NO: 2492867 - RNA, 19 nt, Artificial Sequence
  Description of Artificial Sequence: Synthetic oligonucleotide
gucggcugcuacagaacug

SEQ ID NO: 2492868 - RNA, 19 nt, Artificial Sequence
  Description of Artificial Sequence: Synthetic oligonucleotide
ccucccacuggauucuaug

SEQ ID NO: 2492869 - RNA, 19 nt, Artificial Sequence
  Description of Artificial Sequence: Synthetic oligonucleotide
acgagcagaaagacccaga

SEQ ID NO: 2492870 - RNA, 19 nt, Artificial Sequence
  Description of Artificial Sequence: Synthetic oligonucleotide
ccaaguugcacgagcagaa

SEQ ID NO: 2492871 - RNA, 19 nt, Artificial Sequence
  Description of Artificial Sequence: Synthetic oligonucleotide
ggcaucucuuagacaaagc

SEQ ID NO: 2492872 - RNA, 19 nt, Artificial Sequence
  Description of Artificial Sequence: Synthetic oligonucleotide
agagggcccggaggugccc

SEQ ID NO: 2492873 - RNA, 19 nt, Artificial Sequence
  Description of Artificial Sequence: Synthetic oligonucleotide
agccugauguacagauuga

SEQ ID NO: 2492874 - RNA, 19 nt, Artificial Sequence
  Description of Artificial Sequence: Synthetic oligonucleotide
cagcagaggcagucaccgc

SEQ ID NO: 2492875 - RNA, 19 nt, Artificial Sequence
  Description of Artificial Sequence: Synthetic oligonucleotide
aaagggugucagacaggaa

SEQ ID NO: 2492876 - RNA, 19 nt, Artificial Sequence
  Description of Artificial Sequence: Synthetic oligonucleotide
ugcccucuggcgucacagu

SEQ ID NO: 2492877 - RNA, 19 nt, Artificial Sequence
  Description of Artificial Sequence: Synthetic oligonucleotide
gcaagcuggggaccugggc

SEQ ID NO: 2492878 - RNA, 19 nt, Artificial Sequence
  Description of Artificial Sequence: Synthetic oligonucleotide
gaaggcaagcuggggaccu

SEQ ID NO: 2492879 - RNA, 19 nt, Artificial Sequence
  Description of Artificial Sequence: Synthetic oligonucleotide
ggcgucacagugucaccug

SEQ ID NO: 2492880 - RNA, 19 nt, Artificial Sequence
  Description of Artificial Sequence: Synthetic oligonucleotide
ccacuggauucuauggcuc

SEQ ID NO: 2492881 - RNA, 19 nt, Artificial Sequence
  Description of Artificial Sequence: Synthetic oligonucleotide
cccuagaugacagagagau

SEQ ID NO: 2492882 - RNA, 19 nt, Artificial Sequence
  Description of Artificial Sequence: Synthetic oligonucleotide
gagguagaugacaccuuua

SEQ ID NO: 2492883 - RNA, 19 nt, Artificial Sequence
  Description of Artificial Sequence: Synthetic oligonucleotide
ggugggagguaaagagcag

SEQ ID NO: 2492884 - RNA, 19 nt, Artificial Sequence
  Description of Artificial Sequence: Synthetic oligonucleotide
accuggagcaagguugcuu

SEQ ID NO: 2492885 - RNA, 19 nt, Artificial Sequence
  Description of Artificial Sequence: Synthetic oligonucleotide
cccagguuggaccucaaaa

SEQ ID NO: 2492886 - RNA, 19 nt, Artificial Sequence
  Description of Artificial Sequence: Synthetic oligonucleotide
agguuccaaguugcacgag

SEQ ID NO: 2492887 - RNA, 19 nt, Artificial Sequence
  Description of Artificial Sequence: Synthetic oligonucleotide
gccccuuuacccauaagaa

SEQ ID NO: 2492888 - RNA, 19 nt, Artificial Sequence
  Description of Artificial Sequence: Synthetic oligonucleotide
gcagccuccuuuacccuag

SEQ ID NO: 2492889 - RNA, 19 nt, Artificial Sequence
  Description of Artificial Sequence: Synthetic oligonucleotide
cggaaggacugcugaaggc

SEQ ID NO: 2492890 - RNA, 19 nt, Artificial Sequence
  Description of Artificial Sequence: Synthetic oligonucleotide
ggguaaggcaugaggguuc

SEQ ID NO: 2492891 - RNA, 19 nt, Artificial Sequence
  Description of Artificial Sequence: Synthetic oligonucleotide
ggaugcacaggcaggugga

SEQ ID NO: 2492892 - RNA, 19 nt, Artificial Sequence
  Description of Artificial Sequence: Synthetic oligonucleotide
gggaaaggagguagaugac

SEQ ID NO: 2492893 - RNA, 19 nt, Artificial Sequence
  Description of Artificial Sequence: Synthetic oligonucleotide
ccucuggcgucacaguguc

SEQ ID NO: 2492894 - RNA, 19 nt, Artificial Sequence
  Description of Artificial Sequence: Synthetic oligonucleotide
cuggacuugcugaaacuuu

SEQ ID NO: 2492895 - RNA, 19 nt, Artificial Sequence
  Description of Artificial Sequence: Synthetic oligonucleotide
gaugucagacaugcuugau

SEQ ID NO: 2492896 - RNA, 19 nt, Artificial Sequence
  Description of Artificial Sequence: Synthetic oligonucleotide
cccggaaggacugcugaag

SEQ ID NO: 2492897 - RNA, 19 nt, Artificial Sequence
  Description of Artificial Sequence: Synthetic oligonucleotide
ggacgaaagguuccaaguu

SEQ ID NO: 2492898 - RNA, 19 nt, Artificial Sequence
  Description of Artificial Sequence: Synthetic oligonucleotide
cugcuacagaacugggagu

SEQ ID NO: 2492899 - RNA, 19 nt, Artificial Sequence
  Description of Artificial Sequence: Synthetic oligonucleotide
gggucuuggaaaggguguc

SEQ ID NO: 2492900 - RNA, 19 nt, Artificial Sequence
  Description of Artificial Sequence: Synthetic oligonucleotide
acccuagaugacagagaga

SEQ ID NO: 2492901 - RNA, 19 nt, Artificial Sequence
  Description of Artificial Sequence: Synthetic oligonucleotide
agaugcccucuggcgucac

SEQ ID NO: 2492902 - RNA, 19 nt, Artificial Sequence
  Description of Artificial Sequence: Synthetic oligonucleotide
gaagcccggaaggacugcu

SEQ ID NO: 2492903 - RNA, 19 nt, Artificial Sequence
  Description of Artificial Sequence: Synthetic oligonucleotide
ucaccgccucccacuggau

SEQ ID NO: 2492904 - RNA, 19 nt, Artificial Sequence
  Description of Artificial Sequence: Synthetic oligonucleotide
ggcugcuacagaacuggga

SEQ ID NO: 2492905 - RNA, 19 nt, Artificial Sequence
  Description of Artificial Sequence: Synthetic oligonucleotide
ggucuuggaaaggguguca

SEQ ID NO: 2492906 - RNA, 19 nt, Artificial Sequence
  Description of Artificial Sequence: Synthetic oligonucleotide
guaaggcaugaggguuccc

SEQ ID NO: 2492907 - RNA, 19 nt, Artificial Sequence
  Description of Artificial Sequence: Synthetic oligonucleotide
agcaggcauucuguaggaa

SEQ ID NO: 2492908 - RNA, 19 nt, Artificial Sequence
  Description of Artificial Sequence: Synthetic oligonucleotide
aggguugagcagccuccuu

SEQ ID NO: 2492909 - RNA, 19 nt, Artificial Sequence
  Description of Artificial Sequence: Synthetic oligonucleotide
caaguugcacgagcagaaa

SEQ ID NO: 2492910 - RNA, 19 nt, Artificial Sequence
  Description of Artificial Sequence: Synthetic oligonucleotide
cagaggcagucaccgccuc

SEQ ID NO: 2492911 - RNA, 19 nt, Artificial Sequence
  Description of Artificial Sequence: Synthetic oligonucleotide
ggcagucaccgccucccac

SEQ ID NO: 2492912 - RNA, 19 nt, Artificial Sequence
  Description of Artificial Sequence: Synthetic oligonucleotide
gaaagccccuuuacccaua

SEQ ID NO: 2492913 - RNA, 19 nt, Artificial Sequence
  Description of Artificial Sequence: Synthetic oligonucleotide
ggcccggaggugcccagcc

SEQ ID NO: 2492914 - RNA, 19 nt, Artificial Sequence
  Description of Artificial Sequence: Synthetic oligonucleotide
cccacuggauucuauggcu

SEQ ID NO: 2492915 - RNA, 19 nt, Artificial Sequence
  Description of Artificial Sequence: Synthetic oligonucleotide
ccauugggcugccagcaga

SEQ ID NO: 2492916 - RNA, 19 nt, Artificial Sequence
  Description of Artificial Sequence: Synthetic oligonucleotide
cuggggucuuggaaagggu

SEQ ID NO: 2492917 - RNA, 19 nt, Artificial Sequence
  Description of Artificial Sequence: Synthetic oligonucleotide
ggguugagcagccuccuuu

SEQ ID NO: 2492918 - RNA, 19 nt, Artificial Sequence
  Description of Artificial Sequence: Synthetic oligonucleotide
gggaccugggcaucucuua

SEQ ID NO: 2492919 - RNA, 19 nt, Artificial Sequence
  Description of Artificial Sequence: Synthetic oligonucleotide
cccagcaaucaggaugcac

SEQ ID NO: 2492920 - RNA, 19 nt, Artificial Sequence
  Description of Artificial Sequence: Synthetic oligonucleotide
gcuacagaacugggaguga

SEQ ID NO: 2492921 - RNA, 19 nt, Artificial Sequence
  Description of Artificial Sequence: Synthetic oligonucleotide
ggggucuuggaaagggugu

SEQ ID NO: 2492922 - RNA, 19 nt, Artificial Sequence
  Description of Artificial Sequence: Synthetic oligonucleotide
gguaaagagcaggcauucu

SEQ ID NO: 2492923 - RNA, 19 nt, Artificial Sequence
  Description of Artificial Sequence: Synthetic oligonucleotide
cugacccagguuggaccuc

SEQ ID NO: 2492924 - RNA, 19 nt, Artificial Sequence
  Description of Artificial Sequence: Synthetic oligonucleotide
cuggagcaagguugcuucu

SEQ ID NO: 2492925 - RNA, 19 nt, Artificial Sequence
  Description of Artificial Sequence: Synthetic oligonucleotide
cccauugggcugccagcag

SEQ ID NO: 2492926 - RNA, 19 nt, Artificial Sequence
  Description of Artificial Sequence: Synthetic oligonucleotide
accccugacccagguugga

SEQ ID NO: 2492927 - RNA, 19 nt, Artificial Sequence
  Description of Artificial Sequence: Synthetic oligonucleotide
cgaaagguuccaaguugca

SEQ ID NO: 2492928 - RNA, 19 nt, Artificial Sequence
  Description of Artificial Sequence: Synthetic oligonucleotide
gcuugauaagaaagccccu

SEQ ID NO: 2492929 - RNA, 19 nt, Artificial Sequence
  Description of Artificial Sequence: Synthetic oligonucleotide
gcuggacuugcugaaacuu

SEQ ID NO: 2492930 - RNA, 19 nt, Artificial Sequence
  Description of Artificial Sequence: Synthetic oligonucleotide
cucuggcgucacaguguca

SEQ ID NO: 2492931 - RNA, 19 nt, Artificial Sequence
  Description of Artificial Sequence: Synthetic oligonucleotide
ccugacccagguuggaccu

SEQ ID NO: 2492932 - RNA, 19 nt, Artificial Sequence
  Description of Artificial Sequence: Synthetic oligonucleotide
caggaaccagaagcccgga

SEQ ID NO: 2492933 - RNA, 19 nt, Artificial Sequence
  Description of Artificial Sequence: Synthetic oligonucleotide
ccccaaaggacgaaagguu

SEQ ID NO: 2492934 - RNA, 19 nt, Artificial Sequence
  Description of Artificial Sequence: Synthetic oligonucleotide
cggcugcuacagaacuggg

SEQ ID NO: 2492935 - RNA, 19 nt, Artificial Sequence
  Description of Artificial Sequence: Synthetic oligonucleotide
gaacaggguugagcagccu

SEQ ID NO: 2492936 - RNA, 19 nt, Artificial Sequence
  Description of Artificial Sequence: Synthetic oligonucleotide
ggaggugcccagccccaaa

SEQ ID NO: 2492937 - RNA, 19 nt, Artificial Sequence
  Description of Artificial Sequence: Synthetic oligonucleotide
gcacgagcagaaagaccca

SEQ ID NO: 2492938 - RNA, 19 nt, Artificial Sequence
  Description of Artificial Sequence: Synthetic oligonucleotide
gcccggaggugcccagccc

SEQ ID NO: 2492939 - RNA, 19 nt, Artificial Sequence
  Description of Artificial Sequence: Synthetic oligonucleotide
cgagcagaaagacccagau

SEQ ID NO: 2492940 - RNA, 19 nt, Artificial Sequence
  Description of Artificial Sequence: Synthetic oligonucleotide
cuuugauuucuggggucuu

SEQ ID NO: 2492941 - RNA, 19 nt, Artificial Sequence
  Description of Artificial Sequence: Synthetic oligonucleotide
cgucacagugucaccugga

SEQ ID NO: 2492942 - RNA, 19 nt, Artificial Sequence
  Description of Artificial Sequence: Synthetic oligonucleotide
cagggaugucagacaugcu

SEQ ID NO: 2492943 - RNA, 19 nt, Artificial Sequence
  Description of Artificial Sequence: Synthetic oligonucleotide
gcccggaaggacugcugaa

SEQ ID NO: 2492944 - RNA, 19 nt, Artificial Sequence
  Description of Artificial Sequence: Synthetic oligonucleotide
gcagaggcagucaccgccu

SEQ ID NO: 2492945 - RNA, 19 nt, Artificial Sequence
  Description of Artificial Sequence: Synthetic oligonucleotide
caggguugagcagccuccu

SEQ ID NO: 2492946 - RNA, 19 nt, Artificial Sequence
  Description of Artificial Sequence: Synthetic oligonucleotide
cuggauucuauggcuccuu

SEQ ID NO: 2492947 - RNA, 19 nt, Artificial Sequence
  Description of Artificial Sequence: Synthetic oligonucleotide
ccccaaaggugggagguaa

SEQ ID NO: 2492948 - RNA, 19 nt, Artificial Sequence
  Description of Artificial Sequence: Synthetic oligonucleotide
cccaaaggugggagguaaa

SEQ ID NO: 2492949 - RNA, 19 nt, Artificial Sequence
  Description of Artificial Sequence: Synthetic oligonucleotide
ccccugacccagguuggac

SEQ ID NO: 2492950 - RNA, 19 nt, Artificial Sequence
  Description of Artificial Sequence: Synthetic oligonucleotide
cccucuggcgucacagugu

SEQ ID NO: 2492951 - RNA, 19 nt, Artificial Sequence
  Description of Artificial Sequence: Synthetic oligonucleotide
ccagccccaaaggacgaaa

SEQ ID NO: 2492952 - RNA, 19 nt, Artificial Sequence
  Description of Artificial Sequence: Synthetic oligonucleotide
caccgccucccacuggauu

SEQ ID NO: 2492953 - RNA, 19 nt, Artificial Sequence
  Description of Artificial Sequence: Synthetic oligonucleotide
ccuagaugacagagagauu

SEQ ID NO: 2492954 - RNA, 19 nt, Artificial Sequence
  Description of Artificial Sequence: Synthetic oligonucleotide
ggguucccauugggcugcc

SEQ ID NO: 2492955 - RNA, 19 nt, Artificial Sequence
  Description of Artificial Sequence: Synthetic oligonucleotide
ccagccugauguacagauu

SEQ ID NO: 2492956 - RNA, 19 nt, Artificial Sequence
  Description of Artificial Sequence: Synthetic oligonucleotide
caccuggagcaagguugcu

SEQ ID NO: 2492957 - RNA, 19 nt, Artificial Sequence
  Description of Artificial Sequence: Synthetic oligonucleotide
cccagccccaaaggacgaa

SEQ ID NO: 2492958 - RNA, 19 nt, Artificial Sequence
  Description of Artificial Sequence: Synthetic oligonucleotide
gccucccacuggauucuau

SEQ ID NO: 2492959 - RNA, 19 nt, Artificial Sequence
  Description of Artificial Sequence: Synthetic oligonucleotide
ccgccucccacuggauucu

SEQ ID NO: 2492960 - RNA, 19 nt, Artificial Sequence
  Description of Artificial Sequence: Synthetic oligonucleotide
cgccucccacuggauucua

SEQ ID NO: 2492961 - RNA, 19 nt, Artificial Sequence
  Description of Artificial Sequence: Synthetic oligonucleotide
uauauuucuacauagucgg

SEQ ID NO: 2492962 - RNA, 19 nt, Artificial Sequence
  Description of Artificial Sequence: Synthetic oligonucleotide
uuuaauacuggaaaccucc

SEQ ID NO: 2492963 - RNA, 19 nt, Artificial Sequence
  Description of Artificial Sequence: Synthetic oligonucleotide
aaugaggacgaccauaucu

SEQ ID NO: 2492964 - RNA, 19 nt, Artificial Sequence
  Description of Artificial Sequence: Synthetic oligonucleotide
gauaauaccaguuuuccca

SEQ ID NO: 2492965 - RNA, 19 nt, Artificial Sequence
  Description of Artificial Sequence: Synthetic oligonucleotide
aagauuccauucuugaauc

SEQ ID NO: 2492966 - RNA, 19 nt, Artificial Sequence
  Description of Artificial Sequence: Synthetic oligonucleotide
uccguaaucgauaauacca

SEQ ID NO: 2492967 - RNA, 19 nt, Artificial Sequence
  Description of Artificial Sequence: Synthetic oligonucleotide
acugugacguauuuaauac

SEQ ID NO: 2492968 - RNA, 19 nt, Artificial Sequence
  Description of Artificial Sequence: Synthetic oligonucleotide
aauccaaucuuucuggcug

SEQ ID NO: 2492969 - RNA, 19 nt, Artificial Sequence
  Description of Artificial Sequence: Synthetic oligonucleotide
aaagauuccauucuugaau

SEQ ID NO: 2492970 - RNA, 19 nt, Artificial Sequence
  Description of Artificial Sequence: Synthetic oligonucleotide
acagacaugaaauccaauc

SEQ ID NO: 2492971 - RNA, 19 nt, Artificial Sequence
  Description of Artificial Sequence: Synthetic oligonucleotide
uccuacaaagccauggacg

SEQ ID NO: 2492972 - RNA, 19 nt, Artificial Sequence
  Description of Artificial Sequence: Synthetic oligonucleotide
ugugacguauuuaauacug

SEQ ID NO: 2492973 - RNA, 19 nt, Artificial Sequence
  Description of Artificial Sequence: Synthetic oligonucleotide
uguaaagacaccaccacac

SEQ ID NO: 2492974 - RNA, 19 nt, Artificial Sequence
  Description of Artificial Sequence: Synthetic oligonucleotide
accacaguaaucuuccuac

SEQ ID NO: 2492975 - RNA, 19 nt, Artificial Sequence
  Description of Artificial Sequence: Synthetic oligonucleotide
uggaaguucaucaccacag

SEQ ID NO: 2492976 - RNA, 19 nt, Artificial Sequence
  Description of Artificial Sequence: Synthetic oligonucleotide
cauaucuucaguugcagag

SEQ ID NO: 2492977 - RNA, 19 nt, Artificial Sequence
  Description of Artificial Sequence: Synthetic oligonucleotide
guaaucuuccuacaaagcc

SEQ ID NO: 2492978 - RNA, 19 nt, Artificial Sequence
  Description of Artificial Sequence: Synthetic oligonucleotide
uaucgucauacucauuugg

SEQ ID NO: 2492979 - RNA, 19 nt, Artificial Sequence
  Description of Artificial Sequence: Synthetic oligonucleotide
uucacauacagucuuggcu

SEQ ID NO: 2492980 - RNA, 19 nt, Artificial Sequence
  Description of Artificial Sequence: Synthetic oligonucleotide
aaagccauggacgucauca

SEQ ID NO: 2492981 - RNA, 19 nt, Artificial Sequence
  Description of Artificial Sequence: Synthetic oligonucleotide
uaaucuuccuacaaagcca

SEQ ID NO: 2492982 - RNA, 19 nt, Artificial Sequence
  Description of Artificial Sequence: Synthetic oligonucleotide
gcuuguucaagccauaugg

SEQ ID NO: 2492983 - RNA, 19 nt, Artificial Sequence
  Description of Artificial Sequence: Synthetic oligonucleotide
uucccaaauccacaguugg

SEQ ID NO: 2492984 - RNA, 19 nt, Artificial Sequence
  Description of Artificial Sequence: Synthetic oligonucleotide
aaagcucagaugaauucgc

SEQ ID NO: 2492985 - RNA, 19 nt, Artificial Sequence
  Description of Artificial Sequence: Synthetic oligonucleotide
auuugggaagccuggagac

SEQ ID NO: 2492986 - RNA, 19 nt, Artificial Sequence
  Description of Artificial Sequence: Synthetic oligonucleotide
agcaauaggcaucccaucg

SEQ ID NO: 2492987 - RNA, 19 nt, Artificial Sequence
  Description of Artificial Sequence: Synthetic oligonucleotide
gaaaccuccagcugugacg

SEQ ID NO: 2492988 - RNA, 19 nt, Artificial Sequence
  Description of Artificial Sequence: Synthetic oligonucleotide
uauuuaauacuggaaaccu

SEQ ID NO: 2492989 - RNA, 19 nt, Artificial Sequence
  Description of Artificial Sequence: Synthetic oligonucleotide
ucuugaauccccauccaug

SEQ ID NO: 2492990 - RNA, 19 nt, Artificial Sequence
  Description of Artificial Sequence: Synthetic oligonucleotide
cacagcaagacgcauaagc

SEQ ID NO: 2492991 - RNA, 19 nt, Artificial Sequence
  Description of Artificial Sequence: Synthetic oligonucleotide
aaaccuccagcugugacgg

SEQ ID NO: 2492992 - RNA, 19 nt, Artificial Sequence
  Description of Artificial Sequence: Synthetic oligonucleotide
uguagcaauaggcauccca

SEQ ID NO: 2492993 - RNA, 19 nt, Artificial Sequence
  Description of Artificial Sequence: Synthetic oligonucleotide
uauuucuacauagucggcc

SEQ ID NO: 2492994 - RNA, 19 nt, Artificial Sequence
  Description of Artificial Sequence: Synthetic oligonucleotide
gacgcauaagcaaaugagg

SEQ ID NO: 2492995 - RNA, 19 nt, Artificial Sequence
  Description of Artificial Sequence: Synthetic oligonucleotide
acguauuuaauacuggaaa

SEQ ID NO: 2492996 - RNA, 19 nt, Artificial Sequence
  Description of Artificial Sequence: Synthetic oligonucleotide
aagacgcauaagcaaauga

SEQ ID NO: 2492997 - RNA, 19 nt, Artificial Sequence
  Description of Artificial Sequence: Synthetic oligonucleotide
ucaaggucaugacauuucc

SEQ ID NO: 2492998 - RNA, 19 nt, Artificial Sequence
  Description of Artificial Sequence: Synthetic oligonucleotide
caguaaucuuccuacaaag

SEQ ID NO: 2492999 - RNA, 19 nt, Artificial Sequence
  Description of Artificial Sequence: Synthetic oligonucleotide
uccacugugacguauuuaa

SEQ ID NO: 2493000 - RNA, 19 nt, Artificial Sequence
  Description of Artificial Sequence: Synthetic oligonucleotide
aucaccacaguaaucuucc

SEQ ID NO: 2493001 - RNA, 19 nt, Artificial Sequence
  Description of Artificial Sequence: Synthetic oligonucleotide
ucauauauuucuacauagu

SEQ ID NO: 2493002 - RNA, 19 nt, Artificial Sequence
  Description of Artificial Sequence: Synthetic oligonucleotide
uucgcuuuggaucuguaaa

SEQ ID NO: 2493003 - RNA, 19 nt, Artificial Sequence
  Description of Artificial Sequence: Synthetic oligonucleotide
ucuguaaagacaccaccac

SEQ ID NO: 2493004 - RNA, 19 nt, Artificial Sequence
  Description of Artificial Sequence: Synthetic oligonucleotide
auucacauacagucuuggc

SEQ ID NO: 2493005 - RNA, 19 nt, Artificial Sequence
  Description of Artificial Sequence: Synthetic oligonucleotide
aguaaucuuccuacaaagc

SEQ ID NO: 2493006 - RNA, 19 nt, Artificial Sequence
  Description of Artificial Sequence: Synthetic oligonucleotide
uucacuaugggguauccaa

SEQ ID NO: 2493007 - RNA, 19 nt, Artificial Sequence
  Description of Artificial Sequence: Synthetic oligonucleotide
uggguuguagcaauaggca

SEQ ID NO: 2493008 - RNA, 19 nt, Artificial Sequence
  Description of Artificial Sequence: Synthetic oligonucleotide
aauaccaguuuucccaaau

SEQ ID NO: 2493009 - RNA, 19 nt, Artificial Sequence
  Description of Artificial Sequence: Synthetic oligonucleotide
uaaucgauaauaccaguuu

SEQ ID NO: 2493010 - RNA, 19 nt, Artificial Sequence
  Description of Artificial Sequence: Synthetic oligonucleotide
gaaacuucaaggucaugac

SEQ ID NO: 2493011 - RNA, 19 nt, Artificial Sequence
  Description of Artificial Sequence: Synthetic oligonucleotide
ugacguauuuaauacugga

SEQ ID NO: 2493012 - RNA, 19 nt, Artificial Sequence
  Description of Artificial Sequence: Synthetic oligonucleotide
agauuccauucuugaaucc

SEQ ID NO: 2493013 - RNA, 19 nt, Artificial Sequence
  Description of Artificial Sequence: Synthetic oligonucleotide
ugaauccccauccaugaac

SEQ ID NO: 2493014 - RNA, 19 nt, Artificial Sequence
  Description of Artificial Sequence: Synthetic oligonucleotide
aacuucaaggucaugacau

SEQ ID NO: 2493015 - RNA, 19 nt, Artificial Sequence
  Description of Artificial Sequence: Synthetic oligonucleotide
ugucauauauuucuacaua

SEQ ID NO: 2493016 - RNA, 19 nt, Artificial Sequence
  Description of Artificial Sequence: Synthetic oligonucleotide
uuugcauguggguuguagc

SEQ ID NO: 2493017 - RNA, 19 nt, Artificial Sequence
  Description of Artificial Sequence: Synthetic oligonucleotide
ucgauaauaccaguuuucc

SEQ ID NO: 2493018 - RNA, 19 nt, Artificial Sequence
  Description of Artificial Sequence: Synthetic oligonucleotide
aagcaaaugaggacgacca

SEQ ID NO: 2493019 - RNA, 19 nt, Artificial Sequence
  Description of Artificial Sequence: Synthetic oligonucleotide
uucugcauaggugagcuug

SEQ ID NO: 2493020 - RNA, 19 nt, Artificial Sequence
  Description of Artificial Sequence: Synthetic oligonucleotide
agcugucauauauuucuac

SEQ ID NO: 2493021 - RNA, 19 nt, Artificial Sequence
  Description of Artificial Sequence: Synthetic oligonucleotide
ugggucguguucaagguca

SEQ ID NO: 2493022 - RNA, 19 nt, Artificial Sequence
  Description of Artificial Sequence: Synthetic oligonucleotide
uaagcaaaugaggacgacc

SEQ ID NO: 2493023 - RNA, 19 nt, Artificial Sequence
  Description of Artificial Sequence: Synthetic oligonucleotide
gcauaagcaaaugaggacg

SEQ ID NO: 2493024 - RNA, 19 nt, Artificial Sequence
  Description of Artificial Sequence: Synthetic oligonucleotide
aguuaugaaagauuccauu

SEQ ID NO: 2493025 - RNA, 19 nt, Artificial Sequence
  Description of Artificial Sequence: Synthetic oligonucleotide
ucauuugggaagccuggag

SEQ ID NO: 2493026 - RNA, 19 nt, Artificial Sequence
  Description of Artificial Sequence: Synthetic oligonucleotide
auacuggaaaccuccagcu

SEQ ID NO: 2493027 - RNA, 19 nt, Artificial Sequence
  Description of Artificial Sequence: Synthetic oligonucleotide
aauucgcugaccguacuug

SEQ ID NO: 2493028 - RNA, 19 nt, Artificial Sequence
  Description of Artificial Sequence: Synthetic oligonucleotide
uacuugagccgaaugugcc

SEQ ID NO: 2493029 - RNA, 19 nt, Artificial Sequence
  Description of Artificial Sequence: Synthetic oligonucleotide
ucgcuuuggaucuguaaag

SEQ ID NO: 2493030 - RNA, 19 nt, Artificial Sequence
  Description of Artificial Sequence: Synthetic oligonucleotide
aaucuuucuggcugcuucu

SEQ ID NO: 2493031 - RNA, 19 nt, Artificial Sequence
  Description of Artificial Sequence: Synthetic oligonucleotide
uggacgucaucauagcugu

SEQ ID NO: 2493032 - RNA, 19 nt, Artificial Sequence
  Description of Artificial Sequence: Synthetic oligonucleotide
auccaaucuuucuggcugc

SEQ ID NO: 2493033 - RNA, 19 nt, Artificial Sequence
  Description of Artificial Sequence: Synthetic oligonucleotide
auaccaguuuucccaaauc

SEQ ID NO: 2493034 - RNA, 19 nt, Artificial Sequence
  Description of Artificial Sequence: Synthetic oligonucleotide
auuccguaaucgauaauac

SEQ ID NO: 2493035 - RNA, 19 nt, Artificial Sequence
  Description of Artificial Sequence: Synthetic oligonucleotide
caccuucaaauucacauac

SEQ ID NO: 2493036 - RNA, 19 nt, Artificial Sequence
  Description of Artificial Sequence: Synthetic oligonucleotide
aucgauaauaccaguuuuc

SEQ ID NO: 2493037 - RNA, 19 nt, Artificial Sequence
  Description of Artificial Sequence: Synthetic oligonucleotide
agacgcauaagcaaaugag

SEQ ID NO: 2493038 - RNA, 19 nt, Artificial Sequence
  Description of Artificial Sequence: Synthetic oligonucleotide
uuccguaaucgauaauacc

SEQ ID NO: 2493039 - RNA, 19 nt, Artificial Sequence
  Description of Artificial Sequence: Synthetic oligonucleotide
gauuccguaaucgauaaua

SEQ ID NO: 2493040 - RNA, 19 nt, Artificial Sequence
  Description of Artificial Sequence: Synthetic oligonucleotide
ucccaaauccacaguuggg

SEQ ID NO: 2493041 - RNA, 19 nt, Artificial Sequence
  Description of Artificial Sequence: Synthetic oligonucleotide
auuuaauacuggaaaccuc

SEQ ID NO: 2493042 - RNA, 19 nt, Artificial Sequence
  Description of Artificial Sequence: Synthetic oligonucleotide
acgaccauaucuucaguug

SEQ ID NO: 2493043 - RNA, 19 nt, Artificial Sequence
  Description of Artificial Sequence: Synthetic oligonucleotide
acuaugggguauccaacuc

SEQ ID NO: 2493044 - RNA, 19 nt, Artificial Sequence
  Description of Artificial Sequence: Synthetic oligonucleotide
aguucaucaccacaguaau

SEQ ID NO: 2493045 - RNA, 19 nt, Artificial Sequence
  Description of Artificial Sequence: Synthetic oligonucleotide
uugcuaaugaugucuucug

SEQ ID NO: 2493046 - RNA, 19 nt, Artificial Sequence
  Description of Artificial Sequence: Synthetic oligonucleotide
uuaucgucauacucauuug

SEQ ID NO: 2493047 - RNA, 19 nt, Artificial Sequence
  Description of Artificial Sequence: Synthetic oligonucleotide
auacagucuuggcuucugc

SEQ ID NO: 2493048 - RNA, 19 nt, Artificial Sequence
  Description of Artificial Sequence: Synthetic oligonucleotide
uucaaggucaugacauuuc

SEQ ID NO: 2493049 - RNA, 19 nt, Artificial Sequence
  Description of Artificial Sequence: Synthetic oligonucleotide
acaguaaucuuccuacaaa

SEQ ID NO: 2493050 - RNA, 19 nt, Artificial Sequence
  Description of Artificial Sequence: Synthetic oligonucleotide
gcuucuagcugcuuguagg

SEQ ID NO: 2493051 - RNA, 19 nt, Artificial Sequence
  Description of Artificial Sequence: Synthetic oligonucleotide
gaaugugccaguagcagac

SEQ ID NO: 2493052 - RNA, 19 nt, Artificial Sequence
  Description of Artificial Sequence: Synthetic oligonucleotide
ucgucauacucauuuggga

SEQ ID NO: 2493053 - RNA, 19 nt, Artificial Sequence
  Description of Artificial Sequence: Synthetic oligonucleotide
aaugugccaguagcagacc

SEQ ID NO: 2493054 - RNA, 19 nt, Artificial Sequence
  Description of Artificial Sequence: Synthetic oligonucleotide
ucauacucauuugggaagc

SEQ ID NO: 2493055 - RNA, 19 nt, Artificial Sequence
  Description of Artificial Sequence: Synthetic oligonucleotide
uaggugagcuuguauuugc

SEQ ID NO: 2493056 - RNA, 19 nt, Artificial Sequence
  Description of Artificial Sequence: Synthetic oligonucleotide
guagcagaccugguuaucg

SEQ ID NO: 2493057 - RNA, 19 nt, Artificial Sequence
  Description of Artificial Sequence: Synthetic oligonucleotide
uguauuugccagcccgagc

SEQ ID NO: 2493058 - RNA, 19 nt, Artificial Sequence
  Description of Artificial Sequence: Synthetic oligonucleotide
uuucuacauagucggccag

SEQ ID NO: 2493059 - RNA, 19 nt, Artificial Sequence
  Description of Artificial Sequence: Synthetic oligonucleotide
uuccuacaaagccauggac

SEQ ID NO: 2493060 - RNA, 19 nt, Artificial Sequence
  Description of Artificial Sequence: Synthetic oligonucleotide
gucguguucaaggucaaag

SEQ ID NO: 2493061 - RNA, 19 nt, Artificial Sequence
  Description of Artificial Sequence: Synthetic oligonucleotide
aucgucauacucauuuggg

SEQ ID NO: 2493062 - RNA, 19 nt, Artificial Sequence
  Description of Artificial Sequence: Synthetic oligonucleotide
cuugaauccccauccauga

SEQ ID NO: 2493063 - RNA, 19 nt, Artificial Sequence
  Description of Artificial Sequence: Synthetic oligonucleotide
uccccauccaugaaccucu

SEQ ID NO: 2493064 - RNA, 19 nt, Artificial Sequence
  Description of Artificial Sequence: Synthetic oligonucleotide
ugugacggaugcaucacuc

SEQ ID NO: 2493065 - RNA, 19 nt, Artificial Sequence
  Description of Artificial Sequence: Synthetic oligonucleotide
guuaucgucauacucauuu

SEQ ID NO: 2493066 - RNA, 19 nt, Artificial Sequence
  Description of Artificial Sequence: Synthetic oligonucleotide
ucguguucaaggucaaagu

SEQ ID NO: 2493067 - RNA, 19 nt, Artificial Sequence
  Description of Artificial Sequence: Synthetic oligonucleotide
gaaagauuccauucuugaa

SEQ ID NO: 2493068 - RNA, 19 nt, Artificial Sequence
  Description of Artificial Sequence: Synthetic oligonucleotide
gagccguuuacagugucgg

SEQ ID NO: 2493069 - RNA, 19 nt, Artificial Sequence
  Description of Artificial Sequence: Synthetic oligonucleotide
uucuacauagucggccagg

SEQ ID NO: 2493070 - RNA, 19 nt, Artificial Sequence
  Description of Artificial Sequence: Synthetic oligonucleotide
auaauaccaguuuucccaa

SEQ ID NO: 2493071 - RNA, 19 nt, Artificial Sequence
  Description of Artificial Sequence: Synthetic oligonucleotide
uccaugaaccucuucccac

SEQ ID NO: 2493072 - RNA, 19 nt, Artificial Sequence
  Description of Artificial Sequence: Synthetic oligonucleotide
guauccaacucuucccuug

SEQ ID NO: 2493073 - RNA, 19 nt, Artificial Sequence
  Description of Artificial Sequence: Synthetic oligonucleotide
ucacuaugggguauccaac

SEQ ID NO: 2493074 - RNA, 19 nt, Artificial Sequence
  Description of Artificial Sequence: Synthetic oligonucleotide
ugcuuguucaagccauaug

SEQ ID NO: 2493075 - RNA, 19 nt, Artificial Sequence
  Description of Artificial Sequence: Synthetic oligonucleotide
ucuacauagucggccaggc

SEQ ID NO: 2493076 - RNA, 19 nt, Artificial Sequence
  Description of Artificial Sequence: Synthetic oligonucleotide
gaugaauucgcugaccgua

SEQ ID NO: 2493077 - RNA, 19 nt, Artificial Sequence
  Description of Artificial Sequence: Synthetic oligonucleotide
ucgcugaccguacuugagc

SEQ ID NO: 2493078 - RNA, 19 nt, Artificial Sequence
  Description of Artificial Sequence: Synthetic oligonucleotide
ggaguuaugaaagauucca

SEQ ID NO: 2493079 - RNA, 19 nt, Artificial Sequence
  Description of Artificial Sequence: Synthetic oligonucleotide
agcucagaugaauucgcug

SEQ ID NO: 2493080 - RNA, 19 nt, Artificial Sequence
  Description of Artificial Sequence: Synthetic oligonucleotide
agcagaccugguuaucguc

SEQ ID NO: 2493081 - RNA, 19 nt, Artificial Sequence
  Description of Artificial Sequence: Synthetic oligonucleotide
ugugccaguagcagaccug

SEQ ID NO: 2493082 - RNA, 19 nt, Artificial Sequence
  Description of Artificial Sequence: Synthetic oligonucleotide
uaugggguauccaacucuu

SEQ ID NO: 2493083 - RNA, 19 nt, Artificial Sequence
  Description of Artificial Sequence: Synthetic oligonucleotide
uucgcugaccguacuugag

SEQ ID NO: 2493084 - RNA, 19 nt, Artificial Sequence
  Description of Artificial Sequence: Synthetic oligonucleotide
gaccugguuaucgucauac

SEQ ID NO: 2493085 - RNA, 19 nt, Artificial Sequence
  Description of Artificial Sequence: Synthetic oligonucleotide
gucaugacauuuccuguug

SEQ ID NO: 2493086 - RNA, 19 nt, Artificial Sequence
  Description of Artificial Sequence: Synthetic oligonucleotide
uucuugaauccccauccau

SEQ ID NO: 2493087 - RNA, 19 nt, Artificial Sequence
  Description of Artificial Sequence: Synthetic oligonucleotide
auggacgucaucauagcug

SEQ ID NO: 2493088 - RNA, 19 nt, Artificial Sequence
  Description of Artificial Sequence: Synthetic oligonucleotide
agccauauggaguuaugaa

SEQ ID NO: 2493089 - RNA, 19 nt, Artificial Sequence
  Description of Artificial Sequence: Synthetic oligonucleotide
acccgcugcuuguucaagc

SEQ ID NO: 2493090 - RNA, 19 nt, Artificial Sequence
  Description of Artificial Sequence: Synthetic oligonucleotide
acgcauaagcaaaugagga

SEQ ID NO: 2493091 - RNA, 19 nt, Artificial Sequence
  Description of Artificial Sequence: Synthetic oligonucleotide
cauagcugucauauauuuc

SEQ ID NO: 2493092 - RNA, 19 nt, Artificial Sequence
  Description of Artificial Sequence: Synthetic oligonucleotide
gugacguauuuaauacugg

SEQ ID NO: 2493093 - RNA, 19 nt, Artificial Sequence
  Description of Artificial Sequence: Synthetic oligonucleotide
agcugugacggaugcauca

SEQ ID NO: 2493094 - RNA, 19 nt, Artificial Sequence
  Description of Artificial Sequence: Synthetic oligonucleotide
cauaagcaaaugaggacga

SEQ ID NO: 2493095 - RNA, 19 nt, Artificial Sequence
  Description of Artificial Sequence: Synthetic oligonucleotide
cuccuguugagccggauuc

SEQ ID NO: 2493096 - RNA, 19 nt, Artificial Sequence
  Description of Artificial Sequence: Synthetic oligonucleotide
cucggugguacacacccgc

SEQ ID NO: 2493097 - RNA, 19 nt, Artificial Sequence
  Description of Artificial Sequence: Synthetic oligonucleotide
auaagcaaaugaggacgac

SEQ ID NO: 2493098 - RNA, 19 nt, Artificial Sequence
  Description of Artificial Sequence: Synthetic oligonucleotide
uuguagguggcgaggcggc

SEQ ID NO: 2493099 - RNA, 19 nt, Artificial Sequence
  Description of Artificial Sequence: Synthetic oligonucleotide
cuuugcauguggguuguag

SEQ ID NO: 2493100 - RNA, 19 nt, Artificial Sequence
  Description of Artificial Sequence: Synthetic oligonucleotide
augaauucgcugaccguac

SEQ ID NO: 2493101 - RNA, 19 nt, Artificial Sequence
  Description of Artificial Sequence: Synthetic oligonucleotide
augaaagauuccauucuug

SEQ ID NO: 2493102 - RNA, 19 nt, Artificial Sequence
  Description of Artificial Sequence: Synthetic oligonucleotide
cauuugggaagccuggaga

SEQ ID NO: 2493103 - RNA, 19 nt, Artificial Sequence
  Description of Artificial Sequence: Synthetic oligonucleotide
auuuccuguugcuaaugau

SEQ ID NO: 2493104 - RNA, 19 nt, Artificial Sequence
  Description of Artificial Sequence: Synthetic oligonucleotide
agcccgagcuucucggugg

SEQ ID NO: 2493105 - RNA, 19 nt, Artificial Sequence
  Description of Artificial Sequence: Synthetic oligonucleotide
auaggugagcuuguauuug

SEQ ID NO: 2493106 - RNA, 19 nt, Artificial Sequence
  Description of Artificial Sequence: Synthetic oligonucleotide
agcuuguauuugccagccc

SEQ ID NO: 2493107 - RNA, 19 nt, Artificial Sequence
  Description of Artificial Sequence: Synthetic oligonucleotide
gagccggauuccguaaucg

SEQ ID NO: 2493108 - RNA, 19 nt, Artificial Sequence
  Description of Artificial Sequence: Synthetic oligonucleotide
cucagaugaauucgcugac

SEQ ID NO: 2493109 - RNA, 19 nt, Artificial Sequence
  Description of Artificial Sequence: Synthetic oligonucleotide
uguugagccggauuccgua

SEQ ID NO: 2493110 - RNA, 19 nt, Artificial Sequence
  Description of Artificial Sequence: Synthetic oligonucleotide
guacuugagccgaaugugc

SEQ ID NO: 2493111 - RNA, 19 nt, Artificial Sequence
  Description of Artificial Sequence: Synthetic oligonucleotide
uuuacagugucggggcugu

SEQ ID NO: 2493112 - RNA, 19 nt, Artificial Sequence
  Description of Artificial Sequence: Synthetic oligonucleotide
aaauucgcuuuggaucugu

SEQ ID NO: 2493113 - RNA, 19 nt, Artificial Sequence
  Description of Artificial Sequence: Synthetic oligonucleotide
cucacuccuguugagccgg

SEQ ID NO: 2493114 - RNA, 19 nt, Artificial Sequence
  Description of Artificial Sequence: Synthetic oligonucleotide
gagcuuguauuugccagcc

SEQ ID NO: 2493115 - RNA, 19 nt, Artificial Sequence
  Description of Artificial Sequence: Synthetic oligonucleotide
ugaauucgcugaccguacu

SEQ ID NO: 2493116 - RNA, 19 nt, Artificial Sequence
  Description of Artificial Sequence: Synthetic oligonucleotide
gacguauuuaauacuggaa

SEQ ID NO: 2493117 - RNA, 19 nt, Artificial Sequence
  Description of Artificial Sequence: Synthetic oligonucleotide
aauccccauccaugaaccu

SEQ ID NO: 2493118 - RNA, 19 nt, Artificial Sequence
  Description of Artificial Sequence: Synthetic oligonucleotide
ucucggugguacacacccg

SEQ ID NO: 2493119 - RNA, 19 nt, Artificial Sequence
  Description of Artificial Sequence: Synthetic oligonucleotide
agcaagacgcauaagcaaa

SEQ ID NO: 2493120 - RNA, 19 nt, Artificial Sequence
  Description of Artificial Sequence: Synthetic oligonucleotide
auucgcugaccguacuuga

SEQ ID NO: 2493121 - RNA, 19 nt, Artificial Sequence
  Description of Artificial Sequence: Synthetic oligonucleotide
ggugguacacacccgcugc

SEQ ID NO: 2493122 - RNA, 19 nt, Artificial Sequence
  Description of Artificial Sequence: Synthetic oligonucleotide
caucauagcugucauauau

SEQ ID NO: 2493123 - RNA, 19 nt, Artificial Sequence
  Description of Artificial Sequence: Synthetic oligonucleotide
aaaauucgcuuuggaucug

SEQ ID NO: 2493124 - RNA, 19 nt, Artificial Sequence
  Description of Artificial Sequence: Synthetic oligonucleotide
caugaaccucuucccacag

SEQ ID NO: 2493125 - RNA, 19 nt, Artificial Sequence
  Description of Artificial Sequence: Synthetic oligonucleotide
cuggaaaccuccagcugug

SEQ ID NO: 2493126 - RNA, 19 nt, Artificial Sequence
  Description of Artificial Sequence: Synthetic oligonucleotide
ugaggacgaccauaucuuc

SEQ ID NO: 2493127 - RNA, 19 nt, Artificial Sequence
  Description of Artificial Sequence: Synthetic oligonucleotide
cuguaaagacaccaccaca

SEQ ID NO: 2493128 - RNA, 19 nt, Artificial Sequence
  Description of Artificial Sequence: Synthetic oligonucleotide
cacugugacguauuuaaua

SEQ ID NO: 2493129 - RNA, 19 nt, Artificial Sequence
  Description of Artificial Sequence: Synthetic oligonucleotide
auucgcuuuggaucuguaa

SEQ ID NO: 2493130 - RNA, 19 nt, Artificial Sequence
  Description of Artificial Sequence: Synthetic oligonucleotide
aguugcagagccguuuaca

SEQ ID NO: 2493131 - RNA, 19 nt, Artificial Sequence
  Description of Artificial Sequence: Synthetic oligonucleotide
ccguaaucgauaauaccag

SEQ ID NO: 2493132 - RNA, 19 nt, Artificial Sequence
  Description of Artificial Sequence: Synthetic oligonucleotide
aagccauggacgucaucau

SEQ ID NO: 2493133 - RNA, 19 nt, Artificial Sequence
  Description of Artificial Sequence: Synthetic oligonucleotide
gccguuuacagugucgggg

SEQ ID NO: 2493134 - RNA, 19 nt, Artificial Sequence
  Description of Artificial Sequence: Synthetic oligonucleotide
accguacuugagccgaaug

SEQ ID NO: 2493135 - RNA, 19 nt, Artificial Sequence
  Description of Artificial Sequence: Synthetic oligonucleotide
auguggguuguagcaauag

SEQ ID NO: 2493136 - RNA, 19 nt, Artificial Sequence
  Description of Artificial Sequence: Synthetic oligonucleotide
agagccguuuacagugucg

SEQ ID NO: 2493137 - RNA, 19 nt, Artificial Sequence
  Description of Artificial Sequence: Synthetic oligonucleotide
ucaagccauauggaguuau

SEQ ID NO: 2493138 - RNA, 19 nt, Artificial Sequence
  Description of Artificial Sequence: Synthetic oligonucleotide
gacaccaccacacuccuuu

SEQ ID NO: 2493139 - RNA, 19 nt, Artificial Sequence
  Description of Artificial Sequence: Synthetic oligonucleotide
gccauauggaguuaugaaa

SEQ ID NO: 2493140 - RNA, 19 nt, Artificial Sequence
  Description of Artificial Sequence: Synthetic oligonucleotide
uagcaauaggcaucccauc

SEQ ID NO: 2493141 - RNA, 19 nt, Artificial Sequence
  Description of Artificial Sequence: Synthetic oligonucleotide
cuuccuacaaagccaugga

SEQ ID NO: 2493142 - RNA, 19 nt, Artificial Sequence
  Description of Artificial Sequence: Synthetic oligonucleotide
gaggcggccaccuucaaau

SEQ ID NO: 2493143 - RNA, 19 nt, Artificial Sequence
  Description of Artificial Sequence: Synthetic oligonucleotide
caagccauauggaguuaug

SEQ ID NO: 2493144 - RNA, 19 nt, Artificial Sequence
  Description of Artificial Sequence: Synthetic oligonucleotide
aguagcagaccugguuauc

SEQ ID NO: 2493145 - RNA, 19 nt, Artificial Sequence
  Description of Artificial Sequence: Synthetic oligonucleotide
agccguuuacagugucggg

SEQ ID NO: 2493146 - RNA, 19 nt, Artificial Sequence
  Description of Artificial Sequence: Synthetic oligonucleotide
uugaauccccauccaugaa

SEQ ID NO: 2493147 - RNA, 19 nt, Artificial Sequence
  Description of Artificial Sequence: Synthetic oligonucleotide
ugagccggauuccguaauc

SEQ ID NO: 2493148 - RNA, 19 nt, Artificial Sequence
  Description of Artificial Sequence: Synthetic oligonucleotide
uuucacuaugggguaucca

SEQ ID NO: 2493149 - RNA, 19 nt, Artificial Sequence
  Description of Artificial Sequence: Synthetic oligonucleotide
gagccgaaugugccaguag

SEQ ID NO: 2493150 - RNA, 19 nt, Artificial Sequence
  Description of Artificial Sequence: Synthetic oligonucleotide
guucaagccauauggaguu

SEQ ID NO: 2493151 - RNA, 19 nt, Artificial Sequence
  Description of Artificial Sequence: Synthetic oligonucleotide
auacucauuugggaagccu

SEQ ID NO: 2493152 - RNA, 19 nt, Artificial Sequence
  Description of Artificial Sequence: Synthetic oligonucleotide
guuuacagugucggggcug

SEQ ID NO: 2493153 - RNA, 19 nt, Artificial Sequence
  Description of Artificial Sequence: Synthetic oligonucleotide
gcaauaggcaucccaucgc

SEQ ID NO: 2493154 - RNA, 19 nt, Artificial Sequence
  Description of Artificial Sequence: Synthetic oligonucleotide
uucuagcugcuuguaggug

SEQ ID NO: 2493155 - RNA, 19 nt, Artificial Sequence
  Description of Artificial Sequence: Synthetic oligonucleotide
acauuuccuguugcuaaug

SEQ ID NO: 2493156 - RNA, 19 nt, Artificial Sequence
  Description of Artificial Sequence: Synthetic oligonucleotide
uagcugucauauauuucua

SEQ ID NO: 2493157 - RNA, 19 nt, Artificial Sequence
  Description of Artificial Sequence: Synthetic oligonucleotide
uagcagaccugguuaucgu

SEQ ID NO: 2493158 - RNA, 19 nt, Artificial Sequence
  Description of Artificial Sequence: Synthetic oligonucleotide
augaggacgaccauaucuu

SEQ ID NO: 2493159 - RNA, 19 nt, Artificial Sequence
  Description of Artificial Sequence: Synthetic oligonucleotide
cacauacagucuuggcuuc

SEQ ID NO: 2493160 - RNA, 19 nt, Artificial Sequence
  Description of Artificial Sequence: Synthetic oligonucleotide
uaauaccaguuuucccaaa

SEQ ID NO: 2493161 - RNA, 19 nt, Artificial Sequence
  Description of Artificial Sequence: Synthetic oligonucleotide
aagcucagaugaauucgcu

SEQ ID NO: 2493162 - RNA, 19 nt, Artificial Sequence
  Description of Artificial Sequence: Synthetic oligonucleotide
aucgcucacuccuguugag

SEQ ID NO: 2493163 - RNA, 19 nt, Artificial Sequence
  Description of Artificial Sequence: Synthetic oligonucleotide
cacaguaaucuuccuacaa

SEQ ID NO: 2493164 - RNA, 19 nt, Artificial Sequence
  Description of Artificial Sequence: Synthetic oligonucleotide
uaggcaucccaucgcucac

SEQ ID NO: 2493165 - RNA, 19 nt, Artificial Sequence
  Description of Artificial Sequence: Synthetic oligonucleotide
caagacgcauaagcaaaug

SEQ ID NO: 2493166 - RNA, 19 nt, Artificial Sequence
  Description of Artificial Sequence: Synthetic oligonucleotide
gaggacgaccauaucuuca

SEQ ID NO: 2493167 - RNA, 19 nt, Artificial Sequence
  Description of Artificial Sequence: Synthetic oligonucleotide
acuucaaggucaugacauu

SEQ ID NO: 2493168 - RNA, 19 nt, Artificial Sequence
  Description of Artificial Sequence: Synthetic oligonucleotide
uugagccggauuccguaau

SEQ ID NO: 2493169 - RNA, 19 nt, Artificial Sequence
  Description of Artificial Sequence: Synthetic oligonucleotide
cauacucauuugggaagcc

SEQ ID NO: 2493170 - RNA, 19 nt, Artificial Sequence
  Description of Artificial Sequence: Synthetic oligonucleotide
ucccacagcaagacgcaua

SEQ ID NO: 2493171 - RNA, 19 nt, Artificial Sequence
  Description of Artificial Sequence: Synthetic oligonucleotide
guuucacuaugggguaucc

SEQ ID NO: 2493172 - RNA, 19 nt, Artificial Sequence
  Description of Artificial Sequence: Synthetic oligonucleotide
cagcaagacgcauaagcaa

SEQ ID NO: 2493173 - RNA, 19 nt, Artificial Sequence
  Description of Artificial Sequence: Synthetic oligonucleotide
ccugguuaucgucauacuc

SEQ ID NO: 2493174 - RNA, 19 nt, Artificial Sequence
  Description of Artificial Sequence: Synthetic oligonucleotide
agccggauuccguaaucga

SEQ ID NO: 2493175 - RNA, 19 nt, Artificial Sequence
  Description of Artificial Sequence: Synthetic oligonucleotide
caucccaucgcucacuccu

SEQ ID NO: 2493176 - RNA, 19 nt, Artificial Sequence
  Description of Artificial Sequence: Synthetic oligonucleotide
acacacccgcugcuuguuc

SEQ ID NO: 2493177 - RNA, 19 nt, Artificial Sequence
  Description of Artificial Sequence: Synthetic oligonucleotide
ccguuuacagugucggggc

SEQ ID NO: 2493178 - RNA, 19 nt, Artificial Sequence
  Description of Artificial Sequence: Synthetic oligonucleotide
ucggugguacacacccgcu

SEQ ID NO: 2493179 - RNA, 19 nt, Artificial Sequence
  Description of Artificial Sequence: Synthetic oligonucleotide
agcaaaugaggacgaccau

SEQ ID NO: 2493180 - RNA, 19 nt, Artificial Sequence
  Description of Artificial Sequence: Synthetic oligonucleotide
uugggcccggguuucacua

SEQ ID NO: 2493181 - RNA, 19 nt, Artificial Sequence
  Description of Artificial Sequence: Synthetic oligonucleotide
ucgcucacuccuguugagc

SEQ ID NO: 2493182 - RNA, 19 nt, Artificial Sequence
  Description of Artificial Sequence: Synthetic oligonucleotide
cauacagucuuggcuucug

SEQ ID NO: 2493183 - RNA, 19 nt, Artificial Sequence
  Description of Artificial Sequence: Synthetic oligonucleotide
gacgaccauaucuucaguu

SEQ ID NO: 2493184 - RNA, 19 nt, Artificial Sequence
  Description of Artificial Sequence: Synthetic oligonucleotide
cgauaauaccaguuuuccc

SEQ ID NO: 2493185 - RNA, 19 nt, Artificial Sequence
  Description of Artificial Sequence: Synthetic oligonucleotide
uccuguugcuaaugauguc

SEQ ID NO: 2493186 - RNA, 19 nt, Artificial Sequence
  Description of Artificial Sequence: Synthetic oligonucleotide
gugacggaugcaucacuca

SEQ ID NO: 2493187 - RNA, 19 nt, Artificial Sequence
  Description of Artificial Sequence: Synthetic oligonucleotide
accugguuaucgucauacu

SEQ ID NO: 2493188 - RNA, 19 nt, Artificial Sequence
  Description of Artificial Sequence: Synthetic oligonucleotide
uagguggcgaggcggccac

SEQ ID NO: 2493189 - RNA, 19 nt, Artificial Sequence
  Description of Artificial Sequence: Synthetic oligonucleotide
cccggguuucacuaugggg

SEQ ID NO: 2493190 - RNA, 19 nt, Artificial Sequence
  Description of Artificial Sequence: Synthetic oligonucleotide
ucccaucgcucacuccugu

SEQ ID NO: 2493191 - RNA, 19 nt, Artificial Sequence
  Description of Artificial Sequence: Synthetic oligonucleotide
acuccuguugagccggauu

SEQ ID NO: 2493192 - RNA, 19 nt, Artificial Sequence
  Description of Artificial Sequence: Synthetic oligonucleotide
gcugaccguacuugagccg

SEQ ID NO: 2493193 - RNA, 19 nt, Artificial Sequence
  Description of Artificial Sequence: Synthetic oligonucleotide
ggaaaccuccagcugugac

SEQ ID NO: 2493194 - RNA, 19 nt, Artificial Sequence
  Description of Artificial Sequence: Synthetic oligonucleotide
uggcgaggcggccaccuuc

SEQ ID NO: 2493195 - RNA, 19 nt, Artificial Sequence
  Description of Artificial Sequence: Synthetic oligonucleotide
cugaccguacuugagccga

SEQ ID NO: 2493196 - RNA, 19 nt, Artificial Sequence
  Description of Artificial Sequence: Synthetic oligonucleotide
cuaugggguauccaacucu

SEQ ID NO: 2493197 - RNA, 19 nt, Artificial Sequence
  Description of Artificial Sequence: Synthetic oligonucleotide
aguugggcccggguuucac

SEQ ID NO: 2493198 - RNA, 19 nt, Artificial Sequence
  Description of Artificial Sequence: Synthetic oligonucleotide
gcucacuccuguugagccg

SEQ ID NO: 2493199 - RNA, 19 nt, Artificial Sequence
  Description of Artificial Sequence: Synthetic oligonucleotide
caugacauuuccuguugcu

SEQ ID NO: 2493200 - RNA, 19 nt, Artificial Sequence
  Description of Artificial Sequence: Synthetic oligonucleotide
cgaccauaucuucaguugc

SEQ ID NO: 2493201 - RNA, 19 nt, Artificial Sequence
  Description of Artificial Sequence: Synthetic oligonucleotide
cgcauaagcaaaugaggac

SEQ ID NO: 2493202 - RNA, 19 nt, Artificial Sequence
  Description of Artificial Sequence: Synthetic oligonucleotide
guugagccggauuccguaa

SEQ ID NO: 2493203 - RNA, 19 nt, Artificial Sequence
  Description of Artificial Sequence: Synthetic oligonucleotide
accucuucccacagcaaga

SEQ ID NO: 2493204 - RNA, 19 nt, Artificial Sequence
  Description of Artificial Sequence: Synthetic oligonucleotide
cacuaugggguauccaacu

SEQ ID NO: 2493205 - RNA, 19 nt, Artificial Sequence
  Description of Artificial Sequence: Synthetic oligonucleotide
ccauucuugaauccccauc

SEQ ID NO: 2493206 - RNA, 19 nt, Artificial Sequence
  Description of Artificial Sequence: Synthetic oligonucleotide
gcuuguagguggcgaggcg

SEQ ID NO: 2493207 - RNA, 19 nt, Artificial Sequence
  Description of Artificial Sequence: Synthetic oligonucleotide
ugagccgaaugugccagua

SEQ ID NO: 2493208 - RNA, 19 nt, Artificial Sequence
  Description of Artificial Sequence: Synthetic oligonucleotide
accuucaaauucacauaca

SEQ ID NO: 2493209 - RNA, 19 nt, Artificial Sequence
  Description of Artificial Sequence: Synthetic oligonucleotide
caauaggcaucccaucgcu

SEQ ID NO: 2493210 - RNA, 19 nt, Artificial Sequence
  Description of Artificial Sequence: Synthetic oligonucleotide
gccagcccgagcuucucgg

SEQ ID NO: 2493211 - RNA, 19 nt, Artificial Sequence
  Description of Artificial Sequence: Synthetic oligonucleotide
gagcuucucggugguacac

SEQ ID NO: 2493212 - RNA, 19 nt, Artificial Sequence
  Description of Artificial Sequence: Synthetic oligonucleotide
acauacagucuuggcuucu

SEQ ID NO: 2493213 - RNA, 19 nt, Artificial Sequence
  Description of Artificial Sequence: Synthetic oligonucleotide
gaguuaugaaagauuccau

SEQ ID NO: 2493214 - RNA, 19 nt, Artificial Sequence
  Description of Artificial Sequence: Synthetic oligonucleotide
ccauggacgucaucauagc

SEQ ID NO: 2493215 - RNA, 19 nt, Artificial Sequence
  Description of Artificial Sequence: Synthetic oligonucleotide
cacacccgcugcuuguuca

SEQ ID NO: 2493216 - RNA, 19 nt, Artificial Sequence
  Description of Artificial Sequence: Synthetic oligonucleotide
ugaccguacuugagccgaa

SEQ ID NO: 2493217 - RNA, 19 nt, Artificial Sequence
  Description of Artificial Sequence: Synthetic oligonucleotide
cguacuugagccgaaugug

SEQ ID NO: 2493218 - RNA, 19 nt, Artificial Sequence
  Description of Artificial Sequence: Synthetic oligonucleotide
caguugcagagccguuuac

SEQ ID NO: 2493219 - RNA, 19 nt, Artificial Sequence
  Description of Artificial Sequence: Synthetic oligonucleotide
ccuacaaagccauggacgu

SEQ ID NO: 2493220 - RNA, 19 nt, Artificial Sequence
  Description of Artificial Sequence: Synthetic oligonucleotide
uagcugcuuguagguggcg

SEQ ID NO: 2493221 - RNA, 19 nt, Artificial Sequence
  Description of Artificial Sequence: Synthetic oligonucleotide
cccgcugcuuguucaagcc

SEQ ID NO: 2493222 - RNA, 19 nt, Artificial Sequence
  Description of Artificial Sequence: Synthetic oligonucleotide
cuacaaagccauggacguc

SEQ ID NO: 2493223 - RNA, 19 nt, Artificial Sequence
  Description of Artificial Sequence: Synthetic oligonucleotide
aauucgcuuuggaucugua

SEQ ID NO: 2493224 - RNA, 19 nt, Artificial Sequence
  Description of Artificial Sequence: Synthetic oligonucleotide
uggaaaccuccagcuguga

SEQ ID NO: 2493225 - RNA, 19 nt, Artificial Sequence
  Description of Artificial Sequence: Synthetic oligonucleotide
cugugacguauuuaauacu

SEQ ID NO: 2493226 - RNA, 19 nt, Artificial Sequence
  Description of Artificial Sequence: Synthetic oligonucleotide
ccgaaugugccaguagcag

SEQ ID NO: 2493227 - RNA, 19 nt, Artificial Sequence
  Description of Artificial Sequence: Synthetic oligonucleotide
gaauucgcugaccguacuu

SEQ ID NO: 2493228 - RNA, 19 nt, Artificial Sequence
  Description of Artificial Sequence: Synthetic oligonucleotide
ccaucgcucacuccuguug

SEQ ID NO: 2493229 - RNA, 19 nt, Artificial Sequence
  Description of Artificial Sequence: Synthetic oligonucleotide
cagagccguuuacaguguc

SEQ ID NO: 2493230 - RNA, 19 nt, Artificial Sequence
  Description of Artificial Sequence: Synthetic oligonucleotide
cuacauagucggccaggca

SEQ ID NO: 2493231 - RNA, 19 nt, Artificial Sequence
  Description of Artificial Sequence: Synthetic oligonucleotide
ucggccaggcagccugggu

SEQ ID NO: 2493232 - RNA, 19 nt, Artificial Sequence
  Description of Artificial Sequence: Synthetic oligonucleotide
aggauccacugugacguau

SEQ ID NO: 2493233 - RNA, 19 nt, Artificial Sequence
  Description of Artificial Sequence: Synthetic oligonucleotide
caaggucaugacauuuccu

SEQ ID NO: 2493234 - RNA, 19 nt, Artificial Sequence
  Description of Artificial Sequence: Synthetic oligonucleotide
ggcggccaccuucaaauuc

SEQ ID NO: 2493235 - RNA, 19 nt, Artificial Sequence
  Description of Artificial Sequence: Synthetic oligonucleotide
gcagaccugguuaucguca

SEQ ID NO: 2493236 - RNA, 19 nt, Artificial Sequence
  Description of Artificial Sequence: Synthetic oligonucleotide
gguuucacuaugggguauc

SEQ ID NO: 2493237 - RNA, 19 nt, Artificial Sequence
  Description of Artificial Sequence: Synthetic oligonucleotide
uucaagccauauggaguua

SEQ ID NO: 2493238 - RNA, 19 nt, Artificial Sequence
  Description of Artificial Sequence: Synthetic oligonucleotide
uuguagcaauaggcauccc

SEQ ID NO: 2493239 - RNA, 19 nt, Artificial Sequence
  Description of Artificial Sequence: Synthetic oligonucleotide
ugguacacacccgcugcuu

SEQ ID NO: 2493240 - RNA, 19 nt, Artificial Sequence
  Description of Artificial Sequence: Synthetic oligonucleotide
ggguauccaacucuucccu

SEQ ID NO: 2493241 - RNA, 19 nt, Artificial Sequence
  Description of Artificial Sequence: Synthetic oligonucleotide
ccaugaaccucuucccaca

SEQ ID NO: 2493242 - RNA, 19 nt, Artificial Sequence
  Description of Artificial Sequence: Synthetic oligonucleotide
aaccuccagcugugacgga

SEQ ID NO: 2493243 - RNA, 19 nt, Artificial Sequence
  Description of Artificial Sequence: Synthetic oligonucleotide
guagguggcgaggcggcca

SEQ ID NO: 2493244 - RNA, 19 nt, Artificial Sequence
  Description of Artificial Sequence: Synthetic oligonucleotide
gcccggguuucacuauggg

SEQ ID NO: 2493245 - RNA, 19 nt, Artificial Sequence
  Description of Artificial Sequence: Synthetic oligonucleotide
ggucaugacauuuccuguu

SEQ ID NO: 2493246 - RNA, 19 nt, Artificial Sequence
  Description of Artificial Sequence: Synthetic oligonucleotide
gauccacugugacguauuu

SEQ ID NO: 2493247 - RNA, 19 nt, Artificial Sequence
  Description of Artificial Sequence: Synthetic oligonucleotide
caaagccauggacgucauc

SEQ ID NO: 2493248 - RNA, 19 nt, Artificial Sequence
  Description of Artificial Sequence: Synthetic oligonucleotide
ggguuguagcaauaggcau

SEQ ID NO: 2493249 - RNA, 19 nt, Artificial Sequence
  Description of Artificial Sequence: Synthetic oligonucleotide
ggcuucugcauaggugagc

SEQ ID NO: 2493250 - RNA, 19 nt, Artificial Sequence
  Description of Artificial Sequence: Synthetic oligonucleotide
ccauaucuucaguugcaga

SEQ ID NO: 2493251 - RNA, 19 nt, Artificial Sequence
  Description of Artificial Sequence: Synthetic oligonucleotide
aucccaucgcucacuccug

SEQ ID NO: 2493252 - RNA, 19 nt, Artificial Sequence
  Description of Artificial Sequence: Synthetic oligonucleotide
ccuguugcuaaugaugucu

SEQ ID NO: 2493253 - RNA, 19 nt, Artificial Sequence
  Description of Artificial Sequence: Synthetic oligonucleotide
ggcaucccaucgcucacuc

SEQ ID NO: 2493254 - RNA, 19 nt, Artificial Sequence
  Description of Artificial Sequence: Synthetic oligonucleotide
gcugugacggaugcaucac

SEQ ID NO: 2493255 - RNA, 19 nt, Artificial Sequence
  Description of Artificial Sequence: Synthetic oligonucleotide
aggcaucccaucgcucacu

SEQ ID NO: 2493256 - RNA, 19 nt, Artificial Sequence
  Description of Artificial Sequence: Synthetic oligonucleotide
ugggcccggguuucacuau

SEQ ID NO: 2493257 - RNA, 19 nt, Artificial Sequence
  Description of Artificial Sequence: Synthetic oligonucleotide
cuguugcuaaugaugucuu

SEQ ID NO: 2493258 - RNA, 19 nt, Artificial Sequence
  Description of Artificial Sequence: Synthetic oligonucleotide
cagugucggggcuguccac

SEQ ID NO: 2493259 - RNA, 19 nt, Artificial Sequence
  Description of Artificial Sequence: Synthetic oligonucleotide
auccacaguugggcccggg

SEQ ID NO: 2493260 - RNA, 19 nt, Artificial Sequence
  Description of Artificial Sequence: Synthetic oligonucleotide
cgaaugugccaguagcaga

SEQ ID NO: 2493261 - RNA, 19 nt, Artificial Sequence
  Description of Artificial Sequence: Synthetic oligonucleotide
gccgaaugugccaguagca

SEQ ID NO: 2493262 - RNA, 19 nt, Artificial Sequence
  Description of Artificial Sequence: Synthetic oligonucleotide
gugguacacacccgcugcu

SEQ ID NO: 2493263 - RNA, 19 nt, Artificial Sequence
  Description of Artificial Sequence: Synthetic oligonucleotide
cacccgcugcuuguucaag

SEQ ID NO: 2493264 - RNA, 19 nt, Artificial Sequence
  Description of Artificial Sequence: Synthetic oligonucleotide
cacaguugggcccggguuu

SEQ ID NO: 2493265 - RNA, 19 nt, Artificial Sequence
  Description of Artificial Sequence: Synthetic oligonucleotide
guugggcccggguuucacu

SEQ ID NO: 2493266 - RNA, 19 nt, Artificial Sequence
  Description of Artificial Sequence: Synthetic oligonucleotide
cacagacaugaaauccaau

SEQ ID NO: 2493267 - RNA, 19 nt, Artificial Sequence
  Description of Artificial Sequence: Synthetic oligonucleotide
gcaucccaucgcucacucc

SEQ ID NO: 2493268 - RNA, 19 nt, Artificial Sequence
  Description of Artificial Sequence: Synthetic oligonucleotide
ccguacuugagccgaaugu

SEQ ID NO: 2493269 - RNA, 19 nt, Artificial Sequence
  Description of Artificial Sequence: Synthetic oligonucleotide
uugccagcccgagcuucuc

SEQ ID NO: 2493270 - RNA, 19 nt, Artificial Sequence
  Description of Artificial Sequence: Synthetic oligonucleotide
uuacagugucggggcuguc

SEQ ID NO: 2493271 - RNA, 19 nt, Artificial Sequence
  Description of Artificial Sequence: Synthetic oligonucleotide
cggauuccguaaucgauaa

SEQ ID NO: 2493272 - RNA, 19 nt, Artificial Sequence
  Description of Artificial Sequence: Synthetic oligonucleotide
gguauccaacucuucccuu

SEQ ID NO: 2493273 - RNA, 19 nt, Artificial Sequence
  Description of Artificial Sequence: Synthetic oligonucleotide
cggugguacacacccgcug

SEQ ID NO: 2493274 - RNA, 19 nt, Artificial Sequence
  Description of Artificial Sequence: Synthetic oligonucleotide
cguaaucgauaauaccagu

SEQ ID NO: 2493275 - RNA, 19 nt, Artificial Sequence
  Description of Artificial Sequence: Synthetic oligonucleotide
cugcuuguucaagccauau

SEQ ID NO: 2493276 - RNA, 19 nt, Artificial Sequence
  Description of Artificial Sequence: Synthetic oligonucleotide
ccugggucguguucaaggu

SEQ ID NO: 2493277 - RNA, 19 nt, Artificial Sequence
  Description of Artificial Sequence: Synthetic oligonucleotide
ggacgaccauaucuucagu

SEQ ID NO: 2493278 - RNA, 19 nt, Artificial Sequence
  Description of Artificial Sequence: Synthetic oligonucleotide
cugcauaggugagcuugua

SEQ ID NO: 2493279 - RNA, 19 nt, Artificial Sequence
  Description of Artificial Sequence: Synthetic oligonucleotide
cugcuucuagcugcuugua

SEQ ID NO: 2493280 - RNA, 19 nt, Artificial Sequence
  Description of Artificial Sequence: Synthetic oligonucleotide
gaccguacuugagccgaau

SEQ ID NO: 2493281 - RNA, 19 nt, Artificial Sequence
  Description of Artificial Sequence: Synthetic oligonucleotide
ggaagccuggagacuuaaa

SEQ ID NO: 2493282 - RNA, 19 nt, Artificial Sequence
  Description of Artificial Sequence: Synthetic oligonucleotide
gccggauuccguaaucgau

SEQ ID NO: 2493283 - RNA, 19 nt, Artificial Sequence
  Description of Artificial Sequence: Synthetic oligonucleotide
caggauccacugugacgua

SEQ ID NO: 2493284 - RNA, 19 nt, Artificial Sequence
  Description of Artificial Sequence: Synthetic oligonucleotide
cgagcuucucggugguaca

SEQ ID NO: 2493285 - RNA, 19 nt, Artificial Sequence
  Description of Artificial Sequence: Synthetic oligonucleotide
ggauuccguaaucgauaau

SEQ ID NO: 2493286 - RNA, 19 nt, Artificial Sequence
  Description of Artificial Sequence: Synthetic oligonucleotide
ggauccacugugacguauu

SEQ ID NO: 2493287 - RNA, 19 nt, Artificial Sequence
  Description of Artificial Sequence: Synthetic oligonucleotide
ggucguguucaaggucaaa

SEQ ID NO: 2493288 - RNA, 19 nt, Artificial Sequence
  Description of Artificial Sequence: Synthetic oligonucleotide
gcugcuuguucaagccaua

SEQ ID NO: 2493289 - RNA, 19 nt, Artificial Sequence
  Description of Artificial Sequence: Synthetic oligonucleotide
cuucugcauaggugagcuu

SEQ ID NO: 2493290 - RNA, 19 nt, Artificial Sequence
  Description of Artificial Sequence: Synthetic oligonucleotide
caguugggcccggguuuca

SEQ ID NO: 2493291 - RNA, 19 nt, Artificial Sequence
  Description of Artificial Sequence: Synthetic oligonucleotide
gggucguguucaaggucaa

SEQ ID NO: 2493292 - RNA, 19 nt, Artificial Sequence
  Description of Artificial Sequence: Synthetic oligonucleotide
ccacugugacguauuuaau

SEQ ID NO: 2493293 - RNA, 19 nt, Artificial Sequence
  Description of Artificial Sequence: Synthetic oligonucleotide
ccaggcagccugggucgug

SEQ ID NO: 2493294 - RNA, 19 nt, Artificial Sequence
  Description of Artificial Sequence: Synthetic oligonucleotide
cguuuacagugucggggcu

SEQ ID NO: 2493295 - RNA, 19 nt, Artificial Sequence
  Description of Artificial Sequence: Synthetic oligonucleotide
gcccgagcuucucgguggu

SEQ ID NO: 2493296 - RNA, 19 nt, Artificial Sequence
  Description of Artificial Sequence: Synthetic oligonucleotide
cccaucgcucacuccuguu

SEQ ID NO: 2493297 - RNA, 19 nt, Artificial Sequence
  Description of Artificial Sequence: Synthetic oligonucleotide
ccuuugcauguggguugua

SEQ ID NO: 2493298 - RNA, 19 nt, Artificial Sequence
  Description of Artificial Sequence: Synthetic oligonucleotide
cccgagcuucucgguggua

SEQ ID NO: 2493299 - RNA, 19 nt, Artificial Sequence
  Description of Artificial Sequence: Synthetic oligonucleotide
aaugcuucaaucuucaggg

SEQ ID NO: 2493300 - RNA, 19 nt, Artificial Sequence
  Description of Artificial Sequence: Synthetic oligonucleotide
agcauucuuaaccacaggc

SEQ ID NO: 2493301 - RNA, 19 nt, Artificial Sequence
  Description of Artificial Sequence: Synthetic oligonucleotide
aauguugcgacucgguuuc

SEQ ID NO: 2493302 - RNA, 19 nt, Artificial Sequence
  Description of Artificial Sequence: Synthetic oligonucleotide
aucacuaacaaagucaugg

SEQ ID NO: 2493303 - RNA, 19 nt, Artificial Sequence
  Description of Artificial Sequence: Synthetic oligonucleotide
ucauguauccacuuguuag

SEQ ID NO: 2493304 - RNA, 19 nt, Artificial Sequence
  Description of Artificial Sequence: Synthetic oligonucleotide
aaugcgguggucaagaguc

SEQ ID NO: 2493305 - RNA, 19 nt, Artificial Sequence
  Description of Artificial Sequence: Synthetic oligonucleotide
ucagauagaucauaaaugu

SEQ ID NO: 2493306 - RNA, 19 nt, Artificial Sequence
  Description of Artificial Sequence: Synthetic oligonucleotide
aagugaggcucauagugcc

SEQ ID NO: 2493307 - RNA, 19 nt, Artificial Sequence
  Description of Artificial Sequence: Synthetic oligonucleotide
aagaccauuccuugacucc

SEQ ID NO: 2493308 - RNA, 19 nt, Artificial Sequence
  Description of Artificial Sequence: Synthetic oligonucleotide
aaagaccauuccuugacuc

SEQ ID NO: 2493309 - RNA, 19 nt, Artificial Sequence
  Description of Artificial Sequence: Synthetic oligonucleotide
uuaucucccaccaggacgg

SEQ ID NO: 2493310 - RNA, 19 nt, Artificial Sequence
  Description of Artificial Sequence: Synthetic oligonucleotide
gacuucauccuguacaggg

SEQ ID NO: 2493311 - RNA, 19 nt, Artificial Sequence
  Description of Artificial Sequence: Synthetic oligonucleotide
cucagauagaucauaaaug

SEQ ID NO: 2493312 - RNA, 19 nt, Artificial Sequence
  Description of Artificial Sequence: Synthetic oligonucleotide
aaagugaggcucauagugc

SEQ ID NO: 2493313 - RNA, 19 nt, Artificial Sequence
  Description of Artificial Sequence: Synthetic oligonucleotide
agauacucugcauagggag

SEQ ID NO: 2493314 - RNA, 19 nt, Artificial Sequence
  Description of Artificial Sequence: Synthetic oligonucleotide
gucaaagugaggcucauag

SEQ ID NO: 2493315 - RNA, 19 nt, Artificial Sequence
  Description of Artificial Sequence: Synthetic oligonucleotide
ucaaccguguccuucagcc

SEQ ID NO: 2493316 - RNA, 19 nt, Artificial Sequence
  Description of Artificial Sequence: Synthetic oligonucleotide
acuuuugcugauucgguac

SEQ ID NO: 2493317 - RNA, 19 nt, Artificial Sequence
  Description of Artificial Sequence: Synthetic oligonucleotide
cuuaucucccaccaggacg

SEQ ID NO: 2493318 - RNA, 19 nt, Artificial Sequence
  Description of Artificial Sequence: Synthetic oligonucleotide
caaagugaggcucauagug

SEQ ID NO: 2493319 - RNA, 19 nt, Artificial Sequence
  Description of Artificial Sequence: Synthetic oligonucleotide
acugcgcucagauagauca

SEQ ID NO: 2493320 - RNA, 19 nt, Artificial Sequence
  Description of Artificial Sequence: Synthetic oligonucleotide
agcguggucaaagugaggc

SEQ ID NO: 2493321 - RNA, 19 nt, Artificial Sequence
  Description of Artificial Sequence: Synthetic oligonucleotide
uccauaguucaccaccugg

SEQ ID NO: 2493322 - RNA, 19 nt, Artificial Sequence
  Description of Artificial Sequence: Synthetic oligonucleotide
ucauaaauguugcgacucg

SEQ ID NO: 2493323 - RNA, 19 nt, Artificial Sequence
  Description of Artificial Sequence: Synthetic oligonucleotide
caaugcuucaaucuucagg

SEQ ID NO: 2493324 - RNA, 19 nt, Artificial Sequence
  Description of Artificial Sequence: Synthetic oligonucleotide
gaugucaaggccugugagg

SEQ ID NO: 2493325 - RNA, 19 nt, Artificial Sequence
  Description of Artificial Sequence: Synthetic oligonucleotide
uguguuuccugguaaagac

SEQ ID NO: 2493326 - RNA, 19 nt, Artificial Sequence
  Description of Artificial Sequence: Synthetic oligonucleotide
uagaucauaaauguugcga

SEQ ID NO: 2493327 - RNA, 19 nt, Artificial Sequence
  Description of Artificial Sequence: Synthetic oligonucleotide
ucaggguuggugcugcacg

SEQ ID NO: 2493328 - RNA, 19 nt, Artificial Sequence
  Description of Artificial Sequence: Synthetic oligonucleotide
aucauaaauguugcgacuc

SEQ ID NO: 2493329 - RNA, 19 nt, Artificial Sequence
  Description of Artificial Sequence: Synthetic oligonucleotide
aaccguguccuucagccag

SEQ ID NO: 2493330 - RNA, 19 nt, Artificial Sequence
  Description of Artificial Sequence: Synthetic oligonucleotide
cauucuuaaccacaggcac

SEQ ID NO: 2493331 - RNA, 19 nt, Artificial Sequence
  Description of Artificial Sequence: Synthetic oligonucleotide
cauguauccacuuguuagc

SEQ ID NO: 2493332 - RNA, 19 nt, Artificial Sequence
  Description of Artificial Sequence: Synthetic oligonucleotide
gauuucaccccucucugcc

SEQ ID NO: 2493333 - RNA, 19 nt, Artificial Sequence
  Description of Artificial Sequence: Synthetic oligonucleotide
uguccauacucauguaucc

SEQ ID NO: 2493334 - RNA, 19 nt, Artificial Sequence
  Description of Artificial Sequence: Synthetic oligonucleotide
uacucauguauccacuugu

SEQ ID NO: 2493335 - RNA, 19 nt, Artificial Sequence
  Description of Artificial Sequence: Synthetic oligonucleotide
ugcuuggugacguagcgug

SEQ ID NO: 2493336 - RNA, 19 nt, Artificial Sequence
  Description of Artificial Sequence: Synthetic oligonucleotide
agugcagcauucuuaacca

SEQ ID NO: 2493337 - RNA, 19 nt, Artificial Sequence
  Description of Artificial Sequence: Synthetic oligonucleotide
cauagugcccuccaauucc

SEQ ID NO: 2493338 - RNA, 19 nt, Artificial Sequence
  Description of Artificial Sequence: Synthetic oligonucleotide
caugggaucaaccgugucc

SEQ ID NO: 2493339 - RNA, 19 nt, Artificial Sequence
  Description of Artificial Sequence: Synthetic oligonucleotide
aguuggcauagaugaaggc

SEQ ID NO: 2493340 - RNA, 19 nt, Artificial Sequence
  Description of Artificial Sequence: Synthetic oligonucleotide
guaaagaccauuccuugac

SEQ ID NO: 2493341 - RNA, 19 nt, Artificial Sequence
  Description of Artificial Sequence: Synthetic oligonucleotide
agcucucuaaucuucugag

SEQ ID NO: 2493342 - RNA, 19 nt, Artificial Sequence
  Description of Artificial Sequence: Synthetic oligonucleotide
ucaaucuucaggguuggug

SEQ ID NO: 2493343 - RNA, 19 nt, Artificial Sequence
  Description of Artificial Sequence: Synthetic oligonucleotide
gauacucugcauagggagg

SEQ ID NO: 2493344 - RNA, 19 nt, Artificial Sequence
  Description of Artificial Sequence: Synthetic oligonucleotide
agauuucaccccucucugc

SEQ ID NO: 2493345 - RNA, 19 nt, Artificial Sequence
  Description of Artificial Sequence: Synthetic oligonucleotide
agaccauuccuugacuccc

SEQ ID NO: 2493346 - RNA, 19 nt, Artificial Sequence
  Description of Artificial Sequence: Synthetic oligonucleotide
cuggagauacucugcauag

SEQ ID NO: 2493347 - RNA, 19 nt, Artificial Sequence
  Description of Artificial Sequence: Synthetic oligonucleotide
auguauccacuuguuagcc

SEQ ID NO: 2493348 - RNA, 19 nt, Artificial Sequence
  Description of Artificial Sequence: Synthetic oligonucleotide
uuucaccccucucugcccg

SEQ ID NO: 2493349 - RNA, 19 nt, Artificial Sequence
  Description of Artificial Sequence: Synthetic oligonucleotide
uucgguacuccacugguaa

SEQ ID NO: 2493350 - RNA, 19 nt, Artificial Sequence
  Description of Artificial Sequence: Synthetic oligonucleotide
ucuucggaauuccugucca

SEQ ID NO: 2493351 - RNA, 19 nt, Artificial Sequence
  Description of Artificial Sequence: Synthetic oligonucleotide
guguguguguguuuccugg

SEQ ID NO: 2493352 - RNA, 19 nt, Artificial Sequence
  Description of Artificial Sequence: Synthetic oligonucleotide
auuucaccccucucugccc

SEQ ID NO: 2493353 - RNA, 19 nt, Artificial Sequence
  Description of Artificial Sequence: Synthetic oligonucleotide
uagccacccacuuaucucc

SEQ ID NO: 2493354 - RNA, 19 nt, Artificial Sequence
  Description of Artificial Sequence: Synthetic oligonucleotide
gaagugugucuccaucucc

SEQ ID NO: 2493355 - RNA, 19 nt, Artificial Sequence
  Description of Artificial Sequence: Synthetic oligonucleotide
uucuuaaccacaggcacac

SEQ ID NO: 2493356 - RNA, 19 nt, Artificial Sequence
  Description of Artificial Sequence: Synthetic oligonucleotide
acucccacucacaaggccc

SEQ ID NO: 2493357 - RNA, 19 nt, Artificial Sequence
  Description of Artificial Sequence: Synthetic oligonucleotide
cauagaugaaggccguggc

SEQ ID NO: 2493358 - RNA, 19 nt, Artificial Sequence
  Description of Artificial Sequence: Synthetic oligonucleotide
uaaauguugcgacucgguu

SEQ ID NO: 2493359 - RNA, 19 nt, Artificial Sequence
  Description of Artificial Sequence: Synthetic oligonucleotide
ucacuaacaaagucauggu

SEQ ID NO: 2493360 - RNA, 19 nt, Artificial Sequence
  Description of Artificial Sequence: Synthetic oligonucleotide
uguguguguuuccugguaa

SEQ ID NO: 2493361 - RNA, 19 nt, Artificial Sequence
  Description of Artificial Sequence: Synthetic oligonucleotide
ucgguuuccagacuucauc

SEQ ID NO: 2493362 - RNA, 19 nt, Artificial Sequence
  Description of Artificial Sequence: Synthetic oligonucleotide
ugaugugugugugugugug

SEQ ID NO: 2493363 - RNA, 19 nt, Artificial Sequence
  Description of Artificial Sequence: Synthetic oligonucleotide
ucauagugcccuccaauuc

SEQ ID NO: 2493364 - RNA, 19 nt, Artificial Sequence
  Description of Artificial Sequence: Synthetic oligonucleotide
ugacguagcguggucaaag

SEQ ID NO: 2493365 - RNA, 19 nt, Artificial Sequence
  Description of Artificial Sequence: Synthetic oligonucleotide
uuagccacccacuuaucuc

SEQ ID NO: 2493366 - RNA, 19 nt, Artificial Sequence
  Description of Artificial Sequence: Synthetic oligonucleotide
guuuccagacuucauccug

SEQ ID NO: 2493367 - RNA, 19 nt, Artificial Sequence
  Description of Artificial Sequence: Synthetic oligonucleotide
auacucauguauccacuug

SEQ ID NO: 2493368 - RNA, 19 nt, Artificial Sequence
  Description of Artificial Sequence: Synthetic oligonucleotide
uccugguaaagaccauucc

SEQ ID NO: 2493369 - RNA, 19 nt, Artificial Sequence
  Description of Artificial Sequence: Synthetic oligonucleotide
ucggaauuccuguccauac

SEQ ID NO: 2493370 - RNA, 19 nt, Artificial Sequence
  Description of Artificial Sequence: Synthetic oligonucleotide
aucaaccguguccuucagc

SEQ ID NO: 2493371 - RNA, 19 nt, Artificial Sequence
  Description of Artificial Sequence: Synthetic oligonucleotide
cuaacaaagucaugguaga

SEQ ID NO: 2493372 - RNA, 19 nt, Artificial Sequence
  Description of Artificial Sequence: Synthetic oligonucleotide
cuguccauacucauguauc

SEQ ID NO: 2493373 - RNA, 19 nt, Artificial Sequence
  Description of Artificial Sequence: Synthetic oligonucleotide
gucaagaguccccagcaug

SEQ ID NO: 2493374 - RNA, 19 nt, Artificial Sequence
  Description of Artificial Sequence: Synthetic oligonucleotide
uguguguuuccugguaaag

SEQ ID NO: 2493375 - RNA, 19 nt, Artificial Sequence
  Description of Artificial Sequence: Synthetic oligonucleotide
ugguaacuguccuuuuccc

SEQ ID NO: 2493376 - RNA, 19 nt, Artificial Sequence
  Description of Artificial Sequence: Synthetic oligonucleotide
auagaugaaggccguggcu

SEQ ID NO: 2493377 - RNA, 19 nt, Artificial Sequence
  Description of Artificial Sequence: Synthetic oligonucleotide
ugcuucaaucuucaggguu

SEQ ID NO: 2493378 - RNA, 19 nt, Artificial Sequence
  Description of Artificial Sequence: Synthetic oligonucleotide
ucuacugcgcucagauaga

SEQ ID NO: 2493379 - RNA, 19 nt, Artificial Sequence
  Description of Artificial Sequence: Synthetic oligonucleotide
ucucccaccaggacgggac

SEQ ID NO: 2493380 - RNA, 19 nt, Artificial Sequence
  Description of Artificial Sequence: Synthetic oligonucleotide
uuugcugauucgguacucc

SEQ ID NO: 2493381 - RNA, 19 nt, Artificial Sequence
  Description of Artificial Sequence: Synthetic oligonucleotide
uucgggagauuucaccccu

SEQ ID NO: 2493382 - RNA, 19 nt, Artificial Sequence
  Description of Artificial Sequence: Synthetic oligonucleotide
uguguagguuccaccaaaa

SEQ ID NO: 2493383 - RNA, 19 nt, Artificial Sequence
  Description of Artificial Sequence: Synthetic oligonucleotide
ggcacuuuugcugauucgg

SEQ ID NO: 2493384 - RNA, 19 nt, Artificial Sequence
  Description of Artificial Sequence: Synthetic oligonucleotide
uguauccacuuguuagcca

SEQ ID NO: 2493385 - RNA, 19 nt, Artificial Sequence
  Description of Artificial Sequence: Synthetic oligonucleotide
ugugaggccuucuuccuuc

SEQ ID NO: 2493386 - RNA, 19 nt, Artificial Sequence
  Description of Artificial Sequence: Synthetic oligonucleotide
guagcguggucaaagugag

SEQ ID NO: 2493387 - RNA, 19 nt, Artificial Sequence
  Description of Artificial Sequence: Synthetic oligonucleotide
uucugcaagcucucuaauc

SEQ ID NO: 2493388 - RNA, 19 nt, Artificial Sequence
  Description of Artificial Sequence: Synthetic oligonucleotide
uguguguguguguuuccug

SEQ ID NO: 2493389 - RNA, 19 nt, Artificial Sequence
  Description of Artificial Sequence: Synthetic oligonucleotide
caugaagugugucuccauc

SEQ ID NO: 2493390 - RNA, 19 nt, Artificial Sequence
  Description of Artificial Sequence: Synthetic oligonucleotide
guuccaccaaaacagugca

SEQ ID NO: 2493391 - RNA, 19 nt, Artificial Sequence
  Description of Artificial Sequence: Synthetic oligonucleotide
cuucgggagauuucacccc

SEQ ID NO: 2493392 - RNA, 19 nt, Artificial Sequence
  Description of Artificial Sequence: Synthetic oligonucleotide
cuugacucccacucacaag

SEQ ID NO: 2493393 - RNA, 19 nt, Artificial Sequence
  Description of Artificial Sequence: Synthetic oligonucleotide
cacacugaaguuggcauag

SEQ ID NO: 2493394 - RNA, 19 nt, Artificial Sequence
  Description of Artificial Sequence: Synthetic oligonucleotide
ugccaaugcuucaaucuuc

SEQ ID NO: 2493395 - RNA, 19 nt, Artificial Sequence
  Description of Artificial Sequence: Synthetic oligonucleotide
ugcugauucgguacuccac

SEQ ID NO: 2493396 - RNA, 19 nt, Artificial Sequence
  Description of Artificial Sequence: Synthetic oligonucleotide
uggagauacucugcauagg

SEQ ID NO: 2493397 - RNA, 19 nt, Artificial Sequence
  Description of Artificial Sequence: Synthetic oligonucleotide
gucuucggaauuccugucc

SEQ ID NO: 2493398 - RNA, 19 nt, Artificial Sequence
  Description of Artificial Sequence: Synthetic oligonucleotide
gguaacuguccuuuucccc

SEQ ID NO: 2493399 - RNA, 19 nt, Artificial Sequence
  Description of Artificial Sequence: Synthetic oligonucleotide
aucucuggagccacgguuc

SEQ ID NO: 2493400 - RNA, 19 nt, Artificial Sequence
  Description of Artificial Sequence: Synthetic oligonucleotide
ucucuaaucuucugagcuu

SEQ ID NO: 2493401 - RNA, 19 nt, Artificial Sequence
  Description of Artificial Sequence: Synthetic oligonucleotide
acuccacugguaacugucc

SEQ ID NO: 2493402 - RNA, 19 nt, Artificial Sequence
  Description of Artificial Sequence: Synthetic oligonucleotide
uguguguguguguguuucc

SEQ ID NO: 2493403 - RNA, 19 nt, Artificial Sequence
  Description of Artificial Sequence: Synthetic oligonucleotide
guugcgacucgguuuccag

SEQ ID NO: 2493404 - RNA, 19 nt, Artificial Sequence
  Description of Artificial Sequence: Synthetic oligonucleotide
gacucccacucacaaggcc

SEQ ID NO: 2493405 - RNA, 19 nt, Artificial Sequence
  Description of Artificial Sequence: Synthetic oligonucleotide
uaacuguccuuuuccccug

SEQ ID NO: 2493406 - RNA, 19 nt, Artificial Sequence
  Description of Artificial Sequence: Synthetic oligonucleotide
guggucaagaguccccagc

SEQ ID NO: 2493407 - RNA, 19 nt, Artificial Sequence
  Description of Artificial Sequence: Synthetic oligonucleotide
auguggaaugggugugggg

SEQ ID NO: 2493408 - RNA, 19 nt, Artificial Sequence
  Description of Artificial Sequence: Synthetic oligonucleotide
ccuucgggagauuucaccc

SEQ ID NO: 2493409 - RNA, 19 nt, Artificial Sequence
  Description of Artificial Sequence: Synthetic oligonucleotide
ugccaucugccaaugcuuc

SEQ ID NO: 2493410 - RNA, 19 nt, Artificial Sequence
  Description of Artificial Sequence: Synthetic oligonucleotide
auaaauguugcgacucggu

SEQ ID NO: 2493411 - RNA, 19 nt, Artificial Sequence
  Description of Artificial Sequence: Synthetic oligonucleotide
aggcacuuuugcugauucg

SEQ ID NO: 2493412 - RNA, 19 nt, Artificial Sequence
  Description of Artificial Sequence: Synthetic oligonucleotide
cccagcaugggaucaaccg

SEQ ID NO: 2493413 - RNA, 19 nt, Artificial Sequence
  Description of Artificial Sequence: Synthetic oligonucleotide
augugugugugugugugug

SEQ ID NO: 2493414 - RNA, 19 nt, Artificial Sequence
  Description of Artificial Sequence: Synthetic oligonucleotide
acuuguuagccacccacuu

SEQ ID NO: 2493415 - RNA, 19 nt, Artificial Sequence
  Description of Artificial Sequence: Synthetic oligonucleotide
acccacuuaucucccacca

SEQ ID NO: 2493416 - RNA, 19 nt, Artificial Sequence
  Description of Artificial Sequence: Synthetic oligonucleotide
auucuuaaccacaggcaca

SEQ ID NO: 2493417 - RNA, 19 nt, Artificial Sequence
  Description of Artificial Sequence: Synthetic oligonucleotide
gcauagaugaaggccgugg

SEQ ID NO: 2493418 - RNA, 19 nt, Artificial Sequence
  Description of Artificial Sequence: Synthetic oligonucleotide
acguagcguggucaaagug

SEQ ID NO: 2493419 - RNA, 19 nt, Artificial Sequence
  Description of Artificial Sequence: Synthetic oligonucleotide
ugacucccacucacaaggc

SEQ ID NO: 2493420 - RNA, 19 nt, Artificial Sequence
  Description of Artificial Sequence: Synthetic oligonucleotide
ggugaugugugugugugug

SEQ ID NO: 2493421 - RNA, 19 nt, Artificial Sequence
  Description of Artificial Sequence: Synthetic oligonucleotide
gauucgguacuccacuggu

SEQ ID NO: 2493422 - RNA, 19 nt, Artificial Sequence
  Description of Artificial Sequence: Synthetic oligonucleotide
ggaugucaaggccugugag

SEQ ID NO: 2493423 - RNA, 19 nt, Artificial Sequence
  Description of Artificial Sequence: Synthetic oligonucleotide
acuccuguguagguuccac

SEQ ID NO: 2493424 - RNA, 19 nt, Artificial Sequence
  Description of Artificial Sequence: Synthetic oligonucleotide
gaauuccuguccauacuca

SEQ ID NO: 2493425 - RNA, 19 nt, Artificial Sequence
  Description of Artificial Sequence: Synthetic oligonucleotide
uccuugacucccacucaca

SEQ ID NO: 2493426 - RNA, 19 nt, Artificial Sequence
  Description of Artificial Sequence: Synthetic oligonucleotide
cuccaauuccauaguucac

SEQ ID NO: 2493427 - RNA, 19 nt, Artificial Sequence
  Description of Artificial Sequence: Synthetic oligonucleotide
gguaaagaccauuccuuga

SEQ ID NO: 2493428 - RNA, 19 nt, Artificial Sequence
  Description of Artificial Sequence: Synthetic oligonucleotide
ugugugugugugugugugu

SEQ ID NO: 2493429 - RNA, 19 nt, Artificial Sequence
  Description of Artificial Sequence: Synthetic oligonucleotide
cuccuguguagguuccacc

SEQ ID NO: 2493430 - RNA, 19 nt, Artificial Sequence
  Description of Artificial Sequence: Synthetic oligonucleotide
uugcgacucgguuuccaga

SEQ ID NO: 2493431 - RNA, 19 nt, Artificial Sequence
  Description of Artificial Sequence: Synthetic oligonucleotide
uccagacuucauccuguac

SEQ ID NO: 2493432 - RNA, 19 nt, Artificial Sequence
  Description of Artificial Sequence: Synthetic oligonucleotide
caccacggaucucuggagc

SEQ ID NO: 2493433 - RNA, 19 nt, Artificial Sequence
  Description of Artificial Sequence: Synthetic oligonucleotide
aggccuucuuccuucggga

SEQ ID NO: 2493434 - RNA, 19 nt, Artificial Sequence
  Description of Artificial Sequence: Synthetic oligonucleotide
cugugagggcagcaaugcg

SEQ ID NO: 2493435 - RNA, 19 nt, Artificial Sequence
  Description of Artificial Sequence: Synthetic oligonucleotide
cagcaugaagugugucucc

SEQ ID NO: 2493436 - RNA, 19 nt, Artificial Sequence
  Description of Artificial Sequence: Synthetic oligonucleotide
ugaaggccguggcuccucc

SEQ ID NO: 2493437 - RNA, 19 nt, Artificial Sequence
  Description of Artificial Sequence: Synthetic oligonucleotide
gaucaaccguguccuucag

SEQ ID NO: 2493438 - RNA, 19 nt, Artificial Sequence
  Description of Artificial Sequence: Synthetic oligonucleotide
guguagguuccaccaaaac

SEQ ID NO: 2493439 - RNA, 19 nt, Artificial Sequence
  Description of Artificial Sequence: Synthetic oligonucleotide
ggagauuucaccccucucu

SEQ ID NO: 2493440 - RNA, 19 nt, Artificial Sequence
  Description of Artificial Sequence: Synthetic oligonucleotide
gugugugugugugugugug

SEQ ID NO: 2493441 - RNA, 19 nt, Artificial Sequence
  Description of Artificial Sequence: Synthetic oligonucleotide
uagcguggucaaagugagg

SEQ ID NO: 2493442 - RNA, 19 nt, Artificial Sequence
  Description of Artificial Sequence: Synthetic oligonucleotide
cugagcuucugcaucacua

SEQ ID NO: 2493443 - RNA, 19 nt, Artificial Sequence
  Description of Artificial Sequence: Synthetic oligonucleotide
agugugucuccaucucccu

SEQ ID NO: 2493444 - RNA, 19 nt, Artificial Sequence
  Description of Artificial Sequence: Synthetic oligonucleotide
ggacgggacagccagcaug

SEQ ID NO: 2493445 - RNA, 19 nt, Artificial Sequence
  Description of Artificial Sequence: Synthetic oligonucleotide
uucggaauuccuguccaua

SEQ ID NO: 2493446 - RNA, 19 nt, Artificial Sequence
  Description of Artificial Sequence: Synthetic oligonucleotide
gcucagauagaucauaaau

SEQ ID NO: 2493447 - RNA, 19 nt, Artificial Sequence
  Description of Artificial Sequence: Synthetic oligonucleotide
uccacuuguuagccaccca

SEQ ID NO: 2493448 - RNA, 19 nt, Artificial Sequence
  Description of Artificial Sequence: Synthetic oligonucleotide
cacccacuuaucucccacc

SEQ ID NO: 2493449 - RNA, 19 nt, Artificial Sequence
  Description of Artificial Sequence: Synthetic oligonucleotide
guuagccacccacuuaucu

SEQ ID NO: 2493450 - RNA, 19 nt, Artificial Sequence
  Description of Artificial Sequence: Synthetic oligonucleotide
uggugacguagcgugguca

SEQ ID NO: 2493451 - RNA, 19 nt, Artificial Sequence
  Description of Artificial Sequence: Synthetic oligonucleotide
guucaccaccuggagauac

SEQ ID NO: 2493452 - RNA, 19 nt, Artificial Sequence
  Description of Artificial Sequence: Synthetic oligonucleotide
gucaaggccugugagggca

SEQ ID NO: 2493453 - RNA, 19 nt, Artificial Sequence
  Description of Artificial Sequence: Synthetic oligonucleotide
gacaagcugccaucugcca

SEQ ID NO: 2493454 - RNA, 19 nt, Artificial Sequence
  Description of Artificial Sequence: Synthetic oligonucleotide
uuuuccccugaagccacca

SEQ ID NO: 2493455 - RNA, 19 nt, Artificial Sequence
  Description of Artificial Sequence: Synthetic oligonucleotide
ugcacggucuucggaauuc

SEQ ID NO: 2493456 - RNA, 19 nt, Artificial Sequence
  Description of Artificial Sequence: Synthetic oligonucleotide
cacuaacaaagucauggua

SEQ ID NO: 2493457 - RNA, 19 nt, Artificial Sequence
  Description of Artificial Sequence: Synthetic oligonucleotide
caagaguccccagcauggg

SEQ ID NO: 2493458 - RNA, 19 nt, Artificial Sequence
  Description of Artificial Sequence: Synthetic oligonucleotide
guguguguguguguguuuc

SEQ ID NO: 2493459 - RNA, 19 nt, Artificial Sequence
  Description of Artificial Sequence: Synthetic oligonucleotide
ucgguacuccacugguaac

SEQ ID NO: 2493460 - RNA, 19 nt, Artificial Sequence
  Description of Artificial Sequence: Synthetic oligonucleotide
uguuagccacccacuuauc

SEQ ID NO: 2493461 - RNA, 19 nt, Artificial Sequence
  Description of Artificial Sequence: Synthetic oligonucleotide
agguuccaccaaaacagug

SEQ ID NO: 2493462 - RNA, 19 nt, Artificial Sequence
  Description of Artificial Sequence: Synthetic oligonucleotide
acggucuucggaauuccug

SEQ ID NO: 2493463 - RNA, 19 nt, Artificial Sequence
  Description of Artificial Sequence: Synthetic oligonucleotide
uguugcgacucgguuucca

SEQ ID NO: 2493464 - RNA, 19 nt, Artificial Sequence
  Description of Artificial Sequence: Synthetic oligonucleotide
ccacuuguuagccacccac

SEQ ID NO: 2493465 - RNA, 19 nt, Artificial Sequence
  Description of Artificial Sequence: Synthetic oligonucleotide
cugguaaagaccauuccuu

SEQ ID NO: 2493466 - RNA, 19 nt, Artificial Sequence
  Description of Artificial Sequence: Synthetic oligonucleotide
cgguuuccagacuucaucc

SEQ ID NO: 2493467 - RNA, 19 nt, Artificial Sequence
  Description of Artificial Sequence: Synthetic oligonucleotide
gaucucuggagccacgguu

SEQ ID NO: 2493468 - RNA, 19 nt, Artificial Sequence
  Description of Artificial Sequence: Synthetic oligonucleotide
ugcgcucagauagaucaua

SEQ ID NO: 2493469 - RNA, 19 nt, Artificial Sequence
  Description of Artificial Sequence: Synthetic oligonucleotide
gcauucuuaaccacaggca

SEQ ID NO: 2493470 - RNA, 19 nt, Artificial Sequence
  Description of Artificial Sequence: Synthetic oligonucleotide
cuuuuccccugaagccacc

SEQ ID NO: 2493471 - RNA, 19 nt, Artificial Sequence
  Description of Artificial Sequence: Synthetic oligonucleotide
cuucagccaggcacuuuug

SEQ ID NO: 2493472 - RNA, 19 nt, Artificial Sequence
  Description of Artificial Sequence: Synthetic oligonucleotide
uacugcgcucagauagauc

SEQ ID NO: 2493473 - RNA, 19 nt, Artificial Sequence
  Description of Artificial Sequence: Synthetic oligonucleotide
gaggcucauagugcccucc

SEQ ID NO: 2493474 - RNA, 19 nt, Artificial Sequence
  Description of Artificial Sequence: Synthetic oligonucleotide
uucaggguuggugcugcac

SEQ ID NO: 2493475 - RNA, 19 nt, Artificial Sequence
  Description of Artificial Sequence: Synthetic oligonucleotide
gcucucuaaucuucugagc

SEQ ID NO: 2493476 - RNA, 19 nt, Artificial Sequence
  Description of Artificial Sequence: Synthetic oligonucleotide
auagugcccuccaauucca

SEQ ID NO: 2493477 - RNA, 19 nt, Artificial Sequence
  Description of Artificial Sequence: Synthetic oligonucleotide
uguguguguguguguguuu

SEQ ID NO: 2493478 - RNA, 19 nt, Artificial Sequence
  Description of Artificial Sequence: Synthetic oligonucleotide
gggacagccagcaugaagu

SEQ ID NO: 2493479 - RNA, 19 nt, Artificial Sequence
  Description of Artificial Sequence: Synthetic oligonucleotide
cuguguagguuccaccaaa

SEQ ID NO: 2493480 - RNA, 19 nt, Artificial Sequence
  Description of Artificial Sequence: Synthetic oligonucleotide
uuccagacuucauccugua

SEQ ID NO: 2493481 - RNA, 19 nt, Artificial Sequence
  Description of Artificial Sequence: Synthetic oligonucleotide
cucauguauccacuuguua

SEQ ID NO: 2493482 - RNA, 19 nt, Artificial Sequence
  Description of Artificial Sequence: Synthetic oligonucleotide
gagccacgguucugcaagc

SEQ ID NO: 2493483 - RNA, 19 nt, Artificial Sequence
  Description of Artificial Sequence: Synthetic oligonucleotide
aggcucauagugcccucca

SEQ ID NO: 2493484 - RNA, 19 nt, Artificial Sequence
  Description of Artificial Sequence: Synthetic oligonucleotide
cacuuuugcugauucggua

SEQ ID NO: 2493485 - RNA, 19 nt, Artificial Sequence
  Description of Artificial Sequence: Synthetic oligonucleotide
agccacccacuuaucuccc

SEQ ID NO: 2493486 - RNA, 19 nt, Artificial Sequence
  Description of Artificial Sequence: Synthetic oligonucleotide
gguacuccacugguaacug

SEQ ID NO: 2493487 - RNA, 19 nt, Artificial Sequence
  Description of Artificial Sequence: Synthetic oligonucleotide
gaguccccagcaugggauc

SEQ ID NO: 2493488 - RNA, 19 nt, Artificial Sequence
  Description of Artificial Sequence: Synthetic oligonucleotide
ggggugaugugugugugug

SEQ ID NO: 2493489 - RNA, 19 nt, Artificial Sequence
  Description of Artificial Sequence: Synthetic oligonucleotide
guguguguuuccugguaaa

SEQ ID NO: 2493490 - RNA, 19 nt, Artificial Sequence
  Description of Artificial Sequence: Synthetic oligonucleotide
ugagggcagcaaugcggug

SEQ ID NO: 2493491 - RNA, 19 nt, Artificial Sequence
  Description of Artificial Sequence: Synthetic oligonucleotide
gaugugugugugugugugu

SEQ ID NO: 2493492 - RNA, 19 nt, Artificial Sequence
  Description of Artificial Sequence: Synthetic oligonucleotide
cguagcguggucaaaguga

SEQ ID NO: 2493493 - RNA, 19 nt, Artificial Sequence
  Description of Artificial Sequence: Synthetic oligonucleotide
gugcagcauucuuaaccac

SEQ ID NO: 2493494 - RNA, 19 nt, Artificial Sequence
  Description of Artificial Sequence: Synthetic oligonucleotide
guggucaaagugaggcuca

SEQ ID NO: 2493495 - RNA, 19 nt, Artificial Sequence
  Description of Artificial Sequence: Synthetic oligonucleotide
gacguagcguggucaaagu

SEQ ID NO: 2493496 - RNA, 19 nt, Artificial Sequence
  Description of Artificial Sequence: Synthetic oligonucleotide
cauagggaggcuggauguc

SEQ ID NO: 2493497 - RNA, 19 nt, Artificial Sequence
  Description of Artificial Sequence: Synthetic oligonucleotide
cucauagugcccuccaauu

SEQ ID NO: 2493498 - RNA, 19 nt, Artificial Sequence
  Description of Artificial Sequence: Synthetic oligonucleotide
uccuggcuucucugacaag

SEQ ID NO: 2493499 - RNA, 19 nt, Artificial Sequence
  Description of Artificial Sequence: Synthetic oligonucleotide
ucgggagauuucaccccuc

SEQ ID NO: 2493500 - RNA, 19 nt, Artificial Sequence
  Description of Artificial Sequence: Synthetic oligonucleotide
ggccuucuuccuucgggag

SEQ ID NO: 2493501 - RNA, 19 nt, Artificial Sequence
  Description of Artificial Sequence: Synthetic oligonucleotide
gcugauucgguacuccacu

SEQ ID NO: 2493502 - RNA, 19 nt, Artificial Sequence
  Description of Artificial Sequence: Synthetic oligonucleotide
ucucugcccguggcuuugg

SEQ ID NO: 2493503 - RNA, 19 nt, Artificial Sequence
  Description of Artificial Sequence: Synthetic oligonucleotide
auguugcgacucgguuucc

SEQ ID NO: 2493504 - RNA, 19 nt, Artificial Sequence
  Description of Artificial Sequence: Synthetic oligonucleotide
uacucugcauagggaggcu

SEQ ID NO: 2493505 - RNA, 19 nt, Artificial Sequence
  Description of Artificial Sequence: Synthetic oligonucleotide
cacucacaaggcccugcug

SEQ ID NO: 2493506 - RNA, 19 nt, Artificial Sequence
  Description of Artificial Sequence: Synthetic oligonucleotide
caggcacacugaaguuggc

SEQ ID NO: 2493507 - RNA, 19 nt, Artificial Sequence
  Description of Artificial Sequence: Synthetic oligonucleotide
cauacucauguauccacuu

SEQ ID NO: 2493508 - RNA, 19 nt, Artificial Sequence
  Description of Artificial Sequence: Synthetic oligonucleotide
ggucuucggaauuccuguc

SEQ ID NO: 2493509 - RNA, 19 nt, Artificial Sequence
  Description of Artificial Sequence: Synthetic oligonucleotide
agcaugggaucaaccgugu

SEQ ID NO: 2493510 - RNA, 19 nt, Artificial Sequence
  Description of Artificial Sequence: Synthetic oligonucleotide
ggugacguagcguggucaa

SEQ ID NO: 2493511 - RNA, 19 nt, Artificial Sequence
  Description of Artificial Sequence: Synthetic oligonucleotide
cagauagaucauaaauguu

SEQ ID NO: 2493512 - RNA, 19 nt, Artificial Sequence
  Description of Artificial Sequence: Synthetic oligonucleotide
ucuuaaccacaggcacacu

SEQ ID NO: 2493513 - RNA, 19 nt, Artificial Sequence
  Description of Artificial Sequence: Synthetic oligonucleotide
gccaaugcuucaaucuuca

SEQ ID NO: 2493514 - RNA, 19 nt, Artificial Sequence
  Description of Artificial Sequence: Synthetic oligonucleotide
uccuguccauacucaugua

SEQ ID NO: 2493515 - RNA, 19 nt, Artificial Sequence
  Description of Artificial Sequence: Synthetic oligonucleotide
ccugguaaagaccauuccu

SEQ ID NO: 2493516 - RNA, 19 nt, Artificial Sequence
  Description of Artificial Sequence: Synthetic oligonucleotide
gaccauuccuugacuccca

SEQ ID NO: 2493517 - RNA, 19 nt, Artificial Sequence
  Description of Artificial Sequence: Synthetic oligonucleotide
uagugcccuccaauuccau

SEQ ID NO: 2493518 - RNA, 19 nt, Artificial Sequence
  Description of Artificial Sequence: Synthetic oligonucleotide
gcaaugcgguggucaagag

SEQ ID NO: 2493519 - RNA, 19 nt, Artificial Sequence
  Description of Artificial Sequence: Synthetic oligonucleotide
caggacgggacagccagca

SEQ ID NO: 2493520 - RNA, 19 nt, Artificial Sequence
  Description of Artificial Sequence: Synthetic oligonucleotide
gcauagggaggcuggaugu

SEQ ID NO: 2493521 - RNA, 19 nt, Artificial Sequence
  Description of Artificial Sequence: Synthetic oligonucleotide
caaccguguccuucagcca

SEQ ID NO: 2493522 - RNA, 19 nt, Artificial Sequence
  Description of Artificial Sequence: Synthetic oligonucleotide
gggaucaaccguguccuuc

SEQ ID NO: 2493523 - RNA, 19 nt, Artificial Sequence
  Description of Artificial Sequence: Synthetic oligonucleotide
gcuuggugacguagcgugg

SEQ ID NO: 2493524 - RNA, 19 nt, Artificial Sequence
  Description of Artificial Sequence: Synthetic oligonucleotide
caaugcgguggucaagagu

SEQ ID NO: 2493525 - RNA, 19 nt, Artificial Sequence
  Description of Artificial Sequence: Synthetic oligonucleotide
uucaccccucucugcccgu

SEQ ID NO: 2493526 - RNA, 19 nt, Artificial Sequence
  Description of Artificial Sequence: Synthetic oligonucleotide
ccaaugcuucaaucuucag

SEQ ID NO: 2493527 - RNA, 19 nt, Artificial Sequence
  Description of Artificial Sequence: Synthetic oligonucleotide
cucucugcccguggcuuug

SEQ ID NO: 2493528 - RNA, 19 nt, Artificial Sequence
  Description of Artificial Sequence: Synthetic oligonucleotide
gugaggcucauagugcccu

SEQ ID NO: 2493529 - RNA, 19 nt, Artificial Sequence
  Description of Artificial Sequence: Synthetic oligonucleotide
acacugaaguuggcauaga

SEQ ID NO: 2493530 - RNA, 19 nt, Artificial Sequence
  Description of Artificial Sequence: Synthetic oligonucleotide
gguuuccagacuucauccu

SEQ ID NO: 2493531 - RNA, 19 nt, Artificial Sequence
  Description of Artificial Sequence: Synthetic oligonucleotide
auucgguacuccacuggua

SEQ ID NO: 2493532 - RNA, 19 nt, Artificial Sequence
  Description of Artificial Sequence: Synthetic oligonucleotide
cguggucaaagugaggcuc

SEQ ID NO: 2493533 - RNA, 19 nt, Artificial Sequence
  Description of Artificial Sequence: Synthetic oligonucleotide
cucugcccguggcuuuggc

SEQ ID NO: 2493534 - RNA, 19 nt, Artificial Sequence
  Description of Artificial Sequence: Synthetic oligonucleotide
ggguuggugcugcacgguc

SEQ ID NO: 2493535 - RNA, 19 nt, Artificial Sequence
  Description of Artificial Sequence: Synthetic oligonucleotide
ccaccacggaucucuggag

SEQ ID NO: 2493536 - RNA, 19 nt, Artificial Sequence
  Description of Artificial Sequence: Synthetic oligonucleotide
agcuucuacugcgcucaga

SEQ ID NO: 2493537 - RNA, 19 nt, Artificial Sequence
  Description of Artificial Sequence: Synthetic oligonucleotide
aggguuggugcugcacggu

SEQ ID NO: 2493538 - RNA, 19 nt, Artificial Sequence
  Description of Artificial Sequence: Synthetic oligonucleotide
cccacuuaucucccaccag

SEQ ID NO: 2493539 - RNA, 19 nt, Artificial Sequence
  Description of Artificial Sequence: Synthetic oligonucleotide
cugccaaugcuucaaucuu

SEQ ID NO: 2493540 - RNA, 19 nt, Artificial Sequence
  Description of Artificial Sequence: Synthetic oligonucleotide
cuuggugacguagcguggu

SEQ ID NO: 2493541 - RNA, 19 nt, Artificial Sequence
  Description of Artificial Sequence: Synthetic oligonucleotide
ccaccaaaacagugcagca

SEQ ID NO: 2493542 - RNA, 19 nt, Artificial Sequence
  Description of Artificial Sequence: Synthetic oligonucleotide
gugaugugugugugugugu

SEQ ID NO: 2493543 - RNA, 19 nt, Artificial Sequence
  Description of Artificial Sequence: Synthetic oligonucleotide
agccacgguucugcaagcu

SEQ ID NO: 2493544 - RNA, 19 nt, Artificial Sequence
  Description of Artificial Sequence: Synthetic oligonucleotide
guguguguguguguuuccu

SEQ ID NO: 2493545 - RNA, 19 nt, Artificial Sequence
  Description of Artificial Sequence: Synthetic oligonucleotide
cugccaucugccaaugcuu

SEQ ID NO: 2493546 - RNA, 19 nt, Artificial Sequence
  Description of Artificial Sequence: Synthetic oligonucleotide
guacuccacugguaacugu

SEQ ID NO: 2493547 - RNA, 19 nt, Artificial Sequence
  Description of Artificial Sequence: Synthetic oligonucleotide
aucucccaccaggacggga

SEQ ID NO: 2493548 - RNA, 19 nt, Artificial Sequence
  Description of Artificial Sequence: Synthetic oligonucleotide
gccacgguucugcaagcuc

SEQ ID NO: 2493549 - RNA, 19 nt, Artificial Sequence
  Description of Artificial Sequence: Synthetic oligonucleotide
cucccacucacaaggcccu

SEQ ID NO: 2493550 - RNA, 19 nt, Artificial Sequence
  Description of Artificial Sequence: Synthetic oligonucleotide
ggcauagaugaaggccgug

SEQ ID NO: 2493551 - RNA, 19 nt, Artificial Sequence
  Description of Artificial Sequence: Synthetic oligonucleotide
aggacgggacagccagcau

SEQ ID NO: 2493552 - RNA, 19 nt, Artificial Sequence
  Description of Artificial Sequence: Synthetic oligonucleotide
gggcugcuuggugacguag

SEQ ID NO: 2493553 - RNA, 19 nt, Artificial Sequence
  Description of Artificial Sequence: Synthetic oligonucleotide
ugggaucaaccguguccuu

SEQ ID NO: 2493554 - RNA, 19 nt, Artificial Sequence
  Description of Artificial Sequence: Synthetic oligonucleotide
cagcuucuacugcgcucag

SEQ ID NO: 2493555 - RNA, 19 nt, Artificial Sequence
  Description of Artificial Sequence: Synthetic oligonucleotide
ccuugacucccacucacaa

SEQ ID NO: 2493556 - RNA, 19 nt, Artificial Sequence
  Description of Artificial Sequence: Synthetic oligonucleotide
gcucauagugcccuccaau

SEQ ID NO: 2493557 - RNA, 19 nt, Artificial Sequence
  Description of Artificial Sequence: Synthetic oligonucleotide
cuucucugacaagcugcca

SEQ ID NO: 2493558 - RNA, 19 nt, Artificial Sequence
  Description of Artificial Sequence: Synthetic oligonucleotide
gcacggucuucggaauucc

SEQ ID NO: 2493559 - RNA, 19 nt, Artificial Sequence
  Description of Artificial Sequence: Synthetic oligonucleotide
cgggacagccagcaugaag

SEQ ID NO: 2493560 - RNA, 19 nt, Artificial Sequence
  Description of Artificial Sequence: Synthetic oligonucleotide
ccucuccacuccuguguag

SEQ ID NO: 2493561 - RNA, 19 nt, Artificial Sequence
  Description of Artificial Sequence: Synthetic oligonucleotide
uuggugcugcacggucuuc

SEQ ID NO: 2493562 - RNA, 19 nt, Artificial Sequence
  Description of Artificial Sequence: Synthetic oligonucleotide
guguguguguguguguguu

SEQ ID NO: 2493563 - RNA, 19 nt, Artificial Sequence
  Description of Artificial Sequence: Synthetic oligonucleotide
ccacgguucugcaagcucu

SEQ ID NO: 2493564 - RNA, 19 nt, Artificial Sequence
  Description of Artificial Sequence: Synthetic oligonucleotide
ccauacucauguauccacu

SEQ ID NO: 2493565 - RNA, 19 nt, Artificial Sequence
  Description of Artificial Sequence: Synthetic oligonucleotide
gcgguggucaagagucccc

SEQ ID NO: 2493566 - RNA, 19 nt, Artificial Sequence
  Description of Artificial Sequence: Synthetic oligonucleotide
gcaugggaucaaccguguc

SEQ ID NO: 2493567 - RNA, 19 nt, Artificial Sequence
  Description of Artificial Sequence: Synthetic oligonucleotide
cuucaggguuggugcugca

SEQ ID NO: 2493568 - RNA, 19 nt, Artificial Sequence
  Description of Artificial Sequence: Synthetic oligonucleotide
cucgguuuccagacuucau

SEQ ID NO: 2493569 - RNA, 19 nt, Artificial Sequence
  Description of Artificial Sequence: Synthetic oligonucleotide
cugcaagcucucuaaucuu

SEQ ID NO: 2493570 - RNA, 19 nt, Artificial Sequence
  Description of Artificial Sequence: Synthetic oligonucleotide
ccagcaugggaucaaccgu

SEQ ID NO: 2493571 - RNA, 19 nt, Artificial Sequence
  Description of Artificial Sequence: Synthetic oligonucleotide
cggaucucuggagccacgg

SEQ ID NO: 2493572 - RNA, 19 nt, Artificial Sequence
  Description of Artificial Sequence: Synthetic oligonucleotide
cuucggaauuccuguccau

SEQ ID NO: 2493573 - RNA, 19 nt, Artificial Sequence
  Description of Artificial Sequence: Synthetic oligonucleotide
cccacucacaaggcccugc

SEQ ID NO: 2493574 - RNA, 19 nt, Artificial Sequence
  Description of Artificial Sequence: Synthetic oligonucleotide
ggcucauagugcccuccaa

SEQ ID NO: 2493575 - RNA, 19 nt, Artificial Sequence
  Description of Artificial Sequence: Synthetic oligonucleotide
cacggucuucggaauuccu

SEQ ID NO: 2493576 - RNA, 19 nt, Artificial Sequence
  Description of Artificial Sequence: Synthetic oligonucleotide
gcgcucagauagaucauaa

SEQ ID NO: 2493577 - RNA, 19 nt, Artificial Sequence
  Description of Artificial Sequence: Synthetic oligonucleotide
ccuguccauacucauguau

SEQ ID NO: 2493578 - RNA, 19 nt, Artificial Sequence
  Description of Artificial Sequence: Synthetic oligonucleotide
gugacguagcguggucaaa

SEQ ID NO: 2493579 - RNA, 19 nt, Artificial Sequence
  Description of Artificial Sequence: Synthetic oligonucleotide
gcacuuuugcugauucggu

SEQ ID NO: 2493580 - RNA, 19 nt, Artificial Sequence
  Description of Artificial Sequence: Synthetic oligonucleotide
ccuguguagguuccaccaa

SEQ ID NO: 2493581 - RNA, 19 nt, Artificial Sequence
  Description of Artificial Sequence: Synthetic oligonucleotide
ggucaagaguccccagcau

SEQ ID NO: 2493582 - RNA, 19 nt, Artificial Sequence
  Description of Artificial Sequence: Synthetic oligonucleotide
cuacugcgcucagauagau

SEQ ID NO: 2493583 - RNA, 19 nt, Artificial Sequence
  Description of Artificial Sequence: Synthetic oligonucleotide
ggaucucuggagccacggu

SEQ ID NO: 2493584 - RNA, 19 nt, Artificial Sequence
  Description of Artificial Sequence: Synthetic oligonucleotide
cacuccuguguagguucca

SEQ ID NO: 2493585 - RNA, 19 nt, Artificial Sequence
  Description of Artificial Sequence: Synthetic oligonucleotide
cggucuucggaauuccugu

SEQ ID NO: 2493586 - RNA, 19 nt, Artificial Sequence
  Description of Artificial Sequence: Synthetic oligonucleotide
gggugaugugugugugugu

SEQ ID NO: 2493587 - RNA, 19 nt, Artificial Sequence
  Description of Artificial Sequence: Synthetic oligonucleotide
cugugaggccuucuuccuu

SEQ ID NO: 2493588 - RNA, 19 nt, Artificial Sequence
  Description of Artificial Sequence: Synthetic oligonucleotide
cugcgcucagauagaucau

SEQ ID NO: 2493589 - RNA, 19 nt, Artificial Sequence
  Description of Artificial Sequence: Synthetic oligonucleotide
gcugcacggucuucggaau

SEQ ID NO: 2493590 - RNA, 19 nt, Artificial Sequence
  Description of Artificial Sequence: Synthetic oligonucleotide
cgcucagauagaucauaaa

SEQ ID NO: 2493591 - RNA, 19 nt, Artificial Sequence
  Description of Artificial Sequence: Synthetic oligonucleotide
cacugguaacuguccuuuu

SEQ ID NO: 2493592 - RNA, 19 nt, Artificial Sequence
  Description of Artificial Sequence: Synthetic oligonucleotide
cuccacuccuguguagguu

SEQ ID NO: 2493593 - RNA, 19 nt, Artificial Sequence
  Description of Artificial Sequence: Synthetic oligonucleotide
cugcacggucuucggaauu

SEQ ID NO: 2493594 - RNA, 19 nt, Artificial Sequence
  Description of Artificial Sequence: Synthetic oligonucleotide
cccugaagccaccacggau

SEQ ID NO: 2493595 - RNA, 19 nt, Artificial Sequence
  Description of Artificial Sequence: Synthetic oligonucleotide
cccucuccacuccugugua

SEQ ID NO: 2493596 - RNA, 19 nt, Artificial Sequence
  Description of Artificial Sequence: Synthetic oligonucleotide
ccacucacaaggcccugcu

SEQ ID NO: 2493597 - RNA, 19 nt, Artificial Sequence
  Description of Artificial Sequence: Synthetic oligonucleotide
cggaauuccuguccauacu

SEQ ID NO: 2493598 - RNA, 19 nt, Artificial Sequence
  Description of Artificial Sequence: Synthetic oligonucleotide
ccccugaagccaccacgga

SEQ ID NO: 2493599 - RNA, 19 nt, Artificial Sequence
  Description of Artificial Sequence: Synthetic oligonucleotide
cgguggucaagagucccca

SEQ ID NO: 2493600 - RNA, 19 nt, Artificial Sequence
  Description of Artificial Sequence: Synthetic oligonucleotide
cgguucugcaagcucucua

SEQ ID NO: 2493601 - RNA, 19 nt, Artificial Sequence
  Description of Artificial Sequence: Synthetic oligonucleotide
cgggagauuucaccccucu

SEQ ID NO: 2493602 - RNA, 19 nt, Artificial Sequence
  Description of Artificial Sequence: Synthetic oligonucleotide
cccucucugcccguggcuu

SEQ ID NO: 2493603 - RNA, 19 nt, Artificial Sequence
  Description of Artificial Sequence: Synthetic oligonucleotide
ugaucaaugacauggaugc

SEQ ID NO: 2493604 - RNA, 19 nt, Artificial Sequence
  Description of Artificial Sequence: Synthetic oligonucleotide
uucauauucuccaagccgg

SEQ ID NO: 2493605 - RNA, 19 nt, Artificial Sequence
  Description of Artificial Sequence: Synthetic oligonucleotide
aaaggcaccguacuuggcc

SEQ ID NO: 2493606 - RNA, 19 nt, Artificial Sequence
  Description of Artificial Sequence: Synthetic oligonucleotide
aaaaccgucaccgugggcg

SEQ ID NO: 2493607 - RNA, 19 nt, Artificial Sequence
  Description of Artificial Sequence: Synthetic oligonucleotide
ucaucuacaggauaggagc

SEQ ID NO: 2493608 - RNA, 19 nt, Artificial Sequence
  Description of Artificial Sequence: Synthetic oligonucleotide
agaacuugucgucagcacc

SEQ ID NO: 2493609 - RNA, 19 nt, Artificial Sequence
  Description of Artificial Sequence: Synthetic oligonucleotide
ugagauuacggcuguaccg

SEQ ID NO: 2493610 - RNA, 19 nt, Artificial Sequence
  Description of Artificial Sequence: Synthetic oligonucleotide
aguucuucguuguaugggc

SEQ ID NO: 2493611 - RNA, 19 nt, Artificial Sequence
  Description of Artificial Sequence: Synthetic oligonucleotide
uguauuuugccuccgguca

SEQ ID NO: 2493612 - RNA, 19 nt, Artificial Sequence
  Description of Artificial Sequence: Synthetic oligonucleotide
aaaucugugaguccuacau

SEQ ID NO: 2493613 - RNA, 19 nt, Artificial Sequence
  Description of Artificial Sequence: Synthetic oligonucleotide
ucacaucucauccaacccg

SEQ ID NO: 2493614 - RNA, 19 nt, Artificial Sequence
  Description of Artificial Sequence: Synthetic oligonucleotide
acaacggcuacccacagag

SEQ ID NO: 2493615 - RNA, 19 nt, Artificial Sequence
  Description of Artificial Sequence: Synthetic oligonucleotide
aaaguagcguuuuccguuc

SEQ ID NO: 2493616 - RNA, 19 nt, Artificial Sequence
  Description of Artificial Sequence: Synthetic oligonucleotide
cuugguguagaacuugucg

SEQ ID NO: 2493617 - RNA, 19 nt, Artificial Sequence
  Description of Artificial Sequence: Synthetic oligonucleotide
cuucauauucuccaagccg

SEQ ID NO: 2493618 - RNA, 19 nt, Artificial Sequence
  Description of Artificial Sequence: Synthetic oligonucleotide
aggauaggagcccagcagc

SEQ ID NO: 2493619 - RNA, 19 nt, Artificial Sequence
  Description of Artificial Sequence: Synthetic oligonucleotide
aaugacauggaugcggcag

SEQ ID NO: 2493620 - RNA, 19 nt, Artificial Sequence
  Description of Artificial Sequence: Synthetic oligonucleotide
uguaccgcuucuccgagcg

SEQ ID NO: 2493621 - RNA, 19 nt, Artificial Sequence
  Description of Artificial Sequence: Synthetic oligonucleotide
cugaugaaaaccgucaccg

SEQ ID NO: 2493622 - RNA, 19 nt, Artificial Sequence
  Description of Artificial Sequence: Synthetic oligonucleotide
aaaucucccacggugacag

SEQ ID NO: 2493623 - RNA, 19 nt, Artificial Sequence
  Description of Artificial Sequence: Synthetic oligonucleotide
ugcguuucaugaacgaccg

SEQ ID NO: 2493624 - RNA, 19 nt, Artificial Sequence
  Description of Artificial Sequence: Synthetic oligonucleotide
gaugaaaaccgucaccgug

SEQ ID NO: 2493625 - RNA, 19 nt, Artificial Sequence
  Description of Artificial Sequence: Synthetic oligonucleotide
gauggcuugacaaaggcac

SEQ ID NO: 2493626 - RNA, 19 nt, Artificial Sequence
  Description of Artificial Sequence: Synthetic oligonucleotide
ugggaaaucucccacggug

SEQ ID NO: 2493627 - RNA, 19 nt, Artificial Sequence
  Description of Artificial Sequence: Synthetic oligonucleotide
auauucuccaagccggacg

SEQ ID NO: 2493628 - RNA, 19 nt, Artificial Sequence
  Description of Artificial Sequence: Synthetic oligonucleotide
cucaaaguagcguuuuccg

SEQ ID NO: 2493629 - RNA, 19 nt, Artificial Sequence
  Description of Artificial Sequence: Synthetic oligonucleotide
cuacauacaugacagugcc

SEQ ID NO: 2493630 - RNA, 19 nt, Artificial Sequence
  Description of Artificial Sequence: Synthetic oligonucleotide
uccagcuuacacuugaacu

SEQ ID NO: 2493631 - RNA, 19 nt, Artificial Sequence
  Description of Artificial Sequence: Synthetic oligonucleotide
uauucuccaagccggacgc

SEQ ID NO: 2493632 - RNA, 19 nt, Artificial Sequence
  Description of Artificial Sequence: Synthetic oligonucleotide
uucaugaacgaccgaacug

SEQ ID NO: 2493633 - RNA, 19 nt, Artificial Sequence
  Description of Artificial Sequence: Synthetic oligonucleotide
ucaaugacauggaugcggc

SEQ ID NO: 2493634 - RNA, 19 nt, Artificial Sequence
  Description of Artificial Sequence: Synthetic oligonucleotide
acucaaaguagcguuuucc

SEQ ID NO: 2493635 - RNA, 19 nt, Artificial Sequence
  Description of Artificial Sequence: Synthetic oligonucleotide
aucaaugacauggaugcgg

SEQ ID NO: 2493636 - RNA, 19 nt, Artificial Sequence
  Description of Artificial Sequence: Synthetic oligonucleotide
cuugucgucagcaccauac

SEQ ID NO: 2493637 - RNA, 19 nt, Artificial Sequence
  Description of Artificial Sequence: Synthetic oligonucleotide
agcaggacugcccaccacc

SEQ ID NO: 2493638 - RNA, 19 nt, Artificial Sequence
  Description of Artificial Sequence: Synthetic oligonucleotide
uccuacauacaugacagug

SEQ ID NO: 2493639 - RNA, 19 nt, Artificial Sequence
  Description of Artificial Sequence: Synthetic oligonucleotide
aacggcuacccacagagau

SEQ ID NO: 2493640 - RNA, 19 nt, Artificial Sequence
  Description of Artificial Sequence: Synthetic oligonucleotide
uuucaugaacgaccgaacu

SEQ ID NO: 2493641 - RNA, 19 nt, Artificial Sequence
  Description of Artificial Sequence: Synthetic oligonucleotide
cagcgcauccucuugaucc

SEQ ID NO: 2493642 - RNA, 19 nt, Artificial Sequence
  Description of Artificial Sequence: Synthetic oligonucleotide
uccagcuccaugcacgaag

SEQ ID NO: 2493643 - RNA, 19 nt, Artificial Sequence
  Description of Artificial Sequence: Synthetic oligonucleotide
cuaagggcucgucauaccg

SEQ ID NO: 2493644 - RNA, 19 nt, Artificial Sequence
  Description of Artificial Sequence: Synthetic oligonucleotide
cugcguuucaugaacgacc

SEQ ID NO: 2493645 - RNA, 19 nt, Artificial Sequence
  Description of Artificial Sequence: Synthetic oligonucleotide
augacauggaugcggcagc

SEQ ID NO: 2493646 - RNA, 19 nt, Artificial Sequence
  Description of Artificial Sequence: Synthetic oligonucleotide
aaaccgucaccgugggcgc

SEQ ID NO: 2493647 - RNA, 19 nt, Artificial Sequence
  Description of Artificial Sequence: Synthetic oligonucleotide
uugaacucggcgauaguga

SEQ ID NO: 2493648 - RNA, 19 nt, Artificial Sequence
  Description of Artificial Sequence: Synthetic oligonucleotide
auaagcuuccggugagagc

SEQ ID NO: 2493649 - RNA, 19 nt, Artificial Sequence
  Description of Artificial Sequence: Synthetic oligonucleotide
ugugaguccuacauacaug

SEQ ID NO: 2493650 - RNA, 19 nt, Artificial Sequence
  Description of Artificial Sequence: Synthetic oligonucleotide
ugaaaaccgucaccguggg

SEQ ID NO: 2493651 - RNA, 19 nt, Artificial Sequence
  Description of Artificial Sequence: Synthetic oligonucleotide
aguagccuggcuugaaauc

SEQ ID NO: 2493652 - RNA, 19 nt, Artificial Sequence
  Description of Artificial Sequence: Synthetic oligonucleotide
ugaacucggcgauagugag

SEQ ID NO: 2493653 - RNA, 19 nt, Artificial Sequence
  Description of Artificial Sequence: Synthetic oligonucleotide
agugagauuacggcuguac

SEQ ID NO: 2493654 - RNA, 19 nt, Artificial Sequence
  Description of Artificial Sequence: Synthetic oligonucleotide
uaugggccuaccuugcugc

SEQ ID NO: 2493655 - RNA, 19 nt, Artificial Sequence
  Description of Artificial Sequence: Synthetic oligonucleotide
ugagagcucguauuucucc

SEQ ID NO: 2493656 - RNA, 19 nt, Artificial Sequence
  Description of Artificial Sequence: Synthetic oligonucleotide
ugaacgaccgaacuguauu

SEQ ID NO: 2493657 - RNA, 19 nt, Artificial Sequence
  Description of Artificial Sequence: Synthetic oligonucleotide
uaagggcucgucauaccgg

SEQ ID NO: 2493658 - RNA, 19 nt, Artificial Sequence
  Description of Artificial Sequence: Synthetic oligonucleotide
ucauccaacccguaguccu

SEQ ID NO: 2493659 - RNA, 19 nt, Artificial Sequence
  Description of Artificial Sequence: Synthetic oligonucleotide
augaaaaccgucaccgugg

SEQ ID NO: 2493660 - RNA, 19 nt, Artificial Sequence
  Description of Artificial Sequence: Synthetic oligonucleotide
aacccaguagccuggcuug

SEQ ID NO: 2493661 - RNA, 19 nt, Artificial Sequence
  Description of Artificial Sequence: Synthetic oligonucleotide
auuacggcuguaccgcuuc

SEQ ID NO: 2493662 - RNA, 19 nt, Artificial Sequence
  Description of Artificial Sequence: Synthetic oligonucleotide
gaguccuacauacaugaca

SEQ ID NO: 2493663 - RNA, 19 nt, Artificial Sequence
  Description of Artificial Sequence: Synthetic oligonucleotide
gagauuacggcuguaccgc

SEQ ID NO: 2493664 - RNA, 19 nt, Artificial Sequence
  Description of Artificial Sequence: Synthetic oligonucleotide
gaagggacuggccagguga

SEQ ID NO: 2493665 - RNA, 19 nt, Artificial Sequence
  Description of Artificial Sequence: Synthetic oligonucleotide
uccguucacacugccaucg

SEQ ID NO: 2493666 - RNA, 19 nt, Artificial Sequence
  Description of Artificial Sequence: Synthetic oligonucleotide
ucgucagcaccauacagcu

SEQ ID NO: 2493667 - RNA, 19 nt, Artificial Sequence
  Description of Artificial Sequence: Synthetic oligonucleotide
gaguucuucguuguauggg

SEQ ID NO: 2493668 - RNA, 19 nt, Artificial Sequence
  Description of Artificial Sequence: Synthetic oligonucleotide
gugaguccuacauacauga

SEQ ID NO: 2493669 - RNA, 19 nt, Artificial Sequence
  Description of Artificial Sequence: Synthetic oligonucleotide
cuugcugcguuucaugaac

SEQ ID NO: 2493670 - RNA, 19 nt, Artificial Sequence
  Description of Artificial Sequence: Synthetic oligonucleotide
gagcggaagcuguugagag

SEQ ID NO: 2493671 - RNA, 19 nt, Artificial Sequence
  Description of Artificial Sequence: Synthetic oligonucleotide
aacucggcgauagugagau

SEQ ID NO: 2493672 - RNA, 19 nt, Artificial Sequence
  Description of Artificial Sequence: Synthetic oligonucleotide
gaccgaacuguauuuugcc

SEQ ID NO: 2493673 - RNA, 19 nt, Artificial Sequence
  Description of Artificial Sequence: Synthetic oligonucleotide
caucuacaggauaggagcc

SEQ ID NO: 2493674 - RNA, 19 nt, Artificial Sequence
  Description of Artificial Sequence: Synthetic oligonucleotide
aguuccagcuuacacuuga

SEQ ID NO: 2493675 - RNA, 19 nt, Artificial Sequence
  Description of Artificial Sequence: Synthetic oligonucleotide
gugaucaaugacauggaug

SEQ ID NO: 2493676 - RNA, 19 nt, Artificial Sequence
  Description of Artificial Sequence: Synthetic oligonucleotide
uugcugcguuucaugaacg

SEQ ID NO: 2493677 - RNA, 19 nt, Artificial Sequence
  Description of Artificial Sequence: Synthetic oligonucleotide
acaccaacccaguagccug

SEQ ID NO: 2493678 - RNA, 19 nt, Artificial Sequence
  Description of Artificial Sequence: Synthetic oligonucleotide
cuuggccucgcacucaaag

SEQ ID NO: 2493679 - RNA, 19 nt, Artificial Sequence
  Description of Artificial Sequence: Synthetic oligonucleotide
agagcucguauuucuccac

SEQ ID NO: 2493680 - RNA, 19 nt, Artificial Sequence
  Description of Artificial Sequence: Synthetic oligonucleotide
gacugcaccucacaacggc

SEQ ID NO: 2493681 - RNA, 19 nt, Artificial Sequence
  Description of Artificial Sequence: Synthetic oligonucleotide
aaggcaccguacuuggccu

SEQ ID NO: 2493682 - RNA, 19 nt, Artificial Sequence
  Description of Artificial Sequence: Synthetic oligonucleotide
aagggcucgucauaccgga

SEQ ID NO: 2493683 - RNA, 19 nt, Artificial Sequence
  Description of Artificial Sequence: Synthetic oligonucleotide
accuccaucucgccgcgcc

SEQ ID NO: 2493684 - RNA, 19 nt, Artificial Sequence
  Description of Artificial Sequence: Synthetic oligonucleotide
ugugaucaaugacauggau

SEQ ID NO: 2493685 - RNA, 19 nt, Artificial Sequence
  Description of Artificial Sequence: Synthetic oligonucleotide
ucucccacggugacagccg

SEQ ID NO: 2493686 - RNA, 19 nt, Artificial Sequence
  Description of Artificial Sequence: Synthetic oligonucleotide
uuuuccguucacacugcca

SEQ ID NO: 2493687 - RNA, 19 nt, Artificial Sequence
  Description of Artificial Sequence: Synthetic oligonucleotide
gucaucuacaggauaggag

SEQ ID NO: 2493688 - RNA, 19 nt, Artificial Sequence
  Description of Artificial Sequence: Synthetic oligonucleotide
ugcugaugaaaaccgucac

SEQ ID NO: 2493689 - RNA, 19 nt, Artificial Sequence
  Description of Artificial Sequence: Synthetic oligonucleotide
uuguaugggccuaccuugc

SEQ ID NO: 2493690 - RNA, 19 nt, Artificial Sequence
  Description of Artificial Sequence: Synthetic oligonucleotide
caugcacgaagcaggacug

SEQ ID NO: 2493691 - RNA, 19 nt, Artificial Sequence
  Description of Artificial Sequence: Synthetic oligonucleotide
gucauaagcuuccggugag

SEQ ID NO: 2493692 - RNA, 19 nt, Artificial Sequence
  Description of Artificial Sequence: Synthetic oligonucleotide
gcagccgucaucuacagga

SEQ ID NO: 2493693 - RNA, 19 nt, Artificial Sequence
  Description of Artificial Sequence: Synthetic oligonucleotide
auacaugacagugccccgg

SEQ ID NO: 2493694 - RNA, 19 nt, Artificial Sequence
  Description of Artificial Sequence: Synthetic oligonucleotide
uacaugacagugccccggc

SEQ ID NO: 2493695 - RNA, 19 nt, Artificial Sequence
  Description of Artificial Sequence: Synthetic oligonucleotide
caggauaggagcccagcag

SEQ ID NO: 2493696 - RNA, 19 nt, Artificial Sequence
  Description of Artificial Sequence: Synthetic oligonucleotide
ccuacauacaugacagugc

SEQ ID NO: 2493697 - RNA, 19 nt, Artificial Sequence
  Description of Artificial Sequence: Synthetic oligonucleotide
cucacgccgccucacaccg

SEQ ID NO: 2493698 - RNA, 19 nt, Artificial Sequence
  Description of Artificial Sequence: Synthetic oligonucleotide
ucuacaggauaggagccca

SEQ ID NO: 2493699 - RNA, 19 nt, Artificial Sequence
  Description of Artificial Sequence: Synthetic oligonucleotide
auaccggacaccaacccag

SEQ ID NO: 2493700 - RNA, 19 nt, Artificial Sequence
  Description of Artificial Sequence: Synthetic oligonucleotide
cauacaugacagugccccg

SEQ ID NO: 2493701 - RNA, 19 nt, Artificial Sequence
  Description of Artificial Sequence: Synthetic oligonucleotide
uucuucguuguaugggccu

SEQ ID NO: 2493702 - RNA, 19 nt, Artificial Sequence
  Description of Artificial Sequence: Synthetic oligonucleotide
gcguuuuccguucacacug

SEQ ID NO: 2493703 - RNA, 19 nt, Artificial Sequence
  Description of Artificial Sequence: Synthetic oligonucleotide
auagugagauuacggcugu

SEQ ID NO: 2493704 - RNA, 19 nt, Artificial Sequence
  Description of Artificial Sequence: Synthetic oligonucleotide
caucucauccaacccguag

SEQ ID NO: 2493705 - RNA, 19 nt, Artificial Sequence
  Description of Artificial Sequence: Synthetic oligonucleotide
ugaaaucugugaguccuac

SEQ ID NO: 2493706 - RNA, 19 nt, Artificial Sequence
  Description of Artificial Sequence: Synthetic oligonucleotide
gucgucagcaccauacagc

SEQ ID NO: 2493707 - RNA, 19 nt, Artificial Sequence
  Description of Artificial Sequence: Synthetic oligonucleotide
gacagugccccggcgaagg

SEQ ID NO: 2493708 - RNA, 19 nt, Artificial Sequence
  Description of Artificial Sequence: Synthetic oligonucleotide
ggaguucuucguuguaugg

SEQ ID NO: 2493709 - RNA, 19 nt, Artificial Sequence
  Description of Artificial Sequence: Synthetic oligonucleotide
ggcgauagugagauuacgg

SEQ ID NO: 2493710 - RNA, 19 nt, Artificial Sequence
  Description of Artificial Sequence: Synthetic oligonucleotide
uggccucgcacucaaagua

SEQ ID NO: 2493711 - RNA, 19 nt, Artificial Sequence
  Description of Artificial Sequence: Synthetic oligonucleotide
uucuccgagcggaagcugu

SEQ ID NO: 2493712 - RNA, 19 nt, Artificial Sequence
  Description of Artificial Sequence: Synthetic oligonucleotide
acgaccgaacuguauuuug

SEQ ID NO: 2493713 - RNA, 19 nt, Artificial Sequence
  Description of Artificial Sequence: Synthetic oligonucleotide
ugaugaaaaccgucaccgu

SEQ ID NO: 2493714 - RNA, 19 nt, Artificial Sequence
  Description of Artificial Sequence: Synthetic oligonucleotide
gagagcucguauuucucca

SEQ ID NO: 2493715 - RNA, 19 nt, Artificial Sequence
  Description of Artificial Sequence: Synthetic oligonucleotide
uguugagagagcugcugau

SEQ ID NO: 2493716 - RNA, 19 nt, Artificial Sequence
  Description of Artificial Sequence: Synthetic oligonucleotide
gaucaaugacauggaugcg

SEQ ID NO: 2493717 - RNA, 19 nt, Artificial Sequence
  Description of Artificial Sequence: Synthetic oligonucleotide
accgaacuguauuuugccu

SEQ ID NO: 2493718 - RNA, 19 nt, Artificial Sequence
  Description of Artificial Sequence: Synthetic oligonucleotide
gagcucguauuucuccacc

SEQ ID NO: 2493719 - RNA, 19 nt, Artificial Sequence
  Description of Artificial Sequence: Synthetic oligonucleotide
uugucgucagcaccauaca

SEQ ID NO: 2493720 - RNA, 19 nt, Artificial Sequence
  Description of Artificial Sequence: Synthetic oligonucleotide
agcguuuuccguucacacu

SEQ ID NO: 2493721 - RNA, 19 nt, Artificial Sequence
  Description of Artificial Sequence: Synthetic oligonucleotide
ccagcuuacacuugaacuc

SEQ ID NO: 2493722 - RNA, 19 nt, Artificial Sequence
  Description of Artificial Sequence: Synthetic oligonucleotide
uaccuugcugcguuucaug

SEQ ID NO: 2493723 - RNA, 19 nt, Artificial Sequence
  Description of Artificial Sequence: Synthetic oligonucleotide
auggcuugacaaaggcacc

SEQ ID NO: 2493724 - RNA, 19 nt, Artificial Sequence
  Description of Artificial Sequence: Synthetic oligonucleotide
ucgcacucaaaguagcguu

SEQ ID NO: 2493725 - RNA, 19 nt, Artificial Sequence
  Description of Artificial Sequence: Synthetic oligonucleotide
ugcggcagccgucaucuac

SEQ ID NO: 2493726 - RNA, 19 nt, Artificial Sequence
  Description of Artificial Sequence: Synthetic oligonucleotide
ucggcgauagugagauuac

SEQ ID NO: 2493727 - RNA, 19 nt, Artificial Sequence
  Description of Artificial Sequence: Synthetic oligonucleotide
gaaaucugugaguccuaca

SEQ ID NO: 2493728 - RNA, 19 nt, Artificial Sequence
  Description of Artificial Sequence: Synthetic oligonucleotide
aacccguaguccuccucug

SEQ ID NO: 2493729 - RNA, 19 nt, Artificial Sequence
  Description of Artificial Sequence: Synthetic oligonucleotide
cacuugaacucggcgauag

SEQ ID NO: 2493730 - RNA, 19 nt, Artificial Sequence
  Description of Artificial Sequence: Synthetic oligonucleotide
uacaggauaggagcccagc

SEQ ID NO: 2493731 - RNA, 19 nt, Artificial Sequence
  Description of Artificial Sequence: Synthetic oligonucleotide
uccgagcggaagcuguuga

SEQ ID NO: 2493732 - RNA, 19 nt, Artificial Sequence
  Description of Artificial Sequence: Synthetic oligonucleotide
cucacaacggcuacccaca

SEQ ID NO: 2493733 - RNA, 19 nt, Artificial Sequence
  Description of Artificial Sequence: Synthetic oligonucleotide
ugcaccucacaacggcuac

SEQ ID NO: 2493734 - RNA, 19 nt, Artificial Sequence
  Description of Artificial Sequence: Synthetic oligonucleotide
auccaacccguaguccucc

SEQ ID NO: 2493735 - RNA, 19 nt, Artificial Sequence
  Description of Artificial Sequence: Synthetic oligonucleotide
ugacaaaggcaccguacuu

SEQ ID NO: 2493736 - RNA, 19 nt, Artificial Sequence
  Description of Artificial Sequence: Synthetic oligonucleotide
ucacaacggcuacccacag

SEQ ID NO: 2493737 - RNA, 19 nt, Artificial Sequence
  Description of Artificial Sequence: Synthetic oligonucleotide
gaagcuguugagagagcug

SEQ ID NO: 2493738 - RNA, 19 nt, Artificial Sequence
  Description of Artificial Sequence: Synthetic oligonucleotide
ucaccgugggcgccgacga

SEQ ID NO: 2493739 - RNA, 19 nt, Artificial Sequence
  Description of Artificial Sequence: Synthetic oligonucleotide
agugccccggcgaagggac

SEQ ID NO: 2493740 - RNA, 19 nt, Artificial Sequence
  Description of Artificial Sequence: Synthetic oligonucleotide
ugcugcguuucaugaacga

SEQ ID NO: 2493741 - RNA, 19 nt, Artificial Sequence
  Description of Artificial Sequence: Synthetic oligonucleotide
ugaguccuacauacaugac

SEQ ID NO: 2493742 - RNA, 19 nt, Artificial Sequence
  Description of Artificial Sequence: Synthetic oligonucleotide
ucguuguaugggccuaccu

SEQ ID NO: 2493743 - RNA, 19 nt, Artificial Sequence
  Description of Artificial Sequence: Synthetic oligonucleotide
ggucauaagcuuccgguga

SEQ ID NO: 2493744 - RNA, 19 nt, Artificial Sequence
  Description of Artificial Sequence: Synthetic oligonucleotide
aaguagcguuuuccguuca

SEQ ID NO: 2493745 - RNA, 19 nt, Artificial Sequence
  Description of Artificial Sequence: Synthetic oligonucleotide
gaacuguauuuugccuccg

SEQ ID NO: 2493746 - RNA, 19 nt, Artificial Sequence
  Description of Artificial Sequence: Synthetic oligonucleotide
gucauaccggacaccaacc

SEQ ID NO: 2493747 - RNA, 19 nt, Artificial Sequence
  Description of Artificial Sequence: Synthetic oligonucleotide
ugagagagcugcugaugaa

SEQ ID NO: 2493748 - RNA, 19 nt, Artificial Sequence
  Description of Artificial Sequence: Synthetic oligonucleotide
uccggugagagcucguauu

SEQ ID NO: 2493749 - RNA, 19 nt, Artificial Sequence
  Description of Artificial Sequence: Synthetic oligonucleotide
gcggaagcuguugagagag

SEQ ID NO: 2493750 - RNA, 19 nt, Artificial Sequence
  Description of Artificial Sequence: Synthetic oligonucleotide
acaugacagugccccggcg

SEQ ID NO: 2493751 - RNA, 19 nt, Artificial Sequence
  Description of Artificial Sequence: Synthetic oligonucleotide
uuuugccuccggucauaag

SEQ ID NO: 2493752 - RNA, 19 nt, Artificial Sequence
  Description of Artificial Sequence: Synthetic oligonucleotide
uaccgcuucuccgagcgga

SEQ ID NO: 2493753 - RNA, 19 nt, Artificial Sequence
  Description of Artificial Sequence: Synthetic oligonucleotide
ugacauggaugcggcagcc

SEQ ID NO: 2493754 - RNA, 19 nt, Artificial Sequence
  Description of Artificial Sequence: Synthetic oligonucleotide
ggugacugcaccucacaac

SEQ ID NO: 2493755 - RNA, 19 nt, Artificial Sequence
  Description of Artificial Sequence: Synthetic oligonucleotide
cacggugacagccgauggc

SEQ ID NO: 2493756 - RNA, 19 nt, Artificial Sequence
  Description of Artificial Sequence: Synthetic oligonucleotide
gaugcggcagccgucaucu

SEQ ID NO: 2493757 - RNA, 19 nt, Artificial Sequence
  Description of Artificial Sequence: Synthetic oligonucleotide
caccaacccaguagccugg

SEQ ID NO: 2493758 - RNA, 19 nt, Artificial Sequence
  Description of Artificial Sequence: Synthetic oligonucleotide
uuggacacgucuucauauu

SEQ ID NO: 2493759 - RNA, 19 nt, Artificial Sequence
  Description of Artificial Sequence: Synthetic oligonucleotide
agauuacggcuguaccgcu

SEQ ID NO: 2493760 - RNA, 19 nt, Artificial Sequence
  Description of Artificial Sequence: Synthetic oligonucleotide
gccgucaucuacaggauag

SEQ ID NO: 2493761 - RNA, 19 nt, Artificial Sequence
  Description of Artificial Sequence: Synthetic oligonucleotide
guucuucguuguaugggcc

SEQ ID NO: 2493762 - RNA, 19 nt, Artificial Sequence
  Description of Artificial Sequence: Synthetic oligonucleotide
gaccccgacaccuccaucu

SEQ ID NO: 2493763 - RNA, 19 nt, Artificial Sequence
  Description of Artificial Sequence: Synthetic oligonucleotide
agcgcauccucuugaucca

SEQ ID NO: 2493764 - RNA, 19 nt, Artificial Sequence
  Description of Artificial Sequence: Synthetic oligonucleotide
gagagagcugcugaugaaa

SEQ ID NO: 2493765 - RNA, 19 nt, Artificial Sequence
  Description of Artificial Sequence: Synthetic oligonucleotide
augacagugccccggcgaa

SEQ ID NO: 2493766 - RNA, 19 nt, Artificial Sequence
  Description of Artificial Sequence: Synthetic oligonucleotide
cuguugagagagcugcuga

SEQ ID NO: 2493767 - RNA, 19 nt, Artificial Sequence
  Description of Artificial Sequence: Synthetic oligonucleotide
aacgaccgaacuguauuuu

SEQ ID NO: 2493768 - RNA, 19 nt, Artificial Sequence
  Description of Artificial Sequence: Synthetic oligonucleotide
cucauccaacccguagucc

SEQ ID NO: 2493769 - RNA, 19 nt, Artificial Sequence
  Description of Artificial Sequence: Synthetic oligonucleotide
caaaguagcguuuuccguu

SEQ ID NO: 2493770 - RNA, 19 nt, Artificial Sequence
  Description of Artificial Sequence: Synthetic oligonucleotide
augcacgaagcaggacugc

SEQ ID NO: 2493771 - RNA, 19 nt, Artificial Sequence
  Description of Artificial Sequence: Synthetic oligonucleotide
gaaaaccgucaccgugggc

SEQ ID NO: 2493772 - RNA, 19 nt, Artificial Sequence
  Description of Artificial Sequence: Synthetic oligonucleotide
caugacagugccccggcga

SEQ ID NO: 2493773 - RNA, 19 nt, Artificial Sequence
  Description of Artificial Sequence: Synthetic oligonucleotide
cauaccggacaccaaccca

SEQ ID NO: 2493774 - RNA, 19 nt, Artificial Sequence
  Description of Artificial Sequence: Synthetic oligonucleotide
uacccacagagauggcacu

SEQ ID NO: 2493775 - RNA, 19 nt, Artificial Sequence
  Description of Artificial Sequence: Synthetic oligonucleotide
cauauucuccaagccggac

SEQ ID NO: 2493776 - RNA, 19 nt, Artificial Sequence
  Description of Artificial Sequence: Synthetic oligonucleotide
agcggaagcuguugagaga

SEQ ID NO: 2493777 - RNA, 19 nt, Artificial Sequence
  Description of Artificial Sequence: Synthetic oligonucleotide
augggccuaccuugcugcg

SEQ ID NO: 2493778 - RNA, 19 nt, Artificial Sequence
  Description of Artificial Sequence: Synthetic oligonucleotide
ucauaagcuuccggugaga

SEQ ID NO: 2493779 - RNA, 19 nt, Artificial Sequence
  Description of Artificial Sequence: Synthetic oligonucleotide
aggugacugcaccucacaa

SEQ ID NO: 2493780 - RNA, 19 nt, Artificial Sequence
  Description of Artificial Sequence: Synthetic oligonucleotide
ccgaacuguauuuugccuc

SEQ ID NO: 2493781 - RNA, 19 nt, Artificial Sequence
  Description of Artificial Sequence: Synthetic oligonucleotide
cuuggacacgucuucauau

SEQ ID NO: 2493782 - RNA, 19 nt, Artificial Sequence
  Description of Artificial Sequence: Synthetic oligonucleotide
cgaacuguauuuugccucc

SEQ ID NO: 2493783 - RNA, 19 nt, Artificial Sequence
  Description of Artificial Sequence: Synthetic oligonucleotide
ccucacaacggcuacccac

SEQ ID NO: 2493784 - RNA, 19 nt, Artificial Sequence
  Description of Artificial Sequence: Synthetic oligonucleotide
uucguuguaugggccuacc

SEQ ID NO: 2493785 - RNA, 19 nt, Artificial Sequence
  Description of Artificial Sequence: Synthetic oligonucleotide
ggugacagccgauggcuug

SEQ ID NO: 2493786 - RNA, 19 nt, Artificial Sequence
  Description of Artificial Sequence: Synthetic oligonucleotide
agcuuacacuugaacucgg

SEQ ID NO: 2493787 - RNA, 19 nt, Artificial Sequence
  Description of Artificial Sequence: Synthetic oligonucleotide
acaccuccaucucgccgcg

SEQ ID NO: 2493788 - RNA, 19 nt, Artificial Sequence
  Description of Artificial Sequence: Synthetic oligonucleotide
cucggcgauagugagauua

SEQ ID NO: 2493789 - RNA, 19 nt, Artificial Sequence
  Description of Artificial Sequence: Synthetic oligonucleotide
cacgccgccucacaccggc

SEQ ID NO: 2493790 - RNA, 19 nt, Artificial Sequence
  Description of Artificial Sequence: Synthetic oligonucleotide
accaccaguuccagcuuac

SEQ ID NO: 2493791 - RNA, 19 nt, Artificial Sequence
  Description of Artificial Sequence: Synthetic oligonucleotide
gucaccgugggcgccgacg

SEQ ID NO: 2493792 - RNA, 19 nt, Artificial Sequence
  Description of Artificial Sequence: Synthetic oligonucleotide
cauccaacccguaguccuc

SEQ ID NO: 2493793 - RNA, 19 nt, Artificial Sequence
  Description of Artificial Sequence: Synthetic oligonucleotide
ggaaaucucccacggugac

SEQ ID NO: 2493794 - RNA, 19 nt, Artificial Sequence
  Description of Artificial Sequence: Synthetic oligonucleotide
caagccggacgccacugug

SEQ ID NO: 2493795 - RNA, 19 nt, Artificial Sequence
  Description of Artificial Sequence: Synthetic oligonucleotide
uuccggugagagcucguau

SEQ ID NO: 2493796 - RNA, 19 nt, Artificial Sequence
  Description of Artificial Sequence: Synthetic oligonucleotide
accccgacaccuccaucuc

SEQ ID NO: 2493797 - RNA, 19 nt, Artificial Sequence
  Description of Artificial Sequence: Synthetic oligonucleotide
cucagccuucugcugcgcc

SEQ ID NO: 2493798 - RNA, 19 nt, Artificial Sequence
  Description of Artificial Sequence: Synthetic oligonucleotide
guagcguuuuccguucaca

SEQ ID NO: 2493799 - RNA, 19 nt, Artificial Sequence
  Description of Artificial Sequence: Synthetic oligonucleotide
agcuuccggugagagcucg

SEQ ID NO: 2493800 - RNA, 19 nt, Artificial Sequence
  Description of Artificial Sequence: Synthetic oligonucleotide
guagccuggcuugaaaucu

SEQ ID NO: 2493801 - RNA, 19 nt, Artificial Sequence
  Description of Artificial Sequence: Synthetic oligonucleotide
aggcaccguacuuggccuc

SEQ ID NO: 2493802 - RNA, 19 nt, Artificial Sequence
  Description of Artificial Sequence: Synthetic oligonucleotide
ucuucguuguaugggccua

SEQ ID NO: 2493803 - RNA, 19 nt, Artificial Sequence
  Description of Artificial Sequence: Synthetic oligonucleotide
accuuggacacgucuucau

SEQ ID NO: 2493804 - RNA, 19 nt, Artificial Sequence
  Description of Artificial Sequence: Synthetic oligonucleotide
uaccggacaccaacccagu

SEQ ID NO: 2493805 - RNA, 19 nt, Artificial Sequence
  Description of Artificial Sequence: Synthetic oligonucleotide
uauuuugccuccggucaua

SEQ ID NO: 2493806 - RNA, 19 nt, Artificial Sequence
  Description of Artificial Sequence: Synthetic oligonucleotide
acuugaacucggcgauagu

SEQ ID NO: 2493807 - RNA, 19 nt, Artificial Sequence
  Description of Artificial Sequence: Synthetic oligonucleotide
uccaagccggacgccacug

SEQ ID NO: 2493808 - RNA, 19 nt, Artificial Sequence
  Description of Artificial Sequence: Synthetic oligonucleotide
aagccggacgccacuguga

SEQ ID NO: 2493809 - RNA, 19 nt, Artificial Sequence
  Description of Artificial Sequence: Synthetic oligonucleotide
ucccuaagggcucgucaua

SEQ ID NO: 2493810 - RNA, 19 nt, Artificial Sequence
  Description of Artificial Sequence: Synthetic oligonucleotide
ccggacaccaacccaguag

SEQ ID NO: 2493811 - RNA, 19 nt, Artificial Sequence
  Description of Artificial Sequence: Synthetic oligonucleotide
ccuccggucauaagcuucc

SEQ ID NO: 2493812 - RNA, 19 nt, Artificial Sequence
  Description of Artificial Sequence: Synthetic oligonucleotide
uuacggcuguaccgcuucu

SEQ ID NO: 2493813 - RNA, 19 nt, Artificial Sequence
  Description of Artificial Sequence: Synthetic oligonucleotide
cacugugaucaaugacaug

SEQ ID NO: 2493814 - RNA, 19 nt, Artificial Sequence
  Description of Artificial Sequence: Synthetic oligonucleotide
gguguagaacuugucguca

SEQ ID NO: 2493815 - RNA, 19 nt, Artificial Sequence
  Description of Artificial Sequence: Synthetic oligonucleotide
ccgauggcuugacaaaggc

SEQ ID NO: 2493816 - RNA, 19 nt, Artificial Sequence
  Description of Artificial Sequence: Synthetic oligonucleotide
gacaccaacccaguagccu

SEQ ID NO: 2493817 - RNA, 19 nt, Artificial Sequence
  Description of Artificial Sequence: Synthetic oligonucleotide
acugaggcgcugggcggcc

SEQ ID NO: 2493818 - RNA, 19 nt, Artificial Sequence
  Description of Artificial Sequence: Synthetic oligonucleotide
agccggacgccacugugau

SEQ ID NO: 2493819 - RNA, 19 nt, Artificial Sequence
  Description of Artificial Sequence: Synthetic oligonucleotide
ccucgcacucaaaguagcg

SEQ ID NO: 2493820 - RNA, 19 nt, Artificial Sequence
  Description of Artificial Sequence: Synthetic oligonucleotide
uuuucccuaagggcucguc

SEQ ID NO: 2493821 - RNA, 19 nt, Artificial Sequence
  Description of Artificial Sequence: Synthetic oligonucleotide
acugcaccucacaacggcu

SEQ ID NO: 2493822 - RNA, 19 nt, Artificial Sequence
  Description of Artificial Sequence: Synthetic oligonucleotide
cgucauaccggacaccaac

SEQ ID NO: 2493823 - RNA, 19 nt, Artificial Sequence
  Description of Artificial Sequence: Synthetic oligonucleotide
ucgucauaccggacaccaa

SEQ ID NO: 2493824 - RNA, 19 nt, Artificial Sequence
  Description of Artificial Sequence: Synthetic oligonucleotide
cugcgcccggaguucuucg

SEQ ID NO: 2493825 - RNA, 19 nt, Artificial Sequence
  Description of Artificial Sequence: Synthetic oligonucleotide
cccgacaccuccaucucgc

SEQ ID NO: 2493826 - RNA, 19 nt, Artificial Sequence
  Description of Artificial Sequence: Synthetic oligonucleotide
gaacgaccgaacuguauuu

SEQ ID NO: 2493827 - RNA, 19 nt, Artificial Sequence
  Description of Artificial Sequence: Synthetic oligonucleotide
ucugcugcgcccggaguuc

SEQ ID NO: 2493828 - RNA, 19 nt, Artificial Sequence
  Description of Artificial Sequence: Synthetic oligonucleotide
ggcuguaccgcuucuccga

SEQ ID NO: 2493829 - RNA, 19 nt, Artificial Sequence
  Description of Artificial Sequence: Synthetic oligonucleotide
cuguaccgcuucuccgagc

SEQ ID NO: 2493830 - RNA, 19 nt, Artificial Sequence
  Description of Artificial Sequence: Synthetic oligonucleotide
cgaccgaacuguauuuugc

SEQ ID NO: 2493831 - RNA, 19 nt, Artificial Sequence
  Description of Artificial Sequence: Synthetic oligonucleotide
agcagcgcauccucuugau

SEQ ID NO: 2493832 - RNA, 19 nt, Artificial Sequence
  Description of Artificial Sequence: Synthetic oligonucleotide
acggcuacccacagagaug

SEQ ID NO: 2493833 - RNA, 19 nt, Artificial Sequence
  Description of Artificial Sequence: Synthetic oligonucleotide
ugacagugccccggcgaag

SEQ ID NO: 2493834 - RNA, 19 nt, Artificial Sequence
  Description of Artificial Sequence: Synthetic oligonucleotide
ucuccgagcggaagcuguu

SEQ ID NO: 2493835 - RNA, 19 nt, Artificial Sequence
  Description of Artificial Sequence: Synthetic oligonucleotide
cuccaugcacgaagcagga

SEQ ID NO: 2493836 - RNA, 19 nt, Artificial Sequence
  Description of Artificial Sequence: Synthetic oligonucleotide
aagcuuccggugagagcuc

SEQ ID NO: 2493837 - RNA, 19 nt, Artificial Sequence
  Description of Artificial Sequence: Synthetic oligonucleotide
ggcucgucauaccggacac

SEQ ID NO: 2493838 - RNA, 19 nt, Artificial Sequence
  Description of Artificial Sequence: Synthetic oligonucleotide
auuuugccuccggucauaa

SEQ ID NO: 2493839 - RNA, 19 nt, Artificial Sequence
  Description of Artificial Sequence: Synthetic oligonucleotide
gcaccauacagcuccagcu

SEQ ID NO: 2493840 - RNA, 19 nt, Artificial Sequence
  Description of Artificial Sequence: Synthetic oligonucleotide
cuucguuguaugggccuac

SEQ ID NO: 2493841 - RNA, 19 nt, Artificial Sequence
  Description of Artificial Sequence: Synthetic oligonucleotide
gcgccgacgaccccgacac

SEQ ID NO: 2493842 - RNA, 19 nt, Artificial Sequence
  Description of Artificial Sequence: Synthetic oligonucleotide
ucacgccgccucacaccgg

SEQ ID NO: 2493843 - RNA, 19 nt, Artificial Sequence
  Description of Artificial Sequence: Synthetic oligonucleotide
gaacucggcgauagugaga

SEQ ID NO: 2493844 - RNA, 19 nt, Artificial Sequence
  Description of Artificial Sequence: Synthetic oligonucleotide
cggcuacccacagagaugg

SEQ ID NO: 2493845 - RNA, 19 nt, Artificial Sequence
  Description of Artificial Sequence: Synthetic oligonucleotide
guaccgcuucuccgagcgg

SEQ ID NO: 2493846 - RNA, 19 nt, Artificial Sequence
  Description of Artificial Sequence: Synthetic oligonucleotide
gugagagcucguauuucuc

SEQ ID NO: 2493847 - RNA, 19 nt, Artificial Sequence
  Description of Artificial Sequence: Synthetic oligonucleotide
ugcgcccggaguucuucgu

SEQ ID NO: 2493848 - RNA, 19 nt, Artificial Sequence
  Description of Artificial Sequence: Synthetic oligonucleotide
augaacgaccgaacuguau

SEQ ID NO: 2493849 - RNA, 19 nt, Artificial Sequence
  Description of Artificial Sequence: Synthetic oligonucleotide
gggaaaucucccacgguga

SEQ ID NO: 2493850 - RNA, 19 nt, Artificial Sequence
  Description of Artificial Sequence: Synthetic oligonucleotide
ccuaagggcucgucauacc

SEQ ID NO: 2493851 - RNA, 19 nt, Artificial Sequence
  Description of Artificial Sequence: Synthetic oligonucleotide
ugccccggcgaagggacug

SEQ ID NO: 2493852 - RNA, 19 nt, Artificial Sequence
  Description of Artificial Sequence: Synthetic oligonucleotide
ggccucgcacucaaaguag

SEQ ID NO: 2493853 - RNA, 19 nt, Artificial Sequence
  Description of Artificial Sequence: Synthetic oligonucleotide
ccggacgccacugugauca

SEQ ID NO: 2493854 - RNA, 19 nt, Artificial Sequence
  Description of Artificial Sequence: Synthetic oligonucleotide
caaugacauggaugcggca

SEQ ID NO: 2493855 - RNA, 19 nt, Artificial Sequence
  Description of Artificial Sequence: Synthetic oligonucleotide
gccgauggcuugacaaagg

SEQ ID NO: 2493856 - RNA, 19 nt, Artificial Sequence
  Description of Artificial Sequence: Synthetic oligonucleotide
agccgucaucuacaggaua

SEQ ID NO: 2493857 - RNA, 19 nt, Artificial Sequence
  Description of Artificial Sequence: Synthetic oligonucleotide
gcugcguuucaugaacgac

SEQ ID NO: 2493858 - RNA, 19 nt, Artificial Sequence
  Description of Artificial Sequence: Synthetic oligonucleotide
gggcucgucauaccggaca

SEQ ID NO: 2493859 - RNA, 19 nt, Artificial Sequence
  Description of Artificial Sequence: Synthetic oligonucleotide
uccaacccguaguccuccu

SEQ ID NO: 2493860 - RNA, 19 nt, Artificial Sequence
  Description of Artificial Sequence: Synthetic oligonucleotide
ccucugggaaaucucccac

SEQ ID NO: 2493861 - RNA, 19 nt, Artificial Sequence
  Description of Artificial Sequence: Synthetic oligonucleotide
ggcgaagggacuggccagg

SEQ ID NO: 2493862 - RNA, 19 nt, Artificial Sequence
  Description of Artificial Sequence: Synthetic oligonucleotide
gcucacgccgccucacacc

SEQ ID NO: 2493863 - RNA, 19 nt, Artificial Sequence
  Description of Artificial Sequence: Synthetic oligonucleotide
caacccguaguccuccucu

SEQ ID NO: 2493864 - RNA, 19 nt, Artificial Sequence
  Description of Artificial Sequence: Synthetic oligonucleotide
uacggcuguaccgcuucuc

SEQ ID NO: 2493865 - RNA, 19 nt, Artificial Sequence
  Description of Artificial Sequence: Synthetic oligonucleotide
gacagccgauggcuugaca

SEQ ID NO: 2493866 - RNA, 19 nt, Artificial Sequence
  Description of Artificial Sequence: Synthetic oligonucleotide
caugaacgaccgaacugua

SEQ ID NO: 2493867 - RNA, 19 nt, Artificial Sequence
  Description of Artificial Sequence: Synthetic oligonucleotide
ggcaccguacuuggccucg

SEQ ID NO: 2493868 - RNA, 19 nt, Artificial Sequence
  Description of Artificial Sequence: Synthetic oligonucleotide
ugggccuaccuugcugcgu

SEQ ID NO: 2493869 - RNA, 19 nt, Artificial Sequence
  Description of Artificial Sequence: Synthetic oligonucleotide
cagccgauggcuugacaaa

SEQ ID NO: 2493870 - RNA, 19 nt, Artificial Sequence
  Description of Artificial Sequence: Synthetic oligonucleotide
cuucuccgagcggaagcug

SEQ ID NO: 2493871 - RNA, 19 nt, Artificial Sequence
  Description of Artificial Sequence: Synthetic oligonucleotide
aucucgccgcgcccugcag

SEQ ID NO: 2493872 - RNA, 19 nt, Artificial Sequence
  Description of Artificial Sequence: Synthetic oligonucleotide
ugggcgccgacgaccccga

SEQ ID NO: 2493873 - RNA, 19 nt, Artificial Sequence
  Description of Artificial Sequence: Synthetic oligonucleotide
ccacggugacagccgaugg

SEQ ID NO: 2493874 - RNA, 19 nt, Artificial Sequence
  Description of Artificial Sequence: Synthetic oligonucleotide
cugcaccucacaacggcua

SEQ ID NO: 2493875 - RNA, 19 nt, Artificial Sequence
  Description of Artificial Sequence: Synthetic oligonucleotide
cggaguucuucguuguaug

SEQ ID NO: 2493876 - RNA, 19 nt, Artificial Sequence
  Description of Artificial Sequence: Synthetic oligonucleotide
gacugcccaccaccaguuc

SEQ ID NO: 2493877 - RNA, 19 nt, Artificial Sequence
  Description of Artificial Sequence: Synthetic oligonucleotide
agggcucgucauaccggac

SEQ ID NO: 2493878 - RNA, 19 nt, Artificial Sequence
  Description of Artificial Sequence: Synthetic oligonucleotide
caguagccuggcuugaaau

SEQ ID NO: 2493879 - RNA, 19 nt, Artificial Sequence
  Description of Artificial Sequence: Synthetic oligonucleotide
ggcagccgucaucuacagg

SEQ ID NO: 2493880 - RNA, 19 nt, Artificial Sequence
  Description of Artificial Sequence: Synthetic oligonucleotide
cuccgagcggaagcuguug

SEQ ID NO: 2493881 - RNA, 19 nt, Artificial Sequence
  Description of Artificial Sequence: Synthetic oligonucleotide
ugccuccggucauaagcuu

SEQ ID NO: 2493882 - RNA, 19 nt, Artificial Sequence
  Description of Artificial Sequence: Synthetic oligonucleotide
ugacagccgauggcuugac

SEQ ID NO: 2493883 - RNA, 19 nt, Artificial Sequence
  Description of Artificial Sequence: Synthetic oligonucleotide
agcuguugagagagcugcu

SEQ ID NO: 2493884 - RNA, 19 nt, Artificial Sequence
  Description of Artificial Sequence: Synthetic oligonucleotide
cguuucaugaacgaccgaa

SEQ ID NO: 2493885 - RNA, 19 nt, Artificial Sequence
  Description of Artificial Sequence: Synthetic oligonucleotide
cccuaagggcucgucauac

SEQ ID NO: 2493886 - RNA, 19 nt, Artificial Sequence
  Description of Artificial Sequence: Synthetic oligonucleotide
cacaacggcuacccacaga

SEQ ID NO: 2493887 - RNA, 19 nt, Artificial Sequence
  Description of Artificial Sequence: Synthetic oligonucleotide
accggacaccaacccagua

SEQ ID NO: 2493888 - RNA, 19 nt, Artificial Sequence
  Description of Artificial Sequence: Synthetic oligonucleotide
gcgcugggcggccucagcc

SEQ ID NO: 2493889 - RNA, 19 nt, Artificial Sequence
  Description of Artificial Sequence: Synthetic oligonucleotide
cucgcacucaaaguagcgu

SEQ ID NO: 2493890 - RNA, 19 nt, Artificial Sequence
  Description of Artificial Sequence: Synthetic oligonucleotide
cguuuuccguucacacugc

SEQ ID NO: 2493891 - RNA, 19 nt, Artificial Sequence
  Description of Artificial Sequence: Synthetic oligonucleotide
ccgucaucuacaggauagg

SEQ ID NO: 2493892 - RNA, 19 nt, Artificial Sequence
  Description of Artificial Sequence: Synthetic oligonucleotide
gccucgcacucaaaguagc

SEQ ID NO: 2493893 - RNA, 19 nt, Artificial Sequence
  Description of Artificial Sequence: Synthetic oligonucleotide
ucccacggugacagccgau

SEQ ID NO: 2493894 - RNA, 19 nt, Artificial Sequence
  Description of Artificial Sequence: Synthetic oligonucleotide
ugggcggccucagccuucu

SEQ ID NO: 2493895 - RNA, 19 nt, Artificial Sequence
  Description of Artificial Sequence: Synthetic oligonucleotide
ccggucauaagcuuccggu

SEQ ID NO: 2493896 - RNA, 19 nt, Artificial Sequence
  Description of Artificial Sequence: Synthetic oligonucleotide
caacggcuacccacagaga

SEQ ID NO: 2493897 - RNA, 19 nt, Artificial Sequence
  Description of Artificial Sequence: Synthetic oligonucleotide
gacgaccccgacaccucca

SEQ ID NO: 2493898 - RNA, 19 nt, Artificial Sequence
  Description of Artificial Sequence: Synthetic oligonucleotide
gccgccucacaccggcucc

SEQ ID NO: 2493899 - RNA, 19 nt, Artificial Sequence
  Description of Artificial Sequence: Synthetic oligonucleotide
ggaugcggcagccgucauc

SEQ ID NO: 2493900 - RNA, 19 nt, Artificial Sequence
  Description of Artificial Sequence: Synthetic oligonucleotide
uggaugcggcagccgucau

SEQ ID NO: 2493901 - RNA, 19 nt, Artificial Sequence
  Description of Artificial Sequence: Synthetic oligonucleotide
uagugagauuacggcugua

SEQ ID NO: 2493902 - RNA, 19 nt, Artificial Sequence
  Description of Artificial Sequence: Synthetic oligonucleotide
cccgcgguccggcucacgc

SEQ ID NO: 2493903 - RNA, 19 nt, Artificial Sequence
  Description of Artificial Sequence: Synthetic oligonucleotide
caucucgccgcgcccugca

SEQ ID NO: 2493904 - RNA, 19 nt, Artificial Sequence
  Description of Artificial Sequence: Synthetic oligonucleotide
ccccgacaccuccaucucg

SEQ ID NO: 2493905 - RNA, 19 nt, Artificial Sequence
  Description of Artificial Sequence: Synthetic oligonucleotide
ccggcgaagggacuggcca

SEQ ID NO: 2493906 - RNA, 19 nt, Artificial Sequence
  Description of Artificial Sequence: Synthetic oligonucleotide
cgcgguccggcucacgccg

SEQ ID NO: 2493907 - RNA, 19 nt, Artificial Sequence
  Description of Artificial Sequence: Synthetic oligonucleotide
caccaccaguuccagcuua

SEQ ID NO: 2493908 - RNA, 19 nt, Artificial Sequence
  Description of Artificial Sequence: Synthetic oligonucleotide
cugggcggccucagccuuc

SEQ ID NO: 2493909 - RNA, 19 nt, Artificial Sequence
  Description of Artificial Sequence: Synthetic oligonucleotide
cccacggugacagccgaug

SEQ ID NO: 2493910 - RNA, 19 nt, Artificial Sequence
  Description of Artificial Sequence: Synthetic oligonucleotide
cucccacggugacagccga

SEQ ID NO: 2493911 - RNA, 19 nt, Artificial Sequence
  Description of Artificial Sequence: Synthetic oligonucleotide
guccuacauacaugacagu

SEQ ID NO: 2493912 - RNA, 19 nt, Artificial Sequence
  Description of Artificial Sequence: Synthetic oligonucleotide
guccggcucacgccgccuc

SEQ ID NO: 2493913 - RNA, 19 nt, Artificial Sequence
  Description of Artificial Sequence: Synthetic oligonucleotide
ccgugggcgccgacgaccc

SEQ ID NO: 2493914 - RNA, 19 nt, Artificial Sequence
  Description of Artificial Sequence: Synthetic oligonucleotide
gauuacggcuguaccgcuu

SEQ ID NO: 2493915 - RNA, 19 nt, Artificial Sequence
  Description of Artificial Sequence: Synthetic oligonucleotide
gcagcgcauccucuugauc

SEQ ID NO: 2493916 - RNA, 19 nt, Artificial Sequence
  Description of Artificial Sequence: Synthetic oligonucleotide
cuuccggugagagcucgua

SEQ ID NO: 2493917 - RNA, 19 nt, Artificial Sequence
  Description of Artificial Sequence: Synthetic oligonucleotide
cgauggcuugacaaaggca

SEQ ID NO: 2493918 - RNA, 19 nt, Artificial Sequence
  Description of Artificial Sequence: Synthetic oligonucleotide
gcggcagccgucaucuaca

SEQ ID NO: 2493919 - RNA, 19 nt, Artificial Sequence
  Description of Artificial Sequence: Synthetic oligonucleotide
gccuccggucauaagcuuc

SEQ ID NO: 2493920 - RNA, 19 nt, Artificial Sequence
  Description of Artificial Sequence: Synthetic oligonucleotide
cagcuccaugcacgaagca

SEQ ID NO: 2493921 - RNA, 19 nt, Artificial Sequence
  Description of Artificial Sequence: Synthetic oligonucleotide
ggcgccgacgaccccgaca

SEQ ID NO: 2493922 - RNA, 19 nt, Artificial Sequence
  Description of Artificial Sequence: Synthetic oligonucleotide
cugggaaaucucccacggu

SEQ ID NO: 2493923 - RNA, 19 nt, Artificial Sequence
  Description of Artificial Sequence: Synthetic oligonucleotide
cugcagcggcccgcggucc

SEQ ID NO: 2493924 - RNA, 19 nt, Artificial Sequence
  Description of Artificial Sequence: Synthetic oligonucleotide
caccguacuuggccucgca

SEQ ID NO: 2493925 - RNA, 19 nt, Artificial Sequence
  Description of Artificial Sequence: Synthetic oligonucleotide
ccgacaccuccaucucgcc

SEQ ID NO: 2493926 - RNA, 19 nt, Artificial Sequence
  Description of Artificial Sequence: Synthetic oligonucleotide
ccuugcugcguuucaugaa

SEQ ID NO: 2493927 - RNA, 19 nt, Artificial Sequence
  Description of Artificial Sequence: Synthetic oligonucleotide
gcucgucauaccggacacc

SEQ ID NO: 2493928 - RNA, 19 nt, Artificial Sequence
  Description of Artificial Sequence: Synthetic oligonucleotide
ucgccgcgcccugcagcgg

SEQ ID NO: 2493929 - RNA, 19 nt, Artificial Sequence
  Description of Artificial Sequence: Synthetic oligonucleotide
cggcgauagugagauuacg

SEQ ID NO: 2493930 - RNA, 19 nt, Artificial Sequence
  Description of Artificial Sequence: Synthetic oligonucleotide
cccggcgaagggacuggcc

SEQ ID NO: 2493931 - RNA, 19 nt, Artificial Sequence
  Description of Artificial Sequence: Synthetic oligonucleotide
caccgugggcgccgacgac

SEQ ID NO: 2493932 - RNA, 19 nt, Artificial Sequence
  Description of Artificial Sequence: Synthetic oligonucleotide
ccuuggacacgucuucaua

SEQ ID NO: 2493933 - RNA, 19 nt, Artificial Sequence
  Description of Artificial Sequence: Synthetic oligonucleotide
accgcuucuccgagcggaa

SEQ ID NO: 2493934 - RNA, 19 nt, Artificial Sequence
  Description of Artificial Sequence: Synthetic oligonucleotide
cagugccccggcgaaggga

SEQ ID NO: 2493935 - RNA, 19 nt, Artificial Sequence
  Description of Artificial Sequence: Synthetic oligonucleotide
gcgcauccucuugauccag

SEQ ID NO: 2493936 - RNA, 19 nt, Artificial Sequence
  Description of Artificial Sequence: Synthetic oligonucleotide
cuaccuugcugcguuucau

SEQ ID NO: 2493937 - RNA, 19 nt, Artificial Sequence
  Description of Artificial Sequence: Synthetic oligonucleotide
ccaacccguaguccuccuc

SEQ ID NO: 2493938 - RNA, 19 nt, Artificial Sequence
  Description of Artificial Sequence: Synthetic oligonucleotide
cgucaucuacaggauagga

SEQ ID NO: 2493939 - RNA, 19 nt, Artificial Sequence
  Description of Artificial Sequence: Synthetic oligonucleotide
cgacgaccccgacaccucc

SEQ ID NO: 2493940 - RNA, 19 nt, Artificial Sequence
  Description of Artificial Sequence: Synthetic oligonucleotide
ccgacgaccccgacaccuc

SEQ ID NO: 2493941 - RNA, 19 nt, Artificial Sequence
  Description of Artificial Sequence: Synthetic oligonucleotide
ccgcgguccggcucacgcc

SEQ ID NO: 2493942 - RNA, 19 nt, Artificial Sequence
  Description of Artificial Sequence: Synthetic oligonucleotide
gccgacgaccccgacaccu

SEQ ID NO: 2493943 - RNA, 19 nt, Artificial Sequence
  Description of Artificial Sequence: Synthetic oligonucleotide
ggcgcugggcggccucagc

SEQ ID NO: 2493944 - RNA, 19 nt, Artificial Sequence
  Description of Artificial Sequence: Synthetic oligonucleotide
aggcgcugggcggccucag

SEQ ID NO: 2493945 - RNA, 19 nt, Artificial Sequence
  Description of Artificial Sequence: Synthetic oligonucleotide
acucggcgauagugagauu

SEQ ID NO: 2493946 - RNA, 19 nt, Artificial Sequence
  Description of Artificial Sequence: Synthetic oligonucleotide
cgagcggaagcuguugaga

SEQ ID NO: 2493947 - RNA, 19 nt, Artificial Sequence
  Description of Artificial Sequence: Synthetic oligonucleotide
gcguuucaugaacgaccga

SEQ ID NO: 2493948 - RNA, 19 nt, Artificial Sequence
  Description of Artificial Sequence: Synthetic oligonucleotide
cguuguaugggccuaccuu

SEQ ID NO: 2493949 - RNA, 19 nt, Artificial Sequence
  Description of Artificial Sequence: Synthetic oligonucleotide
cuccaucucgccgcgcccu

SEQ ID NO: 2493950 - RNA, 19 nt, Artificial Sequence
  Description of Artificial Sequence: Synthetic oligonucleotide
caccuccaucucgccgcgc

SEQ ID NO: 2493951 - RNA, 19 nt, Artificial Sequence
  Description of Artificial Sequence: Synthetic oligonucleotide
gccccggcgaagggacugg

SEQ ID NO: 2493952 - RNA, 19 nt, Artificial Sequence
  Description of Artificial Sequence: Synthetic oligonucleotide
gcagcggcccgcgguccgg

SEQ ID NO: 2493953 - RNA, 19 nt, Artificial Sequence
  Description of Artificial Sequence: Synthetic oligonucleotide
cggcagccgucaucuacag

SEQ ID NO: 2493954 - RNA, 19 nt, Artificial Sequence
  Description of Artificial Sequence: Synthetic oligonucleotide
ccgccucacaccggcuccg

SEQ ID NO: 2493955 - RNA, 19 nt, Artificial Sequence
  Description of Artificial Sequence: Synthetic oligonucleotide
gcaccguacuuggccucgc

SEQ ID NO: 2493956 - RNA, 19 nt, Artificial Sequence
  Description of Artificial Sequence: Synthetic oligonucleotide
gcacucaaaguagcguuuu

SEQ ID NO: 2493957 - RNA, 19 nt, Artificial Sequence
  Description of Artificial Sequence: Synthetic oligonucleotide
gcccggaguucuucguugu

SEQ ID NO: 2493958 - RNA, 19 nt, Artificial Sequence
  Description of Artificial Sequence: Synthetic oligonucleotide
augcggcagccgucaucua

SEQ ID NO: 2493959 - RNA, 19 nt, Artificial Sequence
  Description of Artificial Sequence: Synthetic oligonucleotide
ggcuacccacagagauggc

SEQ ID NO: 2493960 - RNA, 19 nt, Artificial Sequence
  Description of Artificial Sequence: Synthetic oligonucleotide
cggugagagcucguauuuc

SEQ ID NO: 2493961 - RNA, 19 nt, Artificial Sequence
  Description of Artificial Sequence: Synthetic oligonucleotide
ccaucucgccgcgcccugc

SEQ ID NO: 2493962 - RNA, 19 nt, Artificial Sequence
  Description of Artificial Sequence: Synthetic oligonucleotide
ggacugcccaccaccaguu

SEQ ID NO: 2493963 - RNA, 19 nt, Artificial Sequence
  Description of Artificial Sequence: Synthetic oligonucleotide
gccggacgccacugugauc

SEQ ID NO: 2493964 - RNA, 19 nt, Artificial Sequence
  Description of Artificial Sequence: Synthetic oligonucleotide
ccggugagagcucguauuu

SEQ ID NO: 2493965 - RNA, 19 nt, Artificial Sequence
  Description of Artificial Sequence: Synthetic oligonucleotide
ccaccaguuccagcuuaca

SEQ ID NO: 2493966 - RNA, 19 nt, Artificial Sequence
  Description of Artificial Sequence: Synthetic oligonucleotide
ccggaguucuucguuguau

SEQ ID NO: 2493967 - RNA, 19 nt, Artificial Sequence
  Description of Artificial Sequence: Synthetic oligonucleotide
cgccgccucacaccggcuc

SEQ ID NO: 2493968 - RNA, 19 nt, Artificial Sequence
  Description of Artificial Sequence: Synthetic oligonucleotide
acgccgccucacaccggcu

SEQ ID NO: 2493969 - RNA, 19 nt, Artificial Sequence
  Description of Artificial Sequence: Synthetic oligonucleotide
gcgcccugcagcggcccgc

SEQ ID NO: 2493970 - RNA, 19 nt, Artificial Sequence
  Description of Artificial Sequence: Synthetic oligonucleotide
ccggcucacgccgccucac

SEQ ID NO: 2493971 - RNA, 19 nt, Artificial Sequence
  Description of Artificial Sequence: Synthetic oligonucleotide
gcccugcagcggcccgcgg

SEQ ID NO: 2493972 - RNA, 19 nt, Artificial Sequence
  Description of Artificial Sequence: Synthetic oligonucleotide
gcugggcggccucagccuu

SEQ ID NO: 2493973 - RNA, 19 nt, Artificial Sequence
  Description of Artificial Sequence: Synthetic oligonucleotide
gcgguccggcucacgccgc

SEQ ID NO: 2493974 - RNA, 19 nt, Artificial Sequence
  Description of Artificial Sequence: Synthetic oligonucleotide
ccccggcgaagggacuggc

SEQ ID NO: 2493975 - RNA, 19 nt, Artificial Sequence
  Description of Artificial Sequence: Synthetic oligonucleotide
cgcacucaaaguagcguuu

SEQ ID NO: 2493976 - RNA, 19 nt, Artificial Sequence
  Description of Artificial Sequence: Synthetic oligonucleotide
cgguccggcucacgccgcc

SEQ ID NO: 2493977 - RNA, 19 nt, Artificial Sequence
  Description of Artificial Sequence: Synthetic oligonucleotide
cccaguagccuggcuugaa

SEQ ID NO: 2493978 - RNA, 19 nt, Artificial Sequence
  Description of Artificial Sequence: Synthetic oligonucleotide
gcgaagggacuggccaggu

SEQ ID NO: 2493979 - RNA, 19 nt, Artificial Sequence
  Description of Artificial Sequence: Synthetic oligonucleotide
cccggaguucuucguugua

SEQ ID NO: 2493980 - RNA, 19 nt, Artificial Sequence
  Description of Artificial Sequence: Synthetic oligonucleotide
ccaagccggacgccacugu

SEQ ID NO: 2493981 - RNA, 19 nt, Artificial Sequence
  Description of Artificial Sequence: Synthetic oligonucleotide
gcgcccggaguucuucguu

SEQ ID NO: 2493982 - RNA, 19 nt, Artificial Sequence
  Description of Artificial Sequence: Synthetic oligonucleotide
cgccucacaccggcuccgc

SEQ ID NO: 2493983 - RNA, 19 nt, Artificial Sequence
  Description of Artificial Sequence: Synthetic oligonucleotide
cgugggcgccgacgacccc

SEQ ID NO: 2493984 - RNA, 19 nt, Artificial Sequence
  Description of Artificial Sequence: Synthetic oligonucleotide
ccguucacacugccaucgu

SEQ ID NO: 2493985 - RNA, 19 nt, Artificial Sequence
  Description of Artificial Sequence: Synthetic oligonucleotide
ccucuugauccagcuuggu

SEQ ID NO: 2493986 - RNA, 19 nt, Artificial Sequence
  Description of Artificial Sequence: Synthetic oligonucleotide
gcccgcgguccggcucacg

SEQ ID NO: 2493987 - RNA, 19 nt, Artificial Sequence
  Description of Artificial Sequence: Synthetic oligonucleotide
gguccggcucacgccgccu

SEQ ID NO: 2493988 - RNA, 19 nt, Artificial Sequence
  Description of Artificial Sequence: Synthetic oligonucleotide
gugccccggcgaagggacu

SEQ ID NO: 2493989 - RNA, 19 nt, Artificial Sequence
  Description of Artificial Sequence: Synthetic oligonucleotide
cugaggcgcugggcggccu

SEQ ID NO: 2493990 - RNA, 19 nt, Artificial Sequence
  Description of Artificial Sequence: Synthetic oligonucleotide
cgccgacgaccccgacacc

SEQ ID NO: 2493991 - RNA, 19 nt, Artificial Sequence
  Description of Artificial Sequence: Synthetic oligonucleotide
ggcccgcgguccggcucac

SEQ ID NO: 2493992 - RNA, 19 nt, Artificial Sequence
  Description of Artificial Sequence: Synthetic oligonucleotide
cggacgccacugugaucaa

SEQ ID NO: 2493993 - RNA, 19 nt, Artificial Sequence
  Description of Artificial Sequence: Synthetic oligonucleotide
ccgucaccgugggcgccga

SEQ ID NO: 2493994 - RNA, 19 nt, Artificial Sequence
  Description of Artificial Sequence: Synthetic oligonucleotide
aaauguuuguuguagaggg

SEQ ID NO: 2493995 - RNA, 19 nt, Artificial Sequence
  Description of Artificial Sequence: Synthetic oligonucleotide
aaauuuugguacuuaauac

SEQ ID NO: 2493996 - RNA, 19 nt, Artificial Sequence
  Description of Artificial Sequence: Synthetic oligonucleotide
aguaaauccuucuucaucc

SEQ ID NO: 2493997 - RNA, 19 nt, Artificial Sequence
  Description of Artificial Sequence: Synthetic oligonucleotide
uuuauaacuuaauauauag

SEQ ID NO: 2493998 - RNA, 19 nt, Artificial Sequence
  Description of Artificial Sequence: Synthetic oligonucleotide
aauacgaguagccagguag

SEQ ID NO: 2493999 - RNA, 19 nt, Artificial Sequence
  Description of Artificial Sequence: Synthetic oligonucleotide
uaccauaaaauuuacaugc

SEQ ID NO: 2494000 - RNA, 19 nt, Artificial Sequence
  Description of Artificial Sequence: Synthetic oligonucleotide
uuuuaugacaaacagacaa

SEQ ID NO: 2494001 - RNA, 19 nt, Artificial Sequence
  Description of Artificial Sequence: Synthetic oligonucleotide
uauaacuuaauauauagua

SEQ ID NO: 2494002 - RNA, 19 nt, Artificial Sequence
  Description of Artificial Sequence: Synthetic oligonucleotide
uuaauuuauaacuuaauau

SEQ ID NO: 2494003 - RNA, 19 nt, Artificial Sequence
  Description of Artificial Sequence: Synthetic oligonucleotide
aaagaauuugcuaacagag

SEQ ID NO: 2494004 - RNA, 19 nt, Artificial Sequence
  Description of Artificial Sequence: Synthetic oligonucleotide
aagugucaaauuuugguac

SEQ ID NO: 2494005 - RNA, 19 nt, Artificial Sequence
  Description of Artificial Sequence: Synthetic oligonucleotide
uuuguaaaccaucauacug

SEQ ID NO: 2494006 - RNA, 19 nt, Artificial Sequence
  Description of Artificial Sequence: Synthetic oligonucleotide
aaagcuggggaucugcacc

SEQ ID NO: 2494007 - RNA, 19 nt, Artificial Sequence
  Description of Artificial Sequence: Synthetic oligonucleotide
auuuacaucaacuccacag

SEQ ID NO: 2494008 - RNA, 19 nt, Artificial Sequence
  Description of Artificial Sequence: Synthetic oligonucleotide
uuugguacuuaauacaaag

SEQ ID NO: 2494009 - RNA, 19 nt, Artificial Sequence
  Description of Artificial Sequence: Synthetic oligonucleotide
aauuuugguacuuaauaca

SEQ ID NO: 2494010 - RNA, 19 nt, Artificial Sequence
  Description of Artificial Sequence: Synthetic oligonucleotide
aaagcaaaggugucccucc

SEQ ID NO: 2494011 - RNA, 19 nt, Artificial Sequence
  Description of Artificial Sequence: Synthetic oligonucleotide
aaacaugauuuuguaaacc

SEQ ID NO: 2494012 - RNA, 19 nt, Artificial Sequence
  Description of Artificial Sequence: Synthetic oligonucleotide
auagacuuacaguaagccc

SEQ ID NO: 2494013 - RNA, 19 nt, Artificial Sequence
  Description of Artificial Sequence: Synthetic oligonucleotide
uagacuuacaguaagcccu

SEQ ID NO: 2494014 - RNA, 19 nt, Artificial Sequence
  Description of Artificial Sequence: Synthetic oligonucleotide
ugguacuuaauacaaagac

SEQ ID NO: 2494015 - RNA, 19 nt, Artificial Sequence
  Description of Artificial Sequence: Synthetic oligonucleotide
aaugacagcgcacuuucuc

SEQ ID NO: 2494016 - RNA, 19 nt, Artificial Sequence
  Description of Artificial Sequence: Synthetic oligonucleotide
acacauaaccaccuguacc

SEQ ID NO: 2494017 - RNA, 19 nt, Artificial Sequence
  Description of Artificial Sequence: Synthetic oligonucleotide
ugaaguaggaacucuacca

SEQ ID NO: 2494018 - RNA, 19 nt, Artificial Sequence
  Description of Artificial Sequence: Synthetic oligonucleotide
agaauuugcuaacagaggu

SEQ ID NO: 2494019 - RNA, 19 nt, Artificial Sequence
  Description of Artificial Sequence: Synthetic oligonucleotide
uguugguuaaaguaguuga

SEQ ID NO: 2494020 - RNA, 19 nt, Artificial Sequence
  Description of Artificial Sequence: Synthetic oligonucleotide
agugaagauaaacagggug

SEQ ID NO: 2494021 - RNA, 19 nt, Artificial Sequence
  Description of Artificial Sequence: Synthetic oligonucleotide
uuugacaauauccguguag

SEQ ID NO: 2494022 - RNA, 19 nt, Artificial Sequence
  Description of Artificial Sequence: Synthetic oligonucleotide
uuguaaaccaucauacugu

SEQ ID NO: 2494023 - RNA, 19 nt, Artificial Sequence
  Description of Artificial Sequence: Synthetic oligonucleotide
ugcuuguugguuaaaguag

SEQ ID NO: 2494024 - RNA, 19 nt, Artificial Sequence
  Description of Artificial Sequence: Synthetic oligonucleotide
uuuuccuaaaagcugggga

SEQ ID NO: 2494025 - RNA, 19 nt, Artificial Sequence
  Description of Artificial Sequence: Synthetic oligonucleotide
aaagugucaaauuuuggua

SEQ ID NO: 2494026 - RNA, 19 nt, Artificial Sequence
  Description of Artificial Sequence: Synthetic oligonucleotide
uguuuuauggggagaaaug

SEQ ID NO: 2494027 - RNA, 19 nt, Artificial Sequence
  Description of Artificial Sequence: Synthetic oligonucleotide
aagagugaagauaaacagg

SEQ ID NO: 2494028 - RNA, 19 nt, Artificial Sequence
  Description of Artificial Sequence: Synthetic oligonucleotide
agagcauuucuccuugagc

SEQ ID NO: 2494029 - RNA, 19 nt, Artificial Sequence
  Description of Artificial Sequence: Synthetic oligonucleotide
uuauuuaaacaugauuuug

SEQ ID NO: 2494030 - RNA, 19 nt, Artificial Sequence
  Description of Artificial Sequence: Synthetic oligonucleotide
auggauauugcacucagcu

SEQ ID NO: 2494031 - RNA, 19 nt, Artificial Sequence
  Description of Artificial Sequence: Synthetic oligonucleotide
ucuuguucaauacgaguag

SEQ ID NO: 2494032 - RNA, 19 nt, Artificial Sequence
  Description of Artificial Sequence: Synthetic oligonucleotide
agaaauguuuguuguagag

SEQ ID NO: 2494033 - RNA, 19 nt, Artificial Sequence
  Description of Artificial Sequence: Synthetic oligonucleotide
uuuacaucaacuccacagu

SEQ ID NO: 2494034 - RNA, 19 nt, Artificial Sequence
  Description of Artificial Sequence: Synthetic oligonucleotide
agauguauggauauugcac

SEQ ID NO: 2494035 - RNA, 19 nt, Artificial Sequence
  Description of Artificial Sequence: Synthetic oligonucleotide
augacaaacagacaaagua

SEQ ID NO: 2494036 - RNA, 19 nt, Artificial Sequence
  Description of Artificial Sequence: Synthetic oligonucleotide
ucaaagugucaaauuuugg

SEQ ID NO: 2494037 - RNA, 19 nt, Artificial Sequence
  Description of Artificial Sequence: Synthetic oligonucleotide
aauuugcuaacagaggugu

SEQ ID NO: 2494038 - RNA, 19 nt, Artificial Sequence
  Description of Artificial Sequence: Synthetic oligonucleotide
agcauuuugacaauauccg

SEQ ID NO: 2494039 - RNA, 19 nt, Artificial Sequence
  Description of Artificial Sequence: Synthetic oligonucleotide
ugccauaaaacauuaauuu

SEQ ID NO: 2494040 - RNA, 19 nt, Artificial Sequence
  Description of Artificial Sequence: Synthetic oligonucleotide
gaaauguuuguuguagagg

SEQ ID NO: 2494041 - RNA, 19 nt, Artificial Sequence
  Description of Artificial Sequence: Synthetic oligonucleotide
uuauaacuuaauauauagu

SEQ ID NO: 2494042 - RNA, 19 nt, Artificial Sequence
  Description of Artificial Sequence: Synthetic oligonucleotide
aaaagcuggggaucugcac

SEQ ID NO: 2494043 - RNA, 19 nt, Artificial Sequence
  Description of Artificial Sequence: Synthetic oligonucleotide
ucgaccuuuuccuaaaagc

SEQ ID NO: 2494044 - RNA, 19 nt, Artificial Sequence
  Description of Artificial Sequence: Synthetic oligonucleotide
cauuuugacaauauccgug

SEQ ID NO: 2494045 - RNA, 19 nt, Artificial Sequence
  Description of Artificial Sequence: Synthetic oligonucleotide
ugguuaaaguaguugacug

SEQ ID NO: 2494046 - RNA, 19 nt, Artificial Sequence
  Description of Artificial Sequence: Synthetic oligonucleotide
cuuacaguaagcccugugc

SEQ ID NO: 2494047 - RNA, 19 nt, Artificial Sequence
  Description of Artificial Sequence: Synthetic oligonucleotide
ugacaaacagacaaaguau

SEQ ID NO: 2494048 - RNA, 19 nt, Artificial Sequence
  Description of Artificial Sequence: Synthetic oligonucleotide
ugugccgcagcccacauca

SEQ ID NO: 2494049 - RNA, 19 nt, Artificial Sequence
  Description of Artificial Sequence: Synthetic oligonucleotide
ucagagaguuaauacaaga

SEQ ID NO: 2494050 - RNA, 19 nt, Artificial Sequence
  Description of Artificial Sequence: Synthetic oligonucleotide
auuuugacaauauccgugu

SEQ ID NO: 2494051 - RNA, 19 nt, Artificial Sequence
  Description of Artificial Sequence: Synthetic oligonucleotide
agucaagcagcauuuugac

SEQ ID NO: 2494052 - RNA, 19 nt, Artificial Sequence
  Description of Artificial Sequence: Synthetic oligonucleotide
aacaggguggaauuucuca

SEQ ID NO: 2494053 - RNA, 19 nt, Artificial Sequence
  Description of Artificial Sequence: Synthetic oligonucleotide
aagaauuugcuaacagagg

SEQ ID NO: 2494054 - RNA, 19 nt, Artificial Sequence
  Description of Artificial Sequence: Synthetic oligonucleotide
ugauugauaacauuuucuu

SEQ ID NO: 2494055 - RNA, 19 nt, Artificial Sequence
  Description of Artificial Sequence: Synthetic oligonucleotide
uuacaguaagcccugugca

SEQ ID NO: 2494056 - RNA, 19 nt, Artificial Sequence
  Description of Artificial Sequence: Synthetic oligonucleotide
uucucaaagugucaaauuu

SEQ ID NO: 2494057 - RNA, 19 nt, Artificial Sequence
  Description of Artificial Sequence: Synthetic oligonucleotide
uuuauggggagaaauguuu

SEQ ID NO: 2494058 - RNA, 19 nt, Artificial Sequence
  Description of Artificial Sequence: Synthetic oligonucleotide
ugugguagagaccucauuu

SEQ ID NO: 2494059 - RNA, 19 nt, Artificial Sequence
  Description of Artificial Sequence: Synthetic oligonucleotide
guucaauacgaguagccag

SEQ ID NO: 2494060 - RNA, 19 nt, Artificial Sequence
  Description of Artificial Sequence: Synthetic oligonucleotide
uuguucaauacgaguagcc

SEQ ID NO: 2494061 - RNA, 19 nt, Artificial Sequence
  Description of Artificial Sequence: Synthetic oligonucleotide
cagagaguuaauacaagag

SEQ ID NO: 2494062 - RNA, 19 nt, Artificial Sequence
  Description of Artificial Sequence: Synthetic oligonucleotide
auugcacucagcuuuaaau

SEQ ID NO: 2494063 - RNA, 19 nt, Artificial Sequence
  Description of Artificial Sequence: Synthetic oligonucleotide
uguagccuuuacuacaggc

SEQ ID NO: 2494064 - RNA, 19 nt, Artificial Sequence
  Description of Artificial Sequence: Synthetic oligonucleotide
cauuuucuuguucaauacg

SEQ ID NO: 2494065 - RNA, 19 nt, Artificial Sequence
  Description of Artificial Sequence: Synthetic oligonucleotide
gaacagacaaagaauuugc

SEQ ID NO: 2494066 - RNA, 19 nt, Artificial Sequence
  Description of Artificial Sequence: Synthetic oligonucleotide
uuauggggagaaauguuug

SEQ ID NO: 2494067 - RNA, 19 nt, Artificial Sequence
  Description of Artificial Sequence: Synthetic oligonucleotide
aagacacauaaccaccugu

SEQ ID NO: 2494068 - RNA, 19 nt, Artificial Sequence
  Description of Artificial Sequence: Synthetic oligonucleotide
ugugauugauaacauuuuc

SEQ ID NO: 2494069 - RNA, 19 nt, Artificial Sequence
  Description of Artificial Sequence: Synthetic oligonucleotide
ucauccgugugauugauaa

SEQ ID NO: 2494070 - RNA, 19 nt, Artificial Sequence
  Description of Artificial Sequence: Synthetic oligonucleotide
acuuaauacaaagacacau

SEQ ID NO: 2494071 - RNA, 19 nt, Artificial Sequence
  Description of Artificial Sequence: Synthetic oligonucleotide
aagauaaacaggguggaau

SEQ ID NO: 2494072 - RNA, 19 nt, Artificial Sequence
  Description of Artificial Sequence: Synthetic oligonucleotide
cauagacuuacaguaagcc

SEQ ID NO: 2494073 - RNA, 19 nt, Artificial Sequence
  Description of Artificial Sequence: Synthetic oligonucleotide
augacagcgcacuuucucg

SEQ ID NO: 2494074 - RNA, 19 nt, Artificial Sequence
  Description of Artificial Sequence: Synthetic oligonucleotide
gaaguaggaacucuaccac

SEQ ID NO: 2494075 - RNA, 19 nt, Artificial Sequence
  Description of Artificial Sequence: Synthetic oligonucleotide
gguggaauuucucaaagug

SEQ ID NO: 2494076 - RNA, 19 nt, Artificial Sequence
  Description of Artificial Sequence: Synthetic oligonucleotide
uuacaugccauaaaacauu

SEQ ID NO: 2494077 - RNA, 19 nt, Artificial Sequence
  Description of Artificial Sequence: Synthetic oligonucleotide
acuuucucgaccuuuuccu

SEQ ID NO: 2494078 - RNA, 19 nt, Artificial Sequence
  Description of Artificial Sequence: Synthetic oligonucleotide
uuacuacaggcuaaugaca

SEQ ID NO: 2494079 - RNA, 19 nt, Artificial Sequence
  Description of Artificial Sequence: Synthetic oligonucleotide
cuacaggcuaaugacagcg

SEQ ID NO: 2494080 - RNA, 19 nt, Artificial Sequence
  Description of Artificial Sequence: Synthetic oligonucleotide
cagacaaagaauuugcuaa

SEQ ID NO: 2494081 - RNA, 19 nt, Artificial Sequence
  Description of Artificial Sequence: Synthetic oligonucleotide
ucaaauuuugguacuuaau

SEQ ID NO: 2494082 - RNA, 19 nt, Artificial Sequence
  Description of Artificial Sequence: Synthetic oligonucleotide
uugacuguuuuauggggag

SEQ ID NO: 2494083 - RNA, 19 nt, Artificial Sequence
  Description of Artificial Sequence: Synthetic oligonucleotide
uugguacuuaauacaaaga

SEQ ID NO: 2494084 - RNA, 19 nt, Artificial Sequence
  Description of Artificial Sequence: Synthetic oligonucleotide
auaaacaggguggaauuuc

SEQ ID NO: 2494085 - RNA, 19 nt, Artificial Sequence
  Description of Artificial Sequence: Synthetic oligonucleotide
auuuucuuguucaauacga

SEQ ID NO: 2494086 - RNA, 19 nt, Artificial Sequence
  Description of Artificial Sequence: Synthetic oligonucleotide
acaagagugaagauaaaca

SEQ ID NO: 2494087 - RNA, 19 nt, Artificial Sequence
  Description of Artificial Sequence: Synthetic oligonucleotide
gauguauggauauugcacu

SEQ ID NO: 2494088 - RNA, 19 nt, Artificial Sequence
  Description of Artificial Sequence: Synthetic oligonucleotide
auaaaauuuacaugccaua

SEQ ID NO: 2494089 - RNA, 19 nt, Artificial Sequence
  Description of Artificial Sequence: Synthetic oligonucleotide
cuuuacuacaggcuaauga

SEQ ID NO: 2494090 - RNA, 19 nt, Artificial Sequence
  Description of Artificial Sequence: Synthetic oligonucleotide
ucugaaguaggaacucuac

SEQ ID NO: 2494091 - RNA, 19 nt, Artificial Sequence
  Description of Artificial Sequence: Synthetic oligonucleotide
uuuccccugugcuuguugg

SEQ ID NO: 2494092 - RNA, 19 nt, Artificial Sequence
  Description of Artificial Sequence: Synthetic oligonucleotide
aaguaguugacuguuuuau

SEQ ID NO: 2494093 - RNA, 19 nt, Artificial Sequence
  Description of Artificial Sequence: Synthetic oligonucleotide
ucucccauagacuuacagu

SEQ ID NO: 2494094 - RNA, 19 nt, Artificial Sequence
  Description of Artificial Sequence: Synthetic oligonucleotide
acuacaggcuaaugacagc

SEQ ID NO: 2494095 - RNA, 19 nt, Artificial Sequence
  Description of Artificial Sequence: Synthetic oligonucleotide
ugcacucagcuuuaaauaa

SEQ ID NO: 2494096 - RNA, 19 nt, Artificial Sequence
  Description of Artificial Sequence: Synthetic oligonucleotide
uguagacaugccuuacuug

SEQ ID NO: 2494097 - RNA, 19 nt, Artificial Sequence
  Description of Artificial Sequence: Synthetic oligonucleotide
aacucuaccacagcuauuu

SEQ ID NO: 2494098 - RNA, 19 nt, Artificial Sequence
  Description of Artificial Sequence: Synthetic oligonucleotide
caaauuuugguacuuaaua

SEQ ID NO: 2494099 - RNA, 19 nt, Artificial Sequence
  Description of Artificial Sequence: Synthetic oligonucleotide
accauaaaauuuacaugcc

SEQ ID NO: 2494100 - RNA, 19 nt, Artificial Sequence
  Description of Artificial Sequence: Synthetic oligonucleotide
cacauaaccaccuguacca

SEQ ID NO: 2494101 - RNA, 19 nt, Artificial Sequence
  Description of Artificial Sequence: Synthetic oligonucleotide
auguauggauauugcacuc

SEQ ID NO: 2494102 - RNA, 19 nt, Artificial Sequence
  Description of Artificial Sequence: Synthetic oligonucleotide
cuaaugacagcgcacuuuc

SEQ ID NO: 2494103 - RNA, 19 nt, Artificial Sequence
  Description of Artificial Sequence: Synthetic oligonucleotide
gaguaaauccuucuucauc

SEQ ID NO: 2494104 - RNA, 19 nt, Artificial Sequence
  Description of Artificial Sequence: Synthetic oligonucleotide
uguucaauacgaguagcca

SEQ ID NO: 2494105 - RNA, 19 nt, Artificial Sequence
  Description of Artificial Sequence: Synthetic oligonucleotide
uacuuaauacaaagacaca

SEQ ID NO: 2494106 - RNA, 19 nt, Artificial Sequence
  Description of Artificial Sequence: Synthetic oligonucleotide
auaacuuaauauauaguaa

SEQ ID NO: 2494107 - RNA, 19 nt, Artificial Sequence
  Description of Artificial Sequence: Synthetic oligonucleotide
uagagcauuucuccuugag

SEQ ID NO: 2494108 - RNA, 19 nt, Artificial Sequence
  Description of Artificial Sequence: Synthetic oligonucleotide
ucucaaagugucaaauuuu

SEQ ID NO: 2494109 - RNA, 19 nt, Artificial Sequence
  Description of Artificial Sequence: Synthetic oligonucleotide
guauggauauugcacucag

SEQ ID NO: 2494110 - RNA, 19 nt, Artificial Sequence
  Description of Artificial Sequence: Synthetic oligonucleotide
uugguuaaaguaguugacu

SEQ ID NO: 2494111 - RNA, 19 nt, Artificial Sequence
  Description of Artificial Sequence: Synthetic oligonucleotide
uuuuauggggagaaauguu

SEQ ID NO: 2494112 - RNA, 19 nt, Artificial Sequence
  Description of Artificial Sequence: Synthetic oligonucleotide
ugugcuuguugguuaaagu

SEQ ID NO: 2494113 - RNA, 19 nt, Artificial Sequence
  Description of Artificial Sequence: Synthetic oligonucleotide
aagcaaaggugucccuccg

SEQ ID NO: 2494114 - RNA, 19 nt, Artificial Sequence
  Description of Artificial Sequence: Synthetic oligonucleotide
cagcuauuugcccaugugc

SEQ ID NO: 2494115 - RNA, 19 nt, Artificial Sequence
  Description of Artificial Sequence: Synthetic oligonucleotide
uuuugguacuuaauacaaa

SEQ ID NO: 2494116 - RNA, 19 nt, Artificial Sequence
  Description of Artificial Sequence: Synthetic oligonucleotide
uugagcugccaacugguga

SEQ ID NO: 2494117 - RNA, 19 nt, Artificial Sequence
  Description of Artificial Sequence: Synthetic oligonucleotide
uuguugguuaaaguaguug

SEQ ID NO: 2494118 - RNA, 19 nt, Artificial Sequence
  Description of Artificial Sequence: Synthetic oligonucleotide
uugaaucccaggagaagga

SEQ ID NO: 2494119 - RNA, 19 nt, Artificial Sequence
  Description of Artificial Sequence: Synthetic oligonucleotide
guaaauccuucuucauccg

SEQ ID NO: 2494120 - RNA, 19 nt, Artificial Sequence
  Description of Artificial Sequence: Synthetic oligonucleotide
aguaggaacucuaccacag

SEQ ID NO: 2494121 - RNA, 19 nt, Artificial Sequence
  Description of Artificial Sequence: Synthetic oligonucleotide
uaaaagcuggggaucugca

SEQ ID NO: 2494122 - RNA, 19 nt, Artificial Sequence
  Description of Artificial Sequence: Synthetic oligonucleotide
cuccguuccagucauacuc

SEQ ID NO: 2494123 - RNA, 19 nt, Artificial Sequence
  Description of Artificial Sequence: Synthetic oligonucleotide
accaucauacuguauacuu

SEQ ID NO: 2494124 - RNA, 19 nt, Artificial Sequence
  Description of Artificial Sequence: Synthetic oligonucleotide
acagacaaagaauuugcua

SEQ ID NO: 2494125 - RNA, 19 nt, Artificial Sequence
  Description of Artificial Sequence: Synthetic oligonucleotide
gacggcauaaagcaaaggu

SEQ ID NO: 2494126 - RNA, 19 nt, Artificial Sequence
  Description of Artificial Sequence: Synthetic oligonucleotide
ugagcugccaacuggugaa

SEQ ID NO: 2494127 - RNA, 19 nt, Artificial Sequence
  Description of Artificial Sequence: Synthetic oligonucleotide
acagucaagcagcauuuug

SEQ ID NO: 2494128 - RNA, 19 nt, Artificial Sequence
  Description of Artificial Sequence: Synthetic oligonucleotide
gaauuugcuaacagaggug

SEQ ID NO: 2494129 - RNA, 19 nt, Artificial Sequence
  Description of Artificial Sequence: Synthetic oligonucleotide
uugcacucagcuuuaaaua

SEQ ID NO: 2494130 - RNA, 19 nt, Artificial Sequence
  Description of Artificial Sequence: Synthetic oligonucleotide
acagcgcacuuucucgacc

SEQ ID NO: 2494131 - RNA, 19 nt, Artificial Sequence
  Description of Artificial Sequence: Synthetic oligonucleotide
auuuugguacuuaauacaa

SEQ ID NO: 2494132 - RNA, 19 nt, Artificial Sequence
  Description of Artificial Sequence: Synthetic oligonucleotide
uacuugaaucccaggagaa

SEQ ID NO: 2494133 - RNA, 19 nt, Artificial Sequence
  Description of Artificial Sequence: Synthetic oligonucleotide
uauggauauugcacucagc

SEQ ID NO: 2494134 - RNA, 19 nt, Artificial Sequence
  Description of Artificial Sequence: Synthetic oligonucleotide
uguaaaccaucauacugua

SEQ ID NO: 2494135 - RNA, 19 nt, Artificial Sequence
  Description of Artificial Sequence: Synthetic oligonucleotide
ugacaauauccguguagcc

SEQ ID NO: 2494136 - RNA, 19 nt, Artificial Sequence
  Description of Artificial Sequence: Synthetic oligonucleotide
uacaugccauaaaacauua

SEQ ID NO: 2494137 - RNA, 19 nt, Artificial Sequence
  Description of Artificial Sequence: Synthetic oligonucleotide
uagccuuuacuacaggcua

SEQ ID NO: 2494138 - RNA, 19 nt, Artificial Sequence
  Description of Artificial Sequence: Synthetic oligonucleotide
auauccguguagccuuuac

SEQ ID NO: 2494139 - RNA, 19 nt, Artificial Sequence
  Description of Artificial Sequence: Synthetic oligonucleotide
ugauaacauuuucuuguuc

SEQ ID NO: 2494140 - RNA, 19 nt, Artificial Sequence
  Description of Artificial Sequence: Synthetic oligonucleotide
uauggggagaaauguuugu

SEQ ID NO: 2494141 - RNA, 19 nt, Artificial Sequence
  Description of Artificial Sequence: Synthetic oligonucleotide
uauccguguagccuuuacu

SEQ ID NO: 2494142 - RNA, 19 nt, Artificial Sequence
  Description of Artificial Sequence: Synthetic oligonucleotide
caaagugucaaauuuuggu

SEQ ID NO: 2494143 - RNA, 19 nt, Artificial Sequence
  Description of Artificial Sequence: Synthetic oligonucleotide
ugccuuacuugaaucccag

SEQ ID NO: 2494144 - RNA, 19 nt, Artificial Sequence
  Description of Artificial Sequence: Synthetic oligonucleotide
gacacauaaccaccuguac

SEQ ID NO: 2494145 - RNA, 19 nt, Artificial Sequence
  Description of Artificial Sequence: Synthetic oligonucleotide
cuggugaacagacaaagaa

SEQ ID NO: 2494146 - RNA, 19 nt, Artificial Sequence
  Description of Artificial Sequence: Synthetic oligonucleotide
uggacggcauaaagcaaag

SEQ ID NO: 2494147 - RNA, 19 nt, Artificial Sequence
  Description of Artificial Sequence: Synthetic oligonucleotide
uguauggauauugcacuca

SEQ ID NO: 2494148 - RNA, 19 nt, Artificial Sequence
  Description of Artificial Sequence: Synthetic oligonucleotide
cuuguucaauacgaguagc

SEQ ID NO: 2494149 - RNA, 19 nt, Artificial Sequence
  Description of Artificial Sequence: Synthetic oligonucleotide
ugccaacuggugaacagac

SEQ ID NO: 2494150 - RNA, 19 nt, Artificial Sequence
  Description of Artificial Sequence: Synthetic oligonucleotide
cucccauagacuuacagua

SEQ ID NO: 2494151 - RNA, 19 nt, Artificial Sequence
  Description of Artificial Sequence: Synthetic oligonucleotide
cuaaaagcuggggaucugc

SEQ ID NO: 2494152 - RNA, 19 nt, Artificial Sequence
  Description of Artificial Sequence: Synthetic oligonucleotide
caugccuuacuugaauccc

SEQ ID NO: 2494153 - RNA, 19 nt, Artificial Sequence
  Description of Artificial Sequence: Synthetic oligonucleotide
gacaugccuuacuugaauc

SEQ ID NO: 2494154 - RNA, 19 nt, Artificial Sequence
  Description of Artificial Sequence: Synthetic oligonucleotide
cuauuugcccaugugccgc

SEQ ID NO: 2494155 - RNA, 19 nt, Artificial Sequence
  Description of Artificial Sequence: Synthetic oligonucleotide
acagcuauuugcccaugug

SEQ ID NO: 2494156 - RNA, 19 nt, Artificial Sequence
  Description of Artificial Sequence: Synthetic oligonucleotide
acaggcuaaugacagcgca

SEQ ID NO: 2494157 - RNA, 19 nt, Artificial Sequence
  Description of Artificial Sequence: Synthetic oligonucleotide
acggcauaaagcaaaggug

SEQ ID NO: 2494158 - RNA, 19 nt, Artificial Sequence
  Description of Artificial Sequence: Synthetic oligonucleotide
ucaacuccacagucaagca

SEQ ID NO: 2494159 - RNA, 19 nt, Artificial Sequence
  Description of Artificial Sequence: Synthetic oligonucleotide
uuaaaguaguugacuguuu

SEQ ID NO: 2494160 - RNA, 19 nt, Artificial Sequence
  Description of Artificial Sequence: Synthetic oligonucleotide
uccguuccagucauacuca

SEQ ID NO: 2494161 - RNA, 19 nt, Artificial Sequence
  Description of Artificial Sequence: Synthetic oligonucleotide
uugauaacauuuucuuguu

SEQ ID NO: 2494162 - RNA, 19 nt, Artificial Sequence
  Description of Artificial Sequence: Synthetic oligonucleotide
gaguuaauacaagagugaa

SEQ ID NO: 2494163 - RNA, 19 nt, Artificial Sequence
  Description of Artificial Sequence: Synthetic oligonucleotide
ugaaucccaggagaaggag

SEQ ID NO: 2494164 - RNA, 19 nt, Artificial Sequence
  Description of Artificial Sequence: Synthetic oligonucleotide
uuucucgaccuuuuccuaa

SEQ ID NO: 2494165 - RNA, 19 nt, Artificial Sequence
  Description of Artificial Sequence: Synthetic oligonucleotide
cagucaagcagcauuuuga

SEQ ID NO: 2494166 - RNA, 19 nt, Artificial Sequence
  Description of Artificial Sequence: Synthetic oligonucleotide
ugucccuccguuccaguca

SEQ ID NO: 2494167 - RNA, 19 nt, Artificial Sequence
  Description of Artificial Sequence: Synthetic oligonucleotide
gcuaacagaggugugguag

SEQ ID NO: 2494168 - RNA, 19 nt, Artificial Sequence
  Description of Artificial Sequence: Synthetic oligonucleotide
uacaguaagcccugugcaa

SEQ ID NO: 2494169 - RNA, 19 nt, Artificial Sequence
  Description of Artificial Sequence: Synthetic oligonucleotide
uccguguagccuuuacuac

SEQ ID NO: 2494170 - RNA, 19 nt, Artificial Sequence
  Description of Artificial Sequence: Synthetic oligonucleotide
uucuccuugagcugccaac

SEQ ID NO: 2494171 - RNA, 19 nt, Artificial Sequence
  Description of Artificial Sequence: Synthetic oligonucleotide
acuuacaguaagcccugug

SEQ ID NO: 2494172 - RNA, 19 nt, Artificial Sequence
  Description of Artificial Sequence: Synthetic oligonucleotide
uacaggcuaaugacagcgc

SEQ ID NO: 2494173 - RNA, 19 nt, Artificial Sequence
  Description of Artificial Sequence: Synthetic oligonucleotide
gguacuuaauacaaagaca

SEQ ID NO: 2494174 - RNA, 19 nt, Artificial Sequence
  Description of Artificial Sequence: Synthetic oligonucleotide
acaggguggaauuucucaa

SEQ ID NO: 2494175 - RNA, 19 nt, Artificial Sequence
  Description of Artificial Sequence: Synthetic oligonucleotide
gacaaagaauuugcuaaca

SEQ ID NO: 2494176 - RNA, 19 nt, Artificial Sequence
  Description of Artificial Sequence: Synthetic oligonucleotide
guugguuaaaguaguugac

SEQ ID NO: 2494177 - RNA, 19 nt, Artificial Sequence
  Description of Artificial Sequence: Synthetic oligonucleotide
gucaaauuuugguacuuaa

SEQ ID NO: 2494178 - RNA, 19 nt, Artificial Sequence
  Description of Artificial Sequence: Synthetic oligonucleotide
aagcccugugcaaagucag

SEQ ID NO: 2494179 - RNA, 19 nt, Artificial Sequence
  Description of Artificial Sequence: Synthetic oligonucleotide
auaaccaccuguaccauaa

SEQ ID NO: 2494180 - RNA, 19 nt, Artificial Sequence
  Description of Artificial Sequence: Synthetic oligonucleotide
gaccucauuuccccugugc

SEQ ID NO: 2494181 - RNA, 19 nt, Artificial Sequence
  Description of Artificial Sequence: Synthetic oligonucleotide
uaacagaggugugguagag

SEQ ID NO: 2494182 - RNA, 19 nt, Artificial Sequence
  Description of Artificial Sequence: Synthetic oligonucleotide
uccuaaaagcuggggaucu

SEQ ID NO: 2494183 - RNA, 19 nt, Artificial Sequence
  Description of Artificial Sequence: Synthetic oligonucleotide
ugacagcgcacuuucucga

SEQ ID NO: 2494184 - RNA, 19 nt, Artificial Sequence
  Description of Artificial Sequence: Synthetic oligonucleotide
cucgaccuuuuccuaaaag

SEQ ID NO: 2494185 - RNA, 19 nt, Artificial Sequence
  Description of Artificial Sequence: Synthetic oligonucleotide
ucccauagacuuacaguaa

SEQ ID NO: 2494186 - RNA, 19 nt, Artificial Sequence
  Description of Artificial Sequence: Synthetic oligonucleotide
accuguaccauaaaauuua

SEQ ID NO: 2494187 - RNA, 19 nt, Artificial Sequence
  Description of Artificial Sequence: Synthetic oligonucleotide
gggaguaaauccuucuuca

SEQ ID NO: 2494188 - RNA, 19 nt, Artificial Sequence
  Description of Artificial Sequence: Synthetic oligonucleotide
gacaauauccguguagccu

SEQ ID NO: 2494189 - RNA, 19 nt, Artificial Sequence
  Description of Artificial Sequence: Synthetic oligonucleotide
augccauaaaacauuaauu

SEQ ID NO: 2494190 - RNA, 19 nt, Artificial Sequence
  Description of Artificial Sequence: Synthetic oligonucleotide
agacaugccuuacuugaau

SEQ ID NO: 2494191 - RNA, 19 nt, Artificial Sequence
  Description of Artificial Sequence: Synthetic oligonucleotide
caugccauaaaacauuaau

SEQ ID NO: 2494192 - RNA, 19 nt, Artificial Sequence
  Description of Artificial Sequence: Synthetic oligonucleotide
uagacaugccuuacuugaa

SEQ ID NO: 2494193 - RNA, 19 nt, Artificial Sequence
  Description of Artificial Sequence: Synthetic oligonucleotide
auaaagcaaaggugucccu

SEQ ID NO: 2494194 - RNA, 19 nt, Artificial Sequence
  Description of Artificial Sequence: Synthetic oligonucleotide
gagaaggagauguauggau

SEQ ID NO: 2494195 - RNA, 19 nt, Artificial Sequence
  Description of Artificial Sequence: Synthetic oligonucleotide
gaaggagauguauggauau

SEQ ID NO: 2494196 - RNA, 19 nt, Artificial Sequence
  Description of Artificial Sequence: Synthetic oligonucleotide
guuuuauggggagaaaugu

SEQ ID NO: 2494197 - RNA, 19 nt, Artificial Sequence
  Description of Artificial Sequence: Synthetic oligonucleotide
uacgaguagccagguagag

SEQ ID NO: 2494198 - RNA, 19 nt, Artificial Sequence
  Description of Artificial Sequence: Synthetic oligonucleotide
uggauauugcacucagcuu

SEQ ID NO: 2494199 - RNA, 19 nt, Artificial Sequence
  Description of Artificial Sequence: Synthetic oligonucleotide
accaccuguaccauaaaau

SEQ ID NO: 2494200 - RNA, 19 nt, Artificial Sequence
  Description of Artificial Sequence: Synthetic oligonucleotide
caggcuaaugacagcgcac

SEQ ID NO: 2494201 - RNA, 19 nt, Artificial Sequence
  Description of Artificial Sequence: Synthetic oligonucleotide
uucucgaccuuuuccuaaa

SEQ ID NO: 2494202 - RNA, 19 nt, Artificial Sequence
  Description of Artificial Sequence: Synthetic oligonucleotide
guugacuguuuuaugggga

SEQ ID NO: 2494203 - RNA, 19 nt, Artificial Sequence
  Description of Artificial Sequence: Synthetic oligonucleotide
uuaauucaacaagaacauu

SEQ ID NO: 2494204 - RNA, 19 nt, Artificial Sequence
  Description of Artificial Sequence: Synthetic oligonucleotide
guaggaacucuaccacagc

SEQ ID NO: 2494205 - RNA, 19 nt, Artificial Sequence
  Description of Artificial Sequence: Synthetic oligonucleotide
uuccuaaaagcuggggauc

SEQ ID NO: 2494206 - RNA, 19 nt, Artificial Sequence
  Description of Artificial Sequence: Synthetic oligonucleotide
cuaacagaggugugguaga

SEQ ID NO: 2494207 - RNA, 19 nt, Artificial Sequence
  Description of Artificial Sequence: Synthetic oligonucleotide
ggauauugcacucagcuuu

SEQ ID NO: 2494208 - RNA, 19 nt, Artificial Sequence
  Description of Artificial Sequence: Synthetic oligonucleotide
aggcuaaugacagcgcacu

SEQ ID NO: 2494209 - RNA, 19 nt, Artificial Sequence
  Description of Artificial Sequence: Synthetic oligonucleotide
caguaagcccugugcaaag

SEQ ID NO: 2494210 - RNA, 19 nt, Artificial Sequence
  Description of Artificial Sequence: Synthetic oligonucleotide
ucaauacgaguagccaggu

SEQ ID NO: 2494211 - RNA, 19 nt, Artificial Sequence
  Description of Artificial Sequence: Synthetic oligonucleotide
cccauggacggcauaaagc

SEQ ID NO: 2494212 - RNA, 19 nt, Artificial Sequence
  Description of Artificial Sequence: Synthetic oligonucleotide
ugucaaauuuugguacuua

SEQ ID NO: 2494213 - RNA, 19 nt, Artificial Sequence
  Description of Artificial Sequence: Synthetic oligonucleotide
uggggaucugcaccauucu

SEQ ID NO: 2494214 - RNA, 19 nt, Artificial Sequence
  Description of Artificial Sequence: Synthetic oligonucleotide
cugugcuuguugguuaaag

SEQ ID NO: 2494215 - RNA, 19 nt, Artificial Sequence
  Description of Artificial Sequence: Synthetic oligonucleotide
acaguaagcccugugcaaa

SEQ ID NO: 2494216 - RNA, 19 nt, Artificial Sequence
  Description of Artificial Sequence: Synthetic oligonucleotide
agguagagcauuucuccuu

SEQ ID NO: 2494217 - RNA, 19 nt, Artificial Sequence
  Description of Artificial Sequence: Synthetic oligonucleotide
uuugcccaugugccgcagc

SEQ ID NO: 2494218 - RNA, 19 nt, Artificial Sequence
  Description of Artificial Sequence: Synthetic oligonucleotide
agaaggagauguauggaua

SEQ ID NO: 2494219 - RNA, 19 nt, Artificial Sequence
  Description of Artificial Sequence: Synthetic oligonucleotide
aaggugucccuccguucca

SEQ ID NO: 2494220 - RNA, 19 nt, Artificial Sequence
  Description of Artificial Sequence: Synthetic oligonucleotide
cuugagcugccaacuggug

SEQ ID NO: 2494221 - RNA, 19 nt, Artificial Sequence
  Description of Artificial Sequence: Synthetic oligonucleotide
gacaaacagacaaaguauu

SEQ ID NO: 2494222 - RNA, 19 nt, Artificial Sequence
  Description of Artificial Sequence: Synthetic oligonucleotide
ccuuacuugaaucccagga

SEQ ID NO: 2494223 - RNA, 19 nt, Artificial Sequence
  Description of Artificial Sequence: Synthetic oligonucleotide
gacagcgcacuuucucgac

SEQ ID NO: 2494224 - RNA, 19 nt, Artificial Sequence
  Description of Artificial Sequence: Synthetic oligonucleotide
caaaggugucccuccguuc

SEQ ID NO: 2494225 - RNA, 19 nt, Artificial Sequence
  Description of Artificial Sequence: Synthetic oligonucleotide
caucaacuccacagucaag

SEQ ID NO: 2494226 - RNA, 19 nt, Artificial Sequence
  Description of Artificial Sequence: Synthetic oligonucleotide
caucauacuguauacuuuu

SEQ ID NO: 2494227 - RNA, 19 nt, Artificial Sequence
  Description of Artificial Sequence: Synthetic oligonucleotide
ugacuguuuuauggggaga

SEQ ID NO: 2494228 - RNA, 19 nt, Artificial Sequence
  Description of Artificial Sequence: Synthetic oligonucleotide
agacuuacaguaagcccug

SEQ ID NO: 2494229 - RNA, 19 nt, Artificial Sequence
  Description of Artificial Sequence: Synthetic oligonucleotide
cuguaccauaaaauuuaca

SEQ ID NO: 2494230 - RNA, 19 nt, Artificial Sequence
  Description of Artificial Sequence: Synthetic oligonucleotide
agacacauaaccaccugua

SEQ ID NO: 2494231 - RNA, 19 nt, Artificial Sequence
  Description of Artificial Sequence: Synthetic oligonucleotide
auacgaguagccagguaga

SEQ ID NO: 2494232 - RNA, 19 nt, Artificial Sequence
  Description of Artificial Sequence: Synthetic oligonucleotide
acucuaccacagcuauuug

SEQ ID NO: 2494233 - RNA, 19 nt, Artificial Sequence
  Description of Artificial Sequence: Synthetic oligonucleotide
gauauugcacucagcuuua

SEQ ID NO: 2494234 - RNA, 19 nt, Artificial Sequence
  Description of Artificial Sequence: Synthetic oligonucleotide
agcaaaggugucccuccgu

SEQ ID NO: 2494235 - RNA, 19 nt, Artificial Sequence
  Description of Artificial Sequence: Synthetic oligonucleotide
ccauaaaauuuacaugcca

SEQ ID NO: 2494236 - RNA, 19 nt, Artificial Sequence
  Description of Artificial Sequence: Synthetic oligonucleotide
gcugccaacuggugaacag

SEQ ID NO: 2494237 - RNA, 19 nt, Artificial Sequence
  Description of Artificial Sequence: Synthetic oligonucleotide
cauccgugugauugauaac

SEQ ID NO: 2494238 - RNA, 19 nt, Artificial Sequence
  Description of Artificial Sequence: Synthetic oligonucleotide
uuccagucauacucauuua

SEQ ID NO: 2494239 - RNA, 19 nt, Artificial Sequence
  Description of Artificial Sequence: Synthetic oligonucleotide
guggaauuucucaaagugu

SEQ ID NO: 2494240 - RNA, 19 nt, Artificial Sequence
  Description of Artificial Sequence: Synthetic oligonucleotide
acuggugaacagacaaaga

SEQ ID NO: 2494241 - RNA, 19 nt, Artificial Sequence
  Description of Artificial Sequence: Synthetic oligonucleotide
gguuaaaguaguugacugu

SEQ ID NO: 2494242 - RNA, 19 nt, Artificial Sequence
  Description of Artificial Sequence: Synthetic oligonucleotide
cagucauacucauuuacau

SEQ ID NO: 2494243 - RNA, 19 nt, Artificial Sequence
  Description of Artificial Sequence: Synthetic oligonucleotide
ccaacuggugaacagacaa

SEQ ID NO: 2494244 - RNA, 19 nt, Artificial Sequence
  Description of Artificial Sequence: Synthetic oligonucleotide
aguaagcccugugcaaagu

SEQ ID NO: 2494245 - RNA, 19 nt, Artificial Sequence
  Description of Artificial Sequence: Synthetic oligonucleotide
uucauccgugugauugaua

SEQ ID NO: 2494246 - RNA, 19 nt, Artificial Sequence
  Description of Artificial Sequence: Synthetic oligonucleotide
caucaggggaguaaauccu

SEQ ID NO: 2494247 - RNA, 19 nt, Artificial Sequence
  Description of Artificial Sequence: Synthetic oligonucleotide
gcacucagcuuuaaauaag

SEQ ID NO: 2494248 - RNA, 19 nt, Artificial Sequence
  Description of Artificial Sequence: Synthetic oligonucleotide
uuuucccauggacggcaua

SEQ ID NO: 2494249 - RNA, 19 nt, Artificial Sequence
  Description of Artificial Sequence: Synthetic oligonucleotide
cguguagccuuuacuacag

SEQ ID NO: 2494250 - RNA, 19 nt, Artificial Sequence
  Description of Artificial Sequence: Synthetic oligonucleotide
augccuuacuugaauccca

SEQ ID NO: 2494251 - RNA, 19 nt, Artificial Sequence
  Description of Artificial Sequence: Synthetic oligonucleotide
gccgcagcccacaucaggg

SEQ ID NO: 2494252 - RNA, 19 nt, Artificial Sequence
  Description of Artificial Sequence: Synthetic oligonucleotide
ccagucauacucauuuaca

SEQ ID NO: 2494253 - RNA, 19 nt, Artificial Sequence
  Description of Artificial Sequence: Synthetic oligonucleotide
uaaccaccuguaccauaaa

SEQ ID NO: 2494254 - RNA, 19 nt, Artificial Sequence
  Description of Artificial Sequence: Synthetic oligonucleotide
augugccgcagcccacauc

SEQ ID NO: 2494255 - RNA, 19 nt, Artificial Sequence
  Description of Artificial Sequence: Synthetic oligonucleotide
cauuuacaucaacuccaca

SEQ ID NO: 2494256 - RNA, 19 nt, Artificial Sequence
  Description of Artificial Sequence: Synthetic oligonucleotide
ugcuaacagagguguggua

SEQ ID NO: 2494257 - RNA, 19 nt, Artificial Sequence
  Description of Artificial Sequence: Synthetic oligonucleotide
caacuggugaacagacaaa

SEQ ID NO: 2494258 - RNA, 19 nt, Artificial Sequence
  Description of Artificial Sequence: Synthetic oligonucleotide
uuccccugugcuuguuggu

SEQ ID NO: 2494259 - RNA, 19 nt, Artificial Sequence
  Description of Artificial Sequence: Synthetic oligonucleotide
aguagccagguagagcauu

SEQ ID NO: 2494260 - RNA, 19 nt, Artificial Sequence
  Description of Artificial Sequence: Synthetic oligonucleotide
ggaacucuaccacagcuau

SEQ ID NO: 2494261 - RNA, 19 nt, Artificial Sequence
  Description of Artificial Sequence: Synthetic oligonucleotide
cauggacggcauaaagcaa

SEQ ID NO: 2494262 - RNA, 19 nt, Artificial Sequence
  Description of Artificial Sequence: Synthetic oligonucleotide
aauauccguguagccuuua

SEQ ID NO: 2494263 - RNA, 19 nt, Artificial Sequence
  Description of Artificial Sequence: Synthetic oligonucleotide
gauaaacaggguggaauuu

SEQ ID NO: 2494264 - RNA, 19 nt, Artificial Sequence
  Description of Artificial Sequence: Synthetic oligonucleotide
gccuuacuugaaucccagg

SEQ ID NO: 2494265 - RNA, 19 nt, Artificial Sequence
  Description of Artificial Sequence: Synthetic oligonucleotide
cauaaccaccuguaccaua

SEQ ID NO: 2494266 - RNA, 19 nt, Artificial Sequence
  Description of Artificial Sequence: Synthetic oligonucleotide
gcauuuugacaauauccgu

SEQ ID NO: 2494267 - RNA, 19 nt, Artificial Sequence
  Description of Artificial Sequence: Synthetic oligonucleotide
cuguuuuauggggagaaau

SEQ ID NO: 2494268 - RNA, 19 nt, Artificial Sequence
  Description of Artificial Sequence: Synthetic oligonucleotide
caccuguaccauaaaauuu

SEQ ID NO: 2494269 - RNA, 19 nt, Artificial Sequence
  Description of Artificial Sequence: Synthetic oligonucleotide
acauaaccaccuguaccau

SEQ ID NO: 2494270 - RNA, 19 nt, Artificial Sequence
  Description of Artificial Sequence: Synthetic oligonucleotide
aucaggggaguaaauccuu

SEQ ID NO: 2494271 - RNA, 19 nt, Artificial Sequence
  Description of Artificial Sequence: Synthetic oligonucleotide
ggacggcauaaagcaaagg

SEQ ID NO: 2494272 - RNA, 19 nt, Artificial Sequence
  Description of Artificial Sequence: Synthetic oligonucleotide
uucccauggacggcauaaa

SEQ ID NO: 2494273 - RNA, 19 nt, Artificial Sequence
  Description of Artificial Sequence: Synthetic oligonucleotide
agccuuuacuacaggcuaa

SEQ ID NO: 2494274 - RNA, 19 nt, Artificial Sequence
  Description of Artificial Sequence: Synthetic oligonucleotide
cagguagagcauuucuccu

SEQ ID NO: 2494275 - RNA, 19 nt, Artificial Sequence
  Description of Artificial Sequence: Synthetic oligonucleotide
cgugugauugauaacauuu

SEQ ID NO: 2494276 - RNA, 19 nt, Artificial Sequence
  Description of Artificial Sequence: Synthetic oligonucleotide
ccguguagccuuuacuaca

SEQ ID NO: 2494277 - RNA, 19 nt, Artificial Sequence
  Description of Artificial Sequence: Synthetic oligonucleotide
gccagguagagcauuucuc

SEQ ID NO: 2494278 - RNA, 19 nt, Artificial Sequence
  Description of Artificial Sequence: Synthetic oligonucleotide
cuuguugguuaaaguaguu

SEQ ID NO: 2494279 - RNA, 19 nt, Artificial Sequence
  Description of Artificial Sequence: Synthetic oligonucleotide
gguguagacaugccuuacu

SEQ ID NO: 2494280 - RNA, 19 nt, Artificial Sequence
  Description of Artificial Sequence: Synthetic oligonucleotide
acaugccauaaaacauuaa

SEQ ID NO: 2494281 - RNA, 19 nt, Artificial Sequence
  Description of Artificial Sequence: Synthetic oligonucleotide
caggggaguaaauccuucu

SEQ ID NO: 2494282 - RNA, 19 nt, Artificial Sequence
  Description of Artificial Sequence: Synthetic oligonucleotide
gugugauugauaacauuuu

SEQ ID NO: 2494283 - RNA, 19 nt, Artificial Sequence
  Description of Artificial Sequence: Synthetic oligonucleotide
ggaguaaauccuucuucau

SEQ ID NO: 2494284 - RNA, 19 nt, Artificial Sequence
  Description of Artificial Sequence: Synthetic oligonucleotide
cagcgcacuuucucgaccu

SEQ ID NO: 2494285 - RNA, 19 nt, Artificial Sequence
  Description of Artificial Sequence: Synthetic oligonucleotide
gggguguagacaugccuua

SEQ ID NO: 2494286 - RNA, 19 nt, Artificial Sequence
  Description of Artificial Sequence: Synthetic oligonucleotide
caauacgaguagccaggua

SEQ ID NO: 2494287 - RNA, 19 nt, Artificial Sequence
  Description of Artificial Sequence: Synthetic oligonucleotide
cccuccguuccagucauac

SEQ ID NO: 2494288 - RNA, 19 nt, Artificial Sequence
  Description of Artificial Sequence: Synthetic oligonucleotide
ggguguagacaugccuuac

SEQ ID NO: 2494289 - RNA, 19 nt, Artificial Sequence
  Description of Artificial Sequence: Synthetic oligonucleotide
cacagcuauuugcccaugu

SEQ ID NO: 2494290 - RNA, 19 nt, Artificial Sequence
  Description of Artificial Sequence: Synthetic oligonucleotide
agcccugugcaaagucaga

SEQ ID NO: 2494291 - RNA, 19 nt, Artificial Sequence
  Description of Artificial Sequence: Synthetic oligonucleotide
ccgcagcccacaucagggg

SEQ ID NO: 2494292 - RNA, 19 nt, Artificial Sequence
  Description of Artificial Sequence: Synthetic oligonucleotide
ccuuuacuacaggcuaaug

SEQ ID NO: 2494293 - RNA, 19 nt, Artificial Sequence
  Description of Artificial Sequence: Synthetic oligonucleotide
agcgcacuuucucgaccuu

SEQ ID NO: 2494294 - RNA, 19 nt, Artificial Sequence
  Description of Artificial Sequence: Synthetic oligonucleotide
ccuugagcugccaacuggu

SEQ ID NO: 2494295 - RNA, 19 nt, Artificial Sequence
  Description of Artificial Sequence: Synthetic oligonucleotide
gugucaaauuuugguacuu

SEQ ID NO: 2494296 - RNA, 19 nt, Artificial Sequence
  Description of Artificial Sequence: Synthetic oligonucleotide
gcaaaggugucccuccguu

SEQ ID NO: 2494297 - RNA, 19 nt, Artificial Sequence
  Description of Artificial Sequence: Synthetic oligonucleotide
guagccagguagagcauuu

SEQ ID NO: 2494298 - RNA, 19 nt, Artificial Sequence
  Description of Artificial Sequence: Synthetic oligonucleotide
gugugguagagaccucauu

SEQ ID NO: 2494299 - RNA, 19 nt, Artificial Sequence
  Description of Artificial Sequence: Synthetic oligonucleotide
ccaucauacuguauacuuu

SEQ ID NO: 2494300 - RNA, 19 nt, Artificial Sequence
  Description of Artificial Sequence: Synthetic oligonucleotide
gacuuacaguaagcccugu

SEQ ID NO: 2494301 - RNA, 19 nt, Artificial Sequence
  Description of Artificial Sequence: Synthetic oligonucleotide
caauauccguguagccuuu

SEQ ID NO: 2494302 - RNA, 19 nt, Artificial Sequence
  Description of Artificial Sequence: Synthetic oligonucleotide
cuucauccgugugauugau

SEQ ID NO: 2494303 - RNA, 19 nt, Artificial Sequence
  Description of Artificial Sequence: Synthetic oligonucleotide
cccacaucaggggaguaaa

SEQ ID NO: 2494304 - RNA, 19 nt, Artificial Sequence
  Description of Artificial Sequence: Synthetic oligonucleotide
gaacucuaccacagcuauu

SEQ ID NO: 2494305 - RNA, 19 nt, Artificial Sequence
  Description of Artificial Sequence: Synthetic oligonucleotide
gugccgcagcccacaucag

SEQ ID NO: 2494306 - RNA, 19 nt, Artificial Sequence
  Description of Artificial Sequence: Synthetic oligonucleotide
gaguagccagguagagcau

SEQ ID NO: 2494307 - RNA, 19 nt, Artificial Sequence
  Description of Artificial Sequence: Synthetic oligonucleotide
cccugugcuuguugguuaa

SEQ ID NO: 2494308 - RNA, 19 nt, Artificial Sequence
  Description of Artificial Sequence: Synthetic oligonucleotide
gccuuuacuacaggcuaau

SEQ ID NO: 2494309 - RNA, 19 nt, Artificial Sequence
  Description of Artificial Sequence: Synthetic oligonucleotide
ggugugguagagaccucau

SEQ ID NO: 2494310 - RNA, 19 nt, Artificial Sequence
  Description of Artificial Sequence: Synthetic oligonucleotide
ggcuaaugacagcgcacuu

SEQ ID NO: 2494311 - RNA, 19 nt, Artificial Sequence
  Description of Artificial Sequence: Synthetic oligonucleotide
ccccugugcuuguugguua

SEQ ID NO: 2494312 - RNA, 19 nt, Artificial Sequence
  Description of Artificial Sequence: Synthetic oligonucleotide
cagcccacaucaggggagu

SEQ ID NO: 2494313 - RNA, 19 nt, Artificial Sequence
  Description of Artificial Sequence: Synthetic oligonucleotide
cacagucaagcagcauuuu

SEQ ID NO: 2494314 - RNA, 19 nt, Artificial Sequence
  Description of Artificial Sequence: Synthetic oligonucleotide
ccgugugauugauaacauu

SEQ ID NO: 2494315 - RNA, 19 nt, Artificial Sequence
  Description of Artificial Sequence: Synthetic oligonucleotide
ccacaucaggggaguaaau

SEQ ID NO: 2494316 - RNA, 19 nt, Artificial Sequence
  Description of Artificial Sequence: Synthetic oligonucleotide
ccguuccagucauacucau

SEQ ID NO: 2494317 - RNA, 19 nt, Artificial Sequence
  Description of Artificial Sequence: Synthetic oligonucleotide
gcgcacuuucucgaccuuu

SEQ ID NO: 2494318 - RNA, 19 nt, Artificial Sequence
  Description of Artificial Sequence: Synthetic oligonucleotide
aguaacgacagccauaucg

SEQ ID NO: 2494319 - RNA, 19 nt, Artificial Sequence
  Description of Artificial Sequence: Synthetic oligonucleotide
uguccagucauccaaauag

SEQ ID NO: 2494320 - RNA, 19 nt, Artificial Sequence
  Description of Artificial Sequence: Synthetic oligonucleotide
uuuugaauaaaacacugcu

SEQ ID NO: 2494321 - RNA, 19 nt, Artificial Sequence
  Description of Artificial Sequence: Synthetic oligonucleotide
uuauaggucgaccauauug

SEQ ID NO: 2494322 - RNA, 19 nt, Artificial Sequence
  Description of Artificial Sequence: Synthetic oligonucleotide
auaacuguugcugucaucc

SEQ ID NO: 2494323 - RNA, 19 nt, Artificial Sequence
  Description of Artificial Sequence: Synthetic oligonucleotide
auugaugugugucagucgg

SEQ ID NO: 2494324 - RNA, 19 nt, Artificial Sequence
  Description of Artificial Sequence: Synthetic oligonucleotide
aaagaggugaagugaaaug

SEQ ID NO: 2494325 - RNA, 19 nt, Artificial Sequence
  Description of Artificial Sequence: Synthetic oligonucleotide
aauaguuguucugacuugg

SEQ ID NO: 2494326 - RNA, 19 nt, Artificial Sequence
  Description of Artificial Sequence: Synthetic oligonucleotide
uuuguccacuuauaggucg

SEQ ID NO: 2494327 - RNA, 19 nt, Artificial Sequence
  Description of Artificial Sequence: Synthetic oligonucleotide
agcgauaagacagccaucc

SEQ ID NO: 2494328 - RNA, 19 nt, Artificial Sequence
  Description of Artificial Sequence: Synthetic oligonucleotide
aacaacagaagcgauaaga

SEQ ID NO: 2494329 - RNA, 19 nt, Artificial Sequence
  Description of Artificial Sequence: Synthetic oligonucleotide
ucuacaaacacuguguggu

SEQ ID NO: 2494330 - RNA, 19 nt, Artificial Sequence
  Description of Artificial Sequence: Synthetic oligonucleotide
aguaagggccauuacagag

SEQ ID NO: 2494331 - RNA, 19 nt, Artificial Sequence
  Description of Artificial Sequence: Synthetic oligonucleotide
uucaguggaagaauguuug

SEQ ID NO: 2494332 - RNA, 19 nt, Artificial Sequence
  Description of Artificial Sequence: Synthetic oligonucleotide
uuugaaucucacuucacca

SEQ ID NO: 2494333 - RNA, 19 nt, Artificial Sequence
  Description of Artificial Sequence: Synthetic oligonucleotide
uucaccaucucucacccag

SEQ ID NO: 2494334 - RNA, 19 nt, Artificial Sequence
  Description of Artificial Sequence: Synthetic oligonucleotide
gaugucuacaaacacugug

SEQ ID NO: 2494335 - RNA, 19 nt, Artificial Sequence
  Description of Artificial Sequence: Synthetic oligonucleotide
aauagucgccuucaccuuc

SEQ ID NO: 2494336 - RNA, 19 nt, Artificial Sequence
  Description of Artificial Sequence: Synthetic oligonucleotide
aacuguugcugucauccac

SEQ ID NO: 2494337 - RNA, 19 nt, Artificial Sequence
  Description of Artificial Sequence: Synthetic oligonucleotide
uucaacaacucacugggcu

SEQ ID NO: 2494338 - RNA, 19 nt, Artificial Sequence
  Description of Artificial Sequence: Synthetic oligonucleotide
agaggauuuacagucauag

SEQ ID NO: 2494339 - RNA, 19 nt, Artificial Sequence
  Description of Artificial Sequence: Synthetic oligonucleotide
cagucauccaaauagucgc

SEQ ID NO: 2494340 - RNA, 19 nt, Artificial Sequence
  Description of Artificial Sequence: Synthetic oligonucleotide
uauuguucuccugugacag

SEQ ID NO: 2494341 - RNA, 19 nt, Artificial Sequence
  Description of Artificial Sequence: Synthetic oligonucleotide
ugcaugauggacuucugcc

SEQ ID NO: 2494342 - RNA, 19 nt, Artificial Sequence
  Description of Artificial Sequence: Synthetic oligonucleotide
acagucauagcucugcaug

SEQ ID NO: 2494343 - RNA, 19 nt, Artificial Sequence
  Description of Artificial Sequence: Synthetic oligonucleotide
uggacuucugccuucaaca

SEQ ID NO: 2494344 - RNA, 19 nt, Artificial Sequence
  Description of Artificial Sequence: Synthetic oligonucleotide
ucuccaauaacuguugcug

SEQ ID NO: 2494345 - RNA, 19 nt, Artificial Sequence
  Description of Artificial Sequence: Synthetic oligonucleotide
cagaugucuacaaacacug

SEQ ID NO: 2494346 - RNA, 19 nt, Artificial Sequence
  Description of Artificial Sequence: Synthetic oligonucleotide
cacuaccugacccauagcg

SEQ ID NO: 2494347 - RNA, 19 nt, Artificial Sequence
  Description of Artificial Sequence: Synthetic oligonucleotide
aagacagccauccuggauu

SEQ ID NO: 2494348 - RNA, 19 nt, Artificial Sequence
  Description of Artificial Sequence: Synthetic oligonucleotide
aagaauguuugaaucucac

SEQ ID NO: 2494349 - RNA, 19 nt, Artificial Sequence
  Description of Artificial Sequence: Synthetic oligonucleotide
acgacagccauaucggacg

SEQ ID NO: 2494350 - RNA, 19 nt, Artificial Sequence
  Description of Artificial Sequence: Synthetic oligonucleotide
uuuacagucauagcucugc

SEQ ID NO: 2494351 - RNA, 19 nt, Artificial Sequence
  Description of Artificial Sequence: Synthetic oligonucleotide
acaacagaagcgauaagac

SEQ ID NO: 2494352 - RNA, 19 nt, Artificial Sequence
  Description of Artificial Sequence: Synthetic oligonucleotide
uccacuuauaggucgacca

SEQ ID NO: 2494353 - RNA, 19 nt, Artificial Sequence
  Description of Artificial Sequence: Synthetic oligonucleotide
uauucuccaauaacuguug

SEQ ID NO: 2494354 - RNA, 19 nt, Artificial Sequence
  Description of Artificial Sequence: Synthetic oligonucleotide
aauaacuguugcugucauc

SEQ ID NO: 2494355 - RNA, 19 nt, Artificial Sequence
  Description of Artificial Sequence: Synthetic oligonucleotide
aggucgaccauauuguucu

SEQ ID NO: 2494356 - RNA, 19 nt, Artificial Sequence
  Description of Artificial Sequence: Synthetic oligonucleotide
cauaaagaugccuuccaug

SEQ ID NO: 2494357 - RNA, 19 nt, Artificial Sequence
  Description of Artificial Sequence: Synthetic oligonucleotide
aaucauccaagaaaauuug

SEQ ID NO: 2494358 - RNA, 19 nt, Artificial Sequence
  Description of Artificial Sequence: Synthetic oligonucleotide
uuucgaccaguauugaugu

SEQ ID NO: 2494359 - RNA, 19 nt, Artificial Sequence
  Description of Artificial Sequence: Synthetic oligonucleotide
agcagcaacagaugucuac

SEQ ID NO: 2494360 - RNA, 19 nt, Artificial Sequence
  Description of Artificial Sequence: Synthetic oligonucleotide
ugacccauagcgcacguca

SEQ ID NO: 2494361 - RNA, 19 nt, Artificial Sequence
  Description of Artificial Sequence: Synthetic oligonucleotide
guaacgacagccauaucgg

SEQ ID NO: 2494362 - RNA, 19 nt, Artificial Sequence
  Description of Artificial Sequence: Synthetic oligonucleotide
uuacaccugucacugacug

SEQ ID NO: 2494363 - RNA, 19 nt, Artificial Sequence
  Description of Artificial Sequence: Synthetic oligonucleotide
auaaaacacugcucagaac

SEQ ID NO: 2494364 - RNA, 19 nt, Artificial Sequence
  Description of Artificial Sequence: Synthetic oligonucleotide
cauauuguucuccugugac

SEQ ID NO: 2494365 - RNA, 19 nt, Artificial Sequence
  Description of Artificial Sequence: Synthetic oligonucleotide
accaguauugauguguguc

SEQ ID NO: 2494366 - RNA, 19 nt, Artificial Sequence
  Description of Artificial Sequence: Synthetic oligonucleotide
cucucacccaguaagggcc

SEQ ID NO: 2494367 - RNA, 19 nt, Artificial Sequence
  Description of Artificial Sequence: Synthetic oligonucleotide
gucaugagagugcagucgg

SEQ ID NO: 2494368 - RNA, 19 nt, Artificial Sequence
  Description of Artificial Sequence: Synthetic oligonucleotide
aacgacagccauaucggac

SEQ ID NO: 2494369 - RNA, 19 nt, Artificial Sequence
  Description of Artificial Sequence: Synthetic oligonucleotide
agugcagucggacauugug

SEQ ID NO: 2494370 - RNA, 19 nt, Artificial Sequence
  Description of Artificial Sequence: Synthetic oligonucleotide
gacauuguggcgcguauug

SEQ ID NO: 2494371 - RNA, 19 nt, Artificial Sequence
  Description of Artificial Sequence: Synthetic oligonucleotide
gagguuucgaccaguauug

SEQ ID NO: 2494372 - RNA, 19 nt, Artificial Sequence
  Description of Artificial Sequence: Synthetic oligonucleotide
aaacacuguguggugacag

SEQ ID NO: 2494373 - RNA, 19 nt, Artificial Sequence
  Description of Artificial Sequence: Synthetic oligonucleotide
auaucggacgcucccacag

SEQ ID NO: 2494374 - RNA, 19 nt, Artificial Sequence
  Description of Artificial Sequence: Synthetic oligonucleotide
gauucgacagccccuaauc

SEQ ID NO: 2494375 - RNA, 19 nt, Artificial Sequence
  Description of Artificial Sequence: Synthetic oligonucleotide
auguuugaaucucacuuca

SEQ ID NO: 2494376 - RNA, 19 nt, Artificial Sequence
  Description of Artificial Sequence: Synthetic oligonucleotide
auggacuucugccuucaac

SEQ ID NO: 2494377 - RNA, 19 nt, Artificial Sequence
  Description of Artificial Sequence: Synthetic oligonucleotide
agugaaaugguggcugugg

SEQ ID NO: 2494378 - RNA, 19 nt, Artificial Sequence
  Description of Artificial Sequence: Synthetic oligonucleotide
ugcagucggacauuguggc

SEQ ID NO: 2494379 - RNA, 19 nt, Artificial Sequence
  Description of Artificial Sequence: Synthetic oligonucleotide
gaucccacgguaaagcagc

SEQ ID NO: 2494380 - RNA, 19 nt, Artificial Sequence
  Description of Artificial Sequence: Synthetic oligonucleotide
agccauaucggacgcuccc

SEQ ID NO: 2494381 - RNA, 19 nt, Artificial Sequence
  Description of Artificial Sequence: Synthetic oligonucleotide
cauaaaccacccaacaaca

SEQ ID NO: 2494382 - RNA, 19 nt, Artificial Sequence
  Description of Artificial Sequence: Synthetic oligonucleotide
caaauagucgccuucaccu

SEQ ID NO: 2494383 - RNA, 19 nt, Artificial Sequence
  Description of Artificial Sequence: Synthetic oligonucleotide
agagguuacaccugucacu

SEQ ID NO: 2494384 - RNA, 19 nt, Artificial Sequence
  Description of Artificial Sequence: Synthetic oligonucleotide
cauuguggcgcguauugag

SEQ ID NO: 2494385 - RNA, 19 nt, Artificial Sequence
  Description of Artificial Sequence: Synthetic oligonucleotide
uccuggauucgacagcccc

SEQ ID NO: 2494386 - RNA, 19 nt, Artificial Sequence
  Description of Artificial Sequence: Synthetic oligonucleotide
acuaccugacccauagcgc

SEQ ID NO: 2494387 - RNA, 19 nt, Artificial Sequence
  Description of Artificial Sequence: Synthetic oligonucleotide
agaauguuugaaucucacu

SEQ ID NO: 2494388 - RNA, 19 nt, Artificial Sequence
  Description of Artificial Sequence: Synthetic oligonucleotide
gaagcgauaagacagccau

SEQ ID NO: 2494389 - RNA, 19 nt, Artificial Sequence
  Description of Artificial Sequence: Synthetic oligonucleotide
cacuucaccaucucucacc

SEQ ID NO: 2494390 - RNA, 19 nt, Artificial Sequence
  Description of Artificial Sequence: Synthetic oligonucleotide
agggaucccacgguaaagc

SEQ ID NO: 2494391 - RNA, 19 nt, Artificial Sequence
  Description of Artificial Sequence: Synthetic oligonucleotide
cugguuuccagaaagaggu

SEQ ID NO: 2494392 - RNA, 19 nt, Artificial Sequence
  Description of Artificial Sequence: Synthetic oligonucleotide
aggugaagugaaauggugg

SEQ ID NO: 2494393 - RNA, 19 nt, Artificial Sequence
  Description of Artificial Sequence: Synthetic oligonucleotide
agucggaugggcuggccac

SEQ ID NO: 2494394 - RNA, 19 nt, Artificial Sequence
  Description of Artificial Sequence: Synthetic oligonucleotide
gcaacagaugucuacaaac

SEQ ID NO: 2494395 - RNA, 19 nt, Artificial Sequence
  Description of Artificial Sequence: Synthetic oligonucleotide
ucgaccaguauugaugugu

SEQ ID NO: 2494396 - RNA, 19 nt, Artificial Sequence
  Description of Artificial Sequence: Synthetic oligonucleotide
cugacugcugcccacuacc

SEQ ID NO: 2494397 - RNA, 19 nt, Artificial Sequence
  Description of Artificial Sequence: Synthetic oligonucleotide
acugcugcccacuaccuga

SEQ ID NO: 2494398 - RNA, 19 nt, Artificial Sequence
  Description of Artificial Sequence: Synthetic oligonucleotide
acuucugccuucaacaacu

SEQ ID NO: 2494399 - RNA, 19 nt, Artificial Sequence
  Description of Artificial Sequence: Synthetic oligonucleotide
uucuccaauaacuguugcu

SEQ ID NO: 2494400 - RNA, 19 nt, Artificial Sequence
  Description of Artificial Sequence: Synthetic oligonucleotide
aucggacgcucccacagcg

SEQ ID NO: 2494401 - RNA, 19 nt, Artificial Sequence
  Description of Artificial Sequence: Synthetic oligonucleotide
auagcgcacgucaugagag

SEQ ID NO: 2494402 - RNA, 19 nt, Artificial Sequence
  Description of Artificial Sequence: Synthetic oligonucleotide
caucucucacccaguaagg

SEQ ID NO: 2494403 - RNA, 19 nt, Artificial Sequence
  Description of Artificial Sequence: Synthetic oligonucleotide
uuacagagcacuguccagu

SEQ ID NO: 2494404 - RNA, 19 nt, Artificial Sequence
  Description of Artificial Sequence: Synthetic oligonucleotide
ccaguaagggccauuacag

SEQ ID NO: 2494405 - RNA, 19 nt, Artificial Sequence
  Description of Artificial Sequence: Synthetic oligonucleotide
aucauccaagaaaauuugg

SEQ ID NO: 2494406 - RNA, 19 nt, Artificial Sequence
  Description of Artificial Sequence: Synthetic oligonucleotide
ucgaccauauuguucuccu

SEQ ID NO: 2494407 - RNA, 19 nt, Artificial Sequence
  Description of Artificial Sequence: Synthetic oligonucleotide
ccauaaaccacccaacaac

SEQ ID NO: 2494408 - RNA, 19 nt, Artificial Sequence
  Description of Artificial Sequence: Synthetic oligonucleotide
accauauuguucuccugug

SEQ ID NO: 2494409 - RNA, 19 nt, Artificial Sequence
  Description of Artificial Sequence: Synthetic oligonucleotide
aguggcucagaggauuuac

SEQ ID NO: 2494410 - RNA, 19 nt, Artificial Sequence
  Description of Artificial Sequence: Synthetic oligonucleotide
cauuacagagcacugucca

SEQ ID NO: 2494411 - RNA, 19 nt, Artificial Sequence
  Description of Artificial Sequence: Synthetic oligonucleotide
guauugaugugugucaguc

SEQ ID NO: 2494412 - RNA, 19 nt, Artificial Sequence
  Description of Artificial Sequence: Synthetic oligonucleotide
acagaugucuacaaacacu

SEQ ID NO: 2494413 - RNA, 19 nt, Artificial Sequence
  Description of Artificial Sequence: Synthetic oligonucleotide
caacagaugucuacaaaca

SEQ ID NO: 2494414 - RNA, 19 nt, Artificial Sequence
  Description of Artificial Sequence: Synthetic oligonucleotide
uuacagucauagcucugca

SEQ ID NO: 2494415 - RNA, 19 nt, Artificial Sequence
  Description of Artificial Sequence: Synthetic oligonucleotide
augucuacaaacacugugu

SEQ ID NO: 2494416 - RNA, 19 nt, Artificial Sequence
  Description of Artificial Sequence: Synthetic oligonucleotide
caauaguuguucugacuug

SEQ ID NO: 2494417 - RNA, 19 nt, Artificial Sequence
  Description of Artificial Sequence: Synthetic oligonucleotide
agucauccaaauagucgcc

SEQ ID NO: 2494418 - RNA, 19 nt, Artificial Sequence
  Description of Artificial Sequence: Synthetic oligonucleotide
ucgacagccccuaaucauc

SEQ ID NO: 2494419 - RNA, 19 nt, Artificial Sequence
  Description of Artificial Sequence: Synthetic oligonucleotide
gaggugaagugaaauggug

SEQ ID NO: 2494420 - RNA, 19 nt, Artificial Sequence
  Description of Artificial Sequence: Synthetic oligonucleotide
aaauagucgccuucaccuu

SEQ ID NO: 2494421 - RNA, 19 nt, Artificial Sequence
  Description of Artificial Sequence: Synthetic oligonucleotide
aacacuguguggugacagu

SEQ ID NO: 2494422 - RNA, 19 nt, Artificial Sequence
  Description of Artificial Sequence: Synthetic oligonucleotide
auucgacagccccuaauca

SEQ ID NO: 2494423 - RNA, 19 nt, Artificial Sequence
  Description of Artificial Sequence: Synthetic oligonucleotide
acagccauaucggacgcuc

SEQ ID NO: 2494424 - RNA, 19 nt, Artificial Sequence
  Description of Artificial Sequence: Synthetic oligonucleotide
ugggccauaccauguaccu

SEQ ID NO: 2494425 - RNA, 19 nt, Artificial Sequence
  Description of Artificial Sequence: Synthetic oligonucleotide
auaguuguucugacuuggc

SEQ ID NO: 2494426 - RNA, 19 nt, Artificial Sequence
  Description of Artificial Sequence: Synthetic oligonucleotide
acugacugcugcccacuac

SEQ ID NO: 2494427 - RNA, 19 nt, Artificial Sequence
  Description of Artificial Sequence: Synthetic oligonucleotide
cagcgcuccauaaaccacc

SEQ ID NO: 2494428 - RNA, 19 nt, Artificial Sequence
  Description of Artificial Sequence: Synthetic oligonucleotide
uaggucgaccauauuguuc

SEQ ID NO: 2494429 - RNA, 19 nt, Artificial Sequence
  Description of Artificial Sequence: Synthetic oligonucleotide
acgucaugagagugcaguc

SEQ ID NO: 2494430 - RNA, 19 nt, Artificial Sequence
  Description of Artificial Sequence: Synthetic oligonucleotide
uguggcgcguauugaguag

SEQ ID NO: 2494431 - RNA, 19 nt, Artificial Sequence
  Description of Artificial Sequence: Synthetic oligonucleotide
ugucagucggaugggcugg

SEQ ID NO: 2494432 - RNA, 19 nt, Artificial Sequence
  Description of Artificial Sequence: Synthetic oligonucleotide
ucaacaacucacugggcuu

SEQ ID NO: 2494433 - RNA, 19 nt, Artificial Sequence
  Description of Artificial Sequence: Synthetic oligonucleotide
gccuucaacaacucacugg

SEQ ID NO: 2494434 - RNA, 19 nt, Artificial Sequence
  Description of Artificial Sequence: Synthetic oligonucleotide
auagucgccuucaccuucc

SEQ ID NO: 2494435 - RNA, 19 nt, Artificial Sequence
  Description of Artificial Sequence: Synthetic oligonucleotide
aucucucacccaguaaggg

SEQ ID NO: 2494436 - RNA, 19 nt, Artificial Sequence
  Description of Artificial Sequence: Synthetic oligonucleotide
uaagacagccauccuggau

SEQ ID NO: 2494437 - RNA, 19 nt, Artificial Sequence
  Description of Artificial Sequence: Synthetic oligonucleotide
aguauugaugugugucagu

SEQ ID NO: 2494438 - RNA, 19 nt, Artificial Sequence
  Description of Artificial Sequence: Synthetic oligonucleotide
ccaucucucacccaguaag

SEQ ID NO: 2494439 - RNA, 19 nt, Artificial Sequence
  Description of Artificial Sequence: Synthetic oligonucleotide
cuaccugacccauagcgca

SEQ ID NO: 2494440 - RNA, 19 nt, Artificial Sequence
  Description of Artificial Sequence: Synthetic oligonucleotide
uuccaauaguuguucugac

SEQ ID NO: 2494441 - RNA, 19 nt, Artificial Sequence
  Description of Artificial Sequence: Synthetic oligonucleotide
agagccgcaaguaacgaca

SEQ ID NO: 2494442 - RNA, 19 nt, Artificial Sequence
  Description of Artificial Sequence: Synthetic oligonucleotide
uuguccacuuauaggucga

SEQ ID NO: 2494443 - RNA, 19 nt, Artificial Sequence
  Description of Artificial Sequence: Synthetic oligonucleotide
cagagguuacaccugucac

SEQ ID NO: 2494444 - RNA, 19 nt, Artificial Sequence
  Description of Artificial Sequence: Synthetic oligonucleotide
cugggccauaccauguacc

SEQ ID NO: 2494445 - RNA, 19 nt, Artificial Sequence
  Description of Artificial Sequence: Synthetic oligonucleotide
gaccauauuguucuccugu

SEQ ID NO: 2494446 - RNA, 19 nt, Artificial Sequence
  Description of Artificial Sequence: Synthetic oligonucleotide
cacgguaaagcagcaacag

SEQ ID NO: 2494447 - RNA, 19 nt, Artificial Sequence
  Description of Artificial Sequence: Synthetic oligonucleotide
gacuucugccuucaacaac

SEQ ID NO: 2494448 - RNA, 19 nt, Artificial Sequence
  Description of Artificial Sequence: Synthetic oligonucleotide
agucggacauuguggcgcg

SEQ ID NO: 2494449 - RNA, 19 nt, Artificial Sequence
  Description of Artificial Sequence: Synthetic oligonucleotide
ugugugucagucggauggg

SEQ ID NO: 2494450 - RNA, 19 nt, Artificial Sequence
  Description of Artificial Sequence: Synthetic oligonucleotide
cagucggacauuguggcgc

SEQ ID NO: 2494451 - RNA, 19 nt, Artificial Sequence
  Description of Artificial Sequence: Synthetic oligonucleotide
gacagacaggaguacuuca

SEQ ID NO: 2494452 - RNA, 19 nt, Artificial Sequence
  Description of Artificial Sequence: Synthetic oligonucleotide
acagacaggaguacuucag

SEQ ID NO: 2494453 - RNA, 19 nt, Artificial Sequence
  Description of Artificial Sequence: Synthetic oligonucleotide
augagagugcagucggaca

SEQ ID NO: 2494454 - RNA, 19 nt, Artificial Sequence
  Description of Artificial Sequence: Synthetic oligonucleotide
gugcagucggacauugugg

SEQ ID NO: 2494455 - RNA, 19 nt, Artificial Sequence
  Description of Artificial Sequence: Synthetic oligonucleotide
cuggccacacuugaugggg

SEQ ID NO: 2494456 - RNA, 19 nt, Artificial Sequence
  Description of Artificial Sequence: Synthetic oligonucleotide
auaaaccacccaacaacag

SEQ ID NO: 2494457 - RNA, 19 nt, Artificial Sequence
  Description of Artificial Sequence: Synthetic oligonucleotide
gguuacaccugucacugac

SEQ ID NO: 2494458 - RNA, 19 nt, Artificial Sequence
  Description of Artificial Sequence: Synthetic oligonucleotide
cugcaugauggacuucugc

SEQ ID NO: 2494459 - RNA, 19 nt, Artificial Sequence
  Description of Artificial Sequence: Synthetic oligonucleotide
uaacgacagccauaucgga

SEQ ID NO: 2494460 - RNA, 19 nt, Artificial Sequence
  Description of Artificial Sequence: Synthetic oligonucleotide
guacuucaguggaagaaug

SEQ ID NO: 2494461 - RNA, 19 nt, Artificial Sequence
  Description of Artificial Sequence: Synthetic oligonucleotide
gugucagucggaugggcug

SEQ ID NO: 2494462 - RNA, 19 nt, Artificial Sequence
  Description of Artificial Sequence: Synthetic oligonucleotide
agcaacagaugucuacaaa

SEQ ID NO: 2494463 - RNA, 19 nt, Artificial Sequence
  Description of Artificial Sequence: Synthetic oligonucleotide
acgguaaagcagcaacaga

SEQ ID NO: 2494464 - RNA, 19 nt, Artificial Sequence
  Description of Artificial Sequence: Synthetic oligonucleotide
caguauugaugugugucag

SEQ ID NO: 2494465 - RNA, 19 nt, Artificial Sequence
  Description of Artificial Sequence: Synthetic oligonucleotide
ucaccacagagccgcaagu

SEQ ID NO: 2494466 - RNA, 19 nt, Artificial Sequence
  Description of Artificial Sequence: Synthetic oligonucleotide
uugaugugugucagucgga

SEQ ID NO: 2494467 - RNA, 19 nt, Artificial Sequence
  Description of Artificial Sequence: Synthetic oligonucleotide
uaucggacgcucccacagc

SEQ ID NO: 2494468 - RNA, 19 nt, Artificial Sequence
  Description of Artificial Sequence: Synthetic oligonucleotide
ugaugugugucagucggau

SEQ ID NO: 2494469 - RNA, 19 nt, Artificial Sequence
  Description of Artificial Sequence: Synthetic oligonucleotide
cuucaacaacucacugggc

SEQ ID NO: 2494470 - RNA, 19 nt, Artificial Sequence
  Description of Artificial Sequence: Synthetic oligonucleotide
uacagagcacuguccaguc

SEQ ID NO: 2494471 - RNA, 19 nt, Artificial Sequence
  Description of Artificial Sequence: Synthetic oligonucleotide
aagugaaaugguggcugug

SEQ ID NO: 2494472 - RNA, 19 nt, Artificial Sequence
  Description of Artificial Sequence: Synthetic oligonucleotide
gaguacuucaguggaagaa

SEQ ID NO: 2494473 - RNA, 19 nt, Artificial Sequence
  Description of Artificial Sequence: Synthetic oligonucleotide
aaguaacgacagccauauc

SEQ ID NO: 2494474 - RNA, 19 nt, Artificial Sequence
  Description of Artificial Sequence: Synthetic oligonucleotide
uguucuccugugacagaca

SEQ ID NO: 2494475 - RNA, 19 nt, Artificial Sequence
  Description of Artificial Sequence: Synthetic oligonucleotide
ggaagaauguuugaaucuc

SEQ ID NO: 2494476 - RNA, 19 nt, Artificial Sequence
  Description of Artificial Sequence: Synthetic oligonucleotide
acuuauaggucgaccauau

SEQ ID NO: 2494477 - RNA, 19 nt, Artificial Sequence
  Description of Artificial Sequence: Synthetic oligonucleotide
ggcuggccacacuugaugg

SEQ ID NO: 2494478 - RNA, 19 nt, Artificial Sequence
  Description of Artificial Sequence: Synthetic oligonucleotide
aagcgauaagacagccauc

SEQ ID NO: 2494479 - RNA, 19 nt, Artificial Sequence
  Description of Artificial Sequence: Synthetic oligonucleotide
ucaugagagugcagucgga

SEQ ID NO: 2494480 - RNA, 19 nt, Artificial Sequence
  Description of Artificial Sequence: Synthetic oligonucleotide
uuguggcgcguauugagua

SEQ ID NO: 2494481 - RNA, 19 nt, Artificial Sequence
  Description of Artificial Sequence: Synthetic oligonucleotide
uacaccugucacugacugc

SEQ ID NO: 2494482 - RNA, 19 nt, Artificial Sequence
  Description of Artificial Sequence: Synthetic oligonucleotide
agaggugaagugaaauggu

SEQ ID NO: 2494483 - RNA, 19 nt, Artificial Sequence
  Description of Artificial Sequence: Synthetic oligonucleotide
gccgcaaguaacgacagcc

SEQ ID NO: 2494484 - RNA, 19 nt, Artificial Sequence
  Description of Artificial Sequence: Synthetic oligonucleotide
auccaaauagucgccuuca

SEQ ID NO: 2494485 - RNA, 19 nt, Artificial Sequence
  Description of Artificial Sequence: Synthetic oligonucleotide
agcgcuccauaaaccaccc

SEQ ID NO: 2494486 - RNA, 19 nt, Artificial Sequence
  Description of Artificial Sequence: Synthetic oligonucleotide
agccgcaaguaacgacagc

SEQ ID NO: 2494487 - RNA, 19 nt, Artificial Sequence
  Description of Artificial Sequence: Synthetic oligonucleotide
gguaaagcagcaacagaug

SEQ ID NO: 2494488 - RNA, 19 nt, Artificial Sequence
  Description of Artificial Sequence: Synthetic oligonucleotide
ccaaauagucgccuucacc

SEQ ID NO: 2494489 - RNA, 19 nt, Artificial Sequence
  Description of Artificial Sequence: Synthetic oligonucleotide
cagaagcgauaagacagcc

SEQ ID NO: 2494490 - RNA, 19 nt, Artificial Sequence
  Description of Artificial Sequence: Synthetic oligonucleotide
agcacuguccagucaucca

SEQ ID NO: 2494491 - RNA, 19 nt, Artificial Sequence
  Description of Artificial Sequence: Synthetic oligonucleotide
gaaagaggugaagugaaau

SEQ ID NO: 2494492 - RNA, 19 nt, Artificial Sequence
  Description of Artificial Sequence: Synthetic oligonucleotide
gccauccuggauucgacag

SEQ ID NO: 2494493 - RNA, 19 nt, Artificial Sequence
  Description of Artificial Sequence: Synthetic oligonucleotide
cagccccuaaucauccaag

SEQ ID NO: 2494494 - RNA, 19 nt, Artificial Sequence
  Description of Artificial Sequence: Synthetic oligonucleotide
cauagcgcacgucaugaga

SEQ ID NO: 2494495 - RNA, 19 nt, Artificial Sequence
  Description of Artificial Sequence: Synthetic oligonucleotide
uguucugacuuggcugggc

SEQ ID NO: 2494496 - RNA, 19 nt, Artificial Sequence
  Description of Artificial Sequence: Synthetic oligonucleotide
acccaguaagggccauuac

SEQ ID NO: 2494497 - RNA, 19 nt, Artificial Sequence
  Description of Artificial Sequence: Synthetic oligonucleotide
gacgcucccacagcgcucc

SEQ ID NO: 2494498 - RNA, 19 nt, Artificial Sequence
  Description of Artificial Sequence: Synthetic oligonucleotide
gugaaaugguggcugugga

SEQ ID NO: 2494499 - RNA, 19 nt, Artificial Sequence
  Description of Artificial Sequence: Synthetic oligonucleotide
acagccccuaaucauccaa

SEQ ID NO: 2494500 - RNA, 19 nt, Artificial Sequence
  Description of Artificial Sequence: Synthetic oligonucleotide
uggccuuccaauaguuguu

SEQ ID NO: 2494501 - RNA, 19 nt, Artificial Sequence
  Description of Artificial Sequence: Synthetic oligonucleotide
uaccugacccauagcgcac

SEQ ID NO: 2494502 - RNA, 19 nt, Artificial Sequence
  Description of Artificial Sequence: Synthetic oligonucleotide
cacccaacaacagaagcga

SEQ ID NO: 2494503 - RNA, 19 nt, Artificial Sequence
  Description of Artificial Sequence: Synthetic oligonucleotide
acccauagcgcacgucaug

SEQ ID NO: 2494504 - RNA, 19 nt, Artificial Sequence
  Description of Artificial Sequence: Synthetic oligonucleotide
ccguauucuccaauaacug

SEQ ID NO: 2494505 - RNA, 19 nt, Artificial Sequence
  Description of Artificial Sequence: Synthetic oligonucleotide
cagagccgcaaguaacgac

SEQ ID NO: 2494506 - RNA, 19 nt, Artificial Sequence
  Description of Artificial Sequence: Synthetic oligonucleotide
gucgaccauauuguucucc

SEQ ID NO: 2494507 - RNA, 19 nt, Artificial Sequence
  Description of Artificial Sequence: Synthetic oligonucleotide
gccauuacagagcacuguc

SEQ ID NO: 2494508 - RNA, 19 nt, Artificial Sequence
  Description of Artificial Sequence: Synthetic oligonucleotide
acagccauccuggauucga

SEQ ID NO: 2494509 - RNA, 19 nt, Artificial Sequence
  Description of Artificial Sequence: Synthetic oligonucleotide
auuguggcgcguauugagu

SEQ ID NO: 2494510 - RNA, 19 nt, Artificial Sequence
  Description of Artificial Sequence: Synthetic oligonucleotide
ucaccaucucucacccagu

SEQ ID NO: 2494511 - RNA, 19 nt, Artificial Sequence
  Description of Artificial Sequence: Synthetic oligonucleotide
ccauuacagagcacugucc

SEQ ID NO: 2494512 - RNA, 19 nt, Artificial Sequence
  Description of Artificial Sequence: Synthetic oligonucleotide
cccacuaccugacccauag

SEQ ID NO: 2494513 - RNA, 19 nt, Artificial Sequence
  Description of Artificial Sequence: Synthetic oligonucleotide
cucagaggauuuacaguca

SEQ ID NO: 2494514 - RNA, 19 nt, Artificial Sequence
  Description of Artificial Sequence: Synthetic oligonucleotide
caacaacucacugggcuuc

SEQ ID NO: 2494515 - RNA, 19 nt, Artificial Sequence
  Description of Artificial Sequence: Synthetic oligonucleotide
acucacugggcuucauaaa

SEQ ID NO: 2494516 - RNA, 19 nt, Artificial Sequence
  Description of Artificial Sequence: Synthetic oligonucleotide
auuuacagucauagcucug

SEQ ID NO: 2494517 - RNA, 19 nt, Artificial Sequence
  Description of Artificial Sequence: Synthetic oligonucleotide
aacaacucacugggcuuca

SEQ ID NO: 2494518 - RNA, 19 nt, Artificial Sequence
  Description of Artificial Sequence: Synthetic oligonucleotide
uuguucugacuuggcuggg

SEQ ID NO: 2494519 - RNA, 19 nt, Artificial Sequence
  Description of Artificial Sequence: Synthetic oligonucleotide
uucgaccaguauugaugug

SEQ ID NO: 2494520 - RNA, 19 nt, Artificial Sequence
  Description of Artificial Sequence: Synthetic oligonucleotide
cauagcucugcaugaugga

SEQ ID NO: 2494521 - RNA, 19 nt, Artificial Sequence
  Description of Artificial Sequence: Synthetic oligonucleotide
cccacgguaaagcagcaac

SEQ ID NO: 2494522 - RNA, 19 nt, Artificial Sequence
  Description of Artificial Sequence: Synthetic oligonucleotide
uguggagguuucgaccagu

SEQ ID NO: 2494523 - RNA, 19 nt, Artificial Sequence
  Description of Artificial Sequence: Synthetic oligonucleotide
gagccgcaaguaacgacag

SEQ ID NO: 2494524 - RNA, 19 nt, Artificial Sequence
  Description of Artificial Sequence: Synthetic oligonucleotide
agcgcacgucaugagagug

SEQ ID NO: 2494525 - RNA, 19 nt, Artificial Sequence
  Description of Artificial Sequence: Synthetic oligonucleotide
caaguaacgacagccauau

SEQ ID NO: 2494526 - RNA, 19 nt, Artificial Sequence
  Description of Artificial Sequence: Synthetic oligonucleotide
agaagcgauaagacagcca

SEQ ID NO: 2494527 - RNA, 19 nt, Artificial Sequence
  Description of Artificial Sequence: Synthetic oligonucleotide
accugacccauagcgcacg

SEQ ID NO: 2494528 - RNA, 19 nt, Artificial Sequence
  Description of Artificial Sequence: Synthetic oligonucleotide
acagagcacuguccaguca

SEQ ID NO: 2494529 - RNA, 19 nt, Artificial Sequence
  Description of Artificial Sequence: Synthetic oligonucleotide
ucggacgcucccacagcgc

SEQ ID NO: 2494530 - RNA, 19 nt, Artificial Sequence
  Description of Artificial Sequence: Synthetic oligonucleotide
ggccauaccauguaccucu

SEQ ID NO: 2494531 - RNA, 19 nt, Artificial Sequence
  Description of Artificial Sequence: Synthetic oligonucleotide
gcgcguauugaguagcuuc

SEQ ID NO: 2494532 - RNA, 19 nt, Artificial Sequence
  Description of Artificial Sequence: Synthetic oligonucleotide
cccacagcgcuccauaaac

SEQ ID NO: 2494533 - RNA, 19 nt, Artificial Sequence
  Description of Artificial Sequence: Synthetic oligonucleotide
cuggagcagggaucccacg

SEQ ID NO: 2494534 - RNA, 19 nt, Artificial Sequence
  Description of Artificial Sequence: Synthetic oligonucleotide
uggcgcguauugaguagcu

SEQ ID NO: 2494535 - RNA, 19 nt, Artificial Sequence
  Description of Artificial Sequence: Synthetic oligonucleotide
guccacuuauaggucgacc

SEQ ID NO: 2494536 - RNA, 19 nt, Artificial Sequence
  Description of Artificial Sequence: Synthetic oligonucleotide
caguaagggccauuacaga

SEQ ID NO: 2494537 - RNA, 19 nt, Artificial Sequence
  Description of Artificial Sequence: Synthetic oligonucleotide
cagccauaucggacgcucc

SEQ ID NO: 2494538 - RNA, 19 nt, Artificial Sequence
  Description of Artificial Sequence: Synthetic oligonucleotide
uagcgcacgucaugagagu

SEQ ID NO: 2494539 - RNA, 19 nt, Artificial Sequence
  Description of Artificial Sequence: Synthetic oligonucleotide
accaucucucacccaguaa

SEQ ID NO: 2494540 - RNA, 19 nt, Artificial Sequence
  Description of Artificial Sequence: Synthetic oligonucleotide
cuucaguggaagaauguuu

SEQ ID NO: 2494541 - RNA, 19 nt, Artificial Sequence
  Description of Artificial Sequence: Synthetic oligonucleotide
guggcgcguauugaguagc

SEQ ID NO: 2494542 - RNA, 19 nt, Artificial Sequence
  Description of Artificial Sequence: Synthetic oligonucleotide
acauuguggcgcguauuga

SEQ ID NO: 2494543 - RNA, 19 nt, Artificial Sequence
  Description of Artificial Sequence: Synthetic oligonucleotide
agagcacuguccagucauc

SEQ ID NO: 2494544 - RNA, 19 nt, Artificial Sequence
  Description of Artificial Sequence: Synthetic oligonucleotide
cguauugaguagcuucacc

SEQ ID NO: 2494545 - RNA, 19 nt, Artificial Sequence
  Description of Artificial Sequence: Synthetic oligonucleotide
cagccauccuggauucgac

SEQ ID NO: 2494546 - RNA, 19 nt, Artificial Sequence
  Description of Artificial Sequence: Synthetic oligonucleotide
gcagucggacauuguggcg

SEQ ID NO: 2494547 - RNA, 19 nt, Artificial Sequence
  Description of Artificial Sequence: Synthetic oligonucleotide
acagagccgcaaguaacga

SEQ ID NO: 2494548 - RNA, 19 nt, Artificial Sequence
  Description of Artificial Sequence: Synthetic oligonucleotide
cagggaucccacgguaaag

SEQ ID NO: 2494549 - RNA, 19 nt, Artificial Sequence
  Description of Artificial Sequence: Synthetic oligonucleotide
uguccacuuauaggucgac

SEQ ID NO: 2494550 - RNA, 19 nt, Artificial Sequence
  Description of Artificial Sequence: Synthetic oligonucleotide
aaugguggcuguggagguu

SEQ ID NO: 2494551 - RNA, 19 nt, Artificial Sequence
  Description of Artificial Sequence: Synthetic oligonucleotide
gggcuggccacacuugaug

SEQ ID NO: 2494552 - RNA, 19 nt, Artificial Sequence
  Description of Artificial Sequence: Synthetic oligonucleotide
aagggccauuacagagcac

SEQ ID NO: 2494553 - RNA, 19 nt, Artificial Sequence
  Description of Artificial Sequence: Synthetic oligonucleotide
gcagcaacagaugucuaca

SEQ ID NO: 2494554 - RNA, 19 nt, Artificial Sequence
  Description of Artificial Sequence: Synthetic oligonucleotide
cauaucggacgcucccaca

SEQ ID NO: 2494555 - RNA, 19 nt, Artificial Sequence
  Description of Artificial Sequence: Synthetic oligonucleotide
agaugucuacaaacacugu

SEQ ID NO: 2494556 - RNA, 19 nt, Artificial Sequence
  Description of Artificial Sequence: Synthetic oligonucleotide
cccaguaagggccauuaca

SEQ ID NO: 2494557 - RNA, 19 nt, Artificial Sequence
  Description of Artificial Sequence: Synthetic oligonucleotide
ugggcuggccacacuugau

SEQ ID NO: 2494558 - RNA, 19 nt, Artificial Sequence
  Description of Artificial Sequence: Synthetic oligonucleotide
cacgucaugagagugcagu

SEQ ID NO: 2494559 - RNA, 19 nt, Artificial Sequence
  Description of Artificial Sequence: Synthetic oligonucleotide
cacagagguuacaccuguc

SEQ ID NO: 2494560 - RNA, 19 nt, Artificial Sequence
  Description of Artificial Sequence: Synthetic oligonucleotide
cccguauucuccaauaacu

SEQ ID NO: 2494561 - RNA, 19 nt, Artificial Sequence
  Description of Artificial Sequence: Synthetic oligonucleotide
acacacuguggcagucuuc

SEQ ID NO: 2494562 - RNA, 19 nt, Artificial Sequence
  Description of Artificial Sequence: Synthetic oligonucleotide
ggguuccccuuucacacac

SEQ ID NO: 2494563 - RNA, 19 nt, Artificial Sequence
  Description of Artificial Sequence: Synthetic oligonucleotide
ccccuuucacacacugugg

SEQ ID NO: 2494564 - RNA, 19 nt, Artificial Sequence
  Description of Artificial Sequence: Synthetic oligonucleotide
cugcugcccacuaccugac

SEQ ID NO: 2494565 - RNA, 19 nt, Artificial Sequence
  Description of Artificial Sequence: Synthetic oligonucleotide
ggaguacuucaguggaaga

SEQ ID NO: 2494566 - RNA, 19 nt, Artificial Sequence
  Description of Artificial Sequence: Synthetic oligonucleotide
ccacagcgcuccauaaacc

SEQ ID NO: 2494567 - RNA, 19 nt, Artificial Sequence
  Description of Artificial Sequence: Synthetic oligonucleotide
cugugacagacaggaguac

SEQ ID NO: 2494568 - RNA, 19 nt, Artificial Sequence
  Description of Artificial Sequence: Synthetic oligonucleotide
cgucaugagagugcagucg

SEQ ID NO: 2494569 - RNA, 19 nt, Artificial Sequence
  Description of Artificial Sequence: Synthetic oligonucleotide
gacagccccuaaucaucca

SEQ ID NO: 2494570 - RNA, 19 nt, Artificial Sequence
  Description of Artificial Sequence: Synthetic oligonucleotide
agguuacaccugucacuga

SEQ ID NO: 2494571 - RNA, 19 nt, Artificial Sequence
  Description of Artificial Sequence: Synthetic oligonucleotide
cugccuucaacaacucacu

SEQ ID NO: 2494572 - RNA, 19 nt, Artificial Sequence
  Description of Artificial Sequence: Synthetic oligonucleotide
uggauucgacagccccuaa

SEQ ID NO: 2494573 - RNA, 19 nt, Artificial Sequence
  Description of Artificial Sequence: Synthetic oligonucleotide
ucggacauuguggcgcgua

SEQ ID NO: 2494574 - RNA, 19 nt, Artificial Sequence
  Description of Artificial Sequence: Synthetic oligonucleotide
cacuuauaggucgaccaua

SEQ ID NO: 2494575 - RNA, 19 nt, Artificial Sequence
  Description of Artificial Sequence: Synthetic oligonucleotide
cagagcacuguccagucau

SEQ ID NO: 2494576 - RNA, 19 nt, Artificial Sequence
  Description of Artificial Sequence: Synthetic oligonucleotide
guggcuguggagguuucga

SEQ ID NO: 2494577 - RNA, 19 nt, Artificial Sequence
  Description of Artificial Sequence: Synthetic oligonucleotide
ucagucggaugggcuggcc

SEQ ID NO: 2494578 - RNA, 19 nt, Artificial Sequence
  Description of Artificial Sequence: Synthetic oligonucleotide
cagcaacagaugucuacaa

SEQ ID NO: 2494579 - RNA, 19 nt, Artificial Sequence
  Description of Artificial Sequence: Synthetic oligonucleotide
ccccguauucuccaauaac

SEQ ID NO: 2494580 - RNA, 19 nt, Artificial Sequence
  Description of Artificial Sequence: Synthetic oligonucleotide
gcaugauggacuucugccu

SEQ ID NO: 2494581 - RNA, 19 nt, Artificial Sequence
  Description of Artificial Sequence: Synthetic oligonucleotide
agguuucgaccaguauuga

SEQ ID NO: 2494582 - RNA, 19 nt, Artificial Sequence
  Description of Artificial Sequence: Synthetic oligonucleotide
uagucgccuucaccuuccu

SEQ ID NO: 2494583 - RNA, 19 nt, Artificial Sequence
  Description of Artificial Sequence: Synthetic oligonucleotide
cagucggaugggcuggcca

SEQ ID NO: 2494584 - RNA, 19 nt, Artificial Sequence
  Description of Artificial Sequence: Synthetic oligonucleotide
cgacagccccuaaucaucc

SEQ ID NO: 2494585 - RNA, 19 nt, Artificial Sequence
  Description of Artificial Sequence: Synthetic oligonucleotide
cagacaggaguacuucagu

SEQ ID NO: 2494586 - RNA, 19 nt, Artificial Sequence
  Description of Artificial Sequence: Synthetic oligonucleotide
ccauaucggacgcucccac

SEQ ID NO: 2494587 - RNA, 19 nt, Artificial Sequence
  Description of Artificial Sequence: Synthetic oligonucleotide
gucauccaaauagucgccu

SEQ ID NO: 2494588 - RNA, 19 nt, Artificial Sequence
  Description of Artificial Sequence: Synthetic oligonucleotide
cuuggcugggccauaccau

SEQ ID NO: 2494589 - RNA, 19 nt, Artificial Sequence
  Description of Artificial Sequence: Synthetic oligonucleotide
cagaggauuuacagucaua

SEQ ID NO: 2494590 - RNA, 19 nt, Artificial Sequence
  Description of Artificial Sequence: Synthetic oligonucleotide
gaccaguauugaugugugu

SEQ ID NO: 2494591 - RNA, 19 nt, Artificial Sequence
  Description of Artificial Sequence: Synthetic oligonucleotide
caaacacuguguggugaca

SEQ ID NO: 2494592 - RNA, 19 nt, Artificial Sequence
  Description of Artificial Sequence: Synthetic oligonucleotide
cuguccagucauccaaaua

SEQ ID NO: 2494593 - RNA, 19 nt, Artificial Sequence
  Description of Artificial Sequence: Synthetic oligonucleotide
ccacgguaaagcagcaaca

SEQ ID NO: 2494594 - RNA, 19 nt, Artificial Sequence
  Description of Artificial Sequence: Synthetic oligonucleotide
ugcccacuaccugacccau

SEQ ID NO: 2494595 - RNA, 19 nt, Artificial Sequence
  Description of Artificial Sequence: Synthetic oligonucleotide
caauaacuguugcugucau

SEQ ID NO: 2494596 - RNA, 19 nt, Artificial Sequence
  Description of Artificial Sequence: Synthetic oligonucleotide
ccuuucacacacuguggca

SEQ ID NO: 2494597 - RNA, 19 nt, Artificial Sequence
  Description of Artificial Sequence: Synthetic oligonucleotide
guuacaccugucacugacu

SEQ ID NO: 2494598 - RNA, 19 nt, Artificial Sequence
  Description of Artificial Sequence: Synthetic oligonucleotide
ccauagcgcacgucaugag

SEQ ID NO: 2494599 - RNA, 19 nt, Artificial Sequence
  Description of Artificial Sequence: Synthetic oligonucleotide
ucccacgguaaagcagcaa

SEQ ID NO: 2494600 - RNA, 19 nt, Artificial Sequence
  Description of Artificial Sequence: Synthetic oligonucleotide
caacucacugggcuucaua

SEQ ID NO: 2494601 - RNA, 19 nt, Artificial Sequence
  Description of Artificial Sequence: Synthetic oligonucleotide
cuggauucgacagccccua

SEQ ID NO: 2494602 - RNA, 19 nt, Artificial Sequence
  Description of Artificial Sequence: Synthetic oligonucleotide
ggccuuccaauaguuguuc

SEQ ID NO: 2494603 - RNA, 19 nt, Artificial Sequence
  Description of Artificial Sequence: Synthetic oligonucleotide
gcaaguaacgacagccaua

SEQ ID NO: 2494604 - RNA, 19 nt, Artificial Sequence
  Description of Artificial Sequence: Synthetic oligonucleotide
gccccuaaucauccaagaa

SEQ ID NO: 2494605 - RNA, 19 nt, Artificial Sequence
  Description of Artificial Sequence: Synthetic oligonucleotide
cgcguauugaguagcuuca

SEQ ID NO: 2494606 - RNA, 19 nt, Artificial Sequence
  Description of Artificial Sequence: Synthetic oligonucleotide
cuucaccaucucucaccca

SEQ ID NO: 2494607 - RNA, 19 nt, Artificial Sequence
  Description of Artificial Sequence: Synthetic oligonucleotide
gguuucgaccaguauugau

SEQ ID NO: 2494608 - RNA, 19 nt, Artificial Sequence
  Description of Artificial Sequence: Synthetic oligonucleotide
gucagucggaugggcuggc

SEQ ID NO: 2494609 - RNA, 19 nt, Artificial Sequence
  Description of Artificial Sequence: Synthetic oligonucleotide
cgcuccauaaaccacccaa

SEQ ID NO: 2494610 - RNA, 19 nt, Artificial Sequence
  Description of Artificial Sequence: Synthetic oligonucleotide
gcagggaucccacgguaaa

SEQ ID NO: 2494611 - RNA, 19 nt, Artificial Sequence
  Description of Artificial Sequence: Synthetic oligonucleotide
gggccauuacagagcacug

SEQ ID NO: 2494612 - RNA, 19 nt, Artificial Sequence
  Description of Artificial Sequence: Synthetic oligonucleotide
gugacagacaggaguacuu

SEQ ID NO: 2494613 - RNA, 19 nt, Artificial Sequence
  Description of Artificial Sequence: Synthetic oligonucleotide
cacccaguaagggccauua

SEQ ID NO: 2494614 - RNA, 19 nt, Artificial Sequence
  Description of Artificial Sequence: Synthetic oligonucleotide
acccaacaacagaagcgau

SEQ ID NO: 2494615 - RNA, 19 nt, Artificial Sequence
  Description of Artificial Sequence: Synthetic oligonucleotide
cccauagcgcacgucauga

SEQ ID NO: 2494616 - RNA, 19 nt, Artificial Sequence
  Description of Artificial Sequence: Synthetic oligonucleotide
cugacccauagcgcacguc

SEQ ID NO: 2494617 - RNA, 19 nt, Artificial Sequence
  Description of Artificial Sequence: Synthetic oligonucleotide
gcgcacgucaugagagugc

SEQ ID NO: 2494618 - RNA, 19 nt, Artificial Sequence
  Description of Artificial Sequence: Synthetic oligonucleotide
guggagguuucgaccagua

SEQ ID NO: 2494619 - RNA, 19 nt, Artificial Sequence
  Description of Artificial Sequence: Synthetic oligonucleotide
aucccacgguaaagcagca

SEQ ID NO: 2494620 - RNA, 19 nt, Artificial Sequence
  Description of Artificial Sequence: Synthetic oligonucleotide
ccgcaaguaacgacagcca

SEQ ID NO: 2494621 - RNA, 19 nt, Artificial Sequence
  Description of Artificial Sequence: Synthetic oligonucleotide
gcguauugaguagcuucac

SEQ ID NO: 2494622 - RNA, 19 nt, Artificial Sequence
  Description of Artificial Sequence: Synthetic oligonucleotide
gucggaugggcuggccaca

SEQ ID NO: 2494623 - RNA, 19 nt, Artificial Sequence
  Description of Artificial Sequence: Synthetic oligonucleotide
ggauucgacagccccuaau

SEQ ID NO: 2494624 - RNA, 19 nt, Artificial Sequence
  Description of Artificial Sequence: Synthetic oligonucleotide
gggguuccccuuucacaca

SEQ ID NO: 2494625 - RNA, 19 nt, Artificial Sequence
  Description of Artificial Sequence: Synthetic oligonucleotide
ggucgaccauauuguucuc

SEQ ID NO: 2494626 - RNA, 19 nt, Artificial Sequence
  Description of Artificial Sequence: Synthetic oligonucleotide
gccauaucggacgcuccca

SEQ ID NO: 2494627 - RNA, 19 nt, Artificial Sequence
  Description of Artificial Sequence: Synthetic oligonucleotide
cgacagccauaucggacgc

SEQ ID NO: 2494628 - RNA, 19 nt, Artificial Sequence
  Description of Artificial Sequence: Synthetic oligonucleotide
cgaccauauuguucuccug

SEQ ID NO: 2494629 - RNA, 19 nt, Artificial Sequence
  Description of Artificial Sequence: Synthetic oligonucleotide
gcucccacagcgcuccaua

SEQ ID NO: 2494630 - RNA, 19 nt, Artificial Sequence
  Description of Artificial Sequence: Synthetic oligonucleotide
ccacuaccugacccauagc

SEQ ID NO: 2494631 - RNA, 19 nt, Artificial Sequence
  Description of Artificial Sequence: Synthetic oligonucleotide
cuuauaggucgaccauauu

SEQ ID NO: 2494632 - RNA, 19 nt, Artificial Sequence
  Description of Artificial Sequence: Synthetic oligonucleotide
gacccauagcgcacgucau

SEQ ID NO: 2494633 - RNA, 19 nt, Artificial Sequence
  Description of Artificial Sequence: Synthetic oligonucleotide
gagagugcagucggacauu

SEQ ID NO: 2494634 - RNA, 19 nt, Artificial Sequence
  Description of Artificial Sequence: Synthetic oligonucleotide
ccuggauucgacagccccu

SEQ ID NO: 2494635 - RNA, 19 nt, Artificial Sequence
  Description of Artificial Sequence: Synthetic oligonucleotide
gccuuccaauaguuguucu

SEQ ID NO: 2494636 - RNA, 19 nt, Artificial Sequence
  Description of Artificial Sequence: Synthetic oligonucleotide
gggcuucauaaagaugccu

SEQ ID NO: 2494637 - RNA, 19 nt, Artificial Sequence
  Description of Artificial Sequence: Synthetic oligonucleotide
gagugcagucggacauugu

SEQ ID NO: 2494638 - RNA, 19 nt, Artificial Sequence
  Description of Artificial Sequence: Synthetic oligonucleotide
gcacgucaugagagugcag

SEQ ID NO: 2494639 - RNA, 19 nt, Artificial Sequence
  Description of Artificial Sequence: Synthetic oligonucleotide
cgcacgucaugagagugca

SEQ ID NO: 2494640 - RNA, 19 nt, Artificial Sequence
  Description of Artificial Sequence: Synthetic oligonucleotide
ccacuuauaggucgaccau

SEQ ID NO: 2494641 - RNA, 19 nt, Artificial Sequence
  Description of Artificial Sequence: Synthetic oligonucleotide
ggacgcucccacagcgcuc

SEQ ID NO: 2494642 - RNA, 19 nt, Artificial Sequence
  Description of Artificial Sequence: Synthetic oligonucleotide
acgcucccacagcgcucca

SEQ ID NO: 2494643 - RNA, 19 nt, Artificial Sequence
  Description of Artificial Sequence: Synthetic oligonucleotide
gcgcuccauaaaccaccca

SEQ ID NO: 2494644 - RNA, 19 nt, Artificial Sequence
  Description of Artificial Sequence: Synthetic oligonucleotide
cgcaaguaacgacagccau

SEQ ID NO: 2494645 - RNA, 19 nt, Artificial Sequence
  Description of Artificial Sequence: Synthetic oligonucleotide
ggacauuguggcgcguauu

SEQ ID NO: 2494646 - RNA, 19 nt, Artificial Sequence
  Description of Artificial Sequence: Synthetic oligonucleotide
cgccuucaccuuccucccc

SEQ ID NO: 2494647 - RNA, 19 nt, Artificial Sequence
  Description of Artificial Sequence: Synthetic oligonucleotide
gguuccccuuucacacacu

SEQ ID NO: 2494648 - RNA, 19 nt, Artificial Sequence
  Description of Artificial Sequence: Synthetic oligonucleotide
cggacgcucccacagcgcu

SEQ ID NO: 2494649 - RNA, 19 nt, Artificial Sequence
  Description of Artificial Sequence: Synthetic oligonucleotide
ggcgcguauugaguagcuu

SEQ ID NO: 2494650 - RNA, 19 nt, Artificial Sequence
  Description of Artificial Sequence: Synthetic oligonucleotide
gccauaccauguaccucuu

SEQ ID NO: 2494651 - RNA, 19 nt, Artificial Sequence
  Description of Artificial Sequence: Synthetic oligonucleotide
cggacauuguggcgcguau

SEQ ID NO: 2494652 - RNA, 19 nt, Artificial Sequence
  Description of Artificial Sequence: Synthetic oligonucleotide
cggaugggcuggccacacu

SEQ ID NO: 2494653 - RNA, 19 nt, Artificial Sequence
  Description of Artificial Sequence: Synthetic oligonucleotide
uucucuaugagccugaugg

SEQ ID NO: 2494654 - RNA, 19 nt, Artificial Sequence
  Description of Artificial Sequence: Synthetic oligonucleotide
ucucuuauagccuugauag

SEQ ID NO: 2494655 - RNA, 19 nt, Artificial Sequence
  Description of Artificial Sequence: Synthetic oligonucleotide
uauucauugcauuaguucg

SEQ ID NO: 2494656 - RNA, 19 nt, Artificial Sequence
  Description of Artificial Sequence: Synthetic oligonucleotide
uugaaauuauccuugagug

SEQ ID NO: 2494657 - RNA, 19 nt, Artificial Sequence
  Description of Artificial Sequence: Synthetic oligonucleotide
aaaguagcaugguaacugc

SEQ ID NO: 2494658 - RNA, 19 nt, Artificial Sequence
  Description of Artificial Sequence: Synthetic oligonucleotide
aaagacgggaugcagcagg

SEQ ID NO: 2494659 - RNA, 19 nt, Artificial Sequence
  Description of Artificial Sequence: Synthetic oligonucleotide
cauugcauuaguucgaacc

SEQ ID NO: 2494660 - RNA, 19 nt, Artificial Sequence
  Description of Artificial Sequence: Synthetic oligonucleotide
aguaauaugaucaagggau

SEQ ID NO: 2494661 - RNA, 19 nt, Artificial Sequence
  Description of Artificial Sequence: Synthetic oligonucleotide
cacaguaauaugaucaagg

SEQ ID NO: 2494662 - RNA, 19 nt, Artificial Sequence
  Description of Artificial Sequence: Synthetic oligonucleotide
uauauccucaaccaagccc

SEQ ID NO: 2494663 - RNA, 19 nt, Artificial Sequence
  Description of Artificial Sequence: Synthetic oligonucleotide
uguaagagaagccucagaa

SEQ ID NO: 2494664 - RNA, 19 nt, Artificial Sequence
  Description of Artificial Sequence: Synthetic oligonucleotide
uaccacaguaauaugauca

SEQ ID NO: 2494665 - RNA, 19 nt, Artificial Sequence
  Description of Artificial Sequence: Synthetic oligonucleotide
acaguaauaugaucaaggg

SEQ ID NO: 2494666 - RNA, 19 nt, Artificial Sequence
  Description of Artificial Sequence: Synthetic oligonucleotide
uugccuuucauccaaggag

SEQ ID NO: 2494667 - RNA, 19 nt, Artificial Sequence
  Description of Artificial Sequence: Synthetic oligonucleotide
gauuauauccucaaccaag

SEQ ID NO: 2494668 - RNA, 19 nt, Artificial Sequence
  Description of Artificial Sequence: Synthetic oligonucleotide
uuguuguacaugaacaggc

SEQ ID NO: 2494669 - RNA, 19 nt, Artificial Sequence
  Description of Artificial Sequence: Synthetic oligonucleotide
aagcaaguuucccaucagc

SEQ ID NO: 2494670 - RNA, 19 nt, Artificial Sequence
  Description of Artificial Sequence: Synthetic oligonucleotide
ugugucgucggccauuugg

SEQ ID NO: 2494671 - RNA, 19 nt, Artificial Sequence
  Description of Artificial Sequence: Synthetic oligonucleotide
aaggccaugauguaagaga

SEQ ID NO: 2494672 - RNA, 19 nt, Artificial Sequence
  Description of Artificial Sequence: Synthetic oligonucleotide
ugauuuaaagcaaguuucc

SEQ ID NO: 2494673 - RNA, 19 nt, Artificial Sequence
  Description of Artificial Sequence: Synthetic oligonucleotide
uuccaagcugauuauaucc

SEQ ID NO: 2494674 - RNA, 19 nt, Artificial Sequence
  Description of Artificial Sequence: Synthetic oligonucleotide
uuccguaaaauuuucuuug

SEQ ID NO: 2494675 - RNA, 19 nt, Artificial Sequence
  Description of Artificial Sequence: Synthetic oligonucleotide
agaucucauuucuucaccc

SEQ ID NO: 2494676 - RNA, 19 nt, Artificial Sequence
  Description of Artificial Sequence: Synthetic oligonucleotide
auuauauccucaaccaagc

SEQ ID NO: 2494677 - RNA, 19 nt, Artificial Sequence
  Description of Artificial Sequence: Synthetic oligonucleotide
uacuuuaggaauagguacc

SEQ ID NO: 2494678 - RNA, 19 nt, Artificial Sequence
  Description of Artificial Sequence: Synthetic oligonucleotide
agaagccucagaaacagcc

SEQ ID NO: 2494679 - RNA, 19 nt, Artificial Sequence
  Description of Artificial Sequence: Synthetic oligonucleotide
gaucaagggauccuggugc

SEQ ID NO: 2494680 - RNA, 19 nt, Artificial Sequence
  Description of Artificial Sequence: Synthetic oligonucleotide
aauaggucuggucaaagua

SEQ ID NO: 2494681 - RNA, 19 nt, Artificial Sequence
  Description of Artificial Sequence: Synthetic oligonucleotide
aaacuggcgaacuggcacg

SEQ ID NO: 2494682 - RNA, 19 nt, Artificial Sequence
  Description of Artificial Sequence: Synthetic oligonucleotide
uuuaggaauagguacccga

SEQ ID NO: 2494683 - RNA, 19 nt, Artificial Sequence
  Description of Artificial Sequence: Synthetic oligonucleotide
auuaguucgaaccuuccgu

SEQ ID NO: 2494684 - RNA, 19 nt, Artificial Sequence
  Description of Artificial Sequence: Synthetic oligonucleotide
uuuaccagcauuucucugu

SEQ ID NO: 2494685 - RNA, 19 nt, Artificial Sequence
  Description of Artificial Sequence: Synthetic oligonucleotide
ugaucuguuucucuaugag

SEQ ID NO: 2494686 - RNA, 19 nt, Artificial Sequence
  Description of Artificial Sequence: Synthetic oligonucleotide
ucuuauagccuugauagcu

SEQ ID NO: 2494687 - RNA, 19 nt, Artificial Sequence
  Description of Artificial Sequence: Synthetic oligonucleotide
ugaaauuauccuugagugc

SEQ ID NO: 2494688 - RNA, 19 nt, Artificial Sequence
  Description of Artificial Sequence: Synthetic oligonucleotide
acagaucucauuucuucac

SEQ ID NO: 2494689 - RNA, 19 nt, Artificial Sequence
  Description of Artificial Sequence: Synthetic oligonucleotide
uugagagucuuauugaaau

SEQ ID NO: 2494690 - RNA, 19 nt, Artificial Sequence
  Description of Artificial Sequence: Synthetic oligonucleotide
uauucaccaaaaucaacug

SEQ ID NO: 2494691 - RNA, 19 nt, Artificial Sequence
  Description of Artificial Sequence: Synthetic oligonucleotide
uggccaaugugauuuaaag

SEQ ID NO: 2494692 - RNA, 19 nt, Artificial Sequence
  Description of Artificial Sequence: Synthetic oligonucleotide
auugcauuaguucgaaccu

SEQ ID NO: 2494693 - RNA, 19 nt, Artificial Sequence
  Description of Artificial Sequence: Synthetic oligonucleotide
uccguaaaauuuucuuugg

SEQ ID NO: 2494694 - RNA, 19 nt, Artificial Sequence
  Description of Artificial Sequence: Synthetic oligonucleotide
agcaccuuacucccaaggc

SEQ ID NO: 2494695 - RNA, 19 nt, Artificial Sequence
  Description of Artificial Sequence: Synthetic oligonucleotide
uguggugacuucauggaga

SEQ ID NO: 2494696 - RNA, 19 nt, Artificial Sequence
  Description of Artificial Sequence: Synthetic oligonucleotide
uuguacaugaacaggcuuc

SEQ ID NO: 2494697 - RNA, 19 nt, Artificial Sequence
  Description of Artificial Sequence: Synthetic oligonucleotide
gcugauuauauccucaacc

SEQ ID NO: 2494698 - RNA, 19 nt, Artificial Sequence
  Description of Artificial Sequence: Synthetic oligonucleotide
aagcaccuuacucccaagg

SEQ ID NO: 2494699 - RNA, 19 nt, Artificial Sequence
  Description of Artificial Sequence: Synthetic oligonucleotide
aaauaggucuggucaaagu

SEQ ID NO: 2494700 - RNA, 19 nt, Artificial Sequence
  Description of Artificial Sequence: Synthetic oligonucleotide
gccaaugugauuuaaagca

SEQ ID NO: 2494701 - RNA, 19 nt, Artificial Sequence
  Description of Artificial Sequence: Synthetic oligonucleotide
acuuuaggaauagguaccc

SEQ ID NO: 2494702 - RNA, 19 nt, Artificial Sequence
  Description of Artificial Sequence: Synthetic oligonucleotide
agauucauuccacuuucuc

SEQ ID NO: 2494703 - RNA, 19 nt, Artificial Sequence
  Description of Artificial Sequence: Synthetic oligonucleotide
gugauuuaaagcaaguuuc

SEQ ID NO: 2494704 - RNA, 19 nt, Artificial Sequence
  Description of Artificial Sequence: Synthetic oligonucleotide
cauccaaggaguucuuugg

SEQ ID NO: 2494705 - RNA, 19 nt, Artificial Sequence
  Description of Artificial Sequence: Synthetic oligonucleotide
aauuagugucccuuccacu

SEQ ID NO: 2494706 - RNA, 19 nt, Artificial Sequence
  Description of Artificial Sequence: Synthetic oligonucleotide
ucuugguugcaaacuggcg

SEQ ID NO: 2494707 - RNA, 19 nt, Artificial Sequence
  Description of Artificial Sequence: Synthetic oligonucleotide
uucuugguugcaaacuggc

SEQ ID NO: 2494708 - RNA, 19 nt, Artificial Sequence
  Description of Artificial Sequence: Synthetic oligonucleotide
caaugugauuuaaagcaag

SEQ ID NO: 2494709 - RNA, 19 nt, Artificial Sequence
  Description of Artificial Sequence: Synthetic oligonucleotide
agguacccgaauuaguguc

SEQ ID NO: 2494710 - RNA, 19 nt, Artificial Sequence
  Description of Artificial Sequence: Synthetic oligonucleotide
aauaugaucaagggauccu

SEQ ID NO: 2494711 - RNA, 19 nt, Artificial Sequence
  Description of Artificial Sequence: Synthetic oligonucleotide
uaauaugaucaagggaucc

SEQ ID NO: 2494712 - RNA, 19 nt, Artificial Sequence
  Description of Artificial Sequence: Synthetic oligonucleotide
guuguuguacaugaacagg

SEQ ID NO: 2494713 - RNA, 19 nt, Artificial Sequence
  Description of Artificial Sequence: Synthetic oligonucleotide
ucuuccaagcugauuauau

SEQ ID NO: 2494714 - RNA, 19 nt, Artificial Sequence
  Description of Artificial Sequence: Synthetic oligonucleotide
cuaaguauugccugugguc

SEQ ID NO: 2494715 - RNA, 19 nt, Artificial Sequence
  Description of Artificial Sequence: Synthetic oligonucleotide
aauuauccuugagugcuuc

SEQ ID NO: 2494716 - RNA, 19 nt, Artificial Sequence
  Description of Artificial Sequence: Synthetic oligonucleotide
guaaaauuuucuuuggccu

SEQ ID NO: 2494717 - RNA, 19 nt, Artificial Sequence
  Description of Artificial Sequence: Synthetic oligonucleotide
ugaucaagggauccuggug

SEQ ID NO: 2494718 - RNA, 19 nt, Artificial Sequence
  Description of Artificial Sequence: Synthetic oligonucleotide
uuaggaauagguacccgaa

SEQ ID NO: 2494719 - RNA, 19 nt, Artificial Sequence
  Description of Artificial Sequence: Synthetic oligonucleotide
ucagcaguuaccacaguaa

SEQ ID NO: 2494720 - RNA, 19 nt, Artificial Sequence
  Description of Artificial Sequence: Synthetic oligonucleotide
gaauagguacccgaauuag

SEQ ID NO: 2494721 - RNA, 19 nt, Artificial Sequence
  Description of Artificial Sequence: Synthetic oligonucleotide
gacgggaugcagcaggcgg

SEQ ID NO: 2494722 - RNA, 19 nt, Artificial Sequence
  Description of Artificial Sequence: Synthetic oligonucleotide
uuauauccucaaccaagcc

SEQ ID NO: 2494723 - RNA, 19 nt, Artificial Sequence
  Description of Artificial Sequence: Synthetic oligonucleotide
cauuaguucgaaccuuccg

SEQ ID NO: 2494724 - RNA, 19 nt, Artificial Sequence
  Description of Artificial Sequence: Synthetic oligonucleotide
ugauuauauccucaaccaa

SEQ ID NO: 2494725 - RNA, 19 nt, Artificial Sequence
  Description of Artificial Sequence: Synthetic oligonucleotide
uuauagccuugauagcugc

SEQ ID NO: 2494726 - RNA, 19 nt, Artificial Sequence
  Description of Artificial Sequence: Synthetic oligonucleotide
auauccucaaccaagcccu

SEQ ID NO: 2494727 - RNA, 19 nt, Artificial Sequence
  Description of Artificial Sequence: Synthetic oligonucleotide
uucucuuauagccuugaua

SEQ ID NO: 2494728 - RNA, 19 nt, Artificial Sequence
  Description of Artificial Sequence: Synthetic oligonucleotide
uccaagcugauuauauccu

SEQ ID NO: 2494729 - RNA, 19 nt, Artificial Sequence
  Description of Artificial Sequence: Synthetic oligonucleotide
aaugugauuuaaagcaagu

SEQ ID NO: 2494730 - RNA, 19 nt, Artificial Sequence
  Description of Artificial Sequence: Synthetic oligonucleotide
aguuaccacaguaauauga

SEQ ID NO: 2494731 - RNA, 19 nt, Artificial Sequence
  Description of Artificial Sequence: Synthetic oligonucleotide
uguuguacaugaacaggcu

SEQ ID NO: 2494732 - RNA, 19 nt, Artificial Sequence
  Description of Artificial Sequence: Synthetic oligonucleotide
ucacagaucucauuucuuc

SEQ ID NO: 2494733 - RNA, 19 nt, Artificial Sequence
  Description of Artificial Sequence: Synthetic oligonucleotide
auagguacccgaauuagug

SEQ ID NO: 2494734 - RNA, 19 nt, Artificial Sequence
  Description of Artificial Sequence: Synthetic oligonucleotide
ucggccauuuggcugaucu

SEQ ID NO: 2494735 - RNA, 19 nt, Artificial Sequence
  Description of Artificial Sequence: Synthetic oligonucleotide
uugcaaacuggcgaacugg

SEQ ID NO: 2494736 - RNA, 19 nt, Artificial Sequence
  Description of Artificial Sequence: Synthetic oligonucleotide
guaggcuaaguauugccug

SEQ ID NO: 2494737 - RNA, 19 nt, Artificial Sequence
  Description of Artificial Sequence: Synthetic oligonucleotide
gccauauucaccaaaauca

SEQ ID NO: 2494738 - RNA, 19 nt, Artificial Sequence
  Description of Artificial Sequence: Synthetic oligonucleotide
cuuauagccuugauagcug

SEQ ID NO: 2494739 - RNA, 19 nt, Artificial Sequence
  Description of Artificial Sequence: Synthetic oligonucleotide
uggagaucuggccaaugug

SEQ ID NO: 2494740 - RNA, 19 nt, Artificial Sequence
  Description of Artificial Sequence: Synthetic oligonucleotide
aagggauccuggugcaguc

SEQ ID NO: 2494741 - RNA, 19 nt, Artificial Sequence
  Description of Artificial Sequence: Synthetic oligonucleotide
cuugguugcaaacuggcga

SEQ ID NO: 2494742 - RNA, 19 nt, Artificial Sequence
  Description of Artificial Sequence: Synthetic oligonucleotide
gucuggucaaaguagcaug

SEQ ID NO: 2494743 - RNA, 19 nt, Artificial Sequence
  Description of Artificial Sequence: Synthetic oligonucleotide
gucaaaguagcaugguaac

SEQ ID NO: 2494744 - RNA, 19 nt, Artificial Sequence
  Description of Artificial Sequence: Synthetic oligonucleotide
augauguaagagaagccuc

SEQ ID NO: 2494745 - RNA, 19 nt, Artificial Sequence
  Description of Artificial Sequence: Synthetic oligonucleotide
aauagguacccgaauuagu

SEQ ID NO: 2494746 - RNA, 19 nt, Artificial Sequence
  Description of Artificial Sequence: Synthetic oligonucleotide
agcuuauucauugcauuag

SEQ ID NO: 2494747 - RNA, 19 nt, Artificial Sequence
  Description of Artificial Sequence: Synthetic oligonucleotide
uguacaugaacaggcuuca

SEQ ID NO: 2494748 - RNA, 19 nt, Artificial Sequence
  Description of Artificial Sequence: Synthetic oligonucleotide
gaaauaggucuggucaaag

SEQ ID NO: 2494749 - RNA, 19 nt, Artificial Sequence
  Description of Artificial Sequence: Synthetic oligonucleotide
aaucaacuguggugacuuc

SEQ ID NO: 2494750 - RNA, 19 nt, Artificial Sequence
  Description of Artificial Sequence: Synthetic oligonucleotide
uggugcaguccuuauguug

SEQ ID NO: 2494751 - RNA, 19 nt, Artificial Sequence
  Description of Artificial Sequence: Synthetic oligonucleotide
uuaguucgaaccuuccgua

SEQ ID NO: 2494752 - RNA, 19 nt, Artificial Sequence
  Description of Artificial Sequence: Synthetic oligonucleotide
caaaagacgggaugcagca

SEQ ID NO: 2494753 - RNA, 19 nt, Artificial Sequence
  Description of Artificial Sequence: Synthetic oligonucleotide
aagacgggaugcagcaggc

SEQ ID NO: 2494754 - RNA, 19 nt, Artificial Sequence
  Description of Artificial Sequence: Synthetic oligonucleotide
uugguugcaaacuggcgaa

SEQ ID NO: 2494755 - RNA, 19 nt, Artificial Sequence
  Description of Artificial Sequence: Synthetic oligonucleotide
uuauccuugagugcuucca

SEQ ID NO: 2494756 - RNA, 19 nt, Artificial Sequence
  Description of Artificial Sequence: Synthetic oligonucleotide
ggaaauuggccauauucac

SEQ ID NO: 2494757 - RNA, 19 nt, Artificial Sequence
  Description of Artificial Sequence: Synthetic oligonucleotide
uucccugguuacuuuagga

SEQ ID NO: 2494758 - RNA, 19 nt, Artificial Sequence
  Description of Artificial Sequence: Synthetic oligonucleotide
aggaauagguacccgaauu

SEQ ID NO: 2494759 - RNA, 19 nt, Artificial Sequence
  Description of Artificial Sequence: Synthetic oligonucleotide
augaacaggcuucauggaa

SEQ ID NO: 2494760 - RNA, 19 nt, Artificial Sequence
  Description of Artificial Sequence: Synthetic oligonucleotide
auaugaucaagggauccug

SEQ ID NO: 2494761 - RNA, 19 nt, Artificial Sequence
  Description of Artificial Sequence: Synthetic oligonucleotide
agcccuuuagcuuuggcuu

SEQ ID NO: 2494762 - RNA, 19 nt, Artificial Sequence
  Description of Artificial Sequence: Synthetic oligonucleotide
ugcaaaagacgggaugcag

SEQ ID NO: 2494763 - RNA, 19 nt, Artificial Sequence
  Description of Artificial Sequence: Synthetic oligonucleotide
cagaucucauuucuucacc

SEQ ID NO: 2494764 - RNA, 19 nt, Artificial Sequence
  Description of Artificial Sequence: Synthetic oligonucleotide
guuacuuuaggaauaggua

SEQ ID NO: 2494765 - RNA, 19 nt, Artificial Sequence
  Description of Artificial Sequence: Synthetic oligonucleotide
ggcggaagcaccuuacucc

SEQ ID NO: 2494766 - RNA, 19 nt, Artificial Sequence
  Description of Artificial Sequence: Synthetic oligonucleotide
aggcggaagcaccuuacuc

SEQ ID NO: 2494767 - RNA, 19 nt, Artificial Sequence
  Description of Artificial Sequence: Synthetic oligonucleotide
gagagucuuauugaaauua

SEQ ID NO: 2494768 - RNA, 19 nt, Artificial Sequence
  Description of Artificial Sequence: Synthetic oligonucleotide
cacucugggaaauuggcca

SEQ ID NO: 2494769 - RNA, 19 nt, Artificial Sequence
  Description of Artificial Sequence: Synthetic oligonucleotide
uaggcuaaguauugccugu

SEQ ID NO: 2494770 - RNA, 19 nt, Artificial Sequence
  Description of Artificial Sequence: Synthetic oligonucleotide
uucugaaauaggucugguc

SEQ ID NO: 2494771 - RNA, 19 nt, Artificial Sequence
  Description of Artificial Sequence: Synthetic oligonucleotide
ucaacuguggugacuucau

SEQ ID NO: 2494772 - RNA, 19 nt, Artificial Sequence
  Description of Artificial Sequence: Synthetic oligonucleotide
uccuccgauguuuuguccu

SEQ ID NO: 2494773 - RNA, 19 nt, Artificial Sequence
  Description of Artificial Sequence: Synthetic oligonucleotide
gccaugauguaagagaagc

SEQ ID NO: 2494774 - RNA, 19 nt, Artificial Sequence
  Description of Artificial Sequence: Synthetic oligonucleotide
uagguacccgaauuagugu

SEQ ID NO: 2494775 - RNA, 19 nt, Artificial Sequence
  Description of Artificial Sequence: Synthetic oligonucleotide
aaccuuccguaaaauuuuc

SEQ ID NO: 2494776 - RNA, 19 nt, Artificial Sequence
  Description of Artificial Sequence: Synthetic oligonucleotide
ugacuucauggagaucugg

SEQ ID NO: 2494777 - RNA, 19 nt, Artificial Sequence
  Description of Artificial Sequence: Synthetic oligonucleotide
gaucucauuucuucaccca

SEQ ID NO: 2494778 - RNA, 19 nt, Artificial Sequence
  Description of Artificial Sequence: Synthetic oligonucleotide
uggucaaaguagcauggua

SEQ ID NO: 2494779 - RNA, 19 nt, Artificial Sequence
  Description of Artificial Sequence: Synthetic oligonucleotide
aucagcaguuaccacagua

SEQ ID NO: 2494780 - RNA, 19 nt, Artificial Sequence
  Description of Artificial Sequence: Synthetic oligonucleotide
cuuccaagcugauuauauc

SEQ ID NO: 2494781 - RNA, 19 nt, Artificial Sequence
  Description of Artificial Sequence: Synthetic oligonucleotide
augaucaagggauccuggu

SEQ ID NO: 2494782 - RNA, 19 nt, Artificial Sequence
  Description of Artificial Sequence: Synthetic oligonucleotide
uuaaagcaaguuucccauc

SEQ ID NO: 2494783 - RNA, 19 nt, Artificial Sequence
  Description of Artificial Sequence: Synthetic oligonucleotide
ucuguuuggccaguuuuac

SEQ ID NO: 2494784 - RNA, 19 nt, Artificial Sequence
  Description of Artificial Sequence: Synthetic oligonucleotide
caguaauaugaucaaggga

SEQ ID NO: 2494785 - RNA, 19 nt, Artificial Sequence
  Description of Artificial Sequence: Synthetic oligonucleotide
ggccaaugugauuuaaagc

SEQ ID NO: 2494786 - RNA, 19 nt, Artificial Sequence
  Description of Artificial Sequence: Synthetic oligonucleotide
aaaagacgggaugcagcag

SEQ ID NO: 2494787 - RNA, 19 nt, Artificial Sequence
  Description of Artificial Sequence: Synthetic oligonucleotide
cuggguaggcuaaguauug

SEQ ID NO: 2494788 - RNA, 19 nt, Artificial Sequence
  Description of Artificial Sequence: Synthetic oligonucleotide
ggaaauuucugaaauaggu

SEQ ID NO: 2494789 - RNA, 19 nt, Artificial Sequence
  Description of Artificial Sequence: Synthetic oligonucleotide
cucaaccaagcccuuuagc

SEQ ID NO: 2494790 - RNA, 19 nt, Artificial Sequence
  Description of Artificial Sequence: Synthetic oligonucleotide
uaggaauagguacccgaau

SEQ ID NO: 2494791 - RNA, 19 nt, Artificial Sequence
  Description of Artificial Sequence: Synthetic oligonucleotide
aguucgaaccuuccguaaa

SEQ ID NO: 2494792 - RNA, 19 nt, Artificial Sequence
  Description of Artificial Sequence: Synthetic oligonucleotide
aacuggcgaacuggcacgg

SEQ ID NO: 2494793 - RNA, 19 nt, Artificial Sequence
  Description of Artificial Sequence: Synthetic oligonucleotide
cuuuaggaauagguacccg

SEQ ID NO: 2494794 - RNA, 19 nt, Artificial Sequence
  Description of Artificial Sequence: Synthetic oligonucleotide
agccugaugguguccuccg

SEQ ID NO: 2494795 - RNA, 19 nt, Artificial Sequence
  Description of Artificial Sequence: Synthetic oligonucleotide
ucucuguguucccugguua

SEQ ID NO: 2494796 - RNA, 19 nt, Artificial Sequence
  Description of Artificial Sequence: Synthetic oligonucleotide
guugccuuucauccaagga

SEQ ID NO: 2494797 - RNA, 19 nt, Artificial Sequence
  Description of Artificial Sequence: Synthetic oligonucleotide
ugagagucuuauugaaauu

SEQ ID NO: 2494798 - RNA, 19 nt, Artificial Sequence
  Description of Artificial Sequence: Synthetic oligonucleotide
uuggcugaucuguuucucu

SEQ ID NO: 2494799 - RNA, 19 nt, Artificial Sequence
  Description of Artificial Sequence: Synthetic oligonucleotide
uccucaaccaagcccuuua

SEQ ID NO: 2494800 - RNA, 19 nt, Artificial Sequence
  Description of Artificial Sequence: Synthetic oligonucleotide
ugcaacugugucgucggcc

SEQ ID NO: 2494801 - RNA, 19 nt, Artificial Sequence
  Description of Artificial Sequence: Synthetic oligonucleotide
uccgauguuuuguccuuug

SEQ ID NO: 2494802 - RNA, 19 nt, Artificial Sequence
  Description of Artificial Sequence: Synthetic oligonucleotide
ggugacuucauggagaucu

SEQ ID NO: 2494803 - RNA, 19 nt, Artificial Sequence
  Description of Artificial Sequence: Synthetic oligonucleotide
ugaaauaggucuggucaaa

SEQ ID NO: 2494804 - RNA, 19 nt, Artificial Sequence
  Description of Artificial Sequence: Synthetic oligonucleotide
caccuuacucccaaggcca

SEQ ID NO: 2494805 - RNA, 19 nt, Artificial Sequence
  Description of Artificial Sequence: Synthetic oligonucleotide
cugguuacuuuaggaauag

SEQ ID NO: 2494806 - RNA, 19 nt, Artificial Sequence
  Description of Artificial Sequence: Synthetic oligonucleotide
auguaagagaagccucaga

SEQ ID NO: 2494807 - RNA, 19 nt, Artificial Sequence
  Description of Artificial Sequence: Synthetic oligonucleotide
uucauugcauuaguucgaa

SEQ ID NO: 2494808 - RNA, 19 nt, Artificial Sequence
  Description of Artificial Sequence: Synthetic oligonucleotide
cucuguguucccugguuac

SEQ ID NO: 2494809 - RNA, 19 nt, Artificial Sequence
  Description of Artificial Sequence: Synthetic oligonucleotide
uguggucauguuguuguac

SEQ ID NO: 2494810 - RNA, 19 nt, Artificial Sequence
  Description of Artificial Sequence: Synthetic oligonucleotide
auucauugcauuaguucga

SEQ ID NO: 2494811 - RNA, 19 nt, Artificial Sequence
  Description of Artificial Sequence: Synthetic oligonucleotide
aucaacuguggugacuuca

SEQ ID NO: 2494812 - RNA, 19 nt, Artificial Sequence
  Description of Artificial Sequence: Synthetic oligonucleotide
gagucuuauugaaauuauc

SEQ ID NO: 2494813 - RNA, 19 nt, Artificial Sequence
  Description of Artificial Sequence: Synthetic oligonucleotide
uguccuccgauguuuuguc

SEQ ID NO: 2494814 - RNA, 19 nt, Artificial Sequence
  Description of Artificial Sequence: Synthetic oligonucleotide
caugauguaagagaagccu

SEQ ID NO: 2494815 - RNA, 19 nt, Artificial Sequence
  Description of Artificial Sequence: Synthetic oligonucleotide
uggcgaacuggcacggcug

SEQ ID NO: 2494816 - RNA, 19 nt, Artificial Sequence
  Description of Artificial Sequence: Synthetic oligonucleotide
gucgucggccauuuggcug

SEQ ID NO: 2494817 - RNA, 19 nt, Artificial Sequence
  Description of Artificial Sequence: Synthetic oligonucleotide
uuauguugagagucuuauu

SEQ ID NO: 2494818 - RNA, 19 nt, Artificial Sequence
  Description of Artificial Sequence: Synthetic oligonucleotide
agcuguacacucugggaaa

SEQ ID NO: 2494819 - RNA, 19 nt, Artificial Sequence
  Description of Artificial Sequence: Synthetic oligonucleotide
uguugguguucuguuuggc

SEQ ID NO: 2494820 - RNA, 19 nt, Artificial Sequence
  Description of Artificial Sequence: Synthetic oligonucleotide
gcaccuuacucccaaggcc

SEQ ID NO: 2494821 - RNA, 19 nt, Artificial Sequence
  Description of Artificial Sequence: Synthetic oligonucleotide
gcuuuggcuuucuugguug

SEQ ID NO: 2494822 - RNA, 19 nt, Artificial Sequence
  Description of Artificial Sequence: Synthetic oligonucleotide
ucgaaccuuccguaaaauu

SEQ ID NO: 2494823 - RNA, 19 nt, Artificial Sequence
  Description of Artificial Sequence: Synthetic oligonucleotide
uaguucgaaccuuccguaa

SEQ ID NO: 2494824 - RNA, 19 nt, Artificial Sequence
  Description of Artificial Sequence: Synthetic oligonucleotide
aguagcaugguaacugcaa

SEQ ID NO: 2494825 - RNA, 19 nt, Artificial Sequence
  Description of Artificial Sequence: Synthetic oligonucleotide
uuucucuuauagccuugau

SEQ ID NO: 2494826 - RNA, 19 nt, Artificial Sequence
  Description of Artificial Sequence: Synthetic oligonucleotide
guagcaugguaacugcaaa

SEQ ID NO: 2494827 - RNA, 19 nt, Artificial Sequence
  Description of Artificial Sequence: Synthetic oligonucleotide
ggguaggcuaaguauugcc

SEQ ID NO: 2494828 - RNA, 19 nt, Artificial Sequence
  Description of Artificial Sequence: Synthetic oligonucleotide
aauuggccauauucaccaa

SEQ ID NO: 2494829 - RNA, 19 nt, Artificial Sequence
  Description of Artificial Sequence: Synthetic oligonucleotide
agagucuuauugaaauuau

SEQ ID NO: 2494830 - RNA, 19 nt, Artificial Sequence
  Description of Artificial Sequence: Synthetic oligonucleotide
augugauuuaaagcaaguu

SEQ ID NO: 2494831 - RNA, 19 nt, Artificial Sequence
  Description of Artificial Sequence: Synthetic oligonucleotide
ucuuugcugccagaugccu

SEQ ID NO: 2494832 - RNA, 19 nt, Artificial Sequence
  Description of Artificial Sequence: Synthetic oligonucleotide
uguucuguuuggccaguuu

SEQ ID NO: 2494833 - RNA, 19 nt, Artificial Sequence
  Description of Artificial Sequence: Synthetic oligonucleotide
gaugcagcaggcggaagca

SEQ ID NO: 2494834 - RNA, 19 nt, Artificial Sequence
  Description of Artificial Sequence: Synthetic oligonucleotide
ggcuaaguauugccugugg

SEQ ID NO: 2494835 - RNA, 19 nt, Artificial Sequence
  Description of Artificial Sequence: Synthetic oligonucleotide
ggucaaaguagcaugguaa

SEQ ID NO: 2494836 - RNA, 19 nt, Artificial Sequence
  Description of Artificial Sequence: Synthetic oligonucleotide
ucauugcauuaguucgaac

SEQ ID NO: 2494837 - RNA, 19 nt, Artificial Sequence
  Description of Artificial Sequence: Synthetic oligonucleotide
uggcugaucuguuucucua

SEQ ID NO: 2494838 - RNA, 19 nt, Artificial Sequence
  Description of Artificial Sequence: Synthetic oligonucleotide
uggguaggcuaaguauugc

SEQ ID NO: 2494839 - RNA, 19 nt, Artificial Sequence
  Description of Artificial Sequence: Synthetic oligonucleotide
gguuacuuuaggaauaggu

SEQ ID NO: 2494840 - RNA, 19 nt, Artificial Sequence
  Description of Artificial Sequence: Synthetic oligonucleotide
ccaugauguaagagaagcc

SEQ ID NO: 2494841 - RNA, 19 nt, Artificial Sequence
  Description of Artificial Sequence: Synthetic oligonucleotide
ggagaucuggccaauguga

SEQ ID NO: 2494842 - RNA, 19 nt, Artificial Sequence
  Description of Artificial Sequence: Synthetic oligonucleotide
guuucccaucagcaguuac

SEQ ID NO: 2494843 - RNA, 19 nt, Artificial Sequence
  Description of Artificial Sequence: Synthetic oligonucleotide
ggugcaguccuuauguuga

SEQ ID NO: 2494844 - RNA, 19 nt, Artificial Sequence
  Description of Artificial Sequence: Synthetic oligonucleotide
ugucgucggccauuuggcu

SEQ ID NO: 2494845 - RNA, 19 nt, Artificial Sequence
  Description of Artificial Sequence: Synthetic oligonucleotide
agggauccuggugcagucc

SEQ ID NO: 2494846 - RNA, 19 nt, Artificial Sequence
  Description of Artificial Sequence: Synthetic oligonucleotide
aguauugccuguggucaug

SEQ ID NO: 2494847 - RNA, 19 nt, Artificial Sequence
  Description of Artificial Sequence: Synthetic oligonucleotide
ucugggaaauuggccauau

SEQ ID NO: 2494848 - RNA, 19 nt, Artificial Sequence
  Description of Artificial Sequence: Synthetic oligonucleotide
aggccaugauguaagagaa

SEQ ID NO: 2494849 - RNA, 19 nt, Artificial Sequence
  Description of Artificial Sequence: Synthetic oligonucleotide
ucuguguucccugguuacu

SEQ ID NO: 2494850 - RNA, 19 nt, Artificial Sequence
  Description of Artificial Sequence: Synthetic oligonucleotide
gagccugaugguguccucc

SEQ ID NO: 2494851 - RNA, 19 nt, Artificial Sequence
  Description of Artificial Sequence: Synthetic oligonucleotide
gugucgucggccauuuggc

SEQ ID NO: 2494852 - RNA, 19 nt, Artificial Sequence
  Description of Artificial Sequence: Synthetic oligonucleotide
uggucauguuguuguacau

SEQ ID NO: 2494853 - RNA, 19 nt, Artificial Sequence
  Description of Artificial Sequence: Synthetic oligonucleotide
uggcuuucuugguugcaaa

SEQ ID NO: 2494854 - RNA, 19 nt, Artificial Sequence
  Description of Artificial Sequence: Synthetic oligonucleotide
caugaacaggcuucaugga

SEQ ID NO: 2494855 - RNA, 19 nt, Artificial Sequence
  Description of Artificial Sequence: Synthetic oligonucleotide
ggaauagguacccgaauua

SEQ ID NO: 2494856 - RNA, 19 nt, Artificial Sequence
  Description of Artificial Sequence: Synthetic oligonucleotide
guacccgaauuaguguccc

SEQ ID NO: 2494857 - RNA, 19 nt, Artificial Sequence
  Description of Artificial Sequence: Synthetic oligonucleotide
aaauuauccuugagugcuu

SEQ ID NO: 2494858 - RNA, 19 nt, Artificial Sequence
  Description of Artificial Sequence: Synthetic oligonucleotide
caguuaccacaguaauaug

SEQ ID NO: 2494859 - RNA, 19 nt, Artificial Sequence
  Description of Artificial Sequence: Synthetic oligonucleotide
cuuauguugagagucuuau

SEQ ID NO: 2494860 - RNA, 19 nt, Artificial Sequence
  Description of Artificial Sequence: Synthetic oligonucleotide
uguguucccugguuacuuu

SEQ ID NO: 2494861 - RNA, 19 nt, Artificial Sequence
  Description of Artificial Sequence: Synthetic oligonucleotide
gcggaagcaccuuacuccc

SEQ ID NO: 2494862 - RNA, 19 nt, Artificial Sequence
  Description of Artificial Sequence: Synthetic oligonucleotide
ucaagggauccuggugcag

SEQ ID NO: 2494863 - RNA, 19 nt, Artificial Sequence
  Description of Artificial Sequence: Synthetic oligonucleotide
guuaccacaguaauaugau

SEQ ID NO: 2494864 - RNA, 19 nt, Artificial Sequence
  Description of Artificial Sequence: Synthetic oligonucleotide
cuuccguaaaauuuucuuu

SEQ ID NO: 2494865 - RNA, 19 nt, Artificial Sequence
  Description of Artificial Sequence: Synthetic oligonucleotide
gcaguuaccacaguaauau

SEQ ID NO: 2494866 - RNA, 19 nt, Artificial Sequence
  Description of Artificial Sequence: Synthetic oligonucleotide
ugagugcuuccaucacaga

SEQ ID NO: 2494867 - RNA, 19 nt, Artificial Sequence
  Description of Artificial Sequence: Synthetic oligonucleotide
caucacagaucucauuucu

SEQ ID NO: 2494868 - RNA, 19 nt, Artificial Sequence
  Description of Artificial Sequence: Synthetic oligonucleotide
cagcuuauucauugcauua

SEQ ID NO: 2494869 - RNA, 19 nt, Artificial Sequence
  Description of Artificial Sequence: Synthetic oligonucleotide
uugcauuaguucgaaccuu

SEQ ID NO: 2494870 - RNA, 19 nt, Artificial Sequence
  Description of Artificial Sequence: Synthetic oligonucleotide
gaaccuuccguaaaauuuu

SEQ ID NO: 2494871 - RNA, 19 nt, Artificial Sequence
  Description of Artificial Sequence: Synthetic oligonucleotide
ugcaguccuuauguugaga

SEQ ID NO: 2494872 - RNA, 19 nt, Artificial Sequence
  Description of Artificial Sequence: Synthetic oligonucleotide
cuuauucauugcauuaguu

SEQ ID NO: 2494873 - RNA, 19 nt, Artificial Sequence
  Description of Artificial Sequence: Synthetic oligonucleotide
caacuguggugacuucaug

SEQ ID NO: 2494874 - RNA, 19 nt, Artificial Sequence
  Description of Artificial Sequence: Synthetic oligonucleotide
ggcgaacuggcacggcugg

SEQ ID NO: 2494875 - RNA, 19 nt, Artificial Sequence
  Description of Artificial Sequence: Synthetic oligonucleotide
ucccaaggccaugauguaa

SEQ ID NO: 2494876 - RNA, 19 nt, Artificial Sequence
  Description of Artificial Sequence: Synthetic oligonucleotide
gucuuugcugccagaugcc

SEQ ID NO: 2494877 - RNA, 19 nt, Artificial Sequence
  Description of Artificial Sequence: Synthetic oligonucleotide
agaucuggccaaugugauu

SEQ ID NO: 2494878 - RNA, 19 nt, Artificial Sequence
  Description of Artificial Sequence: Synthetic oligonucleotide
gcaugguaacugcaaaaga

SEQ ID NO: 2494879 - RNA, 19 nt, Artificial Sequence
  Description of Artificial Sequence: Synthetic oligonucleotide
cuguugccuuucauccaag

SEQ ID NO: 2494880 - RNA, 19 nt, Artificial Sequence
  Description of Artificial Sequence: Synthetic oligonucleotide
ucccuuccacuucuggguu

SEQ ID NO: 2494881 - RNA, 19 nt, Artificial Sequence
  Description of Artificial Sequence: Synthetic oligonucleotide
cuuucucuuauagccuuga

SEQ ID NO: 2494882 - RNA, 19 nt, Artificial Sequence
  Description of Artificial Sequence: Synthetic oligonucleotide
gguacccgaauuagugucc

SEQ ID NO: 2494883 - RNA, 19 nt, Artificial Sequence
  Description of Artificial Sequence: Synthetic oligonucleotide
ucuggccaaugugauuuaa

SEQ ID NO: 2494884 - RNA, 19 nt, Artificial Sequence
  Description of Artificial Sequence: Synthetic oligonucleotide
uucuggguucagauucauu

SEQ ID NO: 2494885 - RNA, 19 nt, Artificial Sequence
  Description of Artificial Sequence: Synthetic oligonucleotide
ccgaauuagugucccuucc

SEQ ID NO: 2494886 - RNA, 19 nt, Artificial Sequence
  Description of Artificial Sequence: Synthetic oligonucleotide
guucagauucauuccacuu

SEQ ID NO: 2494887 - RNA, 19 nt, Artificial Sequence
  Description of Artificial Sequence: Synthetic oligonucleotide
uccuuauguugagagucuu

SEQ ID NO: 2494888 - RNA, 19 nt, Artificial Sequence
  Description of Artificial Sequence: Synthetic oligonucleotide
agcaguuaccacaguaaua

SEQ ID NO: 2494889 - RNA, 19 nt, Artificial Sequence
  Description of Artificial Sequence: Synthetic oligonucleotide
augcagcaggcggaagcac

SEQ ID NO: 2494890 - RNA, 19 nt, Artificial Sequence
  Description of Artificial Sequence: Synthetic oligonucleotide
ccaagcugauuauauccuc

SEQ ID NO: 2494891 - RNA, 19 nt, Artificial Sequence
  Description of Artificial Sequence: Synthetic oligonucleotide
acuggcgaacuggcacggc

SEQ ID NO: 2494892 - RNA, 19 nt, Artificial Sequence
  Description of Artificial Sequence: Synthetic oligonucleotide
cuggccaaugugauuuaaa

SEQ ID NO: 2494893 - RNA, 19 nt, Artificial Sequence
  Description of Artificial Sequence: Synthetic oligonucleotide
uuacucccaaggccaugau

SEQ ID NO: 2494894 - RNA, 19 nt, Artificial Sequence
  Description of Artificial Sequence: Synthetic oligonucleotide
ggaagcaccuuacucccaa

SEQ ID NO: 2494895 - RNA, 19 nt, Artificial Sequence
  Description of Artificial Sequence: Synthetic oligonucleotide
uaccagcauuucucugugu

SEQ ID NO: 2494896 - RNA, 19 nt, Artificial Sequence
  Description of Artificial Sequence: Synthetic oligonucleotide
acccgaauuagugucccuu

SEQ ID NO: 2494897 - RNA, 19 nt, Artificial Sequence
  Description of Artificial Sequence: Synthetic oligonucleotide
ccaaugugauuuaaagcaa

SEQ ID NO: 2494898 - RNA, 19 nt, Artificial Sequence
  Description of Artificial Sequence: Synthetic oligonucleotide
uacccgaauuagugucccu

SEQ ID NO: 2494899 - RNA, 19 nt, Artificial Sequence
  Description of Artificial Sequence: Synthetic oligonucleotide
accuuccguaaaauuuucu

SEQ ID NO: 2494900 - RNA, 19 nt, Artificial Sequence
  Description of Artificial Sequence: Synthetic oligonucleotide
gcuuauucauugcauuagu

SEQ ID NO: 2494901 - RNA, 19 nt, Artificial Sequence
  Description of Artificial Sequence: Synthetic oligonucleotide
agcaggcggaagcaccuua

SEQ ID NO: 2494902 - RNA, 19 nt, Artificial Sequence
  Description of Artificial Sequence: Synthetic oligonucleotide
caccaaaaucaacuguggu

SEQ ID NO: 2494903 - RNA, 19 nt, Artificial Sequence
  Description of Artificial Sequence: Synthetic oligonucleotide
uauccucaaccaagcccuu

SEQ ID NO: 2494904 - RNA, 19 nt, Artificial Sequence
  Description of Artificial Sequence: Synthetic oligonucleotide
gcauuaguucgaaccuucc

SEQ ID NO: 2494905 - RNA, 19 nt, Artificial Sequence
  Description of Artificial Sequence: Synthetic oligonucleotide
gcuaaguauugccuguggu

SEQ ID NO: 2494906 - RNA, 19 nt, Artificial Sequence
  Description of Artificial Sequence: Synthetic oligonucleotide
gagaucuggccaaugugau

SEQ ID NO: 2494907 - RNA, 19 nt, Artificial Sequence
  Description of Artificial Sequence: Synthetic oligonucleotide
agccucagaaacagccaca

SEQ ID NO: 2494908 - RNA, 19 nt, Artificial Sequence
  Description of Artificial Sequence: Synthetic oligonucleotide
aggucuggucaaaguagca

SEQ ID NO: 2494909 - RNA, 19 nt, Artificial Sequence
  Description of Artificial Sequence: Synthetic oligonucleotide
ucauggagaucuggccaau

SEQ ID NO: 2494910 - RNA, 19 nt, Artificial Sequence
  Description of Artificial Sequence: Synthetic oligonucleotide
ccugguuacuuuaggaaua

SEQ ID NO: 2494911 - RNA, 19 nt, Artificial Sequence
  Description of Artificial Sequence: Synthetic oligonucleotide
gguaggcuaaguauugccu

SEQ ID NO: 2494912 - RNA, 19 nt, Artificial Sequence
  Description of Artificial Sequence: Synthetic oligonucleotide
acgggaugcagcaggcgga

SEQ ID NO: 2494913 - RNA, 19 nt, Artificial Sequence
  Description of Artificial Sequence: Synthetic oligonucleotide
gccuugauagcugcagcug

SEQ ID NO: 2494914 - RNA, 19 nt, Artificial Sequence
  Description of Artificial Sequence: Synthetic oligonucleotide
acugugucgucggccauuu

SEQ ID NO: 2494915 - RNA, 19 nt, Artificial Sequence
  Description of Artificial Sequence: Synthetic oligonucleotide
uauugccuguggucauguu

SEQ ID NO: 2494916 - RNA, 19 nt, Artificial Sequence
  Description of Artificial Sequence: Synthetic oligonucleotide
gguguccuccgauguuuug

SEQ ID NO: 2494917 - RNA, 19 nt, Artificial Sequence
  Description of Artificial Sequence: Synthetic oligonucleotide
cccgaauuagugucccuuc

SEQ ID NO: 2494918 - RNA, 19 nt, Artificial Sequence
  Description of Artificial Sequence: Synthetic oligonucleotide
gccuguccagcucugcaac

SEQ ID NO: 2494919 - RNA, 19 nt, Artificial Sequence
  Description of Artificial Sequence: Synthetic oligonucleotide
ccucaaccaagcccuuuag

SEQ ID NO: 2494920 - RNA, 19 nt, Artificial Sequence
  Description of Artificial Sequence: Synthetic oligonucleotide
gaugguguccuccgauguu

SEQ ID NO: 2494921 - RNA, 19 nt, Artificial Sequence
  Description of Artificial Sequence: Synthetic oligonucleotide
ggcuggguaggcuaaguau

SEQ ID NO: 2494922 - RNA, 19 nt, Artificial Sequence
  Description of Artificial Sequence: Synthetic oligonucleotide
guguccuccgauguuuugu

SEQ ID NO: 2494923 - RNA, 19 nt, Artificial Sequence
  Description of Artificial Sequence: Synthetic oligonucleotide
ugcuuccaucacagaucuc

SEQ ID NO: 2494924 - RNA, 19 nt, Artificial Sequence
  Description of Artificial Sequence: Synthetic oligonucleotide
guccuuauguugagagucu

SEQ ID NO: 2494925 - RNA, 19 nt, Artificial Sequence
  Description of Artificial Sequence: Synthetic oligonucleotide
cuggcgaacuggcacggcu

SEQ ID NO: 2494926 - RNA, 19 nt, Artificial Sequence
  Description of Artificial Sequence: Synthetic oligonucleotide
cagauucauuccacuuucu

SEQ ID NO: 2494927 - RNA, 19 nt, Artificial Sequence
  Description of Artificial Sequence: Synthetic oligonucleotide
cgaaccuuccguaaaauuu

SEQ ID NO: 2494928 - RNA, 19 nt, Artificial Sequence
  Description of Artificial Sequence: Synthetic oligonucleotide
guauugccuguggucaugu

SEQ ID NO: 2494929 - RNA, 19 nt, Artificial Sequence
  Description of Artificial Sequence: Synthetic oligonucleotide
ggcacggcuggguaggcua

SEQ ID NO: 2494930 - RNA, 19 nt, Artificial Sequence
  Description of Artificial Sequence: Synthetic oligonucleotide
caagggauccuggugcagu

SEQ ID NO: 2494931 - RNA, 19 nt, Artificial Sequence
  Description of Artificial Sequence: Synthetic oligonucleotide
aguuucccaucagcaguua

SEQ ID NO: 2494932 - RNA, 19 nt, Artificial Sequence
  Description of Artificial Sequence: Synthetic oligonucleotide
gguugcaaacuggcgaacu

SEQ ID NO: 2494933 - RNA, 19 nt, Artificial Sequence
  Description of Artificial Sequence: Synthetic oligonucleotide
ccuuccguaaaauuuucuu

SEQ ID NO: 2494934 - RNA, 19 nt, Artificial Sequence
  Description of Artificial Sequence: Synthetic oligonucleotide
cacggcuggguaggcuaag

SEQ ID NO: 2494935 - RNA, 19 nt, Artificial Sequence
  Description of Artificial Sequence: Synthetic oligonucleotide
uggugacuucauggagauc

SEQ ID NO: 2494936 - RNA, 19 nt, Artificial Sequence
  Description of Artificial Sequence: Synthetic oligonucleotide
gcaggcggaagcaccuuac

SEQ ID NO: 2494937 - RNA, 19 nt, Artificial Sequence
  Description of Artificial Sequence: Synthetic oligonucleotide
gcuggguaggcuaaguauu

SEQ ID NO: 2494938 - RNA, 19 nt, Artificial Sequence
  Description of Artificial Sequence: Synthetic oligonucleotide
ccuuauguugagagucuua

SEQ ID NO: 2494939 - RNA, 19 nt, Artificial Sequence
  Description of Artificial Sequence: Synthetic oligonucleotide
cuggcacggcuggguaggc

SEQ ID NO: 2494940 - RNA, 19 nt, Artificial Sequence
  Description of Artificial Sequence: Synthetic oligonucleotide
cuggucaaaguagcauggu

SEQ ID NO: 2494941 - RNA, 19 nt, Artificial Sequence
  Description of Artificial Sequence: Synthetic oligonucleotide
cugugucgucggccauuug

SEQ ID NO: 2494942 - RNA, 19 nt, Artificial Sequence
  Description of Artificial Sequence: Synthetic oligonucleotide
gcgaacuggcacggcuggg

SEQ ID NO: 2494943 - RNA, 19 nt, Artificial Sequence
  Description of Artificial Sequence: Synthetic oligonucleotide
ccgauguuuuguccuuuga

SEQ ID NO: 2494944 - RNA, 19 nt, Artificial Sequence
  Description of Artificial Sequence: Synthetic oligonucleotide
ggccaguuuuaccagcauu

SEQ ID NO: 2494945 - RNA, 19 nt, Artificial Sequence
  Description of Artificial Sequence: Synthetic oligonucleotide
cccuuccacuucuggguuc

SEQ ID NO: 2494946 - RNA, 19 nt, Artificial Sequence
  Description of Artificial Sequence: Synthetic oligonucleotide
caggcggaagcaccuuacu

SEQ ID NO: 2494947 - RNA, 19 nt, Artificial Sequence
  Description of Artificial Sequence: Synthetic oligonucleotide
guuucucuaugagccugau

SEQ ID NO: 2494948 - RNA, 19 nt, Artificial Sequence
  Description of Artificial Sequence: Synthetic oligonucleotide
cacccaccucuuccaagcu

SEQ ID NO: 2494949 - RNA, 19 nt, Artificial Sequence
  Description of Artificial Sequence: Synthetic oligonucleotide
gcccuuuagcuuuggcuuu

SEQ ID NO: 2494950 - RNA, 19 nt, Artificial Sequence
  Description of Artificial Sequence: Synthetic oligonucleotide
gguguucuguuuggccagu

SEQ ID NO: 2494951 - RNA, 19 nt, Artificial Sequence
  Description of Artificial Sequence: Synthetic oligonucleotide
cugggaaauuggccauauu

SEQ ID NO: 2494952 - RNA, 19 nt, Artificial Sequence
  Description of Artificial Sequence: Synthetic oligonucleotide
caacugugucgucggccau

SEQ ID NO: 2494953 - RNA, 19 nt, Artificial Sequence
  Description of Artificial Sequence: Synthetic oligonucleotide
cuguacacucugggaaauu

SEQ ID NO: 2494954 - RNA, 19 nt, Artificial Sequence
  Description of Artificial Sequence: Synthetic oligonucleotide
ccucuuccaagcugauuau

SEQ ID NO: 2494955 - RNA, 19 nt, Artificial Sequence
  Description of Artificial Sequence: Synthetic oligonucleotide
gccauuuggcugaucuguu

SEQ ID NO: 2494956 - RNA, 19 nt, Artificial Sequence
  Description of Artificial Sequence: Synthetic oligonucleotide
gcacggcuggguaggcuaa

SEQ ID NO: 2494957 - RNA, 19 nt, Artificial Sequence
  Description of Artificial Sequence: Synthetic oligonucleotide
ccuccgauguuuuguccuu

SEQ ID NO: 2494958 - RNA, 19 nt, Artificial Sequence
  Description of Artificial Sequence: Synthetic oligonucleotide
cggcuggguaggcuaagua

SEQ ID NO: 2494959 - RNA, 19 nt, Artificial Sequence
  Description of Artificial Sequence: Synthetic oligonucleotide
cagcaggcggaagcaccuu

SEQ ID NO: 2494960 - RNA, 19 nt, Artificial Sequence
  Description of Artificial Sequence: Synthetic oligonucleotide
uccaagagcaggcagaugg

SEQ ID NO: 2494961 - RNA, 19 nt, Artificial Sequence
  Description of Artificial Sequence: Synthetic oligonucleotide
ucagauaucuucuucaggc

SEQ ID NO: 2494962 - RNA, 19 nt, Artificial Sequence
  Description of Artificial Sequence: Synthetic oligonucleotide
ucauaaacgaggaaauccg

SEQ ID NO: 2494963 - RNA, 19 nt, Artificial Sequence
  Description of Artificial Sequence: Synthetic oligonucleotide
aauccaggcacuugggugc

SEQ ID NO: 2494964 - RNA, 19 nt, Artificial Sequence
  Description of Artificial Sequence: Synthetic oligonucleotide
uuuucauguagucagauau

SEQ ID NO: 2494965 - RNA, 19 nt, Artificial Sequence
  Description of Artificial Sequence: Synthetic oligonucleotide
aucauaaacgaggaaaucc

SEQ ID NO: 2494966 - RNA, 19 nt, Artificial Sequence
  Description of Artificial Sequence: Synthetic oligonucleotide
uugguuuggagguaaagcg

SEQ ID NO: 2494967 - RNA, 19 nt, Artificial Sequence
  Description of Artificial Sequence: Synthetic oligonucleotide
aacgaauccaggcacuugg

SEQ ID NO: 2494968 - RNA, 19 nt, Artificial Sequence
  Description of Artificial Sequence: Synthetic oligonucleotide
ucaaggauaucauaaacga

SEQ ID NO: 2494969 - RNA, 19 nt, Artificial Sequence
  Description of Artificial Sequence: Synthetic oligonucleotide
uuucguuucucaaagucag

SEQ ID NO: 2494970 - RNA, 19 nt, Artificial Sequence
  Description of Artificial Sequence: Synthetic oligonucleotide
uuugaguuccaaaaggcca

SEQ ID NO: 2494971 - RNA, 19 nt, Artificial Sequence
  Description of Artificial Sequence: Synthetic oligonucleotide
agauaucuucuucaggccc

SEQ ID NO: 2494972 - RNA, 19 nt, Artificial Sequence
  Description of Artificial Sequence: Synthetic oligonucleotide
ucagaguagagcuucaucu

SEQ ID NO: 2494973 - RNA, 19 nt, Artificial Sequence
  Description of Artificial Sequence: Synthetic oligonucleotide
uuuggaaacgaauccaggc

SEQ ID NO: 2494974 - RNA, 19 nt, Artificial Sequence
  Description of Artificial Sequence: Synthetic oligonucleotide
uagagcuucaucuucucgg

SEQ ID NO: 2494975 - RNA, 19 nt, Artificial Sequence
  Description of Artificial Sequence: Synthetic oligonucleotide
agacagcccacguauaucc

SEQ ID NO: 2494976 - RNA, 19 nt, Artificial Sequence
  Description of Artificial Sequence: Synthetic oligonucleotide
auugguuuggagguaaagc

SEQ ID NO: 2494977 - RNA, 19 nt, Artificial Sequence
  Description of Artificial Sequence: Synthetic oligonucleotide
auuuugaguuccaaaaggc

SEQ ID NO: 2494978 - RNA, 19 nt, Artificial Sequence
  Description of Artificial Sequence: Synthetic oligonucleotide
ugaguauucugucagggcu

SEQ ID NO: 2494979 - RNA, 19 nt, Artificial Sequence
  Description of Artificial Sequence: Synthetic oligonucleotide
uuuugaguuccaaaaggcc

SEQ ID NO: 2494980 - RNA, 19 nt, Artificial Sequence
  Description of Artificial Sequence: Synthetic oligonucleotide
aacgaggaaauccgcauag

SEQ ID NO: 2494981 - RNA, 19 nt, Artificial Sequence
  Description of Artificial Sequence: Synthetic oligonucleotide
uuuguaguccuauuuugag

SEQ ID NO: 2494982 - RNA, 19 nt, Artificial Sequence
  Description of Artificial Sequence: Synthetic oligonucleotide
acguauaucccaguaaccc

SEQ ID NO: 2494983 - RNA, 19 nt, Artificial Sequence
  Description of Artificial Sequence: Synthetic oligonucleotide
aucaugaguauucugucag

SEQ ID NO: 2494984 - RNA, 19 nt, Artificial Sequence
  Description of Artificial Sequence: Synthetic oligonucleotide
aaagcgugccaagaagucc

SEQ ID NO: 2494985 - RNA, 19 nt, Artificial Sequence
  Description of Artificial Sequence: Synthetic oligonucleotide
ugcaaauauacggugcugg

SEQ ID NO: 2494986 - RNA, 19 nt, Artificial Sequence
  Description of Artificial Sequence: Synthetic oligonucleotide
gcaaagauugguuuggagg

SEQ ID NO: 2494987 - RNA, 19 nt, Artificial Sequence
  Description of Artificial Sequence: Synthetic oligonucleotide
gucaaggauaucauaaacg

SEQ ID NO: 2494988 - RNA, 19 nt, Artificial Sequence
  Description of Artificial Sequence: Synthetic oligonucleotide
ucagguuuggaaacgaauc

SEQ ID NO: 2494989 - RNA, 19 nt, Artificial Sequence
  Description of Artificial Sequence: Synthetic oligonucleotide
ugguuuggagguaaagcgg

SEQ ID NO: 2494990 - RNA, 19 nt, Artificial Sequence
  Description of Artificial Sequence: Synthetic oligonucleotide
aucucuuuuccucauagcu

SEQ ID NO: 2494991 - RNA, 19 nt, Artificial Sequence
  Description of Artificial Sequence: Synthetic oligonucleotide
aaucaugaguauucuguca

SEQ ID NO: 2494992 - RNA, 19 nt, Artificial Sequence
  Description of Artificial Sequence: Synthetic oligonucleotide
uaucuguguacuccaagag

SEQ ID NO: 2494993 - RNA, 19 nt, Artificial Sequence
  Description of Artificial Sequence: Synthetic oligonucleotide
uuccaaaaggccaucuuug

SEQ ID NO: 2494994 - RNA, 19 nt, Artificial Sequence
  Description of Artificial Sequence: Synthetic oligonucleotide
uguaguccuauuuugaguu

SEQ ID NO: 2494995 - RNA, 19 nt, Artificial Sequence
  Description of Artificial Sequence: Synthetic oligonucleotide
uuggaaacgaauccaggca

SEQ ID NO: 2494996 - RNA, 19 nt, Artificial Sequence
  Description of Artificial Sequence: Synthetic oligonucleotide
augaguauucugucagggc

SEQ ID NO: 2494997 - RNA, 19 nt, Artificial Sequence
  Description of Artificial Sequence: Synthetic oligonucleotide
ucaaagcgugccaagaagu

SEQ ID NO: 2494998 - RNA, 19 nt, Artificial Sequence
  Description of Artificial Sequence: Synthetic oligonucleotide
cuauuuugaguuccaaaag

SEQ ID NO: 2494999 - RNA, 19 nt, Artificial Sequence
  Description of Artificial Sequence: Synthetic oligonucleotide
agaguagagcuucaucuuc

SEQ ID NO: 2495000 - RNA, 19 nt, Artificial Sequence
  Description of Artificial Sequence: Synthetic oligonucleotide
cucuuuuccucauagcuug

SEQ ID NO: 2495001 - RNA, 19 nt, Artificial Sequence
  Description of Artificial Sequence: Synthetic oligonucleotide
uguaucuguguacuccaag

SEQ ID NO: 2495002 - RNA, 19 nt, Artificial Sequence
  Description of Artificial Sequence: Synthetic oligonucleotide
gaauccaggcacuugggug

SEQ ID NO: 2495003 - RNA, 19 nt, Artificial Sequence
  Description of Artificial Sequence: Synthetic oligonucleotide
uauacggugcuggucaagg

SEQ ID NO: 2495004 - RNA, 19 nt, Artificial Sequence
  Description of Artificial Sequence: Synthetic oligonucleotide
uggcuuucguuucucaaag

SEQ ID NO: 2495005 - RNA, 19 nt, Artificial Sequence
  Description of Artificial Sequence: Synthetic oligonucleotide
agagcuucaucuucucggg

SEQ ID NO: 2495006 - RNA, 19 nt, Artificial Sequence
  Description of Artificial Sequence: Synthetic oligonucleotide
uguagcaaaccauggccag

SEQ ID NO: 2495007 - RNA, 19 nt, Artificial Sequence
  Description of Artificial Sequence: Synthetic oligonucleotide
uugggugcaaauauacggu

SEQ ID NO: 2495008 - RNA, 19 nt, Artificial Sequence
  Description of Artificial Sequence: Synthetic oligonucleotide
ucaugaguauucugucagg

SEQ ID NO: 2495009 - RNA, 19 nt, Artificial Sequence
  Description of Artificial Sequence: Synthetic oligonucleotide
agucagauaucuucuucag

SEQ ID NO: 2495010 - RNA, 19 nt, Artificial Sequence
  Description of Artificial Sequence: Synthetic oligonucleotide
caaggauaucauaaacgag

SEQ ID NO: 2495011 - RNA, 19 nt, Artificial Sequence
  Description of Artificial Sequence: Synthetic oligonucleotide
cauaaacgaggaaauccgc

SEQ ID NO: 2495012 - RNA, 19 nt, Artificial Sequence
  Description of Artificial Sequence: Synthetic oligonucleotide
caugaguauucugucaggg

SEQ ID NO: 2495013 - RNA, 19 nt, Artificial Sequence
  Description of Artificial Sequence: Synthetic oligonucleotide
cagguuuggaaacgaaucc

SEQ ID NO: 2495014 - RNA, 19 nt, Artificial Sequence
  Description of Artificial Sequence: Synthetic oligonucleotide
uaaacgaggaaauccgcau

SEQ ID NO: 2495015 - RNA, 19 nt, Artificial Sequence
  Description of Artificial Sequence: Synthetic oligonucleotide
aaaaggccaucuuugcaaa

SEQ ID NO: 2495016 - RNA, 19 nt, Artificial Sequence
  Description of Artificial Sequence: Synthetic oligonucleotide
caggcaaucaugaguauuc

SEQ ID NO: 2495017 - RNA, 19 nt, Artificial Sequence
  Description of Artificial Sequence: Synthetic oligonucleotide
aguacucuggcuuucguuu

SEQ ID NO: 2495018 - RNA, 19 nt, Artificial Sequence
  Description of Artificial Sequence: Synthetic oligonucleotide
uccaaaaggccaucuuugc

SEQ ID NO: 2495019 - RNA, 19 nt, Artificial Sequence
  Description of Artificial Sequence: Synthetic oligonucleotide
uucagguuuggaaacgaau

SEQ ID NO: 2495020 - RNA, 19 nt, Artificial Sequence
  Description of Artificial Sequence: Synthetic oligonucleotide
ugcaaagauugguuuggag

SEQ ID NO: 2495021 - RNA, 19 nt, Artificial Sequence
  Description of Artificial Sequence: Synthetic oligonucleotide
uugaguuccaaaaggccau

SEQ ID NO: 2495022 - RNA, 19 nt, Artificial Sequence
  Description of Artificial Sequence: Synthetic oligonucleotide
guauaucccaguaacccag

SEQ ID NO: 2495023 - RNA, 19 nt, Artificial Sequence
  Description of Artificial Sequence: Synthetic oligonucleotide
uacuccaagagcaggcaga

SEQ ID NO: 2495024 - RNA, 19 nt, Artificial Sequence
  Description of Artificial Sequence: Synthetic oligonucleotide
uuguaguccuauuuugagu

SEQ ID NO: 2495025 - RNA, 19 nt, Artificial Sequence
  Description of Artificial Sequence: Synthetic oligonucleotide
aaauccgcauaggugaccu

SEQ ID NO: 2495026 - RNA, 19 nt, Artificial Sequence
  Description of Artificial Sequence: Synthetic oligonucleotide
ucuuugcaaagauugguuu

SEQ ID NO: 2495027 - RNA, 19 nt, Artificial Sequence
  Description of Artificial Sequence: Synthetic oligonucleotide
uuuccucauagcuuguauc

SEQ ID NO: 2495028 - RNA, 19 nt, Artificial Sequence
  Description of Artificial Sequence: Synthetic oligonucleotide
uuuuguggccagcaggcaa

SEQ ID NO: 2495029 - RNA, 19 nt, Artificial Sequence
  Description of Artificial Sequence: Synthetic oligonucleotide
cacuugggugcaaauauac

SEQ ID NO: 2495030 - RNA, 19 nt, Artificial Sequence
  Description of Artificial Sequence: Synthetic oligonucleotide
acccucuaaguacucuggc

SEQ ID NO: 2495031 - RNA, 19 nt, Artificial Sequence
  Description of Artificial Sequence: Synthetic oligonucleotide
caggcagauggcaugagac

SEQ ID NO: 2495032 - RNA, 19 nt, Artificial Sequence
  Description of Artificial Sequence: Synthetic oligonucleotide
uucguuucucaaagucagg

SEQ ID NO: 2495033 - RNA, 19 nt, Artificial Sequence
  Description of Artificial Sequence: Synthetic oligonucleotide
uggucucuugcccaggaac

SEQ ID NO: 2495034 - RNA, 19 nt, Artificial Sequence
  Description of Artificial Sequence: Synthetic oligonucleotide
cuuucguuucucaaaguca

SEQ ID NO: 2495035 - RNA, 19 nt, Artificial Sequence
  Description of Artificial Sequence: Synthetic oligonucleotide
gcuguagcaaaccauggcc

SEQ ID NO: 2495036 - RNA, 19 nt, Artificial Sequence
  Description of Artificial Sequence: Synthetic oligonucleotide
uaucccaguaacccagugu

SEQ ID NO: 2495037 - RNA, 19 nt, Artificial Sequence
  Description of Artificial Sequence: Synthetic oligonucleotide
caaucaugaguauucuguc

SEQ ID NO: 2495038 - RNA, 19 nt, Artificial Sequence
  Description of Artificial Sequence: Synthetic oligonucleotide
ugggugcaaauauacggug

SEQ ID NO: 2495039 - RNA, 19 nt, Artificial Sequence
  Description of Artificial Sequence: Synthetic oligonucleotide
uauucugucagggcugggc

SEQ ID NO: 2495040 - RNA, 19 nt, Artificial Sequence
  Description of Artificial Sequence: Synthetic oligonucleotide
guaucuguguacuccaaga

SEQ ID NO: 2495041 - RNA, 19 nt, Artificial Sequence
  Description of Artificial Sequence: Synthetic oligonucleotide
uuuuccucauagcuuguau

SEQ ID NO: 2495042 - RNA, 19 nt, Artificial Sequence
  Description of Artificial Sequence: Synthetic oligonucleotide
cagauaucuucuucaggcc

SEQ ID NO: 2495043 - RNA, 19 nt, Artificial Sequence
  Description of Artificial Sequence: Synthetic oligonucleotide
aaccauggucucuugccca

SEQ ID NO: 2495044 - RNA, 19 nt, Artificial Sequence
  Description of Artificial Sequence: Synthetic oligonucleotide
uaguccuauuuugaguucc

SEQ ID NO: 2495045 - RNA, 19 nt, Artificial Sequence
  Description of Artificial Sequence: Synthetic oligonucleotide
guagagcuucaucuucucg

SEQ ID NO: 2495046 - RNA, 19 nt, Artificial Sequence
  Description of Artificial Sequence: Synthetic oligonucleotide
uccuauuuugaguuccaaa

SEQ ID NO: 2495047 - RNA, 19 nt, Artificial Sequence
  Description of Artificial Sequence: Synthetic oligonucleotide
uaucucuuuuccucauagc

SEQ ID NO: 2495048 - RNA, 19 nt, Artificial Sequence
  Description of Artificial Sequence: Synthetic oligonucleotide
gccaucuuugcaaagauug

SEQ ID NO: 2495049 - RNA, 19 nt, Artificial Sequence
  Description of Artificial Sequence: Synthetic oligonucleotide
uuggagguaaagcggcuac

SEQ ID NO: 2495050 - RNA, 19 nt, Artificial Sequence
  Description of Artificial Sequence: Synthetic oligonucleotide
guuuggaaacgaauccagg

SEQ ID NO: 2495051 - RNA, 19 nt, Artificial Sequence
  Description of Artificial Sequence: Synthetic oligonucleotide
cuggucaaggauaucauaa

SEQ ID NO: 2495052 - RNA, 19 nt, Artificial Sequence
  Description of Artificial Sequence: Synthetic oligonucleotide
aaggccaucuuugcaaaga

SEQ ID NO: 2495053 - RNA, 19 nt, Artificial Sequence
  Description of Artificial Sequence: Synthetic oligonucleotide
agcuucaucuucucgggga

SEQ ID NO: 2495054 - RNA, 19 nt, Artificial Sequence
  Description of Artificial Sequence: Synthetic oligonucleotide
caaagauugguuuggaggu

SEQ ID NO: 2495055 - RNA, 19 nt, Artificial Sequence
  Description of Artificial Sequence: Synthetic oligonucleotide
gauugguuuggagguaaag

SEQ ID NO: 2495056 - RNA, 19 nt, Artificial Sequence
  Description of Artificial Sequence: Synthetic oligonucleotide
cacguauaucccaguaacc

SEQ ID NO: 2495057 - RNA, 19 nt, Artificial Sequence
  Description of Artificial Sequence: Synthetic oligonucleotide
agacccucuaaguacucug

SEQ ID NO: 2495058 - RNA, 19 nt, Artificial Sequence
  Description of Artificial Sequence: Synthetic oligonucleotide
aaacgaggaaauccgcaua

SEQ ID NO: 2495059 - RNA, 19 nt, Artificial Sequence
  Description of Artificial Sequence: Synthetic oligonucleotide
ugagacagcccacguauau

SEQ ID NO: 2495060 - RNA, 19 nt, Artificial Sequence
  Description of Artificial Sequence: Synthetic oligonucleotide
uuuguggccagcaggcaau

SEQ ID NO: 2495061 - RNA, 19 nt, Artificial Sequence
  Description of Artificial Sequence: Synthetic oligonucleotide
ucagggcuguagcaaacca

SEQ ID NO: 2495062 - RNA, 19 nt, Artificial Sequence
  Description of Artificial Sequence: Synthetic oligonucleotide
agguaaagcggcuacuuuu

SEQ ID NO: 2495063 - RNA, 19 nt, Artificial Sequence
  Description of Artificial Sequence: Synthetic oligonucleotide
caucuucucggggagaccc

SEQ ID NO: 2495064 - RNA, 19 nt, Artificial Sequence
  Description of Artificial Sequence: Synthetic oligonucleotide
aaccauggccagcugcaug

SEQ ID NO: 2495065 - RNA, 19 nt, Artificial Sequence
  Description of Artificial Sequence: Synthetic oligonucleotide
aguauucugucagggcugg

SEQ ID NO: 2495066 - RNA, 19 nt, Artificial Sequence
  Description of Artificial Sequence: Synthetic oligonucleotide
auucugucagggcugggcu

SEQ ID NO: 2495067 - RNA, 19 nt, Artificial Sequence
  Description of Artificial Sequence: Synthetic oligonucleotide
aagcgugccaagaaguccu

SEQ ID NO: 2495068 - RNA, 19 nt, Artificial Sequence
  Description of Artificial Sequence: Synthetic oligonucleotide
aaguacucuggcuuucguu

SEQ ID NO: 2495069 - RNA, 19 nt, Artificial Sequence
  Description of Artificial Sequence: Synthetic oligonucleotide
auaaacgaggaaauccgca

SEQ ID NO: 2495070 - RNA, 19 nt, Artificial Sequence
  Description of Artificial Sequence: Synthetic oligonucleotide
uggucaaggauaucauaaa

SEQ ID NO: 2495071 - RNA, 19 nt, Artificial Sequence
  Description of Artificial Sequence: Synthetic oligonucleotide
cuuguaucuguguacucca

SEQ ID NO: 2495072 - RNA, 19 nt, Artificial Sequence
  Description of Artificial Sequence: Synthetic oligonucleotide
aagauugguuuggagguaa

SEQ ID NO: 2495073 - RNA, 19 nt, Artificial Sequence
  Description of Artificial Sequence: Synthetic oligonucleotide
uaucauaaacgaggaaauc

SEQ ID NO: 2495074 - RNA, 19 nt, Artificial Sequence
  Description of Artificial Sequence: Synthetic oligonucleotide
ggucaaggauaucauaaac

SEQ ID NO: 2495075 - RNA, 19 nt, Artificial Sequence
  Description of Artificial Sequence: Synthetic oligonucleotide
uacggugcuggucaaggau

SEQ ID NO: 2495076 - RNA, 19 nt, Artificial Sequence
  Description of Artificial Sequence: Synthetic oligonucleotide
acuugggugcaaauauacg

SEQ ID NO: 2495077 - RNA, 19 nt, Artificial Sequence
  Description of Artificial Sequence: Synthetic oligonucleotide
gacccucuaaguacucugg

SEQ ID NO: 2495078 - RNA, 19 nt, Artificial Sequence
  Description of Artificial Sequence: Synthetic oligonucleotide
caaagcgugccaagaaguc

SEQ ID NO: 2495079 - RNA, 19 nt, Artificial Sequence
  Description of Artificial Sequence: Synthetic oligonucleotide
uucaucuucucggggagac

SEQ ID NO: 2495080 - RNA, 19 nt, Artificial Sequence
  Description of Artificial Sequence: Synthetic oligonucleotide
ccuauuuugaguuccaaaa

SEQ ID NO: 2495081 - RNA, 19 nt, Artificial Sequence
  Description of Artificial Sequence: Synthetic oligonucleotide
cuaaguacucuggcuuucg

SEQ ID NO: 2495082 - RNA, 19 nt, Artificial Sequence
  Description of Artificial Sequence: Synthetic oligonucleotide
uagcuuguaucuguguacu

SEQ ID NO: 2495083 - RNA, 19 nt, Artificial Sequence
  Description of Artificial Sequence: Synthetic oligonucleotide
uaaagcggcuacuuuucau

SEQ ID NO: 2495084 - RNA, 19 nt, Artificial Sequence
  Description of Artificial Sequence: Synthetic oligonucleotide
cagauggcaugagacagcc

SEQ ID NO: 2495085 - RNA, 19 nt, Artificial Sequence
  Description of Artificial Sequence: Synthetic oligonucleotide
uagcaaaccauggccagcu

SEQ ID NO: 2495086 - RNA, 19 nt, Artificial Sequence
  Description of Artificial Sequence: Synthetic oligonucleotide
aaacgaauccaggcacuug

SEQ ID NO: 2495087 - RNA, 19 nt, Artificial Sequence
  Description of Artificial Sequence: Synthetic oligonucleotide
uaaguacucuggcuuucgu

SEQ ID NO: 2495088 - RNA, 19 nt, Artificial Sequence
  Description of Artificial Sequence: Synthetic oligonucleotide
caaaccauggccagcugca

SEQ ID NO: 2495089 - RNA, 19 nt, Artificial Sequence
  Description of Artificial Sequence: Synthetic oligonucleotide
cuguagcaaaccauggcca

SEQ ID NO: 2495090 - RNA, 19 nt, Artificial Sequence
  Description of Artificial Sequence: Synthetic oligonucleotide
gagcuucaucuucucgggg

SEQ ID NO: 2495091 - RNA, 19 nt, Artificial Sequence
  Description of Artificial Sequence: Synthetic oligonucleotide
gguuuggaaacgaauccag

SEQ ID NO: 2495092 - RNA, 19 nt, Artificial Sequence
  Description of Artificial Sequence: Synthetic oligonucleotide
cucggggagacccucuaag

SEQ ID NO: 2495093 - RNA, 19 nt, Artificial Sequence
  Description of Artificial Sequence: Synthetic oligonucleotide
agcuuguaucuguguacuc

SEQ ID NO: 2495094 - RNA, 19 nt, Artificial Sequence
  Description of Artificial Sequence: Synthetic oligonucleotide
agguuuggaaacgaaucca

SEQ ID NO: 2495095 - RNA, 19 nt, Artificial Sequence
  Description of Artificial Sequence: Synthetic oligonucleotide
agggcuguagcaaaccaug

SEQ ID NO: 2495096 - RNA, 19 nt, Artificial Sequence
  Description of Artificial Sequence: Synthetic oligonucleotide
caaauauacggugcugguc

SEQ ID NO: 2495097 - RNA, 19 nt, Artificial Sequence
  Description of Artificial Sequence: Synthetic oligonucleotide
ggcagauggcaugagacag

SEQ ID NO: 2495098 - RNA, 19 nt, Artificial Sequence
  Description of Artificial Sequence: Synthetic oligonucleotide
gcuuucguuucucaaaguc

SEQ ID NO: 2495099 - RNA, 19 nt, Artificial Sequence
  Description of Artificial Sequence: Synthetic oligonucleotide
gguuuggagguaaagcggc

SEQ ID NO: 2495100 - RNA, 19 nt, Artificial Sequence
  Description of Artificial Sequence: Synthetic oligonucleotide
gugccaagaaguccuucag

SEQ ID NO: 2495101 - RNA, 19 nt, Artificial Sequence
  Description of Artificial Sequence: Synthetic oligonucleotide
gcuuguaucuguguacucc

SEQ ID NO: 2495102 - RNA, 19 nt, Artificial Sequence
  Description of Artificial Sequence: Synthetic oligonucleotide
aggcagauggcaugagaca

SEQ ID NO: 2495103 - RNA, 19 nt, Artificial Sequence
  Description of Artificial Sequence: Synthetic oligonucleotide
auccgcauaggugaccuug

SEQ ID NO: 2495104 - RNA, 19 nt, Artificial Sequence
  Description of Artificial Sequence: Synthetic oligonucleotide
uccacccgaauccucuccu

SEQ ID NO: 2495105 - RNA, 19 nt, Artificial Sequence
  Description of Artificial Sequence: Synthetic oligonucleotide
ccacguauaucccaguaac

SEQ ID NO: 2495106 - RNA, 19 nt, Artificial Sequence
  Description of Artificial Sequence: Synthetic oligonucleotide
ugcuggucaaggauaucau

SEQ ID NO: 2495107 - RNA, 19 nt, Artificial Sequence
  Description of Artificial Sequence: Synthetic oligonucleotide
ucuaaguacucuggcuuuc

SEQ ID NO: 2495108 - RNA, 19 nt, Artificial Sequence
  Description of Artificial Sequence: Synthetic oligonucleotide
uccgcauaggugaccuugu

SEQ ID NO: 2495109 - RNA, 19 nt, Artificial Sequence
  Description of Artificial Sequence: Synthetic oligonucleotide
ucuuuuccucauagcuugu

SEQ ID NO: 2495110 - RNA, 19 nt, Artificial Sequence
  Description of Artificial Sequence: Synthetic oligonucleotide
gaaauccgcauaggugacc

SEQ ID NO: 2495111 - RNA, 19 nt, Artificial Sequence
  Description of Artificial Sequence: Synthetic oligonucleotide
ggggagacccucuaaguac

SEQ ID NO: 2495112 - RNA, 19 nt, Artificial Sequence
  Description of Artificial Sequence: Synthetic oligonucleotide
ccaucuuugcaaagauugg

SEQ ID NO: 2495113 - RNA, 19 nt, Artificial Sequence
  Description of Artificial Sequence: Synthetic oligonucleotide
ucggggagacccucuaagu

SEQ ID NO: 2495114 - RNA, 19 nt, Artificial Sequence
  Description of Artificial Sequence: Synthetic oligonucleotide
cagcaggcaaucaugagua

SEQ ID NO: 2495115 - RNA, 19 nt, Artificial Sequence
  Description of Artificial Sequence: Synthetic oligonucleotide
gugcuggucaaggauauca

SEQ ID NO: 2495116 - RNA, 19 nt, Artificial Sequence
  Description of Artificial Sequence: Synthetic oligonucleotide
aaagauugguuuggaggua

SEQ ID NO: 2495117 - RNA, 19 nt, Artificial Sequence
  Description of Artificial Sequence: Synthetic oligonucleotide
ucucuugcccaggaacuca

SEQ ID NO: 2495118 - RNA, 19 nt, Artificial Sequence
  Description of Artificial Sequence: Synthetic oligonucleotide
aguuccaaaaggccaucuu

SEQ ID NO: 2495119 - RNA, 19 nt, Artificial Sequence
  Description of Artificial Sequence: Synthetic oligonucleotide
cacccgaauccucuccucc

SEQ ID NO: 2495120 - RNA, 19 nt, Artificial Sequence
  Description of Artificial Sequence: Synthetic oligonucleotide
uuguaucuguguacuccaa

SEQ ID NO: 2495121 - RNA, 19 nt, Artificial Sequence
  Description of Artificial Sequence: Synthetic oligonucleotide
aagagcaggcagauggcau

SEQ ID NO: 2495122 - RNA, 19 nt, Artificial Sequence
  Description of Artificial Sequence: Synthetic oligonucleotide
gcaaaccauggccagcugc

SEQ ID NO: 2495123 - RNA, 19 nt, Artificial Sequence
  Description of Artificial Sequence: Synthetic oligonucleotide
uuuggagguaaagcggcua

SEQ ID NO: 2495124 - RNA, 19 nt, Artificial Sequence
  Description of Artificial Sequence: Synthetic oligonucleotide
caugagacagcccacguau

SEQ ID NO: 2495125 - RNA, 19 nt, Artificial Sequence
  Description of Artificial Sequence: Synthetic oligonucleotide
ggcuguagcaaaccauggc

SEQ ID NO: 2495126 - RNA, 19 nt, Artificial Sequence
  Description of Artificial Sequence: Synthetic oligonucleotide
agucagggcuguagcaaac

SEQ ID NO: 2495127 - RNA, 19 nt, Artificial Sequence
  Description of Artificial Sequence: Synthetic oligonucleotide
gcuacuuuucauguaguca

SEQ ID NO: 2495128 - RNA, 19 nt, Artificial Sequence
  Description of Artificial Sequence: Synthetic oligonucleotide
ggcaaucaugaguauucug

SEQ ID NO: 2495129 - RNA, 19 nt, Artificial Sequence
  Description of Artificial Sequence: Synthetic oligonucleotide
guagcaaaccauggccagc

SEQ ID NO: 2495130 - RNA, 19 nt, Artificial Sequence
  Description of Artificial Sequence: Synthetic oligonucleotide
uugcaaagauugguuugga

SEQ ID NO: 2495131 - RNA, 19 nt, Artificial Sequence
  Description of Artificial Sequence: Synthetic oligonucleotide
gcaaucaugaguauucugu

SEQ ID NO: 2495132 - RNA, 19 nt, Artificial Sequence
  Description of Artificial Sequence: Synthetic oligonucleotide
cuggcuuucguuucucaaa

SEQ ID NO: 2495133 - RNA, 19 nt, Artificial Sequence
  Description of Artificial Sequence: Synthetic oligonucleotide
guaguccuauuuugaguuc

SEQ ID NO: 2495134 - RNA, 19 nt, Artificial Sequence
  Description of Artificial Sequence: Synthetic oligonucleotide
guaaagcggcuacuuuuca

SEQ ID NO: 2495135 - RNA, 19 nt, Artificial Sequence
  Description of Artificial Sequence: Synthetic oligonucleotide
cuuuucauguagucagaua

SEQ ID NO: 2495136 - RNA, 19 nt, Artificial Sequence
  Description of Artificial Sequence: Synthetic oligonucleotide
guuccaaaaggccaucuuu

SEQ ID NO: 2495137 - RNA, 19 nt, Artificial Sequence
  Description of Artificial Sequence: Synthetic oligonucleotide
guacucuggcuuucguuuc

SEQ ID NO: 2495138 - RNA, 19 nt, Artificial Sequence
  Description of Artificial Sequence: Synthetic oligonucleotide
auacggugcuggucaagga

SEQ ID NO: 2495139 - RNA, 19 nt, Artificial Sequence
  Description of Artificial Sequence: Synthetic oligonucleotide
acccgaauccucuccuccu

SEQ ID NO: 2495140 - RNA, 19 nt, Artificial Sequence
  Description of Artificial Sequence: Synthetic oligonucleotide
gguaaagcggcuacuuuuc

SEQ ID NO: 2495141 - RNA, 19 nt, Artificial Sequence
  Description of Artificial Sequence: Synthetic oligonucleotide
acgaauccaggcacuuggg

SEQ ID NO: 2495142 - RNA, 19 nt, Artificial Sequence
  Description of Artificial Sequence: Synthetic oligonucleotide
auauacggugcuggucaag

SEQ ID NO: 2495143 - RNA, 19 nt, Artificial Sequence
  Description of Artificial Sequence: Synthetic oligonucleotide
gagacagcccacguauauc

SEQ ID NO: 2495144 - RNA, 19 nt, Artificial Sequence
  Description of Artificial Sequence: Synthetic oligonucleotide
uggagguaaagcggcuacu

SEQ ID NO: 2495145 - RNA, 19 nt, Artificial Sequence
  Description of Artificial Sequence: Synthetic oligonucleotide
ucugucagggcugggcuuu

SEQ ID NO: 2495146 - RNA, 19 nt, Artificial Sequence
  Description of Artificial Sequence: Synthetic oligonucleotide
auguccacccgaauccucu

SEQ ID NO: 2495147 - RNA, 19 nt, Artificial Sequence
  Description of Artificial Sequence: Synthetic oligonucleotide
ggugcaaauauacggugcu

SEQ ID NO: 2495148 - RNA, 19 nt, Artificial Sequence
  Description of Artificial Sequence: Synthetic oligonucleotide
gucagggcuguagcaaacc

SEQ ID NO: 2495149 - RNA, 19 nt, Artificial Sequence
  Description of Artificial Sequence: Synthetic oligonucleotide
ggcuacuuuucauguaguc

SEQ ID NO: 2495150 - RNA, 19 nt, Artificial Sequence
  Description of Artificial Sequence: Synthetic oligonucleotide
gugcaaauauacggugcug

SEQ ID NO: 2495151 - RNA, 19 nt, Artificial Sequence
  Description of Artificial Sequence: Synthetic oligonucleotide
gacagcccacguauauccc

SEQ ID NO: 2495152 - RNA, 19 nt, Artificial Sequence
  Description of Artificial Sequence: Synthetic oligonucleotide
acuccaagagcaggcagau

SEQ ID NO: 2495153 - RNA, 19 nt, Artificial Sequence
  Description of Artificial Sequence: Synthetic oligonucleotide
gggugcaaauauacggugc

SEQ ID NO: 2495154 - RNA, 19 nt, Artificial Sequence
  Description of Artificial Sequence: Synthetic oligonucleotide
gaguagagcuucaucuucu

SEQ ID NO: 2495155 - RNA, 19 nt, Artificial Sequence
  Description of Artificial Sequence: Synthetic oligonucleotide
ugaguuccaaaaggccauc

SEQ ID NO: 2495156 - RNA, 19 nt, Artificial Sequence
  Description of Artificial Sequence: Synthetic oligonucleotide
aggcaaucaugaguauucu

SEQ ID NO: 2495157 - RNA, 19 nt, Artificial Sequence
  Description of Artificial Sequence: Synthetic oligonucleotide
caucuuugcaaagauuggu

SEQ ID NO: 2495158 - RNA, 19 nt, Artificial Sequence
  Description of Artificial Sequence: Synthetic oligonucleotide
guccacccgaauccucucc

SEQ ID NO: 2495159 - RNA, 19 nt, Artificial Sequence
  Description of Artificial Sequence: Synthetic oligonucleotide
ugggcuuuguaguccuauu

SEQ ID NO: 2495160 - RNA, 19 nt, Artificial Sequence
  Description of Artificial Sequence: Synthetic oligonucleotide
ucucggggagacccucuaa

SEQ ID NO: 2495161 - RNA, 19 nt, Artificial Sequence
  Description of Artificial Sequence: Synthetic oligonucleotide
aaaccauggccagcugcau

SEQ ID NO: 2495162 - RNA, 19 nt, Artificial Sequence
  Description of Artificial Sequence: Synthetic oligonucleotide
cuucagguuuggaaacgaa

SEQ ID NO: 2495163 - RNA, 19 nt, Artificial Sequence
  Description of Artificial Sequence: Synthetic oligonucleotide
aguccuauuuugaguucca

SEQ ID NO: 2495164 - RNA, 19 nt, Artificial Sequence
  Description of Artificial Sequence: Synthetic oligonucleotide
uucugucagggcugggcuu

SEQ ID NO: 2495165 - RNA, 19 nt, Artificial Sequence
  Description of Artificial Sequence: Synthetic oligonucleotide
uguccacccgaauccucuc

SEQ ID NO: 2495166 - RNA, 19 nt, Artificial Sequence
  Description of Artificial Sequence: Synthetic oligonucleotide
agcaaaccauggccagcug

SEQ ID NO: 2495167 - RNA, 19 nt, Artificial Sequence
  Description of Artificial Sequence: Synthetic oligonucleotide
ccaagagcaggcagauggc

SEQ ID NO: 2495168 - RNA, 19 nt, Artificial Sequence
  Description of Artificial Sequence: Synthetic oligonucleotide
cauggucucuugcccagga

SEQ ID NO: 2495169 - RNA, 19 nt, Artificial Sequence
  Description of Artificial Sequence: Synthetic oligonucleotide
caagagcaggcagauggca

SEQ ID NO: 2495170 - RNA, 19 nt, Artificial Sequence
  Description of Artificial Sequence: Synthetic oligonucleotide
gggcuguagcaaaccaugg

SEQ ID NO: 2495171 - RNA, 19 nt, Artificial Sequence
  Description of Artificial Sequence: Synthetic oligonucleotide
aauccgcauaggugaccuu

SEQ ID NO: 2495172 - RNA, 19 nt, Artificial Sequence
  Description of Artificial Sequence: Synthetic oligonucleotide
gagcaggcagauggcauga

SEQ ID NO: 2495173 - RNA, 19 nt, Artificial Sequence
  Description of Artificial Sequence: Synthetic oligonucleotide
uggccagcugcaugcgggu

SEQ ID NO: 2495174 - RNA, 19 nt, Artificial Sequence
  Description of Artificial Sequence: Synthetic oligonucleotide
cgcauaggugaccuugucc

SEQ ID NO: 2495175 - RNA, 19 nt, Artificial Sequence
  Description of Artificial Sequence: Synthetic oligonucleotide
uguggccagcaggcaauca

SEQ ID NO: 2495176 - RNA, 19 nt, Artificial Sequence
  Description of Artificial Sequence: Synthetic oligonucleotide
agcaggcaaucaugaguau

SEQ ID NO: 2495177 - RNA, 19 nt, Artificial Sequence
  Description of Artificial Sequence: Synthetic oligonucleotide
ggaaauccgcauaggugac

SEQ ID NO: 2495178 - RNA, 19 nt, Artificial Sequence
  Description of Artificial Sequence: Synthetic oligonucleotide
gagguaaagcggcuacuuu

SEQ ID NO: 2495179 - RNA, 19 nt, Artificial Sequence
  Description of Artificial Sequence: Synthetic oligonucleotide
guauucugucagggcuggg

SEQ ID NO: 2495180 - RNA, 19 nt, Artificial Sequence
  Description of Artificial Sequence: Synthetic oligonucleotide
gccagcaggcaaucaugag

SEQ ID NO: 2495181 - RNA, 19 nt, Artificial Sequence
  Description of Artificial Sequence: Synthetic oligonucleotide
gucucuugcccaggaacuc

SEQ ID NO: 2495182 - RNA, 19 nt, Artificial Sequence
  Description of Artificial Sequence: Synthetic oligonucleotide
cguauaucccaguaaccca

SEQ ID NO: 2495183 - RNA, 19 nt, Artificial Sequence
  Description of Artificial Sequence: Synthetic oligonucleotide
acggugcuggucaaggaua

SEQ ID NO: 2495184 - RNA, 19 nt, Artificial Sequence
  Description of Artificial Sequence: Synthetic oligonucleotide
gcaaauauacggugcuggu

SEQ ID NO: 2495185 - RNA, 19 nt, Artificial Sequence
  Description of Artificial Sequence: Synthetic oligonucleotide
gcagauggcaugagacagc

SEQ ID NO: 2495186 - RNA, 19 nt, Artificial Sequence
  Description of Artificial Sequence: Synthetic oligonucleotide
gaaacgaauccaggcacuu

SEQ ID NO: 2495187 - RNA, 19 nt, Artificial Sequence
  Description of Artificial Sequence: Synthetic oligonucleotide
agcccacguauaucccagu

SEQ ID NO: 2495188 - RNA, 19 nt, Artificial Sequence
  Description of Artificial Sequence: Synthetic oligonucleotide
agcaggcagauggcaugag

SEQ ID NO: 2495189 - RNA, 19 nt, Artificial Sequence
  Description of Artificial Sequence: Synthetic oligonucleotide
cagaguagagcuucaucuu

SEQ ID NO: 2495190 - RNA, 19 nt, Artificial Sequence
  Description of Artificial Sequence: Synthetic oligonucleotide
gaguuccaaaaggccaucu

SEQ ID NO: 2495191 - RNA, 19 nt, Artificial Sequence
  Description of Artificial Sequence: Synthetic oligonucleotide
cucuaaguacucuggcuuu

SEQ ID NO: 2495192 - RNA, 19 nt, Artificial Sequence
  Description of Artificial Sequence: Synthetic oligonucleotide
ggcuuuguaguccuauuuu

SEQ ID NO: 2495193 - RNA, 19 nt, Artificial Sequence
  Description of Artificial Sequence: Synthetic oligonucleotide
guggccagcaggcaaucau

SEQ ID NO: 2495194 - RNA, 19 nt, Artificial Sequence
  Description of Artificial Sequence: Synthetic oligonucleotide
gcaggcagauggcaugaga

SEQ ID NO: 2495195 - RNA, 19 nt, Artificial Sequence
  Description of Artificial Sequence: Synthetic oligonucleotide
gagacccucuaaguacucu

SEQ ID NO: 2495196 - RNA, 19 nt, Artificial Sequence
  Description of Artificial Sequence: Synthetic oligonucleotide
uuguggccagcaggcaauc

SEQ ID NO: 2495197 - RNA, 19 nt, Artificial Sequence
  Description of Artificial Sequence: Synthetic oligonucleotide
agauugguuuggagguaaa

SEQ ID NO: 2495198 - RNA, 19 nt, Artificial Sequence
  Description of Artificial Sequence: Synthetic oligonucleotide
cuuuuccucauagcuugua

SEQ ID NO: 2495199 - RNA, 19 nt, Artificial Sequence
  Description of Artificial Sequence: Synthetic oligonucleotide
ccagcaggcaaucaugagu

SEQ ID NO: 2495200 - RNA, 19 nt, Artificial Sequence
  Description of Artificial Sequence: Synthetic oligonucleotide
cuucaucuucucggggaga

SEQ ID NO: 2495201 - RNA, 19 nt, Artificial Sequence
  Description of Artificial Sequence: Synthetic oligonucleotide
guccuauuuugaguuccaa

SEQ ID NO: 2495202 - RNA, 19 nt, Artificial Sequence
  Description of Artificial Sequence: Synthetic oligonucleotide
cgugccaagaaguccuuca

SEQ ID NO: 2495203 - RNA, 19 nt, Artificial Sequence
  Description of Artificial Sequence: Synthetic oligonucleotide
ggucucuugcccaggaacu

SEQ ID NO: 2495204 - RNA, 19 nt, Artificial Sequence
  Description of Artificial Sequence: Synthetic oligonucleotide
aucuucucggggagacccu

SEQ ID NO: 2495205 - RNA, 19 nt, Artificial Sequence
  Description of Artificial Sequence: Synthetic oligonucleotide
guuuggagguaaagcggcu

SEQ ID NO: 2495206 - RNA, 19 nt, Artificial Sequence
  Description of Artificial Sequence: Synthetic oligonucleotide
ugucagggcugggcuuugu

SEQ ID NO: 2495207 - RNA, 19 nt, Artificial Sequence
  Description of Artificial Sequence: Synthetic oligonucleotide
ggccagcaggcaaucauga

SEQ ID NO: 2495208 - RNA, 19 nt, Artificial Sequence
  Description of Artificial Sequence: Synthetic oligonucleotide
cagggcuguagcaaaccau

SEQ ID NO: 2495209 - RNA, 19 nt, Artificial Sequence
  Description of Artificial Sequence: Synthetic oligonucleotide
gcaugagacagcccacgua

SEQ ID NO: 2495210 - RNA, 19 nt, Artificial Sequence
  Description of Artificial Sequence: Synthetic oligonucleotide
ggaaacgaauccaggcacu

SEQ ID NO: 2495211 - RNA, 19 nt, Artificial Sequence
  Description of Artificial Sequence: Synthetic oligonucleotide
augagacagcccacguaua

SEQ ID NO: 2495212 - RNA, 19 nt, Artificial Sequence
  Description of Artificial Sequence: Synthetic oligonucleotide
cccugcaaaccauggucuc

SEQ ID NO: 2495213 - RNA, 19 nt, Artificial Sequence
  Description of Artificial Sequence: Synthetic oligonucleotide
cccacguauaucccaguaa

SEQ ID NO: 2495214 - RNA, 19 nt, Artificial Sequence
  Description of Artificial Sequence: Synthetic oligonucleotide
gggcuuuguaguccuauuu

SEQ ID NO: 2495215 - RNA, 19 nt, Artificial Sequence
  Description of Artificial Sequence: Synthetic oligonucleotide
gggagacccucuaaguacu

SEQ ID NO: 2495216 - RNA, 19 nt, Artificial Sequence
  Description of Artificial Sequence: Synthetic oligonucleotide
cccgaauccucuccuccuc

SEQ ID NO: 2495217 - RNA, 19 nt, Artificial Sequence
  Description of Artificial Sequence: Synthetic oligonucleotide
ccuucagguuuggaaacga

SEQ ID NO: 2495218 - RNA, 19 nt, Artificial Sequence
  Description of Artificial Sequence: Synthetic oligonucleotide
ggcaugagacagcccacgu

SEQ ID NO: 2495219 - RNA, 19 nt, Artificial Sequence
  Description of Artificial Sequence: Synthetic oligonucleotide
ggagguaaagcggcuacuu

SEQ ID NO: 2495220 - RNA, 19 nt, Artificial Sequence
  Description of Artificial Sequence: Synthetic oligonucleotide
cugucagggcugggcuuug

SEQ ID NO: 2495221 - RNA, 19 nt, Artificial Sequence
  Description of Artificial Sequence: Synthetic oligonucleotide
gcccacguauaucccagua

SEQ ID NO: 2495222 - RNA, 19 nt, Artificial Sequence
  Description of Artificial Sequence: Synthetic oligonucleotide
ggcuuucguuucucaaagu

SEQ ID NO: 2495223 - RNA, 19 nt, Artificial Sequence
  Description of Artificial Sequence: Synthetic oligonucleotide
ggcugggcuuuguaguccu

SEQ ID NO: 2495224 - RNA, 19 nt, Artificial Sequence
  Description of Artificial Sequence: Synthetic oligonucleotide
ggagacccucuaaguacuc

SEQ ID NO: 2495225 - RNA, 19 nt, Artificial Sequence
  Description of Artificial Sequence: Synthetic oligonucleotide
cugggcuuuguaguccuau

SEQ ID NO: 2495226 - RNA, 19 nt, Artificial Sequence
  Description of Artificial Sequence: Synthetic oligonucleotide
ccacccgaauccucuccuc

SEQ ID NO: 2495227 - RNA, 19 nt, Artificial Sequence
  Description of Artificial Sequence: Synthetic oligonucleotide
gccagcugcaugcgggugu

SEQ ID NO: 2495228 - RNA, 19 nt, Artificial Sequence
  Description of Artificial Sequence: Synthetic oligonucleotide
ccccugcaaaccauggucu

SEQ ID NO: 2495229 - RNA, 19 nt, Artificial Sequence
  Description of Artificial Sequence: Synthetic oligonucleotide
ccgcauaggugaccuuguc

SEQ ID NO: 2495230 - RNA, 19 nt, Artificial Sequence
  Description of Artificial Sequence: Synthetic oligonucleotide
ggugcuggucaaggauauc

SEQ ID NO: 2495231 - RNA, 19 nt, Artificial Sequence
  Description of Artificial Sequence: Synthetic oligonucleotide
gcaggcaaucaugaguauu

SEQ ID NO: 2495232 - RNA, 19 nt, Artificial Sequence
  Description of Artificial Sequence: Synthetic oligonucleotide
agcgugccaagaaguccuu

SEQ ID NO: 2495233 - RNA, 19 nt, Artificial Sequence
  Description of Artificial Sequence: Synthetic oligonucleotide
ggccagcugcaugcgggug

SEQ ID NO: 2495234 - RNA, 19 nt, Artificial Sequence
  Description of Artificial Sequence: Synthetic oligonucleotide
cggggagacccucuaagua

SEQ ID NO: 2495235 - RNA, 19 nt, Artificial Sequence
  Description of Artificial Sequence: Synthetic oligonucleotide
cgaauccaggcacuugggu

SEQ ID NO: 2495236 - RNA, 19 nt, Artificial Sequence
  Description of Artificial Sequence: Synthetic oligonucleotide
cggcuacuuuucauguagu

SEQ ID NO: 2495237 - RNA, 19 nt, Artificial Sequence
  Description of Artificial Sequence: Synthetic oligonucleotide
cggugcuggucaaggauau

SEQ ID NO: 2495238 - RNA, 19 nt, Artificial Sequence
  Description of Artificial Sequence: Synthetic oligonucleotide
aauuacaucugccuucacc

SEQ ID NO: 2495239 - RNA, 19 nt, Artificial Sequence
  Description of Artificial Sequence: Synthetic oligonucleotide
aauaagaccugccaggcag

SEQ ID NO: 2495240 - RNA, 19 nt, Artificial Sequence
  Description of Artificial Sequence: Synthetic oligonucleotide
uuaagcagcagacauaggc

SEQ ID NO: 2495241 - RNA, 19 nt, Artificial Sequence
  Description of Artificial Sequence: Synthetic oligonucleotide
aaauaaauuacaucugccu

SEQ ID NO: 2495242 - RNA, 19 nt, Artificial Sequence
  Description of Artificial Sequence: Synthetic oligonucleotide
auaaauuacaucugccuuc

SEQ ID NO: 2495243 - RNA, 19 nt, Artificial Sequence
  Description of Artificial Sequence: Synthetic oligonucleotide
aggacauucagcuuaggac

SEQ ID NO: 2495244 - RNA, 19 nt, Artificial Sequence
  Description of Artificial Sequence: Synthetic oligonucleotide
guaaauaagaccugccagg

SEQ ID NO: 2495245 - RNA, 19 nt, Artificial Sequence
  Description of Artificial Sequence: Synthetic oligonucleotide
uauuguaaaauguuaaaau

SEQ ID NO: 2495246 - RNA, 19 nt, Artificial Sequence
  Description of Artificial Sequence: Synthetic oligonucleotide
aauacuggugaacucagcu

SEQ ID NO: 2495247 - RNA, 19 nt, Artificial Sequence
  Description of Artificial Sequence: Synthetic oligonucleotide
aguaaauaagaccugccag

SEQ ID NO: 2495248 - RNA, 19 nt, Artificial Sequence
  Description of Artificial Sequence: Synthetic oligonucleotide
uuguucauguauuuuauug

SEQ ID NO: 2495249 - RNA, 19 nt, Artificial Sequence
  Description of Artificial Sequence: Synthetic oligonucleotide
cauggaagcaaccagcugg

SEQ ID NO: 2495250 - RNA, 19 nt, Artificial Sequence
  Description of Artificial Sequence: Synthetic oligonucleotide
aguacaugcauacagugug

SEQ ID NO: 2495251 - RNA, 19 nt, Artificial Sequence
  Description of Artificial Sequence: Synthetic oligonucleotide
aaacacaccucucacuguc

SEQ ID NO: 2495252 - RNA, 19 nt, Artificial Sequence
  Description of Artificial Sequence: Synthetic oligonucleotide
agugcugcagccuacauug

SEQ ID NO: 2495253 - RNA, 19 nt, Artificial Sequence
  Description of Artificial Sequence: Synthetic oligonucleotide
auuacaucugccuucacca

SEQ ID NO: 2495254 - RNA, 19 nt, Artificial Sequence
  Description of Artificial Sequence: Synthetic oligonucleotide
uguuaaaauaaauuacauc

SEQ ID NO: 2495255 - RNA, 19 nt, Artificial Sequence
  Description of Artificial Sequence: Synthetic oligonucleotide
aggaguugcccauuaauac

SEQ ID NO: 2495256 - RNA, 19 nt, Artificial Sequence
  Description of Artificial Sequence: Synthetic oligonucleotide
ucauaaggaacagagagcu

SEQ ID NO: 2495257 - RNA, 19 nt, Artificial Sequence
  Description of Artificial Sequence: Synthetic oligonucleotide
ugucaaccgaacaaugggg

SEQ ID NO: 2495258 - RNA, 19 nt, Artificial Sequence
  Description of Artificial Sequence: Synthetic oligonucleotide
aauucaccugugcucaagg

SEQ ID NO: 2495259 - RNA, 19 nt, Artificial Sequence
  Description of Artificial Sequence: Synthetic oligonucleotide
cucacugucauaaugugug

SEQ ID NO: 2495260 - RNA, 19 nt, Artificial Sequence
  Description of Artificial Sequence: Synthetic oligonucleotide
uacagugugguuagugugg

SEQ ID NO: 2495261 - RNA, 19 nt, Artificial Sequence
  Description of Artificial Sequence: Synthetic oligonucleotide
uuaauacuggugaacucag

SEQ ID NO: 2495262 - RNA, 19 nt, Artificial Sequence
  Description of Artificial Sequence: Synthetic oligonucleotide
ugcccauuaauacugguga

SEQ ID NO: 2495263 - RNA, 19 nt, Artificial Sequence
  Description of Artificial Sequence: Synthetic oligonucleotide
ugaugaagggaauucaccu

SEQ ID NO: 2495264 - RNA, 19 nt, Artificial Sequence
  Description of Artificial Sequence: Synthetic oligonucleotide
uccacggaagacuuggagg

SEQ ID NO: 2495265 - RNA, 19 nt, Artificial Sequence
  Description of Artificial Sequence: Synthetic oligonucleotide
aaugugugcagagggaauc

SEQ ID NO: 2495266 - RNA, 19 nt, Artificial Sequence
  Description of Artificial Sequence: Synthetic oligonucleotide
accaccaguacaugcauac

SEQ ID NO: 2495267 - RNA, 19 nt, Artificial Sequence
  Description of Artificial Sequence: Synthetic oligonucleotide
acuuaagcagcagacauag

SEQ ID NO: 2495268 - RNA, 19 nt, Artificial Sequence
  Description of Artificial Sequence: Synthetic oligonucleotide
auagcauggaggccugucc

SEQ ID NO: 2495269 - RNA, 19 nt, Artificial Sequence
  Description of Artificial Sequence: Synthetic oligonucleotide
uuguuguacucauucauca

SEQ ID NO: 2495270 - RNA, 19 nt, Artificial Sequence
  Description of Artificial Sequence: Synthetic oligonucleotide
auuaauacuggugaacuca

SEQ ID NO: 2495271 - RNA, 19 nt, Artificial Sequence
  Description of Artificial Sequence: Synthetic oligonucleotide
auaaggaacagagagcucu

SEQ ID NO: 2495272 - RNA, 19 nt, Artificial Sequence
  Description of Artificial Sequence: Synthetic oligonucleotide
ucaguaaauaagaccugcc

SEQ ID NO: 2495273 - RNA, 19 nt, Artificial Sequence
  Description of Artificial Sequence: Synthetic oligonucleotide
gaagcaaccagcuggagaa

SEQ ID NO: 2495274 - RNA, 19 nt, Artificial Sequence
  Description of Artificial Sequence: Synthetic oligonucleotide
gaacagagagcucugacuc

SEQ ID NO: 2495275 - RNA, 19 nt, Artificial Sequence
  Description of Artificial Sequence: Synthetic oligonucleotide
guuguacucauucaucagc

SEQ ID NO: 2495276 - RNA, 19 nt, Artificial Sequence
  Description of Artificial Sequence: Synthetic oligonucleotide
aagggaauucaccugugcu

SEQ ID NO: 2495277 - RNA, 19 nt, Artificial Sequence
  Description of Artificial Sequence: Synthetic oligonucleotide
ucaccugugcucaagggca

SEQ ID NO: 2495278 - RNA, 19 nt, Artificial Sequence
  Description of Artificial Sequence: Synthetic oligonucleotide
agggaauucaccugugcuc

SEQ ID NO: 2495279 - RNA, 19 nt, Artificial Sequence
  Description of Artificial Sequence: Synthetic oligonucleotide
aacagagagcucugacucg

SEQ ID NO: 2495280 - RNA, 19 nt, Artificial Sequence
  Description of Artificial Sequence: Synthetic oligonucleotide
uuguacucauucaucagcu

SEQ ID NO: 2495281 - RNA, 19 nt, Artificial Sequence
  Description of Artificial Sequence: Synthetic oligonucleotide
gugucaaccgaacaauggg

SEQ ID NO: 2495282 - RNA, 19 nt, Artificial Sequence
  Description of Artificial Sequence: Synthetic oligonucleotide
uaaauaagaccugccaggc

SEQ ID NO: 2495283 - RNA, 19 nt, Artificial Sequence
  Description of Artificial Sequence: Synthetic oligonucleotide
auggaaacacaccucucac

SEQ ID NO: 2495284 - RNA, 19 nt, Artificial Sequence
  Description of Artificial Sequence: Synthetic oligonucleotide
ucagcugcucauaaggaac

SEQ ID NO: 2495285 - RNA, 19 nt, Artificial Sequence
  Description of Artificial Sequence: Synthetic oligonucleotide
acugucauaaugugugcag

SEQ ID NO: 2495286 - RNA, 19 nt, Artificial Sequence
  Description of Artificial Sequence: Synthetic oligonucleotide
ugugcagagggaaucugag

SEQ ID NO: 2495287 - RNA, 19 nt, Artificial Sequence
  Description of Artificial Sequence: Synthetic oligonucleotide
uggacucaucugaugaagg

SEQ ID NO: 2495288 - RNA, 19 nt, Artificial Sequence
  Description of Artificial Sequence: Synthetic oligonucleotide
uuaguguggcuccaggaca

SEQ ID NO: 2495289 - RNA, 19 nt, Artificial Sequence
  Description of Artificial Sequence: Synthetic oligonucleotide
cucauaaggaacagagagc

SEQ ID NO: 2495290 - RNA, 19 nt, Artificial Sequence
  Description of Artificial Sequence: Synthetic oligonucleotide
uucaccugugcucaagggc

SEQ ID NO: 2495291 - RNA, 19 nt, Artificial Sequence
  Description of Artificial Sequence: Synthetic oligonucleotide
accgcuuagagaauggugg

SEQ ID NO: 2495292 - RNA, 19 nt, Artificial Sequence
  Description of Artificial Sequence: Synthetic oligonucleotide
ucugaugaagggaauucac

SEQ ID NO: 2495293 - RNA, 19 nt, Artificial Sequence
  Description of Artificial Sequence: Synthetic oligonucleotide
uucaccaccaguacaugca

SEQ ID NO: 2495294 - RNA, 19 nt, Artificial Sequence
  Description of Artificial Sequence: Synthetic oligonucleotide
gaugaagggaauucaccug

SEQ ID NO: 2495295 - RNA, 19 nt, Artificial Sequence
  Description of Artificial Sequence: Synthetic oligonucleotide
ucugccuucaccaccagua

SEQ ID NO: 2495296 - RNA, 19 nt, Artificial Sequence
  Description of Artificial Sequence: Synthetic oligonucleotide
guacucauucaucagcugc

SEQ ID NO: 2495297 - RNA, 19 nt, Artificial Sequence
  Description of Artificial Sequence: Synthetic oligonucleotide
aaaaccgugucaaccgaac

SEQ ID NO: 2495298 - RNA, 19 nt, Artificial Sequence
  Description of Artificial Sequence: Synthetic oligonucleotide
ucugacucggugcugguga

SEQ ID NO: 2495299 - RNA, 19 nt, Artificial Sequence
  Description of Artificial Sequence: Synthetic oligonucleotide
gagucaguaaauaagaccu

SEQ ID NO: 2495300 - RNA, 19 nt, Artificial Sequence
  Description of Artificial Sequence: Synthetic oligonucleotide
gaagacuuaagcagcagac

SEQ ID NO: 2495301 - RNA, 19 nt, Artificial Sequence
  Description of Artificial Sequence: Synthetic oligonucleotide
gacacuuuucacaggagcc

SEQ ID NO: 2495302 - RNA, 19 nt, Artificial Sequence
  Description of Artificial Sequence: Synthetic oligonucleotide
cugaugaagggaauucacc

SEQ ID NO: 2495303 - RNA, 19 nt, Artificial Sequence
  Description of Artificial Sequence: Synthetic oligonucleotide
uaaauuacaucugccuuca

SEQ ID NO: 2495304 - RNA, 19 nt, Artificial Sequence
  Description of Artificial Sequence: Synthetic oligonucleotide
uggugaacucagcugaagc

SEQ ID NO: 2495305 - RNA, 19 nt, Artificial Sequence
  Description of Artificial Sequence: Synthetic oligonucleotide
uggagguauggaaacacac

SEQ ID NO: 2495306 - RNA, 19 nt, Artificial Sequence
  Description of Artificial Sequence: Synthetic oligonucleotide
agacuuaagcagcagacau

SEQ ID NO: 2495307 - RNA, 19 nt, Artificial Sequence
  Description of Artificial Sequence: Synthetic oligonucleotide
uguuguacucauucaucag

SEQ ID NO: 2495308 - RNA, 19 nt, Artificial Sequence
  Description of Artificial Sequence: Synthetic oligonucleotide
ugaggugggacauggcucc

SEQ ID NO: 2495309 - RNA, 19 nt, Artificial Sequence
  Description of Artificial Sequence: Synthetic oligonucleotide
auacagugugguuagugug

SEQ ID NO: 2495310 - RNA, 19 nt, Artificial Sequence
  Description of Artificial Sequence: Synthetic oligonucleotide
agugugguuaguguggcuc

SEQ ID NO: 2495311 - RNA, 19 nt, Artificial Sequence
  Description of Artificial Sequence: Synthetic oligonucleotide
uugcccauuaauacuggug

SEQ ID NO: 2495312 - RNA, 19 nt, Artificial Sequence
  Description of Artificial Sequence: Synthetic oligonucleotide
ggaaacacaccucucacug

SEQ ID NO: 2495313 - RNA, 19 nt, Artificial Sequence
  Description of Artificial Sequence: Synthetic oligonucleotide
ucccauggaagcaaccagc

SEQ ID NO: 2495314 - RNA, 19 nt, Artificial Sequence
  Description of Artificial Sequence: Synthetic oligonucleotide
cuuguuguacucauucauc

SEQ ID NO: 2495315 - RNA, 19 nt, Artificial Sequence
  Description of Artificial Sequence: Synthetic oligonucleotide
caccaguacaugcauacag

SEQ ID NO: 2495316 - RNA, 19 nt, Artificial Sequence
  Description of Artificial Sequence: Synthetic oligonucleotide
aaccgugucaaccgaacaa

SEQ ID NO: 2495317 - RNA, 19 nt, Artificial Sequence
  Description of Artificial Sequence: Synthetic oligonucleotide
auggcuccuagcucagugc

SEQ ID NO: 2495318 - RNA, 19 nt, Artificial Sequence
  Description of Artificial Sequence: Synthetic oligonucleotide
aaauaagaccugccaggca

SEQ ID NO: 2495319 - RNA, 19 nt, Artificial Sequence
  Description of Artificial Sequence: Synthetic oligonucleotide
cuaguccaugcccaggucc

SEQ ID NO: 2495320 - RNA, 19 nt, Artificial Sequence
  Description of Artificial Sequence: Synthetic oligonucleotide
acauaggcccuccagggug

SEQ ID NO: 2495321 - RNA, 19 nt, Artificial Sequence
  Description of Artificial Sequence: Synthetic oligonucleotide
agcuuaggacacuuuucac

SEQ ID NO: 2495322 - RNA, 19 nt, Artificial Sequence
  Description of Artificial Sequence: Synthetic oligonucleotide
uccuccacggaagacuugg

SEQ ID NO: 2495323 - RNA, 19 nt, Artificial Sequence
  Description of Artificial Sequence: Synthetic oligonucleotide
augcauacagugugguuag

SEQ ID NO: 2495324 - RNA, 19 nt, Artificial Sequence
  Description of Artificial Sequence: Synthetic oligonucleotide
gaguugcccauuaauacug

SEQ ID NO: 2495325 - RNA, 19 nt, Artificial Sequence
  Description of Artificial Sequence: Synthetic oligonucleotide
guuaguguggcuccaggac

SEQ ID NO: 2495326 - RNA, 19 nt, Artificial Sequence
  Description of Artificial Sequence: Synthetic oligonucleotide
aaugguggagguauggaaa

SEQ ID NO: 2495327 - RNA, 19 nt, Artificial Sequence
  Description of Artificial Sequence: Synthetic oligonucleotide
ucucacugucauaaugugu

SEQ ID NO: 2495328 - RNA, 19 nt, Artificial Sequence
  Description of Artificial Sequence: Synthetic oligonucleotide
ggacauucagcuuaggaca

SEQ ID NO: 2495329 - RNA, 19 nt, Artificial Sequence
  Description of Artificial Sequence: Synthetic oligonucleotide
ucgagucaguaaauaagac

SEQ ID NO: 2495330 - RNA, 19 nt, Artificial Sequence
  Description of Artificial Sequence: Synthetic oligonucleotide
ccuacaaccgcuuagagaa

SEQ ID NO: 2495331 - RNA, 19 nt, Artificial Sequence
  Description of Artificial Sequence: Synthetic oligonucleotide
auucaccugugcucaaggg

SEQ ID NO: 2495332 - RNA, 19 nt, Artificial Sequence
  Description of Artificial Sequence: Synthetic oligonucleotide
agguggacucaucugauga

SEQ ID NO: 2495333 - RNA, 19 nt, Artificial Sequence
  Description of Artificial Sequence: Synthetic oligonucleotide
aaccagcuggagaagacag

SEQ ID NO: 2495334 - RNA, 19 nt, Artificial Sequence
  Description of Artificial Sequence: Synthetic oligonucleotide
ucauucaucagcugcucau

SEQ ID NO: 2495335 - RNA, 19 nt, Artificial Sequence
  Description of Artificial Sequence: Synthetic oligonucleotide
cucgagucaguaaauaaga

SEQ ID NO: 2495336 - RNA, 19 nt, Artificial Sequence
  Description of Artificial Sequence: Synthetic oligonucleotide
gucaguaaauaagaccugc

SEQ ID NO: 2495337 - RNA, 19 nt, Artificial Sequence
  Description of Artificial Sequence: Synthetic oligonucleotide
aaaccgugucaaccgaaca

SEQ ID NO: 2495338 - RNA, 19 nt, Artificial Sequence
  Description of Artificial Sequence: Synthetic oligonucleotide
aagacuuaagcagcagaca

SEQ ID NO: 2495339 - RNA, 19 nt, Artificial Sequence
  Description of Artificial Sequence: Synthetic oligonucleotide
uucaucagcugcucauaag

SEQ ID NO: 2495340 - RNA, 19 nt, Artificial Sequence
  Description of Artificial Sequence: Synthetic oligonucleotide
aaauuacaucugccuucac

SEQ ID NO: 2495341 - RNA, 19 nt, Artificial Sequence
  Description of Artificial Sequence: Synthetic oligonucleotide
gguccugggacccucaucc

SEQ ID NO: 2495342 - RNA, 19 nt, Artificial Sequence
  Description of Artificial Sequence: Synthetic oligonucleotide
ugguuaguguggcuccagg

SEQ ID NO: 2495343 - RNA, 19 nt, Artificial Sequence
  Description of Artificial Sequence: Synthetic oligonucleotide
uugagcuccuaguccaugc

SEQ ID NO: 2495344 - RNA, 19 nt, Artificial Sequence
  Description of Artificial Sequence: Synthetic oligonucleotide
gaagggaauucaccugugc

SEQ ID NO: 2495345 - RNA, 19 nt, Artificial Sequence
  Description of Artificial Sequence: Synthetic oligonucleotide
uguugaggcugcuccuugg

SEQ ID NO: 2495346 - RNA, 19 nt, Artificial Sequence
  Description of Artificial Sequence: Synthetic oligonucleotide
gagaaugguggagguaugg

SEQ ID NO: 2495347 - RNA, 19 nt, Artificial Sequence
  Description of Artificial Sequence: Synthetic oligonucleotide
aagcagugccuuguuguac

SEQ ID NO: 2495348 - RNA, 19 nt, Artificial Sequence
  Description of Artificial Sequence: Synthetic oligonucleotide
acagagagcucugacucgg

SEQ ID NO: 2495349 - RNA, 19 nt, Artificial Sequence
  Description of Artificial Sequence: Synthetic oligonucleotide
acagugugguuaguguggc

SEQ ID NO: 2495350 - RNA, 19 nt, Artificial Sequence
  Description of Artificial Sequence: Synthetic oligonucleotide
ugugcucaagggcaccuca

SEQ ID NO: 2495351 - RNA, 19 nt, Artificial Sequence
  Description of Artificial Sequence: Synthetic oligonucleotide
aagguggacucaucugaug

SEQ ID NO: 2495352 - RNA, 19 nt, Artificial Sequence
  Description of Artificial Sequence: Synthetic oligonucleotide
uccaggacauucagcuuag

SEQ ID NO: 2495353 - RNA, 19 nt, Artificial Sequence
  Description of Artificial Sequence: Synthetic oligonucleotide
cagagggaaucugaggugg

SEQ ID NO: 2495354 - RNA, 19 nt, Artificial Sequence
  Description of Artificial Sequence: Synthetic oligonucleotide
uaauacuggugaacucagc

SEQ ID NO: 2495355 - RNA, 19 nt, Artificial Sequence
  Description of Artificial Sequence: Synthetic oligonucleotide
uccuaguccaugcccaggu

SEQ ID NO: 2495356 - RNA, 19 nt, Artificial Sequence
  Description of Artificial Sequence: Synthetic oligonucleotide
aucccauggaagcaaccag

SEQ ID NO: 2495357 - RNA, 19 nt, Artificial Sequence
  Description of Artificial Sequence: Synthetic oligonucleotide
cauuaauacuggugaacuc

SEQ ID NO: 2495358 - RNA, 19 nt, Artificial Sequence
  Description of Artificial Sequence: Synthetic oligonucleotide
augcccagguccugggacc

SEQ ID NO: 2495359 - RNA, 19 nt, Artificial Sequence
  Description of Artificial Sequence: Synthetic oligonucleotide
agcguggcccuacaaccgc

SEQ ID NO: 2495360 - RNA, 19 nt, Artificial Sequence
  Description of Artificial Sequence: Synthetic oligonucleotide
uacaaccgcuuagagaaug

SEQ ID NO: 2495361 - RNA, 19 nt, Artificial Sequence
  Description of Artificial Sequence: Synthetic oligonucleotide
gaaugguggagguauggaa

SEQ ID NO: 2495362 - RNA, 19 nt, Artificial Sequence
  Description of Artificial Sequence: Synthetic oligonucleotide
ugagcuccuaguccaugcc

SEQ ID NO: 2495363 - RNA, 19 nt, Artificial Sequence
  Description of Artificial Sequence: Synthetic oligonucleotide
ggacucaucugaugaaggg

SEQ ID NO: 2495364 - RNA, 19 nt, Artificial Sequence
  Description of Artificial Sequence: Synthetic oligonucleotide
ugaagggaauucaccugug

SEQ ID NO: 2495365 - RNA, 19 nt, Artificial Sequence
  Description of Artificial Sequence: Synthetic oligonucleotide
aaguuguccuccacggaag

SEQ ID NO: 2495366 - RNA, 19 nt, Artificial Sequence
  Description of Artificial Sequence: Synthetic oligonucleotide
acaggaguugcccauuaau

SEQ ID NO: 2495367 - RNA, 19 nt, Artificial Sequence
  Description of Artificial Sequence: Synthetic oligonucleotide
auaaugugugcagagggaa

SEQ ID NO: 2495368 - RNA, 19 nt, Artificial Sequence
  Description of Artificial Sequence: Synthetic oligonucleotide
caguaaauaagaccugcca

SEQ ID NO: 2495369 - RNA, 19 nt, Artificial Sequence
  Description of Artificial Sequence: Synthetic oligonucleotide
gacuucacaucccauggaa

SEQ ID NO: 2495370 - RNA, 19 nt, Artificial Sequence
  Description of Artificial Sequence: Synthetic oligonucleotide
agcagugccuuguuguacu

SEQ ID NO: 2495371 - RNA, 19 nt, Artificial Sequence
  Description of Artificial Sequence: Synthetic oligonucleotide
agggaaucugaggugggac

SEQ ID NO: 2495372 - RNA, 19 nt, Artificial Sequence
  Description of Artificial Sequence: Synthetic oligonucleotide
ugcucaagggcaccucagc

SEQ ID NO: 2495373 - RNA, 19 nt, Artificial Sequence
  Description of Artificial Sequence: Synthetic oligonucleotide
cuacauugccucgagucag

SEQ ID NO: 2495374 - RNA, 19 nt, Artificial Sequence
  Description of Artificial Sequence: Synthetic oligonucleotide
ggacacuuuucacaggagc

SEQ ID NO: 2495375 - RNA, 19 nt, Artificial Sequence
  Description of Artificial Sequence: Synthetic oligonucleotide
aaccgcuuagagaauggug

SEQ ID NO: 2495376 - RNA, 19 nt, Artificial Sequence
  Description of Artificial Sequence: Synthetic oligonucleotide
ucacugucauaaugugugc

SEQ ID NO: 2495377 - RNA, 19 nt, Artificial Sequence
  Description of Artificial Sequence: Synthetic oligonucleotide
gccaaguuguccuccacgg

SEQ ID NO: 2495378 - RNA, 19 nt, Artificial Sequence
  Description of Artificial Sequence: Synthetic oligonucleotide
uaaugugugcagagggaau

SEQ ID NO: 2495379 - RNA, 19 nt, Artificial Sequence
  Description of Artificial Sequence: Synthetic oligonucleotide
gaaaagaaaagcagugccu

SEQ ID NO: 2495380 - RNA, 19 nt, Artificial Sequence
  Description of Artificial Sequence: Synthetic oligonucleotide
ggggccauagcauggaggc

SEQ ID NO: 2495381 - RNA, 19 nt, Artificial Sequence
  Description of Artificial Sequence: Synthetic oligonucleotide
cauaaugugugcagaggga

SEQ ID NO: 2495382 - RNA, 19 nt, Artificial Sequence
  Description of Artificial Sequence: Synthetic oligonucleotide
agugccuuguuguacucau

SEQ ID NO: 2495383 - RNA, 19 nt, Artificial Sequence
  Description of Artificial Sequence: Synthetic oligonucleotide
ccucgagucaguaaauaag

SEQ ID NO: 2495384 - RNA, 19 nt, Artificial Sequence
  Description of Artificial Sequence: Synthetic oligonucleotide
guacaugcauacagugugg

SEQ ID NO: 2495385 - RNA, 19 nt, Artificial Sequence
  Description of Artificial Sequence: Synthetic oligonucleotide
uggcccuacaaccgcuuag

SEQ ID NO: 2495386 - RNA, 19 nt, Artificial Sequence
  Description of Artificial Sequence: Synthetic oligonucleotide
cugaggugggacauggcuc

SEQ ID NO: 2495387 - RNA, 19 nt, Artificial Sequence
  Description of Artificial Sequence: Synthetic oligonucleotide
cauggcuccuagcucagug

SEQ ID NO: 2495388 - RNA, 19 nt, Artificial Sequence
  Description of Artificial Sequence: Synthetic oligonucleotide
gugaagguggacucaucug

SEQ ID NO: 2495389 - RNA, 19 nt, Artificial Sequence
  Description of Artificial Sequence: Synthetic oligonucleotide
cgagucaguaaauaagacc

SEQ ID NO: 2495390 - RNA, 19 nt, Artificial Sequence
  Description of Artificial Sequence: Synthetic oligonucleotide
ugccuucaccaccaguaca

SEQ ID NO: 2495391 - RNA, 19 nt, Artificial Sequence
  Description of Artificial Sequence: Synthetic oligonucleotide
gagcuccuaguccaugccc

SEQ ID NO: 2495392 - RNA, 19 nt, Artificial Sequence
  Description of Artificial Sequence: Synthetic oligonucleotide
caugcauacagugugguua

SEQ ID NO: 2495393 - RNA, 19 nt, Artificial Sequence
  Description of Artificial Sequence: Synthetic oligonucleotide
caucugaugaagggaauuc

SEQ ID NO: 2495394 - RNA, 19 nt, Artificial Sequence
  Description of Artificial Sequence: Synthetic oligonucleotide
ugcagccuacauugccucg

SEQ ID NO: 2495395 - RNA, 19 nt, Artificial Sequence
  Description of Artificial Sequence: Synthetic oligonucleotide
uuacaucugccuucaccac

SEQ ID NO: 2495396 - RNA, 19 nt, Artificial Sequence
  Description of Artificial Sequence: Synthetic oligonucleotide
cagcuuaggacacuuuuca

SEQ ID NO: 2495397 - RNA, 19 nt, Artificial Sequence
  Description of Artificial Sequence: Synthetic oligonucleotide
agcucugacucggugcugg

SEQ ID NO: 2495398 - RNA, 19 nt, Artificial Sequence
  Description of Artificial Sequence: Synthetic oligonucleotide
gacucaucugaugaaggga

SEQ ID NO: 2495399 - RNA, 19 nt, Artificial Sequence
  Description of Artificial Sequence: Synthetic oligonucleotide
uacaugcauacaguguggu

SEQ ID NO: 2495400 - RNA, 19 nt, Artificial Sequence
  Description of Artificial Sequence: Synthetic oligonucleotide
guggacucaucugaugaag

SEQ ID NO: 2495401 - RNA, 19 nt, Artificial Sequence
  Description of Artificial Sequence: Synthetic oligonucleotide
uaguguggcuccaggacau

SEQ ID NO: 2495402 - RNA, 19 nt, Artificial Sequence
  Description of Artificial Sequence: Synthetic oligonucleotide
cuuaagcagcagacauagg

SEQ ID NO: 2495403 - RNA, 19 nt, Artificial Sequence
  Description of Artificial Sequence: Synthetic oligonucleotide
acucaucugaugaagggaa

SEQ ID NO: 2495404 - RNA, 19 nt, Artificial Sequence
  Description of Artificial Sequence: Synthetic oligonucleotide
uccagggugagugcugcag

SEQ ID NO: 2495405 - RNA, 19 nt, Artificial Sequence
  Description of Artificial Sequence: Synthetic oligonucleotide
aucugaugaagggaauuca

SEQ ID NO: 2495406 - RNA, 19 nt, Artificial Sequence
  Description of Artificial Sequence: Synthetic oligonucleotide
gugugguuaguguggcucc

SEQ ID NO: 2495407 - RNA, 19 nt, Artificial Sequence
  Description of Artificial Sequence: Synthetic oligonucleotide
ugggcagacuucacauccc

SEQ ID NO: 2495408 - RNA, 19 nt, Artificial Sequence
  Description of Artificial Sequence: Synthetic oligonucleotide
caaguuguccuccacggaa

SEQ ID NO: 2495409 - RNA, 19 nt, Artificial Sequence
  Description of Artificial Sequence: Synthetic oligonucleotide
cuccacggaagacuuggag

SEQ ID NO: 2495410 - RNA, 19 nt, Artificial Sequence
  Description of Artificial Sequence: Synthetic oligonucleotide
uccuagcucagugccaggc

SEQ ID NO: 2495411 - RNA, 19 nt, Artificial Sequence
  Description of Artificial Sequence: Synthetic oligonucleotide
aggccggauccccuugagc

SEQ ID NO: 2495412 - RNA, 19 nt, Artificial Sequence
  Description of Artificial Sequence: Synthetic oligonucleotide
gguauggaaacacaccucu

SEQ ID NO: 2495413 - RNA, 19 nt, Artificial Sequence
  Description of Artificial Sequence: Synthetic oligonucleotide
gauccccuugagcuccuag

SEQ ID NO: 2495414 - RNA, 19 nt, Artificial Sequence
  Description of Artificial Sequence: Synthetic oligonucleotide
uccaugcccagguccuggg

SEQ ID NO: 2495415 - RNA, 19 nt, Artificial Sequence
  Description of Artificial Sequence: Synthetic oligonucleotide
ucaccaccaguacaugcau

SEQ ID NO: 2495416 - RNA, 19 nt, Artificial Sequence
  Description of Artificial Sequence: Synthetic oligonucleotide
gugaacucagcugaagcuc

SEQ ID NO: 2495417 - RNA, 19 nt, Artificial Sequence
  Description of Artificial Sequence: Synthetic oligonucleotide
uacauugccucgagucagu

SEQ ID NO: 2495418 - RNA, 19 nt, Artificial Sequence
  Description of Artificial Sequence: Synthetic oligonucleotide
caugcccagguccugggac

SEQ ID NO: 2495419 - RNA, 19 nt, Artificial Sequence
  Description of Artificial Sequence: Synthetic oligonucleotide
acaaccgcuuagagaaugg

SEQ ID NO: 2495420 - RNA, 19 nt, Artificial Sequence
  Description of Artificial Sequence: Synthetic oligonucleotide
uggaggccuguccugggca

SEQ ID NO: 2495421 - RNA, 19 nt, Artificial Sequence
  Description of Artificial Sequence: Synthetic oligonucleotide
ggacauggcuccuagcuca

SEQ ID NO: 2495422 - RNA, 19 nt, Artificial Sequence
  Description of Artificial Sequence: Synthetic oligonucleotide
auccccuugagcuccuagu

SEQ ID NO: 2495423 - RNA, 19 nt, Artificial Sequence
  Description of Artificial Sequence: Synthetic oligonucleotide
ucaucugaugaagggaauu

SEQ ID NO: 2495424 - RNA, 19 nt, Artificial Sequence
  Description of Artificial Sequence: Synthetic oligonucleotide
auaagaccugccaggcagg

SEQ ID NO: 2495425 - RNA, 19 nt, Artificial Sequence
  Description of Artificial Sequence: Synthetic oligonucleotide
ggagguauggaaacacacc

SEQ ID NO: 2495426 - RNA, 19 nt, Artificial Sequence
  Description of Artificial Sequence: Synthetic oligonucleotide
ggaagacuuaagcagcaga

SEQ ID NO: 2495427 - RNA, 19 nt, Artificial Sequence
  Description of Artificial Sequence: Synthetic oligonucleotide
agacuucacaucccaugga

SEQ ID NO: 2495428 - RNA, 19 nt, Artificial Sequence
  Description of Artificial Sequence: Synthetic oligonucleotide
aucugagaggccggauccc

SEQ ID NO: 2495429 - RNA, 19 nt, Artificial Sequence
  Description of Artificial Sequence: Synthetic oligonucleotide
gccuacauugccucgaguc

SEQ ID NO: 2495430 - RNA, 19 nt, Artificial Sequence
  Description of Artificial Sequence: Synthetic oligonucleotide
agaaugguggagguaugga

SEQ ID NO: 2495431 - RNA, 19 nt, Artificial Sequence
  Description of Artificial Sequence: Synthetic oligonucleotide
cagcguggcccuacaaccg

SEQ ID NO: 2495432 - RNA, 19 nt, Artificial Sequence
  Description of Artificial Sequence: Synthetic oligonucleotide
agcucagugccaggcacac

SEQ ID NO: 2495433 - RNA, 19 nt, Artificial Sequence
  Description of Artificial Sequence: Synthetic oligonucleotide
ccagcguggcccuacaacc

SEQ ID NO: 2495434 - RNA, 19 nt, Artificial Sequence
  Description of Artificial Sequence: Synthetic oligonucleotide
acaucccauggaagcaacc

SEQ ID NO: 2495435 - RNA, 19 nt, Artificial Sequence
  Description of Artificial Sequence: Synthetic oligonucleotide
uagcucagugccaggcaca

SEQ ID NO: 2495436 - RNA, 19 nt, Artificial Sequence
  Description of Artificial Sequence: Synthetic oligonucleotide
ugugugcagagggaaucug

SEQ ID NO: 2495437 - RNA, 19 nt, Artificial Sequence
  Description of Artificial Sequence: Synthetic oligonucleotide
ggagaagacagaaaagaaa

SEQ ID NO: 2495438 - RNA, 19 nt, Artificial Sequence
  Description of Artificial Sequence: Synthetic oligonucleotide
ggccaaguuguccuccacg

SEQ ID NO: 2495439 - RNA, 19 nt, Artificial Sequence
  Description of Artificial Sequence: Synthetic oligonucleotide
cucaagggcaccucagcca

SEQ ID NO: 2495440 - RNA, 19 nt, Artificial Sequence
  Description of Artificial Sequence: Synthetic oligonucleotide
accaguacaugcauacagu

SEQ ID NO: 2495441 - RNA, 19 nt, Artificial Sequence
  Description of Artificial Sequence: Synthetic oligonucleotide
aguugcccauuaauacugg

SEQ ID NO: 2495442 - RNA, 19 nt, Artificial Sequence
  Description of Artificial Sequence: Synthetic oligonucleotide
agucaguaaauaagaccug

SEQ ID NO: 2495443 - RNA, 19 nt, Artificial Sequence
  Description of Artificial Sequence: Synthetic oligonucleotide
caucagcugcucauaagga

SEQ ID NO: 2495444 - RNA, 19 nt, Artificial Sequence
  Description of Artificial Sequence: Synthetic oligonucleotide
agaaaagcagugccuuguu

SEQ ID NO: 2495445 - RNA, 19 nt, Artificial Sequence
  Description of Artificial Sequence: Synthetic oligonucleotide
uaagaccugccaggcaggc

SEQ ID NO: 2495446 - RNA, 19 nt, Artificial Sequence
  Description of Artificial Sequence: Synthetic oligonucleotide
acggaagacuuggaggucu

SEQ ID NO: 2495447 - RNA, 19 nt, Artificial Sequence
  Description of Artificial Sequence: Synthetic oligonucleotide
cgugucaaccgaacaaugg

SEQ ID NO: 2495448 - RNA, 19 nt, Artificial Sequence
  Description of Artificial Sequence: Synthetic oligonucleotide
caguccucuguugaggcug

SEQ ID NO: 2495449 - RNA, 19 nt, Artificial Sequence
  Description of Artificial Sequence: Synthetic oligonucleotide
uuagagaaugguggaggua

SEQ ID NO: 2495450 - RNA, 19 nt, Artificial Sequence
  Description of Artificial Sequence: Synthetic oligonucleotide
acuuuucacaggagccagg

SEQ ID NO: 2495451 - RNA, 19 nt, Artificial Sequence
  Description of Artificial Sequence: Synthetic oligonucleotide
gcagacauaggcccuccag

SEQ ID NO: 2495452 - RNA, 19 nt, Artificial Sequence
  Description of Artificial Sequence: Synthetic oligonucleotide
ggaagcaaccagcuggaga

SEQ ID NO: 2495453 - RNA, 19 nt, Artificial Sequence
  Description of Artificial Sequence: Synthetic oligonucleotide
cauggaggccuguccuggg

SEQ ID NO: 2495454 - RNA, 19 nt, Artificial Sequence
  Description of Artificial Sequence: Synthetic oligonucleotide
ggcuuguucauguauuuua

SEQ ID NO: 2495455 - RNA, 19 nt, Artificial Sequence
  Description of Artificial Sequence: Synthetic oligonucleotide
gcucaagggcaccucagcc

SEQ ID NO: 2495456 - RNA, 19 nt, Artificial Sequence
  Description of Artificial Sequence: Synthetic oligonucleotide
cuuagagaaugguggaggu

SEQ ID NO: 2495457 - RNA, 19 nt, Artificial Sequence
  Description of Artificial Sequence: Synthetic oligonucleotide
gaaucugaggugggacaug

SEQ ID NO: 2495458 - RNA, 19 nt, Artificial Sequence
  Description of Artificial Sequence: Synthetic oligonucleotide
accgugucaaccgaacaau

SEQ ID NO: 2495459 - RNA, 19 nt, Artificial Sequence
  Description of Artificial Sequence: Synthetic oligonucleotide
aagcaaccagcuggagaag

SEQ ID NO: 2495460 - RNA, 19 nt, Artificial Sequence
  Description of Artificial Sequence: Synthetic oligonucleotide
gguggagguauggaaacac

SEQ ID NO: 2495461 - RNA, 19 nt, Artificial Sequence
  Description of Artificial Sequence: Synthetic oligonucleotide
gggaauucaccugugcuca

SEQ ID NO: 2495462 - RNA, 19 nt, Artificial Sequence
  Description of Artificial Sequence: Synthetic oligonucleotide
caucccauggaagcaacca

SEQ ID NO: 2495463 - RNA, 19 nt, Artificial Sequence
  Description of Artificial Sequence: Synthetic oligonucleotide
acacaccucucacugucau

SEQ ID NO: 2495464 - RNA, 19 nt, Artificial Sequence
  Description of Artificial Sequence: Synthetic oligonucleotide
agagggaaucugagguggg

SEQ ID NO: 2495465 - RNA, 19 nt, Artificial Sequence
  Description of Artificial Sequence: Synthetic oligonucleotide
cugcagccuacauugccuc

SEQ ID NO: 2495466 - RNA, 19 nt, Artificial Sequence
  Description of Artificial Sequence: Synthetic oligonucleotide
acaguccucuguugaggcu

SEQ ID NO: 2495467 - RNA, 19 nt, Artificial Sequence
  Description of Artificial Sequence: Synthetic oligonucleotide
acaugcauacagugugguu

SEQ ID NO: 2495468 - RNA, 19 nt, Artificial Sequence
  Description of Artificial Sequence: Synthetic oligonucleotide
ugguggagguauggaaaca

SEQ ID NO: 2495469 - RNA, 19 nt, Artificial Sequence
  Description of Artificial Sequence: Synthetic oligonucleotide
cauagcauggaggccuguc

SEQ ID NO: 2495470 - RNA, 19 nt, Artificial Sequence
  Description of Artificial Sequence: Synthetic oligonucleotide
agcuccuaguccaugccca

SEQ ID NO: 2495471 - RNA, 19 nt, Artificial Sequence
  Description of Artificial Sequence: Synthetic oligonucleotide
cugccuucaccaccaguac

SEQ ID NO: 2495472 - RNA, 19 nt, Artificial Sequence
  Description of Artificial Sequence: Synthetic oligonucleotide
ggugaacucagcugaagcu

SEQ ID NO: 2495473 - RNA, 19 nt, Artificial Sequence
  Description of Artificial Sequence: Synthetic oligonucleotide
ugagugcugcagccuacau

SEQ ID NO: 2495474 - RNA, 19 nt, Artificial Sequence
  Description of Artificial Sequence: Synthetic oligonucleotide
accugugcucaagggcacc

SEQ ID NO: 2495475 - RNA, 19 nt, Artificial Sequence
  Description of Artificial Sequence: Synthetic oligonucleotide
augugugcagagggaaucu

SEQ ID NO: 2495476 - RNA, 19 nt, Artificial Sequence
  Description of Artificial Sequence: Synthetic oligonucleotide
ggaacagagagcucugacu

SEQ ID NO: 2495477 - RNA, 19 nt, Artificial Sequence
  Description of Artificial Sequence: Synthetic oligonucleotide
uugccucgagucaguaaau

SEQ ID NO: 2495478 - RNA, 19 nt, Artificial Sequence
  Description of Artificial Sequence: Synthetic oligonucleotide
gcagagggaaucugaggug

SEQ ID NO: 2495479 - RNA, 19 nt, Artificial Sequence
  Description of Artificial Sequence: Synthetic oligonucleotide
ggaguugcccauuaauacu

SEQ ID NO: 2495480 - RNA, 19 nt, Artificial Sequence
  Description of Artificial Sequence: Synthetic oligonucleotide
gacauggcuccuagcucag

SEQ ID NO: 2495481 - RNA, 19 nt, Artificial Sequence
  Description of Artificial Sequence: Synthetic oligonucleotide
uccucccacccugaggcca

SEQ ID NO: 2495482 - RNA, 19 nt, Artificial Sequence
  Description of Artificial Sequence: Synthetic oligonucleotide
agcugcucauaaggaacag

SEQ ID NO: 2495483 - RNA, 19 nt, Artificial Sequence
  Description of Artificial Sequence: Synthetic oligonucleotide
gacuuaagcagcagacaua

SEQ ID NO: 2495484 - RNA, 19 nt, Artificial Sequence
  Description of Artificial Sequence: Synthetic oligonucleotide
gggaaucugaggugggaca

SEQ ID NO: 2495485 - RNA, 19 nt, Artificial Sequence
  Description of Artificial Sequence: Synthetic oligonucleotide
gagaggccggauccccuug

SEQ ID NO: 2495486 - RNA, 19 nt, Artificial Sequence
  Description of Artificial Sequence: Synthetic oligonucleotide
cuuggaggucuccucaucu

SEQ ID NO: 2495487 - RNA, 19 nt, Artificial Sequence
  Description of Artificial Sequence: Synthetic oligonucleotide
aucugaggugggacauggc

SEQ ID NO: 2495488 - RNA, 19 nt, Artificial Sequence
  Description of Artificial Sequence: Synthetic oligonucleotide
agagaaugguggagguaug

SEQ ID NO: 2495489 - RNA, 19 nt, Artificial Sequence
  Description of Artificial Sequence: Synthetic oligonucleotide
cacugucauaaugugugca

SEQ ID NO: 2495490 - RNA, 19 nt, Artificial Sequence
  Description of Artificial Sequence: Synthetic oligonucleotide
ugagaggccggauccccuu

SEQ ID NO: 2495491 - RNA, 19 nt, Artificial Sequence
  Description of Artificial Sequence: Synthetic oligonucleotide
cccauuaauacuggugaac

SEQ ID NO: 2495492 - RNA, 19 nt, Artificial Sequence
  Description of Artificial Sequence: Synthetic oligonucleotide
gcuccuagcucagugccag

SEQ ID NO: 2495493 - RNA, 19 nt, Artificial Sequence
  Description of Artificial Sequence: Synthetic oligonucleotide
guauggaaacacaccucuc

SEQ ID NO: 2495494 - RNA, 19 nt, Artificial Sequence
  Description of Artificial Sequence: Synthetic oligonucleotide
agaggccggauccccuuga

SEQ ID NO: 2495495 - RNA, 19 nt, Artificial Sequence
  Description of Artificial Sequence: Synthetic oligonucleotide
ggcaccucagccacagucc

SEQ ID NO: 2495496 - RNA, 19 nt, Artificial Sequence
  Description of Artificial Sequence: Synthetic oligonucleotide
uggaagcaaccagcuggag

SEQ ID NO: 2495497 - RNA, 19 nt, Artificial Sequence
  Description of Artificial Sequence: Synthetic oligonucleotide
cagccuacauugccucgag

SEQ ID NO: 2495498 - RNA, 19 nt, Artificial Sequence
  Description of Artificial Sequence: Synthetic oligonucleotide
ugacucggugcuggugaag

SEQ ID NO: 2495499 - RNA, 19 nt, Artificial Sequence
  Description of Artificial Sequence: Synthetic oligonucleotide
cauaggcccuccaggguga

SEQ ID NO: 2495500 - RNA, 19 nt, Artificial Sequence
  Description of Artificial Sequence: Synthetic oligonucleotide
ggaggucuccucaucugag

SEQ ID NO: 2495501 - RNA, 19 nt, Artificial Sequence
  Description of Artificial Sequence: Synthetic oligonucleotide
uggugaagguggacucauc

SEQ ID NO: 2495502 - RNA, 19 nt, Artificial Sequence
  Description of Artificial Sequence: Synthetic oligonucleotide
gagggaaucugagguggga

SEQ ID NO: 2495503 - RNA, 19 nt, Artificial Sequence
  Description of Artificial Sequence: Synthetic oligonucleotide
gcauggaggccuguccugg

SEQ ID NO: 2495504 - RNA, 19 nt, Artificial Sequence
  Description of Artificial Sequence: Synthetic oligonucleotide
acacaggaguugcccauua

SEQ ID NO: 2495505 - RNA, 19 nt, Artificial Sequence
  Description of Artificial Sequence: Synthetic oligonucleotide
uggaggccaaguuguccuc

SEQ ID NO: 2495506 - RNA, 19 nt, Artificial Sequence
  Description of Artificial Sequence: Synthetic oligonucleotide
ugccucgagucaguaaaua

SEQ ID NO: 2495507 - RNA, 19 nt, Artificial Sequence
  Description of Artificial Sequence: Synthetic oligonucleotide
gugugcagagggaaucuga

SEQ ID NO: 2495508 - RNA, 19 nt, Artificial Sequence
  Description of Artificial Sequence: Synthetic oligonucleotide
ggccggauccccuugagcu

SEQ ID NO: 2495509 - RNA, 19 nt, Artificial Sequence
  Description of Artificial Sequence: Synthetic oligonucleotide
guggagguauggaaacaca

SEQ ID NO: 2495510 - RNA, 19 nt, Artificial Sequence
  Description of Artificial Sequence: Synthetic oligonucleotide
agcagacauaggcccucca

SEQ ID NO: 2495511 - RNA, 19 nt, Artificial Sequence
  Description of Artificial Sequence: Synthetic oligonucleotide
gugcucaagggcaccucag

SEQ ID NO: 2495512 - RNA, 19 nt, Artificial Sequence
  Description of Artificial Sequence: Synthetic oligonucleotide
uuccucccacccugaggcc

SEQ ID NO: 2495513 - RNA, 19 nt, Artificial Sequence
  Description of Artificial Sequence: Synthetic oligonucleotide
acauucagcuuaggacacu

SEQ ID NO: 2495514 - RNA, 19 nt, Artificial Sequence
  Description of Artificial Sequence: Synthetic oligonucleotide
ccuacauugccucgaguca

SEQ ID NO: 2495515 - RNA, 19 nt, Artificial Sequence
  Description of Artificial Sequence: Synthetic oligonucleotide
caaccagcuggagaagaca

SEQ ID NO: 2495516 - RNA, 19 nt, Artificial Sequence
  Description of Artificial Sequence: Synthetic oligonucleotide
cuccuagcucagugccagg

SEQ ID NO: 2495517 - RNA, 19 nt, Artificial Sequence
  Description of Artificial Sequence: Synthetic oligonucleotide
gggacauggcuccuagcuc

SEQ ID NO: 2495518 - RNA, 19 nt, Artificial Sequence
  Description of Artificial Sequence: Synthetic oligonucleotide
aggcuguuccucccacccu

SEQ ID NO: 2495519 - RNA, 19 nt, Artificial Sequence
  Description of Artificial Sequence: Synthetic oligonucleotide
ggaggccuguccugggcag

SEQ ID NO: 2495520 - RNA, 19 nt, Artificial Sequence
  Description of Artificial Sequence: Synthetic oligonucleotide
agccuacauugccucgagu

SEQ ID NO: 2495521 - RNA, 19 nt, Artificial Sequence
  Description of Artificial Sequence: Synthetic oligonucleotide
cuguuccucccacccugag

SEQ ID NO: 2495522 - RNA, 19 nt, Artificial Sequence
  Description of Artificial Sequence: Synthetic oligonucleotide
gccagcguggcccuacaac

SEQ ID NO: 2495523 - RNA, 19 nt, Artificial Sequence
  Description of Artificial Sequence: Synthetic oligonucleotide
guugcccauuaauacuggu

SEQ ID NO: 2495524 - RNA, 19 nt, Artificial Sequence
  Description of Artificial Sequence: Synthetic oligonucleotide
gccucgagucaguaaauaa

SEQ ID NO: 2495525 - RNA, 19 nt, Artificial Sequence
  Description of Artificial Sequence: Synthetic oligonucleotide
cauugccucgagucaguaa

SEQ ID NO: 2495526 - RNA, 19 nt, Artificial Sequence
  Description of Artificial Sequence: Synthetic oligonucleotide
gggaagacuuaagcagcag

SEQ ID NO: 2495527 - RNA, 19 nt, Artificial Sequence
  Description of Artificial Sequence: Synthetic oligonucleotide
gcuccuaguccaugcccag

SEQ ID NO: 2495528 - RNA, 19 nt, Artificial Sequence
  Description of Artificial Sequence: Synthetic oligonucleotide
gccuuguuguacucauuca

SEQ ID NO: 2495529 - RNA, 19 nt, Artificial Sequence
  Description of Artificial Sequence: Synthetic oligonucleotide
agccaggcuguuccuccca

SEQ ID NO: 2495530 - RNA, 19 nt, Artificial Sequence
  Description of Artificial Sequence: Synthetic oligonucleotide
guccugggacccucauccc

SEQ ID NO: 2495531 - RNA, 19 nt, Artificial Sequence
  Description of Artificial Sequence: Synthetic oligonucleotide
gaagguggacucaucugau

SEQ ID NO: 2495532 - RNA, 19 nt, Artificial Sequence
  Description of Artificial Sequence: Synthetic oligonucleotide
ccucucacugucauaaugu

SEQ ID NO: 2495533 - RNA, 19 nt, Artificial Sequence
  Description of Artificial Sequence: Synthetic oligonucleotide
ccgugucaaccgaacaaug

SEQ ID NO: 2495534 - RNA, 19 nt, Artificial Sequence
  Description of Artificial Sequence: Synthetic oligonucleotide
cucugacucggugcuggug

SEQ ID NO: 2495535 - RNA, 19 nt, Artificial Sequence
  Description of Artificial Sequence: Synthetic oligonucleotide
gagugcugcagccuacauu

SEQ ID NO: 2495536 - RNA, 19 nt, Artificial Sequence
  Description of Artificial Sequence: Synthetic oligonucleotide
ugcauacagugugguuagu

SEQ ID NO: 2495537 - RNA, 19 nt, Artificial Sequence
  Description of Artificial Sequence: Synthetic oligonucleotide
guguggcuccaggacauuc

SEQ ID NO: 2495538 - RNA, 19 nt, Artificial Sequence
  Description of Artificial Sequence: Synthetic oligonucleotide
gcccuacaaccgcuuagag

SEQ ID NO: 2495539 - RNA, 19 nt, Artificial Sequence
  Description of Artificial Sequence: Synthetic oligonucleotide
gggcagacuucacauccca

SEQ ID NO: 2495540 - RNA, 19 nt, Artificial Sequence
  Description of Artificial Sequence: Synthetic oligonucleotide
acuggugaacucagcugaa

SEQ ID NO: 2495541 - RNA, 19 nt, Artificial Sequence
  Description of Artificial Sequence: Synthetic oligonucleotide
cccuacaaccgcuuagaga

SEQ ID NO: 2495542 - RNA, 19 nt, Artificial Sequence
  Description of Artificial Sequence: Synthetic oligonucleotide
ccacggaagacuuggaggu

SEQ ID NO: 2495543 - RNA, 19 nt, Artificial Sequence
  Description of Artificial Sequence: Synthetic oligonucleotide
gacuuggaggucuccucau

SEQ ID NO: 2495544 - RNA, 19 nt, Artificial Sequence
  Description of Artificial Sequence: Synthetic oligonucleotide
ggccauagcauggaggccu

SEQ ID NO: 2495545 - RNA, 19 nt, Artificial Sequence
  Description of Artificial Sequence: Synthetic oligonucleotide
ggaagacuuggaggucucc

SEQ ID NO: 2495546 - RNA, 19 nt, Artificial Sequence
  Description of Artificial Sequence: Synthetic oligonucleotide
gcaaccagcuggagaagac

SEQ ID NO: 2495547 - RNA, 19 nt, Artificial Sequence
  Description of Artificial Sequence: Synthetic oligonucleotide
cacggaagacuuggagguc

SEQ ID NO: 2495548 - RNA, 19 nt, Artificial Sequence
  Description of Artificial Sequence: Synthetic oligonucleotide
gugagugcugcagccuaca

SEQ ID NO: 2495549 - RNA, 19 nt, Artificial Sequence
  Description of Artificial Sequence: Synthetic oligonucleotide
ggggaagacuuaagcagca

SEQ ID NO: 2495550 - RNA, 19 nt, Artificial Sequence
  Description of Artificial Sequence: Synthetic oligonucleotide
auaggcccuccagggugag

SEQ ID NO: 2495551 - RNA, 19 nt, Artificial Sequence
  Description of Artificial Sequence: Synthetic oligonucleotide
ggcccuacaaccgcuuaga

SEQ ID NO: 2495552 - RNA, 19 nt, Artificial Sequence
  Description of Artificial Sequence: Synthetic oligonucleotide
acauugccucgagucagua

SEQ ID NO: 2495553 - RNA, 19 nt, Artificial Sequence
  Description of Artificial Sequence: Synthetic oligonucleotide
gcccauuaauacuggugaa

SEQ ID NO: 2495554 - RNA, 19 nt, Artificial Sequence
  Description of Artificial Sequence: Synthetic oligonucleotide
cucaucugaugaagggaau

SEQ ID NO: 2495555 - RNA, 19 nt, Artificial Sequence
  Description of Artificial Sequence: Synthetic oligonucleotide
cacaggaguugcccauuaa

SEQ ID NO: 2495556 - RNA, 19 nt, Artificial Sequence
  Description of Artificial Sequence: Synthetic oligonucleotide
cucuguugaggcugcuccu

SEQ ID NO: 2495557 - RNA, 19 nt, Artificial Sequence
  Description of Artificial Sequence: Synthetic oligonucleotide
cugacucggugcuggugaa

SEQ ID NO: 2495558 - RNA, 19 nt, Artificial Sequence
  Description of Artificial Sequence: Synthetic oligonucleotide
gcagccuacauugccucga

SEQ ID NO: 2495559 - RNA, 19 nt, Artificial Sequence
  Description of Artificial Sequence: Synthetic oligonucleotide
ggugagugcugcagccuac

SEQ ID NO: 2495560 - RNA, 19 nt, Artificial Sequence
  Description of Artificial Sequence: Synthetic oligonucleotide
cagugccuuguuguacuca

SEQ ID NO: 2495561 - RNA, 19 nt, Artificial Sequence
  Description of Artificial Sequence: Synthetic oligonucleotide
cauucagcuuaggacacuu

SEQ ID NO: 2495562 - RNA, 19 nt, Artificial Sequence
  Description of Artificial Sequence: Synthetic oligonucleotide
gggugagugcugcagccua

SEQ ID NO: 2495563 - RNA, 19 nt, Artificial Sequence
  Description of Artificial Sequence: Synthetic oligonucleotide
caccaccaguacaugcaua

SEQ ID NO: 2495564 - RNA, 19 nt, Artificial Sequence
  Description of Artificial Sequence: Synthetic oligonucleotide
cacaccucucacugucaua

SEQ ID NO: 2495565 - RNA, 19 nt, Artificial Sequence
  Description of Artificial Sequence: Synthetic oligonucleotide
ccgcuuagagaauggugga

SEQ ID NO: 2495566 - RNA, 19 nt, Artificial Sequence
  Description of Artificial Sequence: Synthetic oligonucleotide
cucagccacaguccucugu

SEQ ID NO: 2495567 - RNA, 19 nt, Artificial Sequence
  Description of Artificial Sequence: Synthetic oligonucleotide
gcuggugaagguggacuca

SEQ ID NO: 2495568 - RNA, 19 nt, Artificial Sequence
  Description of Artificial Sequence: Synthetic oligonucleotide
ggcugcuccuuggaggcca

SEQ ID NO: 2495569 - RNA, 19 nt, Artificial Sequence
  Description of Artificial Sequence: Synthetic oligonucleotide
gcagcagacauaggcccuc

SEQ ID NO: 2495570 - RNA, 19 nt, Artificial Sequence
  Description of Artificial Sequence: Synthetic oligonucleotide
gcagugccuuguuguacuc

SEQ ID NO: 2495571 - RNA, 19 nt, Artificial Sequence
  Description of Artificial Sequence: Synthetic oligonucleotide
gccggauccccuugagcuc

SEQ ID NO: 2495572 - RNA, 19 nt, Artificial Sequence
  Description of Artificial Sequence: Synthetic oligonucleotide
gcugcagccuacauugccu

SEQ ID NO: 2495573 - RNA, 19 nt, Artificial Sequence
  Description of Artificial Sequence: Synthetic oligonucleotide
guggcccuacaaccgcuua

SEQ ID NO: 2495574 - RNA, 19 nt, Artificial Sequence
  Description of Artificial Sequence: Synthetic oligonucleotide
ccuagcucagugccaggca

SEQ ID NO: 2495575 - RNA, 19 nt, Artificial Sequence
  Description of Artificial Sequence: Synthetic oligonucleotide
caaccgcuuagagaauggu

SEQ ID NO: 2495576 - RNA, 19 nt, Artificial Sequence
  Description of Artificial Sequence: Synthetic oligonucleotide
ccuguccugggcagacuuc

SEQ ID NO: 2495577 - RNA, 19 nt, Artificial Sequence
  Description of Artificial Sequence: Synthetic oligonucleotide
cccauggaagcaaccagcu

SEQ ID NO: 2495578 - RNA, 19 nt, Artificial Sequence
  Description of Artificial Sequence: Synthetic oligonucleotide
cugagaggccggauccccu

SEQ ID NO: 2495579 - RNA, 19 nt, Artificial Sequence
  Description of Artificial Sequence: Synthetic oligonucleotide
ggacagcagccuccccaug

SEQ ID NO: 2495580 - RNA, 19 nt, Artificial Sequence
  Description of Artificial Sequence: Synthetic oligonucleotide
gggccauagcauggaggcc

SEQ ID NO: 2495581 - RNA, 19 nt, Artificial Sequence
  Description of Artificial Sequence: Synthetic oligonucleotide
agggcaccucagccacagu

SEQ ID NO: 2495582 - RNA, 19 nt, Artificial Sequence
  Description of Artificial Sequence: Synthetic oligonucleotide
gaccugccaggcaggccca

SEQ ID NO: 2495583 - RNA, 19 nt, Artificial Sequence
  Description of Artificial Sequence: Synthetic oligonucleotide
uaggcccuccagggugagu

SEQ ID NO: 2495584 - RNA, 19 nt, Artificial Sequence
  Description of Artificial Sequence: Synthetic oligonucleotide
aguguggcuccaggacauu

SEQ ID NO: 2495585 - RNA, 19 nt, Artificial Sequence
  Description of Artificial Sequence: Synthetic oligonucleotide
aggugggacauggcuccua

SEQ ID NO: 2495586 - RNA, 19 nt, Artificial Sequence
  Description of Artificial Sequence: Synthetic oligonucleotide
cuacaaccgcuuagagaau

SEQ ID NO: 2495587 - RNA, 19 nt, Artificial Sequence
  Description of Artificial Sequence: Synthetic oligonucleotide
ggcuccuagcucagugcca

SEQ ID NO: 2495588 - RNA, 19 nt, Artificial Sequence
  Description of Artificial Sequence: Synthetic oligonucleotide
ccaggacauucagcuuagg

SEQ ID NO: 2495589 - RNA, 19 nt, Artificial Sequence
  Description of Artificial Sequence: Synthetic oligonucleotide
cagugugguuaguguggcu

SEQ ID NO: 2495590 - RNA, 19 nt, Artificial Sequence
  Description of Artificial Sequence: Synthetic oligonucleotide
ccaccaguacaugcauaca

SEQ ID NO: 2495591 - RNA, 19 nt, Artificial Sequence
  Description of Artificial Sequence: Synthetic oligonucleotide
ccuccacggaagacuugga

SEQ ID NO: 2495592 - RNA, 19 nt, Artificial Sequence
  Description of Artificial Sequence: Synthetic oligonucleotide
cucaucugagaggccggau

SEQ ID NO: 2495593 - RNA, 19 nt, Artificial Sequence
  Description of Artificial Sequence: Synthetic oligonucleotide
ccucaucugagaggccgga

SEQ ID NO: 2495594 - RNA, 19 nt, Artificial Sequence
  Description of Artificial Sequence: Synthetic oligonucleotide
cccagguccugggacccuc

SEQ ID NO: 2495595 - RNA, 19 nt, Artificial Sequence
  Description of Artificial Sequence: Synthetic oligonucleotide
gggcuuguucauguauuuu

SEQ ID NO: 2495596 - RNA, 19 nt, Artificial Sequence
  Description of Artificial Sequence: Synthetic oligonucleotide
gugccuuguuguacucauu

SEQ ID NO: 2495597 - RNA, 19 nt, Artificial Sequence
  Description of Artificial Sequence: Synthetic oligonucleotide
cagguccugggacccucau

SEQ ID NO: 2495598 - RNA, 19 nt, Artificial Sequence
  Description of Artificial Sequence: Synthetic oligonucleotide
ccugugcucaagggcaccu

SEQ ID NO: 2495599 - RNA, 19 nt, Artificial Sequence
  Description of Artificial Sequence: Synthetic oligonucleotide
gcccuccagggugagugcu

SEQ ID NO: 2495600 - RNA, 19 nt, Artificial Sequence
  Description of Artificial Sequence: Synthetic oligonucleotide
gcguggcccuacaaccgcu

SEQ ID NO: 2495601 - RNA, 19 nt, Artificial Sequence
  Description of Artificial Sequence: Synthetic oligonucleotide
ggauccccuugagcuccua

SEQ ID NO: 2495602 - RNA, 19 nt, Artificial Sequence
  Description of Artificial Sequence: Synthetic oligonucleotide
cguggcccuacaaccgcuu

SEQ ID NO: 2495603 - RNA, 19 nt, Artificial Sequence
  Description of Artificial Sequence: Synthetic oligonucleotide
ccauagcauggaggccugu

SEQ ID NO: 2495604 - RNA, 19 nt, Artificial Sequence
  Description of Artificial Sequence: Synthetic oligonucleotide
cggauccccuugagcuccu

SEQ ID NO: 2495605 - RNA, 19 nt, Artificial Sequence
  Description of Artificial Sequence: Synthetic oligonucleotide
uucagaugaauccacaugg

SEQ ID NO: 2495606 - RNA, 19 nt, Artificial Sequence
  Description of Artificial Sequence: Synthetic oligonucleotide
aauaaugagggaaauuucc

SEQ ID NO: 2495607 - RNA, 19 nt, Artificial Sequence
  Description of Artificial Sequence: Synthetic oligonucleotide
aaaacuauggagucccagc

SEQ ID NO: 2495608 - RNA, 19 nt, Artificial Sequence
  Description of Artificial Sequence: Synthetic oligonucleotide
aaagcagcgcacuaauucc

SEQ ID NO: 2495609 - RNA, 19 nt, Artificial Sequence
  Description of Artificial Sequence: Synthetic oligonucleotide
ucuuuugucagucauucag

SEQ ID NO: 2495610 - RNA, 19 nt, Artificial Sequence
  Description of Artificial Sequence: Synthetic oligonucleotide
aaacagaacgcccaaacug

SEQ ID NO: 2495611 - RNA, 19 nt, Artificial Sequence
  Description of Artificial Sequence: Synthetic oligonucleotide
aauguuuguauagagccac

SEQ ID NO: 2495612 - RNA, 19 nt, Artificial Sequence
  Description of Artificial Sequence: Synthetic oligonucleotide
gaagcgagaauaaugaggg

SEQ ID NO: 2495613 - RNA, 19 nt, Artificial Sequence
  Description of Artificial Sequence: Synthetic oligonucleotide
uucaggaaagaacucaagg

SEQ ID NO: 2495614 - RNA, 19 nt, Artificial Sequence
  Description of Artificial Sequence: Synthetic oligonucleotide
uauaucacagcagaggagg

SEQ ID NO: 2495615 - RNA, 19 nt, Artificial Sequence
  Description of Artificial Sequence: Synthetic oligonucleotide
uuuguauagagccacacuc

SEQ ID NO: 2495616 - RNA, 19 nt, Artificial Sequence
  Description of Artificial Sequence: Synthetic oligonucleotide
uauagagccacacucaggu

SEQ ID NO: 2495617 - RNA, 19 nt, Artificial Sequence
  Description of Artificial Sequence: Synthetic oligonucleotide
ucuauaucacagcagagga

SEQ ID NO: 2495618 - RNA, 19 nt, Artificial Sequence
  Description of Artificial Sequence: Synthetic oligonucleotide
ugcucugaagagcagaagg

SEQ ID NO: 2495619 - RNA, 19 nt, Artificial Sequence
  Description of Artificial Sequence: Synthetic oligonucleotide
aaagcaucgggaaagggac

SEQ ID NO: 2495620 - RNA, 19 nt, Artificial Sequence
  Description of Artificial Sequence: Synthetic oligonucleotide
uuuugucagucauucaggg

SEQ ID NO: 2495621 - RNA, 19 nt, Artificial Sequence
  Description of Artificial Sequence: Synthetic oligonucleotide
gaucuggcuggucauaucg

SEQ ID NO: 2495622 - RNA, 19 nt, Artificial Sequence
  Description of Artificial Sequence: Synthetic oligonucleotide
uguauagagccacacucag

SEQ ID NO: 2495623 - RNA, 19 nt, Artificial Sequence
  Description of Artificial Sequence: Synthetic oligonucleotide
acuauggagucccagcuuc

SEQ ID NO: 2495624 - RNA, 19 nt, Artificial Sequence
  Description of Artificial Sequence: Synthetic oligonucleotide
aaaacagaacgcccaaacu

SEQ ID NO: 2495625 - RNA, 19 nt, Artificial Sequence
  Description of Artificial Sequence: Synthetic oligonucleotide
aaugagggaaauuuccgaa

SEQ ID NO: 2495626 - RNA, 19 nt, Artificial Sequence
  Description of Artificial Sequence: Synthetic oligonucleotide
aacugguucaggaaagaac

SEQ ID NO: 2495627 - RNA, 19 nt, Artificial Sequence
  Description of Artificial Sequence: Synthetic oligonucleotide
gaugaauccacauggucac

SEQ ID NO: 2495628 - RNA, 19 nt, Artificial Sequence
  Description of Artificial Sequence: Synthetic oligonucleotide
agaacgcccaaacugguuc

SEQ ID NO: 2495629 - RNA, 19 nt, Artificial Sequence
  Description of Artificial Sequence: Synthetic oligonucleotide
aauccacauggucacugac

SEQ ID NO: 2495630 - RNA, 19 nt, Artificial Sequence
  Description of Artificial Sequence: Synthetic oligonucleotide
agaauaaugagggaaauuu

SEQ ID NO: 2495631 - RNA, 19 nt, Artificial Sequence
  Description of Artificial Sequence: Synthetic oligonucleotide
gucauaucgccucggaugg

SEQ ID NO: 2495632 - RNA, 19 nt, Artificial Sequence
  Description of Artificial Sequence: Synthetic oligonucleotide
ugaagugaucaaaacuaug

SEQ ID NO: 2495633 - RNA, 19 nt, Artificial Sequence
  Description of Artificial Sequence: Synthetic oligonucleotide
ugaucaaaacuauggaguc

SEQ ID NO: 2495634 - RNA, 19 nt, Artificial Sequence
  Description of Artificial Sequence: Synthetic oligonucleotide
augagggaaauuuccgaac

SEQ ID NO: 2495635 - RNA, 19 nt, Artificial Sequence
  Description of Artificial Sequence: Synthetic oligonucleotide
agagcagaaggcuucgguc

SEQ ID NO: 2495636 - RNA, 19 nt, Artificial Sequence
  Description of Artificial Sequence: Synthetic oligonucleotide
agggugauaaaggugaaag

SEQ ID NO: 2495637 - RNA, 19 nt, Artificial Sequence
  Description of Artificial Sequence: Synthetic oligonucleotide
ggaguuacaccccacgucg

SEQ ID NO: 2495638 - RNA, 19 nt, Artificial Sequence
  Description of Artificial Sequence: Synthetic oligonucleotide
auaaugagggaaauuuccg

SEQ ID NO: 2495639 - RNA, 19 nt, Artificial Sequence
  Description of Artificial Sequence: Synthetic oligonucleotide
uccacaaguagguacuggc

SEQ ID NO: 2495640 - RNA, 19 nt, Artificial Sequence
  Description of Artificial Sequence: Synthetic oligonucleotide
gucuauaucacagcagagg

SEQ ID NO: 2495641 - RNA, 19 nt, Artificial Sequence
  Description of Artificial Sequence: Synthetic oligonucleotide
ucccuuugauccaugaugu

SEQ ID NO: 2495642 - RNA, 19 nt, Artificial Sequence
  Description of Artificial Sequence: Synthetic oligonucleotide
uuguauagagccacacuca

SEQ ID NO: 2495643 - RNA, 19 nt, Artificial Sequence
  Description of Artificial Sequence: Synthetic oligonucleotide
cacuaauuccaucgcaugg

SEQ ID NO: 2495644 - RNA, 19 nt, Artificial Sequence
  Description of Artificial Sequence: Synthetic oligonucleotide
acugguucaggaaagaacu

SEQ ID NO: 2495645 - RNA, 19 nt, Artificial Sequence
  Description of Artificial Sequence: Synthetic oligonucleotide
ugacaugcagaagacaaug

SEQ ID NO: 2495646 - RNA, 19 nt, Artificial Sequence
  Description of Artificial Sequence: Synthetic oligonucleotide
caggcaaaggaaauguuug

SEQ ID NO: 2495647 - RNA, 19 nt, Artificial Sequence
  Description of Artificial Sequence: Synthetic oligonucleotide
gucccuuugauccaugaug

SEQ ID NO: 2495648 - RNA, 19 nt, Artificial Sequence
  Description of Artificial Sequence: Synthetic oligonucleotide
auaaaggugaaagcaucgg

SEQ ID NO: 2495649 - RNA, 19 nt, Artificial Sequence
  Description of Artificial Sequence: Synthetic oligonucleotide
agagcuguagcagaagcuc

SEQ ID NO: 2495650 - RNA, 19 nt, Artificial Sequence
  Description of Artificial Sequence: Synthetic oligonucleotide
gagcagaaggcuucggucc

SEQ ID NO: 2495651 - RNA, 19 nt, Artificial Sequence
  Description of Artificial Sequence: Synthetic oligonucleotide
aaggaaauguuuguauaga

SEQ ID NO: 2495652 - RNA, 19 nt, Artificial Sequence
  Description of Artificial Sequence: Synthetic oligonucleotide
ugcgcuuugcucugaagag

SEQ ID NO: 2495653 - RNA, 19 nt, Artificial Sequence
  Description of Artificial Sequence: Synthetic oligonucleotide
cacaaguagguacuggcag

SEQ ID NO: 2495654 - RNA, 19 nt, Artificial Sequence
  Description of Artificial Sequence: Synthetic oligonucleotide
cagcgcacuaauuccaucg

SEQ ID NO: 2495655 - RNA, 19 nt, Artificial Sequence
  Description of Artificial Sequence: Synthetic oligonucleotide
ucauucagggauugggugu

SEQ ID NO: 2495656 - RNA, 19 nt, Artificial Sequence
  Description of Artificial Sequence: Synthetic oligonucleotide
aaauuuccgaacggggcag

SEQ ID NO: 2495657 - RNA, 19 nt, Artificial Sequence
  Description of Artificial Sequence: Synthetic oligonucleotide
uuucagagcucccggauuc

SEQ ID NO: 2495658 - RNA, 19 nt, Artificial Sequence
  Description of Artificial Sequence: Synthetic oligonucleotide
uaaaaggcagagccuuugc

SEQ ID NO: 2495659 - RNA, 19 nt, Artificial Sequence
  Description of Artificial Sequence: Synthetic oligonucleotide
ggaagcgagaauaaugagg

SEQ ID NO: 2495660 - RNA, 19 nt, Artificial Sequence
  Description of Artificial Sequence: Synthetic oligonucleotide
gagggaaauuuccgaacgg

SEQ ID NO: 2495661 - RNA, 19 nt, Artificial Sequence
  Description of Artificial Sequence: Synthetic oligonucleotide
agcagaaggcuucgguccc

SEQ ID NO: 2495662 - RNA, 19 nt, Artificial Sequence
  Description of Artificial Sequence: Synthetic oligonucleotide
uuacaccccacgucgagcc

SEQ ID NO: 2495663 - RNA, 19 nt, Artificial Sequence
  Description of Artificial Sequence: Synthetic oligonucleotide
ugguguugccaaagcagcg

SEQ ID NO: 2495664 - RNA, 19 nt, Artificial Sequence
  Description of Artificial Sequence: Synthetic oligonucleotide
cuuugauccaugaugucca

SEQ ID NO: 2495665 - RNA, 19 nt, Artificial Sequence
  Description of Artificial Sequence: Synthetic oligonucleotide
agcgcacuaauuccaucgc

SEQ ID NO: 2495666 - RNA, 19 nt, Artificial Sequence
  Description of Artificial Sequence: Synthetic oligonucleotide
ggucauaucgccucggaug

SEQ ID NO: 2495667 - RNA, 19 nt, Artificial Sequence
  Description of Artificial Sequence: Synthetic oligonucleotide
cuauaucacagcagaggag

SEQ ID NO: 2495668 - RNA, 19 nt, Artificial Sequence
  Description of Artificial Sequence: Synthetic oligonucleotide
gaaagcaucgggaaaggga

SEQ ID NO: 2495669 - RNA, 19 nt, Artificial Sequence
  Description of Artificial Sequence: Synthetic oligonucleotide
auccgcacgaucuggcugg

SEQ ID NO: 2495670 - RNA, 19 nt, Artificial Sequence
  Description of Artificial Sequence: Synthetic oligonucleotide
cucccacagaccauggucc

SEQ ID NO: 2495671 - RNA, 19 nt, Artificial Sequence
  Description of Artificial Sequence: Synthetic oligonucleotide
ucuggcuggucauaucgcc

SEQ ID NO: 2495672 - RNA, 19 nt, Artificial Sequence
  Description of Artificial Sequence: Synthetic oligonucleotide
ugggucuauaucacagcag

SEQ ID NO: 2495673 - RNA, 19 nt, Artificial Sequence
  Description of Artificial Sequence: Synthetic oligonucleotide
ggugauaaaggugaaagca

SEQ ID NO: 2495674 - RNA, 19 nt, Artificial Sequence
  Description of Artificial Sequence: Synthetic oligonucleotide
uggugagagagcugaagug

SEQ ID NO: 2495675 - RNA, 19 nt, Artificial Sequence
  Description of Artificial Sequence: Synthetic oligonucleotide
caggaaagaacucaaggga

SEQ ID NO: 2495676 - RNA, 19 nt, Artificial Sequence
  Description of Artificial Sequence: Synthetic oligonucleotide
aaggcuucggucccagcug

SEQ ID NO: 2495677 - RNA, 19 nt, Artificial Sequence
  Description of Artificial Sequence: Synthetic oligonucleotide
aacucaagggaaccuuccu

SEQ ID NO: 2495678 - RNA, 19 nt, Artificial Sequence
  Description of Artificial Sequence: Synthetic oligonucleotide
ggagagaugggccaggaac

SEQ ID NO: 2495679 - RNA, 19 nt, Artificial Sequence
  Description of Artificial Sequence: Synthetic oligonucleotide
ggugaaagcaucgggaaag

SEQ ID NO: 2495680 - RNA, 19 nt, Artificial Sequence
  Description of Artificial Sequence: Synthetic oligonucleotide
aggaucggccucuucucgc

SEQ ID NO: 2495681 - RNA, 19 nt, Artificial Sequence
  Description of Artificial Sequence: Synthetic oligonucleotide
aauuuccgaacggggcagc

SEQ ID NO: 2495682 - RNA, 19 nt, Artificial Sequence
  Description of Artificial Sequence: Synthetic oligonucleotide
gaauaaugagggaaauuuc

SEQ ID NO: 2495683 - RNA, 19 nt, Artificial Sequence
  Description of Artificial Sequence: Synthetic oligonucleotide
uggaagcgagaauaaugag

SEQ ID NO: 2495684 - RNA, 19 nt, Artificial Sequence
  Description of Artificial Sequence: Synthetic oligonucleotide
uuccgaacggggcagcccc

SEQ ID NO: 2495685 - RNA, 19 nt, Artificial Sequence
  Description of Artificial Sequence: Synthetic oligonucleotide
gauugggugugucucugug

SEQ ID NO: 2495686 - RNA, 19 nt, Artificial Sequence
  Description of Artificial Sequence: Synthetic oligonucleotide
ugguucaggaaagaacuca

SEQ ID NO: 2495687 - RNA, 19 nt, Artificial Sequence
  Description of Artificial Sequence: Synthetic oligonucleotide
cagucauucagggauuggg

SEQ ID NO: 2495688 - RNA, 19 nt, Artificial Sequence
  Description of Artificial Sequence: Synthetic oligonucleotide
acaaguagguacuggcaga

SEQ ID NO: 2495689 - RNA, 19 nt, Artificial Sequence
  Description of Artificial Sequence: Synthetic oligonucleotide
ugcgucaggauccgcacga

SEQ ID NO: 2495690 - RNA, 19 nt, Artificial Sequence
  Description of Artificial Sequence: Synthetic oligonucleotide
gagagagcugaagugauca

SEQ ID NO: 2495691 - RNA, 19 nt, Artificial Sequence
  Description of Artificial Sequence: Synthetic oligonucleotide
accaugguccccaugguuc

SEQ ID NO: 2495692 - RNA, 19 nt, Artificial Sequence
  Description of Artificial Sequence: Synthetic oligonucleotide
agcgagaauaaugagggaa

SEQ ID NO: 2495693 - RNA, 19 nt, Artificial Sequence
  Description of Artificial Sequence: Synthetic oligonucleotide
guggaagcgagaauaauga

SEQ ID NO: 2495694 - RNA, 19 nt, Artificial Sequence
  Description of Artificial Sequence: Synthetic oligonucleotide
ucuucucgcgacccucggg

SEQ ID NO: 2495695 - RNA, 19 nt, Artificial Sequence
  Description of Artificial Sequence: Synthetic oligonucleotide
ccaugguucagaugaaucc

SEQ ID NO: 2495696 - RNA, 19 nt, Artificial Sequence
  Description of Artificial Sequence: Synthetic oligonucleotide
aguuacaccccacgucgag

SEQ ID NO: 2495697 - RNA, 19 nt, Artificial Sequence
  Description of Artificial Sequence: Synthetic oligonucleotide
uccggaggcgccuugcagc

SEQ ID NO: 2495698 - RNA, 19 nt, Artificial Sequence
  Description of Artificial Sequence: Synthetic oligonucleotide
agaacucaagggaaccuuc

SEQ ID NO: 2495699 - RNA, 19 nt, Artificial Sequence
  Description of Artificial Sequence: Synthetic oligonucleotide
ucaggauccgcacgaucug

SEQ ID NO: 2495700 - RNA, 19 nt, Artificial Sequence
  Description of Artificial Sequence: Synthetic oligonucleotide
gauccgcacgaucuggcug

SEQ ID NO: 2495701 - RNA, 19 nt, Artificial Sequence
  Description of Artificial Sequence: Synthetic oligonucleotide
caucgcaugguccugcguc

SEQ ID NO: 2495702 - RNA, 19 nt, Artificial Sequence
  Description of Artificial Sequence: Synthetic oligonucleotide
gguggaagcgagaauaaug

SEQ ID NO: 2495703 - RNA, 19 nt, Artificial Sequence
  Description of Artificial Sequence: Synthetic oligonucleotide
aggcggaggucucuggagg

SEQ ID NO: 2495704 - RNA, 19 nt, Artificial Sequence
  Description of Artificial Sequence: Synthetic oligonucleotide
aagagcuguagcagaagcu

SEQ ID NO: 2495705 - RNA, 19 nt, Artificial Sequence
  Description of Artificial Sequence: Synthetic oligonucleotide
uccugcgucaggauccgca

SEQ ID NO: 2495706 - RNA, 19 nt, Artificial Sequence
  Description of Artificial Sequence: Synthetic oligonucleotide
ucucgcgacccucgggagg

SEQ ID NO: 2495707 - RNA, 19 nt, Artificial Sequence
  Description of Artificial Sequence: Synthetic oligonucleotide
cccgguagcacuuccaggg

SEQ ID NO: 2495708 - RNA, 19 nt, Artificial Sequence
  Description of Artificial Sequence: Synthetic oligonucleotide
caaaacuauggagucccag

SEQ ID NO: 2495709 - RNA, 19 nt, Artificial Sequence
  Description of Artificial Sequence: Synthetic oligonucleotide
cuugcagcggcccgguagc

SEQ ID NO: 2495710 - RNA, 19 nt, Artificial Sequence
  Description of Artificial Sequence: Synthetic oligonucleotide
cauggucacugacaugcag

SEQ ID NO: 2495711 - RNA, 19 nt, Artificial Sequence
  Description of Artificial Sequence: Synthetic oligonucleotide
aagaacucaagggaaccuu

SEQ ID NO: 2495712 - RNA, 19 nt, Artificial Sequence
  Description of Artificial Sequence: Synthetic oligonucleotide
aacuauggagucccagcuu

SEQ ID NO: 2495713 - RNA, 19 nt, Artificial Sequence
  Description of Artificial Sequence: Synthetic oligonucleotide
auagagccacacucagguc

SEQ ID NO: 2495714 - RNA, 19 nt, Artificial Sequence
  Description of Artificial Sequence: Synthetic oligonucleotide
ucagggauugggugugucu

SEQ ID NO: 2495715 - RNA, 19 nt, Artificial Sequence
  Description of Artificial Sequence: Synthetic oligonucleotide
gggucuauaucacagcaga

SEQ ID NO: 2495716 - RNA, 19 nt, Artificial Sequence
  Description of Artificial Sequence: Synthetic oligonucleotide
auggagucccagcuuccgg

SEQ ID NO: 2495717 - RNA, 19 nt, Artificial Sequence
  Description of Artificial Sequence: Synthetic oligonucleotide
guauagagccacacucagg

SEQ ID NO: 2495718 - RNA, 19 nt, Artificial Sequence
  Description of Artificial Sequence: Synthetic oligonucleotide
gggaaauuuccgaacgggg

SEQ ID NO: 2495719 - RNA, 19 nt, Artificial Sequence
  Description of Artificial Sequence: Synthetic oligonucleotide
ucgggaaagggacauucuu

SEQ ID NO: 2495720 - RNA, 19 nt, Artificial Sequence
  Description of Artificial Sequence: Synthetic oligonucleotide
gugcgcuuugcucugaaga

SEQ ID NO: 2495721 - RNA, 19 nt, Artificial Sequence
  Description of Artificial Sequence: Synthetic oligonucleotide
auuuccgaacggggcagcc

SEQ ID NO: 2495722 - RNA, 19 nt, Artificial Sequence
  Description of Artificial Sequence: Synthetic oligonucleotide
aggaaagaacucaagggaa

SEQ ID NO: 2495723 - RNA, 19 nt, Artificial Sequence
  Description of Artificial Sequence: Synthetic oligonucleotide
ucagucauucagggauugg

SEQ ID NO: 2495724 - RNA, 19 nt, Artificial Sequence
  Description of Artificial Sequence: Synthetic oligonucleotide
agagcugaagugaucaaaa

SEQ ID NO: 2495725 - RNA, 19 nt, Artificial Sequence
  Description of Artificial Sequence: Synthetic oligonucleotide
ucgggaggguggaagcgag

SEQ ID NO: 2495726 - RNA, 19 nt, Artificial Sequence
  Description of Artificial Sequence: Synthetic oligonucleotide
gcugaagugaucaaaacua

SEQ ID NO: 2495727 - RNA, 19 nt, Artificial Sequence
  Description of Artificial Sequence: Synthetic oligonucleotide
cuauggagucccagcuucc

SEQ ID NO: 2495728 - RNA, 19 nt, Artificial Sequence
  Description of Artificial Sequence: Synthetic oligonucleotide
caaguagguacuggcagac

SEQ ID NO: 2495729 - RNA, 19 nt, Artificial Sequence
  Description of Artificial Sequence: Synthetic oligonucleotide
ugagagagcugaagugauc

SEQ ID NO: 2495730 - RNA, 19 nt, Artificial Sequence
  Description of Artificial Sequence: Synthetic oligonucleotide
aagcgagaauaaugaggga

SEQ ID NO: 2495731 - RNA, 19 nt, Artificial Sequence
  Description of Artificial Sequence: Synthetic oligonucleotide
acgucgagccccaggaucg

SEQ ID NO: 2495732 - RNA, 19 nt, Artificial Sequence
  Description of Artificial Sequence: Synthetic oligonucleotide
uccaucgcaugguccugcg

SEQ ID NO: 2495733 - RNA, 19 nt, Artificial Sequence
  Description of Artificial Sequence: Synthetic oligonucleotide
uaucgccucggauggugag

SEQ ID NO: 2495734 - RNA, 19 nt, Artificial Sequence
  Description of Artificial Sequence: Synthetic oligonucleotide
aucuggcuggucauaucgc

SEQ ID NO: 2495735 - RNA, 19 nt, Artificial Sequence
  Description of Artificial Sequence: Synthetic oligonucleotide
ucgagccccaggaucggcc

SEQ ID NO: 2495736 - RNA, 19 nt, Artificial Sequence
  Description of Artificial Sequence: Synthetic oligonucleotide
gaaggcuucggucccagcu

SEQ ID NO: 2495737 - RNA, 19 nt, Artificial Sequence
  Description of Artificial Sequence: Synthetic oligonucleotide
aacucccacagaccauggu

SEQ ID NO: 2495738 - RNA, 19 nt, Artificial Sequence
  Description of Artificial Sequence: Synthetic oligonucleotide
uuccggaggcgccuugcag

SEQ ID NO: 2495739 - RNA, 19 nt, Artificial Sequence
  Description of Artificial Sequence: Synthetic oligonucleotide
agagaugggccaggaacuc

SEQ ID NO: 2495740 - RNA, 19 nt, Artificial Sequence
  Description of Artificial Sequence: Synthetic oligonucleotide
aucggccucuucucgcgac

SEQ ID NO: 2495741 - RNA, 19 nt, Artificial Sequence
  Description of Artificial Sequence: Synthetic oligonucleotide
gggugauaaaggugaaagc

SEQ ID NO: 2495742 - RNA, 19 nt, Artificial Sequence
  Description of Artificial Sequence: Synthetic oligonucleotide
acaccccacgucgagcccc

SEQ ID NO: 2495743 - RNA, 19 nt, Artificial Sequence
  Description of Artificial Sequence: Synthetic oligonucleotide
caucgggaaagggacauuc

SEQ ID NO: 2495744 - RNA, 19 nt, Artificial Sequence
  Description of Artificial Sequence: Synthetic oligonucleotide
uguugccaaagcagcgcac

SEQ ID NO: 2495745 - RNA, 19 nt, Artificial Sequence
  Description of Artificial Sequence: Synthetic oligonucleotide
gguccccggaguuacaccc

SEQ ID NO: 2495746 - RNA, 19 nt, Artificial Sequence
  Description of Artificial Sequence: Synthetic oligonucleotide
agucauucagggauugggu

SEQ ID NO: 2495747 - RNA, 19 nt, Artificial Sequence
  Description of Artificial Sequence: Synthetic oligonucleotide
cauucagggauugggugug

SEQ ID NO: 2495748 - RNA, 19 nt, Artificial Sequence
  Description of Artificial Sequence: Synthetic oligonucleotide
caggaucggccucuucucg

SEQ ID NO: 2495749 - RNA, 19 nt, Artificial Sequence
  Description of Artificial Sequence: Synthetic oligonucleotide
ucgccucggauggugagag

SEQ ID NO: 2495750 - RNA, 19 nt, Artificial Sequence
  Description of Artificial Sequence: Synthetic oligonucleotide
aagcagcgcacuaauucca

SEQ ID NO: 2495751 - RNA, 19 nt, Artificial Sequence
  Description of Artificial Sequence: Synthetic oligonucleotide
aggauccgcacgaucuggc

SEQ ID NO: 2495752 - RNA, 19 nt, Artificial Sequence
  Description of Artificial Sequence: Synthetic oligonucleotide
uggucauaucgccucggau

SEQ ID NO: 2495753 - RNA, 19 nt, Artificial Sequence
  Description of Artificial Sequence: Synthetic oligonucleotide
cauaucgccucggauggug

SEQ ID NO: 2495754 - RNA, 19 nt, Artificial Sequence
  Description of Artificial Sequence: Synthetic oligonucleotide
ugcagaagacaaugucaaa

SEQ ID NO: 2495755 - RNA, 19 nt, Artificial Sequence
  Description of Artificial Sequence: Synthetic oligonucleotide
ugucagucauucagggauu

SEQ ID NO: 2495756 - RNA, 19 nt, Artificial Sequence
  Description of Artificial Sequence: Synthetic oligonucleotide
ucccacagaccaugguccc

SEQ ID NO: 2495757 - RNA, 19 nt, Artificial Sequence
  Description of Artificial Sequence: Synthetic oligonucleotide
acgcaggcaaaggaaaugu

SEQ ID NO: 2495758 - RNA, 19 nt, Artificial Sequence
  Description of Artificial Sequence: Synthetic oligonucleotide
gaacgcccaaacugguuca

SEQ ID NO: 2495759 - RNA, 19 nt, Artificial Sequence
  Description of Artificial Sequence: Synthetic oligonucleotide
ggaaagaacucaagggaac

SEQ ID NO: 2495760 - RNA, 19 nt, Artificial Sequence
  Description of Artificial Sequence: Synthetic oligonucleotide
ggugagagagcugaaguga

SEQ ID NO: 2495761 - RNA, 19 nt, Artificial Sequence
  Description of Artificial Sequence: Synthetic oligonucleotide
cucgcgacccucgggaggg

SEQ ID NO: 2495762 - RNA, 19 nt, Artificial Sequence
  Description of Artificial Sequence: Synthetic oligonucleotide
aggugaaagcaucgggaaa

SEQ ID NO: 2495763 - RNA, 19 nt, Artificial Sequence
  Description of Artificial Sequence: Synthetic oligonucleotide
cuucucgcgacccucggga

SEQ ID NO: 2495764 - RNA, 19 nt, Artificial Sequence
  Description of Artificial Sequence: Synthetic oligonucleotide
aacgcccaaacugguucag

SEQ ID NO: 2495765 - RNA, 19 nt, Artificial Sequence
  Description of Artificial Sequence: Synthetic oligonucleotide
ggaacucccacagaccaug

SEQ ID NO: 2495766 - RNA, 19 nt, Artificial Sequence
  Description of Artificial Sequence: Synthetic oligonucleotide
gagagcugaagugaucaaa

SEQ ID NO: 2495767 - RNA, 19 nt, Artificial Sequence
  Description of Artificial Sequence: Synthetic oligonucleotide
cugguucaggaaagaacuc

SEQ ID NO: 2495768 - RNA, 19 nt, Artificial Sequence
  Description of Artificial Sequence: Synthetic oligonucleotide
guuacaccccacgucgagc

SEQ ID NO: 2495769 - RNA, 19 nt, Artificial Sequence
  Description of Artificial Sequence: Synthetic oligonucleotide
uugcucugaagagcagaag

SEQ ID NO: 2495770 - RNA, 19 nt, Artificial Sequence
  Description of Artificial Sequence: Synthetic oligonucleotide
gaacucccacagaccaugg

SEQ ID NO: 2495771 - RNA, 19 nt, Artificial Sequence
  Description of Artificial Sequence: Synthetic oligonucleotide
aggcagagccuuugcucgg

SEQ ID NO: 2495772 - RNA, 19 nt, Artificial Sequence
  Description of Artificial Sequence: Synthetic oligonucleotide
agggauugggugugucucu

SEQ ID NO: 2495773 - RNA, 19 nt, Artificial Sequence
  Description of Artificial Sequence: Synthetic oligonucleotide
gcacuaauuccaucgcaug

SEQ ID NO: 2495774 - RNA, 19 nt, Artificial Sequence
  Description of Artificial Sequence: Synthetic oligonucleotide
uuuccgaacggggcagccc

SEQ ID NO: 2495775 - RNA, 19 nt, Artificial Sequence
  Description of Artificial Sequence: Synthetic oligonucleotide
caucacgcaggcaaaggaa

SEQ ID NO: 2495776 - RNA, 19 nt, Artificial Sequence
  Description of Artificial Sequence: Synthetic oligonucleotide
uucucgcgacccucgggag

SEQ ID NO: 2495777 - RNA, 19 nt, Artificial Sequence
  Description of Artificial Sequence: Synthetic oligonucleotide
acccucgggagggaagagc

SEQ ID NO: 2495778 - RNA, 19 nt, Artificial Sequence
  Description of Artificial Sequence: Synthetic oligonucleotide
ggaucggccucuucucgcg

SEQ ID NO: 2495779 - RNA, 19 nt, Artificial Sequence
  Description of Artificial Sequence: Synthetic oligonucleotide
gggugugucucuguggugc

SEQ ID NO: 2495780 - RNA, 19 nt, Artificial Sequence
  Description of Artificial Sequence: Synthetic oligonucleotide
aacggggcagccccggguu

SEQ ID NO: 2495781 - RNA, 19 nt, Artificial Sequence
  Description of Artificial Sequence: Synthetic oligonucleotide
ucggauggugagagagcug

SEQ ID NO: 2495782 - RNA, 19 nt, Artificial Sequence
  Description of Artificial Sequence: Synthetic oligonucleotide
uccccggaguuacacccca

SEQ ID NO: 2495783 - RNA, 19 nt, Artificial Sequence
  Description of Artificial Sequence: Synthetic oligonucleotide
gguguugccaaagcagcgc

SEQ ID NO: 2495784 - RNA, 19 nt, Artificial Sequence
  Description of Artificial Sequence: Synthetic oligonucleotide
gagagaugggccaggaacu

SEQ ID NO: 2495785 - RNA, 19 nt, Artificial Sequence
  Description of Artificial Sequence: Synthetic oligonucleotide
ucggccucuucucgcgacc

SEQ ID NO: 2495786 - RNA, 19 nt, Artificial Sequence
  Description of Artificial Sequence: Synthetic oligonucleotide
aucacgcaggcaaaggaaa

SEQ ID NO: 2495787 - RNA, 19 nt, Artificial Sequence
  Description of Artificial Sequence: Synthetic oligonucleotide
uccgaacggggcagccccg

SEQ ID NO: 2495788 - RNA, 19 nt, Artificial Sequence
  Description of Artificial Sequence: Synthetic oligonucleotide
cacgcaggcaaaggaaaug

SEQ ID NO: 2495789 - RNA, 19 nt, Artificial Sequence
  Description of Artificial Sequence: Synthetic oligonucleotide
gcucucuccacaaggacug

SEQ ID NO: 2495790 - RNA, 19 nt, Artificial Sequence
  Description of Artificial Sequence: Synthetic oligonucleotide
aaguagguacuggcagaca

SEQ ID NO: 2495791 - RNA, 19 nt, Artificial Sequence
  Description of Artificial Sequence: Synthetic oligonucleotide
agagagcugaagugaucaa

SEQ ID NO: 2495792 - RNA, 19 nt, Artificial Sequence
  Description of Artificial Sequence: Synthetic oligonucleotide
uugccaaagcagcgcacua

SEQ ID NO: 2495793 - RNA, 19 nt, Artificial Sequence
  Description of Artificial Sequence: Synthetic oligonucleotide
gucagucauucagggauug

SEQ ID NO: 2495794 - RNA, 19 nt, Artificial Sequence
  Description of Artificial Sequence: Synthetic oligonucleotide
ugccaaagcagcgcacuaa

SEQ ID NO: 2495795 - RNA, 19 nt, Artificial Sequence
  Description of Artificial Sequence: Synthetic oligonucleotide
cugcgucaggauccgcacg

SEQ ID NO: 2495796 - RNA, 19 nt, Artificial Sequence
  Description of Artificial Sequence: Synthetic oligonucleotide
ggucuauaucacagcagag

SEQ ID NO: 2495797 - RNA, 19 nt, Artificial Sequence
  Description of Artificial Sequence: Synthetic oligonucleotide
gugauaaaggugaaagcau

SEQ ID NO: 2495798 - RNA, 19 nt, Artificial Sequence
  Description of Artificial Sequence: Synthetic oligonucleotide
cagcucucuccacaaggac

SEQ ID NO: 2495799 - RNA, 19 nt, Artificial Sequence
  Description of Artificial Sequence: Synthetic oligonucleotide
gccucggauggugagagag

SEQ ID NO: 2495800 - RNA, 19 nt, Artificial Sequence
  Description of Artificial Sequence: Synthetic oligonucleotide
guacuggcagacagaggag

SEQ ID NO: 2495801 - RNA, 19 nt, Artificial Sequence
  Description of Artificial Sequence: Synthetic oligonucleotide
cucuucucgcgacccucgg

SEQ ID NO: 2495802 - RNA, 19 nt, Artificial Sequence
  Description of Artificial Sequence: Synthetic oligonucleotide
cugagcagggcuccccauc

SEQ ID NO: 2495803 - RNA, 19 nt, Artificial Sequence
  Description of Artificial Sequence: Synthetic oligonucleotide
cugaagugaucaaaacuau

SEQ ID NO: 2495804 - RNA, 19 nt, Artificial Sequence
  Description of Artificial Sequence: Synthetic oligonucleotide
guagguacuggcagacaga

SEQ ID NO: 2495805 - RNA, 19 nt, Artificial Sequence
  Description of Artificial Sequence: Synthetic oligonucleotide
ggagucccagcuuccggag

SEQ ID NO: 2495806 - RNA, 19 nt, Artificial Sequence
  Description of Artificial Sequence: Synthetic oligonucleotide
uccccaucacgcaggcaaa

SEQ ID NO: 2495807 - RNA, 19 nt, Artificial Sequence
  Description of Artificial Sequence: Synthetic oligonucleotide
acagaacgcccaaacuggu

SEQ ID NO: 2495808 - RNA, 19 nt, Artificial Sequence
  Description of Artificial Sequence: Synthetic oligonucleotide
ucucuguggugcgcuuugc

SEQ ID NO: 2495809 - RNA, 19 nt, Artificial Sequence
  Description of Artificial Sequence: Synthetic oligonucleotide
auuccaucgcaugguccug

SEQ ID NO: 2495810 - RNA, 19 nt, Artificial Sequence
  Description of Artificial Sequence: Synthetic oligonucleotide
ccuugcagcggcccgguag

SEQ ID NO: 2495811 - RNA, 19 nt, Artificial Sequence
  Description of Artificial Sequence: Synthetic oligonucleotide
acgcccaaacugguucagg

SEQ ID NO: 2495812 - RNA, 19 nt, Artificial Sequence
  Description of Artificial Sequence: Synthetic oligonucleotide
ggcuggucauaucgccucg

SEQ ID NO: 2495813 - RNA, 19 nt, Artificial Sequence
  Description of Artificial Sequence: Synthetic oligonucleotide
uucagggauuggguguguc

SEQ ID NO: 2495814 - RNA, 19 nt, Artificial Sequence
  Description of Artificial Sequence: Synthetic oligonucleotide
acgaucuggcuggucauau

SEQ ID NO: 2495815 - RNA, 19 nt, Artificial Sequence
  Description of Artificial Sequence: Synthetic oligonucleotide
gagaauaaugagggaaauu

SEQ ID NO: 2495816 - RNA, 19 nt, Artificial Sequence
  Description of Artificial Sequence: Synthetic oligonucleotide
ggcccgguagcacuuccag

SEQ ID NO: 2495817 - RNA, 19 nt, Artificial Sequence
  Description of Artificial Sequence: Synthetic oligonucleotide
ucgcaugguccugcgucag

SEQ ID NO: 2495818 - RNA, 19 nt, Artificial Sequence
  Description of Artificial Sequence: Synthetic oligonucleotide
auguuuguauagagccaca

SEQ ID NO: 2495819 - RNA, 19 nt, Artificial Sequence
  Description of Artificial Sequence: Synthetic oligonucleotide
aucgggaaagggacauucu

SEQ ID NO: 2495820 - RNA, 19 nt, Artificial Sequence
  Description of Artificial Sequence: Synthetic oligonucleotide
gcuguagcagaagcuccgg

SEQ ID NO: 2495821 - RNA, 19 nt, Artificial Sequence
  Description of Artificial Sequence: Synthetic oligonucleotide
guugccaaagcagcgcacu

SEQ ID NO: 2495822 - RNA, 19 nt, Artificial Sequence
  Description of Artificial Sequence: Synthetic oligonucleotide
cccggaguuacaccccacg

SEQ ID NO: 2495823 - RNA, 19 nt, Artificial Sequence
  Description of Artificial Sequence: Synthetic oligonucleotide
gaggcaccugagcagggcu

SEQ ID NO: 2495824 - RNA, 19 nt, Artificial Sequence
  Description of Artificial Sequence: Synthetic oligonucleotide
ggugcgcuuugcucugaag

SEQ ID NO: 2495825 - RNA, 19 nt, Artificial Sequence
  Description of Artificial Sequence: Synthetic oligonucleotide
gcgagaauaaugagggaaa

SEQ ID NO: 2495826 - RNA, 19 nt, Artificial Sequence
  Description of Artificial Sequence: Synthetic oligonucleotide
uggugcgcuuugcucugaa

SEQ ID NO: 2495827 - RNA, 19 nt, Artificial Sequence
  Description of Artificial Sequence: Synthetic oligonucleotide
auaucgccucggaugguga

SEQ ID NO: 2495828 - RNA, 19 nt, Artificial Sequence
  Description of Artificial Sequence: Synthetic oligonucleotide
gggaaagggacauucuuuu

SEQ ID NO: 2495829 - RNA, 19 nt, Artificial Sequence
  Description of Artificial Sequence: Synthetic oligonucleotide
cagguccccggaguuacac

SEQ ID NO: 2495830 - RNA, 19 nt, Artificial Sequence
  Description of Artificial Sequence: Synthetic oligonucleotide
cuggucauaucgccucgga

SEQ ID NO: 2495831 - RNA, 19 nt, Artificial Sequence
  Description of Artificial Sequence: Synthetic oligonucleotide
augaauccacauggucacu

SEQ ID NO: 2495832 - RNA, 19 nt, Artificial Sequence
  Description of Artificial Sequence: Synthetic oligonucleotide
gaucggccucuucucgcga

SEQ ID NO: 2495833 - RNA, 19 nt, Artificial Sequence
  Description of Artificial Sequence: Synthetic oligonucleotide
gaguuacaccccacgucga

SEQ ID NO: 2495834 - RNA, 19 nt, Artificial Sequence
  Description of Artificial Sequence: Synthetic oligonucleotide
cucggauggugagagagcu

SEQ ID NO: 2495835 - RNA, 19 nt, Artificial Sequence
  Description of Artificial Sequence: Synthetic oligonucleotide
aucgccucggauggugaga

SEQ ID NO: 2495836 - RNA, 19 nt, Artificial Sequence
  Description of Artificial Sequence: Synthetic oligonucleotide
aggcgccuugcagcggccc

SEQ ID NO: 2495837 - RNA, 19 nt, Artificial Sequence
  Description of Artificial Sequence: Synthetic oligonucleotide
gcccgguagcacuuccagg

SEQ ID NO: 2495838 - RNA, 19 nt, Artificial Sequence
  Description of Artificial Sequence: Synthetic oligonucleotide
ccucggauggugagagagc

SEQ ID NO: 2495839 - RNA, 19 nt, Artificial Sequence
  Description of Artificial Sequence: Synthetic oligonucleotide
ucauaucgccucggauggu

SEQ ID NO: 2495840 - RNA, 19 nt, Artificial Sequence
  Description of Artificial Sequence: Synthetic oligonucleotide
ccggaggcgccuugcagcg

SEQ ID NO: 2495841 - RNA, 19 nt, Artificial Sequence
  Description of Artificial Sequence: Synthetic oligonucleotide
agggaaccuuccugucccu

SEQ ID NO: 2495842 - RNA, 19 nt, Artificial Sequence
  Description of Artificial Sequence: Synthetic oligonucleotide
guuucagagcucccggauu

SEQ ID NO: 2495843 - RNA, 19 nt, Artificial Sequence
  Description of Artificial Sequence: Synthetic oligonucleotide
ucggucccagcugguguug

SEQ ID NO: 2495844 - RNA, 19 nt, Artificial Sequence
  Description of Artificial Sequence: Synthetic oligonucleotide
ccugcgucaggauccgcac

SEQ ID NO: 2495845 - RNA, 19 nt, Artificial Sequence
  Description of Artificial Sequence: Synthetic oligonucleotide
ccggguuucagagcucccg

SEQ ID NO: 2495846 - RNA, 19 nt, Artificial Sequence
  Description of Artificial Sequence: Synthetic oligonucleotide
ccaucacgcaggcaaagga

SEQ ID NO: 2495847 - RNA, 19 nt, Artificial Sequence
  Description of Artificial Sequence: Synthetic oligonucleotide
gcgcuuugcucugaagagc

SEQ ID NO: 2495848 - RNA, 19 nt, Artificial Sequence
  Description of Artificial Sequence: Synthetic oligonucleotide
ccaggaucggccucuucuc

SEQ ID NO: 2495849 - RNA, 19 nt, Artificial Sequence
  Description of Artificial Sequence: Synthetic oligonucleotide
cacugacaugcagaagaca

SEQ ID NO: 2495850 - RNA, 19 nt, Artificial Sequence
  Description of Artificial Sequence: Synthetic oligonucleotide
caugguccccaugguucag

SEQ ID NO: 2495851 - RNA, 19 nt, Artificial Sequence
  Description of Artificial Sequence: Synthetic oligonucleotide
gggauugggugugucucug

SEQ ID NO: 2495852 - RNA, 19 nt, Artificial Sequence
  Description of Artificial Sequence: Synthetic oligonucleotide
ggcaccugagcagggcucc

SEQ ID NO: 2495853 - RNA, 19 nt, Artificial Sequence
  Description of Artificial Sequence: Synthetic oligonucleotide
ggucacugacaugcagaag

SEQ ID NO: 2495854 - RNA, 19 nt, Artificial Sequence
  Description of Artificial Sequence: Synthetic oligonucleotide
agcagcgcacuaauuccau

SEQ ID NO: 2495855 - RNA, 19 nt, Artificial Sequence
  Description of Artificial Sequence: Synthetic oligonucleotide
cccaucacgcaggcaaagg

SEQ ID NO: 2495856 - RNA, 19 nt, Artificial Sequence
  Description of Artificial Sequence: Synthetic oligonucleotide
gcucgggaggguggaagcg

SEQ ID NO: 2495857 - RNA, 19 nt, Artificial Sequence
  Description of Artificial Sequence: Synthetic oligonucleotide
cuggcuggucauaucgccu

SEQ ID NO: 2495858 - RNA, 19 nt, Artificial Sequence
  Description of Artificial Sequence: Synthetic oligonucleotide
agcuuccggaggcgccuug

SEQ ID NO: 2495859 - RNA, 19 nt, Artificial Sequence
  Description of Artificial Sequence: Synthetic oligonucleotide
gguccugcgucaggauccg

SEQ ID NO: 2495860 - RNA, 19 nt, Artificial Sequence
  Description of Artificial Sequence: Synthetic oligonucleotide
gcgcacuaauuccaucgca

SEQ ID NO: 2495861 - RNA, 19 nt, Artificial Sequence
  Description of Artificial Sequence: Synthetic oligonucleotide
gucccagcugguguugcca

SEQ ID NO: 2495862 - RNA, 19 nt, Artificial Sequence
  Description of Artificial Sequence: Synthetic oligonucleotide
cucgggaggguggaagcga

SEQ ID NO: 2495863 - RNA, 19 nt, Artificial Sequence
  Description of Artificial Sequence: Synthetic oligonucleotide
gaacggggcagccccgggu

SEQ ID NO: 2495864 - RNA, 19 nt, Artificial Sequence
  Description of Artificial Sequence: Synthetic oligonucleotide
gugagagagcugaagugau

SEQ ID NO: 2495865 - RNA, 19 nt, Artificial Sequence
  Description of Artificial Sequence: Synthetic oligonucleotide
gcaugguccugcgucagga

SEQ ID NO: 2495866 - RNA, 19 nt, Artificial Sequence
  Description of Artificial Sequence: Synthetic oligonucleotide
gguccccaugguucagaug

SEQ ID NO: 2495867 - RNA, 19 nt, Artificial Sequence
  Description of Artificial Sequence: Synthetic oligonucleotide
ggaggcaccugagcagggc

SEQ ID NO: 2495868 - RNA, 19 nt, Artificial Sequence
  Description of Artificial Sequence: Synthetic oligonucleotide
cuuccggaggcgccuugca

SEQ ID NO: 2495869 - RNA, 19 nt, Artificial Sequence
  Description of Artificial Sequence: Synthetic oligonucleotide
gguuucagagcucccggau

SEQ ID NO: 2495870 - RNA, 19 nt, Artificial Sequence
  Description of Artificial Sequence: Synthetic oligonucleotide
guccccggaguuacacccc

SEQ ID NO: 2495871 - RNA, 19 nt, Artificial Sequence
  Description of Artificial Sequence: Synthetic oligonucleotide
cggaguuacaccccacguc

SEQ ID NO: 2495872 - RNA, 19 nt, Artificial Sequence
  Description of Artificial Sequence: Synthetic oligonucleotide
ggguaaaaggcagagccuu

SEQ ID NO: 2495873 - RNA, 19 nt, Artificial Sequence
  Description of Artificial Sequence: Synthetic oligonucleotide
gcagcgcacuaauuccauc

SEQ ID NO: 2495874 - RNA, 19 nt, Artificial Sequence
  Description of Artificial Sequence: Synthetic oligonucleotide
gccuuugcucgggagggug

SEQ ID NO: 2495875 - RNA, 19 nt, Artificial Sequence
  Description of Artificial Sequence: Synthetic oligonucleotide
gucgagccccaggaucggc

SEQ ID NO: 2495876 - RNA, 19 nt, Artificial Sequence
  Description of Artificial Sequence: Synthetic oligonucleotide
ccgguagcacuuccagggc

SEQ ID NO: 2495877 - RNA, 19 nt, Artificial Sequence
  Description of Artificial Sequence: Synthetic oligonucleotide
cagggugauaaaggugaaa

SEQ ID NO: 2495878 - RNA, 19 nt, Artificial Sequence
  Description of Artificial Sequence: Synthetic oligonucleotide
uugcagcggcccgguagca

SEQ ID NO: 2495879 - RNA, 19 nt, Artificial Sequence
  Description of Artificial Sequence: Synthetic oligonucleotide
gaggucucuggaggcaccu

SEQ ID NO: 2495880 - RNA, 19 nt, Artificial Sequence
  Description of Artificial Sequence: Synthetic oligonucleotide
cucuguggugcgcuuugcu

SEQ ID NO: 2495881 - RNA, 19 nt, Artificial Sequence
  Description of Artificial Sequence: Synthetic oligonucleotide
gccaaagcagcgcacuaau

SEQ ID NO: 2495882 - RNA, 19 nt, Artificial Sequence
  Description of Artificial Sequence: Synthetic oligonucleotide
cccuuugauccaugauguc

SEQ ID NO: 2495883 - RNA, 19 nt, Artificial Sequence
  Description of Artificial Sequence: Synthetic oligonucleotide
gcuuccggaggcgccuugc

SEQ ID NO: 2495884 - RNA, 19 nt, Artificial Sequence
  Description of Artificial Sequence: Synthetic oligonucleotide
uccgcacgaucuggcuggu

SEQ ID NO: 2495885 - RNA, 19 nt, Artificial Sequence
  Description of Artificial Sequence: Synthetic oligonucleotide
gggguaaaaggcagagccu

SEQ ID NO: 2495886 - RNA, 19 nt, Artificial Sequence
  Description of Artificial Sequence: Synthetic oligonucleotide
ggauccgcacgaucuggcu

SEQ ID NO: 2495887 - RNA, 19 nt, Artificial Sequence
  Description of Artificial Sequence: Synthetic oligonucleotide
ggcagccccggguuucaga

SEQ ID NO: 2495888 - RNA, 19 nt, Artificial Sequence
  Description of Artificial Sequence: Synthetic oligonucleotide
guggcuccacaaguaggua

SEQ ID NO: 2495889 - RNA, 19 nt, Artificial Sequence
  Description of Artificial Sequence: Synthetic oligonucleotide
gcagcggcccgguagcacu

SEQ ID NO: 2495890 - RNA, 19 nt, Artificial Sequence
  Description of Artificial Sequence: Synthetic oligonucleotide
cacaaggacugggucuaua

SEQ ID NO: 2495891 - RNA, 19 nt, Artificial Sequence
  Description of Artificial Sequence: Synthetic oligonucleotide
caccccacgucgagcccca

SEQ ID NO: 2495892 - RNA, 19 nt, Artificial Sequence
  Description of Artificial Sequence: Synthetic oligonucleotide
gcgccuugcagcggcccgg

SEQ ID NO: 2495893 - RNA, 19 nt, Artificial Sequence
  Description of Artificial Sequence: Synthetic oligonucleotide
cagaacgcccaaacugguu

SEQ ID NO: 2495894 - RNA, 19 nt, Artificial Sequence
  Description of Artificial Sequence: Synthetic oligonucleotide
ccccacgucgagccccagg

SEQ ID NO: 2495895 - RNA, 19 nt, Artificial Sequence
  Description of Artificial Sequence: Synthetic oligonucleotide
ggauugggugugucucugu

SEQ ID NO: 2495896 - RNA, 19 nt, Artificial Sequence
  Description of Artificial Sequence: Synthetic oligonucleotide
ccccaucacgcaggcaaag

SEQ ID NO: 2495897 - RNA, 19 nt, Artificial Sequence
  Description of Artificial Sequence: Synthetic oligonucleotide
cacgaucuggcuggucaua

SEQ ID NO: 2495898 - RNA, 19 nt, Artificial Sequence
  Description of Artificial Sequence: Synthetic oligonucleotide
cccggguuucagagcuccc

SEQ ID NO: 2495899 - RNA, 19 nt, Artificial Sequence
  Description of Artificial Sequence: Synthetic oligonucleotide
cgcacuaauuccaucgcau

SEQ ID NO: 2495900 - RNA, 19 nt, Artificial Sequence
  Description of Artificial Sequence: Synthetic oligonucleotide
cgcaugguccugcgucagg

SEQ ID NO: 2495901 - RNA, 19 nt, Artificial Sequence
  Description of Artificial Sequence: Synthetic oligonucleotide
cacucagguccccggaguu

SEQ ID NO: 2495902 - RNA, 19 nt, Artificial Sequence
  Description of Artificial Sequence: Synthetic oligonucleotide
cgaucuggcuggucauauc

SEQ ID NO: 2495903 - RNA, 19 nt, Artificial Sequence
  Description of Artificial Sequence: Synthetic oligonucleotide
guccugcgucaggauccgc

SEQ ID NO: 2495904 - RNA, 19 nt, Artificial Sequence
  Description of Artificial Sequence: Synthetic oligonucleotide
cggaggucucuggaggcac

SEQ ID NO: 2495905 - RNA, 19 nt, Artificial Sequence
  Description of Artificial Sequence: Synthetic oligonucleotide
ccggaguuacaccccacgu

SEQ ID NO: 2495906 - RNA, 19 nt, Artificial Sequence
  Description of Artificial Sequence: Synthetic oligonucleotide
gcaccugagcagggcuccc

SEQ ID NO: 2495907 - RNA, 19 nt, Artificial Sequence
  Description of Artificial Sequence: Synthetic oligonucleotide
ccccggaguuacaccccac

SEQ ID NO: 2495908 - RNA, 19 nt, Artificial Sequence
  Description of Artificial Sequence: Synthetic oligonucleotide
cgggaaagggacauucuuu

SEQ ID NO: 2495909 - RNA, 19 nt, Artificial Sequence
  Description of Artificial Sequence: Synthetic oligonucleotide
cggccucuucucgcgaccc

SEQ ID NO: 2495910 - RNA, 19 nt, Artificial Sequence
  Description of Artificial Sequence: Synthetic oligonucleotide
cgagaauaaugagggaaau

SEQ ID NO: 2495911 - RNA, 19 nt, Artificial Sequence
  Description of Artificial Sequence: Synthetic oligonucleotide
ccaaagcagcgcacuaauu

SEQ ID NO: 2495912 - RNA, 19 nt, Artificial Sequence
  Description of Artificial Sequence: Synthetic oligonucleotide
cgucgagccccaggaucgg

SEQ ID NO: 2495913 - RNA, 19 nt, Artificial Sequence
  Description of Artificial Sequence: Synthetic oligonucleotide
ggggcagccccggguuuca

SEQ ID NO: 2495914 - RNA, 19 nt, Artificial Sequence
  Description of Artificial Sequence: Synthetic oligonucleotide
cgacccucgggagggaaga

SEQ ID NO: 2495915 - RNA, 19 nt, Artificial Sequence
  Description of Artificial Sequence: Synthetic oligonucleotide
gggcagccccggguuucag

SEQ ID NO: 2495916 - RNA, 19 nt, Artificial Sequence
  Description of Artificial Sequence: Synthetic oligonucleotide
cagcggcccgguagcacuu

SEQ ID NO: 2495917 - RNA, 19 nt, Artificial Sequence
  Description of Artificial Sequence: Synthetic oligonucleotide
ccaucgcaugguccugcgu

SEQ ID NO: 2495918 - RNA, 19 nt, Artificial Sequence
  Description of Artificial Sequence: Synthetic oligonucleotide
cggcccgguagcacuucca

SEQ ID NO: 2495919 - RNA, 19 nt, Artificial Sequence
  Description of Artificial Sequence: Synthetic oligonucleotide
ggcuucggucccagcuggu

SEQ ID NO: 2495920 - RNA, 19 nt, Artificial Sequence
  Description of Artificial Sequence: Synthetic oligonucleotide
gccccggguuucagagcuc

SEQ ID NO: 2495921 - RNA, 19 nt, Artificial Sequence
  Description of Artificial Sequence: Synthetic oligonucleotide
gcaucgggaaagggacauu

SEQ ID NO: 2495922 - RNA, 19 nt, Artificial Sequence
  Description of Artificial Sequence: Synthetic oligonucleotide
ccgcacgaucuggcugguc

SEQ ID NO: 2495923 - RNA, 19 nt, Artificial Sequence
  Description of Artificial Sequence: Synthetic oligonucleotide
gcgucaggauccgcacgau

SEQ ID NO: 2495924 - RNA, 19 nt, Artificial Sequence
  Description of Artificial Sequence: Synthetic oligonucleotide
gccuugcagcggcccggua

SEQ ID NO: 2495925 - RNA, 19 nt, Artificial Sequence
  Description of Artificial Sequence: Synthetic oligonucleotide
cgcgacccucgggagggaa

SEQ ID NO: 2495926 - RNA, 19 nt, Artificial Sequence
  Description of Artificial Sequence: Synthetic oligonucleotide
ccacaaggacugggucuau

SEQ ID NO: 2495927 - RNA, 19 nt, Artificial Sequence
  Description of Artificial Sequence: Synthetic oligonucleotide
auaauuuucaaacacaaac

SEQ ID NO: 2495928 - RNA, 19 nt, Artificial Sequence
  Description of Artificial Sequence: Synthetic oligonucleotide
uuuacuuacauuuaguuca

SEQ ID NO: 2495929 - RNA, 19 nt, Artificial Sequence
  Description of Artificial Sequence: Synthetic oligonucleotide
auaaauacaaaauagugug

SEQ ID NO: 2495930 - RNA, 19 nt, Artificial Sequence
  Description of Artificial Sequence: Synthetic oligonucleotide
ugucauagcauuccgaugg

SEQ ID NO: 2495931 - RNA, 19 nt, Artificial Sequence
  Description of Artificial Sequence: Synthetic oligonucleotide
uauggaaccauaaacagcu

SEQ ID NO: 2495932 - RNA, 19 nt, Artificial Sequence
  Description of Artificial Sequence: Synthetic oligonucleotide
acauuauggaaccauaaac

SEQ ID NO: 2495933 - RNA, 19 nt, Artificial Sequence
  Description of Artificial Sequence: Synthetic oligonucleotide
aauagugugcaucucgagg

SEQ ID NO: 2495934 - RNA, 19 nt, Artificial Sequence
  Description of Artificial Sequence: Synthetic oligonucleotide
agaaauuacauuauggaac

SEQ ID NO: 2495935 - RNA, 19 nt, Artificial Sequence
  Description of Artificial Sequence: Synthetic oligonucleotide
gaaauuacauuauggaacc

SEQ ID NO: 2495936 - RNA, 19 nt, Artificial Sequence
  Description of Artificial Sequence: Synthetic oligonucleotide
ucuugaaugcgcaagacca

SEQ ID NO: 2495937 - RNA, 19 nt, Artificial Sequence
  Description of Artificial Sequence: Synthetic oligonucleotide
acuggaaaagaacugcccc

SEQ ID NO: 2495938 - RNA, 19 nt, Artificial Sequence
  Description of Artificial Sequence: Synthetic oligonucleotide
uccauuacaucauagugag

SEQ ID NO: 2495939 - RNA, 19 nt, Artificial Sequence
  Description of Artificial Sequence: Synthetic oligonucleotide
aaauuuaauaucuccuccu

SEQ ID NO: 2495940 - RNA, 19 nt, Artificial Sequence
  Description of Artificial Sequence: Synthetic oligonucleotide
uauccauuacaucauagug

SEQ ID NO: 2495941 - RNA, 19 nt, Artificial Sequence
  Description of Artificial Sequence: Synthetic oligonucleotide
aguaguauuucucauccuc

SEQ ID NO: 2495942 - RNA, 19 nt, Artificial Sequence
  Description of Artificial Sequence: Synthetic oligonucleotide
aacaguauaacucgcuucu

SEQ ID NO: 2495943 - RNA, 19 nt, Artificial Sequence
  Description of Artificial Sequence: Synthetic oligonucleotide
gacugaacaguauaacucg

SEQ ID NO: 2495944 - RNA, 19 nt, Artificial Sequence
  Description of Artificial Sequence: Synthetic oligonucleotide
aaugauggaaacugcuguc

SEQ ID NO: 2495945 - RNA, 19 nt, Artificial Sequence
  Description of Artificial Sequence: Synthetic oligonucleotide
uggguauuuauccagguca

SEQ ID NO: 2495946 - RNA, 19 nt, Artificial Sequence
  Description of Artificial Sequence: Synthetic oligonucleotide
ucuucaaagaauauuggaa

SEQ ID NO: 2495947 - RNA, 19 nt, Artificial Sequence
  Description of Artificial Sequence: Synthetic oligonucleotide
aaaagaacugccccucuuc

SEQ ID NO: 2495948 - RNA, 19 nt, Artificial Sequence
  Description of Artificial Sequence: Synthetic oligonucleotide
aaaacacuggaaaagaacu

SEQ ID NO: 2495949 - RNA, 19 nt, Artificial Sequence
  Description of Artificial Sequence: Synthetic oligonucleotide
agcacuucagauuuagaac

SEQ ID NO: 2495950 - RNA, 19 nt, Artificial Sequence
  Description of Artificial Sequence: Synthetic oligonucleotide
uuggaaauuuaauaucucc

SEQ ID NO: 2495951 - RNA, 19 nt, Artificial Sequence
  Description of Artificial Sequence: Synthetic oligonucleotide
auagcauuccgauggaagg

SEQ ID NO: 2495952 - RNA, 19 nt, Artificial Sequence
  Description of Artificial Sequence: Synthetic oligonucleotide
agaguugcaauccagguga

SEQ ID NO: 2495953 - RNA, 19 nt, Artificial Sequence
  Description of Artificial Sequence: Synthetic oligonucleotide
uguagugugaaucuuuaaa

SEQ ID NO: 2495954 - RNA, 19 nt, Artificial Sequence
  Description of Artificial Sequence: Synthetic oligonucleotide
aaugcgcaagaccauuugg

SEQ ID NO: 2495955 - RNA, 19 nt, Artificial Sequence
  Description of Artificial Sequence: Synthetic oligonucleotide
aacacucauaccuccucgc

SEQ ID NO: 2495956 - RNA, 19 nt, Artificial Sequence
  Description of Artificial Sequence: Synthetic oligonucleotide
caaaauagugugcaucucg

SEQ ID NO: 2495957 - RNA, 19 nt, Artificial Sequence
  Description of Artificial Sequence: Synthetic oligonucleotide
uuugcuguaggcuuugucu

SEQ ID NO: 2495958 - RNA, 19 nt, Artificial Sequence
  Description of Artificial Sequence: Synthetic oligonucleotide
uaauaucuccuccuaauga

SEQ ID NO: 2495959 - RNA, 19 nt, Artificial Sequence
  Description of Artificial Sequence: Synthetic oligonucleotide
aauaucuccuccuaaugau

SEQ ID NO: 2495960 - RNA, 19 nt, Artificial Sequence
  Description of Artificial Sequence: Synthetic oligonucleotide
uuccaaaagacauucacuc

SEQ ID NO: 2495961 - RNA, 19 nt, Artificial Sequence
  Description of Artificial Sequence: Synthetic oligonucleotide
uaaauacaaaauagugugc

SEQ ID NO: 2495962 - RNA, 19 nt, Artificial Sequence
  Description of Artificial Sequence: Synthetic oligonucleotide
ucaauauccagcacuucag

SEQ ID NO: 2495963 - RNA, 19 nt, Artificial Sequence
  Description of Artificial Sequence: Synthetic oligonucleotide
aaaagacauucacuccuac

SEQ ID NO: 2495964 - RNA, 19 nt, Artificial Sequence
  Description of Artificial Sequence: Synthetic oligonucleotide
uuuuacuuacauuuaguuc

SEQ ID NO: 2495965 - RNA, 19 nt, Artificial Sequence
  Description of Artificial Sequence: Synthetic oligonucleotide
agacauucacuccuacucc

SEQ ID NO: 2495966 - RNA, 19 nt, Artificial Sequence
  Description of Artificial Sequence: Synthetic oligonucleotide
uuuguuaccauagguaucu

SEQ ID NO: 2495967 - RNA, 19 nt, Artificial Sequence
  Description of Artificial Sequence: Synthetic oligonucleotide
uuuaauaucuccuccuaau

SEQ ID NO: 2495968 - RNA, 19 nt, Artificial Sequence
  Description of Artificial Sequence: Synthetic oligonucleotide
cauuauggaaccauaaaca

SEQ ID NO: 2495969 - RNA, 19 nt, Artificial Sequence
  Description of Artificial Sequence: Synthetic oligonucleotide
ucuuuguuaccauagguau

SEQ ID NO: 2495970 - RNA, 19 nt, Artificial Sequence
  Description of Artificial Sequence: Synthetic oligonucleotide
ugugaaucuuuaaauauuu

SEQ ID NO: 2495971 - RNA, 19 nt, Artificial Sequence
  Description of Artificial Sequence: Synthetic oligonucleotide
guauuuauccaggucaggg

SEQ ID NO: 2495972 - RNA, 19 nt, Artificial Sequence
  Description of Artificial Sequence: Synthetic oligonucleotide
uuuccugucacuuguauua

SEQ ID NO: 2495973 - RNA, 19 nt, Artificial Sequence
  Description of Artificial Sequence: Synthetic oligonucleotide
auagugugcaucucgagga

SEQ ID NO: 2495974 - RNA, 19 nt, Artificial Sequence
  Description of Artificial Sequence: Synthetic oligonucleotide
uccagaguugcaauccagg

SEQ ID NO: 2495975 - RNA, 19 nt, Artificial Sequence
  Description of Artificial Sequence: Synthetic oligonucleotide
uuugucauagcauuccgau

SEQ ID NO: 2495976 - RNA, 19 nt, Artificial Sequence
  Description of Artificial Sequence: Synthetic oligonucleotide
gaaccugauaaauacaaaa

SEQ ID NO: 2495977 - RNA, 19 nt, Artificial Sequence
  Description of Artificial Sequence: Synthetic oligonucleotide
uauuuauccaggucagggc

SEQ ID NO: 2495978 - RNA, 19 nt, Artificial Sequence
  Description of Artificial Sequence: Synthetic oligonucleotide
uuauccauuacaucauagu

SEQ ID NO: 2495979 - RNA, 19 nt, Artificial Sequence
  Description of Artificial Sequence: Synthetic oligonucleotide
aacagcuucaagggaacac

SEQ ID NO: 2495980 - RNA, 19 nt, Artificial Sequence
  Description of Artificial Sequence: Synthetic oligonucleotide
uuugucuugaaugcgcaag

SEQ ID NO: 2495981 - RNA, 19 nt, Artificial Sequence
  Description of Artificial Sequence: Synthetic oligonucleotide
aaauagugugcaucucgag

SEQ ID NO: 2495982 - RNA, 19 nt, Artificial Sequence
  Description of Artificial Sequence: Synthetic oligonucleotide
gauaaauacaaaauagugu

SEQ ID NO: 2495983 - RNA, 19 nt, Artificial Sequence
  Description of Artificial Sequence: Synthetic oligonucleotide
ucuguuuugucauagcauu

SEQ ID NO: 2495984 - RNA, 19 nt, Artificial Sequence
  Description of Artificial Sequence: Synthetic oligonucleotide
cagauuuagaaccugauaa

SEQ ID NO: 2495985 - RNA, 19 nt, Artificial Sequence
  Description of Artificial Sequence: Synthetic oligonucleotide
aauuuaauaucuccuccua

SEQ ID NO: 2495986 - RNA, 19 nt, Artificial Sequence
  Description of Artificial Sequence: Synthetic oligonucleotide
cauagcauuccgauggaag

SEQ ID NO: 2495987 - RNA, 19 nt, Artificial Sequence
  Description of Artificial Sequence: Synthetic oligonucleotide
ugcgcaagaccauuuggcg

SEQ ID NO: 2495988 - RNA, 19 nt, Artificial Sequence
  Description of Artificial Sequence: Synthetic oligonucleotide
uccaagagaccguaaguag

SEQ ID NO: 2495989 - RNA, 19 nt, Artificial Sequence
  Description of Artificial Sequence: Synthetic oligonucleotide
aauuacauuauggaaccau

SEQ ID NO: 2495990 - RNA, 19 nt, Artificial Sequence
  Description of Artificial Sequence: Synthetic oligonucleotide
uauaacucgcuucuuuccu

SEQ ID NO: 2495991 - RNA, 19 nt, Artificial Sequence
  Description of Artificial Sequence: Synthetic oligonucleotide
uuagaaccugauaaauaca

SEQ ID NO: 2495992 - RNA, 19 nt, Artificial Sequence
  Description of Artificial Sequence: Synthetic oligonucleotide
uauccagcacuucagauuu

SEQ ID NO: 2495993 - RNA, 19 nt, Artificial Sequence
  Description of Artificial Sequence: Synthetic oligonucleotide
uguuuugucauagcauucc

SEQ ID NO: 2495994 - RNA, 19 nt, Artificial Sequence
  Description of Artificial Sequence: Synthetic oligonucleotide
cuaaugauggaaacugcug

SEQ ID NO: 2495995 - RNA, 19 nt, Artificial Sequence
  Description of Artificial Sequence: Synthetic oligonucleotide
uccuacuccaaacucuuca

SEQ ID NO: 2495996 - RNA, 19 nt, Artificial Sequence
  Description of Artificial Sequence: Synthetic oligonucleotide
agaguggguauuuauccag

SEQ ID NO: 2495997 - RNA, 19 nt, Artificial Sequence
  Description of Artificial Sequence: Synthetic oligonucleotide
agggcugucaauauccagc

SEQ ID NO: 2495998 - RNA, 19 nt, Artificial Sequence
  Description of Artificial Sequence: Synthetic oligonucleotide
agggaacacucauaccucc

SEQ ID NO: 2495999 - RNA, 19 nt, Artificial Sequence
  Description of Artificial Sequence: Synthetic oligonucleotide
ucauccucuugaaaugaag

SEQ ID NO: 2496000 - RNA, 19 nt, Artificial Sequence
  Description of Artificial Sequence: Synthetic oligonucleotide
uucaaagaauauuggaaau

SEQ ID NO: 2496001 - RNA, 19 nt, Artificial Sequence
  Description of Artificial Sequence: Synthetic oligonucleotide
cucgccuuagggaagagug

SEQ ID NO: 2496002 - RNA, 19 nt, Artificial Sequence
  Description of Artificial Sequence: Synthetic oligonucleotide
uuuugucauagcauuccga

SEQ ID NO: 2496003 - RNA, 19 nt, Artificial Sequence
  Description of Artificial Sequence: Synthetic oligonucleotide
aggacugaacaguauaacu

SEQ ID NO: 2496004 - RNA, 19 nt, Artificial Sequence
  Description of Artificial Sequence: Synthetic oligonucleotide
aggugaacuaauucgaaaa

SEQ ID NO: 2496005 - RNA, 19 nt, Artificial Sequence
  Description of Artificial Sequence: Synthetic oligonucleotide
aaaauagugugcaucucga

SEQ ID NO: 2496006 - RNA, 19 nt, Artificial Sequence
  Description of Artificial Sequence: Synthetic oligonucleotide
gauaucugcaacauccuuc

SEQ ID NO: 2496007 - RNA, 19 nt, Artificial Sequence
  Description of Artificial Sequence: Synthetic oligonucleotide
acacucauaccuccucgcc

SEQ ID NO: 2496008 - RNA, 19 nt, Artificial Sequence
  Description of Artificial Sequence: Synthetic oligonucleotide
uucacuccuacuccaaacu

SEQ ID NO: 2496009 - RNA, 19 nt, Artificial Sequence
  Description of Artificial Sequence: Synthetic oligonucleotide
uuuguagugugaaucuuua

SEQ ID NO: 2496010 - RNA, 19 nt, Artificial Sequence
  Description of Artificial Sequence: Synthetic oligonucleotide
uuuuguagugugaaucuuu

SEQ ID NO: 2496011 - RNA, 19 nt, Artificial Sequence
  Description of Artificial Sequence: Synthetic oligonucleotide
agcucuguccaagauuugc

SEQ ID NO: 2496012 - RNA, 19 nt, Artificial Sequence
  Description of Artificial Sequence: Synthetic oligonucleotide
aucauagugaguccagagu

SEQ ID NO: 2496013 - RNA, 19 nt, Artificial Sequence
  Description of Artificial Sequence: Synthetic oligonucleotide
gaaggugcuuccaaaagac

SEQ ID NO: 2496014 - RNA, 19 nt, Artificial Sequence
  Description of Artificial Sequence: Synthetic oligonucleotide
aaccugauaaauacaaaau

SEQ ID NO: 2496015 - RNA, 19 nt, Artificial Sequence
  Description of Artificial Sequence: Synthetic oligonucleotide
guaaguaguauuucucauc

SEQ ID NO: 2496016 - RNA, 19 nt, Artificial Sequence
  Description of Artificial Sequence: Synthetic oligonucleotide
auuuggcgugcauagaagu

SEQ ID NO: 2496017 - RNA, 19 nt, Artificial Sequence
  Description of Artificial Sequence: Synthetic oligonucleotide
uugucuugaaugcgcaaga

SEQ ID NO: 2496018 - RNA, 19 nt, Artificial Sequence
  Description of Artificial Sequence: Synthetic oligonucleotide
uaaacagcuucaagggaac

SEQ ID NO: 2496019 - RNA, 19 nt, Artificial Sequence
  Description of Artificial Sequence: Synthetic oligonucleotide
cuccuaaugauggaaacug

SEQ ID NO: 2496020 - RNA, 19 nt, Artificial Sequence
  Description of Artificial Sequence: Synthetic oligonucleotide
gaacaguauaacucgcuuc

SEQ ID NO: 2496021 - RNA, 19 nt, Artificial Sequence
  Description of Artificial Sequence: Synthetic oligonucleotide
ucuguccaagauuugcaca

SEQ ID NO: 2496022 - RNA, 19 nt, Artificial Sequence
  Description of Artificial Sequence: Synthetic oligonucleotide
ugaacaguauaacucgcuu

SEQ ID NO: 2496023 - RNA, 19 nt, Artificial Sequence
  Description of Artificial Sequence: Synthetic oligonucleotide
uggaaccauaaacagcuuc

SEQ ID NO: 2496024 - RNA, 19 nt, Artificial Sequence
  Description of Artificial Sequence: Synthetic oligonucleotide
uuuauccaggucagggcug

SEQ ID NO: 2496025 - RNA, 19 nt, Artificial Sequence
  Description of Artificial Sequence: Synthetic oligonucleotide
cauagaagucccuguauuc

SEQ ID NO: 2496026 - RNA, 19 nt, Artificial Sequence
  Description of Artificial Sequence: Synthetic oligonucleotide
guauuucucauccucuuga

SEQ ID NO: 2496027 - RNA, 19 nt, Artificial Sequence
  Description of Artificial Sequence: Synthetic oligonucleotide
gaaaugaagaauucuuuau

SEQ ID NO: 2496028 - RNA, 19 nt, Artificial Sequence
  Description of Artificial Sequence: Synthetic oligonucleotide
auuuaauaucuccuccuaa

SEQ ID NO: 2496029 - RNA, 19 nt, Artificial Sequence
  Description of Artificial Sequence: Synthetic oligonucleotide
ucuccaagagaccguaagu

SEQ ID NO: 2496030 - RNA, 19 nt, Artificial Sequence
  Description of Artificial Sequence: Synthetic oligonucleotide
augcgcaagaccauuuggc

SEQ ID NO: 2496031 - RNA, 19 nt, Artificial Sequence
  Description of Artificial Sequence: Synthetic oligonucleotide
acugaacaguauaacucgc

SEQ ID NO: 2496032 - RNA, 19 nt, Artificial Sequence
  Description of Artificial Sequence: Synthetic oligonucleotide
uuggcgugcauagaagucc

SEQ ID NO: 2496033 - RNA, 19 nt, Artificial Sequence
  Description of Artificial Sequence: Synthetic oligonucleotide
uucagauuuagaaccugau

SEQ ID NO: 2496034 - RNA, 19 nt, Artificial Sequence
  Description of Artificial Sequence: Synthetic oligonucleotide
aagggaacacucauaccuc

SEQ ID NO: 2496035 - RNA, 19 nt, Artificial Sequence
  Description of Artificial Sequence: Synthetic oligonucleotide
cagaaauuacauuauggaa

SEQ ID NO: 2496036 - RNA, 19 nt, Artificial Sequence
  Description of Artificial Sequence: Synthetic oligonucleotide
guuauccauuacaucauag

SEQ ID NO: 2496037 - RNA, 19 nt, Artificial Sequence
  Description of Artificial Sequence: Synthetic oligonucleotide
aacauccuuccuugggucu

SEQ ID NO: 2496038 - RNA, 19 nt, Artificial Sequence
  Description of Artificial Sequence: Synthetic oligonucleotide
auccauuacaucauaguga

SEQ ID NO: 2496039 - RNA, 19 nt, Artificial Sequence
  Description of Artificial Sequence: Synthetic oligonucleotide
uguuaccauagguaucugu

SEQ ID NO: 2496040 - RNA, 19 nt, Artificial Sequence
  Description of Artificial Sequence: Synthetic oligonucleotide
cacuggaaaagaacugccc

SEQ ID NO: 2496041 - RNA, 19 nt, Artificial Sequence
  Description of Artificial Sequence: Synthetic oligonucleotide
caagggaacacucauaccu

SEQ ID NO: 2496042 - RNA, 19 nt, Artificial Sequence
  Description of Artificial Sequence: Synthetic oligonucleotide
agaauauuggaaauuuaau

SEQ ID NO: 2496043 - RNA, 19 nt, Artificial Sequence
  Description of Artificial Sequence: Synthetic oligonucleotide
auaacucgcuucuuuccug

SEQ ID NO: 2496044 - RNA, 19 nt, Artificial Sequence
  Description of Artificial Sequence: Synthetic oligonucleotide
uuuggcgugcauagaaguc

SEQ ID NO: 2496045 - RNA, 19 nt, Artificial Sequence
  Description of Artificial Sequence: Synthetic oligonucleotide
gucuugaaugcgcaagacc

SEQ ID NO: 2496046 - RNA, 19 nt, Artificial Sequence
  Description of Artificial Sequence: Synthetic oligonucleotide
uaccauagguaucuguuuu

SEQ ID NO: 2496047 - RNA, 19 nt, Artificial Sequence
  Description of Artificial Sequence: Synthetic oligonucleotide
gaacugccccucuucaaag

SEQ ID NO: 2496048 - RNA, 19 nt, Artificial Sequence
  Description of Artificial Sequence: Synthetic oligonucleotide
ucgccuuagggaagagugg

SEQ ID NO: 2496049 - RNA, 19 nt, Artificial Sequence
  Description of Artificial Sequence: Synthetic oligonucleotide
gaaugcgcaagaccauuug

SEQ ID NO: 2496050 - RNA, 19 nt, Artificial Sequence
  Description of Artificial Sequence: Synthetic oligonucleotide
cauuuggcgugcauagaag

SEQ ID NO: 2496051 - RNA, 19 nt, Artificial Sequence
  Description of Artificial Sequence: Synthetic oligonucleotide
ucgaggacugaacaguaua

SEQ ID NO: 2496052 - RNA, 19 nt, Artificial Sequence
  Description of Artificial Sequence: Synthetic oligonucleotide
cuuuguuaccauagguauc

SEQ ID NO: 2496053 - RNA, 19 nt, Artificial Sequence
  Description of Artificial Sequence: Synthetic oligonucleotide
augaagaauucuuuauguu

SEQ ID NO: 2496054 - RNA, 19 nt, Artificial Sequence
  Description of Artificial Sequence: Synthetic oligonucleotide
ugcuacagggucuuuguua

SEQ ID NO: 2496055 - RNA, 19 nt, Artificial Sequence
  Description of Artificial Sequence: Synthetic oligonucleotide
accguaaguaguauuucuc

SEQ ID NO: 2496056 - RNA, 19 nt, Artificial Sequence
  Description of Artificial Sequence: Synthetic oligonucleotide
uuacuuacauuuaguucau

SEQ ID NO: 2496057 - RNA, 19 nt, Artificial Sequence
  Description of Artificial Sequence: Synthetic oligonucleotide
uccagcacuucagauuuag

SEQ ID NO: 2496058 - RNA, 19 nt, Artificial Sequence
  Description of Artificial Sequence: Synthetic oligonucleotide
ucaagggaacacucauacc

SEQ ID NO: 2496059 - RNA, 19 nt, Artificial Sequence
  Description of Artificial Sequence: Synthetic oligonucleotide
gaaacugcugucugauauc

SEQ ID NO: 2496060 - RNA, 19 nt, Artificial Sequence
  Description of Artificial Sequence: Synthetic oligonucleotide
ugcauagaagucccuguau

SEQ ID NO: 2496061 - RNA, 19 nt, Artificial Sequence
  Description of Artificial Sequence: Synthetic oligonucleotide
accauagguaucuguuuug

SEQ ID NO: 2496062 - RNA, 19 nt, Artificial Sequence
  Description of Artificial Sequence: Synthetic oligonucleotide
agaacugccccucuucaaa

SEQ ID NO: 2496063 - RNA, 19 nt, Artificial Sequence
  Description of Artificial Sequence: Synthetic oligonucleotide
gaguggguauuuauccagg

SEQ ID NO: 2496064 - RNA, 19 nt, Artificial Sequence
  Description of Artificial Sequence: Synthetic oligonucleotide
uauuucucauccucuugaa

SEQ ID NO: 2496065 - RNA, 19 nt, Artificial Sequence
  Description of Artificial Sequence: Synthetic oligonucleotide
aaagaauauuggaaauuua

SEQ ID NO: 2496066 - RNA, 19 nt, Artificial Sequence
  Description of Artificial Sequence: Synthetic oligonucleotide
caucucgaggacugaacag

SEQ ID NO: 2496067 - RNA, 19 nt, Artificial Sequence
  Description of Artificial Sequence: Synthetic oligonucleotide
guagugugaaucuuuaaau

SEQ ID NO: 2496068 - RNA, 19 nt, Artificial Sequence
  Description of Artificial Sequence: Synthetic oligonucleotide
acaaaauagugugcaucuc

SEQ ID NO: 2496069 - RNA, 19 nt, Artificial Sequence
  Description of Artificial Sequence: Synthetic oligonucleotide
aaguuauccauuacaucau

SEQ ID NO: 2496070 - RNA, 19 nt, Artificial Sequence
  Description of Artificial Sequence: Synthetic oligonucleotide
ugcaucucgaggacugaac

SEQ ID NO: 2496071 - RNA, 19 nt, Artificial Sequence
  Description of Artificial Sequence: Synthetic oligonucleotide
ugauaucugcaacauccuu

SEQ ID NO: 2496072 - RNA, 19 nt, Artificial Sequence
  Description of Artificial Sequence: Synthetic oligonucleotide
cagcacuucagauuuagaa

SEQ ID NO: 2496073 - RNA, 19 nt, Artificial Sequence
  Description of Artificial Sequence: Synthetic oligonucleotide
ggucuucuccaagagaccg

SEQ ID NO: 2496074 - RNA, 19 nt, Artificial Sequence
  Description of Artificial Sequence: Synthetic oligonucleotide
uggcgugcauagaaguccc

SEQ ID NO: 2496075 - RNA, 19 nt, Artificial Sequence
  Description of Artificial Sequence: Synthetic oligonucleotide
uuaccauagguaucuguuu

SEQ ID NO: 2496076 - RNA, 19 nt, Artificial Sequence
  Description of Artificial Sequence: Synthetic oligonucleotide
cuucagauuuagaaccuga

SEQ ID NO: 2496077 - RNA, 19 nt, Artificial Sequence
  Description of Artificial Sequence: Synthetic oligonucleotide
uccucugguaguucagcca

SEQ ID NO: 2496078 - RNA, 19 nt, Artificial Sequence
  Description of Artificial Sequence: Synthetic oligonucleotide
uaacucgcuucuuuccugu

SEQ ID NO: 2496079 - RNA, 19 nt, Artificial Sequence
  Description of Artificial Sequence: Synthetic oligonucleotide
uauuuauaucuuguauaau

SEQ ID NO: 2496080 - RNA, 19 nt, Artificial Sequence
  Description of Artificial Sequence: Synthetic oligonucleotide
agggucuuuguuaccauag

SEQ ID NO: 2496081 - RNA, 19 nt, Artificial Sequence
  Description of Artificial Sequence: Synthetic oligonucleotide
agaccguaaguaguauuuc

SEQ ID NO: 2496082 - RNA, 19 nt, Artificial Sequence
  Description of Artificial Sequence: Synthetic oligonucleotide
uggaugcugcuacaggguc

SEQ ID NO: 2496083 - RNA, 19 nt, Artificial Sequence
  Description of Artificial Sequence: Synthetic oligonucleotide
aacugccccucuucaaaga

SEQ ID NO: 2496084 - RNA, 19 nt, Artificial Sequence
  Description of Artificial Sequence: Synthetic oligonucleotide
aucucgaggacugaacagu

SEQ ID NO: 2496085 - RNA, 19 nt, Artificial Sequence
  Description of Artificial Sequence: Synthetic oligonucleotide
aagaacugccccucuucaa

SEQ ID NO: 2496086 - RNA, 19 nt, Artificial Sequence
  Description of Artificial Sequence: Synthetic oligonucleotide
gcuacagggucuuuguuac

SEQ ID NO: 2496087 - RNA, 19 nt, Artificial Sequence
  Description of Artificial Sequence: Synthetic oligonucleotide
agauuugcacagcucugga

SEQ ID NO: 2496088 - RNA, 19 nt, Artificial Sequence
  Description of Artificial Sequence: Synthetic oligonucleotide
ugaaugcgcaagaccauuu

SEQ ID NO: 2496089 - RNA, 19 nt, Artificial Sequence
  Description of Artificial Sequence: Synthetic oligonucleotide
cuguuuugucauagcauuc

SEQ ID NO: 2496090 - RNA, 19 nt, Artificial Sequence
  Description of Artificial Sequence: Synthetic oligonucleotide
guauuccucugguaguuca

SEQ ID NO: 2496091 - RNA, 19 nt, Artificial Sequence
  Description of Artificial Sequence: Synthetic oligonucleotide
ggacugaacaguauaacuc

SEQ ID NO: 2496092 - RNA, 19 nt, Artificial Sequence
  Description of Artificial Sequence: Synthetic oligonucleotide
cauaccuccucgccuuagg

SEQ ID NO: 2496093 - RNA, 19 nt, Artificial Sequence
  Description of Artificial Sequence: Synthetic oligonucleotide
ucucgaggacugaacagua

SEQ ID NO: 2496094 - RNA, 19 nt, Artificial Sequence
  Description of Artificial Sequence: Synthetic oligonucleotide
cauagguaucuguuuuguc

SEQ ID NO: 2496095 - RNA, 19 nt, Artificial Sequence
  Description of Artificial Sequence: Synthetic oligonucleotide
uugcaauccaggugaacua

SEQ ID NO: 2496096 - RNA, 19 nt, Artificial Sequence
  Description of Artificial Sequence: Synthetic oligonucleotide
guugcaauccaggugaacu

SEQ ID NO: 2496097 - RNA, 19 nt, Artificial Sequence
  Description of Artificial Sequence: Synthetic oligonucleotide
uguaggcuuugucuugaau

SEQ ID NO: 2496098 - RNA, 19 nt, Artificial Sequence
  Description of Artificial Sequence: Synthetic oligonucleotide
ccucuucaaagaauauugg

SEQ ID NO: 2496099 - RNA, 19 nt, Artificial Sequence
  Description of Artificial Sequence: Synthetic oligonucleotide
aagucccuguauuccucug

SEQ ID NO: 2496100 - RNA, 19 nt, Artificial Sequence
  Description of Artificial Sequence: Synthetic oligonucleotide
acucauaccuccucgccuu

SEQ ID NO: 2496101 - RNA, 19 nt, Artificial Sequence
  Description of Artificial Sequence: Synthetic oligonucleotide
ugcugucugauaucugcaa

SEQ ID NO: 2496102 - RNA, 19 nt, Artificial Sequence
  Description of Artificial Sequence: Synthetic oligonucleotide
agugaguccagaguugcaa

SEQ ID NO: 2496103 - RNA, 19 nt, Artificial Sequence
  Description of Artificial Sequence: Synthetic oligonucleotide
uaccuccucgccuuaggga

SEQ ID NO: 2496104 - RNA, 19 nt, Artificial Sequence
  Description of Artificial Sequence: Synthetic oligonucleotide
ggaaggugcuuccaaaaga

SEQ ID NO: 2496105 - RNA, 19 nt, Artificial Sequence
  Description of Artificial Sequence: Synthetic oligonucleotide
cccuguauuccucugguag

SEQ ID NO: 2496106 - RNA, 19 nt, Artificial Sequence
  Description of Artificial Sequence: Synthetic oligonucleotide
ugucuugaaugcgcaagac

SEQ ID NO: 2496107 - RNA, 19 nt, Artificial Sequence
  Description of Artificial Sequence: Synthetic oligonucleotide
aguccagaguugcaaucca

SEQ ID NO: 2496108 - RNA, 19 nt, Artificial Sequence
  Description of Artificial Sequence: Synthetic oligonucleotide
agcauuccgauggaaggug

SEQ ID NO: 2496109 - RNA, 19 nt, Artificial Sequence
  Description of Artificial Sequence: Synthetic oligonucleotide
uuguagugugaaucuuuaa

SEQ ID NO: 2496110 - RNA, 19 nt, Artificial Sequence
  Description of Artificial Sequence: Synthetic oligonucleotide
aagaccauuuggcgugcau

SEQ ID NO: 2496111 - RNA, 19 nt, Artificial Sequence
  Description of Artificial Sequence: Synthetic oligonucleotide
aguugcaauccaggugaac

SEQ ID NO: 2496112 - RNA, 19 nt, Artificial Sequence
  Description of Artificial Sequence: Synthetic oligonucleotide
aucuguuuugucauagcau

SEQ ID NO: 2496113 - RNA, 19 nt, Artificial Sequence
  Description of Artificial Sequence: Synthetic oligonucleotide
gucuuuguuaccauaggua

SEQ ID NO: 2496114 - RNA, 19 nt, Artificial Sequence
  Description of Artificial Sequence: Synthetic oligonucleotide
uuagggaagaguggguauu

SEQ ID NO: 2496115 - RNA, 19 nt, Artificial Sequence
  Description of Artificial Sequence: Synthetic oligonucleotide
caagagaccguaaguagua

SEQ ID NO: 2496116 - RNA, 19 nt, Artificial Sequence
  Description of Artificial Sequence: Synthetic oligonucleotide
agagaccguaaguaguauu

SEQ ID NO: 2496117 - RNA, 19 nt, Artificial Sequence
  Description of Artificial Sequence: Synthetic oligonucleotide
aaacagcuucaagggaaca

SEQ ID NO: 2496118 - RNA, 19 nt, Artificial Sequence
  Description of Artificial Sequence: Synthetic oligonucleotide
ugcugcuacagggucuuug

SEQ ID NO: 2496119 - RNA, 19 nt, Artificial Sequence
  Description of Artificial Sequence: Synthetic oligonucleotide
gaccguaaguaguauuucu

SEQ ID NO: 2496120 - RNA, 19 nt, Artificial Sequence
  Description of Artificial Sequence: Synthetic oligonucleotide
ucuucuccaagagaccgua

SEQ ID NO: 2496121 - RNA, 19 nt, Artificial Sequence
  Description of Artificial Sequence: Synthetic oligonucleotide
aggcuuugucuugaaugcg

SEQ ID NO: 2496122 - RNA, 19 nt, Artificial Sequence
  Description of Artificial Sequence: Synthetic oligonucleotide
uguccaagauuugcacagc

SEQ ID NO: 2496123 - RNA, 19 nt, Artificial Sequence
  Description of Artificial Sequence: Synthetic oligonucleotide
aaggugcuuccaaaagaca

SEQ ID NO: 2496124 - RNA, 19 nt, Artificial Sequence
  Description of Artificial Sequence: Synthetic oligonucleotide
guggguauuuauccagguc

SEQ ID NO: 2496125 - RNA, 19 nt, Artificial Sequence
  Description of Artificial Sequence: Synthetic oligonucleotide
caauauccagcacuucaga

SEQ ID NO: 2496126 - RNA, 19 nt, Artificial Sequence
  Description of Artificial Sequence: Synthetic oligonucleotide
uagugaguccagaguugca

SEQ ID NO: 2496127 - RNA, 19 nt, Artificial Sequence
  Description of Artificial Sequence: Synthetic oligonucleotide
uugaaugcgcaagaccauu

SEQ ID NO: 2496128 - RNA, 19 nt, Artificial Sequence
  Description of Artificial Sequence: Synthetic oligonucleotide
cagcucuggaugcugcuac

SEQ ID NO: 2496129 - RNA, 19 nt, Artificial Sequence
  Description of Artificial Sequence: Synthetic oligonucleotide
cagcuucaagggaacacuc

SEQ ID NO: 2496130 - RNA, 19 nt, Artificial Sequence
  Description of Artificial Sequence: Synthetic oligonucleotide
caaagaauauuggaaauuu

SEQ ID NO: 2496131 - RNA, 19 nt, Artificial Sequence
  Description of Artificial Sequence: Synthetic oligonucleotide
uuccgauggaaggugcuuc

SEQ ID NO: 2496132 - RNA, 19 nt, Artificial Sequence
  Description of Artificial Sequence: Synthetic oligonucleotide
ggaagaguggguauuuauc

SEQ ID NO: 2496133 - RNA, 19 nt, Artificial Sequence
  Description of Artificial Sequence: Synthetic oligonucleotide
cagggcugucaauauccag

SEQ ID NO: 2496134 - RNA, 19 nt, Artificial Sequence
  Description of Artificial Sequence: Synthetic oligonucleotide
gguauuuauccaggucagg

SEQ ID NO: 2496135 - RNA, 19 nt, Artificial Sequence
  Description of Artificial Sequence: Synthetic oligonucleotide
aagagaccguaaguaguau

SEQ ID NO: 2496136 - RNA, 19 nt, Artificial Sequence
  Description of Artificial Sequence: Synthetic oligonucleotide
ggaaacugcugucugauau

SEQ ID NO: 2496137 - RNA, 19 nt, Artificial Sequence
  Description of Artificial Sequence: Synthetic oligonucleotide
caaaagacauucacuccua

SEQ ID NO: 2496138 - RNA, 19 nt, Artificial Sequence
  Description of Artificial Sequence: Synthetic oligonucleotide
ggcuuugucuugaaugcgc

SEQ ID NO: 2496139 - RNA, 19 nt, Artificial Sequence
  Description of Artificial Sequence: Synthetic oligonucleotide
cuacagggucuuuguuacc

SEQ ID NO: 2496140 - RNA, 19 nt, Artificial Sequence
  Description of Artificial Sequence: Synthetic oligonucleotide
guaguauuucucauccucu

SEQ ID NO: 2496141 - RNA, 19 nt, Artificial Sequence
  Description of Artificial Sequence: Synthetic oligonucleotide
ucauagcauuccgauggaa

SEQ ID NO: 2496142 - RNA, 19 nt, Artificial Sequence
  Description of Artificial Sequence: Synthetic oligonucleotide
uaucugcaacauccuuccu

SEQ ID NO: 2496143 - RNA, 19 nt, Artificial Sequence
  Description of Artificial Sequence: Synthetic oligonucleotide
gcaucucgaggacugaaca

SEQ ID NO: 2496144 - RNA, 19 nt, Artificial Sequence
  Description of Artificial Sequence: Synthetic oligonucleotide
gagaccguaaguaguauuu

SEQ ID NO: 2496145 - RNA, 19 nt, Artificial Sequence
  Description of Artificial Sequence: Synthetic oligonucleotide
agugugcaucucgaggacu

SEQ ID NO: 2496146 - RNA, 19 nt, Artificial Sequence
  Description of Artificial Sequence: Synthetic oligonucleotide
guccagaguugcaauccag

SEQ ID NO: 2496147 - RNA, 19 nt, Artificial Sequence
  Description of Artificial Sequence: Synthetic oligonucleotide
ugucaauauccagcacuuc

SEQ ID NO: 2496148 - RNA, 19 nt, Artificial Sequence
  Description of Artificial Sequence: Synthetic oligonucleotide
cuccaagagaccguaagua

SEQ ID NO: 2496149 - RNA, 19 nt, Artificial Sequence
  Description of Artificial Sequence: Synthetic oligonucleotide
aacugcugucugauaucug

SEQ ID NO: 2496150 - RNA, 19 nt, Artificial Sequence
  Description of Artificial Sequence: Synthetic oligonucleotide
agcuucaagggaacacuca

SEQ ID NO: 2496151 - RNA, 19 nt, Artificial Sequence
  Description of Artificial Sequence: Synthetic oligonucleotide
cugaacaguauaacucgcu

SEQ ID NO: 2496152 - RNA, 19 nt, Artificial Sequence
  Description of Artificial Sequence: Synthetic oligonucleotide
cgcaagaccauuuggcgug

SEQ ID NO: 2496153 - RNA, 19 nt, Artificial Sequence
  Description of Artificial Sequence: Synthetic oligonucleotide
gucauagcauuccgaugga

SEQ ID NO: 2496154 - RNA, 19 nt, Artificial Sequence
  Description of Artificial Sequence: Synthetic oligonucleotide
ccguaaguaguauuucuca

SEQ ID NO: 2496155 - RNA, 19 nt, Artificial Sequence
  Description of Artificial Sequence: Synthetic oligonucleotide
agcucuggaugcugcuaca

SEQ ID NO: 2496156 - RNA, 19 nt, Artificial Sequence
  Description of Artificial Sequence: Synthetic oligonucleotide
uuguuaccauagguaucug

SEQ ID NO: 2496157 - RNA, 19 nt, Artificial Sequence
  Description of Artificial Sequence: Synthetic oligonucleotide
gugcauagaagucccugua

SEQ ID NO: 2496158 - RNA, 19 nt, Artificial Sequence
  Description of Artificial Sequence: Synthetic oligonucleotide
cuuugucuugaaugcgcaa

SEQ ID NO: 2496159 - RNA, 19 nt, Artificial Sequence
  Description of Artificial Sequence: Synthetic oligonucleotide
cucauccucuugaaaugaa

SEQ ID NO: 2496160 - RNA, 19 nt, Artificial Sequence
  Description of Artificial Sequence: Synthetic oligonucleotide
gugaaucuuuaaauauuua

SEQ ID NO: 2496161 - RNA, 19 nt, Artificial Sequence
  Description of Artificial Sequence: Synthetic oligonucleotide
cugauaucugcaacauccu

SEQ ID NO: 2496162 - RNA, 19 nt, Artificial Sequence
  Description of Artificial Sequence: Synthetic oligonucleotide
gugugaaucuuuaaauauu

SEQ ID NO: 2496163 - RNA, 19 nt, Artificial Sequence
  Description of Artificial Sequence: Synthetic oligonucleotide
ccuaaugauggaaacugcu

SEQ ID NO: 2496164 - RNA, 19 nt, Artificial Sequence
  Description of Artificial Sequence: Synthetic oligonucleotide
auuccgauggaaggugcuu

SEQ ID NO: 2496165 - RNA, 19 nt, Artificial Sequence
  Description of Artificial Sequence: Synthetic oligonucleotide
cuuagggaagaguggguau

SEQ ID NO: 2496166 - RNA, 19 nt, Artificial Sequence
  Description of Artificial Sequence: Synthetic oligonucleotide
gcaacauccuuccuugggu

SEQ ID NO: 2496167 - RNA, 19 nt, Artificial Sequence
  Description of Artificial Sequence: Synthetic oligonucleotide
ccucuugaaaugaagaauu

SEQ ID NO: 2496168 - RNA, 19 nt, Artificial Sequence
  Description of Artificial Sequence: Synthetic oligonucleotide
caaagcucuguccaagauu

SEQ ID NO: 2496169 - RNA, 19 nt, Artificial Sequence
  Description of Artificial Sequence: Synthetic oligonucleotide
accauuuggcgugcauaga

SEQ ID NO: 2496170 - RNA, 19 nt, Artificial Sequence
  Description of Artificial Sequence: Synthetic oligonucleotide
caggucagggcugucaaua

SEQ ID NO: 2496171 - RNA, 19 nt, Artificial Sequence
  Description of Artificial Sequence: Synthetic oligonucleotide
ggucagggcugucaauauc

SEQ ID NO: 2496172 - RNA, 19 nt, Artificial Sequence
  Description of Artificial Sequence: Synthetic oligonucleotide
acaguauaacucgcuucuu

SEQ ID NO: 2496173 - RNA, 19 nt, Artificial Sequence
  Description of Artificial Sequence: Synthetic oligonucleotide
cacucauaccuccucgccu

SEQ ID NO: 2496174 - RNA, 19 nt, Artificial Sequence
  Description of Artificial Sequence: Synthetic oligonucleotide
gcuucaagggaacacucau

SEQ ID NO: 2496175 - RNA, 19 nt, Artificial Sequence
  Description of Artificial Sequence: Synthetic oligonucleotide
gcucuggaugcugcuacag

SEQ ID NO: 2496176 - RNA, 19 nt, Artificial Sequence
  Description of Artificial Sequence: Synthetic oligonucleotide
caguauaacucgcuucuuu

SEQ ID NO: 2496177 - RNA, 19 nt, Artificial Sequence
  Description of Artificial Sequence: Synthetic oligonucleotide
ccaagagaccguaaguagu

SEQ ID NO: 2496178 - RNA, 19 nt, Artificial Sequence
  Description of Artificial Sequence: Synthetic oligonucleotide
caauccaggugaacuaauu

SEQ ID NO: 2496179 - RNA, 19 nt, Artificial Sequence
  Description of Artificial Sequence: Synthetic oligonucleotide
cagggucuuuguuaccaua

SEQ ID NO: 2496180 - RNA, 19 nt, Artificial Sequence
  Description of Artificial Sequence: Synthetic oligonucleotide
gcauagaagucccuguauu

SEQ ID NO: 2496181 - RNA, 19 nt, Artificial Sequence
  Description of Artificial Sequence: Synthetic oligonucleotide
gggaagaguggguauuuau

SEQ ID NO: 2496182 - RNA, 19 nt, Artificial Sequence
  Description of Artificial Sequence: Synthetic oligonucleotide
gcuguaggcuuugucuuga

SEQ ID NO: 2496183 - RNA, 19 nt, Artificial Sequence
  Description of Artificial Sequence: Synthetic oligonucleotide
ggaaaagaacugccccucu

SEQ ID NO: 2496184 - RNA, 19 nt, Artificial Sequence
  Description of Artificial Sequence: Synthetic oligonucleotide
agggaagaguggguauuua

SEQ ID NO: 2496185 - RNA, 19 nt, Artificial Sequence
  Description of Artificial Sequence: Synthetic oligonucleotide
uccucgccuuagggaagag

SEQ ID NO: 2496186 - RNA, 19 nt, Artificial Sequence
  Description of Artificial Sequence: Synthetic oligonucleotide
ccaggugaacuaauucgaa

SEQ ID NO: 2496187 - RNA, 19 nt, Artificial Sequence
  Description of Artificial Sequence: Synthetic oligonucleotide
gaguugcaauccaggugaa

SEQ ID NO: 2496188 - RNA, 19 nt, Artificial Sequence
  Description of Artificial Sequence: Synthetic oligonucleotide
cgaggacugaacaguauaa

SEQ ID NO: 2496189 - RNA, 19 nt, Artificial Sequence
  Description of Artificial Sequence: Synthetic oligonucleotide
gugcaucucgaggacugaa

SEQ ID NO: 2496190 - RNA, 19 nt, Artificial Sequence
  Description of Artificial Sequence: Synthetic oligonucleotide
guaguucagccaguguuuu

SEQ ID NO: 2496191 - RNA, 19 nt, Artificial Sequence
  Description of Artificial Sequence: Synthetic oligonucleotide
gguaguucagccaguguuu

SEQ ID NO: 2496192 - RNA, 19 nt, Artificial Sequence
  Description of Artificial Sequence: Synthetic oligonucleotide
gcgcaagaccauuuggcgu

SEQ ID NO: 2496193 - RNA, 19 nt, Artificial Sequence
  Description of Artificial Sequence: Synthetic oligonucleotide
ccuguauuccucugguagu

SEQ ID NO: 2496194 - RNA, 19 nt, Artificial Sequence
  Description of Artificial Sequence: Synthetic oligonucleotide
cuccucgccuuagggaaga

SEQ ID NO: 2496195 - RNA, 19 nt, Artificial Sequence
  Description of Artificial Sequence: Synthetic oligonucleotide
cuguauuccucugguaguu

SEQ ID NO: 2496196 - RNA, 19 nt, Artificial Sequence
  Description of Artificial Sequence: Synthetic oligonucleotide
auggaaccauaaacagcuu

SEQ ID NO: 2496197 - RNA, 19 nt, Artificial Sequence
  Description of Artificial Sequence: Synthetic oligonucleotide
cucgaggacugaacaguau

SEQ ID NO: 2496198 - RNA, 19 nt, Artificial Sequence
  Description of Artificial Sequence: Synthetic oligonucleotide
gucuucuccaagagaccgu

SEQ ID NO: 2496199 - RNA, 19 nt, Artificial Sequence
  Description of Artificial Sequence: Synthetic oligonucleotide
ccuuagggaagagugggua

SEQ ID NO: 2496200 - RNA, 19 nt, Artificial Sequence
  Description of Artificial Sequence: Synthetic oligonucleotide
ggugcuuccaaaagacauu

SEQ ID NO: 2496201 - RNA, 19 nt, Artificial Sequence
  Description of Artificial Sequence: Synthetic oligonucleotide
cguaaguaguauuucucau

SEQ ID NO: 2496202 - RNA, 19 nt, Artificial Sequence
  Description of Artificial Sequence: Synthetic oligonucleotide
cucugguaguucagccagu

SEQ ID NO: 2496203 - RNA, 19 nt, Artificial Sequence
  Description of Artificial Sequence: Synthetic oligonucleotide
cugccccucuucaaagaau

SEQ ID NO: 2496204 - RNA, 19 nt, Artificial Sequence
  Description of Artificial Sequence: Synthetic oligonucleotide
cucauaccuccucgccuua

SEQ ID NO: 2496205 - RNA, 19 nt, Artificial Sequence
  Description of Artificial Sequence: Synthetic oligonucleotide
ggaugcugcuacagggucu

SEQ ID NO: 2496206 - RNA, 19 nt, Artificial Sequence
  Description of Artificial Sequence: Synthetic oligonucleotide
caagaccauuuggcgugca

SEQ ID NO: 2496207 - RNA, 19 nt, Artificial Sequence
  Description of Artificial Sequence: Synthetic oligonucleotide
ccuccuaaugauggaaacu

SEQ ID NO: 2496208 - RNA, 19 nt, Artificial Sequence
  Description of Artificial Sequence: Synthetic oligonucleotide
cgugcauagaagucccugu

SEQ ID NO: 2496209 - RNA, 19 nt, Artificial Sequence
  Description of Artificial Sequence: Synthetic oligonucleotide
gggaacacucauaccuccu

SEQ ID NO: 2496210 - RNA, 19 nt, Artificial Sequence
  Description of Artificial Sequence: Synthetic oligonucleotide
gcaauccaggugaacuaau

SEQ ID NO: 2496211 - RNA, 19 nt, Artificial Sequence
  Description of Artificial Sequence: Synthetic oligonucleotide
gccuuagggaagagugggu

SEQ ID NO: 2496212 - RNA, 19 nt, Artificial Sequence
  Description of Artificial Sequence: Synthetic oligonucleotide
augcugcuacagggucuuu

SEQ ID NO: 2496213 - RNA, 19 nt, Artificial Sequence
  Description of Artificial Sequence: Synthetic oligonucleotide
ccccucuucaaagaauauu

SEQ ID NO: 2496214 - RNA, 19 nt, Artificial Sequence
  Description of Artificial Sequence: Synthetic oligonucleotide
ggcgugcauagaagucccu

SEQ ID NO: 2496215 - RNA, 19 nt, Artificial Sequence
  Description of Artificial Sequence: Synthetic oligonucleotide
gccccucuucaaagaauau

SEQ ID NO: 2496216 - RNA, 19 nt, Artificial Sequence
  Description of Artificial Sequence: Synthetic oligonucleotide
ccucgccuuagggaagagu

SEQ ID NO: 2496217 - RNA, 19 nt, Artificial Sequence
  Description of Artificial Sequence: Synthetic oligonucleotide
aagaauacgacauauuucc

SEQ ID NO: 2496218 - RNA, 19 nt, Artificial Sequence
  Description of Artificial Sequence: Synthetic oligonucleotide
ucaucgauaauaaagaggc

SEQ ID NO: 2496219 - RNA, 19 nt, Artificial Sequence
  Description of Artificial Sequence: Synthetic oligonucleotide
ucuguauucacuuaggcag

SEQ ID NO: 2496220 - RNA, 19 nt, Artificial Sequence
  Description of Artificial Sequence: Synthetic oligonucleotide
ucuuccaacaggaagauca

SEQ ID NO: 2496221 - RNA, 19 nt, Artificial Sequence
  Description of Artificial Sequence: Synthetic oligonucleotide
uacaacacagcucagacca

SEQ ID NO: 2496222 - RNA, 19 nt, Artificial Sequence
  Description of Artificial Sequence: Synthetic oligonucleotide
uuaucaucgauaauaaaga

SEQ ID NO: 2496223 - RNA, 19 nt, Artificial Sequence
  Description of Artificial Sequence: Synthetic oligonucleotide
aauacgacauauuucccuc

SEQ ID NO: 2496224 - RNA, 19 nt, Artificial Sequence
  Description of Artificial Sequence: Synthetic oligonucleotide
aagagauaccuucaucagc

SEQ ID NO: 2496225 - RNA, 19 nt, Artificial Sequence
  Description of Artificial Sequence: Synthetic oligonucleotide
ucugcuuagagaaauauuc

SEQ ID NO: 2496226 - RNA, 19 nt, Artificial Sequence
  Description of Artificial Sequence: Synthetic oligonucleotide
aaggauaccuuuaucaucg

SEQ ID NO: 2496227 - RNA, 19 nt, Artificial Sequence
  Description of Artificial Sequence: Synthetic oligonucleotide
guauuuagcacaaagagug

SEQ ID NO: 2496228 - RNA, 19 nt, Artificial Sequence
  Description of Artificial Sequence: Synthetic oligonucleotide
aguugaguuucuuaaauuc

SEQ ID NO: 2496229 - RNA, 19 nt, Artificial Sequence
  Description of Artificial Sequence: Synthetic oligonucleotide
uaaucuugagcaauggugc

SEQ ID NO: 2496230 - RNA, 19 nt, Artificial Sequence
  Description of Artificial Sequence: Synthetic oligonucleotide
gacuccauaaucuugagca

SEQ ID NO: 2496231 - RNA, 19 nt, Artificial Sequence
  Description of Artificial Sequence: Synthetic oligonucleotide
agaagcuccaaucacuugg

SEQ ID NO: 2496232 - RNA, 19 nt, Artificial Sequence
  Description of Artificial Sequence: Synthetic oligonucleotide
agagauaccuucaucagcc

SEQ ID NO: 2496233 - RNA, 19 nt, Artificial Sequence
  Description of Artificial Sequence: Synthetic oligonucleotide
aguguaagagauuuucuuc

SEQ ID NO: 2496234 - RNA, 19 nt, Artificial Sequence
  Description of Artificial Sequence: Synthetic oligonucleotide
aagaguguaagagauuuuc

SEQ ID NO: 2496235 - RNA, 19 nt, Artificial Sequence
  Description of Artificial Sequence: Synthetic oligonucleotide
aaagagauaccuucaucag

SEQ ID NO: 2496236 - RNA, 19 nt, Artificial Sequence
  Description of Artificial Sequence: Synthetic oligonucleotide
aaggaauguucaugggucc

SEQ ID NO: 2496237 - RNA, 19 nt, Artificial Sequence
  Description of Artificial Sequence: Synthetic oligonucleotide
uguguauuuagcacaaaga

SEQ ID NO: 2496238 - RNA, 19 nt, Artificial Sequence
  Description of Artificial Sequence: Synthetic oligonucleotide
uguauuuagcacaaagagu

SEQ ID NO: 2496239 - RNA, 19 nt, Artificial Sequence
  Description of Artificial Sequence: Synthetic oligonucleotide
aagaaaaggcuaaccaccc

SEQ ID NO: 2496240 - RNA, 19 nt, Artificial Sequence
  Description of Artificial Sequence: Synthetic oligonucleotide
auucuuugcucuuuuggac

SEQ ID NO: 2496241 - RNA, 19 nt, Artificial Sequence
  Description of Artificial Sequence: Synthetic oligonucleotide
agaucauuuauagugaucu

SEQ ID NO: 2496242 - RNA, 19 nt, Artificial Sequence
  Description of Artificial Sequence: Synthetic oligonucleotide
ucugaauuguccaucuggc

SEQ ID NO: 2496243 - RNA, 19 nt, Artificial Sequence
  Description of Artificial Sequence: Synthetic oligonucleotide
uagagaaauauucuuugcu

SEQ ID NO: 2496244 - RNA, 19 nt, Artificial Sequence
  Description of Artificial Sequence: Synthetic oligonucleotide
auuuauagugaucugucga

SEQ ID NO: 2496245 - RNA, 19 nt, Artificial Sequence
  Description of Artificial Sequence: Synthetic oligonucleotide
ugcccuaucacugaaagca

SEQ ID NO: 2496246 - RNA, 19 nt, Artificial Sequence
  Description of Artificial Sequence: Synthetic oligonucleotide
ugcucuuuuggacaucagg

SEQ ID NO: 2496247 - RNA, 19 nt, Artificial Sequence
  Description of Artificial Sequence: Synthetic oligonucleotide
uuaagacuccauaaucuug

SEQ ID NO: 2496248 - RNA, 19 nt, Artificial Sequence
  Description of Artificial Sequence: Synthetic oligonucleotide
agaagaauacgacauauuu

SEQ ID NO: 2496249 - RNA, 19 nt, Artificial Sequence
  Description of Artificial Sequence: Synthetic oligonucleotide
agcacaaagaguguaagag

SEQ ID NO: 2496250 - RNA, 19 nt, Artificial Sequence
  Description of Artificial Sequence: Synthetic oligonucleotide
cugucuaccuacaacacag

SEQ ID NO: 2496251 - RNA, 19 nt, Artificial Sequence
  Description of Artificial Sequence: Synthetic oligonucleotide
ugcgcuugggaucugauac

SEQ ID NO: 2496252 - RNA, 19 nt, Artificial Sequence
  Description of Artificial Sequence: Synthetic oligonucleotide
ugaauuguccaucuggcau

SEQ ID NO: 2496253 - RNA, 19 nt, Artificial Sequence
  Description of Artificial Sequence: Synthetic oligonucleotide
cugauaguggaagaaaagg

SEQ ID NO: 2496254 - RNA, 19 nt, Artificial Sequence
  Description of Artificial Sequence: Synthetic oligonucleotide
auguuugucagugaacugg

SEQ ID NO: 2496255 - RNA, 19 nt, Artificial Sequence
  Description of Artificial Sequence: Synthetic oligonucleotide
aaagaagaauacgacauau

SEQ ID NO: 2496256 - RNA, 19 nt, Artificial Sequence
  Description of Artificial Sequence: Synthetic oligonucleotide
ucugcccuaucacugaaag

SEQ ID NO: 2496257 - RNA, 19 nt, Artificial Sequence
  Description of Artificial Sequence: Synthetic oligonucleotide
uuggacaucaggcuugaug

SEQ ID NO: 2496258 - RNA, 19 nt, Artificial Sequence
  Description of Artificial Sequence: Synthetic oligonucleotide
cucugaauuguccaucugg

SEQ ID NO: 2496259 - RNA, 19 nt, Artificial Sequence
  Description of Artificial Sequence: Synthetic oligonucleotide
uuuauagugaucugucgaa

SEQ ID NO: 2496260 - RNA, 19 nt, Artificial Sequence
  Description of Artificial Sequence: Synthetic oligonucleotide
ucugauaccaaaggaaugu

SEQ ID NO: 2496261 - RNA, 19 nt, Artificial Sequence
  Description of Artificial Sequence: Synthetic oligonucleotide
ucuggcauaacagcugugg

SEQ ID NO: 2496262 - RNA, 19 nt, Artificial Sequence
  Description of Artificial Sequence: Synthetic oligonucleotide
aaaggcuaaccaccccagc

SEQ ID NO: 2496263 - RNA, 19 nt, Artificial Sequence
  Description of Artificial Sequence: Synthetic oligonucleotide
cauuuauagugaucugucg

SEQ ID NO: 2496264 - RNA, 19 nt, Artificial Sequence
  Description of Artificial Sequence: Synthetic oligonucleotide
aucaucgauaauaaagagg

SEQ ID NO: 2496265 - RNA, 19 nt, Artificial Sequence
  Description of Artificial Sequence: Synthetic oligonucleotide
uccacagaagcuccaauca

SEQ ID NO: 2496266 - RNA, 19 nt, Artificial Sequence
  Description of Artificial Sequence: Synthetic oligonucleotide
auaccuuuaucaucgauaa

SEQ ID NO: 2496267 - RNA, 19 nt, Artificial Sequence
  Description of Artificial Sequence: Synthetic oligonucleotide
accuucaucagccuuuaag

SEQ ID NO: 2496268 - RNA, 19 nt, Artificial Sequence
  Description of Artificial Sequence: Synthetic oligonucleotide
guaagagauuuucuucugg

SEQ ID NO: 2496269 - RNA, 19 nt, Artificial Sequence
  Description of Artificial Sequence: Synthetic oligonucleotide
cuaccuacaacacagcuca

SEQ ID NO: 2496270 - RNA, 19 nt, Artificial Sequence
  Description of Artificial Sequence: Synthetic oligonucleotide
uguuuuggaucacacauuu

SEQ ID NO: 2496271 - RNA, 19 nt, Artificial Sequence
  Description of Artificial Sequence: Synthetic oligonucleotide
aaggcuaaccaccccagca

SEQ ID NO: 2496272 - RNA, 19 nt, Artificial Sequence
  Description of Artificial Sequence: Synthetic oligonucleotide
uuuuguguauuuagcacaa

SEQ ID NO: 2496273 - RNA, 19 nt, Artificial Sequence
  Description of Artificial Sequence: Synthetic oligonucleotide
uccaacaggaagaucauuu

SEQ ID NO: 2496274 - RNA, 19 nt, Artificial Sequence
  Description of Artificial Sequence: Synthetic oligonucleotide
caucuugcuaucagcaggg

SEQ ID NO: 2496275 - RNA, 19 nt, Artificial Sequence
  Description of Artificial Sequence: Synthetic oligonucleotide
uccaucuggcauaacagcu

SEQ ID NO: 2496276 - RNA, 19 nt, Artificial Sequence
  Description of Artificial Sequence: Synthetic oligonucleotide
uuugcauuuccugaagaca

SEQ ID NO: 2496277 - RNA, 19 nt, Artificial Sequence
  Description of Artificial Sequence: Synthetic oligonucleotide
gaaaaggcuaaccacccca

SEQ ID NO: 2496278 - RNA, 19 nt, Artificial Sequence
  Description of Artificial Sequence: Synthetic oligonucleotide
ucuaccuacaacacagcuc

SEQ ID NO: 2496279 - RNA, 19 nt, Artificial Sequence
  Description of Artificial Sequence: Synthetic oligonucleotide
aguaaaaucaagaggguaa

SEQ ID NO: 2496280 - RNA, 19 nt, Artificial Sequence
  Description of Artificial Sequence: Synthetic oligonucleotide
uguuugucagugaacugga

SEQ ID NO: 2496281 - RNA, 19 nt, Artificial Sequence
  Description of Artificial Sequence: Synthetic oligonucleotide
accuuuaucaucgauaaua

SEQ ID NO: 2496282 - RNA, 19 nt, Artificial Sequence
  Description of Artificial Sequence: Synthetic oligonucleotide
aggguaaaagaagaauacg

SEQ ID NO: 2496283 - RNA, 19 nt, Artificial Sequence
  Description of Artificial Sequence: Synthetic oligonucleotide
gaaggauaccuuuaucauc

SEQ ID NO: 2496284 - RNA, 19 nt, Artificial Sequence
  Description of Artificial Sequence: Synthetic oligonucleotide
gaagaauacgacauauuuc

SEQ ID NO: 2496285 - RNA, 19 nt, Artificial Sequence
  Description of Artificial Sequence: Synthetic oligonucleotide
ucugucuaccuacaacaca

SEQ ID NO: 2496286 - RNA, 19 nt, Artificial Sequence
  Description of Artificial Sequence: Synthetic oligonucleotide
ugaaagagauaccuucauc

SEQ ID NO: 2496287 - RNA, 19 nt, Artificial Sequence
  Description of Artificial Sequence: Synthetic oligonucleotide
gaugucucugaauugucca

SEQ ID NO: 2496288 - RNA, 19 nt, Artificial Sequence
  Description of Artificial Sequence: Synthetic oligonucleotide
uguaggaaagggcauguuu

SEQ ID NO: 2496289 - RNA, 19 nt, Artificial Sequence
  Description of Artificial Sequence: Synthetic oligonucleotide
aaucacuuggcaguugagu

SEQ ID NO: 2496290 - RNA, 19 nt, Artificial Sequence
  Description of Artificial Sequence: Synthetic oligonucleotide
cuucaucagccuuuaagac

SEQ ID NO: 2496291 - RNA, 19 nt, Artificial Sequence
  Description of Artificial Sequence: Synthetic oligonucleotide
uuauagugaucugucgaag

SEQ ID NO: 2496292 - RNA, 19 nt, Artificial Sequence
  Description of Artificial Sequence: Synthetic oligonucleotide
ucuuuuggacaucaggcuu

SEQ ID NO: 2496293 - RNA, 19 nt, Artificial Sequence
  Description of Artificial Sequence: Synthetic oligonucleotide
acacauuuuguuuugugua

SEQ ID NO: 2496294 - RNA, 19 nt, Artificial Sequence
  Description of Artificial Sequence: Synthetic oligonucleotide
agaugucucugaauugucc

SEQ ID NO: 2496295 - RNA, 19 nt, Artificial Sequence
  Description of Artificial Sequence: Synthetic oligonucleotide
aacuggaaggccuggacua

SEQ ID NO: 2496296 - RNA, 19 nt, Artificial Sequence
  Description of Artificial Sequence: Synthetic oligonucleotide
uucuggugcaugcagccug

SEQ ID NO: 2496297 - RNA, 19 nt, Artificial Sequence
  Description of Artificial Sequence: Synthetic oligonucleotide
ugauaccaaaggaauguuc

SEQ ID NO: 2496298 - RNA, 19 nt, Artificial Sequence
  Description of Artificial Sequence: Synthetic oligonucleotide
agcuccaaucacuuggcag

SEQ ID NO: 2496299 - RNA, 19 nt, Artificial Sequence
  Description of Artificial Sequence: Synthetic oligonucleotide
aggcuaaccaccccagcac

SEQ ID NO: 2496300 - RNA, 19 nt, Artificial Sequence
  Description of Artificial Sequence: Synthetic oligonucleotide
cucagaccauuccugauag

SEQ ID NO: 2496301 - RNA, 19 nt, Artificial Sequence
  Description of Artificial Sequence: Synthetic oligonucleotide
aaaguaaaaucaagagggu

SEQ ID NO: 2496302 - RNA, 19 nt, Artificial Sequence
  Description of Artificial Sequence: Synthetic oligonucleotide
aauggugcgcuugggaucu

SEQ ID NO: 2496303 - RNA, 19 nt, Artificial Sequence
  Description of Artificial Sequence: Synthetic oligonucleotide
gagaaauauucuuugcucu

SEQ ID NO: 2496304 - RNA, 19 nt, Artificial Sequence
  Description of Artificial Sequence: Synthetic oligonucleotide
uaauaaagaggccccugaa

SEQ ID NO: 2496305 - RNA, 19 nt, Artificial Sequence
  Description of Artificial Sequence: Synthetic oligonucleotide
uaucacugaaagcaaugau

SEQ ID NO: 2496306 - RNA, 19 nt, Artificial Sequence
  Description of Artificial Sequence: Synthetic oligonucleotide
uacgacauauuucccucug

SEQ ID NO: 2496307 - RNA, 19 nt, Artificial Sequence
  Description of Artificial Sequence: Synthetic oligonucleotide
uucuucuggugcaugcagc

SEQ ID NO: 2496308 - RNA, 19 nt, Artificial Sequence
  Description of Artificial Sequence: Synthetic oligonucleotide
uaggaaagggcauguuuug

SEQ ID NO: 2496309 - RNA, 19 nt, Artificial Sequence
  Description of Artificial Sequence: Synthetic oligonucleotide
gauaccuuuaucaucgaua

SEQ ID NO: 2496310 - RNA, 19 nt, Artificial Sequence
  Description of Artificial Sequence: Synthetic oligonucleotide
gaugguaucacugccaggu

SEQ ID NO: 2496311 - RNA, 19 nt, Artificial Sequence
  Description of Artificial Sequence: Synthetic oligonucleotide
gaucauuuauagugaucug

SEQ ID NO: 2496312 - RNA, 19 nt, Artificial Sequence
  Description of Artificial Sequence: Synthetic oligonucleotide
aaaaggcuaaccaccccag

SEQ ID NO: 2496313 - RNA, 19 nt, Artificial Sequence
  Description of Artificial Sequence: Synthetic oligonucleotide
agaauacgacauauuuccc

SEQ ID NO: 2496314 - RNA, 19 nt, Artificial Sequence
  Description of Artificial Sequence: Synthetic oligonucleotide
uggcaguugaguuucuuaa

SEQ ID NO: 2496315 - RNA, 19 nt, Artificial Sequence
  Description of Artificial Sequence: Synthetic oligonucleotide
aucuugagcaauggugcgc

SEQ ID NO: 2496316 - RNA, 19 nt, Artificial Sequence
  Description of Artificial Sequence: Synthetic oligonucleotide
uggcauaacagcuguggcu

SEQ ID NO: 2496317 - RNA, 19 nt, Artificial Sequence
  Description of Artificial Sequence: Synthetic oligonucleotide
gaauacgacauauuucccu

SEQ ID NO: 2496318 - RNA, 19 nt, Artificial Sequence
  Description of Artificial Sequence: Synthetic oligonucleotide
gaccauuccugauagugga

SEQ ID NO: 2496319 - RNA, 19 nt, Artificial Sequence
  Description of Artificial Sequence: Synthetic oligonucleotide
gaaucucauccacagaucu

SEQ ID NO: 2496320 - RNA, 19 nt, Artificial Sequence
  Description of Artificial Sequence: Synthetic oligonucleotide
cagaccauuccugauagug

SEQ ID NO: 2496321 - RNA, 19 nt, Artificial Sequence
  Description of Artificial Sequence: Synthetic oligonucleotide
auucuucugcccuaucacu

SEQ ID NO: 2496322 - RNA, 19 nt, Artificial Sequence
  Description of Artificial Sequence: Synthetic oligonucleotide
gauaguggaagaaaaggcu

SEQ ID NO: 2496323 - RNA, 19 nt, Artificial Sequence
  Description of Artificial Sequence: Synthetic oligonucleotide
agaaauauucuuugcucuu

SEQ ID NO: 2496324 - RNA, 19 nt, Artificial Sequence
  Description of Artificial Sequence: Synthetic oligonucleotide
uggaucacacauuuuguuu

SEQ ID NO: 2496325 - RNA, 19 nt, Artificial Sequence
  Description of Artificial Sequence: Synthetic oligonucleotide
aggaauguucauggguccc

SEQ ID NO: 2496326 - RNA, 19 nt, Artificial Sequence
  Description of Artificial Sequence: Synthetic oligonucleotide
cacuucaccauguuuguca

SEQ ID NO: 2496327 - RNA, 19 nt, Artificial Sequence
  Description of Artificial Sequence: Synthetic oligonucleotide
ucuugagcaauggugcgcu

SEQ ID NO: 2496328 - RNA, 19 nt, Artificial Sequence
  Description of Artificial Sequence: Synthetic oligonucleotide
ugucgaaggauaccuuuau

SEQ ID NO: 2496329 - RNA, 19 nt, Artificial Sequence
  Description of Artificial Sequence: Synthetic oligonucleotide
ucacuuaggcagaugucuc

SEQ ID NO: 2496330 - RNA, 19 nt, Artificial Sequence
  Description of Artificial Sequence: Synthetic oligonucleotide
agccuuuaagacuccauaa

SEQ ID NO: 2496331 - RNA, 19 nt, Artificial Sequence
  Description of Artificial Sequence: Synthetic oligonucleotide
ucugucgaaggauaccuuu

SEQ ID NO: 2496332 - RNA, 19 nt, Artificial Sequence
  Description of Artificial Sequence: Synthetic oligonucleotide
ucagaaucucauccacaga

SEQ ID NO: 2496333 - RNA, 19 nt, Artificial Sequence
  Description of Artificial Sequence: Synthetic oligonucleotide
caucgauaauaaagaggcc

SEQ ID NO: 2496334 - RNA, 19 nt, Artificial Sequence
  Description of Artificial Sequence: Synthetic oligonucleotide
uucugcuuagagaaauauu

SEQ ID NO: 2496335 - RNA, 19 nt, Artificial Sequence
  Description of Artificial Sequence: Synthetic oligonucleotide
gaauuguccaucuggcaua

SEQ ID NO: 2496336 - RNA, 19 nt, Artificial Sequence
  Description of Artificial Sequence: Synthetic oligonucleotide
ggguaaaagaagaauacga

SEQ ID NO: 2496337 - RNA, 19 nt, Artificial Sequence
  Description of Artificial Sequence: Synthetic oligonucleotide
ugucuaccuacaacacagc

SEQ ID NO: 2496338 - RNA, 19 nt, Artificial Sequence
  Description of Artificial Sequence: Synthetic oligonucleotide
uuaaauucuucugcccuau

SEQ ID NO: 2496339 - RNA, 19 nt, Artificial Sequence
  Description of Artificial Sequence: Synthetic oligonucleotide
gaagcuccaaucacuuggc

SEQ ID NO: 2496340 - RNA, 19 nt, Artificial Sequence
  Description of Artificial Sequence: Synthetic oligonucleotide
aaacccugucugucuaccu

SEQ ID NO: 2496341 - RNA, 19 nt, Artificial Sequence
  Description of Artificial Sequence: Synthetic oligonucleotide
cugucugucuaccuacaac

SEQ ID NO: 2496342 - RNA, 19 nt, Artificial Sequence
  Description of Artificial Sequence: Synthetic oligonucleotide
cauguuugucagugaacug

SEQ ID NO: 2496343 - RNA, 19 nt, Artificial Sequence
  Description of Artificial Sequence: Synthetic oligonucleotide
gucucagaaucucauccac

SEQ ID NO: 2496344 - RNA, 19 nt, Artificial Sequence
  Description of Artificial Sequence: Synthetic oligonucleotide
ugguaucacugccagguuu

SEQ ID NO: 2496345 - RNA, 19 nt, Artificial Sequence
  Description of Artificial Sequence: Synthetic oligonucleotide
cuaucagcagggccgaguc

SEQ ID NO: 2496346 - RNA, 19 nt, Artificial Sequence
  Description of Artificial Sequence: Synthetic oligonucleotide
ucucugaauuguccaucug

SEQ ID NO: 2496347 - RNA, 19 nt, Artificial Sequence
  Description of Artificial Sequence: Synthetic oligonucleotide
cuugggaucugauaccaaa

SEQ ID NO: 2496348 - RNA, 19 nt, Artificial Sequence
  Description of Artificial Sequence: Synthetic oligonucleotide
agugcucacuucugcuuag

SEQ ID NO: 2496349 - RNA, 19 nt, Artificial Sequence
  Description of Artificial Sequence: Synthetic oligonucleotide
cuagucucagaaucucauc

SEQ ID NO: 2496350 - RNA, 19 nt, Artificial Sequence
  Description of Artificial Sequence: Synthetic oligonucleotide
accauguuugucagugaac

SEQ ID NO: 2496351 - RNA, 19 nt, Artificial Sequence
  Description of Artificial Sequence: Synthetic oligonucleotide
agcugggcacacuucacca

SEQ ID NO: 2496352 - RNA, 19 nt, Artificial Sequence
  Description of Artificial Sequence: Synthetic oligonucleotide
cugaagacaucuugcuauc

SEQ ID NO: 2496353 - RNA, 19 nt, Artificial Sequence
  Description of Artificial Sequence: Synthetic oligonucleotide
auacgacauauuucccucu

SEQ ID NO: 2496354 - RNA, 19 nt, Artificial Sequence
  Description of Artificial Sequence: Synthetic oligonucleotide
aauuguccaucuggcauaa

SEQ ID NO: 2496355 - RNA, 19 nt, Artificial Sequence
  Description of Artificial Sequence: Synthetic oligonucleotide
aaauggccccagugcucac

SEQ ID NO: 2496356 - RNA, 19 nt, Artificial Sequence
  Description of Artificial Sequence: Synthetic oligonucleotide
ugaagacaucuugcuauca

SEQ ID NO: 2496357 - RNA, 19 nt, Artificial Sequence
  Description of Artificial Sequence: Synthetic oligonucleotide
ccugauaguggaagaaaag

SEQ ID NO: 2496358 - RNA, 19 nt, Artificial Sequence
  Description of Artificial Sequence: Synthetic oligonucleotide
agaguguaagagauuuucu

SEQ ID NO: 2496359 - RNA, 19 nt, Artificial Sequence
  Description of Artificial Sequence: Synthetic oligonucleotide
ugcauuuccugaagacauc

SEQ ID NO: 2496360 - RNA, 19 nt, Artificial Sequence
  Description of Artificial Sequence: Synthetic oligonucleotide
aagaagaauacgacauauu

SEQ ID NO: 2496361 - RNA, 19 nt, Artificial Sequence
  Description of Artificial Sequence: Synthetic oligonucleotide
caauggugcgcuugggauc

SEQ ID NO: 2496362 - RNA, 19 nt, Artificial Sequence
  Description of Artificial Sequence: Synthetic oligonucleotide
uuccugauaguggaagaaa

SEQ ID NO: 2496363 - RNA, 19 nt, Artificial Sequence
  Description of Artificial Sequence: Synthetic oligonucleotide
acuuaggcagaugucucug

SEQ ID NO: 2496364 - RNA, 19 nt, Artificial Sequence
  Description of Artificial Sequence: Synthetic oligonucleotide
auauuucccucuguauuca

SEQ ID NO: 2496365 - RNA, 19 nt, Artificial Sequence
  Description of Artificial Sequence: Synthetic oligonucleotide
gaagaucauuuauagugau

SEQ ID NO: 2496366 - RNA, 19 nt, Artificial Sequence
  Description of Artificial Sequence: Synthetic oligonucleotide
agggccgagucacaagucu

SEQ ID NO: 2496367 - RNA, 19 nt, Artificial Sequence
  Description of Artificial Sequence: Synthetic oligonucleotide
caugggucccagaauccac

SEQ ID NO: 2496368 - RNA, 19 nt, Artificial Sequence
  Description of Artificial Sequence: Synthetic oligonucleotide
cuuaaauucuucugcccua

SEQ ID NO: 2496369 - RNA, 19 nt, Artificial Sequence
  Description of Artificial Sequence: Synthetic oligonucleotide
ugucucugaauuguccauc

SEQ ID NO: 2496370 - RNA, 19 nt, Artificial Sequence
  Description of Artificial Sequence: Synthetic oligonucleotide
ugggcacacuucaccaugu

SEQ ID NO: 2496371 - RNA, 19 nt, Artificial Sequence
  Description of Artificial Sequence: Synthetic oligonucleotide
ccuaucacugaaagcaaug

SEQ ID NO: 2496372 - RNA, 19 nt, Artificial Sequence
  Description of Artificial Sequence: Synthetic oligonucleotide
cccugaaagagauaccuuc

SEQ ID NO: 2496373 - RNA, 19 nt, Artificial Sequence
  Description of Artificial Sequence: Synthetic oligonucleotide
ggaagaucauuuauaguga

SEQ ID NO: 2496374 - RNA, 19 nt, Artificial Sequence
  Description of Artificial Sequence: Synthetic oligonucleotide
caaucacuuggcaguugag

SEQ ID NO: 2496375 - RNA, 19 nt, Artificial Sequence
  Description of Artificial Sequence: Synthetic oligonucleotide
augucucugaauuguccau

SEQ ID NO: 2496376 - RNA, 19 nt, Artificial Sequence
  Description of Artificial Sequence: Synthetic oligonucleotide
agauaccuucaucagccuu

SEQ ID NO: 2496377 - RNA, 19 nt, Artificial Sequence
  Description of Artificial Sequence: Synthetic oligonucleotide
auuccugauaguggaagaa

SEQ ID NO: 2496378 - RNA, 19 nt, Artificial Sequence
  Description of Artificial Sequence: Synthetic oligonucleotide
acuccauaaucuugagcaa

SEQ ID NO: 2496379 - RNA, 19 nt, Artificial Sequence
  Description of Artificial Sequence: Synthetic oligonucleotide
uagugaucugucgaaggau

SEQ ID NO: 2496380 - RNA, 19 nt, Artificial Sequence
  Description of Artificial Sequence: Synthetic oligonucleotide
acgacauauuucccucugu

SEQ ID NO: 2496381 - RNA, 19 nt, Artificial Sequence
  Description of Artificial Sequence: Synthetic oligonucleotide
cauuccugauaguggaaga

SEQ ID NO: 2496382 - RNA, 19 nt, Artificial Sequence
  Description of Artificial Sequence: Synthetic oligonucleotide
ggaucugauaccaaaggaa

SEQ ID NO: 2496383 - RNA, 19 nt, Artificial Sequence
  Description of Artificial Sequence: Synthetic oligonucleotide
gggaucugauaccaaagga

SEQ ID NO: 2496384 - RNA, 19 nt, Artificial Sequence
  Description of Artificial Sequence: Synthetic oligonucleotide
cuuuaucaucgauaauaaa

SEQ ID NO: 2496385 - RNA, 19 nt, Artificial Sequence
  Description of Artificial Sequence: Synthetic oligonucleotide
cuguauucacuuaggcaga

SEQ ID NO: 2496386 - RNA, 19 nt, Artificial Sequence
  Description of Artificial Sequence: Synthetic oligonucleotide
gaaagggcauguuuuggau

SEQ ID NO: 2496387 - RNA, 19 nt, Artificial Sequence
  Description of Artificial Sequence: Synthetic oligonucleotide
cugcccuaucacugaaagc

SEQ ID NO: 2496388 - RNA, 19 nt, Artificial Sequence
  Description of Artificial Sequence: Synthetic oligonucleotide
aucuugcuaucagcagggc

SEQ ID NO: 2496389 - RNA, 19 nt, Artificial Sequence
  Description of Artificial Sequence: Synthetic oligonucleotide
cagugaacuggaaggccug

SEQ ID NO: 2496390 - RNA, 19 nt, Artificial Sequence
  Description of Artificial Sequence: Synthetic oligonucleotide
cacuguaggaaagggcaug

SEQ ID NO: 2496391 - RNA, 19 nt, Artificial Sequence
  Description of Artificial Sequence: Synthetic oligonucleotide
gcacaaagaguguaagaga

SEQ ID NO: 2496392 - RNA, 19 nt, Artificial Sequence
  Description of Artificial Sequence: Synthetic oligonucleotide
ccaaaggaauguucauggg

SEQ ID NO: 2496393 - RNA, 19 nt, Artificial Sequence
  Description of Artificial Sequence: Synthetic oligonucleotide
accuacaacacagcucaga

SEQ ID NO: 2496394 - RNA, 19 nt, Artificial Sequence
  Description of Artificial Sequence: Synthetic oligonucleotide
gacuagucucagaaucuca

SEQ ID NO: 2496395 - RNA, 19 nt, Artificial Sequence
  Description of Artificial Sequence: Synthetic oligonucleotide
acacuucaccauguuuguc

SEQ ID NO: 2496396 - RNA, 19 nt, Artificial Sequence
  Description of Artificial Sequence: Synthetic oligonucleotide
cagaagcuccaaucacuug

SEQ ID NO: 2496397 - RNA, 19 nt, Artificial Sequence
  Description of Artificial Sequence: Synthetic oligonucleotide
gauaccuucaucagccuuu

SEQ ID NO: 2496398 - RNA, 19 nt, Artificial Sequence
  Description of Artificial Sequence: Synthetic oligonucleotide
cauaaucuugagcaauggu

SEQ ID NO: 2496399 - RNA, 19 nt, Artificial Sequence
  Description of Artificial Sequence: Synthetic oligonucleotide
uaccuacaacacagcucag

SEQ ID NO: 2496400 - RNA, 19 nt, Artificial Sequence
  Description of Artificial Sequence: Synthetic oligonucleotide
caccauguuugucagugaa

SEQ ID NO: 2496401 - RNA, 19 nt, Artificial Sequence
  Description of Artificial Sequence: Synthetic oligonucleotide
gguaucacugccagguuuc

SEQ ID NO: 2496402 - RNA, 19 nt, Artificial Sequence
  Description of Artificial Sequence: Synthetic oligonucleotide
ccuuuaucaucgauaauaa

SEQ ID NO: 2496403 - RNA, 19 nt, Artificial Sequence
  Description of Artificial Sequence: Synthetic oligonucleotide
ccauaaucuugagcaaugg

SEQ ID NO: 2496404 - RNA, 19 nt, Artificial Sequence
  Description of Artificial Sequence: Synthetic oligonucleotide
uuuguguauuuagcacaaa

SEQ ID NO: 2496405 - RNA, 19 nt, Artificial Sequence
  Description of Artificial Sequence: Synthetic oligonucleotide
gucuaccuacaacacagcu

SEQ ID NO: 2496406 - RNA, 19 nt, Artificial Sequence
  Description of Artificial Sequence: Synthetic oligonucleotide
gucugucuaccuacaacac

SEQ ID NO: 2496407 - RNA, 19 nt, Artificial Sequence
  Description of Artificial Sequence: Synthetic oligonucleotide
guaggaaagggcauguuuu

SEQ ID NO: 2496408 - RNA, 19 nt, Artificial Sequence
  Description of Artificial Sequence: Synthetic oligonucleotide
agcucagaccauuccugau

SEQ ID NO: 2496409 - RNA, 19 nt, Artificial Sequence
  Description of Artificial Sequence: Synthetic oligonucleotide
gcuccaaucacuuggcagu

SEQ ID NO: 2496410 - RNA, 19 nt, Artificial Sequence
  Description of Artificial Sequence: Synthetic oligonucleotide
ccugaaagagauaccuuca

SEQ ID NO: 2496411 - RNA, 19 nt, Artificial Sequence
  Description of Artificial Sequence: Synthetic oligonucleotide
agaggccccugaaagagau

SEQ ID NO: 2496412 - RNA, 19 nt, Artificial Sequence
  Description of Artificial Sequence: Synthetic oligonucleotide
gugcaugcagccuggcaga

SEQ ID NO: 2496413 - RNA, 19 nt, Artificial Sequence
  Description of Artificial Sequence: Synthetic oligonucleotide
ccauuccugauaguggaag

SEQ ID NO: 2496414 - RNA, 19 nt, Artificial Sequence
  Description of Artificial Sequence: Synthetic oligonucleotide
cagccuuuaagacuccaua

SEQ ID NO: 2496415 - RNA, 19 nt, Artificial Sequence
  Description of Artificial Sequence: Synthetic oligonucleotide
aagaggccccugaaagaga

SEQ ID NO: 2496416 - RNA, 19 nt, Artificial Sequence
  Description of Artificial Sequence: Synthetic oligonucleotide
ggcauguuuuggaucacac

SEQ ID NO: 2496417 - RNA, 19 nt, Artificial Sequence
  Description of Artificial Sequence: Synthetic oligonucleotide
gcauguuuuggaucacaca

SEQ ID NO: 2496418 - RNA, 19 nt, Artificial Sequence
  Description of Artificial Sequence: Synthetic oligonucleotide
uaaccaccccagcacugua

SEQ ID NO: 2496419 - RNA, 19 nt, Artificial Sequence
  Description of Artificial Sequence: Synthetic oligonucleotide
ggaucacacauuuuguuuu

SEQ ID NO: 2496420 - RNA, 19 nt, Artificial Sequence
  Description of Artificial Sequence: Synthetic oligonucleotide
gccuggacuagucucagaa

SEQ ID NO: 2496421 - RNA, 19 nt, Artificial Sequence
  Description of Artificial Sequence: Synthetic oligonucleotide
aggauaccuuuaucaucga

SEQ ID NO: 2496422 - RNA, 19 nt, Artificial Sequence
  Description of Artificial Sequence: Synthetic oligonucleotide
cugucgaaggauaccuuua

SEQ ID NO: 2496423 - RNA, 19 nt, Artificial Sequence
  Description of Artificial Sequence: Synthetic oligonucleotide
ccacagaagcuccaaucac

SEQ ID NO: 2496424 - RNA, 19 nt, Artificial Sequence
  Description of Artificial Sequence: Synthetic oligonucleotide
gcaguugaguuucuuaaau

SEQ ID NO: 2496425 - RNA, 19 nt, Artificial Sequence
  Description of Artificial Sequence: Synthetic oligonucleotide
ccaaucacuuggcaguuga

SEQ ID NO: 2496426 - RNA, 19 nt, Artificial Sequence
  Description of Artificial Sequence: Synthetic oligonucleotide
augguaucacugccagguu

SEQ ID NO: 2496427 - RNA, 19 nt, Artificial Sequence
  Description of Artificial Sequence: Synthetic oligonucleotide
uuccaacaggaagaucauu

SEQ ID NO: 2496428 - RNA, 19 nt, Artificial Sequence
  Description of Artificial Sequence: Synthetic oligonucleotide
caggaagaucauuuauagu

SEQ ID NO: 2496429 - RNA, 19 nt, Artificial Sequence
  Description of Artificial Sequence: Synthetic oligonucleotide
auuguccaucuggcauaac

SEQ ID NO: 2496430 - RNA, 19 nt, Artificial Sequence
  Description of Artificial Sequence: Synthetic oligonucleotide
ggacuagucucagaaucuc

SEQ ID NO: 2496431 - RNA, 19 nt, Artificial Sequence
  Description of Artificial Sequence: Synthetic oligonucleotide
auaccuucaucagccuuua

SEQ ID NO: 2496432 - RNA, 19 nt, Artificial Sequence
  Description of Artificial Sequence: Synthetic oligonucleotide
gagauaccuucaucagccu

SEQ ID NO: 2496433 - RNA, 19 nt, Artificial Sequence
  Description of Artificial Sequence: Synthetic oligonucleotide
caguugaguuucuuaaauu

SEQ ID NO: 2496434 - RNA, 19 nt, Artificial Sequence
  Description of Artificial Sequence: Synthetic oligonucleotide
gcucagaccauuccugaua

SEQ ID NO: 2496435 - RNA, 19 nt, Artificial Sequence
  Description of Artificial Sequence: Synthetic oligonucleotide
aggccuggacuagucucag

SEQ ID NO: 2496436 - RNA, 19 nt, Artificial Sequence
  Description of Artificial Sequence: Synthetic oligonucleotide
cagggccgagucacaaguc

SEQ ID NO: 2496437 - RNA, 19 nt, Artificial Sequence
  Description of Artificial Sequence: Synthetic oligonucleotide
ugcaugcagccuggcagaa

SEQ ID NO: 2496438 - RNA, 19 nt, Artificial Sequence
  Description of Artificial Sequence: Synthetic oligonucleotide
caccccagcacuguaggaa

SEQ ID NO: 2496439 - RNA, 19 nt, Artificial Sequence
  Description of Artificial Sequence: Synthetic oligonucleotide
uaccuucaucagccuuuaa

SEQ ID NO: 2496440 - RNA, 19 nt, Artificial Sequence
  Description of Artificial Sequence: Synthetic oligonucleotide
ccauguuugucagugaacu

SEQ ID NO: 2496441 - RNA, 19 nt, Artificial Sequence
  Description of Artificial Sequence: Synthetic oligonucleotide
cuucugcccuaucacugaa

SEQ ID NO: 2496442 - RNA, 19 nt, Artificial Sequence
  Description of Artificial Sequence: Synthetic oligonucleotide
gccuuuaagacuccauaau

SEQ ID NO: 2496443 - RNA, 19 nt, Artificial Sequence
  Description of Artificial Sequence: Synthetic oligonucleotide
ggcauaacagcuguggcuu

SEQ ID NO: 2496444 - RNA, 19 nt, Artificial Sequence
  Description of Artificial Sequence: Synthetic oligonucleotide
cuuccaacaggaagaucau

SEQ ID NO: 2496445 - RNA, 19 nt, Artificial Sequence
  Description of Artificial Sequence: Synthetic oligonucleotide
cuccauaaucuugagcaau

SEQ ID NO: 2496446 - RNA, 19 nt, Artificial Sequence
  Description of Artificial Sequence: Synthetic oligonucleotide
gcuaaccaccccagcacug

SEQ ID NO: 2496447 - RNA, 19 nt, Artificial Sequence
  Description of Artificial Sequence: Synthetic oligonucleotide
aucuggcauaacagcugug

SEQ ID NO: 2496448 - RNA, 19 nt, Artificial Sequence
  Description of Artificial Sequence: Synthetic oligonucleotide
ugcuaucagcagggccgag

SEQ ID NO: 2496449 - RNA, 19 nt, Artificial Sequence
  Description of Artificial Sequence: Synthetic oligonucleotide
accauuccugauaguggaa

SEQ ID NO: 2496450 - RNA, 19 nt, Artificial Sequence
  Description of Artificial Sequence: Synthetic oligonucleotide
guuugucagugaacuggaa

SEQ ID NO: 2496451 - RNA, 19 nt, Artificial Sequence
  Description of Artificial Sequence: Synthetic oligonucleotide
gcagggccgagucacaagu

SEQ ID NO: 2496452 - RNA, 19 nt, Artificial Sequence
  Description of Artificial Sequence: Synthetic oligonucleotide
gugcgcuugggaucugaua

SEQ ID NO: 2496453 - RNA, 19 nt, Artificial Sequence
  Description of Artificial Sequence: Synthetic oligonucleotide
cuaaccaccccagcacugu

SEQ ID NO: 2496454 - RNA, 19 nt, Artificial Sequence
  Description of Artificial Sequence: Synthetic oligonucleotide
gccccugaaagagauaccu

SEQ ID NO: 2496455 - RNA, 19 nt, Artificial Sequence
  Description of Artificial Sequence: Synthetic oligonucleotide
aucugucgaaggauaccuu

SEQ ID NO: 2496456 - RNA, 19 nt, Artificial Sequence
  Description of Artificial Sequence: Synthetic oligonucleotide
ggcuaaccaccccagcacu

SEQ ID NO: 2496457 - RNA, 19 nt, Artificial Sequence
  Description of Artificial Sequence: Synthetic oligonucleotide
ggauaccuuuaucaucgau

SEQ ID NO: 2496458 - RNA, 19 nt, Artificial Sequence
  Description of Artificial Sequence: Synthetic oligonucleotide
cuggugcaugcagccuggc

SEQ ID NO: 2496459 - RNA, 19 nt, Artificial Sequence
  Description of Artificial Sequence: Synthetic oligonucleotide
uggccccagugcucacuuc

SEQ ID NO: 2496460 - RNA, 19 nt, Artificial Sequence
  Description of Artificial Sequence: Synthetic oligonucleotide
gggcauguuuuggaucaca

SEQ ID NO: 2496461 - RNA, 19 nt, Artificial Sequence
  Description of Artificial Sequence: Synthetic oligonucleotide
gugcucacuucugcuuaga

SEQ ID NO: 2496462 - RNA, 19 nt, Artificial Sequence
  Description of Artificial Sequence: Synthetic oligonucleotide
cgaaggauaccuuuaucau

SEQ ID NO: 2496463 - RNA, 19 nt, Artificial Sequence
  Description of Artificial Sequence: Synthetic oligonucleotide
ggccccugaaagagauacc

SEQ ID NO: 2496464 - RNA, 19 nt, Artificial Sequence
  Description of Artificial Sequence: Synthetic oligonucleotide
cuucaccauguuugucagu

SEQ ID NO: 2496465 - RNA, 19 nt, Artificial Sequence
  Description of Artificial Sequence: Synthetic oligonucleotide
cgacauauuucccucugua

SEQ ID NO: 2496466 - RNA, 19 nt, Artificial Sequence
  Description of Artificial Sequence: Synthetic oligonucleotide
cugauaccaaaggaauguu

SEQ ID NO: 2496467 - RNA, 19 nt, Artificial Sequence
  Description of Artificial Sequence: Synthetic oligonucleotide
guuuuggaucacacauuuu

SEQ ID NO: 2496468 - RNA, 19 nt, Artificial Sequence
  Description of Artificial Sequence: Synthetic oligonucleotide
gcuaucagcagggccgagu

SEQ ID NO: 2496469 - RNA, 19 nt, Artificial Sequence
  Description of Artificial Sequence: Synthetic oligonucleotide
gcccuaucacugaaagcaa

SEQ ID NO: 2496470 - RNA, 19 nt, Artificial Sequence
  Description of Artificial Sequence: Synthetic oligonucleotide
ggggcaggauacccaauuu

SEQ ID NO: 2496471 - RNA, 19 nt, Artificial Sequence
  Description of Artificial Sequence: Synthetic oligonucleotide
cccagugcucacuucugcu

SEQ ID NO: 2496472 - RNA, 19 nt, Artificial Sequence
  Description of Artificial Sequence: Synthetic oligonucleotide
ggccuggacuagucucaga

SEQ ID NO: 2496473 - RNA, 19 nt, Artificial Sequence
  Description of Artificial Sequence: Synthetic oligonucleotide
cccuaucacugaaagcaau

SEQ ID NO: 2496474 - RNA, 19 nt, Artificial Sequence
  Description of Artificial Sequence: Synthetic oligonucleotide
cuccaaucacuuggcaguu

SEQ ID NO: 2496475 - RNA, 19 nt, Artificial Sequence
  Description of Artificial Sequence: Synthetic oligonucleotide
gcuugggaucugauaccaa

SEQ ID NO: 2496476 - RNA, 19 nt, Artificial Sequence
  Description of Artificial Sequence: Synthetic oligonucleotide
ccaccccagcacuguagga

SEQ ID NO: 2496477 - RNA, 19 nt, Artificial Sequence
  Description of Artificial Sequence: Synthetic oligonucleotide
cuugagcaauggugcgcuu

SEQ ID NO: 2496478 - RNA, 19 nt, Artificial Sequence
  Description of Artificial Sequence: Synthetic oligonucleotide
gcacuguaggaaagggcau

SEQ ID NO: 2496479 - RNA, 19 nt, Artificial Sequence
  Description of Artificial Sequence: Synthetic oligonucleotide
gcauaacagcuguggcuuu

SEQ ID NO: 2496480 - RNA, 19 nt, Artificial Sequence
  Description of Artificial Sequence: Synthetic oligonucleotide
ggugcgcuugggaucugau

SEQ ID NO: 2496481 - RNA, 19 nt, Artificial Sequence
  Description of Artificial Sequence: Synthetic oligonucleotide
ccccugaaagagauaccuu

SEQ ID NO: 2496482 - RNA, 19 nt, Artificial Sequence
  Description of Artificial Sequence: Synthetic oligonucleotide
agaaacggaaaacaaaucc

SEQ ID NO: 2496483 - RNA, 19 nt, Artificial Sequence
  Description of Artificial Sequence: Synthetic oligonucleotide
agaaauaaaagagaaacgg

SEQ ID NO: 2496484 - RNA, 19 nt, Artificial Sequence
  Description of Artificial Sequence: Synthetic oligonucleotide
cuaaacuucggccagagcg

SEQ ID NO: 2496485 - RNA, 19 nt, Artificial Sequence
  Description of Artificial Sequence: Synthetic oligonucleotide
aaacaaauccaccauuguc

SEQ ID NO: 2496486 - RNA, 19 nt, Artificial Sequence
  Description of Artificial Sequence: Synthetic oligonucleotide
auuguacuguuucauagcc

SEQ ID NO: 2496487 - RNA, 19 nt, Artificial Sequence
  Description of Artificial Sequence: Synthetic oligonucleotide
aaagucaagguuugacacc

SEQ ID NO: 2496488 - RNA, 19 nt, Artificial Sequence
  Description of Artificial Sequence: Synthetic oligonucleotide
ucuauagcgaucacggaag

SEQ ID NO: 2496489 - RNA, 19 nt, Artificial Sequence
  Description of Artificial Sequence: Synthetic oligonucleotide
acgaguugaauguucaugg

SEQ ID NO: 2496490 - RNA, 19 nt, Artificial Sequence
  Description of Artificial Sequence: Synthetic oligonucleotide
aaacggaaaacaaauccac

SEQ ID NO: 2496491 - RNA, 19 nt, Artificial Sequence
  Description of Artificial Sequence: Synthetic oligonucleotide
acaccaacaguuuuccgcc

SEQ ID NO: 2496492 - RNA, 19 nt, Artificial Sequence
  Description of Artificial Sequence: Synthetic oligonucleotide
ucuucaacguuccaaacuc

SEQ ID NO: 2496493 - RNA, 19 nt, Artificial Sequence
  Description of Artificial Sequence: Synthetic oligonucleotide
gacaccaacaguuuuccgc

SEQ ID NO: 2496494 - RNA, 19 nt, Artificial Sequence
  Description of Artificial Sequence: Synthetic oligonucleotide
aguugaauguucaugggac

SEQ ID NO: 2496495 - RNA, 19 nt, Artificial Sequence
  Description of Artificial Sequence: Synthetic oligonucleotide
ucaauuugugaugugacga

SEQ ID NO: 2496496 - RNA, 19 nt, Artificial Sequence
  Description of Artificial Sequence: Synthetic oligonucleotide
aauuccuccgcagaaagcu

SEQ ID NO: 2496497 - RNA, 19 nt, Artificial Sequence
  Description of Artificial Sequence: Synthetic oligonucleotide
auagcgaucacggaagagg

SEQ ID NO: 2496498 - RNA, 19 nt, Artificial Sequence
  Description of Artificial Sequence: Synthetic oligonucleotide
aucaauuugugaugugacg

SEQ ID NO: 2496499 - RNA, 19 nt, Artificial Sequence
  Description of Artificial Sequence: Synthetic oligonucleotide
aacggaaaacaaauccacc

SEQ ID NO: 2496500 - RNA, 19 nt, Artificial Sequence
  Description of Artificial Sequence: Synthetic oligonucleotide
ugacacuccaaagucaagg

SEQ ID NO: 2496501 - RNA, 19 nt, Artificial Sequence
  Description of Artificial Sequence: Synthetic oligonucleotide
uguguaucaauuugugaug

SEQ ID NO: 2496502 - RNA, 19 nt, Artificial Sequence
  Description of Artificial Sequence: Synthetic oligonucleotide
uaucaauuugugaugugac

SEQ ID NO: 2496503 - RNA, 19 nt, Artificial Sequence
  Description of Artificial Sequence: Synthetic oligonucleotide
uuuuccgccggucuccacg

SEQ ID NO: 2496504 - RNA, 19 nt, Artificial Sequence
  Description of Artificial Sequence: Synthetic oligonucleotide
ucaagguuugacaccaaca

SEQ ID NO: 2496505 - RNA, 19 nt, Artificial Sequence
  Description of Artificial Sequence: Synthetic oligonucleotide
aguuguuucggccugcugu

SEQ ID NO: 2496506 - RNA, 19 nt, Artificial Sequence
  Description of Artificial Sequence: Synthetic oligonucleotide
acggaaaacaaauccacca

SEQ ID NO: 2496507 - RNA, 19 nt, Artificial Sequence
  Description of Artificial Sequence: Synthetic oligonucleotide
uugaauguucaugggacgg

SEQ ID NO: 2496508 - RNA, 19 nt, Artificial Sequence
  Description of Artificial Sequence: Synthetic oligonucleotide
uugucuggaaguuguuucg

SEQ ID NO: 2496509 - RNA, 19 nt, Artificial Sequence
  Description of Artificial Sequence: Synthetic oligonucleotide
uguuuaugcuuugugcagg

SEQ ID NO: 2496510 - RNA, 19 nt, Artificial Sequence
  Description of Artificial Sequence: Synthetic oligonucleotide
uucuucaacguuccaaacu

SEQ ID NO: 2496511 - RNA, 19 nt, Artificial Sequence
  Description of Artificial Sequence: Synthetic oligonucleotide
caacccucccucuauagcg

SEQ ID NO: 2496512 - RNA, 19 nt, Artificial Sequence
  Description of Artificial Sequence: Synthetic oligonucleotide
ucacggaagaggcuucugg

SEQ ID NO: 2496513 - RNA, 19 nt, Artificial Sequence
  Description of Artificial Sequence: Synthetic oligonucleotide
ucuaaagggacaccauugu

SEQ ID NO: 2496514 - RNA, 19 nt, Artificial Sequence
  Description of Artificial Sequence: Synthetic oligonucleotide
acaucugcugucccuaaac

SEQ ID NO: 2496515 - RNA, 19 nt, Artificial Sequence
  Description of Artificial Sequence: Synthetic oligonucleotide
uaaacuucggccagagcga

SEQ ID NO: 2496516 - RNA, 19 nt, Artificial Sequence
  Description of Artificial Sequence: Synthetic oligonucleotide
gccgcugucgaacagaucg

SEQ ID NO: 2496517 - RNA, 19 nt, Artificial Sequence
  Description of Artificial Sequence: Synthetic oligonucleotide
aauaucugcgucugacacu

SEQ ID NO: 2496518 - RNA, 19 nt, Artificial Sequence
  Description of Artificial Sequence: Synthetic oligonucleotide
gacaccauuguacuguuuc

SEQ ID NO: 2496519 - RNA, 19 nt, Artificial Sequence
  Description of Artificial Sequence: Synthetic oligonucleotide
auuguacgcauccagcugu

SEQ ID NO: 2496520 - RNA, 19 nt, Artificial Sequence
  Description of Artificial Sequence: Synthetic oligonucleotide
gggacggccaucuaaaggg

SEQ ID NO: 2496521 - RNA, 19 nt, Artificial Sequence
  Description of Artificial Sequence: Synthetic oligonucleotide
caacguuccaaacucugcg

SEQ ID NO: 2496522 - RNA, 19 nt, Artificial Sequence
  Description of Artificial Sequence: Synthetic oligonucleotide
uuugugaugugacgaguug

SEQ ID NO: 2496523 - RNA, 19 nt, Artificial Sequence
  Description of Artificial Sequence: Synthetic oligonucleotide
agagcgaucguagugcacg

SEQ ID NO: 2496524 - RNA, 19 nt, Artificial Sequence
  Description of Artificial Sequence: Synthetic oligonucleotide
uucaacguuccaaacucug

SEQ ID NO: 2496525 - RNA, 19 nt, Artificial Sequence
  Description of Artificial Sequence: Synthetic oligonucleotide
ucugacacuccaaagucaa

SEQ ID NO: 2496526 - RNA, 19 nt, Artificial Sequence
  Description of Artificial Sequence: Synthetic oligonucleotide
ugucccuaaacuucggcca

SEQ ID NO: 2496527 - RNA, 19 nt, Artificial Sequence
  Description of Artificial Sequence: Synthetic oligonucleotide
ugcauuguacgcauccagc

SEQ ID NO: 2496528 - RNA, 19 nt, Artificial Sequence
  Description of Artificial Sequence: Synthetic oligonucleotide
aagucaagguuugacacca

SEQ ID NO: 2496529 - RNA, 19 nt, Artificial Sequence
  Description of Artificial Sequence: Synthetic oligonucleotide
guugaauguucaugggacg

SEQ ID NO: 2496530 - RNA, 19 nt, Artificial Sequence
  Description of Artificial Sequence: Synthetic oligonucleotide
aacaguuuuccgccggucu

SEQ ID NO: 2496531 - RNA, 19 nt, Artificial Sequence
  Description of Artificial Sequence: Synthetic oligonucleotide
ucaacguuccaaacucugc

SEQ ID NO: 2496532 - RNA, 19 nt, Artificial Sequence
  Description of Artificial Sequence: Synthetic oligonucleotide
ugggacggccaucuaaagg

SEQ ID NO: 2496533 - RNA, 19 nt, Artificial Sequence
  Description of Artificial Sequence: Synthetic oligonucleotide
guuuaacugguguccaucc

SEQ ID NO: 2496534 - RNA, 19 nt, Artificial Sequence
  Description of Artificial Sequence: Synthetic oligonucleotide
ucuguguaucaauuuguga

SEQ ID NO: 2496535 - RNA, 19 nt, Artificial Sequence
  Description of Artificial Sequence: Synthetic oligonucleotide
acuucggccagagcgaucg

SEQ ID NO: 2496536 - RNA, 19 nt, Artificial Sequence
  Description of Artificial Sequence: Synthetic oligonucleotide
uguggauuugcucggcugu

SEQ ID NO: 2496537 - RNA, 19 nt, Artificial Sequence
  Description of Artificial Sequence: Synthetic oligonucleotide
caauuugugaugugacgag

SEQ ID NO: 2496538 - RNA, 19 nt, Artificial Sequence
  Description of Artificial Sequence: Synthetic oligonucleotide
cuuguguggauuugcucgg

SEQ ID NO: 2496539 - RNA, 19 nt, Artificial Sequence
  Description of Artificial Sequence: Synthetic oligonucleotide
uaacugguguccauccuug

SEQ ID NO: 2496540 - RNA, 19 nt, Artificial Sequence
  Description of Artificial Sequence: Synthetic oligonucleotide
ugaauaucugcgucugaca

SEQ ID NO: 2496541 - RNA, 19 nt, Artificial Sequence
  Description of Artificial Sequence: Synthetic oligonucleotide
agagccacgguuucuuguc

SEQ ID NO: 2496542 - RNA, 19 nt, Artificial Sequence
  Description of Artificial Sequence: Synthetic oligonucleotide
ugcgaagaguuccugaaua

SEQ ID NO: 2496543 - RNA, 19 nt, Artificial Sequence
  Description of Artificial Sequence: Synthetic oligonucleotide
aacguuccaaacucugcga

SEQ ID NO: 2496544 - RNA, 19 nt, Artificial Sequence
  Description of Artificial Sequence: Synthetic oligonucleotide
aagagaaacggaaaacaaa

SEQ ID NO: 2496545 - RNA, 19 nt, Artificial Sequence
  Description of Artificial Sequence: Synthetic oligonucleotide
ucggcuguuuaacuggugu

SEQ ID NO: 2496546 - RNA, 19 nt, Artificial Sequence
  Description of Artificial Sequence: Synthetic oligonucleotide
cugccuuccguucaaagug

SEQ ID NO: 2496547 - RNA, 19 nt, Artificial Sequence
  Description of Artificial Sequence: Synthetic oligonucleotide
auuugcucggcuguuuaac

SEQ ID NO: 2496548 - RNA, 19 nt, Artificial Sequence
  Description of Artificial Sequence: Synthetic oligonucleotide
gacgaguugaauguucaug

SEQ ID NO: 2496549 - RNA, 19 nt, Artificial Sequence
  Description of Artificial Sequence: Synthetic oligonucleotide
aauuugugaugugacgagu

SEQ ID NO: 2496550 - RNA, 19 nt, Artificial Sequence
  Description of Artificial Sequence: Synthetic oligonucleotide
gaguugaauguucauggga

SEQ ID NO: 2496551 - RNA, 19 nt, Artificial Sequence
  Description of Artificial Sequence: Synthetic oligonucleotide
gguccuguuacuugugugg

SEQ ID NO: 2496552 - RNA, 19 nt, Artificial Sequence
  Description of Artificial Sequence: Synthetic oligonucleotide
ugugacgaguugaauguuc

SEQ ID NO: 2496553 - RNA, 19 nt, Artificial Sequence
  Description of Artificial Sequence: Synthetic oligonucleotide
uuacuuguguggauuugcu

SEQ ID NO: 2496554 - RNA, 19 nt, Artificial Sequence
  Description of Artificial Sequence: Synthetic oligonucleotide
ucugcgaagaguuccugaa

SEQ ID NO: 2496555 - RNA, 19 nt, Artificial Sequence
  Description of Artificial Sequence: Synthetic oligonucleotide
cacggaagaggcuucuggg

SEQ ID NO: 2496556 - RNA, 19 nt, Artificial Sequence
  Description of Artificial Sequence: Synthetic oligonucleotide
ugucgaacagaucgugcug

SEQ ID NO: 2496557 - RNA, 19 nt, Artificial Sequence
  Description of Artificial Sequence: Synthetic oligonucleotide
ucggccagagcgaucguag

SEQ ID NO: 2496558 - RNA, 19 nt, Artificial Sequence
  Description of Artificial Sequence: Synthetic oligonucleotide
uccaaagucaagguuugac

SEQ ID NO: 2496559 - RNA, 19 nt, Artificial Sequence
  Description of Artificial Sequence: Synthetic oligonucleotide
uuuaacugguguccauccu

SEQ ID NO: 2496560 - RNA, 19 nt, Artificial Sequence
  Description of Artificial Sequence: Synthetic oligonucleotide
guuucggccugcuguaagg

SEQ ID NO: 2496561 - RNA, 19 nt, Artificial Sequence
  Description of Artificial Sequence: Synthetic oligonucleotide
uguuucggccugcuguaag

SEQ ID NO: 2496562 - RNA, 19 nt, Artificial Sequence
  Description of Artificial Sequence: Synthetic oligonucleotide
aguuccugaauaucugcgu

SEQ ID NO: 2496563 - RNA, 19 nt, Artificial Sequence
  Description of Artificial Sequence: Synthetic oligonucleotide
gaucguagugcacggcugc

SEQ ID NO: 2496564 - RNA, 19 nt, Artificial Sequence
  Description of Artificial Sequence: Synthetic oligonucleotide
uggaaguuguuucggccug

SEQ ID NO: 2496565 - RNA, 19 nt, Artificial Sequence
  Description of Artificial Sequence: Synthetic oligonucleotide
aucuaaagggacaccauug

SEQ ID NO: 2496566 - RNA, 19 nt, Artificial Sequence
  Description of Artificial Sequence: Synthetic oligonucleotide
cucuguguaucaauuugug

SEQ ID NO: 2496567 - RNA, 19 nt, Artificial Sequence
  Description of Artificial Sequence: Synthetic oligonucleotide
guuacuuguguggauuugc

SEQ ID NO: 2496568 - RNA, 19 nt, Artificial Sequence
  Description of Artificial Sequence: Synthetic oligonucleotide
uguaucaauuugugaugug

SEQ ID NO: 2496569 - RNA, 19 nt, Artificial Sequence
  Description of Artificial Sequence: Synthetic oligonucleotide
uuccuccgcagaaagcugc

SEQ ID NO: 2496570 - RNA, 19 nt, Artificial Sequence
  Description of Artificial Sequence: Synthetic oligonucleotide
guaucaauuugugauguga

SEQ ID NO: 2496571 - RNA, 19 nt, Artificial Sequence
  Description of Artificial Sequence: Synthetic oligonucleotide
uuugcucggcuguuuaacu

SEQ ID NO: 2496572 - RNA, 19 nt, Artificial Sequence
  Description of Artificial Sequence: Synthetic oligonucleotide
cugaauaucugcgucugac

SEQ ID NO: 2496573 - RNA, 19 nt, Artificial Sequence
  Description of Artificial Sequence: Synthetic oligonucleotide
ugucuggaaguuguuucgg

SEQ ID NO: 2496574 - RNA, 19 nt, Artificial Sequence
  Description of Artificial Sequence: Synthetic oligonucleotide
uuccugaauaucugcgucu

SEQ ID NO: 2496575 - RNA, 19 nt, Artificial Sequence
  Description of Artificial Sequence: Synthetic oligonucleotide
accaacaguuuuccgccgg

SEQ ID NO: 2496576 - RNA, 19 nt, Artificial Sequence
  Description of Artificial Sequence: Synthetic oligonucleotide
ucaugggacggccaucuaa

SEQ ID NO: 2496577 - RNA, 19 nt, Artificial Sequence
  Description of Artificial Sequence: Synthetic oligonucleotide
uuucuucaacguuccaaac

SEQ ID NO: 2496578 - RNA, 19 nt, Artificial Sequence
  Description of Artificial Sequence: Synthetic oligonucleotide
uuguacuguuucauagccu

SEQ ID NO: 2496579 - RNA, 19 nt, Artificial Sequence
  Description of Artificial Sequence: Synthetic oligonucleotide
ugaauguucaugggacggc

SEQ ID NO: 2496580 - RNA, 19 nt, Artificial Sequence
  Description of Artificial Sequence: Synthetic oligonucleotide
ucccucuauagcgaucacg

SEQ ID NO: 2496581 - RNA, 19 nt, Artificial Sequence
  Description of Artificial Sequence: Synthetic oligonucleotide
uugugaugugacgaguuga

SEQ ID NO: 2496582 - RNA, 19 nt, Artificial Sequence
  Description of Artificial Sequence: Synthetic oligonucleotide
aagggacaccauuguacug

SEQ ID NO: 2496583 - RNA, 19 nt, Artificial Sequence
  Description of Artificial Sequence: Synthetic oligonucleotide
uguuuaacugguguccauc

SEQ ID NO: 2496584 - RNA, 19 nt, Artificial Sequence
  Description of Artificial Sequence: Synthetic oligonucleotide
ugccuuccguucaaagugc

SEQ ID NO: 2496585 - RNA, 19 nt, Artificial Sequence
  Description of Artificial Sequence: Synthetic oligonucleotide
agaucgugcugccauuugu

SEQ ID NO: 2496586 - RNA, 19 nt, Artificial Sequence
  Description of Artificial Sequence: Synthetic oligonucleotide
cauuguacgcauccagcug

SEQ ID NO: 2496587 - RNA, 19 nt, Artificial Sequence
  Description of Artificial Sequence: Synthetic oligonucleotide
uauagcgaucacggaagag

SEQ ID NO: 2496588 - RNA, 19 nt, Artificial Sequence
  Description of Artificial Sequence: Synthetic oligonucleotide
cucuauagcgaucacggaa

SEQ ID NO: 2496589 - RNA, 19 nt, Artificial Sequence
  Description of Artificial Sequence: Synthetic oligonucleotide
aaguuccagagccacgguu

SEQ ID NO: 2496590 - RNA, 19 nt, Artificial Sequence
  Description of Artificial Sequence: Synthetic oligonucleotide
cuccgcagaaagcugcugc

SEQ ID NO: 2496591 - RNA, 19 nt, Artificial Sequence
  Description of Artificial Sequence: Synthetic oligonucleotide
acgguuucuugucaugcca

SEQ ID NO: 2496592 - RNA, 19 nt, Artificial Sequence
  Description of Artificial Sequence: Synthetic oligonucleotide
uccugaauaucugcgucug

SEQ ID NO: 2496593 - RNA, 19 nt, Artificial Sequence
  Description of Artificial Sequence: Synthetic oligonucleotide
aaaguuccagagccacggu

SEQ ID NO: 2496594 - RNA, 19 nt, Artificial Sequence
  Description of Artificial Sequence: Synthetic oligonucleotide
agggacaccauuguacugu

SEQ ID NO: 2496595 - RNA, 19 nt, Artificial Sequence
  Description of Artificial Sequence: Synthetic oligonucleotide
uguuacuuguguggauuug

SEQ ID NO: 2496596 - RNA, 19 nt, Artificial Sequence
  Description of Artificial Sequence: Synthetic oligonucleotide
uuccguucaaagugcacau

SEQ ID NO: 2496597 - RNA, 19 nt, Artificial Sequence
  Description of Artificial Sequence: Synthetic oligonucleotide
caauuccuccgcagaaagc

SEQ ID NO: 2496598 - RNA, 19 nt, Artificial Sequence
  Description of Artificial Sequence: Synthetic oligonucleotide
gagcgaucguagugcacgg

SEQ ID NO: 2496599 - RNA, 19 nt, Artificial Sequence
  Description of Artificial Sequence: Synthetic oligonucleotide
gucgaacagaucgugcugc

SEQ ID NO: 2496600 - RNA, 19 nt, Artificial Sequence
  Description of Artificial Sequence: Synthetic oligonucleotide
gcuguaaggagccggccgg

SEQ ID NO: 2496601 - RNA, 19 nt, Artificial Sequence
  Description of Artificial Sequence: Synthetic oligonucleotide
uacgcauccagcugugcau

SEQ ID NO: 2496602 - RNA, 19 nt, Artificial Sequence
  Description of Artificial Sequence: Synthetic oligonucleotide
uccaguugccaacccuccc

SEQ ID NO: 2496603 - RNA, 19 nt, Artificial Sequence
  Description of Artificial Sequence: Synthetic oligonucleotide
gucaagguuugacaccaac

SEQ ID NO: 2496604 - RNA, 19 nt, Artificial Sequence
  Description of Artificial Sequence: Synthetic oligonucleotide
cacgguuucuugucaugcc

SEQ ID NO: 2496605 - RNA, 19 nt, Artificial Sequence
  Description of Artificial Sequence: Synthetic oligonucleotide
caaauccaccauugucugc

SEQ ID NO: 2496606 - RNA, 19 nt, Artificial Sequence
  Description of Artificial Sequence: Synthetic oligonucleotide
uuuccgccggucuccacgc

SEQ ID NO: 2496607 - RNA, 19 nt, Artificial Sequence
  Description of Artificial Sequence: Synthetic oligonucleotide
cuuccguucaaagugcaca

SEQ ID NO: 2496608 - RNA, 19 nt, Artificial Sequence
  Description of Artificial Sequence: Synthetic oligonucleotide
uucggccugcuguaaggag

SEQ ID NO: 2496609 - RNA, 19 nt, Artificial Sequence
  Description of Artificial Sequence: Synthetic oligonucleotide
aucgugcugccauuugucu

SEQ ID NO: 2496610 - RNA, 19 nt, Artificial Sequence
  Description of Artificial Sequence: Synthetic oligonucleotide
uccgcagaaagcugcugcu

SEQ ID NO: 2496611 - RNA, 19 nt, Artificial Sequence
  Description of Artificial Sequence: Synthetic oligonucleotide
acggaagaggcuucugggu

SEQ ID NO: 2496612 - RNA, 19 nt, Artificial Sequence
  Description of Artificial Sequence: Synthetic oligonucleotide
gucuggaaguuguuucggc

SEQ ID NO: 2496613 - RNA, 19 nt, Artificial Sequence
  Description of Artificial Sequence: Synthetic oligonucleotide
ucgaacagaucgugcugcc

SEQ ID NO: 2496614 - RNA, 19 nt, Artificial Sequence
  Description of Artificial Sequence: Synthetic oligonucleotide
aggucuucucuguguauca

SEQ ID NO: 2496615 - RNA, 19 nt, Artificial Sequence
  Description of Artificial Sequence: Synthetic oligonucleotide
uccaaacucugcgaagagu

SEQ ID NO: 2496616 - RNA, 19 nt, Artificial Sequence
  Description of Artificial Sequence: Synthetic oligonucleotide
ugcugucccuaaacuucgg

SEQ ID NO: 2496617 - RNA, 19 nt, Artificial Sequence
  Description of Artificial Sequence: Synthetic oligonucleotide
guguggauuugcucggcug

SEQ ID NO: 2496618 - RNA, 19 nt, Artificial Sequence
  Description of Artificial Sequence: Synthetic oligonucleotide
ugcaguccaguugccaacc

SEQ ID NO: 2496619 - RNA, 19 nt, Artificial Sequence
  Description of Artificial Sequence: Synthetic oligonucleotide
gucccuaaacuucggccag

SEQ ID NO: 2496620 - RNA, 19 nt, Artificial Sequence
  Description of Artificial Sequence: Synthetic oligonucleotide
uuguacgcauccagcugug

SEQ ID NO: 2496621 - RNA, 19 nt, Artificial Sequence
  Description of Artificial Sequence: Synthetic oligonucleotide
ccuugcauuguacgcaucc

SEQ ID NO: 2496622 - RNA, 19 nt, Artificial Sequence
  Description of Artificial Sequence: Synthetic oligonucleotide
acguuccaaacucugcgaa

SEQ ID NO: 2496623 - RNA, 19 nt, Artificial Sequence
  Description of Artificial Sequence: Synthetic oligonucleotide
aacagaucgugcugccauu

SEQ ID NO: 2496624 - RNA, 19 nt, Artificial Sequence
  Description of Artificial Sequence: Synthetic oligonucleotide
acuccaaagucaagguuug

SEQ ID NO: 2496625 - RNA, 19 nt, Artificial Sequence
  Description of Artificial Sequence: Synthetic oligonucleotide
aacucugcgaagaguuccu

SEQ ID NO: 2496626 - RNA, 19 nt, Artificial Sequence
  Description of Artificial Sequence: Synthetic oligonucleotide
ggcuguuuaacuggugucc

SEQ ID NO: 2496627 - RNA, 19 nt, Artificial Sequence
  Description of Artificial Sequence: Synthetic oligonucleotide
cuccacgccggcuccaccc

SEQ ID NO: 2496628 - RNA, 19 nt, Artificial Sequence
  Description of Artificial Sequence: Synthetic oligonucleotide
gaucgugcugccauuuguc

SEQ ID NO: 2496629 - RNA, 19 nt, Artificial Sequence
  Description of Artificial Sequence: Synthetic oligonucleotide
guacgcauccagcugugca

SEQ ID NO: 2496630 - RNA, 19 nt, Artificial Sequence
  Description of Artificial Sequence: Synthetic oligonucleotide
aggcccgccgccucgguuc

SEQ ID NO: 2496631 - RNA, 19 nt, Artificial Sequence
  Description of Artificial Sequence: Synthetic oligonucleotide
gguuucuugucaugccacc

SEQ ID NO: 2496632 - RNA, 19 nt, Artificial Sequence
  Description of Artificial Sequence: Synthetic oligonucleotide
gaacagaucgugcugccau

SEQ ID NO: 2496633 - RNA, 19 nt, Artificial Sequence
  Description of Artificial Sequence: Synthetic oligonucleotide
caugggacggccaucuaaa

SEQ ID NO: 2496634 - RNA, 19 nt, Artificial Sequence
  Description of Artificial Sequence: Synthetic oligonucleotide
auagccuucagggcaucug

SEQ ID NO: 2496635 - RNA, 19 nt, Artificial Sequence
  Description of Artificial Sequence: Synthetic oligonucleotide
auuugucuggaaguuguuu

SEQ ID NO: 2496636 - RNA, 19 nt, Artificial Sequence
  Description of Artificial Sequence: Synthetic oligonucleotide
uuucggccugcuguaagga

SEQ ID NO: 2496637 - RNA, 19 nt, Artificial Sequence
  Description of Artificial Sequence: Synthetic oligonucleotide
ugcuuugugcaggucuucu

SEQ ID NO: 2496638 - RNA, 19 nt, Artificial Sequence
  Description of Artificial Sequence: Synthetic oligonucleotide
accacgggugccucuccgg

SEQ ID NO: 2496639 - RNA, 19 nt, Artificial Sequence
  Description of Artificial Sequence: Synthetic oligonucleotide
cauccuugcauuguacgca

SEQ ID NO: 2496640 - RNA, 19 nt, Artificial Sequence
  Description of Artificial Sequence: Synthetic oligonucleotide
auuugugaugugacgaguu

SEQ ID NO: 2496641 - RNA, 19 nt, Artificial Sequence
  Description of Artificial Sequence: Synthetic oligonucleotide
aaacuucggccagagcgau

SEQ ID NO: 2496642 - RNA, 19 nt, Artificial Sequence
  Description of Artificial Sequence: Synthetic oligonucleotide
gauuugcucggcuguuuaa

SEQ ID NO: 2496643 - RNA, 19 nt, Artificial Sequence
  Description of Artificial Sequence: Synthetic oligonucleotide
acgggugccucuccgggug

SEQ ID NO: 2496644 - RNA, 19 nt, Artificial Sequence
  Description of Artificial Sequence: Synthetic oligonucleotide
ccaaagucaagguuugaca

SEQ ID NO: 2496645 - RNA, 19 nt, Artificial Sequence
  Description of Artificial Sequence: Synthetic oligonucleotide
gggccgguuccucagaggc

SEQ ID NO: 2496646 - RNA, 19 nt, Artificial Sequence
  Description of Artificial Sequence: Synthetic oligonucleotide
caccaacaguuuuccgccg

SEQ ID NO: 2496647 - RNA, 19 nt, Artificial Sequence
  Description of Artificial Sequence: Synthetic oligonucleotide
caggucuucucuguguauc

SEQ ID NO: 2496648 - RNA, 19 nt, Artificial Sequence
  Description of Artificial Sequence: Synthetic oligonucleotide
cacuccaaagucaagguuu

SEQ ID NO: 2496649 - RNA, 19 nt, Artificial Sequence
  Description of Artificial Sequence: Synthetic oligonucleotide
guuguuucggccugcugua

SEQ ID NO: 2496650 - RNA, 19 nt, Artificial Sequence
  Description of Artificial Sequence: Synthetic oligonucleotide
gugacgaguugaauguuca

SEQ ID NO: 2496651 - RNA, 19 nt, Artificial Sequence
  Description of Artificial Sequence: Synthetic oligonucleotide
agcgaucguagugcacggc

SEQ ID NO: 2496652 - RNA, 19 nt, Artificial Sequence
  Description of Artificial Sequence: Synthetic oligonucleotide
uugccaacccucccucuau

SEQ ID NO: 2496653 - RNA, 19 nt, Artificial Sequence
  Description of Artificial Sequence: Synthetic oligonucleotide
aguuccagagccacgguuu

SEQ ID NO: 2496654 - RNA, 19 nt, Artificial Sequence
  Description of Artificial Sequence: Synthetic oligonucleotide
ugacgaguugaauguucau

SEQ ID NO: 2496655 - RNA, 19 nt, Artificial Sequence
  Description of Artificial Sequence: Synthetic oligonucleotide
accauugucugcaguccag

SEQ ID NO: 2496656 - RNA, 19 nt, Artificial Sequence
  Description of Artificial Sequence: Synthetic oligonucleotide
guaaggagccggccgguuc

SEQ ID NO: 2496657 - RNA, 19 nt, Artificial Sequence
  Description of Artificial Sequence: Synthetic oligonucleotide
aacccucccucuauagcga

SEQ ID NO: 2496658 - RNA, 19 nt, Artificial Sequence
  Description of Artificial Sequence: Synthetic oligonucleotide
uccuccgcagaaagcugcu

SEQ ID NO: 2496659 - RNA, 19 nt, Artificial Sequence
  Description of Artificial Sequence: Synthetic oligonucleotide
cuaaagggacaccauugua

SEQ ID NO: 2496660 - RNA, 19 nt, Artificial Sequence
  Description of Artificial Sequence: Synthetic oligonucleotide
guuccugccgccggcggcg

SEQ ID NO: 2496661 - RNA, 19 nt, Artificial Sequence
  Description of Artificial Sequence: Synthetic oligonucleotide
cugucgaacagaucgugcu

SEQ ID NO: 2496662 - RNA, 19 nt, Artificial Sequence
  Description of Artificial Sequence: Synthetic oligonucleotide
guuuaugcuuugugcaggu

SEQ ID NO: 2496663 - RNA, 19 nt, Artificial Sequence
  Description of Artificial Sequence: Synthetic oligonucleotide
ugguguccauccuugcauu

SEQ ID NO: 2496664 - RNA, 19 nt, Artificial Sequence
  Description of Artificial Sequence: Synthetic oligonucleotide
uccuguuacuuguguggau

SEQ ID NO: 2496665 - RNA, 19 nt, Artificial Sequence
  Description of Artificial Sequence: Synthetic oligonucleotide
uuuaugcuuugugcagguc

SEQ ID NO: 2496666 - RNA, 19 nt, Artificial Sequence
  Description of Artificial Sequence: Synthetic oligonucleotide
guguaucaauuugugaugu

SEQ ID NO: 2496667 - RNA, 19 nt, Artificial Sequence
  Description of Artificial Sequence: Synthetic oligonucleotide
gccagagcgaucguagugc

SEQ ID NO: 2496668 - RNA, 19 nt, Artificial Sequence
  Description of Artificial Sequence: Synthetic oligonucleotide
uguacgcauccagcugugc

SEQ ID NO: 2496669 - RNA, 19 nt, Artificial Sequence
  Description of Artificial Sequence: Synthetic oligonucleotide
cuggaaguuguuucggccu

SEQ ID NO: 2496670 - RNA, 19 nt, Artificial Sequence
  Description of Artificial Sequence: Synthetic oligonucleotide
guuccagagccacgguuuc

SEQ ID NO: 2496671 - RNA, 19 nt, Artificial Sequence
  Description of Artificial Sequence: Synthetic oligonucleotide
accaaaaguuccagagcca

SEQ ID NO: 2496672 - RNA, 19 nt, Artificial Sequence
  Description of Artificial Sequence: Synthetic oligonucleotide
cacggcugcuuucuucaac

SEQ ID NO: 2496673 - RNA, 19 nt, Artificial Sequence
  Description of Artificial Sequence: Synthetic oligonucleotide
ggcgccgcgagagauggcg

SEQ ID NO: 2496674 - RNA, 19 nt, Artificial Sequence
  Description of Artificial Sequence: Synthetic oligonucleotide
gagccggccgguuccugcc

SEQ ID NO: 2496675 - RNA, 19 nt, Artificial Sequence
  Description of Artificial Sequence: Synthetic oligonucleotide
ggguccuguuacuugugug

SEQ ID NO: 2496676 - RNA, 19 nt, Artificial Sequence
  Description of Artificial Sequence: Synthetic oligonucleotide
cuugcauuguacgcaucca

SEQ ID NO: 2496677 - RNA, 19 nt, Artificial Sequence
  Description of Artificial Sequence: Synthetic oligonucleotide
cugccauuugucuggaagu

SEQ ID NO: 2496678 - RNA, 19 nt, Artificial Sequence
  Description of Artificial Sequence: Synthetic oligonucleotide
aacuucggccagagcgauc

SEQ ID NO: 2496679 - RNA, 19 nt, Artificial Sequence
  Description of Artificial Sequence: Synthetic oligonucleotide
uguucaugggacggccauc

SEQ ID NO: 2496680 - RNA, 19 nt, Artificial Sequence
  Description of Artificial Sequence: Synthetic oligonucleotide
augcuuugugcaggucuuc

SEQ ID NO: 2496681 - RNA, 19 nt, Artificial Sequence
  Description of Artificial Sequence: Synthetic oligonucleotide
cagaucgugcugccauuug

SEQ ID NO: 2496682 - RNA, 19 nt, Artificial Sequence
  Description of Artificial Sequence: Synthetic oligonucleotide
auuccuccgcagaaagcug

SEQ ID NO: 2496683 - RNA, 19 nt, Artificial Sequence
  Description of Artificial Sequence: Synthetic oligonucleotide
caguugccaacccucccuc

SEQ ID NO: 2496684 - RNA, 19 nt, Artificial Sequence
  Description of Artificial Sequence: Synthetic oligonucleotide
agaggcuucuggguccugu

SEQ ID NO: 2496685 - RNA, 19 nt, Artificial Sequence
  Description of Artificial Sequence: Synthetic oligonucleotide
gagccacgguuucuuguca

SEQ ID NO: 2496686 - RNA, 19 nt, Artificial Sequence
  Description of Artificial Sequence: Synthetic oligonucleotide
ucuccacgccggcuccacc

SEQ ID NO: 2496687 - RNA, 19 nt, Artificial Sequence
  Description of Artificial Sequence: Synthetic oligonucleotide
guccuguuacuugugugga

SEQ ID NO: 2496688 - RNA, 19 nt, Artificial Sequence
  Description of Artificial Sequence: Synthetic oligonucleotide
caccacgggugccucuccg

SEQ ID NO: 2496689 - RNA, 19 nt, Artificial Sequence
  Description of Artificial Sequence: Synthetic oligonucleotide
agccacgguuucuugucau

SEQ ID NO: 2496690 - RNA, 19 nt, Artificial Sequence
  Description of Artificial Sequence: Synthetic oligonucleotide
cucggcuguuuaacuggug

SEQ ID NO: 2496691 - RNA, 19 nt, Artificial Sequence
  Description of Artificial Sequence: Synthetic oligonucleotide
cuggguccuguuacuugug

SEQ ID NO: 2496692 - RNA, 19 nt, Artificial Sequence
  Description of Artificial Sequence: Synthetic oligonucleotide
uccguucaaagugcacauc

SEQ ID NO: 2496693 - RNA, 19 nt, Artificial Sequence
  Description of Artificial Sequence: Synthetic oligonucleotide
uggcgggccgguuccucag

SEQ ID NO: 2496694 - RNA, 19 nt, Artificial Sequence
  Description of Artificial Sequence: Synthetic oligonucleotide
ccaacccucccucuauagc

SEQ ID NO: 2496695 - RNA, 19 nt, Artificial Sequence
  Description of Artificial Sequence: Synthetic oligonucleotide
guugccaacccucccucua

SEQ ID NO: 2496696 - RNA, 19 nt, Artificial Sequence
  Description of Artificial Sequence: Synthetic oligonucleotide
gcauuguacgcauccagcu

SEQ ID NO: 2496697 - RNA, 19 nt, Artificial Sequence
  Description of Artificial Sequence: Synthetic oligonucleotide
caccauugucugcagucca

SEQ ID NO: 2496698 - RNA, 19 nt, Artificial Sequence
  Description of Artificial Sequence: Synthetic oligonucleotide
gccgguuccucagaggccc

SEQ ID NO: 2496699 - RNA, 19 nt, Artificial Sequence
  Description of Artificial Sequence: Synthetic oligonucleotide
ucuccgggugccgccacca

SEQ ID NO: 2496700 - RNA, 19 nt, Artificial Sequence
  Description of Artificial Sequence: Synthetic oligonucleotide
gccaacccucccucuauag

SEQ ID NO: 2496701 - RNA, 19 nt, Artificial Sequence
  Description of Artificial Sequence: Synthetic oligonucleotide
ucccuaaacuucggccaga

SEQ ID NO: 2496702 - RNA, 19 nt, Artificial Sequence
  Description of Artificial Sequence: Synthetic oligonucleotide
guagugcacggcugcuuuc

SEQ ID NO: 2496703 - RNA, 19 nt, Artificial Sequence
  Description of Artificial Sequence: Synthetic oligonucleotide
guucaugggacggccaucu

SEQ ID NO: 2496704 - RNA, 19 nt, Artificial Sequence
  Description of Artificial Sequence: Synthetic oligonucleotide
cagagcgaucguagugcac

SEQ ID NO: 2496705 - RNA, 19 nt, Artificial Sequence
  Description of Artificial Sequence: Synthetic oligonucleotide
ugccaacccucccucuaua

SEQ ID NO: 2496706 - RNA, 19 nt, Artificial Sequence
  Description of Artificial Sequence: Synthetic oligonucleotide
uccuugcauuguacgcauc

SEQ ID NO: 2496707 - RNA, 19 nt, Artificial Sequence
  Description of Artificial Sequence: Synthetic oligonucleotide
ccacgguuucuugucaugc

SEQ ID NO: 2496708 - RNA, 19 nt, Artificial Sequence
  Description of Artificial Sequence: Synthetic oligonucleotide
caucuaaagggacaccauu

SEQ ID NO: 2496709 - RNA, 19 nt, Artificial Sequence
  Description of Artificial Sequence: Synthetic oligonucleotide
ucaugccaccucuguuuau

SEQ ID NO: 2496710 - RNA, 19 nt, Artificial Sequence
  Description of Artificial Sequence: Synthetic oligonucleotide
acagaucgugcugccauuu

SEQ ID NO: 2496711 - RNA, 19 nt, Artificial Sequence
  Description of Artificial Sequence: Synthetic oligonucleotide
aucacggaagaggcuucug

SEQ ID NO: 2496712 - RNA, 19 nt, Artificial Sequence
  Description of Artificial Sequence: Synthetic oligonucleotide
gcugucgaacagaucgugc

SEQ ID NO: 2496713 - RNA, 19 nt, Artificial Sequence
  Description of Artificial Sequence: Synthetic oligonucleotide
gccgccucgguucacccgc

SEQ ID NO: 2496714 - RNA, 19 nt, Artificial Sequence
  Description of Artificial Sequence: Synthetic oligonucleotide
acucugcgaagaguuccug

SEQ ID NO: 2496715 - RNA, 19 nt, Artificial Sequence
  Description of Artificial Sequence: Synthetic oligonucleotide
uucggccagagcgaucgua

SEQ ID NO: 2496716 - RNA, 19 nt, Artificial Sequence
  Description of Artificial Sequence: Synthetic oligonucleotide
uggauuugcucggcuguuu

SEQ ID NO: 2496717 - RNA, 19 nt, Artificial Sequence
  Description of Artificial Sequence: Synthetic oligonucleotide
aguuuuccgccggucucca

SEQ ID NO: 2496718 - RNA, 19 nt, Artificial Sequence
  Description of Artificial Sequence: Synthetic oligonucleotide
guacuguuucauagccuuc

SEQ ID NO: 2496719 - RNA, 19 nt, Artificial Sequence
  Description of Artificial Sequence: Synthetic oligonucleotide
cugcuguaaggagccggcc

SEQ ID NO: 2496720 - RNA, 19 nt, Artificial Sequence
  Description of Artificial Sequence: Synthetic oligonucleotide
caacaguuuuccgccgguc

SEQ ID NO: 2496721 - RNA, 19 nt, Artificial Sequence
  Description of Artificial Sequence: Synthetic oligonucleotide
cuucaacguuccaaacucu

SEQ ID NO: 2496722 - RNA, 19 nt, Artificial Sequence
  Description of Artificial Sequence: Synthetic oligonucleotide
gcuguuuaacuggugucca

SEQ ID NO: 2496723 - RNA, 19 nt, Artificial Sequence
  Description of Artificial Sequence: Synthetic oligonucleotide
ggugccgccaccaccaaaa

SEQ ID NO: 2496724 - RNA, 19 nt, Artificial Sequence
  Description of Artificial Sequence: Synthetic oligonucleotide
aucguagugcacggcugcu

SEQ ID NO: 2496725 - RNA, 19 nt, Artificial Sequence
  Description of Artificial Sequence: Synthetic oligonucleotide
gcgucugacacuccaaagu

SEQ ID NO: 2496726 - RNA, 19 nt, Artificial Sequence
  Description of Artificial Sequence: Synthetic oligonucleotide
cguuccaaacucugcgaag

SEQ ID NO: 2496727 - RNA, 19 nt, Artificial Sequence
  Description of Artificial Sequence: Synthetic oligonucleotide
agccggccgguuccugccg

SEQ ID NO: 2496728 - RNA, 19 nt, Artificial Sequence
  Description of Artificial Sequence: Synthetic oligonucleotide
cugcgucugacacuccaaa

SEQ ID NO: 2496729 - RNA, 19 nt, Artificial Sequence
  Description of Artificial Sequence: Synthetic oligonucleotide
ccaccauugucugcagucc

SEQ ID NO: 2496730 - RNA, 19 nt, Artificial Sequence
  Description of Artificial Sequence: Synthetic oligonucleotide
uuguuucggccugcuguaa

SEQ ID NO: 2496731 - RNA, 19 nt, Artificial Sequence
  Description of Artificial Sequence: Synthetic oligonucleotide
uucaugggacggccaucua

SEQ ID NO: 2496732 - RNA, 19 nt, Artificial Sequence
  Description of Artificial Sequence: Synthetic oligonucleotide
gugccgccaccaccaaaag

SEQ ID NO: 2496733 - RNA, 19 nt, Artificial Sequence
  Description of Artificial Sequence: Synthetic oligonucleotide
gcuuugugcaggucuucuc

SEQ ID NO: 2496734 - RNA, 19 nt, Artificial Sequence
  Description of Artificial Sequence: Synthetic oligonucleotide
ggaaguuguuucggccugc

SEQ ID NO: 2496735 - RNA, 19 nt, Artificial Sequence
  Description of Artificial Sequence: Synthetic oligonucleotide
ggagccggccgguuccugc

SEQ ID NO: 2496736 - RNA, 19 nt, Artificial Sequence
  Description of Artificial Sequence: Synthetic oligonucleotide
acccucccucuauagcgau

SEQ ID NO: 2496737 - RNA, 19 nt, Artificial Sequence
  Description of Artificial Sequence: Synthetic oligonucleotide
gccacgguuucuugucaug

SEQ ID NO: 2496738 - RNA, 19 nt, Artificial Sequence
  Description of Artificial Sequence: Synthetic oligonucleotide
agcgaucacggaagaggcu

SEQ ID NO: 2496739 - RNA, 19 nt, Artificial Sequence
  Description of Artificial Sequence: Synthetic oligonucleotide
aaggagccggccgguuccu

SEQ ID NO: 2496740 - RNA, 19 nt, Artificial Sequence
  Description of Artificial Sequence: Synthetic oligonucleotide
cucagaggcccgccgccuc

SEQ ID NO: 2496741 - RNA, 19 nt, Artificial Sequence
  Description of Artificial Sequence: Synthetic oligonucleotide
augugacgaguugaauguu

SEQ ID NO: 2496742 - RNA, 19 nt, Artificial Sequence
  Description of Artificial Sequence: Synthetic oligonucleotide
ucguagugcacggcugcuu

SEQ ID NO: 2496743 - RNA, 19 nt, Artificial Sequence
  Description of Artificial Sequence: Synthetic oligonucleotide
cgguuucuugucaugccac

SEQ ID NO: 2496744 - RNA, 19 nt, Artificial Sequence
  Description of Artificial Sequence: Synthetic oligonucleotide
ccacgggugccucuccggg

SEQ ID NO: 2496745 - RNA, 19 nt, Artificial Sequence
  Description of Artificial Sequence: Synthetic oligonucleotide
ccuaaacuucggccagagc

SEQ ID NO: 2496746 - RNA, 19 nt, Artificial Sequence
  Description of Artificial Sequence: Synthetic oligonucleotide
guuucugcuggcaccucua

SEQ ID NO: 2496747 - RNA, 19 nt, Artificial Sequence
  Description of Artificial Sequence: Synthetic oligonucleotide
gaucacggaagaggcuucu

SEQ ID NO: 2496748 - RNA, 19 nt, Artificial Sequence
  Description of Artificial Sequence: Synthetic oligonucleotide
gcggcgccgcgagagaugg

SEQ ID NO: 2496749 - RNA, 19 nt, Artificial Sequence
  Description of Artificial Sequence: Synthetic oligonucleotide
gcaguccaguugccaaccc

SEQ ID NO: 2496750 - RNA, 19 nt, Artificial Sequence
  Description of Artificial Sequence: Synthetic oligonucleotide
gaagaggcuucuggguccu

SEQ ID NO: 2496751 - RNA, 19 nt, Artificial Sequence
  Description of Artificial Sequence: Synthetic oligonucleotide
cccuaaacuucggccagag

SEQ ID NO: 2496752 - RNA, 19 nt, Artificial Sequence
  Description of Artificial Sequence: Synthetic oligonucleotide
gauggcgggccgguuccuc

SEQ ID NO: 2496753 - RNA, 19 nt, Artificial Sequence
  Description of Artificial Sequence: Synthetic oligonucleotide
ccucccucuauagcgauca

SEQ ID NO: 2496754 - RNA, 19 nt, Artificial Sequence
  Description of Artificial Sequence: Synthetic oligonucleotide
cuguuacuuguguggauuu

SEQ ID NO: 2496755 - RNA, 19 nt, Artificial Sequence
  Description of Artificial Sequence: Synthetic oligonucleotide
gugcacaucugcugucccu

SEQ ID NO: 2496756 - RNA, 19 nt, Artificial Sequence
  Description of Artificial Sequence: Synthetic oligonucleotide
cgaucguagugcacggcug

SEQ ID NO: 2496757 - RNA, 19 nt, Artificial Sequence
  Description of Artificial Sequence: Synthetic oligonucleotide
cacaucugcugucccuaaa

SEQ ID NO: 2496758 - RNA, 19 nt, Artificial Sequence
  Description of Artificial Sequence: Synthetic oligonucleotide
gcgaucguagugcacggcu

SEQ ID NO: 2496759 - RNA, 19 nt, Artificial Sequence
  Description of Artificial Sequence: Synthetic oligonucleotide
cucccucuauagcgaucac

SEQ ID NO: 2496760 - RNA, 19 nt, Artificial Sequence
  Description of Artificial Sequence: Synthetic oligonucleotide
cagaggcccgccgccucgg

SEQ ID NO: 2496761 - RNA, 19 nt, Artificial Sequence
  Description of Artificial Sequence: Synthetic oligonucleotide
gcgaagaguuccugaauau

SEQ ID NO: 2496762 - RNA, 19 nt, Artificial Sequence
  Description of Artificial Sequence: Synthetic oligonucleotide
cuguuuaacugguguccau

SEQ ID NO: 2496763 - RNA, 19 nt, Artificial Sequence
  Description of Artificial Sequence: Synthetic oligonucleotide
gcgagagauggcgggccgg

SEQ ID NO: 2496764 - RNA, 19 nt, Artificial Sequence
  Description of Artificial Sequence: Synthetic oligonucleotide
ccagagccacgguuucuug

SEQ ID NO: 2496765 - RNA, 19 nt, Artificial Sequence
  Description of Artificial Sequence: Synthetic oligonucleotide
ggugccucuccgggugccg

SEQ ID NO: 2496766 - RNA, 19 nt, Artificial Sequence
  Description of Artificial Sequence: Synthetic oligonucleotide
ggccaucuaaagggacacc

SEQ ID NO: 2496767 - RNA, 19 nt, Artificial Sequence
  Description of Artificial Sequence: Synthetic oligonucleotide
ccagagcgaucguagugca

SEQ ID NO: 2496768 - RNA, 19 nt, Artificial Sequence
  Description of Artificial Sequence: Synthetic oligonucleotide
auccagcugugcauccaau

SEQ ID NO: 2496769 - RNA, 19 nt, Artificial Sequence
  Description of Artificial Sequence: Synthetic oligonucleotide
agccgcugucgaacagauc

SEQ ID NO: 2496770 - RNA, 19 nt, Artificial Sequence
  Description of Artificial Sequence: Synthetic oligonucleotide
cggcuguuuaacugguguc

SEQ ID NO: 2496771 - RNA, 19 nt, Artificial Sequence
  Description of Artificial Sequence: Synthetic oligonucleotide
ggacggccaucuaaaggga

SEQ ID NO: 2496772 - RNA, 19 nt, Artificial Sequence
  Description of Artificial Sequence: Synthetic oligonucleotide
agucaagguuugacaccaa

SEQ ID NO: 2496773 - RNA, 19 nt, Artificial Sequence
  Description of Artificial Sequence: Synthetic oligonucleotide
gucuccacgccggcuccac

SEQ ID NO: 2496774 - RNA, 19 nt, Artificial Sequence
  Description of Artificial Sequence: Synthetic oligonucleotide
ggucuucucuguguaucaa

SEQ ID NO: 2496775 - RNA, 19 nt, Artificial Sequence
  Description of Artificial Sequence: Synthetic oligonucleotide
ccgccaccaccaaaaguuc

SEQ ID NO: 2496776 - RNA, 19 nt, Artificial Sequence
  Description of Artificial Sequence: Synthetic oligonucleotide
cacggcugccaccacgggu

SEQ ID NO: 2496777 - RNA, 19 nt, Artificial Sequence
  Description of Artificial Sequence: Synthetic oligonucleotide
ccucuauagcgaucacgga

SEQ ID NO: 2496778 - RNA, 19 nt, Artificial Sequence
  Description of Artificial Sequence: Synthetic oligonucleotide
gugaugugacgaguugaau

SEQ ID NO: 2496779 - RNA, 19 nt, Artificial Sequence
  Description of Artificial Sequence: Synthetic oligonucleotide
cugcgaagaguuccugaau

SEQ ID NO: 2496780 - RNA, 19 nt, Artificial Sequence
  Description of Artificial Sequence: Synthetic oligonucleotide
cuccgggugccgccaccac

SEQ ID NO: 2496781 - RNA, 19 nt, Artificial Sequence
  Description of Artificial Sequence: Synthetic oligonucleotide
cgcauccagcugugcaucc

SEQ ID NO: 2496782 - RNA, 19 nt, Artificial Sequence
  Description of Artificial Sequence: Synthetic oligonucleotide
ggccgguuccucagaggcc

SEQ ID NO: 2496783 - RNA, 19 nt, Artificial Sequence
  Description of Artificial Sequence: Synthetic oligonucleotide
gguuugacaccaacaguuu

SEQ ID NO: 2496784 - RNA, 19 nt, Artificial Sequence
  Description of Artificial Sequence: Synthetic oligonucleotide
cgaucacggaagaggcuuc

SEQ ID NO: 2496785 - RNA, 19 nt, Artificial Sequence
  Description of Artificial Sequence: Synthetic oligonucleotide
gcgaucacggaagaggcuu

SEQ ID NO: 2496786 - RNA, 19 nt, Artificial Sequence
  Description of Artificial Sequence: Synthetic oligonucleotide
cgccgcgagagauggcggg

SEQ ID NO: 2496787 - RNA, 19 nt, Artificial Sequence
  Description of Artificial Sequence: Synthetic oligonucleotide
cggccaucuaaagggacac

SEQ ID NO: 2496788 - RNA, 19 nt, Artificial Sequence
  Description of Artificial Sequence: Synthetic oligonucleotide
gccgcgagagauggcgggc

SEQ ID NO: 2496789 - RNA, 19 nt, Artificial Sequence
  Description of Artificial Sequence: Synthetic oligonucleotide
cgcgagagauggcgggccg

SEQ ID NO: 2496790 - RNA, 19 nt, Artificial Sequence
  Description of Artificial Sequence: Synthetic oligonucleotide
gcacaucugcugucccuaa

SEQ ID NO: 2496791 - RNA, 19 nt, Artificial Sequence
  Description of Artificial Sequence: Synthetic oligonucleotide
ccgaagccgcugucgaaca

SEQ ID NO: 2496792 - RNA, 19 nt, Artificial Sequence
  Description of Artificial Sequence: Synthetic oligonucleotide
cgcugucgaacagaucgug

SEQ ID NO: 2496793 - RNA, 19 nt, Artificial Sequence
  Description of Artificial Sequence: Synthetic oligonucleotide
gcgccgcgagagauggcgg

SEQ ID NO: 2496794 - RNA, 19 nt, Artificial Sequence
  Description of Artificial Sequence: Synthetic oligonucleotide
ccaucuaaagggacaccau

SEQ ID NO: 2496795 - RNA, 19 nt, Artificial Sequence
  Description of Artificial Sequence: Synthetic oligonucleotide
ggccugcuguaaggagccg

SEQ ID NO: 2496796 - RNA, 19 nt, Artificial Sequence
  Description of Artificial Sequence: Synthetic oligonucleotide
ccuguuacuuguguggauu

SEQ ID NO: 2496797 - RNA, 19 nt, Artificial Sequence
  Description of Artificial Sequence: Synthetic oligonucleotide
cacgggugccucuccgggu

SEQ ID NO: 2496798 - RNA, 19 nt, Artificial Sequence
  Description of Artificial Sequence: Synthetic oligonucleotide
guggauuugcucggcuguu

SEQ ID NO: 2496799 - RNA, 19 nt, Artificial Sequence
  Description of Artificial Sequence: Synthetic oligonucleotide
caucugccuuccguucaaa

SEQ ID NO: 2496800 - RNA, 19 nt, Artificial Sequence
  Description of Artificial Sequence: Synthetic oligonucleotide
cugccaccacgggugccuc

SEQ ID NO: 2496801 - RNA, 19 nt, Artificial Sequence
  Description of Artificial Sequence: Synthetic oligonucleotide
cccucccucuauagcgauc

SEQ ID NO: 2496802 - RNA, 19 nt, Artificial Sequence
  Description of Artificial Sequence: Synthetic oligonucleotide
ccaccacgggugccucucc

SEQ ID NO: 2496803 - RNA, 19 nt, Artificial Sequence
  Description of Artificial Sequence: Synthetic oligonucleotide
gggacaccauuguacuguu

SEQ ID NO: 2496804 - RNA, 19 nt, Artificial Sequence
  Description of Artificial Sequence: Synthetic oligonucleotide
ccaccucuguuuaugcuuu

SEQ ID NO: 2496805 - RNA, 19 nt, Artificial Sequence
  Description of Artificial Sequence: Synthetic oligonucleotide
ggcggcgccgcgagagaug

SEQ ID NO: 2496806 - RNA, 19 nt, Artificial Sequence
  Description of Artificial Sequence: Synthetic oligonucleotide
cuguaaggagccggccggu

SEQ ID NO: 2496807 - RNA, 19 nt, Artificial Sequence
  Description of Artificial Sequence: Synthetic oligonucleotide
ccgccucgguucacccgcg

SEQ ID NO: 2496808 - RNA, 19 nt, Artificial Sequence
  Description of Artificial Sequence: Synthetic oligonucleotide
ccggccgguuccugccgcc

SEQ ID NO: 2496809 - RNA, 19 nt, Artificial Sequence
  Description of Artificial Sequence: Synthetic oligonucleotide
cggucuccacgccggcucc

SEQ ID NO: 2496810 - RNA, 19 nt, Artificial Sequence
  Description of Artificial Sequence: Synthetic oligonucleotide
cgccgccucgguucacccg

SEQ ID NO: 2496811 - RNA, 19 nt, Artificial Sequence
  Description of Artificial Sequence: Synthetic oligonucleotide
gcucggcuguuuaacuggu

SEQ ID NO: 2496812 - RNA, 19 nt, Artificial Sequence
  Description of Artificial Sequence: Synthetic oligonucleotide
gcacggcugcuuucuucaa

SEQ ID NO: 2496813 - RNA, 19 nt, Artificial Sequence
  Description of Artificial Sequence: Synthetic oligonucleotide
gggugccgccaccaccaaa

SEQ ID NO: 2496814 - RNA, 19 nt, Artificial Sequence
  Description of Artificial Sequence: Synthetic oligonucleotide
cgaacagaucgugcugcca

SEQ ID NO: 2496815 - RNA, 19 nt, Artificial Sequence
  Description of Artificial Sequence: Synthetic oligonucleotide
ggucuccacgccggcucca

SEQ ID NO: 2496816 - RNA, 19 nt, Artificial Sequence
  Description of Artificial Sequence: Synthetic oligonucleotide
cguagugcacggcugcuuu

SEQ ID NO: 2496817 - RNA, 19 nt, Artificial Sequence
  Description of Artificial Sequence: Synthetic oligonucleotide
cuucggccagagcgaucgu

SEQ ID NO: 2496818 - RNA, 19 nt, Artificial Sequence
  Description of Artificial Sequence: Synthetic oligonucleotide
ccgcugucgaacagaucgu

SEQ ID NO: 2496819 - RNA, 19 nt, Artificial Sequence
  Description of Artificial Sequence: Synthetic oligonucleotide
cggccgguuccugccgccg

SEQ ID NO: 2496820 - RNA, 19 nt, Artificial Sequence
  Description of Artificial Sequence: Synthetic oligonucleotide
ggacaccauuguacuguuu

SEQ ID NO: 2496821 - RNA, 19 nt, Artificial Sequence
  Description of Artificial Sequence: Synthetic oligonucleotide
ccgcagaaagcugcugcuu

SEQ ID NO: 2496822 - RNA, 19 nt, Artificial Sequence
  Description of Artificial Sequence: Synthetic oligonucleotide
cggcgccgcgagagauggc

SEQ ID NO: 2496823 - RNA, 19 nt, Artificial Sequence
  Description of Artificial Sequence: Synthetic oligonucleotide
uuuauguuagaauagauug

SEQ ID NO: 2496824 - RNA, 19 nt, Artificial Sequence
  Description of Artificial Sequence: Synthetic oligonucleotide
aaauaaguuaaccacugac

SEQ ID NO: 2496825 - RNA, 19 nt, Artificial Sequence
  Description of Artificial Sequence: Synthetic oligonucleotide
aauauuaauaggcagaaau

SEQ ID NO: 2496826 - RNA, 19 nt, Artificial Sequence
  Description of Artificial Sequence: Synthetic oligonucleotide
aaucugaauggauauacac

SEQ ID NO: 2496827 - RNA, 19 nt, Artificial Sequence
  Description of Artificial Sequence: Synthetic oligonucleotide
acuauuaagagcuaaugag

SEQ ID NO: 2496828 - RNA, 19 nt, Artificial Sequence
  Description of Artificial Sequence: Synthetic oligonucleotide
aauaggcagaaauauacag

SEQ ID NO: 2496829 - RNA, 19 nt, Artificial Sequence
  Description of Artificial Sequence: Synthetic oligonucleotide
uuaauaggcagaaauauac

SEQ ID NO: 2496830 - RNA, 19 nt, Artificial Sequence
  Description of Artificial Sequence: Synthetic oligonucleotide
uccacaacuauuaagagcu

SEQ ID NO: 2496831 - RNA, 19 nt, Artificial Sequence
  Description of Artificial Sequence: Synthetic oligonucleotide
uuccaaaauauuaauaggc

SEQ ID NO: 2496832 - RNA, 19 nt, Artificial Sequence
  Description of Artificial Sequence: Synthetic oligonucleotide
auugcuuaaggguugagac

SEQ ID NO: 2496833 - RNA, 19 nt, Artificial Sequence
  Description of Artificial Sequence: Synthetic oligonucleotide
auaaguuaaccacugacuc

SEQ ID NO: 2496834 - RNA, 19 nt, Artificial Sequence
  Description of Artificial Sequence: Synthetic oligonucleotide
aauggauauacacugaaaa

SEQ ID NO: 2496835 - RNA, 19 nt, Artificial Sequence
  Description of Artificial Sequence: Synthetic oligonucleotide
cuuguauacaugcagaccc

SEQ ID NO: 2496836 - RNA, 19 nt, Artificial Sequence
  Description of Artificial Sequence: Synthetic oligonucleotide
ucugaauggauauacacug

SEQ ID NO: 2496837 - RNA, 19 nt, Artificial Sequence
  Description of Artificial Sequence: Synthetic oligonucleotide
uauacagccauacuuaaac

SEQ ID NO: 2496838 - RNA, 19 nt, Artificial Sequence
  Description of Artificial Sequence: Synthetic oligonucleotide
uuucaagagaucauaaaug

SEQ ID NO: 2496839 - RNA, 19 nt, Artificial Sequence
  Description of Artificial Sequence: Synthetic oligonucleotide
uuaaauaaguuaaccacug

SEQ ID NO: 2496840 - RNA, 19 nt, Artificial Sequence
  Description of Artificial Sequence: Synthetic oligonucleotide
aauccauuaucugaacucc

SEQ ID NO: 2496841 - RNA, 19 nt, Artificial Sequence
  Description of Artificial Sequence: Synthetic oligonucleotide
ucacaaaaggcacagagga

SEQ ID NO: 2496842 - RNA, 19 nt, Artificial Sequence
  Description of Artificial Sequence: Synthetic oligonucleotide
auacacaaaaucugaaugg

SEQ ID NO: 2496843 - RNA, 19 nt, Artificial Sequence
  Description of Artificial Sequence: Synthetic oligonucleotide
uucaagagaucauaaaugc

SEQ ID NO: 2496844 - RNA, 19 nt, Artificial Sequence
  Description of Artificial Sequence: Synthetic oligonucleotide
uaaucuuuguuucucaaca

SEQ ID NO: 2496845 - RNA, 19 nt, Artificial Sequence
  Description of Artificial Sequence: Synthetic oligonucleotide
cugaaauuugacuacaaag

SEQ ID NO: 2496846 - RNA, 19 nt, Artificial Sequence
  Description of Artificial Sequence: Synthetic oligonucleotide
uauuaagagcuaaugagca

SEQ ID NO: 2496847 - RNA, 19 nt, Artificial Sequence
  Description of Artificial Sequence: Synthetic oligonucleotide
uacaccauagucauaaaca

SEQ ID NO: 2496848 - RNA, 19 nt, Artificial Sequence
  Description of Artificial Sequence: Synthetic oligonucleotide
uuaucugaacuccaguuag

SEQ ID NO: 2496849 - RNA, 19 nt, Artificial Sequence
  Description of Artificial Sequence: Synthetic oligonucleotide
uaggcagaaauauacagcc

SEQ ID NO: 2496850 - RNA, 19 nt, Artificial Sequence
  Description of Artificial Sequence: Synthetic oligonucleotide
aacuauuaagagcuaauga

SEQ ID NO: 2496851 - RNA, 19 nt, Artificial Sequence
  Description of Artificial Sequence: Synthetic oligonucleotide
cuauuaagagcuaaugagc

SEQ ID NO: 2496852 - RNA, 19 nt, Artificial Sequence
  Description of Artificial Sequence: Synthetic oligonucleotide
uacauaauugcuuaagggu

SEQ ID NO: 2496853 - RNA, 19 nt, Artificial Sequence
  Description of Artificial Sequence: Synthetic oligonucleotide
ucauaaacaauccauuauc

SEQ ID NO: 2496854 - RNA, 19 nt, Artificial Sequence
  Description of Artificial Sequence: Synthetic oligonucleotide
guacauaauugcuuaaggg

SEQ ID NO: 2496855 - RNA, 19 nt, Artificial Sequence
  Description of Artificial Sequence: Synthetic oligonucleotide
guugaaaguauuuauuuac

SEQ ID NO: 2496856 - RNA, 19 nt, Artificial Sequence
  Description of Artificial Sequence: Synthetic oligonucleotide
uccaaaauauuaauaggca

SEQ ID NO: 2496857 - RNA, 19 nt, Artificial Sequence
  Description of Artificial Sequence: Synthetic oligonucleotide
aauuugacuacaaagguaa

SEQ ID NO: 2496858 - RNA, 19 nt, Artificial Sequence
  Description of Artificial Sequence: Synthetic oligonucleotide
ugcuuaaggguugagacgg

SEQ ID NO: 2496859 - RNA, 19 nt, Artificial Sequence
  Description of Artificial Sequence: Synthetic oligonucleotide
accauagucauaaacaauc

SEQ ID NO: 2496860 - RNA, 19 nt, Artificial Sequence
  Description of Artificial Sequence: Synthetic oligonucleotide
uuuaguacauaauugcuua

SEQ ID NO: 2496861 - RNA, 19 nt, Artificial Sequence
  Description of Artificial Sequence: Synthetic oligonucleotide
auuaugcacauucucaucu

SEQ ID NO: 2496862 - RNA, 19 nt, Artificial Sequence
  Description of Artificial Sequence: Synthetic oligonucleotide
aauaaguuaaccacugacu

SEQ ID NO: 2496863 - RNA, 19 nt, Artificial Sequence
  Description of Artificial Sequence: Synthetic oligonucleotide
aggcaucuuguauacaugc

SEQ ID NO: 2496864 - RNA, 19 nt, Artificial Sequence
  Description of Artificial Sequence: Synthetic oligonucleotide
auaaucuuuguuucucaac

SEQ ID NO: 2496865 - RNA, 19 nt, Artificial Sequence
  Description of Artificial Sequence: Synthetic oligonucleotide
uuauuuacaccauagucau

SEQ ID NO: 2496866 - RNA, 19 nt, Artificial Sequence
  Description of Artificial Sequence: Synthetic oligonucleotide
aauucacuguucuggggcg

SEQ ID NO: 2496867 - RNA, 19 nt, Artificial Sequence
  Description of Artificial Sequence: Synthetic oligonucleotide
uccauuguaaggcaucuug

SEQ ID NO: 2496868 - RNA, 19 nt, Artificial Sequence
  Description of Artificial Sequence: Synthetic oligonucleotide
aaaauauuaauaggcagaa

SEQ ID NO: 2496869 - RNA, 19 nt, Artificial Sequence
  Description of Artificial Sequence: Synthetic oligonucleotide
uuuuauguuagaauagauu

SEQ ID NO: 2496870 - RNA, 19 nt, Artificial Sequence
  Description of Artificial Sequence: Synthetic oligonucleotide
ugaaaguauuuauuuacac

SEQ ID NO: 2496871 - RNA, 19 nt, Artificial Sequence
  Description of Artificial Sequence: Synthetic oligonucleotide
uauuaauaggcagaaauau

SEQ ID NO: 2496872 - RNA, 19 nt, Artificial Sequence
  Description of Artificial Sequence: Synthetic oligonucleotide
uugaaaguauuuauuuaca

SEQ ID NO: 2496873 - RNA, 19 nt, Artificial Sequence
  Description of Artificial Sequence: Synthetic oligonucleotide
acacuuccaacacaacugc

SEQ ID NO: 2496874 - RNA, 19 nt, Artificial Sequence
  Description of Artificial Sequence: Synthetic oligonucleotide
uguuagaauagauuguuua

SEQ ID NO: 2496875 - RNA, 19 nt, Artificial Sequence
  Description of Artificial Sequence: Synthetic oligonucleotide
uacagccauacuuaaaccc

SEQ ID NO: 2496876 - RNA, 19 nt, Artificial Sequence
  Description of Artificial Sequence: Synthetic oligonucleotide
aucuuguauacaugcagac

SEQ ID NO: 2496877 - RNA, 19 nt, Artificial Sequence
  Description of Artificial Sequence: Synthetic oligonucleotide
augcauccuauguacaccc

SEQ ID NO: 2496878 - RNA, 19 nt, Artificial Sequence
  Description of Artificial Sequence: Synthetic oligonucleotide
uuauguuagaauagauugu

SEQ ID NO: 2496879 - RNA, 19 nt, Artificial Sequence
  Description of Artificial Sequence: Synthetic oligonucleotide
caucacaaaaggcacagag

SEQ ID NO: 2496880 - RNA, 19 nt, Artificial Sequence
  Description of Artificial Sequence: Synthetic oligonucleotide
uauuuauuuacaccauagu

SEQ ID NO: 2496881 - RNA, 19 nt, Artificial Sequence
  Description of Artificial Sequence: Synthetic oligonucleotide
gaucuugcauauuuguuug

SEQ ID NO: 2496882 - RNA, 19 nt, Artificial Sequence
  Description of Artificial Sequence: Synthetic oligonucleotide
aagguaacacuuuuaagua

SEQ ID NO: 2496883 - RNA, 19 nt, Artificial Sequence
  Description of Artificial Sequence: Synthetic oligonucleotide
ugguuuuauguuagaauag

SEQ ID NO: 2496884 - RNA, 19 nt, Artificial Sequence
  Description of Artificial Sequence: Synthetic oligonucleotide
auaggcagaaauauacagc

SEQ ID NO: 2496885 - RNA, 19 nt, Artificial Sequence
  Description of Artificial Sequence: Synthetic oligonucleotide
caaaauauuaauaggcaga

SEQ ID NO: 2496886 - RNA, 19 nt, Artificial Sequence
  Description of Artificial Sequence: Synthetic oligonucleotide
caucaauucacuguucugg

SEQ ID NO: 2496887 - RNA, 19 nt, Artificial Sequence
  Description of Artificial Sequence: Synthetic oligonucleotide
uuuuaguacauaauugcuu

SEQ ID NO: 2496888 - RNA, 19 nt, Artificial Sequence
  Description of Artificial Sequence: Synthetic oligonucleotide
ucuuuguuucucaacaaaa

SEQ ID NO: 2496889 - RNA, 19 nt, Artificial Sequence
  Description of Artificial Sequence: Synthetic oligonucleotide
uaaccacugacucauuuca

SEQ ID NO: 2496890 - RNA, 19 nt, Artificial Sequence
  Description of Artificial Sequence: Synthetic oligonucleotide
cauacuuaaacccagggaa

SEQ ID NO: 2496891 - RNA, 19 nt, Artificial Sequence
  Description of Artificial Sequence: Synthetic oligonucleotide
gaagguucagaacucggag

SEQ ID NO: 2496892 - RNA, 19 nt, Artificial Sequence
  Description of Artificial Sequence: Synthetic oligonucleotide
uugcauauuuguuugcccc

SEQ ID NO: 2496893 - RNA, 19 nt, Artificial Sequence
  Description of Artificial Sequence: Synthetic oligonucleotide
aauauacagccauacuuaa

SEQ ID NO: 2496894 - RNA, 19 nt, Artificial Sequence
  Description of Artificial Sequence: Synthetic oligonucleotide
gagcaaaucagcugcagug

SEQ ID NO: 2496895 - RNA, 19 nt, Artificial Sequence
  Description of Artificial Sequence: Synthetic oligonucleotide
uugacuacaaagguaacac

SEQ ID NO: 2496896 - RNA, 19 nt, Artificial Sequence
  Description of Artificial Sequence: Synthetic oligonucleotide
aucaauucacuguucuggg

SEQ ID NO: 2496897 - RNA, 19 nt, Artificial Sequence
  Description of Artificial Sequence: Synthetic oligonucleotide
uaaggguugagacggcuag

SEQ ID NO: 2496898 - RNA, 19 nt, Artificial Sequence
  Description of Artificial Sequence: Synthetic oligonucleotide
auacacaucaauucacugu

SEQ ID NO: 2496899 - RNA, 19 nt, Artificial Sequence
  Description of Artificial Sequence: Synthetic oligonucleotide
aauaaucuuuguuucucaa

SEQ ID NO: 2496900 - RNA, 19 nt, Artificial Sequence
  Description of Artificial Sequence: Synthetic oligonucleotide
acaaaaucugaauggauau

SEQ ID NO: 2496901 - RNA, 19 nt, Artificial Sequence
  Description of Artificial Sequence: Synthetic oligonucleotide
uuccacaacuauuaagagc

SEQ ID NO: 2496902 - RNA, 19 nt, Artificial Sequence
  Description of Artificial Sequence: Synthetic oligonucleotide
auuuacaccauagucauaa

SEQ ID NO: 2496903 - RNA, 19 nt, Artificial Sequence
  Description of Artificial Sequence: Synthetic oligonucleotide
ucugaacuccaguuagugg

SEQ ID NO: 2496904 - RNA, 19 nt, Artificial Sequence
  Description of Artificial Sequence: Synthetic oligonucleotide
acaaagguaacacuuuuaa

SEQ ID NO: 2496905 - RNA, 19 nt, Artificial Sequence
  Description of Artificial Sequence: Synthetic oligonucleotide
ugcacuucuguucucugag

SEQ ID NO: 2496906 - RNA, 19 nt, Artificial Sequence
  Description of Artificial Sequence: Synthetic oligonucleotide
uuccuuucaucacuccugg

SEQ ID NO: 2496907 - RNA, 19 nt, Artificial Sequence
  Description of Artificial Sequence: Synthetic oligonucleotide
uaauaggcagaaauauaca

SEQ ID NO: 2496908 - RNA, 19 nt, Artificial Sequence
  Description of Artificial Sequence: Synthetic oligonucleotide
agguaacacuuuuaaguac

SEQ ID NO: 2496909 - RNA, 19 nt, Artificial Sequence
  Description of Artificial Sequence: Synthetic oligonucleotide
uuacaccauagucauaaac

SEQ ID NO: 2496910 - RNA, 19 nt, Artificial Sequence
  Description of Artificial Sequence: Synthetic oligonucleotide
uacacaucaauucacuguu

SEQ ID NO: 2496911 - RNA, 19 nt, Artificial Sequence
  Description of Artificial Sequence: Synthetic oligonucleotide
uccauuaucugaacuccag

SEQ ID NO: 2496912 - RNA, 19 nt, Artificial Sequence
  Description of Artificial Sequence: Synthetic oligonucleotide
uagauacacaucaauucac

SEQ ID NO: 2496913 - RNA, 19 nt, Artificial Sequence
  Description of Artificial Sequence: Synthetic oligonucleotide
ucucaucugaaauuugacu

SEQ ID NO: 2496914 - RNA, 19 nt, Artificial Sequence
  Description of Artificial Sequence: Synthetic oligonucleotide
gacacuuccaacacaacug

SEQ ID NO: 2496915 - RNA, 19 nt, Artificial Sequence
  Description of Artificial Sequence: Synthetic oligonucleotide
gacggcuagauacacauca

SEQ ID NO: 2496916 - RNA, 19 nt, Artificial Sequence
  Description of Artificial Sequence: Synthetic oligonucleotide
uguaaggcaucuuguauac

SEQ ID NO: 2496917 - RNA, 19 nt, Artificial Sequence
  Description of Artificial Sequence: Synthetic oligonucleotide
uagaauagauuguuuauuu

SEQ ID NO: 2496918 - RNA, 19 nt, Artificial Sequence
  Description of Artificial Sequence: Synthetic oligonucleotide
uugcuuaaggguugagacg

SEQ ID NO: 2496919 - RNA, 19 nt, Artificial Sequence
  Description of Artificial Sequence: Synthetic oligonucleotide
ucaagagaucauaaaugcu

SEQ ID NO: 2496920 - RNA, 19 nt, Artificial Sequence
  Description of Artificial Sequence: Synthetic oligonucleotide
caauccauuaucugaacuc

SEQ ID NO: 2496921 - RNA, 19 nt, Artificial Sequence
  Description of Artificial Sequence: Synthetic oligonucleotide
uuaagagcuaaugagcaaa

SEQ ID NO: 2496922 - RNA, 19 nt, Artificial Sequence
  Description of Artificial Sequence: Synthetic oligonucleotide
ucaucugaaauuugacuac

SEQ ID NO: 2496923 - RNA, 19 nt, Artificial Sequence
  Description of Artificial Sequence: Synthetic oligonucleotide
uaaguuaaccacugacuca

SEQ ID NO: 2496924 - RNA, 19 nt, Artificial Sequence
  Description of Artificial Sequence: Synthetic oligonucleotide
cauaauugcuuaaggguug

SEQ ID NO: 2496925 - RNA, 19 nt, Artificial Sequence
  Description of Artificial Sequence: Synthetic oligonucleotide
uuugacuacaaagguaaca

SEQ ID NO: 2496926 - RNA, 19 nt, Artificial Sequence
  Description of Artificial Sequence: Synthetic oligonucleotide
ucgaagguggaucuuggug

SEQ ID NO: 2496927 - RNA, 19 nt, Artificial Sequence
  Description of Artificial Sequence: Synthetic oligonucleotide
aaguuaaccacugacucau

SEQ ID NO: 2496928 - RNA, 19 nt, Artificial Sequence
  Description of Artificial Sequence: Synthetic oligonucleotide
agaucauaaaugcuuuaca

SEQ ID NO: 2496929 - RNA, 19 nt, Artificial Sequence
  Description of Artificial Sequence: Synthetic oligonucleotide
ucugaaauuugacuacaaa

SEQ ID NO: 2496930 - RNA, 19 nt, Artificial Sequence
  Description of Artificial Sequence: Synthetic oligonucleotide
gguugagacggcuagauac

SEQ ID NO: 2496931 - RNA, 19 nt, Artificial Sequence
  Description of Artificial Sequence: Synthetic oligonucleotide
gaaauuugacuacaaaggu

SEQ ID NO: 2496932 - RNA, 19 nt, Artificial Sequence
  Description of Artificial Sequence: Synthetic oligonucleotide
ucaauucacuguucugggg

SEQ ID NO: 2496933 - RNA, 19 nt, Artificial Sequence
  Description of Artificial Sequence: Synthetic oligonucleotide
aagguucagaacucggaga

SEQ ID NO: 2496934 - RNA, 19 nt, Artificial Sequence
  Description of Artificial Sequence: Synthetic oligonucleotide
agcuaaugagcaaaucagc

SEQ ID NO: 2496935 - RNA, 19 nt, Artificial Sequence
  Description of Artificial Sequence: Synthetic oligonucleotide
aaaucagcugcagugacau

SEQ ID NO: 2496936 - RNA, 19 nt, Artificial Sequence
  Description of Artificial Sequence: Synthetic oligonucleotide
aauugcuuaaggguugaga

SEQ ID NO: 2496937 - RNA, 19 nt, Artificial Sequence
  Description of Artificial Sequence: Synthetic oligonucleotide
cuagauacacaucaauuca

SEQ ID NO: 2496938 - RNA, 19 nt, Artificial Sequence
  Description of Artificial Sequence: Synthetic oligonucleotide
aaacaauccauuaucugaa

SEQ ID NO: 2496939 - RNA, 19 nt, Artificial Sequence
  Description of Artificial Sequence: Synthetic oligonucleotide
uacacaaaaucugaaugga

SEQ ID NO: 2496940 - RNA, 19 nt, Artificial Sequence
  Description of Artificial Sequence: Synthetic oligonucleotide
uaguacauaauugcuuaag

SEQ ID NO: 2496941 - RNA, 19 nt, Artificial Sequence
  Description of Artificial Sequence: Synthetic oligonucleotide
uaaacccagggaaugauuu

SEQ ID NO: 2496942 - RNA, 19 nt, Artificial Sequence
  Description of Artificial Sequence: Synthetic oligonucleotide
uauguuagaauagauuguu

SEQ ID NO: 2496943 - RNA, 19 nt, Artificial Sequence
  Description of Artificial Sequence: Synthetic oligonucleotide
agaaauauacagccauacu

SEQ ID NO: 2496944 - RNA, 19 nt, Artificial Sequence
  Description of Artificial Sequence: Synthetic oligonucleotide
gacauuaugcacauucuca

SEQ ID NO: 2496945 - RNA, 19 nt, Artificial Sequence
  Description of Artificial Sequence: Synthetic oligonucleotide
uuuuccauuguaaggcauc

SEQ ID NO: 2496946 - RNA, 19 nt, Artificial Sequence
  Description of Artificial Sequence: Synthetic oligonucleotide
ugacauuaugcacauucuc

SEQ ID NO: 2496947 - RNA, 19 nt, Artificial Sequence
  Description of Artificial Sequence: Synthetic oligonucleotide
auagucauaaacaauccau

SEQ ID NO: 2496948 - RNA, 19 nt, Artificial Sequence
  Description of Artificial Sequence: Synthetic oligonucleotide
gacucauuucaagagauca

SEQ ID NO: 2496949 - RNA, 19 nt, Artificial Sequence
  Description of Artificial Sequence: Synthetic oligonucleotide
cagaacucggagaacagug

SEQ ID NO: 2496950 - RNA, 19 nt, Artificial Sequence
  Description of Artificial Sequence: Synthetic oligonucleotide
uuguaaggcaucuuguaua

SEQ ID NO: 2496951 - RNA, 19 nt, Artificial Sequence
  Description of Artificial Sequence: Synthetic oligonucleotide
ucuugcauauuuguuugcc

SEQ ID NO: 2496952 - RNA, 19 nt, Artificial Sequence
  Description of Artificial Sequence: Synthetic oligonucleotide
ugucgaagguggaucuugg

SEQ ID NO: 2496953 - RNA, 19 nt, Artificial Sequence
  Description of Artificial Sequence: Synthetic oligonucleotide
cuuccuuucaucacuccug

SEQ ID NO: 2496954 - RNA, 19 nt, Artificial Sequence
  Description of Artificial Sequence: Synthetic oligonucleotide
uucucaucugaaauuugac

SEQ ID NO: 2496955 - RNA, 19 nt, Artificial Sequence
  Description of Artificial Sequence: Synthetic oligonucleotide
ucuuguauacaugcagacc

SEQ ID NO: 2496956 - RNA, 19 nt, Artificial Sequence
  Description of Artificial Sequence: Synthetic oligonucleotide
guuagugguuuuauguuag

SEQ ID NO: 2496957 - RNA, 19 nt, Artificial Sequence
  Description of Artificial Sequence: Synthetic oligonucleotide
acugacucauuucaagaga

SEQ ID NO: 2496958 - RNA, 19 nt, Artificial Sequence
  Description of Artificial Sequence: Synthetic oligonucleotide
uuccaacacaacugcaugc

SEQ ID NO: 2496959 - RNA, 19 nt, Artificial Sequence
  Description of Artificial Sequence: Synthetic oligonucleotide
cugcccacaucacaaaagg

SEQ ID NO: 2496960 - RNA, 19 nt, Artificial Sequence
  Description of Artificial Sequence: Synthetic oligonucleotide
gagaucauaaaugcuuuac

SEQ ID NO: 2496961 - RNA, 19 nt, Artificial Sequence
  Description of Artificial Sequence: Synthetic oligonucleotide
uaugcacauucucaucuga

SEQ ID NO: 2496962 - RNA, 19 nt, Artificial Sequence
  Description of Artificial Sequence: Synthetic oligonucleotide
acaauccauuaucugaacu

SEQ ID NO: 2496963 - RNA, 19 nt, Artificial Sequence
  Description of Artificial Sequence: Synthetic oligonucleotide
acaccauagucauaaacaa

SEQ ID NO: 2496964 - RNA, 19 nt, Artificial Sequence
  Description of Artificial Sequence: Synthetic oligonucleotide
aucuugcauauuuguuugc

SEQ ID NO: 2496965 - RNA, 19 nt, Artificial Sequence
  Description of Artificial Sequence: Synthetic oligonucleotide
uagucauaaacaauccauu

SEQ ID NO: 2496966 - RNA, 19 nt, Artificial Sequence
  Description of Artificial Sequence: Synthetic oligonucleotide
cacugacucauuucaagag

SEQ ID NO: 2496967 - RNA, 19 nt, Artificial Sequence
  Description of Artificial Sequence: Synthetic oligonucleotide
aaauuugacuacaaaggua

SEQ ID NO: 2496968 - RNA, 19 nt, Artificial Sequence
  Description of Artificial Sequence: Synthetic oligonucleotide
auuaucugaacuccaguua

SEQ ID NO: 2496969 - RNA, 19 nt, Artificial Sequence
  Description of Artificial Sequence: Synthetic oligonucleotide
agucauaaacaauccauua

SEQ ID NO: 2496970 - RNA, 19 nt, Artificial Sequence
  Description of Artificial Sequence: Synthetic oligonucleotide
ugcagacccuguaacacug

SEQ ID NO: 2496971 - RNA, 19 nt, Artificial Sequence
  Description of Artificial Sequence: Synthetic oligonucleotide
gaucauaaaugcuuuacau

SEQ ID NO: 2496972 - RNA, 19 nt, Artificial Sequence
  Description of Artificial Sequence: Synthetic oligonucleotide
ugagcaaaucagcugcagu

SEQ ID NO: 2496973 - RNA, 19 nt, Artificial Sequence
  Description of Artificial Sequence: Synthetic oligonucleotide
uucagaacucggagaacag

SEQ ID NO: 2496974 - RNA, 19 nt, Artificial Sequence
  Description of Artificial Sequence: Synthetic oligonucleotide
gcuagauacacaucaauuc

SEQ ID NO: 2496975 - RNA, 19 nt, Artificial Sequence
  Description of Artificial Sequence: Synthetic oligonucleotide
gacccuguaacacugccca

SEQ ID NO: 2496976 - RNA, 19 nt, Artificial Sequence
  Description of Artificial Sequence: Synthetic oligonucleotide
uacuuaaacccagggaaug

SEQ ID NO: 2496977 - RNA, 19 nt, Artificial Sequence
  Description of Artificial Sequence: Synthetic oligonucleotide
aagagcuaaugagcaaauc

SEQ ID NO: 2496978 - RNA, 19 nt, Artificial Sequence
  Description of Artificial Sequence: Synthetic oligonucleotide
uuaugcacauucucaucug

SEQ ID NO: 2496979 - RNA, 19 nt, Artificial Sequence
  Description of Artificial Sequence: Synthetic oligonucleotide
agaacucggagaacagugc

SEQ ID NO: 2496980 - RNA, 19 nt, Artificial Sequence
  Description of Artificial Sequence: Synthetic oligonucleotide
aguuagugguuuuauguua

SEQ ID NO: 2496981 - RNA, 19 nt, Artificial Sequence
  Description of Artificial Sequence: Synthetic oligonucleotide
aacucggagaacagugcac

SEQ ID NO: 2496982 - RNA, 19 nt, Artificial Sequence
  Description of Artificial Sequence: Synthetic oligonucleotide
cuccuggcaaacuugcggc

SEQ ID NO: 2496983 - RNA, 19 nt, Artificial Sequence
  Description of Artificial Sequence: Synthetic oligonucleotide
cuuccaacacaacugcaug

SEQ ID NO: 2496984 - RNA, 19 nt, Artificial Sequence
  Description of Artificial Sequence: Synthetic oligonucleotide
cugcaugcauccuauguac

SEQ ID NO: 2496985 - RNA, 19 nt, Artificial Sequence
  Description of Artificial Sequence: Synthetic oligonucleotide
uaacacugcccacaucaca

SEQ ID NO: 2496986 - RNA, 19 nt, Artificial Sequence
  Description of Artificial Sequence: Synthetic oligonucleotide
agguucagaacucggagaa

SEQ ID NO: 2496987 - RNA, 19 nt, Artificial Sequence
  Description of Artificial Sequence: Synthetic oligonucleotide
gcaucuuguauacaugcag

SEQ ID NO: 2496988 - RNA, 19 nt, Artificial Sequence
  Description of Artificial Sequence: Synthetic oligonucleotide
ugcggccacaucuuaaaga

SEQ ID NO: 2496989 - RNA, 19 nt, Artificial Sequence
  Description of Artificial Sequence: Synthetic oligonucleotide
aacacugcccacaucacaa

SEQ ID NO: 2496990 - RNA, 19 nt, Artificial Sequence
  Description of Artificial Sequence: Synthetic oligonucleotide
uccaguuagugguuuuaug

SEQ ID NO: 2496991 - RNA, 19 nt, Artificial Sequence
  Description of Artificial Sequence: Synthetic oligonucleotide
cacaaaaucugaauggaua

SEQ ID NO: 2496992 - RNA, 19 nt, Artificial Sequence
  Description of Artificial Sequence: Synthetic oligonucleotide
agaauagauuguuuauuuu

SEQ ID NO: 2496993 - RNA, 19 nt, Artificial Sequence
  Description of Artificial Sequence: Synthetic oligonucleotide
uccaacacaacugcaugca

SEQ ID NO: 2496994 - RNA, 19 nt, Artificial Sequence
  Description of Artificial Sequence: Synthetic oligonucleotide
aaaucugaauggauauaca

SEQ ID NO: 2496995 - RNA, 19 nt, Artificial Sequence
  Description of Artificial Sequence: Synthetic oligonucleotide
cacuuuuaaguacacaaaa

SEQ ID NO: 2496996 - RNA, 19 nt, Artificial Sequence
  Description of Artificial Sequence: Synthetic oligonucleotide
acauaauugcuuaaggguu

SEQ ID NO: 2496997 - RNA, 19 nt, Artificial Sequence
  Description of Artificial Sequence: Synthetic oligonucleotide
uaagagcuaaugagcaaau

SEQ ID NO: 2496998 - RNA, 19 nt, Artificial Sequence
  Description of Artificial Sequence: Synthetic oligonucleotide
ugcacauucucaucugaaa

SEQ ID NO: 2496999 - RNA, 19 nt, Artificial Sequence
  Description of Artificial Sequence: Synthetic oligonucleotide
aucugaauggauauacacu

SEQ ID NO: 2497000 - RNA, 19 nt, Artificial Sequence
  Description of Artificial Sequence: Synthetic oligonucleotide
auuaagagcuaaugagcaa

SEQ ID NO: 2497001 - RNA, 19 nt, Artificial Sequence
  Description of Artificial Sequence: Synthetic oligonucleotide
uuaguacauaauugcuuaa

SEQ ID NO: 2497002 - RNA, 19 nt, Artificial Sequence
  Description of Artificial Sequence: Synthetic oligonucleotide
agaacagugcacaucaaaa

SEQ ID NO: 2497003 - RNA, 19 nt, Artificial Sequence
  Description of Artificial Sequence: Synthetic oligonucleotide
uuuccauuguaaggcaucu

SEQ ID NO: 2497004 - RNA, 19 nt, Artificial Sequence
  Description of Artificial Sequence: Synthetic oligonucleotide
caacacaacugcaugcauc

SEQ ID NO: 2497005 - RNA, 19 nt, Artificial Sequence
  Description of Artificial Sequence: Synthetic oligonucleotide
caucuuguauacaugcaga

SEQ ID NO: 2497006 - RNA, 19 nt, Artificial Sequence
  Description of Artificial Sequence: Synthetic oligonucleotide
caaacuugcggccacaucu

SEQ ID NO: 2497007 - RNA, 19 nt, Artificial Sequence
  Description of Artificial Sequence: Synthetic oligonucleotide
auauuaauaggcagaaaua

SEQ ID NO: 2497008 - RNA, 19 nt, Artificial Sequence
  Description of Artificial Sequence: Synthetic oligonucleotide
ugcucuuccgcuccuucug

SEQ ID NO: 2497009 - RNA, 19 nt, Artificial Sequence
  Description of Artificial Sequence: Synthetic oligonucleotide
acugcaugcauccuaugua

SEQ ID NO: 2497010 - RNA, 19 nt, Artificial Sequence
  Description of Artificial Sequence: Synthetic oligonucleotide
uucugucgaagguggaucu

SEQ ID NO: 2497011 - RNA, 19 nt, Artificial Sequence
  Description of Artificial Sequence: Synthetic oligonucleotide
auuguugaaaguauuuauu

SEQ ID NO: 2497012 - RNA, 19 nt, Artificial Sequence
  Description of Artificial Sequence: Synthetic oligonucleotide
ccuuuaaauaaguuaacca

SEQ ID NO: 2497013 - RNA, 19 nt, Artificial Sequence
  Description of Artificial Sequence: Synthetic oligonucleotide
uguauacaugcagacccug

SEQ ID NO: 2497014 - RNA, 19 nt, Artificial Sequence
  Description of Artificial Sequence: Synthetic oligonucleotide
cauagucauaaacaaucca

SEQ ID NO: 2497015 - RNA, 19 nt, Artificial Sequence
  Description of Artificial Sequence: Synthetic oligonucleotide
gaacucggagaacagugca

SEQ ID NO: 2497016 - RNA, 19 nt, Artificial Sequence
  Description of Artificial Sequence: Synthetic oligonucleotide
caugcauccuauguacacc

SEQ ID NO: 2497017 - RNA, 19 nt, Artificial Sequence
  Description of Artificial Sequence: Synthetic oligonucleotide
ugcccacaucacaaaaggc

SEQ ID NO: 2497018 - RNA, 19 nt, Artificial Sequence
  Description of Artificial Sequence: Synthetic oligonucleotide
guucagaacucggagaaca

SEQ ID NO: 2497019 - RNA, 19 nt, Artificial Sequence
  Description of Artificial Sequence: Synthetic oligonucleotide
uucuggggcgcacugcucu

SEQ ID NO: 2497020 - RNA, 19 nt, Artificial Sequence
  Description of Artificial Sequence: Synthetic oligonucleotide
uuaaacccagggaaugauu

SEQ ID NO: 2497021 - RNA, 19 nt, Artificial Sequence
  Description of Artificial Sequence: Synthetic oligonucleotide
gagaacagugcacaucaaa

SEQ ID NO: 2497022 - RNA, 19 nt, Artificial Sequence
  Description of Artificial Sequence: Synthetic oligonucleotide
cauuaugcacauucucauc

SEQ ID NO: 2497023 - RNA, 19 nt, Artificial Sequence
  Description of Artificial Sequence: Synthetic oligonucleotide
ugcaugcauccuauguaca

SEQ ID NO: 2497024 - RNA, 19 nt, Artificial Sequence
  Description of Artificial Sequence: Synthetic oligonucleotide
uuaaggguugagacggcua

SEQ ID NO: 2497025 - RNA, 19 nt, Artificial Sequence
  Description of Artificial Sequence: Synthetic oligonucleotide
aaggagcggaucuugcaua

SEQ ID NO: 2497026 - RNA, 19 nt, Artificial Sequence
  Description of Artificial Sequence: Synthetic oligonucleotide
acagccauacuuaaaccca

SEQ ID NO: 2497027 - RNA, 19 nt, Artificial Sequence
  Description of Artificial Sequence: Synthetic oligonucleotide
uuagugguuuuauguuaga

SEQ ID NO: 2497028 - RNA, 19 nt, Artificial Sequence
  Description of Artificial Sequence: Synthetic oligonucleotide
agauacacaucaauucacu

SEQ ID NO: 2497029 - RNA, 19 nt, Artificial Sequence
  Description of Artificial Sequence: Synthetic oligonucleotide
acauucucaucugaaauuu

SEQ ID NO: 2497030 - RNA, 19 nt, Artificial Sequence
  Description of Artificial Sequence: Synthetic oligonucleotide
uuucccgaagguucagaac

SEQ ID NO: 2497031 - RNA, 19 nt, Artificial Sequence
  Description of Artificial Sequence: Synthetic oligonucleotide
gguaacacuuuuaaguaca

SEQ ID NO: 2497032 - RNA, 19 nt, Artificial Sequence
  Description of Artificial Sequence: Synthetic oligonucleotide
auuaauaggcagaaauaua

SEQ ID NO: 2497033 - RNA, 19 nt, Artificial Sequence
  Description of Artificial Sequence: Synthetic oligonucleotide
ugagacggcuagauacaca

SEQ ID NO: 2497034 - RNA, 19 nt, Artificial Sequence
  Description of Artificial Sequence: Synthetic oligonucleotide
gcugcagugacauuaugca

SEQ ID NO: 2497035 - RNA, 19 nt, Artificial Sequence
  Description of Artificial Sequence: Synthetic oligonucleotide
aucuugguguggcgcuucc

SEQ ID NO: 2497036 - RNA, 19 nt, Artificial Sequence
  Description of Artificial Sequence: Synthetic oligonucleotide
cagccauacuuaaacccag

SEQ ID NO: 2497037 - RNA, 19 nt, Artificial Sequence
  Description of Artificial Sequence: Synthetic oligonucleotide
cauucucaucugaaauuug

SEQ ID NO: 2497038 - RNA, 19 nt, Artificial Sequence
  Description of Artificial Sequence: Synthetic oligonucleotide
gccauacuuaaacccaggg

SEQ ID NO: 2497039 - RNA, 19 nt, Artificial Sequence
  Description of Artificial Sequence: Synthetic oligonucleotide
aaacccagggaaugauuuu

SEQ ID NO: 2497040 - RNA, 19 nt, Artificial Sequence
  Description of Artificial Sequence: Synthetic oligonucleotide
agacccuguaacacugccc

SEQ ID NO: 2497041 - RNA, 19 nt, Artificial Sequence
  Description of Artificial Sequence: Synthetic oligonucleotide
cauuucaagagaucauaaa

SEQ ID NO: 2497042 - RNA, 19 nt, Artificial Sequence
  Description of Artificial Sequence: Synthetic oligonucleotide
auuugacuacaaagguaac

SEQ ID NO: 2497043 - RNA, 19 nt, Artificial Sequence
  Description of Artificial Sequence: Synthetic oligonucleotide
gagacggcuagauacacau

SEQ ID NO: 2497044 - RNA, 19 nt, Artificial Sequence
  Description of Artificial Sequence: Synthetic oligonucleotide
ugacucauuucaagagauc

SEQ ID NO: 2497045 - RNA, 19 nt, Artificial Sequence
  Description of Artificial Sequence: Synthetic oligonucleotide
uagugguuuuauguuagaa

SEQ ID NO: 2497046 - RNA, 19 nt, Artificial Sequence
  Description of Artificial Sequence: Synthetic oligonucleotide
uugcggccacaucuuaaag

SEQ ID NO: 2497047 - RNA, 19 nt, Artificial Sequence
  Description of Artificial Sequence: Synthetic oligonucleotide
auucacuguucuggggcgc

SEQ ID NO: 2497048 - RNA, 19 nt, Artificial Sequence
  Description of Artificial Sequence: Synthetic oligonucleotide
ucagaacucggagaacagu

SEQ ID NO: 2497049 - RNA, 19 nt, Artificial Sequence
  Description of Artificial Sequence: Synthetic oligonucleotide
cugcagugacauuaugcac

SEQ ID NO: 2497050 - RNA, 19 nt, Artificial Sequence
  Description of Artificial Sequence: Synthetic oligonucleotide
agcaaaucagcugcaguga

SEQ ID NO: 2497051 - RNA, 19 nt, Artificial Sequence
  Description of Artificial Sequence: Synthetic oligonucleotide
acuuaaacccagggaauga

SEQ ID NO: 2497052 - RNA, 19 nt, Artificial Sequence
  Description of Artificial Sequence: Synthetic oligonucleotide
acugcccacaucacaaaag

SEQ ID NO: 2497053 - RNA, 19 nt, Artificial Sequence
  Description of Artificial Sequence: Synthetic oligonucleotide
acaacuauuaagagcuaau

SEQ ID NO: 2497054 - RNA, 19 nt, Artificial Sequence
  Description of Artificial Sequence: Synthetic oligonucleotide
gucauaaacaauccauuau

SEQ ID NO: 2497055 - RNA, 19 nt, Artificial Sequence
  Description of Artificial Sequence: Synthetic oligonucleotide
gguuuuauguuagaauaga

SEQ ID NO: 2497056 - RNA, 19 nt, Artificial Sequence
  Description of Artificial Sequence: Synthetic oligonucleotide
acucggagaacagugcaca

SEQ ID NO: 2497057 - RNA, 19 nt, Artificial Sequence
  Description of Artificial Sequence: Synthetic oligonucleotide
auaauugcuuaaggguuga

SEQ ID NO: 2497058 - RNA, 19 nt, Artificial Sequence
  Description of Artificial Sequence: Synthetic oligonucleotide
ugaacuccaguuagugguu

SEQ ID NO: 2497059 - RNA, 19 nt, Artificial Sequence
  Description of Artificial Sequence: Synthetic oligonucleotide
augcagacccuguaacacu

SEQ ID NO: 2497060 - RNA, 19 nt, Artificial Sequence
  Description of Artificial Sequence: Synthetic oligonucleotide
ugcauccuauguacacccc

SEQ ID NO: 2497061 - RNA, 19 nt, Artificial Sequence
  Description of Artificial Sequence: Synthetic oligonucleotide
cacagaggacacuuccaac

SEQ ID NO: 2497062 - RNA, 19 nt, Artificial Sequence
  Description of Artificial Sequence: Synthetic oligonucleotide
gacuacaaagguaacacuu

SEQ ID NO: 2497063 - RNA, 19 nt, Artificial Sequence
  Description of Artificial Sequence: Synthetic oligonucleotide
acuguucuggggcgcacug

SEQ ID NO: 2497064 - RNA, 19 nt, Artificial Sequence
  Description of Artificial Sequence: Synthetic oligonucleotide
acuuccaacacaacugcau

SEQ ID NO: 2497065 - RNA, 19 nt, Artificial Sequence
  Description of Artificial Sequence: Synthetic oligonucleotide
cuucugucgaagguggauc

SEQ ID NO: 2497066 - RNA, 19 nt, Artificial Sequence
  Description of Artificial Sequence: Synthetic oligonucleotide
uccuggcaaacuugcggcc

SEQ ID NO: 2497067 - RNA, 19 nt, Artificial Sequence
  Description of Artificial Sequence: Synthetic oligonucleotide
gaauggauauacacugaaa

SEQ ID NO: 2497068 - RNA, 19 nt, Artificial Sequence
  Description of Artificial Sequence: Synthetic oligonucleotide
uuuacaccauagucauaaa

SEQ ID NO: 2497069 - RNA, 19 nt, Artificial Sequence
  Description of Artificial Sequence: Synthetic oligonucleotide
cauuguaaggcaucuugua

SEQ ID NO: 2497070 - RNA, 19 nt, Artificial Sequence
  Description of Artificial Sequence: Synthetic oligonucleotide
acuacaaagguaacacuuu

SEQ ID NO: 2497071 - RNA, 19 nt, Artificial Sequence
  Description of Artificial Sequence: Synthetic oligonucleotide
acuucuguucucugaguuu

SEQ ID NO: 2497072 - RNA, 19 nt, Artificial Sequence
  Description of Artificial Sequence: Synthetic oligonucleotide
acacuuuuaaguacacaaa

SEQ ID NO: 2497073 - RNA, 19 nt, Artificial Sequence
  Description of Artificial Sequence: Synthetic oligonucleotide
uguggcgcuuccuuucauc

SEQ ID NO: 2497074 - RNA, 19 nt, Artificial Sequence
  Description of Artificial Sequence: Synthetic oligonucleotide
auacuuaaacccagggaau

SEQ ID NO: 2497075 - RNA, 19 nt, Artificial Sequence
  Description of Artificial Sequence: Synthetic oligonucleotide
guaacacuuuuaaguacac

SEQ ID NO: 2497076 - RNA, 19 nt, Artificial Sequence
  Description of Artificial Sequence: Synthetic oligonucleotide
uugagacggcuagauacac

SEQ ID NO: 2497077 - RNA, 19 nt, Artificial Sequence
  Description of Artificial Sequence: Synthetic oligonucleotide
cugaauggauauacacuga

SEQ ID NO: 2497078 - RNA, 19 nt, Artificial Sequence
  Description of Artificial Sequence: Synthetic oligonucleotide
uaauugcuuaaggguugag

SEQ ID NO: 2497079 - RNA, 19 nt, Artificial Sequence
  Description of Artificial Sequence: Synthetic oligonucleotide
uauuuacaccauagucaua

SEQ ID NO: 2497080 - RNA, 19 nt, Artificial Sequence
  Description of Artificial Sequence: Synthetic oligonucleotide
caaaucagcugcagugaca

SEQ ID NO: 2497081 - RNA, 19 nt, Artificial Sequence
  Description of Artificial Sequence: Synthetic oligonucleotide
cucauuucaagagaucaua

SEQ ID NO: 2497082 - RNA, 19 nt, Artificial Sequence
  Description of Artificial Sequence: Synthetic oligonucleotide
guggaucuugguguggcgc

SEQ ID NO: 2497083 - RNA, 19 nt, Artificial Sequence
  Description of Artificial Sequence: Synthetic oligonucleotide
cauuaucugaacuccaguu

SEQ ID NO: 2497084 - RNA, 19 nt, Artificial Sequence
  Description of Artificial Sequence: Synthetic oligonucleotide
guugagacggcuagauaca

SEQ ID NO: 2497085 - RNA, 19 nt, Artificial Sequence
  Description of Artificial Sequence: Synthetic oligonucleotide
guggcgcuuccuuucauca

SEQ ID NO: 2497086 - RNA, 19 nt, Artificial Sequence
  Description of Artificial Sequence: Synthetic oligonucleotide
cugucgaagguggaucuug

SEQ ID NO: 2497087 - RNA, 19 nt, Artificial Sequence
  Description of Artificial Sequence: Synthetic oligonucleotide
cacuccuggcaaacuugcg

SEQ ID NO: 2497088 - RNA, 19 nt, Artificial Sequence
  Description of Artificial Sequence: Synthetic oligonucleotide
gcaugcauccuauguacac

SEQ ID NO: 2497089 - RNA, 19 nt, Artificial Sequence
  Description of Artificial Sequence: Synthetic oligonucleotide
ugguguggcgcuuccuuuc

SEQ ID NO: 2497090 - RNA, 19 nt, Artificial Sequence
  Description of Artificial Sequence: Synthetic oligonucleotide
ucccgaagguucagaacuc

SEQ ID NO: 2497091 - RNA, 19 nt, Artificial Sequence
  Description of Artificial Sequence: Synthetic oligonucleotide
agccauacuuaaacccagg

SEQ ID NO: 2497092 - RNA, 19 nt, Artificial Sequence
  Description of Artificial Sequence: Synthetic oligonucleotide
caucugaaauuugacuaca

SEQ ID NO: 2497093 - RNA, 19 nt, Artificial Sequence
  Description of Artificial Sequence: Synthetic oligonucleotide
aggagcggaucuugcauau

SEQ ID NO: 2497094 - RNA, 19 nt, Artificial Sequence
  Description of Artificial Sequence: Synthetic oligonucleotide
acacaucaauucacuguuc

SEQ ID NO: 2497095 - RNA, 19 nt, Artificial Sequence
  Description of Artificial Sequence: Synthetic oligonucleotide
ggccacaucuuaaagaaaa

SEQ ID NO: 2497096 - RNA, 19 nt, Artificial Sequence
  Description of Artificial Sequence: Synthetic oligonucleotide
acccuguaacacugcccac

SEQ ID NO: 2497097 - RNA, 19 nt, Artificial Sequence
  Description of Artificial Sequence: Synthetic oligonucleotide
cuugcggccacaucuuaaa

SEQ ID NO: 2497098 - RNA, 19 nt, Artificial Sequence
  Description of Artificial Sequence: Synthetic oligonucleotide
cacaucaauucacuguucu

SEQ ID NO: 2497099 - RNA, 19 nt, Artificial Sequence
  Description of Artificial Sequence: Synthetic oligonucleotide
uccuuucaucacuccuggc

SEQ ID NO: 2497100 - RNA, 19 nt, Artificial Sequence
  Description of Artificial Sequence: Synthetic oligonucleotide
aacuugcggccacaucuua

SEQ ID NO: 2497101 - RNA, 19 nt, Artificial Sequence
  Description of Artificial Sequence: Synthetic oligonucleotide
uggggcgcacugcucuucc

SEQ ID NO: 2497102 - RNA, 19 nt, Artificial Sequence
  Description of Artificial Sequence: Synthetic oligonucleotide
acucauuucaagagaucau

SEQ ID NO: 2497103 - RNA, 19 nt, Artificial Sequence
  Description of Artificial Sequence: Synthetic oligonucleotide
ggcagaaauauacagccau

SEQ ID NO: 2497104 - RNA, 19 nt, Artificial Sequence
  Description of Artificial Sequence: Synthetic oligonucleotide
ggaucuugcauauuuguuu

SEQ ID NO: 2497105 - RNA, 19 nt, Artificial Sequence
  Description of Artificial Sequence: Synthetic oligonucleotide
cugacucauuucaagagau

SEQ ID NO: 2497106 - RNA, 19 nt, Artificial Sequence
  Description of Artificial Sequence: Synthetic oligonucleotide
gcaaaucagcugcagugac

SEQ ID NO: 2497107 - RNA, 19 nt, Artificial Sequence
  Description of Artificial Sequence: Synthetic oligonucleotide
uucacuguucuggggcgca

SEQ ID NO: 2497108 - RNA, 19 nt, Artificial Sequence
  Description of Artificial Sequence: Synthetic oligonucleotide
aaacuugcggccacaucuu

SEQ ID NO: 2497109 - RNA, 19 nt, Artificial Sequence
  Description of Artificial Sequence: Synthetic oligonucleotide
aaggguugagacggcuaga

SEQ ID NO: 2497110 - RNA, 19 nt, Artificial Sequence
  Description of Artificial Sequence: Synthetic oligonucleotide
gcggccacaucuuaaagaa

SEQ ID NO: 2497111 - RNA, 19 nt, Artificial Sequence
  Description of Artificial Sequence: Synthetic oligonucleotide
ggacacuuccaacacaacu

SEQ ID NO: 2497112 - RNA, 19 nt, Artificial Sequence
  Description of Artificial Sequence: Synthetic oligonucleotide
auauacagccauacuuaaa

SEQ ID NO: 2497113 - RNA, 19 nt, Artificial Sequence
  Description of Artificial Sequence: Synthetic oligonucleotide
guuuuauguuagaauagau

SEQ ID NO: 2497114 - RNA, 19 nt, Artificial Sequence
  Description of Artificial Sequence: Synthetic oligonucleotide
cacaacuauuaagagcuaa

SEQ ID NO: 2497115 - RNA, 19 nt, Artificial Sequence
  Description of Artificial Sequence: Synthetic oligonucleotide
agcggaucuugcauauuug

SEQ ID NO: 2497116 - RNA, 19 nt, Artificial Sequence
  Description of Artificial Sequence: Synthetic oligonucleotide
aggguugagacggcuagau

SEQ ID NO: 2497117 - RNA, 19 nt, Artificial Sequence
  Description of Artificial Sequence: Synthetic oligonucleotide
uugguguggcgcuuccuuu

SEQ ID NO: 2497118 - RNA, 19 nt, Artificial Sequence
  Description of Artificial Sequence: Synthetic oligonucleotide
gcuaaugagcaaaucagcu

SEQ ID NO: 2497119 - RNA, 19 nt, Artificial Sequence
  Description of Artificial Sequence: Synthetic oligonucleotide
ccaguuagugguuuuaugu

SEQ ID NO: 2497120 - RNA, 19 nt, Artificial Sequence
  Description of Artificial Sequence: Synthetic oligonucleotide
auccauuaucugaacucca

SEQ ID NO: 2497121 - RNA, 19 nt, Artificial Sequence
  Description of Artificial Sequence: Synthetic oligonucleotide
guaacacugcccacaucac

SEQ ID NO: 2497122 - RNA, 19 nt, Artificial Sequence
  Description of Artificial Sequence: Synthetic oligonucleotide
gagcggaucuugcauauuu

SEQ ID NO: 2497123 - RNA, 19 nt, Artificial Sequence
  Description of Artificial Sequence: Synthetic oligonucleotide
aaccacugacucauuucaa

SEQ ID NO: 2497124 - RNA, 19 nt, Artificial Sequence
  Description of Artificial Sequence: Synthetic oligonucleotide
uggcgcuuccuuucaucac

SEQ ID NO: 2497125 - RNA, 19 nt, Artificial Sequence
  Description of Artificial Sequence: Synthetic oligonucleotide
aucugaaauuugacuacaa

SEQ ID NO: 2497126 - RNA, 19 nt, Artificial Sequence
  Description of Artificial Sequence: Synthetic oligonucleotide
ccgaagguucagaacucgg

SEQ ID NO: 2497127 - RNA, 19 nt, Artificial Sequence
  Description of Artificial Sequence: Synthetic oligonucleotide
ccauacuuaaacccaggga

SEQ ID NO: 2497128 - RNA, 19 nt, Artificial Sequence
  Description of Artificial Sequence: Synthetic oligonucleotide
ccccauugcacuucuguuc

SEQ ID NO: 2497129 - RNA, 19 nt, Artificial Sequence
  Description of Artificial Sequence: Synthetic oligonucleotide
cacuuccaacacaacugca

SEQ ID NO: 2497130 - RNA, 19 nt, Artificial Sequence
  Description of Artificial Sequence: Synthetic oligonucleotide
acacugcccacaucacaaa

SEQ ID NO: 2497131 - RNA, 19 nt, Artificial Sequence
  Description of Artificial Sequence: Synthetic oligonucleotide
gaucuugguguggcgcuuc

SEQ ID NO: 2497132 - RNA, 19 nt, Artificial Sequence
  Description of Artificial Sequence: Synthetic oligonucleotide
agacggcuagauacacauc

SEQ ID NO: 2497133 - RNA, 19 nt, Artificial Sequence
  Description of Artificial Sequence: Synthetic oligonucleotide
cucuuccgcuccuucuguc

SEQ ID NO: 2497134 - RNA, 19 nt, Artificial Sequence
  Description of Artificial Sequence: Synthetic oligonucleotide
cuacaaagguaacacuuuu

SEQ ID NO: 2497135 - RNA, 19 nt, Artificial Sequence
  Description of Artificial Sequence: Synthetic oligonucleotide
caguuagugguuuuauguu

SEQ ID NO: 2497136 - RNA, 19 nt, Artificial Sequence
  Description of Artificial Sequence: Synthetic oligonucleotide
cggagaacagugcacauca

SEQ ID NO: 2497137 - RNA, 19 nt, Artificial Sequence
  Description of Artificial Sequence: Synthetic oligonucleotide
acaucacaaaaggcacaga

SEQ ID NO: 2497138 - RNA, 19 nt, Artificial Sequence
  Description of Artificial Sequence: Synthetic oligonucleotide
gugacauuaugcacauucu

SEQ ID NO: 2497139 - RNA, 19 nt, Artificial Sequence
  Description of Artificial Sequence: Synthetic oligonucleotide
acuccaguuagugguuuua

SEQ ID NO: 2497140 - RNA, 19 nt, Artificial Sequence
  Description of Artificial Sequence: Synthetic oligonucleotide
cuguucuggggcgcacugc

SEQ ID NO: 2497141 - RNA, 19 nt, Artificial Sequence
  Description of Artificial Sequence: Synthetic oligonucleotide
uuccgcuccuucugucgaa

SEQ ID NO: 2497142 - RNA, 19 nt, Artificial Sequence
  Description of Artificial Sequence: Synthetic oligonucleotide
cuucuguucucugaguuuu

SEQ ID NO: 2497143 - RNA, 19 nt, Artificial Sequence
  Description of Artificial Sequence: Synthetic oligonucleotide
acuugcggccacaucuuaa

SEQ ID NO: 2497144 - RNA, 19 nt, Artificial Sequence
  Description of Artificial Sequence: Synthetic oligonucleotide
guauacaugcagacccugu

SEQ ID NO: 2497145 - RNA, 19 nt, Artificial Sequence
  Description of Artificial Sequence: Synthetic oligonucleotide
caccauagucauaaacaau

SEQ ID NO: 2497146 - RNA, 19 nt, Artificial Sequence
  Description of Artificial Sequence: Synthetic oligonucleotide
gggcgcacugcucuuccgc

SEQ ID NO: 2497147 - RNA, 19 nt, Artificial Sequence
  Description of Artificial Sequence: Synthetic oligonucleotide
guaaggcaucuuguauaca

SEQ ID NO: 2497148 - RNA, 19 nt, Artificial Sequence
  Description of Artificial Sequence: Synthetic oligonucleotide
cuuaaacccagggaaugau

SEQ ID NO: 2497149 - RNA, 19 nt, Artificial Sequence
  Description of Artificial Sequence: Synthetic oligonucleotide
ggcaucuuguauacaugca

SEQ ID NO: 2497150 - RNA, 19 nt, Artificial Sequence
  Description of Artificial Sequence: Synthetic oligonucleotide
ucugucgaagguggaucuu

SEQ ID NO: 2497151 - RNA, 19 nt, Artificial Sequence
  Description of Artificial Sequence: Synthetic oligonucleotide
uuccauuguaaggcaucuu

SEQ ID NO: 2497152 - RNA, 19 nt, Artificial Sequence
  Description of Artificial Sequence: Synthetic oligonucleotide
ggcgcuuccuuucaucacu

SEQ ID NO: 2497153 - RNA, 19 nt, Artificial Sequence
  Description of Artificial Sequence: Synthetic oligonucleotide
cccgaagguucagaacucg

SEQ ID NO: 2497154 - RNA, 19 nt, Artificial Sequence
  Description of Artificial Sequence: Synthetic oligonucleotide
cuuaaggguugagacggcu

SEQ ID NO: 2497155 - RNA, 19 nt, Artificial Sequence
  Description of Artificial Sequence: Synthetic oligonucleotide
acggcuagauacacaucaa

SEQ ID NO: 2497156 - RNA, 19 nt, Artificial Sequence
  Description of Artificial Sequence: Synthetic oligonucleotide
gguguggcgcuuccuuuca

SEQ ID NO: 2497157 - RNA, 19 nt, Artificial Sequence
  Description of Artificial Sequence: Synthetic oligonucleotide
acacaacugcaugcauccu

SEQ ID NO: 2497158 - RNA, 19 nt, Artificial Sequence
  Description of Artificial Sequence: Synthetic oligonucleotide
cgaagguggaucuuggugu

SEQ ID NO: 2497159 - RNA, 19 nt, Artificial Sequence
  Description of Artificial Sequence: Synthetic oligonucleotide
ucuggggcgcacugcucuu

SEQ ID NO: 2497160 - RNA, 19 nt, Artificial Sequence
  Description of Artificial Sequence: Synthetic oligonucleotide
gcggaucuugcauauuugu

SEQ ID NO: 2497161 - RNA, 19 nt, Artificial Sequence
  Description of Artificial Sequence: Synthetic oligonucleotide
ggcuagauacacaucaauu

SEQ ID NO: 2497162 - RNA, 19 nt, Artificial Sequence
  Description of Artificial Sequence: Synthetic oligonucleotide
cgaagguucagaacucgga

SEQ ID NO: 2497163 - RNA, 19 nt, Artificial Sequence
  Description of Artificial Sequence: Synthetic oligonucleotide
gguucagaacucggagaac

SEQ ID NO: 2497164 - RNA, 19 nt, Artificial Sequence
  Description of Artificial Sequence: Synthetic oligonucleotide
gcaaacuugcggccacauc

SEQ ID NO: 2497165 - RNA, 19 nt, Artificial Sequence
  Description of Artificial Sequence: Synthetic oligonucleotide
gucgaagguggaucuuggu

SEQ ID NO: 2497166 - RNA, 19 nt, Artificial Sequence
  Description of Artificial Sequence: Synthetic oligonucleotide
ccauuguaaggcaucuugu

SEQ ID NO: 2497167 - RNA, 19 nt, Artificial Sequence
  Description of Artificial Sequence: Synthetic oligonucleotide
cgcacugcucuuccgcucc

SEQ ID NO: 2497168 - RNA, 19 nt, Artificial Sequence
  Description of Artificial Sequence: Synthetic oligonucleotide
gcagugacauuaugcacau

SEQ ID NO: 2497169 - RNA, 19 nt, Artificial Sequence
  Description of Artificial Sequence: Synthetic oligonucleotide
ggggcgcacugcucuuccg

SEQ ID NO: 2497170 - RNA, 19 nt, Artificial Sequence
  Description of Artificial Sequence: Synthetic oligonucleotide
gcuuaaggguugagacggc

SEQ ID NO: 2497171 - RNA, 19 nt, Artificial Sequence
  Description of Artificial Sequence: Synthetic oligonucleotide
cccuguaacacugcccaca

SEQ ID NO: 2497172 - RNA, 19 nt, Artificial Sequence
  Description of Artificial Sequence: Synthetic oligonucleotide
aguuaaccacugacucauu

SEQ ID NO: 2497173 - RNA, 19 nt, Artificial Sequence
  Description of Artificial Sequence: Synthetic oligonucleotide
ccauuaucugaacuccagu

SEQ ID NO: 2497174 - RNA, 19 nt, Artificial Sequence
  Description of Artificial Sequence: Synthetic oligonucleotide
guucuggggcgcacugcuc

SEQ ID NO: 2497175 - RNA, 19 nt, Artificial Sequence
  Description of Artificial Sequence: Synthetic oligonucleotide
cuggggcgcacugcucuuc

SEQ ID NO: 2497176 - RNA, 19 nt, Artificial Sequence
  Description of Artificial Sequence: Synthetic oligonucleotide
cucggagaacagugcacau

SEQ ID NO: 2497177 - RNA, 19 nt, Artificial Sequence
  Description of Artificial Sequence: Synthetic oligonucleotide
cuccaguuagugguuuuau

SEQ ID NO: 2497178 - RNA, 19 nt, Artificial Sequence
  Description of Artificial Sequence: Synthetic oligonucleotide
ggguugagacggcuagaua

SEQ ID NO: 2497179 - RNA, 19 nt, Artificial Sequence
  Description of Artificial Sequence: Synthetic oligonucleotide
cgcuuccuuucaucacucc

SEQ ID NO: 2497180 - RNA, 19 nt, Artificial Sequence
  Description of Artificial Sequence: Synthetic oligonucleotide
ggcgcacugcucuuccgcu

SEQ ID NO: 2497181 - RNA, 19 nt, Artificial Sequence
  Description of Artificial Sequence: Synthetic oligonucleotide
ccauugcacuucuguucuc

SEQ ID NO: 2497182 - RNA, 19 nt, Artificial Sequence
  Description of Artificial Sequence: Synthetic oligonucleotide
gcacuucuguucucugagu

SEQ ID NO: 2497183 - RNA, 19 nt, Artificial Sequence
  Description of Artificial Sequence: Synthetic oligonucleotide
gcgcuuccuuucaucacuc

SEQ ID NO: 2497184 - RNA, 19 nt, Artificial Sequence
  Description of Artificial Sequence: Synthetic oligonucleotide
gcgcacugcucuuccgcuc

SEQ ID NO: 2497185 - RNA, 19 nt, Artificial Sequence
  Description of Artificial Sequence: Synthetic oligonucleotide
ggagaacagugcacaucaa

SEQ ID NO: 2497186 - RNA, 19 nt, Artificial Sequence
  Description of Artificial Sequence: Synthetic oligonucleotide
gcucuuccgcuccuucugu

SEQ ID NO: 2497187 - RNA, 19 nt, Artificial Sequence
  Description of Artificial Sequence: Synthetic oligonucleotide
cacuguucuggggcgcacu

SEQ ID NO: 2497188 - RNA, 19 nt, Artificial Sequence
  Description of Artificial Sequence: Synthetic oligonucleotide
ccacaacuauuaagagcua

SEQ ID NO: 2497189 - RNA, 19 nt, Artificial Sequence
  Description of Artificial Sequence: Synthetic oligonucleotide
guguggcgcuuccuuucau

SEQ ID NO: 2497190 - RNA, 19 nt, Artificial Sequence
  Description of Artificial Sequence: Synthetic oligonucleotide
ccaacacaacugcaugcau

SEQ ID NO: 2497191 - RNA, 19 nt, Artificial Sequence
  Description of Artificial Sequence: Synthetic oligonucleotide
ggcaaacuugcggccacau

SEQ ID NO: 2497192 - RNA, 19 nt, Artificial Sequence
  Description of Artificial Sequence: Synthetic oligonucleotide
cggaucuugcauauuuguu

SEQ ID NO: 2497193 - RNA, 19 nt, Artificial Sequence
  Description of Artificial Sequence: Synthetic oligonucleotide
cggcuagauacacaucaau

SEQ ID NO: 2497194 - RNA, 19 nt, Artificial Sequence
  Description of Artificial Sequence: Synthetic oligonucleotide
ggaucuugguguggcgcuu

SEQ ID NO: 2497195 - RNA, 19 nt, Artificial Sequence
  Description of Artificial Sequence: Synthetic oligonucleotide
ggagcggaucuugcauauu

SEQ ID NO: 2497196 - RNA, 19 nt, Artificial Sequence
  Description of Artificial Sequence: Synthetic oligonucleotide
cagugacauuaugcacauu

SEQ ID NO: 2497197 - RNA, 19 nt, Artificial Sequence
  Description of Artificial Sequence: Synthetic oligonucleotide
aauauuauuccucugaacg

SEQ ID NO: 2497198 - RNA, 19 nt, Artificial Sequence
  Description of Artificial Sequence: Synthetic oligonucleotide
gaaaauauaagcuaagccc

SEQ ID NO: 2497199 - RNA, 19 nt, Artificial Sequence
  Description of Artificial Sequence: Synthetic oligonucleotide
uucuuaaucacauagacca

SEQ ID NO: 2497200 - RNA, 19 nt, Artificial Sequence
  Description of Artificial Sequence: Synthetic oligonucleotide
agaaaauauaagcuaagcc

SEQ ID NO: 2497201 - RNA, 19 nt, Artificial Sequence
  Description of Artificial Sequence: Synthetic oligonucleotide
uguuacaccaguuuuaggg

SEQ ID NO: 2497202 - RNA, 19 nt, Artificial Sequence
  Description of Artificial Sequence: Synthetic oligonucleotide
aacugacugagcuugagcc

SEQ ID NO: 2497203 - RNA, 19 nt, Artificial Sequence
  Description of Artificial Sequence: Synthetic oligonucleotide
uuauaauuucaauagacag

SEQ ID NO: 2497204 - RNA, 19 nt, Artificial Sequence
  Description of Artificial Sequence: Synthetic oligonucleotide
aauucuucagggaugagcc

SEQ ID NO: 2497205 - RNA, 19 nt, Artificial Sequence
  Description of Artificial Sequence: Synthetic oligonucleotide
aaugcuccguaccacaugc

SEQ ID NO: 2497206 - RNA, 19 nt, Artificial Sequence
  Description of Artificial Sequence: Synthetic oligonucleotide
auauuucuuaaucacauag

SEQ ID NO: 2497207 - RNA, 19 nt, Artificial Sequence
  Description of Artificial Sequence: Synthetic oligonucleotide
aacccuacuacugauaugg

SEQ ID NO: 2497208 - RNA, 19 nt, Artificial Sequence
  Description of Artificial Sequence: Synthetic oligonucleotide
uccauauucaggaagaggu

SEQ ID NO: 2497209 - RNA, 19 nt, Artificial Sequence
  Description of Artificial Sequence: Synthetic oligonucleotide
aaauucuucagggaugagc

SEQ ID NO: 2497210 - RNA, 19 nt, Artificial Sequence
  Description of Artificial Sequence: Synthetic oligonucleotide
aaaugugguagucuaggcg

SEQ ID NO: 2497211 - RNA, 19 nt, Artificial Sequence
  Description of Artificial Sequence: Synthetic oligonucleotide
uuuggauagaaaauauaag

SEQ ID NO: 2497212 - RNA, 19 nt, Artificial Sequence
  Description of Artificial Sequence: Synthetic oligonucleotide
aaucacauauauuucuuug

SEQ ID NO: 2497213 - RNA, 19 nt, Artificial Sequence
  Description of Artificial Sequence: Synthetic oligonucleotide
uggauagaaaauauaagcu

SEQ ID NO: 2497214 - RNA, 19 nt, Artificial Sequence
  Description of Artificial Sequence: Synthetic oligonucleotide
acgucaaagagguaguggc

SEQ ID NO: 2497215 - RNA, 19 nt, Artificial Sequence
  Description of Artificial Sequence: Synthetic oligonucleotide
uuugcaagcaguuuuagau

SEQ ID NO: 2497216 - RNA, 19 nt, Artificial Sequence
  Description of Artificial Sequence: Synthetic oligonucleotide
ucucaacugagauagauac

SEQ ID NO: 2497217 - RNA, 19 nt, Artificial Sequence
  Description of Artificial Sequence: Synthetic oligonucleotide
aagaguucuucacacggac

SEQ ID NO: 2497218 - RNA, 19 nt, Artificial Sequence
  Description of Artificial Sequence: Synthetic oligonucleotide
aauacagaagaguucuuca

SEQ ID NO: 2497219 - RNA, 19 nt, Artificial Sequence
  Description of Artificial Sequence: Synthetic oligonucleotide
uguccugugugaaagaccc

SEQ ID NO: 2497220 - RNA, 19 nt, Artificial Sequence
  Description of Artificial Sequence: Synthetic oligonucleotide
auaagcuaagccccguucc

SEQ ID NO: 2497221 - RNA, 19 nt, Artificial Sequence
  Description of Artificial Sequence: Synthetic oligonucleotide
uuuuagaucugcaaugcac

SEQ ID NO: 2497222 - RNA, 19 nt, Artificial Sequence
  Description of Artificial Sequence: Synthetic oligonucleotide
ugugaaagacccuuguugc

SEQ ID NO: 2497223 - RNA, 19 nt, Artificial Sequence
  Description of Artificial Sequence: Synthetic oligonucleotide
agcaccauauuucuuaauc

SEQ ID NO: 2497224 - RNA, 19 nt, Artificial Sequence
  Description of Artificial Sequence: Synthetic oligonucleotide
uuauaugcucuguauagcc

SEQ ID NO: 2497225 - RNA, 19 nt, Artificial Sequence
  Description of Artificial Sequence: Synthetic oligonucleotide
aaguuuaucaagaaauucu

SEQ ID NO: 2497226 - RNA, 19 nt, Artificial Sequence
  Description of Artificial Sequence: Synthetic oligonucleotide
acuagugccuguuuaacuc

SEQ ID NO: 2497227 - RNA, 19 nt, Artificial Sequence
  Description of Artificial Sequence: Synthetic oligonucleotide
uuuagaucugcaaugcacu

SEQ ID NO: 2497228 - RNA, 19 nt, Artificial Sequence
  Description of Artificial Sequence: Synthetic oligonucleotide
uuucuuaaucacauagacc

SEQ ID NO: 2497229 - RNA, 19 nt, Artificial Sequence
  Description of Artificial Sequence: Synthetic oligonucleotide
aaggcaauauuauuccucu

SEQ ID NO: 2497230 - RNA, 19 nt, Artificial Sequence
  Description of Artificial Sequence: Synthetic oligonucleotide
uauaugcucuguauagccg

SEQ ID NO: 2497231 - RNA, 19 nt, Artificial Sequence
  Description of Artificial Sequence: Synthetic oligonucleotide
cuuguugcuuguaauaccc

SEQ ID NO: 2497232 - RNA, 19 nt, Artificial Sequence
  Description of Artificial Sequence: Synthetic oligonucleotide
agaccaucaacccuacuac

SEQ ID NO: 2497233 - RNA, 19 nt, Artificial Sequence
  Description of Artificial Sequence: Synthetic oligonucleotide
gaagaggugguacaggggc

SEQ ID NO: 2497234 - RNA, 19 nt, Artificial Sequence
  Description of Artificial Sequence: Synthetic oligonucleotide
uuaaucacauagaccauca

SEQ ID NO: 2497235 - RNA, 19 nt, Artificial Sequence
  Description of Artificial Sequence: Synthetic oligonucleotide
cuucacacggacuagugcc

SEQ ID NO: 2497236 - RNA, 19 nt, Artificial Sequence
  Description of Artificial Sequence: Synthetic oligonucleotide
uauuucuuaaucacauaga

SEQ ID NO: 2497237 - RNA, 19 nt, Artificial Sequence
  Description of Artificial Sequence: Synthetic oligonucleotide
ucacauauauuucuuugga

SEQ ID NO: 2497238 - RNA, 19 nt, Artificial Sequence
  Description of Artificial Sequence: Synthetic oligonucleotide
uccaauagaagcaccauau

SEQ ID NO: 2497239 - RNA, 19 nt, Artificial Sequence
  Description of Artificial Sequence: Synthetic oligonucleotide
auucacauaacugacugag

SEQ ID NO: 2497240 - RNA, 19 nt, Artificial Sequence
  Description of Artificial Sequence: Synthetic oligonucleotide
uccucugaacgucaaagag

SEQ ID NO: 2497241 - RNA, 19 nt, Artificial Sequence
  Description of Artificial Sequence: Synthetic oligonucleotide
ugagauagauacauucaca

SEQ ID NO: 2497242 - RNA, 19 nt, Artificial Sequence
  Description of Artificial Sequence: Synthetic oligonucleotide
uacuucuucuaguugagca

SEQ ID NO: 2497243 - RNA, 19 nt, Artificial Sequence
  Description of Artificial Sequence: Synthetic oligonucleotide
cuuuggauagaaaauauaa

SEQ ID NO: 2497244 - RNA, 19 nt, Artificial Sequence
  Description of Artificial Sequence: Synthetic oligonucleotide
aguuuaucaagaaauucuc

SEQ ID NO: 2497245 - RNA, 19 nt, Artificial Sequence
  Description of Artificial Sequence: Synthetic oligonucleotide
ucaacugagauagauacau

SEQ ID NO: 2497246 - RNA, 19 nt, Artificial Sequence
  Description of Artificial Sequence: Synthetic oligonucleotide
uucaauagacagcaauaca

SEQ ID NO: 2497247 - RNA, 19 nt, Artificial Sequence
  Description of Artificial Sequence: Synthetic oligonucleotide
cugaacgucaaagagguag

SEQ ID NO: 2497248 - RNA, 19 nt, Artificial Sequence
  Description of Artificial Sequence: Synthetic oligonucleotide
ugguacaggggcaagacgu

SEQ ID NO: 2497249 - RNA, 19 nt, Artificial Sequence
  Description of Artificial Sequence: Synthetic oligonucleotide
aaauauaagcuaagccccg

SEQ ID NO: 2497250 - RNA, 19 nt, Artificial Sequence
  Description of Artificial Sequence: Synthetic oligonucleotide
ugagcuugagccuucuuug

SEQ ID NO: 2497251 - RNA, 19 nt, Artificial Sequence
  Description of Artificial Sequence: Synthetic oligonucleotide
ucagggaugagcccuagac

SEQ ID NO: 2497252 - RNA, 19 nt, Artificial Sequence
  Description of Artificial Sequence: Synthetic oligonucleotide
cauauucaggaagaggugg

SEQ ID NO: 2497253 - RNA, 19 nt, Artificial Sequence
  Description of Artificial Sequence: Synthetic oligonucleotide
uuaaguuuaucaagaaauu

SEQ ID NO: 2497254 - RNA, 19 nt, Artificial Sequence
  Description of Artificial Sequence: Synthetic oligonucleotide
auagaagcaccauauuucu

SEQ ID NO: 2497255 - RNA, 19 nt, Artificial Sequence
  Description of Artificial Sequence: Synthetic oligonucleotide
uuucaauagacagcaauac

SEQ ID NO: 2497256 - RNA, 19 nt, Artificial Sequence
  Description of Artificial Sequence: Synthetic oligonucleotide
uagaccaucaacccuacua

SEQ ID NO: 2497257 - RNA, 19 nt, Artificial Sequence
  Description of Artificial Sequence: Synthetic oligonucleotide
cuagacguacuuuuccucc

SEQ ID NO: 2497258 - RNA, 19 nt, Artificial Sequence
  Description of Artificial Sequence: Synthetic oligonucleotide
ugcugugcagaaaugcucc

SEQ ID NO: 2497259 - RNA, 19 nt, Artificial Sequence
  Description of Artificial Sequence: Synthetic oligonucleotide
ucuguauagccgaucccgg

SEQ ID NO: 2497260 - RNA, 19 nt, Artificial Sequence
  Description of Artificial Sequence: Synthetic oligonucleotide
ucacauagaccaucaaccc

SEQ ID NO: 2497261 - RNA, 19 nt, Artificial Sequence
  Description of Artificial Sequence: Synthetic oligonucleotide
guagagaaggucucugggg

SEQ ID NO: 2497262 - RNA, 19 nt, Artificial Sequence
  Description of Artificial Sequence: Synthetic oligonucleotide
auauuauuccucugaacgu

SEQ ID NO: 2497263 - RNA, 19 nt, Artificial Sequence
  Description of Artificial Sequence: Synthetic oligonucleotide
gugugaaagacccuuguug

SEQ ID NO: 2497264 - RNA, 19 nt, Artificial Sequence
  Description of Artificial Sequence: Synthetic oligonucleotide
ugcagaaaugcuccguacc

SEQ ID NO: 2497265 - RNA, 19 nt, Artificial Sequence
  Description of Artificial Sequence: Synthetic oligonucleotide
accaguuuuaggguaaagg

SEQ ID NO: 2497266 - RNA, 19 nt, Artificial Sequence
  Description of Artificial Sequence: Synthetic oligonucleotide
ugcucuguauagccgaucc

SEQ ID NO: 2497267 - RNA, 19 nt, Artificial Sequence
  Description of Artificial Sequence: Synthetic oligonucleotide
ccuacuacugauaugguag

SEQ ID NO: 2497268 - RNA, 19 nt, Artificial Sequence
  Description of Artificial Sequence: Synthetic oligonucleotide
caucaugugcucuucuucc

SEQ ID NO: 2497269 - RNA, 19 nt, Artificial Sequence
  Description of Artificial Sequence: Synthetic oligonucleotide
uaggcgauucuucaccucc

SEQ ID NO: 2497270 - RNA, 19 nt, Artificial Sequence
  Description of Artificial Sequence: Synthetic oligonucleotide
acauaacugacugagcuug

SEQ ID NO: 2497271 - RNA, 19 nt, Artificial Sequence
  Description of Artificial Sequence: Synthetic oligonucleotide
cugagauagauacauucac

SEQ ID NO: 2497272 - RNA, 19 nt, Artificial Sequence
  Description of Artificial Sequence: Synthetic oligonucleotide
ucaauugcauccuggauuu

SEQ ID NO: 2497273 - RNA, 19 nt, Artificial Sequence
  Description of Artificial Sequence: Synthetic oligonucleotide
ucaacccuacuacugauau

SEQ ID NO: 2497274 - RNA, 19 nt, Artificial Sequence
  Description of Artificial Sequence: Synthetic oligonucleotide
uagauacauucacauaacu

SEQ ID NO: 2497275 - RNA, 19 nt, Artificial Sequence
  Description of Artificial Sequence: Synthetic oligonucleotide
cucuguauagccgaucccg

SEQ ID NO: 2497276 - RNA, 19 nt, Artificial Sequence
  Description of Artificial Sequence: Synthetic oligonucleotide
uuccuccauauucaggaag

SEQ ID NO: 2497277 - RNA, 19 nt, Artificial Sequence
  Description of Artificial Sequence: Synthetic oligonucleotide
ugaaccagugccugauggg

SEQ ID NO: 2497278 - RNA, 19 nt, Artificial Sequence
  Description of Artificial Sequence: Synthetic oligonucleotide
guaguggcgcuucugaacc

SEQ ID NO: 2497279 - RNA, 19 nt, Artificial Sequence
  Description of Artificial Sequence: Synthetic oligonucleotide
auagauacauucacauaac

SEQ ID NO: 2497280 - RNA, 19 nt, Artificial Sequence
  Description of Artificial Sequence: Synthetic oligonucleotide
agauacauucacauaacug

SEQ ID NO: 2497281 - RNA, 19 nt, Artificial Sequence
  Description of Artificial Sequence: Synthetic oligonucleotide
uuuguuugauggacgcuug

SEQ ID NO: 2497282 - RNA, 19 nt, Artificial Sequence
  Description of Artificial Sequence: Synthetic oligonucleotide
ucuucacacggacuagugc

SEQ ID NO: 2497283 - RNA, 19 nt, Artificial Sequence
  Description of Artificial Sequence: Synthetic oligonucleotide
ugcaaugcacuuguuaaug

SEQ ID NO: 2497284 - RNA, 19 nt, Artificial Sequence
  Description of Artificial Sequence: Synthetic oligonucleotide
uauaagcuaagccccguuc

SEQ ID NO: 2497285 - RNA, 19 nt, Artificial Sequence
  Description of Artificial Sequence: Synthetic oligonucleotide
gccaucucaacugagauag

SEQ ID NO: 2497286 - RNA, 19 nt, Artificial Sequence
  Description of Artificial Sequence: Synthetic oligonucleotide
guaggugacuuccaaggcc

SEQ ID NO: 2497287 - RNA, 19 nt, Artificial Sequence
  Description of Artificial Sequence: Synthetic oligonucleotide
ugaacgucaaagagguagu

SEQ ID NO: 2497288 - RNA, 19 nt, Artificial Sequence
  Description of Artificial Sequence: Synthetic oligonucleotide
auagacagcaauacagaag

SEQ ID NO: 2497289 - RNA, 19 nt, Artificial Sequence
  Description of Artificial Sequence: Synthetic oligonucleotide
uaacugacugagcuugagc

SEQ ID NO: 2497290 - RNA, 19 nt, Artificial Sequence
  Description of Artificial Sequence: Synthetic oligonucleotide
acagaaaugugguagucua

SEQ ID NO: 2497291 - RNA, 19 nt, Artificial Sequence
  Description of Artificial Sequence: Synthetic oligonucleotide
uuucgacgcagcauguucu

SEQ ID NO: 2497292 - RNA, 19 nt, Artificial Sequence
  Description of Artificial Sequence: Synthetic oligonucleotide
cuuauaugcucuguauagc

SEQ ID NO: 2497293 - RNA, 19 nt, Artificial Sequence
  Description of Artificial Sequence: Synthetic oligonucleotide
agaaaugcuccguaccaca

SEQ ID NO: 2497294 - RNA, 19 nt, Artificial Sequence
  Description of Artificial Sequence: Synthetic oligonucleotide
gaaagacccuuguugcuug

SEQ ID NO: 2497295 - RNA, 19 nt, Artificial Sequence
  Description of Artificial Sequence: Synthetic oligonucleotide
auguucugcacagaaaugu

SEQ ID NO: 2497296 - RNA, 19 nt, Artificial Sequence
  Description of Artificial Sequence: Synthetic oligonucleotide
ccuuauaugcucuguauag

SEQ ID NO: 2497297 - RNA, 19 nt, Artificial Sequence
  Description of Artificial Sequence: Synthetic oligonucleotide
ugccugaugggccuucucc

SEQ ID NO: 2497298 - RNA, 19 nt, Artificial Sequence
  Description of Artificial Sequence: Synthetic oligonucleotide
uaagcuaagccccguucca

SEQ ID NO: 2497299 - RNA, 19 nt, Artificial Sequence
  Description of Artificial Sequence: Synthetic oligonucleotide
uucaccuccuuauaugcuc

SEQ ID NO: 2497300 - RNA, 19 nt, Artificial Sequence
  Description of Artificial Sequence: Synthetic oligonucleotide
gauaugguagagaaggucu

SEQ ID NO: 2497301 - RNA, 19 nt, Artificial Sequence
  Description of Artificial Sequence: Synthetic oligonucleotide
uccuuauaugcucuguaua

SEQ ID NO: 2497302 - RNA, 19 nt, Artificial Sequence
  Description of Artificial Sequence: Synthetic oligonucleotide
uacugauaugguagagaag

SEQ ID NO: 2497303 - RNA, 19 nt, Artificial Sequence
  Description of Artificial Sequence: Synthetic oligonucleotide
cuacugauaugguagagaa

SEQ ID NO: 2497304 - RNA, 19 nt, Artificial Sequence
  Description of Artificial Sequence: Synthetic oligonucleotide
agucuaggcgauucuucac

SEQ ID NO: 2497305 - RNA, 19 nt, Artificial Sequence
  Description of Artificial Sequence: Synthetic oligonucleotide
cuuaaucacauagaccauc

SEQ ID NO: 2497306 - RNA, 19 nt, Artificial Sequence
  Description of Artificial Sequence: Synthetic oligonucleotide
guuuaacucucucuggcca

SEQ ID NO: 2497307 - RNA, 19 nt, Artificial Sequence
  Description of Artificial Sequence: Synthetic oligonucleotide
cauaggguccuguuacacc

SEQ ID NO: 2497308 - RNA, 19 nt, Artificial Sequence
  Description of Artificial Sequence: Synthetic oligonucleotide
guucugcacagaaaugugg

SEQ ID NO: 2497309 - RNA, 19 nt, Artificial Sequence
  Description of Artificial Sequence: Synthetic oligonucleotide
aauauaagcuaagccccgu

SEQ ID NO: 2497310 - RNA, 19 nt, Artificial Sequence
  Description of Artificial Sequence: Synthetic oligonucleotide
uucuucacacggacuagug

SEQ ID NO: 2497311 - RNA, 19 nt, Artificial Sequence
  Description of Artificial Sequence: Synthetic oligonucleotide
gacgugguuguccugugug

SEQ ID NO: 2497312 - RNA, 19 nt, Artificial Sequence
  Description of Artificial Sequence: Synthetic oligonucleotide
caauagacagcaauacaga

SEQ ID NO: 2497313 - RNA, 19 nt, Artificial Sequence
  Description of Artificial Sequence: Synthetic oligonucleotide
guauagccgaucccgguag

SEQ ID NO: 2497314 - RNA, 19 nt, Artificial Sequence
  Description of Artificial Sequence: Synthetic oligonucleotide
uguauagccgaucccggua

SEQ ID NO: 2497315 - RNA, 19 nt, Artificial Sequence
  Description of Artificial Sequence: Synthetic oligonucleotide
ugcacagaaaugugguagu

SEQ ID NO: 2497316 - RNA, 19 nt, Artificial Sequence
  Description of Artificial Sequence: Synthetic oligonucleotide
ugacuuccaaggccaaggc

SEQ ID NO: 2497317 - RNA, 19 nt, Artificial Sequence
  Description of Artificial Sequence: Synthetic oligonucleotide
ugcuuuacuucuucuaguu

SEQ ID NO: 2497318 - RNA, 19 nt, Artificial Sequence
  Description of Artificial Sequence: Synthetic oligonucleotide
ggauuuguuugauggacgc

SEQ ID NO: 2497319 - RNA, 19 nt, Artificial Sequence
  Description of Artificial Sequence: Synthetic oligonucleotide
ucuaggcgauucuucaccu

SEQ ID NO: 2497320 - RNA, 19 nt, Artificial Sequence
  Description of Artificial Sequence: Synthetic oligonucleotide
gaguucuucacacggacua

SEQ ID NO: 2497321 - RNA, 19 nt, Artificial Sequence
  Description of Artificial Sequence: Synthetic oligonucleotide
acauaggguccuguuacac

SEQ ID NO: 2497322 - RNA, 19 nt, Artificial Sequence
  Description of Artificial Sequence: Synthetic oligonucleotide
acugagauagauacauuca

SEQ ID NO: 2497323 - RNA, 19 nt, Artificial Sequence
  Description of Artificial Sequence: Synthetic oligonucleotide
auucuucaccuccuuauau

SEQ ID NO: 2497324 - RNA, 19 nt, Artificial Sequence
  Description of Artificial Sequence: Synthetic oligonucleotide
uuccucugaacgucaaaga

SEQ ID NO: 2497325 - RNA, 19 nt, Artificial Sequence
  Description of Artificial Sequence: Synthetic oligonucleotide
uuguugcuuguaauacccc

SEQ ID NO: 2497326 - RNA, 19 nt, Artificial Sequence
  Description of Artificial Sequence: Synthetic oligonucleotide
uauagccgaucccgguagg

SEQ ID NO: 2497327 - RNA, 19 nt, Artificial Sequence
  Description of Artificial Sequence: Synthetic oligonucleotide
ggcaauauuauuccucuga

SEQ ID NO: 2497328 - RNA, 19 nt, Artificial Sequence
  Description of Artificial Sequence: Synthetic oligonucleotide
acuacugauaugguagaga

SEQ ID NO: 2497329 - RNA, 19 nt, Artificial Sequence
  Description of Artificial Sequence: Synthetic oligonucleotide
ugucaauugcauccuggau

SEQ ID NO: 2497330 - RNA, 19 nt, Artificial Sequence
  Description of Artificial Sequence: Synthetic oligonucleotide
uccugcugugcagaaaugc

SEQ ID NO: 2497331 - RNA, 19 nt, Artificial Sequence
  Description of Artificial Sequence: Synthetic oligonucleotide
auaugguagagaaggucuc

SEQ ID NO: 2497332 - RNA, 19 nt, Artificial Sequence
  Description of Artificial Sequence: Synthetic oligonucleotide
cuuucgacgcagcauguuc

SEQ ID NO: 2497333 - RNA, 19 nt, Artificial Sequence
  Description of Artificial Sequence: Synthetic oligonucleotide
uuuaacucucucuggccau

SEQ ID NO: 2497334 - RNA, 19 nt, Artificial Sequence
  Description of Artificial Sequence: Synthetic oligonucleotide
cuccauauucaggaagagg

SEQ ID NO: 2497335 - RNA, 19 nt, Artificial Sequence
  Description of Artificial Sequence: Synthetic oligonucleotide
ccucugaacgucaaagagg

SEQ ID NO: 2497336 - RNA, 19 nt, Artificial Sequence
  Description of Artificial Sequence: Synthetic oligonucleotide
ugaugggccuucuccaugu

SEQ ID NO: 2497337 - RNA, 19 nt, Artificial Sequence
  Description of Artificial Sequence: Synthetic oligonucleotide
ucugggguaaucacauaua

SEQ ID NO: 2497338 - RNA, 19 nt, Artificial Sequence
  Description of Artificial Sequence: Synthetic oligonucleotide
gggguaaucacauauauuu

SEQ ID NO: 2497339 - RNA, 19 nt, Artificial Sequence
  Description of Artificial Sequence: Synthetic oligonucleotide
ucuuaaucacauagaccau

SEQ ID NO: 2497340 - RNA, 19 nt, Artificial Sequence
  Description of Artificial Sequence: Synthetic oligonucleotide
auucuccaauagaagcacc

SEQ ID NO: 2497341 - RNA, 19 nt, Artificial Sequence
  Description of Artificial Sequence: Synthetic oligonucleotide
uuacaccaguuuuagggua

SEQ ID NO: 2497342 - RNA, 19 nt, Artificial Sequence
  Description of Artificial Sequence: Synthetic oligonucleotide
cucugaacgucaaagaggu

SEQ ID NO: 2497343 - RNA, 19 nt, Artificial Sequence
  Description of Artificial Sequence: Synthetic oligonucleotide
agauagauacauucacaua

SEQ ID NO: 2497344 - RNA, 19 nt, Artificial Sequence
  Description of Artificial Sequence: Synthetic oligonucleotide
uucacacggacuagugccu

SEQ ID NO: 2497345 - RNA, 19 nt, Artificial Sequence
  Description of Artificial Sequence: Synthetic oligonucleotide
uagacguacuuuuccucca

SEQ ID NO: 2497346 - RNA, 19 nt, Artificial Sequence
  Description of Artificial Sequence: Synthetic oligonucleotide
ugccuguuuaacucucucu

SEQ ID NO: 2497347 - RNA, 19 nt, Artificial Sequence
  Description of Artificial Sequence: Synthetic oligonucleotide
uacuacugauaugguagag

SEQ ID NO: 2497348 - RNA, 19 nt, Artificial Sequence
  Description of Artificial Sequence: Synthetic oligonucleotide
gccuguuuaacucucucug

SEQ ID NO: 2497349 - RNA, 19 nt, Artificial Sequence
  Description of Artificial Sequence: Synthetic oligonucleotide
uaugguagagaaggucucu

SEQ ID NO: 2497350 - RNA, 19 nt, Artificial Sequence
  Description of Artificial Sequence: Synthetic oligonucleotide
acauagaccaucaacccua

SEQ ID NO: 2497351 - RNA, 19 nt, Artificial Sequence
  Description of Artificial Sequence: Synthetic oligonucleotide
agcuaagccccguuccaag

SEQ ID NO: 2497352 - RNA, 19 nt, Artificial Sequence
  Description of Artificial Sequence: Synthetic oligonucleotide
ugaaagacccuuguugcuu

SEQ ID NO: 2497353 - RNA, 19 nt, Artificial Sequence
  Description of Artificial Sequence: Synthetic oligonucleotide
auaacugacugagcuugag

SEQ ID NO: 2497354 - RNA, 19 nt, Artificial Sequence
  Description of Artificial Sequence: Synthetic oligonucleotide
aagacgugguuguccugug

SEQ ID NO: 2497355 - RNA, 19 nt, Artificial Sequence
  Description of Artificial Sequence: Synthetic oligonucleotide
ccaguuuuaggguaaagga

SEQ ID NO: 2497356 - RNA, 19 nt, Artificial Sequence
  Description of Artificial Sequence: Synthetic oligonucleotide
aaaauucuucagggaugag

SEQ ID NO: 2497357 - RNA, 19 nt, Artificial Sequence
  Description of Artificial Sequence: Synthetic oligonucleotide
uugagccuucuuugcaagc

SEQ ID NO: 2497358 - RNA, 19 nt, Artificial Sequence
  Description of Artificial Sequence: Synthetic oligonucleotide
uacaggggcaagacguggu

SEQ ID NO: 2497359 - RNA, 19 nt, Artificial Sequence
  Description of Artificial Sequence: Synthetic oligonucleotide
gucaauugcauccuggauu

SEQ ID NO: 2497360 - RNA, 19 nt, Artificial Sequence
  Description of Artificial Sequence: Synthetic oligonucleotide
aggggcaagacgugguugu

SEQ ID NO: 2497361 - RNA, 19 nt, Artificial Sequence
  Description of Artificial Sequence: Synthetic oligonucleotide
guuuuagaucugcaaugca

SEQ ID NO: 2497362 - RNA, 19 nt, Artificial Sequence
  Description of Artificial Sequence: Synthetic oligonucleotide
gcacauaggguccuguuac

SEQ ID NO: 2497363 - RNA, 19 nt, Artificial Sequence
  Description of Artificial Sequence: Synthetic oligonucleotide
aucaugugcucuucuuccu

SEQ ID NO: 2497364 - RNA, 19 nt, Artificial Sequence
  Description of Artificial Sequence: Synthetic oligonucleotide
uuauuccucugaacgucaa

SEQ ID NO: 2497365 - RNA, 19 nt, Artificial Sequence
  Description of Artificial Sequence: Synthetic oligonucleotide
uucgacgcagcauguucug

SEQ ID NO: 2497366 - RNA, 19 nt, Artificial Sequence
  Description of Artificial Sequence: Synthetic oligonucleotide
aaagacccuuguugcuugu

SEQ ID NO: 2497367 - RNA, 19 nt, Artificial Sequence
  Description of Artificial Sequence: Synthetic oligonucleotide
auuauuccucugaacguca

SEQ ID NO: 2497368 - RNA, 19 nt, Artificial Sequence
  Description of Artificial Sequence: Synthetic oligonucleotide
uaauuucaauagacagcaa

SEQ ID NO: 2497369 - RNA, 19 nt, Artificial Sequence
  Description of Artificial Sequence: Synthetic oligonucleotide
gacagcaauacagaagagu

SEQ ID NO: 2497370 - RNA, 19 nt, Artificial Sequence
  Description of Artificial Sequence: Synthetic oligonucleotide
uggcgcuucugaaccagug

SEQ ID NO: 2497371 - RNA, 19 nt, Artificial Sequence
  Description of Artificial Sequence: Synthetic oligonucleotide
guuacaccaguuuuagggu

SEQ ID NO: 2497372 - RNA, 19 nt, Artificial Sequence
  Description of Artificial Sequence: Synthetic oligonucleotide
uugauggacgcuugcuuua

SEQ ID NO: 2497373 - RNA, 19 nt, Artificial Sequence
  Description of Artificial Sequence: Synthetic oligonucleotide
ucugcacagaaauguggua

SEQ ID NO: 2497374 - RNA, 19 nt, Artificial Sequence
  Description of Artificial Sequence: Synthetic oligonucleotide
cuuugcaagcaguuuuaga

SEQ ID NO: 2497375 - RNA, 19 nt, Artificial Sequence
  Description of Artificial Sequence: Synthetic oligonucleotide
aguucuucacacggacuag

SEQ ID NO: 2497376 - RNA, 19 nt, Artificial Sequence
  Description of Artificial Sequence: Synthetic oligonucleotide
gauucuucaccuccuuaua

SEQ ID NO: 2497377 - RNA, 19 nt, Artificial Sequence
  Description of Artificial Sequence: Synthetic oligonucleotide
gaacgucaaagagguagug

SEQ ID NO: 2497378 - RNA, 19 nt, Artificial Sequence
  Description of Artificial Sequence: Synthetic oligonucleotide
uaugcucuguauagccgau

SEQ ID NO: 2497379 - RNA, 19 nt, Artificial Sequence
  Description of Artificial Sequence: Synthetic oligonucleotide
cauagaccaucaacccuac

SEQ ID NO: 2497380 - RNA, 19 nt, Artificial Sequence
  Description of Artificial Sequence: Synthetic oligonucleotide
gcucuucuuccuuucgacg

SEQ ID NO: 2497381 - RNA, 19 nt, Artificial Sequence
  Description of Artificial Sequence: Synthetic oligonucleotide
agccgaucccgguagguga

SEQ ID NO: 2497382 - RNA, 19 nt, Artificial Sequence
  Description of Artificial Sequence: Synthetic oligonucleotide
gcaccauauuucuuaauca

SEQ ID NO: 2497383 - RNA, 19 nt, Artificial Sequence
  Description of Artificial Sequence: Synthetic oligonucleotide
agcacauaggguccuguua

SEQ ID NO: 2497384 - RNA, 19 nt, Artificial Sequence
  Description of Artificial Sequence: Synthetic oligonucleotide
aagcacauaggguccuguu

SEQ ID NO: 2497385 - RNA, 19 nt, Artificial Sequence
  Description of Artificial Sequence: Synthetic oligonucleotide
gaagaguucuucacacgga

SEQ ID NO: 2497386 - RNA, 19 nt, Artificial Sequence
  Description of Artificial Sequence: Synthetic oligonucleotide
ugcuccguaccacaugcuu

SEQ ID NO: 2497387 - RNA, 19 nt, Artificial Sequence
  Description of Artificial Sequence: Synthetic oligonucleotide
gguaguggcgcuucugaac

SEQ ID NO: 2497388 - RNA, 19 nt, Artificial Sequence
  Description of Artificial Sequence: Synthetic oligonucleotide
gacgcagcauguucugcac

SEQ ID NO: 2497389 - RNA, 19 nt, Artificial Sequence
  Description of Artificial Sequence: Synthetic oligonucleotide
guacaggggcaagacgugg

SEQ ID NO: 2497390 - RNA, 19 nt, Artificial Sequence
  Description of Artificial Sequence: Synthetic oligonucleotide
gacuuccaaggccaaggca

SEQ ID NO: 2497391 - RNA, 19 nt, Artificial Sequence
  Description of Artificial Sequence: Synthetic oligonucleotide
aagagguaguggcgcuucu

SEQ ID NO: 2497392 - RNA, 19 nt, Artificial Sequence
  Description of Artificial Sequence: Synthetic oligonucleotide
uccaaggccaaggcaauau

SEQ ID NO: 2497393 - RNA, 19 nt, Artificial Sequence
  Description of Artificial Sequence: Synthetic oligonucleotide
auauaagcuaagccccguu

SEQ ID NO: 2497394 - RNA, 19 nt, Artificial Sequence
  Description of Artificial Sequence: Synthetic oligonucleotide
ugguagucuaggcgauucu

SEQ ID NO: 2497395 - RNA, 19 nt, Artificial Sequence
  Description of Artificial Sequence: Synthetic oligonucleotide
agacccuuguugcuuguaa

SEQ ID NO: 2497396 - RNA, 19 nt, Artificial Sequence
  Description of Artificial Sequence: Synthetic oligonucleotide
aagcaccauauuucuuaau

SEQ ID NO: 2497397 - RNA, 19 nt, Artificial Sequence
  Description of Artificial Sequence: Synthetic oligonucleotide
ccuuguugcuuguaauacc

SEQ ID NO: 2497398 - RNA, 19 nt, Artificial Sequence
  Description of Artificial Sequence: Synthetic oligonucleotide
cgguaggugacuuccaagg

SEQ ID NO: 2497399 - RNA, 19 nt, Artificial Sequence
  Description of Artificial Sequence: Synthetic oligonucleotide
aggcaauauuauuccucug

SEQ ID NO: 2497400 - RNA, 19 nt, Artificial Sequence
  Description of Artificial Sequence: Synthetic oligonucleotide
gacuagugccuguuuaacu

SEQ ID NO: 2497401 - RNA, 19 nt, Artificial Sequence
  Description of Artificial Sequence: Synthetic oligonucleotide
auggacgcuugcuuuacuu

SEQ ID NO: 2497402 - RNA, 19 nt, Artificial Sequence
  Description of Artificial Sequence: Synthetic oligonucleotide
ucuccaauagaagcaccau

SEQ ID NO: 2497403 - RNA, 19 nt, Artificial Sequence
  Description of Artificial Sequence: Synthetic oligonucleotide
guagucuaggcgauucuuc

SEQ ID NO: 2497404 - RNA, 19 nt, Artificial Sequence
  Description of Artificial Sequence: Synthetic oligonucleotide
gcagaaaugcuccguacca

SEQ ID NO: 2497405 - RNA, 19 nt, Artificial Sequence
  Description of Artificial Sequence: Synthetic oligonucleotide
gcaauauuauuccucugaa

SEQ ID NO: 2497406 - RNA, 19 nt, Artificial Sequence
  Description of Artificial Sequence: Synthetic oligonucleotide
gcgcuucugaaccagugcc

SEQ ID NO: 2497407 - RNA, 19 nt, Artificial Sequence
  Description of Artificial Sequence: Synthetic oligonucleotide
aagcaguuuuagaucugca

SEQ ID NO: 2497408 - RNA, 19 nt, Artificial Sequence
  Description of Artificial Sequence: Synthetic oligonucleotide
cauucacauaacugacuga

SEQ ID NO: 2497409 - RNA, 19 nt, Artificial Sequence
  Description of Artificial Sequence: Synthetic oligonucleotide
cagaaaugcuccguaccac

SEQ ID NO: 2497410 - RNA, 19 nt, Artificial Sequence
  Description of Artificial Sequence: Synthetic oligonucleotide
uccuuucgacgcagcaugu

SEQ ID NO: 2497411 - RNA, 19 nt, Artificial Sequence
  Description of Artificial Sequence: Synthetic oligonucleotide
gcuuuacuucuucuaguug

SEQ ID NO: 2497412 - RNA, 19 nt, Artificial Sequence
  Description of Artificial Sequence: Synthetic oligonucleotide
caaggccaaggcaauauua

SEQ ID NO: 2497413 - RNA, 19 nt, Artificial Sequence
  Description of Artificial Sequence: Synthetic oligonucleotide
aguggcgcuucugaaccag

SEQ ID NO: 2497414 - RNA, 19 nt, Artificial Sequence
  Description of Artificial Sequence: Synthetic oligonucleotide
acgugguuguccuguguga

SEQ ID NO: 2497415 - RNA, 19 nt, Artificial Sequence
  Description of Artificial Sequence: Synthetic oligonucleotide
ugauggacgcuugcuuuac

SEQ ID NO: 2497416 - RNA, 19 nt, Artificial Sequence
  Description of Artificial Sequence: Synthetic oligonucleotide
acggacuagugccuguuua

SEQ ID NO: 2497417 - RNA, 19 nt, Artificial Sequence
  Description of Artificial Sequence: Synthetic oligonucleotide
uuaacucucucuggccauc

SEQ ID NO: 2497418 - RNA, 19 nt, Artificial Sequence
  Description of Artificial Sequence: Synthetic oligonucleotide
caacccuacuacugauaug

SEQ ID NO: 2497419 - RNA, 19 nt, Artificial Sequence
  Description of Artificial Sequence: Synthetic oligonucleotide
cugaugggccuucuccaug

SEQ ID NO: 2497420 - RNA, 19 nt, Artificial Sequence
  Description of Artificial Sequence: Synthetic oligonucleotide
aagcuaagccccguuccaa

SEQ ID NO: 2497421 - RNA, 19 nt, Artificial Sequence
  Description of Artificial Sequence: Synthetic oligonucleotide
uagccgaucccgguaggug

SEQ ID NO: 2497422 - RNA, 19 nt, Artificial Sequence
  Description of Artificial Sequence: Synthetic oligonucleotide
ccguuccaagcacauaggg

SEQ ID NO: 2497423 - RNA, 19 nt, Artificial Sequence
  Description of Artificial Sequence: Synthetic oligonucleotide
agacguacuuuuccuccau

SEQ ID NO: 2497424 - RNA, 19 nt, Artificial Sequence
  Description of Artificial Sequence: Synthetic oligonucleotide
ggaagaggugguacagggg

SEQ ID NO: 2497425 - RNA, 19 nt, Artificial Sequence
  Description of Artificial Sequence: Synthetic oligonucleotide
caaugcacuuguuaauggu

SEQ ID NO: 2497426 - RNA, 19 nt, Artificial Sequence
  Description of Artificial Sequence: Synthetic oligonucleotide
gugguagucuaggcgauuc

SEQ ID NO: 2497427 - RNA, 19 nt, Artificial Sequence
  Description of Artificial Sequence: Synthetic oligonucleotide
agcccuagacguacuuuuc

SEQ ID NO: 2497428 - RNA, 19 nt, Artificial Sequence
  Description of Artificial Sequence: Synthetic oligonucleotide
uaacucucucuggccaucu

SEQ ID NO: 2497429 - RNA, 19 nt, Artificial Sequence
  Description of Artificial Sequence: Synthetic oligonucleotide
cauaacugacugagcuuga

SEQ ID NO: 2497430 - RNA, 19 nt, Artificial Sequence
  Description of Artificial Sequence: Synthetic oligonucleotide
aggguccuguuacaccagu

SEQ ID NO: 2497431 - RNA, 19 nt, Artificial Sequence
  Description of Artificial Sequence: Synthetic oligonucleotide
ggcgcuucugaaccagugc

SEQ ID NO: 2497432 - RNA, 19 nt, Artificial Sequence
  Description of Artificial Sequence: Synthetic oligonucleotide
aucucaacugagauagaua

SEQ ID NO: 2497433 - RNA, 19 nt, Artificial Sequence
  Description of Artificial Sequence: Synthetic oligonucleotide
gcuaagccccguuccaagc

SEQ ID NO: 2497434 - RNA, 19 nt, Artificial Sequence
  Description of Artificial Sequence: Synthetic oligonucleotide
ugacugagcuugagccuuc

SEQ ID NO: 2497435 - RNA, 19 nt, Artificial Sequence
  Description of Artificial Sequence: Synthetic oligonucleotide
cgucaaagagguaguggcg

SEQ ID NO: 2497436 - RNA, 19 nt, Artificial Sequence
  Description of Artificial Sequence: Synthetic oligonucleotide
ucgacgcagcauguucugc

SEQ ID NO: 2497437 - RNA, 19 nt, Artificial Sequence
  Description of Artificial Sequence: Synthetic oligonucleotide
gaccaucaacccuacuacu

SEQ ID NO: 2497438 - RNA, 19 nt, Artificial Sequence
  Description of Artificial Sequence: Synthetic oligonucleotide
agacgugguuguccugugu

SEQ ID NO: 2497439 - RNA, 19 nt, Artificial Sequence
  Description of Artificial Sequence: Synthetic oligonucleotide
augcucuguauagccgauc

SEQ ID NO: 2497440 - RNA, 19 nt, Artificial Sequence
  Description of Artificial Sequence: Synthetic oligonucleotide
gcccuagacguacuuuucc

SEQ ID NO: 2497441 - RNA, 19 nt, Artificial Sequence
  Description of Artificial Sequence: Synthetic oligonucleotide
auagaccaucaacccuacu

SEQ ID NO: 2497442 - RNA, 19 nt, Artificial Sequence
  Description of Artificial Sequence: Synthetic oligonucleotide
cacauagaccaucaacccu

SEQ ID NO: 2497443 - RNA, 19 nt, Artificial Sequence
  Description of Artificial Sequence: Synthetic oligonucleotide
guaaucacauauauuucuu

SEQ ID NO: 2497444 - RNA, 19 nt, Artificial Sequence
  Description of Artificial Sequence: Synthetic oligonucleotide
gaucccgguaggugacuuc

SEQ ID NO: 2497445 - RNA, 19 nt, Artificial Sequence
  Description of Artificial Sequence: Synthetic oligonucleotide
ccuagacguacuuuuccuc

SEQ ID NO: 2497446 - RNA, 19 nt, Artificial Sequence
  Description of Artificial Sequence: Synthetic oligonucleotide
auugcauccuggauuuguu

SEQ ID NO: 2497447 - RNA, 19 nt, Artificial Sequence
  Description of Artificial Sequence: Synthetic oligonucleotide
cuagugccuguuuaacucu

SEQ ID NO: 2497448 - RNA, 19 nt, Artificial Sequence
  Description of Artificial Sequence: Synthetic oligonucleotide
ugagcccuagacguacuuu

SEQ ID NO: 2497449 - RNA, 19 nt, Artificial Sequence
  Description of Artificial Sequence: Synthetic oligonucleotide
gauuuguuugauggacgcu

SEQ ID NO: 2497450 - RNA, 19 nt, Artificial Sequence
  Description of Artificial Sequence: Synthetic oligonucleotide
auagccgaucccgguaggu

SEQ ID NO: 2497451 - RNA, 19 nt, Artificial Sequence
  Description of Artificial Sequence: Synthetic oligonucleotide
cugggguaaucacauauau

SEQ ID NO: 2497452 - RNA, 19 nt, Artificial Sequence
  Description of Artificial Sequence: Synthetic oligonucleotide
gagcccuagacguacuuuu

SEQ ID NO: 2497453 - RNA, 19 nt, Artificial Sequence
  Description of Artificial Sequence: Synthetic oligonucleotide
ucugaacgucaaagaggua

SEQ ID NO: 2497454 - RNA, 19 nt, Artificial Sequence
  Description of Artificial Sequence: Synthetic oligonucleotide
ggaugagcccuagacguac

SEQ ID NO: 2497455 - RNA, 19 nt, Artificial Sequence
  Description of Artificial Sequence: Synthetic oligonucleotide
cacauaggguccuguuaca

SEQ ID NO: 2497456 - RNA, 19 nt, Artificial Sequence
  Description of Artificial Sequence: Synthetic oligonucleotide
cuccguaccacaugcuucu

SEQ ID NO: 2497457 - RNA, 19 nt, Artificial Sequence
  Description of Artificial Sequence: Synthetic oligonucleotide
acaggggcaagacgugguu

SEQ ID NO: 2497458 - RNA, 19 nt, Artificial Sequence
  Description of Artificial Sequence: Synthetic oligonucleotide
cccuuguugcuuguaauac

SEQ ID NO: 2497459 - RNA, 19 nt, Artificial Sequence
  Description of Artificial Sequence: Synthetic oligonucleotide
accuccuuauaugcucugu

SEQ ID NO: 2497460 - RNA, 19 nt, Artificial Sequence
  Description of Artificial Sequence: Synthetic oligonucleotide
gacguacuuuuccuccaua

SEQ ID NO: 2497461 - RNA, 19 nt, Artificial Sequence
  Description of Artificial Sequence: Synthetic oligonucleotide
ccugugugaaagacccuug

SEQ ID NO: 2497462 - RNA, 19 nt, Artificial Sequence
  Description of Artificial Sequence: Synthetic oligonucleotide
caggggcaagacgugguug

SEQ ID NO: 2497463 - RNA, 19 nt, Artificial Sequence
  Description of Artificial Sequence: Synthetic oligonucleotide
aggugguacaggggcaaga

SEQ ID NO: 2497464 - RNA, 19 nt, Artificial Sequence
  Description of Artificial Sequence: Synthetic oligonucleotide
caccaguuuuaggguaaag

SEQ ID NO: 2497465 - RNA, 19 nt, Artificial Sequence
  Description of Artificial Sequence: Synthetic oligonucleotide
caccuccuuauaugcucug

SEQ ID NO: 2497466 - RNA, 19 nt, Artificial Sequence
  Description of Artificial Sequence: Synthetic oligonucleotide
ggacuagugccuguuuaac

SEQ ID NO: 2497467 - RNA, 19 nt, Artificial Sequence
  Description of Artificial Sequence: Synthetic oligonucleotide
gcucuguauagccgauccc

SEQ ID NO: 2497468 - RNA, 19 nt, Artificial Sequence
  Description of Artificial Sequence: Synthetic oligonucleotide
gguacaggggcaagacgug

SEQ ID NO: 2497469 - RNA, 19 nt, Artificial Sequence
  Description of Artificial Sequence: Synthetic oligonucleotide
ggacgcuugcuuuacuucu

SEQ ID NO: 2497470 - RNA, 19 nt, Artificial Sequence
  Description of Artificial Sequence: Synthetic oligonucleotide
aagccccguuccaagcaca

SEQ ID NO: 2497471 - RNA, 19 nt, Artificial Sequence
  Description of Artificial Sequence: Synthetic oligonucleotide
cuuuuccugcugugcagaa

SEQ ID NO: 2497472 - RNA, 19 nt, Artificial Sequence
  Description of Artificial Sequence: Synthetic oligonucleotide
cccguuccaagcacauagg

SEQ ID NO: 2497473 - RNA, 19 nt, Artificial Sequence
  Description of Artificial Sequence: Synthetic oligonucleotide
caucucaacugagauagau

SEQ ID NO: 2497474 - RNA, 19 nt, Artificial Sequence
  Description of Artificial Sequence: Synthetic oligonucleotide
cugauaugguagagaaggu

SEQ ID NO: 2497475 - RNA, 19 nt, Artificial Sequence
  Description of Artificial Sequence: Synthetic oligonucleotide
gugguuguccugugugaaa

SEQ ID NO: 2497476 - RNA, 19 nt, Artificial Sequence
  Description of Artificial Sequence: Synthetic oligonucleotide
aagacccuuguugcuugua

SEQ ID NO: 2497477 - RNA, 19 nt, Artificial Sequence
  Description of Artificial Sequence: Synthetic oligonucleotide
gaugggccuucuccauguc

SEQ ID NO: 2497478 - RNA, 19 nt, Artificial Sequence
  Description of Artificial Sequence: Synthetic oligonucleotide
cacagaaaugugguagucu

SEQ ID NO: 2497479 - RNA, 19 nt, Artificial Sequence
  Description of Artificial Sequence: Synthetic oligonucleotide
aucaacccuacuacugaua

SEQ ID NO: 2497480 - RNA, 19 nt, Artificial Sequence
  Description of Artificial Sequence: Synthetic oligonucleotide
ggucucugggguaaucaca

SEQ ID NO: 2497481 - RNA, 19 nt, Artificial Sequence
  Description of Artificial Sequence: Synthetic oligonucleotide
ggcaagacgugguuguccu

SEQ ID NO: 2497482 - RNA, 19 nt, Artificial Sequence
  Description of Artificial Sequence: Synthetic oligonucleotide
cugugugaaagacccuugu

SEQ ID NO: 2497483 - RNA, 19 nt, Artificial Sequence
  Description of Artificial Sequence: Synthetic oligonucleotide
gggcaagacgugguugucc

SEQ ID NO: 2497484 - RNA, 19 nt, Artificial Sequence
  Description of Artificial Sequence: Synthetic oligonucleotide
gccugaugggccuucucca

SEQ ID NO: 2497485 - RNA, 19 nt, Artificial Sequence
  Description of Artificial Sequence: Synthetic oligonucleotide
uuccaaggccaaggcaaua

SEQ ID NO: 2497486 - RNA, 19 nt, Artificial Sequence
  Description of Artificial Sequence: Synthetic oligonucleotide
cacauaacugacugagcuu

SEQ ID NO: 2497487 - RNA, 19 nt, Artificial Sequence
  Description of Artificial Sequence: Synthetic oligonucleotide
cguaccacaugcuucucca

SEQ ID NO: 2497488 - RNA, 19 nt, Artificial Sequence
  Description of Artificial Sequence: Synthetic oligonucleotide
augugguagucuaggcgau

SEQ ID NO: 2497489 - RNA, 19 nt, Artificial Sequence
  Description of Artificial Sequence: Synthetic oligonucleotide
cuguauagccgaucccggu

SEQ ID NO: 2497490 - RNA, 19 nt, Artificial Sequence
  Description of Artificial Sequence: Synthetic oligonucleotide
aggcgauucuucaccuccu

SEQ ID NO: 2497491 - RNA, 19 nt, Artificial Sequence
  Description of Artificial Sequence: Synthetic oligonucleotide
acaccaguuuuaggguaaa

SEQ ID NO: 2497492 - RNA, 19 nt, Artificial Sequence
  Description of Artificial Sequence: Synthetic oligonucleotide
caauugcauccuggauuug

SEQ ID NO: 2497493 - RNA, 19 nt, Artificial Sequence
  Description of Artificial Sequence: Synthetic oligonucleotide
gguccuguuacaccaguuu

SEQ ID NO: 2497494 - RNA, 19 nt, Artificial Sequence
  Description of Artificial Sequence: Synthetic oligonucleotide
caugugcucuucuuccuuu

SEQ ID NO: 2497495 - RNA, 19 nt, Artificial Sequence
  Description of Artificial Sequence: Synthetic oligonucleotide
gcacagaaaugugguaguc

SEQ ID NO: 2497496 - RNA, 19 nt, Artificial Sequence
  Description of Artificial Sequence: Synthetic oligonucleotide
acacggacuagugccuguu

SEQ ID NO: 2497497 - RNA, 19 nt, Artificial Sequence
  Description of Artificial Sequence: Synthetic oligonucleotide
agaaggucucugggguaau

SEQ ID NO: 2497498 - RNA, 19 nt, Artificial Sequence
  Description of Artificial Sequence: Synthetic oligonucleotide
gcaagacgugguuguccug

SEQ ID NO: 2497499 - RNA, 19 nt, Artificial Sequence
  Description of Artificial Sequence: Synthetic oligonucleotide
acccuacuacugauauggu

SEQ ID NO: 2497500 - RNA, 19 nt, Artificial Sequence
  Description of Artificial Sequence: Synthetic oligonucleotide
gaugagcccuagacguacu

SEQ ID NO: 2497501 - RNA, 19 nt, Artificial Sequence
  Description of Artificial Sequence: Synthetic oligonucleotide
cccuacuacugauauggua

SEQ ID NO: 2497502 - RNA, 19 nt, Artificial Sequence
  Description of Artificial Sequence: Synthetic oligonucleotide
caacugagauagauacauu

SEQ ID NO: 2497503 - RNA, 19 nt, Artificial Sequence
  Description of Artificial Sequence: Synthetic oligonucleotide
augcuccguaccacaugcu

SEQ ID NO: 2497504 - RNA, 19 nt, Artificial Sequence
  Description of Artificial Sequence: Synthetic oligonucleotide
gacgcuugcuuuacuucuu

SEQ ID NO: 2497505 - RNA, 19 nt, Artificial Sequence
  Description of Artificial Sequence: Synthetic oligonucleotide
cgacgcagcauguucugca

SEQ ID NO: 2497506 - RNA, 19 nt, Artificial Sequence
  Description of Artificial Sequence: Synthetic oligonucleotide
agccccguuccaagcacau

SEQ ID NO: 2497507 - RNA, 19 nt, Artificial Sequence
  Description of Artificial Sequence: Synthetic oligonucleotide
caagcacauaggguccugu

SEQ ID NO: 2497508 - RNA, 19 nt, Artificial Sequence
  Description of Artificial Sequence: Synthetic oligonucleotide
gguagucuaggcgauucuu

SEQ ID NO: 2497509 - RNA, 19 nt, Artificial Sequence
  Description of Artificial Sequence: Synthetic oligonucleotide
cgauucuucaccuccuuau

SEQ ID NO: 2497510 - RNA, 19 nt, Artificial Sequence
  Description of Artificial Sequence: Synthetic oligonucleotide
cccuagacguacuuuuccu

SEQ ID NO: 2497511 - RNA, 19 nt, Artificial Sequence
  Description of Artificial Sequence: Synthetic oligonucleotide
cguuccaagcacauagggu

SEQ ID NO: 2497512 - RNA, 19 nt, Artificial Sequence
  Description of Artificial Sequence: Synthetic oligonucleotide
cauccuggauuuguuugau

SEQ ID NO: 2497513 - RNA, 19 nt, Artificial Sequence
  Description of Artificial Sequence: Synthetic oligonucleotide
gacugagcuugagccuucu

SEQ ID NO: 2497514 - RNA, 19 nt, Artificial Sequence
  Description of Artificial Sequence: Synthetic oligonucleotide
aggugacuuccaaggccaa

SEQ ID NO: 2497515 - RNA, 19 nt, Artificial Sequence
  Description of Artificial Sequence: Synthetic oligonucleotide
gccgaucccgguaggugac

SEQ ID NO: 2497516 - RNA, 19 nt, Artificial Sequence
  Description of Artificial Sequence: Synthetic oligonucleotide
cggacuagugccuguuuaa

SEQ ID NO: 2497517 - RNA, 19 nt, Artificial Sequence
  Description of Artificial Sequence: Synthetic oligonucleotide
ggggcaagacgugguuguc

SEQ ID NO: 2497518 - RNA, 19 nt, Artificial Sequence
  Description of Artificial Sequence: Synthetic oligonucleotide
gggaugagcccuagacgua

SEQ ID NO: 2497519 - RNA, 19 nt, Artificial Sequence
  Description of Artificial Sequence: Synthetic oligonucleotide
ccaucucaacugagauaga

SEQ ID NO: 2497520 - RNA, 19 nt, Artificial Sequence
  Description of Artificial Sequence: Synthetic oligonucleotide
gaucugcaaugcacuuguu

SEQ ID NO: 2497521 - RNA, 19 nt, Artificial Sequence
  Description of Artificial Sequence: Synthetic oligonucleotide
cgugguuguccugugugaa

SEQ ID NO: 2497522 - RNA, 19 nt, Artificial Sequence
  Description of Artificial Sequence: Synthetic oligonucleotide
gccuucuuugcaagcaguu

SEQ ID NO: 2497523 - RNA, 19 nt, Artificial Sequence
  Description of Artificial Sequence: Synthetic oligonucleotide
guccugugugaaagacccu

SEQ ID NO: 2497524 - RNA, 19 nt, Artificial Sequence
  Description of Artificial Sequence: Synthetic oligonucleotide
cacggacuagugccuguuu

SEQ ID NO: 2497525 - RNA, 19 nt, Artificial Sequence
  Description of Artificial Sequence: Synthetic oligonucleotide
ccugaugggccuucuccau

SEQ ID NO: 2497526 - RNA, 19 nt, Artificial Sequence
  Description of Artificial Sequence: Synthetic oligonucleotide
ggguccuguuacaccaguu

SEQ ID NO: 2497527 - RNA, 19 nt, Artificial Sequence
  Description of Artificial Sequence: Synthetic oligonucleotide
gccccguuccaagcacaua

SEQ ID NO: 2497528 - RNA, 19 nt, Artificial Sequence
  Description of Artificial Sequence: Synthetic oligonucleotide
ccuuucgacgcagcauguu

SEQ ID NO: 2497529 - RNA, 19 nt, Artificial Sequence
  Description of Artificial Sequence: Synthetic oligonucleotide
ccgaucccgguaggugacu

SEQ ID NO: 2497530 - RNA, 19 nt, Artificial Sequence
  Description of Artificial Sequence: Synthetic oligonucleotide
cgaucccgguaggugacuu

SEQ ID NO: 2497531 - RNA, 19 nt, Artificial Sequence
  Description of Artificial Sequence: Synthetic oligonucleotide
gacaauaccauacacaucc

SEQ ID NO: 2497532 - RNA, 19 nt, Artificial Sequence
  Description of Artificial Sequence: Synthetic oligonucleotide
aaaucuuucaaaguguugg

SEQ ID NO: 2497533 - RNA, 19 nt, Artificial Sequence
  Description of Artificial Sequence: Synthetic oligonucleotide
uuuaauuugagaaaacgac

SEQ ID NO: 2497534 - RNA, 19 nt, Artificial Sequence
  Description of Artificial Sequence: Synthetic oligonucleotide
auugaugucagcuguauac

SEQ ID NO: 2497535 - RNA, 19 nt, Artificial Sequence
  Description of Artificial Sequence: Synthetic oligonucleotide
uuuagguuuaauuugagaa

SEQ ID NO: 2497536 - RNA, 19 nt, Artificial Sequence
  Description of Artificial Sequence: Synthetic oligonucleotide
uuggucaacauaacaaugg

SEQ ID NO: 2497537 - RNA, 19 nt, Artificial Sequence
  Description of Artificial Sequence: Synthetic oligonucleotide
uuaauuugagaaaacgaca

SEQ ID NO: 2497538 - RNA, 19 nt, Artificial Sequence
  Description of Artificial Sequence: Synthetic oligonucleotide
accacgaaaucucugaugg

SEQ ID NO: 2497539 - RNA, 19 nt, Artificial Sequence
  Description of Artificial Sequence: Synthetic oligonucleotide
uguucuacacauuugguca

SEQ ID NO: 2497540 - RNA, 19 nt, Artificial Sequence
  Description of Artificial Sequence: Synthetic oligonucleotide
ucugucugcaccaucagag

SEQ ID NO: 2497541 - RNA, 19 nt, Artificial Sequence
  Description of Artificial Sequence: Synthetic oligonucleotide
aacuucugaggucauugcc

SEQ ID NO: 2497542 - RNA, 19 nt, Artificial Sequence
  Description of Artificial Sequence: Synthetic oligonucleotide
acuuagguagacuuauccc

SEQ ID NO: 2497543 - RNA, 19 nt, Artificial Sequence
  Description of Artificial Sequence: Synthetic oligonucleotide
aauaccauacacauccacg

SEQ ID NO: 2497544 - RNA, 19 nt, Artificial Sequence
  Description of Artificial Sequence: Synthetic oligonucleotide
acuuaucccaaucagcuuc

SEQ ID NO: 2497545 - RNA, 19 nt, Artificial Sequence
  Description of Artificial Sequence: Synthetic oligonucleotide
aagaucauagacaauacca

SEQ ID NO: 2497546 - RNA, 19 nt, Artificial Sequence
  Description of Artificial Sequence: Synthetic oligonucleotide
aaaguugaugagcagguca

SEQ ID NO: 2497547 - RNA, 19 nt, Artificial Sequence
  Description of Artificial Sequence: Synthetic oligonucleotide
auaccauacacauccacgg

SEQ ID NO: 2497548 - RNA, 19 nt, Artificial Sequence
  Description of Artificial Sequence: Synthetic oligonucleotide
aaaguaggccucaaaauuc

SEQ ID NO: 2497549 - RNA, 19 nt, Artificial Sequence
  Description of Artificial Sequence: Synthetic oligonucleotide
uccacucgaauuaacuugg

SEQ ID NO: 2497550 - RNA, 19 nt, Artificial Sequence
  Description of Artificial Sequence: Synthetic oligonucleotide
uacuuagguagacuuaucc

SEQ ID NO: 2497551 - RNA, 19 nt, Artificial Sequence
  Description of Artificial Sequence: Synthetic oligonucleotide
uagaucagacgaucgaugg

SEQ ID NO: 2497552 - RNA, 19 nt, Artificial Sequence
  Description of Artificial Sequence: Synthetic oligonucleotide
guuggagucagcuugcugc

SEQ ID NO: 2497553 - RNA, 19 nt, Artificial Sequence
  Description of Artificial Sequence: Synthetic oligonucleotide
uuuggucaacauaacaaug

SEQ ID NO: 2497554 - RNA, 19 nt, Artificial Sequence
  Description of Artificial Sequence: Synthetic oligonucleotide
uagccaggcauauaguugg

SEQ ID NO: 2497555 - RNA, 19 nt, Artificial Sequence
  Description of Artificial Sequence: Synthetic oligonucleotide
aucauagacaauaccauac

SEQ ID NO: 2497556 - RNA, 19 nt, Artificial Sequence
  Description of Artificial Sequence: Synthetic oligonucleotide
uaacgaaaguugaugagca

SEQ ID NO: 2497557 - RNA, 19 nt, Artificial Sequence
  Description of Artificial Sequence: Synthetic oligonucleotide
aagaacaacuucugagguc

SEQ ID NO: 2497558 - RNA, 19 nt, Artificial Sequence
  Description of Artificial Sequence: Synthetic oligonucleotide
guagucaugagccugcuug

SEQ ID NO: 2497559 - RNA, 19 nt, Artificial Sequence
  Description of Artificial Sequence: Synthetic oligonucleotide
augacucucacuugucugc

SEQ ID NO: 2497560 - RNA, 19 nt, Artificial Sequence
  Description of Artificial Sequence: Synthetic oligonucleotide
ugcugcuucuuaaaguagg

SEQ ID NO: 2497561 - RNA, 19 nt, Artificial Sequence
  Description of Artificial Sequence: Synthetic oligonucleotide
uuucucccaaaccauacgc

SEQ ID NO: 2497562 - RNA, 19 nt, Artificial Sequence
  Description of Artificial Sequence: Synthetic oligonucleotide
acucgaauuaacuugguau

SEQ ID NO: 2497563 - RNA, 19 nt, Artificial Sequence
  Description of Artificial Sequence: Synthetic oligonucleotide
augguagccaggcauauag

SEQ ID NO: 2497564 - RNA, 19 nt, Artificial Sequence
  Description of Artificial Sequence: Synthetic oligonucleotide
aaugcaccaggauugguga

SEQ ID NO: 2497565 - RNA, 19 nt, Artificial Sequence
  Description of Artificial Sequence: Synthetic oligonucleotide
aagacgaagccucccacag

SEQ ID NO: 2497566 - RNA, 19 nt, Artificial Sequence
  Description of Artificial Sequence: Synthetic oligonucleotide
aaauggaacugccgcagag

SEQ ID NO: 2497567 - RNA, 19 nt, Artificial Sequence
  Description of Artificial Sequence: Synthetic oligonucleotide
uguauacuuagguagacuu

SEQ ID NO: 2497568 - RNA, 19 nt, Artificial Sequence
  Description of Artificial Sequence: Synthetic oligonucleotide
acauaacaauggcauauac

SEQ ID NO: 2497569 - RNA, 19 nt, Artificial Sequence
  Description of Artificial Sequence: Synthetic oligonucleotide
uuagguuuaauuugagaaa

SEQ ID NO: 2497570 - RNA, 19 nt, Artificial Sequence
  Description of Artificial Sequence: Synthetic oligonucleotide
aauuugagaaaacgacacu

SEQ ID NO: 2497571 - RNA, 19 nt, Artificial Sequence
  Description of Artificial Sequence: Synthetic oligonucleotide
gaagaucauagacaauacc

SEQ ID NO: 2497572 - RNA, 19 nt, Artificial Sequence
  Description of Artificial Sequence: Synthetic oligonucleotide
ugaugguccauuccggaag

SEQ ID NO: 2497573 - RNA, 19 nt, Artificial Sequence
  Description of Artificial Sequence: Synthetic oligonucleotide
uuucuucuccagaagacga

SEQ ID NO: 2497574 - RNA, 19 nt, Artificial Sequence
  Description of Artificial Sequence: Synthetic oligonucleotide
uagacuuaucccaaucagc

SEQ ID NO: 2497575 - RNA, 19 nt, Artificial Sequence
  Description of Artificial Sequence: Synthetic oligonucleotide
ucgauggcaaugaaagugc

SEQ ID NO: 2497576 - RNA, 19 nt, Artificial Sequence
  Description of Artificial Sequence: Synthetic oligonucleotide
aaaacgacacuucauuauu

SEQ ID NO: 2497577 - RNA, 19 nt, Artificial Sequence
  Description of Artificial Sequence: Synthetic oligonucleotide
uugaugagcaggucagugg

SEQ ID NO: 2497578 - RNA, 19 nt, Artificial Sequence
  Description of Artificial Sequence: Synthetic oligonucleotide
uuuuagguuuaauuugaga

SEQ ID NO: 2497579 - RNA, 19 nt, Artificial Sequence
  Description of Artificial Sequence: Synthetic oligonucleotide
cagcuguauacuuagguag

SEQ ID NO: 2497580 - RNA, 19 nt, Artificial Sequence
  Description of Artificial Sequence: Synthetic oligonucleotide
ucugcuucauguagucucg

SEQ ID NO: 2497581 - RNA, 19 nt, Artificial Sequence
  Description of Artificial Sequence: Synthetic oligonucleotide
gaaaucuuucuuggaaugg

SEQ ID NO: 2497582 - RNA, 19 nt, Artificial Sequence
  Description of Artificial Sequence: Synthetic oligonucleotide
uuugagaaaacgacacuuc

SEQ ID NO: 2497583 - RNA, 19 nt, Artificial Sequence
  Description of Artificial Sequence: Synthetic oligonucleotide
gguuuaauuugagaaaacg

SEQ ID NO: 2497584 - RNA, 19 nt, Artificial Sequence
  Description of Artificial Sequence: Synthetic oligonucleotide
cuuagguagacuuauccca

SEQ ID NO: 2497585 - RNA, 19 nt, Artificial Sequence
  Description of Artificial Sequence: Synthetic oligonucleotide
uuguguggcaaugaaaucu

SEQ ID NO: 2497586 - RNA, 19 nt, Artificial Sequence
  Description of Artificial Sequence: Synthetic oligonucleotide
uuccggaagaacaacuucu

SEQ ID NO: 2497587 - RNA, 19 nt, Artificial Sequence
  Description of Artificial Sequence: Synthetic oligonucleotide
uggucaacauaacaauggc

SEQ ID NO: 2497588 - RNA, 19 nt, Artificial Sequence
  Description of Artificial Sequence: Synthetic oligonucleotide
auuuggucaacauaacaau

SEQ ID NO: 2497589 - RNA, 19 nt, Artificial Sequence
  Description of Artificial Sequence: Synthetic oligonucleotide
agaacaacuucugagguca

SEQ ID NO: 2497590 - RNA, 19 nt, Artificial Sequence
  Description of Artificial Sequence: Synthetic oligonucleotide
ucugaggucauugccacag

SEQ ID NO: 2497591 - RNA, 19 nt, Artificial Sequence
  Description of Artificial Sequence: Synthetic oligonucleotide
aucgauggcaaugaaagug

SEQ ID NO: 2497592 - RNA, 19 nt, Artificial Sequence
  Description of Artificial Sequence: Synthetic oligonucleotide
ucuaucugguagaucagac

SEQ ID NO: 2497593 - RNA, 19 nt, Artificial Sequence
  Description of Artificial Sequence: Synthetic oligonucleotide
aauggaacugccgcagagg

SEQ ID NO: 2497594 - RNA, 19 nt, Artificial Sequence
  Description of Artificial Sequence: Synthetic oligonucleotide
ugaugagcaggucaguggu

SEQ ID NO: 2497595 - RNA, 19 nt, Artificial Sequence
  Description of Artificial Sequence: Synthetic oligonucleotide
cacaguuggagucagcuug

SEQ ID NO: 2497596 - RNA, 19 nt, Artificial Sequence
  Description of Artificial Sequence: Synthetic oligonucleotide
agaucagacgaucgauggc

SEQ ID NO: 2497597 - RNA, 19 nt, Artificial Sequence
  Description of Artificial Sequence: Synthetic oligonucleotide
uucaccacgaaaucucuga

SEQ ID NO: 2497598 - RNA, 19 nt, Artificial Sequence
  Description of Artificial Sequence: Synthetic oligonucleotide
aguggugucgggaacaccg

SEQ ID NO: 2497599 - RNA, 19 nt, Artificial Sequence
  Description of Artificial Sequence: Synthetic oligonucleotide
acgaaaguugaugagcagg

SEQ ID NO: 2497600 - RNA, 19 nt, Artificial Sequence
  Description of Artificial Sequence: Synthetic oligonucleotide
uauacuuagguagacuuau

SEQ ID NO: 2497601 - RNA, 19 nt, Artificial Sequence
  Description of Artificial Sequence: Synthetic oligonucleotide
cucauucucuaucugguag

SEQ ID NO: 2497602 - RNA, 19 nt, Artificial Sequence
  Description of Artificial Sequence: Synthetic oligonucleotide
ucaaaauucuccacucgaa

SEQ ID NO: 2497603 - RNA, 19 nt, Artificial Sequence
  Description of Artificial Sequence: Synthetic oligonucleotide
ugaaauggaacugccgcag

SEQ ID NO: 2497604 - RNA, 19 nt, Artificial Sequence
  Description of Artificial Sequence: Synthetic oligonucleotide
ucauauuccucugcaaacc

SEQ ID NO: 2497605 - RNA, 19 nt, Artificial Sequence
  Description of Artificial Sequence: Synthetic oligonucleotide
aaaucuuucuuggaauggu

SEQ ID NO: 2497606 - RNA, 19 nt, Artificial Sequence
  Description of Artificial Sequence: Synthetic oligonucleotide
uggaaugguagccaggcau

SEQ ID NO: 2497607 - RNA, 19 nt, Artificial Sequence
  Description of Artificial Sequence: Synthetic oligonucleotide
ucuuucaaaguguugggua

SEQ ID NO: 2497608 - RNA, 19 nt, Artificial Sequence
  Description of Artificial Sequence: Synthetic oligonucleotide
uauuccucugcaaacccac

SEQ ID NO: 2497609 - RNA, 19 nt, Artificial Sequence
  Description of Artificial Sequence: Synthetic oligonucleotide
ugucugcaccaucagaggc

SEQ ID NO: 2497610 - RNA, 19 nt, Artificial Sequence
  Description of Artificial Sequence: Synthetic oligonucleotide
cuuaaaguaggccucaaaa

SEQ ID NO: 2497611 - RNA, 19 nt, Artificial Sequence
  Description of Artificial Sequence: Synthetic oligonucleotide
guuuaauuugagaaaacga

SEQ ID NO: 2497612 - RNA, 19 nt, Artificial Sequence
  Description of Artificial Sequence: Synthetic oligonucleotide
cauuuggucaacauaacaa

SEQ ID NO: 2497613 - RNA, 19 nt, Artificial Sequence
  Description of Artificial Sequence: Synthetic oligonucleotide
augucagcuguauacuuag

SEQ ID NO: 2497614 - RNA, 19 nt, Artificial Sequence
  Description of Artificial Sequence: Synthetic oligonucleotide
agguaacgaaaguugauga

SEQ ID NO: 2497615 - RNA, 19 nt, Artificial Sequence
  Description of Artificial Sequence: Synthetic oligonucleotide
acugcaaugcaccaggauu

SEQ ID NO: 2497616 - RNA, 19 nt, Artificial Sequence
  Description of Artificial Sequence: Synthetic oligonucleotide
uacacauuuggucaacaua

SEQ ID NO: 2497617 - RNA, 19 nt, Artificial Sequence
  Description of Artificial Sequence: Synthetic oligonucleotide
acauuuggucaacauaaca

SEQ ID NO: 2497618 - RNA, 19 nt, Artificial Sequence
  Description of Artificial Sequence: Synthetic oligonucleotide
cauagacaauaccauacac

SEQ ID NO: 2497619 - RNA, 19 nt, Artificial Sequence
  Description of Artificial Sequence: Synthetic oligonucleotide
uuagguagacuuaucccaa

SEQ ID NO: 2497620 - RNA, 19 nt, Artificial Sequence
  Description of Artificial Sequence: Synthetic oligonucleotide
aacgaaaguugaugagcag

SEQ ID NO: 2497621 - RNA, 19 nt, Artificial Sequence
  Description of Artificial Sequence: Synthetic oligonucleotide
auggcaaugaaagugccug

SEQ ID NO: 2497622 - RNA, 19 nt, Artificial Sequence
  Description of Artificial Sequence: Synthetic oligonucleotide
acgaaaucucugauggucc

SEQ ID NO: 2497623 - RNA, 19 nt, Artificial Sequence
  Description of Artificial Sequence: Synthetic oligonucleotide
agaagacgaagccucccac

SEQ ID NO: 2497624 - RNA, 19 nt, Artificial Sequence
  Description of Artificial Sequence: Synthetic oligonucleotide
ucuuggaaugguagccagg

SEQ ID NO: 2497625 - RNA, 19 nt, Artificial Sequence
  Description of Artificial Sequence: Synthetic oligonucleotide
cuccacucgaauuaacuug

SEQ ID NO: 2497626 - RNA, 19 nt, Artificial Sequence
  Description of Artificial Sequence: Synthetic oligonucleotide
cugcaaugcaccaggauug

SEQ ID NO: 2497627 - RNA, 19 nt, Artificial Sequence
  Description of Artificial Sequence: Synthetic oligonucleotide
acaguuauguccccguagu

SEQ ID NO: 2497628 - RNA, 19 nt, Artificial Sequence
  Description of Artificial Sequence: Synthetic oligonucleotide
agacuuaucccaaucagcu

SEQ ID NO: 2497629 - RNA, 19 nt, Artificial Sequence
  Description of Artificial Sequence: Synthetic oligonucleotide
auagacaauaccauacaca

SEQ ID NO: 2497630 - RNA, 19 nt, Artificial Sequence
  Description of Artificial Sequence: Synthetic oligonucleotide
auccgaagaucauagacaa

SEQ ID NO: 2497631 - RNA, 19 nt, Artificial Sequence
  Description of Artificial Sequence: Synthetic oligonucleotide
ucauucucuaucugguaga

SEQ ID NO: 2497632 - RNA, 19 nt, Artificial Sequence
  Description of Artificial Sequence: Synthetic oligonucleotide
ucaaaguguuggguaaagg

SEQ ID NO: 2497633 - RNA, 19 nt, Artificial Sequence
  Description of Artificial Sequence: Synthetic oligonucleotide
aagugccuguccuuccgac

SEQ ID NO: 2497634 - RNA, 19 nt, Artificial Sequence
  Description of Artificial Sequence: Synthetic oligonucleotide
cuguucuacacauuugguc

SEQ ID NO: 2497635 - RNA, 19 nt, Artificial Sequence
  Description of Artificial Sequence: Synthetic oligonucleotide
uucucccaaaccauacgcc

SEQ ID NO: 2497636 - RNA, 19 nt, Artificial Sequence
  Description of Artificial Sequence: Synthetic oligonucleotide
uagucaugagccugcuugg

SEQ ID NO: 2497637 - RNA, 19 nt, Artificial Sequence
  Description of Artificial Sequence: Synthetic oligonucleotide
caaugcaccaggauuggug

SEQ ID NO: 2497638 - RNA, 19 nt, Artificial Sequence
  Description of Artificial Sequence: Synthetic oligonucleotide
uuuucaccacgaaaucucu

SEQ ID NO: 2497639 - RNA, 19 nt, Artificial Sequence
  Description of Artificial Sequence: Synthetic oligonucleotide
cauaacaauggcauauaca

SEQ ID NO: 2497640 - RNA, 19 nt, Artificial Sequence
  Description of Artificial Sequence: Synthetic oligonucleotide
ucagcuguauacuuaggua

SEQ ID NO: 2497641 - RNA, 19 nt, Artificial Sequence
  Description of Artificial Sequence: Synthetic oligonucleotide
uucuuggaaugguagccag

SEQ ID NO: 2497642 - RNA, 19 nt, Artificial Sequence
  Description of Artificial Sequence: Synthetic oligonucleotide
gaucagacgaucgauggca

SEQ ID NO: 2497643 - RNA, 19 nt, Artificial Sequence
  Description of Artificial Sequence: Synthetic oligonucleotide
aacgacacuucauuauuuu

SEQ ID NO: 2497644 - RNA, 19 nt, Artificial Sequence
  Description of Artificial Sequence: Synthetic oligonucleotide
aaugaaagugccuguccuu

SEQ ID NO: 2497645 - RNA, 19 nt, Artificial Sequence
  Description of Artificial Sequence: Synthetic oligonucleotide
agugccuguccuuccgacc

SEQ ID NO: 2497646 - RNA, 19 nt, Artificial Sequence
  Description of Artificial Sequence: Synthetic oligonucleotide
cugguagaucagacgaucg

SEQ ID NO: 2497647 - RNA, 19 nt, Artificial Sequence
  Description of Artificial Sequence: Synthetic oligonucleotide
agguagacuuaucccaauc

SEQ ID NO: 2497648 - RNA, 19 nt, Artificial Sequence
  Description of Artificial Sequence: Synthetic oligonucleotide
uccggaagaacaacuucug

SEQ ID NO: 2497649 - RNA, 19 nt, Artificial Sequence
  Description of Artificial Sequence: Synthetic oligonucleotide
uuugguccuucccuguucu

SEQ ID NO: 2497650 - RNA, 19 nt, Artificial Sequence
  Description of Artificial Sequence: Synthetic oligonucleotide
ugcuuggaaggccaguacu

SEQ ID NO: 2497651 - RNA, 19 nt, Artificial Sequence
  Description of Artificial Sequence: Synthetic oligonucleotide
gaccagguaacgaaaguug

SEQ ID NO: 2497652 - RNA, 19 nt, Artificial Sequence
  Description of Artificial Sequence: Synthetic oligonucleotide
caaacccacaguuggaguc

SEQ ID NO: 2497653 - RNA, 19 nt, Artificial Sequence
  Description of Artificial Sequence: Synthetic oligonucleotide
uccuuuucuucuccagaag

SEQ ID NO: 2497654 - RNA, 19 nt, Artificial Sequence
  Description of Artificial Sequence: Synthetic oligonucleotide
ugguagaucagacgaucga

SEQ ID NO: 2497655 - RNA, 19 nt, Artificial Sequence
  Description of Artificial Sequence: Synthetic oligonucleotide
ugcaaacccacaguuggag

SEQ ID NO: 2497656 - RNA, 19 nt, Artificial Sequence
  Description of Artificial Sequence: Synthetic oligonucleotide
guaaagguccuuguguggc

SEQ ID NO: 2497657 - RNA, 19 nt, Artificial Sequence
  Description of Artificial Sequence: Synthetic oligonucleotide
aguuauguccccguaguca

SEQ ID NO: 2497658 - RNA, 19 nt, Artificial Sequence
  Description of Artificial Sequence: Synthetic oligonucleotide
cauccgaagaucauagaca

SEQ ID NO: 2497659 - RNA, 19 nt, Artificial Sequence
  Description of Artificial Sequence: Synthetic oligonucleotide
ucuucuccagaagacgaag

SEQ ID NO: 2497660 - RNA, 19 nt, Artificial Sequence
  Description of Artificial Sequence: Synthetic oligonucleotide
aggucauugccacaguuau

SEQ ID NO: 2497661 - RNA, 19 nt, Artificial Sequence
  Description of Artificial Sequence: Synthetic oligonucleotide
agaaaacgacacuucauua

SEQ ID NO: 2497662 - RNA, 19 nt, Artificial Sequence
  Description of Artificial Sequence: Synthetic oligonucleotide
uucaaaguguuggguaaag

SEQ ID NO: 2497663 - RNA, 19 nt, Artificial Sequence
  Description of Artificial Sequence: Synthetic oligonucleotide
gguaacgaaaguugaugag

SEQ ID NO: 2497664 - RNA, 19 nt, Artificial Sequence
  Description of Artificial Sequence: Synthetic oligonucleotide
ucugaugguccauuccgga

SEQ ID NO: 2497665 - RNA, 19 nt, Artificial Sequence
  Description of Artificial Sequence: Synthetic oligonucleotide
cuucugaggucauugccac

SEQ ID NO: 2497666 - RNA, 19 nt, Artificial Sequence
  Description of Artificial Sequence: Synthetic oligonucleotide
ucggaccagguaacgaaag

SEQ ID NO: 2497667 - RNA, 19 nt, Artificial Sequence
  Description of Artificial Sequence: Synthetic oligonucleotide
ucagcuugcugcuucuuaa

SEQ ID NO: 2497668 - RNA, 19 nt, Artificial Sequence
  Description of Artificial Sequence: Synthetic oligonucleotide
auggaacugccgcagagga

SEQ ID NO: 2497669 - RNA, 19 nt, Artificial Sequence
  Description of Artificial Sequence: Synthetic oligonucleotide
uguuggguaaagguccuug

SEQ ID NO: 2497670 - RNA, 19 nt, Artificial Sequence
  Description of Artificial Sequence: Synthetic oligonucleotide
guagucucggaccagguaa

SEQ ID NO: 2497671 - RNA, 19 nt, Artificial Sequence
  Description of Artificial Sequence: Synthetic oligonucleotide
acgacacuucauuauuuug

SEQ ID NO: 2497672 - RNA, 19 nt, Artificial Sequence
  Description of Artificial Sequence: Synthetic oligonucleotide
uguguggcaaugaaaucuu

SEQ ID NO: 2497673 - RNA, 19 nt, Artificial Sequence
  Description of Artificial Sequence: Synthetic oligonucleotide
cucacauuugguccuuccc

SEQ ID NO: 2497674 - RNA, 19 nt, Artificial Sequence
  Description of Artificial Sequence: Synthetic oligonucleotide
ucucggaccagguaacgaa

SEQ ID NO: 2497675 - RNA, 19 nt, Artificial Sequence
  Description of Artificial Sequence: Synthetic oligonucleotide
ugucagcuguauacuuagg

SEQ ID NO: 2497676 - RNA, 19 nt, Artificial Sequence
  Description of Artificial Sequence: Synthetic oligonucleotide
cacauuugguccuucccug

SEQ ID NO: 2497677 - RNA, 19 nt, Artificial Sequence
  Description of Artificial Sequence: Synthetic oligonucleotide
gaaaacgacacuucauuau

SEQ ID NO: 2497678 - RNA, 19 nt, Artificial Sequence
  Description of Artificial Sequence: Synthetic oligonucleotide
cacgaaaucucugaugguc

SEQ ID NO: 2497679 - RNA, 19 nt, Artificial Sequence
  Description of Artificial Sequence: Synthetic oligonucleotide
cucugaugguccauuccgg

SEQ ID NO: 2497680 - RNA, 19 nt, Artificial Sequence
  Description of Artificial Sequence: Synthetic oligonucleotide
cagguaacgaaaguugaug

SEQ ID NO: 2497681 - RNA, 19 nt, Artificial Sequence
  Description of Artificial Sequence: Synthetic oligonucleotide
caauaccauacacauccac

SEQ ID NO: 2497682 - RNA, 19 nt, Artificial Sequence
  Description of Artificial Sequence: Synthetic oligonucleotide
cauguagucucggaccagg

SEQ ID NO: 2497683 - RNA, 19 nt, Artificial Sequence
  Description of Artificial Sequence: Synthetic oligonucleotide
ucuccacucgaauuaacuu

SEQ ID NO: 2497684 - RNA, 19 nt, Artificial Sequence
  Description of Artificial Sequence: Synthetic oligonucleotide
ucacuugucugcauauuuu

SEQ ID NO: 2497685 - RNA, 19 nt, Artificial Sequence
  Description of Artificial Sequence: Synthetic oligonucleotide
uauguccccguagucauga

SEQ ID NO: 2497686 - RNA, 19 nt, Artificial Sequence
  Description of Artificial Sequence: Synthetic oligonucleotide
ucugguagaucagacgauc

SEQ ID NO: 2497687 - RNA, 19 nt, Artificial Sequence
  Description of Artificial Sequence: Synthetic oligonucleotide
gguaaagguccuugugugg

SEQ ID NO: 2497688 - RNA, 19 nt, Artificial Sequence
  Description of Artificial Sequence: Synthetic oligonucleotide
guccccguagucaugagcc

SEQ ID NO: 2497689 - RNA, 19 nt, Artificial Sequence
  Description of Artificial Sequence: Synthetic oligonucleotide
aacaccguggucaggccag

SEQ ID NO: 2497690 - RNA, 19 nt, Artificial Sequence
  Description of Artificial Sequence: Synthetic oligonucleotide
cuuucaaaguguuggguaa

SEQ ID NO: 2497691 - RNA, 19 nt, Artificial Sequence
  Description of Artificial Sequence: Synthetic oligonucleotide
aggccaggaggugaaaugg

SEQ ID NO: 2497692 - RNA, 19 nt, Artificial Sequence
  Description of Artificial Sequence: Synthetic oligonucleotide
uguccccguagucaugagc

SEQ ID NO: 2497693 - RNA, 19 nt, Artificial Sequence
  Description of Artificial Sequence: Synthetic oligonucleotide
cacaguuauguccccguag

SEQ ID NO: 2497694 - RNA, 19 nt, Artificial Sequence
  Description of Artificial Sequence: Synthetic oligonucleotide
acaguuggagucagcuugc

SEQ ID NO: 2497695 - RNA, 19 nt, Artificial Sequence
  Description of Artificial Sequence: Synthetic oligonucleotide
agaucauagacaauaccau

SEQ ID NO: 2497696 - RNA, 19 nt, Artificial Sequence
  Description of Artificial Sequence: Synthetic oligonucleotide
caaaguguuggguaaaggu

SEQ ID NO: 2497697 - RNA, 19 nt, Artificial Sequence
  Description of Artificial Sequence: Synthetic oligonucleotide
gggaaucugcuucauguag

SEQ ID NO: 2497698 - RNA, 19 nt, Artificial Sequence
  Description of Artificial Sequence: Synthetic oligonucleotide
aaagugccuguccuuccga

SEQ ID NO: 2497699 - RNA, 19 nt, Artificial Sequence
  Description of Artificial Sequence: Synthetic oligonucleotide
cuuggaaggccaguacucc

SEQ ID NO: 2497700 - RNA, 19 nt, Artificial Sequence
  Description of Artificial Sequence: Synthetic oligonucleotide
agguuuaauuugagaaaac

SEQ ID NO: 2497701 - RNA, 19 nt, Artificial Sequence
  Description of Artificial Sequence: Synthetic oligonucleotide
cccaaucagcuucagaucc

SEQ ID NO: 2497702 - RNA, 19 nt, Artificial Sequence
  Description of Artificial Sequence: Synthetic oligonucleotide
guagaucagacgaucgaug

SEQ ID NO: 2497703 - RNA, 19 nt, Artificial Sequence
  Description of Artificial Sequence: Synthetic oligonucleotide
uccagaagacgaagccucc

SEQ ID NO: 2497704 - RNA, 19 nt, Artificial Sequence
  Description of Artificial Sequence: Synthetic oligonucleotide
aggccucaaaauucuccac

SEQ ID NO: 2497705 - RNA, 19 nt, Artificial Sequence
  Description of Artificial Sequence: Synthetic oligonucleotide
gagaaaacgacacuucauu

SEQ ID NO: 2497706 - RNA, 19 nt, Artificial Sequence
  Description of Artificial Sequence: Synthetic oligonucleotide
aauucuccacucgaauuaa

SEQ ID NO: 2497707 - RNA, 19 nt, Artificial Sequence
  Description of Artificial Sequence: Synthetic oligonucleotide
gcauccgaagaucauagac

SEQ ID NO: 2497708 - RNA, 19 nt, Artificial Sequence
  Description of Artificial Sequence: Synthetic oligonucleotide
guagccaggcauauaguug

SEQ ID NO: 2497709 - RNA, 19 nt, Artificial Sequence
  Description of Artificial Sequence: Synthetic oligonucleotide
uaccauacacauccacggu

SEQ ID NO: 2497710 - RNA, 19 nt, Artificial Sequence
  Description of Artificial Sequence: Synthetic oligonucleotide
agauccucauauuccucug

SEQ ID NO: 2497711 - RNA, 19 nt, Artificial Sequence
  Description of Artificial Sequence: Synthetic oligonucleotide
acuucugaggucauugcca

SEQ ID NO: 2497712 - RNA, 19 nt, Artificial Sequence
  Description of Artificial Sequence: Synthetic oligonucleotide
uggcaaugaaaucuuucuu

SEQ ID NO: 2497713 - RNA, 19 nt, Artificial Sequence
  Description of Artificial Sequence: Synthetic oligonucleotide
guacuccucacauuugguc

SEQ ID NO: 2497714 - RNA, 19 nt, Artificial Sequence
  Description of Artificial Sequence: Synthetic oligonucleotide
gaagacgaagccucccaca

SEQ ID NO: 2497715 - RNA, 19 nt, Artificial Sequence
  Description of Artificial Sequence: Synthetic oligonucleotide
ggaacugccgcagaggaug

SEQ ID NO: 2497716 - RNA, 19 nt, Artificial Sequence
  Description of Artificial Sequence: Synthetic oligonucleotide
uccuuguguggcaaugaaa

SEQ ID NO: 2497717 - RNA, 19 nt, Artificial Sequence
  Description of Artificial Sequence: Synthetic oligonucleotide
ggguaaagguccuugugug

SEQ ID NO: 2497718 - RNA, 19 nt, Artificial Sequence
  Description of Artificial Sequence: Synthetic oligonucleotide
gucauugccacaguuaugu

SEQ ID NO: 2497719 - RNA, 19 nt, Artificial Sequence
  Description of Artificial Sequence: Synthetic oligonucleotide
gagcaggucaguggugucg

SEQ ID NO: 2497720 - RNA, 19 nt, Artificial Sequence
  Description of Artificial Sequence: Synthetic oligonucleotide
acuccucacauuugguccu

SEQ ID NO: 2497721 - RNA, 19 nt, Artificial Sequence
  Description of Artificial Sequence: Synthetic oligonucleotide
gugcauccgaagaucauag

SEQ ID NO: 2497722 - RNA, 19 nt, Artificial Sequence
  Description of Artificial Sequence: Synthetic oligonucleotide
gguagacuuaucccaauca

SEQ ID NO: 2497723 - RNA, 19 nt, Artificial Sequence
  Description of Artificial Sequence: Synthetic oligonucleotide
cccuguucuacacauuugg

SEQ ID NO: 2497724 - RNA, 19 nt, Artificial Sequence
  Description of Artificial Sequence: Synthetic oligonucleotide
ugugcauccgaagaucaua

SEQ ID NO: 2497725 - RNA, 19 nt, Artificial Sequence
  Description of Artificial Sequence: Synthetic oligonucleotide
gugaaauggaacugccgca

SEQ ID NO: 2497726 - RNA, 19 nt, Artificial Sequence
  Description of Artificial Sequence: Synthetic oligonucleotide
gucgggaacaccgugguca

SEQ ID NO: 2497727 - RNA, 19 nt, Artificial Sequence
  Description of Artificial Sequence: Synthetic oligonucleotide
uuggagucagcuugcugcu

SEQ ID NO: 2497728 - RNA, 19 nt, Artificial Sequence
  Description of Artificial Sequence: Synthetic oligonucleotide
cacauuuggucaacauaac

SEQ ID NO: 2497729 - RNA, 19 nt, Artificial Sequence
  Description of Artificial Sequence: Synthetic oligonucleotide
acacuucauuauuuuggca

SEQ ID NO: 2497730 - RNA, 19 nt, Artificial Sequence
  Description of Artificial Sequence: Synthetic oligonucleotide
ugaugucagcuguauacuu

SEQ ID NO: 2497731 - RNA, 19 nt, Artificial Sequence
  Description of Artificial Sequence: Synthetic oligonucleotide
cacuucauuauuuuggcau

SEQ ID NO: 2497732 - RNA, 19 nt, Artificial Sequence
  Description of Artificial Sequence: Synthetic oligonucleotide
aaaucucugaugguccauu

SEQ ID NO: 2497733 - RNA, 19 nt, Artificial Sequence
  Description of Artificial Sequence: Synthetic oligonucleotide
uggaaggccaguacuccuc

SEQ ID NO: 2497734 - RNA, 19 nt, Artificial Sequence
  Description of Artificial Sequence: Synthetic oligonucleotide
ucccuguucuacacauuug

SEQ ID NO: 2497735 - RNA, 19 nt, Artificial Sequence
  Description of Artificial Sequence: Synthetic oligonucleotide
gaugguccauuccggaaga

SEQ ID NO: 2497736 - RNA, 19 nt, Artificial Sequence
  Description of Artificial Sequence: Synthetic oligonucleotide
uuggaaggccaguacuccu

SEQ ID NO: 2497737 - RNA, 19 nt, Artificial Sequence
  Description of Artificial Sequence: Synthetic oligonucleotide
ucccaaaccauacgccaaa

SEQ ID NO: 2497738 - RNA, 19 nt, Artificial Sequence
  Description of Artificial Sequence: Synthetic oligonucleotide
cagacgaucgauggcaaug

SEQ ID NO: 2497739 - RNA, 19 nt, Artificial Sequence
  Description of Artificial Sequence: Synthetic oligonucleotide
uguagucucggaccaggua

SEQ ID NO: 2497740 - RNA, 19 nt, Artificial Sequence
  Description of Artificial Sequence: Synthetic oligonucleotide
uagucucggaccagguaac

SEQ ID NO: 2497741 - RNA, 19 nt, Artificial Sequence
  Description of Artificial Sequence: Synthetic oligonucleotide
gguguucucauucucuauc

SEQ ID NO: 2497742 - RNA, 19 nt, Artificial Sequence
  Description of Artificial Sequence: Synthetic oligonucleotide
aggccugugcauccgaaga

SEQ ID NO: 2497743 - RNA, 19 nt, Artificial Sequence
  Description of Artificial Sequence: Synthetic oligonucleotide
cucugcaaacccacaguug

SEQ ID NO: 2497744 - RNA, 19 nt, Artificial Sequence
  Description of Artificial Sequence: Synthetic oligonucleotide
ucccaaucagcuucagauc

SEQ ID NO: 2497745 - RNA, 19 nt, Artificial Sequence
  Description of Artificial Sequence: Synthetic oligonucleotide
aucuuucaaaguguugggu

SEQ ID NO: 2497746 - RNA, 19 nt, Artificial Sequence
  Description of Artificial Sequence: Synthetic oligonucleotide
ucugcaccaucagaggccu

SEQ ID NO: 2497747 - RNA, 19 nt, Artificial Sequence
  Description of Artificial Sequence: Synthetic oligonucleotide
ugcuucauguagucucgga

SEQ ID NO: 2497748 - RNA, 19 nt, Artificial Sequence
  Description of Artificial Sequence: Synthetic oligonucleotide
ucgaauuaacuugguauuu

SEQ ID NO: 2497749 - RNA, 19 nt, Artificial Sequence
  Description of Artificial Sequence: Synthetic oligonucleotide
ucaccacgaaaucucugau

SEQ ID NO: 2497750 - RNA, 19 nt, Artificial Sequence
  Description of Artificial Sequence: Synthetic oligonucleotide
uuucaaaguguuggguaaa

SEQ ID NO: 2497751 - RNA, 19 nt, Artificial Sequence
  Description of Artificial Sequence: Synthetic oligonucleotide
aaacgacacuucauuauuu

SEQ ID NO: 2497752 - RNA, 19 nt, Artificial Sequence
  Description of Artificial Sequence: Synthetic oligonucleotide
caccacgaaaucucugaug

SEQ ID NO: 2497753 - RNA, 19 nt, Artificial Sequence
  Description of Artificial Sequence: Synthetic oligonucleotide
agacaauaccauacacauc

SEQ ID NO: 2497754 - RNA, 19 nt, Artificial Sequence
  Description of Artificial Sequence: Synthetic oligonucleotide
ccaggauuggugauucagg

SEQ ID NO: 2497755 - RNA, 19 nt, Artificial Sequence
  Description of Artificial Sequence: Synthetic oligonucleotide
gaggccugugcauccgaag

SEQ ID NO: 2497756 - RNA, 19 nt, Artificial Sequence
  Description of Artificial Sequence: Synthetic oligonucleotide
uuauguccccguagucaug

SEQ ID NO: 2497757 - RNA, 19 nt, Artificial Sequence
  Description of Artificial Sequence: Synthetic oligonucleotide
cuuaucccaaucagcuuca

SEQ ID NO: 2497758 - RNA, 19 nt, Artificial Sequence
  Description of Artificial Sequence: Synthetic oligonucleotide
gcuucauguagucucggac

SEQ ID NO: 2497759 - RNA, 19 nt, Artificial Sequence
  Description of Artificial Sequence: Synthetic oligonucleotide
ugagccugcuuggaaggcc

SEQ ID NO: 2497760 - RNA, 19 nt, Artificial Sequence
  Description of Artificial Sequence: Synthetic oligonucleotide
aguuggcauugaugucagc

SEQ ID NO: 2497761 - RNA, 19 nt, Artificial Sequence
  Description of Artificial Sequence: Synthetic oligonucleotide
uggugucgggaacaccgug

SEQ ID NO: 2497762 - RNA, 19 nt, Artificial Sequence
  Description of Artificial Sequence: Synthetic oligonucleotide
accguggucaggccaggag

SEQ ID NO: 2497763 - RNA, 19 nt, Artificial Sequence
  Description of Artificial Sequence: Synthetic oligonucleotide
gucugcaccaucagaggcc

SEQ ID NO: 2497764 - RNA, 19 nt, Artificial Sequence
  Description of Artificial Sequence: Synthetic oligonucleotide
uccauuccggaagaacaac

SEQ ID NO: 2497765 - RNA, 19 nt, Artificial Sequence
  Description of Artificial Sequence: Synthetic oligonucleotide
accagguaacgaaaguuga

SEQ ID NO: 2497766 - RNA, 19 nt, Artificial Sequence
  Description of Artificial Sequence: Synthetic oligonucleotide
ugccacaguuauguccccg

SEQ ID NO: 2497767 - RNA, 19 nt, Artificial Sequence
  Description of Artificial Sequence: Synthetic oligonucleotide
agacgaucgauggcaauga

SEQ ID NO: 2497768 - RNA, 19 nt, Artificial Sequence
  Description of Artificial Sequence: Synthetic oligonucleotide
auacuuagguagacuuauc

SEQ ID NO: 2497769 - RNA, 19 nt, Artificial Sequence
  Description of Artificial Sequence: Synthetic oligonucleotide
aaagguccuuguguggcaa

SEQ ID NO: 2497770 - RNA, 19 nt, Artificial Sequence
  Description of Artificial Sequence: Synthetic oligonucleotide
uggcaaugaaagugccugu

SEQ ID NO: 2497771 - RNA, 19 nt, Artificial Sequence
  Description of Artificial Sequence: Synthetic oligonucleotide
auucucuaucugguagauc

SEQ ID NO: 2497772 - RNA, 19 nt, Artificial Sequence
  Description of Artificial Sequence: Synthetic oligonucleotide
gaacaccguggucaggcca

SEQ ID NO: 2497773 - RNA, 19 nt, Artificial Sequence
  Description of Artificial Sequence: Synthetic oligonucleotide
agcuguauacuuagguaga

SEQ ID NO: 2497774 - RNA, 19 nt, Artificial Sequence
  Description of Artificial Sequence: Synthetic oligonucleotide
ugcauccgaagaucauaga

SEQ ID NO: 2497775 - RNA, 19 nt, Artificial Sequence
  Description of Artificial Sequence: Synthetic oligonucleotide
gguccauuccggaagaaca

SEQ ID NO: 2497776 - RNA, 19 nt, Artificial Sequence
  Description of Artificial Sequence: Synthetic oligonucleotide
auucuccacucgaauuaac

SEQ ID NO: 2497777 - RNA, 19 nt, Artificial Sequence
  Description of Artificial Sequence: Synthetic oligonucleotide
uccuucccuguucuacaca

SEQ ID NO: 2497778 - RNA, 19 nt, Artificial Sequence
  Description of Artificial Sequence: Synthetic oligonucleotide
gaaaguugaugagcagguc

SEQ ID NO: 2497779 - RNA, 19 nt, Artificial Sequence
  Description of Artificial Sequence: Synthetic oligonucleotide
guuauguccccguagucau

SEQ ID NO: 2497780 - RNA, 19 nt, Artificial Sequence
  Description of Artificial Sequence: Synthetic oligonucleotide
acucucacuugucugcaua

SEQ ID NO: 2497781 - RNA, 19 nt, Artificial Sequence
  Description of Artificial Sequence: Synthetic oligonucleotide
aacccacaguuggagucag

SEQ ID NO: 2497782 - RNA, 19 nt, Artificial Sequence
  Description of Artificial Sequence: Synthetic oligonucleotide
ugguccauuccggaagaac

SEQ ID NO: 2497783 - RNA, 19 nt, Artificial Sequence
  Description of Artificial Sequence: Synthetic oligonucleotide
ggugucgggaacaccgugg

SEQ ID NO: 2497784 - RNA, 19 nt, Artificial Sequence
  Description of Artificial Sequence: Synthetic oligonucleotide
uccuuccgaccccagcacu

SEQ ID NO: 2497785 - RNA, 19 nt, Artificial Sequence
  Description of Artificial Sequence: Synthetic oligonucleotide
ucauguagucucggaccag

SEQ ID NO: 2497786 - RNA, 19 nt, Artificial Sequence
  Description of Artificial Sequence: Synthetic oligonucleotide
guucuacacauuuggucaa

SEQ ID NO: 2497787 - RNA, 19 nt, Artificial Sequence
  Description of Artificial Sequence: Synthetic oligonucleotide
gggaacaccguggucaggc

SEQ ID NO: 2497788 - RNA, 19 nt, Artificial Sequence
  Description of Artificial Sequence: Synthetic oligonucleotide
auauuccucugcaaaccca

SEQ ID NO: 2497789 - RNA, 19 nt, Artificial Sequence
  Description of Artificial Sequence: Synthetic oligonucleotide
acgguguucucauucucua

SEQ ID NO: 2497790 - RNA, 19 nt, Artificial Sequence
  Description of Artificial Sequence: Synthetic oligonucleotide
caaugaaagugccuguccu

SEQ ID NO: 2497791 - RNA, 19 nt, Artificial Sequence
  Description of Artificial Sequence: Synthetic oligonucleotide
cucgaauuaacuugguauu

SEQ ID NO: 2497792 - RNA, 19 nt, Artificial Sequence
  Description of Artificial Sequence: Synthetic oligonucleotide
gaugagcaggucaguggug

SEQ ID NO: 2497793 - RNA, 19 nt, Artificial Sequence
  Description of Artificial Sequence: Synthetic oligonucleotide
uagguagacuuaucccaau

SEQ ID NO: 2497794 - RNA, 19 nt, Artificial Sequence
  Description of Artificial Sequence: Synthetic oligonucleotide
cugccgcagaggaugacuc

SEQ ID NO: 2497795 - RNA, 19 nt, Artificial Sequence
  Description of Artificial Sequence: Synthetic oligonucleotide
agucucggaccagguaacg

SEQ ID NO: 2497796 - RNA, 19 nt, Artificial Sequence
  Description of Artificial Sequence: Synthetic oligonucleotide
aggaugacucucacuuguc

SEQ ID NO: 2497797 - RNA, 19 nt, Artificial Sequence
  Description of Artificial Sequence: Synthetic oligonucleotide
caacauaacaauggcauau

SEQ ID NO: 2497798 - RNA, 19 nt, Artificial Sequence
  Description of Artificial Sequence: Synthetic oligonucleotide
caucagaggccugugcauc

SEQ ID NO: 2497799 - RNA, 19 nt, Artificial Sequence
  Description of Artificial Sequence: Synthetic oligonucleotide
aacugccgcagaggaugac

SEQ ID NO: 2497800 - RNA, 19 nt, Artificial Sequence
  Description of Artificial Sequence: Synthetic oligonucleotide
guguucucauucucuaucu

SEQ ID NO: 2497801 - RNA, 19 nt, Artificial Sequence
  Description of Artificial Sequence: Synthetic oligonucleotide
uuaucccaaucagcuucag

SEQ ID NO: 2497802 - RNA, 19 nt, Artificial Sequence
  Description of Artificial Sequence: Synthetic oligonucleotide
ucauugccacaguuauguc

SEQ ID NO: 2497803 - RNA, 19 nt, Artificial Sequence
  Description of Artificial Sequence: Synthetic oligonucleotide
ucagacgaucgauggcaau

SEQ ID NO: 2497804 - RNA, 19 nt, Artificial Sequence
  Description of Artificial Sequence: Synthetic oligonucleotide
gaucgauggcaaugaaagu

SEQ ID NO: 2497805 - RNA, 19 nt, Artificial Sequence
  Description of Artificial Sequence: Synthetic oligonucleotide
aacaacuucugaggucauu

SEQ ID NO: 2497806 - RNA, 19 nt, Artificial Sequence
  Description of Artificial Sequence: Synthetic oligonucleotide
uccgaagaucauagacaau

SEQ ID NO: 2497807 - RNA, 19 nt, Artificial Sequence
  Description of Artificial Sequence: Synthetic oligonucleotide
ggucaacauaacaauggca

SEQ ID NO: 2497808 - RNA, 19 nt, Artificial Sequence
  Description of Artificial Sequence: Synthetic oligonucleotide
aaugguagccaggcauaua

SEQ ID NO: 2497809 - RNA, 19 nt, Artificial Sequence
  Description of Artificial Sequence: Synthetic oligonucleotide
cugcuuggaaggccaguac

SEQ ID NO: 2497810 - RNA, 19 nt, Artificial Sequence
  Description of Artificial Sequence: Synthetic oligonucleotide
ccaggaggugaaauggaac

SEQ ID NO: 2497811 - RNA, 19 nt, Artificial Sequence
  Description of Artificial Sequence: Synthetic oligonucleotide
caguuauguccccguaguc

SEQ ID NO: 2497812 - RNA, 19 nt, Artificial Sequence
  Description of Artificial Sequence: Synthetic oligonucleotide
aguguuggguaaagguccu

SEQ ID NO: 2497813 - RNA, 19 nt, Artificial Sequence
  Description of Artificial Sequence: Synthetic oligonucleotide
uggaacugccgcagaggau

SEQ ID NO: 2497814 - RNA, 19 nt, Artificial Sequence
  Description of Artificial Sequence: Synthetic oligonucleotide
cuguccuuccgaccccagc

SEQ ID NO: 2497815 - RNA, 19 nt, Artificial Sequence
  Description of Artificial Sequence: Synthetic oligonucleotide
guauacuuagguagacuua

SEQ ID NO: 2497816 - RNA, 19 nt, Artificial Sequence
  Description of Artificial Sequence: Synthetic oligonucleotide
uccgaccccagcacugcaa

SEQ ID NO: 2497817 - RNA, 19 nt, Artificial Sequence
  Description of Artificial Sequence: Synthetic oligonucleotide
ugcaccaggauuggugauu

SEQ ID NO: 2497818 - RNA, 19 nt, Artificial Sequence
  Description of Artificial Sequence: Synthetic oligonucleotide
cgaagaucauagacaauac

SEQ ID NO: 2497819 - RNA, 19 nt, Artificial Sequence
  Description of Artificial Sequence: Synthetic oligonucleotide
ccguggucaggccaggagg

SEQ ID NO: 2497820 - RNA, 19 nt, Artificial Sequence
  Description of Artificial Sequence: Synthetic oligonucleotide
gaaggccaguacuccucac

SEQ ID NO: 2497821 - RNA, 19 nt, Artificial Sequence
  Description of Artificial Sequence: Synthetic oligonucleotide
cucuaucugguagaucaga

SEQ ID NO: 2497822 - RNA, 19 nt, Artificial Sequence
  Description of Artificial Sequence: Synthetic oligonucleotide
cuuccgaccccagcacugc

SEQ ID NO: 2497823 - RNA, 19 nt, Artificial Sequence
  Description of Artificial Sequence: Synthetic oligonucleotide
guuggguaaagguccuugu

SEQ ID NO: 2497824 - RNA, 19 nt, Artificial Sequence
  Description of Artificial Sequence: Synthetic oligonucleotide
gucaugagccugcuuggaa

SEQ ID NO: 2497825 - RNA, 19 nt, Artificial Sequence
  Description of Artificial Sequence: Synthetic oligonucleotide
acgaucgauggcaaugaaa

SEQ ID NO: 2497826 - RNA, 19 nt, Artificial Sequence
  Description of Artificial Sequence: Synthetic oligonucleotide
gucaguggugucgggaaca

SEQ ID NO: 2497827 - RNA, 19 nt, Artificial Sequence
  Description of Artificial Sequence: Synthetic oligonucleotide
ccgaagaucauagacaaua

SEQ ID NO: 2497828 - RNA, 19 nt, Artificial Sequence
  Description of Artificial Sequence: Synthetic oligonucleotide
ugagcaggucagugguguc

SEQ ID NO: 2497829 - RNA, 19 nt, Artificial Sequence
  Description of Artificial Sequence: Synthetic oligonucleotide
uuccgaccccagcacugca

SEQ ID NO: 2497830 - RNA, 19 nt, Artificial Sequence
  Description of Artificial Sequence: Synthetic oligonucleotide
ugccgcagaggaugacucu

SEQ ID NO: 2497831 - RNA, 19 nt, Artificial Sequence
  Description of Artificial Sequence: Synthetic oligonucleotide
agucaugagccugcuugga

SEQ ID NO: 2497832 - RNA, 19 nt, Artificial Sequence
  Description of Artificial Sequence: Synthetic oligonucleotide
uccccguagucaugagccu

SEQ ID NO: 2497833 - RNA, 19 nt, Artificial Sequence
  Description of Artificial Sequence: Synthetic oligonucleotide
uugccacaguuaugucccc

SEQ ID NO: 2497834 - RNA, 19 nt, Artificial Sequence
  Description of Artificial Sequence: Synthetic oligonucleotide
acaauaccauacacaucca

SEQ ID NO: 2497835 - RNA, 19 nt, Artificial Sequence
  Description of Artificial Sequence: Synthetic oligonucleotide
cugcuucauguagucucgg

SEQ ID NO: 2497836 - RNA, 19 nt, Artificial Sequence
  Description of Artificial Sequence: Synthetic oligonucleotide
ugucgggaacaccgugguc

SEQ ID NO: 2497837 - RNA, 19 nt, Artificial Sequence
  Description of Artificial Sequence: Synthetic oligonucleotide
gagccugcuuggaaggcca

SEQ ID NO: 2497838 - RNA, 19 nt, Artificial Sequence
  Description of Artificial Sequence: Synthetic oligonucleotide
cucggaccagguaacgaaa

SEQ ID NO: 2497839 - RNA, 19 nt, Artificial Sequence
  Description of Artificial Sequence: Synthetic oligonucleotide
gcuguauacuuagguagac

SEQ ID NO: 2497840 - RNA, 19 nt, Artificial Sequence
  Description of Artificial Sequence: Synthetic oligonucleotide
ucucacuugucugcauauu

SEQ ID NO: 2497841 - RNA, 19 nt, Artificial Sequence
  Description of Artificial Sequence: Synthetic oligonucleotide
guccuuccgaccccagcac

SEQ ID NO: 2497842 - RNA, 19 nt, Artificial Sequence
  Description of Artificial Sequence: Synthetic oligonucleotide
cccguagucaugagccugc

SEQ ID NO: 2497843 - RNA, 19 nt, Artificial Sequence
  Description of Artificial Sequence: Synthetic oligonucleotide
gacgaucgauggcaaugaa

SEQ ID NO: 2497844 - RNA, 19 nt, Artificial Sequence
  Description of Artificial Sequence: Synthetic oligonucleotide
ggcaaugaaagugccuguc

SEQ ID NO: 2497845 - RNA, 19 nt, Artificial Sequence
  Description of Artificial Sequence: Synthetic oligonucleotide
ccucacauuugguccuucc

SEQ ID NO: 2497846 - RNA, 19 nt, Artificial Sequence
  Description of Artificial Sequence: Synthetic oligonucleotide
guccauuccggaagaacaa

SEQ ID NO: 2497847 - RNA, 19 nt, Artificial Sequence
  Description of Artificial Sequence: Synthetic oligonucleotide
cacucgaauuaacuuggua

SEQ ID NO: 2497848 - RNA, 19 nt, Artificial Sequence
  Description of Artificial Sequence: Synthetic oligonucleotide
aucugguagaucagacgau

SEQ ID NO: 2497849 - RNA, 19 nt, Artificial Sequence
  Description of Artificial Sequence: Synthetic oligonucleotide
gcuuggaaggccaguacuc

SEQ ID NO: 2497850 - RNA, 19 nt, Artificial Sequence
  Description of Artificial Sequence: Synthetic oligonucleotide
ggaaggccaguacuccuca

SEQ ID NO: 2497851 - RNA, 19 nt, Artificial Sequence
  Description of Artificial Sequence: Synthetic oligonucleotide
auguccccguagucaugag

SEQ ID NO: 2497852 - RNA, 19 nt, Artificial Sequence
  Description of Artificial Sequence: Synthetic oligonucleotide
cauugaugucagcuguaua

SEQ ID NO: 2497853 - RNA, 19 nt, Artificial Sequence
  Description of Artificial Sequence: Synthetic oligonucleotide
gcuugcugcuucuuaaagu

SEQ ID NO: 2497854 - RNA, 19 nt, Artificial Sequence
  Description of Artificial Sequence: Synthetic oligonucleotide
gccaguacuccucacauuu

SEQ ID NO: 2497855 - RNA, 19 nt, Artificial Sequence
  Description of Artificial Sequence: Synthetic oligonucleotide
augcaccaggauuggugau

SEQ ID NO: 2497856 - RNA, 19 nt, Artificial Sequence
  Description of Artificial Sequence: Synthetic oligonucleotide
ggaacaccguggucaggcc

SEQ ID NO: 2497857 - RNA, 19 nt, Artificial Sequence
  Description of Artificial Sequence: Synthetic oligonucleotide
cauuccggaagaacaacuu

SEQ ID NO: 2497858 - RNA, 19 nt, Artificial Sequence
  Description of Artificial Sequence: Synthetic oligonucleotide
gacuuaucccaaucagcuu

SEQ ID NO: 2497859 - RNA, 19 nt, Artificial Sequence
  Description of Artificial Sequence: Synthetic oligonucleotide
cuacacauuuggucaacau

SEQ ID NO: 2497860 - RNA, 19 nt, Artificial Sequence
  Description of Artificial Sequence: Synthetic oligonucleotide
ccugugcauccgaagauca

SEQ ID NO: 2497861 - RNA, 19 nt, Artificial Sequence
  Description of Artificial Sequence: Synthetic oligonucleotide
cgauggcaaugaaagugcc

SEQ ID NO: 2497862 - RNA, 19 nt, Artificial Sequence
  Description of Artificial Sequence: Synthetic oligonucleotide
gaacugccgcagaggauga

SEQ ID NO: 2497863 - RNA, 19 nt, Artificial Sequence
  Description of Artificial Sequence: Synthetic oligonucleotide
ggaugacucucacuugucu

SEQ ID NO: 2497864 - RNA, 19 nt, Artificial Sequence
  Description of Artificial Sequence: Synthetic oligonucleotide
aucagacgaucgauggcaa

SEQ ID NO: 2497865 - RNA, 19 nt, Artificial Sequence
  Description of Artificial Sequence: Synthetic oligonucleotide
ccuuccgaccccagcacug

SEQ ID NO: 2497866 - RNA, 19 nt, Artificial Sequence
  Description of Artificial Sequence: Synthetic oligonucleotide
ggaaucugcuucauguagu

SEQ ID NO: 2497867 - RNA, 19 nt, Artificial Sequence
  Description of Artificial Sequence: Synthetic oligonucleotide
gucucggaccagguaacga

SEQ ID NO: 2497868 - RNA, 19 nt, Artificial Sequence
  Description of Artificial Sequence: Synthetic oligonucleotide
ggucaguggugucgggaac

SEQ ID NO: 2497869 - RNA, 19 nt, Artificial Sequence
  Description of Artificial Sequence: Synthetic oligonucleotide
ggucauugccacaguuaug

SEQ ID NO: 2497870 - RNA, 19 nt, Artificial Sequence
  Description of Artificial Sequence: Synthetic oligonucleotide
gaaugguagccaggcauau

SEQ ID NO: 2497871 - RNA, 19 nt, Artificial Sequence
  Description of Artificial Sequence: Synthetic oligonucleotide
gguagaucagacgaucgau

SEQ ID NO: 2497872 - RNA, 19 nt, Artificial Sequence
  Description of Artificial Sequence: Synthetic oligonucleotide
cagcuugcugcuucuuaaa

SEQ ID NO: 2497873 - RNA, 19 nt, Artificial Sequence
  Description of Artificial Sequence: Synthetic oligonucleotide
gugucgggaacaccguggu

SEQ ID NO: 2497874 - RNA, 19 nt, Artificial Sequence
  Description of Artificial Sequence: Synthetic oligonucleotide
ggaaugguagccaggcaua

SEQ ID NO: 2497875 - RNA, 19 nt, Artificial Sequence
  Description of Artificial Sequence: Synthetic oligonucleotide
cuguauacuuagguagacu

SEQ ID NO: 2497876 - RNA, 19 nt, Artificial Sequence
  Description of Artificial Sequence: Synthetic oligonucleotide
acaccguggucaggccagg

SEQ ID NO: 2497877 - RNA, 19 nt, Artificial Sequence
  Description of Artificial Sequence: Synthetic oligonucleotide
gaaaucucugaugguccau

SEQ ID NO: 2497878 - RNA, 19 nt, Artificial Sequence
  Description of Artificial Sequence: Synthetic oligonucleotide
cucucacuugucugcauau

SEQ ID NO: 2497879 - RNA, 19 nt, Artificial Sequence
  Description of Artificial Sequence: Synthetic oligonucleotide
gcaccaggauuggugauuc

SEQ ID NO: 2497880 - RNA, 19 nt, Artificial Sequence
  Description of Artificial Sequence: Synthetic oligonucleotide
caguggugucgggaacacc

SEQ ID NO: 2497881 - RNA, 19 nt, Artificial Sequence
  Description of Artificial Sequence: Synthetic oligonucleotide
ggggaaucugcuucaugua

SEQ ID NO: 2497882 - RNA, 19 nt, Artificial Sequence
  Description of Artificial Sequence: Synthetic oligonucleotide
gccugugcauccgaagauc

SEQ ID NO: 2497883 - RNA, 19 nt, Artificial Sequence
  Description of Artificial Sequence: Synthetic oligonucleotide
gcaaacccacaguuggagu

SEQ ID NO: 2497884 - RNA, 19 nt, Artificial Sequence
  Description of Artificial Sequence: Synthetic oligonucleotide
ccauuccggaagaacaacu

SEQ ID NO: 2497885 - RNA, 19 nt, Artificial Sequence
  Description of Artificial Sequence: Synthetic oligonucleotide
cgaaaucucugauggucca

SEQ ID NO: 2497886 - RNA, 19 nt, Artificial Sequence
  Description of Artificial Sequence: Synthetic oligonucleotide
gccgcagaggaugacucuc

SEQ ID NO: 2497887 - RNA, 19 nt, Artificial Sequence
  Description of Artificial Sequence: Synthetic oligonucleotide
uggagucagcuugcugcuu

SEQ ID NO: 2497888 - RNA, 19 nt, Artificial Sequence
  Description of Artificial Sequence: Synthetic oligonucleotide
ccggaagaacaacuucuga

SEQ ID NO: 2497889 - RNA, 19 nt, Artificial Sequence
  Description of Artificial Sequence: Synthetic oligonucleotide
agccugcuuggaaggccag

SEQ ID NO: 2497890 - RNA, 19 nt, Artificial Sequence
  Description of Artificial Sequence: Synthetic oligonucleotide
gccaggaggugaaauggaa

SEQ ID NO: 2497891 - RNA, 19 nt, Artificial Sequence
  Description of Artificial Sequence: Synthetic oligonucleotide
cagaggccugugcauccga

SEQ ID NO: 2497892 - RNA, 19 nt, Artificial Sequence
  Description of Artificial Sequence: Synthetic oligonucleotide
augguccauuccggaagaa

SEQ ID NO: 2497893 - RNA, 19 nt, Artificial Sequence
  Description of Artificial Sequence: Synthetic oligonucleotide
gccacaguuauguccccgu

SEQ ID NO: 2497894 - RNA, 19 nt, Artificial Sequence
  Description of Artificial Sequence: Synthetic oligonucleotide
ccuguucuacacauuuggu

SEQ ID NO: 2497895 - RNA, 19 nt, Artificial Sequence
  Description of Artificial Sequence: Synthetic oligonucleotide
agucagcuugcugcuucuu

SEQ ID NO: 2497896 - RNA, 19 nt, Artificial Sequence
  Description of Artificial Sequence: Synthetic oligonucleotide
cauuugguccuucccuguu

SEQ ID NO: 2497897 - RNA, 19 nt, Artificial Sequence
  Description of Artificial Sequence: Synthetic oligonucleotide
caccaggauuggugauuca

SEQ ID NO: 2497898 - RNA, 19 nt, Artificial Sequence
  Description of Artificial Sequence: Synthetic oligonucleotide
ccccguagucaugagccug

SEQ ID NO: 2497899 - RNA, 19 nt, Artificial Sequence
  Description of Artificial Sequence: Synthetic oligonucleotide
cacugcaaugcaccaggau

SEQ ID NO: 2497900 - RNA, 19 nt, Artificial Sequence
  Description of Artificial Sequence: Synthetic oligonucleotide
cugcaccaucagaggccug

SEQ ID NO: 2497901 - RNA, 19 nt, Artificial Sequence
  Description of Artificial Sequence: Synthetic oligonucleotide
gccaggcauauaguuggca

SEQ ID NO: 2497902 - RNA, 19 nt, Artificial Sequence
  Description of Artificial Sequence: Synthetic oligonucleotide
cugugcauccgaagaucau

SEQ ID NO: 2497903 - RNA, 19 nt, Artificial Sequence
  Description of Artificial Sequence: Synthetic oligonucleotide
gcauugaugucagcuguau

SEQ ID NO: 2497904 - RNA, 19 nt, Artificial Sequence
  Description of Artificial Sequence: Synthetic oligonucleotide
cgcagaggaugacucucac

SEQ ID NO: 2497905 - RNA, 19 nt, Artificial Sequence
  Description of Artificial Sequence: Synthetic oligonucleotide
ccagguaacgaaaguugau

SEQ ID NO: 2497906 - RNA, 19 nt, Artificial Sequence
  Description of Artificial Sequence: Synthetic oligonucleotide
ccgcagaggaugacucuca

SEQ ID NO: 2497907 - RNA, 19 nt, Artificial Sequence
  Description of Artificial Sequence: Synthetic oligonucleotide
ggccugugcauccgaagau

SEQ ID NO: 2497908 - RNA, 19 nt, Artificial Sequence
  Description of Artificial Sequence: Synthetic oligonucleotide
cccacaguuggagucagcu

SEQ ID NO: 2497909 - RNA, 19 nt, Artificial Sequence
  Description of Artificial Sequence: Synthetic oligonucleotide
ccuguccuuccgaccccag

SEQ ID NO: 2497910 - RNA, 19 nt, Artificial Sequence
  Description of Artificial Sequence: Synthetic oligonucleotide
cugaggucauugccacagu

SEQ ID NO: 2497911 - RNA, 19 nt, Artificial Sequence
  Description of Artificial Sequence: Synthetic oligonucleotide
ccucugcaaacccacaguu

SEQ ID NO: 2497912 - RNA, 19 nt, Artificial Sequence
  Description of Artificial Sequence: Synthetic oligonucleotide
guggugucgggaacaccgu

SEQ ID NO: 2497913 - RNA, 19 nt, Artificial Sequence
  Description of Artificial Sequence: Synthetic oligonucleotide
cuucccuguucuacacauu

SEQ ID NO: 2497914 - RNA, 19 nt, Artificial Sequence
  Description of Artificial Sequence: Synthetic oligonucleotide
cgaccccagcacugcaaug

SEQ ID NO: 2497915 - RNA, 19 nt, Artificial Sequence
  Description of Artificial Sequence: Synthetic oligonucleotide
caccguggucaggccagga

SEQ ID NO: 2497916 - RNA, 19 nt, Artificial Sequence
  Description of Artificial Sequence: Synthetic oligonucleotide
ccacaguuauguccccgua

SEQ ID NO: 2497917 - RNA, 19 nt, Artificial Sequence
  Description of Artificial Sequence: Synthetic oligonucleotide
caguuggagucagcuugcu

SEQ ID NO: 2497918 - RNA, 19 nt, Artificial Sequence
  Description of Artificial Sequence: Synthetic oligonucleotide
cgaauuaacuugguauuuu

SEQ ID NO: 2497919 - RNA, 19 nt, Artificial Sequence
  Description of Artificial Sequence: Synthetic oligonucleotide
ccacgaaaucucugauggu

SEQ ID NO: 2497920 - RNA, 19 nt, Artificial Sequence
  Description of Artificial Sequence: Synthetic oligonucleotide
cccaaaccauacgccaaaa

SEQ ID NO: 2497921 - RNA, 19 nt, Artificial Sequence
  Description of Artificial Sequence: Synthetic oligonucleotide
ggccaguacuccucacauu

SEQ ID NO: 2497922 - RNA, 19 nt, Artificial Sequence
  Description of Artificial Sequence: Synthetic oligonucleotide
ccacucgaauuaacuuggu

SEQ ID NO: 2497923 - RNA, 19 nt, Artificial Sequence
  Description of Artificial Sequence: Synthetic oligonucleotide
guguuggguaaagguccuu

SEQ ID NO: 2497924 - RNA, 19 nt, Artificial Sequence
  Description of Artificial Sequence: Synthetic oligonucleotide
ccacaguuggagucagcuu

SEQ ID NO: 2497925 - RNA, 19 nt, Artificial Sequence
  Description of Artificial Sequence: Synthetic oligonucleotide
cgggaacaccguggucagg

SEQ ID NO: 2497926 - RNA, 19 nt, Artificial Sequence
  Description of Artificial Sequence: Synthetic oligonucleotide
cuccucacauuugguccuu

SEQ ID NO: 2497927 - RNA, 19 nt, Artificial Sequence
  Description of Artificial Sequence: Synthetic oligonucleotide
cgguguucucauucucuau

SEQ ID NO: 2497928 - RNA, 19 nt, Artificial Sequence
  Description of Artificial Sequence: Synthetic oligonucleotide
cguagucaugagccugcuu

SEQ ID NO: 2497929 - RNA, 19 nt, Artificial Sequence
  Description of Artificial Sequence: Synthetic oligonucleotide
ucuucaucgagaaagaagg

SEQ ID NO: 2497930 - RNA, 19 nt, Artificial Sequence
  Description of Artificial Sequence: Synthetic oligonucleotide
ugucauaucaccuugaaga

SEQ ID NO: 2497931 - RNA, 19 nt, Artificial Sequence
  Description of Artificial Sequence: Synthetic oligonucleotide
ugaaaggugaguaaaagug

SEQ ID NO: 2497932 - RNA, 19 nt, Artificial Sequence
  Description of Artificial Sequence: Synthetic oligonucleotide
aacgcuggugauuauaccc

SEQ ID NO: 2497933 - RNA, 19 nt, Artificial Sequence
  Description of Artificial Sequence: Synthetic oligonucleotide
uaaauauauuuucugauga

SEQ ID NO: 2497934 - RNA, 19 nt, Artificial Sequence
  Description of Artificial Sequence: Synthetic oligonucleotide
aauaaacuuauccaagacu

SEQ ID NO: 2497935 - RNA, 19 nt, Artificial Sequence
  Description of Artificial Sequence: Synthetic oligonucleotide
gaaguaugaggaaagaugg

SEQ ID NO: 2497936 - RNA, 19 nt, Artificial Sequence
  Description of Artificial Sequence: Synthetic oligonucleotide
cauuaacugaucuucaucc

SEQ ID NO: 2497937 - RNA, 19 nt, Artificial Sequence
  Description of Artificial Sequence: Synthetic oligonucleotide
aguaaaagugcucagaaau

SEQ ID NO: 2497938 - RNA, 19 nt, Artificial Sequence
  Description of Artificial Sequence: Synthetic oligonucleotide
aauauccucuuuugaaagg

SEQ ID NO: 2497939 - RNA, 19 nt, Artificial Sequence
  Description of Artificial Sequence: Synthetic oligonucleotide
aguaugaggaaagauggcc

SEQ ID NO: 2497940 - RNA, 19 nt, Artificial Sequence
  Description of Artificial Sequence: Synthetic oligonucleotide
cauaucaccuugaagaaag

SEQ ID NO: 2497941 - RNA, 19 nt, Artificial Sequence
  Description of Artificial Sequence: Synthetic oligonucleotide
aucaaucacuaucuggucc

SEQ ID NO: 2497942 - RNA, 19 nt, Artificial Sequence
  Description of Artificial Sequence: Synthetic oligonucleotide
ucuaagucuaagaaguugu

SEQ ID NO: 2497943 - RNA, 19 nt, Artificial Sequence
  Description of Artificial Sequence: Synthetic oligonucleotide
uuuucagcaguaaauauau

SEQ ID NO: 2497944 - RNA, 19 nt, Artificial Sequence
  Description of Artificial Sequence: Synthetic oligonucleotide
aaggaacauaagcaggaac

SEQ ID NO: 2497945 - RNA, 19 nt, Artificial Sequence
  Description of Artificial Sequence: Synthetic oligonucleotide
aaguugucuaccuucaccu

SEQ ID NO: 2497946 - RNA, 19 nt, Artificial Sequence
  Description of Artificial Sequence: Synthetic oligonucleotide
guaaauauauuuucugaug

SEQ ID NO: 2497947 - RNA, 19 nt, Artificial Sequence
  Description of Artificial Sequence: Synthetic oligonucleotide
auuccgacgaaguaugagg

SEQ ID NO: 2497948 - RNA, 19 nt, Artificial Sequence
  Description of Artificial Sequence: Synthetic oligonucleotide
aaauaucucuuccguuggc

SEQ ID NO: 2497949 - RNA, 19 nt, Artificial Sequence
  Description of Artificial Sequence: Synthetic oligonucleotide
ucaucgagaaagaagggcu

SEQ ID NO: 2497950 - RNA, 19 nt, Artificial Sequence
  Description of Artificial Sequence: Synthetic oligonucleotide
aguaaauauauuuucugau

SEQ ID NO: 2497951 - RNA, 19 nt, Artificial Sequence
  Description of Artificial Sequence: Synthetic oligonucleotide
caauuaauaaacuuaucca

SEQ ID NO: 2497952 - RNA, 19 nt, Artificial Sequence
  Description of Artificial Sequence: Synthetic oligonucleotide
ucuccaaauaucucuuccg

SEQ ID NO: 2497953 - RNA, 19 nt, Artificial Sequence
  Description of Artificial Sequence: Synthetic oligonucleotide
ucuuccguuggcuucagag

SEQ ID NO: 2497954 - RNA, 19 nt, Artificial Sequence
  Description of Artificial Sequence: Synthetic oligonucleotide
uuugaaaggugaguaaaag

SEQ ID NO: 2497955 - RNA, 19 nt, Artificial Sequence
  Description of Artificial Sequence: Synthetic oligonucleotide
ugaguaaaagugcucagaa

SEQ ID NO: 2497956 - RNA, 19 nt, Artificial Sequence
  Description of Artificial Sequence: Synthetic oligonucleotide
aagucuaagaaguugucua

SEQ ID NO: 2497957 - RNA, 19 nt, Artificial Sequence
  Description of Artificial Sequence: Synthetic oligonucleotide
agucuaagaaguugucuac

SEQ ID NO: 2497958 - RNA, 19 nt, Artificial Sequence
  Description of Artificial Sequence: Synthetic oligonucleotide
agucacuucguacuuuugg

SEQ ID NO: 2497959 - RNA, 19 nt, Artificial Sequence
  Description of Artificial Sequence: Synthetic oligonucleotide
ggugauuauacccuguucc

SEQ ID NO: 2497960 - RNA, 19 nt, Artificial Sequence
  Description of Artificial Sequence: Synthetic oligonucleotide
auuaucucuggucucagga

SEQ ID NO: 2497961 - RNA, 19 nt, Artificial Sequence
  Description of Artificial Sequence: Synthetic oligonucleotide
uugcucaugacaauuaaua

SEQ ID NO: 2497962 - RNA, 19 nt, Artificial Sequence
  Description of Artificial Sequence: Synthetic oligonucleotide
aauccuuguucaucugggg

SEQ ID NO: 2497963 - RNA, 19 nt, Artificial Sequence
  Description of Artificial Sequence: Synthetic oligonucleotide
gaaguugucuaccuucacc

SEQ ID NO: 2497964 - RNA, 19 nt, Artificial Sequence
  Description of Artificial Sequence: Synthetic oligonucleotide
acuucguacuuuuggaguc

SEQ ID NO: 2497965 - RNA, 19 nt, Artificial Sequence
  Description of Artificial Sequence: Synthetic oligonucleotide
ucagcaguaaauauauuuu

SEQ ID NO: 2497966 - RNA, 19 nt, Artificial Sequence
  Description of Artificial Sequence: Synthetic oligonucleotide
gucguaaucaaauucuuca

SEQ ID NO: 2497967 - RNA, 19 nt, Artificial Sequence
  Description of Artificial Sequence: Synthetic oligonucleotide
ucuucugagcauuccgacg

SEQ ID NO: 2497968 - RNA, 19 nt, Artificial Sequence
  Description of Artificial Sequence: Synthetic oligonucleotide
ucaccuggaaguagcaucc

SEQ ID NO: 2497969 - RNA, 19 nt, Artificial Sequence
  Description of Artificial Sequence: Synthetic oligonucleotide
ucaaucacuaucugguccu

SEQ ID NO: 2497970 - RNA, 19 nt, Artificial Sequence
  Description of Artificial Sequence: Synthetic oligonucleotide
aaaugaugaccauuggauu

SEQ ID NO: 2497971 - RNA, 19 nt, Artificial Sequence
  Description of Artificial Sequence: Synthetic oligonucleotide
gaggcagguccacagaagg

SEQ ID NO: 2497972 - RNA, 19 nt, Artificial Sequence
  Description of Artificial Sequence: Synthetic oligonucleotide
uucucuuuugcuuggccag

SEQ ID NO: 2497973 - RNA, 19 nt, Artificial Sequence
  Description of Artificial Sequence: Synthetic oligonucleotide
uacuuuuggaguccuuucc

SEQ ID NO: 2497974 - RNA, 19 nt, Artificial Sequence
  Description of Artificial Sequence: Synthetic oligonucleotide
uucuuucauuaacugaucu

SEQ ID NO: 2497975 - RNA, 19 nt, Artificial Sequence
  Description of Artificial Sequence: Synthetic oligonucleotide
ucuaagaaguugucuaccu

SEQ ID NO: 2497976 - RNA, 19 nt, Artificial Sequence
  Description of Artificial Sequence: Synthetic oligonucleotide
ugaaucacuuccaugugau

SEQ ID NO: 2497977 - RNA, 19 nt, Artificial Sequence
  Description of Artificial Sequence: Synthetic oligonucleotide
auugucguaaucaaauucu

SEQ ID NO: 2497978 - RNA, 19 nt, Artificial Sequence
  Description of Artificial Sequence: Synthetic oligonucleotide
caaauaucucuuccguugg

SEQ ID NO: 2497979 - RNA, 19 nt, Artificial Sequence
  Description of Artificial Sequence: Synthetic oligonucleotide
ccuaaaaugaugaccauug

SEQ ID NO: 2497980 - RNA, 19 nt, Artificial Sequence
  Description of Artificial Sequence: Synthetic oligonucleotide
uucaucgagaaagaagggc

SEQ ID NO: 2497981 - RNA, 19 nt, Artificial Sequence
  Description of Artificial Sequence: Synthetic oligonucleotide
uauacccuguuccacuuca

SEQ ID NO: 2497982 - RNA, 19 nt, Artificial Sequence
  Description of Artificial Sequence: Synthetic oligonucleotide
aaguaugaggaaagauggc

SEQ ID NO: 2497983 - RNA, 19 nt, Artificial Sequence
  Description of Artificial Sequence: Synthetic oligonucleotide
uuaacugaucuucauccau

SEQ ID NO: 2497984 - RNA, 19 nt, Artificial Sequence
  Description of Artificial Sequence: Synthetic oligonucleotide
augaccauuggauucauuu

SEQ ID NO: 2497985 - RNA, 19 nt, Artificial Sequence
  Description of Artificial Sequence: Synthetic oligonucleotide
guaugaggaaagauggccg

SEQ ID NO: 2497986 - RNA, 19 nt, Artificial Sequence
  Description of Artificial Sequence: Synthetic oligonucleotide
agugcucagaaauucuuca

SEQ ID NO: 2497987 - RNA, 19 nt, Artificial Sequence
  Description of Artificial Sequence: Synthetic oligonucleotide
uucuaagucuaagaaguug

SEQ ID NO: 2497988 - RNA, 19 nt, Artificial Sequence
  Description of Artificial Sequence: Synthetic oligonucleotide
cauugucguaaucaaauuc

SEQ ID NO: 2497989 - RNA, 19 nt, Artificial Sequence
  Description of Artificial Sequence: Synthetic oligonucleotide
cuaaaaugaugaccauugg

SEQ ID NO: 2497990 - RNA, 19 nt, Artificial Sequence
  Description of Artificial Sequence: Synthetic oligonucleotide
ucaugacaauuaauaaacu

SEQ ID NO: 2497991 - RNA, 19 nt, Artificial Sequence
  Description of Artificial Sequence: Synthetic oligonucleotide
gggagugagagucacauug

SEQ ID NO: 2497992 - RNA, 19 nt, Artificial Sequence
  Description of Artificial Sequence: Synthetic oligonucleotide
aggaaagauggccguauuc

SEQ ID NO: 2497993 - RNA, 19 nt, Artificial Sequence
  Description of Artificial Sequence: Synthetic oligonucleotide
uggauagucgcuaucucuc

SEQ ID NO: 2497994 - RNA, 19 nt, Artificial Sequence
  Description of Artificial Sequence: Synthetic oligonucleotide
caagacuucuuucauuaac

SEQ ID NO: 2497995 - RNA, 19 nt, Artificial Sequence
  Description of Artificial Sequence: Synthetic oligonucleotide
uucaccuggaaguagcauc

SEQ ID NO: 2497996 - RNA, 19 nt, Artificial Sequence
  Description of Artificial Sequence: Synthetic oligonucleotide
uuggauagucgcuaucucu

SEQ ID NO: 2497997 - RNA, 19 nt, Artificial Sequence
  Description of Artificial Sequence: Synthetic oligonucleotide
aauaucucuuccguuggcu

SEQ ID NO: 2497998 - RNA, 19 nt, Artificial Sequence
  Description of Artificial Sequence: Synthetic oligonucleotide
uuuggaguccuuuccaguc

SEQ ID NO: 2497999 - RNA, 19 nt, Artificial Sequence
  Description of Artificial Sequence: Synthetic oligonucleotide
ucugguccucuucugagca

SEQ ID NO: 2498000 - RNA, 19 nt, Artificial Sequence
  Description of Artificial Sequence: Synthetic oligonucleotide
uuccgacgaaguaugagga

SEQ ID NO: 2498001 - RNA, 19 nt, Artificial Sequence
  Description of Artificial Sequence: Synthetic oligonucleotide
uaucugguccucuucugag

SEQ ID NO: 2498002 - RNA, 19 nt, Artificial Sequence
  Description of Artificial Sequence: Synthetic oligonucleotide
aagauggccguauuccuaa

SEQ ID NO: 2498003 - RNA, 19 nt, Artificial Sequence
  Description of Artificial Sequence: Synthetic oligonucleotide
augacaauuaauaaacuua

SEQ ID NO: 2498004 - RNA, 19 nt, Artificial Sequence
  Description of Artificial Sequence: Synthetic oligonucleotide
ucuuggauagucgcuaucu

SEQ ID NO: 2498005 - RNA, 19 nt, Artificial Sequence
  Description of Artificial Sequence: Synthetic oligonucleotide
uucacacgaccacucuucg

SEQ ID NO: 2498006 - RNA, 19 nt, Artificial Sequence
  Description of Artificial Sequence: Synthetic oligonucleotide
cauuccuauucacacgacc

SEQ ID NO: 2498007 - RNA, 19 nt, Artificial Sequence
  Description of Artificial Sequence: Synthetic oligonucleotide
uaugaggaaagauggccgu

SEQ ID NO: 2498008 - RNA, 19 nt, Artificial Sequence
  Description of Artificial Sequence: Synthetic oligonucleotide
ucaucuggggcuuacuauc

SEQ ID NO: 2498009 - RNA, 19 nt, Artificial Sequence
  Description of Artificial Sequence: Synthetic oligonucleotide
agacuucuuucauuaacug

SEQ ID NO: 2498010 - RNA, 19 nt, Artificial Sequence
  Description of Artificial Sequence: Synthetic oligonucleotide
aucgagaaagaagggcugc

SEQ ID NO: 2498011 - RNA, 19 nt, Artificial Sequence
  Description of Artificial Sequence: Synthetic oligonucleotide
auccaauccuuguucaucu

SEQ ID NO: 2498012 - RNA, 19 nt, Artificial Sequence
  Description of Artificial Sequence: Synthetic oligonucleotide
caccucagaagagagaggc

SEQ ID NO: 2498013 - RNA, 19 nt, Artificial Sequence
  Description of Artificial Sequence: Synthetic oligonucleotide
ugucguaaucaaauucuuc

SEQ ID NO: 2498014 - RNA, 19 nt, Artificial Sequence
  Description of Artificial Sequence: Synthetic oligonucleotide
uuugcucaugacaauuaau

SEQ ID NO: 2498015 - RNA, 19 nt, Artificial Sequence
  Description of Artificial Sequence: Synthetic oligonucleotide
auagucgcuaucucuccag

SEQ ID NO: 2498016 - RNA, 19 nt, Artificial Sequence
  Description of Artificial Sequence: Synthetic oligonucleotide
uucguucccuagcuguccg

SEQ ID NO: 2498017 - RNA, 19 nt, Artificial Sequence
  Description of Artificial Sequence: Synthetic oligonucleotide
ucagaguucuucccucagc

SEQ ID NO: 2498018 - RNA, 19 nt, Artificial Sequence
  Description of Artificial Sequence: Synthetic oligonucleotide
auucacacgaccacucuuc

SEQ ID NO: 2498019 - RNA, 19 nt, Artificial Sequence
  Description of Artificial Sequence: Synthetic oligonucleotide
cuggaaguagcauccaauc

SEQ ID NO: 2498020 - RNA, 19 nt, Artificial Sequence
  Description of Artificial Sequence: Synthetic oligonucleotide
cuucaucgagaaagaaggg

SEQ ID NO: 2498021 - RNA, 19 nt, Artificial Sequence
  Description of Artificial Sequence: Synthetic oligonucleotide
uggccguauuccuaaaaug

SEQ ID NO: 2498022 - RNA, 19 nt, Artificial Sequence
  Description of Artificial Sequence: Synthetic oligonucleotide
ugcacuucaucuccaaaua

SEQ ID NO: 2498023 - RNA, 19 nt, Artificial Sequence
  Description of Artificial Sequence: Synthetic oligonucleotide
agaaguugucuaccuucac

SEQ ID NO: 2498024 - RNA, 19 nt, Artificial Sequence
  Description of Artificial Sequence: Synthetic oligonucleotide
ccaaauaucucuuccguug

SEQ ID NO: 2498025 - RNA, 19 nt, Artificial Sequence
  Description of Artificial Sequence: Synthetic oligonucleotide
auuccuauucacacgacca

SEQ ID NO: 2498026 - RNA, 19 nt, Artificial Sequence
  Description of Artificial Sequence: Synthetic oligonucleotide
uguuugcucaugacaauua

SEQ ID NO: 2498027 - RNA, 19 nt, Artificial Sequence
  Description of Artificial Sequence: Synthetic oligonucleotide
uuguuggccuucaucaauc

SEQ ID NO: 2498028 - RNA, 19 nt, Artificial Sequence
  Description of Artificial Sequence: Synthetic oligonucleotide
cacaauauccucuuuugaa

SEQ ID NO: 2498029 - RNA, 19 nt, Artificial Sequence
  Description of Artificial Sequence: Synthetic oligonucleotide
gucgcuaucucuccagcag

SEQ ID NO: 2498030 - RNA, 19 nt, Artificial Sequence
  Description of Artificial Sequence: Synthetic oligonucleotide
ucauauguuugcucaugac

SEQ ID NO: 2498031 - RNA, 19 nt, Artificial Sequence
  Description of Artificial Sequence: Synthetic oligonucleotide
cucagaagagagaggcagg

SEQ ID NO: 2498032 - RNA, 19 nt, Artificial Sequence
  Description of Artificial Sequence: Synthetic oligonucleotide
uuccuauucacacgaccac

SEQ ID NO: 2498033 - RNA, 19 nt, Artificial Sequence
  Description of Artificial Sequence: Synthetic oligonucleotide
agcaguaaauauauuuucu

SEQ ID NO: 2498034 - RNA, 19 nt, Artificial Sequence
  Description of Artificial Sequence: Synthetic oligonucleotide
ucguaaucaaauucuucau

SEQ ID NO: 2498035 - RNA, 19 nt, Artificial Sequence
  Description of Artificial Sequence: Synthetic oligonucleotide
uuccguuggcuucagaguu

SEQ ID NO: 2498036 - RNA, 19 nt, Artificial Sequence
  Description of Artificial Sequence: Synthetic oligonucleotide
acauaagcaggaacgcugg

SEQ ID NO: 2498037 - RNA, 19 nt, Artificial Sequence
  Description of Artificial Sequence: Synthetic oligonucleotide
uauccaagacuucuuucau

SEQ ID NO: 2498038 - RNA, 19 nt, Artificial Sequence
  Description of Artificial Sequence: Synthetic oligonucleotide
aaggugaguaaaagugcuc

SEQ ID NO: 2498039 - RNA, 19 nt, Artificial Sequence
  Description of Artificial Sequence: Synthetic oligonucleotide
uccagcccgugucauauca

SEQ ID NO: 2498040 - RNA, 19 nt, Artificial Sequence
  Description of Artificial Sequence: Synthetic oligonucleotide
aggcauuccuauucacacg

SEQ ID NO: 2498041 - RNA, 19 nt, Artificial Sequence
  Description of Artificial Sequence: Synthetic oligonucleotide
cuucugagcauuccgacga

SEQ ID NO: 2498042 - RNA, 19 nt, Artificial Sequence
  Description of Artificial Sequence: Synthetic oligonucleotide
uugucuaccuucaccuuuc

SEQ ID NO: 2498043 - RNA, 19 nt, Artificial Sequence
  Description of Artificial Sequence: Synthetic oligonucleotide
aggugaguaaaagugcuca

SEQ ID NO: 2498044 - RNA, 19 nt, Artificial Sequence
  Description of Artificial Sequence: Synthetic oligonucleotide
uaucaccuugaagaaagcu

SEQ ID NO: 2498045 - RNA, 19 nt, Artificial Sequence
  Description of Artificial Sequence: Synthetic oligonucleotide
uacccuguuccacuucacc

SEQ ID NO: 2498046 - RNA, 19 nt, Artificial Sequence
  Description of Artificial Sequence: Synthetic oligonucleotide
cuaagucuaagaaguuguc

SEQ ID NO: 2498047 - RNA, 19 nt, Artificial Sequence
  Description of Artificial Sequence: Synthetic oligonucleotide
uucaucuggggcuuacuau

SEQ ID NO: 2498048 - RNA, 19 nt, Artificial Sequence
  Description of Artificial Sequence: Synthetic oligonucleotide
uuggaguccuuuccaguca

SEQ ID NO: 2498049 - RNA, 19 nt, Artificial Sequence
  Description of Artificial Sequence: Synthetic oligonucleotide
ugauuauacccuguuccac

SEQ ID NO: 2498050 - RNA, 19 nt, Artificial Sequence
  Description of Artificial Sequence: Synthetic oligonucleotide
auccauuaucucuggucuc

SEQ ID NO: 2498051 - RNA, 19 nt, Artificial Sequence
  Description of Artificial Sequence: Synthetic oligonucleotide
aggauuugggcaggcauuc

SEQ ID NO: 2498052 - RNA, 19 nt, Artificial Sequence
  Description of Artificial Sequence: Synthetic oligonucleotide
ugagcauuccgacgaagua

SEQ ID NO: 2498053 - RNA, 19 nt, Artificial Sequence
  Description of Artificial Sequence: Synthetic oligonucleotide
gggcuuacuaucuuccucc

SEQ ID NO: 2498054 - RNA, 19 nt, Artificial Sequence
  Description of Artificial Sequence: Synthetic oligonucleotide
gugagagucacauugucgu

SEQ ID NO: 2498055 - RNA, 19 nt, Artificial Sequence
  Description of Artificial Sequence: Synthetic oligonucleotide
aagagagaggcagguccac

SEQ ID NO: 2498056 - RNA, 19 nt, Artificial Sequence
  Description of Artificial Sequence: Synthetic oligonucleotide
auaagcaggaacgcuggug

SEQ ID NO: 2498057 - RNA, 19 nt, Artificial Sequence
  Description of Artificial Sequence: Synthetic oligonucleotide
uuaucucuggucucaggau

SEQ ID NO: 2498058 - RNA, 19 nt, Artificial Sequence
  Description of Artificial Sequence: Synthetic oligonucleotide
uugggagugagagucacau

SEQ ID NO: 2498059 - RNA, 19 nt, Artificial Sequence
  Description of Artificial Sequence: Synthetic oligonucleotide
uauucacacgaccacucuu

SEQ ID NO: 2498060 - RNA, 19 nt, Artificial Sequence
  Description of Artificial Sequence: Synthetic oligonucleotide
caucgagaaagaagggcug

SEQ ID NO: 2498061 - RNA, 19 nt, Artificial Sequence
  Description of Artificial Sequence: Synthetic oligonucleotide
gugauuauacccuguucca

SEQ ID NO: 2498062 - RNA, 19 nt, Artificial Sequence
  Description of Artificial Sequence: Synthetic oligonucleotide
gucacuucguacuuuugga

SEQ ID NO: 2498063 - RNA, 19 nt, Artificial Sequence
  Description of Artificial Sequence: Synthetic oligonucleotide
acgaccacucuucguuccc

SEQ ID NO: 2498064 - RNA, 19 nt, Artificial Sequence
  Description of Artificial Sequence: Synthetic oligonucleotide
acccuguuccacuucaccu

SEQ ID NO: 2498065 - RNA, 19 nt, Artificial Sequence
  Description of Artificial Sequence: Synthetic oligonucleotide
gaacgcuggugauuauacc

SEQ ID NO: 2498066 - RNA, 19 nt, Artificial Sequence
  Description of Artificial Sequence: Synthetic oligonucleotide
auggccguauuccuaaaau

SEQ ID NO: 2498067 - RNA, 19 nt, Artificial Sequence
  Description of Artificial Sequence: Synthetic oligonucleotide
ugaccauuggauucauuuu

SEQ ID NO: 2498068 - RNA, 19 nt, Artificial Sequence
  Description of Artificial Sequence: Synthetic oligonucleotide
uggugauuauacccuguuc

SEQ ID NO: 2498069 - RNA, 19 nt, Artificial Sequence
  Description of Artificial Sequence: Synthetic oligonucleotide
uugucguaaucaaauucuu

SEQ ID NO: 2498070 - RNA, 19 nt, Artificial Sequence
  Description of Artificial Sequence: Synthetic oligonucleotide
agcauuccgacgaaguaug

SEQ ID NO: 2498071 - RNA, 19 nt, Artificial Sequence
  Description of Artificial Sequence: Synthetic oligonucleotide
uccaaauaucucuuccguu

SEQ ID NO: 2498072 - RNA, 19 nt, Artificial Sequence
  Description of Artificial Sequence: Synthetic oligonucleotide
uauguuugcucaugacaau

SEQ ID NO: 2498073 - RNA, 19 nt, Artificial Sequence
  Description of Artificial Sequence: Synthetic oligonucleotide
ugggcgcccaucuagucac

SEQ ID NO: 2498074 - RNA, 19 nt, Artificial Sequence
  Description of Artificial Sequence: Synthetic oligonucleotide
guauuccuaaaaugaugac

SEQ ID NO: 2498075 - RNA, 19 nt, Artificial Sequence
  Description of Artificial Sequence: Synthetic oligonucleotide
cuuuugaaaggugaguaaa

SEQ ID NO: 2498076 - RNA, 19 nt, Artificial Sequence
  Description of Artificial Sequence: Synthetic oligonucleotide
auaucaccuugaagaaagc

SEQ ID NO: 2498077 - RNA, 19 nt, Artificial Sequence
  Description of Artificial Sequence: Synthetic oligonucleotide
auuauacccuguuccacuu

SEQ ID NO: 2498078 - RNA, 19 nt, Artificial Sequence
  Description of Artificial Sequence: Synthetic oligonucleotide
gauagucgcuaucucucca

SEQ ID NO: 2498079 - RNA, 19 nt, Artificial Sequence
  Description of Artificial Sequence: Synthetic oligonucleotide
uagucgcuaucucuccagc

SEQ ID NO: 2498080 - RNA, 19 nt, Artificial Sequence
  Description of Artificial Sequence: Synthetic oligonucleotide
uccauguccaaaucuucua

SEQ ID NO: 2498081 - RNA, 19 nt, Artificial Sequence
  Description of Artificial Sequence: Synthetic oligonucleotide
ucuucguucccuagcuguc

SEQ ID NO: 2498082 - RNA, 19 nt, Artificial Sequence
  Description of Artificial Sequence: Synthetic oligonucleotide
uccuauucacacgaccacu

SEQ ID NO: 2498083 - RNA, 19 nt, Artificial Sequence
  Description of Artificial Sequence: Synthetic oligonucleotide
ucgcuaucucuccagcagu

SEQ ID NO: 2498084 - RNA, 19 nt, Artificial Sequence
  Description of Artificial Sequence: Synthetic oligonucleotide
gucauaucaccuugaagaa

SEQ ID NO: 2498085 - RNA, 19 nt, Artificial Sequence
  Description of Artificial Sequence: Synthetic oligonucleotide
cuucauauguuugcucaug

SEQ ID NO: 2498086 - RNA, 19 nt, Artificial Sequence
  Description of Artificial Sequence: Synthetic oligonucleotide
gaguaaaagugcucagaaa

SEQ ID NO: 2498087 - RNA, 19 nt, Artificial Sequence
  Description of Artificial Sequence: Synthetic oligonucleotide
uguuggccuucaucaauca

SEQ ID NO: 2498088 - RNA, 19 nt, Artificial Sequence
  Description of Artificial Sequence: Synthetic oligonucleotide
gagugagagucacauuguc

SEQ ID NO: 2498089 - RNA, 19 nt, Artificial Sequence
  Description of Artificial Sequence: Synthetic oligonucleotide
cacauugucguaaucaaau

SEQ ID NO: 2498090 - RNA, 19 nt, Artificial Sequence
  Description of Artificial Sequence: Synthetic oligonucleotide
ucauaucaccuugaagaaa

SEQ ID NO: 2498091 - RNA, 19 nt, Artificial Sequence
  Description of Artificial Sequence: Synthetic oligonucleotide
uccuaaaaugaugaccauu

SEQ ID NO: 2498092 - RNA, 19 nt, Artificial Sequence
  Description of Artificial Sequence: Synthetic oligonucleotide
gcucaugacaauuaauaaa

SEQ ID NO: 2498093 - RNA, 19 nt, Artificial Sequence
  Description of Artificial Sequence: Synthetic oligonucleotide
acauugucguaaucaaauu

SEQ ID NO: 2498094 - RNA, 19 nt, Artificial Sequence
  Description of Artificial Sequence: Synthetic oligonucleotide
uuugggcaggcauuccuau

SEQ ID NO: 2498095 - RNA, 19 nt, Artificial Sequence
  Description of Artificial Sequence: Synthetic oligonucleotide
cauuccgacgaaguaugag

SEQ ID NO: 2498096 - RNA, 19 nt, Artificial Sequence
  Description of Artificial Sequence: Synthetic oligonucleotide
ggugaguaaaagugcucag

SEQ ID NO: 2498097 - RNA, 19 nt, Artificial Sequence
  Description of Artificial Sequence: Synthetic oligonucleotide
cauccauuaucucuggucu

SEQ ID NO: 2498098 - RNA, 19 nt, Artificial Sequence
  Description of Artificial Sequence: Synthetic oligonucleotide
gccacaauauccucuuuug

SEQ ID NO: 2498099 - RNA, 19 nt, Artificial Sequence
  Description of Artificial Sequence: Synthetic oligonucleotide
caacuuguuggccuucauc

SEQ ID NO: 2498100 - RNA, 19 nt, Artificial Sequence
  Description of Artificial Sequence: Synthetic oligonucleotide
ugaggaaagauggccguau

SEQ ID NO: 2498101 - RNA, 19 nt, Artificial Sequence
  Description of Artificial Sequence: Synthetic oligonucleotide
caucuagucacuucguacu

SEQ ID NO: 2498102 - RNA, 19 nt, Artificial Sequence
  Description of Artificial Sequence: Synthetic oligonucleotide
aguucuuggauagucgcua

SEQ ID NO: 2498103 - RNA, 19 nt, Artificial Sequence
  Description of Artificial Sequence: Synthetic oligonucleotide
cuuggauagucgcuaucuc

SEQ ID NO: 2498104 - RNA, 19 nt, Artificial Sequence
  Description of Artificial Sequence: Synthetic oligonucleotide
uuggccacaauauccucuu

SEQ ID NO: 2498105 - RNA, 19 nt, Artificial Sequence
  Description of Artificial Sequence: Synthetic oligonucleotide
aaagauggccguauuccua

SEQ ID NO: 2498106 - RNA, 19 nt, Artificial Sequence
  Description of Artificial Sequence: Synthetic oligonucleotide
caugacaauuaauaaacuu

SEQ ID NO: 2498107 - RNA, 19 nt, Artificial Sequence
  Description of Artificial Sequence: Synthetic oligonucleotide
uggcuucaccucagaagag

SEQ ID NO: 2498108 - RNA, 19 nt, Artificial Sequence
  Description of Artificial Sequence: Synthetic oligonucleotide
agucgcuaucucuccagca

SEQ ID NO: 2498109 - RNA, 19 nt, Artificial Sequence
  Description of Artificial Sequence: Synthetic oligonucleotide
cguauuccuaaaaugauga

SEQ ID NO: 2498110 - RNA, 19 nt, Artificial Sequence
  Description of Artificial Sequence: Synthetic oligonucleotide
ccaauccuuguucaucugg

SEQ ID NO: 2498111 - RNA, 19 nt, Artificial Sequence
  Description of Artificial Sequence: Synthetic oligonucleotide
cuucguacuuuuggagucc

SEQ ID NO: 2498112 - RNA, 19 nt, Artificial Sequence
  Description of Artificial Sequence: Synthetic oligonucleotide
guuugcucaugacaauuaa

SEQ ID NO: 2498113 - RNA, 19 nt, Artificial Sequence
  Description of Artificial Sequence: Synthetic oligonucleotide
gaagagagaggcaggucca

SEQ ID NO: 2498114 - RNA, 19 nt, Artificial Sequence
  Description of Artificial Sequence: Synthetic oligonucleotide
accacucuucguucccuag

SEQ ID NO: 2498115 - RNA, 19 nt, Artificial Sequence
  Description of Artificial Sequence: Synthetic oligonucleotide
gagagucacauugucguaa

SEQ ID NO: 2498116 - RNA, 19 nt, Artificial Sequence
  Description of Artificial Sequence: Synthetic oligonucleotide
ucgagaaagaagggcugca

SEQ ID NO: 2498117 - RNA, 19 nt, Artificial Sequence
  Description of Artificial Sequence: Synthetic oligonucleotide
ugucuaccuucaccuuucc

SEQ ID NO: 2498118 - RNA, 19 nt, Artificial Sequence
  Description of Artificial Sequence: Synthetic oligonucleotide
acgaaguaugaggaaagau

SEQ ID NO: 2498119 - RNA, 19 nt, Artificial Sequence
  Description of Artificial Sequence: Synthetic oligonucleotide
cucuuuugaaaggugagua

SEQ ID NO: 2498120 - RNA, 19 nt, Artificial Sequence
  Description of Artificial Sequence: Synthetic oligonucleotide
guccacagaaggaacauaa

SEQ ID NO: 2498121 - RNA, 19 nt, Artificial Sequence
  Description of Artificial Sequence: Synthetic oligonucleotide
gugaguaaaagugcucaga

SEQ ID NO: 2498122 - RNA, 19 nt, Artificial Sequence
  Description of Artificial Sequence: Synthetic oligonucleotide
ccaucuagucacuucguac

SEQ ID NO: 2498123 - RNA, 19 nt, Artificial Sequence
  Description of Artificial Sequence: Synthetic oligonucleotide
uccaauccuuguucaucug

SEQ ID NO: 2498124 - RNA, 19 nt, Artificial Sequence
  Description of Artificial Sequence: Synthetic oligonucleotide
aacuuauccaagacuucuu

SEQ ID NO: 2498125 - RNA, 19 nt, Artificial Sequence
  Description of Artificial Sequence: Synthetic oligonucleotide
ggccguauuccuaaaauga

SEQ ID NO: 2498126 - RNA, 19 nt, Artificial Sequence
  Description of Artificial Sequence: Synthetic oligonucleotide
ccguauuccuaaaaugaug

SEQ ID NO: 2498127 - RNA, 19 nt, Artificial Sequence
  Description of Artificial Sequence: Synthetic oligonucleotide
ggauagucgcuaucucucc

SEQ ID NO: 2498128 - RNA, 19 nt, Artificial Sequence
  Description of Artificial Sequence: Synthetic oligonucleotide
cuaucugguccucuucuga

SEQ ID NO: 2498129 - RNA, 19 nt, Artificial Sequence
  Description of Artificial Sequence: Synthetic oligonucleotide
cuucguucccuagcugucc

SEQ ID NO: 2498130 - RNA, 19 nt, Artificial Sequence
  Description of Artificial Sequence: Synthetic oligonucleotide
auguuugcucaugacaauu

SEQ ID NO: 2498131 - RNA, 19 nt, Artificial Sequence
  Description of Artificial Sequence: Synthetic oligonucleotide
aaguagcauccaauccuug

SEQ ID NO: 2498132 - RNA, 19 nt, Artificial Sequence
  Description of Artificial Sequence: Synthetic oligonucleotide
gauggccguauuccuaaaa

SEQ ID NO: 2498133 - RNA, 19 nt, Artificial Sequence
  Description of Artificial Sequence: Synthetic oligonucleotide
uuccuaaaaugaugaccau

SEQ ID NO: 2498134 - RNA, 19 nt, Artificial Sequence
  Description of Artificial Sequence: Synthetic oligonucleotide
uccgacgaaguaugaggaa

SEQ ID NO: 2498135 - RNA, 19 nt, Artificial Sequence
  Description of Artificial Sequence: Synthetic oligonucleotide
gacgaaguaugaggaaaga

SEQ ID NO: 2498136 - RNA, 19 nt, Artificial Sequence
  Description of Artificial Sequence: Synthetic oligonucleotide
aucuagucacuucguacuu

SEQ ID NO: 2498137 - RNA, 19 nt, Artificial Sequence
  Description of Artificial Sequence: Synthetic oligonucleotide
uccguuggcuucagaguuc

SEQ ID NO: 2498138 - RNA, 19 nt, Artificial Sequence
  Description of Artificial Sequence: Synthetic oligonucleotide
cagugaacuugggagugag

SEQ ID NO: 2498139 - RNA, 19 nt, Artificial Sequence
  Description of Artificial Sequence: Synthetic oligonucleotide
uggggcuuacuaucuuccu

SEQ ID NO: 2498140 - RNA, 19 nt, Artificial Sequence
  Description of Artificial Sequence: Synthetic oligonucleotide
acucuucguucccuagcug

SEQ ID NO: 2498141 - RNA, 19 nt, Artificial Sequence
  Description of Artificial Sequence: Synthetic oligonucleotide
ggaacgcuggugauuauac

SEQ ID NO: 2498142 - RNA, 19 nt, Artificial Sequence
  Description of Artificial Sequence: Synthetic oligonucleotide
uucguacuuuuggaguccu

SEQ ID NO: 2498143 - RNA, 19 nt, Artificial Sequence
  Description of Artificial Sequence: Synthetic oligonucleotide
caccugggcgcccaucuag

SEQ ID NO: 2498144 - RNA, 19 nt, Artificial Sequence
  Description of Artificial Sequence: Synthetic oligonucleotide
ccuauucacacgaccacuc

SEQ ID NO: 2498145 - RNA, 19 nt, Artificial Sequence
  Description of Artificial Sequence: Synthetic oligonucleotide
ucacacgaccacucuucgu

SEQ ID NO: 2498146 - RNA, 19 nt, Artificial Sequence
  Description of Artificial Sequence: Synthetic oligonucleotide
guucaucuggggcuuacua

SEQ ID NO: 2498147 - RNA, 19 nt, Artificial Sequence
  Description of Artificial Sequence: Synthetic oligonucleotide
gaacauaagcaggaacgcu

SEQ ID NO: 2498148 - RNA, 19 nt, Artificial Sequence
  Description of Artificial Sequence: Synthetic oligonucleotide
ucuagucacuucguacuuu

SEQ ID NO: 2498149 - RNA, 19 nt, Artificial Sequence
  Description of Artificial Sequence: Synthetic oligonucleotide
agaggcagguccacagaag

SEQ ID NO: 2498150 - RNA, 19 nt, Artificial Sequence
  Description of Artificial Sequence: Synthetic oligonucleotide
ucccuagcuguccgucacc

SEQ ID NO: 2498151 - RNA, 19 nt, Artificial Sequence
  Description of Artificial Sequence: Synthetic oligonucleotide
aguugucuaccuucaccuu

SEQ ID NO: 2498152 - RNA, 19 nt, Artificial Sequence
  Description of Artificial Sequence: Synthetic oligonucleotide
cacuucguacuuuuggagu

SEQ ID NO: 2498153 - RNA, 19 nt, Artificial Sequence
  Description of Artificial Sequence: Synthetic oligonucleotide
ucucuggucucaggauuug

SEQ ID NO: 2498154 - RNA, 19 nt, Artificial Sequence
  Description of Artificial Sequence: Synthetic oligonucleotide
acgcuggugauuauacccu

SEQ ID NO: 2498155 - RNA, 19 nt, Artificial Sequence
  Description of Artificial Sequence: Synthetic oligonucleotide
cucuucguucccuagcugu

SEQ ID NO: 2498156 - RNA, 19 nt, Artificial Sequence
  Description of Artificial Sequence: Synthetic oligonucleotide
cuucaccucagaagagaga

SEQ ID NO: 2498157 - RNA, 19 nt, Artificial Sequence
  Description of Artificial Sequence: Synthetic oligonucleotide
ucagcaggcuuuggcuuca

SEQ ID NO: 2498158 - RNA, 19 nt, Artificial Sequence
  Description of Artificial Sequence: Synthetic oligonucleotide
auacccuguuccacuucac

SEQ ID NO: 2498159 - RNA, 19 nt, Artificial Sequence
  Description of Artificial Sequence: Synthetic oligonucleotide
uguccgucaccugggcgcc

SEQ ID NO: 2498160 - RNA, 19 nt, Artificial Sequence
  Description of Artificial Sequence: Synthetic oligonucleotide
cugcacuucaucuccaaau

SEQ ID NO: 2498161 - RNA, 19 nt, Artificial Sequence
  Description of Artificial Sequence: Synthetic oligonucleotide
uuguucaucuggggcuuac

SEQ ID NO: 2498162 - RNA, 19 nt, Artificial Sequence
  Description of Artificial Sequence: Synthetic oligonucleotide
ucucaggauuugggcaggc

SEQ ID NO: 2498163 - RNA, 19 nt, Artificial Sequence
  Description of Artificial Sequence: Synthetic oligonucleotide
guagcauccaauccuuguu

SEQ ID NO: 2498164 - RNA, 19 nt, Artificial Sequence
  Description of Artificial Sequence: Synthetic oligonucleotide
gagcauuccgacgaaguau

SEQ ID NO: 2498165 - RNA, 19 nt, Artificial Sequence
  Description of Artificial Sequence: Synthetic oligonucleotide
guaaaagugcucagaaauu

SEQ ID NO: 2498166 - RNA, 19 nt, Artificial Sequence
  Description of Artificial Sequence: Synthetic oligonucleotide
cuuccguuggcuucagagu

SEQ ID NO: 2498167 - RNA, 19 nt, Artificial Sequence
  Description of Artificial Sequence: Synthetic oligonucleotide
guucccuagcuguccguca

SEQ ID NO: 2498168 - RNA, 19 nt, Artificial Sequence
  Description of Artificial Sequence: Synthetic oligonucleotide
cuuggccaguucuuggaua

SEQ ID NO: 2498169 - RNA, 19 nt, Artificial Sequence
  Description of Artificial Sequence: Synthetic oligonucleotide
agguccacagaaggaacau

SEQ ID NO: 2498170 - RNA, 19 nt, Artificial Sequence
  Description of Artificial Sequence: Synthetic oligonucleotide
gcuguccgucaccugggcg

SEQ ID NO: 2498171 - RNA, 19 nt, Artificial Sequence
  Description of Artificial Sequence: Synthetic oligonucleotide
auuugggcaggcauuccua

SEQ ID NO: 2498172 - RNA, 19 nt, Artificial Sequence
  Description of Artificial Sequence: Synthetic oligonucleotide
cacuaucugguccucuucu

SEQ ID NO: 2498173 - RNA, 19 nt, Artificial Sequence
  Description of Artificial Sequence: Synthetic oligonucleotide
aggaacgcuggugauuaua

SEQ ID NO: 2498174 - RNA, 19 nt, Artificial Sequence
  Description of Artificial Sequence: Synthetic oligonucleotide
ccuugaagaaagcugccaa

SEQ ID NO: 2498175 - RNA, 19 nt, Artificial Sequence
  Description of Artificial Sequence: Synthetic oligonucleotide
cagaagagagaggcagguc

SEQ ID NO: 2498176 - RNA, 19 nt, Artificial Sequence
  Description of Artificial Sequence: Synthetic oligonucleotide
agcccgugucauaucaccu

SEQ ID NO: 2498177 - RNA, 19 nt, Artificial Sequence
  Description of Artificial Sequence: Synthetic oligonucleotide
ggcagguccacagaaggaa

SEQ ID NO: 2498178 - RNA, 19 nt, Artificial Sequence
  Description of Artificial Sequence: Synthetic oligonucleotide
ucguucccuagcuguccgu

SEQ ID NO: 2498179 - RNA, 19 nt, Artificial Sequence
  Description of Artificial Sequence: Synthetic oligonucleotide
cccgugucauaucaccuug

SEQ ID NO: 2498180 - RNA, 19 nt, Artificial Sequence
  Description of Artificial Sequence: Synthetic oligonucleotide
agauggccguauuccuaaa

SEQ ID NO: 2498181 - RNA, 19 nt, Artificial Sequence
  Description of Artificial Sequence: Synthetic oligonucleotide
agcaggaacgcuggugauu

SEQ ID NO: 2498182 - RNA, 19 nt, Artificial Sequence
  Description of Artificial Sequence: Synthetic oligonucleotide
agugaacuugggagugaga

SEQ ID NO: 2498183 - RNA, 19 nt, Artificial Sequence
  Description of Artificial Sequence: Synthetic oligonucleotide
cuaagaaguugucuaccuu

SEQ ID NO: 2498184 - RNA, 19 nt, Artificial Sequence
  Description of Artificial Sequence: Synthetic oligonucleotide
caucuggggcuuacuaucu

SEQ ID NO: 2498185 - RNA, 19 nt, Artificial Sequence
  Description of Artificial Sequence: Synthetic oligonucleotide
ucguacuuuuggaguccuu

SEQ ID NO: 2498186 - RNA, 19 nt, Artificial Sequence
  Description of Artificial Sequence: Synthetic oligonucleotide
uccgucaccugggcgccca

SEQ ID NO: 2498187 - RNA, 19 nt, Artificial Sequence
  Description of Artificial Sequence: Synthetic oligonucleotide
accucagaagagagaggca

SEQ ID NO: 2498188 - RNA, 19 nt, Artificial Sequence
  Description of Artificial Sequence: Synthetic oligonucleotide
gaccacucuucguucccua

SEQ ID NO: 2498189 - RNA, 19 nt, Artificial Sequence
  Description of Artificial Sequence: Synthetic oligonucleotide
gcaggaacgcuggugauua

SEQ ID NO: 2498190 - RNA, 19 nt, Artificial Sequence
  Description of Artificial Sequence: Synthetic oligonucleotide
ggcuuacuaucuuccucca

SEQ ID NO: 2498191 - RNA, 19 nt, Artificial Sequence
  Description of Artificial Sequence: Synthetic oligonucleotide
ggauuugggcaggcauucc

SEQ ID NO: 2498192 - RNA, 19 nt, Artificial Sequence
  Description of Artificial Sequence: Synthetic oligonucleotide
cuggugauuauacccuguu

SEQ ID NO: 2498193 - RNA, 19 nt, Artificial Sequence
  Description of Artificial Sequence: Synthetic oligonucleotide
accugggcgcccaucuagu

SEQ ID NO: 2498194 - RNA, 19 nt, Artificial Sequence
  Description of Artificial Sequence: Synthetic oligonucleotide
cucaggauuugggcaggca

SEQ ID NO: 2498195 - RNA, 19 nt, Artificial Sequence
  Description of Artificial Sequence: Synthetic oligonucleotide
cgcuaucucuccagcagug

SEQ ID NO: 2498196 - RNA, 19 nt, Artificial Sequence
  Description of Artificial Sequence: Synthetic oligonucleotide
ccgacgaaguaugaggaaa

SEQ ID NO: 2498197 - RNA, 19 nt, Artificial Sequence
  Description of Artificial Sequence: Synthetic oligonucleotide
cauaagcaggaacgcuggu

SEQ ID NO: 2498198 - RNA, 19 nt, Artificial Sequence
  Description of Artificial Sequence: Synthetic oligonucleotide
ccccuuuggccacaauauc

SEQ ID NO: 2498199 - RNA, 19 nt, Artificial Sequence
  Description of Artificial Sequence: Synthetic oligonucleotide
cgagaaagaagggcugcac

SEQ ID NO: 2498200 - RNA, 19 nt, Artificial Sequence
  Description of Artificial Sequence: Synthetic oligonucleotide
ccuggaaguagcauccaau

SEQ ID NO: 2498201 - RNA, 19 nt, Artificial Sequence
  Description of Artificial Sequence: Synthetic oligonucleotide
ccagcccgugucauaucac

SEQ ID NO: 2498202 - RNA, 19 nt, Artificial Sequence
  Description of Artificial Sequence: Synthetic oligonucleotide
gcauuccuauucacacgac

SEQ ID NO: 2498203 - RNA, 19 nt, Artificial Sequence
  Description of Artificial Sequence: Synthetic oligonucleotide
gccguauuccuaaaaugau

SEQ ID NO: 2498204 - RNA, 19 nt, Artificial Sequence
  Description of Artificial Sequence: Synthetic oligonucleotide
ccaagacuucuuucauuaa

SEQ ID NO: 2498205 - RNA, 19 nt, Artificial Sequence
  Description of Artificial Sequence: Synthetic oligonucleotide
ggcugcacuucaucuccaa

SEQ ID NO: 2498206 - RNA, 19 nt, Artificial Sequence
  Description of Artificial Sequence: Synthetic oligonucleotide
gcgcccaucuagucacuuc

SEQ ID NO: 2498207 - RNA, 19 nt, Artificial Sequence
  Description of Artificial Sequence: Synthetic oligonucleotide
gcagugaacuugggaguga

SEQ ID NO: 2498208 - RNA, 19 nt, Artificial Sequence
  Description of Artificial Sequence: Synthetic oligonucleotide
cuucaccuggaaguagcau

SEQ ID NO: 2498209 - RNA, 19 nt, Artificial Sequence
  Description of Artificial Sequence: Synthetic oligonucleotide
gguccacagaaggaacaua

SEQ ID NO: 2498210 - RNA, 19 nt, Artificial Sequence
  Description of Artificial Sequence: Synthetic oligonucleotide
cgugucauaucaccuugaa

SEQ ID NO: 2498211 - RNA, 19 nt, Artificial Sequence
  Description of Artificial Sequence: Synthetic oligonucleotide
ccugggcgcccaucuaguc

SEQ ID NO: 2498212 - RNA, 19 nt, Artificial Sequence
  Description of Artificial Sequence: Synthetic oligonucleotide
ccgugucauaucaccuuga

SEQ ID NO: 2498213 - RNA, 19 nt, Artificial Sequence
  Description of Artificial Sequence: Synthetic oligonucleotide
cccaucuagucacuucgua

SEQ ID NO: 2498214 - RNA, 19 nt, Artificial Sequence
  Description of Artificial Sequence: Synthetic oligonucleotide
cuucaccuuuccagcccgu

SEQ ID NO: 2498215 - RNA, 19 nt, Artificial Sequence
  Description of Artificial Sequence: Synthetic oligonucleotide
ccucuuuugaaaggugagu

SEQ ID NO: 2498216 - RNA, 19 nt, Artificial Sequence
  Description of Artificial Sequence: Synthetic oligonucleotide
cucuuccguuggcuucaga

SEQ ID NO: 2498217 - RNA, 19 nt, Artificial Sequence
  Description of Artificial Sequence: Synthetic oligonucleotide
gcauuccgacgaaguauga

SEQ ID NO: 2498218 - RNA, 19 nt, Artificial Sequence
  Description of Artificial Sequence: Synthetic oligonucleotide
cuuguucaucuggggcuua

SEQ ID NO: 2498219 - RNA, 19 nt, Artificial Sequence
  Description of Artificial Sequence: Synthetic oligonucleotide
cugccaacuuguuggccuu

SEQ ID NO: 2498220 - RNA, 19 nt, Artificial Sequence
  Description of Artificial Sequence: Synthetic oligonucleotide
gcuggugauuauacccugu

SEQ ID NO: 2498221 - RNA, 19 nt, Artificial Sequence
  Description of Artificial Sequence: Synthetic oligonucleotide
cguucccuagcuguccguc

SEQ ID NO: 2498222 - RNA, 19 nt, Artificial Sequence
  Description of Artificial Sequence: Synthetic oligonucleotide
gcccgugucauaucaccuu

SEQ ID NO: 2498223 - RNA, 19 nt, Artificial Sequence
  Description of Artificial Sequence: Synthetic oligonucleotide
guccgucaccugggcgccc

SEQ ID NO: 2498224 - RNA, 19 nt, Artificial Sequence
  Description of Artificial Sequence: Synthetic oligonucleotide
cguacuuuuggaguccuuu

SEQ ID NO: 2498225 - RNA, 19 nt, Artificial Sequence
  Description of Artificial Sequence: Synthetic oligonucleotide
ccguuggcuucagaguucu

SEQ ID NO: 2498226 - RNA, 19 nt, Artificial Sequence
  Description of Artificial Sequence: Synthetic oligonucleotide
caggaacgcuggugauuau

SEQ ID NO: 2498227 - RNA, 19 nt, Artificial Sequence
  Description of Artificial Sequence: Synthetic oligonucleotide
gcccaucuagucacuucgu

SEQ ID NO: 2498228 - RNA, 19 nt, Artificial Sequence
  Description of Artificial Sequence: Synthetic oligonucleotide
ccuuguucaucuggggcuu

SEQ ID NO: 2498229 - RNA, 19 nt, Artificial Sequence
  Description of Artificial Sequence: Synthetic oligonucleotide
ccaacuuguuggccuucau

SEQ ID NO: 2498230 - RNA, 19 nt, Artificial Sequence
  Description of Artificial Sequence: Synthetic oligonucleotide
ggcgcccaucuagucacuu

SEQ ID NO: 2498231 - RNA, 19 nt, Artificial Sequence
  Description of Artificial Sequence: Synthetic oligonucleotide
cgaccacucuucguucccu

SEQ ID NO: 2498232 - RNA, 19 nt, Artificial Sequence
  Description of Artificial Sequence: Synthetic oligonucleotide
cguuggcuucagaguucuu

SEQ ID NO: 2498233 - RNA, 19 nt, Artificial Sequence
  Description of Artificial Sequence: Synthetic oligonucleotide
ccgucaccugggcgcccau

SEQ ID NO: 2498234 - RNA, 19 nt, Artificial Sequence
  Description of Artificial Sequence: Synthetic oligonucleotide
uugacaucaacuuagcucg

SEQ ID NO: 2498235 - RNA, 19 nt, Artificial Sequence
  Description of Artificial Sequence: Synthetic oligonucleotide
aacgcuucagcuuuucccc

SEQ ID NO: 2498236 - RNA, 19 nt, Artificial Sequence
  Description of Artificial Sequence: Synthetic oligonucleotide
uuggcuaccaguuucaucu

SEQ ID NO: 2498237 - RNA, 19 nt, Artificial Sequence
  Description of Artificial Sequence: Synthetic oligonucleotide
uguacuauccauuccucgg

SEQ ID NO: 2498238 - RNA, 19 nt, Artificial Sequence
  Description of Artificial Sequence: Synthetic oligonucleotide
aauaacugcaccacacccc

SEQ ID NO: 2498239 - RNA, 19 nt, Artificial Sequence
  Description of Artificial Sequence: Synthetic oligonucleotide
uuagcucgcuuccugaugg

SEQ ID NO: 2498240 - RNA, 19 nt, Artificial Sequence
  Description of Artificial Sequence: Synthetic oligonucleotide
agcauugaauaacugcacc

SEQ ID NO: 2498241 - RNA, 19 nt, Artificial Sequence
  Description of Artificial Sequence: Synthetic oligonucleotide
ugcagaaucuuccacccgg

SEQ ID NO: 2498242 - RNA, 19 nt, Artificial Sequence
  Description of Artificial Sequence: Synthetic oligonucleotide
ucuggcuucacucugcaca

SEQ ID NO: 2498243 - RNA, 19 nt, Artificial Sequence
  Description of Artificial Sequence: Synthetic oligonucleotide
auuuguacuauccauuccu

SEQ ID NO: 2498244 - RNA, 19 nt, Artificial Sequence
  Description of Artificial Sequence: Synthetic oligonucleotide
auuccuuugguguuucugg

SEQ ID NO: 2498245 - RNA, 19 nt, Artificial Sequence
  Description of Artificial Sequence: Synthetic oligonucleotide
agaaucuuccacccggggc

SEQ ID NO: 2498246 - RNA, 19 nt, Artificial Sequence
  Description of Artificial Sequence: Synthetic oligonucleotide
caggauuuuagccauggcg

SEQ ID NO: 2498247 - RNA, 19 nt, Artificial Sequence
  Description of Artificial Sequence: Synthetic oligonucleotide
uuggaaacaguugacauca

SEQ ID NO: 2498248 - RNA, 19 nt, Artificial Sequence
  Description of Artificial Sequence: Synthetic oligonucleotide
uuuuguucaggauuuuagc

SEQ ID NO: 2498249 - RNA, 19 nt, Artificial Sequence
  Description of Artificial Sequence: Synthetic oligonucleotide
acugaugaaauccuucuug

SEQ ID NO: 2498250 - RNA, 19 nt, Artificial Sequence
  Description of Artificial Sequence: Synthetic oligonucleotide
guugacaucaacuuagcuc

SEQ ID NO: 2498251 - RNA, 19 nt, Artificial Sequence
  Description of Artificial Sequence: Synthetic oligonucleotide
aggaugguggguuuacugc

SEQ ID NO: 2498252 - RNA, 19 nt, Artificial Sequence
  Description of Artificial Sequence: Synthetic oligonucleotide
aacugcaccacaccccucg

SEQ ID NO: 2498253 - RNA, 19 nt, Artificial Sequence
  Description of Artificial Sequence: Synthetic oligonucleotide
gaauaacugcaccacaccc

SEQ ID NO: 2498254 - RNA, 19 nt, Artificial Sequence
  Description of Artificial Sequence: Synthetic oligonucleotide
aaauccuucuuggaaacag

SEQ ID NO: 2498255 - RNA, 19 nt, Artificial Sequence
  Description of Artificial Sequence: Synthetic oligonucleotide
gaaaucgucuugcagaauc

SEQ ID NO: 2498256 - RNA, 19 nt, Artificial Sequence
  Description of Artificial Sequence: Synthetic oligonucleotide
uuugacaacaucuggcuuc

SEQ ID NO: 2498257 - RNA, 19 nt, Artificial Sequence
  Description of Artificial Sequence: Synthetic oligonucleotide
guccauuucugauucaccg

SEQ ID NO: 2498258 - RNA, 19 nt, Artificial Sequence
  Description of Artificial Sequence: Synthetic oligonucleotide
cuucuuaucaagcugcuuc

SEQ ID NO: 2498259 - RNA, 19 nt, Artificial Sequence
  Description of Artificial Sequence: Synthetic oligonucleotide
cugaugaaauccuucuugg

SEQ ID NO: 2498260 - RNA, 19 nt, Artificial Sequence
  Description of Artificial Sequence: Synthetic oligonucleotide
uuccuuaaccuucucacca

SEQ ID NO: 2498261 - RNA, 19 nt, Artificial Sequence
  Description of Artificial Sequence: Synthetic oligonucleotide
acugguccauuucugauuc

SEQ ID NO: 2498262 - RNA, 19 nt, Artificial Sequence
  Description of Artificial Sequence: Synthetic oligonucleotide
caugaaaucgucuugcaga

SEQ ID NO: 2498263 - RNA, 19 nt, Artificial Sequence
  Description of Artificial Sequence: Synthetic oligonucleotide
ugaauaacugcaccacacc

SEQ ID NO: 2498264 - RNA, 19 nt, Artificial Sequence
  Description of Artificial Sequence: Synthetic oligonucleotide
aacuguucucauuuguacu

SEQ ID NO: 2498265 - RNA, 19 nt, Artificial Sequence
  Description of Artificial Sequence: Synthetic oligonucleotide
accaacauuccuuuggugu

SEQ ID NO: 2498266 - RNA, 19 nt, Artificial Sequence
  Description of Artificial Sequence: Synthetic oligonucleotide
ucaugaaaucgucuugcag

SEQ ID NO: 2498267 - RNA, 19 nt, Artificial Sequence
  Description of Artificial Sequence: Synthetic oligonucleotide
cacacgugaguccugaacg

SEQ ID NO: 2498268 - RNA, 19 nt, Artificial Sequence
  Description of Artificial Sequence: Synthetic oligonucleotide
ucgucuugcagaaucuucc

SEQ ID NO: 2498269 - RNA, 19 nt, Artificial Sequence
  Description of Artificial Sequence: Synthetic oligonucleotide
uucugaaccuucuccgucg

SEQ ID NO: 2498270 - RNA, 19 nt, Artificial Sequence
  Description of Artificial Sequence: Synthetic oligonucleotide
aacacugaugaaauccuuc

SEQ ID NO: 2498271 - RNA, 19 nt, Artificial Sequence
  Description of Artificial Sequence: Synthetic oligonucleotide
uuguacuauccauuccucg

SEQ ID NO: 2498272 - RNA, 19 nt, Artificial Sequence
  Description of Artificial Sequence: Synthetic oligonucleotide
acaguugacaucaacuuag

SEQ ID NO: 2498273 - RNA, 19 nt, Artificial Sequence
  Description of Artificial Sequence: Synthetic oligonucleotide
uucauacuggcucccauca

SEQ ID NO: 2498274 - RNA, 19 nt, Artificial Sequence
  Description of Artificial Sequence: Synthetic oligonucleotide
uucuggacagcauugaaua

SEQ ID NO: 2498275 - RNA, 19 nt, Artificial Sequence
  Description of Artificial Sequence: Synthetic oligonucleotide
ucauuuguacuauccauuc

SEQ ID NO: 2498276 - RNA, 19 nt, Artificial Sequence
  Description of Artificial Sequence: Synthetic oligonucleotide
uucucauuuguacuaucca

SEQ ID NO: 2498277 - RNA, 19 nt, Artificial Sequence
  Description of Artificial Sequence: Synthetic oligonucleotide
gaacuguucucauuuguac

SEQ ID NO: 2498278 - RNA, 19 nt, Artificial Sequence
  Description of Artificial Sequence: Synthetic oligonucleotide
uuaaccuucucaccaacau

SEQ ID NO: 2498279 - RNA, 19 nt, Artificial Sequence
  Description of Artificial Sequence: Synthetic oligonucleotide
auuucugauucaccgcuuc

SEQ ID NO: 2498280 - RNA, 19 nt, Artificial Sequence
  Description of Artificial Sequence: Synthetic oligonucleotide
aacaucuggcuucacucug

SEQ ID NO: 2498281 - RNA, 19 nt, Artificial Sequence
  Description of Artificial Sequence: Synthetic oligonucleotide
uccggguucgacauuucgg

SEQ ID NO: 2498282 - RNA, 19 nt, Artificial Sequence
  Description of Artificial Sequence: Synthetic oligonucleotide
uucuacugcgccauccucc

SEQ ID NO: 2498283 - RNA, 19 nt, Artificial Sequence
  Description of Artificial Sequence: Synthetic oligonucleotide
uggacagcauugaauaacu

SEQ ID NO: 2498284 - RNA, 19 nt, Artificial Sequence
  Description of Artificial Sequence: Synthetic oligonucleotide
uggguuuacugcuaggagu

SEQ ID NO: 2498285 - RNA, 19 nt, Artificial Sequence
  Description of Artificial Sequence: Synthetic oligonucleotide
uucagcuuuuccccgcgcg

SEQ ID NO: 2498286 - RNA, 19 nt, Artificial Sequence
  Description of Artificial Sequence: Synthetic oligonucleotide
augaaauccuucuuggaaa

SEQ ID NO: 2498287 - RNA, 19 nt, Artificial Sequence
  Description of Artificial Sequence: Synthetic oligonucleotide
ucuuggaaacaguugacau

SEQ ID NO: 2498288 - RNA, 19 nt, Artificial Sequence
  Description of Artificial Sequence: Synthetic oligonucleotide
ucggaagagugcuugagcu

SEQ ID NO: 2498289 - RNA, 19 nt, Artificial Sequence
  Description of Artificial Sequence: Synthetic oligonucleotide
ucuacugcgccauccuccg

SEQ ID NO: 2498290 - RNA, 19 nt, Artificial Sequence
  Description of Artificial Sequence: Synthetic oligonucleotide
ugaaauccuucuuggaaac

SEQ ID NO: 2498291 - RNA, 19 nt, Artificial Sequence
  Description of Artificial Sequence: Synthetic oligonucleotide
ucucauuuguacuauccau

SEQ ID NO: 2498292 - RNA, 19 nt, Artificial Sequence
  Description of Artificial Sequence: Synthetic oligonucleotide
uuagccauggcgucugccc

SEQ ID NO: 2498293 - RNA, 19 nt, Artificial Sequence
  Description of Artificial Sequence: Synthetic oligonucleotide
gauggaaccuccugcuucc

SEQ ID NO: 2498294 - RNA, 19 nt, Artificial Sequence
  Description of Artificial Sequence: Synthetic oligonucleotide
cauuccucggagaacacug

SEQ ID NO: 2498295 - RNA, 19 nt, Artificial Sequence
  Description of Artificial Sequence: Synthetic oligonucleotide
cugacuucauuucagucug

SEQ ID NO: 2498296 - RNA, 19 nt, Artificial Sequence
  Description of Artificial Sequence: Synthetic oligonucleotide
aacaguugacaucaacuua

SEQ ID NO: 2498297 - RNA, 19 nt, Artificial Sequence
  Description of Artificial Sequence: Synthetic oligonucleotide
auaacugcaccacaccccu

SEQ ID NO: 2498298 - RNA, 19 nt, Artificial Sequence
  Description of Artificial Sequence: Synthetic oligonucleotide
auugaauaacugcaccaca

SEQ ID NO: 2498299 - RNA, 19 nt, Artificial Sequence
  Description of Artificial Sequence: Synthetic oligonucleotide
cacaucauuucccacuccc

SEQ ID NO: 2498300 - RNA, 19 nt, Artificial Sequence
  Description of Artificial Sequence: Synthetic oligonucleotide
acauuguccucacugucag

SEQ ID NO: 2498301 - RNA, 19 nt, Artificial Sequence
  Description of Artificial Sequence: Synthetic oligonucleotide
uuucuggacagcauugaau

SEQ ID NO: 2498302 - RNA, 19 nt, Artificial Sequence
  Description of Artificial Sequence: Synthetic oligonucleotide
gacauuucggccuuggcua

SEQ ID NO: 2498303 - RNA, 19 nt, Artificial Sequence
  Description of Artificial Sequence: Synthetic oligonucleotide
uguucaggauuuuagccau

SEQ ID NO: 2498304 - RNA, 19 nt, Artificial Sequence
  Description of Artificial Sequence: Synthetic oligonucleotide
cuuggaaacaguugacauc

SEQ ID NO: 2498305 - RNA, 19 nt, Artificial Sequence
  Description of Artificial Sequence: Synthetic oligonucleotide
cuggcuuugggguucguag

SEQ ID NO: 2498306 - RNA, 19 nt, Artificial Sequence
  Description of Artificial Sequence: Synthetic oligonucleotide
uccuucuuggaaacaguug

SEQ ID NO: 2498307 - RNA, 19 nt, Artificial Sequence
  Description of Artificial Sequence: Synthetic oligonucleotide
gaagguuccucucugccuc

SEQ ID NO: 2498308 - RNA, 19 nt, Artificial Sequence
  Description of Artificial Sequence: Synthetic oligonucleotide
uacuauccauuccucggag

SEQ ID NO: 2498309 - RNA, 19 nt, Artificial Sequence
  Description of Artificial Sequence: Synthetic oligonucleotide
ucccaguccuucauacugg

SEQ ID NO: 2498310 - RNA, 19 nt, Artificial Sequence
  Description of Artificial Sequence: Synthetic oligonucleotide
uuuguacuauccauuccuc

SEQ ID NO: 2498311 - RNA, 19 nt, Artificial Sequence
  Description of Artificial Sequence: Synthetic oligonucleotide
auuucagucugucuggcuu

SEQ ID NO: 2498312 - RNA, 19 nt, Artificial Sequence
  Description of Artificial Sequence: Synthetic oligonucleotide
ucaccaacauuccuuuggu

SEQ ID NO: 2498313 - RNA, 19 nt, Artificial Sequence
  Description of Artificial Sequence: Synthetic oligonucleotide
aacuuagcucgcuuccuga

SEQ ID NO: 2498314 - RNA, 19 nt, Artificial Sequence
  Description of Artificial Sequence: Synthetic oligonucleotide
cauugaauaacugcaccac

SEQ ID NO: 2498315 - RNA, 19 nt, Artificial Sequence
  Description of Artificial Sequence: Synthetic oligonucleotide
ucggagaacacugaugaaa

SEQ ID NO: 2498316 - RNA, 19 nt, Artificial Sequence
  Description of Artificial Sequence: Synthetic oligonucleotide
ucugaaccuucuccgucgg

SEQ ID NO: 2498317 - RNA, 19 nt, Artificial Sequence
  Description of Artificial Sequence: Synthetic oligonucleotide
cuuccuuaaccuucucacc

SEQ ID NO: 2498318 - RNA, 19 nt, Artificial Sequence
  Description of Artificial Sequence: Synthetic oligonucleotide
cacucugcacaucauuucc

SEQ ID NO: 2498319 - RNA, 19 nt, Artificial Sequence
  Description of Artificial Sequence: Synthetic oligonucleotide
ggaagagugcuugagcucg

SEQ ID NO: 2498320 - RNA, 19 nt, Artificial Sequence
  Description of Artificial Sequence: Synthetic oligonucleotide
uuaucaagcugcuuccuuu

SEQ ID NO: 2498321 - RNA, 19 nt, Artificial Sequence
  Description of Artificial Sequence: Synthetic oligonucleotide
cauacuggcucccaucaug

SEQ ID NO: 2498322 - RNA, 19 nt, Artificial Sequence
  Description of Artificial Sequence: Synthetic oligonucleotide
augaaaucgucuugcagaa

SEQ ID NO: 2498323 - RNA, 19 nt, Artificial Sequence
  Description of Artificial Sequence: Synthetic oligonucleotide
caguccuucauacuggcuc

SEQ ID NO: 2498324 - RNA, 19 nt, Artificial Sequence
  Description of Artificial Sequence: Synthetic oligonucleotide
cauuuguacuauccauucc

SEQ ID NO: 2498325 - RNA, 19 nt, Artificial Sequence
  Description of Artificial Sequence: Synthetic oligonucleotide
uucuuggaaacaguugaca

SEQ ID NO: 2498326 - RNA, 19 nt, Artificial Sequence
  Description of Artificial Sequence: Synthetic oligonucleotide
uuccggguucgacauuucg

SEQ ID NO: 2498327 - RNA, 19 nt, Artificial Sequence
  Description of Artificial Sequence: Synthetic oligonucleotide
caccgcuuccuucugaacc

SEQ ID NO: 2498328 - RNA, 19 nt, Artificial Sequence
  Description of Artificial Sequence: Synthetic oligonucleotide
ugcacaucauuucccacuc

SEQ ID NO: 2498329 - RNA, 19 nt, Artificial Sequence
  Description of Artificial Sequence: Synthetic oligonucleotide
uuugggguucguagcagca

SEQ ID NO: 2498330 - RNA, 19 nt, Artificial Sequence
  Description of Artificial Sequence: Synthetic oligonucleotide
cuuugguguuucuggacag

SEQ ID NO: 2498331 - RNA, 19 nt, Artificial Sequence
  Description of Artificial Sequence: Synthetic oligonucleotide
aacugguccauuucugauu

SEQ ID NO: 2498332 - RNA, 19 nt, Artificial Sequence
  Description of Artificial Sequence: Synthetic oligonucleotide
aacauuccuuugguguuuc

SEQ ID NO: 2498333 - RNA, 19 nt, Artificial Sequence
  Description of Artificial Sequence: Synthetic oligonucleotide
ugaagguuccucucugccu

SEQ ID NO: 2498334 - RNA, 19 nt, Artificial Sequence
  Description of Artificial Sequence: Synthetic oligonucleotide
gucccaguccuucauacug

SEQ ID NO: 2498335 - RNA, 19 nt, Artificial Sequence
  Description of Artificial Sequence: Synthetic oligonucleotide
aaucuuccacccggggccc

SEQ ID NO: 2498336 - RNA, 19 nt, Artificial Sequence
  Description of Artificial Sequence: Synthetic oligonucleotide
auggcgucugcccagccag

SEQ ID NO: 2498337 - RNA, 19 nt, Artificial Sequence
  Description of Artificial Sequence: Synthetic oligonucleotide
ucagcuuuuccccgcgcgc

SEQ ID NO: 2498338 - RNA, 19 nt, Artificial Sequence
  Description of Artificial Sequence: Synthetic oligonucleotide
acauuucggccuuggcuac

SEQ ID NO: 2498339 - RNA, 19 nt, Artificial Sequence
  Description of Artificial Sequence: Synthetic oligonucleotide
ugccucuuugucuuugaca

SEQ ID NO: 2498340 - RNA, 19 nt, Artificial Sequence
  Description of Artificial Sequence: Synthetic oligonucleotide
uucuccgucggaagagugc

SEQ ID NO: 2498341 - RNA, 19 nt, Artificial Sequence
  Description of Artificial Sequence: Synthetic oligonucleotide
gaaccuucuccgucggaag

SEQ ID NO: 2498342 - RNA, 19 nt, Artificial Sequence
  Description of Artificial Sequence: Synthetic oligonucleotide
ucugaagguuccucucugc

SEQ ID NO: 2498343 - RNA, 19 nt, Artificial Sequence
  Description of Artificial Sequence: Synthetic oligonucleotide
agcacuuggcucugcaucu

SEQ ID NO: 2498344 - RNA, 19 nt, Artificial Sequence
  Description of Artificial Sequence: Synthetic oligonucleotide
uugcagaaucuuccacccg

SEQ ID NO: 2498345 - RNA, 19 nt, Artificial Sequence
  Description of Artificial Sequence: Synthetic oligonucleotide
cugaagguuccucucugcc

SEQ ID NO: 2498346 - RNA, 19 nt, Artificial Sequence
  Description of Artificial Sequence: Synthetic oligonucleotide
agcuucuacugcgccaucc

SEQ ID NO: 2498347 - RNA, 19 nt, Artificial Sequence
  Description of Artificial Sequence: Synthetic oligonucleotide
uugucccaguccuucauac

SEQ ID NO: 2498348 - RNA, 19 nt, Artificial Sequence
  Description of Artificial Sequence: Synthetic oligonucleotide
uuuacugcuaggagucuuu

SEQ ID NO: 2498349 - RNA, 19 nt, Artificial Sequence
  Description of Artificial Sequence: Synthetic oligonucleotide
acucugcacaucauuuccc

SEQ ID NO: 2498350 - RNA, 19 nt, Artificial Sequence
  Description of Artificial Sequence: Synthetic oligonucleotide
ucgucuuccggguucgaca

SEQ ID NO: 2498351 - RNA, 19 nt, Artificial Sequence
  Description of Artificial Sequence: Synthetic oligonucleotide
aaaucgucuugcagaaucu

SEQ ID NO: 2498352 - RNA, 19 nt, Artificial Sequence
  Description of Artificial Sequence: Synthetic oligonucleotide
guucguagcagcagaacug

SEQ ID NO: 2498353 - RNA, 19 nt, Artificial Sequence
  Description of Artificial Sequence: Synthetic oligonucleotide
cuggacagcauugaauaac

SEQ ID NO: 2498354 - RNA, 19 nt, Artificial Sequence
  Description of Artificial Sequence: Synthetic oligonucleotide
auccuccgacaacuggucc

SEQ ID NO: 2498355 - RNA, 19 nt, Artificial Sequence
  Description of Artificial Sequence: Synthetic oligonucleotide
ccucuucuuaucaagcugc

SEQ ID NO: 2498356 - RNA, 19 nt, Artificial Sequence
  Description of Artificial Sequence: Synthetic oligonucleotide
ugggguucguagcagcaga

SEQ ID NO: 2498357 - RNA, 19 nt, Artificial Sequence
  Description of Artificial Sequence: Synthetic oligonucleotide
cuuugggguucguagcagc

SEQ ID NO: 2498358 - RNA, 19 nt, Artificial Sequence
  Description of Artificial Sequence: Synthetic oligonucleotide
uacugcgccauccuccgac

SEQ ID NO: 2498359 - RNA, 19 nt, Artificial Sequence
  Description of Artificial Sequence: Synthetic oligonucleotide
agaacacugaugaaauccu

SEQ ID NO: 2498360 - RNA, 19 nt, Artificial Sequence
  Description of Artificial Sequence: Synthetic oligonucleotide
ucaggauuuuagccauggc

SEQ ID NO: 2498361 - RNA, 19 nt, Artificial Sequence
  Description of Artificial Sequence: Synthetic oligonucleotide
uuccugauggaaccuccug

SEQ ID NO: 2498362 - RNA, 19 nt, Artificial Sequence
  Description of Artificial Sequence: Synthetic oligonucleotide
uuccuuugguguuucugga

SEQ ID NO: 2498363 - RNA, 19 nt, Artificial Sequence
  Description of Artificial Sequence: Synthetic oligonucleotide
uucguagcagcagaacugu

SEQ ID NO: 2498364 - RNA, 19 nt, Artificial Sequence
  Description of Artificial Sequence: Synthetic oligonucleotide
guggguuuacugcuaggag

SEQ ID NO: 2498365 - RNA, 19 nt, Artificial Sequence
  Description of Artificial Sequence: Synthetic oligonucleotide
aucaugaaaucgucuugca

SEQ ID NO: 2498366 - RNA, 19 nt, Artificial Sequence
  Description of Artificial Sequence: Synthetic oligonucleotide
agcagcagaacuguucuca

SEQ ID NO: 2498367 - RNA, 19 nt, Artificial Sequence
  Description of Artificial Sequence: Synthetic oligonucleotide
uucugauucaccgcuuccu

SEQ ID NO: 2498368 - RNA, 19 nt, Artificial Sequence
  Description of Artificial Sequence: Synthetic oligonucleotide
uccuccgacaacuggucca

SEQ ID NO: 2498369 - RNA, 19 nt, Artificial Sequence
  Description of Artificial Sequence: Synthetic oligonucleotide
aucaagcugcuuccuuuuc

SEQ ID NO: 2498370 - RNA, 19 nt, Artificial Sequence
  Description of Artificial Sequence: Synthetic oligonucleotide
uguuucuggacagcauuga

SEQ ID NO: 2498371 - RNA, 19 nt, Artificial Sequence
  Description of Artificial Sequence: Synthetic oligonucleotide
cagcauugaauaacugcac

SEQ ID NO: 2498372 - RNA, 19 nt, Artificial Sequence
  Description of Artificial Sequence: Synthetic oligonucleotide
uucucaccaacauuccuuu

SEQ ID NO: 2498373 - RNA, 19 nt, Artificial Sequence
  Description of Artificial Sequence: Synthetic oligonucleotide
ucacucugcacaucauuuc

SEQ ID NO: 2498374 - RNA, 19 nt, Artificial Sequence
  Description of Artificial Sequence: Synthetic oligonucleotide
ugcuugagcucgucuuccg

SEQ ID NO: 2498375 - RNA, 19 nt, Artificial Sequence
  Description of Artificial Sequence: Synthetic oligonucleotide
gaauuagucccagcacuug

SEQ ID NO: 2498376 - RNA, 19 nt, Artificial Sequence
  Description of Artificial Sequence: Synthetic oligonucleotide
cuucauacuggcucccauc

SEQ ID NO: 2498377 - RNA, 19 nt, Artificial Sequence
  Description of Artificial Sequence: Synthetic oligonucleotide
acuuggcucugcaucuucc

SEQ ID NO: 2498378 - RNA, 19 nt, Artificial Sequence
  Description of Artificial Sequence: Synthetic oligonucleotide
ucccaucaugaaaucgucu

SEQ ID NO: 2498379 - RNA, 19 nt, Artificial Sequence
  Description of Artificial Sequence: Synthetic oligonucleotide
aucgucuugcagaaucuuc

SEQ ID NO: 2498380 - RNA, 19 nt, Artificial Sequence
  Description of Artificial Sequence: Synthetic oligonucleotide
aauccuucuuggaaacagu

SEQ ID NO: 2498381 - RNA, 19 nt, Artificial Sequence
  Description of Artificial Sequence: Synthetic oligonucleotide
gucggaagagugcuugagc

SEQ ID NO: 2498382 - RNA, 19 nt, Artificial Sequence
  Description of Artificial Sequence: Synthetic oligonucleotide
uucgacauuucggccuugg

SEQ ID NO: 2498383 - RNA, 19 nt, Artificial Sequence
  Description of Artificial Sequence: Synthetic oligonucleotide
ucauuucagucugucuggc

SEQ ID NO: 2498384 - RNA, 19 nt, Artificial Sequence
  Description of Artificial Sequence: Synthetic oligonucleotide
accgcuuccuucugaaccu

SEQ ID NO: 2498385 - RNA, 19 nt, Artificial Sequence
  Description of Artificial Sequence: Synthetic oligonucleotide
caguugacaucaacuuagc

SEQ ID NO: 2498386 - RNA, 19 nt, Artificial Sequence
  Description of Artificial Sequence: Synthetic oligonucleotide
agccagaauuagucccagc

SEQ ID NO: 2498387 - RNA, 19 nt, Artificial Sequence
  Description of Artificial Sequence: Synthetic oligonucleotide
ucuccgucggaagagugcu

SEQ ID NO: 2498388 - RNA, 19 nt, Artificial Sequence
  Description of Artificial Sequence: Synthetic oligonucleotide
acaccccucgucgcaaucc

SEQ ID NO: 2498389 - RNA, 19 nt, Artificial Sequence
  Description of Artificial Sequence: Synthetic oligonucleotide
ugguccauuucugauucac

SEQ ID NO: 2498390 - RNA, 19 nt, Artificial Sequence
  Description of Artificial Sequence: Synthetic oligonucleotide
guacuauccauuccucgga

SEQ ID NO: 2498391 - RNA, 19 nt, Artificial Sequence
  Description of Artificial Sequence: Synthetic oligonucleotide
uuugguguuucuggacagc

SEQ ID NO: 2498392 - RNA, 19 nt, Artificial Sequence
  Description of Artificial Sequence: Synthetic oligonucleotide
ucagggaacgcuucagcuu

SEQ ID NO: 2498393 - RNA, 19 nt, Artificial Sequence
  Description of Artificial Sequence: Synthetic oligonucleotide
cuucugaaccuucuccguc

SEQ ID NO: 2498394 - RNA, 19 nt, Artificial Sequence
  Description of Artificial Sequence: Synthetic oligonucleotide
caacauuguccucacuguc

SEQ ID NO: 2498395 - RNA, 19 nt, Artificial Sequence
  Description of Artificial Sequence: Synthetic oligonucleotide
cuauccauuccucggagaa

SEQ ID NO: 2498396 - RNA, 19 nt, Artificial Sequence
  Description of Artificial Sequence: Synthetic oligonucleotide
ucggccuuggcuaccaguu

SEQ ID NO: 2498397 - RNA, 19 nt, Artificial Sequence
  Description of Artificial Sequence: Synthetic oligonucleotide
uccgucggaagagugcuug

SEQ ID NO: 2498398 - RNA, 19 nt, Artificial Sequence
  Description of Artificial Sequence: Synthetic oligonucleotide
gcauugaauaacugcacca

SEQ ID NO: 2498399 - RNA, 19 nt, Artificial Sequence
  Description of Artificial Sequence: Synthetic oligonucleotide
cuuagcucgcuuccugaug

SEQ ID NO: 2498400 - RNA, 19 nt, Artificial Sequence
  Description of Artificial Sequence: Synthetic oligonucleotide
uugagcucgucuuccgggu

SEQ ID NO: 2498401 - RNA, 19 nt, Artificial Sequence
  Description of Artificial Sequence: Synthetic oligonucleotide
uucaccgcuuccuucugaa

SEQ ID NO: 2498402 - RNA, 19 nt, Artificial Sequence
  Description of Artificial Sequence: Synthetic oligonucleotide
guagcagcagaacuguucu

SEQ ID NO: 2498403 - RNA, 19 nt, Artificial Sequence
  Description of Artificial Sequence: Synthetic oligonucleotide
uccuuaaccuucucaccaa

SEQ ID NO: 2498404 - RNA, 19 nt, Artificial Sequence
  Description of Artificial Sequence: Synthetic oligonucleotide
uaucaagcugcuuccuuuu

SEQ ID NO: 2498405 - RNA, 19 nt, Artificial Sequence
  Description of Artificial Sequence: Synthetic oligonucleotide
cuuaaccuucucaccaaca

SEQ ID NO: 2498406 - RNA, 19 nt, Artificial Sequence
  Description of Artificial Sequence: Synthetic oligonucleotide
gccagaauuagucccagca

SEQ ID NO: 2498407 - RNA, 19 nt, Artificial Sequence
  Description of Artificial Sequence: Synthetic oligonucleotide
uagccauggcgucugccca

SEQ ID NO: 2498408 - RNA, 19 nt, Artificial Sequence
  Description of Artificial Sequence: Synthetic oligonucleotide
uuuccccgcgcgcacacgu

SEQ ID NO: 2498409 - RNA, 19 nt, Artificial Sequence
  Description of Artificial Sequence: Synthetic oligonucleotide
acuauccauuccucggaga

SEQ ID NO: 2498410 - RNA, 19 nt, Artificial Sequence
  Description of Artificial Sequence: Synthetic oligonucleotide
ucgacauuucggccuuggc

SEQ ID NO: 2498411 - RNA, 19 nt, Artificial Sequence
  Description of Artificial Sequence: Synthetic oligonucleotide
ucuucacaggagucaacau

SEQ ID NO: 2498412 - RNA, 19 nt, Artificial Sequence
  Description of Artificial Sequence: Synthetic oligonucleotide
cagcacuuggcucugcauc

SEQ ID NO: 2498413 - RNA, 19 nt, Artificial Sequence
  Description of Artificial Sequence: Synthetic oligonucleotide
gagucaacauuguccucac

SEQ ID NO: 2498414 - RNA, 19 nt, Artificial Sequence
  Description of Artificial Sequence: Synthetic oligonucleotide
ucauuucccacucccucuu

SEQ ID NO: 2498415 - RNA, 19 nt, Artificial Sequence
  Description of Artificial Sequence: Synthetic oligonucleotide
uuucagucugucuggcuuu

SEQ ID NO: 2498416 - RNA, 19 nt, Artificial Sequence
  Description of Artificial Sequence: Synthetic oligonucleotide
ccuucuuggaaacaguuga

SEQ ID NO: 2498417 - RNA, 19 nt, Artificial Sequence
  Description of Artificial Sequence: Synthetic oligonucleotide
cuuggcuaccaguuucauc

SEQ ID NO: 2498418 - RNA, 19 nt, Artificial Sequence
  Description of Artificial Sequence: Synthetic oligonucleotide
uuuagccauggcgucugcc

SEQ ID NO: 2498419 - RNA, 19 nt, Artificial Sequence
  Description of Artificial Sequence: Synthetic oligonucleotide
acgcuucagcuuuuccccg

SEQ ID NO: 2498420 - RNA, 19 nt, Artificial Sequence
  Description of Artificial Sequence: Synthetic oligonucleotide
aagagugcuugagcucguc

SEQ ID NO: 2498421 - RNA, 19 nt, Artificial Sequence
  Description of Artificial Sequence: Synthetic oligonucleotide
cagaauuagucccagcacu

SEQ ID NO: 2498422 - RNA, 19 nt, Artificial Sequence
  Description of Artificial Sequence: Synthetic oligonucleotide
cucugaagguuccucucug

SEQ ID NO: 2498423 - RNA, 19 nt, Artificial Sequence
  Description of Artificial Sequence: Synthetic oligonucleotide
ugguggguuuacugcuagg

SEQ ID NO: 2498424 - RNA, 19 nt, Artificial Sequence
  Description of Artificial Sequence: Synthetic oligonucleotide
agagugcuugagcucgucu

SEQ ID NO: 2498425 - RNA, 19 nt, Artificial Sequence
  Description of Artificial Sequence: Synthetic oligonucleotide
cagaaucuuccacccgggg

SEQ ID NO: 2498426 - RNA, 19 nt, Artificial Sequence
  Description of Artificial Sequence: Synthetic oligonucleotide
cugauucaccgcuuccuuc

SEQ ID NO: 2498427 - RNA, 19 nt, Artificial Sequence
  Description of Artificial Sequence: Synthetic oligonucleotide
cugucagcuucuacugcgc

SEQ ID NO: 2498428 - RNA, 19 nt, Artificial Sequence
  Description of Artificial Sequence: Synthetic oligonucleotide
ggagucaacauuguccuca

SEQ ID NO: 2498429 - RNA, 19 nt, Artificial Sequence
  Description of Artificial Sequence: Synthetic oligonucleotide
ucuuaucaagcugcuuccu

SEQ ID NO: 2498430 - RNA, 19 nt, Artificial Sequence
  Description of Artificial Sequence: Synthetic oligonucleotide
gacaacaucuggcuucacu

SEQ ID NO: 2498431 - RNA, 19 nt, Artificial Sequence
  Description of Artificial Sequence: Synthetic oligonucleotide
cucccaucaugaaaucguc

SEQ ID NO: 2498432 - RNA, 19 nt, Artificial Sequence
  Description of Artificial Sequence: Synthetic oligonucleotide
guguuucuggacagcauug

SEQ ID NO: 2498433 - RNA, 19 nt, Artificial Sequence
  Description of Artificial Sequence: Synthetic oligonucleotide
ucugccucuuugucuuuga

SEQ ID NO: 2498434 - RNA, 19 nt, Artificial Sequence
  Description of Artificial Sequence: Synthetic oligonucleotide
uugggguucguagcagcag

SEQ ID NO: 2498435 - RNA, 19 nt, Artificial Sequence
  Description of Artificial Sequence: Synthetic oligonucleotide
gacuucauuucagucuguc

SEQ ID NO: 2498436 - RNA, 19 nt, Artificial Sequence
  Description of Artificial Sequence: Synthetic oligonucleotide
acaucaacuuagcucgcuu

SEQ ID NO: 2498437 - RNA, 19 nt, Artificial Sequence
  Description of Artificial Sequence: Synthetic oligonucleotide
aggagucaacauuguccuc

SEQ ID NO: 2498438 - RNA, 19 nt, Artificial Sequence
  Description of Artificial Sequence: Synthetic oligonucleotide
ucucaccaacauuccuuug

SEQ ID NO: 2498439 - RNA, 19 nt, Artificial Sequence
  Description of Artificial Sequence: Synthetic oligonucleotide
cccagccagaauuaguccc

SEQ ID NO: 2498440 - RNA, 19 nt, Artificial Sequence
  Description of Artificial Sequence: Synthetic oligonucleotide
auacuggcucccaucauga

SEQ ID NO: 2498441 - RNA, 19 nt, Artificial Sequence
  Description of Artificial Sequence: Synthetic oligonucleotide
acuuagcucgcuuccugau

SEQ ID NO: 2498442 - RNA, 19 nt, Artificial Sequence
  Description of Artificial Sequence: Synthetic oligonucleotide
uuccucggagaacacugau

SEQ ID NO: 2498443 - RNA, 19 nt, Artificial Sequence
  Description of Artificial Sequence: Synthetic oligonucleotide
ugucccaguccuucauacu

SEQ ID NO: 2498444 - RNA, 19 nt, Artificial Sequence
  Description of Artificial Sequence: Synthetic oligonucleotide
aaucgucuugcagaaucuu

SEQ ID NO: 2498445 - RNA, 19 nt, Artificial Sequence
  Description of Artificial Sequence: Synthetic oligonucleotide
cuucuccgucggaagagug

SEQ ID NO: 2498446 - RNA, 19 nt, Artificial Sequence
  Description of Artificial Sequence: Synthetic oligonucleotide
cauccuccgacaacugguc

SEQ ID NO: 2498447 - RNA, 19 nt, Artificial Sequence
  Description of Artificial Sequence: Synthetic oligonucleotide
agaacuguucucauuugua

SEQ ID NO: 2498448 - RNA, 19 nt, Artificial Sequence
  Description of Artificial Sequence: Synthetic oligonucleotide
aagguuccucucugccucu

SEQ ID NO: 2498449 - RNA, 19 nt, Artificial Sequence
  Description of Artificial Sequence: Synthetic oligonucleotide
ccggguucgacauuucggc

SEQ ID NO: 2498450 - RNA, 19 nt, Artificial Sequence
  Description of Artificial Sequence: Synthetic oligonucleotide
uucggccuuggcuaccagu

SEQ ID NO: 2498451 - RNA, 19 nt, Artificial Sequence
  Description of Artificial Sequence: Synthetic oligonucleotide
ugcgccauccuccgacaac

SEQ ID NO: 2498452 - RNA, 19 nt, Artificial Sequence
  Description of Artificial Sequence: Synthetic oligonucleotide
cacaggagucaacauuguc

SEQ ID NO: 2498453 - RNA, 19 nt, Artificial Sequence
  Description of Artificial Sequence: Synthetic oligonucleotide
agaauuagucccagcacuu

SEQ ID NO: 2498454 - RNA, 19 nt, Artificial Sequence
  Description of Artificial Sequence: Synthetic oligonucleotide
ucugucuggcuuugggguu

SEQ ID NO: 2498455 - RNA, 19 nt, Artificial Sequence
  Description of Artificial Sequence: Synthetic oligonucleotide
gucgcaauccucugaaggu

SEQ ID NO: 2498456 - RNA, 19 nt, Artificial Sequence
  Description of Artificial Sequence: Synthetic oligonucleotide
ccucggagaacacugauga

SEQ ID NO: 2498457 - RNA, 19 nt, Artificial Sequence
  Description of Artificial Sequence: Synthetic oligonucleotide
accuucuccgucggaagag

SEQ ID NO: 2498458 - RNA, 19 nt, Artificial Sequence
  Description of Artificial Sequence: Synthetic oligonucleotide
guuucuggacagcauugaa

SEQ ID NO: 2498459 - RNA, 19 nt, Artificial Sequence
  Description of Artificial Sequence: Synthetic oligonucleotide
ucccacucccucuucuuau

SEQ ID NO: 2498460 - RNA, 19 nt, Artificial Sequence
  Description of Artificial Sequence: Synthetic oligonucleotide
gaaauccuucuuggaaaca

SEQ ID NO: 2498461 - RNA, 19 nt, Artificial Sequence
  Description of Artificial Sequence: Synthetic oligonucleotide
cgucgcaauccucugaagg

SEQ ID NO: 2498462 - RNA, 19 nt, Artificial Sequence
  Description of Artificial Sequence: Synthetic oligonucleotide
gucugucuggcuuuggggu

SEQ ID NO: 2498463 - RNA, 19 nt, Artificial Sequence
  Description of Artificial Sequence: Synthetic oligonucleotide
ucauacuggcucccaucau

SEQ ID NO: 2498464 - RNA, 19 nt, Artificial Sequence
  Description of Artificial Sequence: Synthetic oligonucleotide
uucccacucccucuucuua

SEQ ID NO: 2498465 - RNA, 19 nt, Artificial Sequence
  Description of Artificial Sequence: Synthetic oligonucleotide
ucgucgcaauccucugaag

SEQ ID NO: 2498466 - RNA, 19 nt, Artificial Sequence
  Description of Artificial Sequence: Synthetic oligonucleotide
ggguuuacugcuaggaguc

SEQ ID NO: 2498467 - RNA, 19 nt, Artificial Sequence
  Description of Artificial Sequence: Synthetic oligonucleotide
auucaccgcuuccuucuga

SEQ ID NO: 2498468 - RNA, 19 nt, Artificial Sequence
  Description of Artificial Sequence: Synthetic oligonucleotide
cuucuacugcgccauccuc

SEQ ID NO: 2498469 - RNA, 19 nt, Artificial Sequence
  Description of Artificial Sequence: Synthetic oligonucleotide
gucagcuucuacugcgcca

SEQ ID NO: 2498470 - RNA, 19 nt, Artificial Sequence
  Description of Artificial Sequence: Synthetic oligonucleotide
ccagaauuagucccagcac

SEQ ID NO: 2498471 - RNA, 19 nt, Artificial Sequence
  Description of Artificial Sequence: Synthetic oligonucleotide
cucauuuguacuauccauu

SEQ ID NO: 2498472 - RNA, 19 nt, Artificial Sequence
  Description of Artificial Sequence: Synthetic oligonucleotide
cauuguccucacugucagc

SEQ ID NO: 2498473 - RNA, 19 nt, Artificial Sequence
  Description of Artificial Sequence: Synthetic oligonucleotide
uccauuccucggagaacac

SEQ ID NO: 2498474 - RNA, 19 nt, Artificial Sequence
  Description of Artificial Sequence: Synthetic oligonucleotide
gguucguagcagcagaacu

SEQ ID NO: 2498475 - RNA, 19 nt, Artificial Sequence
  Description of Artificial Sequence: Synthetic oligonucleotide
gguggguuuacugcuagga

SEQ ID NO: 2498476 - RNA, 19 nt, Artificial Sequence
  Description of Artificial Sequence: Synthetic oligonucleotide
gcuugagcucgucuuccgg

SEQ ID NO: 2498477 - RNA, 19 nt, Artificial Sequence
  Description of Artificial Sequence: Synthetic oligonucleotide
agcucgucuuccggguucg

SEQ ID NO: 2498478 - RNA, 19 nt, Artificial Sequence
  Description of Artificial Sequence: Synthetic oligonucleotide
gagcucgucuuccggguuc

SEQ ID NO: 2498479 - RNA, 19 nt, Artificial Sequence
  Description of Artificial Sequence: Synthetic oligonucleotide
ccaucaugaaaucgucuug

SEQ ID NO: 2498480 - RNA, 19 nt, Artificial Sequence
  Description of Artificial Sequence: Synthetic oligonucleotide
gccauccuccgacaacugg

SEQ ID NO: 2498481 - RNA, 19 nt, Artificial Sequence
  Description of Artificial Sequence: Synthetic oligonucleotide
ucgcaauccucugaagguu

SEQ ID NO: 2498482 - RNA, 19 nt, Artificial Sequence
  Description of Artificial Sequence: Synthetic oligonucleotide
ggcucccaucaugaaaucg

SEQ ID NO: 2498483 - RNA, 19 nt, Artificial Sequence
  Description of Artificial Sequence: Synthetic oligonucleotide
cuuuuccccgcgcgcacac

SEQ ID NO: 2498484 - RNA, 19 nt, Artificial Sequence
  Description of Artificial Sequence: Synthetic oligonucleotide
gaaccuccugcuuccuuaa

SEQ ID NO: 2498485 - RNA, 19 nt, Artificial Sequence
  Description of Artificial Sequence: Synthetic oligonucleotide
auuucggccuuggcuacca

SEQ ID NO: 2498486 - RNA, 19 nt, Artificial Sequence
  Description of Artificial Sequence: Synthetic oligonucleotide
uccccgcgcgcacacguga

SEQ ID NO: 2498487 - RNA, 19 nt, Artificial Sequence
  Description of Artificial Sequence: Synthetic oligonucleotide
gugcuugagcucgucuucc

SEQ ID NO: 2498488 - RNA, 19 nt, Artificial Sequence
  Description of Artificial Sequence: Synthetic oligonucleotide
cucgucgcaauccucugaa

SEQ ID NO: 2498489 - RNA, 19 nt, Artificial Sequence
  Description of Artificial Sequence: Synthetic oligonucleotide
uuucggccuuggcuaccag

SEQ ID NO: 2498490 - RNA, 19 nt, Artificial Sequence
  Description of Artificial Sequence: Synthetic oligonucleotide
ggaacgcuucagcuuuucc

SEQ ID NO: 2498491 - RNA, 19 nt, Artificial Sequence
  Description of Artificial Sequence: Synthetic oligonucleotide
uggaaacaguugacaucaa

SEQ ID NO: 2498492 - RNA, 19 nt, Artificial Sequence
  Description of Artificial Sequence: Synthetic oligonucleotide
uuuuccccgcgcgcacacg

SEQ ID NO: 2498493 - RNA, 19 nt, Artificial Sequence
  Description of Artificial Sequence: Synthetic oligonucleotide
ucaccgcuuccuucugaac

SEQ ID NO: 2498494 - RNA, 19 nt, Artificial Sequence
  Description of Artificial Sequence: Synthetic oligonucleotide
acugcgccauccuccgaca

SEQ ID NO: 2498495 - RNA, 19 nt, Artificial Sequence
  Description of Artificial Sequence: Synthetic oligonucleotide
agucaacauuguccucacu

SEQ ID NO: 2498496 - RNA, 19 nt, Artificial Sequence
  Description of Artificial Sequence: Synthetic oligonucleotide
gguccauuucugauucacc

SEQ ID NO: 2498497 - RNA, 19 nt, Artificial Sequence
  Description of Artificial Sequence: Synthetic oligonucleotide
gagugcuugagcucgucuu

SEQ ID NO: 2498498 - RNA, 19 nt, Artificial Sequence
  Description of Artificial Sequence: Synthetic oligonucleotide
cuucacaggagucaacauu

SEQ ID NO: 2498499 - RNA, 19 nt, Artificial Sequence
  Description of Artificial Sequence: Synthetic oligonucleotide
ggagaacacugaugaaauc

SEQ ID NO: 2498500 - RNA, 19 nt, Artificial Sequence
  Description of Artificial Sequence: Synthetic oligonucleotide
cugccucuuugucuuugac

SEQ ID NO: 2498501 - RNA, 19 nt, Artificial Sequence
  Description of Artificial Sequence: Synthetic oligonucleotide
gcacacgugaguccugaac

SEQ ID NO: 2498502 - RNA, 19 nt, Artificial Sequence
  Description of Artificial Sequence: Synthetic oligonucleotide
ugagcucgucuuccggguu

SEQ ID NO: 2498503 - RNA, 19 nt, Artificial Sequence
  Description of Artificial Sequence: Synthetic oligonucleotide
ccuuugguguuucuggaca

SEQ ID NO: 2498504 - RNA, 19 nt, Artificial Sequence
  Description of Artificial Sequence: Synthetic oligonucleotide
cccucuucuuaucaagcug

SEQ ID NO: 2498505 - RNA, 19 nt, Artificial Sequence
  Description of Artificial Sequence: Synthetic oligonucleotide
ucuggcuuugggguucgua

SEQ ID NO: 2498506 - RNA, 19 nt, Artificial Sequence
  Description of Artificial Sequence: Synthetic oligonucleotide
uuacugcuaggagucuuuu

SEQ ID NO: 2498507 - RNA, 19 nt, Artificial Sequence
  Description of Artificial Sequence: Synthetic oligonucleotide
ggaaccuccugcuuccuua

SEQ ID NO: 2498508 - RNA, 19 nt, Artificial Sequence
  Description of Artificial Sequence: Synthetic oligonucleotide
ggccuuggcuaccaguuuc

SEQ ID NO: 2498509 - RNA, 19 nt, Artificial Sequence
  Description of Artificial Sequence: Synthetic oligonucleotide
ugaaaucgucuugcagaau

SEQ ID NO: 2498510 - RNA, 19 nt, Artificial Sequence
  Description of Artificial Sequence: Synthetic oligonucleotide
cagaacuguucucauuugu

SEQ ID NO: 2498511 - RNA, 19 nt, Artificial Sequence
  Description of Artificial Sequence: Synthetic oligonucleotide
cacuuggcucugcaucuuc

SEQ ID NO: 2498512 - RNA, 19 nt, Artificial Sequence
  Description of Artificial Sequence: Synthetic oligonucleotide
auuccucggagaacacuga

SEQ ID NO: 2498513 - RNA, 19 nt, Artificial Sequence
  Description of Artificial Sequence: Synthetic oligonucleotide
cauuucggccuuggcuacc

SEQ ID NO: 2498514 - RNA, 19 nt, Artificial Sequence
  Description of Artificial Sequence: Synthetic oligonucleotide
uacuggcucccaucaugaa

SEQ ID NO: 2498515 - RNA, 19 nt, Artificial Sequence
  Description of Artificial Sequence: Synthetic oligonucleotide
ggaugguggguuuacugcu

SEQ ID NO: 2498516 - RNA, 19 nt, Artificial Sequence
  Description of Artificial Sequence: Synthetic oligonucleotide
cuuccucuucagggaacgc

SEQ ID NO: 2498517 - RNA, 19 nt, Artificial Sequence
  Description of Artificial Sequence: Synthetic oligonucleotide
uagcucgcuuccugaugga

SEQ ID NO: 2498518 - RNA, 19 nt, Artificial Sequence
  Description of Artificial Sequence: Synthetic oligonucleotide
cagccagaauuagucccag

SEQ ID NO: 2498519 - RNA, 19 nt, Artificial Sequence
  Description of Artificial Sequence: Synthetic oligonucleotide
caucuggcuucacucugca

SEQ ID NO: 2498520 - RNA, 19 nt, Artificial Sequence
  Description of Artificial Sequence: Synthetic oligonucleotide
ccuuaaccuucucaccaac

SEQ ID NO: 2498521 - RNA, 19 nt, Artificial Sequence
  Description of Artificial Sequence: Synthetic oligonucleotide
uaacugcaccacaccccuc

SEQ ID NO: 2498522 - RNA, 19 nt, Artificial Sequence
  Description of Artificial Sequence: Synthetic oligonucleotide
cucgucuuccggguucgac

SEQ ID NO: 2498523 - RNA, 19 nt, Artificial Sequence
  Description of Artificial Sequence: Synthetic oligonucleotide
ucguagcagcagaacuguu

SEQ ID NO: 2498524 - RNA, 19 nt, Artificial Sequence
  Description of Artificial Sequence: Synthetic oligonucleotide
uccagccucuccugcuuua

SEQ ID NO: 2498525 - RNA, 19 nt, Artificial Sequence
  Description of Artificial Sequence: Synthetic oligonucleotide
gacaucaacuuagcucgcu

SEQ ID NO: 2498526 - RNA, 19 nt, Artificial Sequence
  Description of Artificial Sequence: Synthetic oligonucleotide
cauggcgucugcccagcca

SEQ ID NO: 2498527 - RNA, 19 nt, Artificial Sequence
  Description of Artificial Sequence: Synthetic oligonucleotide
ggguucgacauuucggccu

SEQ ID NO: 2498528 - RNA, 19 nt, Artificial Sequence
  Description of Artificial Sequence: Synthetic oligonucleotide
gcaauccucugaagguucc

SEQ ID NO: 2498529 - RNA, 19 nt, Artificial Sequence
  Description of Artificial Sequence: Synthetic oligonucleotide
cuuaucaagcugcuuccuu

SEQ ID NO: 2498530 - RNA, 19 nt, Artificial Sequence
  Description of Artificial Sequence: Synthetic oligonucleotide
ggacagcauugaauaacug

SEQ ID NO: 2498531 - RNA, 19 nt, Artificial Sequence
  Description of Artificial Sequence: Synthetic oligonucleotide
cuugucccaguccuucaua

SEQ ID NO: 2498532 - RNA, 19 nt, Artificial Sequence
  Description of Artificial Sequence: Synthetic oligonucleotide
cuuggcucugcaucuuccu

SEQ ID NO: 2498533 - RNA, 19 nt, Artificial Sequence
  Description of Artificial Sequence: Synthetic oligonucleotide
cagggaacgcuucagcuuu

SEQ ID NO: 2498534 - RNA, 19 nt, Artificial Sequence
  Description of Artificial Sequence: Synthetic oligonucleotide
cuuccggguucgacauuuc

SEQ ID NO: 2498535 - RNA, 19 nt, Artificial Sequence
  Description of Artificial Sequence: Synthetic oligonucleotide
acccggggcccucuucuga

SEQ ID NO: 2498536 - RNA, 19 nt, Artificial Sequence
  Description of Artificial Sequence: Synthetic oligonucleotide
gcuuugggguucguagcag

SEQ ID NO: 2498537 - RNA, 19 nt, Artificial Sequence
  Description of Artificial Sequence: Synthetic oligonucleotide
cucuucuuaucaagcugcu

SEQ ID NO: 2498538 - RNA, 19 nt, Artificial Sequence
  Description of Artificial Sequence: Synthetic oligonucleotide
cacucccucuucuuaucaa

SEQ ID NO: 2498539 - RNA, 19 nt, Artificial Sequence
  Description of Artificial Sequence: Synthetic oligonucleotide
ccauuucugauucaccgcu

SEQ ID NO: 2498540 - RNA, 19 nt, Artificial Sequence
  Description of Artificial Sequence: Synthetic oligonucleotide
ccagccagaauuaguccca

SEQ ID NO: 2498541 - RNA, 19 nt, Artificial Sequence
  Description of Artificial Sequence: Synthetic oligonucleotide
uccacccggggcccucuuc

SEQ ID NO: 2498542 - RNA, 19 nt, Artificial Sequence
  Description of Artificial Sequence: Synthetic oligonucleotide
ccgacaacugguccauuuc

SEQ ID NO: 2498543 - RNA, 19 nt, Artificial Sequence
  Description of Artificial Sequence: Synthetic oligonucleotide
cugcaccacaccccucguc

SEQ ID NO: 2498544 - RNA, 19 nt, Artificial Sequence
  Description of Artificial Sequence: Synthetic oligonucleotide
gcucccaucaugaaaucgu

SEQ ID NO: 2498545 - RNA, 19 nt, Artificial Sequence
  Description of Artificial Sequence: Synthetic oligonucleotide
cauuucagucugucuggcu

SEQ ID NO: 2498546 - RNA, 19 nt, Artificial Sequence
  Description of Artificial Sequence: Synthetic oligonucleotide
cuggcuucacucugcacau

SEQ ID NO: 2498547 - RNA, 19 nt, Artificial Sequence
  Description of Artificial Sequence: Synthetic oligonucleotide
cucggagaacacugaugaa

SEQ ID NO: 2498548 - RNA, 19 nt, Artificial Sequence
  Description of Artificial Sequence: Synthetic oligonucleotide
cuuccugauggaaccuccu

SEQ ID NO: 2498549 - RNA, 19 nt, Artificial Sequence
  Description of Artificial Sequence: Synthetic oligonucleotide
cagcuuuuccccgcgcgca

SEQ ID NO: 2498550 - RNA, 19 nt, Artificial Sequence
  Description of Artificial Sequence: Synthetic oligonucleotide
cacaccccucgucgcaauc

SEQ ID NO: 2498551 - RNA, 19 nt, Artificial Sequence
  Description of Artificial Sequence: Synthetic oligonucleotide
guuuacugcuaggagucuu

SEQ ID NO: 2498552 - RNA, 19 nt, Artificial Sequence
  Description of Artificial Sequence: Synthetic oligonucleotide
accacaccccucgucgcaa

SEQ ID NO: 2498553 - RNA, 19 nt, Artificial Sequence
  Description of Artificial Sequence: Synthetic oligonucleotide
ggguucguagcagcagaac

SEQ ID NO: 2498554 - RNA, 19 nt, Artificial Sequence
  Description of Artificial Sequence: Synthetic oligonucleotide
cggguucgacauuucggcc

SEQ ID NO: 2498555 - RNA, 19 nt, Artificial Sequence
  Description of Artificial Sequence: Synthetic oligonucleotide
auggaaccuccugcuuccu

SEQ ID NO: 2498556 - RNA, 19 nt, Artificial Sequence
  Description of Artificial Sequence: Synthetic oligonucleotide
ccauccuccgacaacuggu

SEQ ID NO: 2498557 - RNA, 19 nt, Artificial Sequence
  Description of Artificial Sequence: Synthetic oligonucleotide
cccaucaugaaaucgucuu

SEQ ID NO: 2498558 - RNA, 19 nt, Artificial Sequence
  Description of Artificial Sequence: Synthetic oligonucleotide
ugacaacaucuggcuucac

SEQ ID NO: 2498559 - RNA, 19 nt, Artificial Sequence
  Description of Artificial Sequence: Synthetic oligonucleotide
cacccggggcccucuucug

SEQ ID NO: 2498560 - RNA, 19 nt, Artificial Sequence
  Description of Artificial Sequence: Synthetic oligonucleotide
cugaaccuucuccgucgga

SEQ ID NO: 2498561 - RNA, 19 nt, Artificial Sequence
  Description of Artificial Sequence: Synthetic oligonucleotide
cacugaugaaauccuucuu

SEQ ID NO: 2498562 - RNA, 19 nt, Artificial Sequence
  Description of Artificial Sequence: Synthetic oligonucleotide
gaagagugcuugagcucgu

SEQ ID NO: 2498563 - RNA, 19 nt, Artificial Sequence
  Description of Artificial Sequence: Synthetic oligonucleotide
guucgacauuucggccuug

SEQ ID NO: 2498564 - RNA, 19 nt, Artificial Sequence
  Description of Artificial Sequence: Synthetic oligonucleotide
ccucacugucagcuucuac

SEQ ID NO: 2498565 - RNA, 19 nt, Artificial Sequence
  Description of Artificial Sequence: Synthetic oligonucleotide
uggcuucacucugcacauc

SEQ ID NO: 2498566 - RNA, 19 nt, Artificial Sequence
  Description of Artificial Sequence: Synthetic oligonucleotide
cuguucucauuuguacuau

SEQ ID NO: 2498567 - RNA, 19 nt, Artificial Sequence
  Description of Artificial Sequence: Synthetic oligonucleotide
gucugcccagccagaauua

SEQ ID NO: 2498568 - RNA, 19 nt, Artificial Sequence
  Description of Artificial Sequence: Synthetic oligonucleotide
cgucggaagagugcuugag

SEQ ID NO: 2498569 - RNA, 19 nt, Artificial Sequence
  Description of Artificial Sequence: Synthetic oligonucleotide
cgacauuucggccuuggcu

SEQ ID NO: 2498570 - RNA, 19 nt, Artificial Sequence
  Description of Artificial Sequence: Synthetic oligonucleotide
gccuuggcuaccaguuuca

SEQ ID NO: 2498571 - RNA, 19 nt, Artificial Sequence
  Description of Artificial Sequence: Synthetic oligonucleotide
gguucgacauuucggccuu

SEQ ID NO: 2498572 - RNA, 19 nt, Artificial Sequence
  Description of Artificial Sequence: Synthetic oligonucleotide
cccggggcccucuucugac

SEQ ID NO: 2498573 - RNA, 19 nt, Artificial Sequence
  Description of Artificial Sequence: Synthetic oligonucleotide
cggagaacacugaugaaau

SEQ ID NO: 2498574 - RNA, 19 nt, Artificial Sequence
  Description of Artificial Sequence: Synthetic oligonucleotide
cagcuucuacugcgccauc

SEQ ID NO: 2498575 - RNA, 19 nt, Artificial Sequence
  Description of Artificial Sequence: Synthetic oligonucleotide
cccucgucgcaauccucug

SEQ ID NO: 2498576 - RNA, 19 nt, Artificial Sequence
  Description of Artificial Sequence: Synthetic oligonucleotide
gcagcagaacuguucucau

SEQ ID NO: 2498577 - RNA, 19 nt, Artificial Sequence
  Description of Artificial Sequence: Synthetic oligonucleotide
gggaacgcuucagcuuuuc

SEQ ID NO: 2498578 - RNA, 19 nt, Artificial Sequence
  Description of Artificial Sequence: Synthetic oligonucleotide
aucuuccacccggggcccu

SEQ ID NO: 2498579 - RNA, 19 nt, Artificial Sequence
  Description of Artificial Sequence: Synthetic oligonucleotide
ggggcccucuucugacuuc

SEQ ID NO: 2498580 - RNA, 19 nt, Artificial Sequence
  Description of Artificial Sequence: Synthetic oligonucleotide
gcgccauccuccgacaacu

SEQ ID NO: 2498581 - RNA, 19 nt, Artificial Sequence
  Description of Artificial Sequence: Synthetic oligonucleotide
cuacugcgccauccuccga

SEQ ID NO: 2498582 - RNA, 19 nt, Artificial Sequence
  Description of Artificial Sequence: Synthetic oligonucleotide
uuccacccggggcccucuu

SEQ ID NO: 2498583 - RNA, 19 nt, Artificial Sequence
  Description of Artificial Sequence: Synthetic oligonucleotide
gggguucguagcagcagaa

SEQ ID NO: 2498584 - RNA, 19 nt, Artificial Sequence
  Description of Artificial Sequence: Synthetic oligonucleotide
cugcgccauccuccgacaa

SEQ ID NO: 2498585 - RNA, 19 nt, Artificial Sequence
  Description of Artificial Sequence: Synthetic oligonucleotide
cgcgcgcacacgugagucc

SEQ ID NO: 2498586 - RNA, 19 nt, Artificial Sequence
  Description of Artificial Sequence: Synthetic oligonucleotide
caccccucgucgcaauccu

SEQ ID NO: 2498587 - RNA, 19 nt, Artificial Sequence
  Description of Artificial Sequence: Synthetic oligonucleotide
ccucgucgcaauccucuga

SEQ ID NO: 2498588 - RNA, 19 nt, Artificial Sequence
  Description of Artificial Sequence: Synthetic oligonucleotide
agguuccucucugccucuu

SEQ ID NO: 2498589 - RNA, 19 nt, Artificial Sequence
  Description of Artificial Sequence: Synthetic oligonucleotide
gguuuacugcuaggagucu

SEQ ID NO: 2498590 - RNA, 19 nt, Artificial Sequence
  Description of Artificial Sequence: Synthetic oligonucleotide
ggcuaccaguuucaucuuu

SEQ ID NO: 2498591 - RNA, 19 nt, Artificial Sequence
  Description of Artificial Sequence: Synthetic oligonucleotide
gcuuuuccccgcgcgcaca

SEQ ID NO: 2498592 - RNA, 19 nt, Artificial Sequence
  Description of Artificial Sequence: Synthetic oligonucleotide
agggaacgcuucagcuuuu

SEQ ID NO: 2498593 - RNA, 19 nt, Artificial Sequence
  Description of Artificial Sequence: Synthetic oligonucleotide
gcgcacacgugaguccuga

SEQ ID NO: 2498594 - RNA, 19 nt, Artificial Sequence
  Description of Artificial Sequence: Synthetic oligonucleotide
ccccgcgcgcacacgugag

SEQ ID NO: 2498595 - RNA, 19 nt, Artificial Sequence
  Description of Artificial Sequence: Synthetic oligonucleotide
ccccucgucgcaauccucu

SEQ ID NO: 2498596 - RNA, 19 nt, Artificial Sequence
  Description of Artificial Sequence: Synthetic oligonucleotide
ggcgucugcccagccagaa

SEQ ID NO: 2498597 - RNA, 19 nt, Artificial Sequence
  Description of Artificial Sequence: Synthetic oligonucleotide
ccgcgcgcacacgugaguc

SEQ ID NO: 2498598 - RNA, 19 nt, Artificial Sequence
  Description of Artificial Sequence: Synthetic oligonucleotide
ccgucggaagagugcuuga

SEQ ID NO: 2498599 - RNA, 19 nt, Artificial Sequence
  Description of Artificial Sequence: Synthetic oligonucleotide
gguuccucucugccucuuu

SEQ ID NO: 2498600 - RNA, 19 nt, Artificial Sequence
  Description of Artificial Sequence: Synthetic oligonucleotide
gcgcgcacacgugaguccu

SEQ ID NO: 2498601 - RNA, 19 nt, Artificial Sequence
  Description of Artificial Sequence: Synthetic oligonucleotide
gcccucuucugacuucauu

SEQ ID NO: 2498602 - RNA, 19 nt, Artificial Sequence
  Description of Artificial Sequence: Synthetic oligonucleotide
cgucuuccggguucgacau

SEQ ID NO: 2498603 - RNA, 19 nt, Artificial Sequence
  Description of Artificial Sequence: Synthetic oligonucleotide
gucuuccggguucgacauu

SEQ ID NO: 2498604 - RNA, 19 nt, Artificial Sequence
  Description of Artificial Sequence: Synthetic oligonucleotide
cuccgucggaagagugcuu

SEQ ID NO: 2498605 - RNA, 19 nt, Artificial Sequence
  Description of Artificial Sequence: Synthetic oligonucleotide
cgcgcacacgugaguccug

SEQ ID NO: 2498606 - RNA, 19 nt, Artificial Sequence
  Description of Artificial Sequence: Synthetic oligonucleotide
cuuccacccggggcccucu

SEQ ID NO: 2498607 - RNA, 19 nt, Artificial Sequence
  Description of Artificial Sequence: Synthetic oligonucleotide
ccuucuccgucggaagagu

SEQ ID NO: 2498608 - RNA, 19 nt, Artificial Sequence
  Description of Artificial Sequence: Synthetic oligonucleotide
gcgucugcccagccagaau

SEQ ID NO: 2498609 - RNA, 19 nt, Artificial Sequence
  Description of Artificial Sequence: Synthetic oligonucleotide
ccuccgacaacugguccau

SEQ ID NO: 2498610 - RNA, 19 nt, Artificial Sequence
  Description of Artificial Sequence: Synthetic oligonucleotide
gcucgucuuccggguucga

SEQ ID NO: 2498611 - RNA, 19 nt, Artificial Sequence
  Description of Artificial Sequence: Synthetic oligonucleotide
ccuuggcuaccaguuucau

SEQ ID NO: 2498612 - RNA, 19 nt, Artificial Sequence
  Description of Artificial Sequence: Synthetic oligonucleotide
cgcacacgugaguccugaa

SEQ ID NO: 2498613 - RNA, 19 nt, Artificial Sequence
  Description of Artificial Sequence: Synthetic oligonucleotide
gucuggcuuugggguucgu

SEQ ID NO: 2498614 - RNA, 19 nt, Artificial Sequence
  Description of Artificial Sequence: Synthetic oligonucleotide
ccggggcccucuucugacu

SEQ ID NO: 2498615 - RNA, 19 nt, Artificial Sequence
  Description of Artificial Sequence: Synthetic oligonucleotide
cuccgacaacugguccauu

SEQ ID NO: 2498616 - RNA, 19 nt, Artificial Sequence
  Description of Artificial Sequence: Synthetic oligonucleotide
cccgcgcgcacacgugagu

SEQ ID NO: 2498617 - RNA, 19 nt, Artificial Sequence
  Description of Artificial Sequence: Synthetic oligonucleotide
ggcccucuucugacuucau

SEQ ID NO: 2498618 - RNA, 19 nt, Artificial Sequence
  Description of Artificial Sequence: Synthetic oligonucleotide
cggggcccucuucugacuu

SEQ ID NO: 2498619 - RNA, 19 nt, Artificial Sequence
  Description of Artificial Sequence: Synthetic oligonucleotide
cggccuuggcuaccaguuu

SEQ ID NO: 2498620 - RNA, 19 nt, Artificial Sequence
  Description of Artificial Sequence: Synthetic oligonucleotide
uuaaauuaugcacacacag

SEQ ID NO: 2498621 - RNA, 19 nt, Artificial Sequence
  Description of Artificial Sequence: Synthetic oligonucleotide
aauaguaagcuuuucuuuc

SEQ ID NO: 2498622 - RNA, 19 nt, Artificial Sequence
  Description of Artificial Sequence: Synthetic oligonucleotide
acuauuauaaucuccagag

SEQ ID NO: 2498623 - RNA, 19 nt, Artificial Sequence
  Description of Artificial Sequence: Synthetic oligonucleotide
aaauuaugcacacacagcu

SEQ ID NO: 2498624 - RNA, 19 nt, Artificial Sequence
  Description of Artificial Sequence: Synthetic oligonucleotide
aagguugagagucuuuucc

SEQ ID NO: 2498625 - RNA, 19 nt, Artificial Sequence
  Description of Artificial Sequence: Synthetic oligonucleotide
agaaagaagccuuaacugc

SEQ ID NO: 2498626 - RNA, 19 nt, Artificial Sequence
  Description of Artificial Sequence: Synthetic oligonucleotide
uauuauaaucuccagaggu

SEQ ID NO: 2498627 - RNA, 19 nt, Artificial Sequence
  Description of Artificial Sequence: Synthetic oligonucleotide
aaguaguacucauacaagg

SEQ ID NO: 2498628 - RNA, 19 nt, Artificial Sequence
  Description of Artificial Sequence: Synthetic oligonucleotide
ugauuauuugaaaaugagg

SEQ ID NO: 2498629 - RNA, 19 nt, Artificial Sequence
  Description of Artificial Sequence: Synthetic oligonucleotide
aauuauaucucuaauuuug

SEQ ID NO: 2498630 - RNA, 19 nt, Artificial Sequence
  Description of Artificial Sequence: Synthetic oligonucleotide
auuuguauagcuuagacua

SEQ ID NO: 2498631 - RNA, 19 nt, Artificial Sequence
  Description of Artificial Sequence: Synthetic oligonucleotide
gauuauuugaaaaugagga

SEQ ID NO: 2498632 - RNA, 19 nt, Artificial Sequence
  Description of Artificial Sequence: Synthetic oligonucleotide
uucuuaauaaauuuaacua

SEQ ID NO: 2498633 - RNA, 19 nt, Artificial Sequence
  Description of Artificial Sequence: Synthetic oligonucleotide
uauaucucuaauuuuguca

SEQ ID NO: 2498634 - RNA, 19 nt, Artificial Sequence
  Description of Artificial Sequence: Synthetic oligonucleotide
ucagaaagaagccuuaacu

SEQ ID NO: 2498635 - RNA, 19 nt, Artificial Sequence
  Description of Artificial Sequence: Synthetic oligonucleotide
aaaaugucaaccaugcaag

SEQ ID NO: 2498636 - RNA, 19 nt, Artificial Sequence
  Description of Artificial Sequence: Synthetic oligonucleotide
uaacauaaagguaauggca

SEQ ID NO: 2498637 - RNA, 19 nt, Artificial Sequence
  Description of Artificial Sequence: Synthetic oligonucleotide
agguacaagagccagaaag

SEQ ID NO: 2498638 - RNA, 19 nt, Artificial Sequence
  Description of Artificial Sequence: Synthetic oligonucleotide
cuauauuucauaaacccug

SEQ ID NO: 2498639 - RNA, 19 nt, Artificial Sequence
  Description of Artificial Sequence: Synthetic oligonucleotide
uaugauuauuugaaaauga

SEQ ID NO: 2498640 - RNA, 19 nt, Artificial Sequence
  Description of Artificial Sequence: Synthetic oligonucleotide
ugauuguucgcuuuuaaug

SEQ ID NO: 2498641 - RNA, 19 nt, Artificial Sequence
  Description of Artificial Sequence: Synthetic oligonucleotide
uuagauaaccugcuaauga

SEQ ID NO: 2498642 - RNA, 19 nt, Artificial Sequence
  Description of Artificial Sequence: Synthetic oligonucleotide
aauuuguuauuuguauagc

SEQ ID NO: 2498643 - RNA, 19 nt, Artificial Sequence
  Description of Artificial Sequence: Synthetic oligonucleotide
acugauaaggccuuuaagu

SEQ ID NO: 2498644 - RNA, 19 nt, Artificial Sequence
  Description of Artificial Sequence: Synthetic oligonucleotide
aaagcauaaaguaacauaa

SEQ ID NO: 2498645 - RNA, 19 nt, Artificial Sequence
  Description of Artificial Sequence: Synthetic oligonucleotide
ucuuaauaaauuuaacuau

SEQ ID NO: 2498646 - RNA, 19 nt, Artificial Sequence
  Description of Artificial Sequence: Synthetic oligonucleotide
uuugucaccaauuagugau

SEQ ID NO: 2498647 - RNA, 19 nt, Artificial Sequence
  Description of Artificial Sequence: Synthetic oligonucleotide
ugaggauucaacaacaaua

SEQ ID NO: 2498648 - RNA, 19 nt, Artificial Sequence
  Description of Artificial Sequence: Synthetic oligonucleotide
uuaaguaagaguugcauau

SEQ ID NO: 2498649 - RNA, 19 nt, Artificial Sequence
  Description of Artificial Sequence: Synthetic oligonucleotide
aauuuugucaccaauuagu

SEQ ID NO: 2498650 - RNA, 19 nt, Artificial Sequence
  Description of Artificial Sequence: Synthetic oligonucleotide
uagacuacugauaaggccu

SEQ ID NO: 2498651 - RNA, 19 nt, Artificial Sequence
  Description of Artificial Sequence: Synthetic oligonucleotide
auaguaagcuuuucuuucc

SEQ ID NO: 2498652 - RNA, 19 nt, Artificial Sequence
  Description of Artificial Sequence: Synthetic oligonucleotide
auauugucaccauuaauag

SEQ ID NO: 2498653 - RNA, 19 nt, Artificial Sequence
  Description of Artificial Sequence: Synthetic oligonucleotide
uaauguguagccuacuccc

SEQ ID NO: 2498654 - RNA, 19 nt, Artificial Sequence
  Description of Artificial Sequence: Synthetic oligonucleotide
auuaauaguaagcuuuucu

SEQ ID NO: 2498655 - RNA, 19 nt, Artificial Sequence
  Description of Artificial Sequence: Synthetic oligonucleotide
uugaaaaugaggauucaac

SEQ ID NO: 2498656 - RNA, 19 nt, Artificial Sequence
  Description of Artificial Sequence: Synthetic oligonucleotide
uaaauuaugcacacacagc

SEQ ID NO: 2498657 - RNA, 19 nt, Artificial Sequence
  Description of Artificial Sequence: Synthetic oligonucleotide
auuuuacuuugucagcggc

SEQ ID NO: 2498658 - RNA, 19 nt, Artificial Sequence
  Description of Artificial Sequence: Synthetic oligonucleotide
aguuauucaacaaaauguc

SEQ ID NO: 2498659 - RNA, 19 nt, Artificial Sequence
  Description of Artificial Sequence: Synthetic oligonucleotide
auaaauuuguuauuuguau

SEQ ID NO: 2498660 - RNA, 19 nt, Artificial Sequence
  Description of Artificial Sequence: Synthetic oligonucleotide
auucaauaaaucgugguuc

SEQ ID NO: 2498661 - RNA, 19 nt, Artificial Sequence
  Description of Artificial Sequence: Synthetic oligonucleotide
uuggcuucgcauuuggugg

SEQ ID NO: 2498662 - RNA, 19 nt, Artificial Sequence
  Description of Artificial Sequence: Synthetic oligonucleotide
uuauuuguauagcuuagac

SEQ ID NO: 2498663 - RNA, 19 nt, Artificial Sequence
  Description of Artificial Sequence: Synthetic oligonucleotide
uuaauguguagccuacucc

SEQ ID NO: 2498664 - RNA, 19 nt, Artificial Sequence
  Description of Artificial Sequence: Synthetic oligonucleotide
guaacauaaagguaauggc

SEQ ID NO: 2498665 - RNA, 19 nt, Artificial Sequence
  Description of Artificial Sequence: Synthetic oligonucleotide
aguacucauacaaggaucc

SEQ ID NO: 2498666 - RNA, 19 nt, Artificial Sequence
  Description of Artificial Sequence: Synthetic oligonucleotide
aauaaucagaaagaagccu

SEQ ID NO: 2498667 - RNA, 19 nt, Artificial Sequence
  Description of Artificial Sequence: Synthetic oligonucleotide
uaauuuugucaccaauuag

SEQ ID NO: 2498668 - RNA, 19 nt, Artificial Sequence
  Description of Artificial Sequence: Synthetic oligonucleotide
ugcacagauaguuugguca

SEQ ID NO: 2498669 - RNA, 19 nt, Artificial Sequence
  Description of Artificial Sequence: Synthetic oligonucleotide
uguuauuuguauagcuuag

SEQ ID NO: 2498670 - RNA, 19 nt, Artificial Sequence
  Description of Artificial Sequence: Synthetic oligonucleotide
gguucuaguccuuacaugg

SEQ ID NO: 2498671 - RNA, 19 nt, Artificial Sequence
  Description of Artificial Sequence: Synthetic oligonucleotide
auuagugauuuccuuuugg

SEQ ID NO: 2498672 - RNA, 19 nt, Artificial Sequence
  Description of Artificial Sequence: Synthetic oligonucleotide
cauaaaguaacauaaaggu

SEQ ID NO: 2498673 - RNA, 19 nt, Artificial Sequence
  Description of Artificial Sequence: Synthetic oligonucleotide
uaguucuccaugaagguug

SEQ ID NO: 2498674 - RNA, 19 nt, Artificial Sequence
  Description of Artificial Sequence: Synthetic oligonucleotide
augucaaccaugcaaguag

SEQ ID NO: 2498675 - RNA, 19 nt, Artificial Sequence
  Description of Artificial Sequence: Synthetic oligonucleotide
uuagacuacugauaaggcc

SEQ ID NO: 2498676 - RNA, 19 nt, Artificial Sequence
  Description of Artificial Sequence: Synthetic oligonucleotide
uuuaaauuaugcacacaca

SEQ ID NO: 2498677 - RNA, 19 nt, Artificial Sequence
  Description of Artificial Sequence: Synthetic oligonucleotide
agaucacugcauuaaacuc

SEQ ID NO: 2498678 - RNA, 19 nt, Artificial Sequence
  Description of Artificial Sequence: Synthetic oligonucleotide
aauaaaucgugguucuagu

SEQ ID NO: 2498679 - RNA, 19 nt, Artificial Sequence
  Description of Artificial Sequence: Synthetic oligonucleotide
uucauaaacccugagauau

SEQ ID NO: 2498680 - RNA, 19 nt, Artificial Sequence
  Description of Artificial Sequence: Synthetic oligonucleotide
uuaaauggcagauuggcuu

SEQ ID NO: 2498681 - RNA, 19 nt, Artificial Sequence
  Description of Artificial Sequence: Synthetic oligonucleotide
guauuuuacuuugucagcg

SEQ ID NO: 2498682 - RNA, 19 nt, Artificial Sequence
  Description of Artificial Sequence: Synthetic oligonucleotide
acauaaguauuuuaaauua

SEQ ID NO: 2498683 - RNA, 19 nt, Artificial Sequence
  Description of Artificial Sequence: Synthetic oligonucleotide
uauuuguauagcuuagacu

SEQ ID NO: 2498684 - RNA, 19 nt, Artificial Sequence
  Description of Artificial Sequence: Synthetic oligonucleotide
uuaauaguaagcuuuucuu

SEQ ID NO: 2498685 - RNA, 19 nt, Artificial Sequence
  Description of Artificial Sequence: Synthetic oligonucleotide
auuuguuauuuguauagcu

SEQ ID NO: 2498686 - RNA, 19 nt, Artificial Sequence
  Description of Artificial Sequence: Synthetic oligonucleotide
uuuaucaccgauuuucuua

SEQ ID NO: 2498687 - RNA, 19 nt, Artificial Sequence
  Description of Artificial Sequence: Synthetic oligonucleotide
aaaucgugguucuaguccu

SEQ ID NO: 2498688 - RNA, 19 nt, Artificial Sequence
  Description of Artificial Sequence: Synthetic oligonucleotide
caauaaucagaaagaagcc

SEQ ID NO: 2498689 - RNA, 19 nt, Artificial Sequence
  Description of Artificial Sequence: Synthetic oligonucleotide
uuuugguuaguucuccaug

SEQ ID NO: 2498690 - RNA, 19 nt, Artificial Sequence
  Description of Artificial Sequence: Synthetic oligonucleotide
gauaaggccuuuaaguaag

SEQ ID NO: 2498691 - RNA, 19 nt, Artificial Sequence
  Description of Artificial Sequence: Synthetic oligonucleotide
ucuaauuuugucaccaauu

SEQ ID NO: 2498692 - RNA, 19 nt, Artificial Sequence
  Description of Artificial Sequence: Synthetic oligonucleotide
auuaugcacacacagcugu

SEQ ID NO: 2498693 - RNA, 19 nt, Artificial Sequence
  Description of Artificial Sequence: Synthetic oligonucleotide
ucaccaauuagugauuucc

SEQ ID NO: 2498694 - RNA, 19 nt, Artificial Sequence
  Description of Artificial Sequence: Synthetic oligonucleotide
uuugguuaguucuccauga

SEQ ID NO: 2498695 - RNA, 19 nt, Artificial Sequence
  Description of Artificial Sequence: Synthetic oligonucleotide
aguaagcuuuucuuucccc

SEQ ID NO: 2498696 - RNA, 19 nt, Artificial Sequence
  Description of Artificial Sequence: Synthetic oligonucleotide
uauuuuacuuugucagcgg

SEQ ID NO: 2498697 - RNA, 19 nt, Artificial Sequence
  Description of Artificial Sequence: Synthetic oligonucleotide
uauagcuuagacuacugau

SEQ ID NO: 2498698 - RNA, 19 nt, Artificial Sequence
  Description of Artificial Sequence: Synthetic oligonucleotide
uauucaacaaaaugucaac

SEQ ID NO: 2498699 - RNA, 19 nt, Artificial Sequence
  Description of Artificial Sequence: Synthetic oligonucleotide
cagaaagaagccuuaacug

SEQ ID NO: 2498700 - RNA, 19 nt, Artificial Sequence
  Description of Artificial Sequence: Synthetic oligonucleotide
uucgcuuuuaauguguagc

SEQ ID NO: 2498701 - RNA, 19 nt, Artificial Sequence
  Description of Artificial Sequence: Synthetic oligonucleotide
uuauuugaaaaugaggauu

SEQ ID NO: 2498702 - RNA, 19 nt, Artificial Sequence
  Description of Artificial Sequence: Synthetic oligonucleotide
uaaacccugagauauuaga

SEQ ID NO: 2498703 - RNA, 19 nt, Artificial Sequence
  Description of Artificial Sequence: Synthetic oligonucleotide
uuuguuauuuguauagcuu

SEQ ID NO: 2498704 - RNA, 19 nt, Artificial Sequence
  Description of Artificial Sequence: Synthetic oligonucleotide
gaaaaugaggauucaacaa

SEQ ID NO: 2498705 - RNA, 19 nt, Artificial Sequence
  Description of Artificial Sequence: Synthetic oligonucleotide
auuggcuucgcauuuggug

SEQ ID NO: 2498706 - RNA, 19 nt, Artificial Sequence
  Description of Artificial Sequence: Synthetic oligonucleotide
aguugcauauuuuauguau

SEQ ID NO: 2498707 - RNA, 19 nt, Artificial Sequence
  Description of Artificial Sequence: Synthetic oligonucleotide
uuuaauguguagccuacuc

SEQ ID NO: 2498708 - RNA, 19 nt, Artificial Sequence
  Description of Artificial Sequence: Synthetic oligonucleotide
auauuagauaaccugcuaa

SEQ ID NO: 2498709 - RNA, 19 nt, Artificial Sequence
  Description of Artificial Sequence: Synthetic oligonucleotide
ucaccauuaauaguaagcu

SEQ ID NO: 2498710 - RNA, 19 nt, Artificial Sequence
  Description of Artificial Sequence: Synthetic oligonucleotide
ucaacaaaaugucaaccau

SEQ ID NO: 2498711 - RNA, 19 nt, Artificial Sequence
  Description of Artificial Sequence: Synthetic oligonucleotide
uauuagauaaccugcuaau

SEQ ID NO: 2498712 - RNA, 19 nt, Artificial Sequence
  Description of Artificial Sequence: Synthetic oligonucleotide
uuuaaguaagaguugcaua

SEQ ID NO: 2498713 - RNA, 19 nt, Artificial Sequence
  Description of Artificial Sequence: Synthetic oligonucleotide
uuaauauugucaccauuaa

SEQ ID NO: 2498714 - RNA, 19 nt, Artificial Sequence
  Description of Artificial Sequence: Synthetic oligonucleotide
gguuaguucuccaugaagg

SEQ ID NO: 2498715 - RNA, 19 nt, Artificial Sequence
  Description of Artificial Sequence: Synthetic oligonucleotide
auuauuugaaaaugaggau

SEQ ID NO: 2498716 - RNA, 19 nt, Artificial Sequence
  Description of Artificial Sequence: Synthetic oligonucleotide
cuuaauauugucaccauua

SEQ ID NO: 2498717 - RNA, 19 nt, Artificial Sequence
  Description of Artificial Sequence: Synthetic oligonucleotide
aauuagugauuuccuuuug

SEQ ID NO: 2498718 - RNA, 19 nt, Artificial Sequence
  Description of Artificial Sequence: Synthetic oligonucleotide
auaaguauuuuaaauuaug

SEQ ID NO: 2498719 - RNA, 19 nt, Artificial Sequence
  Description of Artificial Sequence: Synthetic oligonucleotide
ucagcggcaaaccuuaaaa

SEQ ID NO: 2498720 - RNA, 19 nt, Artificial Sequence
  Description of Artificial Sequence: Synthetic oligonucleotide
uucaauaaaucgugguucu

SEQ ID NO: 2498721 - RNA, 19 nt, Artificial Sequence
  Description of Artificial Sequence: Synthetic oligonucleotide
guaugauuauuugaaaaug

SEQ ID NO: 2498722 - RNA, 19 nt, Artificial Sequence
  Description of Artificial Sequence: Synthetic oligonucleotide
aguggugacauguaaaauu

SEQ ID NO: 2498723 - RNA, 19 nt, Artificial Sequence
  Description of Artificial Sequence: Synthetic oligonucleotide
uuauaaucuccagagguac

SEQ ID NO: 2498724 - RNA, 19 nt, Artificial Sequence
  Description of Artificial Sequence: Synthetic oligonucleotide
cuuagacuacugauaaggc

SEQ ID NO: 2498725 - RNA, 19 nt, Artificial Sequence
  Description of Artificial Sequence: Synthetic oligonucleotide
uccaugaagguugagaguc

SEQ ID NO: 2498726 - RNA, 19 nt, Artificial Sequence
  Description of Artificial Sequence: Synthetic oligonucleotide
aaaugaggauucaacaaca

SEQ ID NO: 2498727 - RNA, 19 nt, Artificial Sequence
  Description of Artificial Sequence: Synthetic oligonucleotide
uagcuuagacuacugauaa

SEQ ID NO: 2498728 - RNA, 19 nt, Artificial Sequence
  Description of Artificial Sequence: Synthetic oligonucleotide
uacugauaaggccuuuaag

SEQ ID NO: 2498729 - RNA, 19 nt, Artificial Sequence
  Description of Artificial Sequence: Synthetic oligonucleotide
uuuuacuuugucagcggca

SEQ ID NO: 2498730 - RNA, 19 nt, Artificial Sequence
  Description of Artificial Sequence: Synthetic oligonucleotide
ucgcuuuuaauguguagcc

SEQ ID NO: 2498731 - RNA, 19 nt, Artificial Sequence
  Description of Artificial Sequence: Synthetic oligonucleotide
uaagaguugcauauuuuau

SEQ ID NO: 2498732 - RNA, 19 nt, Artificial Sequence
  Description of Artificial Sequence: Synthetic oligonucleotide
cuauuauaaucuccagagg

SEQ ID NO: 2498733 - RNA, 19 nt, Artificial Sequence
  Description of Artificial Sequence: Synthetic oligonucleotide
aguuuggucacuauuauaa

SEQ ID NO: 2498734 - RNA, 19 nt, Artificial Sequence
  Description of Artificial Sequence: Synthetic oligonucleotide
ucaccgauuuucuuaauaa

SEQ ID NO: 2498735 - RNA, 19 nt, Artificial Sequence
  Description of Artificial Sequence: Synthetic oligonucleotide
aaguaagaguugcauauuu

SEQ ID NO: 2498736 - RNA, 19 nt, Artificial Sequence
  Description of Artificial Sequence: Synthetic oligonucleotide
ugguuaguucuccaugaag

SEQ ID NO: 2498737 - RNA, 19 nt, Artificial Sequence
  Description of Artificial Sequence: Synthetic oligonucleotide
ugauaaggccuuuaaguaa

SEQ ID NO: 2498738 - RNA, 19 nt, Artificial Sequence
  Description of Artificial Sequence: Synthetic oligonucleotide
augauuauuugaaaaugag

SEQ ID NO: 2498739 - RNA, 19 nt, Artificial Sequence
  Description of Artificial Sequence: Synthetic oligonucleotide
aaccaugcaaguaguacuc

SEQ ID NO: 2498740 - RNA, 19 nt, Artificial Sequence
  Description of Artificial Sequence: Synthetic oligonucleotide
gacauguaaaauucauuuc

SEQ ID NO: 2498741 - RNA, 19 nt, Artificial Sequence
  Description of Artificial Sequence: Synthetic oligonucleotide
gccuuaacugcacagauag

SEQ ID NO: 2498742 - RNA, 19 nt, Artificial Sequence
  Description of Artificial Sequence: Synthetic oligonucleotide
uuaucaccgauuuucuuaa

SEQ ID NO: 2498743 - RNA, 19 nt, Artificial Sequence
  Description of Artificial Sequence: Synthetic oligonucleotide
aaagaagccuuaacugcac

SEQ ID NO: 2498744 - RNA, 19 nt, Artificial Sequence
  Description of Artificial Sequence: Synthetic oligonucleotide
gauuguucgcuuuuaaugu

SEQ ID NO: 2498745 - RNA, 19 nt, Artificial Sequence
  Description of Artificial Sequence: Synthetic oligonucleotide
cuaguccuuacauggauug

SEQ ID NO: 2498746 - RNA, 19 nt, Artificial Sequence
  Description of Artificial Sequence: Synthetic oligonucleotide
uaguacucauacaaggauc

SEQ ID NO: 2498747 - RNA, 19 nt, Artificial Sequence
  Description of Artificial Sequence: Synthetic oligonucleotide
uguauagcuuagacuacug

SEQ ID NO: 2498748 - RNA, 19 nt, Artificial Sequence
  Description of Artificial Sequence: Synthetic oligonucleotide
accugcuaaugauuguucg

SEQ ID NO: 2498749 - RNA, 19 nt, Artificial Sequence
  Description of Artificial Sequence: Synthetic oligonucleotide
agguaugauuauuugaaaa

SEQ ID NO: 2498750 - RNA, 19 nt, Artificial Sequence
  Description of Artificial Sequence: Synthetic oligonucleotide
caaguaguacucauacaag

SEQ ID NO: 2498751 - RNA, 19 nt, Artificial Sequence
  Description of Artificial Sequence: Synthetic oligonucleotide
uagauaaccugcuaaugau

SEQ ID NO: 2498752 - RNA, 19 nt, Artificial Sequence
  Description of Artificial Sequence: Synthetic oligonucleotide
gucaccauuaauaguaagc

SEQ ID NO: 2498753 - RNA, 19 nt, Artificial Sequence
  Description of Artificial Sequence: Synthetic oligonucleotide
cuuuuaauguguagccuac

SEQ ID NO: 2498754 - RNA, 19 nt, Artificial Sequence
  Description of Artificial Sequence: Synthetic oligonucleotide
acauaaagguaauggcaag

SEQ ID NO: 2498755 - RNA, 19 nt, Artificial Sequence
  Description of Artificial Sequence: Synthetic oligonucleotide
caauaaaucgugguucuag

SEQ ID NO: 2498756 - RNA, 19 nt, Artificial Sequence
  Description of Artificial Sequence: Synthetic oligonucleotide
uuauaucucuaauuuuguc

SEQ ID NO: 2498757 - RNA, 19 nt, Artificial Sequence
  Description of Artificial Sequence: Synthetic oligonucleotide
aguccuuacauggauuggg

SEQ ID NO: 2498758 - RNA, 19 nt, Artificial Sequence
  Description of Artificial Sequence: Synthetic oligonucleotide
gugauuuccuuuugguuag

SEQ ID NO: 2498759 - RNA, 19 nt, Artificial Sequence
  Description of Artificial Sequence: Synthetic oligonucleotide
uuuguauagcuuagacuac

SEQ ID NO: 2498760 - RNA, 19 nt, Artificial Sequence
  Description of Artificial Sequence: Synthetic oligonucleotide
agaagccuuaacugcacag

SEQ ID NO: 2498761 - RNA, 19 nt, Artificial Sequence
  Description of Artificial Sequence: Synthetic oligonucleotide
ugugacuaacacaaugaua

SEQ ID NO: 2498762 - RNA, 19 nt, Artificial Sequence
  Description of Artificial Sequence: Synthetic oligonucleotide
aacccugagauauuagaua

SEQ ID NO: 2498763 - RNA, 19 nt, Artificial Sequence
  Description of Artificial Sequence: Synthetic oligonucleotide
aaaugucaaccaugcaagu

SEQ ID NO: 2498764 - RNA, 19 nt, Artificial Sequence
  Description of Artificial Sequence: Synthetic oligonucleotide
ggauucaacaacaauaauc

SEQ ID NO: 2498765 - RNA, 19 nt, Artificial Sequence
  Description of Artificial Sequence: Synthetic oligonucleotide
gauaguuuggucacuauua

SEQ ID NO: 2498766 - RNA, 19 nt, Artificial Sequence
  Description of Artificial Sequence: Synthetic oligonucleotide
gugacuaacacaaugauau

SEQ ID NO: 2498767 - RNA, 19 nt, Artificial Sequence
  Description of Artificial Sequence: Synthetic oligonucleotide
auuguucgcuuuuaaugug

SEQ ID NO: 2498768 - RNA, 19 nt, Artificial Sequence
  Description of Artificial Sequence: Synthetic oligonucleotide
uauaaucuccagagguaca

SEQ ID NO: 2498769 - RNA, 19 nt, Artificial Sequence
  Description of Artificial Sequence: Synthetic oligonucleotide
cuuacauggauugggugcc

SEQ ID NO: 2498770 - RNA, 19 nt, Artificial Sequence
  Description of Artificial Sequence: Synthetic oligonucleotide
auuuugucaccaauuagug

SEQ ID NO: 2498771 - RNA, 19 nt, Artificial Sequence
  Description of Artificial Sequence: Synthetic oligonucleotide
uauugucaccauuaauagu

SEQ ID NO: 2498772 - RNA, 19 nt, Artificial Sequence
  Description of Artificial Sequence: Synthetic oligonucleotide
acucccuucaguccuaacu

SEQ ID NO: 2498773 - RNA, 19 nt, Artificial Sequence
  Description of Artificial Sequence: Synthetic oligonucleotide
uaguaagcuuuucuuuccc

SEQ ID NO: 2498774 - RNA, 19 nt, Artificial Sequence
  Description of Artificial Sequence: Synthetic oligonucleotide
auggcaaggaauuucugau

SEQ ID NO: 2498775 - RNA, 19 nt, Artificial Sequence
  Description of Artificial Sequence: Synthetic oligonucleotide
gucacuauuauaaucucca

SEQ ID NO: 2498776 - RNA, 19 nt, Artificial Sequence
  Description of Artificial Sequence: Synthetic oligonucleotide
accauuaauaguaagcuuu

SEQ ID NO: 2498777 - RNA, 19 nt, Artificial Sequence
  Description of Artificial Sequence: Synthetic oligonucleotide
acccugagauauuagauaa

SEQ ID NO: 2498778 - RNA, 19 nt, Artificial Sequence
  Description of Artificial Sequence: Synthetic oligonucleotide
uuuacuuugucagcggcaa

SEQ ID NO: 2498779 - RNA, 19 nt, Artificial Sequence
  Description of Artificial Sequence: Synthetic oligonucleotide
auauuucauaaacccugag

SEQ ID NO: 2498780 - RNA, 19 nt, Artificial Sequence
  Description of Artificial Sequence: Synthetic oligonucleotide
aacucuaucuuugcauucu

SEQ ID NO: 2498781 - RNA, 19 nt, Artificial Sequence
  Description of Artificial Sequence: Synthetic oligonucleotide
aacugcacagauaguuugg

SEQ ID NO: 2498782 - RNA, 19 nt, Artificial Sequence
  Description of Artificial Sequence: Synthetic oligonucleotide
acuuugucagcggcaaacc

SEQ ID NO: 2498783 - RNA, 19 nt, Artificial Sequence
  Description of Artificial Sequence: Synthetic oligonucleotide
aagguaauggcaaggaauu

SEQ ID NO: 2498784 - RNA, 19 nt, Artificial Sequence
  Description of Artificial Sequence: Synthetic oligonucleotide
caucuuaauauugucacca

SEQ ID NO: 2498785 - RNA, 19 nt, Artificial Sequence
  Description of Artificial Sequence: Synthetic oligonucleotide
acuauauuucauaaacccu

SEQ ID NO: 2498786 - RNA, 19 nt, Artificial Sequence
  Description of Artificial Sequence: Synthetic oligonucleotide
gguuaaauggcagauuggc

SEQ ID NO: 2498787 - RNA, 19 nt, Artificial Sequence
  Description of Artificial Sequence: Synthetic oligonucleotide
aauuaugcacacacagcug

SEQ ID NO: 2498788 - RNA, 19 nt, Artificial Sequence
  Description of Artificial Sequence: Synthetic oligonucleotide
auaaagguaauggcaagga

SEQ ID NO: 2498789 - RNA, 19 nt, Artificial Sequence
  Description of Artificial Sequence: Synthetic oligonucleotide
uuugucagcggcaaaccuu

SEQ ID NO: 2498790 - RNA, 19 nt, Artificial Sequence
  Description of Artificial Sequence: Synthetic oligonucleotide
ucuuaauauugucaccauu

SEQ ID NO: 2498791 - RNA, 19 nt, Artificial Sequence
  Description of Artificial Sequence: Synthetic oligonucleotide
uuguucgcuuuuaaugugu

SEQ ID NO: 2498792 - RNA, 19 nt, Artificial Sequence
  Description of Artificial Sequence: Synthetic oligonucleotide
ucaagguuaaauggcagau

SEQ ID NO: 2498793 - RNA, 19 nt, Artificial Sequence
  Description of Artificial Sequence: Synthetic oligonucleotide
gaggauucaacaacaauaa

SEQ ID NO: 2498794 - RNA, 19 nt, Artificial Sequence
  Description of Artificial Sequence: Synthetic oligonucleotide
acgagguaugauuauuuga

SEQ ID NO: 2498795 - RNA, 19 nt, Artificial Sequence
  Description of Artificial Sequence: Synthetic oligonucleotide
aagcucacgagguaugauu

SEQ ID NO: 2498796 - RNA, 19 nt, Artificial Sequence
  Description of Artificial Sequence: Synthetic oligonucleotide
gcaaguaguacucauacaa

SEQ ID NO: 2498797 - RNA, 19 nt, Artificial Sequence
  Description of Artificial Sequence: Synthetic oligonucleotide
guaagaguugcauauuuua

SEQ ID NO: 2498798 - RNA, 19 nt, Artificial Sequence
  Description of Artificial Sequence: Synthetic oligonucleotide
gacuaacacaaugauauaa

SEQ ID NO: 2498799 - RNA, 19 nt, Artificial Sequence
  Description of Artificial Sequence: Synthetic oligonucleotide
aaacccugagauauuagau

SEQ ID NO: 2498800 - RNA, 19 nt, Artificial Sequence
  Description of Artificial Sequence: Synthetic oligonucleotide
uaaucagaaagaagccuua

SEQ ID NO: 2498801 - RNA, 19 nt, Artificial Sequence
  Description of Artificial Sequence: Synthetic oligonucleotide
uacucauacaaggauccca

SEQ ID NO: 2498802 - RNA, 19 nt, Artificial Sequence
  Description of Artificial Sequence: Synthetic oligonucleotide
uugcauucuugccauugca

SEQ ID NO: 2498803 - RNA, 19 nt, Artificial Sequence
  Description of Artificial Sequence: Synthetic oligonucleotide
uucuaguccuuacauggau

SEQ ID NO: 2498804 - RNA, 19 nt, Artificial Sequence
  Description of Artificial Sequence: Synthetic oligonucleotide
uuucauaaacccugagaua

SEQ ID NO: 2498805 - RNA, 19 nt, Artificial Sequence
  Description of Artificial Sequence: Synthetic oligonucleotide
ccuuacauggauugggugc

SEQ ID NO: 2498806 - RNA, 19 nt, Artificial Sequence
  Description of Artificial Sequence: Synthetic oligonucleotide
uagccuacucccuucaguc

SEQ ID NO: 2498807 - RNA, 19 nt, Artificial Sequence
  Description of Artificial Sequence: Synthetic oligonucleotide
auaaucagaaagaagccuu

SEQ ID NO: 2498808 - RNA, 19 nt, Artificial Sequence
  Description of Artificial Sequence: Synthetic oligonucleotide
cuaauuuugucaccaauua

SEQ ID NO: 2498809 - RNA, 19 nt, Artificial Sequence
  Description of Artificial Sequence: Synthetic oligonucleotide
auuauaucucuaauuuugu

SEQ ID NO: 2498810 - RNA, 19 nt, Artificial Sequence
  Description of Artificial Sequence: Synthetic oligonucleotide
uacaagagccagaaagcau

SEQ ID NO: 2498811 - RNA, 19 nt, Artificial Sequence
  Description of Artificial Sequence: Synthetic oligonucleotide
uaucucuaauuuugucacc

SEQ ID NO: 2498812 - RNA, 19 nt, Artificial Sequence
  Description of Artificial Sequence: Synthetic oligonucleotide
aauggcagauuggcuucgc

SEQ ID NO: 2498813 - RNA, 19 nt, Artificial Sequence
  Description of Artificial Sequence: Synthetic oligonucleotide
uuaugcacacacagcugug

SEQ ID NO: 2498814 - RNA, 19 nt, Artificial Sequence
  Description of Artificial Sequence: Synthetic oligonucleotide
caaugauauaaauuuguua

SEQ ID NO: 2498815 - RNA, 19 nt, Artificial Sequence
  Description of Artificial Sequence: Synthetic oligonucleotide
ugucaaccaugcaaguagu

SEQ ID NO: 2498816 - RNA, 19 nt, Artificial Sequence
  Description of Artificial Sequence: Synthetic oligonucleotide
uuguauagcuuagacuacu

SEQ ID NO: 2498817 - RNA, 19 nt, Artificial Sequence
  Description of Artificial Sequence: Synthetic oligonucleotide
uugcauauuuuauguauuu

SEQ ID NO: 2498818 - RNA, 19 nt, Artificial Sequence
  Description of Artificial Sequence: Synthetic oligonucleotide
aguaguacucauacaagga

SEQ ID NO: 2498819 - RNA, 19 nt, Artificial Sequence
  Description of Artificial Sequence: Synthetic oligonucleotide
agauauuagauaaccugcu

SEQ ID NO: 2498820 - RNA, 19 nt, Artificial Sequence
  Description of Artificial Sequence: Synthetic oligonucleotide
aaccugcuaaugauuguuc

SEQ ID NO: 2498821 - RNA, 19 nt, Artificial Sequence
  Description of Artificial Sequence: Synthetic oligonucleotide
aaugucaaccaugcaagua

SEQ ID NO: 2498822 - RNA, 19 nt, Artificial Sequence
  Description of Artificial Sequence: Synthetic oligonucleotide
agauaguuuggucacuauu

SEQ ID NO: 2498823 - RNA, 19 nt, Artificial Sequence
  Description of Artificial Sequence: Synthetic oligonucleotide
uugucagcggcaaaccuua

SEQ ID NO: 2498824 - RNA, 19 nt, Artificial Sequence
  Description of Artificial Sequence: Synthetic oligonucleotide
aaguaacauaaagguaaug

SEQ ID NO: 2498825 - RNA, 19 nt, Artificial Sequence
  Description of Artificial Sequence: Synthetic oligonucleotide
uccuuacauggauugggug

SEQ ID NO: 2498826 - RNA, 19 nt, Artificial Sequence
  Description of Artificial Sequence: Synthetic oligonucleotide
ugguucuaguccuuacaug

SEQ ID NO: 2498827 - RNA, 19 nt, Artificial Sequence
  Description of Artificial Sequence: Synthetic oligonucleotide
uccuaacuccacauaagua

SEQ ID NO: 2498828 - RNA, 19 nt, Artificial Sequence
  Description of Artificial Sequence: Synthetic oligonucleotide
acuaacacaaugauauaaa

SEQ ID NO: 2498829 - RNA, 19 nt, Artificial Sequence
  Description of Artificial Sequence: Synthetic oligonucleotide
guuauucaacaaaauguca

SEQ ID NO: 2498830 - RNA, 19 nt, Artificial Sequence
  Description of Artificial Sequence: Synthetic oligonucleotide
aucuuugcauucuugccau

SEQ ID NO: 2498831 - RNA, 19 nt, Artificial Sequence
  Description of Artificial Sequence: Synthetic oligonucleotide
gauauuagauaaccugcua

SEQ ID NO: 2498832 - RNA, 19 nt, Artificial Sequence
  Description of Artificial Sequence: Synthetic oligonucleotide
ucacgagguaugauuauuu

SEQ ID NO: 2498833 - RNA, 19 nt, Artificial Sequence
  Description of Artificial Sequence: Synthetic oligonucleotide
aagcuuuucuuuccccuaa

SEQ ID NO: 2498834 - RNA, 19 nt, Artificial Sequence
  Description of Artificial Sequence: Synthetic oligonucleotide
uggcaaggaauuucugaug

SEQ ID NO: 2498835 - RNA, 19 nt, Artificial Sequence
  Description of Artificial Sequence: Synthetic oligonucleotide
cccaucuuaauauugucac

SEQ ID NO: 2498836 - RNA, 19 nt, Artificial Sequence
  Description of Artificial Sequence: Synthetic oligonucleotide
auaaaguaacauaaaggua

SEQ ID NO: 2498837 - RNA, 19 nt, Artificial Sequence
  Description of Artificial Sequence: Synthetic oligonucleotide
augauuguucgcuuuuaau

SEQ ID NO: 2498838 - RNA, 19 nt, Artificial Sequence
  Description of Artificial Sequence: Synthetic oligonucleotide
ugcaaguaguacucauaca

SEQ ID NO: 2498839 - RNA, 19 nt, Artificial Sequence
  Description of Artificial Sequence: Synthetic oligonucleotide
cugauaaggccuuuaagua

SEQ ID NO: 2498840 - RNA, 19 nt, Artificial Sequence
  Description of Artificial Sequence: Synthetic oligonucleotide
cacaaugauauaaauuugu

SEQ ID NO: 2498841 - RNA, 19 nt, Artificial Sequence
  Description of Artificial Sequence: Synthetic oligonucleotide
uggugacauguaaaauuca

SEQ ID NO: 2498842 - RNA, 19 nt, Artificial Sequence
  Description of Artificial Sequence: Synthetic oligonucleotide
uucaguccuaacuccacau

SEQ ID NO: 2498843 - RNA, 19 nt, Artificial Sequence
  Description of Artificial Sequence: Synthetic oligonucleotide
gguacaagagccagaaagc

SEQ ID NO: 2498844 - RNA, 19 nt, Artificial Sequence
  Description of Artificial Sequence: Synthetic oligonucleotide
accgauuuucuuaauaaau

SEQ ID NO: 2498845 - RNA, 19 nt, Artificial Sequence
  Description of Artificial Sequence: Synthetic oligonucleotide
cacugcauuaaacucuauc

SEQ ID NO: 2498846 - RNA, 19 nt, Artificial Sequence
  Description of Artificial Sequence: Synthetic oligonucleotide
uaaggccuuuaaguaagag

SEQ ID NO: 2498847 - RNA, 19 nt, Artificial Sequence
  Description of Artificial Sequence: Synthetic oligonucleotide
guggugacauguaaaauuc

SEQ ID NO: 2498848 - RNA, 19 nt, Artificial Sequence
  Description of Artificial Sequence: Synthetic oligonucleotide
ucuaguccuuacauggauu

SEQ ID NO: 2498849 - RNA, 19 nt, Artificial Sequence
  Description of Artificial Sequence: Synthetic oligonucleotide
acacaaugauauaaauuug

SEQ ID NO: 2498850 - RNA, 19 nt, Artificial Sequence
  Description of Artificial Sequence: Synthetic oligonucleotide
augaggauucaacaacaau

SEQ ID NO: 2498851 - RNA, 19 nt, Artificial Sequence
  Description of Artificial Sequence: Synthetic oligonucleotide
cacgagguaugauuauuug

SEQ ID NO: 2498852 - RNA, 19 nt, Artificial Sequence
  Description of Artificial Sequence: Synthetic oligonucleotide
auaaccugcuaaugauugu

SEQ ID NO: 2498853 - RNA, 19 nt, Artificial Sequence
  Description of Artificial Sequence: Synthetic oligonucleotide
uagugauuuccuuuugguu

SEQ ID NO: 2498854 - RNA, 19 nt, Artificial Sequence
  Description of Artificial Sequence: Synthetic oligonucleotide
acaaggaucccaucuuaau

SEQ ID NO: 2498855 - RNA, 19 nt, Artificial Sequence
  Description of Artificial Sequence: Synthetic oligonucleotide
auuauaaucuccagaggua

SEQ ID NO: 2498856 - RNA, 19 nt, Artificial Sequence
  Description of Artificial Sequence: Synthetic oligonucleotide
cauggauugggugccagug

SEQ ID NO: 2498857 - RNA, 19 nt, Artificial Sequence
  Description of Artificial Sequence: Synthetic oligonucleotide
auaaucuccagagguacaa

SEQ ID NO: 2498858 - RNA, 19 nt, Artificial Sequence
  Description of Artificial Sequence: Synthetic oligonucleotide
uccuuuugguuaguucucc

SEQ ID NO: 2498859 - RNA, 19 nt, Artificial Sequence
  Description of Artificial Sequence: Synthetic oligonucleotide
acaagagccagaaagcaua

SEQ ID NO: 2498860 - RNA, 19 nt, Artificial Sequence
  Description of Artificial Sequence: Synthetic oligonucleotide
uguagccuacucccuucag

SEQ ID NO: 2498861 - RNA, 19 nt, Artificial Sequence
  Description of Artificial Sequence: Synthetic oligonucleotide
cucuaucuuugcauucuug

SEQ ID NO: 2498862 - RNA, 19 nt, Artificial Sequence
  Description of Artificial Sequence: Synthetic oligonucleotide
aucuccagagguacaagag

SEQ ID NO: 2498863 - RNA, 19 nt, Artificial Sequence
  Description of Artificial Sequence: Synthetic oligonucleotide
guauagcuuagacuacuga

SEQ ID NO: 2498864 - RNA, 19 nt, Artificial Sequence
  Description of Artificial Sequence: Synthetic oligonucleotide
aucaccgauuuucuuaaua

SEQ ID NO: 2498865 - RNA, 19 nt, Artificial Sequence
  Description of Artificial Sequence: Synthetic oligonucleotide
guucgcuuuuaauguguag

SEQ ID NO: 2498866 - RNA, 19 nt, Artificial Sequence
  Description of Artificial Sequence: Synthetic oligonucleotide
gaagccuuaacugcacaga

SEQ ID NO: 2498867 - RNA, 19 nt, Artificial Sequence
  Description of Artificial Sequence: Synthetic oligonucleotide
aauguguagccuacucccu

SEQ ID NO: 2498868 - RNA, 19 nt, Artificial Sequence
  Description of Artificial Sequence: Synthetic oligonucleotide
uaacuccacauaaguauuu

SEQ ID NO: 2498869 - RNA, 19 nt, Artificial Sequence
  Description of Artificial Sequence: Synthetic oligonucleotide
uaguccuuacauggauugg

SEQ ID NO: 2498870 - RNA, 19 nt, Artificial Sequence
  Description of Artificial Sequence: Synthetic oligonucleotide
auagcuuagacuacugaua

SEQ ID NO: 2498871 - RNA, 19 nt, Artificial Sequence
  Description of Artificial Sequence: Synthetic oligonucleotide
gagguaugauuauuugaaa

SEQ ID NO: 2498872 - RNA, 19 nt, Artificial Sequence
  Description of Artificial Sequence: Synthetic oligonucleotide
uuuuaauguguagccuacu

SEQ ID NO: 2498873 - RNA, 19 nt, Artificial Sequence
  Description of Artificial Sequence: Synthetic oligonucleotide
uaaucuccagagguacaag

SEQ ID NO: 2498874 - RNA, 19 nt, Artificial Sequence
  Description of Artificial Sequence: Synthetic oligonucleotide
gauugggugccagugguga

SEQ ID NO: 2498875 - RNA, 19 nt, Artificial Sequence
  Description of Artificial Sequence: Synthetic oligonucleotide
auacaaggaucccaucuua

SEQ ID NO: 2498876 - RNA, 19 nt, Artificial Sequence
  Description of Artificial Sequence: Synthetic oligonucleotide
uaaccugcuaaugauuguu

SEQ ID NO: 2498877 - RNA, 19 nt, Artificial Sequence
  Description of Artificial Sequence: Synthetic oligonucleotide
acaaugauauaaauuuguu

SEQ ID NO: 2498878 - RNA, 19 nt, Artificial Sequence
  Description of Artificial Sequence: Synthetic oligonucleotide
agguuaaauggcagauugg

SEQ ID NO: 2498879 - RNA, 19 nt, Artificial Sequence
  Description of Artificial Sequence: Synthetic oligonucleotide
uguucgcuuuuaaugugua

SEQ ID NO: 2498880 - RNA, 19 nt, Artificial Sequence
  Description of Artificial Sequence: Synthetic oligonucleotide
aagcauaaaguaacauaaa

SEQ ID NO: 2498881 - RNA, 19 nt, Artificial Sequence
  Description of Artificial Sequence: Synthetic oligonucleotide
aguccuaacuccacauaag

SEQ ID NO: 2498882 - RNA, 19 nt, Artificial Sequence
  Description of Artificial Sequence: Synthetic oligonucleotide
uggucacuauuauaaucuc

SEQ ID NO: 2498883 - RNA, 19 nt, Artificial Sequence
  Description of Artificial Sequence: Synthetic oligonucleotide
uggcagauuggcuucgcau

SEQ ID NO: 2498884 - RNA, 19 nt, Artificial Sequence
  Description of Artificial Sequence: Synthetic oligonucleotide
uaguuuggucacuauuaua

SEQ ID NO: 2498885 - RNA, 19 nt, Artificial Sequence
  Description of Artificial Sequence: Synthetic oligonucleotide
ucaguccuaacuccacaua

SEQ ID NO: 2498886 - RNA, 19 nt, Artificial Sequence
  Description of Artificial Sequence: Synthetic oligonucleotide
auaaacccugagauauuag

SEQ ID NO: 2498887 - RNA, 19 nt, Artificial Sequence
  Description of Artificial Sequence: Synthetic oligonucleotide
gguaauggcaaggaauuuc

SEQ ID NO: 2498888 - RNA, 19 nt, Artificial Sequence
  Description of Artificial Sequence: Synthetic oligonucleotide
guaguacucauacaaggau

SEQ ID NO: 2498889 - RNA, 19 nt, Artificial Sequence
  Description of Artificial Sequence: Synthetic oligonucleotide
aacuccacauaaguauuuu

SEQ ID NO: 2498890 - RNA, 19 nt, Artificial Sequence
  Description of Artificial Sequence: Synthetic oligonucleotide
guaagcuuuucuuuccccu

SEQ ID NO: 2498891 - RNA, 19 nt, Artificial Sequence
  Description of Artificial Sequence: Synthetic oligonucleotide
guuaguucuccaugaaggu

SEQ ID NO: 2498892 - RNA, 19 nt, Artificial Sequence
  Description of Artificial Sequence: Synthetic oligonucleotide
acucauacaaggaucccau

SEQ ID NO: 2498893 - RNA, 19 nt, Artificial Sequence
  Description of Artificial Sequence: Synthetic oligonucleotide
uggcuucgcauuugguggc

SEQ ID NO: 2498894 - RNA, 19 nt, Artificial Sequence
  Description of Artificial Sequence: Synthetic oligonucleotide
aggauucaacaacaauaau

SEQ ID NO: 2498895 - RNA, 19 nt, Artificial Sequence
  Description of Artificial Sequence: Synthetic oligonucleotide
cuuaacugcacagauaguu

SEQ ID NO: 2498896 - RNA, 19 nt, Artificial Sequence
  Description of Artificial Sequence: Synthetic oligonucleotide
caaccaugcaaguaguacu

SEQ ID NO: 2498897 - RNA, 19 nt, Artificial Sequence
  Description of Artificial Sequence: Synthetic oligonucleotide
ggucacuauuauaaucucc

SEQ ID NO: 2498898 - RNA, 19 nt, Artificial Sequence
  Description of Artificial Sequence: Synthetic oligonucleotide
uaaguaagaguugcauauu

SEQ ID NO: 2498899 - RNA, 19 nt, Artificial Sequence
  Description of Artificial Sequence: Synthetic oligonucleotide
acuccacauaaguauuuua

SEQ ID NO: 2498900 - RNA, 19 nt, Artificial Sequence
  Description of Artificial Sequence: Synthetic oligonucleotide
ccugcuaaugauuguucgc

SEQ ID NO: 2498901 - RNA, 19 nt, Artificial Sequence
  Description of Artificial Sequence: Synthetic oligonucleotide
guaauggcaaggaauuucu

SEQ ID NO: 2498902 - RNA, 19 nt, Artificial Sequence
  Description of Artificial Sequence: Synthetic oligonucleotide
ugcuaaugauuguucgcuu

SEQ ID NO: 2498903 - RNA, 19 nt, Artificial Sequence
  Description of Artificial Sequence: Synthetic oligonucleotide
gaucccaucuuaauauugu

SEQ ID NO: 2498904 - RNA, 19 nt, Artificial Sequence
  Description of Artificial Sequence: Synthetic oligonucleotide
caguccuaacuccacauaa

SEQ ID NO: 2498905 - RNA, 19 nt, Artificial Sequence
  Description of Artificial Sequence: Synthetic oligonucleotide
acugcacagauaguuuggu

SEQ ID NO: 2498906 - RNA, 19 nt, Artificial Sequence
  Description of Artificial Sequence: Synthetic oligonucleotide
ccaucuuaauauugucacc

SEQ ID NO: 2498907 - RNA, 19 nt, Artificial Sequence
  Description of Artificial Sequence: Synthetic oligonucleotide
ucgcauuugguggccagcu

SEQ ID NO: 2498908 - RNA, 19 nt, Artificial Sequence
  Description of Artificial Sequence: Synthetic oligonucleotide
aguaagaguugcauauuuu

SEQ ID NO: 2498909 - RNA, 19 nt, Artificial Sequence
  Description of Artificial Sequence: Synthetic oligonucleotide
ugucaccaauuagugauuu

SEQ ID NO: 2498910 - RNA, 19 nt, Artificial Sequence
  Description of Artificial Sequence: Synthetic oligonucleotide
ggcaaggaauuucugaugu

SEQ ID NO: 2498911 - RNA, 19 nt, Artificial Sequence
  Description of Artificial Sequence: Synthetic oligonucleotide
gcugugacuaacacaauga

SEQ ID NO: 2498912 - RNA, 19 nt, Artificial Sequence
  Description of Artificial Sequence: Synthetic oligonucleotide
guccuaacuccacauaagu

SEQ ID NO: 2498913 - RNA, 19 nt, Artificial Sequence
  Description of Artificial Sequence: Synthetic oligonucleotide
caugcaaguaguacucaua

SEQ ID NO: 2498914 - RNA, 19 nt, Artificial Sequence
  Description of Artificial Sequence: Synthetic oligonucleotide
acagauaguuuggucacua

SEQ ID NO: 2498915 - RNA, 19 nt, Artificial Sequence
  Description of Artificial Sequence: Synthetic oligonucleotide
acauggauugggugccagu

SEQ ID NO: 2498916 - RNA, 19 nt, Artificial Sequence
  Description of Artificial Sequence: Synthetic oligonucleotide
gaguugcauauuuuaugua

SEQ ID NO: 2498917 - RNA, 19 nt, Artificial Sequence
  Description of Artificial Sequence: Synthetic oligonucleotide
cugcacagauaguuugguc

SEQ ID NO: 2498918 - RNA, 19 nt, Artificial Sequence
  Description of Artificial Sequence: Synthetic oligonucleotide
uuacuuugucagcggcaaa

SEQ ID NO: 2498919 - RNA, 19 nt, Artificial Sequence
  Description of Artificial Sequence: Synthetic oligonucleotide
cauaaacccugagauauua

SEQ ID NO: 2498920 - RNA, 19 nt, Artificial Sequence
  Description of Artificial Sequence: Synthetic oligonucleotide
ucgugguucuaguccuuac

SEQ ID NO: 2498921 - RNA, 19 nt, Artificial Sequence
  Description of Artificial Sequence: Synthetic oligonucleotide
cuuuaaguaagaguugcau

SEQ ID NO: 2498922 - RNA, 19 nt, Artificial Sequence
  Description of Artificial Sequence: Synthetic oligonucleotide
ggaucccaucuuaauauug

SEQ ID NO: 2498923 - RNA, 19 nt, Artificial Sequence
  Description of Artificial Sequence: Synthetic oligonucleotide
caauuagugauuuccuuuu

SEQ ID NO: 2498924 - RNA, 19 nt, Artificial Sequence
  Description of Artificial Sequence: Synthetic oligonucleotide
cugagauauuagauaaccu

SEQ ID NO: 2498925 - RNA, 19 nt, Artificial Sequence
  Description of Artificial Sequence: Synthetic oligonucleotide
cuacugauaaggccuuuaa

SEQ ID NO: 2498926 - RNA, 19 nt, Artificial Sequence
  Description of Artificial Sequence: Synthetic oligonucleotide
auguguagccuacucccuu

SEQ ID NO: 2498927 - RNA, 19 nt, Artificial Sequence
  Description of Artificial Sequence: Synthetic oligonucleotide
agauaaccugcuaaugauu

SEQ ID NO: 2498928 - RNA, 19 nt, Artificial Sequence
  Description of Artificial Sequence: Synthetic oligonucleotide
cucauacaaggaucccauc

SEQ ID NO: 2498929 - RNA, 19 nt, Artificial Sequence
  Description of Artificial Sequence: Synthetic oligonucleotide
aggaucccaucuuaauauu

SEQ ID NO: 2498930 - RNA, 19 nt, Artificial Sequence
  Description of Artificial Sequence: Synthetic oligonucleotide
caccgauuuucuuaauaaa

SEQ ID NO: 2498931 - RNA, 19 nt, Artificial Sequence
  Description of Artificial Sequence: Synthetic oligonucleotide
aucacugcauuaaacucua

SEQ ID NO: 2498932 - RNA, 19 nt, Artificial Sequence
  Description of Artificial Sequence: Synthetic oligonucleotide
ccuaacuccacauaaguau

SEQ ID NO: 2498933 - RNA, 19 nt, Artificial Sequence
  Description of Artificial Sequence: Synthetic oligonucleotide
cgagguaugauuauuugaa

SEQ ID NO: 2498934 - RNA, 19 nt, Artificial Sequence
  Description of Artificial Sequence: Synthetic oligonucleotide
guacucauacaaggauccc

SEQ ID NO: 2498935 - RNA, 19 nt, Artificial Sequence
  Description of Artificial Sequence: Synthetic oligonucleotide
auggcagauuggcuucgca

SEQ ID NO: 2498936 - RNA, 19 nt, Artificial Sequence
  Description of Artificial Sequence: Synthetic oligonucleotide
acuacugauaaggccuuua

SEQ ID NO: 2498937 - RNA, 19 nt, Artificial Sequence
  Description of Artificial Sequence: Synthetic oligonucleotide
agcaagcucacgagguaug

SEQ ID NO: 2498938 - RNA, 19 nt, Artificial Sequence
  Description of Artificial Sequence: Synthetic oligonucleotide
agcucacgagguaugauua

SEQ ID NO: 2498939 - RNA, 19 nt, Artificial Sequence
  Description of Artificial Sequence: Synthetic oligonucleotide
gugguucuaguccuuacau

SEQ ID NO: 2498940 - RNA, 19 nt, Artificial Sequence
  Description of Artificial Sequence: Synthetic oligonucleotide
gccauugcaguuauucaac

SEQ ID NO: 2498941 - RNA, 19 nt, Artificial Sequence
  Description of Artificial Sequence: Synthetic oligonucleotide
cugcuaaugauuguucgcu

SEQ ID NO: 2498942 - RNA, 19 nt, Artificial Sequence
  Description of Artificial Sequence: Synthetic oligonucleotide
uuacauggauugggugcca

SEQ ID NO: 2498943 - RNA, 19 nt, Artificial Sequence
  Description of Artificial Sequence: Synthetic oligonucleotide
guugagagucuuuuccuuu

SEQ ID NO: 2498944 - RNA, 19 nt, Artificial Sequence
  Description of Artificial Sequence: Synthetic oligonucleotide
gccagaaagcauaaaguaa

SEQ ID NO: 2498945 - RNA, 19 nt, Artificial Sequence
  Description of Artificial Sequence: Synthetic oligonucleotide
cuuuugguuaguucuccau

SEQ ID NO: 2498946 - RNA, 19 nt, Artificial Sequence
  Description of Artificial Sequence: Synthetic oligonucleotide
auuugguggccagcugugu

SEQ ID NO: 2498947 - RNA, 19 nt, Artificial Sequence
  Description of Artificial Sequence: Synthetic oligonucleotide
cauacaaggaucccaucuu

SEQ ID NO: 2498948 - RNA, 19 nt, Artificial Sequence
  Description of Artificial Sequence: Synthetic oligonucleotide
cagauuggcuucgcauuug

SEQ ID NO: 2498949 - RNA, 19 nt, Artificial Sequence
  Description of Artificial Sequence: Synthetic oligonucleotide
caccaauuagugauuuccu

SEQ ID NO: 2498950 - RNA, 19 nt, Artificial Sequence
  Description of Artificial Sequence: Synthetic oligonucleotide
uaucaccgauuuucuuaau

SEQ ID NO: 2498951 - RNA, 19 nt, Artificial Sequence
  Description of Artificial Sequence: Synthetic oligonucleotide
guugcauauuuuauguauu

SEQ ID NO: 2498952 - RNA, 19 nt, Artificial Sequence
  Description of Artificial Sequence: Synthetic oligonucleotide
cucuaauuuugucaccaau

SEQ ID NO: 2498953 - RNA, 19 nt, Artificial Sequence
  Description of Artificial Sequence: Synthetic oligonucleotide
cuaaugauuguucgcuuuu

SEQ ID NO: 2498954 - RNA, 19 nt, Artificial Sequence
  Description of Artificial Sequence: Synthetic oligonucleotide
auaaggccuuuaaguaaga

SEQ ID NO: 2498955 - RNA, 19 nt, Artificial Sequence
  Description of Artificial Sequence: Synthetic oligonucleotide
guguagccuacucccuuca

SEQ ID NO: 2498956 - RNA, 19 nt, Artificial Sequence
  Description of Artificial Sequence: Synthetic oligonucleotide
cuuugucagcggcaaaccu

SEQ ID NO: 2498957 - RNA, 19 nt, Artificial Sequence
  Description of Artificial Sequence: Synthetic oligonucleotide
ugauuuccuuuugguuagu

SEQ ID NO: 2498958 - RNA, 19 nt, Artificial Sequence
  Description of Artificial Sequence: Synthetic oligonucleotide
ggccuuuaaguaagaguug

SEQ ID NO: 2498959 - RNA, 19 nt, Artificial Sequence
  Description of Artificial Sequence: Synthetic oligonucleotide
gucagcggcaaaccuuaaa

SEQ ID NO: 2498960 - RNA, 19 nt, Artificial Sequence
  Description of Artificial Sequence: Synthetic oligonucleotide
cugugacuaacacaaugau

SEQ ID NO: 2498961 - RNA, 19 nt, Artificial Sequence
  Description of Artificial Sequence: Synthetic oligonucleotide
ucacugcauuaaacucuau

SEQ ID NO: 2498962 - RNA, 19 nt, Artificial Sequence
  Description of Artificial Sequence: Synthetic oligonucleotide
ugucagcggcaaaccuuaa

SEQ ID NO: 2498963 - RNA, 19 nt, Artificial Sequence
  Description of Artificial Sequence: Synthetic oligonucleotide
ccuuuaaguaagaguugca

SEQ ID NO: 2498964 - RNA, 19 nt, Artificial Sequence
  Description of Artificial Sequence: Synthetic oligonucleotide
agacuacugauaaggccuu

SEQ ID NO: 2498965 - RNA, 19 nt, Artificial Sequence
  Description of Artificial Sequence: Synthetic oligonucleotide
uacucccuucaguccuaac

SEQ ID NO: 2498966 - RNA, 19 nt, Artificial Sequence
  Description of Artificial Sequence: Synthetic oligonucleotide
cccugagauauuagauaac

SEQ ID NO: 2498967 - RNA, 19 nt, Artificial Sequence
  Description of Artificial Sequence: Synthetic oligonucleotide
ccauugcaguuauucaaca

SEQ ID NO: 2498968 - RNA, 19 nt, Artificial Sequence
  Description of Artificial Sequence: Synthetic oligonucleotide
aaucgugguucuaguccuu

SEQ ID NO: 2498969 - RNA, 19 nt, Artificial Sequence
  Description of Artificial Sequence: Synthetic oligonucleotide
ccgauuuucuuaauaaauu

SEQ ID NO: 2498970 - RNA, 19 nt, Artificial Sequence
  Description of Artificial Sequence: Synthetic oligonucleotide
ccaauuagugauuuccuuu

SEQ ID NO: 2498971 - RNA, 19 nt, Artificial Sequence
  Description of Artificial Sequence: Synthetic oligonucleotide
caccauuaauaguaagcuu

SEQ ID NO: 2498972 - RNA, 19 nt, Artificial Sequence
  Description of Artificial Sequence: Synthetic oligonucleotide
aucgugguucuaguccuua

SEQ ID NO: 2498973 - RNA, 19 nt, Artificial Sequence
  Description of Artificial Sequence: Synthetic oligonucleotide
agccuuaacugcacagaua

SEQ ID NO: 2498974 - RNA, 19 nt, Artificial Sequence
  Description of Artificial Sequence: Synthetic oligonucleotide
gcuaaugauuguucgcuuu

SEQ ID NO: 2498975 - RNA, 19 nt, Artificial Sequence
  Description of Artificial Sequence: Synthetic oligonucleotide
ggcagauuggcuucgcauu

SEQ ID NO: 2498976 - RNA, 19 nt, Artificial Sequence
  Description of Artificial Sequence: Synthetic oligonucleotide
gguggccagcuguguaccc

SEQ ID NO: 2498977 - RNA, 19 nt, Artificial Sequence
  Description of Artificial Sequence: Synthetic oligonucleotide
ucuugccauugcaguuauu

SEQ ID NO: 2498978 - RNA, 19 nt, Artificial Sequence
  Description of Artificial Sequence: Synthetic oligonucleotide
gucaaccaugcaaguagua

SEQ ID NO: 2498979 - RNA, 19 nt, Artificial Sequence
  Description of Artificial Sequence: Synthetic oligonucleotide
ggauugggugccaguggug

SEQ ID NO: 2498980 - RNA, 19 nt, Artificial Sequence
  Description of Artificial Sequence: Synthetic oligonucleotide
gcaagcucacgagguauga

SEQ ID NO: 2498981 - RNA, 19 nt, Artificial Sequence
  Description of Artificial Sequence: Synthetic oligonucleotide
gccaguggugacauguaaa

SEQ ID NO: 2498982 - RNA, 19 nt, Artificial Sequence
  Description of Artificial Sequence: Synthetic oligonucleotide
cagauaguuuggucacuau

SEQ ID NO: 2498983 - RNA, 19 nt, Artificial Sequence
  Description of Artificial Sequence: Synthetic oligonucleotide
cgugguucuaguccuuaca

SEQ ID NO: 2498984 - RNA, 19 nt, Artificial Sequence
  Description of Artificial Sequence: Synthetic oligonucleotide
gcagauuggcuucgcauuu

SEQ ID NO: 2498985 - RNA, 19 nt, Artificial Sequence
  Description of Artificial Sequence: Synthetic oligonucleotide
ggcuucgcauuugguggcc

SEQ ID NO: 2498986 - RNA, 19 nt, Artificial Sequence
  Description of Artificial Sequence: Synthetic oligonucleotide
cucacgagguaugauuauu

SEQ ID NO: 2498987 - RNA, 19 nt, Artificial Sequence
  Description of Artificial Sequence: Synthetic oligonucleotide
caguggugacauguaaaau

SEQ ID NO: 2498988 - RNA, 19 nt, Artificial Sequence
  Description of Artificial Sequence: Synthetic oligonucleotide
cacagauaguuuggucacu

SEQ ID NO: 2498989 - RNA, 19 nt, Artificial Sequence
  Description of Artificial Sequence: Synthetic oligonucleotide
ccaugcaaguaguacucau

SEQ ID NO: 2498990 - RNA, 19 nt, Artificial Sequence
  Description of Artificial Sequence: Synthetic oligonucleotide
caagcucacgagguaugau

SEQ ID NO: 2498991 - RNA, 19 nt, Artificial Sequence
  Description of Artificial Sequence: Synthetic oligonucleotide
gcucacgagguaugauuau

SEQ ID NO: 2498992 - RNA, 19 nt, Artificial Sequence
  Description of Artificial Sequence: Synthetic oligonucleotide
gacuacugauaaggccuuu

SEQ ID NO: 2498993 - RNA, 19 nt, Artificial Sequence
  Description of Artificial Sequence: Synthetic oligonucleotide
cgcauuugguggccagcug

SEQ ID NO: 2498994 - RNA, 19 nt, Artificial Sequence
  Description of Artificial Sequence: Synthetic oligonucleotide
ggccagcuguguacccuac

SEQ ID NO: 2498995 - RNA, 19 nt, Artificial Sequence
  Description of Artificial Sequence: Synthetic oligonucleotide
ccuacucccuucaguccua

SEQ ID NO: 2498996 - RNA, 19 nt, Artificial Sequence
  Description of Artificial Sequence: Synthetic oligonucleotide
cagcugugacuaacacaau

SEQ ID NO: 2498997 - RNA, 19 nt, Artificial Sequence
  Description of Artificial Sequence: Synthetic oligonucleotide
cgcuuuuaauguguagccu

SEQ ID NO: 2498998 - RNA, 19 nt, Artificial Sequence
  Description of Artificial Sequence: Synthetic oligonucleotide
ugcaaaauggccaugaugg

SEQ ID NO: 2498999 - RNA, 19 nt, Artificial Sequence
  Description of Artificial Sequence: Synthetic oligonucleotide
aucacuaagacgcugcccc

SEQ ID NO: 2499000 - RNA, 19 nt, Artificial Sequence
  Description of Artificial Sequence: Synthetic oligonucleotide
aucagaacgagguuuauuc

SEQ ID NO: 2499001 - RNA, 19 nt, Artificial Sequence
  Description of Artificial Sequence: Synthetic oligonucleotide
gaaaugauaguggaaaucc

SEQ ID NO: 2499002 - RNA, 19 nt, Artificial Sequence
  Description of Artificial Sequence: Synthetic oligonucleotide
aaugauaguggaaaucccg

SEQ ID NO: 2499003 - RNA, 19 nt, Artificial Sequence
  Description of Artificial Sequence: Synthetic oligonucleotide
ucaagguugccaaagaggu

SEQ ID NO: 2499004 - RNA, 19 nt, Artificial Sequence
  Description of Artificial Sequence: Synthetic oligonucleotide
acuagcugcagccuguugg

SEQ ID NO: 2499005 - RNA, 19 nt, Artificial Sequence
  Description of Artificial Sequence: Synthetic oligonucleotide
cugauaggggcacagaagg

SEQ ID NO: 2499006 - RNA, 19 nt, Artificial Sequence
  Description of Artificial Sequence: Synthetic oligonucleotide
cuguagagugcauacaucc

SEQ ID NO: 2499007 - RNA, 19 nt, Artificial Sequence
  Description of Artificial Sequence: Synthetic oligonucleotide
aguucugcaugguauaguc

SEQ ID NO: 2499008 - RNA, 19 nt, Artificial Sequence
  Description of Artificial Sequence: Synthetic oligonucleotide
aaaugauaguggaaauccc

SEQ ID NO: 2499009 - RNA, 19 nt, Artificial Sequence
  Description of Artificial Sequence: Synthetic oligonucleotide
agucagagcugccugauag

SEQ ID NO: 2499010 - RNA, 19 nt, Artificial Sequence
  Description of Artificial Sequence: Synthetic oligonucleotide
uuccgaucaaagcuguagg

SEQ ID NO: 2499011 - RNA, 19 nt, Artificial Sequence
  Description of Artificial Sequence: Synthetic oligonucleotide
agugcauacaucccaaacu

SEQ ID NO: 2499012 - RNA, 19 nt, Artificial Sequence
  Description of Artificial Sequence: Synthetic oligonucleotide
ugacacacaagguagcugu

SEQ ID NO: 2499013 - RNA, 19 nt, Artificial Sequence
  Description of Artificial Sequence: Synthetic oligonucleotide
gucuguaagagucaguaac

SEQ ID NO: 2499014 - RNA, 19 nt, Artificial Sequence
  Description of Artificial Sequence: Synthetic oligonucleotide
cucaguggaggaauggugg

SEQ ID NO: 2499015 - RNA, 19 nt, Artificial Sequence
  Description of Artificial Sequence: Synthetic oligonucleotide
auacucaugcucuguggcc

SEQ ID NO: 2499016 - RNA, 19 nt, Artificial Sequence
  Description of Artificial Sequence: Synthetic oligonucleotide
gauaggggcacagaagggg

SEQ ID NO: 2499017 - RNA, 19 nt, Artificial Sequence
  Description of Artificial Sequence: Synthetic oligonucleotide
agaaaugauaguggaaauc

SEQ ID NO: 2499018 - RNA, 19 nt, Artificial Sequence
  Description of Artificial Sequence: Synthetic oligonucleotide
agucaguaacagcugcugc

SEQ ID NO: 2499019 - RNA, 19 nt, Artificial Sequence
  Description of Artificial Sequence: Synthetic oligonucleotide
gaaggcauaagccacucga

SEQ ID NO: 2499020 - RNA, 19 nt, Artificial Sequence
  Description of Artificial Sequence: Synthetic oligonucleotide
uguaagagucaguaacagc

SEQ ID NO: 2499021 - RNA, 19 nt, Artificial Sequence
  Description of Artificial Sequence: Synthetic oligonucleotide
uagcuguacuguuuguugg

SEQ ID NO: 2499022 - RNA, 19 nt, Artificial Sequence
  Description of Artificial Sequence: Synthetic oligonucleotide
accauagcugcucaucagg

SEQ ID NO: 2499023 - RNA, 19 nt, Artificial Sequence
  Description of Artificial Sequence: Synthetic oligonucleotide
aagccucuagcucacgcag

SEQ ID NO: 2499024 - RNA, 19 nt, Artificial Sequence
  Description of Artificial Sequence: Synthetic oligonucleotide
aggucgaucuagcucaggg

SEQ ID NO: 2499025 - RNA, 19 nt, Artificial Sequence
  Description of Artificial Sequence: Synthetic oligonucleotide
ugcaugguauagucaaggg

SEQ ID NO: 2499026 - RNA, 19 nt, Artificial Sequence
  Description of Artificial Sequence: Synthetic oligonucleotide
ucuagcucagggaaguagu

SEQ ID NO: 2499027 - RNA, 19 nt, Artificial Sequence
  Description of Artificial Sequence: Synthetic oligonucleotide
uguagagugcauacauccc

SEQ ID NO: 2499028 - RNA, 19 nt, Artificial Sequence
  Description of Artificial Sequence: Synthetic oligonucleotide
uuuucaagguugccaaaga

SEQ ID NO: 2499029 - RNA, 19 nt, Artificial Sequence
  Description of Artificial Sequence: Synthetic oligonucleotide
ugagaaggugugaccauag

SEQ ID NO: 2499030 - RNA, 19 nt, Artificial Sequence
  Description of Artificial Sequence: Synthetic oligonucleotide
cuugcuguagagugcauac

SEQ ID NO: 2499031 - RNA, 19 nt, Artificial Sequence
  Description of Artificial Sequence: Synthetic oligonucleotide
auagcugcucaucagggca

SEQ ID NO: 2499032 - RNA, 19 nt, Artificial Sequence
  Description of Artificial Sequence: Synthetic oligonucleotide
ucucaguggaggaauggug

SEQ ID NO: 2499033 - RNA, 19 nt, Artificial Sequence
  Description of Artificial Sequence: Synthetic oligonucleotide
ugaccauagcugcucauca

SEQ ID NO: 2499034 - RNA, 19 nt, Artificial Sequence
  Description of Artificial Sequence: Synthetic oligonucleotide
aaacugcacccuauggcgc

SEQ ID NO: 2499035 - RNA, 19 nt, Artificial Sequence
  Description of Artificial Sequence: Synthetic oligonucleotide
acgagguuuauucuugcug

SEQ ID NO: 2499036 - RNA, 19 nt, Artificial Sequence
  Description of Artificial Sequence: Synthetic oligonucleotide
guaagagucaguaacagcu

SEQ ID NO: 2499037 - RNA, 19 nt, Artificial Sequence
  Description of Artificial Sequence: Synthetic oligonucleotide
aggcauaagccacucgagg

SEQ ID NO: 2499038 - RNA, 19 nt, Artificial Sequence
  Description of Artificial Sequence: Synthetic oligonucleotide
guagcuguacuguuuguug

SEQ ID NO: 2499039 - RNA, 19 nt, Artificial Sequence
  Description of Artificial Sequence: Synthetic oligonucleotide
ugcuguagagugcauacau

SEQ ID NO: 2499040 - RNA, 19 nt, Artificial Sequence
  Description of Artificial Sequence: Synthetic oligonucleotide
cugaacguaggccuguggc

SEQ ID NO: 2499041 - RNA, 19 nt, Artificial Sequence
  Description of Artificial Sequence: Synthetic oligonucleotide
cacccuauggcgcaggaag

SEQ ID NO: 2499042 - RNA, 19 nt, Artificial Sequence
  Description of Artificial Sequence: Synthetic oligonucleotide
gacauacucaugcucugug

SEQ ID NO: 2499043 - RNA, 19 nt, Artificial Sequence
  Description of Artificial Sequence: Synthetic oligonucleotide
cugauccagagcuagccag

SEQ ID NO: 2499044 - RNA, 19 nt, Artificial Sequence
  Description of Artificial Sequence: Synthetic oligonucleotide
auuccgaucaaagcuguag

SEQ ID NO: 2499045 - RNA, 19 nt, Artificial Sequence
  Description of Artificial Sequence: Synthetic oligonucleotide
caaaauggccaugaugggc

SEQ ID NO: 2499046 - RNA, 19 nt, Artificial Sequence
  Description of Artificial Sequence: Synthetic oligonucleotide
gaugccuucugaacguagg

SEQ ID NO: 2499047 - RNA, 19 nt, Artificial Sequence
  Description of Artificial Sequence: Synthetic oligonucleotide
ugaacguaggccuguggca

SEQ ID NO: 2499048 - RNA, 19 nt, Artificial Sequence
  Description of Artificial Sequence: Synthetic oligonucleotide
ugcauacaucccaaacugc

SEQ ID NO: 2499049 - RNA, 19 nt, Artificial Sequence
  Description of Artificial Sequence: Synthetic oligonucleotide
auagucaagggcccggaca

SEQ ID NO: 2499050 - RNA, 19 nt, Artificial Sequence
  Description of Artificial Sequence: Synthetic oligonucleotide
cuguucaccaggcccagcg

SEQ ID NO: 2499051 - RNA, 19 nt, Artificial Sequence
  Description of Artificial Sequence: Synthetic oligonucleotide
ugggcagcaucacuaagac

SEQ ID NO: 2499052 - RNA, 19 nt, Artificial Sequence
  Description of Artificial Sequence: Synthetic oligonucleotide
uuucucaguggaggaaugg

SEQ ID NO: 2499053 - RNA, 19 nt, Artificial Sequence
  Description of Artificial Sequence: Synthetic oligonucleotide
cucuagcucacgcagggag

SEQ ID NO: 2499054 - RNA, 19 nt, Artificial Sequence
  Description of Artificial Sequence: Synthetic oligonucleotide
ucugaacguaggccugugg

SEQ ID NO: 2499055 - RNA, 19 nt, Artificial Sequence
  Description of Artificial Sequence: Synthetic oligonucleotide
ucgaucuagcucagggaag

SEQ ID NO: 2499056 - RNA, 19 nt, Artificial Sequence
  Description of Artificial Sequence: Synthetic oligonucleotide
cauaagccacucgaggugg

SEQ ID NO: 2499057 - RNA, 19 nt, Artificial Sequence
  Description of Artificial Sequence: Synthetic oligonucleotide
aauacuagcugcagccugu

SEQ ID NO: 2499058 - RNA, 19 nt, Artificial Sequence
  Description of Artificial Sequence: Synthetic oligonucleotide
ucugauccagagcuagcca

SEQ ID NO: 2499059 - RNA, 19 nt, Artificial Sequence
  Description of Artificial Sequence: Synthetic oligonucleotide
uguuuguuggugguuucag

SEQ ID NO: 2499060 - RNA, 19 nt, Artificial Sequence
  Description of Artificial Sequence: Synthetic oligonucleotide
aacgagguuuauucuugcu

SEQ ID NO: 2499061 - RNA, 19 nt, Artificial Sequence
  Description of Artificial Sequence: Synthetic oligonucleotide
gaaggggaugaccugggac

SEQ ID NO: 2499062 - RNA, 19 nt, Artificial Sequence
  Description of Artificial Sequence: Synthetic oligonucleotide
cauacaucccaaacugcac

SEQ ID NO: 2499063 - RNA, 19 nt, Artificial Sequence
  Description of Artificial Sequence: Synthetic oligonucleotide
uagucaagggcccggacau

SEQ ID NO: 2499064 - RNA, 19 nt, Artificial Sequence
  Description of Artificial Sequence: Synthetic oligonucleotide
uguccuggcacuguucacc

SEQ ID NO: 2499065 - RNA, 19 nt, Artificial Sequence
  Description of Artificial Sequence: Synthetic oligonucleotide
augguauagucaagggccc

SEQ ID NO: 2499066 - RNA, 19 nt, Artificial Sequence
  Description of Artificial Sequence: Synthetic oligonucleotide
cugcaugguauagucaagg

SEQ ID NO: 2499067 - RNA, 19 nt, Artificial Sequence
  Description of Artificial Sequence: Synthetic oligonucleotide
acacaagguagcuguacug

SEQ ID NO: 2499068 - RNA, 19 nt, Artificial Sequence
  Description of Artificial Sequence: Synthetic oligonucleotide
ucaggucuguaagagucag

SEQ ID NO: 2499069 - RNA, 19 nt, Artificial Sequence
  Description of Artificial Sequence: Synthetic oligonucleotide
aguuaaugugcuugcugcu

SEQ ID NO: 2499070 - RNA, 19 nt, Artificial Sequence
  Description of Artificial Sequence: Synthetic oligonucleotide
cugcaaaauggccaugaug

SEQ ID NO: 2499071 - RNA, 19 nt, Artificial Sequence
  Description of Artificial Sequence: Synthetic oligonucleotide
ucuagcucacgcagggaga

SEQ ID NO: 2499072 - RNA, 19 nt, Artificial Sequence
  Description of Artificial Sequence: Synthetic oligonucleotide
uccgccaauacuagcugca

SEQ ID NO: 2499073 - RNA, 19 nt, Artificial Sequence
  Description of Artificial Sequence: Synthetic oligonucleotide
aaggcauaagccacucgag

SEQ ID NO: 2499074 - RNA, 19 nt, Artificial Sequence
  Description of Artificial Sequence: Synthetic oligonucleotide
ggcggaugccuucugaacg

SEQ ID NO: 2499075 - RNA, 19 nt, Artificial Sequence
  Description of Artificial Sequence: Synthetic oligonucleotide
acggacaccucccucaggu

SEQ ID NO: 2499076 - RNA, 19 nt, Artificial Sequence
  Description of Artificial Sequence: Synthetic oligonucleotide
aacugcacccuauggcgca

SEQ ID NO: 2499077 - RNA, 19 nt, Artificial Sequence
  Description of Artificial Sequence: Synthetic oligonucleotide
gaacgagguuuauucuugc

SEQ ID NO: 2499078 - RNA, 19 nt, Artificial Sequence
  Description of Artificial Sequence: Synthetic oligonucleotide
gaugaccugggacggacac

SEQ ID NO: 2499079 - RNA, 19 nt, Artificial Sequence
  Description of Artificial Sequence: Synthetic oligonucleotide
cauagcugcucaucagggc

SEQ ID NO: 2499080 - RNA, 19 nt, Artificial Sequence
  Description of Artificial Sequence: Synthetic oligonucleotide
aggccuuucucaguggagg

SEQ ID NO: 2499081 - RNA, 19 nt, Artificial Sequence
  Description of Artificial Sequence: Synthetic oligonucleotide
agaacgagguuuauucuug

SEQ ID NO: 2499082 - RNA, 19 nt, Artificial Sequence
  Description of Artificial Sequence: Synthetic oligonucleotide
cuguaagagucaguaacag

SEQ ID NO: 2499083 - RNA, 19 nt, Artificial Sequence
  Description of Artificial Sequence: Synthetic oligonucleotide
caauacuagcugcagccug

SEQ ID NO: 2499084 - RNA, 19 nt, Artificial Sequence
  Description of Artificial Sequence: Synthetic oligonucleotide
ucuccgccaauacuagcug

SEQ ID NO: 2499085 - RNA, 19 nt, Artificial Sequence
  Description of Artificial Sequence: Synthetic oligonucleotide
uccuugagaaggugugacc

SEQ ID NO: 2499086 - RNA, 19 nt, Artificial Sequence
  Description of Artificial Sequence: Synthetic oligonucleotide
uacucaugcucuguggcca

SEQ ID NO: 2499087 - RNA, 19 nt, Artificial Sequence
  Description of Artificial Sequence: Synthetic oligonucleotide
aguaguucugcaugguaua

SEQ ID NO: 2499088 - RNA, 19 nt, Artificial Sequence
  Description of Artificial Sequence: Synthetic oligonucleotide
aacguaggccuguggcaag

SEQ ID NO: 2499089 - RNA, 19 nt, Artificial Sequence
  Description of Artificial Sequence: Synthetic oligonucleotide
cacaucaggucgaucuagc

SEQ ID NO: 2499090 - RNA, 19 nt, Artificial Sequence
  Description of Artificial Sequence: Synthetic oligonucleotide
gacgcugccccagauuccg

SEQ ID NO: 2499091 - RNA, 19 nt, Artificial Sequence
  Description of Artificial Sequence: Synthetic oligonucleotide
gucgaucuagcucagggaa

SEQ ID NO: 2499092 - RNA, 19 nt, Artificial Sequence
  Description of Artificial Sequence: Synthetic oligonucleotide
ucagggcaucagaacgagg

SEQ ID NO: 2499093 - RNA, 19 nt, Artificial Sequence
  Description of Artificial Sequence: Synthetic oligonucleotide
agguuuauucuugcuguag

SEQ ID NO: 2499094 - RNA, 19 nt, Artificial Sequence
  Description of Artificial Sequence: Synthetic oligonucleotide
gcaugguauagucaagggc

SEQ ID NO: 2499095 - RNA, 19 nt, Artificial Sequence
  Description of Artificial Sequence: Synthetic oligonucleotide
gcagggagaaaugauagug

SEQ ID NO: 2499096 - RNA, 19 nt, Artificial Sequence
  Description of Artificial Sequence: Synthetic oligonucleotide
uaggccuuucucaguggag

SEQ ID NO: 2499097 - RNA, 19 nt, Artificial Sequence
  Description of Artificial Sequence: Synthetic oligonucleotide
aucuagcucagggaaguag

SEQ ID NO: 2499098 - RNA, 19 nt, Artificial Sequence
  Description of Artificial Sequence: Synthetic oligonucleotide
augauaguggaaaucccga

SEQ ID NO: 2499099 - RNA, 19 nt, Artificial Sequence
  Description of Artificial Sequence: Synthetic oligonucleotide
cuuucucaguggaggaaug

SEQ ID NO: 2499100 - RNA, 19 nt, Artificial Sequence
  Description of Artificial Sequence: Synthetic oligonucleotide
acgcagggagaaaugauag

SEQ ID NO: 2499101 - RNA, 19 nt, Artificial Sequence
  Description of Artificial Sequence: Synthetic oligonucleotide
gcccgucugacacacaagg

SEQ ID NO: 2499102 - RNA, 19 nt, Artificial Sequence
  Description of Artificial Sequence: Synthetic oligonucleotide
guaguucugcaugguauag

SEQ ID NO: 2499103 - RNA, 19 nt, Artificial Sequence
  Description of Artificial Sequence: Synthetic oligonucleotide
uguggcaagagcccacauu

SEQ ID NO: 2499104 - RNA, 19 nt, Artificial Sequence
  Description of Artificial Sequence: Synthetic oligonucleotide
aggucuguaagagucagua

SEQ ID NO: 2499105 - RNA, 19 nt, Artificial Sequence
  Description of Artificial Sequence: Synthetic oligonucleotide
uaaugugcuugcugcuucu

SEQ ID NO: 2499106 - RNA, 19 nt, Artificial Sequence
  Description of Artificial Sequence: Synthetic oligonucleotide
ugguauagucaagggcccg

SEQ ID NO: 2499107 - RNA, 19 nt, Artificial Sequence
  Description of Artificial Sequence: Synthetic oligonucleotide
ugccaaagaggugggcacg

SEQ ID NO: 2499108 - RNA, 19 nt, Artificial Sequence
  Description of Artificial Sequence: Synthetic oligonucleotide
agcuguacuguuuguuggu

SEQ ID NO: 2499109 - RNA, 19 nt, Artificial Sequence
  Description of Artificial Sequence: Synthetic oligonucleotide
ggcccagcgacauuccugg

SEQ ID NO: 2499110 - RNA, 19 nt, Artificial Sequence
  Description of Artificial Sequence: Synthetic oligonucleotide
cuucugauccagagcuagc

SEQ ID NO: 2499111 - RNA, 19 nt, Artificial Sequence
  Description of Artificial Sequence: Synthetic oligonucleotide
gguuuauucuugcuguaga

SEQ ID NO: 2499112 - RNA, 19 nt, Artificial Sequence
  Description of Artificial Sequence: Synthetic oligonucleotide
aucuccgccaauacuagcu

SEQ ID NO: 2499113 - RNA, 19 nt, Artificial Sequence
  Description of Artificial Sequence: Synthetic oligonucleotide
ucacgcagggagaaaugau

SEQ ID NO: 2499114 - RNA, 19 nt, Artificial Sequence
  Description of Artificial Sequence: Synthetic oligonucleotide
gcaaaauggccaugauggg

SEQ ID NO: 2499115 - RNA, 19 nt, Artificial Sequence
  Description of Artificial Sequence: Synthetic oligonucleotide
caaagaggugggcacgcug

SEQ ID NO: 2499116 - RNA, 19 nt, Artificial Sequence
  Description of Artificial Sequence: Synthetic oligonucleotide
uaguggaaaucccgaaguu

SEQ ID NO: 2499117 - RNA, 19 nt, Artificial Sequence
  Description of Artificial Sequence: Synthetic oligonucleotide
gugggugucgggugcaagc

SEQ ID NO: 2499118 - RNA, 19 nt, Artificial Sequence
  Description of Artificial Sequence: Synthetic oligonucleotide
accaucuccgccaauacua

SEQ ID NO: 2499119 - RNA, 19 nt, Artificial Sequence
  Description of Artificial Sequence: Synthetic oligonucleotide
cuccgccaauacuagcugc

SEQ ID NO: 2499120 - RNA, 19 nt, Artificial Sequence
  Description of Artificial Sequence: Synthetic oligonucleotide
caagguugccaaagaggug

SEQ ID NO: 2499121 - RNA, 19 nt, Artificial Sequence
  Description of Artificial Sequence: Synthetic oligonucleotide
acaagguagcuguacuguu

SEQ ID NO: 2499122 - RNA, 19 nt, Artificial Sequence
  Description of Artificial Sequence: Synthetic oligonucleotide
ucaggucgaucuagcucag

SEQ ID NO: 2499123 - RNA, 19 nt, Artificial Sequence
  Description of Artificial Sequence: Synthetic oligonucleotide
gguauagucaagggcccgg

SEQ ID NO: 2499124 - RNA, 19 nt, Artificial Sequence
  Description of Artificial Sequence: Synthetic oligonucleotide
aucagggcaucagaacgag

SEQ ID NO: 2499125 - RNA, 19 nt, Artificial Sequence
  Description of Artificial Sequence: Synthetic oligonucleotide
gcauaagccacucgaggug

SEQ ID NO: 2499126 - RNA, 19 nt, Artificial Sequence
  Description of Artificial Sequence: Synthetic oligonucleotide
acuaagacgcugccccaga

SEQ ID NO: 2499127 - RNA, 19 nt, Artificial Sequence
  Description of Artificial Sequence: Synthetic oligonucleotide
ccagcgacauuccuggcgg

SEQ ID NO: 2499128 - RNA, 19 nt, Artificial Sequence
  Description of Artificial Sequence: Synthetic oligonucleotide
augaccugggacggacacc

SEQ ID NO: 2499129 - RNA, 19 nt, Artificial Sequence
  Description of Artificial Sequence: Synthetic oligonucleotide
ucacuaagacgcugcccca

SEQ ID NO: 2499130 - RNA, 19 nt, Artificial Sequence
  Description of Artificial Sequence: Synthetic oligonucleotide
aagccacucgaggugggug

SEQ ID NO: 2499131 - RNA, 19 nt, Artificial Sequence
  Description of Artificial Sequence: Synthetic oligonucleotide
aggggaugaccugggacgg

SEQ ID NO: 2499132 - RNA, 19 nt, Artificial Sequence
  Description of Artificial Sequence: Synthetic oligonucleotide
ucuugcuguagagugcaua

SEQ ID NO: 2499133 - RNA, 19 nt, Artificial Sequence
  Description of Artificial Sequence: Synthetic oligonucleotide
cagggcaucagaacgaggu

SEQ ID NO: 2499134 - RNA, 19 nt, Artificial Sequence
  Description of Artificial Sequence: Synthetic oligonucleotide
gagaaaugauaguggaaau

SEQ ID NO: 2499135 - RNA, 19 nt, Artificial Sequence
  Description of Artificial Sequence: Synthetic oligonucleotide
uaagacgcugccccagauu

SEQ ID NO: 2499136 - RNA, 19 nt, Artificial Sequence
  Description of Artificial Sequence: Synthetic oligonucleotide
ccugauaggggcacagaag

SEQ ID NO: 2499137 - RNA, 19 nt, Artificial Sequence
  Description of Artificial Sequence: Synthetic oligonucleotide
cgucugacacacaagguag

SEQ ID NO: 2499138 - RNA, 19 nt, Artificial Sequence
  Description of Artificial Sequence: Synthetic oligonucleotide
caucuccgccaauacuagc

SEQ ID NO: 2499139 - RNA, 19 nt, Artificial Sequence
  Description of Artificial Sequence: Synthetic oligonucleotide
uauggcgcaggaaggcaua

SEQ ID NO: 2499140 - RNA, 19 nt, Artificial Sequence
  Description of Artificial Sequence: Synthetic oligonucleotide
caagggcccggacauacuc

SEQ ID NO: 2499141 - RNA, 19 nt, Artificial Sequence
  Description of Artificial Sequence: Synthetic oligonucleotide
agccacucgaggugggugu

SEQ ID NO: 2499142 - RNA, 19 nt, Artificial Sequence
  Description of Artificial Sequence: Synthetic oligonucleotide
gaacguaggccuguggcaa

SEQ ID NO: 2499143 - RNA, 19 nt, Artificial Sequence
  Description of Artificial Sequence: Synthetic oligonucleotide
caggucaggaugucugguc

SEQ ID NO: 2499144 - RNA, 19 nt, Artificial Sequence
  Description of Artificial Sequence: Synthetic oligonucleotide
ugggguuccugaagucaga

SEQ ID NO: 2499145 - RNA, 19 nt, Artificial Sequence
  Description of Artificial Sequence: Synthetic oligonucleotide
gucaagggcccggacauac

SEQ ID NO: 2499146 - RNA, 19 nt, Artificial Sequence
  Description of Artificial Sequence: Synthetic oligonucleotide
caagccucuagcucacgca

SEQ ID NO: 2499147 - RNA, 19 nt, Artificial Sequence
  Description of Artificial Sequence: Synthetic oligonucleotide
guaggccuguggcaagagc

SEQ ID NO: 2499148 - RNA, 19 nt, Artificial Sequence
  Description of Artificial Sequence: Synthetic oligonucleotide
gcauacaucccaaacugca

SEQ ID NO: 2499149 - RNA, 19 nt, Artificial Sequence
  Description of Artificial Sequence: Synthetic oligonucleotide
uccugaagucagagcugcc

SEQ ID NO: 2499150 - RNA, 19 nt, Artificial Sequence
  Description of Artificial Sequence: Synthetic oligonucleotide
cugacacacaagguagcug

SEQ ID NO: 2499151 - RNA, 19 nt, Artificial Sequence
  Description of Artificial Sequence: Synthetic oligonucleotide
uagcucagggaaguaguuc

SEQ ID NO: 2499152 - RNA, 19 nt, Artificial Sequence
  Description of Artificial Sequence: Synthetic oligonucleotide
ggcaggucaggaugucugg

SEQ ID NO: 2499153 - RNA, 19 nt, Artificial Sequence
  Description of Artificial Sequence: Synthetic oligonucleotide
gguguccuggcacuguuca

SEQ ID NO: 2499154 - RNA, 19 nt, Artificial Sequence
  Description of Artificial Sequence: Synthetic oligonucleotide
gacggacaccucccucagg

SEQ ID NO: 2499155 - RNA, 19 nt, Artificial Sequence
  Description of Artificial Sequence: Synthetic oligonucleotide
aggggcccgucugacacac

SEQ ID NO: 2499156 - RNA, 19 nt, Artificial Sequence
  Description of Artificial Sequence: Synthetic oligonucleotide
agagugcauacaucccaaa

SEQ ID NO: 2499157 - RNA, 19 nt, Artificial Sequence
  Description of Artificial Sequence: Synthetic oligonucleotide
agcuagccagguguccugg

SEQ ID NO: 2499158 - RNA, 19 nt, Artificial Sequence
  Description of Artificial Sequence: Synthetic oligonucleotide
ggaaggcauaagccacucg

SEQ ID NO: 2499159 - RNA, 19 nt, Artificial Sequence
  Description of Artificial Sequence: Synthetic oligonucleotide
ugguuucagugcagccuca

SEQ ID NO: 2499160 - RNA, 19 nt, Artificial Sequence
  Description of Artificial Sequence: Synthetic oligonucleotide
gugaccauagcugcucauc

SEQ ID NO: 2499161 - RNA, 19 nt, Artificial Sequence
  Description of Artificial Sequence: Synthetic oligonucleotide
ugcacccuauggcgcagga

SEQ ID NO: 2499162 - RNA, 19 nt, Artificial Sequence
  Description of Artificial Sequence: Synthetic oligonucleotide
agcucacgcagggagaaau

SEQ ID NO: 2499163 - RNA, 19 nt, Artificial Sequence
  Description of Artificial Sequence: Synthetic oligonucleotide
agacgcugccccagauucc

SEQ ID NO: 2499164 - RNA, 19 nt, Artificial Sequence
  Description of Artificial Sequence: Synthetic oligonucleotide
cucaggucuguaagaguca

SEQ ID NO: 2499165 - RNA, 19 nt, Artificial Sequence
  Description of Artificial Sequence: Synthetic oligonucleotide
cacuaagacgcugccccag

SEQ ID NO: 2499166 - RNA, 19 nt, Artificial Sequence
  Description of Artificial Sequence: Synthetic oligonucleotide
auaagccacucgagguggg

SEQ ID NO: 2499167 - RNA, 19 nt, Artificial Sequence
  Description of Artificial Sequence: Synthetic oligonucleotide
uucugaacguaggccugug

SEQ ID NO: 2499168 - RNA, 19 nt, Artificial Sequence
  Description of Artificial Sequence: Synthetic oligonucleotide
agccagguguccuggcacu

SEQ ID NO: 2499169 - RNA, 19 nt, Artificial Sequence
  Description of Artificial Sequence: Synthetic oligonucleotide
ggcauaagccacucgaggu

SEQ ID NO: 2499170 - RNA, 19 nt, Artificial Sequence
  Description of Artificial Sequence: Synthetic oligonucleotide
guuggugguuucagugcag

SEQ ID NO: 2499171 - RNA, 19 nt, Artificial Sequence
  Description of Artificial Sequence: Synthetic oligonucleotide
gcaagccucuagcucacgc

SEQ ID NO: 2499172 - RNA, 19 nt, Artificial Sequence
  Description of Artificial Sequence: Synthetic oligonucleotide
acucgaggugggugucggg

SEQ ID NO: 2499173 - RNA, 19 nt, Artificial Sequence
  Description of Artificial Sequence: Synthetic oligonucleotide
cucacgcagggagaaauga

SEQ ID NO: 2499174 - RNA, 19 nt, Artificial Sequence
  Description of Artificial Sequence: Synthetic oligonucleotide
cacucgaggugggugucgg

SEQ ID NO: 2499175 - RNA, 19 nt, Artificial Sequence
  Description of Artificial Sequence: Synthetic oligonucleotide
cccagcgacauuccuggcg

SEQ ID NO: 2499176 - RNA, 19 nt, Artificial Sequence
  Description of Artificial Sequence: Synthetic oligonucleotide
agguagcuguacuguuugu

SEQ ID NO: 2499177 - RNA, 19 nt, Artificial Sequence
  Description of Artificial Sequence: Synthetic oligonucleotide
gcaucacuaagacgcugcc

SEQ ID NO: 2499178 - RNA, 19 nt, Artificial Sequence
  Description of Artificial Sequence: Synthetic oligonucleotide
ccucccucaggucuguaag

SEQ ID NO: 2499179 - RNA, 19 nt, Artificial Sequence
  Description of Artificial Sequence: Synthetic oligonucleotide
guuuguuggugguuucagu

SEQ ID NO: 2499180 - RNA, 19 nt, Artificial Sequence
  Description of Artificial Sequence: Synthetic oligonucleotide
guggaaaucccgaaguuuu

SEQ ID NO: 2499181 - RNA, 19 nt, Artificial Sequence
  Description of Artificial Sequence: Synthetic oligonucleotide
ggucgaucuagcucaggga

SEQ ID NO: 2499182 - RNA, 19 nt, Artificial Sequence
  Description of Artificial Sequence: Synthetic oligonucleotide
gcaggggcccgucugacac

SEQ ID NO: 2499183 - RNA, 19 nt, Artificial Sequence
  Description of Artificial Sequence: Synthetic oligonucleotide
uaagccacucgaggugggu

SEQ ID NO: 2499184 - RNA, 19 nt, Artificial Sequence
  Description of Artificial Sequence: Synthetic oligonucleotide
gggcagcaucacuaagacg

SEQ ID NO: 2499185 - RNA, 19 nt, Artificial Sequence
  Description of Artificial Sequence: Synthetic oligonucleotide
gggacggacaccucccuca

SEQ ID NO: 2499186 - RNA, 19 nt, Artificial Sequence
  Description of Artificial Sequence: Synthetic oligonucleotide
agccucuagcucacgcagg

SEQ ID NO: 2499187 - RNA, 19 nt, Artificial Sequence
  Description of Artificial Sequence: Synthetic oligonucleotide
agggcaucagaacgagguu

SEQ ID NO: 2499188 - RNA, 19 nt, Artificial Sequence
  Description of Artificial Sequence: Synthetic oligonucleotide
gagcccacauuuuccugaa

SEQ ID NO: 2499189 - RNA, 19 nt, Artificial Sequence
  Description of Artificial Sequence: Synthetic oligonucleotide
gacauuccuggcggaugcc

SEQ ID NO: 2499190 - RNA, 19 nt, Artificial Sequence
  Description of Artificial Sequence: Synthetic oligonucleotide
ccaucuccgccaauacuag

SEQ ID NO: 2499191 - RNA, 19 nt, Artificial Sequence
  Description of Artificial Sequence: Synthetic oligonucleotide
ggugugaccauagcugcuc

SEQ ID NO: 2499192 - RNA, 19 nt, Artificial Sequence
  Description of Artificial Sequence: Synthetic oligonucleotide
cacacaagguagcuguacu

SEQ ID NO: 2499193 - RNA, 19 nt, Artificial Sequence
  Description of Artificial Sequence: Synthetic oligonucleotide
agcccacauuuuccugaag

SEQ ID NO: 2499194 - RNA, 19 nt, Artificial Sequence
  Description of Artificial Sequence: Synthetic oligonucleotide
gcacaucaggucgaucuag

SEQ ID NO: 2499195 - RNA, 19 nt, Artificial Sequence
  Description of Artificial Sequence: Synthetic oligonucleotide
ugcaagccucuagcucacg

SEQ ID NO: 2499196 - RNA, 19 nt, Artificial Sequence
  Description of Artificial Sequence: Synthetic oligonucleotide
cugccugauaggggcacag

SEQ ID NO: 2499197 - RNA, 19 nt, Artificial Sequence
  Description of Artificial Sequence: Synthetic oligonucleotide
ccugggacggacaccuccc

SEQ ID NO: 2499198 - RNA, 19 nt, Artificial Sequence
  Description of Artificial Sequence: Synthetic oligonucleotide
cagaacgagguuuauucuu

SEQ ID NO: 2499199 - RNA, 19 nt, Artificial Sequence
  Description of Artificial Sequence: Synthetic oligonucleotide
uggcgcaggaaggcauaag

SEQ ID NO: 2499200 - RNA, 19 nt, Artificial Sequence
  Description of Artificial Sequence: Synthetic oligonucleotide
aggcccagcgacauuccug

SEQ ID NO: 2499201 - RNA, 19 nt, Artificial Sequence
  Description of Artificial Sequence: Synthetic oligonucleotide
cuagcucacgcagggagaa

SEQ ID NO: 2499202 - RNA, 19 nt, Artificial Sequence
  Description of Artificial Sequence: Synthetic oligonucleotide
cacaagguagcuguacugu

SEQ ID NO: 2499203 - RNA, 19 nt, Artificial Sequence
  Description of Artificial Sequence: Synthetic oligonucleotide
cuggcggaugccuucugaa

SEQ ID NO: 2499204 - RNA, 19 nt, Artificial Sequence
  Description of Artificial Sequence: Synthetic oligonucleotide
gggugcaagccucuagcuc

SEQ ID NO: 2499205 - RNA, 19 nt, Artificial Sequence
  Description of Artificial Sequence: Synthetic oligonucleotide
ugccugauaggggcacaga

SEQ ID NO: 2499206 - RNA, 19 nt, Artificial Sequence
  Description of Artificial Sequence: Synthetic oligonucleotide
gccugauaggggcacagaa

SEQ ID NO: 2499207 - RNA, 19 nt, Artificial Sequence
  Description of Artificial Sequence: Synthetic oligonucleotide
ggaugccuucugaacguag

SEQ ID NO: 2499208 - RNA, 19 nt, Artificial Sequence
  Description of Artificial Sequence: Synthetic oligonucleotide
ggacggacaccucccucag

SEQ ID NO: 2499209 - RNA, 19 nt, Artificial Sequence
  Description of Artificial Sequence: Synthetic oligonucleotide
gcccacauuuuccugaagu

SEQ ID NO: 2499210 - RNA, 19 nt, Artificial Sequence
  Description of Artificial Sequence: Synthetic oligonucleotide
uccuggcggaugccuucug

SEQ ID NO: 2499211 - RNA, 19 nt, Artificial Sequence
  Description of Artificial Sequence: Synthetic oligonucleotide
ugccccagauuccgaucaa

SEQ ID NO: 2499212 - RNA, 19 nt, Artificial Sequence
  Description of Artificial Sequence: Synthetic oligonucleotide
cgacauuccuggcggaugc

SEQ ID NO: 2499213 - RNA, 19 nt, Artificial Sequence
  Description of Artificial Sequence: Synthetic oligonucleotide
ggucaggaugucuggucca

SEQ ID NO: 2499214 - RNA, 19 nt, Artificial Sequence
  Description of Artificial Sequence: Synthetic oligonucleotide
aucaaagcuguaggccuuu

SEQ ID NO: 2499215 - RNA, 19 nt, Artificial Sequence
  Description of Artificial Sequence: Synthetic oligonucleotide
guuaaugugcuugcugcuu

SEQ ID NO: 2499216 - RNA, 19 nt, Artificial Sequence
  Description of Artificial Sequence: Synthetic oligonucleotide
uggguguggcaggggcccg

SEQ ID NO: 2499217 - RNA, 19 nt, Artificial Sequence
  Description of Artificial Sequence: Synthetic oligonucleotide
cacuguucaccaggcccag

SEQ ID NO: 2499218 - RNA, 19 nt, Artificial Sequence
  Description of Artificial Sequence: Synthetic oligonucleotide
gauccagagcuagccaggu

SEQ ID NO: 2499219 - RNA, 19 nt, Artificial Sequence
  Description of Artificial Sequence: Synthetic oligonucleotide
aucccaaacugcacccuau

SEQ ID NO: 2499220 - RNA, 19 nt, Artificial Sequence
  Description of Artificial Sequence: Synthetic oligonucleotide
agcgacauuccuggcggau

SEQ ID NO: 2499221 - RNA, 19 nt, Artificial Sequence
  Description of Artificial Sequence: Synthetic oligonucleotide
gcuguagagugcauacauc

SEQ ID NO: 2499222 - RNA, 19 nt, Artificial Sequence
  Description of Artificial Sequence: Synthetic oligonucleotide
cuugagaaggugugaccau

SEQ ID NO: 2499223 - RNA, 19 nt, Artificial Sequence
  Description of Artificial Sequence: Synthetic oligonucleotide
ggccuuucucaguggagga

SEQ ID NO: 2499224 - RNA, 19 nt, Artificial Sequence
  Description of Artificial Sequence: Synthetic oligonucleotide
acguaggccuguggcaaga

SEQ ID NO: 2499225 - RNA, 19 nt, Artificial Sequence
  Description of Artificial Sequence: Synthetic oligonucleotide
aggugugaccauagcugcu

SEQ ID NO: 2499226 - RNA, 19 nt, Artificial Sequence
  Description of Artificial Sequence: Synthetic oligonucleotide
cuggggcacaucaggucga

SEQ ID NO: 2499227 - RNA, 19 nt, Artificial Sequence
  Description of Artificial Sequence: Synthetic oligonucleotide
gggaugaccugggacggac

SEQ ID NO: 2499228 - RNA, 19 nt, Artificial Sequence
  Description of Artificial Sequence: Synthetic oligonucleotide
cuauggcgcaggaaggcau

SEQ ID NO: 2499229 - RNA, 19 nt, Artificial Sequence
  Description of Artificial Sequence: Synthetic oligonucleotide
caggucgaucuagcucagg

SEQ ID NO: 2499230 - RNA, 19 nt, Artificial Sequence
  Description of Artificial Sequence: Synthetic oligonucleotide
cgagguuuauucuugcugu

SEQ ID NO: 2499231 - RNA, 19 nt, Artificial Sequence
  Description of Artificial Sequence: Synthetic oligonucleotide
cacgcuggccacggaggcc

SEQ ID NO: 2499232 - RNA, 19 nt, Artificial Sequence
  Description of Artificial Sequence: Synthetic oligonucleotide
ccgucugacacacaaggua

SEQ ID NO: 2499233 - RNA, 19 nt, Artificial Sequence
  Description of Artificial Sequence: Synthetic oligonucleotide
gucaggaugucugguccaa

SEQ ID NO: 2499234 - RNA, 19 nt, Artificial Sequence
  Description of Artificial Sequence: Synthetic oligonucleotide
auacuagcugcagccuguu

SEQ ID NO: 2499235 - RNA, 19 nt, Artificial Sequence
  Description of Artificial Sequence: Synthetic oligonucleotide
ggcaucagaacgagguuua

SEQ ID NO: 2499236 - RNA, 19 nt, Artificial Sequence
  Description of Artificial Sequence: Synthetic oligonucleotide
gauuccgaucaaagcugua

SEQ ID NO: 2499237 - RNA, 19 nt, Artificial Sequence
  Description of Artificial Sequence: Synthetic oligonucleotide
cccuauggcgcaggaaggc

SEQ ID NO: 2499238 - RNA, 19 nt, Artificial Sequence
  Description of Artificial Sequence: Synthetic oligonucleotide
ccggacauacucaugcucu

SEQ ID NO: 2499239 - RNA, 19 nt, Artificial Sequence
  Description of Artificial Sequence: Synthetic oligonucleotide
gcgacauuccuggcggaug

SEQ ID NO: 2499240 - RNA, 19 nt, Artificial Sequence
  Description of Artificial Sequence: Synthetic oligonucleotide
gggcccgucugacacacaa

SEQ ID NO: 2499241 - RNA, 19 nt, Artificial Sequence
  Description of Artificial Sequence: Synthetic oligonucleotide
ggccacggaggcccugggg

SEQ ID NO: 2499242 - RNA, 19 nt, Artificial Sequence
  Description of Artificial Sequence: Synthetic oligonucleotide
cuagcucagggaaguaguu

SEQ ID NO: 2499243 - RNA, 19 nt, Artificial Sequence
  Description of Artificial Sequence: Synthetic oligonucleotide
gcuagccagguguccuggc

SEQ ID NO: 2499244 - RNA, 19 nt, Artificial Sequence
  Description of Artificial Sequence: Synthetic oligonucleotide
gaucuagcucagggaagua

SEQ ID NO: 2499245 - RNA, 19 nt, Artificial Sequence
  Description of Artificial Sequence: Synthetic oligonucleotide
gguugccaaagaggugggc

SEQ ID NO: 2499246 - RNA, 19 nt, Artificial Sequence
  Description of Artificial Sequence: Synthetic oligonucleotide
cgccaauacuagcugcagc

SEQ ID NO: 2499247 - RNA, 19 nt, Artificial Sequence
  Description of Artificial Sequence: Synthetic oligonucleotide
cgaucaaagcuguaggccu

SEQ ID NO: 2499248 - RNA, 19 nt, Artificial Sequence
  Description of Artificial Sequence: Synthetic oligonucleotide
gaggugggugucgggugca

SEQ ID NO: 2499249 - RNA, 19 nt, Artificial Sequence
  Description of Artificial Sequence: Synthetic oligonucleotide
uggggcacaucaggucgau

SEQ ID NO: 2499250 - RNA, 19 nt, Artificial Sequence
  Description of Artificial Sequence: Synthetic oligonucleotide
gcugccccagauuccgauc

SEQ ID NO: 2499251 - RNA, 19 nt, Artificial Sequence
  Description of Artificial Sequence: Synthetic oligonucleotide
cucgaggugggugucgggu

SEQ ID NO: 2499252 - RNA, 19 nt, Artificial Sequence
  Description of Artificial Sequence: Synthetic oligonucleotide
ugggcacgcuggccacgga

SEQ ID NO: 2499253 - RNA, 19 nt, Artificial Sequence
  Description of Artificial Sequence: Synthetic oligonucleotide
cggacauacucaugcucug

SEQ ID NO: 2499254 - RNA, 19 nt, Artificial Sequence
  Description of Artificial Sequence: Synthetic oligonucleotide
uagcucacgcagggagaaa

SEQ ID NO: 2499255 - RNA, 19 nt, Artificial Sequence
  Description of Artificial Sequence: Synthetic oligonucleotide
ugucgggugcaagccucua

SEQ ID NO: 2499256 - RNA, 19 nt, Artificial Sequence
  Description of Artificial Sequence: Synthetic oligonucleotide
ggugggcacgcuggccacg

SEQ ID NO: 2499257 - RNA, 19 nt, Artificial Sequence
  Description of Artificial Sequence: Synthetic oligonucleotide
cuucugaacguaggccugu

SEQ ID NO: 2499258 - RNA, 19 nt, Artificial Sequence
  Description of Artificial Sequence: Synthetic oligonucleotide
gguagcuguacuguuuguu

SEQ ID NO: 2499259 - RNA, 19 nt, Artificial Sequence
  Description of Artificial Sequence: Synthetic oligonucleotide
cuaagacgcugccccagau

SEQ ID NO: 2499260 - RNA, 19 nt, Artificial Sequence
  Description of Artificial Sequence: Synthetic oligonucleotide
gccaccaucuccgccaaua

SEQ ID NO: 2499261 - RNA, 19 nt, Artificial Sequence
  Description of Artificial Sequence: Synthetic oligonucleotide
acaccucccucaggucugu

SEQ ID NO: 2499262 - RNA, 19 nt, Artificial Sequence
  Description of Artificial Sequence: Synthetic oligonucleotide
agcuucugauccagagcua

SEQ ID NO: 2499263 - RNA, 19 nt, Artificial Sequence
  Description of Artificial Sequence: Synthetic oligonucleotide
cauuccuggcggaugccuu

SEQ ID NO: 2499264 - RNA, 19 nt, Artificial Sequence
  Description of Artificial Sequence: Synthetic oligonucleotide
caucagaacgagguuuauu

SEQ ID NO: 2499265 - RNA, 19 nt, Artificial Sequence
  Description of Artificial Sequence: Synthetic oligonucleotide
ggcccgucugacacacaag

SEQ ID NO: 2499266 - RNA, 19 nt, Artificial Sequence
  Description of Artificial Sequence: Synthetic oligonucleotide
gguuucagugcagccucaa

SEQ ID NO: 2499267 - RNA, 19 nt, Artificial Sequence
  Description of Artificial Sequence: Synthetic oligonucleotide
ccgccaauacuagcugcag

SEQ ID NO: 2499268 - RNA, 19 nt, Artificial Sequence
  Description of Artificial Sequence: Synthetic oligonucleotide
agucaagggcccggacaua

SEQ ID NO: 2499269 - RNA, 19 nt, Artificial Sequence
  Description of Artificial Sequence: Synthetic oligonucleotide
ccuauggcgcaggaaggca

SEQ ID NO: 2499270 - RNA, 19 nt, Artificial Sequence
  Description of Artificial Sequence: Synthetic oligonucleotide
gggcaucagaacgagguuu

SEQ ID NO: 2499271 - RNA, 19 nt, Artificial Sequence
  Description of Artificial Sequence: Synthetic oligonucleotide
ccacucgaggugggugucg

SEQ ID NO: 2499272 - RNA, 19 nt, Artificial Sequence
  Description of Artificial Sequence: Synthetic oligonucleotide
ggaugaccugggacggaca

SEQ ID NO: 2499273 - RNA, 19 nt, Artificial Sequence
  Description of Artificial Sequence: Synthetic oligonucleotide
acggaggcccuggggcaca

SEQ ID NO: 2499274 - RNA, 19 nt, Artificial Sequence
  Description of Artificial Sequence: Synthetic oligonucleotide
gcugcaaaauggccaugau

SEQ ID NO: 2499275 - RNA, 19 nt, Artificial Sequence
  Description of Artificial Sequence: Synthetic oligonucleotide
gccuuucucaguggaggaa

SEQ ID NO: 2499276 - RNA, 19 nt, Artificial Sequence
  Description of Artificial Sequence: Synthetic oligonucleotide
ccuggcggaugccuucuga

SEQ ID NO: 2499277 - RNA, 19 nt, Artificial Sequence
  Description of Artificial Sequence: Synthetic oligonucleotide
gccuguggcaagagcccac

SEQ ID NO: 2499278 - RNA, 19 nt, Artificial Sequence
  Description of Artificial Sequence: Synthetic oligonucleotide
cugggacggacaccucccu

SEQ ID NO: 2499279 - RNA, 19 nt, Artificial Sequence
  Description of Artificial Sequence: Synthetic oligonucleotide
ccuguggcaagagcccaca

SEQ ID NO: 2499280 - RNA, 19 nt, Artificial Sequence
  Description of Artificial Sequence: Synthetic oligonucleotide
cagguguccuggcacuguu

SEQ ID NO: 2499281 - RNA, 19 nt, Artificial Sequence
  Description of Artificial Sequence: Synthetic oligonucleotide
gcccagcgacauuccuggc

SEQ ID NO: 2499282 - RNA, 19 nt, Artificial Sequence
  Description of Artificial Sequence: Synthetic oligonucleotide
ccaauacuagcugcagccu

SEQ ID NO: 2499283 - RNA, 19 nt, Artificial Sequence
  Description of Artificial Sequence: Synthetic oligonucleotide
caugcucuguggccaccau

SEQ ID NO: 2499284 - RNA, 19 nt, Artificial Sequence
  Description of Artificial Sequence: Synthetic oligonucleotide
cgaucuagcucagggaagu

SEQ ID NO: 2499285 - RNA, 19 nt, Artificial Sequence
  Description of Artificial Sequence: Synthetic oligonucleotide
gguguggcaggggcccguc

SEQ ID NO: 2499286 - RNA, 19 nt, Artificial Sequence
  Description of Artificial Sequence: Synthetic oligonucleotide
gcugccugauaggggcaca

SEQ ID NO: 2499287 - RNA, 19 nt, Artificial Sequence
  Description of Artificial Sequence: Synthetic oligonucleotide
gccacucgagguggguguc

SEQ ID NO: 2499288 - RNA, 19 nt, Artificial Sequence
  Description of Artificial Sequence: Synthetic oligonucleotide
acgcugccccagauuccga

SEQ ID NO: 2499289 - RNA, 19 nt, Artificial Sequence
  Description of Artificial Sequence: Synthetic oligonucleotide
gccccagauuccgaucaaa

SEQ ID NO: 2499290 - RNA, 19 nt, Artificial Sequence
  Description of Artificial Sequence: Synthetic oligonucleotide
cccgucugacacacaaggu

SEQ ID NO: 2499291 - RNA, 19 nt, Artificial Sequence
  Description of Artificial Sequence: Synthetic oligonucleotide
cuguggcaagagcccacau

SEQ ID NO: 2499292 - RNA, 19 nt, Artificial Sequence
  Description of Artificial Sequence: Synthetic oligonucleotide
gcccggacauacucaugcu

SEQ ID NO: 2499293 - RNA, 19 nt, Artificial Sequence
  Description of Artificial Sequence: Synthetic oligonucleotide
ggggaugaccugggacgga

SEQ ID NO: 2499294 - RNA, 19 nt, Artificial Sequence
  Description of Artificial Sequence: Synthetic oligonucleotide
cggacaccucccucagguc

SEQ ID NO: 2499295 - RNA, 19 nt, Artificial Sequence
  Description of Artificial Sequence: Synthetic oligonucleotide
ggggcaggucaggaugucu

SEQ ID NO: 2499296 - RNA, 19 nt, Artificial Sequence
  Description of Artificial Sequence: Synthetic oligonucleotide
ggggcacaucaggucgauc

SEQ ID NO: 2499297 - RNA, 19 nt, Artificial Sequence
  Description of Artificial Sequence: Synthetic oligonucleotide
gcacccuauggcgcaggaa

SEQ ID NO: 2499298 - RNA, 19 nt, Artificial Sequence
  Description of Artificial Sequence: Synthetic oligonucleotide
ccucuagcucacgcaggga

SEQ ID NO: 2499299 - RNA, 19 nt, Artificial Sequence
  Description of Artificial Sequence: Synthetic oligonucleotide
gcaucagaacgagguuuau

SEQ ID NO: 2499300 - RNA, 19 nt, Artificial Sequence
  Description of Artificial Sequence: Synthetic oligonucleotide
cgggugcaagccucuagcu

SEQ ID NO: 2499301 - RNA, 19 nt, Artificial Sequence
  Description of Artificial Sequence: Synthetic oligonucleotide
ccagguguccuggcacugu

SEQ ID NO: 2499302 - RNA, 19 nt, Artificial Sequence
  Description of Artificial Sequence: Synthetic oligonucleotide
caccucccucaggucugua

SEQ ID NO: 2499303 - RNA, 19 nt, Artificial Sequence
  Description of Artificial Sequence: Synthetic oligonucleotide
ggggcccgucugacacaca

SEQ ID NO: 2499304 - RNA, 19 nt, Artificial Sequence
  Description of Artificial Sequence: Synthetic oligonucleotide
cggaugccuucugaacgua

SEQ ID NO: 2499305 - RNA, 19 nt, Artificial Sequence
  Description of Artificial Sequence: Synthetic oligonucleotide
acugaguuacaucggaucc

SEQ ID NO: 2499306 - RNA, 19 nt, Artificial Sequence
  Description of Artificial Sequence: Synthetic oligonucleotide
auauugaugauggagccgc

SEQ ID NO: 2499307 - RNA, 19 nt, Artificial Sequence
  Description of Artificial Sequence: Synthetic oligonucleotide
cuacugauauugaugaugg

SEQ ID NO: 2499308 - RNA, 19 nt, Artificial Sequence
  Description of Artificial Sequence: Synthetic oligonucleotide
gaugccaagaaugcgaccg

SEQ ID NO: 2499309 - RNA, 19 nt, Artificial Sequence
  Description of Artificial Sequence: Synthetic oligonucleotide
gacacaacgacagauggcg

SEQ ID NO: 2499310 - RNA, 19 nt, Artificial Sequence
  Description of Artificial Sequence: Synthetic oligonucleotide
guuacaucggaucccaugg

SEQ ID NO: 2499311 - RNA, 19 nt, Artificial Sequence
  Description of Artificial Sequence: Synthetic oligonucleotide
uguuuguccaauauucccc

SEQ ID NO: 2499312 - RNA, 19 nt, Artificial Sequence
  Description of Artificial Sequence: Synthetic oligonucleotide
uuuccaaugaugcuacuga

SEQ ID NO: 2499313 - RNA, 19 nt, Artificial Sequence
  Description of Artificial Sequence: Synthetic oligonucleotide
ucagaugccaagaaugcga

SEQ ID NO: 2499314 - RNA, 19 nt, Artificial Sequence
  Description of Artificial Sequence: Synthetic oligonucleotide
ugucccaacggaaucauug

SEQ ID NO: 2499315 - RNA, 19 nt, Artificial Sequence
  Description of Artificial Sequence: Synthetic oligonucleotide
auggguguugcaaugaacc

SEQ ID NO: 2499316 - RNA, 19 nt, Artificial Sequence
  Description of Artificial Sequence: Synthetic oligonucleotide
acugauauugaugauggag

SEQ ID NO: 2499317 - RNA, 19 nt, Artificial Sequence
  Description of Artificial Sequence: Synthetic oligonucleotide
ugauauugaugauggagcc

SEQ ID NO: 2499318 - RNA, 19 nt, Artificial Sequence
  Description of Artificial Sequence: Synthetic oligonucleotide
aucacucccgcuuuggagg

SEQ ID NO: 2499319 - RNA, 19 nt, Artificial Sequence
  Description of Artificial Sequence: Synthetic oligonucleotide
gacacguccgccuggaagg

SEQ ID NO: 2499320 - RNA, 19 nt, Artificial Sequence
  Description of Artificial Sequence: Synthetic oligonucleotide
aaucacucccgcuuuggag

SEQ ID NO: 2499321 - RNA, 19 nt, Artificial Sequence
  Description of Artificial Sequence: Synthetic oligonucleotide
uuguuuguccaauauuccc

SEQ ID NO: 2499322 - RNA, 19 nt, Artificial Sequence
  Description of Artificial Sequence: Synthetic oligonucleotide
aggacacaacgacagaugg

SEQ ID NO: 2499323 - RNA, 19 nt, Artificial Sequence
  Description of Artificial Sequence: Synthetic oligonucleotide
uacaucggaucccauggcg

SEQ ID NO: 2499324 - RNA, 19 nt, Artificial Sequence
  Description of Artificial Sequence: Synthetic oligonucleotide
acgcauaauuuguuugucc

SEQ ID NO: 2499325 - RNA, 19 nt, Artificial Sequence
  Description of Artificial Sequence: Synthetic oligonucleotide
augcuacugauauugauga

SEQ ID NO: 2499326 - RNA, 19 nt, Artificial Sequence
  Description of Artificial Sequence: Synthetic oligonucleotide
aaggcagcgugcuucccgc

SEQ ID NO: 2499327 - RNA, 19 nt, Artificial Sequence
  Description of Artificial Sequence: Synthetic oligonucleotide
ugcaaugaacccugggagg

SEQ ID NO: 2499328 - RNA, 19 nt, Artificial Sequence
  Description of Artificial Sequence: Synthetic oligonucleotide
aaugcgaccgcaucugcca

SEQ ID NO: 2499329 - RNA, 19 nt, Artificial Sequence
  Description of Artificial Sequence: Synthetic oligonucleotide
aauauuccccaccuuucca

SEQ ID NO: 2499330 - RNA, 19 nt, Artificial Sequence
  Description of Artificial Sequence: Synthetic oligonucleotide
cuucagaugccaagaaugc

SEQ ID NO: 2499331 - RNA, 19 nt, Artificial Sequence
  Description of Artificial Sequence: Synthetic oligonucleotide
ugugaccagggccagcgcg

SEQ ID NO: 2499332 - RNA, 19 nt, Artificial Sequence
  Description of Artificial Sequence: Synthetic oligonucleotide
agaaaagcaggccugcacu

SEQ ID NO: 2499333 - RNA, 19 nt, Artificial Sequence
  Description of Artificial Sequence: Synthetic oligonucleotide
agguugacagcuaugacuc

SEQ ID NO: 2499334 - RNA, 19 nt, Artificial Sequence
  Description of Artificial Sequence: Synthetic oligonucleotide
aaacucaucgcgugugaug

SEQ ID NO: 2499335 - RNA, 19 nt, Artificial Sequence
  Description of Artificial Sequence: Synthetic oligonucleotide
uguccaauauuccccaccu

SEQ ID NO: 2499336 - RNA, 19 nt, Artificial Sequence
  Description of Artificial Sequence: Synthetic oligonucleotide
gaccgcaucugccacaucc

SEQ ID NO: 2499337 - RNA, 19 nt, Artificial Sequence
  Description of Artificial Sequence: Synthetic oligonucleotide
guggagcagaaacucaucg

SEQ ID NO: 2499338 - RNA, 19 nt, Artificial Sequence
  Description of Artificial Sequence: Synthetic oligonucleotide
uguugcaaugaacccuggg

SEQ ID NO: 2499339 - RNA, 19 nt, Artificial Sequence
  Description of Artificial Sequence: Synthetic oligonucleotide
uccaauauuccccaccuuu

SEQ ID NO: 2499340 - RNA, 19 nt, Artificial Sequence
  Description of Artificial Sequence: Synthetic oligonucleotide
gauauugaugauggagccg

SEQ ID NO: 2499341 - RNA, 19 nt, Artificial Sequence
  Description of Artificial Sequence: Synthetic oligonucleotide
gaucccauggcguccaagc

SEQ ID NO: 2499342 - RNA, 19 nt, Artificial Sequence
  Description of Artificial Sequence: Synthetic oligonucleotide
acggaaucauugcagucac

SEQ ID NO: 2499343 - RNA, 19 nt, Artificial Sequence
  Description of Artificial Sequence: Synthetic oligonucleotide
aguuacaucggaucccaug

SEQ ID NO: 2499344 - RNA, 19 nt, Artificial Sequence
  Description of Artificial Sequence: Synthetic oligonucleotide
uugagguugacagcuauga

SEQ ID NO: 2499345 - RNA, 19 nt, Artificial Sequence
  Description of Artificial Sequence: Synthetic oligonucleotide
acaugaaaagaccuccagu

SEQ ID NO: 2499346 - RNA, 19 nt, Artificial Sequence
  Description of Artificial Sequence: Synthetic oligonucleotide
aguuacaugaaaagaccuc

SEQ ID NO: 2499347 - RNA, 19 nt, Artificial Sequence
  Description of Artificial Sequence: Synthetic oligonucleotide
caggcaguuacaugaaaag

SEQ ID NO: 2499348 - RNA, 19 nt, Artificial Sequence
  Description of Artificial Sequence: Synthetic oligonucleotide
uucagaugccaagaaugcg

SEQ ID NO: 2499349 - RNA, 19 nt, Artificial Sequence
  Description of Artificial Sequence: Synthetic oligonucleotide
uggaggacgcauaauuugu

SEQ ID NO: 2499350 - RNA, 19 nt, Artificial Sequence
  Description of Artificial Sequence: Synthetic oligonucleotide
aggacgcauaauuuguuug

SEQ ID NO: 2499351 - RNA, 19 nt, Artificial Sequence
  Description of Artificial Sequence: Synthetic oligonucleotide
cacaacgacagauggcggg

SEQ ID NO: 2499352 - RNA, 19 nt, Artificial Sequence
  Description of Artificial Sequence: Synthetic oligonucleotide
gacagcuaugacucugucc

SEQ ID NO: 2499353 - RNA, 19 nt, Artificial Sequence
  Description of Artificial Sequence: Synthetic oligonucleotide
gaucgcacggccgaugccg

SEQ ID NO: 2499354 - RNA, 19 nt, Artificial Sequence
  Description of Artificial Sequence: Synthetic oligonucleotide
gacugaguuacaucggauc

SEQ ID NO: 2499355 - RNA, 19 nt, Artificial Sequence
  Description of Artificial Sequence: Synthetic oligonucleotide
aagaaugcgaccgcaucug

SEQ ID NO: 2499356 - RNA, 19 nt, Artificial Sequence
  Description of Artificial Sequence: Synthetic oligonucleotide
uugaugauggagccgcgac

SEQ ID NO: 2499357 - RNA, 19 nt, Artificial Sequence
  Description of Artificial Sequence: Synthetic oligonucleotide
caauauuccccaccuuucc

SEQ ID NO: 2499358 - RNA, 19 nt, Artificial Sequence
  Description of Artificial Sequence: Synthetic oligonucleotide
agaaugcgaccgcaucugc

SEQ ID NO: 2499359 - RNA, 19 nt, Artificial Sequence
  Description of Artificial Sequence: Synthetic oligonucleotide
acaacgacagauggcgggc

SEQ ID NO: 2499360 - RNA, 19 nt, Artificial Sequence
  Description of Artificial Sequence: Synthetic oligonucleotide
cuucuucugacauguggag

SEQ ID NO: 2499361 - RNA, 19 nt, Artificial Sequence
  Description of Artificial Sequence: Synthetic oligonucleotide
auuuucugggucaugggug

SEQ ID NO: 2499362 - RNA, 19 nt, Artificial Sequence
  Description of Artificial Sequence: Synthetic oligonucleotide
uauugaugauggagccgcg

SEQ ID NO: 2499363 - RNA, 19 nt, Artificial Sequence
  Description of Artificial Sequence: Synthetic oligonucleotide
gagaaaagcaggccugcac

SEQ ID NO: 2499364 - RNA, 19 nt, Artificial Sequence
  Description of Artificial Sequence: Synthetic oligonucleotide
ugaguuacaucggauccca

SEQ ID NO: 2499365 - RNA, 19 nt, Artificial Sequence
  Description of Artificial Sequence: Synthetic oligonucleotide
agaugccaagaaugcgacc

SEQ ID NO: 2499366 - RNA, 19 nt, Artificial Sequence
  Description of Artificial Sequence: Synthetic oligonucleotide
uggguguugcaaugaaccc

SEQ ID NO: 2499367 - RNA, 19 nt, Artificial Sequence
  Description of Artificial Sequence: Synthetic oligonucleotide
ugaugcuacugauauugau

SEQ ID NO: 2499368 - RNA, 19 nt, Artificial Sequence
  Description of Artificial Sequence: Synthetic oligonucleotide
accuuuccaaugaugcuac

SEQ ID NO: 2499369 - RNA, 19 nt, Artificial Sequence
  Description of Artificial Sequence: Synthetic oligonucleotide
uggcgggcgagaaaagcag

SEQ ID NO: 2499370 - RNA, 19 nt, Artificial Sequence
  Description of Artificial Sequence: Synthetic oligonucleotide
aggacugaguuacaucgga

SEQ ID NO: 2499371 - RNA, 19 nt, Artificial Sequence
  Description of Artificial Sequence: Synthetic oligonucleotide
uccaaugaugcuacugaua

SEQ ID NO: 2499372 - RNA, 19 nt, Artificial Sequence
  Description of Artificial Sequence: Synthetic oligonucleotide
ugugaugcccgcacaggac

SEQ ID NO: 2499373 - RNA, 19 nt, Artificial Sequence
  Description of Artificial Sequence: Synthetic oligonucleotide
guuuguccaauauucccca

SEQ ID NO: 2499374 - RNA, 19 nt, Artificial Sequence
  Description of Artificial Sequence: Synthetic oligonucleotide
ucccaacggaaucauugca

SEQ ID NO: 2499375 - RNA, 19 nt, Artificial Sequence
  Description of Artificial Sequence: Synthetic oligonucleotide
ucuugcgccaggcgcacgc

SEQ ID NO: 2499376 - RNA, 19 nt, Artificial Sequence
  Description of Artificial Sequence: Synthetic oligonucleotide
ucaucgcgugugaugcccg

SEQ ID NO: 2499377 - RNA, 19 nt, Artificial Sequence
  Description of Artificial Sequence: Synthetic oligonucleotide
gcuacugauauugaugaug

SEQ ID NO: 2499378 - RNA, 19 nt, Artificial Sequence
  Description of Artificial Sequence: Synthetic oligonucleotide
auauuccccaccuuuccaa

SEQ ID NO: 2499379 - RNA, 19 nt, Artificial Sequence
  Description of Artificial Sequence: Synthetic oligonucleotide
ugagguugacagcuaugac

SEQ ID NO: 2499380 - RNA, 19 nt, Artificial Sequence
  Description of Artificial Sequence: Synthetic oligonucleotide
acgcacgguguccugugcc

SEQ ID NO: 2499381 - RNA, 19 nt, Artificial Sequence
  Description of Artificial Sequence: Synthetic oligonucleotide
gucgcaggcggccacggcg

SEQ ID NO: 2499382 - RNA, 19 nt, Artificial Sequence
  Description of Artificial Sequence: Synthetic oligonucleotide
gccacuggacaccagagcc

SEQ ID NO: 2499383 - RNA, 19 nt, Artificial Sequence
  Description of Artificial Sequence: Synthetic oligonucleotide
aagcucgcgcgcugcaguc

SEQ ID NO: 2499384 - RNA, 19 nt, Artificial Sequence
  Description of Artificial Sequence: Synthetic oligonucleotide
aaaagaccuccagugacuu

SEQ ID NO: 2499385 - RNA, 19 nt, Artificial Sequence
  Description of Artificial Sequence: Synthetic oligonucleotide
guugacagcuaugacucug

SEQ ID NO: 2499386 - RNA, 19 nt, Artificial Sequence
  Description of Artificial Sequence: Synthetic oligonucleotide
caggacacaacgacagaug

SEQ ID NO: 2499387 - RNA, 19 nt, Artificial Sequence
  Description of Artificial Sequence: Synthetic oligonucleotide
gcaguuacaugaaaagacc

SEQ ID NO: 2499388 - RNA, 19 nt, Artificial Sequence
  Description of Artificial Sequence: Synthetic oligonucleotide
cauggguguugcaaugaac

SEQ ID NO: 2499389 - RNA, 19 nt, Artificial Sequence
  Description of Artificial Sequence: Synthetic oligonucleotide
cugugauguauccacuguc

SEQ ID NO: 2499390 - RNA, 19 nt, Artificial Sequence
  Description of Artificial Sequence: Synthetic oligonucleotide
cuugagguugacagcuaug

SEQ ID NO: 2499391 - RNA, 19 nt, Artificial Sequence
  Description of Artificial Sequence: Synthetic oligonucleotide
cugaguuacaucggauccc

SEQ ID NO: 2499392 - RNA, 19 nt, Artificial Sequence
  Description of Artificial Sequence: Synthetic oligonucleotide
uuccaaugaugcuacugau

SEQ ID NO: 2499393 - RNA, 19 nt, Artificial Sequence
  Description of Artificial Sequence: Synthetic oligonucleotide
acuaggaaggugcccuuga

SEQ ID NO: 2499394 - RNA, 19 nt, Artificial Sequence
  Description of Artificial Sequence: Synthetic oligonucleotide
gucccaacggaaucauugc

SEQ ID NO: 2499395 - RNA, 19 nt, Artificial Sequence
  Description of Artificial Sequence: Synthetic oligonucleotide
caugugucccaacggaauc

SEQ ID NO: 2499396 - RNA, 19 nt, Artificial Sequence
  Description of Artificial Sequence: Synthetic oligonucleotide
acucaucgcgugugaugcc

SEQ ID NO: 2499397 - RNA, 19 nt, Artificial Sequence
  Description of Artificial Sequence: Synthetic oligonucleotide
ucccauggcguccaagcuc

SEQ ID NO: 2499398 - RNA, 19 nt, Artificial Sequence
  Description of Artificial Sequence: Synthetic oligonucleotide
acaggacacaacgacagau

SEQ ID NO: 2499399 - RNA, 19 nt, Artificial Sequence
  Description of Artificial Sequence: Synthetic oligonucleotide
ggugagcccaaucacuccc

SEQ ID NO: 2499400 - RNA, 19 nt, Artificial Sequence
  Description of Artificial Sequence: Synthetic oligonucleotide
auggagccgcgacagccac

SEQ ID NO: 2499401 - RNA, 19 nt, Artificial Sequence
  Description of Artificial Sequence: Synthetic oligonucleotide
aacgacagauggcgggcga

SEQ ID NO: 2499402 - RNA, 19 nt, Artificial Sequence
  Description of Artificial Sequence: Synthetic oligonucleotide
cugaucgcacggccgaugc

SEQ ID NO: 2499403 - RNA, 19 nt, Artificial Sequence
  Description of Artificial Sequence: Synthetic oligonucleotide
gaaugcgaccgcaucugcc

SEQ ID NO: 2499404 - RNA, 19 nt, Artificial Sequence
  Description of Artificial Sequence: Synthetic oligonucleotide
agcuaugacucugucccag

SEQ ID NO: 2499405 - RNA, 19 nt, Artificial Sequence
  Description of Artificial Sequence: Synthetic oligonucleotide
cacgcugaucgcacggccg

SEQ ID NO: 2499406 - RNA, 19 nt, Artificial Sequence
  Description of Artificial Sequence: Synthetic oligonucleotide
cucaucgcgugugaugccc

SEQ ID NO: 2499407 - RNA, 19 nt, Artificial Sequence
  Description of Artificial Sequence: Synthetic oligonucleotide
gcccgcacaggacacaacg

SEQ ID NO: 2499408 - RNA, 19 nt, Artificial Sequence
  Description of Artificial Sequence: Synthetic oligonucleotide
ggagccggagcugagacgc

SEQ ID NO: 2499409 - RNA, 19 nt, Artificial Sequence
  Description of Artificial Sequence: Synthetic oligonucleotide
caacggaaucauugcaguc

SEQ ID NO: 2499410 - RNA, 19 nt, Artificial Sequence
  Description of Artificial Sequence: Synthetic oligonucleotide
uacugauauugaugaugga

SEQ ID NO: 2499411 - RNA, 19 nt, Artificial Sequence
  Description of Artificial Sequence: Synthetic oligonucleotide
gacgcauaauuuguuuguc

SEQ ID NO: 2499412 - RNA, 19 nt, Artificial Sequence
  Description of Artificial Sequence: Synthetic oligonucleotide
uauuccccaccuuuccaau

SEQ ID NO: 2499413 - RNA, 19 nt, Artificial Sequence
  Description of Artificial Sequence: Synthetic oligonucleotide
gugaugcccgcacaggaca

SEQ ID NO: 2499414 - RNA, 19 nt, Artificial Sequence
  Description of Artificial Sequence: Synthetic oligonucleotide
augcgaccgcaucugccac

SEQ ID NO: 2499415 - RNA, 19 nt, Artificial Sequence
  Description of Artificial Sequence: Synthetic oligonucleotide
ugaugcccgcacaggacac

SEQ ID NO: 2499416 - RNA, 19 nt, Artificial Sequence
  Description of Artificial Sequence: Synthetic oligonucleotide
cccaacggaaucauugcag

SEQ ID NO: 2499417 - RNA, 19 nt, Artificial Sequence
  Description of Artificial Sequence: Synthetic oligonucleotide
ucacucccgcuuuggagga

SEQ ID NO: 2499418 - RNA, 19 nt, Artificial Sequence
  Description of Artificial Sequence: Synthetic oligonucleotide
cagugacuuccacuguggc

SEQ ID NO: 2499419 - RNA, 19 nt, Artificial Sequence
  Description of Artificial Sequence: Synthetic oligonucleotide
gcuaccggcaccugugacc

SEQ ID NO: 2499420 - RNA, 19 nt, Artificial Sequence
  Description of Artificial Sequence: Synthetic oligonucleotide
gugugaugcccgcacagga

SEQ ID NO: 2499421 - RNA, 19 nt, Artificial Sequence
  Description of Artificial Sequence: Synthetic oligonucleotide
acucccgcuuuggaggacg

SEQ ID NO: 2499422 - RNA, 19 nt, Artificial Sequence
  Description of Artificial Sequence: Synthetic oligonucleotide
gaaaagaccuccagugacu

SEQ ID NO: 2499423 - RNA, 19 nt, Artificial Sequence
  Description of Artificial Sequence: Synthetic oligonucleotide
auugaugauggagccgcga

SEQ ID NO: 2499424 - RNA, 19 nt, Artificial Sequence
  Description of Artificial Sequence: Synthetic oligonucleotide
ucccagucuucuucugaca

SEQ ID NO: 2499425 - RNA, 19 nt, Artificial Sequence
  Description of Artificial Sequence: Synthetic oligonucleotide
ccugggaggacugaguuac

SEQ ID NO: 2499426 - RNA, 19 nt, Artificial Sequence
  Description of Artificial Sequence: Synthetic oligonucleotide
ugacagcuaugacucuguc

SEQ ID NO: 2499427 - RNA, 19 nt, Artificial Sequence
  Description of Artificial Sequence: Synthetic oligonucleotide
ucgcgugugaugcccgcac

SEQ ID NO: 2499428 - RNA, 19 nt, Artificial Sequence
  Description of Artificial Sequence: Synthetic oligonucleotide
ugaucgcacggccgaugcc

SEQ ID NO: 2499429 - RNA, 19 nt, Artificial Sequence
  Description of Artificial Sequence: Synthetic oligonucleotide
agccgcgacagccacugga

SEQ ID NO: 2499430 - RNA, 19 nt, Artificial Sequence
  Description of Artificial Sequence: Synthetic oligonucleotide
ccaauauuccccaccuuuc

SEQ ID NO: 2499431 - RNA, 19 nt, Artificial Sequence
  Description of Artificial Sequence: Synthetic oligonucleotide
ggucauggguguugcaaug

SEQ ID NO: 2499432 - RNA, 19 nt, Artificial Sequence
  Description of Artificial Sequence: Synthetic oligonucleotide
agacgcacgguguccugug

SEQ ID NO: 2499433 - RNA, 19 nt, Artificial Sequence
  Description of Artificial Sequence: Synthetic oligonucleotide
ugccaagaaugcgaccgca

SEQ ID NO: 2499434 - RNA, 19 nt, Artificial Sequence
  Description of Artificial Sequence: Synthetic oligonucleotide
auggcgggcgagaaaagca

SEQ ID NO: 2499435 - RNA, 19 nt, Artificial Sequence
  Description of Artificial Sequence: Synthetic oligonucleotide
caagaaugcgaccgcaucu

SEQ ID NO: 2499436 - RNA, 19 nt, Artificial Sequence
  Description of Artificial Sequence: Synthetic oligonucleotide
gacuaggaaggugcccuug

SEQ ID NO: 2499437 - RNA, 19 nt, Artificial Sequence
  Description of Artificial Sequence: Synthetic oligonucleotide
acaucggaucccauggcgu

SEQ ID NO: 2499438 - RNA, 19 nt, Artificial Sequence
  Description of Artificial Sequence: Synthetic oligonucleotide
acacguccgccuggaaggc

SEQ ID NO: 2499439 - RNA, 19 nt, Artificial Sequence
  Description of Artificial Sequence: Synthetic oligonucleotide
acgcugaucgcacggccga

SEQ ID NO: 2499440 - RNA, 19 nt, Artificial Sequence
  Description of Artificial Sequence: Synthetic oligonucleotide
acacaacgacagauggcgg

SEQ ID NO: 2499441 - RNA, 19 nt, Artificial Sequence
  Description of Artificial Sequence: Synthetic oligonucleotide
ugcuacugauauugaugau

SEQ ID NO: 2499442 - RNA, 19 nt, Artificial Sequence
  Description of Artificial Sequence: Synthetic oligonucleotide
cacggcggcgcccucuugc

SEQ ID NO: 2499443 - RNA, 19 nt, Artificial Sequence
  Description of Artificial Sequence: Synthetic oligonucleotide
ugggaggacugaguuacau

SEQ ID NO: 2499444 - RNA, 19 nt, Artificial Sequence
  Description of Artificial Sequence: Synthetic oligonucleotide
cagauggcgggcgagaaaa

SEQ ID NO: 2499445 - RNA, 19 nt, Artificial Sequence
  Description of Artificial Sequence: Synthetic oligonucleotide
acggccgaugccgcuaccg

SEQ ID NO: 2499446 - RNA, 19 nt, Artificial Sequence
  Description of Artificial Sequence: Synthetic oligonucleotide
caacgacagauggcgggcg

SEQ ID NO: 2499447 - RNA, 19 nt, Artificial Sequence
  Description of Artificial Sequence: Synthetic oligonucleotide
gugacuaggaaggugcccu

SEQ ID NO: 2499448 - RNA, 19 nt, Artificial Sequence
  Description of Artificial Sequence: Synthetic oligonucleotide
cuaccggcaccugugacca

SEQ ID NO: 2499449 - RNA, 19 nt, Artificial Sequence
  Description of Artificial Sequence: Synthetic oligonucleotide
gccccugugauguauccac

SEQ ID NO: 2499450 - RNA, 19 nt, Artificial Sequence
  Description of Artificial Sequence: Synthetic oligonucleotide
gauggagccgcgacagcca

SEQ ID NO: 2499451 - RNA, 19 nt, Artificial Sequence
  Description of Artificial Sequence: Synthetic oligonucleotide
ucauugcagucaccuuguc

SEQ ID NO: 2499452 - RNA, 19 nt, Artificial Sequence
  Description of Artificial Sequence: Synthetic oligonucleotide
ccugugaccagggccagcg

SEQ ID NO: 2499453 - RNA, 19 nt, Artificial Sequence
  Description of Artificial Sequence: Synthetic oligonucleotide
aucgcacggccgaugccgc

SEQ ID NO: 2499454 - RNA, 19 nt, Artificial Sequence
  Description of Artificial Sequence: Synthetic oligonucleotide
gaaaagcaggccugcacuu

SEQ ID NO: 2499455 - RNA, 19 nt, Artificial Sequence
  Description of Artificial Sequence: Synthetic oligonucleotide
ggcgagaaaagcaggccug

SEQ ID NO: 2499456 - RNA, 19 nt, Artificial Sequence
  Description of Artificial Sequence: Synthetic oligonucleotide
caucgcgugugaugcccgc

SEQ ID NO: 2499457 - RNA, 19 nt, Artificial Sequence
  Description of Artificial Sequence: Synthetic oligonucleotide
caccuuuccaaugaugcua

SEQ ID NO: 2499458 - RNA, 19 nt, Artificial Sequence
  Description of Artificial Sequence: Synthetic oligonucleotide
ugaacccugggaggacuga

SEQ ID NO: 2499459 - RNA, 19 nt, Artificial Sequence
  Description of Artificial Sequence: Synthetic oligonucleotide
ugccgcuaccggcaccugu

SEQ ID NO: 2499460 - RNA, 19 nt, Artificial Sequence
  Description of Artificial Sequence: Synthetic oligonucleotide
gacucugucccagucuucu

SEQ ID NO: 2499461 - RNA, 19 nt, Artificial Sequence
  Description of Artificial Sequence: Synthetic oligonucleotide
acagauggcgggcgagaaa

SEQ ID NO: 2499462 - RNA, 19 nt, Artificial Sequence
  Description of Artificial Sequence: Synthetic oligonucleotide
ucggaucccauggcgucca

SEQ ID NO: 2499463 - RNA, 19 nt, Artificial Sequence
  Description of Artificial Sequence: Synthetic oligonucleotide
gucauggguguugcaauga

SEQ ID NO: 2499464 - RNA, 19 nt, Artificial Sequence
  Description of Artificial Sequence: Synthetic oligonucleotide
cucuggcauuuucuggguc

SEQ ID NO: 2499465 - RNA, 19 nt, Artificial Sequence
  Description of Artificial Sequence: Synthetic oligonucleotide
ggacgcauaauuuguuugu

SEQ ID NO: 2499466 - RNA, 19 nt, Artificial Sequence
  Description of Artificial Sequence: Synthetic oligonucleotide
acgacagauggcgggcgag

SEQ ID NO: 2499467 - RNA, 19 nt, Artificial Sequence
  Description of Artificial Sequence: Synthetic oligonucleotide
agcagacgcacgguguccu

SEQ ID NO: 2499468 - RNA, 19 nt, Artificial Sequence
  Description of Artificial Sequence: Synthetic oligonucleotide
acguccgccuggaaggcag

SEQ ID NO: 2499469 - RNA, 19 nt, Artificial Sequence
  Description of Artificial Sequence: Synthetic oligonucleotide
gaggacgcauaauuuguuu

SEQ ID NO: 2499470 - RNA, 19 nt, Artificial Sequence
  Description of Artificial Sequence: Synthetic oligonucleotide
ccaagaaugcgaccgcauc

SEQ ID NO: 2499471 - RNA, 19 nt, Artificial Sequence
  Description of Artificial Sequence: Synthetic oligonucleotide
uguggccccugugauguau

SEQ ID NO: 2499472 - RNA, 19 nt, Artificial Sequence
  Description of Artificial Sequence: Synthetic oligonucleotide
augaugcuacugauauuga

SEQ ID NO: 2499473 - RNA, 19 nt, Artificial Sequence
  Description of Artificial Sequence: Synthetic oligonucleotide
ggacacaacgacagauggc

SEQ ID NO: 2499474 - RNA, 19 nt, Artificial Sequence
  Description of Artificial Sequence: Synthetic oligonucleotide
ugcgacacguccgccugga

SEQ ID NO: 2499475 - RNA, 19 nt, Artificial Sequence
  Description of Artificial Sequence: Synthetic oligonucleotide
gcagcgugcuucccgcgcg

SEQ ID NO: 2499476 - RNA, 19 nt, Artificial Sequence
  Description of Artificial Sequence: Synthetic oligonucleotide
agggccagcgcggagcgga

SEQ ID NO: 2499477 - RNA, 19 nt, Artificial Sequence
  Description of Artificial Sequence: Synthetic oligonucleotide
ugacuaggaaggugcccuu

SEQ ID NO: 2499478 - RNA, 19 nt, Artificial Sequence
  Description of Artificial Sequence: Synthetic oligonucleotide
ggugacuaggaaggugccc

SEQ ID NO: 2499479 - RNA, 19 nt, Artificial Sequence
  Description of Artificial Sequence: Synthetic oligonucleotide
gaugccgcuaccggcaccu

SEQ ID NO: 2499480 - RNA, 19 nt, Artificial Sequence
  Description of Artificial Sequence: Synthetic oligonucleotide
ggagccgcgacagccacug

SEQ ID NO: 2499481 - RNA, 19 nt, Artificial Sequence
  Description of Artificial Sequence: Synthetic oligonucleotide
gaaucauugcagucaccuu

SEQ ID NO: 2499482 - RNA, 19 nt, Artificial Sequence
  Description of Artificial Sequence: Synthetic oligonucleotide
gcccucuugcgccaggcgc

SEQ ID NO: 2499483 - RNA, 19 nt, Artificial Sequence
  Description of Artificial Sequence: Synthetic oligonucleotide
gggaggacugaguuacauc

SEQ ID NO: 2499484 - RNA, 19 nt, Artificial Sequence
  Description of Artificial Sequence: Synthetic oligonucleotide
aggcgcacgcugaucgcac

SEQ ID NO: 2499485 - RNA, 19 nt, Artificial Sequence
  Description of Artificial Sequence: Synthetic oligonucleotide
aggcagcgugcuucccgcg

SEQ ID NO: 2499486 - RNA, 19 nt, Artificial Sequence
  Description of Artificial Sequence: Synthetic oligonucleotide
cugucccagucuucuucug

SEQ ID NO: 2499487 - RNA, 19 nt, Artificial Sequence
  Description of Artificial Sequence: Synthetic oligonucleotide
acuuccacuguggccccug

SEQ ID NO: 2499488 - RNA, 19 nt, Artificial Sequence
  Description of Artificial Sequence: Synthetic oligonucleotide
ccguccaggucgcaggcgg

SEQ ID NO: 2499489 - RNA, 19 nt, Artificial Sequence
  Description of Artificial Sequence: Synthetic oligonucleotide
gggugagcccaaucacucc

SEQ ID NO: 2499490 - RNA, 19 nt, Artificial Sequence
  Description of Artificial Sequence: Synthetic oligonucleotide
gacagauggcgggcgagaa

SEQ ID NO: 2499491 - RNA, 19 nt, Artificial Sequence
  Description of Artificial Sequence: Synthetic oligonucleotide
ccaaucacucccgcuuugg

SEQ ID NO: 2499492 - RNA, 19 nt, Artificial Sequence
  Description of Artificial Sequence: Synthetic oligonucleotide
cucccgcuuuggaggacgc

SEQ ID NO: 2499493 - RNA, 19 nt, Artificial Sequence
  Description of Artificial Sequence: Synthetic oligonucleotide
uccugugccgcugccccgu

SEQ ID NO: 2499494 - RNA, 19 nt, Artificial Sequence
  Description of Artificial Sequence: Synthetic oligonucleotide
cagcagacgcacggugucc

SEQ ID NO: 2499495 - RNA, 19 nt, Artificial Sequence
  Description of Artificial Sequence: Synthetic oligonucleotide
cuggcugcggcggccugcg

SEQ ID NO: 2499496 - RNA, 19 nt, Artificial Sequence
  Description of Artificial Sequence: Synthetic oligonucleotide
cugcgacacguccgccugg

SEQ ID NO: 2499497 - RNA, 19 nt, Artificial Sequence
  Description of Artificial Sequence: Synthetic oligonucleotide
accgcaucugccacauccu

SEQ ID NO: 2499498 - RNA, 19 nt, Artificial Sequence
  Description of Artificial Sequence: Synthetic oligonucleotide
agauggcgggcgagaaaag

SEQ ID NO: 2499499 - RNA, 19 nt, Artificial Sequence
  Description of Artificial Sequence: Synthetic oligonucleotide
gaaacucaucgcgugugau

SEQ ID NO: 2499500 - RNA, 19 nt, Artificial Sequence
  Description of Artificial Sequence: Synthetic oligonucleotide
ggccgaugccgcuaccggc

SEQ ID NO: 2499501 - RNA, 19 nt, Artificial Sequence
  Description of Artificial Sequence: Synthetic oligonucleotide
gcgagaaaagcaggccugc

SEQ ID NO: 2499502 - RNA, 19 nt, Artificial Sequence
  Description of Artificial Sequence: Synthetic oligonucleotide
caggcggccacggcggcgc

SEQ ID NO: 2499503 - RNA, 19 nt, Artificial Sequence
  Description of Artificial Sequence: Synthetic oligonucleotide
guccgccuggaaggcagcg

SEQ ID NO: 2499504 - RNA, 19 nt, Artificial Sequence
  Description of Artificial Sequence: Synthetic oligonucleotide
cagcgugcuucccgcgcgg

SEQ ID NO: 2499505 - RNA, 19 nt, Artificial Sequence
  Description of Artificial Sequence: Synthetic oligonucleotide
uccgccuggaaggcagcgu

SEQ ID NO: 2499506 - RNA, 19 nt, Artificial Sequence
  Description of Artificial Sequence: Synthetic oligonucleotide
ggcagcgugcuucccgcgc

SEQ ID NO: 2499507 - RNA, 19 nt, Artificial Sequence
  Description of Artificial Sequence: Synthetic oligonucleotide
gaugcccgcacaggacaca

SEQ ID NO: 2499508 - RNA, 19 nt, Artificial Sequence
  Description of Artificial Sequence: Synthetic oligonucleotide
cucgcgcgcugcagucugg

SEQ ID NO: 2499509 - RNA, 19 nt, Artificial Sequence
  Description of Artificial Sequence: Synthetic oligonucleotide
ugcccgcacaggacacaac

SEQ ID NO: 2499510 - RNA, 19 nt, Artificial Sequence
  Description of Artificial Sequence: Synthetic oligonucleotide
gcacgcugaucgcacggcc

SEQ ID NO: 2499511 - RNA, 19 nt, Artificial Sequence
  Description of Artificial Sequence: Synthetic oligonucleotide
cugugaccagggccagcgc

SEQ ID NO: 2499512 - RNA, 19 nt, Artificial Sequence
  Description of Artificial Sequence: Synthetic oligonucleotide
gcgcacgcugaucgcacgg

SEQ ID NO: 2499513 - RNA, 19 nt, Artificial Sequence
  Description of Artificial Sequence: Synthetic oligonucleotide
ggcggccugcgacacgucc

SEQ ID NO: 2499514 - RNA, 19 nt, Artificial Sequence
  Description of Artificial Sequence: Synthetic oligonucleotide
guguccugugccgcugccc

SEQ ID NO: 2499515 - RNA, 19 nt, Artificial Sequence
  Description of Artificial Sequence: Synthetic oligonucleotide
gaccagggccagcgcggag

SEQ ID NO: 2499516 - RNA, 19 nt, Artificial Sequence
  Description of Artificial Sequence: Synthetic oligonucleotide
cgacacguccgccuggaag

SEQ ID NO: 2499517 - RNA, 19 nt, Artificial Sequence
  Description of Artificial Sequence: Synthetic oligonucleotide
agccggagcugagacgcca

SEQ ID NO: 2499518 - RNA, 19 nt, Artificial Sequence
  Description of Artificial Sequence: Synthetic oligonucleotide
gggcgagaaaagcaggccu

SEQ ID NO: 2499519 - RNA, 19 nt, Artificial Sequence
  Description of Artificial Sequence: Synthetic oligonucleotide
ucccggggccgcccagcag

SEQ ID NO: 2499520 - RNA, 19 nt, Artificial Sequence
  Description of Artificial Sequence: Synthetic oligonucleotide
gcggagccggagcugagac

SEQ ID NO: 2499521 - RNA, 19 nt, Artificial Sequence
  Description of Artificial Sequence: Synthetic oligonucleotide
aucgcgugugaugcccgca

SEQ ID NO: 2499522 - RNA, 19 nt, Artificial Sequence
  Description of Artificial Sequence: Synthetic oligonucleotide
gugcuucccgcgcggcgcc

SEQ ID NO: 2499523 - RNA, 19 nt, Artificial Sequence
  Description of Artificial Sequence: Synthetic oligonucleotide
ccagcagacgcacgguguc

SEQ ID NO: 2499524 - RNA, 19 nt, Artificial Sequence
  Description of Artificial Sequence: Synthetic oligonucleotide
ggguguugcaaugaacccu

SEQ ID NO: 2499525 - RNA, 19 nt, Artificial Sequence
  Description of Artificial Sequence: Synthetic oligonucleotide
cgcacgguguccugugccg

SEQ ID NO: 2499526 - RNA, 19 nt, Artificial Sequence
  Description of Artificial Sequence: Synthetic oligonucleotide
agcggagccggagcugaga

SEQ ID NO: 2499527 - RNA, 19 nt, Artificial Sequence
  Description of Artificial Sequence: Synthetic oligonucleotide
cagcuaugacucuguccca

SEQ ID NO: 2499528 - RNA, 19 nt, Artificial Sequence
  Description of Artificial Sequence: Synthetic oligonucleotide
acgguguccugugccgcug

SEQ ID NO: 2499529 - RNA, 19 nt, Artificial Sequence
  Description of Artificial Sequence: Synthetic oligonucleotide
gcggccugcgacacguccg

SEQ ID NO: 2499530 - RNA, 19 nt, Artificial Sequence
  Description of Artificial Sequence: Synthetic oligonucleotide
ccaacggaaucauugcagu

SEQ ID NO: 2499531 - RNA, 19 nt, Artificial Sequence
  Description of Artificial Sequence: Synthetic oligonucleotide
ggcugcggcggccugcgac

SEQ ID NO: 2499532 - RNA, 19 nt, Artificial Sequence
  Description of Artificial Sequence: Synthetic oligonucleotide
gagccgcgacagccacugg

SEQ ID NO: 2499533 - RNA, 19 nt, Artificial Sequence
  Description of Artificial Sequence: Synthetic oligonucleotide
ccgccuggaaggcagcgug

SEQ ID NO: 2499534 - RNA, 19 nt, Artificial Sequence
  Description of Artificial Sequence: Synthetic oligonucleotide
gccgcuaccggcaccugug

SEQ ID NO: 2499535 - RNA, 19 nt, Artificial Sequence
  Description of Artificial Sequence: Synthetic oligonucleotide
cugugccgcugccccgucc

SEQ ID NO: 2499536 - RNA, 19 nt, Artificial Sequence
  Description of Artificial Sequence: Synthetic oligonucleotide
ucccgcuuuggaggacgca

SEQ ID NO: 2499537 - RNA, 19 nt, Artificial Sequence
  Description of Artificial Sequence: Synthetic oligonucleotide
gcucgcgcgcugcagucug

SEQ ID NO: 2499538 - RNA, 19 nt, Artificial Sequence
  Description of Artificial Sequence: Synthetic oligonucleotide
uaccggcaccugugaccag

SEQ ID NO: 2499539 - RNA, 19 nt, Artificial Sequence
  Description of Artificial Sequence: Synthetic oligonucleotide
ccccaccuuuccaaugaug

SEQ ID NO: 2499540 - RNA, 19 nt, Artificial Sequence
  Description of Artificial Sequence: Synthetic oligonucleotide
caagcucgcgcgcugcagu

SEQ ID NO: 2499541 - RNA, 19 nt, Artificial Sequence
  Description of Artificial Sequence: Synthetic oligonucleotide
gcgugcuucccgcgcggcg

SEQ ID NO: 2499542 - RNA, 19 nt, Artificial Sequence
  Description of Artificial Sequence: Synthetic oligonucleotide
cugcagccugggugacuag

SEQ ID NO: 2499543 - RNA, 19 nt, Artificial Sequence
  Description of Artificial Sequence: Synthetic oligonucleotide
ucgcacggccgaugccgcu

SEQ ID NO: 2499544 - RNA, 19 nt, Artificial Sequence
  Description of Artificial Sequence: Synthetic oligonucleotide
gcugcggcggccugcgaca

SEQ ID NO: 2499545 - RNA, 19 nt, Artificial Sequence
  Description of Artificial Sequence: Synthetic oligonucleotide
cggagcugagacgccaugg

SEQ ID NO: 2499546 - RNA, 19 nt, Artificial Sequence
  Description of Artificial Sequence: Synthetic oligonucleotide
ccggcaccugugaccaggg

SEQ ID NO: 2499547 - RNA, 19 nt, Artificial Sequence
  Description of Artificial Sequence: Synthetic oligonucleotide
caggcgcacgcugaucgca

SEQ ID NO: 2499548 - RNA, 19 nt, Artificial Sequence
  Description of Artificial Sequence: Synthetic oligonucleotide
gcugaucgcacggccgaug

SEQ ID NO: 2499549 - RNA, 19 nt, Artificial Sequence
  Description of Artificial Sequence: Synthetic oligonucleotide
gccgcgacagccacuggac

SEQ ID NO: 2499550 - RNA, 19 nt, Artificial Sequence
  Description of Artificial Sequence: Synthetic oligonucleotide
gccgaugccgcuaccggca

SEQ ID NO: 2499551 - RNA, 19 nt, Artificial Sequence
  Description of Artificial Sequence: Synthetic oligonucleotide
cccaaucacucccgcuuug

SEQ ID NO: 2499552 - RNA, 19 nt, Artificial Sequence
  Description of Artificial Sequence: Synthetic oligonucleotide
agcucgcgcgcugcagucu

SEQ ID NO: 2499553 - RNA, 19 nt, Artificial Sequence
  Description of Artificial Sequence: Synthetic oligonucleotide
ggcguccaagcucgcgcgc

SEQ ID NO: 2499554 - RNA, 19 nt, Artificial Sequence
  Description of Artificial Sequence: Synthetic oligonucleotide
caaugaugcuacugauauu

SEQ ID NO: 2499555 - RNA, 19 nt, Artificial Sequence
  Description of Artificial Sequence: Synthetic oligonucleotide
cugggaggacugaguuaca

SEQ ID NO: 2499556 - RNA, 19 nt, Artificial Sequence
  Description of Artificial Sequence: Synthetic oligonucleotide
cucuugcgccaggcgcacg

SEQ ID NO: 2499557 - RNA, 19 nt, Artificial Sequence
  Description of Artificial Sequence: Synthetic oligonucleotide
guggccccugugauguauc

SEQ ID NO: 2499558 - RNA, 19 nt, Artificial Sequence
  Description of Artificial Sequence: Synthetic oligonucleotide
gagccggagcugagacgcc

SEQ ID NO: 2499559 - RNA, 19 nt, Artificial Sequence
  Description of Artificial Sequence: Synthetic oligonucleotide
ucgcucccggggccgccca

SEQ ID NO: 2499560 - RNA, 19 nt, Artificial Sequence
  Description of Artificial Sequence: Synthetic oligonucleotide
cccucuugcgccaggcgca

SEQ ID NO: 2499561 - RNA, 19 nt, Artificial Sequence
  Description of Artificial Sequence: Synthetic oligonucleotide
cucgcucccggggccgccc

SEQ ID NO: 2499562 - RNA, 19 nt, Artificial Sequence
  Description of Artificial Sequence: Synthetic oligonucleotide
gugccgcugccccguccag

SEQ ID NO: 2499563 - RNA, 19 nt, Artificial Sequence
  Description of Artificial Sequence: Synthetic oligonucleotide
ccaggcgcacgcugaucgc

SEQ ID NO: 2499564 - RNA, 19 nt, Artificial Sequence
  Description of Artificial Sequence: Synthetic oligonucleotide
gcuaugacucugucccagu

SEQ ID NO: 2499565 - RNA, 19 nt, Artificial Sequence
  Description of Artificial Sequence: Synthetic oligonucleotide
gcacgguguccugugccgc

SEQ ID NO: 2499566 - RNA, 19 nt, Artificial Sequence
  Description of Artificial Sequence: Synthetic oligonucleotide
cgugcuucccgcgcggcgc

SEQ ID NO: 2499567 - RNA, 19 nt, Artificial Sequence
  Description of Artificial Sequence: Synthetic oligonucleotide
cacggccgaugccgcuacc

SEQ ID NO: 2499568 - RNA, 19 nt, Artificial Sequence
  Description of Artificial Sequence: Synthetic oligonucleotide
agcaggcgccuggcugcgg

SEQ ID NO: 2499569 - RNA, 19 nt, Artificial Sequence
  Description of Artificial Sequence: Synthetic oligonucleotide
ccgcaucugccacauccuc

SEQ ID NO: 2499570 - RNA, 19 nt, Artificial Sequence
  Description of Artificial Sequence: Synthetic oligonucleotide
gguugacagcuaugacucu

SEQ ID NO: 2499571 - RNA, 19 nt, Artificial Sequence
  Description of Artificial Sequence: Synthetic oligonucleotide
cgcgcugcagucuggguga

SEQ ID NO: 2499572 - RNA, 19 nt, Artificial Sequence
  Description of Artificial Sequence: Synthetic oligonucleotide
ccaagcucgcgcgcugcag

SEQ ID NO: 2499573 - RNA, 19 nt, Artificial Sequence
  Description of Artificial Sequence: Synthetic oligonucleotide
ccaugugucccaacggaau

SEQ ID NO: 2499574 - RNA, 19 nt, Artificial Sequence
  Description of Artificial Sequence: Synthetic oligonucleotide
cggagccggagcugagacg

SEQ ID NO: 2499575 - RNA, 19 nt, Artificial Sequence
  Description of Artificial Sequence: Synthetic oligonucleotide
ggcgcccucuugcgccagg

SEQ ID NO: 2499576 - RNA, 19 nt, Artificial Sequence
  Description of Artificial Sequence: Synthetic oligonucleotide
cacgguguccugugccgcu

SEQ ID NO: 2499577 - RNA, 19 nt, Artificial Sequence
  Description of Artificial Sequence: Synthetic oligonucleotide
gcacggccgaugccgcuac

SEQ ID NO: 2499578 - RNA, 19 nt, Artificial Sequence
  Description of Artificial Sequence: Synthetic oligonucleotide
cggccgaugccgcuaccgg

SEQ ID NO: 2499579 - RNA, 19 nt, Artificial Sequence
  Description of Artificial Sequence: Synthetic oligonucleotide
guccaauauuccccaccuu

SEQ ID NO: 2499580 - RNA, 19 nt, Artificial Sequence
  Description of Artificial Sequence: Synthetic oligonucleotide
ccccguccaggucgcaggc

SEQ ID NO: 2499581 - RNA, 19 nt, Artificial Sequence
  Description of Artificial Sequence: Synthetic oligonucleotide
cacucccgcuuuggaggac

SEQ ID NO: 2499582 - RNA, 19 nt, Artificial Sequence
  Description of Artificial Sequence: Synthetic oligonucleotide
cccggggccgcccagcaga

SEQ ID NO: 2499583 - RNA, 19 nt, Artificial Sequence
  Description of Artificial Sequence: Synthetic oligonucleotide
cuugcuccagcaggcgccu

SEQ ID NO: 2499584 - RNA, 19 nt, Artificial Sequence
  Description of Artificial Sequence: Synthetic oligonucleotide
ggacugaguuacaucggau

SEQ ID NO: 2499585 - RNA, 19 nt, Artificial Sequence
  Description of Artificial Sequence: Synthetic oligonucleotide
cucccggggccgcccagca

SEQ ID NO: 2499586 - RNA, 19 nt, Artificial Sequence
  Description of Artificial Sequence: Synthetic oligonucleotide
ccaccuuuccaaugaugcu

SEQ ID NO: 2499587 - RNA, 19 nt, Artificial Sequence
  Description of Artificial Sequence: Synthetic oligonucleotide
ggccccugugauguaucca

SEQ ID NO: 2499588 - RNA, 19 nt, Artificial Sequence
  Description of Artificial Sequence: Synthetic oligonucleotide
gcugccccguccaggucgc

SEQ ID NO: 2499589 - RNA, 19 nt, Artificial Sequence
  Description of Artificial Sequence: Synthetic oligonucleotide
ccggagcugagacgccaug

SEQ ID NO: 2499590 - RNA, 19 nt, Artificial Sequence
  Description of Artificial Sequence: Synthetic oligonucleotide
cagacgcacgguguccugu

SEQ ID NO: 2499591 - RNA, 19 nt, Artificial Sequence
  Description of Artificial Sequence: Synthetic oligonucleotide
ggaggacgcauaauuuguu

SEQ ID NO: 2499592 - RNA, 19 nt, Artificial Sequence
  Description of Artificial Sequence: Synthetic oligonucleotide
cggccugcgacacguccgc

SEQ ID NO: 2499593 - RNA, 19 nt, Artificial Sequence
  Description of Artificial Sequence: Synthetic oligonucleotide
gaguuacaucggaucccau

SEQ ID NO: 2499594 - RNA, 19 nt, Artificial Sequence
  Description of Artificial Sequence: Synthetic oligonucleotide
ccgaugccgcuaccggcac

SEQ ID NO: 2499595 - RNA, 19 nt, Artificial Sequence
  Description of Artificial Sequence: Synthetic oligonucleotide
augccgcuaccggcaccug

SEQ ID NO: 2499596 - RNA, 19 nt, Artificial Sequence
  Description of Artificial Sequence: Synthetic oligonucleotide
cgcacgcugaucgcacggc

SEQ ID NO: 2499597 - RNA, 19 nt, Artificial Sequence
  Description of Artificial Sequence: Synthetic oligonucleotide
cccguccaggucgcaggcg

SEQ ID NO: 2499598 - RNA, 19 nt, Artificial Sequence
  Description of Artificial Sequence: Synthetic oligonucleotide
gcggagcggagccggagcu

SEQ ID NO: 2499599 - RNA, 19 nt, Artificial Sequence
  Description of Artificial Sequence: Synthetic oligonucleotide
cguccaagcucgcgcgcug

SEQ ID NO: 2499600 - RNA, 19 nt, Artificial Sequence
  Description of Artificial Sequence: Synthetic oligonucleotide
ccucuugcgccaggcgcac

SEQ ID NO: 2499601 - RNA, 19 nt, Artificial Sequence
  Description of Artificial Sequence: Synthetic oligonucleotide
gccgcccagcagacgcacg

SEQ ID NO: 2499602 - RNA, 19 nt, Artificial Sequence
  Description of Artificial Sequence: Synthetic oligonucleotide
cgcuaccggcaccugugac

SEQ ID NO: 2499603 - RNA, 19 nt, Artificial Sequence
  Description of Artificial Sequence: Synthetic oligonucleotide
gcgcccucuugcgccaggc

SEQ ID NO: 2499604 - RNA, 19 nt, Artificial Sequence
  Description of Artificial Sequence: Synthetic oligonucleotide
gcccucgcucccggggccg

SEQ ID NO: 2499605 - RNA, 19 nt, Artificial Sequence
  Description of Artificial Sequence: Synthetic oligonucleotide
gccaagaaugcgaccgcau

SEQ ID NO: 2499606 - RNA, 19 nt, Artificial Sequence
  Description of Artificial Sequence: Synthetic oligonucleotide
gcucccggggccgcccagc

SEQ ID NO: 2499607 - RNA, 19 nt, Artificial Sequence
  Description of Artificial Sequence: Synthetic oligonucleotide
cguccgccuggaaggcagc

SEQ ID NO: 2499608 - RNA, 19 nt, Artificial Sequence
  Description of Artificial Sequence: Synthetic oligonucleotide
cgaugccgcuaccggcacc

SEQ ID NO: 2499609 - RNA, 19 nt, Artificial Sequence
  Description of Artificial Sequence: Synthetic oligonucleotide
cgagaaaagcaggccugca

SEQ ID NO: 2499610 - RNA, 19 nt, Artificial Sequence
  Description of Artificial Sequence: Synthetic oligonucleotide
ccgcgacagccacuggaca

SEQ ID NO: 2499611 - RNA, 19 nt, Artificial Sequence
  Description of Artificial Sequence: Synthetic oligonucleotide
ggccagcgcggagcggagc

SEQ ID NO: 2499612 - RNA, 19 nt, Artificial Sequence
  Description of Artificial Sequence: Synthetic oligonucleotide
gcccaaucacucccgcuuu

SEQ ID NO: 2499613 - RNA, 19 nt, Artificial Sequence
  Description of Artificial Sequence: Synthetic oligonucleotide
ccggggccgcccagcagac

SEQ ID NO: 2499614 - RNA, 19 nt, Artificial Sequence
  Description of Artificial Sequence: Synthetic oligonucleotide
ggccugcgacacguccgcc

SEQ ID NO: 2499615 - RNA, 19 nt, Artificial Sequence
  Description of Artificial Sequence: Synthetic oligonucleotide
cuugcgccaggcgcacgcu

SEQ ID NO: 2499616 - RNA, 19 nt, Artificial Sequence
  Description of Artificial Sequence: Synthetic oligonucleotide
gcggcggccugcgacacgu

SEQ ID NO: 2499617 - RNA, 19 nt, Artificial Sequence
  Description of Artificial Sequence: Synthetic oligonucleotide
gcgcugcagucugggugag

SEQ ID NO: 2499618 - RNA, 19 nt, Artificial Sequence
  Description of Artificial Sequence: Synthetic oligonucleotide
cccgcuuuggaggacgcau

SEQ ID NO: 2499619 - RNA, 19 nt, Artificial Sequence
  Description of Artificial Sequence: Synthetic oligonucleotide
gcguccaagcucgcgcgcu

SEQ ID NO: 2499620 - RNA, 19 nt, Artificial Sequence
  Description of Artificial Sequence: Synthetic oligonucleotide
ccgcuaccggcaccuguga

SEQ ID NO: 2499621 - RNA, 19 nt, Artificial Sequence
  Description of Artificial Sequence: Synthetic oligonucleotide
cgacagauggcgggcgaga

SEQ ID NO: 2499622 - RNA, 19 nt, Artificial Sequence
  Description of Artificial Sequence: Synthetic oligonucleotide
cgcgugugaugcccgcaca

SEQ ID NO: 2499623 - RNA, 19 nt, Artificial Sequence
  Description of Artificial Sequence: Synthetic oligonucleotide
ccugugccgcugccccguc

SEQ ID NO: 2499624 - RNA, 19 nt, Artificial Sequence
  Description of Artificial Sequence: Synthetic oligonucleotide
gcgacacguccgccuggaa

SEQ ID NO: 2499625 - RNA, 19 nt, Artificial Sequence
  Description of Artificial Sequence: Synthetic oligonucleotide
cagucugggugagcccaau

SEQ ID NO: 2499626 - RNA, 19 nt, Artificial Sequence
  Description of Artificial Sequence: Synthetic oligonucleotide
ccacggcggcgcccucuug

SEQ ID NO: 2499627 - RNA, 19 nt, Artificial Sequence
  Description of Artificial Sequence: Synthetic oligonucleotide
gccggagcugagacgccau

SEQ ID NO: 2499628 - RNA, 19 nt, Artificial Sequence
  Description of Artificial Sequence: Synthetic oligonucleotide
gcgccaggcgcacgcugau

SEQ ID NO: 2499629 - RNA, 19 nt, Artificial Sequence
  Description of Artificial Sequence: Synthetic oligonucleotide
cugccccguccaggucgca

SEQ ID NO: 2499630 - RNA, 19 nt, Artificial Sequence
  Description of Artificial Sequence: Synthetic oligonucleotide
cggggccgcccagcagacg

SEQ ID NO: 2499631 - RNA, 19 nt, Artificial Sequence
  Description of Artificial Sequence: Synthetic oligonucleotide
cgcacggccgaugccgcua

SEQ ID NO: 2499632 - RNA, 19 nt, Artificial Sequence
  Description of Artificial Sequence: Synthetic oligonucleotide
cgaccgcaucugccacauc

SEQ ID NO: 2499633 - RNA, 19 nt, Artificial Sequence
  Description of Artificial Sequence: Synthetic oligonucleotide
cggcggccugcgacacguc

SEQ ID NO: 2499634 - RNA, 19 nt, Artificial Sequence
  Description of Artificial Sequence: Synthetic oligonucleotide
cggcgcccucuugcgccag

SEQ ID NO: 2499635 - RNA, 19 nt, Artificial Sequence
  Description of Artificial Sequence: Synthetic oligonucleotide
cgcgcgcugcagucugggu

SEQ ID NO: 2499636 - RNA, 19 nt, Artificial Sequence
  Description of Artificial Sequence: Synthetic oligonucleotide
cggaucccauggcguccaa

SEQ ID NO: 2499637 - RNA, 19 nt, Artificial Sequence
  Description of Artificial Sequence: Synthetic oligonucleotide
cgcccagcagacgcacggu

SEQ ID NO: 2499638 - RNA, 19 nt, Artificial Sequence
  Description of Artificial Sequence: Synthetic oligonucleotide
cgcugaucgcacggccgau

SEQ ID NO: 2499639 - RNA, 19 nt, Artificial Sequence
  Description of Artificial Sequence: Synthetic oligonucleotide
agaucaaacacacaaauuc

SEQ ID NO: 2499640 - RNA, 19 nt, Artificial Sequence
  Description of Artificial Sequence: Synthetic oligonucleotide
uuuuaagagaaguauacag

SEQ ID NO: 2499641 - RNA, 19 nt, Artificial Sequence
  Description of Artificial Sequence: Synthetic oligonucleotide
aaauauuucucacgaaagg

SEQ ID NO: 2499642 - RNA, 19 nt, Artificial Sequence
  Description of Artificial Sequence: Synthetic oligonucleotide
aauucaagggcaucuauuc

SEQ ID NO: 2499643 - RNA, 19 nt, Artificial Sequence
  Description of Artificial Sequence: Synthetic oligonucleotide
ucaaauauagacuuggcac

SEQ ID NO: 2499644 - RNA, 19 nt, Artificial Sequence
  Description of Artificial Sequence: Synthetic oligonucleotide
aagaauccaaaauggagac

SEQ ID NO: 2499645 - RNA, 19 nt, Artificial Sequence
  Description of Artificial Sequence: Synthetic oligonucleotide
uguuacaccacuaaaauau

SEQ ID NO: 2499646 - RNA, 19 nt, Artificial Sequence
  Description of Artificial Sequence: Synthetic oligonucleotide
aauuuaacaagguucaaaa

SEQ ID NO: 2499647 - RNA, 19 nt, Artificial Sequence
  Description of Artificial Sequence: Synthetic oligonucleotide
auaauuuucauucuuggcu

SEQ ID NO: 2499648 - RNA, 19 nt, Artificial Sequence
  Description of Artificial Sequence: Synthetic oligonucleotide
aaauggcagaaauucaagg

SEQ ID NO: 2499649 - RNA, 19 nt, Artificial Sequence
  Description of Artificial Sequence: Synthetic oligonucleotide
uaagaauccaaaauggaga

SEQ ID NO: 2499650 - RNA, 19 nt, Artificial Sequence
  Description of Artificial Sequence: Synthetic oligonucleotide
ugcuaagaauccaaaaugg

SEQ ID NO: 2499651 - RNA, 19 nt, Artificial Sequence
  Description of Artificial Sequence: Synthetic oligonucleotide
uccauugugaucaagcgcc

SEQ ID NO: 2499652 - RNA, 19 nt, Artificial Sequence
  Description of Artificial Sequence: Synthetic oligonucleotide
uuaacaagguucaaaagac

SEQ ID NO: 2499653 - RNA, 19 nt, Artificial Sequence
  Description of Artificial Sequence: Synthetic oligonucleotide
uaaaacaaagaccauuuga

SEQ ID NO: 2499654 - RNA, 19 nt, Artificial Sequence
  Description of Artificial Sequence: Synthetic oligonucleotide
ugaauguagaaaaggaacc

SEQ ID NO: 2499655 - RNA, 19 nt, Artificial Sequence
  Description of Artificial Sequence: Synthetic oligonucleotide
aaauucacauccaaaaguc

SEQ ID NO: 2499656 - RNA, 19 nt, Artificial Sequence
  Description of Artificial Sequence: Synthetic oligonucleotide
ucaauuucgauugauagca

SEQ ID NO: 2499657 - RNA, 19 nt, Artificial Sequence
  Description of Artificial Sequence: Synthetic oligonucleotide
uucuagaucaaacacacaa

SEQ ID NO: 2499658 - RNA, 19 nt, Artificial Sequence
  Description of Artificial Sequence: Synthetic oligonucleotide
auucaauuucgauugauag

SEQ ID NO: 2499659 - RNA, 19 nt, Artificial Sequence
  Description of Artificial Sequence: Synthetic oligonucleotide
ugugguuucuuuaaguuca

SEQ ID NO: 2499660 - RNA, 19 nt, Artificial Sequence
  Description of Artificial Sequence: Synthetic oligonucleotide
cacgaaaggaauuaugacg

SEQ ID NO: 2499661 - RNA, 19 nt, Artificial Sequence
  Description of Artificial Sequence: Synthetic oligonucleotide
aauuaugacguugguaugg

SEQ ID NO: 2499662 - RNA, 19 nt, Artificial Sequence
  Description of Artificial Sequence: Synthetic oligonucleotide
gucaauguuuuauuaaacg

SEQ ID NO: 2499663 - RNA, 19 nt, Artificial Sequence
  Description of Artificial Sequence: Synthetic oligonucleotide
ugaaucuuuauuuuauaug

SEQ ID NO: 2499664 - RNA, 19 nt, Artificial Sequence
  Description of Artificial Sequence: Synthetic oligonucleotide
aauaucuucagagggaaug

SEQ ID NO: 2499665 - RNA, 19 nt, Artificial Sequence
  Description of Artificial Sequence: Synthetic oligonucleotide
cuuuauuuuauauguagac

SEQ ID NO: 2499666 - RNA, 19 nt, Artificial Sequence
  Description of Artificial Sequence: Synthetic oligonucleotide
uaaguuucaugauuguuag

SEQ ID NO: 2499667 - RNA, 19 nt, Artificial Sequence
  Description of Artificial Sequence: Synthetic oligonucleotide
aauagucucuaaaacaaag

SEQ ID NO: 2499668 - RNA, 19 nt, Artificial Sequence
  Description of Artificial Sequence: Synthetic oligonucleotide
ucaauguuuuauuaaacgu

SEQ ID NO: 2499669 - RNA, 19 nt, Artificial Sequence
  Description of Artificial Sequence: Synthetic oligonucleotide
uguuuuauuaaacguguga

SEQ ID NO: 2499670 - RNA, 19 nt, Artificial Sequence
  Description of Artificial Sequence: Synthetic oligonucleotide
uuuuguuacaccacuaaaa

SEQ ID NO: 2499671 - RNA, 19 nt, Artificial Sequence
  Description of Artificial Sequence: Synthetic oligonucleotide
aaguauacagcuccucggg

SEQ ID NO: 2499672 - RNA, 19 nt, Artificial Sequence
  Description of Artificial Sequence: Synthetic oligonucleotide
aaaggaauuaugacguugg

SEQ ID NO: 2499673 - RNA, 19 nt, Artificial Sequence
  Description of Artificial Sequence: Synthetic oligonucleotide
acauaauuuucauucuugg

SEQ ID NO: 2499674 - RNA, 19 nt, Artificial Sequence
  Description of Artificial Sequence: Synthetic oligonucleotide
uuuauuaaacgugugaauc

SEQ ID NO: 2499675 - RNA, 19 nt, Artificial Sequence
  Description of Artificial Sequence: Synthetic oligonucleotide
uaugacguugguauggcag

SEQ ID NO: 2499676 - RNA, 19 nt, Artificial Sequence
  Description of Artificial Sequence: Synthetic oligonucleotide
cugaauguagaaaaggaac

SEQ ID NO: 2499677 - RNA, 19 nt, Artificial Sequence
  Description of Artificial Sequence: Synthetic oligonucleotide
aauguuuuauuaaacgugu

SEQ ID NO: 2499678 - RNA, 19 nt, Artificial Sequence
  Description of Artificial Sequence: Synthetic oligonucleotide
uauucuuucucgauuguca

SEQ ID NO: 2499679 - RNA, 19 nt, Artificial Sequence
  Description of Artificial Sequence: Synthetic oligonucleotide
uuuguuacaccacuaaaau

SEQ ID NO: 2499680 - RNA, 19 nt, Artificial Sequence
  Description of Artificial Sequence: Synthetic oligonucleotide
uuccauaaaaugcuuauuc

SEQ ID NO: 2499681 - RNA, 19 nt, Artificial Sequence
  Description of Artificial Sequence: Synthetic oligonucleotide
uuuccauugugaucaagcg

SEQ ID NO: 2499682 - RNA, 19 nt, Artificial Sequence
  Description of Artificial Sequence: Synthetic oligonucleotide
aaauauagacuuggcacac

SEQ ID NO: 2499683 - RNA, 19 nt, Artificial Sequence
  Description of Artificial Sequence: Synthetic oligonucleotide
aguucaaauauagacuugg

SEQ ID NO: 2499684 - RNA, 19 nt, Artificial Sequence
  Description of Artificial Sequence: Synthetic oligonucleotide
gacacaucaaaauagucuc

SEQ ID NO: 2499685 - RNA, 19 nt, Artificial Sequence
  Description of Artificial Sequence: Synthetic oligonucleotide
uucucgauugucaacauaa

SEQ ID NO: 2499686 - RNA, 19 nt, Artificial Sequence
  Description of Artificial Sequence: Synthetic oligonucleotide
aauuuucauucuuggcugg

SEQ ID NO: 2499687 - RNA, 19 nt, Artificial Sequence
  Description of Artificial Sequence: Synthetic oligonucleotide
uagucucuaaaacaaagac

SEQ ID NO: 2499688 - RNA, 19 nt, Artificial Sequence
  Description of Artificial Sequence: Synthetic oligonucleotide
gaaguauacagcuccucgg

SEQ ID NO: 2499689 - RNA, 19 nt, Artificial Sequence
  Description of Artificial Sequence: Synthetic oligonucleotide
aaaauggagacuuuucaua

SEQ ID NO: 2499690 - RNA, 19 nt, Artificial Sequence
  Description of Artificial Sequence: Synthetic oligonucleotide
aaugcuuauucuuucucga

SEQ ID NO: 2499691 - RNA, 19 nt, Artificial Sequence
  Description of Artificial Sequence: Synthetic oligonucleotide
uuauuaaacgugugaaucu

SEQ ID NO: 2499692 - RNA, 19 nt, Artificial Sequence
  Description of Artificial Sequence: Synthetic oligonucleotide
agucucuaaaacaaagacc

SEQ ID NO: 2499693 - RNA, 19 nt, Artificial Sequence
  Description of Artificial Sequence: Synthetic oligonucleotide
auaguucaaauauagacuu

SEQ ID NO: 2499694 - RNA, 19 nt, Artificial Sequence
  Description of Artificial Sequence: Synthetic oligonucleotide
uuuauuuuauauguagacu

SEQ ID NO: 2499695 - RNA, 19 nt, Artificial Sequence
  Description of Artificial Sequence: Synthetic oligonucleotide
gucucuaaaacaaagacca

SEQ ID NO: 2499696 - RNA, 19 nt, Artificial Sequence
  Description of Artificial Sequence: Synthetic oligonucleotide
uucaauuucgauugauagc

SEQ ID NO: 2499697 - RNA, 19 nt, Artificial Sequence
  Description of Artificial Sequence: Synthetic oligonucleotide
aguuccuugcaauaucuuc

SEQ ID NO: 2499698 - RNA, 19 nt, Artificial Sequence
  Description of Artificial Sequence: Synthetic oligonucleotide
aacgugugaaucuuuauuu

SEQ ID NO: 2499699 - RNA, 19 nt, Artificial Sequence
  Description of Artificial Sequence: Synthetic oligonucleotide
agaaaaugaucacucagca

SEQ ID NO: 2499700 - RNA, 19 nt, Artificial Sequence
  Description of Artificial Sequence: Synthetic oligonucleotide
uauuuuauauguagacucu

SEQ ID NO: 2499701 - RNA, 19 nt, Artificial Sequence
  Description of Artificial Sequence: Synthetic oligonucleotide
augauuguuagugaacugg

SEQ ID NO: 2499702 - RNA, 19 nt, Artificial Sequence
  Description of Artificial Sequence: Synthetic oligonucleotide
cagaaaaugaucacucagc

SEQ ID NO: 2499703 - RNA, 19 nt, Artificial Sequence
  Description of Artificial Sequence: Synthetic oligonucleotide
agagggaaugcuaagaauc

SEQ ID NO: 2499704 - RNA, 19 nt, Artificial Sequence
  Description of Artificial Sequence: Synthetic oligonucleotide
guugguauggcagaaaaug

SEQ ID NO: 2499705 - RNA, 19 nt, Artificial Sequence
  Description of Artificial Sequence: Synthetic oligonucleotide
ugaucaagcgccuugcugu

SEQ ID NO: 2499706 - RNA, 19 nt, Artificial Sequence
  Description of Artificial Sequence: Synthetic oligonucleotide
uuuauauguagacucugaa

SEQ ID NO: 2499707 - RNA, 19 nt, Artificial Sequence
  Description of Artificial Sequence: Synthetic oligonucleotide
cacuaaaauauuucucacg

SEQ ID NO: 2499708 - RNA, 19 nt, Artificial Sequence
  Description of Artificial Sequence: Synthetic oligonucleotide
ugauuguuagugaacuggc

SEQ ID NO: 2499709 - RNA, 19 nt, Artificial Sequence
  Description of Artificial Sequence: Synthetic oligonucleotide
ucugaauguagaaaaggaa

SEQ ID NO: 2499710 - RNA, 19 nt, Artificial Sequence
  Description of Artificial Sequence: Synthetic oligonucleotide
uuuuaaaacagcacagguu

SEQ ID NO: 2499711 - RNA, 19 nt, Artificial Sequence
  Description of Artificial Sequence: Synthetic oligonucleotide
uuuuccaugaccccauagu

SEQ ID NO: 2499712 - RNA, 19 nt, Artificial Sequence
  Description of Artificial Sequence: Synthetic oligonucleotide
aauggagacuuuucauaag

SEQ ID NO: 2499713 - RNA, 19 nt, Artificial Sequence
  Description of Artificial Sequence: Synthetic oligonucleotide
uucauuaaguuccuugcaa

SEQ ID NO: 2499714 - RNA, 19 nt, Artificial Sequence
  Description of Artificial Sequence: Synthetic oligonucleotide
uuucauaaguuucaugauu

SEQ ID NO: 2499715 - RNA, 19 nt, Artificial Sequence
  Description of Artificial Sequence: Synthetic oligonucleotide
aacagugauaguaaagacu

SEQ ID NO: 2499716 - RNA, 19 nt, Artificial Sequence
  Description of Artificial Sequence: Synthetic oligonucleotide
uccauaaaaugcuuauucu

SEQ ID NO: 2499717 - RNA, 19 nt, Artificial Sequence
  Description of Artificial Sequence: Synthetic oligonucleotide
uaaguuccuugcaauaucu

SEQ ID NO: 2499718 - RNA, 19 nt, Artificial Sequence
  Description of Artificial Sequence: Synthetic oligonucleotide
aaacgugugaaucuuuauu

SEQ ID NO: 2499719 - RNA, 19 nt, Artificial Sequence
  Description of Artificial Sequence: Synthetic oligonucleotide
auaucuucagagggaaugc

SEQ ID NO: 2499720 - RNA, 19 nt, Artificial Sequence
  Description of Artificial Sequence: Synthetic oligonucleotide
guccguuucauuaaguucc

SEQ ID NO: 2499721 - RNA, 19 nt, Artificial Sequence
  Description of Artificial Sequence: Synthetic oligonucleotide
aauacuggucucuguucuc

SEQ ID NO: 2499722 - RNA, 19 nt, Artificial Sequence
  Description of Artificial Sequence: Synthetic oligonucleotide
agacuuggcacacacuguc

SEQ ID NO: 2499723 - RNA, 19 nt, Artificial Sequence
  Description of Artificial Sequence: Synthetic oligonucleotide
aauuucgauugauagcaau

SEQ ID NO: 2499724 - RNA, 19 nt, Artificial Sequence
  Description of Artificial Sequence: Synthetic oligonucleotide
uuucauuaaguuccuugca

SEQ ID NO: 2499725 - RNA, 19 nt, Artificial Sequence
  Description of Artificial Sequence: Synthetic oligonucleotide
ugcaauaucuucagaggga

SEQ ID NO: 2499726 - RNA, 19 nt, Artificial Sequence
  Description of Artificial Sequence: Synthetic oligonucleotide
agaccauuugaaauuauuc

SEQ ID NO: 2499727 - RNA, 19 nt, Artificial Sequence
  Description of Artificial Sequence: Synthetic oligonucleotide
ucuucuugagucaauguuu

SEQ ID NO: 2499728 - RNA, 19 nt, Artificial Sequence
  Description of Artificial Sequence: Synthetic oligonucleotide
uucaagggcaucuauucgu

SEQ ID NO: 2499729 - RNA, 19 nt, Artificial Sequence
  Description of Artificial Sequence: Synthetic oligonucleotide
uauuucucacgaaaggaau

SEQ ID NO: 2499730 - RNA, 19 nt, Artificial Sequence
  Description of Artificial Sequence: Synthetic oligonucleotide
ucuagaucaaacacacaaa

SEQ ID NO: 2499731 - RNA, 19 nt, Artificial Sequence
  Description of Artificial Sequence: Synthetic oligonucleotide
ucaacauaauuuucauucu

SEQ ID NO: 2499732 - RNA, 19 nt, Artificial Sequence
  Description of Artificial Sequence: Synthetic oligonucleotide
auugucaacauaauuuuca

SEQ ID NO: 2499733 - RNA, 19 nt, Artificial Sequence
  Description of Artificial Sequence: Synthetic oligonucleotide
ucuucagagggaaugcuaa

SEQ ID NO: 2499734 - RNA, 19 nt, Artificial Sequence
  Description of Artificial Sequence: Synthetic oligonucleotide
ugagucaauguuuuauuaa

SEQ ID NO: 2499735 - RNA, 19 nt, Artificial Sequence
  Description of Artificial Sequence: Synthetic oligonucleotide
auuaugacguugguauggc

SEQ ID NO: 2499736 - RNA, 19 nt, Artificial Sequence
  Description of Artificial Sequence: Synthetic oligonucleotide
uggcagaaauucaagggca

SEQ ID NO: 2499737 - RNA, 19 nt, Artificial Sequence
  Description of Artificial Sequence: Synthetic oligonucleotide
uugauagcaauuauuuauu

SEQ ID NO: 2499738 - RNA, 19 nt, Artificial Sequence
  Description of Artificial Sequence: Synthetic oligonucleotide
ucucacgaaaggaauuaug

SEQ ID NO: 2499739 - RNA, 19 nt, Artificial Sequence
  Description of Artificial Sequence: Synthetic oligonucleotide
uguagacucugaauguaga

SEQ ID NO: 2499740 - RNA, 19 nt, Artificial Sequence
  Description of Artificial Sequence: Synthetic oligonucleotide
auggagacuuuucauaagu

SEQ ID NO: 2499741 - RNA, 19 nt, Artificial Sequence
  Description of Artificial Sequence: Synthetic oligonucleotide
uuaaacgugugaaucuuua

SEQ ID NO: 2499742 - RNA, 19 nt, Artificial Sequence
  Description of Artificial Sequence: Synthetic oligonucleotide
cacuuuuccuucaaauggc

SEQ ID NO: 2499743 - RNA, 19 nt, Artificial Sequence
  Description of Artificial Sequence: Synthetic oligonucleotide
agucaauguuuuauuaaac

SEQ ID NO: 2499744 - RNA, 19 nt, Artificial Sequence
  Description of Artificial Sequence: Synthetic oligonucleotide
acaccacuaaaauauuucu

SEQ ID NO: 2499745 - RNA, 19 nt, Artificial Sequence
  Description of Artificial Sequence: Synthetic oligonucleotide
agacacaucaaaauagucu

SEQ ID NO: 2499746 - RNA, 19 nt, Artificial Sequence
  Description of Artificial Sequence: Synthetic oligonucleotide
uucuucuugagucaauguu

SEQ ID NO: 2499747 - RNA, 19 nt, Artificial Sequence
  Description of Artificial Sequence: Synthetic oligonucleotide
acgaaaggaauuaugacgu

SEQ ID NO: 2499748 - RNA, 19 nt, Artificial Sequence
  Description of Artificial Sequence: Synthetic oligonucleotide
ucagagggaaugcuaagaa

SEQ ID NO: 2499749 - RNA, 19 nt, Artificial Sequence
  Description of Artificial Sequence: Synthetic oligonucleotide
cucacgaaaggaauuauga

SEQ ID NO: 2499750 - RNA, 19 nt, Artificial Sequence
  Description of Artificial Sequence: Synthetic oligonucleotide
ucacgaaaggaauuaugac

SEQ ID NO: 2499751 - RNA, 19 nt, Artificial Sequence
  Description of Artificial Sequence: Synthetic oligonucleotide
aaagcuucuggagaauaca

SEQ ID NO: 2499752 - RNA, 19 nt, Artificial Sequence
  Description of Artificial Sequence: Synthetic oligonucleotide
cagguuuucuagaucaaac

SEQ ID NO: 2499753 - RNA, 19 nt, Artificial Sequence
  Description of Artificial Sequence: Synthetic oligonucleotide
ugauaguaaagacuuuauu

SEQ ID NO: 2499754 - RNA, 19 nt, Artificial Sequence
  Description of Artificial Sequence: Synthetic oligonucleotide
guauacagcuccucgggag

SEQ ID NO: 2499755 - RNA, 19 nt, Artificial Sequence
  Description of Artificial Sequence: Synthetic oligonucleotide
gagucaauguuuuauuaaa

SEQ ID NO: 2499756 - RNA, 19 nt, Artificial Sequence
  Description of Artificial Sequence: Synthetic oligonucleotide
uuuccaugaccccauaguu

SEQ ID NO: 2499757 - RNA, 19 nt, Artificial Sequence
  Description of Artificial Sequence: Synthetic oligonucleotide
cauaguucaaauauagacu

SEQ ID NO: 2499758 - RNA, 19 nt, Artificial Sequence
  Description of Artificial Sequence: Synthetic oligonucleotide
gguuuucuagaucaaacac

SEQ ID NO: 2499759 - RNA, 19 nt, Artificial Sequence
  Description of Artificial Sequence: Synthetic oligonucleotide
ucgauugauagcaauuauu

SEQ ID NO: 2499760 - RNA, 19 nt, Artificial Sequence
  Description of Artificial Sequence: Synthetic oligonucleotide
uauacagcuccucgggaga

SEQ ID NO: 2499761 - RNA, 19 nt, Artificial Sequence
  Description of Artificial Sequence: Synthetic oligonucleotide
ucuugagucaauguuuuau

SEQ ID NO: 2499762 - RNA, 19 nt, Artificial Sequence
  Description of Artificial Sequence: Synthetic oligonucleotide
gaauuaugacguugguaug

SEQ ID NO: 2499763 - RNA, 19 nt, Artificial Sequence
  Description of Artificial Sequence: Synthetic oligonucleotide
uuccuugcaauaucuucag

SEQ ID NO: 2499764 - RNA, 19 nt, Artificial Sequence
  Description of Artificial Sequence: Synthetic oligonucleotide
uaagagaaguauacagcuc

SEQ ID NO: 2499765 - RNA, 19 nt, Artificial Sequence
  Description of Artificial Sequence: Synthetic oligonucleotide
ggaauuaugacguugguau

SEQ ID NO: 2499766 - RNA, 19 nt, Artificial Sequence
  Description of Artificial Sequence: Synthetic oligonucleotide
auuuuauauguagacucug

SEQ ID NO: 2499767 - RNA, 19 nt, Artificial Sequence
  Description of Artificial Sequence: Synthetic oligonucleotide
auuuuccaugaccccauag

SEQ ID NO: 2499768 - RNA, 19 nt, Artificial Sequence
  Description of Artificial Sequence: Synthetic oligonucleotide
ugacuggaaagcuucugga

SEQ ID NO: 2499769 - RNA, 19 nt, Artificial Sequence
  Description of Artificial Sequence: Synthetic oligonucleotide
uuguuagugaacuggccuc

SEQ ID NO: 2499770 - RNA, 19 nt, Artificial Sequence
  Description of Artificial Sequence: Synthetic oligonucleotide
guuuucuagaucaaacaca

SEQ ID NO: 2499771 - RNA, 19 nt, Artificial Sequence
  Description of Artificial Sequence: Synthetic oligonucleotide
auucacauccaaaaguccu

SEQ ID NO: 2499772 - RNA, 19 nt, Artificial Sequence
  Description of Artificial Sequence: Synthetic oligonucleotide
gaauacaugcugugguuuc

SEQ ID NO: 2499773 - RNA, 19 nt, Artificial Sequence
  Description of Artificial Sequence: Synthetic oligonucleotide
gagggaaugcuaagaaucc

SEQ ID NO: 2499774 - RNA, 19 nt, Artificial Sequence
  Description of Artificial Sequence: Synthetic oligonucleotide
uuucgauugauagcaauua

SEQ ID NO: 2499775 - RNA, 19 nt, Artificial Sequence
  Description of Artificial Sequence: Synthetic oligonucleotide
aaggaauuaugacguuggu

SEQ ID NO: 2499776 - RNA, 19 nt, Artificial Sequence
  Description of Artificial Sequence: Synthetic oligonucleotide
uagaucaaacacacaaauu

SEQ ID NO: 2499777 - RNA, 19 nt, Artificial Sequence
  Description of Artificial Sequence: Synthetic oligonucleotide
uugucaacauaauuuucau

SEQ ID NO: 2499778 - RNA, 19 nt, Artificial Sequence
  Description of Artificial Sequence: Synthetic oligonucleotide
auuaaguuccuugcaauau

SEQ ID NO: 2499779 - RNA, 19 nt, Artificial Sequence
  Description of Artificial Sequence: Synthetic oligonucleotide
ucauaaguuucaugauugu

SEQ ID NO: 2499780 - RNA, 19 nt, Artificial Sequence
  Description of Artificial Sequence: Synthetic oligonucleotide
uuacaccacuaaaauauuu

SEQ ID NO: 2499781 - RNA, 19 nt, Artificial Sequence
  Description of Artificial Sequence: Synthetic oligonucleotide
agugauaguaaagacuuua

SEQ ID NO: 2499782 - RNA, 19 nt, Artificial Sequence
  Description of Artificial Sequence: Synthetic oligonucleotide
uucgauugauagcaauuau

SEQ ID NO: 2499783 - RNA, 19 nt, Artificial Sequence
  Description of Artificial Sequence: Synthetic oligonucleotide
aaaugaucacucagcaggu

SEQ ID NO: 2499784 - RNA, 19 nt, Artificial Sequence
  Description of Artificial Sequence: Synthetic oligonucleotide
ucaagcgccuugcugugug

SEQ ID NO: 2499785 - RNA, 19 nt, Artificial Sequence
  Description of Artificial Sequence: Synthetic oligonucleotide
uguuagugaacuggccucc

SEQ ID NO: 2499786 - RNA, 19 nt, Artificial Sequence
  Description of Artificial Sequence: Synthetic oligonucleotide
ugcuuauucuuucucgauu

SEQ ID NO: 2499787 - RNA, 19 nt, Artificial Sequence
  Description of Artificial Sequence: Synthetic oligonucleotide
ugauagcaauuauuuauuu

SEQ ID NO: 2499788 - RNA, 19 nt, Artificial Sequence
  Description of Artificial Sequence: Synthetic oligonucleotide
uuguuacaccacuaaaaua

SEQ ID NO: 2499789 - RNA, 19 nt, Artificial Sequence
  Description of Artificial Sequence: Synthetic oligonucleotide
uauuaaacgugugaaucuu

SEQ ID NO: 2499790 - RNA, 19 nt, Artificial Sequence
  Description of Artificial Sequence: Synthetic oligonucleotide
aaauucaagggcaucuauu

SEQ ID NO: 2499791 - RNA, 19 nt, Artificial Sequence
  Description of Artificial Sequence: Synthetic oligonucleotide
aauacaugcugugguuucu

SEQ ID NO: 2499792 - RNA, 19 nt, Artificial Sequence
  Description of Artificial Sequence: Synthetic oligonucleotide
gagauuuuccaugacccca

SEQ ID NO: 2499793 - RNA, 19 nt, Artificial Sequence
  Description of Artificial Sequence: Synthetic oligonucleotide
uccaaacagugauaguaaa

SEQ ID NO: 2499794 - RNA, 19 nt, Artificial Sequence
  Description of Artificial Sequence: Synthetic oligonucleotide
auuauucaauuucgauuga

SEQ ID NO: 2499795 - RNA, 19 nt, Artificial Sequence
  Description of Artificial Sequence: Synthetic oligonucleotide
caccacuaaaauauuucuc

SEQ ID NO: 2499796 - RNA, 19 nt, Artificial Sequence
  Description of Artificial Sequence: Synthetic oligonucleotide
uauagacuuggcacacacu

SEQ ID NO: 2499797 - RNA, 19 nt, Artificial Sequence
  Description of Artificial Sequence: Synthetic oligonucleotide
gggagauuuuccaugaccc

SEQ ID NO: 2499798 - RNA, 19 nt, Artificial Sequence
  Description of Artificial Sequence: Synthetic oligonucleotide
gaccccauaguucaaauau

SEQ ID NO: 2499799 - RNA, 19 nt, Artificial Sequence
  Description of Artificial Sequence: Synthetic oligonucleotide
caugauuguuagugaacug

SEQ ID NO: 2499800 - RNA, 19 nt, Artificial Sequence
  Description of Artificial Sequence: Synthetic oligonucleotide
augacguugguauggcaga

SEQ ID NO: 2499801 - RNA, 19 nt, Artificial Sequence
  Description of Artificial Sequence: Synthetic oligonucleotide
uuucucacgaaaggaauua

SEQ ID NO: 2499802 - RNA, 19 nt, Artificial Sequence
  Description of Artificial Sequence: Synthetic oligonucleotide
aaauagucucuaaaacaaa

SEQ ID NO: 2499803 - RNA, 19 nt, Artificial Sequence
  Description of Artificial Sequence: Synthetic oligonucleotide
gaaagcuucuggagaauac

SEQ ID NO: 2499804 - RNA, 19 nt, Artificial Sequence
  Description of Artificial Sequence: Synthetic oligonucleotide
uuauucaauuucgauugau

SEQ ID NO: 2499805 - RNA, 19 nt, Artificial Sequence
  Description of Artificial Sequence: Synthetic oligonucleotide
auggcagaaaaugaucacu

SEQ ID NO: 2499806 - RNA, 19 nt, Artificial Sequence
  Description of Artificial Sequence: Synthetic oligonucleotide
uuauucuuucucgauuguc

SEQ ID NO: 2499807 - RNA, 19 nt, Artificial Sequence
  Description of Artificial Sequence: Synthetic oligonucleotide
uguaucagucccugaaauu

SEQ ID NO: 2499808 - RNA, 19 nt, Artificial Sequence
  Description of Artificial Sequence: Synthetic oligonucleotide
aguauacagcuccucggga

SEQ ID NO: 2499809 - RNA, 19 nt, Artificial Sequence
  Description of Artificial Sequence: Synthetic oligonucleotide
acucagcaggugugaauac

SEQ ID NO: 2499810 - RNA, 19 nt, Artificial Sequence
  Description of Artificial Sequence: Synthetic oligonucleotide
agacuuuucauaaguuuca

SEQ ID NO: 2499811 - RNA, 19 nt, Artificial Sequence
  Description of Artificial Sequence: Synthetic oligonucleotide
uaaacgugugaaucuuuau

SEQ ID NO: 2499812 - RNA, 19 nt, Artificial Sequence
  Description of Artificial Sequence: Synthetic oligonucleotide
cuggagaauacaugcugug

SEQ ID NO: 2499813 - RNA, 19 nt, Artificial Sequence
  Description of Artificial Sequence: Synthetic oligonucleotide
uauguagacucugaaugua

SEQ ID NO: 2499814 - RNA, 19 nt, Artificial Sequence
  Description of Artificial Sequence: Synthetic oligonucleotide
uuucuagaucaaacacaca

SEQ ID NO: 2499815 - RNA, 19 nt, Artificial Sequence
  Description of Artificial Sequence: Synthetic oligonucleotide
aggugugaauacuggucuc

SEQ ID NO: 2499816 - RNA, 19 nt, Artificial Sequence
  Description of Artificial Sequence: Synthetic oligonucleotide
aauauagacuuggcacaca

SEQ ID NO: 2499817 - RNA, 19 nt, Artificial Sequence
  Description of Artificial Sequence: Synthetic oligonucleotide
uaucagucccugaaauuua

SEQ ID NO: 2499818 - RNA, 19 nt, Artificial Sequence
  Description of Artificial Sequence: Synthetic oligonucleotide
gugaucaagcgccuugcug

SEQ ID NO: 2499819 - RNA, 19 nt, Artificial Sequence
  Description of Artificial Sequence: Synthetic oligonucleotide
aagaccauuugaaauuauu

SEQ ID NO: 2499820 - RNA, 19 nt, Artificial Sequence
  Description of Artificial Sequence: Synthetic oligonucleotide
aagguucaaaagacacauc

SEQ ID NO: 2499821 - RNA, 19 nt, Artificial Sequence
  Description of Artificial Sequence: Synthetic oligonucleotide
uucuuucucgauugucaac

SEQ ID NO: 2499822 - RNA, 19 nt, Artificial Sequence
  Description of Artificial Sequence: Synthetic oligonucleotide
cuucagagggaaugcuaag

SEQ ID NO: 2499823 - RNA, 19 nt, Artificial Sequence
  Description of Artificial Sequence: Synthetic oligonucleotide
acagcacagguuuucuaga

SEQ ID NO: 2499824 - RNA, 19 nt, Artificial Sequence
  Description of Artificial Sequence: Synthetic oligonucleotide
acguugguauggcagaaaa

SEQ ID NO: 2499825 - RNA, 19 nt, Artificial Sequence
  Description of Artificial Sequence: Synthetic oligonucleotide
agcaggugugaauacuggu

SEQ ID NO: 2499826 - RNA, 19 nt, Artificial Sequence
  Description of Artificial Sequence: Synthetic oligonucleotide
uugugaucaagcgccuugc

SEQ ID NO: 2499827 - RNA, 19 nt, Artificial Sequence
  Description of Artificial Sequence: Synthetic oligonucleotide
ucaagggcaucuauucguu

SEQ ID NO: 2499828 - RNA, 19 nt, Artificial Sequence
  Description of Artificial Sequence: Synthetic oligonucleotide
cagcaggugugaauacugg

SEQ ID NO: 2499829 - RNA, 19 nt, Artificial Sequence
  Description of Artificial Sequence: Synthetic oligonucleotide
cuagaucaaacacacaaau

SEQ ID NO: 2499830 - RNA, 19 nt, Artificial Sequence
  Description of Artificial Sequence: Synthetic oligonucleotide
uggagacuuuucauaaguu

SEQ ID NO: 2499831 - RNA, 19 nt, Artificial Sequence
  Description of Artificial Sequence: Synthetic oligonucleotide
gaucaagcgccuugcugug

SEQ ID NO: 2499832 - RNA, 19 nt, Artificial Sequence
  Description of Artificial Sequence: Synthetic oligonucleotide
ccccauaguucaaauauag

SEQ ID NO: 2499833 - RNA, 19 nt, Artificial Sequence
  Description of Artificial Sequence: Synthetic oligonucleotide
uuaugacguugguauggca

SEQ ID NO: 2499834 - RNA, 19 nt, Artificial Sequence
  Description of Artificial Sequence: Synthetic oligonucleotide
aagcgccuugcugugugac

SEQ ID NO: 2499835 - RNA, 19 nt, Artificial Sequence
  Description of Artificial Sequence: Synthetic oligonucleotide
ucagucccugaaauuuaac

SEQ ID NO: 2499836 - RNA, 19 nt, Artificial Sequence
  Description of Artificial Sequence: Synthetic oligonucleotide
aaguucacuuuuccuucaa

SEQ ID NO: 2499837 - RNA, 19 nt, Artificial Sequence
  Description of Artificial Sequence: Synthetic oligonucleotide
ucucuaaaacaaagaccau

SEQ ID NO: 2499838 - RNA, 19 nt, Artificial Sequence
  Description of Artificial Sequence: Synthetic oligonucleotide
uuucucgauugucaacaua

SEQ ID NO: 2499839 - RNA, 19 nt, Artificial Sequence
  Description of Artificial Sequence: Synthetic oligonucleotide
acaagguucaaaagacaca

SEQ ID NO: 2499840 - RNA, 19 nt, Artificial Sequence
  Description of Artificial Sequence: Synthetic oligonucleotide
auuucgauugauagcaauu

SEQ ID NO: 2499841 - RNA, 19 nt, Artificial Sequence
  Description of Artificial Sequence: Synthetic oligonucleotide
uccguuucauuaaguuccu

SEQ ID NO: 2499842 - RNA, 19 nt, Artificial Sequence
  Description of Artificial Sequence: Synthetic oligonucleotide
ucucgauugucaacauaau

SEQ ID NO: 2499843 - RNA, 19 nt, Artificial Sequence
  Description of Artificial Sequence: Synthetic oligonucleotide
uaucuucagagggaaugcu

SEQ ID NO: 2499844 - RNA, 19 nt, Artificial Sequence
  Description of Artificial Sequence: Synthetic oligonucleotide
agcuccucgggagauuuuc

SEQ ID NO: 2499845 - RNA, 19 nt, Artificial Sequence
  Description of Artificial Sequence: Synthetic oligonucleotide
ggagauuuuccaugacccc

SEQ ID NO: 2499846 - RNA, 19 nt, Artificial Sequence
  Description of Artificial Sequence: Synthetic oligonucleotide
cauuaaguuccuugcaaua

SEQ ID NO: 2499847 - RNA, 19 nt, Artificial Sequence
  Description of Artificial Sequence: Synthetic oligonucleotide
acgugugaaucuuuauuuu

SEQ ID NO: 2499848 - RNA, 19 nt, Artificial Sequence
  Description of Artificial Sequence: Synthetic oligonucleotide
aacuggccuccaaacagug

SEQ ID NO: 2499849 - RNA, 19 nt, Artificial Sequence
  Description of Artificial Sequence: Synthetic oligonucleotide
augcuuauucuuucucgau

SEQ ID NO: 2499850 - RNA, 19 nt, Artificial Sequence
  Description of Artificial Sequence: Synthetic oligonucleotide
auacuggucucuguucuca

SEQ ID NO: 2499851 - RNA, 19 nt, Artificial Sequence
  Description of Artificial Sequence: Synthetic oligonucleotide
uccuugcaauaucuucaga

SEQ ID NO: 2499852 - RNA, 19 nt, Artificial Sequence
  Description of Artificial Sequence: Synthetic oligonucleotide
gaaauucaagggcaucuau

SEQ ID NO: 2499853 - RNA, 19 nt, Artificial Sequence
  Description of Artificial Sequence: Synthetic oligonucleotide
aggaauuaugacguuggua

SEQ ID NO: 2499854 - RNA, 19 nt, Artificial Sequence
  Description of Artificial Sequence: Synthetic oligonucleotide
cacuguccguuucauuaag

SEQ ID NO: 2499855 - RNA, 19 nt, Artificial Sequence
  Description of Artificial Sequence: Synthetic oligonucleotide
acacuguccguuucauuaa

SEQ ID NO: 2499856 - RNA, 19 nt, Artificial Sequence
  Description of Artificial Sequence: Synthetic oligonucleotide
cucgggagauuuuccauga

SEQ ID NO: 2499857 - RNA, 19 nt, Artificial Sequence
  Description of Artificial Sequence: Synthetic oligonucleotide
agcuucuggagaauacaug

SEQ ID NO: 2499858 - RNA, 19 nt, Artificial Sequence
  Description of Artificial Sequence: Synthetic oligonucleotide
agaauccaaaauggagacu

SEQ ID NO: 2499859 - RNA, 19 nt, Artificial Sequence
  Description of Artificial Sequence: Synthetic oligonucleotide
gacuuggcacacacugucc

SEQ ID NO: 2499860 - RNA, 19 nt, Artificial Sequence
  Description of Artificial Sequence: Synthetic oligonucleotide
ugaccccauaguucaaaua

SEQ ID NO: 2499861 - RNA, 19 nt, Artificial Sequence
  Description of Artificial Sequence: Synthetic oligonucleotide
aaagaccauuugaaauuau

SEQ ID NO: 2499862 - RNA, 19 nt, Artificial Sequence
  Description of Artificial Sequence: Synthetic oligonucleotide
augaccccauaguucaaau

SEQ ID NO: 2499863 - RNA, 19 nt, Artificial Sequence
  Description of Artificial Sequence: Synthetic oligonucleotide
auuucucacgaaaggaauu

SEQ ID NO: 2499864 - RNA, 19 nt, Artificial Sequence
  Description of Artificial Sequence: Synthetic oligonucleotide
uccucgggagauuuuccau

SEQ ID NO: 2499865 - RNA, 19 nt, Artificial Sequence
  Description of Artificial Sequence: Synthetic oligonucleotide
guaucagucccugaaauuu

SEQ ID NO: 2499866 - RNA, 19 nt, Artificial Sequence
  Description of Artificial Sequence: Synthetic oligonucleotide
ucacauccaaaaguccuuu

SEQ ID NO: 2499867 - RNA, 19 nt, Artificial Sequence
  Description of Artificial Sequence: Synthetic oligonucleotide
agggaaugcuaagaaucca

SEQ ID NO: 2499868 - RNA, 19 nt, Artificial Sequence
  Description of Artificial Sequence: Synthetic oligonucleotide
ucauucuuggcuggauuuu

SEQ ID NO: 2499869 - RNA, 19 nt, Artificial Sequence
  Description of Artificial Sequence: Synthetic oligonucleotide
gcuaagaauccaaaaugga

SEQ ID NO: 2499870 - RNA, 19 nt, Artificial Sequence
  Description of Artificial Sequence: Synthetic oligonucleotide
agauuuuccaugaccccau

SEQ ID NO: 2499871 - RNA, 19 nt, Artificial Sequence
  Description of Artificial Sequence: Synthetic oligonucleotide
uucucacgaaaggaauuau

SEQ ID NO: 2499872 - RNA, 19 nt, Artificial Sequence
  Description of Artificial Sequence: Synthetic oligonucleotide
gugugaauacuggucucug

SEQ ID NO: 2499873 - RNA, 19 nt, Artificial Sequence
  Description of Artificial Sequence: Synthetic oligonucleotide
ucgggagauuuuccaugac

SEQ ID NO: 2499874 - RNA, 19 nt, Artificial Sequence
  Description of Artificial Sequence: Synthetic oligonucleotide
gagaauacaugcugugguu

SEQ ID NO: 2499875 - RNA, 19 nt, Artificial Sequence
  Description of Artificial Sequence: Synthetic oligonucleotide
uucuugagucaauguuuua

SEQ ID NO: 2499876 - RNA, 19 nt, Artificial Sequence
  Description of Artificial Sequence: Synthetic oligonucleotide
uacaugcugugguuucuuu

SEQ ID NO: 2499877 - RNA, 19 nt, Artificial Sequence
  Description of Artificial Sequence: Synthetic oligonucleotide
ugguuucuuuaaguucacu

SEQ ID NO: 2499878 - RNA, 19 nt, Artificial Sequence
  Description of Artificial Sequence: Synthetic oligonucleotide
cuccucgggagauuuucca

SEQ ID NO: 2499879 - RNA, 19 nt, Artificial Sequence
  Description of Artificial Sequence: Synthetic oligonucleotide
aaguuccuugcaauaucuu

SEQ ID NO: 2499880 - RNA, 19 nt, Artificial Sequence
  Description of Artificial Sequence: Synthetic oligonucleotide
aucagucccugaaauuuaa

SEQ ID NO: 2499881 - RNA, 19 nt, Artificial Sequence
  Description of Artificial Sequence: Synthetic oligonucleotide
cacucagcaggugugaaua

SEQ ID NO: 2499882 - RNA, 19 nt, Artificial Sequence
  Description of Artificial Sequence: Synthetic oligonucleotide
agcgccuugcugugugacu

SEQ ID NO: 2499883 - RNA, 19 nt, Artificial Sequence
  Description of Artificial Sequence: Synthetic oligonucleotide
gucucuguucucaaauucu

SEQ ID NO: 2499884 - RNA, 19 nt, Artificial Sequence
  Description of Artificial Sequence: Synthetic oligonucleotide
ccucgggagauuuuccaug

SEQ ID NO: 2499885 - RNA, 19 nt, Artificial Sequence
  Description of Artificial Sequence: Synthetic oligonucleotide
cgggagauuuuccaugacc

SEQ ID NO: 2499886 - RNA, 19 nt, Artificial Sequence
  Description of Artificial Sequence: Synthetic oligonucleotide
ggagacuuuucauaaguuu

SEQ ID NO: 2499887 - RNA, 19 nt, Artificial Sequence
  Description of Artificial Sequence: Synthetic oligonucleotide
caauuucgauugauagcaa

SEQ ID NO: 2499888 - RNA, 19 nt, Artificial Sequence
  Description of Artificial Sequence: Synthetic oligonucleotide
ggaaugcuaagaauccaaa

SEQ ID NO: 2499889 - RNA, 19 nt, Artificial Sequence
  Description of Artificial Sequence: Synthetic oligonucleotide
cucgauugucaacauaauu

SEQ ID NO: 2499890 - RNA, 19 nt, Artificial Sequence
  Description of Artificial Sequence: Synthetic oligonucleotide
gauuuuccaugaccccaua

SEQ ID NO: 2499891 - RNA, 19 nt, Artificial Sequence
  Description of Artificial Sequence: Synthetic oligonucleotide
gugauaguaaagacuuuau

SEQ ID NO: 2499892 - RNA, 19 nt, Artificial Sequence
  Description of Artificial Sequence: Synthetic oligonucleotide
gacuuuucauaaguuucau

SEQ ID NO: 2499893 - RNA, 19 nt, Artificial Sequence
  Description of Artificial Sequence: Synthetic oligonucleotide
auacagcuccucgggagau

SEQ ID NO: 2499894 - RNA, 19 nt, Artificial Sequence
  Description of Artificial Sequence: Synthetic oligonucleotide
aucacucagcaggugugaa

SEQ ID NO: 2499895 - RNA, 19 nt, Artificial Sequence
  Description of Artificial Sequence: Synthetic oligonucleotide
uggcacacacuguccguuu

SEQ ID NO: 2499896 - RNA, 19 nt, Artificial Sequence
  Description of Artificial Sequence: Synthetic oligonucleotide
guuagugaacuggccucca

SEQ ID NO: 2499897 - RNA, 19 nt, Artificial Sequence
  Description of Artificial Sequence: Synthetic oligonucleotide
cauaaguuucaugauuguu

SEQ ID NO: 2499898 - RNA, 19 nt, Artificial Sequence
  Description of Artificial Sequence: Synthetic oligonucleotide
ccauaaaaugcuuauucuu

SEQ ID NO: 2499899 - RNA, 19 nt, Artificial Sequence
  Description of Artificial Sequence: Synthetic oligonucleotide
caugaccccauaguucaaa

SEQ ID NO: 2499900 - RNA, 19 nt, Artificial Sequence
  Description of Artificial Sequence: Synthetic oligonucleotide
cgauugauagcaauuauuu

SEQ ID NO: 2499901 - RNA, 19 nt, Artificial Sequence
  Description of Artificial Sequence: Synthetic oligonucleotide
accccauaguucaaauaua

SEQ ID NO: 2499902 - RNA, 19 nt, Artificial Sequence
  Description of Artificial Sequence: Synthetic oligonucleotide
gacguugguauggcagaaa

SEQ ID NO: 2499903 - RNA, 19 nt, Artificial Sequence
  Description of Artificial Sequence: Synthetic oligonucleotide
cagagggaaugcuaagaau

SEQ ID NO: 2499904 - RNA, 19 nt, Artificial Sequence
  Description of Artificial Sequence: Synthetic oligonucleotide
gcgccuugcugugugacug

SEQ ID NO: 2499905 - RNA, 19 nt, Artificial Sequence
  Description of Artificial Sequence: Synthetic oligonucleotide
ggaaagcuucuggagaaua

SEQ ID NO: 2499906 - RNA, 19 nt, Artificial Sequence
  Description of Artificial Sequence: Synthetic oligonucleotide
aucaagcgccuugcugugu

SEQ ID NO: 2499907 - RNA, 19 nt, Artificial Sequence
  Description of Artificial Sequence: Synthetic oligonucleotide
cucuguucucaaauucuuu

SEQ ID NO: 2499908 - RNA, 19 nt, Artificial Sequence
  Description of Artificial Sequence: Synthetic oligonucleotide
gcacacacuguccguuuca

SEQ ID NO: 2499909 - RNA, 19 nt, Artificial Sequence
  Description of Artificial Sequence: Synthetic oligonucleotide
cgugugaaucuuuauuuua

SEQ ID NO: 2499910 - RNA, 19 nt, Artificial Sequence
  Description of Artificial Sequence: Synthetic oligonucleotide
gcuccucgggagauuuucc

SEQ ID NO: 2499911 - RNA, 19 nt, Artificial Sequence
  Description of Artificial Sequence: Synthetic oligonucleotide
caagcgccuugcuguguga

SEQ ID NO: 2499912 - RNA, 19 nt, Artificial Sequence
  Description of Artificial Sequence: Synthetic oligonucleotide
uacagcuccucgggagauu

SEQ ID NO: 2499913 - RNA, 19 nt, Artificial Sequence
  Description of Artificial Sequence: Synthetic oligonucleotide
gggcaucuauucguuugac

SEQ ID NO: 2499914 - RNA, 19 nt, Artificial Sequence
  Description of Artificial Sequence: Synthetic oligonucleotide
cccugaaauuuaacaaggu

SEQ ID NO: 2499915 - RNA, 19 nt, Artificial Sequence
  Description of Artificial Sequence: Synthetic oligonucleotide
gugugacuggaaagcuucu

SEQ ID NO: 2499916 - RNA, 19 nt, Artificial Sequence
  Description of Artificial Sequence: Synthetic oligonucleotide
caagggcaucuauucguuu

SEQ ID NO: 2499917 - RNA, 19 nt, Artificial Sequence
  Description of Artificial Sequence: Synthetic oligonucleotide
ccuugcugugugacuggaa

SEQ ID NO: 2499918 - RNA, 19 nt, Artificial Sequence
  Description of Artificial Sequence: Synthetic oligonucleotide
gccuccaaacagugauagu

SEQ ID NO: 2499919 - RNA, 19 nt, Artificial Sequence
  Description of Artificial Sequence: Synthetic oligonucleotide
cguugguauggcagaaaau

SEQ ID NO: 2499920 - RNA, 19 nt, Artificial Sequence
  Description of Artificial Sequence: Synthetic oligonucleotide
cagcuccucgggagauuuu

SEQ ID NO: 2499921 - RNA, 19 nt, Artificial Sequence
  Description of Artificial Sequence: Synthetic oligonucleotide
ccguuucauuaaguuccuu

SEQ ID NO: 2499922 - RNA, 19 nt, Artificial Sequence
  Description of Artificial Sequence: Synthetic oligonucleotide
aaaucugugaacuugaagg

SEQ ID NO: 2499923 - RNA, 19 nt, Artificial Sequence
  Description of Artificial Sequence: Synthetic oligonucleotide
uucgauuaagcacagaacu

SEQ ID NO: 2499924 - RNA, 19 nt, Artificial Sequence
  Description of Artificial Sequence: Synthetic oligonucleotide
uuaagcacagaacucaccc

SEQ ID NO: 2499925 - RNA, 19 nt, Artificial Sequence
  Description of Artificial Sequence: Synthetic oligonucleotide
ucgagugucacccacuggg

SEQ ID NO: 2499926 - RNA, 19 nt, Artificial Sequence
  Description of Artificial Sequence: Synthetic oligonucleotide
acuggcuugaggcagcucc

SEQ ID NO: 2499927 - RNA, 19 nt, Artificial Sequence
  Description of Artificial Sequence: Synthetic oligonucleotide
aaccaauaaaucugugaac

SEQ ID NO: 2499928 - RNA, 19 nt, Artificial Sequence
  Description of Artificial Sequence: Synthetic oligonucleotide
uccacaaucuugcugagug

SEQ ID NO: 2499929 - RNA, 19 nt, Artificial Sequence
  Description of Artificial Sequence: Synthetic oligonucleotide
uguuucuucccaaauugcc

SEQ ID NO: 2499930 - RNA, 19 nt, Artificial Sequence
  Description of Artificial Sequence: Synthetic oligonucleotide
uggagaagguugaagggcg

SEQ ID NO: 2499931 - RNA, 19 nt, Artificial Sequence
  Description of Artificial Sequence: Synthetic oligonucleotide
gauggagaagguugaaggg

SEQ ID NO: 2499932 - RNA, 19 nt, Artificial Sequence
  Description of Artificial Sequence: Synthetic oligonucleotide
uguuccagaguacucuggg

SEQ ID NO: 2499933 - RNA, 19 nt, Artificial Sequence
  Description of Artificial Sequence: Synthetic oligonucleotide
cauauccugaaacuguucc

SEQ ID NO: 2499934 - RNA, 19 nt, Artificial Sequence
  Description of Artificial Sequence: Synthetic oligonucleotide
gaaccaauaaaucugugaa

SEQ ID NO: 2499935 - RNA, 19 nt, Artificial Sequence
  Description of Artificial Sequence: Synthetic oligonucleotide
aggguagaaguccacaauc

SEQ ID NO: 2499936 - RNA, 19 nt, Artificial Sequence
  Description of Artificial Sequence: Synthetic oligonucleotide
aaaggucaacuucagucug

SEQ ID NO: 2499937 - RNA, 19 nt, Artificial Sequence
  Description of Artificial Sequence: Synthetic oligonucleotide
aaacucgagugucacccac

SEQ ID NO: 2499938 - RNA, 19 nt, Artificial Sequence
  Description of Artificial Sequence: Synthetic oligonucleotide
accaauaaaucugugaacu

SEQ ID NO: 2499939 - RNA, 19 nt, Artificial Sequence
  Description of Artificial Sequence: Synthetic oligonucleotide
caaagacuggcucaucucg

SEQ ID NO: 2499940 - RNA, 19 nt, Artificial Sequence
  Description of Artificial Sequence: Synthetic oligonucleotide
ggauggagaagguugaagg

SEQ ID NO: 2499941 - RNA, 19 nt, Artificial Sequence
  Description of Artificial Sequence: Synthetic oligonucleotide
uucggggcaaaccaaagac

SEQ ID NO: 2499942 - RNA, 19 nt, Artificial Sequence
  Description of Artificial Sequence: Synthetic oligonucleotide
gaacaaaccagucucccac

SEQ ID NO: 2499943 - RNA, 19 nt, Artificial Sequence
  Description of Artificial Sequence: Synthetic oligonucleotide
auggagaagguugaagggc

SEQ ID NO: 2499944 - RNA, 19 nt, Artificial Sequence
  Description of Artificial Sequence: Synthetic oligonucleotide
acagugguggcagagggcc

SEQ ID NO: 2499945 - RNA, 19 nt, Artificial Sequence
  Description of Artificial Sequence: Synthetic oligonucleotide
uuucgauuaagcacagaac

SEQ ID NO: 2499946 - RNA, 19 nt, Artificial Sequence
  Description of Artificial Sequence: Synthetic oligonucleotide
agacugugaaccuuccagg

SEQ ID NO: 2499947 - RNA, 19 nt, Artificial Sequence
  Description of Artificial Sequence: Synthetic oligonucleotide
ucuuacacugcuuucucac

SEQ ID NO: 2499948 - RNA, 19 nt, Artificial Sequence
  Description of Artificial Sequence: Synthetic oligonucleotide
ugguagaugaccacacggc

SEQ ID NO: 2499949 - RNA, 19 nt, Artificial Sequence
  Description of Artificial Sequence: Synthetic oligonucleotide
ugucuccucauccugguca

SEQ ID NO: 2499950 - RNA, 19 nt, Artificial Sequence
  Description of Artificial Sequence: Synthetic oligonucleotide
gugguagaugaccacacgg

SEQ ID NO: 2499951 - RNA, 19 nt, Artificial Sequence
  Description of Artificial Sequence: Synthetic oligonucleotide
aagacuggcucaucucggg

SEQ ID NO: 2499952 - RNA, 19 nt, Artificial Sequence
  Description of Artificial Sequence: Synthetic oligonucleotide
guuucgauuaagcacagaa

SEQ ID NO: 2499953 - RNA, 19 nt, Artificial Sequence
  Description of Artificial Sequence: Synthetic oligonucleotide
caaauugccggcuguuucg

SEQ ID NO: 2499954 - RNA, 19 nt, Artificial Sequence
  Description of Artificial Sequence: Synthetic oligonucleotide
gaacuugaagggcuucugg

SEQ ID NO: 2499955 - RNA, 19 nt, Artificial Sequence
  Description of Artificial Sequence: Synthetic oligonucleotide
gaacucacccugcucacgg

SEQ ID NO: 2499956 - RNA, 19 nt, Artificial Sequence
  Description of Artificial Sequence: Synthetic oligonucleotide
aaagauguuucuucccaaa

SEQ ID NO: 2499957 - RNA, 19 nt, Artificial Sequence
  Description of Artificial Sequence: Synthetic oligonucleotide
agugcaacaggugauggag

SEQ ID NO: 2499958 - RNA, 19 nt, Artificial Sequence
  Description of Artificial Sequence: Synthetic oligonucleotide
agugucacccacugggagg

SEQ ID NO: 2499959 - RNA, 19 nt, Artificial Sequence
  Description of Artificial Sequence: Synthetic oligonucleotide
caacaggugauggagaccc

SEQ ID NO: 2499960 - RNA, 19 nt, Artificial Sequence
  Description of Artificial Sequence: Synthetic oligonucleotide
acaggaaccaauaaaucug

SEQ ID NO: 2499961 - RNA, 19 nt, Artificial Sequence
  Description of Artificial Sequence: Synthetic oligonucleotide
gagacccauauccugaaac

SEQ ID NO: 2499962 - RNA, 19 nt, Artificial Sequence
  Description of Artificial Sequence: Synthetic oligonucleotide
acugcuuucucacccagca

SEQ ID NO: 2499963 - RNA, 19 nt, Artificial Sequence
  Description of Artificial Sequence: Synthetic oligonucleotide
gaaguccacaaucuugcug

SEQ ID NO: 2499964 - RNA, 19 nt, Artificial Sequence
  Description of Artificial Sequence: Synthetic oligonucleotide
aucugugaacuugaagggc

SEQ ID NO: 2499965 - RNA, 19 nt, Artificial Sequence
  Description of Artificial Sequence: Synthetic oligonucleotide
aacuguuccagaguacucu

SEQ ID NO: 2499966 - RNA, 19 nt, Artificial Sequence
  Description of Artificial Sequence: Synthetic oligonucleotide
ucgauuaagcacagaacuc

SEQ ID NO: 2499967 - RNA, 19 nt, Artificial Sequence
  Description of Artificial Sequence: Synthetic oligonucleotide
auuaagcacagaacucacc

SEQ ID NO: 2499968 - RNA, 19 nt, Artificial Sequence
  Description of Artificial Sequence: Synthetic oligonucleotide
ucggugguguccucaaagg

SEQ ID NO: 2499969 - RNA, 19 nt, Artificial Sequence
  Description of Artificial Sequence: Synthetic oligonucleotide
cagggaacaaaccagucuc

SEQ ID NO: 2499970 - RNA, 19 nt, Artificial Sequence
  Description of Artificial Sequence: Synthetic oligonucleotide
aucuugcugaguguguccc

SEQ ID NO: 2499971 - RNA, 19 nt, Artificial Sequence
  Description of Artificial Sequence: Synthetic oligonucleotide
gacgugaacacgcugggga

SEQ ID NO: 2499972 - RNA, 19 nt, Artificial Sequence
  Description of Artificial Sequence: Synthetic oligonucleotide
agcugcgugacgugaacac

SEQ ID NO: 2499973 - RNA, 19 nt, Artificial Sequence
  Description of Artificial Sequence: Synthetic oligonucleotide
guagaaguccacaaucuug

SEQ ID NO: 2499974 - RNA, 19 nt, Artificial Sequence
  Description of Artificial Sequence: Synthetic oligonucleotide
aguuccagcaugucuccuc

SEQ ID NO: 2499975 - RNA, 19 nt, Artificial Sequence
  Description of Artificial Sequence: Synthetic oligonucleotide
cacucagggaacaaaccag

SEQ ID NO: 2499976 - RNA, 19 nt, Artificial Sequence
  Description of Artificial Sequence: Synthetic oligonucleotide
uguccccagacugugaacc

SEQ ID NO: 2499977 - RNA, 19 nt, Artificial Sequence
  Description of Artificial Sequence: Synthetic oligonucleotide
uagaugaccacacggccaa

SEQ ID NO: 2499978 - RNA, 19 nt, Artificial Sequence
  Description of Artificial Sequence: Synthetic oligonucleotide
uuucggggcaaaccaaaga

SEQ ID NO: 2499979 - RNA, 19 nt, Artificial Sequence
  Description of Artificial Sequence: Synthetic oligonucleotide
accaaagacuggcucaucu

SEQ ID NO: 2499980 - RNA, 19 nt, Artificial Sequence
  Description of Artificial Sequence: Synthetic oligonucleotide
agacccauauccugaaacu

SEQ ID NO: 2499981 - RNA, 19 nt, Artificial Sequence
  Description of Artificial Sequence: Synthetic oligonucleotide
ggaaacucgagugucaccc

SEQ ID NO: 2499982 - RNA, 19 nt, Artificial Sequence
  Description of Artificial Sequence: Synthetic oligonucleotide
uccagaguacucuggggcc

SEQ ID NO: 2499983 - RNA, 19 nt, Artificial Sequence
  Description of Artificial Sequence: Synthetic oligonucleotide
aacaaaccagucucccaca

SEQ ID NO: 2499984 - RNA, 19 nt, Artificial Sequence
  Description of Artificial Sequence: Synthetic oligonucleotide
aacacgcuggggaaacucg

SEQ ID NO: 2499985 - RNA, 19 nt, Artificial Sequence
  Description of Artificial Sequence: Synthetic oligonucleotide
gaaccuuccagguagcugu

SEQ ID NO: 2499986 - RNA, 19 nt, Artificial Sequence
  Description of Artificial Sequence: Synthetic oligonucleotide
cuuacacugcuuucucacc

SEQ ID NO: 2499987 - RNA, 19 nt, Artificial Sequence
  Description of Artificial Sequence: Synthetic oligonucleotide
ugauggagacccauauccu

SEQ ID NO: 2499988 - RNA, 19 nt, Artificial Sequence
  Description of Artificial Sequence: Synthetic oligonucleotide
agacuggcucaucucgggc

SEQ ID NO: 2499989 - RNA, 19 nt, Artificial Sequence
  Description of Artificial Sequence: Synthetic oligonucleotide
caaaccaaagacuggcuca

SEQ ID NO: 2499990 - RNA, 19 nt, Artificial Sequence
  Description of Artificial Sequence: Synthetic oligonucleotide
cccacaacuggcuugaggc

SEQ ID NO: 2499991 - RNA, 19 nt, Artificial Sequence
  Description of Artificial Sequence: Synthetic oligonucleotide
ucccacaacuggcuugagg

SEQ ID NO: 2499992 - RNA, 19 nt, Artificial Sequence
  Description of Artificial Sequence: Synthetic oligonucleotide
ugaaacuguuccagaguac

SEQ ID NO: 2499993 - RNA, 19 nt, Artificial Sequence
  Description of Artificial Sequence: Synthetic oligonucleotide
cugcgugacgugaacacgc

SEQ ID NO: 2499994 - RNA, 19 nt, Artificial Sequence
  Description of Artificial Sequence: Synthetic oligonucleotide
acgguuucggggcaaacca

SEQ ID NO: 2499995 - RNA, 19 nt, Artificial Sequence
  Description of Artificial Sequence: Synthetic oligonucleotide
ucaggguagaaguccacaa

SEQ ID NO: 2499996 - RNA, 19 nt, Artificial Sequence
  Description of Artificial Sequence: Synthetic oligonucleotide
aacuucagucuguccaccu

SEQ ID NO: 2499997 - RNA, 19 nt, Artificial Sequence
  Description of Artificial Sequence: Synthetic oligonucleotide
ggcuguuucgauuaagcac

SEQ ID NO: 2499998 - RNA, 19 nt, Artificial Sequence
  Description of Artificial Sequence: Synthetic oligonucleotide
accccgagugaagacagcc

SEQ ID NO: 2499999 - RNA, 19 nt, Artificial Sequence
  Description of Artificial Sequence: Synthetic oligonucleotide
uguguccccagacugugaa

SEQ ID NO: 2500000 - RNA, 19 nt, Artificial Sequence
  Description of Artificial Sequence: Synthetic oligonucleotide
ggcguuuguguccucaggg

SEQ ID NO: 2500001 - RNA, 19 nt, Artificial Sequence
  Description of Artificial Sequence: Synthetic oligonucleotide
acuguuccagaguacucug

SEQ ID NO: 2500002 - RNA, 19 nt, Artificial Sequence
  Description of Artificial Sequence: Synthetic oligonucleotide
cuuccagguagcuguggcg

SEQ ID NO: 2500003 - RNA, 19 nt, Artificial Sequence
  Description of Artificial Sequence: Synthetic oligonucleotide
gauuaagcacagaacucac

SEQ ID NO: 2500004 - RNA, 19 nt, Artificial Sequence
  Description of Artificial Sequence: Synthetic oligonucleotide
gucggugguguccucaaag

SEQ ID NO: 2500005 - RNA, 19 nt, Artificial Sequence
  Description of Artificial Sequence: Synthetic oligonucleotide
uuccuggaggaaguggccg

SEQ ID NO: 2500006 - RNA, 19 nt, Artificial Sequence
  Description of Artificial Sequence: Synthetic oligonucleotide
ucaucucgggccugcgacg

SEQ ID NO: 2500007 - RNA, 19 nt, Artificial Sequence
  Description of Artificial Sequence: Synthetic oligonucleotide
ggaacccaggcacucaggg

SEQ ID NO: 2500008 - RNA, 19 nt, Artificial Sequence
  Description of Artificial Sequence: Synthetic oligonucleotide
guggggauggagaagguug

SEQ ID NO: 2500009 - RNA, 19 nt, Artificial Sequence
  Description of Artificial Sequence: Synthetic oligonucleotide
ggaaccaauaaaucuguga

SEQ ID NO: 2500010 - RNA, 19 nt, Artificial Sequence
  Description of Artificial Sequence: Synthetic oligonucleotide
ugcgacgccucgccuagcg

SEQ ID NO: 2500011 - RNA, 19 nt, Artificial Sequence
  Description of Artificial Sequence: Synthetic oligonucleotide
uggggauggagaagguuga

SEQ ID NO: 2500012 - RNA, 19 nt, Artificial Sequence
  Description of Artificial Sequence: Synthetic oligonucleotide
ucggggcaaaccaaagacu

SEQ ID NO: 2500013 - RNA, 19 nt, Artificial Sequence
  Description of Artificial Sequence: Synthetic oligonucleotide
cacaaucuugcugagugug

SEQ ID NO: 2500014 - RNA, 19 nt, Artificial Sequence
  Description of Artificial Sequence: Synthetic oligonucleotide
aaaccaaagacuggcucau

SEQ ID NO: 2500015 - RNA, 19 nt, Artificial Sequence
  Description of Artificial Sequence: Synthetic oligonucleotide
uacucuggggccugcagac

SEQ ID NO: 2500016 - RNA, 19 nt, Artificial Sequence
  Description of Artificial Sequence: Synthetic oligonucleotide
agcaugucuccucauccug

SEQ ID NO: 2500017 - RNA, 19 nt, Artificial Sequence
  Description of Artificial Sequence: Synthetic oligonucleotide
ugaaccuuccagguagcug

SEQ ID NO: 2500018 - RNA, 19 nt, Artificial Sequence
  Description of Artificial Sequence: Synthetic oligonucleotide
gacccauauccugaaacug

SEQ ID NO: 2500019 - RNA, 19 nt, Artificial Sequence
  Description of Artificial Sequence: Synthetic oligonucleotide
gcuguuucgauuaagcaca

SEQ ID NO: 2500020 - RNA, 19 nt, Artificial Sequence
  Description of Artificial Sequence: Synthetic oligonucleotide
aaaagucggugguguccuc

SEQ ID NO: 2500021 - RNA, 19 nt, Artificial Sequence
  Description of Artificial Sequence: Synthetic oligonucleotide
gaagguugaagggcguuug

SEQ ID NO: 2500022 - RNA, 19 nt, Artificial Sequence
  Description of Artificial Sequence: Synthetic oligonucleotide
cucaucucgggccugcgac

SEQ ID NO: 2500023 - RNA, 19 nt, Artificial Sequence
  Description of Artificial Sequence: Synthetic oligonucleotide
gugacgugaacacgcuggg

SEQ ID NO: 2500024 - RNA, 19 nt, Artificial Sequence
  Description of Artificial Sequence: Synthetic oligonucleotide
uagcgcucgggcgaguucg

SEQ ID NO: 2500025 - RNA, 19 nt, Artificial Sequence
  Description of Artificial Sequence: Synthetic oligonucleotide
ugugaaccuuccagguagc

SEQ ID NO: 2500026 - RNA, 19 nt, Artificial Sequence
  Description of Artificial Sequence: Synthetic oligonucleotide
uuccagguagcuguggcga

SEQ ID NO: 2500027 - RNA, 19 nt, Artificial Sequence
  Description of Artificial Sequence: Synthetic oligonucleotide
aagguugaagggcguuugu

SEQ ID NO: 2500028 - RNA, 19 nt, Artificial Sequence
  Description of Artificial Sequence: Synthetic oligonucleotide
aggcacucagggaacaaac

SEQ ID NO: 2500029 - RNA, 19 nt, Artificial Sequence
  Description of Artificial Sequence: Synthetic oligonucleotide
uguggcgacuggagaagcc

SEQ ID NO: 2500030 - RNA, 19 nt, Artificial Sequence
  Description of Artificial Sequence: Synthetic oligonucleotide
acucgagugucacccacug

SEQ ID NO: 2500031 - RNA, 19 nt, Artificial Sequence
  Description of Artificial Sequence: Synthetic oligonucleotide
ugccacuccccacuuggcc

SEQ ID NO: 2500032 - RNA, 19 nt, Artificial Sequence
  Description of Artificial Sequence: Synthetic oligonucleotide
gccgguagcucuuacacug

SEQ ID NO: 2500033 - RNA, 19 nt, Artificial Sequence
  Description of Artificial Sequence: Synthetic oligonucleotide
ggagaagccgcccuggaac

SEQ ID NO: 2500034 - RNA, 19 nt, Artificial Sequence
  Description of Artificial Sequence: Synthetic oligonucleotide
uugaggcagcuccuggaca

SEQ ID NO: 2500035 - RNA, 19 nt, Artificial Sequence
  Description of Artificial Sequence: Synthetic oligonucleotide
cacaacuggcuugaggcag

SEQ ID NO: 2500036 - RNA, 19 nt, Artificial Sequence
  Description of Artificial Sequence: Synthetic oligonucleotide
uacacugcuuucucaccca

SEQ ID NO: 2500037 - RNA, 19 nt, Artificial Sequence
  Description of Artificial Sequence: Synthetic oligonucleotide
uggggaaacucgaguguca

SEQ ID NO: 2500038 - RNA, 19 nt, Artificial Sequence
  Description of Artificial Sequence: Synthetic oligonucleotide
uucuucccaaauugccggc

SEQ ID NO: 2500039 - RNA, 19 nt, Artificial Sequence
  Description of Artificial Sequence: Synthetic oligonucleotide
uccagcaugucuccucauc

SEQ ID NO: 2500040 - RNA, 19 nt, Artificial Sequence
  Description of Artificial Sequence: Synthetic oligonucleotide
aggugauggagacccauau

SEQ ID NO: 2500041 - RNA, 19 nt, Artificial Sequence
  Description of Artificial Sequence: Synthetic oligonucleotide
acaacuggcuugaggcagc

SEQ ID NO: 2500042 - RNA, 19 nt, Artificial Sequence
  Description of Artificial Sequence: Synthetic oligonucleotide
aggugguagaugaccacac

SEQ ID NO: 2500043 - RNA, 19 nt, Artificial Sequence
  Description of Artificial Sequence: Synthetic oligonucleotide
cucgccuagcgcucgggcg

SEQ ID NO: 2500044 - RNA, 19 nt, Artificial Sequence
  Description of Artificial Sequence: Synthetic oligonucleotide
uccccaacaggaaccaaua

SEQ ID NO: 2500045 - RNA, 19 nt, Artificial Sequence
  Description of Artificial Sequence: Synthetic oligonucleotide
ugaagggcguuuguguccu

SEQ ID NO: 2500046 - RNA, 19 nt, Artificial Sequence
  Description of Artificial Sequence: Synthetic oligonucleotide
aaauugccggcuguuucga

SEQ ID NO: 2500047 - RNA, 19 nt, Artificial Sequence
  Description of Artificial Sequence: Synthetic oligonucleotide
guagcuguggcgacuggag

SEQ ID NO: 2500048 - RNA, 19 nt, Artificial Sequence
  Description of Artificial Sequence: Synthetic oligonucleotide
cucuggggccugcagaccc

SEQ ID NO: 2500049 - RNA, 19 nt, Artificial Sequence
  Description of Artificial Sequence: Synthetic oligonucleotide
aacugcaccugcagcugcg

SEQ ID NO: 2500050 - RNA, 19 nt, Artificial Sequence
  Description of Artificial Sequence: Synthetic oligonucleotide
ucgccuagcgcucgggcga

SEQ ID NO: 2500051 - RNA, 19 nt, Artificial Sequence
  Description of Artificial Sequence: Synthetic oligonucleotide
uucccaaauugccggcugu

SEQ ID NO: 2500052 - RNA, 19 nt, Artificial Sequence
  Description of Artificial Sequence: Synthetic oligonucleotide
guggcgacuggagaagccg

SEQ ID NO: 2500053 - RNA, 19 nt, Artificial Sequence
  Description of Artificial Sequence: Synthetic oligonucleotide
caccccaccucccaccucc

SEQ ID NO: 2500054 - RNA, 19 nt, Artificial Sequence
  Description of Artificial Sequence: Synthetic oligonucleotide
uggcgacuggagaagccgc

SEQ ID NO: 2500055 - RNA, 19 nt, Artificial Sequence
  Description of Artificial Sequence: Synthetic oligonucleotide
cgugacgugaacacgcugg

SEQ ID NO: 2500056 - RNA, 19 nt, Artificial Sequence
  Description of Artificial Sequence: Synthetic oligonucleotide
gcgaguucgaaccccggcg

SEQ ID NO: 2500057 - RNA, 19 nt, Artificial Sequence
  Description of Artificial Sequence: Synthetic oligonucleotide
aggaaguggccgccgguag

SEQ ID NO: 2500058 - RNA, 19 nt, Artificial Sequence
  Description of Artificial Sequence: Synthetic oligonucleotide
ucccacagugcaacaggug

SEQ ID NO: 2500059 - RNA, 19 nt, Artificial Sequence
  Description of Artificial Sequence: Synthetic oligonucleotide
gagugaagacagccuguug

SEQ ID NO: 2500060 - RNA, 19 nt, Artificial Sequence
  Description of Artificial Sequence: Synthetic oligonucleotide
uuuguguccucaggguaga

SEQ ID NO: 2500061 - RNA, 19 nt, Artificial Sequence
  Description of Artificial Sequence: Synthetic oligonucleotide
ggugguagaugaccacacg

SEQ ID NO: 2500062 - RNA, 19 nt, Artificial Sequence
  Description of Artificial Sequence: Synthetic oligonucleotide
ucuugcugagugugucccc

SEQ ID NO: 2500063 - RNA, 19 nt, Artificial Sequence
  Description of Artificial Sequence: Synthetic oligonucleotide
aguguguccccagacugug

SEQ ID NO: 2500064 - RNA, 19 nt, Artificial Sequence
  Description of Artificial Sequence: Synthetic oligonucleotide
uagcuguggcgacuggaga

SEQ ID NO: 2500065 - RNA, 19 nt, Artificial Sequence
  Description of Artificial Sequence: Synthetic oligonucleotide
ugacgugaacacgcugggg

SEQ ID NO: 2500066 - RNA, 19 nt, Artificial Sequence
  Description of Artificial Sequence: Synthetic oligonucleotide
agaacucacccugcucacg

SEQ ID NO: 2500067 - RNA, 19 nt, Artificial Sequence
  Description of Artificial Sequence: Synthetic oligonucleotide
cucagggaacaaaccaguc

SEQ ID NO: 2500068 - RNA, 19 nt, Artificial Sequence
  Description of Artificial Sequence: Synthetic oligonucleotide
uugccggcuguuucgauua

SEQ ID NO: 2500069 - RNA, 19 nt, Artificial Sequence
  Description of Artificial Sequence: Synthetic oligonucleotide
acuggcucaucucgggccu

SEQ ID NO: 2500070 - RNA, 19 nt, Artificial Sequence
  Description of Artificial Sequence: Synthetic oligonucleotide
caaucuugcugaguguguc

SEQ ID NO: 2500071 - RNA, 19 nt, Artificial Sequence
  Description of Artificial Sequence: Synthetic oligonucleotide
acucagggaacaaaccagu

SEQ ID NO: 2500072 - RNA, 19 nt, Artificial Sequence
  Description of Artificial Sequence: Synthetic oligonucleotide
guguccucaggguagaagu

SEQ ID NO: 2500073 - RNA, 19 nt, Artificial Sequence
  Description of Artificial Sequence: Synthetic oligonucleotide
gacuggagaagccgcccug

SEQ ID NO: 2500074 - RNA, 19 nt, Artificial Sequence
  Description of Artificial Sequence: Synthetic oligonucleotide
cacgguuucggggcaaacc

SEQ ID NO: 2500075 - RNA, 19 nt, Artificial Sequence
  Description of Artificial Sequence: Synthetic oligonucleotide
cuguuucgauuaagcacag

SEQ ID NO: 2500076 - RNA, 19 nt, Artificial Sequence
  Description of Artificial Sequence: Synthetic oligonucleotide
ugcagaccccgagugaaga

SEQ ID NO: 2500077 - RNA, 19 nt, Artificial Sequence
  Description of Artificial Sequence: Synthetic oligonucleotide
gcucgggcgaguucgaacc

SEQ ID NO: 2500078 - RNA, 19 nt, Artificial Sequence
  Description of Artificial Sequence: Synthetic oligonucleotide
gucucccacaacuggcuug

SEQ ID NO: 2500079 - RNA, 19 nt, Artificial Sequence
  Description of Artificial Sequence: Synthetic oligonucleotide
aagucggugguguccucaa

SEQ ID NO: 2500080 - RNA, 19 nt, Artificial Sequence
  Description of Artificial Sequence: Synthetic oligonucleotide
cuucccaaauugccggcug

SEQ ID NO: 2500081 - RNA, 19 nt, Artificial Sequence
  Description of Artificial Sequence: Synthetic oligonucleotide
auggagacccauauccuga

SEQ ID NO: 2500082 - RNA, 19 nt, Artificial Sequence
  Description of Artificial Sequence: Synthetic oligonucleotide
auugccggcuguuucgauu

SEQ ID NO: 2500083 - RNA, 19 nt, Artificial Sequence
  Description of Artificial Sequence: Synthetic oligonucleotide
ccagcaugucuccucaucc

SEQ ID NO: 2500084 - RNA, 19 nt, Artificial Sequence
  Description of Artificial Sequence: Synthetic oligonucleotide
aaccccggcgcugccacuc

SEQ ID NO: 2500085 - RNA, 19 nt, Artificial Sequence
  Description of Artificial Sequence: Synthetic oligonucleotide
gacugugaaccuuccaggu

SEQ ID NO: 2500086 - RNA, 19 nt, Artificial Sequence
  Description of Artificial Sequence: Synthetic oligonucleotide
gggcaaaccaaagacuggc

SEQ ID NO: 2500087 - RNA, 19 nt, Artificial Sequence
  Description of Artificial Sequence: Synthetic oligonucleotide
ugcgugacgugaacacgcu

SEQ ID NO: 2500088 - RNA, 19 nt, Artificial Sequence
  Description of Artificial Sequence: Synthetic oligonucleotide
aacucacccugcucacggu

SEQ ID NO: 2500089 - RNA, 19 nt, Artificial Sequence
  Description of Artificial Sequence: Synthetic oligonucleotide
gcaaaccaaagacuggcuc

SEQ ID NO: 2500090 - RNA, 19 nt, Artificial Sequence
  Description of Artificial Sequence: Synthetic oligonucleotide
uggagacccauauccugaa

SEQ ID NO: 2500091 - RNA, 19 nt, Artificial Sequence
  Description of Artificial Sequence: Synthetic oligonucleotide
caaaccagucucccacaac

SEQ ID NO: 2500092 - RNA, 19 nt, Artificial Sequence
  Description of Artificial Sequence: Synthetic oligonucleotide
aagggcguuuguguccuca

SEQ ID NO: 2500093 - RNA, 19 nt, Artificial Sequence
  Description of Artificial Sequence: Synthetic oligonucleotide
gcacucagggaacaaacca

SEQ ID NO: 2500094 - RNA, 19 nt, Artificial Sequence
  Description of Artificial Sequence: Synthetic oligonucleotide
ucuucccaaauugccggcu

SEQ ID NO: 2500095 - RNA, 19 nt, Artificial Sequence
  Description of Artificial Sequence: Synthetic oligonucleotide
agaccccgagugaagacag

SEQ ID NO: 2500096 - RNA, 19 nt, Artificial Sequence
  Description of Artificial Sequence: Synthetic oligonucleotide
agagggcccuccccaacag

SEQ ID NO: 2500097 - RNA, 19 nt, Artificial Sequence
  Description of Artificial Sequence: Synthetic oligonucleotide
cacagugcaacaggugaug

SEQ ID NO: 2500098 - RNA, 19 nt, Artificial Sequence
  Description of Artificial Sequence: Synthetic oligonucleotide
cacgcuggggaaacucgag

SEQ ID NO: 2500099 - RNA, 19 nt, Artificial Sequence
  Description of Artificial Sequence: Synthetic oligonucleotide
agggcguuuguguccucag

SEQ ID NO: 2500100 - RNA, 19 nt, Artificial Sequence
  Description of Artificial Sequence: Synthetic oligonucleotide
aauugccggcuguuucgau

SEQ ID NO: 2500101 - RNA, 19 nt, Artificial Sequence
  Description of Artificial Sequence: Synthetic oligonucleotide
gaacacgcuggggaaacuc

SEQ ID NO: 2500102 - RNA, 19 nt, Artificial Sequence
  Description of Artificial Sequence: Synthetic oligonucleotide
ugcagcugcgugacgugaa

SEQ ID NO: 2500103 - RNA, 19 nt, Artificial Sequence
  Description of Artificial Sequence: Synthetic oligonucleotide
guagcucuuacacugcuuu

SEQ ID NO: 2500104 - RNA, 19 nt, Artificial Sequence
  Description of Artificial Sequence: Synthetic oligonucleotide
guacucuggggccugcaga

SEQ ID NO: 2500105 - RNA, 19 nt, Artificial Sequence
  Description of Artificial Sequence: Synthetic oligonucleotide
cacugcuuucucacccagc

SEQ ID NO: 2500106 - RNA, 19 nt, Artificial Sequence
  Description of Artificial Sequence: Synthetic oligonucleotide
ccagucucccacaacuggc

SEQ ID NO: 2500107 - RNA, 19 nt, Artificial Sequence
  Description of Artificial Sequence: Synthetic oligonucleotide
uugcugaguguguccccag

SEQ ID NO: 2500108 - RNA, 19 nt, Artificial Sequence
  Description of Artificial Sequence: Synthetic oligonucleotide
gagggcccuccccaacagg

SEQ ID NO: 2500109 - RNA, 19 nt, Artificial Sequence
  Description of Artificial Sequence: Synthetic oligonucleotide
acgugaacacgcuggggaa

SEQ ID NO: 2500110 - RNA, 19 nt, Artificial Sequence
  Description of Artificial Sequence: Synthetic oligonucleotide
cuggggaaacucgaguguc

SEQ ID NO: 2500111 - RNA, 19 nt, Artificial Sequence
  Description of Artificial Sequence: Synthetic oligonucleotide
cucgagugucacccacugg

SEQ ID NO: 2500112 - RNA, 19 nt, Artificial Sequence
  Description of Artificial Sequence: Synthetic oligonucleotide
uagcucuuacacugcuuuc

SEQ ID NO: 2500113 - RNA, 19 nt, Artificial Sequence
  Description of Artificial Sequence: Synthetic oligonucleotide
ccggcuguuucgauuaagc

SEQ ID NO: 2500114 - RNA, 19 nt, Artificial Sequence
  Description of Artificial Sequence: Synthetic oligonucleotide
acgcuggggaaacucgagu

SEQ ID NO: 2500115 - RNA, 19 nt, Artificial Sequence
  Description of Artificial Sequence: Synthetic oligonucleotide
caacuucagucuguccacc

SEQ ID NO: 2500116 - RNA, 19 nt, Artificial Sequence
  Description of Artificial Sequence: Synthetic oligonucleotide
ucacccugcucacgguuuc

SEQ ID NO: 2500117 - RNA, 19 nt, Artificial Sequence
  Description of Artificial Sequence: Synthetic oligonucleotide
cucuuacacugcuuucuca

SEQ ID NO: 2500118 - RNA, 19 nt, Artificial Sequence
  Description of Artificial Sequence: Synthetic oligonucleotide
cugggaggggcccugguca

SEQ ID NO: 2500119 - RNA, 19 nt, Artificial Sequence
  Description of Artificial Sequence: Synthetic oligonucleotide
ggaacaaaccagucuccca

SEQ ID NO: 2500120 - RNA, 19 nt, Artificial Sequence
  Description of Artificial Sequence: Synthetic oligonucleotide
acaaucuugcugagugugu

SEQ ID NO: 2500121 - RNA, 19 nt, Artificial Sequence
  Description of Artificial Sequence: Synthetic oligonucleotide
auaaaucugugaacuugaa

SEQ ID NO: 2500122 - RNA, 19 nt, Artificial Sequence
  Description of Artificial Sequence: Synthetic oligonucleotide
cuuucucacccagcacccg

SEQ ID NO: 2500123 - RNA, 19 nt, Artificial Sequence
  Description of Artificial Sequence: Synthetic oligonucleotide
gugaacacgcuggggaaac

SEQ ID NO: 2500124 - RNA, 19 nt, Artificial Sequence
  Description of Artificial Sequence: Synthetic oligonucleotide
agaguacucuggggccugc

SEQ ID NO: 2500125 - RNA, 19 nt, Artificial Sequence
  Description of Artificial Sequence: Synthetic oligonucleotide
uccagguagcuguggcgac

SEQ ID NO: 2500126 - RNA, 19 nt, Artificial Sequence
  Description of Artificial Sequence: Synthetic oligonucleotide
caggaaccaauaaaucugu

SEQ ID NO: 2500127 - RNA, 19 nt, Artificial Sequence
  Description of Artificial Sequence: Synthetic oligonucleotide
aguggccgccgguagcucu

SEQ ID NO: 2500128 - RNA, 19 nt, Artificial Sequence
  Description of Artificial Sequence: Synthetic oligonucleotide
gggaacaaaccagucuccc

SEQ ID NO: 2500129 - RNA, 19 nt, Artificial Sequence
  Description of Artificial Sequence: Synthetic oligonucleotide
aucucgggccugcgacgcc

SEQ ID NO: 2500130 - RNA, 19 nt, Artificial Sequence
  Description of Artificial Sequence: Synthetic oligonucleotide
uggcccagccgccagccuc

SEQ ID NO: 2500131 - RNA, 19 nt, Artificial Sequence
  Description of Artificial Sequence: Synthetic oligonucleotide
uguuucgauuaagcacaga

SEQ ID NO: 2500132 - RNA, 19 nt, Artificial Sequence
  Description of Artificial Sequence: Synthetic oligonucleotide
caucucgggccugcgacgc

SEQ ID NO: 2500133 - RNA, 19 nt, Artificial Sequence
  Description of Artificial Sequence: Synthetic oligonucleotide
agaagguugaagggcguuu

SEQ ID NO: 2500134 - RNA, 19 nt, Artificial Sequence
  Description of Artificial Sequence: Synthetic oligonucleotide
cggggcaaaccaaagacug

SEQ ID NO: 2500135 - RNA, 19 nt, Artificial Sequence
  Description of Artificial Sequence: Synthetic oligonucleotide
ggcuugaggcagcuccugg

SEQ ID NO: 2500136 - RNA, 19 nt, Artificial Sequence
  Description of Artificial Sequence: Synthetic oligonucleotide
aguucgaaccccggcgcug

SEQ ID NO: 2500137 - RNA, 19 nt, Artificial Sequence
  Description of Artificial Sequence: Synthetic oligonucleotide
gccacuccccacuuggccc

SEQ ID NO: 2500138 - RNA, 19 nt, Artificial Sequence
  Description of Artificial Sequence: Synthetic oligonucleotide
ccaaauugccggcuguuuc

SEQ ID NO: 2500139 - RNA, 19 nt, Artificial Sequence
  Description of Artificial Sequence: Synthetic oligonucleotide
cucacccagcacccgcagg

SEQ ID NO: 2500140 - RNA, 19 nt, Artificial Sequence
  Description of Artificial Sequence: Synthetic oligonucleotide
cuuggcccagccgccagcc

SEQ ID NO: 2500141 - RNA, 19 nt, Artificial Sequence
  Description of Artificial Sequence: Synthetic oligonucleotide
aggaaccaauaaaucugug

SEQ ID NO: 2500142 - RNA, 19 nt, Artificial Sequence
  Description of Artificial Sequence: Synthetic oligonucleotide
ucgggcgaguucgaacccc

SEQ ID NO: 2500143 - RNA, 19 nt, Artificial Sequence
  Description of Artificial Sequence: Synthetic oligonucleotide
cugcagaccccgagugaag

SEQ ID NO: 2500144 - RNA, 19 nt, Artificial Sequence
  Description of Artificial Sequence: Synthetic oligonucleotide
cuugcugagugugucccca

SEQ ID NO: 2500145 - RNA, 19 nt, Artificial Sequence
  Description of Artificial Sequence: Synthetic oligonucleotide
ggugauggagacccauauc

SEQ ID NO: 2500146 - RNA, 19 nt, Artificial Sequence
  Description of Artificial Sequence: Synthetic oligonucleotide
acaggugauggagacccau

SEQ ID NO: 2500147 - RNA, 19 nt, Artificial Sequence
  Description of Artificial Sequence: Synthetic oligonucleotide
cccgagugaagacagccug

SEQ ID NO: 2500148 - RNA, 19 nt, Artificial Sequence
  Description of Artificial Sequence: Synthetic oligonucleotide
guugggaacccaggcacuc

SEQ ID NO: 2500149 - RNA, 19 nt, Artificial Sequence
  Description of Artificial Sequence: Synthetic oligonucleotide
ggggcaaaccaaagacugg

SEQ ID NO: 2500150 - RNA, 19 nt, Artificial Sequence
  Description of Artificial Sequence: Synthetic oligonucleotide
acucacccugcucacgguu

SEQ ID NO: 2500151 - RNA, 19 nt, Artificial Sequence
  Description of Artificial Sequence: Synthetic oligonucleotide
gagaagccgcccuggaacu

SEQ ID NO: 2500152 - RNA, 19 nt, Artificial Sequence
  Description of Artificial Sequence: Synthetic oligonucleotide
agccuguugggaacccagg

SEQ ID NO: 2500153 - RNA, 19 nt, Artificial Sequence
  Description of Artificial Sequence: Synthetic oligonucleotide
gcugaguguguccccagac

SEQ ID NO: 2500154 - RNA, 19 nt, Artificial Sequence
  Description of Artificial Sequence: Synthetic oligonucleotide
ggcacucagggaacaaacc

SEQ ID NO: 2500155 - RNA, 19 nt, Artificial Sequence
  Description of Artificial Sequence: Synthetic oligonucleotide
acccugcucacgguuucgg

SEQ ID NO: 2500156 - RNA, 19 nt, Artificial Sequence
  Description of Artificial Sequence: Synthetic oligonucleotide
cccacagugcaacagguga

SEQ ID NO: 2500157 - RNA, 19 nt, Artificial Sequence
  Description of Artificial Sequence: Synthetic oligonucleotide
ggcgaguucgaaccccggc

SEQ ID NO: 2500158 - RNA, 19 nt, Artificial Sequence
  Description of Artificial Sequence: Synthetic oligonucleotide
aaccuuccagguagcugug

SEQ ID NO: 2500159 - RNA, 19 nt, Artificial Sequence
  Description of Artificial Sequence: Synthetic oligonucleotide
cucgggcgaguucgaaccc

SEQ ID NO: 2500160 - RNA, 19 nt, Artificial Sequence
  Description of Artificial Sequence: Synthetic oligonucleotide
gcugcgugacgugaacacg

SEQ ID NO: 2500161 - RNA, 19 nt, Artificial Sequence
  Description of Artificial Sequence: Synthetic oligonucleotide
ggaaguggccgccgguagc

SEQ ID NO: 2500162 - RNA, 19 nt, Artificial Sequence
  Description of Artificial Sequence: Synthetic oligonucleotide
gcuuucucacccagcaccc

SEQ ID NO: 2500163 - RNA, 19 nt, Artificial Sequence
  Description of Artificial Sequence: Synthetic oligonucleotide
agguagcuguggcgacugg

SEQ ID NO: 2500164 - RNA, 19 nt, Artificial Sequence
  Description of Artificial Sequence: Synthetic oligonucleotide
gggaaacucgagugucacc

SEQ ID NO: 2500165 - RNA, 19 nt, Artificial Sequence
  Description of Artificial Sequence: Synthetic oligonucleotide
guguccucaaaggucaacu

SEQ ID NO: 2500166 - RNA, 19 nt, Artificial Sequence
  Description of Artificial Sequence: Synthetic oligonucleotide
gggcguuuguguccucagg

SEQ ID NO: 2500167 - RNA, 19 nt, Artificial Sequence
  Description of Artificial Sequence: Synthetic oligonucleotide
cugccacuccccacuuggc

SEQ ID NO: 2500168 - RNA, 19 nt, Artificial Sequence
  Description of Artificial Sequence: Synthetic oligonucleotide
ggcuuccuggaggaagugg

SEQ ID NO: 2500169 - RNA, 19 nt, Artificial Sequence
  Description of Artificial Sequence: Synthetic oligonucleotide
ucgggccugcgacgccucg

SEQ ID NO: 2500170 - RNA, 19 nt, Artificial Sequence
  Description of Artificial Sequence: Synthetic oligonucleotide
ugaacacgcuggggaaacu

SEQ ID NO: 2500171 - RNA, 19 nt, Artificial Sequence
  Description of Artificial Sequence: Synthetic oligonucleotide
agucucccacaacuggcuu

SEQ ID NO: 2500172 - RNA, 19 nt, Artificial Sequence
  Description of Artificial Sequence: Synthetic oligonucleotide
agcacccgcaggugguaga

SEQ ID NO: 2500173 - RNA, 19 nt, Artificial Sequence
  Description of Artificial Sequence: Synthetic oligonucleotide
gacagccuguugggaaccc

SEQ ID NO: 2500174 - RNA, 19 nt, Artificial Sequence
  Description of Artificial Sequence: Synthetic oligonucleotide
cuggaggaaguggccgccg

SEQ ID NO: 2500175 - RNA, 19 nt, Artificial Sequence
  Description of Artificial Sequence: Synthetic oligonucleotide
cagugguggcagagggccc

SEQ ID NO: 2500176 - RNA, 19 nt, Artificial Sequence
  Description of Artificial Sequence: Synthetic oligonucleotide
cgauuaagcacagaacuca

SEQ ID NO: 2500177 - RNA, 19 nt, Artificial Sequence
  Description of Artificial Sequence: Synthetic oligonucleotide
accccggcgcugccacucc

SEQ ID NO: 2500178 - RNA, 19 nt, Artificial Sequence
  Description of Artificial Sequence: Synthetic oligonucleotide
aguggggauggagaagguu

SEQ ID NO: 2500179 - RNA, 19 nt, Artificial Sequence
  Description of Artificial Sequence: Synthetic oligonucleotide
ccuggucagaguuccagca

SEQ ID NO: 2500180 - RNA, 19 nt, Artificial Sequence
  Description of Artificial Sequence: Synthetic oligonucleotide
gaaguggccgccgguagcu

SEQ ID NO: 2500181 - RNA, 19 nt, Artificial Sequence
  Description of Artificial Sequence: Synthetic oligonucleotide
cagaccccgagugaagaca

SEQ ID NO: 2500182 - RNA, 19 nt, Artificial Sequence
  Description of Artificial Sequence: Synthetic oligonucleotide
acacgcuggggaaacucga

SEQ ID NO: 2500183 - RNA, 19 nt, Artificial Sequence
  Description of Artificial Sequence: Synthetic oligonucleotide
ccgccgguagcucuuacac

SEQ ID NO: 2500184 - RNA, 19 nt, Artificial Sequence
  Description of Artificial Sequence: Synthetic oligonucleotide
uggcucaucucgggccugc

SEQ ID NO: 2500185 - RNA, 19 nt, Artificial Sequence
  Description of Artificial Sequence: Synthetic oligonucleotide
ucccaaauugccggcuguu

SEQ ID NO: 2500186 - RNA, 19 nt, Artificial Sequence
  Description of Artificial Sequence: Synthetic oligonucleotide
agaagccgcccuggaacug

SEQ ID NO: 2500187 - RNA, 19 nt, Artificial Sequence
  Description of Artificial Sequence: Synthetic oligonucleotide
guguccccagacugugaac

SEQ ID NO: 2500188 - RNA, 19 nt, Artificial Sequence
  Description of Artificial Sequence: Synthetic oligonucleotide
ggggaaacucgagugucac

SEQ ID NO: 2500189 - RNA, 19 nt, Artificial Sequence
  Description of Artificial Sequence: Synthetic oligonucleotide
gaggaaguggccgccggua

SEQ ID NO: 2500190 - RNA, 19 nt, Artificial Sequence
  Description of Artificial Sequence: Synthetic oligonucleotide
ugaagggcuucuggguguu

SEQ ID NO: 2500191 - RNA, 19 nt, Artificial Sequence
  Description of Artificial Sequence: Synthetic oligonucleotide
cuagcgcucgggcgaguuc

SEQ ID NO: 2500192 - RNA, 19 nt, Artificial Sequence
  Description of Artificial Sequence: Synthetic oligonucleotide
cgcuggggaaacucgagug

SEQ ID NO: 2500193 - RNA, 19 nt, Artificial Sequence
  Description of Artificial Sequence: Synthetic oligonucleotide
cagaguacucuggggccug

SEQ ID NO: 2500194 - RNA, 19 nt, Artificial Sequence
  Description of Artificial Sequence: Synthetic oligonucleotide
ucacgguuucggggcaaac

SEQ ID NO: 2500195 - RNA, 19 nt, Artificial Sequence
  Description of Artificial Sequence: Synthetic oligonucleotide
cugaguguguccccagacu

SEQ ID NO: 2500196 - RNA, 19 nt, Artificial Sequence
  Description of Artificial Sequence: Synthetic oligonucleotide
gcaacaggugauggagacc

SEQ ID NO: 2500197 - RNA, 19 nt, Artificial Sequence
  Description of Artificial Sequence: Synthetic oligonucleotide
cuccccaacaggaaccaau

SEQ ID NO: 2500198 - RNA, 19 nt, Artificial Sequence
  Description of Artificial Sequence: Synthetic oligonucleotide
acagccuguugggaaccca

SEQ ID NO: 2500199 - RNA, 19 nt, Artificial Sequence
  Description of Artificial Sequence: Synthetic oligonucleotide
cuggggccugcagaccccg

SEQ ID NO: 2500200 - RNA, 19 nt, Artificial Sequence
  Description of Artificial Sequence: Synthetic oligonucleotide
cgaguucgaaccccggcgc

SEQ ID NO: 2500201 - RNA, 19 nt, Artificial Sequence
  Description of Artificial Sequence: Synthetic oligonucleotide
ucccaccuccucccacagu

SEQ ID NO: 2500202 - RNA, 19 nt, Artificial Sequence
  Description of Artificial Sequence: Synthetic oligonucleotide
cacccugcucacgguuucg

SEQ ID NO: 2500203 - RNA, 19 nt, Artificial Sequence
  Description of Artificial Sequence: Synthetic oligonucleotide
agucggugguguccucaaa

SEQ ID NO: 2500204 - RNA, 19 nt, Artificial Sequence
  Description of Artificial Sequence: Synthetic oligonucleotide
gguuucggggcaaaccaaa

SEQ ID NO: 2500205 - RNA, 19 nt, Artificial Sequence
  Description of Artificial Sequence: Synthetic oligonucleotide
ggcccuccccaacaggaac

SEQ ID NO: 2500206 - RNA, 19 nt, Artificial Sequence
  Description of Artificial Sequence: Synthetic oligonucleotide
ucgaaccccggcgcugcca

SEQ ID NO: 2500207 - RNA, 19 nt, Artificial Sequence
  Description of Artificial Sequence: Synthetic oligonucleotide
uccccagacugugaaccuu

SEQ ID NO: 2500208 - RNA, 19 nt, Artificial Sequence
  Description of Artificial Sequence: Synthetic oligonucleotide
cucccacagugcaacaggu

SEQ ID NO: 2500209 - RNA, 19 nt, Artificial Sequence
  Description of Artificial Sequence: Synthetic oligonucleotide
gaguucgaaccccggcgcu

SEQ ID NO: 2500210 - RNA, 19 nt, Artificial Sequence
  Description of Artificial Sequence: Synthetic oligonucleotide
cagucucccacaacuggcu

SEQ ID NO: 2500211 - RNA, 19 nt, Artificial Sequence
  Description of Artificial Sequence: Synthetic oligonucleotide
caggugauggagacccaua

SEQ ID NO: 2500212 - RNA, 19 nt, Artificial Sequence
  Description of Artificial Sequence: Synthetic oligonucleotide
gacgccucgccuagcgcuc

SEQ ID NO: 2500213 - RNA, 19 nt, Artificial Sequence
  Description of Artificial Sequence: Synthetic oligonucleotide
gcagaccccgagugaagac

SEQ ID NO: 2500214 - RNA, 19 nt, Artificial Sequence
  Description of Artificial Sequence: Synthetic oligonucleotide
ccugcgacgccucgccuag

SEQ ID NO: 2500215 - RNA, 19 nt, Artificial Sequence
  Description of Artificial Sequence: Synthetic oligonucleotide
cccagacugugaaccuucc

SEQ ID NO: 2500216 - RNA, 19 nt, Artificial Sequence
  Description of Artificial Sequence: Synthetic oligonucleotide
gcccuggucagaguuccag

SEQ ID NO: 2500217 - RNA, 19 nt, Artificial Sequence
  Description of Artificial Sequence: Synthetic oligonucleotide
uuggcccagccgccagccu

SEQ ID NO: 2500218 - RNA, 19 nt, Artificial Sequence
  Description of Artificial Sequence: Synthetic oligonucleotide
gaccccgagugaagacagc

SEQ ID NO: 2500219 - RNA, 19 nt, Artificial Sequence
  Description of Artificial Sequence: Synthetic oligonucleotide
cccacuuggcccagccgcc

SEQ ID NO: 2500220 - RNA, 19 nt, Artificial Sequence
  Description of Artificial Sequence: Synthetic oligonucleotide
cagcaugucuccucauccu

SEQ ID NO: 2500221 - RNA, 19 nt, Artificial Sequence
  Description of Artificial Sequence: Synthetic oligonucleotide
ccgcaggugguagaugacc

SEQ ID NO: 2500222 - RNA, 19 nt, Artificial Sequence
  Description of Artificial Sequence: Synthetic oligonucleotide
ugccggcuguuucgauuaa

SEQ ID NO: 2500223 - RNA, 19 nt, Artificial Sequence
  Description of Artificial Sequence: Synthetic oligonucleotide
cccugcucacgguuucggg

SEQ ID NO: 2500224 - RNA, 19 nt, Artificial Sequence
  Description of Artificial Sequence: Synthetic oligonucleotide
aagccgcccuggaacugca

SEQ ID NO: 2500225 - RNA, 19 nt, Artificial Sequence
  Description of Artificial Sequence: Synthetic oligonucleotide
gguguccucaaaggucaac

SEQ ID NO: 2500226 - RNA, 19 nt, Artificial Sequence
  Description of Artificial Sequence: Synthetic oligonucleotide
ccgguagcucuuacacugc

SEQ ID NO: 2500227 - RNA, 19 nt, Artificial Sequence
  Description of Artificial Sequence: Synthetic oligonucleotide
ggcgacuggagaagccgcc

SEQ ID NO: 2500228 - RNA, 19 nt, Artificial Sequence
  Description of Artificial Sequence: Synthetic oligonucleotide
gcagcugcgugacgugaac

SEQ ID NO: 2500229 - RNA, 19 nt, Artificial Sequence
  Description of Artificial Sequence: Synthetic oligonucleotide
cacccacugggaggggccc

SEQ ID NO: 2500230 - RNA, 19 nt, Artificial Sequence
  Description of Artificial Sequence: Synthetic oligonucleotide
gggccugcgacgccucgcc

SEQ ID NO: 2500231 - RNA, 19 nt, Artificial Sequence
  Description of Artificial Sequence: Synthetic oligonucleotide
gaguacucuggggccugca

SEQ ID NO: 2500232 - RNA, 19 nt, Artificial Sequence
  Description of Artificial Sequence: Synthetic oligonucleotide
gcuggggaaacucgagugu

SEQ ID NO: 2500233 - RNA, 19 nt, Artificial Sequence
  Description of Artificial Sequence: Synthetic oligonucleotide
acgccucgccuagcgcucg

SEQ ID NO: 2500234 - RNA, 19 nt, Artificial Sequence
  Description of Artificial Sequence: Synthetic oligonucleotide
caggcacucagggaacaaa

SEQ ID NO: 2500235 - RNA, 19 nt, Artificial Sequence
  Description of Artificial Sequence: Synthetic oligonucleotide
gcgugacgugaacacgcug

SEQ ID NO: 2500236 - RNA, 19 nt, Artificial Sequence
  Description of Artificial Sequence: Synthetic oligonucleotide
uggggccugcagaccccga

SEQ ID NO: 2500237 - RNA, 19 nt, Artificial Sequence
  Description of Artificial Sequence: Synthetic oligonucleotide
cuggcuugaggcagcuccu

SEQ ID NO: 2500238 - RNA, 19 nt, Artificial Sequence
  Description of Artificial Sequence: Synthetic oligonucleotide
cagcugcgugacgugaaca

SEQ ID NO: 2500239 - RNA, 19 nt, Artificial Sequence
  Description of Artificial Sequence: Synthetic oligonucleotide
cgggcgaguucgaaccccg

SEQ ID NO: 2500240 - RNA, 19 nt, Artificial Sequence
  Description of Artificial Sequence: Synthetic oligonucleotide
gagaagguugaagggcguu

SEQ ID NO: 2500241 - RNA, 19 nt, Artificial Sequence
  Description of Artificial Sequence: Synthetic oligonucleotide
ccacaacuggcuugaggca

SEQ ID NO: 2500242 - RNA, 19 nt, Artificial Sequence
  Description of Artificial Sequence: Synthetic oligonucleotide
guccccagacugugaaccu

SEQ ID NO: 2500243 - RNA, 19 nt, Artificial Sequence
  Description of Artificial Sequence: Synthetic oligonucleotide
gaagggcguuuguguccuc

SEQ ID NO: 2500244 - RNA, 19 nt, Artificial Sequence
  Description of Artificial Sequence: Synthetic oligonucleotide
gcguuuguguccucagggu

SEQ ID NO: 2500245 - RNA, 19 nt, Artificial Sequence
  Description of Artificial Sequence: Synthetic oligonucleotide
gccggcuguuucgauuaag

SEQ ID NO: 2500246 - RNA, 19 nt, Artificial Sequence
  Description of Artificial Sequence: Synthetic oligonucleotide
ccucgccuagcgcucgggc

SEQ ID NO: 2500247 - RNA, 19 nt, Artificial Sequence
  Description of Artificial Sequence: Synthetic oligonucleotide
gaagggcuucuggguguuc

SEQ ID NO: 2500248 - RNA, 19 nt, Artificial Sequence
  Description of Artificial Sequence: Synthetic oligonucleotide
ggagacccauauccugaaa

SEQ ID NO: 2500249 - RNA, 19 nt, Artificial Sequence
  Description of Artificial Sequence: Synthetic oligonucleotide
cugugaacuugaagggcuu

SEQ ID NO: 2500250 - RNA, 19 nt, Artificial Sequence
  Description of Artificial Sequence: Synthetic oligonucleotide
ggucagaguuccagcaugu

SEQ ID NO: 2500251 - RNA, 19 nt, Artificial Sequence
  Description of Artificial Sequence: Synthetic oligonucleotide
ccugcagaccccgagugaa

SEQ ID NO: 2500252 - RNA, 19 nt, Artificial Sequence
  Description of Artificial Sequence: Synthetic oligonucleotide
cuccucccacagugcaaca

SEQ ID NO: 2500253 - RNA, 19 nt, Artificial Sequence
  Description of Artificial Sequence: Synthetic oligonucleotide
cucgggccugcgacgccuc

SEQ ID NO: 2500254 - RNA, 19 nt, Artificial Sequence
  Description of Artificial Sequence: Synthetic oligonucleotide
cucaccccaccucccaccu

SEQ ID NO: 2500255 - RNA, 19 nt, Artificial Sequence
  Description of Artificial Sequence: Synthetic oligonucleotide
cuggcucaucucgggccug

SEQ ID NO: 2500256 - RNA, 19 nt, Artificial Sequence
  Description of Artificial Sequence: Synthetic oligonucleotide
cggcuguuucgauuaagca

SEQ ID NO: 2500257 - RNA, 19 nt, Artificial Sequence
  Description of Artificial Sequence: Synthetic oligonucleotide
agccgcccuggaacugcac

SEQ ID NO: 2500258 - RNA, 19 nt, Artificial Sequence
  Description of Artificial Sequence: Synthetic oligonucleotide
cucacccugcucacgguuu

SEQ ID NO: 2500259 - RNA, 19 nt, Artificial Sequence
  Description of Artificial Sequence: Synthetic oligonucleotide
gaguuccagcaugucuccu

SEQ ID NO: 2500260 - RNA, 19 nt, Artificial Sequence
  Description of Artificial Sequence: Synthetic oligonucleotide
gcucaucucgggccugcga

SEQ ID NO: 2500261 - RNA, 19 nt, Artificial Sequence
  Description of Artificial Sequence: Synthetic oligonucleotide
gugaaccuuccagguagcu

SEQ ID NO: 2500262 - RNA, 19 nt, Artificial Sequence
  Description of Artificial Sequence: Synthetic oligonucleotide
cacccgcaggugguagaug

SEQ ID NO: 2500263 - RNA, 19 nt, Artificial Sequence
  Description of Artificial Sequence: Synthetic oligonucleotide
gccgccgguagcucuuaca

SEQ ID NO: 2500264 - RNA, 19 nt, Artificial Sequence
  Description of Artificial Sequence: Synthetic oligonucleotide
ccaauaaaucugugaacuu

SEQ ID NO: 2500265 - RNA, 19 nt, Artificial Sequence
  Description of Artificial Sequence: Synthetic oligonucleotide
ggcaaaccaaagacuggcu

SEQ ID NO: 2500266 - RNA, 19 nt, Artificial Sequence
  Description of Artificial Sequence: Synthetic oligonucleotide
cguuuguguccucagggua

SEQ ID NO: 2500267 - RNA, 19 nt, Artificial Sequence
  Description of Artificial Sequence: Synthetic oligonucleotide
ccucccaccuccucccaca

SEQ ID NO: 2500268 - RNA, 19 nt, Artificial Sequence
  Description of Artificial Sequence: Synthetic oligonucleotide
gggcgaguucgaaccccgg

SEQ ID NO: 2500269 - RNA, 19 nt, Artificial Sequence
  Description of Artificial Sequence: Synthetic oligonucleotide
gcgacgccucgccuagcgc

SEQ ID NO: 2500270 - RNA, 19 nt, Artificial Sequence
  Description of Artificial Sequence: Synthetic oligonucleotide
cucccacaacuggcuugag

SEQ ID NO: 2500271 - RNA, 19 nt, Artificial Sequence
  Description of Artificial Sequence: Synthetic oligonucleotide
cccgcaggugguagaugac

SEQ ID NO: 2500272 - RNA, 19 nt, Artificial Sequence
  Description of Artificial Sequence: Synthetic oligonucleotide
ccacuccccacuuggccca

SEQ ID NO: 2500273 - RNA, 19 nt, Artificial Sequence
  Description of Artificial Sequence: Synthetic oligonucleotide
cgcucgggcgaguucgaac

SEQ ID NO: 2500274 - RNA, 19 nt, Artificial Sequence
  Description of Artificial Sequence: Synthetic oligonucleotide
cucacgguuucggggcaaa

SEQ ID NO: 2500275 - RNA, 19 nt, Artificial Sequence
  Description of Artificial Sequence: Synthetic oligonucleotide
ggaggaaguggccgccggu

SEQ ID NO: 2500276 - RNA, 19 nt, Artificial Sequence
  Description of Artificial Sequence: Synthetic oligonucleotide
ggagaagguugaagggcgu

SEQ ID NO: 2500277 - RNA, 19 nt, Artificial Sequence
  Description of Artificial Sequence: Synthetic oligonucleotide
gccugcgacgccucgccua

SEQ ID NO: 2500278 - RNA, 19 nt, Artificial Sequence
  Description of Artificial Sequence: Synthetic oligonucleotide
gccucgccuagcgcucggg

SEQ ID NO: 2500279 - RNA, 19 nt, Artificial Sequence
  Description of Artificial Sequence: Synthetic oligonucleotide
ggggauggagaagguugaa

SEQ ID NO: 2500280 - RNA, 19 nt, Artificial Sequence
  Description of Artificial Sequence: Synthetic oligonucleotide
cugcgacgccucgccuagc

SEQ ID NO: 2500281 - RNA, 19 nt, Artificial Sequence
  Description of Artificial Sequence: Synthetic oligonucleotide
ccacagugcaacaggugau

SEQ ID NO: 2500282 - RNA, 19 nt, Artificial Sequence
  Description of Artificial Sequence: Synthetic oligonucleotide
ggggcccuggucagaguuc

SEQ ID NO: 2500283 - RNA, 19 nt, Artificial Sequence
  Description of Artificial Sequence: Synthetic oligonucleotide
ccgagugaagacagccugu

SEQ ID NO: 2500284 - RNA, 19 nt, Artificial Sequence
  Description of Artificial Sequence: Synthetic oligonucleotide
gaaccccggcgcugccacu

SEQ ID NO: 2500285 - RNA, 19 nt, Artificial Sequence
  Description of Artificial Sequence: Synthetic oligonucleotide
gguagcucuuacacugcuu

SEQ ID NO: 2500286 - RNA, 19 nt, Artificial Sequence
  Description of Artificial Sequence: Synthetic oligonucleotide
uggccgccgguagcucuua

SEQ ID NO: 2500287 - RNA, 19 nt, Artificial Sequence
  Description of Artificial Sequence: Synthetic oligonucleotide
cccacugggaggggcccug

SEQ ID NO: 2500288 - RNA, 19 nt, Artificial Sequence
  Description of Artificial Sequence: Synthetic oligonucleotide
ccuggacagugguggcaga

SEQ ID NO: 2500289 - RNA, 19 nt, Artificial Sequence
  Description of Artificial Sequence: Synthetic oligonucleotide
ccagaguacucuggggccu

SEQ ID NO: 2500290 - RNA, 19 nt, Artificial Sequence
  Description of Artificial Sequence: Synthetic oligonucleotide
cgacgccucgccuagcgcu

SEQ ID NO: 2500291 - RNA, 19 nt, Artificial Sequence
  Description of Artificial Sequence: Synthetic oligonucleotide
ggccgccgguagcucuuac

SEQ ID NO: 2500292 - RNA, 19 nt, Artificial Sequence
  Description of Artificial Sequence: Synthetic oligonucleotide
cccuccccaacaggaacca

SEQ ID NO: 2500293 - RNA, 19 nt, Artificial Sequence
  Description of Artificial Sequence: Synthetic oligonucleotide
ccccgagugaagacagccu

SEQ ID NO: 2500294 - RNA, 19 nt, Artificial Sequence
  Description of Artificial Sequence: Synthetic oligonucleotide
cgguuucggggcaaaccaa

SEQ ID NO: 2500295 - RNA, 19 nt, Artificial Sequence
  Description of Artificial Sequence: Synthetic oligonucleotide
cccaggcacucagggaaca

SEQ ID NO: 2500296 - RNA, 19 nt, Artificial Sequence
  Description of Artificial Sequence: Synthetic oligonucleotide
cgugaacacgcuggggaaa

SEQ ID NO: 2500297 - RNA, 19 nt, Artificial Sequence
  Description of Artificial Sequence: Synthetic oligonucleotide
cggugguguccucaaaggu

SEQ ID NO: 2500298 - RNA, 19 nt, Artificial Sequence
  Description of Artificial Sequence: Synthetic oligonucleotide
gggcccuccccaacaggaa

SEQ ID NO: 2500299 - RNA, 19 nt, Artificial Sequence
  Description of Artificial Sequence: Synthetic oligonucleotide
ccaggcacucagggaacaa

SEQ ID NO: 2500300 - RNA, 19 nt, Artificial Sequence
  Description of Artificial Sequence: Synthetic oligonucleotide
guggccgccgguagcucuu

SEQ ID NO: 2500301 - RNA, 19 nt, Artificial Sequence
  Description of Artificial Sequence: Synthetic oligonucleotide
gcacccgcaggugguagau

SEQ ID NO: 2500302 - RNA, 19 nt, Artificial Sequence
  Description of Artificial Sequence: Synthetic oligonucleotide
cgguagcucuuacacugcu

SEQ ID NO: 2500303 - RNA, 19 nt, Artificial Sequence
  Description of Artificial Sequence: Synthetic oligonucleotide
cgggccugcgacgccucgc

SEQ ID NO: 2500304 - RNA, 19 nt, Artificial Sequence
  Description of Artificial Sequence: Synthetic oligonucleotide
cgccuagcgcucgggcgag

SEQ ID NO: 2500305 - RNA, 19 nt, Artificial Sequence
  Description of Artificial Sequence: Synthetic oligonucleotide
cgccucgccuagcgcucgg

SEQ ID NO: 2500306 - RNA, 19 nt, Artificial Sequence
  Description of Artificial Sequence: Synthetic oligonucleotide
cccaaauugccggcuguuu

SEQ ID NO: 2500307 - RNA, 19 nt, Artificial Sequence
  Description of Artificial Sequence: Synthetic oligonucleotide
ggccugcgacgccucgccu

SEQ ID NO: 2500308 - RNA, 19 nt, Artificial Sequence
  Description of Artificial Sequence: Synthetic oligonucleotide
cgccgguagcucuuacacu

SEQ ID NO: 2500309 - RNA, 19 nt, Artificial Sequence
  Description of Artificial Sequence: Synthetic oligonucleotide
gcccagccgccagccuccc

SEQ ID NO: 2500310 - RNA, 19 nt, Artificial Sequence
  Description of Artificial Sequence: Synthetic oligonucleotide
ccagcacccgcagguggua

SEQ ID NO: 2500311 - RNA, 19 nt, Artificial Sequence
  Description of Artificial Sequence: Synthetic oligonucleotide
gcgcucgggcgaguucgaa

SEQ ID NO: 2500312 - RNA, 19 nt, Artificial Sequence
  Description of Artificial Sequence: Synthetic oligonucleotide
ccuccccaacaggaaccaa

SEQ ID NO: 2500313 - RNA, 19 nt, Artificial Sequence
  Description of Artificial Sequence: Synthetic oligonucleotide
ccuagcgcucgggcgaguu

SEQ ID NO: 2500314 - RNA, 19 nt, Artificial Sequence
  Description of Artificial Sequence: Synthetic oligonucleotide
gccuagcgcucgggcgagu

SEQ ID NO: 2500315 - RNA, 19 nt, Artificial Sequence
  Description of Artificial Sequence: Synthetic oligonucleotide
gagaagauaauuugaaggg

SEQ ID NO: 2500316 - RNA, 19 nt, Artificial Sequence
  Description of Artificial Sequence: Synthetic oligonucleotide
aauguaugguuccacaauc

SEQ ID NO: 2500317 - RNA, 19 nt, Artificial Sequence
  Description of Artificial Sequence: Synthetic oligonucleotide
uugagcuuaacaaaggugc

SEQ ID NO: 2500318 - RNA, 19 nt, Artificial Sequence
  Description of Artificial Sequence: Synthetic oligonucleotide
aacuguauagaucucauga

SEQ ID NO: 2500319 - RNA, 19 nt, Artificial Sequence
  Description of Artificial Sequence: Synthetic oligonucleotide
aauuagauccuccaugcag

SEQ ID NO: 2500320 - RNA, 19 nt, Artificial Sequence
  Description of Artificial Sequence: Synthetic oligonucleotide
ucauaaaugagcuuccucc

SEQ ID NO: 2500321 - RNA, 19 nt, Artificial Sequence
  Description of Artificial Sequence: Synthetic oligonucleotide
uuuaccaagagaucgagca

SEQ ID NO: 2500322 - RNA, 19 nt, Artificial Sequence
  Description of Artificial Sequence: Synthetic oligonucleotide
uuauuaacugaccagauua

SEQ ID NO: 2500323 - RNA, 19 nt, Artificial Sequence
  Description of Artificial Sequence: Synthetic oligonucleotide
uuaauugaagccuuguuga

SEQ ID NO: 2500324 - RNA, 19 nt, Artificial Sequence
  Description of Artificial Sequence: Synthetic oligonucleotide
gaagaucugacgaagacgg

SEQ ID NO: 2500325 - RNA, 19 nt, Artificial Sequence
  Description of Artificial Sequence: Synthetic oligonucleotide
aacucugcgaaauuccuuc

SEQ ID NO: 2500326 - RNA, 19 nt, Artificial Sequence
  Description of Artificial Sequence: Synthetic oligonucleotide
aaauaccacaggcaacacc

SEQ ID NO: 2500327 - RNA, 19 nt, Artificial Sequence
  Description of Artificial Sequence: Synthetic oligonucleotide
ggagaagauaauuugaagg

SEQ ID NO: 2500328 - RNA, 19 nt, Artificial Sequence
  Description of Artificial Sequence: Synthetic oligonucleotide
uuuucuuaaggguuucugg

SEQ ID NO: 2500329 - RNA, 19 nt, Artificial Sequence
  Description of Artificial Sequence: Synthetic oligonucleotide
uccguauuuaccaagagau

SEQ ID NO: 2500330 - RNA, 19 nt, Artificial Sequence
  Description of Artificial Sequence: Synthetic oligonucleotide
ucuucauuccaccucgugg

SEQ ID NO: 2500331 - RNA, 19 nt, Artificial Sequence
  Description of Artificial Sequence: Synthetic oligonucleotide
ugaauuagauccuccaugc

SEQ ID NO: 2500332 - RNA, 19 nt, Artificial Sequence
  Description of Artificial Sequence: Synthetic oligonucleotide
uuuacugacuucagguugg

SEQ ID NO: 2500333 - RNA, 19 nt, Artificial Sequence
  Description of Artificial Sequence: Synthetic oligonucleotide
uaugguuccacaauccuca

SEQ ID NO: 2500334 - RNA, 19 nt, Artificial Sequence
  Description of Artificial Sequence: Synthetic oligonucleotide
uugauuuugccauagccgc

SEQ ID NO: 2500335 - RNA, 19 nt, Artificial Sequence
  Description of Artificial Sequence: Synthetic oligonucleotide
gaugauuccguauuuacca

SEQ ID NO: 2500336 - RNA, 19 nt, Artificial Sequence
  Description of Artificial Sequence: Synthetic oligonucleotide
aaggaauugucugucaagg

SEQ ID NO: 2500337 - RNA, 19 nt, Artificial Sequence
  Description of Artificial Sequence: Synthetic oligonucleotide
aauugaagccuuguugagc

SEQ ID NO: 2500338 - RNA, 19 nt, Artificial Sequence
  Description of Artificial Sequence: Synthetic oligonucleotide
uaaaugagcuuccuccgcg

SEQ ID NO: 2500339 - RNA, 19 nt, Artificial Sequence
  Description of Artificial Sequence: Synthetic oligonucleotide
uuucuuaaggguuucuggc

SEQ ID NO: 2500340 - RNA, 19 nt, Artificial Sequence
  Description of Artificial Sequence: Synthetic oligonucleotide
aagcgcuucaccuucaacu

SEQ ID NO: 2500341 - RNA, 19 nt, Artificial Sequence
  Description of Artificial Sequence: Synthetic oligonucleotide
aaguuauuuacuuccuuga

SEQ ID NO: 2500342 - RNA, 19 nt, Artificial Sequence
  Description of Artificial Sequence: Synthetic oligonucleotide
auugauuuugccauagccg

SEQ ID NO: 2500343 - RNA, 19 nt, Artificial Sequence
  Description of Artificial Sequence: Synthetic oligonucleotide
acgaagacggagcagcugc

SEQ ID NO: 2500344 - RNA, 19 nt, Artificial Sequence
  Description of Artificial Sequence: Synthetic oligonucleotide
agaagauaauuugaagggc

SEQ ID NO: 2500345 - RNA, 19 nt, Artificial Sequence
  Description of Artificial Sequence: Synthetic oligonucleotide
agauccuccaugcagauga

SEQ ID NO: 2500346 - RNA, 19 nt, Artificial Sequence
  Description of Artificial Sequence: Synthetic oligonucleotide
uguuuauuaacugaccaga

SEQ ID NO: 2500347 - RNA, 19 nt, Artificial Sequence
  Description of Artificial Sequence: Synthetic oligonucleotide
aguucauccgucuaauaag

SEQ ID NO: 2500348 - RNA, 19 nt, Artificial Sequence
  Description of Artificial Sequence: Synthetic oligonucleotide
guuauuuacuuccuugaag

SEQ ID NO: 2500349 - RNA, 19 nt, Artificial Sequence
  Description of Artificial Sequence: Synthetic oligonucleotide
cuuuucauaaaugagcuuc

SEQ ID NO: 2500350 - RNA, 19 nt, Artificial Sequence
  Description of Artificial Sequence: Synthetic oligonucleotide
uucuuauugauuuugccau

SEQ ID NO: 2500351 - RNA, 19 nt, Artificial Sequence
  Description of Artificial Sequence: Synthetic oligonucleotide
aacaccuuaguucauccgu

SEQ ID NO: 2500352 - RNA, 19 nt, Artificial Sequence
  Description of Artificial Sequence: Synthetic oligonucleotide
ucagcauguuaauugaagc

SEQ ID NO: 2500353 - RNA, 19 nt, Artificial Sequence
  Description of Artificial Sequence: Synthetic oligonucleotide
gaagauaauuugaagggcc

SEQ ID NO: 2500354 - RNA, 19 nt, Artificial Sequence
  Description of Artificial Sequence: Synthetic oligonucleotide
aaaugagcuuccuccgcgc

SEQ ID NO: 2500355 - RNA, 19 nt, Artificial Sequence
  Description of Artificial Sequence: Synthetic oligonucleotide
uuuucauaaaugagcuucc

SEQ ID NO: 2500356 - RNA, 19 nt, Artificial Sequence
  Description of Artificial Sequence: Synthetic oligonucleotide
augaauuagauccuccaug

SEQ ID NO: 2500357 - RNA, 19 nt, Artificial Sequence
  Description of Artificial Sequence: Synthetic oligonucleotide
auaaaugagcuuccuccgc

SEQ ID NO: 2500358 - RNA, 19 nt, Artificial Sequence
  Description of Artificial Sequence: Synthetic oligonucleotide
acuguuuauuaacugacca

SEQ ID NO: 2500359 - RNA, 19 nt, Artificial Sequence
  Description of Artificial Sequence: Synthetic oligonucleotide
uauuuacuuccuugaagcg

SEQ ID NO: 2500360 - RNA, 19 nt, Artificial Sequence
  Description of Artificial Sequence: Synthetic oligonucleotide
ugaagaucugacgaagacg

SEQ ID NO: 2500361 - RNA, 19 nt, Artificial Sequence
  Description of Artificial Sequence: Synthetic oligonucleotide
acaaaugccaguuuggguu

SEQ ID NO: 2500362 - RNA, 19 nt, Artificial Sequence
  Description of Artificial Sequence: Synthetic oligonucleotide
aaugagcuuccuccgcgcc

SEQ ID NO: 2500363 - RNA, 19 nt, Artificial Sequence
  Description of Artificial Sequence: Synthetic oligonucleotide
aaugcuuugccuuuucaua

SEQ ID NO: 2500364 - RNA, 19 nt, Artificial Sequence
  Description of Artificial Sequence: Synthetic oligonucleotide
aaagcaaaguucuuccgaa

SEQ ID NO: 2500365 - RNA, 19 nt, Artificial Sequence
  Description of Artificial Sequence: Synthetic oligonucleotide
uagaugagcucauuuacug

SEQ ID NO: 2500366 - RNA, 19 nt, Artificial Sequence
  Description of Artificial Sequence: Synthetic oligonucleotide
aagagaucgagcaaucaag

SEQ ID NO: 2500367 - RNA, 19 nt, Artificial Sequence
  Description of Artificial Sequence: Synthetic oligonucleotide
uacaccauugauaccucgg

SEQ ID NO: 2500368 - RNA, 19 nt, Artificial Sequence
  Description of Artificial Sequence: Synthetic oligonucleotide
uuaacugaccagauuacaa

SEQ ID NO: 2500369 - RNA, 19 nt, Artificial Sequence
  Description of Artificial Sequence: Synthetic oligonucleotide
ugacuguuuauuaacugac

SEQ ID NO: 2500370 - RNA, 19 nt, Artificial Sequence
  Description of Artificial Sequence: Synthetic oligonucleotide
uguauagaucucaugaauu

SEQ ID NO: 2500371 - RNA, 19 nt, Artificial Sequence
  Description of Artificial Sequence: Synthetic oligonucleotide
gauaccucggauucggaug

SEQ ID NO: 2500372 - RNA, 19 nt, Artificial Sequence
  Description of Artificial Sequence: Synthetic oligonucleotide
uuguugagcuuaacaaagg

SEQ ID NO: 2500373 - RNA, 19 nt, Artificial Sequence
  Description of Artificial Sequence: Synthetic oligonucleotide
aaaguucuuccgaaagcgc

SEQ ID NO: 2500374 - RNA, 19 nt, Artificial Sequence
  Description of Artificial Sequence: Synthetic oligonucleotide
uuaacaaaggugccauuga

SEQ ID NO: 2500375 - RNA, 19 nt, Artificial Sequence
  Description of Artificial Sequence: Synthetic oligonucleotide
uaguucauccgucuaauaa

SEQ ID NO: 2500376 - RNA, 19 nt, Artificial Sequence
  Description of Artificial Sequence: Synthetic oligonucleotide
ucaaagcaaaguucuuccg

SEQ ID NO: 2500377 - RNA, 19 nt, Artificial Sequence
  Description of Artificial Sequence: Synthetic oligonucleotide
uauagaucucaugaauuag

SEQ ID NO: 2500378 - RNA, 19 nt, Artificial Sequence
  Description of Artificial Sequence: Synthetic oligonucleotide
agcaaaguucuuccgaaag

SEQ ID NO: 2500379 - RNA, 19 nt, Artificial Sequence
  Description of Artificial Sequence: Synthetic oligonucleotide
uugccuuuucauaaaugag

SEQ ID NO: 2500380 - RNA, 19 nt, Artificial Sequence
  Description of Artificial Sequence: Synthetic oligonucleotide
uuuacuuccuugaagcguu

SEQ ID NO: 2500381 - RNA, 19 nt, Artificial Sequence
  Description of Artificial Sequence: Synthetic oligonucleotide
uguugagcuuaacaaaggu

SEQ ID NO: 2500382 - RNA, 19 nt, Artificial Sequence
  Description of Artificial Sequence: Synthetic oligonucleotide
uaauaagccuguuuaucug

SEQ ID NO: 2500383 - RNA, 19 nt, Artificial Sequence
  Description of Artificial Sequence: Synthetic oligonucleotide
ugugacuguuuauuaacug

SEQ ID NO: 2500384 - RNA, 19 nt, Artificial Sequence
  Description of Artificial Sequence: Synthetic oligonucleotide
uauuaacugaccagauuac

SEQ ID NO: 2500385 - RNA, 19 nt, Artificial Sequence
  Description of Artificial Sequence: Synthetic oligonucleotide
aagccuguuuaucuggucu

SEQ ID NO: 2500386 - RNA, 19 nt, Artificial Sequence
  Description of Artificial Sequence: Synthetic oligonucleotide
aggaauugucugucaaggc

SEQ ID NO: 2500387 - RNA, 19 nt, Artificial Sequence
  Description of Artificial Sequence: Synthetic oligonucleotide
uccacaauccucagcaugu

SEQ ID NO: 2500388 - RNA, 19 nt, Artificial Sequence
  Description of Artificial Sequence: Synthetic oligonucleotide
auccucagcauguuaauug

SEQ ID NO: 2500389 - RNA, 19 nt, Artificial Sequence
  Description of Artificial Sequence: Synthetic oligonucleotide
agaugauuccguauuuacc

SEQ ID NO: 2500390 - RNA, 19 nt, Artificial Sequence
  Description of Artificial Sequence: Synthetic oligonucleotide
auugauaccucggauucgg

SEQ ID NO: 2500391 - RNA, 19 nt, Artificial Sequence
  Description of Artificial Sequence: Synthetic oligonucleotide
aagacggagcagcugcaac

SEQ ID NO: 2500392 - RNA, 19 nt, Artificial Sequence
  Description of Artificial Sequence: Synthetic oligonucleotide
agcaucaccaccuuccaca

SEQ ID NO: 2500393 - RNA, 19 nt, Artificial Sequence
  Description of Artificial Sequence: Synthetic oligonucleotide
uuuccuugccauccuagcc

SEQ ID NO: 2500394 - RNA, 19 nt, Artificial Sequence
  Description of Artificial Sequence: Synthetic oligonucleotide
uugaagaucugacgaagac

SEQ ID NO: 2500395 - RNA, 19 nt, Artificial Sequence
  Description of Artificial Sequence: Synthetic oligonucleotide
cagcauguuaauugaagcc

SEQ ID NO: 2500396 - RNA, 19 nt, Artificial Sequence
  Description of Artificial Sequence: Synthetic oligonucleotide
cuguuuauuaacugaccag

SEQ ID NO: 2500397 - RNA, 19 nt, Artificial Sequence
  Description of Artificial Sequence: Synthetic oligonucleotide
ugucuucaaagcaaaguuc

SEQ ID NO: 2500398 - RNA, 19 nt, Artificial Sequence
  Description of Artificial Sequence: Synthetic oligonucleotide
cuucuuauugauuuugcca

SEQ ID NO: 2500399 - RNA, 19 nt, Artificial Sequence
  Description of Artificial Sequence: Synthetic oligonucleotide
ugauuuugccauagccgcg

SEQ ID NO: 2500400 - RNA, 19 nt, Artificial Sequence
  Description of Artificial Sequence: Synthetic oligonucleotide
uuccguauuuaccaagaga

SEQ ID NO: 2500401 - RNA, 19 nt, Artificial Sequence
  Description of Artificial Sequence: Synthetic oligonucleotide
ugagcuuaacaaaggugcc

SEQ ID NO: 2500402 - RNA, 19 nt, Artificial Sequence
  Description of Artificial Sequence: Synthetic oligonucleotide
uguaugguuccacaauccu

SEQ ID NO: 2500403 - RNA, 19 nt, Artificial Sequence
  Description of Artificial Sequence: Synthetic oligonucleotide
ugugguaaugcuuugccuu

SEQ ID NO: 2500404 - RNA, 19 nt, Artificial Sequence
  Description of Artificial Sequence: Synthetic oligonucleotide
uaauugaagccuuguugag

SEQ ID NO: 2500405 - RNA, 19 nt, Artificial Sequence
  Description of Artificial Sequence: Synthetic oligonucleotide
agaucucaugaauuagauc

SEQ ID NO: 2500406 - RNA, 19 nt, Artificial Sequence
  Description of Artificial Sequence: Synthetic oligonucleotide
uuuauuaacugaccagauu

SEQ ID NO: 2500407 - RNA, 19 nt, Artificial Sequence
  Description of Artificial Sequence: Synthetic oligonucleotide
gaccuuugggcuuacacca

SEQ ID NO: 2500408 - RNA, 19 nt, Artificial Sequence
  Description of Artificial Sequence: Synthetic oligonucleotide
ucuaguuugccaagcugug

SEQ ID NO: 2500409 - RNA, 19 nt, Artificial Sequence
  Description of Artificial Sequence: Synthetic oligonucleotide
ucuaauaagccuguuuauc

SEQ ID NO: 2500410 - RNA, 19 nt, Artificial Sequence
  Description of Artificial Sequence: Synthetic oligonucleotide
ucauccgucuaauaagccu

SEQ ID NO: 2500411 - RNA, 19 nt, Artificial Sequence
  Description of Artificial Sequence: Synthetic oligonucleotide
uauuuaccaagagaucgag

SEQ ID NO: 2500412 - RNA, 19 nt, Artificial Sequence
  Description of Artificial Sequence: Synthetic oligonucleotide
cauccgucuaauaagccug

SEQ ID NO: 2500413 - RNA, 19 nt, Artificial Sequence
  Description of Artificial Sequence: Synthetic oligonucleotide
ugauuccguauuuaccaag

SEQ ID NO: 2500414 - RNA, 19 nt, Artificial Sequence
  Description of Artificial Sequence: Synthetic oligonucleotide
uaacugaccagauuacaaa

SEQ ID NO: 2500415 - RNA, 19 nt, Artificial Sequence
  Description of Artificial Sequence: Synthetic oligonucleotide
ugucugucaaggcaauucu

SEQ ID NO: 2500416 - RNA, 19 nt, Artificial Sequence
  Description of Artificial Sequence: Synthetic oligonucleotide
ugggcuuacaccauugaua

SEQ ID NO: 2500417 - RNA, 19 nt, Artificial Sequence
  Description of Artificial Sequence: Synthetic oligonucleotide
uucuuaaggguuucuggca

SEQ ID NO: 2500418 - RNA, 19 nt, Artificial Sequence
  Description of Artificial Sequence: Synthetic oligonucleotide
ugaagcguuuuccaacugu

SEQ ID NO: 2500419 - RNA, 19 nt, Artificial Sequence
  Description of Artificial Sequence: Synthetic oligonucleotide
uagaucucaugaauuagau

SEQ ID NO: 2500420 - RNA, 19 nt, Artificial Sequence
  Description of Artificial Sequence: Synthetic oligonucleotide
agcgcuucaccuucaacuc

SEQ ID NO: 2500421 - RNA, 19 nt, Artificial Sequence
  Description of Artificial Sequence: Synthetic oligonucleotide
uuccgcagugucuucaaag

SEQ ID NO: 2500422 - RNA, 19 nt, Artificial Sequence
  Description of Artificial Sequence: Synthetic oligonucleotide
agcauguuaauugaagccu

SEQ ID NO: 2500423 - RNA, 19 nt, Artificial Sequence
  Description of Artificial Sequence: Synthetic oligonucleotide
agccaugcgaaucucuguc

SEQ ID NO: 2500424 - RNA, 19 nt, Artificial Sequence
  Description of Artificial Sequence: Synthetic oligonucleotide
ucugcgaaauuccuucgcu

SEQ ID NO: 2500425 - RNA, 19 nt, Artificial Sequence
  Description of Artificial Sequence: Synthetic oligonucleotide
ucaaggaauugucugucaa

SEQ ID NO: 2500426 - RNA, 19 nt, Artificial Sequence
  Description of Artificial Sequence: Synthetic oligonucleotide
cuuauugauuuugccauag

SEQ ID NO: 2500427 - RNA, 19 nt, Artificial Sequence
  Description of Artificial Sequence: Synthetic oligonucleotide
uucauaaaugagcuuccuc

SEQ ID NO: 2500428 - RNA, 19 nt, Artificial Sequence
  Description of Artificial Sequence: Synthetic oligonucleotide
auucggaugacaaaugcca

SEQ ID NO: 2500429 - RNA, 19 nt, Artificial Sequence
  Description of Artificial Sequence: Synthetic oligonucleotide
guuuaucuggucuucccug

SEQ ID NO: 2500430 - RNA, 19 nt, Artificial Sequence
  Description of Artificial Sequence: Synthetic oligonucleotide
uuauugauuuugccauagc

SEQ ID NO: 2500431 - RNA, 19 nt, Artificial Sequence
  Description of Artificial Sequence: Synthetic oligonucleotide
uccgcagugucuucaaagc

SEQ ID NO: 2500432 - RNA, 19 nt, Artificial Sequence
  Description of Artificial Sequence: Synthetic oligonucleotide
agagaucgagcaaucaagg

SEQ ID NO: 2500433 - RNA, 19 nt, Artificial Sequence
  Description of Artificial Sequence: Synthetic oligonucleotide
uaacaaaggugccauugaa

SEQ ID NO: 2500434 - RNA, 19 nt, Artificial Sequence
  Description of Artificial Sequence: Synthetic oligonucleotide
ugcaauguaugguuccaca

SEQ ID NO: 2500435 - RNA, 19 nt, Artificial Sequence
  Description of Artificial Sequence: Synthetic oligonucleotide
auguaugguuccacaaucc

SEQ ID NO: 2500436 - RNA, 19 nt, Artificial Sequence
  Description of Artificial Sequence: Synthetic oligonucleotide
cucaugaauuagauccucc

SEQ ID NO: 2500437 - RNA, 19 nt, Artificial Sequence
  Description of Artificial Sequence: Synthetic oligonucleotide
agaaguuuccagcuuuccu

SEQ ID NO: 2500438 - RNA, 19 nt, Artificial Sequence
  Description of Artificial Sequence: Synthetic oligonucleotide
agauaauuugaagggccac

SEQ ID NO: 2500439 - RNA, 19 nt, Artificial Sequence
  Description of Artificial Sequence: Synthetic oligonucleotide
uguuaauugaagccuuguu

SEQ ID NO: 2500440 - RNA, 19 nt, Artificial Sequence
  Description of Artificial Sequence: Synthetic oligonucleotide
agaucugacgaagacggag

SEQ ID NO: 2500441 - RNA, 19 nt, Artificial Sequence
  Description of Artificial Sequence: Synthetic oligonucleotide
cagaugauuccguauuuac

SEQ ID NO: 2500442 - RNA, 19 nt, Artificial Sequence
  Description of Artificial Sequence: Synthetic oligonucleotide
uucccuguugccagcauca

SEQ ID NO: 2500443 - RNA, 19 nt, Artificial Sequence
  Description of Artificial Sequence: Synthetic oligonucleotide
uuuaucuggucuucccugu

SEQ ID NO: 2500444 - RNA, 19 nt, Artificial Sequence
  Description of Artificial Sequence: Synthetic oligonucleotide
caaggaauugucugucaag

SEQ ID NO: 2500445 - RNA, 19 nt, Artificial Sequence
  Description of Artificial Sequence: Synthetic oligonucleotide
cguauuuaccaagagaucg

SEQ ID NO: 2500446 - RNA, 19 nt, Artificial Sequence
  Description of Artificial Sequence: Synthetic oligonucleotide
aagauaauuugaagggcca

SEQ ID NO: 2500447 - RNA, 19 nt, Artificial Sequence
  Description of Artificial Sequence: Synthetic oligonucleotide
uuccgaaagcgcuucaccu

SEQ ID NO: 2500448 - RNA, 19 nt, Artificial Sequence
  Description of Artificial Sequence: Synthetic oligonucleotide
cucuucuuauugauuuugc

SEQ ID NO: 2500449 - RNA, 19 nt, Artificial Sequence
  Description of Artificial Sequence: Synthetic oligonucleotide
gcaaucaaggaauugucug

SEQ ID NO: 2500450 - RNA, 19 nt, Artificial Sequence
  Description of Artificial Sequence: Synthetic oligonucleotide
agcucauuuacugacuuca

SEQ ID NO: 2500451 - RNA, 19 nt, Artificial Sequence
  Description of Artificial Sequence: Synthetic oligonucleotide
acuguauagaucucaugaa

SEQ ID NO: 2500452 - RNA, 19 nt, Artificial Sequence
  Description of Artificial Sequence: Synthetic oligonucleotide
ggcaauucucuucuuauug

SEQ ID NO: 2500453 - RNA, 19 nt, Artificial Sequence
  Description of Artificial Sequence: Synthetic oligonucleotide
cauugaagaucugacgaag

SEQ ID NO: 2500454 - RNA, 19 nt, Artificial Sequence
  Description of Artificial Sequence: Synthetic oligonucleotide
gugacuguuuauuaacuga

SEQ ID NO: 2500455 - RNA, 19 nt, Artificial Sequence
  Description of Artificial Sequence: Synthetic oligonucleotide
uccucagcauguuaauuga

SEQ ID NO: 2500456 - RNA, 19 nt, Artificial Sequence
  Description of Artificial Sequence: Synthetic oligonucleotide
gauuuugccauagccgcgc

SEQ ID NO: 2500457 - RNA, 19 nt, Artificial Sequence
  Description of Artificial Sequence: Synthetic oligonucleotide
auuuacuuccuugaagcgu

SEQ ID NO: 2500458 - RNA, 19 nt, Artificial Sequence
  Description of Artificial Sequence: Synthetic oligonucleotide
cuucauuccaccucgugga

SEQ ID NO: 2500459 - RNA, 19 nt, Artificial Sequence
  Description of Artificial Sequence: Synthetic oligonucleotide
uucauccgucuaauaagcc

SEQ ID NO: 2500460 - RNA, 19 nt, Artificial Sequence
  Description of Artificial Sequence: Synthetic oligonucleotide
uguccgguacaucugccug

SEQ ID NO: 2500461 - RNA, 19 nt, Artificial Sequence
  Description of Artificial Sequence: Synthetic oligonucleotide
auuuaccaagagaucgagc

SEQ ID NO: 2500462 - RNA, 19 nt, Artificial Sequence
  Description of Artificial Sequence: Synthetic oligonucleotide
guugagcuuaacaaaggug

SEQ ID NO: 2500463 - RNA, 19 nt, Artificial Sequence
  Description of Artificial Sequence: Synthetic oligonucleotide
cugccuguauuccuugugg

SEQ ID NO: 2500464 - RNA, 19 nt, Artificial Sequence
  Description of Artificial Sequence: Synthetic oligonucleotide
gaucugacgaagacggagc

SEQ ID NO: 2500465 - RNA, 19 nt, Artificial Sequence
  Description of Artificial Sequence: Synthetic oligonucleotide
uccacaaaaugaguugucu

SEQ ID NO: 2500466 - RNA, 19 nt, Artificial Sequence
  Description of Artificial Sequence: Synthetic oligonucleotide
cuaauaagccuguuuaucu

SEQ ID NO: 2500467 - RNA, 19 nt, Artificial Sequence
  Description of Artificial Sequence: Synthetic oligonucleotide
auuccguauuuaccaagag

SEQ ID NO: 2500468 - RNA, 19 nt, Artificial Sequence
  Description of Artificial Sequence: Synthetic oligonucleotide
cuagccaugcgaaucucug

SEQ ID NO: 2500469 - RNA, 19 nt, Artificial Sequence
  Description of Artificial Sequence: Synthetic oligonucleotide
cuucaaagcaaaguucuuc

SEQ ID NO: 2500470 - RNA, 19 nt, Artificial Sequence
  Description of Artificial Sequence: Synthetic oligonucleotide
ucggauucggaugacaaau

SEQ ID NO: 2500471 - RNA, 19 nt, Artificial Sequence
  Description of Artificial Sequence: Synthetic oligonucleotide
auaccucggauucggauga

SEQ ID NO: 2500472 - RNA, 19 nt, Artificial Sequence
  Description of Artificial Sequence: Synthetic oligonucleotide
gcguuuuccaacuguauag

SEQ ID NO: 2500473 - RNA, 19 nt, Artificial Sequence
  Description of Artificial Sequence: Synthetic oligonucleotide
uuaaggguuucuggcacag

SEQ ID NO: 2500474 - RNA, 19 nt, Artificial Sequence
  Description of Artificial Sequence: Synthetic oligonucleotide
ugucaaggcaauucucuuc

SEQ ID NO: 2500475 - RNA, 19 nt, Artificial Sequence
  Description of Artificial Sequence: Synthetic oligonucleotide
auagaucucaugaauuaga

SEQ ID NO: 2500476 - RNA, 19 nt, Artificial Sequence
  Description of Artificial Sequence: Synthetic oligonucleotide
gggcuuacaccauugauac

SEQ ID NO: 2500477 - RNA, 19 nt, Artificial Sequence
  Description of Artificial Sequence: Synthetic oligonucleotide
ggcacauagaaguuuccag

SEQ ID NO: 2500478 - RNA, 19 nt, Artificial Sequence
  Description of Artificial Sequence: Synthetic oligonucleotide
ggaauugucugucaaggca

SEQ ID NO: 2500479 - RNA, 19 nt, Artificial Sequence
  Description of Artificial Sequence: Synthetic oligonucleotide
cuuccgaaagcgcuucacc

SEQ ID NO: 2500480 - RNA, 19 nt, Artificial Sequence
  Description of Artificial Sequence: Synthetic oligonucleotide
cauguuaauugaagccuug

SEQ ID NO: 2500481 - RNA, 19 nt, Artificial Sequence
  Description of Artificial Sequence: Synthetic oligonucleotide
uuccuugaagcguuuucca

SEQ ID NO: 2500482 - RNA, 19 nt, Artificial Sequence
  Description of Artificial Sequence: Synthetic oligonucleotide
accauugauaccucggauu

SEQ ID NO: 2500483 - RNA, 19 nt, Artificial Sequence
  Description of Artificial Sequence: Synthetic oligonucleotide
gaauugucugucaaggcaa

SEQ ID NO: 2500484 - RNA, 19 nt, Artificial Sequence
  Description of Artificial Sequence: Synthetic oligonucleotide
acucugcgaaauuccuucg

SEQ ID NO: 2500485 - RNA, 19 nt, Artificial Sequence
  Description of Artificial Sequence: Synthetic oligonucleotide
uuaccaagagaucgagcaa

SEQ ID NO: 2500486 - RNA, 19 nt, Artificial Sequence
  Description of Artificial Sequence: Synthetic oligonucleotide
ugcgaaauuccuucgcuuu

SEQ ID NO: 2500487 - RNA, 19 nt, Artificial Sequence
  Description of Artificial Sequence: Synthetic oligonucleotide
caaagcaaaguucuuccga

SEQ ID NO: 2500488 - RNA, 19 nt, Artificial Sequence
  Description of Artificial Sequence: Synthetic oligonucleotide
uugugguaaugcuuugccu

SEQ ID NO: 2500489 - RNA, 19 nt, Artificial Sequence
  Description of Artificial Sequence: Synthetic oligonucleotide
agacggagcagcugcaaca

SEQ ID NO: 2500490 - RNA, 19 nt, Artificial Sequence
  Description of Artificial Sequence: Synthetic oligonucleotide
uguugccagcaucaccacc

SEQ ID NO: 2500491 - RNA, 19 nt, Artificial Sequence
  Description of Artificial Sequence: Synthetic oligonucleotide
gauuccguauuuaccaaga

SEQ ID NO: 2500492 - RNA, 19 nt, Artificial Sequence
  Description of Artificial Sequence: Synthetic oligonucleotide
cuccaugcagaugauuccg

SEQ ID NO: 2500493 - RNA, 19 nt, Artificial Sequence
  Description of Artificial Sequence: Synthetic oligonucleotide
ucggaugacaaaugccagu

SEQ ID NO: 2500494 - RNA, 19 nt, Artificial Sequence
  Description of Artificial Sequence: Synthetic oligonucleotide
caacaccuuaguucauccg

SEQ ID NO: 2500495 - RNA, 19 nt, Artificial Sequence
  Description of Artificial Sequence: Synthetic oligonucleotide
gccauugaagaucugacga

SEQ ID NO: 2500496 - RNA, 19 nt, Artificial Sequence
  Description of Artificial Sequence: Synthetic oligonucleotide
ggaccuuugggcuuacacc

SEQ ID NO: 2500497 - RNA, 19 nt, Artificial Sequence
  Description of Artificial Sequence: Synthetic oligonucleotide
auagaaguuuccagcuuuc

SEQ ID NO: 2500498 - RNA, 19 nt, Artificial Sequence
  Description of Artificial Sequence: Synthetic oligonucleotide
ggguuucuggcacagcagg

SEQ ID NO: 2500499 - RNA, 19 nt, Artificial Sequence
  Description of Artificial Sequence: Synthetic oligonucleotide
ugauaccucggauucggau

SEQ ID NO: 2500500 - RNA, 19 nt, Artificial Sequence
  Description of Artificial Sequence: Synthetic oligonucleotide
uaccaagagaucgagcaau

SEQ ID NO: 2500501 - RNA, 19 nt, Artificial Sequence
  Description of Artificial Sequence: Synthetic oligonucleotide
agcguuuuccaacuguaua

SEQ ID NO: 2500502 - RNA, 19 nt, Artificial Sequence
  Description of Artificial Sequence: Synthetic oligonucleotide
ugccauccuagccaugcga

SEQ ID NO: 2500503 - RNA, 19 nt, Artificial Sequence
  Description of Artificial Sequence: Synthetic oligonucleotide
guuugccaagcugugacug

SEQ ID NO: 2500504 - RNA, 19 nt, Artificial Sequence
  Description of Artificial Sequence: Synthetic oligonucleotide
gagaucgagcaaucaagga

SEQ ID NO: 2500505 - RNA, 19 nt, Artificial Sequence
  Description of Artificial Sequence: Synthetic oligonucleotide
uuucauaaaugagcuuccu

SEQ ID NO: 2500506 - RNA, 19 nt, Artificial Sequence
  Description of Artificial Sequence: Synthetic oligonucleotide
augcagaugauuccguauu

SEQ ID NO: 2500507 - RNA, 19 nt, Artificial Sequence
  Description of Artificial Sequence: Synthetic oligonucleotide
acaauccucagcauguuaa

SEQ ID NO: 2500508 - RNA, 19 nt, Artificial Sequence
  Description of Artificial Sequence: Synthetic oligonucleotide
aucaaggaauugucuguca

SEQ ID NO: 2500509 - RNA, 19 nt, Artificial Sequence
  Description of Artificial Sequence: Synthetic oligonucleotide
caccuugcggaccuuuggg

SEQ ID NO: 2500510 - RNA, 19 nt, Artificial Sequence
  Description of Artificial Sequence: Synthetic oligonucleotide
uagaaguuuccagcuuucc

SEQ ID NO: 2500511 - RNA, 19 nt, Artificial Sequence
  Description of Artificial Sequence: Synthetic oligonucleotide
ucuguccgguacaucugcc

SEQ ID NO: 2500512 - RNA, 19 nt, Artificial Sequence
  Description of Artificial Sequence: Synthetic oligonucleotide
gaauuagauccuccaugca

SEQ ID NO: 2500513 - RNA, 19 nt, Artificial Sequence
  Description of Artificial Sequence: Synthetic oligonucleotide
uugccauccuagccaugcg

SEQ ID NO: 2500514 - RNA, 19 nt, Artificial Sequence
  Description of Artificial Sequence: Synthetic oligonucleotide
acaccuuaguucauccguc

SEQ ID NO: 2500515 - RNA, 19 nt, Artificial Sequence
  Description of Artificial Sequence: Synthetic oligonucleotide
caacuguauagaucucaug

SEQ ID NO: 2500516 - RNA, 19 nt, Artificial Sequence
  Description of Artificial Sequence: Synthetic oligonucleotide
uugaagcguuuuccaacug

SEQ ID NO: 2500517 - RNA, 19 nt, Artificial Sequence
  Description of Artificial Sequence: Synthetic oligonucleotide
uccaugcagaugauuccgu

SEQ ID NO: 2500518 - RNA, 19 nt, Artificial Sequence
  Description of Artificial Sequence: Synthetic oligonucleotide
aucugacgaagacggagca

SEQ ID NO: 2500519 - RNA, 19 nt, Artificial Sequence
  Description of Artificial Sequence: Synthetic oligonucleotide
gagcaaucaaggaauuguc

SEQ ID NO: 2500520 - RNA, 19 nt, Artificial Sequence
  Description of Artificial Sequence: Synthetic oligonucleotide
auugaagaucugacgaaga

SEQ ID NO: 2500521 - RNA, 19 nt, Artificial Sequence
  Description of Artificial Sequence: Synthetic oligonucleotide
ugcagaugauuccguauuu

SEQ ID NO: 2500522 - RNA, 19 nt, Artificial Sequence
  Description of Artificial Sequence: Synthetic oligonucleotide
ugccuguauuccuuguggu

SEQ ID NO: 2500523 - RNA, 19 nt, Artificial Sequence
  Description of Artificial Sequence: Synthetic oligonucleotide
uguauuccuugugguaaug

SEQ ID NO: 2500524 - RNA, 19 nt, Artificial Sequence
  Description of Artificial Sequence: Synthetic oligonucleotide
cauugauaccucggauucg

SEQ ID NO: 2500525 - RNA, 19 nt, Artificial Sequence
  Description of Artificial Sequence: Synthetic oligonucleotide
cucugcgaaauuccuucgc

SEQ ID NO: 2500526 - RNA, 19 nt, Artificial Sequence
  Description of Artificial Sequence: Synthetic oligonucleotide
ucucaugaauuagauccuc

SEQ ID NO: 2500527 - RNA, 19 nt, Artificial Sequence
  Description of Artificial Sequence: Synthetic oligonucleotide
guauuuaccaagagaucga

SEQ ID NO: 2500528 - RNA, 19 nt, Artificial Sequence
  Description of Artificial Sequence: Synthetic oligonucleotide
ucugacgaagacggagcag

SEQ ID NO: 2500529 - RNA, 19 nt, Artificial Sequence
  Description of Artificial Sequence: Synthetic oligonucleotide
aguuugccaagcugugacu

SEQ ID NO: 2500530 - RNA, 19 nt, Artificial Sequence
  Description of Artificial Sequence: Synthetic oligonucleotide
augauuccguauuuaccaa

SEQ ID NO: 2500531 - RNA, 19 nt, Artificial Sequence
  Description of Artificial Sequence: Synthetic oligonucleotide
ugaagccuuguugagcuua

SEQ ID NO: 2500532 - RNA, 19 nt, Artificial Sequence
  Description of Artificial Sequence: Synthetic oligonucleotide
caccucguggagaagauaa

SEQ ID NO: 2500533 - RNA, 19 nt, Artificial Sequence
  Description of Artificial Sequence: Synthetic oligonucleotide
auguuaauugaagccuugu

SEQ ID NO: 2500534 - RNA, 19 nt, Artificial Sequence
  Description of Artificial Sequence: Synthetic oligonucleotide
ucgagcaaucaaggaauug

SEQ ID NO: 2500535 - RNA, 19 nt, Artificial Sequence
  Description of Artificial Sequence: Synthetic oligonucleotide
cauccuagccaugcgaauc

SEQ ID NO: 2500536 - RNA, 19 nt, Artificial Sequence
  Description of Artificial Sequence: Synthetic oligonucleotide
gcaacaccuuaguucaucc

SEQ ID NO: 2500537 - RNA, 19 nt, Artificial Sequence
  Description of Artificial Sequence: Synthetic oligonucleotide
acauagaaguuuccagcuu

SEQ ID NO: 2500538 - RNA, 19 nt, Artificial Sequence
  Description of Artificial Sequence: Synthetic oligonucleotide
uaccacaggcaacaccuua

SEQ ID NO: 2500539 - RNA, 19 nt, Artificial Sequence
  Description of Artificial Sequence: Synthetic oligonucleotide
uuaguucauccgucuaaua

SEQ ID NO: 2500540 - RNA, 19 nt, Artificial Sequence
  Description of Artificial Sequence: Synthetic oligonucleotide
guaugguuccacaauccuc

SEQ ID NO: 2500541 - RNA, 19 nt, Artificial Sequence
  Description of Artificial Sequence: Synthetic oligonucleotide
gacaaaugccaguuugggu

SEQ ID NO: 2500542 - RNA, 19 nt, Artificial Sequence
  Description of Artificial Sequence: Synthetic oligonucleotide
ccauugauaccucggauuc

SEQ ID NO: 2500543 - RNA, 19 nt, Artificial Sequence
  Description of Artificial Sequence: Synthetic oligonucleotide
guggagaagauaauuugaa

SEQ ID NO: 2500544 - RNA, 19 nt, Artificial Sequence
  Description of Artificial Sequence: Synthetic oligonucleotide
accaagagaucgagcaauc

SEQ ID NO: 2500545 - RNA, 19 nt, Artificial Sequence
  Description of Artificial Sequence: Synthetic oligonucleotide
caaucaaggaauugucugu

SEQ ID NO: 2500546 - RNA, 19 nt, Artificial Sequence
  Description of Artificial Sequence: Synthetic oligonucleotide
gccuuguugagcuuaacaa

SEQ ID NO: 2500547 - RNA, 19 nt, Artificial Sequence
  Description of Artificial Sequence: Synthetic oligonucleotide
cauuccaccucguggagaa

SEQ ID NO: 2500548 - RNA, 19 nt, Artificial Sequence
  Description of Artificial Sequence: Synthetic oligonucleotide
uccgaaagcgcuucaccuu

SEQ ID NO: 2500549 - RNA, 19 nt, Artificial Sequence
  Description of Artificial Sequence: Synthetic oligonucleotide
cuugaagcguuuuccaacu

SEQ ID NO: 2500550 - RNA, 19 nt, Artificial Sequence
  Description of Artificial Sequence: Synthetic oligonucleotide
gagcuuaacaaaggugcca

SEQ ID NO: 2500551 - RNA, 19 nt, Artificial Sequence
  Description of Artificial Sequence: Synthetic oligonucleotide
aauugucugucaaggcaau

SEQ ID NO: 2500552 - RNA, 19 nt, Artificial Sequence
  Description of Artificial Sequence: Synthetic oligonucleotide
uagccaugcgaaucucugu

SEQ ID NO: 2500553 - RNA, 19 nt, Artificial Sequence
  Description of Artificial Sequence: Synthetic oligonucleotide
gaagcguuuuccaacugua

SEQ ID NO: 2500554 - RNA, 19 nt, Artificial Sequence
  Description of Artificial Sequence: Synthetic oligonucleotide
gugccauugaagaucugac

SEQ ID NO: 2500555 - RNA, 19 nt, Artificial Sequence
  Description of Artificial Sequence: Synthetic oligonucleotide
uugauaccucggauucgga

SEQ ID NO: 2500556 - RNA, 19 nt, Artificial Sequence
  Description of Artificial Sequence: Synthetic oligonucleotide
uccuugugguaaugcuuug

SEQ ID NO: 2500557 - RNA, 19 nt, Artificial Sequence
  Description of Artificial Sequence: Synthetic oligonucleotide
ucauuccaccucguggaga

SEQ ID NO: 2500558 - RNA, 19 nt, Artificial Sequence
  Description of Artificial Sequence: Synthetic oligonucleotide
aagccuuguugagcuuaac

SEQ ID NO: 2500559 - RNA, 19 nt, Artificial Sequence
  Description of Artificial Sequence: Synthetic oligonucleotide
aggcacauagaaguuucca

SEQ ID NO: 2500560 - RNA, 19 nt, Artificial Sequence
  Description of Artificial Sequence: Synthetic oligonucleotide
uacugacuucagguugggg

SEQ ID NO: 2500561 - RNA, 19 nt, Artificial Sequence
  Description of Artificial Sequence: Synthetic oligonucleotide
accuucaacucugcgaaau

SEQ ID NO: 2500562 - RNA, 19 nt, Artificial Sequence
  Description of Artificial Sequence: Synthetic oligonucleotide
ccaugcgaaucucuguccg

SEQ ID NO: 2500563 - RNA, 19 nt, Artificial Sequence
  Description of Artificial Sequence: Synthetic oligonucleotide
aggaaguuauuuacuuccu

SEQ ID NO: 2500564 - RNA, 19 nt, Artificial Sequence
  Description of Artificial Sequence: Synthetic oligonucleotide
uccuugccauccuagccau

SEQ ID NO: 2500565 - RNA, 19 nt, Artificial Sequence
  Description of Artificial Sequence: Synthetic oligonucleotide
uuaucuggucuucccuguu

SEQ ID NO: 2500566 - RNA, 19 nt, Artificial Sequence
  Description of Artificial Sequence: Synthetic oligonucleotide
cuucccuguugccagcauc

SEQ ID NO: 2500567 - RNA, 19 nt, Artificial Sequence
  Description of Artificial Sequence: Synthetic oligonucleotide
accuuccacaaaaugaguu

SEQ ID NO: 2500568 - RNA, 19 nt, Artificial Sequence
  Description of Artificial Sequence: Synthetic oligonucleotide
augcgaaucucuguccggu

SEQ ID NO: 2500569 - RNA, 19 nt, Artificial Sequence
  Description of Artificial Sequence: Synthetic oligonucleotide
ggugccauugaagaucuga

SEQ ID NO: 2500570 - RNA, 19 nt, Artificial Sequence
  Description of Artificial Sequence: Synthetic oligonucleotide
ugacuucagguugggguac

SEQ ID NO: 2500571 - RNA, 19 nt, Artificial Sequence
  Description of Artificial Sequence: Synthetic oligonucleotide
uccaccucguggagaagau

SEQ ID NO: 2500572 - RNA, 19 nt, Artificial Sequence
  Description of Artificial Sequence: Synthetic oligonucleotide
gacgaagacggagcagcug

SEQ ID NO: 2500573 - RNA, 19 nt, Artificial Sequence
  Description of Artificial Sequence: Synthetic oligonucleotide
cuguauagaucucaugaau

SEQ ID NO: 2500574 - RNA, 19 nt, Artificial Sequence
  Description of Artificial Sequence: Synthetic oligonucleotide
agccuguuuaucuggucuu

SEQ ID NO: 2500575 - RNA, 19 nt, Artificial Sequence
  Description of Artificial Sequence: Synthetic oligonucleotide
cauagaaguuuccagcuuu

SEQ ID NO: 2500576 - RNA, 19 nt, Artificial Sequence
  Description of Artificial Sequence: Synthetic oligonucleotide
aagcguuuuccaacuguau

SEQ ID NO: 2500577 - RNA, 19 nt, Artificial Sequence
  Description of Artificial Sequence: Synthetic oligonucleotide
cuucagguugggguacccc

SEQ ID NO: 2500578 - RNA, 19 nt, Artificial Sequence
  Description of Artificial Sequence: Synthetic oligonucleotide
aggguuucuggcacagcag

SEQ ID NO: 2500579 - RNA, 19 nt, Artificial Sequence
  Description of Artificial Sequence: Synthetic oligonucleotide
caugcaauguaugguucca

SEQ ID NO: 2500580 - RNA, 19 nt, Artificial Sequence
  Description of Artificial Sequence: Synthetic oligonucleotide
uuccaacuguauagaucuc

SEQ ID NO: 2500581 - RNA, 19 nt, Artificial Sequence
  Description of Artificial Sequence: Synthetic oligonucleotide
gcugcaacaccuugcggac

SEQ ID NO: 2500582 - RNA, 19 nt, Artificial Sequence
  Description of Artificial Sequence: Synthetic oligonucleotide
gcaauguaugguuccacaa

SEQ ID NO: 2500583 - RNA, 19 nt, Artificial Sequence
  Description of Artificial Sequence: Synthetic oligonucleotide
guagaugagcucauuuacu

SEQ ID NO: 2500584 - RNA, 19 nt, Artificial Sequence
  Description of Artificial Sequence: Synthetic oligonucleotide
caaggcaauucucuucuua

SEQ ID NO: 2500585 - RNA, 19 nt, Artificial Sequence
  Description of Artificial Sequence: Synthetic oligonucleotide
guuucuggcacagcaggaa

SEQ ID NO: 2500586 - RNA, 19 nt, Artificial Sequence
  Description of Artificial Sequence: Synthetic oligonucleotide
aagaucugacgaagacgga

SEQ ID NO: 2500587 - RNA, 19 nt, Artificial Sequence
  Description of Artificial Sequence: Synthetic oligonucleotide
accuuaguucauccgucua

SEQ ID NO: 2500588 - RNA, 19 nt, Artificial Sequence
  Description of Artificial Sequence: Synthetic oligonucleotide
cucguggagaagauaauuu

SEQ ID NO: 2500589 - RNA, 19 nt, Artificial Sequence
  Description of Artificial Sequence: Synthetic oligonucleotide
caauguaugguuccacaau

SEQ ID NO: 2500590 - RNA, 19 nt, Artificial Sequence
  Description of Artificial Sequence: Synthetic oligonucleotide
gacuucagguugggguacc

SEQ ID NO: 2500591 - RNA, 19 nt, Artificial Sequence
  Description of Artificial Sequence: Synthetic oligonucleotide
gaaagcgcuucaccuucaa

SEQ ID NO: 2500592 - RNA, 19 nt, Artificial Sequence
  Description of Artificial Sequence: Synthetic oligonucleotide
guuuauuaacugaccagau

SEQ ID NO: 2500593 - RNA, 19 nt, Artificial Sequence
  Description of Artificial Sequence: Synthetic oligonucleotide
ugagcuuccuccgcgccuu

SEQ ID NO: 2500594 - RNA, 19 nt, Artificial Sequence
  Description of Artificial Sequence: Synthetic oligonucleotide
gccaugcgaaucucugucc

SEQ ID NO: 2500595 - RNA, 19 nt, Artificial Sequence
  Description of Artificial Sequence: Synthetic oligonucleotide
cuaguuugccaagcuguga

SEQ ID NO: 2500596 - RNA, 19 nt, Artificial Sequence
  Description of Artificial Sequence: Synthetic oligonucleotide
ugcgaaucucuguccggua

SEQ ID NO: 2500597 - RNA, 19 nt, Artificial Sequence
  Description of Artificial Sequence: Synthetic oligonucleotide
gcgaaucucuguccgguac

SEQ ID NO: 2500598 - RNA, 19 nt, Artificial Sequence
  Description of Artificial Sequence: Synthetic oligonucleotide
ucaaggcaauucucuucuu

SEQ ID NO: 2500599 - RNA, 19 nt, Artificial Sequence
  Description of Artificial Sequence: Synthetic oligonucleotide
uuacuuccuugaagcguuu

SEQ ID NO: 2500600 - RNA, 19 nt, Artificial Sequence
  Description of Artificial Sequence: Synthetic oligonucleotide
cucggauucggaugacaaa

SEQ ID NO: 2500601 - RNA, 19 nt, Artificial Sequence
  Description of Artificial Sequence: Synthetic oligonucleotide
ucuucccuguugccagcau

SEQ ID NO: 2500602 - RNA, 19 nt, Artificial Sequence
  Description of Artificial Sequence: Synthetic oligonucleotide
gcaggcacauagaaguuuc

SEQ ID NO: 2500603 - RNA, 19 nt, Artificial Sequence
  Description of Artificial Sequence: Synthetic oligonucleotide
caugcagaugauuccguau

SEQ ID NO: 2500604 - RNA, 19 nt, Artificial Sequence
  Description of Artificial Sequence: Synthetic oligonucleotide
gaagccuuguugagcuuaa

SEQ ID NO: 2500605 - RNA, 19 nt, Artificial Sequence
  Description of Artificial Sequence: Synthetic oligonucleotide
gcgcuuguagaugagcuca

SEQ ID NO: 2500606 - RNA, 19 nt, Artificial Sequence
  Description of Artificial Sequence: Synthetic oligonucleotide
gcucauuuacugacuucag

SEQ ID NO: 2500607 - RNA, 19 nt, Artificial Sequence
  Description of Artificial Sequence: Synthetic oligonucleotide
ccuguuuaucuggucuucc

SEQ ID NO: 2500608 - RNA, 19 nt, Artificial Sequence
  Description of Artificial Sequence: Synthetic oligonucleotide
ccgaaagcgcuucaccuuc

SEQ ID NO: 2500609 - RNA, 19 nt, Artificial Sequence
  Description of Artificial Sequence: Synthetic oligonucleotide
auccgucuaauaagccugu

SEQ ID NO: 2500610 - RNA, 19 nt, Artificial Sequence
  Description of Artificial Sequence: Synthetic oligonucleotide
ccuugugguaaugcuuugc

SEQ ID NO: 2500611 - RNA, 19 nt, Artificial Sequence
  Description of Artificial Sequence: Synthetic oligonucleotide
gaagacggagcagcugcaa

SEQ ID NO: 2500612 - RNA, 19 nt, Artificial Sequence
  Description of Artificial Sequence: Synthetic oligonucleotide
ccguauuuaccaagagauc

SEQ ID NO: 2500613 - RNA, 19 nt, Artificial Sequence
  Description of Artificial Sequence: Synthetic oligonucleotide
cuuaguucauccgucuaau

SEQ ID NO: 2500614 - RNA, 19 nt, Artificial Sequence
  Description of Artificial Sequence: Synthetic oligonucleotide
ccuguauuccuugugguaa

SEQ ID NO: 2500615 - RNA, 19 nt, Artificial Sequence
  Description of Artificial Sequence: Synthetic oligonucleotide
cccaugcaauguaugguuc

SEQ ID NO: 2500616 - RNA, 19 nt, Artificial Sequence
  Description of Artificial Sequence: Synthetic oligonucleotide
ggcuuacaccauugauacc

SEQ ID NO: 2500617 - RNA, 19 nt, Artificial Sequence
  Description of Artificial Sequence: Synthetic oligonucleotide
uugaagccuuguugagcuu

SEQ ID NO: 2500618 - RNA, 19 nt, Artificial Sequence
  Description of Artificial Sequence: Synthetic oligonucleotide
accucggauucggaugaca

SEQ ID NO: 2500619 - RNA, 19 nt, Artificial Sequence
  Description of Artificial Sequence: Synthetic oligonucleotide
ggccacaggaaguuauuua

SEQ ID NO: 2500620 - RNA, 19 nt, Artificial Sequence
  Description of Artificial Sequence: Synthetic oligonucleotide
cacaauccucagcauguua

SEQ ID NO: 2500621 - RNA, 19 nt, Artificial Sequence
  Description of Artificial Sequence: Synthetic oligonucleotide
gugguaaugcuuugccuuu

SEQ ID NO: 2500622 - RNA, 19 nt, Artificial Sequence
  Description of Artificial Sequence: Synthetic oligonucleotide
uacuuccuugaagcguuuu

SEQ ID NO: 2500623 - RNA, 19 nt, Artificial Sequence
  Description of Artificial Sequence: Synthetic oligonucleotide
uccuagccaugcgaaucuc

SEQ ID NO: 2500624 - RNA, 19 nt, Artificial Sequence
  Description of Artificial Sequence: Synthetic oligonucleotide
aucgagcaaucaaggaauu

SEQ ID NO: 2500625 - RNA, 19 nt, Artificial Sequence
  Description of Artificial Sequence: Synthetic oligonucleotide
ucccuguugccagcaucac

SEQ ID NO: 2500626 - RNA, 19 nt, Artificial Sequence
  Description of Artificial Sequence: Synthetic oligonucleotide
caccuuaguucauccgucu

SEQ ID NO: 2500627 - RNA, 19 nt, Artificial Sequence
  Description of Artificial Sequence: Synthetic oligonucleotide
uugcggaccuuugggcuua

SEQ ID NO: 2500628 - RNA, 19 nt, Artificial Sequence
  Description of Artificial Sequence: Synthetic oligonucleotide
caauccucagcauguuaau

SEQ ID NO: 2500629 - RNA, 19 nt, Artificial Sequence
  Description of Artificial Sequence: Synthetic oligonucleotide
cauagccgcgcuuguagau

SEQ ID NO: 2500630 - RNA, 19 nt, Artificial Sequence
  Description of Artificial Sequence: Synthetic oligonucleotide
ccucggauucggaugacaa

SEQ ID NO: 2500631 - RNA, 19 nt, Artificial Sequence
  Description of Artificial Sequence: Synthetic oligonucleotide
cggauucggaugacaaaug

SEQ ID NO: 2500632 - RNA, 19 nt, Artificial Sequence
  Description of Artificial Sequence: Synthetic oligonucleotide
cuguauuccuugugguaau

SEQ ID NO: 2500633 - RNA, 19 nt, Artificial Sequence
  Description of Artificial Sequence: Synthetic oligonucleotide
uccgucuaauaagccuguu

SEQ ID NO: 2500634 - RNA, 19 nt, Artificial Sequence
  Description of Artificial Sequence: Synthetic oligonucleotide
cuguccgguacaucugccu

SEQ ID NO: 2500635 - RNA, 19 nt, Artificial Sequence
  Description of Artificial Sequence: Synthetic oligonucleotide
gccuguauuccuuguggua

SEQ ID NO: 2500636 - RNA, 19 nt, Artificial Sequence
  Description of Artificial Sequence: Synthetic oligonucleotide
accucguggagaagauaau

SEQ ID NO: 2500637 - RNA, 19 nt, Artificial Sequence
  Description of Artificial Sequence: Synthetic oligonucleotide
caccauugauaccucggau

SEQ ID NO: 2500638 - RNA, 19 nt, Artificial Sequence
  Description of Artificial Sequence: Synthetic oligonucleotide
cugcgaaauuccuucgcuu

SEQ ID NO: 2500639 - RNA, 19 nt, Artificial Sequence
  Description of Artificial Sequence: Synthetic oligonucleotide
caacucugcgaaauuccuu

SEQ ID NO: 2500640 - RNA, 19 nt, Artificial Sequence
  Description of Artificial Sequence: Synthetic oligonucleotide
gcagaugauuccguauuua

SEQ ID NO: 2500641 - RNA, 19 nt, Artificial Sequence
  Description of Artificial Sequence: Synthetic oligonucleotide
cuuccgcagugucuucaaa

SEQ ID NO: 2500642 - RNA, 19 nt, Artificial Sequence
  Description of Artificial Sequence: Synthetic oligonucleotide
cuugcggaccuuugggcuu

SEQ ID NO: 2500643 - RNA, 19 nt, Artificial Sequence
  Description of Artificial Sequence: Synthetic oligonucleotide
accuuugggcuuacaccau

SEQ ID NO: 2500644 - RNA, 19 nt, Artificial Sequence
  Description of Artificial Sequence: Synthetic oligonucleotide
gccauccuagccaugcgaa

SEQ ID NO: 2500645 - RNA, 19 nt, Artificial Sequence
  Description of Artificial Sequence: Synthetic oligonucleotide
gccaagcugugacuguuua

SEQ ID NO: 2500646 - RNA, 19 nt, Artificial Sequence
  Description of Artificial Sequence: Synthetic oligonucleotide
cgagcaaucaaggaauugu

SEQ ID NO: 2500647 - RNA, 19 nt, Artificial Sequence
  Description of Artificial Sequence: Synthetic oligonucleotide
uaccucggauucggaugac

SEQ ID NO: 2500648 - RNA, 19 nt, Artificial Sequence
  Description of Artificial Sequence: Synthetic oligonucleotide
auaccacaggcaacaccuu

SEQ ID NO: 2500649 - RNA, 19 nt, Artificial Sequence
  Description of Artificial Sequence: Synthetic oligonucleotide
gccuguuuaucuggucuuc

SEQ ID NO: 2500650 - RNA, 19 nt, Artificial Sequence
  Description of Artificial Sequence: Synthetic oligonucleotide
gccgcgcuuguagaugagc

SEQ ID NO: 2500651 - RNA, 19 nt, Artificial Sequence
  Description of Artificial Sequence: Synthetic oligonucleotide
ccgcagugucuucaaagca

SEQ ID NO: 2500652 - RNA, 19 nt, Artificial Sequence
  Description of Artificial Sequence: Synthetic oligonucleotide
ccauagccgcgcuuguaga

SEQ ID NO: 2500653 - RNA, 19 nt, Artificial Sequence
  Description of Artificial Sequence: Synthetic oligonucleotide
gcauguuaauugaagccuu

SEQ ID NO: 2500654 - RNA, 19 nt, Artificial Sequence
  Description of Artificial Sequence: Synthetic oligonucleotide
caccuucaacucugcgaaa

SEQ ID NO: 2500655 - RNA, 19 nt, Artificial Sequence
  Description of Artificial Sequence: Synthetic oligonucleotide
cgaaucucuguccgguaca

SEQ ID NO: 2500656 - RNA, 19 nt, Artificial Sequence
  Description of Artificial Sequence: Synthetic oligonucleotide
ccaugcagaugauuccgua

SEQ ID NO: 2500657 - RNA, 19 nt, Artificial Sequence
  Description of Artificial Sequence: Synthetic oligonucleotide
agccgcgcuuguagaugag

SEQ ID NO: 2500658 - RNA, 19 nt, Artificial Sequence
  Description of Artificial Sequence: Synthetic oligonucleotide
cugcaggcacauagaaguu

SEQ ID NO: 2500659 - RNA, 19 nt, Artificial Sequence
  Description of Artificial Sequence: Synthetic oligonucleotide
ccgcgcuuguagaugagcu

SEQ ID NO: 2500660 - RNA, 19 nt, Artificial Sequence
  Description of Artificial Sequence: Synthetic oligonucleotide
ccuagccaugcgaaucucu

SEQ ID NO: 2500661 - RNA, 19 nt, Artificial Sequence
  Description of Artificial Sequence: Synthetic oligonucleotide
ugcggaccuuugggcuuac

SEQ ID NO: 2500662 - RNA, 19 nt, Artificial Sequence
  Description of Artificial Sequence: Synthetic oligonucleotide
ccccaugcaauguaugguu

SEQ ID NO: 2500663 - RNA, 19 nt, Artificial Sequence
  Description of Artificial Sequence: Synthetic oligonucleotide
cgaagacggagcagcugca

SEQ ID NO: 2500664 - RNA, 19 nt, Artificial Sequence
  Description of Artificial Sequence: Synthetic oligonucleotide
ccuuuucauaaaugagcuu

SEQ ID NO: 2500665 - RNA, 19 nt, Artificial Sequence
  Description of Artificial Sequence: Synthetic oligonucleotide
cgaaagcgcuucaccuuca

SEQ ID NO: 2500666 - RNA, 19 nt, Artificial Sequence
  Description of Artificial Sequence: Synthetic oligonucleotide
ccgucuaauaagccuguuu

SEQ ID NO: 2500667 - RNA, 19 nt, Artificial Sequence
  Description of Artificial Sequence: Synthetic oligonucleotide
ccacaggcaacaccuuagu

SEQ ID NO: 2500668 - RNA, 19 nt, Artificial Sequence
  Description of Artificial Sequence: Synthetic oligonucleotide
ccucguggagaagauaauu

SEQ ID NO: 2500669 - RNA, 19 nt, Artificial Sequence
  Description of Artificial Sequence: Synthetic oligonucleotide
ccuucaacucugcgaaauu

SEQ ID NO: 2500670 - RNA, 19 nt, Artificial Sequence
  Description of Artificial Sequence: Synthetic oligonucleotide
gggccacaggaaguuauuu

SEQ ID NO: 2500671 - RNA, 19 nt, Artificial Sequence
  Description of Artificial Sequence: Synthetic oligonucleotide
ccauccuagccaugcgaau

SEQ ID NO: 2500672 - RNA, 19 nt, Artificial Sequence
  Description of Artificial Sequence: Synthetic oligonucleotide
ccuuugggcuuacaccauu

SEQ ID NO: 2500673 - RNA, 19 nt, Artificial Sequence
  Description of Artificial Sequence: Synthetic oligonucleotide
ccgcgccuuccgcaguguc

SEQ ID NO: 2500674 - RNA, 19 nt, Artificial Sequence
  Description of Artificial Sequence: Synthetic oligonucleotide
ccaccucguggagaagaua

SEQ ID NO: 2500675 - RNA, 19 nt, Artificial Sequence
  Description of Artificial Sequence: Synthetic oligonucleotide
gcggaccuuugggcuuaca

SEQ ID NO: 2500676 - RNA, 19 nt, Artificial Sequence
  Description of Artificial Sequence: Synthetic oligonucleotide
ccacaauccucagcauguu

SEQ ID NO: 2500677 - RNA, 19 nt, Artificial Sequence
  Description of Artificial Sequence: Synthetic oligonucleotide
aaaacacauaacuggaggc

SEQ ID NO: 2500678 - RNA, 19 nt, Artificial Sequence
  Description of Artificial Sequence: Synthetic oligonucleotide
aaaccaauugcuuuuccgc

SEQ ID NO: 2500679 - RNA, 19 nt, Artificial Sequence
  Description of Artificial Sequence: Synthetic oligonucleotide
caauaaaacacauaacugg

SEQ ID NO: 2500680 - RNA, 19 nt, Artificial Sequence
  Description of Artificial Sequence: Synthetic oligonucleotide
aagauuauugauaugacag

SEQ ID NO: 2500681 - RNA, 19 nt, Artificial Sequence
  Description of Artificial Sequence: Synthetic oligonucleotide
agagucaugaacuuacugg

SEQ ID NO: 2500682 - RNA, 19 nt, Artificial Sequence
  Description of Artificial Sequence: Synthetic oligonucleotide
auacagaagaggcuggucc

SEQ ID NO: 2500683 - RNA, 19 nt, Artificial Sequence
  Description of Artificial Sequence: Synthetic oligonucleotide
auaaagauuauugauauga

SEQ ID NO: 2500684 - RNA, 19 nt, Artificial Sequence
  Description of Artificial Sequence: Synthetic oligonucleotide
aaccaauugcuuuuccgcc

SEQ ID NO: 2500685 - RNA, 19 nt, Artificial Sequence
  Description of Artificial Sequence: Synthetic oligonucleotide
uuauaaagauuauugauau

SEQ ID NO: 2500686 - RNA, 19 nt, Artificial Sequence
  Description of Artificial Sequence: Synthetic oligonucleotide
aaucccgccaauaaaacac

SEQ ID NO: 2500687 - RNA, 19 nt, Artificial Sequence
  Description of Artificial Sequence: Synthetic oligonucleotide
uaggauacaacacaacucu

SEQ ID NO: 2500688 - RNA, 19 nt, Artificial Sequence
  Description of Artificial Sequence: Synthetic oligonucleotide
uuuucuguacaucuguggc

SEQ ID NO: 2500689 - RNA, 19 nt, Artificial Sequence
  Description of Artificial Sequence: Synthetic oligonucleotide
ugauaugacagucugccug

SEQ ID NO: 2500690 - RNA, 19 nt, Artificial Sequence
  Description of Artificial Sequence: Synthetic oligonucleotide
uguuauaaagauuauugau

SEQ ID NO: 2500691 - RNA, 19 nt, Artificial Sequence
  Description of Artificial Sequence: Synthetic oligonucleotide
aauaaaacacauaacugga

SEQ ID NO: 2500692 - RNA, 19 nt, Artificial Sequence
  Description of Artificial Sequence: Synthetic oligonucleotide
gauacaacacaacucuucc

SEQ ID NO: 2500693 - RNA, 19 nt, Artificial Sequence
  Description of Artificial Sequence: Synthetic oligonucleotide
uaaaccaauugcuuuuccg

SEQ ID NO: 2500694 - RNA, 19 nt, Artificial Sequence
  Description of Artificial Sequence: Synthetic oligonucleotide
aaacacauaacuggaggcg

SEQ ID NO: 2500695 - RNA, 19 nt, Artificial Sequence
  Description of Artificial Sequence: Synthetic oligonucleotide
auaugcaaugacaaugucc

SEQ ID NO: 2500696 - RNA, 19 nt, Artificial Sequence
  Description of Artificial Sequence: Synthetic oligonucleotide
aaugagaucgcaguacaag

SEQ ID NO: 2500697 - RNA, 19 nt, Artificial Sequence
  Description of Artificial Sequence: Synthetic oligonucleotide
ugcauccccaaugagaucg

SEQ ID NO: 2500698 - RNA, 19 nt, Artificial Sequence
  Description of Artificial Sequence: Synthetic oligonucleotide
ugugcuucucggcaaaccg

SEQ ID NO: 2500699 - RNA, 19 nt, Artificial Sequence
  Description of Artificial Sequence: Synthetic oligonucleotide
aguacaagggcacaggccu

SEQ ID NO: 2500700 - RNA, 19 nt, Artificial Sequence
  Description of Artificial Sequence: Synthetic oligonucleotide
uguuagcccagauugcugg

SEQ ID NO: 2500701 - RNA, 19 nt, Artificial Sequence
  Description of Artificial Sequence: Synthetic oligonucleotide
ugagaucgcaguacaaggg

SEQ ID NO: 2500702 - RNA, 19 nt, Artificial Sequence
  Description of Artificial Sequence: Synthetic oligonucleotide
augacagucugccugucgc

SEQ ID NO: 2500703 - RNA, 19 nt, Artificial Sequence
  Description of Artificial Sequence: Synthetic oligonucleotide
aacuguguuauaaagauua

SEQ ID NO: 2500704 - RNA, 19 nt, Artificial Sequence
  Description of Artificial Sequence: Synthetic oligonucleotide
auuguaguugauguggaac

SEQ ID NO: 2500705 - RNA, 19 nt, Artificial Sequence
  Description of Artificial Sequence: Synthetic oligonucleotide
augagaucgcaguacaagg

SEQ ID NO: 2500706 - RNA, 19 nt, Artificial Sequence
  Description of Artificial Sequence: Synthetic oligonucleotide
aaccgguggaaauuccggc

SEQ ID NO: 2500707 - RNA, 19 nt, Artificial Sequence
  Description of Artificial Sequence: Synthetic oligonucleotide
cugguguuagcccagauug

SEQ ID NO: 2500708 - RNA, 19 nt, Artificial Sequence
  Description of Artificial Sequence: Synthetic oligonucleotide
uugcuuuuccgccugaaca

SEQ ID NO: 2500709 - RNA, 19 nt, Artificial Sequence
  Description of Artificial Sequence: Synthetic oligonucleotide
uaaagauuauugauaugac

SEQ ID NO: 2500710 - RNA, 19 nt, Artificial Sequence
  Description of Artificial Sequence: Synthetic oligonucleotide
aagggcacaggccuggcuc

SEQ ID NO: 2500711 - RNA, 19 nt, Artificial Sequence
  Description of Artificial Sequence: Synthetic oligonucleotide
ugauguggaacugagagaa

SEQ ID NO: 2500712 - RNA, 19 nt, Artificial Sequence
  Description of Artificial Sequence: Synthetic oligonucleotide
uacaacacaacucuuccau

SEQ ID NO: 2500713 - RNA, 19 nt, Artificial Sequence
  Description of Artificial Sequence: Synthetic oligonucleotide
uuuuaaaccaauugcuuuu

SEQ ID NO: 2500714 - RNA, 19 nt, Artificial Sequence
  Description of Artificial Sequence: Synthetic oligonucleotide
cuuuucuguacaucugugg

SEQ ID NO: 2500715 - RNA, 19 nt, Artificial Sequence
  Description of Artificial Sequence: Synthetic oligonucleotide
acugagagaacagaauuuc

SEQ ID NO: 2500716 - RNA, 19 nt, Artificial Sequence
  Description of Artificial Sequence: Synthetic oligonucleotide
uuguaguugauguggaacu

SEQ ID NO: 2500717 - RNA, 19 nt, Artificial Sequence
  Description of Artificial Sequence: Synthetic oligonucleotide
agauugcuggauaagggcc

SEQ ID NO: 2500718 - RNA, 19 nt, Artificial Sequence
  Description of Artificial Sequence: Synthetic oligonucleotide
ugucauuagguuuugcaaa

SEQ ID NO: 2500719 - RNA, 19 nt, Artificial Sequence
  Description of Artificial Sequence: Synthetic oligonucleotide
acugucugggcacauuugg

SEQ ID NO: 2500720 - RNA, 19 nt, Artificial Sequence
  Description of Artificial Sequence: Synthetic oligonucleotide
uuucauucuugucuccugc

SEQ ID NO: 2500721 - RNA, 19 nt, Artificial Sequence
  Description of Artificial Sequence: Synthetic oligonucleotide
aaugcauccccaaugagau

SEQ ID NO: 2500722 - RNA, 19 nt, Artificial Sequence
  Description of Artificial Sequence: Synthetic oligonucleotide
uucaaggucugguugcuag

SEQ ID NO: 2500723 - RNA, 19 nt, Artificial Sequence
  Description of Artificial Sequence: Synthetic oligonucleotide
uccgccugaacacaaagcu

SEQ ID NO: 2500724 - RNA, 19 nt, Artificial Sequence
  Description of Artificial Sequence: Synthetic oligonucleotide
uacagaagaggcugguccg

SEQ ID NO: 2500725 - RNA, 19 nt, Artificial Sequence
  Description of Artificial Sequence: Synthetic oligonucleotide
cuaggauacaacacaacuc

SEQ ID NO: 2500726 - RNA, 19 nt, Artificial Sequence
  Description of Artificial Sequence: Synthetic oligonucleotide
acuaacacugucccuuuuc

SEQ ID NO: 2500727 - RNA, 19 nt, Artificial Sequence
  Description of Artificial Sequence: Synthetic oligonucleotide
cucaaaaucccgcacguac

SEQ ID NO: 2500728 - RNA, 19 nt, Artificial Sequence
  Description of Artificial Sequence: Synthetic oligonucleotide
gucauuagguuuugcaaag

SEQ ID NO: 2500729 - RNA, 19 nt, Artificial Sequence
  Description of Artificial Sequence: Synthetic oligonucleotide
uccuccauuacugucuggg

SEQ ID NO: 2500730 - RNA, 19 nt, Artificial Sequence
  Description of Artificial Sequence: Synthetic oligonucleotide
uauugauaugacagucugc

SEQ ID NO: 2500731 - RNA, 19 nt, Artificial Sequence
  Description of Artificial Sequence: Synthetic oligonucleotide
uaguugauguggaacugag

SEQ ID NO: 2500732 - RNA, 19 nt, Artificial Sequence
  Description of Artificial Sequence: Synthetic oligonucleotide
uauaaagauuauugauaug

SEQ ID NO: 2500733 - RNA, 19 nt, Artificial Sequence
  Description of Artificial Sequence: Synthetic oligonucleotide
uaacuggaggcgaacuggg

SEQ ID NO: 2500734 - RNA, 19 nt, Artificial Sequence
  Description of Artificial Sequence: Synthetic oligonucleotide
ugaacuuacuggcucuucu

SEQ ID NO: 2500735 - RNA, 19 nt, Artificial Sequence
  Description of Artificial Sequence: Synthetic oligonucleotide
acugagguaguccuucaag

SEQ ID NO: 2500736 - RNA, 19 nt, Artificial Sequence
  Description of Artificial Sequence: Synthetic oligonucleotide
guuauaaagauuauugaua

SEQ ID NO: 2500737 - RNA, 19 nt, Artificial Sequence
  Description of Artificial Sequence: Synthetic oligonucleotide
cagauugcuggauaagggc

SEQ ID NO: 2500738 - RNA, 19 nt, Artificial Sequence
  Description of Artificial Sequence: Synthetic oligonucleotide
ucaaaaucccgcacguacu

SEQ ID NO: 2500739 - RNA, 19 nt, Artificial Sequence
  Description of Artificial Sequence: Synthetic oligonucleotide
uaugacagucugccugucg

SEQ ID NO: 2500740 - RNA, 19 nt, Artificial Sequence
  Description of Artificial Sequence: Synthetic oligonucleotide
gagaucgcaguacaagggc

SEQ ID NO: 2500741 - RNA, 19 nt, Artificial Sequence
  Description of Artificial Sequence: Synthetic oligonucleotide
acgagagucaugaacuuac

SEQ ID NO: 2500742 - RNA, 19 nt, Artificial Sequence
  Description of Artificial Sequence: Synthetic oligonucleotide
cagaguucccuuuaaucgc

SEQ ID NO: 2500743 - RNA, 19 nt, Artificial Sequence
  Description of Artificial Sequence: Synthetic oligonucleotide
aguucccuuuaaucgcucc

SEQ ID NO: 2500744 - RNA, 19 nt, Artificial Sequence
  Description of Artificial Sequence: Synthetic oligonucleotide
uuuccgccugaacacaaag

SEQ ID NO: 2500745 - RNA, 19 nt, Artificial Sequence
  Description of Artificial Sequence: Synthetic oligonucleotide
aaaccgguggaaauuccgg

SEQ ID NO: 2500746 - RNA, 19 nt, Artificial Sequence
  Description of Artificial Sequence: Synthetic oligonucleotide
caaaccgguggaaauuccg

SEQ ID NO: 2500747 - RNA, 19 nt, Artificial Sequence
  Description of Artificial Sequence: Synthetic oligonucleotide
auuccggccguccagucuc

SEQ ID NO: 2500748 - RNA, 19 nt, Artificial Sequence
  Description of Artificial Sequence: Synthetic oligonucleotide
uuucuguacaucuguggcu

SEQ ID NO: 2500749 - RNA, 19 nt, Artificial Sequence
  Description of Artificial Sequence: Synthetic oligonucleotide
aaguaaucccgccaauaaa

SEQ ID NO: 2500750 - RNA, 19 nt, Artificial Sequence
  Description of Artificial Sequence: Synthetic oligonucleotide
ugccacacuaacacugucc

SEQ ID NO: 2500751 - RNA, 19 nt, Artificial Sequence
  Description of Artificial Sequence: Synthetic oligonucleotide
ucccuuuaaucgcuccugg

SEQ ID NO: 2500752 - RNA, 19 nt, Artificial Sequence
  Description of Artificial Sequence: Synthetic oligonucleotide
cuggcucuucuuuuaaacc

SEQ ID NO: 2500753 - RNA, 19 nt, Artificial Sequence
  Description of Artificial Sequence: Synthetic oligonucleotide
uaaucccgccaauaaaaca

SEQ ID NO: 2500754 - RNA, 19 nt, Artificial Sequence
  Description of Artificial Sequence: Synthetic oligonucleotide
gagagucaugaacuuacug

SEQ ID NO: 2500755 - RNA, 19 nt, Artificial Sequence
  Description of Artificial Sequence: Synthetic oligonucleotide
acaacacaacucuuccauc

SEQ ID NO: 2500756 - RNA, 19 nt, Artificial Sequence
  Description of Artificial Sequence: Synthetic oligonucleotide
caagcagguaucgucagcc

SEQ ID NO: 2500757 - RNA, 19 nt, Artificial Sequence
  Description of Artificial Sequence: Synthetic oligonucleotide
ucgucagccucaaaauccc

SEQ ID NO: 2500758 - RNA, 19 nt, Artificial Sequence
  Description of Artificial Sequence: Synthetic oligonucleotide
ucaaggucugguugcuagg

SEQ ID NO: 2500759 - RNA, 19 nt, Artificial Sequence
  Description of Artificial Sequence: Synthetic oligonucleotide
uaucgucagccucaaaauc

SEQ ID NO: 2500760 - RNA, 19 nt, Artificial Sequence
  Description of Artificial Sequence: Synthetic oligonucleotide
gccaauaaaacacauaacu

SEQ ID NO: 2500761 - RNA, 19 nt, Artificial Sequence
  Description of Artificial Sequence: Synthetic oligonucleotide
ugguccgcaaaguaauccc

SEQ ID NO: 2500762 - RNA, 19 nt, Artificial Sequence
  Description of Artificial Sequence: Synthetic oligonucleotide
uuggacugguguuagccca

SEQ ID NO: 2500763 - RNA, 19 nt, Artificial Sequence
  Description of Artificial Sequence: Synthetic oligonucleotide
aacuucuuguguccugacu

SEQ ID NO: 2500764 - RNA, 19 nt, Artificial Sequence
  Description of Artificial Sequence: Synthetic oligonucleotide
aguaaucccgccaauaaaa

SEQ ID NO: 2500765 - RNA, 19 nt, Artificial Sequence
  Description of Artificial Sequence: Synthetic oligonucleotide
uugauguggaacugagaga

SEQ ID NO: 2500766 - RNA, 19 nt, Artificial Sequence
  Description of Artificial Sequence: Synthetic oligonucleotide
ucaugaacuuacuggcucu

SEQ ID NO: 2500767 - RNA, 19 nt, Artificial Sequence
  Description of Artificial Sequence: Synthetic oligonucleotide
ucagccucaaaaucccgca

SEQ ID NO: 2500768 - RNA, 19 nt, Artificial Sequence
  Description of Artificial Sequence: Synthetic oligonucleotide
aacugggaggccacgagag

SEQ ID NO: 2500769 - RNA, 19 nt, Artificial Sequence
  Description of Artificial Sequence: Synthetic oligonucleotide
uccccaaugagaucgcagu

SEQ ID NO: 2500770 - RNA, 19 nt, Artificial Sequence
  Description of Artificial Sequence: Synthetic oligonucleotide
aaauuccggccguccaguc

SEQ ID NO: 2500771 - RNA, 19 nt, Artificial Sequence
  Description of Artificial Sequence: Synthetic oligonucleotide
auuagguuuugcaaagcug

SEQ ID NO: 2500772 - RNA, 19 nt, Artificial Sequence
  Description of Artificial Sequence: Synthetic oligonucleotide
agcagguaucgucagccuc

SEQ ID NO: 2500773 - RNA, 19 nt, Artificial Sequence
  Description of Artificial Sequence: Synthetic oligonucleotide
uugcuaggauacaacacaa

SEQ ID NO: 2500774 - RNA, 19 nt, Artificial Sequence
  Description of Artificial Sequence: Synthetic oligonucleotide
aacuuacuggcucuucuuu

SEQ ID NO: 2500775 - RNA, 19 nt, Artificial Sequence
  Description of Artificial Sequence: Synthetic oligonucleotide
cugccugucgccaacugag

SEQ ID NO: 2500776 - RNA, 19 nt, Artificial Sequence
  Description of Artificial Sequence: Synthetic oligonucleotide
cuuggacugguguuagccc

SEQ ID NO: 2500777 - RNA, 19 nt, Artificial Sequence
  Description of Artificial Sequence: Synthetic oligonucleotide
gaacagaauuucauucuug

SEQ ID NO: 2500778 - RNA, 19 nt, Artificial Sequence
  Description of Artificial Sequence: Synthetic oligonucleotide
aaaucccgcacguacucaa

SEQ ID NO: 2500779 - RNA, 19 nt, Artificial Sequence
  Description of Artificial Sequence: Synthetic oligonucleotide
aagcuguacucaucgcucu

SEQ ID NO: 2500780 - RNA, 19 nt, Artificial Sequence
  Description of Artificial Sequence: Synthetic oligonucleotide
uguacucaucgcucugucc

SEQ ID NO: 2500781 - RNA, 19 nt, Artificial Sequence
  Description of Artificial Sequence: Synthetic oligonucleotide
gucaugaacuuacuggcuc

SEQ ID NO: 2500782 - RNA, 19 nt, Artificial Sequence
  Description of Artificial Sequence: Synthetic oligonucleotide
ugcuucucggcaaaccggu

SEQ ID NO: 2500783 - RNA, 19 nt, Artificial Sequence
  Description of Artificial Sequence: Synthetic oligonucleotide
uagguuuugcaaagcugug

SEQ ID NO: 2500784 - RNA, 19 nt, Artificial Sequence
  Description of Artificial Sequence: Synthetic oligonucleotide
cauaacuggaggcgaacug

SEQ ID NO: 2500785 - RNA, 19 nt, Artificial Sequence
  Description of Artificial Sequence: Synthetic oligonucleotide
uguaguugauguggaacug

SEQ ID NO: 2500786 - RNA, 19 nt, Artificial Sequence
  Description of Artificial Sequence: Synthetic oligonucleotide
ucagcuggagagcucgacu

SEQ ID NO: 2500787 - RNA, 19 nt, Artificial Sequence
  Description of Artificial Sequence: Synthetic oligonucleotide
auguggaacugagagaaca

SEQ ID NO: 2500788 - RNA, 19 nt, Artificial Sequence
  Description of Artificial Sequence: Synthetic oligonucleotide
agaaugcauccccaaugag

SEQ ID NO: 2500789 - RNA, 19 nt, Artificial Sequence
  Description of Artificial Sequence: Synthetic oligonucleotide
uuccgccugaacacaaagc

SEQ ID NO: 2500790 - RNA, 19 nt, Artificial Sequence
  Description of Artificial Sequence: Synthetic oligonucleotide
gagcucgacugucauuagg

SEQ ID NO: 2500791 - RNA, 19 nt, Artificial Sequence
  Description of Artificial Sequence: Synthetic oligonucleotide
aauuccggccguccagucu

SEQ ID NO: 2500792 - RNA, 19 nt, Artificial Sequence
  Description of Artificial Sequence: Synthetic oligonucleotide
uggaaauuccggccgucca

SEQ ID NO: 2500793 - RNA, 19 nt, Artificial Sequence
  Description of Artificial Sequence: Synthetic oligonucleotide
aucccgcacguacucaaac

SEQ ID NO: 2500794 - RNA, 19 nt, Artificial Sequence
  Description of Artificial Sequence: Synthetic oligonucleotide
uccgcaaaguaaucccgcc

SEQ ID NO: 2500795 - RNA, 19 nt, Artificial Sequence
  Description of Artificial Sequence: Synthetic oligonucleotide
gaggccacgagagucauga

SEQ ID NO: 2500796 - RNA, 19 nt, Artificial Sequence
  Description of Artificial Sequence: Synthetic oligonucleotide
cagccuaacuucuuguguc

SEQ ID NO: 2500797 - RNA, 19 nt, Artificial Sequence
  Description of Artificial Sequence: Synthetic oligonucleotide
ggcacauuuggucaucagc

SEQ ID NO: 2500798 - RNA, 19 nt, Artificial Sequence
  Description of Artificial Sequence: Synthetic oligonucleotide
auacaacacaacucuucca

SEQ ID NO: 2500799 - RNA, 19 nt, Artificial Sequence
  Description of Artificial Sequence: Synthetic oligonucleotide
cuguccauaugcaaugaca

SEQ ID NO: 2500800 - RNA, 19 nt, Artificial Sequence
  Description of Artificial Sequence: Synthetic oligonucleotide
aacugagagaacagaauuu

SEQ ID NO: 2500801 - RNA, 19 nt, Artificial Sequence
  Description of Artificial Sequence: Synthetic oligonucleotide
ucuguacaucuguggcucg

SEQ ID NO: 2500802 - RNA, 19 nt, Artificial Sequence
  Description of Artificial Sequence: Synthetic oligonucleotide
accaauugcuuuuccgccu

SEQ ID NO: 2500803 - RNA, 19 nt, Artificial Sequence
  Description of Artificial Sequence: Synthetic oligonucleotide
ucugccugucgccaacuga

SEQ ID NO: 2500804 - RNA, 19 nt, Artificial Sequence
  Description of Artificial Sequence: Synthetic oligonucleotide
gaacugagagaacagaauu

SEQ ID NO: 2500805 - RNA, 19 nt, Artificial Sequence
  Description of Artificial Sequence: Synthetic oligonucleotide
ugcuaggauacaacacaac

SEQ ID NO: 2500806 - RNA, 19 nt, Artificial Sequence
  Description of Artificial Sequence: Synthetic oligonucleotide
guccagucucaccacaacc

SEQ ID NO: 2500807 - RNA, 19 nt, Artificial Sequence
  Description of Artificial Sequence: Synthetic oligonucleotide
gauaugacagucugccugu

SEQ ID NO: 2500808 - RNA, 19 nt, Artificial Sequence
  Description of Artificial Sequence: Synthetic oligonucleotide
ugguguuagcccagauugc

SEQ ID NO: 2500809 - RNA, 19 nt, Artificial Sequence
  Description of Artificial Sequence: Synthetic oligonucleotide
ucauuagguuuugcaaagc

SEQ ID NO: 2500810 - RNA, 19 nt, Artificial Sequence
  Description of Artificial Sequence: Synthetic oligonucleotide
ccuuuaaucgcuccugggc

SEQ ID NO: 2500811 - RNA, 19 nt, Artificial Sequence
  Description of Artificial Sequence: Synthetic oligonucleotide
caaaaucccgcacguacuc

SEQ ID NO: 2500812 - RNA, 19 nt, Artificial Sequence
  Description of Artificial Sequence: Synthetic oligonucleotide
gagagcucgacugucauua

SEQ ID NO: 2500813 - RNA, 19 nt, Artificial Sequence
  Description of Artificial Sequence: Synthetic oligonucleotide
cugucgccaacugagguag

SEQ ID NO: 2500814 - RNA, 19 nt, Artificial Sequence
  Description of Artificial Sequence: Synthetic oligonucleotide
cuguggcucgucauuguag

SEQ ID NO: 2500815 - RNA, 19 nt, Artificial Sequence
  Description of Artificial Sequence: Synthetic oligonucleotide
uugauaugacagucugccu

SEQ ID NO: 2500816 - RNA, 19 nt, Artificial Sequence
  Description of Artificial Sequence: Synthetic oligonucleotide
aaaaucccgcacguacuca

SEQ ID NO: 2500817 - RNA, 19 nt, Artificial Sequence
  Description of Artificial Sequence: Synthetic oligonucleotide
uuuaaucgcuccugggcuu

SEQ ID NO: 2500818 - RNA, 19 nt, Artificial Sequence
  Description of Artificial Sequence: Synthetic oligonucleotide
aacccagcagugcggcaag

SEQ ID NO: 2500819 - RNA, 19 nt, Artificial Sequence
  Description of Artificial Sequence: Synthetic oligonucleotide
ccugacuucauccaccuuc

SEQ ID NO: 2500820 - RNA, 19 nt, Artificial Sequence
  Description of Artificial Sequence: Synthetic oligonucleotide
ggggauacagaagaggcug

SEQ ID NO: 2500821 - RNA, 19 nt, Artificial Sequence
  Description of Artificial Sequence: Synthetic oligonucleotide
ugacagucugccugucgcc

SEQ ID NO: 2500822 - RNA, 19 nt, Artificial Sequence
  Description of Artificial Sequence: Synthetic oligonucleotide
cagaaugcauccccaauga

SEQ ID NO: 2500823 - RNA, 19 nt, Artificial Sequence
  Description of Artificial Sequence: Synthetic oligonucleotide
uuaaucgcuccugggcuug

SEQ ID NO: 2500824 - RNA, 19 nt, Artificial Sequence
  Description of Artificial Sequence: Synthetic oligonucleotide
cauuuggucaucagcugga

SEQ ID NO: 2500825 - RNA, 19 nt, Artificial Sequence
  Description of Artificial Sequence: Synthetic oligonucleotide
agcucgacugucauuaggu

SEQ ID NO: 2500826 - RNA, 19 nt, Artificial Sequence
  Description of Artificial Sequence: Synthetic oligonucleotide
aagcagguaucgucagccu

SEQ ID NO: 2500827 - RNA, 19 nt, Artificial Sequence
  Description of Artificial Sequence: Synthetic oligonucleotide
ugccugucgccaacugagg

SEQ ID NO: 2500828 - RNA, 19 nt, Artificial Sequence
  Description of Artificial Sequence: Synthetic oligonucleotide
ggaaauuccggccguccag

SEQ ID NO: 2500829 - RNA, 19 nt, Artificial Sequence
  Description of Artificial Sequence: Synthetic oligonucleotide
agugcggcaagcagguauc

SEQ ID NO: 2500830 - RNA, 19 nt, Artificial Sequence
  Description of Artificial Sequence: Synthetic oligonucleotide
guaaucccgccaauaaaac

SEQ ID NO: 2500831 - RNA, 19 nt, Artificial Sequence
  Description of Artificial Sequence: Synthetic oligonucleotide
acuuacuggcucuucuuuu

SEQ ID NO: 2500832 - RNA, 19 nt, Artificial Sequence
  Description of Artificial Sequence: Synthetic oligonucleotide
cuccauuacugucugggca

SEQ ID NO: 2500833 - RNA, 19 nt, Artificial Sequence
  Description of Artificial Sequence: Synthetic oligonucleotide
gaucgcaguacaagggcac

SEQ ID NO: 2500834 - RNA, 19 nt, Artificial Sequence
  Description of Artificial Sequence: Synthetic oligonucleotide
gucugggcacauuugguca

SEQ ID NO: 2500835 - RNA, 19 nt, Artificial Sequence
  Description of Artificial Sequence: Synthetic oligonucleotide
uucuuguguccugacuuca

SEQ ID NO: 2500836 - RNA, 19 nt, Artificial Sequence
  Description of Artificial Sequence: Synthetic oligonucleotide
ucggcaaaccgguggaaau

SEQ ID NO: 2500837 - RNA, 19 nt, Artificial Sequence
  Description of Artificial Sequence: Synthetic oligonucleotide
uucugcaggcagccuaacu

SEQ ID NO: 2500838 - RNA, 19 nt, Artificial Sequence
  Description of Artificial Sequence: Synthetic oligonucleotide
cuuuaaucgcuccugggcu

SEQ ID NO: 2500839 - RNA, 19 nt, Artificial Sequence
  Description of Artificial Sequence: Synthetic oligonucleotide
gcuaggauacaacacaacu

SEQ ID NO: 2500840 - RNA, 19 nt, Artificial Sequence
  Description of Artificial Sequence: Synthetic oligonucleotide
gaacugggaggccacgaga

SEQ ID NO: 2500841 - RNA, 19 nt, Artificial Sequence
  Description of Artificial Sequence: Synthetic oligonucleotide
augcaaugacaauguccuc

SEQ ID NO: 2500842 - RNA, 19 nt, Artificial Sequence
  Description of Artificial Sequence: Synthetic oligonucleotide
cagucucaccacaacccag

SEQ ID NO: 2500843 - RNA, 19 nt, Artificial Sequence
  Description of Artificial Sequence: Synthetic oligonucleotide
uuuuccgccugaacacaaa

SEQ ID NO: 2500844 - RNA, 19 nt, Artificial Sequence
  Description of Artificial Sequence: Synthetic oligonucleotide
acauaacuggaggcgaacu

SEQ ID NO: 2500845 - RNA, 19 nt, Artificial Sequence
  Description of Artificial Sequence: Synthetic oligonucleotide
aaacuguguuauaaagauu

SEQ ID NO: 2500846 - RNA, 19 nt, Artificial Sequence
  Description of Artificial Sequence: Synthetic oligonucleotide
ucccgcacguacucaaacu

SEQ ID NO: 2500847 - RNA, 19 nt, Artificial Sequence
  Description of Artificial Sequence: Synthetic oligonucleotide
ucuuguguccugacuucau

SEQ ID NO: 2500848 - RNA, 19 nt, Artificial Sequence
  Description of Artificial Sequence: Synthetic oligonucleotide
aucagcuggagagcucgac

SEQ ID NO: 2500849 - RNA, 19 nt, Artificial Sequence
  Description of Artificial Sequence: Synthetic oligonucleotide
gcaaagcugugcuucucgg

SEQ ID NO: 2500850 - RNA, 19 nt, Artificial Sequence
  Description of Artificial Sequence: Synthetic oligonucleotide
augaacuuacuggcucuuc

SEQ ID NO: 2500851 - RNA, 19 nt, Artificial Sequence
  Description of Artificial Sequence: Synthetic oligonucleotide
ucgccaacugagguagucc

SEQ ID NO: 2500852 - RNA, 19 nt, Artificial Sequence
  Description of Artificial Sequence: Synthetic oligonucleotide
aggucugguugcuaggaua

SEQ ID NO: 2500853 - RNA, 19 nt, Artificial Sequence
  Description of Artificial Sequence: Synthetic oligonucleotide
uggaggcgaacugggaggc

SEQ ID NO: 2500854 - RNA, 19 nt, Artificial Sequence
  Description of Artificial Sequence: Synthetic oligonucleotide
agaguucccuuuaaucgcu

SEQ ID NO: 2500855 - RNA, 19 nt, Artificial Sequence
  Description of Artificial Sequence: Synthetic oligonucleotide
caucuguggcucgucauug

SEQ ID NO: 2500856 - RNA, 19 nt, Artificial Sequence
  Description of Artificial Sequence: Synthetic oligonucleotide
ucgcaguacaagggcacag

SEQ ID NO: 2500857 - RNA, 19 nt, Artificial Sequence
  Description of Artificial Sequence: Synthetic oligonucleotide
uaacuucuuguguccugac

SEQ ID NO: 2500858 - RNA, 19 nt, Artificial Sequence
  Description of Artificial Sequence: Synthetic oligonucleotide
guaguugauguggaacuga

SEQ ID NO: 2500859 - RNA, 19 nt, Artificial Sequence
  Description of Artificial Sequence: Synthetic oligonucleotide
cuuacuggcucuucuuuua

SEQ ID NO: 2500860 - RNA, 19 nt, Artificial Sequence
  Description of Artificial Sequence: Synthetic oligonucleotide
agaucgcaguacaagggca

SEQ ID NO: 2500861 - RNA, 19 nt, Artificial Sequence
  Description of Artificial Sequence: Synthetic oligonucleotide
ugguccgggucacagucau

SEQ ID NO: 2500862 - RNA, 19 nt, Artificial Sequence
  Description of Artificial Sequence: Synthetic oligonucleotide
uacuggcucuucuuuuaaa

SEQ ID NO: 2500863 - RNA, 19 nt, Artificial Sequence
  Description of Artificial Sequence: Synthetic oligonucleotide
ccgccaauaaaacacauaa

SEQ ID NO: 2500864 - RNA, 19 nt, Artificial Sequence
  Description of Artificial Sequence: Synthetic oligonucleotide
agagcucgacugucauuag

SEQ ID NO: 2500865 - RNA, 19 nt, Artificial Sequence
  Description of Artificial Sequence: Synthetic oligonucleotide
gguccgcaaaguaaucccg

SEQ ID NO: 2500866 - RNA, 19 nt, Artificial Sequence
  Description of Artificial Sequence: Synthetic oligonucleotide
guguccugacuucauccac

SEQ ID NO: 2500867 - RNA, 19 nt, Artificial Sequence
  Description of Artificial Sequence: Synthetic oligonucleotide
uugucuccugccagaguuc

SEQ ID NO: 2500868 - RNA, 19 nt, Artificial Sequence
  Description of Artificial Sequence: Synthetic oligonucleotide
augcauccccaaugagauc

SEQ ID NO: 2500869 - RNA, 19 nt, Artificial Sequence
  Description of Artificial Sequence: Synthetic oligonucleotide
ugucccuuuucuguacauc

SEQ ID NO: 2500870 - RNA, 19 nt, Artificial Sequence
  Description of Artificial Sequence: Synthetic oligonucleotide
aggcagccuaacuucuugu

SEQ ID NO: 2500871 - RNA, 19 nt, Artificial Sequence
  Description of Artificial Sequence: Synthetic oligonucleotide
cccagauugcuggauaagg

SEQ ID NO: 2500872 - RNA, 19 nt, Artificial Sequence
  Description of Artificial Sequence: Synthetic oligonucleotide
cugggaggccacgagaguc

SEQ ID NO: 2500873 - RNA, 19 nt, Artificial Sequence
  Description of Artificial Sequence: Synthetic oligonucleotide
ugccagaguucccuuuaau

SEQ ID NO: 2500874 - RNA, 19 nt, Artificial Sequence
  Description of Artificial Sequence: Synthetic oligonucleotide
ucccgccaauaaaacacau

SEQ ID NO: 2500875 - RNA, 19 nt, Artificial Sequence
  Description of Artificial Sequence: Synthetic oligonucleotide
guacaucuguggcucguca

SEQ ID NO: 2500876 - RNA, 19 nt, Artificial Sequence
  Description of Artificial Sequence: Synthetic oligonucleotide
ggucugguugcuaggauac

SEQ ID NO: 2500877 - RNA, 19 nt, Artificial Sequence
  Description of Artificial Sequence: Synthetic oligonucleotide
guccgcaaaguaaucccgc

SEQ ID NO: 2500878 - RNA, 19 nt, Artificial Sequence
  Description of Artificial Sequence: Synthetic oligonucleotide
ggccacgagagucaugaac

SEQ ID NO: 2500879 - RNA, 19 nt, Artificial Sequence
  Description of Artificial Sequence: Synthetic oligonucleotide
guggaaauuccggccgucc

SEQ ID NO: 2500880 - RNA, 19 nt, Artificial Sequence
  Description of Artificial Sequence: Synthetic oligonucleotide
uguacaucuguggcucguc

SEQ ID NO: 2500881 - RNA, 19 nt, Artificial Sequence
  Description of Artificial Sequence: Synthetic oligonucleotide
ugcuggauaagggcccaga

SEQ ID NO: 2500882 - RNA, 19 nt, Artificial Sequence
  Description of Artificial Sequence: Synthetic oligonucleotide
ucgcucuguccauaugcaa

SEQ ID NO: 2500883 - RNA, 19 nt, Artificial Sequence
  Description of Artificial Sequence: Synthetic oligonucleotide
auaugacagucugccuguc

SEQ ID NO: 2500884 - RNA, 19 nt, Artificial Sequence
  Description of Artificial Sequence: Synthetic oligonucleotide
cacauaacuggaggcgaac

SEQ ID NO: 2500885 - RNA, 19 nt, Artificial Sequence
  Description of Artificial Sequence: Synthetic oligonucleotide
caccuucugccacacuaac

SEQ ID NO: 2500886 - RNA, 19 nt, Artificial Sequence
  Description of Artificial Sequence: Synthetic oligonucleotide
ggcagccuaacuucuugug

SEQ ID NO: 2500887 - RNA, 19 nt, Artificial Sequence
  Description of Artificial Sequence: Synthetic oligonucleotide
guggaacugagagaacaga

SEQ ID NO: 2500888 - RNA, 19 nt, Artificial Sequence
  Description of Artificial Sequence: Synthetic oligonucleotide
gacagucugccugucgcca

SEQ ID NO: 2500889 - RNA, 19 nt, Artificial Sequence
  Description of Artificial Sequence: Synthetic oligonucleotide
uuagcccagauugcuggau

SEQ ID NO: 2500890 - RNA, 19 nt, Artificial Sequence
  Description of Artificial Sequence: Synthetic oligonucleotide
auugcuggauaagggccca

SEQ ID NO: 2500891 - RNA, 19 nt, Artificial Sequence
  Description of Artificial Sequence: Synthetic oligonucleotide
aucgcucuguccauaugca

SEQ ID NO: 2500892 - RNA, 19 nt, Artificial Sequence
  Description of Artificial Sequence: Synthetic oligonucleotide
cacaacucuuccaucaaau

SEQ ID NO: 2500893 - RNA, 19 nt, Artificial Sequence
  Description of Artificial Sequence: Synthetic oligonucleotide
gggauacagaagaggcugg

SEQ ID NO: 2500894 - RNA, 19 nt, Artificial Sequence
  Description of Artificial Sequence: Synthetic oligonucleotide
cauuguaguugauguggaa

SEQ ID NO: 2500895 - RNA, 19 nt, Artificial Sequence
  Description of Artificial Sequence: Synthetic oligonucleotide
uaaucgcuccugggcuugg

SEQ ID NO: 2500896 - RNA, 19 nt, Artificial Sequence
  Description of Artificial Sequence: Synthetic oligonucleotide
ugggcacauuuggucauca

SEQ ID NO: 2500897 - RNA, 19 nt, Artificial Sequence
  Description of Artificial Sequence: Synthetic oligonucleotide
guguuagcccagauugcug

SEQ ID NO: 2500898 - RNA, 19 nt, Artificial Sequence
  Description of Artificial Sequence: Synthetic oligonucleotide
acacuaacacugucccuuu

SEQ ID NO: 2500899 - RNA, 19 nt, Artificial Sequence
  Description of Artificial Sequence: Synthetic oligonucleotide
caaaguaaucccgccaaua

SEQ ID NO: 2500900 - RNA, 19 nt, Artificial Sequence
  Description of Artificial Sequence: Synthetic oligonucleotide
ccgguggaaauuccggccg

SEQ ID NO: 2500901 - RNA, 19 nt, Artificial Sequence
  Description of Artificial Sequence: Synthetic oligonucleotide
cgcacguacucaaacuugc

SEQ ID NO: 2500902 - RNA, 19 nt, Artificial Sequence
  Description of Artificial Sequence: Synthetic oligonucleotide
gcacauuuggucaucagcu

SEQ ID NO: 2500903 - RNA, 19 nt, Artificial Sequence
  Description of Artificial Sequence: Synthetic oligonucleotide
ggcaagcagguaucgucag

SEQ ID NO: 2500904 - RNA, 19 nt, Artificial Sequence
  Description of Artificial Sequence: Synthetic oligonucleotide
acuguguuauaaagauuau

SEQ ID NO: 2500905 - RNA, 19 nt, Artificial Sequence
  Description of Artificial Sequence: Synthetic oligonucleotide
cuuuuccgccugaacacaa

SEQ ID NO: 2500906 - RNA, 19 nt, Artificial Sequence
  Description of Artificial Sequence: Synthetic oligonucleotide
aacuggaggcgaacuggga

SEQ ID NO: 2500907 - RNA, 19 nt, Artificial Sequence
  Description of Artificial Sequence: Synthetic oligonucleotide
agaagaggcugguccgcaa

SEQ ID NO: 2500908 - RNA, 19 nt, Artificial Sequence
  Description of Artificial Sequence: Synthetic oligonucleotide
caccacaacccagcagugc

SEQ ID NO: 2500909 - RNA, 19 nt, Artificial Sequence
  Description of Artificial Sequence: Synthetic oligonucleotide
gcggcaagcagguaucguc

SEQ ID NO: 2500910 - RNA, 19 nt, Artificial Sequence
  Description of Artificial Sequence: Synthetic oligonucleotide
caaugagaucgcaguacaa

SEQ ID NO: 2500911 - RNA, 19 nt, Artificial Sequence
  Description of Artificial Sequence: Synthetic oligonucleotide
gaacuuacuggcucuucuu

SEQ ID NO: 2500912 - RNA, 19 nt, Artificial Sequence
  Description of Artificial Sequence: Synthetic oligonucleotide
ccagaaaacuguguuauaa

SEQ ID NO: 2500913 - RNA, 19 nt, Artificial Sequence
  Description of Artificial Sequence: Synthetic oligonucleotide
aucgcaguacaagggcaca

SEQ ID NO: 2500914 - RNA, 19 nt, Artificial Sequence
  Description of Artificial Sequence: Synthetic oligonucleotide
ccaaugagaucgcaguaca

SEQ ID NO: 2500915 - RNA, 19 nt, Artificial Sequence
  Description of Artificial Sequence: Synthetic oligonucleotide
caaacuugcucuuggccau

SEQ ID NO: 2500916 - RNA, 19 nt, Artificial Sequence
  Description of Artificial Sequence: Synthetic oligonucleotide
aucccgccaauaaaacaca

SEQ ID NO: 2500917 - RNA, 19 nt, Artificial Sequence
  Description of Artificial Sequence: Synthetic oligonucleotide
ggauaagggcccagaaaac

SEQ ID NO: 2500918 - RNA, 19 nt, Artificial Sequence
  Description of Artificial Sequence: Synthetic oligonucleotide
auuacugucugggcacauu

SEQ ID NO: 2500919 - RNA, 19 nt, Artificial Sequence
  Description of Artificial Sequence: Synthetic oligonucleotide
ccuaacuucuuguguccug

SEQ ID NO: 2500920 - RNA, 19 nt, Artificial Sequence
  Description of Artificial Sequence: Synthetic oligonucleotide
ccaauugcuuuuccgccug

SEQ ID NO: 2500921 - RNA, 19 nt, Artificial Sequence
  Description of Artificial Sequence: Synthetic oligonucleotide
cccaaugagaucgcaguac

SEQ ID NO: 2500922 - RNA, 19 nt, Artificial Sequence
  Description of Artificial Sequence: Synthetic oligonucleotide
agcugugcuucucggcaaa

SEQ ID NO: 2500923 - RNA, 19 nt, Artificial Sequence
  Description of Artificial Sequence: Synthetic oligonucleotide
guaguccuucaaggucugg

SEQ ID NO: 2500924 - RNA, 19 nt, Artificial Sequence
  Description of Artificial Sequence: Synthetic oligonucleotide
cuggcucugguccggguca

SEQ ID NO: 2500925 - RNA, 19 nt, Artificial Sequence
  Description of Artificial Sequence: Synthetic oligonucleotide
ggcaaaccgguggaaauuc

SEQ ID NO: 2500926 - RNA, 19 nt, Artificial Sequence
  Description of Artificial Sequence: Synthetic oligonucleotide
gucucaccacaacccagca

SEQ ID NO: 2500927 - RNA, 19 nt, Artificial Sequence
  Description of Artificial Sequence: Synthetic oligonucleotide
gcaagcagguaucgucagc

SEQ ID NO: 2500928 - RNA, 19 nt, Artificial Sequence
  Description of Artificial Sequence: Synthetic oligonucleotide
gcagguaucgucagccuca

SEQ ID NO: 2500929 - RNA, 19 nt, Artificial Sequence
  Description of Artificial Sequence: Synthetic oligonucleotide
caacugagguaguccuuca

SEQ ID NO: 2500930 - RNA, 19 nt, Artificial Sequence
  Description of Artificial Sequence: Synthetic oligonucleotide
acaacccagcagugcggca

SEQ ID NO: 2500931 - RNA, 19 nt, Artificial Sequence
  Description of Artificial Sequence: Synthetic oligonucleotide
aaucccgcacguacucaaa

SEQ ID NO: 2500932 - RNA, 19 nt, Artificial Sequence
  Description of Artificial Sequence: Synthetic oligonucleotide
cucgacugucauuagguuu

SEQ ID NO: 2500933 - RNA, 19 nt, Artificial Sequence
  Description of Artificial Sequence: Synthetic oligonucleotide
gccacgagagucaugaacu

SEQ ID NO: 2500934 - RNA, 19 nt, Artificial Sequence
  Description of Artificial Sequence: Synthetic oligonucleotide
ccaacugagguaguccuuc

SEQ ID NO: 2500935 - RNA, 19 nt, Artificial Sequence
  Description of Artificial Sequence: Synthetic oligonucleotide
cugccacacuaacacuguc

SEQ ID NO: 2500936 - RNA, 19 nt, Artificial Sequence
  Description of Artificial Sequence: Synthetic oligonucleotide
cauccuuuccccuuccauu

SEQ ID NO: 2500937 - RNA, 19 nt, Artificial Sequence
  Description of Artificial Sequence: Synthetic oligonucleotide
ugcggcaagcagguaucgu

SEQ ID NO: 2500938 - RNA, 19 nt, Artificial Sequence
  Description of Artificial Sequence: Synthetic oligonucleotide
aaucgcuccugggcuugga

SEQ ID NO: 2500939 - RNA, 19 nt, Artificial Sequence
  Description of Artificial Sequence: Synthetic oligonucleotide
gugcggcaagcagguaucg

SEQ ID NO: 2500940 - RNA, 19 nt, Artificial Sequence
  Description of Artificial Sequence: Synthetic oligonucleotide
ccacaacccagcagugcgg

SEQ ID NO: 2500941 - RNA, 19 nt, Artificial Sequence
  Description of Artificial Sequence: Synthetic oligonucleotide
aggcgaacugggaggccac

SEQ ID NO: 2500942 - RNA, 19 nt, Artificial Sequence
  Description of Artificial Sequence: Synthetic oligonucleotide
gucgccaacugagguaguc

SEQ ID NO: 2500943 - RNA, 19 nt, Artificial Sequence
  Description of Artificial Sequence: Synthetic oligonucleotide
aggcugguccgcaaaguaa

SEQ ID NO: 2500944 - RNA, 19 nt, Artificial Sequence
  Description of Artificial Sequence: Synthetic oligonucleotide
aggauacaacacaacucuu

SEQ ID NO: 2500945 - RNA, 19 nt, Artificial Sequence
  Description of Artificial Sequence: Synthetic oligonucleotide
ccgcacguacucaaacuug

SEQ ID NO: 2500946 - RNA, 19 nt, Artificial Sequence
  Description of Artificial Sequence: Synthetic oligonucleotide
gguguuagcccagauugcu

SEQ ID NO: 2500947 - RNA, 19 nt, Artificial Sequence
  Description of Artificial Sequence: Synthetic oligonucleotide
ugucgccaacugagguagu

SEQ ID NO: 2500948 - RNA, 19 nt, Artificial Sequence
  Description of Artificial Sequence: Synthetic oligonucleotide
cgccaauaaaacacauaac

SEQ ID NO: 2500949 - RNA, 19 nt, Artificial Sequence
  Description of Artificial Sequence: Synthetic oligonucleotide
cgucauuguaguugaugug

SEQ ID NO: 2500950 - RNA, 19 nt, Artificial Sequence
  Description of Artificial Sequence: Synthetic oligonucleotide
acccagcagugcggcaagc

SEQ ID NO: 2500951 - RNA, 19 nt, Artificial Sequence
  Description of Artificial Sequence: Synthetic oligonucleotide
ccgccugaacacaaagcug

SEQ ID NO: 2500952 - RNA, 19 nt, Artificial Sequence
  Description of Artificial Sequence: Synthetic oligonucleotide
guccauaugcaaugacaau

SEQ ID NO: 2500953 - RNA, 19 nt, Artificial Sequence
  Description of Artificial Sequence: Synthetic oligonucleotide
gaguucccuuuaaucgcuc

SEQ ID NO: 2500954 - RNA, 19 nt, Artificial Sequence
  Description of Artificial Sequence: Synthetic oligonucleotide
gcuggauaagggcccagaa

SEQ ID NO: 2500955 - RNA, 19 nt, Artificial Sequence
  Description of Artificial Sequence: Synthetic oligonucleotide
gcaaaccgguggaaauucc

SEQ ID NO: 2500956 - RNA, 19 nt, Artificial Sequence
  Description of Artificial Sequence: Synthetic oligonucleotide
uuccggccguccagucuca

SEQ ID NO: 2500957 - RNA, 19 nt, Artificial Sequence
  Description of Artificial Sequence: Synthetic oligonucleotide
gguaguccuucaaggucug

SEQ ID NO: 2500958 - RNA, 19 nt, Artificial Sequence
  Description of Artificial Sequence: Synthetic oligonucleotide
agucugccugucgccaacu

SEQ ID NO: 2500959 - RNA, 19 nt, Artificial Sequence
  Description of Artificial Sequence: Synthetic oligonucleotide
cugucugggcacauuuggu

SEQ ID NO: 2500960 - RNA, 19 nt, Artificial Sequence
  Description of Artificial Sequence: Synthetic oligonucleotide
ggaacugagagaacagaau

SEQ ID NO: 2500961 - RNA, 19 nt, Artificial Sequence
  Description of Artificial Sequence: Synthetic oligonucleotide
cuguguuauaaagauuauu

SEQ ID NO: 2500962 - RNA, 19 nt, Artificial Sequence
  Description of Artificial Sequence: Synthetic oligonucleotide
gcucugguccgggucacag

SEQ ID NO: 2500963 - RNA, 19 nt, Artificial Sequence
  Description of Artificial Sequence: Synthetic oligonucleotide
cagugcggcaagcagguau

SEQ ID NO: 2500964 - RNA, 19 nt, Artificial Sequence
  Description of Artificial Sequence: Synthetic oligonucleotide
cucggcaaaccgguggaaa

SEQ ID NO: 2500965 - RNA, 19 nt, Artificial Sequence
  Description of Artificial Sequence: Synthetic oligonucleotide
caauugcuuuuccgccuga

SEQ ID NO: 2500966 - RNA, 19 nt, Artificial Sequence
  Description of Artificial Sequence: Synthetic oligonucleotide
cacgagagucaugaacuua

SEQ ID NO: 2500967 - RNA, 19 nt, Artificial Sequence
  Description of Artificial Sequence: Synthetic oligonucleotide
cgaacugggaggccacgag

SEQ ID NO: 2500968 - RNA, 19 nt, Artificial Sequence
  Description of Artificial Sequence: Synthetic oligonucleotide
gcuuuuccgccugaacaca

SEQ ID NO: 2500969 - RNA, 19 nt, Artificial Sequence
  Description of Artificial Sequence: Synthetic oligonucleotide
gccucaaaaucccgcacgu

SEQ ID NO: 2500970 - RNA, 19 nt, Artificial Sequence
  Description of Artificial Sequence: Synthetic oligonucleotide
gcccagauugcuggauaag

SEQ ID NO: 2500971 - RNA, 19 nt, Artificial Sequence
  Description of Artificial Sequence: Synthetic oligonucleotide
ggcuuggacugguguuagc

SEQ ID NO: 2500972 - RNA, 19 nt, Artificial Sequence
  Description of Artificial Sequence: Synthetic oligonucleotide
gcccagaaaacuguguuau

SEQ ID NO: 2500973 - RNA, 19 nt, Artificial Sequence
  Description of Artificial Sequence: Synthetic oligonucleotide
cucaucgcucuguccauau

SEQ ID NO: 2500974 - RNA, 19 nt, Artificial Sequence
  Description of Artificial Sequence: Synthetic oligonucleotide
ggucaucagcuggagagcu

SEQ ID NO: 2500975 - RNA, 19 nt, Artificial Sequence
  Description of Artificial Sequence: Synthetic oligonucleotide
cgccugaacacaaagcugu

SEQ ID NO: 2500976 - RNA, 19 nt, Artificial Sequence
  Description of Artificial Sequence: Synthetic oligonucleotide
ggcgaacugggaggccacg

SEQ ID NO: 2500977 - RNA, 19 nt, Artificial Sequence
  Description of Artificial Sequence: Synthetic oligonucleotide
uggcucugguccgggucac

SEQ ID NO: 2500978 - RNA, 19 nt, Artificial Sequence
  Description of Artificial Sequence: Synthetic oligonucleotide
gguggaaauuccggccguc

SEQ ID NO: 2500979 - RNA, 19 nt, Artificial Sequence
  Description of Artificial Sequence: Synthetic oligonucleotide
cauccccaaugagaucgca

SEQ ID NO: 2500980 - RNA, 19 nt, Artificial Sequence
  Description of Artificial Sequence: Synthetic oligonucleotide
ccgcaaaguaaucccgcca

SEQ ID NO: 2500981 - RNA, 19 nt, Artificial Sequence
  Description of Artificial Sequence: Synthetic oligonucleotide
cugggcuuggacugguguu

SEQ ID NO: 2500982 - RNA, 19 nt, Artificial Sequence
  Description of Artificial Sequence: Synthetic oligonucleotide
ggauacagaagaggcuggu

SEQ ID NO: 2500983 - RNA, 19 nt, Artificial Sequence
  Description of Artificial Sequence: Synthetic oligonucleotide
agguaucgucagccucaaa

SEQ ID NO: 2500984 - RNA, 19 nt, Artificial Sequence
  Description of Artificial Sequence: Synthetic oligonucleotide
ccugucgccaacugaggua

SEQ ID NO: 2500985 - RNA, 19 nt, Artificial Sequence
  Description of Artificial Sequence: Synthetic oligonucleotide
aggccacgagagucaugaa

SEQ ID NO: 2500986 - RNA, 19 nt, Artificial Sequence
  Description of Artificial Sequence: Synthetic oligonucleotide
ggcugguccgcaaaguaau

SEQ ID NO: 2500987 - RNA, 19 nt, Artificial Sequence
  Description of Artificial Sequence: Synthetic oligonucleotide
cggcaagcagguaucguca

SEQ ID NO: 2500988 - RNA, 19 nt, Artificial Sequence
  Description of Artificial Sequence: Synthetic oligonucleotide
gccguccagucucaccaca

SEQ ID NO: 2500989 - RNA, 19 nt, Artificial Sequence
  Description of Artificial Sequence: Synthetic oligonucleotide
ccaccuucugccacacuaa

SEQ ID NO: 2500990 - RNA, 19 nt, Artificial Sequence
  Description of Artificial Sequence: Synthetic oligonucleotide
gcauccccaaugagaucgc

SEQ ID NO: 2500991 - RNA, 19 nt, Artificial Sequence
  Description of Artificial Sequence: Synthetic oligonucleotide
gcugguccgcaaaguaauc

SEQ ID NO: 2500992 - RNA, 19 nt, Artificial Sequence
  Description of Artificial Sequence: Synthetic oligonucleotide
gcuucucggcaaaccggug

SEQ ID NO: 2500993 - RNA, 19 nt, Artificial Sequence
  Description of Artificial Sequence: Synthetic oligonucleotide
cuucaaggucugguugcua

SEQ ID NO: 2500994 - RNA, 19 nt, Artificial Sequence
  Description of Artificial Sequence: Synthetic oligonucleotide
cggccguccagucucacca

SEQ ID NO: 2500995 - RNA, 19 nt, Artificial Sequence
  Description of Artificial Sequence: Synthetic oligonucleotide
gccugucgccaacugaggu

SEQ ID NO: 2500996 - RNA, 19 nt, Artificial Sequence
  Description of Artificial Sequence: Synthetic oligonucleotide
cuguacaucuguggcucgu

SEQ ID NO: 2500997 - RNA, 19 nt, Artificial Sequence
  Description of Artificial Sequence: Synthetic oligonucleotide
ccggccguccagucucacc

SEQ ID NO: 2500998 - RNA, 19 nt, Artificial Sequence
  Description of Artificial Sequence: Synthetic oligonucleotide
cagguaucgucagccucaa

SEQ ID NO: 2500999 - RNA, 19 nt, Artificial Sequence
  Description of Artificial Sequence: Synthetic oligonucleotide
ggccguccagucucaccac

SEQ ID NO: 2501000 - RNA, 19 nt, Artificial Sequence
  Description of Artificial Sequence: Synthetic oligonucleotide
caugaacuuacuggcucuu

SEQ ID NO: 2501001 - RNA, 19 nt, Artificial Sequence
  Description of Artificial Sequence: Synthetic oligonucleotide
uccggccguccagucucac

SEQ ID NO: 2501002 - RNA, 19 nt, Artificial Sequence
  Description of Artificial Sequence: Synthetic oligonucleotide
gcgaacugggaggccacga

SEQ ID NO: 2501003 - RNA, 19 nt, Artificial Sequence
  Description of Artificial Sequence: Synthetic oligonucleotide
ggaggccacgagagucaug

SEQ ID NO: 2501004 - RNA, 19 nt, Artificial Sequence
  Description of Artificial Sequence: Synthetic oligonucleotide
gcucgacugucauuagguu

SEQ ID NO: 2501005 - RNA, 19 nt, Artificial Sequence
  Description of Artificial Sequence: Synthetic oligonucleotide
ccauuacugucugggcaca

SEQ ID NO: 2501006 - RNA, 19 nt, Artificial Sequence
  Description of Artificial Sequence: Synthetic oligonucleotide
cccagaaaacuguguuaua

SEQ ID NO: 2501007 - RNA, 19 nt, Artificial Sequence
  Description of Artificial Sequence: Synthetic oligonucleotide
ccguccagucucaccacaa

SEQ ID NO: 2501008 - RNA, 19 nt, Artificial Sequence
  Description of Artificial Sequence: Synthetic oligonucleotide
ggagagcucgacugucauu

SEQ ID NO: 2501009 - RNA, 19 nt, Artificial Sequence
  Description of Artificial Sequence: Synthetic oligonucleotide
gccuaacuucuuguguccu

SEQ ID NO: 2501010 - RNA, 19 nt, Artificial Sequence
  Description of Artificial Sequence: Synthetic oligonucleotide
cauuacugucugggcacau

SEQ ID NO: 2501011 - RNA, 19 nt, Artificial Sequence
  Description of Artificial Sequence: Synthetic oligonucleotide
cacuaacacugucccuuuu

SEQ ID NO: 2501012 - RNA, 19 nt, Artificial Sequence
  Description of Artificial Sequence: Synthetic oligonucleotide
cgccaacugagguaguccu

SEQ ID NO: 2501013 - RNA, 19 nt, Artificial Sequence
  Description of Artificial Sequence: Synthetic oligonucleotide
cccgcacguacucaaacuu

SEQ ID NO: 2501014 - RNA, 19 nt, Artificial Sequence
  Description of Artificial Sequence: Synthetic oligonucleotide
gccugaacacaaagcugua

SEQ ID NO: 2501015 - RNA, 19 nt, Artificial Sequence
  Description of Artificial Sequence: Synthetic oligonucleotide
gguccgggucacagucauc

SEQ ID NO: 2501016 - RNA, 19 nt, Artificial Sequence
  Description of Artificial Sequence: Synthetic oligonucleotide
ccucaaaaucccgcacgua

SEQ ID NO: 2501017 - RNA, 19 nt, Artificial Sequence
  Description of Artificial Sequence: Synthetic oligonucleotide
cgggucacagucauccuuu

SEQ ID NO: 2501018 - RNA, 19 nt, Artificial Sequence
  Description of Artificial Sequence: Synthetic oligonucleotide
ccacgagagucaugaacuu

SEQ ID NO: 2501019 - RNA, 19 nt, Artificial Sequence
  Description of Artificial Sequence: Synthetic oligonucleotide
gcaggcagccuaacuucuu

SEQ ID NO: 2501020 - RNA, 19 nt, Artificial Sequence
  Description of Artificial Sequence: Synthetic oligonucleotide
cgguggaaauuccggccgu

SEQ ID NO: 2501021 - RNA, 19 nt, Artificial Sequence
  Description of Artificial Sequence: Synthetic oligonucleotide
gcagugcggcaagcaggua

SEQ ID NO: 2501022 - RNA, 19 nt, Artificial Sequence
  Description of Artificial Sequence: Synthetic oligonucleotide
aauaacauagucucucugc

SEQ ID NO: 2501023 - RNA, 19 nt, Artificial Sequence
  Description of Artificial Sequence: Synthetic oligonucleotide
aagucaauaacauagucuc

SEQ ID NO: 2501024 - RNA, 19 nt, Artificial Sequence
  Description of Artificial Sequence: Synthetic oligonucleotide
uauucuuagacacaaagga

SEQ ID NO: 2501025 - RNA, 19 nt, Artificial Sequence
  Description of Artificial Sequence: Synthetic oligonucleotide
gauacugaccuucagaucc

SEQ ID NO: 2501026 - RNA, 19 nt, Artificial Sequence
  Description of Artificial Sequence: Synthetic oligonucleotide
auauuaacugaacugcucc

SEQ ID NO: 2501027 - RNA, 19 nt, Artificial Sequence
  Description of Artificial Sequence: Synthetic oligonucleotide
uuugacaaagacaaacucc

SEQ ID NO: 2501028 - RNA, 19 nt, Artificial Sequence
  Description of Artificial Sequence: Synthetic oligonucleotide
uuuucauucauccaugccu

SEQ ID NO: 2501029 - RNA, 19 nt, Artificial Sequence
  Description of Artificial Sequence: Synthetic oligonucleotide
auuauucuuagacacaaag

SEQ ID NO: 2501030 - RNA, 19 nt, Artificial Sequence
  Description of Artificial Sequence: Synthetic oligonucleotide
acacucgacaauuucaggc

SEQ ID NO: 2501031 - RNA, 19 nt, Artificial Sequence
  Description of Artificial Sequence: Synthetic oligonucleotide
uuucuaguagcucaggggc

SEQ ID NO: 2501032 - RNA, 19 nt, Artificial Sequence
  Description of Artificial Sequence: Synthetic oligonucleotide
uuuaagaugggucucugug

SEQ ID NO: 2501033 - RNA, 19 nt, Artificial Sequence
  Description of Artificial Sequence: Synthetic oligonucleotide
aaugguuuuguaccggauc

SEQ ID NO: 2501034 - RNA, 19 nt, Artificial Sequence
  Description of Artificial Sequence: Synthetic oligonucleotide
uuucaaugagcucugcagg

SEQ ID NO: 2501035 - RNA, 19 nt, Artificial Sequence
  Description of Artificial Sequence: Synthetic oligonucleotide
aaacuuuucauucauccau

SEQ ID NO: 2501036 - RNA, 19 nt, Artificial Sequence
  Description of Artificial Sequence: Synthetic oligonucleotide
uguuccauaacacacucga

SEQ ID NO: 2501037 - RNA, 19 nt, Artificial Sequence
  Description of Artificial Sequence: Synthetic oligonucleotide
cuaauguuguccaugauuc

SEQ ID NO: 2501038 - RNA, 19 nt, Artificial Sequence
  Description of Artificial Sequence: Synthetic oligonucleotide
aacauagucucucugcuca

SEQ ID NO: 2501039 - RNA, 19 nt, Artificial Sequence
  Description of Artificial Sequence: Synthetic oligonucleotide
ugcuguuuuauauuaacug

SEQ ID NO: 2501040 - RNA, 19 nt, Artificial Sequence
  Description of Artificial Sequence: Synthetic oligonucleotide
acacguaugaaucuagguc

SEQ ID NO: 2501041 - RNA, 19 nt, Artificial Sequence
  Description of Artificial Sequence: Synthetic oligonucleotide
gacuucauuauucuuagac

SEQ ID NO: 2501042 - RNA, 19 nt, Artificial Sequence
  Description of Artificial Sequence: Synthetic oligonucleotide
uucauggagauccagcacc

SEQ ID NO: 2501043 - RNA, 19 nt, Artificial Sequence
  Description of Artificial Sequence: Synthetic oligonucleotide
uucacucucagaaacacgu

SEQ ID NO: 2501044 - RNA, 19 nt, Artificial Sequence
  Description of Artificial Sequence: Synthetic oligonucleotide
uuuuguaccggaucaagug

SEQ ID NO: 2501045 - RNA, 19 nt, Artificial Sequence
  Description of Artificial Sequence: Synthetic oligonucleotide
uucuuagacacaaaggaaa

SEQ ID NO: 2501046 - RNA, 19 nt, Artificial Sequence
  Description of Artificial Sequence: Synthetic oligonucleotide
uuccauaacacacucgaca

SEQ ID NO: 2501047 - RNA, 19 nt, Artificial Sequence
  Description of Artificial Sequence: Synthetic oligonucleotide
ucuucaugagucgacaccg

SEQ ID NO: 2501048 - RNA, 19 nt, Artificial Sequence
  Description of Artificial Sequence: Synthetic oligonucleotide
uccauauacucuuugacaa

SEQ ID NO: 2501049 - RNA, 19 nt, Artificial Sequence
  Description of Artificial Sequence: Synthetic oligonucleotide
uuccauauguucuagcugu

SEQ ID NO: 2501050 - RNA, 19 nt, Artificial Sequence
  Description of Artificial Sequence: Synthetic oligonucleotide
cuuuucuaggaugugaggg

SEQ ID NO: 2501051 - RNA, 19 nt, Artificial Sequence
  Description of Artificial Sequence: Synthetic oligonucleotide
aucuucaugagucgacacc

SEQ ID NO: 2501052 - RNA, 19 nt, Artificial Sequence
  Description of Artificial Sequence: Synthetic oligonucleotide
uguuuuauauuaacugaac

SEQ ID NO: 2501053 - RNA, 19 nt, Artificial Sequence
  Description of Artificial Sequence: Synthetic oligonucleotide
cuuucuaguagcucagggg

SEQ ID NO: 2501054 - RNA, 19 nt, Artificial Sequence
  Description of Artificial Sequence: Synthetic oligonucleotide
uuuguaccggaucaagugc

SEQ ID NO: 2501055 - RNA, 19 nt, Artificial Sequence
  Description of Artificial Sequence: Synthetic oligonucleotide
uuauauuaacugaacugcu

SEQ ID NO: 2501056 - RNA, 19 nt, Artificial Sequence
  Description of Artificial Sequence: Synthetic oligonucleotide
ugugugauccauauacucu

SEQ ID NO: 2501057 - RNA, 19 nt, Artificial Sequence
  Description of Artificial Sequence: Synthetic oligonucleotide
agucucucugcucaucugc

SEQ ID NO: 2501058 - RNA, 19 nt, Artificial Sequence
  Description of Artificial Sequence: Synthetic oligonucleotide
acuuuucauucauccaugc

SEQ ID NO: 2501059 - RNA, 19 nt, Artificial Sequence
  Description of Artificial Sequence: Synthetic oligonucleotide
uguucauggagauccagca

SEQ ID NO: 2501060 - RNA, 19 nt, Artificial Sequence
  Description of Artificial Sequence: Synthetic oligonucleotide
uuucuaauguuguccauga

SEQ ID NO: 2501061 - RNA, 19 nt, Artificial Sequence
  Description of Artificial Sequence: Synthetic oligonucleotide
cuaaggauauagcggaucc

SEQ ID NO: 2501062 - RNA, 19 nt, Artificial Sequence
  Description of Artificial Sequence: Synthetic oligonucleotide
uucugguucuacuaggaug

SEQ ID NO: 2501063 - RNA, 19 nt, Artificial Sequence
  Description of Artificial Sequence: Synthetic oligonucleotide
cauauguucuagcuguucc

SEQ ID NO: 2501064 - RNA, 19 nt, Artificial Sequence
  Description of Artificial Sequence: Synthetic oligonucleotide
uuucuugucguucuuucac

SEQ ID NO: 2501065 - RNA, 19 nt, Artificial Sequence
  Description of Artificial Sequence: Synthetic oligonucleotide
aggggcaaacuuuucauuc

SEQ ID NO: 2501066 - RNA, 19 nt, Artificial Sequence
  Description of Artificial Sequence: Synthetic oligonucleotide
uauauuaacugaacugcuc

SEQ ID NO: 2501067 - RNA, 19 nt, Artificial Sequence
  Description of Artificial Sequence: Synthetic oligonucleotide
aacacguaugaaucuaggu

SEQ ID NO: 2501068 - RNA, 19 nt, Artificial Sequence
  Description of Artificial Sequence: Synthetic oligonucleotide
ucguuucugaaccaggaac

SEQ ID NO: 2501069 - RNA, 19 nt, Artificial Sequence
  Description of Artificial Sequence: Synthetic oligonucleotide
gauauagcggauccucucc

SEQ ID NO: 2501070 - RNA, 19 nt, Artificial Sequence
  Description of Artificial Sequence: Synthetic oligonucleotide
aacugaacugcuccagaag

SEQ ID NO: 2501071 - RNA, 19 nt, Artificial Sequence
  Description of Artificial Sequence: Synthetic oligonucleotide
cauucgauggauacugacc

SEQ ID NO: 2501072 - RNA, 19 nt, Artificial Sequence
  Description of Artificial Sequence: Synthetic oligonucleotide
cugucaucguuucugaacc

SEQ ID NO: 2501073 - RNA, 19 nt, Artificial Sequence
  Description of Artificial Sequence: Synthetic oligonucleotide
auaacauagucucucugcu

SEQ ID NO: 2501074 - RNA, 19 nt, Artificial Sequence
  Description of Artificial Sequence: Synthetic oligonucleotide
acuaggauguuuucuuguc

SEQ ID NO: 2501075 - RNA, 19 nt, Artificial Sequence
  Description of Artificial Sequence: Synthetic oligonucleotide
aggugcaaugguuuuguac

SEQ ID NO: 2501076 - RNA, 19 nt, Artificial Sequence
  Description of Artificial Sequence: Synthetic oligonucleotide
ugaaucuaggucugguuug

SEQ ID NO: 2501077 - RNA, 19 nt, Artificial Sequence
  Description of Artificial Sequence: Synthetic oligonucleotide
uuuucuaggaugugaggga

SEQ ID NO: 2501078 - RNA, 19 nt, Artificial Sequence
  Description of Artificial Sequence: Synthetic oligonucleotide
ucaucguuucugaaccagg

SEQ ID NO: 2501079 - RNA, 19 nt, Artificial Sequence
  Description of Artificial Sequence: Synthetic oligonucleotide
uggauacugaccuucagau

SEQ ID NO: 2501080 - RNA, 19 nt, Artificial Sequence
  Description of Artificial Sequence: Synthetic oligonucleotide
ucugucaucguuucugaac

SEQ ID NO: 2501081 - RNA, 19 nt, Artificial Sequence
  Description of Artificial Sequence: Synthetic oligonucleotide
uucaaugagcucugcaggc

SEQ ID NO: 2501082 - RNA, 19 nt, Artificial Sequence
  Description of Artificial Sequence: Synthetic oligonucleotide
ugagauuuccuuccauaug

SEQ ID NO: 2501083 - RNA, 19 nt, Artificial Sequence
  Description of Artificial Sequence: Synthetic oligonucleotide
uucauuauucuuagacaca

SEQ ID NO: 2501084 - RNA, 19 nt, Artificial Sequence
  Description of Artificial Sequence: Synthetic oligonucleotide
gcaaacuuuucauucaucc

SEQ ID NO: 2501085 - RNA, 19 nt, Artificial Sequence
  Description of Artificial Sequence: Synthetic oligonucleotide
aggcuugcuuucuaguagc

SEQ ID NO: 2501086 - RNA, 19 nt, Artificial Sequence
  Description of Artificial Sequence: Synthetic oligonucleotide
uguucuagcuguuccauaa

SEQ ID NO: 2501087 - RNA, 19 nt, Artificial Sequence
  Description of Artificial Sequence: Synthetic oligonucleotide
aaugggguuucuaauguug

SEQ ID NO: 2501088 - RNA, 19 nt, Artificial Sequence
  Description of Artificial Sequence: Synthetic oligonucleotide
uccauaacacacucgacaa

SEQ ID NO: 2501089 - RNA, 19 nt, Artificial Sequence
  Description of Artificial Sequence: Synthetic oligonucleotide
cuccucuggagaaaggacg

SEQ ID NO: 2501090 - RNA, 19 nt, Artificial Sequence
  Description of Artificial Sequence: Synthetic oligonucleotide
cucuuugacaaagacaaac

SEQ ID NO: 2501091 - RNA, 19 nt, Artificial Sequence
  Description of Artificial Sequence: Synthetic oligonucleotide
augggucucugugugaucc

SEQ ID NO: 2501092 - RNA, 19 nt, Artificial Sequence
  Description of Artificial Sequence: Synthetic oligonucleotide
augguuuuguaccggauca

SEQ ID NO: 2501093 - RNA, 19 nt, Artificial Sequence
  Description of Artificial Sequence: Synthetic oligonucleotide
ucuuagacacaaaggaaau

SEQ ID NO: 2501094 - RNA, 19 nt, Artificial Sequence
  Description of Artificial Sequence: Synthetic oligonucleotide
ucuaucuucaugagucgac

SEQ ID NO: 2501095 - RNA, 19 nt, Artificial Sequence
  Description of Artificial Sequence: Synthetic oligonucleotide
uuaagaugggucucugugu

SEQ ID NO: 2501096 - RNA, 19 nt, Artificial Sequence
  Description of Artificial Sequence: Synthetic oligonucleotide
cuuugacaaagacaaacuc

SEQ ID NO: 2501097 - RNA, 19 nt, Artificial Sequence
  Description of Artificial Sequence: Synthetic oligonucleotide
cuaggauguuuucuugucg

SEQ ID NO: 2501098 - RNA, 19 nt, Artificial Sequence
  Description of Artificial Sequence: Synthetic oligonucleotide
agcaacaagaggugcaaug

SEQ ID NO: 2501099 - RNA, 19 nt, Artificial Sequence
  Description of Artificial Sequence: Synthetic oligonucleotide
uauuaacugaacugcucca

SEQ ID NO: 2501100 - RNA, 19 nt, Artificial Sequence
  Description of Artificial Sequence: Synthetic oligonucleotide
uuaacugaacugcuccaga

SEQ ID NO: 2501101 - RNA, 19 nt, Artificial Sequence
  Description of Artificial Sequence: Synthetic oligonucleotide
ucuaggucugguuugggaa

SEQ ID NO: 2501102 - RNA, 19 nt, Artificial Sequence
  Description of Artificial Sequence: Synthetic oligonucleotide
agugcugugagcccuccuc

SEQ ID NO: 2501103 - RNA, 19 nt, Artificial Sequence
  Description of Artificial Sequence: Synthetic oligonucleotide
caugauuccauguccucag

SEQ ID NO: 2501104 - RNA, 19 nt, Artificial Sequence
  Description of Artificial Sequence: Synthetic oligonucleotide
aaacacguaugaaucuagg

SEQ ID NO: 2501105 - RNA, 19 nt, Artificial Sequence
  Description of Artificial Sequence: Synthetic oligonucleotide
ucucuaucuucaugagucg

SEQ ID NO: 2501106 - RNA, 19 nt, Artificial Sequence
  Description of Artificial Sequence: Synthetic oligonucleotide
caagagguccacuuucugc

SEQ ID NO: 2501107 - RNA, 19 nt, Artificial Sequence
  Description of Artificial Sequence: Synthetic oligonucleotide
ucaauaacauagucucucu

SEQ ID NO: 2501108 - RNA, 19 nt, Artificial Sequence
  Description of Artificial Sequence: Synthetic oligonucleotide
ucuuucacucucagaaaca

SEQ ID NO: 2501109 - RNA, 19 nt, Artificial Sequence
  Description of Artificial Sequence: Synthetic oligonucleotide
gagauuuccuuccauaugu

SEQ ID NO: 2501110 - RNA, 19 nt, Artificial Sequence
  Description of Artificial Sequence: Synthetic oligonucleotide
cuccaucuccauucgaugg

SEQ ID NO: 2501111 - RNA, 19 nt, Artificial Sequence
  Description of Artificial Sequence: Synthetic oligonucleotide
ucugcaggcgucaggacca

SEQ ID NO: 2501112 - RNA, 19 nt, Artificial Sequence
  Description of Artificial Sequence: Synthetic oligonucleotide
uaggauguuuucuugucgu

SEQ ID NO: 2501113 - RNA, 19 nt, Artificial Sequence
  Description of Artificial Sequence: Synthetic oligonucleotide
uggagcaugacuucauuau

SEQ ID NO: 2501114 - RNA, 19 nt, Artificial Sequence
  Description of Artificial Sequence: Synthetic oligonucleotide
gaaacacguaugaaucuag

SEQ ID NO: 2501115 - RNA, 19 nt, Artificial Sequence
  Description of Artificial Sequence: Synthetic oligonucleotide
uuguaccggaucaagugcu

SEQ ID NO: 2501116 - RNA, 19 nt, Artificial Sequence
  Description of Artificial Sequence: Synthetic oligonucleotide
caugagucgacaccgcaag

SEQ ID NO: 2501117 - RNA, 19 nt, Artificial Sequence
  Description of Artificial Sequence: Synthetic oligonucleotide
auuaacugaacugcuccag

SEQ ID NO: 2501118 - RNA, 19 nt, Artificial Sequence
  Description of Artificial Sequence: Synthetic oligonucleotide
aacuuuucauucauccaug

SEQ ID NO: 2501119 - RNA, 19 nt, Artificial Sequence
  Description of Artificial Sequence: Synthetic oligonucleotide
gagucgacaccgcaaguag

SEQ ID NO: 2501120 - RNA, 19 nt, Artificial Sequence
  Description of Artificial Sequence: Synthetic oligonucleotide
uuucaggcuugcuuucuag

SEQ ID NO: 2501121 - RNA, 19 nt, Artificial Sequence
  Description of Artificial Sequence: Synthetic oligonucleotide
uuugggaacugcccucaag

SEQ ID NO: 2501122 - RNA, 19 nt, Artificial Sequence
  Description of Artificial Sequence: Synthetic oligonucleotide
gaaucuaggucugguuugg

SEQ ID NO: 2501123 - RNA, 19 nt, Artificial Sequence
  Description of Artificial Sequence: Synthetic oligonucleotide
agcaugacuucauuauucu

SEQ ID NO: 2501124 - RNA, 19 nt, Artificial Sequence
  Description of Artificial Sequence: Synthetic oligonucleotide
guuuuauauuaacugaacu

SEQ ID NO: 2501125 - RNA, 19 nt, Artificial Sequence
  Description of Artificial Sequence: Synthetic oligonucleotide
aacugcccucaagaggucc

SEQ ID NO: 2501126 - RNA, 19 nt, Artificial Sequence
  Description of Artificial Sequence: Synthetic oligonucleotide
auauguucuagcuguucca

SEQ ID NO: 2501127 - RNA, 19 nt, Artificial Sequence
  Description of Artificial Sequence: Synthetic oligonucleotide
uacuaggauguuuucuugu

SEQ ID NO: 2501128 - RNA, 19 nt, Artificial Sequence
  Description of Artificial Sequence: Synthetic oligonucleotide
uucaugagucgacaccgca

SEQ ID NO: 2501129 - RNA, 19 nt, Artificial Sequence
  Description of Artificial Sequence: Synthetic oligonucleotide
agauccccacuuuuggcuc

SEQ ID NO: 2501130 - RNA, 19 nt, Artificial Sequence
  Description of Artificial Sequence: Synthetic oligonucleotide
uaauguuguccaugauucc

SEQ ID NO: 2501131 - RNA, 19 nt, Artificial Sequence
  Description of Artificial Sequence: Synthetic oligonucleotide
gcugcuaaggauauagcgg

SEQ ID NO: 2501132 - RNA, 19 nt, Artificial Sequence
  Description of Artificial Sequence: Synthetic oligonucleotide
ggaucaagugcugugagcc

SEQ ID NO: 2501133 - RNA, 19 nt, Artificial Sequence
  Description of Artificial Sequence: Synthetic oligonucleotide
aggcaugugcuuuaaggca

SEQ ID NO: 2501134 - RNA, 19 nt, Artificial Sequence
  Description of Artificial Sequence: Synthetic oligonucleotide
cuguuuuauauuaacugaa

SEQ ID NO: 2501135 - RNA, 19 nt, Artificial Sequence
  Description of Artificial Sequence: Synthetic oligonucleotide
uccaucuccauucgaugga

SEQ ID NO: 2501136 - RNA, 19 nt, Artificial Sequence
  Description of Artificial Sequence: Synthetic oligonucleotide
cuuccauauguucuagcug

SEQ ID NO: 2501137 - RNA, 19 nt, Artificial Sequence
  Description of Artificial Sequence: Synthetic oligonucleotide
cugcuaaggauauagcgga

SEQ ID NO: 2501138 - RNA, 19 nt, Artificial Sequence
  Description of Artificial Sequence: Synthetic oligonucleotide
gauggauacugaccuucag

SEQ ID NO: 2501139 - RNA, 19 nt, Artificial Sequence
  Description of Artificial Sequence: Synthetic oligonucleotide
uuuuaagaugggucucugu

SEQ ID NO: 2501140 - RNA, 19 nt, Artificial Sequence
  Description of Artificial Sequence: Synthetic oligonucleotide
gcuguuuuauauuaacuga

SEQ ID NO: 2501141 - RNA, 19 nt, Artificial Sequence
  Description of Artificial Sequence: Synthetic oligonucleotide
uaacugaacugcuccagaa

SEQ ID NO: 2501142 - RNA, 19 nt, Artificial Sequence
  Description of Artificial Sequence: Synthetic oligonucleotide
cuucagauccccacuuuug

SEQ ID NO: 2501143 - RNA, 19 nt, Artificial Sequence
  Description of Artificial Sequence: Synthetic oligonucleotide
cuuucacucucagaaacac

SEQ ID NO: 2501144 - RNA, 19 nt, Artificial Sequence
  Description of Artificial Sequence: Synthetic oligonucleotide
acuguauggagcaugacuu

SEQ ID NO: 2501145 - RNA, 19 nt, Artificial Sequence
  Description of Artificial Sequence: Synthetic oligonucleotide
ucauggagauccagcaccu

SEQ ID NO: 2501146 - RNA, 19 nt, Artificial Sequence
  Description of Artificial Sequence: Synthetic oligonucleotide
auagcggauccucuccauc

SEQ ID NO: 2501147 - RNA, 19 nt, Artificial Sequence
  Description of Artificial Sequence: Synthetic oligonucleotide
auggagauccagcaccucu

SEQ ID NO: 2501148 - RNA, 19 nt, Artificial Sequence
  Description of Artificial Sequence: Synthetic oligonucleotide
uucuaguagcucaggggca

SEQ ID NO: 2501149 - RNA, 19 nt, Artificial Sequence
  Description of Artificial Sequence: Synthetic oligonucleotide
acaaaggaaaugggguuuc

SEQ ID NO: 2501150 - RNA, 19 nt, Artificial Sequence
  Description of Artificial Sequence: Synthetic oligonucleotide
gugcaaugguuuuguaccg

SEQ ID NO: 2501151 - RNA, 19 nt, Artificial Sequence
  Description of Artificial Sequence: Synthetic oligonucleotide
uucuacuaggauguuuucu

SEQ ID NO: 2501152 - RNA, 19 nt, Artificial Sequence
  Description of Artificial Sequence: Synthetic oligonucleotide
ugggaacugcccucaagag

SEQ ID NO: 2501153 - RNA, 19 nt, Artificial Sequence
  Description of Artificial Sequence: Synthetic oligonucleotide
ugcaaugguuuuguaccgg

SEQ ID NO: 2501154 - RNA, 19 nt, Artificial Sequence
  Description of Artificial Sequence: Synthetic oligonucleotide
cuccauucgauggauacug

SEQ ID NO: 2501155 - RNA, 19 nt, Artificial Sequence
  Description of Artificial Sequence: Synthetic oligonucleotide
cagguugggaggcaugugc

SEQ ID NO: 2501156 - RNA, 19 nt, Artificial Sequence
  Description of Artificial Sequence: Synthetic oligonucleotide
gauguuuucuugucguucu

SEQ ID NO: 2501157 - RNA, 19 nt, Artificial Sequence
  Description of Artificial Sequence: Synthetic oligonucleotide
ucaugagucgacaccgcaa

SEQ ID NO: 2501158 - RNA, 19 nt, Artificial Sequence
  Description of Artificial Sequence: Synthetic oligonucleotide
cacguaugaaucuaggucu

SEQ ID NO: 2501159 - RNA, 19 nt, Artificial Sequence
  Description of Artificial Sequence: Synthetic oligonucleotide
caauaacauagucucucug

SEQ ID NO: 2501160 - RNA, 19 nt, Artificial Sequence
  Description of Artificial Sequence: Synthetic oligonucleotide
uucuugucguucuuucacu

SEQ ID NO: 2501161 - RNA, 19 nt, Artificial Sequence
  Description of Artificial Sequence: Synthetic oligonucleotide
aggcgucaggaccaccucc

SEQ ID NO: 2501162 - RNA, 19 nt, Artificial Sequence
  Description of Artificial Sequence: Synthetic oligonucleotide
uaugaaucuaggucugguu

SEQ ID NO: 2501163 - RNA, 19 nt, Artificial Sequence
  Description of Artificial Sequence: Synthetic oligonucleotide
acacaaaggaaaugggguu

SEQ ID NO: 2501164 - RNA, 19 nt, Artificial Sequence
  Description of Artificial Sequence: Synthetic oligonucleotide
caggcuugcuuucuaguag

SEQ ID NO: 2501165 - RNA, 19 nt, Artificial Sequence
  Description of Artificial Sequence: Synthetic oligonucleotide
aaaugggguuucuaauguu

SEQ ID NO: 2501166 - RNA, 19 nt, Artificial Sequence
  Description of Artificial Sequence: Synthetic oligonucleotide
cuacuaggauguuuucuug

SEQ ID NO: 2501167 - RNA, 19 nt, Artificial Sequence
  Description of Artificial Sequence: Synthetic oligonucleotide
ucuugucguucuuucacuc

SEQ ID NO: 2501168 - RNA, 19 nt, Artificial Sequence
  Description of Artificial Sequence: Synthetic oligonucleotide
uagcggauccucuccaucu

SEQ ID NO: 2501169 - RNA, 19 nt, Artificial Sequence
  Description of Artificial Sequence: Synthetic oligonucleotide
acacacucgacaauuucag

SEQ ID NO: 2501170 - RNA, 19 nt, Artificial Sequence
  Description of Artificial Sequence: Synthetic oligonucleotide
aagaggugcaaugguuuug

SEQ ID NO: 2501171 - RNA, 19 nt, Artificial Sequence
  Description of Artificial Sequence: Synthetic oligonucleotide
uguaccggaucaagugcug

SEQ ID NO: 2501172 - RNA, 19 nt, Artificial Sequence
  Description of Artificial Sequence: Synthetic oligonucleotide
caaguagcugcuaaggaua

SEQ ID NO: 2501173 - RNA, 19 nt, Artificial Sequence
  Description of Artificial Sequence: Synthetic oligonucleotide
aaucuaggucugguuuggg

SEQ ID NO: 2501174 - RNA, 19 nt, Artificial Sequence
  Description of Artificial Sequence: Synthetic oligonucleotide
uuucuaggaugugagggaa

SEQ ID NO: 2501175 - RNA, 19 nt, Artificial Sequence
  Description of Artificial Sequence: Synthetic oligonucleotide
uaacauagucucucugcuc

SEQ ID NO: 2501176 - RNA, 19 nt, Artificial Sequence
  Description of Artificial Sequence: Synthetic oligonucleotide
uucaggcuugcuuucuagu

SEQ ID NO: 2501177 - RNA, 19 nt, Artificial Sequence
  Description of Artificial Sequence: Synthetic oligonucleotide
gucaggaccaccuccucac

SEQ ID NO: 2501178 - RNA, 19 nt, Artificial Sequence
  Description of Artificial Sequence: Synthetic oligonucleotide
gggaacugcccucaagagg

SEQ ID NO: 2501179 - RNA, 19 nt, Artificial Sequence
  Description of Artificial Sequence: Synthetic oligonucleotide
cucucagaaacacguauga

SEQ ID NO: 2501180 - RNA, 19 nt, Artificial Sequence
  Description of Artificial Sequence: Synthetic oligonucleotide
auucuuagacacaaaggaa

SEQ ID NO: 2501181 - RNA, 19 nt, Artificial Sequence
  Description of Artificial Sequence: Synthetic oligonucleotide
cuguuccauaacacacucg

SEQ ID NO: 2501182 - RNA, 19 nt, Artificial Sequence
  Description of Artificial Sequence: Synthetic oligonucleotide
uauguucuagcuguuccau

SEQ ID NO: 2501183 - RNA, 19 nt, Artificial Sequence
  Description of Artificial Sequence: Synthetic oligonucleotide
cagaguccuguucauggag

SEQ ID NO: 2501184 - RNA, 19 nt, Artificial Sequence
  Description of Artificial Sequence: Synthetic oligonucleotide
aucuaggucugguuuggga

SEQ ID NO: 2501185 - RNA, 19 nt, Artificial Sequence
  Description of Artificial Sequence: Synthetic oligonucleotide
agaagcaacaagaggugca

SEQ ID NO: 2501186 - RNA, 19 nt, Artificial Sequence
  Description of Artificial Sequence: Synthetic oligonucleotide
cauucauccaugccugcuc

SEQ ID NO: 2501187 - RNA, 19 nt, Artificial Sequence
  Description of Artificial Sequence: Synthetic oligonucleotide
agucgacaccgcaaguagc

SEQ ID NO: 2501188 - RNA, 19 nt, Artificial Sequence
  Description of Artificial Sequence: Synthetic oligonucleotide
uaccggaucaagugcugug

SEQ ID NO: 2501189 - RNA, 19 nt, Artificial Sequence
  Description of Artificial Sequence: Synthetic oligonucleotide
guccacuuucugcagguug

SEQ ID NO: 2501190 - RNA, 19 nt, Artificial Sequence
  Description of Artificial Sequence: Synthetic oligonucleotide
uuguuugugcuguuuuaua

SEQ ID NO: 2501191 - RNA, 19 nt, Artificial Sequence
  Description of Artificial Sequence: Synthetic oligonucleotide
ucgacaauuucaggcuugc

SEQ ID NO: 2501192 - RNA, 19 nt, Artificial Sequence
  Description of Artificial Sequence: Synthetic oligonucleotide
acucucagaaacacguaug

SEQ ID NO: 2501193 - RNA, 19 nt, Artificial Sequence
  Description of Artificial Sequence: Synthetic oligonucleotide
ucuaguagcucaggggcaa

SEQ ID NO: 2501194 - RNA, 19 nt, Artificial Sequence
  Description of Artificial Sequence: Synthetic oligonucleotide
uauggagcaugacuucauu

SEQ ID NO: 2501195 - RNA, 19 nt, Artificial Sequence
  Description of Artificial Sequence: Synthetic oligonucleotide
agaaacacguaugaaucua

SEQ ID NO: 2501196 - RNA, 19 nt, Artificial Sequence
  Description of Artificial Sequence: Synthetic oligonucleotide
agaggugcaaugguuuugu

SEQ ID NO: 2501197 - RNA, 19 nt, Artificial Sequence
  Description of Artificial Sequence: Synthetic oligonucleotide
uccuuccauauguucuagc

SEQ ID NO: 2501198 - RNA, 19 nt, Artificial Sequence
  Description of Artificial Sequence: Synthetic oligonucleotide
caucguuucugaaccagga

SEQ ID NO: 2501199 - RNA, 19 nt, Artificial Sequence
  Description of Artificial Sequence: Synthetic oligonucleotide
gucaucguuucugaaccag

SEQ ID NO: 2501200 - RNA, 19 nt, Artificial Sequence
  Description of Artificial Sequence: Synthetic oligonucleotide
ucauucauccaugccugcu

SEQ ID NO: 2501201 - RNA, 19 nt, Artificial Sequence
  Description of Artificial Sequence: Synthetic oligonucleotide
gggguuucuaauguugucc

SEQ ID NO: 2501202 - RNA, 19 nt, Artificial Sequence
  Description of Artificial Sequence: Synthetic oligonucleotide
cuucaugagucgacaccgc

SEQ ID NO: 2501203 - RNA, 19 nt, Artificial Sequence
  Description of Artificial Sequence: Synthetic oligonucleotide
aaacuccucuggagaaagg

SEQ ID NO: 2501204 - RNA, 19 nt, Artificial Sequence
  Description of Artificial Sequence: Synthetic oligonucleotide
cagaagcaacaagaggugc

SEQ ID NO: 2501205 - RNA, 19 nt, Artificial Sequence
  Description of Artificial Sequence: Synthetic oligonucleotide
caauuucaggcuugcuuuc

SEQ ID NO: 2501206 - RNA, 19 nt, Artificial Sequence
  Description of Artificial Sequence: Synthetic oligonucleotide
guucauggagauccagcac

SEQ ID NO: 2501207 - RNA, 19 nt, Artificial Sequence
  Description of Artificial Sequence: Synthetic oligonucleotide
ugcuuucuaguagcucagg

SEQ ID NO: 2501208 - RNA, 19 nt, Artificial Sequence
  Description of Artificial Sequence: Synthetic oligonucleotide
uaaggauauagcggauccu

SEQ ID NO: 2501209 - RNA, 19 nt, Artificial Sequence
  Description of Artificial Sequence: Synthetic oligonucleotide
uccauucgauggauacuga

SEQ ID NO: 2501210 - RNA, 19 nt, Artificial Sequence
  Description of Artificial Sequence: Synthetic oligonucleotide
ugucaucguuucugaacca

SEQ ID NO: 2501211 - RNA, 19 nt, Artificial Sequence
  Description of Artificial Sequence: Synthetic oligonucleotide
uagcucaggggcaaacuuu

SEQ ID NO: 2501212 - RNA, 19 nt, Artificial Sequence
  Description of Artificial Sequence: Synthetic oligonucleotide
uucugagauuuccuuccau

SEQ ID NO: 2501213 - RNA, 19 nt, Artificial Sequence
  Description of Artificial Sequence: Synthetic oligonucleotide
gucguucuuucacucucag

SEQ ID NO: 2501214 - RNA, 19 nt, Artificial Sequence
  Description of Artificial Sequence: Synthetic oligonucleotide
cuguauggagcaugacuuc

SEQ ID NO: 2501215 - RNA, 19 nt, Artificial Sequence
  Description of Artificial Sequence: Synthetic oligonucleotide
gguuuuguaccggaucaag

SEQ ID NO: 2501216 - RNA, 19 nt, Artificial Sequence
  Description of Artificial Sequence: Synthetic oligonucleotide
ucguucuuucacucucaga

SEQ ID NO: 2501217 - RNA, 19 nt, Artificial Sequence
  Description of Artificial Sequence: Synthetic oligonucleotide
ugggguuucuaauguuguc

SEQ ID NO: 2501218 - RNA, 19 nt, Artificial Sequence
  Description of Artificial Sequence: Synthetic oligonucleotide
uauagcggauccucuccau

SEQ ID NO: 2501219 - RNA, 19 nt, Artificial Sequence
  Description of Artificial Sequence: Synthetic oligonucleotide
aaguagcugcuaaggauau

SEQ ID NO: 2501220 - RNA, 19 nt, Artificial Sequence
  Description of Artificial Sequence: Synthetic oligonucleotide
ugguuugggaacugcccuc

SEQ ID NO: 2501221 - RNA, 19 nt, Artificial Sequence
  Description of Artificial Sequence: Synthetic oligonucleotide
ugacuucauuauucuuaga

SEQ ID NO: 2501222 - RNA, 19 nt, Artificial Sequence
  Description of Artificial Sequence: Synthetic oligonucleotide
ggguuucuaauguugucca

SEQ ID NO: 2501223 - RNA, 19 nt, Artificial Sequence
  Description of Artificial Sequence: Synthetic oligonucleotide
gugcugugagcccuccucc

SEQ ID NO: 2501224 - RNA, 19 nt, Artificial Sequence
  Description of Artificial Sequence: Synthetic oligonucleotide
aguagcucaggggcaaacu

SEQ ID NO: 2501225 - RNA, 19 nt, Artificial Sequence
  Description of Artificial Sequence: Synthetic oligonucleotide
cuaucuucaugagucgaca

SEQ ID NO: 2501226 - RNA, 19 nt, Artificial Sequence
  Description of Artificial Sequence: Synthetic oligonucleotide
ugcuaaggauauagcggau

SEQ ID NO: 2501227 - RNA, 19 nt, Artificial Sequence
  Description of Artificial Sequence: Synthetic oligonucleotide
ucacucucagaaacacgua

SEQ ID NO: 2501228 - RNA, 19 nt, Artificial Sequence
  Description of Artificial Sequence: Synthetic oligonucleotide
ggauauagcggauccucuc

SEQ ID NO: 2501229 - RNA, 19 nt, Artificial Sequence
  Description of Artificial Sequence: Synthetic oligonucleotide
ggaacugcccucaagaggu

SEQ ID NO: 2501230 - RNA, 19 nt, Artificial Sequence
  Description of Artificial Sequence: Synthetic oligonucleotide
ccaagucaauaacauaguc

SEQ ID NO: 2501231 - RNA, 19 nt, Artificial Sequence
  Description of Artificial Sequence: Synthetic oligonucleotide
agaugggucucugugugau

SEQ ID NO: 2501232 - RNA, 19 nt, Artificial Sequence
  Description of Artificial Sequence: Synthetic oligonucleotide
augggguuucuaauguugu

SEQ ID NO: 2501233 - RNA, 19 nt, Artificial Sequence
  Description of Artificial Sequence: Synthetic oligonucleotide
ccuuuucuaggaugugagg

SEQ ID NO: 2501234 - RNA, 19 nt, Artificial Sequence
  Description of Artificial Sequence: Synthetic oligonucleotide
auuucaggcuugcuuucua

SEQ ID NO: 2501235 - RNA, 19 nt, Artificial Sequence
  Description of Artificial Sequence: Synthetic oligonucleotide
acguaugaaucuaggucug

SEQ ID NO: 2501236 - RNA, 19 nt, Artificial Sequence
  Description of Artificial Sequence: Synthetic oligonucleotide
guucuacuaggauguuuuc

SEQ ID NO: 2501237 - RNA, 19 nt, Artificial Sequence
  Description of Artificial Sequence: Synthetic oligonucleotide
aggauauagcggauccucu

SEQ ID NO: 2501238 - RNA, 19 nt, Artificial Sequence
  Description of Artificial Sequence: Synthetic oligonucleotide
accggaucaagugcuguga

SEQ ID NO: 2501239 - RNA, 19 nt, Artificial Sequence
  Description of Artificial Sequence: Synthetic oligonucleotide
augagucgacaccgcaagu

SEQ ID NO: 2501240 - RNA, 19 nt, Artificial Sequence
  Description of Artificial Sequence: Synthetic oligonucleotide
aggauguuuucuugucguu

SEQ ID NO: 2501241 - RNA, 19 nt, Artificial Sequence
  Description of Artificial Sequence: Synthetic oligonucleotide
gugugauccauauacucuu

SEQ ID NO: 2501242 - RNA, 19 nt, Artificial Sequence
  Description of Artificial Sequence: Synthetic oligonucleotide
uacugaccuucagaucccc

SEQ ID NO: 2501243 - RNA, 19 nt, Artificial Sequence
  Description of Artificial Sequence: Synthetic oligonucleotide
guuguccaugauuccaugu

SEQ ID NO: 2501244 - RNA, 19 nt, Artificial Sequence
  Description of Artificial Sequence: Synthetic oligonucleotide
ccauucgauggauacugac

SEQ ID NO: 2501245 - RNA, 19 nt, Artificial Sequence
  Description of Artificial Sequence: Synthetic oligonucleotide
uaguagcucaggggcaaac

SEQ ID NO: 2501246 - RNA, 19 nt, Artificial Sequence
  Description of Artificial Sequence: Synthetic oligonucleotide
guuccauaacacacucgac

SEQ ID NO: 2501247 - RNA, 19 nt, Artificial Sequence
  Description of Artificial Sequence: Synthetic oligonucleotide
auguuguccaugauuccau

SEQ ID NO: 2501248 - RNA, 19 nt, Artificial Sequence
  Description of Artificial Sequence: Synthetic oligonucleotide
uucgauggauacugaccuu

SEQ ID NO: 2501249 - RNA, 19 nt, Artificial Sequence
  Description of Artificial Sequence: Synthetic oligonucleotide
cagaaacacguaugaaucu

SEQ ID NO: 2501250 - RNA, 19 nt, Artificial Sequence
  Description of Artificial Sequence: Synthetic oligonucleotide
ugguuuuguaccggaucaa

SEQ ID NO: 2501251 - RNA, 19 nt, Artificial Sequence
  Description of Artificial Sequence: Synthetic oligonucleotide
gaugggucucugugugauc

SEQ ID NO: 2501252 - RNA, 19 nt, Artificial Sequence
  Description of Artificial Sequence: Synthetic oligonucleotide
acauagucucucugcucau

SEQ ID NO: 2501253 - RNA, 19 nt, Artificial Sequence
  Description of Artificial Sequence: Synthetic oligonucleotide
ucugcagguugggaggcau

SEQ ID NO: 2501254 - RNA, 19 nt, Artificial Sequence
  Description of Artificial Sequence: Synthetic oligonucleotide
cagauccccacuuuuggcu

SEQ ID NO: 2501255 - RNA, 19 nt, Artificial Sequence
  Description of Artificial Sequence: Synthetic oligonucleotide
gucucugugugauccauau

SEQ ID NO: 2501256 - RNA, 19 nt, Artificial Sequence
  Description of Artificial Sequence: Synthetic oligonucleotide
cucuaucuucaugagucga

SEQ ID NO: 2501257 - RNA, 19 nt, Artificial Sequence
  Description of Artificial Sequence: Synthetic oligonucleotide
ucgacaccgcaaguagcug

SEQ ID NO: 2501258 - RNA, 19 nt, Artificial Sequence
  Description of Artificial Sequence: Synthetic oligonucleotide
guuuuguaccggaucaagu

SEQ ID NO: 2501259 - RNA, 19 nt, Artificial Sequence
  Description of Artificial Sequence: Synthetic oligonucleotide
ugguucuacuaggauguuu

SEQ ID NO: 2501260 - RNA, 19 nt, Artificial Sequence
  Description of Artificial Sequence: Synthetic oligonucleotide
ggauacugaccuucagauc

SEQ ID NO: 2501261 - RNA, 19 nt, Artificial Sequence
  Description of Artificial Sequence: Synthetic oligonucleotide
guaugaaucuaggucuggu

SEQ ID NO: 2501262 - RNA, 19 nt, Artificial Sequence
  Description of Artificial Sequence: Synthetic oligonucleotide
gcuaaggauauagcggauc

SEQ ID NO: 2501263 - RNA, 19 nt, Artificial Sequence
  Description of Artificial Sequence: Synthetic oligonucleotide
cucaagagguccacuuucu

SEQ ID NO: 2501264 - RNA, 19 nt, Artificial Sequence
  Description of Artificial Sequence: Synthetic oligonucleotide
cuugucguucuuucacucu

SEQ ID NO: 2501265 - RNA, 19 nt, Artificial Sequence
  Description of Artificial Sequence: Synthetic oligonucleotide
accuucagauccccacuuu

SEQ ID NO: 2501266 - RNA, 19 nt, Artificial Sequence
  Description of Artificial Sequence: Synthetic oligonucleotide
cacucucagaaacacguau

SEQ ID NO: 2501267 - RNA, 19 nt, Artificial Sequence
  Description of Artificial Sequence: Synthetic oligonucleotide
gucgacaccgcaaguagcu

SEQ ID NO: 2501268 - RNA, 19 nt, Artificial Sequence
  Description of Artificial Sequence: Synthetic oligonucleotide
gguucuacuaggauguuuu

SEQ ID NO: 2501269 - RNA, 19 nt, Artificial Sequence
  Description of Artificial Sequence: Synthetic oligonucleotide
cuuguuugugcuguuuuau

SEQ ID NO: 2501270 - RNA, 19 nt, Artificial Sequence
  Description of Artificial Sequence: Synthetic oligonucleotide
ggcgcauuuucuccuuuuc

SEQ ID NO: 2501271 - RNA, 19 nt, Artificial Sequence
  Description of Artificial Sequence: Synthetic oligonucleotide
ggaccaccuccucacuacc

SEQ ID NO: 2501272 - RNA, 19 nt, Artificial Sequence
  Description of Artificial Sequence: Synthetic oligonucleotide
cugcagguugggaggcaug

SEQ ID NO: 2501273 - RNA, 19 nt, Artificial Sequence
  Description of Artificial Sequence: Synthetic oligonucleotide
guagcucaggggcaaacuu

SEQ ID NO: 2501274 - RNA, 19 nt, Artificial Sequence
  Description of Artificial Sequence: Synthetic oligonucleotide
gacaccgcaaguagcugcu

SEQ ID NO: 2501275 - RNA, 19 nt, Artificial Sequence
  Description of Artificial Sequence: Synthetic oligonucleotide
gauccccacuuuuggcucu

SEQ ID NO: 2501276 - RNA, 19 nt, Artificial Sequence
  Description of Artificial Sequence: Synthetic oligonucleotide
gcggauccucuccaucucc

SEQ ID NO: 2501277 - RNA, 19 nt, Artificial Sequence
  Description of Artificial Sequence: Synthetic oligonucleotide
gcuucugguucuacuagga

SEQ ID NO: 2501278 - RNA, 19 nt, Artificial Sequence
  Description of Artificial Sequence: Synthetic oligonucleotide
ccggaucaagugcugugag

SEQ ID NO: 2501279 - RNA, 19 nt, Artificial Sequence
  Description of Artificial Sequence: Synthetic oligonucleotide
gaccuucagauccccacuu

SEQ ID NO: 2501280 - RNA, 19 nt, Artificial Sequence
  Description of Artificial Sequence: Synthetic oligonucleotide
ccuuucaaugagcucugca

SEQ ID NO: 2501281 - RNA, 19 nt, Artificial Sequence
  Description of Artificial Sequence: Synthetic oligonucleotide
ugggaggcaugugcuuuaa

SEQ ID NO: 2501282 - RNA, 19 nt, Artificial Sequence
  Description of Artificial Sequence: Synthetic oligonucleotide
gcaccucugucaucguuuc

SEQ ID NO: 2501283 - RNA, 19 nt, Artificial Sequence
  Description of Artificial Sequence: Synthetic oligonucleotide
caccgcaaguagcugcuaa

SEQ ID NO: 2501284 - RNA, 19 nt, Artificial Sequence
  Description of Artificial Sequence: Synthetic oligonucleotide
cgcagggcgcauuuucucc

SEQ ID NO: 2501285 - RNA, 19 nt, Artificial Sequence
  Description of Artificial Sequence: Synthetic oligonucleotide
aggucugguuugggaacug

SEQ ID NO: 2501286 - RNA, 19 nt, Artificial Sequence
  Description of Artificial Sequence: Synthetic oligonucleotide
acucuuugacaaagacaaa

SEQ ID NO: 2501287 - RNA, 19 nt, Artificial Sequence
  Description of Artificial Sequence: Synthetic oligonucleotide
cggaucaagugcugugagc

SEQ ID NO: 2501288 - RNA, 19 nt, Artificial Sequence
  Description of Artificial Sequence: Synthetic oligonucleotide
cauggagauccagcaccuc

SEQ ID NO: 2501289 - RNA, 19 nt, Artificial Sequence
  Description of Artificial Sequence: Synthetic oligonucleotide
caagaggugcaaugguuuu

SEQ ID NO: 2501290 - RNA, 19 nt, Artificial Sequence
  Description of Artificial Sequence: Synthetic oligonucleotide
ccaugauuccauguccuca

SEQ ID NO: 2501291 - RNA, 19 nt, Artificial Sequence
  Description of Artificial Sequence: Synthetic oligonucleotide
gaggugcaaugguuuugua

SEQ ID NO: 2501292 - RNA, 19 nt, Artificial Sequence
  Description of Artificial Sequence: Synthetic oligonucleotide
cguaugaaucuaggucugg

SEQ ID NO: 2501293 - RNA, 19 nt, Artificial Sequence
  Description of Artificial Sequence: Synthetic oligonucleotide
caaugguuuuguaccggau

SEQ ID NO: 2501294 - RNA, 19 nt, Artificial Sequence
  Description of Artificial Sequence: Synthetic oligonucleotide
agggcgcauuuucuccuuu

SEQ ID NO: 2501295 - RNA, 19 nt, Artificial Sequence
  Description of Artificial Sequence: Synthetic oligonucleotide
ccauauguucuagcuguuc

SEQ ID NO: 2501296 - RNA, 19 nt, Artificial Sequence
  Description of Artificial Sequence: Synthetic oligonucleotide
caucuccauucgauggaua

SEQ ID NO: 2501297 - RNA, 19 nt, Artificial Sequence
  Description of Artificial Sequence: Synthetic oligonucleotide
cuucugguucuacuaggau

SEQ ID NO: 2501298 - RNA, 19 nt, Artificial Sequence
  Description of Artificial Sequence: Synthetic oligonucleotide
ggagcaugacuucauuauu

SEQ ID NO: 2501299 - RNA, 19 nt, Artificial Sequence
  Description of Artificial Sequence: Synthetic oligonucleotide
ugcaggcgucaggaccacc

SEQ ID NO: 2501300 - RNA, 19 nt, Artificial Sequence
  Description of Artificial Sequence: Synthetic oligonucleotide
guugggaggcaugugcuuu

SEQ ID NO: 2501301 - RNA, 19 nt, Artificial Sequence
  Description of Artificial Sequence: Synthetic oligonucleotide
gaacugcccucaagagguc

SEQ ID NO: 2501302 - RNA, 19 nt, Artificial Sequence
  Description of Artificial Sequence: Synthetic oligonucleotide
guuugggaacugcccucaa

SEQ ID NO: 2501303 - RNA, 19 nt, Artificial Sequence
  Description of Artificial Sequence: Synthetic oligonucleotide
cacuuucugcagguuggga

SEQ ID NO: 2501304 - RNA, 19 nt, Artificial Sequence
  Description of Artificial Sequence: Synthetic oligonucleotide
ccacuuucugcagguuggg

SEQ ID NO: 2501305 - RNA, 19 nt, Artificial Sequence
  Description of Artificial Sequence: Synthetic oligonucleotide
guauggagcaugacuucau

SEQ ID NO: 2501306 - RNA, 19 nt, Artificial Sequence
  Description of Artificial Sequence: Synthetic oligonucleotide
gcaugugcuuuaaggcaac

SEQ ID NO: 2501307 - RNA, 19 nt, Artificial Sequence
  Description of Artificial Sequence: Synthetic oligonucleotide
gcgcauuuucuccuuuucu

SEQ ID NO: 2501308 - RNA, 19 nt, Artificial Sequence
  Description of Artificial Sequence: Synthetic oligonucleotide
guaccggaucaagugcugu

SEQ ID NO: 2501309 - RNA, 19 nt, Artificial Sequence
  Description of Artificial Sequence: Synthetic oligonucleotide
ccuccaagucaauaacaua

SEQ ID NO: 2501310 - RNA, 19 nt, Artificial Sequence
  Description of Artificial Sequence: Synthetic oligonucleotide
cuaguagcucaggggcaaa

SEQ ID NO: 2501311 - RNA, 19 nt, Artificial Sequence
  Description of Artificial Sequence: Synthetic oligonucleotide
ccgcagggcgcauuuucuc

SEQ ID NO: 2501312 - RNA, 19 nt, Artificial Sequence
  Description of Artificial Sequence: Synthetic oligonucleotide
cgauggauacugaccuuca

SEQ ID NO: 2501313 - RNA, 19 nt, Artificial Sequence
  Description of Artificial Sequence: Synthetic oligonucleotide
ccccgcagggcgcauuuuc

SEQ ID NO: 2501314 - RNA, 19 nt, Artificial Sequence
  Description of Artificial Sequence: Synthetic oligonucleotide
gccuuucaaugagcucugc

SEQ ID NO: 2501315 - RNA, 19 nt, Artificial Sequence
  Description of Artificial Sequence: Synthetic oligonucleotide
cugcaggcgucaggaccac

SEQ ID NO: 2501316 - RNA, 19 nt, Artificial Sequence
  Description of Artificial Sequence: Synthetic oligonucleotide
ggcgucaggaccaccuccu

SEQ ID NO: 2501317 - RNA, 19 nt, Artificial Sequence
  Description of Artificial Sequence: Synthetic oligonucleotide
acaccgcaaguagcugcua

SEQ ID NO: 2501318 - RNA, 19 nt, Artificial Sequence
  Description of Artificial Sequence: Synthetic oligonucleotide
cgucaggaccaccuccuca

SEQ ID NO: 2501319 - RNA, 19 nt, Artificial Sequence
  Description of Artificial Sequence: Synthetic oligonucleotide
gcccucaagagguccacuu

SEQ ID NO: 2501320 - RNA, 19 nt, Artificial Sequence
  Description of Artificial Sequence: Synthetic oligonucleotide
gcgucaggaccaccuccuc

SEQ ID NO: 2501321 - RNA, 19 nt, Artificial Sequence
  Description of Artificial Sequence: Synthetic oligonucleotide
cagcaccucugucaucguu

SEQ ID NO: 2501322 - RNA, 19 nt, Artificial Sequence
  Description of Artificial Sequence: Synthetic oligonucleotide
gggcgcauuuucuccuuuu

SEQ ID NO: 2501323 - RNA, 19 nt, Artificial Sequence
  Description of Artificial Sequence: Synthetic oligonucleotide
cagggcgcauuuucuccuu

SEQ ID NO: 2501324 - RNA, 19 nt, Artificial Sequence
  Description of Artificial Sequence: Synthetic oligonucleotide
cccgcagggcgcauuuucu

SEQ ID NO: 2501325 - RNA, 19 nt, Artificial Sequence
  Description of Artificial Sequence: Synthetic oligonucleotide
ccaucuccauucgauggau

SEQ ID NO: 2501326 - RNA, 19 nt, Artificial Sequence
  Description of Artificial Sequence: Synthetic oligonucleotide
cugguucuacuaggauguu

SEQ ID NO: 2501327 - RNA, 19 nt, Artificial Sequence
  Description of Artificial Sequence: Synthetic oligonucleotide
cgacaauuucaggcuugcu

SEQ ID NO: 2501328 - RNA, 19 nt, Artificial Sequence
  Description of Artificial Sequence: Synthetic oligonucleotide
aauccuauaaaucaggacc

SEQ ID NO: 2501329 - RNA, 19 nt, Artificial Sequence
  Description of Artificial Sequence: Synthetic oligonucleotide
aauauaaacgaaugucucc

SEQ ID NO: 2501330 - RNA, 19 nt, Artificial Sequence
  Description of Artificial Sequence: Synthetic oligonucleotide
aaggcuuucauccaacccc

SEQ ID NO: 2501331 - RNA, 19 nt, Artificial Sequence
  Description of Artificial Sequence: Synthetic oligonucleotide
aacgguuucacucauucac

SEQ ID NO: 2501332 - RNA, 19 nt, Artificial Sequence
  Description of Artificial Sequence: Synthetic oligonucleotide
uugaaaauccuauaaauca

SEQ ID NO: 2501333 - RNA, 19 nt, Artificial Sequence
  Description of Artificial Sequence: Synthetic oligonucleotide
ucuaaguauuguuagaaag

SEQ ID NO: 2501334 - RNA, 19 nt, Artificial Sequence
  Description of Artificial Sequence: Synthetic oligonucleotide
auuucagacacuccguugc

SEQ ID NO: 2501335 - RNA, 19 nt, Artificial Sequence
  Description of Artificial Sequence: Synthetic oligonucleotide
acuacuaucguuuucuaag

SEQ ID NO: 2501336 - RNA, 19 nt, Artificial Sequence
  Description of Artificial Sequence: Synthetic oligonucleotide
ucagcagacauuuuaauug

SEQ ID NO: 2501337 - RNA, 19 nt, Artificial Sequence
  Description of Artificial Sequence: Synthetic oligonucleotide
uuagcuaccuuaaaguuug

SEQ ID NO: 2501338 - RNA, 19 nt, Artificial Sequence
  Description of Artificial Sequence: Synthetic oligonucleotide
uuaauugaaaauccuauaa

SEQ ID NO: 2501339 - RNA, 19 nt, Artificial Sequence
  Description of Artificial Sequence: Synthetic oligonucleotide
aaauccuauaaaucaggac

SEQ ID NO: 2501340 - RNA, 19 nt, Artificial Sequence
  Description of Artificial Sequence: Synthetic oligonucleotide
uucaaguccaucaaguagc

SEQ ID NO: 2501341 - RNA, 19 nt, Artificial Sequence
  Description of Artificial Sequence: Synthetic oligonucleotide
auauaaacgaaugucuccc

SEQ ID NO: 2501342 - RNA, 19 nt, Artificial Sequence
  Description of Artificial Sequence: Synthetic oligonucleotide
uuuuaauugaaaauccuau

SEQ ID NO: 2501343 - RNA, 19 nt, Artificial Sequence
  Description of Artificial Sequence: Synthetic oligonucleotide
uccguuuucucuaacagcc

SEQ ID NO: 2501344 - RNA, 19 nt, Artificial Sequence
  Description of Artificial Sequence: Synthetic oligonucleotide
cuaaguauuguuagaaagc

SEQ ID NO: 2501345 - RNA, 19 nt, Artificial Sequence
  Description of Artificial Sequence: Synthetic oligonucleotide
aaaccaaauuuauucagca

SEQ ID NO: 2501346 - RNA, 19 nt, Artificial Sequence
  Description of Artificial Sequence: Synthetic oligonucleotide
aauuucuccuccugaaguc

SEQ ID NO: 2501347 - RNA, 19 nt, Artificial Sequence
  Description of Artificial Sequence: Synthetic oligonucleotide
uucucuaacagcccgcgcg

SEQ ID NO: 2501348 - RNA, 19 nt, Artificial Sequence
  Description of Artificial Sequence: Synthetic oligonucleotide
aguauuguuagaaagccuc

SEQ ID NO: 2501349 - RNA, 19 nt, Artificial Sequence
  Description of Artificial Sequence: Synthetic oligonucleotide
aguuuagcuaccuuaaagu

SEQ ID NO: 2501350 - RNA, 19 nt, Artificial Sequence
  Description of Artificial Sequence: Synthetic oligonucleotide
guuuucuaaguauuguuag

SEQ ID NO: 2501351 - RNA, 19 nt, Artificial Sequence
  Description of Artificial Sequence: Synthetic oligonucleotide
auugaaaauccuauaaauc

SEQ ID NO: 2501352 - RNA, 19 nt, Artificial Sequence
  Description of Artificial Sequence: Synthetic oligonucleotide
gaaaauccuauaaaucagg

SEQ ID NO: 2501353 - RNA, 19 nt, Artificial Sequence
  Description of Artificial Sequence: Synthetic oligonucleotide
uuuagcuccguacuguccc

SEQ ID NO: 2501354 - RNA, 19 nt, Artificial Sequence
  Description of Artificial Sequence: Synthetic oligonucleotide
ucaaguuucacaaggggaa

SEQ ID NO: 2501355 - RNA, 19 nt, Artificial Sequence
  Description of Artificial Sequence: Synthetic oligonucleotide
uccaauauaaacgaauguc

SEQ ID NO: 2501356 - RNA, 19 nt, Artificial Sequence
  Description of Artificial Sequence: Synthetic oligonucleotide
aaccaaauuuauucagcag

SEQ ID NO: 2501357 - RNA, 19 nt, Artificial Sequence
  Description of Artificial Sequence: Synthetic oligonucleotide
uuagaaagccucccgauuc

SEQ ID NO: 2501358 - RNA, 19 nt, Artificial Sequence
  Description of Artificial Sequence: Synthetic oligonucleotide
aauuucagacacuccguug

SEQ ID NO: 2501359 - RNA, 19 nt, Artificial Sequence
  Description of Artificial Sequence: Synthetic oligonucleotide
uucacaaggggaaaagccu

SEQ ID NO: 2501360 - RNA, 19 nt, Artificial Sequence
  Description of Artificial Sequence: Synthetic oligonucleotide
ucgaacaagccauugaauc

SEQ ID NO: 2501361 - RNA, 19 nt, Artificial Sequence
  Description of Artificial Sequence: Synthetic oligonucleotide
ugcagggugacugaguccg

SEQ ID NO: 2501362 - RNA, 19 nt, Artificial Sequence
  Description of Artificial Sequence: Synthetic oligonucleotide
aguguacgucaauagcugc

SEQ ID NO: 2501363 - RNA, 19 nt, Artificial Sequence
  Description of Artificial Sequence: Synthetic oligonucleotide
acgaaugucuccccaaggg

SEQ ID NO: 2501364 - RNA, 19 nt, Artificial Sequence
  Description of Artificial Sequence: Synthetic oligonucleotide
aacgaaugucuccccaagg

SEQ ID NO: 2501365 - RNA, 19 nt, Artificial Sequence
  Description of Artificial Sequence: Synthetic oligonucleotide
uggaggaucgaacaagcca

SEQ ID NO: 2501366 - RNA, 19 nt, Artificial Sequence
  Description of Artificial Sequence: Synthetic oligonucleotide
auggacacggcuuuagcuc

SEQ ID NO: 2501367 - RNA, 19 nt, Artificial Sequence
  Description of Artificial Sequence: Synthetic oligonucleotide
aaacgaaugucuccccaag

SEQ ID NO: 2501368 - RNA, 19 nt, Artificial Sequence
  Description of Artificial Sequence: Synthetic oligonucleotide
cuauaaaucaggaccacca

SEQ ID NO: 2501369 - RNA, 19 nt, Artificial Sequence
  Description of Artificial Sequence: Synthetic oligonucleotide
ucaaguagcugccacaguu

SEQ ID NO: 2501370 - RNA, 19 nt, Artificial Sequence
  Description of Artificial Sequence: Synthetic oligonucleotide
uuuagcuaccuuaaaguuu

SEQ ID NO: 2501371 - RNA, 19 nt, Artificial Sequence
  Description of Artificial Sequence: Synthetic oligonucleotide
gcuaccuuaaaguuugggg

SEQ ID NO: 2501372 - RNA, 19 nt, Artificial Sequence
  Description of Artificial Sequence: Synthetic oligonucleotide
uaucguuuucuaaguauug

SEQ ID NO: 2501373 - RNA, 19 nt, Artificial Sequence
  Description of Artificial Sequence: Synthetic oligonucleotide
ucuggaggaucgaacaagc

SEQ ID NO: 2501374 - RNA, 19 nt, Artificial Sequence
  Description of Artificial Sequence: Synthetic oligonucleotide
aaggggaaaagccugcaau

SEQ ID NO: 2501375 - RNA, 19 nt, Artificial Sequence
  Description of Artificial Sequence: Synthetic oligonucleotide
aaaaguuuagcuaccuuaa

SEQ ID NO: 2501376 - RNA, 19 nt, Artificial Sequence
  Description of Artificial Sequence: Synthetic oligonucleotide
aaaauccuauaaaucagga

SEQ ID NO: 2501377 - RNA, 19 nt, Artificial Sequence
  Description of Artificial Sequence: Synthetic oligonucleotide
ucacaaggggaaaagccug

SEQ ID NO: 2501378 - RNA, 19 nt, Artificial Sequence
  Description of Artificial Sequence: Synthetic oligonucleotide
uacgucaauagcugcaucu

SEQ ID NO: 2501379 - RNA, 19 nt, Artificial Sequence
  Description of Artificial Sequence: Synthetic oligonucleotide
cagaaaaguguguccaagg

SEQ ID NO: 2501380 - RNA, 19 nt, Artificial Sequence
  Description of Artificial Sequence: Synthetic oligonucleotide
guaaaucccagauccucgg

SEQ ID NO: 2501381 - RNA, 19 nt, Artificial Sequence
  Description of Artificial Sequence: Synthetic oligonucleotide
uuguuagaaagccucccga

SEQ ID NO: 2501382 - RNA, 19 nt, Artificial Sequence
  Description of Artificial Sequence: Synthetic oligonucleotide
aagggcacccucaaguuuc

SEQ ID NO: 2501383 - RNA, 19 nt, Artificial Sequence
  Description of Artificial Sequence: Synthetic oligonucleotide
cccaguaaaucccagaucc

SEQ ID NO: 2501384 - RNA, 19 nt, Artificial Sequence
  Description of Artificial Sequence: Synthetic oligonucleotide
uuuucucuaacagcccgcg

SEQ ID NO: 2501385 - RNA, 19 nt, Artificial Sequence
  Description of Artificial Sequence: Synthetic oligonucleotide
acuaucguuuucuaaguau

SEQ ID NO: 2501386 - RNA, 19 nt, Artificial Sequence
  Description of Artificial Sequence: Synthetic oligonucleotide
aguaaaucccagauccucg

SEQ ID NO: 2501387 - RNA, 19 nt, Artificial Sequence
  Description of Artificial Sequence: Synthetic oligonucleotide
uuucagacacuccguugcg

SEQ ID NO: 2501388 - RNA, 19 nt, Artificial Sequence
  Description of Artificial Sequence: Synthetic oligonucleotide
uaacuuuggggcugcagcc

SEQ ID NO: 2501389 - RNA, 19 nt, Artificial Sequence
  Description of Artificial Sequence: Synthetic oligonucleotide
aacuuuggggcugcagccc

SEQ ID NO: 2501390 - RNA, 19 nt, Artificial Sequence
  Description of Artificial Sequence: Synthetic oligonucleotide
gaacuagcaggugaggaag

SEQ ID NO: 2501391 - RNA, 19 nt, Artificial Sequence
  Description of Artificial Sequence: Synthetic oligonucleotide
aaagaacuagcaggugagg

SEQ ID NO: 2501392 - RNA, 19 nt, Artificial Sequence
  Description of Artificial Sequence: Synthetic oligonucleotide
cauccaaccccacacacac

SEQ ID NO: 2501393 - RNA, 19 nt, Artificial Sequence
  Description of Artificial Sequence: Synthetic oligonucleotide
uauaaacgaaugucucccc

SEQ ID NO: 2501394 - RNA, 19 nt, Artificial Sequence
  Description of Artificial Sequence: Synthetic oligonucleotide
accaccacaauuucagaca

SEQ ID NO: 2501395 - RNA, 19 nt, Artificial Sequence
  Description of Artificial Sequence: Synthetic oligonucleotide
auccaauauaaacgaaugu

SEQ ID NO: 2501396 - RNA, 19 nt, Artificial Sequence
  Description of Artificial Sequence: Synthetic oligonucleotide
caauagcugcaucuggagg

SEQ ID NO: 2501397 - RNA, 19 nt, Artificial Sequence
  Description of Artificial Sequence: Synthetic oligonucleotide
aaguguacgucaauagcug

SEQ ID NO: 2501398 - RNA, 19 nt, Artificial Sequence
  Description of Artificial Sequence: Synthetic oligonucleotide
auaaacgaaugucucccca

SEQ ID NO: 2501399 - RNA, 19 nt, Artificial Sequence
  Description of Artificial Sequence: Synthetic oligonucleotide
uucuaaguauuguuagaaa

SEQ ID NO: 2501400 - RNA, 19 nt, Artificial Sequence
  Description of Artificial Sequence: Synthetic oligonucleotide
cucauucacaaagaacuag

SEQ ID NO: 2501401 - RNA, 19 nt, Artificial Sequence
  Description of Artificial Sequence: Synthetic oligonucleotide
ucuaacagcccgcgcgcgg

SEQ ID NO: 2501402 - RNA, 19 nt, Artificial Sequence
  Description of Artificial Sequence: Synthetic oligonucleotide
guagcugccacaguucucc

SEQ ID NO: 2501403 - RNA, 19 nt, Artificial Sequence
  Description of Artificial Sequence: Synthetic oligonucleotide
ucucuaacagcccgcgcgc

SEQ ID NO: 2501404 - RNA, 19 nt, Artificial Sequence
  Description of Artificial Sequence: Synthetic oligonucleotide
cucaaguuucacaagggga

SEQ ID NO: 2501405 - RNA, 19 nt, Artificial Sequence
  Description of Artificial Sequence: Synthetic oligonucleotide
ucggauucagcagagaguu

SEQ ID NO: 2501406 - RNA, 19 nt, Artificial Sequence
  Description of Artificial Sequence: Synthetic oligonucleotide
ucagguucaaguccaucaa

SEQ ID NO: 2501407 - RNA, 19 nt, Artificial Sequence
  Description of Artificial Sequence: Synthetic oligonucleotide
uggacacggcuuuagcucc

SEQ ID NO: 2501408 - RNA, 19 nt, Artificial Sequence
  Description of Artificial Sequence: Synthetic oligonucleotide
aguccaucaaguagcugcc

SEQ ID NO: 2501409 - RNA, 19 nt, Artificial Sequence
  Description of Artificial Sequence: Synthetic oligonucleotide
ugcugcucagucgaguccg

SEQ ID NO: 2501410 - RNA, 19 nt, Artificial Sequence
  Description of Artificial Sequence: Synthetic oligonucleotide
uguuagaaagccucccgau

SEQ ID NO: 2501411 - RNA, 19 nt, Artificial Sequence
  Description of Artificial Sequence: Synthetic oligonucleotide
aaacgguuucacucauuca

SEQ ID NO: 2501412 - RNA, 19 nt, Artificial Sequence
  Description of Artificial Sequence: Synthetic oligonucleotide
uaaacgaaugucuccccaa

SEQ ID NO: 2501413 - RNA, 19 nt, Artificial Sequence
  Description of Artificial Sequence: Synthetic oligonucleotide
gaaguguacgucaauagcu

SEQ ID NO: 2501414 - RNA, 19 nt, Artificial Sequence
  Description of Artificial Sequence: Synthetic oligonucleotide
ucaaguccaucaaguagcu

SEQ ID NO: 2501415 - RNA, 19 nt, Artificial Sequence
  Description of Artificial Sequence: Synthetic oligonucleotide
agaacuagcaggugaggaa

SEQ ID NO: 2501416 - RNA, 19 nt, Artificial Sequence
  Description of Artificial Sequence: Synthetic oligonucleotide
acacaccacacuacuaucg

SEQ ID NO: 2501417 - RNA, 19 nt, Artificial Sequence
  Description of Artificial Sequence: Synthetic oligonucleotide
acuuuggggcugcagcccg

SEQ ID NO: 2501418 - RNA, 19 nt, Artificial Sequence
  Description of Artificial Sequence: Synthetic oligonucleotide
agggugacugaguccggcc

SEQ ID NO: 2501419 - RNA, 19 nt, Artificial Sequence
  Description of Artificial Sequence: Synthetic oligonucleotide
gaaaaguguguccaaggcu

SEQ ID NO: 2501420 - RNA, 19 nt, Artificial Sequence
  Description of Artificial Sequence: Synthetic oligonucleotide
agucgaguccguuuucucu

SEQ ID NO: 2501421 - RNA, 19 nt, Artificial Sequence
  Description of Artificial Sequence: Synthetic oligonucleotide
ccaaauuuauucagcagac

SEQ ID NO: 2501422 - RNA, 19 nt, Artificial Sequence
  Description of Artificial Sequence: Synthetic oligonucleotide
acggcuuuagcuccguacu

SEQ ID NO: 2501423 - RNA, 19 nt, Artificial Sequence
  Description of Artificial Sequence: Synthetic oligonucleotide
cuuuagcuccguacugucc

SEQ ID NO: 2501424 - RNA, 19 nt, Artificial Sequence
  Description of Artificial Sequence: Synthetic oligonucleotide
uuagcuccguacugucccg

SEQ ID NO: 2501425 - RNA, 19 nt, Artificial Sequence
  Description of Artificial Sequence: Synthetic oligonucleotide
aaguauuguuagaaagccu

SEQ ID NO: 2501426 - RNA, 19 nt, Artificial Sequence
  Description of Artificial Sequence: Synthetic oligonucleotide
ucagacacuccguugcgaa

SEQ ID NO: 2501427 - RNA, 19 nt, Artificial Sequence
  Description of Artificial Sequence: Synthetic oligonucleotide
uccguugcgaaguguacgu

SEQ ID NO: 2501428 - RNA, 19 nt, Artificial Sequence
  Description of Artificial Sequence: Synthetic oligonucleotide
cugaagucacauuuuaaaa

SEQ ID NO: 2501429 - RNA, 19 nt, Artificial Sequence
  Description of Artificial Sequence: Synthetic oligonucleotide
aucuggaggaucgaacaag

SEQ ID NO: 2501430 - RNA, 19 nt, Artificial Sequence
  Description of Artificial Sequence: Synthetic oligonucleotide
aaccagggcagaaaagugu

SEQ ID NO: 2501431 - RNA, 19 nt, Artificial Sequence
  Description of Artificial Sequence: Synthetic oligonucleotide
guccguuuucucuaacagc

SEQ ID NO: 2501432 - RNA, 19 nt, Artificial Sequence
  Description of Artificial Sequence: Synthetic oligonucleotide
guauuguuagaaagccucc

SEQ ID NO: 2501433 - RNA, 19 nt, Artificial Sequence
  Description of Artificial Sequence: Synthetic oligonucleotide
aaagggcacccucaaguuu

SEQ ID NO: 2501434 - RNA, 19 nt, Artificial Sequence
  Description of Artificial Sequence: Synthetic oligonucleotide
agcugcaucuggaggaucg

SEQ ID NO: 2501435 - RNA, 19 nt, Artificial Sequence
  Description of Artificial Sequence: Synthetic oligonucleotide
ucucccaguaaaucccaga

SEQ ID NO: 2501436 - RNA, 19 nt, Artificial Sequence
  Description of Artificial Sequence: Synthetic oligonucleotide
uacuaucguuuucuaagua

SEQ ID NO: 2501437 - RNA, 19 nt, Artificial Sequence
  Description of Artificial Sequence: Synthetic oligonucleotide
cuccguacugucccggccg

SEQ ID NO: 2501438 - RNA, 19 nt, Artificial Sequence
  Description of Artificial Sequence: Synthetic oligonucleotide
caaguagcugccacaguuc

SEQ ID NO: 2501439 - RNA, 19 nt, Artificial Sequence
  Description of Artificial Sequence: Synthetic oligonucleotide
agcaggagagagccccucg

SEQ ID NO: 2501440 - RNA, 19 nt, Artificial Sequence
  Description of Artificial Sequence: Synthetic oligonucleotide
gggguggcaccucaaaggg

SEQ ID NO: 2501441 - RNA, 19 nt, Artificial Sequence
  Description of Artificial Sequence: Synthetic oligonucleotide
agcuaccuuaaaguuuggg

SEQ ID NO: 2501442 - RNA, 19 nt, Artificial Sequence
  Description of Artificial Sequence: Synthetic oligonucleotide
cacggcuuuagcuccguac

SEQ ID NO: 2501443 - RNA, 19 nt, Artificial Sequence
  Description of Artificial Sequence: Synthetic oligonucleotide
uuucucuaacagcccgcgc

SEQ ID NO: 2501444 - RNA, 19 nt, Artificial Sequence
  Description of Artificial Sequence: Synthetic oligonucleotide
cagguucaaguccaucaag

SEQ ID NO: 2501445 - RNA, 19 nt, Artificial Sequence
  Description of Artificial Sequence: Synthetic oligonucleotide
uguacgucaauagcugcau

SEQ ID NO: 2501446 - RNA, 19 nt, Artificial Sequence
  Description of Artificial Sequence: Synthetic oligonucleotide
aaguuucacaaggggaaaa

SEQ ID NO: 2501447 - RNA, 19 nt, Artificial Sequence
  Description of Artificial Sequence: Synthetic oligonucleotide
ucccaguaaaucccagauc

SEQ ID NO: 2501448 - RNA, 19 nt, Artificial Sequence
  Description of Artificial Sequence: Synthetic oligonucleotide
caguaaaucccagauccuc

SEQ ID NO: 2501449 - RNA, 19 nt, Artificial Sequence
  Description of Artificial Sequence: Synthetic oligonucleotide
cggacgguaacuuuggggc

SEQ ID NO: 2501450 - RNA, 19 nt, Artificial Sequence
  Description of Artificial Sequence: Synthetic oligonucleotide
uccguacugucccggccgg

SEQ ID NO: 2501451 - RNA, 19 nt, Artificial Sequence
  Description of Artificial Sequence: Synthetic oligonucleotide
agcagagaguucaaaccag

SEQ ID NO: 2501452 - RNA, 19 nt, Artificial Sequence
  Description of Artificial Sequence: Synthetic oligonucleotide
ugcgaaguguacgucaaua

SEQ ID NO: 2501453 - RNA, 19 nt, Artificial Sequence
  Description of Artificial Sequence: Synthetic oligonucleotide
agcuccguacugucccggc

SEQ ID NO: 2501454 - RNA, 19 nt, Artificial Sequence
  Description of Artificial Sequence: Synthetic oligonucleotide
ggauucagcagagaguuca

SEQ ID NO: 2501455 - RNA, 19 nt, Artificial Sequence
  Description of Artificial Sequence: Synthetic oligonucleotide
gcgaaguguacgucaauag

SEQ ID NO: 2501456 - RNA, 19 nt, Artificial Sequence
  Description of Artificial Sequence: Synthetic oligonucleotide
cuugggccggcguagccgc

SEQ ID NO: 2501457 - RNA, 19 nt, Artificial Sequence
  Description of Artificial Sequence: Synthetic oligonucleotide
cuccguugcgaaguguacg

SEQ ID NO: 2501458 - RNA, 19 nt, Artificial Sequence
  Description of Artificial Sequence: Synthetic oligonucleotide
agccucccgauuccgcccc

SEQ ID NO: 2501459 - RNA, 19 nt, Artificial Sequence
  Description of Artificial Sequence: Synthetic oligonucleotide
gacgguaacuuuggggcug

SEQ ID NO: 2501460 - RNA, 19 nt, Artificial Sequence
  Description of Artificial Sequence: Synthetic oligonucleotide
agacacuccguugcgaagu

SEQ ID NO: 2501461 - RNA, 19 nt, Artificial Sequence
  Description of Artificial Sequence: Synthetic oligonucleotide
gauuccgccccucgcgagc

SEQ ID NO: 2501462 - RNA, 19 nt, Artificial Sequence
  Description of Artificial Sequence: Synthetic oligonucleotide
ccucaaguuucacaagggg

SEQ ID NO: 2501463 - RNA, 19 nt, Artificial Sequence
  Description of Artificial Sequence: Synthetic oligonucleotide
ucgcgagccacaauccaau

SEQ ID NO: 2501464 - RNA, 19 nt, Artificial Sequence
  Description of Artificial Sequence: Synthetic oligonucleotide
acgucaauagcugcaucug

SEQ ID NO: 2501465 - RNA, 19 nt, Artificial Sequence
  Description of Artificial Sequence: Synthetic oligonucleotide
guuuagcuaccuuaaaguu

SEQ ID NO: 2501466 - RNA, 19 nt, Artificial Sequence
  Description of Artificial Sequence: Synthetic oligonucleotide
gcggacgguaacuuugggg

SEQ ID NO: 2501467 - RNA, 19 nt, Artificial Sequence
  Description of Artificial Sequence: Synthetic oligonucleotide
ggcugucagguucaagucc

SEQ ID NO: 2501468 - RNA, 19 nt, Artificial Sequence
  Description of Artificial Sequence: Synthetic oligonucleotide
gggaccccgggucagagcc

SEQ ID NO: 2501469 - RNA, 19 nt, Artificial Sequence
  Description of Artificial Sequence: Synthetic oligonucleotide
acgguaacuuuggggcugc

SEQ ID NO: 2501470 - RNA, 19 nt, Artificial Sequence
  Description of Artificial Sequence: Synthetic oligonucleotide
uccuauaaaucaggaccac

SEQ ID NO: 2501471 - RNA, 19 nt, Artificial Sequence
  Description of Artificial Sequence: Synthetic oligonucleotide
aagcaggagagagccccuc

SEQ ID NO: 2501472 - RNA, 19 nt, Artificial Sequence
  Description of Artificial Sequence: Synthetic oligonucleotide
uagcuaccuuaaaguuugg

SEQ ID NO: 2501473 - RNA, 19 nt, Artificial Sequence
  Description of Artificial Sequence: Synthetic oligonucleotide
gacacuccguugcgaagug

SEQ ID NO: 2501474 - RNA, 19 nt, Artificial Sequence
  Description of Artificial Sequence: Synthetic oligonucleotide
cguuuucucuaacagcccg

SEQ ID NO: 2501475 - RNA, 19 nt, Artificial Sequence
  Description of Artificial Sequence: Synthetic oligonucleotide
cucaaagggcacccucaag

SEQ ID NO: 2501476 - RNA, 19 nt, Artificial Sequence
  Description of Artificial Sequence: Synthetic oligonucleotide
uucagacacuccguugcga

SEQ ID NO: 2501477 - RNA, 19 nt, Artificial Sequence
  Description of Artificial Sequence: Synthetic oligonucleotide
aggagagagccccucggau

SEQ ID NO: 2501478 - RNA, 19 nt, Artificial Sequence
  Description of Artificial Sequence: Synthetic oligonucleotide
cgaaguguacgucaauagc

SEQ ID NO: 2501479 - RNA, 19 nt, Artificial Sequence
  Description of Artificial Sequence: Synthetic oligonucleotide
acuccguugcgaaguguac

SEQ ID NO: 2501480 - RNA, 19 nt, Artificial Sequence
  Description of Artificial Sequence: Synthetic oligonucleotide
caaauuuauucagcagaca

SEQ ID NO: 2501481 - RNA, 19 nt, Artificial Sequence
  Description of Artificial Sequence: Synthetic oligonucleotide
cagacacuccguugcgaag

SEQ ID NO: 2501482 - RNA, 19 nt, Artificial Sequence
  Description of Artificial Sequence: Synthetic oligonucleotide
ugcucagucgaguccguuu

SEQ ID NO: 2501483 - RNA, 19 nt, Artificial Sequence
  Description of Artificial Sequence: Synthetic oligonucleotide
cuaucguuuucuaaguauu

SEQ ID NO: 2501484 - RNA, 19 nt, Artificial Sequence
  Description of Artificial Sequence: Synthetic oligonucleotide
gggaaaagccugcaauuuc

SEQ ID NO: 2501485 - RNA, 19 nt, Artificial Sequence
  Description of Artificial Sequence: Synthetic oligonucleotide
gcugcggccacccacggac

SEQ ID NO: 2501486 - RNA, 19 nt, Artificial Sequence
  Description of Artificial Sequence: Synthetic oligonucleotide
acuagcaggugaggaagca

SEQ ID NO: 2501487 - RNA, 19 nt, Artificial Sequence
  Description of Artificial Sequence: Synthetic oligonucleotide
aucaaguagcugccacagu

SEQ ID NO: 2501488 - RNA, 19 nt, Artificial Sequence
  Description of Artificial Sequence: Synthetic oligonucleotide
cuacuaucguuuucuaagu

SEQ ID NO: 2501489 - RNA, 19 nt, Artificial Sequence
  Description of Artificial Sequence: Synthetic oligonucleotide
ggaucgaacaagccauuga

SEQ ID NO: 2501490 - RNA, 19 nt, Artificial Sequence
  Description of Artificial Sequence: Synthetic oligonucleotide
aacagcccgcgcgcggacg

SEQ ID NO: 2501491 - RNA, 19 nt, Artificial Sequence
  Description of Artificial Sequence: Synthetic oligonucleotide
ugcggccacccacggaccc

SEQ ID NO: 2501492 - RNA, 19 nt, Artificial Sequence
  Description of Artificial Sequence: Synthetic oligonucleotide
acgguuucacucauucaca

SEQ ID NO: 2501493 - RNA, 19 nt, Artificial Sequence
  Description of Artificial Sequence: Synthetic oligonucleotide
accacacuacuaucguuuu

SEQ ID NO: 2501494 - RNA, 19 nt, Artificial Sequence
  Description of Artificial Sequence: Synthetic oligonucleotide
acaauccaauauaaacgaa

SEQ ID NO: 2501495 - RNA, 19 nt, Artificial Sequence
  Description of Artificial Sequence: Synthetic oligonucleotide
guguacgucaauagcugca

SEQ ID NO: 2501496 - RNA, 19 nt, Artificial Sequence
  Description of Artificial Sequence: Synthetic oligonucleotide
ggccggacacucuugggcc

SEQ ID NO: 2501497 - RNA, 19 nt, Artificial Sequence
  Description of Artificial Sequence: Synthetic oligonucleotide
gauccucggcugccggugc

SEQ ID NO: 2501498 - RNA, 19 nt, Artificial Sequence
  Description of Artificial Sequence: Synthetic oligonucleotide
gaguccggcccgcugcggc

SEQ ID NO: 2501499 - RNA, 19 nt, Artificial Sequence
  Description of Artificial Sequence: Synthetic oligonucleotide
ccaccacaauuucagacac

SEQ ID NO: 2501500 - RNA, 19 nt, Artificial Sequence
  Description of Artificial Sequence: Synthetic oligonucleotide
aggcuuucauccaacccca

SEQ ID NO: 2501501 - RNA, 19 nt, Artificial Sequence
  Description of Artificial Sequence: Synthetic oligonucleotide
cugcaauuucuccuccuga

SEQ ID NO: 2501502 - RNA, 19 nt, Artificial Sequence
  Description of Artificial Sequence: Synthetic oligonucleotide
cacuacuaucguuuucuaa

SEQ ID NO: 2501503 - RNA, 19 nt, Artificial Sequence
  Description of Artificial Sequence: Synthetic oligonucleotide
aacaagccauugaaucuuu

SEQ ID NO: 2501504 - RNA, 19 nt, Artificial Sequence
  Description of Artificial Sequence: Synthetic oligonucleotide
acaccacacuacuaucguu

SEQ ID NO: 2501505 - RNA, 19 nt, Artificial Sequence
  Description of Artificial Sequence: Synthetic oligonucleotide
uagcuccguacugucccgg

SEQ ID NO: 2501506 - RNA, 19 nt, Artificial Sequence
  Description of Artificial Sequence: Synthetic oligonucleotide
ggugcugcucagucgaguc

SEQ ID NO: 2501507 - RNA, 19 nt, Artificial Sequence
  Description of Artificial Sequence: Synthetic oligonucleotide
ggauggacacggcuuuagc

SEQ ID NO: 2501508 - RNA, 19 nt, Artificial Sequence
  Description of Artificial Sequence: Synthetic oligonucleotide
aagggcugucagguucaag

SEQ ID NO: 2501509 - RNA, 19 nt, Artificial Sequence
  Description of Artificial Sequence: Synthetic oligonucleotide
caaccccacacacaccaca

SEQ ID NO: 2501510 - RNA, 19 nt, Artificial Sequence
  Description of Artificial Sequence: Synthetic oligonucleotide
cucccgauuccgccccucg

SEQ ID NO: 2501511 - RNA, 19 nt, Artificial Sequence
  Description of Artificial Sequence: Synthetic oligonucleotide
gguaacuuuggggcugcag

SEQ ID NO: 2501512 - RNA, 19 nt, Artificial Sequence
  Description of Artificial Sequence: Synthetic oligonucleotide
ccaaggcuuucauccaacc

SEQ ID NO: 2501513 - RNA, 19 nt, Artificial Sequence
  Description of Artificial Sequence: Synthetic oligonucleotide
cuuuggggcugcagcccgc

SEQ ID NO: 2501514 - RNA, 19 nt, Artificial Sequence
  Description of Artificial Sequence: Synthetic oligonucleotide
guuagaaagccucccgauu

SEQ ID NO: 2501515 - RNA, 19 nt, Artificial Sequence
  Description of Artificial Sequence: Synthetic oligonucleotide
guugcgaaguguacgucaa

SEQ ID NO: 2501516 - RNA, 19 nt, Artificial Sequence
  Description of Artificial Sequence: Synthetic oligonucleotide
cgaaugucuccccaagggc

SEQ ID NO: 2501517 - RNA, 19 nt, Artificial Sequence
  Description of Artificial Sequence: Synthetic oligonucleotide
guacgucaauagcugcauc

SEQ ID NO: 2501518 - RNA, 19 nt, Artificial Sequence
  Description of Artificial Sequence: Synthetic oligonucleotide
uggcaccucaaagggcacc

SEQ ID NO: 2501519 - RNA, 19 nt, Artificial Sequence
  Description of Artificial Sequence: Synthetic oligonucleotide
cucuaacagcccgcgcgcg

SEQ ID NO: 2501520 - RNA, 19 nt, Artificial Sequence
  Description of Artificial Sequence: Synthetic oligonucleotide
uugcgaaguguacgucaau

SEQ ID NO: 2501521 - RNA, 19 nt, Artificial Sequence
  Description of Artificial Sequence: Synthetic oligonucleotide
gcacccgagggcugcaggg

SEQ ID NO: 2501522 - RNA, 19 nt, Artificial Sequence
  Description of Artificial Sequence: Synthetic oligonucleotide
cagucgaguccguuuucuc

SEQ ID NO: 2501523 - RNA, 19 nt, Artificial Sequence
  Description of Artificial Sequence: Synthetic oligonucleotide
cucgcgagccacaauccaa

SEQ ID NO: 2501524 - RNA, 19 nt, Artificial Sequence
  Description of Artificial Sequence: Synthetic oligonucleotide
cacuccguugcgaagugua

SEQ ID NO: 2501525 - RNA, 19 nt, Artificial Sequence
  Description of Artificial Sequence: Synthetic oligonucleotide
auucagcagagaguucaaa

SEQ ID NO: 2501526 - RNA, 19 nt, Artificial Sequence
  Description of Artificial Sequence: Synthetic oligonucleotide
cagggugacugaguccggc

SEQ ID NO: 2501527 - RNA, 19 nt, Artificial Sequence
  Description of Artificial Sequence: Synthetic oligonucleotide
caucuggaggaucgaacaa

SEQ ID NO: 2501528 - RNA, 19 nt, Artificial Sequence
  Description of Artificial Sequence: Synthetic oligonucleotide
caccacacuacuaucguuu

SEQ ID NO: 2501529 - RNA, 19 nt, Artificial Sequence
  Description of Artificial Sequence: Synthetic oligonucleotide
gcuuuagcuccguacuguc

SEQ ID NO: 2501530 - RNA, 19 nt, Artificial Sequence
  Description of Artificial Sequence: Synthetic oligonucleotide
cucccaguaaaucccagau

SEQ ID NO: 2501531 - RNA, 19 nt, Artificial Sequence
  Description of Artificial Sequence: Synthetic oligonucleotide
ggaggaucgaacaagccau

SEQ ID NO: 2501532 - RNA, 19 nt, Artificial Sequence
  Description of Artificial Sequence: Synthetic oligonucleotide
gcagacauuuuaauugaaa

SEQ ID NO: 2501533 - RNA, 19 nt, Artificial Sequence
  Description of Artificial Sequence: Synthetic oligonucleotide
cccgauuccgccccucgcg

SEQ ID NO: 2501534 - RNA, 19 nt, Artificial Sequence
  Description of Artificial Sequence: Synthetic oligonucleotide
cucagucgaguccguuuuc

SEQ ID NO: 2501535 - RNA, 19 nt, Artificial Sequence
  Description of Artificial Sequence: Synthetic oligonucleotide
caaguuucacaaggggaaa

SEQ ID NO: 2501536 - RNA, 19 nt, Artificial Sequence
  Description of Artificial Sequence: Synthetic oligonucleotide
gguuucacucauucacaaa

SEQ ID NO: 2501537 - RNA, 19 nt, Artificial Sequence
  Description of Artificial Sequence: Synthetic oligonucleotide
ugaguccggcccgcugcgg

SEQ ID NO: 2501538 - RNA, 19 nt, Artificial Sequence
  Description of Artificial Sequence: Synthetic oligonucleotide
uugggccggcguagccgcg

SEQ ID NO: 2501539 - RNA, 19 nt, Artificial Sequence
  Description of Artificial Sequence: Synthetic oligonucleotide
gggauggacacggcuuuag

SEQ ID NO: 2501540 - RNA, 19 nt, Artificial Sequence
  Description of Artificial Sequence: Synthetic oligonucleotide
gggcugucagguucaaguc

SEQ ID NO: 2501541 - RNA, 19 nt, Artificial Sequence
  Description of Artificial Sequence: Synthetic oligonucleotide
gccggugcugcucagucga

SEQ ID NO: 2501542 - RNA, 19 nt, Artificial Sequence
  Description of Artificial Sequence: Synthetic oligonucleotide
agccacaauccaauauaaa

SEQ ID NO: 2501543 - RNA, 19 nt, Artificial Sequence
  Description of Artificial Sequence: Synthetic oligonucleotide
gugacugaguccggcccgc

SEQ ID NO: 2501544 - RNA, 19 nt, Artificial Sequence
  Description of Artificial Sequence: Synthetic oligonucleotide
cacaccacacuacuaucgu

SEQ ID NO: 2501545 - RNA, 19 nt, Artificial Sequence
  Description of Artificial Sequence: Synthetic oligonucleotide
caggagagagccccucgga

SEQ ID NO: 2501546 - RNA, 19 nt, Artificial Sequence
  Description of Artificial Sequence: Synthetic oligonucleotide
guacugucccggccggaca

SEQ ID NO: 2501547 - RNA, 19 nt, Artificial Sequence
  Description of Artificial Sequence: Synthetic oligonucleotide
ccgggucagagccaggcac

SEQ ID NO: 2501548 - RNA, 19 nt, Artificial Sequence
  Description of Artificial Sequence: Synthetic oligonucleotide
ggcacccgagggcugcagg

SEQ ID NO: 2501549 - RNA, 19 nt, Artificial Sequence
  Description of Artificial Sequence: Synthetic oligonucleotide
cuaacagcccgcgcgcgga

SEQ ID NO: 2501550 - RNA, 19 nt, Artificial Sequence
  Description of Artificial Sequence: Synthetic oligonucleotide
ccccucgcgagccacaauc

SEQ ID NO: 2501551 - RNA, 19 nt, Artificial Sequence
  Description of Artificial Sequence: Synthetic oligonucleotide
cugcggccacccacggacc

SEQ ID NO: 2501552 - RNA, 19 nt, Artificial Sequence
  Description of Artificial Sequence: Synthetic oligonucleotide
auccucggcugccggugcu

SEQ ID NO: 2501553 - RNA, 19 nt, Artificial Sequence
  Description of Artificial Sequence: Synthetic oligonucleotide
gcuccguacugucccggcc

SEQ ID NO: 2501554 - RNA, 19 nt, Artificial Sequence
  Description of Artificial Sequence: Synthetic oligonucleotide
cccucgcgagccacaaucc

SEQ ID NO: 2501555 - RNA, 19 nt, Artificial Sequence
  Description of Artificial Sequence: Synthetic oligonucleotide
ggaccaccacaauuucaga

SEQ ID NO: 2501556 - RNA, 19 nt, Artificial Sequence
  Description of Artificial Sequence: Synthetic oligonucleotide
cguugcgaaguguacguca

SEQ ID NO: 2501557 - RNA, 19 nt, Artificial Sequence
  Description of Artificial Sequence: Synthetic oligonucleotide
guagccgcguccucuuccu

SEQ ID NO: 2501558 - RNA, 19 nt, Artificial Sequence
  Description of Artificial Sequence: Synthetic oligonucleotide
ggacacggcuuuagcuccg

SEQ ID NO: 2501559 - RNA, 19 nt, Artificial Sequence
  Description of Artificial Sequence: Synthetic oligonucleotide
cgaacaagccauugaaucu

SEQ ID NO: 2501560 - RNA, 19 nt, Artificial Sequence
  Description of Artificial Sequence: Synthetic oligonucleotide
cgcgcggacgguaacuuug

SEQ ID NO: 2501561 - RNA, 19 nt, Artificial Sequence
  Description of Artificial Sequence: Synthetic oligonucleotide
cgagccacaauccaauaua

SEQ ID NO: 2501562 - RNA, 19 nt, Artificial Sequence
  Description of Artificial Sequence: Synthetic oligonucleotide
acaagccauugaaucuuuu

SEQ ID NO: 2501563 - RNA, 19 nt, Artificial Sequence
  Description of Artificial Sequence: Synthetic oligonucleotide
acacuccguugcgaagugu

SEQ ID NO: 2501564 - RNA, 19 nt, Artificial Sequence
  Description of Artificial Sequence: Synthetic oligonucleotide
gcgcggacgguaacuuugg

SEQ ID NO: 2501565 - RNA, 19 nt, Artificial Sequence
  Description of Artificial Sequence: Synthetic oligonucleotide
cguagccgcguccucuucc

SEQ ID NO: 2501566 - RNA, 19 nt, Artificial Sequence
  Description of Artificial Sequence: Synthetic oligonucleotide
ccaagggcugucagguuca

SEQ ID NO: 2501567 - RNA, 19 nt, Artificial Sequence
  Description of Artificial Sequence: Synthetic oligonucleotide
cgggucagagccaggcacc

SEQ ID NO: 2501568 - RNA, 19 nt, Artificial Sequence
  Description of Artificial Sequence: Synthetic oligonucleotide
ugacugaguccggcccgcu

SEQ ID NO: 2501569 - RNA, 19 nt, Artificial Sequence
  Description of Artificial Sequence: Synthetic oligonucleotide
uagccgcguccucuuccuc

SEQ ID NO: 2501570 - RNA, 19 nt, Artificial Sequence
  Description of Artificial Sequence: Synthetic oligonucleotide
ggucagagccaggcacccg

SEQ ID NO: 2501571 - RNA, 19 nt, Artificial Sequence
  Description of Artificial Sequence: Synthetic oligonucleotide
cccggccggacacucuugg

SEQ ID NO: 2501572 - RNA, 19 nt, Artificial Sequence
  Description of Artificial Sequence: Synthetic oligonucleotide
agagagccccucggauuca

SEQ ID NO: 2501573 - RNA, 19 nt, Artificial Sequence
  Description of Artificial Sequence: Synthetic oligonucleotide
gccacaguucucccaguaa

SEQ ID NO: 2501574 - RNA, 19 nt, Artificial Sequence
  Description of Artificial Sequence: Synthetic oligonucleotide
ccacacuacuaucguuuuc

SEQ ID NO: 2501575 - RNA, 19 nt, Artificial Sequence
  Description of Artificial Sequence: Synthetic oligonucleotide
ggguggcaccucaaagggc

SEQ ID NO: 2501576 - RNA, 19 nt, Artificial Sequence
  Description of Artificial Sequence: Synthetic oligonucleotide
uccgccccucgcgagccac

SEQ ID NO: 2501577 - RNA, 19 nt, Artificial Sequence
  Description of Artificial Sequence: Synthetic oligonucleotide
ggagagagccccucggauu

SEQ ID NO: 2501578 - RNA, 19 nt, Artificial Sequence
  Description of Artificial Sequence: Synthetic oligonucleotide
acugucccggccggacacu

SEQ ID NO: 2501579 - RNA, 19 nt, Artificial Sequence
  Description of Artificial Sequence: Synthetic oligonucleotide
ugggccggcguagccgcgu

SEQ ID NO: 2501580 - RNA, 19 nt, Artificial Sequence
  Description of Artificial Sequence: Synthetic oligonucleotide
ggacgguaacuuuggggcu

SEQ ID NO: 2501581 - RNA, 19 nt, Artificial Sequence
  Description of Artificial Sequence: Synthetic oligonucleotide
ugucuccccaagggcuguc

SEQ ID NO: 2501582 - RNA, 19 nt, Artificial Sequence
  Description of Artificial Sequence: Synthetic oligonucleotide
ggacacucuugggccggcg

SEQ ID NO: 2501583 - RNA, 19 nt, Artificial Sequence
  Description of Artificial Sequence: Synthetic oligonucleotide
agggcacccucaaguuuca

SEQ ID NO: 2501584 - RNA, 19 nt, Artificial Sequence
  Description of Artificial Sequence: Synthetic oligonucleotide
guggcaccucaaagggcac

SEQ ID NO: 2501585 - RNA, 19 nt, Artificial Sequence
  Description of Artificial Sequence: Synthetic oligonucleotide
acacggcuuuagcuccgua

SEQ ID NO: 2501586 - RNA, 19 nt, Artificial Sequence
  Description of Artificial Sequence: Synthetic oligonucleotide
ccgcgcgggauggacacgg

SEQ ID NO: 2501587 - RNA, 19 nt, Artificial Sequence
  Description of Artificial Sequence: Synthetic oligonucleotide
caccacaauuucagacacu

SEQ ID NO: 2501588 - RNA, 19 nt, Artificial Sequence
  Description of Artificial Sequence: Synthetic oligonucleotide
ccccucggauucagcagag

SEQ ID NO: 2501589 - RNA, 19 nt, Artificial Sequence
  Description of Artificial Sequence: Synthetic oligonucleotide
cccagauccucggcugccg

SEQ ID NO: 2501590 - RNA, 19 nt, Artificial Sequence
  Description of Artificial Sequence: Synthetic oligonucleotide
gcucagucgaguccguuuu

SEQ ID NO: 2501591 - RNA, 19 nt, Artificial Sequence
  Description of Artificial Sequence: Synthetic oligonucleotide
gcccgcgcgggauggacac

SEQ ID NO: 2501592 - RNA, 19 nt, Artificial Sequence
  Description of Artificial Sequence: Synthetic oligonucleotide
ccaaccccacacacaccac

SEQ ID NO: 2501593 - RNA, 19 nt, Artificial Sequence
  Description of Artificial Sequence: Synthetic oligonucleotide
ccccgggucagagccaggc

SEQ ID NO: 2501594 - RNA, 19 nt, Artificial Sequence
  Description of Artificial Sequence: Synthetic oligonucleotide
gcgagccacaauccaauau

SEQ ID NO: 2501595 - RNA, 19 nt, Artificial Sequence
  Description of Artificial Sequence: Synthetic oligonucleotide
ccggccggacacucuuggg

SEQ ID NO: 2501596 - RNA, 19 nt, Artificial Sequence
  Description of Artificial Sequence: Synthetic oligonucleotide
aggcacccgagggcugcag

SEQ ID NO: 2501597 - RNA, 19 nt, Artificial Sequence
  Description of Artificial Sequence: Synthetic oligonucleotide
ccaggcacccgagggcugc

SEQ ID NO: 2501598 - RNA, 19 nt, Artificial Sequence
  Description of Artificial Sequence: Synthetic oligonucleotide
cgguuucacucauucacaa

SEQ ID NO: 2501599 - RNA, 19 nt, Artificial Sequence
  Description of Artificial Sequence: Synthetic oligonucleotide
cagcccgcgcgggauggac

SEQ ID NO: 2501600 - RNA, 19 nt, Artificial Sequence
  Description of Artificial Sequence: Synthetic oligonucleotide
cggcuuuagcuccguacug

SEQ ID NO: 2501601 - RNA, 19 nt, Artificial Sequence
  Description of Artificial Sequence: Synthetic oligonucleotide
gcagggugacugaguccgg

SEQ ID NO: 2501602 - RNA, 19 nt, Artificial Sequence
  Description of Artificial Sequence: Synthetic oligonucleotide
ccucaaagggcacccucaa

SEQ ID NO: 2501603 - RNA, 19 nt, Artificial Sequence
  Description of Artificial Sequence: Synthetic oligonucleotide
agcccgcgcgggauggaca

SEQ ID NO: 2501604 - RNA, 19 nt, Artificial Sequence
  Description of Artificial Sequence: Synthetic oligonucleotide
cguacugucccggccggac

SEQ ID NO: 2501605 - RNA, 19 nt, Artificial Sequence
  Description of Artificial Sequence: Synthetic oligonucleotide
ccaguaaaucccagauccu

SEQ ID NO: 2501606 - RNA, 19 nt, Artificial Sequence
  Description of Artificial Sequence: Synthetic oligonucleotide
gacacggcuuuagcuccgu

SEQ ID NO: 2501607 - RNA, 19 nt, Artificial Sequence
  Description of Artificial Sequence: Synthetic oligonucleotide
ccucgcgagccacaaucca

SEQ ID NO: 2501608 - RNA, 19 nt, Artificial Sequence
  Description of Artificial Sequence: Synthetic oligonucleotide
cgauuccgccccucgcgag

SEQ ID NO: 2501609 - RNA, 19 nt, Artificial Sequence
  Description of Artificial Sequence: Synthetic oligonucleotide
cgcggacgguaacuuuggg

SEQ ID NO: 2501610 - RNA, 19 nt, Artificial Sequence
  Description of Artificial Sequence: Synthetic oligonucleotide
ccgauuccgccccucgcga

SEQ ID NO: 2501611 - RNA, 19 nt, Artificial Sequence
  Description of Artificial Sequence: Synthetic oligonucleotide
gucccggccggacacucuu

SEQ ID NO: 2501612 - RNA, 19 nt, Artificial Sequence
  Description of Artificial Sequence: Synthetic oligonucleotide
cacggaccccggggcacug

SEQ ID NO: 2501613 - RNA, 19 nt, Artificial Sequence
  Description of Artificial Sequence: Synthetic oligonucleotide
ccggugcugcucagucgag

SEQ ID NO: 2501614 - RNA, 19 nt, Artificial Sequence
  Description of Artificial Sequence: Synthetic oligonucleotide
cugucagguucaaguccau

SEQ ID NO: 2501615 - RNA, 19 nt, Artificial Sequence
  Description of Artificial Sequence: Synthetic oligonucleotide
ggccggcguagccgcgucc

SEQ ID NO: 2501616 - RNA, 19 nt, Artificial Sequence
  Description of Artificial Sequence: Synthetic oligonucleotide
cccgagggcugcaggguga

SEQ ID NO: 2501617 - RNA, 19 nt, Artificial Sequence
  Description of Artificial Sequence: Synthetic oligonucleotide
accccgggucagagccagg

SEQ ID NO: 2501618 - RNA, 19 nt, Artificial Sequence
  Description of Artificial Sequence: Synthetic oligonucleotide
cggauucagcagagaguuc

SEQ ID NO: 2501619 - RNA, 19 nt, Artificial Sequence
  Description of Artificial Sequence: Synthetic oligonucleotide
ccguugcgaaguguacguc

SEQ ID NO: 2501620 - RNA, 19 nt, Artificial Sequence
  Description of Artificial Sequence: Synthetic oligonucleotide
caagggcugucagguucaa

SEQ ID NO: 2501621 - RNA, 19 nt, Artificial Sequence
  Description of Artificial Sequence: Synthetic oligonucleotide
gcggccacccacggacccc

SEQ ID NO: 2501622 - RNA, 19 nt, Artificial Sequence
  Description of Artificial Sequence: Synthetic oligonucleotide
cccacggaccccggggcac

SEQ ID NO: 2501623 - RNA, 19 nt, Artificial Sequence
  Description of Artificial Sequence: Synthetic oligonucleotide
ccuccgggaccccggguca

SEQ ID NO: 2501624 - RNA, 19 nt, Artificial Sequence
  Description of Artificial Sequence: Synthetic oligonucleotide
ccgagggcugcagggugac

SEQ ID NO: 2501625 - RNA, 19 nt, Artificial Sequence
  Description of Artificial Sequence: Synthetic oligonucleotide
ccgggaccccgggucagag

SEQ ID NO: 2501626 - RNA, 19 nt, Artificial Sequence
  Description of Artificial Sequence: Synthetic oligonucleotide
gcguagccgcguccucuuc

SEQ ID NO: 2501627 - RNA, 19 nt, Artificial Sequence
  Description of Artificial Sequence: Synthetic oligonucleotide
gcgcgggauggacacggcu

SEQ ID NO: 2501628 - RNA, 19 nt, Artificial Sequence
  Description of Artificial Sequence: Synthetic oligonucleotide
cccgggucagagccaggca

SEQ ID NO: 2501629 - RNA, 19 nt, Artificial Sequence
  Description of Artificial Sequence: Synthetic oligonucleotide
cgggaccccgggucagagc

SEQ ID NO: 2501630 - RNA, 19 nt, Artificial Sequence
  Description of Artificial Sequence: Synthetic oligonucleotide
caggcacccgagggcugca

SEQ ID NO: 2501631 - RNA, 19 nt, Artificial Sequence
  Description of Artificial Sequence: Synthetic oligonucleotide
ggcguagccgcguccucuu

SEQ ID NO: 2501632 - RNA, 19 nt, Artificial Sequence
  Description of Artificial Sequence: Synthetic oligonucleotide
gggccggcguagccgcguc

SEQ ID NO: 2501633 - RNA, 19 nt, Artificial Sequence
  Description of Artificial Sequence: Synthetic oligonucleotide
ggaccccgggucagagcca

SEQ ID NO: 2501634 - RNA, 19 nt, Artificial Sequence
  Description of Artificial Sequence: Synthetic oligonucleotide
cgcgcgggauggacacggc

SEQ ID NO: 2501635 - RNA, 19 nt, Artificial Sequence
  Description of Artificial Sequence: Synthetic oligonucleotide
cccgcgcgcggacgguaac

SEQ ID NO: 2501636 - RNA, 19 nt, Artificial Sequence
  Description of Artificial Sequence: Synthetic oligonucleotide
gccggcguagccgcguccu

SEQ ID NO: 2501637 - RNA, 19 nt, Artificial Sequence
  Description of Artificial Sequence: Synthetic oligonucleotide
gcugcagcccgcgcgggau

SEQ ID NO: 2501638 - RNA, 19 nt, Artificial Sequence
  Description of Artificial Sequence: Synthetic oligonucleotide
cccgcgcgggauggacacg

SEQ ID NO: 2501639 - RNA, 19 nt, Artificial Sequence
  Description of Artificial Sequence: Synthetic oligonucleotide
cgcgggauggacacggcuu

SEQ ID NO: 2501640 - RNA, 19 nt, Artificial Sequence
  Description of Artificial Sequence: Synthetic oligonucleotide
ccggcguagccgcguccuc

SEQ ID NO: 2501641 - RNA, 19 nt, Artificial Sequence
  Description of Artificial Sequence: Synthetic oligonucleotide
ccucccgauuccgccccuc

SEQ ID NO: 2501642 - RNA, 19 nt, Artificial Sequence
  Description of Artificial Sequence: Synthetic oligonucleotide
cgcgagccacaauccaaua

SEQ ID NO: 2501643 - RNA, 19 nt, Artificial Sequence
  Description of Artificial Sequence: Synthetic oligonucleotide
cggcccgcugcggccaccc

SEQ ID NO: 2501644 - RNA, 19 nt, Artificial Sequence
  Description of Artificial Sequence: Synthetic oligonucleotide
gcagcccgcgcgggaugga

SEQ ID NO: 2501645 - RNA, 19 nt, Artificial Sequence
  Description of Artificial Sequence: Synthetic oligonucleotide
gcgcgcggacgguaacuuu

SEQ ID NO: 2501646 - RNA, 19 nt, Artificial Sequence
  Description of Artificial Sequence: Synthetic oligonucleotide
ccgccccucgcgagccaca

SEQ ID NO: 2501647 - RNA, 19 nt, Artificial Sequence
  Description of Artificial Sequence: Synthetic oligonucleotide
gcccgcgcgcggacgguaa

SEQ ID NO: 2501648 - RNA, 19 nt, Artificial Sequence
  Description of Artificial Sequence: Synthetic oligonucleotide
ccguacugucccggccgga

SEQ ID NO: 2501649 - RNA, 19 nt, Artificial Sequence
  Description of Artificial Sequence: Synthetic oligonucleotide
cggugcugcucagucgagu

SEQ ID NO: 2501650 - RNA, 19 nt, Artificial Sequence
  Description of Artificial Sequence: Synthetic oligonucleotide
cgggauggacacggcuuua

SEQ ID NO: 2501651 - RNA, 19 nt, Artificial Sequence
  Description of Artificial Sequence: Synthetic oligonucleotide
cggcguagccgcguccucu

SEQ ID NO: 2501652 - RNA, 19 nt, Artificial Sequence
  Description of Artificial Sequence: Synthetic oligonucleotide
cggaccccggggcacuggu

SEQ ID NO: 2501653 - RNA, 19 nt, Artificial Sequence
  Description of Artificial Sequence: Synthetic oligonucleotide
cagcccgcgcgcggacggu

SEQ ID NO: 2501654 - RNA, 19 nt, Artificial Sequence
  Description of Artificial Sequence: Synthetic oligonucleotide
gccccucgcgagccacaau

SEQ ID NO: 2501655 - RNA, 19 nt, Artificial Sequence
  Description of Artificial Sequence: Synthetic oligonucleotide
ccacggaccccggggcacu

SEQ ID NO: 2501656 - RNA, 19 nt, Artificial Sequence
  Description of Artificial Sequence: Synthetic oligonucleotide
ccgcgcgcggacgguaacu

SEQ ID NO: 2501657 - RNA, 19 nt, Artificial Sequence
  Description of Artificial Sequence: Synthetic oligonucleotide
ccccaagggcugucagguu

SEQ ID NO: 2501658 - RNA, 19 nt, Artificial Sequence
  Description of Artificial Sequence: Synthetic oligonucleotide
cgguaacuuuggggcugca

SEQ ID NO: 2501659 - RNA, 19 nt, Artificial Sequence
  Description of Artificial Sequence: Synthetic oligonucleotide
cgccccucgcgagccacaa

SEQ ID NO: 2501660 - RNA, 19 nt, Artificial Sequence
  Description of Artificial Sequence: Synthetic oligonucleotide
cgcgcgcggacgguaacuu

SEQ ID NO: 2501661 - RNA, 19 nt, Artificial Sequence
  Description of Artificial Sequence: Synthetic oligonucleotide
aaaaccauuagauaauggg

SEQ ID NO: 2501662 - RNA, 19 nt, Artificial Sequence
  Description of Artificial Sequence: Synthetic oligonucleotide
cuuacaauguauuugaacc

SEQ ID NO: 2501663 - RNA, 19 nt, Artificial Sequence
  Description of Artificial Sequence: Synthetic oligonucleotide
aauauuuuagaaguugccc

SEQ ID NO: 2501664 - RNA, 19 nt, Artificial Sequence
  Description of Artificial Sequence: Synthetic oligonucleotide
auauuuuagaaguugcccc

SEQ ID NO: 2501665 - RNA, 19 nt, Artificial Sequence
  Description of Artificial Sequence: Synthetic oligonucleotide
auguauuugaaccuuuucc

SEQ ID NO: 2501666 - RNA, 19 nt, Artificial Sequence
  Description of Artificial Sequence: Synthetic oligonucleotide
uuaaucuuaacugauauuc

SEQ ID NO: 2501667 - RNA, 19 nt, Artificial Sequence
  Description of Artificial Sequence: Synthetic oligonucleotide
uguauuugaaccuuuuccc

SEQ ID NO: 2501668 - RNA, 19 nt, Artificial Sequence
  Description of Artificial Sequence: Synthetic oligonucleotide
uaagccagagccaugacag

SEQ ID NO: 2501669 - RNA, 19 nt, Artificial Sequence
  Description of Artificial Sequence: Synthetic oligonucleotide
uuaacugauauucuuacaa

SEQ ID NO: 2501670 - RNA, 19 nt, Artificial Sequence
  Description of Artificial Sequence: Synthetic oligonucleotide
uggguaauauuuuagaagu

SEQ ID NO: 2501671 - RNA, 19 nt, Artificial Sequence
  Description of Artificial Sequence: Synthetic oligonucleotide
uagauaauggguaauauuu

SEQ ID NO: 2501672 - RNA, 19 nt, Artificial Sequence
  Description of Artificial Sequence: Synthetic oligonucleotide
aacugauauucuuacaaug

SEQ ID NO: 2501673 - RNA, 19 nt, Artificial Sequence
  Description of Artificial Sequence: Synthetic oligonucleotide
cugaaguuaaucuuaacug

SEQ ID NO: 2501674 - RNA, 19 nt, Artificial Sequence
  Description of Artificial Sequence: Synthetic oligonucleotide
aauucuuacuacccaagug

SEQ ID NO: 2501675 - RNA, 19 nt, Artificial Sequence
  Description of Artificial Sequence: Synthetic oligonucleotide
ugaaguuaaucuuaacuga

SEQ ID NO: 2501676 - RNA, 19 nt, Artificial Sequence
  Description of Artificial Sequence: Synthetic oligonucleotide
uaauauuuuagaaguugcc

SEQ ID NO: 2501677 - RNA, 19 nt, Artificial Sequence
  Description of Artificial Sequence: Synthetic oligonucleotide
auucuuacuacccaagugu

SEQ ID NO: 2501678 - RNA, 19 nt, Artificial Sequence
  Description of Artificial Sequence: Synthetic oligonucleotide
auggguaauauuuuagaag

SEQ ID NO: 2501679 - RNA, 19 nt, Artificial Sequence
  Description of Artificial Sequence: Synthetic oligonucleotide
auucuuacaauguauuuga

SEQ ID NO: 2501680 - RNA, 19 nt, Artificial Sequence
  Description of Artificial Sequence: Synthetic oligonucleotide
aauggguaauauuuuagaa

SEQ ID NO: 2501681 - RNA, 19 nt, Artificial Sequence
  Description of Artificial Sequence: Synthetic oligonucleotide
uauucuuacaauguauuug

SEQ ID NO: 2501682 - RNA, 19 nt, Artificial Sequence
  Description of Artificial Sequence: Synthetic oligonucleotide
aaguacuccaugcgcaugg

SEQ ID NO: 2501683 - RNA, 19 nt, Artificial Sequence
  Description of Artificial Sequence: Synthetic oligonucleotide
uucaaaguacuccaugcgc

SEQ ID NO: 2501684 - RNA, 19 nt, Artificial Sequence
  Description of Artificial Sequence: Synthetic oligonucleotide
caaaaggugauauuagcac

SEQ ID NO: 2501685 - RNA, 19 nt, Artificial Sequence
  Description of Artificial Sequence: Synthetic oligonucleotide
agagccaugacagcaaagc

SEQ ID NO: 2501686 - RNA, 19 nt, Artificial Sequence
  Description of Artificial Sequence: Synthetic oligonucleotide
ucaaaguacuccaugcgca

SEQ ID NO: 2501687 - RNA, 19 nt, Artificial Sequence
  Description of Artificial Sequence: Synthetic oligonucleotide
uucuuuggaaaucccaagc

SEQ ID NO: 2501688 - RNA, 19 nt, Artificial Sequence
  Description of Artificial Sequence: Synthetic oligonucleotide
ucuuaacugauauucuuac

SEQ ID NO: 2501689 - RNA, 19 nt, Artificial Sequence
  Description of Artificial Sequence: Synthetic oligonucleotide
uaauggguaauauuuuaga

SEQ ID NO: 2501690 - RNA, 19 nt, Artificial Sequence
  Description of Artificial Sequence: Synthetic oligonucleotide
aguuaaucuuaacugauau

SEQ ID NO: 2501691 - RNA, 19 nt, Artificial Sequence
  Description of Artificial Sequence: Synthetic oligonucleotide
ucuuacaauguauuugaac

SEQ ID NO: 2501692 - RNA, 19 nt, Artificial Sequence
  Description of Artificial Sequence: Synthetic oligonucleotide
aaaccauuagauaaugggu

SEQ ID NO: 2501693 - RNA, 19 nt, Artificial Sequence
  Description of Artificial Sequence: Synthetic oligonucleotide
ugauauucuuacaauguau

SEQ ID NO: 2501694 - RNA, 19 nt, Artificial Sequence
  Description of Artificial Sequence: Synthetic oligonucleotide
aaucuuaacugauauucuu

SEQ ID NO: 2501695 - RNA, 19 nt, Artificial Sequence
  Description of Artificial Sequence: Synthetic oligonucleotide
guaauauuuuagaaguugc

SEQ ID NO: 2501696 - RNA, 19 nt, Artificial Sequence
  Description of Artificial Sequence: Synthetic oligonucleotide
uccaaaaggugauauuagc

SEQ ID NO: 2501697 - RNA, 19 nt, Artificial Sequence
  Description of Artificial Sequence: Synthetic oligonucleotide
caggauagcacccagguuc

SEQ ID NO: 2501698 - RNA, 19 nt, Artificial Sequence
  Description of Artificial Sequence: Synthetic oligonucleotide
uuacaauguauuugaaccu

SEQ ID NO: 2501699 - RNA, 19 nt, Artificial Sequence
  Description of Artificial Sequence: Synthetic oligonucleotide
uaaucuuaacugauauucu

SEQ ID NO: 2501700 - RNA, 19 nt, Artificial Sequence
  Description of Artificial Sequence: Synthetic oligonucleotide
augguguccaugcacuugg

SEQ ID NO: 2501701 - RNA, 19 nt, Artificial Sequence
  Description of Artificial Sequence: Synthetic oligonucleotide
cuaauucuuacuacccaag

SEQ ID NO: 2501702 - RNA, 19 nt, Artificial Sequence
  Description of Artificial Sequence: Synthetic oligonucleotide
guauuugaaccuuuucccc

SEQ ID NO: 2501703 - RNA, 19 nt, Artificial Sequence
  Description of Artificial Sequence: Synthetic oligonucleotide
uaggcuccccuccaaaagg

SEQ ID NO: 2501704 - RNA, 19 nt, Artificial Sequence
  Description of Artificial Sequence: Synthetic oligonucleotide
ucagcugaaguuaaucuua

SEQ ID NO: 2501705 - RNA, 19 nt, Artificial Sequence
  Description of Artificial Sequence: Synthetic oligonucleotide
caaaaccauuagauaaugg

SEQ ID NO: 2501706 - RNA, 19 nt, Artificial Sequence
  Description of Artificial Sequence: Synthetic oligonucleotide
uaauucuuacuacccaagu

SEQ ID NO: 2501707 - RNA, 19 nt, Artificial Sequence
  Description of Artificial Sequence: Synthetic oligonucleotide
uacuccaugcgcauggugu

SEQ ID NO: 2501708 - RNA, 19 nt, Artificial Sequence
  Description of Artificial Sequence: Synthetic oligonucleotide
augcgcaugguguccaugc

SEQ ID NO: 2501709 - RNA, 19 nt, Artificial Sequence
  Description of Artificial Sequence: Synthetic oligonucleotide
cuuacuacccaaguguuug

SEQ ID NO: 2501710 - RNA, 19 nt, Artificial Sequence
  Description of Artificial Sequence: Synthetic oligonucleotide
uagaacucgcucuuccuag

SEQ ID NO: 2501711 - RNA, 19 nt, Artificial Sequence
  Description of Artificial Sequence: Synthetic oligonucleotide
uuagauaauggguaauauu

SEQ ID NO: 2501712 - RNA, 19 nt, Artificial Sequence
  Description of Artificial Sequence: Synthetic oligonucleotide
aaaagguccaggaucccag

SEQ ID NO: 2501713 - RNA, 19 nt, Artificial Sequence
  Description of Artificial Sequence: Synthetic oligonucleotide
acuacccaaguguuugugg

SEQ ID NO: 2501714 - RNA, 19 nt, Artificial Sequence
  Description of Artificial Sequence: Synthetic oligonucleotide
auaauggguaauauuuuag

SEQ ID NO: 2501715 - RNA, 19 nt, Artificial Sequence
  Description of Artificial Sequence: Synthetic oligonucleotide
gauaauggguaauauuuua

SEQ ID NO: 2501716 - RNA, 19 nt, Artificial Sequence
  Description of Artificial Sequence: Synthetic oligonucleotide
gguaauauuuuagaaguug

SEQ ID NO: 2501717 - RNA, 19 nt, Artificial Sequence
  Description of Artificial Sequence: Synthetic oligonucleotide
uaguucuuuggaaauccca

SEQ ID NO: 2501718 - RNA, 19 nt, Artificial Sequence
  Description of Artificial Sequence: Synthetic oligonucleotide
aaagguccaggaucccagg

SEQ ID NO: 2501719 - RNA, 19 nt, Artificial Sequence
  Description of Artificial Sequence: Synthetic oligonucleotide
acugauauucuuacaaugu

SEQ ID NO: 2501720 - RNA, 19 nt, Artificial Sequence
  Description of Artificial Sequence: Synthetic oligonucleotide
aaccauuagauaaugggua

SEQ ID NO: 2501721 - RNA, 19 nt, Artificial Sequence
  Description of Artificial Sequence: Synthetic oligonucleotide
auaagccagagccaugaca

SEQ ID NO: 2501722 - RNA, 19 nt, Artificial Sequence
  Description of Artificial Sequence: Synthetic oligonucleotide
cuccaaaaggugauauuag

SEQ ID NO: 2501723 - RNA, 19 nt, Artificial Sequence
  Description of Artificial Sequence: Synthetic oligonucleotide
uauguucagcugaaguuaa

SEQ ID NO: 2501724 - RNA, 19 nt, Artificial Sequence
  Description of Artificial Sequence: Synthetic oligonucleotide
guucuuuggaaaucccaag

SEQ ID NO: 2501725 - RNA, 19 nt, Artificial Sequence
  Description of Artificial Sequence: Synthetic oligonucleotide
gauagcacccagguucugg

SEQ ID NO: 2501726 - RNA, 19 nt, Artificial Sequence
  Description of Artificial Sequence: Synthetic oligonucleotide
uaacugauauucuuacaau

SEQ ID NO: 2501727 - RNA, 19 nt, Artificial Sequence
  Description of Artificial Sequence: Synthetic oligonucleotide
agguucuggaggcaggaag

SEQ ID NO: 2501728 - RNA, 19 nt, Artificial Sequence
  Description of Artificial Sequence: Synthetic oligonucleotide
uuuaccucaggguggcuga

SEQ ID NO: 2501729 - RNA, 19 nt, Artificial Sequence
  Description of Artificial Sequence: Synthetic oligonucleotide
ucuuccuaguucuuuggaa

SEQ ID NO: 2501730 - RNA, 19 nt, Artificial Sequence
  Description of Artificial Sequence: Synthetic oligonucleotide
uuuuaccucaggguggcug

SEQ ID NO: 2501731 - RNA, 19 nt, Artificial Sequence
  Description of Artificial Sequence: Synthetic oligonucleotide
uucagcugaaguuaaucuu

SEQ ID NO: 2501732 - RNA, 19 nt, Artificial Sequence
  Description of Artificial Sequence: Synthetic oligonucleotide
cuaguucuuuggaaauccc

SEQ ID NO: 2501733 - RNA, 19 nt, Artificial Sequence
  Description of Artificial Sequence: Synthetic oligonucleotide
auuagauaauggguaauau

SEQ ID NO: 2501734 - RNA, 19 nt, Artificial Sequence
  Description of Artificial Sequence: Synthetic oligonucleotide
accauuagauaauggguaa

SEQ ID NO: 2501735 - RNA, 19 nt, Artificial Sequence
  Description of Artificial Sequence: Synthetic oligonucleotide
acuccaugcgcaugguguc

SEQ ID NO: 2501736 - RNA, 19 nt, Artificial Sequence
  Description of Artificial Sequence: Synthetic oligonucleotide
uguucagcugaaguuaauc

SEQ ID NO: 2501737 - RNA, 19 nt, Artificial Sequence
  Description of Artificial Sequence: Synthetic oligonucleotide
acucgcucuuccuaguucu

SEQ ID NO: 2501738 - RNA, 19 nt, Artificial Sequence
  Description of Artificial Sequence: Synthetic oligonucleotide
uucuuacuacccaaguguu

SEQ ID NO: 2501739 - RNA, 19 nt, Artificial Sequence
  Description of Artificial Sequence: Synthetic oligonucleotide
agcugaaguuaaucuuaac

SEQ ID NO: 2501740 - RNA, 19 nt, Artificial Sequence
  Description of Artificial Sequence: Synthetic oligonucleotide
guguccaugcacuugggga

SEQ ID NO: 2501741 - RNA, 19 nt, Artificial Sequence
  Description of Artificial Sequence: Synthetic oligonucleotide
uacaauguauuugaaccuu

SEQ ID NO: 2501742 - RNA, 19 nt, Artificial Sequence
  Description of Artificial Sequence: Synthetic oligonucleotide
aggguggcugagcagguag

SEQ ID NO: 2501743 - RNA, 19 nt, Artificial Sequence
  Description of Artificial Sequence: Synthetic oligonucleotide
aaaguacuccaugcgcaug

SEQ ID NO: 2501744 - RNA, 19 nt, Artificial Sequence
  Description of Artificial Sequence: Synthetic oligonucleotide
cuuccuaguucuuuggaaa

SEQ ID NO: 2501745 - RNA, 19 nt, Artificial Sequence
  Description of Artificial Sequence: Synthetic oligonucleotide
uuccuaguucuuuggaaau

SEQ ID NO: 2501746 - RNA, 19 nt, Artificial Sequence
  Description of Artificial Sequence: Synthetic oligonucleotide
auagcacccagguucugga

SEQ ID NO: 2501747 - RNA, 19 nt, Artificial Sequence
  Description of Artificial Sequence: Synthetic oligonucleotide
aguucuuuggaaaucccaa

SEQ ID NO: 2501748 - RNA, 19 nt, Artificial Sequence
  Description of Artificial Sequence: Synthetic oligonucleotide
aagguccaggaucccagga

SEQ ID NO: 2501749 - RNA, 19 nt, Artificial Sequence
  Description of Artificial Sequence: Synthetic oligonucleotide
cuuaacugauauucuuaca

SEQ ID NO: 2501750 - RNA, 19 nt, Artificial Sequence
  Description of Artificial Sequence: Synthetic oligonucleotide
gcugaaguuaaucuuaacu

SEQ ID NO: 2501751 - RNA, 19 nt, Artificial Sequence
  Description of Artificial Sequence: Synthetic oligonucleotide
ucccaggauagcacccagg

SEQ ID NO: 2501752 - RNA, 19 nt, Artificial Sequence
  Description of Artificial Sequence: Synthetic oligonucleotide
uucuuacaauguauuugaa

SEQ ID NO: 2501753 - RNA, 19 nt, Artificial Sequence
  Description of Artificial Sequence: Synthetic oligonucleotide
agcccaugaagugacgcuc

SEQ ID NO: 2501754 - RNA, 19 nt, Artificial Sequence
  Description of Artificial Sequence: Synthetic oligonucleotide
cuacccaaguguuugugga

SEQ ID NO: 2501755 - RNA, 19 nt, Artificial Sequence
  Description of Artificial Sequence: Synthetic oligonucleotide
gauauucuuacaauguauu

SEQ ID NO: 2501756 - RNA, 19 nt, Artificial Sequence
  Description of Artificial Sequence: Synthetic oligonucleotide
ucuuacuacccaaguguuu

SEQ ID NO: 2501757 - RNA, 19 nt, Artificial Sequence
  Description of Artificial Sequence: Synthetic oligonucleotide
aaguuaaucuuaacugaua

SEQ ID NO: 2501758 - RNA, 19 nt, Artificial Sequence
  Description of Artificial Sequence: Synthetic oligonucleotide
guucagcugaaguuaaucu

SEQ ID NO: 2501759 - RNA, 19 nt, Artificial Sequence
  Description of Artificial Sequence: Synthetic oligonucleotide
gaaguuaaucuuaacugau

SEQ ID NO: 2501760 - RNA, 19 nt, Artificial Sequence
  Description of Artificial Sequence: Synthetic oligonucleotide
uuacuacccaaguguuugu

SEQ ID NO: 2501761 - RNA, 19 nt, Artificial Sequence
  Description of Artificial Sequence: Synthetic oligonucleotide
ccuaguucuuuggaaaucc

SEQ ID NO: 2501762 - RNA, 19 nt, Artificial Sequence
  Description of Artificial Sequence: Synthetic oligonucleotide
uacuacccaaguguuugug

SEQ ID NO: 2501763 - RNA, 19 nt, Artificial Sequence
  Description of Artificial Sequence: Synthetic oligonucleotide
cugauauucuuacaaugua

SEQ ID NO: 2501764 - RNA, 19 nt, Artificial Sequence
  Description of Artificial Sequence: Synthetic oligonucleotide
aucuuaacugauauucuua

SEQ ID NO: 2501765 - RNA, 19 nt, Artificial Sequence
  Description of Artificial Sequence: Synthetic oligonucleotide
agauaauggguaauauuuu

SEQ ID NO: 2501766 - RNA, 19 nt, Artificial Sequence
  Description of Artificial Sequence: Synthetic oligonucleotide
agaacucgcucuuccuagu

SEQ ID NO: 2501767 - RNA, 19 nt, Artificial Sequence
  Description of Artificial Sequence: Synthetic oligonucleotide
ugguguccaugcacuuggg

SEQ ID NO: 2501768 - RNA, 19 nt, Artificial Sequence
  Description of Artificial Sequence: Synthetic oligonucleotide
uccuaguucuuuggaaauc

SEQ ID NO: 2501769 - RNA, 19 nt, Artificial Sequence
  Description of Artificial Sequence: Synthetic oligonucleotide
gguguccaugcacuugggg

SEQ ID NO: 2501770 - RNA, 19 nt, Artificial Sequence
  Description of Artificial Sequence: Synthetic oligonucleotide
uucuggaggcaggaagagc

SEQ ID NO: 2501771 - RNA, 19 nt, Artificial Sequence
  Description of Artificial Sequence: Synthetic oligonucleotide
cauuagauaauggguaaua

SEQ ID NO: 2501772 - RNA, 19 nt, Artificial Sequence
  Description of Artificial Sequence: Synthetic oligonucleotide
ccccaaaaccauuagauaa

SEQ ID NO: 2501773 - RNA, 19 nt, Artificial Sequence
  Description of Artificial Sequence: Synthetic oligonucleotide
ugcgcaugguguccaugca

SEQ ID NO: 2501774 - RNA, 19 nt, Artificial Sequence
  Description of Artificial Sequence: Synthetic oligonucleotide
aucccaggauagcacccag

SEQ ID NO: 2501775 - RNA, 19 nt, Artificial Sequence
  Description of Artificial Sequence: Synthetic oligonucleotide
caugguguccaugcacuug

SEQ ID NO: 2501776 - RNA, 19 nt, Artificial Sequence
  Description of Artificial Sequence: Synthetic oligonucleotide
uccaggaucccaggauagc

SEQ ID NO: 2501777 - RNA, 19 nt, Artificial Sequence
  Description of Artificial Sequence: Synthetic oligonucleotide
ccccuaauucuuacuaccc

SEQ ID NO: 2501778 - RNA, 19 nt, Artificial Sequence
  Description of Artificial Sequence: Synthetic oligonucleotide
ucaggguggcugagcaggu

SEQ ID NO: 2501779 - RNA, 19 nt, Artificial Sequence
  Description of Artificial Sequence: Synthetic oligonucleotide
guuaaucuuaacugauauu

SEQ ID NO: 2501780 - RNA, 19 nt, Artificial Sequence
  Description of Artificial Sequence: Synthetic oligonucleotide
guacuccaugcgcauggug

SEQ ID NO: 2501781 - RNA, 19 nt, Artificial Sequence
  Description of Artificial Sequence: Synthetic oligonucleotide
uccaugcgcauggugucca

SEQ ID NO: 2501782 - RNA, 19 nt, Artificial Sequence
  Description of Artificial Sequence: Synthetic oligonucleotide
guccaugcacuuggggagg

SEQ ID NO: 2501783 - RNA, 19 nt, Artificial Sequence
  Description of Artificial Sequence: Synthetic oligonucleotide
ccaaaaccauuagauaaug

SEQ ID NO: 2501784 - RNA, 19 nt, Artificial Sequence
  Description of Artificial Sequence: Synthetic oligonucleotide
acaauguauuugaaccuuu

SEQ ID NO: 2501785 - RNA, 19 nt, Artificial Sequence
  Description of Artificial Sequence: Synthetic oligonucleotide
ccuaauucuuacuacccaa

SEQ ID NO: 2501786 - RNA, 19 nt, Artificial Sequence
  Description of Artificial Sequence: Synthetic oligonucleotide
aggauagcacccagguucu

SEQ ID NO: 2501787 - RNA, 19 nt, Artificial Sequence
  Description of Artificial Sequence: Synthetic oligonucleotide
gcacccagguucuggaggc

SEQ ID NO: 2501788 - RNA, 19 nt, Artificial Sequence
  Description of Artificial Sequence: Synthetic oligonucleotide
cucuuccuaguucuuugga

SEQ ID NO: 2501789 - RNA, 19 nt, Artificial Sequence
  Description of Artificial Sequence: Synthetic oligonucleotide
uuaccucaggguggcugag

SEQ ID NO: 2501790 - RNA, 19 nt, Artificial Sequence
  Description of Artificial Sequence: Synthetic oligonucleotide
ggagcccaugaagugacgc

SEQ ID NO: 2501791 - RNA, 19 nt, Artificial Sequence
  Description of Artificial Sequence: Synthetic oligonucleotide
cagcugaaguuaaucuuaa

SEQ ID NO: 2501792 - RNA, 19 nt, Artificial Sequence
  Description of Artificial Sequence: Synthetic oligonucleotide
ccuuuuaccucaggguggc

SEQ ID NO: 2501793 - RNA, 19 nt, Artificial Sequence
  Description of Artificial Sequence: Synthetic oligonucleotide
cuccaugcgcauggugucc

SEQ ID NO: 2501794 - RNA, 19 nt, Artificial Sequence
  Description of Artificial Sequence: Synthetic oligonucleotide
gagcccaugaagugacgcu

SEQ ID NO: 2501795 - RNA, 19 nt, Artificial Sequence
  Description of Artificial Sequence: Synthetic oligonucleotide
uaccucaggguggcugagc

SEQ ID NO: 2501796 - RNA, 19 nt, Artificial Sequence
  Description of Artificial Sequence: Synthetic oligonucleotide
ugcacuuggggaggucauc

SEQ ID NO: 2501797 - RNA, 19 nt, Artificial Sequence
  Description of Artificial Sequence: Synthetic oligonucleotide
gcccaugaagugacgcucg

SEQ ID NO: 2501798 - RNA, 19 nt, Artificial Sequence
  Description of Artificial Sequence: Synthetic oligonucleotide
caaaguacuccaugcgcau

SEQ ID NO: 2501799 - RNA, 19 nt, Artificial Sequence
  Description of Artificial Sequence: Synthetic oligonucleotide
uccaugcacuuggggaggu

SEQ ID NO: 2501800 - RNA, 19 nt, Artificial Sequence
  Description of Artificial Sequence: Synthetic oligonucleotide
caauguauuugaaccuuuu

SEQ ID NO: 2501801 - RNA, 19 nt, Artificial Sequence
  Description of Artificial Sequence: Synthetic oligonucleotide
ggaucccaggauagcaccc

SEQ ID NO: 2501802 - RNA, 19 nt, Artificial Sequence
  Description of Artificial Sequence: Synthetic oligonucleotide
ccuccaaaaggugauauua

SEQ ID NO: 2501803 - RNA, 19 nt, Artificial Sequence
  Description of Artificial Sequence: Synthetic oligonucleotide
gguccaggaucccaggaua

SEQ ID NO: 2501804 - RNA, 19 nt, Artificial Sequence
  Description of Artificial Sequence: Synthetic oligonucleotide
caugcgcaugguguccaug

SEQ ID NO: 2501805 - RNA, 19 nt, Artificial Sequence
  Description of Artificial Sequence: Synthetic oligonucleotide
aggcuccccuccaaaaggu

SEQ ID NO: 2501806 - RNA, 19 nt, Artificial Sequence
  Description of Artificial Sequence: Synthetic oligonucleotide
ucgcucuuccuaguucuuu

SEQ ID NO: 2501807 - RNA, 19 nt, Artificial Sequence
  Description of Artificial Sequence: Synthetic oligonucleotide
cccuaauucuuacuaccca

SEQ ID NO: 2501808 - RNA, 19 nt, Artificial Sequence
  Description of Artificial Sequence: Synthetic oligonucleotide
gcgcaugguguccaugcac

SEQ ID NO: 2501809 - RNA, 19 nt, Artificial Sequence
  Description of Artificial Sequence: Synthetic oligonucleotide
ggggagcccaugaagugac

SEQ ID NO: 2501810 - RNA, 19 nt, Artificial Sequence
  Description of Artificial Sequence: Synthetic oligonucleotide
cccagguucuggaggcagg

SEQ ID NO: 2501811 - RNA, 19 nt, Artificial Sequence
  Description of Artificial Sequence: Synthetic oligonucleotide
cgcucuuccuaguucuuug

SEQ ID NO: 2501812 - RNA, 19 nt, Artificial Sequence
  Description of Artificial Sequence: Synthetic oligonucleotide
gaacucgcucuuccuaguu

SEQ ID NO: 2501813 - RNA, 19 nt, Artificial Sequence
  Description of Artificial Sequence: Synthetic oligonucleotide
auguucagcugaaguuaau

SEQ ID NO: 2501814 - RNA, 19 nt, Artificial Sequence
  Description of Artificial Sequence: Synthetic oligonucleotide
gcuccccuccaaaagguga

SEQ ID NO: 2501815 - RNA, 19 nt, Artificial Sequence
  Description of Artificial Sequence: Synthetic oligonucleotide
ccaggaucccaggauagca

SEQ ID NO: 2501816 - RNA, 19 nt, Artificial Sequence
  Description of Artificial Sequence: Synthetic oligonucleotide
cccaaaaccauuagauaau

SEQ ID NO: 2501817 - RNA, 19 nt, Artificial Sequence
  Description of Artificial Sequence: Synthetic oligonucleotide
uccccuccaaaaggugaua

SEQ ID NO: 2501818 - RNA, 19 nt, Artificial Sequence
  Description of Artificial Sequence: Synthetic oligonucleotide
augcacuuggggaggucau

SEQ ID NO: 2501819 - RNA, 19 nt, Artificial Sequence
  Description of Artificial Sequence: Synthetic oligonucleotide
accccggggagcccaugaa

SEQ ID NO: 2501820 - RNA, 19 nt, Artificial Sequence
  Description of Artificial Sequence: Synthetic oligonucleotide
cuccccuccaaaaggugau

SEQ ID NO: 2501821 - RNA, 19 nt, Artificial Sequence
  Description of Artificial Sequence: Synthetic oligonucleotide
ccggggagcccaugaagug

SEQ ID NO: 2501822 - RNA, 19 nt, Artificial Sequence
  Description of Artificial Sequence: Synthetic oligonucleotide
ggcuccccuccaaaaggug

SEQ ID NO: 2501823 - RNA, 19 nt, Artificial Sequence
  Description of Artificial Sequence: Synthetic oligonucleotide
cccaggauagcacccaggu

SEQ ID NO: 2501824 - RNA, 19 nt, Artificial Sequence
  Description of Artificial Sequence: Synthetic oligonucleotide
ggcugagcagguaguucac

SEQ ID NO: 2501825 - RNA, 19 nt, Artificial Sequence
  Description of Artificial Sequence: Synthetic oligonucleotide
caccccggggagcccauga

SEQ ID NO: 2501826 - RNA, 19 nt, Artificial Sequence
  Description of Artificial Sequence: Synthetic oligonucleotide
gggagcccaugaagugacg

SEQ ID NO: 2501827 - RNA, 19 nt, Artificial Sequence
  Description of Artificial Sequence: Synthetic oligonucleotide
cacuuggggaggucaucgu

SEQ ID NO: 2501828 - RNA, 19 nt, Artificial Sequence
  Description of Artificial Sequence: Synthetic oligonucleotide
ggguaauauuuuagaaguu

SEQ ID NO: 2501829 - RNA, 19 nt, Artificial Sequence
  Description of Artificial Sequence: Synthetic oligonucleotide
ggauagcacccagguucug

SEQ ID NO: 2501830 - RNA, 19 nt, Artificial Sequence
  Description of Artificial Sequence: Synthetic oligonucleotide
ccagagccaugacagcaaa

SEQ ID NO: 2501831 - RNA, 19 nt, Artificial Sequence
  Description of Artificial Sequence: Synthetic oligonucleotide
cccggggagcccaugaagu

SEQ ID NO: 2501832 - RNA, 19 nt, Artificial Sequence
  Description of Artificial Sequence: Synthetic oligonucleotide
cagguucuggaggcaggaa

SEQ ID NO: 2501833 - RNA, 19 nt, Artificial Sequence
  Description of Artificial Sequence: Synthetic oligonucleotide
cacccagguucuggaggca

SEQ ID NO: 2501834 - RNA, 19 nt, Artificial Sequence
  Description of Artificial Sequence: Synthetic oligonucleotide
ccauuagauaauggguaau

SEQ ID NO: 2501835 - RNA, 19 nt, Artificial Sequence
  Description of Artificial Sequence: Synthetic oligonucleotide
cucgcucuuccuaguucuu

SEQ ID NO: 2501836 - RNA, 19 nt, Artificial Sequence
  Description of Artificial Sequence: Synthetic oligonucleotide
gguggcugagcagguaguu

SEQ ID NO: 2501837 - RNA, 19 nt, Artificial Sequence
  Description of Artificial Sequence: Synthetic oligonucleotide
gcaugguguccaugcacuu

SEQ ID NO: 2501838 - RNA, 19 nt, Artificial Sequence
  Description of Artificial Sequence: Synthetic oligonucleotide
cgcgccgcaccccggggag

SEQ ID NO: 2501839 - RNA, 19 nt, Artificial Sequence
  Description of Artificial Sequence: Synthetic oligonucleotide
caggguggcugagcaggua

SEQ ID NO: 2501840 - RNA, 19 nt, Artificial Sequence
  Description of Artificial Sequence: Synthetic oligonucleotide
cggggagcccaugaaguga

SEQ ID NO: 2501841 - RNA, 19 nt, Artificial Sequence
  Description of Artificial Sequence: Synthetic oligonucleotide
ggguggcugagcagguagu

SEQ ID NO: 2501842 - RNA, 19 nt, Artificial Sequence
  Description of Artificial Sequence: Synthetic oligonucleotide
ccaugcacuuggggagguc

SEQ ID NO: 2501843 - RNA, 19 nt, Artificial Sequence
  Description of Artificial Sequence: Synthetic oligonucleotide
cgccgcaccccggggagcc

SEQ ID NO: 2501844 - RNA, 19 nt, Artificial Sequence
  Description of Artificial Sequence: Synthetic oligonucleotide
cccuccaaaaggugauauu

SEQ ID NO: 2501845 - RNA, 19 nt, Artificial Sequence
  Description of Artificial Sequence: Synthetic oligonucleotide
ccccuccaaaaggugauau

SEQ ID NO: 2501846 - RNA, 19 nt, Artificial Sequence
  Description of Artificial Sequence: Synthetic oligonucleotide
ccaggauagcacccagguu

SEQ ID NO: 2501847 - RNA, 19 nt, Artificial Sequence
  Description of Artificial Sequence: Synthetic oligonucleotide
gcaccccggggagcccaug

SEQ ID NO: 2501848 - RNA, 19 nt, Artificial Sequence
  Description of Artificial Sequence: Synthetic oligonucleotide
gccgcaccccggggagccc

SEQ ID NO: 2501849 - RNA, 19 nt, Artificial Sequence
  Description of Artificial Sequence: Synthetic oligonucleotide
ccgcaccccggggagccca

SEQ ID NO: 2501850 - RNA, 19 nt, Artificial Sequence
  Description of Artificial Sequence: Synthetic oligonucleotide
ccaugcgcaugguguccau

SEQ ID NO: 2501851 - RNA, 19 nt, Artificial Sequence
  Description of Artificial Sequence: Synthetic oligonucleotide
cgcaccccggggagcccau

SEQ ID NO: 2501852 - RNA, 19 nt, Artificial Sequence
  Description of Artificial Sequence: Synthetic oligonucleotide
ugguauaccaccuuugugg

SEQ ID NO: 2501853 - RNA, 19 nt, Artificial Sequence
  Description of Artificial Sequence: Synthetic oligonucleotide
auuccuaaagucaacaugc

SEQ ID NO: 2501854 - RNA, 19 nt, Artificial Sequence
  Description of Artificial Sequence: Synthetic oligonucleotide
uguaccauggguaccaagg

SEQ ID NO: 2501855 - RNA, 19 nt, Artificial Sequence
  Description of Artificial Sequence: Synthetic oligonucleotide
ucuccugacaacaacgugg

SEQ ID NO: 2501856 - RNA, 19 nt, Artificial Sequence
  Description of Artificial Sequence: Synthetic oligonucleotide
aaagucaacaugcaacuug

SEQ ID NO: 2501857 - RNA, 19 nt, Artificial Sequence
  Description of Artificial Sequence: Synthetic oligonucleotide
agauuuccuugauagagcc

SEQ ID NO: 2501858 - RNA, 19 nt, Artificial Sequence
  Description of Artificial Sequence: Synthetic oligonucleotide
aaacaaacuguuccaagag

SEQ ID NO: 2501859 - RNA, 19 nt, Artificial Sequence
  Description of Artificial Sequence: Synthetic oligonucleotide
aagaguuucacauuccuaa

SEQ ID NO: 2501860 - RNA, 19 nt, Artificial Sequence
  Description of Artificial Sequence: Synthetic oligonucleotide
auauuuccaagguucauuc

SEQ ID NO: 2501861 - RNA, 19 nt, Artificial Sequence
  Description of Artificial Sequence: Synthetic oligonucleotide
aagguucauucucauaggg

SEQ ID NO: 2501862 - RNA, 19 nt, Artificial Sequence
  Description of Artificial Sequence: Synthetic oligonucleotide
uuucacauuccuaaaguca

SEQ ID NO: 2501863 - RNA, 19 nt, Artificial Sequence
  Description of Artificial Sequence: Synthetic oligonucleotide
ucugguauucuucugaauc

SEQ ID NO: 2501864 - RNA, 19 nt, Artificial Sequence
  Description of Artificial Sequence: Synthetic oligonucleotide
uugugaucccggcagaugg

SEQ ID NO: 2501865 - RNA, 19 nt, Artificial Sequence
  Description of Artificial Sequence: Synthetic oligonucleotide
uucucauagggagaaaugg

SEQ ID NO: 2501866 - RNA, 19 nt, Artificial Sequence
  Description of Artificial Sequence: Synthetic oligonucleotide
uguuccaagaguuucacau

SEQ ID NO: 2501867 - RNA, 19 nt, Artificial Sequence
  Description of Artificial Sequence: Synthetic oligonucleotide
gaugauacccgugugggcg

SEQ ID NO: 2501868 - RNA, 19 nt, Artificial Sequence
  Description of Artificial Sequence: Synthetic oligonucleotide
aagaugauacccguguggg

SEQ ID NO: 2501869 - RNA, 19 nt, Artificial Sequence
  Description of Artificial Sequence: Synthetic oligonucleotide
ucaacaugcaacuugugau

SEQ ID NO: 2501870 - RNA, 19 nt, Artificial Sequence
  Description of Artificial Sequence: Synthetic oligonucleotide
uauaccaccuuugugguug

SEQ ID NO: 2501871 - RNA, 19 nt, Artificial Sequence
  Description of Artificial Sequence: Synthetic oligonucleotide
gguucauucucauagggag

SEQ ID NO: 2501872 - RNA, 19 nt, Artificial Sequence
  Description of Artificial Sequence: Synthetic oligonucleotide
uacgaauacacgucuuccg

SEQ ID NO: 2501873 - RNA, 19 nt, Artificial Sequence
  Description of Artificial Sequence: Synthetic oligonucleotide
ugugcugcuucauacagac

SEQ ID NO: 2501874 - RNA, 19 nt, Artificial Sequence
  Description of Artificial Sequence: Synthetic oligonucleotide
gaauccagauauuuccaag

SEQ ID NO: 2501875 - RNA, 19 nt, Artificial Sequence
  Description of Artificial Sequence: Synthetic oligonucleotide
aacaaacuguuccaagagu

SEQ ID NO: 2501876 - RNA, 19 nt, Artificial Sequence
  Description of Artificial Sequence: Synthetic oligonucleotide
agucagcccaaacagggcg

SEQ ID NO: 2501877 - RNA, 19 nt, Artificial Sequence
  Description of Artificial Sequence: Synthetic oligonucleotide
acgaauacacgucuuccgg

SEQ ID NO: 2501878 - RNA, 19 nt, Artificial Sequence
  Description of Artificial Sequence: Synthetic oligonucleotide
gauagagccggcgaaggcg

SEQ ID NO: 2501879 - RNA, 19 nt, Artificial Sequence
  Description of Artificial Sequence: Synthetic oligonucleotide
auacacgucuuccgggucc

SEQ ID NO: 2501880 - RNA, 19 nt, Artificial Sequence
  Description of Artificial Sequence: Synthetic oligonucleotide
agcccaucugcucaguggc

SEQ ID NO: 2501881 - RNA, 19 nt, Artificial Sequence
  Description of Artificial Sequence: Synthetic oligonucleotide
uuuacgaauacacgucuuc

SEQ ID NO: 2501882 - RNA, 19 nt, Artificial Sequence
  Description of Artificial Sequence: Synthetic oligonucleotide
guagucagcccaaacaggg

SEQ ID NO: 2501883 - RNA, 19 nt, Artificial Sequence
  Description of Artificial Sequence: Synthetic oligonucleotide
auggguaccaagguucucc

SEQ ID NO: 2501884 - RNA, 19 nt, Artificial Sequence
  Description of Artificial Sequence: Synthetic oligonucleotide
cugguauucuucugaaucc

SEQ ID NO: 2501885 - RNA, 19 nt, Artificial Sequence
  Description of Artificial Sequence: Synthetic oligonucleotide
uuuggugcaaagagcccgg

SEQ ID NO: 2501886 - RNA, 19 nt, Artificial Sequence
  Description of Artificial Sequence: Synthetic oligonucleotide
cauuccuaaagucaacaug

SEQ ID NO: 2501887 - RNA, 19 nt, Artificial Sequence
  Description of Artificial Sequence: Synthetic oligonucleotide
aauacacgucuuccggguc

SEQ ID NO: 2501888 - RNA, 19 nt, Artificial Sequence
  Description of Artificial Sequence: Synthetic oligonucleotide
aggacagggaaccuucuuc

SEQ ID NO: 2501889 - RNA, 19 nt, Artificial Sequence
  Description of Artificial Sequence: Synthetic oligonucleotide
gaacguaguaccugaggag

SEQ ID NO: 2501890 - RNA, 19 nt, Artificial Sequence
  Description of Artificial Sequence: Synthetic oligonucleotide
ugugggcgcaaacaaacug

SEQ ID NO: 2501891 - RNA, 19 nt, Artificial Sequence
  Description of Artificial Sequence: Synthetic oligonucleotide
cauagggagaaauggggag

SEQ ID NO: 2501892 - RNA, 19 nt, Artificial Sequence
  Description of Artificial Sequence: Synthetic oligonucleotide
ccuaaagucaacaugcaac

SEQ ID NO: 2501893 - RNA, 19 nt, Artificial Sequence
  Description of Artificial Sequence: Synthetic oligonucleotide
agcgugugagcccaggagg

SEQ ID NO: 2501894 - RNA, 19 nt, Artificial Sequence
  Description of Artificial Sequence: Synthetic oligonucleotide
aacguaguaccugaggaga

SEQ ID NO: 2501895 - RNA, 19 nt, Artificial Sequence
  Description of Artificial Sequence: Synthetic oligonucleotide
ccaagguucauucucauag

SEQ ID NO: 2501896 - RNA, 19 nt, Artificial Sequence
  Description of Artificial Sequence: Synthetic oligonucleotide
cuuuggugcaaagagcccg

SEQ ID NO: 2501897 - RNA, 19 nt, Artificial Sequence
  Description of Artificial Sequence: Synthetic oligonucleotide
accugaggagaccauacuc

SEQ ID NO: 2501898 - RNA, 19 nt, Artificial Sequence
  Description of Artificial Sequence: Synthetic oligonucleotide
ggcaucaucgacucggugg

SEQ ID NO: 2501899 - RNA, 19 nt, Artificial Sequence
  Description of Artificial Sequence: Synthetic oligonucleotide
ucgggcaucaucgacucgg

SEQ ID NO: 2501900 - RNA, 19 nt, Artificial Sequence
  Description of Artificial Sequence: Synthetic oligonucleotide
uucacagguccuaagcacu

SEQ ID NO: 2501901 - RNA, 19 nt, Artificial Sequence
  Description of Artificial Sequence: Synthetic oligonucleotide
ggcgcaaacaaacuguucc

SEQ ID NO: 2501902 - RNA, 19 nt, Artificial Sequence
  Description of Artificial Sequence: Synthetic oligonucleotide
acagggaaccuucuucagg

SEQ ID NO: 2501903 - RNA, 19 nt, Artificial Sequence
  Description of Artificial Sequence: Synthetic oligonucleotide
cagggcgagagccauagcg

SEQ ID NO: 2501904 - RNA, 19 nt, Artificial Sequence
  Description of Artificial Sequence: Synthetic oligonucleotide
uuacgaauacacgucuucc

SEQ ID NO: 2501905 - RNA, 19 nt, Artificial Sequence
  Description of Artificial Sequence: Synthetic oligonucleotide
uuccccaguucacaggucc

SEQ ID NO: 2501906 - RNA, 19 nt, Artificial Sequence
  Description of Artificial Sequence: Synthetic oligonucleotide
uucuugugcugcuucauac

SEQ ID NO: 2501907 - RNA, 19 nt, Artificial Sequence
  Description of Artificial Sequence: Synthetic oligonucleotide
cauacagacuccuguguag

SEQ ID NO: 2501908 - RNA, 19 nt, Artificial Sequence
  Description of Artificial Sequence: Synthetic oligonucleotide
agaugauacccgugugggc

SEQ ID NO: 2501909 - RNA, 19 nt, Artificial Sequence
  Description of Artificial Sequence: Synthetic oligonucleotide
ggcggagugacacugacag

SEQ ID NO: 2501910 - RNA, 19 nt, Artificial Sequence
  Description of Artificial Sequence: Synthetic oligonucleotide
uucuaggagauuuccuuga

SEQ ID NO: 2501911 - RNA, 19 nt, Artificial Sequence
  Description of Artificial Sequence: Synthetic oligonucleotide
gugcaaagagcccggaggg

SEQ ID NO: 2501912 - RNA, 19 nt, Artificial Sequence
  Description of Artificial Sequence: Synthetic oligonucleotide
ugaggucagugucucgggg

SEQ ID NO: 2501913 - RNA, 19 nt, Artificial Sequence
  Description of Artificial Sequence: Synthetic oligonucleotide
aacagggcgagagccauag

SEQ ID NO: 2501914 - RNA, 19 nt, Artificial Sequence
  Description of Artificial Sequence: Synthetic oligonucleotide
aagucaacaugcaacuugu

SEQ ID NO: 2501915 - RNA, 19 nt, Artificial Sequence
  Description of Artificial Sequence: Synthetic oligonucleotide
caagguucauucucauagg

SEQ ID NO: 2501916 - RNA, 19 nt, Artificial Sequence
  Description of Artificial Sequence: Synthetic oligonucleotide
acaugcaacuugugauccc

SEQ ID NO: 2501917 - RNA, 19 nt, Artificial Sequence
  Description of Artificial Sequence: Synthetic oligonucleotide
ugaauccagauauuuccaa

SEQ ID NO: 2501918 - RNA, 19 nt, Artificial Sequence
  Description of Artificial Sequence: Synthetic oligonucleotide
cugaggagaccauacuccc

SEQ ID NO: 2501919 - RNA, 19 nt, Artificial Sequence
  Description of Artificial Sequence: Synthetic oligonucleotide
ucauacagacuccugugua

SEQ ID NO: 2501920 - RNA, 19 nt, Artificial Sequence
  Description of Artificial Sequence: Synthetic oligonucleotide
guugcugccagcuguacca

SEQ ID NO: 2501921 - RNA, 19 nt, Artificial Sequence
  Description of Artificial Sequence: Synthetic oligonucleotide
caugcaacuugugaucccg

SEQ ID NO: 2501922 - RNA, 19 nt, Artificial Sequence
  Description of Artificial Sequence: Synthetic oligonucleotide
gagauuuccuugauagagc

SEQ ID NO: 2501923 - RNA, 19 nt, Artificial Sequence
  Description of Artificial Sequence: Synthetic oligonucleotide
ugugaucccggcagauggg

SEQ ID NO: 2501924 - RNA, 19 nt, Artificial Sequence
  Description of Artificial Sequence: Synthetic oligonucleotide
uccaagaguuucacauucc

SEQ ID NO: 2501925 - RNA, 19 nt, Artificial Sequence
  Description of Artificial Sequence: Synthetic oligonucleotide
augauacccgugugggcgc

SEQ ID NO: 2501926 - RNA, 19 nt, Artificial Sequence
  Description of Artificial Sequence: Synthetic oligonucleotide
gagcccaucugcucagugg

SEQ ID NO: 2501927 - RNA, 19 nt, Artificial Sequence
  Description of Artificial Sequence: Synthetic oligonucleotide
ggaacuucgccagaggccg

SEQ ID NO: 2501928 - RNA, 19 nt, Artificial Sequence
  Description of Artificial Sequence: Synthetic oligonucleotide
uccuaaagucaacaugcaa

SEQ ID NO: 2501929 - RNA, 19 nt, Artificial Sequence
  Description of Artificial Sequence: Synthetic oligonucleotide
ucuugugcugcuucauaca

SEQ ID NO: 2501930 - RNA, 19 nt, Artificial Sequence
  Description of Artificial Sequence: Synthetic oligonucleotide
uccuugauagagccggcga

SEQ ID NO: 2501931 - RNA, 19 nt, Artificial Sequence
  Description of Artificial Sequence: Synthetic oligonucleotide
acuguuccaagaguuucac

SEQ ID NO: 2501932 - RNA, 19 nt, Artificial Sequence
  Description of Artificial Sequence: Synthetic oligonucleotide
uucuccugacaacaacgug

SEQ ID NO: 2501933 - RNA, 19 nt, Artificial Sequence
  Description of Artificial Sequence: Synthetic oligonucleotide
agcggugggcaucucgggc

SEQ ID NO: 2501934 - RNA, 19 nt, Artificial Sequence
  Description of Artificial Sequence: Synthetic oligonucleotide
cuaaagucaacaugcaacu

SEQ ID NO: 2501935 - RNA, 19 nt, Artificial Sequence
  Description of Artificial Sequence: Synthetic oligonucleotide
ugauagagccggcgaaggc

SEQ ID NO: 2501936 - RNA, 19 nt, Artificial Sequence
  Description of Artificial Sequence: Synthetic oligonucleotide
augggcaguacugagguca

SEQ ID NO: 2501937 - RNA, 19 nt, Artificial Sequence
  Description of Artificial Sequence: Synthetic oligonucleotide
gguucuccugacaacaacg

SEQ ID NO: 2501938 - RNA, 19 nt, Artificial Sequence
  Description of Artificial Sequence: Synthetic oligonucleotide
cucgaacuggggaacguag

SEQ ID NO: 2501939 - RNA, 19 nt, Artificial Sequence
  Description of Artificial Sequence: Synthetic oligonucleotide
gaggucagugucucggggc

SEQ ID NO: 2501940 - RNA, 19 nt, Artificial Sequence
  Description of Artificial Sequence: Synthetic oligonucleotide
uggggaacguaguaccuga

SEQ ID NO: 2501941 - RNA, 19 nt, Artificial Sequence
  Description of Artificial Sequence: Synthetic oligonucleotide
uucgccagaggccggggag

SEQ ID NO: 2501942 - RNA, 19 nt, Artificial Sequence
  Description of Artificial Sequence: Synthetic oligonucleotide
uggcgguuucugcuggugg

SEQ ID NO: 2501943 - RNA, 19 nt, Artificial Sequence
  Description of Artificial Sequence: Synthetic oligonucleotide
ugcaacuugugaucccggc

SEQ ID NO: 2501944 - RNA, 19 nt, Artificial Sequence
  Description of Artificial Sequence: Synthetic oligonucleotide
gcaucaucgacucgguggg

SEQ ID NO: 2501945 - RNA, 19 nt, Artificial Sequence
  Description of Artificial Sequence: Synthetic oligonucleotide
gauuuccuugauagagccg

SEQ ID NO: 2501946 - RNA, 19 nt, Artificial Sequence
  Description of Artificial Sequence: Synthetic oligonucleotide
ggaacguaguaccugagga

SEQ ID NO: 2501947 - RNA, 19 nt, Artificial Sequence
  Description of Artificial Sequence: Synthetic oligonucleotide
uuuuacgaauacacgucuu

SEQ ID NO: 2501948 - RNA, 19 nt, Artificial Sequence
  Description of Artificial Sequence: Synthetic oligonucleotide
uccuaagcacucugggagc

SEQ ID NO: 2501949 - RNA, 19 nt, Artificial Sequence
  Description of Artificial Sequence: Synthetic oligonucleotide
uggagcggugggcaucucg

SEQ ID NO: 2501950 - RNA, 19 nt, Artificial Sequence
  Description of Artificial Sequence: Synthetic oligonucleotide
cuugauagagccggcgaag

SEQ ID NO: 2501951 - RNA, 19 nt, Artificial Sequence
  Description of Artificial Sequence: Synthetic oligonucleotide
accuuugugguugcggcgg

SEQ ID NO: 2501952 - RNA, 19 nt, Artificial Sequence
  Description of Artificial Sequence: Synthetic oligonucleotide
aaggcgggacaguucucuc

SEQ ID NO: 2501953 - RNA, 19 nt, Artificial Sequence
  Description of Artificial Sequence: Synthetic oligonucleotide
ugcggcgguagucagccca

SEQ ID NO: 2501954 - RNA, 19 nt, Artificial Sequence
  Description of Artificial Sequence: Synthetic oligonucleotide
aaagagcccggaggggaac

SEQ ID NO: 2501955 - RNA, 19 nt, Artificial Sequence
  Description of Artificial Sequence: Synthetic oligonucleotide
gacagggaaccuucuucag

SEQ ID NO: 2501956 - RNA, 19 nt, Artificial Sequence
  Description of Artificial Sequence: Synthetic oligonucleotide
gggccuuuggugcaaagag

SEQ ID NO: 2501957 - RNA, 19 nt, Artificial Sequence
  Description of Artificial Sequence: Synthetic oligonucleotide
ucucggggcucgaacuggg

SEQ ID NO: 2501958 - RNA, 19 nt, Artificial Sequence
  Description of Artificial Sequence: Synthetic oligonucleotide
auagagccggcgaaggcgg

SEQ ID NO: 2501959 - RNA, 19 nt, Artificial Sequence
  Description of Artificial Sequence: Synthetic oligonucleotide
ucuaggagauuuccuugau

SEQ ID NO: 2501960 - RNA, 19 nt, Artificial Sequence
  Description of Artificial Sequence: Synthetic oligonucleotide
aacuugugaucccggcaga

SEQ ID NO: 2501961 - RNA, 19 nt, Artificial Sequence
  Description of Artificial Sequence: Synthetic oligonucleotide
agaguuucacauuccuaaa

SEQ ID NO: 2501962 - RNA, 19 nt, Artificial Sequence
  Description of Artificial Sequence: Synthetic oligonucleotide
auaccaccuuugugguugc

SEQ ID NO: 2501963 - RNA, 19 nt, Artificial Sequence
  Description of Artificial Sequence: Synthetic oligonucleotide
guugcggcgguagucagcc

SEQ ID NO: 2501964 - RNA, 19 nt, Artificial Sequence
  Description of Artificial Sequence: Synthetic oligonucleotide
agcccaaacagggcgagag

SEQ ID NO: 2501965 - RNA, 19 nt, Artificial Sequence
  Description of Artificial Sequence: Synthetic oligonucleotide
uugugcugcuucauacaga

SEQ ID NO: 2501966 - RNA, 19 nt, Artificial Sequence
  Description of Artificial Sequence: Synthetic oligonucleotide
ugcuucauacagacuccug

SEQ ID NO: 2501967 - RNA, 19 nt, Artificial Sequence
  Description of Artificial Sequence: Synthetic oligonucleotide
uggugcaaagagcccggag

SEQ ID NO: 2501968 - RNA, 19 nt, Artificial Sequence
  Description of Artificial Sequence: Synthetic oligonucleotide
ucgaacuggggaacguagu

SEQ ID NO: 2501969 - RNA, 19 nt, Artificial Sequence
  Description of Artificial Sequence: Synthetic oligonucleotide
auucucauagggagaaaug

SEQ ID NO: 2501970 - RNA, 19 nt, Artificial Sequence
  Description of Artificial Sequence: Synthetic oligonucleotide
caguacugaggucaguguc

SEQ ID NO: 2501971 - RNA, 19 nt, Artificial Sequence
  Description of Artificial Sequence: Synthetic oligonucleotide
uuuccuugauagagccggc

SEQ ID NO: 2501972 - RNA, 19 nt, Artificial Sequence
  Description of Artificial Sequence: Synthetic oligonucleotide
ugaggagaccauacucccu

SEQ ID NO: 2501973 - RNA, 19 nt, Artificial Sequence
  Description of Artificial Sequence: Synthetic oligonucleotide
gaacuggggaacguaguac

SEQ ID NO: 2501974 - RNA, 19 nt, Artificial Sequence
  Description of Artificial Sequence: Synthetic oligonucleotide
aacuucgccagaggccggg

SEQ ID NO: 2501975 - RNA, 19 nt, Artificial Sequence
  Description of Artificial Sequence: Synthetic oligonucleotide
agaccauacucccuggcuu

SEQ ID NO: 2501976 - RNA, 19 nt, Artificial Sequence
  Description of Artificial Sequence: Synthetic oligonucleotide
auucuucugaauccagaua

SEQ ID NO: 2501977 - RNA, 19 nt, Artificial Sequence
  Description of Artificial Sequence: Synthetic oligonucleotide
agcgguucugguauucuuc

SEQ ID NO: 2501978 - RNA, 19 nt, Artificial Sequence
  Description of Artificial Sequence: Synthetic oligonucleotide
cugaauccagauauuucca

SEQ ID NO: 2501979 - RNA, 19 nt, Artificial Sequence
  Description of Artificial Sequence: Synthetic oligonucleotide
ugugagcccaggaggcagc

SEQ ID NO: 2501980 - RNA, 19 nt, Artificial Sequence
  Description of Artificial Sequence: Synthetic oligonucleotide
ugcaaagagcccggagggg

SEQ ID NO: 2501981 - RNA, 19 nt, Artificial Sequence
  Description of Artificial Sequence: Synthetic oligonucleotide
ugggcaguacugaggucag

SEQ ID NO: 2501982 - RNA, 19 nt, Artificial Sequence
  Description of Artificial Sequence: Synthetic oligonucleotide
gaauacacgucuuccgggu

SEQ ID NO: 2501983 - RNA, 19 nt, Artificial Sequence
  Description of Artificial Sequence: Synthetic oligonucleotide
agggcgagagccauagcgg

SEQ ID NO: 2501984 - RNA, 19 nt, Artificial Sequence
  Description of Artificial Sequence: Synthetic oligonucleotide
gggaacguaguaccugagg

SEQ ID NO: 2501985 - RNA, 19 nt, Artificial Sequence
  Description of Artificial Sequence: Synthetic oligonucleotide
uaccugaggagaccauacu

SEQ ID NO: 2501986 - RNA, 19 nt, Artificial Sequence
  Description of Artificial Sequence: Synthetic oligonucleotide
gcugcggugguauaccacc

SEQ ID NO: 2501987 - RNA, 19 nt, Artificial Sequence
  Description of Artificial Sequence: Synthetic oligonucleotide
caagguucuccugacaaca

SEQ ID NO: 2501988 - RNA, 19 nt, Artificial Sequence
  Description of Artificial Sequence: Synthetic oligonucleotide
ucggggcucgaacugggga

SEQ ID NO: 2501989 - RNA, 19 nt, Artificial Sequence
  Description of Artificial Sequence: Synthetic oligonucleotide
agccucagcagcgugugag

SEQ ID NO: 2501990 - RNA, 19 nt, Artificial Sequence
  Description of Artificial Sequence: Synthetic oligonucleotide
gaucccggcagauggggca

SEQ ID NO: 2501991 - RNA, 19 nt, Artificial Sequence
  Description of Artificial Sequence: Synthetic oligonucleotide
ugaucccggcagauggggc

SEQ ID NO: 2501992 - RNA, 19 nt, Artificial Sequence
  Description of Artificial Sequence: Synthetic oligonucleotide
gccgcuuucuucuaggaga

SEQ ID NO: 2501993 - RNA, 19 nt, Artificial Sequence
  Description of Artificial Sequence: Synthetic oligonucleotide
uggggcaaggguucccagc

SEQ ID NO: 2501994 - RNA, 19 nt, Artificial Sequence
  Description of Artificial Sequence: Synthetic oligonucleotide
ucccggggaacuucgccag

SEQ ID NO: 2501995 - RNA, 19 nt, Artificial Sequence
  Description of Artificial Sequence: Synthetic oligonucleotide
acguaguaccugaggagac

SEQ ID NO: 2501996 - RNA, 19 nt, Artificial Sequence
  Description of Artificial Sequence: Synthetic oligonucleotide
caccuuugugguugcggcg

SEQ ID NO: 2501997 - RNA, 19 nt, Artificial Sequence
  Description of Artificial Sequence: Synthetic oligonucleotide
uaagcacucugggagccca

SEQ ID NO: 2501998 - RNA, 19 nt, Artificial Sequence
  Description of Artificial Sequence: Synthetic oligonucleotide
gguagucagcccaaacagg

SEQ ID NO: 2501999 - RNA, 19 nt, Artificial Sequence
  Description of Artificial Sequence: Synthetic oligonucleotide
uaccauggguaccaagguu

SEQ ID NO: 2502000 - RNA, 19 nt, Artificial Sequence
  Description of Artificial Sequence: Synthetic oligonucleotide
agcuguaccauggguacca

SEQ ID NO: 2502001 - RNA, 19 nt, Artificial Sequence
  Description of Artificial Sequence: Synthetic oligonucleotide
guuucugcugguggagcgg

SEQ ID NO: 2502002 - RNA, 19 nt, Artificial Sequence
  Description of Artificial Sequence: Synthetic oligonucleotide
uggguaccaagguucuccu

SEQ ID NO: 2502003 - RNA, 19 nt, Artificial Sequence
  Description of Artificial Sequence: Synthetic oligonucleotide
uccugacaacaacgugggg

SEQ ID NO: 2502004 - RNA, 19 nt, Artificial Sequence
  Description of Artificial Sequence: Synthetic oligonucleotide
uacugaggucagugucucg

SEQ ID NO: 2502005 - RNA, 19 nt, Artificial Sequence
  Description of Artificial Sequence: Synthetic oligonucleotide
guauucuucugaauccaga

SEQ ID NO: 2502006 - RNA, 19 nt, Artificial Sequence
  Description of Artificial Sequence: Synthetic oligonucleotide
cacauuccuaaagucaaca

SEQ ID NO: 2502007 - RNA, 19 nt, Artificial Sequence
  Description of Artificial Sequence: Synthetic oligonucleotide
gggaaccuucuucagggcc

SEQ ID NO: 2502008 - RNA, 19 nt, Artificial Sequence
  Description of Artificial Sequence: Synthetic oligonucleotide
ugggcgcaaacaaacuguu

SEQ ID NO: 2502009 - RNA, 19 nt, Artificial Sequence
  Description of Artificial Sequence: Synthetic oligonucleotide
gugaucccggcagaugggg

SEQ ID NO: 2502010 - RNA, 19 nt, Artificial Sequence
  Description of Artificial Sequence: Synthetic oligonucleotide
guaccaagguucuccugac

SEQ ID NO: 2502011 - RNA, 19 nt, Artificial Sequence
  Description of Artificial Sequence: Synthetic oligonucleotide
ucagcccaaacagggcgag

SEQ ID NO: 2502012 - RNA, 19 nt, Artificial Sequence
  Description of Artificial Sequence: Synthetic oligonucleotide
guaccugaggagaccauac

SEQ ID NO: 2502013 - RNA, 19 nt, Artificial Sequence
  Description of Artificial Sequence: Synthetic oligonucleotide
guaguaccugaggagacca

SEQ ID NO: 2502014 - RNA, 19 nt, Artificial Sequence
  Description of Artificial Sequence: Synthetic oligonucleotide
ggcguggaagaugauaccc

SEQ ID NO: 2502015 - RNA, 19 nt, Artificial Sequence
  Description of Artificial Sequence: Synthetic oligonucleotide
cagcgugugagcccaggag

SEQ ID NO: 2502016 - RNA, 19 nt, Artificial Sequence
  Description of Artificial Sequence: Synthetic oligonucleotide
agguucauucucauaggga

SEQ ID NO: 2502017 - RNA, 19 nt, Artificial Sequence
  Description of Artificial Sequence: Synthetic oligonucleotide
ggggcaaggguucccagcc

SEQ ID NO: 2502018 - RNA, 19 nt, Artificial Sequence
  Description of Artificial Sequence: Synthetic oligonucleotide
ggacagggaaccuucuuca

SEQ ID NO: 2502019 - RNA, 19 nt, Artificial Sequence
  Description of Artificial Sequence: Synthetic oligonucleotide
ugggagcccaucugcucag

SEQ ID NO: 2502020 - RNA, 19 nt, Artificial Sequence
  Description of Artificial Sequence: Synthetic oligonucleotide
cauacucccuggcuuucug

SEQ ID NO: 2502021 - RNA, 19 nt, Artificial Sequence
  Description of Artificial Sequence: Synthetic oligonucleotide
ggcaguacugaggucagug

SEQ ID NO: 2502022 - RNA, 19 nt, Artificial Sequence
  Description of Artificial Sequence: Synthetic oligonucleotide
caucucgggcaucaucgac

SEQ ID NO: 2502023 - RNA, 19 nt, Artificial Sequence
  Description of Artificial Sequence: Synthetic oligonucleotide
uccaagguucauucucaua

SEQ ID NO: 2502024 - RNA, 19 nt, Artificial Sequence
  Description of Artificial Sequence: Synthetic oligonucleotide
gagaccauacucccuggcu

SEQ ID NO: 2502025 - RNA, 19 nt, Artificial Sequence
  Description of Artificial Sequence: Synthetic oligonucleotide
ucuuccggguccgcugcgg

SEQ ID NO: 2502026 - RNA, 19 nt, Artificial Sequence
  Description of Artificial Sequence: Synthetic oligonucleotide
ggggcguggaagaugauac

SEQ ID NO: 2502027 - RNA, 19 nt, Artificial Sequence
  Description of Artificial Sequence: Synthetic oligonucleotide
uccgcugcggugguauacc

SEQ ID NO: 2502028 - RNA, 19 nt, Artificial Sequence
  Description of Artificial Sequence: Synthetic oligonucleotide
cuugugaucccggcagaug

SEQ ID NO: 2502029 - RNA, 19 nt, Artificial Sequence
  Description of Artificial Sequence: Synthetic oligonucleotide
agccauagcgguucuggua

SEQ ID NO: 2502030 - RNA, 19 nt, Artificial Sequence
  Description of Artificial Sequence: Synthetic oligonucleotide
cgaauacacgucuuccggg

SEQ ID NO: 2502031 - RNA, 19 nt, Artificial Sequence
  Description of Artificial Sequence: Synthetic oligonucleotide
ccagcuguaccauggguac

SEQ ID NO: 2502032 - RNA, 19 nt, Artificial Sequence
  Description of Artificial Sequence: Synthetic oligonucleotide
ccaccuuugugguugcggc

SEQ ID NO: 2502033 - RNA, 19 nt, Artificial Sequence
  Description of Artificial Sequence: Synthetic oligonucleotide
agauauuuccaagguucau

SEQ ID NO: 2502034 - RNA, 19 nt, Artificial Sequence
  Description of Artificial Sequence: Synthetic oligonucleotide
caagaguuucacauuccua

SEQ ID NO: 2502035 - RNA, 19 nt, Artificial Sequence
  Description of Artificial Sequence: Synthetic oligonucleotide
ugguugcggcgguagucag

SEQ ID NO: 2502036 - RNA, 19 nt, Artificial Sequence
  Description of Artificial Sequence: Synthetic oligonucleotide
uccccaguucacagguccu

SEQ ID NO: 2502037 - RNA, 19 nt, Artificial Sequence
  Description of Artificial Sequence: Synthetic oligonucleotide
aaggguucccagccacuuu

SEQ ID NO: 2502038 - RNA, 19 nt, Artificial Sequence
  Description of Artificial Sequence: Synthetic oligonucleotide
acagggcgagagccauagc

SEQ ID NO: 2502039 - RNA, 19 nt, Artificial Sequence
  Description of Artificial Sequence: Synthetic oligonucleotide
uggugguugcugccagcug

SEQ ID NO: 2502040 - RNA, 19 nt, Artificial Sequence
  Description of Artificial Sequence: Synthetic oligonucleotide
caguggcgguuucugcugg

SEQ ID NO: 2502041 - RNA, 19 nt, Artificial Sequence
  Description of Artificial Sequence: Synthetic oligonucleotide
agugacacugacagcucca

SEQ ID NO: 2502042 - RNA, 19 nt, Artificial Sequence
  Description of Artificial Sequence: Synthetic oligonucleotide
aguaccugaggagaccaua

SEQ ID NO: 2502043 - RNA, 19 nt, Artificial Sequence
  Description of Artificial Sequence: Synthetic oligonucleotide
guucccagccacuuuauuu

SEQ ID NO: 2502044 - RNA, 19 nt, Artificial Sequence
  Description of Artificial Sequence: Synthetic oligonucleotide
gauggggcaaggguuccca

SEQ ID NO: 2502045 - RNA, 19 nt, Artificial Sequence
  Description of Artificial Sequence: Synthetic oligonucleotide
gcguggaagaugauacccg

SEQ ID NO: 2502046 - RNA, 19 nt, Artificial Sequence
  Description of Artificial Sequence: Synthetic oligonucleotide
cgugugggcgcaaacaaac

SEQ ID NO: 2502047 - RNA, 19 nt, Artificial Sequence
  Description of Artificial Sequence: Synthetic oligonucleotide
uugugguugcggcgguagu

SEQ ID NO: 2502048 - RNA, 19 nt, Artificial Sequence
  Description of Artificial Sequence: Synthetic oligonucleotide
auagcgguucugguauucu

SEQ ID NO: 2502049 - RNA, 19 nt, Artificial Sequence
  Description of Artificial Sequence: Synthetic oligonucleotide
cgguagucagcccaaacag

SEQ ID NO: 2502050 - RNA, 19 nt, Artificial Sequence
  Description of Artificial Sequence: Synthetic oligonucleotide
cuggggaacguaguaccug

SEQ ID NO: 2502051 - RNA, 19 nt, Artificial Sequence
  Description of Artificial Sequence: Synthetic oligonucleotide
gucucggggcucgaacugg

SEQ ID NO: 2502052 - RNA, 19 nt, Artificial Sequence
  Description of Artificial Sequence: Synthetic oligonucleotide
augcaacuugugaucccgg

SEQ ID NO: 2502053 - RNA, 19 nt, Artificial Sequence
  Description of Artificial Sequence: Synthetic oligonucleotide
agggccuuuggugcaaaga

SEQ ID NO: 2502054 - RNA, 19 nt, Artificial Sequence
  Description of Artificial Sequence: Synthetic oligonucleotide
auggggcaaggguucccag

SEQ ID NO: 2502055 - RNA, 19 nt, Artificial Sequence
  Description of Artificial Sequence: Synthetic oligonucleotide
gguauaccaccuuuguggu

SEQ ID NO: 2502056 - RNA, 19 nt, Artificial Sequence
  Description of Artificial Sequence: Synthetic oligonucleotide
aaccugggcucccggggaa

SEQ ID NO: 2502057 - RNA, 19 nt, Artificial Sequence
  Description of Artificial Sequence: Synthetic oligonucleotide
cucccggggaacuucgcca

SEQ ID NO: 2502058 - RNA, 19 nt, Artificial Sequence
  Description of Artificial Sequence: Synthetic oligonucleotide
uagcgguucugguauucuu

SEQ ID NO: 2502059 - RNA, 19 nt, Artificial Sequence
  Description of Artificial Sequence: Synthetic oligonucleotide
gcaacuugugaucccggca

SEQ ID NO: 2502060 - RNA, 19 nt, Artificial Sequence
  Description of Artificial Sequence: Synthetic oligonucleotide
uaguaccugaggagaccau

SEQ ID NO: 2502061 - RNA, 19 nt, Artificial Sequence
  Description of Artificial Sequence: Synthetic oligonucleotide
gaaggcgggacaguucucu

SEQ ID NO: 2502062 - RNA, 19 nt, Artificial Sequence
  Description of Artificial Sequence: Synthetic oligonucleotide
ggggccgcuuucuucuagg

SEQ ID NO: 2502063 - RNA, 19 nt, Artificial Sequence
  Description of Artificial Sequence: Synthetic oligonucleotide
cucaguggcgguuucugcu

SEQ ID NO: 2502064 - RNA, 19 nt, Artificial Sequence
  Description of Artificial Sequence: Synthetic oligonucleotide
cuaggagauuuccuugaua

SEQ ID NO: 2502065 - RNA, 19 nt, Artificial Sequence
  Description of Artificial Sequence: Synthetic oligonucleotide
ugcggugguauaccaccuu

SEQ ID NO: 2502066 - RNA, 19 nt, Artificial Sequence
  Description of Artificial Sequence: Synthetic oligonucleotide
cucggggcucgaacugggg

SEQ ID NO: 2502067 - RNA, 19 nt, Artificial Sequence
  Description of Artificial Sequence: Synthetic oligonucleotide
gaacuucgccagaggccgg

SEQ ID NO: 2502068 - RNA, 19 nt, Artificial Sequence
  Description of Artificial Sequence: Synthetic oligonucleotide
gcugcuucauacagacucc

SEQ ID NO: 2502069 - RNA, 19 nt, Artificial Sequence
  Description of Artificial Sequence: Synthetic oligonucleotide
cauucucauagggagaaau

SEQ ID NO: 2502070 - RNA, 19 nt, Artificial Sequence
  Description of Artificial Sequence: Synthetic oligonucleotide
agcccggaggggaaccugg

SEQ ID NO: 2502071 - RNA, 19 nt, Artificial Sequence
  Description of Artificial Sequence: Synthetic oligonucleotide
ggccgcuuucuucuaggag

SEQ ID NO: 2502072 - RNA, 19 nt, Artificial Sequence
  Description of Artificial Sequence: Synthetic oligonucleotide
gugguugcggcgguaguca

SEQ ID NO: 2502073 - RNA, 19 nt, Artificial Sequence
  Description of Artificial Sequence: Synthetic oligonucleotide
ggugguauaccaccuuugu

SEQ ID NO: 2502074 - RNA, 19 nt, Artificial Sequence
  Description of Artificial Sequence: Synthetic oligonucleotide
acuugugaucccggcagau

SEQ ID NO: 2502075 - RNA, 19 nt, Artificial Sequence
  Description of Artificial Sequence: Synthetic oligonucleotide
agcagcgugugagcccagg

SEQ ID NO: 2502076 - RNA, 19 nt, Artificial Sequence
  Description of Artificial Sequence: Synthetic oligonucleotide
uacccgugugggcgcaaac

SEQ ID NO: 2502077 - RNA, 19 nt, Artificial Sequence
  Description of Artificial Sequence: Synthetic oligonucleotide
ccaagguucuccugacaac

SEQ ID NO: 2502078 - RNA, 19 nt, Artificial Sequence
  Description of Artificial Sequence: Synthetic oligonucleotide
agucaacaugcaacuugug

SEQ ID NO: 2502079 - RNA, 19 nt, Artificial Sequence
  Description of Artificial Sequence: Synthetic oligonucleotide
ggccuuuggugcaaagagc

SEQ ID NO: 2502080 - RNA, 19 nt, Artificial Sequence
  Description of Artificial Sequence: Synthetic oligonucleotide
cuguuccaagaguuucaca

SEQ ID NO: 2502081 - RNA, 19 nt, Artificial Sequence
  Description of Artificial Sequence: Synthetic oligonucleotide
aguggcgguuucugcuggu

SEQ ID NO: 2502082 - RNA, 19 nt, Artificial Sequence
  Description of Artificial Sequence: Synthetic oligonucleotide
gcaaagagcccggagggga

SEQ ID NO: 2502083 - RNA, 19 nt, Artificial Sequence
  Description of Artificial Sequence: Synthetic oligonucleotide
uuggugcaaagagcccgga

SEQ ID NO: 2502084 - RNA, 19 nt, Artificial Sequence
  Description of Artificial Sequence: Synthetic oligonucleotide
caugggcaguacugagguc

SEQ ID NO: 2502085 - RNA, 19 nt, Artificial Sequence
  Description of Artificial Sequence: Synthetic oligonucleotide
caaagagcccggaggggaa

SEQ ID NO: 2502086 - RNA, 19 nt, Artificial Sequence
  Description of Artificial Sequence: Synthetic oligonucleotide
ugauacccgugugggcgca

SEQ ID NO: 2502087 - RNA, 19 nt, Artificial Sequence
  Description of Artificial Sequence: Synthetic oligonucleotide
uaccaccuuugugguugcg

SEQ ID NO: 2502088 - RNA, 19 nt, Artificial Sequence
  Description of Artificial Sequence: Synthetic oligonucleotide
ggcgguuucugcuggugga

SEQ ID NO: 2502089 - RNA, 19 nt, Artificial Sequence
  Description of Artificial Sequence: Synthetic oligonucleotide
caucaucgacucggugggg

SEQ ID NO: 2502090 - RNA, 19 nt, Artificial Sequence
  Description of Artificial Sequence: Synthetic oligonucleotide
gaccauacucccuggcuuu

SEQ ID NO: 2502091 - RNA, 19 nt, Artificial Sequence
  Description of Artificial Sequence: Synthetic oligonucleotide
cagcuguaccauggguacc

SEQ ID NO: 2502092 - RNA, 19 nt, Artificial Sequence
  Description of Artificial Sequence: Synthetic oligonucleotide
gggcguggaagaugauacc

SEQ ID NO: 2502093 - RNA, 19 nt, Artificial Sequence
  Description of Artificial Sequence: Synthetic oligonucleotide
ggagcccaucugcucagug

SEQ ID NO: 2502094 - RNA, 19 nt, Artificial Sequence
  Description of Artificial Sequence: Synthetic oligonucleotide
gagagccauagcgguucug

SEQ ID NO: 2502095 - RNA, 19 nt, Artificial Sequence
  Description of Artificial Sequence: Synthetic oligonucleotide
gcucccggggaacuucgcc

SEQ ID NO: 2502096 - RNA, 19 nt, Artificial Sequence
  Description of Artificial Sequence: Synthetic oligonucleotide
gcgugugagcccaggaggc

SEQ ID NO: 2502097 - RNA, 19 nt, Artificial Sequence
  Description of Artificial Sequence: Synthetic oligonucleotide
gcuuucuucuaggagauuu

SEQ ID NO: 2502098 - RNA, 19 nt, Artificial Sequence
  Description of Artificial Sequence: Synthetic oligonucleotide
ugguugcugccagcuguac

SEQ ID NO: 2502099 - RNA, 19 nt, Artificial Sequence
  Description of Artificial Sequence: Synthetic oligonucleotide
guggcgguuucugcuggug

SEQ ID NO: 2502100 - RNA, 19 nt, Artificial Sequence
  Description of Artificial Sequence: Synthetic oligonucleotide
gagccggcgaaggcgggac

SEQ ID NO: 2502101 - RNA, 19 nt, Artificial Sequence
  Description of Artificial Sequence: Synthetic oligonucleotide
gcgagagccauagcgguuc

SEQ ID NO: 2502102 - RNA, 19 nt, Artificial Sequence
  Description of Artificial Sequence: Synthetic oligonucleotide
ccucagcagcgugugagcc

SEQ ID NO: 2502103 - RNA, 19 nt, Artificial Sequence
  Description of Artificial Sequence: Synthetic oligonucleotide
cauggguaccaagguucuc

SEQ ID NO: 2502104 - RNA, 19 nt, Artificial Sequence
  Description of Artificial Sequence: Synthetic oligonucleotide
acacgucuuccggguccgc

SEQ ID NO: 2502105 - RNA, 19 nt, Artificial Sequence
  Description of Artificial Sequence: Synthetic oligonucleotide
guccgcugcggugguauac

SEQ ID NO: 2502106 - RNA, 19 nt, Artificial Sequence
  Description of Artificial Sequence: Synthetic oligonucleotide
cguaguaccugaggagacc

SEQ ID NO: 2502107 - RNA, 19 nt, Artificial Sequence
  Description of Artificial Sequence: Synthetic oligonucleotide
ggggaaccugggcucccgg

SEQ ID NO: 2502108 - RNA, 19 nt, Artificial Sequence
  Description of Artificial Sequence: Synthetic oligonucleotide
gcccaaacagggcgagagc

SEQ ID NO: 2502109 - RNA, 19 nt, Artificial Sequence
  Description of Artificial Sequence: Synthetic oligonucleotide
gagcccggaggggaaccug

SEQ ID NO: 2502110 - RNA, 19 nt, Artificial Sequence
  Description of Artificial Sequence: Synthetic oligonucleotide
agagccggcgaaggcggga

SEQ ID NO: 2502111 - RNA, 19 nt, Artificial Sequence
  Description of Artificial Sequence: Synthetic oligonucleotide
agagcccggaggggaaccu

SEQ ID NO: 2502112 - RNA, 19 nt, Artificial Sequence
  Description of Artificial Sequence: Synthetic oligonucleotide
ggggccggcggagugacac

SEQ ID NO: 2502113 - RNA, 19 nt, Artificial Sequence
  Description of Artificial Sequence: Synthetic oligonucleotide
ccuugauagagccggcgaa

SEQ ID NO: 2502114 - RNA, 19 nt, Artificial Sequence
  Description of Artificial Sequence: Synthetic oligonucleotide
ggggaacguaguaccugag

SEQ ID NO: 2502115 - RNA, 19 nt, Artificial Sequence
  Description of Artificial Sequence: Synthetic oligonucleotide
cucugggagcccaucugcu

SEQ ID NO: 2502116 - RNA, 19 nt, Artificial Sequence
  Description of Artificial Sequence: Synthetic oligonucleotide
gcgguucugguauucuucu

SEQ ID NO: 2502117 - RNA, 19 nt, Artificial Sequence
  Description of Artificial Sequence: Synthetic oligonucleotide
ccaagaguuucacauuccu

SEQ ID NO: 2502118 - RNA, 19 nt, Artificial Sequence
  Description of Artificial Sequence: Synthetic oligonucleotide
gcaguacugaggucagugu

SEQ ID NO: 2502119 - RNA, 19 nt, Artificial Sequence
  Description of Artificial Sequence: Synthetic oligonucleotide
gggcucgaacuggggaacg

SEQ ID NO: 2502120 - RNA, 19 nt, Artificial Sequence
  Description of Artificial Sequence: Synthetic oligonucleotide
gggcaucaucgacucggug

SEQ ID NO: 2502121 - RNA, 19 nt, Artificial Sequence
  Description of Artificial Sequence: Synthetic oligonucleotide
uugcggcgguagucagccc

SEQ ID NO: 2502122 - RNA, 19 nt, Artificial Sequence
  Description of Artificial Sequence: Synthetic oligonucleotide
ggagugacacugacagcuc

SEQ ID NO: 2502123 - RNA, 19 nt, Artificial Sequence
  Description of Artificial Sequence: Synthetic oligonucleotide
gguugcggcgguagucagc

SEQ ID NO: 2502124 - RNA, 19 nt, Artificial Sequence
  Description of Artificial Sequence: Synthetic oligonucleotide
gcggagugacacugacagc

SEQ ID NO: 2502125 - RNA, 19 nt, Artificial Sequence
  Description of Artificial Sequence: Synthetic oligonucleotide
gcagcgugugagcccagga

SEQ ID NO: 2502126 - RNA, 19 nt, Artificial Sequence
  Description of Artificial Sequence: Synthetic oligonucleotide
aucccggcagauggggcaa

SEQ ID NO: 2502127 - RNA, 19 nt, Artificial Sequence
  Description of Artificial Sequence: Synthetic oligonucleotide
gcaucucgggcaucaucga

SEQ ID NO: 2502128 - RNA, 19 nt, Artificial Sequence
  Description of Artificial Sequence: Synthetic oligonucleotide
auacccgugugggcgcaaa

SEQ ID NO: 2502129 - RNA, 19 nt, Artificial Sequence
  Description of Artificial Sequence: Synthetic oligonucleotide
cggagugacacugacagcu

SEQ ID NO: 2502130 - RNA, 19 nt, Artificial Sequence
  Description of Artificial Sequence: Synthetic oligonucleotide
ggggcucgaacuggggaac

SEQ ID NO: 2502131 - RNA, 19 nt, Artificial Sequence
  Description of Artificial Sequence: Synthetic oligonucleotide
gccggcgaaggcgggacag

SEQ ID NO: 2502132 - RNA, 19 nt, Artificial Sequence
  Description of Artificial Sequence: Synthetic oligonucleotide
ggccggcggagugacacug

SEQ ID NO: 2502133 - RNA, 19 nt, Artificial Sequence
  Description of Artificial Sequence: Synthetic oligonucleotide
agccggcgaaggcgggaca

SEQ ID NO: 2502134 - RNA, 19 nt, Artificial Sequence
  Description of Artificial Sequence: Synthetic oligonucleotide
gggcucccggggaacuucg

SEQ ID NO: 2502135 - RNA, 19 nt, Artificial Sequence
  Description of Artificial Sequence: Synthetic oligonucleotide
guauaccaccuuugugguu

SEQ ID NO: 2502136 - RNA, 19 nt, Artificial Sequence
  Description of Artificial Sequence: Synthetic oligonucleotide
gggcgagagccauagcggu

SEQ ID NO: 2502137 - RNA, 19 nt, Artificial Sequence
  Description of Artificial Sequence: Synthetic oligonucleotide
cugcggugguauaccaccu

SEQ ID NO: 2502138 - RNA, 19 nt, Artificial Sequence
  Description of Artificial Sequence: Synthetic oligonucleotide
cgucuuccggguccgcugc

SEQ ID NO: 2502139 - RNA, 19 nt, Artificial Sequence
  Description of Artificial Sequence: Synthetic oligonucleotide
gggccgcuuucuucuagga

SEQ ID NO: 2502140 - RNA, 19 nt, Artificial Sequence
  Description of Artificial Sequence: Synthetic oligonucleotide
gugguugcugccagcugua

SEQ ID NO: 2502141 - RNA, 19 nt, Artificial Sequence
  Description of Artificial Sequence: Synthetic oligonucleotide
gugugggcgcaaacaaacu

SEQ ID NO: 2502142 - RNA, 19 nt, Artificial Sequence
  Description of Artificial Sequence: Synthetic oligonucleotide
ccggcggagugacacugac

SEQ ID NO: 2502143 - RNA, 19 nt, Artificial Sequence
  Description of Artificial Sequence: Synthetic oligonucleotide
cgggacaguucucucucug

SEQ ID NO: 2502144 - RNA, 19 nt, Artificial Sequence
  Description of Artificial Sequence: Synthetic oligonucleotide
ccggcagauggggcaaggg

SEQ ID NO: 2502145 - RNA, 19 nt, Artificial Sequence
  Description of Artificial Sequence: Synthetic oligonucleotide
gggcgcaaacaaacuguuc

SEQ ID NO: 2502146 - RNA, 19 nt, Artificial Sequence
  Description of Artificial Sequence: Synthetic oligonucleotide
ugggcaucucgggcaucau

SEQ ID NO: 2502147 - RNA, 19 nt, Artificial Sequence
  Description of Artificial Sequence: Synthetic oligonucleotide
ggcgaaggcgggacaguuc

SEQ ID NO: 2502148 - RNA, 19 nt, Artificial Sequence
  Description of Artificial Sequence: Synthetic oligonucleotide
gauacccgugugggcgcaa

SEQ ID NO: 2502149 - RNA, 19 nt, Artificial Sequence
  Description of Artificial Sequence: Synthetic oligonucleotide
cggggaacuucgccagagg

SEQ ID NO: 2502150 - RNA, 19 nt, Artificial Sequence
  Description of Artificial Sequence: Synthetic oligonucleotide
gcacucugggagcccaucu

SEQ ID NO: 2502151 - RNA, 19 nt, Artificial Sequence
  Description of Artificial Sequence: Synthetic oligonucleotide
cguggaagaugauacccgu

SEQ ID NO: 2502152 - RNA, 19 nt, Artificial Sequence
  Description of Artificial Sequence: Synthetic oligonucleotide
caaggguucccagccacuu

SEQ ID NO: 2502153 - RNA, 19 nt, Artificial Sequence
  Description of Artificial Sequence: Synthetic oligonucleotide
cagcagcgugugagcccag

SEQ ID NO: 2502154 - RNA, 19 nt, Artificial Sequence
  Description of Artificial Sequence: Synthetic oligonucleotide
cgguucugguauucuucug

SEQ ID NO: 2502155 - RNA, 19 nt, Artificial Sequence
  Description of Artificial Sequence: Synthetic oligonucleotide
cuuugugguugcggcggua

SEQ ID NO: 2502156 - RNA, 19 nt, Artificial Sequence
  Description of Artificial Sequence: Synthetic oligonucleotide
ccauggguaccaagguucu

SEQ ID NO: 2502157 - RNA, 19 nt, Artificial Sequence
  Description of Artificial Sequence: Synthetic oligonucleotide
cacagguccuaagcacucu

SEQ ID NO: 2502158 - RNA, 19 nt, Artificial Sequence
  Description of Artificial Sequence: Synthetic oligonucleotide
gcggugguauaccaccuuu

SEQ ID NO: 2502159 - RNA, 19 nt, Artificial Sequence
  Description of Artificial Sequence: Synthetic oligonucleotide
cgcugcggugguauaccac

SEQ ID NO: 2502160 - RNA, 19 nt, Artificial Sequence
  Description of Artificial Sequence: Synthetic oligonucleotide
gcucgaacuggggaacgua

SEQ ID NO: 2502161 - RNA, 19 nt, Artificial Sequence
  Description of Artificial Sequence: Synthetic oligonucleotide
ccgugugggcgcaaacaaa

SEQ ID NO: 2502162 - RNA, 19 nt, Artificial Sequence
  Description of Artificial Sequence: Synthetic oligonucleotide
cagcccaaacagggcgaga

SEQ ID NO: 2502163 - RNA, 19 nt, Artificial Sequence
  Description of Artificial Sequence: Synthetic oligonucleotide
gguucccagccacuuuauu

SEQ ID NO: 2502164 - RNA, 19 nt, Artificial Sequence
  Description of Artificial Sequence: Synthetic oligonucleotide
cggggcucgaacuggggaa

SEQ ID NO: 2502165 - RNA, 19 nt, Artificial Sequence
  Description of Artificial Sequence: Synthetic oligonucleotide
ggcucccggggaacuucgc

SEQ ID NO: 2502166 - RNA, 19 nt, Artificial Sequence
  Description of Artificial Sequence: Synthetic oligonucleotide
cagugucucggggcucgaa

SEQ ID NO: 2502167 - RNA, 19 nt, Artificial Sequence
  Description of Artificial Sequence: Synthetic oligonucleotide
gcuguaccauggguaccaa

SEQ ID NO: 2502168 - RNA, 19 nt, Artificial Sequence
  Description of Artificial Sequence: Synthetic oligonucleotide
ggcucgaacuggggaacgu

SEQ ID NO: 2502169 - RNA, 19 nt, Artificial Sequence
  Description of Artificial Sequence: Synthetic oligonucleotide
gcaaggguucccagccacu

SEQ ID NO: 2502170 - RNA, 19 nt, Artificial Sequence
  Description of Artificial Sequence: Synthetic oligonucleotide
ccgcugcggugguauacca

SEQ ID NO: 2502171 - RNA, 19 nt, Artificial Sequence
  Description of Artificial Sequence: Synthetic oligonucleotide
caucugcucaguggcgguu

SEQ ID NO: 2502172 - RNA, 19 nt, Artificial Sequence
  Description of Artificial Sequence: Synthetic oligonucleotide
ggguccgcugcggugguau

SEQ ID NO: 2502173 - RNA, 19 nt, Artificial Sequence
  Description of Artificial Sequence: Synthetic oligonucleotide
gcgggacaguucucucucu

SEQ ID NO: 2502174 - RNA, 19 nt, Artificial Sequence
  Description of Artificial Sequence: Synthetic oligonucleotide
gguccgcugcggugguaua

SEQ ID NO: 2502175 - RNA, 19 nt, Artificial Sequence
  Description of Artificial Sequence: Synthetic oligonucleotide
gcggcgguagucagcccaa

SEQ ID NO: 2502176 - RNA, 19 nt, Artificial Sequence
  Description of Artificial Sequence: Synthetic oligonucleotide
cgugugagcccaggaggca

SEQ ID NO: 2502177 - RNA, 19 nt, Artificial Sequence
  Description of Artificial Sequence: Synthetic oligonucleotide
gccggcggagugacacuga

SEQ ID NO: 2502178 - RNA, 19 nt, Artificial Sequence
  Description of Artificial Sequence: Synthetic oligonucleotide
cggcggagugacacugaca

SEQ ID NO: 2502179 - RNA, 19 nt, Artificial Sequence
  Description of Artificial Sequence: Synthetic oligonucleotide
ggcgagagccauagcgguu

SEQ ID NO: 2502180 - RNA, 19 nt, Artificial Sequence
  Description of Artificial Sequence: Synthetic oligonucleotide
guggagcggugggcaucuc

SEQ ID NO: 2502181 - RNA, 19 nt, Artificial Sequence
  Description of Artificial Sequence: Synthetic oligonucleotide
ccuuugugguugcggcggu

SEQ ID NO: 2502182 - RNA, 19 nt, Artificial Sequence
  Description of Artificial Sequence: Synthetic oligonucleotide
cccggggaacuucgccaga

SEQ ID NO: 2502183 - RNA, 19 nt, Artificial Sequence
  Description of Artificial Sequence: Synthetic oligonucleotide
gggccggcggagugacacu

SEQ ID NO: 2502184 - RNA, 19 nt, Artificial Sequence
  Description of Artificial Sequence: Synthetic oligonucleotide
gggagcccaucugcucagu

SEQ ID NO: 2502185 - RNA, 19 nt, Artificial Sequence
  Description of Artificial Sequence: Synthetic oligonucleotide
ccggcgaaggcgggacagu

SEQ ID NO: 2502186 - RNA, 19 nt, Artificial Sequence
  Description of Artificial Sequence: Synthetic oligonucleotide
cggcgguagucagcccaaa

SEQ ID NO: 2502187 - RNA, 19 nt, Artificial Sequence
  Description of Artificial Sequence: Synthetic oligonucleotide
cggguccgcugcgguggua

SEQ ID NO: 2502188 - RNA, 19 nt, Artificial Sequence
  Description of Artificial Sequence: Synthetic oligonucleotide
auauauuauauucauaggg

SEQ ID NO: 2502189 - RNA, 19 nt, Artificial Sequence
  Description of Artificial Sequence: Synthetic oligonucleotide
aaaucuuacauucguaggg

SEQ ID NO: 2502190 - RNA, 19 nt, Artificial Sequence
  Description of Artificial Sequence: Synthetic oligonucleotide
uuguuuaucaccaauauau

SEQ ID NO: 2502191 - RNA, 19 nt, Artificial Sequence
  Description of Artificial Sequence: Synthetic oligonucleotide
ugaggucagaaccagaccg

SEQ ID NO: 2502192 - RNA, 19 nt, Artificial Sequence
  Description of Artificial Sequence: Synthetic oligonucleotide
auagcuuugagucuucacg

SEQ ID NO: 2502193 - RNA, 19 nt, Artificial Sequence
  Description of Artificial Sequence: Synthetic oligonucleotide
uaaaauuggaaccacuacu

SEQ ID NO: 2502194 - RNA, 19 nt, Artificial Sequence
  Description of Artificial Sequence: Synthetic oligonucleotide
uauguuuugaugcugaaua

SEQ ID NO: 2502195 - RNA, 19 nt, Artificial Sequence
  Description of Artificial Sequence: Synthetic oligonucleotide
ugauguugaguaaaauugg

SEQ ID NO: 2502196 - RNA, 19 nt, Artificial Sequence
  Description of Artificial Sequence: Synthetic oligonucleotide
ucuagagggauuucaaagg

SEQ ID NO: 2502197 - RNA, 19 nt, Artificial Sequence
  Description of Artificial Sequence: Synthetic oligonucleotide
uccagaauauauuauauuc

SEQ ID NO: 2502198 - RNA, 19 nt, Artificial Sequence
  Description of Artificial Sequence: Synthetic oligonucleotide
uguugaguaaaauuggaac

SEQ ID NO: 2502199 - RNA, 19 nt, Artificial Sequence
  Description of Artificial Sequence: Synthetic oligonucleotide
aguccucguauuuauaggc

SEQ ID NO: 2502200 - RNA, 19 nt, Artificial Sequence
  Description of Artificial Sequence: Synthetic oligonucleotide
auuuauaggcuuucuuacc

SEQ ID NO: 2502201 - RNA, 19 nt, Artificial Sequence
  Description of Artificial Sequence: Synthetic oligonucleotide
acaaaucuuacauucguag

SEQ ID NO: 2502202 - RNA, 19 nt, Artificial Sequence
  Description of Artificial Sequence: Synthetic oligonucleotide
guugaguaaaauuggaacc

SEQ ID NO: 2502203 - RNA, 19 nt, Artificial Sequence
  Description of Artificial Sequence: Synthetic oligonucleotide
guaguuaaaguucuuuccg

SEQ ID NO: 2502204 - RNA, 19 nt, Artificial Sequence
  Description of Artificial Sequence: Synthetic oligonucleotide
uguuuaauaagcugugagc

SEQ ID NO: 2502205 - RNA, 19 nt, Artificial Sequence
  Description of Artificial Sequence: Synthetic oligonucleotide
uaucggauagcuuugaguc

SEQ ID NO: 2502206 - RNA, 19 nt, Artificial Sequence
  Description of Artificial Sequence: Synthetic oligonucleotide
uuucaaagguagacuaucg

SEQ ID NO: 2502207 - RNA, 19 nt, Artificial Sequence
  Description of Artificial Sequence: Synthetic oligonucleotide
gaggucaacaaguaaacug

SEQ ID NO: 2502208 - RNA, 19 nt, Artificial Sequence
  Description of Artificial Sequence: Synthetic oligonucleotide
ucuaugaugacugaugagu

SEQ ID NO: 2502209 - RNA, 19 nt, Artificial Sequence
  Description of Artificial Sequence: Synthetic oligonucleotide
aauaugaauuuucuucaga

SEQ ID NO: 2502210 - RNA, 19 nt, Artificial Sequence
  Description of Artificial Sequence: Synthetic oligonucleotide
uuuaucaccaauauauguu

SEQ ID NO: 2502211 - RNA, 19 nt, Artificial Sequence
  Description of Artificial Sequence: Synthetic oligonucleotide
uuucuucagaugaacaagc

SEQ ID NO: 2502212 - RNA, 19 nt, Artificial Sequence
  Description of Artificial Sequence: Synthetic oligonucleotide
acauucgaagguuucuucc

SEQ ID NO: 2502213 - RNA, 19 nt, Artificial Sequence
  Description of Artificial Sequence: Synthetic oligonucleotide
uuugaugcugaauaagcug

SEQ ID NO: 2502214 - RNA, 19 nt, Artificial Sequence
  Description of Artificial Sequence: Synthetic oligonucleotide
auauuauauucauagggca

SEQ ID NO: 2502215 - RNA, 19 nt, Artificial Sequence
  Description of Artificial Sequence: Synthetic oligonucleotide
accaauauauguuuugaug

SEQ ID NO: 2502216 - RNA, 19 nt, Artificial Sequence
  Description of Artificial Sequence: Synthetic oligonucleotide
uucaaagguagacuaucgg

SEQ ID NO: 2502217 - RNA, 19 nt, Artificial Sequence
  Description of Artificial Sequence: Synthetic oligonucleotide
aagguagacuaucggauag

SEQ ID NO: 2502218 - RNA, 19 nt, Artificial Sequence
  Description of Artificial Sequence: Synthetic oligonucleotide
uucacguacagcuugugug

SEQ ID NO: 2502219 - RNA, 19 nt, Artificial Sequence
  Description of Artificial Sequence: Synthetic oligonucleotide
ucaaagguagacuaucgga

SEQ ID NO: 2502220 - RNA, 19 nt, Artificial Sequence
  Description of Artificial Sequence: Synthetic oligonucleotide
uagacuaucggauagcuuu

SEQ ID NO: 2502221 - RNA, 19 nt, Artificial Sequence
  Description of Artificial Sequence: Synthetic oligonucleotide
cugauggcgaguaaaauug

SEQ ID NO: 2502222 - RNA, 19 nt, Artificial Sequence
  Description of Artificial Sequence: Synthetic oligonucleotide
uugaugcugaauaagcugu

SEQ ID NO: 2502223 - RNA, 19 nt, Artificial Sequence
  Description of Artificial Sequence: Synthetic oligonucleotide
acuguuucuacauucuuca

SEQ ID NO: 2502224 - RNA, 19 nt, Artificial Sequence
  Description of Artificial Sequence: Synthetic oligonucleotide
ucuacauucuucagucuag

SEQ ID NO: 2502225 - RNA, 19 nt, Artificial Sequence
  Description of Artificial Sequence: Synthetic oligonucleotide
auaugaauuuucuucagau

SEQ ID NO: 2502226 - RNA, 19 nt, Artificial Sequence
  Description of Artificial Sequence: Synthetic oligonucleotide
uuuuguuuaucaccaauau

SEQ ID NO: 2502227 - RNA, 19 nt, Artificial Sequence
  Description of Artificial Sequence: Synthetic oligonucleotide
uguuucuacauucuucagu

SEQ ID NO: 2502228 - RNA, 19 nt, Artificial Sequence
  Description of Artificial Sequence: Synthetic oligonucleotide
caaaucuuacauucguagg

SEQ ID NO: 2502229 - RNA, 19 nt, Artificial Sequence
  Description of Artificial Sequence: Synthetic oligonucleotide
ugauguuuaauaagcugug

SEQ ID NO: 2502230 - RNA, 19 nt, Artificial Sequence
  Description of Artificial Sequence: Synthetic oligonucleotide
aauauauguuuugaugcug

SEQ ID NO: 2502231 - RNA, 19 nt, Artificial Sequence
  Description of Artificial Sequence: Synthetic oligonucleotide
uaugaauuuucuucagaug

SEQ ID NO: 2502232 - RNA, 19 nt, Artificial Sequence
  Description of Artificial Sequence: Synthetic oligonucleotide
aauuggaaccacuacuaaa

SEQ ID NO: 2502233 - RNA, 19 nt, Artificial Sequence
  Description of Artificial Sequence: Synthetic oligonucleotide
ugagucguaguuaaaguuc

SEQ ID NO: 2502234 - RNA, 19 nt, Artificial Sequence
  Description of Artificial Sequence: Synthetic oligonucleotide
uguuuaucaccaauauaug

SEQ ID NO: 2502235 - RNA, 19 nt, Artificial Sequence
  Description of Artificial Sequence: Synthetic oligonucleotide
ucugagaauaggcuuuccc

SEQ ID NO: 2502236 - RNA, 19 nt, Artificial Sequence
  Description of Artificial Sequence: Synthetic oligonucleotide
gucuagagggauuucaaag

SEQ ID NO: 2502237 - RNA, 19 nt, Artificial Sequence
  Description of Artificial Sequence: Synthetic oligonucleotide
agaaccagaccggaaagcc

SEQ ID NO: 2502238 - RNA, 19 nt, Artificial Sequence
  Description of Artificial Sequence: Synthetic oligonucleotide
uuaaaguucuuuccgcagu

SEQ ID NO: 2502239 - RNA, 19 nt, Artificial Sequence
  Description of Artificial Sequence: Synthetic oligonucleotide
ucuucagaugaacaagcug

SEQ ID NO: 2502240 - RNA, 19 nt, Artificial Sequence
  Description of Artificial Sequence: Synthetic oligonucleotide
aacuguuucuacauucuuc

SEQ ID NO: 2502241 - RNA, 19 nt, Artificial Sequence
  Description of Artificial Sequence: Synthetic oligonucleotide
gauucuaugaugacugaug

SEQ ID NO: 2502242 - RNA, 19 nt, Artificial Sequence
  Description of Artificial Sequence: Synthetic oligonucleotide
auauucauagggcaacucu

SEQ ID NO: 2502243 - RNA, 19 nt, Artificial Sequence
  Description of Artificial Sequence: Synthetic oligonucleotide
uugaguaaaauuggaacca

SEQ ID NO: 2502244 - RNA, 19 nt, Artificial Sequence
  Description of Artificial Sequence: Synthetic oligonucleotide
uaaacgucuuuccacacuc

SEQ ID NO: 2502245 - RNA, 19 nt, Artificial Sequence
  Description of Artificial Sequence: Synthetic oligonucleotide
ugagaauaggcuuucccac

SEQ ID NO: 2502246 - RNA, 19 nt, Artificial Sequence
  Description of Artificial Sequence: Synthetic oligonucleotide
agauaaacgucuuuccaca

SEQ ID NO: 2502247 - RNA, 19 nt, Artificial Sequence
  Description of Artificial Sequence: Synthetic oligonucleotide
auucuaugaugacugauga

SEQ ID NO: 2502248 - RNA, 19 nt, Artificial Sequence
  Description of Artificial Sequence: Synthetic oligonucleotide
uuacuaaaaggccuccaga

SEQ ID NO: 2502249 - RNA, 19 nt, Artificial Sequence
  Description of Artificial Sequence: Synthetic oligonucleotide
uuucuuaccggcauggauu

SEQ ID NO: 2502250 - RNA, 19 nt, Artificial Sequence
  Description of Artificial Sequence: Synthetic oligonucleotide
aauaggcuuucccacaaau

SEQ ID NO: 2502251 - RNA, 19 nt, Artificial Sequence
  Description of Artificial Sequence: Synthetic oligonucleotide
uuggaaccacuacuaaagg

SEQ ID NO: 2502252 - RNA, 19 nt, Artificial Sequence
  Description of Artificial Sequence: Synthetic oligonucleotide
ugaguugugagcucugaga

SEQ ID NO: 2502253 - RNA, 19 nt, Artificial Sequence
  Description of Artificial Sequence: Synthetic oligonucleotide
guuacuaaaaggccuccag

SEQ ID NO: 2502254 - RNA, 19 nt, Artificial Sequence
  Description of Artificial Sequence: Synthetic oligonucleotide
uacuaaaaggccuccagaa

SEQ ID NO: 2502255 - RNA, 19 nt, Artificial Sequence
  Description of Artificial Sequence: Synthetic oligonucleotide
uaguuaaaguucuuuccgc

SEQ ID NO: 2502256 - RNA, 19 nt, Artificial Sequence
  Description of Artificial Sequence: Synthetic oligonucleotide
gugaugucgcgucaggucg

SEQ ID NO: 2502257 - RNA, 19 nt, Artificial Sequence
  Description of Artificial Sequence: Synthetic oligonucleotide
augacugaugaguugugag

SEQ ID NO: 2502258 - RNA, 19 nt, Artificial Sequence
  Description of Artificial Sequence: Synthetic oligonucleotide
cagauaaacgucuuuccac

SEQ ID NO: 2502259 - RNA, 19 nt, Artificial Sequence
  Description of Artificial Sequence: Synthetic oligonucleotide
aguuaaaguucuuuccgca

SEQ ID NO: 2502260 - RNA, 19 nt, Artificial Sequence
  Description of Artificial Sequence: Synthetic oligonucleotide
guuaaaguucuuuccgcag

SEQ ID NO: 2502261 - RNA, 19 nt, Artificial Sequence
  Description of Artificial Sequence: Synthetic oligonucleotide
uaagcugugagucguaguu

SEQ ID NO: 2502262 - RNA, 19 nt, Artificial Sequence
  Description of Artificial Sequence: Synthetic oligonucleotide
guaaaauuggaaccacuac

SEQ ID NO: 2502263 - RNA, 19 nt, Artificial Sequence
  Description of Artificial Sequence: Synthetic oligonucleotide
gucucgugaggucagaacc

SEQ ID NO: 2502264 - RNA, 19 nt, Artificial Sequence
  Description of Artificial Sequence: Synthetic oligonucleotide
aauaagcugugagucguag

SEQ ID NO: 2502265 - RNA, 19 nt, Artificial Sequence
  Description of Artificial Sequence: Synthetic oligonucleotide
acagauaaacgucuuucca

SEQ ID NO: 2502266 - RNA, 19 nt, Artificial Sequence
  Description of Artificial Sequence: Synthetic oligonucleotide
uuuguuuaucaccaauaua

SEQ ID NO: 2502267 - RNA, 19 nt, Artificial Sequence
  Description of Artificial Sequence: Synthetic oligonucleotide
uggcgaguaaaauuggaac

SEQ ID NO: 2502268 - RNA, 19 nt, Artificial Sequence
  Description of Artificial Sequence: Synthetic oligonucleotide
aaucuuacauucguagggu

SEQ ID NO: 2502269 - RNA, 19 nt, Artificial Sequence
  Description of Artificial Sequence: Synthetic oligonucleotide
uaugaugacugaugaguug

SEQ ID NO: 2502270 - RNA, 19 nt, Artificial Sequence
  Description of Artificial Sequence: Synthetic oligonucleotide
ugauggcgaguaaaauugg

SEQ ID NO: 2502271 - RNA, 19 nt, Artificial Sequence
  Description of Artificial Sequence: Synthetic oligonucleotide
ugugagucguaguuaaagu

SEQ ID NO: 2502272 - RNA, 19 nt, Artificial Sequence
  Description of Artificial Sequence: Synthetic oligonucleotide
ugaauaagcugugagucgu

SEQ ID NO: 2502273 - RNA, 19 nt, Artificial Sequence
  Description of Artificial Sequence: Synthetic oligonucleotide
uucuacauucuucagucua

SEQ ID NO: 2502274 - RNA, 19 nt, Artificial Sequence
  Description of Artificial Sequence: Synthetic oligonucleotide
cacagauaaacgucuuucc

SEQ ID NO: 2502275 - RNA, 19 nt, Artificial Sequence
  Description of Artificial Sequence: Synthetic oligonucleotide
uauaggcuuucuuaccggc

SEQ ID NO: 2502276 - RNA, 19 nt, Artificial Sequence
  Description of Artificial Sequence: Synthetic oligonucleotide
ucugauggcgaguaaaauu

SEQ ID NO: 2502277 - RNA, 19 nt, Artificial Sequence
  Description of Artificial Sequence: Synthetic oligonucleotide
aaagguagacuaucggaua

SEQ ID NO: 2502278 - RNA, 19 nt, Artificial Sequence
  Description of Artificial Sequence: Synthetic oligonucleotide
cauucgaagguuucuuccc

SEQ ID NO: 2502279 - RNA, 19 nt, Artificial Sequence
  Description of Artificial Sequence: Synthetic oligonucleotide
aaguucuuuccgcaguccu

SEQ ID NO: 2502280 - RNA, 19 nt, Artificial Sequence
  Description of Artificial Sequence: Synthetic oligonucleotide
ugaauucugugaugucgcg

SEQ ID NO: 2502281 - RNA, 19 nt, Artificial Sequence
  Description of Artificial Sequence: Synthetic oligonucleotide
uaaaaggccuccagaauau

SEQ ID NO: 2502282 - RNA, 19 nt, Artificial Sequence
  Description of Artificial Sequence: Synthetic oligonucleotide
aacgucuuuccacacuccu

SEQ ID NO: 2502283 - RNA, 19 nt, Artificial Sequence
  Description of Artificial Sequence: Synthetic oligonucleotide
auaagcugugagcucugac

SEQ ID NO: 2502284 - RNA, 19 nt, Artificial Sequence
  Description of Artificial Sequence: Synthetic oligonucleotide
ugcugaauaagcugugagu

SEQ ID NO: 2502285 - RNA, 19 nt, Artificial Sequence
  Description of Artificial Sequence: Synthetic oligonucleotide
ucguaguuaaaguucuuuc

SEQ ID NO: 2502286 - RNA, 19 nt, Artificial Sequence
  Description of Artificial Sequence: Synthetic oligonucleotide
caauaugaauuuucuucag

SEQ ID NO: 2502287 - RNA, 19 nt, Artificial Sequence
  Description of Artificial Sequence: Synthetic oligonucleotide
gaugaacaagcugagguca

SEQ ID NO: 2502288 - RNA, 19 nt, Artificial Sequence
  Description of Artificial Sequence: Synthetic oligonucleotide
agucuucacguacagcuug

SEQ ID NO: 2502289 - RNA, 19 nt, Artificial Sequence
  Description of Artificial Sequence: Synthetic oligonucleotide
aacucuccaauaugaauuu

SEQ ID NO: 2502290 - RNA, 19 nt, Artificial Sequence
  Description of Artificial Sequence: Synthetic oligonucleotide
ucugugaugucgcgucagg

SEQ ID NO: 2502291 - RNA, 19 nt, Artificial Sequence
  Description of Artificial Sequence: Synthetic oligonucleotide
ggcgaguaaaauuggaacc

SEQ ID NO: 2502292 - RNA, 19 nt, Artificial Sequence
  Description of Artificial Sequence: Synthetic oligonucleotide
uucuaugaugacugaugag

SEQ ID NO: 2502293 - RNA, 19 nt, Artificial Sequence
  Description of Artificial Sequence: Synthetic oligonucleotide
aacaaguaaacuguuucua

SEQ ID NO: 2502294 - RNA, 19 nt, Artificial Sequence
  Description of Artificial Sequence: Synthetic oligonucleotide
cugaggucaacaaguaaac

SEQ ID NO: 2502295 - RNA, 19 nt, Artificial Sequence
  Description of Artificial Sequence: Synthetic oligonucleotide
cacuacuaaaggcuuuucc

SEQ ID NO: 2502296 - RNA, 19 nt, Artificial Sequence
  Description of Artificial Sequence: Synthetic oligonucleotide
guuuaauaagcugugagcu

SEQ ID NO: 2502297 - RNA, 19 nt, Artificial Sequence
  Description of Artificial Sequence: Synthetic oligonucleotide
uucuucagaugaacaagcu

SEQ ID NO: 2502298 - RNA, 19 nt, Artificial Sequence
  Description of Artificial Sequence: Synthetic oligonucleotide
ucacguacagcuugugugu

SEQ ID NO: 2502299 - RNA, 19 nt, Artificial Sequence
  Description of Artificial Sequence: Synthetic oligonucleotide
ucaggucggagccacagau

SEQ ID NO: 2502300 - RNA, 19 nt, Artificial Sequence
  Description of Artificial Sequence: Synthetic oligonucleotide
aggucaacaaguaaacugu

SEQ ID NO: 2502301 - RNA, 19 nt, Artificial Sequence
  Description of Artificial Sequence: Synthetic oligonucleotide
ucucgugaggucagaacca

SEQ ID NO: 2502302 - RNA, 19 nt, Artificial Sequence
  Description of Artificial Sequence: Synthetic oligonucleotide
augaugacugaugaguugu

SEQ ID NO: 2502303 - RNA, 19 nt, Artificial Sequence
  Description of Artificial Sequence: Synthetic oligonucleotide
ucagucuagagggauuuca

SEQ ID NO: 2502304 - RNA, 19 nt, Artificial Sequence
  Description of Artificial Sequence: Synthetic oligonucleotide
gauguugaguaaaauugga

SEQ ID NO: 2502305 - RNA, 19 nt, Artificial Sequence
  Description of Artificial Sequence: Synthetic oligonucleotide
aaacgucuuuccacacucc

SEQ ID NO: 2502306 - RNA, 19 nt, Artificial Sequence
  Description of Artificial Sequence: Synthetic oligonucleotide
ugugaugucgcgucagguc

SEQ ID NO: 2502307 - RNA, 19 nt, Artificial Sequence
  Description of Artificial Sequence: Synthetic oligonucleotide
cuaaaaggccuccagaaua

SEQ ID NO: 2502308 - RNA, 19 nt, Artificial Sequence
  Description of Artificial Sequence: Synthetic oligonucleotide
guuuaucaccaauauaugu

SEQ ID NO: 2502309 - RNA, 19 nt, Artificial Sequence
  Description of Artificial Sequence: Synthetic oligonucleotide
uucgaagguuucuucccag

SEQ ID NO: 2502310 - RNA, 19 nt, Artificial Sequence
  Description of Artificial Sequence: Synthetic oligonucleotide
caguccucguauuuauagg

SEQ ID NO: 2502311 - RNA, 19 nt, Artificial Sequence
  Description of Artificial Sequence: Synthetic oligonucleotide
ucggagccacagauaaacg

SEQ ID NO: 2502312 - RNA, 19 nt, Artificial Sequence
  Description of Artificial Sequence: Synthetic oligonucleotide
cugugagucguaguuaaag

SEQ ID NO: 2502313 - RNA, 19 nt, Artificial Sequence
  Description of Artificial Sequence: Synthetic oligonucleotide
aguaaaauuggaaccacua

SEQ ID NO: 2502314 - RNA, 19 nt, Artificial Sequence
  Description of Artificial Sequence: Synthetic oligonucleotide
ugaugucgcgucaggucgg

SEQ ID NO: 2502315 - RNA, 19 nt, Artificial Sequence
  Description of Artificial Sequence: Synthetic oligonucleotide
uaaaggcauugccacacuc

SEQ ID NO: 2502316 - RNA, 19 nt, Artificial Sequence
  Description of Artificial Sequence: Synthetic oligonucleotide
acugaugaguugugagcuc

SEQ ID NO: 2502317 - RNA, 19 nt, Artificial Sequence
  Description of Artificial Sequence: Synthetic oligonucleotide
ugaguaaaauuggaaccac

SEQ ID NO: 2502318 - RNA, 19 nt, Artificial Sequence
  Description of Artificial Sequence: Synthetic oligonucleotide
uuauauucauagggcaacu

SEQ ID NO: 2502319 - RNA, 19 nt, Artificial Sequence
  Description of Artificial Sequence: Synthetic oligonucleotide
augaguugugagcucugag

SEQ ID NO: 2502320 - RNA, 19 nt, Artificial Sequence
  Description of Artificial Sequence: Synthetic oligonucleotide
agaccggaaagccuuuuca

SEQ ID NO: 2502321 - RNA, 19 nt, Artificial Sequence
  Description of Artificial Sequence: Synthetic oligonucleotide
auucgaagguuucuuccca

SEQ ID NO: 2502322 - RNA, 19 nt, Artificial Sequence
  Description of Artificial Sequence: Synthetic oligonucleotide
uagggcaacucuccaauau

SEQ ID NO: 2502323 - RNA, 19 nt, Artificial Sequence
  Description of Artificial Sequence: Synthetic oligonucleotide
uucuuaccggcauggauuc

SEQ ID NO: 2502324 - RNA, 19 nt, Artificial Sequence
  Description of Artificial Sequence: Synthetic oligonucleotide
acuaucggauagcuuugag

SEQ ID NO: 2502325 - RNA, 19 nt, Artificial Sequence
  Description of Artificial Sequence: Synthetic oligonucleotide
agccuuuucacacuccuua

SEQ ID NO: 2502326 - RNA, 19 nt, Artificial Sequence
  Description of Artificial Sequence: Synthetic oligonucleotide
ugucgcgucaggucggagc

SEQ ID NO: 2502327 - RNA, 19 nt, Artificial Sequence
  Description of Artificial Sequence: Synthetic oligonucleotide
uauauguuuugaugcugaa

SEQ ID NO: 2502328 - RNA, 19 nt, Artificial Sequence
  Description of Artificial Sequence: Synthetic oligonucleotide
gcaguccucguauuuauag

SEQ ID NO: 2502329 - RNA, 19 nt, Artificial Sequence
  Description of Artificial Sequence: Synthetic oligonucleotide
accggaaagccuuuucaca

SEQ ID NO: 2502330 - RNA, 19 nt, Artificial Sequence
  Description of Artificial Sequence: Synthetic oligonucleotide
auaggcuuucccacaaauc

SEQ ID NO: 2502331 - RNA, 19 nt, Artificial Sequence
  Description of Artificial Sequence: Synthetic oligonucleotide
aggucggagccacagauaa

SEQ ID NO: 2502332 - RNA, 19 nt, Artificial Sequence
  Description of Artificial Sequence: Synthetic oligonucleotide
gucggagccacagauaaac

SEQ ID NO: 2502333 - RNA, 19 nt, Artificial Sequence
  Description of Artificial Sequence: Synthetic oligonucleotide
uaggcuuucuuaccggcau

SEQ ID NO: 2502334 - RNA, 19 nt, Artificial Sequence
  Description of Artificial Sequence: Synthetic oligonucleotide
agaauaggcuuucccacaa

SEQ ID NO: 2502335 - RNA, 19 nt, Artificial Sequence
  Description of Artificial Sequence: Synthetic oligonucleotide
agggcaacucuccaauaug

SEQ ID NO: 2502336 - RNA, 19 nt, Artificial Sequence
  Description of Artificial Sequence: Synthetic oligonucleotide
ugaugacugaugaguugug

SEQ ID NO: 2502337 - RNA, 19 nt, Artificial Sequence
  Description of Artificial Sequence: Synthetic oligonucleotide
agguagacuaucggauagc

SEQ ID NO: 2502338 - RNA, 19 nt, Artificial Sequence
  Description of Artificial Sequence: Synthetic oligonucleotide
gaggucagaaccagaccgg

SEQ ID NO: 2502339 - RNA, 19 nt, Artificial Sequence
  Description of Artificial Sequence: Synthetic oligonucleotide
cguaguuaaaguucuuucc

SEQ ID NO: 2502340 - RNA, 19 nt, Artificial Sequence
  Description of Artificial Sequence: Synthetic oligonucleotide
gugagcucugagaauaggc

SEQ ID NO: 2502341 - RNA, 19 nt, Artificial Sequence
  Description of Artificial Sequence: Synthetic oligonucleotide
gauguuuaauaagcuguga

SEQ ID NO: 2502342 - RNA, 19 nt, Artificial Sequence
  Description of Artificial Sequence: Synthetic oligonucleotide
uaucaccaauauauguuuu

SEQ ID NO: 2502343 - RNA, 19 nt, Artificial Sequence
  Description of Artificial Sequence: Synthetic oligonucleotide
ucauagggcaacucuccaa

SEQ ID NO: 2502344 - RNA, 19 nt, Artificial Sequence
  Description of Artificial Sequence: Synthetic oligonucleotide
agcugugagucguaguuaa

SEQ ID NO: 2502345 - RNA, 19 nt, Artificial Sequence
  Description of Artificial Sequence: Synthetic oligonucleotide
aaaggccuccagaauauau

SEQ ID NO: 2502346 - RNA, 19 nt, Artificial Sequence
  Description of Artificial Sequence: Synthetic oligonucleotide
uauauucauagggcaacuc

SEQ ID NO: 2502347 - RNA, 19 nt, Artificial Sequence
  Description of Artificial Sequence: Synthetic oligonucleotide
ugucucgugaggucagaac

SEQ ID NO: 2502348 - RNA, 19 nt, Artificial Sequence
  Description of Artificial Sequence: Synthetic oligonucleotide
uuucuacauucuucagucu

SEQ ID NO: 2502349 - RNA, 19 nt, Artificial Sequence
  Description of Artificial Sequence: Synthetic oligonucleotide
cuuugagucuucacguaca

SEQ ID NO: 2502350 - RNA, 19 nt, Artificial Sequence
  Description of Artificial Sequence: Synthetic oligonucleotide
gucagaaccagaccggaaa

SEQ ID NO: 2502351 - RNA, 19 nt, Artificial Sequence
  Description of Artificial Sequence: Synthetic oligonucleotide
ugaugaguugugagcucug

SEQ ID NO: 2502352 - RNA, 19 nt, Artificial Sequence
  Description of Artificial Sequence: Synthetic oligonucleotide
agucuagagggauuucaaa

SEQ ID NO: 2502353 - RNA, 19 nt, Artificial Sequence
  Description of Artificial Sequence: Synthetic oligonucleotide
auaagcugugagucguagu

SEQ ID NO: 2502354 - RNA, 19 nt, Artificial Sequence
  Description of Artificial Sequence: Synthetic oligonucleotide
ggauuucaaagguagacua

SEQ ID NO: 2502355 - RNA, 19 nt, Artificial Sequence
  Description of Artificial Sequence: Synthetic oligonucleotide
uucucugauggcgaguaaa

SEQ ID NO: 2502356 - RNA, 19 nt, Artificial Sequence
  Description of Artificial Sequence: Synthetic oligonucleotide
gucgcgucaggucggagcc

SEQ ID NO: 2502357 - RNA, 19 nt, Artificial Sequence
  Description of Artificial Sequence: Synthetic oligonucleotide
uuuucacacuccuuacauu

SEQ ID NO: 2502358 - RNA, 19 nt, Artificial Sequence
  Description of Artificial Sequence: Synthetic oligonucleotide
ugaggucaacaaguaaacu

SEQ ID NO: 2502359 - RNA, 19 nt, Artificial Sequence
  Description of Artificial Sequence: Synthetic oligonucleotide
aucggauagcuuugagucu

SEQ ID NO: 2502360 - RNA, 19 nt, Artificial Sequence
  Description of Artificial Sequence: Synthetic oligonucleotide
uccucguauuuauaggcuu

SEQ ID NO: 2502361 - RNA, 19 nt, Artificial Sequence
  Description of Artificial Sequence: Synthetic oligonucleotide
ucuucagucuagagggauu

SEQ ID NO: 2502362 - RNA, 19 nt, Artificial Sequence
  Description of Artificial Sequence: Synthetic oligonucleotide
aguucuuuccgcaguccuc

SEQ ID NO: 2502363 - RNA, 19 nt, Artificial Sequence
  Description of Artificial Sequence: Synthetic oligonucleotide
uggauucuaugaugacuga

SEQ ID NO: 2502364 - RNA, 19 nt, Artificial Sequence
  Description of Artificial Sequence: Synthetic oligonucleotide
caauauauguuuugaugcu

SEQ ID NO: 2502365 - RNA, 19 nt, Artificial Sequence
  Description of Artificial Sequence: Synthetic oligonucleotide
cuguuucuacauucuucag

SEQ ID NO: 2502366 - RNA, 19 nt, Artificial Sequence
  Description of Artificial Sequence: Synthetic oligonucleotide
gaugacugaugaguuguga

SEQ ID NO: 2502367 - RNA, 19 nt, Artificial Sequence
  Description of Artificial Sequence: Synthetic oligonucleotide
cuuugauguuuaauaagcu

SEQ ID NO: 2502368 - RNA, 19 nt, Artificial Sequence
  Description of Artificial Sequence: Synthetic oligonucleotide
caaagguagacuaucggau

SEQ ID NO: 2502369 - RNA, 19 nt, Artificial Sequence
  Description of Artificial Sequence: Synthetic oligonucleotide
aaccagaccggaaagccuu

SEQ ID NO: 2502370 - RNA, 19 nt, Artificial Sequence
  Description of Artificial Sequence: Synthetic oligonucleotide
aggccuccagaauauauua

SEQ ID NO: 2502371 - RNA, 19 nt, Artificial Sequence
  Description of Artificial Sequence: Synthetic oligonucleotide
gacugaugaguugugagcu

SEQ ID NO: 2502372 - RNA, 19 nt, Artificial Sequence
  Description of Artificial Sequence: Synthetic oligonucleotide
ucgaagguuucuucccagu

SEQ ID NO: 2502373 - RNA, 19 nt, Artificial Sequence
  Description of Artificial Sequence: Synthetic oligonucleotide
gugaggucagaaccagacc

SEQ ID NO: 2502374 - RNA, 19 nt, Artificial Sequence
  Description of Artificial Sequence: Synthetic oligonucleotide
gauggcgaguaaaauugga

SEQ ID NO: 2502375 - RNA, 19 nt, Artificial Sequence
  Description of Artificial Sequence: Synthetic oligonucleotide
auauguuuugaugcugaau

SEQ ID NO: 2502376 - RNA, 19 nt, Artificial Sequence
  Description of Artificial Sequence: Synthetic oligonucleotide
uucuucagucuagagggau

SEQ ID NO: 2502377 - RNA, 19 nt, Artificial Sequence
  Description of Artificial Sequence: Synthetic oligonucleotide
auguugaguaaaauuggaa

SEQ ID NO: 2502378 - RNA, 19 nt, Artificial Sequence
  Description of Artificial Sequence: Synthetic oligonucleotide
gaugcugaauaagcuguga

SEQ ID NO: 2502379 - RNA, 19 nt, Artificial Sequence
  Description of Artificial Sequence: Synthetic oligonucleotide
aaggccuccagaauauauu

SEQ ID NO: 2502380 - RNA, 19 nt, Artificial Sequence
  Description of Artificial Sequence: Synthetic oligonucleotide
gaaagccuuuucacacucc

SEQ ID NO: 2502381 - RNA, 19 nt, Artificial Sequence
  Description of Artificial Sequence: Synthetic oligonucleotide
aguugugagcucugagaau

SEQ ID NO: 2502382 - RNA, 19 nt, Artificial Sequence
  Description of Artificial Sequence: Synthetic oligonucleotide
ggaaccacuacuaaaggcu

SEQ ID NO: 2502383 - RNA, 19 nt, Artificial Sequence
  Description of Artificial Sequence: Synthetic oligonucleotide
ucguauuuauaggcuuucu

SEQ ID NO: 2502384 - RNA, 19 nt, Artificial Sequence
  Description of Artificial Sequence: Synthetic oligonucleotide
ccggaaagccuuuucacac

SEQ ID NO: 2502385 - RNA, 19 nt, Artificial Sequence
  Description of Artificial Sequence: Synthetic oligonucleotide
ugaacaagcugaggucaac

SEQ ID NO: 2502386 - RNA, 19 nt, Artificial Sequence
  Description of Artificial Sequence: Synthetic oligonucleotide
gcugaggucaacaaguaaa

SEQ ID NO: 2502387 - RNA, 19 nt, Artificial Sequence
  Description of Artificial Sequence: Synthetic oligonucleotide
aucuuacauucguaggguu

SEQ ID NO: 2502388 - RNA, 19 nt, Artificial Sequence
  Description of Artificial Sequence: Synthetic oligonucleotide
auucugugaugucgcguca

SEQ ID NO: 2502389 - RNA, 19 nt, Artificial Sequence
  Description of Artificial Sequence: Synthetic oligonucleotide
cuagagggauuucaaaggu

SEQ ID NO: 2502390 - RNA, 19 nt, Artificial Sequence
  Description of Artificial Sequence: Synthetic oligonucleotide
cuaucggauagcuuugagu

SEQ ID NO: 2502391 - RNA, 19 nt, Artificial Sequence
  Description of Artificial Sequence: Synthetic oligonucleotide
cuuuucacacuccuuacau

SEQ ID NO: 2502392 - RNA, 19 nt, Artificial Sequence
  Description of Artificial Sequence: Synthetic oligonucleotide
cucguauuuauaggcuuuc

SEQ ID NO: 2502393 - RNA, 19 nt, Artificial Sequence
  Description of Artificial Sequence: Synthetic oligonucleotide
uuaccggcauggauucuau

SEQ ID NO: 2502394 - RNA, 19 nt, Artificial Sequence
  Description of Artificial Sequence: Synthetic oligonucleotide
gaugaguugugagcucuga

SEQ ID NO: 2502395 - RNA, 19 nt, Artificial Sequence
  Description of Artificial Sequence: Synthetic oligonucleotide
auggcgaguaaaauuggaa

SEQ ID NO: 2502396 - RNA, 19 nt, Artificial Sequence
  Description of Artificial Sequence: Synthetic oligonucleotide
agacuaucggauagcuuug

SEQ ID NO: 2502397 - RNA, 19 nt, Artificial Sequence
  Description of Artificial Sequence: Synthetic oligonucleotide
cucgugaggucagaaccag

SEQ ID NO: 2502398 - RNA, 19 nt, Artificial Sequence
  Description of Artificial Sequence: Synthetic oligonucleotide
ggagccacagauaaacguc

SEQ ID NO: 2502399 - RNA, 19 nt, Artificial Sequence
  Description of Artificial Sequence: Synthetic oligonucleotide
cacaaaucuuacauucgua

SEQ ID NO: 2502400 - RNA, 19 nt, Artificial Sequence
  Description of Artificial Sequence: Synthetic oligonucleotide
ucgugaggucagaaccaga

SEQ ID NO: 2502401 - RNA, 19 nt, Artificial Sequence
  Description of Artificial Sequence: Synthetic oligonucleotide
cgugaggucagaaccagac

SEQ ID NO: 2502402 - RNA, 19 nt, Artificial Sequence
  Description of Artificial Sequence: Synthetic oligonucleotide
gcgaguaaaauuggaacca

SEQ ID NO: 2502403 - RNA, 19 nt, Artificial Sequence
  Description of Artificial Sequence: Synthetic oligonucleotide
agcuuugagucuucacgua

SEQ ID NO: 2502404 - RNA, 19 nt, Artificial Sequence
  Description of Artificial Sequence: Synthetic oligonucleotide
auaggcuuucuuaccggca

SEQ ID NO: 2502405 - RNA, 19 nt, Artificial Sequence
  Description of Artificial Sequence: Synthetic oligonucleotide
gaaccacuacuaaaggccu

SEQ ID NO: 2502406 - RNA, 19 nt, Artificial Sequence
  Description of Artificial Sequence: Synthetic oligonucleotide
aagcugugagucguaguua

SEQ ID NO: 2502407 - RNA, 19 nt, Artificial Sequence
  Description of Artificial Sequence: Synthetic oligonucleotide
gugagucguaguuaaaguu

SEQ ID NO: 2502408 - RNA, 19 nt, Artificial Sequence
  Description of Artificial Sequence: Synthetic oligonucleotide
gaguaaaauuggaaccacu

SEQ ID NO: 2502409 - RNA, 19 nt, Artificial Sequence
  Description of Artificial Sequence: Synthetic oligonucleotide
cuaugaugacugaugaguu

SEQ ID NO: 2502410 - RNA, 19 nt, Artificial Sequence
  Description of Artificial Sequence: Synthetic oligonucleotide
accacuacuaaaggcuuuu

SEQ ID NO: 2502411 - RNA, 19 nt, Artificial Sequence
  Description of Artificial Sequence: Synthetic oligonucleotide
cagucuagagggauuucaa

SEQ ID NO: 2502412 - RNA, 19 nt, Artificial Sequence
  Description of Artificial Sequence: Synthetic oligonucleotide
auagggcaacucuccaaua

SEQ ID NO: 2502413 - RNA, 19 nt, Artificial Sequence
  Description of Artificial Sequence: Synthetic oligonucleotide
aagcugaggucaacaagua

SEQ ID NO: 2502414 - RNA, 19 nt, Artificial Sequence
  Description of Artificial Sequence: Synthetic oligonucleotide
cauagggcaacucuccaau

SEQ ID NO: 2502415 - RNA, 19 nt, Artificial Sequence
  Description of Artificial Sequence: Synthetic oligonucleotide
gagggauuucaaagguaga

SEQ ID NO: 2502416 - RNA, 19 nt, Artificial Sequence
  Description of Artificial Sequence: Synthetic oligonucleotide
ccuuacauucgaagguuuc

SEQ ID NO: 2502417 - RNA, 19 nt, Artificial Sequence
  Description of Artificial Sequence: Synthetic oligonucleotide
cagaccggaaagccuuuuc

SEQ ID NO: 2502418 - RNA, 19 nt, Artificial Sequence
  Description of Artificial Sequence: Synthetic oligonucleotide
gacuaucggauagcuuuga

SEQ ID NO: 2502419 - RNA, 19 nt, Artificial Sequence
  Description of Artificial Sequence: Synthetic oligonucleotide
uaccggcauggauucuaug

SEQ ID NO: 2502420 - RNA, 19 nt, Artificial Sequence
  Description of Artificial Sequence: Synthetic oligonucleotide
gagccacagauaaacgucu

SEQ ID NO: 2502421 - RNA, 19 nt, Artificial Sequence
  Description of Artificial Sequence: Synthetic oligonucleotide
aaccacuacuaaaggcuuu

SEQ ID NO: 2502422 - RNA, 19 nt, Artificial Sequence
  Description of Artificial Sequence: Synthetic oligonucleotide
gccuccagaauauauuaua

SEQ ID NO: 2502423 - RNA, 19 nt, Artificial Sequence
  Description of Artificial Sequence: Synthetic oligonucleotide
cuuucuuaccggcauggau

SEQ ID NO: 2502424 - RNA, 19 nt, Artificial Sequence
  Description of Artificial Sequence: Synthetic oligonucleotide
uucagucuagagggauuuc

SEQ ID NO: 2502425 - RNA, 19 nt, Artificial Sequence
  Description of Artificial Sequence: Synthetic oligonucleotide
uucuuuccgcaguccucgu

SEQ ID NO: 2502426 - RNA, 19 nt, Artificial Sequence
  Description of Artificial Sequence: Synthetic oligonucleotide
gggcaacucuccaauauga

SEQ ID NO: 2502427 - RNA, 19 nt, Artificial Sequence
  Description of Artificial Sequence: Synthetic oligonucleotide
uuuccgcaguccucguauu

SEQ ID NO: 2502428 - RNA, 19 nt, Artificial Sequence
  Description of Artificial Sequence: Synthetic oligonucleotide
cuuaccggcauggauucua

SEQ ID NO: 2502429 - RNA, 19 nt, Artificial Sequence
  Description of Artificial Sequence: Synthetic oligonucleotide
auucuucagucuagaggga

SEQ ID NO: 2502430 - RNA, 19 nt, Artificial Sequence
  Description of Artificial Sequence: Synthetic oligonucleotide
cuccagaauauauuauauu

SEQ ID NO: 2502431 - RNA, 19 nt, Artificial Sequence
  Description of Artificial Sequence: Synthetic oligonucleotide
augaacaagcugaggucaa

SEQ ID NO: 2502432 - RNA, 19 nt, Artificial Sequence
  Description of Artificial Sequence: Synthetic oligonucleotide
aaccacuacuaaaggccuu

SEQ ID NO: 2502433 - RNA, 19 nt, Artificial Sequence
  Description of Artificial Sequence: Synthetic oligonucleotide
acguacagcuuguguguuu

SEQ ID NO: 2502434 - RNA, 19 nt, Artificial Sequence
  Description of Artificial Sequence: Synthetic oligonucleotide
guauccuuugauguuuaau

SEQ ID NO: 2502435 - RNA, 19 nt, Artificial Sequence
  Description of Artificial Sequence: Synthetic oligonucleotide
caccaauauauguuuugau

SEQ ID NO: 2502436 - RNA, 19 nt, Artificial Sequence
  Description of Artificial Sequence: Synthetic oligonucleotide
cuucacguacagcuugugu

SEQ ID NO: 2502437 - RNA, 19 nt, Artificial Sequence
  Description of Artificial Sequence: Synthetic oligonucleotide
gaaccagaccggaaagccu

SEQ ID NO: 2502438 - RNA, 19 nt, Artificial Sequence
  Description of Artificial Sequence: Synthetic oligonucleotide
gaugucucgugaggucaga

SEQ ID NO: 2502439 - RNA, 19 nt, Artificial Sequence
  Description of Artificial Sequence: Synthetic oligonucleotide
gaaccacuacuaaaggcuu

SEQ ID NO: 2502440 - RNA, 19 nt, Artificial Sequence
  Description of Artificial Sequence: Synthetic oligonucleotide
gaauaagcugugagucgua

SEQ ID NO: 2502441 - RNA, 19 nt, Artificial Sequence
  Description of Artificial Sequence: Synthetic oligonucleotide
gguagacuaucggauagcu

SEQ ID NO: 2502442 - RNA, 19 nt, Artificial Sequence
  Description of Artificial Sequence: Synthetic oligonucleotide
ucuuaccggcauggauucu

SEQ ID NO: 2502443 - RNA, 19 nt, Artificial Sequence
  Description of Artificial Sequence: Synthetic oligonucleotide
gucguaguuaaaguucuuu

SEQ ID NO: 2502444 - RNA, 19 nt, Artificial Sequence
  Description of Artificial Sequence: Synthetic oligonucleotide
augucucgugaggucagaa

SEQ ID NO: 2502445 - RNA, 19 nt, Artificial Sequence
  Description of Artificial Sequence: Synthetic oligonucleotide
gucaggucggagccacaga

SEQ ID NO: 2502446 - RNA, 19 nt, Artificial Sequence
  Description of Artificial Sequence: Synthetic oligonucleotide
gaugucgcgucaggucgga

SEQ ID NO: 2502447 - RNA, 19 nt, Artificial Sequence
  Description of Artificial Sequence: Synthetic oligonucleotide
ccuuuucacacuccuuaca

SEQ ID NO: 2502448 - RNA, 19 nt, Artificial Sequence
  Description of Artificial Sequence: Synthetic oligonucleotide
guccucguauuuauaggcu

SEQ ID NO: 2502449 - RNA, 19 nt, Artificial Sequence
  Description of Artificial Sequence: Synthetic oligonucleotide
gucaacaaguaaacuguuu

SEQ ID NO: 2502450 - RNA, 19 nt, Artificial Sequence
  Description of Artificial Sequence: Synthetic oligonucleotide
cgaguaaaauuggaaccac

SEQ ID NO: 2502451 - RNA, 19 nt, Artificial Sequence
  Description of Artificial Sequence: Synthetic oligonucleotide
acgucuuuccacacuccuu

SEQ ID NO: 2502452 - RNA, 19 nt, Artificial Sequence
  Description of Artificial Sequence: Synthetic oligonucleotide
cuucagucuagagggauuu

SEQ ID NO: 2502453 - RNA, 19 nt, Artificial Sequence
  Description of Artificial Sequence: Synthetic oligonucleotide
cggcauggauucuaugaug

SEQ ID NO: 2502454 - RNA, 19 nt, Artificial Sequence
  Description of Artificial Sequence: Synthetic oligonucleotide
cuaaaggcauugccacacu

SEQ ID NO: 2502455 - RNA, 19 nt, Artificial Sequence
  Description of Artificial Sequence: Synthetic oligonucleotide
ggcaacucuccaauaugaa

SEQ ID NO: 2502456 - RNA, 19 nt, Artificial Sequence
  Description of Artificial Sequence: Synthetic oligonucleotide
agucguaguuaaaguucuu

SEQ ID NO: 2502457 - RNA, 19 nt, Artificial Sequence
  Description of Artificial Sequence: Synthetic oligonucleotide
gcauugccacacuccuuac

SEQ ID NO: 2502458 - RNA, 19 nt, Artificial Sequence
  Description of Artificial Sequence: Synthetic oligonucleotide
cgucuuuccacacuccuua

SEQ ID NO: 2502459 - RNA, 19 nt, Artificial Sequence
  Description of Artificial Sequence: Synthetic oligonucleotide
cuccuuacauucgaagguu

SEQ ID NO: 2502460 - RNA, 19 nt, Artificial Sequence
  Description of Artificial Sequence: Synthetic oligonucleotide
caggucggagccacagaua

SEQ ID NO: 2502461 - RNA, 19 nt, Artificial Sequence
  Description of Artificial Sequence: Synthetic oligonucleotide
gucuucacguacagcuugu

SEQ ID NO: 2502462 - RNA, 19 nt, Artificial Sequence
  Description of Artificial Sequence: Synthetic oligonucleotide
augucgcgucaggucggag

SEQ ID NO: 2502463 - RNA, 19 nt, Artificial Sequence
  Description of Artificial Sequence: Synthetic oligonucleotide
ucgcgucaggucggagcca

SEQ ID NO: 2502464 - RNA, 19 nt, Artificial Sequence
  Description of Artificial Sequence: Synthetic oligonucleotide
cucugauguugaguaaaau

SEQ ID NO: 2502465 - RNA, 19 nt, Artificial Sequence
  Description of Artificial Sequence: Synthetic oligonucleotide
cucugauggcgaguaaaau

SEQ ID NO: 2502466 - RNA, 19 nt, Artificial Sequence
  Description of Artificial Sequence: Synthetic oligonucleotide
cugugaugucgcgucaggu

SEQ ID NO: 2502467 - RNA, 19 nt, Artificial Sequence
  Description of Artificial Sequence: Synthetic oligonucleotide
guagacuaucggauagcuu

SEQ ID NO: 2502468 - RNA, 19 nt, Artificial Sequence
  Description of Artificial Sequence: Synthetic oligonucleotide
cgucaggucggagccacag

SEQ ID NO: 2502469 - RNA, 19 nt, Artificial Sequence
  Description of Artificial Sequence: Synthetic oligonucleotide
gcuuucuuaccggcaugga

SEQ ID NO: 2502470 - RNA, 19 nt, Artificial Sequence
  Description of Artificial Sequence: Synthetic oligonucleotide
ggucagaaccagaccggaa

SEQ ID NO: 2502471 - RNA, 19 nt, Artificial Sequence
  Description of Artificial Sequence: Synthetic oligonucleotide
aggcauugccacacuccuu

SEQ ID NO: 2502472 - RNA, 19 nt, Artificial Sequence
  Description of Artificial Sequence: Synthetic oligonucleotide
accagaccggaaagccuuu

SEQ ID NO: 2502473 - RNA, 19 nt, Artificial Sequence
  Description of Artificial Sequence: Synthetic oligonucleotide
ccacuacuaaaggcuuuuc

SEQ ID NO: 2502474 - RNA, 19 nt, Artificial Sequence
  Description of Artificial Sequence: Synthetic oligonucleotide
cggagccacagauaaacgu

SEQ ID NO: 2502475 - RNA, 19 nt, Artificial Sequence
  Description of Artificial Sequence: Synthetic oligonucleotide
cguauuuauaggcuuucuu

SEQ ID NO: 2502476 - RNA, 19 nt, Artificial Sequence
  Description of Artificial Sequence: Synthetic oligonucleotide
ccucguauuuauaggcuuu

SEQ ID NO: 2502477 - RNA, 19 nt, Artificial Sequence
  Description of Artificial Sequence: Synthetic oligonucleotide
ccggcauggauucuaugau

SEQ ID NO: 2502478 - RNA, 19 nt, Artificial Sequence
  Description of Artificial Sequence: Synthetic oligonucleotide
gcugugagucguaguuaaa

SEQ ID NO: 2502479 - RNA, 19 nt, Artificial Sequence
  Description of Artificial Sequence: Synthetic oligonucleotide
cggauagcuuugagucuuc

SEQ ID NO: 2502480 - RNA, 19 nt, Artificial Sequence
  Description of Artificial Sequence: Synthetic oligonucleotide
ggccuccagaauauauuau

SEQ ID NO: 2502481 - RNA, 19 nt, Artificial Sequence
  Description of Artificial Sequence: Synthetic oligonucleotide
cgcgucaggucggagccac

SEQ ID NO: 2502482 - RNA, 19 nt, Artificial Sequence
  Description of Artificial Sequence: Synthetic oligonucleotide
ggucggagccacagauaaa

SEQ ID NO: 2502483 - RNA, 19 nt, Artificial Sequence
  Description of Artificial Sequence: Synthetic oligonucleotide
cacguacagcuuguguguu

SEQ ID NO: 2502484 - RNA, 19 nt, Artificial Sequence
  Description of Artificial Sequence: Synthetic oligonucleotide
cggaaagccuuuucacacu

SEQ ID NO: 2502485 - RNA, 19 nt, Artificial Sequence
  Description of Artificial Sequence: Synthetic oligonucleotide
ccgcaguccucguauuuau

SEQ ID NO: 2502486 - RNA, 19 nt, Artificial Sequence
  Description of Artificial Sequence: Synthetic oligonucleotide
cguacagcuuguguguuuu

SEQ ID NO: 2502487 - RNA, 19 nt, Artificial Sequence
  Description of Artificial Sequence: Synthetic oligonucleotide
gcgucaggucggagccaca

SEQ ID NO: 2502488 - RNA, 19 nt, Artificial Sequence
  Description of Artificial Sequence: Synthetic oligonucleotide
ccagaccggaaagccuuuu

SEQ ID NO: 2502489 - RNA, 19 nt, Artificial Sequence
  Description of Artificial Sequence: Synthetic oligonucleotide
ugagcuuagaaccugaaga

SEQ ID NO: 2502490 - RNA, 19 nt, Artificial Sequence
  Description of Artificial Sequence: Synthetic oligonucleotide
auaacugagaauccaaagg

SEQ ID NO: 2502491 - RNA, 19 nt, Artificial Sequence
  Description of Artificial Sequence: Synthetic oligonucleotide
agauaaaaguguuugcugg

SEQ ID NO: 2502492 - RNA, 19 nt, Artificial Sequence
  Description of Artificial Sequence: Synthetic oligonucleotide
uuaccauuuucacuaagcg

SEQ ID NO: 2502493 - RNA, 19 nt, Artificial Sequence
  Description of Artificial Sequence: Synthetic oligonucleotide
gucuauugagcuuagaacc

SEQ ID NO: 2502494 - RNA, 19 nt, Artificial Sequence
  Description of Artificial Sequence: Synthetic oligonucleotide
guaaacaccuguuuggagg

SEQ ID NO: 2502495 - RNA, 19 nt, Artificial Sequence
  Description of Artificial Sequence: Synthetic oligonucleotide
agaauccaaaggcaggucc

SEQ ID NO: 2502496 - RNA, 19 nt, Artificial Sequence
  Description of Artificial Sequence: Synthetic oligonucleotide
aaugucaaggccccagggg

SEQ ID NO: 2502497 - RNA, 19 nt, Artificial Sequence
  Description of Artificial Sequence: Synthetic oligonucleotide
ucuuccaguuccaagaaug

SEQ ID NO: 2502498 - RNA, 19 nt, Artificial Sequence
  Description of Artificial Sequence: Synthetic oligonucleotide
ucuuucaccagugaacucg

SEQ ID NO: 2502499 - RNA, 19 nt, Artificial Sequence
  Description of Artificial Sequence: Synthetic oligonucleotide
auaggagugcgcuggaugc

SEQ ID NO: 2502500 - RNA, 19 nt, Artificial Sequence
  Description of Artificial Sequence: Synthetic oligonucleotide
aggagaucuuccuaguacc

SEQ ID NO: 2502501 - RNA, 19 nt, Artificial Sequence
  Description of Artificial Sequence: Synthetic oligonucleotide
uucgguuucaaauucuuca

SEQ ID NO: 2502502 - RNA, 19 nt, Artificial Sequence
  Description of Artificial Sequence: Synthetic oligonucleotide
gcaauuaugaguucugugg

SEQ ID NO: 2502503 - RNA, 19 nt, Artificial Sequence
  Description of Artificial Sequence: Synthetic oligonucleotide
guaccacugaucuucaugg

SEQ ID NO: 2502504 - RNA, 19 nt, Artificial Sequence
  Description of Artificial Sequence: Synthetic oligonucleotide
uguuguguggcagaggccg

SEQ ID NO: 2502505 - RNA, 19 nt, Artificial Sequence
  Description of Artificial Sequence: Synthetic oligonucleotide
cugaguagaacccaucucc

SEQ ID NO: 2502506 - RNA, 19 nt, Artificial Sequence
  Description of Artificial Sequence: Synthetic oligonucleotide
gacuccuuccuuuaggucc

SEQ ID NO: 2502507 - RNA, 19 nt, Artificial Sequence
  Description of Artificial Sequence: Synthetic oligonucleotide
aauaggagugcgcuggaug

SEQ ID NO: 2502508 - RNA, 19 nt, Artificial Sequence
  Description of Artificial Sequence: Synthetic oligonucleotide
cuuguuuaggacaacucag

SEQ ID NO: 2502509 - RNA, 19 nt, Artificial Sequence
  Description of Artificial Sequence: Synthetic oligonucleotide
cuuguuguguggcagaggc

SEQ ID NO: 2502510 - RNA, 19 nt, Artificial Sequence
  Description of Artificial Sequence: Synthetic oligonucleotide
uaccauuuucacuaagcgg

SEQ ID NO: 2502511 - RNA, 19 nt, Artificial Sequence
  Description of Artificial Sequence: Synthetic oligonucleotide
caagggauaacugagaauc

SEQ ID NO: 2502512 - RNA, 19 nt, Artificial Sequence
  Description of Artificial Sequence: Synthetic oligonucleotide
ggguaaauggacuuggagg

SEQ ID NO: 2502513 - RNA, 19 nt, Artificial Sequence
  Description of Artificial Sequence: Synthetic oligonucleotide
uguaccacugaucuucaug

SEQ ID NO: 2502514 - RNA, 19 nt, Artificial Sequence
  Description of Artificial Sequence: Synthetic oligonucleotide
ugucgcaaugucaaggccc

SEQ ID NO: 2502515 - RNA, 19 nt, Artificial Sequence
  Description of Artificial Sequence: Synthetic oligonucleotide
uuguuuaggacaacucagc

SEQ ID NO: 2502516 - RNA, 19 nt, Artificial Sequence
  Description of Artificial Sequence: Synthetic oligonucleotide
ucuauugagcuuagaaccu

SEQ ID NO: 2502517 - RNA, 19 nt, Artificial Sequence
  Description of Artificial Sequence: Synthetic oligonucleotide
ugccacucgggccagaugc

SEQ ID NO: 2502518 - RNA, 19 nt, Artificial Sequence
  Description of Artificial Sequence: Synthetic oligonucleotide
agaaccugaagacugggga

SEQ ID NO: 2502519 - RNA, 19 nt, Artificial Sequence
  Description of Artificial Sequence: Synthetic oligonucleotide
uguuugcuggggcagagca

SEQ ID NO: 2502520 - RNA, 19 nt, Artificial Sequence
  Description of Artificial Sequence: Synthetic oligonucleotide
cuuagaaccugaagacugg

SEQ ID NO: 2502521 - RNA, 19 nt, Artificial Sequence
  Description of Artificial Sequence: Synthetic oligonucleotide
cacuaagcggagaaggccg

SEQ ID NO: 2502522 - RNA, 19 nt, Artificial Sequence
  Description of Artificial Sequence: Synthetic oligonucleotide
aauuaugaguucuguggau

SEQ ID NO: 2502523 - RNA, 19 nt, Artificial Sequence
  Description of Artificial Sequence: Synthetic oligonucleotide
gaacccaucuccacuaggg

SEQ ID NO: 2502524 - RNA, 19 nt, Artificial Sequence
  Description of Artificial Sequence: Synthetic oligonucleotide
uugagcuuagaaccugaag

SEQ ID NO: 2502525 - RNA, 19 nt, Artificial Sequence
  Description of Artificial Sequence: Synthetic oligonucleotide
aagggauaacugagaaucc

SEQ ID NO: 2502526 - RNA, 19 nt, Artificial Sequence
  Description of Artificial Sequence: Synthetic oligonucleotide
uuugcuggggcagagcaag

SEQ ID NO: 2502527 - RNA, 19 nt, Artificial Sequence
  Description of Artificial Sequence: Synthetic oligonucleotide
auaaaaguguuugcugggg

SEQ ID NO: 2502528 - RNA, 19 nt, Artificial Sequence
  Description of Artificial Sequence: Synthetic oligonucleotide
cugaauaggagugcgcugg

SEQ ID NO: 2502529 - RNA, 19 nt, Artificial Sequence
  Description of Artificial Sequence: Synthetic oligonucleotide
aguagaacccaucuccacu

SEQ ID NO: 2502530 - RNA, 19 nt, Artificial Sequence
  Description of Artificial Sequence: Synthetic oligonucleotide
gaaccugaagacuggggag

SEQ ID NO: 2502531 - RNA, 19 nt, Artificial Sequence
  Description of Artificial Sequence: Synthetic oligonucleotide
agcaacugguccucaaggg

SEQ ID NO: 2502532 - RNA, 19 nt, Artificial Sequence
  Description of Artificial Sequence: Synthetic oligonucleotide
uccaagaaugacuccuucc

SEQ ID NO: 2502533 - RNA, 19 nt, Artificial Sequence
  Description of Artificial Sequence: Synthetic oligonucleotide
uguccgagcaaugccaagg

SEQ ID NO: 2502534 - RNA, 19 nt, Artificial Sequence
  Description of Artificial Sequence: Synthetic oligonucleotide
gagaaggccgcuuacccug

SEQ ID NO: 2502535 - RNA, 19 nt, Artificial Sequence
  Description of Artificial Sequence: Synthetic oligonucleotide
agguccuuaccauuuucac

SEQ ID NO: 2502536 - RNA, 19 nt, Artificial Sequence
  Description of Artificial Sequence: Synthetic oligonucleotide
uguggauugcuuagccucc

SEQ ID NO: 2502537 - RNA, 19 nt, Artificial Sequence
  Description of Artificial Sequence: Synthetic oligonucleotide
agagcgaggaucugggucu

SEQ ID NO: 2502538 - RNA, 19 nt, Artificial Sequence
  Description of Artificial Sequence: Synthetic oligonucleotide
aaggguaggagagcgagga

SEQ ID NO: 2502539 - RNA, 19 nt, Artificial Sequence
  Description of Artificial Sequence: Synthetic oligonucleotide
acugagaauccaaaggcag

SEQ ID NO: 2502540 - RNA, 19 nt, Artificial Sequence
  Description of Artificial Sequence: Synthetic oligonucleotide
aguucaaucuggcuccaug

SEQ ID NO: 2502541 - RNA, 19 nt, Artificial Sequence
  Description of Artificial Sequence: Synthetic oligonucleotide
uccaguucagaagauaaaa

SEQ ID NO: 2502542 - RNA, 19 nt, Artificial Sequence
  Description of Artificial Sequence: Synthetic oligonucleotide
ugcuauuugcuuuccgucu

SEQ ID NO: 2502543 - RNA, 19 nt, Artificial Sequence
  Description of Artificial Sequence: Synthetic oligonucleotide
uauugagcuuagaaccuga

SEQ ID NO: 2502544 - RNA, 19 nt, Artificial Sequence
  Description of Artificial Sequence: Synthetic oligonucleotide
uuuggaggggaguucaauc

SEQ ID NO: 2502545 - RNA, 19 nt, Artificial Sequence
  Description of Artificial Sequence: Synthetic oligonucleotide
cuguggauugcuuagccuc

SEQ ID NO: 2502546 - RNA, 19 nt, Artificial Sequence
  Description of Artificial Sequence: Synthetic oligonucleotide
ugagaauccaaaggcaggu

SEQ ID NO: 2502547 - RNA, 19 nt, Artificial Sequence
  Description of Artificial Sequence: Synthetic oligonucleotide
uuagaaccugaagacuggg

SEQ ID NO: 2502548 - RNA, 19 nt, Artificial Sequence
  Description of Artificial Sequence: Synthetic oligonucleotide
ucgguuucaaauucuucac

SEQ ID NO: 2502549 - RNA, 19 nt, Artificial Sequence
  Description of Artificial Sequence: Synthetic oligonucleotide
guccuuaccauuuucacua

SEQ ID NO: 2502550 - RNA, 19 nt, Artificial Sequence
  Description of Artificial Sequence: Synthetic oligonucleotide
augucaaggccccagggga

SEQ ID NO: 2502551 - RNA, 19 nt, Artificial Sequence
  Description of Artificial Sequence: Synthetic oligonucleotide
uacccugucgcaaugucaa

SEQ ID NO: 2502552 - RNA, 19 nt, Artificial Sequence
  Description of Artificial Sequence: Synthetic oligonucleotide
caccagugaacucggaggg

SEQ ID NO: 2502553 - RNA, 19 nt, Artificial Sequence
  Description of Artificial Sequence: Synthetic oligonucleotide
uggcuggcaauuaugaguu

SEQ ID NO: 2502554 - RNA, 19 nt, Artificial Sequence
  Description of Artificial Sequence: Synthetic oligonucleotide
uuucagaagucuuccaguu

SEQ ID NO: 2502555 - RNA, 19 nt, Artificial Sequence
  Description of Artificial Sequence: Synthetic oligonucleotide
ucugaguagaacccaucuc

SEQ ID NO: 2502556 - RNA, 19 nt, Artificial Sequence
  Description of Artificial Sequence: Synthetic oligonucleotide
ucacuaagcggagaaggcc

SEQ ID NO: 2502557 - RNA, 19 nt, Artificial Sequence
  Description of Artificial Sequence: Synthetic oligonucleotide
ugaagacuggggagucucg

SEQ ID NO: 2502558 - RNA, 19 nt, Artificial Sequence
  Description of Artificial Sequence: Synthetic oligonucleotide
uccacuagggguggggacg

SEQ ID NO: 2502559 - RNA, 19 nt, Artificial Sequence
  Description of Artificial Sequence: Synthetic oligonucleotide
cuaguaccuugcuauuugc

SEQ ID NO: 2502560 - RNA, 19 nt, Artificial Sequence
  Description of Artificial Sequence: Synthetic oligonucleotide
guugucguccugcaggaug

SEQ ID NO: 2502561 - RNA, 19 nt, Artificial Sequence
  Description of Artificial Sequence: Synthetic oligonucleotide
uuacccugucgcaauguca

SEQ ID NO: 2502562 - RNA, 19 nt, Artificial Sequence
  Description of Artificial Sequence: Synthetic oligonucleotide
uuuucacuaagcggagaag

SEQ ID NO: 2502563 - RNA, 19 nt, Artificial Sequence
  Description of Artificial Sequence: Synthetic oligonucleotide
aggugaacgagggucugcc

SEQ ID NO: 2502564 - RNA, 19 nt, Artificial Sequence
  Description of Artificial Sequence: Synthetic oligonucleotide
uugcuauuugcuuuccguc

SEQ ID NO: 2502565 - RNA, 19 nt, Artificial Sequence
  Description of Artificial Sequence: Synthetic oligonucleotide
ugcuuuccgucuauugagc

SEQ ID NO: 2502566 - RNA, 19 nt, Artificial Sequence
  Description of Artificial Sequence: Synthetic oligonucleotide
aguaccuugcuauuugcuu

SEQ ID NO: 2502567 - RNA, 19 nt, Artificial Sequence
  Description of Artificial Sequence: Synthetic oligonucleotide
aaggccgcuuacccugucg

SEQ ID NO: 2502568 - RNA, 19 nt, Artificial Sequence
  Description of Artificial Sequence: Synthetic oligonucleotide
caauuaugaguucugugga

SEQ ID NO: 2502569 - RNA, 19 nt, Artificial Sequence
  Description of Artificial Sequence: Synthetic oligonucleotide
agggucugccacucgggcc

SEQ ID NO: 2502570 - RNA, 19 nt, Artificial Sequence
  Description of Artificial Sequence: Synthetic oligonucleotide
auggguguccgagcaaugc

SEQ ID NO: 2502571 - RNA, 19 nt, Artificial Sequence
  Description of Artificial Sequence: Synthetic oligonucleotide
agaacccaucuccacuagg

SEQ ID NO: 2502572 - RNA, 19 nt, Artificial Sequence
  Description of Artificial Sequence: Synthetic oligonucleotide
gucuguaccacugaucuuc

SEQ ID NO: 2502573 - RNA, 19 nt, Artificial Sequence
  Description of Artificial Sequence: Synthetic oligonucleotide
uuuccgucuauugagcuua

SEQ ID NO: 2502574 - RNA, 19 nt, Artificial Sequence
  Description of Artificial Sequence: Synthetic oligonucleotide
uguggagagcucuccaccu

SEQ ID NO: 2502575 - RNA, 19 nt, Artificial Sequence
  Description of Artificial Sequence: Synthetic oligonucleotide
aggccgcuuacccugucgc

SEQ ID NO: 2502576 - RNA, 19 nt, Artificial Sequence
  Description of Artificial Sequence: Synthetic oligonucleotide
ucuucauggguguccgagc

SEQ ID NO: 2502577 - RNA, 19 nt, Artificial Sequence
  Description of Artificial Sequence: Synthetic oligonucleotide
gaaugacuccuuccuuuag

SEQ ID NO: 2502578 - RNA, 19 nt, Artificial Sequence
  Description of Artificial Sequence: Synthetic oligonucleotide
uggguguccgagcaaugcc

SEQ ID NO: 2502579 - RNA, 19 nt, Artificial Sequence
  Description of Artificial Sequence: Synthetic oligonucleotide
gggaguucaaucuggcucc

SEQ ID NO: 2502580 - RNA, 19 nt, Artificial Sequence
  Description of Artificial Sequence: Synthetic oligonucleotide
gaagacuggggagucucgg

SEQ ID NO: 2502581 - RNA, 19 nt, Artificial Sequence
  Description of Artificial Sequence: Synthetic oligonucleotide
gagagcgaggaucuggguc

SEQ ID NO: 2502582 - RNA, 19 nt, Artificial Sequence
  Description of Artificial Sequence: Synthetic oligonucleotide
aucuucauggguguccgag

SEQ ID NO: 2502583 - RNA, 19 nt, Artificial Sequence
  Description of Artificial Sequence: Synthetic oligonucleotide
acgagggucugccacucgg

SEQ ID NO: 2502584 - RNA, 19 nt, Artificial Sequence
  Description of Artificial Sequence: Synthetic oligonucleotide
uuagguccuuaccauuuuc

SEQ ID NO: 2502585 - RNA, 19 nt, Artificial Sequence
  Description of Artificial Sequence: Synthetic oligonucleotide
ucuuccuaguaccuugcua

SEQ ID NO: 2502586 - RNA, 19 nt, Artificial Sequence
  Description of Artificial Sequence: Synthetic oligonucleotide
ucuguggauugcuuagccu

SEQ ID NO: 2502587 - RNA, 19 nt, Artificial Sequence
  Description of Artificial Sequence: Synthetic oligonucleotide
cacuaggugaacgaggguc

SEQ ID NO: 2502588 - RNA, 19 nt, Artificial Sequence
  Description of Artificial Sequence: Synthetic oligonucleotide
ugguaaacaccuguuugga

SEQ ID NO: 2502589 - RNA, 19 nt, Artificial Sequence
  Description of Artificial Sequence: Synthetic oligonucleotide
agagcaagcucuguggggu

SEQ ID NO: 2502590 - RNA, 19 nt, Artificial Sequence
  Description of Artificial Sequence: Synthetic oligonucleotide
aaauggacuuggaggcuuc

SEQ ID NO: 2502591 - RNA, 19 nt, Artificial Sequence
  Description of Artificial Sequence: Synthetic oligonucleotide
agucucgggaucucuugag

SEQ ID NO: 2502592 - RNA, 19 nt, Artificial Sequence
  Description of Artificial Sequence: Synthetic oligonucleotide
ucaagggauaacugagaau

SEQ ID NO: 2502593 - RNA, 19 nt, Artificial Sequence
  Description of Artificial Sequence: Synthetic oligonucleotide
ucuguaccacugaucuuca

SEQ ID NO: 2502594 - RNA, 19 nt, Artificial Sequence
  Description of Artificial Sequence: Synthetic oligonucleotide
aggggaguugucguccugc

SEQ ID NO: 2502595 - RNA, 19 nt, Artificial Sequence
  Description of Artificial Sequence: Synthetic oligonucleotide
cucgggaucucuugagggc

SEQ ID NO: 2502596 - RNA, 19 nt, Artificial Sequence
  Description of Artificial Sequence: Synthetic oligonucleotide
gcuggagugccugagaugc

SEQ ID NO: 2502597 - RNA, 19 nt, Artificial Sequence
  Description of Artificial Sequence: Synthetic oligonucleotide
ugugggguaaauggacuug

SEQ ID NO: 2502598 - RNA, 19 nt, Artificial Sequence
  Description of Artificial Sequence: Synthetic oligonucleotide
cuggcaauuaugaguucug

SEQ ID NO: 2502599 - RNA, 19 nt, Artificial Sequence
  Description of Artificial Sequence: Synthetic oligonucleotide
cuguggagagcucuccacc

SEQ ID NO: 2502600 - RNA, 19 nt, Artificial Sequence
  Description of Artificial Sequence: Synthetic oligonucleotide
guccgagcaaugccaaggg

SEQ ID NO: 2502601 - RNA, 19 nt, Artificial Sequence
  Description of Artificial Sequence: Synthetic oligonucleotide
agcuuguuuaggacaacuc

SEQ ID NO: 2502602 - RNA, 19 nt, Artificial Sequence
  Description of Artificial Sequence: Synthetic oligonucleotide
ccaguucagaagauaaaag

SEQ ID NO: 2502603 - RNA, 19 nt, Artificial Sequence
  Description of Artificial Sequence: Synthetic oligonucleotide
gugaacgagggucugccac

SEQ ID NO: 2502604 - RNA, 19 nt, Artificial Sequence
  Description of Artificial Sequence: Synthetic oligonucleotide
gcuuguuuaggacaacuca

SEQ ID NO: 2502605 - RNA, 19 nt, Artificial Sequence
  Description of Artificial Sequence: Synthetic oligonucleotide
ggcaauuaugaguucugug

SEQ ID NO: 2502606 - RNA, 19 nt, Artificial Sequence
  Description of Artificial Sequence: Synthetic oligonucleotide
ugaauaggagugcgcugga

SEQ ID NO: 2502607 - RNA, 19 nt, Artificial Sequence
  Description of Artificial Sequence: Synthetic oligonucleotide
ggggaguucaaucuggcuc

SEQ ID NO: 2502608 - RNA, 19 nt, Artificial Sequence
  Description of Artificial Sequence: Synthetic oligonucleotide
auuaugaguucuguggauu

SEQ ID NO: 2502609 - RNA, 19 nt, Artificial Sequence
  Description of Artificial Sequence: Synthetic oligonucleotide
aggagugcgcuggaugccc

SEQ ID NO: 2502610 - RNA, 19 nt, Artificial Sequence
  Description of Artificial Sequence: Synthetic oligonucleotide
uggaugcccgcacuaggug

SEQ ID NO: 2502611 - RNA, 19 nt, Artificial Sequence
  Description of Artificial Sequence: Synthetic oligonucleotide
uuuagguccuuaccauuuu

SEQ ID NO: 2502612 - RNA, 19 nt, Artificial Sequence
  Description of Artificial Sequence: Synthetic oligonucleotide
accugaauaggagugcgcu

SEQ ID NO: 2502613 - RNA, 19 nt, Artificial Sequence
  Description of Artificial Sequence: Synthetic oligonucleotide
gguaaacaccuguuuggag

SEQ ID NO: 2502614 - RNA, 19 nt, Artificial Sequence
  Description of Artificial Sequence: Synthetic oligonucleotide
acuaagcggagaaggccgc

SEQ ID NO: 2502615 - RNA, 19 nt, Artificial Sequence
  Description of Artificial Sequence: Synthetic oligonucleotide
cuucgguuucaaauucuuc

SEQ ID NO: 2502616 - RNA, 19 nt, Artificial Sequence
  Description of Artificial Sequence: Synthetic oligonucleotide
uggggacgaagcccggcgg

SEQ ID NO: 2502617 - RNA, 19 nt, Artificial Sequence
  Description of Artificial Sequence: Synthetic oligonucleotide
agaaugacuccuuccuuua

SEQ ID NO: 2502618 - RNA, 19 nt, Artificial Sequence
  Description of Artificial Sequence: Synthetic oligonucleotide
aacgagggucugccacucg

SEQ ID NO: 2502619 - RNA, 19 nt, Artificial Sequence
  Description of Artificial Sequence: Synthetic oligonucleotide
gaauccaaaggcaggucca

SEQ ID NO: 2502620 - RNA, 19 nt, Artificial Sequence
  Description of Artificial Sequence: Synthetic oligonucleotide
cuauugagcuuagaaccug

SEQ ID NO: 2502621 - RNA, 19 nt, Artificial Sequence
  Description of Artificial Sequence: Synthetic oligonucleotide
agggauaacugagaaucca

SEQ ID NO: 2502622 - RNA, 19 nt, Artificial Sequence
  Description of Artificial Sequence: Synthetic oligonucleotide
gugccugagaugcucugag

SEQ ID NO: 2502623 - RNA, 19 nt, Artificial Sequence
  Description of Artificial Sequence: Synthetic oligonucleotide
agcggagaaggccgcuuac

SEQ ID NO: 2502624 - RNA, 19 nt, Artificial Sequence
  Description of Artificial Sequence: Synthetic oligonucleotide
caaggguaggagagcgagg

SEQ ID NO: 2502625 - RNA, 19 nt, Artificial Sequence
  Description of Artificial Sequence: Synthetic oligonucleotide
aguucuggcuggcaauuau

SEQ ID NO: 2502626 - RNA, 19 nt, Artificial Sequence
  Description of Artificial Sequence: Synthetic oligonucleotide
uaaauggacuuggaggcuu

SEQ ID NO: 2502627 - RNA, 19 nt, Artificial Sequence
  Description of Artificial Sequence: Synthetic oligonucleotide
uccuugguaaacaccuguu

SEQ ID NO: 2502628 - RNA, 19 nt, Artificial Sequence
  Description of Artificial Sequence: Synthetic oligonucleotide
agcaaugccaaggguagga

SEQ ID NO: 2502629 - RNA, 19 nt, Artificial Sequence
  Description of Artificial Sequence: Synthetic oligonucleotide
caaaggcagguccaguuca

SEQ ID NO: 2502630 - RNA, 19 nt, Artificial Sequence
  Description of Artificial Sequence: Synthetic oligonucleotide
cuugcuauuugcuuuccgu

SEQ ID NO: 2502631 - RNA, 19 nt, Artificial Sequence
  Description of Artificial Sequence: Synthetic oligonucleotide
guagaacccaucuccacua

SEQ ID NO: 2502632 - RNA, 19 nt, Artificial Sequence
  Description of Artificial Sequence: Synthetic oligonucleotide
agcuuagaaccugaagacu

SEQ ID NO: 2502633 - RNA, 19 nt, Artificial Sequence
  Description of Artificial Sequence: Synthetic oligonucleotide
ugcucugaguagaacccau

SEQ ID NO: 2502634 - RNA, 19 nt, Artificial Sequence
  Description of Artificial Sequence: Synthetic oligonucleotide
gaguugucguccugcagga

SEQ ID NO: 2502635 - RNA, 19 nt, Artificial Sequence
  Description of Artificial Sequence: Synthetic oligonucleotide
acuaggugaacgagggucu

SEQ ID NO: 2502636 - RNA, 19 nt, Artificial Sequence
  Description of Artificial Sequence: Synthetic oligonucleotide
aggauggugagaggagauc

SEQ ID NO: 2502637 - RNA, 19 nt, Artificial Sequence
  Description of Artificial Sequence: Synthetic oligonucleotide
gucgcaaugucaaggcccc

SEQ ID NO: 2502638 - RNA, 19 nt, Artificial Sequence
  Description of Artificial Sequence: Synthetic oligonucleotide
ggauugcuuagccuccucc

SEQ ID NO: 2502639 - RNA, 19 nt, Artificial Sequence
  Description of Artificial Sequence: Synthetic oligonucleotide
cuucauggguguccgagca

SEQ ID NO: 2502640 - RNA, 19 nt, Artificial Sequence
  Description of Artificial Sequence: Synthetic oligonucleotide
ucauggguguccgagcaau

SEQ ID NO: 2502641 - RNA, 19 nt, Artificial Sequence
  Description of Artificial Sequence: Synthetic oligonucleotide
cgucuauugagcuuagaac

SEQ ID NO: 2502642 - RNA, 19 nt, Artificial Sequence
  Description of Artificial Sequence: Synthetic oligonucleotide
ucgggaucucuugagggcu

SEQ ID NO: 2502643 - RNA, 19 nt, Artificial Sequence
  Description of Artificial Sequence: Synthetic oligonucleotide
uggcaauuaugaguucugu

SEQ ID NO: 2502644 - RNA, 19 nt, Artificial Sequence
  Description of Artificial Sequence: Synthetic oligonucleotide
ugacaggcuuggcugugga

SEQ ID NO: 2502645 - RNA, 19 nt, Artificial Sequence
  Description of Artificial Sequence: Synthetic oligonucleotide
cugucgcaaugucaaggcc

SEQ ID NO: 2502646 - RNA, 19 nt, Artificial Sequence
  Description of Artificial Sequence: Synthetic oligonucleotide
acaacucagcucuucuguu

SEQ ID NO: 2502647 - RNA, 19 nt, Artificial Sequence
  Description of Artificial Sequence: Synthetic oligonucleotide
ccugucgcaaugucaaggc

SEQ ID NO: 2502648 - RNA, 19 nt, Artificial Sequence
  Description of Artificial Sequence: Synthetic oligonucleotide
agcucuccaccugaauagg

SEQ ID NO: 2502649 - RNA, 19 nt, Artificial Sequence
  Description of Artificial Sequence: Synthetic oligonucleotide
uccgagcaaugccaagggu

SEQ ID NO: 2502650 - RNA, 19 nt, Artificial Sequence
  Description of Artificial Sequence: Synthetic oligonucleotide
acugaucuucauggguguc

SEQ ID NO: 2502651 - RNA, 19 nt, Artificial Sequence
  Description of Artificial Sequence: Synthetic oligonucleotide
ugacuccuuccuuuagguc

SEQ ID NO: 2502652 - RNA, 19 nt, Artificial Sequence
  Description of Artificial Sequence: Synthetic oligonucleotide
ccuaguaccuugcuauuug

SEQ ID NO: 2502653 - RNA, 19 nt, Artificial Sequence
  Description of Artificial Sequence: Synthetic oligonucleotide
gagucucgggaucucuuga

SEQ ID NO: 2502654 - RNA, 19 nt, Artificial Sequence
  Description of Artificial Sequence: Synthetic oligonucleotide
caccugaauaggagugcgc

SEQ ID NO: 2502655 - RNA, 19 nt, Artificial Sequence
  Description of Artificial Sequence: Synthetic oligonucleotide
cgcacuaggugaacgaggg

SEQ ID NO: 2502656 - RNA, 19 nt, Artificial Sequence
  Description of Artificial Sequence: Synthetic oligonucleotide
accuugcuauuugcuuucc

SEQ ID NO: 2502657 - RNA, 19 nt, Artificial Sequence
  Description of Artificial Sequence: Synthetic oligonucleotide
gaggggaguucaaucuggc

SEQ ID NO: 2502658 - RNA, 19 nt, Artificial Sequence
  Description of Artificial Sequence: Synthetic oligonucleotide
gaacucggagggucuguac

SEQ ID NO: 2502659 - RNA, 19 nt, Artificial Sequence
  Description of Artificial Sequence: Synthetic oligonucleotide
aagcggagaaggccgcuua

SEQ ID NO: 2502660 - RNA, 19 nt, Artificial Sequence
  Description of Artificial Sequence: Synthetic oligonucleotide
gggucuguaccacugaucu

SEQ ID NO: 2502661 - RNA, 19 nt, Artificial Sequence
  Description of Artificial Sequence: Synthetic oligonucleotide
ggucuugagcuuguuuagg

SEQ ID NO: 2502662 - RNA, 19 nt, Artificial Sequence
  Description of Artificial Sequence: Synthetic oligonucleotide
uuccgucuauugagcuuag

SEQ ID NO: 2502663 - RNA, 19 nt, Artificial Sequence
  Description of Artificial Sequence: Synthetic oligonucleotide
ugcccgcacuaggugaacg

SEQ ID NO: 2502664 - RNA, 19 nt, Artificial Sequence
  Description of Artificial Sequence: Synthetic oligonucleotide
agggucuguaccacugauc

SEQ ID NO: 2502665 - RNA, 19 nt, Artificial Sequence
  Description of Artificial Sequence: Synthetic oligonucleotide
uggagugccugagaugcuc

SEQ ID NO: 2502666 - RNA, 19 nt, Artificial Sequence
  Description of Artificial Sequence: Synthetic oligonucleotide
gaggcuucgguuucaaauu

SEQ ID NO: 2502667 - RNA, 19 nt, Artificial Sequence
  Description of Artificial Sequence: Synthetic oligonucleotide
aggggaguucaaucuggcu

SEQ ID NO: 2502668 - RNA, 19 nt, Artificial Sequence
  Description of Artificial Sequence: Synthetic oligonucleotide
uguuuggaggggaguucaa

SEQ ID NO: 2502669 - RNA, 19 nt, Artificial Sequence
  Description of Artificial Sequence: Synthetic oligonucleotide
ugaguucuggcuggcaauu

SEQ ID NO: 2502670 - RNA, 19 nt, Artificial Sequence
  Description of Artificial Sequence: Synthetic oligonucleotide
gagugccugagaugcucug

SEQ ID NO: 2502671 - RNA, 19 nt, Artificial Sequence
  Description of Artificial Sequence: Synthetic oligonucleotide
ugcgcuggaugcccgcacu

SEQ ID NO: 2502672 - RNA, 19 nt, Artificial Sequence
  Description of Artificial Sequence: Synthetic oligonucleotide
aucuuccuaguaccuugcu

SEQ ID NO: 2502673 - RNA, 19 nt, Artificial Sequence
  Description of Artificial Sequence: Synthetic oligonucleotide
acucgggccagaugcuugu

SEQ ID NO: 2502674 - RNA, 19 nt, Artificial Sequence
  Description of Artificial Sequence: Synthetic oligonucleotide
acuagggguggggacgaag

SEQ ID NO: 2502675 - RNA, 19 nt, Artificial Sequence
  Description of Artificial Sequence: Synthetic oligonucleotide
ggagucucgggaucucuug

SEQ ID NO: 2502676 - RNA, 19 nt, Artificial Sequence
  Description of Artificial Sequence: Synthetic oligonucleotide
uccuuaccauuuucacuaa

SEQ ID NO: 2502677 - RNA, 19 nt, Artificial Sequence
  Description of Artificial Sequence: Synthetic oligonucleotide
uccuaguaccuugcuauuu

SEQ ID NO: 2502678 - RNA, 19 nt, Artificial Sequence
  Description of Artificial Sequence: Synthetic oligonucleotide
uaggagugcgcuggaugcc

SEQ ID NO: 2502679 - RNA, 19 nt, Artificial Sequence
  Description of Artificial Sequence: Synthetic oligonucleotide
uaggacaacucagcucuuc

SEQ ID NO: 2502680 - RNA, 19 nt, Artificial Sequence
  Description of Artificial Sequence: Synthetic oligonucleotide
gagaugcucugaguagaac

SEQ ID NO: 2502681 - RNA, 19 nt, Artificial Sequence
  Description of Artificial Sequence: Synthetic oligonucleotide
cacucgggccagaugcuug

SEQ ID NO: 2502682 - RNA, 19 nt, Artificial Sequence
  Description of Artificial Sequence: Synthetic oligonucleotide
guggagagcucuccaccug

SEQ ID NO: 2502683 - RNA, 19 nt, Artificial Sequence
  Description of Artificial Sequence: Synthetic oligonucleotide
cauggguguccgagcaaug

SEQ ID NO: 2502684 - RNA, 19 nt, Artificial Sequence
  Description of Artificial Sequence: Synthetic oligonucleotide
gagaauccaaaggcagguc

SEQ ID NO: 2502685 - RNA, 19 nt, Artificial Sequence
  Description of Artificial Sequence: Synthetic oligonucleotide
ccauuuucacuaagcggag

SEQ ID NO: 2502686 - RNA, 19 nt, Artificial Sequence
  Description of Artificial Sequence: Synthetic oligonucleotide
ugccugagaugcucugagu

SEQ ID NO: 2502687 - RNA, 19 nt, Artificial Sequence
  Description of Artificial Sequence: Synthetic oligonucleotide
ggaggcuucgguuucaaau

SEQ ID NO: 2502688 - RNA, 19 nt, Artificial Sequence
  Description of Artificial Sequence: Synthetic oligonucleotide
gggguggggacgaagcccg

SEQ ID NO: 2502689 - RNA, 19 nt, Artificial Sequence
  Description of Artificial Sequence: Synthetic oligonucleotide
uuccuaguaccuugcuauu

SEQ ID NO: 2502690 - RNA, 19 nt, Artificial Sequence
  Description of Artificial Sequence: Synthetic oligonucleotide
cugcaggauggugagagga

SEQ ID NO: 2502691 - RNA, 19 nt, Artificial Sequence
  Description of Artificial Sequence: Synthetic oligonucleotide
uggauugcuuagccuccuc

SEQ ID NO: 2502692 - RNA, 19 nt, Artificial Sequence
  Description of Artificial Sequence: Synthetic oligonucleotide
ucggagggucuguaccacu

SEQ ID NO: 2502693 - RNA, 19 nt, Artificial Sequence
  Description of Artificial Sequence: Synthetic oligonucleotide
agaggccgcgcuggagugc

SEQ ID NO: 2502694 - RNA, 19 nt, Artificial Sequence
  Description of Artificial Sequence: Synthetic oligonucleotide
cuguuuggaggggaguuca

SEQ ID NO: 2502695 - RNA, 19 nt, Artificial Sequence
  Description of Artificial Sequence: Synthetic oligonucleotide
gagaggagaucuuccuagu

SEQ ID NO: 2502696 - RNA, 19 nt, Artificial Sequence
  Description of Artificial Sequence: Synthetic oligonucleotide
gacuuggaggcuucgguuu

SEQ ID NO: 2502697 - RNA, 19 nt, Artificial Sequence
  Description of Artificial Sequence: Synthetic oligonucleotide
uucuguugacaggcuuggc

SEQ ID NO: 2502698 - RNA, 19 nt, Artificial Sequence
  Description of Artificial Sequence: Synthetic oligonucleotide
ugagcuuguuuaggacaac

SEQ ID NO: 2502699 - RNA, 19 nt, Artificial Sequence
  Description of Artificial Sequence: Synthetic oligonucleotide
gaggccgcgcuggagugcc

SEQ ID NO: 2502700 - RNA, 19 nt, Artificial Sequence
  Description of Artificial Sequence: Synthetic oligonucleotide
guguccgagcaaugccaag

SEQ ID NO: 2502701 - RNA, 19 nt, Artificial Sequence
  Description of Artificial Sequence: Synthetic oligonucleotide
augcucugaguagaaccca

SEQ ID NO: 2502702 - RNA, 19 nt, Artificial Sequence
  Description of Artificial Sequence: Synthetic oligonucleotide
ggguaggagagcgaggauc

SEQ ID NO: 2502703 - RNA, 19 nt, Artificial Sequence
  Description of Artificial Sequence: Synthetic oligonucleotide
acccugucgcaaugucaag

SEQ ID NO: 2502704 - RNA, 19 nt, Artificial Sequence
  Description of Artificial Sequence: Synthetic oligonucleotide
cuaggugaacgagggucug

SEQ ID NO: 2502705 - RNA, 19 nt, Artificial Sequence
  Description of Artificial Sequence: Synthetic oligonucleotide
auugagcuuagaaccugaa

SEQ ID NO: 2502706 - RNA, 19 nt, Artificial Sequence
  Description of Artificial Sequence: Synthetic oligonucleotide
ggggacgaagcccggcggg

SEQ ID NO: 2502707 - RNA, 19 nt, Artificial Sequence
  Description of Artificial Sequence: Synthetic oligonucleotide
accuguuuggaggggaguu

SEQ ID NO: 2502708 - RNA, 19 nt, Artificial Sequence
  Description of Artificial Sequence: Synthetic oligonucleotide
ggauaacugagaauccaaa

SEQ ID NO: 2502709 - RNA, 19 nt, Artificial Sequence
  Description of Artificial Sequence: Synthetic oligonucleotide
ccgcacuaggugaacgagg

SEQ ID NO: 2502710 - RNA, 19 nt, Artificial Sequence
  Description of Artificial Sequence: Synthetic oligonucleotide
uuaggacaacucagcucuu

SEQ ID NO: 2502711 - RNA, 19 nt, Artificial Sequence
  Description of Artificial Sequence: Synthetic oligonucleotide
gguccuuaccauuuucacu

SEQ ID NO: 2502712 - RNA, 19 nt, Artificial Sequence
  Description of Artificial Sequence: Synthetic oligonucleotide
gagugcgcuggaugcccgc

SEQ ID NO: 2502713 - RNA, 19 nt, Artificial Sequence
  Description of Artificial Sequence: Synthetic oligonucleotide
cccugucgcaaugucaagg

SEQ ID NO: 2502714 - RNA, 19 nt, Artificial Sequence
  Description of Artificial Sequence: Synthetic oligonucleotide
gaacgagggucugccacuc

SEQ ID NO: 2502715 - RNA, 19 nt, Artificial Sequence
  Description of Artificial Sequence: Synthetic oligonucleotide
cagaggccgcgcuggagug

SEQ ID NO: 2502716 - RNA, 19 nt, Artificial Sequence
  Description of Artificial Sequence: Synthetic oligonucleotide
gccugagaugcucugagua

SEQ ID NO: 2502717 - RNA, 19 nt, Artificial Sequence
  Description of Artificial Sequence: Synthetic oligonucleotide
cuuagccuccuccuuggua

SEQ ID NO: 2502718 - RNA, 19 nt, Artificial Sequence
  Description of Artificial Sequence: Synthetic oligonucleotide
uggcuccauggcagcaacu

SEQ ID NO: 2502719 - RNA, 19 nt, Artificial Sequence
  Description of Artificial Sequence: Synthetic oligonucleotide
uaagcggagaaggccgcuu

SEQ ID NO: 2502720 - RNA, 19 nt, Artificial Sequence
  Description of Artificial Sequence: Synthetic oligonucleotide
guuguguggcagaggccgc

SEQ ID NO: 2502721 - RNA, 19 nt, Artificial Sequence
  Description of Artificial Sequence: Synthetic oligonucleotide
ucugccacucgggccagau

SEQ ID NO: 2502722 - RNA, 19 nt, Artificial Sequence
  Description of Artificial Sequence: Synthetic oligonucleotide
ggauggugagaggagaucu

SEQ ID NO: 2502723 - RNA, 19 nt, Artificial Sequence
  Description of Artificial Sequence: Synthetic oligonucleotide
ccgucuauugagcuuagaa

SEQ ID NO: 2502724 - RNA, 19 nt, Artificial Sequence
  Description of Artificial Sequence: Synthetic oligonucleotide
ggccccaggggaguugucg

SEQ ID NO: 2502725 - RNA, 19 nt, Artificial Sequence
  Description of Artificial Sequence: Synthetic oligonucleotide
cucggagggucuguaccac

SEQ ID NO: 2502726 - RNA, 19 nt, Artificial Sequence
  Description of Artificial Sequence: Synthetic oligonucleotide
cggagaaggccgcuuaccc

SEQ ID NO: 2502727 - RNA, 19 nt, Artificial Sequence
  Description of Artificial Sequence: Synthetic oligonucleotide
accagugaacucggagggu

SEQ ID NO: 2502728 - RNA, 19 nt, Artificial Sequence
  Description of Artificial Sequence: Synthetic oligonucleotide
guaaauggacuuggaggcu

SEQ ID NO: 2502729 - RNA, 19 nt, Artificial Sequence
  Description of Artificial Sequence: Synthetic oligonucleotide
agguccaguucagaagaua

SEQ ID NO: 2502730 - RNA, 19 nt, Artificial Sequence
  Description of Artificial Sequence: Synthetic oligonucleotide
uccgucuauugagcuuaga

SEQ ID NO: 2502731 - RNA, 19 nt, Artificial Sequence
  Description of Artificial Sequence: Synthetic oligonucleotide
gcuuguuguguggcagagg

SEQ ID NO: 2502732 - RNA, 19 nt, Artificial Sequence
  Description of Artificial Sequence: Synthetic oligonucleotide
ccgagcaaugccaagggua

SEQ ID NO: 2502733 - RNA, 19 nt, Artificial Sequence
  Description of Artificial Sequence: Synthetic oligonucleotide
aggguaggagagcgaggau

SEQ ID NO: 2502734 - RNA, 19 nt, Artificial Sequence
  Description of Artificial Sequence: Synthetic oligonucleotide
uuggaggcuucgguuucaa

SEQ ID NO: 2502735 - RNA, 19 nt, Artificial Sequence
  Description of Artificial Sequence: Synthetic oligonucleotide
cacugaucuucaugggugu

SEQ ID NO: 2502736 - RNA, 19 nt, Artificial Sequence
  Description of Artificial Sequence: Synthetic oligonucleotide
agugcgcuggaugcccgca

SEQ ID NO: 2502737 - RNA, 19 nt, Artificial Sequence
  Description of Artificial Sequence: Synthetic oligonucleotide
gacuggggagucucgggau

SEQ ID NO: 2502738 - RNA, 19 nt, Artificial Sequence
  Description of Artificial Sequence: Synthetic oligonucleotide
gcuggcaauuaugaguucu

SEQ ID NO: 2502739 - RNA, 19 nt, Artificial Sequence
  Description of Artificial Sequence: Synthetic oligonucleotide
ccucaagggauaacugaga

SEQ ID NO: 2502740 - RNA, 19 nt, Artificial Sequence
  Description of Artificial Sequence: Synthetic oligonucleotide
gaaggccgcuuacccuguc

SEQ ID NO: 2502741 - RNA, 19 nt, Artificial Sequence
  Description of Artificial Sequence: Synthetic oligonucleotide
cugaguucuggcuggcaau

SEQ ID NO: 2502742 - RNA, 19 nt, Artificial Sequence
  Description of Artificial Sequence: Synthetic oligonucleotide
cuuuccgucuauugagcuu

SEQ ID NO: 2502743 - RNA, 19 nt, Artificial Sequence
  Description of Artificial Sequence: Synthetic oligonucleotide
ggagugcgcuggaugcccg

SEQ ID NO: 2502744 - RNA, 19 nt, Artificial Sequence
  Description of Artificial Sequence: Synthetic oligonucleotide
gcuuuccgucuauugagcu

SEQ ID NO: 2502745 - RNA, 19 nt, Artificial Sequence
  Description of Artificial Sequence: Synthetic oligonucleotide
agaaggccgcuuacccugu

SEQ ID NO: 2502746 - RNA, 19 nt, Artificial Sequence
  Description of Artificial Sequence: Synthetic oligonucleotide
cuuggaggcuucgguuuca

SEQ ID NO: 2502747 - RNA, 19 nt, Artificial Sequence
  Description of Artificial Sequence: Synthetic oligonucleotide
ggcuguggagagcucucca

SEQ ID NO: 2502748 - RNA, 19 nt, Artificial Sequence
  Description of Artificial Sequence: Synthetic oligonucleotide
cugguccucaagggauaac

SEQ ID NO: 2502749 - RNA, 19 nt, Artificial Sequence
  Description of Artificial Sequence: Synthetic oligonucleotide
gugcgcuggaugcccgcac

SEQ ID NO: 2502750 - RNA, 19 nt, Artificial Sequence
  Description of Artificial Sequence: Synthetic oligonucleotide
guuugcuggggcagagcaa

SEQ ID NO: 2502751 - RNA, 19 nt, Artificial Sequence
  Description of Artificial Sequence: Synthetic oligonucleotide
gauggugagaggagaucuu

SEQ ID NO: 2502752 - RNA, 19 nt, Artificial Sequence
  Description of Artificial Sequence: Synthetic oligonucleotide
caggggaguugucguccug

SEQ ID NO: 2502753 - RNA, 19 nt, Artificial Sequence
  Description of Artificial Sequence: Synthetic oligonucleotide
ugucguccugcaggauggu

SEQ ID NO: 2502754 - RNA, 19 nt, Artificial Sequence
  Description of Artificial Sequence: Synthetic oligonucleotide
gcggagaaggccgcuuacc

SEQ ID NO: 2502755 - RNA, 19 nt, Artificial Sequence
  Description of Artificial Sequence: Synthetic oligonucleotide
cuugagggcuugucugagu

SEQ ID NO: 2502756 - RNA, 19 nt, Artificial Sequence
  Description of Artificial Sequence: Synthetic oligonucleotide
cgagggucugccacucggg

SEQ ID NO: 2502757 - RNA, 19 nt, Artificial Sequence
  Description of Artificial Sequence: Synthetic oligonucleotide
gaguucuggcuggcaauua

SEQ ID NO: 2502758 - RNA, 19 nt, Artificial Sequence
  Description of Artificial Sequence: Synthetic oligonucleotide
gucuuccaguuccaagaau

SEQ ID NO: 2502759 - RNA, 19 nt, Artificial Sequence
  Description of Artificial Sequence: Synthetic oligonucleotide
gaauaggagugcgcuggau

SEQ ID NO: 2502760 - RNA, 19 nt, Artificial Sequence
  Description of Artificial Sequence: Synthetic oligonucleotide
ucgcaaugucaaggcccca

SEQ ID NO: 2502761 - RNA, 19 nt, Artificial Sequence
  Description of Artificial Sequence: Synthetic oligonucleotide
cccgcacuaggugaacgag

SEQ ID NO: 2502762 - RNA, 19 nt, Artificial Sequence
  Description of Artificial Sequence: Synthetic oligonucleotide
ggagaucuuccuaguaccu

SEQ ID NO: 2502763 - RNA, 19 nt, Artificial Sequence
  Description of Artificial Sequence: Synthetic oligonucleotide
ccuguuuggaggggaguuc

SEQ ID NO: 2502764 - RNA, 19 nt, Artificial Sequence
  Description of Artificial Sequence: Synthetic oligonucleotide
gguggggacgaagcccggc

SEQ ID NO: 2502765 - RNA, 19 nt, Artificial Sequence
  Description of Artificial Sequence: Synthetic oligonucleotide
aguugucguccugcaggau

SEQ ID NO: 2502766 - RNA, 19 nt, Artificial Sequence
  Description of Artificial Sequence: Synthetic oligonucleotide
gggacgaagcccggcgggc

SEQ ID NO: 2502767 - RNA, 19 nt, Artificial Sequence
  Description of Artificial Sequence: Synthetic oligonucleotide
uggggagucucgggaucuc

SEQ ID NO: 2502768 - RNA, 19 nt, Artificial Sequence
  Description of Artificial Sequence: Synthetic oligonucleotide
cgaggaucugggucuugag

SEQ ID NO: 2502769 - RNA, 19 nt, Artificial Sequence
  Description of Artificial Sequence: Synthetic oligonucleotide
gcccgcacuaggugaacga

SEQ ID NO: 2502770 - RNA, 19 nt, Artificial Sequence
  Description of Artificial Sequence: Synthetic oligonucleotide
agcgaggaucugggucuug

SEQ ID NO: 2502771 - RNA, 19 nt, Artificial Sequence
  Description of Artificial Sequence: Synthetic oligonucleotide
gcgaggaucugggucuuga

SEQ ID NO: 2502772 - RNA, 19 nt, Artificial Sequence
  Description of Artificial Sequence: Synthetic oligonucleotide
gccgcuuacccugucgcaa

SEQ ID NO: 2502773 - RNA, 19 nt, Artificial Sequence
  Description of Artificial Sequence: Synthetic oligonucleotide
ggccgcuuacccugucgca

SEQ ID NO: 2502774 - RNA, 19 nt, Artificial Sequence
  Description of Artificial Sequence: Synthetic oligonucleotide
ggaguucaaucuggcucca

SEQ ID NO: 2502775 - RNA, 19 nt, Artificial Sequence
  Description of Artificial Sequence: Synthetic oligonucleotide
gugaacucggagggucugu

SEQ ID NO: 2502776 - RNA, 19 nt, Artificial Sequence
  Description of Artificial Sequence: Synthetic oligonucleotide
ggaucugggucuugagcuu

SEQ ID NO: 2502777 - RNA, 19 nt, Artificial Sequence
  Description of Artificial Sequence: Synthetic oligonucleotide
ggcuucgguuucaaauucu

SEQ ID NO: 2502778 - RNA, 19 nt, Artificial Sequence
  Description of Artificial Sequence: Synthetic oligonucleotide
ggcgggccccagcucgacc

SEQ ID NO: 2502779 - RNA, 19 nt, Artificial Sequence
  Description of Artificial Sequence: Synthetic oligonucleotide
ggagagcucuccaccugaa

SEQ ID NO: 2502780 - RNA, 19 nt, Artificial Sequence
  Description of Artificial Sequence: Synthetic oligonucleotide
cuaagcggagaaggccgcu

SEQ ID NO: 2502781 - RNA, 19 nt, Artificial Sequence
  Description of Artificial Sequence: Synthetic oligonucleotide
ggagagcgaggaucugggu

SEQ ID NO: 2502782 - RNA, 19 nt, Artificial Sequence
  Description of Artificial Sequence: Synthetic oligonucleotide
ggagugccugagaugcucu

SEQ ID NO: 2502783 - RNA, 19 nt, Artificial Sequence
  Description of Artificial Sequence: Synthetic oligonucleotide
gcuucgguuucaaauucuu

SEQ ID NO: 2502784 - RNA, 19 nt, Artificial Sequence
  Description of Artificial Sequence: Synthetic oligonucleotide
cuggagugccugagaugcu

SEQ ID NO: 2502785 - RNA, 19 nt, Artificial Sequence
  Description of Artificial Sequence: Synthetic oligonucleotide
ccccaggggaguugucguc

SEQ ID NO: 2502786 - RNA, 19 nt, Artificial Sequence
  Description of Artificial Sequence: Synthetic oligonucleotide
gcgggccccagcucgaccu

SEQ ID NO: 2502787 - RNA, 19 nt, Artificial Sequence
  Description of Artificial Sequence: Synthetic oligonucleotide
gcgcuggagugccugagau

SEQ ID NO: 2502788 - RNA, 19 nt, Artificial Sequence
  Description of Artificial Sequence: Synthetic oligonucleotide
gaguucaaucuggcuccau

SEQ ID NO: 2502789 - RNA, 19 nt, Artificial Sequence
  Description of Artificial Sequence: Synthetic oligonucleotide
gccaaggguaggagagcga

SEQ ID NO: 2502790 - RNA, 19 nt, Artificial Sequence
  Description of Artificial Sequence: Synthetic oligonucleotide
gcaagcucugugggguaaa

SEQ ID NO: 2502791 - RNA, 19 nt, Artificial Sequence
  Description of Artificial Sequence: Synthetic oligonucleotide
caccuguuuggaggggagu

SEQ ID NO: 2502792 - RNA, 19 nt, Artificial Sequence
  Description of Artificial Sequence: Synthetic oligonucleotide
caagcucugugggguaaau

SEQ ID NO: 2502793 - RNA, 19 nt, Artificial Sequence
  Description of Artificial Sequence: Synthetic oligonucleotide
gcacuaggugaacgagggu

SEQ ID NO: 2502794 - RNA, 19 nt, Artificial Sequence
  Description of Artificial Sequence: Synthetic oligonucleotide
ggccccagcucgaccucug

SEQ ID NO: 2502795 - RNA, 19 nt, Artificial Sequence
  Description of Artificial Sequence: Synthetic oligonucleotide
ccacuagggguggggacga

SEQ ID NO: 2502796 - RNA, 19 nt, Artificial Sequence
  Description of Artificial Sequence: Synthetic oligonucleotide
gccgcgcuggagugccuga

SEQ ID NO: 2502797 - RNA, 19 nt, Artificial Sequence
  Description of Artificial Sequence: Synthetic oligonucleotide
gcgcuggaugcccgcacua

SEQ ID NO: 2502798 - RNA, 19 nt, Artificial Sequence
  Description of Artificial Sequence: Synthetic oligonucleotide
ccgcgcuggagugccugag

SEQ ID NO: 2502799 - RNA, 19 nt, Artificial Sequence
  Description of Artificial Sequence: Synthetic oligonucleotide
gagcgaggaucugggucuu

SEQ ID NO: 2502800 - RNA, 19 nt, Artificial Sequence
  Description of Artificial Sequence: Synthetic oligonucleotide
gggagucucgggaucucuu

SEQ ID NO: 2502801 - RNA, 19 nt, Artificial Sequence
  Description of Artificial Sequence: Synthetic oligonucleotide
gucugccacucgggccaga

SEQ ID NO: 2502802 - RNA, 19 nt, Artificial Sequence
  Description of Artificial Sequence: Synthetic oligonucleotide
ccgcuuacccugucgcaau

SEQ ID NO: 2502803 - RNA, 19 nt, Artificial Sequence
  Description of Artificial Sequence: Synthetic oligonucleotide
aggccgcgcuggagugccu

SEQ ID NO: 2502804 - RNA, 19 nt, Artificial Sequence
  Description of Artificial Sequence: Synthetic oligonucleotide
ccggcgggccccagcucga

SEQ ID NO: 2502805 - RNA, 19 nt, Artificial Sequence
  Description of Artificial Sequence: Synthetic oligonucleotide
gcccggcgggccccagcuc

SEQ ID NO: 2502806 - RNA, 19 nt, Artificial Sequence
  Description of Artificial Sequence: Synthetic oligonucleotide
cucgggccagaugcuuguu

SEQ ID NO: 2502807 - RNA, 19 nt, Artificial Sequence
  Description of Artificial Sequence: Synthetic oligonucleotide
ccacucgggccagaugcuu

SEQ ID NO: 2502808 - RNA, 19 nt, Artificial Sequence
  Description of Artificial Sequence: Synthetic oligonucleotide
cggcgggccccagcucgac

SEQ ID NO: 2502809 - RNA, 19 nt, Artificial Sequence
  Description of Artificial Sequence: Synthetic oligonucleotide
aaucauugcgcuuuugccc

SEQ ID NO: 2502810 - RNA, 19 nt, Artificial Sequence
  Description of Artificial Sequence: Synthetic oligonucleotide
acuaguggaaauuucaagg

SEQ ID NO: 2502811 - RNA, 19 nt, Artificial Sequence
  Description of Artificial Sequence: Synthetic oligonucleotide
uuuacagagauguugaaac

SEQ ID NO: 2502812 - RNA, 19 nt, Artificial Sequence
  Description of Artificial Sequence: Synthetic oligonucleotide
ugaaacacaucacagacgu

SEQ ID NO: 2502813 - RNA, 19 nt, Artificial Sequence
  Description of Artificial Sequence: Synthetic oligonucleotide
uuuacuuuggaggacagag

SEQ ID NO: 2502814 - RNA, 19 nt, Artificial Sequence
  Description of Artificial Sequence: Synthetic oligonucleotide
aaugggagccagcagaaag

SEQ ID NO: 2502815 - RNA, 19 nt, Artificial Sequence
  Description of Artificial Sequence: Synthetic oligonucleotide
acaaucauugcgcuuuugc

SEQ ID NO: 2502816 - RNA, 19 nt, Artificial Sequence
  Description of Artificial Sequence: Synthetic oligonucleotide
acugguagcucucauaguc

SEQ ID NO: 2502817 - RNA, 19 nt, Artificial Sequence
  Description of Artificial Sequence: Synthetic oligonucleotide
uuaucuugggccuggaugc

SEQ ID NO: 2502818 - RNA, 19 nt, Artificial Sequence
  Description of Artificial Sequence: Synthetic oligonucleotide
gauggaauagaccagcaga

SEQ ID NO: 2502819 - RNA, 19 nt, Artificial Sequence
  Description of Artificial Sequence: Synthetic oligonucleotide
gauguugaaacacaucaca

SEQ ID NO: 2502820 - RNA, 19 nt, Artificial Sequence
  Description of Artificial Sequence: Synthetic oligonucleotide
uugaaacacaucacagacg

SEQ ID NO: 2502821 - RNA, 19 nt, Artificial Sequence
  Description of Artificial Sequence: Synthetic oligonucleotide
uuuguuaagaagcgcacaa

SEQ ID NO: 2502822 - RNA, 19 nt, Artificial Sequence
  Description of Artificial Sequence: Synthetic oligonucleotide
accuucaugugucugcacc

SEQ ID NO: 2502823 - RNA, 19 nt, Artificial Sequence
  Description of Artificial Sequence: Synthetic oligonucleotide
uguuaagaagcgcacaauc

SEQ ID NO: 2502824 - RNA, 19 nt, Artificial Sequence
  Description of Artificial Sequence: Synthetic oligonucleotide
uacaguuugccuguguugg

SEQ ID NO: 2502825 - RNA, 19 nt, Artificial Sequence
  Description of Artificial Sequence: Synthetic oligonucleotide
ugcgcuuuugcccacacga

SEQ ID NO: 2502826 - RNA, 19 nt, Artificial Sequence
  Description of Artificial Sequence: Synthetic oligonucleotide
gaagcgcacaaucauugcg

SEQ ID NO: 2502827 - RNA, 19 nt, Artificial Sequence
  Description of Artificial Sequence: Synthetic oligonucleotide
uagaccagcagaaagcccu

SEQ ID NO: 2502828 - RNA, 19 nt, Artificial Sequence
  Description of Artificial Sequence: Synthetic oligonucleotide
uuaagaagcgcacaaucau

SEQ ID NO: 2502829 - RNA, 19 nt, Artificial Sequence
  Description of Artificial Sequence: Synthetic oligonucleotide
uguugaaacacaucacaga

SEQ ID NO: 2502830 - RNA, 19 nt, Artificial Sequence
  Description of Artificial Sequence: Synthetic oligonucleotide
ggggcuuuuacuuuggagg

SEQ ID NO: 2502831 - RNA, 19 nt, Artificial Sequence
  Description of Artificial Sequence: Synthetic oligonucleotide
ucguaguuuucacuagugg

SEQ ID NO: 2502832 - RNA, 19 nt, Artificial Sequence
  Description of Artificial Sequence: Synthetic oligonucleotide
aagcgcacaaucauugcgc

SEQ ID NO: 2502833 - RNA, 19 nt, Artificial Sequence
  Description of Artificial Sequence: Synthetic oligonucleotide
cucgaauacaguuugccug

SEQ ID NO: 2502834 - RNA, 19 nt, Artificial Sequence
  Description of Artificial Sequence: Synthetic oligonucleotide
auagacgagucucgaauac

SEQ ID NO: 2502835 - RNA, 19 nt, Artificial Sequence
  Description of Artificial Sequence: Synthetic oligonucleotide
agaugggucaccccagggc

SEQ ID NO: 2502836 - RNA, 19 nt, Artificial Sequence
  Description of Artificial Sequence: Synthetic oligonucleotide
aaaguggccgaacggacug

SEQ ID NO: 2502837 - RNA, 19 nt, Artificial Sequence
  Description of Artificial Sequence: Synthetic oligonucleotide
aauacaguuugccuguguu

SEQ ID NO: 2502838 - RNA, 19 nt, Artificial Sequence
  Description of Artificial Sequence: Synthetic oligonucleotide
gauaaaucucuuuguuaag

SEQ ID NO: 2502839 - RNA, 19 nt, Artificial Sequence
  Description of Artificial Sequence: Synthetic oligonucleotide
cucucauagucugugaugg

SEQ ID NO: 2502840 - RNA, 19 nt, Artificial Sequence
  Description of Artificial Sequence: Synthetic oligonucleotide
ucgccgauaaaucucuuug

SEQ ID NO: 2502841 - RNA, 19 nt, Artificial Sequence
  Description of Artificial Sequence: Synthetic oligonucleotide
caaucauugcgcuuuugcc

SEQ ID NO: 2502842 - RNA, 19 nt, Artificial Sequence
  Description of Artificial Sequence: Synthetic oligonucleotide
aaagcccucggcccacugc

SEQ ID NO: 2502843 - RNA, 19 nt, Artificial Sequence
  Description of Artificial Sequence: Synthetic oligonucleotide
uuggacagagaguccaccg

SEQ ID NO: 2502844 - RNA, 19 nt, Artificial Sequence
  Description of Artificial Sequence: Synthetic oligonucleotide
cuugcucacuucuuuacag

SEQ ID NO: 2502845 - RNA, 19 nt, Artificial Sequence
  Description of Artificial Sequence: Synthetic oligonucleotide
ugauggaauagaccagcag

SEQ ID NO: 2502846 - RNA, 19 nt, Artificial Sequence
  Description of Artificial Sequence: Synthetic oligonucleotide
ggaauagaccagcagaaag

SEQ ID NO: 2502847 - RNA, 19 nt, Artificial Sequence
  Description of Artificial Sequence: Synthetic oligonucleotide
aagaagcgcacaaucauug

SEQ ID NO: 2502848 - RNA, 19 nt, Artificial Sequence
  Description of Artificial Sequence: Synthetic oligonucleotide
ucuuuguuaagaagcgcac

SEQ ID NO: 2502849 - RNA, 19 nt, Artificial Sequence
  Description of Artificial Sequence: Synthetic oligonucleotide
uguucggggagcgaggccg

SEQ ID NO: 2502850 - RNA, 19 nt, Artificial Sequence
  Description of Artificial Sequence: Synthetic oligonucleotide
gagucucgaauacaguuug

SEQ ID NO: 2502851 - RNA, 19 nt, Artificial Sequence
  Description of Artificial Sequence: Synthetic oligonucleotide
uucguaguuuucacuagug

SEQ ID NO: 2502852 - RNA, 19 nt, Artificial Sequence
  Description of Artificial Sequence: Synthetic oligonucleotide
agaagcgcacaaucauugc

SEQ ID NO: 2502853 - RNA, 19 nt, Artificial Sequence
  Description of Artificial Sequence: Synthetic oligonucleotide
uggaucugcagugauagcu

SEQ ID NO: 2502854 - RNA, 19 nt, Artificial Sequence
  Description of Artificial Sequence: Synthetic oligonucleotide
ucgaauacaguuugccugu

SEQ ID NO: 2502855 - RNA, 19 nt, Artificial Sequence
  Description of Artificial Sequence: Synthetic oligonucleotide
acauagacgagucucgaau

SEQ ID NO: 2502856 - RNA, 19 nt, Artificial Sequence
  Description of Artificial Sequence: Synthetic oligonucleotide
uuacuuuggaggacagagc

SEQ ID NO: 2502857 - RNA, 19 nt, Artificial Sequence
  Description of Artificial Sequence: Synthetic oligonucleotide
uggccgaacggacugguag

SEQ ID NO: 2502858 - RNA, 19 nt, Artificial Sequence
  Description of Artificial Sequence: Synthetic oligonucleotide
cacuaguggaaauuucaag

SEQ ID NO: 2502859 - RNA, 19 nt, Artificial Sequence
  Description of Artificial Sequence: Synthetic oligonucleotide
agugcccagacaugguugg

SEQ ID NO: 2502860 - RNA, 19 nt, Artificial Sequence
  Description of Artificial Sequence: Synthetic oligonucleotide
aucucuuuguuaagaagcg

SEQ ID NO: 2502861 - RNA, 19 nt, Artificial Sequence
  Description of Artificial Sequence: Synthetic oligonucleotide
cucuuuguuaagaagcgca

SEQ ID NO: 2502862 - RNA, 19 nt, Artificial Sequence
  Description of Artificial Sequence: Synthetic oligonucleotide
ucucgaauacaguuugccu

SEQ ID NO: 2502863 - RNA, 19 nt, Artificial Sequence
  Description of Artificial Sequence: Synthetic oligonucleotide
uaguggaaauuucaaggaa

SEQ ID NO: 2502864 - RNA, 19 nt, Artificial Sequence
  Description of Artificial Sequence: Synthetic oligonucleotide
ugcagugauagcugguccc

SEQ ID NO: 2502865 - RNA, 19 nt, Artificial Sequence
  Description of Artificial Sequence: Synthetic oligonucleotide
acgacccgcgccuagcacc

SEQ ID NO: 2502866 - RNA, 19 nt, Artificial Sequence
  Description of Artificial Sequence: Synthetic oligonucleotide
cuaguggaaauuucaagga

SEQ ID NO: 2502867 - RNA, 19 nt, Artificial Sequence
  Description of Artificial Sequence: Synthetic oligonucleotide
uucguagucgccgauaaau

SEQ ID NO: 2502868 - RNA, 19 nt, Artificial Sequence
  Description of Artificial Sequence: Synthetic oligonucleotide
cugaagaccuucauguguc

SEQ ID NO: 2502869 - RNA, 19 nt, Artificial Sequence
  Description of Artificial Sequence: Synthetic oligonucleotide
ucauuggcuagcugaagac

SEQ ID NO: 2502870 - RNA, 19 nt, Artificial Sequence
  Description of Artificial Sequence: Synthetic oligonucleotide
agauguugaaacacaucac

SEQ ID NO: 2502871 - RNA, 19 nt, Artificial Sequence
  Description of Artificial Sequence: Synthetic oligonucleotide
ucacuaguggaaauuucaa

SEQ ID NO: 2502872 - RNA, 19 nt, Artificial Sequence
  Description of Artificial Sequence: Synthetic oligonucleotide
auacaguuugccuguguug

SEQ ID NO: 2502873 - RNA, 19 nt, Artificial Sequence
  Description of Artificial Sequence: Synthetic oligonucleotide
aaagugcccagacaugguu

SEQ ID NO: 2502874 - RNA, 19 nt, Artificial Sequence
  Description of Artificial Sequence: Synthetic oligonucleotide
uaaaguggccgaacggacu

SEQ ID NO: 2502875 - RNA, 19 nt, Artificial Sequence
  Description of Artificial Sequence: Synthetic oligonucleotide
ucaugugucugcaccugcc

SEQ ID NO: 2502876 - RNA, 19 nt, Artificial Sequence
  Description of Artificial Sequence: Synthetic oligonucleotide
ggacugguagcucucauag

SEQ ID NO: 2502877 - RNA, 19 nt, Artificial Sequence
  Description of Artificial Sequence: Synthetic oligonucleotide
augguuggcggacgcaugg

SEQ ID NO: 2502878 - RNA, 19 nt, Artificial Sequence
  Description of Artificial Sequence: Synthetic oligonucleotide
cuuuggaggacagagccug

SEQ ID NO: 2502879 - RNA, 19 nt, Artificial Sequence
  Description of Artificial Sequence: Synthetic oligonucleotide
acgucuucguaguuuucac

SEQ ID NO: 2502880 - RNA, 19 nt, Artificial Sequence
  Description of Artificial Sequence: Synthetic oligonucleotide
uuugcccacacgacccgcg

SEQ ID NO: 2502881 - RNA, 19 nt, Artificial Sequence
  Description of Artificial Sequence: Synthetic oligonucleotide
uaagaagcgcacaaucauu

SEQ ID NO: 2502882 - RNA, 19 nt, Artificial Sequence
  Description of Artificial Sequence: Synthetic oligonucleotide
ugcauguucggggagcgag

SEQ ID NO: 2502883 - RNA, 19 nt, Artificial Sequence
  Description of Artificial Sequence: Synthetic oligonucleotide
aggacucgggaaugggagc

SEQ ID NO: 2502884 - RNA, 19 nt, Artificial Sequence
  Description of Artificial Sequence: Synthetic oligonucleotide
ucuccuuuguugcccacga

SEQ ID NO: 2502885 - RNA, 19 nt, Artificial Sequence
  Description of Artificial Sequence: Synthetic oligonucleotide
guuggguucguagucgccg

SEQ ID NO: 2502886 - RNA, 19 nt, Artificial Sequence
  Description of Artificial Sequence: Synthetic oligonucleotide
uuugccuguguuggguucg

SEQ ID NO: 2502887 - RNA, 19 nt, Artificial Sequence
  Description of Artificial Sequence: Synthetic oligonucleotide
agacaugguuggcggacgc

SEQ ID NO: 2502888 - RNA, 19 nt, Artificial Sequence
  Description of Artificial Sequence: Synthetic oligonucleotide
uccaccguuuggcugaggu

SEQ ID NO: 2502889 - RNA, 19 nt, Artificial Sequence
  Description of Artificial Sequence: Synthetic oligonucleotide
ugguagcucucauagucug

SEQ ID NO: 2502890 - RNA, 19 nt, Artificial Sequence
  Description of Artificial Sequence: Synthetic oligonucleotide
gaggacucgggaaugggag

SEQ ID NO: 2502891 - RNA, 19 nt, Artificial Sequence
  Description of Artificial Sequence: Synthetic oligonucleotide
uagucgccgauaaaucucu

SEQ ID NO: 2502892 - RNA, 19 nt, Artificial Sequence
  Description of Artificial Sequence: Synthetic oligonucleotide
uucaugugucugcaccugc

SEQ ID NO: 2502893 - RNA, 19 nt, Artificial Sequence
  Description of Artificial Sequence: Synthetic oligonucleotide
caguuugauguccuugggc

SEQ ID NO: 2502894 - RNA, 19 nt, Artificial Sequence
  Description of Artificial Sequence: Synthetic oligonucleotide
acgagucucgaauacaguu

SEQ ID NO: 2502895 - RNA, 19 nt, Artificial Sequence
  Description of Artificial Sequence: Synthetic oligonucleotide
ugaugacaggggcuuuucc

SEQ ID NO: 2502896 - RNA, 19 nt, Artificial Sequence
  Description of Artificial Sequence: Synthetic oligonucleotide
agacgagucucgaauacag

SEQ ID NO: 2502897 - RNA, 19 nt, Artificial Sequence
  Description of Artificial Sequence: Synthetic oligonucleotide
aguguccuggaucugcagu

SEQ ID NO: 2502898 - RNA, 19 nt, Artificial Sequence
  Description of Artificial Sequence: Synthetic oligonucleotide
agagauguugaaacacauc

SEQ ID NO: 2502899 - RNA, 19 nt, Artificial Sequence
  Description of Artificial Sequence: Synthetic oligonucleotide
ucucuuuguuaagaagcgc

SEQ ID NO: 2502900 - RNA, 19 nt, Artificial Sequence
  Description of Artificial Sequence: Synthetic oligonucleotide
auagucugugauggaauag

SEQ ID NO: 2502901 - RNA, 19 nt, Artificial Sequence
  Description of Artificial Sequence: Synthetic oligonucleotide
uggacagagaguccaccgu

SEQ ID NO: 2502902 - RNA, 19 nt, Artificial Sequence
  Description of Artificial Sequence: Synthetic oligonucleotide
uugcucacuucuuuacaga

SEQ ID NO: 2502903 - RNA, 19 nt, Artificial Sequence
  Description of Artificial Sequence: Synthetic oligonucleotide
ucguagucgccgauaaauc

SEQ ID NO: 2502904 - RNA, 19 nt, Artificial Sequence
  Description of Artificial Sequence: Synthetic oligonucleotide
gucucgaauacaguuugcc

SEQ ID NO: 2502905 - RNA, 19 nt, Artificial Sequence
  Description of Artificial Sequence: Synthetic oligonucleotide
augggcacgucccgcgacc

SEQ ID NO: 2502906 - RNA, 19 nt, Artificial Sequence
  Description of Artificial Sequence: Synthetic oligonucleotide
auugcgcuuuugcccacac

SEQ ID NO: 2502907 - RNA, 19 nt, Artificial Sequence
  Description of Artificial Sequence: Synthetic oligonucleotide
agaguccaccguuuggcug

SEQ ID NO: 2502908 - RNA, 19 nt, Artificial Sequence
  Description of Artificial Sequence: Synthetic oligonucleotide
gaguccaccguuuggcuga

SEQ ID NO: 2502909 - RNA, 19 nt, Artificial Sequence
  Description of Artificial Sequence: Synthetic oligonucleotide
cucauuggcuagcugaaga

SEQ ID NO: 2502910 - RNA, 19 nt, Artificial Sequence
  Description of Artificial Sequence: Synthetic oligonucleotide
aagugcccagacaugguug

SEQ ID NO: 2502911 - RNA, 19 nt, Artificial Sequence
  Description of Artificial Sequence: Synthetic oligonucleotide
gggcuuuuccaucagggug

SEQ ID NO: 2502912 - RNA, 19 nt, Artificial Sequence
  Description of Artificial Sequence: Synthetic oligonucleotide
gacaggggcuuuuccauca

SEQ ID NO: 2502913 - RNA, 19 nt, Artificial Sequence
  Description of Artificial Sequence: Synthetic oligonucleotide
gacgcaugggcacgucccg

SEQ ID NO: 2502914 - RNA, 19 nt, Artificial Sequence
  Description of Artificial Sequence: Synthetic oligonucleotide
uggaccuuccggaucugcu

SEQ ID NO: 2502915 - RNA, 19 nt, Artificial Sequence
  Description of Artificial Sequence: Synthetic oligonucleotide
cuggaugccucccggagug

SEQ ID NO: 2502916 - RNA, 19 nt, Artificial Sequence
  Description of Artificial Sequence: Synthetic oligonucleotide
agcagaaagugcccagaca

SEQ ID NO: 2502917 - RNA, 19 nt, Artificial Sequence
  Description of Artificial Sequence: Synthetic oligonucleotide
auggaauagaccagcagaa

SEQ ID NO: 2502918 - RNA, 19 nt, Artificial Sequence
  Description of Artificial Sequence: Synthetic oligonucleotide
ucgggaaugggagccagca

SEQ ID NO: 2502919 - RNA, 19 nt, Artificial Sequence
  Description of Artificial Sequence: Synthetic oligonucleotide
cuccacauagacgagucuc

SEQ ID NO: 2502920 - RNA, 19 nt, Artificial Sequence
  Description of Artificial Sequence: Synthetic oligonucleotide
agcugaagaccuucaugug

SEQ ID NO: 2502921 - RNA, 19 nt, Artificial Sequence
  Description of Artificial Sequence: Synthetic oligonucleotide
ugccugaagcgccucuuca

SEQ ID NO: 2502922 - RNA, 19 nt, Artificial Sequence
  Description of Artificial Sequence: Synthetic oligonucleotide
uguuggguucguagucgcc

SEQ ID NO: 2502923 - RNA, 19 nt, Artificial Sequence
  Description of Artificial Sequence: Synthetic oligonucleotide
cagagaguccaccguuugg

SEQ ID NO: 2502924 - RNA, 19 nt, Artificial Sequence
  Description of Artificial Sequence: Synthetic oligonucleotide
agcucucauagucugugau

SEQ ID NO: 2502925 - RNA, 19 nt, Artificial Sequence
  Description of Artificial Sequence: Synthetic oligonucleotide
ugaagcgccucuucagguc

SEQ ID NO: 2502926 - RNA, 19 nt, Artificial Sequence
  Description of Artificial Sequence: Synthetic oligonucleotide
uccccacugaggcugugca

SEQ ID NO: 2502927 - RNA, 19 nt, Artificial Sequence
  Description of Artificial Sequence: Synthetic oligonucleotide
aaauuucaaggaagacacu

SEQ ID NO: 2502928 - RNA, 19 nt, Artificial Sequence
  Description of Artificial Sequence: Synthetic oligonucleotide
uagacgagucucgaauaca

SEQ ID NO: 2502929 - RNA, 19 nt, Artificial Sequence
  Description of Artificial Sequence: Synthetic oligonucleotide
cuuggacagagaguccacc

SEQ ID NO: 2502930 - RNA, 19 nt, Artificial Sequence
  Description of Artificial Sequence: Synthetic oligonucleotide
guaaaguggccgaacggac

SEQ ID NO: 2502931 - RNA, 19 nt, Artificial Sequence
  Description of Artificial Sequence: Synthetic oligonucleotide
ugggagccagcagaaagug

SEQ ID NO: 2502932 - RNA, 19 nt, Artificial Sequence
  Description of Artificial Sequence: Synthetic oligonucleotide
cagaaagugcccagacaug

SEQ ID NO: 2502933 - RNA, 19 nt, Artificial Sequence
  Description of Artificial Sequence: Synthetic oligonucleotide
agucucgaauacaguuugc

SEQ ID NO: 2502934 - RNA, 19 nt, Artificial Sequence
  Description of Artificial Sequence: Synthetic oligonucleotide
auguucggggagcgaggcc

SEQ ID NO: 2502935 - RNA, 19 nt, Artificial Sequence
  Description of Artificial Sequence: Synthetic oligonucleotide
agcgcacaaucauugcgcu

SEQ ID NO: 2502936 - RNA, 19 nt, Artificial Sequence
  Description of Artificial Sequence: Synthetic oligonucleotide
uugcgcuuuugcccacacg

SEQ ID NO: 2502937 - RNA, 19 nt, Artificial Sequence
  Description of Artificial Sequence: Synthetic oligonucleotide
aggguggaccuuccggauc

SEQ ID NO: 2502938 - RNA, 19 nt, Artificial Sequence
  Description of Artificial Sequence: Synthetic oligonucleotide
cucacuucuuuacagagau

SEQ ID NO: 2502939 - RNA, 19 nt, Artificial Sequence
  Description of Artificial Sequence: Synthetic oligonucleotide
guagucgccgauaaaucuc

SEQ ID NO: 2502940 - RNA, 19 nt, Artificial Sequence
  Description of Artificial Sequence: Synthetic oligonucleotide
uuggcggacgcaugggcac

SEQ ID NO: 2502941 - RNA, 19 nt, Artificial Sequence
  Description of Artificial Sequence: Synthetic oligonucleotide
cugccgggcaugcaagagg

SEQ ID NO: 2502942 - RNA, 19 nt, Artificial Sequence
  Description of Artificial Sequence: Synthetic oligonucleotide
uuggguucguagucgccga

SEQ ID NO: 2502943 - RNA, 19 nt, Artificial Sequence
  Description of Artificial Sequence: Synthetic oligonucleotide
ucucauagucugugaugga

SEQ ID NO: 2502944 - RNA, 19 nt, Artificial Sequence
  Description of Artificial Sequence: Synthetic oligonucleotide
ugcacgcacuuggacagag

SEQ ID NO: 2502945 - RNA, 19 nt, Artificial Sequence
  Description of Artificial Sequence: Synthetic oligonucleotide
gaggaggacucgggaaugg

SEQ ID NO: 2502946 - RNA, 19 nt, Artificial Sequence
  Description of Artificial Sequence: Synthetic oligonucleotide
gaggacagagccugccuga

SEQ ID NO: 2502947 - RNA, 19 nt, Artificial Sequence
  Description of Artificial Sequence: Synthetic oligonucleotide
acaucacagacgucuucgu

SEQ ID NO: 2502948 - RNA, 19 nt, Artificial Sequence
  Description of Artificial Sequence: Synthetic oligonucleotide
cauguucggggagcgaggc

SEQ ID NO: 2502949 - RNA, 19 nt, Artificial Sequence
  Description of Artificial Sequence: Synthetic oligonucleotide
guguuggguucguagucgc

SEQ ID NO: 2502950 - RNA, 19 nt, Artificial Sequence
  Description of Artificial Sequence: Synthetic oligonucleotide
uggaauagaccagcagaaa

SEQ ID NO: 2502951 - RNA, 19 nt, Artificial Sequence
  Description of Artificial Sequence: Synthetic oligonucleotide
ucccggaguguccuggauc

SEQ ID NO: 2502952 - RNA, 19 nt, Artificial Sequence
  Description of Artificial Sequence: Synthetic oligonucleotide
gcuuuugcccacacgaccc

SEQ ID NO: 2502953 - RNA, 19 nt, Artificial Sequence
  Description of Artificial Sequence: Synthetic oligonucleotide
uccugcauguucggggagc

SEQ ID NO: 2502954 - RNA, 19 nt, Artificial Sequence
  Description of Artificial Sequence: Synthetic oligonucleotide
cauagucugugauggaaua

SEQ ID NO: 2502955 - RNA, 19 nt, Artificial Sequence
  Description of Artificial Sequence: Synthetic oligonucleotide
agguagucggaggaggacu

SEQ ID NO: 2502956 - RNA, 19 nt, Artificial Sequence
  Description of Artificial Sequence: Synthetic oligonucleotide
aaguggccgaacggacugg

SEQ ID NO: 2502957 - RNA, 19 nt, Artificial Sequence
  Description of Artificial Sequence: Synthetic oligonucleotide
cauagacgagucucgaaua

SEQ ID NO: 2502958 - RNA, 19 nt, Artificial Sequence
  Description of Artificial Sequence: Synthetic oligonucleotide
gaguguccuggaucugcag

SEQ ID NO: 2502959 - RNA, 19 nt, Artificial Sequence
  Description of Artificial Sequence: Synthetic oligonucleotide
uuccggaucugcugguaaa

SEQ ID NO: 2502960 - RNA, 19 nt, Artificial Sequence
  Description of Artificial Sequence: Synthetic oligonucleotide
aucugcugguaaaguggcc

SEQ ID NO: 2502961 - RNA, 19 nt, Artificial Sequence
  Description of Artificial Sequence: Synthetic oligonucleotide
gggcuuuuacuuuggagga

SEQ ID NO: 2502962 - RNA, 19 nt, Artificial Sequence
  Description of Artificial Sequence: Synthetic oligonucleotide
cuugggcaggagguagucg

SEQ ID NO: 2502963 - RNA, 19 nt, Artificial Sequence
  Description of Artificial Sequence: Synthetic oligonucleotide
uuuugcccacacgacccgc

SEQ ID NO: 2502964 - RNA, 19 nt, Artificial Sequence
  Description of Artificial Sequence: Synthetic oligonucleotide
cuucaugugucugcaccug

SEQ ID NO: 2502965 - RNA, 19 nt, Artificial Sequence
  Description of Artificial Sequence: Synthetic oligonucleotide
caugguuggcggacgcaug

SEQ ID NO: 2502966 - RNA, 19 nt, Artificial Sequence
  Description of Artificial Sequence: Synthetic oligonucleotide
aggaggacucgggaauggg

SEQ ID NO: 2502967 - RNA, 19 nt, Artificial Sequence
  Description of Artificial Sequence: Synthetic oligonucleotide
aguuugccuguguuggguu

SEQ ID NO: 2502968 - RNA, 19 nt, Artificial Sequence
  Description of Artificial Sequence: Synthetic oligonucleotide
guuugccuguguuggguuc

SEQ ID NO: 2502969 - RNA, 19 nt, Artificial Sequence
  Description of Artificial Sequence: Synthetic oligonucleotide
cgcgcugcaggauagcugg

SEQ ID NO: 2502970 - RNA, 19 nt, Artificial Sequence
  Description of Artificial Sequence: Synthetic oligonucleotide
uugcccacacgacccgcgc

SEQ ID NO: 2502971 - RNA, 19 nt, Artificial Sequence
  Description of Artificial Sequence: Synthetic oligonucleotide
gaugccucccggagugucc

SEQ ID NO: 2502972 - RNA, 19 nt, Artificial Sequence
  Description of Artificial Sequence: Synthetic oligonucleotide
uaucuugggccuggaugcc

SEQ ID NO: 2502973 - RNA, 19 nt, Artificial Sequence
  Description of Artificial Sequence: Synthetic oligonucleotide
aacacaucacagacgucuu

SEQ ID NO: 2502974 - RNA, 19 nt, Artificial Sequence
  Description of Artificial Sequence: Synthetic oligonucleotide
acagacgucuucguaguuu

SEQ ID NO: 2502975 - RNA, 19 nt, Artificial Sequence
  Description of Artificial Sequence: Synthetic oligonucleotide
aacggacugguagcucuca

SEQ ID NO: 2502976 - RNA, 19 nt, Artificial Sequence
  Description of Artificial Sequence: Synthetic oligonucleotide
ugcccacacgacccgcgcc

SEQ ID NO: 2502977 - RNA, 19 nt, Artificial Sequence
  Description of Artificial Sequence: Synthetic oligonucleotide
ugguuggcggacgcauggg

SEQ ID NO: 2502978 - RNA, 19 nt, Artificial Sequence
  Description of Artificial Sequence: Synthetic oligonucleotide
caucaggguggaccuuccg

SEQ ID NO: 2502979 - RNA, 19 nt, Artificial Sequence
  Description of Artificial Sequence: Synthetic oligonucleotide
acaugguuggcggacgcau

SEQ ID NO: 2502980 - RNA, 19 nt, Artificial Sequence
  Description of Artificial Sequence: Synthetic oligonucleotide
ggaccuuccggaucugcug

SEQ ID NO: 2502981 - RNA, 19 nt, Artificial Sequence
  Description of Artificial Sequence: Synthetic oligonucleotide
guagucggaggaggacucg

SEQ ID NO: 2502982 - RNA, 19 nt, Artificial Sequence
  Description of Artificial Sequence: Synthetic oligonucleotide
cuggaucugcagugauagc

SEQ ID NO: 2502983 - RNA, 19 nt, Artificial Sequence
  Description of Artificial Sequence: Synthetic oligonucleotide
cugucugagaugggucacc

SEQ ID NO: 2502984 - RNA, 19 nt, Artificial Sequence
  Description of Artificial Sequence: Synthetic oligonucleotide
acgcaugggcacgucccgc

SEQ ID NO: 2502985 - RNA, 19 nt, Artificial Sequence
  Description of Artificial Sequence: Synthetic oligonucleotide
gagguagucggaggaggac

SEQ ID NO: 2502986 - RNA, 19 nt, Artificial Sequence
  Description of Artificial Sequence: Synthetic oligonucleotide
caccguuuggcugagguua

SEQ ID NO: 2502987 - RNA, 19 nt, Artificial Sequence
  Description of Artificial Sequence: Synthetic oligonucleotide
cagagccugccugaagcgc

SEQ ID NO: 2502988 - RNA, 19 nt, Artificial Sequence
  Description of Artificial Sequence: Synthetic oligonucleotide
ggacucgggaaugggagcc

SEQ ID NO: 2502989 - RNA, 19 nt, Artificial Sequence
  Description of Artificial Sequence: Synthetic oligonucleotide
ugggcacgucccgcgaccg

SEQ ID NO: 2502990 - RNA, 19 nt, Artificial Sequence
  Description of Artificial Sequence: Synthetic oligonucleotide
gguuggcggacgcaugggc

SEQ ID NO: 2502991 - RNA, 19 nt, Artificial Sequence
  Description of Artificial Sequence: Synthetic oligonucleotide
agaccagcagaaagcccuc

SEQ ID NO: 2502992 - RNA, 19 nt, Artificial Sequence
  Description of Artificial Sequence: Synthetic oligonucleotide
gguucguagucgccgauaa

SEQ ID NO: 2502993 - RNA, 19 nt, Artificial Sequence
  Description of Artificial Sequence: Synthetic oligonucleotide
caccugccgggcaugcaag

SEQ ID NO: 2502994 - RNA, 19 nt, Artificial Sequence
  Description of Artificial Sequence: Synthetic oligonucleotide
gcugaagaccuucaugugu

SEQ ID NO: 2502995 - RNA, 19 nt, Artificial Sequence
  Description of Artificial Sequence: Synthetic oligonucleotide
uggcuagcugaagaccuuc

SEQ ID NO: 2502996 - RNA, 19 nt, Artificial Sequence
  Description of Artificial Sequence: Synthetic oligonucleotide
cucgggaaugggagccagc

SEQ ID NO: 2502997 - RNA, 19 nt, Artificial Sequence
  Description of Artificial Sequence: Synthetic oligonucleotide
ggccgaacggacugguagc

SEQ ID NO: 2502998 - RNA, 19 nt, Artificial Sequence
  Description of Artificial Sequence: Synthetic oligonucleotide
cugagguuaucuugggccu

SEQ ID NO: 2502999 - RNA, 19 nt, Artificial Sequence
  Description of Artificial Sequence: Synthetic oligonucleotide
gucggaggaggacucggga

SEQ ID NO: 2503000 - RNA, 19 nt, Artificial Sequence
  Description of Artificial Sequence: Synthetic oligonucleotide
acucgggaaugggagccag

SEQ ID NO: 2503001 - RNA, 19 nt, Artificial Sequence
  Description of Artificial Sequence: Synthetic oligonucleotide
guuggcggacgcaugggca

SEQ ID NO: 2503002 - RNA, 19 nt, Artificial Sequence
  Description of Artificial Sequence: Synthetic oligonucleotide
cccacugaggcugugcagc

SEQ ID NO: 2503003 - RNA, 19 nt, Artificial Sequence
  Description of Artificial Sequence: Synthetic oligonucleotide
gcaggagguagucggagga

SEQ ID NO: 2503004 - RNA, 19 nt, Artificial Sequence
  Description of Artificial Sequence: Synthetic oligonucleotide
uggcggacgcaugggcacg

SEQ ID NO: 2503005 - RNA, 19 nt, Artificial Sequence
  Description of Artificial Sequence: Synthetic oligonucleotide
acacgacccgcgccuagca

SEQ ID NO: 2503006 - RNA, 19 nt, Artificial Sequence
  Description of Artificial Sequence: Synthetic oligonucleotide
gaccuucaugugucugcac

SEQ ID NO: 2503007 - RNA, 19 nt, Artificial Sequence
  Description of Artificial Sequence: Synthetic oligonucleotide
caugggcacgucccgcgac

SEQ ID NO: 2503008 - RNA, 19 nt, Artificial Sequence
  Description of Artificial Sequence: Synthetic oligonucleotide
cagagauguugaaacacau

SEQ ID NO: 2503009 - RNA, 19 nt, Artificial Sequence
  Description of Artificial Sequence: Synthetic oligonucleotide
agcucauuggcuagcugaa

SEQ ID NO: 2503010 - RNA, 19 nt, Artificial Sequence
  Description of Artificial Sequence: Synthetic oligonucleotide
ucugcaccugccgggcaug

SEQ ID NO: 2503011 - RNA, 19 nt, Artificial Sequence
  Description of Artificial Sequence: Synthetic oligonucleotide
cacauagacgagucucgaa

SEQ ID NO: 2503012 - RNA, 19 nt, Artificial Sequence
  Description of Artificial Sequence: Synthetic oligonucleotide
cugcugguaaaguggccga

SEQ ID NO: 2503013 - RNA, 19 nt, Artificial Sequence
  Description of Artificial Sequence: Synthetic oligonucleotide
ggacgcaugggcacguccc

SEQ ID NO: 2503014 - RNA, 19 nt, Artificial Sequence
  Description of Artificial Sequence: Synthetic oligonucleotide
ugcugguaaaguggccgaa

SEQ ID NO: 2503015 - RNA, 19 nt, Artificial Sequence
  Description of Artificial Sequence: Synthetic oligonucleotide
uccgcuccccacugaggcu

SEQ ID NO: 2503016 - RNA, 19 nt, Artificial Sequence
  Description of Artificial Sequence: Synthetic oligonucleotide
guuuucacuaguggaaauu

SEQ ID NO: 2503017 - RNA, 19 nt, Artificial Sequence
  Description of Artificial Sequence: Synthetic oligonucleotide
cugguagcucucauagucu

SEQ ID NO: 2503018 - RNA, 19 nt, Artificial Sequence
  Description of Artificial Sequence: Synthetic oligonucleotide
aagacacugcccagcucau

SEQ ID NO: 2503019 - RNA, 19 nt, Artificial Sequence
  Description of Artificial Sequence: Synthetic oligonucleotide
ggcacgucccgcgaccgcg

SEQ ID NO: 2503020 - RNA, 19 nt, Artificial Sequence
  Description of Artificial Sequence: Synthetic oligonucleotide
aguggccgaacggacuggu

SEQ ID NO: 2503021 - RNA, 19 nt, Artificial Sequence
  Description of Artificial Sequence: Synthetic oligonucleotide
cacacgacccgcgccuagc

SEQ ID NO: 2503022 - RNA, 19 nt, Artificial Sequence
  Description of Artificial Sequence: Synthetic oligonucleotide
agacgucuucguaguuuuc

SEQ ID NO: 2503023 - RNA, 19 nt, Artificial Sequence
  Description of Artificial Sequence: Synthetic oligonucleotide
gaacggacugguagcucuc

SEQ ID NO: 2503024 - RNA, 19 nt, Artificial Sequence
  Description of Artificial Sequence: Synthetic oligonucleotide
cgcuuuugcccacacgacc

SEQ ID NO: 2503025 - RNA, 19 nt, Artificial Sequence
  Description of Artificial Sequence: Synthetic oligonucleotide
uggguucguagucgccgau

SEQ ID NO: 2503026 - RNA, 19 nt, Artificial Sequence
  Description of Artificial Sequence: Synthetic oligonucleotide
cccgcgaccgcgcugcagg

SEQ ID NO: 2503027 - RNA, 19 nt, Artificial Sequence
  Description of Artificial Sequence: Synthetic oligonucleotide
gacaugguuggcggacgca

SEQ ID NO: 2503028 - RNA, 19 nt, Artificial Sequence
  Description of Artificial Sequence: Synthetic oligonucleotide
ucggcccacugcacgcacu

SEQ ID NO: 2503029 - RNA, 19 nt, Artificial Sequence
  Description of Artificial Sequence: Synthetic oligonucleotide
cuuccggaucugcugguaa

SEQ ID NO: 2503030 - RNA, 19 nt, Artificial Sequence
  Description of Artificial Sequence: Synthetic oligonucleotide
gguagucggaggaggacuc

SEQ ID NO: 2503031 - RNA, 19 nt, Artificial Sequence
  Description of Artificial Sequence: Synthetic oligonucleotide
gcauguucggggagcgagg

SEQ ID NO: 2503032 - RNA, 19 nt, Artificial Sequence
  Description of Artificial Sequence: Synthetic oligonucleotide
augggucaccccagggcag

SEQ ID NO: 2503033 - RNA, 19 nt, Artificial Sequence
  Description of Artificial Sequence: Synthetic oligonucleotide
ccgauaaaucucuuuguua

SEQ ID NO: 2503034 - RNA, 19 nt, Artificial Sequence
  Description of Artificial Sequence: Synthetic oligonucleotide
acggacugguagcucucau

SEQ ID NO: 2503035 - RNA, 19 nt, Artificial Sequence
  Description of Artificial Sequence: Synthetic oligonucleotide
ggaggaggacucgggaaug

SEQ ID NO: 2503036 - RNA, 19 nt, Artificial Sequence
  Description of Artificial Sequence: Synthetic oligonucleotide
cccuccacauagacgaguc

SEQ ID NO: 2503037 - RNA, 19 nt, Artificial Sequence
  Description of Artificial Sequence: Synthetic oligonucleotide
ccuagcaccgccaguuuga

SEQ ID NO: 2503038 - RNA, 19 nt, Artificial Sequence
  Description of Artificial Sequence: Synthetic oligonucleotide
cugaagcgccucuucaggu

SEQ ID NO: 2503039 - RNA, 19 nt, Artificial Sequence
  Description of Artificial Sequence: Synthetic oligonucleotide
gaaagugcccagacauggu

SEQ ID NO: 2503040 - RNA, 19 nt, Artificial Sequence
  Description of Artificial Sequence: Synthetic oligonucleotide
acgcacuuggacagagagu

SEQ ID NO: 2503041 - RNA, 19 nt, Artificial Sequence
  Description of Artificial Sequence: Synthetic oligonucleotide
augccucccggaguguccu

SEQ ID NO: 2503042 - RNA, 19 nt, Artificial Sequence
  Description of Artificial Sequence: Synthetic oligonucleotide
gcugguaaaguggccgaac

SEQ ID NO: 2503043 - RNA, 19 nt, Artificial Sequence
  Description of Artificial Sequence: Synthetic oligonucleotide
cacgacccgcgccuagcac

SEQ ID NO: 2503044 - RNA, 19 nt, Artificial Sequence
  Description of Artificial Sequence: Synthetic oligonucleotide
cagacgucuucguaguuuu

SEQ ID NO: 2503045 - RNA, 19 nt, Artificial Sequence
  Description of Artificial Sequence: Synthetic oligonucleotide
cagaaagcccucggcccac

SEQ ID NO: 2503046 - RNA, 19 nt, Artificial Sequence
  Description of Artificial Sequence: Synthetic oligonucleotide
guucguagucgccgauaaa

SEQ ID NO: 2503047 - RNA, 19 nt, Artificial Sequence
  Description of Artificial Sequence: Synthetic oligonucleotide
gggcaugcaagaggucucc

SEQ ID NO: 2503048 - RNA, 19 nt, Artificial Sequence
  Description of Artificial Sequence: Synthetic oligonucleotide
gacgagucucgaauacagu

SEQ ID NO: 2503049 - RNA, 19 nt, Artificial Sequence
  Description of Artificial Sequence: Synthetic oligonucleotide
gacucgggaaugggagcca

SEQ ID NO: 2503050 - RNA, 19 nt, Artificial Sequence
  Description of Artificial Sequence: Synthetic oligonucleotide
cucggcccacugcacgcac

SEQ ID NO: 2503051 - RNA, 19 nt, Artificial Sequence
  Description of Artificial Sequence: Synthetic oligonucleotide
aguccaccguuuggcugag

SEQ ID NO: 2503052 - RNA, 19 nt, Artificial Sequence
  Description of Artificial Sequence: Synthetic oligonucleotide
ccaucaggguggaccuucc

SEQ ID NO: 2503053 - RNA, 19 nt, Artificial Sequence
  Description of Artificial Sequence: Synthetic oligonucleotide
gccgauaaaucucuuuguu

SEQ ID NO: 2503054 - RNA, 19 nt, Artificial Sequence
  Description of Artificial Sequence: Synthetic oligonucleotide
gacagagaguccaccguuu

SEQ ID NO: 2503055 - RNA, 19 nt, Artificial Sequence
  Description of Artificial Sequence: Synthetic oligonucleotide
gucgccgauaaaucucuuu

SEQ ID NO: 2503056 - RNA, 19 nt, Artificial Sequence
  Description of Artificial Sequence: Synthetic oligonucleotide
agaaagcccucggcccacu

SEQ ID NO: 2503057 - RNA, 19 nt, Artificial Sequence
  Description of Artificial Sequence: Synthetic oligonucleotide
agcccucggcccacugcac

SEQ ID NO: 2503058 - RNA, 19 nt, Artificial Sequence
  Description of Artificial Sequence: Synthetic oligonucleotide
ccacugcacgcacuuggac

SEQ ID NO: 2503059 - RNA, 19 nt, Artificial Sequence
  Description of Artificial Sequence: Synthetic oligonucleotide
ggggcuuuuccaucagggu

SEQ ID NO: 2503060 - RNA, 19 nt, Artificial Sequence
  Description of Artificial Sequence: Synthetic oligonucleotide
ugccucccggaguguccug

SEQ ID NO: 2503061 - RNA, 19 nt, Artificial Sequence
  Description of Artificial Sequence: Synthetic oligonucleotide
acgucccgcgaccgcgcug

SEQ ID NO: 2503062 - RNA, 19 nt, Artificial Sequence
  Description of Artificial Sequence: Synthetic oligonucleotide
gaccgcgcugcaggauagc

SEQ ID NO: 2503063 - RNA, 19 nt, Artificial Sequence
  Description of Artificial Sequence: Synthetic oligonucleotide
ggacagagaguccaccguu

SEQ ID NO: 2503064 - RNA, 19 nt, Artificial Sequence
  Description of Artificial Sequence: Synthetic oligonucleotide
agguuaucuugggccugga

SEQ ID NO: 2503065 - RNA, 19 nt, Artificial Sequence
  Description of Artificial Sequence: Synthetic oligonucleotide
uggaugccucccggagugu

SEQ ID NO: 2503066 - RNA, 19 nt, Artificial Sequence
  Description of Artificial Sequence: Synthetic oligonucleotide
cgacccgcgccuagcaccg

SEQ ID NO: 2503067 - RNA, 19 nt, Artificial Sequence
  Description of Artificial Sequence: Synthetic oligonucleotide
cuuuguugcccacgaugau

SEQ ID NO: 2503068 - RNA, 19 nt, Artificial Sequence
  Description of Artificial Sequence: Synthetic oligonucleotide
cggaguguccuggaucugc

SEQ ID NO: 2503069 - RNA, 19 nt, Artificial Sequence
  Description of Artificial Sequence: Synthetic oligonucleotide
gcacuuggacagagagucc

SEQ ID NO: 2503070 - RNA, 19 nt, Artificial Sequence
  Description of Artificial Sequence: Synthetic oligonucleotide
cguagucgccgauaaaucu

SEQ ID NO: 2503071 - RNA, 19 nt, Artificial Sequence
  Description of Artificial Sequence: Synthetic oligonucleotide
ccuucaugugucugcaccu

SEQ ID NO: 2503072 - RNA, 19 nt, Artificial Sequence
  Description of Artificial Sequence: Synthetic oligonucleotide
cauugcgcuuuugcccaca

SEQ ID NO: 2503073 - RNA, 19 nt, Artificial Sequence
  Description of Artificial Sequence: Synthetic oligonucleotide
ggcuagcugaagaccuuca

SEQ ID NO: 2503074 - RNA, 19 nt, Artificial Sequence
  Description of Artificial Sequence: Synthetic oligonucleotide
ccugccgggcaugcaagag

SEQ ID NO: 2503075 - RNA, 19 nt, Artificial Sequence
  Description of Artificial Sequence: Synthetic oligonucleotide
ggaugccucccggaguguc

SEQ ID NO: 2503076 - RNA, 19 nt, Artificial Sequence
  Description of Artificial Sequence: Synthetic oligonucleotide
ccgcgcugcaggauagcug

SEQ ID NO: 2503077 - RNA, 19 nt, Artificial Sequence
  Description of Artificial Sequence: Synthetic oligonucleotide
uuccaucaggguggaccuu

SEQ ID NO: 2503078 - RNA, 19 nt, Artificial Sequence
  Description of Artificial Sequence: Synthetic oligonucleotide
cccggaguguccuggaucu

SEQ ID NO: 2503079 - RNA, 19 nt, Artificial Sequence
  Description of Artificial Sequence: Synthetic oligonucleotide
gcgcuuuugcccacacgac

SEQ ID NO: 2503080 - RNA, 19 nt, Artificial Sequence
  Description of Artificial Sequence: Synthetic oligonucleotide
gcuuuuccaucagggugga

SEQ ID NO: 2503081 - RNA, 19 nt, Artificial Sequence
  Description of Artificial Sequence: Synthetic oligonucleotide
gcgaccgcgcugcaggaua

SEQ ID NO: 2503082 - RNA, 19 nt, Artificial Sequence
  Description of Artificial Sequence: Synthetic oligonucleotide
cgggcaugcaagaggucuc

SEQ ID NO: 2503083 - RNA, 19 nt, Artificial Sequence
  Description of Artificial Sequence: Synthetic oligonucleotide
ccacauagacgagucucga

SEQ ID NO: 2503084 - RNA, 19 nt, Artificial Sequence
  Description of Artificial Sequence: Synthetic oligonucleotide
cggacgcaugggcacgucc

SEQ ID NO: 2503085 - RNA, 19 nt, Artificial Sequence
  Description of Artificial Sequence: Synthetic oligonucleotide
cccacugcacgcacuugga

SEQ ID NO: 2503086 - RNA, 19 nt, Artificial Sequence
  Description of Artificial Sequence: Synthetic oligonucleotide
gguuaucuugggccuggau

SEQ ID NO: 2503087 - RNA, 19 nt, Artificial Sequence
  Description of Artificial Sequence: Synthetic oligonucleotide
ggccuggaugccucccgga

SEQ ID NO: 2503088 - RNA, 19 nt, Artificial Sequence
  Description of Artificial Sequence: Synthetic oligonucleotide
gcaugcaagaggucuccuu

SEQ ID NO: 2503089 - RNA, 19 nt, Artificial Sequence
  Description of Artificial Sequence: Synthetic oligonucleotide
agucgccgauaaaucucuu

SEQ ID NO: 2503090 - RNA, 19 nt, Artificial Sequence
  Description of Artificial Sequence: Synthetic oligonucleotide
ccacacgacccgcgccuag

SEQ ID NO: 2503091 - RNA, 19 nt, Artificial Sequence
  Description of Artificial Sequence: Synthetic oligonucleotide
gggcacgucccgcgaccgc

SEQ ID NO: 2503092 - RNA, 19 nt, Artificial Sequence
  Description of Artificial Sequence: Synthetic oligonucleotide
ccgggcaugcaagaggucu

SEQ ID NO: 2503093 - RNA, 19 nt, Artificial Sequence
  Description of Artificial Sequence: Synthetic oligonucleotide
cgaauacaguuugccugug

SEQ ID NO: 2503094 - RNA, 19 nt, Artificial Sequence
  Description of Artificial Sequence: Synthetic oligonucleotide
cccagacaugguuggcgga

SEQ ID NO: 2503095 - RNA, 19 nt, Artificial Sequence
  Description of Artificial Sequence: Synthetic oligonucleotide
cuagcaccgccaguuugau

SEQ ID NO: 2503096 - RNA, 19 nt, Artificial Sequence
  Description of Artificial Sequence: Synthetic oligonucleotide
cugcauguucggggagcga

SEQ ID NO: 2503097 - RNA, 19 nt, Artificial Sequence
  Description of Artificial Sequence: Synthetic oligonucleotide
cgagucucgaauacaguuu

SEQ ID NO: 2503098 - RNA, 19 nt, Artificial Sequence
  Description of Artificial Sequence: Synthetic oligonucleotide
ggguucguagucgccgaua

SEQ ID NO: 2503099 - RNA, 19 nt, Artificial Sequence
  Description of Artificial Sequence: Synthetic oligonucleotide
cgcacaaucauugcgcuuu

SEQ ID NO: 2503100 - RNA, 19 nt, Artificial Sequence
  Description of Artificial Sequence: Synthetic oligonucleotide
cugcacgcacuuggacaga

SEQ ID NO: 2503101 - RNA, 19 nt, Artificial Sequence
  Description of Artificial Sequence: Synthetic oligonucleotide
gccgaacggacugguagcu

SEQ ID NO: 2503102 - RNA, 19 nt, Artificial Sequence
  Description of Artificial Sequence: Synthetic oligonucleotide
cgucuucguaguuuucacu

SEQ ID NO: 2503103 - RNA, 19 nt, Artificial Sequence
  Description of Artificial Sequence: Synthetic oligonucleotide
ccgaacggacugguagcuc

SEQ ID NO: 2503104 - RNA, 19 nt, Artificial Sequence
  Description of Artificial Sequence: Synthetic oligonucleotide
ccgcgccuagcaccgccag

SEQ ID NO: 2503105 - RNA, 19 nt, Artificial Sequence
  Description of Artificial Sequence: Synthetic oligonucleotide
guggccgaacggacuggua

SEQ ID NO: 2503106 - RNA, 19 nt, Artificial Sequence
  Description of Artificial Sequence: Synthetic oligonucleotide
cacagacgucuucguaguu

SEQ ID NO: 2503107 - RNA, 19 nt, Artificial Sequence
  Description of Artificial Sequence: Synthetic oligonucleotide
gcgccuagcaccgccaguu

SEQ ID NO: 2503108 - RNA, 19 nt, Artificial Sequence
  Description of Artificial Sequence: Synthetic oligonucleotide
cggacugguagcucucaua

SEQ ID NO: 2503109 - RNA, 19 nt, Artificial Sequence
  Description of Artificial Sequence: Synthetic oligonucleotide
cguuuggcugagguuaucu

SEQ ID NO: 2503110 - RNA, 19 nt, Artificial Sequence
  Description of Artificial Sequence: Synthetic oligonucleotide
ccacugaggcugugcagcu

SEQ ID NO: 2503111 - RNA, 19 nt, Artificial Sequence
  Description of Artificial Sequence: Synthetic oligonucleotide
ccucccggaguguccugga

SEQ ID NO: 2503112 - RNA, 19 nt, Artificial Sequence
  Description of Artificial Sequence: Synthetic oligonucleotide
cucccggaguguccuggau

SEQ ID NO: 2503113 - RNA, 19 nt, Artificial Sequence
  Description of Artificial Sequence: Synthetic oligonucleotide
ccuccacauagacgagucu

SEQ ID NO: 2503114 - RNA, 19 nt, Artificial Sequence
  Description of Artificial Sequence: Synthetic oligonucleotide
ccguuuggcugagguuauc

SEQ ID NO: 2503115 - RNA, 19 nt, Artificial Sequence
  Description of Artificial Sequence: Synthetic oligonucleotide
cccgcgccuagcaccgcca

SEQ ID NO: 2503116 - RNA, 19 nt, Artificial Sequence
  Description of Artificial Sequence: Synthetic oligonucleotide
cacgucccgcgaccgcgcu

SEQ ID NO: 2503117 - RNA, 19 nt, Artificial Sequence
  Description of Artificial Sequence: Synthetic oligonucleotide
ccggaguguccuggaucug

SEQ ID NO: 2503118 - RNA, 19 nt, Artificial Sequence
  Description of Artificial Sequence: Synthetic oligonucleotide
ccggaucugcugguaaagu

SEQ ID NO: 2503119 - RNA, 19 nt, Artificial Sequence
  Description of Artificial Sequence: Synthetic oligonucleotide
gcgcacaaucauugcgcuu

SEQ ID NO: 2503120 - RNA, 19 nt, Artificial Sequence
  Description of Artificial Sequence: Synthetic oligonucleotide
gucccgcgaccgcgcugca

SEQ ID NO: 2503121 - RNA, 19 nt, Artificial Sequence
  Description of Artificial Sequence: Synthetic oligonucleotide
gccgggcaugcaagagguc

SEQ ID NO: 2503122 - RNA, 19 nt, Artificial Sequence
  Description of Artificial Sequence: Synthetic oligonucleotide
ccaccguuuggcugagguu

SEQ ID NO: 2503123 - RNA, 19 nt, Artificial Sequence
  Description of Artificial Sequence: Synthetic oligonucleotide
ccucggcccacugcacgca

SEQ ID NO: 2503124 - RNA, 19 nt, Artificial Sequence
  Description of Artificial Sequence: Synthetic oligonucleotide
ggcggacgcaugggcacgu

SEQ ID NO: 2503125 - RNA, 19 nt, Artificial Sequence
  Description of Artificial Sequence: Synthetic oligonucleotide
ccccuccacauagacgagu

SEQ ID NO: 2503126 - RNA, 19 nt, Artificial Sequence
  Description of Artificial Sequence: Synthetic oligonucleotide
ccgcgaccgcgcugcagga

SEQ ID NO: 2503127 - RNA, 19 nt, Artificial Sequence
  Description of Artificial Sequence: Synthetic oligonucleotide
gcggacgcaugggcacguc

SEQ ID NO: 2503128 - RNA, 19 nt, Artificial Sequence
  Description of Artificial Sequence: Synthetic oligonucleotide
ccugccugaagcgccucuu

SEQ ID NO: 2503129 - RNA, 19 nt, Artificial Sequence
  Description of Artificial Sequence: Synthetic oligonucleotide
ccgccaguuugauguccuu

SEQ ID NO: 2503130 - RNA, 19 nt, Artificial Sequence
  Description of Artificial Sequence: Synthetic oligonucleotide
cggcccacugcacgcacuu

SEQ ID NO: 2503131 - RNA, 19 nt, Artificial Sequence
  Description of Artificial Sequence: Synthetic oligonucleotide
cgcgccuagcaccgccagu

SEQ ID NO: 2503132 - RNA, 19 nt, Artificial Sequence
  Description of Artificial Sequence: Synthetic oligonucleotide
cgcgaccgcgcugcaggau

SEQ ID NO: 2503133 - RNA, 19 nt, Artificial Sequence
  Description of Artificial Sequence: Synthetic oligonucleotide
ucuguauguauuuagagag

SEQ ID NO: 2503134 - RNA, 19 nt, Artificial Sequence
  Description of Artificial Sequence: Synthetic oligonucleotide
aauuucucuacucauuccg

SEQ ID NO: 2503135 - RNA, 19 nt, Artificial Sequence
  Description of Artificial Sequence: Synthetic oligonucleotide
aagaauauucguaugaagg

SEQ ID NO: 2503136 - RNA, 19 nt, Artificial Sequence
  Description of Artificial Sequence: Synthetic oligonucleotide
ugaaguagaacuugaaggg

SEQ ID NO: 2503137 - RNA, 19 nt, Artificial Sequence
  Description of Artificial Sequence: Synthetic oligonucleotide
uuaagguaaacaaaauuag

SEQ ID NO: 2503138 - RNA, 19 nt, Artificial Sequence
  Description of Artificial Sequence: Synthetic oligonucleotide
agaauauucguaugaaggc

SEQ ID NO: 2503139 - RNA, 19 nt, Artificial Sequence
  Description of Artificial Sequence: Synthetic oligonucleotide
ugcuuuaucaaacugaagu

SEQ ID NO: 2503140 - RNA, 19 nt, Artificial Sequence
  Description of Artificial Sequence: Synthetic oligonucleotide
ucugaauucaacaucauuc

SEQ ID NO: 2503141 - RNA, 19 nt, Artificial Sequence
  Description of Artificial Sequence: Synthetic oligonucleotide
uaugccauggcuuaaaaug

SEQ ID NO: 2503142 - RNA, 19 nt, Artificial Sequence
  Description of Artificial Sequence: Synthetic oligonucleotide
aaaaguccaaacauuaucg

SEQ ID NO: 2503143 - RNA, 19 nt, Artificial Sequence
  Description of Artificial Sequence: Synthetic oligonucleotide
uucuguauaacugauaugc

SEQ ID NO: 2503144 - RNA, 19 nt, Artificial Sequence
  Description of Artificial Sequence: Synthetic oligonucleotide
agagaacagagucacaugc

SEQ ID NO: 2503145 - RNA, 19 nt, Artificial Sequence
  Description of Artificial Sequence: Synthetic oligonucleotide
aaagcgaugaaaauaacag

SEQ ID NO: 2503146 - RNA, 19 nt, Artificial Sequence
  Description of Artificial Sequence: Synthetic oligonucleotide
uacaauuuucacuuuaucc

SEQ ID NO: 2503147 - RNA, 19 nt, Artificial Sequence
  Description of Artificial Sequence: Synthetic oligonucleotide
aaaguccaaacauuaucgc

SEQ ID NO: 2503148 - RNA, 19 nt, Artificial Sequence
  Description of Artificial Sequence: Synthetic oligonucleotide
cugaaauugacucuguucc

SEQ ID NO: 2503149 - RNA, 19 nt, Artificial Sequence
  Description of Artificial Sequence: Synthetic oligonucleotide
aaguuacauuucuuuaugc

SEQ ID NO: 2503150 - RNA, 19 nt, Artificial Sequence
  Description of Artificial Sequence: Synthetic oligonucleotide
aguuuauugaagaauauuc

SEQ ID NO: 2503151 - RNA, 19 nt, Artificial Sequence
  Description of Artificial Sequence: Synthetic oligonucleotide
aaucuguauguauuuagag

SEQ ID NO: 2503152 - RNA, 19 nt, Artificial Sequence
  Description of Artificial Sequence: Synthetic oligonucleotide
uuaaaauggagcaauuacu

SEQ ID NO: 2503153 - RNA, 19 nt, Artificial Sequence
  Description of Artificial Sequence: Synthetic oligonucleotide
uguacuaaaggucauguaa

SEQ ID NO: 2503154 - RNA, 19 nt, Artificial Sequence
  Description of Artificial Sequence: Synthetic oligonucleotide
ugaauuuauugcuuuauca

SEQ ID NO: 2503155 - RNA, 19 nt, Artificial Sequence
  Description of Artificial Sequence: Synthetic oligonucleotide
aauucaacaucauucaaua

SEQ ID NO: 2503156 - RNA, 19 nt, Artificial Sequence
  Description of Artificial Sequence: Synthetic oligonucleotide
uuuauugaagaauauucgu

SEQ ID NO: 2503157 - RNA, 19 nt, Artificial Sequence
  Description of Artificial Sequence: Synthetic oligonucleotide
uaugcuguguacuaaaggu

SEQ ID NO: 2503158 - RNA, 19 nt, Artificial Sequence
  Description of Artificial Sequence: Synthetic oligonucleotide
aauuuauugcuuuaucaaa

SEQ ID NO: 2503159 - RNA, 19 nt, Artificial Sequence
  Description of Artificial Sequence: Synthetic oligonucleotide
aucaaacugaaguagaacu

SEQ ID NO: 2503160 - RNA, 19 nt, Artificial Sequence
  Description of Artificial Sequence: Synthetic oligonucleotide
acuuuaauaaguucuguca

SEQ ID NO: 2503161 - RNA, 19 nt, Artificial Sequence
  Description of Artificial Sequence: Synthetic oligonucleotide
aacauuaucgcagaaucug

SEQ ID NO: 2503162 - RNA, 19 nt, Artificial Sequence
  Description of Artificial Sequence: Synthetic oligonucleotide
uuaugcuguguacuaaagg

SEQ ID NO: 2503163 - RNA, 19 nt, Artificial Sequence
  Description of Artificial Sequence: Synthetic oligonucleotide
uuuaauaaguucugucacc

SEQ ID NO: 2503164 - RNA, 19 nt, Artificial Sequence
  Description of Artificial Sequence: Synthetic oligonucleotide
guuuauugaagaauauucg

SEQ ID NO: 2503165 - RNA, 19 nt, Artificial Sequence
  Description of Artificial Sequence: Synthetic oligonucleotide
uauguauuuagagagcccc

SEQ ID NO: 2503166 - RNA, 19 nt, Artificial Sequence
  Description of Artificial Sequence: Synthetic oligonucleotide
acaguguugucauuucugc

SEQ ID NO: 2503167 - RNA, 19 nt, Artificial Sequence
  Description of Artificial Sequence: Synthetic oligonucleotide
aaauggagcaauuacuuuu

SEQ ID NO: 2503168 - RNA, 19 nt, Artificial Sequence
  Description of Artificial Sequence: Synthetic oligonucleotide
auuuauugcuuuaucaaac

SEQ ID NO: 2503169 - RNA, 19 nt, Artificial Sequence
  Description of Artificial Sequence: Synthetic oligonucleotide
auuucuguauaacugauau

SEQ ID NO: 2503170 - RNA, 19 nt, Artificial Sequence
  Description of Artificial Sequence: Synthetic oligonucleotide
auuucuuuaugcuguguac

SEQ ID NO: 2503171 - RNA, 19 nt, Artificial Sequence
  Description of Artificial Sequence: Synthetic oligonucleotide
auuccguaguauuggagcc

SEQ ID NO: 2503172 - RNA, 19 nt, Artificial Sequence
  Description of Artificial Sequence: Synthetic oligonucleotide
uuuuaagguaaacaaaauu

SEQ ID NO: 2503173 - RNA, 19 nt, Artificial Sequence
  Description of Artificial Sequence: Synthetic oligonucleotide
uauugaagaauauucguau

SEQ ID NO: 2503174 - RNA, 19 nt, Artificial Sequence
  Description of Artificial Sequence: Synthetic oligonucleotide
uguauaacugauaugccau

SEQ ID NO: 2503175 - RNA, 19 nt, Artificial Sequence
  Description of Artificial Sequence: Synthetic oligonucleotide
aaaagccgaauuucucuac

SEQ ID NO: 2503176 - RNA, 19 nt, Artificial Sequence
  Description of Artificial Sequence: Synthetic oligonucleotide
uguauguauuuagagagcc

SEQ ID NO: 2503177 - RNA, 19 nt, Artificial Sequence
  Description of Artificial Sequence: Synthetic oligonucleotide
auaacugauaugccauggc

SEQ ID NO: 2503178 - RNA, 19 nt, Artificial Sequence
  Description of Artificial Sequence: Synthetic oligonucleotide
gaagaauauucguaugaag

SEQ ID NO: 2503179 - RNA, 19 nt, Artificial Sequence
  Description of Artificial Sequence: Synthetic oligonucleotide
uuuagagagccccugaaau

SEQ ID NO: 2503180 - RNA, 19 nt, Artificial Sequence
  Description of Artificial Sequence: Synthetic oligonucleotide
uuauugaagaauauucgua

SEQ ID NO: 2503181 - RNA, 19 nt, Artificial Sequence
  Description of Artificial Sequence: Synthetic oligonucleotide
agaaucuguauguauuuag

SEQ ID NO: 2503182 - RNA, 19 nt, Artificial Sequence
  Description of Artificial Sequence: Synthetic oligonucleotide
uacaguauagcacaguguu

SEQ ID NO: 2503183 - RNA, 19 nt, Artificial Sequence
  Description of Artificial Sequence: Synthetic oligonucleotide
aauuaguuuauugaagaau

SEQ ID NO: 2503184 - RNA, 19 nt, Artificial Sequence
  Description of Artificial Sequence: Synthetic oligonucleotide
uguaagagaacagagucac

SEQ ID NO: 2503185 - RNA, 19 nt, Artificial Sequence
  Description of Artificial Sequence: Synthetic oligonucleotide
uaagguaaacaaaauuagu

SEQ ID NO: 2503186 - RNA, 19 nt, Artificial Sequence
  Description of Artificial Sequence: Synthetic oligonucleotide
aaggcaaccacuuuugauu

SEQ ID NO: 2503187 - RNA, 19 nt, Artificial Sequence
  Description of Artificial Sequence: Synthetic oligonucleotide
cuuuaauaaguucugucac

SEQ ID NO: 2503188 - RNA, 19 nt, Artificial Sequence
  Description of Artificial Sequence: Synthetic oligonucleotide
uggguuacaguauagcaca

SEQ ID NO: 2503189 - RNA, 19 nt, Artificial Sequence
  Description of Artificial Sequence: Synthetic oligonucleotide
aaacccuuggguuacagua

SEQ ID NO: 2503190 - RNA, 19 nt, Artificial Sequence
  Description of Artificial Sequence: Synthetic oligonucleotide
aaggucauguaagagaaca

SEQ ID NO: 2503191 - RNA, 19 nt, Artificial Sequence
  Description of Artificial Sequence: Synthetic oligonucleotide
uacaaaaguccaaacauua

SEQ ID NO: 2503192 - RNA, 19 nt, Artificial Sequence
  Description of Artificial Sequence: Synthetic oligonucleotide
guuacaguauagcacagug

SEQ ID NO: 2503193 - RNA, 19 nt, Artificial Sequence
  Description of Artificial Sequence: Synthetic oligonucleotide
cauuccguaguauuggagc

SEQ ID NO: 2503194 - RNA, 19 nt, Artificial Sequence
  Description of Artificial Sequence: Synthetic oligonucleotide
gaauuuauugcuuuaucaa

SEQ ID NO: 2503195 - RNA, 19 nt, Artificial Sequence
  Description of Artificial Sequence: Synthetic oligonucleotide
uauaacugauaugccaugg

SEQ ID NO: 2503196 - RNA, 19 nt, Artificial Sequence
  Description of Artificial Sequence: Synthetic oligonucleotide
uguaugagcucaucaaggc

SEQ ID NO: 2503197 - RNA, 19 nt, Artificial Sequence
  Description of Artificial Sequence: Synthetic oligonucleotide
aaaagcgaugaaaauaaca

SEQ ID NO: 2503198 - RNA, 19 nt, Artificial Sequence
  Description of Artificial Sequence: Synthetic oligonucleotide
aaauuaguuuauugaagaa

SEQ ID NO: 2503199 - RNA, 19 nt, Artificial Sequence
  Description of Artificial Sequence: Synthetic oligonucleotide
aaguccaaacauuaucgca

SEQ ID NO: 2503200 - RNA, 19 nt, Artificial Sequence
  Description of Artificial Sequence: Synthetic oligonucleotide
uuauugcuuuaucaaacug

SEQ ID NO: 2503201 - RNA, 19 nt, Artificial Sequence
  Description of Artificial Sequence: Synthetic oligonucleotide
ugcuguguacuaaagguca

SEQ ID NO: 2503202 - RNA, 19 nt, Artificial Sequence
  Description of Artificial Sequence: Synthetic oligonucleotide
acaucauucaauacaaaag

SEQ ID NO: 2503203 - RNA, 19 nt, Artificial Sequence
  Description of Artificial Sequence: Synthetic oligonucleotide
uuuaugcuguguacuaaag

SEQ ID NO: 2503204 - RNA, 19 nt, Artificial Sequence
  Description of Artificial Sequence: Synthetic oligonucleotide
cuuuaucaaacugaaguag

SEQ ID NO: 2503205 - RNA, 19 nt, Artificial Sequence
  Description of Artificial Sequence: Synthetic oligonucleotide
cuguaugagcucaucaagg

SEQ ID NO: 2503206 - RNA, 19 nt, Artificial Sequence
  Description of Artificial Sequence: Synthetic oligonucleotide
uuggguuacaguauagcac

SEQ ID NO: 2503207 - RNA, 19 nt, Artificial Sequence
  Description of Artificial Sequence: Synthetic oligonucleotide
uuaauaaguucugucaccu

SEQ ID NO: 2503208 - RNA, 19 nt, Artificial Sequence
  Description of Artificial Sequence: Synthetic oligonucleotide
aauugacucuguuccugac

SEQ ID NO: 2503209 - RNA, 19 nt, Artificial Sequence
  Description of Artificial Sequence: Synthetic oligonucleotide
aguuacauuucuuuaugcu

SEQ ID NO: 2503210 - RNA, 19 nt, Artificial Sequence
  Description of Artificial Sequence: Synthetic oligonucleotide
uuaucgcagaaucuguaug

SEQ ID NO: 2503211 - RNA, 19 nt, Artificial Sequence
  Description of Artificial Sequence: Synthetic oligonucleotide
guuccugacucucugagcc

SEQ ID NO: 2503212 - RNA, 19 nt, Artificial Sequence
  Description of Artificial Sequence: Synthetic oligonucleotide
uguugggacuguaugagcu

SEQ ID NO: 2503213 - RNA, 19 nt, Artificial Sequence
  Description of Artificial Sequence: Synthetic oligonucleotide
uaacugauaugccauggcu

SEQ ID NO: 2503214 - RNA, 19 nt, Artificial Sequence
  Description of Artificial Sequence: Synthetic oligonucleotide
aucuguauguauuuagaga

SEQ ID NO: 2503215 - RNA, 19 nt, Artificial Sequence
  Description of Artificial Sequence: Synthetic oligonucleotide
ucagccacggaaaccacag

SEQ ID NO: 2503216 - RNA, 19 nt, Artificial Sequence
  Description of Artificial Sequence: Synthetic oligonucleotide
uaugaaggcaaccacuuuu

SEQ ID NO: 2503217 - RNA, 19 nt, Artificial Sequence
  Description of Artificial Sequence: Synthetic oligonucleotide
aagcgaugaaaauaacaga

SEQ ID NO: 2503218 - RNA, 19 nt, Artificial Sequence
  Description of Artificial Sequence: Synthetic oligonucleotide
agccacggaaaccacagcg

SEQ ID NO: 2503219 - RNA, 19 nt, Artificial Sequence
  Description of Artificial Sequence: Synthetic oligonucleotide
ucuguauaacugauaugcc

SEQ ID NO: 2503220 - RNA, 19 nt, Artificial Sequence
  Description of Artificial Sequence: Synthetic oligonucleotide
aauaacagaagguggcaua

SEQ ID NO: 2503221 - RNA, 19 nt, Artificial Sequence
  Description of Artificial Sequence: Synthetic oligonucleotide
cuaaaggucauguaagaga

SEQ ID NO: 2503222 - RNA, 19 nt, Artificial Sequence
  Description of Artificial Sequence: Synthetic oligonucleotide
uacucauuccguaguauug

SEQ ID NO: 2503223 - RNA, 19 nt, Artificial Sequence
  Description of Artificial Sequence: Synthetic oligonucleotide
auugaagaauauucguaug

SEQ ID NO: 2503224 - RNA, 19 nt, Artificial Sequence
  Description of Artificial Sequence: Synthetic oligonucleotide
agguaaacaaaauuaguuu

SEQ ID NO: 2503225 - RNA, 19 nt, Artificial Sequence
  Description of Artificial Sequence: Synthetic oligonucleotide
aaauugacucuguuccuga

SEQ ID NO: 2503226 - RNA, 19 nt, Artificial Sequence
  Description of Artificial Sequence: Synthetic oligonucleotide
uaagagaacagagucacau

SEQ ID NO: 2503227 - RNA, 19 nt, Artificial Sequence
  Description of Artificial Sequence: Synthetic oligonucleotide
auucaacaucauucaauac

SEQ ID NO: 2503228 - RNA, 19 nt, Artificial Sequence
  Description of Artificial Sequence: Synthetic oligonucleotide
ugaagacuguuucccaaag

SEQ ID NO: 2503229 - RNA, 19 nt, Artificial Sequence
  Description of Artificial Sequence: Synthetic oligonucleotide
uucaggcuugcauugaugu

SEQ ID NO: 2503230 - RNA, 19 nt, Artificial Sequence
  Description of Artificial Sequence: Synthetic oligonucleotide
uuuucuucaggcuugcauu

SEQ ID NO: 2503231 - RNA, 19 nt, Artificial Sequence
  Description of Artificial Sequence: Synthetic oligonucleotide
aaagucguauuucuguaua

SEQ ID NO: 2503232 - RNA, 19 nt, Artificial Sequence
  Description of Artificial Sequence: Synthetic oligonucleotide
uaucgcagaaucuguaugu

SEQ ID NO: 2503233 - RNA, 19 nt, Artificial Sequence
  Description of Artificial Sequence: Synthetic oligonucleotide
aagccgaauuucucuacuc

SEQ ID NO: 2503234 - RNA, 19 nt, Artificial Sequence
  Description of Artificial Sequence: Synthetic oligonucleotide
  modified_base (19)..(19): a, c, u, g, unknown or other
aaccacuuuugauuugucn

SEQ ID NO: 2503235 - RNA, 19 nt, Artificial Sequence
  Description of Artificial Sequence: Synthetic oligonucleotide
aucaaggcuuucuugaaga

SEQ ID NO: 2503236 - RNA, 19 nt, Artificial Sequence
  Description of Artificial Sequence: Synthetic oligonucleotide
aagagaacagagucacaug

SEQ ID NO: 2503237 - RNA, 19 nt, Artificial Sequence
  Description of Artificial Sequence: Synthetic oligonucleotide
cuugcauugauguccugag

SEQ ID NO: 2503238 - RNA, 19 nt, Artificial Sequence
  Description of Artificial Sequence: Synthetic oligonucleotide
uugacucuguuccugacuc

SEQ ID NO: 2503239 - RNA, 19 nt, Artificial Sequence
  Description of Artificial Sequence: Synthetic oligonucleotide
uauagcacaguguugucau

SEQ ID NO: 2503240 - RNA, 19 nt, Artificial Sequence
  Description of Artificial Sequence: Synthetic oligonucleotide
  modified_base (18)..(18): a, c, u, g, unknown or other
accacuuuugauuugucnu

SEQ ID NO: 2503241 - RNA, 19 nt, Artificial Sequence
  Description of Artificial Sequence: Synthetic oligonucleotide
uucucuacucauuccguag

SEQ ID NO: 2503242 - RNA, 19 nt, Artificial Sequence
  Description of Artificial Sequence: Synthetic oligonucleotide
uaguauuggagccaguauu

SEQ ID NO: 2503243 - RNA, 19 nt, Artificial Sequence
  Description of Artificial Sequence: Synthetic oligonucleotide
ucuguugggacuguaugag

SEQ ID NO: 2503244 - RNA, 19 nt, Artificial Sequence
  Description of Artificial Sequence: Synthetic oligonucleotide
aaaauggagcaauuacuuu

SEQ ID NO: 2503245 - RNA, 19 nt, Artificial Sequence
  Description of Artificial Sequence: Synthetic oligonucleotide
aaagccgaauuucucuacu

SEQ ID NO: 2503246 - RNA, 19 nt, Artificial Sequence
  Description of Artificial Sequence: Synthetic oligonucleotide
cauggcuuaaaauggagca

SEQ ID NO: 2503247 - RNA, 19 nt, Artificial Sequence
  Description of Artificial Sequence: Synthetic oligonucleotide
guacuaaaggucauguaag

SEQ ID NO: 2503248 - RNA, 19 nt, Artificial Sequence
  Description of Artificial Sequence: Synthetic oligonucleotide
ugcaccgugagaauaaauu

SEQ ID NO: 2503249 - RNA, 19 nt, Artificial Sequence
  Description of Artificial Sequence: Synthetic oligonucleotide
uucacuuuauccacuuuaa

SEQ ID NO: 2503250 - RNA, 19 nt, Artificial Sequence
  Description of Artificial Sequence: Synthetic oligonucleotide
gaauuucucuacucauucc

SEQ ID NO: 2503251 - RNA, 19 nt, Artificial Sequence
  Description of Artificial Sequence: Synthetic oligonucleotide
uuaguuuauugaagaauau

SEQ ID NO: 2503252 - RNA, 19 nt, Artificial Sequence
  Description of Artificial Sequence: Synthetic oligonucleotide
ucaaacugaaguagaacuu

SEQ ID NO: 2503253 - RNA, 19 nt, Artificial Sequence
  Description of Artificial Sequence: Synthetic oligonucleotide
uacuaaaggucauguaaga

SEQ ID NO: 2503254 - RNA, 19 nt, Artificial Sequence
  Description of Artificial Sequence: Synthetic oligonucleotide
aauauucguaugaaggcaa

SEQ ID NO: 2503255 - RNA, 19 nt, Artificial Sequence
  Description of Artificial Sequence: Synthetic oligonucleotide
uagagagccccugaaauug

SEQ ID NO: 2503256 - RNA, 19 nt, Artificial Sequence
  Description of Artificial Sequence: Synthetic oligonucleotide
uguguacuaaaggucaugu

SEQ ID NO: 2503257 - RNA, 19 nt, Artificial Sequence
  Description of Artificial Sequence: Synthetic oligonucleotide
uuucuuuaugcuguguacu

SEQ ID NO: 2503258 - RNA, 19 nt, Artificial Sequence
  Description of Artificial Sequence: Synthetic oligonucleotide
ucguaugaaggcaaccacu

SEQ ID NO: 2503259 - RNA, 19 nt, Artificial Sequence
  Description of Artificial Sequence: Synthetic oligonucleotide
uuacaguauagcacagugu

SEQ ID NO: 2503260 - RNA, 19 nt, Artificial Sequence
  Description of Artificial Sequence: Synthetic oligonucleotide
aaguagaacuugaagggca

SEQ ID NO: 2503261 - RNA, 19 nt, Artificial Sequence
  Description of Artificial Sequence: Synthetic oligonucleotide
ucauuccguaguauuggag

SEQ ID NO: 2503262 - RNA, 19 nt, Artificial Sequence
  Description of Artificial Sequence: Synthetic oligonucleotide
agcgaugaaaauaacagaa

SEQ ID NO: 2503263 - RNA, 19 nt, Artificial Sequence
  Description of Artificial Sequence: Synthetic oligonucleotide
gaaguagaacuugaagggc

SEQ ID NO: 2503264 - RNA, 19 nt, Artificial Sequence
  Description of Artificial Sequence: Synthetic oligonucleotide
gaauauucguaugaaggca

SEQ ID NO: 2503265 - RNA, 19 nt, Artificial Sequence
  Description of Artificial Sequence: Synthetic oligonucleotide
gaaauugacucuguuccug

SEQ ID NO: 2503266 - RNA, 19 nt, Artificial Sequence
  Description of Artificial Sequence: Synthetic oligonucleotide
ugaauucaacaucauucaa

SEQ ID NO: 2503267 - RNA, 19 nt, Artificial Sequence
  Description of Artificial Sequence: Synthetic oligonucleotide
acuaaaggucauguaagag

SEQ ID NO: 2503268 - RNA, 19 nt, Artificial Sequence
  Description of Artificial Sequence: Synthetic oligonucleotide
agucguauuucuguauaac

SEQ ID NO: 2503269 - RNA, 19 nt, Artificial Sequence
  Description of Artificial Sequence: Synthetic oligonucleotide
ucugugaaacccuuggguu

SEQ ID NO: 2503270 - RNA, 19 nt, Artificial Sequence
  Description of Artificial Sequence: Synthetic oligonucleotide
uucguaugaaggcaaccac

SEQ ID NO: 2503271 - RNA, 19 nt, Artificial Sequence
  Description of Artificial Sequence: Synthetic oligonucleotide
uguugucauuucugcaccg

SEQ ID NO: 2503272 - RNA, 19 nt, Artificial Sequence
  Description of Artificial Sequence: Synthetic oligonucleotide
cucucugaauucaacauca

SEQ ID NO: 2503273 - RNA, 19 nt, Artificial Sequence
  Description of Artificial Sequence: Synthetic oligonucleotide
cugaauucaacaucauuca

SEQ ID NO: 2503274 - RNA, 19 nt, Artificial Sequence
  Description of Artificial Sequence: Synthetic oligonucleotide
uguauuuagagagccccug

SEQ ID NO: 2503275 - RNA, 19 nt, Artificial Sequence
  Description of Artificial Sequence: Synthetic oligonucleotide
acucauuccguaguauugg

SEQ ID NO: 2503276 - RNA, 19 nt, Artificial Sequence
  Description of Artificial Sequence: Synthetic oligonucleotide
uauuuagagagccccugaa

SEQ ID NO: 2503277 - RNA, 19 nt, Artificial Sequence
  Description of Artificial Sequence: Synthetic oligonucleotide
caggcuugcauugaugucc

SEQ ID NO: 2503278 - RNA, 19 nt, Artificial Sequence
  Description of Artificial Sequence: Synthetic oligonucleotide
uuucuguauaacugauaug

SEQ ID NO: 2503279 - RNA, 19 nt, Artificial Sequence
  Description of Artificial Sequence: Synthetic oligonucleotide
auccacuuuaauaaguucu

SEQ ID NO: 2503280 - RNA, 19 nt, Artificial Sequence
  Description of Artificial Sequence: Synthetic oligonucleotide
cuguauaacugauaugcca

SEQ ID NO: 2503281 - RNA, 19 nt, Artificial Sequence
  Description of Artificial Sequence: Synthetic oligonucleotide
cgaugaaaauaacagaagg

SEQ ID NO: 2503282 - RNA, 19 nt, Artificial Sequence
  Description of Artificial Sequence: Synthetic oligonucleotide
cuuggguuacaguauagca

SEQ ID NO: 2503283 - RNA, 19 nt, Artificial Sequence
  Description of Artificial Sequence: Synthetic oligonucleotide
agucacaugcuucucucug

SEQ ID NO: 2503284 - RNA, 19 nt, Artificial Sequence
  Description of Artificial Sequence: Synthetic oligonucleotide
agacuguuucccaaagucg

SEQ ID NO: 2503285 - RNA, 19 nt, Artificial Sequence
  Description of Artificial Sequence: Synthetic oligonucleotide
cuguauguauuuagagagc

SEQ ID NO: 2503286 - RNA, 19 nt, Artificial Sequence
  Description of Artificial Sequence: Synthetic oligonucleotide
cucaucaaggcuuucuuga

SEQ ID NO: 2503287 - RNA, 19 nt, Artificial Sequence
  Description of Artificial Sequence: Synthetic oligonucleotide
uugcauugauguccugagg

SEQ ID NO: 2503288 - RNA, 19 nt, Artificial Sequence
  Description of Artificial Sequence: Synthetic oligonucleotide
gguaaacaaaauuaguuua

SEQ ID NO: 2503289 - RNA, 19 nt, Artificial Sequence
  Description of Artificial Sequence: Synthetic oligonucleotide
augccauggcuuaaaaugg

SEQ ID NO: 2503290 - RNA, 19 nt, Artificial Sequence
  Description of Artificial Sequence: Synthetic oligonucleotide
ugaaauugacucuguuccu

SEQ ID NO: 2503291 - RNA, 19 nt, Artificial Sequence
  Description of Artificial Sequence: Synthetic oligonucleotide
uugucauuucugcaccgug

SEQ ID NO: 2503292 - RNA, 19 nt, Artificial Sequence
  Description of Artificial Sequence: Synthetic oligonucleotide
ucucuacucauuccguagu

SEQ ID NO: 2503293 - RNA, 19 nt, Artificial Sequence
  Description of Artificial Sequence: Synthetic oligonucleotide
acugauaugccauggcuua

SEQ ID NO: 2503294 - RNA, 19 nt, Artificial Sequence
  Description of Artificial Sequence: Synthetic oligonucleotide
gucauuucugcaccgugag

SEQ ID NO: 2503295 - RNA, 19 nt, Artificial Sequence
  Description of Artificial Sequence: Synthetic oligonucleotide
ucugagccaaugcugaauu

SEQ ID NO: 2503296 - RNA, 19 nt, Artificial Sequence
  Description of Artificial Sequence: Synthetic oligonucleotide
aaacauuaucgcagaaucu

SEQ ID NO: 2503297 - RNA, 19 nt, Artificial Sequence
  Description of Artificial Sequence: Synthetic oligonucleotide
auuaucgcagaaucuguau

SEQ ID NO: 2503298 - RNA, 19 nt, Artificial Sequence
  Description of Artificial Sequence: Synthetic oligonucleotide
auucguaugaaggcaacca

SEQ ID NO: 2503299 - RNA, 19 nt, Artificial Sequence
  Description of Artificial Sequence: Synthetic oligonucleotide
aauuuucacuuuauccacu

SEQ ID NO: 2503300 - RNA, 19 nt, Artificial Sequence
  Description of Artificial Sequence: Synthetic oligonucleotide
ugagggaaggcgcuuccgc

SEQ ID NO: 2503301 - RNA, 19 nt, Artificial Sequence
  Description of Artificial Sequence: Synthetic oligonucleotide
cacaguguugucauuucug

SEQ ID NO: 2503302 - RNA, 19 nt, Artificial Sequence
  Description of Artificial Sequence: Synthetic oligonucleotide
aagucguauuucuguauaa

SEQ ID NO: 2503303 - RNA, 19 nt, Artificial Sequence
  Description of Artificial Sequence: Synthetic oligonucleotide
aaacugaaguagaacuuga

SEQ ID NO: 2503304 - RNA, 19 nt, Artificial Sequence
  Description of Artificial Sequence: Synthetic oligonucleotide
gaaucuguauguauuuaga

SEQ ID NO: 2503305 - RNA, 19 nt, Artificial Sequence
  Description of Artificial Sequence: Synthetic oligonucleotide
uauucguaugaaggcaacc

SEQ ID NO: 2503306 - RNA, 19 nt, Artificial Sequence
  Description of Artificial Sequence: Synthetic oligonucleotide
gacuguaugagcucaucaa

SEQ ID NO: 2503307 - RNA, 19 nt, Artificial Sequence
  Description of Artificial Sequence: Synthetic oligonucleotide
guauaacugauaugccaug

SEQ ID NO: 2503308 - RNA, 19 nt, Artificial Sequence
  Description of Artificial Sequence: Synthetic oligonucleotide
aaugcugaauuuauugcuu

SEQ ID NO: 2503309 - RNA, 19 nt, Artificial Sequence
  Description of Artificial Sequence: Synthetic oligonucleotide
uucuuuaugcuguguacua

SEQ ID NO: 2503310 - RNA, 19 nt, Artificial Sequence
  Description of Artificial Sequence: Synthetic oligonucleotide
uacauuucuuuaugcugug

SEQ ID NO: 2503311 - RNA, 19 nt, Artificial Sequence
  Description of Artificial Sequence: Synthetic oligonucleotide
ugacucucugagccaaugc

SEQ ID NO: 2503312 - RNA, 19 nt, Artificial Sequence
  Description of Artificial Sequence: Synthetic oligonucleotide
acaugcuucucucugugaa

SEQ ID NO: 2503313 - RNA, 19 nt, Artificial Sequence
  Description of Artificial Sequence: Synthetic oligonucleotide
agaacagagucacaugcuu

SEQ ID NO: 2503314 - RNA, 19 nt, Artificial Sequence
  Description of Artificial Sequence: Synthetic oligonucleotide
auuuagagagccccugaaa

SEQ ID NO: 2503315 - RNA, 19 nt, Artificial Sequence
  Description of Artificial Sequence: Synthetic oligonucleotide
auguccugagggaaggcgc

SEQ ID NO: 2503316 - RNA, 19 nt, Artificial Sequence
  Description of Artificial Sequence: Synthetic oligonucleotide
uaaguucugucaccucucu

SEQ ID NO: 2503317 - RNA, 19 nt, Artificial Sequence
  Description of Artificial Sequence: Synthetic oligonucleotide
ugugaaacccuuggguuac

SEQ ID NO: 2503318 - RNA, 19 nt, Artificial Sequence
  Description of Artificial Sequence: Synthetic oligonucleotide
ccaaugcugaauuuauugc

SEQ ID NO: 2503319 - RNA, 19 nt, Artificial Sequence
  Description of Artificial Sequence: Synthetic oligonucleotide
uuagagagccccugaaauu

SEQ ID NO: 2503320 - RNA, 19 nt, Artificial Sequence
  Description of Artificial Sequence: Synthetic oligonucleotide
uucugcaccgugagaauaa

SEQ ID NO: 2503321 - RNA, 19 nt, Artificial Sequence
  Description of Artificial Sequence: Synthetic oligonucleotide
uguuccugacucucugagc

SEQ ID NO: 2503322 - RNA, 19 nt, Artificial Sequence
  Description of Artificial Sequence: Synthetic oligonucleotide
ugaaggcaaccacuuuuga

SEQ ID NO: 2503323 - RNA, 19 nt, Artificial Sequence
  Description of Artificial Sequence: Synthetic oligonucleotide
ugccauggcuuaaaaugga

SEQ ID NO: 2503324 - RNA, 19 nt, Artificial Sequence
  Description of Artificial Sequence: Synthetic oligonucleotide
augcuguguacuaaagguc

SEQ ID NO: 2503325 - RNA, 19 nt, Artificial Sequence
  Description of Artificial Sequence: Synthetic oligonucleotide
auauucguaugaaggcaac

SEQ ID NO: 2503326 - RNA, 19 nt, Artificial Sequence
  Description of Artificial Sequence: Synthetic oligonucleotide
uccguaguauuggagccag

SEQ ID NO: 2503327 - RNA, 19 nt, Artificial Sequence
  Description of Artificial Sequence: Synthetic oligonucleotide
agccgaauuucucuacuca

SEQ ID NO: 2503328 - RNA, 19 nt, Artificial Sequence
  Description of Artificial Sequence: Synthetic oligonucleotide
uggcuuaaaauggagcaau

SEQ ID NO: 2503329 - RNA, 19 nt, Artificial Sequence
  Description of Artificial Sequence: Synthetic oligonucleotide
ucacuuuauccacuuuaau

SEQ ID NO: 2503330 - RNA, 19 nt, Artificial Sequence
  Description of Artificial Sequence: Synthetic oligonucleotide
cauuucugcaccgugagaa

SEQ ID NO: 2503331 - RNA, 19 nt, Artificial Sequence
  Description of Artificial Sequence: Synthetic oligonucleotide
cuguuccugacucucugag

SEQ ID NO: 2503332 - RNA, 19 nt, Artificial Sequence
  Description of Artificial Sequence: Synthetic oligonucleotide
aacugauaugccauggcuu

SEQ ID NO: 2503333 - RNA, 19 nt, Artificial Sequence
  Description of Artificial Sequence: Synthetic oligonucleotide
ugaucuguugggacuguau

SEQ ID NO: 2503334 - RNA, 19 nt, Artificial Sequence
  Description of Artificial Sequence: Synthetic oligonucleotide
uuucucuacucauuccgua

SEQ ID NO: 2503335 - RNA, 19 nt, Artificial Sequence
  Description of Artificial Sequence: Synthetic oligonucleotide
gagggaaggcgcuuccgcc

SEQ ID NO: 2503336 - RNA, 19 nt, Artificial Sequence
  Description of Artificial Sequence: Synthetic oligonucleotide
auaacagaagguggcauaa

SEQ ID NO: 2503337 - RNA, 19 nt, Artificial Sequence
  Description of Artificial Sequence: Synthetic oligonucleotide
auaugccauggcuuaaaau

SEQ ID NO: 2503338 - RNA, 19 nt, Artificial Sequence
  Description of Artificial Sequence: Synthetic oligonucleotide
uuuuaccaucacaggcuac

SEQ ID NO: 2503339 - RNA, 19 nt, Artificial Sequence
  Description of Artificial Sequence: Synthetic oligonucleotide
cuuuaugcuguguacuaaa

SEQ ID NO: 2503340 - RNA, 19 nt, Artificial Sequence
  Description of Artificial Sequence: Synthetic oligonucleotide
ucuuuaugcuguguacuaa

SEQ ID NO: 2503341 - RNA, 19 nt, Artificial Sequence
  Description of Artificial Sequence: Synthetic oligonucleotide
augaaggcaaccacuuuug

SEQ ID NO: 2503342 - RNA, 19 nt, Artificial Sequence
  Description of Artificial Sequence: Synthetic oligonucleotide
uugggacuguaugagcuca

SEQ ID NO: 2503343 - RNA, 19 nt, Artificial Sequence
  Description of Artificial Sequence: Synthetic oligonucleotide
uaauaaguucugucaccuc

SEQ ID NO: 2503344 - RNA, 19 nt, Artificial Sequence
  Description of Artificial Sequence: Synthetic oligonucleotide
guauguauuuagagagccc

SEQ ID NO: 2503345 - RNA, 19 nt, Artificial Sequence
  Description of Artificial Sequence: Synthetic oligonucleotide
acuugaagggcaagcuggg

SEQ ID NO: 2503346 - RNA, 19 nt, Artificial Sequence
  Description of Artificial Sequence: Synthetic oligonucleotide
aaggcgcuuccgccgcggc

SEQ ID NO: 2503347 - RNA, 19 nt, Artificial Sequence
  Description of Artificial Sequence: Synthetic oligonucleotide
guauuuagagagccccuga

SEQ ID NO: 2503348 - RNA, 19 nt, Artificial Sequence
  Description of Artificial Sequence: Synthetic oligonucleotide
aguauuggagccaguauuu

SEQ ID NO: 2503349 - RNA, 19 nt, Artificial Sequence
  Description of Artificial Sequence: Synthetic oligonucleotide
ccugaaauugacucuguuc

SEQ ID NO: 2503350 - RNA, 19 nt, Artificial Sequence
  Description of Artificial Sequence: Synthetic oligonucleotide
auacaaaaguccaaacauu

SEQ ID NO: 2503351 - RNA, 19 nt, Artificial Sequence
  Description of Artificial Sequence: Synthetic oligonucleotide
ugucaccucucugaauuca

SEQ ID NO: 2503352 - RNA, 19 nt, Artificial Sequence
  Description of Artificial Sequence: Synthetic oligonucleotide
cuguugggacuguaugagc

SEQ ID NO: 2503353 - RNA, 19 nt, Artificial Sequence
  Description of Artificial Sequence: Synthetic oligonucleotide
ugaaacccuuggguuacag

SEQ ID NO: 2503354 - RNA, 19 nt, Artificial Sequence
  Description of Artificial Sequence: Synthetic oligonucleotide
cuucaggcuugcauugaug

SEQ ID NO: 2503355 - RNA, 19 nt, Artificial Sequence
  Description of Artificial Sequence: Synthetic oligonucleotide
cuugaagacuguuucccaa

SEQ ID NO: 2503356 - RNA, 19 nt, Artificial Sequence
  Description of Artificial Sequence: Synthetic oligonucleotide
uccaaacauuaucgcagaa

SEQ ID NO: 2503357 - RNA, 19 nt, Artificial Sequence
  Description of Artificial Sequence: Synthetic oligonucleotide
caccgugagaauaaauuaa

SEQ ID NO: 2503358 - RNA, 19 nt, Artificial Sequence
  Description of Artificial Sequence: Synthetic oligonucleotide
gauaugccauggcuuaaaa

SEQ ID NO: 2503359 - RNA, 19 nt, Artificial Sequence
  Description of Artificial Sequence: Synthetic oligonucleotide
ugcugaauuuauugcuuua

SEQ ID NO: 2503360 - RNA, 19 nt, Artificial Sequence
  Description of Artificial Sequence: Synthetic oligonucleotide
acauuaucgcagaaucugu

SEQ ID NO: 2503361 - RNA, 19 nt, Artificial Sequence
  Description of Artificial Sequence: Synthetic oligonucleotide
aacugaaguagaacuugaa

SEQ ID NO: 2503362 - RNA, 19 nt, Artificial Sequence
  Description of Artificial Sequence: Synthetic oligonucleotide
ugauaugccauggcuuaaa

SEQ ID NO: 2503363 - RNA, 19 nt, Artificial Sequence
  Description of Artificial Sequence: Synthetic oligonucleotide
ucuacucauuccguaguau

SEQ ID NO: 2503364 - RNA, 19 nt, Artificial Sequence
  Description of Artificial Sequence: Synthetic oligonucleotide
gacuguuucccaaagucgu

SEQ ID NO: 2503365 - RNA, 19 nt, Artificial Sequence
  Description of Artificial Sequence: Synthetic oligonucleotide
guauagcacaguguuguca

SEQ ID NO: 2503366 - RNA, 19 nt, Artificial Sequence
  Description of Artificial Sequence: Synthetic oligonucleotide
  modified_base (15)..(15): a, c, u, g, unknown or other
acuuuugauuugucnuuaa

SEQ ID NO: 2503367 - RNA, 19 nt, Artificial Sequence
  Description of Artificial Sequence: Synthetic oligonucleotide
ucgcagaaucuguauguau

SEQ ID NO: 2503368 - RNA, 19 nt, Artificial Sequence
  Description of Artificial Sequence: Synthetic oligonucleotide
uccgccgcggcgcuagcag

SEQ ID NO: 2503369 - RNA, 19 nt, Artificial Sequence
  Description of Artificial Sequence: Synthetic oligonucleotide
gcuuuaucaaacugaagua

SEQ ID NO: 2503370 - RNA, 19 nt, Artificial Sequence
  Description of Artificial Sequence: Synthetic oligonucleotide
auuucucuacucauuccgu

SEQ ID NO: 2503371 - RNA, 19 nt, Artificial Sequence
  Description of Artificial Sequence: Synthetic oligonucleotide
ucaggcuugcauugauguc

SEQ ID NO: 2503372 - RNA, 19 nt, Artificial Sequence
  Description of Artificial Sequence: Synthetic oligonucleotide
ucucugaauucaacaucau

SEQ ID NO: 2503373 - RNA, 19 nt, Artificial Sequence
  Description of Artificial Sequence: Synthetic oligonucleotide
caccucucugaauucaaca

SEQ ID NO: 2503374 - RNA, 19 nt, Artificial Sequence
  Description of Artificial Sequence: Synthetic oligonucleotide
accgugagaauaaauuaaa

SEQ ID NO: 2503375 - RNA, 19 nt, Artificial Sequence
  Description of Artificial Sequence: Synthetic oligonucleotide
auucaauacaaaaguccaa

SEQ ID NO: 2503376 - RNA, 19 nt, Artificial Sequence
  Description of Artificial Sequence: Synthetic oligonucleotide
uuucugcaccgugagaaua

SEQ ID NO: 2503377 - RNA, 19 nt, Artificial Sequence
  Description of Artificial Sequence: Synthetic oligonucleotide
auuucugcaccgugagaau

SEQ ID NO: 2503378 - RNA, 19 nt, Artificial Sequence
  Description of Artificial Sequence: Synthetic oligonucleotide
guccaaacauuaucgcaga

SEQ ID NO: 2503379 - RNA, 19 nt, Artificial Sequence
  Description of Artificial Sequence: Synthetic oligonucleotide
acaaaaguccaaacauuau

SEQ ID NO: 2503380 - RNA, 19 nt, Artificial Sequence
  Description of Artificial Sequence: Synthetic oligonucleotide
gcgaugaaaauaacagaag

SEQ ID NO: 2503381 - RNA, 19 nt, Artificial Sequence
  Description of Artificial Sequence: Synthetic oligonucleotide
acaguauagcacaguguug

SEQ ID NO: 2503382 - RNA, 19 nt, Artificial Sequence
  Description of Artificial Sequence: Synthetic oligonucleotide
gacucuguuccugacucuc

SEQ ID NO: 2503383 - RNA, 19 nt, Artificial Sequence
  Description of Artificial Sequence: Synthetic oligonucleotide
gaaggcaaccacuuuugau

SEQ ID NO: 2503384 - RNA, 19 nt, Artificial Sequence
  Description of Artificial Sequence: Synthetic oligonucleotide
uuccguaguauuggagcca

SEQ ID NO: 2503385 - RNA, 19 nt, Artificial Sequence
  Description of Artificial Sequence: Synthetic oligonucleotide
ggucauguaagagaacaga

SEQ ID NO: 2503386 - RNA, 19 nt, Artificial Sequence
  Description of Artificial Sequence: Synthetic oligonucleotide
guugggacuguaugagcuc

SEQ ID NO: 2503387 - RNA, 19 nt, Artificial Sequence
  Description of Artificial Sequence: Synthetic oligonucleotide
uguuucccaaagucguauu

SEQ ID NO: 2503388 - RNA, 19 nt, Artificial Sequence
  Description of Artificial Sequence: Synthetic oligonucleotide
caguauagcacaguguugu

SEQ ID NO: 2503389 - RNA, 19 nt, Artificial Sequence
  Description of Artificial Sequence: Synthetic oligonucleotide
cauuaucgcagaaucugua

SEQ ID NO: 2503390 - RNA, 19 nt, Artificial Sequence
  Description of Artificial Sequence: Synthetic oligonucleotide
acagagucacaugcuucuc

SEQ ID NO: 2503391 - RNA, 19 nt, Artificial Sequence
  Description of Artificial Sequence: Synthetic oligonucleotide
aacccuuggguuacaguau

SEQ ID NO: 2503392 - RNA, 19 nt, Artificial Sequence
  Description of Artificial Sequence: Synthetic oligonucleotide
uuccugacucucugagcca

SEQ ID NO: 2503393 - RNA, 19 nt, Artificial Sequence
  Description of Artificial Sequence: Synthetic oligonucleotide
cgaauuucucuacucauuc

SEQ ID NO: 2503394 - RNA, 19 nt, Artificial Sequence
  Description of Artificial Sequence: Synthetic oligonucleotide
gaagacuguuucccaaagu

SEQ ID NO: 2503395 - RNA, 19 nt, Artificial Sequence
  Description of Artificial Sequence: Synthetic oligonucleotide
cuguguacuaaaggucaug

SEQ ID NO: 2503396 - RNA, 19 nt, Artificial Sequence
  Description of Artificial Sequence: Synthetic oligonucleotide
guaugagcucaucaaggcu

SEQ ID NO: 2503397 - RNA, 19 nt, Artificial Sequence
  Description of Artificial Sequence: Synthetic oligonucleotide
cucugugaaacccuugggu

SEQ ID NO: 2503398 - RNA, 19 nt, Artificial Sequence
  Description of Artificial Sequence: Synthetic oligonucleotide
cucauuccguaguauugga

SEQ ID NO: 2503399 - RNA, 19 nt, Artificial Sequence
  Description of Artificial Sequence: Synthetic oligonucleotide
auguauuuagagagccccu

SEQ ID NO: 2503400 - RNA, 19 nt, Artificial Sequence
  Description of Artificial Sequence: Synthetic oligonucleotide
cugugaaacccuuggguua

SEQ ID NO: 2503401 - RNA, 19 nt, Artificial Sequence
  Description of Artificial Sequence: Synthetic oligonucleotide
caguguugucauuucugca

SEQ ID NO: 2503402 - RNA, 19 nt, Artificial Sequence
  Description of Artificial Sequence: Synthetic oligonucleotide
ucucugagccaaugcugaa

SEQ ID NO: 2503403 - RNA, 19 nt, Artificial Sequence
  Description of Artificial Sequence: Synthetic oligonucleotide
  modified_base (16)..(16): a, c, u, g, unknown or other
cacuuuugauuugucnuua

SEQ ID NO: 2503404 - RNA, 19 nt, Artificial Sequence
  Description of Artificial Sequence: Synthetic oligonucleotide
guucugucaccucucugaa

SEQ ID NO: 2503405 - RNA, 19 nt, Artificial Sequence
  Description of Artificial Sequence: Synthetic oligonucleotide
cauugauguccugagggaa

SEQ ID NO: 2503406 - RNA, 19 nt, Artificial Sequence
  Description of Artificial Sequence: Synthetic oligonucleotide
cugacucucugagccaaug

SEQ ID NO: 2503407 - RNA, 19 nt, Artificial Sequence
  Description of Artificial Sequence: Synthetic oligonucleotide
gaaacccuuggguuacagu

SEQ ID NO: 2503408 - RNA, 19 nt, Artificial Sequence
  Description of Artificial Sequence: Synthetic oligonucleotide
acccuuggguuacaguaua

SEQ ID NO: 2503409 - RNA, 19 nt, Artificial Sequence
  Description of Artificial Sequence: Synthetic oligonucleotide
gagccgggcagggugcccg

SEQ ID NO: 2503410 - RNA, 19 nt, Artificial Sequence
  Description of Artificial Sequence: Synthetic oligonucleotide
uucugucaccucucugaau

SEQ ID NO: 2503411 - RNA, 19 nt, Artificial Sequence
  Description of Artificial Sequence: Synthetic oligonucleotide
guaguauuggagccaguau

SEQ ID NO: 2503412 - RNA, 19 nt, Artificial Sequence
  Description of Artificial Sequence: Synthetic oligonucleotide
gaaggcgcuuccgccgcgg

SEQ ID NO: 2503413 - RNA, 19 nt, Artificial Sequence
  Description of Artificial Sequence: Synthetic oligonucleotide
gcaccgugagaauaaauua

SEQ ID NO: 2503414 - RNA, 19 nt, Artificial Sequence
  Description of Artificial Sequence: Synthetic oligonucleotide
caaccacuuuugauuuguc

SEQ ID NO: 2503415 - RNA, 19 nt, Artificial Sequence
  Description of Artificial Sequence: Synthetic oligonucleotide
gcauugauguccugaggga

SEQ ID NO: 2503416 - RNA, 19 nt, Artificial Sequence
  Description of Artificial Sequence: Synthetic oligonucleotide
caugcuucucucugugaaa

SEQ ID NO: 2503417 - RNA, 19 nt, Artificial Sequence
  Description of Artificial Sequence: Synthetic oligonucleotide
ucugcaccgugagaauaaa

SEQ ID NO: 2503418 - RNA, 19 nt, Artificial Sequence
  Description of Artificial Sequence: Synthetic oligonucleotide
cucagccacggaaaccaca

SEQ ID NO: 2503419 - RNA, 19 nt, Artificial Sequence
  Description of Artificial Sequence: Synthetic oligonucleotide
ccuuggguuacaguauagc

SEQ ID NO: 2503420 - RNA, 19 nt, Artificial Sequence
  Description of Artificial Sequence: Synthetic oligonucleotide
gagaacagagucacaugcu

SEQ ID NO: 2503421 - RNA, 19 nt, Artificial Sequence
  Description of Artificial Sequence: Synthetic oligonucleotide
guguacuaaaggucaugua

SEQ ID NO: 2503422 - RNA, 19 nt, Artificial Sequence
  Description of Artificial Sequence: Synthetic oligonucleotide
aggcgcuuccgccgcggcg

SEQ ID NO: 2503423 - RNA, 19 nt, Artificial Sequence
  Description of Artificial Sequence: Synthetic oligonucleotide
aucgcagaaucuguaugua

SEQ ID NO: 2503424 - RNA, 19 nt, Artificial Sequence
  Description of Artificial Sequence: Synthetic oligonucleotide
gcuugcauugauguccuga

SEQ ID NO: 2503425 - RNA, 19 nt, Artificial Sequence
  Description of Artificial Sequence: Synthetic oligonucleotide
cuacucauuccguaguauu

SEQ ID NO: 2503426 - RNA, 19 nt, Artificial Sequence
  Description of Artificial Sequence: Synthetic oligonucleotide
caaagucguauuucuguau

SEQ ID NO: 2503427 - RNA, 19 nt, Artificial Sequence
  Description of Artificial Sequence: Synthetic oligonucleotide
gccccugaaauugacucug

SEQ ID NO: 2503428 - RNA, 19 nt, Artificial Sequence
  Description of Artificial Sequence: Synthetic oligonucleotide
gcuuaaaauggagcaauua

SEQ ID NO: 2503429 - RNA, 19 nt, Artificial Sequence
  Description of Artificial Sequence: Synthetic oligonucleotide
uccugagggaaggcgcuuc

SEQ ID NO: 2503430 - RNA, 19 nt, Artificial Sequence
  Description of Artificial Sequence: Synthetic oligonucleotide
agagagccccugaaauuga

SEQ ID NO: 2503431 - RNA, 19 nt, Artificial Sequence
  Description of Artificial Sequence: Synthetic oligonucleotide
aggcuugcauugauguccu

SEQ ID NO: 2503432 - RNA, 19 nt, Artificial Sequence
  Description of Artificial Sequence: Synthetic oligonucleotide
guuucccaaagucguauuu

SEQ ID NO: 2503433 - RNA, 19 nt, Artificial Sequence
  Description of Artificial Sequence: Synthetic oligonucleotide
guaagagaacagagucaca

SEQ ID NO: 2503434 - RNA, 19 nt, Artificial Sequence
  Description of Artificial Sequence: Synthetic oligonucleotide
gagccaaugcugaauuuau

SEQ ID NO: 2503435 - RNA, 19 nt, Artificial Sequence
  Description of Artificial Sequence: Synthetic oligonucleotide
gggugaucuguugggacug

SEQ ID NO: 2503436 - RNA, 19 nt, Artificial Sequence
  Description of Artificial Sequence: Synthetic oligonucleotide
cacaugcuucucucuguga

SEQ ID NO: 2503437 - RNA, 19 nt, Artificial Sequence
  Description of Artificial Sequence: Synthetic oligonucleotide
ggcaaccacuuuugauuug

SEQ ID NO: 2503438 - RNA, 19 nt, Artificial Sequence
  Description of Artificial Sequence: Synthetic oligonucleotide
gccacggaaaccacagcgc

SEQ ID NO: 2503439 - RNA, 19 nt, Artificial Sequence
  Description of Artificial Sequence: Synthetic oligonucleotide
agccgggcagggugcccgc

SEQ ID NO: 2503440 - RNA, 19 nt, Artificial Sequence
  Description of Artificial Sequence: Synthetic oligonucleotide
ggcgcuagcagagccgggc

SEQ ID NO: 2503441 - RNA, 19 nt, Artificial Sequence
  Description of Artificial Sequence: Synthetic oligonucleotide
cagccacggaaaccacagc

SEQ ID NO: 2503442 - RNA, 19 nt, Artificial Sequence
  Description of Artificial Sequence: Synthetic oligonucleotide
cagaaucuguauguauuua

SEQ ID NO: 2503443 - RNA, 19 nt, Artificial Sequence
  Description of Artificial Sequence: Synthetic oligonucleotide
cagggugcccgccgcgacc

SEQ ID NO: 2503444 - RNA, 19 nt, Artificial Sequence
  Description of Artificial Sequence: Synthetic oligonucleotide
acuguuucccaaagucgua

SEQ ID NO: 2503445 - RNA, 19 nt, Artificial Sequence
  Description of Artificial Sequence: Synthetic oligonucleotide
gggaaggcgcuuccgccgc

SEQ ID NO: 2503446 - RNA, 19 nt, Artificial Sequence
  Description of Artificial Sequence: Synthetic oligonucleotide
cucugaauucaacaucauu

SEQ ID NO: 2503447 - RNA, 19 nt, Artificial Sequence
  Description of Artificial Sequence: Synthetic oligonucleotide
cccaaagucguauuucugu

SEQ ID NO: 2503448 - RNA, 19 nt, Artificial Sequence
  Description of Artificial Sequence: Synthetic oligonucleotide
ggguuacaguauagcacag

SEQ ID NO: 2503449 - RNA, 19 nt, Artificial Sequence
  Description of Artificial Sequence: Synthetic oligonucleotide
ccaaagucguauuucugua

SEQ ID NO: 2503450 - RNA, 19 nt, Artificial Sequence
  Description of Artificial Sequence: Synthetic oligonucleotide
guugucauuucugcaccgu

SEQ ID NO: 2503451 - RNA, 19 nt, Artificial Sequence
  Description of Artificial Sequence: Synthetic oligonucleotide
ggcgcuuccgccgcggcgc

SEQ ID NO: 2503452 - RNA, 19 nt, Artificial Sequence
  Description of Artificial Sequence: Synthetic oligonucleotide
gcgaccaccuccucagcca

SEQ ID NO: 2503453 - RNA, 19 nt, Artificial Sequence
  Description of Artificial Sequence: Synthetic oligonucleotide
ccgugagaauaaauuaaaa

SEQ ID NO: 2503454 - RNA, 19 nt, Artificial Sequence
  Description of Artificial Sequence: Synthetic oligonucleotide
cccuuggguuacaguauag

SEQ ID NO: 2503455 - RNA, 19 nt, Artificial Sequence
  Description of Artificial Sequence: Synthetic oligonucleotide
agggugcccgccgcgacca

SEQ ID NO: 2503456 - RNA, 19 nt, Artificial Sequence
  Description of Artificial Sequence: Synthetic oligonucleotide
ccugagggaaggcgcuucc

SEQ ID NO: 2503457 - RNA, 19 nt, Artificial Sequence
  Description of Artificial Sequence: Synthetic oligonucleotide
gcggcgcuagcagagccgg

SEQ ID NO: 2503458 - RNA, 19 nt, Artificial Sequence
  Description of Artificial Sequence: Synthetic oligonucleotide
caucacaggcuacaauuuu

SEQ ID NO: 2503459 - RNA, 19 nt, Artificial Sequence
  Description of Artificial Sequence: Synthetic oligonucleotide
ggggugaucuguugggacu

SEQ ID NO: 2503460 - RNA, 19 nt, Artificial Sequence
  Description of Artificial Sequence: Synthetic oligonucleotide
gcaaccacuuuugauuugu

SEQ ID NO: 2503461 - RNA, 19 nt, Artificial Sequence
  Description of Artificial Sequence: Synthetic oligonucleotide
gcugaauuuauugcuuuau

SEQ ID NO: 2503462 - RNA, 19 nt, Artificial Sequence
  Description of Artificial Sequence: Synthetic oligonucleotide
cugauaugccauggcuuaa

SEQ ID NO: 2503463 - RNA, 19 nt, Artificial Sequence
  Description of Artificial Sequence: Synthetic oligonucleotide
uuccgccgcggcgcuagca

SEQ ID NO: 2503464 - RNA, 19 nt, Artificial Sequence
  Description of Artificial Sequence: Synthetic oligonucleotide
gguuacaguauagcacagu

SEQ ID NO: 2503465 - RNA, 19 nt, Artificial Sequence
  Description of Artificial Sequence: Synthetic oligonucleotide
guauuggagccaguauuuu

SEQ ID NO: 2503466 - RNA, 19 nt, Artificial Sequence
  Description of Artificial Sequence: Synthetic oligonucleotide
gggacuguaugagcucauc

SEQ ID NO: 2503467 - RNA, 19 nt, Artificial Sequence
  Description of Artificial Sequence: Synthetic oligonucleotide
cgcgaccaccuccucagcc

SEQ ID NO: 2503468 - RNA, 19 nt, Artificial Sequence
  Description of Artificial Sequence: Synthetic oligonucleotide
cguaguauuggagccagua

SEQ ID NO: 2503469 - RNA, 19 nt, Artificial Sequence
  Description of Artificial Sequence: Synthetic oligonucleotide
ccaaacauuaucgcagaau

SEQ ID NO: 2503470 - RNA, 19 nt, Artificial Sequence
  Description of Artificial Sequence: Synthetic oligonucleotide
gugaucuguugggacugua

SEQ ID NO: 2503471 - RNA, 19 nt, Artificial Sequence
  Description of Artificial Sequence: Synthetic oligonucleotide
cguaugaaggcaaccacuu

SEQ ID NO: 2503472 - RNA, 19 nt, Artificial Sequence
  Description of Artificial Sequence: Synthetic oligonucleotide
cugcaccgugagaauaaau

SEQ ID NO: 2503473 - RNA, 19 nt, Artificial Sequence
  Description of Artificial Sequence: Synthetic oligonucleotide
gugaaacccuuggguuaca

SEQ ID NO: 2503474 - RNA, 19 nt, Artificial Sequence
  Description of Artificial Sequence: Synthetic oligonucleotide
cgcggcgcuagcagagccg

SEQ ID NO: 2503475 - RNA, 19 nt, Artificial Sequence
  Description of Artificial Sequence: Synthetic oligonucleotide
ccacggaaaccacagcgcu

SEQ ID NO: 2503476 - RNA, 19 nt, Artificial Sequence
  Description of Artificial Sequence: Synthetic oligonucleotide
gcgcuagcagagccgggca

SEQ ID NO: 2503477 - RNA, 19 nt, Artificial Sequence
  Description of Artificial Sequence: Synthetic oligonucleotide
ggcuugcauugauguccug

SEQ ID NO: 2503478 - RNA, 19 nt, Artificial Sequence
  Description of Artificial Sequence: Synthetic oligonucleotide
ccgcggcgcuagcagagcc

SEQ ID NO: 2503479 - RNA, 19 nt, Artificial Sequence
  Description of Artificial Sequence: Synthetic oligonucleotide
gcagggugcccgccgcgac

SEQ ID NO: 2503480 - RNA, 19 nt, Artificial Sequence
  Description of Artificial Sequence: Synthetic oligonucleotide
cgcuagcagagccgggcag

SEQ ID NO: 2503481 - RNA, 19 nt, Artificial Sequence
  Description of Artificial Sequence: Synthetic oligonucleotide
ccgggcagggugcccgccg

SEQ ID NO: 2503482 - RNA, 19 nt, Artificial Sequence
  Description of Artificial Sequence: Synthetic oligonucleotide
cgccgcggcgcuagcagag

SEQ ID NO: 2503483 - RNA, 19 nt, Artificial Sequence
  Description of Artificial Sequence: Synthetic oligonucleotide
gcuguguacuaaaggucau

SEQ ID NO: 2503484 - RNA, 19 nt, Artificial Sequence
  Description of Artificial Sequence: Synthetic oligonucleotide
gugcccgccgcgaccaccu

SEQ ID NO: 2503485 - RNA, 19 nt, Artificial Sequence
  Description of Artificial Sequence: Synthetic oligonucleotide
ggugaucuguugggacugu

SEQ ID NO: 2503486 - RNA, 19 nt, Artificial Sequence
  Description of Artificial Sequence: Synthetic oligonucleotide
ccgcgaccaccuccucagc

SEQ ID NO: 2503487 - RNA, 19 nt, Artificial Sequence
  Description of Artificial Sequence: Synthetic oligonucleotide
cccugaaauugacucuguu

SEQ ID NO: 2503488 - RNA, 19 nt, Artificial Sequence
  Description of Artificial Sequence: Synthetic oligonucleotide
cccgccgcgaccaccuccu

SEQ ID NO: 2503489 - RNA, 19 nt, Artificial Sequence
  Description of Artificial Sequence: Synthetic oligonucleotide
cggcgcuagcagagccggg

SEQ ID NO: 2503490 - RNA, 19 nt, Artificial Sequence
  Description of Artificial Sequence: Synthetic oligonucleotide
gccgggcagggugcccgcc

SEQ ID NO: 2503491 - RNA, 19 nt, Artificial Sequence
  Description of Artificial Sequence: Synthetic oligonucleotide
ccgccgcggcgcuagcaga

SEQ ID NO: 2503492 - RNA, 19 nt, Artificial Sequence
  Description of Artificial Sequence: Synthetic oligonucleotide
gggugcccgccgcgaccac

SEQ ID NO: 2503493 - RNA, 19 nt, Artificial Sequence
  Description of Artificial Sequence: Synthetic oligonucleotide
ccugacucucugagccaau

SEQ ID NO: 2503494 - RNA, 19 nt, Artificial Sequence
  Description of Artificial Sequence: Synthetic oligonucleotide
ccguaguauuggagccagu

SEQ ID NO: 2503495 - RNA, 19 nt, Artificial Sequence
  Description of Artificial Sequence: Synthetic oligonucleotide
gcgcuuccgccgcggcgcu

SEQ ID NO: 2503496 - RNA, 19 nt, Artificial Sequence
  Description of Artificial Sequence: Synthetic oligonucleotide
ccgccgcgaccaccuccuc

SEQ ID NO: 2503497 - RNA, 19 nt, Artificial Sequence
  Description of Artificial Sequence: Synthetic oligonucleotide
cgcuuccgccgcggcgcua

SEQ ID NO: 2503498 - RNA, 19 nt, Artificial Sequence
  Description of Artificial Sequence: Synthetic oligonucleotide
auucauagaaaauagaaac

SEQ ID NO: 2503499 - RNA, 19 nt, Artificial Sequence
  Description of Artificial Sequence: Synthetic oligonucleotide
aagagcuuaaaguauaagc

SEQ ID NO: 2503500 - RNA, 19 nt, Artificial Sequence
  Description of Artificial Sequence: Synthetic oligonucleotide
ucugcauuaaacuaaauug

SEQ ID NO: 2503501 - RNA, 19 nt, Artificial Sequence
  Description of Artificial Sequence: Synthetic oligonucleotide
uuuaauaacauaaaaggaa

SEQ ID NO: 2503502 - RNA, 19 nt, Artificial Sequence
  Description of Artificial Sequence: Synthetic oligonucleotide
aaagagaagacaccugacc

SEQ ID NO: 2503503 - RNA, 19 nt, Artificial Sequence
  Description of Artificial Sequence: Synthetic oligonucleotide
aaaguauaagcaaacacac

SEQ ID NO: 2503504 - RNA, 19 nt, Artificial Sequence
  Description of Artificial Sequence: Synthetic oligonucleotide
uucaugaagaacuugagac

SEQ ID NO: 2503505 - RNA, 19 nt, Artificial Sequence
  Description of Artificial Sequence: Synthetic oligonucleotide
  modified_base (16)..(16): a, c, u, g, unknown or other
aaaagggucaguuugngua

SEQ ID NO: 2503506 - RNA, 19 nt, Artificial Sequence
  Description of Artificial Sequence: Synthetic oligonucleotide
aaagggaacagucgaagac

SEQ ID NO: 2503507 - RNA, 19 nt, Artificial Sequence
  Description of Artificial Sequence: Synthetic oligonucleotide
uguggaaucaaagagaaga

SEQ ID NO: 2503508 - RNA, 19 nt, Artificial Sequence
  Description of Artificial Sequence: Synthetic oligonucleotide
uuaaaguauaagcaaacac

SEQ ID NO: 2503509 - RNA, 19 nt, Artificial Sequence
  Description of Artificial Sequence: Synthetic oligonucleotide
uuaauaacauaaaaggaaa

SEQ ID NO: 2503510 - RNA, 19 nt, Artificial Sequence
  Description of Artificial Sequence: Synthetic oligonucleotide
aacagucgaagacugaguc

SEQ ID NO: 2503511 - RNA, 19 nt, Artificial Sequence
  Description of Artificial Sequence: Synthetic oligonucleotide
aacaaugacauccuauugu

SEQ ID NO: 2503512 - RNA, 19 nt, Artificial Sequence
  Description of Artificial Sequence: Synthetic oligonucleotide
gaacuugagaccaucaugg

SEQ ID NO: 2503513 - RNA, 19 nt, Artificial Sequence
  Description of Artificial Sequence: Synthetic oligonucleotide
aguauaagcaaacacacau

SEQ ID NO: 2503514 - RNA, 19 nt, Artificial Sequence
  Description of Artificial Sequence: Synthetic oligonucleotide
caaagaaucgcauuucugc

SEQ ID NO: 2503515 - RNA, 19 nt, Artificial Sequence
  Description of Artificial Sequence: Synthetic oligonucleotide
aaaaggaaaacucugcaua

SEQ ID NO: 2503516 - RNA, 19 nt, Artificial Sequence
  Description of Artificial Sequence: Synthetic oligonucleotide
ucuaauugcaucuccagga

SEQ ID NO: 2503517 - RNA, 19 nt, Artificial Sequence
  Description of Artificial Sequence: Synthetic oligonucleotide
auuaaacuaaauugguauc

SEQ ID NO: 2503518 - RNA, 19 nt, Artificial Sequence
  Description of Artificial Sequence: Synthetic oligonucleotide
cuugagaccaucauggcag

SEQ ID NO: 2503519 - RNA, 19 nt, Artificial Sequence
  Description of Artificial Sequence: Synthetic oligonucleotide
acacauacaacauuuucuc

SEQ ID NO: 2503520 - RNA, 19 nt, Artificial Sequence
  Description of Artificial Sequence: Synthetic oligonucleotide
aaacaaauaguauccaaaa

SEQ ID NO: 2503521 - RNA, 19 nt, Artificial Sequence
  Description of Artificial Sequence: Synthetic oligonucleotide
ucuuaagcauccaaggagc

SEQ ID NO: 2503522 - RNA, 19 nt, Artificial Sequence
  Description of Artificial Sequence: Synthetic oligonucleotide
ucaaagagaagacaccuga

SEQ ID NO: 2503523 - RNA, 19 nt, Artificial Sequence
  Description of Artificial Sequence: Synthetic oligonucleotide
aauagaaacuuucaacuuu

SEQ ID NO: 2503524 - RNA, 19 nt, Artificial Sequence
  Description of Artificial Sequence: Synthetic oligonucleotide
  modified_base (7)..(7): a, c, u, g, unknown or other
aguuugnguaguuacuguc

SEQ ID NO: 2503525 - RNA, 19 nt, Artificial Sequence
  Description of Artificial Sequence: Synthetic oligonucleotide
aagagaagacaccugaccu

SEQ ID NO: 2503526 - RNA, 19 nt, Artificial Sequence
  Description of Artificial Sequence: Synthetic oligonucleotide
  modified_base (3)..(3): a, c, u, g, unknown or other
ugnguaguuacugucaaag

SEQ ID NO: 2503527 - RNA, 19 nt, Artificial Sequence
  Description of Artificial Sequence: Synthetic oligonucleotide
acaaauaguauccaaaaua

SEQ ID NO: 2503528 - RNA, 19 nt, Artificial Sequence
  Description of Artificial Sequence: Synthetic oligonucleotide
uuaagcaugaauguuugcc

SEQ ID NO: 2503529 - RNA, 19 nt, Artificial Sequence
  Description of Artificial Sequence: Synthetic oligonucleotide
ugucaaagcuucaugaaga

SEQ ID NO: 2503530 - RNA, 19 nt, Artificial Sequence
  Description of Artificial Sequence: Synthetic oligonucleotide
cauaaaaggaaaacucugc

SEQ ID NO: 2503531 - RNA, 19 nt, Artificial Sequence
  Description of Artificial Sequence: Synthetic oligonucleotide
ugagucuuaagcauccaag

SEQ ID NO: 2503532 - RNA, 19 nt, Artificial Sequence
  Description of Artificial Sequence: Synthetic oligonucleotide
aagucucccaugcugguac

SEQ ID NO: 2503533 - RNA, 19 nt, Artificial Sequence
  Description of Artificial Sequence: Synthetic oligonucleotide
uauuaagcaugaauguuug

SEQ ID NO: 2503534 - RNA, 19 nt, Artificial Sequence
  Description of Artificial Sequence: Synthetic oligonucleotide
aaagaaucgcauuucugcu

SEQ ID NO: 2503535 - RNA, 19 nt, Artificial Sequence
  Description of Artificial Sequence: Synthetic oligonucleotide
uccaaaauauuaagcauga

SEQ ID NO: 2503536 - RNA, 19 nt, Artificial Sequence
  Description of Artificial Sequence: Synthetic oligonucleotide
uuuucaagagucuaccacu

SEQ ID NO: 2503537 - RNA, 19 nt, Artificial Sequence
  Description of Artificial Sequence: Synthetic oligonucleotide
  modified_base (15)..(15): a, c, u, g, unknown or other
ucagguaagauacanguuu

SEQ ID NO: 2503538 - RNA, 19 nt, Artificial Sequence
  Description of Artificial Sequence: Synthetic oligonucleotide
ugaaaggauucauagaaaa

SEQ ID NO: 2503539 - RNA, 19 nt, Artificial Sequence
  Description of Artificial Sequence: Synthetic oligonucleotide
cauagaaagggaacagucg

SEQ ID NO: 2503540 - RNA, 19 nt, Artificial Sequence
  Description of Artificial Sequence: Synthetic oligonucleotide
cauccuauugucaagccag

SEQ ID NO: 2503541 - RNA, 19 nt, Artificial Sequence
  Description of Artificial Sequence: Synthetic oligonucleotide
uuuacaaacauaggaaggu

SEQ ID NO: 2503542 - RNA, 19 nt, Artificial Sequence
  Description of Artificial Sequence: Synthetic oligonucleotide
aagaaucgcauuucugcuc

SEQ ID NO: 2503543 - RNA, 19 nt, Artificial Sequence
  Description of Artificial Sequence: Synthetic oligonucleotide
uuaaacuaaauugguaucu

SEQ ID NO: 2503544 - RNA, 19 nt, Artificial Sequence
  Description of Artificial Sequence: Synthetic oligonucleotide
aagagucuaccacuguuag

SEQ ID NO: 2503545 - RNA, 19 nt, Artificial Sequence
  Description of Artificial Sequence: Synthetic oligonucleotide
  modified_base (15)..(15): a, c, u, g, unknown or other
aaagggucaguuugnguag

SEQ ID NO: 2503546 - RNA, 19 nt, Artificial Sequence
  Description of Artificial Sequence: Synthetic oligonucleotide
aacauuuucucauucgguu

SEQ ID NO: 2503547 - RNA, 19 nt, Artificial Sequence
  Description of Artificial Sequence: Synthetic oligonucleotide
auaaaaggaaaacucugca

SEQ ID NO: 2503548 - RNA, 19 nt, Artificial Sequence
  Description of Artificial Sequence: Synthetic oligonucleotide
ucuguggaaucaaagagaa

SEQ ID NO: 2503549 - RNA, 19 nt, Artificial Sequence
  Description of Artificial Sequence: Synthetic oligonucleotide
auagaaagggaacagucga

SEQ ID NO: 2503550 - RNA, 19 nt, Artificial Sequence
  Description of Artificial Sequence: Synthetic oligonucleotide
aacaaagaaucgcauuucu

SEQ ID NO: 2503551 - RNA, 19 nt, Artificial Sequence
  Description of Artificial Sequence: Synthetic oligonucleotide
aacuugagaccaucauggc

SEQ ID NO: 2503552 - RNA, 19 nt, Artificial Sequence
  Description of Artificial Sequence: Synthetic oligonucleotide
gucuuaagcauccaaggag

SEQ ID NO: 2503553 - RNA, 19 nt, Artificial Sequence
  Description of Artificial Sequence: Synthetic oligonucleotide
auuuccaaugcuagaagcc

SEQ ID NO: 2503554 - RNA, 19 nt, Artificial Sequence
  Description of Artificial Sequence: Synthetic oligonucleotide
guuagcaacuacugcaggg

SEQ ID NO: 2503555 - RNA, 19 nt, Artificial Sequence
  Description of Artificial Sequence: Synthetic oligonucleotide
aacaaauaguauccaaaau

SEQ ID NO: 2503556 - RNA, 19 nt, Artificial Sequence
  Description of Artificial Sequence: Synthetic oligonucleotide
aaacuaaauugguaucuga

SEQ ID NO: 2503557 - RNA, 19 nt, Artificial Sequence
  Description of Artificial Sequence: Synthetic oligonucleotide
aaaacucugcauagaaagg

SEQ ID NO: 2503558 - RNA, 19 nt, Artificial Sequence
  Description of Artificial Sequence: Synthetic oligonucleotide
uaagcaugaauguuugcca

SEQ ID NO: 2503559 - RNA, 19 nt, Artificial Sequence
  Description of Artificial Sequence: Synthetic oligonucleotide
agaacuugagaccaucaug

SEQ ID NO: 2503560 - RNA, 19 nt, Artificial Sequence
  Description of Artificial Sequence: Synthetic oligonucleotide
aauauuaagcaugaauguu

SEQ ID NO: 2503561 - RNA, 19 nt, Artificial Sequence
  Description of Artificial Sequence: Synthetic oligonucleotide
aagccuaaccaagaacccc

SEQ ID NO: 2503562 - RNA, 19 nt, Artificial Sequence
  Description of Artificial Sequence: Synthetic oligonucleotide
aagaaccccgagcuaaguc

SEQ ID NO: 2503563 - RNA, 19 nt, Artificial Sequence
  Description of Artificial Sequence: Synthetic oligonucleotide
uucugcauuaaacuaaauu

SEQ ID NO: 2503564 - RNA, 19 nt, Artificial Sequence
  Description of Artificial Sequence: Synthetic oligonucleotide
guucauaacaaagaaucgc

SEQ ID NO: 2503565 - RNA, 19 nt, Artificial Sequence
  Description of Artificial Sequence: Synthetic oligonucleotide
ugcuagaagccuaaccaag

SEQ ID NO: 2503566 - RNA, 19 nt, Artificial Sequence
  Description of Artificial Sequence: Synthetic oligonucleotide
acauacaacauuuucucau

SEQ ID NO: 2503567 - RNA, 19 nt, Artificial Sequence
  Description of Artificial Sequence: Synthetic oligonucleotide
uuucaagagucuaccacug

SEQ ID NO: 2503568 - RNA, 19 nt, Artificial Sequence
  Description of Artificial Sequence: Synthetic oligonucleotide
auuaagcaugaauguuugc

SEQ ID NO: 2503569 - RNA, 19 nt, Artificial Sequence
  Description of Artificial Sequence: Synthetic oligonucleotide
cuaaccaagaaccccgagc

SEQ ID NO: 2503570 - RNA, 19 nt, Artificial Sequence
  Description of Artificial Sequence: Synthetic oligonucleotide
gagucuaccacuguuagca

SEQ ID NO: 2503571 - RNA, 19 nt, Artificial Sequence
  Description of Artificial Sequence: Synthetic oligonucleotide
  modified_base (9)..(9): a, c, u, g, unknown or other
ucaguuugnguaguuacug

SEQ ID NO: 2503572 - RNA, 19 nt, Artificial Sequence
  Description of Artificial Sequence: Synthetic oligonucleotide
  modified_base (2)..(2): a, c, u, g, unknown or other
unguccuugucuccaaaag

SEQ ID NO: 2503573 - RNA, 19 nt, Artificial Sequence
  Description of Artificial Sequence: Synthetic oligonucleotide
ucugcauagaaagggaaca

SEQ ID NO: 2503574 - RNA, 19 nt, Artificial Sequence
  Description of Artificial Sequence: Synthetic oligonucleotide
uucucauucgguucggugu

SEQ ID NO: 2503575 - RNA, 19 nt, Artificial Sequence
  Description of Artificial Sequence: Synthetic oligonucleotide
  modified_base (5)..(5): a, c, u, g, unknown or other
uuugnguaguuacugucaa

SEQ ID NO: 2503576 - RNA, 19 nt, Artificial Sequence
  Description of Artificial Sequence: Synthetic oligonucleotide
uaagcauccaaggagcaca

SEQ ID NO: 2503577 - RNA, 19 nt, Artificial Sequence
  Description of Artificial Sequence: Synthetic oligonucleotide
gagaagacaccugaccugg

SEQ ID NO: 2503578 - RNA, 19 nt, Artificial Sequence
  Description of Artificial Sequence: Synthetic oligonucleotide
acuaaauugguaucugaaa

SEQ ID NO: 2503579 - RNA, 19 nt, Artificial Sequence
  Description of Artificial Sequence: Synthetic oligonucleotide
uccaggaccacgcacauuu

SEQ ID NO: 2503580 - RNA, 19 nt, Artificial Sequence
  Description of Artificial Sequence: Synthetic oligonucleotide
uccccaaccacuuucugca

SEQ ID NO: 2503581 - RNA, 19 nt, Artificial Sequence
  Description of Artificial Sequence: Synthetic oligonucleotide
uuacugucaaagcuucaug

SEQ ID NO: 2503582 - RNA, 19 nt, Artificial Sequence
  Description of Artificial Sequence: Synthetic oligonucleotide
aaacauaggaaggugguuu

SEQ ID NO: 2503583 - RNA, 19 nt, Artificial Sequence
  Description of Artificial Sequence: Synthetic oligonucleotide
guccuugucuccaaaaggg

SEQ ID NO: 2503584 - RNA, 19 nt, Artificial Sequence
  Description of Artificial Sequence: Synthetic oligonucleotide
acauaaaaggaaaacucug

SEQ ID NO: 2503585 - RNA, 19 nt, Artificial Sequence
  Description of Artificial Sequence: Synthetic oligonucleotide
agaaucgcauuucugcucu

SEQ ID NO: 2503586 - RNA, 19 nt, Artificial Sequence
  Description of Artificial Sequence: Synthetic oligonucleotide
uaauugcaucuccaggacc

SEQ ID NO: 2503587 - RNA, 19 nt, Artificial Sequence
  Description of Artificial Sequence: Synthetic oligonucleotide
agaaccccgagcuaagucu

SEQ ID NO: 2503588 - RNA, 19 nt, Artificial Sequence
  Description of Artificial Sequence: Synthetic oligonucleotide
agaaagucucccaugcugg

SEQ ID NO: 2503589 - RNA, 19 nt, Artificial Sequence
  Description of Artificial Sequence: Synthetic oligonucleotide
cugucaaagcuucaugaag

SEQ ID NO: 2503590 - RNA, 19 nt, Artificial Sequence
  Description of Artificial Sequence: Synthetic oligonucleotide
uauugucaagccaggcaag

SEQ ID NO: 2503591 - RNA, 19 nt, Artificial Sequence
  Description of Artificial Sequence: Synthetic oligonucleotide
aggcaagucuaauugcauc

SEQ ID NO: 2503592 - RNA, 19 nt, Artificial Sequence
  Description of Artificial Sequence: Synthetic oligonucleotide
agagucuaccacuguuagc

SEQ ID NO: 2503593 - RNA, 19 nt, Artificial Sequence
  Description of Artificial Sequence: Synthetic oligonucleotide
  modified_base (19)..(19): a, c, u, g, unknown or other
uccaaaagggucaguuugn

SEQ ID NO: 2503594 - RNA, 19 nt, Artificial Sequence
  Description of Artificial Sequence: Synthetic oligonucleotide
cacauuuucaagagucuac

SEQ ID NO: 2503595 - RNA, 19 nt, Artificial Sequence
  Description of Artificial Sequence: Synthetic oligonucleotide
agccaggcaagucuaauug

SEQ ID NO: 2503596 - RNA, 19 nt, Artificial Sequence
  Description of Artificial Sequence: Synthetic oligonucleotide
  modified_base (2)..(2): a, c, u, g, unknown or other
gnguaguuacugucaaagc

SEQ ID NO: 2503597 - RNA, 19 nt, Artificial Sequence
  Description of Artificial Sequence: Synthetic oligonucleotide
ggaaucaaagagaagacac

SEQ ID NO: 2503598 - RNA, 19 nt, Artificial Sequence
  Description of Artificial Sequence: Synthetic oligonucleotide
agucuuaagcauccaagga

SEQ ID NO: 2503599 - RNA, 19 nt, Artificial Sequence
  Description of Artificial Sequence: Synthetic oligonucleotide
ucauaacaaagaaucgcau

SEQ ID NO: 2503600 - RNA, 19 nt, Artificial Sequence
  Description of Artificial Sequence: Synthetic oligonucleotide
cauuaaacuaaauugguau

SEQ ID NO: 2503601 - RNA, 19 nt, Artificial Sequence
  Description of Artificial Sequence: Synthetic oligonucleotide
aagggaacagucgaagacu

SEQ ID NO: 2503602 - RNA, 19 nt, Artificial Sequence
  Description of Artificial Sequence: Synthetic oligonucleotide
aacuaaauugguaucugaa

SEQ ID NO: 2503603 - RNA, 19 nt, Artificial Sequence
  Description of Artificial Sequence: Synthetic oligonucleotide
agagaagacaccugaccug

SEQ ID NO: 2503604 - RNA, 19 nt, Artificial Sequence
  Description of Artificial Sequence: Synthetic oligonucleotide
acgcacauuuucaagaguc

SEQ ID NO: 2503605 - RNA, 19 nt, Artificial Sequence
  Description of Artificial Sequence: Synthetic oligonucleotide
caaugcuagaagccuaacc

SEQ ID NO: 2503606 - RNA, 19 nt, Artificial Sequence
  Description of Artificial Sequence: Synthetic oligonucleotide
uagaagccuaaccaagaac

SEQ ID NO: 2503607 - RNA, 19 nt, Artificial Sequence
  Description of Artificial Sequence: Synthetic oligonucleotide
uuuccaaugcuagaagccu

SEQ ID NO: 2503608 - RNA, 19 nt, Artificial Sequence
  Description of Artificial Sequence: Synthetic oligonucleotide
uuacaaacauaggaaggug

SEQ ID NO: 2503609 - RNA, 19 nt, Artificial Sequence
  Description of Artificial Sequence: Synthetic oligonucleotide
accacgcacauuuucaaga

SEQ ID NO: 2503610 - RNA, 19 nt, Artificial Sequence
  Description of Artificial Sequence: Synthetic oligonucleotide
agggaguuuaauaacauaa

SEQ ID NO: 2503611 - RNA, 19 nt, Artificial Sequence
  Description of Artificial Sequence: Synthetic oligonucleotide
gagcuuaaaguauaagcaa

SEQ ID NO: 2503612 - RNA, 19 nt, Artificial Sequence
  Description of Artificial Sequence: Synthetic oligonucleotide
acuugagaccaucauggca

SEQ ID NO: 2503613 - RNA, 19 nt, Artificial Sequence
  Description of Artificial Sequence: Synthetic oligonucleotide
uuucucauucgguucggug

SEQ ID NO: 2503614 - RNA, 19 nt, Artificial Sequence
  Description of Artificial Sequence: Synthetic oligonucleotide
uaguuacugucaaagcuuc

SEQ ID NO: 2503615 - RNA, 19 nt, Artificial Sequence
  Description of Artificial Sequence: Synthetic oligonucleotide
uucuuguggagcuuccugu

SEQ ID NO: 2503616 - RNA, 19 nt, Artificial Sequence
  Description of Artificial Sequence: Synthetic oligonucleotide
uuguggagcuuccuguccc

SEQ ID NO: 2503617 - RNA, 19 nt, Artificial Sequence
  Description of Artificial Sequence: Synthetic oligonucleotide
uuagcaacuacugcagggu

SEQ ID NO: 2503618 - RNA, 19 nt, Artificial Sequence
  Description of Artificial Sequence: Synthetic oligonucleotide
caagucuaauugcaucucc

SEQ ID NO: 2503619 - RNA, 19 nt, Artificial Sequence
  Description of Artificial Sequence: Synthetic oligonucleotide
auaguauccaaaauauuaa

SEQ ID NO: 2503620 - RNA, 19 nt, Artificial Sequence
  Description of Artificial Sequence: Synthetic oligonucleotide
uguccccaugccuaaaucu

SEQ ID NO: 2503621 - RNA, 19 nt, Artificial Sequence
  Description of Artificial Sequence: Synthetic oligonucleotide
auugguaucugaaaggauu

SEQ ID NO: 2503622 - RNA, 19 nt, Artificial Sequence
  Description of Artificial Sequence: Synthetic oligonucleotide
aacuacugcagggucaggu

SEQ ID NO: 2503623 - RNA, 19 nt, Artificial Sequence
  Description of Artificial Sequence: Synthetic oligonucleotide
aacauaggaaggugguuuu

SEQ ID NO: 2503624 - RNA, 19 nt, Artificial Sequence
  Description of Artificial Sequence: Synthetic oligonucleotide
cuaauugcaucuccaggac

SEQ ID NO: 2503625 - RNA, 19 nt, Artificial Sequence
  Description of Artificial Sequence: Synthetic oligonucleotide
aagacaccugaccuggaaa

SEQ ID NO: 2503626 - RNA, 19 nt, Artificial Sequence
  Description of Artificial Sequence: Synthetic oligonucleotide
agcuacucuccccaaccac

SEQ ID NO: 2503627 - RNA, 19 nt, Artificial Sequence
  Description of Artificial Sequence: Synthetic oligonucleotide
cuauugucaagccaggcaa

SEQ ID NO: 2503628 - RNA, 19 nt, Artificial Sequence
  Description of Artificial Sequence: Synthetic oligonucleotide
agcacagcuacucucccca

SEQ ID NO: 2503629 - RNA, 19 nt, Artificial Sequence
  Description of Artificial Sequence: Synthetic oligonucleotide
aagggaguuuaauaacaua

SEQ ID NO: 2503630 - RNA, 19 nt, Artificial Sequence
  Description of Artificial Sequence: Synthetic oligonucleotide
cuuagcacugaccaccuca

SEQ ID NO: 2503631 - RNA, 19 nt, Artificial Sequence
  Description of Artificial Sequence: Synthetic oligonucleotide
agccuaaccaagaaccccg

SEQ ID NO: 2503632 - RNA, 19 nt, Artificial Sequence
  Description of Artificial Sequence: Synthetic oligonucleotide
uuagcacugaccaccucaa

SEQ ID NO: 2503633 - RNA, 19 nt, Artificial Sequence
  Description of Artificial Sequence: Synthetic oligonucleotide
aucgcauuucugcucuuag

SEQ ID NO: 2503634 - RNA, 19 nt, Artificial Sequence
  Description of Artificial Sequence: Synthetic oligonucleotide
gacauccuauugucaagcc

SEQ ID NO: 2503635 - RNA, 19 nt, Artificial Sequence
  Description of Artificial Sequence: Synthetic oligonucleotide
acauccuauugucaagcca

SEQ ID NO: 2503636 - RNA, 19 nt, Artificial Sequence
  Description of Artificial Sequence: Synthetic oligonucleotide
cugaccaccucaaugacaa

SEQ ID NO: 2503637 - RNA, 19 nt, Artificial Sequence
  Description of Artificial Sequence: Synthetic oligonucleotide
gacugagucuuaagcaucc

SEQ ID NO: 2503638 - RNA, 19 nt, Artificial Sequence
  Description of Artificial Sequence: Synthetic oligonucleotide
gaagccuaaccaagaaccc

SEQ ID NO: 2503639 - RNA, 19 nt, Artificial Sequence
  Description of Artificial Sequence: Synthetic oligonucleotide
  modified_base (3)..(3): a, c, u, g, unknown or other
uunguccuugucuccaaaa

SEQ ID NO: 2503640 - RNA, 19 nt, Artificial Sequence
  Description of Artificial Sequence: Synthetic oligonucleotide
aaguauaagcaaacacaca

SEQ ID NO: 2503641 - RNA, 19 nt, Artificial Sequence
  Description of Artificial Sequence: Synthetic oligonucleotide
ggauucauagaaaauagaa

SEQ ID NO: 2503642 - RNA, 19 nt, Artificial Sequence
  Description of Artificial Sequence: Synthetic oligonucleotide
uccaaugcuagaagccuaa

SEQ ID NO: 2503643 - RNA, 19 nt, Artificial Sequence
  Description of Artificial Sequence: Synthetic oligonucleotide
cuuaaaguauaagcaaaca

SEQ ID NO: 2503644 - RNA, 19 nt, Artificial Sequence
  Description of Artificial Sequence: Synthetic oligonucleotide
uaacaaagaaucgcauuuc

SEQ ID NO: 2503645 - RNA, 19 nt, Artificial Sequence
  Description of Artificial Sequence: Synthetic oligonucleotide
  modified_base (11)..(11): a, c, u, g, unknown or other
ggucaguuugnguaguuac

SEQ ID NO: 2503646 - RNA, 19 nt, Artificial Sequence
  Description of Artificial Sequence: Synthetic oligonucleotide
augaauguuugccaauguu

SEQ ID NO: 2503647 - RNA, 19 nt, Artificial Sequence
  Description of Artificial Sequence: Synthetic oligonucleotide
  modified_base (4)..(4): a, c, u, g, unknown or other
uuunguccuugucuccaaa

SEQ ID NO: 2503648 - RNA, 19 nt, Artificial Sequence
  Description of Artificial Sequence: Synthetic oligonucleotide
aaggaaaacucugcauaga

SEQ ID NO: 2503649 - RNA, 19 nt, Artificial Sequence
  Description of Artificial Sequence: Synthetic oligonucleotide
aacucugcauagaaaggga

SEQ ID NO: 2503650 - RNA, 19 nt, Artificial Sequence
  Description of Artificial Sequence: Synthetic oligonucleotide
guucuuguggagcuuccug

SEQ ID NO: 2503651 - RNA, 19 nt, Artificial Sequence
  Description of Artificial Sequence: Synthetic oligonucleotide
cuccccaaccacuuucugc

SEQ ID NO: 2503652 - RNA, 19 nt, Artificial Sequence
  Description of Artificial Sequence: Synthetic oligonucleotide
ggaacagucgaagacugag

SEQ ID NO: 2503653 - RNA, 19 nt, Artificial Sequence
  Description of Artificial Sequence: Synthetic oligonucleotide
cugcucuuagcacugacca

SEQ ID NO: 2503654 - RNA, 19 nt, Artificial Sequence
  Description of Artificial Sequence: Synthetic oligonucleotide
cuuguggagcuuccugucc

SEQ ID NO: 2503655 - RNA, 19 nt, Artificial Sequence
  Description of Artificial Sequence: Synthetic oligonucleotide
agcuuaaaguauaagcaaa

SEQ ID NO: 2503656 - RNA, 19 nt, Artificial Sequence
  Description of Artificial Sequence: Synthetic oligonucleotide
  modified_base (6)..(6): a, c, u, g, unknown or other
guuugnguaguuacuguca

SEQ ID NO: 2503657 - RNA, 19 nt, Artificial Sequence
  Description of Artificial Sequence: Synthetic oligonucleotide
uucaagagucuaccacugu

SEQ ID NO: 2503658 - RNA, 19 nt, Artificial Sequence
  Description of Artificial Sequence: Synthetic oligonucleotide
acaaagaaucgcauuucug

SEQ ID NO: 2503659 - RNA, 19 nt, Artificial Sequence
  Description of Artificial Sequence: Synthetic oligonucleotide
uuaagcauccaaggagcac

SEQ ID NO: 2503660 - RNA, 19 nt, Artificial Sequence
  Description of Artificial Sequence: Synthetic oligonucleotide
ucucauucgguucgguguu

SEQ ID NO: 2503661 - RNA, 19 nt, Artificial Sequence
  Description of Artificial Sequence: Synthetic oligonucleotide
  modified_base (14)..(14): a, c, u, g, unknown or other
aagggucaguuugnguagu

SEQ ID NO: 2503662 - RNA, 19 nt, Artificial Sequence
  Description of Artificial Sequence: Synthetic oligonucleotide
aauugguaucugaaaggau

SEQ ID NO: 2503663 - RNA, 19 nt, Artificial Sequence
  Description of Artificial Sequence: Synthetic oligonucleotide
  modified_base (5)..(5): a, c, u, g, unknown or other
uuuunguccuugucuccaa

SEQ ID NO: 2503664 - RNA, 19 nt, Artificial Sequence
  Description of Artificial Sequence: Synthetic oligonucleotide
uuccaaugcuagaagccua

SEQ ID NO: 2503665 - RNA, 19 nt, Artificial Sequence
  Description of Artificial Sequence: Synthetic oligonucleotide
uucgguucgguguuuucau

SEQ ID NO: 2503666 - RNA, 19 nt, Artificial Sequence
  Description of Artificial Sequence: Synthetic oligonucleotide
  modified_base (4)..(4): a, c, u, g, unknown or other
uugnguaguuacugucaaa

SEQ ID NO: 2503667 - RNA, 19 nt, Artificial Sequence
  Description of Artificial Sequence: Synthetic oligonucleotide
accaagaaccccgagcuaa

SEQ ID NO: 2503668 - RNA, 19 nt, Artificial Sequence
  Description of Artificial Sequence: Synthetic oligonucleotide
gcucuuagcacugaccacc

SEQ ID NO: 2503669 - RNA, 19 nt, Artificial Sequence
  Description of Artificial Sequence: Synthetic oligonucleotide
auuuucucauucgguucgg

SEQ ID NO: 2503670 - RNA, 19 nt, Artificial Sequence
  Description of Artificial Sequence: Synthetic oligonucleotide
auucgguucgguguuuuca

SEQ ID NO: 2503671 - RNA, 19 nt, Artificial Sequence
  Description of Artificial Sequence: Synthetic oligonucleotide
auuucugcucuuagcacug

SEQ ID NO: 2503672 - RNA, 19 nt, Artificial Sequence
  Description of Artificial Sequence: Synthetic oligonucleotide
cuuaagcauccaaggagca

SEQ ID NO: 2503673 - RNA, 19 nt, Artificial Sequence
  Description of Artificial Sequence: Synthetic oligonucleotide
uagcaacuacugcaggguc

SEQ ID NO: 2503674 - RNA, 19 nt, Artificial Sequence
  Description of Artificial Sequence: Synthetic oligonucleotide
uucugcucuuagcacugac

SEQ ID NO: 2503675 - RNA, 19 nt, Artificial Sequence
  Description of Artificial Sequence: Synthetic oligonucleotide
auugucaagccaggcaagu

SEQ ID NO: 2503676 - RNA, 19 nt, Artificial Sequence
  Description of Artificial Sequence: Synthetic oligonucleotide
aucaaagagaagacaccug

SEQ ID NO: 2503677 - RNA, 19 nt, Artificial Sequence
  Description of Artificial Sequence: Synthetic oligonucleotide
uugucuccaaaagggucag

SEQ ID NO: 2503678 - RNA, 19 nt, Artificial Sequence
  Description of Artificial Sequence: Synthetic oligonucleotide
gucuaccacuguuagcaac

SEQ ID NO: 2503679 - RNA, 19 nt, Artificial Sequence
  Description of Artificial Sequence: Synthetic oligonucleotide
uccuauugucaagccaggc

SEQ ID NO: 2503680 - RNA, 19 nt, Artificial Sequence
  Description of Artificial Sequence: Synthetic oligonucleotide
aggauucauagaaaauaga

SEQ ID NO: 2503681 - RNA, 19 nt, Artificial Sequence
  Description of Artificial Sequence: Synthetic oligonucleotide
ugguaucugaaaggauuca

SEQ ID NO: 2503682 - RNA, 19 nt, Artificial Sequence
  Description of Artificial Sequence: Synthetic oligonucleotide
agcuaagucuguggaauca

SEQ ID NO: 2503683 - RNA, 19 nt, Artificial Sequence
  Description of Artificial Sequence: Synthetic oligonucleotide
gaagacaccugaccuggaa

SEQ ID NO: 2503684 - RNA, 19 nt, Artificial Sequence
  Description of Artificial Sequence: Synthetic oligonucleotide
gaauguuugccaauguuuu

SEQ ID NO: 2503685 - RNA, 19 nt, Artificial Sequence
  Description of Artificial Sequence: Synthetic oligonucleotide
gaaccccgagcuaagucug

SEQ ID NO: 2503686 - RNA, 19 nt, Artificial Sequence
  Description of Artificial Sequence: Synthetic oligonucleotide
agggaacagucgaagacug

SEQ ID NO: 2503687 - RNA, 19 nt, Artificial Sequence
  Description of Artificial Sequence: Synthetic oligonucleotide
ugcucuuagcacugaccac

SEQ ID NO: 2503688 - RNA, 19 nt, Artificial Sequence
  Description of Artificial Sequence: Synthetic oligonucleotide
auugcaucuccaggaccac

SEQ ID NO: 2503689 - RNA, 19 nt, Artificial Sequence
  Description of Artificial Sequence: Synthetic oligonucleotide
caaugacauccuauuguca

SEQ ID NO: 2503690 - RNA, 19 nt, Artificial Sequence
  Description of Artificial Sequence: Synthetic oligonucleotide
caagagucuaccacuguua

SEQ ID NO: 2503691 - RNA, 19 nt, Artificial Sequence
  Description of Artificial Sequence: Synthetic oligonucleotide
cuagaagccuaaccaagaa

SEQ ID NO: 2503692 - RNA, 19 nt, Artificial Sequence
  Description of Artificial Sequence: Synthetic oligonucleotide
cugguacccuguuuuguuc

SEQ ID NO: 2503693 - RNA, 19 nt, Artificial Sequence
  Description of Artificial Sequence: Synthetic oligonucleotide
aggaccacgcacauuuuca

SEQ ID NO: 2503694 - RNA, 19 nt, Artificial Sequence
  Description of Artificial Sequence: Synthetic oligonucleotide
ucuccccaaccacuuucug

SEQ ID NO: 2503695 - RNA, 19 nt, Artificial Sequence
  Description of Artificial Sequence: Synthetic oligonucleotide
auccuauugucaagccagg

SEQ ID NO: 2503696 - RNA, 19 nt, Artificial Sequence
  Description of Artificial Sequence: Synthetic oligonucleotide
  modified_base (19)..(19): a, c, u, g, unknown or other
agggucagguaagauacan

SEQ ID NO: 2503697 - RNA, 19 nt, Artificial Sequence
  Description of Artificial Sequence: Synthetic oligonucleotide
ccaagggaguuuaauaaca

SEQ ID NO: 2503698 - RNA, 19 nt, Artificial Sequence
  Description of Artificial Sequence: Synthetic oligonucleotide
gcaugaauguuugccaaug

SEQ ID NO: 2503699 - RNA, 19 nt, Artificial Sequence
  Description of Artificial Sequence: Synthetic oligonucleotide
uccccaugccuaaaucuuu

SEQ ID NO: 2503700 - RNA, 19 nt, Artificial Sequence
  Description of Artificial Sequence: Synthetic oligonucleotide
aaucgcauuucugcucuua

SEQ ID NO: 2503701 - RNA, 19 nt, Artificial Sequence
  Description of Artificial Sequence: Synthetic oligonucleotide
agcaacuacugcaggguca

SEQ ID NO: 2503702 - RNA, 19 nt, Artificial Sequence
  Description of Artificial Sequence: Synthetic oligonucleotide
aaagucucccaugcuggua

SEQ ID NO: 2503703 - RNA, 19 nt, Artificial Sequence
  Description of Artificial Sequence: Synthetic oligonucleotide
ggcaagucuaauugcaucu

SEQ ID NO: 2503704 - RNA, 19 nt, Artificial Sequence
  Description of Artificial Sequence: Synthetic oligonucleotide
caggaccacgcacauuuuc

SEQ ID NO: 2503705 - RNA, 19 nt, Artificial Sequence
  Description of Artificial Sequence: Synthetic oligonucleotide
caacauuuucucauucggu

SEQ ID NO: 2503706 - RNA, 19 nt, Artificial Sequence
  Description of Artificial Sequence: Synthetic oligonucleotide
acccuguuuuguucaauuu

SEQ ID NO: 2503707 - RNA, 19 nt, Artificial Sequence
  Description of Artificial Sequence: Synthetic oligonucleotide
acugaccaccucaaugaca

SEQ ID NO: 2503708 - RNA, 19 nt, Artificial Sequence
  Description of Artificial Sequence: Synthetic oligonucleotide
cacugaccaccucaaugac

SEQ ID NO: 2503709 - RNA, 19 nt, Artificial Sequence
  Description of Artificial Sequence: Synthetic oligonucleotide
ucucccaugcugguacccu

SEQ ID NO: 2503710 - RNA, 19 nt, Artificial Sequence
  Description of Artificial Sequence: Synthetic oligonucleotide
  modified_base (10)..(10): a, c, u, g, unknown or other
gucaguuugnguaguuacu

SEQ ID NO: 2503711 - RNA, 19 nt, Artificial Sequence
  Description of Artificial Sequence: Synthetic oligonucleotide
uugucaagccaggcaaguc

SEQ ID NO: 2503712 - RNA, 19 nt, Artificial Sequence
  Description of Artificial Sequence: Synthetic oligonucleotide
accaccucaaugacaauuu

SEQ ID NO: 2503713 - RNA, 19 nt, Artificial Sequence
  Description of Artificial Sequence: Synthetic oligonucleotide
ccacgcacauuuucaagag

SEQ ID NO: 2503714 - RNA, 19 nt, Artificial Sequence
  Description of Artificial Sequence: Synthetic oligonucleotide
agcauccaaggagcacagc

SEQ ID NO: 2503715 - RNA, 19 nt, Artificial Sequence
  Description of Artificial Sequence: Synthetic oligonucleotide
cacagcuacucuccccaac

SEQ ID NO: 2503716 - RNA, 19 nt, Artificial Sequence
  Description of Artificial Sequence: Synthetic oligonucleotide
  modified_base (14)..(14): a, c, u, g, unknown or other
cagguaagauacanguuuu

SEQ ID NO: 2503717 - RNA, 19 nt, Artificial Sequence
  Description of Artificial Sequence: Synthetic oligonucleotide
acucugcauagaaagggaa

SEQ ID NO: 2503718 - RNA, 19 nt, Artificial Sequence
  Description of Artificial Sequence: Synthetic oligonucleotide
gaaagucucccaugcuggu

SEQ ID NO: 2503719 - RNA, 19 nt, Artificial Sequence
  Description of Artificial Sequence: Synthetic oligonucleotide
agucuaccacuguuagcaa

SEQ ID NO: 2503720 - RNA, 19 nt, Artificial Sequence
  Description of Artificial Sequence: Synthetic oligonucleotide
cuguccccaugccuaaauc

SEQ ID NO: 2503721 - RNA, 19 nt, Artificial Sequence
  Description of Artificial Sequence: Synthetic oligonucleotide
cauucgguucgguguuuuc

SEQ ID NO: 2503722 - RNA, 19 nt, Artificial Sequence
  Description of Artificial Sequence: Synthetic oligonucleotide
ccaggcaagucuaauugca

SEQ ID NO: 2503723 - RNA, 19 nt, Artificial Sequence
  Description of Artificial Sequence: Synthetic oligonucleotide
caagggaguuuaauaacau

SEQ ID NO: 2503724 - RNA, 19 nt, Artificial Sequence
  Description of Artificial Sequence: Synthetic oligonucleotide
gggaguuuaauaacauaaa

SEQ ID NO: 2503725 - RNA, 19 nt, Artificial Sequence
  Description of Artificial Sequence: Synthetic oligonucleotide
gcuagaagccuaaccaaga

SEQ ID NO: 2503726 - RNA, 19 nt, Artificial Sequence
  Description of Artificial Sequence: Synthetic oligonucleotide
  modified_base (18)..(18): a, c, u, g, unknown or other
gggucagguaagauacang

SEQ ID NO: 2503727 - RNA, 19 nt, Artificial Sequence
  Description of Artificial Sequence: Synthetic oligonucleotide
cgcauuucugcucuuagca

SEQ ID NO: 2503728 - RNA, 19 nt, Artificial Sequence
  Description of Artificial Sequence: Synthetic oligonucleotide
  modified_base (18)..(18): a, c, u, g, unknown or other
ccaaaagggucaguuugng

SEQ ID NO: 2503729 - RNA, 19 nt, Artificial Sequence
  Description of Artificial Sequence: Synthetic oligonucleotide
gcauuaaacuaaauuggua

SEQ ID NO: 2503730 - RNA, 19 nt, Artificial Sequence
  Description of Artificial Sequence: Synthetic oligonucleotide
aguuacugucaaagcuuca

SEQ ID NO: 2503731 - RNA, 19 nt, Artificial Sequence
  Description of Artificial Sequence: Synthetic oligonucleotide
ggaaaacucugcauagaaa

SEQ ID NO: 2503732 - RNA, 19 nt, Artificial Sequence
  Description of Artificial Sequence: Synthetic oligonucleotide
caugaauguuugccaaugu

SEQ ID NO: 2503733 - RNA, 19 nt, Artificial Sequence
  Description of Artificial Sequence: Synthetic oligonucleotide
gaacagucgaagacugagu

SEQ ID NO: 2503734 - RNA, 19 nt, Artificial Sequence
  Description of Artificial Sequence: Synthetic oligonucleotide
acugagucuuaagcaucca

SEQ ID NO: 2503735 - RNA, 19 nt, Artificial Sequence
  Description of Artificial Sequence: Synthetic oligonucleotide
ccaagaaccccgagcuaag

SEQ ID NO: 2503736 - RNA, 19 nt, Artificial Sequence
  Description of Artificial Sequence: Synthetic oligonucleotide
  modified_base (8)..(8): a, c, u, g, unknown or other
caguuugnguaguuacugu

SEQ ID NO: 2503737 - RNA, 19 nt, Artificial Sequence
  Description of Artificial Sequence: Synthetic oligonucleotide
gaccaccucaaugacaauu

SEQ ID NO: 2503738 - RNA, 19 nt, Artificial Sequence
  Description of Artificial Sequence: Synthetic oligonucleotide
ucauucgguucgguguuuu

SEQ ID NO: 2503739 - RNA, 19 nt, Artificial Sequence
  Description of Artificial Sequence: Synthetic oligonucleotide
  modified_base (17)..(17): a, c, u, g, unknown or other
caaaagggucaguuugngu

SEQ ID NO: 2503740 - RNA, 19 nt, Artificial Sequence
  Description of Artificial Sequence: Synthetic oligonucleotide
ucgguucgguguuuucauu

SEQ ID NO: 2503741 - RNA, 19 nt, Artificial Sequence
  Description of Artificial Sequence: Synthetic oligonucleotide
uacucuccccaaccacuuu

SEQ ID NO: 2503742 - RNA, 19 nt, Artificial Sequence
  Description of Artificial Sequence: Synthetic oligonucleotide
uagcacugaccaccucaau

SEQ ID NO: 2503743 - RNA, 19 nt, Artificial Sequence
  Description of Artificial Sequence: Synthetic oligonucleotide
augaagaacuugagaccau

SEQ ID NO: 2503744 - RNA, 19 nt, Artificial Sequence
  Description of Artificial Sequence: Synthetic oligonucleotide
cagucgaagacugagucuu

SEQ ID NO: 2503745 - RNA, 19 nt, Artificial Sequence
  Description of Artificial Sequence: Synthetic oligonucleotide
gcaagucuaauugcaucuc

SEQ ID NO: 2503746 - RNA, 19 nt, Artificial Sequence
  Description of Artificial Sequence: Synthetic oligonucleotide
ggaccacgcacauuuucaa

SEQ ID NO: 2503747 - RNA, 19 nt, Artificial Sequence
  Description of Artificial Sequence: Synthetic oligonucleotide
aaccccgagcuaagucugu

SEQ ID NO: 2503748 - RNA, 19 nt, Artificial Sequence
  Description of Artificial Sequence: Synthetic oligonucleotide
accccgagcuaagucugug

SEQ ID NO: 2503749 - RNA, 19 nt, Artificial Sequence
  Description of Artificial Sequence: Synthetic oligonucleotide
ccuaaccaagaaccccgag

SEQ ID NO: 2503750 - RNA, 19 nt, Artificial Sequence
  Description of Artificial Sequence: Synthetic oligonucleotide
cagcuacucuccccaacca

SEQ ID NO: 2503751 - RNA, 19 nt, Artificial Sequence
  Description of Artificial Sequence: Synthetic oligonucleotide
ccccgagcuaagucugugg

SEQ ID NO: 2503752 - RNA, 19 nt, Artificial Sequence
  Description of Artificial Sequence: Synthetic oligonucleotide
caacuacugcagggucagg

SEQ ID NO: 2503753 - RNA, 19 nt, Artificial Sequence
  Description of Artificial Sequence: Synthetic oligonucleotide
agaagacaccugaccugga

SEQ ID NO: 2503754 - RNA, 19 nt, Artificial Sequence
  Description of Artificial Sequence: Synthetic oligonucleotide
caggcaagucuaauugcau

SEQ ID NO: 2503755 - RNA, 19 nt, Artificial Sequence
  Description of Artificial Sequence: Synthetic oligonucleotide
gguacccuguuuuguucaa

SEQ ID NO: 2503756 - RNA, 19 nt, Artificial Sequence
  Description of Artificial Sequence: Synthetic oligonucleotide
cccgagcuaagucugugga

SEQ ID NO: 2503757 - RNA, 19 nt, Artificial Sequence
  Description of Artificial Sequence: Synthetic oligonucleotide
gcuacucuccccaaccacu

SEQ ID NO: 2503758 - RNA, 19 nt, Artificial Sequence
  Description of Artificial Sequence: Synthetic oligonucleotide
cacgcacauuuucaagagu

SEQ ID NO: 2503759 - RNA, 19 nt, Artificial Sequence
  Description of Artificial Sequence: Synthetic oligonucleotide
cuacucuccccaaccacuu

SEQ ID NO: 2503760 - RNA, 19 nt, Artificial Sequence
  Description of Artificial Sequence: Synthetic oligonucleotide
  modified_base (13)..(13): a, c, u, g, unknown or other
agggucaguuugnguaguu

SEQ ID NO: 2503761 - RNA, 19 nt, Artificial Sequence
  Description of Artificial Sequence: Synthetic oligonucleotide
guccccaugccuaaaucuu

SEQ ID NO: 2503762 - RNA, 19 nt, Artificial Sequence
  Description of Artificial Sequence: Synthetic oligonucleotide
gguucgguguuuucauuuu

SEQ ID NO: 2503763 - RNA, 19 nt, Artificial Sequence
  Description of Artificial Sequence: Synthetic oligonucleotide
uccuguccccaugccuaaa

SEQ ID NO: 2503764 - RNA, 19 nt, Artificial Sequence
  Description of Artificial Sequence: Synthetic oligonucleotide
guggagcuuccugucccca

SEQ ID NO: 2503765 - RNA, 19 nt, Artificial Sequence
  Description of Artificial Sequence: Synthetic oligonucleotide
ccaaugcuagaagccuaac

SEQ ID NO: 2503766 - RNA, 19 nt, Artificial Sequence
  Description of Artificial Sequence: Synthetic oligonucleotide
gggaacagucgaagacuga

SEQ ID NO: 2503767 - RNA, 19 nt, Artificial Sequence
  Description of Artificial Sequence: Synthetic oligonucleotide
caagaaccccgagcuaagu

SEQ ID NO: 2503768 - RNA, 19 nt, Artificial Sequence
  Description of Artificial Sequence: Synthetic oligonucleotide
gaaucgcauuucugcucuu

SEQ ID NO: 2503769 - RNA, 19 nt, Artificial Sequence
  Description of Artificial Sequence: Synthetic oligonucleotide
ccgagcuaagucuguggaa

SEQ ID NO: 2503770 - RNA, 19 nt, Artificial Sequence
  Description of Artificial Sequence: Synthetic oligonucleotide
gccuaaccaagaaccccga

SEQ ID NO: 2503771 - RNA, 19 nt, Artificial Sequence
  Description of Artificial Sequence: Synthetic oligonucleotide
cacuuucugcaaaguucuu

SEQ ID NO: 2503772 - RNA, 19 nt, Artificial Sequence
  Description of Artificial Sequence: Synthetic oligonucleotide
gcacagcuacucuccccaa

SEQ ID NO: 2503773 - RNA, 19 nt, Artificial Sequence
  Description of Artificial Sequence: Synthetic oligonucleotide
cgguucgguguuuucauuu

SEQ ID NO: 2503774 - RNA, 19 nt, Artificial Sequence
  Description of Artificial Sequence: Synthetic oligonucleotide
ccccaugccuaaaucuuuu

SEQ ID NO: 2503775 - RNA, 19 nt, Artificial Sequence
  Description of Artificial Sequence: Synthetic oligonucleotide
cugcagggucagguaagau

SEQ ID NO: 2503776 - RNA, 19 nt, Artificial Sequence
  Description of Artificial Sequence: Synthetic oligonucleotide
cucauucgguucgguguuu

SEQ ID NO: 2503777 - RNA, 19 nt, Artificial Sequence
  Description of Artificial Sequence: Synthetic oligonucleotide
ccccaaccacuuucugcaa

SEQ ID NO: 2503778 - RNA, 19 nt, Artificial Sequence
  Description of Artificial Sequence: Synthetic oligonucleotide
ccaggaccacgcacauuuu

SEQ ID NO: 2503779 - RNA, 19 nt, Artificial Sequence
  Description of Artificial Sequence: Synthetic oligonucleotide
  modified_base (1)..(1): a, c, u, g, unknown or other
nguaguuacugucaaagcu

SEQ ID NO: 2503780 - RNA, 19 nt, Artificial Sequence
  Description of Artificial Sequence: Synthetic oligonucleotide
auaaaaugcauucagaugc

SEQ ID NO: 2503781 - RNA, 19 nt, Artificial Sequence
  Description of Artificial Sequence: Synthetic oligonucleotide
uaauguugaaaucagaagg

SEQ ID NO: 2503782 - RNA, 19 nt, Artificial Sequence
  Description of Artificial Sequence: Synthetic oligonucleotide
aaugaaaguuucuauaaac

SEQ ID NO: 2503783 - RNA, 19 nt, Artificial Sequence
  Description of Artificial Sequence: Synthetic oligonucleotide
cuuaagaggaccaagaaag

SEQ ID NO: 2503784 - RNA, 19 nt, Artificial Sequence
  Description of Artificial Sequence: Synthetic oligonucleotide
agauauaauagccaacagc

SEQ ID NO: 2503785 - RNA, 19 nt, Artificial Sequence
  Description of Artificial Sequence: Synthetic oligonucleotide
acaaucuaugaauacaacc

SEQ ID NO: 2503786 - RNA, 19 nt, Artificial Sequence
  Description of Artificial Sequence: Synthetic oligonucleotide
aaaucagaaggccaacacc

SEQ ID NO: 2503787 - RNA, 19 nt, Artificial Sequence
  Description of Artificial Sequence: Synthetic oligonucleotide
ucuauaaacccucuguggg

SEQ ID NO: 2503788 - RNA, 19 nt, Artificial Sequence
  Description of Artificial Sequence: Synthetic oligonucleotide
caaucuaugaauacaaccc

SEQ ID NO: 2503789 - RNA, 19 nt, Artificial Sequence
  Description of Artificial Sequence: Synthetic oligonucleotide
augaauacaacccacagga

SEQ ID NO: 2503790 - RNA, 19 nt, Artificial Sequence
  Description of Artificial Sequence: Synthetic oligonucleotide
aaaguuccaucccagugcc

SEQ ID NO: 2503791 - RNA, 19 nt, Artificial Sequence
  Description of Artificial Sequence: Synthetic oligonucleotide
gauauaauagccaacagca

SEQ ID NO: 2503792 - RNA, 19 nt, Artificial Sequence
  Description of Artificial Sequence: Synthetic oligonucleotide
ucaaccauaagguauuucc

SEQ ID NO: 2503793 - RNA, 19 nt, Artificial Sequence
  Description of Artificial Sequence: Synthetic oligonucleotide
aauccuaugguggacacac

SEQ ID NO: 2503794 - RNA, 19 nt, Artificial Sequence
  Description of Artificial Sequence: Synthetic oligonucleotide
agaugaaccacauuaaugu

SEQ ID NO: 2503795 - RNA, 19 nt, Artificial Sequence
  Description of Artificial Sequence: Synthetic oligonucleotide
cuaggaguggauaaaaugc

SEQ ID NO: 2503796 - RNA, 19 nt, Artificial Sequence
  Description of Artificial Sequence: Synthetic oligonucleotide
guuacauagauauaauagc

SEQ ID NO: 2503797 - RNA, 19 nt, Artificial Sequence
  Description of Artificial Sequence: Synthetic oligonucleotide
uggauaaaaugcaaaauga

SEQ ID NO: 2503798 - RNA, 19 nt, Artificial Sequence
  Description of Artificial Sequence: Synthetic oligonucleotide
uuaauguugaaaucagaag

SEQ ID NO: 2503799 - RNA, 19 nt, Artificial Sequence
  Description of Artificial Sequence: Synthetic oligonucleotide
ucagaugcacaucaaaagc

SEQ ID NO: 2503800 - RNA, 19 nt, Artificial Sequence
  Description of Artificial Sequence: Synthetic oligonucleotide
uuggagaugaaccacauua

SEQ ID NO: 2503801 - RNA, 19 nt, Artificial Sequence
  Description of Artificial Sequence: Synthetic oligonucleotide
uaaaguuccaucccagugc

SEQ ID NO: 2503802 - RNA, 19 nt, Artificial Sequence
  Description of Artificial Sequence: Synthetic oligonucleotide
ugugaggauaacaugguug

SEQ ID NO: 2503803 - RNA, 19 nt, Artificial Sequence
  Description of Artificial Sequence: Synthetic oligonucleotide
gaauacaacccacaggagc

SEQ ID NO: 2503804 - RNA, 19 nt, Artificial Sequence
  Description of Artificial Sequence: Synthetic oligonucleotide
aaucuaugaauacaaccca

SEQ ID NO: 2503805 - RNA, 19 nt, Artificial Sequence
  Description of Artificial Sequence: Synthetic oligonucleotide
uauccaauaaaugugucug

SEQ ID NO: 2503806 - RNA, 19 nt, Artificial Sequence
  Description of Artificial Sequence: Synthetic oligonucleotide
aacucaaaguccaucugcc

SEQ ID NO: 2503807 - RNA, 19 nt, Artificial Sequence
  Description of Artificial Sequence: Synthetic oligonucleotide
aacuaaauauccaauaaau

SEQ ID NO: 2503808 - RNA, 19 nt, Artificial Sequence
  Description of Artificial Sequence: Synthetic oligonucleotide
gaauucaagacuccauucc

SEQ ID NO: 2503809 - RNA, 19 nt, Artificial Sequence
  Description of Artificial Sequence: Synthetic oligonucleotide
ugcaaauggauagagcagg

SEQ ID NO: 2503810 - RNA, 19 nt, Artificial Sequence
  Description of Artificial Sequence: Synthetic oligonucleotide
uacauagauauaauagcca

SEQ ID NO: 2503811 - RNA, 19 nt, Artificial Sequence
  Description of Artificial Sequence: Synthetic oligonucleotide
uuugcuuccgguaaugaaa

SEQ ID NO: 2503812 - RNA, 19 nt, Artificial Sequence
  Description of Artificial Sequence: Synthetic oligonucleotide
auagauauaauagccaaca

SEQ ID NO: 2503813 - RNA, 19 nt, Artificial Sequence
  Description of Artificial Sequence: Synthetic oligonucleotide
cagaugcacaucaaaagcg

SEQ ID NO: 2503814 - RNA, 19 nt, Artificial Sequence
  Description of Artificial Sequence: Synthetic oligonucleotide
aaauggauagagcaggauu

SEQ ID NO: 2503815 - RNA, 19 nt, Artificial Sequence
  Description of Artificial Sequence: Synthetic oligonucleotide
gagaggugcaaauggauag

SEQ ID NO: 2503816 - RNA, 19 nt, Artificial Sequence
  Description of Artificial Sequence: Synthetic oligonucleotide
aauacaacccacaggagca

SEQ ID NO: 2503817 - RNA, 19 nt, Artificial Sequence
  Description of Artificial Sequence: Synthetic oligonucleotide
aaugacuaggaguggauaa

SEQ ID NO: 2503818 - RNA, 19 nt, Artificial Sequence
  Description of Artificial Sequence: Synthetic oligonucleotide
gguuacauagauauaauag

SEQ ID NO: 2503819 - RNA, 19 nt, Artificial Sequence
  Description of Artificial Sequence: Synthetic oligonucleotide
auagccaacagcaaucaac

SEQ ID NO: 2503820 - RNA, 19 nt, Artificial Sequence
  Description of Artificial Sequence: Synthetic oligonucleotide
cuaugguggacacacagag

SEQ ID NO: 2503821 - RNA, 19 nt, Artificial Sequence
  Description of Artificial Sequence: Synthetic oligonucleotide
uagagcaucugccaugcag

SEQ ID NO: 2503822 - RNA, 19 nt, Artificial Sequence
  Description of Artificial Sequence: Synthetic oligonucleotide
guagaaggaacacagcaug

SEQ ID NO: 2503823 - RNA, 19 nt, Artificial Sequence
  Description of Artificial Sequence: Synthetic oligonucleotide
accauaagguauuuccaac

SEQ ID NO: 2503824 - RNA, 19 nt, Artificial Sequence
  Description of Artificial Sequence: Synthetic oligonucleotide
auaauagccaacagcaauc

SEQ ID NO: 2503825 - RNA, 19 nt, Artificial Sequence
  Description of Artificial Sequence: Synthetic oligonucleotide
aagaggaccaagaaagcag

SEQ ID NO: 2503826 - RNA, 19 nt, Artificial Sequence
  Description of Artificial Sequence: Synthetic oligonucleotide
uagauauaauagccaacag

SEQ ID NO: 2503827 - RNA, 19 nt, Artificial Sequence
  Description of Artificial Sequence: Synthetic oligonucleotide
aauauccaauaaauguguc

SEQ ID NO: 2503828 - RNA, 19 nt, Artificial Sequence
  Description of Artificial Sequence: Synthetic oligonucleotide
agcauguggguaaaguucc

SEQ ID NO: 2503829 - RNA, 19 nt, Artificial Sequence
  Description of Artificial Sequence: Synthetic oligonucleotide
cuggcguuucacuagauac

SEQ ID NO: 2503830 - RNA, 19 nt, Artificial Sequence
  Description of Artificial Sequence: Synthetic oligonucleotide
uacacaaucuaugaauaca

SEQ ID NO: 2503831 - RNA, 19 nt, Artificial Sequence
  Description of Artificial Sequence: Synthetic oligonucleotide
cuauaaacccucugugggg

SEQ ID NO: 2503832 - RNA, 19 nt, Artificial Sequence
  Description of Artificial Sequence: Synthetic oligonucleotide
uaggaguggauaaaaugca

SEQ ID NO: 2503833 - RNA, 19 nt, Artificial Sequence
  Description of Artificial Sequence: Synthetic oligonucleotide
gaguggauaaaaugcauuc

SEQ ID NO: 2503834 - RNA, 19 nt, Artificial Sequence
  Description of Artificial Sequence: Synthetic oligonucleotide
uugcuuccgguaaugaaag

SEQ ID NO: 2503835 - RNA, 19 nt, Artificial Sequence
  Description of Artificial Sequence: Synthetic oligonucleotide
uuaagaggaccaagaaagc

SEQ ID NO: 2503836 - RNA, 19 nt, Artificial Sequence
  Description of Artificial Sequence: Synthetic oligonucleotide
auauccaauaaaugugucu

SEQ ID NO: 2503837 - RNA, 19 nt, Artificial Sequence
  Description of Artificial Sequence: Synthetic oligonucleotide
aacaccuacacaaucuaug

SEQ ID NO: 2503838 - RNA, 19 nt, Artificial Sequence
  Description of Artificial Sequence: Synthetic oligonucleotide
cuaugaauacaacccacag

SEQ ID NO: 2503839 - RNA, 19 nt, Artificial Sequence
  Description of Artificial Sequence: Synthetic oligonucleotide
guccauacagcacagcgag

SEQ ID NO: 2503840 - RNA, 19 nt, Artificial Sequence
  Description of Artificial Sequence: Synthetic oligonucleotide
acuaaauauccaauaaaug

SEQ ID NO: 2503841 - RNA, 19 nt, Artificial Sequence
  Description of Artificial Sequence: Synthetic oligonucleotide
guaaaguuccaucccagug

SEQ ID NO: 2503842 - RNA, 19 nt, Artificial Sequence
  Description of Artificial Sequence: Synthetic oligonucleotide
uguagaaggaacacagcau

SEQ ID NO: 2503843 - RNA, 19 nt, Artificial Sequence
  Description of Artificial Sequence: Synthetic oligonucleotide
ggugcaaauggauagagca

SEQ ID NO: 2503844 - RNA, 19 nt, Artificial Sequence
  Description of Artificial Sequence: Synthetic oligonucleotide
ucugccaugcagcaaacuc

SEQ ID NO: 2503845 - RNA, 19 nt, Artificial Sequence
  Description of Artificial Sequence: Synthetic oligonucleotide
ucccauguccagcacaaag

SEQ ID NO: 2503846 - RNA, 19 nt, Artificial Sequence
  Description of Artificial Sequence: Synthetic oligonucleotide
acuagauacuuguuggaga

SEQ ID NO: 2503847 - RNA, 19 nt, Artificial Sequence
  Description of Artificial Sequence: Synthetic oligonucleotide
aauggauagagcaggauua

SEQ ID NO: 2503848 - RNA, 19 nt, Artificial Sequence
  Description of Artificial Sequence: Synthetic oligonucleotide
accuacacaaucuaugaau

SEQ ID NO: 2503849 - RNA, 19 nt, Artificial Sequence
  Description of Artificial Sequence: Synthetic oligonucleotide
caguccauacagcacagcg

SEQ ID NO: 2503850 - RNA, 19 nt, Artificial Sequence
  Description of Artificial Sequence: Synthetic oligonucleotide
ugaaguacuugguagcauc

SEQ ID NO: 2503851 - RNA, 19 nt, Artificial Sequence
  Description of Artificial Sequence: Synthetic oligonucleotide
gguauuuccaacuaaauau

SEQ ID NO: 2503852 - RNA, 19 nt, Artificial Sequence
  Description of Artificial Sequence: Synthetic oligonucleotide
cacaucauagucucuacuc

SEQ ID NO: 2503853 - RNA, 19 nt, Artificial Sequence
  Description of Artificial Sequence: Synthetic oligonucleotide
acuuguuggagaugaacca

SEQ ID NO: 2503854 - RNA, 19 nt, Artificial Sequence
  Description of Artificial Sequence: Synthetic oligonucleotide
cauagauauaauagccaac

SEQ ID NO: 2503855 - RNA, 19 nt, Artificial Sequence
  Description of Artificial Sequence: Synthetic oligonucleotide
gaggauaacaugguugaug

SEQ ID NO: 2503856 - RNA, 19 nt, Artificial Sequence
  Description of Artificial Sequence: Synthetic oligonucleotide
uggguaaaguuccauccca

SEQ ID NO: 2503857 - RNA, 19 nt, Artificial Sequence
  Description of Artificial Sequence: Synthetic oligonucleotide
uaagaggaccaagaaagca

SEQ ID NO: 2503858 - RNA, 19 nt, Artificial Sequence
  Description of Artificial Sequence: Synthetic oligonucleotide
acuuaagaggaccaagaaa

SEQ ID NO: 2503859 - RNA, 19 nt, Artificial Sequence
  Description of Artificial Sequence: Synthetic oligonucleotide
cauagucucuacucuggcg

SEQ ID NO: 2503860 - RNA, 19 nt, Artificial Sequence
  Description of Artificial Sequence: Synthetic oligonucleotide
ugauccuuuguuugcuucc

SEQ ID NO: 2503861 - RNA, 19 nt, Artificial Sequence
  Description of Artificial Sequence: Synthetic oligonucleotide
auguggguaaaguuccauc

SEQ ID NO: 2503862 - RNA, 19 nt, Artificial Sequence
  Description of Artificial Sequence: Synthetic oligonucleotide
aacagcaaucaaccauaag

SEQ ID NO: 2503863 - RNA, 19 nt, Artificial Sequence
  Description of Artificial Sequence: Synthetic oligonucleotide
aucuaugaauacaacccac

SEQ ID NO: 2503864 - RNA, 19 nt, Artificial Sequence
  Description of Artificial Sequence: Synthetic oligonucleotide
ugaauacaacccacaggag

SEQ ID NO: 2503865 - RNA, 19 nt, Artificial Sequence
  Description of Artificial Sequence: Synthetic oligonucleotide
ucuguggggaagugaacag

SEQ ID NO: 2503866 - RNA, 19 nt, Artificial Sequence
  Description of Artificial Sequence: Synthetic oligonucleotide
uauaaacccucugugggga

SEQ ID NO: 2503867 - RNA, 19 nt, Artificial Sequence
  Description of Artificial Sequence: Synthetic oligonucleotide
ucuacucuggcguuucacu

SEQ ID NO: 2503868 - RNA, 19 nt, Artificial Sequence
  Description of Artificial Sequence: Synthetic oligonucleotide
cacugaaguacuugguagc

SEQ ID NO: 2503869 - RNA, 19 nt, Artificial Sequence
  Description of Artificial Sequence: Synthetic oligonucleotide
gacacuuaagaggaccaag

SEQ ID NO: 2503870 - RNA, 19 nt, Artificial Sequence
  Description of Artificial Sequence: Synthetic oligonucleotide
gugaggauaacaugguuga

SEQ ID NO: 2503871 - RNA, 19 nt, Artificial Sequence
  Description of Artificial Sequence: Synthetic oligonucleotide
uccccugcauugaagaacu

SEQ ID NO: 2503872 - RNA, 19 nt, Artificial Sequence
  Description of Artificial Sequence: Synthetic oligonucleotide
ucauagucucuacucuggc

SEQ ID NO: 2503873 - RNA, 19 nt, Artificial Sequence
  Description of Artificial Sequence: Synthetic oligonucleotide
caagacuccauuccccugc

SEQ ID NO: 2503874 - RNA, 19 nt, Artificial Sequence
  Description of Artificial Sequence: Synthetic oligonucleotide
agcgacaguccauacagca

SEQ ID NO: 2503875 - RNA, 19 nt, Artificial Sequence
  Description of Artificial Sequence: Synthetic oligonucleotide
aucccuggaauucaagacu

SEQ ID NO: 2503876 - RNA, 19 nt, Artificial Sequence
  Description of Artificial Sequence: Synthetic oligonucleotide
uucaagacuccauuccccu

SEQ ID NO: 2503877 - RNA, 19 nt, Artificial Sequence
  Description of Artificial Sequence: Synthetic oligonucleotide
agcuggauaaaaugcaaaa

SEQ ID NO: 2503878 - RNA, 19 nt, Artificial Sequence
  Description of Artificial Sequence: Synthetic oligonucleotide
caucauagucucuacucug

SEQ ID NO: 2503879 - RNA, 19 nt, Artificial Sequence
  Description of Artificial Sequence: Synthetic oligonucleotide
uagaaggaacacagcaugu

SEQ ID NO: 2503880 - RNA, 19 nt, Artificial Sequence
  Description of Artificial Sequence: Synthetic oligonucleotide
agaggaccaagaaagcagg

SEQ ID NO: 2503881 - RNA, 19 nt, Artificial Sequence
  Description of Artificial Sequence: Synthetic oligonucleotide
uacucuggcguuucacuag

SEQ ID NO: 2503882 - RNA, 19 nt, Artificial Sequence
  Description of Artificial Sequence: Synthetic oligonucleotide
cacaucaaaagcguacccc

SEQ ID NO: 2503883 - RNA, 19 nt, Artificial Sequence
  Description of Artificial Sequence: Synthetic oligonucleotide
augaaccacauuaauguug

SEQ ID NO: 2503884 - RNA, 19 nt, Artificial Sequence
  Description of Artificial Sequence: Synthetic oligonucleotide
ugugugucucgcugcaucc

SEQ ID NO: 2503885 - RNA, 19 nt, Artificial Sequence
  Description of Artificial Sequence: Synthetic oligonucleotide
gaaagcagggucaucucug

SEQ ID NO: 2503886 - RNA, 19 nt, Artificial Sequence
  Description of Artificial Sequence: Synthetic oligonucleotide
auaagguauuuccaacuaa

SEQ ID NO: 2503887 - RNA, 19 nt, Artificial Sequence
  Description of Artificial Sequence: Synthetic oligonucleotide
uaauagccaacagcaauca

SEQ ID NO: 2503888 - RNA, 19 nt, Artificial Sequence
  Description of Artificial Sequence: Synthetic oligonucleotide
uggagaugaaccacauuaa

SEQ ID NO: 2503889 - RNA, 19 nt, Artificial Sequence
  Description of Artificial Sequence: Synthetic oligonucleotide
cuuguagcguuuugcuccg

SEQ ID NO: 2503890 - RNA, 19 nt, Artificial Sequence
  Description of Artificial Sequence: Synthetic oligonucleotide
gauccuuuguuugcuuccg

SEQ ID NO: 2503891 - RNA, 19 nt, Artificial Sequence
  Description of Artificial Sequence: Synthetic oligonucleotide
uuccaacuaaauauccaau

SEQ ID NO: 2503892 - RNA, 19 nt, Artificial Sequence
  Description of Artificial Sequence: Synthetic oligonucleotide
agcaaacucaaaguccauc

SEQ ID NO: 2503893 - RNA, 19 nt, Artificial Sequence
  Description of Artificial Sequence: Synthetic oligonucleotide
uagcguuuugcuccggcug

SEQ ID NO: 2503894 - RNA, 19 nt, Artificial Sequence
  Description of Artificial Sequence: Synthetic oligonucleotide
uguagcguuuugcuccggc

SEQ ID NO: 2503895 - RNA, 19 nt, Artificial Sequence
  Description of Artificial Sequence: Synthetic oligonucleotide
ucacuagauacuuguugga

SEQ ID NO: 2503896 - RNA, 19 nt, Artificial Sequence
  Description of Artificial Sequence: Synthetic oligonucleotide
ugugucugugaggauaaca

SEQ ID NO: 2503897 - RNA, 19 nt, Artificial Sequence
  Description of Artificial Sequence: Synthetic oligonucleotide
uggcguuucacuagauacu

SEQ ID NO: 2503898 - RNA, 19 nt, Artificial Sequence
  Description of Artificial Sequence: Synthetic oligonucleotide
uuuguuugcuuccgguaau

SEQ ID NO: 2503899 - RNA, 19 nt, Artificial Sequence
  Description of Artificial Sequence: Synthetic oligonucleotide
gauagagcaggauuacugu

SEQ ID NO: 2503900 - RNA, 19 nt, Artificial Sequence
  Description of Artificial Sequence: Synthetic oligonucleotide
auacagcacagcgagaggu

SEQ ID NO: 2503901 - RNA, 19 nt, Artificial Sequence
  Description of Artificial Sequence: Synthetic oligonucleotide
uuccaucccagugccagcg

SEQ ID NO: 2503902 - RNA, 19 nt, Artificial Sequence
  Description of Artificial Sequence: Synthetic oligonucleotide
auggauagagcaggauuac

SEQ ID NO: 2503903 - RNA, 19 nt, Artificial Sequence
  Description of Artificial Sequence: Synthetic oligonucleotide
uccgguaaugaaaguuucu

SEQ ID NO: 2503904 - RNA, 19 nt, Artificial Sequence
  Description of Artificial Sequence: Synthetic oligonucleotide
cacaaucuaugaauacaac

SEQ ID NO: 2503905 - RNA, 19 nt, Artificial Sequence
  Description of Artificial Sequence: Synthetic oligonucleotide
uuccgguaaugaaaguuuc

SEQ ID NO: 2503906 - RNA, 19 nt, Artificial Sequence
  Description of Artificial Sequence: Synthetic oligonucleotide
ccagcacaaagccaaaucc

SEQ ID NO: 2503907 - RNA, 19 nt, Artificial Sequence
  Description of Artificial Sequence: Synthetic oligonucleotide
gaggugcaaauggauagag

SEQ ID NO: 2503908 - RNA, 19 nt, Artificial Sequence
  Description of Artificial Sequence: Synthetic oligonucleotide
aggaacacagcaugugggu

SEQ ID NO: 2503909 - RNA, 19 nt, Artificial Sequence
  Description of Artificial Sequence: Synthetic oligonucleotide
uacagcacagcgagaggug

SEQ ID NO: 2503910 - RNA, 19 nt, Artificial Sequence
  Description of Artificial Sequence: Synthetic oligonucleotide
cacuagauacuuguuggag

SEQ ID NO: 2503911 - RNA, 19 nt, Artificial Sequence
  Description of Artificial Sequence: Synthetic oligonucleotide
ugucucgcugcaucccugg

SEQ ID NO: 2503912 - RNA, 19 nt, Artificial Sequence
  Description of Artificial Sequence: Synthetic oligonucleotide
aaaaugacuaggaguggau

SEQ ID NO: 2503913 - RNA, 19 nt, Artificial Sequence
  Description of Artificial Sequence: Synthetic oligonucleotide
guacuugguagcaucuucc

SEQ ID NO: 2503914 - RNA, 19 nt, Artificial Sequence
  Description of Artificial Sequence: Synthetic oligonucleotide
ucacccuguacuuguagaa

SEQ ID NO: 2503915 - RNA, 19 nt, Artificial Sequence
  Description of Artificial Sequence: Synthetic oligonucleotide
uccuuuguuugcuuccggu

SEQ ID NO: 2503916 - RNA, 19 nt, Artificial Sequence
  Description of Artificial Sequence: Synthetic oligonucleotide
uguaucccaggaagguuac

SEQ ID NO: 2503917 - RNA, 19 nt, Artificial Sequence
  Description of Artificial Sequence: Synthetic oligonucleotide
agccagacacuuaagagga

SEQ ID NO: 2503918 - RNA, 19 nt, Artificial Sequence
  Description of Artificial Sequence: Synthetic oligonucleotide
ggauagagcaggauuacug

SEQ ID NO: 2503919 - RNA, 19 nt, Artificial Sequence
  Description of Artificial Sequence: Synthetic oligonucleotide
aauagccaacagcaaucaa

SEQ ID NO: 2503920 - RNA, 19 nt, Artificial Sequence
  Description of Artificial Sequence: Synthetic oligonucleotide
uguuggagaugaaccacau

SEQ ID NO: 2503921 - RNA, 19 nt, Artificial Sequence
  Description of Artificial Sequence: Synthetic oligonucleotide
ugugucucgcugcaucccu

SEQ ID NO: 2503922 - RNA, 19 nt, Artificial Sequence
  Description of Artificial Sequence: Synthetic oligonucleotide
cucaaaguccaucugccga

SEQ ID NO: 2503923 - RNA, 19 nt, Artificial Sequence
  Description of Artificial Sequence: Synthetic oligonucleotide
uacuugguagcaucuuccu

SEQ ID NO: 2503924 - RNA, 19 nt, Artificial Sequence
  Description of Artificial Sequence: Synthetic oligonucleotide
uaucccaggaagguuacau

SEQ ID NO: 2503925 - RNA, 19 nt, Artificial Sequence
  Description of Artificial Sequence: Synthetic oligonucleotide
aaaugacuaggaguggaua

SEQ ID NO: 2503926 - RNA, 19 nt, Artificial Sequence
  Description of Artificial Sequence: Synthetic oligonucleotide
gguacuuguagcguuuugc

SEQ ID NO: 2503927 - RNA, 19 nt, Artificial Sequence
  Description of Artificial Sequence: Synthetic oligonucleotide
cauuaauguugaaaucaga

SEQ ID NO: 2503928 - RNA, 19 nt, Artificial Sequence
  Description of Artificial Sequence: Synthetic oligonucleotide
ccagcgacaguccauacag

SEQ ID NO: 2503929 - RNA, 19 nt, Artificial Sequence
  Description of Artificial Sequence: Synthetic oligonucleotide
ucaagacuccauuccccug

SEQ ID NO: 2503930 - RNA, 19 nt, Artificial Sequence
  Description of Artificial Sequence: Synthetic oligonucleotide
caaauccuaugguggacac

SEQ ID NO: 2503931 - RNA, 19 nt, Artificial Sequence
  Description of Artificial Sequence: Synthetic oligonucleotide
acacuuaagaggaccaaga

SEQ ID NO: 2503932 - RNA, 19 nt, Artificial Sequence
  Description of Artificial Sequence: Synthetic oligonucleotide
ugcaucccuggaauucaag

SEQ ID NO: 2503933 - RNA, 19 nt, Artificial Sequence
  Description of Artificial Sequence: Synthetic oligonucleotide
agcaaucaaccauaaggua

SEQ ID NO: 2503934 - RNA, 19 nt, Artificial Sequence
  Description of Artificial Sequence: Synthetic oligonucleotide
acugaaguacuugguagca

SEQ ID NO: 2503935 - RNA, 19 nt, Artificial Sequence
  Description of Artificial Sequence: Synthetic oligonucleotide
aggugcaaauggauagagc

SEQ ID NO: 2503936 - RNA, 19 nt, Artificial Sequence
  Description of Artificial Sequence: Synthetic oligonucleotide
agaugcacaucaaaagcgu

SEQ ID NO: 2503937 - RNA, 19 nt, Artificial Sequence
  Description of Artificial Sequence: Synthetic oligonucleotide
uccaucugccgaaaucgaa

SEQ ID NO: 2503938 - RNA, 19 nt, Artificial Sequence
  Description of Artificial Sequence: Synthetic oligonucleotide
ggaccaagaaagcaggguc

SEQ ID NO: 2503939 - RNA, 19 nt, Artificial Sequence
  Description of Artificial Sequence: Synthetic oligonucleotide
auagagcaggauuacugua

SEQ ID NO: 2503940 - RNA, 19 nt, Artificial Sequence
  Description of Artificial Sequence: Synthetic oligonucleotide
cuuuguuugcuuccgguaa

SEQ ID NO: 2503941 - RNA, 19 nt, Artificial Sequence
  Description of Artificial Sequence: Synthetic oligonucleotide
agccuucugagguacuugu

SEQ ID NO: 2503942 - RNA, 19 nt, Artificial Sequence
  Description of Artificial Sequence: Synthetic oligonucleotide
uuccccugcauugaagaac

SEQ ID NO: 2503943 - RNA, 19 nt, Artificial Sequence
  Description of Artificial Sequence: Synthetic oligonucleotide
uccacaucauagucucuac

SEQ ID NO: 2503944 - RNA, 19 nt, Artificial Sequence
  Description of Artificial Sequence: Synthetic oligonucleotide
gugcaaauggauagagcag

SEQ ID NO: 2503945 - RNA, 19 nt, Artificial Sequence
  Description of Artificial Sequence: Synthetic oligonucleotide
cagcaaucaaccauaaggu

SEQ ID NO: 2503946 - RNA, 19 nt, Artificial Sequence
  Description of Artificial Sequence: Synthetic oligonucleotide
aucaaccauaagguauuuc

SEQ ID NO: 2503947 - RNA, 19 nt, Artificial Sequence
  Description of Artificial Sequence: Synthetic oligonucleotide
auccuuuguuugcuuccgg

SEQ ID NO: 2503948 - RNA, 19 nt, Artificial Sequence
  Description of Artificial Sequence: Synthetic oligonucleotide
uuugcuccggcuguguguc

SEQ ID NO: 2503949 - RNA, 19 nt, Artificial Sequence
  Description of Artificial Sequence: Synthetic oligonucleotide
caaaaugacuaggagugga

SEQ ID NO: 2503950 - RNA, 19 nt, Artificial Sequence
  Description of Artificial Sequence: Synthetic oligonucleotide
caugcagcaaacucaaagu

SEQ ID NO: 2503951 - RNA, 19 nt, Artificial Sequence
  Description of Artificial Sequence: Synthetic oligonucleotide
agcaggauuacuguauuuu

SEQ ID NO: 2503952 - RNA, 19 nt, Artificial Sequence
  Description of Artificial Sequence: Synthetic oligonucleotide
agcguuuugcuccggcugu

SEQ ID NO: 2503953 - RNA, 19 nt, Artificial Sequence
  Description of Artificial Sequence: Synthetic oligonucleotide
cugauccuuuguuugcuuc

SEQ ID NO: 2503954 - RNA, 19 nt, Artificial Sequence
  Description of Artificial Sequence: Synthetic oligonucleotide
ugagguacuuguagcguuu

SEQ ID NO: 2503955 - RNA, 19 nt, Artificial Sequence
  Description of Artificial Sequence: Synthetic oligonucleotide
uaaacccucuguggggaag

SEQ ID NO: 2503956 - RNA, 19 nt, Artificial Sequence
  Description of Artificial Sequence: Synthetic oligonucleotide
ugaacagguagagcaucug

SEQ ID NO: 2503957 - RNA, 19 nt, Artificial Sequence
  Description of Artificial Sequence: Synthetic oligonucleotide
gaccaagaaagcaggguca

SEQ ID NO: 2503958 - RNA, 19 nt, Artificial Sequence
  Description of Artificial Sequence: Synthetic oligonucleotide
uguuugcuuccgguaauga

SEQ ID NO: 2503959 - RNA, 19 nt, Artificial Sequence
  Description of Artificial Sequence: Synthetic oligonucleotide
cuucacccuguacuuguag

SEQ ID NO: 2503960 - RNA, 19 nt, Artificial Sequence
  Description of Artificial Sequence: Synthetic oligonucleotide
cuguggggaagugaacagg

SEQ ID NO: 2503961 - RNA, 19 nt, Artificial Sequence
  Description of Artificial Sequence: Synthetic oligonucleotide
cauaagguauuuccaacua

SEQ ID NO: 2503962 - RNA, 19 nt, Artificial Sequence
  Description of Artificial Sequence: Synthetic oligonucleotide
cuagauacuuguuggagau

SEQ ID NO: 2503963 - RNA, 19 nt, Artificial Sequence
  Description of Artificial Sequence: Synthetic oligonucleotide
acagcgagaggugcaaaug

SEQ ID NO: 2503964 - RNA, 19 nt, Artificial Sequence
  Description of Artificial Sequence: Synthetic oligonucleotide
gacaguccauacagcacag

SEQ ID NO: 2503965 - RNA, 19 nt, Artificial Sequence
  Description of Artificial Sequence: Synthetic oligonucleotide
ucucgcugcaucccuggaa

SEQ ID NO: 2503966 - RNA, 19 nt, Artificial Sequence
  Description of Artificial Sequence: Synthetic oligonucleotide
aaacccucuguggggaagu

SEQ ID NO: 2503967 - RNA, 19 nt, Artificial Sequence
  Description of Artificial Sequence: Synthetic oligonucleotide
cacagagccagacacuuaa

SEQ ID NO: 2503968 - RNA, 19 nt, Artificial Sequence
  Description of Artificial Sequence: Synthetic oligonucleotide
aacccacaggagcagcuuu

SEQ ID NO: 2503969 - RNA, 19 nt, Artificial Sequence
  Description of Artificial Sequence: Synthetic oligonucleotide
guuugcuuccgguaaugaa

SEQ ID NO: 2503970 - RNA, 19 nt, Artificial Sequence
  Description of Artificial Sequence: Synthetic oligonucleotide
aggaccaagaaagcagggu

SEQ ID NO: 2503971 - RNA, 19 nt, Artificial Sequence
  Description of Artificial Sequence: Synthetic oligonucleotide
cuguaucccaggaagguua

SEQ ID NO: 2503972 - RNA, 19 nt, Artificial Sequence
  Description of Artificial Sequence: Synthetic oligonucleotide
gguagagcaucugccaugc

SEQ ID NO: 2503973 - RNA, 19 nt, Artificial Sequence
  Description of Artificial Sequence: Synthetic oligonucleotide
guacuuguagcguuuugcu

SEQ ID NO: 2503974 - RNA, 19 nt, Artificial Sequence
  Description of Artificial Sequence: Synthetic oligonucleotide
gguggacacacagagccag

SEQ ID NO: 2503975 - RNA, 19 nt, Artificial Sequence
  Description of Artificial Sequence: Synthetic oligonucleotide
uccauuccccugcauugaa

SEQ ID NO: 2503976 - RNA, 19 nt, Artificial Sequence
  Description of Artificial Sequence: Synthetic oligonucleotide
ugguggacacacagagcca

SEQ ID NO: 2503977 - RNA, 19 nt, Artificial Sequence
  Description of Artificial Sequence: Synthetic oligonucleotide
uggauagagcaggauuacu

SEQ ID NO: 2503978 - RNA, 19 nt, Artificial Sequence
  Description of Artificial Sequence: Synthetic oligonucleotide
ucacuucacccuguacuug

SEQ ID NO: 2503979 - RNA, 19 nt, Artificial Sequence
  Description of Artificial Sequence: Synthetic oligonucleotide
auauaauagccaacagcaa

SEQ ID NO: 2503980 - RNA, 19 nt, Artificial Sequence
  Description of Artificial Sequence: Synthetic oligonucleotide
uagauacuuguuggagaug

SEQ ID NO: 2503981 - RNA, 19 nt, Artificial Sequence
  Description of Artificial Sequence: Synthetic oligonucleotide
agagcuggauaaaaugcaa

SEQ ID NO: 2503982 - RNA, 19 nt, Artificial Sequence
  Description of Artificial Sequence: Synthetic oligonucleotide
agaggugcaaauggauaga

SEQ ID NO: 2503983 - RNA, 19 nt, Artificial Sequence
  Description of Artificial Sequence: Synthetic oligonucleotide
uacaacccacaggagcagc

SEQ ID NO: 2503984 - RNA, 19 nt, Artificial Sequence
  Description of Artificial Sequence: Synthetic oligonucleotide
gggaagugaacagguagag

SEQ ID NO: 2503985 - RNA, 19 nt, Artificial Sequence
  Description of Artificial Sequence: Synthetic oligonucleotide
agguacuuguagcguuuug

SEQ ID NO: 2503986 - RNA, 19 nt, Artificial Sequence
  Description of Artificial Sequence: Synthetic oligonucleotide
augacuaggaguggauaaa

SEQ ID NO: 2503987 - RNA, 19 nt, Artificial Sequence
  Description of Artificial Sequence: Synthetic oligonucleotide
auacaacccacaggagcag

SEQ ID NO: 2503988 - RNA, 19 nt, Artificial Sequence
  Description of Artificial Sequence: Synthetic oligonucleotide
agggucaucucuggcccac

SEQ ID NO: 2503989 - RNA, 19 nt, Artificial Sequence
  Description of Artificial Sequence: Synthetic oligonucleotide
caucugccgaaaucgaaaa

SEQ ID NO: 2503990 - RNA, 19 nt, Artificial Sequence
  Description of Artificial Sequence: Synthetic oligonucleotide
aaucaaccauaagguauuu

SEQ ID NO: 2503991 - RNA, 19 nt, Artificial Sequence
  Description of Artificial Sequence: Synthetic oligonucleotide
gaugaaccacauuaauguu

SEQ ID NO: 2503992 - RNA, 19 nt, Artificial Sequence
  Description of Artificial Sequence: Synthetic oligonucleotide
cacuuaagaggaccaagaa

SEQ ID NO: 2503993 - RNA, 19 nt, Artificial Sequence
  Description of Artificial Sequence: Synthetic oligonucleotide
aaguacuugguagcaucuu

SEQ ID NO: 2503994 - RNA, 19 nt, Artificial Sequence
  Description of Artificial Sequence: Synthetic oligonucleotide
gcaaaaugacuaggagugg

SEQ ID NO: 2503995 - RNA, 19 nt, Artificial Sequence
  Description of Artificial Sequence: Synthetic oligonucleotide
caaucaaccauaagguauu

SEQ ID NO: 2503996 - RNA, 19 nt, Artificial Sequence
  Description of Artificial Sequence: Synthetic oligonucleotide
agccaacagcaaucaacca

SEQ ID NO: 2503997 - RNA, 19 nt, Artificial Sequence
  Description of Artificial Sequence: Synthetic oligonucleotide
ucucuacucuggcguuuca

SEQ ID NO: 2503998 - RNA, 19 nt, Artificial Sequence
  Description of Artificial Sequence: Synthetic oligonucleotide
gagcuggauaaaaugcaaa

SEQ ID NO: 2503999 - RNA, 19 nt, Artificial Sequence
  Description of Artificial Sequence: Synthetic oligonucleotide
caggagcagcuuuauuguc

SEQ ID NO: 2504000 - RNA, 19 nt, Artificial Sequence
  Description of Artificial Sequence: Synthetic oligonucleotide
ggaagugaacagguagagc

SEQ ID NO: 2504001 - RNA, 19 nt, Artificial Sequence
  Description of Artificial Sequence: Synthetic oligonucleotide
guuccaucccagugccagc

SEQ ID NO: 2504002 - RNA, 19 nt, Artificial Sequence
  Description of Artificial Sequence: Synthetic oligonucleotide
cuuccgguaaugaaaguuu

SEQ ID NO: 2504003 - RNA, 19 nt, Artificial Sequence
  Description of Artificial Sequence: Synthetic oligonucleotide
agcgagaggugcaaaugga

SEQ ID NO: 2504004 - RNA, 19 nt, Artificial Sequence
  Description of Artificial Sequence: Synthetic oligonucleotide
acuguaucccaggaagguu

SEQ ID NO: 2504005 - RNA, 19 nt, Artificial Sequence
  Description of Artificial Sequence: Synthetic oligonucleotide
auaaacccucuguggggaa

SEQ ID NO: 2504006 - RNA, 19 nt, Artificial Sequence
  Description of Artificial Sequence: Synthetic oligonucleotide
gcaaucaaccauaagguau

SEQ ID NO: 2504007 - RNA, 19 nt, Artificial Sequence
  Description of Artificial Sequence: Synthetic oligonucleotide
ccuacacaaucuaugaaua

SEQ ID NO: 2504008 - RNA, 19 nt, Artificial Sequence
  Description of Artificial Sequence: Synthetic oligonucleotide
caucucuggcccacugauc

SEQ ID NO: 2504009 - RNA, 19 nt, Artificial Sequence
  Description of Artificial Sequence: Synthetic oligonucleotide
ugaggauaacaugguugau

SEQ ID NO: 2504010 - RNA, 19 nt, Artificial Sequence
  Description of Artificial Sequence: Synthetic oligonucleotide
cagcgacaguccauacagc

SEQ ID NO: 2504011 - RNA, 19 nt, Artificial Sequence
  Description of Artificial Sequence: Synthetic oligonucleotide
uccaucccagugccagcga

SEQ ID NO: 2504012 - RNA, 19 nt, Artificial Sequence
  Description of Artificial Sequence: Synthetic oligonucleotide
cccagugccagcgacaguc

SEQ ID NO: 2504013 - RNA, 19 nt, Artificial Sequence
  Description of Artificial Sequence: Synthetic oligonucleotide
aaauggcagugcacuguau

SEQ ID NO: 2504014 - RNA, 19 nt, Artificial Sequence
  Description of Artificial Sequence: Synthetic oligonucleotide
gauacuuguuggagaugaa

SEQ ID NO: 2504015 - RNA, 19 nt, Artificial Sequence
  Description of Artificial Sequence: Synthetic oligonucleotide
cccacuccacaucauaguc

SEQ ID NO: 2504016 - RNA, 19 nt, Artificial Sequence
  Description of Artificial Sequence: Synthetic oligonucleotide
ggggaagugaacagguaga

SEQ ID NO: 2504017 - RNA, 19 nt, Artificial Sequence
  Description of Artificial Sequence: Synthetic oligonucleotide
caccuacacaaucuaugaa

SEQ ID NO: 2504018 - RNA, 19 nt, Artificial Sequence
  Description of Artificial Sequence: Synthetic oligonucleotide
guagcguuuugcuccggcu

SEQ ID NO: 2504019 - RNA, 19 nt, Artificial Sequence
  Description of Artificial Sequence: Synthetic oligonucleotide
ggagaugaaccacauuaau

SEQ ID NO: 2504020 - RNA, 19 nt, Artificial Sequence
  Description of Artificial Sequence: Synthetic oligonucleotide
cuggaauucaagacuccau

SEQ ID NO: 2504021 - RNA, 19 nt, Artificial Sequence
  Description of Artificial Sequence: Synthetic oligonucleotide
ggccaacaccuacacaauc

SEQ ID NO: 2504022 - RNA, 19 nt, Artificial Sequence
  Description of Artificial Sequence: Synthetic oligonucleotide
ccauaagguauuuccaacu

SEQ ID NO: 2504023 - RNA, 19 nt, Artificial Sequence
  Description of Artificial Sequence: Synthetic oligonucleotide
ccaucugccgaaaucgaaa

SEQ ID NO: 2504024 - RNA, 19 nt, Artificial Sequence
  Description of Artificial Sequence: Synthetic oligonucleotide
gucucuacucuggcguuuc

SEQ ID NO: 2504025 - RNA, 19 nt, Artificial Sequence
  Description of Artificial Sequence: Synthetic oligonucleotide
ugccagcgacaguccauac

SEQ ID NO: 2504026 - RNA, 19 nt, Artificial Sequence
  Description of Artificial Sequence: Synthetic oligonucleotide
uccggcugugugucucgcu

SEQ ID NO: 2504027 - RNA, 19 nt, Artificial Sequence
  Description of Artificial Sequence: Synthetic oligonucleotide
agugccagcgacaguccau

SEQ ID NO: 2504028 - RNA, 19 nt, Artificial Sequence
  Description of Artificial Sequence: Synthetic oligonucleotide
cgacaguccauacagcaca

SEQ ID NO: 2504029 - RNA, 19 nt, Artificial Sequence
  Description of Artificial Sequence: Synthetic oligonucleotide
ccuaugguggacacacaga

SEQ ID NO: 2504030 - RNA, 19 nt, Artificial Sequence
  Description of Artificial Sequence: Synthetic oligonucleotide
gcaaauggauagagcagga

SEQ ID NO: 2504031 - RNA, 19 nt, Artificial Sequence
  Description of Artificial Sequence: Synthetic oligonucleotide
cucgcugcaucccuggaau

SEQ ID NO: 2504032 - RNA, 19 nt, Artificial Sequence
  Description of Artificial Sequence: Synthetic oligonucleotide
cugagguacuuguagcguu

SEQ ID NO: 2504033 - RNA, 19 nt, Artificial Sequence
  Description of Artificial Sequence: Synthetic oligonucleotide
cccuggaauucaagacucc

SEQ ID NO: 2504034 - RNA, 19 nt, Artificial Sequence
  Description of Artificial Sequence: Synthetic oligonucleotide
ccaaauccuaugguggaca

SEQ ID NO: 2504035 - RNA, 19 nt, Artificial Sequence
  Description of Artificial Sequence: Synthetic oligonucleotide
caacaccuacacaaucuau

SEQ ID NO: 2504036 - RNA, 19 nt, Artificial Sequence
  Description of Artificial Sequence: Synthetic oligonucleotide
cacuguaucccaggaaggu

SEQ ID NO: 2504037 - RNA, 19 nt, Artificial Sequence
  Description of Artificial Sequence: Synthetic oligonucleotide
guccaucugccgaaaucga

SEQ ID NO: 2504038 - RNA, 19 nt, Artificial Sequence
  Description of Artificial Sequence: Synthetic oligonucleotide
ccggcugugugucucgcug

SEQ ID NO: 2504039 - RNA, 19 nt, Artificial Sequence
  Description of Artificial Sequence: Synthetic oligonucleotide
cuccauuccccugcauuga

SEQ ID NO: 2504040 - RNA, 19 nt, Artificial Sequence
  Description of Artificial Sequence: Synthetic oligonucleotide
gccagcgacaguccauaca

SEQ ID NO: 2504041 - RNA, 19 nt, Artificial Sequence
  Description of Artificial Sequence: Synthetic oligonucleotide
gcgacaguccauacagcac

SEQ ID NO: 2504042 - RNA, 19 nt, Artificial Sequence
  Description of Artificial Sequence: Synthetic oligonucleotide
ggauaacaugguugaugaa

SEQ ID NO: 2504043 - RNA, 19 nt, Artificial Sequence
  Description of Artificial Sequence: Synthetic oligonucleotide
gccaaauccuaugguggac

SEQ ID NO: 2504044 - RNA, 19 nt, Artificial Sequence
  Description of Artificial Sequence: Synthetic oligonucleotide
cccuguacuuguagaagga

SEQ ID NO: 2504045 - RNA, 19 nt, Artificial Sequence
  Description of Artificial Sequence: Synthetic oligonucleotide
cacagcgagaggugcaaau

SEQ ID NO: 2504046 - RNA, 19 nt, Artificial Sequence
  Description of Artificial Sequence: Synthetic oligonucleotide
cagugccagcgacagucca

SEQ ID NO: 2504047 - RNA, 19 nt, Artificial Sequence
  Description of Artificial Sequence: Synthetic oligonucleotide
caaaguccaucugccgaaa

SEQ ID NO: 2504048 - RNA, 19 nt, Artificial Sequence
  Description of Artificial Sequence: Synthetic oligonucleotide
ggaguggauaaaaugcauu

SEQ ID NO: 2504049 - RNA, 19 nt, Artificial Sequence
  Description of Artificial Sequence: Synthetic oligonucleotide
cugcaucccuggaauucaa

SEQ ID NO: 2504050 - RNA, 19 nt, Artificial Sequence
  Description of Artificial Sequence: Synthetic oligonucleotide
guuggagaugaaccacauu

SEQ ID NO: 2504051 - RNA, 19 nt, Artificial Sequence
  Description of Artificial Sequence: Synthetic oligonucleotide
gugccagcgacaguccaua

SEQ ID NO: 2504052 - RNA, 19 nt, Artificial Sequence
  Description of Artificial Sequence: Synthetic oligonucleotide
gucucgcugcaucccugga

SEQ ID NO: 2504053 - RNA, 19 nt, Artificial Sequence
  Description of Artificial Sequence: Synthetic oligonucleotide
ggaagguuacauagauaua

SEQ ID NO: 2504054 - RNA, 19 nt, Artificial Sequence
  Description of Artificial Sequence: Synthetic oligonucleotide
gcguuucacuagauacuug

SEQ ID NO: 2504055 - RNA, 19 nt, Artificial Sequence
  Description of Artificial Sequence: Synthetic oligonucleotide
ccgguaaugaaaguuucua

SEQ ID NO: 2504056 - RNA, 19 nt, Artificial Sequence
  Description of Artificial Sequence: Synthetic oligonucleotide
gcuuccgguaaugaaaguu

SEQ ID NO: 2504057 - RNA, 19 nt, Artificial Sequence
  Description of Artificial Sequence: Synthetic oligonucleotide
ccucuguggggaagugaac

SEQ ID NO: 2504058 - RNA, 19 nt, Artificial Sequence
  Description of Artificial Sequence: Synthetic oligonucleotide
auccuaugguggacacaca

SEQ ID NO: 2504059 - RNA, 19 nt, Artificial Sequence
  Description of Artificial Sequence: Synthetic oligonucleotide
ggcguuucacuagauacuu

SEQ ID NO: 2504060 - RNA, 19 nt, Artificial Sequence
  Description of Artificial Sequence: Synthetic oligonucleotide
cgagaggugcaaauggaua

SEQ ID NO: 2504061 - RNA, 19 nt, Artificial Sequence
  Description of Artificial Sequence: Synthetic oligonucleotide
cauguggguaaaguuccau

SEQ ID NO: 2504062 - RNA, 19 nt, Artificial Sequence
  Description of Artificial Sequence: Synthetic oligonucleotide
guggggaagugaacaggua

SEQ ID NO: 2504063 - RNA, 19 nt, Artificial Sequence
  Description of Artificial Sequence: Synthetic oligonucleotide
cugaaguacuugguagcau

SEQ ID NO: 2504064 - RNA, 19 nt, Artificial Sequence
  Description of Artificial Sequence: Synthetic oligonucleotide
gagguacuuguagcguuuu

SEQ ID NO: 2504065 - RNA, 19 nt, Artificial Sequence
  Description of Artificial Sequence: Synthetic oligonucleotide
aucccauguccagcacaaa

SEQ ID NO: 2504066 - RNA, 19 nt, Artificial Sequence
  Description of Artificial Sequence: Synthetic oligonucleotide
gcauguggguaaaguucca

SEQ ID NO: 2504067 - RNA, 19 nt, Artificial Sequence
  Description of Artificial Sequence: Synthetic oligonucleotide
gcguuuugcuccggcugug

SEQ ID NO: 2504068 - RNA, 19 nt, Artificial Sequence
  Description of Artificial Sequence: Synthetic oligonucleotide
cagcaaacucaaaguccau

SEQ ID NO: 2504069 - RNA, 19 nt, Artificial Sequence
  Description of Artificial Sequence: Synthetic oligonucleotide
cgguaaugaaaguuucuau

SEQ ID NO: 2504070 - RNA, 19 nt, Artificial Sequence
  Description of Artificial Sequence: Synthetic oligonucleotide
gcgagaggugcaaauggau

SEQ ID NO: 2504071 - RNA, 19 nt, Artificial Sequence
  Description of Artificial Sequence: Synthetic oligonucleotide
ccccugcauugaagaacuc

SEQ ID NO: 2504072 - RNA, 19 nt, Artificial Sequence
  Description of Artificial Sequence: Synthetic oligonucleotide
gcacagcgagaggugcaaa

SEQ ID NO: 2504073 - RNA, 19 nt, Artificial Sequence
  Description of Artificial Sequence: Synthetic oligonucleotide
cguuuugcuccggcugugu

SEQ ID NO: 2504074 - RNA, 19 nt, Artificial Sequence
  Description of Artificial Sequence: Synthetic oligonucleotide
gaauggguagcuuugagag

SEQ ID NO: 2504075 - RNA, 19 nt, Artificial Sequence
  Description of Artificial Sequence: Synthetic oligonucleotide
uuuggggagucacugaugg

SEQ ID NO: 2504076 - RNA, 19 nt, Artificial Sequence
  Description of Artificial Sequence: Synthetic oligonucleotide
ucucgaagggcacagacag

SEQ ID NO: 2504077 - RNA, 19 nt, Artificial Sequence
  Description of Artificial Sequence: Synthetic oligonucleotide
aggauugacagugaggacc

SEQ ID NO: 2504078 - RNA, 19 nt, Artificial Sequence
  Description of Artificial Sequence: Synthetic oligonucleotide
acgaaaaccacacucuggg

SEQ ID NO: 2504079 - RNA, 19 nt, Artificial Sequence
  Description of Artificial Sequence: Synthetic oligonucleotide
uauucccaggaucaggagg

SEQ ID NO: 2504080 - RNA, 19 nt, Artificial Sequence
  Description of Artificial Sequence: Synthetic oligonucleotide
agugucuucauggaaggcc

SEQ ID NO: 2504081 - RNA, 19 nt, Artificial Sequence
  Description of Artificial Sequence: Synthetic oligonucleotide
agagagaacagguguggcc

SEQ ID NO: 2504082 - RNA, 19 nt, Artificial Sequence
  Description of Artificial Sequence: Synthetic oligonucleotide
acugaugggagccacgauc

SEQ ID NO: 2504083 - RNA, 19 nt, Artificial Sequence
  Description of Artificial Sequence: Synthetic oligonucleotide
aacagugucuucauggaag

SEQ ID NO: 2504084 - RNA, 19 nt, Artificial Sequence
  Description of Artificial Sequence: Synthetic oligonucleotide
ugcaggaugcgcuugagca

SEQ ID NO: 2504085 - RNA, 19 nt, Artificial Sequence
  Description of Artificial Sequence: Synthetic oligonucleotide
gagaagacggagaugagcc

SEQ ID NO: 2504086 - RNA, 19 nt, Artificial Sequence
  Description of Artificial Sequence: Synthetic oligonucleotide
aagccgagcguccagcgcg

SEQ ID NO: 2504087 - RNA, 19 nt, Artificial Sequence
  Description of Artificial Sequence: Synthetic oligonucleotide
ugcgcuugagcacagcugc

SEQ ID NO: 2504088 - RNA, 19 nt, Artificial Sequence
  Description of Artificial Sequence: Synthetic oligonucleotide
uggaaugcuucucgaaggg

SEQ ID NO: 2504089 - RNA, 19 nt, Artificial Sequence
  Description of Artificial Sequence: Synthetic oligonucleotide
ucaaacacaggaacagugu

SEQ ID NO: 2504090 - RNA, 19 nt, Artificial Sequence
  Description of Artificial Sequence: Synthetic oligonucleotide
ucuggaauggguagcuuug

SEQ ID NO: 2504091 - RNA, 19 nt, Artificial Sequence
  Description of Artificial Sequence: Synthetic oligonucleotide
uagcuuugagagcaggugc

SEQ ID NO: 2504092 - RNA, 19 nt, Artificial Sequence
  Description of Artificial Sequence: Synthetic oligonucleotide
acagugucuucauggaagg

SEQ ID NO: 2504093 - RNA, 19 nt, Artificial Sequence
  Description of Artificial Sequence: Synthetic oligonucleotide
gaagagagaacaggugugg

SEQ ID NO: 2504094 - RNA, 19 nt, Artificial Sequence
  Description of Artificial Sequence: Synthetic oligonucleotide
acggagaugagcccgugcg

SEQ ID NO: 2504095 - RNA, 19 nt, Artificial Sequence
  Description of Artificial Sequence: Synthetic oligonucleotide
guggaaugcuucucgaagg

SEQ ID NO: 2504096 - RNA, 19 nt, Artificial Sequence
  Description of Artificial Sequence: Synthetic oligonucleotide
ucguccaggaaccagcaga

SEQ ID NO: 2504097 - RNA, 19 nt, Artificial Sequence
  Description of Artificial Sequence: Synthetic oligonucleotide
auggggaccaggcugccgc

SEQ ID NO: 2504098 - RNA, 19 nt, Artificial Sequence
  Description of Artificial Sequence: Synthetic oligonucleotide
gaagacggagaugagcccg

SEQ ID NO: 2504099 - RNA, 19 nt, Artificial Sequence
  Description of Artificial Sequence: Synthetic oligonucleotide
ugcucgaagggcacgaggc

SEQ ID NO: 2504100 - RNA, 19 nt, Artificial Sequence
  Description of Artificial Sequence: Synthetic oligonucleotide
cugcauucagcacagggag

SEQ ID NO: 2504101 - RNA, 19 nt, Artificial Sequence
  Description of Artificial Sequence: Synthetic oligonucleotide
agaagacggagaugagccc

SEQ ID NO: 2504102 - RNA, 19 nt, Artificial Sequence
  Description of Artificial Sequence: Synthetic oligonucleotide
aaugcuucucgaagggcac

SEQ ID NO: 2504103 - RNA, 19 nt, Artificial Sequence
  Description of Artificial Sequence: Synthetic oligonucleotide
uaggaggggaugaccaggg

SEQ ID NO: 2504104 - RNA, 19 nt, Artificial Sequence
  Description of Artificial Sequence: Synthetic oligonucleotide
ucgggcaccuuccaggcag

SEQ ID NO: 2504105 - RNA, 19 nt, Artificial Sequence
  Description of Artificial Sequence: Synthetic oligonucleotide
ucaggguuacccucugcgg

SEQ ID NO: 2504106 - RNA, 19 nt, Artificial Sequence
  Description of Artificial Sequence: Synthetic oligonucleotide
ucgaagggcacagacagca

SEQ ID NO: 2504107 - RNA, 19 nt, Artificial Sequence
  Description of Artificial Sequence: Synthetic oligonucleotide
aggcgcucgucgcagaagc

SEQ ID NO: 2504108 - RNA, 19 nt, Artificial Sequence
  Description of Artificial Sequence: Synthetic oligonucleotide
cacgaaaaccacacucugg

SEQ ID NO: 2504109 - RNA, 19 nt, Artificial Sequence
  Description of Artificial Sequence: Synthetic oligonucleotide
ucucgggccagcaugggga

SEQ ID NO: 2504110 - RNA, 19 nt, Artificial Sequence
  Description of Artificial Sequence: Synthetic oligonucleotide
auggguagcuuugagagca

SEQ ID NO: 2504111 - RNA, 19 nt, Artificial Sequence
  Description of Artificial Sequence: Synthetic oligonucleotide
auugacagugaggaccugg

SEQ ID NO: 2504112 - RNA, 19 nt, Artificial Sequence
  Description of Artificial Sequence: Synthetic oligonucleotide
agaacagguguggccaucc

SEQ ID NO: 2504113 - RNA, 19 nt, Artificial Sequence
  Description of Artificial Sequence: Synthetic oligonucleotide
cagugcuccauccuugucc

SEQ ID NO: 2504114 - RNA, 19 nt, Artificial Sequence
  Description of Artificial Sequence: Synthetic oligonucleotide
aaacacaggaacagugucu

SEQ ID NO: 2504115 - RNA, 19 nt, Artificial Sequence
  Description of Artificial Sequence: Synthetic oligonucleotide
uggaauggguagcuuugag

SEQ ID NO: 2504116 - RNA, 19 nt, Artificial Sequence
  Description of Artificial Sequence: Synthetic oligonucleotide
ucgucgcagaagccgagcg

SEQ ID NO: 2504117 - RNA, 19 nt, Artificial Sequence
  Description of Artificial Sequence: Synthetic oligonucleotide
uggggagucacugauggga

SEQ ID NO: 2504118 - RNA, 19 nt, Artificial Sequence
  Description of Artificial Sequence: Synthetic oligonucleotide
agcagagggagcccgugcg

SEQ ID NO: 2504119 - RNA, 19 nt, Artificial Sequence
  Description of Artificial Sequence: Synthetic oligonucleotide
uucauggaaggccugccuc

SEQ ID NO: 2504120 - RNA, 19 nt, Artificial Sequence
  Description of Artificial Sequence: Synthetic oligonucleotide
uuacccucugcgguggugg

SEQ ID NO: 2504121 - RNA, 19 nt, Artificial Sequence
  Description of Artificial Sequence: Synthetic oligonucleotide
caggaggucaaacacagga

SEQ ID NO: 2504122 - RNA, 19 nt, Artificial Sequence
  Description of Artificial Sequence: Synthetic oligonucleotide
gaaugcuucucgaagggca

SEQ ID NO: 2504123 - RNA, 19 nt, Artificial Sequence
  Description of Artificial Sequence: Synthetic oligonucleotide
aagcugucgggcccggcgg

SEQ ID NO: 2504124 - RNA, 19 nt, Artificial Sequence
  Description of Artificial Sequence: Synthetic oligonucleotide
cuugccuuccccuguggcc

SEQ ID NO: 2504125 - RNA, 19 nt, Artificial Sequence
  Description of Artificial Sequence: Synthetic oligonucleotide
aacacaggaacagugucuu

SEQ ID NO: 2504126 - RNA, 19 nt, Artificial Sequence
  Description of Artificial Sequence: Synthetic oligonucleotide
ugggcugcauucagcacag

SEQ ID NO: 2504127 - RNA, 19 nt, Artificial Sequence
  Description of Artificial Sequence: Synthetic oligonucleotide
gagagaacagguguggcca

SEQ ID NO: 2504128 - RNA, 19 nt, Artificial Sequence
  Description of Artificial Sequence: Synthetic oligonucleotide
agugcuccauccuuguccu

SEQ ID NO: 2504129 - RNA, 19 nt, Artificial Sequence
  Description of Artificial Sequence: Synthetic oligonucleotide
agccacgaucuucucuugc

SEQ ID NO: 2504130 - RNA, 19 nt, Artificial Sequence
  Description of Artificial Sequence: Synthetic oligonucleotide
uugagagcaggugcguccg

SEQ ID NO: 2504131 - RNA, 19 nt, Artificial Sequence
  Description of Artificial Sequence: Synthetic oligonucleotide
guagcuuugagagcaggug

SEQ ID NO: 2504132 - RNA, 19 nt, Artificial Sequence
  Description of Artificial Sequence: Synthetic oligonucleotide
agcuuugagagcaggugcg

SEQ ID NO: 2504133 - RNA, 19 nt, Artificial Sequence
  Description of Artificial Sequence: Synthetic oligonucleotide
ggaggucaaacacaggaac

SEQ ID NO: 2504134 - RNA, 19 nt, Artificial Sequence
  Description of Artificial Sequence: Synthetic oligonucleotide
agaagccgagcguccagcg

SEQ ID NO: 2504135 - RNA, 19 nt, Artificial Sequence
  Description of Artificial Sequence: Synthetic oligonucleotide
ggaucaggaggucaaacac

SEQ ID NO: 2504136 - RNA, 19 nt, Artificial Sequence
  Description of Artificial Sequence: Synthetic oligonucleotide
uuuccuggcguaguccucc

SEQ ID NO: 2504137 - RNA, 19 nt, Artificial Sequence
  Description of Artificial Sequence: Synthetic oligonucleotide
ggcagggcaggauugacag

SEQ ID NO: 2504138 - RNA, 19 nt, Artificial Sequence
  Description of Artificial Sequence: Synthetic oligonucleotide
gaaggccugccucaguuuc

SEQ ID NO: 2504139 - RNA, 19 nt, Artificial Sequence
  Description of Artificial Sequence: Synthetic oligonucleotide
ugcuccauccuuguccugc

SEQ ID NO: 2504140 - RNA, 19 nt, Artificial Sequence
  Description of Artificial Sequence: Synthetic oligonucleotide
gaccagggaagagagaaca

SEQ ID NO: 2504141 - RNA, 19 nt, Artificial Sequence
  Description of Artificial Sequence: Synthetic oligonucleotide
guaggaggggaugaccagg

SEQ ID NO: 2504142 - RNA, 19 nt, Artificial Sequence
  Description of Artificial Sequence: Synthetic oligonucleotide
uccgguagaggccguacgu

SEQ ID NO: 2504143 - RNA, 19 nt, Artificial Sequence
  Description of Artificial Sequence: Synthetic oligonucleotide
agcugcgccagcgacgcgc

SEQ ID NO: 2504144 - RNA, 19 nt, Artificial Sequence
  Description of Artificial Sequence: Synthetic oligonucleotide
caagcugucgggcccggcg

SEQ ID NO: 2504145 - RNA, 19 nt, Artificial Sequence
  Description of Artificial Sequence: Synthetic oligonucleotide
gagaugagcccgugcgcgg

SEQ ID NO: 2504146 - RNA, 19 nt, Artificial Sequence
  Description of Artificial Sequence: Synthetic oligonucleotide
aaggccugccucaguuucc

SEQ ID NO: 2504147 - RNA, 19 nt, Artificial Sequence
  Description of Artificial Sequence: Synthetic oligonucleotide
ucggcgugcucgaagggca

SEQ ID NO: 2504148 - RNA, 19 nt, Artificial Sequence
  Description of Artificial Sequence: Synthetic oligonucleotide
auucagcacagggaguguc

SEQ ID NO: 2504149 - RNA, 19 nt, Artificial Sequence
  Description of Artificial Sequence: Synthetic oligonucleotide
gaucaggaggucaaacaca

SEQ ID NO: 2504150 - RNA, 19 nt, Artificial Sequence
  Description of Artificial Sequence: Synthetic oligonucleotide
gaggucaaacacaggaaca

SEQ ID NO: 2504151 - RNA, 19 nt, Artificial Sequence
  Description of Artificial Sequence: Synthetic oligonucleotide
uggaaggccugccucaguu

SEQ ID NO: 2504152 - RNA, 19 nt, Artificial Sequence
  Description of Artificial Sequence: Synthetic oligonucleotide
auaggcccagcgcgaagcg

SEQ ID NO: 2504153 - RNA, 19 nt, Artificial Sequence
  Description of Artificial Sequence: Synthetic oligonucleotide
cuguaggaggggaugacca

SEQ ID NO: 2504154 - RNA, 19 nt, Artificial Sequence
  Description of Artificial Sequence: Synthetic oligonucleotide
gaacagguguggccauccg

SEQ ID NO: 2504155 - RNA, 19 nt, Artificial Sequence
  Description of Artificial Sequence: Synthetic oligonucleotide
gagcaggugcguccgguag

SEQ ID NO: 2504156 - RNA, 19 nt, Artificial Sequence
  Description of Artificial Sequence: Synthetic oligonucleotide
cagcauggggaccaggcug

SEQ ID NO: 2504157 - RNA, 19 nt, Artificial Sequence
  Description of Artificial Sequence: Synthetic oligonucleotide
ugaggaccuggcugucugg

SEQ ID NO: 2504158 - RNA, 19 nt, Artificial Sequence
  Description of Artificial Sequence: Synthetic oligonucleotide
agcacagcugccuugccuu

SEQ ID NO: 2504159 - RNA, 19 nt, Artificial Sequence
  Description of Artificial Sequence: Synthetic oligonucleotide
ucugcggugguggcuuugg

SEQ ID NO: 2504160 - RNA, 19 nt, Artificial Sequence
  Description of Artificial Sequence: Synthetic oligonucleotide
ggagaugagcccgugcgcg

SEQ ID NO: 2504161 - RNA, 19 nt, Artificial Sequence
  Description of Artificial Sequence: Synthetic oligonucleotide
ugcuucucgaagggcacag

SEQ ID NO: 2504162 - RNA, 19 nt, Artificial Sequence
  Description of Artificial Sequence: Synthetic oligonucleotide
gggagugucaggguuaccc

SEQ ID NO: 2504163 - RNA, 19 nt, Artificial Sequence
  Description of Artificial Sequence: Synthetic oligonucleotide
uuggggagucacugauggg

SEQ ID NO: 2504164 - RNA, 19 nt, Artificial Sequence
  Description of Artificial Sequence: Synthetic oligonucleotide
cugggcugcauucagcaca

SEQ ID NO: 2504165 - RNA, 19 nt, Artificial Sequence
  Description of Artificial Sequence: Synthetic oligonucleotide
cuuuggggagucacugaug

SEQ ID NO: 2504166 - RNA, 19 nt, Artificial Sequence
  Description of Artificial Sequence: Synthetic oligonucleotide
guggccacgaaaaccacac

SEQ ID NO: 2504167 - RNA, 19 nt, Artificial Sequence
  Description of Artificial Sequence: Synthetic oligonucleotide
aggcccagcgcgaagcggc

SEQ ID NO: 2504168 - RNA, 19 nt, Artificial Sequence
  Description of Artificial Sequence: Synthetic oligonucleotide
gagugucaggguuacccuc

SEQ ID NO: 2504169 - RNA, 19 nt, Artificial Sequence
  Description of Artificial Sequence: Synthetic oligonucleotide
ggaauggguagcuuugaga

SEQ ID NO: 2504170 - RNA, 19 nt, Artificial Sequence
  Description of Artificial Sequence: Synthetic oligonucleotide
gaacagugucuucauggaa

SEQ ID NO: 2504171 - RNA, 19 nt, Artificial Sequence
  Description of Artificial Sequence: Synthetic oligonucleotide
ggagaagacggagaugagc

SEQ ID NO: 2504172 - RNA, 19 nt, Artificial Sequence
  Description of Artificial Sequence: Synthetic oligonucleotide
ggaagagagaacaggugug

SEQ ID NO: 2504173 - RNA, 19 nt, Artificial Sequence
  Description of Artificial Sequence: Synthetic oligonucleotide
cacaggaacagugucuuca

SEQ ID NO: 2504174 - RNA, 19 nt, Artificial Sequence
  Description of Artificial Sequence: Synthetic oligonucleotide
cucgaagggcacgaggcgc

SEQ ID NO: 2504175 - RNA, 19 nt, Artificial Sequence
  Description of Artificial Sequence: Synthetic oligonucleotide
acaggaacagugucuucau

SEQ ID NO: 2504176 - RNA, 19 nt, Artificial Sequence
  Description of Artificial Sequence: Synthetic oligonucleotide
gaagccgagcguccagcgc

SEQ ID NO: 2504177 - RNA, 19 nt, Artificial Sequence
  Description of Artificial Sequence: Synthetic oligonucleotide
gugcucgaagggcacgagg

SEQ ID NO: 2504178 - RNA, 19 nt, Artificial Sequence
  Description of Artificial Sequence: Synthetic oligonucleotide
aagggcacgaggcgcucgu

SEQ ID NO: 2504179 - RNA, 19 nt, Artificial Sequence
  Description of Artificial Sequence: Synthetic oligonucleotide
ggagucacugaugggagcc

SEQ ID NO: 2504180 - RNA, 19 nt, Artificial Sequence
  Description of Artificial Sequence: Synthetic oligonucleotide
ggccacgaaaaccacacuc

SEQ ID NO: 2504181 - RNA, 19 nt, Artificial Sequence
  Description of Artificial Sequence: Synthetic oligonucleotide
gaugcgcuugagcacagcu

SEQ ID NO: 2504182 - RNA, 19 nt, Artificial Sequence
  Description of Artificial Sequence: Synthetic oligonucleotide
agagggagcccgugcgcgg

SEQ ID NO: 2504183 - RNA, 19 nt, Artificial Sequence
  Description of Artificial Sequence: Synthetic oligonucleotide
uggcguaguccuccgcagc

SEQ ID NO: 2504184 - RNA, 19 nt, Artificial Sequence
  Description of Artificial Sequence: Synthetic oligonucleotide
ugagagcaggugcguccgg

SEQ ID NO: 2504185 - RNA, 19 nt, Artificial Sequence
  Description of Artificial Sequence: Synthetic oligonucleotide
ugucaggguuacccucugc

SEQ ID NO: 2504186 - RNA, 19 nt, Artificial Sequence
  Description of Artificial Sequence: Synthetic oligonucleotide
aggccguacgugcucucgg

SEQ ID NO: 2504187 - RNA, 19 nt, Artificial Sequence
  Description of Artificial Sequence: Synthetic oligonucleotide
gcauucagcacagggagug

SEQ ID NO: 2504188 - RNA, 19 nt, Artificial Sequence
  Description of Artificial Sequence: Synthetic oligonucleotide
acucugggcugcauucagc

SEQ ID NO: 2504189 - RNA, 19 nt, Artificial Sequence
  Description of Artificial Sequence: Synthetic oligonucleotide
gcccgauaggcccagcgcg

SEQ ID NO: 2504190 - RNA, 19 nt, Artificial Sequence
  Description of Artificial Sequence: Synthetic oligonucleotide
acacaggaacagugucuuc

SEQ ID NO: 2504191 - RNA, 19 nt, Artificial Sequence
  Description of Artificial Sequence: Synthetic oligonucleotide
guccgguagaggccguacg

SEQ ID NO: 2504192 - RNA, 19 nt, Artificial Sequence
  Description of Artificial Sequence: Synthetic oligonucleotide
gacggagaugagcccgugc

SEQ ID NO: 2504193 - RNA, 19 nt, Artificial Sequence
  Description of Artificial Sequence: Synthetic oligonucleotide
ggaacagugucuucaugga

SEQ ID NO: 2504194 - RNA, 19 nt, Artificial Sequence
  Description of Artificial Sequence: Synthetic oligonucleotide
gucucgggccagcaugggg

SEQ ID NO: 2504195 - RNA, 19 nt, Artificial Sequence
  Description of Artificial Sequence: Synthetic oligonucleotide
uuccccuguggccacgaaa

SEQ ID NO: 2504196 - RNA, 19 nt, Artificial Sequence
  Description of Artificial Sequence: Synthetic oligonucleotide
ucgcagaagccgagcgucc

SEQ ID NO: 2504197 - RNA, 19 nt, Artificial Sequence
  Description of Artificial Sequence: Synthetic oligonucleotide
agugucaggguuacccucu

SEQ ID NO: 2504198 - RNA, 19 nt, Artificial Sequence
  Description of Artificial Sequence: Synthetic oligonucleotide
cagcgcgccaagcugucgg

SEQ ID NO: 2504199 - RNA, 19 nt, Artificial Sequence
  Description of Artificial Sequence: Synthetic oligonucleotide
cuggcguaguccuccgcag

SEQ ID NO: 2504200 - RNA, 19 nt, Artificial Sequence
  Description of Artificial Sequence: Synthetic oligonucleotide
agaugagcccgugcgcggg

SEQ ID NO: 2504201 - RNA, 19 nt, Artificial Sequence
  Description of Artificial Sequence: Synthetic oligonucleotide
uggguagcuuugagagcag

SEQ ID NO: 2504202 - RNA, 19 nt, Artificial Sequence
  Description of Artificial Sequence: Synthetic oligonucleotide
uggccauccgggccuauuc

SEQ ID NO: 2504203 - RNA, 19 nt, Artificial Sequence
  Description of Artificial Sequence: Synthetic oligonucleotide
agcuccugcgggcuggaga

SEQ ID NO: 2504204 - RNA, 19 nt, Artificial Sequence
  Description of Artificial Sequence: Synthetic oligonucleotide
gggugcaccaugguggcgg

SEQ ID NO: 2504205 - RNA, 19 nt, Artificial Sequence
  Description of Artificial Sequence: Synthetic oligonucleotide
caggcugccgcccgauagg

SEQ ID NO: 2504206 - RNA, 19 nt, Artificial Sequence
  Description of Artificial Sequence: Synthetic oligonucleotide
gucuucauggaaggccugc

SEQ ID NO: 2504207 - RNA, 19 nt, Artificial Sequence
  Description of Artificial Sequence: Synthetic oligonucleotide
ggcugucuggaauggguag

SEQ ID NO: 2504208 - RNA, 19 nt, Artificial Sequence
  Description of Artificial Sequence: Synthetic oligonucleotide
gcugccgcccgauaggccc

SEQ ID NO: 2504209 - RNA, 19 nt, Artificial Sequence
  Description of Artificial Sequence: Synthetic oligonucleotide
cacucugggcugcauucag

SEQ ID NO: 2504210 - RNA, 19 nt, Artificial Sequence
  Description of Artificial Sequence: Synthetic oligonucleotide
gaggccguacgugcucucg

SEQ ID NO: 2504211 - RNA, 19 nt, Artificial Sequence
  Description of Artificial Sequence: Synthetic oligonucleotide
uuccuggcguaguccuccg

SEQ ID NO: 2504212 - RNA, 19 nt, Artificial Sequence
  Description of Artificial Sequence: Synthetic oligonucleotide
gucgcagaagccgagcguc

SEQ ID NO: 2504213 - RNA, 19 nt, Artificial Sequence
  Description of Artificial Sequence: Synthetic oligonucleotide
agcggccucgggcaccuuc

SEQ ID NO: 2504214 - RNA, 19 nt, Artificial Sequence
  Description of Artificial Sequence: Synthetic oligonucleotide
guaguccuccgcagcaucc

SEQ ID NO: 2504215 - RNA, 19 nt, Artificial Sequence
  Description of Artificial Sequence: Synthetic oligonucleotide
aggcugccgcccgauaggc

SEQ ID NO: 2504216 - RNA, 19 nt, Artificial Sequence
  Description of Artificial Sequence: Synthetic oligonucleotide
agcgcgccaagcugucggg

SEQ ID NO: 2504217 - RNA, 19 nt, Artificial Sequence
  Description of Artificial Sequence: Synthetic oligonucleotide
ucuacaggcagggcaggau

SEQ ID NO: 2504218 - RNA, 19 nt, Artificial Sequence
  Description of Artificial Sequence: Synthetic oligonucleotide
cucgaagggcacagacagc

SEQ ID NO: 2504219 - RNA, 19 nt, Artificial Sequence
  Description of Artificial Sequence: Synthetic oligonucleotide
ccuauucccaggaucagga

SEQ ID NO: 2504220 - RNA, 19 nt, Artificial Sequence
  Description of Artificial Sequence: Synthetic oligonucleotide
cuuguccugcaggaugcgc

SEQ ID NO: 2504221 - RNA, 19 nt, Artificial Sequence
  Description of Artificial Sequence: Synthetic oligonucleotide
aagacggagaugagcccgu

SEQ ID NO: 2504222 - RNA, 19 nt, Artificial Sequence
  Description of Artificial Sequence: Synthetic oligonucleotide
caggauugacagugaggac

SEQ ID NO: 2504223 - RNA, 19 nt, Artificial Sequence
  Description of Artificial Sequence: Synthetic oligonucleotide
gaagggcacgaggcgcucg

SEQ ID NO: 2504224 - RNA, 19 nt, Artificial Sequence
  Description of Artificial Sequence: Synthetic oligonucleotide
agcaggugcguccgguaga

SEQ ID NO: 2504225 - RNA, 19 nt, Artificial Sequence
  Description of Artificial Sequence: Synthetic oligonucleotide
aggucucgggccagcaugg

SEQ ID NO: 2504226 - RNA, 19 nt, Artificial Sequence
  Description of Artificial Sequence: Synthetic oligonucleotide
cagcgacgcgcccagcucc

SEQ ID NO: 2504227 - RNA, 19 nt, Artificial Sequence
  Description of Artificial Sequence: Synthetic oligonucleotide
cgcggcugcaccauggugg

SEQ ID NO: 2504228 - RNA, 19 nt, Artificial Sequence
  Description of Artificial Sequence: Synthetic oligonucleotide
gugcguccgguagaggccg

SEQ ID NO: 2504229 - RNA, 19 nt, Artificial Sequence
  Description of Artificial Sequence: Synthetic oligonucleotide
cucggcgugcucgaagggc

SEQ ID NO: 2504230 - RNA, 19 nt, Artificial Sequence
  Description of Artificial Sequence: Synthetic oligonucleotide
cgcgggugcaccauggugg

SEQ ID NO: 2504231 - RNA, 19 nt, Artificial Sequence
  Description of Artificial Sequence: Synthetic oligonucleotide
uccugcgggcuggagaaga

SEQ ID NO: 2504232 - RNA, 19 nt, Artificial Sequence
  Description of Artificial Sequence: Synthetic oligonucleotide
cuuugagagcaggugcguc

SEQ ID NO: 2504233 - RNA, 19 nt, Artificial Sequence
  Description of Artificial Sequence: Synthetic oligonucleotide
accagggaagagagaacag

SEQ ID NO: 2504234 - RNA, 19 nt, Artificial Sequence
  Description of Artificial Sequence: Synthetic oligonucleotide
agagaacagguguggccau

SEQ ID NO: 2504235 - RNA, 19 nt, Artificial Sequence
  Description of Artificial Sequence: Synthetic oligonucleotide
caggaacagugucuucaug

SEQ ID NO: 2504236 - RNA, 19 nt, Artificial Sequence
  Description of Artificial Sequence: Synthetic oligonucleotide
agcgcgaagcggccucggg

SEQ ID NO: 2504237 - RNA, 19 nt, Artificial Sequence
  Description of Artificial Sequence: Synthetic oligonucleotide
cagaagccgagcguccagc

SEQ ID NO: 2504238 - RNA, 19 nt, Artificial Sequence
  Description of Artificial Sequence: Synthetic oligonucleotide
gcucgaagggcacgaggcg

SEQ ID NO: 2504239 - RNA, 19 nt, Artificial Sequence
  Description of Artificial Sequence: Synthetic oligonucleotide
guagaggccguacgugcuc

SEQ ID NO: 2504240 - RNA, 19 nt, Artificial Sequence
  Description of Artificial Sequence: Synthetic oligonucleotide
cuccgcagcauccucuaca

SEQ ID NO: 2504241 - RNA, 19 nt, Artificial Sequence
  Description of Artificial Sequence: Synthetic oligonucleotide
accagcugcgccagcgacg

SEQ ID NO: 2504242 - RNA, 19 nt, Artificial Sequence
  Description of Artificial Sequence: Synthetic oligonucleotide
ugagcccgugcgcgggugc

SEQ ID NO: 2504243 - RNA, 19 nt, Artificial Sequence
  Description of Artificial Sequence: Synthetic oligonucleotide
aggaggucaaacacaggaa

SEQ ID NO: 2504244 - RNA, 19 nt, Artificial Sequence
  Description of Artificial Sequence: Synthetic oligonucleotide
uagaggccguacgugcucu

SEQ ID NO: 2504245 - RNA, 19 nt, Artificial Sequence
  Description of Artificial Sequence: Synthetic oligonucleotide
caggaugcgcuugagcaca

SEQ ID NO: 2504246 - RNA, 19 nt, Artificial Sequence
  Description of Artificial Sequence: Synthetic oligonucleotide
augcgcuugagcacagcug

SEQ ID NO: 2504247 - RNA, 19 nt, Artificial Sequence
  Description of Artificial Sequence: Synthetic oligonucleotide
gaucuucucuugcuccugu

SEQ ID NO: 2504248 - RNA, 19 nt, Artificial Sequence
  Description of Artificial Sequence: Synthetic oligonucleotide
ugccucguccaggaaccag

SEQ ID NO: 2504249 - RNA, 19 nt, Artificial Sequence
  Description of Artificial Sequence: Synthetic oligonucleotide
agaggccguacgugcucuc

SEQ ID NO: 2504250 - RNA, 19 nt, Artificial Sequence
  Description of Artificial Sequence: Synthetic oligonucleotide
gagccacgaucuucucuug

SEQ ID NO: 2504251 - RNA, 19 nt, Artificial Sequence
  Description of Artificial Sequence: Synthetic oligonucleotide
cacagacagcagccgcgcg

SEQ ID NO: 2504252 - RNA, 19 nt, Artificial Sequence
  Description of Artificial Sequence: Synthetic oligonucleotide
gggcacgaggcgcucgucg

SEQ ID NO: 2504253 - RNA, 19 nt, Artificial Sequence
  Description of Artificial Sequence: Synthetic oligonucleotide
uggccacgaaaaccacacu

SEQ ID NO: 2504254 - RNA, 19 nt, Artificial Sequence
  Description of Artificial Sequence: Synthetic oligonucleotide
gccuauucccaggaucagg

SEQ ID NO: 2504255 - RNA, 19 nt, Artificial Sequence
  Description of Artificial Sequence: Synthetic oligonucleotide
ccacgaaaaccacacucug

SEQ ID NO: 2504256 - RNA, 19 nt, Artificial Sequence
  Description of Artificial Sequence: Synthetic oligonucleotide
uugcuccuguaggagggga

SEQ ID NO: 2504257 - RNA, 19 nt, Artificial Sequence
  Description of Artificial Sequence: Synthetic oligonucleotide
gggaugaccagggaagaga

SEQ ID NO: 2504258 - RNA, 19 nt, Artificial Sequence
  Description of Artificial Sequence: Synthetic oligonucleotide
ugcgccagcgacgcgccca

SEQ ID NO: 2504259 - RNA, 19 nt, Artificial Sequence
  Description of Artificial Sequence: Synthetic oligonucleotide
uaguccuccgcagcauccu

SEQ ID NO: 2504260 - RNA, 19 nt, Artificial Sequence
  Description of Artificial Sequence: Synthetic oligonucleotide
ugcgcggcugcaccauggu

SEQ ID NO: 2504261 - RNA, 19 nt, Artificial Sequence
  Description of Artificial Sequence: Synthetic oligonucleotide
uacccucugcggugguggc

SEQ ID NO: 2504262 - RNA, 19 nt, Artificial Sequence
  Description of Artificial Sequence: Synthetic oligonucleotide
agcguccagcgcgccaagc

SEQ ID NO: 2504263 - RNA, 19 nt, Artificial Sequence
  Description of Artificial Sequence: Synthetic oligonucleotide
aggggaugaccagggaaga

SEQ ID NO: 2504264 - RNA, 19 nt, Artificial Sequence
  Description of Artificial Sequence: Synthetic oligonucleotide
gggccuauucccaggauca

SEQ ID NO: 2504265 - RNA, 19 nt, Artificial Sequence
  Description of Artificial Sequence: Synthetic oligonucleotide
cucguccaggaaccagcag

SEQ ID NO: 2504266 - RNA, 19 nt, Artificial Sequence
  Description of Artificial Sequence: Synthetic oligonucleotide
ugguggcgggcagugcucc

SEQ ID NO: 2504267 - RNA, 19 nt, Artificial Sequence
  Description of Artificial Sequence: Synthetic oligonucleotide
gaugaccagggaagagaga

SEQ ID NO: 2504268 - RNA, 19 nt, Artificial Sequence
  Description of Artificial Sequence: Synthetic oligonucleotide
uccuggcguaguccuccgc

SEQ ID NO: 2504269 - RNA, 19 nt, Artificial Sequence
  Description of Artificial Sequence: Synthetic oligonucleotide
gcugucuggaauggguagc

SEQ ID NO: 2504270 - RNA, 19 nt, Artificial Sequence
  Description of Artificial Sequence: Synthetic oligonucleotide
gugucuucauggaaggccu

SEQ ID NO: 2504271 - RNA, 19 nt, Artificial Sequence
  Description of Artificial Sequence: Synthetic oligonucleotide
caccagcugcgccagcgac

SEQ ID NO: 2504272 - RNA, 19 nt, Artificial Sequence
  Description of Artificial Sequence: Synthetic oligonucleotide
gcaggaugcgcuugagcac

SEQ ID NO: 2504273 - RNA, 19 nt, Artificial Sequence
  Description of Artificial Sequence: Synthetic oligonucleotide
uccuccgcagcauccucua

SEQ ID NO: 2504274 - RNA, 19 nt, Artificial Sequence
  Description of Artificial Sequence: Synthetic oligonucleotide
cucgucgcagaagccgagc

SEQ ID NO: 2504275 - RNA, 19 nt, Artificial Sequence
  Description of Artificial Sequence: Synthetic oligonucleotide
ggcacgaggcgcucgucgc

SEQ ID NO: 2504276 - RNA, 19 nt, Artificial Sequence
  Description of Artificial Sequence: Synthetic oligonucleotide
cacagcugccuugccuucc

SEQ ID NO: 2504277 - RNA, 19 nt, Artificial Sequence
  Description of Artificial Sequence: Synthetic oligonucleotide
gaggcgcucgucgcagaag

SEQ ID NO: 2504278 - RNA, 19 nt, Artificial Sequence
  Description of Artificial Sequence: Synthetic oligonucleotide
cagggagugucaggguuac

SEQ ID NO: 2504279 - RNA, 19 nt, Artificial Sequence
  Description of Artificial Sequence: Synthetic oligonucleotide
gccguacgugcucucggcg

SEQ ID NO: 2504280 - RNA, 19 nt, Artificial Sequence
  Description of Artificial Sequence: Synthetic oligonucleotide
ccuuccaggcagcucgcgg

SEQ ID NO: 2504281 - RNA, 19 nt, Artificial Sequence
  Description of Artificial Sequence: Synthetic oligonucleotide
gugucaggguuacccucug

SEQ ID NO: 2504282 - RNA, 19 nt, Artificial Sequence
  Description of Artificial Sequence: Synthetic oligonucleotide
ugcgcgggugcaccauggu

SEQ ID NO: 2504283 - RNA, 19 nt, Artificial Sequence
  Description of Artificial Sequence: Synthetic oligonucleotide
acacucugggcugcauuca

SEQ ID NO: 2504284 - RNA, 19 nt, Artificial Sequence
  Description of Artificial Sequence: Synthetic oligonucleotide
gggagucacugaugggagc

SEQ ID NO: 2504285 - RNA, 19 nt, Artificial Sequence
  Description of Artificial Sequence: Synthetic oligonucleotide
caugguggcgggcagugcu

SEQ ID NO: 2504286 - RNA, 19 nt, Artificial Sequence
  Description of Artificial Sequence: Synthetic oligonucleotide
cacgaggcgcucgucgcag

SEQ ID NO: 2504287 - RNA, 19 nt, Artificial Sequence
  Description of Artificial Sequence: Synthetic oligonucleotide
ggugcguccgguagaggcc

SEQ ID NO: 2504288 - RNA, 19 nt, Artificial Sequence
  Description of Artificial Sequence: Synthetic oligonucleotide
uccagcgcgccaagcuguc

SEQ ID NO: 2504289 - RNA, 19 nt, Artificial Sequence
  Description of Artificial Sequence: Synthetic oligonucleotide
augguggcgggcagugcuc

SEQ ID NO: 2504290 - RNA, 19 nt, Artificial Sequence
  Description of Artificial Sequence: Synthetic oligonucleotide
ggguagcuuugagagcagg

SEQ ID NO: 2504291 - RNA, 19 nt, Artificial Sequence
  Description of Artificial Sequence: Synthetic oligonucleotide
cauggggaccaggcugccg

SEQ ID NO: 2504292 - RNA, 19 nt, Artificial Sequence
  Description of Artificial Sequence: Synthetic oligonucleotide
guuacccucugcgguggug

SEQ ID NO: 2504293 - RNA, 19 nt, Artificial Sequence
  Description of Artificial Sequence: Synthetic oligonucleotide
gagaacagguguggccauc

SEQ ID NO: 2504294 - RNA, 19 nt, Artificial Sequence
  Description of Artificial Sequence: Synthetic oligonucleotide
gcgcucgucgcagaagccg

SEQ ID NO: 2504295 - RNA, 19 nt, Artificial Sequence
  Description of Artificial Sequence: Synthetic oligonucleotide
ggcguaguccuccgcagca

SEQ ID NO: 2504296 - RNA, 19 nt, Artificial Sequence
  Description of Artificial Sequence: Synthetic oligonucleotide
gauugacagugaggaccug

SEQ ID NO: 2504297 - RNA, 19 nt, Artificial Sequence
  Description of Artificial Sequence: Synthetic oligonucleotide
gugcgcggcugcaccaugg

SEQ ID NO: 2504298 - RNA, 19 nt, Artificial Sequence
  Description of Artificial Sequence: Synthetic oligonucleotide
caggguuacccucugcggu

SEQ ID NO: 2504299 - RNA, 19 nt, Artificial Sequence
  Description of Artificial Sequence: Synthetic oligonucleotide
agccgagcguccagcgcgc

SEQ ID NO: 2504300 - RNA, 19 nt, Artificial Sequence
  Description of Artificial Sequence: Synthetic oligonucleotide
ccuguaggaggggaugacc

SEQ ID NO: 2504301 - RNA, 19 nt, Artificial Sequence
  Description of Artificial Sequence: Synthetic oligonucleotide
cccuguggccacgaaaacc

SEQ ID NO: 2504302 - RNA, 19 nt, Artificial Sequence
  Description of Artificial Sequence: Synthetic oligonucleotide
agggagugucaggguuacc

SEQ ID NO: 2504303 - RNA, 19 nt, Artificial Sequence
  Description of Artificial Sequence: Synthetic oligonucleotide
aggaccuggcugucuggaa

SEQ ID NO: 2504304 - RNA, 19 nt, Artificial Sequence
  Description of Artificial Sequence: Synthetic oligonucleotide
acagggagugucaggguua

SEQ ID NO: 2504305 - RNA, 19 nt, Artificial Sequence
  Description of Artificial Sequence: Synthetic oligonucleotide
gcagaagccgagcguccag

SEQ ID NO: 2504306 - RNA, 19 nt, Artificial Sequence
  Description of Artificial Sequence: Synthetic oligonucleotide
aggcagggcaggauugaca

SEQ ID NO: 2504307 - RNA, 19 nt, Artificial Sequence
  Description of Artificial Sequence: Synthetic oligonucleotide
gagucacugaugggagcca

SEQ ID NO: 2504308 - RNA, 19 nt, Artificial Sequence
  Description of Artificial Sequence: Synthetic oligonucleotide
cagcucgcggcccgcugcg

SEQ ID NO: 2504309 - RNA, 19 nt, Artificial Sequence
  Description of Artificial Sequence: Synthetic oligonucleotide
cgguagaggccguacgugc

SEQ ID NO: 2504310 - RNA, 19 nt, Artificial Sequence
  Description of Artificial Sequence: Synthetic oligonucleotide
gcuccugcgggcuggagaa

SEQ ID NO: 2504311 - RNA, 19 nt, Artificial Sequence
  Description of Artificial Sequence: Synthetic oligonucleotide
gucgggcccggcgggagcg

SEQ ID NO: 2504312 - RNA, 19 nt, Artificial Sequence
  Description of Artificial Sequence: Synthetic oligonucleotide
ggauugacagugaggaccu

SEQ ID NO: 2504313 - RNA, 19 nt, Artificial Sequence
  Description of Artificial Sequence: Synthetic oligonucleotide
gcaggugcguccgguagag

SEQ ID NO: 2504314 - RNA, 19 nt, Artificial Sequence
  Description of Artificial Sequence: Synthetic oligonucleotide
ggccguacgugcucucggc

SEQ ID NO: 2504315 - RNA, 19 nt, Artificial Sequence
  Description of Artificial Sequence: Synthetic oligonucleotide
uggcgggcagugcuccauc

SEQ ID NO: 2504316 - RNA, 19 nt, Artificial Sequence
  Description of Artificial Sequence: Synthetic oligonucleotide
cuggaauggguagcuuuga

SEQ ID NO: 2504317 - RNA, 19 nt, Artificial Sequence
  Description of Artificial Sequence: Synthetic oligonucleotide
cuucauggaaggccugccu

SEQ ID NO: 2504318 - RNA, 19 nt, Artificial Sequence
  Description of Artificial Sequence: Synthetic oligonucleotide
guacgugcucucggcgugc

SEQ ID NO: 2504319 - RNA, 19 nt, Artificial Sequence
  Description of Artificial Sequence: Synthetic oligonucleotide
gcuccuguaggaggggaug

SEQ ID NO: 2504320 - RNA, 19 nt, Artificial Sequence
  Description of Artificial Sequence: Synthetic oligonucleotide
gcggcugcaccaugguggc

SEQ ID NO: 2504321 - RNA, 19 nt, Artificial Sequence
  Description of Artificial Sequence: Synthetic oligonucleotide
cuccuguaggaggggauga

SEQ ID NO: 2504322 - RNA, 19 nt, Artificial Sequence
  Description of Artificial Sequence: Synthetic oligonucleotide
acgugcucucggcgugcuc

SEQ ID NO: 2504323 - RNA, 19 nt, Artificial Sequence
  Description of Artificial Sequence: Synthetic oligonucleotide
ggggaugaccagggaagag

SEQ ID NO: 2504324 - RNA, 19 nt, Artificial Sequence
  Description of Artificial Sequence: Synthetic oligonucleotide
gagcguccagcgcgccaag

SEQ ID NO: 2504325 - RNA, 19 nt, Artificial Sequence
  Description of Artificial Sequence: Synthetic oligonucleotide
uacgugcucucggcgugcu

SEQ ID NO: 2504326 - RNA, 19 nt, Artificial Sequence
  Description of Artificial Sequence: Synthetic oligonucleotide
ggcgggcagugcuccaucc

SEQ ID NO: 2504327 - RNA, 19 nt, Artificial Sequence
  Description of Artificial Sequence: Synthetic oligonucleotide
ggagugucaggguuacccu

SEQ ID NO: 2504328 - RNA, 19 nt, Artificial Sequence
  Description of Artificial Sequence: Synthetic oligonucleotide
ggugcaccaugguggcggc

SEQ ID NO: 2504329 - RNA, 19 nt, Artificial Sequence
  Description of Artificial Sequence: Synthetic oligonucleotide
gcgggugcaccaugguggc

SEQ ID NO: 2504330 - RNA, 19 nt, Artificial Sequence
  Description of Artificial Sequence: Synthetic oligonucleotide
gcagcucgcggcccgcugc

SEQ ID NO: 2504331 - RNA, 19 nt, Artificial Sequence
  Description of Artificial Sequence: Synthetic oligonucleotide
ugccuuccccuguggccac

SEQ ID NO: 2504332 - RNA, 19 nt, Artificial Sequence
  Description of Artificial Sequence: Synthetic oligonucleotide
agacggagaugagcccgug

SEQ ID NO: 2504333 - RNA, 19 nt, Artificial Sequence
  Description of Artificial Sequence: Synthetic oligonucleotide
ugggagccacgaucuucuc

SEQ ID NO: 2504334 - RNA, 19 nt, Artificial Sequence
  Description of Artificial Sequence: Synthetic oligonucleotide
gccacgaaaaccacacucu

SEQ ID NO: 2504335 - RNA, 19 nt, Artificial Sequence
  Description of Artificial Sequence: Synthetic oligonucleotide
gccacgaucuucucuugcu

SEQ ID NO: 2504336 - RNA, 19 nt, Artificial Sequence
  Description of Artificial Sequence: Synthetic oligonucleotide
cacagggagugucaggguu

SEQ ID NO: 2504337 - RNA, 19 nt, Artificial Sequence
  Description of Artificial Sequence: Synthetic oligonucleotide
uucccaggaucaggagguc

SEQ ID NO: 2504338 - RNA, 19 nt, Artificial Sequence
  Description of Artificial Sequence: Synthetic oligonucleotide
gggcagugcuccauccuug

SEQ ID NO: 2504339 - RNA, 19 nt, Artificial Sequence
  Description of Artificial Sequence: Synthetic oligonucleotide
ccuggcguaguccuccgca

SEQ ID NO: 2504340 - RNA, 19 nt, Artificial Sequence
  Description of Artificial Sequence: Synthetic oligonucleotide
ucgggccagcauggggacc

SEQ ID NO: 2504341 - RNA, 19 nt, Artificial Sequence
  Description of Artificial Sequence: Synthetic oligonucleotide
gcgccaagcugucgggccc

SEQ ID NO: 2504342 - RNA, 19 nt, Artificial Sequence
  Description of Artificial Sequence: Synthetic oligonucleotide
gcgcgggugcaccauggug

SEQ ID NO: 2504343 - RNA, 19 nt, Artificial Sequence
  Description of Artificial Sequence: Synthetic oligonucleotide
gagagcaggugcguccggu

SEQ ID NO: 2504344 - RNA, 19 nt, Artificial Sequence
  Description of Artificial Sequence: Synthetic oligonucleotide
acgaggcgcucgucgcaga

SEQ ID NO: 2504345 - RNA, 19 nt, Artificial Sequence
  Description of Artificial Sequence: Synthetic oligonucleotide
agcucgcggcccgcugcgc

SEQ ID NO: 2504346 - RNA, 19 nt, Artificial Sequence
  Description of Artificial Sequence: Synthetic oligonucleotide
ggcgugcucgaagggcacg

SEQ ID NO: 2504347 - RNA, 19 nt, Artificial Sequence
  Description of Artificial Sequence: Synthetic oligonucleotide
cucuacaggcagggcagga

SEQ ID NO: 2504348 - RNA, 19 nt, Artificial Sequence
  Description of Artificial Sequence: Synthetic oligonucleotide
cagccgcgcggcugccucg

SEQ ID NO: 2504349 - RNA, 19 nt, Artificial Sequence
  Description of Artificial Sequence: Synthetic oligonucleotide
ugcguccgguagaggccgu

SEQ ID NO: 2504350 - RNA, 19 nt, Artificial Sequence
  Description of Artificial Sequence: Synthetic oligonucleotide
agcccgugcgcgggugcac

SEQ ID NO: 2504351 - RNA, 19 nt, Artificial Sequence
  Description of Artificial Sequence: Synthetic oligonucleotide
cugucuggaauggguagcu

SEQ ID NO: 2504352 - RNA, 19 nt, Artificial Sequence
  Description of Artificial Sequence: Synthetic oligonucleotide
ggccuauucccaggaucag

SEQ ID NO: 2504353 - RNA, 19 nt, Artificial Sequence
  Description of Artificial Sequence: Synthetic oligonucleotide
agggcacgaggcgcucguc

SEQ ID NO: 2504354 - RNA, 19 nt, Artificial Sequence
  Description of Artificial Sequence: Synthetic oligonucleotide
ggccucgggcaccuuccag

SEQ ID NO: 2504355 - RNA, 19 nt, Artificial Sequence
  Description of Artificial Sequence: Synthetic oligonucleotide
gugcucucggcgugcucga

SEQ ID NO: 2504356 - RNA, 19 nt, Artificial Sequence
  Description of Artificial Sequence: Synthetic oligonucleotide
cguacgugcucucggcgug

SEQ ID NO: 2504357 - RNA, 19 nt, Artificial Sequence
  Description of Artificial Sequence: Synthetic oligonucleotide
gugcaccaugguggcggcg

SEQ ID NO: 2504358 - RNA, 19 nt, Artificial Sequence
  Description of Artificial Sequence: Synthetic oligonucleotide
ggaccuggcugucuggaau

SEQ ID NO: 2504359 - RNA, 19 nt, Artificial Sequence
  Description of Artificial Sequence: Synthetic oligonucleotide
ccgcccgauaggcccagcg

SEQ ID NO: 2504360 - RNA, 19 nt, Artificial Sequence
  Description of Artificial Sequence: Synthetic oligonucleotide
cugucgggcccggcgggag

SEQ ID NO: 2504361 - RNA, 19 nt, Artificial Sequence
  Description of Artificial Sequence: Synthetic oligonucleotide
caggugcguccgguagagg

SEQ ID NO: 2504362 - RNA, 19 nt, Artificial Sequence
  Description of Artificial Sequence: Synthetic oligonucleotide
cgcgccaagcugucgggcc

SEQ ID NO: 2504363 - RNA, 19 nt, Artificial Sequence
  Description of Artificial Sequence: Synthetic oligonucleotide
cgggccuauucccaggauc

SEQ ID NO: 2504364 - RNA, 19 nt, Artificial Sequence
  Description of Artificial Sequence: Synthetic oligonucleotide
ugccgcccgauaggcccag

SEQ ID NO: 2504365 - RNA, 19 nt, Artificial Sequence
  Description of Artificial Sequence: Synthetic oligonucleotide
cggagaugagcccgugcgc

SEQ ID NO: 2504366 - RNA, 19 nt, Artificial Sequence
  Description of Artificial Sequence: Synthetic oligonucleotide
ggucucgggccagcauggg

SEQ ID NO: 2504367 - RNA, 19 nt, Artificial Sequence
  Description of Artificial Sequence: Synthetic oligonucleotide
guggcuuuggggagucacu

SEQ ID NO: 2504368 - RNA, 19 nt, Artificial Sequence
  Description of Artificial Sequence: Synthetic oligonucleotide
acccucugcggugguggcu

SEQ ID NO: 2504369 - RNA, 19 nt, Artificial Sequence
  Description of Artificial Sequence: Synthetic oligonucleotide
cucgcggcccgcugcgcca

SEQ ID NO: 2504370 - RNA, 19 nt, Artificial Sequence
  Description of Artificial Sequence: Synthetic oligonucleotide
gggagccacgaucuucucu

SEQ ID NO: 2504371 - RNA, 19 nt, Artificial Sequence
  Description of Artificial Sequence: Synthetic oligonucleotide
guccagcgcgccaagcugu

SEQ ID NO: 2504372 - RNA, 19 nt, Artificial Sequence
  Description of Artificial Sequence: Synthetic oligonucleotide
cguccagcgcgccaagcug

SEQ ID NO: 2504373 - RNA, 19 nt, Artificial Sequence
  Description of Artificial Sequence: Synthetic oligonucleotide
gcagugcuccauccuuguc

SEQ ID NO: 2504374 - RNA, 19 nt, Artificial Sequence
  Description of Artificial Sequence: Synthetic oligonucleotide
agcgacgcgcccagcuccu

SEQ ID NO: 2504375 - RNA, 19 nt, Artificial Sequence
  Description of Artificial Sequence: Synthetic oligonucleotide
gguagaggccguacgugcu

SEQ ID NO: 2504376 - RNA, 19 nt, Artificial Sequence
  Description of Artificial Sequence: Synthetic oligonucleotide
gcccgugcgcggcugcacc

SEQ ID NO: 2504377 - RNA, 19 nt, Artificial Sequence
  Description of Artificial Sequence: Synthetic oligonucleotide
ccuuguccugcaggaugcg

SEQ ID NO: 2504378 - RNA, 19 nt, Artificial Sequence
  Description of Artificial Sequence: Synthetic oligonucleotide
cagugaggaccuggcuguc

SEQ ID NO: 2504379 - RNA, 19 nt, Artificial Sequence
  Description of Artificial Sequence: Synthetic oligonucleotide
gagcccgugcgcgggugca

SEQ ID NO: 2504380 - RNA, 19 nt, Artificial Sequence
  Description of Artificial Sequence: Synthetic oligonucleotide
gcgcccagcuccugcgggc

SEQ ID NO: 2504381 - RNA, 19 nt, Artificial Sequence
  Description of Artificial Sequence: Synthetic oligonucleotide
ggagcccgugcgcggcugc

SEQ ID NO: 2504382 - RNA, 19 nt, Artificial Sequence
  Description of Artificial Sequence: Synthetic oligonucleotide
gcucgucgcagaagccgag

SEQ ID NO: 2504383 - RNA, 19 nt, Artificial Sequence
  Description of Artificial Sequence: Synthetic oligonucleotide
ugcucucggcgugcucgaa

SEQ ID NO: 2504384 - RNA, 19 nt, Artificial Sequence
  Description of Artificial Sequence: Synthetic oligonucleotide
cuccugcgggcuggagaag

SEQ ID NO: 2504385 - RNA, 19 nt, Artificial Sequence
  Description of Artificial Sequence: Synthetic oligonucleotide
ggcagcucgcggcccgcug

SEQ ID NO: 2504386 - RNA, 19 nt, Artificial Sequence
  Description of Artificial Sequence: Synthetic oligonucleotide
gcgcggcugcaccauggug

SEQ ID NO: 2504387 - RNA, 19 nt, Artificial Sequence
  Description of Artificial Sequence: Synthetic oligonucleotide
cgcccgauaggcccagcgc

SEQ ID NO: 2504388 - RNA, 19 nt, Artificial Sequence
  Description of Artificial Sequence: Synthetic oligonucleotide
ccagcgacgcgcccagcuc

SEQ ID NO: 2504389 - RNA, 19 nt, Artificial Sequence
  Description of Artificial Sequence: Synthetic oligonucleotide
cccgauaggcccagcgcga

SEQ ID NO: 2504390 - RNA, 19 nt, Artificial Sequence
  Description of Artificial Sequence: Synthetic oligonucleotide
ggcgcucgucgcagaagcc

SEQ ID NO: 2504391 - RNA, 19 nt, Artificial Sequence
  Description of Artificial Sequence: Synthetic oligonucleotide
ccgcagcauccucuacagg

SEQ ID NO: 2504392 - RNA, 19 nt, Artificial Sequence
  Description of Artificial Sequence: Synthetic oligonucleotide
gcgggcaggucucgggcca

SEQ ID NO: 2504393 - RNA, 19 nt, Artificial Sequence
  Description of Artificial Sequence: Synthetic oligonucleotide
gcacgaggcgcucgucgca

SEQ ID NO: 2504394 - RNA, 19 nt, Artificial Sequence
  Description of Artificial Sequence: Synthetic oligonucleotide
cauucagcacagggagugu

SEQ ID NO: 2504395 - RNA, 19 nt, Artificial Sequence
  Description of Artificial Sequence: Synthetic oligonucleotide
gcugcgccagcgacgcgcc

SEQ ID NO: 2504396 - RNA, 19 nt, Artificial Sequence
  Description of Artificial Sequence: Synthetic oligonucleotide
ggcaccuuccaggcagcuc

SEQ ID NO: 2504397 - RNA, 19 nt, Artificial Sequence
  Description of Artificial Sequence: Synthetic oligonucleotide
cugccuugccuuccccugu

SEQ ID NO: 2504398 - RNA, 19 nt, Artificial Sequence
  Description of Artificial Sequence: Synthetic oligonucleotide
gcgcuugagcacagcugcc

SEQ ID NO: 2504399 - RNA, 19 nt, Artificial Sequence
  Description of Artificial Sequence: Synthetic oligonucleotide
cugcgccagcgacgcgccc

SEQ ID NO: 2504400 - RNA, 19 nt, Artificial Sequence
  Description of Artificial Sequence: Synthetic oligonucleotide
ucgcggcccgcugcgccac

SEQ ID NO: 2504401 - RNA, 19 nt, Artificial Sequence
  Description of Artificial Sequence: Synthetic oligonucleotide
agccgcgcggcugccucgu

SEQ ID NO: 2504402 - RNA, 19 nt, Artificial Sequence
  Description of Artificial Sequence: Synthetic oligonucleotide
gcgaagcggccucgggcac

SEQ ID NO: 2504403 - RNA, 19 nt, Artificial Sequence
  Description of Artificial Sequence: Synthetic oligonucleotide
gagcccgugcgcggcugca

SEQ ID NO: 2504404 - RNA, 19 nt, Artificial Sequence
  Description of Artificial Sequence: Synthetic oligonucleotide
cagcugcgccagcgacgcg

SEQ ID NO: 2504405 - RNA, 19 nt, Artificial Sequence
  Description of Artificial Sequence: Synthetic oligonucleotide
ggugguggcuuuggggagu

SEQ ID NO: 2504406 - RNA, 19 nt, Artificial Sequence
  Description of Artificial Sequence: Synthetic oligonucleotide
gcgugcucgaagggcacga

SEQ ID NO: 2504407 - RNA, 19 nt, Artificial Sequence
  Description of Artificial Sequence: Synthetic oligonucleotide
gcuuugagagcaggugcgu

SEQ ID NO: 2504408 - RNA, 19 nt, Artificial Sequence
  Description of Artificial Sequence: Synthetic oligonucleotide
gccagcgacgcgcccagcu

SEQ ID NO: 2504409 - RNA, 19 nt, Artificial Sequence
  Description of Artificial Sequence: Synthetic oligonucleotide
ccgcgcggcugccucgucc

SEQ ID NO: 2504410 - RNA, 19 nt, Artificial Sequence
  Description of Artificial Sequence: Synthetic oligonucleotide
cgauaggcccagcgcgaag

SEQ ID NO: 2504411 - RNA, 19 nt, Artificial Sequence
  Description of Artificial Sequence: Synthetic oligonucleotide
cgcgcccagcuccugcggg

SEQ ID NO: 2504412 - RNA, 19 nt, Artificial Sequence
  Description of Artificial Sequence: Synthetic oligonucleotide
gguggcgggcagugcucca

SEQ ID NO: 2504413 - RNA, 19 nt, Artificial Sequence
  Description of Artificial Sequence: Synthetic oligonucleotide
uguggccauccgggccuau

SEQ ID NO: 2504414 - RNA, 19 nt, Artificial Sequence
  Description of Artificial Sequence: Synthetic oligonucleotide
cgcucgucgcagaagccga

SEQ ID NO: 2504415 - RNA, 19 nt, Artificial Sequence
  Description of Artificial Sequence: Synthetic oligonucleotide
aggcagcucgcggcccgcu

SEQ ID NO: 2504416 - RNA, 19 nt, Artificial Sequence
  Description of Artificial Sequence: Synthetic oligonucleotide
ggcccagcgcgaagcggcc

SEQ ID NO: 2504417 - RNA, 19 nt, Artificial Sequence
  Description of Artificial Sequence: Synthetic oligonucleotide
gcauggggaccaggcugcc

SEQ ID NO: 2504418 - RNA, 19 nt, Artificial Sequence
  Description of Artificial Sequence: Synthetic oligonucleotide
ggaccaggcugccgcccga

SEQ ID NO: 2504419 - RNA, 19 nt, Artificial Sequence
  Description of Artificial Sequence: Synthetic oligonucleotide
ccuccgcagcauccucuac

SEQ ID NO: 2504420 - RNA, 19 nt, Artificial Sequence
  Description of Artificial Sequence: Synthetic oligonucleotide
cgacgcgcccagcuccugc

SEQ ID NO: 2504421 - RNA, 19 nt, Artificial Sequence
  Description of Artificial Sequence: Synthetic oligonucleotide
gcccgugcgcgggugcacc

SEQ ID NO: 2504422 - RNA, 19 nt, Artificial Sequence
  Description of Artificial Sequence: Synthetic oligonucleotide
gcgcgccaagcugucgggc

SEQ ID NO: 2504423 - RNA, 19 nt, Artificial Sequence
  Description of Artificial Sequence: Synthetic oligonucleotide
gcacagggagugucagggu

SEQ ID NO: 2504424 - RNA, 19 nt, Artificial Sequence
  Description of Artificial Sequence: Synthetic oligonucleotide
ccguacgugcucucggcgu

SEQ ID NO: 2504425 - RNA, 19 nt, Artificial Sequence
  Description of Artificial Sequence: Synthetic oligonucleotide
gcgggcuggagaagacgga

SEQ ID NO: 2504426 - RNA, 19 nt, Artificial Sequence
  Description of Artificial Sequence: Synthetic oligonucleotide
cgccaagcugucgggcccg

SEQ ID NO: 2504427 - RNA, 19 nt, Artificial Sequence
  Description of Artificial Sequence: Synthetic oligonucleotide
cccggcgggagcggcggcg

SEQ ID NO: 2504428 - RNA, 19 nt, Artificial Sequence
  Description of Artificial Sequence: Synthetic oligonucleotide
cguccgguagaggccguac

SEQ ID NO: 2504429 - RNA, 19 nt, Artificial Sequence
  Description of Artificial Sequence: Synthetic oligonucleotide
gggagcccgugcgcggcug

SEQ ID NO: 2504430 - RNA, 19 nt, Artificial Sequence
  Description of Artificial Sequence: Synthetic oligonucleotide
cgugcucgaagggcacgag

SEQ ID NO: 2504431 - RNA, 19 nt, Artificial Sequence
  Description of Artificial Sequence: Synthetic oligonucleotide
gcgggcagugcuccauccu

SEQ ID NO: 2504432 - RNA, 19 nt, Artificial Sequence
  Description of Artificial Sequence: Synthetic oligonucleotide
guggcgggcagugcuccau

SEQ ID NO: 2504433 - RNA, 19 nt, Artificial Sequence
  Description of Artificial Sequence: Synthetic oligonucleotide
gaccaggcugccgcccgau

SEQ ID NO: 2504434 - RNA, 19 nt, Artificial Sequence
  Description of Artificial Sequence: Synthetic oligonucleotide
ccaagcugucgggcccggc

SEQ ID NO: 2504435 - RNA, 19 nt, Artificial Sequence
  Description of Artificial Sequence: Synthetic oligonucleotide
ccaggaucaggaggucaaa

SEQ ID NO: 2504436 - RNA, 19 nt, Artificial Sequence
  Description of Artificial Sequence: Synthetic oligonucleotide
gcgcggcugccucguccag

SEQ ID NO: 2504437 - RNA, 19 nt, Artificial Sequence
  Description of Artificial Sequence: Synthetic oligonucleotide
cgcgcggcugccucgucca

SEQ ID NO: 2504438 - RNA, 19 nt, Artificial Sequence
  Description of Artificial Sequence: Synthetic oligonucleotide
cggcgugcucgaagggcac

SEQ ID NO: 2504439 - RNA, 19 nt, Artificial Sequence
  Description of Artificial Sequence: Synthetic oligonucleotide
cgagcguccagcgcgccaa

SEQ ID NO: 2504440 - RNA, 19 nt, Artificial Sequence
  Description of Artificial Sequence: Synthetic oligonucleotide
cgcagaagccgagcgucca

SEQ ID NO: 2504441 - RNA, 19 nt, Artificial Sequence
  Description of Artificial Sequence: Synthetic oligonucleotide
gccgagcguccagcgcgcc

SEQ ID NO: 2504442 - RNA, 19 nt, Artificial Sequence
  Description of Artificial Sequence: Synthetic oligonucleotide
ccgagcguccagcgcgcca

SEQ ID NO: 2504443 - RNA, 19 nt, Artificial Sequence
  Description of Artificial Sequence: Synthetic oligonucleotide
ccgauaggcccagcgcgaa

SEQ ID NO: 2504444 - RNA, 19 nt, Artificial Sequence
  Description of Artificial Sequence: Synthetic oligonucleotide
cgggugcaccaugguggcg

SEQ ID NO: 2504445 - RNA, 19 nt, Artificial Sequence
  Description of Artificial Sequence: Synthetic oligonucleotide
cccgugcgcgggugcacca

SEQ ID NO: 2504446 - RNA, 19 nt, Artificial Sequence
  Description of Artificial Sequence: Synthetic oligonucleotide
ccacacucugggcugcauu

SEQ ID NO: 2504447 - RNA, 19 nt, Artificial Sequence
  Description of Artificial Sequence: Synthetic oligonucleotide
cgucgcagaagccgagcgu

SEQ ID NO: 2504448 - RNA, 19 nt, Artificial Sequence
  Description of Artificial Sequence: Synthetic oligonucleotide
cgaggcgcucgucgcagaa

SEQ ID NO: 2504449 - RNA, 19 nt, Artificial Sequence
  Description of Artificial Sequence: Synthetic oligonucleotide
gcgacgcgcccagcuccug

SEQ ID NO: 2504450 - RNA, 19 nt, Artificial Sequence
  Description of Artificial Sequence: Synthetic oligonucleotide
aagcggccucgggcaccuu

SEQ ID NO: 2504451 - RNA, 19 nt, Artificial Sequence
  Description of Artificial Sequence: Synthetic oligonucleotide
gggcaccuuccaggcagcu

SEQ ID NO: 2504452 - RNA, 19 nt, Artificial Sequence
  Description of Artificial Sequence: Synthetic oligonucleotide
cggcugcaccaugguggcg

SEQ ID NO: 2504453 - RNA, 19 nt, Artificial Sequence
  Description of Artificial Sequence: Synthetic oligonucleotide
cgggcagugcuccauccuu

SEQ ID NO: 2504454 - RNA, 19 nt, Artificial Sequence
  Description of Artificial Sequence: Synthetic oligonucleotide
cccucugcggugguggcuu

SEQ ID NO: 2504455 - RNA, 19 nt, Artificial Sequence
  Description of Artificial Sequence: Synthetic oligonucleotide
gcggcccgcugcgccacca

SEQ ID NO: 2504456 - RNA, 19 nt, Artificial Sequence
  Description of Artificial Sequence: Synthetic oligonucleotide
gcguccgguagaggccgua

SEQ ID NO: 2504457 - RNA, 19 nt, Artificial Sequence
  Description of Artificial Sequence: Synthetic oligonucleotide
gccgcccgauaggcccagc

SEQ ID NO: 2504458 - RNA, 19 nt, Artificial Sequence
  Description of Artificial Sequence: Synthetic oligonucleotide
gccgcgcggcugccucguc

SEQ ID NO: 2504459 - RNA, 19 nt, Artificial Sequence
  Description of Artificial Sequence: Synthetic oligonucleotide
cggccucgggcaccuucca

SEQ ID NO: 2504460 - RNA, 19 nt, Artificial Sequence
  Description of Artificial Sequence: Synthetic oligonucleotide
ccgggccuauucccaggau

SEQ ID NO: 2504461 - RNA, 19 nt, Artificial Sequence
  Description of Artificial Sequence: Synthetic oligonucleotide
ccucugcggugguggcuuu

SEQ ID NO: 2504462 - RNA, 19 nt, Artificial Sequence
  Description of Artificial Sequence: Synthetic oligonucleotide
ccgugcgcgggugcaccau

SEQ ID NO: 2504463 - RNA, 19 nt, Artificial Sequence
  Description of Artificial Sequence: Synthetic oligonucleotide
auuaaugucaaugucagcc

SEQ ID NO: 2504464 - RNA, 19 nt, Artificial Sequence
  Description of Artificial Sequence: Synthetic oligonucleotide
gauuaacugauucaaaucg

SEQ ID NO: 2504465 - RNA, 19 nt, Artificial Sequence
  Description of Artificial Sequence: Synthetic oligonucleotide
aggaaaaugacauagacca

SEQ ID NO: 2504466 - RNA, 19 nt, Artificial Sequence
  Description of Artificial Sequence: Synthetic oligonucleotide
aaaaucacgaauguaaguc

SEQ ID NO: 2504467 - RNA, 19 nt, Artificial Sequence
  Description of Artificial Sequence: Synthetic oligonucleotide
ucuuucauugguuacaggg

SEQ ID NO: 2504468 - RNA, 19 nt, Artificial Sequence
  Description of Artificial Sequence: Synthetic oligonucleotide
uaugagaauaugaagguag

SEQ ID NO: 2504469 - RNA, 19 nt, Artificial Sequence
  Description of Artificial Sequence: Synthetic oligonucleotide
ugcaggaucaacauggugg

SEQ ID NO: 2504470 - RNA, 19 nt, Artificial Sequence
  Description of Artificial Sequence: Synthetic oligonucleotide
acauagaccauucugcugc

SEQ ID NO: 2504471 - RNA, 19 nt, Artificial Sequence
  Description of Artificial Sequence: Synthetic oligonucleotide
uagacugugagcuugaacc

SEQ ID NO: 2504472 - RNA, 19 nt, Artificial Sequence
  Description of Artificial Sequence: Synthetic oligonucleotide
aaauuacaagugcugaugg

SEQ ID NO: 2504473 - RNA, 19 nt, Artificial Sequence
  Description of Artificial Sequence: Synthetic oligonucleotide
ugaaccuugacucagagau

SEQ ID NO: 2504474 - RNA, 19 nt, Artificial Sequence
  Description of Artificial Sequence: Synthetic oligonucleotide
ucauaauuaucacagaagu

SEQ ID NO: 2504475 - RNA, 19 nt, Artificial Sequence
  Description of Artificial Sequence: Synthetic oligonucleotide
aauauuuagcauuacucca

SEQ ID NO: 2504476 - RNA, 19 nt, Artificial Sequence
  Description of Artificial Sequence: Synthetic oligonucleotide
uaauuuucugaaaaucacg

SEQ ID NO: 2504477 - RNA, 19 nt, Artificial Sequence
  Description of Artificial Sequence: Synthetic oligonucleotide
uguaaauuggcuuccaccc

SEQ ID NO: 2504478 - RNA, 19 nt, Artificial Sequence
  Description of Artificial Sequence: Synthetic oligonucleotide
aauaccuaaaacugcagca

SEQ ID NO: 2504479 - RNA, 19 nt, Artificial Sequence
  Description of Artificial Sequence: Synthetic oligonucleotide
aacucaguaucccaaguac

SEQ ID NO: 2504480 - RNA, 19 nt, Artificial Sequence
  Description of Artificial Sequence: Synthetic oligonucleotide
uuuguaacgaacauacaug

SEQ ID NO: 2504481 - RNA, 19 nt, Artificial Sequence
  Description of Artificial Sequence: Synthetic oligonucleotide
uuguuuguaacgaacauac

SEQ ID NO: 2504482 - RNA, 19 nt, Artificial Sequence
  Description of Artificial Sequence: Synthetic oligonucleotide
uuguaacgaacauacaugg

SEQ ID NO: 2504483 - RNA, 19 nt, Artificial Sequence
  Description of Artificial Sequence: Synthetic oligonucleotide
aaaucgucagaguauaaug

SEQ ID NO: 2504484 - RNA, 19 nt, Artificial Sequence
  Description of Artificial Sequence: Synthetic oligonucleotide
caauauuuagcauuacucc

SEQ ID NO: 2504485 - RNA, 19 nt, Artificial Sequence
  Description of Artificial Sequence: Synthetic oligonucleotide
ugucauaaaggguuaaucc

SEQ ID NO: 2504486 - RNA, 19 nt, Artificial Sequence
  Description of Artificial Sequence: Synthetic oligonucleotide
aauuacaagugcugauggc

SEQ ID NO: 2504487 - RNA, 19 nt, Artificial Sequence
  Description of Artificial Sequence: Synthetic oligonucleotide
auguaaauuggcuuccacc

SEQ ID NO: 2504488 - RNA, 19 nt, Artificial Sequence
  Description of Artificial Sequence: Synthetic oligonucleotide
auguaugagaauaugaagg

SEQ ID NO: 2504489 - RNA, 19 nt, Artificial Sequence
  Description of Artificial Sequence: Synthetic oligonucleotide
aaaggguuaauccauguaa

SEQ ID NO: 2504490 - RNA, 19 nt, Artificial Sequence
  Description of Artificial Sequence: Synthetic oligonucleotide
gauguaugagaauaugaag

SEQ ID NO: 2504491 - RNA, 19 nt, Artificial Sequence
  Description of Artificial Sequence: Synthetic oligonucleotide
ugaaaaucacgaauguaag

SEQ ID NO: 2504492 - RNA, 19 nt, Artificial Sequence
  Description of Artificial Sequence: Synthetic oligonucleotide
aucaacuuuguguuaauuc

SEQ ID NO: 2504493 - RNA, 19 nt, Artificial Sequence
  Description of Artificial Sequence: Synthetic oligonucleotide
auaauuaucacagaaguau

SEQ ID NO: 2504494 - RNA, 19 nt, Artificial Sequence
  Description of Artificial Sequence: Synthetic oligonucleotide
aguagugaccaugugaagc

SEQ ID NO: 2504495 - RNA, 19 nt, Artificial Sequence
  Description of Artificial Sequence: Synthetic oligonucleotide
auaggcaucuuucuggagg

SEQ ID NO: 2504496 - RNA, 19 nt, Artificial Sequence
  Description of Artificial Sequence: Synthetic oligonucleotide
gaauuugaugauuagguuc

SEQ ID NO: 2504497 - RNA, 19 nt, Artificial Sequence
  Description of Artificial Sequence: Synthetic oligonucleotide
uaacgaacauacaugguag

SEQ ID NO: 2504498 - RNA, 19 nt, Artificial Sequence
  Description of Artificial Sequence: Synthetic oligonucleotide
cugagaaucauaauuauca

SEQ ID NO: 2504499 - RNA, 19 nt, Artificial Sequence
  Description of Artificial Sequence: Synthetic oligonucleotide
auuucaagcaaguugucug

SEQ ID NO: 2504500 - RNA, 19 nt, Artificial Sequence
  Description of Artificial Sequence: Synthetic oligonucleotide
acugauauaaggcaaugca

SEQ ID NO: 2504501 - RNA, 19 nt, Artificial Sequence
  Description of Artificial Sequence: Synthetic oligonucleotide
agcauuacuccaaauaggc

SEQ ID NO: 2504502 - RNA, 19 nt, Artificial Sequence
  Description of Artificial Sequence: Synthetic oligonucleotide
aacgaacauacaugguagc

SEQ ID NO: 2504503 - RNA, 19 nt, Artificial Sequence
  Description of Artificial Sequence: Synthetic oligonucleotide
ugauguaugagaauaugaa

SEQ ID NO: 2504504 - RNA, 19 nt, Artificial Sequence
  Description of Artificial Sequence: Synthetic oligonucleotide
ucaaugucagccuugauua

SEQ ID NO: 2504505 - RNA, 19 nt, Artificial Sequence
  Description of Artificial Sequence: Synthetic oligonucleotide
cuuuguguuaauucuuugg

SEQ ID NO: 2504506 - RNA, 19 nt, Artificial Sequence
  Description of Artificial Sequence: Synthetic oligonucleotide
aauuuucugaaaaucacga

SEQ ID NO: 2504507 - RNA, 19 nt, Artificial Sequence
  Description of Artificial Sequence: Synthetic oligonucleotide
aacugcagcaauauuuagc

SEQ ID NO: 2504508 - RNA, 19 nt, Artificial Sequence
  Description of Artificial Sequence: Synthetic oligonucleotide
uauaaggcaaugcaggauc

SEQ ID NO: 2504509 - RNA, 19 nt, Artificial Sequence
  Description of Artificial Sequence: Synthetic oligonucleotide
aauuugaugauuagguucu

SEQ ID NO: 2504510 - RNA, 19 nt, Artificial Sequence
  Description of Artificial Sequence: Synthetic oligonucleotide
gguuaauccauguaaauug

SEQ ID NO: 2504511 - RNA, 19 nt, Artificial Sequence
  Description of Artificial Sequence: Synthetic oligonucleotide
aaagcagcgguguucuuuc

SEQ ID NO: 2504512 - RNA, 19 nt, Artificial Sequence
  Description of Artificial Sequence: Synthetic oligonucleotide
uguaugagaauaugaaggu

SEQ ID NO: 2504513 - RNA, 19 nt, Artificial Sequence
  Description of Artificial Sequence: Synthetic oligonucleotide
aaaucacgaauguaaguca

SEQ ID NO: 2504514 - RNA, 19 nt, Artificial Sequence
  Description of Artificial Sequence: Synthetic oligonucleotide
uuucucaaaucccugagaa

SEQ ID NO: 2504515 - RNA, 19 nt, Artificial Sequence
  Description of Artificial Sequence: Synthetic oligonucleotide
uuucauugguuacagggca

SEQ ID NO: 2504516 - RNA, 19 nt, Artificial Sequence
  Description of Artificial Sequence: Synthetic oligonucleotide
uagcauuacuccaaauagg

SEQ ID NO: 2504517 - RNA, 19 nt, Artificial Sequence
  Description of Artificial Sequence: Synthetic oligonucleotide
guagcaauaccuaaaacug

SEQ ID NO: 2504518 - RNA, 19 nt, Artificial Sequence
  Description of Artificial Sequence: Synthetic oligonucleotide
uaugccacaagagaagucc

SEQ ID NO: 2504519 - RNA, 19 nt, Artificial Sequence
  Description of Artificial Sequence: Synthetic oligonucleotide
auugcagugauguaugaga

SEQ ID NO: 2504520 - RNA, 19 nt, Artificial Sequence
  Description of Artificial Sequence: Synthetic oligonucleotide
uuucaagcaaguugucugg

SEQ ID NO: 2504521 - RNA, 19 nt, Artificial Sequence
  Description of Artificial Sequence: Synthetic oligonucleotide
aagcacauaugccacaaga

SEQ ID NO: 2504522 - RNA, 19 nt, Artificial Sequence
  Description of Artificial Sequence: Synthetic oligonucleotide
acgaauguaagucaggaaa

SEQ ID NO: 2504523 - RNA, 19 nt, Artificial Sequence
  Description of Artificial Sequence: Synthetic oligonucleotide
uaauccauguaaauuggcu

SEQ ID NO: 2504524 - RNA, 19 nt, Artificial Sequence
  Description of Artificial Sequence: Synthetic oligonucleotide
ucagaguauaaugagcaag

SEQ ID NO: 2504525 - RNA, 19 nt, Artificial Sequence
  Description of Artificial Sequence: Synthetic oligonucleotide
gaugauuagguucucuuca

SEQ ID NO: 2504526 - RNA, 19 nt, Artificial Sequence
  Description of Artificial Sequence: Synthetic oligonucleotide
uuuccccucauuaaaaguc

SEQ ID NO: 2504527 - RNA, 19 nt, Artificial Sequence
  Description of Artificial Sequence: Synthetic oligonucleotide
uagcaaauguccaaauuac

SEQ ID NO: 2504528 - RNA, 19 nt, Artificial Sequence
  Description of Artificial Sequence: Synthetic oligonucleotide
acauacaugguagcaauac

SEQ ID NO: 2504529 - RNA, 19 nt, Artificial Sequence
  Description of Artificial Sequence: Synthetic oligonucleotide
cuuucauugguuacagggc

SEQ ID NO: 2504530 - RNA, 19 nt, Artificial Sequence
  Description of Artificial Sequence: Synthetic oligonucleotide
augugaagcacauaugcca

SEQ ID NO: 2504531 - RNA, 19 nt, Artificial Sequence
  Description of Artificial Sequence: Synthetic oligonucleotide
ucuuucucaaaucccugag

SEQ ID NO: 2504532 - RNA, 19 nt, Artificial Sequence
  Description of Artificial Sequence: Synthetic oligonucleotide
aacaacucaguaucccaag

SEQ ID NO: 2504533 - RNA, 19 nt, Artificial Sequence
  Description of Artificial Sequence: Synthetic oligonucleotide
agaauaugaagguagcaaa

SEQ ID NO: 2504534 - RNA, 19 nt, Artificial Sequence
  Description of Artificial Sequence: Synthetic oligonucleotide
cugaaaaucacgaauguaa

SEQ ID NO: 2504535 - RNA, 19 nt, Artificial Sequence
  Description of Artificial Sequence: Synthetic oligonucleotide
auaugaagguagcaaaugu

SEQ ID NO: 2504536 - RNA, 19 nt, Artificial Sequence
  Description of Artificial Sequence: Synthetic oligonucleotide
uaggcuuuauaccauuucu

SEQ ID NO: 2504537 - RNA, 19 nt, Artificial Sequence
  Description of Artificial Sequence: Synthetic oligonucleotide
uaugaagguagcaaauguc

SEQ ID NO: 2504538 - RNA, 19 nt, Artificial Sequence
  Description of Artificial Sequence: Synthetic oligonucleotide
uuaauccauguaaauuggc

SEQ ID NO: 2504539 - RNA, 19 nt, Artificial Sequence
  Description of Artificial Sequence: Synthetic oligonucleotide
uugguuacagggcaaggug

SEQ ID NO: 2504540 - RNA, 19 nt, Artificial Sequence
  Description of Artificial Sequence: Synthetic oligonucleotide
ugauuagguucucuucagg

SEQ ID NO: 2504541 - RNA, 19 nt, Artificial Sequence
  Description of Artificial Sequence: Synthetic oligonucleotide
uccaaagaaggaaaaugac

SEQ ID NO: 2504542 - RNA, 19 nt, Artificial Sequence
  Description of Artificial Sequence: Synthetic oligonucleotide
ugugaagcacauaugccac

SEQ ID NO: 2504543 - RNA, 19 nt, Artificial Sequence
  Description of Artificial Sequence: Synthetic oligonucleotide
guuaauccauguaaauugg

SEQ ID NO: 2504544 - RNA, 19 nt, Artificial Sequence
  Description of Artificial Sequence: Synthetic oligonucleotide
gauuagguucucuucagga

SEQ ID NO: 2504545 - RNA, 19 nt, Artificial Sequence
  Description of Artificial Sequence: Synthetic oligonucleotide
aucgucagaguauaaugag

SEQ ID NO: 2504546 - RNA, 19 nt, Artificial Sequence
  Description of Artificial Sequence: Synthetic oligonucleotide
aucauaauuaucacagaag

SEQ ID NO: 2504547 - RNA, 19 nt, Artificial Sequence
  Description of Artificial Sequence: Synthetic oligonucleotide
uuaaugucaaugucagccu

SEQ ID NO: 2504548 - RNA, 19 nt, Artificial Sequence
  Description of Artificial Sequence: Synthetic oligonucleotide
aaucgucagaguauaauga

SEQ ID NO: 2504549 - RNA, 19 nt, Artificial Sequence
  Description of Artificial Sequence: Synthetic oligonucleotide
gauauaaggcaaugcagga

SEQ ID NO: 2504550 - RNA, 19 nt, Artificial Sequence
  Description of Artificial Sequence: Synthetic oligonucleotide
caauaccuaaaacugcagc

SEQ ID NO: 2504551 - RNA, 19 nt, Artificial Sequence
  Description of Artificial Sequence: Synthetic oligonucleotide
uaaauuggcuuccacccgu

SEQ ID NO: 2504552 - RNA, 19 nt, Artificial Sequence
  Description of Artificial Sequence: Synthetic oligonucleotide
aaggcaaugcaggaucaac

SEQ ID NO: 2504553 - RNA, 19 nt, Artificial Sequence
  Description of Artificial Sequence: Synthetic oligonucleotide
aaucacgaauguaagucag

SEQ ID NO: 2504554 - RNA, 19 nt, Artificial Sequence
  Description of Artificial Sequence: Synthetic oligonucleotide
uuuauaccauuucuaguuc

SEQ ID NO: 2504555 - RNA, 19 nt, Artificial Sequence
  Description of Artificial Sequence: Synthetic oligonucleotide
aguaucccaaguacaaggc

SEQ ID NO: 2504556 - RNA, 19 nt, Artificial Sequence
  Description of Artificial Sequence: Synthetic oligonucleotide
ugagaaucauaauuaucac

SEQ ID NO: 2504557 - RNA, 19 nt, Artificial Sequence
  Description of Artificial Sequence: Synthetic oligonucleotide
uagcaauaccuaaaacugc

SEQ ID NO: 2504558 - RNA, 19 nt, Artificial Sequence
  Description of Artificial Sequence: Synthetic oligonucleotide
agcaauauuuagcauuacu

SEQ ID NO: 2504559 - RNA, 19 nt, Artificial Sequence
  Description of Artificial Sequence: Synthetic oligonucleotide
caugugaagcacauaugcc

SEQ ID NO: 2504560 - RNA, 19 nt, Artificial Sequence
  Description of Artificial Sequence: Synthetic oligonucleotide
ucauuaaaagucucuggaa

SEQ ID NO: 2504561 - RNA, 19 nt, Artificial Sequence
  Description of Artificial Sequence: Synthetic oligonucleotide
accagugucacugauauaa

SEQ ID NO: 2504562 - RNA, 19 nt, Artificial Sequence
  Description of Artificial Sequence: Synthetic oligonucleotide
uucugaaaaucacgaaugu

SEQ ID NO: 2504563 - RNA, 19 nt, Artificial Sequence
  Description of Artificial Sequence: Synthetic oligonucleotide
ucgucagaguauaaugagc

SEQ ID NO: 2504564 - RNA, 19 nt, Artificial Sequence
  Description of Artificial Sequence: Synthetic oligonucleotide
aguccuaacaacucaguau

SEQ ID NO: 2504565 - RNA, 19 nt, Artificial Sequence
  Description of Artificial Sequence: Synthetic oligonucleotide
guaauuuucugaaaaucac

SEQ ID NO: 2504566 - RNA, 19 nt, Artificial Sequence
  Description of Artificial Sequence: Synthetic oligonucleotide
uuauaccauuucuaguucu

SEQ ID NO: 2504567 - RNA, 19 nt, Artificial Sequence
  Description of Artificial Sequence: Synthetic oligonucleotide
ucuaguucucagaugguau

SEQ ID NO: 2504568 - RNA, 19 nt, Artificial Sequence
  Description of Artificial Sequence: Synthetic oligonucleotide
ugguuacagggcaaggugc

SEQ ID NO: 2504569 - RNA, 19 nt, Artificial Sequence
  Description of Artificial Sequence: Synthetic oligonucleotide
cucauuaaaagucucugga

SEQ ID NO: 2504570 - RNA, 19 nt, Artificial Sequence
  Description of Artificial Sequence: Synthetic oligonucleotide
uuaauucuuuggcuuccag

SEQ ID NO: 2504571 - RNA, 19 nt, Artificial Sequence
  Description of Artificial Sequence: Synthetic oligonucleotide
guaacgaacauacauggua

SEQ ID NO: 2504572 - RNA, 19 nt, Artificial Sequence
  Description of Artificial Sequence: Synthetic oligonucleotide
guaaauuggcuuccacccg

SEQ ID NO: 2504573 - RNA, 19 nt, Artificial Sequence
  Description of Artificial Sequence: Synthetic oligonucleotide
ucccugagaaucauaauua

SEQ ID NO: 2504574 - RNA, 19 nt, Artificial Sequence
  Description of Artificial Sequence: Synthetic oligonucleotide
caaauuacaagugcugaug

SEQ ID NO: 2504575 - RNA, 19 nt, Artificial Sequence
  Description of Artificial Sequence: Synthetic oligonucleotide
uccaaauuacaagugcuga

SEQ ID NO: 2504576 - RNA, 19 nt, Artificial Sequence
  Description of Artificial Sequence: Synthetic oligonucleotide
gauucagugcaugaacuug

SEQ ID NO: 2504577 - RNA, 19 nt, Artificial Sequence
  Description of Artificial Sequence: Synthetic oligonucleotide
aacuuguuuguaacgaaca

SEQ ID NO: 2504578 - RNA, 19 nt, Artificial Sequence
  Description of Artificial Sequence: Synthetic oligonucleotide
uaauuaucacagaaguauu

SEQ ID NO: 2504579 - RNA, 19 nt, Artificial Sequence
  Description of Artificial Sequence: Synthetic oligonucleotide
agugcaugaacuuguuugu

SEQ ID NO: 2504580 - RNA, 19 nt, Artificial Sequence
  Description of Artificial Sequence: Synthetic oligonucleotide
ugacauagaccauucugcu

SEQ ID NO: 2504581 - RNA, 19 nt, Artificial Sequence
  Description of Artificial Sequence: Synthetic oligonucleotide
acugauucaaaucgucaga

SEQ ID NO: 2504582 - RNA, 19 nt, Artificial Sequence
  Description of Artificial Sequence: Synthetic oligonucleotide
cauacaugguagcaauacc

SEQ ID NO: 2504583 - RNA, 19 nt, Artificial Sequence
  Description of Artificial Sequence: Synthetic oligonucleotide
ggcuuuauaccauuucuag

SEQ ID NO: 2504584 - RNA, 19 nt, Artificial Sequence
  Description of Artificial Sequence: Synthetic oligonucleotide
uuuuccccucauuaaaagu

SEQ ID NO: 2504585 - RNA, 19 nt, Artificial Sequence
  Description of Artificial Sequence: Synthetic oligonucleotide
augauuagguucucuucag

SEQ ID NO: 2504586 - RNA, 19 nt, Artificial Sequence
  Description of Artificial Sequence: Synthetic oligonucleotide
aauaggcaucuuucuggag

SEQ ID NO: 2504587 - RNA, 19 nt, Artificial Sequence
  Description of Artificial Sequence: Synthetic oligonucleotide
aucccugagaaucauaauu

SEQ ID NO: 2504588 - RNA, 19 nt, Artificial Sequence
  Description of Artificial Sequence: Synthetic oligonucleotide
cugauucaaaucgucagag

SEQ ID NO: 2504589 - RNA, 19 nt, Artificial Sequence
  Description of Artificial Sequence: Synthetic oligonucleotide
uaacaacucaguaucccaa

SEQ ID NO: 2504590 - RNA, 19 nt, Artificial Sequence
  Description of Artificial Sequence: Synthetic oligonucleotide
auacaugguagcaauaccu

SEQ ID NO: 2504591 - RNA, 19 nt, Artificial Sequence
  Description of Artificial Sequence: Synthetic oligonucleotide
aagucucuggaaagcagcg

SEQ ID NO: 2504592 - RNA, 19 nt, Artificial Sequence
  Description of Artificial Sequence: Synthetic oligonucleotide
acagaggccuugcuggaac

SEQ ID NO: 2504593 - RNA, 19 nt, Artificial Sequence
  Description of Artificial Sequence: Synthetic oligonucleotide
ugaugauuagguucucuuc

SEQ ID NO: 2504594 - RNA, 19 nt, Artificial Sequence
  Description of Artificial Sequence: Synthetic oligonucleotide
auaaaggguuaauccaugu

SEQ ID NO: 2504595 - RNA, 19 nt, Artificial Sequence
  Description of Artificial Sequence: Synthetic oligonucleotide
ucacgaauguaagucagga

SEQ ID NO: 2504596 - RNA, 19 nt, Artificial Sequence
  Description of Artificial Sequence: Synthetic oligonucleotide
agugcugauggcaggaaac

SEQ ID NO: 2504597 - RNA, 19 nt, Artificial Sequence
  Description of Artificial Sequence: Synthetic oligonucleotide
ugguggaguguuauugcag

SEQ ID NO: 2504598 - RNA, 19 nt, Artificial Sequence
  Description of Artificial Sequence: Synthetic oligonucleotide
gagaauaugaagguagcaa

SEQ ID NO: 2504599 - RNA, 19 nt, Artificial Sequence
  Description of Artificial Sequence: Synthetic oligonucleotide
gugcaucuuucucaaaucc

SEQ ID NO: 2504600 - RNA, 19 nt, Artificial Sequence
  Description of Artificial Sequence: Synthetic oligonucleotide
caugguggaguguuauugc

SEQ ID NO: 2504601 - RNA, 19 nt, Artificial Sequence
  Description of Artificial Sequence: Synthetic oligonucleotide
uauugcagugauguaugag

SEQ ID NO: 2504602 - RNA, 19 nt, Artificial Sequence
  Description of Artificial Sequence: Synthetic oligonucleotide
cacauuucaagcaaguugu

SEQ ID NO: 2504603 - RNA, 19 nt, Artificial Sequence
  Description of Artificial Sequence: Synthetic oligonucleotide
uguaacgaacauacauggu

SEQ ID NO: 2504604 - RNA, 19 nt, Artificial Sequence
  Description of Artificial Sequence: Synthetic oligonucleotide
auuagguucucuucaggau

SEQ ID NO: 2504605 - RNA, 19 nt, Artificial Sequence
  Description of Artificial Sequence: Synthetic oligonucleotide
guagugaccaugugaagca

SEQ ID NO: 2504606 - RNA, 19 nt, Artificial Sequence
  Description of Artificial Sequence: Synthetic oligonucleotide
ccaugugaagcacauaugc

SEQ ID NO: 2504607 - RNA, 19 nt, Artificial Sequence
  Description of Artificial Sequence: Synthetic oligonucleotide
cacauaugccacaagagaa

SEQ ID NO: 2504608 - RNA, 19 nt, Artificial Sequence
  Description of Artificial Sequence: Synthetic oligonucleotide
cuuucuggagguacuguac

SEQ ID NO: 2504609 - RNA, 19 nt, Artificial Sequence
  Description of Artificial Sequence: Synthetic oligonucleotide
augaacuuguuuguaacga

SEQ ID NO: 2504610 - RNA, 19 nt, Artificial Sequence
  Description of Artificial Sequence: Synthetic oligonucleotide
agugauguaugagaauaug

SEQ ID NO: 2504611 - RNA, 19 nt, Artificial Sequence
  Description of Artificial Sequence: Synthetic oligonucleotide
uuccccucauuaaaagucu

SEQ ID NO: 2504612 - RNA, 19 nt, Artificial Sequence
  Description of Artificial Sequence: Synthetic oligonucleotide
acuuuguguuaauucuuug

SEQ ID NO: 2504613 - RNA, 19 nt, Artificial Sequence
  Description of Artificial Sequence: Synthetic oligonucleotide
uccuaacaacucaguaucc

SEQ ID NO: 2504614 - RNA, 19 nt, Artificial Sequence
  Description of Artificial Sequence: Synthetic oligonucleotide
gcaauauuuagcauuacuc

SEQ ID NO: 2504615 - RNA, 19 nt, Artificial Sequence
  Description of Artificial Sequence: Synthetic oligonucleotide
cuaguucucagaugguauc

SEQ ID NO: 2504616 - RNA, 19 nt, Artificial Sequence
  Description of Artificial Sequence: Synthetic oligonucleotide
gaaucauaauuaucacaga

SEQ ID NO: 2504617 - RNA, 19 nt, Artificial Sequence
  Description of Artificial Sequence: Synthetic oligonucleotide
cuaacaacucaguauccca

SEQ ID NO: 2504618 - RNA, 19 nt, Artificial Sequence
  Description of Artificial Sequence: Synthetic oligonucleotide
ucauugguuacagggcaag

SEQ ID NO: 2504619 - RNA, 19 nt, Artificial Sequence
  Description of Artificial Sequence: Synthetic oligonucleotide
uucaaaucgucagaguaua

SEQ ID NO: 2504620 - RNA, 19 nt, Artificial Sequence
  Description of Artificial Sequence: Synthetic oligonucleotide
uuuguugaauuugaugauu

SEQ ID NO: 2504621 - RNA, 19 nt, Artificial Sequence
  Description of Artificial Sequence: Synthetic oligonucleotide
augguagcaauaccuaaaa

SEQ ID NO: 2504622 - RNA, 19 nt, Artificial Sequence
  Description of Artificial Sequence: Synthetic oligonucleotide
uguuuguaacgaacauaca

SEQ ID NO: 2504623 - RNA, 19 nt, Artificial Sequence
  Description of Artificial Sequence: Synthetic oligonucleotide
cauguagacugugagcuug

SEQ ID NO: 2504624 - RNA, 19 nt, Artificial Sequence
  Description of Artificial Sequence: Synthetic oligonucleotide
guaucccaaguacaaggcc

SEQ ID NO: 2504625 - RNA, 19 nt, Artificial Sequence
  Description of Artificial Sequence: Synthetic oligonucleotide
acuuguuuguaacgaacau

SEQ ID NO: 2504626 - RNA, 19 nt, Artificial Sequence
  Description of Artificial Sequence: Synthetic oligonucleotide
uccauguaaauuggcuucc

SEQ ID NO: 2504627 - RNA, 19 nt, Artificial Sequence
  Description of Artificial Sequence: Synthetic oligonucleotide
ugauucaaaucgucagagu

SEQ ID NO: 2504628 - RNA, 19 nt, Artificial Sequence
  Description of Artificial Sequence: Synthetic oligonucleotide
agcacauaugccacaagag

SEQ ID NO: 2504629 - RNA, 19 nt, Artificial Sequence
  Description of Artificial Sequence: Synthetic oligonucleotide
cacccguaaaguaauuuuc

SEQ ID NO: 2504630 - RNA, 19 nt, Artificial Sequence
  Description of Artificial Sequence: Synthetic oligonucleotide
cauuacuccaaauaggcau

SEQ ID NO: 2504631 - RNA, 19 nt, Artificial Sequence
  Description of Artificial Sequence: Synthetic oligonucleotide
caggauucagugcaugaac

SEQ ID NO: 2504632 - RNA, 19 nt, Artificial Sequence
  Description of Artificial Sequence: Synthetic oligonucleotide
aaacagaggccuugcugga

SEQ ID NO: 2504633 - RNA, 19 nt, Artificial Sequence
  Description of Artificial Sequence: Synthetic oligonucleotide
gaaaaucacgaauguaagu

SEQ ID NO: 2504634 - RNA, 19 nt, Artificial Sequence
  Description of Artificial Sequence: Synthetic oligonucleotide
uaccuaaaacugcagcaau

SEQ ID NO: 2504635 - RNA, 19 nt, Artificial Sequence
  Description of Artificial Sequence: Synthetic oligonucleotide
uucuuucauugguuacagg

SEQ ID NO: 2504636 - RNA, 19 nt, Artificial Sequence
  Description of Artificial Sequence: Synthetic oligonucleotide
aggaucaacaugguggagu

SEQ ID NO: 2504637 - RNA, 19 nt, Artificial Sequence
  Description of Artificial Sequence: Synthetic oligonucleotide
uggaguguuauugcaguga

SEQ ID NO: 2504638 - RNA, 19 nt, Artificial Sequence
  Description of Artificial Sequence: Synthetic oligonucleotide
gaccaugugaagcacauau

SEQ ID NO: 2504639 - RNA, 19 nt, Artificial Sequence
  Description of Artificial Sequence: Synthetic oligonucleotide
aaggguuaauccauguaaa

SEQ ID NO: 2504640 - RNA, 19 nt, Artificial Sequence
  Description of Artificial Sequence: Synthetic oligonucleotide
auuaucacagaaguauuuu

SEQ ID NO: 2504641 - RNA, 19 nt, Artificial Sequence
  Description of Artificial Sequence: Synthetic oligonucleotide
uucuuuggcuuccagucuu

SEQ ID NO: 2504642 - RNA, 19 nt, Artificial Sequence
  Description of Artificial Sequence: Synthetic oligonucleotide
ugguagcaauaccuaaaac

SEQ ID NO: 2504643 - RNA, 19 nt, Artificial Sequence
  Description of Artificial Sequence: Synthetic oligonucleotide
aguugucuggaucaacuuu

SEQ ID NO: 2504644 - RNA, 19 nt, Artificial Sequence
  Description of Artificial Sequence: Synthetic oligonucleotide
acaacucaguaucccaagu

SEQ ID NO: 2504645 - RNA, 19 nt, Artificial Sequence
  Description of Artificial Sequence: Synthetic oligonucleotide
aaguugucuggaucaacuu

SEQ ID NO: 2504646 - RNA, 19 nt, Artificial Sequence
  Description of Artificial Sequence: Synthetic oligonucleotide
auauuuagcauuacuccaa

SEQ ID NO: 2504647 - RNA, 19 nt, Artificial Sequence
  Description of Artificial Sequence: Synthetic oligonucleotide
agacugugagcuugaaccu

SEQ ID NO: 2504648 - RNA, 19 nt, Artificial Sequence
  Description of Artificial Sequence: Synthetic oligonucleotide
aaucccugagaaucauaau

SEQ ID NO: 2504649 - RNA, 19 nt, Artificial Sequence
  Description of Artificial Sequence: Synthetic oligonucleotide
gugauguaugagaauauga

SEQ ID NO: 2504650 - RNA, 19 nt, Artificial Sequence
  Description of Artificial Sequence: Synthetic oligonucleotide
cauguaaauuggcuuccac

SEQ ID NO: 2504651 - RNA, 19 nt, Artificial Sequence
  Description of Artificial Sequence: Synthetic oligonucleotide
acaugguagcaauaccuaa

SEQ ID NO: 2504652 - RNA, 19 nt, Artificial Sequence
  Description of Artificial Sequence: Synthetic oligonucleotide
guguuaauucuuuggcuuc

SEQ ID NO: 2504653 - RNA, 19 nt, Artificial Sequence
  Description of Artificial Sequence: Synthetic oligonucleotide
aacuuuguguuaauucuuu

SEQ ID NO: 2504654 - RNA, 19 nt, Artificial Sequence
  Description of Artificial Sequence: Synthetic oligonucleotide
caucuuucucaaaucccug

SEQ ID NO: 2504655 - RNA, 19 nt, Artificial Sequence
  Description of Artificial Sequence: Synthetic oligonucleotide
augguggaguguuauugca

SEQ ID NO: 2504656 - RNA, 19 nt, Artificial Sequence
  Description of Artificial Sequence: Synthetic oligonucleotide
uucauugguuacagggcaa

SEQ ID NO: 2504657 - RNA, 19 nt, Artificial Sequence
  Description of Artificial Sequence: Synthetic oligonucleotide
cauaauuaucacagaagua

SEQ ID NO: 2504658 - RNA, 19 nt, Artificial Sequence
  Description of Artificial Sequence: Synthetic oligonucleotide
ugucagccuugauuaacug

SEQ ID NO: 2504659 - RNA, 19 nt, Artificial Sequence
  Description of Artificial Sequence: Synthetic oligonucleotide
auaccuaaaacugcagcaa

SEQ ID NO: 2504660 - RNA, 19 nt, Artificial Sequence
  Description of Artificial Sequence: Synthetic oligonucleotide
ugaagcacauaugccacaa

SEQ ID NO: 2504661 - RNA, 19 nt, Artificial Sequence
  Description of Artificial Sequence: Synthetic oligonucleotide
ggaucaacaugguggagug

SEQ ID NO: 2504662 - RNA, 19 nt, Artificial Sequence
  Description of Artificial Sequence: Synthetic oligonucleotide
ugucuggaucaacuuugug

SEQ ID NO: 2504663 - RNA, 19 nt, Artificial Sequence
  Description of Artificial Sequence: Synthetic oligonucleotide
aggguuaauccauguaaau

SEQ ID NO: 2504664 - RNA, 19 nt, Artificial Sequence
  Description of Artificial Sequence: Synthetic oligonucleotide
uuucuaguucucagauggu

SEQ ID NO: 2504665 - RNA, 19 nt, Artificial Sequence
  Description of Artificial Sequence: Synthetic oligonucleotide
auucaaaucgucagaguau

SEQ ID NO: 2504666 - RNA, 19 nt, Artificial Sequence
  Description of Artificial Sequence: Synthetic oligonucleotide
uugaaccuugacucagaga

SEQ ID NO: 2504667 - RNA, 19 nt, Artificial Sequence
  Description of Artificial Sequence: Synthetic oligonucleotide
cucaguaucccaaguacaa

SEQ ID NO: 2504668 - RNA, 19 nt, Artificial Sequence
  Description of Artificial Sequence: Synthetic oligonucleotide
auucagugcaugaacuugu

SEQ ID NO: 2504669 - RNA, 19 nt, Artificial Sequence
  Description of Artificial Sequence: Synthetic oligonucleotide
gaagcacauaugccacaag

SEQ ID NO: 2504670 - RNA, 19 nt, Artificial Sequence
  Description of Artificial Sequence: Synthetic oligonucleotide
caugguagcaauaccuaaa

SEQ ID NO: 2504671 - RNA, 19 nt, Artificial Sequence
  Description of Artificial Sequence: Synthetic oligonucleotide
gaaaaugacauagaccauu

SEQ ID NO: 2504672 - RNA, 19 nt, Artificial Sequence
  Description of Artificial Sequence: Synthetic oligonucleotide
uucuaguucucagauggua

SEQ ID NO: 2504673 - RNA, 19 nt, Artificial Sequence
  Description of Artificial Sequence: Synthetic oligonucleotide
aucaacaugguggaguguu

SEQ ID NO: 2504674 - RNA, 19 nt, Artificial Sequence
  Description of Artificial Sequence: Synthetic oligonucleotide
uugucuggaucaacuuugu

SEQ ID NO: 2504675 - RNA, 19 nt, Artificial Sequence
  Description of Artificial Sequence: Synthetic oligonucleotide
agcuugaaccuugacucag

SEQ ID NO: 2504676 - RNA, 19 nt, Artificial Sequence
  Description of Artificial Sequence: Synthetic oligonucleotide
ucaaaucgucagaguauaa

SEQ ID NO: 2504677 - RNA, 19 nt, Artificial Sequence
  Description of Artificial Sequence: Synthetic oligonucleotide
acgaacauacaugguagca

SEQ ID NO: 2504678 - RNA, 19 nt, Artificial Sequence
  Description of Artificial Sequence: Synthetic oligonucleotide
ugcugcaguagugaccaug

SEQ ID NO: 2504679 - RNA, 19 nt, Artificial Sequence
  Description of Artificial Sequence: Synthetic oligonucleotide
gugucauaaaggguuaauc

SEQ ID NO: 2504680 - RNA, 19 nt, Artificial Sequence
  Description of Artificial Sequence: Synthetic oligonucleotide
aggauucagugcaugaacu

SEQ ID NO: 2504681 - RNA, 19 nt, Artificial Sequence
  Description of Artificial Sequence: Synthetic oligonucleotide
aucacgaauguaagucagg

SEQ ID NO: 2504682 - RNA, 19 nt, Artificial Sequence
  Description of Artificial Sequence: Synthetic oligonucleotide
ucaagcaaguugucuggau

SEQ ID NO: 2504683 - RNA, 19 nt, Artificial Sequence
  Description of Artificial Sequence: Synthetic oligonucleotide
cagaguauaaugagcaagu

SEQ ID NO: 2504684 - RNA, 19 nt, Artificial Sequence
  Description of Artificial Sequence: Synthetic oligonucleotide
aacaugguggaguguuauu

SEQ ID NO: 2504685 - RNA, 19 nt, Artificial Sequence
  Description of Artificial Sequence: Synthetic oligonucleotide
auauaaggcaaugcaggau

SEQ ID NO: 2504686 - RNA, 19 nt, Artificial Sequence
  Description of Artificial Sequence: Synthetic oligonucleotide
auuuagcauuacuccaaau

SEQ ID NO: 2504687 - RNA, 19 nt, Artificial Sequence
  Description of Artificial Sequence: Synthetic oligonucleotide
guguucuuucauugguuac

SEQ ID NO: 2504688 - RNA, 19 nt, Artificial Sequence
  Description of Artificial Sequence: Synthetic oligonucleotide
auaugccacaagagaaguc

SEQ ID NO: 2504689 - RNA, 19 nt, Artificial Sequence
  Description of Artificial Sequence: Synthetic oligonucleotide
ugugagcuugaaccuugac

SEQ ID NO: 2504690 - RNA, 19 nt, Artificial Sequence
  Description of Artificial Sequence: Synthetic oligonucleotide
uucaagcaaguugucugga

SEQ ID NO: 2504691 - RNA, 19 nt, Artificial Sequence
  Description of Artificial Sequence: Synthetic oligonucleotide
cauugguuacagggcaagg

SEQ ID NO: 2504692 - RNA, 19 nt, Artificial Sequence
  Description of Artificial Sequence: Synthetic oligonucleotide
cagcgguguucuuucauug

SEQ ID NO: 2504693 - RNA, 19 nt, Artificial Sequence
  Description of Artificial Sequence: Synthetic oligonucleotide
cuuucucaaaucccugaga

SEQ ID NO: 2504694 - RNA, 19 nt, Artificial Sequence
  Description of Artificial Sequence: Synthetic oligonucleotide
acucaguaucccaaguaca

SEQ ID NO: 2504695 - RNA, 19 nt, Artificial Sequence
  Description of Artificial Sequence: Synthetic oligonucleotide
aauuggcuuccacccguaa

SEQ ID NO: 2504696 - RNA, 19 nt, Artificial Sequence
  Description of Artificial Sequence: Synthetic oligonucleotide
acccguaaaguaauuuucu

SEQ ID NO: 2504697 - RNA, 19 nt, Artificial Sequence
  Description of Artificial Sequence: Synthetic oligonucleotide
ugcagugauguaugagaau

SEQ ID NO: 2504698 - RNA, 19 nt, Artificial Sequence
  Description of Artificial Sequence: Synthetic oligonucleotide
aggcaaugcaggaucaaca

SEQ ID NO: 2504699 - RNA, 19 nt, Artificial Sequence
  Description of Artificial Sequence: Synthetic oligonucleotide
guggaguguuauugcagug

SEQ ID NO: 2504700 - RNA, 19 nt, Artificial Sequence
  Description of Artificial Sequence: Synthetic oligonucleotide
aaggccagcuuuguugaau

SEQ ID NO: 2504701 - RNA, 19 nt, Artificial Sequence
  Description of Artificial Sequence: Synthetic oligonucleotide
augucagccuugauuaacu

SEQ ID NO: 2504702 - RNA, 19 nt, Artificial Sequence
  Description of Artificial Sequence: Synthetic oligonucleotide
cuuguuuguaacgaacaua

SEQ ID NO: 2504703 - RNA, 19 nt, Artificial Sequence
  Description of Artificial Sequence: Synthetic oligonucleotide
uucagugcaugaacuuguu

SEQ ID NO: 2504704 - RNA, 19 nt, Artificial Sequence
  Description of Artificial Sequence: Synthetic oligonucleotide
uccccucauuaaaagucuc

SEQ ID NO: 2504705 - RNA, 19 nt, Artificial Sequence
  Description of Artificial Sequence: Synthetic oligonucleotide
ccuaacaacucaguauccc

SEQ ID NO: 2504706 - RNA, 19 nt, Artificial Sequence
  Description of Artificial Sequence: Synthetic oligonucleotide
gaaccuugacucagagaug

SEQ ID NO: 2504707 - RNA, 19 nt, Artificial Sequence
  Description of Artificial Sequence: Synthetic oligonucleotide
agugucauaaaggguuaau

SEQ ID NO: 2504708 - RNA, 19 nt, Artificial Sequence
  Description of Artificial Sequence: Synthetic oligonucleotide
cuugcuggaaccaccacau

SEQ ID NO: 2504709 - RNA, 19 nt, Artificial Sequence
  Description of Artificial Sequence: Synthetic oligonucleotide
gagcuugaaccuugacuca

SEQ ID NO: 2504710 - RNA, 19 nt, Artificial Sequence
  Description of Artificial Sequence: Synthetic oligonucleotide
ugccacaagagaaguccua

SEQ ID NO: 2504711 - RNA, 19 nt, Artificial Sequence
  Description of Artificial Sequence: Synthetic oligonucleotide
aacauacaugguagcaaua

SEQ ID NO: 2504712 - RNA, 19 nt, Artificial Sequence
  Description of Artificial Sequence: Synthetic oligonucleotide
gcagugauguaugagaaua

SEQ ID NO: 2504713 - RNA, 19 nt, Artificial Sequence
  Description of Artificial Sequence: Synthetic oligonucleotide
cgucagaguauaaugagca

SEQ ID NO: 2504714 - RNA, 19 nt, Artificial Sequence
  Description of Artificial Sequence: Synthetic oligonucleotide
ccguaaaguaauuuucuga

SEQ ID NO: 2504715 - RNA, 19 nt, Artificial Sequence
  Description of Artificial Sequence: Synthetic oligonucleotide
accaugugaagcacauaug

SEQ ID NO: 2504716 - RNA, 19 nt, Artificial Sequence
  Description of Artificial Sequence: Synthetic oligonucleotide
gaguguuauugcagugaug

SEQ ID NO: 2504717 - RNA, 19 nt, Artificial Sequence
  Description of Artificial Sequence: Synthetic oligonucleotide
ucauguagacugugagcuu

SEQ ID NO: 2504718 - RNA, 19 nt, Artificial Sequence
  Description of Artificial Sequence: Synthetic oligonucleotide
gguguucuuucauugguua

SEQ ID NO: 2504719 - RNA, 19 nt, Artificial Sequence
  Description of Artificial Sequence: Synthetic oligonucleotide
ugguaggcuuuauaccauu

SEQ ID NO: 2504720 - RNA, 19 nt, Artificial Sequence
  Description of Artificial Sequence: Synthetic oligonucleotide
cccguaaaguaauuuucug

SEQ ID NO: 2504721 - RNA, 19 nt, Artificial Sequence
  Description of Artificial Sequence: Synthetic oligonucleotide
gucagaguauaaugagcaa

SEQ ID NO: 2504722 - RNA, 19 nt, Artificial Sequence
  Description of Artificial Sequence: Synthetic oligonucleotide
guaugagaauaugaaggua

SEQ ID NO: 2504723 - RNA, 19 nt, Artificial Sequence
  Description of Artificial Sequence: Synthetic oligonucleotide
aggccagcuuuguugaauu

SEQ ID NO: 2504724 - RNA, 19 nt, Artificial Sequence
  Description of Artificial Sequence: Synthetic oligonucleotide
gccuugauuaacugauuca

SEQ ID NO: 2504725 - RNA, 19 nt, Artificial Sequence
  Description of Artificial Sequence: Synthetic oligonucleotide
uccacccguaaaguaauuu

SEQ ID NO: 2504726 - RNA, 19 nt, Artificial Sequence
  Description of Artificial Sequence: Synthetic oligonucleotide
gugaagcacauaugccaca

SEQ ID NO: 2504727 - RNA, 19 nt, Artificial Sequence
  Description of Artificial Sequence: Synthetic oligonucleotide
uaaggcaaugcaggaucaa

SEQ ID NO: 2504728 - RNA, 19 nt, Artificial Sequence
  Description of Artificial Sequence: Synthetic oligonucleotide
agguacuguaccaguguca

SEQ ID NO: 2504729 - RNA, 19 nt, Artificial Sequence
  Description of Artificial Sequence: Synthetic oligonucleotide
gcuggaaccaccacauuuc

SEQ ID NO: 2504730 - RNA, 19 nt, Artificial Sequence
  Description of Artificial Sequence: Synthetic oligonucleotide
aacagaggccuugcuggaa

SEQ ID NO: 2504731 - RNA, 19 nt, Artificial Sequence
  Description of Artificial Sequence: Synthetic oligonucleotide
agcagcgguguucuuucau

SEQ ID NO: 2504732 - RNA, 19 nt, Artificial Sequence
  Description of Artificial Sequence: Synthetic oligonucleotide
cuggaaccaccacauuuca

SEQ ID NO: 2504733 - RNA, 19 nt, Artificial Sequence
  Description of Artificial Sequence: Synthetic oligonucleotide
gcaauaccuaaaacugcag

SEQ ID NO: 2504734 - RNA, 19 nt, Artificial Sequence
  Description of Artificial Sequence: Synthetic oligonucleotide
gcaaggugcagugucauaa

SEQ ID NO: 2504735 - RNA, 19 nt, Artificial Sequence
  Description of Artificial Sequence: Synthetic oligonucleotide
ggcaucuuucuggagguac

SEQ ID NO: 2504736 - RNA, 19 nt, Artificial Sequence
  Description of Artificial Sequence: Synthetic oligonucleotide
gguggaguguuauugcagu

SEQ ID NO: 2504737 - RNA, 19 nt, Artificial Sequence
  Description of Artificial Sequence: Synthetic oligonucleotide
accacauuucaagcaaguu

SEQ ID NO: 2504738 - RNA, 19 nt, Artificial Sequence
  Description of Artificial Sequence: Synthetic oligonucleotide
gacucagagaugguaggcu

SEQ ID NO: 2504739 - RNA, 19 nt, Artificial Sequence
  Description of Artificial Sequence: Synthetic oligonucleotide
auagaccauucugcugcag

SEQ ID NO: 2504740 - RNA, 19 nt, Artificial Sequence
  Description of Artificial Sequence: Synthetic oligonucleotide
cacgaauguaagucaggaa

SEQ ID NO: 2504741 - RNA, 19 nt, Artificial Sequence
  Description of Artificial Sequence: Synthetic oligonucleotide
uggcuuccacccguaaagu

SEQ ID NO: 2504742 - RNA, 19 nt, Artificial Sequence
  Description of Artificial Sequence: Synthetic oligonucleotide
gaggccuugcuggaaccac

SEQ ID NO: 2504743 - RNA, 19 nt, Artificial Sequence
  Description of Artificial Sequence: Synthetic oligonucleotide
gcuuuauaccauuucuagu

SEQ ID NO: 2504744 - RNA, 19 nt, Artificial Sequence
  Description of Artificial Sequence: Synthetic oligonucleotide
cccucauuaaaagucucug

SEQ ID NO: 2504745 - RNA, 19 nt, Artificial Sequence
  Description of Artificial Sequence: Synthetic oligonucleotide
cauagaccauucugcugca

SEQ ID NO: 2504746 - RNA, 19 nt, Artificial Sequence
  Description of Artificial Sequence: Synthetic oligonucleotide
uguagacugugagcuugaa

SEQ ID NO: 2504747 - RNA, 19 nt, Artificial Sequence
  Description of Artificial Sequence: Synthetic oligonucleotide
aaauuggcuuccacccgua

SEQ ID NO: 2504748 - RNA, 19 nt, Artificial Sequence
  Description of Artificial Sequence: Synthetic oligonucleotide
gaaagcagcgguguucuuu

SEQ ID NO: 2504749 - RNA, 19 nt, Artificial Sequence
  Description of Artificial Sequence: Synthetic oligonucleotide
caaaucgucagaguauaau

SEQ ID NO: 2504750 - RNA, 19 nt, Artificial Sequence
  Description of Artificial Sequence: Synthetic oligonucleotide
gguuacagggcaaggugca

SEQ ID NO: 2504751 - RNA, 19 nt, Artificial Sequence
  Description of Artificial Sequence: Synthetic oligonucleotide
augccacaagagaaguccu

SEQ ID NO: 2504752 - RNA, 19 nt, Artificial Sequence
  Description of Artificial Sequence: Synthetic oligonucleotide
caaggugcagugucauaaa

SEQ ID NO: 2504753 - RNA, 19 nt, Artificial Sequence
  Description of Artificial Sequence: Synthetic oligonucleotide
ccaccacauuucaagcaag

SEQ ID NO: 2504754 - RNA, 19 nt, Artificial Sequence
  Description of Artificial Sequence: Synthetic oligonucleotide
gcuuccacccguaaaguaa

SEQ ID NO: 2504755 - RNA, 19 nt, Artificial Sequence
  Description of Artificial Sequence: Synthetic oligonucleotide
augguaggcuuuauaccau

SEQ ID NO: 2504756 - RNA, 19 nt, Artificial Sequence
  Description of Artificial Sequence: Synthetic oligonucleotide
ccacaagagaaguccuaac

SEQ ID NO: 2504757 - RNA, 19 nt, Artificial Sequence
  Description of Artificial Sequence: Synthetic oligonucleotide
caaaucccugagaaucaua

SEQ ID NO: 2504758 - RNA, 19 nt, Artificial Sequence
  Description of Artificial Sequence: Synthetic oligonucleotide
auguagacugugagcuuga

SEQ ID NO: 2504759 - RNA, 19 nt, Artificial Sequence
  Description of Artificial Sequence: Synthetic oligonucleotide
uuccacccguaaaguaauu

SEQ ID NO: 2504760 - RNA, 19 nt, Artificial Sequence
  Description of Artificial Sequence: Synthetic oligonucleotide
cagcaauauuuagcauuac

SEQ ID NO: 2504761 - RNA, 19 nt, Artificial Sequence
  Description of Artificial Sequence: Synthetic oligonucleotide
caaugucagccuugauuaa

SEQ ID NO: 2504762 - RNA, 19 nt, Artificial Sequence
  Description of Artificial Sequence: Synthetic oligonucleotide
agggcaaggugcaguguca

SEQ ID NO: 2504763 - RNA, 19 nt, Artificial Sequence
  Description of Artificial Sequence: Synthetic oligonucleotide
ggaguguuauugcagugau

SEQ ID NO: 2504764 - RNA, 19 nt, Artificial Sequence
  Description of Artificial Sequence: Synthetic oligonucleotide
ggagguacuguaccagugu

SEQ ID NO: 2504765 - RNA, 19 nt, Artificial Sequence
  Description of Artificial Sequence: Synthetic oligonucleotide
caggaucaacaugguggag

SEQ ID NO: 2504766 - RNA, 19 nt, Artificial Sequence
  Description of Artificial Sequence: Synthetic oligonucleotide
gguagcaaauguccaaauu

SEQ ID NO: 2504767 - RNA, 19 nt, Artificial Sequence
  Description of Artificial Sequence: Synthetic oligonucleotide
gcauuacuccaaauaggca

SEQ ID NO: 2504768 - RNA, 19 nt, Artificial Sequence
  Description of Artificial Sequence: Synthetic oligonucleotide
cuaaaacugcagcaauauu

SEQ ID NO: 2504769 - RNA, 19 nt, Artificial Sequence
  Description of Artificial Sequence: Synthetic oligonucleotide
cuggagguacuguaccagu

SEQ ID NO: 2504770 - RNA, 19 nt, Artificial Sequence
  Description of Artificial Sequence: Synthetic oligonucleotide
cugugagcuugaaccuuga

SEQ ID NO: 2504771 - RNA, 19 nt, Artificial Sequence
  Description of Artificial Sequence: Synthetic oligonucleotide
ugaccaugugaagcacaua

SEQ ID NO: 2504772 - RNA, 19 nt, Artificial Sequence
  Description of Artificial Sequence: Synthetic oligonucleotide
cuggaucaacuuuguguua

SEQ ID NO: 2504773 - RNA, 19 nt, Artificial Sequence
  Description of Artificial Sequence: Synthetic oligonucleotide
uaccagugucacugauaua

SEQ ID NO: 2504774 - RNA, 19 nt, Artificial Sequence
  Description of Artificial Sequence: Synthetic oligonucleotide
ggguuaauccauguaaauu

SEQ ID NO: 2504775 - RNA, 19 nt, Artificial Sequence
  Description of Artificial Sequence: Synthetic oligonucleotide
agguucucuucaggauuca

SEQ ID NO: 2504776 - RNA, 19 nt, Artificial Sequence
  Description of Artificial Sequence: Synthetic oligonucleotide
gccacaagagaaguccuaa

SEQ ID NO: 2504777 - RNA, 19 nt, Artificial Sequence
  Description of Artificial Sequence: Synthetic oligonucleotide
ccauuucuaguucucagau

SEQ ID NO: 2504778 - RNA, 19 nt, Artificial Sequence
  Description of Artificial Sequence: Synthetic oligonucleotide
ggauucagugcaugaacuu

SEQ ID NO: 2504779 - RNA, 19 nt, Artificial Sequence
  Description of Artificial Sequence: Synthetic oligonucleotide
ccagucuuucagaucaugu

SEQ ID NO: 2504780 - RNA, 19 nt, Artificial Sequence
  Description of Artificial Sequence: Synthetic oligonucleotide
gugcaugaacuuguuugua

SEQ ID NO: 2504781 - RNA, 19 nt, Artificial Sequence
  Description of Artificial Sequence: Synthetic oligonucleotide
gcgguguucuuucauuggu

SEQ ID NO: 2504782 - RNA, 19 nt, Artificial Sequence
  Description of Artificial Sequence: Synthetic oligonucleotide
ggcuuccacccguaaagua

SEQ ID NO: 2504783 - RNA, 19 nt, Artificial Sequence
  Description of Artificial Sequence: Synthetic oligonucleotide
gaucaacaugguggagugu

SEQ ID NO: 2504784 - RNA, 19 nt, Artificial Sequence
  Description of Artificial Sequence: Synthetic oligonucleotide
guacuguaccagugucacu

SEQ ID NO: 2504785 - RNA, 19 nt, Artificial Sequence
  Description of Artificial Sequence: Synthetic oligonucleotide
caacaugguggaguguuau

SEQ ID NO: 2504786 - RNA, 19 nt, Artificial Sequence
  Description of Artificial Sequence: Synthetic oligonucleotide
cgaacauacaugguagcaa

SEQ ID NO: 2504787 - RNA, 19 nt, Artificial Sequence
  Description of Artificial Sequence: Synthetic oligonucleotide
cagugucauaaaggguuaa

SEQ ID NO: 2504788 - RNA, 19 nt, Artificial Sequence
  Description of Artificial Sequence: Synthetic oligonucleotide
ggcuuccagucuuucagau

SEQ ID NO: 2504789 - RNA, 19 nt, Artificial Sequence
  Description of Artificial Sequence: Synthetic oligonucleotide
caaggccagcuuuguugaa

SEQ ID NO: 2504790 - RNA, 19 nt, Artificial Sequence
  Description of Artificial Sequence: Synthetic oligonucleotide
guacaaggccagcuuuguu

SEQ ID NO: 2504791 - RNA, 19 nt, Artificial Sequence
  Description of Artificial Sequence: Synthetic oligonucleotide
gcagugucauaaaggguua

SEQ ID NO: 2504792 - RNA, 19 nt, Artificial Sequence
  Description of Artificial Sequence: Synthetic oligonucleotide
ccuugacucagagauggua

SEQ ID NO: 2504793 - RNA, 19 nt, Artificial Sequence
  Description of Artificial Sequence: Synthetic oligonucleotide
ccacccguaaaguaauuuu

SEQ ID NO: 2504794 - RNA, 19 nt, Artificial Sequence
  Description of Artificial Sequence: Synthetic oligonucleotide
cuguaccagugucacugau

SEQ ID NO: 2504795 - RNA, 19 nt, Artificial Sequence
  Description of Artificial Sequence: Synthetic oligonucleotide
gcagcgguguucuuucauu

SEQ ID NO: 2504796 - RNA, 19 nt, Artificial Sequence
  Description of Artificial Sequence: Synthetic oligonucleotide
ggcaaggugcagugucaua

SEQ ID NO: 2504797 - RNA, 19 nt, Artificial Sequence
  Description of Artificial Sequence: Synthetic oligonucleotide
ccauguaaauuggcuucca

SEQ ID NO: 2504798 - RNA, 19 nt, Artificial Sequence
  Description of Artificial Sequence: Synthetic oligonucleotide
ccccucauuaaaagucucu

SEQ ID NO: 2504799 - RNA, 19 nt, Artificial Sequence
  Description of Artificial Sequence: Synthetic oligonucleotide
gguaggcuuuauaccauuu

SEQ ID NO: 2504800 - RNA, 19 nt, Artificial Sequence
  Description of Artificial Sequence: Synthetic oligonucleotide
cagccuugauuaacugauu

SEQ ID NO: 2504801 - RNA, 19 nt, Artificial Sequence
  Description of Artificial Sequence: Synthetic oligonucleotide
ggccagcuuuguugaauuu

SEQ ID NO: 2504802 - RNA, 19 nt, Artificial Sequence
  Description of Artificial Sequence: Synthetic oligonucleotide
gggcaaggugcagugucau

SEQ ID NO: 2504803 - RNA, 19 nt, Artificial Sequence
  Description of Artificial Sequence: Synthetic oligonucleotide
ggaaagcagcgguguucuu

SEQ ID NO: 2504804 - RNA, 19 nt, Artificial Sequence
  Description of Artificial Sequence: Synthetic oligonucleotide
cgguguucuuucauugguu

SEQ ID NO: 2504805 - RNA, 19 nt, Artificial Sequence
  Description of Artificial Sequence: Synthetic oligonucleotide
aaggagaacagccagauug

SEQ ID NO: 2504806 - RNA, 19 nt, Artificial Sequence
  Description of Artificial Sequence: Synthetic oligonucleotide
aaaguuagcagaaagcggg

SEQ ID NO: 2504807 - RNA, 19 nt, Artificial Sequence
  Description of Artificial Sequence: Synthetic oligonucleotide
uguaaaauguccucgaaga

SEQ ID NO: 2504808 - RNA, 19 nt, Artificial Sequence
  Description of Artificial Sequence: Synthetic oligonucleotide
aaggcuaguucucagguac

SEQ ID NO: 2504809 - RNA, 19 nt, Artificial Sequence
  Description of Artificial Sequence: Synthetic oligonucleotide
aaggucaauaaacuccacc

SEQ ID NO: 2504810 - RNA, 19 nt, Artificial Sequence
  Description of Artificial Sequence: Synthetic oligonucleotide
agaaaguuagcagaaagcg

SEQ ID NO: 2504811 - RNA, 19 nt, Artificial Sequence
  Description of Artificial Sequence: Synthetic oligonucleotide
ugcaaggucaauaaacucc

SEQ ID NO: 2504812 - RNA, 19 nt, Artificial Sequence
  Description of Artificial Sequence: Synthetic oligonucleotide
cucucuaaggagaacagcc

SEQ ID NO: 2504813 - RNA, 19 nt, Artificial Sequence
  Description of Artificial Sequence: Synthetic oligonucleotide
aucacuuggauuuggacug

SEQ ID NO: 2504814 - RNA, 19 nt, Artificial Sequence
  Description of Artificial Sequence: Synthetic oligonucleotide
aacuccaccugcuccaacg

SEQ ID NO: 2504815 - RNA, 19 nt, Artificial Sequence
  Description of Artificial Sequence: Synthetic oligonucleotide
ucugcaaggucaauaaacu

SEQ ID NO: 2504816 - RNA, 19 nt, Artificial Sequence
  Description of Artificial Sequence: Synthetic oligonucleotide
aggucaauaaacuccaccu

SEQ ID NO: 2504817 - RNA, 19 nt, Artificial Sequence
  Description of Artificial Sequence: Synthetic oligonucleotide
gaacacaucugcuccaucc

SEQ ID NO: 2504818 - RNA, 19 nt, Artificial Sequence
  Description of Artificial Sequence: Synthetic oligonucleotide
gacgagaugcuaccuaugg

SEQ ID NO: 2504819 - RNA, 19 nt, Artificial Sequence
  Description of Artificial Sequence: Synthetic oligonucleotide
agaagaaaagcacugggaa

SEQ ID NO: 2504820 - RNA, 19 nt, Artificial Sequence
  Description of Artificial Sequence: Synthetic oligonucleotide
aaaacaaauucugucucug

SEQ ID NO: 2504821 - RNA, 19 nt, Artificial Sequence
  Description of Artificial Sequence: Synthetic oligonucleotide
gaaaguuagcagaaagcgg

SEQ ID NO: 2504822 - RNA, 19 nt, Artificial Sequence
  Description of Artificial Sequence: Synthetic oligonucleotide
auuuggguccaugucagcc

SEQ ID NO: 2504823 - RNA, 19 nt, Artificial Sequence
  Description of Artificial Sequence: Synthetic oligonucleotide
ugcagcgggagaaaguuag

SEQ ID NO: 2504824 - RNA, 19 nt, Artificial Sequence
  Description of Artificial Sequence: Synthetic oligonucleotide
aucugcaaggucaauaaac

SEQ ID NO: 2504825 - RNA, 19 nt, Artificial Sequence
  Description of Artificial Sequence: Synthetic oligonucleotide
auuuggacugcgcagguug

SEQ ID NO: 2504826 - RNA, 19 nt, Artificial Sequence
  Description of Artificial Sequence: Synthetic oligonucleotide
gagucagaggacaaggagg

SEQ ID NO: 2504827 - RNA, 19 nt, Artificial Sequence
  Description of Artificial Sequence: Synthetic oligonucleotide
ucuuugcgacuccagaugc

SEQ ID NO: 2504828 - RNA, 19 nt, Artificial Sequence
  Description of Artificial Sequence: Synthetic oligonucleotide
aggacaaggaggaaguucg

SEQ ID NO: 2504829 - RNA, 19 nt, Artificial Sequence
  Description of Artificial Sequence: Synthetic oligonucleotide
uccucacaaggcaagaaca

SEQ ID NO: 2504830 - RNA, 19 nt, Artificial Sequence
  Description of Artificial Sequence: Synthetic oligonucleotide
cucagguacaacauccacc

SEQ ID NO: 2504831 - RNA, 19 nt, Artificial Sequence
  Description of Artificial Sequence: Synthetic oligonucleotide
aguguccaggcucugcccc

SEQ ID NO: 2504832 - RNA, 19 nt, Artificial Sequence
  Description of Artificial Sequence: Synthetic oligonucleotide
ucagaggacaaggaggaag

SEQ ID NO: 2504833 - RNA, 19 nt, Artificial Sequence
  Description of Artificial Sequence: Synthetic oligonucleotide
ucuggcuguaaaauguccu

SEQ ID NO: 2504834 - RNA, 19 nt, Artificial Sequence
  Description of Artificial Sequence: Synthetic oligonucleotide
ugaucugcaaggucaauaa

SEQ ID NO: 2504835 - RNA, 19 nt, Artificial Sequence
  Description of Artificial Sequence: Synthetic oligonucleotide
cuaguucucagguacaaca

SEQ ID NO: 2504836 - RNA, 19 nt, Artificial Sequence
  Description of Artificial Sequence: Synthetic oligonucleotide
gaaguccuaccucagaaga

SEQ ID NO: 2504837 - RNA, 19 nt, Artificial Sequence
  Description of Artificial Sequence: Synthetic oligonucleotide
aauuccucuggaugguugu

SEQ ID NO: 2504838 - RNA, 19 nt, Artificial Sequence
  Description of Artificial Sequence: Synthetic oligonucleotide
uggauuuggacugcgcagg

SEQ ID NO: 2504839 - RNA, 19 nt, Artificial Sequence
  Description of Artificial Sequence: Synthetic oligonucleotide
aguucucagguacaacauc

SEQ ID NO: 2504840 - RNA, 19 nt, Artificial Sequence
  Description of Artificial Sequence: Synthetic oligonucleotide
uaccucagaagaaaagcac

SEQ ID NO: 2504841 - RNA, 19 nt, Artificial Sequence
  Description of Artificial Sequence: Synthetic oligonucleotide
ucuaaggagaacagccaga

SEQ ID NO: 2504842 - RNA, 19 nt, Artificial Sequence
  Description of Artificial Sequence: Synthetic oligonucleotide
uacuucuccaggaggugcg

SEQ ID NO: 2504843 - RNA, 19 nt, Artificial Sequence
  Description of Artificial Sequence: Synthetic oligonucleotide
cuguaaaauguccucgaag

SEQ ID NO: 2504844 - RNA, 19 nt, Artificial Sequence
  Description of Artificial Sequence: Synthetic oligonucleotide
ugucaggucuucuccagag

SEQ ID NO: 2504845 - RNA, 19 nt, Artificial Sequence
  Description of Artificial Sequence: Synthetic oligonucleotide
caaauucugucucuggcug

SEQ ID NO: 2504846 - RNA, 19 nt, Artificial Sequence
  Description of Artificial Sequence: Synthetic oligonucleotide
ucucuaaggagaacagcca

SEQ ID NO: 2504847 - RNA, 19 nt, Artificial Sequence
  Description of Artificial Sequence: Synthetic oligonucleotide
acauucacuuccauggacg

SEQ ID NO: 2504848 - RNA, 19 nt, Artificial Sequence
  Description of Artificial Sequence: Synthetic oligonucleotide
ugagacgcagcuguuggcg

SEQ ID NO: 2504849 - RNA, 19 nt, Artificial Sequence
  Description of Artificial Sequence: Synthetic oligonucleotide
gguuggacgagucagagga

SEQ ID NO: 2504850 - RNA, 19 nt, Artificial Sequence
  Description of Artificial Sequence: Synthetic oligonucleotide
gacgagucagaggacaagg

SEQ ID NO: 2504851 - RNA, 19 nt, Artificial Sequence
  Description of Artificial Sequence: Synthetic oligonucleotide
guucucagguacaacaucc

SEQ ID NO: 2504852 - RNA, 19 nt, Artificial Sequence
  Description of Artificial Sequence: Synthetic oligonucleotide
aacacaucugcuccauccu

SEQ ID NO: 2504853 - RNA, 19 nt, Artificial Sequence
  Description of Artificial Sequence: Synthetic oligonucleotide
uuagcagaaagcggggaag

SEQ ID NO: 2504854 - RNA, 19 nt, Artificial Sequence
  Description of Artificial Sequence: Synthetic oligonucleotide
uccuaccucagaagaaaag

SEQ ID NO: 2504855 - RNA, 19 nt, Artificial Sequence
  Description of Artificial Sequence: Synthetic oligonucleotide
auacuucuccaggaggugc

SEQ ID NO: 2504856 - RNA, 19 nt, Artificial Sequence
  Description of Artificial Sequence: Synthetic oligonucleotide
uggaaguccuaccucagaa

SEQ ID NO: 2504857 - RNA, 19 nt, Artificial Sequence
  Description of Artificial Sequence: Synthetic oligonucleotide
uuuggguccaugucagccc

SEQ ID NO: 2504858 - RNA, 19 nt, Artificial Sequence
  Description of Artificial Sequence: Synthetic oligonucleotide
uaaagugucaggucuucuc

SEQ ID NO: 2504859 - RNA, 19 nt, Artificial Sequence
  Description of Artificial Sequence: Synthetic oligonucleotide
aaggaggaaguucgggaug

SEQ ID NO: 2504860 - RNA, 19 nt, Artificial Sequence
  Description of Artificial Sequence: Synthetic oligonucleotide
uacaacauccaccauccuu

SEQ ID NO: 2504861 - RNA, 19 nt, Artificial Sequence
  Description of Artificial Sequence: Synthetic oligonucleotide
gcucaauuccucuggaugg

SEQ ID NO: 2504862 - RNA, 19 nt, Artificial Sequence
  Description of Artificial Sequence: Synthetic oligonucleotide
ugcucguggauuugggucc

SEQ ID NO: 2504863 - RNA, 19 nt, Artificial Sequence
  Description of Artificial Sequence: Synthetic oligonucleotide
cuagcugcaguguccaggc

SEQ ID NO: 2504864 - RNA, 19 nt, Artificial Sequence
  Description of Artificial Sequence: Synthetic oligonucleotide
gaugugguccugucuggcg

SEQ ID NO: 2504865 - RNA, 19 nt, Artificial Sequence
  Description of Artificial Sequence: Synthetic oligonucleotide
uuugcgacuccagaugcag

SEQ ID NO: 2504866 - RNA, 19 nt, Artificial Sequence
  Description of Artificial Sequence: Synthetic oligonucleotide
cucuaaggagaacagccag

SEQ ID NO: 2504867 - RNA, 19 nt, Artificial Sequence
  Description of Artificial Sequence: Synthetic oligonucleotide
uggaugguuguccacucca

SEQ ID NO: 2504868 - RNA, 19 nt, Artificial Sequence
  Description of Artificial Sequence: Synthetic oligonucleotide
cuuacgcgcauacuucucc

SEQ ID NO: 2504869 - RNA, 19 nt, Artificial Sequence
  Description of Artificial Sequence: Synthetic oligonucleotide
aaauucugucucuggcugu

SEQ ID NO: 2504870 - RNA, 19 nt, Artificial Sequence
  Description of Artificial Sequence: Synthetic oligonucleotide
uccauggacgagaugcuac

SEQ ID NO: 2504871 - RNA, 19 nt, Artificial Sequence
  Description of Artificial Sequence: Synthetic oligonucleotide
cucgaagaauuucugccgc

SEQ ID NO: 2504872 - RNA, 19 nt, Artificial Sequence
  Description of Artificial Sequence: Synthetic oligonucleotide
agugcuagcugcagugucc

SEQ ID NO: 2504873 - RNA, 19 nt, Artificial Sequence
  Description of Artificial Sequence: Synthetic oligonucleotide
agcgggagaaaguuagcag

SEQ ID NO: 2504874 - RNA, 19 nt, Artificial Sequence
  Description of Artificial Sequence: Synthetic oligonucleotide
uggcaaguaaagugucagg

SEQ ID NO: 2504875 - RNA, 19 nt, Artificial Sequence
  Description of Artificial Sequence: Synthetic oligonucleotide
gaaguucgggauguggucc

SEQ ID NO: 2504876 - RNA, 19 nt, Artificial Sequence
  Description of Artificial Sequence: Synthetic oligonucleotide
acgagaugcuaccuauggg

SEQ ID NO: 2504877 - RNA, 19 nt, Artificial Sequence
  Description of Artificial Sequence: Synthetic oligonucleotide
auggcaaguaaagugucag

SEQ ID NO: 2504878 - RNA, 19 nt, Artificial Sequence
  Description of Artificial Sequence: Synthetic oligonucleotide
aauuucugccgcucccuga

SEQ ID NO: 2504879 - RNA, 19 nt, Artificial Sequence
  Description of Artificial Sequence: Synthetic oligonucleotide
agaugcagaugggauaggg

SEQ ID NO: 2504880 - RNA, 19 nt, Artificial Sequence
  Description of Artificial Sequence: Synthetic oligonucleotide
aagcggggaaggcuaguuc

SEQ ID NO: 2504881 - RNA, 19 nt, Artificial Sequence
  Description of Artificial Sequence: Synthetic oligonucleotide
ucucagguacaacauccac

SEQ ID NO: 2504882 - RNA, 19 nt, Artificial Sequence
  Description of Artificial Sequence: Synthetic oligonucleotide
caaggcaagaacacaucug

SEQ ID NO: 2504883 - RNA, 19 nt, Artificial Sequence
  Description of Artificial Sequence: Synthetic oligonucleotide
ucaucagacugcgccaagg

SEQ ID NO: 2504884 - RNA, 19 nt, Artificial Sequence
  Description of Artificial Sequence: Synthetic oligonucleotide
uguccucgaagaauuucug

SEQ ID NO: 2504885 - RNA, 19 nt, Artificial Sequence
  Description of Artificial Sequence: Synthetic oligonucleotide
aaguuagcagaaagcgggg

SEQ ID NO: 2504886 - RNA, 19 nt, Artificial Sequence
  Description of Artificial Sequence: Synthetic oligonucleotide
ugggauccccucucuaagg

SEQ ID NO: 2504887 - RNA, 19 nt, Artificial Sequence
  Description of Artificial Sequence: Synthetic oligonucleotide
agauuggccaguccacaag

SEQ ID NO: 2504888 - RNA, 19 nt, Artificial Sequence
  Description of Artificial Sequence: Synthetic oligonucleotide
uccaacguguccacauuca

SEQ ID NO: 2504889 - RNA, 19 nt, Artificial Sequence
  Description of Artificial Sequence: Synthetic oligonucleotide
cuaccucagaagaaaagca

SEQ ID NO: 2504890 - RNA, 19 nt, Artificial Sequence
  Description of Artificial Sequence: Synthetic oligonucleotide
aguaaagugucaggucuuc

SEQ ID NO: 2504891 - RNA, 19 nt, Artificial Sequence
  Description of Artificial Sequence: Synthetic oligonucleotide
ugcgggaugggcagcgagg

SEQ ID NO: 2504892 - RNA, 19 nt, Artificial Sequence
  Description of Artificial Sequence: Synthetic oligonucleotide
agugucaggucuucuccag

SEQ ID NO: 2504893 - RNA, 19 nt, Artificial Sequence
  Description of Artificial Sequence: Synthetic oligonucleotide
gauuggccaguccacaaga

SEQ ID NO: 2504894 - RNA, 19 nt, Artificial Sequence
  Description of Artificial Sequence: Synthetic oligonucleotide
caucagacugcgccaaggg

SEQ ID NO: 2504895 - RNA, 19 nt, Artificial Sequence
  Description of Artificial Sequence: Synthetic oligonucleotide
uagcagaaagcggggaagg

SEQ ID NO: 2504896 - RNA, 19 nt, Artificial Sequence
  Description of Artificial Sequence: Synthetic oligonucleotide
agccagauuggccagucca

SEQ ID NO: 2504897 - RNA, 19 nt, Artificial Sequence
  Description of Artificial Sequence: Synthetic oligonucleotide
uucucagguacaacaucca

SEQ ID NO: 2504898 - RNA, 19 nt, Artificial Sequence
  Description of Artificial Sequence: Synthetic oligonucleotide
uccagagugcucugcuggg

SEQ ID NO: 2504899 - RNA, 19 nt, Artificial Sequence
  Description of Artificial Sequence: Synthetic oligonucleotide
gucuuugcgacuccagaug

SEQ ID NO: 2504900 - RNA, 19 nt, Artificial Sequence
  Description of Artificial Sequence: Synthetic oligonucleotide
  modified_base (16)..(16): a, c, u, g, unknown or other
ucagccccugcgaucnccc

SEQ ID NO: 2504901 - RNA, 19 nt, Artificial Sequence
  Description of Artificial Sequence: Synthetic oligonucleotide
uaguucucagguacaacau

SEQ ID NO: 2504902 - RNA, 19 nt, Artificial Sequence
  Description of Artificial Sequence: Synthetic oligonucleotide
gaggaaguucgggaugugg

SEQ ID NO: 2504903 - RNA, 19 nt, Artificial Sequence
  Description of Artificial Sequence: Synthetic oligonucleotide
cucuggcuguaaaaugucc

SEQ ID NO: 2504904 - RNA, 19 nt, Artificial Sequence
  Description of Artificial Sequence: Synthetic oligonucleotide
ggggaaaacaaauucuguc

SEQ ID NO: 2504905 - RNA, 19 nt, Artificial Sequence
  Description of Artificial Sequence: Synthetic oligonucleotide
cuuggauuuggacugcgca

SEQ ID NO: 2504906 - RNA, 19 nt, Artificial Sequence
  Description of Artificial Sequence: Synthetic oligonucleotide
cagacaucuggggaguugg

SEQ ID NO: 2504907 - RNA, 19 nt, Artificial Sequence
  Description of Artificial Sequence: Synthetic oligonucleotide
cugggaagguugcagcggg

SEQ ID NO: 2504908 - RNA, 19 nt, Artificial Sequence
  Description of Artificial Sequence: Synthetic oligonucleotide
ucugucucuggcuguaaaa

SEQ ID NO: 2504909 - RNA, 19 nt, Artificial Sequence
  Description of Artificial Sequence: Synthetic oligonucleotide
aaguucgggaugugguccu

SEQ ID NO: 2504910 - RNA, 19 nt, Artificial Sequence
  Description of Artificial Sequence: Synthetic oligonucleotide
gagaacagccagauuggcc

SEQ ID NO: 2504911 - RNA, 19 nt, Artificial Sequence
  Description of Artificial Sequence: Synthetic oligonucleotide
auccugaucugcaagguca

SEQ ID NO: 2504912 - RNA, 19 nt, Artificial Sequence
  Description of Artificial Sequence: Synthetic oligonucleotide
ucuggcguggguaccggca

SEQ ID NO: 2504913 - RNA, 19 nt, Artificial Sequence
  Description of Artificial Sequence: Synthetic oligonucleotide
uggacgagaugcuaccuau

SEQ ID NO: 2504914 - RNA, 19 nt, Artificial Sequence
  Description of Artificial Sequence: Synthetic oligonucleotide
uuggacgagucagaggaca

SEQ ID NO: 2504915 - RNA, 19 nt, Artificial Sequence
  Description of Artificial Sequence: Synthetic oligonucleotide
ugcgacuccagaugcagau

SEQ ID NO: 2504916 - RNA, 19 nt, Artificial Sequence
  Description of Artificial Sequence: Synthetic oligonucleotide
acgcgcauacuucuccagg

SEQ ID NO: 2504917 - RNA, 19 nt, Artificial Sequence
  Description of Artificial Sequence: Synthetic oligonucleotide
cacauucacuuccauggac

SEQ ID NO: 2504918 - RNA, 19 nt, Artificial Sequence
  Description of Artificial Sequence: Synthetic oligonucleotide
caauuccucuggaugguug

SEQ ID NO: 2504919 - RNA, 19 nt, Artificial Sequence
  Description of Artificial Sequence: Synthetic oligonucleotide
gaauuucugccgcucccug

SEQ ID NO: 2504920 - RNA, 19 nt, Artificial Sequence
  Description of Artificial Sequence: Synthetic oligonucleotide
cugcucguggauuuggguc

SEQ ID NO: 2504921 - RNA, 19 nt, Artificial Sequence
  Description of Artificial Sequence: Synthetic oligonucleotide
agcagaaagcggggaaggc

SEQ ID NO: 2504922 - RNA, 19 nt, Artificial Sequence
  Description of Artificial Sequence: Synthetic oligonucleotide
uccagaugcagaugggaua

SEQ ID NO: 2504923 - RNA, 19 nt, Artificial Sequence
  Description of Artificial Sequence: Synthetic oligonucleotide
acaagaggcccagugcuag

SEQ ID NO: 2504924 - RNA, 19 nt, Artificial Sequence
  Description of Artificial Sequence: Synthetic oligonucleotide
ucugccgcucccugagacg

SEQ ID NO: 2504925 - RNA, 19 nt, Artificial Sequence
  Description of Artificial Sequence: Synthetic oligonucleotide
caucacuuggauuuggacu

SEQ ID NO: 2504926 - RNA, 19 nt, Artificial Sequence
  Description of Artificial Sequence: Synthetic oligonucleotide
uuacgcgcauacuucucca

SEQ ID NO: 2504927 - RNA, 19 nt, Artificial Sequence
  Description of Artificial Sequence: Synthetic oligonucleotide
aacauccaccauccuuucu

SEQ ID NO: 2504928 - RNA, 19 nt, Artificial Sequence
  Description of Artificial Sequence: Synthetic oligonucleotide
cuggcuguaaaauguccuc

SEQ ID NO: 2504929 - RNA, 19 nt, Artificial Sequence
  Description of Artificial Sequence: Synthetic oligonucleotide
cauuuggaaguccuaccuc

SEQ ID NO: 2504930 - RNA, 19 nt, Artificial Sequence
  Description of Artificial Sequence: Synthetic oligonucleotide
uucugccgcucccugagac

SEQ ID NO: 2504931 - RNA, 19 nt, Artificial Sequence
  Description of Artificial Sequence: Synthetic oligonucleotide
guccucacaaggcaagaac

SEQ ID NO: 2504932 - RNA, 19 nt, Artificial Sequence
  Description of Artificial Sequence: Synthetic oligonucleotide
caggucuucuccagagugc

SEQ ID NO: 2504933 - RNA, 19 nt, Artificial Sequence
  Description of Artificial Sequence: Synthetic oligonucleotide
guaaaauguccucgaagaa

SEQ ID NO: 2504934 - RNA, 19 nt, Artificial Sequence
  Description of Artificial Sequence: Synthetic oligonucleotide
guccacauucacuuccaug

SEQ ID NO: 2504935 - RNA, 19 nt, Artificial Sequence
  Description of Artificial Sequence: Synthetic oligonucleotide
acugggaagguugcagcgg

SEQ ID NO: 2504936 - RNA, 19 nt, Artificial Sequence
  Description of Artificial Sequence: Synthetic oligonucleotide
ccuaccucagaagaaaagc

SEQ ID NO: 2504937 - RNA, 19 nt, Artificial Sequence
  Description of Artificial Sequence: Synthetic oligonucleotide
gaagguugcagcgggagaa

SEQ ID NO: 2504938 - RNA, 19 nt, Artificial Sequence
  Description of Artificial Sequence: Synthetic oligonucleotide
uaccggcaggcucaauucc

SEQ ID NO: 2504939 - RNA, 19 nt, Artificial Sequence
  Description of Artificial Sequence: Synthetic oligonucleotide
cugcaaggucaauaaacuc

SEQ ID NO: 2504940 - RNA, 19 nt, Artificial Sequence
  Description of Artificial Sequence: Synthetic oligonucleotide
ugcgccaagggugugucug

SEQ ID NO: 2504941 - RNA, 19 nt, Artificial Sequence
  Description of Artificial Sequence: Synthetic oligonucleotide
agguuggacgagucagagg

SEQ ID NO: 2504942 - RNA, 19 nt, Artificial Sequence
  Description of Artificial Sequence: Synthetic oligonucleotide
acuuggauuuggacugcgc

SEQ ID NO: 2504943 - RNA, 19 nt, Artificial Sequence
  Description of Artificial Sequence: Synthetic oligonucleotide
aucagacugcgccaagggu

SEQ ID NO: 2504944 - RNA, 19 nt, Artificial Sequence
  Description of Artificial Sequence: Synthetic oligonucleotide
cugauggcaaguaaagugu

SEQ ID NO: 2504945 - RNA, 19 nt, Artificial Sequence
  Description of Artificial Sequence: Synthetic oligonucleotide
gcggagaguccucacaagg

SEQ ID NO: 2504946 - RNA, 19 nt, Artificial Sequence
  Description of Artificial Sequence: Synthetic oligonucleotide
gaggacaaggaggaaguuc

SEQ ID NO: 2504947 - RNA, 19 nt, Artificial Sequence
  Description of Artificial Sequence: Synthetic oligonucleotide
ggaaguccuaccucagaag

SEQ ID NO: 2504948 - RNA, 19 nt, Artificial Sequence
  Description of Artificial Sequence: Synthetic oligonucleotide
auguccucgaagaauuucu

SEQ ID NO: 2504949 - RNA, 19 nt, Artificial Sequence
  Description of Artificial Sequence: Synthetic oligonucleotide
ggcaagaacacaucugcuc

SEQ ID NO: 2504950 - RNA, 19 nt, Artificial Sequence
  Description of Artificial Sequence: Synthetic oligonucleotide
ucgaagaauuucugccgcu

SEQ ID NO: 2504951 - RNA, 19 nt, Artificial Sequence
  Description of Artificial Sequence: Synthetic oligonucleotide
ugcuccaacguguccacau

SEQ ID NO: 2504952 - RNA, 19 nt, Artificial Sequence
  Description of Artificial Sequence: Synthetic oligonucleotide
uacgcgcauacuucuccag

SEQ ID NO: 2504953 - RNA, 19 nt, Artificial Sequence
  Description of Artificial Sequence: Synthetic oligonucleotide
cugggauccccucucuaag

SEQ ID NO: 2504954 - RNA, 19 nt, Artificial Sequence
  Description of Artificial Sequence: Synthetic oligonucleotide
gacugcgcagguuggacga

SEQ ID NO: 2504955 - RNA, 19 nt, Artificial Sequence
  Description of Artificial Sequence: Synthetic oligonucleotide
aguccuaccucagaagaaa

SEQ ID NO: 2504956 - RNA, 19 nt, Artificial Sequence
  Description of Artificial Sequence: Synthetic oligonucleotide
aagaggcccagugcuagcu

SEQ ID NO: 2504957 - RNA, 19 nt, Artificial Sequence
  Description of Artificial Sequence: Synthetic oligonucleotide
cacaaggcaagaacacauc

SEQ ID NO: 2504958 - RNA, 19 nt, Artificial Sequence
  Description of Artificial Sequence: Synthetic oligonucleotide
gauccccucucuaaggaga

SEQ ID NO: 2504959 - RNA, 19 nt, Artificial Sequence
  Description of Artificial Sequence: Synthetic oligonucleotide
aauucugucucuggcugua

SEQ ID NO: 2504960 - RNA, 19 nt, Artificial Sequence
  Description of Artificial Sequence: Synthetic oligonucleotide
gauuuggguccaugucagc

SEQ ID NO: 2504961 - RNA, 19 nt, Artificial Sequence
  Description of Artificial Sequence: Synthetic oligonucleotide
aagaacacaucugcuccau

SEQ ID NO: 2504962 - RNA, 19 nt, Artificial Sequence
  Description of Artificial Sequence: Synthetic oligonucleotide
  modified_base (10)..(10): a, c, u, g, unknown or other
ccugcgaucncccuggcca

SEQ ID NO: 2504963 - RNA, 19 nt, Artificial Sequence
  Description of Artificial Sequence: Synthetic oligonucleotide
aggaaguucgggauguggu

SEQ ID NO: 2504964 - RNA, 19 nt, Artificial Sequence
  Description of Artificial Sequence: Synthetic oligonucleotide
cuccauccugaucugcaag

SEQ ID NO: 2504965 - RNA, 19 nt, Artificial Sequence
  Description of Artificial Sequence: Synthetic oligonucleotide
ggauuuggguccaugucag

SEQ ID NO: 2504966 - RNA, 19 nt, Artificial Sequence
  Description of Artificial Sequence: Synthetic oligonucleotide
uggacgagucagaggacaa

SEQ ID NO: 2504967 - RNA, 19 nt, Artificial Sequence
  Description of Artificial Sequence: Synthetic oligonucleotide
ucugcuccauccugaucug

SEQ ID NO: 2504968 - RNA, 19 nt, Artificial Sequence
  Description of Artificial Sequence: Synthetic oligonucleotide
cauucacuuccauggacga

SEQ ID NO: 2504969 - RNA, 19 nt, Artificial Sequence
  Description of Artificial Sequence: Synthetic oligonucleotide
uccugaucugcaaggucaa

SEQ ID NO: 2504970 - RNA, 19 nt, Artificial Sequence
  Description of Artificial Sequence: Synthetic oligonucleotide
aggaggaaguucgggaugu

SEQ ID NO: 2504971 - RNA, 19 nt, Artificial Sequence
  Description of Artificial Sequence: Synthetic oligonucleotide
ccugagacgcagcuguugg

SEQ ID NO: 2504972 - RNA, 19 nt, Artificial Sequence
  Description of Artificial Sequence: Synthetic oligonucleotide
acgcuuacgcgcauacuuc

SEQ ID NO: 2504973 - RNA, 19 nt, Artificial Sequence
  Description of Artificial Sequence: Synthetic oligonucleotide
cuccaacguguccacauuc

SEQ ID NO: 2504974 - RNA, 19 nt, Artificial Sequence
  Description of Artificial Sequence: Synthetic oligonucleotide
ucgggaugugguccugucu

SEQ ID NO: 2504975 - RNA, 19 nt, Artificial Sequence
  Description of Artificial Sequence: Synthetic oligonucleotide
ccaagggugugucugcucc

SEQ ID NO: 2504976 - RNA, 19 nt, Artificial Sequence
  Description of Artificial Sequence: Synthetic oligonucleotide
aaguaaagugucaggucuu

SEQ ID NO: 2504977 - RNA, 19 nt, Artificial Sequence
  Description of Artificial Sequence: Synthetic oligonucleotide
uccugucuggcguggguac

SEQ ID NO: 2504978 - RNA, 19 nt, Artificial Sequence
  Description of Artificial Sequence: Synthetic oligonucleotide
gcaaguaaagugucagguc

SEQ ID NO: 2504979 - RNA, 19 nt, Artificial Sequence
  Description of Artificial Sequence: Synthetic oligonucleotide
accugcuccaacgugucca

SEQ ID NO: 2504980 - RNA, 19 nt, Artificial Sequence
  Description of Artificial Sequence: Synthetic oligonucleotide
auucacuuccauggacgag

SEQ ID NO: 2504981 - RNA, 19 nt, Artificial Sequence
  Description of Artificial Sequence: Synthetic oligonucleotide
aaagcggggaaggcuaguu

SEQ ID NO: 2504982 - RNA, 19 nt, Artificial Sequence
  Description of Artificial Sequence: Synthetic oligonucleotide
cugagacgcagcuguuggc

SEQ ID NO: 2504983 - RNA, 19 nt, Artificial Sequence
  Description of Artificial Sequence: Synthetic oligonucleotide
aguuagcagaaagcgggga

SEQ ID NO: 2504984 - RNA, 19 nt, Artificial Sequence
  Description of Artificial Sequence: Synthetic oligonucleotide
aaguccuaccucagaagaa

SEQ ID NO: 2504985 - RNA, 19 nt, Artificial Sequence
  Description of Artificial Sequence: Synthetic oligonucleotide
cacaucugcuccauccuga

SEQ ID NO: 2504986 - RNA, 19 nt, Artificial Sequence
  Description of Artificial Sequence: Synthetic oligonucleotide
ggacugcgcagguuggacg

SEQ ID NO: 2504987 - RNA, 19 nt, Artificial Sequence
  Description of Artificial Sequence: Synthetic oligonucleotide
uugcgacuccagaugcaga

SEQ ID NO: 2504988 - RNA, 19 nt, Artificial Sequence
  Description of Artificial Sequence: Synthetic oligonucleotide
gcgggagaaaguuagcaga

SEQ ID NO: 2504989 - RNA, 19 nt, Artificial Sequence
  Description of Artificial Sequence: Synthetic oligonucleotide
gaucugcaaggucaauaaa

SEQ ID NO: 2504990 - RNA, 19 nt, Artificial Sequence
  Description of Artificial Sequence: Synthetic oligonucleotide
acugcgccaaggguguguc

SEQ ID NO: 2504991 - RNA, 19 nt, Artificial Sequence
  Description of Artificial Sequence: Synthetic oligonucleotide
cuggaugguuguccacucc

SEQ ID NO: 2504992 - RNA, 19 nt, Artificial Sequence
  Description of Artificial Sequence: Synthetic oligonucleotide
gcaaggucaauaaacucca

SEQ ID NO: 2504993 - RNA, 19 nt, Artificial Sequence
  Description of Artificial Sequence: Synthetic oligonucleotide
cacuccagacaucugggga

SEQ ID NO: 2504994 - RNA, 19 nt, Artificial Sequence
  Description of Artificial Sequence: Synthetic oligonucleotide
agagugcucugcugggccu

SEQ ID NO: 2504995 - RNA, 19 nt, Artificial Sequence
  Description of Artificial Sequence: Synthetic oligonucleotide
cagaaagcggggaaggcua

SEQ ID NO: 2504996 - RNA, 19 nt, Artificial Sequence
  Description of Artificial Sequence: Synthetic oligonucleotide
auuggccaguccacaagag

SEQ ID NO: 2504997 - RNA, 19 nt, Artificial Sequence
  Description of Artificial Sequence: Synthetic oligonucleotide
caaggucaauaaacuccac

SEQ ID NO: 2504998 - RNA, 19 nt, Artificial Sequence
  Description of Artificial Sequence: Synthetic oligonucleotide
aggcucugccccuccauca

SEQ ID NO: 2504999 - RNA, 19 nt, Artificial Sequence
  Description of Artificial Sequence: Synthetic oligonucleotide
cgacuccagaugcagaugg

SEQ ID NO: 2505000 - RNA, 19 nt, Artificial Sequence
  Description of Artificial Sequence: Synthetic oligonucleotide
gaaggcuaguucucaggua

SEQ ID NO: 2505001 - RNA, 19 nt, Artificial Sequence
  Description of Artificial Sequence: Synthetic oligonucleotide
ggaaguucgggaugugguc

SEQ ID NO: 2505002 - RNA, 19 nt, Artificial Sequence
  Description of Artificial Sequence: Synthetic oligonucleotide
cugccgcucccugagacgc

SEQ ID NO: 2505003 - RNA, 19 nt, Artificial Sequence
  Description of Artificial Sequence: Synthetic oligonucleotide
ccucacaaggcaagaacac

SEQ ID NO: 2505004 - RNA, 19 nt, Artificial Sequence
  Description of Artificial Sequence: Synthetic oligonucleotide
uaaggagaacagccagauu

SEQ ID NO: 2505005 - RNA, 19 nt, Artificial Sequence
  Description of Artificial Sequence: Synthetic oligonucleotide
ucacuuggauuuggacugc

SEQ ID NO: 2505006 - RNA, 19 nt, Artificial Sequence
  Description of Artificial Sequence: Synthetic oligonucleotide
ugcgcagguuggacgaguc

SEQ ID NO: 2505007 - RNA, 19 nt, Artificial Sequence
  Description of Artificial Sequence: Synthetic oligonucleotide
ggcguuccagggcugcucg

SEQ ID NO: 2505008 - RNA, 19 nt, Artificial Sequence
  Description of Artificial Sequence: Synthetic oligonucleotide
gucucuggcuguaaaaugu

SEQ ID NO: 2505009 - RNA, 19 nt, Artificial Sequence
  Description of Artificial Sequence: Synthetic oligonucleotide
caguguccaggcucugccc

SEQ ID NO: 2505010 - RNA, 19 nt, Artificial Sequence
  Description of Artificial Sequence: Synthetic oligonucleotide
cuggcguggguaccggcag

SEQ ID NO: 2505011 - RNA, 19 nt, Artificial Sequence
  Description of Artificial Sequence: Synthetic oligonucleotide
uguuggcguuccagggcug

SEQ ID NO: 2505012 - RNA, 19 nt, Artificial Sequence
  Description of Artificial Sequence: Synthetic oligonucleotide
ccauggacgagaugcuacc

SEQ ID NO: 2505013 - RNA, 19 nt, Artificial Sequence
  Description of Artificial Sequence: Synthetic oligonucleotide
cugucuggcguggguaccg

SEQ ID NO: 2505014 - RNA, 19 nt, Artificial Sequence
  Description of Artificial Sequence: Synthetic oligonucleotide
cagaggacaaggaggaagu

SEQ ID NO: 2505015 - RNA, 19 nt, Artificial Sequence
  Description of Artificial Sequence: Synthetic oligonucleotide
gggaugugguccugucugg

SEQ ID NO: 2505016 - RNA, 19 nt, Artificial Sequence
  Description of Artificial Sequence: Synthetic oligonucleotide
uucgggaugugguccuguc

SEQ ID NO: 2505017 - RNA, 19 nt, Artificial Sequence
  Description of Artificial Sequence: Synthetic oligonucleotide
uggacugcgcagguuggac

SEQ ID NO: 2505018 - RNA, 19 nt, Artificial Sequence
  Description of Artificial Sequence: Synthetic oligonucleotide
  modified_base (8)..(8): a, c, u, g, unknown or other
ugcgaucncccuggccacg

SEQ ID NO: 2505019 - RNA, 19 nt, Artificial Sequence
  Description of Artificial Sequence: Synthetic oligonucleotide
cacuuggauuuggacugcg

SEQ ID NO: 2505020 - RNA, 19 nt, Artificial Sequence
  Description of Artificial Sequence: Synthetic oligonucleotide
gcuguuggcguuccagggc

SEQ ID NO: 2505021 - RNA, 19 nt, Artificial Sequence
  Description of Artificial Sequence: Synthetic oligonucleotide
agguugcagcgggagaaag

SEQ ID NO: 2505022 - RNA, 19 nt, Artificial Sequence
  Description of Artificial Sequence: Synthetic oligonucleotide
cagugcuagcugcaguguc

SEQ ID NO: 2505023 - RNA, 19 nt, Artificial Sequence
  Description of Artificial Sequence: Synthetic oligonucleotide
agaaagcggggaaggcuag

SEQ ID NO: 2505024 - RNA, 19 nt, Artificial Sequence
  Description of Artificial Sequence: Synthetic oligonucleotide
ugucuggcguggguaccgg

SEQ ID NO: 2505025 - RNA, 19 nt, Artificial Sequence
  Description of Artificial Sequence: Synthetic oligonucleotide
caacauccaccauccuuuc

SEQ ID NO: 2505026 - RNA, 19 nt, Artificial Sequence
  Description of Artificial Sequence: Synthetic oligonucleotide
gggcugauggcaaguaaag

SEQ ID NO: 2505027 - RNA, 19 nt, Artificial Sequence
  Description of Artificial Sequence: Synthetic oligonucleotide
ugggaagguugcagcggga

SEQ ID NO: 2505028 - RNA, 19 nt, Artificial Sequence
  Description of Artificial Sequence: Synthetic oligonucleotide
gagaguccucacaaggcaa

SEQ ID NO: 2505029 - RNA, 19 nt, Artificial Sequence
  Description of Artificial Sequence: Synthetic oligonucleotide
  modified_base (9)..(9): a, c, u, g, unknown or other
cugcgaucncccuggccac

SEQ ID NO: 2505030 - RNA, 19 nt, Artificial Sequence
  Description of Artificial Sequence: Synthetic oligonucleotide
  modified_base (3)..(3): a, c, u, g, unknown or other
ucncccuggccacgcuuac

SEQ ID NO: 2505031 - RNA, 19 nt, Artificial Sequence
  Description of Artificial Sequence: Synthetic oligonucleotide
ggcaaguaaagugucaggu

SEQ ID NO: 2505032 - RNA, 19 nt, Artificial Sequence
  Description of Artificial Sequence: Synthetic oligonucleotide
cucaucagacugcgccaag

SEQ ID NO: 2505033 - RNA, 19 nt, Artificial Sequence
  Description of Artificial Sequence: Synthetic oligonucleotide
caucuggggaguuggcgga

SEQ ID NO: 2505034 - RNA, 19 nt, Artificial Sequence
  Description of Artificial Sequence: Synthetic oligonucleotide
ccaucacuuggauuuggac

SEQ ID NO: 2505035 - RNA, 19 nt, Artificial Sequence
  Description of Artificial Sequence: Synthetic oligonucleotide
cugccccuccaucaucccc

SEQ ID NO: 2505036 - RNA, 19 nt, Artificial Sequence
  Description of Artificial Sequence: Synthetic oligonucleotide
cuggggaguuggcggagag

SEQ ID NO: 2505037 - RNA, 19 nt, Artificial Sequence
  Description of Artificial Sequence: Synthetic oligonucleotide
cuuugcgacuccagaugca

SEQ ID NO: 2505038 - RNA, 19 nt, Artificial Sequence
  Description of Artificial Sequence: Synthetic oligonucleotide
uugcagcgggagaaaguua

SEQ ID NO: 2505039 - RNA, 19 nt, Artificial Sequence
  Description of Artificial Sequence: Synthetic oligonucleotide
guggguaccggcaggcuca

SEQ ID NO: 2505040 - RNA, 19 nt, Artificial Sequence
  Description of Artificial Sequence: Synthetic oligonucleotide
aggugcgggaugggcagcg

SEQ ID NO: 2505041 - RNA, 19 nt, Artificial Sequence
  Description of Artificial Sequence: Synthetic oligonucleotide
aagguugcagcgggagaaa

SEQ ID NO: 2505042 - RNA, 19 nt, Artificial Sequence
  Description of Artificial Sequence: Synthetic oligonucleotide
ggaaggcuaguucucaggu

SEQ ID NO: 2505043 - RNA, 19 nt, Artificial Sequence
  Description of Artificial Sequence: Synthetic oligonucleotide
ccuggccacgcuuacgcgc

SEQ ID NO: 2505044 - RNA, 19 nt, Artificial Sequence
  Description of Artificial Sequence: Synthetic oligonucleotide
ggaugggcagcgagggucg

SEQ ID NO: 2505045 - RNA, 19 nt, Artificial Sequence
  Description of Artificial Sequence: Synthetic oligonucleotide
gugcgggaugggcagcgag

SEQ ID NO: 2505046 - RNA, 19 nt, Artificial Sequence
  Description of Artificial Sequence: Synthetic oligonucleotide
caguccacaagaggcccag

SEQ ID NO: 2505047 - RNA, 19 nt, Artificial Sequence
  Description of Artificial Sequence: Synthetic oligonucleotide
caaggaggaaguucgggau

SEQ ID NO: 2505048 - RNA, 19 nt, Artificial Sequence
  Description of Artificial Sequence: Synthetic oligonucleotide
ggggaaggcuaguucucag

SEQ ID NO: 2505049 - RNA, 19 nt, Artificial Sequence
  Description of Artificial Sequence: Synthetic oligonucleotide
cuaaggagaacagccagau

SEQ ID NO: 2505050 - RNA, 19 nt, Artificial Sequence
  Description of Artificial Sequence: Synthetic oligonucleotide
caggaggugcgggaugggc

SEQ ID NO: 2505051 - RNA, 19 nt, Artificial Sequence
  Description of Artificial Sequence: Synthetic oligonucleotide
uuccauggacgagaugcua

SEQ ID NO: 2505052 - RNA, 19 nt, Artificial Sequence
  Description of Artificial Sequence: Synthetic oligonucleotide
aguccucacaaggcaagaa

SEQ ID NO: 2505053 - RNA, 19 nt, Artificial Sequence
  Description of Artificial Sequence: Synthetic oligonucleotide
uuggacugcgcagguugga

SEQ ID NO: 2505054 - RNA, 19 nt, Artificial Sequence
  Description of Artificial Sequence: Synthetic oligonucleotide
aggcaagaacacaucugcu

SEQ ID NO: 2505055 - RNA, 19 nt, Artificial Sequence
  Description of Artificial Sequence: Synthetic oligonucleotide
aguuggcggagaguccuca

SEQ ID NO: 2505056 - RNA, 19 nt, Artificial Sequence
  Description of Artificial Sequence: Synthetic oligonucleotide
gggaagguugcagcgggag

SEQ ID NO: 2505057 - RNA, 19 nt, Artificial Sequence
  Description of Artificial Sequence: Synthetic oligonucleotide
guuggcggagaguccucac

SEQ ID NO: 2505058 - RNA, 19 nt, Artificial Sequence
  Description of Artificial Sequence: Synthetic oligonucleotide
cagcgggagaaaguuagca

SEQ ID NO: 2505059 - RNA, 19 nt, Artificial Sequence
  Description of Artificial Sequence: Synthetic oligonucleotide
agugcucugcugggccugg

SEQ ID NO: 2505060 - RNA, 19 nt, Artificial Sequence
  Description of Artificial Sequence: Synthetic oligonucleotide
cccucucuaaggagaacag

SEQ ID NO: 2505061 - RNA, 19 nt, Artificial Sequence
  Description of Artificial Sequence: Synthetic oligonucleotide
ucuggggaguuggcggaga

SEQ ID NO: 2505062 - RNA, 19 nt, Artificial Sequence
  Description of Artificial Sequence: Synthetic oligonucleotide
ggaugguuguccacuccag

SEQ ID NO: 2505063 - RNA, 19 nt, Artificial Sequence
  Description of Artificial Sequence: Synthetic oligonucleotide
gcgcauacuucuccaggag

SEQ ID NO: 2505064 - RNA, 19 nt, Artificial Sequence
  Description of Artificial Sequence: Synthetic oligonucleotide
cagauuggccaguccacaa

SEQ ID NO: 2505065 - RNA, 19 nt, Artificial Sequence
  Description of Artificial Sequence: Synthetic oligonucleotide
gagugcucugcugggccug

SEQ ID NO: 2505066 - RNA, 19 nt, Artificial Sequence
  Description of Artificial Sequence: Synthetic oligonucleotide
guugcagcgggagaaaguu

SEQ ID NO: 2505067 - RNA, 19 nt, Artificial Sequence
  Description of Artificial Sequence: Synthetic oligonucleotide
cggagaguccucacaaggc

SEQ ID NO: 2505068 - RNA, 19 nt, Artificial Sequence
  Description of Artificial Sequence: Synthetic oligonucleotide
cacgcuuacgcgcauacuu

SEQ ID NO: 2505069 - RNA, 19 nt, Artificial Sequence
  Description of Artificial Sequence: Synthetic oligonucleotide
gggauccccucucuaagga

SEQ ID NO: 2505070 - RNA, 19 nt, Artificial Sequence
  Description of Artificial Sequence: Synthetic oligonucleotide
gaguccucacaaggcaaga

SEQ ID NO: 2505071 - RNA, 19 nt, Artificial Sequence
  Description of Artificial Sequence: Synthetic oligonucleotide
gggucuuugcgacuccaga

SEQ ID NO: 2505072 - RNA, 19 nt, Artificial Sequence
  Description of Artificial Sequence: Synthetic oligonucleotide
accggcaggcucaauuccu

SEQ ID NO: 2505073 - RNA, 19 nt, Artificial Sequence
  Description of Artificial Sequence: Synthetic oligonucleotide
agacgcagcuguuggcguu

SEQ ID NO: 2505074 - RNA, 19 nt, Artificial Sequence
  Description of Artificial Sequence: Synthetic oligonucleotide
ccaacguguccacauucac

SEQ ID NO: 2505075 - RNA, 19 nt, Artificial Sequence
  Description of Artificial Sequence: Synthetic oligonucleotide
ggcggagaguccucacaag

SEQ ID NO: 2505076 - RNA, 19 nt, Artificial Sequence
  Description of Artificial Sequence: Synthetic oligonucleotide
gcgggaugggcagcgaggg

SEQ ID NO: 2505077 - RNA, 19 nt, Artificial Sequence
  Description of Artificial Sequence: Synthetic oligonucleotide
cagaugcagaugggauagg

SEQ ID NO: 2505078 - RNA, 19 nt, Artificial Sequence
  Description of Artificial Sequence: Synthetic oligonucleotide
gcuguaaaauguccucgaa

SEQ ID NO: 2505079 - RNA, 19 nt, Artificial Sequence
  Description of Artificial Sequence: Synthetic oligonucleotide
gguuguccacuccagacau

SEQ ID NO: 2505080 - RNA, 19 nt, Artificial Sequence
  Description of Artificial Sequence: Synthetic oligonucleotide
gacgcagcuguuggcguuc

SEQ ID NO: 2505081 - RNA, 19 nt, Artificial Sequence
  Description of Artificial Sequence: Synthetic oligonucleotide
acgcagcuguuggcguucc

SEQ ID NO: 2505082 - RNA, 19 nt, Artificial Sequence
  Description of Artificial Sequence: Synthetic oligonucleotide
ggaagguugcagcgggaga

SEQ ID NO: 2505083 - RNA, 19 nt, Artificial Sequence
  Description of Artificial Sequence: Synthetic oligonucleotide
aucuggggaguuggcggag

SEQ ID NO: 2505084 - RNA, 19 nt, Artificial Sequence
  Description of Artificial Sequence: Synthetic oligonucleotide
ggacgagucagaggacaag

SEQ ID NO: 2505085 - RNA, 19 nt, Artificial Sequence
  Description of Artificial Sequence: Synthetic oligonucleotide
ccucucuaaggagaacagc

SEQ ID NO: 2505086 - RNA, 19 nt, Artificial Sequence
  Description of Artificial Sequence: Synthetic oligonucleotide
  modified_base (13)..(13): a, c, u, g, unknown or other
gccccugcgaucncccugg

SEQ ID NO: 2505087 - RNA, 19 nt, Artificial Sequence
  Description of Artificial Sequence: Synthetic oligonucleotide
gugguccugucuggcgugg

SEQ ID NO: 2505088 - RNA, 19 nt, Artificial Sequence
  Description of Artificial Sequence: Synthetic oligonucleotide
cagccagauuggccagucc

SEQ ID NO: 2505089 - RNA, 19 nt, Artificial Sequence
  Description of Artificial Sequence: Synthetic oligonucleotide
cuccagaugcagaugggau

SEQ ID NO: 2505090 - RNA, 19 nt, Artificial Sequence
  Description of Artificial Sequence: Synthetic oligonucleotide
gugcuagcugcagugucca

SEQ ID NO: 2505091 - RNA, 19 nt, Artificial Sequence
  Description of Artificial Sequence: Synthetic oligonucleotide
ggaugugguccugucuggc

SEQ ID NO: 2505092 - RNA, 19 nt, Artificial Sequence
  Description of Artificial Sequence: Synthetic oligonucleotide
guuggacgagucagaggac

SEQ ID NO: 2505093 - RNA, 19 nt, Artificial Sequence
  Description of Artificial Sequence: Synthetic oligonucleotide
gagacgcagcuguuggcgu

SEQ ID NO: 2505094 - RNA, 19 nt, Artificial Sequence
  Description of Artificial Sequence: Synthetic oligonucleotide
ggucuuugcgacuccagau

SEQ ID NO: 2505095 - RNA, 19 nt, Artificial Sequence
  Description of Artificial Sequence: Synthetic oligonucleotide
  modified_base (4)..(4): a, c, u, g, unknown or other
aucncccuggccacgcuua

SEQ ID NO: 2505096 - RNA, 19 nt, Artificial Sequence
  Description of Artificial Sequence: Synthetic oligonucleotide
ggccaguccacaagaggcc

SEQ ID NO: 2505097 - RNA, 19 nt, Artificial Sequence
  Description of Artificial Sequence: Synthetic oligonucleotide
cuuccauggacgagaugcu

SEQ ID NO: 2505098 - RNA, 19 nt, Artificial Sequence
  Description of Artificial Sequence: Synthetic oligonucleotide
caggcucaauuccucugga

SEQ ID NO: 2505099 - RNA, 19 nt, Artificial Sequence
  Description of Artificial Sequence: Synthetic oligonucleotide
uggguccaugucagccccu

SEQ ID NO: 2505100 - RNA, 19 nt, Artificial Sequence
  Description of Artificial Sequence: Synthetic oligonucleotide
acugcgcagguuggacgag

SEQ ID NO: 2505101 - RNA, 19 nt, Artificial Sequence
  Description of Artificial Sequence: Synthetic oligonucleotide
gucuggcguggguaccggc

SEQ ID NO: 2505102 - RNA, 19 nt, Artificial Sequence
  Description of Artificial Sequence: Synthetic oligonucleotide
cgcagguuggacgagucag

SEQ ID NO: 2505103 - RNA, 19 nt, Artificial Sequence
  Description of Artificial Sequence: Synthetic oligonucleotide
  modified_base (2)..(2): a, c, u, g, unknown or other
cncccuggccacgcuuacg

SEQ ID NO: 2505104 - RNA, 19 nt, Artificial Sequence
  Description of Artificial Sequence: Synthetic oligonucleotide
cacaagaggcccagugcua

SEQ ID NO: 2505105 - RNA, 19 nt, Artificial Sequence
  Description of Artificial Sequence: Synthetic oligonucleotide
gccacgcuuacgcgcauac

SEQ ID NO: 2505106 - RNA, 19 nt, Artificial Sequence
  Description of Artificial Sequence: Synthetic oligonucleotide
gcuaguucucagguacaac

SEQ ID NO: 2505107 - RNA, 19 nt, Artificial Sequence
  Description of Artificial Sequence: Synthetic oligonucleotide
guaaagugucaggucuucu

SEQ ID NO: 2505108 - RNA, 19 nt, Artificial Sequence
  Description of Artificial Sequence: Synthetic oligonucleotide
ggggcugauggcaaguaaa

SEQ ID NO: 2505109 - RNA, 19 nt, Artificial Sequence
  Description of Artificial Sequence: Synthetic oligonucleotide
ggcugcucguggauuuggg

SEQ ID NO: 2505110 - RNA, 19 nt, Artificial Sequence
  Description of Artificial Sequence: Synthetic oligonucleotide
guccuaccucagaagaaaa

SEQ ID NO: 2505111 - RNA, 19 nt, Artificial Sequence
  Description of Artificial Sequence: Synthetic oligonucleotide
gguaccggcaggcucaauu

SEQ ID NO: 2505112 - RNA, 19 nt, Artificial Sequence
  Description of Artificial Sequence: Synthetic oligonucleotide
aggcuaguucucagguaca

SEQ ID NO: 2505113 - RNA, 19 nt, Artificial Sequence
  Description of Artificial Sequence: Synthetic oligonucleotide
aguucgggaugugguccug

SEQ ID NO: 2505114 - RNA, 19 nt, Artificial Sequence
  Description of Artificial Sequence: Synthetic oligonucleotide
  modified_base (18)..(18): a, c, u, g, unknown or other
ugucagccccugcgaucnc

SEQ ID NO: 2505115 - RNA, 19 nt, Artificial Sequence
  Description of Artificial Sequence: Synthetic oligonucleotide
agaggacaaggaggaaguu

SEQ ID NO: 2505116 - RNA, 19 nt, Artificial Sequence
  Description of Artificial Sequence: Synthetic oligonucleotide
uggcguuccagggcugcuc

SEQ ID NO: 2505117 - RNA, 19 nt, Artificial Sequence
  Description of Artificial Sequence: Synthetic oligonucleotide
auccccucucuaaggagaa

SEQ ID NO: 2505118 - RNA, 19 nt, Artificial Sequence
  Description of Artificial Sequence: Synthetic oligonucleotide
ggacgagaugcuaccuaug

SEQ ID NO: 2505119 - RNA, 19 nt, Artificial Sequence
  Description of Artificial Sequence: Synthetic oligonucleotide
ugccgcucccugagacgca

SEQ ID NO: 2505120 - RNA, 19 nt, Artificial Sequence
  Description of Artificial Sequence: Synthetic oligonucleotide
cacuuccauggacgagaug

SEQ ID NO: 2505121 - RNA, 19 nt, Artificial Sequence
  Description of Artificial Sequence: Synthetic oligonucleotide
gccagauuggccaguccac

SEQ ID NO: 2505122 - RNA, 19 nt, Artificial Sequence
  Description of Artificial Sequence: Synthetic oligonucleotide
ggaguuggcggagaguccu

SEQ ID NO: 2505123 - RNA, 19 nt, Artificial Sequence
  Description of Artificial Sequence: Synthetic oligonucleotide
gaggugcgggaugggcagc

SEQ ID NO: 2505124 - RNA, 19 nt, Artificial Sequence
  Description of Artificial Sequence: Synthetic oligonucleotide
  modified_base (5)..(5): a, c, u, g, unknown or other
gaucncccuggccacgcuu

SEQ ID NO: 2505125 - RNA, 19 nt, Artificial Sequence
  Description of Artificial Sequence: Synthetic oligonucleotide
agggcugcucguggauuug

SEQ ID NO: 2505126 - RNA, 19 nt, Artificial Sequence
  Description of Artificial Sequence: Synthetic oligonucleotide
ucccugagacgcagcuguu

SEQ ID NO: 2505127 - RNA, 19 nt, Artificial Sequence
  Description of Artificial Sequence: Synthetic oligonucleotide
uccccucucuaaggagaac

SEQ ID NO: 2505128 - RNA, 19 nt, Artificial Sequence
  Description of Artificial Sequence: Synthetic oligonucleotide
auucugucucuggcuguaa

SEQ ID NO: 2505129 - RNA, 19 nt, Artificial Sequence
  Description of Artificial Sequence: Synthetic oligonucleotide
  modified_base (7)..(7): a, c, u, g, unknown or other
gcgaucncccuggccacgc

SEQ ID NO: 2505130 - RNA, 19 nt, Artificial Sequence
  Description of Artificial Sequence: Synthetic oligonucleotide
cucaauuccucuggauggu

SEQ ID NO: 2505131 - RNA, 19 nt, Artificial Sequence
  Description of Artificial Sequence: Synthetic oligonucleotide
guuguccacuccagacauc

SEQ ID NO: 2505132 - RNA, 19 nt, Artificial Sequence
  Description of Artificial Sequence: Synthetic oligonucleotide
ggggucuuugcgacuccag

SEQ ID NO: 2505133 - RNA, 19 nt, Artificial Sequence
  Description of Artificial Sequence: Synthetic oligonucleotide
gaguuggcggagaguccuc

SEQ ID NO: 2505134 - RNA, 19 nt, Artificial Sequence
  Description of Artificial Sequence: Synthetic oligonucleotide
ccacaagaggcccagugcu

SEQ ID NO: 2505135 - RNA, 19 nt, Artificial Sequence
  Description of Artificial Sequence: Synthetic oligonucleotide
ccccucucuaaggagaaca

SEQ ID NO: 2505136 - RNA, 19 nt, Artificial Sequence
  Description of Artificial Sequence: Synthetic oligonucleotide
ccugggauccccucucuaa

SEQ ID NO: 2505137 - RNA, 19 nt, Artificial Sequence
  Description of Artificial Sequence: Synthetic oligonucleotide
uccagacaucuggggaguu

SEQ ID NO: 2505138 - RNA, 19 nt, Artificial Sequence
  Description of Artificial Sequence: Synthetic oligonucleotide
ggcuaguucucagguacaa

SEQ ID NO: 2505139 - RNA, 19 nt, Artificial Sequence
  Description of Artificial Sequence: Synthetic oligonucleotide
gcgccaagggugugucugc

SEQ ID NO: 2505140 - RNA, 19 nt, Artificial Sequence
  Description of Artificial Sequence: Synthetic oligonucleotide
gggaguuggcggagagucc

SEQ ID NO: 2505141 - RNA, 19 nt, Artificial Sequence
  Description of Artificial Sequence: Synthetic oligonucleotide
gaaagcggggaaggcuagu

SEQ ID NO: 2505142 - RNA, 19 nt, Artificial Sequence
  Description of Artificial Sequence: Synthetic oligonucleotide
ggguccaugucagccccug

SEQ ID NO: 2505143 - RNA, 19 nt, Artificial Sequence
  Description of Artificial Sequence: Synthetic oligonucleotide
ggauuuggacugcgcaggu

SEQ ID NO: 2505144 - RNA, 19 nt, Artificial Sequence
  Description of Artificial Sequence: Synthetic oligonucleotide
cccaucacuuggauuugga

SEQ ID NO: 2505145 - RNA, 19 nt, Artificial Sequence
  Description of Artificial Sequence: Synthetic oligonucleotide
guccugucuggcgugggua

SEQ ID NO: 2505146 - RNA, 19 nt, Artificial Sequence
  Description of Artificial Sequence: Synthetic oligonucleotide
aguccacaagaggcccagu

SEQ ID NO: 2505147 - RNA, 19 nt, Artificial Sequence
  Description of Artificial Sequence: Synthetic oligonucleotide
gcagcgggagaaaguuagc

SEQ ID NO: 2505148 - RNA, 19 nt, Artificial Sequence
  Description of Artificial Sequence: Synthetic oligonucleotide
cauggacgagaugcuaccu

SEQ ID NO: 2505149 - RNA, 19 nt, Artificial Sequence
  Description of Artificial Sequence: Synthetic oligonucleotide
gcgacuccagaugcagaug

SEQ ID NO: 2505150 - RNA, 19 nt, Artificial Sequence
  Description of Artificial Sequence: Synthetic oligonucleotide
ccggcaggcucaauuccuc

SEQ ID NO: 2505151 - RNA, 19 nt, Artificial Sequence
  Description of Artificial Sequence: Synthetic oligonucleotide
gauuuggacugcgcagguu

SEQ ID NO: 2505152 - RNA, 19 nt, Artificial Sequence
  Description of Artificial Sequence: Synthetic oligonucleotide
cccuggccacgcuuacgcg

SEQ ID NO: 2505153 - RNA, 19 nt, Artificial Sequence
  Description of Artificial Sequence: Synthetic oligonucleotide
cgcgcauacuucuccagga

SEQ ID NO: 2505154 - RNA, 19 nt, Artificial Sequence
  Description of Artificial Sequence: Synthetic oligonucleotide
gacugcgccaagggugugu

SEQ ID NO: 2505155 - RNA, 19 nt, Artificial Sequence
  Description of Artificial Sequence: Synthetic oligonucleotide
ccccaucacuuggauuugg

SEQ ID NO: 2505156 - RNA, 19 nt, Artificial Sequence
  Description of Artificial Sequence: Synthetic oligonucleotide
gcuuacgcgcauacuucuc

SEQ ID NO: 2505157 - RNA, 19 nt, Artificial Sequence
  Description of Artificial Sequence: Synthetic oligonucleotide
cguggguaccggcaggcuc

SEQ ID NO: 2505158 - RNA, 19 nt, Artificial Sequence
  Description of Artificial Sequence: Synthetic oligonucleotide
guacaacauccaccauccu

SEQ ID NO: 2505159 - RNA, 19 nt, Artificial Sequence
  Description of Artificial Sequence: Synthetic oligonucleotide
uucucacucuggggcugau

SEQ ID NO: 2505160 - RNA, 19 nt, Artificial Sequence
  Description of Artificial Sequence: Synthetic oligonucleotide
gggccugggauccccucuc

SEQ ID NO: 2505161 - RNA, 19 nt, Artificial Sequence
  Description of Artificial Sequence: Synthetic oligonucleotide
gcugcucguggauuugggu

SEQ ID NO: 2505162 - RNA, 19 nt, Artificial Sequence
  Description of Artificial Sequence: Synthetic oligonucleotide
ccagauuggccaguccaca

SEQ ID NO: 2505163 - RNA, 19 nt, Artificial Sequence
  Description of Artificial Sequence: Synthetic oligonucleotide
guguccaggcucugccccu

SEQ ID NO: 2505164 - RNA, 19 nt, Artificial Sequence
  Description of Artificial Sequence: Synthetic oligonucleotide
gccgcucccugagacgcag

SEQ ID NO: 2505165 - RNA, 19 nt, Artificial Sequence
  Description of Artificial Sequence: Synthetic oligonucleotide
ccugucuggcguggguacc

SEQ ID NO: 2505166 - RNA, 19 nt, Artificial Sequence
  Description of Artificial Sequence: Synthetic oligonucleotide
gccaagggugugucugcuc

SEQ ID NO: 2505167 - RNA, 19 nt, Artificial Sequence
  Description of Artificial Sequence: Synthetic oligonucleotide
agacugcgccaagggugug

SEQ ID NO: 2505168 - RNA, 19 nt, Artificial Sequence
  Description of Artificial Sequence: Synthetic oligonucleotide
cccugagacgcagcuguug

SEQ ID NO: 2505169 - RNA, 19 nt, Artificial Sequence
  Description of Artificial Sequence: Synthetic oligonucleotide
gguugcagcgggagaaagu

SEQ ID NO: 2505170 - RNA, 19 nt, Artificial Sequence
  Description of Artificial Sequence: Synthetic oligonucleotide
  modified_base (11)..(11): a, c, u, g, unknown or other
cccugcgaucncccuggcc

SEQ ID NO: 2505171 - RNA, 19 nt, Artificial Sequence
  Description of Artificial Sequence: Synthetic oligonucleotide
cguggauuuggguccaugu

SEQ ID NO: 2505172 - RNA, 19 nt, Artificial Sequence
  Description of Artificial Sequence: Synthetic oligonucleotide
ccaguccacaagaggccca

SEQ ID NO: 2505173 - RNA, 19 nt, Artificial Sequence
  Description of Artificial Sequence: Synthetic oligonucleotide
cagggcugcucguggauuu

SEQ ID NO: 2505174 - RNA, 19 nt, Artificial Sequence
  Description of Artificial Sequence: Synthetic oligonucleotide
guucgggaugugguccugu

SEQ ID NO: 2505175 - RNA, 19 nt, Artificial Sequence
  Description of Artificial Sequence: Synthetic oligonucleotide
gcgcagguuggacgaguca

SEQ ID NO: 2505176 - RNA, 19 nt, Artificial Sequence
  Description of Artificial Sequence: Synthetic oligonucleotide
cuggggcugauggcaagua

SEQ ID NO: 2505177 - RNA, 19 nt, Artificial Sequence
  Description of Artificial Sequence: Synthetic oligonucleotide
gcggggaaggcuaguucuc

SEQ ID NO: 2505178 - RNA, 19 nt, Artificial Sequence
  Description of Artificial Sequence: Synthetic oligonucleotide
ggcucugccccuccaucau

SEQ ID NO: 2505179 - RNA, 19 nt, Artificial Sequence
  Description of Artificial Sequence: Synthetic oligonucleotide
gcuccaacguguccacauu

SEQ ID NO: 2505180 - RNA, 19 nt, Artificial Sequence
  Description of Artificial Sequence: Synthetic oligonucleotide
cugcgcagguuggacgagu

SEQ ID NO: 2505181 - RNA, 19 nt, Artificial Sequence
  Description of Artificial Sequence: Synthetic oligonucleotide
cgcuuacgcgcauacuucu

SEQ ID NO: 2505182 - RNA, 19 nt, Artificial Sequence
  Description of Artificial Sequence: Synthetic oligonucleotide
gcccagugcuagcugcagu

SEQ ID NO: 2505183 - RNA, 19 nt, Artificial Sequence
  Description of Artificial Sequence: Synthetic oligonucleotide
gccugggauccccucucua

SEQ ID NO: 2505184 - RNA, 19 nt, Artificial Sequence
  Description of Artificial Sequence: Synthetic oligonucleotide
ccauccugaucugcaaggu

SEQ ID NO: 2505185 - RNA, 19 nt, Artificial Sequence
  Description of Artificial Sequence: Synthetic oligonucleotide
ccgcucccugagacgcagc

SEQ ID NO: 2505186 - RNA, 19 nt, Artificial Sequence
  Description of Artificial Sequence: Synthetic oligonucleotide
ggugcgggaugggcagcga

SEQ ID NO: 2505187 - RNA, 19 nt, Artificial Sequence
  Description of Artificial Sequence: Synthetic oligonucleotide
cugcgccaagggugugucu

SEQ ID NO: 2505188 - RNA, 19 nt, Artificial Sequence
  Description of Artificial Sequence: Synthetic oligonucleotide
cggggaaggcuaguucuca

SEQ ID NO: 2505189 - RNA, 19 nt, Artificial Sequence
  Description of Artificial Sequence: Synthetic oligonucleotide
  modified_base (15)..(15): a, c, u, g, unknown or other
cagccccugcgaucncccu

SEQ ID NO: 2505190 - RNA, 19 nt, Artificial Sequence
  Description of Artificial Sequence: Synthetic oligonucleotide
ggccugggauccccucucu

SEQ ID NO: 2505191 - RNA, 19 nt, Artificial Sequence
  Description of Artificial Sequence: Synthetic oligonucleotide
  modified_base (12)..(12): a, c, u, g, unknown or other
ccccugcgaucncccuggc

SEQ ID NO: 2505192 - RNA, 19 nt, Artificial Sequence
  Description of Artificial Sequence: Synthetic oligonucleotide
ggccacgcuuacgcgcaua

SEQ ID NO: 2505193 - RNA, 19 nt, Artificial Sequence
  Description of Artificial Sequence: Synthetic oligonucleotide
gcguuccagggcugcucgu

SEQ ID NO: 2505194 - RNA, 19 nt, Artificial Sequence
  Description of Artificial Sequence: Synthetic oligonucleotide
cggcaggcucaauuccucu

SEQ ID NO: 2505195 - RNA, 19 nt, Artificial Sequence
  Description of Artificial Sequence: Synthetic oligonucleotide
gccccuccaucauccccau

SEQ ID NO: 2505196 - RNA, 19 nt, Artificial Sequence
  Description of Artificial Sequence: Synthetic oligonucleotide
ccugaucugcaaggucaau

SEQ ID NO: 2505197 - RNA, 19 nt, Artificial Sequence
  Description of Artificial Sequence: Synthetic oligonucleotide
ccacgcuuacgcgcauacu

SEQ ID NO: 2505198 - RNA, 19 nt, Artificial Sequence
  Description of Artificial Sequence: Synthetic oligonucleotide
cgcagcuguuggcguucca

SEQ ID NO: 2505199 - RNA, 19 nt, Artificial Sequence
  Description of Artificial Sequence: Synthetic oligonucleotide
  modified_base (6)..(6): a, c, u, g, unknown or other
cgaucncccuggccacgcu

SEQ ID NO: 2505200 - RNA, 19 nt, Artificial Sequence
  Description of Artificial Sequence: Synthetic oligonucleotide
cgccaagggugugucugcu

SEQ ID NO: 2505201 - RNA, 19 nt, Artificial Sequence
  Description of Artificial Sequence: Synthetic oligonucleotide
ggguaccggcaggcucaau

SEQ ID NO: 2505202 - RNA, 19 nt, Artificial Sequence
  Description of Artificial Sequence: Synthetic oligonucleotide
  modified_base (1)..(1): a, c, u, g, unknown or other
ncccuggccacgcuuacgc

SEQ ID NO: 2505203 - RNA, 19 nt, Artificial Sequence
  Description of Artificial Sequence: Synthetic oligonucleotide
aacaauaaguuacaaauac

SEQ ID NO: 2505204 - RNA, 19 nt, Artificial Sequence
  Description of Artificial Sequence: Synthetic oligonucleotide
aauucuauguacaagaggg

SEQ ID NO: 2505205 - RNA, 19 nt, Artificial Sequence
  Description of Artificial Sequence: Synthetic oligonucleotide
aaugcaguaucuuagcaac

SEQ ID NO: 2505206 - RNA, 19 nt, Artificial Sequence
  Description of Artificial Sequence: Synthetic oligonucleotide
uauuugauuacucaaauac

SEQ ID NO: 2505207 - RNA, 19 nt, Artificial Sequence
  Description of Artificial Sequence: Synthetic oligonucleotide
guuacaaauacccugaacc

SEQ ID NO: 2505208 - RNA, 19 nt, Artificial Sequence
  Description of Artificial Sequence: Synthetic oligonucleotide
uuugauuacucaaauaccc

SEQ ID NO: 2505209 - RNA, 19 nt, Artificial Sequence
  Description of Artificial Sequence: Synthetic oligonucleotide
uaauauaacacacagcuaa

SEQ ID NO: 2505210 - RNA, 19 nt, Artificial Sequence
  Description of Artificial Sequence: Synthetic oligonucleotide
uaaacuagucaaaaguagg

SEQ ID NO: 2505211 - RNA, 19 nt, Artificial Sequence
  Description of Artificial Sequence: Synthetic oligonucleotide
uuugaguugcacuugauug

SEQ ID NO: 2505212 - RNA, 19 nt, Artificial Sequence
  Description of Artificial Sequence: Synthetic oligonucleotide
uaaaagacguguuaguucc

SEQ ID NO: 2505213 - RNA, 19 nt, Artificial Sequence
  Description of Artificial Sequence: Synthetic oligonucleotide
acuacacugaauuaucuac

SEQ ID NO: 2505214 - RNA, 19 nt, Artificial Sequence
  Description of Artificial Sequence: Synthetic oligonucleotide
uuaguaguacuucaaauca

SEQ ID NO: 2505215 - RNA, 19 nt, Artificial Sequence
  Description of Artificial Sequence: Synthetic oligonucleotide
aagggguuaauuaaaagac

SEQ ID NO: 2505216 - RNA, 19 nt, Artificial Sequence
  Description of Artificial Sequence: Synthetic oligonucleotide
aagugaauaaacuagucaa

SEQ ID NO: 2505217 - RNA, 19 nt, Artificial Sequence
  Description of Artificial Sequence: Synthetic oligonucleotide
aacguuaaauauuugauua

SEQ ID NO: 2505218 - RNA, 19 nt, Artificial Sequence
  Description of Artificial Sequence: Synthetic oligonucleotide
aaagugaauaaacuaguca

SEQ ID NO: 2505219 - RNA, 19 nt, Artificial Sequence
  Description of Artificial Sequence: Synthetic oligonucleotide
uuaaauauuugauuacuca

SEQ ID NO: 2505220 - RNA, 19 nt, Artificial Sequence
  Description of Artificial Sequence: Synthetic oligonucleotide
auaacuuaaacaugauacg

SEQ ID NO: 2505221 - RNA, 19 nt, Artificial Sequence
  Description of Artificial Sequence: Synthetic oligonucleotide
uuucaauggagcaagugag

SEQ ID NO: 2505222 - RNA, 19 nt, Artificial Sequence
  Description of Artificial Sequence: Synthetic oligonucleotide
aaaugaggaaugcaguauc

SEQ ID NO: 2505223 - RNA, 19 nt, Artificial Sequence
  Description of Artificial Sequence: Synthetic oligonucleotide
auaaguuacaaauacccug

SEQ ID NO: 2505224 - RNA, 19 nt, Artificial Sequence
  Description of Artificial Sequence: Synthetic oligonucleotide
acuagucaaaaguaggugg

SEQ ID NO: 2505225 - RNA, 19 nt, Artificial Sequence
  Description of Artificial Sequence: Synthetic oligonucleotide
acucaaauacccuaagacg

SEQ ID NO: 2505226 - RNA, 19 nt, Artificial Sequence
  Description of Artificial Sequence: Synthetic oligonucleotide
uuuucaauggagcaaguga

SEQ ID NO: 2505227 - RNA, 19 nt, Artificial Sequence
  Description of Artificial Sequence: Synthetic oligonucleotide
ucaugaagcauuaauuccc

SEQ ID NO: 2505228 - RNA, 19 nt, Artificial Sequence
  Description of Artificial Sequence: Synthetic oligonucleotide
ugagcuuagaaucaaggca

SEQ ID NO: 2505229 - RNA, 19 nt, Artificial Sequence
  Description of Artificial Sequence: Synthetic oligonucleotide
uguuuagaaaaguagcuug

SEQ ID NO: 2505230 - RNA, 19 nt, Artificial Sequence
  Description of Artificial Sequence: Synthetic oligonucleotide
aauauuugauuacucaaau

SEQ ID NO: 2505231 - RNA, 19 nt, Artificial Sequence
  Description of Artificial Sequence: Synthetic oligonucleotide
uaagggguuaauuaaaaga

SEQ ID NO: 2505232 - RNA, 19 nt, Artificial Sequence
  Description of Artificial Sequence: Synthetic oligonucleotide
uaauucuauguacaagagg

SEQ ID NO: 2505233 - RNA, 19 nt, Artificial Sequence
  Description of Artificial Sequence: Synthetic oligonucleotide
gaccauacaguuuacacgc

SEQ ID NO: 2505234 - RNA, 19 nt, Artificial Sequence
  Description of Artificial Sequence: Synthetic oligonucleotide
aauacccugaaccuaauaa

SEQ ID NO: 2505235 - RNA, 19 nt, Artificial Sequence
  Description of Artificial Sequence: Synthetic oligonucleotide
uaacuuaaacaugauacgg

SEQ ID NO: 2505236 - RNA, 19 nt, Artificial Sequence
  Description of Artificial Sequence: Synthetic oligonucleotide
uuagguauggugaauuuca

SEQ ID NO: 2505237 - RNA, 19 nt, Artificial Sequence
  Description of Artificial Sequence: Synthetic oligonucleotide
aauuucaugaagcauuaau

SEQ ID NO: 2505238 - RNA, 19 nt, Artificial Sequence
  Description of Artificial Sequence: Synthetic oligonucleotide
aaaauugucaaagugcuaa

SEQ ID NO: 2505239 - RNA, 19 nt, Artificial Sequence
  Description of Artificial Sequence: Synthetic oligonucleotide
agugcuaagacuucauuag

SEQ ID NO: 2505240 - RNA, 19 nt, Artificial Sequence
  Description of Artificial Sequence: Synthetic oligonucleotide
uaauuaaaagacguguuag

SEQ ID NO: 2505241 - RNA, 19 nt, Artificial Sequence
  Description of Artificial Sequence: Synthetic oligonucleotide
agaaaaguagcuuggagcu

SEQ ID NO: 2505242 - RNA, 19 nt, Artificial Sequence
  Description of Artificial Sequence: Synthetic oligonucleotide
uaugacaggcccaauaaca

SEQ ID NO: 2505243 - RNA, 19 nt, Artificial Sequence
  Description of Artificial Sequence: Synthetic oligonucleotide
ucuaaaagugaauaaacua

SEQ ID NO: 2505244 - RNA, 19 nt, Artificial Sequence
  Description of Artificial Sequence: Synthetic oligonucleotide
aauuaaaagacguguuagu

SEQ ID NO: 2505245 - RNA, 19 nt, Artificial Sequence
  Description of Artificial Sequence: Synthetic oligonucleotide
ucuuucaaaggucagcuac

SEQ ID NO: 2505246 - RNA, 19 nt, Artificial Sequence
  Description of Artificial Sequence: Synthetic oligonucleotide
aaagucucaacguuaaaua

SEQ ID NO: 2505247 - RNA, 19 nt, Artificial Sequence
  Description of Artificial Sequence: Synthetic oligonucleotide
ugaagaagaaauaauucua

SEQ ID NO: 2505248 - RNA, 19 nt, Artificial Sequence
  Description of Artificial Sequence: Synthetic oligonucleotide
gauacgguuaauauaacac

SEQ ID NO: 2505249 - RNA, 19 nt, Artificial Sequence
  Description of Artificial Sequence: Synthetic oligonucleotide
aguauguuuguuucuggac

SEQ ID NO: 2505250 - RNA, 19 nt, Artificial Sequence
  Description of Artificial Sequence: Synthetic oligonucleotide
auuugauuacucaaauacc

SEQ ID NO: 2505251 - RNA, 19 nt, Artificial Sequence
  Description of Artificial Sequence: Synthetic oligonucleotide
uuaucuacugcuaccauaa

SEQ ID NO: 2505252 - RNA, 19 nt, Artificial Sequence
  Description of Artificial Sequence: Synthetic oligonucleotide
aacaugauacgguuaauau

SEQ ID NO: 2505253 - RNA, 19 nt, Artificial Sequence
  Description of Artificial Sequence: Synthetic oligonucleotide
aauguuuagaaaaguagcu

SEQ ID NO: 2505254 - RNA, 19 nt, Artificial Sequence
  Description of Artificial Sequence: Synthetic oligonucleotide
uuaauuaaaagacguguua

SEQ ID NO: 2505255 - RNA, 19 nt, Artificial Sequence
  Description of Artificial Sequence: Synthetic oligonucleotide
auacccugaaccuaauaac

SEQ ID NO: 2505256 - RNA, 19 nt, Artificial Sequence
  Description of Artificial Sequence: Synthetic oligonucleotide
uaagacguaugacaggccc

SEQ ID NO: 2505257 - RNA, 19 nt, Artificial Sequence
  Description of Artificial Sequence: Synthetic oligonucleotide
uacaagaggguccauauuc

SEQ ID NO: 2505258 - RNA, 19 nt, Artificial Sequence
  Description of Artificial Sequence: Synthetic oligonucleotide
ucaacguuaaauauuugau

SEQ ID NO: 2505259 - RNA, 19 nt, Artificial Sequence
  Description of Artificial Sequence: Synthetic oligonucleotide
aaucaaggcaggcuuaaca

SEQ ID NO: 2505260 - RNA, 19 nt, Artificial Sequence
  Description of Artificial Sequence: Synthetic oligonucleotide
ugaauuaucuacugcuacc

SEQ ID NO: 2505261 - RNA, 19 nt, Artificial Sequence
  Description of Artificial Sequence: Synthetic oligonucleotide
caugauacgguuaauauaa

SEQ ID NO: 2505262 - RNA, 19 nt, Artificial Sequence
  Description of Artificial Sequence: Synthetic oligonucleotide
ucuaauguuuagaaaagua

SEQ ID NO: 2505263 - RNA, 19 nt, Artificial Sequence
  Description of Artificial Sequence: Synthetic oligonucleotide
aauacccuaagacguauga

SEQ ID NO: 2505264 - RNA, 19 nt, Artificial Sequence
  Description of Artificial Sequence: Synthetic oligonucleotide
ugaaccuaauaacuuaaac

SEQ ID NO: 2505265 - RNA, 19 nt, Artificial Sequence
  Description of Artificial Sequence: Synthetic oligonucleotide
uacgguuaauauaacacac

SEQ ID NO: 2505266 - RNA, 19 nt, Artificial Sequence
  Description of Artificial Sequence: Synthetic oligonucleotide
guuaguuccacuucggaac

SEQ ID NO: 2505267 - RNA, 19 nt, Artificial Sequence
  Description of Artificial Sequence: Synthetic oligonucleotide
ugcacuugauugaagaaga

SEQ ID NO: 2505268 - RNA, 19 nt, Artificial Sequence
  Description of Artificial Sequence: Synthetic oligonucleotide
aggcuuaacaaaugcuucc

SEQ ID NO: 2505269 - RNA, 19 nt, Artificial Sequence
  Description of Artificial Sequence: Synthetic oligonucleotide
guauguuuguuucuggacc

SEQ ID NO: 2505270 - RNA, 19 nt, Artificial Sequence
  Description of Artificial Sequence: Synthetic oligonucleotide
uacucaguacaucugggag

SEQ ID NO: 2505271 - RNA, 19 nt, Artificial Sequence
  Description of Artificial Sequence: Synthetic oligonucleotide
aauaaacuagucaaaagua

SEQ ID NO: 2505272 - RNA, 19 nt, Artificial Sequence
  Description of Artificial Sequence: Synthetic oligonucleotide
uaagacuucauuaguagua

SEQ ID NO: 2505273 - RNA, 19 nt, Artificial Sequence
  Description of Artificial Sequence: Synthetic oligonucleotide
auauaacacacagcuaacc

SEQ ID NO: 2505274 - RNA, 19 nt, Artificial Sequence
  Description of Artificial Sequence: Synthetic oligonucleotide
aaauugucaaagugcuaag

SEQ ID NO: 2505275 - RNA, 19 nt, Artificial Sequence
  Description of Artificial Sequence: Synthetic oligonucleotide
acguuaaauauuugauuac

SEQ ID NO: 2505276 - RNA, 19 nt, Artificial Sequence
  Description of Artificial Sequence: Synthetic oligonucleotide
uucggaacucaaaugagga

SEQ ID NO: 2505277 - RNA, 19 nt, Artificial Sequence
  Description of Artificial Sequence: Synthetic oligonucleotide
gagcuuagaaucaaggcag

SEQ ID NO: 2505278 - RNA, 19 nt, Artificial Sequence
  Description of Artificial Sequence: Synthetic oligonucleotide
uuagaaucaaggcaggcuu

SEQ ID NO: 2505279 - RNA, 19 nt, Artificial Sequence
  Description of Artificial Sequence: Synthetic oligonucleotide
uuaacaaaugcuuccugac

SEQ ID NO: 2505280 - RNA, 19 nt, Artificial Sequence
  Description of Artificial Sequence: Synthetic oligonucleotide
uuacaaauacccugaaccu

SEQ ID NO: 2505281 - RNA, 19 nt, Artificial Sequence
  Description of Artificial Sequence: Synthetic oligonucleotide
uacccuaagacguaugaca

SEQ ID NO: 2505282 - RNA, 19 nt, Artificial Sequence
  Description of Artificial Sequence: Synthetic oligonucleotide
cacacauuuucaauggagc

SEQ ID NO: 2505283 - RNA, 19 nt, Artificial Sequence
  Description of Artificial Sequence: Synthetic oligonucleotide
auauucaaugcacacauuu

SEQ ID NO: 2505284 - RNA, 19 nt, Artificial Sequence
  Description of Artificial Sequence: Synthetic oligonucleotide
aaaaguagcuuggagcucu

SEQ ID NO: 2505285 - RNA, 19 nt, Artificial Sequence
  Description of Artificial Sequence: Synthetic oligonucleotide
aguuacaaauacccugaac

SEQ ID NO: 2505286 - RNA, 19 nt, Artificial Sequence
  Description of Artificial Sequence: Synthetic oligonucleotide
auaaacuagucaaaaguag

SEQ ID NO: 2505287 - RNA, 19 nt, Artificial Sequence
  Description of Artificial Sequence: Synthetic oligonucleotide
acagccauuauuacaaagg

SEQ ID NO: 2505288 - RNA, 19 nt, Artificial Sequence
  Description of Artificial Sequence: Synthetic oligonucleotide
gguauggugaauuucauga

SEQ ID NO: 2505289 - RNA, 19 nt, Artificial Sequence
  Description of Artificial Sequence: Synthetic oligonucleotide
acacugaauuaucuacugc

SEQ ID NO: 2505290 - RNA, 19 nt, Artificial Sequence
  Description of Artificial Sequence: Synthetic oligonucleotide
cauuauuacaaaggcagcc

SEQ ID NO: 2505291 - RNA, 19 nt, Artificial Sequence
  Description of Artificial Sequence: Synthetic oligonucleotide
ugauugaagaagaaauaau

SEQ ID NO: 2505292 - RNA, 19 nt, Artificial Sequence
  Description of Artificial Sequence: Synthetic oligonucleotide
aauaaguuacaaauacccu

SEQ ID NO: 2505293 - RNA, 19 nt, Artificial Sequence
  Description of Artificial Sequence: Synthetic oligonucleotide
auacgguuaauauaacaca

SEQ ID NO: 2505294 - RNA, 19 nt, Artificial Sequence
  Description of Artificial Sequence: Synthetic oligonucleotide
uugauugaagaagaaauaa

SEQ ID NO: 2505295 - RNA, 19 nt, Artificial Sequence
  Description of Artificial Sequence: Synthetic oligonucleotide
uaauaacuuaaacaugaua

SEQ ID NO: 2505296 - RNA, 19 nt, Artificial Sequence
  Description of Artificial Sequence: Synthetic oligonucleotide
uauguuuguuucuggacca

SEQ ID NO: 2505297 - RNA, 19 nt, Artificial Sequence
  Description of Artificial Sequence: Synthetic oligonucleotide
uucuggaccauacaguuua

SEQ ID NO: 2505298 - RNA, 19 nt, Artificial Sequence
  Description of Artificial Sequence: Synthetic oligonucleotide
cuucggaacucaaaugagg

SEQ ID NO: 2505299 - RNA, 19 nt, Artificial Sequence
  Description of Artificial Sequence: Synthetic oligonucleotide
ugauacgguuaauauaaca

SEQ ID NO: 2505300 - RNA, 19 nt, Artificial Sequence
  Description of Artificial Sequence: Synthetic oligonucleotide
aagugcuaagacuucauua

SEQ ID NO: 2505301 - RNA, 19 nt, Artificial Sequence
  Description of Artificial Sequence: Synthetic oligonucleotide
uucccaacuacacugaauu

SEQ ID NO: 2505302 - RNA, 19 nt, Artificial Sequence
  Description of Artificial Sequence: Synthetic oligonucleotide
guuuagaaaaguagcuugg

SEQ ID NO: 2505303 - RNA, 19 nt, Artificial Sequence
  Description of Artificial Sequence: Synthetic oligonucleotide
aagucucaacguuaaauau

SEQ ID NO: 2505304 - RNA, 19 nt, Artificial Sequence
  Description of Artificial Sequence: Synthetic oligonucleotide
aaagacguguuaguuccac

SEQ ID NO: 2505305 - RNA, 19 nt, Artificial Sequence
  Description of Artificial Sequence: Synthetic oligonucleotide
caugaagcauuaauucccg

SEQ ID NO: 2505306 - RNA, 19 nt, Artificial Sequence
  Description of Artificial Sequence: Synthetic oligonucleotide
acuugauugaagaagaaau

SEQ ID NO: 2505307 - RNA, 19 nt, Artificial Sequence
  Description of Artificial Sequence: Synthetic oligonucleotide
aguugcacuugauugaaga

SEQ ID NO: 2505308 - RNA, 19 nt, Artificial Sequence
  Description of Artificial Sequence: Synthetic oligonucleotide
ucaaaggucagcuaccauu

SEQ ID NO: 2505309 - RNA, 19 nt, Artificial Sequence
  Description of Artificial Sequence: Synthetic oligonucleotide
gccauuauuacaaaggcag

SEQ ID NO: 2505310 - RNA, 19 nt, Artificial Sequence
  Description of Artificial Sequence: Synthetic oligonucleotide
uacacugaauuaucuacug

SEQ ID NO: 2505311 - RNA, 19 nt, Artificial Sequence
  Description of Artificial Sequence: Synthetic oligonucleotide
aaacuagucaaaaguaggu

SEQ ID NO: 2505312 - RNA, 19 nt, Artificial Sequence
  Description of Artificial Sequence: Synthetic oligonucleotide
aacuagucaaaaguaggug

SEQ ID NO: 2505313 - RNA, 19 nt, Artificial Sequence
  Description of Artificial Sequence: Synthetic oligonucleotide
uugauuacucaaauacccu

SEQ ID NO: 2505314 - RNA, 19 nt, Artificial Sequence
  Description of Artificial Sequence: Synthetic oligonucleotide
accuacucaguacaucugg

SEQ ID NO: 2505315 - RNA, 19 nt, Artificial Sequence
  Description of Artificial Sequence: Synthetic oligonucleotide
uugcacuugauugaagaag

SEQ ID NO: 2505316 - RNA, 19 nt, Artificial Sequence
  Description of Artificial Sequence: Synthetic oligonucleotide
uccacuucggaacucaaau

SEQ ID NO: 2505317 - RNA, 19 nt, Artificial Sequence
  Description of Artificial Sequence: Synthetic oligonucleotide
uggaccauacaguuuacac

SEQ ID NO: 2505318 - RNA, 19 nt, Artificial Sequence
  Description of Artificial Sequence: Synthetic oligonucleotide
acguguuaguuccacuucg

SEQ ID NO: 2505319 - RNA, 19 nt, Artificial Sequence
  Description of Artificial Sequence: Synthetic oligonucleotide
cuuucaaaggucagcuacc

SEQ ID NO: 2505320 - RNA, 19 nt, Artificial Sequence
  Description of Artificial Sequence: Synthetic oligonucleotide
uaacaaaugcuuccugacu

SEQ ID NO: 2505321 - RNA, 19 nt, Artificial Sequence
  Description of Artificial Sequence: Synthetic oligonucleotide
aauggagcaagugagcuua

SEQ ID NO: 2505322 - RNA, 19 nt, Artificial Sequence
  Description of Artificial Sequence: Synthetic oligonucleotide
uucaaaucaaagucucaac

SEQ ID NO: 2505323 - RNA, 19 nt, Artificial Sequence
  Description of Artificial Sequence: Synthetic oligonucleotide
gagaggacuucuaaaagug

SEQ ID NO: 2505324 - RNA, 19 nt, Artificial Sequence
  Description of Artificial Sequence: Synthetic oligonucleotide
uucauuaguaguacuucaa

SEQ ID NO: 2505325 - RNA, 19 nt, Artificial Sequence
  Description of Artificial Sequence: Synthetic oligonucleotide
uguuaguuccacuucggaa

SEQ ID NO: 2505326 - RNA, 19 nt, Artificial Sequence
  Description of Artificial Sequence: Synthetic oligonucleotide
uucugaguggaggugagag

SEQ ID NO: 2505327 - RNA, 19 nt, Artificial Sequence
  Description of Artificial Sequence: Synthetic oligonucleotide
uguacaagaggguccauau

SEQ ID NO: 2505328 - RNA, 19 nt, Artificial Sequence
  Description of Artificial Sequence: Synthetic oligonucleotide
uucaauggagcaagugagc

SEQ ID NO: 2505329 - RNA, 19 nt, Artificial Sequence
  Description of Artificial Sequence: Synthetic oligonucleotide
cucaacguuaaauauuuga

SEQ ID NO: 2505330 - RNA, 19 nt, Artificial Sequence
  Description of Artificial Sequence: Synthetic oligonucleotide
ggaccauacaguuuacacg

SEQ ID NO: 2505331 - RNA, 19 nt, Artificial Sequence
  Description of Artificial Sequence: Synthetic oligonucleotide
guaagggguuaauuaaaag

SEQ ID NO: 2505332 - RNA, 19 nt, Artificial Sequence
  Description of Artificial Sequence: Synthetic oligonucleotide
cagccauuauuacaaaggc

SEQ ID NO: 2505333 - RNA, 19 nt, Artificial Sequence
  Description of Artificial Sequence: Synthetic oligonucleotide
acacauuuucaauggagca

SEQ ID NO: 2505334 - RNA, 19 nt, Artificial Sequence
  Description of Artificial Sequence: Synthetic oligonucleotide
acuuaaacaugauacgguu

SEQ ID NO: 2505335 - RNA, 19 nt, Artificial Sequence
  Description of Artificial Sequence: Synthetic oligonucleotide
gugagcuuagaaucaaggc

SEQ ID NO: 2505336 - RNA, 19 nt, Artificial Sequence
  Description of Artificial Sequence: Synthetic oligonucleotide
ccuaauaacuuaaacauga

SEQ ID NO: 2505337 - RNA, 19 nt, Artificial Sequence
  Description of Artificial Sequence: Synthetic oligonucleotide
aauugucaaagugcuaaga

SEQ ID NO: 2505338 - RNA, 19 nt, Artificial Sequence
  Description of Artificial Sequence: Synthetic oligonucleotide
acaaaugcuuccugacuuc

SEQ ID NO: 2505339 - RNA, 19 nt, Artificial Sequence
  Description of Artificial Sequence: Synthetic oligonucleotide
cugaauuaucuacugcuac

SEQ ID NO: 2505340 - RNA, 19 nt, Artificial Sequence
  Description of Artificial Sequence: Synthetic oligonucleotide
gcuaccauaaguuacaacu

SEQ ID NO: 2505341 - RNA, 19 nt, Artificial Sequence
  Description of Artificial Sequence: Synthetic oligonucleotide
uuaauauaacacacagcua

SEQ ID NO: 2505342 - RNA, 19 nt, Artificial Sequence
  Description of Artificial Sequence: Synthetic oligonucleotide
uuuguuucuggaccauaca

SEQ ID NO: 2505343 - RNA, 19 nt, Artificial Sequence
  Description of Artificial Sequence: Synthetic oligonucleotide
ucacguaagggguuaauua

SEQ ID NO: 2505344 - RNA, 19 nt, Artificial Sequence
  Description of Artificial Sequence: Synthetic oligonucleotide
gaauuaucuacugcuacca

SEQ ID NO: 2505345 - RNA, 19 nt, Artificial Sequence
  Description of Artificial Sequence: Synthetic oligonucleotide
aacuacacugaauuaucua

SEQ ID NO: 2505346 - RNA, 19 nt, Artificial Sequence
  Description of Artificial Sequence: Synthetic oligonucleotide
ugcuaagacuucauuagua

SEQ ID NO: 2505347 - RNA, 19 nt, Artificial Sequence
  Description of Artificial Sequence: Synthetic oligonucleotide
uuaauucccgaguauguuu

SEQ ID NO: 2505348 - RNA, 19 nt, Artificial Sequence
  Description of Artificial Sequence: Synthetic oligonucleotide
aagcauuaauucccgagua

SEQ ID NO: 2505349 - RNA, 19 nt, Artificial Sequence
  Description of Artificial Sequence: Synthetic oligonucleotide
cucaaauacccuaagacgu

SEQ ID NO: 2505350 - RNA, 19 nt, Artificial Sequence
  Description of Artificial Sequence: Synthetic oligonucleotide
ugaggggagguuucuaaug

SEQ ID NO: 2505351 - RNA, 19 nt, Artificial Sequence
  Description of Artificial Sequence: Synthetic oligonucleotide
aucaaggcaggcuuaacaa

SEQ ID NO: 2505352 - RNA, 19 nt, Artificial Sequence
  Description of Artificial Sequence: Synthetic oligonucleotide
gcuaagacuucauuaguag

SEQ ID NO: 2505353 - RNA, 19 nt, Artificial Sequence
  Description of Artificial Sequence: Synthetic oligonucleotide
gaaugcaguaucuuagcaa

SEQ ID NO: 2505354 - RNA, 19 nt, Artificial Sequence
  Description of Artificial Sequence: Synthetic oligonucleotide
acacgcucuucuuucaaag

SEQ ID NO: 2505355 - RNA, 19 nt, Artificial Sequence
  Description of Artificial Sequence: Synthetic oligonucleotide
auuaaaagacguguuaguu

SEQ ID NO: 2505356 - RNA, 19 nt, Artificial Sequence
  Description of Artificial Sequence: Synthetic oligonucleotide
gugagaggacuucuaaaag

SEQ ID NO: 2505357 - RNA, 19 nt, Artificial Sequence
  Description of Artificial Sequence: Synthetic oligonucleotide
auuaucuacugcuaccaua

SEQ ID NO: 2505358 - RNA, 19 nt, Artificial Sequence
  Description of Artificial Sequence: Synthetic oligonucleotide
aauuaucuacugcuaccau

SEQ ID NO: 2505359 - RNA, 19 nt, Artificial Sequence
  Description of Artificial Sequence: Synthetic oligonucleotide
aaagugcuaagacuucauu

SEQ ID NO: 2505360 - RNA, 19 nt, Artificial Sequence
  Description of Artificial Sequence: Synthetic oligonucleotide
guuaaauauuugauuacuc

SEQ ID NO: 2505361 - RNA, 19 nt, Artificial Sequence
  Description of Artificial Sequence: Synthetic oligonucleotide
aaugaggaaugcaguaucu

SEQ ID NO: 2505362 - RNA, 19 nt, Artificial Sequence
  Description of Artificial Sequence: Synthetic oligonucleotide
guuuacacgcucuucuuuc

SEQ ID NO: 2505363 - RNA, 19 nt, Artificial Sequence
  Description of Artificial Sequence: Synthetic oligonucleotide
aaccuuucacguaaggggu

SEQ ID NO: 2505364 - RNA, 19 nt, Artificial Sequence
  Description of Artificial Sequence: Synthetic oligonucleotide
uaguaguacuucaaaucaa

SEQ ID NO: 2505365 - RNA, 19 nt, Artificial Sequence
  Description of Artificial Sequence: Synthetic oligonucleotide
agggguuaauuaaaagacg

SEQ ID NO: 2505366 - RNA, 19 nt, Artificial Sequence
  Description of Artificial Sequence: Synthetic oligonucleotide
uucuaauguuuagaaaagu

SEQ ID NO: 2505367 - RNA, 19 nt, Artificial Sequence
  Description of Artificial Sequence: Synthetic oligonucleotide
cuuccugacuucugagugg

SEQ ID NO: 2505368 - RNA, 19 nt, Artificial Sequence
  Description of Artificial Sequence: Synthetic oligonucleotide
acaugauacgguuaauaua

SEQ ID NO: 2505369 - RNA, 19 nt, Artificial Sequence
  Description of Artificial Sequence: Synthetic oligonucleotide
uuuacacgcucuucuuuca

SEQ ID NO: 2505370 - RNA, 19 nt, Artificial Sequence
  Description of Artificial Sequence: Synthetic oligonucleotide
uuaguuugaguugcacuug

SEQ ID NO: 2505371 - RNA, 19 nt, Artificial Sequence
  Description of Artificial Sequence: Synthetic oligonucleotide
cacuucggaacucaaauga

SEQ ID NO: 2505372 - RNA, 19 nt, Artificial Sequence
  Description of Artificial Sequence: Synthetic oligonucleotide
gaagcauuaauucccgagu

SEQ ID NO: 2505373 - RNA, 19 nt, Artificial Sequence
  Description of Artificial Sequence: Synthetic oligonucleotide
aguagcuuggagcucugga

SEQ ID NO: 2505374 - RNA, 19 nt, Artificial Sequence
  Description of Artificial Sequence: Synthetic oligonucleotide
auauuugauuacucaaaua

SEQ ID NO: 2505375 - RNA, 19 nt, Artificial Sequence
  Description of Artificial Sequence: Synthetic oligonucleotide
uuucaaaggucagcuacca

SEQ ID NO: 2505376 - RNA, 19 nt, Artificial Sequence
  Description of Artificial Sequence: Synthetic oligonucleotide
acgcucuucuuucaaaggu

SEQ ID NO: 2505377 - RNA, 19 nt, Artificial Sequence
  Description of Artificial Sequence: Synthetic oligonucleotide
guaguacuucaaaucaaag

SEQ ID NO: 2505378 - RNA, 19 nt, Artificial Sequence
  Description of Artificial Sequence: Synthetic oligonucleotide
aaucaaagucucaacguua

SEQ ID NO: 2505379 - RNA, 19 nt, Artificial Sequence
  Description of Artificial Sequence: Synthetic oligonucleotide
aguaucuuagcaacaguga

SEQ ID NO: 2505380 - RNA, 19 nt, Artificial Sequence
  Description of Artificial Sequence: Synthetic oligonucleotide
auacccuaagacguaugac

SEQ ID NO: 2505381 - RNA, 19 nt, Artificial Sequence
  Description of Artificial Sequence: Synthetic oligonucleotide
caggcuuaacaaaugcuuc

SEQ ID NO: 2505382 - RNA, 19 nt, Artificial Sequence
  Description of Artificial Sequence: Synthetic oligonucleotide
aguaggugguggcaguuca

SEQ ID NO: 2505383 - RNA, 19 nt, Artificial Sequence
  Description of Artificial Sequence: Synthetic oligonucleotide
auuacaaaggcagccccug

SEQ ID NO: 2505384 - RNA, 19 nt, Artificial Sequence
  Description of Artificial Sequence: Synthetic oligonucleotide
aaaggucagcuaccauuug

SEQ ID NO: 2505385 - RNA, 19 nt, Artificial Sequence
  Description of Artificial Sequence: Synthetic oligonucleotide
agguauggugaauuucaug

SEQ ID NO: 2505386 - RNA, 19 nt, Artificial Sequence
  Description of Artificial Sequence: Synthetic oligonucleotide
cuugauugaagaagaaaua

SEQ ID NO: 2505387 - RNA, 19 nt, Artificial Sequence
  Description of Artificial Sequence: Synthetic oligonucleotide
ucaaggcaggcuuaacaaa

SEQ ID NO: 2505388 - RNA, 19 nt, Artificial Sequence
  Description of Artificial Sequence: Synthetic oligonucleotide
aagacguguuaguuccacu

SEQ ID NO: 2505389 - RNA, 19 nt, Artificial Sequence
  Description of Artificial Sequence: Synthetic oligonucleotide
cauauuuuccuguuaggua

SEQ ID NO: 2505390 - RNA, 19 nt, Artificial Sequence
  Description of Artificial Sequence: Synthetic oligonucleotide
uuacaaaggcagccccugc

SEQ ID NO: 2505391 - RNA, 19 nt, Artificial Sequence
  Description of Artificial Sequence: Synthetic oligonucleotide
cacgcucuucuuucaaagg

SEQ ID NO: 2505392 - RNA, 19 nt, Artificial Sequence
  Description of Artificial Sequence: Synthetic oligonucleotide
aggcccaauaacaauaagu

SEQ ID NO: 2505393 - RNA, 19 nt, Artificial Sequence
  Description of Artificial Sequence: Synthetic oligonucleotide
aguaguacuucaaaucaaa

SEQ ID NO: 2505394 - RNA, 19 nt, Artificial Sequence
  Description of Artificial Sequence: Synthetic oligonucleotide
acccuaagacguaugacag

SEQ ID NO: 2505395 - RNA, 19 nt, Artificial Sequence
  Description of Artificial Sequence: Synthetic oligonucleotide
agacguguuaguuccacuu

SEQ ID NO: 2505396 - RNA, 19 nt, Artificial Sequence
  Description of Artificial Sequence: Synthetic oligonucleotide
acaaauacccugaaccuaa

SEQ ID NO: 2505397 - RNA, 19 nt, Artificial Sequence
  Description of Artificial Sequence: Synthetic oligonucleotide
ccuaagacguaugacaggc

SEQ ID NO: 2505398 - RNA, 19 nt, Artificial Sequence
  Description of Artificial Sequence: Synthetic oligonucleotide
guuuguuucuggaccauac

SEQ ID NO: 2505399 - RNA, 19 nt, Artificial Sequence
  Description of Artificial Sequence: Synthetic oligonucleotide
aaauacccugaaccuaaua

SEQ ID NO: 2505400 - RNA, 19 nt, Artificial Sequence
  Description of Artificial Sequence: Synthetic oligonucleotide
cacugaauuaucuacugcu

SEQ ID NO: 2505401 - RNA, 19 nt, Artificial Sequence
  Description of Artificial Sequence: Synthetic oligonucleotide
uacaaauacccugaaccua

SEQ ID NO: 2505402 - RNA, 19 nt, Artificial Sequence
  Description of Artificial Sequence: Synthetic oligonucleotide
agcucuggaccacucacca

SEQ ID NO: 2505403 - RNA, 19 nt, Artificial Sequence
  Description of Artificial Sequence: Synthetic oligonucleotide
ucucaacguuaaauauuug

SEQ ID NO: 2505404 - RNA, 19 nt, Artificial Sequence
  Description of Artificial Sequence: Synthetic oligonucleotide
acugcuaccauaaguuaca

SEQ ID NO: 2505405 - RNA, 19 nt, Artificial Sequence
  Description of Artificial Sequence: Synthetic oligonucleotide
ucccgaguauguuuguuuc

SEQ ID NO: 2505406 - RNA, 19 nt, Artificial Sequence
  Description of Artificial Sequence: Synthetic oligonucleotide
gaagaagaaauaauucuau

SEQ ID NO: 2505407 - RNA, 19 nt, Artificial Sequence
  Description of Artificial Sequence: Synthetic oligonucleotide
cuaagacguaugacaggcc

SEQ ID NO: 2505408 - RNA, 19 nt, Artificial Sequence
  Description of Artificial Sequence: Synthetic oligonucleotide
ggugagaggacuucuaaaa

SEQ ID NO: 2505409 - RNA, 19 nt, Artificial Sequence
  Description of Artificial Sequence: Synthetic oligonucleotide
agcauuaauucccgaguau

SEQ ID NO: 2505410 - RNA, 19 nt, Artificial Sequence
  Description of Artificial Sequence: Synthetic oligonucleotide
ugaguugcacuugauugaa

SEQ ID NO: 2505411 - RNA, 19 nt, Artificial Sequence
  Description of Artificial Sequence: Synthetic oligonucleotide
uguuagguauggugaauuu

SEQ ID NO: 2505412 - RNA, 19 nt, Artificial Sequence
  Description of Artificial Sequence: Synthetic oligonucleotide
gacguguuaguuccacuuc

SEQ ID NO: 2505413 - RNA, 19 nt, Artificial Sequence
  Description of Artificial Sequence: Synthetic oligonucleotide
aaauacccuaagacguaug

SEQ ID NO: 2505414 - RNA, 19 nt, Artificial Sequence
  Description of Artificial Sequence: Synthetic oligonucleotide
agugaauaaacuagucaaa

SEQ ID NO: 2505415 - RNA, 19 nt, Artificial Sequence
  Description of Artificial Sequence: Synthetic oligonucleotide
gguuaauauaacacacagc

SEQ ID NO: 2505416 - RNA, 19 nt, Artificial Sequence
  Description of Artificial Sequence: Synthetic oligonucleotide
aguuuacacgcucuucuuu

SEQ ID NO: 2505417 - RNA, 19 nt, Artificial Sequence
  Description of Artificial Sequence: Synthetic oligonucleotide
uccuguuagguauggugaa

SEQ ID NO: 2505418 - RNA, 19 nt, Artificial Sequence
  Description of Artificial Sequence: Synthetic oligonucleotide
auguuuagaaaaguagcuu

SEQ ID NO: 2505419 - RNA, 19 nt, Artificial Sequence
  Description of Artificial Sequence: Synthetic oligonucleotide
acuucggaacucaaaugag

SEQ ID NO: 2505420 - RNA, 19 nt, Artificial Sequence
  Description of Artificial Sequence: Synthetic oligonucleotide
gguuaauuaaaagacgugu

SEQ ID NO: 2505421 - RNA, 19 nt, Artificial Sequence
  Description of Artificial Sequence: Synthetic oligonucleotide
cacguaagggguuaauuaa

SEQ ID NO: 2505422 - RNA, 19 nt, Artificial Sequence
  Description of Artificial Sequence: Synthetic oligonucleotide
guuagguauggugaauuuc

SEQ ID NO: 2505423 - RNA, 19 nt, Artificial Sequence
  Description of Artificial Sequence: Synthetic oligonucleotide
gcauuaauucccgaguaug

SEQ ID NO: 2505424 - RNA, 19 nt, Artificial Sequence
  Description of Artificial Sequence: Synthetic oligonucleotide
ucggaacucaaaugaggaa

SEQ ID NO: 2505425 - RNA, 19 nt, Artificial Sequence
  Description of Artificial Sequence: Synthetic oligonucleotide
auuaauucccgaguauguu

SEQ ID NO: 2505426 - RNA, 19 nt, Artificial Sequence
  Description of Artificial Sequence: Synthetic oligonucleotide
acagcuaaccuuucacgua

SEQ ID NO: 2505427 - RNA, 19 nt, Artificial Sequence
  Description of Artificial Sequence: Synthetic oligonucleotide
cgguuaauauaacacacag

SEQ ID NO: 2505428 - RNA, 19 nt, Artificial Sequence
  Description of Artificial Sequence: Synthetic oligonucleotide
uagguauggugaauuucau

SEQ ID NO: 2505429 - RNA, 19 nt, Artificial Sequence
  Description of Artificial Sequence: Synthetic oligonucleotide
uuacacgcucuucuuucaa

SEQ ID NO: 2505430 - RNA, 19 nt, Artificial Sequence
  Description of Artificial Sequence: Synthetic oligonucleotide
ucaaagucucaacguuaaa

SEQ ID NO: 2505431 - RNA, 19 nt, Artificial Sequence
  Description of Artificial Sequence: Synthetic oligonucleotide
ggaacucaaaugaggaaug

SEQ ID NO: 2505432 - RNA, 19 nt, Artificial Sequence
  Description of Artificial Sequence: Synthetic oligonucleotide
aagacguaugacaggccca

SEQ ID NO: 2505433 - RNA, 19 nt, Artificial Sequence
  Description of Artificial Sequence: Synthetic oligonucleotide
aucaaagucucaacguuaa

SEQ ID NO: 2505434 - RNA, 19 nt, Artificial Sequence
  Description of Artificial Sequence: Synthetic oligonucleotide
uacacgcucuucuuucaaa

SEQ ID NO: 2505435 - RNA, 19 nt, Artificial Sequence
  Description of Artificial Sequence: Synthetic oligonucleotide
cuagucaaaaguagguggu

SEQ ID NO: 2505436 - RNA, 19 nt, Artificial Sequence
  Description of Artificial Sequence: Synthetic oligonucleotide
ugcuaccauaaguuacaac

SEQ ID NO: 2505437 - RNA, 19 nt, Artificial Sequence
  Description of Artificial Sequence: Synthetic oligonucleotide
uucccgaguauguuuguuu

SEQ ID NO: 2505438 - RNA, 19 nt, Artificial Sequence
  Description of Artificial Sequence: Synthetic oligonucleotide
guaucuuagcaacagugau

SEQ ID NO: 2505439 - RNA, 19 nt, Artificial Sequence
  Description of Artificial Sequence: Synthetic oligonucleotide
cauuaguaguacuucaaau

SEQ ID NO: 2505440 - RNA, 19 nt, Artificial Sequence
  Description of Artificial Sequence: Synthetic oligonucleotide
augauacgguuaauauaac

SEQ ID NO: 2505441 - RNA, 19 nt, Artificial Sequence
  Description of Artificial Sequence: Synthetic oligonucleotide
aaccuacucaguacaucug

SEQ ID NO: 2505442 - RNA, 19 nt, Artificial Sequence
  Description of Artificial Sequence: Synthetic oligonucleotide
aaguagcuuggagcucugg

SEQ ID NO: 2505443 - RNA, 19 nt, Artificial Sequence
  Description of Artificial Sequence: Synthetic oligonucleotide
uuccacuucggaacucaaa

SEQ ID NO: 2505444 - RNA, 19 nt, Artificial Sequence
  Description of Artificial Sequence: Synthetic oligonucleotide
guugcacuugauugaagaa

SEQ ID NO: 2505445 - RNA, 19 nt, Artificial Sequence
  Description of Artificial Sequence: Synthetic oligonucleotide
aggugagaggacuucuaaa

SEQ ID NO: 2505446 - RNA, 19 nt, Artificial Sequence
  Description of Artificial Sequence: Synthetic oligonucleotide
cauuaauucccgaguaugu

SEQ ID NO: 2505447 - RNA, 19 nt, Artificial Sequence
  Description of Artificial Sequence: Synthetic oligonucleotide
uucacguaagggguuaauu

SEQ ID NO: 2505448 - RNA, 19 nt, Artificial Sequence
  Description of Artificial Sequence: Synthetic oligonucleotide
guauggugaauuucaugaa

SEQ ID NO: 2505449 - RNA, 19 nt, Artificial Sequence
  Description of Artificial Sequence: Synthetic oligonucleotide
acaagaggguccauauuca

SEQ ID NO: 2505450 - RNA, 19 nt, Artificial Sequence
  Description of Artificial Sequence: Synthetic oligonucleotide
agcuuagaaucaaggcagg

SEQ ID NO: 2505451 - RNA, 19 nt, Artificial Sequence
  Description of Artificial Sequence: Synthetic oligonucleotide
ccauuauuacaaaggcagc

SEQ ID NO: 2505452 - RNA, 19 nt, Artificial Sequence
  Description of Artificial Sequence: Synthetic oligonucleotide
gcacacauuuucaauggag

SEQ ID NO: 2505453 - RNA, 19 nt, Artificial Sequence
  Description of Artificial Sequence: Synthetic oligonucleotide
acguaugacaggcccaaua

SEQ ID NO: 2505454 - RNA, 19 nt, Artificial Sequence
  Description of Artificial Sequence: Synthetic oligonucleotide
gcuaaccuuucacguaagg

SEQ ID NO: 2505455 - RNA, 19 nt, Artificial Sequence
  Description of Artificial Sequence: Synthetic oligonucleotide
agucucaacguuaaauauu

SEQ ID NO: 2505456 - RNA, 19 nt, Artificial Sequence
  Description of Artificial Sequence: Synthetic oligonucleotide
gaggugagaggacuucuaa

SEQ ID NO: 2505457 - RNA, 19 nt, Artificial Sequence
  Description of Artificial Sequence: Synthetic oligonucleotide
aguuccacuucggaacuca

SEQ ID NO: 2505458 - RNA, 19 nt, Artificial Sequence
  Description of Artificial Sequence: Synthetic oligonucleotide
uucaaaggucagcuaccau

SEQ ID NO: 2505459 - RNA, 19 nt, Artificial Sequence
  Description of Artificial Sequence: Synthetic oligonucleotide
ugacuucugaguggaggug

SEQ ID NO: 2505460 - RNA, 19 nt, Artificial Sequence
  Description of Artificial Sequence: Synthetic oligonucleotide
auacaguuuacacgcucuu

SEQ ID NO: 2505461 - RNA, 19 nt, Artificial Sequence
  Description of Artificial Sequence: Synthetic oligonucleotide
ccuacucaguacaucuggg

SEQ ID NO: 2505462 - RNA, 19 nt, Artificial Sequence
  Description of Artificial Sequence: Synthetic oligonucleotide
aaagcaccugaggggaggu

SEQ ID NO: 2505463 - RNA, 19 nt, Artificial Sequence
  Description of Artificial Sequence: Synthetic oligonucleotide
cuacacugaauuaucuacu

SEQ ID NO: 2505464 - RNA, 19 nt, Artificial Sequence
  Description of Artificial Sequence: Synthetic oligonucleotide
ucuggaccauacaguuuac

SEQ ID NO: 2505465 - RNA, 19 nt, Artificial Sequence
  Description of Artificial Sequence: Synthetic oligonucleotide
ggaaugcaguaucuuagca

SEQ ID NO: 2505466 - RNA, 19 nt, Artificial Sequence
  Description of Artificial Sequence: Synthetic oligonucleotide
guuaauuaaaagacguguu

SEQ ID NO: 2505467 - RNA, 19 nt, Artificial Sequence
  Description of Artificial Sequence: Synthetic oligonucleotide
uucuuucaaaggucagcua

SEQ ID NO: 2505468 - RNA, 19 nt, Artificial Sequence
  Description of Artificial Sequence: Synthetic oligonucleotide
acugaauuaucuacugcua

SEQ ID NO: 2505469 - RNA, 19 nt, Artificial Sequence
  Description of Artificial Sequence: Synthetic oligonucleotide
agaaucaaggcaggcuuaa

SEQ ID NO: 2505470 - RNA, 19 nt, Artificial Sequence
  Description of Artificial Sequence: Synthetic oligonucleotide
accauaaguuacaacuaaa

SEQ ID NO: 2505471 - RNA, 19 nt, Artificial Sequence
  Description of Artificial Sequence: Synthetic oligonucleotide
acuucaaaucaaagucuca

SEQ ID NO: 2505472 - RNA, 19 nt, Artificial Sequence
  Description of Artificial Sequence: Synthetic oligonucleotide
aaaagacguguuaguucca

SEQ ID NO: 2505473 - RNA, 19 nt, Artificial Sequence
  Description of Artificial Sequence: Synthetic oligonucleotide
cuuagaaucaaggcaggcu

SEQ ID NO: 2505474 - RNA, 19 nt, Artificial Sequence
  Description of Artificial Sequence: Synthetic oligonucleotide
guguuaguuccacuucgga

SEQ ID NO: 2505475 - RNA, 19 nt, Artificial Sequence
  Description of Artificial Sequence: Synthetic oligonucleotide
ggguuaauuaaaagacgug

SEQ ID NO: 2505476 - RNA, 19 nt, Artificial Sequence
  Description of Artificial Sequence: Synthetic oligonucleotide
aggugguggcaguucauau

SEQ ID NO: 2505477 - RNA, 19 nt, Artificial Sequence
  Description of Artificial Sequence: Synthetic oligonucleotide
cacagcuaaccuuucacgu

SEQ ID NO: 2505478 - RNA, 19 nt, Artificial Sequence
  Description of Artificial Sequence: Synthetic oligonucleotide
cagcuaaccuuucacguaa

SEQ ID NO: 2505479 - RNA, 19 nt, Artificial Sequence
  Description of Artificial Sequence: Synthetic oligonucleotide
caacguuaaauauuugauu

SEQ ID NO: 2505480 - RNA, 19 nt, Artificial Sequence
  Description of Artificial Sequence: Synthetic oligonucleotide
ggguccauauucaaugcac

SEQ ID NO: 2505481 - RNA, 19 nt, Artificial Sequence
  Description of Artificial Sequence: Synthetic oligonucleotide
uguuuguuucuggaccaua

SEQ ID NO: 2505482 - RNA, 19 nt, Artificial Sequence
  Description of Artificial Sequence: Synthetic oligonucleotide
ugacagccauuauuacaaa

SEQ ID NO: 2505483 - RNA, 19 nt, Artificial Sequence
  Description of Artificial Sequence: Synthetic oligonucleotide
ucccaacuacacugaauua

SEQ ID NO: 2505484 - RNA, 19 nt, Artificial Sequence
  Description of Artificial Sequence: Synthetic oligonucleotide
aggacuucuaaaagugaau

SEQ ID NO: 2505485 - RNA, 19 nt, Artificial Sequence
  Description of Artificial Sequence: Synthetic oligonucleotide
gucucaacguuaaauauuu

SEQ ID NO: 2505486 - RNA, 19 nt, Artificial Sequence
  Description of Artificial Sequence: Synthetic oligonucleotide
agacguaugacaggcccaa

SEQ ID NO: 2505487 - RNA, 19 nt, Artificial Sequence
  Description of Artificial Sequence: Synthetic oligonucleotide
gggguuaauuaaaagacgu

SEQ ID NO: 2505488 - RNA, 19 nt, Artificial Sequence
  Description of Artificial Sequence: Synthetic oligonucleotide
gaguugcacuugauugaag

SEQ ID NO: 2505489 - RNA, 19 nt, Artificial Sequence
  Description of Artificial Sequence: Synthetic oligonucleotide
cugaaccuaauaacuuaaa

SEQ ID NO: 2505490 - RNA, 19 nt, Artificial Sequence
  Description of Artificial Sequence: Synthetic oligonucleotide
caggcccaauaacaauaag

SEQ ID NO: 2505491 - RNA, 19 nt, Artificial Sequence
  Description of Artificial Sequence: Synthetic oligonucleotide
gacuucauuaguaguacuu

SEQ ID NO: 2505492 - RNA, 19 nt, Artificial Sequence
  Description of Artificial Sequence: Synthetic oligonucleotide
caaaggucagcuaccauuu

SEQ ID NO: 2505493 - RNA, 19 nt, Artificial Sequence
  Description of Artificial Sequence: Synthetic oligonucleotide
acguaagggguuaauuaaa

SEQ ID NO: 2505494 - RNA, 19 nt, Artificial Sequence
  Description of Artificial Sequence: Synthetic oligonucleotide
cuaauaacuuaaacaugau

SEQ ID NO: 2505495 - RNA, 19 nt, Artificial Sequence
  Description of Artificial Sequence: Synthetic oligonucleotide
guuugaguugcacuugauu

SEQ ID NO: 2505496 - RNA, 19 nt, Artificial Sequence
  Description of Artificial Sequence: Synthetic oligonucleotide
uuggagcucuggaccacuc

SEQ ID NO: 2505497 - RNA, 19 nt, Artificial Sequence
  Description of Artificial Sequence: Synthetic oligonucleotide
ucuuagcaacagugaugac

SEQ ID NO: 2505498 - RNA, 19 nt, Artificial Sequence
  Description of Artificial Sequence: Synthetic oligonucleotide
caacuacacugaauuaucu

SEQ ID NO: 2505499 - RNA, 19 nt, Artificial Sequence
  Description of Artificial Sequence: Synthetic oligonucleotide
uuucacguaagggguuaau

SEQ ID NO: 2505500 - RNA, 19 nt, Artificial Sequence
  Description of Artificial Sequence: Synthetic oligonucleotide
auguacaagaggguccaua

SEQ ID NO: 2505501 - RNA, 19 nt, Artificial Sequence
  Description of Artificial Sequence: Synthetic oligonucleotide
cuacugcuaccauaaguua

SEQ ID NO: 2505502 - RNA, 19 nt, Artificial Sequence
  Description of Artificial Sequence: Synthetic oligonucleotide
acaggcccaauaacaauaa

SEQ ID NO: 2505503 - RNA, 19 nt, Artificial Sequence
  Description of Artificial Sequence: Synthetic oligonucleotide
augaggaaugcaguaucuu

SEQ ID NO: 2505504 - RNA, 19 nt, Artificial Sequence
  Description of Artificial Sequence: Synthetic oligonucleotide
uggagcaagugagcuuaga

SEQ ID NO: 2505505 - RNA, 19 nt, Artificial Sequence
  Description of Artificial Sequence: Synthetic oligonucleotide
cccuaagacguaugacagg

SEQ ID NO: 2505506 - RNA, 19 nt, Artificial Sequence
  Description of Artificial Sequence: Synthetic oligonucleotide
cguguuaguuccacuucgg

SEQ ID NO: 2505507 - RNA, 19 nt, Artificial Sequence
  Description of Artificial Sequence: Synthetic oligonucleotide
aggucagcuaccauuuguu

SEQ ID NO: 2505508 - RNA, 19 nt, Artificial Sequence
  Description of Artificial Sequence: Synthetic oligonucleotide
ccacuucggaacucaaaug

SEQ ID NO: 2505509 - RNA, 19 nt, Artificial Sequence
  Description of Artificial Sequence: Synthetic oligonucleotide
gcuuagaaucaaggcaggc

SEQ ID NO: 2505510 - RNA, 19 nt, Artificial Sequence
  Description of Artificial Sequence: Synthetic oligonucleotide
gguccauauucaaugcaca

SEQ ID NO: 2505511 - RNA, 19 nt, Artificial Sequence
  Description of Artificial Sequence: Synthetic oligonucleotide
ccugaaccuaauaacuuaa

SEQ ID NO: 2505512 - RNA, 19 nt, Artificial Sequence
  Description of Artificial Sequence: Synthetic oligonucleotide
ccauacaguuuacacgcuc

SEQ ID NO: 2505513 - RNA, 19 nt, Artificial Sequence
  Description of Artificial Sequence: Synthetic oligonucleotide
acccugaaccuaauaacuu

SEQ ID NO: 2505514 - RNA, 19 nt, Artificial Sequence
  Description of Artificial Sequence: Synthetic oligonucleotide
ggcccaauaacaauaaguu

SEQ ID NO: 2505515 - RNA, 19 nt, Artificial Sequence
  Description of Artificial Sequence: Synthetic oligonucleotide
caagugagcuuagaaucaa

SEQ ID NO: 2505516 - RNA, 19 nt, Artificial Sequence
  Description of Artificial Sequence: Synthetic oligonucleotide
ccgaguauguuuguuucug

SEQ ID NO: 2505517 - RNA, 19 nt, Artificial Sequence
  Description of Artificial Sequence: Synthetic oligonucleotide
agcuaaccuuucacguaag

SEQ ID NO: 2505518 - RNA, 19 nt, Artificial Sequence
  Description of Artificial Sequence: Synthetic oligonucleotide
gcccaauaacaauaaguua

SEQ ID NO: 2505519 - RNA, 19 nt, Artificial Sequence
  Description of Artificial Sequence: Synthetic oligonucleotide
caaagugcuaagacuucau

SEQ ID NO: 2505520 - RNA, 19 nt, Artificial Sequence
  Description of Artificial Sequence: Synthetic oligonucleotide
auucccgaguauguuuguu

SEQ ID NO: 2505521 - RNA, 19 nt, Artificial Sequence
  Description of Artificial Sequence: Synthetic oligonucleotide
ggugaauuucaugaagcau

SEQ ID NO: 2505522 - RNA, 19 nt, Artificial Sequence
  Description of Artificial Sequence: Synthetic oligonucleotide
cuggaccauacaguuuaca

SEQ ID NO: 2505523 - RNA, 19 nt, Artificial Sequence
  Description of Artificial Sequence: Synthetic oligonucleotide
cauuuucaauggagcaagu

SEQ ID NO: 2505524 - RNA, 19 nt, Artificial Sequence
  Description of Artificial Sequence: Synthetic oligonucleotide
cguaugacaggcccaauaa

SEQ ID NO: 2505525 - RNA, 19 nt, Artificial Sequence
  Description of Artificial Sequence: Synthetic oligonucleotide
cguaagggguuaauuaaaa

SEQ ID NO: 2505526 - RNA, 19 nt, Artificial Sequence
  Description of Artificial Sequence: Synthetic oligonucleotide
caaaugcuuccugacuucu

SEQ ID NO: 2505527 - RNA, 19 nt, Artificial Sequence
  Description of Artificial Sequence: Synthetic oligonucleotide
auggagcaagugagcuuag

SEQ ID NO: 2505528 - RNA, 19 nt, Artificial Sequence
  Description of Artificial Sequence: Synthetic oligonucleotide
gcaggcuuaacaaaugcuu

SEQ ID NO: 2505529 - RNA, 19 nt, Artificial Sequence
  Description of Artificial Sequence: Synthetic oligonucleotide
cccugaaccuaauaacuua

SEQ ID NO: 2505530 - RNA, 19 nt, Artificial Sequence
  Description of Artificial Sequence: Synthetic oligonucleotide
ggcuuaacaaaugcuuccu

SEQ ID NO: 2505531 - RNA, 19 nt, Artificial Sequence
  Description of Artificial Sequence: Synthetic oligonucleotide
gcagccccugccaauguac

SEQ ID NO: 2505532 - RNA, 19 nt, Artificial Sequence
  Description of Artificial Sequence: Synthetic oligonucleotide
caguucauauuuuccuguu

SEQ ID NO: 2505533 - RNA, 19 nt, Artificial Sequence
  Description of Artificial Sequence: Synthetic oligonucleotide
gggagguuucuaauguuua

SEQ ID NO: 2505534 - RNA, 19 nt, Artificial Sequence
  Description of Artificial Sequence: Synthetic oligonucleotide
cuguuagguauggugaauu

SEQ ID NO: 2505535 - RNA, 19 nt, Artificial Sequence
  Description of Artificial Sequence: Synthetic oligonucleotide
guacaagaggguccauauu

SEQ ID NO: 2505536 - RNA, 19 nt, Artificial Sequence
  Description of Artificial Sequence: Synthetic oligonucleotide
cuuucacguaagggguuaa

SEQ ID NO: 2505537 - RNA, 19 nt, Artificial Sequence
  Description of Artificial Sequence: Synthetic oligonucleotide
ggugguggcaguucauauu

SEQ ID NO: 2505538 - RNA, 19 nt, Artificial Sequence
  Description of Artificial Sequence: Synthetic oligonucleotide
caguuuacacgcucuucuu

SEQ ID NO: 2505539 - RNA, 19 nt, Artificial Sequence
  Description of Artificial Sequence: Synthetic oligonucleotide
guuccacuucggaacucaa

SEQ ID NO: 2505540 - RNA, 19 nt, Artificial Sequence
  Description of Artificial Sequence: Synthetic oligonucleotide
caaauacccugaaccuaau

SEQ ID NO: 2505541 - RNA, 19 nt, Artificial Sequence
  Description of Artificial Sequence: Synthetic oligonucleotide
cccaacuacacugaauuau

SEQ ID NO: 2505542 - RNA, 19 nt, Artificial Sequence
  Description of Artificial Sequence: Synthetic oligonucleotide
ggaggugagaggacuucua

SEQ ID NO: 2505543 - RNA, 19 nt, Artificial Sequence
  Description of Artificial Sequence: Synthetic oligonucleotide
ggggagguuucuaauguuu

SEQ ID NO: 2505544 - RNA, 19 nt, Artificial Sequence
  Description of Artificial Sequence: Synthetic oligonucleotide
gcuuggagcucuggaccac

SEQ ID NO: 2505545 - RNA, 19 nt, Artificial Sequence
  Description of Artificial Sequence: Synthetic oligonucleotide
gcaccugaggggagguuuc

SEQ ID NO: 2505546 - RNA, 19 nt, Artificial Sequence
  Description of Artificial Sequence: Synthetic oligonucleotide
gcucuggaccacucaccaa

SEQ ID NO: 2505547 - RNA, 19 nt, Artificial Sequence
  Description of Artificial Sequence: Synthetic oligonucleotide
guaggugguggcaguucau

SEQ ID NO: 2505548 - RNA, 19 nt, Artificial Sequence
  Description of Artificial Sequence: Synthetic oligonucleotide
ccuuucacguaagggguua

SEQ ID NO: 2505549 - RNA, 19 nt, Artificial Sequence
  Description of Artificial Sequence: Synthetic oligonucleotide
gacguaugacaggcccaau

SEQ ID NO: 2505550 - RNA, 19 nt, Artificial Sequence
  Description of Artificial Sequence: Synthetic oligonucleotide
cccgaguauguuuguuucu

SEQ ID NO: 2505551 - RNA, 19 nt, Artificial Sequence
  Description of Artificial Sequence: Synthetic oligonucleotide
cagugaugacagccauuau

SEQ ID NO: 2505552 - RNA, 19 nt, Artificial Sequence
  Description of Artificial Sequence: Synthetic oligonucleotide
ccccugccaauguacacau

SEQ ID NO: 2505553 - RNA, 19 nt, Artificial Sequence
  Description of Artificial Sequence: Synthetic oligonucleotide
caccugaggggagguuucu

SEQ ID NO: 2505554 - RNA, 19 nt, Artificial Sequence
  Description of Artificial Sequence: Synthetic oligonucleotide
ccuguuagguauggugaau

SEQ ID NO: 2505555 - RNA, 19 nt, Artificial Sequence
  Description of Artificial Sequence: Synthetic oligonucleotide
guugauauaagugacucgg

SEQ ID NO: 2505556 - RNA, 19 nt, Artificial Sequence
  Description of Artificial Sequence: Synthetic oligonucleotide
caaacaugcaggcugagcg

SEQ ID NO: 2505557 - RNA, 19 nt, Artificial Sequence
  Description of Artificial Sequence: Synthetic oligonucleotide
acagauacgugucccagcc

SEQ ID NO: 2505558 - RNA, 19 nt, Artificial Sequence
  Description of Artificial Sequence: Synthetic oligonucleotide
aaugggaagggaugaagag

SEQ ID NO: 2505559 - RNA, 19 nt, Artificial Sequence
  Description of Artificial Sequence: Synthetic oligonucleotide
aaacaugcaggcugagcgc

SEQ ID NO: 2505560 - RNA, 19 nt, Artificial Sequence
  Description of Artificial Sequence: Synthetic oligonucleotide
caucugauccaccagaacc

SEQ ID NO: 2505561 - RNA, 19 nt, Artificial Sequence
  Description of Artificial Sequence: Synthetic oligonucleotide
auauaagugacucggaaau

SEQ ID NO: 2505562 - RNA, 19 nt, Artificial Sequence
  Description of Artificial Sequence: Synthetic oligonucleotide
ucugaccuguuccagaacc

SEQ ID NO: 2505563 - RNA, 19 nt, Artificial Sequence
  Description of Artificial Sequence: Synthetic oligonucleotide
aaguucaccagcugagcgg

SEQ ID NO: 2505564 - RNA, 19 nt, Artificial Sequence
  Description of Artificial Sequence: Synthetic oligonucleotide
auaagugacucggaaaugg

SEQ ID NO: 2505565 - RNA, 19 nt, Artificial Sequence
  Description of Artificial Sequence: Synthetic oligonucleotide
cuucagguaggacagauac

SEQ ID NO: 2505566 - RNA, 19 nt, Artificial Sequence
  Description of Artificial Sequence: Synthetic oligonucleotide
agaaccuucuugaucacgc

SEQ ID NO: 2505567 - RNA, 19 nt, Artificial Sequence
  Description of Artificial Sequence: Synthetic oligonucleotide
ucagguaggacagauacgu

SEQ ID NO: 2505568 - RNA, 19 nt, Artificial Sequence
  Description of Artificial Sequence: Synthetic oligonucleotide
auucaaguucaguccacgc

SEQ ID NO: 2505569 - RNA, 19 nt, Artificial Sequence
  Description of Artificial Sequence: Synthetic oligonucleotide
uaagugacucggaaauggg

SEQ ID NO: 2505570 - RNA, 19 nt, Artificial Sequence
  Description of Artificial Sequence: Synthetic oligonucleotide
ugauauaagugacucggaa

SEQ ID NO: 2505571 - RNA, 19 nt, Artificial Sequence
  Description of Artificial Sequence: Synthetic oligonucleotide
uucaaguucaguccacgca

SEQ ID NO: 2505572 - RNA, 19 nt, Artificial Sequence
  Description of Artificial Sequence: Synthetic oligonucleotide
guucaguccacgcagcccg

SEQ ID NO: 2505573 - RNA, 19 nt, Artificial Sequence
  Description of Artificial Sequence: Synthetic oligonucleotide
uaccagacgcccaggaugg

SEQ ID NO: 2505574 - RNA, 19 nt, Artificial Sequence
  Description of Artificial Sequence: Synthetic oligonucleotide
uccagaaccuccuauggga

SEQ ID NO: 2505575 - RNA, 19 nt, Artificial Sequence
  Description of Artificial Sequence: Synthetic oligonucleotide
acaugggcaaacugucucc

SEQ ID NO: 2505576 - RNA, 19 nt, Artificial Sequence
  Description of Artificial Sequence: Synthetic oligonucleotide
aaacgcaccagucagccuu

SEQ ID NO: 2505577 - RNA, 19 nt, Artificial Sequence
  Description of Artificial Sequence: Synthetic oligonucleotide
uucuugaucacgcucggaa

SEQ ID NO: 2505578 - RNA, 19 nt, Artificial Sequence
  Description of Artificial Sequence: Synthetic oligonucleotide
uguccauuggccuacuccu

SEQ ID NO: 2505579 - RNA, 19 nt, Artificial Sequence
  Description of Artificial Sequence: Synthetic oligonucleotide
uccagacuuagucagccug

SEQ ID NO: 2505580 - RNA, 19 nt, Artificial Sequence
  Description of Artificial Sequence: Synthetic oligonucleotide
gauauaagugacucggaaa

SEQ ID NO: 2505581 - RNA, 19 nt, Artificial Sequence
  Description of Artificial Sequence: Synthetic oligonucleotide
uuccagaaccuccuauggg

SEQ ID NO: 2505582 - RNA, 19 nt, Artificial Sequence
  Description of Artificial Sequence: Synthetic oligonucleotide
ucggaaaugggaagggaug

SEQ ID NO: 2505583 - RNA, 19 nt, Artificial Sequence
  Description of Artificial Sequence: Synthetic oligonucleotide
agaagucccagaauuuggc

SEQ ID NO: 2505584 - RNA, 19 nt, Artificial Sequence
  Description of Artificial Sequence: Synthetic oligonucleotide
aaggggcccaugcugcagc

SEQ ID NO: 2505585 - RNA, 19 nt, Artificial Sequence
  Description of Artificial Sequence: Synthetic oligonucleotide
ugagcggcuggccaaacgc

SEQ ID NO: 2505586 - RNA, 19 nt, Artificial Sequence
  Description of Artificial Sequence: Synthetic oligonucleotide
uucagguaggacagauacg

SEQ ID NO: 2505587 - RNA, 19 nt, Artificial Sequence
  Description of Artificial Sequence: Synthetic oligonucleotide
ucuugaucacgcucggaag

SEQ ID NO: 2505588 - RNA, 19 nt, Artificial Sequence
  Description of Artificial Sequence: Synthetic oligonucleotide
cagcauucaaguucagucc

SEQ ID NO: 2505589 - RNA, 19 nt, Artificial Sequence
  Description of Artificial Sequence: Synthetic oligonucleotide
agcccguugauauaaguga

SEQ ID NO: 2505590 - RNA, 19 nt, Artificial Sequence
  Description of Artificial Sequence: Synthetic oligonucleotide
aaaugggaagggaugaaga

SEQ ID NO: 2505591 - RNA, 19 nt, Artificial Sequence
  Description of Artificial Sequence: Synthetic oligonucleotide
agauacgugucccagccca

SEQ ID NO: 2505592 - RNA, 19 nt, Artificial Sequence
  Description of Artificial Sequence: Synthetic oligonucleotide
agcauucaaguucagucca

SEQ ID NO: 2505593 - RNA, 19 nt, Artificial Sequence
  Description of Artificial Sequence: Synthetic oligonucleotide
acagcggucgccccgcagc

SEQ ID NO: 2505594 - RNA, 19 nt, Artificial Sequence
  Description of Artificial Sequence: Synthetic oligonucleotide
uaugggaguguguccauug

SEQ ID NO: 2505595 - RNA, 19 nt, Artificial Sequence
  Description of Artificial Sequence: Synthetic oligonucleotide
gaagucccagaauuuggcc

SEQ ID NO: 2505596 - RNA, 19 nt, Artificial Sequence
  Description of Artificial Sequence: Synthetic oligonucleotide
ugacucggaaaugggaagg

SEQ ID NO: 2505597 - RNA, 19 nt, Artificial Sequence
  Description of Artificial Sequence: Synthetic oligonucleotide
cugguccagacuuagucag

SEQ ID NO: 2505598 - RNA, 19 nt, Artificial Sequence
  Description of Artificial Sequence: Synthetic oligonucleotide
uugauauaagugacucgga

SEQ ID NO: 2505599 - RNA, 19 nt, Artificial Sequence
  Description of Artificial Sequence: Synthetic oligonucleotide
uccuccgcagcauucaagu

SEQ ID NO: 2505600 - RNA, 19 nt, Artificial Sequence
  Description of Artificial Sequence: Synthetic oligonucleotide
uuggugacgagcagcgcgc

SEQ ID NO: 2505601 - RNA, 19 nt, Artificial Sequence
  Description of Artificial Sequence: Synthetic oligonucleotide
gcagcauucaaguucaguc

SEQ ID NO: 2505602 - RNA, 19 nt, Artificial Sequence
  Description of Artificial Sequence: Synthetic oligonucleotide
cagagcucugaccuguucc

SEQ ID NO: 2505603 - RNA, 19 nt, Artificial Sequence
  Description of Artificial Sequence: Synthetic oligonucleotide
aagaggaaguucaccagcu

SEQ ID NO: 2505604 - RNA, 19 nt, Artificial Sequence
  Description of Artificial Sequence: Synthetic oligonucleotide
guguccauuggccuacucc

SEQ ID NO: 2505605 - RNA, 19 nt, Artificial Sequence
  Description of Artificial Sequence: Synthetic oligonucleotide
aguguguccauuggccuac

SEQ ID NO: 2505606 - RNA, 19 nt, Artificial Sequence
  Description of Artificial Sequence: Synthetic oligonucleotide
uggguuuuggauguggcuc

SEQ ID NO: 2505607 - RNA, 19 nt, Artificial Sequence
  Description of Artificial Sequence: Synthetic oligonucleotide
uccuaugggagugugucca

SEQ ID NO: 2505608 - RNA, 19 nt, Artificial Sequence
  Description of Artificial Sequence: Synthetic oligonucleotide
cauucaaguucaguccacg

SEQ ID NO: 2505609 - RNA, 19 nt, Artificial Sequence
  Description of Artificial Sequence: Synthetic oligonucleotide
aaguaccagacgcccagga

SEQ ID NO: 2505610 - RNA, 19 nt, Artificial Sequence
  Description of Artificial Sequence: Synthetic oligonucleotide
aggcgguccaaccacaggu

SEQ ID NO: 2505611 - RNA, 19 nt, Artificial Sequence
  Description of Artificial Sequence: Synthetic oligonucleotide
gacagauacgugucccagc

SEQ ID NO: 2505612 - RNA, 19 nt, Artificial Sequence
  Description of Artificial Sequence: Synthetic oligonucleotide
cagacgcccaggaugggcg

SEQ ID NO: 2505613 - RNA, 19 nt, Artificial Sequence
  Description of Artificial Sequence: Synthetic oligonucleotide
gugacucggaaaugggaag

SEQ ID NO: 2505614 - RNA, 19 nt, Artificial Sequence
  Description of Artificial Sequence: Synthetic oligonucleotide
uccaaccacagguaccaga

SEQ ID NO: 2505615 - RNA, 19 nt, Artificial Sequence
  Description of Artificial Sequence: Synthetic oligonucleotide
cagcccguugauauaagug

SEQ ID NO: 2505616 - RNA, 19 nt, Artificial Sequence
  Description of Artificial Sequence: Synthetic oligonucleotide
cuccgcagcauucaaguuc

SEQ ID NO: 2505617 - RNA, 19 nt, Artificial Sequence
  Description of Artificial Sequence: Synthetic oligonucleotide
gacucggaaaugggaaggg

SEQ ID NO: 2505618 - RNA, 19 nt, Artificial Sequence
  Description of Artificial Sequence: Synthetic oligonucleotide
gcaccagucagccuuguag

SEQ ID NO: 2505619 - RNA, 19 nt, Artificial Sequence
  Description of Artificial Sequence: Synthetic oligonucleotide
uuggccuacuccuccgcag

SEQ ID NO: 2505620 - RNA, 19 nt, Artificial Sequence
  Description of Artificial Sequence: Synthetic oligonucleotide
caaguucaguccacgcagc

SEQ ID NO: 2505621 - RNA, 19 nt, Artificial Sequence
  Description of Artificial Sequence: Synthetic oligonucleotide
auagcugguccagacuuag

SEQ ID NO: 2505622 - RNA, 19 nt, Artificial Sequence
  Description of Artificial Sequence: Synthetic oligonucleotide
ucacaugggcaaacugucu

SEQ ID NO: 2505623 - RNA, 19 nt, Artificial Sequence
  Description of Artificial Sequence: Synthetic oligonucleotide
ucaggggcccaguacuuca

SEQ ID NO: 2505624 - RNA, 19 nt, Artificial Sequence
  Description of Artificial Sequence: Synthetic oligonucleotide
agugacucggaaaugggaa

SEQ ID NO: 2505625 - RNA, 19 nt, Artificial Sequence
  Description of Artificial Sequence: Synthetic oligonucleotide
caggaaguaccagacgccc

SEQ ID NO: 2505626 - RNA, 19 nt, Artificial Sequence
  Description of Artificial Sequence: Synthetic oligonucleotide
ugucagcccguugauauaa

SEQ ID NO: 2505627 - RNA, 19 nt, Artificial Sequence
  Description of Artificial Sequence: Synthetic oligonucleotide
gacuuagucagccuggguu

SEQ ID NO: 2505628 - RNA, 19 nt, Artificial Sequence
  Description of Artificial Sequence: Synthetic oligonucleotide
cccaccgcaaacaugcagg

SEQ ID NO: 2505629 - RNA, 19 nt, Artificial Sequence
  Description of Artificial Sequence: Synthetic oligonucleotide
gaggaggcgguccaaccac

SEQ ID NO: 2505630 - RNA, 19 nt, Artificial Sequence
  Description of Artificial Sequence: Synthetic oligonucleotide
uacgugucccagcccagug

SEQ ID NO: 2505631 - RNA, 19 nt, Artificial Sequence
  Description of Artificial Sequence: Synthetic oligonucleotide
uggccuacuccuccgcagc

SEQ ID NO: 2505632 - RNA, 19 nt, Artificial Sequence
  Description of Artificial Sequence: Synthetic oligonucleotide
gcucggaaggcuucggagg

SEQ ID NO: 2505633 - RNA, 19 nt, Artificial Sequence
  Description of Artificial Sequence: Synthetic oligonucleotide
ggccaaacgcaccagucag

SEQ ID NO: 2505634 - RNA, 19 nt, Artificial Sequence
  Description of Artificial Sequence: Synthetic oligonucleotide
agccagcgccuuccgagcc

SEQ ID NO: 2505635 - RNA, 19 nt, Artificial Sequence
  Description of Artificial Sequence: Synthetic oligonucleotide
uucaguccacgcagcccgg

SEQ ID NO: 2505636 - RNA, 19 nt, Artificial Sequence
  Description of Artificial Sequence: Synthetic oligonucleotide
gaggcgguccaaccacagg

SEQ ID NO: 2505637 - RNA, 19 nt, Artificial Sequence
  Description of Artificial Sequence: Synthetic oligonucleotide
ugguccagacuuagucagc

SEQ ID NO: 2505638 - RNA, 19 nt, Artificial Sequence
  Description of Artificial Sequence: Synthetic oligonucleotide
uucggaggcccgaggcagg

SEQ ID NO: 2505639 - RNA, 19 nt, Artificial Sequence
  Description of Artificial Sequence: Synthetic oligonucleotide
cuggccaaacgcaccaguc

SEQ ID NO: 2505640 - RNA, 19 nt, Artificial Sequence
  Description of Artificial Sequence: Synthetic oligonucleotide
gaguuggaagggguucagg

SEQ ID NO: 2505641 - RNA, 19 nt, Artificial Sequence
  Description of Artificial Sequence: Synthetic oligonucleotide
agccuuguagaagucccag

SEQ ID NO: 2505642 - RNA, 19 nt, Artificial Sequence
  Description of Artificial Sequence: Synthetic oligonucleotide
cuucggaggcccgaggcag

SEQ ID NO: 2505643 - RNA, 19 nt, Artificial Sequence
  Description of Artificial Sequence: Synthetic oligonucleotide
auuggccuacuccuccgca

SEQ ID NO: 2505644 - RNA, 19 nt, Artificial Sequence
  Description of Artificial Sequence: Synthetic oligonucleotide
cuccuaugggagugugucc

SEQ ID NO: 2505645 - RNA, 19 nt, Artificial Sequence
  Description of Artificial Sequence: Synthetic oligonucleotide
ccagacuuagucagccugg

SEQ ID NO: 2505646 - RNA, 19 nt, Artificial Sequence
  Description of Artificial Sequence: Synthetic oligonucleotide
cagacuuagucagccuggg

SEQ ID NO: 2505647 - RNA, 19 nt, Artificial Sequence
  Description of Artificial Sequence: Synthetic oligonucleotide
aguaccagacgcccaggau

SEQ ID NO: 2505648 - RNA, 19 nt, Artificial Sequence
  Description of Artificial Sequence: Synthetic oligonucleotide
aacagcggucgccccgcag

SEQ ID NO: 2505649 - RNA, 19 nt, Artificial Sequence
  Description of Artificial Sequence: Synthetic oligonucleotide
aaggcuucggaggcccgag

SEQ ID NO: 2505650 - RNA, 19 nt, Artificial Sequence
  Description of Artificial Sequence: Synthetic oligonucleotide
caccagucagccuuguaga

SEQ ID NO: 2505651 - RNA, 19 nt, Artificial Sequence
  Description of Artificial Sequence: Synthetic oligonucleotide
ugcuggggcuguuucacau

SEQ ID NO: 2505652 - RNA, 19 nt, Artificial Sequence
  Description of Artificial Sequence: Synthetic oligonucleotide
gcagcccggaguuggaagg

SEQ ID NO: 2505653 - RNA, 19 nt, Artificial Sequence
  Description of Artificial Sequence: Synthetic oligonucleotide
gauacgugucccagcccag

SEQ ID NO: 2505654 - RNA, 19 nt, Artificial Sequence
  Description of Artificial Sequence: Synthetic oligonucleotide
gggaguguguccauuggcc

SEQ ID NO: 2505655 - RNA, 19 nt, Artificial Sequence
  Description of Artificial Sequence: Synthetic oligonucleotide
ccauggcagacuccgaagg

SEQ ID NO: 2505656 - RNA, 19 nt, Artificial Sequence
  Description of Artificial Sequence: Synthetic oligonucleotide
caccucccaggccugacgc

SEQ ID NO: 2505657 - RNA, 19 nt, Artificial Sequence
  Description of Artificial Sequence: Synthetic oligonucleotide
gacuccgaagggauagcug

SEQ ID NO: 2505658 - RNA, 19 nt, Artificial Sequence
  Description of Artificial Sequence: Synthetic oligonucleotide
auggcagacuccgaaggga

SEQ ID NO: 2505659 - RNA, 19 nt, Artificial Sequence
  Description of Artificial Sequence: Synthetic oligonucleotide
aggguguuggugacgagca

SEQ ID NO: 2505660 - RNA, 19 nt, Artificial Sequence
  Description of Artificial Sequence: Synthetic oligonucleotide
ugacgagcagcgcgcggcc

SEQ ID NO: 2505661 - RNA, 19 nt, Artificial Sequence
  Description of Artificial Sequence: Synthetic oligonucleotide
gcagacuccgaagggauag

SEQ ID NO: 2505662 - RNA, 19 nt, Artificial Sequence
  Description of Artificial Sequence: Synthetic oligonucleotide
ucacgcucggaaggcuucg

SEQ ID NO: 2505663 - RNA, 19 nt, Artificial Sequence
  Description of Artificial Sequence: Synthetic oligonucleotide
ugaccuguuccagaaccuc

SEQ ID NO: 2505664 - RNA, 19 nt, Artificial Sequence
  Description of Artificial Sequence: Synthetic oligonucleotide
gugacgagcagcgcgcggc

SEQ ID NO: 2505665 - RNA, 19 nt, Artificial Sequence
  Description of Artificial Sequence: Synthetic oligonucleotide
gguccagacuuagucagcc

SEQ ID NO: 2505666 - RNA, 19 nt, Artificial Sequence
  Description of Artificial Sequence: Synthetic oligonucleotide
ugcagcccaccgcaaacau

SEQ ID NO: 2505667 - RNA, 19 nt, Artificial Sequence
  Description of Artificial Sequence: Synthetic oligonucleotide
cugagcggcuggccaaacg

SEQ ID NO: 2505668 - RNA, 19 nt, Artificial Sequence
  Description of Artificial Sequence: Synthetic oligonucleotide
cagucagccuuguagaagu

SEQ ID NO: 2505669 - RNA, 19 nt, Artificial Sequence
  Description of Artificial Sequence: Synthetic oligonucleotide
aagggauagcugguccaga

SEQ ID NO: 2505670 - RNA, 19 nt, Artificial Sequence
  Description of Artificial Sequence: Synthetic oligonucleotide
ugacgcgcgccgucgcccg

SEQ ID NO: 2505671 - RNA, 19 nt, Artificial Sequence
  Description of Artificial Sequence: Synthetic oligonucleotide
agacuuagucagccugggu

SEQ ID NO: 2505672 - RNA, 19 nt, Artificial Sequence
  Description of Artificial Sequence: Synthetic oligonucleotide
gguaggacagauacguguc

SEQ ID NO: 2505673 - RNA, 19 nt, Artificial Sequence
  Description of Artificial Sequence: Synthetic oligonucleotide
aaccuccuaugggagugug

SEQ ID NO: 2505674 - RNA, 19 nt, Artificial Sequence
  Description of Artificial Sequence: Synthetic oligonucleotide
cguugauauaagugacucg

SEQ ID NO: 2505675 - RNA, 19 nt, Artificial Sequence
  Description of Artificial Sequence: Synthetic oligonucleotide
cuccuccgcagcauucaag

SEQ ID NO: 2505676 - RNA, 19 nt, Artificial Sequence
  Description of Artificial Sequence: Synthetic oligonucleotide
cugauccaccagaaccuuc

SEQ ID NO: 2505677 - RNA, 19 nt, Artificial Sequence
  Description of Artificial Sequence: Synthetic oligonucleotide
agacuccgaagggauagcu

SEQ ID NO: 2505678 - RNA, 19 nt, Artificial Sequence
  Description of Artificial Sequence: Synthetic oligonucleotide
gaguguguccauuggccua

SEQ ID NO: 2505679 - RNA, 19 nt, Artificial Sequence
  Description of Artificial Sequence: Synthetic oligonucleotide
gaugggcgaggccaccauc

SEQ ID NO: 2505680 - RNA, 19 nt, Artificial Sequence
  Description of Artificial Sequence: Synthetic oligonucleotide
ccagaaccuccuaugggag

SEQ ID NO: 2505681 - RNA, 19 nt, Artificial Sequence
  Description of Artificial Sequence: Synthetic oligonucleotide
gagcgccgcgcgcugaagc

SEQ ID NO: 2505682 - RNA, 19 nt, Artificial Sequence
  Description of Artificial Sequence: Synthetic oligonucleotide
uggauguggcucagagcuc

SEQ ID NO: 2505683 - RNA, 19 nt, Artificial Sequence
  Description of Artificial Sequence: Synthetic oligonucleotide
cuacuccuccgcagcauuc

SEQ ID NO: 2505684 - RNA, 19 nt, Artificial Sequence
  Description of Artificial Sequence: Synthetic oligonucleotide
acgugucccagcccagugu

SEQ ID NO: 2505685 - RNA, 19 nt, Artificial Sequence
  Description of Artificial Sequence: Synthetic oligonucleotide
uuggcccgcagcuccuggc

SEQ ID NO: 2505686 - RNA, 19 nt, Artificial Sequence
  Description of Artificial Sequence: Synthetic oligonucleotide
gaaggggcccaugcugcag

SEQ ID NO: 2505687 - RNA, 19 nt, Artificial Sequence
  Description of Artificial Sequence: Synthetic oligonucleotide
ggacagauacgugucccag

SEQ ID NO: 2505688 - RNA, 19 nt, Artificial Sequence
  Description of Artificial Sequence: Synthetic oligonucleotide
uccagcgucuggccuucca

SEQ ID NO: 2505689 - RNA, 19 nt, Artificial Sequence
  Description of Artificial Sequence: Synthetic oligonucleotide
ugaucacgcucggaaggcu

SEQ ID NO: 2505690 - RNA, 19 nt, Artificial Sequence
  Description of Artificial Sequence: Synthetic oligonucleotide
aacgcaccagucagccuug

SEQ ID NO: 2505691 - RNA, 19 nt, Artificial Sequence
  Description of Artificial Sequence: Synthetic oligonucleotide
uccgaagggauagcugguc

SEQ ID NO: 2505692 - RNA, 19 nt, Artificial Sequence
  Description of Artificial Sequence: Synthetic oligonucleotide
cagauacgugucccagccc

SEQ ID NO: 2505693 - RNA, 19 nt, Artificial Sequence
  Description of Artificial Sequence: Synthetic oligonucleotide
ggguuuuggauguggcuca

SEQ ID NO: 2505694 - RNA, 19 nt, Artificial Sequence
  Description of Artificial Sequence: Synthetic oligonucleotide
agcgccuuccgagcccagc

SEQ ID NO: 2505695 - RNA, 19 nt, Artificial Sequence
  Description of Artificial Sequence: Synthetic oligonucleotide
augggcgaggccaccaucu

SEQ ID NO: 2505696 - RNA, 19 nt, Artificial Sequence
  Description of Artificial Sequence: Synthetic oligonucleotide
acucggaaaugggaaggga

SEQ ID NO: 2505697 - RNA, 19 nt, Artificial Sequence
  Description of Artificial Sequence: Synthetic oligonucleotide
uguguccauuggccuacuc

SEQ ID NO: 2505698 - RNA, 19 nt, Artificial Sequence
  Description of Artificial Sequence: Synthetic oligonucleotide
uggugacgagcagcgcgcg

SEQ ID NO: 2505699 - RNA, 19 nt, Artificial Sequence
  Description of Artificial Sequence: Synthetic oligonucleotide
ccguugauauaagugacuc

SEQ ID NO: 2505700 - RNA, 19 nt, Artificial Sequence
  Description of Artificial Sequence: Synthetic oligonucleotide
ggcaaacugucuccauggc

SEQ ID NO: 2505701 - RNA, 19 nt, Artificial Sequence
  Description of Artificial Sequence: Synthetic oligonucleotide
cucggaaaugggaagggau

SEQ ID NO: 2505702 - RNA, 19 nt, Artificial Sequence
  Description of Artificial Sequence: Synthetic oligonucleotide
ggcuucggaggcccgaggc

SEQ ID NO: 2505703 - RNA, 19 nt, Artificial Sequence
  Description of Artificial Sequence: Synthetic oligonucleotide
cucccaggccugacgcgcg

SEQ ID NO: 2505704 - RNA, 19 nt, Artificial Sequence
  Description of Artificial Sequence: Synthetic oligonucleotide
aggcuucggaggcccgagg

SEQ ID NO: 2505705 - RNA, 19 nt, Artificial Sequence
  Description of Artificial Sequence: Synthetic oligonucleotide
uucaggggcccaguacuuc

SEQ ID NO: 2505706 - RNA, 19 nt, Artificial Sequence
  Description of Artificial Sequence: Synthetic oligonucleotide
ucgcgcgcgcaccucccag

SEQ ID NO: 2505707 - RNA, 19 nt, Artificial Sequence
  Description of Artificial Sequence: Synthetic oligonucleotide
aagcucugucccggucgcg

SEQ ID NO: 2505708 - RNA, 19 nt, Artificial Sequence
  Description of Artificial Sequence: Synthetic oligonucleotide
ccaaccacagguaccagaa

SEQ ID NO: 2505709 - RNA, 19 nt, Artificial Sequence
  Description of Artificial Sequence: Synthetic oligonucleotide
gcagcucuccuccagcguc

SEQ ID NO: 2505710 - RNA, 19 nt, Artificial Sequence
  Description of Artificial Sequence: Synthetic oligonucleotide
ccuccuaugggaguguguc

SEQ ID NO: 2505711 - RNA, 19 nt, Artificial Sequence
  Description of Artificial Sequence: Synthetic oligonucleotide
agccgcccgaagccaucgc

SEQ ID NO: 2505712 - RNA, 19 nt, Artificial Sequence
  Description of Artificial Sequence: Synthetic oligonucleotide
ucggaaggcuucggaggcc

SEQ ID NO: 2505713 - RNA, 19 nt, Artificial Sequence
  Description of Artificial Sequence: Synthetic oligonucleotide
cgcgcugaagcucuguccc

SEQ ID NO: 2505714 - RNA, 19 nt, Artificial Sequence
  Description of Artificial Sequence: Synthetic oligonucleotide
gcgccuuccgagcccagcg

SEQ ID NO: 2505715 - RNA, 19 nt, Artificial Sequence
  Description of Artificial Sequence: Synthetic oligonucleotide
gcaaacaugcaggcugagc

SEQ ID NO: 2505716 - RNA, 19 nt, Artificial Sequence
  Description of Artificial Sequence: Synthetic oligonucleotide
ccgaagggauagcuggucc

SEQ ID NO: 2505717 - RNA, 19 nt, Artificial Sequence
  Description of Artificial Sequence: Synthetic oligonucleotide
cuuccgagcccagcgccag

SEQ ID NO: 2505718 - RNA, 19 nt, Artificial Sequence
  Description of Artificial Sequence: Synthetic oligonucleotide
aggccugacgcgcgccguc

SEQ ID NO: 2505719 - RNA, 19 nt, Artificial Sequence
  Description of Artificial Sequence: Synthetic oligonucleotide
caugggcaaacugucucca

SEQ ID NO: 2505720 - RNA, 19 nt, Artificial Sequence
  Description of Artificial Sequence: Synthetic oligonucleotide
ggaggaggcgguccaacca

SEQ ID NO: 2505721 - RNA, 19 nt, Artificial Sequence
  Description of Artificial Sequence: Synthetic oligonucleotide
cucugaccuguuccagaac

SEQ ID NO: 2505722 - RNA, 19 nt, Artificial Sequence
  Description of Artificial Sequence: Synthetic oligonucleotide
ggugcuggggcuguuucac

SEQ ID NO: 2505723 - RNA, 19 nt, Artificial Sequence
  Description of Artificial Sequence: Synthetic oligonucleotide
augggcaaacugucuccau

SEQ ID NO: 2505724 - RNA, 19 nt, Artificial Sequence
  Description of Artificial Sequence: Synthetic oligonucleotide
ccaccgcaaacaugcaggc

SEQ ID NO: 2505725 - RNA, 19 nt, Artificial Sequence
  Description of Artificial Sequence: Synthetic oligonucleotide
gggaggaggcgguccaacc

SEQ ID NO: 2505726 - RNA, 19 nt, Artificial Sequence
  Description of Artificial Sequence: Synthetic oligonucleotide
acgcucggaaggcuucgga

SEQ ID NO: 2505727 - RNA, 19 nt, Artificial Sequence
  Description of Artificial Sequence: Synthetic oligonucleotide
gauagcugguccagacuua

SEQ ID NO: 2505728 - RNA, 19 nt, Artificial Sequence
  Description of Artificial Sequence: Synthetic oligonucleotide
auacgugucccagcccagu

SEQ ID NO: 2505729 - RNA, 19 nt, Artificial Sequence
  Description of Artificial Sequence: Synthetic oligonucleotide
acuccuccgcagcauucaa

SEQ ID NO: 2505730 - RNA, 19 nt, Artificial Sequence
  Description of Artificial Sequence: Synthetic oligonucleotide
cagacuccgaagggauagc

SEQ ID NO: 2505731 - RNA, 19 nt, Artificial Sequence
  Description of Artificial Sequence: Synthetic oligonucleotide
ggugacgagcagcgcgcgg

SEQ ID NO: 2505732 - RNA, 19 nt, Artificial Sequence
  Description of Artificial Sequence: Synthetic oligonucleotide
ucccaggccugacgcgcgc

SEQ ID NO: 2505733 - RNA, 19 nt, Artificial Sequence
  Description of Artificial Sequence: Synthetic oligonucleotide
cgugccgcagcccagggug

SEQ ID NO: 2505734 - RNA, 19 nt, Artificial Sequence
  Description of Artificial Sequence: Synthetic oligonucleotide
cagcggucgccccgcagcc

SEQ ID NO: 2505735 - RNA, 19 nt, Artificial Sequence
  Description of Artificial Sequence: Synthetic oligonucleotide
cugacgcgcgccgucgccc

SEQ ID NO: 2505736 - RNA, 19 nt, Artificial Sequence
  Description of Artificial Sequence: Synthetic oligonucleotide
ccagucagccuuguagaag

SEQ ID NO: 2505737 - RNA, 19 nt, Artificial Sequence
  Description of Artificial Sequence: Synthetic oligonucleotide
agacgcccaggaugggcga

SEQ ID NO: 2505738 - RNA, 19 nt, Artificial Sequence
  Description of Artificial Sequence: Synthetic oligonucleotide
gacgcccaggaugggcgag

SEQ ID NO: 2505739 - RNA, 19 nt, Artificial Sequence
  Description of Artificial Sequence: Synthetic oligonucleotide
gccaugagcgugccgcagc

SEQ ID NO: 2505740 - RNA, 19 nt, Artificial Sequence
  Description of Artificial Sequence: Synthetic oligonucleotide
gcccaccgcaaacaugcag

SEQ ID NO: 2505741 - RNA, 19 nt, Artificial Sequence
  Description of Artificial Sequence: Synthetic oligonucleotide
gcucugucccggucgcgcg

SEQ ID NO: 2505742 - RNA, 19 nt, Artificial Sequence
  Description of Artificial Sequence: Synthetic oligonucleotide
ucaguccacgcagcccgga

SEQ ID NO: 2505743 - RNA, 19 nt, Artificial Sequence
  Description of Artificial Sequence: Synthetic oligonucleotide
agccaugagcgugccgcag

SEQ ID NO: 2505744 - RNA, 19 nt, Artificial Sequence
  Description of Artificial Sequence: Synthetic oligonucleotide
gucagcccguugauauaag

SEQ ID NO: 2505745 - RNA, 19 nt, Artificial Sequence
  Description of Artificial Sequence: Synthetic oligonucleotide
ggaguguguccauuggccu

SEQ ID NO: 2505746 - RNA, 19 nt, Artificial Sequence
  Description of Artificial Sequence: Synthetic oligonucleotide
ggguucaggggcccaguac

SEQ ID NO: 2505747 - RNA, 19 nt, Artificial Sequence
  Description of Artificial Sequence: Synthetic oligonucleotide
cuggguuuuggauguggcu

SEQ ID NO: 2505748 - RNA, 19 nt, Artificial Sequence
  Description of Artificial Sequence: Synthetic oligonucleotide
ccaugagcgugccgcagcc

SEQ ID NO: 2505749 - RNA, 19 nt, Artificial Sequence
  Description of Artificial Sequence: Synthetic oligonucleotide
gcccguugauauaagugac

SEQ ID NO: 2505750 - RNA, 19 nt, Artificial Sequence
  Description of Artificial Sequence: Synthetic oligonucleotide
cagccuuguagaaguccca

SEQ ID NO: 2505751 - RNA, 19 nt, Artificial Sequence
  Description of Artificial Sequence: Synthetic oligonucleotide
gccuuccgagcccagcgcc

SEQ ID NO: 2505752 - RNA, 19 nt, Artificial Sequence
  Description of Artificial Sequence: Synthetic oligonucleotide
ccgcccgaagccaucgccg

SEQ ID NO: 2505753 - RNA, 19 nt, Artificial Sequence
  Description of Artificial Sequence: Synthetic oligonucleotide
caugagcgugccgcagccc

SEQ ID NO: 2505754 - RNA, 19 nt, Artificial Sequence
  Description of Artificial Sequence: Synthetic oligonucleotide
ggaacagcggucgccccgc

SEQ ID NO: 2505755 - RNA, 19 nt, Artificial Sequence
  Description of Artificial Sequence: Synthetic oligonucleotide
gccuggguuuuggaugugg

SEQ ID NO: 2505756 - RNA, 19 nt, Artificial Sequence
  Description of Artificial Sequence: Synthetic oligonucleotide
gcgguccaaccacagguac

SEQ ID NO: 2505757 - RNA, 19 nt, Artificial Sequence
  Description of Artificial Sequence: Synthetic oligonucleotide
ccagcgucuggccuuccag

SEQ ID NO: 2505758 - RNA, 19 nt, Artificial Sequence
  Description of Artificial Sequence: Synthetic oligonucleotide
gcgcgcugaagcucugucc

SEQ ID NO: 2505759 - RNA, 19 nt, Artificial Sequence
  Description of Artificial Sequence: Synthetic oligonucleotide
auuuggcccgcagcuccug

SEQ ID NO: 2505760 - RNA, 19 nt, Artificial Sequence
  Description of Artificial Sequence: Synthetic oligonucleotide
agcgcgcggccccggaaca

SEQ ID NO: 2505761 - RNA, 19 nt, Artificial Sequence
  Description of Artificial Sequence: Synthetic oligonucleotide
cacgcucggaaggcuucgg

SEQ ID NO: 2505762 - RNA, 19 nt, Artificial Sequence
  Description of Artificial Sequence: Synthetic oligonucleotide
cugaccuguuccagaaccu

SEQ ID NO: 2505763 - RNA, 19 nt, Artificial Sequence
  Description of Artificial Sequence: Synthetic oligonucleotide
gcgcugaagcucugucccg

SEQ ID NO: 2505764 - RNA, 19 nt, Artificial Sequence
  Description of Artificial Sequence: Synthetic oligonucleotide
gacgagcagcgcgcggccc

SEQ ID NO: 2505765 - RNA, 19 nt, Artificial Sequence
  Description of Artificial Sequence: Synthetic oligonucleotide
cagcgcgcggccccggaac

SEQ ID NO: 2505766 - RNA, 19 nt, Artificial Sequence
  Description of Artificial Sequence: Synthetic oligonucleotide
gcauucaaguucaguccac

SEQ ID NO: 2505767 - RNA, 19 nt, Artificial Sequence
  Description of Artificial Sequence: Synthetic oligonucleotide
cccagaauuuggcccgcag

SEQ ID NO: 2505768 - RNA, 19 nt, Artificial Sequence
  Description of Artificial Sequence: Synthetic oligonucleotide
ucccagaauuuggcccgca

SEQ ID NO: 2505769 - RNA, 19 nt, Artificial Sequence
  Description of Artificial Sequence: Synthetic oligonucleotide
ggaggcgguccaaccacag

SEQ ID NO: 2505770 - RNA, 19 nt, Artificial Sequence
  Description of Artificial Sequence: Synthetic oligonucleotide
gccgcccgaagccaucgcc

SEQ ID NO: 2505771 - RNA, 19 nt, Artificial Sequence
  Description of Artificial Sequence: Synthetic oligonucleotide
cgcucggaaggcuucggag

SEQ ID NO: 2505772 - RNA, 19 nt, Artificial Sequence
  Description of Artificial Sequence: Synthetic oligonucleotide
ccacgcagcccggaguugg

SEQ ID NO: 2505773 - RNA, 19 nt, Artificial Sequence
  Description of Artificial Sequence: Synthetic oligonucleotide
gcggucgccccgcagccag

SEQ ID NO: 2505774 - RNA, 19 nt, Artificial Sequence
  Description of Artificial Sequence: Synthetic oligonucleotide
cuucuugaucacgcucgga

SEQ ID NO: 2505775 - RNA, 19 nt, Artificial Sequence
  Description of Artificial Sequence: Synthetic oligonucleotide
aggaggcgguccaaccaca

SEQ ID NO: 2505776 - RNA, 19 nt, Artificial Sequence
  Description of Artificial Sequence: Synthetic oligonucleotide
cgguccaaccacagguacc

SEQ ID NO: 2505777 - RNA, 19 nt, Artificial Sequence
  Description of Artificial Sequence: Synthetic oligonucleotide
cagaaccuccuaugggagu

SEQ ID NO: 2505778 - RNA, 19 nt, Artificial Sequence
  Description of Artificial Sequence: Synthetic oligonucleotide
gcuucggaggcccgaggca

SEQ ID NO: 2505779 - RNA, 19 nt, Artificial Sequence
  Description of Artificial Sequence: Synthetic oligonucleotide
cccggaacagcggucgccc

SEQ ID NO: 2505780 - RNA, 19 nt, Artificial Sequence
  Description of Artificial Sequence: Synthetic oligonucleotide
gucccagaauuuggcccgc

SEQ ID NO: 2505781 - RNA, 19 nt, Artificial Sequence
  Description of Artificial Sequence: Synthetic oligonucleotide
accuccuaugggagugugu

SEQ ID NO: 2505782 - RNA, 19 nt, Artificial Sequence
  Description of Artificial Sequence: Synthetic oligonucleotide
gugucagcccguugauaua

SEQ ID NO: 2505783 - RNA, 19 nt, Artificial Sequence
  Description of Artificial Sequence: Synthetic oligonucleotide
guccaaccacagguaccag

SEQ ID NO: 2505784 - RNA, 19 nt, Artificial Sequence
  Description of Artificial Sequence: Synthetic oligonucleotide
ccagacgcccaggaugggc

SEQ ID NO: 2505785 - RNA, 19 nt, Artificial Sequence
  Description of Artificial Sequence: Synthetic oligonucleotide
ggucgccccgcagccagcg

SEQ ID NO: 2505786 - RNA, 19 nt, Artificial Sequence
  Description of Artificial Sequence: Synthetic oligonucleotide
ugucccggucgcgcgcgca

SEQ ID NO: 2505787 - RNA, 19 nt, Artificial Sequence
  Description of Artificial Sequence: Synthetic oligonucleotide
gaucacgcucggaaggcuu

SEQ ID NO: 2505788 - RNA, 19 nt, Artificial Sequence
  Description of Artificial Sequence: Synthetic oligonucleotide
gucccggucgcgcgcgcac

SEQ ID NO: 2505789 - RNA, 19 nt, Artificial Sequence
  Description of Artificial Sequence: Synthetic oligonucleotide
ccaggccugacgcgcgccg

SEQ ID NO: 2505790 - RNA, 19 nt, Artificial Sequence
  Description of Artificial Sequence: Synthetic oligonucleotide
ggccugacgcgcgccgucg

SEQ ID NO: 2505791 - RNA, 19 nt, Artificial Sequence
  Description of Artificial Sequence: Synthetic oligonucleotide
gggauagcugguccagacu

SEQ ID NO: 2505792 - RNA, 19 nt, Artificial Sequence
  Description of Artificial Sequence: Synthetic oligonucleotide
gggcgaggccaccaucuga

SEQ ID NO: 2505793 - RNA, 19 nt, Artificial Sequence
  Description of Artificial Sequence: Synthetic oligonucleotide
cgcugaagcucugucccgg

SEQ ID NO: 2505794 - RNA, 19 nt, Artificial Sequence
  Description of Artificial Sequence: Synthetic oligonucleotide
gaacagcggucgccccgca

SEQ ID NO: 2505795 - RNA, 19 nt, Artificial Sequence
  Description of Artificial Sequence: Synthetic oligonucleotide
gccagcgccuuccgagccc

SEQ ID NO: 2505796 - RNA, 19 nt, Artificial Sequence
  Description of Artificial Sequence: Synthetic oligonucleotide
gaaccuccuaugggagugu

SEQ ID NO: 2505797 - RNA, 19 nt, Artificial Sequence
  Description of Artificial Sequence: Synthetic oligonucleotide
gcccgcagccaugagcgug

SEQ ID NO: 2505798 - RNA, 19 nt, Artificial Sequence
  Description of Artificial Sequence: Synthetic oligonucleotide
ccggaguuggaagggguuc

SEQ ID NO: 2505799 - RNA, 19 nt, Artificial Sequence
  Description of Artificial Sequence: Synthetic oligonucleotide
caaacgcaccagucagccu

SEQ ID NO: 2505800 - RNA, 19 nt, Artificial Sequence
  Description of Artificial Sequence: Synthetic oligonucleotide
ccgcaaacaugcaggcuga

SEQ ID NO: 2505801 - RNA, 19 nt, Artificial Sequence
  Description of Artificial Sequence: Synthetic oligonucleotide
gacgcgcgccgucgcccgc

SEQ ID NO: 2505802 - RNA, 19 nt, Artificial Sequence
  Description of Artificial Sequence: Synthetic oligonucleotide
cggaaaugggaagggauga

SEQ ID NO: 2505803 - RNA, 19 nt, Artificial Sequence
  Description of Artificial Sequence: Synthetic oligonucleotide
gcggcuggccaaacgcacc

SEQ ID NO: 2505804 - RNA, 19 nt, Artificial Sequence
  Description of Artificial Sequence: Synthetic oligonucleotide
cacgcagcccggaguugga

SEQ ID NO: 2505805 - RNA, 19 nt, Artificial Sequence
  Description of Artificial Sequence: Synthetic oligonucleotide
ccugacgcgcgccgucgcc

SEQ ID NO: 2505806 - RNA, 19 nt, Artificial Sequence
  Description of Artificial Sequence: Synthetic oligonucleotide
ggcgaggccaccaucugau

SEQ ID NO: 2505807 - RNA, 19 nt, Artificial Sequence
  Description of Artificial Sequence: Synthetic oligonucleotide
cgcccgaagccaucgccgc

SEQ ID NO: 2505808 - RNA, 19 nt, Artificial Sequence
  Description of Artificial Sequence: Synthetic oligonucleotide
cccguugauauaagugacu

SEQ ID NO: 2505809 - RNA, 19 nt, Artificial Sequence
  Description of Artificial Sequence: Synthetic oligonucleotide
gcgcgcaccucccaggccu

SEQ ID NO: 2505810 - RNA, 19 nt, Artificial Sequence
  Description of Artificial Sequence: Synthetic oligonucleotide
ccgcagcccaggguguugg

SEQ ID NO: 2505811 - RNA, 19 nt, Artificial Sequence
  Description of Artificial Sequence: Synthetic oligonucleotide
agccuggguuuuggaugug

SEQ ID NO: 2505812 - RNA, 19 nt, Artificial Sequence
  Description of Artificial Sequence: Synthetic oligonucleotide
cugucccggucgcgcgcgc

SEQ ID NO: 2505813 - RNA, 19 nt, Artificial Sequence
  Description of Artificial Sequence: Synthetic oligonucleotide
cugagcgccgcgcgcugaa

SEQ ID NO: 2505814 - RNA, 19 nt, Artificial Sequence
  Description of Artificial Sequence: Synthetic oligonucleotide
ccggaacagcggucgcccc

SEQ ID NO: 2505815 - RNA, 19 nt, Artificial Sequence
  Description of Artificial Sequence: Synthetic oligonucleotide
gcccaggguguuggugacg

SEQ ID NO: 2505816 - RNA, 19 nt, Artificial Sequence
  Description of Artificial Sequence: Synthetic oligonucleotide
ccuuccgagcccagcgcca

SEQ ID NO: 2505817 - RNA, 19 nt, Artificial Sequence
  Description of Artificial Sequence: Synthetic oligonucleotide
agcccaccgcaaacaugca

SEQ ID NO: 2505818 - RNA, 19 nt, Artificial Sequence
  Description of Artificial Sequence: Synthetic oligonucleotide
gcccaugcugcagcccacc

SEQ ID NO: 2505819 - RNA, 19 nt, Artificial Sequence
  Description of Artificial Sequence: Synthetic oligonucleotide
agcggucgccccgcagcca

SEQ ID NO: 2505820 - RNA, 19 nt, Artificial Sequence
  Description of Artificial Sequence: Synthetic oligonucleotide
gcgcggccccggaacagcg

SEQ ID NO: 2505821 - RNA, 19 nt, Artificial Sequence
  Description of Artificial Sequence: Synthetic oligonucleotide
ccccggaacagcggucgcc

SEQ ID NO: 2505822 - RNA, 19 nt, Artificial Sequence
  Description of Artificial Sequence: Synthetic oligonucleotide
cagcgccuuccgagcccag

SEQ ID NO: 2505823 - RNA, 19 nt, Artificial Sequence
  Description of Artificial Sequence: Synthetic oligonucleotide
acgcaccagucagccuugu

SEQ ID NO: 2505824 - RNA, 19 nt, Artificial Sequence
  Description of Artificial Sequence: Synthetic oligonucleotide
ggcgguccaaccacaggua

SEQ ID NO: 2505825 - RNA, 19 nt, Artificial Sequence
  Description of Artificial Sequence: Synthetic oligonucleotide
gccugacgcgcgccgucgc

SEQ ID NO: 2505826 - RNA, 19 nt, Artificial Sequence
  Description of Artificial Sequence: Synthetic oligonucleotide
gcgaggccaccaucugauc

SEQ ID NO: 2505827 - RNA, 19 nt, Artificial Sequence
  Description of Artificial Sequence: Synthetic oligonucleotide
ggucgcgcgcgcaccuccc

SEQ ID NO: 2505828 - RNA, 19 nt, Artificial Sequence
  Description of Artificial Sequence: Synthetic oligonucleotide
cgccuuccgagcccagcgc

SEQ ID NO: 2505829 - RNA, 19 nt, Artificial Sequence
  Description of Artificial Sequence: Synthetic oligonucleotide
acgcgcgccgucgcccgca

SEQ ID NO: 2505830 - RNA, 19 nt, Artificial Sequence
  Description of Artificial Sequence: Synthetic oligonucleotide
caccgcaaacaugcaggcu

SEQ ID NO: 2505831 - RNA, 19 nt, Artificial Sequence
  Description of Artificial Sequence: Synthetic oligonucleotide
cuccagcgucuggccuucc

SEQ ID NO: 2505832 - RNA, 19 nt, Artificial Sequence
  Description of Artificial Sequence: Synthetic oligonucleotide
cgcgcgcugaagcucuguc

SEQ ID NO: 2505833 - RNA, 19 nt, Artificial Sequence
  Description of Artificial Sequence: Synthetic oligonucleotide
gccccggaacagcggucgc

SEQ ID NO: 2505834 - RNA, 19 nt, Artificial Sequence
  Description of Artificial Sequence: Synthetic oligonucleotide
cggaguuggaagggguuca

SEQ ID NO: 2505835 - RNA, 19 nt, Artificial Sequence
  Description of Artificial Sequence: Synthetic oligonucleotide
gcgucuggccuuccaggcu

SEQ ID NO: 2505836 - RNA, 19 nt, Artificial Sequence
  Description of Artificial Sequence: Synthetic oligonucleotide
gcugagcggcuggccaaac

SEQ ID NO: 2505837 - RNA, 19 nt, Artificial Sequence
  Description of Artificial Sequence: Synthetic oligonucleotide
ggaugggcgaggccaccau

SEQ ID NO: 2505838 - RNA, 19 nt, Artificial Sequence
  Description of Artificial Sequence: Synthetic oligonucleotide
cgcaaacaugcaggcugag

SEQ ID NO: 2505839 - RNA, 19 nt, Artificial Sequence
  Description of Artificial Sequence: Synthetic oligonucleotide
ccuccagcgucuggccuuc

SEQ ID NO: 2505840 - RNA, 19 nt, Artificial Sequence
  Description of Artificial Sequence: Synthetic oligonucleotide
ccgcagcauucaaguucag

SEQ ID NO: 2505841 - RNA, 19 nt, Artificial Sequence
  Description of Artificial Sequence: Synthetic oligonucleotide
cgcggccccggaacagcgg

SEQ ID NO: 2505842 - RNA, 19 nt, Artificial Sequence
  Description of Artificial Sequence: Synthetic oligonucleotide
cccaggccugacgcgcgcc

SEQ ID NO: 2505843 - RNA, 19 nt, Artificial Sequence
  Description of Artificial Sequence: Synthetic oligonucleotide
guucaccagcugagcggcu

SEQ ID NO: 2505844 - RNA, 19 nt, Artificial Sequence
  Description of Artificial Sequence: Synthetic oligonucleotide
cccagcgccagccgcccga

SEQ ID NO: 2505845 - RNA, 19 nt, Artificial Sequence
  Description of Artificial Sequence: Synthetic oligonucleotide
ccagcgccuuccgagccca

SEQ ID NO: 2505846 - RNA, 19 nt, Artificial Sequence
  Description of Artificial Sequence: Synthetic oligonucleotide
gccgucgcccgcagccaug

SEQ ID NO: 2505847 - RNA, 19 nt, Artificial Sequence
  Description of Artificial Sequence: Synthetic oligonucleotide
gcgcgcggccccggaacag

SEQ ID NO: 2505848 - RNA, 19 nt, Artificial Sequence
  Description of Artificial Sequence: Synthetic oligonucleotide
gugccgcagcccagggugu

SEQ ID NO: 2505849 - RNA, 19 nt, Artificial Sequence
  Description of Artificial Sequence: Synthetic oligonucleotide
guguguccauuggccuacu

SEQ ID NO: 2505850 - RNA, 19 nt, Artificial Sequence
  Description of Artificial Sequence: Synthetic oligonucleotide
ccuaugggaguguguccau

SEQ ID NO: 2505851 - RNA, 19 nt, Artificial Sequence
  Description of Artificial Sequence: Synthetic oligonucleotide
cgcgcggccccggaacagc

SEQ ID NO: 2505852 - RNA, 19 nt, Artificial Sequence
  Description of Artificial Sequence: Synthetic oligonucleotide
gcccggaguuggaaggggu

SEQ ID NO: 2505853 - RNA, 19 nt, Artificial Sequence
  Description of Artificial Sequence: Synthetic oligonucleotide
cgcgcgcaccucccaggcc

SEQ ID NO: 2505854 - RNA, 19 nt, Artificial Sequence
  Description of Artificial Sequence: Synthetic oligonucleotide
cgcgcaccucccaggccug

SEQ ID NO: 2505855 - RNA, 19 nt, Artificial Sequence
  Description of Artificial Sequence: Synthetic oligonucleotide
ccgcagccaugagcgugcc

SEQ ID NO: 2505856 - RNA, 19 nt, Artificial Sequence
  Description of Artificial Sequence: Synthetic oligonucleotide
ccgucgcccgcagccauga

SEQ ID NO: 2505857 - RNA, 19 nt, Artificial Sequence
  Description of Artificial Sequence: Synthetic oligonucleotide
cccggaguuggaagggguu

SEQ ID NO: 2505858 - RNA, 19 nt, Artificial Sequence
  Description of Artificial Sequence: Synthetic oligonucleotide
gcgugccgcagcccagggu

SEQ ID NO: 2505859 - RNA, 19 nt, Artificial Sequence
  Description of Artificial Sequence: Synthetic oligonucleotide
ccuccgcagcauucaaguu

SEQ ID NO: 2505860 - RNA, 19 nt, Artificial Sequence
  Description of Artificial Sequence: Synthetic oligonucleotide
cggucgccccgcagccagc

SEQ ID NO: 2505861 - RNA, 19 nt, Artificial Sequence
  Description of Artificial Sequence: Synthetic oligonucleotide
gccgcgcgcugaagcucug

SEQ ID NO: 2505862 - RNA, 19 nt, Artificial Sequence
  Description of Artificial Sequence: Synthetic oligonucleotide
cgccgcgcgcugaagcucu

SEQ ID NO: 2505863 - RNA, 19 nt, Artificial Sequence
  Description of Artificial Sequence: Synthetic oligonucleotide
gccagccgcccgaagccau

SEQ ID NO: 2505864 - RNA, 19 nt, Artificial Sequence
  Description of Artificial Sequence: Synthetic oligonucleotide
ccggucgcgcgcgcaccuc

SEQ ID NO: 2505865 - RNA, 19 nt, Artificial Sequence
  Description of Artificial Sequence: Synthetic oligonucleotide
cgcgcgccgucgcccgcag

SEQ ID NO: 2505866 - RNA, 19 nt, Artificial Sequence
  Description of Artificial Sequence: Synthetic oligonucleotide
cgcaccagucagccuugua

SEQ ID NO: 2505867 - RNA, 19 nt, Artificial Sequence
  Description of Artificial Sequence: Synthetic oligonucleotide
ccagcgccagccgcccgaa

SEQ ID NO: 2505868 - RNA, 19 nt, Artificial Sequence
  Description of Artificial Sequence: Synthetic oligonucleotide
cccggucgcgcgcgcaccu

SEQ ID NO: 2505869 - RNA, 19 nt, Artificial Sequence
  Description of Artificial Sequence: Synthetic oligonucleotide
ccgcgcgcugaagcucugu

SEQ ID NO: 2505870 - RNA, 19 nt, Artificial Sequence
  Description of Artificial Sequence: Synthetic oligonucleotide
cgccgucgcccgcagccau

SEQ ID NO: 2505871 - RNA, 19 nt, Artificial Sequence
  Description of Artificial Sequence: Synthetic oligonucleotide
aauaauagaauccaaaaca

SEQ ID NO: 2505872 - RNA, 19 nt, Artificial Sequence
  Description of Artificial Sequence: Synthetic oligonucleotide
aauauuuucacugaggcac

SEQ ID NO: 2505873 - RNA, 19 nt, Artificial Sequence
  Description of Artificial Sequence: Synthetic oligonucleotide
aauagaauccaaaacaagc

SEQ ID NO: 2505874 - RNA, 19 nt, Artificial Sequence
  Description of Artificial Sequence: Synthetic oligonucleotide
aaaguuuucagcuaccauc

SEQ ID NO: 2505875 - RNA, 19 nt, Artificial Sequence
  Description of Artificial Sequence: Synthetic oligonucleotide
aauuuguugacaauaaugg

SEQ ID NO: 2505876 - RNA, 19 nt, Artificial Sequence
  Description of Artificial Sequence: Synthetic oligonucleotide
aacaagaagaaguuuguuc

SEQ ID NO: 2505877 - RNA, 19 nt, Artificial Sequence
  Description of Artificial Sequence: Synthetic oligonucleotide
uuuguugacaauaauggcc

SEQ ID NO: 2505878 - RNA, 19 nt, Artificial Sequence
  Description of Artificial Sequence: Synthetic oligonucleotide
cauuguauguuuaaaagcc

SEQ ID NO: 2505879 - RNA, 19 nt, Artificial Sequence
  Description of Artificial Sequence: Synthetic oligonucleotide
uaauuuguugacaauaaug

SEQ ID NO: 2505880 - RNA, 19 nt, Artificial Sequence
  Description of Artificial Sequence: Synthetic oligonucleotide
uuuaucauauucaauguac

SEQ ID NO: 2505881 - RNA, 19 nt, Artificial Sequence
  Description of Artificial Sequence: Synthetic oligonucleotide
uauauguccaccuaauuug

SEQ ID NO: 2505882 - RNA, 19 nt, Artificial Sequence
  Description of Artificial Sequence: Synthetic oligonucleotide
aagcccaaauaauagaauc

SEQ ID NO: 2505883 - RNA, 19 nt, Artificial Sequence
  Description of Artificial Sequence: Synthetic oligonucleotide
aaauaaauucucccgagcu

SEQ ID NO: 2505884 - RNA, 19 nt, Artificial Sequence
  Description of Artificial Sequence: Synthetic oligonucleotide
agcaugucuaaauaaauuc

SEQ ID NO: 2505885 - RNA, 19 nt, Artificial Sequence
  Description of Artificial Sequence: Synthetic oligonucleotide
aguuugauaaaacucuggg

SEQ ID NO: 2505886 - RNA, 19 nt, Artificial Sequence
  Description of Artificial Sequence: Synthetic oligonucleotide
ucaaaauccuuauuuauca

SEQ ID NO: 2505887 - RNA, 19 nt, Artificial Sequence
  Description of Artificial Sequence: Synthetic oligonucleotide
uuuaauaugcuacccagcu

SEQ ID NO: 2505888 - RNA, 19 nt, Artificial Sequence
  Description of Artificial Sequence: Synthetic oligonucleotide
ucuaaauaaauucucccga

SEQ ID NO: 2505889 - RNA, 19 nt, Artificial Sequence
  Description of Artificial Sequence: Synthetic oligonucleotide
agaauugacagccugaagu

SEQ ID NO: 2505890 - RNA, 19 nt, Artificial Sequence
  Description of Artificial Sequence: Synthetic oligonucleotide
ugcagaaauauuuucacug

SEQ ID NO: 2505891 - RNA, 19 nt, Artificial Sequence
  Description of Artificial Sequence: Synthetic oligonucleotide
aaaauaaguuugauaaaac

SEQ ID NO: 2505892 - RNA, 19 nt, Artificial Sequence
  Description of Artificial Sequence: Synthetic oligonucleotide
uuaacuuuaaaguuucccu

SEQ ID NO: 2505893 - RNA, 19 nt, Artificial Sequence
  Description of Artificial Sequence: Synthetic oligonucleotide
auuuguugacaauaauggc

SEQ ID NO: 2505894 - RNA, 19 nt, Artificial Sequence
  Description of Artificial Sequence: Synthetic oligonucleotide
gaauauuugagguauuuca

SEQ ID NO: 2505895 - RNA, 19 nt, Artificial Sequence
  Description of Artificial Sequence: Synthetic oligonucleotide
ucauuguauguuuaaaagc

SEQ ID NO: 2505896 - RNA, 19 nt, Artificial Sequence
  Description of Artificial Sequence: Synthetic oligonucleotide
aacugcauccaacagagga

SEQ ID NO: 2505897 - RNA, 19 nt, Artificial Sequence
  Description of Artificial Sequence: Synthetic oligonucleotide
aaugcugggaagcaaugag

SEQ ID NO: 2505898 - RNA, 19 nt, Artificial Sequence
  Description of Artificial Sequence: Synthetic oligonucleotide
aauaaauucucccgagcug

SEQ ID NO: 2505899 - RNA, 19 nt, Artificial Sequence
  Description of Artificial Sequence: Synthetic oligonucleotide
gucuaaauaaauucucccg

SEQ ID NO: 2505900 - RNA, 19 nt, Artificial Sequence
  Description of Artificial Sequence: Synthetic oligonucleotide
aaugagaauugacagccug

SEQ ID NO: 2505901 - RNA, 19 nt, Artificial Sequence
  Description of Artificial Sequence: Synthetic oligonucleotide
aacugcaucgaauauuuga

SEQ ID NO: 2505902 - RNA, 19 nt, Artificial Sequence
  Description of Artificial Sequence: Synthetic oligonucleotide
uuguugacaauaauggcca

SEQ ID NO: 2505903 - RNA, 19 nt, Artificial Sequence
  Description of Artificial Sequence: Synthetic oligonucleotide
cucauuguauguuuaaaag

SEQ ID NO: 2505904 - RNA, 19 nt, Artificial Sequence
  Description of Artificial Sequence: Synthetic oligonucleotide
ugucuaaauaaauucuccc

SEQ ID NO: 2505905 - RNA, 19 nt, Artificial Sequence
  Description of Artificial Sequence: Synthetic oligonucleotide
aauagcuaggaaugcuggg

SEQ ID NO: 2505906 - RNA, 19 nt, Artificial Sequence
  Description of Artificial Sequence: Synthetic oligonucleotide
uauacguugagcaugucua

SEQ ID NO: 2505907 - RNA, 19 nt, Artificial Sequence
  Description of Artificial Sequence: Synthetic oligonucleotide
uauuugagguauuucagcu

SEQ ID NO: 2505908 - RNA, 19 nt, Artificial Sequence
  Description of Artificial Sequence: Synthetic oligonucleotide
auaaguuugauaaaacucu

SEQ ID NO: 2505909 - RNA, 19 nt, Artificial Sequence
  Description of Artificial Sequence: Synthetic oligonucleotide
aguaacaagaagaaguuug

SEQ ID NO: 2505910 - RNA, 19 nt, Artificial Sequence
  Description of Artificial Sequence: Synthetic oligonucleotide
uuauauguccaccuaauuu

SEQ ID NO: 2505911 - RNA, 19 nt, Artificial Sequence
  Description of Artificial Sequence: Synthetic oligonucleotide
uucuccauuagcuugaaua

SEQ ID NO: 2505912 - RNA, 19 nt, Artificial Sequence
  Description of Artificial Sequence: Synthetic oligonucleotide
uaaauaaauucucccgagc

SEQ ID NO: 2505913 - RNA, 19 nt, Artificial Sequence
  Description of Artificial Sequence: Synthetic oligonucleotide
uuaucauauucaauguaca

SEQ ID NO: 2505914 - RNA, 19 nt, Artificial Sequence
  Description of Artificial Sequence: Synthetic oligonucleotide
uaguacuaagcacuucugg

SEQ ID NO: 2505915 - RNA, 19 nt, Artificial Sequence
  Description of Artificial Sequence: Synthetic oligonucleotide
uccauuagcuugaauagcu

SEQ ID NO: 2505916 - RNA, 19 nt, Artificial Sequence
  Description of Artificial Sequence: Synthetic oligonucleotide
ugcugaauuaugcuguccc

SEQ ID NO: 2505917 - RNA, 19 nt, Artificial Sequence
  Description of Artificial Sequence: Synthetic oligonucleotide
auauuaacuuuaaaguuuc

SEQ ID NO: 2505918 - RNA, 19 nt, Artificial Sequence
  Description of Artificial Sequence: Synthetic oligonucleotide
uaaguuugauaaaacucug

SEQ ID NO: 2505919 - RNA, 19 nt, Artificial Sequence
  Description of Artificial Sequence: Synthetic oligonucleotide
aaaacaagcuuaaacugug

SEQ ID NO: 2505920 - RNA, 19 nt, Artificial Sequence
  Description of Artificial Sequence: Synthetic oligonucleotide
cuaaauaaauucucccgag

SEQ ID NO: 2505921 - RNA, 19 nt, Artificial Sequence
  Description of Artificial Sequence: Synthetic oligonucleotide
uuuuaauaugcuacccagc

SEQ ID NO: 2505922 - RNA, 19 nt, Artificial Sequence
  Description of Artificial Sequence: Synthetic oligonucleotide
aacaagcuuaaacugugca

SEQ ID NO: 2505923 - RNA, 19 nt, Artificial Sequence
  Description of Artificial Sequence: Synthetic oligonucleotide
uaugcuacccagcugcuug

SEQ ID NO: 2505924 - RNA, 19 nt, Artificial Sequence
  Description of Artificial Sequence: Synthetic oligonucleotide
aaaauccuuauuuaucaua

SEQ ID NO: 2505925 - RNA, 19 nt, Artificial Sequence
  Description of Artificial Sequence: Synthetic oligonucleotide
cacugaggcacuuauauac

SEQ ID NO: 2505926 - RNA, 19 nt, Artificial Sequence
  Description of Artificial Sequence: Synthetic oligonucleotide
agaaguuuguucuguguuc

SEQ ID NO: 2505927 - RNA, 19 nt, Artificial Sequence
  Description of Artificial Sequence: Synthetic oligonucleotide
ucugaggaucauuggaacg

SEQ ID NO: 2505928 - RNA, 19 nt, Artificial Sequence
  Description of Artificial Sequence: Synthetic oligonucleotide
uaaaagcccaaauaauaga

SEQ ID NO: 2505929 - RNA, 19 nt, Artificial Sequence
  Description of Artificial Sequence: Synthetic oligonucleotide
uacuucuaaucaaugguug

SEQ ID NO: 2505930 - RNA, 19 nt, Artificial Sequence
  Description of Artificial Sequence: Synthetic oligonucleotide
uuauauacguugagcaugu

SEQ ID NO: 2505931 - RNA, 19 nt, Artificial Sequence
  Description of Artificial Sequence: Synthetic oligonucleotide
augucuaaauaaauucucc

SEQ ID NO: 2505932 - RNA, 19 nt, Artificial Sequence
  Description of Artificial Sequence: Synthetic oligonucleotide
aguacuaagcacuucuggu

SEQ ID NO: 2505933 - RNA, 19 nt, Artificial Sequence
  Description of Artificial Sequence: Synthetic oligonucleotide
ugcaucgaauauuugaggu

SEQ ID NO: 2505934 - RNA, 19 nt, Artificial Sequence
  Description of Artificial Sequence: Synthetic oligonucleotide
guuugauaaaacucugggc

SEQ ID NO: 2505935 - RNA, 19 nt, Artificial Sequence
  Description of Artificial Sequence: Synthetic oligonucleotide
aaauccuuauuuaucauau

SEQ ID NO: 2505936 - RNA, 19 nt, Artificial Sequence
  Description of Artificial Sequence: Synthetic oligonucleotide
cuuauauacguugagcaug

SEQ ID NO: 2505937 - RNA, 19 nt, Artificial Sequence
  Description of Artificial Sequence: Synthetic oligonucleotide
acaagcuuaaacugugcag

SEQ ID NO: 2505938 - RNA, 19 nt, Artificial Sequence
  Description of Artificial Sequence: Synthetic oligonucleotide
auuguauguuuaaaagccc

SEQ ID NO: 2505939 - RNA, 19 nt, Artificial Sequence
  Description of Artificial Sequence: Synthetic oligonucleotide
caacagaggaggaacaaag

SEQ ID NO: 2505940 - RNA, 19 nt, Artificial Sequence
  Description of Artificial Sequence: Synthetic oligonucleotide
uaucauauucaauguacac

SEQ ID NO: 2505941 - RNA, 19 nt, Artificial Sequence
  Description of Artificial Sequence: Synthetic oligonucleotide
gacaauaauggccauagua

SEQ ID NO: 2505942 - RNA, 19 nt, Artificial Sequence
  Description of Artificial Sequence: Synthetic oligonucleotide
ugcuuuguaaccauuucuc

SEQ ID NO: 2505943 - RNA, 19 nt, Artificial Sequence
  Description of Artificial Sequence: Synthetic oligonucleotide
auggccauaguacuaagca

SEQ ID NO: 2505944 - RNA, 19 nt, Artificial Sequence
  Description of Artificial Sequence: Synthetic oligonucleotide
caugucuaaauaaauucuc

SEQ ID NO: 2505945 - RNA, 19 nt, Artificial Sequence
  Description of Artificial Sequence: Synthetic oligonucleotide
aauuacaaagggaugucca

SEQ ID NO: 2505946 - RNA, 19 nt, Artificial Sequence
  Description of Artificial Sequence: Synthetic oligonucleotide
uaccaucugaggaucauug

SEQ ID NO: 2505947 - RNA, 19 nt, Artificial Sequence
  Description of Artificial Sequence: Synthetic oligonucleotide
uugagcaugucuaaauaaa

SEQ ID NO: 2505948 - RNA, 19 nt, Artificial Sequence
  Description of Artificial Sequence: Synthetic oligonucleotide
uguucuguguucuggauau

SEQ ID NO: 2505949 - RNA, 19 nt, Artificial Sequence
  Description of Artificial Sequence: Synthetic oligonucleotide
gcuuaaacugugcaggugg

SEQ ID NO: 2505950 - RNA, 19 nt, Artificial Sequence
  Description of Artificial Sequence: Synthetic oligonucleotide
gcaacauuuuguaaaagcg

SEQ ID NO: 2505951 - RNA, 19 nt, Artificial Sequence
  Description of Artificial Sequence: Synthetic oligonucleotide
uuaauaugcuacccagcug

SEQ ID NO: 2505952 - RNA, 19 nt, Artificial Sequence
  Description of Artificial Sequence: Synthetic oligonucleotide
agaauaucacaaaauaagu

SEQ ID NO: 2505953 - RNA, 19 nt, Artificial Sequence
  Description of Artificial Sequence: Synthetic oligonucleotide
uacaaagggauguccaaca

SEQ ID NO: 2505954 - RNA, 19 nt, Artificial Sequence
  Description of Artificial Sequence: Synthetic oligonucleotide
cagauauuaacuuuaaagu

SEQ ID NO: 2505955 - RNA, 19 nt, Artificial Sequence
  Description of Artificial Sequence: Synthetic oligonucleotide
aauucucccgagcugaauu

SEQ ID NO: 2505956 - RNA, 19 nt, Artificial Sequence
  Description of Artificial Sequence: Synthetic oligonucleotide
cacuuauauacguugagca

SEQ ID NO: 2505957 - RNA, 19 nt, Artificial Sequence
  Description of Artificial Sequence: Synthetic oligonucleotide
aaacaagcuuaaacugugc

SEQ ID NO: 2505958 - RNA, 19 nt, Artificial Sequence
  Description of Artificial Sequence: Synthetic oligonucleotide
auauacguugagcaugucu

SEQ ID NO: 2505959 - RNA, 19 nt, Artificial Sequence
  Description of Artificial Sequence: Synthetic oligonucleotide
aucauauucaauguacacu

SEQ ID NO: 2505960 - RNA, 19 nt, Artificial Sequence
  Description of Artificial Sequence: Synthetic oligonucleotide
uuucaggaucuuuucagga

SEQ ID NO: 2505961 - RNA, 19 nt, Artificial Sequence
  Description of Artificial Sequence: Synthetic oligonucleotide
ugggacauuucucugguaa

SEQ ID NO: 2505962 - RNA, 19 nt, Artificial Sequence
  Description of Artificial Sequence: Synthetic oligonucleotide
gaauuaugcugucccauac

SEQ ID NO: 2505963 - RNA, 19 nt, Artificial Sequence
  Description of Artificial Sequence: Synthetic oligonucleotide
gaggaacaaaguuuucagc

SEQ ID NO: 2505964 - RNA, 19 nt, Artificial Sequence
  Description of Artificial Sequence: Synthetic oligonucleotide
uuuaccguccgcauacuuc

SEQ ID NO: 2505965 - RNA, 19 nt, Artificial Sequence
  Description of Artificial Sequence: Synthetic oligonucleotide
ugagcaugucuaaauaaau

SEQ ID NO: 2505966 - RNA, 19 nt, Artificial Sequence
  Description of Artificial Sequence: Synthetic oligonucleotide
caacauuccucauuguaug

SEQ ID NO: 2505967 - RNA, 19 nt, Artificial Sequence
  Description of Artificial Sequence: Synthetic oligonucleotide
acugcaucgaauauuugag

SEQ ID NO: 2505968 - RNA, 19 nt, Artificial Sequence
  Description of Artificial Sequence: Synthetic oligonucleotide
cugaggaucauuggaacgg

SEQ ID NO: 2505969 - RNA, 19 nt, Artificial Sequence
  Description of Artificial Sequence: Synthetic oligonucleotide
uuaccguccgcauacuucu

SEQ ID NO: 2505970 - RNA, 19 nt, Artificial Sequence
  Description of Artificial Sequence: Synthetic oligonucleotide
uguccaccuaauuuguuga

SEQ ID NO: 2505971 - RNA, 19 nt, Artificial Sequence
  Description of Artificial Sequence: Synthetic oligonucleotide
uucaggauauccacuauuu

SEQ ID NO: 2505972 - RNA, 19 nt, Artificial Sequence
  Description of Artificial Sequence: Synthetic oligonucleotide
uguauguuuaaaagcccaa

SEQ ID NO: 2505973 - RNA, 19 nt, Artificial Sequence
  Description of Artificial Sequence: Synthetic oligonucleotide
caaugguugcuuuguaacc

SEQ ID NO: 2505974 - RNA, 19 nt, Artificial Sequence
  Description of Artificial Sequence: Synthetic oligonucleotide
ugauaaaacucugggcugc

SEQ ID NO: 2505975 - RNA, 19 nt, Artificial Sequence
  Description of Artificial Sequence: Synthetic oligonucleotide
gaauuacaaagggaugucc

SEQ ID NO: 2505976 - RNA, 19 nt, Artificial Sequence
  Description of Artificial Sequence: Synthetic oligonucleotide
gcaaugagaauugacagcc

SEQ ID NO: 2505977 - RNA, 19 nt, Artificial Sequence
  Description of Artificial Sequence: Synthetic oligonucleotide
auuggaacggcucacccaa

SEQ ID NO: 2505978 - RNA, 19 nt, Artificial Sequence
  Description of Artificial Sequence: Synthetic oligonucleotide
auguccaccuaauuuguug

SEQ ID NO: 2505979 - RNA, 19 nt, Artificial Sequence
  Description of Artificial Sequence: Synthetic oligonucleotide
ugcugggaagcaaugagaa

SEQ ID NO: 2505980 - RNA, 19 nt, Artificial Sequence
  Description of Artificial Sequence: Synthetic oligonucleotide
uagaauccaaaacaagcuu

SEQ ID NO: 2505981 - RNA, 19 nt, Artificial Sequence
  Description of Artificial Sequence: Synthetic oligonucleotide
ugcaacauuccucauugua

SEQ ID NO: 2505982 - RNA, 19 nt, Artificial Sequence
  Description of Artificial Sequence: Synthetic oligonucleotide
cacccaaccagauauuaac

SEQ ID NO: 2505983 - RNA, 19 nt, Artificial Sequence
  Description of Artificial Sequence: Synthetic oligonucleotide
gugcagguggaauagcuag

SEQ ID NO: 2505984 - RNA, 19 nt, Artificial Sequence
  Description of Artificial Sequence: Synthetic oligonucleotide
uuugguugccugcugaauu

SEQ ID NO: 2505985 - RNA, 19 nt, Artificial Sequence
  Description of Artificial Sequence: Synthetic oligonucleotide
auauucaauguacacucaa

SEQ ID NO: 2505986 - RNA, 19 nt, Artificial Sequence
  Description of Artificial Sequence: Synthetic oligonucleotide
cuacccagcugcuugacug

SEQ ID NO: 2505987 - RNA, 19 nt, Artificial Sequence
  Description of Artificial Sequence: Synthetic oligonucleotide
agguggaauagcuaggaau

SEQ ID NO: 2505988 - RNA, 19 nt, Artificial Sequence
  Description of Artificial Sequence: Synthetic oligonucleotide
aagcuuaaacugugcaggu

SEQ ID NO: 2505989 - RNA, 19 nt, Artificial Sequence
  Description of Artificial Sequence: Synthetic oligonucleotide
cugguaaucaaugagaacu

SEQ ID NO: 2505990 - RNA, 19 nt, Artificial Sequence
  Description of Artificial Sequence: Synthetic oligonucleotide
acuuauauacguugagcau

SEQ ID NO: 2505991 - RNA, 19 nt, Artificial Sequence
  Description of Artificial Sequence: Synthetic oligonucleotide
gauauuaacuuuaaaguuu

SEQ ID NO: 2505992 - RNA, 19 nt, Artificial Sequence
  Description of Artificial Sequence: Synthetic oligonucleotide
agaagaaguuuguucugug

SEQ ID NO: 2505993 - RNA, 19 nt, Artificial Sequence
  Description of Artificial Sequence: Synthetic oligonucleotide
auuaugcugucccauacuu

SEQ ID NO: 2505994 - RNA, 19 nt, Artificial Sequence
  Description of Artificial Sequence: Synthetic oligonucleotide
cugcaucgaauauuugagg

SEQ ID NO: 2505995 - RNA, 19 nt, Artificial Sequence
  Description of Artificial Sequence: Synthetic oligonucleotide
auuacaaagggauguccaa

SEQ ID NO: 2505996 - RNA, 19 nt, Artificial Sequence
  Description of Artificial Sequence: Synthetic oligonucleotide
aaacugugcagguggaaua

SEQ ID NO: 2505997 - RNA, 19 nt, Artificial Sequence
  Description of Artificial Sequence: Synthetic oligonucleotide
ucuggauauucuucaaaau

SEQ ID NO: 2505998 - RNA, 19 nt, Artificial Sequence
  Description of Artificial Sequence: Synthetic oligonucleotide
gaacggcucacccaaccag

SEQ ID NO: 2505999 - RNA, 19 nt, Artificial Sequence
  Description of Artificial Sequence: Synthetic oligonucleotide
gaauugacagccugaagua

SEQ ID NO: 2506000 - RNA, 19 nt, Artificial Sequence
  Description of Artificial Sequence: Synthetic oligonucleotide
agcuguuauauguccaccu

SEQ ID NO: 2506001 - RNA, 19 nt, Artificial Sequence
  Description of Artificial Sequence: Synthetic oligonucleotide
ugccugcugaauuaugcug

SEQ ID NO: 2506002 - RNA, 19 nt, Artificial Sequence
  Description of Artificial Sequence: Synthetic oligonucleotide
ucuugcgcaacauuuugua

SEQ ID NO: 2506003 - RNA, 19 nt, Artificial Sequence
  Description of Artificial Sequence: Synthetic oligonucleotide
aucauuggaacggcucacc

SEQ ID NO: 2506004 - RNA, 19 nt, Artificial Sequence
  Description of Artificial Sequence: Synthetic oligonucleotide
aauaauggccauaguacua

SEQ ID NO: 2506005 - RNA, 19 nt, Artificial Sequence
  Description of Artificial Sequence: Synthetic oligonucleotide
uuacaaagggauguccaac

SEQ ID NO: 2506006 - RNA, 19 nt, Artificial Sequence
  Description of Artificial Sequence: Synthetic oligonucleotide
ugcgcaacauuuuguaaaa

SEQ ID NO: 2506007 - RNA, 19 nt, Artificial Sequence
  Description of Artificial Sequence: Synthetic oligonucleotide
ugaauuaugcugucccaua

SEQ ID NO: 2506008 - RNA, 19 nt, Artificial Sequence
  Description of Artificial Sequence: Synthetic oligonucleotide
guugccugcugaauuaugc

SEQ ID NO: 2506009 - RNA, 19 nt, Artificial Sequence
  Description of Artificial Sequence: Synthetic oligonucleotide
uucaggaucuuuucaggau

SEQ ID NO: 2506010 - RNA, 19 nt, Artificial Sequence
  Description of Artificial Sequence: Synthetic oligonucleotide
cauacuucuaaucaauggu

SEQ ID NO: 2506011 - RNA, 19 nt, Artificial Sequence
  Description of Artificial Sequence: Synthetic oligonucleotide
auauucuucaaaauccuua

SEQ ID NO: 2506012 - RNA, 19 nt, Artificial Sequence
  Description of Artificial Sequence: Synthetic oligonucleotide
ugaauuacaaagggauguc

SEQ ID NO: 2506013 - RNA, 19 nt, Artificial Sequence
  Description of Artificial Sequence: Synthetic oligonucleotide
uaaacugugcagguggaau

SEQ ID NO: 2506014 - RNA, 19 nt, Artificial Sequence
  Description of Artificial Sequence: Synthetic oligonucleotide
auagcuaggaaugcuggga

SEQ ID NO: 2506015 - RNA, 19 nt, Artificial Sequence
  Description of Artificial Sequence: Synthetic oligonucleotide
gagaauugacagccugaag

SEQ ID NO: 2506016 - RNA, 19 nt, Artificial Sequence
  Description of Artificial Sequence: Synthetic oligonucleotide
ucuaaucaaugguugcuuu

SEQ ID NO: 2506017 - RNA, 19 nt, Artificial Sequence
  Description of Artificial Sequence: Synthetic oligonucleotide
uccgcauacuucuaaucaa

SEQ ID NO: 2506018 - RNA, 19 nt, Artificial Sequence
  Description of Artificial Sequence: Synthetic oligonucleotide
uggaacggcucacccaacc

SEQ ID NO: 2506019 - RNA, 19 nt, Artificial Sequence
  Description of Artificial Sequence: Synthetic oligonucleotide
ggaucuuuucaggauaucc

SEQ ID NO: 2506020 - RNA, 19 nt, Artificial Sequence
  Description of Artificial Sequence: Synthetic oligonucleotide
agcuugaauagcugcagaa

SEQ ID NO: 2506021 - RNA, 19 nt, Artificial Sequence
  Description of Artificial Sequence: Synthetic oligonucleotide
cauaguacuaagcacuucu

SEQ ID NO: 2506022 - RNA, 19 nt, Artificial Sequence
  Description of Artificial Sequence: Synthetic oligonucleotide
uggccauaguacuaagcac

SEQ ID NO: 2506023 - RNA, 19 nt, Artificial Sequence
  Description of Artificial Sequence: Synthetic oligonucleotide
acugaggcacuuauauacg

SEQ ID NO: 2506024 - RNA, 19 nt, Artificial Sequence
  Description of Artificial Sequence: Synthetic oligonucleotide
uagcuaggaaugcugggaa

SEQ ID NO: 2506025 - RNA, 19 nt, Artificial Sequence
  Description of Artificial Sequence: Synthetic oligonucleotide
agcugcuugacuguuucag

SEQ ID NO: 2506026 - RNA, 19 nt, Artificial Sequence
  Description of Artificial Sequence: Synthetic oligonucleotide
auaauggccauaguacuaa

SEQ ID NO: 2506027 - RNA, 19 nt, Artificial Sequence
  Description of Artificial Sequence: Synthetic oligonucleotide
agggauguccaacagcuuu

SEQ ID NO: 2506028 - RNA, 19 nt, Artificial Sequence
  Description of Artificial Sequence: Synthetic oligonucleotide
aaagcccaaauaauagaau

SEQ ID NO: 2506029 - RNA, 19 nt, Artificial Sequence
  Description of Artificial Sequence: Synthetic oligonucleotide
aauugacagccugaaguaa

SEQ ID NO: 2506030 - RNA, 19 nt, Artificial Sequence
  Description of Artificial Sequence: Synthetic oligonucleotide
uaauggccauaguacuaag

SEQ ID NO: 2506031 - RNA, 19 nt, Artificial Sequence
  Description of Artificial Sequence: Synthetic oligonucleotide
guccgcauacuucuaauca

SEQ ID NO: 2506032 - RNA, 19 nt, Artificial Sequence
  Description of Artificial Sequence: Synthetic oligonucleotide
aggaucauuggaacggcuc

SEQ ID NO: 2506033 - RNA, 19 nt, Artificial Sequence
  Description of Artificial Sequence: Synthetic oligonucleotide
aaucaaugguugcuuugua

SEQ ID NO: 2506034 - RNA, 19 nt, Artificial Sequence
  Description of Artificial Sequence: Synthetic oligonucleotide
uggaauagcuaggaaugcu

SEQ ID NO: 2506035 - RNA, 19 nt, Artificial Sequence
  Description of Artificial Sequence: Synthetic oligonucleotide
aacagaggaggaacaaagu

SEQ ID NO: 2506036 - RNA, 19 nt, Artificial Sequence
  Description of Artificial Sequence: Synthetic oligonucleotide
agguauuucagcuguuaua

SEQ ID NO: 2506037 - RNA, 19 nt, Artificial Sequence
  Description of Artificial Sequence: Synthetic oligonucleotide
uuuguucuguguucuggau

SEQ ID NO: 2506038 - RNA, 19 nt, Artificial Sequence
  Description of Artificial Sequence: Synthetic oligonucleotide
agaauccaaaacaagcuua

SEQ ID NO: 2506039 - RNA, 19 nt, Artificial Sequence
  Description of Artificial Sequence: Synthetic oligonucleotide
aguaucuguaagccuguau

SEQ ID NO: 2506040 - RNA, 19 nt, Artificial Sequence
  Description of Artificial Sequence: Synthetic oligonucleotide
uccaccuaauuuguugaca

SEQ ID NO: 2506041 - RNA, 19 nt, Artificial Sequence
  Description of Artificial Sequence: Synthetic oligonucleotide
ugcaggcucucacauuugu

SEQ ID NO: 2506042 - RNA, 19 nt, Artificial Sequence
  Description of Artificial Sequence: Synthetic oligonucleotide
guaagccuguaucugcaac

SEQ ID NO: 2506043 - RNA, 19 nt, Artificial Sequence
  Description of Artificial Sequence: Synthetic oligonucleotide
gcuuuguaaccauuucucc

SEQ ID NO: 2506044 - RNA, 19 nt, Artificial Sequence
  Description of Artificial Sequence: Synthetic oligonucleotide
ucacccaaccagauauuaa

SEQ ID NO: 2506045 - RNA, 19 nt, Artificial Sequence
  Description of Artificial Sequence: Synthetic oligonucleotide
cccgagcugaauuacaaag

SEQ ID NO: 2506046 - RNA, 19 nt, Artificial Sequence
  Description of Artificial Sequence: Synthetic oligonucleotide
ugaggaucauuggaacggc

SEQ ID NO: 2506047 - RNA, 19 nt, Artificial Sequence
  Description of Artificial Sequence: Synthetic oligonucleotide
agcuaggaaugcugggaag

SEQ ID NO: 2506048 - RNA, 19 nt, Artificial Sequence
  Description of Artificial Sequence: Synthetic oligonucleotide
acguugagcaugucuaaau

SEQ ID NO: 2506049 - RNA, 19 nt, Artificial Sequence
  Description of Artificial Sequence: Synthetic oligonucleotide
ugaggcacuuauauacguu

SEQ ID NO: 2506050 - RNA, 19 nt, Artificial Sequence
  Description of Artificial Sequence: Synthetic oligonucleotide
caacauuuuguaaaagcgu

SEQ ID NO: 2506051 - RNA, 19 nt, Artificial Sequence
  Description of Artificial Sequence: Synthetic oligonucleotide
uucuaaucaaugguugcuu

SEQ ID NO: 2506052 - RNA, 19 nt, Artificial Sequence
  Description of Artificial Sequence: Synthetic oligonucleotide
guauuucagcuguuauaug

SEQ ID NO: 2506053 - RNA, 19 nt, Artificial Sequence
  Description of Artificial Sequence: Synthetic oligonucleotide
ucucccgagcugaauuaca

SEQ ID NO: 2506054 - RNA, 19 nt, Artificial Sequence
  Description of Artificial Sequence: Synthetic oligonucleotide
cgcaacauuuuguaaaagc

SEQ ID NO: 2506055 - RNA, 19 nt, Artificial Sequence
  Description of Artificial Sequence: Synthetic oligonucleotide
cgagcugaauuacaaaggg

SEQ ID NO: 2506056 - RNA, 19 nt, Artificial Sequence
  Description of Artificial Sequence: Synthetic oligonucleotide
uugguugccugcugaauua

SEQ ID NO: 2506057 - RNA, 19 nt, Artificial Sequence
  Description of Artificial Sequence: Synthetic oligonucleotide
ucuagcagcugggacauuu

SEQ ID NO: 2506058 - RNA, 19 nt, Artificial Sequence
  Description of Artificial Sequence: Synthetic oligonucleotide
uuccucauuguauguuuaa

SEQ ID NO: 2506059 - RNA, 19 nt, Artificial Sequence
  Description of Artificial Sequence: Synthetic oligonucleotide
acugugcagguggaauagc

SEQ ID NO: 2506060 - RNA, 19 nt, Artificial Sequence
  Description of Artificial Sequence: Synthetic oligonucleotide
uaaauucucccgagcugaa

SEQ ID NO: 2506061 - RNA, 19 nt, Artificial Sequence
  Description of Artificial Sequence: Synthetic oligonucleotide
ccgagcugaauuacaaagg

SEQ ID NO: 2506062 - RNA, 19 nt, Artificial Sequence
  Description of Artificial Sequence: Synthetic oligonucleotide
auaguacuaagcacuucug

SEQ ID NO: 2506063 - RNA, 19 nt, Artificial Sequence
  Description of Artificial Sequence: Synthetic oligonucleotide
cugcuugacuguuucagga

SEQ ID NO: 2506064 - RNA, 19 nt, Artificial Sequence
  Description of Artificial Sequence: Synthetic oligonucleotide
acauuucucugguaaucaa

SEQ ID NO: 2506065 - RNA, 19 nt, Artificial Sequence
  Description of Artificial Sequence: Synthetic oligonucleotide
gaaguaacaagaagaaguu

SEQ ID NO: 2506066 - RNA, 19 nt, Artificial Sequence
  Description of Artificial Sequence: Synthetic oligonucleotide
ccaaauaauagaauccaaa

SEQ ID NO: 2506067 - RNA, 19 nt, Artificial Sequence
  Description of Artificial Sequence: Synthetic oligonucleotide
gaucauuggaacggcucac

SEQ ID NO: 2506068 - RNA, 19 nt, Artificial Sequence
  Description of Artificial Sequence: Synthetic oligonucleotide
ugcauccaacagaggagga

SEQ ID NO: 2506069 - RNA, 19 nt, Artificial Sequence
  Description of Artificial Sequence: Synthetic oligonucleotide
uuuuaccguccgcauacuu

SEQ ID NO: 2506070 - RNA, 19 nt, Artificial Sequence
  Description of Artificial Sequence: Synthetic oligonucleotide
cuuauuuaucauauucaau

SEQ ID NO: 2506071 - RNA, 19 nt, Artificial Sequence
  Description of Artificial Sequence: Synthetic oligonucleotide
cauauucaauguacacuca

SEQ ID NO: 2506072 - RNA, 19 nt, Artificial Sequence
  Description of Artificial Sequence: Synthetic oligonucleotide
aagccuguaucugcaacau

SEQ ID NO: 2506073 - RNA, 19 nt, Artificial Sequence
  Description of Artificial Sequence: Synthetic oligonucleotide
auacguugagcaugucuaa

SEQ ID NO: 2506074 - RNA, 19 nt, Artificial Sequence
  Description of Artificial Sequence: Synthetic oligonucleotide
uguaagccuguaucugcaa

SEQ ID NO: 2506075 - RNA, 19 nt, Artificial Sequence
  Description of Artificial Sequence: Synthetic oligonucleotide
augagaauugacagccuga

SEQ ID NO: 2506076 - RNA, 19 nt, Artificial Sequence
  Description of Artificial Sequence: Synthetic oligonucleotide
aacggcucacccaaccaga

SEQ ID NO: 2506077 - RNA, 19 nt, Artificial Sequence
  Description of Artificial Sequence: Synthetic oligonucleotide
gaaugcugggaagcaauga

SEQ ID NO: 2506078 - RNA, 19 nt, Artificial Sequence
  Description of Artificial Sequence: Synthetic oligonucleotide
gguaaucaaugagaacugc

SEQ ID NO: 2506079 - RNA, 19 nt, Artificial Sequence
  Description of Artificial Sequence: Synthetic oligonucleotide
ggaucauuggaacggcuca

SEQ ID NO: 2506080 - RNA, 19 nt, Artificial Sequence
  Description of Artificial Sequence: Synthetic oligonucleotide
cuguuauauguccaccuaa

SEQ ID NO: 2506081 - RNA, 19 nt, Artificial Sequence
  Description of Artificial Sequence: Synthetic oligonucleotide
gcacuuauauacguugagc

SEQ ID NO: 2506082 - RNA, 19 nt, Artificial Sequence
  Description of Artificial Sequence: Synthetic oligonucleotide
gguauuucagcuguuauau

SEQ ID NO: 2506083 - RNA, 19 nt, Artificial Sequence
  Description of Artificial Sequence: Synthetic oligonucleotide
gcuaggaaugcugggaagc

SEQ ID NO: 2506084 - RNA, 19 nt, Artificial Sequence
  Description of Artificial Sequence: Synthetic oligonucleotide
acauuuuguaaaagcguaa

SEQ ID NO: 2506085 - RNA, 19 nt, Artificial Sequence
  Description of Artificial Sequence: Synthetic oligonucleotide
ccuuauuuaucauauucaa

SEQ ID NO: 2506086 - RNA, 19 nt, Artificial Sequence
  Description of Artificial Sequence: Synthetic oligonucleotide
gagcugaauuacaaaggga

SEQ ID NO: 2506087 - RNA, 19 nt, Artificial Sequence
  Description of Artificial Sequence: Synthetic oligonucleotide
auucucccgagcugaauua

SEQ ID NO: 2506088 - RNA, 19 nt, Artificial Sequence
  Description of Artificial Sequence: Synthetic oligonucleotide
guaacaagaagaaguuugu

SEQ ID NO: 2506089 - RNA, 19 nt, Artificial Sequence
  Description of Artificial Sequence: Synthetic oligonucleotide
cauuggaacggcucaccca

SEQ ID NO: 2506090 - RNA, 19 nt, Artificial Sequence
  Description of Artificial Sequence: Synthetic oligonucleotide
agcuuaaacugugcaggug

SEQ ID NO: 2506091 - RNA, 19 nt, Artificial Sequence
  Description of Artificial Sequence: Synthetic oligonucleotide
ggaagcaaugagaauugac

SEQ ID NO: 2506092 - RNA, 19 nt, Artificial Sequence
  Description of Artificial Sequence: Synthetic oligonucleotide
uacguugagcaugucuaaa

SEQ ID NO: 2506093 - RNA, 19 nt, Artificial Sequence
  Description of Artificial Sequence: Synthetic oligonucleotide
uuguaaccauuucuccauu

SEQ ID NO: 2506094 - RNA, 19 nt, Artificial Sequence
  Description of Artificial Sequence: Synthetic oligonucleotide
gauaaaacucugggcugca

SEQ ID NO: 2506095 - RNA, 19 nt, Artificial Sequence
  Description of Artificial Sequence: Synthetic oligonucleotide
aaauucucccgagcugaau

SEQ ID NO: 2506096 - RNA, 19 nt, Artificial Sequence
  Description of Artificial Sequence: Synthetic oligonucleotide
aggcucucacauuuguuuu

SEQ ID NO: 2506097 - RNA, 19 nt, Artificial Sequence
  Description of Artificial Sequence: Synthetic oligonucleotide
cuugacuguuucaggaucu

SEQ ID NO: 2506098 - RNA, 19 nt, Artificial Sequence
  Description of Artificial Sequence: Synthetic oligonucleotide
aaacugcaucgaauauuug

SEQ ID NO: 2506099 - RNA, 19 nt, Artificial Sequence
  Description of Artificial Sequence: Synthetic oligonucleotide
gcugaauuacaaagggaug

SEQ ID NO: 2506100 - RNA, 19 nt, Artificial Sequence
  Description of Artificial Sequence: Synthetic oligonucleotide
ggaacaaaguuuucagcua

SEQ ID NO: 2506101 - RNA, 19 nt, Artificial Sequence
  Description of Artificial Sequence: Synthetic oligonucleotide
acccaaccagauauuaacu

SEQ ID NO: 2506102 - RNA, 19 nt, Artificial Sequence
  Description of Artificial Sequence: Synthetic oligonucleotide
aggaaugcugggaagcaau

SEQ ID NO: 2506103 - RNA, 19 nt, Artificial Sequence
  Description of Artificial Sequence: Synthetic oligonucleotide
uucucccgagcugaauuac

SEQ ID NO: 2506104 - RNA, 19 nt, Artificial Sequence
  Description of Artificial Sequence: Synthetic oligonucleotide
cuugcgcaacauuuuguaa

SEQ ID NO: 2506105 - RNA, 19 nt, Artificial Sequence
  Description of Artificial Sequence: Synthetic oligonucleotide
ucccgagcugaauuacaaa

SEQ ID NO: 2506106 - RNA, 19 nt, Artificial Sequence
  Description of Artificial Sequence: Synthetic oligonucleotide
guacuaagcacuucugguu

SEQ ID NO: 2506107 - RNA, 19 nt, Artificial Sequence
  Description of Artificial Sequence: Synthetic oligonucleotide
cagaggaggaacaaaguuu

SEQ ID NO: 2506108 - RNA, 19 nt, Artificial Sequence
  Description of Artificial Sequence: Synthetic oligonucleotide
guccaccuaauuuguugac

SEQ ID NO: 2506109 - RNA, 19 nt, Artificial Sequence
  Description of Artificial Sequence: Synthetic oligonucleotide
gagguauuucagcuguuau

SEQ ID NO: 2506110 - RNA, 19 nt, Artificial Sequence
  Description of Artificial Sequence: Synthetic oligonucleotide
uaggaaugcugggaagcaa

SEQ ID NO: 2506111 - RNA, 19 nt, Artificial Sequence
  Description of Artificial Sequence: Synthetic oligonucleotide
acauuccucauuguauguu

SEQ ID NO: 2506112 - RNA, 19 nt, Artificial Sequence
  Description of Artificial Sequence: Synthetic oligonucleotide
cuaggaaugcugggaagca

SEQ ID NO: 2506113 - RNA, 19 nt, Artificial Sequence
  Description of Artificial Sequence: Synthetic oligonucleotide
cugcugaauuaugcugucc

SEQ ID NO: 2506114 - RNA, 19 nt, Artificial Sequence
  Description of Artificial Sequence: Synthetic oligonucleotide
cuaauuuguugacaauaau

SEQ ID NO: 2506115 - RNA, 19 nt, Artificial Sequence
  Description of Artificial Sequence: Synthetic oligonucleotide
ugacagccugaaguaacaa

SEQ ID NO: 2506116 - RNA, 19 nt, Artificial Sequence
  Description of Artificial Sequence: Synthetic oligonucleotide
gacuguuucaggaucuuuu

SEQ ID NO: 2506117 - RNA, 19 nt, Artificial Sequence
  Description of Artificial Sequence: Synthetic oligonucleotide
cauuucucugguaaucaau

SEQ ID NO: 2506118 - RNA, 19 nt, Artificial Sequence
  Description of Artificial Sequence: Synthetic oligonucleotide
acagcuuugcaggcucuca

SEQ ID NO: 2506119 - RNA, 19 nt, Artificial Sequence
  Description of Artificial Sequence: Synthetic oligonucleotide
auccaacagaggaggaaca

SEQ ID NO: 2506120 - RNA, 19 nt, Artificial Sequence
  Description of Artificial Sequence: Synthetic oligonucleotide
accguccgcauacuucuaa

SEQ ID NO: 2506121 - RNA, 19 nt, Artificial Sequence
  Description of Artificial Sequence: Synthetic oligonucleotide
cucccgagcugaauuacaa

SEQ ID NO: 2506122 - RNA, 19 nt, Artificial Sequence
  Description of Artificial Sequence: Synthetic oligonucleotide
ggccauaguacuaagcacu

SEQ ID NO: 2506123 - RNA, 19 nt, Artificial Sequence
  Description of Artificial Sequence: Synthetic oligonucleotide
gcaugucuaaauaaauucu

SEQ ID NO: 2506124 - RNA, 19 nt, Artificial Sequence
  Description of Artificial Sequence: Synthetic oligonucleotide
uuggaacggcucacccaac

SEQ ID NO: 2506125 - RNA, 19 nt, Artificial Sequence
  Description of Artificial Sequence: Synthetic oligonucleotide
ggaaugcugggaagcaaug

SEQ ID NO: 2506126 - RNA, 19 nt, Artificial Sequence
  Description of Artificial Sequence: Synthetic oligonucleotide
uaucugcaacauuccucau

SEQ ID NO: 2506127 - RNA, 19 nt, Artificial Sequence
  Description of Artificial Sequence: Synthetic oligonucleotide
cugugcagguggaauagcu

SEQ ID NO: 2506128 - RNA, 19 nt, Artificial Sequence
  Description of Artificial Sequence: Synthetic oligonucleotide
gcaucgaauauuugaggua

SEQ ID NO: 2506129 - RNA, 19 nt, Artificial Sequence
  Description of Artificial Sequence: Synthetic oligonucleotide
aaguaucuguaagccugua

SEQ ID NO: 2506130 - RNA, 19 nt, Artificial Sequence
  Description of Artificial Sequence: Synthetic oligonucleotide
caggcucucacauuuguuu

SEQ ID NO: 2506131 - RNA, 19 nt, Artificial Sequence
  Description of Artificial Sequence: Synthetic oligonucleotide
ggaacggcucacccaacca

SEQ ID NO: 2506132 - RNA, 19 nt, Artificial Sequence
  Description of Artificial Sequence: Synthetic oligonucleotide
uauauacguugagcauguc

SEQ ID NO: 2506133 - RNA, 19 nt, Artificial Sequence
  Description of Artificial Sequence: Synthetic oligonucleotide
cgcauacuucuaaucaaug

SEQ ID NO: 2506134 - RNA, 19 nt, Artificial Sequence
  Description of Artificial Sequence: Synthetic oligonucleotide
cagcuaccaucugaggauc

SEQ ID NO: 2506135 - RNA, 19 nt, Artificial Sequence
  Description of Artificial Sequence: Synthetic oligonucleotide
caaaguuuucagcuaccau

SEQ ID NO: 2506136 - RNA, 19 nt, Artificial Sequence
  Description of Artificial Sequence: Synthetic oligonucleotide
cuguaucugcaacauuccu

SEQ ID NO: 2506137 - RNA, 19 nt, Artificial Sequence
  Description of Artificial Sequence: Synthetic oligonucleotide
cucacccaaccagauauua

SEQ ID NO: 2506138 - RNA, 19 nt, Artificial Sequence
  Description of Artificial Sequence: Synthetic oligonucleotide
cugaauuaugcugucccau

SEQ ID NO: 2506139 - RNA, 19 nt, Artificial Sequence
  Description of Artificial Sequence: Synthetic oligonucleotide
caggaucuuuucaggauau

SEQ ID NO: 2506140 - RNA, 19 nt, Artificial Sequence
  Description of Artificial Sequence: Synthetic oligonucleotide
ugcuacccagcugcuugac

SEQ ID NO: 2506141 - RNA, 19 nt, Artificial Sequence
  Description of Artificial Sequence: Synthetic oligonucleotide
auaugcuacccagcugcuu

SEQ ID NO: 2506142 - RNA, 19 nt, Artificial Sequence
  Description of Artificial Sequence: Synthetic oligonucleotide
ccugcugaauuaugcuguc

SEQ ID NO: 2506143 - RNA, 19 nt, Artificial Sequence
  Description of Artificial Sequence: Synthetic oligonucleotide
caaugagaauugacagccu

SEQ ID NO: 2506144 - RNA, 19 nt, Artificial Sequence
  Description of Artificial Sequence: Synthetic oligonucleotide
agcuaccaucugaggauca

SEQ ID NO: 2506145 - RNA, 19 nt, Artificial Sequence
  Description of Artificial Sequence: Synthetic oligonucleotide
gguugccugcugaauuaug

SEQ ID NO: 2506146 - RNA, 19 nt, Artificial Sequence
  Description of Artificial Sequence: Synthetic oligonucleotide
uaccguccgcauacuucua

SEQ ID NO: 2506147 - RNA, 19 nt, Artificial Sequence
  Description of Artificial Sequence: Synthetic oligonucleotide
gcgcaacauuuuguaaaag

SEQ ID NO: 2506148 - RNA, 19 nt, Artificial Sequence
  Description of Artificial Sequence: Synthetic oligonucleotide
cagguggaauagcuaggaa

SEQ ID NO: 2506149 - RNA, 19 nt, Artificial Sequence
  Description of Artificial Sequence: Synthetic oligonucleotide
gaggaucauuggaacggcu

SEQ ID NO: 2506150 - RNA, 19 nt, Artificial Sequence
  Description of Artificial Sequence: Synthetic oligonucleotide
gccugcugaauuaugcugu

SEQ ID NO: 2506151 - RNA, 19 nt, Artificial Sequence
  Description of Artificial Sequence: Synthetic oligonucleotide
acggcucacccaaccagau

SEQ ID NO: 2506152 - RNA, 19 nt, Artificial Sequence
  Description of Artificial Sequence: Synthetic oligonucleotide
cguccgcauacuucuaauc

SEQ ID NO: 2506153 - RNA, 19 nt, Artificial Sequence
  Description of Artificial Sequence: Synthetic oligonucleotide
ccauaguacuaagcacuuc

SEQ ID NO: 2506154 - RNA, 19 nt, Artificial Sequence
  Description of Artificial Sequence: Synthetic oligonucleotide
cuuugcaggcucucacauu

SEQ ID NO: 2506155 - RNA, 19 nt, Artificial Sequence
  Description of Artificial Sequence: Synthetic oligonucleotide
cguugagcaugucuaaaua

SEQ ID NO: 2506156 - RNA, 19 nt, Artificial Sequence
  Description of Artificial Sequence: Synthetic oligonucleotide
caacagcuuugcaggcucu

SEQ ID NO: 2506157 - RNA, 19 nt, Artificial Sequence
  Description of Artificial Sequence: Synthetic oligonucleotide
acccagcugcuugacuguu

SEQ ID NO: 2506158 - RNA, 19 nt, Artificial Sequence
  Description of Artificial Sequence: Synthetic oligonucleotide
cuaccaucugaggaucauu

SEQ ID NO: 2506159 - RNA, 19 nt, Artificial Sequence
  Description of Artificial Sequence: Synthetic oligonucleotide
ccgcauacuucuaaucaau

SEQ ID NO: 2506160 - RNA, 19 nt, Artificial Sequence
  Description of Artificial Sequence: Synthetic oligonucleotide
gcuacccagcugcuugacu

SEQ ID NO: 2506161 - RNA, 19 nt, Artificial Sequence
  Description of Artificial Sequence: Synthetic oligonucleotide
gccauaguacuaagcacuu

SEQ ID NO: 2506162 - RNA, 19 nt, Artificial Sequence
  Description of Artificial Sequence: Synthetic oligonucleotide
gcuaccaucugaggaucau

SEQ ID NO: 2506163 - RNA, 19 nt, Artificial Sequence
  Description of Artificial Sequence: Synthetic oligonucleotide
guucuguguucuggauauu

SEQ ID NO: 2506164 - RNA, 19 nt, Artificial Sequence
  Description of Artificial Sequence: Synthetic oligonucleotide
gcucacccaaccagauauu

SEQ ID NO: 2506165 - RNA, 19 nt, Artificial Sequence
  Description of Artificial Sequence: Synthetic oligonucleotide
cggcucacccaaccagaua

SEQ ID NO: 2506166 - RNA, 19 nt, Artificial Sequence
  Description of Artificial Sequence: Synthetic oligonucleotide
aacauuagcaaguaaaauc

SEQ ID NO: 2506167 - RNA, 19 nt, Artificial Sequence
  Description of Artificial Sequence: Synthetic oligonucleotide
aaugcuauugcuuugcuag

SEQ ID NO: 2506168 - RNA, 19 nt, Artificial Sequence
  Description of Artificial Sequence: Synthetic oligonucleotide
aauacuuucuguuuguucu

SEQ ID NO: 2506169 - RNA, 19 nt, Artificial Sequence
  Description of Artificial Sequence: Synthetic oligonucleotide
uauuaugugaccuauauau

SEQ ID NO: 2506170 - RNA, 19 nt, Artificial Sequence
  Description of Artificial Sequence: Synthetic oligonucleotide
aguacuuucucccagccgc

SEQ ID NO: 2506171 - RNA, 19 nt, Artificial Sequence
  Description of Artificial Sequence: Synthetic oligonucleotide
uuaauuagagcuuucauuc

SEQ ID NO: 2506172 - RNA, 19 nt, Artificial Sequence
  Description of Artificial Sequence: Synthetic oligonucleotide
aaagaaaauauugacaggu

SEQ ID NO: 2506173 - RNA, 19 nt, Artificial Sequence
  Description of Artificial Sequence: Synthetic oligonucleotide
ucaaggagaauacauuugg

SEQ ID NO: 2506174 - RNA, 19 nt, Artificial Sequence
  Description of Artificial Sequence: Synthetic oligonucleotide
uaagcuugaaaucugggag

SEQ ID NO: 2506175 - RNA, 19 nt, Artificial Sequence
  Description of Artificial Sequence: Synthetic oligonucleotide
aaauaugaagauaugagug

SEQ ID NO: 2506176 - RNA, 19 nt, Artificial Sequence
  Description of Artificial Sequence: Synthetic oligonucleotide
uauaccaagagacaauacc

SEQ ID NO: 2506177 - RNA, 19 nt, Artificial Sequence
  Description of Artificial Sequence: Synthetic oligonucleotide
uacaagauaagcuugaaau

SEQ ID NO: 2506178 - RNA, 19 nt, Artificial Sequence
  Description of Artificial Sequence: Synthetic oligonucleotide
uugagaaggaaguacaucc

SEQ ID NO: 2506179 - RNA, 19 nt, Artificial Sequence
  Description of Artificial Sequence: Synthetic oligonucleotide
gaugguacaaucuauuaug

SEQ ID NO: 2506180 - RNA, 19 nt, Artificial Sequence
  Description of Artificial Sequence: Synthetic oligonucleotide
aagcuuaccaaaugaacgg

SEQ ID NO: 2506181 - RNA, 19 nt, Artificial Sequence
  Description of Artificial Sequence: Synthetic oligonucleotide
aauaugaagauaugaguga

SEQ ID NO: 2506182 - RNA, 19 nt, Artificial Sequence
  Description of Artificial Sequence: Synthetic oligonucleotide
ucucaaaaugccaagauaa

SEQ ID NO: 2506183 - RNA, 19 nt, Artificial Sequence
  Description of Artificial Sequence: Synthetic oligonucleotide
uuagcaaguaaaaucaccu

SEQ ID NO: 2506184 - RNA, 19 nt, Artificial Sequence
  Description of Artificial Sequence: Synthetic oligonucleotide
gaagcuuaccaaaugaacg

SEQ ID NO: 2506185 - RNA, 19 nt, Artificial Sequence
  Description of Artificial Sequence: Synthetic oligonucleotide
ugacagguuauucaaauug

SEQ ID NO: 2506186 - RNA, 19 nt, Artificial Sequence
  Description of Artificial Sequence: Synthetic oligonucleotide
agguuauucaaauugaggu

SEQ ID NO: 2506187 - RNA, 19 nt, Artificial Sequence
  Description of Artificial Sequence: Synthetic oligonucleotide
aauggaaaugcccuuugag

SEQ ID NO: 2506188 - RNA, 19 nt, Artificial Sequence
  Description of Artificial Sequence: Synthetic oligonucleotide
agaccaaggacauuucugc

SEQ ID NO: 2506189 - RNA, 19 nt, Artificial Sequence
  Description of Artificial Sequence: Synthetic oligonucleotide
uuaacaaauacaagauaag

SEQ ID NO: 2506190 - RNA, 19 nt, Artificial Sequence
  Description of Artificial Sequence: Synthetic oligonucleotide
auacccucuaugcugaacc

SEQ ID NO: 2506191 - RNA, 19 nt, Artificial Sequence
  Description of Artificial Sequence: Synthetic oligonucleotide
aaaaucaccugucauuugu

SEQ ID NO: 2506192 - RNA, 19 nt, Artificial Sequence
  Description of Artificial Sequence: Synthetic oligonucleotide
uucaaauuuaccaagccua

SEQ ID NO: 2506193 - RNA, 19 nt, Artificial Sequence
  Description of Artificial Sequence: Synthetic oligonucleotide
aacaaauacaagauaagcu

SEQ ID NO: 2506194 - RNA, 19 nt, Artificial Sequence
  Description of Artificial Sequence: Synthetic oligonucleotide
aaggagaauacauuuggcu

SEQ ID NO: 2506195 - RNA, 19 nt, Artificial Sequence
  Description of Artificial Sequence: Synthetic oligonucleotide
uuaugugaccuauauauac

SEQ ID NO: 2506196 - RNA, 19 nt, Artificial Sequence
  Description of Artificial Sequence: Synthetic oligonucleotide
uuccagaucuccaugaagc

SEQ ID NO: 2506197 - RNA, 19 nt, Artificial Sequence
  Description of Artificial Sequence: Synthetic oligonucleotide
aaauuuaccaagccuauuu

SEQ ID NO: 2506198 - RNA, 19 nt, Artificial Sequence
  Description of Artificial Sequence: Synthetic oligonucleotide
aggagaauacauuuggcuc

SEQ ID NO: 2506199 - RNA, 19 nt, Artificial Sequence
  Description of Artificial Sequence: Synthetic oligonucleotide
gagacaauacccucuaugc

SEQ ID NO: 2506200 - RNA, 19 nt, Artificial Sequence
  Description of Artificial Sequence: Synthetic oligonucleotide
uucaaauugagguucaaau

SEQ ID NO: 2506201 - RNA, 19 nt, Artificial Sequence
  Description of Artificial Sequence: Synthetic oligonucleotide
uaacaaauacaagauaagc

SEQ ID NO: 2506202 - RNA, 19 nt, Artificial Sequence
  Description of Artificial Sequence: Synthetic oligonucleotide
gacaauacccucuaugcug

SEQ ID NO: 2506203 - RNA, 19 nt, Artificial Sequence
  Description of Artificial Sequence: Synthetic oligonucleotide
auuuggcuccuauugaugg

SEQ ID NO: 2506204 - RNA, 19 nt, Artificial Sequence
  Description of Artificial Sequence: Synthetic oligonucleotide
aauuagagcuuucauuccu

SEQ ID NO: 2506205 - RNA, 19 nt, Artificial Sequence
  Description of Artificial Sequence: Synthetic oligonucleotide
ucuuucaucccaaaguuaa

SEQ ID NO: 2506206 - RNA, 19 nt, Artificial Sequence
  Description of Artificial Sequence: Synthetic oligonucleotide
aauggcagaguacuuucuc

SEQ ID NO: 2506207 - RNA, 19 nt, Artificial Sequence
  Description of Artificial Sequence: Synthetic oligonucleotide
uuuguuagaaaagaaaaua

SEQ ID NO: 2506208 - RNA, 19 nt, Artificial Sequence
  Description of Artificial Sequence: Synthetic oligonucleotide
ucuauuaugugaccuauau

SEQ ID NO: 2506209 - RNA, 19 nt, Artificial Sequence
  Description of Artificial Sequence: Synthetic oligonucleotide
aaaucugggaguucuucag

SEQ ID NO: 2506210 - RNA, 19 nt, Artificial Sequence
  Description of Artificial Sequence: Synthetic oligonucleotide
augaacggcugacagaugg

SEQ ID NO: 2506211 - RNA, 19 nt, Artificial Sequence
  Description of Artificial Sequence: Synthetic oligonucleotide
auacauuuggcuccuauug

SEQ ID NO: 2506212 - RNA, 19 nt, Artificial Sequence
  Description of Artificial Sequence: Synthetic oligonucleotide
ucuaugcugaaccuaauuc

SEQ ID NO: 2506213 - RNA, 19 nt, Artificial Sequence
  Description of Artificial Sequence: Synthetic oligonucleotide
auuagcaaguaaaaucacc

SEQ ID NO: 2506214 - RNA, 19 nt, Artificial Sequence
  Description of Artificial Sequence: Synthetic oligonucleotide
uaugugaccuauauauacc

SEQ ID NO: 2506215 - RNA, 19 nt, Artificial Sequence
  Description of Artificial Sequence: Synthetic oligonucleotide
uauauauaccaagagacaa

SEQ ID NO: 2506216 - RNA, 19 nt, Artificial Sequence
  Description of Artificial Sequence: Synthetic oligonucleotide
aauuaauuagagcuuucau

SEQ ID NO: 2506217 - RNA, 19 nt, Artificial Sequence
  Description of Artificial Sequence: Synthetic oligonucleotide
auuaauuagagcuuucauu

SEQ ID NO: 2506218 - RNA, 19 nt, Artificial Sequence
  Description of Artificial Sequence: Synthetic oligonucleotide
aaaugaacggcugacagau

SEQ ID NO: 2506219 - RNA, 19 nt, Artificial Sequence
  Description of Artificial Sequence: Synthetic oligonucleotide
uggagaaucaccaccucag

SEQ ID NO: 2506220 - RNA, 19 nt, Artificial Sequence
  Description of Artificial Sequence: Synthetic oligonucleotide
uucuucagguuucaaauac

SEQ ID NO: 2506221 - RNA, 19 nt, Artificial Sequence
  Description of Artificial Sequence: Synthetic oligonucleotide
cuagcauucuuucauuugc

SEQ ID NO: 2506222 - RNA, 19 nt, Artificial Sequence
  Description of Artificial Sequence: Synthetic oligonucleotide
cuauugauggcaaggagac

SEQ ID NO: 2506223 - RNA, 19 nt, Artificial Sequence
  Description of Artificial Sequence: Synthetic oligonucleotide
aaggaaguacauccuggac

SEQ ID NO: 2506224 - RNA, 19 nt, Artificial Sequence
  Description of Artificial Sequence: Synthetic oligonucleotide
uguuagaaaagaaaauauu

SEQ ID NO: 2506225 - RNA, 19 nt, Artificial Sequence
  Description of Artificial Sequence: Synthetic oligonucleotide
ugaccuauauauaccaaga

SEQ ID NO: 2506226 - RNA, 19 nt, Artificial Sequence
  Description of Artificial Sequence: Synthetic oligonucleotide
agccuauuucuacaaaugg

SEQ ID NO: 2506227 - RNA, 19 nt, Artificial Sequence
  Description of Artificial Sequence: Synthetic oligonucleotide
guuaacaaauacaagauaa

SEQ ID NO: 2506228 - RNA, 19 nt, Artificial Sequence
  Description of Artificial Sequence: Synthetic oligonucleotide
ucuagcaggagccaucugu

SEQ ID NO: 2506229 - RNA, 19 nt, Artificial Sequence
  Description of Artificial Sequence: Synthetic oligonucleotide
ugaagcuuaccaaaugaac

SEQ ID NO: 2506230 - RNA, 19 nt, Artificial Sequence
  Description of Artificial Sequence: Synthetic oligonucleotide
aaugccaagauaacauuag

SEQ ID NO: 2506231 - RNA, 19 nt, Artificial Sequence
  Description of Artificial Sequence: Synthetic oligonucleotide
aaauuaauuagagcuuuca

SEQ ID NO: 2506232 - RNA, 19 nt, Artificial Sequence
  Description of Artificial Sequence: Synthetic oligonucleotide
gaagauaugagugaguucu

SEQ ID NO: 2506233 - RNA, 19 nt, Artificial Sequence
  Description of Artificial Sequence: Synthetic oligonucleotide
ugccaagauaacauuagca

SEQ ID NO: 2506234 - RNA, 19 nt, Artificial Sequence
  Description of Artificial Sequence: Synthetic oligonucleotide
acauuagcaaguaaaauca

SEQ ID NO: 2506235 - RNA, 19 nt, Artificial Sequence
  Description of Artificial Sequence: Synthetic oligonucleotide
cuucaguggaaauaugaag

SEQ ID NO: 2506236 - RNA, 19 nt, Artificial Sequence
  Description of Artificial Sequence: Synthetic oligonucleotide
agcaaguaaaaucaccugu

SEQ ID NO: 2506237 - RNA, 19 nt, Artificial Sequence
  Description of Artificial Sequence: Synthetic oligonucleotide
gaaaugcccuuugagaagg

SEQ ID NO: 2506238 - RNA, 19 nt, Artificial Sequence
  Description of Artificial Sequence: Synthetic oligonucleotide
cauuuguuagaaaagaaaa

SEQ ID NO: 2506239 - RNA, 19 nt, Artificial Sequence
  Description of Artificial Sequence: Synthetic oligonucleotide
aauugagguucaaauuuac

SEQ ID NO: 2506240 - RNA, 19 nt, Artificial Sequence
  Description of Artificial Sequence: Synthetic oligonucleotide
uggaaaugcccuuugagaa

SEQ ID NO: 2506241 - RNA, 19 nt, Artificial Sequence
  Description of Artificial Sequence: Synthetic oligonucleotide
gagguucaaauuuaccaag

SEQ ID NO: 2506242 - RNA, 19 nt, Artificial Sequence
  Description of Artificial Sequence: Synthetic oligonucleotide
uggaaauaugaagauauga

SEQ ID NO: 2506243 - RNA, 19 nt, Artificial Sequence
  Description of Artificial Sequence: Synthetic oligonucleotide
aucuccaugaagcuuacca

SEQ ID NO: 2506244 - RNA, 19 nt, Artificial Sequence
  Description of Artificial Sequence: Synthetic oligonucleotide
ucaaaaugccaagauaaca

SEQ ID NO: 2506245 - RNA, 19 nt, Artificial Sequence
  Description of Artificial Sequence: Synthetic oligonucleotide
uacauccuggacuugagga

SEQ ID NO: 2506246 - RNA, 19 nt, Artificial Sequence
  Description of Artificial Sequence: Synthetic oligonucleotide
agagacaauacccucuaug

SEQ ID NO: 2506247 - RNA, 19 nt, Artificial Sequence
  Description of Artificial Sequence: Synthetic oligonucleotide
aguaaaaucaccugucauu

SEQ ID NO: 2506248 - RNA, 19 nt, Artificial Sequence
  Description of Artificial Sequence: Synthetic oligonucleotide
agaaucaccaccucaggca

SEQ ID NO: 2506249 - RNA, 19 nt, Artificial Sequence
  Description of Artificial Sequence: Synthetic oligonucleotide
uuucuuucaucccaaaguu

SEQ ID NO: 2506250 - RNA, 19 nt, Artificial Sequence
  Description of Artificial Sequence: Synthetic oligonucleotide
aggaaguacauccuggacu

SEQ ID NO: 2506251 - RNA, 19 nt, Artificial Sequence
  Description of Artificial Sequence: Synthetic oligonucleotide
ugaguucugguuuugugca

SEQ ID NO: 2506252 - RNA, 19 nt, Artificial Sequence
  Description of Artificial Sequence: Synthetic oligonucleotide
accuauauauaccaagaga

SEQ ID NO: 2506253 - RNA, 19 nt, Artificial Sequence
  Description of Artificial Sequence: Synthetic oligonucleotide
auaagcuugaaaucuggga

SEQ ID NO: 2506254 - RNA, 19 nt, Artificial Sequence
  Description of Artificial Sequence: Synthetic oligonucleotide
ugucauuuguuagaaaaga

SEQ ID NO: 2506255 - RNA, 19 nt, Artificial Sequence
  Description of Artificial Sequence: Synthetic oligonucleotide
ugagguucaaauuuaccaa

SEQ ID NO: 2506256 - RNA, 19 nt, Artificial Sequence
  Description of Artificial Sequence: Synthetic oligonucleotide
gguacaaucuauuauguga

SEQ ID NO: 2506257 - RNA, 19 nt, Artificial Sequence
  Description of Artificial Sequence: Synthetic oligonucleotide
caaaguuaacaaauacaag

SEQ ID NO: 2506258 - RNA, 19 nt, Artificial Sequence
  Description of Artificial Sequence: Synthetic oligonucleotide
uuuguucucuucauguuuc

SEQ ID NO: 2506259 - RNA, 19 nt, Artificial Sequence
  Description of Artificial Sequence: Synthetic oligonucleotide
uaauucucaaaaugccaag

SEQ ID NO: 2506260 - RNA, 19 nt, Artificial Sequence
  Description of Artificial Sequence: Synthetic oligonucleotide
ucuacaaauggcagaguac

SEQ ID NO: 2506261 - RNA, 19 nt, Artificial Sequence
  Description of Artificial Sequence: Synthetic oligonucleotide
aaguuaacaaauacaagau

SEQ ID NO: 2506262 - RNA, 19 nt, Artificial Sequence
  Description of Artificial Sequence: Synthetic oligonucleotide
ugcaucaaggagaauacau

SEQ ID NO: 2506263 - RNA, 19 nt, Artificial Sequence
  Description of Artificial Sequence: Synthetic oligonucleotide
cuauuucuacaaauggcag

SEQ ID NO: 2506264 - RNA, 19 nt, Artificial Sequence
  Description of Artificial Sequence: Synthetic oligonucleotide
augccaagauaacauuagc

SEQ ID NO: 2506265 - RNA, 19 nt, Artificial Sequence
  Description of Artificial Sequence: Synthetic oligonucleotide
aaguaaaaucaccugucau

SEQ ID NO: 2506266 - RNA, 19 nt, Artificial Sequence
  Description of Artificial Sequence: Synthetic oligonucleotide
uaugcugaaccuaauucuc

SEQ ID NO: 2506267 - RNA, 19 nt, Artificial Sequence
  Description of Artificial Sequence: Synthetic oligonucleotide
gugaccuauauauaccaag

SEQ ID NO: 2506268 - RNA, 19 nt, Artificial Sequence
  Description of Artificial Sequence: Synthetic oligonucleotide
uucuacaaauggcagagua

SEQ ID NO: 2506269 - RNA, 19 nt, Artificial Sequence
  Description of Artificial Sequence: Synthetic oligonucleotide
guuauucaaauugagguuc

SEQ ID NO: 2506270 - RNA, 19 nt, Artificial Sequence
  Description of Artificial Sequence: Synthetic oligonucleotide
aagcuugaaaucugggagu

SEQ ID NO: 2506271 - RNA, 19 nt, Artificial Sequence
  Description of Artificial Sequence: Synthetic oligonucleotide
uauugcuuugcuagcauuc

SEQ ID NO: 2506272 - RNA, 19 nt, Artificial Sequence
  Description of Artificial Sequence: Synthetic oligonucleotide
gaccuauauauaccaagag

SEQ ID NO: 2506273 - RNA, 19 nt, Artificial Sequence
  Description of Artificial Sequence: Synthetic oligonucleotide
aauacauuuggcuccuauu

SEQ ID NO: 2506274 - RNA, 19 nt, Artificial Sequence
  Description of Artificial Sequence: Synthetic oligonucleotide
auaugaagauaugagugag

SEQ ID NO: 2506275 - RNA, 19 nt, Artificial Sequence
  Description of Artificial Sequence: Synthetic oligonucleotide
uuuaccaagccuauuucua

SEQ ID NO: 2506276 - RNA, 19 nt, Artificial Sequence
  Description of Artificial Sequence: Synthetic oligonucleotide
auggaaaugcccuuugaga

SEQ ID NO: 2506277 - RNA, 19 nt, Artificial Sequence
  Description of Artificial Sequence: Synthetic oligonucleotide
auugacagguuauucaaau

SEQ ID NO: 2506278 - RNA, 19 nt, Artificial Sequence
  Description of Artificial Sequence: Synthetic oligonucleotide
auauugacagguuauucaa

SEQ ID NO: 2506279 - RNA, 19 nt, Artificial Sequence
  Description of Artificial Sequence: Synthetic oligonucleotide
gaugcucccaaauuaauua

SEQ ID NO: 2506280 - RNA, 19 nt, Artificial Sequence
  Description of Artificial Sequence: Synthetic oligonucleotide
auuuaccaagccuauuucu

SEQ ID NO: 2506281 - RNA, 19 nt, Artificial Sequence
  Description of Artificial Sequence: Synthetic oligonucleotide
gauaagcuugaaaucuggg

SEQ ID NO: 2506282 - RNA, 19 nt, Artificial Sequence
  Description of Artificial Sequence: Synthetic oligonucleotide
ugcccuuugagaaggaagu

SEQ ID NO: 2506283 - RNA, 19 nt, Artificial Sequence
  Description of Artificial Sequence: Synthetic oligonucleotide
uuauucaaauugagguuca

SEQ ID NO: 2506284 - RNA, 19 nt, Artificial Sequence
  Description of Artificial Sequence: Synthetic oligonucleotide
uacauuuggcuccuauuga

SEQ ID NO: 2506285 - RNA, 19 nt, Artificial Sequence
  Description of Artificial Sequence: Synthetic oligonucleotide
gagaaucaccaccucaggc

SEQ ID NO: 2506286 - RNA, 19 nt, Artificial Sequence
  Description of Artificial Sequence: Synthetic oligonucleotide
accaagagacaauacccuc

SEQ ID NO: 2506287 - RNA, 19 nt, Artificial Sequence
  Description of Artificial Sequence: Synthetic oligonucleotide
gugaguucugguuuugugc

SEQ ID NO: 2506288 - RNA, 19 nt, Artificial Sequence
  Description of Artificial Sequence: Synthetic oligonucleotide
ucaaauuuaccaagccuau

SEQ ID NO: 2506289 - RNA, 19 nt, Artificial Sequence
  Description of Artificial Sequence: Synthetic oligonucleotide
cugucauuuguuagaaaag

SEQ ID NO: 2506290 - RNA, 19 nt, Artificial Sequence
  Description of Artificial Sequence: Synthetic oligonucleotide
uauauaccaagagacaaua

SEQ ID NO: 2506291 - RNA, 19 nt, Artificial Sequence
  Description of Artificial Sequence: Synthetic oligonucleotide
ucauguuuccagaucucca

SEQ ID NO: 2506292 - RNA, 19 nt, Artificial Sequence
  Description of Artificial Sequence: Synthetic oligonucleotide
ucaauggaaaugcccuuug

SEQ ID NO: 2506293 - RNA, 19 nt, Artificial Sequence
  Description of Artificial Sequence: Synthetic oligonucleotide
cuuaccaaaugaacggcug

SEQ ID NO: 2506294 - RNA, 19 nt, Artificial Sequence
  Description of Artificial Sequence: Synthetic oligonucleotide
gauggcaaggagaccaagg

SEQ ID NO: 2506295 - RNA, 19 nt, Artificial Sequence
  Description of Artificial Sequence: Synthetic oligonucleotide
uuaccaaaugaacggcuga

SEQ ID NO: 2506296 - RNA, 19 nt, Artificial Sequence
  Description of Artificial Sequence: Synthetic oligonucleotide
uccuauugauggcaaggag

SEQ ID NO: 2506297 - RNA, 19 nt, Artificial Sequence
  Description of Artificial Sequence: Synthetic oligonucleotide
uuucaaauacuuucuguuu

SEQ ID NO: 2506298 - RNA, 19 nt, Artificial Sequence
  Description of Artificial Sequence: Synthetic oligonucleotide
aaggagaccaaggacauuu

SEQ ID NO: 2506299 - RNA, 19 nt, Artificial Sequence
  Description of Artificial Sequence: Synthetic oligonucleotide
cuaauucucaaaaugccaa

SEQ ID NO: 2506300 - RNA, 19 nt, Artificial Sequence
  Description of Artificial Sequence: Synthetic oligonucleotide
uggagcaaaaugacuaaaa

SEQ ID NO: 2506301 - RNA, 19 nt, Artificial Sequence
  Description of Artificial Sequence: Synthetic oligonucleotide
augugaccuauauauacca

SEQ ID NO: 2506302 - RNA, 19 nt, Artificial Sequence
  Description of Artificial Sequence: Synthetic oligonucleotide
gagaaggaaguacauccug

SEQ ID NO: 2506303 - RNA, 19 nt, Artificial Sequence
  Description of Artificial Sequence: Synthetic oligonucleotide
uucucaaaaugccaagaua

SEQ ID NO: 2506304 - RNA, 19 nt, Artificial Sequence
  Description of Artificial Sequence: Synthetic oligonucleotide
uuaccaagccuauuucuac

SEQ ID NO: 2506305 - RNA, 19 nt, Artificial Sequence
  Description of Artificial Sequence: Synthetic oligonucleotide
ucuguggagcaaaaugacu

SEQ ID NO: 2506306 - RNA, 19 nt, Artificial Sequence
  Description of Artificial Sequence: Synthetic oligonucleotide
uuugggcaaaugcuauugc

SEQ ID NO: 2506307 - RNA, 19 nt, Artificial Sequence
  Description of Artificial Sequence: Synthetic oligonucleotide
uaugaagauaugagugagu

SEQ ID NO: 2506308 - RNA, 19 nt, Artificial Sequence
  Description of Artificial Sequence: Synthetic oligonucleotide
aauacccucuaugcugaac

SEQ ID NO: 2506309 - RNA, 19 nt, Artificial Sequence
  Description of Artificial Sequence: Synthetic oligonucleotide
aaucuauuaugugaccuau

SEQ ID NO: 2506310 - RNA, 19 nt, Artificial Sequence
  Description of Artificial Sequence: Synthetic oligonucleotide
agguucaaauuuaccaagc

SEQ ID NO: 2506311 - RNA, 19 nt, Artificial Sequence
  Description of Artificial Sequence: Synthetic oligonucleotide
aagauaagcuugaaaucug

SEQ ID NO: 2506312 - RNA, 19 nt, Artificial Sequence
  Description of Artificial Sequence: Synthetic oligonucleotide
ugacagaugguacaaucua

SEQ ID NO: 2506313 - RNA, 19 nt, Artificial Sequence
  Description of Artificial Sequence: Synthetic oligonucleotide
uucucuucauguuuccaga

SEQ ID NO: 2506314 - RNA, 19 nt, Artificial Sequence
  Description of Artificial Sequence: Synthetic oligonucleotide
acaaucuauuaugugaccu

SEQ ID NO: 2506315 - RNA, 19 nt, Artificial Sequence
  Description of Artificial Sequence: Synthetic oligonucleotide
guacaaucuauuaugugac

SEQ ID NO: 2506316 - RNA, 19 nt, Artificial Sequence
  Description of Artificial Sequence: Synthetic oligonucleotide
caaggagaauacauuuggc

SEQ ID NO: 2506317 - RNA, 19 nt, Artificial Sequence
  Description of Artificial Sequence: Synthetic oligonucleotide
agcuuaccaaaugaacggc

SEQ ID NO: 2506318 - RNA, 19 nt, Artificial Sequence
  Description of Artificial Sequence: Synthetic oligonucleotide
auuccccacuucuagcagg

SEQ ID NO: 2506319 - RNA, 19 nt, Artificial Sequence
  Description of Artificial Sequence: Synthetic oligonucleotide
ucaguggaaauaugaagau

SEQ ID NO: 2506320 - RNA, 19 nt, Artificial Sequence
  Description of Artificial Sequence: Synthetic oligonucleotide
augcuauugcuuugcuagc

SEQ ID NO: 2506321 - RNA, 19 nt, Artificial Sequence
  Description of Artificial Sequence: Synthetic oligonucleotide
ucuucagguuucaaauacu

SEQ ID NO: 2506322 - RNA, 19 nt, Artificial Sequence
  Description of Artificial Sequence: Synthetic oligonucleotide
uacaaucuauuaugugacc

SEQ ID NO: 2506323 - RNA, 19 nt, Artificial Sequence
  Description of Artificial Sequence: Synthetic oligonucleotide
acauccuggacuugaggag

SEQ ID NO: 2506324 - RNA, 19 nt, Artificial Sequence
  Description of Artificial Sequence: Synthetic oligonucleotide
uucaucccaaaguuaacaa

SEQ ID NO: 2506325 - RNA, 19 nt, Artificial Sequence
  Description of Artificial Sequence: Synthetic oligonucleotide
uagcaaguaaaaucaccug

SEQ ID NO: 2506326 - RNA, 19 nt, Artificial Sequence
  Description of Artificial Sequence: Synthetic oligonucleotide
uggcagaguacuuucuccc

SEQ ID NO: 2506327 - RNA, 19 nt, Artificial Sequence
  Description of Artificial Sequence: Synthetic oligonucleotide
cuauauauaccaagagaca

SEQ ID NO: 2506328 - RNA, 19 nt, Artificial Sequence
  Description of Artificial Sequence: Synthetic oligonucleotide
agauaugagugaguucugg

SEQ ID NO: 2506329 - RNA, 19 nt, Artificial Sequence
  Description of Artificial Sequence: Synthetic oligonucleotide
agauaagcuugaaaucugg

SEQ ID NO: 2506330 - RNA, 19 nt, Artificial Sequence
  Description of Artificial Sequence: Synthetic oligonucleotide
caagauaacauuagcaagu

SEQ ID NO: 2506331 - RNA, 19 nt, Artificial Sequence
  Description of Artificial Sequence: Synthetic oligonucleotide
cucaaaaugccaagauaac

SEQ ID NO: 2506332 - RNA, 19 nt, Artificial Sequence
  Description of Artificial Sequence: Synthetic oligonucleotide
augcucccaaauuaauuag

SEQ ID NO: 2506333 - RNA, 19 nt, Artificial Sequence
  Description of Artificial Sequence: Synthetic oligonucleotide
caugaagcuuaccaaauga

SEQ ID NO: 2506334 - RNA, 19 nt, Artificial Sequence
  Description of Artificial Sequence: Synthetic oligonucleotide
ugagaucuuucuuuccacu

SEQ ID NO: 2506335 - RNA, 19 nt, Artificial Sequence
  Description of Artificial Sequence: Synthetic oligonucleotide
auuugggcaaaugcuauug

SEQ ID NO: 2506336 - RNA, 19 nt, Artificial Sequence
  Description of Artificial Sequence: Synthetic oligonucleotide
ugcucccaaauuaauuaga

SEQ ID NO: 2506337 - RNA, 19 nt, Artificial Sequence
  Description of Artificial Sequence: Synthetic oligonucleotide
caaauggcagaguacuuuc

SEQ ID NO: 2506338 - RNA, 19 nt, Artificial Sequence
  Description of Artificial Sequence: Synthetic oligonucleotide
ugcucucucccugagaucu

SEQ ID NO: 2506339 - RNA, 19 nt, Artificial Sequence
  Description of Artificial Sequence: Synthetic oligonucleotide
ugguacaaucuauuaugug

SEQ ID NO: 2506340 - RNA, 19 nt, Artificial Sequence
  Description of Artificial Sequence: Synthetic oligonucleotide
gaaggaaguacauccugga

SEQ ID NO: 2506341 - RNA, 19 nt, Artificial Sequence
  Description of Artificial Sequence: Synthetic oligonucleotide
aaaugcuauugcuuugcua

SEQ ID NO: 2506342 - RNA, 19 nt, Artificial Sequence
  Description of Artificial Sequence: Synthetic oligonucleotide
ccaagauaacauuagcaag

SEQ ID NO: 2506343 - RNA, 19 nt, Artificial Sequence
  Description of Artificial Sequence: Synthetic oligonucleotide
ucuccaugaagcuuaccaa

SEQ ID NO: 2506344 - RNA, 19 nt, Artificial Sequence
  Description of Artificial Sequence: Synthetic oligonucleotide
auaugagugaguucugguu

SEQ ID NO: 2506345 - RNA, 19 nt, Artificial Sequence
  Description of Artificial Sequence: Synthetic oligonucleotide
gagaccaaggacauuucug

SEQ ID NO: 2506346 - RNA, 19 nt, Artificial Sequence
  Description of Artificial Sequence: Synthetic oligonucleotide
agacaauacccucuaugcu

SEQ ID NO: 2506347 - RNA, 19 nt, Artificial Sequence
  Description of Artificial Sequence: Synthetic oligonucleotide
uccaugaagcuuaccaaau

SEQ ID NO: 2506348 - RNA, 19 nt, Artificial Sequence
  Description of Artificial Sequence: Synthetic oligonucleotide
uuugagaaggaaguacauc

SEQ ID NO: 2506349 - RNA, 19 nt, Artificial Sequence
  Description of Artificial Sequence: Synthetic oligonucleotide
uauugacagguuauucaaa

SEQ ID NO: 2506350 - RNA, 19 nt, Artificial Sequence
  Description of Artificial Sequence: Synthetic oligonucleotide
aaaugccaagauaacauua

SEQ ID NO: 2506351 - RNA, 19 nt, Artificial Sequence
  Description of Artificial Sequence: Synthetic oligonucleotide
aacggcugacagaugguac

SEQ ID NO: 2506352 - RNA, 19 nt, Artificial Sequence
  Description of Artificial Sequence: Synthetic oligonucleotide
cauuagcaaguaaaaucac

SEQ ID NO: 2506353 - RNA, 19 nt, Artificial Sequence
  Description of Artificial Sequence: Synthetic oligonucleotide
aaucaccugucauuuguua

SEQ ID NO: 2506354 - RNA, 19 nt, Artificial Sequence
  Description of Artificial Sequence: Synthetic oligonucleotide
aaguacauccuggacuuga

SEQ ID NO: 2506355 - RNA, 19 nt, Artificial Sequence
  Description of Artificial Sequence: Synthetic oligonucleotide
uaacauuagcaaguaaaau

SEQ ID NO: 2506356 - RNA, 19 nt, Artificial Sequence
  Description of Artificial Sequence: Synthetic oligonucleotide
aucuguggagcaaaaugac

SEQ ID NO: 2506357 - RNA, 19 nt, Artificial Sequence
  Description of Artificial Sequence: Synthetic oligonucleotide
gaguacuuucucccagccg

SEQ ID NO: 2506358 - RNA, 19 nt, Artificial Sequence
  Description of Artificial Sequence: Synthetic oligonucleotide
aaauugagguucaaauuua

SEQ ID NO: 2506359 - RNA, 19 nt, Artificial Sequence
  Description of Artificial Sequence: Synthetic oligonucleotide
augaagauaugagugaguu

SEQ ID NO: 2506360 - RNA, 19 nt, Artificial Sequence
  Description of Artificial Sequence: Synthetic oligonucleotide
gguucaaauuuaccaagcc

SEQ ID NO: 2506361 - RNA, 19 nt, Artificial Sequence
  Description of Artificial Sequence: Synthetic oligonucleotide
uguggagcaaaaugacuaa

SEQ ID NO: 2506362 - RNA, 19 nt, Artificial Sequence
  Description of Artificial Sequence: Synthetic oligonucleotide
cuagcaggagccaucugug

SEQ ID NO: 2506363 - RNA, 19 nt, Artificial Sequence
  Description of Artificial Sequence: Synthetic oligonucleotide
aggagaugcucccaaauua

SEQ ID NO: 2506364 - RNA, 19 nt, Artificial Sequence
  Description of Artificial Sequence: Synthetic oligonucleotide
acauuuggcuccuauugau

SEQ ID NO: 2506365 - RNA, 19 nt, Artificial Sequence
  Description of Artificial Sequence: Synthetic oligonucleotide
uuuggcuccuauugauggc

SEQ ID NO: 2506366 - RNA, 19 nt, Artificial Sequence
  Description of Artificial Sequence: Synthetic oligonucleotide
aagauaacauuagcaagua

SEQ ID NO: 2506367 - RNA, 19 nt, Artificial Sequence
  Description of Artificial Sequence: Synthetic oligonucleotide
gugacuugcagcuggagaa

SEQ ID NO: 2506368 - RNA, 19 nt, Artificial Sequence
  Description of Artificial Sequence: Synthetic oligonucleotide
auuagagcuuucauuccuc

SEQ ID NO: 2506369 - RNA, 19 nt, Artificial Sequence
  Description of Artificial Sequence: Synthetic oligonucleotide
auauaccaagagacaauac

SEQ ID NO: 2506370 - RNA, 19 nt, Artificial Sequence
  Description of Artificial Sequence: Synthetic oligonucleotide
ccuauuucuacaaauggca

SEQ ID NO: 2506371 - RNA, 19 nt, Artificial Sequence
  Description of Artificial Sequence: Synthetic oligonucleotide
caaaaugccaagauaacau

SEQ ID NO: 2506372 - RNA, 19 nt, Artificial Sequence
  Description of Artificial Sequence: Synthetic oligonucleotide
ucucccagccgcaggaggc

SEQ ID NO: 2506373 - RNA, 19 nt, Artificial Sequence
  Description of Artificial Sequence: Synthetic oligonucleotide
uaccaagccuauuucuaca

SEQ ID NO: 2506374 - RNA, 19 nt, Artificial Sequence
  Description of Artificial Sequence: Synthetic oligonucleotide
caaauuaauuagagcuuuc

SEQ ID NO: 2506375 - RNA, 19 nt, Artificial Sequence
  Description of Artificial Sequence: Synthetic oligonucleotide
auuccucugugacuugcag

SEQ ID NO: 2506376 - RNA, 19 nt, Artificial Sequence
  Description of Artificial Sequence: Synthetic oligonucleotide
ugaggagaugcucccaaau

SEQ ID NO: 2506377 - RNA, 19 nt, Artificial Sequence
  Description of Artificial Sequence: Synthetic oligonucleotide
ugaagauaugagugaguuc

SEQ ID NO: 2506378 - RNA, 19 nt, Artificial Sequence
  Description of Artificial Sequence: Synthetic oligonucleotide
ugugaccuauauauaccaa

SEQ ID NO: 2506379 - RNA, 19 nt, Artificial Sequence
  Description of Artificial Sequence: Synthetic oligonucleotide
cauuuggcuccuauugaug

SEQ ID NO: 2506380 - RNA, 19 nt, Artificial Sequence
  Description of Artificial Sequence: Synthetic oligonucleotide
aguucugguuuugugcauc

SEQ ID NO: 2506381 - RNA, 19 nt, Artificial Sequence
  Description of Artificial Sequence: Synthetic oligonucleotide
aucaccaccucaggcauuc

SEQ ID NO: 2506382 - RNA, 19 nt, Artificial Sequence
  Description of Artificial Sequence: Synthetic oligonucleotide
uggcaaggagaccaaggac

SEQ ID NO: 2506383 - RNA, 19 nt, Artificial Sequence
  Description of Artificial Sequence: Synthetic oligonucleotide
guacauccuggacuugagg

SEQ ID NO: 2506384 - RNA, 19 nt, Artificial Sequence
  Description of Artificial Sequence: Synthetic oligonucleotide
ugaaaucugggaguucuuc

SEQ ID NO: 2506385 - RNA, 19 nt, Artificial Sequence
  Description of Artificial Sequence: Synthetic oligonucleotide
ugcugaaccuaauucucaa

SEQ ID NO: 2506386 - RNA, 19 nt, Artificial Sequence
  Description of Artificial Sequence: Synthetic oligonucleotide
uccagaucuccaugaagcu

SEQ ID NO: 2506387 - RNA, 19 nt, Artificial Sequence
  Description of Artificial Sequence: Synthetic oligonucleotide
cuguggagcaaaaugacua

SEQ ID NO: 2506388 - RNA, 19 nt, Artificial Sequence
  Description of Artificial Sequence: Synthetic oligonucleotide
uucauuugcuucugucuuc

SEQ ID NO: 2506389 - RNA, 19 nt, Artificial Sequence
  Description of Artificial Sequence: Synthetic oligonucleotide
cugagaucuuucuuuccac

SEQ ID NO: 2506390 - RNA, 19 nt, Artificial Sequence
  Description of Artificial Sequence: Synthetic oligonucleotide
acuuucucccagccgcagg

SEQ ID NO: 2506391 - RNA, 19 nt, Artificial Sequence
  Description of Artificial Sequence: Synthetic oligonucleotide
cagaguacuuucucccagc

SEQ ID NO: 2506392 - RNA, 19 nt, Artificial Sequence
  Description of Artificial Sequence: Synthetic oligonucleotide
ggaaaugcccuuugagaag

SEQ ID NO: 2506393 - RNA, 19 nt, Artificial Sequence
  Description of Artificial Sequence: Synthetic oligonucleotide
cuuucaucccaaaguuaac

SEQ ID NO: 2506394 - RNA, 19 nt, Artificial Sequence
  Description of Artificial Sequence: Synthetic oligonucleotide
gccaagauaacauuagcaa

SEQ ID NO: 2506395 - RNA, 19 nt, Artificial Sequence
  Description of Artificial Sequence: Synthetic oligonucleotide
aagaaaauauugacagguu

SEQ ID NO: 2506396 - RNA, 19 nt, Artificial Sequence
  Description of Artificial Sequence: Synthetic oligonucleotide
ccaaaugaacggcugacag

SEQ ID NO: 2506397 - RNA, 19 nt, Artificial Sequence
  Description of Artificial Sequence: Synthetic oligonucleotide
uguuuguucucuucauguu

SEQ ID NO: 2506398 - RNA, 19 nt, Artificial Sequence
  Description of Artificial Sequence: Synthetic oligonucleotide
cuaugcugaaccuaauucu

SEQ ID NO: 2506399 - RNA, 19 nt, Artificial Sequence
  Description of Artificial Sequence: Synthetic oligonucleotide
ugcuauugcuuugcuagca

SEQ ID NO: 2506400 - RNA, 19 nt, Artificial Sequence
  Description of Artificial Sequence: Synthetic oligonucleotide
uuggcuccuauugauggca

SEQ ID NO: 2506401 - RNA, 19 nt, Artificial Sequence
  Description of Artificial Sequence: Synthetic oligonucleotide
agaucuuucuuuccacuuu

SEQ ID NO: 2506402 - RNA, 19 nt, Artificial Sequence
  Description of Artificial Sequence: Synthetic oligonucleotide
aaggacauuucugcucucu

SEQ ID NO: 2506403 - RNA, 19 nt, Artificial Sequence
  Description of Artificial Sequence: Synthetic oligonucleotide
cccacuucuagcaggagcc

SEQ ID NO: 2506404 - RNA, 19 nt, Artificial Sequence
  Description of Artificial Sequence: Synthetic oligonucleotide
uuguucucuucauguuucc

SEQ ID NO: 2506405 - RNA, 19 nt, Artificial Sequence
  Description of Artificial Sequence: Synthetic oligonucleotide
gauaugagugaguucuggu

SEQ ID NO: 2506406 - RNA, 19 nt, Artificial Sequence
  Description of Artificial Sequence: Synthetic oligonucleotide
uuccccacuucuagcagga

SEQ ID NO: 2506407 - RNA, 19 nt, Artificial Sequence
  Description of Artificial Sequence: Synthetic oligonucleotide
uaccaaaugaacggcugac

SEQ ID NO: 2506408 - RNA, 19 nt, Artificial Sequence
  Description of Artificial Sequence: Synthetic oligonucleotide
acggcugacagaugguaca

SEQ ID NO: 2506409 - RNA, 19 nt, Artificial Sequence
  Description of Artificial Sequence: Synthetic oligonucleotide
ucauuccucugugacuugc

SEQ ID NO: 2506410 - RNA, 19 nt, Artificial Sequence
  Description of Artificial Sequence: Synthetic oligonucleotide
auauauaccaagagacaau

SEQ ID NO: 2506411 - RNA, 19 nt, Artificial Sequence
  Description of Artificial Sequence: Synthetic oligonucleotide
ccaucuguggagcaaaaug

SEQ ID NO: 2506412 - RNA, 19 nt, Artificial Sequence
  Description of Artificial Sequence: Synthetic oligonucleotide
acaauacccucuaugcuga

SEQ ID NO: 2506413 - RNA, 19 nt, Artificial Sequence
  Description of Artificial Sequence: Synthetic oligonucleotide
ucugugacuugcagcugga

SEQ ID NO: 2506414 - RNA, 19 nt, Artificial Sequence
  Description of Artificial Sequence: Synthetic oligonucleotide
ugaacggcugacagauggu

SEQ ID NO: 2506415 - RNA, 19 nt, Artificial Sequence
  Description of Artificial Sequence: Synthetic oligonucleotide
uugacagguuauucaaauu

SEQ ID NO: 2506416 - RNA, 19 nt, Artificial Sequence
  Description of Artificial Sequence: Synthetic oligonucleotide
uggacuugaggagaugcuc

SEQ ID NO: 2506417 - RNA, 19 nt, Artificial Sequence
  Description of Artificial Sequence: Synthetic oligonucleotide
caggaggcagauuugggca

SEQ ID NO: 2506418 - RNA, 19 nt, Artificial Sequence
  Description of Artificial Sequence: Synthetic oligonucleotide
augguacaaucuauuaugu

SEQ ID NO: 2506419 - RNA, 19 nt, Artificial Sequence
  Description of Artificial Sequence: Synthetic oligonucleotide
agauaacauuagcaaguaa

SEQ ID NO: 2506420 - RNA, 19 nt, Artificial Sequence
  Description of Artificial Sequence: Synthetic oligonucleotide
caaaugaacggcugacaga

SEQ ID NO: 2506421 - RNA, 19 nt, Artificial Sequence
  Description of Artificial Sequence: Synthetic oligonucleotide
ccugucauuuguuagaaaa

SEQ ID NO: 2506422 - RNA, 19 nt, Artificial Sequence
  Description of Artificial Sequence: Synthetic oligonucleotide
aagauaugagugaguucug

SEQ ID NO: 2506423 - RNA, 19 nt, Artificial Sequence
  Description of Artificial Sequence: Synthetic oligonucleotide
ggcaaggagaccaaggaca

SEQ ID NO: 2506424 - RNA, 19 nt, Artificial Sequence
  Description of Artificial Sequence: Synthetic oligonucleotide
augcccuuugagaaggaag

SEQ ID NO: 2506425 - RNA, 19 nt, Artificial Sequence
  Description of Artificial Sequence: Synthetic oligonucleotide
ucccugagaucuuucuuuc

SEQ ID NO: 2506426 - RNA, 19 nt, Artificial Sequence
  Description of Artificial Sequence: Synthetic oligonucleotide
accaagccuauuucuacaa

SEQ ID NO: 2506427 - RNA, 19 nt, Artificial Sequence
  Description of Artificial Sequence: Synthetic oligonucleotide
ggagaaucaccaccucagg

SEQ ID NO: 2506428 - RNA, 19 nt, Artificial Sequence
  Description of Artificial Sequence: Synthetic oligonucleotide
cagauuugggcaaaugcua

SEQ ID NO: 2506429 - RNA, 19 nt, Artificial Sequence
  Description of Artificial Sequence: Synthetic oligonucleotide
cucuucauguuuccagauc

SEQ ID NO: 2506430 - RNA, 19 nt, Artificial Sequence
  Description of Artificial Sequence: Synthetic oligonucleotide
ccuauugauggcaaggaga

SEQ ID NO: 2506431 - RNA, 19 nt, Artificial Sequence
  Description of Artificial Sequence: Synthetic oligonucleotide
gcucccaaauuaauuagag

SEQ ID NO: 2506432 - RNA, 19 nt, Artificial Sequence
  Description of Artificial Sequence: Synthetic oligonucleotide
cuacaaauggcagaguacu

SEQ ID NO: 2506433 - RNA, 19 nt, Artificial Sequence
  Description of Artificial Sequence: Synthetic oligonucleotide
gcuccuauugauggcaagg

SEQ ID NO: 2506434 - RNA, 19 nt, Artificial Sequence
  Description of Artificial Sequence: Synthetic oligonucleotide
cuguuuguucucuucaugu

SEQ ID NO: 2506435 - RNA, 19 nt, Artificial Sequence
  Description of Artificial Sequence: Synthetic oligonucleotide
gccuauuucuacaaauggc

SEQ ID NO: 2506436 - RNA, 19 nt, Artificial Sequence
  Description of Artificial Sequence: Synthetic oligonucleotide
gcuagcauucuuucauuug

SEQ ID NO: 2506437 - RNA, 19 nt, Artificial Sequence
  Description of Artificial Sequence: Synthetic oligonucleotide
cuccaugaagcuuaccaaa

SEQ ID NO: 2506438 - RNA, 19 nt, Artificial Sequence
  Description of Artificial Sequence: Synthetic oligonucleotide
uauugauggcaaggagacc

SEQ ID NO: 2506439 - RNA, 19 nt, Artificial Sequence
  Description of Artificial Sequence: Synthetic oligonucleotide
cccaaaguuaacaaauaca

SEQ ID NO: 2506440 - RNA, 19 nt, Artificial Sequence
  Description of Artificial Sequence: Synthetic oligonucleotide
aagagacaauacccucuau

SEQ ID NO: 2506441 - RNA, 19 nt, Artificial Sequence
  Description of Artificial Sequence: Synthetic oligonucleotide
ucucaauggaaaugcccuu

SEQ ID NO: 2506442 - RNA, 19 nt, Artificial Sequence
  Description of Artificial Sequence: Synthetic oligonucleotide
gucauuuguuagaaaagaa

SEQ ID NO: 2506443 - RNA, 19 nt, Artificial Sequence
  Description of Artificial Sequence: Synthetic oligonucleotide
augaagcuuaccaaaugaa

SEQ ID NO: 2506444 - RNA, 19 nt, Artificial Sequence
  Description of Artificial Sequence: Synthetic oligonucleotide
gcugacagaugguacaauc

SEQ ID NO: 2506445 - RNA, 19 nt, Artificial Sequence
  Description of Artificial Sequence: Synthetic oligonucleotide
augagugaguucugguuuu

SEQ ID NO: 2506446 - RNA, 19 nt, Artificial Sequence
  Description of Artificial Sequence: Synthetic oligonucleotide
cauuccccacuucuagcag

SEQ ID NO: 2506447 - RNA, 19 nt, Artificial Sequence
  Description of Artificial Sequence: Synthetic oligonucleotide
guggaaauaugaagauaug

SEQ ID NO: 2506448 - RNA, 19 nt, Artificial Sequence
  Description of Artificial Sequence: Synthetic oligonucleotide
agauuugggcaaaugcuau

SEQ ID NO: 2506449 - RNA, 19 nt, Artificial Sequence
  Description of Artificial Sequence: Synthetic oligonucleotide
ugauggcaaggagaccaag

SEQ ID NO: 2506450 - RNA, 19 nt, Artificial Sequence
  Description of Artificial Sequence: Synthetic oligonucleotide
gcaaaugcuauugcuuugc

SEQ ID NO: 2506451 - RNA, 19 nt, Artificial Sequence
  Description of Artificial Sequence: Synthetic oligonucleotide
aguacauccuggacuugag

SEQ ID NO: 2506452 - RNA, 19 nt, Artificial Sequence
  Description of Artificial Sequence: Synthetic oligonucleotide
uugauggcaaggagaccaa

SEQ ID NO: 2506453 - RNA, 19 nt, Artificial Sequence
  Description of Artificial Sequence: Synthetic oligonucleotide
aaugcccuuugagaaggaa

SEQ ID NO: 2506454 - RNA, 19 nt, Artificial Sequence
  Description of Artificial Sequence: Synthetic oligonucleotide
auuaugugaccuauauaua

SEQ ID NO: 2506455 - RNA, 19 nt, Artificial Sequence
  Description of Artificial Sequence: Synthetic oligonucleotide
uacccucuaugcugaaccu

SEQ ID NO: 2506456 - RNA, 19 nt, Artificial Sequence
  Description of Artificial Sequence: Synthetic oligonucleotide
cuuucucccagccgcagga

SEQ ID NO: 2506457 - RNA, 19 nt, Artificial Sequence
  Description of Artificial Sequence: Synthetic oligonucleotide
gcaaguaaaaucaccuguc

SEQ ID NO: 2506458 - RNA, 19 nt, Artificial Sequence
  Description of Artificial Sequence: Synthetic oligonucleotide
accaaaugaacggcugaca

SEQ ID NO: 2506459 - RNA, 19 nt, Artificial Sequence
  Description of Artificial Sequence: Synthetic oligonucleotide
ggacuugaggagaugcucc

SEQ ID NO: 2506460 - RNA, 19 nt, Artificial Sequence
  Description of Artificial Sequence: Synthetic oligonucleotide
gaauacauuuggcuccuau

SEQ ID NO: 2506461 - RNA, 19 nt, Artificial Sequence
  Description of Artificial Sequence: Synthetic oligonucleotide
aaaucaccugucauuuguu

SEQ ID NO: 2506462 - RNA, 19 nt, Artificial Sequence
  Description of Artificial Sequence: Synthetic oligonucleotide
ugagugaguucugguuuug

SEQ ID NO: 2506463 - RNA, 19 nt, Artificial Sequence
  Description of Artificial Sequence: Synthetic oligonucleotide
acagaugguacaaucuauu

SEQ ID NO: 2506464 - RNA, 19 nt, Artificial Sequence
  Description of Artificial Sequence: Synthetic oligonucleotide
cagguuucaaauacuuucu

SEQ ID NO: 2506465 - RNA, 19 nt, Artificial Sequence
  Description of Artificial Sequence: Synthetic oligonucleotide
uugaggagaugcucccaaa

SEQ ID NO: 2506466 - RNA, 19 nt, Artificial Sequence
  Description of Artificial Sequence: Synthetic oligonucleotide
caagccuauuucuacaaau

SEQ ID NO: 2506467 - RNA, 19 nt, Artificial Sequence
  Description of Artificial Sequence: Synthetic oligonucleotide
guucuucagguuucaaaua

SEQ ID NO: 2506468 - RNA, 19 nt, Artificial Sequence
  Description of Artificial Sequence: Synthetic oligonucleotide
uugcuuugcuagcauucuu

SEQ ID NO: 2506469 - RNA, 19 nt, Artificial Sequence
  Description of Artificial Sequence: Synthetic oligonucleotide
cuauuaugugaccuauaua

SEQ ID NO: 2506470 - RNA, 19 nt, Artificial Sequence
  Description of Artificial Sequence: Synthetic oligonucleotide
cugacagaugguacaaucu

SEQ ID NO: 2506471 - RNA, 19 nt, Artificial Sequence
  Description of Artificial Sequence: Synthetic oligonucleotide
agaugcucccaaauuaauu

SEQ ID NO: 2506472 - RNA, 19 nt, Artificial Sequence
  Description of Artificial Sequence: Synthetic oligonucleotide
uuucuacaaauggcagagu

SEQ ID NO: 2506473 - RNA, 19 nt, Artificial Sequence
  Description of Artificial Sequence: Synthetic oligonucleotide
guuuguucucuucauguuu

SEQ ID NO: 2506474 - RNA, 19 nt, Artificial Sequence
  Description of Artificial Sequence: Synthetic oligonucleotide
uacuuucucccagccgcag

SEQ ID NO: 2506475 - RNA, 19 nt, Artificial Sequence
  Description of Artificial Sequence: Synthetic oligonucleotide
cuuucauuccucugugacu

SEQ ID NO: 2506476 - RNA, 19 nt, Artificial Sequence
  Description of Artificial Sequence: Synthetic oligonucleotide
agaucuccaugaagcuuac

SEQ ID NO: 2506477 - RNA, 19 nt, Artificial Sequence
  Description of Artificial Sequence: Synthetic oligonucleotide
aaugaacggcugacagaug

SEQ ID NO: 2506478 - RNA, 19 nt, Artificial Sequence
  Description of Artificial Sequence: Synthetic oligonucleotide
caagagacaauacccucua

SEQ ID NO: 2506479 - RNA, 19 nt, Artificial Sequence
  Description of Artificial Sequence: Synthetic oligonucleotide
augcugaaccuaauucuca

SEQ ID NO: 2506480 - RNA, 19 nt, Artificial Sequence
  Description of Artificial Sequence: Synthetic oligonucleotide
guuuccagaucuccaugaa

SEQ ID NO: 2506481 - RNA, 19 nt, Artificial Sequence
  Description of Artificial Sequence: Synthetic oligonucleotide
gagaucuuucuuuccacuu

SEQ ID NO: 2506482 - RNA, 19 nt, Artificial Sequence
  Description of Artificial Sequence: Synthetic oligonucleotide
ggcauuccccacuucuagc

SEQ ID NO: 2506483 - RNA, 19 nt, Artificial Sequence
  Description of Artificial Sequence: Synthetic oligonucleotide
gcauuccccacuucuagca

SEQ ID NO: 2506484 - RNA, 19 nt, Artificial Sequence
  Description of Artificial Sequence: Synthetic oligonucleotide
caauggaaaugcccuuuga

SEQ ID NO: 2506485 - RNA, 19 nt, Artificial Sequence
  Description of Artificial Sequence: Synthetic oligonucleotide
gcuuugcuagcauucuuuc

SEQ ID NO: 2506486 - RNA, 19 nt, Artificial Sequence
  Description of Artificial Sequence: Synthetic oligonucleotide
ggaaguacauccuggacuu

SEQ ID NO: 2506487 - RNA, 19 nt, Artificial Sequence
  Description of Artificial Sequence: Synthetic oligonucleotide
cauccuggacuugaggaga

SEQ ID NO: 2506488 - RNA, 19 nt, Artificial Sequence
  Description of Artificial Sequence: Synthetic oligonucleotide
cuccuauugauggcaagga

SEQ ID NO: 2506489 - RNA, 19 nt, Artificial Sequence
  Description of Artificial Sequence: Synthetic oligonucleotide
ccaugaagcuuaccaaaug

SEQ ID NO: 2506490 - RNA, 19 nt, Artificial Sequence
  Description of Artificial Sequence: Synthetic oligonucleotide
uggcuccuauugauggcaa

SEQ ID NO: 2506491 - RNA, 19 nt, Artificial Sequence
  Description of Artificial Sequence: Synthetic oligonucleotide
aggagaccaaggacauuuc

SEQ ID NO: 2506492 - RNA, 19 nt, Artificial Sequence
  Description of Artificial Sequence: Synthetic oligonucleotide
gaccaaggacauuucugcu

SEQ ID NO: 2506493 - RNA, 19 nt, Artificial Sequence
  Description of Artificial Sequence: Synthetic oligonucleotide
ccugagaucuuucuuucca

SEQ ID NO: 2506494 - RNA, 19 nt, Artificial Sequence
  Description of Artificial Sequence: Synthetic oligonucleotide
gacagaugguacaaucuau

SEQ ID NO: 2506495 - RNA, 19 nt, Artificial Sequence
  Description of Artificial Sequence: Synthetic oligonucleotide
gaggagaugcucccaaauu

SEQ ID NO: 2506496 - RNA, 19 nt, Artificial Sequence
  Description of Artificial Sequence: Synthetic oligonucleotide
caggagccaucuguggagc

SEQ ID NO: 2506497 - RNA, 19 nt, Artificial Sequence
  Description of Artificial Sequence: Synthetic oligonucleotide
gaaguacauccuggacuug

SEQ ID NO: 2506498 - RNA, 19 nt, Artificial Sequence
  Description of Artificial Sequence: Synthetic oligonucleotide
cauuccucugugacuugca

SEQ ID NO: 2506499 - RNA, 19 nt, Artificial Sequence
  Description of Artificial Sequence: Synthetic oligonucleotide
gagaauacauuuggcuccu

SEQ ID NO: 2506500 - RNA, 19 nt, Artificial Sequence
  Description of Artificial Sequence: Synthetic oligonucleotide
gaacggcugacagauggua

SEQ ID NO: 2506501 - RNA, 19 nt, Artificial Sequence
  Description of Artificial Sequence: Synthetic oligonucleotide
cccuuugagaaggaaguac

SEQ ID NO: 2506502 - RNA, 19 nt, Artificial Sequence
  Description of Artificial Sequence: Synthetic oligonucleotide
aaaugcccuuugagaagga

SEQ ID NO: 2506503 - RNA, 19 nt, Artificial Sequence
  Description of Artificial Sequence: Synthetic oligonucleotide
gauuugggcaaaugcuauu

SEQ ID NO: 2506504 - RNA, 19 nt, Artificial Sequence
  Description of Artificial Sequence: Synthetic oligonucleotide
ggagaugcucccaaauuaa

SEQ ID NO: 2506505 - RNA, 19 nt, Artificial Sequence
  Description of Artificial Sequence: Synthetic oligonucleotide
ccccacuucuagcaggagc

SEQ ID NO: 2506506 - RNA, 19 nt, Artificial Sequence
  Description of Artificial Sequence: Synthetic oligonucleotide
gaucuccaugaagcuuacc

SEQ ID NO: 2506507 - RNA, 19 nt, Artificial Sequence
  Description of Artificial Sequence: Synthetic oligonucleotide
ggcagaguacuuucuccca

SEQ ID NO: 2506508 - RNA, 19 nt, Artificial Sequence
  Description of Artificial Sequence: Synthetic oligonucleotide
caccucaggcauuccccac

SEQ ID NO: 2506509 - RNA, 19 nt, Artificial Sequence
  Description of Artificial Sequence: Synthetic oligonucleotide
guggagcaaaaugacuaaa

SEQ ID NO: 2506510 - RNA, 19 nt, Artificial Sequence
  Description of Artificial Sequence: Synthetic oligonucleotide
gcagcuggagaaucaccac

SEQ ID NO: 2506511 - RNA, 19 nt, Artificial Sequence
  Description of Artificial Sequence: Synthetic oligonucleotide
cucccugagaucuuucuuu

SEQ ID NO: 2506512 - RNA, 19 nt, Artificial Sequence
  Description of Artificial Sequence: Synthetic oligonucleotide
gagccaucuguggagcaaa

SEQ ID NO: 2506513 - RNA, 19 nt, Artificial Sequence
  Description of Artificial Sequence: Synthetic oligonucleotide
uucugguuuugugcaucaa

SEQ ID NO: 2506514 - RNA, 19 nt, Artificial Sequence
  Description of Artificial Sequence: Synthetic oligonucleotide
caaggacauuucugcucuc

SEQ ID NO: 2506515 - RNA, 19 nt, Artificial Sequence
  Description of Artificial Sequence: Synthetic oligonucleotide
aucuauuaugugaccuaua

SEQ ID NO: 2506516 - RNA, 19 nt, Artificial Sequence
  Description of Artificial Sequence: Synthetic oligonucleotide
caguggaaauaugaagaua

SEQ ID NO: 2506517 - RNA, 19 nt, Artificial Sequence
  Description of Artificial Sequence: Synthetic oligonucleotide
cccugagaucuuucuuucc

SEQ ID NO: 2506518 - RNA, 19 nt, Artificial Sequence
  Description of Artificial Sequence: Synthetic oligonucleotide
gcugaaccuaauucucaaa

SEQ ID NO: 2506519 - RNA, 19 nt, Artificial Sequence
  Description of Artificial Sequence: Synthetic oligonucleotide
guacuuucucccagccgca

SEQ ID NO: 2506520 - RNA, 19 nt, Artificial Sequence
  Description of Artificial Sequence: Synthetic oligonucleotide
caaaugcuauugcuuugcu

SEQ ID NO: 2506521 - RNA, 19 nt, Artificial Sequence
  Description of Artificial Sequence: Synthetic oligonucleotide
aaucaccaccucaggcauu

SEQ ID NO: 2506522 - RNA, 19 nt, Artificial Sequence
  Description of Artificial Sequence: Synthetic oligonucleotide
cccucuaugcugaaccuaa

SEQ ID NO: 2506523 - RNA, 19 nt, Artificial Sequence
  Description of Artificial Sequence: Synthetic oligonucleotide
ccaagagacaauacccucu

SEQ ID NO: 2506524 - RNA, 19 nt, Artificial Sequence
  Description of Artificial Sequence: Synthetic oligonucleotide
ggagaccaaggacauuucu

SEQ ID NO: 2506525 - RNA, 19 nt, Artificial Sequence
  Description of Artificial Sequence: Synthetic oligonucleotide
cucuaugcugaaccuaauu

SEQ ID NO: 2506526 - RNA, 19 nt, Artificial Sequence
  Description of Artificial Sequence: Synthetic oligonucleotide
cucucccugagaucuuucu

SEQ ID NO: 2506527 - RNA, 19 nt, Artificial Sequence
  Description of Artificial Sequence: Synthetic oligonucleotide
acccucuaugcugaaccua

SEQ ID NO: 2506528 - RNA, 19 nt, Artificial Sequence
  Description of Artificial Sequence: Synthetic oligonucleotide
cucaggcauuccccacuuc

SEQ ID NO: 2506529 - RNA, 19 nt, Artificial Sequence
  Description of Artificial Sequence: Synthetic oligonucleotide
auccuggacuugaggagau

SEQ ID NO: 2506530 - RNA, 19 nt, Artificial Sequence
  Description of Artificial Sequence: Synthetic oligonucleotide
ccgcaggaggcagauuugg

SEQ ID NO: 2506531 - RNA, 19 nt, Artificial Sequence
  Description of Artificial Sequence: Synthetic oligonucleotide
gagugaguucugguuuugu

SEQ ID NO: 2506532 - RNA, 19 nt, Artificial Sequence
  Description of Artificial Sequence: Synthetic oligonucleotide
gcuggagaaucaccaccuc

SEQ ID NO: 2506533 - RNA, 19 nt, Artificial Sequence
  Description of Artificial Sequence: Synthetic oligonucleotide
gcuuaccaaaugaacggcu

SEQ ID NO: 2506534 - RNA, 19 nt, Artificial Sequence
  Description of Artificial Sequence: Synthetic oligonucleotide
cucaauggaaaugcccuuu

SEQ ID NO: 2506535 - RNA, 19 nt, Artificial Sequence
  Description of Artificial Sequence: Synthetic oligonucleotide
cccaaauuaauuagagcuu

SEQ ID NO: 2506536 - RNA, 19 nt, Artificial Sequence
  Description of Artificial Sequence: Synthetic oligonucleotide
gcaucaaggagaauacauu

SEQ ID NO: 2506537 - RNA, 19 nt, Artificial Sequence
  Description of Artificial Sequence: Synthetic oligonucleotide
gcuauugcuuugcuagcau

SEQ ID NO: 2506538 - RNA, 19 nt, Artificial Sequence
  Description of Artificial Sequence: Synthetic oligonucleotide
caaauuuaccaagccuauu

SEQ ID NO: 2506539 - RNA, 19 nt, Artificial Sequence
  Description of Artificial Sequence: Synthetic oligonucleotide
caauacccucuaugcugaa

SEQ ID NO: 2506540 - RNA, 19 nt, Artificial Sequence
  Description of Artificial Sequence: Synthetic oligonucleotide
ggagccaucuguggagcaa

SEQ ID NO: 2506541 - RNA, 19 nt, Artificial Sequence
  Description of Artificial Sequence: Synthetic oligonucleotide
gggaguucuucagguuuca

SEQ ID NO: 2506542 - RNA, 19 nt, Artificial Sequence
  Description of Artificial Sequence: Synthetic oligonucleotide
agaauacauuuggcuccua

SEQ ID NO: 2506543 - RNA, 19 nt, Artificial Sequence
  Description of Artificial Sequence: Synthetic oligonucleotide
ccaccucaggcauucccca

SEQ ID NO: 2506544 - RNA, 19 nt, Artificial Sequence
  Description of Artificial Sequence: Synthetic oligonucleotide
ccaagccuauuucuacaaa

SEQ ID NO: 2506545 - RNA, 19 nt, Artificial Sequence
  Description of Artificial Sequence: Synthetic oligonucleotide
ggaggcagauuugggcaaa

SEQ ID NO: 2506546 - RNA, 19 nt, Artificial Sequence
  Description of Artificial Sequence: Synthetic oligonucleotide
ggaguucuucagguuucaa

SEQ ID NO: 2506547 - RNA, 19 nt, Artificial Sequence
  Description of Artificial Sequence: Synthetic oligonucleotide
cacuucuagcaggagccau

SEQ ID NO: 2506548 - RNA, 19 nt, Artificial Sequence
  Description of Artificial Sequence: Synthetic oligonucleotide
gcccuuugagaaggaagua

SEQ ID NO: 2506549 - RNA, 19 nt, Artificial Sequence
  Description of Artificial Sequence: Synthetic oligonucleotide
ccacuucuagcaggagcca

SEQ ID NO: 2506550 - RNA, 19 nt, Artificial Sequence
  Description of Artificial Sequence: Synthetic oligonucleotide
gccaucuguggagcaaaau

SEQ ID NO: 2506551 - RNA, 19 nt, Artificial Sequence
  Description of Artificial Sequence: Synthetic oligonucleotide
ccagaucuccaugaagcuu

SEQ ID NO: 2506552 - RNA, 19 nt, Artificial Sequence
  Description of Artificial Sequence: Synthetic oligonucleotide
ggcugacagaugguacaau

SEQ ID NO: 2506553 - RNA, 19 nt, Artificial Sequence
  Description of Artificial Sequence: Synthetic oligonucleotide
cccagccgcaggaggcaga

SEQ ID NO: 2506554 - RNA, 19 nt, Artificial Sequence
  Description of Artificial Sequence: Synthetic oligonucleotide
ccucuaugcugaaccuaau

SEQ ID NO: 2506555 - RNA, 19 nt, Artificial Sequence
  Description of Artificial Sequence: Synthetic oligonucleotide
cggcugacagaugguacaa

SEQ ID NO: 2506556 - RNA, 19 nt, Artificial Sequence
  Description of Artificial Sequence: Synthetic oligonucleotide
ccucaggcauuccccacuu

SEQ ID NO: 2506557 - RNA, 19 nt, Artificial Sequence
  Description of Artificial Sequence: Synthetic oligonucleotide
ccagccgcaggaggcagau

SEQ ID NO: 2506558 - RNA, 19 nt, Artificial Sequence
  Description of Artificial Sequence: Synthetic oligonucleotide
aucaauaagaacuuaaaag

SEQ ID NO: 2506559 - RNA, 19 nt, Artificial Sequence
  Description of Artificial Sequence: Synthetic oligonucleotide
  modified_base (9)..(9): a, c, u, g, unknown or other
aaaauuaanccuuucauau

SEQ ID NO: 2506560 - RNA, 19 nt, Artificial Sequence
  Description of Artificial Sequence: Synthetic oligonucleotide
aaauguaugguaaacgugc

SEQ ID NO: 2506561 - RNA, 19 nt, Artificial Sequence
  Description of Artificial Sequence: Synthetic oligonucleotide
ucaacuaacaauauuaaaa

SEQ ID NO: 2506562 - RNA, 19 nt, Artificial Sequence
  Description of Artificial Sequence: Synthetic oligonucleotide
uuuacuuuggacaacacaa

SEQ ID NO: 2506563 - RNA, 19 nt, Artificial Sequence
  Description of Artificial Sequence: Synthetic oligonucleotide
  modified_base (7)..(7): a, c, u, g, unknown or other
aauuaanccuuucauauua

SEQ ID NO: 2506564 - RNA, 19 nt, Artificial Sequence
  Description of Artificial Sequence: Synthetic oligonucleotide
acagauuuuaaauguaugg

SEQ ID NO: 2506565 - RNA, 19 nt, Artificial Sequence
  Description of Artificial Sequence: Synthetic oligonucleotide
aacaugcugugauagagac

SEQ ID NO: 2506566 - RNA, 19 nt, Artificial Sequence
  Description of Artificial Sequence: Synthetic oligonucleotide
  modified_base (3)..(3): a, c, u, g, unknown or other
aanccuuucauauuagcca

SEQ ID NO: 2506567 - RNA, 19 nt, Artificial Sequence
  Description of Artificial Sequence: Synthetic oligonucleotide
uugaguaauaaauacaagu

SEQ ID NO: 2506568 - RNA, 19 nt, Artificial Sequence
  Description of Artificial Sequence: Synthetic oligonucleotide
aaguugagaaacuagauua

SEQ ID NO: 2506569 - RNA, 19 nt, Artificial Sequence
  Description of Artificial Sequence: Synthetic oligonucleotide
  modified_base (4)..(4): a, c, u, g, unknown or other
uaanccuuucauauuagcc

SEQ ID NO: 2506570 - RNA, 19 nt, Artificial Sequence
  Description of Artificial Sequence: Synthetic oligonucleotide
uuuaaauguaugguaaacg

SEQ ID NO: 2506571 - RNA, 19 nt, Artificial Sequence
  Description of Artificial Sequence: Synthetic oligonucleotide
cuauacaccaggaugaacc

SEQ ID NO: 2506572 - RNA, 19 nt, Artificial Sequence
  Description of Artificial Sequence: Synthetic oligonucleotide
agcauuacuguuaaggucc

SEQ ID NO: 2506573 - RNA, 19 nt, Artificial Sequence
  Description of Artificial Sequence: Synthetic oligonucleotide
ucugaguuuuaucugcucg

SEQ ID NO: 2506574 - RNA, 19 nt, Artificial Sequence
  Description of Artificial Sequence: Synthetic oligonucleotide
uuaaauguaugguaaacgu

SEQ ID NO: 2506575 - RNA, 19 nt, Artificial Sequence
  Description of Artificial Sequence: Synthetic oligonucleotide
aguugugcaacacugaucu

SEQ ID NO: 2506576 - RNA, 19 nt, Artificial Sequence
  Description of Artificial Sequence: Synthetic oligonucleotide
cuaagcauuacuguuaagg

SEQ ID NO: 2506577 - RNA, 19 nt, Artificial Sequence
  Description of Artificial Sequence: Synthetic oligonucleotide
aguucugcaacccagguug

SEQ ID NO: 2506578 - RNA, 19 nt, Artificial Sequence
  Description of Artificial Sequence: Synthetic oligonucleotide
ucuuucugguuccagaucc

SEQ ID NO: 2506579 - RNA, 19 nt, Artificial Sequence
  Description of Artificial Sequence: Synthetic oligonucleotide
uuuccuacuaggauuagug

SEQ ID NO: 2506580 - RNA, 19 nt, Artificial Sequence
  Description of Artificial Sequence: Synthetic oligonucleotide
gaguaauaaauacaaguug

SEQ ID NO: 2506581 - RNA, 19 nt, Artificial Sequence
  Description of Artificial Sequence: Synthetic oligonucleotide
aagcauuacuguuaagguc

SEQ ID NO: 2506582 - RNA, 19 nt, Artificial Sequence
  Description of Artificial Sequence: Synthetic oligonucleotide
uugagaaacuagauuaaag

SEQ ID NO: 2506583 - RNA, 19 nt, Artificial Sequence
  Description of Artificial Sequence: Synthetic oligonucleotide
uagauguauggcaacaugc

SEQ ID NO: 2506584 - RNA, 19 nt, Artificial Sequence
  Description of Artificial Sequence: Synthetic oligonucleotide
ugaguaauaaauacaaguu

SEQ ID NO: 2506585 - RNA, 19 nt, Artificial Sequence
  Description of Artificial Sequence: Synthetic oligonucleotide
aaaagcuagaaaaggacag

SEQ ID NO: 2506586 - RNA, 19 nt, Artificial Sequence
  Description of Artificial Sequence: Synthetic oligonucleotide
gauucaccaaacuauacac

SEQ ID NO: 2506587 - RNA, 19 nt, Artificial Sequence
  Description of Artificial Sequence: Synthetic oligonucleotide
uucauauuagccaucaaua

SEQ ID NO: 2506588 - RNA, 19 nt, Artificial Sequence
  Description of Artificial Sequence: Synthetic oligonucleotide
uuuccucugaguuuuaucu

SEQ ID NO: 2506589 - RNA, 19 nt, Artificial Sequence
  Description of Artificial Sequence: Synthetic oligonucleotide
uucaccaaacuauacacca

SEQ ID NO: 2506590 - RNA, 19 nt, Artificial Sequence
  Description of Artificial Sequence: Synthetic oligonucleotide
auguacagaucucucaugg

SEQ ID NO: 2506591 - RNA, 19 nt, Artificial Sequence
  Description of Artificial Sequence: Synthetic oligonucleotide
uaaauguaugguaaacgug

SEQ ID NO: 2506592 - RNA, 19 nt, Artificial Sequence
  Description of Artificial Sequence: Synthetic oligonucleotide
uaugcacuucauuagaugu

SEQ ID NO: 2506593 - RNA, 19 nt, Artificial Sequence
  Description of Artificial Sequence: Synthetic oligonucleotide
acagaucucucauggaggc

SEQ ID NO: 2506594 - RNA, 19 nt, Artificial Sequence
  Description of Artificial Sequence: Synthetic oligonucleotide
gauagagacagguuuacca

SEQ ID NO: 2506595 - RNA, 19 nt, Artificial Sequence
  Description of Artificial Sequence: Synthetic oligonucleotide
ugauucaccaaacuauaca

SEQ ID NO: 2506596 - RNA, 19 nt, Artificial Sequence
  Description of Artificial Sequence: Synthetic oligonucleotide
gcuagaaaaggacagauug

SEQ ID NO: 2506597 - RNA, 19 nt, Artificial Sequence
  Description of Artificial Sequence: Synthetic oligonucleotide
uccaugaaaggacagcccc

SEQ ID NO: 2506598 - RNA, 19 nt, Artificial Sequence
  Description of Artificial Sequence: Synthetic oligonucleotide
aaaaucaacuaacaauauu

SEQ ID NO: 2506599 - RNA, 19 nt, Artificial Sequence
  Description of Artificial Sequence: Synthetic oligonucleotide
aaaaguucauccaccauug

SEQ ID NO: 2506600 - RNA, 19 nt, Artificial Sequence
  Description of Artificial Sequence: Synthetic oligonucleotide
uaagcauuacuguuaaggu

SEQ ID NO: 2506601 - RNA, 19 nt, Artificial Sequence
  Description of Artificial Sequence: Synthetic oligonucleotide
cuagaaaaggacagauugg

SEQ ID NO: 2506602 - RNA, 19 nt, Artificial Sequence
  Description of Artificial Sequence: Synthetic oligonucleotide
uucauuagauguauggcaa

SEQ ID NO: 2506603 - RNA, 19 nt, Artificial Sequence
  Description of Artificial Sequence: Synthetic oligonucleotide
uaguucauuugccugacga

SEQ ID NO: 2506604 - RNA, 19 nt, Artificial Sequence
  Description of Artificial Sequence: Synthetic oligonucleotide
auauuagccaucaauaaga

SEQ ID NO: 2506605 - RNA, 19 nt, Artificial Sequence
  Description of Artificial Sequence: Synthetic oligonucleotide
auaagaacuuaaaagcuag

SEQ ID NO: 2506606 - RNA, 19 nt, Artificial Sequence
  Description of Artificial Sequence: Synthetic oligonucleotide
ugugcaaauuuccucugag

SEQ ID NO: 2506607 - RNA, 19 nt, Artificial Sequence
  Description of Artificial Sequence: Synthetic oligonucleotide
uuagauguauggcaacaug

SEQ ID NO: 2506608 - RNA, 19 nt, Artificial Sequence
  Description of Artificial Sequence: Synthetic oligonucleotide
accaggaugaacccuuggc

SEQ ID NO: 2506609 - RNA, 19 nt, Artificial Sequence
  Description of Artificial Sequence: Synthetic oligonucleotide
ugauguuuccaugaaagga

SEQ ID NO: 2506610 - RNA, 19 nt, Artificial Sequence
  Description of Artificial Sequence: Synthetic oligonucleotide
  modified_base (5)..(5): a, c, u, g, unknown or other
uuaanccuuucauauuagc

SEQ ID NO: 2506611 - RNA, 19 nt, Artificial Sequence
  Description of Artificial Sequence: Synthetic oligonucleotide
ucuugagggccaaagaccu

SEQ ID NO: 2506612 - RNA, 19 nt, Artificial Sequence
  Description of Artificial Sequence: Synthetic oligonucleotide
gauguuuccaugaaaggac

SEQ ID NO: 2506613 - RNA, 19 nt, Artificial Sequence
  Description of Artificial Sequence: Synthetic oligonucleotide
ugaguuugaguaauaaaua

SEQ ID NO: 2506614 - RNA, 19 nt, Artificial Sequence
  Description of Artificial Sequence: Synthetic oligonucleotide
cugaaaagacuguugauuc

SEQ ID NO: 2506615 - RNA, 19 nt, Artificial Sequence
  Description of Artificial Sequence: Synthetic oligonucleotide
aaagaccuuaugcacuuca

SEQ ID NO: 2506616 - RNA, 19 nt, Artificial Sequence
  Description of Artificial Sequence: Synthetic oligonucleotide
gagaaacuagauuaaagaa

SEQ ID NO: 2506617 - RNA, 19 nt, Artificial Sequence
  Description of Artificial Sequence: Synthetic oligonucleotide
aguucuccaaagcagcauc

SEQ ID NO: 2506618 - RNA, 19 nt, Artificial Sequence
  Description of Artificial Sequence: Synthetic oligonucleotide
guaaaguucuccaaagcag

SEQ ID NO: 2506619 - RNA, 19 nt, Artificial Sequence
  Description of Artificial Sequence: Synthetic oligonucleotide
agauuuuaaauguauggua

SEQ ID NO: 2506620 - RNA, 19 nt, Artificial Sequence
  Description of Artificial Sequence: Synthetic oligonucleotide
  modified_base (2)..(2): a, c, u, g, unknown or other
anccuuucauauuagccau

SEQ ID NO: 2506621 - RNA, 19 nt, Artificial Sequence
  Description of Artificial Sequence: Synthetic oligonucleotide
cucgguauggccaggauug

SEQ ID NO: 2506622 - RNA, 19 nt, Artificial Sequence
  Description of Artificial Sequence: Synthetic oligonucleotide
agaacuuaaaagcuagaaa

SEQ ID NO: 2506623 - RNA, 19 nt, Artificial Sequence
  Description of Artificial Sequence: Synthetic oligonucleotide
uccuacuaggauuagugga

SEQ ID NO: 2506624 - RNA, 19 nt, Artificial Sequence
  Description of Artificial Sequence: Synthetic oligonucleotide
ggaugaauaguucauuugc

SEQ ID NO: 2506625 - RNA, 19 nt, Artificial Sequence
  Description of Artificial Sequence: Synthetic oligonucleotide
gacauaaccucucuuucug

SEQ ID NO: 2506626 - RNA, 19 nt, Artificial Sequence
  Description of Artificial Sequence: Synthetic oligonucleotide
aguuuuaucugcucgguau

SEQ ID NO: 2506627 - RNA, 19 nt, Artificial Sequence
  Description of Artificial Sequence: Synthetic oligonucleotide
ucucauuggcuugauaucc

SEQ ID NO: 2506628 - RNA, 19 nt, Artificial Sequence
  Description of Artificial Sequence: Synthetic oligonucleotide
ucucauggaggcaaacugc

SEQ ID NO: 2506629 - RNA, 19 nt, Artificial Sequence
  Description of Artificial Sequence: Synthetic oligonucleotide
uguaugguaaacgugcuaa

SEQ ID NO: 2506630 - RNA, 19 nt, Artificial Sequence
  Description of Artificial Sequence: Synthetic oligonucleotide
gaugaauaguucauuugcc

SEQ ID NO: 2506631 - RNA, 19 nt, Artificial Sequence
  Description of Artificial Sequence: Synthetic oligonucleotide
aauaagaacuuaaaagcua

SEQ ID NO: 2506632 - RNA, 19 nt, Artificial Sequence
  Description of Artificial Sequence: Synthetic oligonucleotide
uucauuugccugacgaucu

SEQ ID NO: 2506633 - RNA, 19 nt, Artificial Sequence
  Description of Artificial Sequence: Synthetic oligonucleotide
aacacaaguugugcaacac

SEQ ID NO: 2506634 - RNA, 19 nt, Artificial Sequence
  Description of Artificial Sequence: Synthetic oligonucleotide
uuaugcacuucauuagaug

SEQ ID NO: 2506635 - RNA, 19 nt, Artificial Sequence
  Description of Artificial Sequence: Synthetic oligonucleotide
aaacgugcuaagcauuacu

SEQ ID NO: 2506636 - RNA, 19 nt, Artificial Sequence
  Description of Artificial Sequence: Synthetic oligonucleotide
uccagaauuuccaguacug

SEQ ID NO: 2506637 - RNA, 19 nt, Artificial Sequence
  Description of Artificial Sequence: Synthetic oligonucleotide
ucauccaccauugauuuac

SEQ ID NO: 2506638 - RNA, 19 nt, Artificial Sequence
  Description of Artificial Sequence: Synthetic oligonucleotide
auuagccaucaauaagaac

SEQ ID NO: 2506639 - RNA, 19 nt, Artificial Sequence
  Description of Artificial Sequence: Synthetic oligonucleotide
aacagauuuuaaauguaug

SEQ ID NO: 2506640 - RNA, 19 nt, Artificial Sequence
  Description of Artificial Sequence: Synthetic oligonucleotide
aagaacuuaaaagcuagaa

SEQ ID NO: 2506641 - RNA, 19 nt, Artificial Sequence
  Description of Artificial Sequence: Synthetic oligonucleotide
  modified_base (8)..(8): a, c, u, g, unknown or other
aaauuaanccuuucauauu

SEQ ID NO: 2506642 - RNA, 19 nt, Artificial Sequence
  Description of Artificial Sequence: Synthetic oligonucleotide
cacuuuguuuccuacuagg

SEQ ID NO: 2506643 - RNA, 19 nt, Artificial Sequence
  Description of Artificial Sequence: Synthetic oligonucleotide
augguaaacgugcuaagca

SEQ ID NO: 2506644 - RNA, 19 nt, Artificial Sequence
  Description of Artificial Sequence: Synthetic oligonucleotide
guaauaaauacaaguugag

SEQ ID NO: 2506645 - RNA, 19 nt, Artificial Sequence
  Description of Artificial Sequence: Synthetic oligonucleotide
cugaguuuuaucugcucgg

SEQ ID NO: 2506646 - RNA, 19 nt, Artificial Sequence
  Description of Artificial Sequence: Synthetic oligonucleotide
gauguauggcaacaugcug

SEQ ID NO: 2506647 - RNA, 19 nt, Artificial Sequence
  Description of Artificial Sequence: Synthetic oligonucleotide
uugccugacgaucucagca

SEQ ID NO: 2506648 - RNA, 19 nt, Artificial Sequence
  Description of Artificial Sequence: Synthetic oligonucleotide
cuucauuagauguauggca

SEQ ID NO: 2506649 - RNA, 19 nt, Artificial Sequence
  Description of Artificial Sequence: Synthetic oligonucleotide
uuuggacaacacaaguugu

SEQ ID NO: 2506650 - RNA, 19 nt, Artificial Sequence
  Description of Artificial Sequence: Synthetic oligonucleotide
uguuaagguccuuggaucu

SEQ ID NO: 2506651 - RNA, 19 nt, Artificial Sequence
  Description of Artificial Sequence: Synthetic oligonucleotide
uugugcaacacugaucuug

SEQ ID NO: 2506652 - RNA, 19 nt, Artificial Sequence
  Description of Artificial Sequence: Synthetic oligonucleotide
caccaaacuauacaccagg

SEQ ID NO: 2506653 - RNA, 19 nt, Artificial Sequence
  Description of Artificial Sequence: Synthetic oligonucleotide
uauacaccaggaugaaccc

SEQ ID NO: 2506654 - RNA, 19 nt, Artificial Sequence
  Description of Artificial Sequence: Synthetic oligonucleotide
acuguuaagguccuuggau

SEQ ID NO: 2506655 - RNA, 19 nt, Artificial Sequence
  Description of Artificial Sequence: Synthetic oligonucleotide
auuacuguuaagguccuug

SEQ ID NO: 2506656 - RNA, 19 nt, Artificial Sequence
  Description of Artificial Sequence: Synthetic oligonucleotide
ugugauagagacagguuua

SEQ ID NO: 2506657 - RNA, 19 nt, Artificial Sequence
  Description of Artificial Sequence: Synthetic oligonucleotide
gaaaagacuguugauucac

SEQ ID NO: 2506658 - RNA, 19 nt, Artificial Sequence
  Description of Artificial Sequence: Synthetic oligonucleotide
uuaucugcucgguauggcc

SEQ ID NO: 2506659 - RNA, 19 nt, Artificial Sequence
  Description of Artificial Sequence: Synthetic oligonucleotide
uaugguaaacgugcuaagc

SEQ ID NO: 2506660 - RNA, 19 nt, Artificial Sequence
  Description of Artificial Sequence: Synthetic oligonucleotide
uuugauguacagaucucuc

SEQ ID NO: 2506661 - RNA, 19 nt, Artificial Sequence
  Description of Artificial Sequence: Synthetic oligonucleotide
auucaccaaacuauacacc

SEQ ID NO: 2506662 - RNA, 19 nt, Artificial Sequence
  Description of Artificial Sequence: Synthetic oligonucleotide
agaaacuagauuaaagaaa

SEQ ID NO: 2506663 - RNA, 19 nt, Artificial Sequence
  Description of Artificial Sequence: Synthetic oligonucleotide
gacagguuuaccaaggcuc

SEQ ID NO: 2506664 - RNA, 19 nt, Artificial Sequence
  Description of Artificial Sequence: Synthetic oligonucleotide
uguauggcaacaugcugug

SEQ ID NO: 2506665 - RNA, 19 nt, Artificial Sequence
  Description of Artificial Sequence: Synthetic oligonucleotide
auccugaaaagacuguuga

SEQ ID NO: 2506666 - RNA, 19 nt, Artificial Sequence
  Description of Artificial Sequence: Synthetic oligonucleotide
acacugaucuugcuucucg

SEQ ID NO: 2506667 - RNA, 19 nt, Artificial Sequence
  Description of Artificial Sequence: Synthetic oligonucleotide
uagagacagguuuaccaag

SEQ ID NO: 2506668 - RNA, 19 nt, Artificial Sequence
  Description of Artificial Sequence: Synthetic oligonucleotide
uauuagccaucaauaagaa

SEQ ID NO: 2506669 - RNA, 19 nt, Artificial Sequence
  Description of Artificial Sequence: Synthetic oligonucleotide
aacgugcuaagcauuacug

SEQ ID NO: 2506670 - RNA, 19 nt, Artificial Sequence
  Description of Artificial Sequence: Synthetic oligonucleotide
aaucaacuaacaauauuaa

SEQ ID NO: 2506671 - RNA, 19 nt, Artificial Sequence
  Description of Artificial Sequence: Synthetic oligonucleotide
ucaccaaacuauacaccag

SEQ ID NO: 2506672 - RNA, 19 nt, Artificial Sequence
  Description of Artificial Sequence: Synthetic oligonucleotide
auagagacagguuuaccaa

SEQ ID NO: 2506673 - RNA, 19 nt, Artificial Sequence
  Description of Artificial Sequence: Synthetic oligonucleotide
aagacuguugauucaccaa

SEQ ID NO: 2506674 - RNA, 19 nt, Artificial Sequence
  Description of Artificial Sequence: Synthetic oligonucleotide
uaucugcucgguauggcca

SEQ ID NO: 2506675 - RNA, 19 nt, Artificial Sequence
  Description of Artificial Sequence: Synthetic oligonucleotide
gaccuuaugcacuucauua

SEQ ID NO: 2506676 - RNA, 19 nt, Artificial Sequence
  Description of Artificial Sequence: Synthetic oligonucleotide
uugauucaccaaacuauac

SEQ ID NO: 2506677 - RNA, 19 nt, Artificial Sequence
  Description of Artificial Sequence: Synthetic oligonucleotide
aaagcuagaaaaggacaga

SEQ ID NO: 2506678 - RNA, 19 nt, Artificial Sequence
  Description of Artificial Sequence: Synthetic oligonucleotide
aguuugaguaauaaauaca

SEQ ID NO: 2506679 - RNA, 19 nt, Artificial Sequence
  Description of Artificial Sequence: Synthetic oligonucleotide
uaagaacuuaaaagcuaga

SEQ ID NO: 2506680 - RNA, 19 nt, Artificial Sequence
  Description of Artificial Sequence: Synthetic oligonucleotide
acaacacaaguugugcaac

SEQ ID NO: 2506681 - RNA, 19 nt, Artificial Sequence
  Description of Artificial Sequence: Synthetic oligonucleotide
agacuguugauucaccaaa

SEQ ID NO: 2506682 - RNA, 19 nt, Artificial Sequence
  Description of Artificial Sequence: Synthetic oligonucleotide
cugaguuugaguaauaaau

SEQ ID NO: 2506683 - RNA, 19 nt, Artificial Sequence
  Description of Artificial Sequence: Synthetic oligonucleotide
cuguuaagguccuuggauc

SEQ ID NO: 2506684 - RNA, 19 nt, Artificial Sequence
  Description of Artificial Sequence: Synthetic oligonucleotide
aaguugugcaacacugauc

SEQ ID NO: 2506685 - RNA, 19 nt, Artificial Sequence
  Description of Artificial Sequence: Synthetic oligonucleotide
aucaacuaacaauauuaaa

SEQ ID NO: 2506686 - RNA, 19 nt, Artificial Sequence
  Description of Artificial Sequence: Synthetic oligonucleotide
ugcuaagcauuacuguuaa

SEQ ID NO: 2506687 - RNA, 19 nt, Artificial Sequence
  Description of Artificial Sequence: Synthetic oligonucleotide
agacauaaccucucuuucu

SEQ ID NO: 2506688 - RNA, 19 nt, Artificial Sequence
  Description of Artificial Sequence: Synthetic oligonucleotide
ugguaaacgugcuaagcau

SEQ ID NO: 2506689 - RNA, 19 nt, Artificial Sequence
  Description of Artificial Sequence: Synthetic oligonucleotide
ucugaucucucauuggcuu

SEQ ID NO: 2506690 - RNA, 19 nt, Artificial Sequence
  Description of Artificial Sequence: Synthetic oligonucleotide
auacaaguugagaaacuag

SEQ ID NO: 2506691 - RNA, 19 nt, Artificial Sequence
  Description of Artificial Sequence: Synthetic oligonucleotide
acuguugauucaccaaacu

SEQ ID NO: 2506692 - RNA, 19 nt, Artificial Sequence
  Description of Artificial Sequence: Synthetic oligonucleotide
aauguaugguaaacgugcu

SEQ ID NO: 2506693 - RNA, 19 nt, Artificial Sequence
  Description of Artificial Sequence: Synthetic oligonucleotide
auguauggcaacaugcugu

SEQ ID NO: 2506694 - RNA, 19 nt, Artificial Sequence
  Description of Artificial Sequence: Synthetic oligonucleotide
ucauuagauguauggcaac

SEQ ID NO: 2506695 - RNA, 19 nt, Artificial Sequence
  Description of Artificial Sequence: Synthetic oligonucleotide
  modified_base (6)..(6): a, c, u, g, unknown or other
auuaanccuuucauauuag

SEQ ID NO: 2506696 - RNA, 19 nt, Artificial Sequence
  Description of Artificial Sequence: Synthetic oligonucleotide
cucaguucugcaacccagg

SEQ ID NO: 2506697 - RNA, 19 nt, Artificial Sequence
  Description of Artificial Sequence: Synthetic oligonucleotide
uacuguuaagguccuugga

SEQ ID NO: 2506698 - RNA, 19 nt, Artificial Sequence
  Description of Artificial Sequence: Synthetic oligonucleotide
uagguaauacugaguuuga

SEQ ID NO: 2506699 - RNA, 19 nt, Artificial Sequence
  Description of Artificial Sequence: Synthetic oligonucleotide
ucauuggcuugauauccug

SEQ ID NO: 2506700 - RNA, 19 nt, Artificial Sequence
  Description of Artificial Sequence: Synthetic oligonucleotide
uguacagaucucucaugga

SEQ ID NO: 2506701 - RNA, 19 nt, Artificial Sequence
  Description of Artificial Sequence: Synthetic oligonucleotide
ugcaacccagguuguaaag

SEQ ID NO: 2506702 - RNA, 19 nt, Artificial Sequence
  Description of Artificial Sequence: Synthetic oligonucleotide
caaggcucaguucugcaac

SEQ ID NO: 2506703 - RNA, 19 nt, Artificial Sequence
  Description of Artificial Sequence: Synthetic oligonucleotide
uacaccaggaugaacccuu

SEQ ID NO: 2506704 - RNA, 19 nt, Artificial Sequence
  Description of Artificial Sequence: Synthetic oligonucleotide
guaugguaaacgugcuaag

SEQ ID NO: 2506705 - RNA, 19 nt, Artificial Sequence
  Description of Artificial Sequence: Synthetic oligonucleotide
aaaguucuccaaagcagca

SEQ ID NO: 2506706 - RNA, 19 nt, Artificial Sequence
  Description of Artificial Sequence: Synthetic oligonucleotide
uuuaucugcucgguauggc

SEQ ID NO: 2506707 - RNA, 19 nt, Artificial Sequence
  Description of Artificial Sequence: Synthetic oligonucleotide
aacccagguuguaaaguuc

SEQ ID NO: 2506708 - RNA, 19 nt, Artificial Sequence
  Description of Artificial Sequence: Synthetic oligonucleotide
agacagguuuaccaaggcu

SEQ ID NO: 2506709 - RNA, 19 nt, Artificial Sequence
  Description of Artificial Sequence: Synthetic oligonucleotide
uguccagaauuuccaguac

SEQ ID NO: 2506710 - RNA, 19 nt, Artificial Sequence
  Description of Artificial Sequence: Synthetic oligonucleotide
acuauacaccaggaugaac

SEQ ID NO: 2506711 - RNA, 19 nt, Artificial Sequence
  Description of Artificial Sequence: Synthetic oligonucleotide
agauuggcaaagaacagau

SEQ ID NO: 2506712 - RNA, 19 nt, Artificial Sequence
  Description of Artificial Sequence: Synthetic oligonucleotide
guuuccaugaaaggacagc

SEQ ID NO: 2506713 - RNA, 19 nt, Artificial Sequence
  Description of Artificial Sequence: Synthetic oligonucleotide
ugcacuucauuagauguau

SEQ ID NO: 2506714 - RNA, 19 nt, Artificial Sequence
  Description of Artificial Sequence: Synthetic oligonucleotide
ggcuugauauccugaaaag

SEQ ID NO: 2506715 - RNA, 19 nt, Artificial Sequence
  Description of Artificial Sequence: Synthetic oligonucleotide
uaggauuaguggaacuuuu

SEQ ID NO: 2506716 - RNA, 19 nt, Artificial Sequence
  Description of Artificial Sequence: Synthetic oligonucleotide
aguucauccaccauugauu

SEQ ID NO: 2506717 - RNA, 19 nt, Artificial Sequence
  Description of Artificial Sequence: Synthetic oligonucleotide
aguucauuugccugacgau

SEQ ID NO: 2506718 - RNA, 19 nt, Artificial Sequence
  Description of Artificial Sequence: Synthetic oligonucleotide
agauguauggcaacaugcu

SEQ ID NO: 2506719 - RNA, 19 nt, Artificial Sequence
  Description of Artificial Sequence: Synthetic oligonucleotide
gauccacuuuguuuccuac

SEQ ID NO: 2506720 - RNA, 19 nt, Artificial Sequence
  Description of Artificial Sequence: Synthetic oligonucleotide
aggacagccccauucuuga

SEQ ID NO: 2506721 - RNA, 19 nt, Artificial Sequence
  Description of Artificial Sequence: Synthetic oligonucleotide
gguauggccaggauugagg

SEQ ID NO: 2506722 - RNA, 19 nt, Artificial Sequence
  Description of Artificial Sequence: Synthetic oligonucleotide
cagguuguaaaguucucca

SEQ ID NO: 2506723 - RNA, 19 nt, Artificial Sequence
  Description of Artificial Sequence: Synthetic oligonucleotide
cucacaaucugaucucuca

SEQ ID NO: 2506724 - RNA, 19 nt, Artificial Sequence
  Description of Artificial Sequence: Synthetic oligonucleotide
aagguccuuggaucuugag

SEQ ID NO: 2506725 - RNA, 19 nt, Artificial Sequence
  Description of Artificial Sequence: Synthetic oligonucleotide
acgugcuaagcauuacugu

SEQ ID NO: 2506726 - RNA, 19 nt, Artificial Sequence
  Description of Artificial Sequence: Synthetic oligonucleotide
ugauagagacagguuuacc

SEQ ID NO: 2506727 - RNA, 19 nt, Artificial Sequence
  Description of Artificial Sequence: Synthetic oligonucleotide
uacuaggauuaguggaacu

SEQ ID NO: 2506728 - RNA, 19 nt, Artificial Sequence
  Description of Artificial Sequence: Synthetic oligonucleotide
cucucauuggcuugauauc

SEQ ID NO: 2506729 - RNA, 19 nt, Artificial Sequence
  Description of Artificial Sequence: Synthetic oligonucleotide
gggaugaauaguucauuug

SEQ ID NO: 2506730 - RNA, 19 nt, Artificial Sequence
  Description of Artificial Sequence: Synthetic oligonucleotide
ugcuucucgggcagggaug

SEQ ID NO: 2506731 - RNA, 19 nt, Artificial Sequence
  Description of Artificial Sequence: Synthetic oligonucleotide
gcaacaugcugugauagag

SEQ ID NO: 2506732 - RNA, 19 nt, Artificial Sequence
  Description of Artificial Sequence: Synthetic oligonucleotide
aggaugaacccuuggccgu

SEQ ID NO: 2506733 - RNA, 19 nt, Artificial Sequence
  Description of Artificial Sequence: Synthetic oligonucleotide
agaucucucauggaggcaa

SEQ ID NO: 2506734 - RNA, 19 nt, Artificial Sequence
  Description of Artificial Sequence: Synthetic oligonucleotide
ucucgggcagggaugaaua

SEQ ID NO: 2506735 - RNA, 19 nt, Artificial Sequence
  Description of Artificial Sequence: Synthetic oligonucleotide
aggacagauuggcaaagaa

SEQ ID NO: 2506736 - RNA, 19 nt, Artificial Sequence
  Description of Artificial Sequence: Synthetic oligonucleotide
cacucucacaaucugaucu

SEQ ID NO: 2506737 - RNA, 19 nt, Artificial Sequence
  Description of Artificial Sequence: Synthetic oligonucleotide
uuggcuugauauccugaaa

SEQ ID NO: 2506738 - RNA, 19 nt, Artificial Sequence
  Description of Artificial Sequence: Synthetic oligonucleotide
auuagauguauggcaacau

SEQ ID NO: 2506739 - RNA, 19 nt, Artificial Sequence
  Description of Artificial Sequence: Synthetic oligonucleotide
agguaauacugaguuugag

SEQ ID NO: 2506740 - RNA, 19 nt, Artificial Sequence
  Description of Artificial Sequence: Synthetic oligonucleotide
cugaucucucauuggcuug

SEQ ID NO: 2506741 - RNA, 19 nt, Artificial Sequence
  Description of Artificial Sequence: Synthetic oligonucleotide
auaucucuucacucucaca

SEQ ID NO: 2506742 - RNA, 19 nt, Artificial Sequence
  Description of Artificial Sequence: Synthetic oligonucleotide
auuugccugacgaucucag

SEQ ID NO: 2506743 - RNA, 19 nt, Artificial Sequence
  Description of Artificial Sequence: Synthetic oligonucleotide
uugcuucucgggcagggau

SEQ ID NO: 2506744 - RNA, 19 nt, Artificial Sequence
  Description of Artificial Sequence: Synthetic oligonucleotide
aauuuccucugaguuuuau

SEQ ID NO: 2506745 - RNA, 19 nt, Artificial Sequence
  Description of Artificial Sequence: Synthetic oligonucleotide
cauuagauguauggcaaca

SEQ ID NO: 2506746 - RNA, 19 nt, Artificial Sequence
  Description of Artificial Sequence: Synthetic oligonucleotide
ugccugacgaucucagcaa

SEQ ID NO: 2506747 - RNA, 19 nt, Artificial Sequence
  Description of Artificial Sequence: Synthetic oligonucleotide
aacuauacaccaggaugaa

SEQ ID NO: 2506748 - RNA, 19 nt, Artificial Sequence
  Description of Artificial Sequence: Synthetic oligonucleotide
agaccuuaugcacuucauu

SEQ ID NO: 2506749 - RNA, 19 nt, Artificial Sequence
  Description of Artificial Sequence: Synthetic oligonucleotide
auaaccucucuuucugguu

SEQ ID NO: 2506750 - RNA, 19 nt, Artificial Sequence
  Description of Artificial Sequence: Synthetic oligonucleotide
aaggacagauuggcaaaga

SEQ ID NO: 2506751 - RNA, 19 nt, Artificial Sequence
  Description of Artificial Sequence: Synthetic oligonucleotide
acagguuuaccaaggcuca

SEQ ID NO: 2506752 - RNA, 19 nt, Artificial Sequence
  Description of Artificial Sequence: Synthetic oligonucleotide
uaaacgugcuaagcauuac

SEQ ID NO: 2506753 - RNA, 19 nt, Artificial Sequence
  Description of Artificial Sequence: Synthetic oligonucleotide
gaacagauuuuaaauguau

SEQ ID NO: 2506754 - RNA, 19 nt, Artificial Sequence
  Description of Artificial Sequence: Synthetic oligonucleotide
agccccauucuugagccag

SEQ ID NO: 2506755 - RNA, 19 nt, Artificial Sequence
  Description of Artificial Sequence: Synthetic oligonucleotide
ggacagauuggcaaagaac

SEQ ID NO: 2506756 - RNA, 19 nt, Artificial Sequence
  Description of Artificial Sequence: Synthetic oligonucleotide
ggcagggaugaauaguuca

SEQ ID NO: 2506757 - RNA, 19 nt, Artificial Sequence
  Description of Artificial Sequence: Synthetic oligonucleotide
guuuaccaaggcucaguuc

SEQ ID NO: 2506758 - RNA, 19 nt, Artificial Sequence
  Description of Artificial Sequence: Synthetic oligonucleotide
gugauagagacagguuuac

SEQ ID NO: 2506759 - RNA, 19 nt, Artificial Sequence
  Description of Artificial Sequence: Synthetic oligonucleotide
caacaugcugugauagaga

SEQ ID NO: 2506760 - RNA, 19 nt, Artificial Sequence
  Description of Artificial Sequence: Synthetic oligonucleotide
acccagguuguaaaguucu

SEQ ID NO: 2506761 - RNA, 19 nt, Artificial Sequence
  Description of Artificial Sequence: Synthetic oligonucleotide
uaccaaggcucaguucugc

SEQ ID NO: 2506762 - RNA, 19 nt, Artificial Sequence
  Description of Artificial Sequence: Synthetic oligonucleotide
aagaccuuaugcacuucau

SEQ ID NO: 2506763 - RNA, 19 nt, Artificial Sequence
  Description of Artificial Sequence: Synthetic oligonucleotide
agauccacuuuguuuccua

SEQ ID NO: 2506764 - RNA, 19 nt, Artificial Sequence
  Description of Artificial Sequence: Synthetic oligonucleotide
guauggccaggauugaggu

SEQ ID NO: 2506765 - RNA, 19 nt, Artificial Sequence
  Description of Artificial Sequence: Synthetic oligonucleotide
ucgggcagggaugaauagu

SEQ ID NO: 2506766 - RNA, 19 nt, Artificial Sequence
  Description of Artificial Sequence: Synthetic oligonucleotide
auguaugguaaacgugcua

SEQ ID NO: 2506767 - RNA, 19 nt, Artificial Sequence
  Description of Artificial Sequence: Synthetic oligonucleotide
cucgggcagggaugaauag

SEQ ID NO: 2506768 - RNA, 19 nt, Artificial Sequence
  Description of Artificial Sequence: Synthetic oligonucleotide
agguuuaccaaggcucagu

SEQ ID NO: 2506769 - RNA, 19 nt, Artificial Sequence
  Description of Artificial Sequence: Synthetic oligonucleotide
guaaacgugcuaagcauua

SEQ ID NO: 2506770 - RNA, 19 nt, Artificial Sequence
  Description of Artificial Sequence: Synthetic oligonucleotide
aucugaucucucauuggcu

SEQ ID NO: 2506771 - RNA, 19 nt, Artificial Sequence
  Description of Artificial Sequence: Synthetic oligonucleotide
guccuuggaucuugagggc

SEQ ID NO: 2506772 - RNA, 19 nt, Artificial Sequence
  Description of Artificial Sequence: Synthetic oligonucleotide
cuuaugcacuucauuagau

SEQ ID NO: 2506773 - RNA, 19 nt, Artificial Sequence
  Description of Artificial Sequence: Synthetic oligonucleotide
auggcaacaugcugugaua

SEQ ID NO: 2506774 - RNA, 19 nt, Artificial Sequence
  Description of Artificial Sequence: Synthetic oligonucleotide
caaguugagaaacuagauu

SEQ ID NO: 2506775 - RNA, 19 nt, Artificial Sequence
  Description of Artificial Sequence: Synthetic oligonucleotide
gaguuuuaucugcucggua

SEQ ID NO: 2506776 - RNA, 19 nt, Artificial Sequence
  Description of Artificial Sequence: Synthetic oligonucleotide
ccagguuguaaaguucucc

SEQ ID NO: 2506777 - RNA, 19 nt, Artificial Sequence
  Description of Artificial Sequence: Synthetic oligonucleotide
auacaccaggaugaacccu

SEQ ID NO: 2506778 - RNA, 19 nt, Artificial Sequence
  Description of Artificial Sequence: Synthetic oligonucleotide
ccuacuaggauuaguggaa

SEQ ID NO: 2506779 - RNA, 19 nt, Artificial Sequence
  Description of Artificial Sequence: Synthetic oligonucleotide
uucucgggcagggaugaau

SEQ ID NO: 2506780 - RNA, 19 nt, Artificial Sequence
  Description of Artificial Sequence: Synthetic oligonucleotide
cugccuucugaagacauaa

SEQ ID NO: 2506781 - RNA, 19 nt, Artificial Sequence
  Description of Artificial Sequence: Synthetic oligonucleotide
cagagcucugccuucugaa

SEQ ID NO: 2506782 - RNA, 19 nt, Artificial Sequence
  Description of Artificial Sequence: Synthetic oligonucleotide
caaguugugcaacacugau

SEQ ID NO: 2506783 - RNA, 19 nt, Artificial Sequence
  Description of Artificial Sequence: Synthetic oligonucleotide
cucgguuccugcggugucc

SEQ ID NO: 2506784 - RNA, 19 nt, Artificial Sequence
  Description of Artificial Sequence: Synthetic oligonucleotide
gugcaaauuuccucugagu

SEQ ID NO: 2506785 - RNA, 19 nt, Artificial Sequence
  Description of Artificial Sequence: Synthetic oligonucleotide
gugcuaagcauuacuguua

SEQ ID NO: 2506786 - RNA, 19 nt, Artificial Sequence
  Description of Artificial Sequence: Synthetic oligonucleotide
gccaucaauaagaacuuaa

SEQ ID NO: 2506787 - RNA, 19 nt, Artificial Sequence
  Description of Artificial Sequence: Synthetic oligonucleotide
agcuagaaaaggacagauu

SEQ ID NO: 2506788 - RNA, 19 nt, Artificial Sequence
  Description of Artificial Sequence: Synthetic oligonucleotide
ccacuuuguuuccuacuag

SEQ ID NO: 2506789 - RNA, 19 nt, Artificial Sequence
  Description of Artificial Sequence: Synthetic oligonucleotide
ucgguuccugcggugucca

SEQ ID NO: 2506790 - RNA, 19 nt, Artificial Sequence
  Description of Artificial Sequence: Synthetic oligonucleotide
cugcaacccagguuguaaa

SEQ ID NO: 2506791 - RNA, 19 nt, Artificial Sequence
  Description of Artificial Sequence: Synthetic oligonucleotide
cagguuuaccaaggcucag

SEQ ID NO: 2506792 - RNA, 19 nt, Artificial Sequence
  Description of Artificial Sequence: Synthetic oligonucleotide
augcacuucauuagaugua

SEQ ID NO: 2506793 - RNA, 19 nt, Artificial Sequence
  Description of Artificial Sequence: Synthetic oligonucleotide
gcuaagcauuacuguuaag

SEQ ID NO: 2506794 - RNA, 19 nt, Artificial Sequence
  Description of Artificial Sequence: Synthetic oligonucleotide
acaugcugugauagagaca

SEQ ID NO: 2506795 - RNA, 19 nt, Artificial Sequence
  Description of Artificial Sequence: Synthetic oligonucleotide
ugcucgguauggccaggau

SEQ ID NO: 2506796 - RNA, 19 nt, Artificial Sequence
  Description of Artificial Sequence: Synthetic oligonucleotide
cucauuggcuugauauccu

SEQ ID NO: 2506797 - RNA, 19 nt, Artificial Sequence
  Description of Artificial Sequence: Synthetic oligonucleotide
ucgguauggccaggauuga

SEQ ID NO: 2506798 - RNA, 19 nt, Artificial Sequence
  Description of Artificial Sequence: Synthetic oligonucleotide
aucucucauuggcuugaua

SEQ ID NO: 2506799 - RNA, 19 nt, Artificial Sequence
  Description of Artificial Sequence: Synthetic oligonucleotide
guuuccuacuaggauuagu

SEQ ID NO: 2506800 - RNA, 19 nt, Artificial Sequence
  Description of Artificial Sequence: Synthetic oligonucleotide
caaagaccuuaugcacuuc

SEQ ID NO: 2506801 - RNA, 19 nt, Artificial Sequence
  Description of Artificial Sequence: Synthetic oligonucleotide
uucugcaacccagguugua

SEQ ID NO: 2506802 - RNA, 19 nt, Artificial Sequence
  Description of Artificial Sequence: Synthetic oligonucleotide
ggcaaagaacagauuuuaa

SEQ ID NO: 2506803 - RNA, 19 nt, Artificial Sequence
  Description of Artificial Sequence: Synthetic oligonucleotide
gguuuaccaaggcucaguu

SEQ ID NO: 2506804 - RNA, 19 nt, Artificial Sequence
  Description of Artificial Sequence: Synthetic oligonucleotide
agccaucaauaagaacuua

SEQ ID NO: 2506805 - RNA, 19 nt, Artificial Sequence
  Description of Artificial Sequence: Synthetic oligonucleotide
ccaugaaaggacagcccca

SEQ ID NO: 2506806 - RNA, 19 nt, Artificial Sequence
  Description of Artificial Sequence: Synthetic oligonucleotide
auacugaguuugaguaaua

SEQ ID NO: 2506807 - RNA, 19 nt, Artificial Sequence
  Description of Artificial Sequence: Synthetic oligonucleotide
caacacugaucuugcuucu

SEQ ID NO: 2506808 - RNA, 19 nt, Artificial Sequence
  Description of Artificial Sequence: Synthetic oligonucleotide
uggccaggauugagguuuu

SEQ ID NO: 2506809 - RNA, 19 nt, Artificial Sequence
  Description of Artificial Sequence: Synthetic oligonucleotide
augaacccuuggccguuuu

SEQ ID NO: 2506810 - RNA, 19 nt, Artificial Sequence
  Description of Artificial Sequence: Synthetic oligonucleotide
gguaaacgugcuaagcauu

SEQ ID NO: 2506811 - RNA, 19 nt, Artificial Sequence
  Description of Artificial Sequence: Synthetic oligonucleotide
cugcgguguccagaauuuc

SEQ ID NO: 2506812 - RNA, 19 nt, Artificial Sequence
  Description of Artificial Sequence: Synthetic oligonucleotide
cucucacaaucugaucucu

SEQ ID NO: 2506813 - RNA, 19 nt, Artificial Sequence
  Description of Artificial Sequence: Synthetic oligonucleotide
cauccaccauugauuuacu

SEQ ID NO: 2506814 - RNA, 19 nt, Artificial Sequence
  Description of Artificial Sequence: Synthetic oligonucleotide
cccagguuguaaaguucuc

SEQ ID NO: 2506815 - RNA, 19 nt, Artificial Sequence
  Description of Artificial Sequence: Synthetic oligonucleotide
gcaacccagguuguaaagu

SEQ ID NO: 2506816 - RNA, 19 nt, Artificial Sequence
  Description of Artificial Sequence: Synthetic oligonucleotide
gguuccagauccacuuugu

SEQ ID NO: 2506817 - RNA, 19 nt, Artificial Sequence
  Description of Artificial Sequence: Synthetic oligonucleotide
ccaaacuauacaccaggau

SEQ ID NO: 2506818 - RNA, 19 nt, Artificial Sequence
  Description of Artificial Sequence: Synthetic oligonucleotide
guuaagguccuuggaucuu

SEQ ID NO: 2506819 - RNA, 19 nt, Artificial Sequence
  Description of Artificial Sequence: Synthetic oligonucleotide
gccugacgaucucagcaaa

SEQ ID NO: 2506820 - RNA, 19 nt, Artificial Sequence
  Description of Artificial Sequence: Synthetic oligonucleotide
ccugacgaucucagcaaaa

SEQ ID NO: 2506821 - RNA, 19 nt, Artificial Sequence
  Description of Artificial Sequence: Synthetic oligonucleotide
cgugcuaagcauuacuguu

SEQ ID NO: 2506822 - RNA, 19 nt, Artificial Sequence
  Description of Artificial Sequence: Synthetic oligonucleotide
gggcagggaugaauaguuc

SEQ ID NO: 2506823 - RNA, 19 nt, Artificial Sequence
  Description of Artificial Sequence: Synthetic oligonucleotide
cagggaugaauaguucauu

SEQ ID NO: 2506824 - RNA, 19 nt, Artificial Sequence
  Description of Artificial Sequence: Synthetic oligonucleotide
gugcaacacugaucuugcu

SEQ ID NO: 2506825 - RNA, 19 nt, Artificial Sequence
  Description of Artificial Sequence: Synthetic oligonucleotide
ggaggcaaacugcucgguu

SEQ ID NO: 2506826 - RNA, 19 nt, Artificial Sequence
  Description of Artificial Sequence: Synthetic oligonucleotide
gcucgguauggccaggauu

SEQ ID NO: 2506827 - RNA, 19 nt, Artificial Sequence
  Description of Artificial Sequence: Synthetic oligonucleotide
gccagagcucugccuucug

SEQ ID NO: 2506828 - RNA, 19 nt, Artificial Sequence
  Description of Artificial Sequence: Synthetic oligonucleotide
gcucgguuccugcgguguc

SEQ ID NO: 2506829 - RNA, 19 nt, Artificial Sequence
  Description of Artificial Sequence: Synthetic oligonucleotide
guucugcaacccagguugu

SEQ ID NO: 2506830 - RNA, 19 nt, Artificial Sequence
  Description of Artificial Sequence: Synthetic oligonucleotide
guugugcaacacugaucuu

SEQ ID NO: 2506831 - RNA, 19 nt, Artificial Sequence
  Description of Artificial Sequence: Synthetic oligonucleotide
cgguauggccaggauugag

SEQ ID NO: 2506832 - RNA, 19 nt, Artificial Sequence
  Description of Artificial Sequence: Synthetic oligonucleotide
gcugugauagagacagguu

SEQ ID NO: 2506833 - RNA, 19 nt, Artificial Sequence
  Description of Artificial Sequence: Synthetic oligonucleotide
cugguuccagauccacuuu

SEQ ID NO: 2506834 - RNA, 19 nt, Artificial Sequence
  Description of Artificial Sequence: Synthetic oligonucleotide
gcauuacuguuaagguccu

SEQ ID NO: 2506835 - RNA, 19 nt, Artificial Sequence
  Description of Artificial Sequence: Synthetic oligonucleotide
ccugcgguguccagaauuu

SEQ ID NO: 2506836 - RNA, 19 nt, Artificial Sequence
  Description of Artificial Sequence: Synthetic oligonucleotide
gccccauucuugagccaga

SEQ ID NO: 2506837 - RNA, 19 nt, Artificial Sequence
  Description of Artificial Sequence: Synthetic oligonucleotide
ggaugaacccuuggccguu

SEQ ID NO: 2506838 - RNA, 19 nt, Artificial Sequence
  Description of Artificial Sequence: Synthetic oligonucleotide
ggcaaacugcucgguuccu

SEQ ID NO: 2506839 - RNA, 19 nt, Artificial Sequence
  Description of Artificial Sequence: Synthetic oligonucleotide
  modified_base (1)..(1): a, c, u, g, unknown or other
nccuuucauauuagccauc

SEQ ID NO: 2506840 - RNA, 19 nt, Artificial Sequence
  Description of Artificial Sequence: Synthetic oligonucleotide
aauucuucgagcaaaacgg

SEQ ID NO: 2506841 - RNA, 19 nt, Artificial Sequence
  Description of Artificial Sequence: Synthetic oligonucleotide
aaaugcaccuuucuggccc

SEQ ID NO: 2506842 - RNA, 19 nt, Artificial Sequence
  Description of Artificial Sequence: Synthetic oligonucleotide
uaaauagaaggccaccugg

SEQ ID NO: 2506843 - RNA, 19 nt, Artificial Sequence
  Description of Artificial Sequence: Synthetic oligonucleotide
ucuccagguaaauagaagg

SEQ ID NO: 2506844 - RNA, 19 nt, Artificial Sequence
  Description of Artificial Sequence: Synthetic oligonucleotide
gagaaaugcaccuuucugg

SEQ ID NO: 2506845 - RNA, 19 nt, Artificial Sequence
  Description of Artificial Sequence: Synthetic oligonucleotide
aguuccacuuucuucagcc

SEQ ID NO: 2506846 - RNA, 19 nt, Artificial Sequence
  Description of Artificial Sequence: Synthetic oligonucleotide
agaaaugcaccuuucuggc

SEQ ID NO: 2506847 - RNA, 19 nt, Artificial Sequence
  Description of Artificial Sequence: Synthetic oligonucleotide
ucuaucaucaucugaaagu

SEQ ID NO: 2506848 - RNA, 19 nt, Artificial Sequence
  Description of Artificial Sequence: Synthetic oligonucleotide
ucuucuaucaucaucugaa

SEQ ID NO: 2506849 - RNA, 19 nt, Artificial Sequence
  Description of Artificial Sequence: Synthetic oligonucleotide
aucuucugggaccacaacc

SEQ ID NO: 2506850 - RNA, 19 nt, Artificial Sequence
  Description of Artificial Sequence: Synthetic oligonucleotide
caauucuucgagcaaaacg

SEQ ID NO: 2506851 - RNA, 19 nt, Artificial Sequence
  Description of Artificial Sequence: Synthetic oligonucleotide
aacggcuccuaucucgugc

SEQ ID NO: 2506852 - RNA, 19 nt, Artificial Sequence
  Description of Artificial Sequence: Synthetic oligonucleotide
cuucucuccagguaaauag

SEQ ID NO: 2506853 - RNA, 19 nt, Artificial Sequence
  Description of Artificial Sequence: Synthetic oligonucleotide
aaagucccaaaguuucagg

SEQ ID NO: 2506854 - RNA, 19 nt, Artificial Sequence
  Description of Artificial Sequence: Synthetic oligonucleotide
gacauucucagagaaaugc

SEQ ID NO: 2506855 - RNA, 19 nt, Artificial Sequence
  Description of Artificial Sequence: Synthetic oligonucleotide
uucucaacaacguaagccu

SEQ ID NO: 2506856 - RNA, 19 nt, Artificial Sequence
  Description of Artificial Sequence: Synthetic oligonucleotide
gaagcgauggguuuccaag

SEQ ID NO: 2506857 - RNA, 19 nt, Artificial Sequence
  Description of Artificial Sequence: Synthetic oligonucleotide
uucuaucaucaucugaaag

SEQ ID NO: 2506858 - RNA, 19 nt, Artificial Sequence
  Description of Artificial Sequence: Synthetic oligonucleotide
aucucgugcaagcugcucc

SEQ ID NO: 2506859 - RNA, 19 nt, Artificial Sequence
  Description of Artificial Sequence: Synthetic oligonucleotide
ucaggaggggaacuguugg

SEQ ID NO: 2506860 - RNA, 19 nt, Artificial Sequence
  Description of Artificial Sequence: Synthetic oligonucleotide
aaaguuucaggaggggaac

SEQ ID NO: 2506861 - RNA, 19 nt, Artificial Sequence
  Description of Artificial Sequence: Synthetic oligonucleotide
caaaacggcuccuaucucg

SEQ ID NO: 2506862 - RNA, 19 nt, Artificial Sequence
  Description of Artificial Sequence: Synthetic oligonucleotide
ugcuuuacccucuucagga

SEQ ID NO: 2506863 - RNA, 19 nt, Artificial Sequence
  Description of Artificial Sequence: Synthetic oligonucleotide
aauggacugugacauucuc

SEQ ID NO: 2506864 - RNA, 19 nt, Artificial Sequence
  Description of Artificial Sequence: Synthetic oligonucleotide
aggaguuccacuuucuuca

SEQ ID NO: 2506865 - RNA, 19 nt, Artificial Sequence
  Description of Artificial Sequence: Synthetic oligonucleotide
agcaaaacggcuccuaucu

SEQ ID NO: 2506866 - RNA, 19 nt, Artificial Sequence
  Description of Artificial Sequence: Synthetic oligonucleotide
uuggcuugcacauccaggc

SEQ ID NO: 2506867 - RNA, 19 nt, Artificial Sequence
  Description of Artificial Sequence: Synthetic oligonucleotide
aagcgauggguuuccaagg

SEQ ID NO: 2506868 - RNA, 19 nt, Artificial Sequence
  Description of Artificial Sequence: Synthetic oligonucleotide
aagucccaaaguuucagga

SEQ ID NO: 2506869 - RNA, 19 nt, Artificial Sequence
  Description of Artificial Sequence: Synthetic oligonucleotide
gagguaaggacccagcuuc

SEQ ID NO: 2506870 - RNA, 19 nt, Artificial Sequence
  Description of Artificial Sequence: Synthetic oligonucleotide
agagaaaugcaccuuucug

SEQ ID NO: 2506871 - RNA, 19 nt, Artificial Sequence
  Description of Artificial Sequence: Synthetic oligonucleotide
caucaguggagacaggagg

SEQ ID NO: 2506872 - RNA, 19 nt, Artificial Sequence
  Description of Artificial Sequence: Synthetic oligonucleotide
aacaacguaagccuccuuu

SEQ ID NO: 2506873 - RNA, 19 nt, Artificial Sequence
  Description of Artificial Sequence: Synthetic oligonucleotide
ucugaucugcuccaguuac

SEQ ID NO: 2506874 - RNA, 19 nt, Artificial Sequence
  Description of Artificial Sequence: Synthetic oligonucleotide
cugaaagucccaaaguuuc

SEQ ID NO: 2506875 - RNA, 19 nt, Artificial Sequence
  Description of Artificial Sequence: Synthetic oligonucleotide
uucugaaucuucugggacc

SEQ ID NO: 2506876 - RNA, 19 nt, Artificial Sequence
  Description of Artificial Sequence: Synthetic oligonucleotide
guucucaacaacguaagcc

SEQ ID NO: 2506877 - RNA, 19 nt, Artificial Sequence
  Description of Artificial Sequence: Synthetic oligonucleotide
gucccaaaguuucaggagg

SEQ ID NO: 2506878 - RNA, 19 nt, Artificial Sequence
  Description of Artificial Sequence: Synthetic oligonucleotide
ugaggaagcccaucagugg

SEQ ID NO: 2506879 - RNA, 19 nt, Artificial Sequence
  Description of Artificial Sequence: Synthetic oligonucleotide
ugguucucaggaacaaggg

SEQ ID NO: 2506880 - RNA, 19 nt, Artificial Sequence
  Description of Artificial Sequence: Synthetic oligonucleotide
ugcacauccaggcaggguc

SEQ ID NO: 2506881 - RNA, 19 nt, Artificial Sequence
  Description of Artificial Sequence: Synthetic oligonucleotide
aaucuucugggaccacaac

SEQ ID NO: 2506882 - RNA, 19 nt, Artificial Sequence
  Description of Artificial Sequence: Synthetic oligonucleotide
ucccaaaguuucaggaggg

SEQ ID NO: 2506883 - RNA, 19 nt, Artificial Sequence
  Description of Artificial Sequence: Synthetic oligonucleotide
uccaguuacuguuucugcc

SEQ ID NO: 2506884 - RNA, 19 nt, Artificial Sequence
  Description of Artificial Sequence: Synthetic oligonucleotide
uuaggggcaguccaaggug

SEQ ID NO: 2506885 - RNA, 19 nt, Artificial Sequence
  Description of Artificial Sequence: Synthetic oligonucleotide
uaaaggagucucagggucc

SEQ ID NO: 2506886 - RNA, 19 nt, Artificial Sequence
  Description of Artificial Sequence: Synthetic oligonucleotide
uuucuggcccguaaaggag

SEQ ID NO: 2506887 - RNA, 19 nt, Artificial Sequence
  Description of Artificial Sequence: Synthetic oligonucleotide
agcgauggguuuccaaggc

SEQ ID NO: 2506888 - RNA, 19 nt, Artificial Sequence
  Description of Artificial Sequence: Synthetic oligonucleotide
ugggaccacaaccucacag

SEQ ID NO: 2506889 - RNA, 19 nt, Artificial Sequence
  Description of Artificial Sequence: Synthetic oligonucleotide
aacguaagccuccuuugca

SEQ ID NO: 2506890 - RNA, 19 nt, Artificial Sequence
  Description of Artificial Sequence: Synthetic oligonucleotide
uucucagagaaaugcaccu

SEQ ID NO: 2506891 - RNA, 19 nt, Artificial Sequence
  Description of Artificial Sequence: Synthetic oligonucleotide
caugcucuggcucggaagg

SEQ ID NO: 2506892 - RNA, 19 nt, Artificial Sequence
  Description of Artificial Sequence: Synthetic oligonucleotide
ucuucgagcaaaacggcuc

SEQ ID NO: 2506893 - RNA, 19 nt, Artificial Sequence
  Description of Artificial Sequence: Synthetic oligonucleotide
uccagguaaauagaaggcc

SEQ ID NO: 2506894 - RNA, 19 nt, Artificial Sequence
  Description of Artificial Sequence: Synthetic oligonucleotide
aaugcaccuuucuggcccg

SEQ ID NO: 2506895 - RNA, 19 nt, Artificial Sequence
  Description of Artificial Sequence: Synthetic oligonucleotide
guaaaggagucucaggguc

SEQ ID NO: 2506896 - RNA, 19 nt, Artificial Sequence
  Description of Artificial Sequence: Synthetic oligonucleotide
cuccagguaaauagaaggc

SEQ ID NO: 2506897 - RNA, 19 nt, Artificial Sequence
  Description of Artificial Sequence: Synthetic oligonucleotide
uccuuugcagccgaagggg

SEQ ID NO: 2506898 - RNA, 19 nt, Artificial Sequence
  Description of Artificial Sequence: Synthetic oligonucleotide
guaaauagaaggccaccug

SEQ ID NO: 2506899 - RNA, 19 nt, Artificial Sequence
  Description of Artificial Sequence: Synthetic oligonucleotide
accacaaccucacagucgu

SEQ ID NO: 2506900 - RNA, 19 nt, Artificial Sequence
  Description of Artificial Sequence: Synthetic oligonucleotide
gaaauggacugugacauuc

SEQ ID NO: 2506901 - RNA, 19 nt, Artificial Sequence
  Description of Artificial Sequence: Synthetic oligonucleotide
gugguucucaggaacaagg

SEQ ID NO: 2506902 - RNA, 19 nt, Artificial Sequence
  Description of Artificial Sequence: Synthetic oligonucleotide
agucccaaaguuucaggag

SEQ ID NO: 2506903 - RNA, 19 nt, Artificial Sequence
  Description of Artificial Sequence: Synthetic oligonucleotide
cucaacaacguaagccucc

SEQ ID NO: 2506904 - RNA, 19 nt, Artificial Sequence
  Description of Artificial Sequence: Synthetic oligonucleotide
aacccugagccucauggcu

SEQ ID NO: 2506905 - RNA, 19 nt, Artificial Sequence
  Description of Artificial Sequence: Synthetic oligonucleotide
gaaagucccaaaguuucag

SEQ ID NO: 2506906 - RNA, 19 nt, Artificial Sequence
  Description of Artificial Sequence: Synthetic oligonucleotide
acaacguaagccuccuuug

SEQ ID NO: 2506907 - RNA, 19 nt, Artificial Sequence
  Description of Artificial Sequence: Synthetic oligonucleotide
caaggaaauggacugugac

SEQ ID NO: 2506908 - RNA, 19 nt, Artificial Sequence
  Description of Artificial Sequence: Synthetic oligonucleotide
agcaucagcuucuaucuga

SEQ ID NO: 2506909 - RNA, 19 nt, Artificial Sequence
  Description of Artificial Sequence: Synthetic oligonucleotide
ugaaagucccaaaguuuca

SEQ ID NO: 2506910 - RNA, 19 nt, Artificial Sequence
  Description of Artificial Sequence: Synthetic oligonucleotide
uuccgggacccucaggcgg

SEQ ID NO: 2506911 - RNA, 19 nt, Artificial Sequence
  Description of Artificial Sequence: Synthetic oligonucleotide
ucugggaccacaaccucac

SEQ ID NO: 2506912 - RNA, 19 nt, Artificial Sequence
  Description of Artificial Sequence: Synthetic oligonucleotide
aaauagaaggccaccugga

SEQ ID NO: 2506913 - RNA, 19 nt, Artificial Sequence
  Description of Artificial Sequence: Synthetic oligonucleotide
uccuaucucgugcaagcug

SEQ ID NO: 2506914 - RNA, 19 nt, Artificial Sequence
  Description of Artificial Sequence: Synthetic oligonucleotide
uacuguuucugccggccag

SEQ ID NO: 2506915 - RNA, 19 nt, Artificial Sequence
  Description of Artificial Sequence: Synthetic oligonucleotide
auucuucgagcaaaacggc

SEQ ID NO: 2506916 - RNA, 19 nt, Artificial Sequence
  Description of Artificial Sequence: Synthetic oligonucleotide
uucaggaggggaacuguug

SEQ ID NO: 2506917 - RNA, 19 nt, Artificial Sequence
  Description of Artificial Sequence: Synthetic oligonucleotide
acguaagccuccuuugcag

SEQ ID NO: 2506918 - RNA, 19 nt, Artificial Sequence
  Description of Artificial Sequence: Synthetic oligonucleotide
uucuucgagcaaaacggcu

SEQ ID NO: 2506919 - RNA, 19 nt, Artificial Sequence
  Description of Artificial Sequence: Synthetic oligonucleotide
acugaggaagcccaucagu

SEQ ID NO: 2506920 - RNA, 19 nt, Artificial Sequence
  Description of Artificial Sequence: Synthetic oligonucleotide
cuucugaaucuucugggac

SEQ ID NO: 2506921 - RNA, 19 nt, Artificial Sequence
  Description of Artificial Sequence: Synthetic oligonucleotide
ucucuccagguaaauagaa

SEQ ID NO: 2506922 - RNA, 19 nt, Artificial Sequence
  Description of Artificial Sequence: Synthetic oligonucleotide
cuucgagcaaaacggcucc

SEQ ID NO: 2506923 - RNA, 19 nt, Artificial Sequence
  Description of Artificial Sequence: Synthetic oligonucleotide
guaaggacccagcuucucc

SEQ ID NO: 2506924 - RNA, 19 nt, Artificial Sequence
  Description of Artificial Sequence: Synthetic oligonucleotide
ccguaaaggagucucaggg

SEQ ID NO: 2506925 - RNA, 19 nt, Artificial Sequence
  Description of Artificial Sequence: Synthetic oligonucleotide
ugacauucucagagaaaug

SEQ ID NO: 2506926 - RNA, 19 nt, Artificial Sequence
  Description of Artificial Sequence: Synthetic oligonucleotide
gaaaugcaccuuucuggcc

SEQ ID NO: 2506927 - RNA, 19 nt, Artificial Sequence
  Description of Artificial Sequence: Synthetic oligonucleotide
uucugggaccacaaccuca

SEQ ID NO: 2506928 - RNA, 19 nt, Artificial Sequence
  Description of Artificial Sequence: Synthetic oligonucleotide
ugugacauucucagagaaa

SEQ ID NO: 2506929 - RNA, 19 nt, Artificial Sequence
  Description of Artificial Sequence: Synthetic oligonucleotide
cuuucuggcccguaaagga

SEQ ID NO: 2506930 - RNA, 19 nt, Artificial Sequence
  Description of Artificial Sequence: Synthetic oligonucleotide
uaucugaucugcuccaguu

SEQ ID NO: 2506931 - RNA, 19 nt, Artificial Sequence
  Description of Artificial Sequence: Synthetic oligonucleotide
ucaucaucugaaaguccca

SEQ ID NO: 2506932 - RNA, 19 nt, Artificial Sequence
  Description of Artificial Sequence: Synthetic oligonucleotide
gucgucaucuucuaucauc

SEQ ID NO: 2506933 - RNA, 19 nt, Artificial Sequence
  Description of Artificial Sequence: Synthetic oligonucleotide
aucuucuaucaucaucuga

SEQ ID NO: 2506934 - RNA, 19 nt, Artificial Sequence
  Description of Artificial Sequence: Synthetic oligonucleotide
cugcuuuacccucuucagg

SEQ ID NO: 2506935 - RNA, 19 nt, Artificial Sequence
  Description of Artificial Sequence: Synthetic oligonucleotide
gaggaagcccaucagugga

SEQ ID NO: 2506936 - RNA, 19 nt, Artificial Sequence
  Description of Artificial Sequence: Synthetic oligonucleotide
aggacccagcuucuccucc

SEQ ID NO: 2506937 - RNA, 19 nt, Artificial Sequence
  Description of Artificial Sequence: Synthetic oligonucleotide
caaaguuucaggaggggaa

SEQ ID NO: 2506938 - RNA, 19 nt, Artificial Sequence
  Description of Artificial Sequence: Synthetic oligonucleotide
ugaaucuucugggaccaca

SEQ ID NO: 2506939 - RNA, 19 nt, Artificial Sequence
  Description of Artificial Sequence: Synthetic oligonucleotide
ucucaacaacguaagccuc

SEQ ID NO: 2506940 - RNA, 19 nt, Artificial Sequence
  Description of Artificial Sequence: Synthetic oligonucleotide
accuuucuggcccguaaag

SEQ ID NO: 2506941 - RNA, 19 nt, Artificial Sequence
  Description of Artificial Sequence: Synthetic oligonucleotide
caguuacuguuucugccgg

SEQ ID NO: 2506942 - RNA, 19 nt, Artificial Sequence
  Description of Artificial Sequence: Synthetic oligonucleotide
ucucgugcaagcugcuccc

SEQ ID NO: 2506943 - RNA, 19 nt, Artificial Sequence
  Description of Artificial Sequence: Synthetic oligonucleotide
uccacaagucccucugucu

SEQ ID NO: 2506944 - RNA, 19 nt, Artificial Sequence
  Description of Artificial Sequence: Synthetic oligonucleotide
uucuggcccguaaaggagu

SEQ ID NO: 2506945 - RNA, 19 nt, Artificial Sequence
  Description of Artificial Sequence: Synthetic oligonucleotide
guaagccuccuuugcagcc

SEQ ID NO: 2506946 - RNA, 19 nt, Artificial Sequence
  Description of Artificial Sequence: Synthetic oligonucleotide
uaagccuccuuugcagccg

SEQ ID NO: 2506947 - RNA, 19 nt, Artificial Sequence
  Description of Artificial Sequence: Synthetic oligonucleotide
ugagguaaggacccagcuu

SEQ ID NO: 2506948 - RNA, 19 nt, Artificial Sequence
  Description of Artificial Sequence: Synthetic oligonucleotide
uuccaaggcgugcccaugc

SEQ ID NO: 2506949 - RNA, 19 nt, Artificial Sequence
  Description of Artificial Sequence: Synthetic oligonucleotide
ucuggcucggaaggcaggg

SEQ ID NO: 2506950 - RNA, 19 nt, Artificial Sequence
  Description of Artificial Sequence: Synthetic oligonucleotide
ccuaucucgugcaagcugc

SEQ ID NO: 2506951 - RNA, 19 nt, Artificial Sequence
  Description of Artificial Sequence: Synthetic oligonucleotide
aggaacaaggggaggugcc

SEQ ID NO: 2506952 - RNA, 19 nt, Artificial Sequence
  Description of Artificial Sequence: Synthetic oligonucleotide
caacguaagccuccuuugc

SEQ ID NO: 2506953 - RNA, 19 nt, Artificial Sequence
  Description of Artificial Sequence: Synthetic oligonucleotide
auggguuuccaaggcgugc

SEQ ID NO: 2506954 - RNA, 19 nt, Artificial Sequence
  Description of Artificial Sequence: Synthetic oligonucleotide
guuacuguuucugccggcc

SEQ ID NO: 2506955 - RNA, 19 nt, Artificial Sequence
  Description of Artificial Sequence: Synthetic oligonucleotide
uguuucugccggccagggg

SEQ ID NO: 2506956 - RNA, 19 nt, Artificial Sequence
  Description of Artificial Sequence: Synthetic oligonucleotide
uucaggaguuccacuuucu

SEQ ID NO: 2506957 - RNA, 19 nt, Artificial Sequence
  Description of Artificial Sequence: Synthetic oligonucleotide
gaacaaggggaggugccgg

SEQ ID NO: 2506958 - RNA, 19 nt, Artificial Sequence
  Description of Artificial Sequence: Synthetic oligonucleotide
ccaguuacuguuucugccg

SEQ ID NO: 2506959 - RNA, 19 nt, Artificial Sequence
  Description of Artificial Sequence: Synthetic oligonucleotide
gugcaagcugcucccaggg

SEQ ID NO: 2506960 - RNA, 19 nt, Artificial Sequence
  Description of Artificial Sequence: Synthetic oligonucleotide
aaaggagucucaggguccu

SEQ ID NO: 2506961 - RNA, 19 nt, Artificial Sequence
  Description of Artificial Sequence: Synthetic oligonucleotide
gaggggaacuguuggcuug

SEQ ID NO: 2506962 - RNA, 19 nt, Artificial Sequence
  Description of Artificial Sequence: Synthetic oligonucleotide
agccucauggcugggacuc

SEQ ID NO: 2506963 - RNA, 19 nt, Artificial Sequence
  Description of Artificial Sequence: Synthetic oligonucleotide
uuccacaagucccucuguc

SEQ ID NO: 2506964 - RNA, 19 nt, Artificial Sequence
  Description of Artificial Sequence: Synthetic oligonucleotide
uuacuguuucugccggcca

SEQ ID NO: 2506965 - RNA, 19 nt, Artificial Sequence
  Description of Artificial Sequence: Synthetic oligonucleotide
gugcccaugcucuggcucg

SEQ ID NO: 2506966 - RNA, 19 nt, Artificial Sequence
  Description of Artificial Sequence: Synthetic oligonucleotide
cucccagggaccacgucgg

SEQ ID NO: 2506967 - RNA, 19 nt, Artificial Sequence
  Description of Artificial Sequence: Synthetic oligonucleotide
ucuaucugaucugcuccag

SEQ ID NO: 2506968 - RNA, 19 nt, Artificial Sequence
  Description of Artificial Sequence: Synthetic oligonucleotide
gaaggcaggggugagguaa

SEQ ID NO: 2506969 - RNA, 19 nt, Artificial Sequence
  Description of Artificial Sequence: Synthetic oligonucleotide
uggguuuccaaggcgugcc

SEQ ID NO: 2506970 - RNA, 19 nt, Artificial Sequence
  Description of Artificial Sequence: Synthetic oligonucleotide
cucugucugcucuccaggc

SEQ ID NO: 2506971 - RNA, 19 nt, Artificial Sequence
  Description of Artificial Sequence: Synthetic oligonucleotide
aagcccaucaguggagaca

SEQ ID NO: 2506972 - RNA, 19 nt, Artificial Sequence
  Description of Artificial Sequence: Synthetic oligonucleotide
aaauggacugugacauucu

SEQ ID NO: 2506973 - RNA, 19 nt, Artificial Sequence
  Description of Artificial Sequence: Synthetic oligonucleotide
gcugguccugcccagacag

SEQ ID NO: 2506974 - RNA, 19 nt, Artificial Sequence
  Description of Artificial Sequence: Synthetic oligonucleotide
gcucccagggaccacgucg

SEQ ID NO: 2506975 - RNA, 19 nt, Artificial Sequence
  Description of Artificial Sequence: Synthetic oligonucleotide
caguccaagguggugcugg

SEQ ID NO: 2506976 - RNA, 19 nt, Artificial Sequence
  Description of Artificial Sequence: Synthetic oligonucleotide
agugcucugcuuccacaag

SEQ ID NO: 2506977 - RNA, 19 nt, Artificial Sequence
  Description of Artificial Sequence: Synthetic oligonucleotide
gaccacgucgggcagccug

SEQ ID NO: 2506978 - RNA, 19 nt, Artificial Sequence
  Description of Artificial Sequence: Synthetic oligonucleotide
gcuuccgggacccucaggc

SEQ ID NO: 2506979 - RNA, 19 nt, Artificial Sequence
  Description of Artificial Sequence: Synthetic oligonucleotide
cuucaggaguuccacuuuc

SEQ ID NO: 2506980 - RNA, 19 nt, Artificial Sequence
  Description of Artificial Sequence: Synthetic oligonucleotide
ucaacaacguaagccuccu

SEQ ID NO: 2506981 - RNA, 19 nt, Artificial Sequence
  Description of Artificial Sequence: Synthetic oligonucleotide
gacagcaaggaaauggacu

SEQ ID NO: 2506982 - RNA, 19 nt, Artificial Sequence
  Description of Artificial Sequence: Synthetic oligonucleotide
aacuguuggcuugcacauc

SEQ ID NO: 2506983 - RNA, 19 nt, Artificial Sequence
  Description of Artificial Sequence: Synthetic oligonucleotide
uggaagagagagugcucug

SEQ ID NO: 2506984 - RNA, 19 nt, Artificial Sequence
  Description of Artificial Sequence: Synthetic oligonucleotide
gagcaaaacggcuccuauc

SEQ ID NO: 2506985 - RNA, 19 nt, Artificial Sequence
  Description of Artificial Sequence: Synthetic oligonucleotide
aagagagagugcucugcuu

SEQ ID NO: 2506986 - RNA, 19 nt, Artificial Sequence
  Description of Artificial Sequence: Synthetic oligonucleotide
cugggcaauucuucgagca

SEQ ID NO: 2506987 - RNA, 19 nt, Artificial Sequence
  Description of Artificial Sequence: Synthetic oligonucleotide
aguuucaggaggggaacug

SEQ ID NO: 2506988 - RNA, 19 nt, Artificial Sequence
  Description of Artificial Sequence: Synthetic oligonucleotide
uuucaggaggggaacuguu

SEQ ID NO: 2506989 - RNA, 19 nt, Artificial Sequence
  Description of Artificial Sequence: Synthetic oligonucleotide
ucgugcaagcugcucccag

SEQ ID NO: 2506990 - RNA, 19 nt, Artificial Sequence
  Description of Artificial Sequence: Synthetic oligonucleotide
cucuccaggcagacaaccc

SEQ ID NO: 2506991 - RNA, 19 nt, Artificial Sequence
  Description of Artificial Sequence: Synthetic oligonucleotide
aucaguggagacaggaggu

SEQ ID NO: 2506992 - RNA, 19 nt, Artificial Sequence
  Description of Artificial Sequence: Synthetic oligonucleotide
uucuccuccgccugggcaa

SEQ ID NO: 2506993 - RNA, 19 nt, Artificial Sequence
  Description of Artificial Sequence: Synthetic oligonucleotide
aggggaacuguuggcuugc

SEQ ID NO: 2506994 - RNA, 19 nt, Artificial Sequence
  Description of Artificial Sequence: Synthetic oligonucleotide
ucuucaggaguuccacuuu

SEQ ID NO: 2506995 - RNA, 19 nt, Artificial Sequence
  Description of Artificial Sequence: Synthetic oligonucleotide
uccgccugggcaauucuuc

SEQ ID NO: 2506996 - RNA, 19 nt, Artificial Sequence
  Description of Artificial Sequence: Synthetic oligonucleotide
acgucgggcagccugggcu

SEQ ID NO: 2506997 - RNA, 19 nt, Artificial Sequence
  Description of Artificial Sequence: Synthetic oligonucleotide
ucaggaguuccacuuucuu

SEQ ID NO: 2506998 - RNA, 19 nt, Artificial Sequence
  Description of Artificial Sequence: Synthetic oligonucleotide
aaguuucaggaggggaacu

SEQ ID NO: 2506999 - RNA, 19 nt, Artificial Sequence
  Description of Artificial Sequence: Synthetic oligonucleotide
gcugcuuuacccucuucag

SEQ ID NO: 2507000 - RNA, 19 nt, Artificial Sequence
  Description of Artificial Sequence: Synthetic oligonucleotide
acuguuucugccggccagg

SEQ ID NO: 2507001 - RNA, 19 nt, Artificial Sequence
  Description of Artificial Sequence: Synthetic oligonucleotide
ugggcaauucuucgagcaa

SEQ ID NO: 2507002 - RNA, 19 nt, Artificial Sequence
  Description of Artificial Sequence: Synthetic oligonucleotide
aaacggcuccuaucucgug

SEQ ID NO: 2507003 - RNA, 19 nt, Artificial Sequence
  Description of Artificial Sequence: Synthetic oligonucleotide
agcccgacugaggaagccc

SEQ ID NO: 2507004 - RNA, 19 nt, Artificial Sequence
  Description of Artificial Sequence: Synthetic oligonucleotide
gaguuccacuuucuucagc

SEQ ID NO: 2507005 - RNA, 19 nt, Artificial Sequence
  Description of Artificial Sequence: Synthetic oligonucleotide
gugacauucucagagaaau

SEQ ID NO: 2507006 - RNA, 19 nt, Artificial Sequence
  Description of Artificial Sequence: Synthetic oligonucleotide
agagugcucugcuuccaca

SEQ ID NO: 2507007 - RNA, 19 nt, Artificial Sequence
  Description of Artificial Sequence: Synthetic oligonucleotide
caguggagacaggaggugg

SEQ ID NO: 2507008 - RNA, 19 nt, Artificial Sequence
  Description of Artificial Sequence: Synthetic oligonucleotide
gcuccuaucucgugcaagc

SEQ ID NO: 2507009 - RNA, 19 nt, Artificial Sequence
  Description of Artificial Sequence: Synthetic oligonucleotide
gauggguuuccaaggcgug

SEQ ID NO: 2507010 - RNA, 19 nt, Artificial Sequence
  Description of Artificial Sequence: Synthetic oligonucleotide
acucuugucugggucagcu

SEQ ID NO: 2507011 - RNA, 19 nt, Artificial Sequence
  Description of Artificial Sequence: Synthetic oligonucleotide
caacccugagccucauggc

SEQ ID NO: 2507012 - RNA, 19 nt, Artificial Sequence
  Description of Artificial Sequence: Synthetic oligonucleotide
uggagacaggagguggaag

SEQ ID NO: 2507013 - RNA, 19 nt, Artificial Sequence
  Description of Artificial Sequence: Synthetic oligonucleotide
gaagagagagugcucugcu

SEQ ID NO: 2507014 - RNA, 19 nt, Artificial Sequence
  Description of Artificial Sequence: Synthetic oligonucleotide
cuuccgggacccucaggcg

SEQ ID NO: 2507015 - RNA, 19 nt, Artificial Sequence
  Description of Artificial Sequence: Synthetic oligonucleotide
caggaggggaacuguuggc

SEQ ID NO: 2507016 - RNA, 19 nt, Artificial Sequence
  Description of Artificial Sequence: Synthetic oligonucleotide
aaggcgugcccaugcucug

SEQ ID NO: 2507017 - RNA, 19 nt, Artificial Sequence
  Description of Artificial Sequence: Synthetic oligonucleotide
agacaggagguggaaggag

SEQ ID NO: 2507018 - RNA, 19 nt, Artificial Sequence
  Description of Artificial Sequence: Synthetic oligonucleotide
gaacuguuggcuugcacau

SEQ ID NO: 2507019 - RNA, 19 nt, Artificial Sequence
  Description of Artificial Sequence: Synthetic oligonucleotide
gagugcucugcuuccacaa

SEQ ID NO: 2507020 - RNA, 19 nt, Artificial Sequence
  Description of Artificial Sequence: Synthetic oligonucleotide
uggcuugcacauccaggca

SEQ ID NO: 2507021 - RNA, 19 nt, Artificial Sequence
  Description of Artificial Sequence: Synthetic oligonucleotide
gcuucuaucugaucugcuc

SEQ ID NO: 2507022 - RNA, 19 nt, Artificial Sequence
  Description of Artificial Sequence: Synthetic oligonucleotide
acaaccucacagucgucau

SEQ ID NO: 2507023 - RNA, 19 nt, Artificial Sequence
  Description of Artificial Sequence: Synthetic oligonucleotide
cuggcuucucuccagguaa

SEQ ID NO: 2507024 - RNA, 19 nt, Artificial Sequence
  Description of Artificial Sequence: Synthetic oligonucleotide
uggcugggacucuugucug

SEQ ID NO: 2507025 - RNA, 19 nt, Artificial Sequence
  Description of Artificial Sequence: Synthetic oligonucleotide
cugcucuccaggcagacaa

SEQ ID NO: 2507026 - RNA, 19 nt, Artificial Sequence
  Description of Artificial Sequence: Synthetic oligonucleotide
ugucugcucuccaggcaga

SEQ ID NO: 2507027 - RNA, 19 nt, Artificial Sequence
  Description of Artificial Sequence: Synthetic oligonucleotide
aucugaucugcuccaguua

SEQ ID NO: 2507028 - RNA, 19 nt, Artificial Sequence
  Description of Artificial Sequence: Synthetic oligonucleotide
auccaggcagggucccugg

SEQ ID NO: 2507029 - RNA, 19 nt, Artificial Sequence
  Description of Artificial Sequence: Synthetic oligonucleotide
ugcaagcugcucccaggga

SEQ ID NO: 2507030 - RNA, 19 nt, Artificial Sequence
  Description of Artificial Sequence: Synthetic oligonucleotide
ccuccuuugcagccgaagg

SEQ ID NO: 2507031 - RNA, 19 nt, Artificial Sequence
  Description of Artificial Sequence: Synthetic oligonucleotide
cagcuucuaucugaucugc

SEQ ID NO: 2507032 - RNA, 19 nt, Artificial Sequence
  Description of Artificial Sequence: Synthetic oligonucleotide
ccagguaaauagaaggcca

SEQ ID NO: 2507033 - RNA, 19 nt, Artificial Sequence
  Description of Artificial Sequence: Synthetic oligonucleotide
cuccaagcccgacugagga

SEQ ID NO: 2507034 - RNA, 19 nt, Artificial Sequence
  Description of Artificial Sequence: Synthetic oligonucleotide
uacccucuucaggaguucc

SEQ ID NO: 2507035 - RNA, 19 nt, Artificial Sequence
  Description of Artificial Sequence: Synthetic oligonucleotide
ggaacaaggggaggugccg

SEQ ID NO: 2507036 - RNA, 19 nt, Artificial Sequence
  Description of Artificial Sequence: Synthetic oligonucleotide
gguucucaacaacguaagc

SEQ ID NO: 2507037 - RNA, 19 nt, Artificial Sequence
  Description of Artificial Sequence: Synthetic oligonucleotide
agcuuaggggcaguccaag

SEQ ID NO: 2507038 - RNA, 19 nt, Artificial Sequence
  Description of Artificial Sequence: Synthetic oligonucleotide
ggguucucaacaacguaag

SEQ ID NO: 2507039 - RNA, 19 nt, Artificial Sequence
  Description of Artificial Sequence: Synthetic oligonucleotide
uccaaggcgugcccaugcu

SEQ ID NO: 2507040 - RNA, 19 nt, Artificial Sequence
  Description of Artificial Sequence: Synthetic oligonucleotide
cugugacauucucagagaa

SEQ ID NO: 2507041 - RNA, 19 nt, Artificial Sequence
  Description of Artificial Sequence: Synthetic oligonucleotide
ccaccuggaagagagagug

SEQ ID NO: 2507042 - RNA, 19 nt, Artificial Sequence
  Description of Artificial Sequence: Synthetic oligonucleotide
cucuggcucggaaggcagg

SEQ ID NO: 2507043 - RNA, 19 nt, Artificial Sequence
  Description of Artificial Sequence: Synthetic oligonucleotide
uuuccaaggcgugcccaug

SEQ ID NO: 2507044 - RNA, 19 nt, Artificial Sequence
  Description of Artificial Sequence: Synthetic oligonucleotide
cuugcacauccaggcaggg

SEQ ID NO: 2507045 - RNA, 19 nt, Artificial Sequence
  Description of Artificial Sequence: Synthetic oligonucleotide
uggcccguaaaggagucuc

SEQ ID NO: 2507046 - RNA, 19 nt, Artificial Sequence
  Description of Artificial Sequence: Synthetic oligonucleotide
ggucagcugcuucugaauc

SEQ ID NO: 2507047 - RNA, 19 nt, Artificial Sequence
  Description of Artificial Sequence: Synthetic oligonucleotide
cuuugcagccgaaggggca

SEQ ID NO: 2507048 - RNA, 19 nt, Artificial Sequence
  Description of Artificial Sequence: Synthetic oligonucleotide
ugucugggucagcugcuuc

SEQ ID NO: 2507049 - RNA, 19 nt, Artificial Sequence
  Description of Artificial Sequence: Synthetic oligonucleotide
caagcccgacugaggaagc

SEQ ID NO: 2507050 - RNA, 19 nt, Artificial Sequence
  Description of Artificial Sequence: Synthetic oligonucleotide
gcgauggguuuccaaggcg

SEQ ID NO: 2507051 - RNA, 19 nt, Artificial Sequence
  Description of Artificial Sequence: Synthetic oligonucleotide
ucucagagaaaugcaccuu

SEQ ID NO: 2507052 - RNA, 19 nt, Artificial Sequence
  Description of Artificial Sequence: Synthetic oligonucleotide
aguggagacaggaggugga

SEQ ID NO: 2507053 - RNA, 19 nt, Artificial Sequence
  Description of Artificial Sequence: Synthetic oligonucleotide
cuuaggggcaguccaaggu

SEQ ID NO: 2507054 - RNA, 19 nt, Artificial Sequence
  Description of Artificial Sequence: Synthetic oligonucleotide
gccugggcaauucuucgag

SEQ ID NO: 2507055 - RNA, 19 nt, Artificial Sequence
  Description of Artificial Sequence: Synthetic oligonucleotide
caucugaaagucccaaagu

SEQ ID NO: 2507056 - RNA, 19 nt, Artificial Sequence
  Description of Artificial Sequence: Synthetic oligonucleotide
caaggggaggugccggaug

SEQ ID NO: 2507057 - RNA, 19 nt, Artificial Sequence
  Description of Artificial Sequence: Synthetic oligonucleotide
ccuuucuggcccguaaagg

SEQ ID NO: 2507058 - RNA, 19 nt, Artificial Sequence
  Description of Artificial Sequence: Synthetic oligonucleotide
aggagucucaggguccuga

SEQ ID NO: 2507059 - RNA, 19 nt, Artificial Sequence
  Description of Artificial Sequence: Synthetic oligonucleotide
cucaggcggcuccaagccc

SEQ ID NO: 2507060 - RNA, 19 nt, Artificial Sequence
  Description of Artificial Sequence: Synthetic oligonucleotide
caccuggaagagagagugc

SEQ ID NO: 2507061 - RNA, 19 nt, Artificial Sequence
  Description of Artificial Sequence: Synthetic oligonucleotide
aggaagcccaucaguggag

SEQ ID NO: 2507062 - RNA, 19 nt, Artificial Sequence
  Description of Artificial Sequence: Synthetic oligonucleotide
ggacccagcuucuccuccg

SEQ ID NO: 2507063 - RNA, 19 nt, Artificial Sequence
  Description of Artificial Sequence: Synthetic oligonucleotide
ggaguuccacuuucuucag

SEQ ID NO: 2507064 - RNA, 19 nt, Artificial Sequence
  Description of Artificial Sequence: Synthetic oligonucleotide
gagucucaggguccugauc

SEQ ID NO: 2507065 - RNA, 19 nt, Artificial Sequence
  Description of Artificial Sequence: Synthetic oligonucleotide
uccaagcccgacugaggaa

SEQ ID NO: 2507066 - RNA, 19 nt, Artificial Sequence
  Description of Artificial Sequence: Synthetic oligonucleotide
uggcuucucuccagguaaa

SEQ ID NO: 2507067 - RNA, 19 nt, Artificial Sequence
  Description of Artificial Sequence: Synthetic oligonucleotide
cuguuucugccggccaggg

SEQ ID NO: 2507068 - RNA, 19 nt, Artificial Sequence
  Description of Artificial Sequence: Synthetic oligonucleotide
caaggcgugcccaugcucu

SEQ ID NO: 2507069 - RNA, 19 nt, Artificial Sequence
  Description of Artificial Sequence: Synthetic oligonucleotide
ccaagcccgacugaggaag

SEQ ID NO: 2507070 - RNA, 19 nt, Artificial Sequence
  Description of Artificial Sequence: Synthetic oligonucleotide
cccguaaaggagucucagg

SEQ ID NO: 2507071 - RNA, 19 nt, Artificial Sequence
  Description of Artificial Sequence: Synthetic oligonucleotide
gggguucucaacaacguaa

SEQ ID NO: 2507072 - RNA, 19 nt, Artificial Sequence
  Description of Artificial Sequence: Synthetic oligonucleotide
caaccucacagucgucauc

SEQ ID NO: 2507073 - RNA, 19 nt, Artificial Sequence
  Description of Artificial Sequence: Synthetic oligonucleotide
agucgucaucuucuaucau

SEQ ID NO: 2507074 - RNA, 19 nt, Artificial Sequence
  Description of Artificial Sequence: Synthetic oligonucleotide
gugccggaugagcaucagc

SEQ ID NO: 2507075 - RNA, 19 nt, Artificial Sequence
  Description of Artificial Sequence: Synthetic oligonucleotide
agggaccacgucgggcagc

SEQ ID NO: 2507076 - RNA, 19 nt, Artificial Sequence
  Description of Artificial Sequence: Synthetic oligonucleotide
cagacaacccugagccuca

SEQ ID NO: 2507077 - RNA, 19 nt, Artificial Sequence
  Description of Artificial Sequence: Synthetic oligonucleotide
gacaacccugagccucaug

SEQ ID NO: 2507078 - RNA, 19 nt, Artificial Sequence
  Description of Artificial Sequence: Synthetic oligonucleotide
cucuggggcuuccgggacc

SEQ ID NO: 2507079 - RNA, 19 nt, Artificial Sequence
  Description of Artificial Sequence: Synthetic oligonucleotide
cuggaagagagagugcucu

SEQ ID NO: 2507080 - RNA, 19 nt, Artificial Sequence
  Description of Artificial Sequence: Synthetic oligonucleotide
ccuuugcagccgaaggggc

SEQ ID NO: 2507081 - RNA, 19 nt, Artificial Sequence
  Description of Artificial Sequence: Synthetic oligonucleotide
gggcaguccaagguggugc

SEQ ID NO: 2507082 - RNA, 19 nt, Artificial Sequence
  Description of Artificial Sequence: Synthetic oligonucleotide
ucgagcaaaacggcuccua

SEQ ID NO: 2507083 - RNA, 19 nt, Artificial Sequence
  Description of Artificial Sequence: Synthetic oligonucleotide
gaggugccggaugagcauc

SEQ ID NO: 2507084 - RNA, 19 nt, Artificial Sequence
  Description of Artificial Sequence: Synthetic oligonucleotide
caucagcuucuaucugauc

SEQ ID NO: 2507085 - RNA, 19 nt, Artificial Sequence
  Description of Artificial Sequence: Synthetic oligonucleotide
agagagugcucugcuucca

SEQ ID NO: 2507086 - RNA, 19 nt, Artificial Sequence
  Description of Artificial Sequence: Synthetic oligonucleotide
agguggugcuggcuucucu

SEQ ID NO: 2507087 - RNA, 19 nt, Artificial Sequence
  Description of Artificial Sequence: Synthetic oligonucleotide
uaucucgugcaagcugcuc

SEQ ID NO: 2507088 - RNA, 19 nt, Artificial Sequence
  Description of Artificial Sequence: Synthetic oligonucleotide
gcugcucccagggaccacg

SEQ ID NO: 2507089 - RNA, 19 nt, Artificial Sequence
  Description of Artificial Sequence: Synthetic oligonucleotide
ccucaggcggcuccaagcc

SEQ ID NO: 2507090 - RNA, 19 nt, Artificial Sequence
  Description of Artificial Sequence: Synthetic oligonucleotide
uucgagcaaaacggcuccu

SEQ ID NO: 2507091 - RNA, 19 nt, Artificial Sequence
  Description of Artificial Sequence: Synthetic oligonucleotide
uugcacauccaggcagggu

SEQ ID NO: 2507092 - RNA, 19 nt, Artificial Sequence
  Description of Artificial Sequence: Synthetic oligonucleotide
ggcuccaagcccgacugag

SEQ ID NO: 2507093 - RNA, 19 nt, Artificial Sequence
  Description of Artificial Sequence: Synthetic oligonucleotide
ugcccaugcucuggcucgg

SEQ ID NO: 2507094 - RNA, 19 nt, Artificial Sequence
  Description of Artificial Sequence: Synthetic oligonucleotide
cauccaggcagggucccug

SEQ ID NO: 2507095 - RNA, 19 nt, Artificial Sequence
  Description of Artificial Sequence: Synthetic oligonucleotide
cuuuacccucuucaggagu

SEQ ID NO: 2507096 - RNA, 19 nt, Artificial Sequence
  Description of Artificial Sequence: Synthetic oligonucleotide
gcggcuccaagcccgacug

SEQ ID NO: 2507097 - RNA, 19 nt, Artificial Sequence
  Description of Artificial Sequence: Synthetic oligonucleotide
cagagaaaugcaccuuucu

SEQ ID NO: 2507098 - RNA, 19 nt, Artificial Sequence
  Description of Artificial Sequence: Synthetic oligonucleotide
cguaagccuccuuugcagc

SEQ ID NO: 2507099 - RNA, 19 nt, Artificial Sequence
  Description of Artificial Sequence: Synthetic oligonucleotide
ccgaaggggcagcuuaggg

SEQ ID NO: 2507100 - RNA, 19 nt, Artificial Sequence
  Description of Artificial Sequence: Synthetic oligonucleotide
cacuuucuucagccucccc

SEQ ID NO: 2507101 - RNA, 19 nt, Artificial Sequence
  Description of Artificial Sequence: Synthetic oligonucleotide
gugcucugcuuccacaagu

SEQ ID NO: 2507102 - RNA, 19 nt, Artificial Sequence
  Description of Artificial Sequence: Synthetic oligonucleotide
gcucuccaggcagacaacc

SEQ ID NO: 2507103 - RNA, 19 nt, Artificial Sequence
  Description of Artificial Sequence: Synthetic oligonucleotide
guccugauccugggugggg

SEQ ID NO: 2507104 - RNA, 19 nt, Artificial Sequence
  Description of Artificial Sequence: Synthetic oligonucleotide
cccucaggcggcuccaagc

SEQ ID NO: 2507105 - RNA, 19 nt, Artificial Sequence
  Description of Artificial Sequence: Synthetic oligonucleotide
cacauccaggcaggguccc

SEQ ID NO: 2507106 - RNA, 19 nt, Artificial Sequence
  Description of Artificial Sequence: Synthetic oligonucleotide
ccugggcaauucuucgagc

SEQ ID NO: 2507107 - RNA, 19 nt, Artificial Sequence
  Description of Artificial Sequence: Synthetic oligonucleotide
gggaccacaaccucacagu

SEQ ID NO: 2507108 - RNA, 19 nt, Artificial Sequence
  Description of Artificial Sequence: Synthetic oligonucleotide
aggcgugcccaugcucugg

SEQ ID NO: 2507109 - RNA, 19 nt, Artificial Sequence
  Description of Artificial Sequence: Synthetic oligonucleotide
ggacucuugucugggucag

SEQ ID NO: 2507110 - RNA, 19 nt, Artificial Sequence
  Description of Artificial Sequence: Synthetic oligonucleotide
gguccugauccuggguggg

SEQ ID NO: 2507111 - RNA, 19 nt, Artificial Sequence
  Description of Artificial Sequence: Synthetic oligonucleotide
agccgaaggggcagcuuag

SEQ ID NO: 2507112 - RNA, 19 nt, Artificial Sequence
  Description of Artificial Sequence: Synthetic oligonucleotide
cgugcaagcugcucccagg

SEQ ID NO: 2507113 - RNA, 19 nt, Artificial Sequence
  Description of Artificial Sequence: Synthetic oligonucleotide
ggcuccuaucucgugcaag

SEQ ID NO: 2507114 - RNA, 19 nt, Artificial Sequence
  Description of Artificial Sequence: Synthetic oligonucleotide
gggacccucaggcggcucc

SEQ ID NO: 2507115 - RNA, 19 nt, Artificial Sequence
  Description of Artificial Sequence: Synthetic oligonucleotide
guuucaggaggggaacugu

SEQ ID NO: 2507116 - RNA, 19 nt, Artificial Sequence
  Description of Artificial Sequence: Synthetic oligonucleotide
gcaauucuucgagcaaaac

SEQ ID NO: 2507117 - RNA, 19 nt, Artificial Sequence
  Description of Artificial Sequence: Synthetic oligonucleotide
gacucuugucugggucagc

SEQ ID NO: 2507118 - RNA, 19 nt, Artificial Sequence
  Description of Artificial Sequence: Synthetic oligonucleotide
gcccguaaaggagucucag

SEQ ID NO: 2507119 - RNA, 19 nt, Artificial Sequence
  Description of Artificial Sequence: Synthetic oligonucleotide
ggcagcuuaggggcagucc

SEQ ID NO: 2507120 - RNA, 19 nt, Artificial Sequence
  Description of Artificial Sequence: Synthetic oligonucleotide
ggaagcgauggguuuccaa

SEQ ID NO: 2507121 - RNA, 19 nt, Artificial Sequence
  Description of Artificial Sequence: Synthetic oligonucleotide
cagccgaaggggcagcuua

SEQ ID NO: 2507122 - RNA, 19 nt, Artificial Sequence
  Description of Artificial Sequence: Synthetic oligonucleotide
cccaaaguuucaggagggg

SEQ ID NO: 2507123 - RNA, 19 nt, Artificial Sequence
  Description of Artificial Sequence: Synthetic oligonucleotide
cagggaccacgucgggcag

SEQ ID NO: 2507124 - RNA, 19 nt, Artificial Sequence
  Description of Artificial Sequence: Synthetic oligonucleotide
ggcgugcccaugcucuggc

SEQ ID NO: 2507125 - RNA, 19 nt, Artificial Sequence
  Description of Artificial Sequence: Synthetic oligonucleotide
ugcucccagggaccacguc

SEQ ID NO: 2507126 - RNA, 19 nt, Artificial Sequence
  Description of Artificial Sequence: Synthetic oligonucleotide
acaaggggaggugccggau

SEQ ID NO: 2507127 - RNA, 19 nt, Artificial Sequence
  Description of Artificial Sequence: Synthetic oligonucleotide
uccuccgccugggcaauuc

SEQ ID NO: 2507128 - RNA, 19 nt, Artificial Sequence
  Description of Artificial Sequence: Synthetic oligonucleotide
gaugagcaucagcuucuau

SEQ ID NO: 2507129 - RNA, 19 nt, Artificial Sequence
  Description of Artificial Sequence: Synthetic oligonucleotide
acccucuucaggaguucca

SEQ ID NO: 2507130 - RNA, 19 nt, Artificial Sequence
  Description of Artificial Sequence: Synthetic oligonucleotide
caccuuucuggcccguaaa

SEQ ID NO: 2507131 - RNA, 19 nt, Artificial Sequence
  Description of Artificial Sequence: Synthetic oligonucleotide
uggggcuuccgggacccuc

SEQ ID NO: 2507132 - RNA, 19 nt, Artificial Sequence
  Description of Artificial Sequence: Synthetic oligonucleotide
ccggccaggggcucugggg

SEQ ID NO: 2507133 - RNA, 19 nt, Artificial Sequence
  Description of Artificial Sequence: Synthetic oligonucleotide
ggcaauucuucgagcaaaa

SEQ ID NO: 2507134 - RNA, 19 nt, Artificial Sequence
  Description of Artificial Sequence: Synthetic oligonucleotide
cacgucgggcagccugggc

SEQ ID NO: 2507135 - RNA, 19 nt, Artificial Sequence
  Description of Artificial Sequence: Synthetic oligonucleotide
ggacugugacauucucaga

SEQ ID NO: 2507136 - RNA, 19 nt, Artificial Sequence
  Description of Artificial Sequence: Synthetic oligonucleotide
gggaccacgucgggcagcc

SEQ ID NO: 2507137 - RNA, 19 nt, Artificial Sequence
  Description of Artificial Sequence: Synthetic oligonucleotide
ccaagguggugcuggcuuc

SEQ ID NO: 2507138 - RNA, 19 nt, Artificial Sequence
  Description of Artificial Sequence: Synthetic oligonucleotide
gcucuggcucggaaggcag

SEQ ID NO: 2507139 - RNA, 19 nt, Artificial Sequence
  Description of Artificial Sequence: Synthetic oligonucleotide
gguuuccaaggcgugccca

SEQ ID NO: 2507140 - RNA, 19 nt, Artificial Sequence
  Description of Artificial Sequence: Synthetic oligonucleotide
cagcuuaggggcaguccaa

SEQ ID NO: 2507141 - RNA, 19 nt, Artificial Sequence
  Description of Artificial Sequence: Synthetic oligonucleotide
caggcagggucccugggcu

SEQ ID NO: 2507142 - RNA, 19 nt, Artificial Sequence
  Description of Artificial Sequence: Synthetic oligonucleotide
ggcagggucccugggcugc

SEQ ID NO: 2507143 - RNA, 19 nt, Artificial Sequence
  Description of Artificial Sequence: Synthetic oligonucleotide
ggggugguucucaggaaca

SEQ ID NO: 2507144 - RNA, 19 nt, Artificial Sequence
  Description of Artificial Sequence: Synthetic oligonucleotide
gguaaggacccagcuucuc

SEQ ID NO: 2507145 - RNA, 19 nt, Artificial Sequence
  Description of Artificial Sequence: Synthetic oligonucleotide
cugaaucuucugggaccac

SEQ ID NO: 2507146 - RNA, 19 nt, Artificial Sequence
  Description of Artificial Sequence: Synthetic oligonucleotide
agggucccugggcugcuuu

SEQ ID NO: 2507147 - RNA, 19 nt, Artificial Sequence
  Description of Artificial Sequence: Synthetic oligonucleotide
gccgaaggggcagcuuagg

SEQ ID NO: 2507148 - RNA, 19 nt, Artificial Sequence
  Description of Artificial Sequence: Synthetic oligonucleotide
ggcuuccgggacccucagg

SEQ ID NO: 2507149 - RNA, 19 nt, Artificial Sequence
  Description of Artificial Sequence: Synthetic oligonucleotide
ugcaccuuucuggcccgua

SEQ ID NO: 2507150 - RNA, 19 nt, Artificial Sequence
  Description of Artificial Sequence: Synthetic oligonucleotide
acauccaggcagggucccu

SEQ ID NO: 2507151 - RNA, 19 nt, Artificial Sequence
  Description of Artificial Sequence: Synthetic oligonucleotide
cuaucucgugcaagcugcu

SEQ ID NO: 2507152 - RNA, 19 nt, Artificial Sequence
  Description of Artificial Sequence: Synthetic oligonucleotide
gggcagccugggcuggucc

SEQ ID NO: 2507153 - RNA, 19 nt, Artificial Sequence
  Description of Artificial Sequence: Synthetic oligonucleotide
ccaaggcgugcccaugcuc

SEQ ID NO: 2507154 - RNA, 19 nt, Artificial Sequence
  Description of Artificial Sequence: Synthetic oligonucleotide
accucacagucgucaucuu

SEQ ID NO: 2507155 - RNA, 19 nt, Artificial Sequence
  Description of Artificial Sequence: Synthetic oligonucleotide
ggucccugggcugcuuuac

SEQ ID NO: 2507156 - RNA, 19 nt, Artificial Sequence
  Description of Artificial Sequence: Synthetic oligonucleotide
gcaccuuucuggcccguaa

SEQ ID NO: 2507157 - RNA, 19 nt, Artificial Sequence
  Description of Artificial Sequence: Synthetic oligonucleotide
cgacugaggaagcccauca

SEQ ID NO: 2507158 - RNA, 19 nt, Artificial Sequence
  Description of Artificial Sequence: Synthetic oligonucleotide
cugcuuccacaagucccuc

SEQ ID NO: 2507159 - RNA, 19 nt, Artificial Sequence
  Description of Artificial Sequence: Synthetic oligonucleotide
gcuucucuccagguaaaua

SEQ ID NO: 2507160 - RNA, 19 nt, Artificial Sequence
  Description of Artificial Sequence: Synthetic oligonucleotide
ggugccggaugagcaucag

SEQ ID NO: 2507161 - RNA, 19 nt, Artificial Sequence
  Description of Artificial Sequence: Synthetic oligonucleotide
gccugggcugguccugccc

SEQ ID NO: 2507162 - RNA, 19 nt, Artificial Sequence
  Description of Artificial Sequence: Synthetic oligonucleotide
ggcaguccaagguggugcu

SEQ ID NO: 2507163 - RNA, 19 nt, Artificial Sequence
  Description of Artificial Sequence: Synthetic oligonucleotide
ugccggccaggggcucugg

SEQ ID NO: 2507164 - RNA, 19 nt, Artificial Sequence
  Description of Artificial Sequence: Synthetic oligonucleotide
cugggaccacaaccucaca

SEQ ID NO: 2507165 - RNA, 19 nt, Artificial Sequence
  Description of Artificial Sequence: Synthetic oligonucleotide
cguaaaggagucucagggu

SEQ ID NO: 2507166 - RNA, 19 nt, Artificial Sequence
  Description of Artificial Sequence: Synthetic oligonucleotide
gcccgacugaggaagccca

SEQ ID NO: 2507167 - RNA, 19 nt, Artificial Sequence
  Description of Artificial Sequence: Synthetic oligonucleotide
gggcuuccgggacccucag

SEQ ID NO: 2507168 - RNA, 19 nt, Artificial Sequence
  Description of Artificial Sequence: Synthetic oligonucleotide
ggaggugccggaugagcau

SEQ ID NO: 2507169 - RNA, 19 nt, Artificial Sequence
  Description of Artificial Sequence: Synthetic oligonucleotide
cuccuaucucgugcaagcu

SEQ ID NO: 2507170 - RNA, 19 nt, Artificial Sequence
  Description of Artificial Sequence: Synthetic oligonucleotide
agacaacccugagccucau

SEQ ID NO: 2507171 - RNA, 19 nt, Artificial Sequence
  Description of Artificial Sequence: Synthetic oligonucleotide
cucgugcaagcugcuccca

SEQ ID NO: 2507172 - RNA, 19 nt, Artificial Sequence
  Description of Artificial Sequence: Synthetic oligonucleotide
cgucgggcagccugggcug

SEQ ID NO: 2507173 - RNA, 19 nt, Artificial Sequence
  Description of Artificial Sequence: Synthetic oligonucleotide
gcagccugggcugguccug

SEQ ID NO: 2507174 - RNA, 19 nt, Artificial Sequence
  Description of Artificial Sequence: Synthetic oligonucleotide
ggaaauggacugugacauu

SEQ ID NO: 2507175 - RNA, 19 nt, Artificial Sequence
  Description of Artificial Sequence: Synthetic oligonucleotide
uucugccggccaggggcuc

SEQ ID NO: 2507176 - RNA, 19 nt, Artificial Sequence
  Description of Artificial Sequence: Synthetic oligonucleotide
ggcccguaaaggagucuca

SEQ ID NO: 2507177 - RNA, 19 nt, Artificial Sequence
  Description of Artificial Sequence: Synthetic oligonucleotide
gcaucagcuucuaucugau

SEQ ID NO: 2507178 - RNA, 19 nt, Artificial Sequence
  Description of Artificial Sequence: Synthetic oligonucleotide
augcaccuuucuggcccgu

SEQ ID NO: 2507179 - RNA, 19 nt, Artificial Sequence
  Description of Artificial Sequence: Synthetic oligonucleotide
ccgacugaggaagcccauc

SEQ ID NO: 2507180 - RNA, 19 nt, Artificial Sequence
  Description of Artificial Sequence: Synthetic oligonucleotide
cugccggccaggggcucug

SEQ ID NO: 2507181 - RNA, 19 nt, Artificial Sequence
  Description of Artificial Sequence: Synthetic oligonucleotide
ggcggcuccaagcccgacu

SEQ ID NO: 2507182 - RNA, 19 nt, Artificial Sequence
  Description of Artificial Sequence: Synthetic oligonucleotide
ggcagacaacccugagccu

SEQ ID NO: 2507183 - RNA, 19 nt, Artificial Sequence
  Description of Artificial Sequence: Synthetic oligonucleotide
cccagacagcaaggaaaug

SEQ ID NO: 2507184 - RNA, 19 nt, Artificial Sequence
  Description of Artificial Sequence: Synthetic oligonucleotide
ggaugagcaucagcuucua

SEQ ID NO: 2507185 - RNA, 19 nt, Artificial Sequence
  Description of Artificial Sequence: Synthetic oligonucleotide
cggaugagcaucagcuucu

SEQ ID NO: 2507186 - RNA, 19 nt, Artificial Sequence
  Description of Artificial Sequence: Synthetic oligonucleotide
gguccugcccagacagcaa

SEQ ID NO: 2507187 - RNA, 19 nt, Artificial Sequence
  Description of Artificial Sequence: Synthetic oligonucleotide
cuccgccugggcaauucuu

SEQ ID NO: 2507188 - RNA, 19 nt, Artificial Sequence
  Description of Artificial Sequence: Synthetic oligonucleotide
gacccucaggcggcuccaa

SEQ ID NO: 2507189 - RNA, 19 nt, Artificial Sequence
  Description of Artificial Sequence: Synthetic oligonucleotide
ccacaaccucacagucguc

SEQ ID NO: 2507190 - RNA, 19 nt, Artificial Sequence
  Description of Artificial Sequence: Synthetic oligonucleotide
ggacccucaggcggcucca

SEQ ID NO: 2507191 - RNA, 19 nt, Artificial Sequence
  Description of Artificial Sequence: Synthetic oligonucleotide
gggcugcuuuacccucuuc

SEQ ID NO: 2507192 - RNA, 19 nt, Artificial Sequence
  Description of Artificial Sequence: Synthetic oligonucleotide
gcccaucaguggagacagg

SEQ ID NO: 2507193 - RNA, 19 nt, Artificial Sequence
  Description of Artificial Sequence: Synthetic oligonucleotide
gggucccugggcugcuuua

SEQ ID NO: 2507194 - RNA, 19 nt, Artificial Sequence
  Description of Artificial Sequence: Synthetic oligonucleotide
ggggugagguaaggaccca

SEQ ID NO: 2507195 - RNA, 19 nt, Artificial Sequence
  Description of Artificial Sequence: Synthetic oligonucleotide
cugcucccagggaccacgu

SEQ ID NO: 2507196 - RNA, 19 nt, Artificial Sequence
  Description of Artificial Sequence: Synthetic oligonucleotide
ccacgucgggcagccuggg

SEQ ID NO: 2507197 - RNA, 19 nt, Artificial Sequence
  Description of Artificial Sequence: Synthetic oligonucleotide
gccaccuggaagagagagu

SEQ ID NO: 2507198 - RNA, 19 nt, Artificial Sequence
  Description of Artificial Sequence: Synthetic oligonucleotide
gggcagcuuaggggcaguc

SEQ ID NO: 2507199 - RNA, 19 nt, Artificial Sequence
  Description of Artificial Sequence: Synthetic oligonucleotide
cgccugggcaauucuucga

SEQ ID NO: 2507200 - RNA, 19 nt, Artificial Sequence
  Description of Artificial Sequence: Synthetic oligonucleotide
caacaacguaagccuccuu

SEQ ID NO: 2507201 - RNA, 19 nt, Artificial Sequence
  Description of Artificial Sequence: Synthetic oligonucleotide
cgagcaaaacggcuccuau

SEQ ID NO: 2507202 - RNA, 19 nt, Artificial Sequence
  Description of Artificial Sequence: Synthetic oligonucleotide
cuggcccguaaaggagucu

SEQ ID NO: 2507203 - RNA, 19 nt, Artificial Sequence
  Description of Artificial Sequence: Synthetic oligonucleotide
ggcuucucuccagguaaau

SEQ ID NO: 2507204 - RNA, 19 nt, Artificial Sequence
  Description of Artificial Sequence: Synthetic oligonucleotide
gcgugcccaugcucuggcu

SEQ ID NO: 2507205 - RNA, 19 nt, Artificial Sequence
  Description of Artificial Sequence: Synthetic oligonucleotide
gcccaugcucuggcucgga

SEQ ID NO: 2507206 - RNA, 19 nt, Artificial Sequence
  Description of Artificial Sequence: Synthetic oligonucleotide
ccuccgccugggcaauucu

SEQ ID NO: 2507207 - RNA, 19 nt, Artificial Sequence
  Description of Artificial Sequence: Synthetic oligonucleotide
ggggcagcuuaggggcagu

SEQ ID NO: 2507208 - RNA, 19 nt, Artificial Sequence
  Description of Artificial Sequence: Synthetic oligonucleotide
cccgacugaggaagcccau

SEQ ID NO: 2507209 - RNA, 19 nt, Artificial Sequence
  Description of Artificial Sequence: Synthetic oligonucleotide
gcagggucccugggcugcu

SEQ ID NO: 2507210 - RNA, 19 nt, Artificial Sequence
  Description of Artificial Sequence: Synthetic oligonucleotide
gcagccgaaggggcagcuu

SEQ ID NO: 2507211 - RNA, 19 nt, Artificial Sequence
  Description of Artificial Sequence: Synthetic oligonucleotide
cggcuccaagcccgacuga

SEQ ID NO: 2507212 - RNA, 19 nt, Artificial Sequence
  Description of Artificial Sequence: Synthetic oligonucleotide
cagggucccugggcugcuu

SEQ ID NO: 2507213 - RNA, 19 nt, Artificial Sequence
  Description of Artificial Sequence: Synthetic oligonucleotide
ggaccacgucgggcagccu

SEQ ID NO: 2507214 - RNA, 19 nt, Artificial Sequence
  Description of Artificial Sequence: Synthetic oligonucleotide
cgggacccucaggcggcuc

SEQ ID NO: 2507215 - RNA, 19 nt, Artificial Sequence
  Description of Artificial Sequence: Synthetic oligonucleotide
ccgggacccucaggcggcu

SEQ ID NO: 2507216 - RNA, 19 nt, Artificial Sequence
  Description of Artificial Sequence: Synthetic oligonucleotide
aacauugugaucuucaucu

SEQ ID NO: 2507217 - RNA, 19 nt, Artificial Sequence
  Description of Artificial Sequence: Synthetic oligonucleotide
ucaaauuauuuuaagaaca

SEQ ID NO: 2507218 - RNA, 19 nt, Artificial Sequence
  Description of Artificial Sequence: Synthetic oligonucleotide
uguuaauuccuucagcuca

SEQ ID NO: 2507219 - RNA, 19 nt, Artificial Sequence
  Description of Artificial Sequence: Synthetic oligonucleotide
uuuauuaaucaaauuauuu

SEQ ID NO: 2507220 - RNA, 19 nt, Artificial Sequence
  Description of Artificial Sequence: Synthetic oligonucleotide
uuauuaaucaaauuauuuu

SEQ ID NO: 2507221 - RNA, 19 nt, Artificial Sequence
  Description of Artificial Sequence: Synthetic oligonucleotide
uuaaucaaauuauuuuaag

SEQ ID NO: 2507222 - RNA, 19 nt, Artificial Sequence
  Description of Artificial Sequence: Synthetic oligonucleotide
auaaauuuucugcuugccg

SEQ ID NO: 2507223 - RNA, 19 nt, Artificial Sequence
  Description of Artificial Sequence: Synthetic oligonucleotide
uuuacaauacuucugcuuu

SEQ ID NO: 2507224 - RNA, 19 nt, Artificial Sequence
  Description of Artificial Sequence: Synthetic oligonucleotide
uuacucauggccuuucccg

SEQ ID NO: 2507225 - RNA, 19 nt, Artificial Sequence
  Description of Artificial Sequence: Synthetic oligonucleotide
cacuaugucaaacuggucc

SEQ ID NO: 2507226 - RNA, 19 nt, Artificial Sequence
  Description of Artificial Sequence: Synthetic oligonucleotide
ucggcuuuuacucauggcc

SEQ ID NO: 2507227 - RNA, 19 nt, Artificial Sequence
  Description of Artificial Sequence: Synthetic oligonucleotide
uauguagugagcacauucc

SEQ ID NO: 2507228 - RNA, 19 nt, Artificial Sequence
  Description of Artificial Sequence: Synthetic oligonucleotide
uacgucuucuccuugaucu

SEQ ID NO: 2507229 - RNA, 19 nt, Artificial Sequence
  Description of Artificial Sequence: Synthetic oligonucleotide
gauugcaucacacaggucu

SEQ ID NO: 2507230 - RNA, 19 nt, Artificial Sequence
  Description of Artificial Sequence: Synthetic oligonucleotide
cucuuuacaauacuucugc

SEQ ID NO: 2507231 - RNA, 19 nt, Artificial Sequence
  Description of Artificial Sequence: Synthetic oligonucleotide
auucucuugcgcuuccucc

SEQ ID NO: 2507232 - RNA, 19 nt, Artificial Sequence
  Description of Artificial Sequence: Synthetic oligonucleotide
ugcaccuuggcagugaggg

SEQ ID NO: 2507233 - RNA, 19 nt, Artificial Sequence
  Description of Artificial Sequence: Synthetic oligonucleotide
cuugggguauccuucaagg

SEQ ID NO: 2507234 - RNA, 19 nt, Artificial Sequence
  Description of Artificial Sequence: Synthetic oligonucleotide
ucuucaucugucucuaugc

SEQ ID NO: 2507235 - RNA, 19 nt, Artificial Sequence
  Description of Artificial Sequence: Synthetic oligonucleotide
uuuuauuaaucaaauuauu

SEQ ID NO: 2507236 - RNA, 19 nt, Artificial Sequence
  Description of Artificial Sequence: Synthetic oligonucleotide
agcacauuccuucuuuaac

SEQ ID NO: 2507237 - RNA, 19 nt, Artificial Sequence
  Description of Artificial Sequence: Synthetic oligonucleotide
caaggauugcaucacacag

SEQ ID NO: 2507238 - RNA, 19 nt, Artificial Sequence
  Description of Artificial Sequence: Synthetic oligonucleotide
gucagcaucacucacuaug

SEQ ID NO: 2507239 - RNA, 19 nt, Artificial Sequence
  Description of Artificial Sequence: Synthetic oligonucleotide
aagguagccagcccaggac

SEQ ID NO: 2507240 - RNA, 19 nt, Artificial Sequence
  Description of Artificial Sequence: Synthetic oligonucleotide
uggucugcaaaauaaauuu

SEQ ID NO: 2507241 - RNA, 19 nt, Artificial Sequence
  Description of Artificial Sequence: Synthetic oligonucleotide
uuuuaagaacaagaaggcc

SEQ ID NO: 2507242 - RNA, 19 nt, Artificial Sequence
  Description of Artificial Sequence: Synthetic oligonucleotide
agucucucuauguagugag

SEQ ID NO: 2507243 - RNA, 19 nt, Artificial Sequence
  Description of Artificial Sequence: Synthetic oligonucleotide
uuuccgaacacguccuggg

SEQ ID NO: 2507244 - RNA, 19 nt, Artificial Sequence
  Description of Artificial Sequence: Synthetic oligonucleotide
aacaagaaggccaccuaac

SEQ ID NO: 2507245 - RNA, 19 nt, Artificial Sequence
  Description of Artificial Sequence: Synthetic oligonucleotide
uuuucuuuguacaccugcu

SEQ ID NO: 2507246 - RNA, 19 nt, Artificial Sequence
  Description of Artificial Sequence: Synthetic oligonucleotide
uuuacucauggccuuuccc

SEQ ID NO: 2507247 - RNA, 19 nt, Artificial Sequence
  Description of Artificial Sequence: Synthetic oligonucleotide
agguaccucaggaugaucc

SEQ ID NO: 2507248 - RNA, 19 nt, Artificial Sequence
  Description of Artificial Sequence: Synthetic oligonucleotide
acuaugucaaacugguccu

SEQ ID NO: 2507249 - RNA, 19 nt, Artificial Sequence
  Description of Artificial Sequence: Synthetic oligonucleotide
aaggauugcaucacacagg

SEQ ID NO: 2507250 - RNA, 19 nt, Artificial Sequence
  Description of Artificial Sequence: Synthetic oligonucleotide
aauuuucugcuugccguac

SEQ ID NO: 2507251 - RNA, 19 nt, Artificial Sequence
  Description of Artificial Sequence: Synthetic oligonucleotide
aggauugcaucacacaggu

SEQ ID NO: 2507252 - RNA, 19 nt, Artificial Sequence
  Description of Artificial Sequence: Synthetic oligonucleotide
aaccaagguagccagccca

SEQ ID NO: 2507253 - RNA, 19 nt, Artificial Sequence
  Description of Artificial Sequence: Synthetic oligonucleotide
ucagcaucacucacuaugu

SEQ ID NO: 2507254 - RNA, 19 nt, Artificial Sequence
  Description of Artificial Sequence: Synthetic oligonucleotide
cucccugucuccaaggacc

SEQ ID NO: 2507255 - RNA, 19 nt, Artificial Sequence
  Description of Artificial Sequence: Synthetic oligonucleotide
uugcuguaagcucugcacc

SEQ ID NO: 2507256 - RNA, 19 nt, Artificial Sequence
  Description of Artificial Sequence: Synthetic oligonucleotide
auugugaucuucaucuguc

SEQ ID NO: 2507257 - RNA, 19 nt, Artificial Sequence
  Description of Artificial Sequence: Synthetic oligonucleotide
uucugcuuuucuuuguaca

SEQ ID NO: 2507258 - RNA, 19 nt, Artificial Sequence
  Description of Artificial Sequence: Synthetic oligonucleotide
uguaagcucugcaccuugg

SEQ ID NO: 2507259 - RNA, 19 nt, Artificial Sequence
  Description of Artificial Sequence: Synthetic oligonucleotide
ucaaggauugcaucacaca

SEQ ID NO: 2507260 - RNA, 19 nt, Artificial Sequence
  Description of Artificial Sequence: Synthetic oligonucleotide
agcaucacucacuauguca

SEQ ID NO: 2507261 - RNA, 19 nt, Artificial Sequence
  Description of Artificial Sequence: Synthetic oligonucleotide
guagugagcacauuccuuc

SEQ ID NO: 2507262 - RNA, 19 nt, Artificial Sequence
  Description of Artificial Sequence: Synthetic oligonucleotide
ucuugggguauccuucaag

SEQ ID NO: 2507263 - RNA, 19 nt, Artificial Sequence
  Description of Artificial Sequence: Synthetic oligonucleotide
uaccucaggaugaucccgg

SEQ ID NO: 2507264 - RNA, 19 nt, Artificial Sequence
  Description of Artificial Sequence: Synthetic oligonucleotide
gugagggccacaauguugg

SEQ ID NO: 2507265 - RNA, 19 nt, Artificial Sequence
  Description of Artificial Sequence: Synthetic oligonucleotide
ugggguauccuucaaggau

SEQ ID NO: 2507266 - RNA, 19 nt, Artificial Sequence
  Description of Artificial Sequence: Synthetic oligonucleotide
gaucuugccuugcugggcc

SEQ ID NO: 2507267 - RNA, 19 nt, Artificial Sequence
  Description of Artificial Sequence: Synthetic oligonucleotide
cuaaccaagguagccagcc

SEQ ID NO: 2507268 - RNA, 19 nt, Artificial Sequence
  Description of Artificial Sequence: Synthetic oligonucleotide
aucacucacuaugucaaac

SEQ ID NO: 2507269 - RNA, 19 nt, Artificial Sequence
  Description of Artificial Sequence: Synthetic oligonucleotide
aaauuuucugcuugccgua

SEQ ID NO: 2507270 - RNA, 19 nt, Artificial Sequence
  Description of Artificial Sequence: Synthetic oligonucleotide
ucucuauguagugagcaca

SEQ ID NO: 2507271 - RNA, 19 nt, Artificial Sequence
  Description of Artificial Sequence: Synthetic oligonucleotide
ucucucuauguagugagca

SEQ ID NO: 2507272 - RNA, 19 nt, Artificial Sequence
  Description of Artificial Sequence: Synthetic oligonucleotide
cucuaugccaacuucuuca

SEQ ID NO: 2507273 - RNA, 19 nt, Artificial Sequence
  Description of Artificial Sequence: Synthetic oligonucleotide
aaggccaccuaaccaaggu

SEQ ID NO: 2507274 - RNA, 19 nt, Artificial Sequence
  Description of Artificial Sequence: Synthetic oligonucleotide
uuuuacucauggccuuucc

SEQ ID NO: 2507275 - RNA, 19 nt, Artificial Sequence
  Description of Artificial Sequence: Synthetic oligonucleotide
gagccuaacauugugaucu

SEQ ID NO: 2507276 - RNA, 19 nt, Artificial Sequence
  Description of Artificial Sequence: Synthetic oligonucleotide
uguggcggcagcuuugcug

SEQ ID NO: 2507277 - RNA, 19 nt, Artificial Sequence
  Description of Artificial Sequence: Synthetic oligonucleotide
uuucuuuguacaccugcuc

SEQ ID NO: 2507278 - RNA, 19 nt, Artificial Sequence
  Description of Artificial Sequence: Synthetic oligonucleotide
uuuugcuccugcagguacc

SEQ ID NO: 2507279 - RNA, 19 nt, Artificial Sequence
  Description of Artificial Sequence: Synthetic oligonucleotide
acucauggccuuucccgcc

SEQ ID NO: 2507280 - RNA, 19 nt, Artificial Sequence
  Description of Artificial Sequence: Synthetic oligonucleotide
cuugccguacgucuucucc

SEQ ID NO: 2507281 - RNA, 19 nt, Artificial Sequence
  Description of Artificial Sequence: Synthetic oligonucleotide
agagccuucaccaccgccg

SEQ ID NO: 2507282 - RNA, 19 nt, Artificial Sequence
  Description of Artificial Sequence: Synthetic oligonucleotide
cuugcccaguccauguucc

SEQ ID NO: 2507283 - RNA, 19 nt, Artificial Sequence
  Description of Artificial Sequence: Synthetic oligonucleotide
ucuuuacaauacuucugcu

SEQ ID NO: 2507284 - RNA, 19 nt, Artificial Sequence
  Description of Artificial Sequence: Synthetic oligonucleotide
uuguuaauuccuucagcuc

SEQ ID NO: 2507285 - RNA, 19 nt, Artificial Sequence
  Description of Artificial Sequence: Synthetic oligonucleotide
uucugcuugccguacgucu

SEQ ID NO: 2507286 - RNA, 19 nt, Artificial Sequence
  Description of Artificial Sequence: Synthetic oligonucleotide
uguggucauucucuugcgc

SEQ ID NO: 2507287 - RNA, 19 nt, Artificial Sequence
  Description of Artificial Sequence: Synthetic oligonucleotide
uccacucuuuacaauacuu

SEQ ID NO: 2507288 - RNA, 19 nt, Artificial Sequence
  Description of Artificial Sequence: Synthetic oligonucleotide
uguagggccgguuuugcuc

SEQ ID NO: 2507289 - RNA, 19 nt, Artificial Sequence
  Description of Artificial Sequence: Synthetic oligonucleotide
ucuuuguacaccugcucuc

SEQ ID NO: 2507290 - RNA, 19 nt, Artificial Sequence
  Description of Artificial Sequence: Synthetic oligonucleotide
cacuuguuaauuccuucag

SEQ ID NO: 2507291 - RNA, 19 nt, Artificial Sequence
  Description of Artificial Sequence: Synthetic oligonucleotide
ugcaucucaggagugguca

SEQ ID NO: 2507292 - RNA, 19 nt, Artificial Sequence
  Description of Artificial Sequence: Synthetic oligonucleotide
uacucauggccuuucccgc

SEQ ID NO: 2507293 - RNA, 19 nt, Artificial Sequence
  Description of Artificial Sequence: Synthetic oligonucleotide
uccuccacucuuuacaaua

SEQ ID NO: 2507294 - RNA, 19 nt, Artificial Sequence
  Description of Artificial Sequence: Synthetic oligonucleotide
aggacuucugcucccuguc

SEQ ID NO: 2507295 - RNA, 19 nt, Artificial Sequence
  Description of Artificial Sequence: Synthetic oligonucleotide
ugcuguaagcucugcaccu

SEQ ID NO: 2507296 - RNA, 19 nt, Artificial Sequence
  Description of Artificial Sequence: Synthetic oligonucleotide
uguuccuucugcagguuuc

SEQ ID NO: 2507297 - RNA, 19 nt, Artificial Sequence
  Description of Artificial Sequence: Synthetic oligonucleotide
agcucagccuccauguggc

SEQ ID NO: 2507298 - RNA, 19 nt, Artificial Sequence
  Description of Artificial Sequence: Synthetic oligonucleotide
auguagugagcacauuccu

SEQ ID NO: 2507299 - RNA, 19 nt, Artificial Sequence
  Description of Artificial Sequence: Synthetic oligonucleotide
uguagugagcacauuccuu

SEQ ID NO: 2507300 - RNA, 19 nt, Artificial Sequence
  Description of Artificial Sequence: Synthetic oligonucleotide
uucucuugcgcuuccucca

SEQ ID NO: 2507301 - RNA, 19 nt, Artificial Sequence
  Description of Artificial Sequence: Synthetic oligonucleotide
gucugcaaaauaaauuuuc

SEQ ID NO: 2507302 - RNA, 19 nt, Artificial Sequence
  Description of Artificial Sequence: Synthetic oligonucleotide
cucggcucggcuuuuacuc

SEQ ID NO: 2507303 - RNA, 19 nt, Artificial Sequence
  Description of Artificial Sequence: Synthetic oligonucleotide
cacauuccuucuuuaacuc

SEQ ID NO: 2507304 - RNA, 19 nt, Artificial Sequence
  Description of Artificial Sequence: Synthetic oligonucleotide
gaacaagaaggccaccuaa

SEQ ID NO: 2507305 - RNA, 19 nt, Artificial Sequence
  Description of Artificial Sequence: Synthetic oligonucleotide
ugggagccuaacauuguga

SEQ ID NO: 2507306 - RNA, 19 nt, Artificial Sequence
  Description of Artificial Sequence: Synthetic oligonucleotide
cacucacuaugucaaacug

SEQ ID NO: 2507307 - RNA, 19 nt, Artificial Sequence
  Description of Artificial Sequence: Synthetic oligonucleotide
cuccaaggaccccucaggg

SEQ ID NO: 2507308 - RNA, 19 nt, Artificial Sequence
  Description of Artificial Sequence: Synthetic oligonucleotide
ucugcaccuuggcagugag

SEQ ID NO: 2507309 - RNA, 19 nt, Artificial Sequence
  Description of Artificial Sequence: Synthetic oligonucleotide
ucuaugccaacuucuucaa

SEQ ID NO: 2507310 - RNA, 19 nt, Artificial Sequence
  Description of Artificial Sequence: Synthetic oligonucleotide
guagggccgguuuugcucc

SEQ ID NO: 2507311 - RNA, 19 nt, Artificial Sequence
  Description of Artificial Sequence: Synthetic oligonucleotide
ucucuaugccaacuucuuc

SEQ ID NO: 2507312 - RNA, 19 nt, Artificial Sequence
  Description of Artificial Sequence: Synthetic oligonucleotide
ucuccuugaucuugccuug

SEQ ID NO: 2507313 - RNA, 19 nt, Artificial Sequence
  Description of Artificial Sequence: Synthetic oligonucleotide
acucuuuacaauacuucug

SEQ ID NO: 2507314 - RNA, 19 nt, Artificial Sequence
  Description of Artificial Sequence: Synthetic oligonucleotide
caccuuggcagugagggcc

SEQ ID NO: 2507315 - RNA, 19 nt, Artificial Sequence
  Description of Artificial Sequence: Synthetic oligonucleotide
uugggguauccuucaagga

SEQ ID NO: 2507316 - RNA, 19 nt, Artificial Sequence
  Description of Artificial Sequence: Synthetic oligonucleotide
uggucagcgcacuuguuaa

SEQ ID NO: 2507317 - RNA, 19 nt, Artificial Sequence
  Description of Artificial Sequence: Synthetic oligonucleotide
cucacuaugucaaacuggu

SEQ ID NO: 2507318 - RNA, 19 nt, Artificial Sequence
  Description of Artificial Sequence: Synthetic oligonucleotide
guauccuucaaggauugca

SEQ ID NO: 2507319 - RNA, 19 nt, Artificial Sequence
  Description of Artificial Sequence: Synthetic oligonucleotide
uggaggucagcaucacuca

SEQ ID NO: 2507320 - RNA, 19 nt, Artificial Sequence
  Description of Artificial Sequence: Synthetic oligonucleotide
cucucuauguagugagcac

SEQ ID NO: 2507321 - RNA, 19 nt, Artificial Sequence
  Description of Artificial Sequence: Synthetic oligonucleotide
cagcgcacuuguuaauucc

SEQ ID NO: 2507322 - RNA, 19 nt, Artificial Sequence
  Description of Artificial Sequence: Synthetic oligonucleotide
uacaauacuucugcuuuuc

SEQ ID NO: 2507323 - RNA, 19 nt, Artificial Sequence
  Description of Artificial Sequence: Synthetic oligonucleotide
cagcucagccuccaugugg

SEQ ID NO: 2507324 - RNA, 19 nt, Artificial Sequence
  Description of Artificial Sequence: Synthetic oligonucleotide
uccuggucugcaaaauaaa

SEQ ID NO: 2507325 - RNA, 19 nt, Artificial Sequence
  Description of Artificial Sequence: Synthetic oligonucleotide
acauugugaucuucaucug

SEQ ID NO: 2507326 - RNA, 19 nt, Artificial Sequence
  Description of Artificial Sequence: Synthetic oligonucleotide
guuuccgaacacguccugg

SEQ ID NO: 2507327 - RNA, 19 nt, Artificial Sequence
  Description of Artificial Sequence: Synthetic oligonucleotide
aguccauguuccuucugca

SEQ ID NO: 2507328 - RNA, 19 nt, Artificial Sequence
  Description of Artificial Sequence: Synthetic oligonucleotide
uuccgaacacguccugggc

SEQ ID NO: 2507329 - RNA, 19 nt, Artificial Sequence
  Description of Artificial Sequence: Synthetic oligonucleotide
ucagcgcacuuguuaauuc

SEQ ID NO: 2507330 - RNA, 19 nt, Artificial Sequence
  Description of Artificial Sequence: Synthetic oligonucleotide
uucaccaccgccgccuugc

SEQ ID NO: 2507331 - RNA, 19 nt, Artificial Sequence
  Description of Artificial Sequence: Synthetic oligonucleotide
ucugggagccuaacauugu

SEQ ID NO: 2507332 - RNA, 19 nt, Artificial Sequence
  Description of Artificial Sequence: Synthetic oligonucleotide
uugccguacgucuucuccu

SEQ ID NO: 2507333 - RNA, 19 nt, Artificial Sequence
  Description of Artificial Sequence: Synthetic oligonucleotide
guaagcucugcaccuuggc

SEQ ID NO: 2507334 - RNA, 19 nt, Artificial Sequence
  Description of Artificial Sequence: Synthetic oligonucleotide
cuuucugcaucucaggagu

SEQ ID NO: 2507335 - RNA, 19 nt, Artificial Sequence
  Description of Artificial Sequence: Synthetic oligonucleotide
uuacaauacuucugcuuuu

SEQ ID NO: 2507336 - RNA, 19 nt, Artificial Sequence
  Description of Artificial Sequence: Synthetic oligonucleotide
guaccucaggaugaucccg

SEQ ID NO: 2507337 - RNA, 19 nt, Artificial Sequence
  Description of Artificial Sequence: Synthetic oligonucleotide
acaccugcucucucucuuc

SEQ ID NO: 2507338 - RNA, 19 nt, Artificial Sequence
  Description of Artificial Sequence: Synthetic oligonucleotide
gacuucugcucccugucuc

SEQ ID NO: 2507339 - RNA, 19 nt, Artificial Sequence
  Description of Artificial Sequence: Synthetic oligonucleotide
gauccagagccuucaccac

SEQ ID NO: 2507340 - RNA, 19 nt, Artificial Sequence
  Description of Artificial Sequence: Synthetic oligonucleotide
gaaggccaccuaaccaagg

SEQ ID NO: 2507341 - RNA, 19 nt, Artificial Sequence
  Description of Artificial Sequence: Synthetic oligonucleotide
uagugagcacauuccuucu

SEQ ID NO: 2507342 - RNA, 19 nt, Artificial Sequence
  Description of Artificial Sequence: Synthetic oligonucleotide
cacucuuuacaauacuucu

SEQ ID NO: 2507343 - RNA, 19 nt, Artificial Sequence
  Description of Artificial Sequence: Synthetic oligonucleotide
uuuguacaccugcucucuc

SEQ ID NO: 2507344 - RNA, 19 nt, Artificial Sequence
  Description of Artificial Sequence: Synthetic oligonucleotide
ucugcuugccguacgucuu

SEQ ID NO: 2507345 - RNA, 19 nt, Artificial Sequence
  Description of Artificial Sequence: Synthetic oligonucleotide
ugcucccugucuccaagga

SEQ ID NO: 2507346 - RNA, 19 nt, Artificial Sequence
  Description of Artificial Sequence: Synthetic oligonucleotide
ucuugcgcuuccuccacuc

SEQ ID NO: 2507347 - RNA, 19 nt, Artificial Sequence
  Description of Artificial Sequence: Synthetic oligonucleotide
ggccaccuaaccaagguag

SEQ ID NO: 2507348 - RNA, 19 nt, Artificial Sequence
  Description of Artificial Sequence: Synthetic oligonucleotide
cucaggaguggucagcgca

SEQ ID NO: 2507349 - RNA, 19 nt, Artificial Sequence
  Description of Artificial Sequence: Synthetic oligonucleotide
cucggcuuuuacucauggc

SEQ ID NO: 2507350 - RNA, 19 nt, Artificial Sequence
  Description of Artificial Sequence: Synthetic oligonucleotide
uacaccugcucucucucuu

SEQ ID NO: 2507351 - RNA, 19 nt, Artificial Sequence
  Description of Artificial Sequence: Synthetic oligonucleotide
aggucagcaucacucacua

SEQ ID NO: 2507352 - RNA, 19 nt, Artificial Sequence
  Description of Artificial Sequence: Synthetic oligonucleotide
ugagcacauuccuucuuua

SEQ ID NO: 2507353 - RNA, 19 nt, Artificial Sequence
  Description of Artificial Sequence: Synthetic oligonucleotide
ugcaucacacaggucugug

SEQ ID NO: 2507354 - RNA, 19 nt, Artificial Sequence
  Description of Artificial Sequence: Synthetic oligonucleotide
cugggagccuaacauugug

SEQ ID NO: 2507355 - RNA, 19 nt, Artificial Sequence
  Description of Artificial Sequence: Synthetic oligonucleotide
aaacugguccuggucugca

SEQ ID NO: 2507356 - RNA, 19 nt, Artificial Sequence
  Description of Artificial Sequence: Synthetic oligonucleotide
cucagccuccauguggcgg

SEQ ID NO: 2507357 - RNA, 19 nt, Artificial Sequence
  Description of Artificial Sequence: Synthetic oligonucleotide
ucacuaugucaaacugguc

SEQ ID NO: 2507358 - RNA, 19 nt, Artificial Sequence
  Description of Artificial Sequence: Synthetic oligonucleotide
augguugguggcugcuuug

SEQ ID NO: 2507359 - RNA, 19 nt, Artificial Sequence
  Description of Artificial Sequence: Synthetic oligonucleotide
cuguaagcucugcaccuug

SEQ ID NO: 2507360 - RNA, 19 nt, Artificial Sequence
  Description of Artificial Sequence: Synthetic oligonucleotide
ccaacuucuucaaagaacu

SEQ ID NO: 2507361 - RNA, 19 nt, Artificial Sequence
  Description of Artificial Sequence: Synthetic oligonucleotide
cuuuacaauacuucugcuu

SEQ ID NO: 2507362 - RNA, 19 nt, Artificial Sequence
  Description of Artificial Sequence: Synthetic oligonucleotide
ucggcucggcuuuuacuca

SEQ ID NO: 2507363 - RNA, 19 nt, Artificial Sequence
  Description of Artificial Sequence: Synthetic oligonucleotide
agaaggccaccuaaccaag

SEQ ID NO: 2507364 - RNA, 19 nt, Artificial Sequence
  Description of Artificial Sequence: Synthetic oligonucleotide
uggucauucucuugcgcuu

SEQ ID NO: 2507365 - RNA, 19 nt, Artificial Sequence
  Description of Artificial Sequence: Synthetic oligonucleotide
uccauguggcggcagcuuu

SEQ ID NO: 2507366 - RNA, 19 nt, Artificial Sequence
  Description of Artificial Sequence: Synthetic oligonucleotide
cuuugcuguaagcucugca

SEQ ID NO: 2507367 - RNA, 19 nt, Artificial Sequence
  Description of Artificial Sequence: Synthetic oligonucleotide
ccgguuuugcuccugcagg

SEQ ID NO: 2507368 - RNA, 19 nt, Artificial Sequence
  Description of Artificial Sequence: Synthetic oligonucleotide
acugguccuggucugcaaa

SEQ ID NO: 2507369 - RNA, 19 nt, Artificial Sequence
  Description of Artificial Sequence: Synthetic oligonucleotide
gcacuuguuaauuccuuca

SEQ ID NO: 2507370 - RNA, 19 nt, Artificial Sequence
  Description of Artificial Sequence: Synthetic oligonucleotide
cugcagguuuccgaacacg

SEQ ID NO: 2507371 - RNA, 19 nt, Artificial Sequence
  Description of Artificial Sequence: Synthetic oligonucleotide
cuuccuccacucuuuacaa

SEQ ID NO: 2507372 - RNA, 19 nt, Artificial Sequence
  Description of Artificial Sequence: Synthetic oligonucleotide
cuuuuacucauggccuuuc

SEQ ID NO: 2507373 - RNA, 19 nt, Artificial Sequence
  Description of Artificial Sequence: Synthetic oligonucleotide
caucucaggaguggucagc

SEQ ID NO: 2507374 - RNA, 19 nt, Artificial Sequence
  Description of Artificial Sequence: Synthetic oligonucleotide
aacugguccuggucugcaa

SEQ ID NO: 2507375 - RNA, 19 nt, Artificial Sequence
  Description of Artificial Sequence: Synthetic oligonucleotide
cuaugucaaacugguccug

SEQ ID NO: 2507376 - RNA, 19 nt, Artificial Sequence
  Description of Artificial Sequence: Synthetic oligonucleotide
uugcgcuuccuccacucuu

SEQ ID NO: 2507377 - RNA, 19 nt, Artificial Sequence
  Description of Artificial Sequence: Synthetic oligonucleotide
cauguggcggcagcuuugc

SEQ ID NO: 2507378 - RNA, 19 nt, Artificial Sequence
  Description of Artificial Sequence: Synthetic oligonucleotide
cugcucccugucuccaagg

SEQ ID NO: 2507379 - RNA, 19 nt, Artificial Sequence
  Description of Artificial Sequence: Synthetic oligonucleotide
gcucggcuuuuacucaugg

SEQ ID NO: 2507380 - RNA, 19 nt, Artificial Sequence
  Description of Artificial Sequence: Synthetic oligonucleotide
aacacguccugggcgcugu

SEQ ID NO: 2507381 - RNA, 19 nt, Artificial Sequence
  Description of Artificial Sequence: Synthetic oligonucleotide
cagagccuucaccaccgcc

SEQ ID NO: 2507382 - RNA, 19 nt, Artificial Sequence
  Description of Artificial Sequence: Synthetic oligonucleotide
cacaggucuguggucauuc

SEQ ID NO: 2507383 - RNA, 19 nt, Artificial Sequence
  Description of Artificial Sequence: Synthetic oligonucleotide
guggucagcgcacuuguua

SEQ ID NO: 2507384 - RNA, 19 nt, Artificial Sequence
  Description of Artificial Sequence: Synthetic oligonucleotide
guccuggucugcaaaauaa

SEQ ID NO: 2507385 - RNA, 19 nt, Artificial Sequence
  Description of Artificial Sequence: Synthetic oligonucleotide
caagguagccagcccagga

SEQ ID NO: 2507386 - RNA, 19 nt, Artificial Sequence
  Description of Artificial Sequence: Synthetic oligonucleotide
cauugugaucuucaucugu

SEQ ID NO: 2507387 - RNA, 19 nt, Artificial Sequence
  Description of Artificial Sequence: Synthetic oligonucleotide
agcgcacuuguuaauuccu

SEQ ID NO: 2507388 - RNA, 19 nt, Artificial Sequence
  Description of Artificial Sequence: Synthetic oligonucleotide
accgccgccuugcccaguc

SEQ ID NO: 2507389 - RNA, 19 nt, Artificial Sequence
  Description of Artificial Sequence: Synthetic oligonucleotide
guacgucuucuccuugauc

SEQ ID NO: 2507390 - RNA, 19 nt, Artificial Sequence
  Description of Artificial Sequence: Synthetic oligonucleotide
caggcuguggaggucagca

SEQ ID NO: 2507391 - RNA, 19 nt, Artificial Sequence
  Description of Artificial Sequence: Synthetic oligonucleotide
uggccuuucccgccaccga

SEQ ID NO: 2507392 - RNA, 19 nt, Artificial Sequence
  Description of Artificial Sequence: Synthetic oligonucleotide
gaccccucaggggucuggg

SEQ ID NO: 2507393 - RNA, 19 nt, Artificial Sequence
  Description of Artificial Sequence: Synthetic oligonucleotide
gccgguuuugcuccugcag

SEQ ID NO: 2507394 - RNA, 19 nt, Artificial Sequence
  Description of Artificial Sequence: Synthetic oligonucleotide
caccuaaccaagguagcca

SEQ ID NO: 2507395 - RNA, 19 nt, Artificial Sequence
  Description of Artificial Sequence: Synthetic oligonucleotide
guggcggcagcuuugcugu

SEQ ID NO: 2507396 - RNA, 19 nt, Artificial Sequence
  Description of Artificial Sequence: Synthetic oligonucleotide
uuccuccacucuuuacaau

SEQ ID NO: 2507397 - RNA, 19 nt, Artificial Sequence
  Description of Artificial Sequence: Synthetic oligonucleotide
uugcaucacacaggucugu

SEQ ID NO: 2507398 - RNA, 19 nt, Artificial Sequence
  Description of Artificial Sequence: Synthetic oligonucleotide
agguuuccgaacacguccu

SEQ ID NO: 2507399 - RNA, 19 nt, Artificial Sequence
  Description of Artificial Sequence: Synthetic oligonucleotide
gaguggucagcgcacuugu

SEQ ID NO: 2507400 - RNA, 19 nt, Artificial Sequence
  Description of Artificial Sequence: Synthetic oligonucleotide
ugagggccacaauguuggc

SEQ ID NO: 2507401 - RNA, 19 nt, Artificial Sequence
  Description of Artificial Sequence: Synthetic oligonucleotide
ccgaacacguccugggcgc

SEQ ID NO: 2507402 - RNA, 19 nt, Artificial Sequence
  Description of Artificial Sequence: Synthetic oligonucleotide
gcaucacucacuaugucaa

SEQ ID NO: 2507403 - RNA, 19 nt, Artificial Sequence
  Description of Artificial Sequence: Synthetic oligonucleotide
cugcaccuuggcagugagg

SEQ ID NO: 2507404 - RNA, 19 nt, Artificial Sequence
  Description of Artificial Sequence: Synthetic oligonucleotide
gucucucuauguagugagc

SEQ ID NO: 2507405 - RNA, 19 nt, Artificial Sequence
  Description of Artificial Sequence: Synthetic oligonucleotide
ugccguacgucuucuccuu

SEQ ID NO: 2507406 - RNA, 19 nt, Artificial Sequence
  Description of Artificial Sequence: Synthetic oligonucleotide
aaggaccccucaggggucu

SEQ ID NO: 2507407 - RNA, 19 nt, Artificial Sequence
  Description of Artificial Sequence: Synthetic oligonucleotide
ucuauguagugagcacauu

SEQ ID NO: 2507408 - RNA, 19 nt, Artificial Sequence
  Description of Artificial Sequence: Synthetic oligonucleotide
caauacuucugcuuuucuu

SEQ ID NO: 2507409 - RNA, 19 nt, Artificial Sequence
  Description of Artificial Sequence: Synthetic oligonucleotide
ggaguggucagcgcacuug

SEQ ID NO: 2507410 - RNA, 19 nt, Artificial Sequence
  Description of Artificial Sequence: Synthetic oligonucleotide
caaggaccccucagggguc

SEQ ID NO: 2507411 - RNA, 19 nt, Artificial Sequence
  Description of Artificial Sequence: Synthetic oligonucleotide
ggagccuaacauugugauc

SEQ ID NO: 2507412 - RNA, 19 nt, Artificial Sequence
  Description of Artificial Sequence: Synthetic oligonucleotide
cagcaucacucacuauguc

SEQ ID NO: 2507413 - RNA, 19 nt, Artificial Sequence
  Description of Artificial Sequence: Synthetic oligonucleotide
ggccacaauguuggcaucc

SEQ ID NO: 2507414 - RNA, 19 nt, Artificial Sequence
  Description of Artificial Sequence: Synthetic oligonucleotide
uugcccaguccauguuccu

SEQ ID NO: 2507415 - RNA, 19 nt, Artificial Sequence
  Description of Artificial Sequence: Synthetic oligonucleotide
ccuucaaggauugcaucac

SEQ ID NO: 2507416 - RNA, 19 nt, Artificial Sequence
  Description of Artificial Sequence: Synthetic oligonucleotide
uucugcucccugucuccaa

SEQ ID NO: 2507417 - RNA, 19 nt, Artificial Sequence
  Description of Artificial Sequence: Synthetic oligonucleotide
cagucucucuauguaguga

SEQ ID NO: 2507418 - RNA, 19 nt, Artificial Sequence
  Description of Artificial Sequence: Synthetic oligonucleotide
cuccuugaucuugccuugc

SEQ ID NO: 2507419 - RNA, 19 nt, Artificial Sequence
  Description of Artificial Sequence: Synthetic oligonucleotide
agcuuugcuguaagcucug

SEQ ID NO: 2507420 - RNA, 19 nt, Artificial Sequence
  Description of Artificial Sequence: Synthetic oligonucleotide
ccaccuaaccaagguagcc

SEQ ID NO: 2507421 - RNA, 19 nt, Artificial Sequence
  Description of Artificial Sequence: Synthetic oligonucleotide
ggguauccuucaaggauug

SEQ ID NO: 2507422 - RNA, 19 nt, Artificial Sequence
  Description of Artificial Sequence: Synthetic oligonucleotide
auguuggcauccaggcugu

SEQ ID NO: 2507423 - RNA, 19 nt, Artificial Sequence
  Description of Artificial Sequence: Synthetic oligonucleotide
acgucuucuccuugaucuu

SEQ ID NO: 2507424 - RNA, 19 nt, Artificial Sequence
  Description of Artificial Sequence: Synthetic oligonucleotide
cuuucccgccaccgaacuc

SEQ ID NO: 2507425 - RNA, 19 nt, Artificial Sequence
  Description of Artificial Sequence: Synthetic oligonucleotide
cucauggccuuucccgcca

SEQ ID NO: 2507426 - RNA, 19 nt, Artificial Sequence
  Description of Artificial Sequence: Synthetic oligonucleotide
cuugcugggccagcugauc

SEQ ID NO: 2507427 - RNA, 19 nt, Artificial Sequence
  Description of Artificial Sequence: Synthetic oligonucleotide
guccugggcgcuguagggc

SEQ ID NO: 2507428 - RNA, 19 nt, Artificial Sequence
  Description of Artificial Sequence: Synthetic oligonucleotide
ccuaaccaagguagccagc

SEQ ID NO: 2507429 - RNA, 19 nt, Artificial Sequence
  Description of Artificial Sequence: Synthetic oligonucleotide
cuuuguacaccugcucucu

SEQ ID NO: 2507430 - RNA, 19 nt, Artificial Sequence
  Description of Artificial Sequence: Synthetic oligonucleotide
gaacacguccugggcgcug

SEQ ID NO: 2507431 - RNA, 19 nt, Artificial Sequence
  Description of Artificial Sequence: Synthetic oligonucleotide
gguuuccgaacacguccug

SEQ ID NO: 2507432 - RNA, 19 nt, Artificial Sequence
  Description of Artificial Sequence: Synthetic oligonucleotide
gcccaguccauguuccuuc

SEQ ID NO: 2507433 - RNA, 19 nt, Artificial Sequence
  Description of Artificial Sequence: Synthetic oligonucleotide
agccuaacauugugaucuu

SEQ ID NO: 2507434 - RNA, 19 nt, Artificial Sequence
  Description of Artificial Sequence: Synthetic oligonucleotide
caucacucacuaugucaaa

SEQ ID NO: 2507435 - RNA, 19 nt, Artificial Sequence
  Description of Artificial Sequence: Synthetic oligonucleotide
aggcuguggaggucagcau

SEQ ID NO: 2507436 - RNA, 19 nt, Artificial Sequence
  Description of Artificial Sequence: Synthetic oligonucleotide
gcggcagcuuugcuguaag

SEQ ID NO: 2507437 - RNA, 19 nt, Artificial Sequence
  Description of Artificial Sequence: Synthetic oligonucleotide
cuaugccaacuucuucaaa

SEQ ID NO: 2507438 - RNA, 19 nt, Artificial Sequence
  Description of Artificial Sequence: Synthetic oligonucleotide
ugcccaguccauguuccuu

SEQ ID NO: 2507439 - RNA, 19 nt, Artificial Sequence
  Description of Artificial Sequence: Synthetic oligonucleotide
gggagccuaacauugugau

SEQ ID NO: 2507440 - RNA, 19 nt, Artificial Sequence
  Description of Artificial Sequence: Synthetic oligonucleotide
caauguuggcauccaggcu

SEQ ID NO: 2507441 - RNA, 19 nt, Artificial Sequence
  Description of Artificial Sequence: Synthetic oligonucleotide
gcucccugucuccaaggac

SEQ ID NO: 2507442 - RNA, 19 nt, Artificial Sequence
  Description of Artificial Sequence: Synthetic oligonucleotide
cacguccugggcgcuguag

SEQ ID NO: 2507443 - RNA, 19 nt, Artificial Sequence
  Description of Artificial Sequence: Synthetic oligonucleotide
ggucauucucuugcgcuuc

SEQ ID NO: 2507444 - RNA, 19 nt, Artificial Sequence
  Description of Artificial Sequence: Synthetic oligonucleotide
cgcacuuguuaauuccuuc

SEQ ID NO: 2507445 - RNA, 19 nt, Artificial Sequence
  Description of Artificial Sequence: Synthetic oligonucleotide
gccuugcugggccagcuga

SEQ ID NO: 2507446 - RNA, 19 nt, Artificial Sequence
  Description of Artificial Sequence: Synthetic oligonucleotide
guagccagcccaggacuuc

SEQ ID NO: 2507447 - RNA, 19 nt, Artificial Sequence
  Description of Artificial Sequence: Synthetic oligonucleotide
gguccuggucugcaaaaua

SEQ ID NO: 2507448 - RNA, 19 nt, Artificial Sequence
  Description of Artificial Sequence: Synthetic oligonucleotide
aggaguggucagcgcacuu

SEQ ID NO: 2507449 - RNA, 19 nt, Artificial Sequence
  Description of Artificial Sequence: Synthetic oligonucleotide
gccaccuaaccaagguagc

SEQ ID NO: 2507450 - RNA, 19 nt, Artificial Sequence
  Description of Artificial Sequence: Synthetic oligonucleotide
ccaaggaccccucaggggu

SEQ ID NO: 2507451 - RNA, 19 nt, Artificial Sequence
  Description of Artificial Sequence: Synthetic oligonucleotide
cuucaccaccgccgccuug

SEQ ID NO: 2507452 - RNA, 19 nt, Artificial Sequence
  Description of Artificial Sequence: Synthetic oligonucleotide
cugggcgcuguagggccgg

SEQ ID NO: 2507453 - RNA, 19 nt, Artificial Sequence
  Description of Artificial Sequence: Synthetic oligonucleotide
gguauccuucaaggauugc

SEQ ID NO: 2507454 - RNA, 19 nt, Artificial Sequence
  Description of Artificial Sequence: Synthetic oligonucleotide
cguccugggcgcuguaggg

SEQ ID NO: 2507455 - RNA, 19 nt, Artificial Sequence
  Description of Artificial Sequence: Synthetic oligonucleotide
auguggcggcagcuuugcu

SEQ ID NO: 2507456 - RNA, 19 nt, Artificial Sequence
  Description of Artificial Sequence: Synthetic oligonucleotide
accccucaggggucuggga

SEQ ID NO: 2507457 - RNA, 19 nt, Artificial Sequence
  Description of Artificial Sequence: Synthetic oligonucleotide
ggggucugggagccuaaca

SEQ ID NO: 2507458 - RNA, 19 nt, Artificial Sequence
  Description of Artificial Sequence: Synthetic oligonucleotide
gcagugagggccacaaugu

SEQ ID NO: 2507459 - RNA, 19 nt, Artificial Sequence
  Description of Artificial Sequence: Synthetic oligonucleotide
uagggccgguuuugcuccu

SEQ ID NO: 2507460 - RNA, 19 nt, Artificial Sequence
  Description of Artificial Sequence: Synthetic oligonucleotide
guacaccugcucucucucu

SEQ ID NO: 2507461 - RNA, 19 nt, Artificial Sequence
  Description of Artificial Sequence: Synthetic oligonucleotide
caugguugguggcugcuuu

SEQ ID NO: 2507462 - RNA, 19 nt, Artificial Sequence
  Description of Artificial Sequence: Synthetic oligonucleotide
cauccaggcuguggagguc

SEQ ID NO: 2507463 - RNA, 19 nt, Artificial Sequence
  Description of Artificial Sequence: Synthetic oligonucleotide
ggccuuucccgccaccgaa

SEQ ID NO: 2507464 - RNA, 19 nt, Artificial Sequence
  Description of Artificial Sequence: Synthetic oligonucleotide
gggccgguuuugcuccugc

SEQ ID NO: 2507465 - RNA, 19 nt, Artificial Sequence
  Description of Artificial Sequence: Synthetic oligonucleotide
ccuggucugcaaaauaaau

SEQ ID NO: 2507466 - RNA, 19 nt, Artificial Sequence
  Description of Artificial Sequence: Synthetic oligonucleotide
gucucuaugccaacuucuu

SEQ ID NO: 2507467 - RNA, 19 nt, Artificial Sequence
  Description of Artificial Sequence: Synthetic oligonucleotide
gucagcgcacuuguuaauu

SEQ ID NO: 2507468 - RNA, 19 nt, Artificial Sequence
  Description of Artificial Sequence: Synthetic oligonucleotide
cucugcaccuuggcaguga

SEQ ID NO: 2507469 - RNA, 19 nt, Artificial Sequence
  Description of Artificial Sequence: Synthetic oligonucleotide
gcuuugcuguaagcucugc

SEQ ID NO: 2507470 - RNA, 19 nt, Artificial Sequence
  Description of Artificial Sequence: Synthetic oligonucleotide
ccauguuccuucugcaggu

SEQ ID NO: 2507471 - RNA, 19 nt, Artificial Sequence
  Description of Artificial Sequence: Synthetic oligonucleotide
gccguacgucuucuccuug

SEQ ID NO: 2507472 - RNA, 19 nt, Artificial Sequence
  Description of Artificial Sequence: Synthetic oligonucleotide
gggguauccuucaaggauu

SEQ ID NO: 2507473 - RNA, 19 nt, Artificial Sequence
  Description of Artificial Sequence: Synthetic oligonucleotide
cucuugggguauccuucaa

SEQ ID NO: 2507474 - RNA, 19 nt, Artificial Sequence
  Description of Artificial Sequence: Synthetic oligonucleotide
ggaccccucaggggucugg

SEQ ID NO: 2507475 - RNA, 19 nt, Artificial Sequence
  Description of Artificial Sequence: Synthetic oligonucleotide
ggucugcaaaauaaauuuu

SEQ ID NO: 2507476 - RNA, 19 nt, Artificial Sequence
  Description of Artificial Sequence: Synthetic oligonucleotide
acacaggucuguggucauu

SEQ ID NO: 2507477 - RNA, 19 nt, Artificial Sequence
  Description of Artificial Sequence: Synthetic oligonucleotide
cuuggcagugagggccaca

SEQ ID NO: 2507478 - RNA, 19 nt, Artificial Sequence
  Description of Artificial Sequence: Synthetic oligonucleotide
cuugcgcuuccuccacucu

SEQ ID NO: 2507479 - RNA, 19 nt, Artificial Sequence
  Description of Artificial Sequence: Synthetic oligonucleotide
ggcuuuuacucauggccuu

SEQ ID NO: 2507480 - RNA, 19 nt, Artificial Sequence
  Description of Artificial Sequence: Synthetic oligonucleotide
aguggucagcgcacuuguu

SEQ ID NO: 2507481 - RNA, 19 nt, Artificial Sequence
  Description of Artificial Sequence: Synthetic oligonucleotide
gccuaacauugugaucuuc

SEQ ID NO: 2507482 - RNA, 19 nt, Artificial Sequence
  Description of Artificial Sequence: Synthetic oligonucleotide
caccugcucucucucuucu

SEQ ID NO: 2507483 - RNA, 19 nt, Artificial Sequence
  Description of Artificial Sequence: Synthetic oligonucleotide
ggcucggcuuuuacucaug

SEQ ID NO: 2507484 - RNA, 19 nt, Artificial Sequence
  Description of Artificial Sequence: Synthetic oligonucleotide
agggccgguuuugcuccug

SEQ ID NO: 2507485 - RNA, 19 nt, Artificial Sequence
  Description of Artificial Sequence: Synthetic oligonucleotide
agccagcccaggacuucug

SEQ ID NO: 2507486 - RNA, 19 nt, Artificial Sequence
  Description of Artificial Sequence: Synthetic oligonucleotide
ggccgguuuugcuccugca

SEQ ID NO: 2507487 - RNA, 19 nt, Artificial Sequence
  Description of Artificial Sequence: Synthetic oligonucleotide
gccuuucccgccaccgaac

SEQ ID NO: 2507488 - RNA, 19 nt, Artificial Sequence
  Description of Artificial Sequence: Synthetic oligonucleotide
uggcugcuuugauguucuu

SEQ ID NO: 2507489 - RNA, 19 nt, Artificial Sequence
  Description of Artificial Sequence: Synthetic oligonucleotide
ccaggacuucugcucccug

SEQ ID NO: 2507490 - RNA, 19 nt, Artificial Sequence
  Description of Artificial Sequence: Synthetic oligonucleotide
ggauugcaucacacagguc

SEQ ID NO: 2507491 - RNA, 19 nt, Artificial Sequence
  Description of Artificial Sequence: Synthetic oligonucleotide
gccucggcucggcuuuuac

SEQ ID NO: 2507492 - RNA, 19 nt, Artificial Sequence
  Description of Artificial Sequence: Synthetic oligonucleotide
gcuugccguacgucuucuc

SEQ ID NO: 2507493 - RNA, 19 nt, Artificial Sequence
  Description of Artificial Sequence: Synthetic oligonucleotide
cggcuuuuacucauggccu

SEQ ID NO: 2507494 - RNA, 19 nt, Artificial Sequence
  Description of Artificial Sequence: Synthetic oligonucleotide
ccggccgcggccucggcuc

SEQ ID NO: 2507495 - RNA, 19 nt, Artificial Sequence
  Description of Artificial Sequence: Synthetic oligonucleotide
caggggucugggagccuaa

SEQ ID NO: 2507496 - RNA, 19 nt, Artificial Sequence
  Description of Artificial Sequence: Synthetic oligonucleotide
ggcgcuguagggccgguuu

SEQ ID NO: 2507497 - RNA, 19 nt, Artificial Sequence
  Description of Artificial Sequence: Synthetic oligonucleotide
gcucugcaccuuggcagug

SEQ ID NO: 2507498 - RNA, 19 nt, Artificial Sequence
  Description of Artificial Sequence: Synthetic oligonucleotide
cucuugcgcuuccuccacu

SEQ ID NO: 2507499 - RNA, 19 nt, Artificial Sequence
  Description of Artificial Sequence: Synthetic oligonucleotide
cacacaggucuguggucau

SEQ ID NO: 2507500 - RNA, 19 nt, Artificial Sequence
  Description of Artificial Sequence: Synthetic oligonucleotide
aggaccccucaggggucug

SEQ ID NO: 2507501 - RNA, 19 nt, Artificial Sequence
  Description of Artificial Sequence: Synthetic oligonucleotide
ggucagcgcacuuguuaau

SEQ ID NO: 2507502 - RNA, 19 nt, Artificial Sequence
  Description of Artificial Sequence: Synthetic oligonucleotide
acacguccugggcgcugua

SEQ ID NO: 2507503 - RNA, 19 nt, Artificial Sequence
  Description of Artificial Sequence: Synthetic oligonucleotide
ggcggcagcuuugcuguaa

SEQ ID NO: 2507504 - RNA, 19 nt, Artificial Sequence
  Description of Artificial Sequence: Synthetic oligonucleotide
ggcuccggccgcggccucg

SEQ ID NO: 2507505 - RNA, 19 nt, Artificial Sequence
  Description of Artificial Sequence: Synthetic oligonucleotide
cgcuguagggccgguuuug

SEQ ID NO: 2507506 - RNA, 19 nt, Artificial Sequence
  Description of Artificial Sequence: Synthetic oligonucleotide
ugggcgcuguagggccggu

SEQ ID NO: 2507507 - RNA, 19 nt, Artificial Sequence
  Description of Artificial Sequence: Synthetic oligonucleotide
ccagcccaggacuucugcu

SEQ ID NO: 2507508 - RNA, 19 nt, Artificial Sequence
  Description of Artificial Sequence: Synthetic oligonucleotide
gcuuuuacucauggccuuu

SEQ ID NO: 2507509 - RNA, 19 nt, Artificial Sequence
  Description of Artificial Sequence: Synthetic oligonucleotide
ccuuucccgccaccgaacu

SEQ ID NO: 2507510 - RNA, 19 nt, Artificial Sequence
  Description of Artificial Sequence: Synthetic oligonucleotide
cauguuccuucugcagguu

SEQ ID NO: 2507511 - RNA, 19 nt, Artificial Sequence
  Description of Artificial Sequence: Synthetic oligonucleotide
cuccggccgcggccucggc

SEQ ID NO: 2507512 - RNA, 19 nt, Artificial Sequence
  Description of Artificial Sequence: Synthetic oligonucleotide
ccucggcucggcuuuuacu

SEQ ID NO: 2507513 - RNA, 19 nt, Artificial Sequence
  Description of Artificial Sequence: Synthetic oligonucleotide
gcuguaagcucugcaccuu

SEQ ID NO: 2507514 - RNA, 19 nt, Artificial Sequence
  Description of Artificial Sequence: Synthetic oligonucleotide
ggucagcaucacucacuau

SEQ ID NO: 2507515 - RNA, 19 nt, Artificial Sequence
  Description of Artificial Sequence: Synthetic oligonucleotide
cagccuccauguggcggca

SEQ ID NO: 2507516 - RNA, 19 nt, Artificial Sequence
  Description of Artificial Sequence: Synthetic oligonucleotide
cuccauguggcggcagcuu

SEQ ID NO: 2507517 - RNA, 19 nt, Artificial Sequence
  Description of Artificial Sequence: Synthetic oligonucleotide
gcgcuuccuccacucuuua

SEQ ID NO: 2507518 - RNA, 19 nt, Artificial Sequence
  Description of Artificial Sequence: Synthetic oligonucleotide
gcggccucggcucggcuuu

SEQ ID NO: 2507519 - RNA, 19 nt, Artificial Sequence
  Description of Artificial Sequence: Synthetic oligonucleotide
gcgcacuuguuaauuccuu

SEQ ID NO: 2507520 - RNA, 19 nt, Artificial Sequence
  Description of Artificial Sequence: Synthetic oligonucleotide
cgccgccuugcccagucca

SEQ ID NO: 2507521 - RNA, 19 nt, Artificial Sequence
  Description of Artificial Sequence: Synthetic oligonucleotide
ccgccgccuugcccagucc

SEQ ID NO: 2507522 - RNA, 19 nt, Artificial Sequence
  Description of Artificial Sequence: Synthetic oligonucleotide
gccgcggccucggcucggc

SEQ ID NO: 2507523 - RNA, 19 nt, Artificial Sequence
  Description of Artificial Sequence: Synthetic oligonucleotide
cguacgucuucuccuugau

SEQ ID NO: 2507524 - RNA, 19 nt, Artificial Sequence
  Description of Artificial Sequence: Synthetic oligonucleotide
gcgcuguagggccgguuuu

SEQ ID NO: 2507525 - RNA, 19 nt, Artificial Sequence
  Description of Artificial Sequence: Synthetic oligonucleotide
gccgccuugcccaguccau

SEQ ID NO: 2507526 - RNA, 19 nt, Artificial Sequence
  Description of Artificial Sequence: Synthetic oligonucleotide
cggcucggcuuuuacucau

SEQ ID NO: 2507527 - RNA, 19 nt, Artificial Sequence
  Description of Artificial Sequence: Synthetic oligonucleotide
ggccucggcucggcuuuua

SEQ ID NO: 2507528 - RNA, 19 nt, Artificial Sequence
  Description of Artificial Sequence: Synthetic oligonucleotide
cgaacacguccugggcgcu

SEQ ID NO: 2507529 - RNA, 19 nt, Artificial Sequence
  Description of Artificial Sequence: Synthetic oligonucleotide
caccgccgccuugcccagu

SEQ ID NO: 2507530 - RNA, 19 nt, Artificial Sequence
  Description of Artificial Sequence: Synthetic oligonucleotide
gggcgcuguagggccgguu

SEQ ID NO: 2507531 - RNA, 19 nt, Artificial Sequence
  Description of Artificial Sequence: Synthetic oligonucleotide
ccgcggccucggcucggcu

SEQ ID NO: 2507532 - RNA, 19 nt, Artificial Sequence
  Description of Artificial Sequence: Synthetic oligonucleotide
cggccucggcucggcuuuu

SEQ ID NO: 2507533 - RNA, 19 nt, Artificial Sequence
  Description of Artificial Sequence: Synthetic oligonucleotide
aacaaguuaacaccaacgg

SEQ ID NO: 2507534 - RNA, 19 nt, Artificial Sequence
  Description of Artificial Sequence: Synthetic oligonucleotide
guaacuaaggcacugaaag

SEQ ID NO: 2507535 - RNA, 19 nt, Artificial Sequence
  Description of Artificial Sequence: Synthetic oligonucleotide
aaaagcuuccugcaaacag

SEQ ID NO: 2507536 - RNA, 19 nt, Artificial Sequence
  Description of Artificial Sequence: Synthetic oligonucleotide
aaagaaagggacccguaac

SEQ ID NO: 2507537 - RNA, 19 nt, Artificial Sequence
  Description of Artificial Sequence: Synthetic oligonucleotide
uaaagauaaaggcagcagc

SEQ ID NO: 2507538 - RNA, 19 nt, Artificial Sequence
  Description of Artificial Sequence: Synthetic oligonucleotide
aauaaugggacccagcaua

SEQ ID NO: 2507539 - RNA, 19 nt, Artificial Sequence
  Description of Artificial Sequence: Synthetic oligonucleotide
uguaaacaaguuaacacca

SEQ ID NO: 2507540 - RNA, 19 nt, Artificial Sequence
  Description of Artificial Sequence: Synthetic oligonucleotide
acaucaaaggaauaauggg

SEQ ID NO: 2507541 - RNA, 19 nt, Artificial Sequence
  Description of Artificial Sequence: Synthetic oligonucleotide
aauaaagccccuuccauga

SEQ ID NO: 2507542 - RNA, 19 nt, Artificial Sequence
  Description of Artificial Sequence: Synthetic oligonucleotide
uuuacaccaaacauggucu

SEQ ID NO: 2507543 - RNA, 19 nt, Artificial Sequence
  Description of Artificial Sequence: Synthetic oligonucleotide
ucauuagacaauuccacag

SEQ ID NO: 2507544 - RNA, 19 nt, Artificial Sequence
  Description of Artificial Sequence: Synthetic oligonucleotide
uuauuuaagaacacguuau

SEQ ID NO: 2507545 - RNA, 19 nt, Artificial Sequence
  Description of Artificial Sequence: Synthetic oligonucleotide
acuuuuacaccaaacaugg

SEQ ID NO: 2507546 - RNA, 19 nt, Artificial Sequence
  Description of Artificial Sequence: Synthetic oligonucleotide
aagaacacguuauagaauu

SEQ ID NO: 2507547 - RNA, 19 nt, Artificial Sequence
  Description of Artificial Sequence: Synthetic oligonucleotide
cacguuauagaauucuugg

SEQ ID NO: 2507548 - RNA, 19 nt, Artificial Sequence
  Description of Artificial Sequence: Synthetic oligonucleotide
ugcaucaccuguuaaaacc

SEQ ID NO: 2507549 - RNA, 19 nt, Artificial Sequence
  Description of Artificial Sequence: Synthetic oligonucleotide
auuucaggcaaauuuucuc

SEQ ID NO: 2507550 - RNA, 19 nt, Artificial Sequence
  Description of Artificial Sequence: Synthetic oligonucleotide
uagacaauuccacaggaac

SEQ ID NO: 2507551 - RNA, 19 nt, Artificial Sequence
  Description of Artificial Sequence: Synthetic oligonucleotide
uuucaggcaaauuuucucc

SEQ ID NO: 2507552 - RNA, 19 nt, Artificial Sequence
  Description of Artificial Sequence: Synthetic oligonucleotide
agcacauuauuuuauauaa

SEQ ID NO: 2507553 - RNA, 19 nt, Artificial Sequence
  Description of Artificial Sequence: Synthetic oligonucleotide
aacuuuuacaccaaacaug

SEQ ID NO: 2507554 - RNA, 19 nt, Artificial Sequence
  Description of Artificial Sequence: Synthetic oligonucleotide
acaaaacggcugcugaucc

SEQ ID NO: 2507555 - RNA, 19 nt, Artificial Sequence
  Description of Artificial Sequence: Synthetic oligonucleotide
acaaguuaacaccaacggg

SEQ ID NO: 2507556 - RNA, 19 nt, Artificial Sequence
  Description of Artificial Sequence: Synthetic oligonucleotide
aacuaaggcacugaaagca

SEQ ID NO: 2507557 - RNA, 19 nt, Artificial Sequence
  Description of Artificial Sequence: Synthetic oligonucleotide
aggaacauccagucuaccc

SEQ ID NO: 2507558 - RNA, 19 nt, Artificial Sequence
  Description of Artificial Sequence: Synthetic oligonucleotide
uucaugaugaugacacucc

SEQ ID NO: 2507559 - RNA, 19 nt, Artificial Sequence
  Description of Artificial Sequence: Synthetic oligonucleotide
uuuuguaucuguccaccag

SEQ ID NO: 2507560 - RNA, 19 nt, Artificial Sequence
  Description of Artificial Sequence: Synthetic oligonucleotide
gguugauaaacaucaaagg

SEQ ID NO: 2507561 - RNA, 19 nt, Artificial Sequence
  Description of Artificial Sequence: Synthetic oligonucleotide
aaagcuuccugcaaacagg

SEQ ID NO: 2507562 - RNA, 19 nt, Artificial Sequence
  Description of Artificial Sequence: Synthetic oligonucleotide
aagaaagggacccguaacu

SEQ ID NO: 2507563 - RNA, 19 nt, Artificial Sequence
  Description of Artificial Sequence: Synthetic oligonucleotide
guuauagaauucuuggaac

SEQ ID NO: 2507564 - RNA, 19 nt, Artificial Sequence
  Description of Artificial Sequence: Synthetic oligonucleotide
gacagguugauaaacauca

SEQ ID NO: 2507565 - RNA, 19 nt, Artificial Sequence
  Description of Artificial Sequence: Synthetic oligonucleotide
aaaugcaucaccuguuaaa

SEQ ID NO: 2507566 - RNA, 19 nt, Artificial Sequence
  Description of Artificial Sequence: Synthetic oligonucleotide
uagaauucuuggaacagga

SEQ ID NO: 2507567 - RNA, 19 nt, Artificial Sequence
  Description of Artificial Sequence: Synthetic oligonucleotide
aacauggucuccaacaaug

SEQ ID NO: 2507568 - RNA, 19 nt, Artificial Sequence
  Description of Artificial Sequence: Synthetic oligonucleotide
agguugauaaacaucaaag

SEQ ID NO: 2507569 - RNA, 19 nt, Artificial Sequence
  Description of Artificial Sequence: Synthetic oligonucleotide
agcuauaucucauuagaca

SEQ ID NO: 2507570 - RNA, 19 nt, Artificial Sequence
  Description of Artificial Sequence: Synthetic oligonucleotide
uaaacaaguuaacaccaac

SEQ ID NO: 2507571 - RNA, 19 nt, Artificial Sequence
  Description of Artificial Sequence: Synthetic oligonucleotide
aacaccaacggggaucccc

SEQ ID NO: 2507572 - RNA, 19 nt, Artificial Sequence
  Description of Artificial Sequence: Synthetic oligonucleotide
augaauaaagauaaaggca

SEQ ID NO: 2507573 - RNA, 19 nt, Artificial Sequence
  Description of Artificial Sequence: Synthetic oligonucleotide
uccagucuacccuaguccg

SEQ ID NO: 2507574 - RNA, 19 nt, Artificial Sequence
  Description of Artificial Sequence: Synthetic oligonucleotide
aaaagaaagggacccguaa

SEQ ID NO: 2507575 - RNA, 19 nt, Artificial Sequence
  Description of Artificial Sequence: Synthetic oligonucleotide
aaagcacauuauuuuauau

SEQ ID NO: 2507576 - RNA, 19 nt, Artificial Sequence
  Description of Artificial Sequence: Synthetic oligonucleotide
uauagaauucuuggaacag

SEQ ID NO: 2507577 - RNA, 19 nt, Artificial Sequence
  Description of Artificial Sequence: Synthetic oligonucleotide
aucugagguagcuauaucu

SEQ ID NO: 2507578 - RNA, 19 nt, Artificial Sequence
  Description of Artificial Sequence: Synthetic oligonucleotide
uuuguaucuguccaccagu

SEQ ID NO: 2507579 - RNA, 19 nt, Artificial Sequence
  Description of Artificial Sequence: Synthetic oligonucleotide
uccagcgauaccacgacag

SEQ ID NO: 2507580 - RNA, 19 nt, Artificial Sequence
  Description of Artificial Sequence: Synthetic oligonucleotide
augauucugacaccgcgcg

SEQ ID NO: 2507581 - RNA, 19 nt, Artificial Sequence
  Description of Artificial Sequence: Synthetic oligonucleotide
gugaccaguguuuagacac

SEQ ID NO: 2507582 - RNA, 19 nt, Artificial Sequence
  Description of Artificial Sequence: Synthetic oligonucleotide
aaugggacccagcauaaaa

SEQ ID NO: 2507583 - RNA, 19 nt, Artificial Sequence
  Description of Artificial Sequence: Synthetic oligonucleotide
gagaaaacgcgcgacgucg

SEQ ID NO: 2507584 - RNA, 19 nt, Artificial Sequence
  Description of Artificial Sequence: Synthetic oligonucleotide
ucaccuguuaaaaccaacu

SEQ ID NO: 2507585 - RNA, 19 nt, Artificial Sequence
  Description of Artificial Sequence: Synthetic oligonucleotide
acugaaagcacauuauuuu

SEQ ID NO: 2507586 - RNA, 19 nt, Artificial Sequence
  Description of Artificial Sequence: Synthetic oligonucleotide
uccauuagucuuuacugug

SEQ ID NO: 2507587 - RNA, 19 nt, Artificial Sequence
  Description of Artificial Sequence: Synthetic oligonucleotide
gaauucuuggaacaggaaa

SEQ ID NO: 2507588 - RNA, 19 nt, Artificial Sequence
  Description of Artificial Sequence: Synthetic oligonucleotide
ucuccaacaaugccacagg

SEQ ID NO: 2507589 - RNA, 19 nt, Artificial Sequence
  Description of Artificial Sequence: Synthetic oligonucleotide
gauucugacaccgcgcggg

SEQ ID NO: 2507590 - RNA, 19 nt, Artificial Sequence
  Description of Artificial Sequence: Synthetic oligonucleotide
caaaggaauaaugggaccc

SEQ ID NO: 2507591 - RNA, 19 nt, Artificial Sequence
  Description of Artificial Sequence: Synthetic oligonucleotide
guagcuauaucucauuaga

SEQ ID NO: 2507592 - RNA, 19 nt, Artificial Sequence
  Description of Artificial Sequence: Synthetic oligonucleotide
uccagguacaaaugcauca

SEQ ID NO: 2507593 - RNA, 19 nt, Artificial Sequence
  Description of Artificial Sequence: Synthetic oligonucleotide
gagacugccacuccacggg

SEQ ID NO: 2507594 - RNA, 19 nt, Artificial Sequence
  Description of Artificial Sequence: Synthetic oligonucleotide
aaucugagguagcuauauc

SEQ ID NO: 2507595 - RNA, 19 nt, Artificial Sequence
  Description of Artificial Sequence: Synthetic oligonucleotide
ugaaagcacauuauuuuau

SEQ ID NO: 2507596 - RNA, 19 nt, Artificial Sequence
  Description of Artificial Sequence: Synthetic oligonucleotide
ucaaaggaauaaugggacc

SEQ ID NO: 2507597 - RNA, 19 nt, Artificial Sequence
  Description of Artificial Sequence: Synthetic oligonucleotide
aaugcaucaccuguuaaaa

SEQ ID NO: 2507598 - RNA, 19 nt, Artificial Sequence
  Description of Artificial Sequence: Synthetic oligonucleotide
cuccuagugagugacaagg

SEQ ID NO: 2507599 - RNA, 19 nt, Artificial Sequence
  Description of Artificial Sequence: Synthetic oligonucleotide
aaaacggcugcugauccag

SEQ ID NO: 2507600 - RNA, 19 nt, Artificial Sequence
  Description of Artificial Sequence: Synthetic oligonucleotide
ugauccagcgauaccacga

SEQ ID NO: 2507601 - RNA, 19 nt, Artificial Sequence
  Description of Artificial Sequence: Synthetic oligonucleotide
cacgaagcuacaaaacggc

SEQ ID NO: 2507602 - RNA, 19 nt, Artificial Sequence
  Description of Artificial Sequence: Synthetic oligonucleotide
ucugagguagcuauaucuc

SEQ ID NO: 2507603 - RNA, 19 nt, Artificial Sequence
  Description of Artificial Sequence: Synthetic oligonucleotide
uguuuuguaucuguccacc

SEQ ID NO: 2507604 - RNA, 19 nt, Artificial Sequence
  Description of Artificial Sequence: Synthetic oligonucleotide
guaucuguccaccagugac

SEQ ID NO: 2507605 - RNA, 19 nt, Artificial Sequence
  Description of Artificial Sequence: Synthetic oligonucleotide
uuaacaccaacggggaucc

SEQ ID NO: 2507606 - RNA, 19 nt, Artificial Sequence
  Description of Artificial Sequence: Synthetic oligonucleotide
uccaaucugagguagcuau

SEQ ID NO: 2507607 - RNA, 19 nt, Artificial Sequence
  Description of Artificial Sequence: Synthetic oligonucleotide
aacggcugcugauccagcg

SEQ ID NO: 2507608 - RNA, 19 nt, Artificial Sequence
  Description of Artificial Sequence: Synthetic oligonucleotide
aaacgcgcgacgucgcggg

SEQ ID NO: 2507609 - RNA, 19 nt, Artificial Sequence
  Description of Artificial Sequence: Synthetic oligonucleotide
uaacuaaggcacugaaagc

SEQ ID NO: 2507610 - RNA, 19 nt, Artificial Sequence
  Description of Artificial Sequence: Synthetic oligonucleotide
uauuuaagaacacguuaua

SEQ ID NO: 2507611 - RNA, 19 nt, Artificial Sequence
  Description of Artificial Sequence: Synthetic oligonucleotide
augaugacacuccuuucuc

SEQ ID NO: 2507612 - RNA, 19 nt, Artificial Sequence
  Description of Artificial Sequence: Synthetic oligonucleotide
aaagggacccguaacuaag

SEQ ID NO: 2507613 - RNA, 19 nt, Artificial Sequence
  Description of Artificial Sequence: Synthetic oligonucleotide
uaccacgacagguugauaa

SEQ ID NO: 2507614 - RNA, 19 nt, Artificial Sequence
  Description of Artificial Sequence: Synthetic oligonucleotide
uggauuucaggcaaauuuu

SEQ ID NO: 2507615 - RNA, 19 nt, Artificial Sequence
  Description of Artificial Sequence: Synthetic oligonucleotide
acacuuuugagacuggauu

SEQ ID NO: 2507616 - RNA, 19 nt, Artificial Sequence
  Description of Artificial Sequence: Synthetic oligonucleotide
uaagaacacguuauagaau

SEQ ID NO: 2507617 - RNA, 19 nt, Artificial Sequence
  Description of Artificial Sequence: Synthetic oligonucleotide
uagcuauaucucauuagac

SEQ ID NO: 2507618 - RNA, 19 nt, Artificial Sequence
  Description of Artificial Sequence: Synthetic oligonucleotide
caugauucugacaccgcgc

SEQ ID NO: 2507619 - RNA, 19 nt, Artificial Sequence
  Description of Artificial Sequence: Synthetic oligonucleotide
uuguaucuguccaccagug

SEQ ID NO: 2507620 - RNA, 19 nt, Artificial Sequence
  Description of Artificial Sequence: Synthetic oligonucleotide
ccuaugaauaaagauaaag

SEQ ID NO: 2507621 - RNA, 19 nt, Artificial Sequence
  Description of Artificial Sequence: Synthetic oligonucleotide
ccaacaaugccacaggaag

SEQ ID NO: 2507622 - RNA, 19 nt, Artificial Sequence
  Description of Artificial Sequence: Synthetic oligonucleotide
gaagcgugagccacgaagc

SEQ ID NO: 2507623 - RNA, 19 nt, Artificial Sequence
  Description of Artificial Sequence: Synthetic oligonucleotide
caaccugcgagcagaaccc

SEQ ID NO: 2507624 - RNA, 19 nt, Artificial Sequence
  Description of Artificial Sequence: Synthetic oligonucleotide
ugaugacacuccuuucucc

SEQ ID NO: 2507625 - RNA, 19 nt, Artificial Sequence
  Description of Artificial Sequence: Synthetic oligonucleotide
augcaucaccuguuaaaac

SEQ ID NO: 2507626 - RNA, 19 nt, Artificial Sequence
  Description of Artificial Sequence: Synthetic oligonucleotide
cuagugagugacaaggaga

SEQ ID NO: 2507627 - RNA, 19 nt, Artificial Sequence
  Description of Artificial Sequence: Synthetic oligonucleotide
ugagccacgaagcuacaaa

SEQ ID NO: 2507628 - RNA, 19 nt, Artificial Sequence
  Description of Artificial Sequence: Synthetic oligonucleotide
ugagguagcuauaucucau

SEQ ID NO: 2507629 - RNA, 19 nt, Artificial Sequence
  Description of Artificial Sequence: Synthetic oligonucleotide
gucuacccuaguccgaugg

SEQ ID NO: 2507630 - RNA, 19 nt, Artificial Sequence
  Description of Artificial Sequence: Synthetic oligonucleotide
ucuccagguacaaaugcau

SEQ ID NO: 2507631 - RNA, 19 nt, Artificial Sequence
  Description of Artificial Sequence: Synthetic oligonucleotide
gccacgaagcuacaaaacg

SEQ ID NO: 2507632 - RNA, 19 nt, Artificial Sequence
  Description of Artificial Sequence: Synthetic oligonucleotide
gaugaugacacuccuuucu

SEQ ID NO: 2507633 - RNA, 19 nt, Artificial Sequence
  Description of Artificial Sequence: Synthetic oligonucleotide
ucaugaugaugacacuccu

SEQ ID NO: 2507634 - RNA, 19 nt, Artificial Sequence
  Description of Artificial Sequence: Synthetic oligonucleotide
agggacccguaacuaaggc

SEQ ID NO: 2507635 - RNA, 19 nt, Artificial Sequence
  Description of Artificial Sequence: Synthetic oligonucleotide
uaaagccccuuccaugaca

SEQ ID NO: 2507636 - RNA, 19 nt, Artificial Sequence
  Description of Artificial Sequence: Synthetic oligonucleotide
accuguuaaaaccaacuuu

SEQ ID NO: 2507637 - RNA, 19 nt, Artificial Sequence
  Description of Artificial Sequence: Synthetic oligonucleotide
aguguuuagacaccauuuu

SEQ ID NO: 2507638 - RNA, 19 nt, Artificial Sequence
  Description of Artificial Sequence: Synthetic oligonucleotide
acguuauagaauucuugga

SEQ ID NO: 2507639 - RNA, 19 nt, Artificial Sequence
  Description of Artificial Sequence: Synthetic oligonucleotide
aaaacgcgcgacgucgcgg

SEQ ID NO: 2507640 - RNA, 19 nt, Artificial Sequence
  Description of Artificial Sequence: Synthetic oligonucleotide
cauuagucuuuacugugac

SEQ ID NO: 2507641 - RNA, 19 nt, Artificial Sequence
  Description of Artificial Sequence: Synthetic oligonucleotide
gguagcuauaucucauuag

SEQ ID NO: 2507642 - RNA, 19 nt, Artificial Sequence
  Description of Artificial Sequence: Synthetic oligonucleotide
gcuauaucucauuagacaa

SEQ ID NO: 2507643 - RNA, 19 nt, Artificial Sequence
  Description of Artificial Sequence: Synthetic oligonucleotide
ggaauaaugggacccagca

SEQ ID NO: 2507644 - RNA, 19 nt, Artificial Sequence
  Description of Artificial Sequence: Synthetic oligonucleotide
acaccaugauucugacacc

SEQ ID NO: 2507645 - RNA, 19 nt, Artificial Sequence
  Description of Artificial Sequence: Synthetic oligonucleotide
accaacggggauccccucc

SEQ ID NO: 2507646 - RNA, 19 nt, Artificial Sequence
  Description of Artificial Sequence: Synthetic oligonucleotide
aaggaauaaugggacccag

SEQ ID NO: 2507647 - RNA, 19 nt, Artificial Sequence
  Description of Artificial Sequence: Synthetic oligonucleotide
cauggucuccaacaaugcc

SEQ ID NO: 2507648 - RNA, 19 nt, Artificial Sequence
  Description of Artificial Sequence: Synthetic oligonucleotide
aaguuaacaccaacgggga

SEQ ID NO: 2507649 - RNA, 19 nt, Artificial Sequence
  Description of Artificial Sequence: Synthetic oligonucleotide
ugauucugacaccgcgcgg

SEQ ID NO: 2507650 - RNA, 19 nt, Artificial Sequence
  Description of Artificial Sequence: Synthetic oligonucleotide
auaaagccccuuccaugac

SEQ ID NO: 2507651 - RNA, 19 nt, Artificial Sequence
  Description of Artificial Sequence: Synthetic oligonucleotide
caccaugauucugacaccg

SEQ ID NO: 2507652 - RNA, 19 nt, Artificial Sequence
  Description of Artificial Sequence: Synthetic oligonucleotide
guuaacaccaacggggauc

SEQ ID NO: 2507653 - RNA, 19 nt, Artificial Sequence
  Description of Artificial Sequence: Synthetic oligonucleotide
gagacuggauuucaggcaa

SEQ ID NO: 2507654 - RNA, 19 nt, Artificial Sequence
  Description of Artificial Sequence: Synthetic oligonucleotide
ugugccagagcaucucugu

SEQ ID NO: 2507655 - RNA, 19 nt, Artificial Sequence
  Description of Artificial Sequence: Synthetic oligonucleotide
auucugacaccgcgcgggc

SEQ ID NO: 2507656 - RNA, 19 nt, Artificial Sequence
  Description of Artificial Sequence: Synthetic oligonucleotide
cucauuagacaauuccaca

SEQ ID NO: 2507657 - RNA, 19 nt, Artificial Sequence
  Description of Artificial Sequence: Synthetic oligonucleotide
gagagacuuuauuuaagaa

SEQ ID NO: 2507658 - RNA, 19 nt, Artificial Sequence
  Description of Artificial Sequence: Synthetic oligonucleotide
aggaauaaugggacccagc

SEQ ID NO: 2507659 - RNA, 19 nt, Artificial Sequence
  Description of Artificial Sequence: Synthetic oligonucleotide
guucaugaugaugacacuc

SEQ ID NO: 2507660 - RNA, 19 nt, Artificial Sequence
  Description of Artificial Sequence: Synthetic oligonucleotide
ugaccaguguuuagacacc

SEQ ID NO: 2507661 - RNA, 19 nt, Artificial Sequence
  Description of Artificial Sequence: Synthetic oligonucleotide
uuuccuccuagugagugac

SEQ ID NO: 2507662 - RNA, 19 nt, Artificial Sequence
  Description of Artificial Sequence: Synthetic oligonucleotide
uuuucuccaaucugaggua

SEQ ID NO: 2507663 - RNA, 19 nt, Artificial Sequence
  Description of Artificial Sequence: Synthetic oligonucleotide
auuagucuuuacugugacu

SEQ ID NO: 2507664 - RNA, 19 nt, Artificial Sequence
  Description of Artificial Sequence: Synthetic oligonucleotide
gguacaaaugcaucaccug

SEQ ID NO: 2507665 - RNA, 19 nt, Artificial Sequence
  Description of Artificial Sequence: Synthetic oligonucleotide
uguugggcaucauccuucc

SEQ ID NO: 2507666 - RNA, 19 nt, Artificial Sequence
  Description of Artificial Sequence: Synthetic oligonucleotide
uacaaaacggcugcugauc

SEQ ID NO: 2507667 - RNA, 19 nt, Artificial Sequence
  Description of Artificial Sequence: Synthetic oligonucleotide
aagggacccguaacuaagg

SEQ ID NO: 2507668 - RNA, 19 nt, Artificial Sequence
  Description of Artificial Sequence: Synthetic oligonucleotide
cagagcaucucuguugggc

SEQ ID NO: 2507669 - RNA, 19 nt, Artificial Sequence
  Description of Artificial Sequence: Synthetic oligonucleotide
agacaauuccacaggaaca

SEQ ID NO: 2507670 - RNA, 19 nt, Artificial Sequence
  Description of Artificial Sequence: Synthetic oligonucleotide
ugggcaucauccuuccacu

SEQ ID NO: 2507671 - RNA, 19 nt, Artificial Sequence
  Description of Artificial Sequence: Synthetic oligonucleotide
ggagagacuuuauuuaaga

SEQ ID NO: 2507672 - RNA, 19 nt, Artificial Sequence
  Description of Artificial Sequence: Synthetic oligonucleotide
acacguuauagaauucuug

SEQ ID NO: 2507673 - RNA, 19 nt, Artificial Sequence
  Description of Artificial Sequence: Synthetic oligonucleotide
uacccuaguccgaugguuc

SEQ ID NO: 2507674 - RNA, 19 nt, Artificial Sequence
  Description of Artificial Sequence: Synthetic oligonucleotide
cagguacaaaugcaucacc

SEQ ID NO: 2507675 - RNA, 19 nt, Artificial Sequence
  Description of Artificial Sequence: Synthetic oligonucleotide
gauccagcgauaccacgac

SEQ ID NO: 2507676 - RNA, 19 nt, Artificial Sequence
  Description of Artificial Sequence: Synthetic oligonucleotide
acaggaacauccagucuac

SEQ ID NO: 2507677 - RNA, 19 nt, Artificial Sequence
  Description of Artificial Sequence: Synthetic oligonucleotide
gaaagggacccguaacuaa

SEQ ID NO: 2507678 - RNA, 19 nt, Artificial Sequence
  Description of Artificial Sequence: Synthetic oligonucleotide
ucuguugggcaucauccuu

SEQ ID NO: 2507679 - RNA, 19 nt, Artificial Sequence
  Description of Artificial Sequence: Synthetic oligonucleotide
acgacagguugauaaacau

SEQ ID NO: 2507680 - RNA, 19 nt, Artificial Sequence
  Description of Artificial Sequence: Synthetic oligonucleotide
acaaaugcaucaccuguua

SEQ ID NO: 2507681 - RNA, 19 nt, Artificial Sequence
  Description of Artificial Sequence: Synthetic oligonucleotide
agugaccaguguuuagaca

SEQ ID NO: 2507682 - RNA, 19 nt, Artificial Sequence
  Description of Artificial Sequence: Synthetic oligonucleotide
cugauccagcgauaccacg

SEQ ID NO: 2507683 - RNA, 19 nt, Artificial Sequence
  Description of Artificial Sequence: Synthetic oligonucleotide
ggggacacuggacagagac

SEQ ID NO: 2507684 - RNA, 19 nt, Artificial Sequence
  Description of Artificial Sequence: Synthetic oligonucleotide
ugcauggcccagccaaacc

SEQ ID NO: 2507685 - RNA, 19 nt, Artificial Sequence
  Description of Artificial Sequence: Synthetic oligonucleotide
uacugugacugugccagag

SEQ ID NO: 2507686 - RNA, 19 nt, Artificial Sequence
  Description of Artificial Sequence: Synthetic oligonucleotide
aagcgugagccacgaagcu

SEQ ID NO: 2507687 - RNA, 19 nt, Artificial Sequence
  Description of Artificial Sequence: Synthetic oligonucleotide
aguauaaaauaaagccccu

SEQ ID NO: 2507688 - RNA, 19 nt, Artificial Sequence
  Description of Artificial Sequence: Synthetic oligonucleotide
aacacuuuugagacuggau

SEQ ID NO: 2507689 - RNA, 19 nt, Artificial Sequence
  Description of Artificial Sequence: Synthetic oligonucleotide
uucuccaaucugagguagc

SEQ ID NO: 2507690 - RNA, 19 nt, Artificial Sequence
  Description of Artificial Sequence: Synthetic oligonucleotide
agaaaacgcgcgacgucgc

SEQ ID NO: 2507691 - RNA, 19 nt, Artificial Sequence
  Description of Artificial Sequence: Synthetic oligonucleotide
cuguugggcaucauccuuc

SEQ ID NO: 2507692 - RNA, 19 nt, Artificial Sequence
  Description of Artificial Sequence: Synthetic oligonucleotide
ucaggcaaauuuucuccaa

SEQ ID NO: 2507693 - RNA, 19 nt, Artificial Sequence
  Description of Artificial Sequence: Synthetic oligonucleotide
uacaccaaacauggucucc

SEQ ID NO: 2507694 - RNA, 19 nt, Artificial Sequence
  Description of Artificial Sequence: Synthetic oligonucleotide
uuacaccaaacauggucuc

SEQ ID NO: 2507695 - RNA, 19 nt, Artificial Sequence
  Description of Artificial Sequence: Synthetic oligonucleotide
cacgccggagaaaacgcgc

SEQ ID NO: 2507696 - RNA, 19 nt, Artificial Sequence
  Description of Artificial Sequence: Synthetic oligonucleotide
ggacccguaacuaaggcac

SEQ ID NO: 2507697 - RNA, 19 nt, Artificial Sequence
  Description of Artificial Sequence: Synthetic oligonucleotide
agccacgaagcuacaaaac

SEQ ID NO: 2507698 - RNA, 19 nt, Artificial Sequence
  Description of Artificial Sequence: Synthetic oligonucleotide
aaccaacuuuuacaccaaa

SEQ ID NO: 2507699 - RNA, 19 nt, Artificial Sequence
  Description of Artificial Sequence: Synthetic oligonucleotide
cauccagucuacccuaguc

SEQ ID NO: 2507700 - RNA, 19 nt, Artificial Sequence
  Description of Artificial Sequence: Synthetic oligonucleotide
aacacguuauagaauucuu

SEQ ID NO: 2507701 - RNA, 19 nt, Artificial Sequence
  Description of Artificial Sequence: Synthetic oligonucleotide
agacugccacuccacgggg

SEQ ID NO: 2507702 - RNA, 19 nt, Artificial Sequence
  Description of Artificial Sequence: Synthetic oligonucleotide
cugagguagcuauaucuca

SEQ ID NO: 2507703 - RNA, 19 nt, Artificial Sequence
  Description of Artificial Sequence: Synthetic oligonucleotide
ucuacccuaguccgauggu

SEQ ID NO: 2507704 - RNA, 19 nt, Artificial Sequence
  Description of Artificial Sequence: Synthetic oligonucleotide
gagccacgaagcuacaaaa

SEQ ID NO: 2507705 - RNA, 19 nt, Artificial Sequence
  Description of Artificial Sequence: Synthetic oligonucleotide
agaacacguuauagaauuc

SEQ ID NO: 2507706 - RNA, 19 nt, Artificial Sequence
  Description of Artificial Sequence: Synthetic oligonucleotide
aaacggcugcugauccagc

SEQ ID NO: 2507707 - RNA, 19 nt, Artificial Sequence
  Description of Artificial Sequence: Synthetic oligonucleotide
uccuaugaauaaagauaaa

SEQ ID NO: 2507708 - RNA, 19 nt, Artificial Sequence
  Description of Artificial Sequence: Synthetic oligonucleotide
cagugaccaguguuuagac

SEQ ID NO: 2507709 - RNA, 19 nt, Artificial Sequence
  Description of Artificial Sequence: Synthetic oligonucleotide
ccaugauucugacaccgcg

SEQ ID NO: 2507710 - RNA, 19 nt, Artificial Sequence
  Description of Artificial Sequence: Synthetic oligonucleotide
agguagcuauaucucauua

SEQ ID NO: 2507711 - RNA, 19 nt, Artificial Sequence
  Description of Artificial Sequence: Synthetic oligonucleotide
gaacacguuauagaauucu

SEQ ID NO: 2507712 - RNA, 19 nt, Artificial Sequence
  Description of Artificial Sequence: Synthetic oligonucleotide
accagugaccaguguuuag

SEQ ID NO: 2507713 - RNA, 19 nt, Artificial Sequence
  Description of Artificial Sequence: Synthetic oligonucleotide
cuccagguacaaaugcauc

SEQ ID NO: 2507714 - RNA, 19 nt, Artificial Sequence
  Description of Artificial Sequence: Synthetic oligonucleotide
cacgacagguugauaaaca

SEQ ID NO: 2507715 - RNA, 19 nt, Artificial Sequence
  Description of Artificial Sequence: Synthetic oligonucleotide
ugugacugugccagagcau

SEQ ID NO: 2507716 - RNA, 19 nt, Artificial Sequence
  Description of Artificial Sequence: Synthetic oligonucleotide
cuuuauuuaagaacacguu

SEQ ID NO: 2507717 - RNA, 19 nt, Artificial Sequence
  Description of Artificial Sequence: Synthetic oligonucleotide
ugcaaacaggaagaguaua

SEQ ID NO: 2507718 - RNA, 19 nt, Artificial Sequence
  Description of Artificial Sequence: Synthetic oligonucleotide
ugacugugccagagcaucu

SEQ ID NO: 2507719 - RNA, 19 nt, Artificial Sequence
  Description of Artificial Sequence: Synthetic oligonucleotide
acugugccagagcaucucu

SEQ ID NO: 2507720 - RNA, 19 nt, Artificial Sequence
  Description of Artificial Sequence: Synthetic oligonucleotide
ccuagugagugacaaggag

SEQ ID NO: 2507721 - RNA, 19 nt, Artificial Sequence
  Description of Artificial Sequence: Synthetic oligonucleotide
caacuuuuacaccaaacau

SEQ ID NO: 2507722 - RNA, 19 nt, Artificial Sequence
  Description of Artificial Sequence: Synthetic oligonucleotide
aaccugcgagcagaacccg

SEQ ID NO: 2507723 - RNA, 19 nt, Artificial Sequence
  Description of Artificial Sequence: Synthetic oligonucleotide
gucgcggggacacuggaca

SEQ ID NO: 2507724 - RNA, 19 nt, Artificial Sequence
  Description of Artificial Sequence: Synthetic oligonucleotide
gauuucaggcaaauuuucu

SEQ ID NO: 2507725 - RNA, 19 nt, Artificial Sequence
  Description of Artificial Sequence: Synthetic oligonucleotide
cacaggaagcgugagccac

SEQ ID NO: 2507726 - RNA, 19 nt, Artificial Sequence
  Description of Artificial Sequence: Synthetic oligonucleotide
cagguugauaaacaucaaa

SEQ ID NO: 2507727 - RNA, 19 nt, Artificial Sequence
  Description of Artificial Sequence: Synthetic oligonucleotide
uuccugcaaacaggaagag

SEQ ID NO: 2507728 - RNA, 19 nt, Artificial Sequence
  Description of Artificial Sequence: Synthetic oligonucleotide
aaaccaacuuuuacaccaa

SEQ ID NO: 2507729 - RNA, 19 nt, Artificial Sequence
  Description of Artificial Sequence: Synthetic oligonucleotide
ugacaaggagagacuuuau

SEQ ID NO: 2507730 - RNA, 19 nt, Artificial Sequence
  Description of Artificial Sequence: Synthetic oligonucleotide
acggggauccccuccauua

SEQ ID NO: 2507731 - RNA, 19 nt, Artificial Sequence
  Description of Artificial Sequence: Synthetic oligonucleotide
ggaacauccagucuacccu

SEQ ID NO: 2507732 - RNA, 19 nt, Artificial Sequence
  Description of Artificial Sequence: Synthetic oligonucleotide
accacgacagguugauaaa

SEQ ID NO: 2507733 - RNA, 19 nt, Artificial Sequence
  Description of Artificial Sequence: Synthetic oligonucleotide
agccccuuccaugacacca

SEQ ID NO: 2507734 - RNA, 19 nt, Artificial Sequence
  Description of Artificial Sequence: Synthetic oligonucleotide
auccuuccacuuccuauga

SEQ ID NO: 2507735 - RNA, 19 nt, Artificial Sequence
  Description of Artificial Sequence: Synthetic oligonucleotide
aguuaacaccaacggggau

SEQ ID NO: 2507736 - RNA, 19 nt, Artificial Sequence
  Description of Artificial Sequence: Synthetic oligonucleotide
agaaagggacccguaacua

SEQ ID NO: 2507737 - RNA, 19 nt, Artificial Sequence
  Description of Artificial Sequence: Synthetic oligonucleotide
cccaggaacacuuuugaga

SEQ ID NO: 2507738 - RNA, 19 nt, Artificial Sequence
  Description of Artificial Sequence: Synthetic oligonucleotide
acccuaguccgaugguuca

SEQ ID NO: 2507739 - RNA, 19 nt, Artificial Sequence
  Description of Artificial Sequence: Synthetic oligonucleotide
auaaugggacccagcauaa

SEQ ID NO: 2507740 - RNA, 19 nt, Artificial Sequence
  Description of Artificial Sequence: Synthetic oligonucleotide
cugugccagagcaucucug

SEQ ID NO: 2507741 - RNA, 19 nt, Artificial Sequence
  Description of Artificial Sequence: Synthetic oligonucleotide
gaauaaugggacccagcau

SEQ ID NO: 2507742 - RNA, 19 nt, Artificial Sequence
  Description of Artificial Sequence: Synthetic oligonucleotide
gaaaagaaagggacccgua

SEQ ID NO: 2507743 - RNA, 19 nt, Artificial Sequence
  Description of Artificial Sequence: Synthetic oligonucleotide
guaaacaaguuaacaccaa

SEQ ID NO: 2507744 - RNA, 19 nt, Artificial Sequence
  Description of Artificial Sequence: Synthetic oligonucleotide
ggauuucaggcaaauuuuc

SEQ ID NO: 2507745 - RNA, 19 nt, Artificial Sequence
  Description of Artificial Sequence: Synthetic oligonucleotide
aacgcgcgacgucgcgggg

SEQ ID NO: 2507746 - RNA, 19 nt, Artificial Sequence
  Description of Artificial Sequence: Synthetic oligonucleotide
cuaguccgaugguucauga

SEQ ID NO: 2507747 - RNA, 19 nt, Artificial Sequence
  Description of Artificial Sequence: Synthetic oligonucleotide
acgaagcuacaaaacggcu

SEQ ID NO: 2507748 - RNA, 19 nt, Artificial Sequence
  Description of Artificial Sequence: Synthetic oligonucleotide
cuguuaaaaccaacuuuua

SEQ ID NO: 2507749 - RNA, 19 nt, Artificial Sequence
  Description of Artificial Sequence: Synthetic oligonucleotide
aacggggauccccuccauu

SEQ ID NO: 2507750 - RNA, 19 nt, Artificial Sequence
  Description of Artificial Sequence: Synthetic oligonucleotide
acgccggagaaaacgcgcg

SEQ ID NO: 2507751 - RNA, 19 nt, Artificial Sequence
  Description of Artificial Sequence: Synthetic oligonucleotide
cuccaacaaugccacagga

SEQ ID NO: 2507752 - RNA, 19 nt, Artificial Sequence
  Description of Artificial Sequence: Synthetic oligonucleotide
accugcgagcagaacccgc

SEQ ID NO: 2507753 - RNA, 19 nt, Artificial Sequence
  Description of Artificial Sequence: Synthetic oligonucleotide
agcgauaccacgacagguu

SEQ ID NO: 2507754 - RNA, 19 nt, Artificial Sequence
  Description of Artificial Sequence: Synthetic oligonucleotide
gggcacgccggagaaaacg

SEQ ID NO: 2507755 - RNA, 19 nt, Artificial Sequence
  Description of Artificial Sequence: Synthetic oligonucleotide
uaguccgaugguucaugau

SEQ ID NO: 2507756 - RNA, 19 nt, Artificial Sequence
  Description of Artificial Sequence: Synthetic oligonucleotide
aagcuacaaaacggcugcu

SEQ ID NO: 2507757 - RNA, 19 nt, Artificial Sequence
  Description of Artificial Sequence: Synthetic oligonucleotide
cagcuugcauggcccagcc

SEQ ID NO: 2507758 - RNA, 19 nt, Artificial Sequence
  Description of Artificial Sequence: Synthetic oligonucleotide
cuauaucucauuagacaau

SEQ ID NO: 2507759 - RNA, 19 nt, Artificial Sequence
  Description of Artificial Sequence: Synthetic oligonucleotide
uuacugugacugugccaga

SEQ ID NO: 2507760 - RNA, 19 nt, Artificial Sequence
  Description of Artificial Sequence: Synthetic oligonucleotide
gcgauaccacgacagguug

SEQ ID NO: 2507761 - RNA, 19 nt, Artificial Sequence
  Description of Artificial Sequence: Synthetic oligonucleotide
gacgucgcggggacacugg

SEQ ID NO: 2507762 - RNA, 19 nt, Artificial Sequence
  Description of Artificial Sequence: Synthetic oligonucleotide
gauaccacgacagguugau

SEQ ID NO: 2507763 - RNA, 19 nt, Artificial Sequence
  Description of Artificial Sequence: Synthetic oligonucleotide
ucuguccaccagugaccag

SEQ ID NO: 2507764 - RNA, 19 nt, Artificial Sequence
  Description of Artificial Sequence: Synthetic oligonucleotide
cacuuuugagacuggauuu

SEQ ID NO: 2507765 - RNA, 19 nt, Artificial Sequence
  Description of Artificial Sequence: Synthetic oligonucleotide
caaaugcaucaccuguuaa

SEQ ID NO: 2507766 - RNA, 19 nt, Artificial Sequence
  Description of Artificial Sequence: Synthetic oligonucleotide
ccugcgagcagaacccgcc

SEQ ID NO: 2507767 - RNA, 19 nt, Artificial Sequence
  Description of Artificial Sequence: Synthetic oligonucleotide
auccagcgauaccacgaca

SEQ ID NO: 2507768 - RNA, 19 nt, Artificial Sequence
  Description of Artificial Sequence: Synthetic oligonucleotide
agucuacccuaguccgaug

SEQ ID NO: 2507769 - RNA, 19 nt, Artificial Sequence
  Description of Artificial Sequence: Synthetic oligonucleotide
caguguuuagacaccauuu

SEQ ID NO: 2507770 - RNA, 19 nt, Artificial Sequence
  Description of Artificial Sequence: Synthetic oligonucleotide
acccguaacuaaggcacug

SEQ ID NO: 2507771 - RNA, 19 nt, Artificial Sequence
  Description of Artificial Sequence: Synthetic oligonucleotide
agccaaacccaggaacacu

SEQ ID NO: 2507772 - RNA, 19 nt, Artificial Sequence
  Description of Artificial Sequence: Synthetic oligonucleotide
acaccaacggggauccccu

SEQ ID NO: 2507773 - RNA, 19 nt, Artificial Sequence
  Description of Artificial Sequence: Synthetic oligonucleotide
ggagaaaacgcgcgacguc

SEQ ID NO: 2507774 - RNA, 19 nt, Artificial Sequence
  Description of Artificial Sequence: Synthetic oligonucleotide
gcaucaccuguuaaaacca

SEQ ID NO: 2507775 - RNA, 19 nt, Artificial Sequence
  Description of Artificial Sequence: Synthetic oligonucleotide
uccgaugguucaugaugau

SEQ ID NO: 2507776 - RNA, 19 nt, Artificial Sequence
  Description of Artificial Sequence: Synthetic oligonucleotide
caucaccuguuaaaaccaa

SEQ ID NO: 2507777 - RNA, 19 nt, Artificial Sequence
  Description of Artificial Sequence: Synthetic oligonucleotide
gggacccguaacuaaggca

SEQ ID NO: 2507778 - RNA, 19 nt, Artificial Sequence
  Description of Artificial Sequence: Synthetic oligonucleotide
ccagguacaaaugcaucac

SEQ ID NO: 2507779 - RNA, 19 nt, Artificial Sequence
  Description of Artificial Sequence: Synthetic oligonucleotide
cagccaaacccaggaacac

SEQ ID NO: 2507780 - RNA, 19 nt, Artificial Sequence
  Description of Artificial Sequence: Synthetic oligonucleotide
ccggagaaaacgcgcgacg

SEQ ID NO: 2507781 - RNA, 19 nt, Artificial Sequence
  Description of Artificial Sequence: Synthetic oligonucleotide
gauccccuccauuagucuu

SEQ ID NO: 2507782 - RNA, 19 nt, Artificial Sequence
  Description of Artificial Sequence: Synthetic oligonucleotide
ccauuagucuuuacuguga

SEQ ID NO: 2507783 - RNA, 19 nt, Artificial Sequence
  Description of Artificial Sequence: Synthetic oligonucleotide
uucugacaccgcgcgggcc

SEQ ID NO: 2507784 - RNA, 19 nt, Artificial Sequence
  Description of Artificial Sequence: Synthetic oligonucleotide
ccagcgauaccacgacagg

SEQ ID NO: 2507785 - RNA, 19 nt, Artificial Sequence
  Description of Artificial Sequence: Synthetic oligonucleotide
cacuggacagagacugcca

SEQ ID NO: 2507786 - RNA, 19 nt, Artificial Sequence
  Description of Artificial Sequence: Synthetic oligonucleotide
uaaugggacccagcauaaa

SEQ ID NO: 2507787 - RNA, 19 nt, Artificial Sequence
  Description of Artificial Sequence: Synthetic oligonucleotide
agugacaaggagagacuuu

SEQ ID NO: 2507788 - RNA, 19 nt, Artificial Sequence
  Description of Artificial Sequence: Synthetic oligonucleotide
caggaacauccagucuacc

SEQ ID NO: 2507789 - RNA, 19 nt, Artificial Sequence
  Description of Artificial Sequence: Synthetic oligonucleotide
ggaacacuuuugagacugg

SEQ ID NO: 2507790 - RNA, 19 nt, Artificial Sequence
  Description of Artificial Sequence: Synthetic oligonucleotide
ggcacgccggagaaaacgc

SEQ ID NO: 2507791 - RNA, 19 nt, Artificial Sequence
  Description of Artificial Sequence: Synthetic oligonucleotide
cuacaaaacggcugcugau

SEQ ID NO: 2507792 - RNA, 19 nt, Artificial Sequence
  Description of Artificial Sequence: Synthetic oligonucleotide
gagguagcuauaucucauu

SEQ ID NO: 2507793 - RNA, 19 nt, Artificial Sequence
  Description of Artificial Sequence: Synthetic oligonucleotide
cugggcacgccggagaaaa

SEQ ID NO: 2507794 - RNA, 19 nt, Artificial Sequence
  Description of Artificial Sequence: Synthetic oligonucleotide
cuugcauggcccagccaaa

SEQ ID NO: 2507795 - RNA, 19 nt, Artificial Sequence
  Description of Artificial Sequence: Synthetic oligonucleotide
cuguccaccagugaccagu

SEQ ID NO: 2507796 - RNA, 19 nt, Artificial Sequence
  Description of Artificial Sequence: Synthetic oligonucleotide
caaucugagguagcuauau

SEQ ID NO: 2507797 - RNA, 19 nt, Artificial Sequence
  Description of Artificial Sequence: Synthetic oligonucleotide
agcgugagccacgaagcua

SEQ ID NO: 2507798 - RNA, 19 nt, Artificial Sequence
  Description of Artificial Sequence: Synthetic oligonucleotide
ugggcacgccggagaaaac

SEQ ID NO: 2507799 - RNA, 19 nt, Artificial Sequence
  Description of Artificial Sequence: Synthetic oligonucleotide
gagugacaaggagagacuu

SEQ ID NO: 2507800 - RNA, 19 nt, Artificial Sequence
  Description of Artificial Sequence: Synthetic oligonucleotide
acgucgcggggacacugga

SEQ ID NO: 2507801 - RNA, 19 nt, Artificial Sequence
  Description of Artificial Sequence: Synthetic oligonucleotide
agcuugcauggcccagcca

SEQ ID NO: 2507802 - RNA, 19 nt, Artificial Sequence
  Description of Artificial Sequence: Synthetic oligonucleotide
gcggggacacuggacagag

SEQ ID NO: 2507803 - RNA, 19 nt, Artificial Sequence
  Description of Artificial Sequence: Synthetic oligonucleotide
ccagugaccaguguuuaga

SEQ ID NO: 2507804 - RNA, 19 nt, Artificial Sequence
  Description of Artificial Sequence: Synthetic oligonucleotide
ccacgacagguugauaaac

SEQ ID NO: 2507805 - RNA, 19 nt, Artificial Sequence
  Description of Artificial Sequence: Synthetic oligonucleotide
cuuuuacaccaaacauggu

SEQ ID NO: 2507806 - RNA, 19 nt, Artificial Sequence
  Description of Artificial Sequence: Synthetic oligonucleotide
ccuccuagugagugacaag

SEQ ID NO: 2507807 - RNA, 19 nt, Artificial Sequence
  Description of Artificial Sequence: Synthetic oligonucleotide
caugaugaugacacuccuu

SEQ ID NO: 2507808 - RNA, 19 nt, Artificial Sequence
  Description of Artificial Sequence: Synthetic oligonucleotide
caccuguuaaaaccaacuu

SEQ ID NO: 2507809 - RNA, 19 nt, Artificial Sequence
  Description of Artificial Sequence: Synthetic oligonucleotide
gcacgccggagaaaacgcg

SEQ ID NO: 2507810 - RNA, 19 nt, Artificial Sequence
  Description of Artificial Sequence: Synthetic oligonucleotide
gggauccccuccauuaguc

SEQ ID NO: 2507811 - RNA, 19 nt, Artificial Sequence
  Description of Artificial Sequence: Synthetic oligonucleotide
caggcaaauuuucuccaau

SEQ ID NO: 2507812 - RNA, 19 nt, Artificial Sequence
  Description of Artificial Sequence: Synthetic oligonucleotide
ccgaugguucaugaugaug

SEQ ID NO: 2507813 - RNA, 19 nt, Artificial Sequence
  Description of Artificial Sequence: Synthetic oligonucleotide
cacaaccugcgagcagaac

SEQ ID NO: 2507814 - RNA, 19 nt, Artificial Sequence
  Description of Artificial Sequence: Synthetic oligonucleotide
ccuaguccgaugguucaug

SEQ ID NO: 2507815 - RNA, 19 nt, Artificial Sequence
  Description of Artificial Sequence: Synthetic oligonucleotide
caggaagcgugagccacga

SEQ ID NO: 2507816 - RNA, 19 nt, Artificial Sequence
  Description of Artificial Sequence: Synthetic oligonucleotide
cguaacuaaggcacugaaa

SEQ ID NO: 2507817 - RNA, 19 nt, Artificial Sequence
  Description of Artificial Sequence: Synthetic oligonucleotide
cagcgauaccacgacaggu

SEQ ID NO: 2507818 - RNA, 19 nt, Artificial Sequence
  Description of Artificial Sequence: Synthetic oligonucleotide
uaacaccaacggggauccc

SEQ ID NO: 2507819 - RNA, 19 nt, Artificial Sequence
  Description of Artificial Sequence: Synthetic oligonucleotide
ccagagcaucucuguuggg

SEQ ID NO: 2507820 - RNA, 19 nt, Artificial Sequence
  Description of Artificial Sequence: Synthetic oligonucleotide
gacaccgcgcgggccgcgc

SEQ ID NO: 2507821 - RNA, 19 nt, Artificial Sequence
  Description of Artificial Sequence: Synthetic oligonucleotide
ggcacugaaagcacauuau

SEQ ID NO: 2507822 - RNA, 19 nt, Artificial Sequence
  Description of Artificial Sequence: Synthetic oligonucleotide
ccuuccacuuccuaugaau

SEQ ID NO: 2507823 - RNA, 19 nt, Artificial Sequence
  Description of Artificial Sequence: Synthetic oligonucleotide
caccaacggggauccccuc

SEQ ID NO: 2507824 - RNA, 19 nt, Artificial Sequence
  Description of Artificial Sequence: Synthetic oligonucleotide
ccaugacaccaugauucug

SEQ ID NO: 2507825 - RNA, 19 nt, Artificial Sequence
  Description of Artificial Sequence: Synthetic oligonucleotide
gggucacaaccugcgagca

SEQ ID NO: 2507826 - RNA, 19 nt, Artificial Sequence
  Description of Artificial Sequence: Synthetic oligonucleotide
ggauccccuccauuagucu

SEQ ID NO: 2507827 - RNA, 19 nt, Artificial Sequence
  Description of Artificial Sequence: Synthetic oligonucleotide
aggaagcgugagccacgaa

SEQ ID NO: 2507828 - RNA, 19 nt, Artificial Sequence
  Description of Artificial Sequence: Synthetic oligonucleotide
ccguaacuaaggcacugaa

SEQ ID NO: 2507829 - RNA, 19 nt, Artificial Sequence
  Description of Artificial Sequence: Synthetic oligonucleotide
ccaacggggauccccucca

SEQ ID NO: 2507830 - RNA, 19 nt, Artificial Sequence
  Description of Artificial Sequence: Synthetic oligonucleotide
acgcgcgacgucgcgggga

SEQ ID NO: 2507831 - RNA, 19 nt, Artificial Sequence
  Description of Artificial Sequence: Synthetic oligonucleotide
gcaucucuguugggcauca

SEQ ID NO: 2507832 - RNA, 19 nt, Artificial Sequence
  Description of Artificial Sequence: Synthetic oligonucleotide
auaccacgacagguugaua

SEQ ID NO: 2507833 - RNA, 19 nt, Artificial Sequence
  Description of Artificial Sequence: Synthetic oligonucleotide
acaccgcgcgggccgcgca

SEQ ID NO: 2507834 - RNA, 19 nt, Artificial Sequence
  Description of Artificial Sequence: Synthetic oligonucleotide
ccagucuacccuaguccga

SEQ ID NO: 2507835 - RNA, 19 nt, Artificial Sequence
  Description of Artificial Sequence: Synthetic oligonucleotide
cagucuacccuaguccgau

SEQ ID NO: 2507836 - RNA, 19 nt, Artificial Sequence
  Description of Artificial Sequence: Synthetic oligonucleotide
cuacccuaguccgaugguu

SEQ ID NO: 2507837 - RNA, 19 nt, Artificial Sequence
  Description of Artificial Sequence: Synthetic oligonucleotide
gcgcacccugggcacgccg

SEQ ID NO: 2507838 - RNA, 19 nt, Artificial Sequence
  Description of Artificial Sequence: Synthetic oligonucleotide
gccaaacccaggaacacuu

SEQ ID NO: 2507839 - RNA, 19 nt, Artificial Sequence
  Description of Artificial Sequence: Synthetic oligonucleotide
cggggauccccuccauuag

SEQ ID NO: 2507840 - RNA, 19 nt, Artificial Sequence
  Description of Artificial Sequence: Synthetic oligonucleotide
ccaaucugagguagcuaua

SEQ ID NO: 2507841 - RNA, 19 nt, Artificial Sequence
  Description of Artificial Sequence: Synthetic oligonucleotide
cgauaccacgacagguuga

SEQ ID NO: 2507842 - RNA, 19 nt, Artificial Sequence
  Description of Artificial Sequence: Synthetic oligonucleotide
ccacaggaagcgugagcca

SEQ ID NO: 2507843 - RNA, 19 nt, Artificial Sequence
  Description of Artificial Sequence: Synthetic oligonucleotide
cccguaacuaaggcacuga

SEQ ID NO: 2507844 - RNA, 19 nt, Artificial Sequence
  Description of Artificial Sequence: Synthetic oligonucleotide
gcgcgggccgcgcacccug

SEQ ID NO: 2507845 - RNA, 19 nt, Artificial Sequence
  Description of Artificial Sequence: Synthetic oligonucleotide
cgucgcggggacacuggac

SEQ ID NO: 2507846 - RNA, 19 nt, Artificial Sequence
  Description of Artificial Sequence: Synthetic oligonucleotide
cgcgacgucgcggggacac

SEQ ID NO: 2507847 - RNA, 19 nt, Artificial Sequence
  Description of Artificial Sequence: Synthetic oligonucleotide
gccgcgcacccugggcacg

SEQ ID NO: 2507848 - RNA, 19 nt, Artificial Sequence
  Description of Artificial Sequence: Synthetic oligonucleotide
cgcgcgacgucgcggggac

SEQ ID NO: 2507849 - RNA, 19 nt, Artificial Sequence
  Description of Artificial Sequence: Synthetic oligonucleotide
cgacgucgcggggacacug

SEQ ID NO: 2507850 - RNA, 19 nt, Artificial Sequence
  Description of Artificial Sequence: Synthetic oligonucleotide
ccccuccauuagucuuuac

SEQ ID NO: 2507851 - RNA, 19 nt, Artificial Sequence
  Description of Artificial Sequence: Synthetic oligonucleotide
cggagaaaacgcgcgacgu

SEQ ID NO: 2507852 - RNA, 19 nt, Artificial Sequence
  Description of Artificial Sequence: Synthetic oligonucleotide
cccugggcacgccggagaa

SEQ ID NO: 2507853 - RNA, 19 nt, Artificial Sequence
  Description of Artificial Sequence: Synthetic oligonucleotide
caacggggauccccuccau

SEQ ID NO: 2507854 - RNA, 19 nt, Artificial Sequence
  Description of Artificial Sequence: Synthetic oligonucleotide
ccgcgcacccugggcacgc

SEQ ID NO: 2507855 - RNA, 19 nt, Artificial Sequence
  Description of Artificial Sequence: Synthetic oligonucleotide
ccaaacccaggaacacuuu

SEQ ID NO: 2507856 - RNA, 19 nt, Artificial Sequence
  Description of Artificial Sequence: Synthetic oligonucleotide
cgccggagaaaacgcgcga

SEQ ID NO: 2507857 - RNA, 19 nt, Artificial Sequence
  Description of Artificial Sequence: Synthetic oligonucleotide
cggcugcugauccagcgau

SEQ ID NO: 2507858 - RNA, 19 nt, Artificial Sequence
  Description of Artificial Sequence: Synthetic oligonucleotide
caucucuguugggcaucau

SEQ ID NO: 2507859 - RNA, 19 nt, Artificial Sequence
  Description of Artificial Sequence: Synthetic oligonucleotide
cccuaguccgaugguucau

SEQ ID NO: 2507860 - RNA, 19 nt, Artificial Sequence
  Description of Artificial Sequence: Synthetic oligonucleotide
cgcgcacccugggcacgcc

SEQ ID NO: 2507861 - RNA, 19 nt, Artificial Sequence
  Description of Artificial Sequence: Synthetic oligonucleotide
gcgacgucgcggggacacu

SEQ ID NO: 2507862 - RNA, 19 nt, Artificial Sequence
  Description of Artificial Sequence: Synthetic oligonucleotide
gcgcgacgucgcggggaca

SEQ ID NO: 2507863 - RNA, 19 nt, Artificial Sequence
  Description of Artificial Sequence: Synthetic oligonucleotide
gaaauaauaacauuccucc

SEQ ID NO: 2507864 - RNA, 19 nt, Artificial Sequence
  Description of Artificial Sequence: Synthetic oligonucleotide
aagaaauaggcucugguac

SEQ ID NO: 2507865 - RNA, 19 nt, Artificial Sequence
  Description of Artificial Sequence: Synthetic oligonucleotide
aauaauaacauuccuccag

SEQ ID NO: 2507866 - RNA, 19 nt, Artificial Sequence
  Description of Artificial Sequence: Synthetic oligonucleotide
aaaaggguaggcuaagccg

SEQ ID NO: 2507867 - RNA, 19 nt, Artificial Sequence
  Description of Artificial Sequence: Synthetic oligonucleotide
uuucagauaaacaacgccc

SEQ ID NO: 2507868 - RNA, 19 nt, Artificial Sequence
  Description of Artificial Sequence: Synthetic oligonucleotide
aauuuucagauaaacaacg

SEQ ID NO: 2507869 - RNA, 19 nt, Artificial Sequence
  Description of Artificial Sequence: Synthetic oligonucleotide
uuuguaaagaaauaggcuc

SEQ ID NO: 2507870 - RNA, 19 nt, Artificial Sequence
  Description of Artificial Sequence: Synthetic oligonucleotide
aaacacuauuuccagcacc

SEQ ID NO: 2507871 - RNA, 19 nt, Artificial Sequence
  Description of Artificial Sequence: Synthetic oligonucleotide
aauaaagaaaggauccugg

SEQ ID NO: 2507872 - RNA, 19 nt, Artificial Sequence
  Description of Artificial Sequence: Synthetic oligonucleotide
agcaauaaagaaaggaucc

SEQ ID NO: 2507873 - RNA, 19 nt, Artificial Sequence
  Description of Artificial Sequence: Synthetic oligonucleotide
uuuccuguuaacuugcaag

SEQ ID NO: 2507874 - RNA, 19 nt, Artificial Sequence
  Description of Artificial Sequence: Synthetic oligonucleotide
ugauacauagcucuguugu

SEQ ID NO: 2507875 - RNA, 19 nt, Artificial Sequence
  Description of Artificial Sequence: Synthetic oligonucleotide
uuuucagauaaacaacgcc

SEQ ID NO: 2507876 - RNA, 19 nt, Artificial Sequence
  Description of Artificial Sequence: Synthetic oligonucleotide
auaauaacauuccuccagg

SEQ ID NO: 2507877 - RNA, 19 nt, Artificial Sequence
  Description of Artificial Sequence: Synthetic oligonucleotide
auuaucauaucuuccauga

SEQ ID NO: 2507878 - RNA, 19 nt, Artificial Sequence
  Description of Artificial Sequence: Synthetic oligonucleotide
agaaauaggcucugguacc

SEQ ID NO: 2507879 - RNA, 19 nt, Artificial Sequence
  Description of Artificial Sequence: Synthetic oligonucleotide
uaacaugauacauagcucu

SEQ ID NO: 2507880 - RNA, 19 nt, Artificial Sequence
  Description of Artificial Sequence: Synthetic oligonucleotide
uugcuuuucauguaauccg

SEQ ID NO: 2507881 - RNA, 19 nt, Artificial Sequence
  Description of Artificial Sequence: Synthetic oligonucleotide
ucauaccuuaacaugauac

SEQ ID NO: 2507882 - RNA, 19 nt, Artificial Sequence
  Description of Artificial Sequence: Synthetic oligonucleotide
gacuuuacaagcuccacag

SEQ ID NO: 2507883 - RNA, 19 nt, Artificial Sequence
  Description of Artificial Sequence: Synthetic oligonucleotide
aaaggagauugcuaauuuc

SEQ ID NO: 2507884 - RNA, 19 nt, Artificial Sequence
  Description of Artificial Sequence: Synthetic oligonucleotide
agaaugacaucuaggaucc

SEQ ID NO: 2507885 - RNA, 19 nt, Artificial Sequence
  Description of Artificial Sequence: Synthetic oligonucleotide
aacgcccuuucuuaaagcg

SEQ ID NO: 2507886 - RNA, 19 nt, Artificial Sequence
  Description of Artificial Sequence: Synthetic oligonucleotide
uuuccuugaacccacacuc

SEQ ID NO: 2507887 - RNA, 19 nt, Artificial Sequence
  Description of Artificial Sequence: Synthetic oligonucleotide
accuuaacaugauacauag

SEQ ID NO: 2507888 - RNA, 19 nt, Artificial Sequence
  Description of Artificial Sequence: Synthetic oligonucleotide
uccaguauucggaaagugg

SEQ ID NO: 2507889 - RNA, 19 nt, Artificial Sequence
  Description of Artificial Sequence: Synthetic oligonucleotide
uuugaguccagugcaaugg

SEQ ID NO: 2507890 - RNA, 19 nt, Artificial Sequence
  Description of Artificial Sequence: Synthetic oligonucleotide
ugagaaaggagauugcuaa

SEQ ID NO: 2507891 - RNA, 19 nt, Artificial Sequence
  Description of Artificial Sequence: Synthetic oligonucleotide
aacacuauuuccagcaccg

SEQ ID NO: 2507892 - RNA, 19 nt, Artificial Sequence
  Description of Artificial Sequence: Synthetic oligonucleotide
ucuuccaugaucccgaaau

SEQ ID NO: 2507893 - RNA, 19 nt, Artificial Sequence
  Description of Artificial Sequence: Synthetic oligonucleotide
gauugcuaauuucagcucc

SEQ ID NO: 2507894 - RNA, 19 nt, Artificial Sequence
  Description of Artificial Sequence: Synthetic oligonucleotide
ugaucaaccagauuuugcu

SEQ ID NO: 2507895 - RNA, 19 nt, Artificial Sequence
  Description of Artificial Sequence: Synthetic oligonucleotide
uggacaacagcuugcaucc

SEQ ID NO: 2507896 - RNA, 19 nt, Artificial Sequence
  Description of Artificial Sequence: Synthetic oligonucleotide
ucccgaaauaauaacauuc

SEQ ID NO: 2507897 - RNA, 19 nt, Artificial Sequence
  Description of Artificial Sequence: Synthetic oligonucleotide
cuuaacaugauacauagcu

SEQ ID NO: 2507898 - RNA, 19 nt, Artificial Sequence
  Description of Artificial Sequence: Synthetic oligonucleotide
aauccggccucacagaaca

SEQ ID NO: 2507899 - RNA, 19 nt, Artificial Sequence
  Description of Artificial Sequence: Synthetic oligonucleotide
agauaaacaacgcccuuuc

SEQ ID NO: 2507900 - RNA, 19 nt, Artificial Sequence
  Description of Artificial Sequence: Synthetic oligonucleotide
ugaucccgaaauaauaaca

SEQ ID NO: 2507901 - RNA, 19 nt, Artificial Sequence
  Description of Artificial Sequence: Synthetic oligonucleotide
aaauaauaacauuccucca

SEQ ID NO: 2507902 - RNA, 19 nt, Artificial Sequence
  Description of Artificial Sequence: Synthetic oligonucleotide
gaaaaggguaggcuaagcc

SEQ ID NO: 2507903 - RNA, 19 nt, Artificial Sequence
  Description of Artificial Sequence: Synthetic oligonucleotide
acauaugguggauuucccc

SEQ ID NO: 2507904 - RNA, 19 nt, Artificial Sequence
  Description of Artificial Sequence: Synthetic oligonucleotide
cuuaaagcgaagcugagca

SEQ ID NO: 2507905 - RNA, 19 nt, Artificial Sequence
  Description of Artificial Sequence: Synthetic oligonucleotide
uucagauaaacaacgcccu

SEQ ID NO: 2507906 - RNA, 19 nt, Artificial Sequence
  Description of Artificial Sequence: Synthetic oligonucleotide
acacaucgugaacaaaggc

SEQ ID NO: 2507907 - RNA, 19 nt, Artificial Sequence
  Description of Artificial Sequence: Synthetic oligonucleotide
uugcaagcgaugaucaacc

SEQ ID NO: 2507908 - RNA, 19 nt, Artificial Sequence
  Description of Artificial Sequence: Synthetic oligonucleotide
aacaaaggcagaacagugg

SEQ ID NO: 2507909 - RNA, 19 nt, Artificial Sequence
  Description of Artificial Sequence: Synthetic oligonucleotide
ugagcauuaucauaucuuc

SEQ ID NO: 2507910 - RNA, 19 nt, Artificial Sequence
  Description of Artificial Sequence: Synthetic oligonucleotide
augaucccgaaauaauaac

SEQ ID NO: 2507911 - RNA, 19 nt, Artificial Sequence
  Description of Artificial Sequence: Synthetic oligonucleotide
uuccuguuaacuugcaagc

SEQ ID NO: 2507912 - RNA, 19 nt, Artificial Sequence
  Description of Artificial Sequence: Synthetic oligonucleotide
gaacauaugguggauuucc

SEQ ID NO: 2507913 - RNA, 19 nt, Artificial Sequence
  Description of Artificial Sequence: Synthetic oligonucleotide
aauaggcucugguaccauc

SEQ ID NO: 2507914 - RNA, 19 nt, Artificial Sequence
  Description of Artificial Sequence: Synthetic oligonucleotide
uuaacaugauacauagcuc

SEQ ID NO: 2507915 - RNA, 19 nt, Artificial Sequence
  Description of Artificial Sequence: Synthetic oligonucleotide
ugugguuucauaccuuaac

SEQ ID NO: 2507916 - RNA, 19 nt, Artificial Sequence
  Description of Artificial Sequence: Synthetic oligonucleotide
ucuggaauuuuccuugaac

SEQ ID NO: 2507917 - RNA, 19 nt, Artificial Sequence
  Description of Artificial Sequence: Synthetic oligonucleotide
uccccuuuuguaaagaaau

SEQ ID NO: 2507918 - RNA, 19 nt, Artificial Sequence
  Description of Artificial Sequence: Synthetic oligonucleotide
auuuucagauaaacaacgc

SEQ ID NO: 2507919 - RNA, 19 nt, Artificial Sequence
  Description of Artificial Sequence: Synthetic oligonucleotide
uuuuccuugaacccacacu

SEQ ID NO: 2507920 - RNA, 19 nt, Artificial Sequence
  Description of Artificial Sequence: Synthetic oligonucleotide
uaaacaacgcccuuucuua

SEQ ID NO: 2507921 - RNA, 19 nt, Artificial Sequence
  Description of Artificial Sequence: Synthetic oligonucleotide
ugacuuuacaagcuccaca

SEQ ID NO: 2507922 - RNA, 19 nt, Artificial Sequence
  Description of Artificial Sequence: Synthetic oligonucleotide
gagauugcuaauuucagcu

SEQ ID NO: 2507923 - RNA, 19 nt, Artificial Sequence
  Description of Artificial Sequence: Synthetic oligonucleotide
aacauaugguggauuuccc

SEQ ID NO: 2507924 - RNA, 19 nt, Artificial Sequence
  Description of Artificial Sequence: Synthetic oligonucleotide
agagagcacaaagacaagg

SEQ ID NO: 2507925 - RNA, 19 nt, Artificial Sequence
  Description of Artificial Sequence: Synthetic oligonucleotide
cauaucuuccaugaucccg

SEQ ID NO: 2507926 - RNA, 19 nt, Artificial Sequence
  Description of Artificial Sequence: Synthetic oligonucleotide
guaggcuaagccgucaucg

SEQ ID NO: 2507927 - RNA, 19 nt, Artificial Sequence
  Description of Artificial Sequence: Synthetic oligonucleotide
uccuggaauguucugcaag

SEQ ID NO: 2507928 - RNA, 19 nt, Artificial Sequence
  Description of Artificial Sequence: Synthetic oligonucleotide
agauugcuaauuucagcuc

SEQ ID NO: 2507929 - RNA, 19 nt, Artificial Sequence
  Description of Artificial Sequence: Synthetic oligonucleotide
ucuggaaaaggguaggcua

SEQ ID NO: 2507930 - RNA, 19 nt, Artificial Sequence
  Description of Artificial Sequence: Synthetic oligonucleotide
gccgucaucgcacacaucg

SEQ ID NO: 2507931 - RNA, 19 nt, Artificial Sequence
  Description of Artificial Sequence: Synthetic oligonucleotide
ccuuuuguaaagaaauagg

SEQ ID NO: 2507932 - RNA, 19 nt, Artificial Sequence
  Description of Artificial Sequence: Synthetic oligonucleotide
guuucauaccuuaacauga

SEQ ID NO: 2507933 - RNA, 19 nt, Artificial Sequence
  Description of Artificial Sequence: Synthetic oligonucleotide
ugugugguggugguggugg

SEQ ID NO: 2507934 - RNA, 19 nt, Artificial Sequence
  Description of Artificial Sequence: Synthetic oligonucleotide
aaaggguaggcuaagccgu

SEQ ID NO: 2507935 - RNA, 19 nt, Artificial Sequence
  Description of Artificial Sequence: Synthetic oligonucleotide
cauuaucauaucuuccaug

SEQ ID NO: 2507936 - RNA, 19 nt, Artificial Sequence
  Description of Artificial Sequence: Synthetic oligonucleotide
auaaacaacgcccuuucuu

SEQ ID NO: 2507937 - RNA, 19 nt, Artificial Sequence
  Description of Artificial Sequence: Synthetic oligonucleotide
caagcgaugaucaaccaga

SEQ ID NO: 2507938 - RNA, 19 nt, Artificial Sequence
  Description of Artificial Sequence: Synthetic oligonucleotide
gauacauagcucuguugug

SEQ ID NO: 2507939 - RNA, 19 nt, Artificial Sequence
  Description of Artificial Sequence: Synthetic oligonucleotide
uaauaacauuccuccaggc

SEQ ID NO: 2507940 - RNA, 19 nt, Artificial Sequence
  Description of Artificial Sequence: Synthetic oligonucleotide
accuccaguauucggaaag

SEQ ID NO: 2507941 - RNA, 19 nt, Artificial Sequence
  Description of Artificial Sequence: Synthetic oligonucleotide
agugcaaugguuucuggaa

SEQ ID NO: 2507942 - RNA, 19 nt, Artificial Sequence
  Description of Artificial Sequence: Synthetic oligonucleotide
uacauagcucuguugugag

SEQ ID NO: 2507943 - RNA, 19 nt, Artificial Sequence
  Description of Artificial Sequence: Synthetic oligonucleotide
gaacaaaggcagaacagug

SEQ ID NO: 2507944 - RNA, 19 nt, Artificial Sequence
  Description of Artificial Sequence: Synthetic oligonucleotide
cacacaucgugaacaaagg

SEQ ID NO: 2507945 - RNA, 19 nt, Artificial Sequence
  Description of Artificial Sequence: Synthetic oligonucleotide
gguuucauaccuuaacaug

SEQ ID NO: 2507946 - RNA, 19 nt, Artificial Sequence
  Description of Artificial Sequence: Synthetic oligonucleotide
augaucaaccagauuuugc

SEQ ID NO: 2507947 - RNA, 19 nt, Artificial Sequence
  Description of Artificial Sequence: Synthetic oligonucleotide
ugaauagaagagagcacaa

SEQ ID NO: 2507948 - RNA, 19 nt, Artificial Sequence
  Description of Artificial Sequence: Synthetic oligonucleotide
acaucuaggaucccaucug

SEQ ID NO: 2507949 - RNA, 19 nt, Artificial Sequence
  Description of Artificial Sequence: Synthetic oligonucleotide
uuuggcuuacaugugugug

SEQ ID NO: 2507950 - RNA, 19 nt, Artificial Sequence
  Description of Artificial Sequence: Synthetic oligonucleotide
uuacaagcuccacagcuuc

SEQ ID NO: 2507951 - RNA, 19 nt, Artificial Sequence
  Description of Artificial Sequence: Synthetic oligonucleotide
cacaucgugaacaaaggca

SEQ ID NO: 2507952 - RNA, 19 nt, Artificial Sequence
  Description of Artificial Sequence: Synthetic oligonucleotide
acaacgcccuuucuuaaag

SEQ ID NO: 2507953 - RNA, 19 nt, Artificial Sequence
  Description of Artificial Sequence: Synthetic oligonucleotide
gugaauagaagagagcaca

SEQ ID NO: 2507954 - RNA, 19 nt, Artificial Sequence
  Description of Artificial Sequence: Synthetic oligonucleotide
aagguuuacuuuggcuuac

SEQ ID NO: 2507955 - RNA, 19 nt, Artificial Sequence
  Description of Artificial Sequence: Synthetic oligonucleotide
ggccucacagaacauaugg

SEQ ID NO: 2507956 - RNA, 19 nt, Artificial Sequence
  Description of Artificial Sequence: Synthetic oligonucleotide
guggacaacagcuugcauc

SEQ ID NO: 2507957 - RNA, 19 nt, Artificial Sequence
  Description of Artificial Sequence: Synthetic oligonucleotide
caauaaagaaaggauccug

SEQ ID NO: 2507958 - RNA, 19 nt, Artificial Sequence
  Description of Artificial Sequence: Synthetic oligonucleotide
ugguuucauaccuuaacau

SEQ ID NO: 2507959 - RNA, 19 nt, Artificial Sequence
  Description of Artificial Sequence: Synthetic oligonucleotide
uucuuaaagcgaagcugag

SEQ ID NO: 2507960 - RNA, 19 nt, Artificial Sequence
  Description of Artificial Sequence: Synthetic oligonucleotide
uaccuuaacaugauacaua

SEQ ID NO: 2507961 - RNA, 19 nt, Artificial Sequence
  Description of Artificial Sequence: Synthetic oligonucleotide
uuuacaagcuccacagcuu

SEQ ID NO: 2507962 - RNA, 19 nt, Artificial Sequence
  Description of Artificial Sequence: Synthetic oligonucleotide
augugacuuuacaagcucc

SEQ ID NO: 2507963 - RNA, 19 nt, Artificial Sequence
  Description of Artificial Sequence: Synthetic oligonucleotide
ucuaggaucccaucuggaa

SEQ ID NO: 2507964 - RNA, 19 nt, Artificial Sequence
  Description of Artificial Sequence: Synthetic oligonucleotide
uuaacuugcaagcgaugau

SEQ ID NO: 2507965 - RNA, 19 nt, Artificial Sequence
  Description of Artificial Sequence: Synthetic oligonucleotide
ugggugugguuucauaccu

SEQ ID NO: 2507966 - RNA, 19 nt, Artificial Sequence
  Description of Artificial Sequence: Synthetic oligonucleotide
auagaagagagcacaaaga

SEQ ID NO: 2507967 - RNA, 19 nt, Artificial Sequence
  Description of Artificial Sequence: Synthetic oligonucleotide
uaggaucccaucuggaaaa

SEQ ID NO: 2507968 - RNA, 19 nt, Artificial Sequence
  Description of Artificial Sequence: Synthetic oligonucleotide
cauaccuuaacaugauaca

SEQ ID NO: 2507969 - RNA, 19 nt, Artificial Sequence
  Description of Artificial Sequence: Synthetic oligonucleotide
ccaguauucggaaaguggc

SEQ ID NO: 2507970 - RNA, 19 nt, Artificial Sequence
  Description of Artificial Sequence: Synthetic oligonucleotide
gaaaguggcauugcuacca

SEQ ID NO: 2507971 - RNA, 19 nt, Artificial Sequence
  Description of Artificial Sequence: Synthetic oligonucleotide
ucuuaaagcgaagcugagc

SEQ ID NO: 2507972 - RNA, 19 nt, Artificial Sequence
  Description of Artificial Sequence: Synthetic oligonucleotide
uuucauaccuuaacaugau

SEQ ID NO: 2507973 - RNA, 19 nt, Artificial Sequence
  Description of Artificial Sequence: Synthetic oligonucleotide
ugaacccacacucggugca

SEQ ID NO: 2507974 - RNA, 19 nt, Artificial Sequence
  Description of Artificial Sequence: Synthetic oligonucleotide
uccaugaucccgaaauaau

SEQ ID NO: 2507975 - RNA, 19 nt, Artificial Sequence
  Description of Artificial Sequence: Synthetic oligonucleotide
gacaaggagaaugacaucu

SEQ ID NO: 2507976 - RNA, 19 nt, Artificial Sequence
  Description of Artificial Sequence: Synthetic oligonucleotide
uguuaacuugcaagcgaug

SEQ ID NO: 2507977 - RNA, 19 nt, Artificial Sequence
  Description of Artificial Sequence: Synthetic oligonucleotide
caaggagaaugacaucuag

SEQ ID NO: 2507978 - RNA, 19 nt, Artificial Sequence
  Description of Artificial Sequence: Synthetic oligonucleotide
aauguucugcaagguguuc

SEQ ID NO: 2507979 - RNA, 19 nt, Artificial Sequence
  Description of Artificial Sequence: Synthetic oligonucleotide
uaacuugcaagcgaugauc

SEQ ID NO: 2507980 - RNA, 19 nt, Artificial Sequence
  Description of Artificial Sequence: Synthetic oligonucleotide
aacuugcaagcgaugauca

SEQ ID NO: 2507981 - RNA, 19 nt, Artificial Sequence
  Description of Artificial Sequence: Synthetic oligonucleotide
gacaacagcuugcauccug

SEQ ID NO: 2507982 - RNA, 19 nt, Artificial Sequence
  Description of Artificial Sequence: Synthetic oligonucleotide
augauacauagcucuguug

SEQ ID NO: 2507983 - RNA, 19 nt, Artificial Sequence
  Description of Artificial Sequence: Synthetic oligonucleotide
aaguggcauugcuaccagg

SEQ ID NO: 2507984 - RNA, 19 nt, Artificial Sequence
  Description of Artificial Sequence: Synthetic oligonucleotide
uucggaaaguggcauugcu

SEQ ID NO: 2507985 - RNA, 19 nt, Artificial Sequence
  Description of Artificial Sequence: Synthetic oligonucleotide
gcuuacauguguguggugg

SEQ ID NO: 2507986 - RNA, 19 nt, Artificial Sequence
  Description of Artificial Sequence: Synthetic oligonucleotide
uuuccaagcccuguguugu

SEQ ID NO: 2507987 - RNA, 19 nt, Artificial Sequence
  Description of Artificial Sequence: Synthetic oligonucleotide
guuaacuugcaagcgauga

SEQ ID NO: 2507988 - RNA, 19 nt, Artificial Sequence
  Description of Artificial Sequence: Synthetic oligonucleotide
gaugaucaaccagauuuug

SEQ ID NO: 2507989 - RNA, 19 nt, Artificial Sequence
  Description of Artificial Sequence: Synthetic oligonucleotide
uguaauccggccucacaga

SEQ ID NO: 2507990 - RNA, 19 nt, Artificial Sequence
  Description of Artificial Sequence: Synthetic oligonucleotide
gaauuuuccuugaacccac

SEQ ID NO: 2507991 - RNA, 19 nt, Artificial Sequence
  Description of Artificial Sequence: Synthetic oligonucleotide
uguaggacgcaugugacuu

SEQ ID NO: 2507992 - RNA, 19 nt, Artificial Sequence
  Description of Artificial Sequence: Synthetic oligonucleotide
aacaugauacauagcucug

SEQ ID NO: 2507993 - RNA, 19 nt, Artificial Sequence
  Description of Artificial Sequence: Synthetic oligonucleotide
uugugagaaaggagauugc

SEQ ID NO: 2507994 - RNA, 19 nt, Artificial Sequence
  Description of Artificial Sequence: Synthetic oligonucleotide
uggcauugcuaccaggaaa

SEQ ID NO: 2507995 - RNA, 19 nt, Artificial Sequence
  Description of Artificial Sequence: Synthetic oligonucleotide
auacauagcucuguuguga

SEQ ID NO: 2507996 - RNA, 19 nt, Artificial Sequence
  Description of Artificial Sequence: Synthetic oligonucleotide
agcgaagcugagcauuauc

SEQ ID NO: 2507997 - RNA, 19 nt, Artificial Sequence
  Description of Artificial Sequence: Synthetic oligonucleotide
caugaucccgaaauaauaa

SEQ ID NO: 2507998 - RNA, 19 nt, Artificial Sequence
  Description of Artificial Sequence: Synthetic oligonucleotide
gagcacaaagacaaggaga

SEQ ID NO: 2507999 - RNA, 19 nt, Artificial Sequence
  Description of Artificial Sequence: Synthetic oligonucleotide
agguguucaggauuggaaa

SEQ ID NO: 2508000 - RNA, 19 nt, Artificial Sequence
  Description of Artificial Sequence: Synthetic oligonucleotide
cccgaaauaauaacauucc

SEQ ID NO: 2508001 - RNA, 19 nt, Artificial Sequence
  Description of Artificial Sequence: Synthetic oligonucleotide
gacgcaugugacuuuacaa

SEQ ID NO: 2508002 - RNA, 19 nt, Artificial Sequence
  Description of Artificial Sequence: Synthetic oligonucleotide
aaacaacgcccuuucuuaa

SEQ ID NO: 2508003 - RNA, 19 nt, Artificial Sequence
  Description of Artificial Sequence: Synthetic oligonucleotide
auaccuuaacaugauacau

SEQ ID NO: 2508004 - RNA, 19 nt, Artificial Sequence
  Description of Artificial Sequence: Synthetic oligonucleotide
gagcauuaucauaucuucc

SEQ ID NO: 2508005 - RNA, 19 nt, Artificial Sequence
  Description of Artificial Sequence: Synthetic oligonucleotide
aacagugggccucacugua

SEQ ID NO: 2508006 - RNA, 19 nt, Artificial Sequence
  Description of Artificial Sequence: Synthetic oligonucleotide
auaucuuccaugaucccga

SEQ ID NO: 2508007 - RNA, 19 nt, Artificial Sequence
  Description of Artificial Sequence: Synthetic oligonucleotide
ugguuucuggaauuuuccu

SEQ ID NO: 2508008 - RNA, 19 nt, Artificial Sequence
  Description of Artificial Sequence: Synthetic oligonucleotide
aucgcacacaucgugaaca

SEQ ID NO: 2508009 - RNA, 19 nt, Artificial Sequence
  Description of Artificial Sequence: Synthetic oligonucleotide
acuguaggacgcaugugac

SEQ ID NO: 2508010 - RNA, 19 nt, Artificial Sequence
  Description of Artificial Sequence: Synthetic oligonucleotide
caugugacuuuacaagcuc

SEQ ID NO: 2508011 - RNA, 19 nt, Artificial Sequence
  Description of Artificial Sequence: Synthetic oligonucleotide
ggagauugcuaauuucagc

SEQ ID NO: 2508012 - RNA, 19 nt, Artificial Sequence
  Description of Artificial Sequence: Synthetic oligonucleotide
agaacauaugguggauuuc

SEQ ID NO: 2508013 - RNA, 19 nt, Artificial Sequence
  Description of Artificial Sequence: Synthetic oligonucleotide
uaaagcgaagcugagcauu

SEQ ID NO: 2508014 - RNA, 19 nt, Artificial Sequence
  Description of Artificial Sequence: Synthetic oligonucleotide
cuuuacaagcuccacagcu

SEQ ID NO: 2508015 - RNA, 19 nt, Artificial Sequence
  Description of Artificial Sequence: Synthetic oligonucleotide
ucgguggacaacagcuugc

SEQ ID NO: 2508016 - RNA, 19 nt, Artificial Sequence
  Description of Artificial Sequence: Synthetic oligonucleotide
aagugcucugucuuuccaa

SEQ ID NO: 2508017 - RNA, 19 nt, Artificial Sequence
  Description of Artificial Sequence: Synthetic oligonucleotide
uugaacccacacucggugc

SEQ ID NO: 2508018 - RNA, 19 nt, Artificial Sequence
  Description of Artificial Sequence: Synthetic oligonucleotide
aagguguucaggauuggaa

SEQ ID NO: 2508019 - RNA, 19 nt, Artificial Sequence
  Description of Artificial Sequence: Synthetic oligonucleotide
ccuggaauguucugcaagg

SEQ ID NO: 2508020 - RNA, 19 nt, Artificial Sequence
  Description of Artificial Sequence: Synthetic oligonucleotide
aacaacgcccuuucuuaaa

SEQ ID NO: 2508021 - RNA, 19 nt, Artificial Sequence
  Description of Artificial Sequence: Synthetic oligonucleotide
uugcuaccaggaaagugcu

SEQ ID NO: 2508022 - RNA, 19 nt, Artificial Sequence
  Description of Artificial Sequence: Synthetic oligonucleotide
ucauaucuuccaugauccc

SEQ ID NO: 2508023 - RNA, 19 nt, Artificial Sequence
  Description of Artificial Sequence: Synthetic oligonucleotide
uuccaugaucccgaaauaa

SEQ ID NO: 2508024 - RNA, 19 nt, Artificial Sequence
  Description of Artificial Sequence: Synthetic oligonucleotide
auucggaaaguggcauugc

SEQ ID NO: 2508025 - RNA, 19 nt, Artificial Sequence
  Description of Artificial Sequence: Synthetic oligonucleotide
uuuccccuuuuguaaagaa

SEQ ID NO: 2508026 - RNA, 19 nt, Artificial Sequence
  Description of Artificial Sequence: Synthetic oligonucleotide
aagccgucaucgcacacau

SEQ ID NO: 2508027 - RNA, 19 nt, Artificial Sequence
  Description of Artificial Sequence: Synthetic oligonucleotide
ccucacagaacauauggug

SEQ ID NO: 2508028 - RNA, 19 nt, Artificial Sequence
  Description of Artificial Sequence: Synthetic oligonucleotide
cacuguaggacgcauguga

SEQ ID NO: 2508029 - RNA, 19 nt, Artificial Sequence
  Description of Artificial Sequence: Synthetic oligonucleotide
gacaucuaggaucccaucu

SEQ ID NO: 2508030 - RNA, 19 nt, Artificial Sequence
  Description of Artificial Sequence: Synthetic oligonucleotide
ucggaaaguggcauugcua

SEQ ID NO: 2508031 - RNA, 19 nt, Artificial Sequence
  Description of Artificial Sequence: Synthetic oligonucleotide
aguauucggaaaguggcau

SEQ ID NO: 2508032 - RNA, 19 nt, Artificial Sequence
  Description of Artificial Sequence: Synthetic oligonucleotide
uaggcuaagccgucaucgc

SEQ ID NO: 2508033 - RNA, 19 nt, Artificial Sequence
  Description of Artificial Sequence: Synthetic oligonucleotide
auccugucagggugaauag

SEQ ID NO: 2508034 - RNA, 19 nt, Artificial Sequence
  Description of Artificial Sequence: Synthetic oligonucleotide
aggagauugcuaauuucag

SEQ ID NO: 2508035 - RNA, 19 nt, Artificial Sequence
  Description of Artificial Sequence: Synthetic oligonucleotide
agaaaggagauugcuaauu

SEQ ID NO: 2508036 - RNA, 19 nt, Artificial Sequence
  Description of Artificial Sequence: Synthetic oligonucleotide
caaccuggacagucggugg

SEQ ID NO: 2508037 - RNA, 19 nt, Artificial Sequence
  Description of Artificial Sequence: Synthetic oligonucleotide
ucaucgcacacaucgugaa

SEQ ID NO: 2508038 - RNA, 19 nt, Artificial Sequence
  Description of Artificial Sequence: Synthetic oligonucleotide
gucgguggacaacagcuug

SEQ ID NO: 2508039 - RNA, 19 nt, Artificial Sequence
  Description of Artificial Sequence: Synthetic oligonucleotide
ggcaaaaucacagcaauaa

SEQ ID NO: 2508040 - RNA, 19 nt, Artificial Sequence
  Description of Artificial Sequence: Synthetic oligonucleotide
uggagagaaaagguuuacu

SEQ ID NO: 2508041 - RNA, 19 nt, Artificial Sequence
  Description of Artificial Sequence: Synthetic oligonucleotide
cauugcuaccaggaaagug

SEQ ID NO: 2508042 - RNA, 19 nt, Artificial Sequence
  Description of Artificial Sequence: Synthetic oligonucleotide
gagagaaaagguuuacuuu

SEQ ID NO: 2508043 - RNA, 19 nt, Artificial Sequence
  Description of Artificial Sequence: Synthetic oligonucleotide
uggaaaaggguaggcuaag

SEQ ID NO: 2508044 - RNA, 19 nt, Artificial Sequence
  Description of Artificial Sequence: Synthetic oligonucleotide
uuaaagcgaagcugagcau

SEQ ID NO: 2508045 - RNA, 19 nt, Artificial Sequence
  Description of Artificial Sequence: Synthetic oligonucleotide
gaaauaggcucugguacca

SEQ ID NO: 2508046 - RNA, 19 nt, Artificial Sequence
  Description of Artificial Sequence: Synthetic oligonucleotide
cugucagggugaauagaag

SEQ ID NO: 2508047 - RNA, 19 nt, Artificial Sequence
  Description of Artificial Sequence: Synthetic oligonucleotide
acaagcuccacagcuucag

SEQ ID NO: 2508048 - RNA, 19 nt, Artificial Sequence
  Description of Artificial Sequence: Synthetic oligonucleotide
agcugagcauuaucauauc

SEQ ID NO: 2508049 - RNA, 19 nt, Artificial Sequence
  Description of Artificial Sequence: Synthetic oligonucleotide
gcgaugaucaaccagauuu

SEQ ID NO: 2508050 - RNA, 19 nt, Artificial Sequence
  Description of Artificial Sequence: Synthetic oligonucleotide
acaugauacauagcucugu

SEQ ID NO: 2508051 - RNA, 19 nt, Artificial Sequence
  Description of Artificial Sequence: Synthetic oligonucleotide
guggugguggugguggugg

SEQ ID NO: 2508052 - RNA, 19 nt, Artificial Sequence
  Description of Artificial Sequence: Synthetic oligonucleotide
cauagcucuguugugagaa

SEQ ID NO: 2508053 - RNA, 19 nt, Artificial Sequence
  Description of Artificial Sequence: Synthetic oligonucleotide
uacaagcuccacagcuuca

SEQ ID NO: 2508054 - RNA, 19 nt, Artificial Sequence
  Description of Artificial Sequence: Synthetic oligonucleotide
acacuauuuccagcaccgc

SEQ ID NO: 2508055 - RNA, 19 nt, Artificial Sequence
  Description of Artificial Sequence: Synthetic oligonucleotide
agauuuugcuuuucaugua

SEQ ID NO: 2508056 - RNA, 19 nt, Artificial Sequence
  Description of Artificial Sequence: Synthetic oligonucleotide
ugcuaauuucagcuccuuu

SEQ ID NO: 2508057 - RNA, 19 nt, Artificial Sequence
  Description of Artificial Sequence: Synthetic oligonucleotide
ggaauuuuccuugaaccca

SEQ ID NO: 2508058 - RNA, 19 nt, Artificial Sequence
  Description of Artificial Sequence: Synthetic oligonucleotide
uaauccggccucacagaac

SEQ ID NO: 2508059 - RNA, 19 nt, Artificial Sequence
  Description of Artificial Sequence: Synthetic oligonucleotide
cauaugguggauuuccccu

SEQ ID NO: 2508060 - RNA, 19 nt, Artificial Sequence
  Description of Artificial Sequence: Synthetic oligonucleotide
cuccuuugaguccagugca

SEQ ID NO: 2508061 - RNA, 19 nt, Artificial Sequence
  Description of Artificial Sequence: Synthetic oligonucleotide
uggcuuacauguguguggu

SEQ ID NO: 2508062 - RNA, 19 nt, Artificial Sequence
  Description of Artificial Sequence: Synthetic oligonucleotide
caacgcccuuucuuaaagc

SEQ ID NO: 2508063 - RNA, 19 nt, Artificial Sequence
  Description of Artificial Sequence: Synthetic oligonucleotide
cuaggaucccaucuggaaa

SEQ ID NO: 2508064 - RNA, 19 nt, Artificial Sequence
  Description of Artificial Sequence: Synthetic oligonucleotide
aagagagcacaaagacaag

SEQ ID NO: 2508065 - RNA, 19 nt, Artificial Sequence
  Description of Artificial Sequence: Synthetic oligonucleotide
guggauuuccccuuuugua

SEQ ID NO: 2508066 - RNA, 19 nt, Artificial Sequence
  Description of Artificial Sequence: Synthetic oligonucleotide
gaauagaagagagcacaaa

SEQ ID NO: 2508067 - RNA, 19 nt, Artificial Sequence
  Description of Artificial Sequence: Synthetic oligonucleotide
cagccaaccuccaguauuc

SEQ ID NO: 2508068 - RNA, 19 nt, Artificial Sequence
  Description of Artificial Sequence: Synthetic oligonucleotide
aagcccuguguuguguucu

SEQ ID NO: 2508069 - RNA, 19 nt, Artificial Sequence
  Description of Artificial Sequence: Synthetic oligonucleotide
agaaaggauccuggaaugu

SEQ ID NO: 2508070 - RNA, 19 nt, Artificial Sequence
  Description of Artificial Sequence: Synthetic oligonucleotide
auaggcucugguaccaucu

SEQ ID NO: 2508071 - RNA, 19 nt, Artificial Sequence
  Description of Artificial Sequence: Synthetic oligonucleotide
aggcuaagccgucaucgca

SEQ ID NO: 2508072 - RNA, 19 nt, Artificial Sequence
  Description of Artificial Sequence: Synthetic oligonucleotide
auaugguggauuuccccuu

SEQ ID NO: 2508073 - RNA, 19 nt, Artificial Sequence
  Description of Artificial Sequence: Synthetic oligonucleotide
acuuuggcuuacaugugug

SEQ ID NO: 2508074 - RNA, 19 nt, Artificial Sequence
  Description of Artificial Sequence: Synthetic oligonucleotide
cacuauuuccagcaccgca

SEQ ID NO: 2508075 - RNA, 19 nt, Artificial Sequence
  Description of Artificial Sequence: Synthetic oligonucleotide
aaagcgaagcugagcauua

SEQ ID NO: 2508076 - RNA, 19 nt, Artificial Sequence
  Description of Artificial Sequence: Synthetic oligonucleotide
gaucccgaaauaauaacau

SEQ ID NO: 2508077 - RNA, 19 nt, Artificial Sequence
  Description of Artificial Sequence: Synthetic oligonucleotide
ugcaagcgaugaucaacca

SEQ ID NO: 2508078 - RNA, 19 nt, Artificial Sequence
  Description of Artificial Sequence: Synthetic oligonucleotide
cuggaaaaggguaggcuaa

SEQ ID NO: 2508079 - RNA, 19 nt, Artificial Sequence
  Description of Artificial Sequence: Synthetic oligonucleotide
guaauccggccucacagaa

SEQ ID NO: 2508080 - RNA, 19 nt, Artificial Sequence
  Description of Artificial Sequence: Synthetic oligonucleotide
uaugguggauuuccccuuu

SEQ ID NO: 2508081 - RNA, 19 nt, Artificial Sequence
  Description of Artificial Sequence: Synthetic oligonucleotide
auugcuaauuucagcuccu

SEQ ID NO: 2508082 - RNA, 19 nt, Artificial Sequence
  Description of Artificial Sequence: Synthetic oligonucleotide
cggaaaguggcauugcuac

SEQ ID NO: 2508083 - RNA, 19 nt, Artificial Sequence
  Description of Artificial Sequence: Synthetic oligonucleotide
cagcaaccuggacagucgg

SEQ ID NO: 2508084 - RNA, 19 nt, Artificial Sequence
  Description of Artificial Sequence: Synthetic oligonucleotide
ugacaucuaggaucccauc

SEQ ID NO: 2508085 - RNA, 19 nt, Artificial Sequence
  Description of Artificial Sequence: Synthetic oligonucleotide
ugaguccagugcaaugguu

SEQ ID NO: 2508086 - RNA, 19 nt, Artificial Sequence
  Description of Artificial Sequence: Synthetic oligonucleotide
cauccugucagggugaaua

SEQ ID NO: 2508087 - RNA, 19 nt, Artificial Sequence
  Description of Artificial Sequence: Synthetic oligonucleotide
aggcagaacagugggccuc

SEQ ID NO: 2508088 - RNA, 19 nt, Artificial Sequence
  Description of Artificial Sequence: Synthetic oligonucleotide
cgcaugugacuuuacaagc

SEQ ID NO: 2508089 - RNA, 19 nt, Artificial Sequence
  Description of Artificial Sequence: Synthetic oligonucleotide
uguugugagaaaggagauu

SEQ ID NO: 2508090 - RNA, 19 nt, Artificial Sequence
  Description of Artificial Sequence: Synthetic oligonucleotide
acaacagcuugcauccugu

SEQ ID NO: 2508091 - RNA, 19 nt, Artificial Sequence
  Description of Artificial Sequence: Synthetic oligonucleotide
acauagcucuguugugaga

SEQ ID NO: 2508092 - RNA, 19 nt, Artificial Sequence
  Description of Artificial Sequence: Synthetic oligonucleotide
aggaaagugcucugucuuu

SEQ ID NO: 2508093 - RNA, 19 nt, Artificial Sequence
  Description of Artificial Sequence: Synthetic oligonucleotide
ggaaaguggcauugcuacc

SEQ ID NO: 2508094 - RNA, 19 nt, Artificial Sequence
  Description of Artificial Sequence: Synthetic oligonucleotide
aaccuccaguauucggaaa

SEQ ID NO: 2508095 - RNA, 19 nt, Artificial Sequence
  Description of Artificial Sequence: Synthetic oligonucleotide
cagugcaaugguuucugga

SEQ ID NO: 2508096 - RNA, 19 nt, Artificial Sequence
  Description of Artificial Sequence: Synthetic oligonucleotide
gauaaacaacgcccuuucu

SEQ ID NO: 2508097 - RNA, 19 nt, Artificial Sequence
  Description of Artificial Sequence: Synthetic oligonucleotide
cuucaggggcaaaaucaca

SEQ ID NO: 2508098 - RNA, 19 nt, Artificial Sequence
  Description of Artificial Sequence: Synthetic oligonucleotide
uccaggcuucagcaaccug

SEQ ID NO: 2508099 - RNA, 19 nt, Artificial Sequence
  Description of Artificial Sequence: Synthetic oligonucleotide
cuccaguauucggaaagug

SEQ ID NO: 2508100 - RNA, 19 nt, Artificial Sequence
  Description of Artificial Sequence: Synthetic oligonucleotide
ucgcacacaucgugaacaa

SEQ ID NO: 2508101 - RNA, 19 nt, Artificial Sequence
  Description of Artificial Sequence: Synthetic oligonucleotide
accuggacagucgguggac

SEQ ID NO: 2508102 - RNA, 19 nt, Artificial Sequence
  Description of Artificial Sequence: Synthetic oligonucleotide
uccugucagggugaauaga

SEQ ID NO: 2508103 - RNA, 19 nt, Artificial Sequence
  Description of Artificial Sequence: Synthetic oligonucleotide
ucacuguaggacgcaugug

SEQ ID NO: 2508104 - RNA, 19 nt, Artificial Sequence
  Description of Artificial Sequence: Synthetic oligonucleotide
ugguggugguggugguggg

SEQ ID NO: 2508105 - RNA, 19 nt, Artificial Sequence
  Description of Artificial Sequence: Synthetic oligonucleotide
augacaucuaggaucccau

SEQ ID NO: 2508106 - RNA, 19 nt, Artificial Sequence
  Description of Artificial Sequence: Synthetic oligonucleotide
caucgcacacaucgugaac

SEQ ID NO: 2508107 - RNA, 19 nt, Artificial Sequence
  Description of Artificial Sequence: Synthetic oligonucleotide
ugguaccaucuccucggac

SEQ ID NO: 2508108 - RNA, 19 nt, Artificial Sequence
  Description of Artificial Sequence: Synthetic oligonucleotide
aaauaggcucugguaccau

SEQ ID NO: 2508109 - RNA, 19 nt, Artificial Sequence
  Description of Artificial Sequence: Synthetic oligonucleotide
cucacuguaggacgcaugu

SEQ ID NO: 2508110 - RNA, 19 nt, Artificial Sequence
  Description of Artificial Sequence: Synthetic oligonucleotide
uggacagucgguggacaac

SEQ ID NO: 2508111 - RNA, 19 nt, Artificial Sequence
  Description of Artificial Sequence: Synthetic oligonucleotide
uaccaggaaagugcucugu

SEQ ID NO: 2508112 - RNA, 19 nt, Artificial Sequence
  Description of Artificial Sequence: Synthetic oligonucleotide
aagcgaugaucaaccagau

SEQ ID NO: 2508113 - RNA, 19 nt, Artificial Sequence
  Description of Artificial Sequence: Synthetic oligonucleotide
ccaaccuccaguauucgga

SEQ ID NO: 2508114 - RNA, 19 nt, Artificial Sequence
  Description of Artificial Sequence: Synthetic oligonucleotide
gucaucgcacacaucguga

SEQ ID NO: 2508115 - RNA, 19 nt, Artificial Sequence
  Description of Artificial Sequence: Synthetic oligonucleotide
cugagcauuaucauaucuu

SEQ ID NO: 2508116 - RNA, 19 nt, Artificial Sequence
  Description of Artificial Sequence: Synthetic oligonucleotide
uaucuuccaugaucccgaa

SEQ ID NO: 2508117 - RNA, 19 nt, Artificial Sequence
  Description of Artificial Sequence: Synthetic oligonucleotide
uuccaagcccuguguugug

SEQ ID NO: 2508118 - RNA, 19 nt, Artificial Sequence
  Description of Artificial Sequence: Synthetic oligonucleotide
gaucaaccagauuuugcuu

SEQ ID NO: 2508119 - RNA, 19 nt, Artificial Sequence
  Description of Artificial Sequence: Synthetic oligonucleotide
cccuguguuguguucuucc

SEQ ID NO: 2508120 - RNA, 19 nt, Artificial Sequence
  Description of Artificial Sequence: Synthetic oligonucleotide
uguggugguggugguggug

SEQ ID NO: 2508121 - RNA, 19 nt, Artificial Sequence
  Description of Artificial Sequence: Synthetic oligonucleotide
ucauguaauccggccucac

SEQ ID NO: 2508122 - RNA, 19 nt, Artificial Sequence
  Description of Artificial Sequence: Synthetic oligonucleotide
gugguggugguggugggug

SEQ ID NO: 2508123 - RNA, 19 nt, Artificial Sequence
  Description of Artificial Sequence: Synthetic oligonucleotide
cuguuaacuugcaagcgau

SEQ ID NO: 2508124 - RNA, 19 nt, Artificial Sequence
  Description of Artificial Sequence: Synthetic oligonucleotide
gacagucgguggacaacag

SEQ ID NO: 2508125 - RNA, 19 nt, Artificial Sequence
  Description of Artificial Sequence: Synthetic oligonucleotide
uaggacgcaugugacuuua

SEQ ID NO: 2508126 - RNA, 19 nt, Artificial Sequence
  Description of Artificial Sequence: Synthetic oligonucleotide
uccaagcccuguguugugu

SEQ ID NO: 2508127 - RNA, 19 nt, Artificial Sequence
  Description of Artificial Sequence: Synthetic oligonucleotide
caagcccuguguuguguuc

SEQ ID NO: 2508128 - RNA, 19 nt, Artificial Sequence
  Description of Artificial Sequence: Synthetic oligonucleotide
gaacagugggccucacugu

SEQ ID NO: 2508129 - RNA, 19 nt, Artificial Sequence
  Description of Artificial Sequence: Synthetic oligonucleotide
ggugugguuucauaccuua

SEQ ID NO: 2508130 - RNA, 19 nt, Artificial Sequence
  Description of Artificial Sequence: Synthetic oligonucleotide
ccuuaacaugauacauagc

SEQ ID NO: 2508131 - RNA, 19 nt, Artificial Sequence
  Description of Artificial Sequence: Synthetic oligonucleotide
caucgugaacaaaggcaga

SEQ ID NO: 2508132 - RNA, 19 nt, Artificial Sequence
  Description of Artificial Sequence: Synthetic oligonucleotide
caaccuccaguauucggaa

SEQ ID NO: 2508133 - RNA, 19 nt, Artificial Sequence
  Description of Artificial Sequence: Synthetic oligonucleotide
ccuguuaacuugcaagcga

SEQ ID NO: 2508134 - RNA, 19 nt, Artificial Sequence
  Description of Artificial Sequence: Synthetic oligonucleotide
gagaaaggagauugcuaau

SEQ ID NO: 2508135 - RNA, 19 nt, Artificial Sequence
  Description of Artificial Sequence: Synthetic oligonucleotide
aggaucccaucuggaaaag

SEQ ID NO: 2508136 - RNA, 19 nt, Artificial Sequence
  Description of Artificial Sequence: Synthetic oligonucleotide
cccuuucuuaaagcgaagc

SEQ ID NO: 2508137 - RNA, 19 nt, Artificial Sequence
  Description of Artificial Sequence: Synthetic oligonucleotide
gugggccucacuguaggac

SEQ ID NO: 2508138 - RNA, 19 nt, Artificial Sequence
  Description of Artificial Sequence: Synthetic oligonucleotide
cuuacaugugugugguggu

SEQ ID NO: 2508139 - RNA, 19 nt, Artificial Sequence
  Description of Artificial Sequence: Synthetic oligonucleotide
ccugucagggugaauagaa

SEQ ID NO: 2508140 - RNA, 19 nt, Artificial Sequence
  Description of Artificial Sequence: Synthetic oligonucleotide
agccaaccuccaguauucg

SEQ ID NO: 2508141 - RNA, 19 nt, Artificial Sequence
  Description of Artificial Sequence: Synthetic oligonucleotide
ggacgcaugugacuuuaca

SEQ ID NO: 2508142 - RNA, 19 nt, Artificial Sequence
  Description of Artificial Sequence: Synthetic oligonucleotide
ggcuaagccgucaucgcac

SEQ ID NO: 2508143 - RNA, 19 nt, Artificial Sequence
  Description of Artificial Sequence: Synthetic oligonucleotide
agcgaugaucaaccagauu

SEQ ID NO: 2508144 - RNA, 19 nt, Artificial Sequence
  Description of Artificial Sequence: Synthetic oligonucleotide
uccggccucacagaacaua

SEQ ID NO: 2508145 - RNA, 19 nt, Artificial Sequence
  Description of Artificial Sequence: Synthetic oligonucleotide
acgcccuuucuuaaagcga

SEQ ID NO: 2508146 - RNA, 19 nt, Artificial Sequence
  Description of Artificial Sequence: Synthetic oligonucleotide
caagguguucaggauugga

SEQ ID NO: 2508147 - RNA, 19 nt, Artificial Sequence
  Description of Artificial Sequence: Synthetic oligonucleotide
cucggugcauugccacuug

SEQ ID NO: 2508148 - RNA, 19 nt, Artificial Sequence
  Description of Artificial Sequence: Synthetic oligonucleotide
gcucuguugugagaaagga

SEQ ID NO: 2508149 - RNA, 19 nt, Artificial Sequence
  Description of Artificial Sequence: Synthetic oligonucleotide
gaguccagugcaaugguuu

SEQ ID NO: 2508150 - RNA, 19 nt, Artificial Sequence
  Description of Artificial Sequence: Synthetic oligonucleotide
cuuccaugaucccgaaaua

SEQ ID NO: 2508151 - RNA, 19 nt, Artificial Sequence
  Description of Artificial Sequence: Synthetic oligonucleotide
ggacagucgguggacaaca

SEQ ID NO: 2508152 - RNA, 19 nt, Artificial Sequence
  Description of Artificial Sequence: Synthetic oligonucleotide
gaaugacaucuaggauccc

SEQ ID NO: 2508153 - RNA, 19 nt, Artificial Sequence
  Description of Artificial Sequence: Synthetic oligonucleotide
aagcgaagcugagcauuau

SEQ ID NO: 2508154 - RNA, 19 nt, Artificial Sequence
  Description of Artificial Sequence: Synthetic oligonucleotide
ccaugaucccgaaauaaua

SEQ ID NO: 2508155 - RNA, 19 nt, Artificial Sequence
  Description of Artificial Sequence: Synthetic oligonucleotide
agguuuacuuuggcuuaca

SEQ ID NO: 2508156 - RNA, 19 nt, Artificial Sequence
  Description of Artificial Sequence: Synthetic oligonucleotide
aggacgcaugugacuuuac

SEQ ID NO: 2508157 - RNA, 19 nt, Artificial Sequence
  Description of Artificial Sequence: Synthetic oligonucleotide
cuguugugagaaaggagau

SEQ ID NO: 2508158 - RNA, 19 nt, Artificial Sequence
  Description of Artificial Sequence: Synthetic oligonucleotide
uugcuaauuucagcuccuu

SEQ ID NO: 2508159 - RNA, 19 nt, Artificial Sequence
  Description of Artificial Sequence: Synthetic oligonucleotide
gugcauugccacuuguuuu

SEQ ID NO: 2508160 - RNA, 19 nt, Artificial Sequence
  Description of Artificial Sequence: Synthetic oligonucleotide
ggugcauugccacuuguuu

SEQ ID NO: 2508161 - RNA, 19 nt, Artificial Sequence
  Description of Artificial Sequence: Synthetic oligonucleotide
guaccaucuccucggacau

SEQ ID NO: 2508162 - RNA, 19 nt, Artificial Sequence
  Description of Artificial Sequence: Synthetic oligonucleotide
gguaggcuaagccgucauc

SEQ ID NO: 2508163 - RNA, 19 nt, Artificial Sequence
  Description of Artificial Sequence: Synthetic oligonucleotide
ggagaaugacaucuaggau

SEQ ID NO: 2508164 - RNA, 19 nt, Artificial Sequence
  Description of Artificial Sequence: Synthetic oligonucleotide
cacagcuucaggggcaaaa

SEQ ID NO: 2508165 - RNA, 19 nt, Artificial Sequence
  Description of Artificial Sequence: Synthetic oligonucleotide
caggaaagugcucugucuu

SEQ ID NO: 2508166 - RNA, 19 nt, Artificial Sequence
  Description of Artificial Sequence: Synthetic oligonucleotide
gcaauaaagaaaggauccu

SEQ ID NO: 2508167 - RNA, 19 nt, Artificial Sequence
  Description of Artificial Sequence: Synthetic oligonucleotide
ugguggugguggugguggu

SEQ ID NO: 2508168 - RNA, 19 nt, Artificial Sequence
  Description of Artificial Sequence: Synthetic oligonucleotide
augguggauuuccccuuuu

SEQ ID NO: 2508169 - RNA, 19 nt, Artificial Sequence
  Description of Artificial Sequence: Synthetic oligonucleotide
ugcauccugucagggugaa

SEQ ID NO: 2508170 - RNA, 19 nt, Artificial Sequence
  Description of Artificial Sequence: Synthetic oligonucleotide
cgucaucgcacacaucgug

SEQ ID NO: 2508171 - RNA, 19 nt, Artificial Sequence
  Description of Artificial Sequence: Synthetic oligonucleotide
gcuaagccgucaucgcaca

SEQ ID NO: 2508172 - RNA, 19 nt, Artificial Sequence
  Description of Artificial Sequence: Synthetic oligonucleotide
guauucggaaaguggcauu

SEQ ID NO: 2508173 - RNA, 19 nt, Artificial Sequence
  Description of Artificial Sequence: Synthetic oligonucleotide
cuguaggacgcaugugacu

SEQ ID NO: 2508174 - RNA, 19 nt, Artificial Sequence
  Description of Artificial Sequence: Synthetic oligonucleotide
cagauaaacaacgcccuuu

SEQ ID NO: 2508175 - RNA, 19 nt, Artificial Sequence
  Description of Artificial Sequence: Synthetic oligonucleotide
agucgguggacaacagcuu

SEQ ID NO: 2508176 - RNA, 19 nt, Artificial Sequence
  Description of Artificial Sequence: Synthetic oligonucleotide
aacccacacucggugcauu

SEQ ID NO: 2508177 - RNA, 19 nt, Artificial Sequence
  Description of Artificial Sequence: Synthetic oligonucleotide
ccuuucuuaaagcgaagcu

SEQ ID NO: 2508178 - RNA, 19 nt, Artificial Sequence
  Description of Artificial Sequence: Synthetic oligonucleotide
gugugugguggugguggug

SEQ ID NO: 2508179 - RNA, 19 nt, Artificial Sequence
  Description of Artificial Sequence: Synthetic oligonucleotide
gcaugugacuuuacaagcu

SEQ ID NO: 2508180 - RNA, 19 nt, Artificial Sequence
  Description of Artificial Sequence: Synthetic oligonucleotide
ccgaaauaauaacauuccu

SEQ ID NO: 2508181 - RNA, 19 nt, Artificial Sequence
  Description of Artificial Sequence: Synthetic oligonucleotide
ggcuuacauguguguggug

SEQ ID NO: 2508182 - RNA, 19 nt, Artificial Sequence
  Description of Artificial Sequence: Synthetic oligonucleotide
gcagccaaccuccaguauu

SEQ ID NO: 2508183 - RNA, 19 nt, Artificial Sequence
  Description of Artificial Sequence: Synthetic oligonucleotide
gguuuacuuuggcuuacau

SEQ ID NO: 2508184 - RNA, 19 nt, Artificial Sequence
  Description of Artificial Sequence: Synthetic oligonucleotide
cugguaccaucuccucgga

SEQ ID NO: 2508185 - RNA, 19 nt, Artificial Sequence
  Description of Artificial Sequence: Synthetic oligonucleotide
gguggugguggugguggug

SEQ ID NO: 2508186 - RNA, 19 nt, Artificial Sequence
  Description of Artificial Sequence: Synthetic oligonucleotide
gcccuuucuuaaagcgaag

SEQ ID NO: 2508187 - RNA, 19 nt, Artificial Sequence
  Description of Artificial Sequence: Synthetic oligonucleotide
uaccaucuccucggacaua

SEQ ID NO: 2508188 - RNA, 19 nt, Artificial Sequence
  Description of Artificial Sequence: Synthetic oligonucleotide
ccaggaaagugcucugucu

SEQ ID NO: 2508189 - RNA, 19 nt, Artificial Sequence
  Description of Artificial Sequence: Synthetic oligonucleotide
agccgucaucgcacacauc

SEQ ID NO: 2508190 - RNA, 19 nt, Artificial Sequence
  Description of Artificial Sequence: Synthetic oligonucleotide
guaggacgcaugugacuuu

SEQ ID NO: 2508191 - RNA, 19 nt, Artificial Sequence
  Description of Artificial Sequence: Synthetic oligonucleotide
gaacccacacucggugcau

SEQ ID NO: 2508192 - RNA, 19 nt, Artificial Sequence
  Description of Artificial Sequence: Synthetic oligonucleotide
gccucacagaacauauggu

SEQ ID NO: 2508193 - RNA, 19 nt, Artificial Sequence
  Description of Artificial Sequence: Synthetic oligonucleotide
guguggugguggugguggu

SEQ ID NO: 2508194 - RNA, 19 nt, Artificial Sequence
  Description of Artificial Sequence: Synthetic oligonucleotide
ccggccucacagaacauau

SEQ ID NO: 2508195 - RNA, 19 nt, Artificial Sequence
  Description of Artificial Sequence: Synthetic oligonucleotide
ggguaggcuaagccgucau

SEQ ID NO: 2508196 - RNA, 19 nt, Artificial Sequence
  Description of Artificial Sequence: Synthetic oligonucleotide
auccggccucacagaacau

SEQ ID NO: 2508197 - RNA, 19 nt, Artificial Sequence
  Description of Artificial Sequence: Synthetic oligonucleotide
gcauugcuaccaggaaagu

SEQ ID NO: 2508198 - RNA, 19 nt, Artificial Sequence
  Description of Artificial Sequence: Synthetic oligonucleotide
ggugguggugguggugggu

SEQ ID NO: 2508199 - RNA, 19 nt, Artificial Sequence
  Description of Artificial Sequence: Synthetic oligonucleotide
gcagaacagugggccucac

SEQ ID NO: 2508200 - RNA, 19 nt, Artificial Sequence
  Description of Artificial Sequence: Synthetic oligonucleotide
ccgucaucgcacacaucgu

SEQ ID NO: 2508201 - RNA, 19 nt, Artificial Sequence
  Description of Artificial Sequence: Synthetic oligonucleotide
ggacaacagcuugcauccu

SEQ ID NO: 2508202 - RNA, 19 nt, Artificial Sequence
  Description of Artificial Sequence: Synthetic oligonucleotide
ccaagcccuguguuguguu

SEQ ID NO: 2508203 - RNA, 19 nt, Artificial Sequence
  Description of Artificial Sequence: Synthetic oligonucleotide
gcaccgcagccaaccucca

SEQ ID NO: 2508204 - RNA, 19 nt, Artificial Sequence
  Description of Artificial Sequence: Synthetic oligonucleotide
ccagcaccgcagccaaccu

SEQ ID NO: 2508205 - RNA, 19 nt, Artificial Sequence
  Description of Artificial Sequence: Synthetic oligonucleotide
cgcacacaucgugaacaaa

SEQ ID NO: 2508206 - RNA, 19 nt, Artificial Sequence
  Description of Artificial Sequence: Synthetic oligonucleotide
cggugcauugccacuuguu

SEQ ID NO: 2508207 - RNA, 19 nt, Artificial Sequence
  Description of Artificial Sequence: Synthetic oligonucleotide
gcauccugucagggugaau

SEQ ID NO: 2508208 - RNA, 19 nt, Artificial Sequence
  Description of Artificial Sequence: Synthetic oligonucleotide
aaggcaacgccucagaggc

SEQ ID NO: 2508209 - RNA, 19 nt, Artificial Sequence
  Description of Artificial Sequence: Synthetic oligonucleotide
aaggcaaugaggaaagucc

SEQ ID NO: 2508210 - RNA, 19 nt, Artificial Sequence
  Description of Artificial Sequence: Synthetic oligonucleotide
aaucccgaagagcacagcc

SEQ ID NO: 2508211 - RNA, 19 nt, Artificial Sequence
  Description of Artificial Sequence: Synthetic oligonucleotide
uuugcuggcaugaaaauga

SEQ ID NO: 2508212 - RNA, 19 nt, Artificial Sequence
  Description of Artificial Sequence: Synthetic oligonucleotide
agaguaguccaccaggacc

SEQ ID NO: 2508213 - RNA, 19 nt, Artificial Sequence
  Description of Artificial Sequence: Synthetic oligonucleotide
gauagaguaguccaccagg

SEQ ID NO: 2508214 - RNA, 19 nt, Artificial Sequence
  Description of Artificial Sequence: Synthetic oligonucleotide
ugacauggguaacagagcg

SEQ ID NO: 2508215 - RNA, 19 nt, Artificial Sequence
  Description of Artificial Sequence: Synthetic oligonucleotide
aaugcauugacauggguaa

SEQ ID NO: 2508216 - RNA, 19 nt, Artificial Sequence
  Description of Artificial Sequence: Synthetic oligonucleotide
gauagacaggcccacaagg

SEQ ID NO: 2508217 - RNA, 19 nt, Artificial Sequence
  Description of Artificial Sequence: Synthetic oligonucleotide
auugacauggguaacagag

SEQ ID NO: 2508218 - RNA, 19 nt, Artificial Sequence
  Description of Artificial Sequence: Synthetic oligonucleotide
ugugugagagcccuguagg

SEQ ID NO: 2508219 - RNA, 19 nt, Artificial Sequence
  Description of Artificial Sequence: Synthetic oligonucleotide
aucuucagaguccagcgcc

SEQ ID NO: 2508220 - RNA, 19 nt, Artificial Sequence
  Description of Artificial Sequence: Synthetic oligonucleotide
augaaaaugagcagcagac

SEQ ID NO: 2508221 - RNA, 19 nt, Artificial Sequence
  Description of Artificial Sequence: Synthetic oligonucleotide
caugucuucaccuugguca

SEQ ID NO: 2508222 - RNA, 19 nt, Artificial Sequence
  Description of Artificial Sequence: Synthetic oligonucleotide
gacuugaccacccagagaa

SEQ ID NO: 2508223 - RNA, 19 nt, Artificial Sequence
  Description of Artificial Sequence: Synthetic oligonucleotide
gaugcaggugaacaggugc

SEQ ID NO: 2508224 - RNA, 19 nt, Artificial Sequence
  Description of Artificial Sequence: Synthetic oligonucleotide
caugacgauagacaggccc

SEQ ID NO: 2508225 - RNA, 19 nt, Artificial Sequence
  Description of Artificial Sequence: Synthetic oligonucleotide
gaagagcacagccaauggg

SEQ ID NO: 2508226 - RNA, 19 nt, Artificial Sequence
  Description of Artificial Sequence: Synthetic oligonucleotide
gaaggcaacgccucagagg

SEQ ID NO: 2508227 - RNA, 19 nt, Artificial Sequence
  Description of Artificial Sequence: Synthetic oligonucleotide
aaaguuuggcuccgcaucu

SEQ ID NO: 2508228 - RNA, 19 nt, Artificial Sequence
  Description of Artificial Sequence: Synthetic oligonucleotide
aacuggauaccagacagug

SEQ ID NO: 2508229 - RNA, 19 nt, Artificial Sequence
  Description of Artificial Sequence: Synthetic oligonucleotide
ccaaaauccccaaugaugc

SEQ ID NO: 2508230 - RNA, 19 nt, Artificial Sequence
  Description of Artificial Sequence: Synthetic oligonucleotide
gauggcagugcgcaugacg

SEQ ID NO: 2508231 - RNA, 19 nt, Artificial Sequence
  Description of Artificial Sequence: Synthetic oligonucleotide
gaagagccggggcagaagg

SEQ ID NO: 2508232 - RNA, 19 nt, Artificial Sequence
  Description of Artificial Sequence: Synthetic oligonucleotide
agaagagcaaugcagccca

SEQ ID NO: 2508233 - RNA, 19 nt, Artificial Sequence
  Description of Artificial Sequence: Synthetic oligonucleotide
gaugcgucgagccuugccc

SEQ ID NO: 2508234 - RNA, 19 nt, Artificial Sequence
  Description of Artificial Sequence: Synthetic oligonucleotide
uugacuugaccacccagag

SEQ ID NO: 2508235 - RNA, 19 nt, Artificial Sequence
  Description of Artificial Sequence: Synthetic oligonucleotide
acuuguacucguccuggcc

SEQ ID NO: 2508236 - RNA, 19 nt, Artificial Sequence
  Description of Artificial Sequence: Synthetic oligonucleotide
ggucaaugcauugacaugg

SEQ ID NO: 2508237 - RNA, 19 nt, Artificial Sequence
  Description of Artificial Sequence: Synthetic oligonucleotide
aacuugcgcaggaagaagg

SEQ ID NO: 2508238 - RNA, 19 nt, Artificial Sequence
  Description of Artificial Sequence: Synthetic oligonucleotide
ugauagaguaguccaccag

SEQ ID NO: 2508239 - RNA, 19 nt, Artificial Sequence
  Description of Artificial Sequence: Synthetic oligonucleotide
aaaauccccaaugaugcgu

SEQ ID NO: 2508240 - RNA, 19 nt, Artificial Sequence
  Description of Artificial Sequence: Synthetic oligonucleotide
uggguaacagagcggacag

SEQ ID NO: 2508241 - RNA, 19 nt, Artificial Sequence
  Description of Artificial Sequence: Synthetic oligonucleotide
ugugauagaguaguccacc

SEQ ID NO: 2508242 - RNA, 19 nt, Artificial Sequence
  Description of Artificial Sequence: Synthetic oligonucleotide
uguuccugaacuugcgcag

SEQ ID NO: 2508243 - RNA, 19 nt, Artificial Sequence
  Description of Artificial Sequence: Synthetic oligonucleotide
gaaaaugagcagcagacgu

SEQ ID NO: 2508244 - RNA, 19 nt, Artificial Sequence
  Description of Artificial Sequence: Synthetic oligonucleotide
auagacaggcccacaaggc

SEQ ID NO: 2508245 - RNA, 19 nt, Artificial Sequence
  Description of Artificial Sequence: Synthetic oligonucleotide
uccucaucaaaguuuggcu

SEQ ID NO: 2508246 - RNA, 19 nt, Artificial Sequence
  Description of Artificial Sequence: Synthetic oligonucleotide
aggaagaaggcaaugagga

SEQ ID NO: 2508247 - RNA, 19 nt, Artificial Sequence
  Description of Artificial Sequence: Synthetic oligonucleotide
aagagcacagccaauggga

SEQ ID NO: 2508248 - RNA, 19 nt, Artificial Sequence
  Description of Artificial Sequence: Synthetic oligonucleotide
uggcaugaaaaugagcagc

SEQ ID NO: 2508249 - RNA, 19 nt, Artificial Sequence
  Description of Artificial Sequence: Synthetic oligonucleotide
ucaccuuggucacguaggg

SEQ ID NO: 2508250 - RNA, 19 nt, Artificial Sequence
  Description of Artificial Sequence: Synthetic oligonucleotide
aaauccccaaugaugcguc

SEQ ID NO: 2508251 - RNA, 19 nt, Artificial Sequence
  Description of Artificial Sequence: Synthetic oligonucleotide
uugacauggguaacagagc

SEQ ID NO: 2508252 - RNA, 19 nt, Artificial Sequence
  Description of Artificial Sequence: Synthetic oligonucleotide
augagcacuccggugaccc

SEQ ID NO: 2508253 - RNA, 19 nt, Artificial Sequence
  Description of Artificial Sequence: Synthetic oligonucleotide
gaggaaaguccccagcaug

SEQ ID NO: 2508254 - RNA, 19 nt, Artificial Sequence
  Description of Artificial Sequence: Synthetic oligonucleotide
uugaccacccagagaagag

SEQ ID NO: 2508255 - RNA, 19 nt, Artificial Sequence
  Description of Artificial Sequence: Synthetic oligonucleotide
aaugggauccggcgcagca

SEQ ID NO: 2508256 - RNA, 19 nt, Artificial Sequence
  Description of Artificial Sequence: Synthetic oligonucleotide
ugggaaugccaaaaucccc

SEQ ID NO: 2508257 - RNA, 19 nt, Artificial Sequence
  Description of Artificial Sequence: Synthetic oligonucleotide
augaggaugagggacagca

SEQ ID NO: 2508258 - RNA, 19 nt, Artificial Sequence
  Description of Artificial Sequence: Synthetic oligonucleotide
guguaggugucugugauag

SEQ ID NO: 2508259 - RNA, 19 nt, Artificial Sequence
  Description of Artificial Sequence: Synthetic oligonucleotide
uauugggcugguuccuugg

SEQ ID NO: 2508260 - RNA, 19 nt, Artificial Sequence
  Description of Artificial Sequence: Synthetic oligonucleotide
caaaguuuggcuccgcauc

SEQ ID NO: 2508261 - RNA, 19 nt, Artificial Sequence
  Description of Artificial Sequence: Synthetic oligonucleotide
uuuggcuccgcaucuucag

SEQ ID NO: 2508262 - RNA, 19 nt, Artificial Sequence
  Description of Artificial Sequence: Synthetic oligonucleotide
ucacuuguacucguccugg

SEQ ID NO: 2508263 - RNA, 19 nt, Artificial Sequence
  Description of Artificial Sequence: Synthetic oligonucleotide
agccaaugggauccggcgc

SEQ ID NO: 2508264 - RNA, 19 nt, Artificial Sequence
  Description of Artificial Sequence: Synthetic oligonucleotide
agauggaaaugggaaugcc

SEQ ID NO: 2508265 - RNA, 19 nt, Artificial Sequence
  Description of Artificial Sequence: Synthetic oligonucleotide
augaggaaaguccccagca

SEQ ID NO: 2508266 - RNA, 19 nt, Artificial Sequence
  Description of Artificial Sequence: Synthetic oligonucleotide
aggcaaugaggaaaguccc

SEQ ID NO: 2508267 - RNA, 19 nt, Artificial Sequence
  Description of Artificial Sequence: Synthetic oligonucleotide
aaaaucccgaagagcacag

SEQ ID NO: 2508268 - RNA, 19 nt, Artificial Sequence
  Description of Artificial Sequence: Synthetic oligonucleotide
uagacaggcccacaaggcu

SEQ ID NO: 2508269 - RNA, 19 nt, Artificial Sequence
  Description of Artificial Sequence: Synthetic oligonucleotide
uaccagacagugaugugac

SEQ ID NO: 2508270 - RNA, 19 nt, Artificial Sequence
  Description of Artificial Sequence: Synthetic oligonucleotide
ccagagaagagcaaugcag

SEQ ID NO: 2508271 - RNA, 19 nt, Artificial Sequence
  Description of Artificial Sequence: Synthetic oligonucleotide
aauccccaaugaugcgucg

SEQ ID NO: 2508272 - RNA, 19 nt, Artificial Sequence
  Description of Artificial Sequence: Synthetic oligonucleotide
ugacggucaaugcauugac

SEQ ID NO: 2508273 - RNA, 19 nt, Artificial Sequence
  Description of Artificial Sequence: Synthetic oligonucleotide
gagaagagcaaugcagccc

SEQ ID NO: 2508274 - RNA, 19 nt, Artificial Sequence
  Description of Artificial Sequence: Synthetic oligonucleotide
ucaccaggugcgauggcag

SEQ ID NO: 2508275 - RNA, 19 nt, Artificial Sequence
  Description of Artificial Sequence: Synthetic oligonucleotide
aaugagcacuccggugacc

SEQ ID NO: 2508276 - RNA, 19 nt, Artificial Sequence
  Description of Artificial Sequence: Synthetic oligonucleotide
augcgucgagccuugcccc

SEQ ID NO: 2508277 - RNA, 19 nt, Artificial Sequence
  Description of Artificial Sequence: Synthetic oligonucleotide
agaaggcaacgccucagag

SEQ ID NO: 2508278 - RNA, 19 nt, Artificial Sequence
  Description of Artificial Sequence: Synthetic oligonucleotide
gcuggcaugaaaaugagca

SEQ ID NO: 2508279 - RNA, 19 nt, Artificial Sequence
  Description of Artificial Sequence: Synthetic oligonucleotide
agaguccagcgccugcagc

SEQ ID NO: 2508280 - RNA, 19 nt, Artificial Sequence
  Description of Artificial Sequence: Synthetic oligonucleotide
uugcgcaggaagaaggcaa

SEQ ID NO: 2508281 - RNA, 19 nt, Artificial Sequence
  Description of Artificial Sequence: Synthetic oligonucleotide
aaaucccgaagagcacagc

SEQ ID NO: 2508282 - RNA, 19 nt, Artificial Sequence
  Description of Artificial Sequence: Synthetic oligonucleotide
uguguguaggugucuguga

SEQ ID NO: 2508283 - RNA, 19 nt, Artificial Sequence
  Description of Artificial Sequence: Synthetic oligonucleotide
acauggguaacagagcgga

SEQ ID NO: 2508284 - RNA, 19 nt, Artificial Sequence
  Description of Artificial Sequence: Synthetic oligonucleotide
ugggacaacuggauaccag

SEQ ID NO: 2508285 - RNA, 19 nt, Artificial Sequence
  Description of Artificial Sequence: Synthetic oligonucleotide
augccaaaauccccaauga

SEQ ID NO: 2508286 - RNA, 19 nt, Artificial Sequence
  Description of Artificial Sequence: Synthetic oligonucleotide
aguuuggcuccgcaucuuc

SEQ ID NO: 2508287 - RNA, 19 nt, Artificial Sequence
  Description of Artificial Sequence: Synthetic oligonucleotide
ugggcugguuccuugggcc

SEQ ID NO: 2508288 - RNA, 19 nt, Artificial Sequence
  Description of Artificial Sequence: Synthetic oligonucleotide
ucaaaguuuggcuccgcau

SEQ ID NO: 2508289 - RNA, 19 nt, Artificial Sequence
  Description of Artificial Sequence: Synthetic oligonucleotide
ugcauugacauggguaaca

SEQ ID NO: 2508290 - RNA, 19 nt, Artificial Sequence
  Description of Artificial Sequence: Synthetic oligonucleotide
uccccaaugaugcgucgag

SEQ ID NO: 2508291 - RNA, 19 nt, Artificial Sequence
  Description of Artificial Sequence: Synthetic oligonucleotide
gaaggcaaugaggaaaguc

SEQ ID NO: 2508292 - RNA, 19 nt, Artificial Sequence
  Description of Artificial Sequence: Synthetic oligonucleotide
uggaugcaggugaacaggu

SEQ ID NO: 2508293 - RNA, 19 nt, Artificial Sequence
  Description of Artificial Sequence: Synthetic oligonucleotide
aggugcauccgccaugucu

SEQ ID NO: 2508294 - RNA, 19 nt, Artificial Sequence
  Description of Artificial Sequence: Synthetic oligonucleotide
ugagcaagagcaggaagga

SEQ ID NO: 2508295 - RNA, 19 nt, Artificial Sequence
  Description of Artificial Sequence: Synthetic oligonucleotide
accaagauggaaaugggaa

SEQ ID NO: 2508296 - RNA, 19 nt, Artificial Sequence
  Description of Artificial Sequence: Synthetic oligonucleotide
gauccggcgcagcacagcc

SEQ ID NO: 2508297 - RNA, 19 nt, Artificial Sequence
  Description of Artificial Sequence: Synthetic oligonucleotide
uugcuggcaugaaaaugag

SEQ ID NO: 2508298 - RNA, 19 nt, Artificial Sequence
  Description of Artificial Sequence: Synthetic oligonucleotide
cagccaaugggauccggcg

SEQ ID NO: 2508299 - RNA, 19 nt, Artificial Sequence
  Description of Artificial Sequence: Synthetic oligonucleotide
cagacagugaugugacccc

SEQ ID NO: 2508300 - RNA, 19 nt, Artificial Sequence
  Description of Artificial Sequence: Synthetic oligonucleotide
uggcuccgcaucuucagag

SEQ ID NO: 2508301 - RNA, 19 nt, Artificial Sequence
  Description of Artificial Sequence: Synthetic oligonucleotide
ugugagagcccuguaggca

SEQ ID NO: 2508302 - RNA, 19 nt, Artificial Sequence
  Description of Artificial Sequence: Synthetic oligonucleotide
gauaccagacagugaugug

SEQ ID NO: 2508303 - RNA, 19 nt, Artificial Sequence
  Description of Artificial Sequence: Synthetic oligonucleotide
uguaggcaccgucagcuuc

SEQ ID NO: 2508304 - RNA, 19 nt, Artificial Sequence
  Description of Artificial Sequence: Synthetic oligonucleotide
uccggcgcagcacagcccc

SEQ ID NO: 2508305 - RNA, 19 nt, Artificial Sequence
  Description of Artificial Sequence: Synthetic oligonucleotide
ucaaugcauugacaugggu

SEQ ID NO: 2508306 - RNA, 19 nt, Artificial Sequence
  Description of Artificial Sequence: Synthetic oligonucleotide
uccggugacccgcugcucc

SEQ ID NO: 2508307 - RNA, 19 nt, Artificial Sequence
  Description of Artificial Sequence: Synthetic oligonucleotide
auugggcugguuccuuggg

SEQ ID NO: 2508308 - RNA, 19 nt, Artificial Sequence
  Description of Artificial Sequence: Synthetic oligonucleotide
cugugugagagcccuguag

SEQ ID NO: 2508309 - RNA, 19 nt, Artificial Sequence
  Description of Artificial Sequence: Synthetic oligonucleotide
ugccaaaauccccaaugau

SEQ ID NO: 2508310 - RNA, 19 nt, Artificial Sequence
  Description of Artificial Sequence: Synthetic oligonucleotide
caaugcauugacaugggua

SEQ ID NO: 2508311 - RNA, 19 nt, Artificial Sequence
  Description of Artificial Sequence: Synthetic oligonucleotide
acagccaaugggauccggc

SEQ ID NO: 2508312 - RNA, 19 nt, Artificial Sequence
  Description of Artificial Sequence: Synthetic oligonucleotide
uagaguaguccaccaggac

SEQ ID NO: 2508313 - RNA, 19 nt, Artificial Sequence
  Description of Artificial Sequence: Synthetic oligonucleotide
cuuguacucguccuggcca

SEQ ID NO: 2508314 - RNA, 19 nt, Artificial Sequence
  Description of Artificial Sequence: Synthetic oligonucleotide
gacauggguaacagagcgg

SEQ ID NO: 2508315 - RNA, 19 nt, Artificial Sequence
  Description of Artificial Sequence: Synthetic oligonucleotide
ugaggaaaguccccagcau

SEQ ID NO: 2508316 - RNA, 19 nt, Artificial Sequence
  Description of Artificial Sequence: Synthetic oligonucleotide
gcuguauugggcugguucc

SEQ ID NO: 2508317 - RNA, 19 nt, Artificial Sequence
  Description of Artificial Sequence: Synthetic oligonucleotide
aaaaugagcagcagacguu

SEQ ID NO: 2508318 - RNA, 19 nt, Artificial Sequence
  Description of Artificial Sequence: Synthetic oligonucleotide
acaguggcagcugugugag

SEQ ID NO: 2508319 - RNA, 19 nt, Artificial Sequence
  Description of Artificial Sequence: Synthetic oligonucleotide
aggugucugugauagagua

SEQ ID NO: 2508320 - RNA, 19 nt, Artificial Sequence
  Description of Artificial Sequence: Synthetic oligonucleotide
gccaaaauccccaaugaug

SEQ ID NO: 2508321 - RNA, 19 nt, Artificial Sequence
  Description of Artificial Sequence: Synthetic oligonucleotide
ugaugcgucgagccuugcc

SEQ ID NO: 2508322 - RNA, 19 nt, Artificial Sequence
  Description of Artificial Sequence: Synthetic oligonucleotide
gaugagggacagcagagcu

SEQ ID NO: 2508323 - RNA, 19 nt, Artificial Sequence
  Description of Artificial Sequence: Synthetic oligonucleotide
ugcuggcaugaaaaugagc

SEQ ID NO: 2508324 - RNA, 19 nt, Artificial Sequence
  Description of Artificial Sequence: Synthetic oligonucleotide
ugcgcaugacggucaaugc

SEQ ID NO: 2508325 - RNA, 19 nt, Artificial Sequence
  Description of Artificial Sequence: Synthetic oligonucleotide
uaggugucugugauagagu

SEQ ID NO: 2508326 - RNA, 19 nt, Artificial Sequence
  Description of Artificial Sequence: Synthetic oligonucleotide
ugggauccggcgcagcaca

SEQ ID NO: 2508327 - RNA, 19 nt, Artificial Sequence
  Description of Artificial Sequence: Synthetic oligonucleotide
accagacagugaugugacc

SEQ ID NO: 2508328 - RNA, 19 nt, Artificial Sequence
  Description of Artificial Sequence: Synthetic oligonucleotide
aaugaugcgucgagccuug

SEQ ID NO: 2508329 - RNA, 19 nt, Artificial Sequence
  Description of Artificial Sequence: Synthetic oligonucleotide
accaucaccaagauggaaa

SEQ ID NO: 2508330 - RNA, 19 nt, Artificial Sequence
  Description of Artificial Sequence: Synthetic oligonucleotide
cugugauagaguaguccac

SEQ ID NO: 2508331 - RNA, 19 nt, Artificial Sequence
  Description of Artificial Sequence: Synthetic oligonucleotide
guugggacaacuggauacc

SEQ ID NO: 2508332 - RNA, 19 nt, Artificial Sequence
  Description of Artificial Sequence: Synthetic oligonucleotide
cucacuuguacucguccug

SEQ ID NO: 2508333 - RNA, 19 nt, Artificial Sequence
  Description of Artificial Sequence: Synthetic oligonucleotide
cccaugacgauagacaggc

SEQ ID NO: 2508334 - RNA, 19 nt, Artificial Sequence
  Description of Artificial Sequence: Synthetic oligonucleotide
uggauaccagacagugaug

SEQ ID NO: 2508335 - RNA, 19 nt, Artificial Sequence
  Description of Artificial Sequence: Synthetic oligonucleotide
ugaccacccagagaagagc

SEQ ID NO: 2508336 - RNA, 19 nt, Artificial Sequence
  Description of Artificial Sequence: Synthetic oligonucleotide
auagaguaguccaccagga

SEQ ID NO: 2508337 - RNA, 19 nt, Artificial Sequence
  Description of Artificial Sequence: Synthetic oligonucleotide
gacaggcccacaaggcugg

SEQ ID NO: 2508338 - RNA, 19 nt, Artificial Sequence
  Description of Artificial Sequence: Synthetic oligonucleotide
caugacggucaaugcauug

SEQ ID NO: 2508339 - RNA, 19 nt, Artificial Sequence
  Description of Artificial Sequence: Synthetic oligonucleotide
ggcaccgucagcuucugug

SEQ ID NO: 2508340 - RNA, 19 nt, Artificial Sequence
  Description of Artificial Sequence: Synthetic oligonucleotide
guugacuugaccacccaga

SEQ ID NO: 2508341 - RNA, 19 nt, Artificial Sequence
  Description of Artificial Sequence: Synthetic oligonucleotide
gagcagcagacguugggac

SEQ ID NO: 2508342 - RNA, 19 nt, Artificial Sequence
  Description of Artificial Sequence: Synthetic oligonucleotide
acgauagacaggcccacaa

SEQ ID NO: 2508343 - RNA, 19 nt, Artificial Sequence
  Description of Artificial Sequence: Synthetic oligonucleotide
uuccugaacuugcgcagga

SEQ ID NO: 2508344 - RNA, 19 nt, Artificial Sequence
  Description of Artificial Sequence: Synthetic oligonucleotide
guagggcugcucaggaugg

SEQ ID NO: 2508345 - RNA, 19 nt, Artificial Sequence
  Description of Artificial Sequence: Synthetic oligonucleotide
uggcagcugugugagagcc

SEQ ID NO: 2508346 - RNA, 19 nt, Artificial Sequence
  Description of Artificial Sequence: Synthetic oligonucleotide
cccaaugaugcgucgagcc

SEQ ID NO: 2508347 - RNA, 19 nt, Artificial Sequence
  Description of Artificial Sequence: Synthetic oligonucleotide
gugugagagcccuguaggc

SEQ ID NO: 2508348 - RNA, 19 nt, Artificial Sequence
  Description of Artificial Sequence: Synthetic oligonucleotide
gugcgcaugacggucaaug

SEQ ID NO: 2508349 - RNA, 19 nt, Artificial Sequence
  Description of Artificial Sequence: Synthetic oligonucleotide
augacgauagacaggccca

SEQ ID NO: 2508350 - RNA, 19 nt, Artificial Sequence
  Description of Artificial Sequence: Synthetic oligonucleotide
augacggucaaugcauuga

SEQ ID NO: 2508351 - RNA, 19 nt, Artificial Sequence
  Description of Artificial Sequence: Synthetic oligonucleotide
gucaaugcauugacauggg

SEQ ID NO: 2508352 - RNA, 19 nt, Artificial Sequence
  Description of Artificial Sequence: Synthetic oligonucleotide
ucagaguccagcgccugca

SEQ ID NO: 2508353 - RNA, 19 nt, Artificial Sequence
  Description of Artificial Sequence: Synthetic oligonucleotide
gaagcggcuguuccugaac

SEQ ID NO: 2508354 - RNA, 19 nt, Artificial Sequence
  Description of Artificial Sequence: Synthetic oligonucleotide
ugagagcccuguaggcacc

SEQ ID NO: 2508355 - RNA, 19 nt, Artificial Sequence
  Description of Artificial Sequence: Synthetic oligonucleotide
agcagcagacguugggaca

SEQ ID NO: 2508356 - RNA, 19 nt, Artificial Sequence
  Description of Artificial Sequence: Synthetic oligonucleotide
guuccugaacuugcgcagg

SEQ ID NO: 2508357 - RNA, 19 nt, Artificial Sequence
  Description of Artificial Sequence: Synthetic oligonucleotide
gugauagaguaguccacca

SEQ ID NO: 2508358 - RNA, 19 nt, Artificial Sequence
  Description of Artificial Sequence: Synthetic oligonucleotide
uuggcuccgcaucuucaga

SEQ ID NO: 2508359 - RNA, 19 nt, Artificial Sequence
  Description of Artificial Sequence: Synthetic oligonucleotide
agugaggccgccguugacu

SEQ ID NO: 2508360 - RNA, 19 nt, Artificial Sequence
  Description of Artificial Sequence: Synthetic oligonucleotide
cagagcuguauugggcugg

SEQ ID NO: 2508361 - RNA, 19 nt, Artificial Sequence
  Description of Artificial Sequence: Synthetic oligonucleotide
ugagcacuccggugacccg

SEQ ID NO: 2508362 - RNA, 19 nt, Artificial Sequence
  Description of Artificial Sequence: Synthetic oligonucleotide
ugucugugauagaguaguc

SEQ ID NO: 2508363 - RNA, 19 nt, Artificial Sequence
  Description of Artificial Sequence: Synthetic oligonucleotide
ugcgcaggaagaaggcaau

SEQ ID NO: 2508364 - RNA, 19 nt, Artificial Sequence
  Description of Artificial Sequence: Synthetic oligonucleotide
augcauugacauggguaac

SEQ ID NO: 2508365 - RNA, 19 nt, Artificial Sequence
  Description of Artificial Sequence: Synthetic oligonucleotide
uguguaggugucugugaua

SEQ ID NO: 2508366 - RNA, 19 nt, Artificial Sequence
  Description of Artificial Sequence: Synthetic oligonucleotide
ugcagcguccccugguccu

SEQ ID NO: 2508367 - RNA, 19 nt, Artificial Sequence
  Description of Artificial Sequence: Synthetic oligonucleotide
cuugaccacccagagaaga

SEQ ID NO: 2508368 - RNA, 19 nt, Artificial Sequence
  Description of Artificial Sequence: Synthetic oligonucleotide
uccagcgccugcagcgucc

SEQ ID NO: 2508369 - RNA, 19 nt, Artificial Sequence
  Description of Artificial Sequence: Synthetic oligonucleotide
gugucugugauagaguagu

SEQ ID NO: 2508370 - RNA, 19 nt, Artificial Sequence
  Description of Artificial Sequence: Synthetic oligonucleotide
cauccucaucaaaguuugg

SEQ ID NO: 2508371 - RNA, 19 nt, Artificial Sequence
  Description of Artificial Sequence: Synthetic oligonucleotide
aaggccagugaggccgccg

SEQ ID NO: 2508372 - RNA, 19 nt, Artificial Sequence
  Description of Artificial Sequence: Synthetic oligonucleotide
cucccgaaccuccuggauc

SEQ ID NO: 2508373 - RNA, 19 nt, Artificial Sequence
  Description of Artificial Sequence: Synthetic oligonucleotide
agacguugggacaacugga

SEQ ID NO: 2508374 - RNA, 19 nt, Artificial Sequence
  Description of Artificial Sequence: Synthetic oligonucleotide
acuccggugacccgcugcu

SEQ ID NO: 2508375 - RNA, 19 nt, Artificial Sequence
  Description of Artificial Sequence: Synthetic oligonucleotide
uuguacucguccuggccau

SEQ ID NO: 2508376 - RNA, 19 nt, Artificial Sequence
  Description of Artificial Sequence: Synthetic oligonucleotide
gggcuugucaccaggugcg

SEQ ID NO: 2508377 - RNA, 19 nt, Artificial Sequence
  Description of Artificial Sequence: Synthetic oligonucleotide
caccaagauggaaauggga

SEQ ID NO: 2508378 - RNA, 19 nt, Artificial Sequence
  Description of Artificial Sequence: Synthetic oligonucleotide
cguugggacaacuggauac

SEQ ID NO: 2508379 - RNA, 19 nt, Artificial Sequence
  Description of Artificial Sequence: Synthetic oligonucleotide
caaugagcacuccggugac

SEQ ID NO: 2508380 - RNA, 19 nt, Artificial Sequence
  Description of Artificial Sequence: Synthetic oligonucleotide
caccgugagcaagagcagg

SEQ ID NO: 2508381 - RNA, 19 nt, Artificial Sequence
  Description of Artificial Sequence: Synthetic oligonucleotide
uugggacaacuggauacca

SEQ ID NO: 2508382 - RNA, 19 nt, Artificial Sequence
  Description of Artificial Sequence: Synthetic oligonucleotide
acaggugcauccgccaugu

SEQ ID NO: 2508383 - RNA, 19 nt, Artificial Sequence
  Description of Artificial Sequence: Synthetic oligonucleotide
cacuuguacucguccuggc

SEQ ID NO: 2508384 - RNA, 19 nt, Artificial Sequence
  Description of Artificial Sequence: Synthetic oligonucleotide
gaccacccagagaagagca

SEQ ID NO: 2508385 - RNA, 19 nt, Artificial Sequence
  Description of Artificial Sequence: Synthetic oligonucleotide
auccgccaugucuucaccu

SEQ ID NO: 2508386 - RNA, 19 nt, Artificial Sequence
  Description of Artificial Sequence: Synthetic oligonucleotide
ccugaacuugcgcaggaag

SEQ ID NO: 2508387 - RNA, 19 nt, Artificial Sequence
  Description of Artificial Sequence: Synthetic oligonucleotide
accgucagcuucugugugu

SEQ ID NO: 2508388 - RNA, 19 nt, Artificial Sequence
  Description of Artificial Sequence: Synthetic oligonucleotide
ggaaaugggaaugccaaaa

SEQ ID NO: 2508389 - RNA, 19 nt, Artificial Sequence
  Description of Artificial Sequence: Synthetic oligonucleotide
gggaaugccaaaaucccca

SEQ ID NO: 2508390 - RNA, 19 nt, Artificial Sequence
  Description of Artificial Sequence: Synthetic oligonucleotide
gagcacuccggugacccgc

SEQ ID NO: 2508391 - RNA, 19 nt, Artificial Sequence
  Description of Artificial Sequence: Synthetic oligonucleotide
cuuggucacguagggcugc

SEQ ID NO: 2508392 - RNA, 19 nt, Artificial Sequence
  Description of Artificial Sequence: Synthetic oligonucleotide
uguaggugucugugauaga

SEQ ID NO: 2508393 - RNA, 19 nt, Artificial Sequence
  Description of Artificial Sequence: Synthetic oligonucleotide
ugacgauagacaggcccac

SEQ ID NO: 2508394 - RNA, 19 nt, Artificial Sequence
  Description of Artificial Sequence: Synthetic oligonucleotide
ugacccgcugcucccgaac

SEQ ID NO: 2508395 - RNA, 19 nt, Artificial Sequence
  Description of Artificial Sequence: Synthetic oligonucleotide
gccgccguugacuugacca

SEQ ID NO: 2508396 - RNA, 19 nt, Artificial Sequence
  Description of Artificial Sequence: Synthetic oligonucleotide
uccgccaugucuucaccuu

SEQ ID NO: 2508397 - RNA, 19 nt, Artificial Sequence
  Description of Artificial Sequence: Synthetic oligonucleotide
ggugcgauggcagugcgca

SEQ ID NO: 2508398 - RNA, 19 nt, Artificial Sequence
  Description of Artificial Sequence: Synthetic oligonucleotide
gcauugacauggguaacag

SEQ ID NO: 2508399 - RNA, 19 nt, Artificial Sequence
  Description of Artificial Sequence: Synthetic oligonucleotide
ggcaugaaaaugagcagca

SEQ ID NO: 2508400 - RNA, 19 nt, Artificial Sequence
  Description of Artificial Sequence: Synthetic oligonucleotide
augcaggugaacaggugca

SEQ ID NO: 2508401 - RNA, 19 nt, Artificial Sequence
  Description of Artificial Sequence: Synthetic oligonucleotide
caacgccucagaggcaccg

SEQ ID NO: 2508402 - RNA, 19 nt, Artificial Sequence
  Description of Artificial Sequence: Synthetic oligonucleotide
cauugacauggguaacaga

SEQ ID NO: 2508403 - RNA, 19 nt, Artificial Sequence
  Description of Artificial Sequence: Synthetic oligonucleotide
agcugugugagagcccugu

SEQ ID NO: 2508404 - RNA, 19 nt, Artificial Sequence
  Description of Artificial Sequence: Synthetic oligonucleotide
gcuguuccugaacuugcgc

SEQ ID NO: 2508405 - RNA, 19 nt, Artificial Sequence
  Description of Artificial Sequence: Synthetic oligonucleotide
gaggccgccguugacuuga

SEQ ID NO: 2508406 - RNA, 19 nt, Artificial Sequence
  Description of Artificial Sequence: Synthetic oligonucleotide
cauccgccaugucuucacc

SEQ ID NO: 2508407 - RNA, 19 nt, Artificial Sequence
  Description of Artificial Sequence: Synthetic oligonucleotide
gagagcccuguaggcaccg

SEQ ID NO: 2508408 - RNA, 19 nt, Artificial Sequence
  Description of Artificial Sequence: Synthetic oligonucleotide
cucguccuggccauccuca

SEQ ID NO: 2508409 - RNA, 19 nt, Artificial Sequence
  Description of Artificial Sequence: Synthetic oligonucleotide
acgccucagaggcaccgug

SEQ ID NO: 2508410 - RNA, 19 nt, Artificial Sequence
  Description of Artificial Sequence: Synthetic oligonucleotide
accgugagcaagagcagga

SEQ ID NO: 2508411 - RNA, 19 nt, Artificial Sequence
  Description of Artificial Sequence: Synthetic oligonucleotide
gucaccaggugcgauggca

SEQ ID NO: 2508412 - RNA, 19 nt, Artificial Sequence
  Description of Artificial Sequence: Synthetic oligonucleotide
ugcucaggauggugcuuug

SEQ ID NO: 2508413 - RNA, 19 nt, Artificial Sequence
  Description of Artificial Sequence: Synthetic oligonucleotide
ucagaggcaccgugagcaa

SEQ ID NO: 2508414 - RNA, 19 nt, Artificial Sequence
  Description of Artificial Sequence: Synthetic oligonucleotide
cacuccggugacccgcugc

SEQ ID NO: 2508415 - RNA, 19 nt, Artificial Sequence
  Description of Artificial Sequence: Synthetic oligonucleotide
accaggugcgauggcagug

SEQ ID NO: 2508416 - RNA, 19 nt, Artificial Sequence
  Description of Artificial Sequence: Synthetic oligonucleotide
caggugcgauggcagugcg

SEQ ID NO: 2508417 - RNA, 19 nt, Artificial Sequence
  Description of Artificial Sequence: Synthetic oligonucleotide
gaaaggccagugaggccgc

SEQ ID NO: 2508418 - RNA, 19 nt, Artificial Sequence
  Description of Artificial Sequence: Synthetic oligonucleotide
acuggauaccagacaguga

SEQ ID NO: 2508419 - RNA, 19 nt, Artificial Sequence
  Description of Artificial Sequence: Synthetic oligonucleotide
aggccagugaggccgccgu

SEQ ID NO: 2508420 - RNA, 19 nt, Artificial Sequence
  Description of Artificial Sequence: Synthetic oligonucleotide
uguauugggcugguuccuu

SEQ ID NO: 2508421 - RNA, 19 nt, Artificial Sequence
  Description of Artificial Sequence: Synthetic oligonucleotide
ugucaccaggugcgauggc

SEQ ID NO: 2508422 - RNA, 19 nt, Artificial Sequence
  Description of Artificial Sequence: Synthetic oligonucleotide
guggcagcugugugagagc

SEQ ID NO: 2508423 - RNA, 19 nt, Artificial Sequence
  Description of Artificial Sequence: Synthetic oligonucleotide
ggauaccagacagugaugu

SEQ ID NO: 2508424 - RNA, 19 nt, Artificial Sequence
  Description of Artificial Sequence: Synthetic oligonucleotide
auggugcuuugcuggcaug

SEQ ID NO: 2508425 - RNA, 19 nt, Artificial Sequence
  Description of Artificial Sequence: Synthetic oligonucleotide
acguugggacaacuggaua

SEQ ID NO: 2508426 - RNA, 19 nt, Artificial Sequence
  Description of Artificial Sequence: Synthetic oligonucleotide
ggacaacuggauaccagac

SEQ ID NO: 2508427 - RNA, 19 nt, Artificial Sequence
  Description of Artificial Sequence: Synthetic oligonucleotide
ugcauccgccaugucuuca

SEQ ID NO: 2508428 - RNA, 19 nt, Artificial Sequence
  Description of Artificial Sequence: Synthetic oligonucleotide
ugcaggugaacaggugcau

SEQ ID NO: 2508429 - RNA, 19 nt, Artificial Sequence
  Description of Artificial Sequence: Synthetic oligonucleotide
caccgucagcuucugugug

SEQ ID NO: 2508430 - RNA, 19 nt, Artificial Sequence
  Description of Artificial Sequence: Synthetic oligonucleotide
aggugcgauggcagugcgc

SEQ ID NO: 2508431 - RNA, 19 nt, Artificial Sequence
  Description of Artificial Sequence: Synthetic oligonucleotide
cugcagcguccccuggucc

SEQ ID NO: 2508432 - RNA, 19 nt, Artificial Sequence
  Description of Artificial Sequence: Synthetic oligonucleotide
ggaaaguccccagcaugag

SEQ ID NO: 2508433 - RNA, 19 nt, Artificial Sequence
  Description of Artificial Sequence: Synthetic oligonucleotide
cgaagagcacagccaaugg

SEQ ID NO: 2508434 - RNA, 19 nt, Artificial Sequence
  Description of Artificial Sequence: Synthetic oligonucleotide
ggcaacgccucagaggcac

SEQ ID NO: 2508435 - RNA, 19 nt, Artificial Sequence
  Description of Artificial Sequence: Synthetic oligonucleotide
cagaggcaccgugagcaag

SEQ ID NO: 2508436 - RNA, 19 nt, Artificial Sequence
  Description of Artificial Sequence: Synthetic oligonucleotide
agcccuguaggcaccguca

SEQ ID NO: 2508437 - RNA, 19 nt, Artificial Sequence
  Description of Artificial Sequence: Synthetic oligonucleotide
aacgccucagaggcaccgu

SEQ ID NO: 2508438 - RNA, 19 nt, Artificial Sequence
  Description of Artificial Sequence: Synthetic oligonucleotide
guguguaggugucugugau

SEQ ID NO: 2508439 - RNA, 19 nt, Artificial Sequence
  Description of Artificial Sequence: Synthetic oligonucleotide
auccccaaugaugcgucga

SEQ ID NO: 2508440 - RNA, 19 nt, Artificial Sequence
  Description of Artificial Sequence: Synthetic oligonucleotide
ccgaagagcacagccaaug

SEQ ID NO: 2508441 - RNA, 19 nt, Artificial Sequence
  Description of Artificial Sequence: Synthetic oligonucleotide
cacguagggcugcucagga

SEQ ID NO: 2508442 - RNA, 19 nt, Artificial Sequence
  Description of Artificial Sequence: Synthetic oligonucleotide
gccaaugggauccggcgca

SEQ ID NO: 2508443 - RNA, 19 nt, Artificial Sequence
  Description of Artificial Sequence: Synthetic oligonucleotide
agggcugcucaggauggug

SEQ ID NO: 2508444 - RNA, 19 nt, Artificial Sequence
  Description of Artificial Sequence: Synthetic oligonucleotide
agcgccugcagcguccccu

SEQ ID NO: 2508445 - RNA, 19 nt, Artificial Sequence
  Description of Artificial Sequence: Synthetic oligonucleotide
acuugaccacccagagaag

SEQ ID NO: 2508446 - RNA, 19 nt, Artificial Sequence
  Description of Artificial Sequence: Synthetic oligonucleotide
caccuuggucacguagggc

SEQ ID NO: 2508447 - RNA, 19 nt, Artificial Sequence
  Description of Artificial Sequence: Synthetic oligonucleotide
aaguuuggcuccgcaucuu

SEQ ID NO: 2508448 - RNA, 19 nt, Artificial Sequence
  Description of Artificial Sequence: Synthetic oligonucleotide
ugaggccgccguugacuug

SEQ ID NO: 2508449 - RNA, 19 nt, Artificial Sequence
  Description of Artificial Sequence: Synthetic oligonucleotide
cgaaccuccuggaucuggg

SEQ ID NO: 2508450 - RNA, 19 nt, Artificial Sequence
  Description of Artificial Sequence: Synthetic oligonucleotide
agagcuguauugggcuggu

SEQ ID NO: 2508451 - RNA, 19 nt, Artificial Sequence
  Description of Artificial Sequence: Synthetic oligonucleotide
agaaggcaaugaggaaagu

SEQ ID NO: 2508452 - RNA, 19 nt, Artificial Sequence
  Description of Artificial Sequence: Synthetic oligonucleotide
gacgauagacaggcccaca

SEQ ID NO: 2508453 - RNA, 19 nt, Artificial Sequence
  Description of Artificial Sequence: Synthetic oligonucleotide
uccugaacuugcgcaggaa

SEQ ID NO: 2508454 - RNA, 19 nt, Artificial Sequence
  Description of Artificial Sequence: Synthetic oligonucleotide
ccccaugacgauagacagg

SEQ ID NO: 2508455 - RNA, 19 nt, Artificial Sequence
  Description of Artificial Sequence: Synthetic oligonucleotide
auccggcgcagcacagccc

SEQ ID NO: 2508456 - RNA, 19 nt, Artificial Sequence
  Description of Artificial Sequence: Synthetic oligonucleotide
gcgcaugacggucaaugca

SEQ ID NO: 2508457 - RNA, 19 nt, Artificial Sequence
  Description of Artificial Sequence: Synthetic oligonucleotide
agccggggcagaaggcaac

SEQ ID NO: 2508458 - RNA, 19 nt, Artificial Sequence
  Description of Artificial Sequence: Synthetic oligonucleotide
gcuccgcaucuucagaguc

SEQ ID NO: 2508459 - RNA, 19 nt, Artificial Sequence
  Description of Artificial Sequence: Synthetic oligonucleotide
cagcucacuuguacucguc

SEQ ID NO: 2508460 - RNA, 19 nt, Artificial Sequence
  Description of Artificial Sequence: Synthetic oligonucleotide
gaacaggugcauccgccau

SEQ ID NO: 2508461 - RNA, 19 nt, Artificial Sequence
  Description of Artificial Sequence: Synthetic oligonucleotide
gacguugggacaacuggau

SEQ ID NO: 2508462 - RNA, 19 nt, Artificial Sequence
  Description of Artificial Sequence: Synthetic oligonucleotide
gcauccgccaugucuucac

SEQ ID NO: 2508463 - RNA, 19 nt, Artificial Sequence
  Description of Artificial Sequence: Synthetic oligonucleotide
agcggcuguuccugaacuu

SEQ ID NO: 2508464 - RNA, 19 nt, Artificial Sequence
  Description of Artificial Sequence: Synthetic oligonucleotide
acccgcugcucccgaaccu

SEQ ID NO: 2508465 - RNA, 19 nt, Artificial Sequence
  Description of Artificial Sequence: Synthetic oligonucleotide
gcaugaggaugagggacag

SEQ ID NO: 2508466 - RNA, 19 nt, Artificial Sequence
  Description of Artificial Sequence: Synthetic oligonucleotide
acguagggcugcucaggau

SEQ ID NO: 2508467 - RNA, 19 nt, Artificial Sequence
  Description of Artificial Sequence: Synthetic oligonucleotide
ucguccuggccauccucau

SEQ ID NO: 2508468 - RNA, 19 nt, Artificial Sequence
  Description of Artificial Sequence: Synthetic oligonucleotide
uuggucacguagggcugcu

SEQ ID NO: 2508469 - RNA, 19 nt, Artificial Sequence
  Description of Artificial Sequence: Synthetic oligonucleotide
ggaagagccggggcagaag

SEQ ID NO: 2508470 - RNA, 19 nt, Artificial Sequence
  Description of Artificial Sequence: Synthetic oligonucleotide
caaugggauccggcgcagc

SEQ ID NO: 2508471 - RNA, 19 nt, Artificial Sequence
  Description of Artificial Sequence: Synthetic oligonucleotide
cgauagacaggcccacaag

SEQ ID NO: 2508472 - RNA, 19 nt, Artificial Sequence
  Description of Artificial Sequence: Synthetic oligonucleotide
cguugacuugaccacccag

SEQ ID NO: 2508473 - RNA, 19 nt, Artificial Sequence
  Description of Artificial Sequence: Synthetic oligonucleotide
ccuuggucacguagggcug

SEQ ID NO: 2508474 - RNA, 19 nt, Artificial Sequence
  Description of Artificial Sequence: Synthetic oligonucleotide
aguccagcgccugcagcgu

SEQ ID NO: 2508475 - RNA, 19 nt, Artificial Sequence
  Description of Artificial Sequence: Synthetic oligonucleotide
guaggcaccgucagcuucu

SEQ ID NO: 2508476 - RNA, 19 nt, Artificial Sequence
  Description of Artificial Sequence: Synthetic oligonucleotide
gcccuguaggcaccgucag

SEQ ID NO: 2508477 - RNA, 19 nt, Artificial Sequence
  Description of Artificial Sequence: Synthetic oligonucleotide
ccaggugcgauggcagugc

SEQ ID NO: 2508478 - RNA, 19 nt, Artificial Sequence
  Description of Artificial Sequence: Synthetic oligonucleotide
caacuggauaccagacagu

SEQ ID NO: 2508479 - RNA, 19 nt, Artificial Sequence
  Description of Artificial Sequence: Synthetic oligonucleotide
ccaugucuucaccuugguc

SEQ ID NO: 2508480 - RNA, 19 nt, Artificial Sequence
  Description of Artificial Sequence: Synthetic oligonucleotide
cggucaaugcauugacaug

SEQ ID NO: 2508481 - RNA, 19 nt, Artificial Sequence
  Description of Artificial Sequence: Synthetic oligonucleotide
cccagagaagagcaaugca

SEQ ID NO: 2508482 - RNA, 19 nt, Artificial Sequence
  Description of Artificial Sequence: Synthetic oligonucleotide
caaugaugcgucgagccuu

SEQ ID NO: 2508483 - RNA, 19 nt, Artificial Sequence
  Description of Artificial Sequence: Synthetic oligonucleotide
ccgccguugacuugaccac

SEQ ID NO: 2508484 - RNA, 19 nt, Artificial Sequence
  Description of Artificial Sequence: Synthetic oligonucleotide
gccagugaggccgccguug

SEQ ID NO: 2508485 - RNA, 19 nt, Artificial Sequence
  Description of Artificial Sequence: Synthetic oligonucleotide
gcucacuuguacucguccu

SEQ ID NO: 2508486 - RNA, 19 nt, Artificial Sequence
  Description of Artificial Sequence: Synthetic oligonucleotide
ggugcauccgccaugucuu

SEQ ID NO: 2508487 - RNA, 19 nt, Artificial Sequence
  Description of Artificial Sequence: Synthetic oligonucleotide
gugcauccgccaugucuuc

SEQ ID NO: 2508488 - RNA, 19 nt, Artificial Sequence
  Description of Artificial Sequence: Synthetic oligonucleotide
guaguccaccaggaccauc

SEQ ID NO: 2508489 - RNA, 19 nt, Artificial Sequence
  Description of Artificial Sequence: Synthetic oligonucleotide
cagugaggccgccguugac

SEQ ID NO: 2508490 - RNA, 19 nt, Artificial Sequence
  Description of Artificial Sequence: Synthetic oligonucleotide
ccaagauggaaaugggaau

SEQ ID NO: 2508491 - RNA, 19 nt, Artificial Sequence
  Description of Artificial Sequence: Synthetic oligonucleotide
gcgauggcagugcgcauga

SEQ ID NO: 2508492 - RNA, 19 nt, Artificial Sequence
  Description of Artificial Sequence: Synthetic oligonucleotide
ccuguaggcaccgucagcu

SEQ ID NO: 2508493 - RNA, 19 nt, Artificial Sequence
  Description of Artificial Sequence: Synthetic oligonucleotide
ccgaaccuccuggaucugg

SEQ ID NO: 2508494 - RNA, 19 nt, Artificial Sequence
  Description of Artificial Sequence: Synthetic oligonucleotide
gcaggugaacaggugcauc

SEQ ID NO: 2508495 - RNA, 19 nt, Artificial Sequence
  Description of Artificial Sequence: Synthetic oligonucleotide
agcacuccggugacccgcu

SEQ ID NO: 2508496 - RNA, 19 nt, Artificial Sequence
  Description of Artificial Sequence: Synthetic oligonucleotide
gagccggggcagaaggcaa

SEQ ID NO: 2508497 - RNA, 19 nt, Artificial Sequence
  Description of Artificial Sequence: Synthetic oligonucleotide
accacccagagaagagcaa

SEQ ID NO: 2508498 - RNA, 19 nt, Artificial Sequence
  Description of Artificial Sequence: Synthetic oligonucleotide
cagcugugugagagcccug

SEQ ID NO: 2508499 - RNA, 19 nt, Artificial Sequence
  Description of Artificial Sequence: Synthetic oligonucleotide
ggauccggcgcagcacagc

SEQ ID NO: 2508500 - RNA, 19 nt, Artificial Sequence
  Description of Artificial Sequence: Synthetic oligonucleotide
cagcguccccugguccugg

SEQ ID NO: 2508501 - RNA, 19 nt, Artificial Sequence
  Description of Artificial Sequence: Synthetic oligonucleotide
ccgccaugucuucaccuug

SEQ ID NO: 2508502 - RNA, 19 nt, Artificial Sequence
  Description of Artificial Sequence: Synthetic oligonucleotide
gcaccgucagcuucugugu

SEQ ID NO: 2508503 - RNA, 19 nt, Artificial Sequence
  Description of Artificial Sequence: Synthetic oligonucleotide
cccuguaggcaccgucagc

SEQ ID NO: 2508504 - RNA, 19 nt, Artificial Sequence
  Description of Artificial Sequence: Synthetic oligonucleotide
ccugcagcguccccugguc

SEQ ID NO: 2508505 - RNA, 19 nt, Artificial Sequence
  Description of Artificial Sequence: Synthetic oligonucleotide
guccagcgccugcagcguc

SEQ ID NO: 2508506 - RNA, 19 nt, Artificial Sequence
  Description of Artificial Sequence: Synthetic oligonucleotide
gugaggccgccguugacuu

SEQ ID NO: 2508507 - RNA, 19 nt, Artificial Sequence
  Description of Artificial Sequence: Synthetic oligonucleotide
agcguccccugguccugga

SEQ ID NO: 2508508 - RNA, 19 nt, Artificial Sequence
  Description of Artificial Sequence: Synthetic oligonucleotide
ccggugacccgcugcuccc

SEQ ID NO: 2508509 - RNA, 19 nt, Artificial Sequence
  Description of Artificial Sequence: Synthetic oligonucleotide
ccccaaugaugcgucgagc

SEQ ID NO: 2508510 - RNA, 19 nt, Artificial Sequence
  Description of Artificial Sequence: Synthetic oligonucleotide
ggaccaucaccaagaugga

SEQ ID NO: 2508511 - RNA, 19 nt, Artificial Sequence
  Description of Artificial Sequence: Synthetic oligonucleotide
ccaucaccaagauggaaau

SEQ ID NO: 2508512 - RNA, 19 nt, Artificial Sequence
  Description of Artificial Sequence: Synthetic oligonucleotide
gggacagcagagcuguauu

SEQ ID NO: 2508513 - RNA, 19 nt, Artificial Sequence
  Description of Artificial Sequence: Synthetic oligonucleotide
cuguauugggcugguuccu

SEQ ID NO: 2508514 - RNA, 19 nt, Artificial Sequence
  Description of Artificial Sequence: Synthetic oligonucleotide
uggucacguagggcugcuc

SEQ ID NO: 2508515 - RNA, 19 nt, Artificial Sequence
  Description of Artificial Sequence: Synthetic oligonucleotide
gcagugcgcaugacgguca

SEQ ID NO: 2508516 - RNA, 19 nt, Artificial Sequence
  Description of Artificial Sequence: Synthetic oligonucleotide
ggcagcugugugagagccc

SEQ ID NO: 2508517 - RNA, 19 nt, Artificial Sequence
  Description of Artificial Sequence: Synthetic oligonucleotide
agagcccuguaggcaccgu

SEQ ID NO: 2508518 - RNA, 19 nt, Artificial Sequence
  Description of Artificial Sequence: Synthetic oligonucleotide
gcgcaggaagaaggcaaug

SEQ ID NO: 2508519 - RNA, 19 nt, Artificial Sequence
  Description of Artificial Sequence: Synthetic oligonucleotide
agugcgcaugacggucaau

SEQ ID NO: 2508520 - RNA, 19 nt, Artificial Sequence
  Description of Artificial Sequence: Synthetic oligonucleotide
ccaaugggauccggcgcag

SEQ ID NO: 2508521 - RNA, 19 nt, Artificial Sequence
  Description of Artificial Sequence: Synthetic oligonucleotide
ccaaugaugcgucgagccu

SEQ ID NO: 2508522 - RNA, 19 nt, Artificial Sequence
  Description of Artificial Sequence: Synthetic oligonucleotide
ggugacccgcugcucccga

SEQ ID NO: 2508523 - RNA, 19 nt, Artificial Sequence
  Description of Artificial Sequence: Synthetic oligonucleotide
gggauccggcgcagcacag

SEQ ID NO: 2508524 - RNA, 19 nt, Artificial Sequence
  Description of Artificial Sequence: Synthetic oligonucleotide
ggcuccgcaucuucagagu

SEQ ID NO: 2508525 - RNA, 19 nt, Artificial Sequence
  Description of Artificial Sequence: Synthetic oligonucleotide
cuucuguguguaggugucu

SEQ ID NO: 2508526 - RNA, 19 nt, Artificial Sequence
  Description of Artificial Sequence: Synthetic oligonucleotide
cgcaugacggucaaugcau

SEQ ID NO: 2508527 - RNA, 19 nt, Artificial Sequence
  Description of Artificial Sequence: Synthetic oligonucleotide
cugcucaggauggugcuuu

SEQ ID NO: 2508528 - RNA, 19 nt, Artificial Sequence
  Description of Artificial Sequence: Synthetic oligonucleotide
cagugcgcaugacggucaa

SEQ ID NO: 2508529 - RNA, 19 nt, Artificial Sequence
  Description of Artificial Sequence: Synthetic oligonucleotide
gugacccgcugcucccgaa

SEQ ID NO: 2508530 - RNA, 19 nt, Artificial Sequence
  Description of Artificial Sequence: Synthetic oligonucleotide
gcggacaguggcagcugug

SEQ ID NO: 2508531 - RNA, 19 nt, Artificial Sequence
  Description of Artificial Sequence: Synthetic oligonucleotide
aggccgccguugacuugac

SEQ ID NO: 2508532 - RNA, 19 nt, Artificial Sequence
  Description of Artificial Sequence: Synthetic oligonucleotide
gcagcguccccugguccug

SEQ ID NO: 2508533 - RNA, 19 nt, Artificial Sequence
  Description of Artificial Sequence: Synthetic oligonucleotide
aggcaacgccucagaggca

SEQ ID NO: 2508534 - RNA, 19 nt, Artificial Sequence
  Description of Artificial Sequence: Synthetic oligonucleotide
cgccguugacuugaccacc

SEQ ID NO: 2508535 - RNA, 19 nt, Artificial Sequence
  Description of Artificial Sequence: Synthetic oligonucleotide
cuccggugacccgcugcuc

SEQ ID NO: 2508536 - RNA, 19 nt, Artificial Sequence
  Description of Artificial Sequence: Synthetic oligonucleotide
caggugcauccgccauguc

SEQ ID NO: 2508537 - RNA, 19 nt, Artificial Sequence
  Description of Artificial Sequence: Synthetic oligonucleotide
gcugugugagagcccugua

SEQ ID NO: 2508538 - RNA, 19 nt, Artificial Sequence
  Description of Artificial Sequence: Synthetic oligonucleotide
ggccgccguugacuugacc

SEQ ID NO: 2508539 - RNA, 19 nt, Artificial Sequence
  Description of Artificial Sequence: Synthetic oligonucleotide
gcaacgccucagaggcacc

SEQ ID NO: 2508540 - RNA, 19 nt, Artificial Sequence
  Description of Artificial Sequence: Synthetic oligonucleotide
caguggcagcugugugaga

SEQ ID NO: 2508541 - RNA, 19 nt, Artificial Sequence
  Description of Artificial Sequence: Synthetic oligonucleotide
cagcgccugcagcgucccc

SEQ ID NO: 2508542 - RNA, 19 nt, Artificial Sequence
  Description of Artificial Sequence: Synthetic oligonucleotide
ggcuugucaccaggugcga

SEQ ID NO: 2508543 - RNA, 19 nt, Artificial Sequence
  Description of Artificial Sequence: Synthetic oligonucleotide
gcaaugcagcccagcugga

SEQ ID NO: 2508544 - RNA, 19 nt, Artificial Sequence
  Description of Artificial Sequence: Synthetic oligonucleotide
ccagcgccugcagcguccc

SEQ ID NO: 2508545 - RNA, 19 nt, Artificial Sequence
  Description of Artificial Sequence: Synthetic oligonucleotide
gcacuccggugacccgcug

SEQ ID NO: 2508546 - RNA, 19 nt, Artificial Sequence
  Description of Artificial Sequence: Synthetic oligonucleotide
cgccucagaggcaccguga

SEQ ID NO: 2508547 - RNA, 19 nt, Artificial Sequence
  Description of Artificial Sequence: Synthetic oligonucleotide
ccacccagagaagagcaau

SEQ ID NO: 2508548 - RNA, 19 nt, Artificial Sequence
  Description of Artificial Sequence: Synthetic oligonucleotide
gugcgauggcagugcgcau

SEQ ID NO: 2508549 - RNA, 19 nt, Artificial Sequence
  Description of Artificial Sequence: Synthetic oligonucleotide
ccgucagcuucugugugua

SEQ ID NO: 2508550 - RNA, 19 nt, Artificial Sequence
  Description of Artificial Sequence: Synthetic oligonucleotide
ggguaacagagcggacagu

SEQ ID NO: 2508551 - RNA, 19 nt, Artificial Sequence
  Description of Artificial Sequence: Synthetic oligonucleotide
ccgugagcaagagcaggaa

SEQ ID NO: 2508552 - RNA, 19 nt, Artificial Sequence
  Description of Artificial Sequence: Synthetic oligonucleotide
gcaugacggucaaugcauu

SEQ ID NO: 2508553 - RNA, 19 nt, Artificial Sequence
  Description of Artificial Sequence: Synthetic oligonucleotide
cggugacccgcugcucccg

SEQ ID NO: 2508554 - RNA, 19 nt, Artificial Sequence
  Description of Artificial Sequence: Synthetic oligonucleotide
ccaggaccaucaccaagau

SEQ ID NO: 2508555 - RNA, 19 nt, Artificial Sequence
  Description of Artificial Sequence: Synthetic oligonucleotide
gcguccccugguccuggaa

SEQ ID NO: 2508556 - RNA, 19 nt, Artificial Sequence
  Description of Artificial Sequence: Synthetic oligonucleotide
gagcuguauugggcugguu

SEQ ID NO: 2508557 - RNA, 19 nt, Artificial Sequence
  Description of Artificial Sequence: Synthetic oligonucleotide
cccgaaccuccuggaucug

SEQ ID NO: 2508558 - RNA, 19 nt, Artificial Sequence
  Description of Artificial Sequence: Synthetic oligonucleotide
cggacaguggcagcugugu

SEQ ID NO: 2508559 - RNA, 19 nt, Artificial Sequence
  Description of Artificial Sequence: Synthetic oligonucleotide
gcugcucaggauggugcuu

SEQ ID NO: 2508560 - RNA, 19 nt, Artificial Sequence
  Description of Artificial Sequence: Synthetic oligonucleotide
cgauggcagugcgcaugac

SEQ ID NO: 2508561 - RNA, 19 nt, Artificial Sequence
  Description of Artificial Sequence: Synthetic oligonucleotide
ggccagugaggccgccguu

SEQ ID NO: 2508562 - RNA, 19 nt, Artificial Sequence
  Description of Artificial Sequence: Synthetic oligonucleotide
uuaugcaucacguacauca

SEQ ID NO: 2508563 - RNA, 19 nt, Artificial Sequence
  Description of Artificial Sequence: Synthetic oligonucleotide
acaauuaccauucuugaag

SEQ ID NO: 2508564 - RNA, 19 nt, Artificial Sequence
  Description of Artificial Sequence: Synthetic oligonucleotide
uucacaauuaccauucuug

SEQ ID NO: 2508565 - RNA, 19 nt, Artificial Sequence
  Description of Artificial Sequence: Synthetic oligonucleotide
gaagucacaauacugguag

SEQ ID NO: 2508566 - RNA, 19 nt, Artificial Sequence
  Description of Artificial Sequence: Synthetic oligonucleotide
aauaaggcaaggcccauuc

SEQ ID NO: 2508567 - RNA, 19 nt, Artificial Sequence
  Description of Artificial Sequence: Synthetic oligonucleotide
ugugugguaagucucacag

SEQ ID NO: 2508568 - RNA, 19 nt, Artificial Sequence
  Description of Artificial Sequence: Synthetic oligonucleotide
uccauguacuguaucaugg

SEQ ID NO: 2508569 - RNA, 19 nt, Artificial Sequence
  Description of Artificial Sequence: Synthetic oligonucleotide
agaaaacuacuguaggaac

SEQ ID NO: 2508570 - RNA, 19 nt, Artificial Sequence
  Description of Artificial Sequence: Synthetic oligonucleotide
ugugauggggucaggaggg

SEQ ID NO: 2508571 - RNA, 19 nt, Artificial Sequence
  Description of Artificial Sequence: Synthetic oligonucleotide
acagcugggaaccagcugg

SEQ ID NO: 2508572 - RNA, 19 nt, Artificial Sequence
  Description of Artificial Sequence: Synthetic oligonucleotide
ugugguaagucucacaguc

SEQ ID NO: 2508573 - RNA, 19 nt, Artificial Sequence
  Description of Artificial Sequence: Synthetic oligonucleotide
aaaacuacuguaggaacuc

SEQ ID NO: 2508574 - RNA, 19 nt, Artificial Sequence
  Description of Artificial Sequence: Synthetic oligonucleotide
aauacugguagcggguacc

SEQ ID NO: 2508575 - RNA, 19 nt, Artificial Sequence
  Description of Artificial Sequence: Synthetic oligonucleotide
acuguaucaugguaucugc

SEQ ID NO: 2508576 - RNA, 19 nt, Artificial Sequence
  Description of Artificial Sequence: Synthetic oligonucleotide
aauuaccauucuugaagac

SEQ ID NO: 2508577 - RNA, 19 nt, Artificial Sequence
  Description of Artificial Sequence: Synthetic oligonucleotide
aggaggggaguccagagcc

SEQ ID NO: 2508578 - RNA, 19 nt, Artificial Sequence
  Description of Artificial Sequence: Synthetic oligonucleotide
acuguaggaacucaagcag

SEQ ID NO: 2508579 - RNA, 19 nt, Artificial Sequence
  Description of Artificial Sequence: Synthetic oligonucleotide
uuaccauucuugaagacaa

SEQ ID NO: 2508580 - RNA, 19 nt, Artificial Sequence
  Description of Artificial Sequence: Synthetic oligonucleotide
acaagggccauacuccacc

SEQ ID NO: 2508581 - RNA, 19 nt, Artificial Sequence
  Description of Artificial Sequence: Synthetic oligonucleotide
ugucuauuuccaaauacgu

SEQ ID NO: 2508582 - RNA, 19 nt, Artificial Sequence
  Description of Artificial Sequence: Synthetic oligonucleotide
aagcccuugagcuucacca

SEQ ID NO: 2508583 - RNA, 19 nt, Artificial Sequence
  Description of Artificial Sequence: Synthetic oligonucleotide
agagccccagaacacaugc

SEQ ID NO: 2508584 - RNA, 19 nt, Artificial Sequence
  Description of Artificial Sequence: Synthetic oligonucleotide
uguaucaugguaucugcug

SEQ ID NO: 2508585 - RNA, 19 nt, Artificial Sequence
  Description of Artificial Sequence: Synthetic oligonucleotide
uuuccaaauacgugugggg

SEQ ID NO: 2508586 - RNA, 19 nt, Artificial Sequence
  Description of Artificial Sequence: Synthetic oligonucleotide
uacuguaggaacucaagca

SEQ ID NO: 2508587 - RNA, 19 nt, Artificial Sequence
  Description of Artificial Sequence: Synthetic oligonucleotide
ucacaauacugguagcggg

SEQ ID NO: 2508588 - RNA, 19 nt, Artificial Sequence
  Description of Artificial Sequence: Synthetic oligonucleotide
uccaguuaaggcaugagua

SEQ ID NO: 2508589 - RNA, 19 nt, Artificial Sequence
  Description of Artificial Sequence: Synthetic oligonucleotide
guaucaugguaucugcugg

SEQ ID NO: 2508590 - RNA, 19 nt, Artificial Sequence
  Description of Artificial Sequence: Synthetic oligonucleotide
acuagcgaauuccagccac

SEQ ID NO: 2508591 - RNA, 19 nt, Artificial Sequence
  Description of Artificial Sequence: Synthetic oligonucleotide
ucacuagcgaauuccagcc

SEQ ID NO: 2508592 - RNA, 19 nt, Artificial Sequence
  Description of Artificial Sequence: Synthetic oligonucleotide
aaagcccuugagcuucacc

SEQ ID NO: 2508593 - RNA, 19 nt, Artificial Sequence
  Description of Artificial Sequence: Synthetic oligonucleotide
aacucaagcaggaggcucc

SEQ ID NO: 2508594 - RNA, 19 nt, Artificial Sequence
  Description of Artificial Sequence: Synthetic oligonucleotide
ugcaucacguacaucagcu

SEQ ID NO: 2508595 - RNA, 19 nt, Artificial Sequence
  Description of Artificial Sequence: Synthetic oligonucleotide
acguacaucagcuucccag

SEQ ID NO: 2508596 - RNA, 19 nt, Artificial Sequence
  Description of Artificial Sequence: Synthetic oligonucleotide
aagaguuccauguacugua

SEQ ID NO: 2508597 - RNA, 19 nt, Artificial Sequence
  Description of Artificial Sequence: Synthetic oligonucleotide
uguuccuuguuucucugcc

SEQ ID NO: 2508598 - RNA, 19 nt, Artificial Sequence
  Description of Artificial Sequence: Synthetic oligonucleotide
acaugcuacagcugggaac

SEQ ID NO: 2508599 - RNA, 19 nt, Artificial Sequence
  Description of Artificial Sequence: Synthetic oligonucleotide
aggaacucaagcaggaggc

SEQ ID NO: 2508600 - RNA, 19 nt, Artificial Sequence
  Description of Artificial Sequence: Synthetic oligonucleotide
ugguaagucucacagucca

SEQ ID NO: 2508601 - RNA, 19 nt, Artificial Sequence
  Description of Artificial Sequence: Synthetic oligonucleotide
aagucacaauacugguagc

SEQ ID NO: 2508602 - RNA, 19 nt, Artificial Sequence
  Description of Artificial Sequence: Synthetic oligonucleotide
aguuccauguacuguauca

SEQ ID NO: 2508603 - RNA, 19 nt, Artificial Sequence
  Description of Artificial Sequence: Synthetic oligonucleotide
uguaggaacucaagcagga

SEQ ID NO: 2508604 - RNA, 19 nt, Artificial Sequence
  Description of Artificial Sequence: Synthetic oligonucleotide
ucacaauuaccauucuuga

SEQ ID NO: 2508605 - RNA, 19 nt, Artificial Sequence
  Description of Artificial Sequence: Synthetic oligonucleotide
ucugcuggcccguacacag

SEQ ID NO: 2508606 - RNA, 19 nt, Artificial Sequence
  Description of Artificial Sequence: Synthetic oligonucleotide
cacacaagggccauacucc

SEQ ID NO: 2508607 - RNA, 19 nt, Artificial Sequence
  Description of Artificial Sequence: Synthetic oligonucleotide
augucuauuuccaaauacg

SEQ ID NO: 2508608 - RNA, 19 nt, Artificial Sequence
  Description of Artificial Sequence: Synthetic oligonucleotide
aguccacacaaaauguucc

SEQ ID NO: 2508609 - RNA, 19 nt, Artificial Sequence
  Description of Artificial Sequence: Synthetic oligonucleotide
caugguaucugcuggcccg

SEQ ID NO: 2508610 - RNA, 19 nt, Artificial Sequence
  Description of Artificial Sequence: Synthetic oligonucleotide
agggcaaaacagcucaggg

SEQ ID NO: 2508611 - RNA, 19 nt, Artificial Sequence
  Description of Artificial Sequence: Synthetic oligonucleotide
caugcuacagcugggaacc

SEQ ID NO: 2508612 - RNA, 19 nt, Artificial Sequence
  Description of Artificial Sequence: Synthetic oligonucleotide
uagaaaacuacuguaggaa

SEQ ID NO: 2508613 - RNA, 19 nt, Artificial Sequence
  Description of Artificial Sequence: Synthetic oligonucleotide
cagcaauaaggcaaggccc

SEQ ID NO: 2508614 - RNA, 19 nt, Artificial Sequence
  Description of Artificial Sequence: Synthetic oligonucleotide
acagagaugccacgggcac

SEQ ID NO: 2508615 - RNA, 19 nt, Artificial Sequence
  Description of Artificial Sequence: Synthetic oligonucleotide
gucacuagcgaauuccagc

SEQ ID NO: 2508616 - RNA, 19 nt, Artificial Sequence
  Description of Artificial Sequence: Synthetic oligonucleotide
guugaagaguuccauguac

SEQ ID NO: 2508617 - RNA, 19 nt, Artificial Sequence
  Description of Artificial Sequence: Synthetic oligonucleotide
uaaggcaaggcccauucuc

SEQ ID NO: 2508618 - RNA, 19 nt, Artificial Sequence
  Description of Artificial Sequence: Synthetic oligonucleotide
ucaagcaggaggcuccagc

SEQ ID NO: 2508619 - RNA, 19 nt, Artificial Sequence
  Description of Artificial Sequence: Synthetic oligonucleotide
uaugcaucacguacaucag

SEQ ID NO: 2508620 - RNA, 19 nt, Artificial Sequence
  Description of Artificial Sequence: Synthetic oligonucleotide
augcaucacguacaucagc

SEQ ID NO: 2508621 - RNA, 19 nt, Artificial Sequence
  Description of Artificial Sequence: Synthetic oligonucleotide
cuguaggaacucaagcagg

SEQ ID NO: 2508622 - RNA, 19 nt, Artificial Sequence
  Description of Artificial Sequence: Synthetic oligonucleotide
auuaccauucuugaagaca

SEQ ID NO: 2508623 - RNA, 19 nt, Artificial Sequence
  Description of Artificial Sequence: Synthetic oligonucleotide
ggaguuaugcaucacguac

SEQ ID NO: 2508624 - RNA, 19 nt, Artificial Sequence
  Description of Artificial Sequence: Synthetic oligonucleotide
ucacuagccaccacacaag

SEQ ID NO: 2508625 - RNA, 19 nt, Artificial Sequence
  Description of Artificial Sequence: Synthetic oligonucleotide
aucacguacaucagcuucc

SEQ ID NO: 2508626 - RNA, 19 nt, Artificial Sequence
  Description of Artificial Sequence: Synthetic oligonucleotide
ucggaguuaugcaucacgu

SEQ ID NO: 2508627 - RNA, 19 nt, Artificial Sequence
  Description of Artificial Sequence: Synthetic oligonucleotide
agucucacaguccacacaa

SEQ ID NO: 2508628 - RNA, 19 nt, Artificial Sequence
  Description of Artificial Sequence: Synthetic oligonucleotide
cuugaagacaagccaaauc

SEQ ID NO: 2508629 - RNA, 19 nt, Artificial Sequence
  Description of Artificial Sequence: Synthetic oligonucleotide
aagggcaaaacagcucagg

SEQ ID NO: 2508630 - RNA, 19 nt, Artificial Sequence
  Description of Artificial Sequence: Synthetic oligonucleotide
cuagaaaacuacuguagga

SEQ ID NO: 2508631 - RNA, 19 nt, Artificial Sequence
  Description of Artificial Sequence: Synthetic oligonucleotide
ucucacaguccacacaaaa

SEQ ID NO: 2508632 - RNA, 19 nt, Artificial Sequence
  Description of Artificial Sequence: Synthetic oligonucleotide
cucggaguuaugcaucacg

SEQ ID NO: 2508633 - RNA, 19 nt, Artificial Sequence
  Description of Artificial Sequence: Synthetic oligonucleotide
cauucuugaagacaagcca

SEQ ID NO: 2508634 - RNA, 19 nt, Artificial Sequence
  Description of Artificial Sequence: Synthetic oligonucleotide
uaucaugguaucugcuggc

SEQ ID NO: 2508635 - RNA, 19 nt, Artificial Sequence
  Description of Artificial Sequence: Synthetic oligonucleotide
accuagaaaacuacuguag

SEQ ID NO: 2508636 - RNA, 19 nt, Artificial Sequence
  Description of Artificial Sequence: Synthetic oligonucleotide
aaggacccugcguacagca

SEQ ID NO: 2508637 - RNA, 19 nt, Artificial Sequence
  Description of Artificial Sequence: Synthetic oligonucleotide
uuucucugccccaagcauc

SEQ ID NO: 2508638 - RNA, 19 nt, Artificial Sequence
  Description of Artificial Sequence: Synthetic oligonucleotide
auccaguuaaggcaugagu

SEQ ID NO: 2508639 - RNA, 19 nt, Artificial Sequence
  Description of Artificial Sequence: Synthetic oligonucleotide
aucaugguaucugcuggcc

SEQ ID NO: 2508640 - RNA, 19 nt, Artificial Sequence
  Description of Artificial Sequence: Synthetic oligonucleotide
ucaugguaucugcuggccc

SEQ ID NO: 2508641 - RNA, 19 nt, Artificial Sequence
  Description of Artificial Sequence: Synthetic oligonucleotide
gucacaauacugguagcgg

SEQ ID NO: 2508642 - RNA, 19 nt, Artificial Sequence
  Description of Artificial Sequence: Synthetic oligonucleotide
auacuccaccuccacagag

SEQ ID NO: 2508643 - RNA, 19 nt, Artificial Sequence
  Description of Artificial Sequence: Synthetic oligonucleotide
ccuagaaaacuacuguagg

SEQ ID NO: 2508644 - RNA, 19 nt, Artificial Sequence
  Description of Artificial Sequence: Synthetic oligonucleotide
uguggcuaccuagaaaacu

SEQ ID NO: 2508645 - RNA, 19 nt, Artificial Sequence
  Description of Artificial Sequence: Synthetic oligonucleotide
caauuaccauucuugaaga

SEQ ID NO: 2508646 - RNA, 19 nt, Artificial Sequence
  Description of Artificial Sequence: Synthetic oligonucleotide
aauccaguuaaggcaugag

SEQ ID NO: 2508647 - RNA, 19 nt, Artificial Sequence
  Description of Artificial Sequence: Synthetic oligonucleotide
aggaagucacaauacuggu

SEQ ID NO: 2508648 - RNA, 19 nt, Artificial Sequence
  Description of Artificial Sequence: Synthetic oligonucleotide
caucacguacaucagcuuc

SEQ ID NO: 2508649 - RNA, 19 nt, Artificial Sequence
  Description of Artificial Sequence: Synthetic oligonucleotide
gguguggcuaccuagaaaa

SEQ ID NO: 2508650 - RNA, 19 nt, Artificial Sequence
  Description of Artificial Sequence: Synthetic oligonucleotide
gccaaauccaguuaaggca

SEQ ID NO: 2508651 - RNA, 19 nt, Artificial Sequence
  Description of Artificial Sequence: Synthetic oligonucleotide
auugugacugugcccaccu

SEQ ID NO: 2508652 - RNA, 19 nt, Artificial Sequence
  Description of Artificial Sequence: Synthetic oligonucleotide
agacaagccaaauccaguu

SEQ ID NO: 2508653 - RNA, 19 nt, Artificial Sequence
  Description of Artificial Sequence: Synthetic oligonucleotide
aagucucacaguccacaca

SEQ ID NO: 2508654 - RNA, 19 nt, Artificial Sequence
  Description of Artificial Sequence: Synthetic oligonucleotide
gucacuagccaccacacaa

SEQ ID NO: 2508655 - RNA, 19 nt, Artificial Sequence
  Description of Artificial Sequence: Synthetic oligonucleotide
aagacaagccaaauccagu

SEQ ID NO: 2508656 - RNA, 19 nt, Artificial Sequence
  Description of Artificial Sequence: Synthetic oligonucleotide
ugcguacagcaccuguucc

SEQ ID NO: 2508657 - RNA, 19 nt, Artificial Sequence
  Description of Artificial Sequence: Synthetic oligonucleotide
uaagucucacaguccacac

SEQ ID NO: 2508658 - RNA, 19 nt, Artificial Sequence
  Description of Artificial Sequence: Synthetic oligonucleotide
aguuaugcaucacguacau

SEQ ID NO: 2508659 - RNA, 19 nt, Artificial Sequence
  Description of Artificial Sequence: Synthetic oligonucleotide
ugggcaauacccuggugac

SEQ ID NO: 2508660 - RNA, 19 nt, Artificial Sequence
  Description of Artificial Sequence: Synthetic oligonucleotide
aucgaaguuggugucagca

SEQ ID NO: 2508661 - RNA, 19 nt, Artificial Sequence
  Description of Artificial Sequence: Synthetic oligonucleotide
augccacgggcacugggcc

SEQ ID NO: 2508662 - RNA, 19 nt, Artificial Sequence
  Description of Artificial Sequence: Synthetic oligonucleotide
auacugguagcggguaccc

SEQ ID NO: 2508663 - RNA, 19 nt, Artificial Sequence
  Description of Artificial Sequence: Synthetic oligonucleotide
agcgaauuccagccacugg

SEQ ID NO: 2508664 - RNA, 19 nt, Artificial Sequence
  Description of Artificial Sequence: Synthetic oligonucleotide
acuacuguaggaacucaag

SEQ ID NO: 2508665 - RNA, 19 nt, Artificial Sequence
  Description of Artificial Sequence: Synthetic oligonucleotide
caguccacacaaaauguuc

SEQ ID NO: 2508666 - RNA, 19 nt, Artificial Sequence
  Description of Artificial Sequence: Synthetic oligonucleotide
aaauccaguuaaggcauga

SEQ ID NO: 2508667 - RNA, 19 nt, Artificial Sequence
  Description of Artificial Sequence: Synthetic oligonucleotide
uguugaagaguuccaugua

SEQ ID NO: 2508668 - RNA, 19 nt, Artificial Sequence
  Description of Artificial Sequence: Synthetic oligonucleotide
ccauucuugaagacaagcc

SEQ ID NO: 2508669 - RNA, 19 nt, Artificial Sequence
  Description of Artificial Sequence: Synthetic oligonucleotide
uagccaccacacaagggcc

SEQ ID NO: 2508670 - RNA, 19 nt, Artificial Sequence
  Description of Artificial Sequence: Synthetic oligonucleotide
caagccaaauccaguuaag

SEQ ID NO: 2508671 - RNA, 19 nt, Artificial Sequence
  Description of Artificial Sequence: Synthetic oligonucleotide
uggugguguggcuaccuag

SEQ ID NO: 2508672 - RNA, 19 nt, Artificial Sequence
  Description of Artificial Sequence: Synthetic oligonucleotide
uacucggaguuaugcauca

SEQ ID NO: 2508673 - RNA, 19 nt, Artificial Sequence
  Description of Artificial Sequence: Synthetic oligonucleotide
cacuagccaccacacaagg

SEQ ID NO: 2508674 - RNA, 19 nt, Artificial Sequence
  Description of Artificial Sequence: Synthetic oligonucleotide
gauggggucaggaggggag

SEQ ID NO: 2508675 - RNA, 19 nt, Artificial Sequence
  Description of Artificial Sequence: Synthetic oligonucleotide
caugagcacaucgaaguug

SEQ ID NO: 2508676 - RNA, 19 nt, Artificial Sequence
  Description of Artificial Sequence: Synthetic oligonucleotide
auucuugaagacaagccaa

SEQ ID NO: 2508677 - RNA, 19 nt, Artificial Sequence
  Description of Artificial Sequence: Synthetic oligonucleotide
gacugugcccaccuucacc

SEQ ID NO: 2508678 - RNA, 19 nt, Artificial Sequence
  Description of Artificial Sequence: Synthetic oligonucleotide
uacaucagcuucccagccu

SEQ ID NO: 2508679 - RNA, 19 nt, Artificial Sequence
  Description of Artificial Sequence: Synthetic oligonucleotide
gagcacaucgaaguuggug

SEQ ID NO: 2508680 - RNA, 19 nt, Artificial Sequence
  Description of Artificial Sequence: Synthetic oligonucleotide
ugcuggcccguacacagca

SEQ ID NO: 2508681 - RNA, 19 nt, Artificial Sequence
  Description of Artificial Sequence: Synthetic oligonucleotide
gaauuccagccacuggcac

SEQ ID NO: 2508682 - RNA, 19 nt, Artificial Sequence
  Description of Artificial Sequence: Synthetic oligonucleotide
gaaaacuacuguaggaacu

SEQ ID NO: 2508683 - RNA, 19 nt, Artificial Sequence
  Description of Artificial Sequence: Synthetic oligonucleotide
ugcuguuuucggaucuugu

SEQ ID NO: 2508684 - RNA, 19 nt, Artificial Sequence
  Description of Artificial Sequence: Synthetic oligonucleotide
caaucuugcuggcuuuggc

SEQ ID NO: 2508685 - RNA, 19 nt, Artificial Sequence
  Description of Artificial Sequence: Synthetic oligonucleotide
gcagcugccagucacuagc

SEQ ID NO: 2508686 - RNA, 19 nt, Artificial Sequence
  Description of Artificial Sequence: Synthetic oligonucleotide
gaugccacgggcacugggc

SEQ ID NO: 2508687 - RNA, 19 nt, Artificial Sequence
  Description of Artificial Sequence: Synthetic oligonucleotide
agcaauaaggcaaggccca

SEQ ID NO: 2508688 - RNA, 19 nt, Artificial Sequence
  Description of Artificial Sequence: Synthetic oligonucleotide
gaguuaugcaucacguaca

SEQ ID NO: 2508689 - RNA, 19 nt, Artificial Sequence
  Description of Artificial Sequence: Synthetic oligonucleotide
uggugucagcaauaaggca

SEQ ID NO: 2508690 - RNA, 19 nt, Artificial Sequence
  Description of Artificial Sequence: Synthetic oligonucleotide
cagaacacaugcuacagcu

SEQ ID NO: 2508691 - RNA, 19 nt, Artificial Sequence
  Description of Artificial Sequence: Synthetic oligonucleotide
uggcuaccuagaaaacuac

SEQ ID NO: 2508692 - RNA, 19 nt, Artificial Sequence
  Description of Artificial Sequence: Synthetic oligonucleotide
uucaccaggaagucacaau

SEQ ID NO: 2508693 - RNA, 19 nt, Artificial Sequence
  Description of Artificial Sequence: Synthetic oligonucleotide
acacaagggccauacucca

SEQ ID NO: 2508694 - RNA, 19 nt, Artificial Sequence
  Description of Artificial Sequence: Synthetic oligonucleotide
aaacuacuguaggaacuca

SEQ ID NO: 2508695 - RNA, 19 nt, Artificial Sequence
  Description of Artificial Sequence: Synthetic oligonucleotide
ucuucacaauuaccauucu

SEQ ID NO: 2508696 - RNA, 19 nt, Artificial Sequence
  Description of Artificial Sequence: Synthetic oligonucleotide
agagaugccacgggcacug

SEQ ID NO: 2508697 - RNA, 19 nt, Artificial Sequence
  Description of Artificial Sequence: Synthetic oligonucleotide
gcuaccuagaaaacuacug

SEQ ID NO: 2508698 - RNA, 19 nt, Artificial Sequence
  Description of Artificial Sequence: Synthetic oligonucleotide
uaccauucuugaagacaag

SEQ ID NO: 2508699 - RNA, 19 nt, Artificial Sequence
  Description of Artificial Sequence: Synthetic oligonucleotide
guaagucucacaguccaca

SEQ ID NO: 2508700 - RNA, 19 nt, Artificial Sequence
  Description of Artificial Sequence: Synthetic oligonucleotide
caucaugucuauuuccaaa

SEQ ID NO: 2508701 - RNA, 19 nt, Artificial Sequence
  Description of Artificial Sequence: Synthetic oligonucleotide
guacaucagcuucccagcc

SEQ ID NO: 2508702 - RNA, 19 nt, Artificial Sequence
  Description of Artificial Sequence: Synthetic oligonucleotide
uccuccugggcaauacccu

SEQ ID NO: 2508703 - RNA, 19 nt, Artificial Sequence
  Description of Artificial Sequence: Synthetic oligonucleotide
ucgaaguuggugucagcaa

SEQ ID NO: 2508704 - RNA, 19 nt, Artificial Sequence
  Description of Artificial Sequence: Synthetic oligonucleotide
agaugccacgggcacuggg

SEQ ID NO: 2508705 - RNA, 19 nt, Artificial Sequence
  Description of Artificial Sequence: Synthetic oligonucleotide
ccuggugacagcuuagaug

SEQ ID NO: 2508706 - RNA, 19 nt, Artificial Sequence
  Description of Artificial Sequence: Synthetic oligonucleotide
gugucagcaauaaggcaag

SEQ ID NO: 2508707 - RNA, 19 nt, Artificial Sequence
  Description of Artificial Sequence: Synthetic oligonucleotide
ucggaucuuguugaagagu

SEQ ID NO: 2508708 - RNA, 19 nt, Artificial Sequence
  Description of Artificial Sequence: Synthetic oligonucleotide
cuaccuagaaaacuacugu

SEQ ID NO: 2508709 - RNA, 19 nt, Artificial Sequence
  Description of Artificial Sequence: Synthetic oligonucleotide
gaggcagcugugugguaag

SEQ ID NO: 2508710 - RNA, 19 nt, Artificial Sequence
  Description of Artificial Sequence: Synthetic oligonucleotide
uacccuggugacagcuuag

SEQ ID NO: 2508711 - RNA, 19 nt, Artificial Sequence
  Description of Artificial Sequence: Synthetic oligonucleotide
uacacagcaucaugucuau

SEQ ID NO: 2508712 - RNA, 19 nt, Artificial Sequence
  Description of Artificial Sequence: Synthetic oligonucleotide
uggcccguacacagcauca

SEQ ID NO: 2508713 - RNA, 19 nt, Artificial Sequence
  Description of Artificial Sequence: Synthetic oligonucleotide
ugguguggcuaccuagaaa

SEQ ID NO: 2508714 - RNA, 19 nt, Artificial Sequence
  Description of Artificial Sequence: Synthetic oligonucleotide
cuggcuuuggcacucugga

SEQ ID NO: 2508715 - RNA, 19 nt, Artificial Sequence
  Description of Artificial Sequence: Synthetic oligonucleotide
gaacucaagcaggaggcuc

SEQ ID NO: 2508716 - RNA, 19 nt, Artificial Sequence
  Description of Artificial Sequence: Synthetic oligonucleotide
ccacacaaaauguuccuug

SEQ ID NO: 2508717 - RNA, 19 nt, Artificial Sequence
  Description of Artificial Sequence: Synthetic oligonucleotide
aguuaaggcaugaguaaaa

SEQ ID NO: 2508718 - RNA, 19 nt, Artificial Sequence
  Description of Artificial Sequence: Synthetic oligonucleotide
acuagccaccacacaaggg

SEQ ID NO: 2508719 - RNA, 19 nt, Artificial Sequence
  Description of Artificial Sequence: Synthetic oligonucleotide
agggacaaggacccugcgu

SEQ ID NO: 2508720 - RNA, 19 nt, Artificial Sequence
  Description of Artificial Sequence: Synthetic oligonucleotide
acacaaaauguuccuuguu

SEQ ID NO: 2508721 - RNA, 19 nt, Artificial Sequence
  Description of Artificial Sequence: Synthetic oligonucleotide
ugucagcaauaaggcaagg

SEQ ID NO: 2508722 - RNA, 19 nt, Artificial Sequence
  Description of Artificial Sequence: Synthetic oligonucleotide
uccagagccccagaacaca

SEQ ID NO: 2508723 - RNA, 19 nt, Artificial Sequence
  Description of Artificial Sequence: Synthetic oligonucleotide
uagcgaauuccagccacug

SEQ ID NO: 2508724 - RNA, 19 nt, Artificial Sequence
  Description of Artificial Sequence: Synthetic oligonucleotide
uggugacagcuuagauggg

SEQ ID NO: 2508725 - RNA, 19 nt, Artificial Sequence
  Description of Artificial Sequence: Synthetic oligonucleotide
guacacagcaucaugucua

SEQ ID NO: 2508726 - RNA, 19 nt, Artificial Sequence
  Description of Artificial Sequence: Synthetic oligonucleotide
cacaauuaccauucuugaa

SEQ ID NO: 2508727 - RNA, 19 nt, Artificial Sequence
  Description of Artificial Sequence: Synthetic oligonucleotide
cacugggccccauugugac

SEQ ID NO: 2508728 - RNA, 19 nt, Artificial Sequence
  Description of Artificial Sequence: Synthetic oligonucleotide
caauacugguagcggguac

SEQ ID NO: 2508729 - RNA, 19 nt, Artificial Sequence
  Description of Artificial Sequence: Synthetic oligonucleotide
auacccuggugacagcuua

SEQ ID NO: 2508730 - RNA, 19 nt, Artificial Sequence
  Description of Artificial Sequence: Synthetic oligonucleotide
caaauccaguuaaggcaug

SEQ ID NO: 2508731 - RNA, 19 nt, Artificial Sequence
  Description of Artificial Sequence: Synthetic oligonucleotide
ugcuacagcugggaaccag

SEQ ID NO: 2508732 - RNA, 19 nt, Artificial Sequence
  Description of Artificial Sequence: Synthetic oligonucleotide
ccagucacuagcgaauucc

SEQ ID NO: 2508733 - RNA, 19 nt, Artificial Sequence
  Description of Artificial Sequence: Synthetic oligonucleotide
ggacccugcguacagcacc

SEQ ID NO: 2508734 - RNA, 19 nt, Artificial Sequence
  Description of Artificial Sequence: Synthetic oligonucleotide
gaagaguuccauguacugu

SEQ ID NO: 2508735 - RNA, 19 nt, Artificial Sequence
  Description of Artificial Sequence: Synthetic oligonucleotide
agucacuagcgaauuccag

SEQ ID NO: 2508736 - RNA, 19 nt, Artificial Sequence
  Description of Artificial Sequence: Synthetic oligonucleotide
ucucaaucuugcuggcuuu

SEQ ID NO: 2508737 - RNA, 19 nt, Artificial Sequence
  Description of Artificial Sequence: Synthetic oligonucleotide
guaggaacucaagcaggag

SEQ ID NO: 2508738 - RNA, 19 nt, Artificial Sequence
  Description of Artificial Sequence: Synthetic oligonucleotide
cugggccccauugugacug

SEQ ID NO: 2508739 - RNA, 19 nt, Artificial Sequence
  Description of Artificial Sequence: Synthetic oligonucleotide
gacaagccaaauccaguua

SEQ ID NO: 2508740 - RNA, 19 nt, Artificial Sequence
  Description of Artificial Sequence: Synthetic oligonucleotide
cagcugccagucacuagcg

SEQ ID NO: 2508741 - RNA, 19 nt, Artificial Sequence
  Description of Artificial Sequence: Synthetic oligonucleotide
gaguuccauguacuguauc

SEQ ID NO: 2508742 - RNA, 19 nt, Artificial Sequence
  Description of Artificial Sequence: Synthetic oligonucleotide
cugcguacagcaccuguuc

SEQ ID NO: 2508743 - RNA, 19 nt, Artificial Sequence
  Description of Artificial Sequence: Synthetic oligonucleotide
gcagucacuagccaccaca

SEQ ID NO: 2508744 - RNA, 19 nt, Artificial Sequence
  Description of Artificial Sequence: Synthetic oligonucleotide
uccuuguuucucugcccca

SEQ ID NO: 2508745 - RNA, 19 nt, Artificial Sequence
  Description of Artificial Sequence: Synthetic oligonucleotide
cagcugugugguaagucuc

SEQ ID NO: 2508746 - RNA, 19 nt, Artificial Sequence
  Description of Artificial Sequence: Synthetic oligonucleotide
guuccuccugggcaauacc

SEQ ID NO: 2508747 - RNA, 19 nt, Artificial Sequence
  Description of Artificial Sequence: Synthetic oligonucleotide
agucacuagccaccacaca

SEQ ID NO: 2508748 - RNA, 19 nt, Artificial Sequence
  Description of Artificial Sequence: Synthetic oligonucleotide
agaacacaugcuacagcug

SEQ ID NO: 2508749 - RNA, 19 nt, Artificial Sequence
  Description of Artificial Sequence: Synthetic oligonucleotide
gugguaagucucacagucc

SEQ ID NO: 2508750 - RNA, 19 nt, Artificial Sequence
  Description of Artificial Sequence: Synthetic oligonucleotide
cauugugacugugcccacc

SEQ ID NO: 2508751 - RNA, 19 nt, Artificial Sequence
  Description of Artificial Sequence: Synthetic oligonucleotide
guggcuaccuagaaaacua

SEQ ID NO: 2508752 - RNA, 19 nt, Artificial Sequence
  Description of Artificial Sequence: Synthetic oligonucleotide
gggacaaggacccugcgua

SEQ ID NO: 2508753 - RNA, 19 nt, Artificial Sequence
  Description of Artificial Sequence: Synthetic oligonucleotide
caccacacaagggccauac

SEQ ID NO: 2508754 - RNA, 19 nt, Artificial Sequence
  Description of Artificial Sequence: Synthetic oligonucleotide
ggggccagggacaaggacc

SEQ ID NO: 2508755 - RNA, 19 nt, Artificial Sequence
  Description of Artificial Sequence: Synthetic oligonucleotide
guacagcaccuguuccucc

SEQ ID NO: 2508756 - RNA, 19 nt, Artificial Sequence
  Description of Artificial Sequence: Synthetic oligonucleotide
cagcugggaaccagcuggg

SEQ ID NO: 2508757 - RNA, 19 nt, Artificial Sequence
  Description of Artificial Sequence: Synthetic oligonucleotide
cguacaucagcuucccagc

SEQ ID NO: 2508758 - RNA, 19 nt, Artificial Sequence
  Description of Artificial Sequence: Synthetic oligonucleotide
uagcggguaccccgggucu

SEQ ID NO: 2508759 - RNA, 19 nt, Artificial Sequence
  Description of Artificial Sequence: Synthetic oligonucleotide
gaaguuggugucagcaaua

SEQ ID NO: 2508760 - RNA, 19 nt, Artificial Sequence
  Description of Artificial Sequence: Synthetic oligonucleotide
guacucggaguuaugcauc

SEQ ID NO: 2508761 - RNA, 19 nt, Artificial Sequence
  Description of Artificial Sequence: Synthetic oligonucleotide
cuugcugcuguuuucggau

SEQ ID NO: 2508762 - RNA, 19 nt, Artificial Sequence
  Description of Artificial Sequence: Synthetic oligonucleotide
cagucacuagcgaauucca

SEQ ID NO: 2508763 - RNA, 19 nt, Artificial Sequence
  Description of Artificial Sequence: Synthetic oligonucleotide
ugguagcggguaccccggg

SEQ ID NO: 2508764 - RNA, 19 nt, Artificial Sequence
  Description of Artificial Sequence: Synthetic oligonucleotide
cucaaucuugcuggcuuug

SEQ ID NO: 2508765 - RNA, 19 nt, Artificial Sequence
  Description of Artificial Sequence: Synthetic oligonucleotide
gguaccccgggucucaauc

SEQ ID NO: 2508766 - RNA, 19 nt, Artificial Sequence
  Description of Artificial Sequence: Synthetic oligonucleotide
ugacugugcccaccuucac

SEQ ID NO: 2508767 - RNA, 19 nt, Artificial Sequence
  Description of Artificial Sequence: Synthetic oligonucleotide
cacaagggccauacuccac

SEQ ID NO: 2508768 - RNA, 19 nt, Artificial Sequence
  Description of Artificial Sequence: Synthetic oligonucleotide
gacaaggacccugcguaca

SEQ ID NO: 2508769 - RNA, 19 nt, Artificial Sequence
  Description of Artificial Sequence: Synthetic oligonucleotide
caucgaaguuggugucagc

SEQ ID NO: 2508770 - RNA, 19 nt, Artificial Sequence
  Description of Artificial Sequence: Synthetic oligonucleotide
ugauggggucaggagggga

SEQ ID NO: 2508771 - RNA, 19 nt, Artificial Sequence
  Description of Artificial Sequence: Synthetic oligonucleotide
cauucuucacaauuaccau

SEQ ID NO: 2508772 - RNA, 19 nt, Artificial Sequence
  Description of Artificial Sequence: Synthetic oligonucleotide
acaguccacacaaaauguu

SEQ ID NO: 2508773 - RNA, 19 nt, Artificial Sequence
  Description of Artificial Sequence: Synthetic oligonucleotide
agcugugauggggucagga

SEQ ID NO: 2508774 - RNA, 19 nt, Artificial Sequence
  Description of Artificial Sequence: Synthetic oligonucleotide
gggguacucggaguuaugc

SEQ ID NO: 2508775 - RNA, 19 nt, Artificial Sequence
  Description of Artificial Sequence: Synthetic oligonucleotide
cuggcccguacacagcauc

SEQ ID NO: 2508776 - RNA, 19 nt, Artificial Sequence
  Description of Artificial Sequence: Synthetic oligonucleotide
aauacccuggugacagcuu

SEQ ID NO: 2508777 - RNA, 19 nt, Artificial Sequence
  Description of Artificial Sequence: Synthetic oligonucleotide
cacaauacugguagcgggu

SEQ ID NO: 2508778 - RNA, 19 nt, Artificial Sequence
  Description of Artificial Sequence: Synthetic oligonucleotide
acaauacugguagcgggua

SEQ ID NO: 2508779 - RNA, 19 nt, Artificial Sequence
  Description of Artificial Sequence: Synthetic oligonucleotide
agcccuugagcuucaccau

SEQ ID NO: 2508780 - RNA, 19 nt, Artificial Sequence
  Description of Artificial Sequence: Synthetic oligonucleotide
gccccauugugacugugcc

SEQ ID NO: 2508781 - RNA, 19 nt, Artificial Sequence
  Description of Artificial Sequence: Synthetic oligonucleotide
gguacucggaguuaugcau

SEQ ID NO: 2508782 - RNA, 19 nt, Artificial Sequence
  Description of Artificial Sequence: Synthetic oligonucleotide
agcugugugguaagucuca

SEQ ID NO: 2508783 - RNA, 19 nt, Artificial Sequence
  Description of Artificial Sequence: Synthetic oligonucleotide
ugagcacaucgaaguuggu

SEQ ID NO: 2508784 - RNA, 19 nt, Artificial Sequence
  Description of Artificial Sequence: Synthetic oligonucleotide
acucggaguuaugcaucac

SEQ ID NO: 2508785 - RNA, 19 nt, Artificial Sequence
  Description of Artificial Sequence: Synthetic oligonucleotide
ugccacgggcacugggccc

SEQ ID NO: 2508786 - RNA, 19 nt, Artificial Sequence
  Description of Artificial Sequence: Synthetic oligonucleotide
gcuccagcagucacuagcc

SEQ ID NO: 2508787 - RNA, 19 nt, Artificial Sequence
  Description of Artificial Sequence: Synthetic oligonucleotide
cagagccccagaacacaug

SEQ ID NO: 2508788 - RNA, 19 nt, Artificial Sequence
  Description of Artificial Sequence: Synthetic oligonucleotide
ccagggacaaggacccugc

SEQ ID NO: 2508789 - RNA, 19 nt, Artificial Sequence
  Description of Artificial Sequence: Synthetic oligonucleotide
uacugguagcggguacccc

SEQ ID NO: 2508790 - RNA, 19 nt, Artificial Sequence
  Description of Artificial Sequence: Synthetic oligonucleotide
cccauugugacugugccca

SEQ ID NO: 2508791 - RNA, 19 nt, Artificial Sequence
  Description of Artificial Sequence: Synthetic oligonucleotide
ugggaaccagcuggggcca

SEQ ID NO: 2508792 - RNA, 19 nt, Artificial Sequence
  Description of Artificial Sequence: Synthetic oligonucleotide
guccacacaaaauguuccu

SEQ ID NO: 2508793 - RNA, 19 nt, Artificial Sequence
  Description of Artificial Sequence: Synthetic oligonucleotide
uaccccgggucucaaucuu

SEQ ID NO: 2508794 - RNA, 19 nt, Artificial Sequence
  Description of Artificial Sequence: Synthetic oligonucleotide
cugugugguaagucucaca

SEQ ID NO: 2508795 - RNA, 19 nt, Artificial Sequence
  Description of Artificial Sequence: Synthetic oligonucleotide
gcugccagucacuagcgaa

SEQ ID NO: 2508796 - RNA, 19 nt, Artificial Sequence
  Description of Artificial Sequence: Synthetic oligonucleotide
agcugccagucacuagcga

SEQ ID NO: 2508797 - RNA, 19 nt, Artificial Sequence
  Description of Artificial Sequence: Synthetic oligonucleotide
ggguacucggaguuaugca

SEQ ID NO: 2508798 - RNA, 19 nt, Artificial Sequence
  Description of Artificial Sequence: Synthetic oligonucleotide
aggacccugcguacagcac

SEQ ID NO: 2508799 - RNA, 19 nt, Artificial Sequence
  Description of Artificial Sequence: Synthetic oligonucleotide
acugggccccauugugacu

SEQ ID NO: 2508800 - RNA, 19 nt, Artificial Sequence
  Description of Artificial Sequence: Synthetic oligonucleotide
caggguggaggcagcugug

SEQ ID NO: 2508801 - RNA, 19 nt, Artificial Sequence
  Description of Artificial Sequence: Synthetic oligonucleotide
ccgggucucaaucuugcug

SEQ ID NO: 2508802 - RNA, 19 nt, Artificial Sequence
  Description of Artificial Sequence: Synthetic oligonucleotide
gguaucugcuggcccguac

SEQ ID NO: 2508803 - RNA, 19 nt, Artificial Sequence
  Description of Artificial Sequence: Synthetic oligonucleotide
acuggcacuugcugcuguu

SEQ ID NO: 2508804 - RNA, 19 nt, Artificial Sequence
  Description of Artificial Sequence: Synthetic oligonucleotide
guuaugcaucacguacauc

SEQ ID NO: 2508805 - RNA, 19 nt, Artificial Sequence
  Description of Artificial Sequence: Synthetic oligonucleotide
agaguuccauguacuguau

SEQ ID NO: 2508806 - RNA, 19 nt, Artificial Sequence
  Description of Artificial Sequence: Synthetic oligonucleotide
cugcuggcccguacacagc

SEQ ID NO: 2508807 - RNA, 19 nt, Artificial Sequence
  Description of Artificial Sequence: Synthetic oligonucleotide
cacaucgaaguugguguca

SEQ ID NO: 2508808 - RNA, 19 nt, Artificial Sequence
  Description of Artificial Sequence: Synthetic oligonucleotide
ugccagucacuagcgaauu

SEQ ID NO: 2508809 - RNA, 19 nt, Artificial Sequence
  Description of Artificial Sequence: Synthetic oligonucleotide
ggacaaggacccugcguac

SEQ ID NO: 2508810 - RNA, 19 nt, Artificial Sequence
  Description of Artificial Sequence: Synthetic oligonucleotide
cuguaucaugguaucugcu

SEQ ID NO: 2508811 - RNA, 19 nt, Artificial Sequence
  Description of Artificial Sequence: Synthetic oligonucleotide
gucaggaggggaguccaga

SEQ ID NO: 2508812 - RNA, 19 nt, Artificial Sequence
  Description of Artificial Sequence: Synthetic oligonucleotide
aucugcuggcccguacaca

SEQ ID NO: 2508813 - RNA, 19 nt, Artificial Sequence
  Description of Artificial Sequence: Synthetic oligonucleotide
cacaugcuacagcugggaa

SEQ ID NO: 2508814 - RNA, 19 nt, Artificial Sequence
  Description of Artificial Sequence: Synthetic oligonucleotide
gugguguggcuaccuagaa

SEQ ID NO: 2508815 - RNA, 19 nt, Artificial Sequence
  Description of Artificial Sequence: Synthetic oligonucleotide
cugugcccaccuucaccag

SEQ ID NO: 2508816 - RNA, 19 nt, Artificial Sequence
  Description of Artificial Sequence: Synthetic oligonucleotide
cuucacaauuaccauucuu

SEQ ID NO: 2508817 - RNA, 19 nt, Artificial Sequence
  Description of Artificial Sequence: Synthetic oligonucleotide
agcggguaccccgggucuc

SEQ ID NO: 2508818 - RNA, 19 nt, Artificial Sequence
  Description of Artificial Sequence: Synthetic oligonucleotide
cacuagcgaauuccagcca

SEQ ID NO: 2508819 - RNA, 19 nt, Artificial Sequence
  Description of Artificial Sequence: Synthetic oligonucleotide
acccuggugacagcuuaga

SEQ ID NO: 2508820 - RNA, 19 nt, Artificial Sequence
  Description of Artificial Sequence: Synthetic oligonucleotide
gcccguacacagcaucaug

SEQ ID NO: 2508821 - RNA, 19 nt, Artificial Sequence
  Description of Artificial Sequence: Synthetic oligonucleotide
guuccauguacuguaucau

SEQ ID NO: 2508822 - RNA, 19 nt, Artificial Sequence
  Description of Artificial Sequence: Synthetic oligonucleotide
ccuccugggcaauacccug

SEQ ID NO: 2508823 - RNA, 19 nt, Artificial Sequence
  Description of Artificial Sequence: Synthetic oligonucleotide
gcacaucgaaguugguguc

SEQ ID NO: 2508824 - RNA, 19 nt, Artificial Sequence
  Description of Artificial Sequence: Synthetic oligonucleotide
ccguacacagcaucauguc

SEQ ID NO: 2508825 - RNA, 19 nt, Artificial Sequence
  Description of Artificial Sequence: Synthetic oligonucleotide
uugugacugugcccaccuu

SEQ ID NO: 2508826 - RNA, 19 nt, Artificial Sequence
  Description of Artificial Sequence: Synthetic oligonucleotide
gagaugccacgggcacugg

SEQ ID NO: 2508827 - RNA, 19 nt, Artificial Sequence
  Description of Artificial Sequence: Synthetic oligonucleotide
cuagcgaauuccagccacu

SEQ ID NO: 2508828 - RNA, 19 nt, Artificial Sequence
  Description of Artificial Sequence: Synthetic oligonucleotide
gguaagucucacaguccac

SEQ ID NO: 2508829 - RNA, 19 nt, Artificial Sequence
  Description of Artificial Sequence: Synthetic oligonucleotide
caauacccuggugacagcu

SEQ ID NO: 2508830 - RNA, 19 nt, Artificial Sequence
  Description of Artificial Sequence: Synthetic oligonucleotide
ggaggcagcugugugguaa

SEQ ID NO: 2508831 - RNA, 19 nt, Artificial Sequence
  Description of Artificial Sequence: Synthetic oligonucleotide
gugugguaagucucacagu

SEQ ID NO: 2508832 - RNA, 19 nt, Artificial Sequence
  Description of Artificial Sequence: Synthetic oligonucleotide
ccccauugugacugugccc

SEQ ID NO: 2508833 - RNA, 19 nt, Artificial Sequence
  Description of Artificial Sequence: Synthetic oligonucleotide
ccccgggucucaaucuugc

SEQ ID NO: 2508834 - RNA, 19 nt, Artificial Sequence
  Description of Artificial Sequence: Synthetic oligonucleotide
gccauacuccaccuccaca

SEQ ID NO: 2508835 - RNA, 19 nt, Artificial Sequence
  Description of Artificial Sequence: Synthetic oligonucleotide
cugccagucacuagcgaau

SEQ ID NO: 2508836 - RNA, 19 nt, Artificial Sequence
  Description of Artificial Sequence: Synthetic oligonucleotide
ggaucuuguugaagaguuc

SEQ ID NO: 2508837 - RNA, 19 nt, Artificial Sequence
  Description of Artificial Sequence: Synthetic oligonucleotide
guacuguaucaugguaucu

SEQ ID NO: 2508838 - RNA, 19 nt, Artificial Sequence
  Description of Artificial Sequence: Synthetic oligonucleotide
cucaagcaggaggcuccag

SEQ ID NO: 2508839 - RNA, 19 nt, Artificial Sequence
  Description of Artificial Sequence: Synthetic oligonucleotide
ggccccauugugacugugc

SEQ ID NO: 2508840 - RNA, 19 nt, Artificial Sequence
  Description of Artificial Sequence: Synthetic oligonucleotide
gcaauacccuggugacagc

SEQ ID NO: 2508841 - RNA, 19 nt, Artificial Sequence
  Description of Artificial Sequence: Synthetic oligonucleotide
cuccagcagucacuagcca

SEQ ID NO: 2508842 - RNA, 19 nt, Artificial Sequence
  Description of Artificial Sequence: Synthetic oligonucleotide
ggggaguccagagccccag

SEQ ID NO: 2508843 - RNA, 19 nt, Artificial Sequence
  Description of Artificial Sequence: Synthetic oligonucleotide
gcuguuuucggaucuuguu

SEQ ID NO: 2508844 - RNA, 19 nt, Artificial Sequence
  Description of Artificial Sequence: Synthetic oligonucleotide
accccgggucucaaucuug

SEQ ID NO: 2508845 - RNA, 19 nt, Artificial Sequence
  Description of Artificial Sequence: Synthetic oligonucleotide
ggcagcugugugguaaguc

SEQ ID NO: 2508846 - RNA, 19 nt, Artificial Sequence
  Description of Artificial Sequence: Synthetic oligonucleotide
gacccugcguacagcaccu

SEQ ID NO: 2508847 - RNA, 19 nt, Artificial Sequence
  Description of Artificial Sequence: Synthetic oligonucleotide
cccguacacagcaucaugu

SEQ ID NO: 2508848 - RNA, 19 nt, Artificial Sequence
  Description of Artificial Sequence: Synthetic oligonucleotide
ggcaaggcccauucucaaa

SEQ ID NO: 2508849 - RNA, 19 nt, Artificial Sequence
  Description of Artificial Sequence: Synthetic oligonucleotide
ccccagaacacaugcuaca

SEQ ID NO: 2508850 - RNA, 19 nt, Artificial Sequence
  Description of Artificial Sequence: Synthetic oligonucleotide
caagggccauacuccaccu

SEQ ID NO: 2508851 - RNA, 19 nt, Artificial Sequence
  Description of Artificial Sequence: Synthetic oligonucleotide
cccguggugguguggcuac

SEQ ID NO: 2508852 - RNA, 19 nt, Artificial Sequence
  Description of Artificial Sequence: Synthetic oligonucleotide
cuuggcugcccagggugga

SEQ ID NO: 2508853 - RNA, 19 nt, Artificial Sequence
  Description of Artificial Sequence: Synthetic oligonucleotide
cacguacaucagcuuccca

SEQ ID NO: 2508854 - RNA, 19 nt, Artificial Sequence
  Description of Artificial Sequence: Synthetic oligonucleotide
gccacgggcacugggcccc

SEQ ID NO: 2508855 - RNA, 19 nt, Artificial Sequence
  Description of Artificial Sequence: Synthetic oligonucleotide
cagcagucacuagccacca

SEQ ID NO: 2508856 - RNA, 19 nt, Artificial Sequence
  Description of Artificial Sequence: Synthetic oligonucleotide
cuggggccagggacaagga

SEQ ID NO: 2508857 - RNA, 19 nt, Artificial Sequence
  Description of Artificial Sequence: Synthetic oligonucleotide
aggcagcugugugguaagu

SEQ ID NO: 2508858 - RNA, 19 nt, Artificial Sequence
  Description of Artificial Sequence: Synthetic oligonucleotide
gggucaggaggggagucca

SEQ ID NO: 2508859 - RNA, 19 nt, Artificial Sequence
  Description of Artificial Sequence: Synthetic oligonucleotide
ggcuaccuagaaaacuacu

SEQ ID NO: 2508860 - RNA, 19 nt, Artificial Sequence
  Description of Artificial Sequence: Synthetic oligonucleotide
ccauguacuguaucauggu

SEQ ID NO: 2508861 - RNA, 19 nt, Artificial Sequence
  Description of Artificial Sequence: Synthetic oligonucleotide
uugcuggcuuuggcacucu

SEQ ID NO: 2508862 - RNA, 19 nt, Artificial Sequence
  Description of Artificial Sequence: Synthetic oligonucleotide
cguacagcaccuguuccuc

SEQ ID NO: 2508863 - RNA, 19 nt, Artificial Sequence
  Description of Artificial Sequence: Synthetic oligonucleotide
ggucaggaggggaguccag

SEQ ID NO: 2508864 - RNA, 19 nt, Artificial Sequence
  Description of Artificial Sequence: Synthetic oligonucleotide
ugguaucugcuggcccgua

SEQ ID NO: 2508865 - RNA, 19 nt, Artificial Sequence
  Description of Artificial Sequence: Synthetic oligonucleotide
aggggaguccagagcccca

SEQ ID NO: 2508866 - RNA, 19 nt, Artificial Sequence
  Description of Artificial Sequence: Synthetic oligonucleotide
ccauugugacugugcccac

SEQ ID NO: 2508867 - RNA, 19 nt, Artificial Sequence
  Description of Artificial Sequence: Synthetic oligonucleotide
acacagcaucaugucuauu

SEQ ID NO: 2508868 - RNA, 19 nt, Artificial Sequence
  Description of Artificial Sequence: Synthetic oligonucleotide
acgggcacugggccccauu

SEQ ID NO: 2508869 - RNA, 19 nt, Artificial Sequence
  Description of Artificial Sequence: Synthetic oligonucleotide
ucucugccccaagcaucuc

SEQ ID NO: 2508870 - RNA, 19 nt, Artificial Sequence
  Description of Artificial Sequence: Synthetic oligonucleotide
cguacacagcaucaugucu

SEQ ID NO: 2508871 - RNA, 19 nt, Artificial Sequence
  Description of Artificial Sequence: Synthetic oligonucleotide
cgggcacugggccccauug

SEQ ID NO: 2508872 - RNA, 19 nt, Artificial Sequence
  Description of Artificial Sequence: Synthetic oligonucleotide
ccuucaccaggaagucaca

SEQ ID NO: 2508873 - RNA, 19 nt, Artificial Sequence
  Description of Artificial Sequence: Synthetic oligonucleotide
ccugggcaauacccuggug

SEQ ID NO: 2508874 - RNA, 19 nt, Artificial Sequence
  Description of Artificial Sequence: Synthetic oligonucleotide
cgaaguuggugucagcaau

SEQ ID NO: 2508875 - RNA, 19 nt, Artificial Sequence
  Description of Artificial Sequence: Synthetic oligonucleotide
acccugcguacagcaccug

SEQ ID NO: 2508876 - RNA, 19 nt, Artificial Sequence
  Description of Artificial Sequence: Synthetic oligonucleotide
gguagcggguaccccgggu

SEQ ID NO: 2508877 - RNA, 19 nt, Artificial Sequence
  Description of Artificial Sequence: Synthetic oligonucleotide
gggaguccagagccccaga

SEQ ID NO: 2508878 - RNA, 19 nt, Artificial Sequence
  Description of Artificial Sequence: Synthetic oligonucleotide
caauaaggcaaggcccauu

SEQ ID NO: 2508879 - RNA, 19 nt, Artificial Sequence
  Description of Artificial Sequence: Synthetic oligonucleotide
ggucucaaucuugcuggcu

SEQ ID NO: 2508880 - RNA, 19 nt, Artificial Sequence
  Description of Artificial Sequence: Synthetic oligonucleotide
cagagaugccacgggcacu

SEQ ID NO: 2508881 - RNA, 19 nt, Artificial Sequence
  Description of Artificial Sequence: Synthetic oligonucleotide
gggaaccagcuggggccag

SEQ ID NO: 2508882 - RNA, 19 nt, Artificial Sequence
  Description of Artificial Sequence: Synthetic oligonucleotide
cggaguuaugcaucacgua

SEQ ID NO: 2508883 - RNA, 19 nt, Artificial Sequence
  Description of Artificial Sequence: Synthetic oligonucleotide
ggggcccgugguggugugg

SEQ ID NO: 2508884 - RNA, 19 nt, Artificial Sequence
  Description of Artificial Sequence: Synthetic oligonucleotide
ccugcguacagcaccuguu

SEQ ID NO: 2508885 - RNA, 19 nt, Artificial Sequence
  Description of Artificial Sequence: Synthetic oligonucleotide
cccaggguggaggcagcug

SEQ ID NO: 2508886 - RNA, 19 nt, Artificial Sequence
  Description of Artificial Sequence: Synthetic oligonucleotide
gggcacugggccccauugu

SEQ ID NO: 2508887 - RNA, 19 nt, Artificial Sequence
  Description of Artificial Sequence: Synthetic oligonucleotide
cuguuccuccugggcaaua

SEQ ID NO: 2508888 - RNA, 19 nt, Artificial Sequence
  Description of Artificial Sequence: Synthetic oligonucleotide
gcaauaaggcaaggcccau

SEQ ID NO: 2508889 - RNA, 19 nt, Artificial Sequence
  Description of Artificial Sequence: Synthetic oligonucleotide
gggcagcugccagucacua

SEQ ID NO: 2508890 - RNA, 19 nt, Artificial Sequence
  Description of Artificial Sequence: Synthetic oligonucleotide
cuggcacuugcugcuguuu

SEQ ID NO: 2508891 - RNA, 19 nt, Artificial Sequence
  Description of Artificial Sequence: Synthetic oligonucleotide
gcggguaccccgggucuca

SEQ ID NO: 2508892 - RNA, 19 nt, Artificial Sequence
  Description of Artificial Sequence: Synthetic oligonucleotide
ccaugagcacaucgaaguu

SEQ ID NO: 2508893 - RNA, 19 nt, Artificial Sequence
  Description of Artificial Sequence: Synthetic oligonucleotide
ggccuuggcugcccagggu

SEQ ID NO: 2508894 - RNA, 19 nt, Artificial Sequence
  Description of Artificial Sequence: Synthetic oligonucleotide
ccguggugguguggcuacc

SEQ ID NO: 2508895 - RNA, 19 nt, Artificial Sequence
  Description of Artificial Sequence: Synthetic oligonucleotide
cccugcguacagcaccugu

SEQ ID NO: 2508896 - RNA, 19 nt, Artificial Sequence
  Description of Artificial Sequence: Synthetic oligonucleotide
ggcccguacacagcaucau

SEQ ID NO: 2508897 - RNA, 19 nt, Artificial Sequence
  Description of Artificial Sequence: Synthetic oligonucleotide
cccuggugacagcuuagau

SEQ ID NO: 2508898 - RNA, 19 nt, Artificial Sequence
  Description of Artificial Sequence: Synthetic oligonucleotide
gcugcuguuuucggaucuu

SEQ ID NO: 2508899 - RNA, 19 nt, Artificial Sequence
  Description of Artificial Sequence: Synthetic oligonucleotide
gcuggcccguacacagcau

SEQ ID NO: 2508900 - RNA, 19 nt, Artificial Sequence
  Description of Artificial Sequence: Synthetic oligonucleotide
ccaccacacaagggccaua

SEQ ID NO: 2508901 - RNA, 19 nt, Artificial Sequence
  Description of Artificial Sequence: Synthetic oligonucleotide
ggccagggacaaggacccu

SEQ ID NO: 2508902 - RNA, 19 nt, Artificial Sequence
  Description of Artificial Sequence: Synthetic oligonucleotide
ccacgggcacugggcccca

SEQ ID NO: 2508903 - RNA, 19 nt, Artificial Sequence
  Description of Artificial Sequence: Synthetic oligonucleotide
aacauuuaauauuaagcac

SEQ ID NO: 2508904 - RNA, 19 nt, Artificial Sequence
  Description of Artificial Sequence: Synthetic oligonucleotide
aauauuaagcaccuugaag

SEQ ID NO: 2508905 - RNA, 19 nt, Artificial Sequence
  Description of Artificial Sequence: Synthetic oligonucleotide
auauuaagcaccuugaaga

SEQ ID NO: 2508906 - RNA, 19 nt, Artificial Sequence
  Description of Artificial Sequence: Synthetic oligonucleotide
acauuuaauauuaagcacc

SEQ ID NO: 2508907 - RNA, 19 nt, Artificial Sequence
  Description of Artificial Sequence: Synthetic oligonucleotide
uuaaguagcagguaaggcc

SEQ ID NO: 2508908 - RNA, 19 nt, Artificial Sequence
  Description of Artificial Sequence: Synthetic oligonucleotide
uuaauauuaagcaccuuga

SEQ ID NO: 2508909 - RNA, 19 nt, Artificial Sequence
  Description of Artificial Sequence: Synthetic oligonucleotide
ugggcauggauauacagcg

SEQ ID NO: 2508910 - RNA, 19 nt, Artificial Sequence
  Description of Artificial Sequence: Synthetic oligonucleotide
ucaauagaaauuauaaaua

SEQ ID NO: 2508911 - RNA, 19 nt, Artificial Sequence
  Description of Artificial Sequence: Synthetic oligonucleotide
uccccugucacucagcucg

SEQ ID NO: 2508912 - RNA, 19 nt, Artificial Sequence
  Description of Artificial Sequence: Synthetic oligonucleotide
ucgguaaaauuccugacag

SEQ ID NO: 2508913 - RNA, 19 nt, Artificial Sequence
  Description of Artificial Sequence: Synthetic oligonucleotide
uguuaguaaggauuugggg

SEQ ID NO: 2508914 - RNA, 19 nt, Artificial Sequence
  Description of Artificial Sequence: Synthetic oligonucleotide
cuuaggaggucacagagcc

SEQ ID NO: 2508915 - RNA, 19 nt, Artificial Sequence
  Description of Artificial Sequence: Synthetic oligonucleotide
uuguuaguaaggauuuggg

SEQ ID NO: 2508916 - RNA, 19 nt, Artificial Sequence
  Description of Artificial Sequence: Synthetic oligonucleotide
ugaagagugaaggugaugu

SEQ ID NO: 2508917 - RNA, 19 nt, Artificial Sequence
  Description of Artificial Sequence: Synthetic oligonucleotide
uauuaagcaccuugaagag

SEQ ID NO: 2508918 - RNA, 19 nt, Artificial Sequence
  Description of Artificial Sequence: Synthetic oligonucleotide
guaguaucgguucagcugc

SEQ ID NO: 2508919 - RNA, 19 nt, Artificial Sequence
  Description of Artificial Sequence: Synthetic oligonucleotide
gacucuuugguuaaguagc

SEQ ID NO: 2508920 - RNA, 19 nt, Artificial Sequence
  Description of Artificial Sequence: Synthetic oligonucleotide
uuuucggccuccuuguuag

SEQ ID NO: 2508921 - RNA, 19 nt, Artificial Sequence
  Description of Artificial Sequence: Synthetic oligonucleotide
aaagguguguccuguacca

SEQ ID NO: 2508922 - RNA, 19 nt, Artificial Sequence
  Description of Artificial Sequence: Synthetic oligonucleotide
uuuuggagaguguagcggc

SEQ ID NO: 2508923 - RNA, 19 nt, Artificial Sequence
  Description of Artificial Sequence: Synthetic oligonucleotide
ucugcaaucugaguuuugg

SEQ ID NO: 2508924 - RNA, 19 nt, Artificial Sequence
  Description of Artificial Sequence: Synthetic oligonucleotide
cagguagcggcuaacaugc

SEQ ID NO: 2508925 - RNA, 19 nt, Artificial Sequence
  Description of Artificial Sequence: Synthetic oligonucleotide
cuuguuaguaaggauuugg

SEQ ID NO: 2508926 - RNA, 19 nt, Artificial Sequence
  Description of Artificial Sequence: Synthetic oligonucleotide
gaggucaucugccaggaag

SEQ ID NO: 2508927 - RNA, 19 nt, Artificial Sequence
  Description of Artificial Sequence: Synthetic oligonucleotide
ugaguuuuggagaguguag

SEQ ID NO: 2508928 - RNA, 19 nt, Artificial Sequence
  Description of Artificial Sequence: Synthetic oligonucleotide
ucugaggucaucugccagg

SEQ ID NO: 2508929 - RNA, 19 nt, Artificial Sequence
  Description of Artificial Sequence: Synthetic oligonucleotide
aguuuuggagaguguagcg

SEQ ID NO: 2508930 - RNA, 19 nt, Artificial Sequence
  Description of Artificial Sequence: Synthetic oligonucleotide
uugguuaaguagcagguaa

SEQ ID NO: 2508931 - RNA, 19 nt, Artificial Sequence
  Description of Artificial Sequence: Synthetic oligonucleotide
gaugaugacaggugagaag

SEQ ID NO: 2508932 - RNA, 19 nt, Artificial Sequence
  Description of Artificial Sequence: Synthetic oligonucleotide
ugccugucgaugaugacag

SEQ ID NO: 2508933 - RNA, 19 nt, Artificial Sequence
  Description of Artificial Sequence: Synthetic oligonucleotide
aauagaaauuauaaauaau

SEQ ID NO: 2508934 - RNA, 19 nt, Artificial Sequence
  Description of Artificial Sequence: Synthetic oligonucleotide
ucucaauagaaauuauaaa

SEQ ID NO: 2508935 - RNA, 19 nt, Artificial Sequence
  Description of Artificial Sequence: Synthetic oligonucleotide
agcaguagaggaugagggc

SEQ ID NO: 2508936 - RNA, 19 nt, Artificial Sequence
  Description of Artificial Sequence: Synthetic oligonucleotide
uccgucagaacccucugag

SEQ ID NO: 2508937 - RNA, 19 nt, Artificial Sequence
  Description of Artificial Sequence: Synthetic oligonucleotide
gguaaaauuccugacagug

SEQ ID NO: 2508938 - RNA, 19 nt, Artificial Sequence
  Description of Artificial Sequence: Synthetic oligonucleotide
aacuuuucggccuccuugu

SEQ ID NO: 2508939 - RNA, 19 nt, Artificial Sequence
  Description of Artificial Sequence: Synthetic oligonucleotide
uaauauuaagcaccuugaa

SEQ ID NO: 2508940 - RNA, 19 nt, Artificial Sequence
  Description of Artificial Sequence: Synthetic oligonucleotide
gaugauccuguccacuugc

SEQ ID NO: 2508941 - RNA, 19 nt, Artificial Sequence
  Description of Artificial Sequence: Synthetic oligonucleotide
ugguuaaguagcagguaag

SEQ ID NO: 2508942 - RNA, 19 nt, Artificial Sequence
  Description of Artificial Sequence: Synthetic oligonucleotide
uaucgguucagcugcagga

SEQ ID NO: 2508943 - RNA, 19 nt, Artificial Sequence
  Description of Artificial Sequence: Synthetic oligonucleotide
aaggcaaggaugcgucggg

SEQ ID NO: 2508944 - RNA, 19 nt, Artificial Sequence
  Description of Artificial Sequence: Synthetic oligonucleotide
ugucgaugaugacagguga

SEQ ID NO: 2508945 - RNA, 19 nt, Artificial Sequence
  Description of Artificial Sequence: Synthetic oligonucleotide
agguguguccuguaccagc

SEQ ID NO: 2508946 - RNA, 19 nt, Artificial Sequence
  Description of Artificial Sequence: Synthetic oligonucleotide
ggugauguguucucaauag

SEQ ID NO: 2508947 - RNA, 19 nt, Artificial Sequence
  Description of Artificial Sequence: Synthetic oligonucleotide
ucacagagccgcaccaacg

SEQ ID NO: 2508948 - RNA, 19 nt, Artificial Sequence
  Description of Artificial Sequence: Synthetic oligonucleotide
aagacauggaccccacagu

SEQ ID NO: 2508949 - RNA, 19 nt, Artificial Sequence
  Description of Artificial Sequence: Synthetic oligonucleotide
uguguucucaauagaaauu

SEQ ID NO: 2508950 - RNA, 19 nt, Artificial Sequence
  Description of Artificial Sequence: Synthetic oligonucleotide
guuuuggagaguguagcgg

SEQ ID NO: 2508951 - RNA, 19 nt, Artificial Sequence
  Description of Artificial Sequence: Synthetic oligonucleotide
cugggcauggauauacagc

SEQ ID NO: 2508952 - RNA, 19 nt, Artificial Sequence
  Description of Artificial Sequence: Synthetic oligonucleotide
cauggauauacagcgcucg

SEQ ID NO: 2508953 - RNA, 19 nt, Artificial Sequence
  Description of Artificial Sequence: Synthetic oligonucleotide
gguaguaucgguucagcug

SEQ ID NO: 2508954 - RNA, 19 nt, Artificial Sequence
  Description of Artificial Sequence: Synthetic oligonucleotide
ggucugaucugucauggcg

SEQ ID NO: 2508955 - RNA, 19 nt, Artificial Sequence
  Description of Artificial Sequence: Synthetic oligonucleotide
gucacaguaggucugaucu

SEQ ID NO: 2508956 - RNA, 19 nt, Artificial Sequence
  Description of Artificial Sequence: Synthetic oligonucleotide
acagcgcucgguaaaauuc

SEQ ID NO: 2508957 - RNA, 19 nt, Artificial Sequence
  Description of Artificial Sequence: Synthetic oligonucleotide
agcacuuuggggucuggag

SEQ ID NO: 2508958 - RNA, 19 nt, Artificial Sequence
  Description of Artificial Sequence: Synthetic oligonucleotide
gaaggcaaggaugcgucgg

SEQ ID NO: 2508959 - RNA, 19 nt, Artificial Sequence
  Description of Artificial Sequence: Synthetic oligonucleotide
uccugucacggaaaggugu

SEQ ID NO: 2508960 - RNA, 19 nt, Artificial Sequence
  Description of Artificial Sequence: Synthetic oligonucleotide
gaguguagcggcugggcag

SEQ ID NO: 2508961 - RNA, 19 nt, Artificial Sequence
  Description of Artificial Sequence: Synthetic oligonucleotide
guuggaacauuuaauauua

SEQ ID NO: 2508962 - RNA, 19 nt, Artificial Sequence
  Description of Artificial Sequence: Synthetic oligonucleotide
guaaaauuccugacagugc

SEQ ID NO: 2508963 - RNA, 19 nt, Artificial Sequence
  Description of Artificial Sequence: Synthetic oligonucleotide
auggauauacagcgcucgg

SEQ ID NO: 2508964 - RNA, 19 nt, Artificial Sequence
  Description of Artificial Sequence: Synthetic oligonucleotide
acagagccgcaccaacgcc

SEQ ID NO: 2508965 - RNA, 19 nt, Artificial Sequence
  Description of Artificial Sequence: Synthetic oligonucleotide
uccuguaccagccggucac

SEQ ID NO: 2508966 - RNA, 19 nt, Artificial Sequence
  Description of Artificial Sequence: Synthetic oligonucleotide
accuugaagagugaaggug

SEQ ID NO: 2508967 - RNA, 19 nt, Artificial Sequence
  Description of Artificial Sequence: Synthetic oligonucleotide
aacagguagcggcuaacau

SEQ ID NO: 2508968 - RNA, 19 nt, Artificial Sequence
  Description of Artificial Sequence: Synthetic oligonucleotide
guaucgguucagcugcagg

SEQ ID NO: 2508969 - RNA, 19 nt, Artificial Sequence
  Description of Artificial Sequence: Synthetic oligonucleotide
aaggugauguguucucaau

SEQ ID NO: 2508970 - RNA, 19 nt, Artificial Sequence
  Description of Artificial Sequence: Synthetic oligonucleotide
aagcucauggguccccugu

SEQ ID NO: 2508971 - RNA, 19 nt, Artificial Sequence
  Description of Artificial Sequence: Synthetic oligonucleotide
agaaggcaaggaugcgucg

SEQ ID NO: 2508972 - RNA, 19 nt, Artificial Sequence
  Description of Artificial Sequence: Synthetic oligonucleotide
auauacagcgcucgguaaa

SEQ ID NO: 2508973 - RNA, 19 nt, Artificial Sequence
  Description of Artificial Sequence: Synthetic oligonucleotide
cuugcugcucgcucaggcg

SEQ ID NO: 2508974 - RNA, 19 nt, Artificial Sequence
  Description of Artificial Sequence: Synthetic oligonucleotide
cugucgaugaugacaggug

SEQ ID NO: 2508975 - RNA, 19 nt, Artificial Sequence
  Description of Artificial Sequence: Synthetic oligonucleotide
aucugaguuuuggagagug

SEQ ID NO: 2508976 - RNA, 19 nt, Artificial Sequence
  Description of Artificial Sequence: Synthetic oligonucleotide
uuuggagaguguagcggcu

SEQ ID NO: 2508977 - RNA, 19 nt, Artificial Sequence
  Description of Artificial Sequence: Synthetic oligonucleotide
aggucaucugccaggaagg

SEQ ID NO: 2508978 - RNA, 19 nt, Artificial Sequence
  Description of Artificial Sequence: Synthetic oligonucleotide
guuccggaacuuuucggcc

SEQ ID NO: 2508979 - RNA, 19 nt, Artificial Sequence
  Description of Artificial Sequence: Synthetic oligonucleotide
cugucacucagcucgcggc

SEQ ID NO: 2508980 - RNA, 19 nt, Artificial Sequence
  Description of Artificial Sequence: Synthetic oligonucleotide
gauguguucucaauagaaa

SEQ ID NO: 2508981 - RNA, 19 nt, Artificial Sequence
  Description of Artificial Sequence: Synthetic oligonucleotide
gucauggcggaggacacgg

SEQ ID NO: 2508982 - RNA, 19 nt, Artificial Sequence
  Description of Artificial Sequence: Synthetic oligonucleotide
cucgguaaaauuccugaca

SEQ ID NO: 2508983 - RNA, 19 nt, Artificial Sequence
  Description of Artificial Sequence: Synthetic oligonucleotide
ucugccaggaaggccaaca

SEQ ID NO: 2508984 - RNA, 19 nt, Artificial Sequence
  Description of Artificial Sequence: Synthetic oligonucleotide
cauuuaauauuaagcaccu

SEQ ID NO: 2508985 - RNA, 19 nt, Artificial Sequence
  Description of Artificial Sequence: Synthetic oligonucleotide
uggagggcagcaguagagg

SEQ ID NO: 2508986 - RNA, 19 nt, Artificial Sequence
  Description of Artificial Sequence: Synthetic oligonucleotide
guaggucugaucugucaug

SEQ ID NO: 2508987 - RNA, 19 nt, Artificial Sequence
  Description of Artificial Sequence: Synthetic oligonucleotide
guagcggcuaacaugccug

SEQ ID NO: 2508988 - RNA, 19 nt, Artificial Sequence
  Description of Artificial Sequence: Synthetic oligonucleotide
cagcgcucgguaaaauucc

SEQ ID NO: 2508989 - RNA, 19 nt, Artificial Sequence
  Description of Artificial Sequence: Synthetic oligonucleotide
gucacggaaaggugugucc

SEQ ID NO: 2508990 - RNA, 19 nt, Artificial Sequence
  Description of Artificial Sequence: Synthetic oligonucleotide
aggucugaucugucauggc

SEQ ID NO: 2508991 - RNA, 19 nt, Artificial Sequence
  Description of Artificial Sequence: Synthetic oligonucleotide
ucugaguuuuggagagugu

SEQ ID NO: 2508992 - RNA, 19 nt, Artificial Sequence
  Description of Artificial Sequence: Synthetic oligonucleotide
aacaugccugucgaugaug

SEQ ID NO: 2508993 - RNA, 19 nt, Artificial Sequence
  Description of Artificial Sequence: Synthetic oligonucleotide
aacccucugaggucaucug

SEQ ID NO: 2508994 - RNA, 19 nt, Artificial Sequence
  Description of Artificial Sequence: Synthetic oligonucleotide
ucacaguaggucugaucug

SEQ ID NO: 2508995 - RNA, 19 nt, Artificial Sequence
  Description of Artificial Sequence: Synthetic oligonucleotide
aguguagcggcugggcagg

SEQ ID NO: 2508996 - RNA, 19 nt, Artificial Sequence
  Description of Artificial Sequence: Synthetic oligonucleotide
guggcuuaggaggucacag

SEQ ID NO: 2508997 - RNA, 19 nt, Artificial Sequence
  Description of Artificial Sequence: Synthetic oligonucleotide
uuccggaacuuuucggccu

SEQ ID NO: 2508998 - RNA, 19 nt, Artificial Sequence
  Description of Artificial Sequence: Synthetic oligonucleotide
cuuugguuaaguagcaggu

SEQ ID NO: 2508999 - RNA, 19 nt, Artificial Sequence
  Description of Artificial Sequence: Synthetic oligonucleotide
gagaaggcaaggaugcguc

SEQ ID NO: 2509000 - RNA, 19 nt, Artificial Sequence
  Description of Artificial Sequence: Synthetic oligonucleotide
ucacggaaagguguguccu

SEQ ID NO: 2509001 - RNA, 19 nt, Artificial Sequence
  Description of Artificial Sequence: Synthetic oligonucleotide
uauacagcgcucgguaaaa

SEQ ID NO: 2509002 - RNA, 19 nt, Artificial Sequence
  Description of Artificial Sequence: Synthetic oligonucleotide
gcggcuaacaugccugucg

SEQ ID NO: 2509003 - RNA, 19 nt, Artificial Sequence
  Description of Artificial Sequence: Synthetic oligonucleotide
cuaggccuaggccugccag

SEQ ID NO: 2509004 - RNA, 19 nt, Artificial Sequence
  Description of Artificial Sequence: Synthetic oligonucleotide
uuugguuaaguagcaggua

SEQ ID NO: 2509005 - RNA, 19 nt, Artificial Sequence
  Description of Artificial Sequence: Synthetic oligonucleotide
cugccaggaagcucauggg

SEQ ID NO: 2509006 - RNA, 19 nt, Artificial Sequence
  Description of Artificial Sequence: Synthetic oligonucleotide
gcaguagaggaugagggcc

SEQ ID NO: 2509007 - RNA, 19 nt, Artificial Sequence
  Description of Artificial Sequence: Synthetic oligonucleotide
aggugauguguucucaaua

SEQ ID NO: 2509008 - RNA, 19 nt, Artificial Sequence
  Description of Artificial Sequence: Synthetic oligonucleotide
auggcggaggacacggcgc

SEQ ID NO: 2509009 - RNA, 19 nt, Artificial Sequence
  Description of Artificial Sequence: Synthetic oligonucleotide
agcaccuugaagagugaag

SEQ ID NO: 2509010 - RNA, 19 nt, Artificial Sequence
  Description of Artificial Sequence: Synthetic oligonucleotide
gcuaacaugccugucgaug

SEQ ID NO: 2509011 - RNA, 19 nt, Artificial Sequence
  Description of Artificial Sequence: Synthetic oligonucleotide
aagguguguccuguaccag

SEQ ID NO: 2509012 - RNA, 19 nt, Artificial Sequence
  Description of Artificial Sequence: Synthetic oligonucleotide
aggaugauccuguccacuu

SEQ ID NO: 2509013 - RNA, 19 nt, Artificial Sequence
  Description of Artificial Sequence: Synthetic oligonucleotide
uggcuuaggaggucacaga

SEQ ID NO: 2509014 - RNA, 19 nt, Artificial Sequence
  Description of Artificial Sequence: Synthetic oligonucleotide
acaggugagaaggcaagga

SEQ ID NO: 2509015 - RNA, 19 nt, Artificial Sequence
  Description of Artificial Sequence: Synthetic oligonucleotide
agccggucacaguaggucu

SEQ ID NO: 2509016 - RNA, 19 nt, Artificial Sequence
  Description of Artificial Sequence: Synthetic oligonucleotide
ugggguuccggaacuuuuc

SEQ ID NO: 2509017 - RNA, 19 nt, Artificial Sequence
  Description of Artificial Sequence: Synthetic oligonucleotide
aggaugagggccaggcccg

SEQ ID NO: 2509018 - RNA, 19 nt, Artificial Sequence
  Description of Artificial Sequence: Synthetic oligonucleotide
acagugccucuccccacac

SEQ ID NO: 2509019 - RNA, 19 nt, Artificial Sequence
  Description of Artificial Sequence: Synthetic oligonucleotide
gagaguguagcggcugggc

SEQ ID NO: 2509020 - RNA, 19 nt, Artificial Sequence
  Description of Artificial Sequence: Synthetic oligonucleotide
ugucauggcggaggacacg

SEQ ID NO: 2509021 - RNA, 19 nt, Artificial Sequence
  Description of Artificial Sequence: Synthetic oligonucleotide
gcagcaguagaggaugagg

SEQ ID NO: 2509022 - RNA, 19 nt, Artificial Sequence
  Description of Artificial Sequence: Synthetic oligonucleotide
uaagcaccuugaagaguga

SEQ ID NO: 2509023 - RNA, 19 nt, Artificial Sequence
  Description of Artificial Sequence: Synthetic oligonucleotide
ugccucuccccacacugcu

SEQ ID NO: 2509024 - RNA, 19 nt, Artificial Sequence
  Description of Artificial Sequence: Synthetic oligonucleotide
agggaugccuugggguucc

SEQ ID NO: 2509025 - RNA, 19 nt, Artificial Sequence
  Description of Artificial Sequence: Synthetic oligonucleotide
gaucugucauggcggagga

SEQ ID NO: 2509026 - RNA, 19 nt, Artificial Sequence
  Description of Artificial Sequence: Synthetic oligonucleotide
uacagcgcucgguaaaauu

SEQ ID NO: 2509027 - RNA, 19 nt, Artificial Sequence
  Description of Artificial Sequence: Synthetic oligonucleotide
guucucaauagaaauuaua

SEQ ID NO: 2509028 - RNA, 19 nt, Artificial Sequence
  Description of Artificial Sequence: Synthetic oligonucleotide
uggguccccugucacucag

SEQ ID NO: 2509029 - RNA, 19 nt, Artificial Sequence
  Description of Artificial Sequence: Synthetic oligonucleotide
ugucacggaaagguguguc

SEQ ID NO: 2509030 - RNA, 19 nt, Artificial Sequence
  Description of Artificial Sequence: Synthetic oligonucleotide
ucggccuccuuguuaguaa

SEQ ID NO: 2509031 - RNA, 19 nt, Artificial Sequence
  Description of Artificial Sequence: Synthetic oligonucleotide
acaugccugucgaugauga

SEQ ID NO: 2509032 - RNA, 19 nt, Artificial Sequence
  Description of Artificial Sequence: Synthetic oligonucleotide
gggguuccggaacuuuucg

SEQ ID NO: 2509033 - RNA, 19 nt, Artificial Sequence
  Description of Artificial Sequence: Synthetic oligonucleotide
agcagguaaggcccagggu

SEQ ID NO: 2509034 - RNA, 19 nt, Artificial Sequence
  Description of Artificial Sequence: Synthetic oligonucleotide
agcucgcggcucucgcugc

SEQ ID NO: 2509035 - RNA, 19 nt, Artificial Sequence
  Description of Artificial Sequence: Synthetic oligonucleotide
gacagugccucuccccaca

SEQ ID NO: 2509036 - RNA, 19 nt, Artificial Sequence
  Description of Artificial Sequence: Synthetic oligonucleotide
cucauggguccccugucac

SEQ ID NO: 2509037 - RNA, 19 nt, Artificial Sequence
  Description of Artificial Sequence: Synthetic oligonucleotide
agagugaaggugauguguu

SEQ ID NO: 2509038 - RNA, 19 nt, Artificial Sequence
  Description of Artificial Sequence: Synthetic oligonucleotide
cugucauggcggaggacac

SEQ ID NO: 2509039 - RNA, 19 nt, Artificial Sequence
  Description of Artificial Sequence: Synthetic oligonucleotide
uccggaacuuuucggccuc

SEQ ID NO: 2509040 - RNA, 19 nt, Artificial Sequence
  Description of Artificial Sequence: Synthetic oligonucleotide
auggaccccacagugggca

SEQ ID NO: 2509041 - RNA, 19 nt, Artificial Sequence
  Description of Artificial Sequence: Synthetic oligonucleotide
caaggaugcgucggguccc

SEQ ID NO: 2509042 - RNA, 19 nt, Artificial Sequence
  Description of Artificial Sequence: Synthetic oligonucleotide
aagcaccuugaagagugaa

SEQ ID NO: 2509043 - RNA, 19 nt, Artificial Sequence
  Description of Artificial Sequence: Synthetic oligonucleotide
uaguaucgguucagcugca

SEQ ID NO: 2509044 - RNA, 19 nt, Artificial Sequence
  Description of Artificial Sequence: Synthetic oligonucleotide
cacggaaagguguguccug

SEQ ID NO: 2509045 - RNA, 19 nt, Artificial Sequence
  Description of Artificial Sequence: Synthetic oligonucleotide
augagggccaggcccgcug

SEQ ID NO: 2509046 - RNA, 19 nt, Artificial Sequence
  Description of Artificial Sequence: Synthetic oligonucleotide
gaaggccaacagguagcgg

SEQ ID NO: 2509047 - RNA, 19 nt, Artificial Sequence
  Description of Artificial Sequence: Synthetic oligonucleotide
cauggaccccacagugggc

SEQ ID NO: 2509048 - RNA, 19 nt, Artificial Sequence
  Description of Artificial Sequence: Synthetic oligonucleotide
aguaucgguucagcugcag

SEQ ID NO: 2509049 - RNA, 19 nt, Artificial Sequence
  Description of Artificial Sequence: Synthetic oligonucleotide
gacacggcgccgccccgcg

SEQ ID NO: 2509050 - RNA, 19 nt, Artificial Sequence
  Description of Artificial Sequence: Synthetic oligonucleotide
ugcugcucgcucaggcgac

SEQ ID NO: 2509051 - RNA, 19 nt, Artificial Sequence
  Description of Artificial Sequence: Synthetic oligonucleotide
cugcaaucugaguuuugga

SEQ ID NO: 2509052 - RNA, 19 nt, Artificial Sequence
  Description of Artificial Sequence: Synthetic oligonucleotide
uagcggcuaacaugccugu

SEQ ID NO: 2509053 - RNA, 19 nt, Artificial Sequence
  Description of Artificial Sequence: Synthetic oligonucleotide
ggcauggauauacagcgcu

SEQ ID NO: 2509054 - RNA, 19 nt, Artificial Sequence
  Description of Artificial Sequence: Synthetic oligonucleotide
ucucugcaaucugaguuuu

SEQ ID NO: 2509055 - RNA, 19 nt, Artificial Sequence
  Description of Artificial Sequence: Synthetic oligonucleotide
gcucgguaaaauuccugac

SEQ ID NO: 2509056 - RNA, 19 nt, Artificial Sequence
  Description of Artificial Sequence: Synthetic oligonucleotide
ggaugcgucgggucccagg

SEQ ID NO: 2509057 - RNA, 19 nt, Artificial Sequence
  Description of Artificial Sequence: Synthetic oligonucleotide
auuuaauauuaagcaccuu

SEQ ID NO: 2509058 - RNA, 19 nt, Artificial Sequence
  Description of Artificial Sequence: Synthetic oligonucleotide
ccugucacggaaaggugug

SEQ ID NO: 2509059 - RNA, 19 nt, Artificial Sequence
  Description of Artificial Sequence: Synthetic oligonucleotide
cucugcaaucugaguuuug

SEQ ID NO: 2509060 - RNA, 19 nt, Artificial Sequence
  Description of Artificial Sequence: Synthetic oligonucleotide
caugccugucgaugaugac

SEQ ID NO: 2509061 - RNA, 19 nt, Artificial Sequence
  Description of Artificial Sequence: Synthetic oligonucleotide
uucggccuccuuguuagua

SEQ ID NO: 2509062 - RNA, 19 nt, Artificial Sequence
  Description of Artificial Sequence: Synthetic oligonucleotide
cagccggucacaguagguc

SEQ ID NO: 2509063 - RNA, 19 nt, Artificial Sequence
  Description of Artificial Sequence: Synthetic oligonucleotide
accaacgcccagggaugcc

SEQ ID NO: 2509064 - RNA, 19 nt, Artificial Sequence
  Description of Artificial Sequence: Synthetic oligonucleotide
cagcucgcggcucucgcug

SEQ ID NO: 2509065 - RNA, 19 nt, Artificial Sequence
  Description of Artificial Sequence: Synthetic oligonucleotide
cuuuucggccuccuuguua

SEQ ID NO: 2509066 - RNA, 19 nt, Artificial Sequence
  Description of Artificial Sequence: Synthetic oligonucleotide
gaacccucugaggucaucu

SEQ ID NO: 2509067 - RNA, 19 nt, Artificial Sequence
  Description of Artificial Sequence: Synthetic oligonucleotide
ccuaggccugccaggaagc

SEQ ID NO: 2509068 - RNA, 19 nt, Artificial Sequence
  Description of Artificial Sequence: Synthetic oligonucleotide
aucugucauggcggaggac

SEQ ID NO: 2509069 - RNA, 19 nt, Artificial Sequence
  Description of Artificial Sequence: Synthetic oligonucleotide
agaacccucugaggucauc

SEQ ID NO: 2509070 - RNA, 19 nt, Artificial Sequence
  Description of Artificial Sequence: Synthetic oligonucleotide
gacccuguccugucacgga

SEQ ID NO: 2509071 - RNA, 19 nt, Artificial Sequence
  Description of Artificial Sequence: Synthetic oligonucleotide
aaggaugcgucggguccca

SEQ ID NO: 2509072 - RNA, 19 nt, Artificial Sequence
  Description of Artificial Sequence: Synthetic oligonucleotide
caacagguagcggcuaaca

SEQ ID NO: 2509073 - RNA, 19 nt, Artificial Sequence
  Description of Artificial Sequence: Synthetic oligonucleotide
caggaagcucauggguccc

SEQ ID NO: 2509074 - RNA, 19 nt, Artificial Sequence
  Description of Artificial Sequence: Synthetic oligonucleotide
agcggcuaacaugccuguc

SEQ ID NO: 2509075 - RNA, 19 nt, Artificial Sequence
  Description of Artificial Sequence: Synthetic oligonucleotide
cacaguaggucugaucugu

SEQ ID NO: 2509076 - RNA, 19 nt, Artificial Sequence
  Description of Artificial Sequence: Synthetic oligonucleotide
ugcucgcucaggcgacccu

SEQ ID NO: 2509077 - RNA, 19 nt, Artificial Sequence
  Description of Artificial Sequence: Synthetic oligonucleotide
ccgucagaacccucugagg

SEQ ID NO: 2509078 - RNA, 19 nt, Artificial Sequence
  Description of Artificial Sequence: Synthetic oligonucleotide
acuuuucggccuccuuguu

SEQ ID NO: 2509079 - RNA, 19 nt, Artificial Sequence
  Description of Artificial Sequence: Synthetic oligonucleotide
aggccaacagguagcggcu

SEQ ID NO: 2509080 - RNA, 19 nt, Artificial Sequence
  Description of Artificial Sequence: Synthetic oligonucleotide
agguagcggcuaacaugcc

SEQ ID NO: 2509081 - RNA, 19 nt, Artificial Sequence
  Description of Artificial Sequence: Synthetic oligonucleotide
agagccgcaccaacgccca

SEQ ID NO: 2509082 - RNA, 19 nt, Artificial Sequence
  Description of Artificial Sequence: Synthetic oligonucleotide
uuucggccuccuuguuagu

SEQ ID NO: 2509083 - RNA, 19 nt, Artificial Sequence
  Description of Artificial Sequence: Synthetic oligonucleotide
cagguaaggcccagggucu

SEQ ID NO: 2509084 - RNA, 19 nt, Artificial Sequence
  Description of Artificial Sequence: Synthetic oligonucleotide
augauccuguccacuugcu

SEQ ID NO: 2509085 - RNA, 19 nt, Artificial Sequence
  Description of Artificial Sequence: Synthetic oligonucleotide
uaggccugccaggaagcuc

SEQ ID NO: 2509086 - RNA, 19 nt, Artificial Sequence
  Description of Artificial Sequence: Synthetic oligonucleotide
caccaacgcccagggaugc

SEQ ID NO: 2509087 - RNA, 19 nt, Artificial Sequence
  Description of Artificial Sequence: Synthetic oligonucleotide
agcgcucgguaaaauuccu

SEQ ID NO: 2509088 - RNA, 19 nt, Artificial Sequence
  Description of Artificial Sequence: Synthetic oligonucleotide
ggucaucugccaggaaggc

SEQ ID NO: 2509089 - RNA, 19 nt, Artificial Sequence
  Description of Artificial Sequence: Synthetic oligonucleotide
gguaaggcccagggucugg

SEQ ID NO: 2509090 - RNA, 19 nt, Artificial Sequence
  Description of Artificial Sequence: Synthetic oligonucleotide
cucggcuguccgccgcccg

SEQ ID NO: 2509091 - RNA, 19 nt, Artificial Sequence
  Description of Artificial Sequence: Synthetic oligonucleotide
agguaaggcccagggucug

SEQ ID NO: 2509092 - RNA, 19 nt, Artificial Sequence
  Description of Artificial Sequence: Synthetic oligonucleotide
caggcgacccuguccuguc

SEQ ID NO: 2509093 - RNA, 19 nt, Artificial Sequence
  Description of Artificial Sequence: Synthetic oligonucleotide
ugcuaggccuaggccugcc

SEQ ID NO: 2509094 - RNA, 19 nt, Artificial Sequence
  Description of Artificial Sequence: Synthetic oligonucleotide
caggggacucuuugguuaa

SEQ ID NO: 2509095 - RNA, 19 nt, Artificial Sequence
  Description of Artificial Sequence: Synthetic oligonucleotide
cccgcugcuaggccuaggc

SEQ ID NO: 2509096 - RNA, 19 nt, Artificial Sequence
  Description of Artificial Sequence: Synthetic oligonucleotide
gguagcggcuaacaugccu

SEQ ID NO: 2509097 - RNA, 19 nt, Artificial Sequence
  Description of Artificial Sequence: Synthetic oligonucleotide
cuuuggggucuggagggca

SEQ ID NO: 2509098 - RNA, 19 nt, Artificial Sequence
  Description of Artificial Sequence: Synthetic oligonucleotide
gggguaguaucgguucagc

SEQ ID NO: 2509099 - RNA, 19 nt, Artificial Sequence
  Description of Artificial Sequence: Synthetic oligonucleotide
gcucucgcugccccagucc

SEQ ID NO: 2509100 - RNA, 19 nt, Artificial Sequence
  Description of Artificial Sequence: Synthetic oligonucleotide
gggacucuuugguuaagua

SEQ ID NO: 2509101 - RNA, 19 nt, Artificial Sequence
  Description of Artificial Sequence: Synthetic oligonucleotide
auacagcgcucgguaaaau

SEQ ID NO: 2509102 - RNA, 19 nt, Artificial Sequence
  Description of Artificial Sequence: Synthetic oligonucleotide
caccuugaagagugaaggu

SEQ ID NO: 2509103 - RNA, 19 nt, Artificial Sequence
  Description of Artificial Sequence: Synthetic oligonucleotide
gcucaggcgacccuguccu

SEQ ID NO: 2509104 - RNA, 19 nt, Artificial Sequence
  Description of Artificial Sequence: Synthetic oligonucleotide
gcaccaacgcccagggaug

SEQ ID NO: 2509105 - RNA, 19 nt, Artificial Sequence
  Description of Artificial Sequence: Synthetic oligonucleotide
cagggaugccuugggguuc

SEQ ID NO: 2509106 - RNA, 19 nt, Artificial Sequence
  Description of Artificial Sequence: Synthetic oligonucleotide
gcgacccuguccugucacg

SEQ ID NO: 2509107 - RNA, 19 nt, Artificial Sequence
  Description of Artificial Sequence: Synthetic oligonucleotide
aggggacucuuugguuaag

SEQ ID NO: 2509108 - RNA, 19 nt, Artificial Sequence
  Description of Artificial Sequence: Synthetic oligonucleotide
augcgucgggucccaggca

SEQ ID NO: 2509109 - RNA, 19 nt, Artificial Sequence
  Description of Artificial Sequence: Synthetic oligonucleotide
cgcucgguaaaauuccuga

SEQ ID NO: 2509110 - RNA, 19 nt, Artificial Sequence
  Description of Artificial Sequence: Synthetic oligonucleotide
ucgcucaggcgacccuguc

SEQ ID NO: 2509111 - RNA, 19 nt, Artificial Sequence
  Description of Artificial Sequence: Synthetic oligonucleotide
cugcucgcucaggcgaccc

SEQ ID NO: 2509112 - RNA, 19 nt, Artificial Sequence
  Description of Artificial Sequence: Synthetic oligonucleotide
ggguaguaucgguucagcu

SEQ ID NO: 2509113 - RNA, 19 nt, Artificial Sequence
  Description of Artificial Sequence: Synthetic oligonucleotide
ggcgacccuguccugucac

SEQ ID NO: 2509114 - RNA, 19 nt, Artificial Sequence
  Description of Artificial Sequence: Synthetic oligonucleotide
ccaggggacucuuugguua

SEQ ID NO: 2509115 - RNA, 19 nt, Artificial Sequence
  Description of Artificial Sequence: Synthetic oligonucleotide
gcauggauauacagcgcuc

SEQ ID NO: 2509116 - RNA, 19 nt, Artificial Sequence
  Description of Artificial Sequence: Synthetic oligonucleotide
uggguccgucagaacccuc

SEQ ID NO: 2509117 - RNA, 19 nt, Artificial Sequence
  Description of Artificial Sequence: Synthetic oligonucleotide
aggcgacccuguccuguca

SEQ ID NO: 2509118 - RNA, 19 nt, Artificial Sequence
  Description of Artificial Sequence: Synthetic oligonucleotide
gucacucagcucgcggcuc

SEQ ID NO: 2509119 - RNA, 19 nt, Artificial Sequence
  Description of Artificial Sequence: Synthetic oligonucleotide
cucaggcgacccuguccug

SEQ ID NO: 2509120 - RNA, 19 nt, Artificial Sequence
  Description of Artificial Sequence: Synthetic oligonucleotide
ccuuguuaguaaggauuug

SEQ ID NO: 2509121 - RNA, 19 nt, Artificial Sequence
  Description of Artificial Sequence: Synthetic oligonucleotide
cgucagaacccucugaggu

SEQ ID NO: 2509122 - RNA, 19 nt, Artificial Sequence
  Description of Artificial Sequence: Synthetic oligonucleotide
guccccugucacucagcuc

SEQ ID NO: 2509123 - RNA, 19 nt, Artificial Sequence
  Description of Artificial Sequence: Synthetic oligonucleotide
gguccccugucacucagcu

SEQ ID NO: 2509124 - RNA, 19 nt, Artificial Sequence
  Description of Artificial Sequence: Synthetic oligonucleotide
acacggcgccgccccgcgg

SEQ ID NO: 2509125 - RNA, 19 nt, Artificial Sequence
  Description of Artificial Sequence: Synthetic oligonucleotide
cugcuaggccuaggccugc

SEQ ID NO: 2509126 - RNA, 19 nt, Artificial Sequence
  Description of Artificial Sequence: Synthetic oligonucleotide
gcucgcucaggcgacccug

SEQ ID NO: 2509127 - RNA, 19 nt, Artificial Sequence
  Description of Artificial Sequence: Synthetic oligonucleotide
acggcgccgccccgcgguc

SEQ ID NO: 2509128 - RNA, 19 nt, Artificial Sequence
  Description of Artificial Sequence: Synthetic oligonucleotide
gguggcuuaggaggucaca

SEQ ID NO: 2509129 - RNA, 19 nt, Artificial Sequence
  Description of Artificial Sequence: Synthetic oligonucleotide
gccggucacaguaggucug

SEQ ID NO: 2509130 - RNA, 19 nt, Artificial Sequence
  Description of Artificial Sequence: Synthetic oligonucleotide
gccccaguccagcucucug

SEQ ID NO: 2509131 - RNA, 19 nt, Artificial Sequence
  Description of Artificial Sequence: Synthetic oligonucleotide
ccaacagguagcggcuaac

SEQ ID NO: 2509132 - RNA, 19 nt, Artificial Sequence
  Description of Artificial Sequence: Synthetic oligonucleotide
cgcucaggcgacccugucc

SEQ ID NO: 2509133 - RNA, 19 nt, Artificial Sequence
  Description of Artificial Sequence: Synthetic oligonucleotide
gcgcucgguaaaauuccug

SEQ ID NO: 2509134 - RNA, 19 nt, Artificial Sequence
  Description of Artificial Sequence: Synthetic oligonucleotide
cgacccuguccugucacgg

SEQ ID NO: 2509135 - RNA, 19 nt, Artificial Sequence
  Description of Artificial Sequence: Synthetic oligonucleotide
ccucugaggucaucugcca

SEQ ID NO: 2509136 - RNA, 19 nt, Artificial Sequence
  Description of Artificial Sequence: Synthetic oligonucleotide
gccaacagguagcggcuaa

SEQ ID NO: 2509137 - RNA, 19 nt, Artificial Sequence
  Description of Artificial Sequence: Synthetic oligonucleotide
ggucuggguccgucagaac

SEQ ID NO: 2509138 - RNA, 19 nt, Artificial Sequence
  Description of Artificial Sequence: Synthetic oligonucleotide
ggaggacacggcgccgccc

SEQ ID NO: 2509139 - RNA, 19 nt, Artificial Sequence
  Description of Artificial Sequence: Synthetic oligonucleotide
ggcagcacuuuggggucug

SEQ ID NO: 2509140 - RNA, 19 nt, Artificial Sequence
  Description of Artificial Sequence: Synthetic oligonucleotide
aggaugcgucgggucccag

SEQ ID NO: 2509141 - RNA, 19 nt, Artificial Sequence
  Description of Artificial Sequence: Synthetic oligonucleotide
gcuaggccuaggccugcca

SEQ ID NO: 2509142 - RNA, 19 nt, Artificial Sequence
  Description of Artificial Sequence: Synthetic oligonucleotide
cccagggaugccuuggggu

SEQ ID NO: 2509143 - RNA, 19 nt, Artificial Sequence
  Description of Artificial Sequence: Synthetic oligonucleotide
guguccuguaccagccggu

SEQ ID NO: 2509144 - RNA, 19 nt, Artificial Sequence
  Description of Artificial Sequence: Synthetic oligonucleotide
ggucacagagccgcaccaa

SEQ ID NO: 2509145 - RNA, 19 nt, Artificial Sequence
  Description of Artificial Sequence: Synthetic oligonucleotide
gucgggucccaggcagcac

SEQ ID NO: 2509146 - RNA, 19 nt, Artificial Sequence
  Description of Artificial Sequence: Synthetic oligonucleotide
cgcaccaacgcccagggau

SEQ ID NO: 2509147 - RNA, 19 nt, Artificial Sequence
  Description of Artificial Sequence: Synthetic oligonucleotide
cucgcucaggcgacccugu

SEQ ID NO: 2509148 - RNA, 19 nt, Artificial Sequence
  Description of Artificial Sequence: Synthetic oligonucleotide
ggguccgucagaacccucu

SEQ ID NO: 2509149 - RNA, 19 nt, Artificial Sequence
  Description of Artificial Sequence: Synthetic oligonucleotide
cgcugcuaggccuaggccu

SEQ ID NO: 2509150 - RNA, 19 nt, Artificial Sequence
  Description of Artificial Sequence: Synthetic oligonucleotide
gcggcucucgcugccccag

SEQ ID NO: 2509151 - RNA, 19 nt, Artificial Sequence
  Description of Artificial Sequence: Synthetic oligonucleotide
ccaggcccgcugcuaggcc

SEQ ID NO: 2509152 - RNA, 19 nt, Artificial Sequence
  Description of Artificial Sequence: Synthetic oligonucleotide
ccccugucacucagcucgc

SEQ ID NO: 2509153 - RNA, 19 nt, Artificial Sequence
  Description of Artificial Sequence: Synthetic oligonucleotide
cggcuaacaugccugucga

SEQ ID NO: 2509154 - RNA, 19 nt, Artificial Sequence
  Description of Artificial Sequence: Synthetic oligonucleotide
cacucagcucgcggcucuc

SEQ ID NO: 2509155 - RNA, 19 nt, Artificial Sequence
  Description of Artificial Sequence: Synthetic oligonucleotide
agggccaggcccgcugcua

SEQ ID NO: 2509156 - RNA, 19 nt, Artificial Sequence
  Description of Artificial Sequence: Synthetic oligonucleotide
gcugcucgcucaggcgacc

SEQ ID NO: 2509157 - RNA, 19 nt, Artificial Sequence
  Description of Artificial Sequence: Synthetic oligonucleotide
ggcugggcauggauauaca

SEQ ID NO: 2509158 - RNA, 19 nt, Artificial Sequence
  Description of Artificial Sequence: Synthetic oligonucleotide
gccuugggguuccggaacu

SEQ ID NO: 2509159 - RNA, 19 nt, Artificial Sequence
  Description of Artificial Sequence: Synthetic oligonucleotide
cugucacggaaaggugugu

SEQ ID NO: 2509160 - RNA, 19 nt, Artificial Sequence
  Description of Artificial Sequence: Synthetic oligonucleotide
ggaagcucauggguccccu

SEQ ID NO: 2509161 - RNA, 19 nt, Artificial Sequence
  Description of Artificial Sequence: Synthetic oligonucleotide
cuggguccgucagaacccu

SEQ ID NO: 2509162 - RNA, 19 nt, Artificial Sequence
  Description of Artificial Sequence: Synthetic oligonucleotide
cacggcgccgccccgcggu

SEQ ID NO: 2509163 - RNA, 19 nt, Artificial Sequence
  Description of Artificial Sequence: Synthetic oligonucleotide
ccggaacuuuucggccucc

SEQ ID NO: 2509164 - RNA, 19 nt, Artificial Sequence
  Description of Artificial Sequence: Synthetic oligonucleotide
aggcccgcugcuaggccua

SEQ ID NO: 2509165 - RNA, 19 nt, Artificial Sequence
  Description of Artificial Sequence: Synthetic oligonucleotide
ggcuaacaugccugucgau

SEQ ID NO: 2509166 - RNA, 19 nt, Artificial Sequence
  Description of Artificial Sequence: Synthetic oligonucleotide
cgcgguccucggcuguccg

SEQ ID NO: 2509167 - RNA, 19 nt, Artificial Sequence
  Description of Artificial Sequence: Synthetic oligonucleotide
caacgcccagggaugccuu

SEQ ID NO: 2509168 - RNA, 19 nt, Artificial Sequence
  Description of Artificial Sequence: Synthetic oligonucleotide
ccggucacaguaggucuga

SEQ ID NO: 2509169 - RNA, 19 nt, Artificial Sequence
  Description of Artificial Sequence: Synthetic oligonucleotide
gccgccccgcgguccucgg

SEQ ID NO: 2509170 - RNA, 19 nt, Artificial Sequence
  Description of Artificial Sequence: Synthetic oligonucleotide
ggccuaggccugccaggaa

SEQ ID NO: 2509171 - RNA, 19 nt, Artificial Sequence
  Description of Artificial Sequence: Synthetic oligonucleotide
ccuguaccagccggucaca

SEQ ID NO: 2509172 - RNA, 19 nt, Artificial Sequence
  Description of Artificial Sequence: Synthetic oligonucleotide
ccaacgcccagggaugccu

SEQ ID NO: 2509173 - RNA, 19 nt, Artificial Sequence
  Description of Artificial Sequence: Synthetic oligonucleotide
ggccaacagguagcggcua

SEQ ID NO: 2509174 - RNA, 19 nt, Artificial Sequence
  Description of Artificial Sequence: Synthetic oligonucleotide
gcccgcugcuaggccuagg

SEQ ID NO: 2509175 - RNA, 19 nt, Artificial Sequence
  Description of Artificial Sequence: Synthetic oligonucleotide
ggcccgcugcuaggccuag

SEQ ID NO: 2509176 - RNA, 19 nt, Artificial Sequence
  Description of Artificial Sequence: Synthetic oligonucleotide
ccgcgguccucggcugucc

SEQ ID NO: 2509177 - RNA, 19 nt, Artificial Sequence
  Description of Artificial Sequence: Synthetic oligonucleotide
cggaaagguguguccugua

SEQ ID NO: 2509178 - RNA, 19 nt, Artificial Sequence
  Description of Artificial Sequence: Synthetic oligonucleotide
ggggcugggcauggauaua

SEQ ID NO: 2509179 - RNA, 19 nt, Artificial Sequence
  Description of Artificial Sequence: Synthetic oligonucleotide
cccgcgguccucggcuguc

SEQ ID NO: 2509180 - RNA, 19 nt, Artificial Sequence
  Description of Artificial Sequence: Synthetic oligonucleotide
cgccgccccgcgguccucg

SEQ ID NO: 2509181 - RNA, 19 nt, Artificial Sequence
  Description of Artificial Sequence: Synthetic oligonucleotide
ccgcaccaacgcccaggga

SEQ ID NO: 2509182 - RNA, 19 nt, Artificial Sequence
  Description of Artificial Sequence: Synthetic oligonucleotide
cgccccgcgguccucggcu

SEQ ID NO: 2509183 - RNA, 19 nt, Artificial Sequence
  Description of Artificial Sequence: Synthetic oligonucleotide
ccccgcgguccucggcugu

SEQ ID NO: 2509184 - RNA, 19 nt, Artificial Sequence
  Description of Artificial Sequence: Synthetic oligonucleotide
aaucucaccagugaaagac

SEQ ID NO: 2509185 - RNA, 19 nt, Artificial Sequence
  Description of Artificial Sequence: Synthetic oligonucleotide
uccaagacaacccaguucc

SEQ ID NO: 2509186 - RNA, 19 nt, Artificial Sequence
  Description of Artificial Sequence: Synthetic oligonucleotide
aguaaaucuccacuggacc

SEQ ID NO: 2509187 - RNA, 19 nt, Artificial Sequence
  Description of Artificial Sequence: Synthetic oligonucleotide
aagguaaagacugagcagg

SEQ ID NO: 2509188 - RNA, 19 nt, Artificial Sequence
  Description of Artificial Sequence: Synthetic oligonucleotide
ucaagguaaagacugagca

SEQ ID NO: 2509189 - RNA, 19 nt, Artificial Sequence
  Description of Artificial Sequence: Synthetic oligonucleotide
cuugguucugccaauauag

SEQ ID NO: 2509190 - RNA, 19 nt, Artificial Sequence
  Description of Artificial Sequence: Synthetic oligonucleotide
cuucuaaugucuuuagccg

SEQ ID NO: 2509191 - RNA, 19 nt, Artificial Sequence
  Description of Artificial Sequence: Synthetic oligonucleotide
cagugaaagacucagaaac

SEQ ID NO: 2509192 - RNA, 19 nt, Artificial Sequence
  Description of Artificial Sequence: Synthetic oligonucleotide
ucuaagaucuccaccaugu

SEQ ID NO: 2509193 - RNA, 19 nt, Artificial Sequence
  Description of Artificial Sequence: Synthetic oligonucleotide
ucuuccucuugucugauag

SEQ ID NO: 2509194 - RNA, 19 nt, Artificial Sequence
  Description of Artificial Sequence: Synthetic oligonucleotide
agaugugagaaaucucacc

SEQ ID NO: 2509195 - RNA, 19 nt, Artificial Sequence
  Description of Artificial Sequence: Synthetic oligonucleotide
uuuuagagcaucuuccacu

SEQ ID NO: 2509196 - RNA, 19 nt, Artificial Sequence
  Description of Artificial Sequence: Synthetic oligonucleotide
auauuucagggacaaugcc

SEQ ID NO: 2509197 - RNA, 19 nt, Artificial Sequence
  Description of Artificial Sequence: Synthetic oligonucleotide
ugcucuaggaaauucaggu

SEQ ID NO: 2509198 - RNA, 19 nt, Artificial Sequence
  Description of Artificial Sequence: Synthetic oligonucleotide
ucacuagggaucauggucc

SEQ ID NO: 2509199 - RNA, 19 nt, Artificial Sequence
  Description of Artificial Sequence: Synthetic oligonucleotide
uucuaaugucuuuagccgg

SEQ ID NO: 2509200 - RNA, 19 nt, Artificial Sequence
  Description of Artificial Sequence: Synthetic oligonucleotide
aauauagcggaaaugcgug

SEQ ID NO: 2509201 - RNA, 19 nt, Artificial Sequence
  Description of Artificial Sequence: Synthetic oligonucleotide
aaugucuuuagccggggca

SEQ ID NO: 2509202 - RNA, 19 nt, Artificial Sequence
  Description of Artificial Sequence: Synthetic oligonucleotide
ugccgaauaacuuggacca

SEQ ID NO: 2509203 - RNA, 19 nt, Artificial Sequence
  Description of Artificial Sequence: Synthetic oligonucleotide
ugguucugccaauauagcg

SEQ ID NO: 2509204 - RNA, 19 nt, Artificial Sequence
  Description of Artificial Sequence: Synthetic oligonucleotide
uuuagagcaucuuccacug

SEQ ID NO: 2509205 - RNA, 19 nt, Artificial Sequence
  Description of Artificial Sequence: Synthetic oligonucleotide
guaaagacugagcaggcag

SEQ ID NO: 2509206 - RNA, 19 nt, Artificial Sequence
  Description of Artificial Sequence: Synthetic oligonucleotide
uucacuagggaucaugguc

SEQ ID NO: 2509207 - RNA, 19 nt, Artificial Sequence
  Description of Artificial Sequence: Synthetic oligonucleotide
auaggugccagucuucauc

SEQ ID NO: 2509208 - RNA, 19 nt, Artificial Sequence
  Description of Artificial Sequence: Synthetic oligonucleotide
ugagaaaucucaccaguga

SEQ ID NO: 2509209 - RNA, 19 nt, Artificial Sequence
  Description of Artificial Sequence: Synthetic oligonucleotide
aucaguccauauuucaggg

SEQ ID NO: 2509210 - RNA, 19 nt, Artificial Sequence
  Description of Artificial Sequence: Synthetic oligonucleotide
ucagguuuggggauaauuc

SEQ ID NO: 2509211 - RNA, 19 nt, Artificial Sequence
  Description of Artificial Sequence: Synthetic oligonucleotide
ugauagggagccuggacgg

SEQ ID NO: 2509212 - RNA, 19 nt, Artificial Sequence
  Description of Artificial Sequence: Synthetic oligonucleotide
aagucgcaugguuagaugu

SEQ ID NO: 2509213 - RNA, 19 nt, Artificial Sequence
  Description of Artificial Sequence: Synthetic oligonucleotide
ugugagaaaucucaccagu

SEQ ID NO: 2509214 - RNA, 19 nt, Artificial Sequence
  Description of Artificial Sequence: Synthetic oligonucleotide
aguaauggggcuucacuag

SEQ ID NO: 2509215 - RNA, 19 nt, Artificial Sequence
  Description of Artificial Sequence: Synthetic oligonucleotide
uaccaauaaaccuucuugu

SEQ ID NO: 2509216 - RNA, 19 nt, Artificial Sequence
  Description of Artificial Sequence: Synthetic oligonucleotide
uguagagacgcgaacccgc

SEQ ID NO: 2509217 - RNA, 19 nt, Artificial Sequence
  Description of Artificial Sequence: Synthetic oligonucleotide
ucaguaaaucuccacugga

SEQ ID NO: 2509218 - RNA, 19 nt, Artificial Sequence
  Description of Artificial Sequence: Synthetic oligonucleotide
uuugccuugcuuuccagca

SEQ ID NO: 2509219 - RNA, 19 nt, Artificial Sequence
  Description of Artificial Sequence: Synthetic oligonucleotide
ucuuguagagacgcgaacc

SEQ ID NO: 2509220 - RNA, 19 nt, Artificial Sequence
  Description of Artificial Sequence: Synthetic oligonucleotide
uuccucuugucugauaggg

SEQ ID NO: 2509221 - RNA, 19 nt, Artificial Sequence
  Description of Artificial Sequence: Synthetic oligonucleotide
acucaguaaaucuccacug

SEQ ID NO: 2509222 - RNA, 19 nt, Artificial Sequence
  Description of Artificial Sequence: Synthetic oligonucleotide
aaaccuucuuguguuuucg

SEQ ID NO: 2509223 - RNA, 19 nt, Artificial Sequence
  Description of Artificial Sequence: Synthetic oligonucleotide
cugccgaauaacuuggacc

SEQ ID NO: 2509224 - RNA, 19 nt, Artificial Sequence
  Description of Artificial Sequence: Synthetic oligonucleotide
aaguaauggggcuucacua

SEQ ID NO: 2509225 - RNA, 19 nt, Artificial Sequence
  Description of Artificial Sequence: Synthetic oligonucleotide
aagacaacccaguuccgcu

SEQ ID NO: 2509226 - RNA, 19 nt, Artificial Sequence
  Description of Artificial Sequence: Synthetic oligonucleotide
uaauggggcuucacuaggg

SEQ ID NO: 2509227 - RNA, 19 nt, Artificial Sequence
  Description of Artificial Sequence: Synthetic oligonucleotide
uuagccggggcacauuaag

SEQ ID NO: 2509228 - RNA, 19 nt, Artificial Sequence
  Description of Artificial Sequence: Synthetic oligonucleotide
ugagcaggcagaaccagca

SEQ ID NO: 2509229 - RNA, 19 nt, Artificial Sequence
  Description of Artificial Sequence: Synthetic oligonucleotide
ucaggcucaauaccaauaa

SEQ ID NO: 2509230 - RNA, 19 nt, Artificial Sequence
  Description of Artificial Sequence: Synthetic oligonucleotide
aaagucgcaugguuagaug

SEQ ID NO: 2509231 - RNA, 19 nt, Artificial Sequence
  Description of Artificial Sequence: Synthetic oligonucleotide
cucaguaaaucuccacugg

SEQ ID NO: 2509232 - RNA, 19 nt, Artificial Sequence
  Description of Artificial Sequence: Synthetic oligonucleotide
uaaagacugagcaggcaga

SEQ ID NO: 2509233 - RNA, 19 nt, Artificial Sequence
  Description of Artificial Sequence: Synthetic oligonucleotide
cuuguagagacgcgaaccc

SEQ ID NO: 2509234 - RNA, 19 nt, Artificial Sequence
  Description of Artificial Sequence: Synthetic oligonucleotide
aaccagcacucucaggcuc

SEQ ID NO: 2509235 - RNA, 19 nt, Artificial Sequence
  Description of Artificial Sequence: Synthetic oligonucleotide
aaccccuccaagacaaccc

SEQ ID NO: 2509236 - RNA, 19 nt, Artificial Sequence
  Description of Artificial Sequence: Synthetic oligonucleotide
caagguaaagacugagcag

SEQ ID NO: 2509237 - RNA, 19 nt, Artificial Sequence
  Description of Artificial Sequence: Synthetic oligonucleotide
uuuucgaggcuccuggauc

SEQ ID NO: 2509238 - RNA, 19 nt, Artificial Sequence
  Description of Artificial Sequence: Synthetic oligonucleotide
ucuaccaccacugggcgcc

SEQ ID NO: 2509239 - RNA, 19 nt, Artificial Sequence
  Description of Artificial Sequence: Synthetic oligonucleotide
accagugaaagacucagaa

SEQ ID NO: 2509240 - RNA, 19 nt, Artificial Sequence
  Description of Artificial Sequence: Synthetic oligonucleotide
ucuugucugauagggagcc

SEQ ID NO: 2509241 - RNA, 19 nt, Artificial Sequence
  Description of Artificial Sequence: Synthetic oligonucleotide
uccgcugccgaauaacuug

SEQ ID NO: 2509242 - RNA, 19 nt, Artificial Sequence
  Description of Artificial Sequence: Synthetic oligonucleotide
cucaagguaaagacugagc

SEQ ID NO: 2509243 - RNA, 19 nt, Artificial Sequence
  Description of Artificial Sequence: Synthetic oligonucleotide
guaauggggcuucacuagg

SEQ ID NO: 2509244 - RNA, 19 nt, Artificial Sequence
  Description of Artificial Sequence: Synthetic oligonucleotide
gguucugccaauauagcgg

SEQ ID NO: 2509245 - RNA, 19 nt, Artificial Sequence
  Description of Artificial Sequence: Synthetic oligonucleotide
uucuaagaucuccaccaug

SEQ ID NO: 2509246 - RNA, 19 nt, Artificial Sequence
  Description of Artificial Sequence: Synthetic oligonucleotide
gccaauauagcggaaaugc

SEQ ID NO: 2509247 - RNA, 19 nt, Artificial Sequence
  Description of Artificial Sequence: Synthetic oligonucleotide
agggccgaaagucgcaugg

SEQ ID NO: 2509248 - RNA, 19 nt, Artificial Sequence
  Description of Artificial Sequence: Synthetic oligonucleotide
aucccauagcgguaguggg

SEQ ID NO: 2509249 - RNA, 19 nt, Artificial Sequence
  Description of Artificial Sequence: Synthetic oligonucleotide
auagcggaaaugcguguuc

SEQ ID NO: 2509250 - RNA, 19 nt, Artificial Sequence
  Description of Artificial Sequence: Synthetic oligonucleotide
aaaucucaccagugaaaga

SEQ ID NO: 2509251 - RNA, 19 nt, Artificial Sequence
  Description of Artificial Sequence: Synthetic oligonucleotide
ucugauagggagccuggac

SEQ ID NO: 2509252 - RNA, 19 nt, Artificial Sequence
  Description of Artificial Sequence: Synthetic oligonucleotide
aauggggcuucacuaggga

SEQ ID NO: 2509253 - RNA, 19 nt, Artificial Sequence
  Description of Artificial Sequence: Synthetic oligonucleotide
caguaaaucuccacuggac

SEQ ID NO: 2509254 - RNA, 19 nt, Artificial Sequence
  Description of Artificial Sequence: Synthetic oligonucleotide
ggaaaugcguguucaaccc

SEQ ID NO: 2509255 - RNA, 19 nt, Artificial Sequence
  Description of Artificial Sequence: Synthetic oligonucleotide
gaaaugcguguucaacccc

SEQ ID NO: 2509256 - RNA, 19 nt, Artificial Sequence
  Description of Artificial Sequence: Synthetic oligonucleotide
augucuuuagccggggcac

SEQ ID NO: 2509257 - RNA, 19 nt, Artificial Sequence
  Description of Artificial Sequence: Synthetic oligonucleotide
aauaaaccuucuuguguuu

SEQ ID NO: 2509258 - RNA, 19 nt, Artificial Sequence
  Description of Artificial Sequence: Synthetic oligonucleotide
auucucccagaucuuguag

SEQ ID NO: 2509259 - RNA, 19 nt, Artificial Sequence
  Description of Artificial Sequence: Synthetic oligonucleotide
acuagcuugaccugaugau

SEQ ID NO: 2509260 - RNA, 19 nt, Artificial Sequence
  Description of Artificial Sequence: Synthetic oligonucleotide
gagaaaucucaccagugaa

SEQ ID NO: 2509261 - RNA, 19 nt, Artificial Sequence
  Description of Artificial Sequence: Synthetic oligonucleotide
ucucaccagugaaagacuc

SEQ ID NO: 2509262 - RNA, 19 nt, Artificial Sequence
  Description of Artificial Sequence: Synthetic oligonucleotide
aaaugcguguucaaccccu

SEQ ID NO: 2509263 - RNA, 19 nt, Artificial Sequence
  Description of Artificial Sequence: Synthetic oligonucleotide
agagacgcgaacccgcucu

SEQ ID NO: 2509264 - RNA, 19 nt, Artificial Sequence
  Description of Artificial Sequence: Synthetic oligonucleotide
uuguagagacgcgaacccg

SEQ ID NO: 2509265 - RNA, 19 nt, Artificial Sequence
  Description of Artificial Sequence: Synthetic oligonucleotide
ugcguguucaaccccucca

SEQ ID NO: 2509266 - RNA, 19 nt, Artificial Sequence
  Description of Artificial Sequence: Synthetic oligonucleotide
ucagggacaaugccaucug

SEQ ID NO: 2509267 - RNA, 19 nt, Artificial Sequence
  Description of Artificial Sequence: Synthetic oligonucleotide
caucccauagcgguagugg

SEQ ID NO: 2509268 - RNA, 19 nt, Artificial Sequence
  Description of Artificial Sequence: Synthetic oligonucleotide
ggcucaauaccaauaaacc

SEQ ID NO: 2509269 - RNA, 19 nt, Artificial Sequence
  Description of Artificial Sequence: Synthetic oligonucleotide
uggacggcucaucccauag

SEQ ID NO: 2509270 - RNA, 19 nt, Artificial Sequence
  Description of Artificial Sequence: Synthetic oligonucleotide
uggggcuucacuagggauc

SEQ ID NO: 2509271 - RNA, 19 nt, Artificial Sequence
  Description of Artificial Sequence: Synthetic oligonucleotide
accucaguggguuuccugu

SEQ ID NO: 2509272 - RNA, 19 nt, Artificial Sequence
  Description of Artificial Sequence: Synthetic oligonucleotide
uugucugauagggagccug

SEQ ID NO: 2509273 - RNA, 19 nt, Artificial Sequence
  Description of Artificial Sequence: Synthetic oligonucleotide
gaugaaguaauggggcuuc

SEQ ID NO: 2509274 - RNA, 19 nt, Artificial Sequence
  Description of Artificial Sequence: Synthetic oligonucleotide
cagccucccacccucaagg

SEQ ID NO: 2509275 - RNA, 19 nt, Artificial Sequence
  Description of Artificial Sequence: Synthetic oligonucleotide
acagaauaggugccagucu

SEQ ID NO: 2509276 - RNA, 19 nt, Artificial Sequence
  Description of Artificial Sequence: Synthetic oligonucleotide
aguuccgcugccgaauaac

SEQ ID NO: 2509277 - RNA, 19 nt, Artificial Sequence
  Description of Artificial Sequence: Synthetic oligonucleotide
gacucaguaaaucuccacu

SEQ ID NO: 2509278 - RNA, 19 nt, Artificial Sequence
  Description of Artificial Sequence: Synthetic oligonucleotide
uaaugucuuuagccggggc

SEQ ID NO: 2509279 - RNA, 19 nt, Artificial Sequence
  Description of Artificial Sequence: Synthetic oligonucleotide
aagacugagcaggcagaac

SEQ ID NO: 2509280 - RNA, 19 nt, Artificial Sequence
  Description of Artificial Sequence: Synthetic oligonucleotide
cucaauaccaauaaaccuu

SEQ ID NO: 2509281 - RNA, 19 nt, Artificial Sequence
  Description of Artificial Sequence: Synthetic oligonucleotide
agaucuuguagagacgcga

SEQ ID NO: 2509282 - RNA, 19 nt, Artificial Sequence
  Description of Artificial Sequence: Synthetic oligonucleotide
cacugauguguccuugggg

SEQ ID NO: 2509283 - RNA, 19 nt, Artificial Sequence
  Description of Artificial Sequence: Synthetic oligonucleotide
uuggaugccaaggccaaca

SEQ ID NO: 2509284 - RNA, 19 nt, Artificial Sequence
  Description of Artificial Sequence: Synthetic oligonucleotide
gaaguaauggggcuucacu

SEQ ID NO: 2509285 - RNA, 19 nt, Artificial Sequence
  Description of Artificial Sequence: Synthetic oligonucleotide
caauauagcggaaaugcgu

SEQ ID NO: 2509286 - RNA, 19 nt, Artificial Sequence
  Description of Artificial Sequence: Synthetic oligonucleotide
agguaaagacugagcaggc

SEQ ID NO: 2509287 - RNA, 19 nt, Artificial Sequence
  Description of Artificial Sequence: Synthetic oligonucleotide
ugacucaguaaaucuccac

SEQ ID NO: 2509288 - RNA, 19 nt, Artificial Sequence
  Description of Artificial Sequence: Synthetic oligonucleotide
guggguuuccuguccacag

SEQ ID NO: 2509289 - RNA, 19 nt, Artificial Sequence
  Description of Artificial Sequence: Synthetic oligonucleotide
augcguguucaaccccucc

SEQ ID NO: 2509290 - RNA, 19 nt, Artificial Sequence
  Description of Artificial Sequence: Synthetic oligonucleotide
gacaacccaguuccgcugc

SEQ ID NO: 2509291 - RNA, 19 nt, Artificial Sequence
  Description of Artificial Sequence: Synthetic oligonucleotide
ggagcguagcuuuggaugc

SEQ ID NO: 2509292 - RNA, 19 nt, Artificial Sequence
  Description of Artificial Sequence: Synthetic oligonucleotide
ugaccugaugaugaaguaa

SEQ ID NO: 2509293 - RNA, 19 nt, Artificial Sequence
  Description of Artificial Sequence: Synthetic oligonucleotide
guuuggggauaauucuccc

SEQ ID NO: 2509294 - RNA, 19 nt, Artificial Sequence
  Description of Artificial Sequence: Synthetic oligonucleotide
agcacucucaggcucaaua

SEQ ID NO: 2509295 - RNA, 19 nt, Artificial Sequence
  Description of Artificial Sequence: Synthetic oligonucleotide
guucugccaauauagcgga

SEQ ID NO: 2509296 - RNA, 19 nt, Artificial Sequence
  Description of Artificial Sequence: Synthetic oligonucleotide
agugaaagacucagaaacu

SEQ ID NO: 2509297 - RNA, 19 nt, Artificial Sequence
  Description of Artificial Sequence: Synthetic oligonucleotide
uucaucagagaugggcucu

SEQ ID NO: 2509298 - RNA, 19 nt, Artificial Sequence
  Description of Artificial Sequence: Synthetic oligonucleotide
ucuccugacucaguaaauc

SEQ ID NO: 2509299 - RNA, 19 nt, Artificial Sequence
  Description of Artificial Sequence: Synthetic oligonucleotide
cacagaauaggugccaguc

SEQ ID NO: 2509300 - RNA, 19 nt, Artificial Sequence
  Description of Artificial Sequence: Synthetic oligonucleotide
ucgcaugguuagaugugag

SEQ ID NO: 2509301 - RNA, 19 nt, Artificial Sequence
  Description of Artificial Sequence: Synthetic oligonucleotide
cuugaccugaugaugaagu

SEQ ID NO: 2509302 - RNA, 19 nt, Artificial Sequence
  Description of Artificial Sequence: Synthetic oligonucleotide
uaaaucuccacuggaccuc

SEQ ID NO: 2509303 - RNA, 19 nt, Artificial Sequence
  Description of Artificial Sequence: Synthetic oligonucleotide
caacagggccgaaagucgc

SEQ ID NO: 2509304 - RNA, 19 nt, Artificial Sequence
  Description of Artificial Sequence: Synthetic oligonucleotide
gaucauggucccucgguga

SEQ ID NO: 2509305 - RNA, 19 nt, Artificial Sequence
  Description of Artificial Sequence: Synthetic oligonucleotide
caagacaacccaguuccgc

SEQ ID NO: 2509306 - RNA, 19 nt, Artificial Sequence
  Description of Artificial Sequence: Synthetic oligonucleotide
ugggcucuaccaccacugg

SEQ ID NO: 2509307 - RNA, 19 nt, Artificial Sequence
  Description of Artificial Sequence: Synthetic oligonucleotide
guaaaucuccacuggaccu

SEQ ID NO: 2509308 - RNA, 19 nt, Artificial Sequence
  Description of Artificial Sequence: Synthetic oligonucleotide
auauagcggaaaugcgugu

SEQ ID NO: 2509309 - RNA, 19 nt, Artificial Sequence
  Description of Artificial Sequence: Synthetic oligonucleotide
cuuccucuugucugauagg

SEQ ID NO: 2509310 - RNA, 19 nt, Artificial Sequence
  Description of Artificial Sequence: Synthetic oligonucleotide
aauaggugccagucuucau

SEQ ID NO: 2509311 - RNA, 19 nt, Artificial Sequence
  Description of Artificial Sequence: Synthetic oligonucleotide
aacccaguuccgcugccga

SEQ ID NO: 2509312 - RNA, 19 nt, Artificial Sequence
  Description of Artificial Sequence: Synthetic oligonucleotide
ugccaauauagcggaaaug

SEQ ID NO: 2509313 - RNA, 19 nt, Artificial Sequence
  Description of Artificial Sequence: Synthetic oligonucleotide
gaacccgcucuccugacuc

SEQ ID NO: 2509314 - RNA, 19 nt, Artificial Sequence
  Description of Artificial Sequence: Synthetic oligonucleotide
uccucuugucugauaggga

SEQ ID NO: 2509315 - RNA, 19 nt, Artificial Sequence
  Description of Artificial Sequence: Synthetic oligonucleotide
acaacccaguuccgcugcc

SEQ ID NO: 2509316 - RNA, 19 nt, Artificial Sequence
  Description of Artificial Sequence: Synthetic oligonucleotide
gugagaaaucucaccagug

SEQ ID NO: 2509317 - RNA, 19 nt, Artificial Sequence
  Description of Artificial Sequence: Synthetic oligonucleotide
aggcagaaccagcacucuc

SEQ ID NO: 2509318 - RNA, 19 nt, Artificial Sequence
  Description of Artificial Sequence: Synthetic oligonucleotide
gaauaggugccagucuuca

SEQ ID NO: 2509319 - RNA, 19 nt, Artificial Sequence
  Description of Artificial Sequence: Synthetic oligonucleotide
cagagaugggcucuaccac

SEQ ID NO: 2509320 - RNA, 19 nt, Artificial Sequence
  Description of Artificial Sequence: Synthetic oligonucleotide
acucucaggcucaauacca

SEQ ID NO: 2509321 - RNA, 19 nt, Artificial Sequence
  Description of Artificial Sequence: Synthetic oligonucleotide
guccacaggguccacuagc

SEQ ID NO: 2509322 - RNA, 19 nt, Artificial Sequence
  Description of Artificial Sequence: Synthetic oligonucleotide
agaauaggugccagucuuc

SEQ ID NO: 2509323 - RNA, 19 nt, Artificial Sequence
  Description of Artificial Sequence: Synthetic oligonucleotide
gagccuggacggcucaucc

SEQ ID NO: 2509324 - RNA, 19 nt, Artificial Sequence
  Description of Artificial Sequence: Synthetic oligonucleotide
agaaaucucaccagugaaa

SEQ ID NO: 2509325 - RNA, 19 nt, Artificial Sequence
  Description of Artificial Sequence: Synthetic oligonucleotide
agccuggacggcucauccc

SEQ ID NO: 2509326 - RNA, 19 nt, Artificial Sequence
  Description of Artificial Sequence: Synthetic oligonucleotide
aauucagguuuggggauaa

SEQ ID NO: 2509327 - RNA, 19 nt, Artificial Sequence
  Description of Artificial Sequence: Synthetic oligonucleotide
aaugcguguucaaccccuc

SEQ ID NO: 2509328 - RNA, 19 nt, Artificial Sequence
  Description of Artificial Sequence: Synthetic oligonucleotide
gcuucacuagggaucaugg

SEQ ID NO: 2509329 - RNA, 19 nt, Artificial Sequence
  Description of Artificial Sequence: Synthetic oligonucleotide
cacuagcuugaccugauga

SEQ ID NO: 2509330 - RNA, 19 nt, Artificial Sequence
  Description of Artificial Sequence: Synthetic oligonucleotide
ggcucuuuauugguguugg

SEQ ID NO: 2509331 - RNA, 19 nt, Artificial Sequence
  Description of Artificial Sequence: Synthetic oligonucleotide
uucagguuuggggauaauu

SEQ ID NO: 2509332 - RNA, 19 nt, Artificial Sequence
  Description of Artificial Sequence: Synthetic oligonucleotide
ugguuagaugugagaaauc

SEQ ID NO: 2509333 - RNA, 19 nt, Artificial Sequence
  Description of Artificial Sequence: Synthetic oligonucleotide
uguuuucgaggcuccugga

SEQ ID NO: 2509334 - RNA, 19 nt, Artificial Sequence
  Description of Artificial Sequence: Synthetic oligonucleotide
gguuuggggauaauucucc

SEQ ID NO: 2509335 - RNA, 19 nt, Artificial Sequence
  Description of Artificial Sequence: Synthetic oligonucleotide
cuagggaucauggucccuc

SEQ ID NO: 2509336 - RNA, 19 nt, Artificial Sequence
  Description of Artificial Sequence: Synthetic oligonucleotide
guuagaugugagaaaucuc

SEQ ID NO: 2509337 - RNA, 19 nt, Artificial Sequence
  Description of Artificial Sequence: Synthetic oligonucleotide
aaauucagguuuggggaua

SEQ ID NO: 2509338 - RNA, 19 nt, Artificial Sequence
  Description of Artificial Sequence: Synthetic oligonucleotide
ccagaucuuguagagacgc

SEQ ID NO: 2509339 - RNA, 19 nt, Artificial Sequence
  Description of Artificial Sequence: Synthetic oligonucleotide
gaaauucagguuuggggau

SEQ ID NO: 2509340 - RNA, 19 nt, Artificial Sequence
  Description of Artificial Sequence: Synthetic oligonucleotide
uagccggggcacauuaagu

SEQ ID NO: 2509341 - RNA, 19 nt, Artificial Sequence
  Description of Artificial Sequence: Synthetic oligonucleotide
uauagcggaaaugcguguu

SEQ ID NO: 2509342 - RNA, 19 nt, Artificial Sequence
  Description of Artificial Sequence: Synthetic oligonucleotide
ucuccaccaugucuccaca

SEQ ID NO: 2509343 - RNA, 19 nt, Artificial Sequence
  Description of Artificial Sequence: Synthetic oligonucleotide
ccacccucaagguaaagac

SEQ ID NO: 2509344 - RNA, 19 nt, Artificial Sequence
  Description of Artificial Sequence: Synthetic oligonucleotide
uggggauaauucucccaga

SEQ ID NO: 2509345 - RNA, 19 nt, Artificial Sequence
  Description of Artificial Sequence: Synthetic oligonucleotide
caauaaaccuucuuguguu

SEQ ID NO: 2509346 - RNA, 19 nt, Artificial Sequence
  Description of Artificial Sequence: Synthetic oligonucleotide
ccgaaagucgcaugguuag

SEQ ID NO: 2509347 - RNA, 19 nt, Artificial Sequence
  Description of Artificial Sequence: Synthetic oligonucleotide
uagcggaaaugcguguuca

SEQ ID NO: 2509348 - RNA, 19 nt, Artificial Sequence
  Description of Artificial Sequence: Synthetic oligonucleotide
caugguuagaugugagaaa

SEQ ID NO: 2509349 - RNA, 19 nt, Artificial Sequence
  Description of Artificial Sequence: Synthetic oligonucleotide
gagcaucuuccacugaugu

SEQ ID NO: 2509350 - RNA, 19 nt, Artificial Sequence
  Description of Artificial Sequence: Synthetic oligonucleotide
uccacuagcuugaccugau

SEQ ID NO: 2509351 - RNA, 19 nt, Artificial Sequence
  Description of Artificial Sequence: Synthetic oligonucleotide
ggcucuaccaccacugggc

SEQ ID NO: 2509352 - RNA, 19 nt, Artificial Sequence
  Description of Artificial Sequence: Synthetic oligonucleotide
gguuagaugugagaaaucu

SEQ ID NO: 2509353 - RNA, 19 nt, Artificial Sequence
  Description of Artificial Sequence: Synthetic oligonucleotide
agaugggcucuaccaccac

SEQ ID NO: 2509354 - RNA, 19 nt, Artificial Sequence
  Description of Artificial Sequence: Synthetic oligonucleotide
cggaaaugcguguucaacc

SEQ ID NO: 2509355 - RNA, 19 nt, Artificial Sequence
  Description of Artificial Sequence: Synthetic oligonucleotide
agccggggcacauuaaguu

SEQ ID NO: 2509356 - RNA, 19 nt, Artificial Sequence
  Description of Artificial Sequence: Synthetic oligonucleotide
agggaucauggucccucgg

SEQ ID NO: 2509357 - RNA, 19 nt, Artificial Sequence
  Description of Artificial Sequence: Synthetic oligonucleotide
ucaucccauagcgguagug

SEQ ID NO: 2509358 - RNA, 19 nt, Artificial Sequence
  Description of Artificial Sequence: Synthetic oligonucleotide
uccccauugccuccaucac

SEQ ID NO: 2509359 - RNA, 19 nt, Artificial Sequence
  Description of Artificial Sequence: Synthetic oligonucleotide
agggacaaugccaucugcu

SEQ ID NO: 2509360 - RNA, 19 nt, Artificial Sequence
  Description of Artificial Sequence: Synthetic oligonucleotide
gaucuuguagagacgcgaa

SEQ ID NO: 2509361 - RNA, 19 nt, Artificial Sequence
  Description of Artificial Sequence: Synthetic oligonucleotide
gcucaauaccaauaaaccu

SEQ ID NO: 2509362 - RNA, 19 nt, Artificial Sequence
  Description of Artificial Sequence: Synthetic oligonucleotide
uccuugguucugccaauau

SEQ ID NO: 2509363 - RNA, 19 nt, Artificial Sequence
  Description of Artificial Sequence: Synthetic oligonucleotide
cagggacaaugccaucugc

SEQ ID NO: 2509364 - RNA, 19 nt, Artificial Sequence
  Description of Artificial Sequence: Synthetic oligonucleotide
gaccugaugaugaaguaau

SEQ ID NO: 2509365 - RNA, 19 nt, Artificial Sequence
  Description of Artificial Sequence: Synthetic oligonucleotide
accccuccaagacaaccca

SEQ ID NO: 2509366 - RNA, 19 nt, Artificial Sequence
  Description of Artificial Sequence: Synthetic oligonucleotide
agucgcaugguuagaugug

SEQ ID NO: 2509367 - RNA, 19 nt, Artificial Sequence
  Description of Artificial Sequence: Synthetic oligonucleotide
gccuucuaagaucuccacc

SEQ ID NO: 2509368 - RNA, 19 nt, Artificial Sequence
  Description of Artificial Sequence: Synthetic oligonucleotide
gcucuaccaccacugggcg

SEQ ID NO: 2509369 - RNA, 19 nt, Artificial Sequence
  Description of Artificial Sequence: Synthetic oligonucleotide
gagaugggcucuaccacca

SEQ ID NO: 2509370 - RNA, 19 nt, Artificial Sequence
  Description of Artificial Sequence: Synthetic oligonucleotide
gauagggagccuggacggc

SEQ ID NO: 2509371 - RNA, 19 nt, Artificial Sequence
  Description of Artificial Sequence: Synthetic oligonucleotide
gaccacuuugccuugcuuu

SEQ ID NO: 2509372 - RNA, 19 nt, Artificial Sequence
  Description of Artificial Sequence: Synthetic oligonucleotide
cucaggcucaauaccaaua

SEQ ID NO: 2509373 - RNA, 19 nt, Artificial Sequence
  Description of Artificial Sequence: Synthetic oligonucleotide
cucuaccaccacugggcgc

SEQ ID NO: 2509374 - RNA, 19 nt, Artificial Sequence
  Description of Artificial Sequence: Synthetic oligonucleotide
aacccgcucuccugacuca

SEQ ID NO: 2509375 - RNA, 19 nt, Artificial Sequence
  Description of Artificial Sequence: Synthetic oligonucleotide
gacugagcaggcagaacca

SEQ ID NO: 2509376 - RNA, 19 nt, Artificial Sequence
  Description of Artificial Sequence: Synthetic oligonucleotide
cagguuuggggauaauucu

SEQ ID NO: 2509377 - RNA, 19 nt, Artificial Sequence
  Description of Artificial Sequence: Synthetic oligonucleotide
cauugccuccaucacaucu

SEQ ID NO: 2509378 - RNA, 19 nt, Artificial Sequence
  Description of Artificial Sequence: Synthetic oligonucleotide
aacagggccgaaagucgca

SEQ ID NO: 2509379 - RNA, 19 nt, Artificial Sequence
  Description of Artificial Sequence: Synthetic oligonucleotide
agacgcgaacccgcucucc

SEQ ID NO: 2509380 - RNA, 19 nt, Artificial Sequence
  Description of Artificial Sequence: Synthetic oligonucleotide
caucugcucuaggaaauuc

SEQ ID NO: 2509381 - RNA, 19 nt, Artificial Sequence
  Description of Artificial Sequence: Synthetic oligonucleotide
auagggagccuggacggcu

SEQ ID NO: 2509382 - RNA, 19 nt, Artificial Sequence
  Description of Artificial Sequence: Synthetic oligonucleotide
ugcuccauggaggauucuu

SEQ ID NO: 2509383 - RNA, 19 nt, Artificial Sequence
  Description of Artificial Sequence: Synthetic oligonucleotide
gaaagucgcaugguuagau

SEQ ID NO: 2509384 - RNA, 19 nt, Artificial Sequence
  Description of Artificial Sequence: Synthetic oligonucleotide
ugucuuuagccggggcaca

SEQ ID NO: 2509385 - RNA, 19 nt, Artificial Sequence
  Description of Artificial Sequence: Synthetic oligonucleotide
aguccauauuucagggaca

SEQ ID NO: 2509386 - RNA, 19 nt, Artificial Sequence
  Description of Artificial Sequence: Synthetic oligonucleotide
ucggugauccuugguucug

SEQ ID NO: 2509387 - RNA, 19 nt, Artificial Sequence
  Description of Artificial Sequence: Synthetic oligonucleotide
gggcucuaccaccacuggg

SEQ ID NO: 2509388 - RNA, 19 nt, Artificial Sequence
  Description of Artificial Sequence: Synthetic oligonucleotide
gggauaauucucccagauc

SEQ ID NO: 2509389 - RNA, 19 nt, Artificial Sequence
  Description of Artificial Sequence: Synthetic oligonucleotide
gccaacagggccgaaaguc

SEQ ID NO: 2509390 - RNA, 19 nt, Artificial Sequence
  Description of Artificial Sequence: Synthetic oligonucleotide
gucgcaugguuagauguga

SEQ ID NO: 2509391 - RNA, 19 nt, Artificial Sequence
  Description of Artificial Sequence: Synthetic oligonucleotide
cuuuagccggggcacauua

SEQ ID NO: 2509392 - RNA, 19 nt, Artificial Sequence
  Description of Artificial Sequence: Synthetic oligonucleotide
uuucagggacaaugccauc

SEQ ID NO: 2509393 - RNA, 19 nt, Artificial Sequence
  Description of Artificial Sequence: Synthetic oligonucleotide
agggagcguagcuuuggau

SEQ ID NO: 2509394 - RNA, 19 nt, Artificial Sequence
  Description of Artificial Sequence: Synthetic oligonucleotide
gaugggcucuaccaccacu

SEQ ID NO: 2509395 - RNA, 19 nt, Artificial Sequence
  Description of Artificial Sequence: Synthetic oligonucleotide
ggugauccuugguucugcc

SEQ ID NO: 2509396 - RNA, 19 nt, Artificial Sequence
  Description of Artificial Sequence: Synthetic oligonucleotide
ggugccagucuucaucaga

SEQ ID NO: 2509397 - RNA, 19 nt, Artificial Sequence
  Description of Artificial Sequence: Synthetic oligonucleotide
gagggagcguagcuuugga

SEQ ID NO: 2509398 - RNA, 19 nt, Artificial Sequence
  Description of Artificial Sequence: Synthetic oligonucleotide
uagagacgcgaacccgcuc

SEQ ID NO: 2509399 - RNA, 19 nt, Artificial Sequence
  Description of Artificial Sequence: Synthetic oligonucleotide
agcggaaaugcguguucaa

SEQ ID NO: 2509400 - RNA, 19 nt, Artificial Sequence
  Description of Artificial Sequence: Synthetic oligonucleotide
ccauggaggauucuuccuc

SEQ ID NO: 2509401 - RNA, 19 nt, Artificial Sequence
  Description of Artificial Sequence: Synthetic oligonucleotide
acggcucaucccauagcgg

SEQ ID NO: 2509402 - RNA, 19 nt, Artificial Sequence
  Description of Artificial Sequence: Synthetic oligonucleotide
accugaugaugaaguaaug

SEQ ID NO: 2509403 - RNA, 19 nt, Artificial Sequence
  Description of Artificial Sequence: Synthetic oligonucleotide
gcugccgaauaacuuggac

SEQ ID NO: 2509404 - RNA, 19 nt, Artificial Sequence
  Description of Artificial Sequence: Synthetic oligonucleotide
gaaccagcacucucaggcu

SEQ ID NO: 2509405 - RNA, 19 nt, Artificial Sequence
  Description of Artificial Sequence: Synthetic oligonucleotide
gagcguagcuuuggaugcc

SEQ ID NO: 2509406 - RNA, 19 nt, Artificial Sequence
  Description of Artificial Sequence: Synthetic oligonucleotide
ggagggagcguagcuuugg

SEQ ID NO: 2509407 - RNA, 19 nt, Artificial Sequence
  Description of Artificial Sequence: Synthetic oligonucleotide
cauccuugccuucuaagau

SEQ ID NO: 2509408 - RNA, 19 nt, Artificial Sequence
  Description of Artificial Sequence: Synthetic oligonucleotide
gcucaucccauagcgguag

SEQ ID NO: 2509409 - RNA, 19 nt, Artificial Sequence
  Description of Artificial Sequence: Synthetic oligonucleotide
gugaaagacucagaaacuu

SEQ ID NO: 2509410 - RNA, 19 nt, Artificial Sequence
  Description of Artificial Sequence: Synthetic oligonucleotide
ccaauaaaccuucuugugu

SEQ ID NO: 2509411 - RNA, 19 nt, Artificial Sequence
  Description of Artificial Sequence: Synthetic oligonucleotide
cagaauaggugccagucuu

SEQ ID NO: 2509412 - RNA, 19 nt, Artificial Sequence
  Description of Artificial Sequence: Synthetic oligonucleotide
ccgcugccgaauaacuugg

SEQ ID NO: 2509413 - RNA, 19 nt, Artificial Sequence
  Description of Artificial Sequence: Synthetic oligonucleotide
ggcuucacuagggaucaug

SEQ ID NO: 2509414 - RNA, 19 nt, Artificial Sequence
  Description of Artificial Sequence: Synthetic oligonucleotide
cccagaucuuguagagacg

SEQ ID NO: 2509415 - RNA, 19 nt, Artificial Sequence
  Description of Artificial Sequence: Synthetic oligonucleotide
agcguagcuuuggaugcca

SEQ ID NO: 2509416 - RNA, 19 nt, Artificial Sequence
  Description of Artificial Sequence: Synthetic oligonucleotide
aaucuccacuggaccucag

SEQ ID NO: 2509417 - RNA, 19 nt, Artificial Sequence
  Description of Artificial Sequence: Synthetic oligonucleotide
ggacaaugccaucugcucu

SEQ ID NO: 2509418 - RNA, 19 nt, Artificial Sequence
  Description of Artificial Sequence: Synthetic oligonucleotide
ccucggugauccuugguuc

SEQ ID NO: 2509419 - RNA, 19 nt, Artificial Sequence
  Description of Artificial Sequence: Synthetic oligonucleotide
caguggguuuccuguccac

SEQ ID NO: 2509420 - RNA, 19 nt, Artificial Sequence
  Description of Artificial Sequence: Synthetic oligonucleotide
gagacgcgaacccgcucuc

SEQ ID NO: 2509421 - RNA, 19 nt, Artificial Sequence
  Description of Artificial Sequence: Synthetic oligonucleotide
gauaauucucccagaucuu

SEQ ID NO: 2509422 - RNA, 19 nt, Artificial Sequence
  Description of Artificial Sequence: Synthetic oligonucleotide
uucgaggcuccuggauccc

SEQ ID NO: 2509423 - RNA, 19 nt, Artificial Sequence
  Description of Artificial Sequence: Synthetic oligonucleotide
agggcucuuuauugguguu

SEQ ID NO: 2509424 - RNA, 19 nt, Artificial Sequence
  Description of Artificial Sequence: Synthetic oligonucleotide
gauccccauugccuccauc

SEQ ID NO: 2509425 - RNA, 19 nt, Artificial Sequence
  Description of Artificial Sequence: Synthetic oligonucleotide
ucccucggugauccuuggu

SEQ ID NO: 2509426 - RNA, 19 nt, Artificial Sequence
  Description of Artificial Sequence: Synthetic oligonucleotide
gcaggcagaaccagcacuc

SEQ ID NO: 2509427 - RNA, 19 nt, Artificial Sequence
  Description of Artificial Sequence: Synthetic oligonucleotide
agccucccacccucaaggu

SEQ ID NO: 2509428 - RNA, 19 nt, Artificial Sequence
  Description of Artificial Sequence: Synthetic oligonucleotide
ccaagacaacccaguuccg

SEQ ID NO: 2509429 - RNA, 19 nt, Artificial Sequence
  Description of Artificial Sequence: Synthetic oligonucleotide
gacgcgaacccgcucuccu

SEQ ID NO: 2509430 - RNA, 19 nt, Artificial Sequence
  Description of Artificial Sequence: Synthetic oligonucleotide
gccuggacggcucauccca

SEQ ID NO: 2509431 - RNA, 19 nt, Artificial Sequence
  Description of Artificial Sequence: Synthetic oligonucleotide
cagggcucuuuauuggugu

SEQ ID NO: 2509432 - RNA, 19 nt, Artificial Sequence
  Description of Artificial Sequence: Synthetic oligonucleotide
guaguggggagggagcgua

SEQ ID NO: 2509433 - RNA, 19 nt, Artificial Sequence
  Description of Artificial Sequence: Synthetic oligonucleotide
gcggaaaugcguguucaac

SEQ ID NO: 2509434 - RNA, 19 nt, Artificial Sequence
  Description of Artificial Sequence: Synthetic oligonucleotide
cagggccgaaagucgcaug

SEQ ID NO: 2509435 - RNA, 19 nt, Artificial Sequence
  Description of Artificial Sequence: Synthetic oligonucleotide
ggacggcucaucccauagc

SEQ ID NO: 2509436 - RNA, 19 nt, Artificial Sequence
  Description of Artificial Sequence: Synthetic oligonucleotide
acagggccgaaagucgcau

SEQ ID NO: 2509437 - RNA, 19 nt, Artificial Sequence
  Description of Artificial Sequence: Synthetic oligonucleotide
acccgcucuccugacucag

SEQ ID NO: 2509438 - RNA, 19 nt, Artificial Sequence
  Description of Artificial Sequence: Synthetic oligonucleotide
cguagcuuuggaugccaag

SEQ ID NO: 2509439 - RNA, 19 nt, Artificial Sequence
  Description of Artificial Sequence: Synthetic oligonucleotide
gauccuugguucugccaau

SEQ ID NO: 2509440 - RNA, 19 nt, Artificial Sequence
  Description of Artificial Sequence: Synthetic oligonucleotide
ucuuuagccggggcacauu

SEQ ID NO: 2509441 - RNA, 19 nt, Artificial Sequence
  Description of Artificial Sequence: Synthetic oligonucleotide
acuagggaucauggucccu

SEQ ID NO: 2509442 - RNA, 19 nt, Artificial Sequence
  Description of Artificial Sequence: Synthetic oligonucleotide
ccagugaaagacucagaaa

SEQ ID NO: 2509443 - RNA, 19 nt, Artificial Sequence
  Description of Artificial Sequence: Synthetic oligonucleotide
ggggauaauucucccagau

SEQ ID NO: 2509444 - RNA, 19 nt, Artificial Sequence
  Description of Artificial Sequence: Synthetic oligonucleotide
gcagccucccacccucaag

SEQ ID NO: 2509445 - RNA, 19 nt, Artificial Sequence
  Description of Artificial Sequence: Synthetic oligonucleotide
cucggugauccuugguucu

SEQ ID NO: 2509446 - RNA, 19 nt, Artificial Sequence
  Description of Artificial Sequence: Synthetic oligonucleotide
gggccaucaguccauauuu

SEQ ID NO: 2509447 - RNA, 19 nt, Artificial Sequence
  Description of Artificial Sequence: Synthetic oligonucleotide
gcuccauggaggauucuuc

SEQ ID NO: 2509448 - RNA, 19 nt, Artificial Sequence
  Description of Artificial Sequence: Synthetic oligonucleotide
acccaguuccgcugccgaa

SEQ ID NO: 2509449 - RNA, 19 nt, Artificial Sequence
  Description of Artificial Sequence: Synthetic oligonucleotide
gucugauagggagccugga

SEQ ID NO: 2509450 - RNA, 19 nt, Artificial Sequence
  Description of Artificial Sequence: Synthetic oligonucleotide
gcuuuccagcauccuugcc

SEQ ID NO: 2509451 - RNA, 19 nt, Artificial Sequence
  Description of Artificial Sequence: Synthetic oligonucleotide
caccacugggcgccgccug

SEQ ID NO: 2509452 - RNA, 19 nt, Artificial Sequence
  Description of Artificial Sequence: Synthetic oligonucleotide
ucccacccucaagguaaag

SEQ ID NO: 2509453 - RNA, 19 nt, Artificial Sequence
  Description of Artificial Sequence: Synthetic oligonucleotide
gggaucauggucccucggu

SEQ ID NO: 2509454 - RNA, 19 nt, Artificial Sequence
  Description of Artificial Sequence: Synthetic oligonucleotide
cguguucaaccccuccaag

SEQ ID NO: 2509455 - RNA, 19 nt, Artificial Sequence
  Description of Artificial Sequence: Synthetic oligonucleotide
agcagccucccacccucaa

SEQ ID NO: 2509456 - RNA, 19 nt, Artificial Sequence
  Description of Artificial Sequence: Synthetic oligonucleotide
guagagacgcgaacccgcu

SEQ ID NO: 2509457 - RNA, 19 nt, Artificial Sequence
  Description of Artificial Sequence: Synthetic oligonucleotide
caccaugucuccacagaau

SEQ ID NO: 2509458 - RNA, 19 nt, Artificial Sequence
  Description of Artificial Sequence: Synthetic oligonucleotide
ccacuuugccuugcuuucc

SEQ ID NO: 2509459 - RNA, 19 nt, Artificial Sequence
  Description of Artificial Sequence: Synthetic oligonucleotide
guggggagggagcguagcu

SEQ ID NO: 2509460 - RNA, 19 nt, Artificial Sequence
  Description of Artificial Sequence: Synthetic oligonucleotide
gccgaaagucgcaugguua

SEQ ID NO: 2509461 - RNA, 19 nt, Artificial Sequence
  Description of Artificial Sequence: Synthetic oligonucleotide
ccccuccaagacaacccag

SEQ ID NO: 2509462 - RNA, 19 nt, Artificial Sequence
  Description of Artificial Sequence: Synthetic oligonucleotide
cuaccaccacugggcgccg

SEQ ID NO: 2509463 - RNA, 19 nt, Artificial Sequence
  Description of Artificial Sequence: Synthetic oligonucleotide
cccauagcgguagugggga

SEQ ID NO: 2509464 - RNA, 19 nt, Artificial Sequence
  Description of Artificial Sequence: Synthetic oligonucleotide
ccuugguucugccaauaua

SEQ ID NO: 2509465 - RNA, 19 nt, Artificial Sequence
  Description of Artificial Sequence: Synthetic oligonucleotide
ggccaucaguccauauuuc

SEQ ID NO: 2509466 - RNA, 19 nt, Artificial Sequence
  Description of Artificial Sequence: Synthetic oligonucleotide
gcucuaggaaauucagguu

SEQ ID NO: 2509467 - RNA, 19 nt, Artificial Sequence
  Description of Artificial Sequence: Synthetic oligonucleotide
ccauagcgguaguggggag

SEQ ID NO: 2509468 - RNA, 19 nt, Artificial Sequence
  Description of Artificial Sequence: Synthetic oligonucleotide
cgguaguggggagggagcg

SEQ ID NO: 2509469 - RNA, 19 nt, Artificial Sequence
  Description of Artificial Sequence: Synthetic oligonucleotide
cccacccucaagguaaaga

SEQ ID NO: 2509470 - RNA, 19 nt, Artificial Sequence
  Description of Artificial Sequence: Synthetic oligonucleotide
cgcaugguuagaugugaga

SEQ ID NO: 2509471 - RNA, 19 nt, Artificial Sequence
  Description of Artificial Sequence: Synthetic oligonucleotide
ggggccaucaguccauauu

SEQ ID NO: 2509472 - RNA, 19 nt, Artificial Sequence
  Description of Artificial Sequence: Synthetic oligonucleotide
cuggacggcucaucccaua

SEQ ID NO: 2509473 - RNA, 19 nt, Artificial Sequence
  Description of Artificial Sequence: Synthetic oligonucleotide
uagcgguaguggggaggga

SEQ ID NO: 2509474 - RNA, 19 nt, Artificial Sequence
  Description of Artificial Sequence: Synthetic oligonucleotide
ccacuagcuugaccugaug

SEQ ID NO: 2509475 - RNA, 19 nt, Artificial Sequence
  Description of Artificial Sequence: Synthetic oligonucleotide
gggagggagcguagcuuug

SEQ ID NO: 2509476 - RNA, 19 nt, Artificial Sequence
  Description of Artificial Sequence: Synthetic oligonucleotide
gccgaauaacuuggaccac

SEQ ID NO: 2509477 - RNA, 19 nt, Artificial Sequence
  Description of Artificial Sequence: Synthetic oligonucleotide
cacugggcgccgccugcuc

SEQ ID NO: 2509478 - RNA, 19 nt, Artificial Sequence
  Description of Artificial Sequence: Synthetic oligonucleotide
ggggagggagcguagcuuu

SEQ ID NO: 2509479 - RNA, 19 nt, Artificial Sequence
  Description of Artificial Sequence: Synthetic oligonucleotide
caguuccgcugccgaauaa

SEQ ID NO: 2509480 - RNA, 19 nt, Artificial Sequence
  Description of Artificial Sequence: Synthetic oligonucleotide
cacuggaccucaguggguu

SEQ ID NO: 2509481 - RNA, 19 nt, Artificial Sequence
  Description of Artificial Sequence: Synthetic oligonucleotide
gcgaacccgcucuccugac

SEQ ID NO: 2509482 - RNA, 19 nt, Artificial Sequence
  Description of Artificial Sequence: Synthetic oligonucleotide
ccgaauaacuuggaccacu

SEQ ID NO: 2509483 - RNA, 19 nt, Artificial Sequence
  Description of Artificial Sequence: Synthetic oligonucleotide
gucuuuagccggggcacau

SEQ ID NO: 2509484 - RNA, 19 nt, Artificial Sequence
  Description of Artificial Sequence: Synthetic oligonucleotide
ccgccugcuccauggagga

SEQ ID NO: 2509485 - RNA, 19 nt, Artificial Sequence
  Description of Artificial Sequence: Synthetic oligonucleotide
ggccgaaagucgcaugguu

SEQ ID NO: 2509486 - RNA, 19 nt, Artificial Sequence
  Description of Artificial Sequence: Synthetic oligonucleotide
gccggggcacauuaaguuu

SEQ ID NO: 2509487 - RNA, 19 nt, Artificial Sequence
  Description of Artificial Sequence: Synthetic oligonucleotide
ccauugccuccaucacauc

SEQ ID NO: 2509488 - RNA, 19 nt, Artificial Sequence
  Description of Artificial Sequence: Synthetic oligonucleotide
ggcucaucccauagcggua

SEQ ID NO: 2509489 - RNA, 19 nt, Artificial Sequence
  Description of Artificial Sequence: Synthetic oligonucleotide
gguuuccuguccacagggu

SEQ ID NO: 2509490 - RNA, 19 nt, Artificial Sequence
  Description of Artificial Sequence: Synthetic oligonucleotide
caggcagaaccagcacucu

SEQ ID NO: 2509491 - RNA, 19 nt, Artificial Sequence
  Description of Artificial Sequence: Synthetic oligonucleotide
cucaucccauagcgguagu

SEQ ID NO: 2509492 - RNA, 19 nt, Artificial Sequence
  Description of Artificial Sequence: Synthetic oligonucleotide
ccggggcacauuaaguuuu

SEQ ID NO: 2509493 - RNA, 19 nt, Artificial Sequence
  Description of Artificial Sequence: Synthetic oligonucleotide
cgcgaacccgcucuccuga

SEQ ID NO: 2509494 - RNA, 19 nt, Artificial Sequence
  Description of Artificial Sequence: Synthetic oligonucleotide
gccugcuccauggaggauu

SEQ ID NO: 2509495 - RNA, 19 nt, Artificial Sequence
  Description of Artificial Sequence: Synthetic oligonucleotide
cccucggugauccuugguu

SEQ ID NO: 2509496 - RNA, 19 nt, Artificial Sequence
  Description of Artificial Sequence: Synthetic oligonucleotide
ccacagaauaggugccagu

SEQ ID NO: 2509497 - RNA, 19 nt, Artificial Sequence
  Description of Artificial Sequence: Synthetic oligonucleotide
gguaguggggagggagcgu

SEQ ID NO: 2509498 - RNA, 19 nt, Artificial Sequence
  Description of Artificial Sequence: Synthetic oligonucleotide
cgaauaacuuggaccacuu

SEQ ID NO: 2509499 - RNA, 19 nt, Artificial Sequence
  Description of Artificial Sequence: Synthetic oligonucleotide
ugggcgccgccugcuccau

SEQ ID NO: 2509500 - RNA, 19 nt, Artificial Sequence
  Description of Artificial Sequence: Synthetic oligonucleotide
ccgcucuccugacucagua

SEQ ID NO: 2509501 - RNA, 19 nt, Artificial Sequence
  Description of Artificial Sequence: Synthetic oligonucleotide
ggaccacuuugccuugcuu

SEQ ID NO: 2509502 - RNA, 19 nt, Artificial Sequence
  Description of Artificial Sequence: Synthetic oligonucleotide
cgccgccugcuccauggag

SEQ ID NO: 2509503 - RNA, 19 nt, Artificial Sequence
  Description of Artificial Sequence: Synthetic oligonucleotide
cgaaagucgcaugguuaga

SEQ ID NO: 2509504 - RNA, 19 nt, Artificial Sequence
  Description of Artificial Sequence: Synthetic oligonucleotide
ccuccaagacaacccaguu

SEQ ID NO: 2509505 - RNA, 19 nt, Artificial Sequence
  Description of Artificial Sequence: Synthetic oligonucleotide
gcguagcuuuggaugccaa

SEQ ID NO: 2509506 - RNA, 19 nt, Artificial Sequence
  Description of Artificial Sequence: Synthetic oligonucleotide
cgcucuccugacucaguaa

SEQ ID NO: 2509507 - RNA, 19 nt, Artificial Sequence
  Description of Artificial Sequence: Synthetic oligonucleotide
gggccgaaagucgcauggu

SEQ ID NO: 2509508 - RNA, 19 nt, Artificial Sequence
  Description of Artificial Sequence: Synthetic oligonucleotide
gggcgccgccugcuccaug

SEQ ID NO: 2509509 - RNA, 19 nt, Artificial Sequence
  Description of Artificial Sequence: Synthetic oligonucleotide
cgcugccgaauaacuugga

SEQ ID NO: 2509510 - RNA, 19 nt, Artificial Sequence
  Description of Artificial Sequence: Synthetic oligonucleotide
ggaccucaguggguuuccu

SEQ ID NO: 2509511 - RNA, 19 nt, Artificial Sequence
  Description of Artificial Sequence: Synthetic oligonucleotide
cccaguuccgcugccgaau

SEQ ID NO: 2509512 - RNA, 19 nt, Artificial Sequence
  Description of Artificial Sequence: Synthetic oligonucleotide
ccuggacggcucaucccau

SEQ ID NO: 2509513 - RNA, 19 nt, Artificial Sequence
  Description of Artificial Sequence: Synthetic oligonucleotide
cgaacccgcucuccugacu

SEQ ID NO: 2509514 - RNA, 19 nt, Artificial Sequence
  Description of Artificial Sequence: Synthetic oligonucleotide
cagcacucucaggcucaau

SEQ ID NO: 2509515 - RNA, 19 nt, Artificial Sequence
  Description of Artificial Sequence: Synthetic oligonucleotide
aagugaaagccauucuucc

SEQ ID NO: 2509516 - RNA, 19 nt, Artificial Sequence
  Description of Artificial Sequence: Synthetic oligonucleotide
uucaguguagcucagauuc

SEQ ID NO: 2509517 - RNA, 19 nt, Artificial Sequence
  Description of Artificial Sequence: Synthetic oligonucleotide
ucauacaagauggagaaag

SEQ ID NO: 2509518 - RNA, 19 nt, Artificial Sequence
  Description of Artificial Sequence: Synthetic oligonucleotide
aauuuaucuugucuccgac

SEQ ID NO: 2509519 - RNA, 19 nt, Artificial Sequence
  Description of Artificial Sequence: Synthetic oligonucleotide
ugugauuugggaaagccga

SEQ ID NO: 2509520 - RNA, 19 nt, Artificial Sequence
  Description of Artificial Sequence: Synthetic oligonucleotide
uuuuccagguccaacaggc

SEQ ID NO: 2509521 - RNA, 19 nt, Artificial Sequence
  Description of Artificial Sequence: Synthetic oligonucleotide
uaauguaagaccuugugau

SEQ ID NO: 2509522 - RNA, 19 nt, Artificial Sequence
  Description of Artificial Sequence: Synthetic oligonucleotide
uucaguuccaaaaucgggc

SEQ ID NO: 2509523 - RNA, 19 nt, Artificial Sequence
  Description of Artificial Sequence: Synthetic oligonucleotide
auuugagucauacaagaug

SEQ ID NO: 2509524 - RNA, 19 nt, Artificial Sequence
  Description of Artificial Sequence: Synthetic oligonucleotide
aagauuucuggcuggaucu

SEQ ID NO: 2509525 - RNA, 19 nt, Artificial Sequence
  Description of Artificial Sequence: Synthetic oligonucleotide
ucuccauaauguaagaccu

SEQ ID NO: 2509526 - RNA, 19 nt, Artificial Sequence
  Description of Artificial Sequence: Synthetic oligonucleotide
uuuaagggcaccuuucucu

SEQ ID NO: 2509527 - RNA, 19 nt, Artificial Sequence
  Description of Artificial Sequence: Synthetic oligonucleotide
ucaggagcaauaaaauuca

SEQ ID NO: 2509528 - RNA, 19 nt, Artificial Sequence
  Description of Artificial Sequence: Synthetic oligonucleotide
ugcauuaccuuguugaagu

SEQ ID NO: 2509529 - RNA, 19 nt, Artificial Sequence
  Description of Artificial Sequence: Synthetic oligonucleotide
ucaguuccaaaaucgggcg

SEQ ID NO: 2509530 - RNA, 19 nt, Artificial Sequence
  Description of Artificial Sequence: Synthetic oligonucleotide
gaugcaauacucaugcuug

SEQ ID NO: 2509531 - RNA, 19 nt, Artificial Sequence
  Description of Artificial Sequence: Synthetic oligonucleotide
uugugauuugggaaagccg

SEQ ID NO: 2509532 - RNA, 19 nt, Artificial Sequence
  Description of Artificial Sequence: Synthetic oligonucleotide
guuacagucauagacgaag

SEQ ID NO: 2509533 - RNA, 19 nt, Artificial Sequence
  Description of Artificial Sequence: Synthetic oligonucleotide
caagucuccauaauguaag

SEQ ID NO: 2509534 - RNA, 19 nt, Artificial Sequence
  Description of Artificial Sequence: Synthetic oligonucleotide
acugcuuuugauaucugcc

SEQ ID NO: 2509535 - RNA, 19 nt, Artificial Sequence
  Description of Artificial Sequence: Synthetic oligonucleotide
uguaagcgcucucauaacc

SEQ ID NO: 2509536 - RNA, 19 nt, Artificial Sequence
  Description of Artificial Sequence: Synthetic oligonucleotide
aaauuuaucuugucuccga

SEQ ID NO: 2509537 - RNA, 19 nt, Artificial Sequence
  Description of Artificial Sequence: Synthetic oligonucleotide
auaauguaagaccuuguga

SEQ ID NO: 2509538 - RNA, 19 nt, Artificial Sequence
  Description of Artificial Sequence: Synthetic oligonucleotide
uagacgaagucauaguuac

SEQ ID NO: 2509539 - RNA, 19 nt, Artificial Sequence
  Description of Artificial Sequence: Synthetic oligonucleotide
gucuccauaauguaagacc

SEQ ID NO: 2509540 - RNA, 19 nt, Artificial Sequence
  Description of Artificial Sequence: Synthetic oligonucleotide
agauucugcaguuugcucu

SEQ ID NO: 2509541 - RNA, 19 nt, Artificial Sequence
  Description of Artificial Sequence: Synthetic oligonucleotide
ucacuuaacauguccuucc

SEQ ID NO: 2509542 - RNA, 19 nt, Artificial Sequence
  Description of Artificial Sequence: Synthetic oligonucleotide
aagggcaccuuucucuuuc

SEQ ID NO: 2509543 - RNA, 19 nt, Artificial Sequence
  Description of Artificial Sequence: Synthetic oligonucleotide
aagaccuugugauuuggga

SEQ ID NO: 2509544 - RNA, 19 nt, Artificial Sequence
  Description of Artificial Sequence: Synthetic oligonucleotide
auaaccugcuccuucacca

SEQ ID NO: 2509545 - RNA, 19 nt, Artificial Sequence
  Description of Artificial Sequence: Synthetic oligonucleotide
cauaauguaagaccuugug

SEQ ID NO: 2509546 - RNA, 19 nt, Artificial Sequence
  Description of Artificial Sequence: Synthetic oligonucleotide
accugcauuaccuuguuga

SEQ ID NO: 2509547 - RNA, 19 nt, Artificial Sequence
  Description of Artificial Sequence: Synthetic oligonucleotide
ucugccaccggcaauuugu

SEQ ID NO: 2509548 - RNA, 19 nt, Artificial Sequence
  Description of Artificial Sequence: Synthetic oligonucleotide
cuaggcuugguuguaagcg

SEQ ID NO: 2509549 - RNA, 19 nt, Artificial Sequence
  Description of Artificial Sequence: Synthetic oligonucleotide
uuucauaugagggcagucc

SEQ ID NO: 2509550 - RNA, 19 nt, Artificial Sequence
  Description of Artificial Sequence: Synthetic oligonucleotide
ugagucauacaagauggag

SEQ ID NO: 2509551 - RNA, 19 nt, Artificial Sequence
  Description of Artificial Sequence: Synthetic oligonucleotide
ugaagugaaagccauucuu

SEQ ID NO: 2509552 - RNA, 19 nt, Artificial Sequence
  Description of Artificial Sequence: Synthetic oligonucleotide
gaguuccuaaagcaggucc

SEQ ID NO: 2509553 - RNA, 19 nt, Artificial Sequence
  Description of Artificial Sequence: Synthetic oligonucleotide
uguagcucagauucugcag

SEQ ID NO: 2509554 - RNA, 19 nt, Artificial Sequence
  Description of Artificial Sequence: Synthetic oligonucleotide
gagacuggaaaucuuccug

SEQ ID NO: 2509555 - RNA, 19 nt, Artificial Sequence
  Description of Artificial Sequence: Synthetic oligonucleotide
uaccuuguugaagugaaag

SEQ ID NO: 2509556 - RNA, 19 nt, Artificial Sequence
  Description of Artificial Sequence: Synthetic oligonucleotide
uucauaugagggcaguccu

SEQ ID NO: 2509557 - RNA, 19 nt, Artificial Sequence
  Description of Artificial Sequence: Synthetic oligonucleotide
caauuugagucauacaaga

SEQ ID NO: 2509558 - RNA, 19 nt, Artificial Sequence
  Description of Artificial Sequence: Synthetic oligonucleotide
augagggcaguccuuuccc

SEQ ID NO: 2509559 - RNA, 19 nt, Artificial Sequence
  Description of Artificial Sequence: Synthetic oligonucleotide
cauacaagauggagaaagc

SEQ ID NO: 2509560 - RNA, 19 nt, Artificial Sequence
  Description of Artificial Sequence: Synthetic oligonucleotide
uuaacauguccuucccaag

SEQ ID NO: 2509561 - RNA, 19 nt, Artificial Sequence
  Description of Artificial Sequence: Synthetic oligonucleotide
auaguuacugggcuccuug

SEQ ID NO: 2509562 - RNA, 19 nt, Artificial Sequence
  Description of Artificial Sequence: Synthetic oligonucleotide
uccacgaggcgguucaggg

SEQ ID NO: 2509563 - RNA, 19 nt, Artificial Sequence
  Description of Artificial Sequence: Synthetic oligonucleotide
agugcauucagcccaucug

SEQ ID NO: 2509564 - RNA, 19 nt, Artificial Sequence
  Description of Artificial Sequence: Synthetic oligonucleotide
ggcaauuuguccugcaggg

SEQ ID NO: 2509565 - RNA, 19 nt, Artificial Sequence
  Description of Artificial Sequence: Synthetic oligonucleotide
uuugggaaagccgacaaua

SEQ ID NO: 2509566 - RNA, 19 nt, Artificial Sequence
  Description of Artificial Sequence: Synthetic oligonucleotide
accuuucucuuucauauga

SEQ ID NO: 2509567 - RNA, 19 nt, Artificial Sequence
  Description of Artificial Sequence: Synthetic oligonucleotide
caaauuuaucuugucuccg

SEQ ID NO: 2509568 - RNA, 19 nt, Artificial Sequence
  Description of Artificial Sequence: Synthetic oligonucleotide
ugggaaagccgacaauacc

SEQ ID NO: 2509569 - RNA, 19 nt, Artificial Sequence
  Description of Artificial Sequence: Synthetic oligonucleotide
agaugcaauacucaugcuu

SEQ ID NO: 2509570 - RNA, 19 nt, Artificial Sequence
  Description of Artificial Sequence: Synthetic oligonucleotide
aaucgggcgagacuggaaa

SEQ ID NO: 2509571 - RNA, 19 nt, Artificial Sequence
  Description of Artificial Sequence: Synthetic oligonucleotide
ucuggaaucuggauguuuu

SEQ ID NO: 2509572 - RNA, 19 nt, Artificial Sequence
  Description of Artificial Sequence: Synthetic oligonucleotide
uugauaucugccaccggca

SEQ ID NO: 2509573 - RNA, 19 nt, Artificial Sequence
  Description of Artificial Sequence: Synthetic oligonucleotide
ugcuuuugauaucugccac

SEQ ID NO: 2509574 - RNA, 19 nt, Artificial Sequence
  Description of Artificial Sequence: Synthetic oligonucleotide
auuucaguguagcucagau

SEQ ID NO: 2509575 - RNA, 19 nt, Artificial Sequence
  Description of Artificial Sequence: Synthetic oligonucleotide
aguuacugggcuccuuggg

SEQ ID NO: 2509576 - RNA, 19 nt, Artificial Sequence
  Description of Artificial Sequence: Synthetic oligonucleotide
uuggcaauuugagucauac

SEQ ID NO: 2509577 - RNA, 19 nt, Artificial Sequence
  Description of Artificial Sequence: Synthetic oligonucleotide
ucauagacgaagucauagu

SEQ ID NO: 2509578 - RNA, 19 nt, Artificial Sequence
  Description of Artificial Sequence: Synthetic oligonucleotide
uuacagucauagacgaagu

SEQ ID NO: 2509579 - RNA, 19 nt, Artificial Sequence
  Description of Artificial Sequence: Synthetic oligonucleotide
uucaggauuucaguguagc

SEQ ID NO: 2509580 - RNA, 19 nt, Artificial Sequence
  Description of Artificial Sequence: Synthetic oligonucleotide
aaagccgacaauaccaaau

SEQ ID NO: 2509581 - RNA, 19 nt, Artificial Sequence
  Description of Artificial Sequence: Synthetic oligonucleotide
uuguugaagugaaagccau

SEQ ID NO: 2509582 - RNA, 19 nt, Artificial Sequence
  Description of Artificial Sequence: Synthetic oligonucleotide
uuuugauaucugccaccgg

SEQ ID NO: 2509583 - RNA, 19 nt, Artificial Sequence
  Description of Artificial Sequence: Synthetic oligonucleotide
uggaaaucuuccugguuca

SEQ ID NO: 2509584 - RNA, 19 nt, Artificial Sequence
  Description of Artificial Sequence: Synthetic oligonucleotide
uccaggucauuccuuguca

SEQ ID NO: 2509585 - RNA, 19 nt, Artificial Sequence
  Description of Artificial Sequence: Synthetic oligonucleotide
uccaaaaucgggcgagacu

SEQ ID NO: 2509586 - RNA, 19 nt, Artificial Sequence
  Description of Artificial Sequence: Synthetic oligonucleotide
ucucauaaccugcuccuuc

SEQ ID NO: 2509587 - RNA, 19 nt, Artificial Sequence
  Description of Artificial Sequence: Synthetic oligonucleotide
uaagcgcucucauaaccug

SEQ ID NO: 2509588 - RNA, 19 nt, Artificial Sequence
  Description of Artificial Sequence: Synthetic oligonucleotide
acaauaccaaauuuaucuu

SEQ ID NO: 2509589 - RNA, 19 nt, Artificial Sequence
  Description of Artificial Sequence: Synthetic oligonucleotide
aagccgacaauaccaaauu

SEQ ID NO: 2509590 - RNA, 19 nt, Artificial Sequence
  Description of Artificial Sequence: Synthetic oligonucleotide
uaguuacugggcuccuugg

SEQ ID NO: 2509591 - RNA, 19 nt, Artificial Sequence
  Description of Artificial Sequence: Synthetic oligonucleotide
aagcgcucucauaaccugc

SEQ ID NO: 2509592 - RNA, 19 nt, Artificial Sequence
  Description of Artificial Sequence: Synthetic oligonucleotide
aagcaggucccuuccacga

SEQ ID NO: 2509593 - RNA, 19 nt, Artificial Sequence
  Description of Artificial Sequence: Synthetic oligonucleotide
aaagcaaguucaagcaccu

SEQ ID NO: 2509594 - RNA, 19 nt, Artificial Sequence
  Description of Artificial Sequence: Synthetic oligonucleotide
gagcguugaguuccuaaag

SEQ ID NO: 2509595 - RNA, 19 nt, Artificial Sequence
  Description of Artificial Sequence: Synthetic oligonucleotide
uuacugggcuccuugggga

SEQ ID NO: 2509596 - RNA, 19 nt, Artificial Sequence
  Description of Artificial Sequence: Synthetic oligonucleotide
uccuugucaggucacuuaa

SEQ ID NO: 2509597 - RNA, 19 nt, Artificial Sequence
  Description of Artificial Sequence: Synthetic oligonucleotide
aagucuccauaauguaaga

SEQ ID NO: 2509598 - RNA, 19 nt, Artificial Sequence
  Description of Artificial Sequence: Synthetic oligonucleotide
ugucaggagcaauaaaauu

SEQ ID NO: 2509599 - RNA, 19 nt, Artificial Sequence
  Description of Artificial Sequence: Synthetic oligonucleotide
auacucaugcuugucagga

SEQ ID NO: 2509600 - RNA, 19 nt, Artificial Sequence
  Description of Artificial Sequence: Synthetic oligonucleotide
cacgaggcgguucaggggc

SEQ ID NO: 2509601 - RNA, 19 nt, Artificial Sequence
  Description of Artificial Sequence: Synthetic oligonucleotide
aauuugagucauacaagau

SEQ ID NO: 2509602 - RNA, 19 nt, Artificial Sequence
  Description of Artificial Sequence: Synthetic oligonucleotide
gagggcaguccuuuccccg

SEQ ID NO: 2509603 - RNA, 19 nt, Artificial Sequence
  Description of Artificial Sequence: Synthetic oligonucleotide
ucccaagcagugcauucag

SEQ ID NO: 2509604 - RNA, 19 nt, Artificial Sequence
  Description of Artificial Sequence: Synthetic oligonucleotide
gauuugggaaagccgacaa

SEQ ID NO: 2509605 - RNA, 19 nt, Artificial Sequence
  Description of Artificial Sequence: Synthetic oligonucleotide
cagacuggcggauuuucag

SEQ ID NO: 2509606 - RNA, 19 nt, Artificial Sequence
  Description of Artificial Sequence: Synthetic oligonucleotide
gaccuugugauuugggaaa

SEQ ID NO: 2509607 - RNA, 19 nt, Artificial Sequence
  Description of Artificial Sequence: Synthetic oligonucleotide
uguuuuguuuaagggcacc

SEQ ID NO: 2509608 - RNA, 19 nt, Artificial Sequence
  Description of Artificial Sequence: Synthetic oligonucleotide
uugguuguaagcgcucuca

SEQ ID NO: 2509609 - RNA, 19 nt, Artificial Sequence
  Description of Artificial Sequence: Synthetic oligonucleotide
cagcucuaagauuucuggc

SEQ ID NO: 2509610 - RNA, 19 nt, Artificial Sequence
  Description of Artificial Sequence: Synthetic oligonucleotide
auuaccuuguugaagugaa

SEQ ID NO: 2509611 - RNA, 19 nt, Artificial Sequence
  Description of Artificial Sequence: Synthetic oligonucleotide
ucuaagauuucuggcugga

SEQ ID NO: 2509612 - RNA, 19 nt, Artificial Sequence
  Description of Artificial Sequence: Synthetic oligonucleotide
ugguucauccucucagacu

SEQ ID NO: 2509613 - RNA, 19 nt, Artificial Sequence
  Description of Artificial Sequence: Synthetic oligonucleotide
ugauaucugccaccggcaa

SEQ ID NO: 2509614 - RNA, 19 nt, Artificial Sequence
  Description of Artificial Sequence: Synthetic oligonucleotide
ugauuugggaaagccgaca

SEQ ID NO: 2509615 - RNA, 19 nt, Artificial Sequence
  Description of Artificial Sequence: Synthetic oligonucleotide
guuugaucagcucuaagau

SEQ ID NO: 2509616 - RNA, 19 nt, Artificial Sequence
  Description of Artificial Sequence: Synthetic oligonucleotide
ucuuccaagucuccauaau

SEQ ID NO: 2509617 - RNA, 19 nt, Artificial Sequence
  Description of Artificial Sequence: Synthetic oligonucleotide
aaaaucgggcgagacugga

SEQ ID NO: 2509618 - RNA, 19 nt, Artificial Sequence
  Description of Artificial Sequence: Synthetic oligonucleotide
caaaaucgggcgagacugg

SEQ ID NO: 2509619 - RNA, 19 nt, Artificial Sequence
  Description of Artificial Sequence: Synthetic oligonucleotide
gacuggcggauuuucagga

SEQ ID NO: 2509620 - RNA, 19 nt, Artificial Sequence
  Description of Artificial Sequence: Synthetic oligonucleotide
caguuacagucauagacga

SEQ ID NO: 2509621 - RNA, 19 nt, Artificial Sequence
  Description of Artificial Sequence: Synthetic oligonucleotide
uccuaaagcaggucccuuc

SEQ ID NO: 2509622 - RNA, 19 nt, Artificial Sequence
  Description of Artificial Sequence: Synthetic oligonucleotide
uacucaugcuugucaggag

SEQ ID NO: 2509623 - RNA, 19 nt, Artificial Sequence
  Description of Artificial Sequence: Synthetic oligonucleotide
ucaguguagcucagauucu

SEQ ID NO: 2509624 - RNA, 19 nt, Artificial Sequence
  Description of Artificial Sequence: Synthetic oligonucleotide
uuaagggcaccuuucucuu

SEQ ID NO: 2509625 - RNA, 19 nt, Artificial Sequence
  Description of Artificial Sequence: Synthetic oligonucleotide
ccaaaaucgggcgagacug

SEQ ID NO: 2509626 - RNA, 19 nt, Artificial Sequence
  Description of Artificial Sequence: Synthetic oligonucleotide
auaugagggcaguccuuuc

SEQ ID NO: 2509627 - RNA, 19 nt, Artificial Sequence
  Description of Artificial Sequence: Synthetic oligonucleotide
ucuccgacgagcguugagu

SEQ ID NO: 2509628 - RNA, 19 nt, Artificial Sequence
  Description of Artificial Sequence: Synthetic oligonucleotide
uugucuccgacgagcguug

SEQ ID NO: 2509629 - RNA, 19 nt, Artificial Sequence
  Description of Artificial Sequence: Synthetic oligonucleotide
caguuugcucuugaacugg

SEQ ID NO: 2509630 - RNA, 19 nt, Artificial Sequence
  Description of Artificial Sequence: Synthetic oligonucleotide
ucuuucauaugagggcagu

SEQ ID NO: 2509631 - RNA, 19 nt, Artificial Sequence
  Description of Artificial Sequence: Synthetic oligonucleotide
agcuaggcuugguuguaag

SEQ ID NO: 2509632 - RNA, 19 nt, Artificial Sequence
  Description of Artificial Sequence: Synthetic oligonucleotide
cucauaaccugcuccuuca

SEQ ID NO: 2509633 - RNA, 19 nt, Artificial Sequence
  Description of Artificial Sequence: Synthetic oligonucleotide
uuguaagcgcucucauaac

SEQ ID NO: 2509634 - RNA, 19 nt, Artificial Sequence
  Description of Artificial Sequence: Synthetic oligonucleotide
aucuugucuccgacgagcg

SEQ ID NO: 2509635 - RNA, 19 nt, Artificial Sequence
  Description of Artificial Sequence: Synthetic oligonucleotide
uucccaagcagugcauuca

SEQ ID NO: 2509636 - RNA, 19 nt, Artificial Sequence
  Description of Artificial Sequence: Synthetic oligonucleotide
guuuaagggcaccuuucuc

SEQ ID NO: 2509637 - RNA, 19 nt, Artificial Sequence
  Description of Artificial Sequence: Synthetic oligonucleotide
gucaccacugcuuuugaua

SEQ ID NO: 2509638 - RNA, 19 nt, Artificial Sequence
  Description of Artificial Sequence: Synthetic oligonucleotide
uggcaauuugagucauaca

SEQ ID NO: 2509639 - RNA, 19 nt, Artificial Sequence
  Description of Artificial Sequence: Synthetic oligonucleotide
ugagggcaguccuuucccc

SEQ ID NO: 2509640 - RNA, 19 nt, Artificial Sequence
  Description of Artificial Sequence: Synthetic oligonucleotide
uuccuugucaggucacuua

SEQ ID NO: 2509641 - RNA, 19 nt, Artificial Sequence
  Description of Artificial Sequence: Synthetic oligonucleotide
cugcauuaccuuguugaag

SEQ ID NO: 2509642 - RNA, 19 nt, Artificial Sequence
  Description of Artificial Sequence: Synthetic oligonucleotide
auaucugccaccggcaauu

SEQ ID NO: 2509643 - RNA, 19 nt, Artificial Sequence
  Description of Artificial Sequence: Synthetic oligonucleotide
ucauaugagggcaguccuu

SEQ ID NO: 2509644 - RNA, 19 nt, Artificial Sequence
  Description of Artificial Sequence: Synthetic oligonucleotide
acaggcggagcuugaucuc

SEQ ID NO: 2509645 - RNA, 19 nt, Artificial Sequence
  Description of Artificial Sequence: Synthetic oligonucleotide
gcaauacucaugcuuguca

SEQ ID NO: 2509646 - RNA, 19 nt, Artificial Sequence
  Description of Artificial Sequence: Synthetic oligonucleotide
caggagcaauaaaauucag

SEQ ID NO: 2509647 - RNA, 19 nt, Artificial Sequence
  Description of Artificial Sequence: Synthetic oligonucleotide
gcaguuugcucuugaacug

SEQ ID NO: 2509648 - RNA, 19 nt, Artificial Sequence
  Description of Artificial Sequence: Synthetic oligonucleotide
uguugaagugaaagccauu

SEQ ID NO: 2509649 - RNA, 19 nt, Artificial Sequence
  Description of Artificial Sequence: Synthetic oligonucleotide
auuugggaaagccgacaau

SEQ ID NO: 2509650 - RNA, 19 nt, Artificial Sequence
  Description of Artificial Sequence: Synthetic oligonucleotide
gucacuuaacauguccuuc

SEQ ID NO: 2509651 - RNA, 19 nt, Artificial Sequence
  Description of Artificial Sequence: Synthetic oligonucleotide
uggcggauuuucaggauuu

SEQ ID NO: 2509652 - RNA, 19 nt, Artificial Sequence
  Description of Artificial Sequence: Synthetic oligonucleotide
aggucacuuaacauguccu

SEQ ID NO: 2509653 - RNA, 19 nt, Artificial Sequence
  Description of Artificial Sequence: Synthetic oligonucleotide
ugguuguaagcgcucucau

SEQ ID NO: 2509654 - RNA, 19 nt, Artificial Sequence
  Description of Artificial Sequence: Synthetic oligonucleotide
cuguuugaucagcucuaag

SEQ ID NO: 2509655 - RNA, 19 nt, Artificial Sequence
  Description of Artificial Sequence: Synthetic oligonucleotide
ggucccuuccacgaggcgg

SEQ ID NO: 2509656 - RNA, 19 nt, Artificial Sequence
  Description of Artificial Sequence: Synthetic oligonucleotide
cggagcuugaucuccaugc

SEQ ID NO: 2509657 - RNA, 19 nt, Artificial Sequence
  Description of Artificial Sequence: Synthetic oligonucleotide
uuccaaaaucgggcgagac

SEQ ID NO: 2509658 - RNA, 19 nt, Artificial Sequence
  Description of Artificial Sequence: Synthetic oligonucleotide
uuccacgaggcgguucagg

SEQ ID NO: 2509659 - RNA, 19 nt, Artificial Sequence
  Description of Artificial Sequence: Synthetic oligonucleotide
ugcaauacucaugcuuguc

SEQ ID NO: 2509660 - RNA, 19 nt, Artificial Sequence
  Description of Artificial Sequence: Synthetic oligonucleotide
cuggaaucuggauguuuuc

SEQ ID NO: 2509661 - RNA, 19 nt, Artificial Sequence
  Description of Artificial Sequence: Synthetic oligonucleotide
caguuggcaauuugaguca

SEQ ID NO: 2509662 - RNA, 19 nt, Artificial Sequence
  Description of Artificial Sequence: Synthetic oligonucleotide
accuugugauuugggaaag

SEQ ID NO: 2509663 - RNA, 19 nt, Artificial Sequence
  Description of Artificial Sequence: Synthetic oligonucleotide
ccuaaagcaggucccuucc

SEQ ID NO: 2509664 - RNA, 19 nt, Artificial Sequence
  Description of Artificial Sequence: Synthetic oligonucleotide
agcaggucccuuccacgag

SEQ ID NO: 2509665 - RNA, 19 nt, Artificial Sequence
  Description of Artificial Sequence: Synthetic oligonucleotide
uuccccgucaccacugcuu

SEQ ID NO: 2509666 - RNA, 19 nt, Artificial Sequence
  Description of Artificial Sequence: Synthetic oligonucleotide
cuuucauaugagggcaguc

SEQ ID NO: 2509667 - RNA, 19 nt, Artificial Sequence
  Description of Artificial Sequence: Synthetic oligonucleotide
caguguagcucagauucug

SEQ ID NO: 2509668 - RNA, 19 nt, Artificial Sequence
  Description of Artificial Sequence: Synthetic oligonucleotide
cauuaccuuguugaaguga

SEQ ID NO: 2509669 - RNA, 19 nt, Artificial Sequence
  Description of Artificial Sequence: Synthetic oligonucleotide
uccaacaggcggagcuuga

SEQ ID NO: 2509670 - RNA, 19 nt, Artificial Sequence
  Description of Artificial Sequence: Synthetic oligonucleotide
gaaagccgacaauaccaaa

SEQ ID NO: 2509671 - RNA, 19 nt, Artificial Sequence
  Description of Artificial Sequence: Synthetic oligonucleotide
gcauucagcccaucugucc

SEQ ID NO: 2509672 - RNA, 19 nt, Artificial Sequence
  Description of Artificial Sequence: Synthetic oligonucleotide
ucaggucacuuaacauguc

SEQ ID NO: 2509673 - RNA, 19 nt, Artificial Sequence
  Description of Artificial Sequence: Synthetic oligonucleotide
acgagcguugaguuccuaa

SEQ ID NO: 2509674 - RNA, 19 nt, Artificial Sequence
  Description of Artificial Sequence: Synthetic oligonucleotide
gcguugaguuccuaaagca

SEQ ID NO: 2509675 - RNA, 19 nt, Artificial Sequence
  Description of Artificial Sequence: Synthetic oligonucleotide
caggucccuuccacgaggc

SEQ ID NO: 2509676 - RNA, 19 nt, Artificial Sequence
  Description of Artificial Sequence: Synthetic oligonucleotide
cuugguuguaagcgcucuc

SEQ ID NO: 2509677 - RNA, 19 nt, Artificial Sequence
  Description of Artificial Sequence: Synthetic oligonucleotide
agccgacaauaccaaauuu

SEQ ID NO: 2509678 - RNA, 19 nt, Artificial Sequence
  Description of Artificial Sequence: Synthetic oligonucleotide
caccuuucucuuucauaug

SEQ ID NO: 2509679 - RNA, 19 nt, Artificial Sequence
  Description of Artificial Sequence: Synthetic oligonucleotide
gcaggucccuuccacgagg

SEQ ID NO: 2509680 - RNA, 19 nt, Artificial Sequence
  Description of Artificial Sequence: Synthetic oligonucleotide
ugaguuccuaaagcagguc

SEQ ID NO: 2509681 - RNA, 19 nt, Artificial Sequence
  Description of Artificial Sequence: Synthetic oligonucleotide
gcuaggcuugguuguaagc

SEQ ID NO: 2509682 - RNA, 19 nt, Artificial Sequence
  Description of Artificial Sequence: Synthetic oligonucleotide
gcaccuuucucuuucauau

SEQ ID NO: 2509683 - RNA, 19 nt, Artificial Sequence
  Description of Artificial Sequence: Synthetic oligonucleotide
agcaccuccuuguuuuguu

SEQ ID NO: 2509684 - RNA, 19 nt, Artificial Sequence
  Description of Artificial Sequence: Synthetic oligonucleotide
ccgacgagcguugaguucc

SEQ ID NO: 2509685 - RNA, 19 nt, Artificial Sequence
  Description of Artificial Sequence: Synthetic oligonucleotide
caggcggagcuugaucucc

SEQ ID NO: 2509686 - RNA, 19 nt, Artificial Sequence
  Description of Artificial Sequence: Synthetic oligonucleotide
caacaggcggagcuugauc

SEQ ID NO: 2509687 - RNA, 19 nt, Artificial Sequence
  Description of Artificial Sequence: Synthetic oligonucleotide
cuuuccccgucaccacugc

SEQ ID NO: 2509688 - RNA, 19 nt, Artificial Sequence
  Description of Artificial Sequence: Synthetic oligonucleotide
uccccgucaccacugcuuu

SEQ ID NO: 2509689 - RNA, 19 nt, Artificial Sequence
  Description of Artificial Sequence: Synthetic oligonucleotide
gacucucuuccaagucucc

SEQ ID NO: 2509690 - RNA, 19 nt, Artificial Sequence
  Description of Artificial Sequence: Synthetic oligonucleotide
gugauuugggaaagccgac

SEQ ID NO: 2509691 - RNA, 19 nt, Artificial Sequence
  Description of Artificial Sequence: Synthetic oligonucleotide
ucgggcgagacuggaaauc

SEQ ID NO: 2509692 - RNA, 19 nt, Artificial Sequence
  Description of Artificial Sequence: Synthetic oligonucleotide
uccgacgagcguugaguuc

SEQ ID NO: 2509693 - RNA, 19 nt, Artificial Sequence
  Description of Artificial Sequence: Synthetic oligonucleotide
acuggcggauuuucaggau

SEQ ID NO: 2509694 - RNA, 19 nt, Artificial Sequence
  Description of Artificial Sequence: Synthetic oligonucleotide
aaaucgggcgagacuggaa

SEQ ID NO: 2509695 - RNA, 19 nt, Artificial Sequence
  Description of Artificial Sequence: Synthetic oligonucleotide
aguuugcucuugaacuggu

SEQ ID NO: 2509696 - RNA, 19 nt, Artificial Sequence
  Description of Artificial Sequence: Synthetic oligonucleotide
guuuuguuuaagggcaccu

SEQ ID NO: 2509697 - RNA, 19 nt, Artificial Sequence
  Description of Artificial Sequence: Synthetic oligonucleotide
aucgggcgagacuggaaau

SEQ ID NO: 2509698 - RNA, 19 nt, Artificial Sequence
  Description of Artificial Sequence: Synthetic oligonucleotide
guaagcgcucucauaaccu

SEQ ID NO: 2509699 - RNA, 19 nt, Artificial Sequence
  Description of Artificial Sequence: Synthetic oligonucleotide
uucagcccaucuguccaga

SEQ ID NO: 2509700 - RNA, 19 nt, Artificial Sequence
  Description of Artificial Sequence: Synthetic oligonucleotide
uacugggcuccuuggggau

SEQ ID NO: 2509701 - RNA, 19 nt, Artificial Sequence
  Description of Artificial Sequence: Synthetic oligonucleotide
agcgcucucauaaccugcu

SEQ ID NO: 2509702 - RNA, 19 nt, Artificial Sequence
  Description of Artificial Sequence: Synthetic oligonucleotide
ggggcacuucuccuugggg

SEQ ID NO: 2509703 - RNA, 19 nt, Artificial Sequence
  Description of Artificial Sequence: Synthetic oligonucleotide
ccaggucauuccuugucag

SEQ ID NO: 2509704 - RNA, 19 nt, Artificial Sequence
  Description of Artificial Sequence: Synthetic oligonucleotide
gauaucugccaccggcaau

SEQ ID NO: 2509705 - RNA, 19 nt, Artificial Sequence
  Description of Artificial Sequence: Synthetic oligonucleotide
cggcaauuuguccugcagg

SEQ ID NO: 2509706 - RNA, 19 nt, Artificial Sequence
  Description of Artificial Sequence: Synthetic oligonucleotide
guccaacaggcggagcuug

SEQ ID NO: 2509707 - RNA, 19 nt, Artificial Sequence
  Description of Artificial Sequence: Synthetic oligonucleotide
ccaagucuccauaauguaa

SEQ ID NO: 2509708 - RNA, 19 nt, Artificial Sequence
  Description of Artificial Sequence: Synthetic oligonucleotide
gucuccgacgagcguugag

SEQ ID NO: 2509709 - RNA, 19 nt, Artificial Sequence
  Description of Artificial Sequence: Synthetic oligonucleotide
auuccuugucaggucacuu

SEQ ID NO: 2509710 - RNA, 19 nt, Artificial Sequence
  Description of Artificial Sequence: Synthetic oligonucleotide
gcauuaccuuguugaagug

SEQ ID NO: 2509711 - RNA, 19 nt, Artificial Sequence
  Description of Artificial Sequence: Synthetic oligonucleotide
ggucauuccuugucagguc

SEQ ID NO: 2509712 - RNA, 19 nt, Artificial Sequence
  Description of Artificial Sequence: Synthetic oligonucleotide
gaucagcucuaagauuucu

SEQ ID NO: 2509713 - RNA, 19 nt, Artificial Sequence
  Description of Artificial Sequence: Synthetic oligonucleotide
accggcaauuuguccugca

SEQ ID NO: 2509714 - RNA, 19 nt, Artificial Sequence
  Description of Artificial Sequence: Synthetic oligonucleotide
ggcgagacuggaaaucuuc

SEQ ID NO: 2509715 - RNA, 19 nt, Artificial Sequence
  Description of Artificial Sequence: Synthetic oligonucleotide
gcgagacuggaaaucuucc

SEQ ID NO: 2509716 - RNA, 19 nt, Artificial Sequence
  Description of Artificial Sequence: Synthetic oligonucleotide
gaugggcggaggugcaucu

SEQ ID NO: 2509717 - RNA, 19 nt, Artificial Sequence
  Description of Artificial Sequence: Synthetic oligonucleotide
gccgacaauaccaaauuua

SEQ ID NO: 2509718 - RNA, 19 nt, Artificial Sequence
  Description of Artificial Sequence: Synthetic oligonucleotide
aguuacagucauagacgaa

SEQ ID NO: 2509719 - RNA, 19 nt, Artificial Sequence
  Description of Artificial Sequence: Synthetic oligonucleotide
guccuuuccccgucaccac

SEQ ID NO: 2509720 - RNA, 19 nt, Artificial Sequence
  Description of Artificial Sequence: Synthetic oligonucleotide
guuugcucuugaacugguc

SEQ ID NO: 2509721 - RNA, 19 nt, Artificial Sequence
  Description of Artificial Sequence: Synthetic oligonucleotide
caccacugcuuuugauauc

SEQ ID NO: 2509722 - RNA, 19 nt, Artificial Sequence
  Description of Artificial Sequence: Synthetic oligonucleotide
ggacucucuuccaagucuc

SEQ ID NO: 2509723 - RNA, 19 nt, Artificial Sequence
  Description of Artificial Sequence: Synthetic oligonucleotide
uuccuaaagcaggucccuu

SEQ ID NO: 2509724 - RNA, 19 nt, Artificial Sequence
  Description of Artificial Sequence: Synthetic oligonucleotide
cugguccagggagcuaggc

SEQ ID NO: 2509725 - RNA, 19 nt, Artificial Sequence
  Description of Artificial Sequence: Synthetic oligonucleotide
gguuguaagcgcucucaua

SEQ ID NO: 2509726 - RNA, 19 nt, Artificial Sequence
  Description of Artificial Sequence: Synthetic oligonucleotide
ggaaagccgacaauaccaa

SEQ ID NO: 2509727 - RNA, 19 nt, Artificial Sequence
  Description of Artificial Sequence: Synthetic oligonucleotide
ucucagacuggcggauuuu

SEQ ID NO: 2509728 - RNA, 19 nt, Artificial Sequence
  Description of Artificial Sequence: Synthetic oligonucleotide
guuccaaaaucgggcgaga

SEQ ID NO: 2509729 - RNA, 19 nt, Artificial Sequence
  Description of Artificial Sequence: Synthetic oligonucleotide
ccacgaggcgguucagggg

SEQ ID NO: 2509730 - RNA, 19 nt, Artificial Sequence
  Description of Artificial Sequence: Synthetic oligonucleotide
ccggcaauuuguccugcag

SEQ ID NO: 2509731 - RNA, 19 nt, Artificial Sequence
  Description of Artificial Sequence: Synthetic oligonucleotide
ccgacaauaccaaauuuau

SEQ ID NO: 2509732 - RNA, 19 nt, Artificial Sequence
  Description of Artificial Sequence: Synthetic oligonucleotide
ggggacucucuuccaaguc

SEQ ID NO: 2509733 - RNA, 19 nt, Artificial Sequence
  Description of Artificial Sequence: Synthetic oligonucleotide
ccuugucaggucacuuaac

SEQ ID NO: 2509734 - RNA, 19 nt, Artificial Sequence
  Description of Artificial Sequence: Synthetic oligonucleotide
gaggcgguucaggggcugc

SEQ ID NO: 2509735 - RNA, 19 nt, Artificial Sequence
  Description of Artificial Sequence: Synthetic oligonucleotide
cuugucuccgacgagcguu

SEQ ID NO: 2509736 - RNA, 19 nt, Artificial Sequence
  Description of Artificial Sequence: Synthetic oligonucleotide
gggagcuaggcuugguugu

SEQ ID NO: 2509737 - RNA, 19 nt, Artificial Sequence
  Description of Artificial Sequence: Synthetic oligonucleotide
gcggagcuugaucuccaug

SEQ ID NO: 2509738 - RNA, 19 nt, Artificial Sequence
  Description of Artificial Sequence: Synthetic oligonucleotide
agcucagauucugcaguuu

SEQ ID NO: 2509739 - RNA, 19 nt, Artificial Sequence
  Description of Artificial Sequence: Synthetic oligonucleotide
ccaccggcaauuuguccug

SEQ ID NO: 2509740 - RNA, 19 nt, Artificial Sequence
  Description of Artificial Sequence: Synthetic oligonucleotide
cccgucaccacugcuuuug

SEQ ID NO: 2509741 - RNA, 19 nt, Artificial Sequence
  Description of Artificial Sequence: Synthetic oligonucleotide
ccuuccacgaggcgguuca

SEQ ID NO: 2509742 - RNA, 19 nt, Artificial Sequence
  Description of Artificial Sequence: Synthetic oligonucleotide
aggaggguguccaggucau

SEQ ID NO: 2509743 - RNA, 19 nt, Artificial Sequence
  Description of Artificial Sequence: Synthetic oligonucleotide
ccugcauuaccuuguugaa

SEQ ID NO: 2509744 - RNA, 19 nt, Artificial Sequence
  Description of Artificial Sequence: Synthetic oligonucleotide
cagugcauucagcccaucu

SEQ ID NO: 2509745 - RNA, 19 nt, Artificial Sequence
  Description of Artificial Sequence: Synthetic oligonucleotide
ugucuccgacgagcguuga

SEQ ID NO: 2509746 - RNA, 19 nt, Artificial Sequence
  Description of Artificial Sequence: Synthetic oligonucleotide
gagcuaggcuugguuguaa

SEQ ID NO: 2509747 - RNA, 19 nt, Artificial Sequence
  Description of Artificial Sequence: Synthetic oligonucleotide
ggucacuuaacauguccuu

SEQ ID NO: 2509748 - RNA, 19 nt, Artificial Sequence
  Description of Artificial Sequence: Synthetic oligonucleotide
caccggcaauuuguccugc

SEQ ID NO: 2509749 - RNA, 19 nt, Artificial Sequence
  Description of Artificial Sequence: Synthetic oligonucleotide
ccuugugauuugggaaagc

SEQ ID NO: 2509750 - RNA, 19 nt, Artificial Sequence
  Description of Artificial Sequence: Synthetic oligonucleotide
uaucugccaccggcaauuu

SEQ ID NO: 2509751 - RNA, 19 nt, Artificial Sequence
  Description of Artificial Sequence: Synthetic oligonucleotide
cuuccacgaggcgguucag

SEQ ID NO: 2509752 - RNA, 19 nt, Artificial Sequence
  Description of Artificial Sequence: Synthetic oligonucleotide
augggcggaggugcaucug

SEQ ID NO: 2509753 - RNA, 19 nt, Artificial Sequence
  Description of Artificial Sequence: Synthetic oligonucleotide
ggaggugcaucuggaaucu

SEQ ID NO: 2509754 - RNA, 19 nt, Artificial Sequence
  Description of Artificial Sequence: Synthetic oligonucleotide
cuggcggauuuucaggauu

SEQ ID NO: 2509755 - RNA, 19 nt, Artificial Sequence
  Description of Artificial Sequence: Synthetic oligonucleotide
cuccauaauguaagaccuu

SEQ ID NO: 2509756 - RNA, 19 nt, Artificial Sequence
  Description of Artificial Sequence: Synthetic oligonucleotide
caugcuugucaggagcaau

SEQ ID NO: 2509757 - RNA, 19 nt, Artificial Sequence
  Description of Artificial Sequence: Synthetic oligonucleotide
ggaugggcggaggugcauc

SEQ ID NO: 2509758 - RNA, 19 nt, Artificial Sequence
  Description of Artificial Sequence: Synthetic oligonucleotide
gucccuuccacgaggcggu

SEQ ID NO: 2509759 - RNA, 19 nt, Artificial Sequence
  Description of Artificial Sequence: Synthetic oligonucleotide
cgagcguugaguuccuaaa

SEQ ID NO: 2509760 - RNA, 19 nt, Artificial Sequence
  Description of Artificial Sequence: Synthetic oligonucleotide
cagaugcaauacucaugcu

SEQ ID NO: 2509761 - RNA, 19 nt, Artificial Sequence
  Description of Artificial Sequence: Synthetic oligonucleotide
cuccuuggggaugggcgga

SEQ ID NO: 2509762 - RNA, 19 nt, Artificial Sequence
  Description of Artificial Sequence: Synthetic oligonucleotide
gcuguuugaucagcucuaa

SEQ ID NO: 2509763 - RNA, 19 nt, Artificial Sequence
  Description of Artificial Sequence: Synthetic oligonucleotide
cuaagauuucuggcuggau

SEQ ID NO: 2509764 - RNA, 19 nt, Artificial Sequence
  Description of Artificial Sequence: Synthetic oligonucleotide
ccaucuguccagaugcaau

SEQ ID NO: 2509765 - RNA, 19 nt, Artificial Sequence
  Description of Artificial Sequence: Synthetic oligonucleotide
cuccgacgagcguugaguu

SEQ ID NO: 2509766 - RNA, 19 nt, Artificial Sequence
  Description of Artificial Sequence: Synthetic oligonucleotide
ggauguuuuccagguccaa

SEQ ID NO: 2509767 - RNA, 19 nt, Artificial Sequence
  Description of Artificial Sequence: Synthetic oligonucleotide
ggcggauuuucaggauuuc

SEQ ID NO: 2509768 - RNA, 19 nt, Artificial Sequence
  Description of Artificial Sequence: Synthetic oligonucleotide
ggcggaggugcaucuggaa

SEQ ID NO: 2509769 - RNA, 19 nt, Artificial Sequence
  Description of Artificial Sequence: Synthetic oligonucleotide
gcggaggugcaucuggaau

SEQ ID NO: 2509770 - RNA, 19 nt, Artificial Sequence
  Description of Artificial Sequence: Synthetic oligonucleotide
acgaggcgguucaggggcu

SEQ ID NO: 2509771 - RNA, 19 nt, Artificial Sequence
  Description of Artificial Sequence: Synthetic oligonucleotide
gcuugguuguaagcgcucu

SEQ ID NO: 2509772 - RNA, 19 nt, Artificial Sequence
  Description of Artificial Sequence: Synthetic oligonucleotide
gggcaguccuuuccccguc

SEQ ID NO: 2509773 - RNA, 19 nt, Artificial Sequence
  Description of Artificial Sequence: Synthetic oligonucleotide
cagggagcuaggcuugguu

SEQ ID NO: 2509774 - RNA, 19 nt, Artificial Sequence
  Description of Artificial Sequence: Synthetic oligonucleotide
ggagcuaggcuugguugua

SEQ ID NO: 2509775 - RNA, 19 nt, Artificial Sequence
  Description of Artificial Sequence: Synthetic oligonucleotide
gcgcucucauaaccugcuc

SEQ ID NO: 2509776 - RNA, 19 nt, Artificial Sequence
  Description of Artificial Sequence: Synthetic oligonucleotide
gcgguucaggggcugcugu

SEQ ID NO: 2509777 - RNA, 19 nt, Artificial Sequence
  Description of Artificial Sequence: Synthetic oligonucleotide
gacgagcguugaguuccua

SEQ ID NO: 2509778 - RNA, 19 nt, Artificial Sequence
  Description of Artificial Sequence: Synthetic oligonucleotide
gggcggaggugcaucugga

SEQ ID NO: 2509779 - RNA, 19 nt, Artificial Sequence
  Description of Artificial Sequence: Synthetic oligonucleotide
gguucaggggcugcuguuu

SEQ ID NO: 2509780 - RNA, 19 nt, Artificial Sequence
  Description of Artificial Sequence: Synthetic oligonucleotide
ucccuuccacgaggcgguu

SEQ ID NO: 2509781 - RNA, 19 nt, Artificial Sequence
  Description of Artificial Sequence: Synthetic oligonucleotide
cccaucuguccagaugcaa

SEQ ID NO: 2509782 - RNA, 19 nt, Artificial Sequence
  Description of Artificial Sequence: Synthetic oligonucleotide
ccgucaccacugcuuuuga

SEQ ID NO: 2509783 - RNA, 19 nt, Artificial Sequence
  Description of Artificial Sequence: Synthetic oligonucleotide
gguccaacaggcggagcuu

SEQ ID NO: 2509784 - RNA, 19 nt, Artificial Sequence
  Description of Artificial Sequence: Synthetic oligonucleotide
gggcaccuuucucuuucau

SEQ ID NO: 2509785 - RNA, 19 nt, Artificial Sequence
  Description of Artificial Sequence: Synthetic oligonucleotide
cccuuccacgaggcgguuc

SEQ ID NO: 2509786 - RNA, 19 nt, Artificial Sequence
  Description of Artificial Sequence: Synthetic oligonucleotide
gcagugcauucagcccauc

SEQ ID NO: 2509787 - RNA, 19 nt, Artificial Sequence
  Description of Artificial Sequence: Synthetic oligonucleotide
cgggcgagacuggaaaucu

SEQ ID NO: 2509788 - RNA, 19 nt, Artificial Sequence
  Description of Artificial Sequence: Synthetic oligonucleotide
gggcgagacuggaaaucuu

SEQ ID NO: 2509789 - RNA, 19 nt, Artificial Sequence
  Description of Artificial Sequence: Synthetic oligonucleotide
ccaacaggcggagcuugau

SEQ ID NO: 2509790 - RNA, 19 nt, Artificial Sequence
  Description of Artificial Sequence: Synthetic oligonucleotide
gggaugggcggaggugcau

SEQ ID NO: 2509791 - RNA, 19 nt, Artificial Sequence
  Description of Artificial Sequence: Synthetic oligonucleotide
cgucaccacugcuuuugau

SEQ ID NO: 2509792 - RNA, 19 nt, Artificial Sequence
  Description of Artificial Sequence: Synthetic oligonucleotide
cgacgagcguugaguuccu

SEQ ID NO: 2509793 - RNA, 19 nt, Artificial Sequence
  Description of Artificial Sequence: Synthetic oligonucleotide
ccccgucaccacugcuuuu

SEQ ID NO: 2509794 - RNA, 19 nt, Artificial Sequence
  Description of Artificial Sequence: Synthetic oligonucleotide
aaagccaucauuuccauag

SEQ ID NO: 2509795 - RNA, 19 nt, Artificial Sequence
  Description of Artificial Sequence: Synthetic oligonucleotide
auauuuugaaaacacauuc

SEQ ID NO: 2509796 - RNA, 19 nt, Artificial Sequence
  Description of Artificial Sequence: Synthetic oligonucleotide
aauauaucgauguugcaug

SEQ ID NO: 2509797 - RNA, 19 nt, Artificial Sequence
  Description of Artificial Sequence: Synthetic oligonucleotide
acagaaaacagauuuuccc

SEQ ID NO: 2509798 - RNA, 19 nt, Artificial Sequence
  Description of Artificial Sequence: Synthetic oligonucleotide
uuaucuuuagacauggcag

SEQ ID NO: 2509799 - RNA, 19 nt, Artificial Sequence
  Description of Artificial Sequence: Synthetic oligonucleotide
cacaaaaugaccaccaugg

SEQ ID NO: 2509800 - RNA, 19 nt, Artificial Sequence
  Description of Artificial Sequence: Synthetic oligonucleotide
agaagaguucaauauaucg

SEQ ID NO: 2509801 - RNA, 19 nt, Artificial Sequence
  Description of Artificial Sequence: Synthetic oligonucleotide
uucaauauaucgauguugc

SEQ ID NO: 2509802 - RNA, 19 nt, Artificial Sequence
  Description of Artificial Sequence: Synthetic oligonucleotide
ucagucauuauaaaguucu

SEQ ID NO: 2509803 - RNA, 19 nt, Artificial Sequence
  Description of Artificial Sequence: Synthetic oligonucleotide
uguuguuaggacuuguacg

SEQ ID NO: 2509804 - RNA, 19 nt, Artificial Sequence
  Description of Artificial Sequence: Synthetic oligonucleotide
auuauaaaguucuugaaau

SEQ ID NO: 2509805 - RNA, 19 nt, Artificial Sequence
  Description of Artificial Sequence: Synthetic oligonucleotide
auagccauaauuauuauag

SEQ ID NO: 2509806 - RNA, 19 nt, Artificial Sequence
  Description of Artificial Sequence: Synthetic oligonucleotide
uaaccaaauauuuugaaaa

SEQ ID NO: 2509807 - RNA, 19 nt, Artificial Sequence
  Description of Artificial Sequence: Synthetic oligonucleotide
ucaauaugaacucguauug

SEQ ID NO: 2509808 - RNA, 19 nt, Artificial Sequence
  Description of Artificial Sequence: Synthetic oligonucleotide
auuauuauagccaccauag

SEQ ID NO: 2509809 - RNA, 19 nt, Artificial Sequence
  Description of Artificial Sequence: Synthetic oligonucleotide
agauuuucccaucacaauc

SEQ ID NO: 2509810 - RNA, 19 nt, Artificial Sequence
  Description of Artificial Sequence: Synthetic oligonucleotide
aaguggucucaguacaucc

SEQ ID NO: 2509811 - RNA, 19 nt, Artificial Sequence
  Description of Artificial Sequence: Synthetic oligonucleotide
caaucuguaagaaagucag

SEQ ID NO: 2509812 - RNA, 19 nt, Artificial Sequence
  Description of Artificial Sequence: Synthetic oligonucleotide
aucuucaugugucacaaac

SEQ ID NO: 2509813 - RNA, 19 nt, Artificial Sequence
  Description of Artificial Sequence: Synthetic oligonucleotide
uauuuugaaaacacauucc

SEQ ID NO: 2509814 - RNA, 19 nt, Artificial Sequence
  Description of Artificial Sequence: Synthetic oligonucleotide
aauaugaacucguauugga

SEQ ID NO: 2509815 - RNA, 19 nt, Artificial Sequence
  Description of Artificial Sequence: Synthetic oligonucleotide
acaaucuguugcuuuaacc

SEQ ID NO: 2509816 - RNA, 19 nt, Artificial Sequence
  Description of Artificial Sequence: Synthetic oligonucleotide
uucuguugcacgaaaaggc

SEQ ID NO: 2509817 - RNA, 19 nt, Artificial Sequence
  Description of Artificial Sequence: Synthetic oligonucleotide
uaagaaagucagcagaugu

SEQ ID NO: 2509818 - RNA, 19 nt, Artificial Sequence
  Description of Artificial Sequence: Synthetic oligonucleotide
auuuugaaaacacauuccu

SEQ ID NO: 2509819 - RNA, 19 nt, Artificial Sequence
  Description of Artificial Sequence: Synthetic oligonucleotide
aauuagcaauaucauuuuc

SEQ ID NO: 2509820 - RNA, 19 nt, Artificial Sequence
  Description of Artificial Sequence: Synthetic oligonucleotide
uuagcaauaucauuuucug

SEQ ID NO: 2509821 - RNA, 19 nt, Artificial Sequence
  Description of Artificial Sequence: Synthetic oligonucleotide
uauaaaguucuugaaauac

SEQ ID NO: 2509822 - RNA, 19 nt, Artificial Sequence
  Description of Artificial Sequence: Synthetic oligonucleotide
acucguauuggauugagug

SEQ ID NO: 2509823 - RNA, 19 nt, Artificial Sequence
  Description of Artificial Sequence: Synthetic oligonucleotide
aaaugaccaccauggaaac

SEQ ID NO: 2509824 - RNA, 19 nt, Artificial Sequence
  Description of Artificial Sequence: Synthetic oligonucleotide
ugucacaaacucuacaucu

SEQ ID NO: 2509825 - RNA, 19 nt, Artificial Sequence
  Description of Artificial Sequence: Synthetic oligonucleotide
uaaaguucuugaaauacaa

SEQ ID NO: 2509826 - RNA, 19 nt, Artificial Sequence
  Description of Artificial Sequence: Synthetic oligonucleotide
ucaaucuguaagaaaguca

SEQ ID NO: 2509827 - RNA, 19 nt, Artificial Sequence
  Description of Artificial Sequence: Synthetic oligonucleotide
aacacauuccuucagucau

SEQ ID NO: 2509828 - RNA, 19 nt, Artificial Sequence
  Description of Artificial Sequence: Synthetic oligonucleotide
aggacuuguacguuggagg

SEQ ID NO: 2509829 - RNA, 19 nt, Artificial Sequence
  Description of Artificial Sequence: Synthetic oligonucleotide
agcaauaucauuuucuguu

SEQ ID NO: 2509830 - RNA, 19 nt, Artificial Sequence
  Description of Artificial Sequence: Synthetic oligonucleotide
auaauuauuauagccacca

SEQ ID NO: 2509831 - RNA, 19 nt, Artificial Sequence
  Description of Artificial Sequence: Synthetic oligonucleotide
aaccugaacuugcaucacc

SEQ ID NO: 2509832 - RNA, 19 nt, Artificial Sequence
  Description of Artificial Sequence: Synthetic oligonucleotide
aauaucauuuucuguugca

SEQ ID NO: 2509833 - RNA, 19 nt, Artificial Sequence
  Description of Artificial Sequence: Synthetic oligonucleotide
ucuuccaucucucauccug

SEQ ID NO: 2509834 - RNA, 19 nt, Artificial Sequence
  Description of Artificial Sequence: Synthetic oligonucleotide
aaguaugcaacaaauaaaa

SEQ ID NO: 2509835 - RNA, 19 nt, Artificial Sequence
  Description of Artificial Sequence: Synthetic oligonucleotide
uuaaccaaauauuuugaaa

SEQ ID NO: 2509836 - RNA, 19 nt, Artificial Sequence
  Description of Artificial Sequence: Synthetic oligonucleotide
uuucuguugcacgaaaagg

SEQ ID NO: 2509837 - RNA, 19 nt, Artificial Sequence
  Description of Artificial Sequence: Synthetic oligonucleotide
aacagauuuucccaucaca

SEQ ID NO: 2509838 - RNA, 19 nt, Artificial Sequence
  Description of Artificial Sequence: Synthetic oligonucleotide
uaucuuuagacauggcagc

SEQ ID NO: 2509839 - RNA, 19 nt, Artificial Sequence
  Description of Artificial Sequence: Synthetic oligonucleotide
aaaaccuacagaaaacaga

SEQ ID NO: 2509840 - RNA, 19 nt, Artificial Sequence
  Description of Artificial Sequence: Synthetic oligonucleotide
uguacguuggaggaagugg

SEQ ID NO: 2509841 - RNA, 19 nt, Artificial Sequence
  Description of Artificial Sequence: Synthetic oligonucleotide
auguuguuaggacuuguac

SEQ ID NO: 2509842 - RNA, 19 nt, Artificial Sequence
  Description of Artificial Sequence: Synthetic oligonucleotide
gaaaccugaacuugcauca

SEQ ID NO: 2509843 - RNA, 19 nt, Artificial Sequence
  Description of Artificial Sequence: Synthetic oligonucleotide
uccuugauuauccauucca

SEQ ID NO: 2509844 - RNA, 19 nt, Artificial Sequence
  Description of Artificial Sequence: Synthetic oligonucleotide
aaacagauuuucccaucac

SEQ ID NO: 2509845 - RNA, 19 nt, Artificial Sequence
  Description of Artificial Sequence: Synthetic oligonucleotide
ucccaacagauccauaucc

SEQ ID NO: 2509846 - RNA, 19 nt, Artificial Sequence
  Description of Artificial Sequence: Synthetic oligonucleotide
ucuguaagaaagucagcag

SEQ ID NO: 2509847 - RNA, 19 nt, Artificial Sequence
  Description of Artificial Sequence: Synthetic oligonucleotide
ugcaacaaauaaaaccuac

SEQ ID NO: 2509848 - RNA, 19 nt, Artificial Sequence
  Description of Artificial Sequence: Synthetic oligonucleotide
uccauauccuccuugauua

SEQ ID NO: 2509849 - RNA, 19 nt, Artificial Sequence
  Description of Artificial Sequence: Synthetic oligonucleotide
agaagaaauuagcaauauc

SEQ ID NO: 2509850 - RNA, 19 nt, Artificial Sequence
  Description of Artificial Sequence: Synthetic oligonucleotide
aaacacauuccuucaguca

SEQ ID NO: 2509851 - RNA, 19 nt, Artificial Sequence
  Description of Artificial Sequence: Synthetic oligonucleotide
uauccauuccaucucugcc

SEQ ID NO: 2509852 - RNA, 19 nt, Artificial Sequence
  Description of Artificial Sequence: Synthetic oligonucleotide
aacagauccauauccuccu

SEQ ID NO: 2509853 - RNA, 19 nt, Artificial Sequence
  Description of Artificial Sequence: Synthetic oligonucleotide
uugaaauacaaaagaaauu

SEQ ID NO: 2509854 - RNA, 19 nt, Artificial Sequence
  Description of Artificial Sequence: Synthetic oligonucleotide
aguacaucccacgccaucc

SEQ ID NO: 2509855 - RNA, 19 nt, Artificial Sequence
  Description of Artificial Sequence: Synthetic oligonucleotide
auaucgauguugcauguug

SEQ ID NO: 2509856 - RNA, 19 nt, Artificial Sequence
  Description of Artificial Sequence: Synthetic oligonucleotide
aaauucaaucuguaagaaa

SEQ ID NO: 2509857 - RNA, 19 nt, Artificial Sequence
  Description of Artificial Sequence: Synthetic oligonucleotide
uuguccauaguaaccacca

SEQ ID NO: 2509858 - RNA, 19 nt, Artificial Sequence
  Description of Artificial Sequence: Synthetic oligonucleotide
uuuaaccaaauauuuugaa

SEQ ID NO: 2509859 - RNA, 19 nt, Artificial Sequence
  Description of Artificial Sequence: Synthetic oligonucleotide
uguugcacgaaaaggcagc

SEQ ID NO: 2509860 - RNA, 19 nt, Artificial Sequence
  Description of Artificial Sequence: Synthetic oligonucleotide
uggugagaagaaauuagca

SEQ ID NO: 2509861 - RNA, 19 nt, Artificial Sequence
  Description of Artificial Sequence: Synthetic oligonucleotide
augaacucguauuggauug

SEQ ID NO: 2509862 - RNA, 19 nt, Artificial Sequence
  Description of Artificial Sequence: Synthetic oligonucleotide
ucucauccugucaucaaag

SEQ ID NO: 2509863 - RNA, 19 nt, Artificial Sequence
  Description of Artificial Sequence: Synthetic oligonucleotide
ugcacgaaaaggcagcccu

SEQ ID NO: 2509864 - RNA, 19 nt, Artificial Sequence
  Description of Artificial Sequence: Synthetic oligonucleotide
ucuguugcacgaaaaggca

SEQ ID NO: 2509865 - RNA, 19 nt, Artificial Sequence
  Description of Artificial Sequence: Synthetic oligonucleotide
auaucauuuucuguugcac

SEQ ID NO: 2509866 - RNA, 19 nt, Artificial Sequence
  Description of Artificial Sequence: Synthetic oligonucleotide
aauauuuugaaaacacauu

SEQ ID NO: 2509867 - RNA, 19 nt, Artificial Sequence
  Description of Artificial Sequence: Synthetic oligonucleotide
aaugucaauaugaacucgu

SEQ ID NO: 2509868 - RNA, 19 nt, Artificial Sequence
  Description of Artificial Sequence: Synthetic oligonucleotide
caacagauccauauccucc

SEQ ID NO: 2509869 - RNA, 19 nt, Artificial Sequence
  Description of Artificial Sequence: Synthetic oligonucleotide
auaaaaccuacagaaaaca

SEQ ID NO: 2509870 - RNA, 19 nt, Artificial Sequence
  Description of Artificial Sequence: Synthetic oligonucleotide
gaaauuagcaauaucauuu

SEQ ID NO: 2509871 - RNA, 19 nt, Artificial Sequence
  Description of Artificial Sequence: Synthetic oligonucleotide
aaacucuacaucugccucu

SEQ ID NO: 2509872 - RNA, 19 nt, Artificial Sequence
  Description of Artificial Sequence: Synthetic oligonucleotide
caucaaagccaucauuucc

SEQ ID NO: 2509873 - RNA, 19 nt, Artificial Sequence
  Description of Artificial Sequence: Synthetic oligonucleotide
uuucccaucacaaucuguu

SEQ ID NO: 2509874 - RNA, 19 nt, Artificial Sequence
  Description of Artificial Sequence: Synthetic oligonucleotide
cucguauuggauugagugg

SEQ ID NO: 2509875 - RNA, 19 nt, Artificial Sequence
  Description of Artificial Sequence: Synthetic oligonucleotide
cauggaaaccugaacuugc

SEQ ID NO: 2509876 - RNA, 19 nt, Artificial Sequence
  Description of Artificial Sequence: Synthetic oligonucleotide
agccaucauuuccauagcc

SEQ ID NO: 2509877 - RNA, 19 nt, Artificial Sequence
  Description of Artificial Sequence: Synthetic oligonucleotide
aagccaucauuuccauagc

SEQ ID NO: 2509878 - RNA, 19 nt, Artificial Sequence
  Description of Artificial Sequence: Synthetic oligonucleotide
cuucaugugucacaaacuc

SEQ ID NO: 2509879 - RNA, 19 nt, Artificial Sequence
  Description of Artificial Sequence: Synthetic oligonucleotide
auuagcaauaucauuuucu

SEQ ID NO: 2509880 - RNA, 19 nt, Artificial Sequence
  Description of Artificial Sequence: Synthetic oligonucleotide
gaagaguucaauauaucga

SEQ ID NO: 2509881 - RNA, 19 nt, Artificial Sequence
  Description of Artificial Sequence: Synthetic oligonucleotide
uguuaggacuuguacguug

SEQ ID NO: 2509882 - RNA, 19 nt, Artificial Sequence
  Description of Artificial Sequence: Synthetic oligonucleotide
acgaccauaaccucccaag

SEQ ID NO: 2509883 - RNA, 19 nt, Artificial Sequence
  Description of Artificial Sequence: Synthetic oligonucleotide
uauuggauugaguggugag

SEQ ID NO: 2509884 - RNA, 19 nt, Artificial Sequence
  Description of Artificial Sequence: Synthetic oligonucleotide
uuauccauuccaucucugc

SEQ ID NO: 2509885 - RNA, 19 nt, Artificial Sequence
  Description of Artificial Sequence: Synthetic oligonucleotide
aguaaccaccaccuccacc

SEQ ID NO: 2509886 - RNA, 19 nt, Artificial Sequence
  Description of Artificial Sequence: Synthetic oligonucleotide
aagaaauuagcaauaucau

SEQ ID NO: 2509887 - RNA, 19 nt, Artificial Sequence
  Description of Artificial Sequence: Synthetic oligonucleotide
ucuucaugugucacaaacu

SEQ ID NO: 2509888 - RNA, 19 nt, Artificial Sequence
  Description of Artificial Sequence: Synthetic oligonucleotide
uugcuuuaaccaaauauuu

SEQ ID NO: 2509889 - RNA, 19 nt, Artificial Sequence
  Description of Artificial Sequence: Synthetic oligonucleotide
caccauagucaucaaaacc

SEQ ID NO: 2509890 - RNA, 19 nt, Artificial Sequence
  Description of Artificial Sequence: Synthetic oligonucleotide
aaucuguaagaaagucagc

SEQ ID NO: 2509891 - RNA, 19 nt, Artificial Sequence
  Description of Artificial Sequence: Synthetic oligonucleotide
auuuccauagccauaauua

SEQ ID NO: 2509892 - RNA, 19 nt, Artificial Sequence
  Description of Artificial Sequence: Synthetic oligonucleotide
agaaagucagcagauguug

SEQ ID NO: 2509893 - RNA, 19 nt, Artificial Sequence
  Description of Artificial Sequence: Synthetic oligonucleotide
ucccaagccaucaggagug

SEQ ID NO: 2509894 - RNA, 19 nt, Artificial Sequence
  Description of Artificial Sequence: Synthetic oligonucleotide
uuauaaaguucuugaaaua

SEQ ID NO: 2509895 - RNA, 19 nt, Artificial Sequence
  Description of Artificial Sequence: Synthetic oligonucleotide
uaugaacucguauuggauu

SEQ ID NO: 2509896 - RNA, 19 nt, Artificial Sequence
  Description of Artificial Sequence: Synthetic oligonucleotide
aucuuuagacauggcagcc

SEQ ID NO: 2509897 - RNA, 19 nt, Artificial Sequence
  Description of Artificial Sequence: Synthetic oligonucleotide
ugauuauccauuccaucuc

SEQ ID NO: 2509898 - RNA, 19 nt, Artificial Sequence
  Description of Artificial Sequence: Synthetic oligonucleotide
auauccuccacuguaguug

SEQ ID NO: 2509899 - RNA, 19 nt, Artificial Sequence
  Description of Artificial Sequence: Synthetic oligonucleotide
cauccugucaucaaagcca

SEQ ID NO: 2509900 - RNA, 19 nt, Artificial Sequence
  Description of Artificial Sequence: Synthetic oligonucleotide
gaccauaaccucccaagcc

SEQ ID NO: 2509901 - RNA, 19 nt, Artificial Sequence
  Description of Artificial Sequence: Synthetic oligonucleotide
uuuugaaaacacauuccuu

SEQ ID NO: 2509902 - RNA, 19 nt, Artificial Sequence
  Description of Artificial Sequence: Synthetic oligonucleotide
uguaguuguuccccauucc

SEQ ID NO: 2509903 - RNA, 19 nt, Artificial Sequence
  Description of Artificial Sequence: Synthetic oligonucleotide
guaguuguuccccauuccc

SEQ ID NO: 2509904 - RNA, 19 nt, Artificial Sequence
  Description of Artificial Sequence: Synthetic oligonucleotide
aaccucccaagccaucagg

SEQ ID NO: 2509905 - RNA, 19 nt, Artificial Sequence
  Description of Artificial Sequence: Synthetic oligonucleotide
auuccagaccucccauucc

SEQ ID NO: 2509906 - RNA, 19 nt, Artificial Sequence
  Description of Artificial Sequence: Synthetic oligonucleotide
ucucccaacagauccauau

SEQ ID NO: 2509907 - RNA, 19 nt, Artificial Sequence
  Description of Artificial Sequence: Synthetic oligonucleotide
cuuguccauaguaaccacc

SEQ ID NO: 2509908 - RNA, 19 nt, Artificial Sequence
  Description of Artificial Sequence: Synthetic oligonucleotide
aguggugagaagaaauuag

SEQ ID NO: 2509909 - RNA, 19 nt, Artificial Sequence
  Description of Artificial Sequence: Synthetic oligonucleotide
ucguauuggauugaguggu

SEQ ID NO: 2509910 - RNA, 19 nt, Artificial Sequence
  Description of Artificial Sequence: Synthetic oligonucleotide
uuuccauagccauaauuau

SEQ ID NO: 2509911 - RNA, 19 nt, Artificial Sequence
  Description of Artificial Sequence: Synthetic oligonucleotide
ugucaauaugaacucguau

SEQ ID NO: 2509912 - RNA, 19 nt, Artificial Sequence
  Description of Artificial Sequence: Synthetic oligonucleotide
guccauaguaaccaccacc

SEQ ID NO: 2509913 - RNA, 19 nt, Artificial Sequence
  Description of Artificial Sequence: Synthetic oligonucleotide
ucucaguacaucccacgcc

SEQ ID NO: 2509914 - RNA, 19 nt, Artificial Sequence
  Description of Artificial Sequence: Synthetic oligonucleotide
ucuacaucugccucuccug

SEQ ID NO: 2509915 - RNA, 19 nt, Artificial Sequence
  Description of Artificial Sequence: Synthetic oligonucleotide
aguaugcaacaaauaaaac

SEQ ID NO: 2509916 - RNA, 19 nt, Artificial Sequence
  Description of Artificial Sequence: Synthetic oligonucleotide
cuuuaaccaaauauuuuga

SEQ ID NO: 2509917 - RNA, 19 nt, Artificial Sequence
  Description of Artificial Sequence: Synthetic oligonucleotide
cauuccaccuuguccauag

SEQ ID NO: 2509918 - RNA, 19 nt, Artificial Sequence
  Description of Artificial Sequence: Synthetic oligonucleotide
gaguucaauauaucgaugu

SEQ ID NO: 2509919 - RNA, 19 nt, Artificial Sequence
  Description of Artificial Sequence: Synthetic oligonucleotide
uccaccuuguccauaguaa

SEQ ID NO: 2509920 - RNA, 19 nt, Artificial Sequence
  Description of Artificial Sequence: Synthetic oligonucleotide
auucccauucucccaacag

SEQ ID NO: 2509921 - RNA, 19 nt, Artificial Sequence
  Description of Artificial Sequence: Synthetic oligonucleotide
agaccucccauuccagagc

SEQ ID NO: 2509922 - RNA, 19 nt, Artificial Sequence
  Description of Artificial Sequence: Synthetic oligonucleotide
cuugauuauccauuccauc

SEQ ID NO: 2509923 - RNA, 19 nt, Artificial Sequence
  Description of Artificial Sequence: Synthetic oligonucleotide
uucaugugucacaaacucu

SEQ ID NO: 2509924 - RNA, 19 nt, Artificial Sequence
  Description of Artificial Sequence: Synthetic oligonucleotide
uucccauucucccaacaga

SEQ ID NO: 2509925 - RNA, 19 nt, Artificial Sequence
  Description of Artificial Sequence: Synthetic oligonucleotide
caauaugaacucguauugg

SEQ ID NO: 2509926 - RNA, 19 nt, Artificial Sequence
  Description of Artificial Sequence: Synthetic oligonucleotide
agucauuauaaaguucuug

SEQ ID NO: 2509927 - RNA, 19 nt, Artificial Sequence
  Description of Artificial Sequence: Synthetic oligonucleotide
uucaaucuguaagaaaguc

SEQ ID NO: 2509928 - RNA, 19 nt, Artificial Sequence
  Description of Artificial Sequence: Synthetic oligonucleotide
uguugcucugccaucggcu

SEQ ID NO: 2509929 - RNA, 19 nt, Artificial Sequence
  Description of Artificial Sequence: Synthetic oligonucleotide
acuuguacguuggaggaag

SEQ ID NO: 2509930 - RNA, 19 nt, Artificial Sequence
  Description of Artificial Sequence: Synthetic oligonucleotide
uuauuauagccaccauagu

SEQ ID NO: 2509931 - RNA, 19 nt, Artificial Sequence
  Description of Artificial Sequence: Synthetic oligonucleotide
cuuuagacauggcagccac

SEQ ID NO: 2509932 - RNA, 19 nt, Artificial Sequence
  Description of Artificial Sequence: Synthetic oligonucleotide
uaguuguuccccauuccca

SEQ ID NO: 2509933 - RNA, 19 nt, Artificial Sequence
  Description of Artificial Sequence: Synthetic oligonucleotide
uccacuguaguuguucccc

SEQ ID NO: 2509934 - RNA, 19 nt, Artificial Sequence
  Description of Artificial Sequence: Synthetic oligonucleotide
ucccacgccauccaccucc

SEQ ID NO: 2509935 - RNA, 19 nt, Artificial Sequence
  Description of Artificial Sequence: Synthetic oligonucleotide
cacaaacucuacaucugcc

SEQ ID NO: 2509936 - RNA, 19 nt, Artificial Sequence
  Description of Artificial Sequence: Synthetic oligonucleotide
aacucuacaucugccucuc

SEQ ID NO: 2509937 - RNA, 19 nt, Artificial Sequence
  Description of Artificial Sequence: Synthetic oligonucleotide
ugcuuuaaccaaauauuuu

SEQ ID NO: 2509938 - RNA, 19 nt, Artificial Sequence
  Description of Artificial Sequence: Synthetic oligonucleotide
guuguuaggacuuguacgu

SEQ ID NO: 2509939 - RNA, 19 nt, Artificial Sequence
  Description of Artificial Sequence: Synthetic oligonucleotide
uaucgauguugcauguugu

SEQ ID NO: 2509940 - RNA, 19 nt, Artificial Sequence
  Description of Artificial Sequence: Synthetic oligonucleotide
guuaggacuuguacguugg

SEQ ID NO: 2509941 - RNA, 19 nt, Artificial Sequence
  Description of Artificial Sequence: Synthetic oligonucleotide
uuccagaccucccauucca

SEQ ID NO: 2509942 - RNA, 19 nt, Artificial Sequence
  Description of Artificial Sequence: Synthetic oligonucleotide
aguggucucaguacauccc

SEQ ID NO: 2509943 - RNA, 19 nt, Artificial Sequence
  Description of Artificial Sequence: Synthetic oligonucleotide
uuuuaucuuuagacauggc

SEQ ID NO: 2509944 - RNA, 19 nt, Artificial Sequence
  Description of Artificial Sequence: Synthetic oligonucleotide
auaaaguucuugaaauaca

SEQ ID NO: 2509945 - RNA, 19 nt, Artificial Sequence
  Description of Artificial Sequence: Synthetic oligonucleotide
auccauuccaucucugcca

SEQ ID NO: 2509946 - RNA, 19 nt, Artificial Sequence
  Description of Artificial Sequence: Synthetic oligonucleotide
ccauaauuauuauagccac

SEQ ID NO: 2509947 - RNA, 19 nt, Artificial Sequence
  Description of Artificial Sequence: Synthetic oligonucleotide
accacgaccauaaccuccc

SEQ ID NO: 2509948 - RNA, 19 nt, Artificial Sequence
  Description of Artificial Sequence: Synthetic oligonucleotide
ucccauucucccaacagau

SEQ ID NO: 2509949 - RNA, 19 nt, Artificial Sequence
  Description of Artificial Sequence: Synthetic oligonucleotide
ucaauauaucgauguugca

SEQ ID NO: 2509950 - RNA, 19 nt, Artificial Sequence
  Description of Artificial Sequence: Synthetic oligonucleotide
ugccauauccuccacugua

SEQ ID NO: 2509951 - RNA, 19 nt, Artificial Sequence
  Description of Artificial Sequence: Synthetic oligonucleotide
auauaucgauguugcaugu

SEQ ID NO: 2509952 - RNA, 19 nt, Artificial Sequence
  Description of Artificial Sequence: Synthetic oligonucleotide
auaguaaccaccaccucca

SEQ ID NO: 2509953 - RNA, 19 nt, Artificial Sequence
  Description of Artificial Sequence: Synthetic oligonucleotide
uagcaauaucauuuucugu

SEQ ID NO: 2509954 - RNA, 19 nt, Artificial Sequence
  Description of Artificial Sequence: Synthetic oligonucleotide
uaggacuuguacguuggag

SEQ ID NO: 2509955 - RNA, 19 nt, Artificial Sequence
  Description of Artificial Sequence: Synthetic oligonucleotide
uuuucccaucacaaucugu

SEQ ID NO: 2509956 - RNA, 19 nt, Artificial Sequence
  Description of Artificial Sequence: Synthetic oligonucleotide
caccuuguccauaguaacc

SEQ ID NO: 2509957 - RNA, 19 nt, Artificial Sequence
  Description of Artificial Sequence: Synthetic oligonucleotide
cuguugcacgaaaaggcag

SEQ ID NO: 2509958 - RNA, 19 nt, Artificial Sequence
  Description of Artificial Sequence: Synthetic oligonucleotide
gaaauucaaucuguaagaa

SEQ ID NO: 2509959 - RNA, 19 nt, Artificial Sequence
  Description of Artificial Sequence: Synthetic oligonucleotide
caaugucaauaugaacucg

SEQ ID NO: 2509960 - RNA, 19 nt, Artificial Sequence
  Description of Artificial Sequence: Synthetic oligonucleotide
cacugcaucuucauguguc

SEQ ID NO: 2509961 - RNA, 19 nt, Artificial Sequence
  Description of Artificial Sequence: Synthetic oligonucleotide
cucauccugucaucaaagc

SEQ ID NO: 2509962 - RNA, 19 nt, Artificial Sequence
  Description of Artificial Sequence: Synthetic oligonucleotide
acagauuuucccaucacaa

SEQ ID NO: 2509963 - RNA, 19 nt, Artificial Sequence
  Description of Artificial Sequence: Synthetic oligonucleotide
cagaccucccauuccagag

SEQ ID NO: 2509964 - RNA, 19 nt, Artificial Sequence
  Description of Artificial Sequence: Synthetic oligonucleotide
ggugagaagaaauuagcaa

SEQ ID NO: 2509965 - RNA, 19 nt, Artificial Sequence
  Description of Artificial Sequence: Synthetic oligonucleotide
ucccaugccucuuccaucu

SEQ ID NO: 2509966 - RNA, 19 nt, Artificial Sequence
  Description of Artificial Sequence: Synthetic oligonucleotide
uauccuccacuguaguugu

SEQ ID NO: 2509967 - RNA, 19 nt, Artificial Sequence
  Description of Artificial Sequence: Synthetic oligonucleotide
gucaauaugaacucguauu

SEQ ID NO: 2509968 - RNA, 19 nt, Artificial Sequence
  Description of Artificial Sequence: Synthetic oligonucleotide
ggaaaccugaacuugcauc

SEQ ID NO: 2509969 - RNA, 19 nt, Artificial Sequence
  Description of Artificial Sequence: Synthetic oligonucleotide
cucaguacaucccacgcca

SEQ ID NO: 2509970 - RNA, 19 nt, Artificial Sequence
  Description of Artificial Sequence: Synthetic oligonucleotide
gucucaguacaucccacgc

SEQ ID NO: 2509971 - RNA, 19 nt, Artificial Sequence
  Description of Artificial Sequence: Synthetic oligonucleotide
aguuguuccccauucccau

SEQ ID NO: 2509972 - RNA, 19 nt, Artificial Sequence
  Description of Artificial Sequence: Synthetic oligonucleotide
cauuccagaccucccauuc

SEQ ID NO: 2509973 - RNA, 19 nt, Artificial Sequence
  Description of Artificial Sequence: Synthetic oligonucleotide
auccauauccuccuugauu

SEQ ID NO: 2509974 - RNA, 19 nt, Artificial Sequence
  Description of Artificial Sequence: Synthetic oligonucleotide
augugucacaaacucuaca

SEQ ID NO: 2509975 - RNA, 19 nt, Artificial Sequence
  Description of Artificial Sequence: Synthetic oligonucleotide
cauuccuucagucauuaua

SEQ ID NO: 2509976 - RNA, 19 nt, Artificial Sequence
  Description of Artificial Sequence: Synthetic oligonucleotide
aucacaaucuguugcuuua

SEQ ID NO: 2509977 - RNA, 19 nt, Artificial Sequence
  Description of Artificial Sequence: Synthetic oligonucleotide
auuggauugaguggugaga

SEQ ID NO: 2509978 - RNA, 19 nt, Artificial Sequence
  Description of Artificial Sequence: Synthetic oligonucleotide
aguucaauauaucgauguu

SEQ ID NO: 2509979 - RNA, 19 nt, Artificial Sequence
  Description of Artificial Sequence: Synthetic oligonucleotide
gcaauaucauuuucuguug

SEQ ID NO: 2509980 - RNA, 19 nt, Artificial Sequence
  Description of Artificial Sequence: Synthetic oligonucleotide
ucccauuccagaccuccca

SEQ ID NO: 2509981 - RNA, 19 nt, Artificial Sequence
  Description of Artificial Sequence: Synthetic oligonucleotide
ucuuuagacauggcagcca

SEQ ID NO: 2509982 - RNA, 19 nt, Artificial Sequence
  Description of Artificial Sequence: Synthetic oligonucleotide
caccacgaccauaaccucc

SEQ ID NO: 2509983 - RNA, 19 nt, Artificial Sequence
  Description of Artificial Sequence: Synthetic oligonucleotide
accauggaaaccugaacuu

SEQ ID NO: 2509984 - RNA, 19 nt, Artificial Sequence
  Description of Artificial Sequence: Synthetic oligonucleotide
ucugccauagccucccauu

SEQ ID NO: 2509985 - RNA, 19 nt, Artificial Sequence
  Description of Artificial Sequence: Synthetic oligonucleotide
caccaccacgaccauaacc

SEQ ID NO: 2509986 - RNA, 19 nt, Artificial Sequence
  Description of Artificial Sequence: Synthetic oligonucleotide
uaaccucccaagccaucag

SEQ ID NO: 2509987 - RNA, 19 nt, Artificial Sequence
  Description of Artificial Sequence: Synthetic oligonucleotide
guaagaaagucagcagaug

SEQ ID NO: 2509988 - RNA, 19 nt, Artificial Sequence
  Description of Artificial Sequence: Synthetic oligonucleotide
auaaccucccaagccauca

SEQ ID NO: 2509989 - RNA, 19 nt, Artificial Sequence
  Description of Artificial Sequence: Synthetic oligonucleotide
gccauaauuauuauagcca

SEQ ID NO: 2509990 - RNA, 19 nt, Artificial Sequence
  Description of Artificial Sequence: Synthetic oligonucleotide
caugugucacaaacucuac

SEQ ID NO: 2509991 - RNA, 19 nt, Artificial Sequence
  Description of Artificial Sequence: Synthetic oligonucleotide
guugcuuuaaccaaauauu

SEQ ID NO: 2509992 - RNA, 19 nt, Artificial Sequence
  Description of Artificial Sequence: Synthetic oligonucleotide
gaacucguauuggauugag

SEQ ID NO: 2509993 - RNA, 19 nt, Artificial Sequence
  Description of Artificial Sequence: Synthetic oligonucleotide
acaucccacgccauccacc

SEQ ID NO: 2509994 - RNA, 19 nt, Artificial Sequence
  Description of Artificial Sequence: Synthetic oligonucleotide
cagcagauguuguuaggac

SEQ ID NO: 2509995 - RNA, 19 nt, Artificial Sequence
  Description of Artificial Sequence: Synthetic oligonucleotide
uuuagacauggcagccacu

SEQ ID NO: 2509996 - RNA, 19 nt, Artificial Sequence
  Description of Artificial Sequence: Synthetic oligonucleotide
agcuccaccauagccaugu

SEQ ID NO: 2509997 - RNA, 19 nt, Artificial Sequence
  Description of Artificial Sequence: Synthetic oligonucleotide
auucaaucuguaagaaagu

SEQ ID NO: 2509998 - RNA, 19 nt, Artificial Sequence
  Description of Artificial Sequence: Synthetic oligonucleotide
uguccauaguaaccaccac

SEQ ID NO: 2509999 - RNA, 19 nt, Artificial Sequence
  Description of Artificial Sequence: Synthetic oligonucleotide
uuaggacuuguacguugga

SEQ ID NO: 2510000 - RNA, 19 nt, Artificial Sequence
  Description of Artificial Sequence: Synthetic oligonucleotide
accuccacucauuccaccu

SEQ ID NO: 2510001 - RNA, 19 nt, Artificial Sequence
  Description of Artificial Sequence: Synthetic oligonucleotide
agaguucaauauaucgaug

SEQ ID NO: 2510002 - RNA, 19 nt, Artificial Sequence
  Description of Artificial Sequence: Synthetic oligonucleotide
uauccuccuugauuaucca

SEQ ID NO: 2510003 - RNA, 19 nt, Artificial Sequence
  Description of Artificial Sequence: Synthetic oligonucleotide
uggaaaccugaacuugcau

SEQ ID NO: 2510004 - RNA, 19 nt, Artificial Sequence
  Description of Artificial Sequence: Synthetic oligonucleotide
acgaaaaggcagcccucuc

SEQ ID NO: 2510005 - RNA, 19 nt, Artificial Sequence
  Description of Artificial Sequence: Synthetic oligonucleotide
uuguacguuggaggaagug

SEQ ID NO: 2510006 - RNA, 19 nt, Artificial Sequence
  Description of Artificial Sequence: Synthetic oligonucleotide
ucggcuccaaugucaauau

SEQ ID NO: 2510007 - RNA, 19 nt, Artificial Sequence
  Description of Artificial Sequence: Synthetic oligonucleotide
auaugaacucguauuggau

SEQ ID NO: 2510008 - RNA, 19 nt, Artificial Sequence
  Description of Artificial Sequence: Synthetic oligonucleotide
cagauccauauccuccuug

SEQ ID NO: 2510009 - RNA, 19 nt, Artificial Sequence
  Description of Artificial Sequence: Synthetic oligonucleotide
ggauugaguggugagaaga

SEQ ID NO: 2510010 - RNA, 19 nt, Artificial Sequence
  Description of Artificial Sequence: Synthetic oligonucleotide
cacaaucuguugcuuuaac

SEQ ID NO: 2510011 - RNA, 19 nt, Artificial Sequence
  Description of Artificial Sequence: Synthetic oligonucleotide
gauugaguggugagaagaa

SEQ ID NO: 2510012 - RNA, 19 nt, Artificial Sequence
  Description of Artificial Sequence: Synthetic oligonucleotide
ugaacucguauuggauuga

SEQ ID NO: 2510013 - RNA, 19 nt, Artificial Sequence
  Description of Artificial Sequence: Synthetic oligonucleotide
uacaucccacgccauccac

SEQ ID NO: 2510014 - RNA, 19 nt, Artificial Sequence
  Description of Artificial Sequence: Synthetic oligonucleotide
guugcacgaaaaggcagcc

SEQ ID NO: 2510015 - RNA, 19 nt, Artificial Sequence
  Description of Artificial Sequence: Synthetic oligonucleotide
aucggcuccaaugucaaua

SEQ ID NO: 2510016 - RNA, 19 nt, Artificial Sequence
  Description of Artificial Sequence: Synthetic oligonucleotide
gaaguggucucaguacauc

SEQ ID NO: 2510017 - RNA, 19 nt, Artificial Sequence
  Description of Artificial Sequence: Synthetic oligonucleotide
cuccacuguaguuguuccc

SEQ ID NO: 2510018 - RNA, 19 nt, Artificial Sequence
  Description of Artificial Sequence: Synthetic oligonucleotide
uacguuggaggaagugguc

SEQ ID NO: 2510019 - RNA, 19 nt, Artificial Sequence
  Description of Artificial Sequence: Synthetic oligonucleotide
ggcuccaaugucaauauga

SEQ ID NO: 2510020 - RNA, 19 nt, Artificial Sequence
  Description of Artificial Sequence: Synthetic oligonucleotide
uggucucaguacaucccac

SEQ ID NO: 2510021 - RNA, 19 nt, Artificial Sequence
  Description of Artificial Sequence: Synthetic oligonucleotide
ccuucagucauuauaaagu

SEQ ID NO: 2510022 - RNA, 19 nt, Artificial Sequence
  Description of Artificial Sequence: Synthetic oligonucleotide
accugaacuugcaucacca

SEQ ID NO: 2510023 - RNA, 19 nt, Artificial Sequence
  Description of Artificial Sequence: Synthetic oligonucleotide
cuccuugauuauccauucc

SEQ ID NO: 2510024 - RNA, 19 nt, Artificial Sequence
  Description of Artificial Sequence: Synthetic oligonucleotide
acucuacaucugccucucc

SEQ ID NO: 2510025 - RNA, 19 nt, Artificial Sequence
  Description of Artificial Sequence: Synthetic oligonucleotide
caauauaucgauguugcau

SEQ ID NO: 2510026 - RNA, 19 nt, Artificial Sequence
  Description of Artificial Sequence: Synthetic oligonucleotide
guggucucaguacauccca

SEQ ID NO: 2510027 - RNA, 19 nt, Artificial Sequence
  Description of Artificial Sequence: Synthetic oligonucleotide
aucgauguugcauguuguu

SEQ ID NO: 2510028 - RNA, 19 nt, Artificial Sequence
  Description of Artificial Sequence: Synthetic oligonucleotide
accuccagggguggaauuc

SEQ ID NO: 2510029 - RNA, 19 nt, Artificial Sequence
  Description of Artificial Sequence: Synthetic oligonucleotide
ucgauguugcauguuguuu

SEQ ID NO: 2510030 - RNA, 19 nt, Artificial Sequence
  Description of Artificial Sequence: Synthetic oligonucleotide
ugaccaccauggaaaccug

SEQ ID NO: 2510031 - RNA, 19 nt, Artificial Sequence
  Description of Artificial Sequence: Synthetic oligonucleotide
ggacuuguacguuggagga

SEQ ID NO: 2510032 - RNA, 19 nt, Artificial Sequence
  Description of Artificial Sequence: Synthetic oligonucleotide
cauauccuccuugauuauc

SEQ ID NO: 2510033 - RNA, 19 nt, Artificial Sequence
  Description of Artificial Sequence: Synthetic oligonucleotide
aagccaucaggagugccau

SEQ ID NO: 2510034 - RNA, 19 nt, Artificial Sequence
  Description of Artificial Sequence: Synthetic oligonucleotide
uccacucauuccaccuugu

SEQ ID NO: 2510035 - RNA, 19 nt, Artificial Sequence
  Description of Artificial Sequence: Synthetic oligonucleotide
aacucguauuggauugagu

SEQ ID NO: 2510036 - RNA, 19 nt, Artificial Sequence
  Description of Artificial Sequence: Synthetic oligonucleotide
cauuccagagccaccucca

SEQ ID NO: 2510037 - RNA, 19 nt, Artificial Sequence
  Description of Artificial Sequence: Synthetic oligonucleotide
aucaggagugccauauccu

SEQ ID NO: 2510038 - RNA, 19 nt, Artificial Sequence
  Description of Artificial Sequence: Synthetic oligonucleotide
acguuggaggaaguggucu

SEQ ID NO: 2510039 - RNA, 19 nt, Artificial Sequence
  Description of Artificial Sequence: Synthetic oligonucleotide
uguuccccauucccauucu

SEQ ID NO: 2510040 - RNA, 19 nt, Artificial Sequence
  Description of Artificial Sequence: Synthetic oligonucleotide
cugccauagccucccauuc

SEQ ID NO: 2510041 - RNA, 19 nt, Artificial Sequence
  Description of Artificial Sequence: Synthetic oligonucleotide
cauucucccaacagaucca

SEQ ID NO: 2510042 - RNA, 19 nt, Artificial Sequence
  Description of Artificial Sequence: Synthetic oligonucleotide
gauguuguuaggacuugua

SEQ ID NO: 2510043 - RNA, 19 nt, Artificial Sequence
  Description of Artificial Sequence: Synthetic oligonucleotide
agagccaccuccaggggug

SEQ ID NO: 2510044 - RNA, 19 nt, Artificial Sequence
  Description of Artificial Sequence: Synthetic oligonucleotide
ucacaaucuguugcuuuaa

SEQ ID NO: 2510045 - RNA, 19 nt, Artificial Sequence
  Description of Artificial Sequence: Synthetic oligonucleotide
caucugccucuccuguugc

SEQ ID NO: 2510046 - RNA, 19 nt, Artificial Sequence
  Description of Artificial Sequence: Synthetic oligonucleotide
gcaacaaauaaaaccuaca

SEQ ID NO: 2510047 - RNA, 19 nt, Artificial Sequence
  Description of Artificial Sequence: Synthetic oligonucleotide
guauuggauugagugguga

SEQ ID NO: 2510048 - RNA, 19 nt, Artificial Sequence
  Description of Artificial Sequence: Synthetic oligonucleotide
uguccucccaugccucuuc

SEQ ID NO: 2510049 - RNA, 19 nt, Artificial Sequence
  Description of Artificial Sequence: Synthetic oligonucleotide
cucccauuccagaccuccc

SEQ ID NO: 2510050 - RNA, 19 nt, Artificial Sequence
  Description of Artificial Sequence: Synthetic oligonucleotide
cauaaccucccaagccauc

SEQ ID NO: 2510051 - RNA, 19 nt, Artificial Sequence
  Description of Artificial Sequence: Synthetic oligonucleotide
uauaucgauguugcauguu

SEQ ID NO: 2510052 - RNA, 19 nt, Artificial Sequence
  Description of Artificial Sequence: Synthetic oligonucleotide
uugcacgaaaaggcagccc

SEQ ID NO: 2510053 - RNA, 19 nt, Artificial Sequence
  Description of Artificial Sequence: Synthetic oligonucleotide
cauuuucuguugcacgaaa

SEQ ID NO: 2510054 - RNA, 19 nt, Artificial Sequence
  Description of Artificial Sequence: Synthetic oligonucleotide
cagggguggaauucaagaa

SEQ ID NO: 2510055 - RNA, 19 nt, Artificial Sequence
  Description of Artificial Sequence: Synthetic oligonucleotide
gccaccauagucaucaaaa

SEQ ID NO: 2510056 - RNA, 19 nt, Artificial Sequence
  Description of Artificial Sequence: Synthetic oligonucleotide
uuccaucucucauccuguc

SEQ ID NO: 2510057 - RNA, 19 nt, Artificial Sequence
  Description of Artificial Sequence: Synthetic oligonucleotide
uggaggaaguggucucagu

SEQ ID NO: 2510058 - RNA, 19 nt, Artificial Sequence
  Description of Artificial Sequence: Synthetic oligonucleotide
auggaaaccugaacuugca

SEQ ID NO: 2510059 - RNA, 19 nt, Artificial Sequence
  Description of Artificial Sequence: Synthetic oligonucleotide
ccaacagauccauauccuc

SEQ ID NO: 2510060 - RNA, 19 nt, Artificial Sequence
  Description of Artificial Sequence: Synthetic oligonucleotide
cucucauccugucaucaaa

SEQ ID NO: 2510061 - RNA, 19 nt, Artificial Sequence
  Description of Artificial Sequence: Synthetic oligonucleotide
caucucucauccugucauc

SEQ ID NO: 2510062 - RNA, 19 nt, Artificial Sequence
  Description of Artificial Sequence: Synthetic oligonucleotide
ccugucaucaaagccauca

SEQ ID NO: 2510063 - RNA, 19 nt, Artificial Sequence
  Description of Artificial Sequence: Synthetic oligonucleotide
cucccaugccucuuccauc

SEQ ID NO: 2510064 - RNA, 19 nt, Artificial Sequence
  Description of Artificial Sequence: Synthetic oligonucleotide
ccaccauagucaucaaaac

SEQ ID NO: 2510065 - RNA, 19 nt, Artificial Sequence
  Description of Artificial Sequence: Synthetic oligonucleotide
ccaccuuguccauaguaac

SEQ ID NO: 2510066 - RNA, 19 nt, Artificial Sequence
  Description of Artificial Sequence: Synthetic oligonucleotide
gaaagucagcagauguugu

SEQ ID NO: 2510067 - RNA, 19 nt, Artificial Sequence
  Description of Artificial Sequence: Synthetic oligonucleotide
cuugcaucaccagcuccac

SEQ ID NO: 2510068 - RNA, 19 nt, Artificial Sequence
  Description of Artificial Sequence: Synthetic oligonucleotide
ucauuuccauagccauaau

SEQ ID NO: 2510069 - RNA, 19 nt, Artificial Sequence
  Description of Artificial Sequence: Synthetic oligonucleotide
caccuccacucauuccacc

SEQ ID NO: 2510070 - RNA, 19 nt, Artificial Sequence
  Description of Artificial Sequence: Synthetic oligonucleotide
agccaccauagucaucaaa

SEQ ID NO: 2510071 - RNA, 19 nt, Artificial Sequence
  Description of Artificial Sequence: Synthetic oligonucleotide
ccuccacuguaguuguucc

SEQ ID NO: 2510072 - RNA, 19 nt, Artificial Sequence
  Description of Artificial Sequence: Synthetic oligonucleotide
guacguuggaggaaguggu

SEQ ID NO: 2510073 - RNA, 19 nt, Artificial Sequence
  Description of Artificial Sequence: Synthetic oligonucleotide
accaccauggaaaccugaa

SEQ ID NO: 2510074 - RNA, 19 nt, Artificial Sequence
  Description of Artificial Sequence: Synthetic oligonucleotide
accucccaagccaucagga

SEQ ID NO: 2510075 - RNA, 19 nt, Artificial Sequence
  Description of Artificial Sequence: Synthetic oligonucleotide
auccugucaucaaagccau

SEQ ID NO: 2510076 - RNA, 19 nt, Artificial Sequence
  Description of Artificial Sequence: Synthetic oligonucleotide
ccuccuugauuauccauuc

SEQ ID NO: 2510077 - RNA, 19 nt, Artificial Sequence
  Description of Artificial Sequence: Synthetic oligonucleotide
aaccuacagaaaacagauu

SEQ ID NO: 2510078 - RNA, 19 nt, Artificial Sequence
  Description of Artificial Sequence: Synthetic oligonucleotide
guacaucccacgccaucca

SEQ ID NO: 2510079 - RNA, 19 nt, Artificial Sequence
  Description of Artificial Sequence: Synthetic oligonucleotide
augcaacaaauaaaaccua

SEQ ID NO: 2510080 - RNA, 19 nt, Artificial Sequence
  Description of Artificial Sequence: Synthetic oligonucleotide
uuguuaggacuuguacguu

SEQ ID NO: 2510081 - RNA, 19 nt, Artificial Sequence
  Description of Artificial Sequence: Synthetic oligonucleotide
cauucccauucucccaaca

SEQ ID NO: 2510082 - RNA, 19 nt, Artificial Sequence
  Description of Artificial Sequence: Synthetic oligonucleotide
uccucccaugccucuucca

SEQ ID NO: 2510083 - RNA, 19 nt, Artificial Sequence
  Description of Artificial Sequence: Synthetic oligonucleotide
augucaauaugaacucgua

SEQ ID NO: 2510084 - RNA, 19 nt, Artificial Sequence
  Description of Artificial Sequence: Synthetic oligonucleotide
cucccaagccaucaggagu

SEQ ID NO: 2510085 - RNA, 19 nt, Artificial Sequence
  Description of Artificial Sequence: Synthetic oligonucleotide
ccauggaaaccugaacuug

SEQ ID NO: 2510086 - RNA, 19 nt, Artificial Sequence
  Description of Artificial Sequence: Synthetic oligonucleotide
ccugaacuugcaucaccag

SEQ ID NO: 2510087 - RNA, 19 nt, Artificial Sequence
  Description of Artificial Sequence: Synthetic oligonucleotide
auuccaccuuguccauagu

SEQ ID NO: 2510088 - RNA, 19 nt, Artificial Sequence
  Description of Artificial Sequence: Synthetic oligonucleotide
uucucccaacagauccaua

SEQ ID NO: 2510089 - RNA, 19 nt, Artificial Sequence
  Description of Artificial Sequence: Synthetic oligonucleotide
guuccccauucccauucuc

SEQ ID NO: 2510090 - RNA, 19 nt, Artificial Sequence
  Description of Artificial Sequence: Synthetic oligonucleotide
gacuuguacguuggaggaa

SEQ ID NO: 2510091 - RNA, 19 nt, Artificial Sequence
  Description of Artificial Sequence: Synthetic oligonucleotide
acauuccuucagucauuau

SEQ ID NO: 2510092 - RNA, 19 nt, Artificial Sequence
  Description of Artificial Sequence: Synthetic oligonucleotide
ccucccauuccagaccucc

SEQ ID NO: 2510093 - RNA, 19 nt, Artificial Sequence
  Description of Artificial Sequence: Synthetic oligonucleotide
caucccacgccauccaccu

SEQ ID NO: 2510094 - RNA, 19 nt, Artificial Sequence
  Description of Artificial Sequence: Synthetic oligonucleotide
guccucccaugccucuucc

SEQ ID NO: 2510095 - RNA, 19 nt, Artificial Sequence
  Description of Artificial Sequence: Synthetic oligonucleotide
ccucccaagccaucaggag

SEQ ID NO: 2510096 - RNA, 19 nt, Artificial Sequence
  Description of Artificial Sequence: Synthetic oligonucleotide
gauccauauccuccuugau

SEQ ID NO: 2510097 - RNA, 19 nt, Artificial Sequence
  Description of Artificial Sequence: Synthetic oligonucleotide
cgaccauaaccucccaagc

SEQ ID NO: 2510098 - RNA, 19 nt, Artificial Sequence
  Description of Artificial Sequence: Synthetic oligonucleotide
gcuccaaugucaauaugaa

SEQ ID NO: 2510099 - RNA, 19 nt, Artificial Sequence
  Description of Artificial Sequence: Synthetic oligonucleotide
cuacaucugccucuccugu

SEQ ID NO: 2510100 - RNA, 19 nt, Artificial Sequence
  Description of Artificial Sequence: Synthetic oligonucleotide
gaccaccauggaaaccuga

SEQ ID NO: 2510101 - RNA, 19 nt, Artificial Sequence
  Description of Artificial Sequence: Synthetic oligonucleotide
ucauuccaccuuguccaua

SEQ ID NO: 2510102 - RNA, 19 nt, Artificial Sequence
  Description of Artificial Sequence: Synthetic oligonucleotide
ccaccauggaaaccugaac

SEQ ID NO: 2510103 - RNA, 19 nt, Artificial Sequence
  Description of Artificial Sequence: Synthetic oligonucleotide
aucccacgccauccaccuc

SEQ ID NO: 2510104 - RNA, 19 nt, Artificial Sequence
  Description of Artificial Sequence: Synthetic oligonucleotide
cugccaucggcuccaaugu

SEQ ID NO: 2510105 - RNA, 19 nt, Artificial Sequence
  Description of Artificial Sequence: Synthetic oligonucleotide
ccuuguccauaguaaccac

SEQ ID NO: 2510106 - RNA, 19 nt, Artificial Sequence
  Description of Artificial Sequence: Synthetic oligonucleotide
caucacaaucuguugcuuu

SEQ ID NO: 2510107 - RNA, 19 nt, Artificial Sequence
  Description of Artificial Sequence: Synthetic oligonucleotide
uccugucaucaaagccauc

SEQ ID NO: 2510108 - RNA, 19 nt, Artificial Sequence
  Description of Artificial Sequence: Synthetic oligonucleotide
ccucccauuccagagccac

SEQ ID NO: 2510109 - RNA, 19 nt, Artificial Sequence
  Description of Artificial Sequence: Synthetic oligonucleotide
cacgccauccaccuccacu

SEQ ID NO: 2510110 - RNA, 19 nt, Artificial Sequence
  Description of Artificial Sequence: Synthetic oligonucleotide
gccaucggcuccaauguca

SEQ ID NO: 2510111 - RNA, 19 nt, Artificial Sequence
  Description of Artificial Sequence: Synthetic oligonucleotide
cacgaccauaaccucccaa

SEQ ID NO: 2510112 - RNA, 19 nt, Artificial Sequence
  Description of Artificial Sequence: Synthetic oligonucleotide
ccuguugcucugccaucgg

SEQ ID NO: 2510113 - RNA, 19 nt, Artificial Sequence
  Description of Artificial Sequence: Synthetic oligonucleotide
cccauucucccaacagauc

SEQ ID NO: 2510114 - RNA, 19 nt, Artificial Sequence
  Description of Artificial Sequence: Synthetic oligonucleotide
cacgaaaaggcagcccucu

SEQ ID NO: 2510115 - RNA, 19 nt, Artificial Sequence
  Description of Artificial Sequence: Synthetic oligonucleotide
cguuggaggaaguggucuc

SEQ ID NO: 2510116 - RNA, 19 nt, Artificial Sequence
  Description of Artificial Sequence: Synthetic oligonucleotide
gcagauguuguuaggacuu

SEQ ID NO: 2510117 - RNA, 19 nt, Artificial Sequence
  Description of Artificial Sequence: Synthetic oligonucleotide
cuuguacguuggaggaagu

SEQ ID NO: 2510118 - RNA, 19 nt, Artificial Sequence
  Description of Artificial Sequence: Synthetic oligonucleotide
cuguugcuuuaaccaaaua

SEQ ID NO: 2510119 - RNA, 19 nt, Artificial Sequence
  Description of Artificial Sequence: Synthetic oligonucleotide
ccuugauuauccauuccau

SEQ ID NO: 2510120 - RNA, 19 nt, Artificial Sequence
  Description of Artificial Sequence: Synthetic oligonucleotide
cauguccucccaugccucu

SEQ ID NO: 2510121 - RNA, 19 nt, Artificial Sequence
  Description of Artificial Sequence: Synthetic oligonucleotide
cccaucacaaucuguugcu

SEQ ID NO: 2510122 - RNA, 19 nt, Artificial Sequence
  Description of Artificial Sequence: Synthetic oligonucleotide
ccaucucucauccugucau

SEQ ID NO: 2510123 - RNA, 19 nt, Artificial Sequence
  Description of Artificial Sequence: Synthetic oligonucleotide
cccauucccauucucccaa

SEQ ID NO: 2510124 - RNA, 19 nt, Artificial Sequence
  Description of Artificial Sequence: Synthetic oligonucleotide
guuguuccccauucccauu

SEQ ID NO: 2510125 - RNA, 19 nt, Artificial Sequence
  Description of Artificial Sequence: Synthetic oligonucleotide
gugccauauccuccacugu

SEQ ID NO: 2510126 - RNA, 19 nt, Artificial Sequence
  Description of Artificial Sequence: Synthetic oligonucleotide
cagucauuauaaaguucuu

SEQ ID NO: 2510127 - RNA, 19 nt, Artificial Sequence
  Description of Artificial Sequence: Synthetic oligonucleotide
ccagaccucccauuccaga

SEQ ID NO: 2510128 - RNA, 19 nt, Artificial Sequence
  Description of Artificial Sequence: Synthetic oligonucleotide
agccaucaggagugccaua

SEQ ID NO: 2510129 - RNA, 19 nt, Artificial Sequence
  Description of Artificial Sequence: Synthetic oligonucleotide
cccaacagauccauauccu

SEQ ID NO: 2510130 - RNA, 19 nt, Artificial Sequence
  Description of Artificial Sequence: Synthetic oligonucleotide
cauagccauguccucccau

SEQ ID NO: 2510131 - RNA, 19 nt, Artificial Sequence
  Description of Artificial Sequence: Synthetic oligonucleotide
gccaucaggagugccauau

SEQ ID NO: 2510132 - RNA, 19 nt, Artificial Sequence
  Description of Artificial Sequence: Synthetic oligonucleotide
ccauucccauucucccaac

SEQ ID NO: 2510133 - RNA, 19 nt, Artificial Sequence
  Description of Artificial Sequence: Synthetic oligonucleotide
auguccucccaugccucuu

SEQ ID NO: 2510134 - RNA, 19 nt, Artificial Sequence
  Description of Artificial Sequence: Synthetic oligonucleotide
ccaucaggagugccauauc

SEQ ID NO: 2510135 - RNA, 19 nt, Artificial Sequence
  Description of Artificial Sequence: Synthetic oligonucleotide
cacuguaguuguuccccau

SEQ ID NO: 2510136 - RNA, 19 nt, Artificial Sequence
  Description of Artificial Sequence: Synthetic oligonucleotide
ccacuguaguuguucccca

SEQ ID NO: 2510137 - RNA, 19 nt, Artificial Sequence
  Description of Artificial Sequence: Synthetic oligonucleotide
cucauuccaccuuguccau

SEQ ID NO: 2510138 - RNA, 19 nt, Artificial Sequence
  Description of Artificial Sequence: Synthetic oligonucleotide
gcacgaaaaggcagcccuc

SEQ ID NO: 2510139 - RNA, 19 nt, Artificial Sequence
  Description of Artificial Sequence: Synthetic oligonucleotide
cgauguugcauguuguuuu

SEQ ID NO: 2510140 - RNA, 19 nt, Artificial Sequence
  Description of Artificial Sequence: Synthetic oligonucleotide
ggaaguggucucaguacau

SEQ ID NO: 2510141 - RNA, 19 nt, Artificial Sequence
  Description of Artificial Sequence: Synthetic oligonucleotide
accucccauuccagagcca

SEQ ID NO: 2510142 - RNA, 19 nt, Artificial Sequence
  Description of Artificial Sequence: Synthetic oligonucleotide
ccauaaccucccaagccau

SEQ ID NO: 2510143 - RNA, 19 nt, Artificial Sequence
  Description of Artificial Sequence: Synthetic oligonucleotide
cucugccauagccucccau

SEQ ID NO: 2510144 - RNA, 19 nt, Artificial Sequence
  Description of Artificial Sequence: Synthetic oligonucleotide
gcuccaccauagccauguc

SEQ ID NO: 2510145 - RNA, 19 nt, Artificial Sequence
  Description of Artificial Sequence: Synthetic oligonucleotide
cuccaccaccacgaccaua

SEQ ID NO: 2510146 - RNA, 19 nt, Artificial Sequence
  Description of Artificial Sequence: Synthetic oligonucleotide
gccaccuccagggguggaa

SEQ ID NO: 2510147 - RNA, 19 nt, Artificial Sequence
  Description of Artificial Sequence: Synthetic oligonucleotide
ccauagccauguccuccca

SEQ ID NO: 2510148 - RNA, 19 nt, Artificial Sequence
  Description of Artificial Sequence: Synthetic oligonucleotide
auccuccacuguaguuguu

SEQ ID NO: 2510149 - RNA, 19 nt, Artificial Sequence
  Description of Artificial Sequence: Synthetic oligonucleotide
gccauccaccuccacucau

SEQ ID NO: 2510150 - RNA, 19 nt, Artificial Sequence
  Description of Artificial Sequence: Synthetic oligonucleotide
ccauauccuccuugauuau

SEQ ID NO: 2510151 - RNA, 19 nt, Artificial Sequence
  Description of Artificial Sequence: Synthetic oligonucleotide
cccauuccagaccucccau

SEQ ID NO: 2510152 - RNA, 19 nt, Artificial Sequence
  Description of Artificial Sequence: Synthetic oligonucleotide
ccauuccagaccucccauu

SEQ ID NO: 2510153 - RNA, 19 nt, Artificial Sequence
  Description of Artificial Sequence: Synthetic oligonucleotide
ccacgaccauaaccuccca

SEQ ID NO: 2510154 - RNA, 19 nt, Artificial Sequence
  Description of Artificial Sequence: Synthetic oligonucleotide
ccauuccaucucugccaua

SEQ ID NO: 2510155 - RNA, 19 nt, Artificial Sequence
  Description of Artificial Sequence: Synthetic oligonucleotide
ccaucacaaucuguugcuu

SEQ ID NO: 2510156 - RNA, 19 nt, Artificial Sequence
  Description of Artificial Sequence: Synthetic oligonucleotide
gccucccauuccagaccuc

SEQ ID NO: 2510157 - RNA, 19 nt, Artificial Sequence
  Description of Artificial Sequence: Synthetic oligonucleotide
ccaccuccagggguggaau

SEQ ID NO: 2510158 - RNA, 19 nt, Artificial Sequence
  Description of Artificial Sequence: Synthetic oligonucleotide
uagauuuccaauaauaugu

SEQ ID NO: 2510159 - RNA, 19 nt, Artificial Sequence
  Description of Artificial Sequence: Synthetic oligonucleotide
uaauauguacauuuggagg

SEQ ID NO: 2510160 - RNA, 19 nt, Artificial Sequence
  Description of Artificial Sequence: Synthetic oligonucleotide
ugaaguuguaaguaaagag

SEQ ID NO: 2510161 - RNA, 19 nt, Artificial Sequence
  Description of Artificial Sequence: Synthetic oligonucleotide
aaaugcaugagcgagaggu

SEQ ID NO: 2510162 - RNA, 19 nt, Artificial Sequence
  Description of Artificial Sequence: Synthetic oligonucleotide
auaauauguacauuuggag

SEQ ID NO: 2510163 - RNA, 19 nt, Artificial Sequence
  Description of Artificial Sequence: Synthetic oligonucleotide
guaaguaaagaguuguggg

SEQ ID NO: 2510164 - RNA, 19 nt, Artificial Sequence
  Description of Artificial Sequence: Synthetic oligonucleotide
cucuuaaaaugcaugagcg

SEQ ID NO: 2510165 - RNA, 19 nt, Artificial Sequence
  Description of Artificial Sequence: Synthetic oligonucleotide
agagagacauuuucaagcc

SEQ ID NO: 2510166 - RNA, 19 nt, Artificial Sequence
  Description of Artificial Sequence: Synthetic oligonucleotide
uuuaagagagacauuuuca

SEQ ID NO: 2510167 - RNA, 19 nt, Artificial Sequence
  Description of Artificial Sequence: Synthetic oligonucleotide
uguaaguaaagaguugugg

SEQ ID NO: 2510168 - RNA, 19 nt, Artificial Sequence
  Description of Artificial Sequence: Synthetic oligonucleotide
uuuucaagccacuugauaa

SEQ ID NO: 2510169 - RNA, 19 nt, Artificial Sequence
  Description of Artificial Sequence: Synthetic oligonucleotide
aauaauauguacauuugga

SEQ ID NO: 2510170 - RNA, 19 nt, Artificial Sequence
  Description of Artificial Sequence: Synthetic oligonucleotide
uuuuaagagagacauuuuc

SEQ ID NO: 2510171 - RNA, 19 nt, Artificial Sequence
  Description of Artificial Sequence: Synthetic oligonucleotide
uguaaagagguguucaaca

SEQ ID NO: 2510172 - RNA, 19 nt, Artificial Sequence
  Description of Artificial Sequence: Synthetic oligonucleotide
uaaucagugguguugaaac

SEQ ID NO: 2510173 - RNA, 19 nt, Artificial Sequence
  Description of Artificial Sequence: Synthetic oligonucleotide
aauggaaagacgacugcgc

SEQ ID NO: 2510174 - RNA, 19 nt, Artificial Sequence
  Description of Artificial Sequence: Synthetic oligonucleotide
guaucaaagguguaaagug

SEQ ID NO: 2510175 - RNA, 19 nt, Artificial Sequence
  Description of Artificial Sequence: Synthetic oligonucleotide
cuuaguucugccauaagug

SEQ ID NO: 2510176 - RNA, 19 nt, Artificial Sequence
  Description of Artificial Sequence: Synthetic oligonucleotide
uaucuuguaggucagcaca

SEQ ID NO: 2510177 - RNA, 19 nt, Artificial Sequence
  Description of Artificial Sequence: Synthetic oligonucleotide
guuagugucaucuuaguuc

SEQ ID NO: 2510178 - RNA, 19 nt, Artificial Sequence
  Description of Artificial Sequence: Synthetic oligonucleotide
aacaugguuuggaaaagcc

SEQ ID NO: 2510179 - RNA, 19 nt, Artificial Sequence
  Description of Artificial Sequence: Synthetic oligonucleotide
aaguaaagaguuguggguc

SEQ ID NO: 2510180 - RNA, 19 nt, Artificial Sequence
  Description of Artificial Sequence: Synthetic oligonucleotide
ucugguuugggaacaaaag

SEQ ID NO: 2510181 - RNA, 19 nt, Artificial Sequence
  Description of Artificial Sequence: Synthetic oligonucleotide
ucuuaguucugccauaagu

SEQ ID NO: 2510182 - RNA, 19 nt, Artificial Sequence
  Description of Artificial Sequence: Synthetic oligonucleotide
uggggaauaacauuccaag

SEQ ID NO: 2510183 - RNA, 19 nt, Artificial Sequence
  Description of Artificial Sequence: Synthetic oligonucleotide
aaagagguguucaacauug

SEQ ID NO: 2510184 - RNA, 19 nt, Artificial Sequence
  Description of Artificial Sequence: Synthetic oligonucleotide
ucugccauaagugaaaggu

SEQ ID NO: 2510185 - RNA, 19 nt, Artificial Sequence
  Description of Artificial Sequence: Synthetic oligonucleotide
caauaauauguacauuugg

SEQ ID NO: 2510186 - RNA, 19 nt, Artificial Sequence
  Description of Artificial Sequence: Synthetic oligonucleotide
auaauggaaagacgacugc

SEQ ID NO: 2510187 - RNA, 19 nt, Artificial Sequence
  Description of Artificial Sequence: Synthetic oligonucleotide
ugccauaagugaaaggucc

SEQ ID NO: 2510188 - RNA, 19 nt, Artificial Sequence
  Description of Artificial Sequence: Synthetic oligonucleotide
uuagugucaucuuaguucu

SEQ ID NO: 2510189 - RNA, 19 nt, Artificial Sequence
  Description of Artificial Sequence: Synthetic oligonucleotide
ucugccaacuguaacagcu

SEQ ID NO: 2510190 - RNA, 19 nt, Artificial Sequence
  Description of Artificial Sequence: Synthetic oligonucleotide
ucugaaguuguaaguaaag

SEQ ID NO: 2510191 - RNA, 19 nt, Artificial Sequence
  Description of Artificial Sequence: Synthetic oligonucleotide
cauaauggaaagacgacug

SEQ ID NO: 2510192 - RNA, 19 nt, Artificial Sequence
  Description of Artificial Sequence: Synthetic oligonucleotide
uguaaaguguaccacuccu

SEQ ID NO: 2510193 - RNA, 19 nt, Artificial Sequence
  Description of Artificial Sequence: Synthetic oligonucleotide
uaacauuccaaguccuugg

SEQ ID NO: 2510194 - RNA, 19 nt, Artificial Sequence
  Description of Artificial Sequence: Synthetic oligonucleotide
aauuguaaagagguguuca

SEQ ID NO: 2510195 - RNA, 19 nt, Artificial Sequence
  Description of Artificial Sequence: Synthetic oligonucleotide
uuuccaauaauauguacau

SEQ ID NO: 2510196 - RNA, 19 nt, Artificial Sequence
  Description of Artificial Sequence: Synthetic oligonucleotide
ugugucaucgccuuucucu

SEQ ID NO: 2510197 - RNA, 19 nt, Artificial Sequence
  Description of Artificial Sequence: Synthetic oligonucleotide
aaguguaccacuccuacau

SEQ ID NO: 2510198 - RNA, 19 nt, Artificial Sequence
  Description of Artificial Sequence: Synthetic oligonucleotide
guagauuuccaauaauaug

SEQ ID NO: 2510199 - RNA, 19 nt, Artificial Sequence
  Description of Artificial Sequence: Synthetic oligonucleotide
uuaagagagacauuuucaa

SEQ ID NO: 2510200 - RNA, 19 nt, Artificial Sequence
  Description of Artificial Sequence: Synthetic oligonucleotide
uuuugaaauguuaguguca

SEQ ID NO: 2510201 - RNA, 19 nt, Artificial Sequence
  Description of Artificial Sequence: Synthetic oligonucleotide
uucaacauugcagagguac

SEQ ID NO: 2510202 - RNA, 19 nt, Artificial Sequence
  Description of Artificial Sequence: Synthetic oligonucleotide
uaaguaaagaguugugggu

SEQ ID NO: 2510203 - RNA, 19 nt, Artificial Sequence
  Description of Artificial Sequence: Synthetic oligonucleotide
uaauggaaagacgacugcg

SEQ ID NO: 2510204 - RNA, 19 nt, Artificial Sequence
  Description of Artificial Sequence: Synthetic oligonucleotide
uguaucaaagguguaaagu

SEQ ID NO: 2510205 - RNA, 19 nt, Artificial Sequence
  Description of Artificial Sequence: Synthetic oligonucleotide
uaaaguguaccacuccuac

SEQ ID NO: 2510206 - RNA, 19 nt, Artificial Sequence
  Description of Artificial Sequence: Synthetic oligonucleotide
uacauuuggaggaucgucu

SEQ ID NO: 2510207 - RNA, 19 nt, Artificial Sequence
  Description of Artificial Sequence: Synthetic oligonucleotide
acauaggcucuuaaaaugc

SEQ ID NO: 2510208 - RNA, 19 nt, Artificial Sequence
  Description of Artificial Sequence: Synthetic oligonucleotide
aagacgacugcgcuguuug

SEQ ID NO: 2510209 - RNA, 19 nt, Artificial Sequence
  Description of Artificial Sequence: Synthetic oligonucleotide
uuaguucugccauaaguga

SEQ ID NO: 2510210 - RNA, 19 nt, Artificial Sequence
  Description of Artificial Sequence: Synthetic oligonucleotide
uccuacaucaaccucuggu

SEQ ID NO: 2510211 - RNA, 19 nt, Artificial Sequence
  Description of Artificial Sequence: Synthetic oligonucleotide
cuguacacaucacauaggc

SEQ ID NO: 2510212 - RNA, 19 nt, Artificial Sequence
  Description of Artificial Sequence: Synthetic oligonucleotide
ugggcuguaucaaaggugu

SEQ ID NO: 2510213 - RNA, 19 nt, Artificial Sequence
  Description of Artificial Sequence: Synthetic oligonucleotide
cuuccuucggaacugaaac

SEQ ID NO: 2510214 - RNA, 19 nt, Artificial Sequence
  Description of Artificial Sequence: Synthetic oligonucleotide
aaauguuagugucaucuua

SEQ ID NO: 2510215 - RNA, 19 nt, Artificial Sequence
  Description of Artificial Sequence: Synthetic oligonucleotide
uccuggaauuguaaagagg

SEQ ID NO: 2510216 - RNA, 19 nt, Artificial Sequence
  Description of Artificial Sequence: Synthetic oligonucleotide
uugauaaucagugguguug

SEQ ID NO: 2510217 - RNA, 19 nt, Artificial Sequence
  Description of Artificial Sequence: Synthetic oligonucleotide
augagcgagagguggaugg

SEQ ID NO: 2510218 - RNA, 19 nt, Artificial Sequence
  Description of Artificial Sequence: Synthetic oligonucleotide
aauacuuccuucggaacug

SEQ ID NO: 2510219 - RNA, 19 nt, Artificial Sequence
  Description of Artificial Sequence: Synthetic oligonucleotide
aacugaaacgcguacugaa

SEQ ID NO: 2510220 - RNA, 19 nt, Artificial Sequence
  Description of Artificial Sequence: Synthetic oligonucleotide
auuccaaguccuugguggc

SEQ ID NO: 2510221 - RNA, 19 nt, Artificial Sequence
  Description of Artificial Sequence: Synthetic oligonucleotide
uaggcucuuaaaaugcaug

SEQ ID NO: 2510222 - RNA, 19 nt, Artificial Sequence
  Description of Artificial Sequence: Synthetic oligonucleotide
ucuuaaaaugcaugagcga

SEQ ID NO: 2510223 - RNA, 19 nt, Artificial Sequence
  Description of Artificial Sequence: Synthetic oligonucleotide
agguguucaacauugcaga

SEQ ID NO: 2510224 - RNA, 19 nt, Artificial Sequence
  Description of Artificial Sequence: Synthetic oligonucleotide
aucagugguguugaaacac

SEQ ID NO: 2510225 - RNA, 19 nt, Artificial Sequence
  Description of Artificial Sequence: Synthetic oligonucleotide
uaccacuccuacaucaacc

SEQ ID NO: 2510226 - RNA, 19 nt, Artificial Sequence
  Description of Artificial Sequence: Synthetic oligonucleotide
caauccucagucuuccagg

SEQ ID NO: 2510227 - RNA, 19 nt, Artificial Sequence
  Description of Artificial Sequence: Synthetic oligonucleotide
uuugaaauguuagugucau

SEQ ID NO: 2510228 - RNA, 19 nt, Artificial Sequence
  Description of Artificial Sequence: Synthetic oligonucleotide
guggcuacaagucucucag

SEQ ID NO: 2510229 - RNA, 19 nt, Artificial Sequence
  Description of Artificial Sequence: Synthetic oligonucleotide
ucaaccucugguuugggaa

SEQ ID NO: 2510230 - RNA, 19 nt, Artificial Sequence
  Description of Artificial Sequence: Synthetic oligonucleotide
aaguuguaaguaaagaguu

SEQ ID NO: 2510231 - RNA, 19 nt, Artificial Sequence
  Description of Artificial Sequence: Synthetic oligonucleotide
auaagugaaagguccauuu

SEQ ID NO: 2510232 - RNA, 19 nt, Artificial Sequence
  Description of Artificial Sequence: Synthetic oligonucleotide
aaguccuugguggcaauac

SEQ ID NO: 2510233 - RNA, 19 nt, Artificial Sequence
  Description of Artificial Sequence: Synthetic oligonucleotide
gauuuccaauaauauguac

SEQ ID NO: 2510234 - RNA, 19 nt, Artificial Sequence
  Description of Artificial Sequence: Synthetic oligonucleotide
uuguaaguaaagaguugug

SEQ ID NO: 2510235 - RNA, 19 nt, Artificial Sequence
  Description of Artificial Sequence: Synthetic oligonucleotide
ucuaucuuguaggucagca

SEQ ID NO: 2510236 - RNA, 19 nt, Artificial Sequence
  Description of Artificial Sequence: Synthetic oligonucleotide
aaucagugguguugaaaca

SEQ ID NO: 2510237 - RNA, 19 nt, Artificial Sequence
  Description of Artificial Sequence: Synthetic oligonucleotide
uuggaaaagccuuuucuau

SEQ ID NO: 2510238 - RNA, 19 nt, Artificial Sequence
  Description of Artificial Sequence: Synthetic oligonucleotide
uuguaggucagcacauccc

SEQ ID NO: 2510239 - RNA, 19 nt, Artificial Sequence
  Description of Artificial Sequence: Synthetic oligonucleotide
gaaguuguaaguaaagagu

SEQ ID NO: 2510240 - RNA, 19 nt, Artificial Sequence
  Description of Artificial Sequence: Synthetic oligonucleotide
uuccuucggaacugaaacg

SEQ ID NO: 2510241 - RNA, 19 nt, Artificial Sequence
  Description of Artificial Sequence: Synthetic oligonucleotide
ugguguugaaacacuaaaa

SEQ ID NO: 2510242 - RNA, 19 nt, Artificial Sequence
  Description of Artificial Sequence: Synthetic oligonucleotide
aaaguguaccacuccuaca

SEQ ID NO: 2510243 - RNA, 19 nt, Artificial Sequence
  Description of Artificial Sequence: Synthetic oligonucleotide
aauccucagucuuccaggu

SEQ ID NO: 2510244 - RNA, 19 nt, Artificial Sequence
  Description of Artificial Sequence: Synthetic oligonucleotide
uccuucggaacugaaacgc

SEQ ID NO: 2510245 - RNA, 19 nt, Artificial Sequence
  Description of Artificial Sequence: Synthetic oligonucleotide
gaguugugggucuucauca

SEQ ID NO: 2510246 - RNA, 19 nt, Artificial Sequence
  Description of Artificial Sequence: Synthetic oligonucleotide
ugucgucuaacaugguuug

SEQ ID NO: 2510247 - RNA, 19 nt, Artificial Sequence
  Description of Artificial Sequence: Synthetic oligonucleotide
uugugggucuucaucacac

SEQ ID NO: 2510248 - RNA, 19 nt, Artificial Sequence
  Description of Artificial Sequence: Synthetic oligonucleotide
gguggcaauacuuccuucg

SEQ ID NO: 2510249 - RNA, 19 nt, Artificial Sequence
  Description of Artificial Sequence: Synthetic oligonucleotide
aaaaugcaugagcgagagg

SEQ ID NO: 2510250 - RNA, 19 nt, Artificial Sequence
  Description of Artificial Sequence: Synthetic oligonucleotide
ucaacauugcagagguacu

SEQ ID NO: 2510251 - RNA, 19 nt, Artificial Sequence
  Description of Artificial Sequence: Synthetic oligonucleotide
uggaaaagccuuuucuauc

SEQ ID NO: 2510252 - RNA, 19 nt, Artificial Sequence
  Description of Artificial Sequence: Synthetic oligonucleotide
uuccuuuugaaauguuagu

SEQ ID NO: 2510253 - RNA, 19 nt, Artificial Sequence
  Description of Artificial Sequence: Synthetic oligonucleotide
agguguaaaguguaccacu

SEQ ID NO: 2510254 - RNA, 19 nt, Artificial Sequence
  Description of Artificial Sequence: Synthetic oligonucleotide
aguugugggucuucaucac

SEQ ID NO: 2510255 - RNA, 19 nt, Artificial Sequence
  Description of Artificial Sequence: Synthetic oligonucleotide
caaagguguaaaguguacc

SEQ ID NO: 2510256 - RNA, 19 nt, Artificial Sequence
  Description of Artificial Sequence: Synthetic oligonucleotide
ucucugaaguuguaaguaa

SEQ ID NO: 2510257 - RNA, 19 nt, Artificial Sequence
  Description of Artificial Sequence: Synthetic oligonucleotide
ugucaucuuaguucugcca

SEQ ID NO: 2510258 - RNA, 19 nt, Artificial Sequence
  Description of Artificial Sequence: Synthetic oligonucleotide
caucccauggacaauccuc

SEQ ID NO: 2510259 - RNA, 19 nt, Artificial Sequence
  Description of Artificial Sequence: Synthetic oligonucleotide
aggcucuuaaaaugcauga

SEQ ID NO: 2510260 - RNA, 19 nt, Artificial Sequence
  Description of Artificial Sequence: Synthetic oligonucleotide
uguuagugucaucuuaguu

SEQ ID NO: 2510261 - RNA, 19 nt, Artificial Sequence
  Description of Artificial Sequence: Synthetic oligonucleotide
auguacauuuggaggaucg

SEQ ID NO: 2510262 - RNA, 19 nt, Artificial Sequence
  Description of Artificial Sequence: Synthetic oligonucleotide
uguuuucuaggcguugagc

SEQ ID NO: 2510263 - RNA, 19 nt, Artificial Sequence
  Description of Artificial Sequence: Synthetic oligonucleotide
uaaagagguguucaacauu

SEQ ID NO: 2510264 - RNA, 19 nt, Artificial Sequence
  Description of Artificial Sequence: Synthetic oligonucleotide
agagguguucaacauugca

SEQ ID NO: 2510265 - RNA, 19 nt, Artificial Sequence
  Description of Artificial Sequence: Synthetic oligonucleotide
aagguagauuuccaauaau

SEQ ID NO: 2510266 - RNA, 19 nt, Artificial Sequence
  Description of Artificial Sequence: Synthetic oligonucleotide
auuguaaagagguguucaa

SEQ ID NO: 2510267 - RNA, 19 nt, Artificial Sequence
  Description of Artificial Sequence: Synthetic oligonucleotide
agccacuugauaaucagug

SEQ ID NO: 2510268 - RNA, 19 nt, Artificial Sequence
  Description of Artificial Sequence: Synthetic oligonucleotide
ucagugguguugaaacacu

SEQ ID NO: 2510269 - RNA, 19 nt, Artificial Sequence
  Description of Artificial Sequence: Synthetic oligonucleotide
guggcaauacuuccuucgg

SEQ ID NO: 2510270 - RNA, 19 nt, Artificial Sequence
  Description of Artificial Sequence: Synthetic oligonucleotide
acugaaacgcguacugaac

SEQ ID NO: 2510271 - RNA, 19 nt, Artificial Sequence
  Description of Artificial Sequence: Synthetic oligonucleotide
auuuucaagccacuugaua

SEQ ID NO: 2510272 - RNA, 19 nt, Artificial Sequence
  Description of Artificial Sequence: Synthetic oligonucleotide
aagagguguucaacauugc

SEQ ID NO: 2510273 - RNA, 19 nt, Artificial Sequence
  Description of Artificial Sequence: Synthetic oligonucleotide
ugaaacgcguacugaacaa

SEQ ID NO: 2510274 - RNA, 19 nt, Artificial Sequence
  Description of Artificial Sequence: Synthetic oligonucleotide
auggaaagacgacugcgcu

SEQ ID NO: 2510275 - RNA, 19 nt, Artificial Sequence
  Description of Artificial Sequence: Synthetic oligonucleotide
uggaaagacgacugcgcug

SEQ ID NO: 2510276 - RNA, 19 nt, Artificial Sequence
  Description of Artificial Sequence: Synthetic oligonucleotide
cuguaucaaagguguaaag

SEQ ID NO: 2510277 - RNA, 19 nt, Artificial Sequence
  Description of Artificial Sequence: Synthetic oligonucleotide
acuugauaaucaguggugu

SEQ ID NO: 2510278 - RNA, 19 nt, Artificial Sequence
  Description of Artificial Sequence: Synthetic oligonucleotide
aucgccuuucucuuggccu

SEQ ID NO: 2510279 - RNA, 19 nt, Artificial Sequence
  Description of Artificial Sequence: Synthetic oligonucleotide
aaacgcguacugaacaacu

SEQ ID NO: 2510280 - RNA, 19 nt, Artificial Sequence
  Description of Artificial Sequence: Synthetic oligonucleotide
ucgucuaacaugguuugga

SEQ ID NO: 2510281 - RNA, 19 nt, Artificial Sequence
  Description of Artificial Sequence: Synthetic oligonucleotide
uucugccauaagugaaagg

SEQ ID NO: 2510282 - RNA, 19 nt, Artificial Sequence
  Description of Artificial Sequence: Synthetic oligonucleotide
uggacaauccucagucuuc

SEQ ID NO: 2510283 - RNA, 19 nt, Artificial Sequence
  Description of Artificial Sequence: Synthetic oligonucleotide
augcaugagcgagaggugg

SEQ ID NO: 2510284 - RNA, 19 nt, Artificial Sequence
  Description of Artificial Sequence: Synthetic oligonucleotide
agucgggucgaugucugcc

SEQ ID NO: 2510285 - RNA, 19 nt, Artificial Sequence
  Description of Artificial Sequence: Synthetic oligonucleotide
uuguaaagagguguucaac

SEQ ID NO: 2510286 - RNA, 19 nt, Artificial Sequence
  Description of Artificial Sequence: Synthetic oligonucleotide
gucagcacaucccauggac

SEQ ID NO: 2510287 - RNA, 19 nt, Artificial Sequence
  Description of Artificial Sequence: Synthetic oligonucleotide
cuaucuuguaggucagcac

SEQ ID NO: 2510288 - RNA, 19 nt, Artificial Sequence
  Description of Artificial Sequence: Synthetic oligonucleotide
accacuccuacaucaaccu

SEQ ID NO: 2510289 - RNA, 19 nt, Artificial Sequence
  Description of Artificial Sequence: Synthetic oligonucleotide
uguguuuucuaggcguuga

SEQ ID NO: 2510290 - RNA, 19 nt, Artificial Sequence
  Description of Artificial Sequence: Synthetic oligonucleotide
gcuacuuccuuuugaaaug

SEQ ID NO: 2510291 - RNA, 19 nt, Artificial Sequence
  Description of Artificial Sequence: Synthetic oligonucleotide
aucgucuucccacugucgu

SEQ ID NO: 2510292 - RNA, 19 nt, Artificial Sequence
  Description of Artificial Sequence: Synthetic oligonucleotide
uguaccacuccuacaucaa

SEQ ID NO: 2510293 - RNA, 19 nt, Artificial Sequence
  Description of Artificial Sequence: Synthetic oligonucleotide
ccacugucgucuaacaugg

SEQ ID NO: 2510294 - RNA, 19 nt, Artificial Sequence
  Description of Artificial Sequence: Synthetic oligonucleotide
cuaggcguugagcuuuggg

SEQ ID NO: 2510295 - RNA, 19 nt, Artificial Sequence
  Description of Artificial Sequence: Synthetic oligonucleotide
uggcaauacuuccuucgga

SEQ ID NO: 2510296 - RNA, 19 nt, Artificial Sequence
  Description of Artificial Sequence: Synthetic oligonucleotide
aguuguaaguaaagaguug

SEQ ID NO: 2510297 - RNA, 19 nt, Artificial Sequence
  Description of Artificial Sequence: Synthetic oligonucleotide
ugcgcuguuugcuuccugu

SEQ ID NO: 2510298 - RNA, 19 nt, Artificial Sequence
  Description of Artificial Sequence: Synthetic oligonucleotide
guguaaaguguaccacucc

SEQ ID NO: 2510299 - RNA, 19 nt, Artificial Sequence
  Description of Artificial Sequence: Synthetic oligonucleotide
agcgagagguggaugggcc

SEQ ID NO: 2510300 - RNA, 19 nt, Artificial Sequence
  Description of Artificial Sequence: Synthetic oligonucleotide
cuggaauuguaaagaggug

SEQ ID NO: 2510301 - RNA, 19 nt, Artificial Sequence
  Description of Artificial Sequence: Synthetic oligonucleotide
auggacaauccucagucuu

SEQ ID NO: 2510302 - RNA, 19 nt, Artificial Sequence
  Description of Artificial Sequence: Synthetic oligonucleotide
ugcaugagcgagaggugga

SEQ ID NO: 2510303 - RNA, 19 nt, Artificial Sequence
  Description of Artificial Sequence: Synthetic oligonucleotide
cugaaacgcguacugaaca

SEQ ID NO: 2510304 - RNA, 19 nt, Artificial Sequence
  Description of Artificial Sequence: Synthetic oligonucleotide
gaauuguaaagagguguuc

SEQ ID NO: 2510305 - RNA, 19 nt, Artificial Sequence
  Description of Artificial Sequence: Synthetic oligonucleotide
gugguguugaaacacuaaa

SEQ ID NO: 2510306 - RNA, 19 nt, Artificial Sequence
  Description of Artificial Sequence: Synthetic oligonucleotide
uuuucuaggcguugagcuu

SEQ ID NO: 2510307 - RNA, 19 nt, Artificial Sequence
  Description of Artificial Sequence: Synthetic oligonucleotide
uucggaacugaaacgcgua

SEQ ID NO: 2510308 - RNA, 19 nt, Artificial Sequence
  Description of Artificial Sequence: Synthetic oligonucleotide
auguuagugucaucuuagu

SEQ ID NO: 2510309 - RNA, 19 nt, Artificial Sequence
  Description of Artificial Sequence: Synthetic oligonucleotide
auaaucagugguguugaaa

SEQ ID NO: 2510310 - RNA, 19 nt, Artificial Sequence
  Description of Artificial Sequence: Synthetic oligonucleotide
gaaacgcguacugaacaac

SEQ ID NO: 2510311 - RNA, 19 nt, Artificial Sequence
  Description of Artificial Sequence: Synthetic oligonucleotide
cugccauaagugaaagguc

SEQ ID NO: 2510312 - RNA, 19 nt, Artificial Sequence
  Description of Artificial Sequence: Synthetic oligonucleotide
uugggaacaaaagcuuuuc

SEQ ID NO: 2510313 - RNA, 19 nt, Artificial Sequence
  Description of Artificial Sequence: Synthetic oligonucleotide
agacgacugcgcuguuugc

SEQ ID NO: 2510314 - RNA, 19 nt, Artificial Sequence
  Description of Artificial Sequence: Synthetic oligonucleotide
uugguggcaauacuuccuu

SEQ ID NO: 2510315 - RNA, 19 nt, Artificial Sequence
  Description of Artificial Sequence: Synthetic oligonucleotide
gaucgucuucccacugucg

SEQ ID NO: 2510316 - RNA, 19 nt, Artificial Sequence
  Description of Artificial Sequence: Synthetic oligonucleotide
acaugguuuggaaaagccu

SEQ ID NO: 2510317 - RNA, 19 nt, Artificial Sequence
  Description of Artificial Sequence: Synthetic oligonucleotide
cugaaguuguaaguaaaga

SEQ ID NO: 2510318 - RNA, 19 nt, Artificial Sequence
  Description of Artificial Sequence: Synthetic oligonucleotide
uguacauuuggaggaucgu

SEQ ID NO: 2510319 - RNA, 19 nt, Artificial Sequence
  Description of Artificial Sequence: Synthetic oligonucleotide
gugucaucuuaguucugcc

SEQ ID NO: 2510320 - RNA, 19 nt, Artificial Sequence
  Description of Artificial Sequence: Synthetic oligonucleotide
ugagcgagagguggauggg

SEQ ID NO: 2510321 - RNA, 19 nt, Artificial Sequence
  Description of Artificial Sequence: Synthetic oligonucleotide
uuggaggaucgucuuccca

SEQ ID NO: 2510322 - RNA, 19 nt, Artificial Sequence
  Description of Artificial Sequence: Synthetic oligonucleotide
ccauggacaauccucaguc

SEQ ID NO: 2510323 - RNA, 19 nt, Artificial Sequence
  Description of Artificial Sequence: Synthetic oligonucleotide
gccacuugauaaucagugg

SEQ ID NO: 2510324 - RNA, 19 nt, Artificial Sequence
  Description of Artificial Sequence: Synthetic oligonucleotide
gagagacauuuucaagcca

SEQ ID NO: 2510325 - RNA, 19 nt, Artificial Sequence
  Description of Artificial Sequence: Synthetic oligonucleotide
cagcuugaacggcugcucg

SEQ ID NO: 2510326 - RNA, 19 nt, Artificial Sequence
  Description of Artificial Sequence: Synthetic oligonucleotide
aagaguugugggucuucau

SEQ ID NO: 2510327 - RNA, 19 nt, Artificial Sequence
  Description of Artificial Sequence: Synthetic oligonucleotide
aucaaccucugguuuggga

SEQ ID NO: 2510328 - RNA, 19 nt, Artificial Sequence
  Description of Artificial Sequence: Synthetic oligonucleotide
ggccauaauggaaagacga

SEQ ID NO: 2510329 - RNA, 19 nt, Artificial Sequence
  Description of Artificial Sequence: Synthetic oligonucleotide
ugugggucuucaucacaca

SEQ ID NO: 2510330 - RNA, 19 nt, Artificial Sequence
  Description of Artificial Sequence: Synthetic oligonucleotide
guguuuucuaggcguugag

SEQ ID NO: 2510331 - RNA, 19 nt, Artificial Sequence
  Description of Artificial Sequence: Synthetic oligonucleotide
cccacugucgucuaacaug

SEQ ID NO: 2510332 - RNA, 19 nt, Artificial Sequence
  Description of Artificial Sequence: Synthetic oligonucleotide
ccaacuguaacagcuuucc

SEQ ID NO: 2510333 - RNA, 19 nt, Artificial Sequence
  Description of Artificial Sequence: Synthetic oligonucleotide
uugagcuuuggggaauaac

SEQ ID NO: 2510334 - RNA, 19 nt, Artificial Sequence
  Description of Artificial Sequence: Synthetic oligonucleotide
gacugcgcuguuugcuucc

SEQ ID NO: 2510335 - RNA, 19 nt, Artificial Sequence
  Description of Artificial Sequence: Synthetic oligonucleotide
ccuggaauuguaaagaggu

SEQ ID NO: 2510336 - RNA, 19 nt, Artificial Sequence
  Description of Artificial Sequence: Synthetic oligonucleotide
uggaugggccggagagucg

SEQ ID NO: 2510337 - RNA, 19 nt, Artificial Sequence
  Description of Artificial Sequence: Synthetic oligonucleotide
caugguuuggaaaagccuu

SEQ ID NO: 2510338 - RNA, 19 nt, Artificial Sequence
  Description of Artificial Sequence: Synthetic oligonucleotide
ggaaaagccuuuucuaucu

SEQ ID NO: 2510339 - RNA, 19 nt, Artificial Sequence
  Description of Artificial Sequence: Synthetic oligonucleotide
acauuuggaggaucgucuu

SEQ ID NO: 2510340 - RNA, 19 nt, Artificial Sequence
  Description of Artificial Sequence: Synthetic oligonucleotide
uauguacauuuggaggauc

SEQ ID NO: 2510341 - RNA, 19 nt, Artificial Sequence
  Description of Artificial Sequence: Synthetic oligonucleotide
ggcaauacuuccuucggaa

SEQ ID NO: 2510342 - RNA, 19 nt, Artificial Sequence
  Description of Artificial Sequence: Synthetic oligonucleotide
gaucuugggcuguaucaaa

SEQ ID NO: 2510343 - RNA, 19 nt, Artificial Sequence
  Description of Artificial Sequence: Synthetic oligonucleotide
aaccucugguuugggaaca

SEQ ID NO: 2510344 - RNA, 19 nt, Artificial Sequence
  Description of Artificial Sequence: Synthetic oligonucleotide
guaaagagguguucaacau

SEQ ID NO: 2510345 - RNA, 19 nt, Artificial Sequence
  Description of Artificial Sequence: Synthetic oligonucleotide
uucccacugucgucuaaca

SEQ ID NO: 2510346 - RNA, 19 nt, Artificial Sequence
  Description of Artificial Sequence: Synthetic oligonucleotide
acaucacauaggcucuuaa

SEQ ID NO: 2510347 - RNA, 19 nt, Artificial Sequence
  Description of Artificial Sequence: Synthetic oligonucleotide
aggaucgucuucccacugu

SEQ ID NO: 2510348 - RNA, 19 nt, Artificial Sequence
  Description of Artificial Sequence: Synthetic oligonucleotide
caauacuuccuucggaacu

SEQ ID NO: 2510349 - RNA, 19 nt, Artificial Sequence
  Description of Artificial Sequence: Synthetic oligonucleotide
cauuuggaggaucgucuuc

SEQ ID NO: 2510350 - RNA, 19 nt, Artificial Sequence
  Description of Artificial Sequence: Synthetic oligonucleotide
uuccugugguggcuacaag

SEQ ID NO: 2510351 - RNA, 19 nt, Artificial Sequence
  Description of Artificial Sequence: Synthetic oligonucleotide
agcuugaacggcugcucga

SEQ ID NO: 2510352 - RNA, 19 nt, Artificial Sequence
  Description of Artificial Sequence: Synthetic oligonucleotide
gaacugaaacgcguacuga

SEQ ID NO: 2510353 - RNA, 19 nt, Artificial Sequence
  Description of Artificial Sequence: Synthetic oligonucleotide
caucgccuuucucuuggcc

SEQ ID NO: 2510354 - RNA, 19 nt, Artificial Sequence
  Description of Artificial Sequence: Synthetic oligonucleotide
acaucccauggacaauccu

SEQ ID NO: 2510355 - RNA, 19 nt, Artificial Sequence
  Description of Artificial Sequence: Synthetic oligonucleotide
cuguuugcuuccuguggug

SEQ ID NO: 2510356 - RNA, 19 nt, Artificial Sequence
  Description of Artificial Sequence: Synthetic oligonucleotide
agauuuccaauaauaugua

SEQ ID NO: 2510357 - RNA, 19 nt, Artificial Sequence
  Description of Artificial Sequence: Synthetic oligonucleotide
uucuaccagcuugaacggc

SEQ ID NO: 2510358 - RNA, 19 nt, Artificial Sequence
  Description of Artificial Sequence: Synthetic oligonucleotide
cucagcuacuuccuuuuga

SEQ ID NO: 2510359 - RNA, 19 nt, Artificial Sequence
  Description of Artificial Sequence: Synthetic oligonucleotide
acgcguacugaacaacuuu

SEQ ID NO: 2510360 - RNA, 19 nt, Artificial Sequence
  Description of Artificial Sequence: Synthetic oligonucleotide
gucgaugucugccaacugu

SEQ ID NO: 2510361 - RNA, 19 nt, Artificial Sequence
  Description of Artificial Sequence: Synthetic oligonucleotide
cuucccacugucgucuaac

SEQ ID NO: 2510362 - RNA, 19 nt, Artificial Sequence
  Description of Artificial Sequence: Synthetic oligonucleotide
ccuugguggcaauacuucc

SEQ ID NO: 2510363 - RNA, 19 nt, Artificial Sequence
  Description of Artificial Sequence: Synthetic oligonucleotide
cucgaucuugggcuguauc

SEQ ID NO: 2510364 - RNA, 19 nt, Artificial Sequence
  Description of Artificial Sequence: Synthetic oligonucleotide
gauaaucagugguguugaa

SEQ ID NO: 2510365 - RNA, 19 nt, Artificial Sequence
  Description of Artificial Sequence: Synthetic oligonucleotide
auaggcucuuaaaaugcau

SEQ ID NO: 2510366 - RNA, 19 nt, Artificial Sequence
  Description of Artificial Sequence: Synthetic oligonucleotide
cagcacaucccauggacaa

SEQ ID NO: 2510367 - RNA, 19 nt, Artificial Sequence
  Description of Artificial Sequence: Synthetic oligonucleotide
ccuucggaacugaaacgcg

SEQ ID NO: 2510368 - RNA, 19 nt, Artificial Sequence
  Description of Artificial Sequence: Synthetic oligonucleotide
gucgucuaacaugguuugg

SEQ ID NO: 2510369 - RNA, 19 nt, Artificial Sequence
  Description of Artificial Sequence: Synthetic oligonucleotide
ugaacggcugcucgaucuu

SEQ ID NO: 2510370 - RNA, 19 nt, Artificial Sequence
  Description of Artificial Sequence: Synthetic oligonucleotide
cucucugaaguuguaagua

SEQ ID NO: 2510371 - RNA, 19 nt, Artificial Sequence
  Description of Artificial Sequence: Synthetic oligonucleotide
ggaugggccggagagucgg

SEQ ID NO: 2510372 - RNA, 19 nt, Artificial Sequence
  Description of Artificial Sequence: Synthetic oligonucleotide
uggcuacaagucucucagc

SEQ ID NO: 2510373 - RNA, 19 nt, Artificial Sequence
  Description of Artificial Sequence: Synthetic oligonucleotide
ucgucuucccacugucguc

SEQ ID NO: 2510374 - RNA, 19 nt, Artificial Sequence
  Description of Artificial Sequence: Synthetic oligonucleotide
guggaugggccggagaguc

SEQ ID NO: 2510375 - RNA, 19 nt, Artificial Sequence
  Description of Artificial Sequence: Synthetic oligonucleotide
gagcgagagguggaugggc

SEQ ID NO: 2510376 - RNA, 19 nt, Artificial Sequence
  Description of Artificial Sequence: Synthetic oligonucleotide
aacgcguacugaacaacuu

SEQ ID NO: 2510377 - RNA, 19 nt, Artificial Sequence
  Description of Artificial Sequence: Synthetic oligonucleotide
cuguaacagcuuuccugug

SEQ ID NO: 2510378 - RNA, 19 nt, Artificial Sequence
  Description of Artificial Sequence: Synthetic oligonucleotide
uacuuccuucggaacugaa

SEQ ID NO: 2510379 - RNA, 19 nt, Artificial Sequence
  Description of Artificial Sequence: Synthetic oligonucleotide
ggcuacaagucucucagcu

SEQ ID NO: 2510380 - RNA, 19 nt, Artificial Sequence
  Description of Artificial Sequence: Synthetic oligonucleotide
acuuccuucggaacugaaa

SEQ ID NO: 2510381 - RNA, 19 nt, Artificial Sequence
  Description of Artificial Sequence: Synthetic oligonucleotide
acgacugcgcuguuugcuu

SEQ ID NO: 2510382 - RNA, 19 nt, Artificial Sequence
  Description of Artificial Sequence: Synthetic oligonucleotide
gaacggcugcucgaucuug

SEQ ID NO: 2510383 - RNA, 19 nt, Artificial Sequence
  Description of Artificial Sequence: Synthetic oligonucleotide
gggccauaauggaaagacg

SEQ ID NO: 2510384 - RNA, 19 nt, Artificial Sequence
  Description of Artificial Sequence: Synthetic oligonucleotide
gggccggagagucgggucg

SEQ ID NO: 2510385 - RNA, 19 nt, Artificial Sequence
  Description of Artificial Sequence: Synthetic oligonucleotide
agagucgggucgaugucug

SEQ ID NO: 2510386 - RNA, 19 nt, Artificial Sequence
  Description of Artificial Sequence: Synthetic oligonucleotide
ucgggucgaugucugccaa

SEQ ID NO: 2510387 - RNA, 19 nt, Artificial Sequence
  Description of Artificial Sequence: Synthetic oligonucleotide
guaaaguguaccacuccua

SEQ ID NO: 2510388 - RNA, 19 nt, Artificial Sequence
  Description of Artificial Sequence: Synthetic oligonucleotide
cuucggaacugaaacgcgu

SEQ ID NO: 2510389 - RNA, 19 nt, Artificial Sequence
  Description of Artificial Sequence: Synthetic oligonucleotide
ucuucccacugucgucuaa

SEQ ID NO: 2510390 - RNA, 19 nt, Artificial Sequence
  Description of Artificial Sequence: Synthetic oligonucleotide
cuugaacggcugcucgauc

SEQ ID NO: 2510391 - RNA, 19 nt, Artificial Sequence
  Description of Artificial Sequence: Synthetic oligonucleotide
ucuaggcguugagcuuugg

SEQ ID NO: 2510392 - RNA, 19 nt, Artificial Sequence
  Description of Artificial Sequence: Synthetic oligonucleotide
ggaaagacgacugcgcugu

SEQ ID NO: 2510393 - RNA, 19 nt, Artificial Sequence
  Description of Artificial Sequence: Synthetic oligonucleotide
ggaucgucuucccacuguc

SEQ ID NO: 2510394 - RNA, 19 nt, Artificial Sequence
  Description of Artificial Sequence: Synthetic oligonucleotide
ccuuuugaaauguuagugu

SEQ ID NO: 2510395 - RNA, 19 nt, Artificial Sequence
  Description of Artificial Sequence: Synthetic oligonucleotide
gucgggucgaugucugcca

SEQ ID NO: 2510396 - RNA, 19 nt, Artificial Sequence
  Description of Artificial Sequence: Synthetic oligonucleotide
uaacagcuuuccuguguuu

SEQ ID NO: 2510397 - RNA, 19 nt, Artificial Sequence
  Description of Artificial Sequence: Synthetic oligonucleotide
cuguguuuucuaggcguug

SEQ ID NO: 2510398 - RNA, 19 nt, Artificial Sequence
  Description of Artificial Sequence: Synthetic oligonucleotide
gccauaauggaaagacgac

SEQ ID NO: 2510399 - RNA, 19 nt, Artificial Sequence
  Description of Artificial Sequence: Synthetic oligonucleotide
gcuguaucaaagguguaaa

SEQ ID NO: 2510400 - RNA, 19 nt, Artificial Sequence
  Description of Artificial Sequence: Synthetic oligonucleotide
gagucgggucgaugucugc

SEQ ID NO: 2510401 - RNA, 19 nt, Artificial Sequence
  Description of Artificial Sequence: Synthetic oligonucleotide
augguuuggaaaagccuuu

SEQ ID NO: 2510402 - RNA, 19 nt, Artificial Sequence
  Description of Artificial Sequence: Synthetic oligonucleotide
auacuuccuucggaacuga

SEQ ID NO: 2510403 - RNA, 19 nt, Artificial Sequence
  Description of Artificial Sequence: Synthetic oligonucleotide
ggcuguaucaaagguguaa

SEQ ID NO: 2510404 - RNA, 19 nt, Artificial Sequence
  Description of Artificial Sequence: Synthetic oligonucleotide
gaugggccggagagucggg

SEQ ID NO: 2510405 - RNA, 19 nt, Artificial Sequence
  Description of Artificial Sequence: Synthetic oligonucleotide
ugggccggagagucggguc

SEQ ID NO: 2510406 - RNA, 19 nt, Artificial Sequence
  Description of Artificial Sequence: Synthetic oligonucleotide
gagguggaugggccggaga

SEQ ID NO: 2510407 - RNA, 19 nt, Artificial Sequence
  Description of Artificial Sequence: Synthetic oligonucleotide
cagugguguugaaacacua

SEQ ID NO: 2510408 - RNA, 19 nt, Artificial Sequence
  Description of Artificial Sequence: Synthetic oligonucleotide
cuugauaaucagugguguu

SEQ ID NO: 2510409 - RNA, 19 nt, Artificial Sequence
  Description of Artificial Sequence: Synthetic oligonucleotide
gacgacugcgcuguuugcu

SEQ ID NO: 2510410 - RNA, 19 nt, Artificial Sequence
  Description of Artificial Sequence: Synthetic oligonucleotide
gagagucgggucgaugucu

SEQ ID NO: 2510411 - RNA, 19 nt, Artificial Sequence
  Description of Artificial Sequence: Synthetic oligonucleotide
gcuguuugcuuccuguggu

SEQ ID NO: 2510412 - RNA, 19 nt, Artificial Sequence
  Description of Artificial Sequence: Synthetic oligonucleotide
cuacaucaaccucugguuu

SEQ ID NO: 2510413 - RNA, 19 nt, Artificial Sequence
  Description of Artificial Sequence: Synthetic oligonucleotide
cagcuacuuccuuuugaaa

SEQ ID NO: 2510414 - RNA, 19 nt, Artificial Sequence
  Description of Artificial Sequence: Synthetic oligonucleotide
cauggacaauccucagucu

SEQ ID NO: 2510415 - RNA, 19 nt, Artificial Sequence
  Description of Artificial Sequence: Synthetic oligonucleotide
ggucgaugucugccaacug

SEQ ID NO: 2510416 - RNA, 19 nt, Artificial Sequence
  Description of Artificial Sequence: Synthetic oligonucleotide
gcuacaagucucucagcua

SEQ ID NO: 2510417 - RNA, 19 nt, Artificial Sequence
  Description of Artificial Sequence: Synthetic oligonucleotide
agcacaucccauggacaau

SEQ ID NO: 2510418 - RNA, 19 nt, Artificial Sequence
  Description of Artificial Sequence: Synthetic oligonucleotide
ggaauuguaaagagguguu

SEQ ID NO: 2510419 - RNA, 19 nt, Artificial Sequence
  Description of Artificial Sequence: Synthetic oligonucleotide
ggcguugagcuuuggggaa

SEQ ID NO: 2510420 - RNA, 19 nt, Artificial Sequence
  Description of Artificial Sequence: Synthetic oligonucleotide
gugucaucgccuuucucuu

SEQ ID NO: 2510421 - RNA, 19 nt, Artificial Sequence
  Description of Artificial Sequence: Synthetic oligonucleotide
gcgcuguuugcuuccugug

SEQ ID NO: 2510422 - RNA, 19 nt, Artificial Sequence
  Description of Artificial Sequence: Synthetic oligonucleotide
gccauaagugaaaggucca

SEQ ID NO: 2510423 - RNA, 19 nt, Artificial Sequence
  Description of Artificial Sequence: Synthetic oligonucleotide
cauaagugaaagguccauu

SEQ ID NO: 2510424 - RNA, 19 nt, Artificial Sequence
  Description of Artificial Sequence: Synthetic oligonucleotide
acugcgcuguuugcuuccu

SEQ ID NO: 2510425 - RNA, 19 nt, Artificial Sequence
  Description of Artificial Sequence: Synthetic oligonucleotide
ccauaauggaaagacgacu

SEQ ID NO: 2510426 - RNA, 19 nt, Artificial Sequence
  Description of Artificial Sequence: Synthetic oligonucleotide
ccuacaucaaccucugguu

SEQ ID NO: 2510427 - RNA, 19 nt, Artificial Sequence
  Description of Artificial Sequence: Synthetic oligonucleotide
ggaggaucgucuucccacu

SEQ ID NO: 2510428 - RNA, 19 nt, Artificial Sequence
  Description of Artificial Sequence: Synthetic oligonucleotide
gccaacuguaacagcuuuc

SEQ ID NO: 2510429 - RNA, 19 nt, Artificial Sequence
  Description of Artificial Sequence: Synthetic oligonucleotide
ccuuuucuaucuuguaggu

SEQ ID NO: 2510430 - RNA, 19 nt, Artificial Sequence
  Description of Artificial Sequence: Synthetic oligonucleotide
caacuguaacagcuuuccu

SEQ ID NO: 2510431 - RNA, 19 nt, Artificial Sequence
  Description of Artificial Sequence: Synthetic oligonucleotide
cugcgcuguuugcuuccug

SEQ ID NO: 2510432 - RNA, 19 nt, Artificial Sequence
  Description of Artificial Sequence: Synthetic oligonucleotide
cagagguacugggccauaa

SEQ ID NO: 2510433 - RNA, 19 nt, Artificial Sequence
  Description of Artificial Sequence: Synthetic oligonucleotide
gggucgaugucugccaacu

SEQ ID NO: 2510434 - RNA, 19 nt, Artificial Sequence
  Description of Artificial Sequence: Synthetic oligonucleotide
accucugguuugggaacaa

SEQ ID NO: 2510435 - RNA, 19 nt, Artificial Sequence
  Description of Artificial Sequence: Synthetic oligonucleotide
caaguccuugguggcaaua

SEQ ID NO: 2510436 - RNA, 19 nt, Artificial Sequence
  Description of Artificial Sequence: Synthetic oligonucleotide
guaggucagcacaucccau

SEQ ID NO: 2510437 - RNA, 19 nt, Artificial Sequence
  Description of Artificial Sequence: Synthetic oligonucleotide
guucaacauugcagaggua

SEQ ID NO: 2510438 - RNA, 19 nt, Artificial Sequence
  Description of Artificial Sequence: Synthetic oligonucleotide
cggcugcucgaucuugggc

SEQ ID NO: 2510439 - RNA, 19 nt, Artificial Sequence
  Description of Artificial Sequence: Synthetic oligonucleotide
gucuucccacugucgucua

SEQ ID NO: 2510440 - RNA, 19 nt, Artificial Sequence
  Description of Artificial Sequence: Synthetic oligonucleotide
cggagagucgggucgaugu

SEQ ID NO: 2510441 - RNA, 19 nt, Artificial Sequence
  Description of Artificial Sequence: Synthetic oligonucleotide
cgacugcgcuguuugcuuc

SEQ ID NO: 2510442 - RNA, 19 nt, Artificial Sequence
  Description of Artificial Sequence: Synthetic oligonucleotide
gaaagacgacugcgcuguu

SEQ ID NO: 2510443 - RNA, 19 nt, Artificial Sequence
  Description of Artificial Sequence: Synthetic oligonucleotide
gcuugaacggcugcucgau

SEQ ID NO: 2510444 - RNA, 19 nt, Artificial Sequence
  Description of Artificial Sequence: Synthetic oligonucleotide
gguggaugggccggagagu

SEQ ID NO: 2510445 - RNA, 19 nt, Artificial Sequence
  Description of Artificial Sequence: Synthetic oligonucleotide
cgcguacugaacaacuuuu

SEQ ID NO: 2510446 - RNA, 19 nt, Artificial Sequence
  Description of Artificial Sequence: Synthetic oligonucleotide
ccuguguuuucuaggcguu

SEQ ID NO: 2510447 - RNA, 19 nt, Artificial Sequence
  Description of Artificial Sequence: Synthetic oligonucleotide
cacugucgucuaacauggu

SEQ ID NO: 2510448 - RNA, 19 nt, Artificial Sequence
  Description of Artificial Sequence: Synthetic oligonucleotide
ccauaagugaaagguccau

SEQ ID NO: 2510449 - RNA, 19 nt, Artificial Sequence
  Description of Artificial Sequence: Synthetic oligonucleotide
ccggagagucgggucgaug

SEQ ID NO: 2510450 - RNA, 19 nt, Artificial Sequence
  Description of Artificial Sequence: Synthetic oligonucleotide
ggccggagagucgggucga

SEQ ID NO: 2510451 - RNA, 19 nt, Artificial Sequence
  Description of Artificial Sequence: Synthetic oligonucleotide
gcaugagcgagagguggau

SEQ ID NO: 2510452 - RNA, 19 nt, Artificial Sequence
  Description of Artificial Sequence: Synthetic oligonucleotide
gggcuguaucaaaggugua

SEQ ID NO: 2510453 - RNA, 19 nt, Artificial Sequence
  Description of Artificial Sequence: Synthetic oligonucleotide
cggaacugaaacgcguacu

SEQ ID NO: 2510454 - RNA, 19 nt, Artificial Sequence
  Description of Artificial Sequence: Synthetic oligonucleotide
gcagagguacugggccaua

SEQ ID NO: 2510455 - RNA, 19 nt, Artificial Sequence
  Description of Artificial Sequence: Synthetic oligonucleotide
gcucgaucuugggcuguau

SEQ ID NO: 2510456 - RNA, 19 nt, Artificial Sequence
  Description of Artificial Sequence: Synthetic oligonucleotide
gccggagagucgggucgau

SEQ ID NO: 2510457 - RNA, 19 nt, Artificial Sequence
  Description of Artificial Sequence: Synthetic oligonucleotide
aaugaguucaaauugccac

SEQ ID NO: 2510458 - RNA, 19 nt, Artificial Sequence
  Description of Artificial Sequence: Synthetic oligonucleotide
uuucauacgaccaagacca

SEQ ID NO: 2510459 - RNA, 19 nt, Artificial Sequence
  Description of Artificial Sequence: Synthetic oligonucleotide
accaauauucucuugaacc

SEQ ID NO: 2510460 - RNA, 19 nt, Artificial Sequence
  Description of Artificial Sequence: Synthetic oligonucleotide
auaauaauucuucuugucc

SEQ ID NO: 2510461 - RNA, 19 nt, Artificial Sequence
  Description of Artificial Sequence: Synthetic oligonucleotide
uauaucaaaagcaucauga

SEQ ID NO: 2510462 - RNA, 19 nt, Artificial Sequence
  Description of Artificial Sequence: Synthetic oligonucleotide
uaaaggaaaaccuaaagca

SEQ ID NO: 2510463 - RNA, 19 nt, Artificial Sequence
  Description of Artificial Sequence: Synthetic oligonucleotide
aaaguaaucagaauucagc

SEQ ID NO: 2510464 - RNA, 19 nt, Artificial Sequence
  Description of Artificial Sequence: Synthetic oligonucleotide
acuguuaauaaccaacacc

SEQ ID NO: 2510465 - RNA, 19 nt, Artificial Sequence
  Description of Artificial Sequence: Synthetic oligonucleotide
guuauuaucaaugauuagg

SEQ ID NO: 2510466 - RNA, 19 nt, Artificial Sequence
  Description of Artificial Sequence: Synthetic oligonucleotide
auaaccaacaccaauauuc

SEQ ID NO: 2510467 - RNA, 19 nt, Artificial Sequence
  Description of Artificial Sequence: Synthetic oligonucleotide
uuuaacacuagcuagcaug

SEQ ID NO: 2510468 - RNA, 19 nt, Artificial Sequence
  Description of Artificial Sequence: Synthetic oligonucleotide
aaauuuucauuuuagagua

SEQ ID NO: 2510469 - RNA, 19 nt, Artificial Sequence
  Description of Artificial Sequence: Synthetic oligonucleotide
ucuuucuuaaaauccaagg

SEQ ID NO: 2510470 - RNA, 19 nt, Artificial Sequence
  Description of Artificial Sequence: Synthetic oligonucleotide
aguuuauauacauauccac

SEQ ID NO: 2510471 - RNA, 19 nt, Artificial Sequence
  Description of Artificial Sequence: Synthetic oligonucleotide
ugcauaauuauuuucaagu

SEQ ID NO: 2510472 - RNA, 19 nt, Artificial Sequence
  Description of Artificial Sequence: Synthetic oligonucleotide
aaggguguaaaggaaaacc

SEQ ID NO: 2510473 - RNA, 19 nt, Artificial Sequence
  Description of Artificial Sequence: Synthetic oligonucleotide
uuaccuaucauaacaauga

SEQ ID NO: 2510474 - RNA, 19 nt, Artificial Sequence
  Description of Artificial Sequence: Synthetic oligonucleotide
ucuagcuacauuuaaaggu

SEQ ID NO: 2510475 - RNA, 19 nt, Artificial Sequence
  Description of Artificial Sequence: Synthetic oligonucleotide
acaaaggaaacauugcaac

SEQ ID NO: 2510476 - RNA, 19 nt, Artificial Sequence
  Description of Artificial Sequence: Synthetic oligonucleotide
uuauuaucaaugauuagga

SEQ ID NO: 2510477 - RNA, 19 nt, Artificial Sequence
  Description of Artificial Sequence: Synthetic oligonucleotide
uaugaaaaggguguaaagg

SEQ ID NO: 2510478 - RNA, 19 nt, Artificial Sequence
  Description of Artificial Sequence: Synthetic oligonucleotide
auuaucaaugauuaggacu

SEQ ID NO: 2510479 - RNA, 19 nt, Artificial Sequence
  Description of Artificial Sequence: Synthetic oligonucleotide
uuuacuguaguccacauuu

SEQ ID NO: 2510480 - RNA, 19 nt, Artificial Sequence
  Description of Artificial Sequence: Synthetic oligonucleotide
cauacuguauaucaaaagc

SEQ ID NO: 2510481 - RNA, 19 nt, Artificial Sequence
  Description of Artificial Sequence: Synthetic oligonucleotide
uaaaggugcaacuaggccc

SEQ ID NO: 2510482 - RNA, 19 nt, Artificial Sequence
  Description of Artificial Sequence: Synthetic oligonucleotide
uguaaaggaaaaccuaaag

SEQ ID NO: 2510483 - RNA, 19 nt, Artificial Sequence
  Description of Artificial Sequence: Synthetic oligonucleotide
uaucauaacaaugaguuca

SEQ ID NO: 2510484 - RNA, 19 nt, Artificial Sequence
  Description of Artificial Sequence: Synthetic oligonucleotide
aacaaugaguucaaauugc

SEQ ID NO: 2510485 - RNA, 19 nt, Artificial Sequence
  Description of Artificial Sequence: Synthetic oligonucleotide
uuuaccuaucauaacaaug

SEQ ID NO: 2510486 - RNA, 19 nt, Artificial Sequence
  Description of Artificial Sequence: Synthetic oligonucleotide
uuaucaaugauuaggacua

SEQ ID NO: 2510487 - RNA, 19 nt, Artificial Sequence
  Description of Artificial Sequence: Synthetic oligonucleotide
uaauuguugaaaauuuuca

SEQ ID NO: 2510488 - RNA, 19 nt, Artificial Sequence
  Description of Artificial Sequence: Synthetic oligonucleotide
uaaaauccaaggacaagcg

SEQ ID NO: 2510489 - RNA, 19 nt, Artificial Sequence
  Description of Artificial Sequence: Synthetic oligonucleotide
uuaauaaccaacaccaaua

SEQ ID NO: 2510490 - RNA, 19 nt, Artificial Sequence
  Description of Artificial Sequence: Synthetic oligonucleotide
uuuaguaacuguuaauaac

SEQ ID NO: 2510491 - RNA, 19 nt, Artificial Sequence
  Description of Artificial Sequence: Synthetic oligonucleotide
aacuccauacuguauauca

SEQ ID NO: 2510492 - RNA, 19 nt, Artificial Sequence
  Description of Artificial Sequence: Synthetic oligonucleotide
guaaaggaaaaccuaaagc

SEQ ID NO: 2510493 - RNA, 19 nt, Artificial Sequence
  Description of Artificial Sequence: Synthetic oligonucleotide
uuaauuguugaaaauuuuc

SEQ ID NO: 2510494 - RNA, 19 nt, Artificial Sequence
  Description of Artificial Sequence: Synthetic oligonucleotide
uuucuugugaagauaauaa

SEQ ID NO: 2510495 - RNA, 19 nt, Artificial Sequence
  Description of Artificial Sequence: Synthetic oligonucleotide
augucuaagaauuaauugu

SEQ ID NO: 2510496 - RNA, 19 nt, Artificial Sequence
  Description of Artificial Sequence: Synthetic oligonucleotide
cuguuaauaaccaacacca

SEQ ID NO: 2510497 - RNA, 19 nt, Artificial Sequence
  Description of Artificial Sequence: Synthetic oligonucleotide
ucuaagaauuaauuguuga

SEQ ID NO: 2510498 - RNA, 19 nt, Artificial Sequence
  Description of Artificial Sequence: Synthetic oligonucleotide
uuuaaaggugcaacuaggc

SEQ ID NO: 2510499 - RNA, 19 nt, Artificial Sequence
  Description of Artificial Sequence: Synthetic oligonucleotide
ugauuugcaaguaucuuga

SEQ ID NO: 2510500 - RNA, 19 nt, Artificial Sequence
  Description of Artificial Sequence: Synthetic oligonucleotide
agcguguuugguuucauac

SEQ ID NO: 2510501 - RNA, 19 nt, Artificial Sequence
  Description of Artificial Sequence: Synthetic oligonucleotide
ucaugaaauaaguuuauau

SEQ ID NO: 2510502 - RNA, 19 nt, Artificial Sequence
  Description of Artificial Sequence: Synthetic oligonucleotide
uuaaaggugcaacuaggcc

SEQ ID NO: 2510503 - RNA, 19 nt, Artificial Sequence
  Description of Artificial Sequence: Synthetic oligonucleotide
caugucuaagaauuaauug

SEQ ID NO: 2510504 - RNA, 19 nt, Artificial Sequence
  Description of Artificial Sequence: Synthetic oligonucleotide
ugaaaauuuucauuuuaga

SEQ ID NO: 2510505 - RNA, 19 nt, Artificial Sequence
  Description of Artificial Sequence: Synthetic oligonucleotide
uaacuguuaauaaccaaca

SEQ ID NO: 2510506 - RNA, 19 nt, Artificial Sequence
  Description of Artificial Sequence: Synthetic oligonucleotide
aauagcuuuaacacuagcu

SEQ ID NO: 2510507 - RNA, 19 nt, Artificial Sequence
  Description of Artificial Sequence: Synthetic oligonucleotide
aacacuagcuagcaugucu

SEQ ID NO: 2510508 - RNA, 19 nt, Artificial Sequence
  Description of Artificial Sequence: Synthetic oligonucleotide
augaaaaggguguaaagga

SEQ ID NO: 2510509 - RNA, 19 nt, Artificial Sequence
  Description of Artificial Sequence: Synthetic oligonucleotide
augauuugcaaguaucuug

SEQ ID NO: 2510510 - RNA, 19 nt, Artificial Sequence
  Description of Artificial Sequence: Synthetic oligonucleotide
cuagcuacauuuaaaggug

SEQ ID NO: 2510511 - RNA, 19 nt, Artificial Sequence
  Description of Artificial Sequence: Synthetic oligonucleotide
ugaguuuggagucuugcca

SEQ ID NO: 2510512 - RNA, 19 nt, Artificial Sequence
  Description of Artificial Sequence: Synthetic oligonucleotide
aaagcaauaugaaaagggu

SEQ ID NO: 2510513 - RNA, 19 nt, Artificial Sequence
  Description of Artificial Sequence: Synthetic oligonucleotide
guuucauacgaccaagacc

SEQ ID NO: 2510514 - RNA, 19 nt, Artificial Sequence
  Description of Artificial Sequence: Synthetic oligonucleotide
uucaaguuauuaucaauga

SEQ ID NO: 2510515 - RNA, 19 nt, Artificial Sequence
  Description of Artificial Sequence: Synthetic oligonucleotide
aauuaauuguugaaaauuu

SEQ ID NO: 2510516 - RNA, 19 nt, Artificial Sequence
  Description of Artificial Sequence: Synthetic oligonucleotide
ugcaacuaggcccuuuggg

SEQ ID NO: 2510517 - RNA, 19 nt, Artificial Sequence
  Description of Artificial Sequence: Synthetic oligonucleotide
uaagaauuaauuguugaaa

SEQ ID NO: 2510518 - RNA, 19 nt, Artificial Sequence
  Description of Artificial Sequence: Synthetic oligonucleotide
agcaucaugaaauaaguuu

SEQ ID NO: 2510519 - RNA, 19 nt, Artificial Sequence
  Description of Artificial Sequence: Synthetic oligonucleotide
uagcuuuaacacuagcuag

SEQ ID NO: 2510520 - RNA, 19 nt, Artificial Sequence
  Description of Artificial Sequence: Synthetic oligonucleotide
uuaacacuagcuagcaugu

SEQ ID NO: 2510521 - RNA, 19 nt, Artificial Sequence
  Description of Artificial Sequence: Synthetic oligonucleotide
ucaaugauuaggacuaaaa

SEQ ID NO: 2510522 - RNA, 19 nt, Artificial Sequence
  Description of Artificial Sequence: Synthetic oligonucleotide
uuugauuuaguaacuguua

SEQ ID NO: 2510523 - RNA, 19 nt, Artificial Sequence
  Description of Artificial Sequence: Synthetic oligonucleotide
uuucauuuuagaguacugc

SEQ ID NO: 2510524 - RNA, 19 nt, Artificial Sequence
  Description of Artificial Sequence: Synthetic oligonucleotide
uguaaccuugaaaaugucu

SEQ ID NO: 2510525 - RNA, 19 nt, Artificial Sequence
  Description of Artificial Sequence: Synthetic oligonucleotide
uauacauauccacaucccu

SEQ ID NO: 2510526 - RNA, 19 nt, Artificial Sequence
  Description of Artificial Sequence: Synthetic oligonucleotide
auaugaaaaggguguaaag

SEQ ID NO: 2510527 - RNA, 19 nt, Artificial Sequence
  Description of Artificial Sequence: Synthetic oligonucleotide
cauuuaaaggugcaacuag

SEQ ID NO: 2510528 - RNA, 19 nt, Artificial Sequence
  Description of Artificial Sequence: Synthetic oligonucleotide
cuguauaucaaaagcauca

SEQ ID NO: 2510529 - RNA, 19 nt, Artificial Sequence
  Description of Artificial Sequence: Synthetic oligonucleotide
uguuugguuucauacgacc

SEQ ID NO: 2510530 - RNA, 19 nt, Artificial Sequence
  Description of Artificial Sequence: Synthetic oligonucleotide
auaauuuggcaucaaagua

SEQ ID NO: 2510531 - RNA, 19 nt, Artificial Sequence
  Description of Artificial Sequence: Synthetic oligonucleotide
uacauuuaaaggugcaacu

SEQ ID NO: 2510532 - RNA, 19 nt, Artificial Sequence
  Description of Artificial Sequence: Synthetic oligonucleotide
aauauuugauuuaguaacu

SEQ ID NO: 2510533 - RNA, 19 nt, Artificial Sequence
  Description of Artificial Sequence: Synthetic oligonucleotide
auccacaucccucauaucu

SEQ ID NO: 2510534 - RNA, 19 nt, Artificial Sequence
  Description of Artificial Sequence: Synthetic oligonucleotide
uuuagaguacugcuguaac

SEQ ID NO: 2510535 - RNA, 19 nt, Artificial Sequence
  Description of Artificial Sequence: Synthetic oligonucleotide
guaaccuugaaaaugucug

SEQ ID NO: 2510536 - RNA, 19 nt, Artificial Sequence
  Description of Artificial Sequence: Synthetic oligonucleotide
auagcuuuaacacuagcua

SEQ ID NO: 2510537 - RNA, 19 nt, Artificial Sequence
  Description of Artificial Sequence: Synthetic oligonucleotide
uacauauccacaucccuca

SEQ ID NO: 2510538 - RNA, 19 nt, Artificial Sequence
  Description of Artificial Sequence: Synthetic oligonucleotide
cagaaagcaauaugaaaag

SEQ ID NO: 2510539 - RNA, 19 nt, Artificial Sequence
  Description of Artificial Sequence: Synthetic oligonucleotide
uacuguauaucaaaagcau

SEQ ID NO: 2510540 - RNA, 19 nt, Artificial Sequence
  Description of Artificial Sequence: Synthetic oligonucleotide
guaacuguuaauaaccaac

SEQ ID NO: 2510541 - RNA, 19 nt, Artificial Sequence
  Description of Artificial Sequence: Synthetic oligonucleotide
aaguuauuaucaaugauua

SEQ ID NO: 2510542 - RNA, 19 nt, Artificial Sequence
  Description of Artificial Sequence: Synthetic oligonucleotide
ugucuaagaauuaauuguu

SEQ ID NO: 2510543 - RNA, 19 nt, Artificial Sequence
  Description of Artificial Sequence: Synthetic oligonucleotide
ugugaagauaauaauucuu

SEQ ID NO: 2510544 - RNA, 19 nt, Artificial Sequence
  Description of Artificial Sequence: Synthetic oligonucleotide
uuuucauuuuagaguacug

SEQ ID NO: 2510545 - RNA, 19 nt, Artificial Sequence
  Description of Artificial Sequence: Synthetic oligonucleotide
cuaacaguggcugaguuug

SEQ ID NO: 2510546 - RNA, 19 nt, Artificial Sequence
  Description of Artificial Sequence: Synthetic oligonucleotide
cucauaucugcuuguaacc

SEQ ID NO: 2510547 - RNA, 19 nt, Artificial Sequence
  Description of Artificial Sequence: Synthetic oligonucleotide
uuagaguacugcuguaacc

SEQ ID NO: 2510548 - RNA, 19 nt, Artificial Sequence
  Description of Artificial Sequence: Synthetic oligonucleotide
auuuaaaggugcaacuagg

SEQ ID NO: 2510549 - RNA, 19 nt, Artificial Sequence
  Description of Artificial Sequence: Synthetic oligonucleotide
cuugaaaaugucugaccgg

SEQ ID NO: 2510550 - RNA, 19 nt, Artificial Sequence
  Description of Artificial Sequence: Synthetic oligonucleotide
uaaccagucuuucuuaaaa

SEQ ID NO: 2510551 - RNA, 19 nt, Artificial Sequence
  Description of Artificial Sequence: Synthetic oligonucleotide
uccacauuuaccaccacau

SEQ ID NO: 2510552 - RNA, 19 nt, Artificial Sequence
  Description of Artificial Sequence: Synthetic oligonucleotide
agcagccugcaucaaauac

SEQ ID NO: 2510553 - RNA, 19 nt, Artificial Sequence
  Description of Artificial Sequence: Synthetic oligonucleotide
aaauacugugcaccuucuc

SEQ ID NO: 2510554 - RNA, 19 nt, Artificial Sequence
  Description of Artificial Sequence: Synthetic oligonucleotide
aaaggguguaaaggaaaac

SEQ ID NO: 2510555 - RNA, 19 nt, Artificial Sequence
  Description of Artificial Sequence: Synthetic oligonucleotide
aguggcugaguuuggaguc

SEQ ID NO: 2510556 - RNA, 19 nt, Artificial Sequence
  Description of Artificial Sequence: Synthetic oligonucleotide
uaauaaccaacaccaauau

SEQ ID NO: 2510557 - RNA, 19 nt, Artificial Sequence
  Description of Artificial Sequence: Synthetic oligonucleotide
cuuucuuaaaauccaagga

SEQ ID NO: 2510558 - RNA, 19 nt, Artificial Sequence
  Description of Artificial Sequence: Synthetic oligonucleotide
ucaccagaugauuugcaag

SEQ ID NO: 2510559 - RNA, 19 nt, Artificial Sequence
  Description of Artificial Sequence: Synthetic oligonucleotide
agcuuuaacacuagcuagc

SEQ ID NO: 2510560 - RNA, 19 nt, Artificial Sequence
  Description of Artificial Sequence: Synthetic oligonucleotide
auauccacaucccucauau

SEQ ID NO: 2510561 - RNA, 19 nt, Artificial Sequence
  Description of Artificial Sequence: Synthetic oligonucleotide
uucaaauugccacugcaua

SEQ ID NO: 2510562 - RNA, 19 nt, Artificial Sequence
  Description of Artificial Sequence: Synthetic oligonucleotide
ucaaguuauuaucaaugau

SEQ ID NO: 2510563 - RNA, 19 nt, Artificial Sequence
  Description of Artificial Sequence: Synthetic oligonucleotide
caugaaauaaguuuauaua

SEQ ID NO: 2510564 - RNA, 19 nt, Artificial Sequence
  Description of Artificial Sequence: Synthetic oligonucleotide
agcaauaugaaaagggugu

SEQ ID NO: 2510565 - RNA, 19 nt, Artificial Sequence
  Description of Artificial Sequence: Synthetic oligonucleotide
ucugcuuguaaccagucuu

SEQ ID NO: 2510566 - RNA, 19 nt, Artificial Sequence
  Description of Artificial Sequence: Synthetic oligonucleotide
acgaccaagaccagcagcc

SEQ ID NO: 2510567 - RNA, 19 nt, Artificial Sequence
  Description of Artificial Sequence: Synthetic oligonucleotide
uccuuuaggcggaugacca

SEQ ID NO: 2510568 - RNA, 19 nt, Artificial Sequence
  Description of Artificial Sequence: Synthetic oligonucleotide
uugugaagauaauaauucu

SEQ ID NO: 2510569 - RNA, 19 nt, Artificial Sequence
  Description of Artificial Sequence: Synthetic oligonucleotide
ugcuguaaccuugaaaaug

SEQ ID NO: 2510570 - RNA, 19 nt, Artificial Sequence
  Description of Artificial Sequence: Synthetic oligonucleotide
uauucucuugaacccacug

SEQ ID NO: 2510571 - RNA, 19 nt, Artificial Sequence
  Description of Artificial Sequence: Synthetic oligonucleotide
uuugguuucauacgaccaa

SEQ ID NO: 2510572 - RNA, 19 nt, Artificial Sequence
  Description of Artificial Sequence: Synthetic oligonucleotide
gucuagcuacauuuaaagg

SEQ ID NO: 2510573 - RNA, 19 nt, Artificial Sequence
  Description of Artificial Sequence: Synthetic oligonucleotide
uagaguacugcuguaaccu

SEQ ID NO: 2510574 - RNA, 19 nt, Artificial Sequence
  Description of Artificial Sequence: Synthetic oligonucleotide
ucaaaguaaucagaauuca

SEQ ID NO: 2510575 - RNA, 19 nt, Artificial Sequence
  Description of Artificial Sequence: Synthetic oligonucleotide
guaaucagaauucagcaua

SEQ ID NO: 2510576 - RNA, 19 nt, Artificial Sequence
  Description of Artificial Sequence: Synthetic oligonucleotide
aguuauuaucaaugauuag

SEQ ID NO: 2510577 - RNA, 19 nt, Artificial Sequence
  Description of Artificial Sequence: Synthetic oligonucleotide
uaccuaucauaacaaugag

SEQ ID NO: 2510578 - RNA, 19 nt, Artificial Sequence
  Description of Artificial Sequence: Synthetic oligonucleotide
ggucuagcuacauuuaaag

SEQ ID NO: 2510579 - RNA, 19 nt, Artificial Sequence
  Description of Artificial Sequence: Synthetic oligonucleotide
aucagaauucagcauaaaa

SEQ ID NO: 2510580 - RNA, 19 nt, Artificial Sequence
  Description of Artificial Sequence: Synthetic oligonucleotide
auacuguauaucaaaagca

SEQ ID NO: 2510581 - RNA, 19 nt, Artificial Sequence
  Description of Artificial Sequence: Synthetic oligonucleotide
ccuugaaaaugucugaccg

SEQ ID NO: 2510582 - RNA, 19 nt, Artificial Sequence
  Description of Artificial Sequence: Synthetic oligonucleotide
aguucaaauugccacugca

SEQ ID NO: 2510583 - RNA, 19 nt, Artificial Sequence
  Description of Artificial Sequence: Synthetic oligonucleotide
auacauauccacaucccuc

SEQ ID NO: 2510584 - RNA, 19 nt, Artificial Sequence
  Description of Artificial Sequence: Synthetic oligonucleotide
aucuuuauguguaauagau

SEQ ID NO: 2510585 - RNA, 19 nt, Artificial Sequence
  Description of Artificial Sequence: Synthetic oligonucleotide
ugugauauguccaguccuc

SEQ ID NO: 2510586 - RNA, 19 nt, Artificial Sequence
  Description of Artificial Sequence: Synthetic oligonucleotide
uaaccuugaaaaugucuga

SEQ ID NO: 2510587 - RNA, 19 nt, Artificial Sequence
  Description of Artificial Sequence: Synthetic oligonucleotide
uacuguaguccacauuuac

SEQ ID NO: 2510588 - RNA, 19 nt, Artificial Sequence
  Description of Artificial Sequence: Synthetic oligonucleotide
aguaaucagaauucagcau

SEQ ID NO: 2510589 - RNA, 19 nt, Artificial Sequence
  Description of Artificial Sequence: Synthetic oligonucleotide
cugcauaauuauuuucaag

SEQ ID NO: 2510590 - RNA, 19 nt, Artificial Sequence
  Description of Artificial Sequence: Synthetic oligonucleotide
cagaugauuugcaaguauc

SEQ ID NO: 2510591 - RNA, 19 nt, Artificial Sequence
  Description of Artificial Sequence: Synthetic oligonucleotide
aggugugauauguccaguc

SEQ ID NO: 2510592 - RNA, 19 nt, Artificial Sequence
  Description of Artificial Sequence: Synthetic oligonucleotide
aaaggugcaacuaggcccu

SEQ ID NO: 2510593 - RNA, 19 nt, Artificial Sequence
  Description of Artificial Sequence: Synthetic oligonucleotide
cauacgaccaagaccagca

SEQ ID NO: 2510594 - RNA, 19 nt, Artificial Sequence
  Description of Artificial Sequence: Synthetic oligonucleotide
cauaucugcuuguaaccag

SEQ ID NO: 2510595 - RNA, 19 nt, Artificial Sequence
  Description of Artificial Sequence: Synthetic oligonucleotide
auauuugauuuaguaacug

SEQ ID NO: 2510596 - RNA, 19 nt, Artificial Sequence
  Description of Artificial Sequence: Synthetic oligonucleotide
uaggcggaugaccacaacu

SEQ ID NO: 2510597 - RNA, 19 nt, Artificial Sequence
  Description of Artificial Sequence: Synthetic oligonucleotide
aauaaccaacaccaauauu

SEQ ID NO: 2510598 - RNA, 19 nt, Artificial Sequence
  Description of Artificial Sequence: Synthetic oligonucleotide
uucuugugaagauaauaau

SEQ ID NO: 2510599 - RNA, 19 nt, Artificial Sequence
  Description of Artificial Sequence: Synthetic oligonucleotide
ugaccacaacuccauacug

SEQ ID NO: 2510600 - RNA, 19 nt, Artificial Sequence
  Description of Artificial Sequence: Synthetic oligonucleotide
ucauaucugcuuguaacca

SEQ ID NO: 2510601 - RNA, 19 nt, Artificial Sequence
  Description of Artificial Sequence: Synthetic oligonucleotide
ccagucuuucuuaaaaucc

SEQ ID NO: 2510602 - RNA, 19 nt, Artificial Sequence
  Description of Artificial Sequence: Synthetic oligonucleotide
augaccacaacuccauacu

SEQ ID NO: 2510603 - RNA, 19 nt, Artificial Sequence
  Description of Artificial Sequence: Synthetic oligonucleotide
uacgaccaagaccagcagc

SEQ ID NO: 2510604 - RNA, 19 nt, Artificial Sequence
  Description of Artificial Sequence: Synthetic oligonucleotide
auucucuugaacccacuga

SEQ ID NO: 2510605 - RNA, 19 nt, Artificial Sequence
  Description of Artificial Sequence: Synthetic oligonucleotide
ccaauauucucuugaaccc

SEQ ID NO: 2510606 - RNA, 19 nt, Artificial Sequence
  Description of Artificial Sequence: Synthetic oligonucleotide
accuaaagcacaaaggaaa

SEQ ID NO: 2510607 - RNA, 19 nt, Artificial Sequence
  Description of Artificial Sequence: Synthetic oligonucleotide
uagcuacauuuaaaggugc

SEQ ID NO: 2510608 - RNA, 19 nt, Artificial Sequence
  Description of Artificial Sequence: Synthetic oligonucleotide
ucuuuauguguaauagauu

SEQ ID NO: 2510609 - RNA, 19 nt, Artificial Sequence
  Description of Artificial Sequence: Synthetic oligonucleotide
uuuuagaguacugcuguaa

SEQ ID NO: 2510610 - RNA, 19 nt, Artificial Sequence
  Description of Artificial Sequence: Synthetic oligonucleotide
gaaaaugucugaccggucu

SEQ ID NO: 2510611 - RNA, 19 nt, Artificial Sequence
  Description of Artificial Sequence: Synthetic oligonucleotide
cugaguuuggagucuugcc

SEQ ID NO: 2510612 - RNA, 19 nt, Artificial Sequence
  Description of Artificial Sequence: Synthetic oligonucleotide
uguuaauaaccaacaccaa

SEQ ID NO: 2510613 - RNA, 19 nt, Artificial Sequence
  Description of Artificial Sequence: Synthetic oligonucleotide
ucuugaacccacugaauuu

SEQ ID NO: 2510614 - RNA, 19 nt, Artificial Sequence
  Description of Artificial Sequence: Synthetic oligonucleotide
aaaaugucugaccggucua

SEQ ID NO: 2510615 - RNA, 19 nt, Artificial Sequence
  Description of Artificial Sequence: Synthetic oligonucleotide
uguaaccagucuuucuuaa

SEQ ID NO: 2510616 - RNA, 19 nt, Artificial Sequence
  Description of Artificial Sequence: Synthetic oligonucleotide
gaauuaauuguugaaaauu

SEQ ID NO: 2510617 - RNA, 19 nt, Artificial Sequence
  Description of Artificial Sequence: Synthetic oligonucleotide
uucaccagaugauuugcaa

SEQ ID NO: 2510618 - RNA, 19 nt, Artificial Sequence
  Description of Artificial Sequence: Synthetic oligonucleotide
acauuuaccaccacauccu

SEQ ID NO: 2510619 - RNA, 19 nt, Artificial Sequence
  Description of Artificial Sequence: Synthetic oligonucleotide
uguauaucaaaagcaucau

SEQ ID NO: 2510620 - RNA, 19 nt, Artificial Sequence
  Description of Artificial Sequence: Synthetic oligonucleotide
cuaucauaacaaugaguuc

SEQ ID NO: 2510621 - RNA, 19 nt, Artificial Sequence
  Description of Artificial Sequence: Synthetic oligonucleotide
cagccugcaucaaauacug

SEQ ID NO: 2510622 - RNA, 19 nt, Artificial Sequence
  Description of Artificial Sequence: Synthetic oligonucleotide
uagcuagcaugucuaagaa

SEQ ID NO: 2510623 - RNA, 19 nt, Artificial Sequence
  Description of Artificial Sequence: Synthetic oligonucleotide
uacugcuguaaccuugaaa

SEQ ID NO: 2510624 - RNA, 19 nt, Artificial Sequence
  Description of Artificial Sequence: Synthetic oligonucleotide
acaguggcugaguuuggag

SEQ ID NO: 2510625 - RNA, 19 nt, Artificial Sequence
  Description of Artificial Sequence: Synthetic oligonucleotide
aacuaggcccuuuggguau

SEQ ID NO: 2510626 - RNA, 19 nt, Artificial Sequence
  Description of Artificial Sequence: Synthetic oligonucleotide
aguuuggagucuugccauc

SEQ ID NO: 2510627 - RNA, 19 nt, Artificial Sequence
  Description of Artificial Sequence: Synthetic oligonucleotide
ugguuucauacgaccaaga

SEQ ID NO: 2510628 - RNA, 19 nt, Artificial Sequence
  Description of Artificial Sequence: Synthetic oligonucleotide
ugucugaccggucuagcua

SEQ ID NO: 2510629 - RNA, 19 nt, Artificial Sequence
  Description of Artificial Sequence: Synthetic oligonucleotide
gccugcaucaaauacugug

SEQ ID NO: 2510630 - RNA, 19 nt, Artificial Sequence
  Description of Artificial Sequence: Synthetic oligonucleotide
gucuaagaauuaauuguug

SEQ ID NO: 2510631 - RNA, 19 nt, Artificial Sequence
  Description of Artificial Sequence: Synthetic oligonucleotide
caucccucauaucugcuug

SEQ ID NO: 2510632 - RNA, 19 nt, Artificial Sequence
  Description of Artificial Sequence: Synthetic oligonucleotide
cacaaaggaaacauugcaa

SEQ ID NO: 2510633 - RNA, 19 nt, Artificial Sequence
  Description of Artificial Sequence: Synthetic oligonucleotide
ccucauaucugcuuguaac

SEQ ID NO: 2510634 - RNA, 19 nt, Artificial Sequence
  Description of Artificial Sequence: Synthetic oligonucleotide
ugcaaguaucuugaucuga

SEQ ID NO: 2510635 - RNA, 19 nt, Artificial Sequence
  Description of Artificial Sequence: Synthetic oligonucleotide
aggguguaaaggaaaaccu

SEQ ID NO: 2510636 - RNA, 19 nt, Artificial Sequence
  Description of Artificial Sequence: Synthetic oligonucleotide
auuaauuguugaaaauuuu

SEQ ID NO: 2510637 - RNA, 19 nt, Artificial Sequence
  Description of Artificial Sequence: Synthetic oligonucleotide
uuuaggcggaugaccacaa

SEQ ID NO: 2510638 - RNA, 19 nt, Artificial Sequence
  Description of Artificial Sequence: Synthetic oligonucleotide
cauuuuagaguacugcugu

SEQ ID NO: 2510639 - RNA, 19 nt, Artificial Sequence
  Description of Artificial Sequence: Synthetic oligonucleotide
acaacuccauacuguauau

SEQ ID NO: 2510640 - RNA, 19 nt, Artificial Sequence
  Description of Artificial Sequence: Synthetic oligonucleotide
ucauacgaccaagaccagc

SEQ ID NO: 2510641 - RNA, 19 nt, Artificial Sequence
  Description of Artificial Sequence: Synthetic oligonucleotide
ggugugauauguccagucc

SEQ ID NO: 2510642 - RNA, 19 nt, Artificial Sequence
  Description of Artificial Sequence: Synthetic oligonucleotide
uaacaguggcugaguuugg

SEQ ID NO: 2510643 - RNA, 19 nt, Artificial Sequence
  Description of Artificial Sequence: Synthetic oligonucleotide
uugcaaguaucuugaucug

SEQ ID NO: 2510644 - RNA, 19 nt, Artificial Sequence
  Description of Artificial Sequence: Synthetic oligonucleotide
uuuggagucuugccauccu

SEQ ID NO: 2510645 - RNA, 19 nt, Artificial Sequence
  Description of Artificial Sequence: Synthetic oligonucleotide
aggcggaugaccacaacuc

SEQ ID NO: 2510646 - RNA, 19 nt, Artificial Sequence
  Description of Artificial Sequence: Synthetic oligonucleotide
caucuuuauguguaauaga

SEQ ID NO: 2510647 - RNA, 19 nt, Artificial Sequence
  Description of Artificial Sequence: Synthetic oligonucleotide
cauaacaaugaguucaaau

SEQ ID NO: 2510648 - RNA, 19 nt, Artificial Sequence
  Description of Artificial Sequence: Synthetic oligonucleotide
aaggacaagcguguuuggu

SEQ ID NO: 2510649 - RNA, 19 nt, Artificial Sequence
  Description of Artificial Sequence: Synthetic oligonucleotide
ggaggugugauauguccag

SEQ ID NO: 2510650 - RNA, 19 nt, Artificial Sequence
  Description of Artificial Sequence: Synthetic oligonucleotide
gaguacugcuguaaccuug

SEQ ID NO: 2510651 - RNA, 19 nt, Artificial Sequence
  Description of Artificial Sequence: Synthetic oligonucleotide
accacaacuccauacugua

SEQ ID NO: 2510652 - RNA, 19 nt, Artificial Sequence
  Description of Artificial Sequence: Synthetic oligonucleotide
caaugaguucaaauugcca

SEQ ID NO: 2510653 - RNA, 19 nt, Artificial Sequence
  Description of Artificial Sequence: Synthetic oligonucleotide
aggacaagcguguuugguu

SEQ ID NO: 2510654 - RNA, 19 nt, Artificial Sequence
  Description of Artificial Sequence: Synthetic oligonucleotide
gucugaccggucuagcuac

SEQ ID NO: 2510655 - RNA, 19 nt, Artificial Sequence
  Description of Artificial Sequence: Synthetic oligonucleotide
guuugguuucauacgacca

SEQ ID NO: 2510656 - RNA, 19 nt, Artificial Sequence
  Description of Artificial Sequence: Synthetic oligonucleotide
caccaauauucucuugaac

SEQ ID NO: 2510657 - RNA, 19 nt, Artificial Sequence
  Description of Artificial Sequence: Synthetic oligonucleotide
ccuaaagcacaaaggaaac

SEQ ID NO: 2510658 - RNA, 19 nt, Artificial Sequence
  Description of Artificial Sequence: Synthetic oligonucleotide
cuccuuuaggcggaugacc

SEQ ID NO: 2510659 - RNA, 19 nt, Artificial Sequence
  Description of Artificial Sequence: Synthetic oligonucleotide
gcacaaaggaaacauugca

SEQ ID NO: 2510660 - RNA, 19 nt, Artificial Sequence
  Description of Artificial Sequence: Synthetic oligonucleotide
gcguguuugguuucauacg

SEQ ID NO: 2510661 - RNA, 19 nt, Artificial Sequence
  Description of Artificial Sequence: Synthetic oligonucleotide
aauugccacugcauaauua

SEQ ID NO: 2510662 - RNA, 19 nt, Artificial Sequence
  Description of Artificial Sequence: Synthetic oligonucleotide
auacgaccaagaccagcag

SEQ ID NO: 2510663 - RNA, 19 nt, Artificial Sequence
  Description of Artificial Sequence: Synthetic oligonucleotide
aucugcuuguaaccagucu

SEQ ID NO: 2510664 - RNA, 19 nt, Artificial Sequence
  Description of Artificial Sequence: Synthetic oligonucleotide
accuaucauaacaaugagu

SEQ ID NO: 2510665 - RNA, 19 nt, Artificial Sequence
  Description of Artificial Sequence: Synthetic oligonucleotide
aacaguggcugaguuugga

SEQ ID NO: 2510666 - RNA, 19 nt, Artificial Sequence
  Description of Artificial Sequence: Synthetic oligonucleotide
cacaacuccauacuguaua

SEQ ID NO: 2510667 - RNA, 19 nt, Artificial Sequence
  Description of Artificial Sequence: Synthetic oligonucleotide
guuuggagucuugccaucc

SEQ ID NO: 2510668 - RNA, 19 nt, Artificial Sequence
  Description of Artificial Sequence: Synthetic oligonucleotide
uucauacgaccaagaccag

SEQ ID NO: 2510669 - RNA, 19 nt, Artificial Sequence
  Description of Artificial Sequence: Synthetic oligonucleotide
gguguaaaggaaaaccuaa

SEQ ID NO: 2510670 - RNA, 19 nt, Artificial Sequence
  Description of Artificial Sequence: Synthetic oligonucleotide
auuuuagaguacugcugua

SEQ ID NO: 2510671 - RNA, 19 nt, Artificial Sequence
  Description of Artificial Sequence: Synthetic oligonucleotide
auauguccaguccuccuuu

SEQ ID NO: 2510672 - RNA, 19 nt, Artificial Sequence
  Description of Artificial Sequence: Synthetic oligonucleotide
cucaucuuuauguguaaua

SEQ ID NO: 2510673 - RNA, 19 nt, Artificial Sequence
  Description of Artificial Sequence: Synthetic oligonucleotide
guccacauuuaccaccaca

SEQ ID NO: 2510674 - RNA, 19 nt, Artificial Sequence
  Description of Artificial Sequence: Synthetic oligonucleotide
aguacugcuguaaccuuga

SEQ ID NO: 2510675 - RNA, 19 nt, Artificial Sequence
  Description of Artificial Sequence: Synthetic oligonucleotide
cugcaucaaauacugugca

SEQ ID NO: 2510676 - RNA, 19 nt, Artificial Sequence
  Description of Artificial Sequence: Synthetic oligonucleotide
uccucaucuuuauguguaa

SEQ ID NO: 2510677 - RNA, 19 nt, Artificial Sequence
  Description of Artificial Sequence: Synthetic oligonucleotide
gugauauguccaguccucc

SEQ ID NO: 2510678 - RNA, 19 nt, Artificial Sequence
  Description of Artificial Sequence: Synthetic oligonucleotide
agcuagcaugucuaagaau

SEQ ID NO: 2510679 - RNA, 19 nt, Artificial Sequence
  Description of Artificial Sequence: Synthetic oligonucleotide
cuuguaaccagucuuucuu

SEQ ID NO: 2510680 - RNA, 19 nt, Artificial Sequence
  Description of Artificial Sequence: Synthetic oligonucleotide
gugcaacuaggcccuuugg

SEQ ID NO: 2510681 - RNA, 19 nt, Artificial Sequence
  Description of Artificial Sequence: Synthetic oligonucleotide
gcaucaugaaauaaguuua

SEQ ID NO: 2510682 - RNA, 19 nt, Artificial Sequence
  Description of Artificial Sequence: Synthetic oligonucleotide
aucauaacaaugaguucaa

SEQ ID NO: 2510683 - RNA, 19 nt, Artificial Sequence
  Description of Artificial Sequence: Synthetic oligonucleotide
ggugcaacuaggcccuuug

SEQ ID NO: 2510684 - RNA, 19 nt, Artificial Sequence
  Description of Artificial Sequence: Synthetic oligonucleotide
caccagaugauuugcaagu

SEQ ID NO: 2510685 - RNA, 19 nt, Artificial Sequence
  Description of Artificial Sequence: Synthetic oligonucleotide
gcaaguaucuugaucugac

SEQ ID NO: 2510686 - RNA, 19 nt, Artificial Sequence
  Description of Artificial Sequence: Synthetic oligonucleotide
cuuuaggcggaugaccaca

SEQ ID NO: 2510687 - RNA, 19 nt, Artificial Sequence
  Description of Artificial Sequence: Synthetic oligonucleotide
aagcguguuugguuucaua

SEQ ID NO: 2510688 - RNA, 19 nt, Artificial Sequence
  Description of Artificial Sequence: Synthetic oligonucleotide
gacaagcguguuugguuuc

SEQ ID NO: 2510689 - RNA, 19 nt, Artificial Sequence
  Description of Artificial Sequence: Synthetic oligonucleotide
gaccggucuagcuacauuu

SEQ ID NO: 2510690 - RNA, 19 nt, Artificial Sequence
  Description of Artificial Sequence: Synthetic oligonucleotide
gugugauauguccaguccu

SEQ ID NO: 2510691 - RNA, 19 nt, Artificial Sequence
  Description of Artificial Sequence: Synthetic oligonucleotide
aucaugaaauaaguuuaua

SEQ ID NO: 2510692 - RNA, 19 nt, Artificial Sequence
  Description of Artificial Sequence: Synthetic oligonucleotide
gauauguccaguccuccuu

SEQ ID NO: 2510693 - RNA, 19 nt, Artificial Sequence
  Description of Artificial Sequence: Synthetic oligonucleotide
cuguaaccuugaaaauguc

SEQ ID NO: 2510694 - RNA, 19 nt, Artificial Sequence
  Description of Artificial Sequence: Synthetic oligonucleotide
agaguacugcuguaaccuu

SEQ ID NO: 2510695 - RNA, 19 nt, Artificial Sequence
  Description of Artificial Sequence: Synthetic oligonucleotide
guaaccagucuuucuuaaa

SEQ ID NO: 2510696 - RNA, 19 nt, Artificial Sequence
  Description of Artificial Sequence: Synthetic oligonucleotide
accacauccuugguaccag

SEQ ID NO: 2510697 - RNA, 19 nt, Artificial Sequence
  Description of Artificial Sequence: Synthetic oligonucleotide
uuaggcggaugaccacaac

SEQ ID NO: 2510698 - RNA, 19 nt, Artificial Sequence
  Description of Artificial Sequence: Synthetic oligonucleotide
aggaaacauugcaacaaau

SEQ ID NO: 2510699 - RNA, 19 nt, Artificial Sequence
  Description of Artificial Sequence: Synthetic oligonucleotide
aucaaugauuaggacuaaa

SEQ ID NO: 2510700 - RNA, 19 nt, Artificial Sequence
  Description of Artificial Sequence: Synthetic oligonucleotide
agcuacauuuaaaggugca

SEQ ID NO: 2510701 - RNA, 19 nt, Artificial Sequence
  Description of Artificial Sequence: Synthetic oligonucleotide
ugcuuguaaccagucuuuc

SEQ ID NO: 2510702 - RNA, 19 nt, Artificial Sequence
  Description of Artificial Sequence: Synthetic oligonucleotide
ggcggaugaccacaacucc

SEQ ID NO: 2510703 - RNA, 19 nt, Artificial Sequence
  Description of Artificial Sequence: Synthetic oligonucleotide
ucugaccggucuagcuaca

SEQ ID NO: 2510704 - RNA, 19 nt, Artificial Sequence
  Description of Artificial Sequence: Synthetic oligonucleotide
uauguccaguccuccuuua

SEQ ID NO: 2510705 - RNA, 19 nt, Artificial Sequence
  Description of Artificial Sequence: Synthetic oligonucleotide
guguaaaggaaaaccuaaa

SEQ ID NO: 2510706 - RNA, 19 nt, Artificial Sequence
  Description of Artificial Sequence: Synthetic oligonucleotide
gcuagcaugucuaagaauu

SEQ ID NO: 2510707 - RNA, 19 nt, Artificial Sequence
  Description of Artificial Sequence: Synthetic oligonucleotide
uaucaaugauuaggacuaa

SEQ ID NO: 2510708 - RNA, 19 nt, Artificial Sequence
  Description of Artificial Sequence: Synthetic oligonucleotide
caacuaggcccuuugggua

SEQ ID NO: 2510709 - RNA, 19 nt, Artificial Sequence
  Description of Artificial Sequence: Synthetic oligonucleotide
cuagcaugucuaagaauua

SEQ ID NO: 2510710 - RNA, 19 nt, Artificial Sequence
  Description of Artificial Sequence: Synthetic oligonucleotide
acacuagcuagcaugucua

SEQ ID NO: 2510711 - RNA, 19 nt, Artificial Sequence
  Description of Artificial Sequence: Synthetic oligonucleotide
caauaugaaaaggguguaa

SEQ ID NO: 2510712 - RNA, 19 nt, Artificial Sequence
  Description of Artificial Sequence: Synthetic oligonucleotide
gcuguaaccuugaaaaugu

SEQ ID NO: 2510713 - RNA, 19 nt, Artificial Sequence
  Description of Artificial Sequence: Synthetic oligonucleotide
ugaccggucuagcuacauu

SEQ ID NO: 2510714 - RNA, 19 nt, Artificial Sequence
  Description of Artificial Sequence: Synthetic oligonucleotide
cucuugaacccacugaauu

SEQ ID NO: 2510715 - RNA, 19 nt, Artificial Sequence
  Description of Artificial Sequence: Synthetic oligonucleotide
caucaugaaauaaguuuau

SEQ ID NO: 2510716 - RNA, 19 nt, Artificial Sequence
  Description of Artificial Sequence: Synthetic oligonucleotide
gcaacuaggcccuuugggu

SEQ ID NO: 2510717 - RNA, 19 nt, Artificial Sequence
  Description of Artificial Sequence: Synthetic oligonucleotide
guguuugguuucauacgac

SEQ ID NO: 2510718 - RNA, 19 nt, Artificial Sequence
  Description of Artificial Sequence: Synthetic oligonucleotide
gcuuuaacacuagcuagca

SEQ ID NO: 2510719 - RNA, 19 nt, Artificial Sequence
  Description of Artificial Sequence: Synthetic oligonucleotide
gaccacaacuccauacugu

SEQ ID NO: 2510720 - RNA, 19 nt, Artificial Sequence
  Description of Artificial Sequence: Synthetic oligonucleotide
acauugcaacaaauaaaua

SEQ ID NO: 2510721 - RNA, 19 nt, Artificial Sequence
  Description of Artificial Sequence: Synthetic oligonucleotide
auauucucuugaacccacu

SEQ ID NO: 2510722 - RNA, 19 nt, Artificial Sequence
  Description of Artificial Sequence: Synthetic oligonucleotide
uaacacuagcuagcauguc

SEQ ID NO: 2510723 - RNA, 19 nt, Artificial Sequence
  Description of Artificial Sequence: Synthetic oligonucleotide
guucaaauugccacugcau

SEQ ID NO: 2510724 - RNA, 19 nt, Artificial Sequence
  Description of Artificial Sequence: Synthetic oligonucleotide
accagaugauuugcaagua

SEQ ID NO: 2510725 - RNA, 19 nt, Artificial Sequence
  Description of Artificial Sequence: Synthetic oligonucleotide
gauuugcaaguaucuugau

SEQ ID NO: 2510726 - RNA, 19 nt, Artificial Sequence
  Description of Artificial Sequence: Synthetic oligonucleotide
caaguaucuugaucugacu

SEQ ID NO: 2510727 - RNA, 19 nt, Artificial Sequence
  Description of Artificial Sequence: Synthetic oligonucleotide
gcuacauuuaaaggugcaa

SEQ ID NO: 2510728 - RNA, 19 nt, Artificial Sequence
  Description of Artificial Sequence: Synthetic oligonucleotide
cuugaacccacugaauuuu

SEQ ID NO: 2510729 - RNA, 19 nt, Artificial Sequence
  Description of Artificial Sequence: Synthetic oligonucleotide
caguccuccuuuaggcgga

SEQ ID NO: 2510730 - RNA, 19 nt, Artificial Sequence
  Description of Artificial Sequence: Synthetic oligonucleotide
auccuugguaccaggugau

SEQ ID NO: 2510731 - RNA, 19 nt, Artificial Sequence
  Description of Artificial Sequence: Synthetic oligonucleotide
guccuuggaggugugauau

SEQ ID NO: 2510732 - RNA, 19 nt, Artificial Sequence
  Description of Artificial Sequence: Synthetic oligonucleotide
cacuagcuagcaugucuaa

SEQ ID NO: 2510733 - RNA, 19 nt, Artificial Sequence
  Description of Artificial Sequence: Synthetic oligonucleotide
ccacauuuaccaccacauc

SEQ ID NO: 2510734 - RNA, 19 nt, Artificial Sequence
  Description of Artificial Sequence: Synthetic oligonucleotide
gcaauaugaaaagggugua

SEQ ID NO: 2510735 - RNA, 19 nt, Artificial Sequence
  Description of Artificial Sequence: Synthetic oligonucleotide
ggacaagcguguuugguuu

SEQ ID NO: 2510736 - RNA, 19 nt, Artificial Sequence
  Description of Artificial Sequence: Synthetic oligonucleotide
ccuuuaggcggaugaccac

SEQ ID NO: 2510737 - RNA, 19 nt, Artificial Sequence
  Description of Artificial Sequence: Synthetic oligonucleotide
cugcuuguaaccagucuuu

SEQ ID NO: 2510738 - RNA, 19 nt, Artificial Sequence
  Description of Artificial Sequence: Synthetic oligonucleotide
gcagccugcaucaaauacu

SEQ ID NO: 2510739 - RNA, 19 nt, Artificial Sequence
  Description of Artificial Sequence: Synthetic oligonucleotide
uaggcccuuuggguauucu

SEQ ID NO: 2510740 - RNA, 19 nt, Artificial Sequence
  Description of Artificial Sequence: Synthetic oligonucleotide
gcaucaaaguaaucagaau

SEQ ID NO: 2510741 - RNA, 19 nt, Artificial Sequence
  Description of Artificial Sequence: Synthetic oligonucleotide
cuuuaacacuagcuagcau

SEQ ID NO: 2510742 - RNA, 19 nt, Artificial Sequence
  Description of Artificial Sequence: Synthetic oligonucleotide
gcaugucuaagaauuaauu

SEQ ID NO: 2510743 - RNA, 19 nt, Artificial Sequence
  Description of Artificial Sequence: Synthetic oligonucleotide
accggucuagcuacauuua

SEQ ID NO: 2510744 - RNA, 19 nt, Artificial Sequence
  Description of Artificial Sequence: Synthetic oligonucleotide
guacugcuguaaccuugaa

SEQ ID NO: 2510745 - RNA, 19 nt, Artificial Sequence
  Description of Artificial Sequence: Synthetic oligonucleotide
cuaggcccuuuggguauuc

SEQ ID NO: 2510746 - RNA, 19 nt, Artificial Sequence
  Description of Artificial Sequence: Synthetic oligonucleotide
agccugcaucaaauacugu

SEQ ID NO: 2510747 - RNA, 19 nt, Artificial Sequence
  Description of Artificial Sequence: Synthetic oligonucleotide
acuaggcccuuuggguauu

SEQ ID NO: 2510748 - RNA, 19 nt, Artificial Sequence
  Description of Artificial Sequence: Synthetic oligonucleotide
ggaugaccacaacuccaua

SEQ ID NO: 2510749 - RNA, 19 nt, Artificial Sequence
  Description of Artificial Sequence: Synthetic oligonucleotide
cggucuagcuacauuuaaa

SEQ ID NO: 2510750 - RNA, 19 nt, Artificial Sequence
  Description of Artificial Sequence: Synthetic oligonucleotide
ccggucuagcuacauuuaa

SEQ ID NO: 2510751 - RNA, 19 nt, Artificial Sequence
  Description of Artificial Sequence: Synthetic oligonucleotide
ccagaugauuugcaaguau

SEQ ID NO: 2510752 - RNA, 19 nt, Artificial Sequence
  Description of Artificial Sequence: Synthetic oligonucleotide
ggcccuuuggguauucuuu

SEQ ID NO: 2510753 - RNA, 19 nt, Artificial Sequence
  Description of Artificial Sequence: Synthetic oligonucleotide
gcccuuuggguauucuuuu

SEQ ID NO: 2510754 - RNA, 19 nt, Artificial Sequence
  Description of Artificial Sequence: Synthetic oligonucleotide
caagcguguuugguuucau

SEQ ID NO: 2510755 - RNA, 19 nt, Artificial Sequence
  Description of Artificial Sequence: Synthetic oligonucleotide
cugaccggucuagcuacau

SEQ ID NO: 2510756 - RNA, 19 nt, Artificial Sequence
  Description of Artificial Sequence: Synthetic oligonucleotide
aauuauauauguuacuagc

SEQ ID NO: 2510757 - RNA, 19 nt, Artificial Sequence
  Description of Artificial Sequence: Synthetic oligonucleotide
uaaacaucagaacagagcg

SEQ ID NO: 2510758 - RNA, 19 nt, Artificial Sequence
  Description of Artificial Sequence: Synthetic oligonucleotide
auaagaaucgaacagauag

SEQ ID NO: 2510759 - RNA, 19 nt, Artificial Sequence
  Description of Artificial Sequence: Synthetic oligonucleotide
aaauuuugcaucaugaugg

SEQ ID NO: 2510760 - RNA, 19 nt, Artificial Sequence
  Description of Artificial Sequence: Synthetic oligonucleotide
aacacuuacaacuauaaga

SEQ ID NO: 2510761 - RNA, 19 nt, Artificial Sequence
  Description of Artificial Sequence: Synthetic oligonucleotide
uauauuucggauacaaagg

SEQ ID NO: 2510762 - RNA, 19 nt, Artificial Sequence
  Description of Artificial Sequence: Synthetic oligonucleotide
aggaauaacacuuacaacu

SEQ ID NO: 2510763 - RNA, 19 nt, Artificial Sequence
  Description of Artificial Sequence: Synthetic oligonucleotide
auagaaaacagacuucggc

SEQ ID NO: 2510764 - RNA, 19 nt, Artificial Sequence
  Description of Artificial Sequence: Synthetic oligonucleotide
ucuuaaaagaggaauaaca

SEQ ID NO: 2510765 - RNA, 19 nt, Artificial Sequence
  Description of Artificial Sequence: Synthetic oligonucleotide
uacauaugaccuuugaugg

SEQ ID NO: 2510766 - RNA, 19 nt, Artificial Sequence
  Description of Artificial Sequence: Synthetic oligonucleotide
aaaucugucugcugggucc

SEQ ID NO: 2510767 - RNA, 19 nt, Artificial Sequence
  Description of Artificial Sequence: Synthetic oligonucleotide
uuuuguagggauaaaagca

SEQ ID NO: 2510768 - RNA, 19 nt, Artificial Sequence
  Description of Artificial Sequence: Synthetic oligonucleotide
cuuugaaaacccaauaugg

SEQ ID NO: 2510769 - RNA, 19 nt, Artificial Sequence
  Description of Artificial Sequence: Synthetic oligonucleotide
uacaaauuacagaauaucc

SEQ ID NO: 2510770 - RNA, 19 nt, Artificial Sequence
  Description of Artificial Sequence: Synthetic oligonucleotide
auauuucggauacaaaggc

SEQ ID NO: 2510771 - RNA, 19 nt, Artificial Sequence
  Description of Artificial Sequence: Synthetic oligonucleotide
uauaagaauggcuauaaga

SEQ ID NO: 2510772 - RNA, 19 nt, Artificial Sequence
  Description of Artificial Sequence: Synthetic oligonucleotide
uuuagugaagacauuagga

SEQ ID NO: 2510773 - RNA, 19 nt, Artificial Sequence
  Description of Artificial Sequence: Synthetic oligonucleotide
aacuccuuguaacuguugc

SEQ ID NO: 2510774 - RNA, 19 nt, Artificial Sequence
  Description of Artificial Sequence: Synthetic oligonucleotide
ugcauuaauauuccaacag

SEQ ID NO: 2510775 - RNA, 19 nt, Artificial Sequence
  Description of Artificial Sequence: Synthetic oligonucleotide
uaaaagaggaauaacacuu

SEQ ID NO: 2510776 - RNA, 19 nt, Artificial Sequence
  Description of Artificial Sequence: Synthetic oligonucleotide
aagaauggcuauaagaauc

SEQ ID NO: 2510777 - RNA, 19 nt, Artificial Sequence
  Description of Artificial Sequence: Synthetic oligonucleotide
uuuguagggauaaaagcag

SEQ ID NO: 2510778 - RNA, 19 nt, Artificial Sequence
  Description of Artificial Sequence: Synthetic oligonucleotide
aauuuugcaucaugauggc

SEQ ID NO: 2510779 - RNA, 19 nt, Artificial Sequence
  Description of Artificial Sequence: Synthetic oligonucleotide
ucuuauuuuguacaaauua

SEQ ID NO: 2510780 - RNA, 19 nt, Artificial Sequence
  Description of Artificial Sequence: Synthetic oligonucleotide
gaagacauuaggaagagug

SEQ ID NO: 2510781 - RNA, 19 nt, Artificial Sequence
  Description of Artificial Sequence: Synthetic oligonucleotide
uauauauguuacuagcaag

SEQ ID NO: 2510782 - RNA, 19 nt, Artificial Sequence
  Description of Artificial Sequence: Synthetic oligonucleotide
uuuuacaaacguaugauua

SEQ ID NO: 2510783 - RNA, 19 nt, Artificial Sequence
  Description of Artificial Sequence: Synthetic oligonucleotide
ucugcuaucaucaacccaa

SEQ ID NO: 2510784 - RNA, 19 nt, Artificial Sequence
  Description of Artificial Sequence: Synthetic oligonucleotide
ugguucauaaguuugcaag

SEQ ID NO: 2510785 - RNA, 19 nt, Artificial Sequence
  Description of Artificial Sequence: Synthetic oligonucleotide
auaaacaucagaacagagc

SEQ ID NO: 2510786 - RNA, 19 nt, Artificial Sequence
  Description of Artificial Sequence: Synthetic oligonucleotide
aacauaaacaucagaacag

SEQ ID NO: 2510787 - RNA, 19 nt, Artificial Sequence
  Description of Artificial Sequence: Synthetic oligonucleotide
aauuacagaauauccauua

SEQ ID NO: 2510788 - RNA, 19 nt, Artificial Sequence
  Description of Artificial Sequence: Synthetic oligonucleotide
aacaucagaacagagcguc

SEQ ID NO: 2510789 - RNA, 19 nt, Artificial Sequence
  Description of Artificial Sequence: Synthetic oligonucleotide
uguaaaauauuauguguug

SEQ ID NO: 2510790 - RNA, 19 nt, Artificial Sequence
  Description of Artificial Sequence: Synthetic oligonucleotide
aaguguauuuuccaaugag

SEQ ID NO: 2510791 - RNA, 19 nt, Artificial Sequence
  Description of Artificial Sequence: Synthetic oligonucleotide
uaagaaucgaacagauagg

SEQ ID NO: 2510792 - RNA, 19 nt, Artificial Sequence
  Description of Artificial Sequence: Synthetic oligonucleotide
aauauuauguguuggcuua

SEQ ID NO: 2510793 - RNA, 19 nt, Artificial Sequence
  Description of Artificial Sequence: Synthetic oligonucleotide
aauauuccaacagacucuc

SEQ ID NO: 2510794 - RNA, 19 nt, Artificial Sequence
  Description of Artificial Sequence: Synthetic oligonucleotide
uuauauauguuacuagcaa

SEQ ID NO: 2510795 - RNA, 19 nt, Artificial Sequence
  Description of Artificial Sequence: Synthetic oligonucleotide
aacagacucucuuaaaaga

SEQ ID NO: 2510796 - RNA, 19 nt, Artificial Sequence
  Description of Artificial Sequence: Synthetic oligonucleotide
augauuacacugaagaacg

SEQ ID NO: 2510797 - RNA, 19 nt, Artificial Sequence
  Description of Artificial Sequence: Synthetic oligonucleotide
augauaacugccucacucc

SEQ ID NO: 2510798 - RNA, 19 nt, Artificial Sequence
  Description of Artificial Sequence: Synthetic oligonucleotide
auuaggaagaguggcagcc

SEQ ID NO: 2510799 - RNA, 19 nt, Artificial Sequence
  Description of Artificial Sequence: Synthetic oligonucleotide
auaacugccucacuccagc

SEQ ID NO: 2510800 - RNA, 19 nt, Artificial Sequence
  Description of Artificial Sequence: Synthetic oligonucleotide
guuuuguagggauaaaagc

SEQ ID NO: 2510801 - RNA, 19 nt, Artificial Sequence
  Description of Artificial Sequence: Synthetic oligonucleotide
gcaacuaggagcuucaagg

SEQ ID NO: 2510802 - RNA, 19 nt, Artificial Sequence
  Description of Artificial Sequence: Synthetic oligonucleotide
ugguacauuacugugcugg

SEQ ID NO: 2510803 - RNA, 19 nt, Artificial Sequence
  Description of Artificial Sequence: Synthetic oligonucleotide
uuagugaagacauuaggaa

SEQ ID NO: 2510804 - RNA, 19 nt, Artificial Sequence
  Description of Artificial Sequence: Synthetic oligonucleotide
ucaucaacccaaaauuuug

SEQ ID NO: 2510805 - RNA, 19 nt, Artificial Sequence
  Description of Artificial Sequence: Synthetic oligonucleotide
caaacguaugauuacacug

SEQ ID NO: 2510806 - RNA, 19 nt, Artificial Sequence
  Description of Artificial Sequence: Synthetic oligonucleotide
cuuguaagcuguaaacucc

SEQ ID NO: 2510807 - RNA, 19 nt, Artificial Sequence
  Description of Artificial Sequence: Synthetic oligonucleotide
uagaaaacagacuucggcu

SEQ ID NO: 2510808 - RNA, 19 nt, Artificial Sequence
  Description of Artificial Sequence: Synthetic oligonucleotide
acuaggagcuucaaggucc

SEQ ID NO: 2510809 - RNA, 19 nt, Artificial Sequence
  Description of Artificial Sequence: Synthetic oligonucleotide
uagugaagacauuaggaag

SEQ ID NO: 2510810 - RNA, 19 nt, Artificial Sequence
  Description of Artificial Sequence: Synthetic oligonucleotide
cuuggugugaugauaacug

SEQ ID NO: 2510811 - RNA, 19 nt, Artificial Sequence
  Description of Artificial Sequence: Synthetic oligonucleotide
aaaaucugucugcuggguc

SEQ ID NO: 2510812 - RNA, 19 nt, Artificial Sequence
  Description of Artificial Sequence: Synthetic oligonucleotide
aauaugguuugguucauaa

SEQ ID NO: 2510813 - RNA, 19 nt, Artificial Sequence
  Description of Artificial Sequence: Synthetic oligonucleotide
ugugcuggcaaauauauuu

SEQ ID NO: 2510814 - RNA, 19 nt, Artificial Sequence
  Description of Artificial Sequence: Synthetic oligonucleotide
uaauauuccaacagacucu

SEQ ID NO: 2510815 - RNA, 19 nt, Artificial Sequence
  Description of Artificial Sequence: Synthetic oligonucleotide
uuugaugguacauuacugu

SEQ ID NO: 2510816 - RNA, 19 nt, Artificial Sequence
  Description of Artificial Sequence: Synthetic oligonucleotide
acuagcaagucuuauuuug

SEQ ID NO: 2510817 - RNA, 19 nt, Artificial Sequence
  Description of Artificial Sequence: Synthetic oligonucleotide
cuuuagugaagacauuagg

SEQ ID NO: 2510818 - RNA, 19 nt, Artificial Sequence
  Description of Artificial Sequence: Synthetic oligonucleotide
acuuacaacuauaagaaug

SEQ ID NO: 2510819 - RNA, 19 nt, Artificial Sequence
  Description of Artificial Sequence: Synthetic oligonucleotide
uauguguuggcuuaagauc

SEQ ID NO: 2510820 - RNA, 19 nt, Artificial Sequence
  Description of Artificial Sequence: Synthetic oligonucleotide
uuuacaaacguaugauuac

SEQ ID NO: 2510821 - RNA, 19 nt, Artificial Sequence
  Description of Artificial Sequence: Synthetic oligonucleotide
ugaagaacgucaacaacug

SEQ ID NO: 2510822 - RNA, 19 nt, Artificial Sequence
  Description of Artificial Sequence: Synthetic oligonucleotide
aacagauaggaucugcuau

SEQ ID NO: 2510823 - RNA, 19 nt, Artificial Sequence
  Description of Artificial Sequence: Synthetic oligonucleotide
auggcuauaagaaucgaac

SEQ ID NO: 2510824 - RNA, 19 nt, Artificial Sequence
  Description of Artificial Sequence: Synthetic oligonucleotide
agacauuaggaagaguggc

SEQ ID NO: 2510825 - RNA, 19 nt, Artificial Sequence
  Description of Artificial Sequence: Synthetic oligonucleotide
auuucggauacaaaggcac

SEQ ID NO: 2510826 - RNA, 19 nt, Artificial Sequence
  Description of Artificial Sequence: Synthetic oligonucleotide
guguauuuuccaaugaggg

SEQ ID NO: 2510827 - RNA, 19 nt, Artificial Sequence
  Description of Artificial Sequence: Synthetic oligonucleotide
aacuaggagcuucaagguc

SEQ ID NO: 2510828 - RNA, 19 nt, Artificial Sequence
  Description of Artificial Sequence: Synthetic oligonucleotide
caauuauauauguuacuag

SEQ ID NO: 2510829 - RNA, 19 nt, Artificial Sequence
  Description of Artificial Sequence: Synthetic oligonucleotide
aagaacgucaacaacugug

SEQ ID NO: 2510830 - RNA, 19 nt, Artificial Sequence
  Description of Artificial Sequence: Synthetic oligonucleotide
ugaaaacccaauaugguuu

SEQ ID NO: 2510831 - RNA, 19 nt, Artificial Sequence
  Description of Artificial Sequence: Synthetic oligonucleotide
gaggcaauuacaccaauac

SEQ ID NO: 2510832 - RNA, 19 nt, Artificial Sequence
  Description of Artificial Sequence: Synthetic oligonucleotide
agcaagucuuauuuuguac

SEQ ID NO: 2510833 - RNA, 19 nt, Artificial Sequence
  Description of Artificial Sequence: Synthetic oligonucleotide
auaagaauggcuauaagaa

SEQ ID NO: 2510834 - RNA, 19 nt, Artificial Sequence
  Description of Artificial Sequence: Synthetic oligonucleotide
uacaaacaauuuuacaaac

SEQ ID NO: 2510835 - RNA, 19 nt, Artificial Sequence
  Description of Artificial Sequence: Synthetic oligonucleotide
ugaugguacauuacugugc

SEQ ID NO: 2510836 - RNA, 19 nt, Artificial Sequence
  Description of Artificial Sequence: Synthetic oligonucleotide
agaguggcagcccacaguc

SEQ ID NO: 2510837 - RNA, 19 nt, Artificial Sequence
  Description of Artificial Sequence: Synthetic oligonucleotide
aagugcuguucuuguaagc

SEQ ID NO: 2510838 - RNA, 19 nt, Artificial Sequence
  Description of Artificial Sequence: Synthetic oligonucleotide
uuauguguuggcuuaagau

SEQ ID NO: 2510839 - RNA, 19 nt, Artificial Sequence
  Description of Artificial Sequence: Synthetic oligonucleotide
uuacuagcaagucuuauuu

SEQ ID NO: 2510840 - RNA, 19 nt, Artificial Sequence
  Description of Artificial Sequence: Synthetic oligonucleotide
ucuuguaagcuguaaacuc

SEQ ID NO: 2510841 - RNA, 19 nt, Artificial Sequence
  Description of Artificial Sequence: Synthetic oligonucleotide
ucaaggucccaacauaaac

SEQ ID NO: 2510842 - RNA, 19 nt, Artificial Sequence
  Description of Artificial Sequence: Synthetic oligonucleotide
cuguguaaaauauuaugug

SEQ ID NO: 2510843 - RNA, 19 nt, Artificial Sequence
  Description of Artificial Sequence: Synthetic oligonucleotide
ucugauagcacuggggaag

SEQ ID NO: 2510844 - RNA, 19 nt, Artificial Sequence
  Description of Artificial Sequence: Synthetic oligonucleotide
aagaaucgaacagauagga

SEQ ID NO: 2510845 - RNA, 19 nt, Artificial Sequence
  Description of Artificial Sequence: Synthetic oligonucleotide
acagauaggaucugcuauc

SEQ ID NO: 2510846 - RNA, 19 nt, Artificial Sequence
  Description of Artificial Sequence: Synthetic oligonucleotide
caacauaaacaucagaaca

SEQ ID NO: 2510847 - RNA, 19 nt, Artificial Sequence
  Description of Artificial Sequence: Synthetic oligonucleotide
aacgucaacaacugugaca

SEQ ID NO: 2510848 - RNA, 19 nt, Artificial Sequence
  Description of Artificial Sequence: Synthetic oligonucleotide
aacccaaaauuuugcauca

SEQ ID NO: 2510849 - RNA, 19 nt, Artificial Sequence
  Description of Artificial Sequence: Synthetic oligonucleotide
uguacaaauuacagaauau

SEQ ID NO: 2510850 - RNA, 19 nt, Artificial Sequence
  Description of Artificial Sequence: Synthetic oligonucleotide
aagacauuaggaagagugg

SEQ ID NO: 2510851 - RNA, 19 nt, Artificial Sequence
  Description of Artificial Sequence: Synthetic oligonucleotide
aguguauuuuccaaugagg

SEQ ID NO: 2510852 - RNA, 19 nt, Artificial Sequence
  Description of Artificial Sequence: Synthetic oligonucleotide
uguauuuuccaaugaggga

SEQ ID NO: 2510853 - RNA, 19 nt, Artificial Sequence
  Description of Artificial Sequence: Synthetic oligonucleotide
uaacacuuacaacuauaag

SEQ ID NO: 2510854 - RNA, 19 nt, Artificial Sequence
  Description of Artificial Sequence: Synthetic oligonucleotide
uuaagauccaccuggcguc

SEQ ID NO: 2510855 - RNA, 19 nt, Artificial Sequence
  Description of Artificial Sequence: Synthetic oligonucleotide
aaacguaugauuacacuga

SEQ ID NO: 2510856 - RNA, 19 nt, Artificial Sequence
  Description of Artificial Sequence: Synthetic oligonucleotide
aauuacaccaauacuccca

SEQ ID NO: 2510857 - RNA, 19 nt, Artificial Sequence
  Description of Artificial Sequence: Synthetic oligonucleotide
uacaccuuguaaaaucugu

SEQ ID NO: 2510858 - RNA, 19 nt, Artificial Sequence
  Description of Artificial Sequence: Synthetic oligonucleotide
uugaugguacauuacugug

SEQ ID NO: 2510859 - RNA, 19 nt, Artificial Sequence
  Description of Artificial Sequence: Synthetic oligonucleotide
acaaacaauuuuacaaacg

SEQ ID NO: 2510860 - RNA, 19 nt, Artificial Sequence
  Description of Artificial Sequence: Synthetic oligonucleotide
uauuucggauacaaaggca

SEQ ID NO: 2510861 - RNA, 19 nt, Artificial Sequence
  Description of Artificial Sequence: Synthetic oligonucleotide
gcaaauauauuucggauac

SEQ ID NO: 2510862 - RNA, 19 nt, Artificial Sequence
  Description of Artificial Sequence: Synthetic oligonucleotide
guaaaaucugucugcuggg

SEQ ID NO: 2510863 - RNA, 19 nt, Artificial Sequence
  Description of Artificial Sequence: Synthetic oligonucleotide
uacauuacugugcuggcaa

SEQ ID NO: 2510864 - RNA, 19 nt, Artificial Sequence
  Description of Artificial Sequence: Synthetic oligonucleotide
caacccaaaauuuugcauc

SEQ ID NO: 2510865 - RNA, 19 nt, Artificial Sequence
  Description of Artificial Sequence: Synthetic oligonucleotide
acaacuauaagaauggcua

SEQ ID NO: 2510866 - RNA, 19 nt, Artificial Sequence
  Description of Artificial Sequence: Synthetic oligonucleotide
auauguuacuagcaagucu

SEQ ID NO: 2510867 - RNA, 19 nt, Artificial Sequence
  Description of Artificial Sequence: Synthetic oligonucleotide
gaaaacccaauaugguuug

SEQ ID NO: 2510868 - RNA, 19 nt, Artificial Sequence
  Description of Artificial Sequence: Synthetic oligonucleotide
ucugcuagaauguguaaaa

SEQ ID NO: 2510869 - RNA, 19 nt, Artificial Sequence
  Description of Artificial Sequence: Synthetic oligonucleotide
uguaucugcuagaaugugu

SEQ ID NO: 2510870 - RNA, 19 nt, Artificial Sequence
  Description of Artificial Sequence: Synthetic oligonucleotide
ucccaaguguaucugcuag

SEQ ID NO: 2510871 - RNA, 19 nt, Artificial Sequence
  Description of Artificial Sequence: Synthetic oligonucleotide
guucuuguaagcuguaaac

SEQ ID NO: 2510872 - RNA, 19 nt, Artificial Sequence
  Description of Artificial Sequence: Synthetic oligonucleotide
gguucauaaguuugcaagg

SEQ ID NO: 2510873 - RNA, 19 nt, Artificial Sequence
  Description of Artificial Sequence: Synthetic oligonucleotide
uguaaacuccuuguaacug

SEQ ID NO: 2510874 - RNA, 19 nt, Artificial Sequence
  Description of Artificial Sequence: Synthetic oligonucleotide
agaauggcuauaagaaucg

SEQ ID NO: 2510875 - RNA, 19 nt, Artificial Sequence
  Description of Artificial Sequence: Synthetic oligonucleotide
auauauguuacuagcaagu

SEQ ID NO: 2510876 - RNA, 19 nt, Artificial Sequence
  Description of Artificial Sequence: Synthetic oligonucleotide
aaaacaacacugguuuugu

SEQ ID NO: 2510877 - RNA, 19 nt, Artificial Sequence
  Description of Artificial Sequence: Synthetic oligonucleotide
uugcauuaauauuccaaca

SEQ ID NO: 2510878 - RNA, 19 nt, Artificial Sequence
  Description of Artificial Sequence: Synthetic oligonucleotide
uacaaacguaugauuacac

SEQ ID NO: 2510879 - RNA, 19 nt, Artificial Sequence
  Description of Artificial Sequence: Synthetic oligonucleotide
cagacucucuuaaaagagg

SEQ ID NO: 2510880 - RNA, 19 nt, Artificial Sequence
  Description of Artificial Sequence: Synthetic oligonucleotide
caacugugacauuucauag

SEQ ID NO: 2510881 - RNA, 19 nt, Artificial Sequence
  Description of Artificial Sequence: Synthetic oligonucleotide
caucaacccaaaauuuugc

SEQ ID NO: 2510882 - RNA, 19 nt, Artificial Sequence
  Description of Artificial Sequence: Synthetic oligonucleotide
uaucaucaacccaaaauuu

SEQ ID NO: 2510883 - RNA, 19 nt, Artificial Sequence
  Description of Artificial Sequence: Synthetic oligonucleotide
uggcuauaagaaucgaaca

SEQ ID NO: 2510884 - RNA, 19 nt, Artificial Sequence
  Description of Artificial Sequence: Synthetic oligonucleotide
ggcuauaagaaucgaacag

SEQ ID NO: 2510885 - RNA, 19 nt, Artificial Sequence
  Description of Artificial Sequence: Synthetic oligonucleotide
uaagaauggcuauaagaau

SEQ ID NO: 2510886 - RNA, 19 nt, Artificial Sequence
  Description of Artificial Sequence: Synthetic oligonucleotide
agugaagacauuaggaaga

SEQ ID NO: 2510887 - RNA, 19 nt, Artificial Sequence
  Description of Artificial Sequence: Synthetic oligonucleotide
ucucucacuggcuuggugu

SEQ ID NO: 2510888 - RNA, 19 nt, Artificial Sequence
  Description of Artificial Sequence: Synthetic oligonucleotide
ugauaacugccucacucca

SEQ ID NO: 2510889 - RNA, 19 nt, Artificial Sequence
  Description of Artificial Sequence: Synthetic oligonucleotide
cauagaaaacagacuucgg

SEQ ID NO: 2510890 - RNA, 19 nt, Artificial Sequence
  Description of Artificial Sequence: Synthetic oligonucleotide
uuacaaacguaugauuaca

SEQ ID NO: 2510891 - RNA, 19 nt, Artificial Sequence
  Description of Artificial Sequence: Synthetic oligonucleotide
auaggaucugcuaucauca

SEQ ID NO: 2510892 - RNA, 19 nt, Artificial Sequence
  Description of Artificial Sequence: Synthetic oligonucleotide
auuacacugaagaacguca

SEQ ID NO: 2510893 - RNA, 19 nt, Artificial Sequence
  Description of Artificial Sequence: Synthetic oligonucleotide
caagguacaaacaauuuua

SEQ ID NO: 2510894 - RNA, 19 nt, Artificial Sequence
  Description of Artificial Sequence: Synthetic oligonucleotide
uuguaagcuguaaacuccu

SEQ ID NO: 2510895 - RNA, 19 nt, Artificial Sequence
  Description of Artificial Sequence: Synthetic oligonucleotide
acaaacguaugauuacacu

SEQ ID NO: 2510896 - RNA, 19 nt, Artificial Sequence
  Description of Artificial Sequence: Synthetic oligonucleotide
uucuuguaagcuguaaacu

SEQ ID NO: 2510897 - RNA, 19 nt, Artificial Sequence
  Description of Artificial Sequence: Synthetic oligonucleotide
auggcagaggcaauuacac

SEQ ID NO: 2510898 - RNA, 19 nt, Artificial Sequence
  Description of Artificial Sequence: Synthetic oligonucleotide
acagacuucggcuuguaaa

SEQ ID NO: 2510899 - RNA, 19 nt, Artificial Sequence
  Description of Artificial Sequence: Synthetic oligonucleotide
aauaacacuuacaacuaua

SEQ ID NO: 2510900 - RNA, 19 nt, Artificial Sequence
  Description of Artificial Sequence: Synthetic oligonucleotide
acaccaauacucccaagug

SEQ ID NO: 2510901 - RNA, 19 nt, Artificial Sequence
  Description of Artificial Sequence: Synthetic oligonucleotide
guuugcaagguacaaacaa

SEQ ID NO: 2510902 - RNA, 19 nt, Artificial Sequence
  Description of Artificial Sequence: Synthetic oligonucleotide
gaaucucucacuggcuugg

SEQ ID NO: 2510903 - RNA, 19 nt, Artificial Sequence
  Description of Artificial Sequence: Synthetic oligonucleotide
auaugguuugguucauaag

SEQ ID NO: 2510904 - RNA, 19 nt, Artificial Sequence
  Description of Artificial Sequence: Synthetic oligonucleotide
ucaacccaaaauuuugcau

SEQ ID NO: 2510905 - RNA, 19 nt, Artificial Sequence
  Description of Artificial Sequence: Synthetic oligonucleotide
gaggaauaacacuuacaac

SEQ ID NO: 2510906 - RNA, 19 nt, Artificial Sequence
  Description of Artificial Sequence: Synthetic oligonucleotide
acgucaacaacugugacau

SEQ ID NO: 2510907 - RNA, 19 nt, Artificial Sequence
  Description of Artificial Sequence: Synthetic oligonucleotide
acagacucucuuaaaagag

SEQ ID NO: 2510908 - RNA, 19 nt, Artificial Sequence
  Description of Artificial Sequence: Synthetic oligonucleotide
acauuaggaagaguggcag

SEQ ID NO: 2510909 - RNA, 19 nt, Artificial Sequence
  Description of Artificial Sequence: Synthetic oligonucleotide
aacguaugauuacacugaa

SEQ ID NO: 2510910 - RNA, 19 nt, Artificial Sequence
  Description of Artificial Sequence: Synthetic oligonucleotide
agaagugcuguucuuguaa

SEQ ID NO: 2510911 - RNA, 19 nt, Artificial Sequence
  Description of Artificial Sequence: Synthetic oligonucleotide
guacaaauuacagaauauc

SEQ ID NO: 2510912 - RNA, 19 nt, Artificial Sequence
  Description of Artificial Sequence: Synthetic oligonucleotide
uggcaaauauauuucggau

SEQ ID NO: 2510913 - RNA, 19 nt, Artificial Sequence
  Description of Artificial Sequence: Synthetic oligonucleotide
ggaaguguauuuuccaaug

SEQ ID NO: 2510914 - RNA, 19 nt, Artificial Sequence
  Description of Artificial Sequence: Synthetic oligonucleotide
auuauguguuggcuuaaga

SEQ ID NO: 2510915 - RNA, 19 nt, Artificial Sequence
  Description of Artificial Sequence: Synthetic oligonucleotide
caauuacaccaauacuccc

SEQ ID NO: 2510916 - RNA, 19 nt, Artificial Sequence
  Description of Artificial Sequence: Synthetic oligonucleotide
aucaacccaaaauuuugca

SEQ ID NO: 2510917 - RNA, 19 nt, Artificial Sequence
  Description of Artificial Sequence: Synthetic oligonucleotide
acacugaagaacgucaaca

SEQ ID NO: 2510918 - RNA, 19 nt, Artificial Sequence
  Description of Artificial Sequence: Synthetic oligonucleotide
ugaaucucucacuggcuug

SEQ ID NO: 2510919 - RNA, 19 nt, Artificial Sequence
  Description of Artificial Sequence: Synthetic oligonucleotide
uauauguuacuagcaaguc

SEQ ID NO: 2510920 - RNA, 19 nt, Artificial Sequence
  Description of Artificial Sequence: Synthetic oligonucleotide
gguuuuguagggauaaaag

SEQ ID NO: 2510921 - RNA, 19 nt, Artificial Sequence
  Description of Artificial Sequence: Synthetic oligonucleotide
uguuggcuuaagauccacc

SEQ ID NO: 2510922 - RNA, 19 nt, Artificial Sequence
  Description of Artificial Sequence: Synthetic oligonucleotide
auuucauagaaaacagacu

SEQ ID NO: 2510923 - RNA, 19 nt, Artificial Sequence
  Description of Artificial Sequence: Synthetic oligonucleotide
acuauaagaauggcuauaa

SEQ ID NO: 2510924 - RNA, 19 nt, Artificial Sequence
  Description of Artificial Sequence: Synthetic oligonucleotide
gaaguguauuuuccaauga

SEQ ID NO: 2510925 - RNA, 19 nt, Artificial Sequence
  Description of Artificial Sequence: Synthetic oligonucleotide
agucugaaucucucacugg

SEQ ID NO: 2510926 - RNA, 19 nt, Artificial Sequence
  Description of Artificial Sequence: Synthetic oligonucleotide
aguggcagcccacagucug

SEQ ID NO: 2510927 - RNA, 19 nt, Artificial Sequence
  Description of Artificial Sequence: Synthetic oligonucleotide
cugaagaacgucaacaacu

SEQ ID NO: 2510928 - RNA, 19 nt, Artificial Sequence
  Description of Artificial Sequence: Synthetic oligonucleotide
uauaagaaucgaacagaua

SEQ ID NO: 2510929 - RNA, 19 nt, Artificial Sequence
  Description of Artificial Sequence: Synthetic oligonucleotide
auuacaccaauacucccaa

SEQ ID NO: 2510930 - RNA, 19 nt, Artificial Sequence
  Description of Artificial Sequence: Synthetic oligonucleotide
auacaaaggcacuuugaaa

SEQ ID NO: 2510931 - RNA, 19 nt, Artificial Sequence
  Description of Artificial Sequence: Synthetic oligonucleotide
gaugguacauuacugugcu

SEQ ID NO: 2510932 - RNA, 19 nt, Artificial Sequence
  Description of Artificial Sequence: Synthetic oligonucleotide
uucauaaguuugcaaggua

SEQ ID NO: 2510933 - RNA, 19 nt, Artificial Sequence
  Description of Artificial Sequence: Synthetic oligonucleotide
gaucugcuaucaucaaccc

SEQ ID NO: 2510934 - RNA, 19 nt, Artificial Sequence
  Description of Artificial Sequence: Synthetic oligonucleotide
uuacacugaagaacgucaa

SEQ ID NO: 2510935 - RNA, 19 nt, Artificial Sequence
  Description of Artificial Sequence: Synthetic oligonucleotide
agguacaaacaauuuuaca

SEQ ID NO: 2510936 - RNA, 19 nt, Artificial Sequence
  Description of Artificial Sequence: Synthetic oligonucleotide
aagaguggcagcccacagu

SEQ ID NO: 2510937 - RNA, 19 nt, Artificial Sequence
  Description of Artificial Sequence: Synthetic oligonucleotide
uuucggauacaaaggcacu

SEQ ID NO: 2510938 - RNA, 19 nt, Artificial Sequence
  Description of Artificial Sequence: Synthetic oligonucleotide
ucugaaucucucacuggcu

SEQ ID NO: 2510939 - RNA, 19 nt, Artificial Sequence
  Description of Artificial Sequence: Synthetic oligonucleotide
aauggcuauaagaaucgaa

SEQ ID NO: 2510940 - RNA, 19 nt, Artificial Sequence
  Description of Artificial Sequence: Synthetic oligonucleotide
cagucugaaucucucacug

SEQ ID NO: 2510941 - RNA, 19 nt, Artificial Sequence
  Description of Artificial Sequence: Synthetic oligonucleotide
agaacagagcguccagaag

SEQ ID NO: 2510942 - RNA, 19 nt, Artificial Sequence
  Description of Artificial Sequence: Synthetic oligonucleotide
uccuuguaacuguugcacc

SEQ ID NO: 2510943 - RNA, 19 nt, Artificial Sequence
  Description of Artificial Sequence: Synthetic oligonucleotide
cuauaagaauggcuauaag

SEQ ID NO: 2510944 - RNA, 19 nt, Artificial Sequence
  Description of Artificial Sequence: Synthetic oligonucleotide
agugcuguucuuguaagcu

SEQ ID NO: 2510945 - RNA, 19 nt, Artificial Sequence
  Description of Artificial Sequence: Synthetic oligonucleotide
acauacauaugaccuuuga

SEQ ID NO: 2510946 - RNA, 19 nt, Artificial Sequence
  Description of Artificial Sequence: Synthetic oligonucleotide
gauuacacugaagaacguc

SEQ ID NO: 2510947 - RNA, 19 nt, Artificial Sequence
  Description of Artificial Sequence: Synthetic oligonucleotide
acauaaacaucagaacaga

SEQ ID NO: 2510948 - RNA, 19 nt, Artificial Sequence
  Description of Artificial Sequence: Synthetic oligonucleotide
uaaaagcagugguuuccag

SEQ ID NO: 2510949 - RNA, 19 nt, Artificial Sequence
  Description of Artificial Sequence: Synthetic oligonucleotide
ccuggcgucagcaucaggg

SEQ ID NO: 2510950 - RNA, 19 nt, Artificial Sequence
  Description of Artificial Sequence: Synthetic oligonucleotide
ggcagaggcaauuacacca

SEQ ID NO: 2510951 - RNA, 19 nt, Artificial Sequence
  Description of Artificial Sequence: Synthetic oligonucleotide
guaacuguugcacccucug

SEQ ID NO: 2510952 - RNA, 19 nt, Artificial Sequence
  Description of Artificial Sequence: Synthetic oligonucleotide
aaacccaauaugguuuggu

SEQ ID NO: 2510953 - RNA, 19 nt, Artificial Sequence
  Description of Artificial Sequence: Synthetic oligonucleotide
uuccaacagacucucuuaa

SEQ ID NO: 2510954 - RNA, 19 nt, Artificial Sequence
  Description of Artificial Sequence: Synthetic oligonucleotide
ggucccaacauaaacauca

SEQ ID NO: 2510955 - RNA, 19 nt, Artificial Sequence
  Description of Artificial Sequence: Synthetic oligonucleotide
ugcaagguacaaacaauuu

SEQ ID NO: 2510956 - RNA, 19 nt, Artificial Sequence
  Description of Artificial Sequence: Synthetic oligonucleotide
aacuauaagaauggcuaua

SEQ ID NO: 2510957 - RNA, 19 nt, Artificial Sequence
  Description of Artificial Sequence: Synthetic oligonucleotide
cuguugcacccucugauag

SEQ ID NO: 2510958 - RNA, 19 nt, Artificial Sequence
  Description of Artificial Sequence: Synthetic oligonucleotide
uacacugaagaacgucaac

SEQ ID NO: 2510959 - RNA, 19 nt, Artificial Sequence
  Description of Artificial Sequence: Synthetic oligonucleotide
gccuguguaaaauauuaug

SEQ ID NO: 2510960 - RNA, 19 nt, Artificial Sequence
  Description of Artificial Sequence: Synthetic oligonucleotide
uaaguuugcaagguacaaa

SEQ ID NO: 2510961 - RNA, 19 nt, Artificial Sequence
  Description of Artificial Sequence: Synthetic oligonucleotide
cauuaggaagaguggcagc

SEQ ID NO: 2510962 - RNA, 19 nt, Artificial Sequence
  Description of Artificial Sequence: Synthetic oligonucleotide
uggcuuggugugaugauaa

SEQ ID NO: 2510963 - RNA, 19 nt, Artificial Sequence
  Description of Artificial Sequence: Synthetic oligonucleotide
gaguucuuugcauuaauau

SEQ ID NO: 2510964 - RNA, 19 nt, Artificial Sequence
  Description of Artificial Sequence: Synthetic oligonucleotide
gcaauuacaccaauacucc

SEQ ID NO: 2510965 - RNA, 19 nt, Artificial Sequence
  Description of Artificial Sequence: Synthetic oligonucleotide
uguaacuguugcacccucu

SEQ ID NO: 2510966 - RNA, 19 nt, Artificial Sequence
  Description of Artificial Sequence: Synthetic oligonucleotide
aaaagaggaauaacacuua

SEQ ID NO: 2510967 - RNA, 19 nt, Artificial Sequence
  Description of Artificial Sequence: Synthetic oligonucleotide
agaacgucaacaacuguga

SEQ ID NO: 2510968 - RNA, 19 nt, Artificial Sequence
  Description of Artificial Sequence: Synthetic oligonucleotide
cuuaagauccaccuggcgu

SEQ ID NO: 2510969 - RNA, 19 nt, Artificial Sequence
  Description of Artificial Sequence: Synthetic oligonucleotide
ugguuuuguagggauaaaa

SEQ ID NO: 2510970 - RNA, 19 nt, Artificial Sequence
  Description of Artificial Sequence: Synthetic oligonucleotide
aguguaucugcuagaaugu

SEQ ID NO: 2510971 - RNA, 19 nt, Artificial Sequence
  Description of Artificial Sequence: Synthetic oligonucleotide
ucccaacauaaacaucaga

SEQ ID NO: 2510972 - RNA, 19 nt, Artificial Sequence
  Description of Artificial Sequence: Synthetic oligonucleotide
cuaucaucaacccaaaauu

SEQ ID NO: 2510973 - RNA, 19 nt, Artificial Sequence
  Description of Artificial Sequence: Synthetic oligonucleotide
cuccuuguaacuguugcac

SEQ ID NO: 2510974 - RNA, 19 nt, Artificial Sequence
  Description of Artificial Sequence: Synthetic oligonucleotide
guaugauuacacugaagaa

SEQ ID NO: 2510975 - RNA, 19 nt, Artificial Sequence
  Description of Artificial Sequence: Synthetic oligonucleotide
uguugcacccucugauagc

SEQ ID NO: 2510976 - RNA, 19 nt, Artificial Sequence
  Description of Artificial Sequence: Synthetic oligonucleotide
ccaacauaaacaucagaac

SEQ ID NO: 2510977 - RNA, 19 nt, Artificial Sequence
  Description of Artificial Sequence: Synthetic oligonucleotide
gauggcagaggcaauuaca

SEQ ID NO: 2510978 - RNA, 19 nt, Artificial Sequence
  Description of Artificial Sequence: Synthetic oligonucleotide
cguaugauuacacugaaga

SEQ ID NO: 2510979 - RNA, 19 nt, Artificial Sequence
  Description of Artificial Sequence: Synthetic oligonucleotide
aacacugguuuuguaggga

SEQ ID NO: 2510980 - RNA, 19 nt, Artificial Sequence
  Description of Artificial Sequence: Synthetic oligonucleotide
uaacuguugcacccucuga

SEQ ID NO: 2510981 - RNA, 19 nt, Artificial Sequence
  Description of Artificial Sequence: Synthetic oligonucleotide
uaaacuccuuguaacuguu

SEQ ID NO: 2510982 - RNA, 19 nt, Artificial Sequence
  Description of Artificial Sequence: Synthetic oligonucleotide
gauaacugccucacuccag

SEQ ID NO: 2510983 - RNA, 19 nt, Artificial Sequence
  Description of Artificial Sequence: Synthetic oligonucleotide
agacucucuuaaaagagga

SEQ ID NO: 2510984 - RNA, 19 nt, Artificial Sequence
  Description of Artificial Sequence: Synthetic oligonucleotide
gcaagucuuauuuuguaca

SEQ ID NO: 2510985 - RNA, 19 nt, Artificial Sequence
  Description of Artificial Sequence: Synthetic oligonucleotide
uacucccaaguguaucugc

SEQ ID NO: 2510986 - RNA, 19 nt, Artificial Sequence
  Description of Artificial Sequence: Synthetic oligonucleotide
ugauuacacugaagaacgu

SEQ ID NO: 2510987 - RNA, 19 nt, Artificial Sequence
  Description of Artificial Sequence: Synthetic oligonucleotide
uguguuggcuuaagaucca

SEQ ID NO: 2510988 - RNA, 19 nt, Artificial Sequence
  Description of Artificial Sequence: Synthetic oligonucleotide
uucaaggucccaacauaaa

SEQ ID NO: 2510989 - RNA, 19 nt, Artificial Sequence
  Description of Artificial Sequence: Synthetic oligonucleotide
uaaaaucugucugcugggu

SEQ ID NO: 2510990 - RNA, 19 nt, Artificial Sequence
  Description of Artificial Sequence: Synthetic oligonucleotide
gacauuaggaagaguggca

SEQ ID NO: 2510991 - RNA, 19 nt, Artificial Sequence
  Description of Artificial Sequence: Synthetic oligonucleotide
auaugaccuuugaugguac

SEQ ID NO: 2510992 - RNA, 19 nt, Artificial Sequence
  Description of Artificial Sequence: Synthetic oligonucleotide
acugguuuuguagggauaa

SEQ ID NO: 2510993 - RNA, 19 nt, Artificial Sequence
  Description of Artificial Sequence: Synthetic oligonucleotide
cuggcgucagcaucagggg

SEQ ID NO: 2510994 - RNA, 19 nt, Artificial Sequence
  Description of Artificial Sequence: Synthetic oligonucleotide
ccuuguaacuguugcaccc

SEQ ID NO: 2510995 - RNA, 19 nt, Artificial Sequence
  Description of Artificial Sequence: Synthetic oligonucleotide
aaacaucagaacagagcgu

SEQ ID NO: 2510996 - RNA, 19 nt, Artificial Sequence
  Description of Artificial Sequence: Synthetic oligonucleotide
gugaugauaacugccucac

SEQ ID NO: 2510997 - RNA, 19 nt, Artificial Sequence
  Description of Artificial Sequence: Synthetic oligonucleotide
cuaggagcuucaagguccc

SEQ ID NO: 2510998 - RNA, 19 nt, Artificial Sequence
  Description of Artificial Sequence: Synthetic oligonucleotide
gugaagacauuaggaagag

SEQ ID NO: 2510999 - RNA, 19 nt, Artificial Sequence
  Description of Artificial Sequence: Synthetic oligonucleotide
gguuugguucauaaguuug

SEQ ID NO: 2511000 - RNA, 19 nt, Artificial Sequence
  Description of Artificial Sequence: Synthetic oligonucleotide
aacauacauaugaccuuug

SEQ ID NO: 2511001 - RNA, 19 nt, Artificial Sequence
  Description of Artificial Sequence: Synthetic oligonucleotide
gaacgucaacaacugugac

SEQ ID NO: 2511002 - RNA, 19 nt, Artificial Sequence
  Description of Artificial Sequence: Synthetic oligonucleotide
gaacagauaggaucugcua

SEQ ID NO: 2511003 - RNA, 19 nt, Artificial Sequence
  Description of Artificial Sequence: Synthetic oligonucleotide
gugacauuucauagaaaac

SEQ ID NO: 2511004 - RNA, 19 nt, Artificial Sequence
  Description of Artificial Sequence: Synthetic oligonucleotide
gcuauaagaaucgaacaga

SEQ ID NO: 2511005 - RNA, 19 nt, Artificial Sequence
  Description of Artificial Sequence: Synthetic oligonucleotide
aucugcuaucaucaaccca

SEQ ID NO: 2511006 - RNA, 19 nt, Artificial Sequence
  Description of Artificial Sequence: Synthetic oligonucleotide
caagucuuauuuuguacaa

SEQ ID NO: 2511007 - RNA, 19 nt, Artificial Sequence
  Description of Artificial Sequence: Synthetic oligonucleotide
ugaugauaacugccucacu

SEQ ID NO: 2511008 - RNA, 19 nt, Artificial Sequence
  Description of Artificial Sequence: Synthetic oligonucleotide
guaaacuccuuguaacugu

SEQ ID NO: 2511009 - RNA, 19 nt, Artificial Sequence
  Description of Artificial Sequence: Synthetic oligonucleotide
cagacuucggcuuguaaaa

SEQ ID NO: 2511010 - RNA, 19 nt, Artificial Sequence
  Description of Artificial Sequence: Synthetic oligonucleotide
cuauaagaaucgaacagau

SEQ ID NO: 2511011 - RNA, 19 nt, Artificial Sequence
  Description of Artificial Sequence: Synthetic oligonucleotide
accuuugaugguacauuac

SEQ ID NO: 2511012 - RNA, 19 nt, Artificial Sequence
  Description of Artificial Sequence: Synthetic oligonucleotide
uguuacuagcaagucuuau

SEQ ID NO: 2511013 - RNA, 19 nt, Artificial Sequence
  Description of Artificial Sequence: Synthetic oligonucleotide
aucugcuagaauguguaaa

SEQ ID NO: 2511014 - RNA, 19 nt, Artificial Sequence
  Description of Artificial Sequence: Synthetic oligonucleotide
uuacaccaauacucccaag

SEQ ID NO: 2511015 - RNA, 19 nt, Artificial Sequence
  Description of Artificial Sequence: Synthetic oligonucleotide
acagagcguccagaagugc

SEQ ID NO: 2511016 - RNA, 19 nt, Artificial Sequence
  Description of Artificial Sequence: Synthetic oligonucleotide
uccaacagacucucuuaaa

SEQ ID NO: 2511017 - RNA, 19 nt, Artificial Sequence
  Description of Artificial Sequence: Synthetic oligonucleotide
aucaucaacccaaaauuuu

SEQ ID NO: 2511018 - RNA, 19 nt, Artificial Sequence
  Description of Artificial Sequence: Synthetic oligonucleotide
uuguaacuguugcacccuc

SEQ ID NO: 2511019 - RNA, 19 nt, Artificial Sequence
  Description of Artificial Sequence: Synthetic oligonucleotide
uaucugcuagaauguguaa

SEQ ID NO: 2511020 - RNA, 19 nt, Artificial Sequence
  Description of Artificial Sequence: Synthetic oligonucleotide
gguacauuacugugcuggc

SEQ ID NO: 2511021 - RNA, 19 nt, Artificial Sequence
  Description of Artificial Sequence: Synthetic oligonucleotide
ggcaaauauauuucggaua

SEQ ID NO: 2511022 - RNA, 19 nt, Artificial Sequence
  Description of Artificial Sequence: Synthetic oligonucleotide
ugaccuuugaugguacauu

SEQ ID NO: 2511023 - RNA, 19 nt, Artificial Sequence
  Description of Artificial Sequence: Synthetic oligonucleotide
uuccaaugagggaggaguu

SEQ ID NO: 2511024 - RNA, 19 nt, Artificial Sequence
  Description of Artificial Sequence: Synthetic oligonucleotide
cacugaagaacgucaacaa

SEQ ID NO: 2511025 - RNA, 19 nt, Artificial Sequence
  Description of Artificial Sequence: Synthetic oligonucleotide
caauacucccaaguguauc

SEQ ID NO: 2511026 - RNA, 19 nt, Artificial Sequence
  Description of Artificial Sequence: Synthetic oligonucleotide
cccaauaugguuugguuca

SEQ ID NO: 2511027 - RNA, 19 nt, Artificial Sequence
  Description of Artificial Sequence: Synthetic oligonucleotide
gcuuuagugaagacauuag

SEQ ID NO: 2511028 - RNA, 19 nt, Artificial Sequence
  Description of Artificial Sequence: Synthetic oligonucleotide
uucggauacaaaggcacuu

SEQ ID NO: 2511029 - RNA, 19 nt, Artificial Sequence
  Description of Artificial Sequence: Synthetic oligonucleotide
ggcaacuaggagcuucaag

SEQ ID NO: 2511030 - RNA, 19 nt, Artificial Sequence
  Description of Artificial Sequence: Synthetic oligonucleotide
acccucugauagcacuggg

SEQ ID NO: 2511031 - RNA, 19 nt, Artificial Sequence
  Description of Artificial Sequence: Synthetic oligonucleotide
gcuaucaucaacccaaaau

SEQ ID NO: 2511032 - RNA, 19 nt, Artificial Sequence
  Description of Artificial Sequence: Synthetic oligonucleotide
ugcuaucaucaacccaaaa

SEQ ID NO: 2511033 - RNA, 19 nt, Artificial Sequence
  Description of Artificial Sequence: Synthetic oligonucleotide
caucaggggcaacuaggag

SEQ ID NO: 2511034 - RNA, 19 nt, Artificial Sequence
  Description of Artificial Sequence: Synthetic oligonucleotide
ggauaaaagcagugguuuc

SEQ ID NO: 2511035 - RNA, 19 nt, Artificial Sequence
  Description of Artificial Sequence: Synthetic oligonucleotide
gaauaacacuuacaacuau

SEQ ID NO: 2511036 - RNA, 19 nt, Artificial Sequence
  Description of Artificial Sequence: Synthetic oligonucleotide
cauaugaccuuugauggua

SEQ ID NO: 2511037 - RNA, 19 nt, Artificial Sequence
  Description of Artificial Sequence: Synthetic oligonucleotide
guguaaaauauuauguguu

SEQ ID NO: 2511038 - RNA, 19 nt, Artificial Sequence
  Description of Artificial Sequence: Synthetic oligonucleotide
auacaccuuguaaaaucug

SEQ ID NO: 2511039 - RNA, 19 nt, Artificial Sequence
  Description of Artificial Sequence: Synthetic oligonucleotide
uguaagcuguaaacuccuu

SEQ ID NO: 2511040 - RNA, 19 nt, Artificial Sequence
  Description of Artificial Sequence: Synthetic oligonucleotide
uaagauccaccuggcguca

SEQ ID NO: 2511041 - RNA, 19 nt, Artificial Sequence
  Description of Artificial Sequence: Synthetic oligonucleotide
agggaggaguucuuugcau

SEQ ID NO: 2511042 - RNA, 19 nt, Artificial Sequence
  Description of Artificial Sequence: Synthetic oligonucleotide
aguuugcaagguacaaaca

SEQ ID NO: 2511043 - RNA, 19 nt, Artificial Sequence
  Description of Artificial Sequence: Synthetic oligonucleotide
gcagcccacagucugaauc

SEQ ID NO: 2511044 - RNA, 19 nt, Artificial Sequence
  Description of Artificial Sequence: Synthetic oligonucleotide
augaccuuugaugguacau

SEQ ID NO: 2511045 - RNA, 19 nt, Artificial Sequence
  Description of Artificial Sequence: Synthetic oligonucleotide
cccaaaauuuugcaucaug

SEQ ID NO: 2511046 - RNA, 19 nt, Artificial Sequence
  Description of Artificial Sequence: Synthetic oligonucleotide
ucggauacaaaggcacuuu

SEQ ID NO: 2511047 - RNA, 19 nt, Artificial Sequence
  Description of Artificial Sequence: Synthetic oligonucleotide
guguaucugcuagaaugug

SEQ ID NO: 2511048 - RNA, 19 nt, Artificial Sequence
  Description of Artificial Sequence: Synthetic oligonucleotide
cacuuugaaaacccaauau

SEQ ID NO: 2511049 - RNA, 19 nt, Artificial Sequence
  Description of Artificial Sequence: Synthetic oligonucleotide
uaggaucugcuaucaucaa

SEQ ID NO: 2511050 - RNA, 19 nt, Artificial Sequence
  Description of Artificial Sequence: Synthetic oligonucleotide
acauuacugugcuggcaaa

SEQ ID NO: 2511051 - RNA, 19 nt, Artificial Sequence
  Description of Artificial Sequence: Synthetic oligonucleotide
guucauaaguuugcaaggu

SEQ ID NO: 2511052 - RNA, 19 nt, Artificial Sequence
  Description of Artificial Sequence: Synthetic oligonucleotide
acguaugauuacacugaag

SEQ ID NO: 2511053 - RNA, 19 nt, Artificial Sequence
  Description of Artificial Sequence: Synthetic oligonucleotide
caucagaacagagcgucca

SEQ ID NO: 2511054 - RNA, 19 nt, Artificial Sequence
  Description of Artificial Sequence: Synthetic oligonucleotide
agauaggaucugcuaucau

SEQ ID NO: 2511055 - RNA, 19 nt, Artificial Sequence
  Description of Artificial Sequence: Synthetic oligonucleotide
gaauggcuauaagaaucga

SEQ ID NO: 2511056 - RNA, 19 nt, Artificial Sequence
  Description of Artificial Sequence: Synthetic oligonucleotide
agaaucgaacagauaggau

SEQ ID NO: 2511057 - RNA, 19 nt, Artificial Sequence
  Description of Artificial Sequence: Synthetic oligonucleotide
auauuauguguuggcuuaa

SEQ ID NO: 2511058 - RNA, 19 nt, Artificial Sequence
  Description of Artificial Sequence: Synthetic oligonucleotide
cacccucugauagcacugg

SEQ ID NO: 2511059 - RNA, 19 nt, Artificial Sequence
  Description of Artificial Sequence: Synthetic oligonucleotide
auagcacuggggaagugua

SEQ ID NO: 2511060 - RNA, 19 nt, Artificial Sequence
  Description of Artificial Sequence: Synthetic oligonucleotide
aggucccaacauaaacauc

SEQ ID NO: 2511061 - RNA, 19 nt, Artificial Sequence
  Description of Artificial Sequence: Synthetic oligonucleotide
guacauuacugugcuggca

SEQ ID NO: 2511062 - RNA, 19 nt, Artificial Sequence
  Description of Artificial Sequence: Synthetic oligonucleotide
aagauccaccuggcgucag

SEQ ID NO: 2511063 - RNA, 19 nt, Artificial Sequence
  Description of Artificial Sequence: Synthetic oligonucleotide
agcacuggggaaguguauu

SEQ ID NO: 2511064 - RNA, 19 nt, Artificial Sequence
  Description of Artificial Sequence: Synthetic oligonucleotide
agaggcaauuacaccaaua

SEQ ID NO: 2511065 - RNA, 19 nt, Artificial Sequence
  Description of Artificial Sequence: Synthetic oligonucleotide
caccaauacucccaagugu

SEQ ID NO: 2511066 - RNA, 19 nt, Artificial Sequence
  Description of Artificial Sequence: Synthetic oligonucleotide
ucucacuggcuugguguga

SEQ ID NO: 2511067 - RNA, 19 nt, Artificial Sequence
  Description of Artificial Sequence: Synthetic oligonucleotide
ugauagcacuggggaagug

SEQ ID NO: 2511068 - RNA, 19 nt, Artificial Sequence
  Description of Artificial Sequence: Synthetic oligonucleotide
agcccacagucugaaucuc

SEQ ID NO: 2511069 - RNA, 19 nt, Artificial Sequence
  Description of Artificial Sequence: Synthetic oligonucleotide
gaggaguucuuugcauuaa

SEQ ID NO: 2511070 - RNA, 19 nt, Artificial Sequence
  Description of Artificial Sequence: Synthetic oligonucleotide
gcaagguacaaacaauuuu

SEQ ID NO: 2511071 - RNA, 19 nt, Artificial Sequence
  Description of Artificial Sequence: Synthetic oligonucleotide
ggaggaguucuuugcauua

SEQ ID NO: 2511072 - RNA, 19 nt, Artificial Sequence
  Description of Artificial Sequence: Synthetic oligonucleotide
aaacagacuucggcuugua

SEQ ID NO: 2511073 - RNA, 19 nt, Artificial Sequence
  Description of Artificial Sequence: Synthetic oligonucleotide
ggcuuaagauccaccuggc

SEQ ID NO: 2511074 - RNA, 19 nt, Artificial Sequence
  Description of Artificial Sequence: Synthetic oligonucleotide
accuggcgucagcaucagg

SEQ ID NO: 2511075 - RNA, 19 nt, Artificial Sequence
  Description of Artificial Sequence: Synthetic oligonucleotide
ccuuugaugguacauuacu

SEQ ID NO: 2511076 - RNA, 19 nt, Artificial Sequence
  Description of Artificial Sequence: Synthetic oligonucleotide
guguuggcuuaagauccac

SEQ ID NO: 2511077 - RNA, 19 nt, Artificial Sequence
  Description of Artificial Sequence: Synthetic oligonucleotide
gggaaguguauuuuccaau

SEQ ID NO: 2511078 - RNA, 19 nt, Artificial Sequence
  Description of Artificial Sequence: Synthetic oligonucleotide
cuuguaacuguugcacccu

SEQ ID NO: 2511079 - RNA, 19 nt, Artificial Sequence
  Description of Artificial Sequence: Synthetic oligonucleotide
cacuccagccuguguaaaa

SEQ ID NO: 2511080 - RNA, 19 nt, Artificial Sequence
  Description of Artificial Sequence: Synthetic oligonucleotide
auauuccaacagacucucu

SEQ ID NO: 2511081 - RNA, 19 nt, Artificial Sequence
  Description of Artificial Sequence: Synthetic oligonucleotide
ggaagaguggcagcccaca

SEQ ID NO: 2511082 - RNA, 19 nt, Artificial Sequence
  Description of Artificial Sequence: Synthetic oligonucleotide
cacuuacaacuauaagaau

SEQ ID NO: 2511083 - RNA, 19 nt, Artificial Sequence
  Description of Artificial Sequence: Synthetic oligonucleotide
cagaagugcuguucuugua

SEQ ID NO: 2511084 - RNA, 19 nt, Artificial Sequence
  Description of Artificial Sequence: Synthetic oligonucleotide
cugcuaucaucaacccaaa

SEQ ID NO: 2511085 - RNA, 19 nt, Artificial Sequence
  Description of Artificial Sequence: Synthetic oligonucleotide
cacugguuuuguagggaua

SEQ ID NO: 2511086 - RNA, 19 nt, Artificial Sequence
  Description of Artificial Sequence: Synthetic oligonucleotide
cuccagccuguguaaaaua

SEQ ID NO: 2511087 - RNA, 19 nt, Artificial Sequence
  Description of Artificial Sequence: Synthetic oligonucleotide
auguuacuagcaagucuua

SEQ ID NO: 2511088 - RNA, 19 nt, Artificial Sequence
  Description of Artificial Sequence: Synthetic oligonucleotide
cucccaaguguaucugcua

SEQ ID NO: 2511089 - RNA, 19 nt, Artificial Sequence
  Description of Artificial Sequence: Synthetic oligonucleotide
acccaaaauuuugcaucau

SEQ ID NO: 2511090 - RNA, 19 nt, Artificial Sequence
  Description of Artificial Sequence: Synthetic oligonucleotide
ggcacuuugaaaacccaau

SEQ ID NO: 2511091 - RNA, 19 nt, Artificial Sequence
  Description of Artificial Sequence: Synthetic oligonucleotide
ccaccuggcgucagcauca

SEQ ID NO: 2511092 - RNA, 19 nt, Artificial Sequence
  Description of Artificial Sequence: Synthetic oligonucleotide
agcguccagaagugcuguu

SEQ ID NO: 2511093 - RNA, 19 nt, Artificial Sequence
  Description of Artificial Sequence: Synthetic oligonucleotide
caaguguaucugcuagaau

SEQ ID NO: 2511094 - RNA, 19 nt, Artificial Sequence
  Description of Artificial Sequence: Synthetic oligonucleotide
caauaugguuugguucaua

SEQ ID NO: 2511095 - RNA, 19 nt, Artificial Sequence
  Description of Artificial Sequence: Synthetic oligonucleotide
gagcguccagaagugcugu

SEQ ID NO: 2511096 - RNA, 19 nt, Artificial Sequence
  Description of Artificial Sequence: Synthetic oligonucleotide
cauuacugugcuggcaaau

SEQ ID NO: 2511097 - RNA, 19 nt, Artificial Sequence
  Description of Artificial Sequence: Synthetic oligonucleotide
ggggcaacuaggagcuuca

SEQ ID NO: 2511098 - RNA, 19 nt, Artificial Sequence
  Description of Artificial Sequence: Synthetic oligonucleotide
cccaaguguaucugcuaga

SEQ ID NO: 2511099 - RNA, 19 nt, Artificial Sequence
  Description of Artificial Sequence: Synthetic oligonucleotide
cugauagcacuggggaagu

SEQ ID NO: 2511100 - RNA, 19 nt, Artificial Sequence
  Description of Artificial Sequence: Synthetic oligonucleotide
ccagaagugcuguucuugu

SEQ ID NO: 2511101 - RNA, 19 nt, Artificial Sequence
  Description of Artificial Sequence: Synthetic oligonucleotide
gggaggaguucuuugcauu

SEQ ID NO: 2511102 - RNA, 19 nt, Artificial Sequence
  Description of Artificial Sequence: Synthetic oligonucleotide
caccuggcgucagcaucag

SEQ ID NO: 2511103 - RNA, 19 nt, Artificial Sequence
  Description of Artificial Sequence: Synthetic oligonucleotide
cgaacagauaggaucugcu

SEQ ID NO: 2511104 - RNA, 19 nt, Artificial Sequence
  Description of Artificial Sequence: Synthetic oligonucleotide
cucacuggcuuggugugau

SEQ ID NO: 2511105 - RNA, 19 nt, Artificial Sequence
  Description of Artificial Sequence: Synthetic oligonucleotide
cagaggcaauuacaccaau

SEQ ID NO: 2511106 - RNA, 19 nt, Artificial Sequence
  Description of Artificial Sequence: Synthetic oligonucleotide
gaguggcagcccacagucu

SEQ ID NO: 2511107 - RNA, 19 nt, Artificial Sequence
  Description of Artificial Sequence: Synthetic oligonucleotide
cacuggggaaguguauuuu

SEQ ID NO: 2511108 - RNA, 19 nt, Artificial Sequence
  Description of Artificial Sequence: Synthetic oligonucleotide
ccaauacucccaaguguau

SEQ ID NO: 2511109 - RNA, 19 nt, Artificial Sequence
  Description of Artificial Sequence: Synthetic oligonucleotide
gggcaacuaggagcuucaa

SEQ ID NO: 2511110 - RNA, 19 nt, Artificial Sequence
  Description of Artificial Sequence: Synthetic oligonucleotide
gccucacuccagccugugu

SEQ ID NO: 2511111 - RNA, 19 nt, Artificial Sequence
  Description of Artificial Sequence: Synthetic oligonucleotide
ccaauaugguuugguucau

SEQ ID NO: 2511112 - RNA, 19 nt, Artificial Sequence
  Description of Artificial Sequence: Synthetic oligonucleotide
gaaagguucauccaggcgg

SEQ ID NO: 2511113 - RNA, 19 nt, Artificial Sequence
  Description of Artificial Sequence: Synthetic oligonucleotide
aauaccagggcccagaagu

SEQ ID NO: 2511114 - RNA, 19 nt, Artificial Sequence
  Description of Artificial Sequence: Synthetic oligonucleotide
ugguauugcaucuagagag

SEQ ID NO: 2511115 - RNA, 19 nt, Artificial Sequence
  Description of Artificial Sequence: Synthetic oligonucleotide
aucaucuaggcccugaccc

SEQ ID NO: 2511116 - RNA, 19 nt, Artificial Sequence
  Description of Artificial Sequence: Synthetic oligonucleotide
uugaggaaugcacacagcg

SEQ ID NO: 2511117 - RNA, 19 nt, Artificial Sequence
  Description of Artificial Sequence: Synthetic oligonucleotide
ucugguauugcaucuagag

SEQ ID NO: 2511118 - RNA, 19 nt, Artificial Sequence
  Description of Artificial Sequence: Synthetic oligonucleotide
agacuucaguaucugagcc

SEQ ID NO: 2511119 - RNA, 19 nt, Artificial Sequence
  Description of Artificial Sequence: Synthetic oligonucleotide
ugaggcucggcacagacgc

SEQ ID NO: 2511120 - RNA, 19 nt, Artificial Sequence
  Description of Artificial Sequence: Synthetic oligonucleotide
agcaaucagcuuuggaugc

SEQ ID NO: 2511121 - RNA, 19 nt, Artificial Sequence
  Description of Artificial Sequence: Synthetic oligonucleotide
agagacuucgcccagccag

SEQ ID NO: 2511122 - RNA, 19 nt, Artificial Sequence
  Description of Artificial Sequence: Synthetic oligonucleotide
gaggaaugcacacagcggc

SEQ ID NO: 2511123 - RNA, 19 nt, Artificial Sequence
  Description of Artificial Sequence: Synthetic oligonucleotide
aaagggugaggcucggcac

SEQ ID NO: 2511124 - RNA, 19 nt, Artificial Sequence
  Description of Artificial Sequence: Synthetic oligonucleotide
gguagaagcaucuacagca

SEQ ID NO: 2511125 - RNA, 19 nt, Artificial Sequence
  Description of Artificial Sequence: Synthetic oligonucleotide
ugaacuccacaccuguagg

SEQ ID NO: 2511126 - RNA, 19 nt, Artificial Sequence
  Description of Artificial Sequence: Synthetic oligonucleotide
ugaggaaugcacacagcgg

SEQ ID NO: 2511127 - RNA, 19 nt, Artificial Sequence
  Description of Artificial Sequence: Synthetic oligonucleotide
aacuccacaccuguaggcc

SEQ ID NO: 2511128 - RNA, 19 nt, Artificial Sequence
  Description of Artificial Sequence: Synthetic oligonucleotide
cacacagcggcacagaaag

SEQ ID NO: 2511129 - RNA, 19 nt, Artificial Sequence
  Description of Artificial Sequence: Synthetic oligonucleotide
agaccucccugguagaagc

SEQ ID NO: 2511130 - RNA, 19 nt, Artificial Sequence
  Description of Artificial Sequence: Synthetic oligonucleotide
gagaugagagacuucgccc

SEQ ID NO: 2511131 - RNA, 19 nt, Artificial Sequence
  Description of Artificial Sequence: Synthetic oligonucleotide
ucagccagcaaucagcuuu

SEQ ID NO: 2511132 - RNA, 19 nt, Artificial Sequence
  Description of Artificial Sequence: Synthetic oligonucleotide
gguuuguccggucugaggg

SEQ ID NO: 2511133 - RNA, 19 nt, Artificial Sequence
  Description of Artificial Sequence: Synthetic oligonucleotide
acucaccaaaggcagcugc

SEQ ID NO: 2511134 - RNA, 19 nt, Artificial Sequence
  Description of Artificial Sequence: Synthetic oligonucleotide
ucuacagcaacagggcagg

SEQ ID NO: 2511135 - RNA, 19 nt, Artificial Sequence
  Description of Artificial Sequence: Synthetic oligonucleotide
ucugacucggcccuuccag

SEQ ID NO: 2511136 - RNA, 19 nt, Artificial Sequence
  Description of Artificial Sequence: Synthetic oligonucleotide
gaugccggggucuaccagg

SEQ ID NO: 2511137 - RNA, 19 nt, Artificial Sequence
  Description of Artificial Sequence: Synthetic oligonucleotide
agcaccucagcgcucaagg

SEQ ID NO: 2511138 - RNA, 19 nt, Artificial Sequence
  Description of Artificial Sequence: Synthetic oligonucleotide
cacagaaagguucauccag

SEQ ID NO: 2511139 - RNA, 19 nt, Artificial Sequence
  Description of Artificial Sequence: Synthetic oligonucleotide
gagacuucaguaucugagc

SEQ ID NO: 2511140 - RNA, 19 nt, Artificial Sequence
  Description of Artificial Sequence: Synthetic oligonucleotide
uuggccaauaccagggccc

SEQ ID NO: 2511141 - RNA, 19 nt, Artificial Sequence
  Description of Artificial Sequence: Synthetic oligonucleotide
gaagcaucuacagcaacag

SEQ ID NO: 2511142 - RNA, 19 nt, Artificial Sequence
  Description of Artificial Sequence: Synthetic oligonucleotide
agaaagguucauccaggcg

SEQ ID NO: 2511143 - RNA, 19 nt, Artificial Sequence
  Description of Artificial Sequence: Synthetic oligonucleotide
ucugagggagaugagagac

SEQ ID NO: 2511144 - RNA, 19 nt, Artificial Sequence
  Description of Artificial Sequence: Synthetic oligonucleotide
acuucgcccagccagagcu

SEQ ID NO: 2511145 - RNA, 19 nt, Artificial Sequence
  Description of Artificial Sequence: Synthetic oligonucleotide
uugcagucgcaccugaggc

SEQ ID NO: 2511146 - RNA, 19 nt, Artificial Sequence
  Description of Artificial Sequence: Synthetic oligonucleotide
ggcacagaaagguucaucc

SEQ ID NO: 2511147 - RNA, 19 nt, Artificial Sequence
  Description of Artificial Sequence: Synthetic oligonucleotide
agcgcucaaggcuccaacc

SEQ ID NO: 2511148 - RNA, 19 nt, Artificial Sequence
  Description of Artificial Sequence: Synthetic oligonucleotide
cuugcagucgcaccugagg

SEQ ID NO: 2511149 - RNA, 19 nt, Artificial Sequence
  Description of Artificial Sequence: Synthetic oligonucleotide
ugguagaagcaucuacagc

SEQ ID NO: 2511150 - RNA, 19 nt, Artificial Sequence
  Description of Artificial Sequence: Synthetic oligonucleotide
guagccaggaccuucugac

SEQ ID NO: 2511151 - RNA, 19 nt, Artificial Sequence
  Description of Artificial Sequence: Synthetic oligonucleotide
cagcaaucagcuuuggaug

SEQ ID NO: 2511152 - RNA, 19 nt, Artificial Sequence
  Description of Artificial Sequence: Synthetic oligonucleotide
guucccacucaccaaaggc

SEQ ID NO: 2511153 - RNA, 19 nt, Artificial Sequence
  Description of Artificial Sequence: Synthetic oligonucleotide
gcaaagaccucccugguag

SEQ ID NO: 2511154 - RNA, 19 nt, Artificial Sequence
  Description of Artificial Sequence: Synthetic oligonucleotide
cugaacuccacaccuguag

SEQ ID NO: 2511155 - RNA, 19 nt, Artificial Sequence
  Description of Artificial Sequence: Synthetic oligonucleotide
cugguagaagcaucuacag

SEQ ID NO: 2511156 - RNA, 19 nt, Artificial Sequence
  Description of Artificial Sequence: Synthetic oligonucleotide
ugagagacuucgcccagcc

SEQ ID NO: 2511157 - RNA, 19 nt, Artificial Sequence
  Description of Artificial Sequence: Synthetic oligonucleotide
aaugcacacagcggcacag

SEQ ID NO: 2511158 - RNA, 19 nt, Artificial Sequence
  Description of Artificial Sequence: Synthetic oligonucleotide
gacuucaguaucugagccc

SEQ ID NO: 2511159 - RNA, 19 nt, Artificial Sequence
  Description of Artificial Sequence: Synthetic oligonucleotide
uguccacuuggccuggacc

SEQ ID NO: 2511160 - RNA, 19 nt, Artificial Sequence
  Description of Artificial Sequence: Synthetic oligonucleotide
uucugagacuucaguaucu

SEQ ID NO: 2511161 - RNA, 19 nt, Artificial Sequence
  Description of Artificial Sequence: Synthetic oligonucleotide
gaacuccacaccuguaggc

SEQ ID NO: 2511162 - RNA, 19 nt, Artificial Sequence
  Description of Artificial Sequence: Synthetic oligonucleotide
auugcaucuagagagggau

SEQ ID NO: 2511163 - RNA, 19 nt, Artificial Sequence
  Description of Artificial Sequence: Synthetic oligonucleotide
uauugcaucuagagaggga

SEQ ID NO: 2511164 - RNA, 19 nt, Artificial Sequence
  Description of Artificial Sequence: Synthetic oligonucleotide
acagaaagguucauccagg

SEQ ID NO: 2511165 - RNA, 19 nt, Artificial Sequence
  Description of Artificial Sequence: Synthetic oligonucleotide
acugcggccccgcagauca

SEQ ID NO: 2511166 - RNA, 19 nt, Artificial Sequence
  Description of Artificial Sequence: Synthetic oligonucleotide
ggagaugagagacuucgcc

SEQ ID NO: 2511167 - RNA, 19 nt, Artificial Sequence
  Description of Artificial Sequence: Synthetic oligonucleotide
uuuggaugcuguaguuccc

SEQ ID NO: 2511168 - RNA, 19 nt, Artificial Sequence
  Description of Artificial Sequence: Synthetic oligonucleotide
guccacuuggccuggaccc

SEQ ID NO: 2511169 - RNA, 19 nt, Artificial Sequence
  Description of Artificial Sequence: Synthetic oligonucleotide
guauugcaucuagagaggg

SEQ ID NO: 2511170 - RNA, 19 nt, Artificial Sequence
  Description of Artificial Sequence: Synthetic oligonucleotide
uccggucugagggagauga

SEQ ID NO: 2511171 - RNA, 19 nt, Artificial Sequence
  Description of Artificial Sequence: Synthetic oligonucleotide
aguaucugagccccgucca

SEQ ID NO: 2511172 - RNA, 19 nt, Artificial Sequence
  Description of Artificial Sequence: Synthetic oligonucleotide
cagaaagguucauccaggc

SEQ ID NO: 2511173 - RNA, 19 nt, Artificial Sequence
  Description of Artificial Sequence: Synthetic oligonucleotide
ggcacagacgcucuugagg

SEQ ID NO: 2511174 - RNA, 19 nt, Artificial Sequence
  Description of Artificial Sequence: Synthetic oligonucleotide
aguucccacucaccaaagg

SEQ ID NO: 2511175 - RNA, 19 nt, Artificial Sequence
  Description of Artificial Sequence: Synthetic oligonucleotide
ucuaccagggacuggguuu

SEQ ID NO: 2511176 - RNA, 19 nt, Artificial Sequence
  Description of Artificial Sequence: Synthetic oligonucleotide
acggcccguagccaggacc

SEQ ID NO: 2511177 - RNA, 19 nt, Artificial Sequence
  Description of Artificial Sequence: Synthetic oligonucleotide
aagggugaggcucggcaca

SEQ ID NO: 2511178 - RNA, 19 nt, Artificial Sequence
  Description of Artificial Sequence: Synthetic oligonucleotide
cuggcucagagccugcucc

SEQ ID NO: 2511179 - RNA, 19 nt, Artificial Sequence
  Description of Artificial Sequence: Synthetic oligonucleotide
cauccaggcggaaggagcc

SEQ ID NO: 2511180 - RNA, 19 nt, Artificial Sequence
  Description of Artificial Sequence: Synthetic oligonucleotide
cagggacuggguuuguccg

SEQ ID NO: 2511181 - RNA, 19 nt, Artificial Sequence
  Description of Artificial Sequence: Synthetic oligonucleotide
cuuggccaauaccagggcc

SEQ ID NO: 2511182 - RNA, 19 nt, Artificial Sequence
  Description of Artificial Sequence: Synthetic oligonucleotide
agaucagagcugcccugcc

SEQ ID NO: 2511183 - RNA, 19 nt, Artificial Sequence
  Description of Artificial Sequence: Synthetic oligonucleotide
gaugagagacuucgcccag

SEQ ID NO: 2511184 - RNA, 19 nt, Artificial Sequence
  Description of Artificial Sequence: Synthetic oligonucleotide
aaaggcagcugcacagcgg

SEQ ID NO: 2511185 - RNA, 19 nt, Artificial Sequence
  Description of Artificial Sequence: Synthetic oligonucleotide
aucuacagcaacagggcag

SEQ ID NO: 2511186 - RNA, 19 nt, Artificial Sequence
  Description of Artificial Sequence: Synthetic oligonucleotide
uuuguccggucugagggag

SEQ ID NO: 2511187 - RNA, 19 nt, Artificial Sequence
  Description of Artificial Sequence: Synthetic oligonucleotide
uguaguucccacucaccaa

SEQ ID NO: 2511188 - RNA, 19 nt, Artificial Sequence
  Description of Artificial Sequence: Synthetic oligonucleotide
aggugaagugggauggggc

SEQ ID NO: 2511189 - RNA, 19 nt, Artificial Sequence
  Description of Artificial Sequence: Synthetic oligonucleotide
ucgcaccugaggcugaacu

SEQ ID NO: 2511190 - RNA, 19 nt, Artificial Sequence
  Description of Artificial Sequence: Synthetic oligonucleotide
ucaucuaggcccugaccca

SEQ ID NO: 2511191 - RNA, 19 nt, Artificial Sequence
  Description of Artificial Sequence: Synthetic oligonucleotide
gcagagcuggccuugcucg

SEQ ID NO: 2511192 - RNA, 19 nt, Artificial Sequence
  Description of Artificial Sequence: Synthetic oligonucleotide
caguaucugagccccgucc

SEQ ID NO: 2511193 - RNA, 19 nt, Artificial Sequence
  Description of Artificial Sequence: Synthetic oligonucleotide
ugcucugugccgacggccc

SEQ ID NO: 2511194 - RNA, 19 nt, Artificial Sequence
  Description of Artificial Sequence: Synthetic oligonucleotide
caucugguauugcaucuag

SEQ ID NO: 2511195 - RNA, 19 nt, Artificial Sequence
  Description of Artificial Sequence: Synthetic oligonucleotide
uagagagggaugccggggu

SEQ ID NO: 2511196 - RNA, 19 nt, Artificial Sequence
  Description of Artificial Sequence: Synthetic oligonucleotide
ggcggaaggagccuggugc

SEQ ID NO: 2511197 - RNA, 19 nt, Artificial Sequence
  Description of Artificial Sequence: Synthetic oligonucleotide
ugcucgucugcacggcccg

SEQ ID NO: 2511198 - RNA, 19 nt, Artificial Sequence
  Description of Artificial Sequence: Synthetic oligonucleotide
gucgccuuggccaauacca

SEQ ID NO: 2511199 - RNA, 19 nt, Artificial Sequence
  Description of Artificial Sequence: Synthetic oligonucleotide
agcugcucugugccgacgg

SEQ ID NO: 2511200 - RNA, 19 nt, Artificial Sequence
  Description of Artificial Sequence: Synthetic oligonucleotide
gaugaggcugagguggggc

SEQ ID NO: 2511201 - RNA, 19 nt, Artificial Sequence
  Description of Artificial Sequence: Synthetic oligonucleotide
ugacucggcccuuccagcc

SEQ ID NO: 2511202 - RNA, 19 nt, Artificial Sequence
  Description of Artificial Sequence: Synthetic oligonucleotide
acgcucuugaggaaugcac

SEQ ID NO: 2511203 - RNA, 19 nt, Artificial Sequence
  Description of Artificial Sequence: Synthetic oligonucleotide
ugucgccuuggccaauacc

SEQ ID NO: 2511204 - RNA, 19 nt, Artificial Sequence
  Description of Artificial Sequence: Synthetic oligonucleotide
ugaaucaucuaggcccuga

SEQ ID NO: 2511205 - RNA, 19 nt, Artificial Sequence
  Description of Artificial Sequence: Synthetic oligonucleotide
cuguaguucccacucacca

SEQ ID NO: 2511206 - RNA, 19 nt, Artificial Sequence
  Description of Artificial Sequence: Synthetic oligonucleotide
ucuugcagucgcaccugag

SEQ ID NO: 2511207 - RNA, 19 nt, Artificial Sequence
  Description of Artificial Sequence: Synthetic oligonucleotide
uaguucccacucaccaaag

SEQ ID NO: 2511208 - RNA, 19 nt, Artificial Sequence
  Description of Artificial Sequence: Synthetic oligonucleotide
gguauugcaucuagagagg

SEQ ID NO: 2511209 - RNA, 19 nt, Artificial Sequence
  Description of Artificial Sequence: Synthetic oligonucleotide
cagcaaagggugaggcucg

SEQ ID NO: 2511210 - RNA, 19 nt, Artificial Sequence
  Description of Artificial Sequence: Synthetic oligonucleotide
ucgccuuggccaauaccag

SEQ ID NO: 2511211 - RNA, 19 nt, Artificial Sequence
  Description of Artificial Sequence: Synthetic oligonucleotide
gugccgacggcccagcacc

SEQ ID NO: 2511212 - RNA, 19 nt, Artificial Sequence
  Description of Artificial Sequence: Synthetic oligonucleotide
ugagggagaugagagacuu

SEQ ID NO: 2511213 - RNA, 19 nt, Artificial Sequence
  Description of Artificial Sequence: Synthetic oligonucleotide
gcugagguggggcugaggc

SEQ ID NO: 2511214 - RNA, 19 nt, Artificial Sequence
  Description of Artificial Sequence: Synthetic oligonucleotide
gucugcacggcccguagcc

SEQ ID NO: 2511215 - RNA, 19 nt, Artificial Sequence
  Description of Artificial Sequence: Synthetic oligonucleotide
acuggguuuguccggucug

SEQ ID NO: 2511216 - RNA, 19 nt, Artificial Sequence
  Description of Artificial Sequence: Synthetic oligonucleotide
cuccagccaugccagagcc

SEQ ID NO: 2511217 - RNA, 19 nt, Artificial Sequence
  Description of Artificial Sequence: Synthetic oligonucleotide
ucggcacagacgcucuuga

SEQ ID NO: 2511218 - RNA, 19 nt, Artificial Sequence
  Description of Artificial Sequence: Synthetic oligonucleotide
agagagggaugccgggguc

SEQ ID NO: 2511219 - RNA, 19 nt, Artificial Sequence
  Description of Artificial Sequence: Synthetic oligonucleotide
gaggcugaacuccacaccu

SEQ ID NO: 2511220 - RNA, 19 nt, Artificial Sequence
  Description of Artificial Sequence: Synthetic oligonucleotide
ugggcccucagccagcaau

SEQ ID NO: 2511221 - RNA, 19 nt, Artificial Sequence
  Description of Artificial Sequence: Synthetic oligonucleotide
agggaugccggggucuacc

SEQ ID NO: 2511222 - RNA, 19 nt, Artificial Sequence
  Description of Artificial Sequence: Synthetic oligonucleotide
agggacuggguuuguccgg

SEQ ID NO: 2511223 - RNA, 19 nt, Artificial Sequence
  Description of Artificial Sequence: Synthetic oligonucleotide
uucauccaggcggaaggag

SEQ ID NO: 2511224 - RNA, 19 nt, Artificial Sequence
  Description of Artificial Sequence: Synthetic oligonucleotide
aacacccaccugaaucauc

SEQ ID NO: 2511225 - RNA, 19 nt, Artificial Sequence
  Description of Artificial Sequence: Synthetic oligonucleotide
ugcacacagcggcacagaa

SEQ ID NO: 2511226 - RNA, 19 nt, Artificial Sequence
  Description of Artificial Sequence: Synthetic oligonucleotide
acacccaccugaaucaucu

SEQ ID NO: 2511227 - RNA, 19 nt, Artificial Sequence
  Description of Artificial Sequence: Synthetic oligonucleotide
acagcggugcuccagccau

SEQ ID NO: 2511228 - RNA, 19 nt, Artificial Sequence
  Description of Artificial Sequence: Synthetic oligonucleotide
caaagggugaggcucggca

SEQ ID NO: 2511229 - RNA, 19 nt, Artificial Sequence
  Description of Artificial Sequence: Synthetic oligonucleotide
cugguauugcaucuagaga

SEQ ID NO: 2511230 - RNA, 19 nt, Artificial Sequence
  Description of Artificial Sequence: Synthetic oligonucleotide
augagagacuucgcccagc

SEQ ID NO: 2511231 - RNA, 19 nt, Artificial Sequence
  Description of Artificial Sequence: Synthetic oligonucleotide
cccaccugaaucaucuagg

SEQ ID NO: 2511232 - RNA, 19 nt, Artificial Sequence
  Description of Artificial Sequence: Synthetic oligonucleotide
uccauuccuucugagacuu

SEQ ID NO: 2511233 - RNA, 19 nt, Artificial Sequence
  Description of Artificial Sequence: Synthetic oligonucleotide
agcggugcuccagccaugc

SEQ ID NO: 2511234 - RNA, 19 nt, Artificial Sequence
  Description of Artificial Sequence: Synthetic oligonucleotide
uucaguaucugagccccgu

SEQ ID NO: 2511235 - RNA, 19 nt, Artificial Sequence
  Description of Artificial Sequence: Synthetic oligonucleotide
ugcagucgcaccugaggcu

SEQ ID NO: 2511236 - RNA, 19 nt, Artificial Sequence
  Description of Artificial Sequence: Synthetic oligonucleotide
aggccuccaggcaaagacc

SEQ ID NO: 2511237 - RNA, 19 nt, Artificial Sequence
  Description of Artificial Sequence: Synthetic oligonucleotide
acuccacaccuguaggccu

SEQ ID NO: 2511238 - RNA, 19 nt, Artificial Sequence
  Description of Artificial Sequence: Synthetic oligonucleotide
gggucuaccagggacuggg

SEQ ID NO: 2511239 - RNA, 19 nt, Artificial Sequence
  Description of Artificial Sequence: Synthetic oligonucleotide
ugaagugggauggggcaga

SEQ ID NO: 2511240 - RNA, 19 nt, Artificial Sequence
  Description of Artificial Sequence: Synthetic oligonucleotide
aucagagcugcccugccuu

SEQ ID NO: 2511241 - RNA, 19 nt, Artificial Sequence
  Description of Artificial Sequence: Synthetic oligonucleotide
gcacagacgcucuugagga

SEQ ID NO: 2511242 - RNA, 19 nt, Artificial Sequence
  Description of Artificial Sequence: Synthetic oligonucleotide
agacgcucuugaggaaugc

SEQ ID NO: 2511243 - RNA, 19 nt, Artificial Sequence
  Description of Artificial Sequence: Synthetic oligonucleotide
uggugccucuugcagucgc

SEQ ID NO: 2511244 - RNA, 19 nt, Artificial Sequence
  Description of Artificial Sequence: Synthetic oligonucleotide
aaagaccucccugguagaa

SEQ ID NO: 2511245 - RNA, 19 nt, Artificial Sequence
  Description of Artificial Sequence: Synthetic oligonucleotide
ggccuggacccucagagcc

SEQ ID NO: 2511246 - RNA, 19 nt, Artificial Sequence
  Description of Artificial Sequence: Synthetic oligonucleotide
ggaccuucugacucggccc

SEQ ID NO: 2511247 - RNA, 19 nt, Artificial Sequence
  Description of Artificial Sequence: Synthetic oligonucleotide
uuccagcccaacacccacc

SEQ ID NO: 2511248 - RNA, 19 nt, Artificial Sequence
  Description of Artificial Sequence: Synthetic oligonucleotide
uguggcccaacugcggccc

SEQ ID NO: 2511249 - RNA, 19 nt, Artificial Sequence
  Description of Artificial Sequence: Synthetic oligonucleotide
ggugaagugggauggggca

SEQ ID NO: 2511250 - RNA, 19 nt, Artificial Sequence
  Description of Artificial Sequence: Synthetic oligonucleotide
ucaguaucugagccccguc

SEQ ID NO: 2511251 - RNA, 19 nt, Artificial Sequence
  Description of Artificial Sequence: Synthetic oligonucleotide
caggugaagugggaugggg

SEQ ID NO: 2511252 - RNA, 19 nt, Artificial Sequence
  Description of Artificial Sequence: Synthetic oligonucleotide
cuugcucgucugcacggcc

SEQ ID NO: 2511253 - RNA, 19 nt, Artificial Sequence
  Description of Artificial Sequence: Synthetic oligonucleotide
ucgucugcacggcccguag

SEQ ID NO: 2511254 - RNA, 19 nt, Artificial Sequence
  Description of Artificial Sequence: Synthetic oligonucleotide
cagcggcacagaaagguuc

SEQ ID NO: 2511255 - RNA, 19 nt, Artificial Sequence
  Description of Artificial Sequence: Synthetic oligonucleotide
cccaacacccaccugaauc

SEQ ID NO: 2511256 - RNA, 19 nt, Artificial Sequence
  Description of Artificial Sequence: Synthetic oligonucleotide
augaggcugagguggggcu

SEQ ID NO: 2511257 - RNA, 19 nt, Artificial Sequence
  Description of Artificial Sequence: Synthetic oligonucleotide
ugccucuugcagucgcacc

SEQ ID NO: 2511258 - RNA, 19 nt, Artificial Sequence
  Description of Artificial Sequence: Synthetic oligonucleotide
cagaucagagcugcccugc

SEQ ID NO: 2511259 - RNA, 19 nt, Artificial Sequence
  Description of Artificial Sequence: Synthetic oligonucleotide
uaucugagccccguccacu

SEQ ID NO: 2511260 - RNA, 19 nt, Artificial Sequence
  Description of Artificial Sequence: Synthetic oligonucleotide
agcaacagggcaggugaag

SEQ ID NO: 2511261 - RNA, 19 nt, Artificial Sequence
  Description of Artificial Sequence: Synthetic oligonucleotide
cccucagccagcaaucagc

SEQ ID NO: 2511262 - RNA, 19 nt, Artificial Sequence
  Description of Artificial Sequence: Synthetic oligonucleotide
gcaucuacagcaacagggc

SEQ ID NO: 2511263 - RNA, 19 nt, Artificial Sequence
  Description of Artificial Sequence: Synthetic oligonucleotide
uggcacugucgccuuggcc

SEQ ID NO: 2511264 - RNA, 19 nt, Artificial Sequence
  Description of Artificial Sequence: Synthetic oligonucleotide
gacuggcugcaggaggccg

SEQ ID NO: 2511265 - RNA, 19 nt, Artificial Sequence
  Description of Artificial Sequence: Synthetic oligonucleotide
cuaccagggacuggguuug

SEQ ID NO: 2511266 - RNA, 19 nt, Artificial Sequence
  Description of Artificial Sequence: Synthetic oligonucleotide
cagccagcaaucagcuuug

SEQ ID NO: 2511267 - RNA, 19 nt, Artificial Sequence
  Description of Artificial Sequence: Synthetic oligonucleotide
acggugugcagcaaagggu

SEQ ID NO: 2511268 - RNA, 19 nt, Artificial Sequence
  Description of Artificial Sequence: Synthetic oligonucleotide
cuccaggcaaagaccuccc

SEQ ID NO: 2511269 - RNA, 19 nt, Artificial Sequence
  Description of Artificial Sequence: Synthetic oligonucleotide
ccagaagugcccaaggaga

SEQ ID NO: 2511270 - RNA, 19 nt, Artificial Sequence
  Description of Artificial Sequence: Synthetic oligonucleotide
gaggcuggcacggugugca

SEQ ID NO: 2511271 - RNA, 19 nt, Artificial Sequence
  Description of Artificial Sequence: Synthetic oligonucleotide
caucuacagcaacagggca

SEQ ID NO: 2511272 - RNA, 19 nt, Artificial Sequence
  Description of Artificial Sequence: Synthetic oligonucleotide
gccuuggccaauaccaggg

SEQ ID NO: 2511273 - RNA, 19 nt, Artificial Sequence
  Description of Artificial Sequence: Synthetic oligonucleotide
uaccagggcccagaagugc

SEQ ID NO: 2511274 - RNA, 19 nt, Artificial Sequence
  Description of Artificial Sequence: Synthetic oligonucleotide
caauaccagggcccagaag

SEQ ID NO: 2511275 - RNA, 19 nt, Artificial Sequence
  Description of Artificial Sequence: Synthetic oligonucleotide
ccugguagaagcaucuaca

SEQ ID NO: 2511276 - RNA, 19 nt, Artificial Sequence
  Description of Artificial Sequence: Synthetic oligonucleotide
aggcucggcacagacgcuc

SEQ ID NO: 2511277 - RNA, 19 nt, Artificial Sequence
  Description of Artificial Sequence: Synthetic oligonucleotide
agguucauccaggcggaag

SEQ ID NO: 2511278 - RNA, 19 nt, Artificial Sequence
  Description of Artificial Sequence: Synthetic oligonucleotide
uggaugcuguaguucccac

SEQ ID NO: 2511279 - RNA, 19 nt, Artificial Sequence
  Description of Artificial Sequence: Synthetic oligonucleotide
uucgcccagccagagcugc

SEQ ID NO: 2511280 - RNA, 19 nt, Artificial Sequence
  Description of Artificial Sequence: Synthetic oligonucleotide
cucaccaaaggcagcugca

SEQ ID NO: 2511281 - RNA, 19 nt, Artificial Sequence
  Description of Artificial Sequence: Synthetic oligonucleotide
auuccuucugagacuucag

SEQ ID NO: 2511282 - RNA, 19 nt, Artificial Sequence
  Description of Artificial Sequence: Synthetic oligonucleotide
gcagcaaagggugaggcuc

SEQ ID NO: 2511283 - RNA, 19 nt, Artificial Sequence
  Description of Artificial Sequence: Synthetic oligonucleotide
caucuaggcccugacccag

SEQ ID NO: 2511284 - RNA, 19 nt, Artificial Sequence
  Description of Artificial Sequence: Synthetic oligonucleotide
ggugcuccagccaugccag

SEQ ID NO: 2511285 - RNA, 19 nt, Artificial Sequence
  Description of Artificial Sequence: Synthetic oligonucleotide
caaucagcuuuggaugcug

SEQ ID NO: 2511286 - RNA, 19 nt, Artificial Sequence
  Description of Artificial Sequence: Synthetic oligonucleotide
acagacgcucuugaggaau

SEQ ID NO: 2511287 - RNA, 19 nt, Artificial Sequence
  Description of Artificial Sequence: Synthetic oligonucleotide
gcucuugaggaaugcacac

SEQ ID NO: 2511288 - RNA, 19 nt, Artificial Sequence
  Description of Artificial Sequence: Synthetic oligonucleotide
agaagugcccaaggagaug

SEQ ID NO: 2511289 - RNA, 19 nt, Artificial Sequence
  Description of Artificial Sequence: Synthetic oligonucleotide
gugcagcaaagggugaggc

SEQ ID NO: 2511290 - RNA, 19 nt, Artificial Sequence
  Description of Artificial Sequence: Synthetic oligonucleotide
ggguuuguccggucugagg

SEQ ID NO: 2511291 - RNA, 19 nt, Artificial Sequence
  Description of Artificial Sequence: Synthetic oligonucleotide
uggacccucagagccugag

SEQ ID NO: 2511292 - RNA, 19 nt, Artificial Sequence
  Description of Artificial Sequence: Synthetic oligonucleotide
cuguggcccaacugcggcc

SEQ ID NO: 2511293 - RNA, 19 nt, Artificial Sequence
  Description of Artificial Sequence: Synthetic oligonucleotide
gccaggaccuucugacucg

SEQ ID NO: 2511294 - RNA, 19 nt, Artificial Sequence
  Description of Artificial Sequence: Synthetic oligonucleotide
ccagcuguuguccuggcuc

SEQ ID NO: 2511295 - RNA, 19 nt, Artificial Sequence
  Description of Artificial Sequence: Synthetic oligonucleotide
cuucugacucggcccuucc

SEQ ID NO: 2511296 - RNA, 19 nt, Artificial Sequence
  Description of Artificial Sequence: Synthetic oligonucleotide
uggguuuguccggucugag

SEQ ID NO: 2511297 - RNA, 19 nt, Artificial Sequence
  Description of Artificial Sequence: Synthetic oligonucleotide
ccguccacuguccacuugg

SEQ ID NO: 2511298 - RNA, 19 nt, Artificial Sequence
  Description of Artificial Sequence: Synthetic oligonucleotide
uguaggccuccaggcaaag

SEQ ID NO: 2511299 - RNA, 19 nt, Artificial Sequence
  Description of Artificial Sequence: Synthetic oligonucleotide
aucagcuuuggaugcugua

SEQ ID NO: 2511300 - RNA, 19 nt, Artificial Sequence
  Description of Artificial Sequence: Synthetic oligonucleotide
guuuguccggucugaggga

SEQ ID NO: 2511301 - RNA, 19 nt, Artificial Sequence
  Description of Artificial Sequence: Synthetic oligonucleotide
cugcccugccuuuccauuc

SEQ ID NO: 2511302 - RNA, 19 nt, Artificial Sequence
  Description of Artificial Sequence: Synthetic oligonucleotide
aacugcggccccgcagauc

SEQ ID NO: 2511303 - RNA, 19 nt, Artificial Sequence
  Description of Artificial Sequence: Synthetic oligonucleotide
gcaccugaggcugaacucc

SEQ ID NO: 2511304 - RNA, 19 nt, Artificial Sequence
  Description of Artificial Sequence: Synthetic oligonucleotide
ccaacacccaccugaauca

SEQ ID NO: 2511305 - RNA, 19 nt, Artificial Sequence
  Description of Artificial Sequence: Synthetic oligonucleotide
uggccaauaccagggccca

SEQ ID NO: 2511306 - RNA, 19 nt, Artificial Sequence
  Description of Artificial Sequence: Synthetic oligonucleotide
ggugaggcucggcacagac

SEQ ID NO: 2511307 - RNA, 19 nt, Artificial Sequence
  Description of Artificial Sequence: Synthetic oligonucleotide
uccaggcggaaggagccug

SEQ ID NO: 2511308 - RNA, 19 nt, Artificial Sequence
  Description of Artificial Sequence: Synthetic oligonucleotide
gacuucgcccagccagagc

SEQ ID NO: 2511309 - RNA, 19 nt, Artificial Sequence
  Description of Artificial Sequence: Synthetic oligonucleotide
auaccagggcccagaagug

SEQ ID NO: 2511310 - RNA, 19 nt, Artificial Sequence
  Description of Artificial Sequence: Synthetic oligonucleotide
ggagccuggugccucuugc

SEQ ID NO: 2511311 - RNA, 19 nt, Artificial Sequence
  Description of Artificial Sequence: Synthetic oligonucleotide
aucuaggcccugacccagc

SEQ ID NO: 2511312 - RNA, 19 nt, Artificial Sequence
  Description of Artificial Sequence: Synthetic oligonucleotide
cuccacaccuguaggccuc

SEQ ID NO: 2511313 - RNA, 19 nt, Artificial Sequence
  Description of Artificial Sequence: Synthetic oligonucleotide
guagaagcaucuacagcaa

SEQ ID NO: 2511314 - RNA, 19 nt, Artificial Sequence
  Description of Artificial Sequence: Synthetic oligonucleotide
cugcucugugccgacggcc

SEQ ID NO: 2511315 - RNA, 19 nt, Artificial Sequence
  Description of Artificial Sequence: Synthetic oligonucleotide
uguccggucugagggagau

SEQ ID NO: 2511316 - RNA, 19 nt, Artificial Sequence
  Description of Artificial Sequence: Synthetic oligonucleotide
cacugcuguggcccaacug

SEQ ID NO: 2511317 - RNA, 19 nt, Artificial Sequence
  Description of Artificial Sequence: Synthetic oligonucleotide
aggaggccguggcacuguc

SEQ ID NO: 2511318 - RNA, 19 nt, Artificial Sequence
  Description of Artificial Sequence: Synthetic oligonucleotide
aggaaugcacacagcggca

SEQ ID NO: 2511319 - RNA, 19 nt, Artificial Sequence
  Description of Artificial Sequence: Synthetic oligonucleotide
gacgcucuugaggaaugca

SEQ ID NO: 2511320 - RNA, 19 nt, Artificial Sequence
  Description of Artificial Sequence: Synthetic oligonucleotide
gagacuucgcccagccaga

SEQ ID NO: 2511321 - RNA, 19 nt, Artificial Sequence
  Description of Artificial Sequence: Synthetic oligonucleotide
uuguccggucugagggaga

SEQ ID NO: 2511322 - RNA, 19 nt, Artificial Sequence
  Description of Artificial Sequence: Synthetic oligonucleotide
cucagagccugcuccaucu

SEQ ID NO: 2511323 - RNA, 19 nt, Artificial Sequence
  Description of Artificial Sequence: Synthetic oligonucleotide
agcaaagggugaggcucgg

SEQ ID NO: 2511324 - RNA, 19 nt, Artificial Sequence
  Description of Artificial Sequence: Synthetic oligonucleotide
ccagcaaucagcuuuggau

SEQ ID NO: 2511325 - RNA, 19 nt, Artificial Sequence
  Description of Artificial Sequence: Synthetic oligonucleotide
augccggggucuaccaggg

SEQ ID NO: 2511326 - RNA, 19 nt, Artificial Sequence
  Description of Artificial Sequence: Synthetic oligonucleotide
cggugugcagcaaagggug

SEQ ID NO: 2511327 - RNA, 19 nt, Artificial Sequence
  Description of Artificial Sequence: Synthetic oligonucleotide
gggcaggugaagugggaug

SEQ ID NO: 2511328 - RNA, 19 nt, Artificial Sequence
  Description of Artificial Sequence: Synthetic oligonucleotide
gaccuucugacucggcccu

SEQ ID NO: 2511329 - RNA, 19 nt, Artificial Sequence
  Description of Artificial Sequence: Synthetic oligonucleotide
aagugcccaaggagaugag

SEQ ID NO: 2511330 - RNA, 19 nt, Artificial Sequence
  Description of Artificial Sequence: Synthetic oligonucleotide
caccaaaggcagcugcaca

SEQ ID NO: 2511331 - RNA, 19 nt, Artificial Sequence
  Description of Artificial Sequence: Synthetic oligonucleotide
cagcgcucaaggcuccaac

SEQ ID NO: 2511332 - RNA, 19 nt, Artificial Sequence
  Description of Artificial Sequence: Synthetic oligonucleotide
cagcuguuguccuggcuca

SEQ ID NO: 2511333 - RNA, 19 nt, Artificial Sequence
  Description of Artificial Sequence: Synthetic oligonucleotide
agacuucgcccagccagag

SEQ ID NO: 2511334 - RNA, 19 nt, Artificial Sequence
  Description of Artificial Sequence: Synthetic oligonucleotide
gcagaucagagcugcccug

SEQ ID NO: 2511335 - RNA, 19 nt, Artificial Sequence
  Description of Artificial Sequence: Synthetic oligonucleotide
cucggcacagacgcucuug

SEQ ID NO: 2511336 - RNA, 19 nt, Artificial Sequence
  Description of Artificial Sequence: Synthetic oligonucleotide
aucugguauugcaucuaga

SEQ ID NO: 2511337 - RNA, 19 nt, Artificial Sequence
  Description of Artificial Sequence: Synthetic oligonucleotide
cccugguagaagcaucuac

SEQ ID NO: 2511338 - RNA, 19 nt, Artificial Sequence
  Description of Artificial Sequence: Synthetic oligonucleotide
gcacagaaagguucaucca

SEQ ID NO: 2511339 - RNA, 19 nt, Artificial Sequence
  Description of Artificial Sequence: Synthetic oligonucleotide
cacagcggcacagaaaggu

SEQ ID NO: 2511340 - RNA, 19 nt, Artificial Sequence
  Description of Artificial Sequence: Synthetic oligonucleotide
gaucagagcugcccugccu

SEQ ID NO: 2511341 - RNA, 19 nt, Artificial Sequence
  Description of Artificial Sequence: Synthetic oligonucleotide
caaagaccucccugguaga

SEQ ID NO: 2511342 - RNA, 19 nt, Artificial Sequence
  Description of Artificial Sequence: Synthetic oligonucleotide
ggaaugcacacagcggcac

SEQ ID NO: 2511343 - RNA, 19 nt, Artificial Sequence
  Description of Artificial Sequence: Synthetic oligonucleotide
gcagucgcaccugaggcug

SEQ ID NO: 2511344 - RNA, 19 nt, Artificial Sequence
  Description of Artificial Sequence: Synthetic oligonucleotide
gccggggucuaccagggac

SEQ ID NO: 2511345 - RNA, 19 nt, Artificial Sequence
  Description of Artificial Sequence: Synthetic oligonucleotide
ucagagcugcccugccuuu

SEQ ID NO: 2511346 - RNA, 19 nt, Artificial Sequence
  Description of Artificial Sequence: Synthetic oligonucleotide
gcggaaggagccuggugcc

SEQ ID NO: 2511347 - RNA, 19 nt, Artificial Sequence
  Description of Artificial Sequence: Synthetic oligonucleotide
ucugugccgacggcccagc

SEQ ID NO: 2511348 - RNA, 19 nt, Artificial Sequence
  Description of Artificial Sequence: Synthetic oligonucleotide
gacggcccagcaccucagc

SEQ ID NO: 2511349 - RNA, 19 nt, Artificial Sequence
  Description of Artificial Sequence: Synthetic oligonucleotide
uccacaccuguaggccucc

SEQ ID NO: 2511350 - RNA, 19 nt, Artificial Sequence
  Description of Artificial Sequence: Synthetic oligonucleotide
agggcaggugaagugggau

SEQ ID NO: 2511351 - RNA, 19 nt, Artificial Sequence
  Description of Artificial Sequence: Synthetic oligonucleotide
acacagcggcacagaaagg

SEQ ID NO: 2511352 - RNA, 19 nt, Artificial Sequence
  Description of Artificial Sequence: Synthetic oligonucleotide
ccuuuccauuccuucugag

SEQ ID NO: 2511353 - RNA, 19 nt, Artificial Sequence
  Description of Artificial Sequence: Synthetic oligonucleotide
cuucgcccagccagagcug

SEQ ID NO: 2511354 - RNA, 19 nt, Artificial Sequence
  Description of Artificial Sequence: Synthetic oligonucleotide
gagcugcucugugccgacg

SEQ ID NO: 2511355 - RNA, 19 nt, Artificial Sequence
  Description of Artificial Sequence: Synthetic oligonucleotide
uggcccaacugcggccccg

SEQ ID NO: 2511356 - RNA, 19 nt, Artificial Sequence
  Description of Artificial Sequence: Synthetic oligonucleotide
caccucagcgcucaaggcu

SEQ ID NO: 2511357 - RNA, 19 nt, Artificial Sequence
  Description of Artificial Sequence: Synthetic oligonucleotide
cagcuuuggaugcuguagu

SEQ ID NO: 2511358 - RNA, 19 nt, Artificial Sequence
  Description of Artificial Sequence: Synthetic oligonucleotide
cucccugguagaagcaucu

SEQ ID NO: 2511359 - RNA, 19 nt, Artificial Sequence
  Description of Artificial Sequence: Synthetic oligonucleotide
ggccccgcagaucagagcu

SEQ ID NO: 2511360 - RNA, 19 nt, Artificial Sequence
  Description of Artificial Sequence: Synthetic oligonucleotide
cuaggcccugacccagcug

SEQ ID NO: 2511361 - RNA, 19 nt, Artificial Sequence
  Description of Artificial Sequence: Synthetic oligonucleotide
ugcggccccgcagaucaga

SEQ ID NO: 2511362 - RNA, 19 nt, Artificial Sequence
  Description of Artificial Sequence: Synthetic oligonucleotide
cucugugccgacggcccag

SEQ ID NO: 2511363 - RNA, 19 nt, Artificial Sequence
  Description of Artificial Sequence: Synthetic oligonucleotide
ucagcgcucaaggcuccaa

SEQ ID NO: 2511364 - RNA, 19 nt, Artificial Sequence
  Description of Artificial Sequence: Synthetic oligonucleotide
gcaccucagcgcucaaggc

SEQ ID NO: 2511365 - RNA, 19 nt, Artificial Sequence
  Description of Artificial Sequence: Synthetic oligonucleotide
ggacccucagagccugagc

SEQ ID NO: 2511366 - RNA, 19 nt, Artificial Sequence
  Description of Artificial Sequence: Synthetic oligonucleotide
ggaugccggggucuaccag

SEQ ID NO: 2511367 - RNA, 19 nt, Artificial Sequence
  Description of Artificial Sequence: Synthetic oligonucleotide
guggcacugucgccuuggc

SEQ ID NO: 2511368 - RNA, 19 nt, Artificial Sequence
  Description of Artificial Sequence: Synthetic oligonucleotide
gaaggagccuggugccucu

SEQ ID NO: 2511369 - RNA, 19 nt, Artificial Sequence
  Description of Artificial Sequence: Synthetic oligonucleotide
aggcugaacuccacaccug

SEQ ID NO: 2511370 - RNA, 19 nt, Artificial Sequence
  Description of Artificial Sequence: Synthetic oligonucleotide
cugcacagcggugcuccag

SEQ ID NO: 2511371 - RNA, 19 nt, Artificial Sequence
  Description of Artificial Sequence: Synthetic oligonucleotide
gcaucuagagagggaugcc

SEQ ID NO: 2511372 - RNA, 19 nt, Artificial Sequence
  Description of Artificial Sequence: Synthetic oligonucleotide
cagagcugcucugugccga

SEQ ID NO: 2511373 - RNA, 19 nt, Artificial Sequence
  Description of Artificial Sequence: Synthetic oligonucleotide
caggaccuucugacucggc

SEQ ID NO: 2511374 - RNA, 19 nt, Artificial Sequence
  Description of Artificial Sequence: Synthetic oligonucleotide
gagggagaugagagacuuc

SEQ ID NO: 2511375 - RNA, 19 nt, Artificial Sequence
  Description of Artificial Sequence: Synthetic oligonucleotide
cuuggccuggacccucaga

SEQ ID NO: 2511376 - RNA, 19 nt, Artificial Sequence
  Description of Artificial Sequence: Synthetic oligonucleotide
acagcggcacagaaagguu

SEQ ID NO: 2511377 - RNA, 19 nt, Artificial Sequence
  Description of Artificial Sequence: Synthetic oligonucleotide
ugccgacggcccagcaccu

SEQ ID NO: 2511378 - RNA, 19 nt, Artificial Sequence
  Description of Artificial Sequence: Synthetic oligonucleotide
cuguaggccuccaggcaaa

SEQ ID NO: 2511379 - RNA, 19 nt, Artificial Sequence
  Description of Artificial Sequence: Synthetic oligonucleotide
ccuuggccaauaccagggc

SEQ ID NO: 2511380 - RNA, 19 nt, Artificial Sequence
  Description of Artificial Sequence: Synthetic oligonucleotide
cuggccuugcucgucugca

SEQ ID NO: 2511381 - RNA, 19 nt, Artificial Sequence
  Description of Artificial Sequence: Synthetic oligonucleotide
gugccucuugcagucgcac

SEQ ID NO: 2511382 - RNA, 19 nt, Artificial Sequence
  Description of Artificial Sequence: Synthetic oligonucleotide
ccuucugagacuucaguau

SEQ ID NO: 2511383 - RNA, 19 nt, Artificial Sequence
  Description of Artificial Sequence: Synthetic oligonucleotide
cacuguccacuuggccugg

SEQ ID NO: 2511384 - RNA, 19 nt, Artificial Sequence
  Description of Artificial Sequence: Synthetic oligonucleotide
cacucaccaaaggcagcug

SEQ ID NO: 2511385 - RNA, 19 nt, Artificial Sequence
  Description of Artificial Sequence: Synthetic oligonucleotide
cuggugccucuugcagucg

SEQ ID NO: 2511386 - RNA, 19 nt, Artificial Sequence
  Description of Artificial Sequence: Synthetic oligonucleotide
augcacacagcggcacaga

SEQ ID NO: 2511387 - RNA, 19 nt, Artificial Sequence
  Description of Artificial Sequence: Synthetic oligonucleotide
aggcuggcacggugugcag

SEQ ID NO: 2511388 - RNA, 19 nt, Artificial Sequence
  Description of Artificial Sequence: Synthetic oligonucleotide
cugucgccuuggccaauac

SEQ ID NO: 2511389 - RNA, 19 nt, Artificial Sequence
  Description of Artificial Sequence: Synthetic oligonucleotide
ggcugaacuccacaccugu

SEQ ID NO: 2511390 - RNA, 19 nt, Artificial Sequence
  Description of Artificial Sequence: Synthetic oligonucleotide
cuggguuuguccggucuga

SEQ ID NO: 2511391 - RNA, 19 nt, Artificial Sequence
  Description of Artificial Sequence: Synthetic oligonucleotide
gggagaugagagacuucgc

SEQ ID NO: 2511392 - RNA, 19 nt, Artificial Sequence
  Description of Artificial Sequence: Synthetic oligonucleotide
gcaggugaagugggauggg

SEQ ID NO: 2511393 - RNA, 19 nt, Artificial Sequence
  Description of Artificial Sequence: Synthetic oligonucleotide
cugagggagaugagagacu

SEQ ID NO: 2511394 - RNA, 19 nt, Artificial Sequence
  Description of Artificial Sequence: Synthetic oligonucleotide
cagcaccucagcgcucaag

SEQ ID NO: 2511395 - RNA, 19 nt, Artificial Sequence
  Description of Artificial Sequence: Synthetic oligonucleotide
cgccuuggccaauaccagg

SEQ ID NO: 2511396 - RNA, 19 nt, Artificial Sequence
  Description of Artificial Sequence: Synthetic oligonucleotide
ccaggcggaaggagccugg

SEQ ID NO: 2511397 - RNA, 19 nt, Artificial Sequence
  Description of Artificial Sequence: Synthetic oligonucleotide
cacagcggugcuccagcca

SEQ ID NO: 2511398 - RNA, 19 nt, Artificial Sequence
  Description of Artificial Sequence: Synthetic oligonucleotide
gagcugcccugccuuucca

SEQ ID NO: 2511399 - RNA, 19 nt, Artificial Sequence
  Description of Artificial Sequence: Synthetic oligonucleotide
ccucccugguagaagcauc

SEQ ID NO: 2511400 - RNA, 19 nt, Artificial Sequence
  Description of Artificial Sequence: Synthetic oligonucleotide
ccaacugcggccccgcaga

SEQ ID NO: 2511401 - RNA, 19 nt, Artificial Sequence
  Description of Artificial Sequence: Synthetic oligonucleotide
ccgcagaucagagcugccc

SEQ ID NO: 2511402 - RNA, 19 nt, Artificial Sequence
  Description of Artificial Sequence: Synthetic oligonucleotide
gagagggaugccggggucu

SEQ ID NO: 2511403 - RNA, 19 nt, Artificial Sequence
  Description of Artificial Sequence: Synthetic oligonucleotide
gagcuggccuugcucgucu

SEQ ID NO: 2511404 - RNA, 19 nt, Artificial Sequence
  Description of Artificial Sequence: Synthetic oligonucleotide
gccucuugcagucgcaccu

SEQ ID NO: 2511405 - RNA, 19 nt, Artificial Sequence
  Description of Artificial Sequence: Synthetic oligonucleotide
gccaauaccagggcccaga

SEQ ID NO: 2511406 - RNA, 19 nt, Artificial Sequence
  Description of Artificial Sequence: Synthetic oligonucleotide
acugucgccuuggccaaua

SEQ ID NO: 2511407 - RNA, 19 nt, Artificial Sequence
  Description of Artificial Sequence: Synthetic oligonucleotide
ccuguaggccuccaggcaa

SEQ ID NO: 2511408 - RNA, 19 nt, Artificial Sequence
  Description of Artificial Sequence: Synthetic oligonucleotide
cuggcugcaggaggccgug

SEQ ID NO: 2511409 - RNA, 19 nt, Artificial Sequence
  Description of Artificial Sequence: Synthetic oligonucleotide
gaccucccugguagaagca

SEQ ID NO: 2511410 - RNA, 19 nt, Artificial Sequence
  Description of Artificial Sequence: Synthetic oligonucleotide
cugaaucaucuaggcccug

SEQ ID NO: 2511411 - RNA, 19 nt, Artificial Sequence
  Description of Artificial Sequence: Synthetic oligonucleotide
ggaugcuguaguucccacu

SEQ ID NO: 2511412 - RNA, 19 nt, Artificial Sequence
  Description of Artificial Sequence: Synthetic oligonucleotide
gccagcaaucagcuuugga

SEQ ID NO: 2511413 - RNA, 19 nt, Artificial Sequence
  Description of Artificial Sequence: Synthetic oligonucleotide
cagagcugcccugccuuuc

SEQ ID NO: 2511414 - RNA, 19 nt, Artificial Sequence
  Description of Artificial Sequence: Synthetic oligonucleotide
cgcucuugaggaaugcaca

SEQ ID NO: 2511415 - RNA, 19 nt, Artificial Sequence
  Description of Artificial Sequence: Synthetic oligonucleotide
gcacagcggugcuccagcc

SEQ ID NO: 2511416 - RNA, 19 nt, Artificial Sequence
  Description of Artificial Sequence: Synthetic oligonucleotide
cccaacugcggccccgcag

SEQ ID NO: 2511417 - RNA, 19 nt, Artificial Sequence
  Description of Artificial Sequence: Synthetic oligonucleotide
guaggccuccaggcaaaga

SEQ ID NO: 2511418 - RNA, 19 nt, Artificial Sequence
  Description of Artificial Sequence: Synthetic oligonucleotide
ccaggaccuucugacucgg

SEQ ID NO: 2511419 - RNA, 19 nt, Artificial Sequence
  Description of Artificial Sequence: Synthetic oligonucleotide
cagcggugcuccagccaug

SEQ ID NO: 2511420 - RNA, 19 nt, Artificial Sequence
  Description of Artificial Sequence: Synthetic oligonucleotide
ggaggccguggcacugucg

SEQ ID NO: 2511421 - RNA, 19 nt, Artificial Sequence
  Description of Artificial Sequence: Synthetic oligonucleotide
agggcccagaagugcccaa

SEQ ID NO: 2511422 - RNA, 19 nt, Artificial Sequence
  Description of Artificial Sequence: Synthetic oligonucleotide
gcucagagccugcuccauc

SEQ ID NO: 2511423 - RNA, 19 nt, Artificial Sequence
  Description of Artificial Sequence: Synthetic oligonucleotide
ccugaaucaucuaggcccu

SEQ ID NO: 2511424 - RNA, 19 nt, Artificial Sequence
  Description of Artificial Sequence: Synthetic oligonucleotide
gggaugccggggucuacca

SEQ ID NO: 2511425 - RNA, 19 nt, Artificial Sequence
  Description of Artificial Sequence: Synthetic oligonucleotide
gagggaugccggggucuac

SEQ ID NO: 2511426 - RNA, 19 nt, Artificial Sequence
  Description of Artificial Sequence: Synthetic oligonucleotide
ccucagcgcucaaggcucc

SEQ ID NO: 2511427 - RNA, 19 nt, Artificial Sequence
  Description of Artificial Sequence: Synthetic oligonucleotide
ggcuggcacggugugcagc

SEQ ID NO: 2511428 - RNA, 19 nt, Artificial Sequence
  Description of Artificial Sequence: Synthetic oligonucleotide
guggcccaacugcggcccc

SEQ ID NO: 2511429 - RNA, 19 nt, Artificial Sequence
  Description of Artificial Sequence: Synthetic oligonucleotide
cgcaccugaggcugaacuc

SEQ ID NO: 2511430 - RNA, 19 nt, Artificial Sequence
  Description of Artificial Sequence: Synthetic oligonucleotide
cagcaacagggcaggugaa

SEQ ID NO: 2511431 - RNA, 19 nt, Artificial Sequence
  Description of Artificial Sequence: Synthetic oligonucleotide
agucgcaccugaggcugaa

SEQ ID NO: 2511432 - RNA, 19 nt, Artificial Sequence
  Description of Artificial Sequence: Synthetic oligonucleotide
ccuggacccucagagccug

SEQ ID NO: 2511433 - RNA, 19 nt, Artificial Sequence
  Description of Artificial Sequence: Synthetic oligonucleotide
gcgcucaaggcuccaaccu

SEQ ID NO: 2511434 - RNA, 19 nt, Artificial Sequence
  Description of Artificial Sequence: Synthetic oligonucleotide
ggugugcagcaaaggguga

SEQ ID NO: 2511435 - RNA, 19 nt, Artificial Sequence
  Description of Artificial Sequence: Synthetic oligonucleotide
ggggucuaccagggacugg

SEQ ID NO: 2511436 - RNA, 19 nt, Artificial Sequence
  Description of Artificial Sequence: Synthetic oligonucleotide
uugggcccucagccagcaa

SEQ ID NO: 2511437 - RNA, 19 nt, Artificial Sequence
  Description of Artificial Sequence: Synthetic oligonucleotide
ggccuccaggcaaagaccu

SEQ ID NO: 2511438 - RNA, 19 nt, Artificial Sequence
  Description of Artificial Sequence: Synthetic oligonucleotide
ggacuggcugcaggaggcc

SEQ ID NO: 2511439 - RNA, 19 nt, Artificial Sequence
  Description of Artificial Sequence: Synthetic oligonucleotide
uaccagggacuggguuugu

SEQ ID NO: 2511440 - RNA, 19 nt, Artificial Sequence
  Description of Artificial Sequence: Synthetic oligonucleotide
ggcccugacccagcuguug

SEQ ID NO: 2511441 - RNA, 19 nt, Artificial Sequence
  Description of Artificial Sequence: Synthetic oligonucleotide
gcaaagggugaggcucggc

SEQ ID NO: 2511442 - RNA, 19 nt, Artificial Sequence
  Description of Artificial Sequence: Synthetic oligonucleotide
cggugcuccagccaugcca

SEQ ID NO: 2511443 - RNA, 19 nt, Artificial Sequence
  Description of Artificial Sequence: Synthetic oligonucleotide
gggcccucagccagcaauc

SEQ ID NO: 2511444 - RNA, 19 nt, Artificial Sequence
  Description of Artificial Sequence: Synthetic oligonucleotide
cagucgcaccugaggcuga

SEQ ID NO: 2511445 - RNA, 19 nt, Artificial Sequence
  Description of Artificial Sequence: Synthetic oligonucleotide
gucgcaccugaggcugaac

SEQ ID NO: 2511446 - RNA, 19 nt, Artificial Sequence
  Description of Artificial Sequence: Synthetic oligonucleotide
ggugccucuugcagucgca

SEQ ID NO: 2511447 - RNA, 19 nt, Artificial Sequence
  Description of Artificial Sequence: Synthetic oligonucleotide
ccaauaccagggcccagaa

SEQ ID NO: 2511448 - RNA, 19 nt, Artificial Sequence
  Description of Artificial Sequence: Synthetic oligonucleotide
ucggcccuuccagcccaac

SEQ ID NO: 2511449 - RNA, 19 nt, Artificial Sequence
  Description of Artificial Sequence: Synthetic oligonucleotide
cccgcagaucagagcugcc

SEQ ID NO: 2511450 - RNA, 19 nt, Artificial Sequence
  Description of Artificial Sequence: Synthetic oligonucleotide
cacggcccguagccaggac

SEQ ID NO: 2511451 - RNA, 19 nt, Artificial Sequence
  Description of Artificial Sequence: Synthetic oligonucleotide
gcacacagcggcacagaaa

SEQ ID NO: 2511452 - RNA, 19 nt, Artificial Sequence
  Description of Artificial Sequence: Synthetic oligonucleotide
guccggucugagggagaug

SEQ ID NO: 2511453 - RNA, 19 nt, Artificial Sequence
  Description of Artificial Sequence: Synthetic oligonucleotide
ccggucugagggagaugag

SEQ ID NO: 2511454 - RNA, 19 nt, Artificial Sequence
  Description of Artificial Sequence: Synthetic oligonucleotide
cagagcuggccuugcucgu

SEQ ID NO: 2511455 - RNA, 19 nt, Artificial Sequence
  Description of Artificial Sequence: Synthetic oligonucleotide
cguagccaggaccuucuga

SEQ ID NO: 2511456 - RNA, 19 nt, Artificial Sequence
  Description of Artificial Sequence: Synthetic oligonucleotide
gcggccccgcagaucagag

SEQ ID NO: 2511457 - RNA, 19 nt, Artificial Sequence
  Description of Artificial Sequence: Synthetic oligonucleotide
gcuccaucugguauugcau

SEQ ID NO: 2511458 - RNA, 19 nt, Artificial Sequence
  Description of Artificial Sequence: Synthetic oligonucleotide
ccuucugacucggcccuuc

SEQ ID NO: 2511459 - RNA, 19 nt, Artificial Sequence
  Description of Artificial Sequence: Synthetic oligonucleotide
ggccaauaccagggcccag

SEQ ID NO: 2511460 - RNA, 19 nt, Artificial Sequence
  Description of Artificial Sequence: Synthetic oligonucleotide
ggggcagagcuggccuugc

SEQ ID NO: 2511461 - RNA, 19 nt, Artificial Sequence
  Description of Artificial Sequence: Synthetic oligonucleotide
gcucugugccgacggccca

SEQ ID NO: 2511462 - RNA, 19 nt, Artificial Sequence
  Description of Artificial Sequence: Synthetic oligonucleotide
ggccguggcacugucgccu

SEQ ID NO: 2511463 - RNA, 19 nt, Artificial Sequence
  Description of Artificial Sequence: Synthetic oligonucleotide
cggcacagacgcucuugag

SEQ ID NO: 2511464 - RNA, 19 nt, Artificial Sequence
  Description of Artificial Sequence: Synthetic oligonucleotide
ccacucaccaaaggcagcu

SEQ ID NO: 2511465 - RNA, 19 nt, Artificial Sequence
  Description of Artificial Sequence: Synthetic oligonucleotide
gggacuggguuuguccggu

SEQ ID NO: 2511466 - RNA, 19 nt, Artificial Sequence
  Description of Artificial Sequence: Synthetic oligonucleotide
cucgucugcacggcccgua

SEQ ID NO: 2511467 - RNA, 19 nt, Artificial Sequence
  Description of Artificial Sequence: Synthetic oligonucleotide
gcccguagccaggaccuuc

SEQ ID NO: 2511468 - RNA, 19 nt, Artificial Sequence
  Description of Artificial Sequence: Synthetic oligonucleotide
cuggacccucagagccuga

SEQ ID NO: 2511469 - RNA, 19 nt, Artificial Sequence
  Description of Artificial Sequence: Synthetic oligonucleotide
ggcccaacugcggccccgc

SEQ ID NO: 2511470 - RNA, 19 nt, Artificial Sequence
  Description of Artificial Sequence: Synthetic oligonucleotide
ccgacggcccagcaccuca

SEQ ID NO: 2511471 - RNA, 19 nt, Artificial Sequence
  Description of Artificial Sequence: Synthetic oligonucleotide
cgucugcacggcccguagc

SEQ ID NO: 2511472 - RNA, 19 nt, Artificial Sequence
  Description of Artificial Sequence: Synthetic oligonucleotide
cucagcgcucaaggcucca

SEQ ID NO: 2511473 - RNA, 19 nt, Artificial Sequence
  Description of Artificial Sequence: Synthetic oligonucleotide
cugugccgacggcccagca

SEQ ID NO: 2511474 - RNA, 19 nt, Artificial Sequence
  Description of Artificial Sequence: Synthetic oligonucleotide
gcggugcuccagccaugcc

SEQ ID NO: 2511475 - RNA, 19 nt, Artificial Sequence
  Description of Artificial Sequence: Synthetic oligonucleotide
accuucugacucggcccuu

SEQ ID NO: 2511476 - RNA, 19 nt, Artificial Sequence
  Description of Artificial Sequence: Synthetic oligonucleotide
ccagcccaacacccaccug

SEQ ID NO: 2511477 - RNA, 19 nt, Artificial Sequence
  Description of Artificial Sequence: Synthetic oligonucleotide
caacacccaccugaaucau

SEQ ID NO: 2511478 - RNA, 19 nt, Artificial Sequence
  Description of Artificial Sequence: Synthetic oligonucleotide
cggcacagaaagguucauc

SEQ ID NO: 2511479 - RNA, 19 nt, Artificial Sequence
  Description of Artificial Sequence: Synthetic oligonucleotide
ccaucugguauugcaucua

SEQ ID NO: 2511480 - RNA, 19 nt, Artificial Sequence
  Description of Artificial Sequence: Synthetic oligonucleotide
cgcagaucagagcugcccu

SEQ ID NO: 2511481 - RNA, 19 nt, Artificial Sequence
  Description of Artificial Sequence: Synthetic oligonucleotide
ccggggucuaccagggacu

SEQ ID NO: 2511482 - RNA, 19 nt, Artificial Sequence
  Description of Artificial Sequence: Synthetic oligonucleotide
gccccguccacuguccacu

SEQ ID NO: 2511483 - RNA, 19 nt, Artificial Sequence
  Description of Artificial Sequence: Synthetic oligonucleotide
gccccgcagaucagagcug

SEQ ID NO: 2511484 - RNA, 19 nt, Artificial Sequence
  Description of Artificial Sequence: Synthetic oligonucleotide
ccguagccaggaccuucug

SEQ ID NO: 2511485 - RNA, 19 nt, Artificial Sequence
  Description of Artificial Sequence: Synthetic oligonucleotide
cccguagccaggaccuucu

SEQ ID NO: 2511486 - RNA, 19 nt, Artificial Sequence
  Description of Artificial Sequence: Synthetic oligonucleotide
cucagccagcaaucagcuu

SEQ ID NO: 2511487 - RNA, 19 nt, Artificial Sequence
  Description of Artificial Sequence: Synthetic oligonucleotide
cggggucuaccagggacug

SEQ ID NO: 2511488 - RNA, 19 nt, Artificial Sequence
  Description of Artificial Sequence: Synthetic oligonucleotide
cucggcccuuccagcccaa

SEQ ID NO: 2511489 - RNA, 19 nt, Artificial Sequence
  Description of Artificial Sequence: Synthetic oligonucleotide
aggcccugacccagcuguu

SEQ ID NO: 2511490 - RNA, 19 nt, Artificial Sequence
  Description of Artificial Sequence: Synthetic oligonucleotide
cuacagcaacagggcaggu

SEQ ID NO: 2511491 - RNA, 19 nt, Artificial Sequence
  Description of Artificial Sequence: Synthetic oligonucleotide
gcacggcccguagccagga

SEQ ID NO: 2511492 - RNA, 19 nt, Artificial Sequence
  Description of Artificial Sequence: Synthetic oligonucleotide
caggaggccguggcacugu

SEQ ID NO: 2511493 - RNA, 19 nt, Artificial Sequence
  Description of Artificial Sequence: Synthetic oligonucleotide
caacugcggccccgcagau

SEQ ID NO: 2511494 - RNA, 19 nt, Artificial Sequence
  Description of Artificial Sequence: Synthetic oligonucleotide
ggcucggcacagacgcucu

SEQ ID NO: 2511495 - RNA, 19 nt, Artificial Sequence
  Description of Artificial Sequence: Synthetic oligonucleotide
ggucuaccagggacugggu

SEQ ID NO: 2511496 - RNA, 19 nt, Artificial Sequence
  Description of Artificial Sequence: Synthetic oligonucleotide
cggcccguagccaggaccu

SEQ ID NO: 2511497 - RNA, 19 nt, Artificial Sequence
  Description of Artificial Sequence: Synthetic oligonucleotide
gccuggacccucagagccu

SEQ ID NO: 2511498 - RNA, 19 nt, Artificial Sequence
  Description of Artificial Sequence: Synthetic oligonucleotide
cggcccuuccagcccaaca

SEQ ID NO: 2511499 - RNA, 19 nt, Artificial Sequence
  Description of Artificial Sequence: Synthetic oligonucleotide
gcccaacugcggccccgca

SEQ ID NO: 2511500 - RNA, 19 nt, Artificial Sequence
  Description of Artificial Sequence: Synthetic oligonucleotide
gccgacggcccagcaccuc

SEQ ID NO: 2511501 - RNA, 19 nt, Artificial Sequence
  Description of Artificial Sequence: Synthetic oligonucleotide
gcccaacacccaccugaau

SEQ ID NO: 2511502 - RNA, 19 nt, Artificial Sequence
  Description of Artificial Sequence: Synthetic oligonucleotide
ccacugcuguggcccaacu

SEQ ID NO: 2511503 - RNA, 19 nt, Artificial Sequence
  Description of Artificial Sequence: Synthetic oligonucleotide
gcggcacagaaagguucau

SEQ ID NO: 2511504 - RNA, 19 nt, Artificial Sequence
  Description of Artificial Sequence: Synthetic oligonucleotide
gcucggcacagacgcucuu

SEQ ID NO: 2511505 - RNA, 19 nt, Artificial Sequence
  Description of Artificial Sequence: Synthetic oligonucleotide
cacugucgccuuggccaau

SEQ ID NO: 2511506 - RNA, 19 nt, Artificial Sequence
  Description of Artificial Sequence: Synthetic oligonucleotide
ccacaccuguaggccucca

SEQ ID NO: 2511507 - RNA, 19 nt, Artificial Sequence
  Description of Artificial Sequence: Synthetic oligonucleotide
cccugccuuuccauuccuu

SEQ ID NO: 2511508 - RNA, 19 nt, Artificial Sequence
  Description of Artificial Sequence: Synthetic oligonucleotide
gcucgucugcacggcccgu

SEQ ID NO: 2511509 - RNA, 19 nt, Artificial Sequence
  Description of Artificial Sequence: Synthetic oligonucleotide
ccccguccacuguccacuu

SEQ ID NO: 2511510 - RNA, 19 nt, Artificial Sequence
  Description of Artificial Sequence: Synthetic oligonucleotide
aauuaaucaaaacuaauac

SEQ ID NO: 2511511 - RNA, 19 nt, Artificial Sequence
  Description of Artificial Sequence: Synthetic oligonucleotide
aauaccuuaauuaucagcc

SEQ ID NO: 2511512 - RNA, 19 nt, Artificial Sequence
  Description of Artificial Sequence: Synthetic oligonucleotide
uuagaaacaagucagagcc

SEQ ID NO: 2511513 - RNA, 19 nt, Artificial Sequence
  Description of Artificial Sequence: Synthetic oligonucleotide
acaaagaauaaacacaacc

SEQ ID NO: 2511514 - RNA, 19 nt, Artificial Sequence
  Description of Artificial Sequence: Synthetic oligonucleotide
uuaauuaucagccaggggu

SEQ ID NO: 2511515 - RNA, 19 nt, Artificial Sequence
  Description of Artificial Sequence: Synthetic oligonucleotide
aagaauaugccucugaggu

SEQ ID NO: 2511516 - RNA, 19 nt, Artificial Sequence
  Description of Artificial Sequence: Synthetic oligonucleotide
auucaaucacauuagaaac

SEQ ID NO: 2511517 - RNA, 19 nt, Artificial Sequence
  Description of Artificial Sequence: Synthetic oligonucleotide
aauucaaucacauuagaaa

SEQ ID NO: 2511518 - RNA, 19 nt, Artificial Sequence
  Description of Artificial Sequence: Synthetic oligonucleotide
acuaauacaaagaauaaac

SEQ ID NO: 2511519 - RNA, 19 nt, Artificial Sequence
  Description of Artificial Sequence: Synthetic oligonucleotide
acaaaugaaauucaaucac

SEQ ID NO: 2511520 - RNA, 19 nt, Artificial Sequence
  Description of Artificial Sequence: Synthetic oligonucleotide
aaaauaaauacacugcgau

SEQ ID NO: 2511521 - RNA, 19 nt, Artificial Sequence
  Description of Artificial Sequence: Synthetic oligonucleotide
aaaacuaauacaaagaaua

SEQ ID NO: 2511522 - RNA, 19 nt, Artificial Sequence
  Description of Artificial Sequence: Synthetic oligonucleotide
uauaaagcugucuagaaac

SEQ ID NO: 2511523 - RNA, 19 nt, Artificial Sequence
  Description of Artificial Sequence: Synthetic oligonucleotide
uuaguuaccucccaaaaga

SEQ ID NO: 2511524 - RNA, 19 nt, Artificial Sequence
  Description of Artificial Sequence: Synthetic oligonucleotide
aggucuuaggguuuuaugc

SEQ ID NO: 2511525 - RNA, 19 nt, Artificial Sequence
  Description of Artificial Sequence: Synthetic oligonucleotide
aauaaauacacugcgauaa

SEQ ID NO: 2511526 - RNA, 19 nt, Artificial Sequence
  Description of Artificial Sequence: Synthetic oligonucleotide
aaaacuucccuuuggacug

SEQ ID NO: 2511527 - RNA, 19 nt, Artificial Sequence
  Description of Artificial Sequence: Synthetic oligonucleotide
ucuuuugcgaguuugaggu

SEQ ID NO: 2511528 - RNA, 19 nt, Artificial Sequence
  Description of Artificial Sequence: Synthetic oligonucleotide
aaagaauaugccucugagg

SEQ ID NO: 2511529 - RNA, 19 nt, Artificial Sequence
  Description of Artificial Sequence: Synthetic oligonucleotide
uuuuauaaugcauugacuu

SEQ ID NO: 2511530 - RNA, 19 nt, Artificial Sequence
  Description of Artificial Sequence: Synthetic oligonucleotide
agauaaaucccaucuacgg

SEQ ID NO: 2511531 - RNA, 19 nt, Artificial Sequence
  Description of Artificial Sequence: Synthetic oligonucleotide
cuuacauucacucaaacca

SEQ ID NO: 2511532 - RNA, 19 nt, Artificial Sequence
  Description of Artificial Sequence: Synthetic oligonucleotide
aaagaauaaacacaaccau

SEQ ID NO: 2511533 - RNA, 19 nt, Artificial Sequence
  Description of Artificial Sequence: Synthetic oligonucleotide
cacauuagaaacaagucag

SEQ ID NO: 2511534 - RNA, 19 nt, Artificial Sequence
  Description of Artificial Sequence: Synthetic oligonucleotide
ucacauuagaaacaaguca

SEQ ID NO: 2511535 - RNA, 19 nt, Artificial Sequence
  Description of Artificial Sequence: Synthetic oligonucleotide
aauaucauucacccuuuuc

SEQ ID NO: 2511536 - RNA, 19 nt, Artificial Sequence
  Description of Artificial Sequence: Synthetic oligonucleotide
uaaagaauaugccucugag

SEQ ID NO: 2511537 - RNA, 19 nt, Artificial Sequence
  Description of Artificial Sequence: Synthetic oligonucleotide
gauaaaucccaucuacggg

SEQ ID NO: 2511538 - RNA, 19 nt, Artificial Sequence
  Description of Artificial Sequence: Synthetic oligonucleotide
uugacuuacaaaugaacag

SEQ ID NO: 2511539 - RNA, 19 nt, Artificial Sequence
  Description of Artificial Sequence: Synthetic oligonucleotide
caaagacugaccuagcagg

SEQ ID NO: 2511540 - RNA, 19 nt, Artificial Sequence
  Description of Artificial Sequence: Synthetic oligonucleotide
auuaaucaaaacuaauaca

SEQ ID NO: 2511541 - RNA, 19 nt, Artificial Sequence
  Description of Artificial Sequence: Synthetic oligonucleotide
caugugaacagcaucacag

SEQ ID NO: 2511542 - RNA, 19 nt, Artificial Sequence
  Description of Artificial Sequence: Synthetic oligonucleotide
agaaauaucauucacccuu

SEQ ID NO: 2511543 - RNA, 19 nt, Artificial Sequence
  Description of Artificial Sequence: Synthetic oligonucleotide
uuuaguuaccucccaaaag

SEQ ID NO: 2511544 - RNA, 19 nt, Artificial Sequence
  Description of Artificial Sequence: Synthetic oligonucleotide
ugugacaauaccuuaauua

SEQ ID NO: 2511545 - RNA, 19 nt, Artificial Sequence
  Description of Artificial Sequence: Synthetic oligonucleotide
cuagaaacaaaugaaauuc

SEQ ID NO: 2511546 - RNA, 19 nt, Artificial Sequence
  Description of Artificial Sequence: Synthetic oligonucleotide
auaucauucacccuuuuca

SEQ ID NO: 2511547 - RNA, 19 nt, Artificial Sequence
  Description of Artificial Sequence: Synthetic oligonucleotide
ugucagacaaacuacaauc

SEQ ID NO: 2511548 - RNA, 19 nt, Artificial Sequence
  Description of Artificial Sequence: Synthetic oligonucleotide
cauuuuauaaugcauugac

SEQ ID NO: 2511549 - RNA, 19 nt, Artificial Sequence
  Description of Artificial Sequence: Synthetic oligonucleotide
uaaaauaaauacacugcga

SEQ ID NO: 2511550 - RNA, 19 nt, Artificial Sequence
  Description of Artificial Sequence: Synthetic oligonucleotide
uagcauuuuaguuaccucc

SEQ ID NO: 2511551 - RNA, 19 nt, Artificial Sequence
  Description of Artificial Sequence: Synthetic oligonucleotide
ucaugugcuaggaugaagc

SEQ ID NO: 2511552 - RNA, 19 nt, Artificial Sequence
  Description of Artificial Sequence: Synthetic oligonucleotide
acuuuaaagaauaugccuc

SEQ ID NO: 2511553 - RNA, 19 nt, Artificial Sequence
  Description of Artificial Sequence: Synthetic oligonucleotide
aaaaguaaguauguggccu

SEQ ID NO: 2511554 - RNA, 19 nt, Artificial Sequence
  Description of Artificial Sequence: Synthetic oligonucleotide
ugcauugacuuacaaauga

SEQ ID NO: 2511555 - RNA, 19 nt, Artificial Sequence
  Description of Artificial Sequence: Synthetic oligonucleotide
uaagcuuacauucacucaa

SEQ ID NO: 2511556 - RNA, 19 nt, Artificial Sequence
  Description of Artificial Sequence: Synthetic oligonucleotide
uccuuaacuagcauuuuag

SEQ ID NO: 2511557 - RNA, 19 nt, Artificial Sequence
  Description of Artificial Sequence: Synthetic oligonucleotide
uuuaagcuuacauucacuc

SEQ ID NO: 2511558 - RNA, 19 nt, Artificial Sequence
  Description of Artificial Sequence: Synthetic oligonucleotide
aaagauguuacacguggca

SEQ ID NO: 2511559 - RNA, 19 nt, Artificial Sequence
  Description of Artificial Sequence: Synthetic oligonucleotide
aauacacugcgauaaauua

SEQ ID NO: 2511560 - RNA, 19 nt, Artificial Sequence
  Description of Artificial Sequence: Synthetic oligonucleotide
cucacuucaggucuuaggg

SEQ ID NO: 2511561 - RNA, 19 nt, Artificial Sequence
  Description of Artificial Sequence: Synthetic oligonucleotide
caaagaauaaacacaacca

SEQ ID NO: 2511562 - RNA, 19 nt, Artificial Sequence
  Description of Artificial Sequence: Synthetic oligonucleotide
acuacaauccucuuucucu

SEQ ID NO: 2511563 - RNA, 19 nt, Artificial Sequence
  Description of Artificial Sequence: Synthetic oligonucleotide
guagagauuccuuaacuag

SEQ ID NO: 2511564 - RNA, 19 nt, Artificial Sequence
  Description of Artificial Sequence: Synthetic oligonucleotide
caaacuacaauccucuuuc

SEQ ID NO: 2511565 - RNA, 19 nt, Artificial Sequence
  Description of Artificial Sequence: Synthetic oligonucleotide
ucucaguugaaccuccugc

SEQ ID NO: 2511566 - RNA, 19 nt, Artificial Sequence
  Description of Artificial Sequence: Synthetic oligonucleotide
aacuacaauccucuuucuc

SEQ ID NO: 2511567 - RNA, 19 nt, Artificial Sequence
  Description of Artificial Sequence: Synthetic oligonucleotide
uagagauuccuuaacuagc

SEQ ID NO: 2511568 - RNA, 19 nt, Artificial Sequence
  Description of Artificial Sequence: Synthetic oligonucleotide
acugcgauaaauuaaucaa

SEQ ID NO: 2511569 - RNA, 19 nt, Artificial Sequence
  Description of Artificial Sequence: Synthetic oligonucleotide
uuauaaugcauugacuuac

SEQ ID NO: 2511570 - RNA, 19 nt, Artificial Sequence
  Description of Artificial Sequence: Synthetic oligonucleotide
uaccuuaauuaucagccag

SEQ ID NO: 2511571 - RNA, 19 nt, Artificial Sequence
  Description of Artificial Sequence: Synthetic oligonucleotide
uauuuaagcuuacauucac

SEQ ID NO: 2511572 - RNA, 19 nt, Artificial Sequence
  Description of Artificial Sequence: Synthetic oligonucleotide
ugcgauaaauuaaucaaaa

SEQ ID NO: 2511573 - RNA, 19 nt, Artificial Sequence
  Description of Artificial Sequence: Synthetic oligonucleotide
uucacucaaaccaugugac

SEQ ID NO: 2511574 - RNA, 19 nt, Artificial Sequence
  Description of Artificial Sequence: Synthetic oligonucleotide
ugucuagaaacaaaugaaa

SEQ ID NO: 2511575 - RNA, 19 nt, Artificial Sequence
  Description of Artificial Sequence: Synthetic oligonucleotide
gacaauaccuuaauuauca

SEQ ID NO: 2511576 - RNA, 19 nt, Artificial Sequence
  Description of Artificial Sequence: Synthetic oligonucleotide
auucacucaaaccauguga

SEQ ID NO: 2511577 - RNA, 19 nt, Artificial Sequence
  Description of Artificial Sequence: Synthetic oligonucleotide
uuaaagaauaugccucuga

SEQ ID NO: 2511578 - RNA, 19 nt, Artificial Sequence
  Description of Artificial Sequence: Synthetic oligonucleotide
aaaagauguuacacguggc

SEQ ID NO: 2511579 - RNA, 19 nt, Artificial Sequence
  Description of Artificial Sequence: Synthetic oligonucleotide
acacuuuaaagaauaugcc

SEQ ID NO: 2511580 - RNA, 19 nt, Artificial Sequence
  Description of Artificial Sequence: Synthetic oligonucleotide
uuccccaucuuacaaaaug

SEQ ID NO: 2511581 - RNA, 19 nt, Artificial Sequence
  Description of Artificial Sequence: Synthetic oligonucleotide
uacaaaaugccacauggua

SEQ ID NO: 2511582 - RNA, 19 nt, Artificial Sequence
  Description of Artificial Sequence: Synthetic oligonucleotide
ugcucaaagacugaccuag

SEQ ID NO: 2511583 - RNA, 19 nt, Artificial Sequence
  Description of Artificial Sequence: Synthetic oligonucleotide
guuuuaugcagaaauauca

SEQ ID NO: 2511584 - RNA, 19 nt, Artificial Sequence
  Description of Artificial Sequence: Synthetic oligonucleotide
acaagucagagccacaugu

SEQ ID NO: 2511585 - RNA, 19 nt, Artificial Sequence
  Description of Artificial Sequence: Synthetic oligonucleotide
uaugcagaaauaucauuca

SEQ ID NO: 2511586 - RNA, 19 nt, Artificial Sequence
  Description of Artificial Sequence: Synthetic oligonucleotide
uuucucucacuucaggucu

SEQ ID NO: 2511587 - RNA, 19 nt, Artificial Sequence
  Description of Artificial Sequence: Synthetic oligonucleotide
acuuauuuaagcuuacauu

SEQ ID NO: 2511588 - RNA, 19 nt, Artificial Sequence
  Description of Artificial Sequence: Synthetic oligonucleotide
uaacuagcauuuuaguuac

SEQ ID NO: 2511589 - RNA, 19 nt, Artificial Sequence
  Description of Artificial Sequence: Synthetic oligonucleotide
caauaccuuaauuaucagc

SEQ ID NO: 2511590 - RNA, 19 nt, Artificial Sequence
  Description of Artificial Sequence: Synthetic oligonucleotide
accauuuuauaaugcauug

SEQ ID NO: 2511591 - RNA, 19 nt, Artificial Sequence
  Description of Artificial Sequence: Synthetic oligonucleotide
caaaccaugugacaauacc

SEQ ID NO: 2511592 - RNA, 19 nt, Artificial Sequence
  Description of Artificial Sequence: Synthetic oligonucleotide
aaauaaauacacugcgaua

SEQ ID NO: 2511593 - RNA, 19 nt, Artificial Sequence
  Description of Artificial Sequence: Synthetic oligonucleotide
gcagaaauaucauucaccc

SEQ ID NO: 2511594 - RNA, 19 nt, Artificial Sequence
  Description of Artificial Sequence: Synthetic oligonucleotide
aaggcuacacagauaaauc

SEQ ID NO: 2511595 - RNA, 19 nt, Artificial Sequence
  Description of Artificial Sequence: Synthetic oligonucleotide
uuuuaugcagaaauaucau

SEQ ID NO: 2511596 - RNA, 19 nt, Artificial Sequence
  Description of Artificial Sequence: Synthetic oligonucleotide
aucuuuugcgaguuugagg

SEQ ID NO: 2511597 - RNA, 19 nt, Artificial Sequence
  Description of Artificial Sequence: Synthetic oligonucleotide
uacacugcgauaaauuaau

SEQ ID NO: 2511598 - RNA, 19 nt, Artificial Sequence
  Description of Artificial Sequence: Synthetic oligonucleotide
aaguauguggccuucucaa

SEQ ID NO: 2511599 - RNA, 19 nt, Artificial Sequence
  Description of Artificial Sequence: Synthetic oligonucleotide
uucucaacugucccaaagc

SEQ ID NO: 2511600 - RNA, 19 nt, Artificial Sequence
  Description of Artificial Sequence: Synthetic oligonucleotide
ugggcaguugcucaaagac

SEQ ID NO: 2511601 - RNA, 19 nt, Artificial Sequence
  Description of Artificial Sequence: Synthetic oligonucleotide
agucuacacacuuuaaaga

SEQ ID NO: 2511602 - RNA, 19 nt, Artificial Sequence
  Description of Artificial Sequence: Synthetic oligonucleotide
auugacuuacaaaugaaca

SEQ ID NO: 2511603 - RNA, 19 nt, Artificial Sequence
  Description of Artificial Sequence: Synthetic oligonucleotide
uuuggcugcugucagacaa

SEQ ID NO: 2511604 - RNA, 19 nt, Artificial Sequence
  Description of Artificial Sequence: Synthetic oligonucleotide
cuuuggacuguacuguucc

SEQ ID NO: 2511605 - RNA, 19 nt, Artificial Sequence
  Description of Artificial Sequence: Synthetic oligonucleotide
uuuauaaugcauugacuua

SEQ ID NO: 2511606 - RNA, 19 nt, Artificial Sequence
  Description of Artificial Sequence: Synthetic oligonucleotide
agguucaugugcuaggaug

SEQ ID NO: 2511607 - RNA, 19 nt, Artificial Sequence
  Description of Artificial Sequence: Synthetic oligonucleotide
uccccaucuuacaaaaugc

SEQ ID NO: 2511608 - RNA, 19 nt, Artificial Sequence
  Description of Artificial Sequence: Synthetic oligonucleotide
aucacauuagaaacaaguc

SEQ ID NO: 2511609 - RNA, 19 nt, Artificial Sequence
  Description of Artificial Sequence: Synthetic oligonucleotide
ucagacaaacuacaauccu

SEQ ID NO: 2511610 - RNA, 19 nt, Artificial Sequence
  Description of Artificial Sequence: Synthetic oligonucleotide
uuaagcuuacauucacuca

SEQ ID NO: 2511611 - RNA, 19 nt, Artificial Sequence
  Description of Artificial Sequence: Synthetic oligonucleotide
ucuauaaagcugucuagaa

SEQ ID NO: 2511612 - RNA, 19 nt, Artificial Sequence
  Description of Artificial Sequence: Synthetic oligonucleotide
aacuaauacaaagaauaaa

SEQ ID NO: 2511613 - RNA, 19 nt, Artificial Sequence
  Description of Artificial Sequence: Synthetic oligonucleotide
agcauuuuaguuaccuccc

SEQ ID NO: 2511614 - RNA, 19 nt, Artificial Sequence
  Description of Artificial Sequence: Synthetic oligonucleotide
aaaugaaauucaaucacau

SEQ ID NO: 2511615 - RNA, 19 nt, Artificial Sequence
  Description of Artificial Sequence: Synthetic oligonucleotide
ucucaacugucccaaagcu

SEQ ID NO: 2511616 - RNA, 19 nt, Artificial Sequence
  Description of Artificial Sequence: Synthetic oligonucleotide
agacugaccuagcagguuc

SEQ ID NO: 2511617 - RNA, 19 nt, Artificial Sequence
  Description of Artificial Sequence: Synthetic oligonucleotide
aaaccaugugacaauaccu

SEQ ID NO: 2511618 - RNA, 19 nt, Artificial Sequence
  Description of Artificial Sequence: Synthetic oligonucleotide
ucucacuucaggucuuagg

SEQ ID NO: 2511619 - RNA, 19 nt, Artificial Sequence
  Description of Artificial Sequence: Synthetic oligonucleotide
uaaguauguggccuucuca

SEQ ID NO: 2511620 - RNA, 19 nt, Artificial Sequence
  Description of Artificial Sequence: Synthetic oligonucleotide
uguacuguuccccaucuua

SEQ ID NO: 2511621 - RNA, 19 nt, Artificial Sequence
  Description of Artificial Sequence: Synthetic oligonucleotide
aaauucaaucacauuagaa

SEQ ID NO: 2511622 - RNA, 19 nt, Artificial Sequence
  Description of Artificial Sequence: Synthetic oligonucleotide
ugaaccuccugcuuugggc

SEQ ID NO: 2511623 - RNA, 19 nt, Artificial Sequence
  Description of Artificial Sequence: Synthetic oligonucleotide
uaaugcauugacuuacaaa

SEQ ID NO: 2511624 - RNA, 19 nt, Artificial Sequence
  Description of Artificial Sequence: Synthetic oligonucleotide
uucuauaaagcugucuaga

SEQ ID NO: 2511625 - RNA, 19 nt, Artificial Sequence
  Description of Artificial Sequence: Synthetic oligonucleotide
augguagagauuccuuaac

SEQ ID NO: 2511626 - RNA, 19 nt, Artificial Sequence
  Description of Artificial Sequence: Synthetic oligonucleotide
ucauucacccuuuucaaua

SEQ ID NO: 2511627 - RNA, 19 nt, Artificial Sequence
  Description of Artificial Sequence: Synthetic oligonucleotide
uuacacguggcacuuauuu

SEQ ID NO: 2511628 - RNA, 19 nt, Artificial Sequence
  Description of Artificial Sequence: Synthetic oligonucleotide
agaauaaacacaaccauuu

SEQ ID NO: 2511629 - RNA, 19 nt, Artificial Sequence
  Description of Artificial Sequence: Synthetic oligonucleotide
ucuuucucucacuucaggu

SEQ ID NO: 2511630 - RNA, 19 nt, Artificial Sequence
  Description of Artificial Sequence: Synthetic oligonucleotide
gaauaugccucugagguuc

SEQ ID NO: 2511631 - RNA, 19 nt, Artificial Sequence
  Description of Artificial Sequence: Synthetic oligonucleotide
cauuagaaacaagucagag

SEQ ID NO: 2511632 - RNA, 19 nt, Artificial Sequence
  Description of Artificial Sequence: Synthetic oligonucleotide
acagcaucacagucuacac

SEQ ID NO: 2511633 - RNA, 19 nt, Artificial Sequence
  Description of Artificial Sequence: Synthetic oligonucleotide
uauaaugcauugacuuaca

SEQ ID NO: 2511634 - RNA, 19 nt, Artificial Sequence
  Description of Artificial Sequence: Synthetic oligonucleotide
ugacaauaccuuaauuauc

SEQ ID NO: 2511635 - RNA, 19 nt, Artificial Sequence
  Description of Artificial Sequence: Synthetic oligonucleotide
acacaaccauuuuauaaug

SEQ ID NO: 2511636 - RNA, 19 nt, Artificial Sequence
  Description of Artificial Sequence: Synthetic oligonucleotide
uucccuuuggacuguacug

SEQ ID NO: 2511637 - RNA, 19 nt, Artificial Sequence
  Description of Artificial Sequence: Synthetic oligonucleotide
cuuaauuaucagccagggg

SEQ ID NO: 2511638 - RNA, 19 nt, Artificial Sequence
  Description of Artificial Sequence: Synthetic oligonucleotide
aguauguggccuucucaac

SEQ ID NO: 2511639 - RNA, 19 nt, Artificial Sequence
  Description of Artificial Sequence: Synthetic oligonucleotide
uuuaugcagaaauaucauu

SEQ ID NO: 2511640 - RNA, 19 nt, Artificial Sequence
  Description of Artificial Sequence: Synthetic oligonucleotide
caaaugaaauucaaucaca

SEQ ID NO: 2511641 - RNA, 19 nt, Artificial Sequence
  Description of Artificial Sequence: Synthetic oligonucleotide
uuuugcgaguuugagguca

SEQ ID NO: 2511642 - RNA, 19 nt, Artificial Sequence
  Description of Artificial Sequence: Synthetic oligonucleotide
aaaguaaguauguggccuu

SEQ ID NO: 2511643 - RNA, 19 nt, Artificial Sequence
  Description of Artificial Sequence: Synthetic oligonucleotide
aaacuaauacaaagaauaa

SEQ ID NO: 2511644 - RNA, 19 nt, Artificial Sequence
  Description of Artificial Sequence: Synthetic oligonucleotide
agagccacaugugaacagc

SEQ ID NO: 2511645 - RNA, 19 nt, Artificial Sequence
  Description of Artificial Sequence: Synthetic oligonucleotide
ucuacacacuuuaaagaau

SEQ ID NO: 2511646 - RNA, 19 nt, Artificial Sequence
  Description of Artificial Sequence: Synthetic oligonucleotide
aggaugaagcuguccaggg

SEQ ID NO: 2511647 - RNA, 19 nt, Artificial Sequence
  Description of Artificial Sequence: Synthetic oligonucleotide
uaucauucacccuuuucaa

SEQ ID NO: 2511648 - RNA, 19 nt, Artificial Sequence
  Description of Artificial Sequence: Synthetic oligonucleotide
acuuuggcugcugucagac

SEQ ID NO: 2511649 - RNA, 19 nt, Artificial Sequence
  Description of Artificial Sequence: Synthetic oligonucleotide
uauguggccuucucaacug

SEQ ID NO: 2511650 - RNA, 19 nt, Artificial Sequence
  Description of Artificial Sequence: Synthetic oligonucleotide
ugcugucagacaaacuaca

SEQ ID NO: 2511651 - RNA, 19 nt, Artificial Sequence
  Description of Artificial Sequence: Synthetic oligonucleotide
cuuucucucacuucagguc

SEQ ID NO: 2511652 - RNA, 19 nt, Artificial Sequence
  Description of Artificial Sequence: Synthetic oligonucleotide
aaauacacugcgauaaauu

SEQ ID NO: 2511653 - RNA, 19 nt, Artificial Sequence
  Description of Artificial Sequence: Synthetic oligonucleotide
agcuuacauucacucaaac

SEQ ID NO: 2511654 - RNA, 19 nt, Artificial Sequence
  Description of Artificial Sequence: Synthetic oligonucleotide
ucuuaggguuuuaugcaga

SEQ ID NO: 2511655 - RNA, 19 nt, Artificial Sequence
  Description of Artificial Sequence: Synthetic oligonucleotide
uaauuaucagccagggguu

SEQ ID NO: 2511656 - RNA, 19 nt, Artificial Sequence
  Description of Artificial Sequence: Synthetic oligonucleotide
ucugagguucaugugcuag

SEQ ID NO: 2511657 - RNA, 19 nt, Artificial Sequence
  Description of Artificial Sequence: Synthetic oligonucleotide
cagacaaacuacaauccuc

SEQ ID NO: 2511658 - RNA, 19 nt, Artificial Sequence
  Description of Artificial Sequence: Synthetic oligonucleotide
aaacaagucagagccacau

SEQ ID NO: 2511659 - RNA, 19 nt, Artificial Sequence
  Description of Artificial Sequence: Synthetic oligonucleotide
acguggcacuuauuuaagc

SEQ ID NO: 2511660 - RNA, 19 nt, Artificial Sequence
  Description of Artificial Sequence: Synthetic oligonucleotide
cuagcagguuccaucagac

SEQ ID NO: 2511661 - RNA, 19 nt, Artificial Sequence
  Description of Artificial Sequence: Synthetic oligonucleotide
aauccucuuucucucacuu

SEQ ID NO: 2511662 - RNA, 19 nt, Artificial Sequence
  Description of Artificial Sequence: Synthetic oligonucleotide
uccugcuuugggcaguugc

SEQ ID NO: 2511663 - RNA, 19 nt, Artificial Sequence
  Description of Artificial Sequence: Synthetic oligonucleotide
ucacagucuacacacuuua

SEQ ID NO: 2511664 - RNA, 19 nt, Artificial Sequence
  Description of Artificial Sequence: Synthetic oligonucleotide
acuagcauuuuaguuaccu

SEQ ID NO: 2511665 - RNA, 19 nt, Artificial Sequence
  Description of Artificial Sequence: Synthetic oligonucleotide
acacguggcacuuauuuaa

SEQ ID NO: 2511666 - RNA, 19 nt, Artificial Sequence
  Description of Artificial Sequence: Synthetic oligonucleotide
uguuccccaucuuacaaaa

SEQ ID NO: 2511667 - RNA, 19 nt, Artificial Sequence
  Description of Artificial Sequence: Synthetic oligonucleotide
gucuuaggguuuuaugcag

SEQ ID NO: 2511668 - RNA, 19 nt, Artificial Sequence
  Description of Artificial Sequence: Synthetic oligonucleotide
gcugucuagaaacaaauga

SEQ ID NO: 2511669 - RNA, 19 nt, Artificial Sequence
  Description of Artificial Sequence: Synthetic oligonucleotide
uuuaaagaauaugccucug

SEQ ID NO: 2511670 - RNA, 19 nt, Artificial Sequence
  Description of Artificial Sequence: Synthetic oligonucleotide
uugaaccuccugcuuuggg

SEQ ID NO: 2511671 - RNA, 19 nt, Artificial Sequence
  Description of Artificial Sequence: Synthetic oligonucleotide
agacaaacuacaauccucu

SEQ ID NO: 2511672 - RNA, 19 nt, Artificial Sequence
  Description of Artificial Sequence: Synthetic oligonucleotide
acaauaccuuaauuaucag

SEQ ID NO: 2511673 - RNA, 19 nt, Artificial Sequence
  Description of Artificial Sequence: Synthetic oligonucleotide
gucagacaaacuacaaucc

SEQ ID NO: 2511674 - RNA, 19 nt, Artificial Sequence
  Description of Artificial Sequence: Synthetic oligonucleotide
auuuuauaaugcauugacu

SEQ ID NO: 2511675 - RNA, 19 nt, Artificial Sequence
  Description of Artificial Sequence: Synthetic oligonucleotide
aggucagaucuuuugcgag

SEQ ID NO: 2511676 - RNA, 19 nt, Artificial Sequence
  Description of Artificial Sequence: Synthetic oligonucleotide
gaucuuuugcgaguuugag

SEQ ID NO: 2511677 - RNA, 19 nt, Artificial Sequence
  Description of Artificial Sequence: Synthetic oligonucleotide
acaaacuacaauccucuuu

SEQ ID NO: 2511678 - RNA, 19 nt, Artificial Sequence
  Description of Artificial Sequence: Synthetic oligonucleotide
uguuacacguggcacuuau

SEQ ID NO: 2511679 - RNA, 19 nt, Artificial Sequence
  Description of Artificial Sequence: Synthetic oligonucleotide
uggcacuuauuuaagcuua

SEQ ID NO: 2511680 - RNA, 19 nt, Artificial Sequence
  Description of Artificial Sequence: Synthetic oligonucleotide
agauuccuuaacuagcauu

SEQ ID NO: 2511681 - RNA, 19 nt, Artificial Sequence
  Description of Artificial Sequence: Synthetic oligonucleotide
cugucuagaaacaaaugaa

SEQ ID NO: 2511682 - RNA, 19 nt, Artificial Sequence
  Description of Artificial Sequence: Synthetic oligonucleotide
acugucccaaagcuggcag

SEQ ID NO: 2511683 - RNA, 19 nt, Artificial Sequence
  Description of Artificial Sequence: Synthetic oligonucleotide
cuucucaacugucccaaag

SEQ ID NO: 2511684 - RNA, 19 nt, Artificial Sequence
  Description of Artificial Sequence: Synthetic oligonucleotide
ccaucuuacaaaaugccac

SEQ ID NO: 2511685 - RNA, 19 nt, Artificial Sequence
  Description of Artificial Sequence: Synthetic oligonucleotide
aaacuacaauccucuuucu

SEQ ID NO: 2511686 - RNA, 19 nt, Artificial Sequence
  Description of Artificial Sequence: Synthetic oligonucleotide
ucaaaccaugugacaauac

SEQ ID NO: 2511687 - RNA, 19 nt, Artificial Sequence
  Description of Artificial Sequence: Synthetic oligonucleotide
uccacuuuggcugcuguca

SEQ ID NO: 2511688 - RNA, 19 nt, Artificial Sequence
  Description of Artificial Sequence: Synthetic oligonucleotide
gaugaagcuguccaggggu

SEQ ID NO: 2511689 - RNA, 19 nt, Artificial Sequence
  Description of Artificial Sequence: Synthetic oligonucleotide
aaucccaucuacgggaaaa

SEQ ID NO: 2511690 - RNA, 19 nt, Artificial Sequence
  Description of Artificial Sequence: Synthetic oligonucleotide
uuaucagccagggguuugg

SEQ ID NO: 2511691 - RNA, 19 nt, Artificial Sequence
  Description of Artificial Sequence: Synthetic oligonucleotide
aaagcugucuagaaacaaa

SEQ ID NO: 2511692 - RNA, 19 nt, Artificial Sequence
  Description of Artificial Sequence: Synthetic oligonucleotide
cuacaauccucuuucucuc

SEQ ID NO: 2511693 - RNA, 19 nt, Artificial Sequence
  Description of Artificial Sequence: Synthetic oligonucleotide
cauucacccuuuucaauac

SEQ ID NO: 2511694 - RNA, 19 nt, Artificial Sequence
  Description of Artificial Sequence: Synthetic oligonucleotide
cacugcgauaaauuaauca

SEQ ID NO: 2511695 - RNA, 19 nt, Artificial Sequence
  Description of Artificial Sequence: Synthetic oligonucleotide
accuuaauuaucagccagg

SEQ ID NO: 2511696 - RNA, 19 nt, Artificial Sequence
  Description of Artificial Sequence: Synthetic oligonucleotide
uuccuuaacuagcauuuua

SEQ ID NO: 2511697 - RNA, 19 nt, Artificial Sequence
  Description of Artificial Sequence: Synthetic oligonucleotide
ugaccuagcagguuccauc

SEQ ID NO: 2511698 - RNA, 19 nt, Artificial Sequence
  Description of Artificial Sequence: Synthetic oligonucleotide
augccucugagguucaugu

SEQ ID NO: 2511699 - RNA, 19 nt, Artificial Sequence
  Description of Artificial Sequence: Synthetic oligonucleotide
acacacuuuaaagaauaug

SEQ ID NO: 2511700 - RNA, 19 nt, Artificial Sequence
  Description of Artificial Sequence: Synthetic oligonucleotide
ugucccaaagcuggcagag

SEQ ID NO: 2511701 - RNA, 19 nt, Artificial Sequence
  Description of Artificial Sequence: Synthetic oligonucleotide
aaguaaguauguggccuuc

SEQ ID NO: 2511702 - RNA, 19 nt, Artificial Sequence
  Description of Artificial Sequence: Synthetic oligonucleotide
auaccuuaauuaucagcca

SEQ ID NO: 2511703 - RNA, 19 nt, Artificial Sequence
  Description of Artificial Sequence: Synthetic oligonucleotide
uuugcgaguuugaggucag

SEQ ID NO: 2511704 - RNA, 19 nt, Artificial Sequence
  Description of Artificial Sequence: Synthetic oligonucleotide
cucccaaaagauguuacac

SEQ ID NO: 2511705 - RNA, 19 nt, Artificial Sequence
  Description of Artificial Sequence: Synthetic oligonucleotide
aagcugucuagaaacaaau

SEQ ID NO: 2511706 - RNA, 19 nt, Artificial Sequence
  Description of Artificial Sequence: Synthetic oligonucleotide
guugcucaaagacugaccu

SEQ ID NO: 2511707 - RNA, 19 nt, Artificial Sequence
  Description of Artificial Sequence: Synthetic oligonucleotide
uggacuguacuguucccca

SEQ ID NO: 2511708 - RNA, 19 nt, Artificial Sequence
  Description of Artificial Sequence: Synthetic oligonucleotide
guuaccucccaaaagaugu

SEQ ID NO: 2511709 - RNA, 19 nt, Artificial Sequence
  Description of Artificial Sequence: Synthetic oligonucleotide
aaagacugaccuagcaggu

SEQ ID NO: 2511710 - RNA, 19 nt, Artificial Sequence
  Description of Artificial Sequence: Synthetic oligonucleotide
cucaacugucccaaagcug

SEQ ID NO: 2511711 - RNA, 19 nt, Artificial Sequence
  Description of Artificial Sequence: Synthetic oligonucleotide
cucuuucucucacuucagg

SEQ ID NO: 2511712 - RNA, 19 nt, Artificial Sequence
  Description of Artificial Sequence: Synthetic oligonucleotide
cuagcauuuuaguuaccuc

SEQ ID NO: 2511713 - RNA, 19 nt, Artificial Sequence
  Description of Artificial Sequence: Synthetic oligonucleotide
gaaccuccugcuuugggca

SEQ ID NO: 2511714 - RNA, 19 nt, Artificial Sequence
  Description of Artificial Sequence: Synthetic oligonucleotide
agagauuccuuaacuagca

SEQ ID NO: 2511715 - RNA, 19 nt, Artificial Sequence
  Description of Artificial Sequence: Synthetic oligonucleotide
acuguacuguuccccaucu

SEQ ID NO: 2511716 - RNA, 19 nt, Artificial Sequence
  Description of Artificial Sequence: Synthetic oligonucleotide
uuggacuguacuguucccc

SEQ ID NO: 2511717 - RNA, 19 nt, Artificial Sequence
  Description of Artificial Sequence: Synthetic oligonucleotide
ucacuucaggucuuagggu

SEQ ID NO: 2511718 - RNA, 19 nt, Artificial Sequence
  Description of Artificial Sequence: Synthetic oligonucleotide
gugacaauaccuuaauuau

SEQ ID NO: 2511719 - RNA, 19 nt, Artificial Sequence
  Description of Artificial Sequence: Synthetic oligonucleotide
cacuuuaaagaauaugccu

SEQ ID NO: 2511720 - RNA, 19 nt, Artificial Sequence
  Description of Artificial Sequence: Synthetic oligonucleotide
uaguuaccucccaaaagau

SEQ ID NO: 2511721 - RNA, 19 nt, Artificial Sequence
  Description of Artificial Sequence: Synthetic oligonucleotide
aaccaugugacaauaccuu

SEQ ID NO: 2511722 - RNA, 19 nt, Artificial Sequence
  Description of Artificial Sequence: Synthetic oligonucleotide
ugcuuugggcaguugcuca

SEQ ID NO: 2511723 - RNA, 19 nt, Artificial Sequence
  Description of Artificial Sequence: Synthetic oligonucleotide
uucaugugcuaggaugaag

SEQ ID NO: 2511724 - RNA, 19 nt, Artificial Sequence
  Description of Artificial Sequence: Synthetic oligonucleotide
augugaacagcaucacagu

SEQ ID NO: 2511725 - RNA, 19 nt, Artificial Sequence
  Description of Artificial Sequence: Synthetic oligonucleotide
cugcugucagacaaacuac

SEQ ID NO: 2511726 - RNA, 19 nt, Artificial Sequence
  Description of Artificial Sequence: Synthetic oligonucleotide
gaccuagcagguuccauca

SEQ ID NO: 2511727 - RNA, 19 nt, Artificial Sequence
  Description of Artificial Sequence: Synthetic oligonucleotide
uuuggacuguacuguuccc

SEQ ID NO: 2511728 - RNA, 19 nt, Artificial Sequence
  Description of Artificial Sequence: Synthetic oligonucleotide
cauucacucaaaccaugug

SEQ ID NO: 2511729 - RNA, 19 nt, Artificial Sequence
  Description of Artificial Sequence: Synthetic oligonucleotide
acaugugaacagcaucaca

SEQ ID NO: 2511730 - RNA, 19 nt, Artificial Sequence
  Description of Artificial Sequence: Synthetic oligonucleotide
ucacucaaaccaugugaca

SEQ ID NO: 2511731 - RNA, 19 nt, Artificial Sequence
  Description of Artificial Sequence: Synthetic oligonucleotide
caagucagagccacaugug

SEQ ID NO: 2511732 - RNA, 19 nt, Artificial Sequence
  Description of Artificial Sequence: Synthetic oligonucleotide
ugagguucaugugcuagga

SEQ ID NO: 2511733 - RNA, 19 nt, Artificial Sequence
  Description of Artificial Sequence: Synthetic oligonucleotide
uacacacuuuaaagaauau

SEQ ID NO: 2511734 - RNA, 19 nt, Artificial Sequence
  Description of Artificial Sequence: Synthetic oligonucleotide
acuguuccccaucuuacaa

SEQ ID NO: 2511735 - RNA, 19 nt, Artificial Sequence
  Description of Artificial Sequence: Synthetic oligonucleotide
gggguuucucaguugaacc

SEQ ID NO: 2511736 - RNA, 19 nt, Artificial Sequence
  Description of Artificial Sequence: Synthetic oligonucleotide
cuuuaaagaauaugccucu

SEQ ID NO: 2511737 - RNA, 19 nt, Artificial Sequence
  Description of Artificial Sequence: Synthetic oligonucleotide
auaaugcauugacuuacaa

SEQ ID NO: 2511738 - RNA, 19 nt, Artificial Sequence
  Description of Artificial Sequence: Synthetic oligonucleotide
uacuguuccccaucuuaca

SEQ ID NO: 2511739 - RNA, 19 nt, Artificial Sequence
  Description of Artificial Sequence: Synthetic oligonucleotide
agccaggucagaucuuuug

SEQ ID NO: 2511740 - RNA, 19 nt, Artificial Sequence
  Description of Artificial Sequence: Synthetic oligonucleotide
aaauaucauucacccuuuu

SEQ ID NO: 2511741 - RNA, 19 nt, Artificial Sequence
  Description of Artificial Sequence: Synthetic oligonucleotide
cagaucuuuugcgaguuug

SEQ ID NO: 2511742 - RNA, 19 nt, Artificial Sequence
  Description of Artificial Sequence: Synthetic oligonucleotide
uacaauccucuuucucuca

SEQ ID NO: 2511743 - RNA, 19 nt, Artificial Sequence
  Description of Artificial Sequence: Synthetic oligonucleotide
auuuaagcuuacauucacu

SEQ ID NO: 2511744 - RNA, 19 nt, Artificial Sequence
  Description of Artificial Sequence: Synthetic oligonucleotide
aucauucacccuuuucaau

SEQ ID NO: 2511745 - RNA, 19 nt, Artificial Sequence
  Description of Artificial Sequence: Synthetic oligonucleotide
acucaaaccaugugacaau

SEQ ID NO: 2511746 - RNA, 19 nt, Artificial Sequence
  Description of Artificial Sequence: Synthetic oligonucleotide
cuuaacuagcauuuuaguu

SEQ ID NO: 2511747 - RNA, 19 nt, Artificial Sequence
  Description of Artificial Sequence: Synthetic oligonucleotide
aaaugccacaugguagaga

SEQ ID NO: 2511748 - RNA, 19 nt, Artificial Sequence
  Description of Artificial Sequence: Synthetic oligonucleotide
gauuccuuaacuagcauuu

SEQ ID NO: 2511749 - RNA, 19 nt, Artificial Sequence
  Description of Artificial Sequence: Synthetic oligonucleotide
aacuagcauuuuaguuacc

SEQ ID NO: 2511750 - RNA, 19 nt, Artificial Sequence
  Description of Artificial Sequence: Synthetic oligonucleotide
caggucuuaggguuuuaug

SEQ ID NO: 2511751 - RNA, 19 nt, Artificial Sequence
  Description of Artificial Sequence: Synthetic oligonucleotide
ucccuuuggacuguacugu

SEQ ID NO: 2511752 - RNA, 19 nt, Artificial Sequence
  Description of Artificial Sequence: Synthetic oligonucleotide
ggucuuaggguuuuaugca

SEQ ID NO: 2511753 - RNA, 19 nt, Artificial Sequence
  Description of Artificial Sequence: Synthetic oligonucleotide
agccuggggcuacagagug

SEQ ID NO: 2511754 - RNA, 19 nt, Artificial Sequence
  Description of Artificial Sequence: Synthetic oligonucleotide
accucccaaaagauguuac

SEQ ID NO: 2511755 - RNA, 19 nt, Artificial Sequence
  Description of Artificial Sequence: Synthetic oligonucleotide
auaaagcugucuagaaaca

SEQ ID NO: 2511756 - RNA, 19 nt, Artificial Sequence
  Description of Artificial Sequence: Synthetic oligonucleotide
uugggcaguugcucaaaga

SEQ ID NO: 2511757 - RNA, 19 nt, Artificial Sequence
  Description of Artificial Sequence: Synthetic oligonucleotide
uacacguggcacuuauuua

SEQ ID NO: 2511758 - RNA, 19 nt, Artificial Sequence
  Description of Artificial Sequence: Synthetic oligonucleotide
cugcgauaaauuaaucaaa

SEQ ID NO: 2511759 - RNA, 19 nt, Artificial Sequence
  Description of Artificial Sequence: Synthetic oligonucleotide
cacguggcacuuauuuaag

SEQ ID NO: 2511760 - RNA, 19 nt, Artificial Sequence
  Description of Artificial Sequence: Synthetic oligonucleotide
guaaguauguggccuucuc

SEQ ID NO: 2511761 - RNA, 19 nt, Artificial Sequence
  Description of Artificial Sequence: Synthetic oligonucleotide
ccaggucagaucuuuugcg

SEQ ID NO: 2511762 - RNA, 19 nt, Artificial Sequence
  Description of Artificial Sequence: Synthetic oligonucleotide
guuucucaguugaaccucc

SEQ ID NO: 2511763 - RNA, 19 nt, Artificial Sequence
  Description of Artificial Sequence: Synthetic oligonucleotide
ucaguugaaccuccugcuu

SEQ ID NO: 2511764 - RNA, 19 nt, Artificial Sequence
  Description of Artificial Sequence: Synthetic oligonucleotide
ccuuaauuaucagccaggg

SEQ ID NO: 2511765 - RNA, 19 nt, Artificial Sequence
  Description of Artificial Sequence: Synthetic oligonucleotide
gcgauaaauuaaucaaaac

SEQ ID NO: 2511766 - RNA, 19 nt, Artificial Sequence
  Description of Artificial Sequence: Synthetic oligonucleotide
gacuguacuguuccccauc

SEQ ID NO: 2511767 - RNA, 19 nt, Artificial Sequence
  Description of Artificial Sequence: Synthetic oligonucleotide
auacacugcgauaaauuaa

SEQ ID NO: 2511768 - RNA, 19 nt, Artificial Sequence
  Description of Artificial Sequence: Synthetic oligonucleotide
cucaaagacugaccuagca

SEQ ID NO: 2511769 - RNA, 19 nt, Artificial Sequence
  Description of Artificial Sequence: Synthetic oligonucleotide
acauuagaaacaagucaga

SEQ ID NO: 2511770 - RNA, 19 nt, Artificial Sequence
  Description of Artificial Sequence: Synthetic oligonucleotide
agaauaugccucugagguu

SEQ ID NO: 2511771 - RNA, 19 nt, Artificial Sequence
  Description of Artificial Sequence: Synthetic oligonucleotide
acauucacucaaaccaugu

SEQ ID NO: 2511772 - RNA, 19 nt, Artificial Sequence
  Description of Artificial Sequence: Synthetic oligonucleotide
guacuguuccccaucuuac

SEQ ID NO: 2511773 - RNA, 19 nt, Artificial Sequence
  Description of Artificial Sequence: Synthetic oligonucleotide
uguggccuucucaacuguc

SEQ ID NO: 2511774 - RNA, 19 nt, Artificial Sequence
  Description of Artificial Sequence: Synthetic oligonucleotide
aauuaucagccagggguuu

SEQ ID NO: 2511775 - RNA, 19 nt, Artificial Sequence
  Description of Artificial Sequence: Synthetic oligonucleotide
aacugucccaaagcuggca

SEQ ID NO: 2511776 - RNA, 19 nt, Artificial Sequence
  Description of Artificial Sequence: Synthetic oligonucleotide
gguagagauuccuuaacua

SEQ ID NO: 2511777 - RNA, 19 nt, Artificial Sequence
  Description of Artificial Sequence: Synthetic oligonucleotide
guauguggccuucucaacu

SEQ ID NO: 2511778 - RNA, 19 nt, Artificial Sequence
  Description of Artificial Sequence: Synthetic oligonucleotide
cuuaggguuuuaugcagaa

SEQ ID NO: 2511779 - RNA, 19 nt, Artificial Sequence
  Description of Artificial Sequence: Synthetic oligonucleotide
augcauugacuuacaaaug

SEQ ID NO: 2511780 - RNA, 19 nt, Artificial Sequence
  Description of Artificial Sequence: Synthetic oligonucleotide
cauuuuaguuaccucccaa

SEQ ID NO: 2511781 - RNA, 19 nt, Artificial Sequence
  Description of Artificial Sequence: Synthetic oligonucleotide
uuccaucagacuccacuuu

SEQ ID NO: 2511782 - RNA, 19 nt, Artificial Sequence
  Description of Artificial Sequence: Synthetic oligonucleotide
aaaucccaucuacgggaaa

SEQ ID NO: 2511783 - RNA, 19 nt, Artificial Sequence
  Description of Artificial Sequence: Synthetic oligonucleotide
augugacaauaccuuaauu

SEQ ID NO: 2511784 - RNA, 19 nt, Artificial Sequence
  Description of Artificial Sequence: Synthetic oligonucleotide
agaucuuuugcgaguuuga

SEQ ID NO: 2511785 - RNA, 19 nt, Artificial Sequence
  Description of Artificial Sequence: Synthetic oligonucleotide
agcugucuagaaacaaaug

SEQ ID NO: 2511786 - RNA, 19 nt, Artificial Sequence
  Description of Artificial Sequence: Synthetic oligonucleotide
uuaccucccaaaagauguu

SEQ ID NO: 2511787 - RNA, 19 nt, Artificial Sequence
  Description of Artificial Sequence: Synthetic oligonucleotide
ccacaugugaacagcauca

SEQ ID NO: 2511788 - RNA, 19 nt, Artificial Sequence
  Description of Artificial Sequence: Synthetic oligonucleotide
gacugaccuagcagguucc

SEQ ID NO: 2511789 - RNA, 19 nt, Artificial Sequence
  Description of Artificial Sequence: Synthetic oligonucleotide
cacuuauuuaagcuuacau

SEQ ID NO: 2511790 - RNA, 19 nt, Artificial Sequence
  Description of Artificial Sequence: Synthetic oligonucleotide
ccccaucuuacaaaaugcc

SEQ ID NO: 2511791 - RNA, 19 nt, Artificial Sequence
  Description of Artificial Sequence: Synthetic oligonucleotide
gguuccaucagacuccacu

SEQ ID NO: 2511792 - RNA, 19 nt, Artificial Sequence
  Description of Artificial Sequence: Synthetic oligonucleotide
aguaaguauguggccuucu

SEQ ID NO: 2511793 - RNA, 19 nt, Artificial Sequence
  Description of Artificial Sequence: Synthetic oligonucleotide
acacugcgauaaauuaauc

SEQ ID NO: 2511794 - RNA, 19 nt, Artificial Sequence
  Description of Artificial Sequence: Synthetic oligonucleotide
aagcuuacauucacucaaa

SEQ ID NO: 2511795 - RNA, 19 nt, Artificial Sequence
  Description of Artificial Sequence: Synthetic oligonucleotide
ugccucugagguucaugug

SEQ ID NO: 2511796 - RNA, 19 nt, Artificial Sequence
  Description of Artificial Sequence: Synthetic oligonucleotide
caacugucccaaagcuggc

SEQ ID NO: 2511797 - RNA, 19 nt, Artificial Sequence
  Description of Artificial Sequence: Synthetic oligonucleotide
uagcagguuccaucagacu

SEQ ID NO: 2511798 - RNA, 19 nt, Artificial Sequence
  Description of Artificial Sequence: Synthetic oligonucleotide
ucaggucuuaggguuuuau

SEQ ID NO: 2511799 - RNA, 19 nt, Artificial Sequence
  Description of Artificial Sequence: Synthetic oligonucleotide
guugaaccuccugcuuugg

SEQ ID NO: 2511800 - RNA, 19 nt, Artificial Sequence
  Description of Artificial Sequence: Synthetic oligonucleotide
ccaaaagauguuacacgug

SEQ ID NO: 2511801 - RNA, 19 nt, Artificial Sequence
  Description of Artificial Sequence: Synthetic oligonucleotide
aauaugccucugagguuca

SEQ ID NO: 2511802 - RNA, 19 nt, Artificial Sequence
  Description of Artificial Sequence: Synthetic oligonucleotide
uugcucaaagacugaccua

SEQ ID NO: 2511803 - RNA, 19 nt, Artificial Sequence
  Description of Artificial Sequence: Synthetic oligonucleotide
gaagcuguccagggguuuc

SEQ ID NO: 2511804 - RNA, 19 nt, Artificial Sequence
  Description of Artificial Sequence: Synthetic oligonucleotide
caaggcuacacagauaaau

SEQ ID NO: 2511805 - RNA, 19 nt, Artificial Sequence
  Description of Artificial Sequence: Synthetic oligonucleotide
acuccacuuuggcugcugu

SEQ ID NO: 2511806 - RNA, 19 nt, Artificial Sequence
  Description of Artificial Sequence: Synthetic oligonucleotide
aagacugaccuagcagguu

SEQ ID NO: 2511807 - RNA, 19 nt, Artificial Sequence
  Description of Artificial Sequence: Synthetic oligonucleotide
gcagguuccaucagacucc

SEQ ID NO: 2511808 - RNA, 19 nt, Artificial Sequence
  Description of Artificial Sequence: Synthetic oligonucleotide
gcuacacagauaaauccca

SEQ ID NO: 2511809 - RNA, 19 nt, Artificial Sequence
  Description of Artificial Sequence: Synthetic oligonucleotide
gaaacaagucagagccaca

SEQ ID NO: 2511810 - RNA, 19 nt, Artificial Sequence
  Description of Artificial Sequence: Synthetic oligonucleotide
accuagcagguuccaucag

SEQ ID NO: 2511811 - RNA, 19 nt, Artificial Sequence
  Description of Artificial Sequence: Synthetic oligonucleotide
cacccuuuucaauacuuua

SEQ ID NO: 2511812 - RNA, 19 nt, Artificial Sequence
  Description of Artificial Sequence: Synthetic oligonucleotide
gccacaugugaacagcauc

SEQ ID NO: 2511813 - RNA, 19 nt, Artificial Sequence
  Description of Artificial Sequence: Synthetic oligonucleotide
gacuuacaaaugaacaguu

SEQ ID NO: 2511814 - RNA, 19 nt, Artificial Sequence
  Description of Artificial Sequence: Synthetic oligonucleotide
auguggccuucucaacugu

SEQ ID NO: 2511815 - RNA, 19 nt, Artificial Sequence
  Description of Artificial Sequence: Synthetic oligonucleotide
cacagauaaaucccaucua

SEQ ID NO: 2511816 - RNA, 19 nt, Artificial Sequence
  Description of Artificial Sequence: Synthetic oligonucleotide
uaccucccaaaagauguua

SEQ ID NO: 2511817 - RNA, 19 nt, Artificial Sequence
  Description of Artificial Sequence: Synthetic oligonucleotide
gguuucucaguugaaccuc

SEQ ID NO: 2511818 - RNA, 19 nt, Artificial Sequence
  Description of Artificial Sequence: Synthetic oligonucleotide
uucucucacuucaggucuu

SEQ ID NO: 2511819 - RNA, 19 nt, Artificial Sequence
  Description of Artificial Sequence: Synthetic oligonucleotide
cagcaucacagucuacaca

SEQ ID NO: 2511820 - RNA, 19 nt, Artificial Sequence
  Description of Artificial Sequence: Synthetic oligonucleotide
aggguuuuaugcagaaaua

SEQ ID NO: 2511821 - RNA, 19 nt, Artificial Sequence
  Description of Artificial Sequence: Synthetic oligonucleotide
aagcuguccagggguuucu

SEQ ID NO: 2511822 - RNA, 19 nt, Artificial Sequence
  Description of Artificial Sequence: Synthetic oligonucleotide
cccaucuuacaaaaugcca

SEQ ID NO: 2511823 - RNA, 19 nt, Artificial Sequence
  Description of Artificial Sequence: Synthetic oligonucleotide
cuucccuuuggacuguacu

SEQ ID NO: 2511824 - RNA, 19 nt, Artificial Sequence
  Description of Artificial Sequence: Synthetic oligonucleotide
gaaauaucauucacccuuu

SEQ ID NO: 2511825 - RNA, 19 nt, Artificial Sequence
  Description of Artificial Sequence: Synthetic oligonucleotide
cccaaaagauguuacacgu

SEQ ID NO: 2511826 - RNA, 19 nt, Artificial Sequence
  Description of Artificial Sequence: Synthetic oligonucleotide
cuguuccccaucuuacaaa

SEQ ID NO: 2511827 - RNA, 19 nt, Artificial Sequence
  Description of Artificial Sequence: Synthetic oligonucleotide
aucacagucuacacacuuu

SEQ ID NO: 2511828 - RNA, 19 nt, Artificial Sequence
  Description of Artificial Sequence: Synthetic oligonucleotide
guggcacuuauuuaagcuu

SEQ ID NO: 2511829 - RNA, 19 nt, Artificial Sequence
  Description of Artificial Sequence: Synthetic oligonucleotide
acuucccuuuggacuguac

SEQ ID NO: 2511830 - RNA, 19 nt, Artificial Sequence
  Description of Artificial Sequence: Synthetic oligonucleotide
cuccacuuuggcugcuguc

SEQ ID NO: 2511831 - RNA, 19 nt, Artificial Sequence
  Description of Artificial Sequence: Synthetic oligonucleotide
cacuucaggucuuaggguu

SEQ ID NO: 2511832 - RNA, 19 nt, Artificial Sequence
  Description of Artificial Sequence: Synthetic oligonucleotide
caugugacaauaccuuaau

SEQ ID NO: 2511833 - RNA, 19 nt, Artificial Sequence
  Description of Artificial Sequence: Synthetic oligonucleotide
ccuggggcuacagagugag

SEQ ID NO: 2511834 - RNA, 19 nt, Artificial Sequence
  Description of Artificial Sequence: Synthetic oligonucleotide
gauguuacacguggcacuu

SEQ ID NO: 2511835 - RNA, 19 nt, Artificial Sequence
  Description of Artificial Sequence: Synthetic oligonucleotide
cucaaaccaugugacaaua

SEQ ID NO: 2511836 - RNA, 19 nt, Artificial Sequence
  Description of Artificial Sequence: Synthetic oligonucleotide
cauuucuauaaagcugucu

SEQ ID NO: 2511837 - RNA, 19 nt, Artificial Sequence
  Description of Artificial Sequence: Synthetic oligonucleotide
caugugcuaggaugaagcu

SEQ ID NO: 2511838 - RNA, 19 nt, Artificial Sequence
  Description of Artificial Sequence: Synthetic oligonucleotide
gcauuuuaguuaccuccca

SEQ ID NO: 2511839 - RNA, 19 nt, Artificial Sequence
  Description of Artificial Sequence: Synthetic oligonucleotide
cugucagacaaacuacaau

SEQ ID NO: 2511840 - RNA, 19 nt, Artificial Sequence
  Description of Artificial Sequence: Synthetic oligonucleotide
cagaaauaucauucacccu

SEQ ID NO: 2511841 - RNA, 19 nt, Artificial Sequence
  Description of Artificial Sequence: Synthetic oligonucleotide
ggguuucucaguugaaccu

SEQ ID NO: 2511842 - RNA, 19 nt, Artificial Sequence
  Description of Artificial Sequence: Synthetic oligonucleotide
cucucacuucaggucuuag

SEQ ID NO: 2511843 - RNA, 19 nt, Artificial Sequence
  Description of Artificial Sequence: Synthetic oligonucleotide
gagauuccuuaacuagcau

SEQ ID NO: 2511844 - RNA, 19 nt, Artificial Sequence
  Description of Artificial Sequence: Synthetic oligonucleotide
ggguuuuaugcagaaauau

SEQ ID NO: 2511845 - RNA, 19 nt, Artificial Sequence
  Description of Artificial Sequence: Synthetic oligonucleotide
ggcagagccaggucagauc

SEQ ID NO: 2511846 - RNA, 19 nt, Artificial Sequence
  Description of Artificial Sequence: Synthetic oligonucleotide
cugucccaaagcuggcaga

SEQ ID NO: 2511847 - RNA, 19 nt, Artificial Sequence
  Description of Artificial Sequence: Synthetic oligonucleotide
acugaccuagcagguucca

SEQ ID NO: 2511848 - RNA, 19 nt, Artificial Sequence
  Description of Artificial Sequence: Synthetic oligonucleotide
cagggguuuggaccuaaaa

SEQ ID NO: 2511849 - RNA, 19 nt, Artificial Sequence
  Description of Artificial Sequence: Synthetic oligonucleotide
ggcacuuauuuaagcuuac

SEQ ID NO: 2511850 - RNA, 19 nt, Artificial Sequence
  Description of Artificial Sequence: Synthetic oligonucleotide
ccuuuggacuguacuguuc

SEQ ID NO: 2511851 - RNA, 19 nt, Artificial Sequence
  Description of Artificial Sequence: Synthetic oligonucleotide
ccacuuuggcugcugucag

SEQ ID NO: 2511852 - RNA, 19 nt, Artificial Sequence
  Description of Artificial Sequence: Synthetic oligonucleotide
gcauugacuuacaaaugaa

SEQ ID NO: 2511853 - RNA, 19 nt, Artificial Sequence
  Description of Artificial Sequence: Synthetic oligonucleotide
ccauuuuauaaugcauuga

SEQ ID NO: 2511854 - RNA, 19 nt, Artificial Sequence
  Description of Artificial Sequence: Synthetic oligonucleotide
ggucagaucuuuugcgagu

SEQ ID NO: 2511855 - RNA, 19 nt, Artificial Sequence
  Description of Artificial Sequence: Synthetic oligonucleotide
ucucucacuucaggucuua

SEQ ID NO: 2511856 - RNA, 19 nt, Artificial Sequence
  Description of Artificial Sequence: Synthetic oligonucleotide
ccuagcagguuccaucaga

SEQ ID NO: 2511857 - RNA, 19 nt, Artificial Sequence
  Description of Artificial Sequence: Synthetic oligonucleotide
gacaaacuacaauccucuu

SEQ ID NO: 2511858 - RNA, 19 nt, Artificial Sequence
  Description of Artificial Sequence: Synthetic oligonucleotide
gucccaaagcuggcagagc

SEQ ID NO: 2511859 - RNA, 19 nt, Artificial Sequence
  Description of Artificial Sequence: Synthetic oligonucleotide
gaacagcaucacagucuac

SEQ ID NO: 2511860 - RNA, 19 nt, Artificial Sequence
  Description of Artificial Sequence: Synthetic oligonucleotide
ccucccaaaagauguuaca

SEQ ID NO: 2511861 - RNA, 19 nt, Artificial Sequence
  Description of Artificial Sequence: Synthetic oligonucleotide
agccacaugugaacagcau

SEQ ID NO: 2511862 - RNA, 19 nt, Artificial Sequence
  Description of Artificial Sequence: Synthetic oligonucleotide
caguugaaccuccugcuuu

SEQ ID NO: 2511863 - RNA, 19 nt, Artificial Sequence
  Description of Artificial Sequence: Synthetic oligonucleotide
caauccucuuucucucacu

SEQ ID NO: 2511864 - RNA, 19 nt, Artificial Sequence
  Description of Artificial Sequence: Synthetic oligonucleotide
gagguucaugugcuaggau

SEQ ID NO: 2511865 - RNA, 19 nt, Artificial Sequence
  Description of Artificial Sequence: Synthetic oligonucleotide
ccuuaacuagcauuuuagu

SEQ ID NO: 2511866 - RNA, 19 nt, Artificial Sequence
  Description of Artificial Sequence: Synthetic oligonucleotide
augaagcuguccagggguu

SEQ ID NO: 2511867 - RNA, 19 nt, Artificial Sequence
  Description of Artificial Sequence: Synthetic oligonucleotide
cacaugguagagauuccuu

SEQ ID NO: 2511868 - RNA, 19 nt, Artificial Sequence
  Description of Artificial Sequence: Synthetic oligonucleotide
gcugucagacaaacuacaa

SEQ ID NO: 2511869 - RNA, 19 nt, Artificial Sequence
  Description of Artificial Sequence: Synthetic oligonucleotide
gcacuuauuuaagcuuaca

SEQ ID NO: 2511870 - RNA, 19 nt, Artificial Sequence
  Description of Artificial Sequence: Synthetic oligonucleotide
gucagaucuuuugcgaguu

SEQ ID NO: 2511871 - RNA, 19 nt, Artificial Sequence
  Description of Artificial Sequence: Synthetic oligonucleotide
cagguuccaucagacucca

SEQ ID NO: 2511872 - RNA, 19 nt, Artificial Sequence
  Description of Artificial Sequence: Synthetic oligonucleotide
gcucaaagacugaccuagc

SEQ ID NO: 2511873 - RNA, 19 nt, Artificial Sequence
  Description of Artificial Sequence: Synthetic oligonucleotide
uucaggucuuaggguuuua

SEQ ID NO: 2511874 - RNA, 19 nt, Artificial Sequence
  Description of Artificial Sequence: Synthetic oligonucleotide
cguggcacuuauuuaagcu

SEQ ID NO: 2511875 - RNA, 19 nt, Artificial Sequence
  Description of Artificial Sequence: Synthetic oligonucleotide
gccacaugguagagauucc

SEQ ID NO: 2511876 - RNA, 19 nt, Artificial Sequence
  Description of Artificial Sequence: Synthetic oligonucleotide
gccuucucaacugucccaa

SEQ ID NO: 2511877 - RNA, 19 nt, Artificial Sequence
  Description of Artificial Sequence: Synthetic oligonucleotide
agguuccaucagacuccac

SEQ ID NO: 2511878 - RNA, 19 nt, Artificial Sequence
  Description of Artificial Sequence: Synthetic oligonucleotide
gcauuucuauaaagcuguc

SEQ ID NO: 2511879 - RNA, 19 nt, Artificial Sequence
  Description of Artificial Sequence: Synthetic oligonucleotide
cucugagguucaugugcua

SEQ ID NO: 2511880 - RNA, 19 nt, Artificial Sequence
  Description of Artificial Sequence: Synthetic oligonucleotide
auaugccucugagguucau

SEQ ID NO: 2511881 - RNA, 19 nt, Artificial Sequence
  Description of Artificial Sequence: Synthetic oligonucleotide
gggcaguugcucaaagacu

SEQ ID NO: 2511882 - RNA, 19 nt, Artificial Sequence
  Description of Artificial Sequence: Synthetic oligonucleotide
ccucugagguucaugugcu

SEQ ID NO: 2511883 - RNA, 19 nt, Artificial Sequence
  Description of Artificial Sequence: Synthetic oligonucleotide
auguuacacguggcacuua

SEQ ID NO: 2511884 - RNA, 19 nt, Artificial Sequence
  Description of Artificial Sequence: Synthetic oligonucleotide
gcaguugcucaaagacuga

SEQ ID NO: 2511885 - RNA, 19 nt, Artificial Sequence
  Description of Artificial Sequence: Synthetic oligonucleotide
gugcuaggaugaagcuguc

SEQ ID NO: 2511886 - RNA, 19 nt, Artificial Sequence
  Description of Artificial Sequence: Synthetic oligonucleotide
cuucaggucuuaggguuuu

SEQ ID NO: 2511887 - RNA, 19 nt, Artificial Sequence
  Description of Artificial Sequence: Synthetic oligonucleotide
guuccccaucuuacaaaau

SEQ ID NO: 2511888 - RNA, 19 nt, Artificial Sequence
  Description of Artificial Sequence: Synthetic oligonucleotide
guuacacguggcacuuauu

SEQ ID NO: 2511889 - RNA, 19 nt, Artificial Sequence
  Description of Artificial Sequence: Synthetic oligonucleotide
ggacuguacuguuccccau

SEQ ID NO: 2511890 - RNA, 19 nt, Artificial Sequence
  Description of Artificial Sequence: Synthetic oligonucleotide
augccacaugguagagauu

SEQ ID NO: 2511891 - RNA, 19 nt, Artificial Sequence
  Description of Artificial Sequence: Synthetic oligonucleotide
ccacaugguagagauuccu

SEQ ID NO: 2511892 - RNA, 19 nt, Artificial Sequence
  Description of Artificial Sequence: Synthetic oligonucleotide
cugaccuagcagguuccau

SEQ ID NO: 2511893 - RNA, 19 nt, Artificial Sequence
  Description of Artificial Sequence: Synthetic oligonucleotide
ccuucucaacugucccaaa

SEQ ID NO: 2511894 - RNA, 19 nt, Artificial Sequence
  Description of Artificial Sequence: Synthetic oligonucleotide
cuguacuguuccccaucuu

SEQ ID NO: 2511895 - RNA, 19 nt, Artificial Sequence
  Description of Artificial Sequence: Synthetic oligonucleotide
cuggggcuacagagugagu

SEQ ID NO: 2511896 - RNA, 19 nt, Artificial Sequence
  Description of Artificial Sequence: Synthetic oligonucleotide
gccuggggcuacagaguga

SEQ ID NO: 2511897 - RNA, 19 nt, Artificial Sequence
  Description of Artificial Sequence: Synthetic oligonucleotide
cagagccaggucagaucuu

SEQ ID NO: 2511898 - RNA, 19 nt, Artificial Sequence
  Description of Artificial Sequence: Synthetic oligonucleotide
gccagggguuuggaccuaa

SEQ ID NO: 2511899 - RNA, 19 nt, Artificial Sequence
  Description of Artificial Sequence: Synthetic oligonucleotide
ccagggguuuggaccuaaa

SEQ ID NO: 2511900 - RNA, 19 nt, Artificial Sequence
  Description of Artificial Sequence: Synthetic oligonucleotide
auauuugucguguaaaucg

SEQ ID NO: 2511901 - RNA, 19 nt, Artificial Sequence
  Description of Artificial Sequence: Synthetic oligonucleotide
ucuauuacuuucuucaccg

SEQ ID NO: 2511902 - RNA, 19 nt, Artificial Sequence
  Description of Artificial Sequence: Synthetic oligonucleotide
uuagcaagaagcuuggagg

SEQ ID NO: 2511903 - RNA, 19 nt, Artificial Sequence
  Description of Artificial Sequence: Synthetic oligonucleotide
cauagauucgacauugucg

SEQ ID NO: 2511904 - RNA, 19 nt, Artificial Sequence
  Description of Artificial Sequence: Synthetic oligonucleotide
cuuauuucgaagcucauag

SEQ ID NO: 2511905 - RNA, 19 nt, Artificial Sequence
  Description of Artificial Sequence: Synthetic oligonucleotide
uacugauacaccauguuag

SEQ ID NO: 2511906 - RNA, 19 nt, Artificial Sequence
  Description of Artificial Sequence: Synthetic oligonucleotide
auaggaguagccucggucc

SEQ ID NO: 2511907 - RNA, 19 nt, Artificial Sequence
  Description of Artificial Sequence: Synthetic oligonucleotide
aagcauuucgauucucggc

SEQ ID NO: 2511908 - RNA, 19 nt, Artificial Sequence
  Description of Artificial Sequence: Synthetic oligonucleotide
acuccauaagcauacacgg

SEQ ID NO: 2511909 - RNA, 19 nt, Artificial Sequence
  Description of Artificial Sequence: Synthetic oligonucleotide
guguaaaucggcuacauug

SEQ ID NO: 2511910 - RNA, 19 nt, Artificial Sequence
  Description of Artificial Sequence: Synthetic oligonucleotide
auagauucgacauugucga

SEQ ID NO: 2511911 - RNA, 19 nt, Artificial Sequence
  Description of Artificial Sequence: Synthetic oligonucleotide
cauguuagcaagaagcuug

SEQ ID NO: 2511912 - RNA, 19 nt, Artificial Sequence
  Description of Artificial Sequence: Synthetic oligonucleotide
caccauguuagcaagaagc

SEQ ID NO: 2511913 - RNA, 19 nt, Artificial Sequence
  Description of Artificial Sequence: Synthetic oligonucleotide
ugaagcauuucgauucucg

SEQ ID NO: 2511914 - RNA, 19 nt, Artificial Sequence
  Description of Artificial Sequence: Synthetic oligonucleotide
uauuugucguguaaaucgg

SEQ ID NO: 2511915 - RNA, 19 nt, Artificial Sequence
  Description of Artificial Sequence: Synthetic oligonucleotide
acauugucgagccagcaac

SEQ ID NO: 2511916 - RNA, 19 nt, Artificial Sequence
  Description of Artificial Sequence: Synthetic oligonucleotide
uuucgaagcucauagauuc

SEQ ID NO: 2511917 - RNA, 19 nt, Artificial Sequence
  Description of Artificial Sequence: Synthetic oligonucleotide
uccaugacgaaacuugaag

SEQ ID NO: 2511918 - RNA, 19 nt, Artificial Sequence
  Description of Artificial Sequence: Synthetic oligonucleotide
cugucuacauaguagaggc

SEQ ID NO: 2511919 - RNA, 19 nt, Artificial Sequence
  Description of Artificial Sequence: Synthetic oligonucleotide
auugacugaaccuccagag

SEQ ID NO: 2511920 - RNA, 19 nt, Artificial Sequence
  Description of Artificial Sequence: Synthetic oligonucleotide
agaagcugcaauccgcugc

SEQ ID NO: 2511921 - RNA, 19 nt, Artificial Sequence
  Description of Artificial Sequence: Synthetic oligonucleotide
uauuucgaagcucauagau

SEQ ID NO: 2511922 - RNA, 19 nt, Artificial Sequence
  Description of Artificial Sequence: Synthetic oligonucleotide
cauacacggagccagaacc

SEQ ID NO: 2511923 - RNA, 19 nt, Artificial Sequence
  Description of Artificial Sequence: Synthetic oligonucleotide
acugauacaccauguuagc

SEQ ID NO: 2511924 - RNA, 19 nt, Artificial Sequence
  Description of Artificial Sequence: Synthetic oligonucleotide
guugauuucuauuacuuuc

SEQ ID NO: 2511925 - RNA, 19 nt, Artificial Sequence
  Description of Artificial Sequence: Synthetic oligonucleotide
gauacaccauguuagcaag

SEQ ID NO: 2511926 - RNA, 19 nt, Artificial Sequence
  Description of Artificial Sequence: Synthetic oligonucleotide
uucuauuacuuucuucacc

SEQ ID NO: 2511927 - RNA, 19 nt, Artificial Sequence
  Description of Artificial Sequence: Synthetic oligonucleotide
caugacgaaacuugaaggc

SEQ ID NO: 2511928 - RNA, 19 nt, Artificial Sequence
  Description of Artificial Sequence: Synthetic oligonucleotide
uguggugguuccaugaagc

SEQ ID NO: 2511929 - RNA, 19 nt, Artificial Sequence
  Description of Artificial Sequence: Synthetic oligonucleotide
gacuccauaagcauacacg

SEQ ID NO: 2511930 - RNA, 19 nt, Artificial Sequence
  Description of Artificial Sequence: Synthetic oligonucleotide
acuucuaggucauaggagu

SEQ ID NO: 2511931 - RNA, 19 nt, Artificial Sequence
  Description of Artificial Sequence: Synthetic oligonucleotide
guuagcaagaagcuuggag

SEQ ID NO: 2511932 - RNA, 19 nt, Artificial Sequence
  Description of Artificial Sequence: Synthetic oligonucleotide
aauauaagcucccgcugug

SEQ ID NO: 2511933 - RNA, 19 nt, Artificial Sequence
  Description of Artificial Sequence: Synthetic oligonucleotide
gauucgacauugucgagcc

SEQ ID NO: 2511934 - RNA, 19 nt, Artificial Sequence
  Description of Artificial Sequence: Synthetic oligonucleotide
uguaaaucggcuacauugu

SEQ ID NO: 2511935 - RNA, 19 nt, Artificial Sequence
  Description of Artificial Sequence: Synthetic oligonucleotide
ucugggaggcaauauaagc

SEQ ID NO: 2511936 - RNA, 19 nt, Artificial Sequence
  Description of Artificial Sequence: Synthetic oligonucleotide
gguuccaugaagcauuucg

SEQ ID NO: 2511937 - RNA, 19 nt, Artificial Sequence
  Description of Artificial Sequence: Synthetic oligonucleotide
ucuuaucccagccacagau

SEQ ID NO: 2511938 - RNA, 19 nt, Artificial Sequence
  Description of Artificial Sequence: Synthetic oligonucleotide
agcaaccgcucccagaagc

SEQ ID NO: 2511939 - RNA, 19 nt, Artificial Sequence
  Description of Artificial Sequence: Synthetic oligonucleotide
agcauuucgauucucggcu

SEQ ID NO: 2511940 - RNA, 19 nt, Artificial Sequence
  Description of Artificial Sequence: Synthetic oligonucleotide
agauucgacauugucgagc

SEQ ID NO: 2511941 - RNA, 19 nt, Artificial Sequence
  Description of Artificial Sequence: Synthetic oligonucleotide
augacgaaacuugaaggcc

SEQ ID NO: 2511942 - RNA, 19 nt, Artificial Sequence
  Description of Artificial Sequence: Synthetic oligonucleotide
uaggcaucucuguaggugg

SEQ ID NO: 2511943 - RNA, 19 nt, Artificial Sequence
  Description of Artificial Sequence: Synthetic oligonucleotide
uaaaucggcuacauuguca

SEQ ID NO: 2511944 - RNA, 19 nt, Artificial Sequence
  Description of Artificial Sequence: Synthetic oligonucleotide
aacccaugcugguucaccg

SEQ ID NO: 2511945 - RNA, 19 nt, Artificial Sequence
  Description of Artificial Sequence: Synthetic oligonucleotide
caugacuccauaagcauac

SEQ ID NO: 2511946 - RNA, 19 nt, Artificial Sequence
  Description of Artificial Sequence: Synthetic oligonucleotide
acgugguagagauugacug

SEQ ID NO: 2511947 - RNA, 19 nt, Artificial Sequence
  Description of Artificial Sequence: Synthetic oligonucleotide
acauaguagaggccagggc

SEQ ID NO: 2511948 - RNA, 19 nt, Artificial Sequence
  Description of Artificial Sequence: Synthetic oligonucleotide
ugacgaaacuugaaggcca

SEQ ID NO: 2511949 - RNA, 19 nt, Artificial Sequence
  Description of Artificial Sequence: Synthetic oligonucleotide
uuugucguguaaaucggcu

SEQ ID NO: 2511950 - RNA, 19 nt, Artificial Sequence
  Description of Artificial Sequence: Synthetic oligonucleotide
acuccccggacccaggucc

SEQ ID NO: 2511951 - RNA, 19 nt, Artificial Sequence
  Description of Artificial Sequence: Synthetic oligonucleotide
ugacugaaccuccagagua

SEQ ID NO: 2511952 - RNA, 19 nt, Artificial Sequence
  Description of Artificial Sequence: Synthetic oligonucleotide
uucgacauugucgagccag

SEQ ID NO: 2511953 - RNA, 19 nt, Artificial Sequence
  Description of Artificial Sequence: Synthetic oligonucleotide
ugucguguaaaucggcuac

SEQ ID NO: 2511954 - RNA, 19 nt, Artificial Sequence
  Description of Artificial Sequence: Synthetic oligonucleotide
acugucuacauaguagagg

SEQ ID NO: 2511955 - RNA, 19 nt, Artificial Sequence
  Description of Artificial Sequence: Synthetic oligonucleotide
aaacccaugcugguucacc

SEQ ID NO: 2511956 - RNA, 19 nt, Artificial Sequence
  Description of Artificial Sequence: Synthetic oligonucleotide
cauaagcauacacggagcc

SEQ ID NO: 2511957 - RNA, 19 nt, Artificial Sequence
  Description of Artificial Sequence: Synthetic oligonucleotide
cagaucguaagccuccugg

SEQ ID NO: 2511958 - RNA, 19 nt, Artificial Sequence
  Description of Artificial Sequence: Synthetic oligonucleotide
uuucuucaccgucugggag

SEQ ID NO: 2511959 - RNA, 19 nt, Artificial Sequence
  Description of Artificial Sequence: Synthetic oligonucleotide
agaagguaaggguugauuu

SEQ ID NO: 2511960 - RNA, 19 nt, Artificial Sequence
  Description of Artificial Sequence: Synthetic oligonucleotide
uacauaguagaggccaggg

SEQ ID NO: 2511961 - RNA, 19 nt, Artificial Sequence
  Description of Artificial Sequence: Synthetic oligonucleotide
uauaagcucccgcuguggc

SEQ ID NO: 2511962 - RNA, 19 nt, Artificial Sequence
  Description of Artificial Sequence: Synthetic oligonucleotide
cagaucauggugcccaugg

SEQ ID NO: 2511963 - RNA, 19 nt, Artificial Sequence
  Description of Artificial Sequence: Synthetic oligonucleotide
ucauagauucgacauuguc

SEQ ID NO: 2511964 - RNA, 19 nt, Artificial Sequence
  Description of Artificial Sequence: Synthetic oligonucleotide
aggcaauauaagcucccgc

SEQ ID NO: 2511965 - RNA, 19 nt, Artificial Sequence
  Description of Artificial Sequence: Synthetic oligonucleotide
acauugucacuggagacac

SEQ ID NO: 2511966 - RNA, 19 nt, Artificial Sequence
  Description of Artificial Sequence: Synthetic oligonucleotide
caacaaugacuccaugacg

SEQ ID NO: 2511967 - RNA, 19 nt, Artificial Sequence
  Description of Artificial Sequence: Synthetic oligonucleotide
uggacuucuaggucauagg

SEQ ID NO: 2511968 - RNA, 19 nt, Artificial Sequence
  Description of Artificial Sequence: Synthetic oligonucleotide
uccagaguaggcaucucug

SEQ ID NO: 2511969 - RNA, 19 nt, Artificial Sequence
  Description of Artificial Sequence: Synthetic oligonucleotide
uagagauugacugaaccuc

SEQ ID NO: 2511970 - RNA, 19 nt, Artificial Sequence
  Description of Artificial Sequence: Synthetic oligonucleotide
ucucuuaucccagccacag

SEQ ID NO: 2511971 - RNA, 19 nt, Artificial Sequence
  Description of Artificial Sequence: Synthetic oligonucleotide
uugguagauggcucggcgg

SEQ ID NO: 2511972 - RNA, 19 nt, Artificial Sequence
  Description of Artificial Sequence: Synthetic oligonucleotide
uucgaagcucauagauucg

SEQ ID NO: 2511973 - RNA, 19 nt, Artificial Sequence
  Description of Artificial Sequence: Synthetic oligonucleotide
uacauugucacuggagaca

SEQ ID NO: 2511974 - RNA, 19 nt, Artificial Sequence
  Description of Artificial Sequence: Synthetic oligonucleotide
ugucgagccagcaaccgcu

SEQ ID NO: 2511975 - RNA, 19 nt, Artificial Sequence
  Description of Artificial Sequence: Synthetic oligonucleotide
uuucuauuacuuucuucac

SEQ ID NO: 2511976 - RNA, 19 nt, Artificial Sequence
  Description of Artificial Sequence: Synthetic oligonucleotide
uacuauauuugucguguaa

SEQ ID NO: 2511977 - RNA, 19 nt, Artificial Sequence
  Description of Artificial Sequence: Synthetic oligonucleotide
cuugguagauggcucggcg

SEQ ID NO: 2511978 - RNA, 19 nt, Artificial Sequence
  Description of Artificial Sequence: Synthetic oligonucleotide
gaagcucauagauucgaca

SEQ ID NO: 2511979 - RNA, 19 nt, Artificial Sequence
  Description of Artificial Sequence: Synthetic oligonucleotide
ugccuuuguacugauacac

SEQ ID NO: 2511980 - RNA, 19 nt, Artificial Sequence
  Description of Artificial Sequence: Synthetic oligonucleotide
uuguacugauacaccaugu

SEQ ID NO: 2511981 - RNA, 19 nt, Artificial Sequence
  Description of Artificial Sequence: Synthetic oligonucleotide
ugggaggcaauauaagcuc

SEQ ID NO: 2511982 - RNA, 19 nt, Artificial Sequence
  Description of Artificial Sequence: Synthetic oligonucleotide
gacuucuaggucauaggag

SEQ ID NO: 2511983 - RNA, 19 nt, Artificial Sequence
  Description of Artificial Sequence: Synthetic oligonucleotide
ugcaacacgcuagccagcg

SEQ ID NO: 2511984 - RNA, 19 nt, Artificial Sequence
  Description of Artificial Sequence: Synthetic oligonucleotide
gauugacugaaccuccaga

SEQ ID NO: 2511985 - RNA, 19 nt, Artificial Sequence
  Description of Artificial Sequence: Synthetic oligonucleotide
caacacgcuagccagcgcc

SEQ ID NO: 2511986 - RNA, 19 nt, Artificial Sequence
  Description of Artificial Sequence: Synthetic oligonucleotide
uuauuucgaagcucauaga

SEQ ID NO: 2511987 - RNA, 19 nt, Artificial Sequence
  Description of Artificial Sequence: Synthetic oligonucleotide
auuugucguguaaaucggc

SEQ ID NO: 2511988 - RNA, 19 nt, Artificial Sequence
  Description of Artificial Sequence: Synthetic oligonucleotide
cuacauugucacuggagac

SEQ ID NO: 2511989 - RNA, 19 nt, Artificial Sequence
  Description of Artificial Sequence: Synthetic oligonucleotide
ccaugacgaaacuugaagg

SEQ ID NO: 2511990 - RNA, 19 nt, Artificial Sequence
  Description of Artificial Sequence: Synthetic oligonucleotide
aaccgcucccagaagcugc

SEQ ID NO: 2511991 - RNA, 19 nt, Artificial Sequence
  Description of Artificial Sequence: Synthetic oligonucleotide
uucuaggucauaggaguag

SEQ ID NO: 2511992 - RNA, 19 nt, Artificial Sequence
  Description of Artificial Sequence: Synthetic oligonucleotide
ucuaggucauaggaguagc

SEQ ID NO: 2511993 - RNA, 19 nt, Artificial Sequence
  Description of Artificial Sequence: Synthetic oligonucleotide
ccaugaagcauuucgauuc

SEQ ID NO: 2511994 - RNA, 19 nt, Artificial Sequence
  Description of Artificial Sequence: Synthetic oligonucleotide
gaacccaccgagaaggcug

SEQ ID NO: 2511995 - RNA, 19 nt, Artificial Sequence
  Description of Artificial Sequence: Synthetic oligonucleotide
uggcuugguagauggcucg

SEQ ID NO: 2511996 - RNA, 19 nt, Artificial Sequence
  Description of Artificial Sequence: Synthetic oligonucleotide
gauucucggcuccucuggg

SEQ ID NO: 2511997 - RNA, 19 nt, Artificial Sequence
  Description of Artificial Sequence: Synthetic oligonucleotide
uaagcucccgcuguggccc

SEQ ID NO: 2511998 - RNA, 19 nt, Artificial Sequence
  Description of Artificial Sequence: Synthetic oligonucleotide
uccaugacuccauaagcau

SEQ ID NO: 2511999 - RNA, 19 nt, Artificial Sequence
  Description of Artificial Sequence: Synthetic oligonucleotide
agauugacugaaccuccag

SEQ ID NO: 2512000 - RNA, 19 nt, Artificial Sequence
  Description of Artificial Sequence: Synthetic oligonucleotide
gucuacauaguagaggcca

SEQ ID NO: 2512001 - RNA, 19 nt, Artificial Sequence
  Description of Artificial Sequence: Synthetic oligonucleotide
ugucuacauaguagaggcc

SEQ ID NO: 2512002 - RNA, 19 nt, Artificial Sequence
  Description of Artificial Sequence: Synthetic oligonucleotide
ggcucggcgggccagaucg

SEQ ID NO: 2512003 - RNA, 19 nt, Artificial Sequence
  Description of Artificial Sequence: Synthetic oligonucleotide
auacacggagccagaaccc

SEQ ID NO: 2512004 - RNA, 19 nt, Artificial Sequence
  Description of Artificial Sequence: Synthetic oligonucleotide
aguagccucgguccaugac

SEQ ID NO: 2512005 - RNA, 19 nt, Artificial Sequence
  Description of Artificial Sequence: Synthetic oligonucleotide
gaucguaagccuccuggac

SEQ ID NO: 2512006 - RNA, 19 nt, Artificial Sequence
  Description of Artificial Sequence: Synthetic oligonucleotide
gcugcaacacgcuagccag

SEQ ID NO: 2512007 - RNA, 19 nt, Artificial Sequence
  Description of Artificial Sequence: Synthetic oligonucleotide
uuccaugaagcauuucgau

SEQ ID NO: 2512008 - RNA, 19 nt, Artificial Sequence
  Description of Artificial Sequence: Synthetic oligonucleotide
agcaagaagcuuggaggcc

SEQ ID NO: 2512009 - RNA, 19 nt, Artificial Sequence
  Description of Artificial Sequence: Synthetic oligonucleotide
aggguugauuucuauuacu

SEQ ID NO: 2512010 - RNA, 19 nt, Artificial Sequence
  Description of Artificial Sequence: Synthetic oligonucleotide
gaggcaauauaagcucccg

SEQ ID NO: 2512011 - RNA, 19 nt, Artificial Sequence
  Description of Artificial Sequence: Synthetic oligonucleotide
cauugucgagccagcaacc

SEQ ID NO: 2512012 - RNA, 19 nt, Artificial Sequence
  Description of Artificial Sequence: Synthetic oligonucleotide
agccccaugccuuuguacu

SEQ ID NO: 2512013 - RNA, 19 nt, Artificial Sequence
  Description of Artificial Sequence: Synthetic oligonucleotide
uccaugaagcauuucgauu

SEQ ID NO: 2512014 - RNA, 19 nt, Artificial Sequence
  Description of Artificial Sequence: Synthetic oligonucleotide
ggaaucagcugcaacaaug

SEQ ID NO: 2512015 - RNA, 19 nt, Artificial Sequence
  Description of Artificial Sequence: Synthetic oligonucleotide
acccagguccagcagaucu

SEQ ID NO: 2512016 - RNA, 19 nt, Artificial Sequence
  Description of Artificial Sequence: Synthetic oligonucleotide
agagaugcgguuccccuca

SEQ ID NO: 2512017 - RNA, 19 nt, Artificial Sequence
  Description of Artificial Sequence: Synthetic oligonucleotide
gaagcugcaauccgcugca

SEQ ID NO: 2512018 - RNA, 19 nt, Artificial Sequence
  Description of Artificial Sequence: Synthetic oligonucleotide
auugucgagccagcaaccg

SEQ ID NO: 2512019 - RNA, 19 nt, Artificial Sequence
  Description of Artificial Sequence: Synthetic oligonucleotide
aaaacccaugcugguucac

SEQ ID NO: 2512020 - RNA, 19 nt, Artificial Sequence
  Description of Artificial Sequence: Synthetic oligonucleotide
guaggcaucucuguaggug

SEQ ID NO: 2512021 - RNA, 19 nt, Artificial Sequence
  Description of Artificial Sequence: Synthetic oligonucleotide
uaggucauaggaguagccu

SEQ ID NO: 2512022 - RNA, 19 nt, Artificial Sequence
  Description of Artificial Sequence: Synthetic oligonucleotide
uguggcccgggaaucagcu

SEQ ID NO: 2512023 - RNA, 19 nt, Artificial Sequence
  Description of Artificial Sequence: Synthetic oligonucleotide
guuccagagaugcgguucc

SEQ ID NO: 2512024 - RNA, 19 nt, Artificial Sequence
  Description of Artificial Sequence: Synthetic oligonucleotide
auauaagcucccgcugugg

SEQ ID NO: 2512025 - RNA, 19 nt, Artificial Sequence
  Description of Artificial Sequence: Synthetic oligonucleotide
aacgugguagagauugacu

SEQ ID NO: 2512026 - RNA, 19 nt, Artificial Sequence
  Description of Artificial Sequence: Synthetic oligonucleotide
cagaucugcacgaccuccg

SEQ ID NO: 2512027 - RNA, 19 nt, Artificial Sequence
  Description of Artificial Sequence: Synthetic oligonucleotide
aagccuccuggacuucuag

SEQ ID NO: 2512028 - RNA, 19 nt, Artificial Sequence
  Description of Artificial Sequence: Synthetic oligonucleotide
uucucggcuccucugggac

SEQ ID NO: 2512029 - RNA, 19 nt, Artificial Sequence
  Description of Artificial Sequence: Synthetic oligonucleotide
uugucgagccagcaaccgc

SEQ ID NO: 2512030 - RNA, 19 nt, Artificial Sequence
  Description of Artificial Sequence: Synthetic oligonucleotide
uucgauucucggcuccucu

SEQ ID NO: 2512031 - RNA, 19 nt, Artificial Sequence
  Description of Artificial Sequence: Synthetic oligonucleotide
agaucguaagccuccugga

SEQ ID NO: 2512032 - RNA, 19 nt, Artificial Sequence
  Description of Artificial Sequence: Synthetic oligonucleotide
cauuucgauucucggcucc

SEQ ID NO: 2512033 - RNA, 19 nt, Artificial Sequence
  Description of Artificial Sequence: Synthetic oligonucleotide
ucgaagcucauagauucga

SEQ ID NO: 2512034 - RNA, 19 nt, Artificial Sequence
  Description of Artificial Sequence: Synthetic oligonucleotide
agcugcaacaaugacucca

SEQ ID NO: 2512035 - RNA, 19 nt, Artificial Sequence
  Description of Artificial Sequence: Synthetic oligonucleotide
auguuagcaagaagcuugg

SEQ ID NO: 2512036 - RNA, 19 nt, Artificial Sequence
  Description of Artificial Sequence: Synthetic oligonucleotide
ugauuucuauuacuuucuu

SEQ ID NO: 2512037 - RNA, 19 nt, Artificial Sequence
  Description of Artificial Sequence: Synthetic oligonucleotide
gaaacuugaaggccagugu

SEQ ID NO: 2512038 - RNA, 19 nt, Artificial Sequence
  Description of Artificial Sequence: Synthetic oligonucleotide
aggccaguguggugguucc

SEQ ID NO: 2512039 - RNA, 19 nt, Artificial Sequence
  Description of Artificial Sequence: Synthetic oligonucleotide
uguuccagagaugcgguuc

SEQ ID NO: 2512040 - RNA, 19 nt, Artificial Sequence
  Description of Artificial Sequence: Synthetic oligonucleotide
ucagcccaucaccaggacu

SEQ ID NO: 2512041 - RNA, 19 nt, Artificial Sequence
  Description of Artificial Sequence: Synthetic oligonucleotide
ucgacauugucgagccagc

SEQ ID NO: 2512042 - RNA, 19 nt, Artificial Sequence
  Description of Artificial Sequence: Synthetic oligonucleotide
ggucauaggaguagccucg

SEQ ID NO: 2512043 - RNA, 19 nt, Artificial Sequence
  Description of Artificial Sequence: Synthetic oligonucleotide
ugcacgaccuccgaaucca

SEQ ID NO: 2512044 - RNA, 19 nt, Artificial Sequence
  Description of Artificial Sequence: Synthetic oligonucleotide
gccgcugcgacagagaugc

SEQ ID NO: 2512045 - RNA, 19 nt, Artificial Sequence
  Description of Artificial Sequence: Synthetic oligonucleotide
guacugauacaccauguua

SEQ ID NO: 2512046 - RNA, 19 nt, Artificial Sequence
  Description of Artificial Sequence: Synthetic oligonucleotide
aucugcacgaccuccgaau

SEQ ID NO: 2512047 - RNA, 19 nt, Artificial Sequence
  Description of Artificial Sequence: Synthetic oligonucleotide
cacugucuacauaguagag

SEQ ID NO: 2512048 - RNA, 19 nt, Artificial Sequence
  Description of Artificial Sequence: Synthetic oligonucleotide
ucugcacgaccuccgaauc

SEQ ID NO: 2512049 - RNA, 19 nt, Artificial Sequence
  Description of Artificial Sequence: Synthetic oligonucleotide
gcucauagauucgacauug

SEQ ID NO: 2512050 - RNA, 19 nt, Artificial Sequence
  Description of Artificial Sequence: Synthetic oligonucleotide
ugcgacagagaugcgcucc

SEQ ID NO: 2512051 - RNA, 19 nt, Artificial Sequence
  Description of Artificial Sequence: Synthetic oligonucleotide
cuacauaguagaggccagg

SEQ ID NO: 2512052 - RNA, 19 nt, Artificial Sequence
  Description of Artificial Sequence: Synthetic oligonucleotide
gcugcaauccgcugcaccc

SEQ ID NO: 2512053 - RNA, 19 nt, Artificial Sequence
  Description of Artificial Sequence: Synthetic oligonucleotide
ucgauucucggcuccucug

SEQ ID NO: 2512054 - RNA, 19 nt, Artificial Sequence
  Description of Artificial Sequence: Synthetic oligonucleotide
cacggauccagccauccuc

SEQ ID NO: 2512055 - RNA, 19 nt, Artificial Sequence
  Description of Artificial Sequence: Synthetic oligonucleotide
guaaaucggcuacauuguc

SEQ ID NO: 2512056 - RNA, 19 nt, Artificial Sequence
  Description of Artificial Sequence: Synthetic oligonucleotide
ggcuguuccagagaugcgg

SEQ ID NO: 2512057 - RNA, 19 nt, Artificial Sequence
  Description of Artificial Sequence: Synthetic oligonucleotide
agcagaucugcacgaccuc

SEQ ID NO: 2512058 - RNA, 19 nt, Artificial Sequence
  Description of Artificial Sequence: Synthetic oligonucleotide
gacgaaacuugaaggccag

SEQ ID NO: 2512059 - RNA, 19 nt, Artificial Sequence
  Description of Artificial Sequence: Synthetic oligonucleotide
gcaauauaagcucccgcug

SEQ ID NO: 2512060 - RNA, 19 nt, Artificial Sequence
  Description of Artificial Sequence: Synthetic oligonucleotide
uagauucgacauugucgag

SEQ ID NO: 2512061 - RNA, 19 nt, Artificial Sequence
  Description of Artificial Sequence: Synthetic oligonucleotide
acgaccuccgaauccaaaa

SEQ ID NO: 2512062 - RNA, 19 nt, Artificial Sequence
  Description of Artificial Sequence: Synthetic oligonucleotide
gcaagaagcuuggaggccg

SEQ ID NO: 2512063 - RNA, 19 nt, Artificial Sequence
  Description of Artificial Sequence: Synthetic oligonucleotide
uugucguguaaaucggcua

SEQ ID NO: 2512064 - RNA, 19 nt, Artificial Sequence
  Description of Artificial Sequence: Synthetic oligonucleotide
accgagaaggcuguuccag

SEQ ID NO: 2512065 - RNA, 19 nt, Artificial Sequence
  Description of Artificial Sequence: Synthetic oligonucleotide
gaacgugguagagauugac

SEQ ID NO: 2512066 - RNA, 19 nt, Artificial Sequence
  Description of Artificial Sequence: Synthetic oligonucleotide
ucuucaccgucugggaggc

SEQ ID NO: 2512067 - RNA, 19 nt, Artificial Sequence
  Description of Artificial Sequence: Synthetic oligonucleotide
ggacuucuaggucauagga

SEQ ID NO: 2512068 - RNA, 19 nt, Artificial Sequence
  Description of Artificial Sequence: Synthetic oligonucleotide
ucguaagccuccuggacuu

SEQ ID NO: 2512069 - RNA, 19 nt, Artificial Sequence
  Description of Artificial Sequence: Synthetic oligonucleotide
auaguagaggccagggccu

SEQ ID NO: 2512070 - RNA, 19 nt, Artificial Sequence
  Description of Artificial Sequence: Synthetic oligonucleotide
aaucggcuacauugucacu

SEQ ID NO: 2512071 - RNA, 19 nt, Artificial Sequence
  Description of Artificial Sequence: Synthetic oligonucleotide
cacggagccagaacccacc

SEQ ID NO: 2512072 - RNA, 19 nt, Artificial Sequence
  Description of Artificial Sequence: Synthetic oligonucleotide
acggagccagaacccaccg

SEQ ID NO: 2512073 - RNA, 19 nt, Artificial Sequence
  Description of Artificial Sequence: Synthetic oligonucleotide
guccaugacuccauaagca

SEQ ID NO: 2512074 - RNA, 19 nt, Artificial Sequence
  Description of Artificial Sequence: Synthetic oligonucleotide
gacauugucgagccagcaa

SEQ ID NO: 2512075 - RNA, 19 nt, Artificial Sequence
  Description of Artificial Sequence: Synthetic oligonucleotide
cugaaccuccagaguaggc

SEQ ID NO: 2512076 - RNA, 19 nt, Artificial Sequence
  Description of Artificial Sequence: Synthetic oligonucleotide
aguguggugguuccaugaa

SEQ ID NO: 2512077 - RNA, 19 nt, Artificial Sequence
  Description of Artificial Sequence: Synthetic oligonucleotide
ccccucacugucuacauag

SEQ ID NO: 2512078 - RNA, 19 nt, Artificial Sequence
  Description of Artificial Sequence: Synthetic oligonucleotide
guuccaugaagcauuucga

SEQ ID NO: 2512079 - RNA, 19 nt, Artificial Sequence
  Description of Artificial Sequence: Synthetic oligonucleotide
agccagaacccaccgagaa

SEQ ID NO: 2512080 - RNA, 19 nt, Artificial Sequence
  Description of Artificial Sequence: Synthetic oligonucleotide
ggcaauauaagcucccgcu

SEQ ID NO: 2512081 - RNA, 19 nt, Artificial Sequence
  Description of Artificial Sequence: Synthetic oligonucleotide
uucaccgucugggaggcaa

SEQ ID NO: 2512082 - RNA, 19 nt, Artificial Sequence
  Description of Artificial Sequence: Synthetic oligonucleotide
auuucgaagcucauagauu

SEQ ID NO: 2512083 - RNA, 19 nt, Artificial Sequence
  Description of Artificial Sequence: Synthetic oligonucleotide
aguaggcaucucuguaggu

SEQ ID NO: 2512084 - RNA, 19 nt, Artificial Sequence
  Description of Artificial Sequence: Synthetic oligonucleotide
ccauaagcauacacggagc

SEQ ID NO: 2512085 - RNA, 19 nt, Artificial Sequence
  Description of Artificial Sequence: Synthetic oligonucleotide
auccucccgaacgugguag

SEQ ID NO: 2512086 - RNA, 19 nt, Artificial Sequence
  Description of Artificial Sequence: Synthetic oligonucleotide
caagaagcuuggaggccgc

SEQ ID NO: 2512087 - RNA, 19 nt, Artificial Sequence
  Description of Artificial Sequence: Synthetic oligonucleotide
aucggccgcugcaacacgc

SEQ ID NO: 2512088 - RNA, 19 nt, Artificial Sequence
  Description of Artificial Sequence: Synthetic oligonucleotide
gagaugcgcuccuuauuuc

SEQ ID NO: 2512089 - RNA, 19 nt, Artificial Sequence
  Description of Artificial Sequence: Synthetic oligonucleotide
agcucauagauucgacauu

SEQ ID NO: 2512090 - RNA, 19 nt, Artificial Sequence
  Description of Artificial Sequence: Synthetic oligonucleotide
gucugggaggcaauauaag

SEQ ID NO: 2512091 - RNA, 19 nt, Artificial Sequence
  Description of Artificial Sequence: Synthetic oligonucleotide
augaagcauuucgauucuc

SEQ ID NO: 2512092 - RNA, 19 nt, Artificial Sequence
  Description of Artificial Sequence: Synthetic oligonucleotide
guagccucgguccaugacu

SEQ ID NO: 2512093 - RNA, 19 nt, Artificial Sequence
  Description of Artificial Sequence: Synthetic oligonucleotide
cugcacgaccuccgaaucc

SEQ ID NO: 2512094 - RNA, 19 nt, Artificial Sequence
  Description of Artificial Sequence: Synthetic oligonucleotide
ccuuuguacugauacacca

SEQ ID NO: 2512095 - RNA, 19 nt, Artificial Sequence
  Description of Artificial Sequence: Synthetic oligonucleotide
caauauaagcucccgcugu

SEQ ID NO: 2512096 - RNA, 19 nt, Artificial Sequence
  Description of Artificial Sequence: Synthetic oligonucleotide
cauugucacuggagacacg

SEQ ID NO: 2512097 - RNA, 19 nt, Artificial Sequence
  Description of Artificial Sequence: Synthetic oligonucleotide
caucaccaggacuccccgg

SEQ ID NO: 2512098 - RNA, 19 nt, Artificial Sequence
  Description of Artificial Sequence: Synthetic oligonucleotide
auucucggcuccucuggga

SEQ ID NO: 2512099 - RNA, 19 nt, Artificial Sequence
  Description of Artificial Sequence: Synthetic oligonucleotide
agaucugcacgaccuccga

SEQ ID NO: 2512100 - RNA, 19 nt, Artificial Sequence
  Description of Artificial Sequence: Synthetic oligonucleotide
ggauccagccauccucccg

SEQ ID NO: 2512101 - RNA, 19 nt, Artificial Sequence
  Description of Artificial Sequence: Synthetic oligonucleotide
ucgagccagcaaccgcucc

SEQ ID NO: 2512102 - RNA, 19 nt, Artificial Sequence
  Description of Artificial Sequence: Synthetic oligonucleotide
uggugguuccaugaagcau

SEQ ID NO: 2512103 - RNA, 19 nt, Artificial Sequence
  Description of Artificial Sequence: Synthetic oligonucleotide
cccauggacagccccaugc

SEQ ID NO: 2512104 - RNA, 19 nt, Artificial Sequence
  Description of Artificial Sequence: Synthetic oligonucleotide
cuccauaagcauacacgga

SEQ ID NO: 2512105 - RNA, 19 nt, Artificial Sequence
  Description of Artificial Sequence: Synthetic oligonucleotide
ucgguccaugacuccauaa

SEQ ID NO: 2512106 - RNA, 19 nt, Artificial Sequence
  Description of Artificial Sequence: Synthetic oligonucleotide
acuccaugacgaaacuuga

SEQ ID NO: 2512107 - RNA, 19 nt, Artificial Sequence
  Description of Artificial Sequence: Synthetic oligonucleotide
gucacuggagacacggauc

SEQ ID NO: 2512108 - RNA, 19 nt, Artificial Sequence
  Description of Artificial Sequence: Synthetic oligonucleotide
aacacgcuagccagcgcca

SEQ ID NO: 2512109 - RNA, 19 nt, Artificial Sequence
  Description of Artificial Sequence: Synthetic oligonucleotide
uguagguggcuugguagau

SEQ ID NO: 2512110 - RNA, 19 nt, Artificial Sequence
  Description of Artificial Sequence: Synthetic oligonucleotide
ccaccgagaaggcuguucc

SEQ ID NO: 2512111 - RNA, 19 nt, Artificial Sequence
  Description of Artificial Sequence: Synthetic oligonucleotide
ucguguaaaucggcuacau

SEQ ID NO: 2512112 - RNA, 19 nt, Artificial Sequence
  Description of Artificial Sequence: Synthetic oligonucleotide
gacaccccagcugggcgcg

SEQ ID NO: 2512113 - RNA, 19 nt, Artificial Sequence
  Description of Artificial Sequence: Synthetic oligonucleotide
guagauggcucggcgggcc

SEQ ID NO: 2512114 - RNA, 19 nt, Artificial Sequence
  Description of Artificial Sequence: Synthetic oligonucleotide
cugauacaccauguuagca

SEQ ID NO: 2512115 - RNA, 19 nt, Artificial Sequence
  Description of Artificial Sequence: Synthetic oligonucleotide
gagauugacugaaccucca

SEQ ID NO: 2512116 - RNA, 19 nt, Artificial Sequence
  Description of Artificial Sequence: Synthetic oligonucleotide
gagacacggauccagccau

SEQ ID NO: 2512117 - RNA, 19 nt, Artificial Sequence
  Description of Artificial Sequence: Synthetic oligonucleotide
uguuagcaagaagcuugga

SEQ ID NO: 2512118 - RNA, 19 nt, Artificial Sequence
  Description of Artificial Sequence: Synthetic oligonucleotide
ccaggcucagcccaucacc

SEQ ID NO: 2512119 - RNA, 19 nt, Artificial Sequence
  Description of Artificial Sequence: Synthetic oligonucleotide
caggcucagcccaucacca

SEQ ID NO: 2512120 - RNA, 19 nt, Artificial Sequence
  Description of Artificial Sequence: Synthetic oligonucleotide
accuccagaguaggcaucu

SEQ ID NO: 2512121 - RNA, 19 nt, Artificial Sequence
  Description of Artificial Sequence: Synthetic oligonucleotide
augcgguuccccucacugu

SEQ ID NO: 2512122 - RNA, 19 nt, Artificial Sequence
  Description of Artificial Sequence: Synthetic oligonucleotide
cagaagcugcaauccgcug

SEQ ID NO: 2512123 - RNA, 19 nt, Artificial Sequence
  Description of Artificial Sequence: Synthetic oligonucleotide
ggaggcaauauaagcuccc

SEQ ID NO: 2512124 - RNA, 19 nt, Artificial Sequence
  Description of Artificial Sequence: Synthetic oligonucleotide
aagcugcaauccgcugcac

SEQ ID NO: 2512125 - RNA, 19 nt, Artificial Sequence
  Description of Artificial Sequence: Synthetic oligonucleotide
cugcaacacgcuagccagc

SEQ ID NO: 2512126 - RNA, 19 nt, Artificial Sequence
  Description of Artificial Sequence: Synthetic oligonucleotide
gggacaccccagcugggcg

SEQ ID NO: 2512127 - RNA, 19 nt, Artificial Sequence
  Description of Artificial Sequence: Synthetic oligonucleotide
aacccaccgagaaggcugu

SEQ ID NO: 2512128 - RNA, 19 nt, Artificial Sequence
  Description of Artificial Sequence: Synthetic oligonucleotide
uuccccucacugucuacau

SEQ ID NO: 2512129 - RNA, 19 nt, Artificial Sequence
  Description of Artificial Sequence: Synthetic oligonucleotide
aggccgcugcgacagagau

SEQ ID NO: 2512130 - RNA, 19 nt, Artificial Sequence
  Description of Artificial Sequence: Synthetic oligonucleotide
cugcaauccgcugcacccc

SEQ ID NO: 2512131 - RNA, 19 nt, Artificial Sequence
  Description of Artificial Sequence: Synthetic oligonucleotide
gggaggcaauauaagcucc

SEQ ID NO: 2512132 - RNA, 19 nt, Artificial Sequence
  Description of Artificial Sequence: Synthetic oligonucleotide
augcgcuccuuauuucgaa

SEQ ID NO: 2512133 - RNA, 19 nt, Artificial Sequence
  Description of Artificial Sequence: Synthetic oligonucleotide
gaucugcacgaccuccgaa

SEQ ID NO: 2512134 - RNA, 19 nt, Artificial Sequence
  Description of Artificial Sequence: Synthetic oligonucleotide
acgcuagccagcgccaugu

SEQ ID NO: 2512135 - RNA, 19 nt, Artificial Sequence
  Description of Artificial Sequence: Synthetic oligonucleotide
cuguggcccgggaaucagc

SEQ ID NO: 2512136 - RNA, 19 nt, Artificial Sequence
  Description of Artificial Sequence: Synthetic oligonucleotide
uucaccggcaucggccgcu

SEQ ID NO: 2512137 - RNA, 19 nt, Artificial Sequence
  Description of Artificial Sequence: Synthetic oligonucleotide
uccucccgaacgugguaga

SEQ ID NO: 2512138 - RNA, 19 nt, Artificial Sequence
  Description of Artificial Sequence: Synthetic oligonucleotide
ucggccgcugcaacacgcu

SEQ ID NO: 2512139 - RNA, 19 nt, Artificial Sequence
  Description of Artificial Sequence: Synthetic oligonucleotide
gcagaucugcacgaccucc

SEQ ID NO: 2512140 - RNA, 19 nt, Artificial Sequence
  Description of Artificial Sequence: Synthetic oligonucleotide
gaggccagggccucucuua

SEQ ID NO: 2512141 - RNA, 19 nt, Artificial Sequence
  Description of Artificial Sequence: Synthetic oligonucleotide
ucggcgggccagaucguaa

SEQ ID NO: 2512142 - RNA, 19 nt, Artificial Sequence
  Description of Artificial Sequence: Synthetic oligonucleotide
cccaucaccaggacucccc

SEQ ID NO: 2512143 - RNA, 19 nt, Artificial Sequence
  Description of Artificial Sequence: Synthetic oligonucleotide
cagaguaggcaucucugua

SEQ ID NO: 2512144 - RNA, 19 nt, Artificial Sequence
  Description of Artificial Sequence: Synthetic oligonucleotide
gccagaacccaccgagaag

SEQ ID NO: 2512145 - RNA, 19 nt, Artificial Sequence
  Description of Artificial Sequence: Synthetic oligonucleotide
cucucuuaucccagccaca

SEQ ID NO: 2512146 - RNA, 19 nt, Artificial Sequence
  Description of Artificial Sequence: Synthetic oligonucleotide
auacaccauguuagcaaga

SEQ ID NO: 2512147 - RNA, 19 nt, Artificial Sequence
  Description of Artificial Sequence: Synthetic oligonucleotide
auggugcccagaagguaag

SEQ ID NO: 2512148 - RNA, 19 nt, Artificial Sequence
  Description of Artificial Sequence: Synthetic oligonucleotide
caucggccgcugcaacacg

SEQ ID NO: 2512149 - RNA, 19 nt, Artificial Sequence
  Description of Artificial Sequence: Synthetic oligonucleotide
cgaaacuugaaggccagug

SEQ ID NO: 2512150 - RNA, 19 nt, Artificial Sequence
  Description of Artificial Sequence: Synthetic oligonucleotide
gcauacacggagccagaac

SEQ ID NO: 2512151 - RNA, 19 nt, Artificial Sequence
  Description of Artificial Sequence: Synthetic oligonucleotide
agaugcgguuccccucacu

SEQ ID NO: 2512152 - RNA, 19 nt, Artificial Sequence
  Description of Artificial Sequence: Synthetic oligonucleotide
uuccagagaugcgguuccc

SEQ ID NO: 2512153 - RNA, 19 nt, Artificial Sequence
  Description of Artificial Sequence: Synthetic oligonucleotide
auucgacauugucgagcca

SEQ ID NO: 2512154 - RNA, 19 nt, Artificial Sequence
  Description of Artificial Sequence: Synthetic oligonucleotide
ucaccgucugggaggcaau

SEQ ID NO: 2512155 - RNA, 19 nt, Artificial Sequence
  Description of Artificial Sequence: Synthetic oligonucleotide
gucguguaaaucggcuaca

SEQ ID NO: 2512156 - RNA, 19 nt, Artificial Sequence
  Description of Artificial Sequence: Synthetic oligonucleotide
gccuuuguacugauacacc

SEQ ID NO: 2512157 - RNA, 19 nt, Artificial Sequence
  Description of Artificial Sequence: Synthetic oligonucleotide
uccccucacugucuacaua

SEQ ID NO: 2512158 - RNA, 19 nt, Artificial Sequence
  Description of Artificial Sequence: Synthetic oligonucleotide
cccaugcugguucaccggc

SEQ ID NO: 2512159 - RNA, 19 nt, Artificial Sequence
  Description of Artificial Sequence: Synthetic oligonucleotide
ggccucucuuaucccagcc

SEQ ID NO: 2512160 - RNA, 19 nt, Artificial Sequence
  Description of Artificial Sequence: Synthetic oligonucleotide
caaugacuccaugacgaaa

SEQ ID NO: 2512161 - RNA, 19 nt, Artificial Sequence
  Description of Artificial Sequence: Synthetic oligonucleotide
gccgcugcaacacgcuagc

SEQ ID NO: 2512162 - RNA, 19 nt, Artificial Sequence
  Description of Artificial Sequence: Synthetic oligonucleotide
caaccgcucccagaagcug

SEQ ID NO: 2512163 - RNA, 19 nt, Artificial Sequence
  Description of Artificial Sequence: Synthetic oligonucleotide
ggccagaucguaagccucc

SEQ ID NO: 2512164 - RNA, 19 nt, Artificial Sequence
  Description of Artificial Sequence: Synthetic oligonucleotide
uaguagaggccagggccuc

SEQ ID NO: 2512165 - RNA, 19 nt, Artificial Sequence
  Description of Artificial Sequence: Synthetic oligonucleotide
agacacggauccagccauc

SEQ ID NO: 2512166 - RNA, 19 nt, Artificial Sequence
  Description of Artificial Sequence: Synthetic oligonucleotide
agauggcucggcgggccag

SEQ ID NO: 2512167 - RNA, 19 nt, Artificial Sequence
  Description of Artificial Sequence: Synthetic oligonucleotide
gagccagcaaccgcuccca

SEQ ID NO: 2512168 - RNA, 19 nt, Artificial Sequence
  Description of Artificial Sequence: Synthetic oligonucleotide
cucagcccaucaccaggac

SEQ ID NO: 2512169 - RNA, 19 nt, Artificial Sequence
  Description of Artificial Sequence: Synthetic oligonucleotide
aggcuguuccagagaugcg

SEQ ID NO: 2512170 - RNA, 19 nt, Artificial Sequence
  Description of Artificial Sequence: Synthetic oligonucleotide
ggcuugguagauggcucgg

SEQ ID NO: 2512171 - RNA, 19 nt, Artificial Sequence
  Description of Artificial Sequence: Synthetic oligonucleotide
cacgcuagccagcgccaug

SEQ ID NO: 2512172 - RNA, 19 nt, Artificial Sequence
  Description of Artificial Sequence: Synthetic oligonucleotide
ggugguuccaugaagcauu

SEQ ID NO: 2512173 - RNA, 19 nt, Artificial Sequence
  Description of Artificial Sequence: Synthetic oligonucleotide
ucccgcuguggcccgggaa

SEQ ID NO: 2512174 - RNA, 19 nt, Artificial Sequence
  Description of Artificial Sequence: Synthetic oligonucleotide
gacuccccggacccagguc

SEQ ID NO: 2512175 - RNA, 19 nt, Artificial Sequence
  Description of Artificial Sequence: Synthetic oligonucleotide
gcauuucgauucucggcuc

SEQ ID NO: 2512176 - RNA, 19 nt, Artificial Sequence
  Description of Artificial Sequence: Synthetic oligonucleotide
cugggcgcggccaggcuca

SEQ ID NO: 2512177 - RNA, 19 nt, Artificial Sequence
  Description of Artificial Sequence: Synthetic oligonucleotide
gagccagaacccaccgaga

SEQ ID NO: 2512178 - RNA, 19 nt, Artificial Sequence
  Description of Artificial Sequence: Synthetic oligonucleotide
ccacagaucauggugccca

SEQ ID NO: 2512179 - RNA, 19 nt, Artificial Sequence
  Description of Artificial Sequence: Synthetic oligonucleotide
gccccaugccuuuguacug

SEQ ID NO: 2512180 - RNA, 19 nt, Artificial Sequence
  Description of Artificial Sequence: Synthetic oligonucleotide
ggaguagccucgguccaug

SEQ ID NO: 2512181 - RNA, 19 nt, Artificial Sequence
  Description of Artificial Sequence: Synthetic oligonucleotide
cucauagauucgacauugu

SEQ ID NO: 2512182 - RNA, 19 nt, Artificial Sequence
  Description of Artificial Sequence: Synthetic oligonucleotide
gguagauggcucggcgggc

SEQ ID NO: 2512183 - RNA, 19 nt, Artificial Sequence
  Description of Artificial Sequence: Synthetic oligonucleotide
agccauccucccgaacgug

SEQ ID NO: 2512184 - RNA, 19 nt, Artificial Sequence
  Description of Artificial Sequence: Synthetic oligonucleotide
gcgggccagaucguaagcc

SEQ ID NO: 2512185 - RNA, 19 nt, Artificial Sequence
  Description of Artificial Sequence: Synthetic oligonucleotide
cagcaaccgcucccagaag

SEQ ID NO: 2512186 - RNA, 19 nt, Artificial Sequence
  Description of Artificial Sequence: Synthetic oligonucleotide
accgucugggaggcaauau

SEQ ID NO: 2512187 - RNA, 19 nt, Artificial Sequence
  Description of Artificial Sequence: Synthetic oligonucleotide
guagaggccagggccucuc

SEQ ID NO: 2512188 - RNA, 19 nt, Artificial Sequence
  Description of Artificial Sequence: Synthetic oligonucleotide
gcuugguagauggcucggc

SEQ ID NO: 2512189 - RNA, 19 nt, Artificial Sequence
  Description of Artificial Sequence: Synthetic oligonucleotide
gcaucggccgcugcaacac

SEQ ID NO: 2512190 - RNA, 19 nt, Artificial Sequence
  Description of Artificial Sequence: Synthetic oligonucleotide
caccgagaaggcuguucca

SEQ ID NO: 2512191 - RNA, 19 nt, Artificial Sequence
  Description of Artificial Sequence: Synthetic oligonucleotide
ggcaucggccgcugcaaca

SEQ ID NO: 2512192 - RNA, 19 nt, Artificial Sequence
  Description of Artificial Sequence: Synthetic oligonucleotide
gacagccccaugccuuugu

SEQ ID NO: 2512193 - RNA, 19 nt, Artificial Sequence
  Description of Artificial Sequence: Synthetic oligonucleotide
cacgaccuccgaauccaaa

SEQ ID NO: 2512194 - RNA, 19 nt, Artificial Sequence
  Description of Artificial Sequence: Synthetic oligonucleotide
ccaugacuccauaagcaua

SEQ ID NO: 2512195 - RNA, 19 nt, Artificial Sequence
  Description of Artificial Sequence: Synthetic oligonucleotide
ucaccggcaucggccgcug

SEQ ID NO: 2512196 - RNA, 19 nt, Artificial Sequence
  Description of Artificial Sequence: Synthetic oligonucleotide
guaagccuccuggacuucu

SEQ ID NO: 2512197 - RNA, 19 nt, Artificial Sequence
  Description of Artificial Sequence: Synthetic oligonucleotide
cgucugggaggcaauauaa

SEQ ID NO: 2512198 - RNA, 19 nt, Artificial Sequence
  Description of Artificial Sequence: Synthetic oligonucleotide
auccagccauccucccgaa

SEQ ID NO: 2512199 - RNA, 19 nt, Artificial Sequence
  Description of Artificial Sequence: Synthetic oligonucleotide
gggccucucuuaucccagc

SEQ ID NO: 2512200 - RNA, 19 nt, Artificial Sequence
  Description of Artificial Sequence: Synthetic oligonucleotide
gcugcgacagagaugcgcu

SEQ ID NO: 2512201 - RNA, 19 nt, Artificial Sequence
  Description of Artificial Sequence: Synthetic oligonucleotide
gcaacacgcuagccagcgc

SEQ ID NO: 2512202 - RNA, 19 nt, Artificial Sequence
  Description of Artificial Sequence: Synthetic oligonucleotide
uggcucggcgggccagauc

SEQ ID NO: 2512203 - RNA, 19 nt, Artificial Sequence
  Description of Artificial Sequence: Synthetic oligonucleotide
cagaagguaaggguugauu

SEQ ID NO: 2512204 - RNA, 19 nt, Artificial Sequence
  Description of Artificial Sequence: Synthetic oligonucleotide
gguuccccucacugucuac

SEQ ID NO: 2512205 - RNA, 19 nt, Artificial Sequence
  Description of Artificial Sequence: Synthetic oligonucleotide
uccccggacccagguccag

SEQ ID NO: 2512206 - RNA, 19 nt, Artificial Sequence
  Description of Artificial Sequence: Synthetic oligonucleotide
acacgcuagccagcgccau

SEQ ID NO: 2512207 - RNA, 19 nt, Artificial Sequence
  Description of Artificial Sequence: Synthetic oligonucleotide
gggccagaucguaagccuc

SEQ ID NO: 2512208 - RNA, 19 nt, Artificial Sequence
  Description of Artificial Sequence: Synthetic oligonucleotide
gucgagccagcaaccgcuc

SEQ ID NO: 2512209 - RNA, 19 nt, Artificial Sequence
  Description of Artificial Sequence: Synthetic oligonucleotide
gccacagaucauggugccc

SEQ ID NO: 2512210 - RNA, 19 nt, Artificial Sequence
  Description of Artificial Sequence: Synthetic oligonucleotide
ccucacugucuacauagua

SEQ ID NO: 2512211 - RNA, 19 nt, Artificial Sequence
  Description of Artificial Sequence: Synthetic oligonucleotide
ccgagaaggcuguuccaga

SEQ ID NO: 2512212 - RNA, 19 nt, Artificial Sequence
  Description of Artificial Sequence: Synthetic oligonucleotide
ccagaucguaagccuccug

SEQ ID NO: 2512213 - RNA, 19 nt, Artificial Sequence
  Description of Artificial Sequence: Synthetic oligonucleotide
cuccccggacccaggucca

SEQ ID NO: 2512214 - RNA, 19 nt, Artificial Sequence
  Description of Artificial Sequence: Synthetic oligonucleotide
gacccagguccagcagauc

SEQ ID NO: 2512215 - RNA, 19 nt, Artificial Sequence
  Description of Artificial Sequence: Synthetic oligonucleotide
caccccagcugggcgcggc

SEQ ID NO: 2512216 - RNA, 19 nt, Artificial Sequence
  Description of Artificial Sequence: Synthetic oligonucleotide
cagagaugcgcuccuuauu

SEQ ID NO: 2512217 - RNA, 19 nt, Artificial Sequence
  Description of Artificial Sequence: Synthetic oligonucleotide
cucgguccaugacuccaua

SEQ ID NO: 2512218 - RNA, 19 nt, Artificial Sequence
  Description of Artificial Sequence: Synthetic oligonucleotide
ccucccgaacgugguagag

SEQ ID NO: 2512219 - RNA, 19 nt, Artificial Sequence
  Description of Artificial Sequence: Synthetic oligonucleotide
ucggcuccucugggacacc

SEQ ID NO: 2512220 - RNA, 19 nt, Artificial Sequence
  Description of Artificial Sequence: Synthetic oligonucleotide
acaccccagcugggcgcgg

SEQ ID NO: 2512221 - RNA, 19 nt, Artificial Sequence
  Description of Artificial Sequence: Synthetic oligonucleotide
cacagaucauggugcccau

SEQ ID NO: 2512222 - RNA, 19 nt, Artificial Sequence
  Description of Artificial Sequence: Synthetic oligonucleotide
caccggcaucggccgcugc

SEQ ID NO: 2512223 - RNA, 19 nt, Artificial Sequence
  Description of Artificial Sequence: Synthetic oligonucleotide
ggccgcugcgacagagaug

SEQ ID NO: 2512224 - RNA, 19 nt, Artificial Sequence
  Description of Artificial Sequence: Synthetic oligonucleotide
gcaaccgcucccagaagcu

SEQ ID NO: 2512225 - RNA, 19 nt, Artificial Sequence
  Description of Artificial Sequence: Synthetic oligonucleotide
cccggacccagguccagca

SEQ ID NO: 2512226 - RNA, 19 nt, Artificial Sequence
  Description of Artificial Sequence: Synthetic oligonucleotide
gcccaucaccaggacuccc

SEQ ID NO: 2512227 - RNA, 19 nt, Artificial Sequence
  Description of Artificial Sequence: Synthetic oligonucleotide
cuguuccagagaugcgguu

SEQ ID NO: 2512228 - RNA, 19 nt, Artificial Sequence
  Description of Artificial Sequence: Synthetic oligonucleotide
ccgucugggaggcaauaua

SEQ ID NO: 2512229 - RNA, 19 nt, Artificial Sequence
  Description of Artificial Sequence: Synthetic oligonucleotide
ggacagccccaugccuuug

SEQ ID NO: 2512230 - RNA, 19 nt, Artificial Sequence
  Description of Artificial Sequence: Synthetic oligonucleotide
cucggcgggccagaucgua

SEQ ID NO: 2512231 - RNA, 19 nt, Artificial Sequence
  Description of Artificial Sequence: Synthetic oligonucleotide
ggcccgggaaucagcugca

SEQ ID NO: 2512232 - RNA, 19 nt, Artificial Sequence
  Description of Artificial Sequence: Synthetic oligonucleotide
ggacuccccggacccaggu

SEQ ID NO: 2512233 - RNA, 19 nt, Artificial Sequence
  Description of Artificial Sequence: Synthetic oligonucleotide
ggcaucucuguagguggcu

SEQ ID NO: 2512234 - RNA, 19 nt, Artificial Sequence
  Description of Artificial Sequence: Synthetic oligonucleotide
caccgucugggaggcaaua

SEQ ID NO: 2512235 - RNA, 19 nt, Artificial Sequence
  Description of Artificial Sequence: Synthetic oligonucleotide
ccauccucccgaacguggu

SEQ ID NO: 2512236 - RNA, 19 nt, Artificial Sequence
  Description of Artificial Sequence: Synthetic oligonucleotide
gcgcggccaggcucagccc

SEQ ID NO: 2512237 - RNA, 19 nt, Artificial Sequence
  Description of Artificial Sequence: Synthetic oligonucleotide
ccgcugcaacacgcuagcc

SEQ ID NO: 2512238 - RNA, 19 nt, Artificial Sequence
  Description of Artificial Sequence: Synthetic oligonucleotide
ccccggacccagguccagc

SEQ ID NO: 2512239 - RNA, 19 nt, Artificial Sequence
  Description of Artificial Sequence: Synthetic oligonucleotide
gccagaucguaagccuccu

SEQ ID NO: 2512240 - RNA, 19 nt, Artificial Sequence
  Description of Artificial Sequence: Synthetic oligonucleotide
ccgcuguggcccgggaauc

SEQ ID NO: 2512241 - RNA, 19 nt, Artificial Sequence
  Description of Artificial Sequence: Synthetic oligonucleotide
cccgcuguggcccgggaau

SEQ ID NO: 2512242 - RNA, 19 nt, Artificial Sequence
  Description of Artificial Sequence: Synthetic oligonucleotide
cuucaccgucugggaggca

SEQ ID NO: 2512243 - RNA, 19 nt, Artificial Sequence
  Description of Artificial Sequence: Synthetic oligonucleotide
ccgcugcgacagagaugcg

SEQ ID NO: 2512244 - RNA, 19 nt, Artificial Sequence
  Description of Artificial Sequence: Synthetic oligonucleotide
gcacgaccuccgaauccaa

SEQ ID NO: 2512245 - RNA, 19 nt, Artificial Sequence
  Description of Artificial Sequence: Synthetic oligonucleotide
cguaagccuccuggacuuc

SEQ ID NO: 2512246 - RNA, 19 nt, Artificial Sequence
  Description of Artificial Sequence: Synthetic oligonucleotide
gcgguuccccucacugucu

SEQ ID NO: 2512247 - RNA, 19 nt, Artificial Sequence
  Description of Artificial Sequence: Synthetic oligonucleotide
cguguaaaucggcuacauu

SEQ ID NO: 2512248 - RNA, 19 nt, Artificial Sequence
  Description of Artificial Sequence: Synthetic oligonucleotide
cgcuguggcccgggaauca

SEQ ID NO: 2512249 - RNA, 19 nt, Artificial Sequence
  Description of Artificial Sequence: Synthetic oligonucleotide
cgguuccccucacugucua

SEQ ID NO: 2512250 - RNA, 19 nt, Artificial Sequence
  Description of Artificial Sequence: Synthetic oligonucleotide
gcccgggaaucagcugcaa

SEQ ID NO: 2512251 - RNA, 19 nt, Artificial Sequence
  Description of Artificial Sequence: Synthetic oligonucleotide
ccuggacuucuaggucaua

SEQ ID NO: 2512252 - RNA, 19 nt, Artificial Sequence
  Description of Artificial Sequence: Synthetic oligonucleotide
cggccgcugcaacacgcua

SEQ ID NO: 2512253 - RNA, 19 nt, Artificial Sequence
  Description of Artificial Sequence: Synthetic oligonucleotide
gcucggcgggccagaucgu

SEQ ID NO: 2512254 - RNA, 19 nt, Artificial Sequence
  Description of Artificial Sequence: Synthetic oligonucleotide
aaagccaccagauauaagg

SEQ ID NO: 2512255 - RNA, 19 nt, Artificial Sequence
  Description of Artificial Sequence: Synthetic oligonucleotide
uuaaaguagaauuucagcc

SEQ ID NO: 2512256 - RNA, 19 nt, Artificial Sequence
  Description of Artificial Sequence: Synthetic oligonucleotide
auuaaaguagaauuucagc

SEQ ID NO: 2512257 - RNA, 19 nt, Artificial Sequence
  Description of Artificial Sequence: Synthetic oligonucleotide
ugcauauucaccauuaaag

SEQ ID NO: 2512258 - RNA, 19 nt, Artificial Sequence
  Description of Artificial Sequence: Synthetic oligonucleotide
ugugcuaucgacaucaaag

SEQ ID NO: 2512259 - RNA, 19 nt, Artificial Sequence
  Description of Artificial Sequence: Synthetic oligonucleotide
aacaaagucagugauguac

SEQ ID NO: 2512260 - RNA, 19 nt, Artificial Sequence
  Description of Artificial Sequence: Synthetic oligonucleotide
aaaaccugcauauucacca

SEQ ID NO: 2512261 - RNA, 19 nt, Artificial Sequence
  Description of Artificial Sequence: Synthetic oligonucleotide
aaguugacaucauucuucc

SEQ ID NO: 2512262 - RNA, 19 nt, Artificial Sequence
  Description of Artificial Sequence: Synthetic oligonucleotide
ugauuauuuucuuaaagug

SEQ ID NO: 2512263 - RNA, 19 nt, Artificial Sequence
  Description of Artificial Sequence: Synthetic oligonucleotide
uuggcaaauacguuggucg

SEQ ID NO: 2512264 - RNA, 19 nt, Artificial Sequence
  Description of Artificial Sequence: Synthetic oligonucleotide
uuuacuuguugccugauca

SEQ ID NO: 2512265 - RNA, 19 nt, Artificial Sequence
  Description of Artificial Sequence: Synthetic oligonucleotide
uguaacuuccagaaauugg

SEQ ID NO: 2512266 - RNA, 19 nt, Artificial Sequence
  Description of Artificial Sequence: Synthetic oligonucleotide
aacauuucgcuccuguagg

SEQ ID NO: 2512267 - RNA, 19 nt, Artificial Sequence
  Description of Artificial Sequence: Synthetic oligonucleotide
gaaagcaucagcaggaggg

SEQ ID NO: 2512268 - RNA, 19 nt, Artificial Sequence
  Description of Artificial Sequence: Synthetic oligonucleotide
uauaaggaacaccugaaca

SEQ ID NO: 2512269 - RNA, 19 nt, Artificial Sequence
  Description of Artificial Sequence: Synthetic oligonucleotide
aaacuaagcuaucuccugg

SEQ ID NO: 2512270 - RNA, 19 nt, Artificial Sequence
  Description of Artificial Sequence: Synthetic oligonucleotide
cuuacaagcucccuuaugc

SEQ ID NO: 2512271 - RNA, 19 nt, Artificial Sequence
  Description of Artificial Sequence: Synthetic oligonucleotide
auauucaccauuaaaguag

SEQ ID NO: 2512272 - RNA, 19 nt, Artificial Sequence
  Description of Artificial Sequence: Synthetic oligonucleotide
ucgacaucaaagcacacug

SEQ ID NO: 2512273 - RNA, 19 nt, Artificial Sequence
  Description of Artificial Sequence: Synthetic oligonucleotide
aaaacuaagcuaucuccug

SEQ ID NO: 2512274 - RNA, 19 nt, Artificial Sequence
  Description of Artificial Sequence: Synthetic oligonucleotide
aacuaagcuaucuccuggg

SEQ ID NO: 2512275 - RNA, 19 nt, Artificial Sequence
  Description of Artificial Sequence: Synthetic oligonucleotide
agauauaaggaacaccuga

SEQ ID NO: 2512276 - RNA, 19 nt, Artificial Sequence
  Description of Artificial Sequence: Synthetic oligonucleotide
cuguaggcgacuuacaagc

SEQ ID NO: 2512277 - RNA, 19 nt, Artificial Sequence
  Description of Artificial Sequence: Synthetic oligonucleotide
ucuccaaucaugauuauuu

SEQ ID NO: 2512278 - RNA, 19 nt, Artificial Sequence
  Description of Artificial Sequence: Synthetic oligonucleotide
uuuccuuuaaaauuucgaa

SEQ ID NO: 2512279 - RNA, 19 nt, Artificial Sequence
  Description of Artificial Sequence: Synthetic oligonucleotide
ucaccauuaaaguagaauu

SEQ ID NO: 2512280 - RNA, 19 nt, Artificial Sequence
  Description of Artificial Sequence: Synthetic oligonucleotide
ugggauauugagcuuagca

SEQ ID NO: 2512281 - RNA, 19 nt, Artificial Sequence
  Description of Artificial Sequence: Synthetic oligonucleotide
aacaccugaacauuucgcu

SEQ ID NO: 2512282 - RNA, 19 nt, Artificial Sequence
  Description of Artificial Sequence: Synthetic oligonucleotide
caaugaaagcaucagcagg

SEQ ID NO: 2512283 - RNA, 19 nt, Artificial Sequence
  Description of Artificial Sequence: Synthetic oligonucleotide
cuauuggcaaauacguugg

SEQ ID NO: 2512284 - RNA, 19 nt, Artificial Sequence
  Description of Artificial Sequence: Synthetic oligonucleotide
gaacauuucgcuccuguag

SEQ ID NO: 2512285 - RNA, 19 nt, Artificial Sequence
  Description of Artificial Sequence: Synthetic oligonucleotide
auuucgaauaacuuuuccu

SEQ ID NO: 2512286 - RNA, 19 nt, Artificial Sequence
  Description of Artificial Sequence: Synthetic oligonucleotide
aauuucagccuauuggcaa

SEQ ID NO: 2512287 - RNA, 19 nt, Artificial Sequence
  Description of Artificial Sequence: Synthetic oligonucleotide
aucaaagcacacugcaucg

SEQ ID NO: 2512288 - RNA, 19 nt, Artificial Sequence
  Description of Artificial Sequence: Synthetic oligonucleotide
uccuaaagccaccagauau

SEQ ID NO: 2512289 - RNA, 19 nt, Artificial Sequence
  Description of Artificial Sequence: Synthetic oligonucleotide
caagaaguugacaucauuc

SEQ ID NO: 2512290 - RNA, 19 nt, Artificial Sequence
  Description of Artificial Sequence: Synthetic oligonucleotide
aaauacguuggucguuggg

SEQ ID NO: 2512291 - RNA, 19 nt, Artificial Sequence
  Description of Artificial Sequence: Synthetic oligonucleotide
uacaagcucccuuaugccg

SEQ ID NO: 2512292 - RNA, 19 nt, Artificial Sequence
  Description of Artificial Sequence: Synthetic oligonucleotide
cuuagcagccacaugcucc

SEQ ID NO: 2512293 - RNA, 19 nt, Artificial Sequence
  Description of Artificial Sequence: Synthetic oligonucleotide
uaaagugaaacuuuuccuu

SEQ ID NO: 2512294 - RNA, 19 nt, Artificial Sequence
  Description of Artificial Sequence: Synthetic oligonucleotide
gauuauuuucuuaaaguga

SEQ ID NO: 2512295 - RNA, 19 nt, Artificial Sequence
  Description of Artificial Sequence: Synthetic oligonucleotide
aaaguagaauuucagccua

SEQ ID NO: 2512296 - RNA, 19 nt, Artificial Sequence
  Description of Artificial Sequence: Synthetic oligonucleotide
aaagcaucagcaggagggc

SEQ ID NO: 2512297 - RNA, 19 nt, Artificial Sequence
  Description of Artificial Sequence: Synthetic oligonucleotide
aaauuggaguuguucugag

SEQ ID NO: 2512298 - RNA, 19 nt, Artificial Sequence
  Description of Artificial Sequence: Synthetic oligonucleotide
aauacguuggucguuggga

SEQ ID NO: 2512299 - RNA, 19 nt, Artificial Sequence
  Description of Artificial Sequence: Synthetic oligonucleotide
acaugcuccacaauacucc

SEQ ID NO: 2512300 - RNA, 19 nt, Artificial Sequence
  Description of Artificial Sequence: Synthetic oligonucleotide
ggauauugagcuuagcagc

SEQ ID NO: 2512301 - RNA, 19 nt, Artificial Sequence
  Description of Artificial Sequence: Synthetic oligonucleotide
cucugaaaggcaaugcccc

SEQ ID NO: 2512302 - RNA, 19 nt, Artificial Sequence
  Description of Artificial Sequence: Synthetic oligonucleotide
agaaauuggaguuguucug

SEQ ID NO: 2512303 - RNA, 19 nt, Artificial Sequence
  Description of Artificial Sequence: Synthetic oligonucleotide
uaggcgacuuacaagcucc

SEQ ID NO: 2512304 - RNA, 19 nt, Artificial Sequence
  Description of Artificial Sequence: Synthetic oligonucleotide
uguagcuccaucuccaauc

SEQ ID NO: 2512305 - RNA, 19 nt, Artificial Sequence
  Description of Artificial Sequence: Synthetic oligonucleotide
uuucuuaaagugaaacuuu

SEQ ID NO: 2512306 - RNA, 19 nt, Artificial Sequence
  Description of Artificial Sequence: Synthetic oligonucleotide
auuggaguuguucugagua

SEQ ID NO: 2512307 - RNA, 19 nt, Artificial Sequence
  Description of Artificial Sequence: Synthetic oligonucleotide
uaaacaagaaguugacauc

SEQ ID NO: 2512308 - RNA, 19 nt, Artificial Sequence
  Description of Artificial Sequence: Synthetic oligonucleotide
guucugaguaaacaagaag

SEQ ID NO: 2512309 - RNA, 19 nt, Artificial Sequence
  Description of Artificial Sequence: Synthetic oligonucleotide
gauauugagcuuagcagcc

SEQ ID NO: 2512310 - RNA, 19 nt, Artificial Sequence
  Description of Artificial Sequence: Synthetic oligonucleotide
guaaacaagaaguugacau

SEQ ID NO: 2512311 - RNA, 19 nt, Artificial Sequence
  Description of Artificial Sequence: Synthetic oligonucleotide
cagccuauuggcaaauacg

SEQ ID NO: 2512312 - RNA, 19 nt, Artificial Sequence
  Description of Artificial Sequence: Synthetic oligonucleotide
acuaagcuaucuccugggc

SEQ ID NO: 2512313 - RNA, 19 nt, Artificial Sequence
  Description of Artificial Sequence: Synthetic oligonucleotide
agugauguaccacuuggca

SEQ ID NO: 2512314 - RNA, 19 nt, Artificial Sequence
  Description of Artificial Sequence: Synthetic oligonucleotide
uaacuuccagaaauuggag

SEQ ID NO: 2512315 - RNA, 19 nt, Artificial Sequence
  Description of Artificial Sequence: Synthetic oligonucleotide
cuaacuguguaacuuccag

SEQ ID NO: 2512316 - RNA, 19 nt, Artificial Sequence
  Description of Artificial Sequence: Synthetic oligonucleotide
guucccucagcucugagug

SEQ ID NO: 2512317 - RNA, 19 nt, Artificial Sequence
  Description of Artificial Sequence: Synthetic oligonucleotide
gaaguugacaucauucuuc

SEQ ID NO: 2512318 - RNA, 19 nt, Artificial Sequence
  Description of Artificial Sequence: Synthetic oligonucleotide
uacuccuaaagccaccaga

SEQ ID NO: 2512319 - RNA, 19 nt, Artificial Sequence
  Description of Artificial Sequence: Synthetic oligonucleotide
gggauauugagcuuagcag

SEQ ID NO: 2512320 - RNA, 19 nt, Artificial Sequence
  Description of Artificial Sequence: Synthetic oligonucleotide
ucugaguaaacaagaaguu

SEQ ID NO: 2512321 - RNA, 19 nt, Artificial Sequence
  Description of Artificial Sequence: Synthetic oligonucleotide
guuguucugaguaaacaag

SEQ ID NO: 2512322 - RNA, 19 nt, Artificial Sequence
  Description of Artificial Sequence: Synthetic oligonucleotide
aaauuucgaauaacuuuuc

SEQ ID NO: 2512323 - RNA, 19 nt, Artificial Sequence
  Description of Artificial Sequence: Synthetic oligonucleotide
uggucguugggauauugag

SEQ ID NO: 2512324 - RNA, 19 nt, Artificial Sequence
  Description of Artificial Sequence: Synthetic oligonucleotide
caucaaagcacacugcauc

SEQ ID NO: 2512325 - RNA, 19 nt, Artificial Sequence
  Description of Artificial Sequence: Synthetic oligonucleotide
ucuccuagcagcucaacaa

SEQ ID NO: 2512326 - RNA, 19 nt, Artificial Sequence
  Description of Artificial Sequence: Synthetic oligonucleotide
ugcaucucaucaaaaccug

SEQ ID NO: 2512327 - RNA, 19 nt, Artificial Sequence
  Description of Artificial Sequence: Synthetic oligonucleotide
aauacuccuaaagccacca

SEQ ID NO: 2512328 - RNA, 19 nt, Artificial Sequence
  Description of Artificial Sequence: Synthetic oligonucleotide
cuccaaauccaaugaaagc

SEQ ID NO: 2512329 - RNA, 19 nt, Artificial Sequence
  Description of Artificial Sequence: Synthetic oligonucleotide
caccugaacauuucgcucc

SEQ ID NO: 2512330 - RNA, 19 nt, Artificial Sequence
  Description of Artificial Sequence: Synthetic oligonucleotide
ucagccuauuggcaaauac

SEQ ID NO: 2512331 - RNA, 19 nt, Artificial Sequence
  Description of Artificial Sequence: Synthetic oligonucleotide
ugcuaucgacaucaaagca

SEQ ID NO: 2512332 - RNA, 19 nt, Artificial Sequence
  Description of Artificial Sequence: Synthetic oligonucleotide
gugagcgcaucucugaaag

SEQ ID NO: 2512333 - RNA, 19 nt, Artificial Sequence
  Description of Artificial Sequence: Synthetic oligonucleotide
acaccugaacauuucgcuc

SEQ ID NO: 2512334 - RNA, 19 nt, Artificial Sequence
  Description of Artificial Sequence: Synthetic oligonucleotide
uucuuaaagugaaacuuuu

SEQ ID NO: 2512335 - RNA, 19 nt, Artificial Sequence
  Description of Artificial Sequence: Synthetic oligonucleotide
uuacaagcucccuuaugcc

SEQ ID NO: 2512336 - RNA, 19 nt, Artificial Sequence
  Description of Artificial Sequence: Synthetic oligonucleotide
ucgaauaacuuuuccuuuc

SEQ ID NO: 2512337 - RNA, 19 nt, Artificial Sequence
  Description of Artificial Sequence: Synthetic oligonucleotide
agccuaacuguguaacuuc

SEQ ID NO: 2512338 - RNA, 19 nt, Artificial Sequence
  Description of Artificial Sequence: Synthetic oligonucleotide
agcagcucaacaaagucag

SEQ ID NO: 2512339 - RNA, 19 nt, Artificial Sequence
  Description of Artificial Sequence: Synthetic oligonucleotide
ccuauuggcaaauacguug

SEQ ID NO: 2512340 - RNA, 19 nt, Artificial Sequence
  Description of Artificial Sequence: Synthetic oligonucleotide
caaaaccugcauauucacc

SEQ ID NO: 2512341 - RNA, 19 nt, Artificial Sequence
  Description of Artificial Sequence: Synthetic oligonucleotide
agugggaggaccauccugg

SEQ ID NO: 2512342 - RNA, 19 nt, Artificial Sequence
  Description of Artificial Sequence: Synthetic oligonucleotide
uuagcagccacaugcucca

SEQ ID NO: 2512343 - RNA, 19 nt, Artificial Sequence
  Description of Artificial Sequence: Synthetic oligonucleotide
uccaaucaugauuauuuuc

SEQ ID NO: 2512344 - RNA, 19 nt, Artificial Sequence
  Description of Artificial Sequence: Synthetic oligonucleotide
guagaauuucagccuauug

SEQ ID NO: 2512345 - RNA, 19 nt, Artificial Sequence
  Description of Artificial Sequence: Synthetic oligonucleotide
aauuggaguuguucugagu

SEQ ID NO: 2512346 - RNA, 19 nt, Artificial Sequence
  Description of Artificial Sequence: Synthetic oligonucleotide
gugcuaucgacaucaaagc

SEQ ID NO: 2512347 - RNA, 19 nt, Artificial Sequence
  Description of Artificial Sequence: Synthetic oligonucleotide
uccacaccacagaauuugg

SEQ ID NO: 2512348 - RNA, 19 nt, Artificial Sequence
  Description of Artificial Sequence: Synthetic oligonucleotide
uguaccacuuggcauugcu

SEQ ID NO: 2512349 - RNA, 19 nt, Artificial Sequence
  Description of Artificial Sequence: Synthetic oligonucleotide
cuaucgacaucaaagcaca

SEQ ID NO: 2512350 - RNA, 19 nt, Artificial Sequence
  Description of Artificial Sequence: Synthetic oligonucleotide
guugccugaucacauuucc

SEQ ID NO: 2512351 - RNA, 19 nt, Artificial Sequence
  Description of Artificial Sequence: Synthetic oligonucleotide
aaggcaaugccccucccau

SEQ ID NO: 2512352 - RNA, 19 nt, Artificial Sequence
  Description of Artificial Sequence: Synthetic oligonucleotide
cugagugggaggaccaucc

SEQ ID NO: 2512353 - RNA, 19 nt, Artificial Sequence
  Description of Artificial Sequence: Synthetic oligonucleotide
uauugagcuuagcagccac

SEQ ID NO: 2512354 - RNA, 19 nt, Artificial Sequence
  Description of Artificial Sequence: Synthetic oligonucleotide
agcucaacaaagucaguga

SEQ ID NO: 2512355 - RNA, 19 nt, Artificial Sequence
  Description of Artificial Sequence: Synthetic oligonucleotide
cugaguaaacaagaaguug

SEQ ID NO: 2512356 - RNA, 19 nt, Artificial Sequence
  Description of Artificial Sequence: Synthetic oligonucleotide
gaaauuggaguuguucuga

SEQ ID NO: 2512357 - RNA, 19 nt, Artificial Sequence
  Description of Artificial Sequence: Synthetic oligonucleotide
gagcgcaucucugaaaggc

SEQ ID NO: 2512358 - RNA, 19 nt, Artificial Sequence
  Description of Artificial Sequence: Synthetic oligonucleotide
uuucccaccugacucggcu

SEQ ID NO: 2512359 - RNA, 19 nt, Artificial Sequence
  Description of Artificial Sequence: Synthetic oligonucleotide
cuagcagcucaacaaaguc

SEQ ID NO: 2512360 - RNA, 19 nt, Artificial Sequence
  Description of Artificial Sequence: Synthetic oligonucleotide
aagugaaacuuuuccuuua

SEQ ID NO: 2512361 - RNA, 19 nt, Artificial Sequence
  Description of Artificial Sequence: Synthetic oligonucleotide
aggagccuaacuguguaac

SEQ ID NO: 2512362 - RNA, 19 nt, Artificial Sequence
  Description of Artificial Sequence: Synthetic oligonucleotide
ucaaagcacacugcaucgg

SEQ ID NO: 2512363 - RNA, 19 nt, Artificial Sequence
  Description of Artificial Sequence: Synthetic oligonucleotide
caaagcacacugcaucggc

SEQ ID NO: 2512364 - RNA, 19 nt, Artificial Sequence
  Description of Artificial Sequence: Synthetic oligonucleotide
cauauucaccauuaaagua

SEQ ID NO: 2512365 - RNA, 19 nt, Artificial Sequence
  Description of Artificial Sequence: Synthetic oligonucleotide
gucguugggauauugagcu

SEQ ID NO: 2512366 - RNA, 19 nt, Artificial Sequence
  Description of Artificial Sequence: Synthetic oligonucleotide
uccuguaggcgacuuacaa

SEQ ID NO: 2512367 - RNA, 19 nt, Artificial Sequence
  Description of Artificial Sequence: Synthetic oligonucleotide
acaagcucccuuaugccgg

SEQ ID NO: 2512368 - RNA, 19 nt, Artificial Sequence
  Description of Artificial Sequence: Synthetic oligonucleotide
agcucugagugggaggacc

SEQ ID NO: 2512369 - RNA, 19 nt, Artificial Sequence
  Description of Artificial Sequence: Synthetic oligonucleotide
gcugcaucucaucaaaacc

SEQ ID NO: 2512370 - RNA, 19 nt, Artificial Sequence
  Description of Artificial Sequence: Synthetic oligonucleotide
gacaucauucuuccaguuc

SEQ ID NO: 2512371 - RNA, 19 nt, Artificial Sequence
  Description of Artificial Sequence: Synthetic oligonucleotide
uuacuuguugccugaucac

SEQ ID NO: 2512372 - RNA, 19 nt, Artificial Sequence
  Description of Artificial Sequence: Synthetic oligonucleotide
agccuauuggcaaauacgu

SEQ ID NO: 2512373 - RNA, 19 nt, Artificial Sequence
  Description of Artificial Sequence: Synthetic oligonucleotide
agaaguugacaucauucuu

SEQ ID NO: 2512374 - RNA, 19 nt, Artificial Sequence
  Description of Artificial Sequence: Synthetic oligonucleotide
auuucgcuccuguaggcga

SEQ ID NO: 2512375 - RNA, 19 nt, Artificial Sequence
  Description of Artificial Sequence: Synthetic oligonucleotide
ggcaaugccccucccaugg

SEQ ID NO: 2512376 - RNA, 19 nt, Artificial Sequence
  Description of Artificial Sequence: Synthetic oligonucleotide
gucauuucagacacagcag

SEQ ID NO: 2512377 - RNA, 19 nt, Artificial Sequence
  Description of Artificial Sequence: Synthetic oligonucleotide
acuuacaagcucccuuaug

SEQ ID NO: 2512378 - RNA, 19 nt, Artificial Sequence
  Description of Artificial Sequence: Synthetic oligonucleotide
ucggcuguuggcugcaucu

SEQ ID NO: 2512379 - RNA, 19 nt, Artificial Sequence
  Description of Artificial Sequence: Synthetic oligonucleotide
aguaaacaagaaguugaca

SEQ ID NO: 2512380 - RNA, 19 nt, Artificial Sequence
  Description of Artificial Sequence: Synthetic oligonucleotide
ugcaucggcugaacagagg

SEQ ID NO: 2512381 - RNA, 19 nt, Artificial Sequence
  Description of Artificial Sequence: Synthetic oligonucleotide
uacuuguugccugaucaca

SEQ ID NO: 2512382 - RNA, 19 nt, Artificial Sequence
  Description of Artificial Sequence: Synthetic oligonucleotide
ugcucuuuacuuguugccu

SEQ ID NO: 2512383 - RNA, 19 nt, Artificial Sequence
  Description of Artificial Sequence: Synthetic oligonucleotide
aaugccccucccauggcuc

SEQ ID NO: 2512384 - RNA, 19 nt, Artificial Sequence
  Description of Artificial Sequence: Synthetic oligonucleotide
cagcucaacaaagucagug

SEQ ID NO: 2512385 - RNA, 19 nt, Artificial Sequence
  Description of Artificial Sequence: Synthetic oligonucleotide
caauacuccuaaagccacc

SEQ ID NO: 2512386 - RNA, 19 nt, Artificial Sequence
  Description of Artificial Sequence: Synthetic oligonucleotide
ugagcgcaucucugaaagg

SEQ ID NO: 2512387 - RNA, 19 nt, Artificial Sequence
  Description of Artificial Sequence: Synthetic oligonucleotide
uguugccugaucacauuuc

SEQ ID NO: 2512388 - RNA, 19 nt, Artificial Sequence
  Description of Artificial Sequence: Synthetic oligonucleotide
cauugcucuuuacuuguug

SEQ ID NO: 2512389 - RNA, 19 nt, Artificial Sequence
  Description of Artificial Sequence: Synthetic oligonucleotide
cagauauaaggaacaccug

SEQ ID NO: 2512390 - RNA, 19 nt, Artificial Sequence
  Description of Artificial Sequence: Synthetic oligonucleotide
auuucagccuauuggcaaa

SEQ ID NO: 2512391 - RNA, 19 nt, Artificial Sequence
  Description of Artificial Sequence: Synthetic oligonucleotide
uuguugccugaucacauuu

SEQ ID NO: 2512392 - RNA, 19 nt, Artificial Sequence
  Description of Artificial Sequence: Synthetic oligonucleotide
gaggaguucccucagcucu

SEQ ID NO: 2512393 - RNA, 19 nt, Artificial Sequence
  Description of Artificial Sequence: Synthetic oligonucleotide
ugagcuuagcagccacaug

SEQ ID NO: 2512394 - RNA, 19 nt, Artificial Sequence
  Description of Artificial Sequence: Synthetic oligonucleotide
uguaggcgacuuacaagcu

SEQ ID NO: 2512395 - RNA, 19 nt, Artificial Sequence
  Description of Artificial Sequence: Synthetic oligonucleotide
aguucccucagcucugagu

SEQ ID NO: 2512396 - RNA, 19 nt, Artificial Sequence
  Description of Artificial Sequence: Synthetic oligonucleotide
acugcaucggcugaacaga

SEQ ID NO: 2512397 - RNA, 19 nt, Artificial Sequence
  Description of Artificial Sequence: Synthetic oligonucleotide
gaauuucagccuauuggca

SEQ ID NO: 2512398 - RNA, 19 nt, Artificial Sequence
  Description of Artificial Sequence: Synthetic oligonucleotide
auacguuggucguugggau

SEQ ID NO: 2512399 - RNA, 19 nt, Artificial Sequence
  Description of Artificial Sequence: Synthetic oligonucleotide
aucggcugaacagaggagu

SEQ ID NO: 2512400 - RNA, 19 nt, Artificial Sequence
  Description of Artificial Sequence: Synthetic oligonucleotide
aucagugccaggcguucag

SEQ ID NO: 2512401 - RNA, 19 nt, Artificial Sequence
  Description of Artificial Sequence: Synthetic oligonucleotide
caaauacguuggucguugg

SEQ ID NO: 2512402 - RNA, 19 nt, Artificial Sequence
  Description of Artificial Sequence: Synthetic oligonucleotide
guguaacuuccagaaauug

SEQ ID NO: 2512403 - RNA, 19 nt, Artificial Sequence
  Description of Artificial Sequence: Synthetic oligonucleotide
aucgacaucaaagcacacu

SEQ ID NO: 2512404 - RNA, 19 nt, Artificial Sequence
  Description of Artificial Sequence: Synthetic oligonucleotide
uauuggcaaauacguuggu

SEQ ID NO: 2512405 - RNA, 19 nt, Artificial Sequence
  Description of Artificial Sequence: Synthetic oligonucleotide
cauuucgcuccuguaggcg

SEQ ID NO: 2512406 - RNA, 19 nt, Artificial Sequence
  Description of Artificial Sequence: Synthetic oligonucleotide
gcuaucgacaucaaagcac

SEQ ID NO: 2512407 - RNA, 19 nt, Artificial Sequence
  Description of Artificial Sequence: Synthetic oligonucleotide
ccagauauaaggaacaccu

SEQ ID NO: 2512408 - RNA, 19 nt, Artificial Sequence
  Description of Artificial Sequence: Synthetic oligonucleotide
ucccauggcucuccgaguc

SEQ ID NO: 2512409 - RNA, 19 nt, Artificial Sequence
  Description of Artificial Sequence: Synthetic oligonucleotide
cugcaucucaucaaaaccu

SEQ ID NO: 2512410 - RNA, 19 nt, Artificial Sequence
  Description of Artificial Sequence: Synthetic oligonucleotide
uggaguuguucugaguaaa

SEQ ID NO: 2512411 - RNA, 19 nt, Artificial Sequence
  Description of Artificial Sequence: Synthetic oligonucleotide
uuugcaccugcucccugga

SEQ ID NO: 2512412 - RNA, 19 nt, Artificial Sequence
  Description of Artificial Sequence: Synthetic oligonucleotide
acuccuaaagccaccagau

SEQ ID NO: 2512413 - RNA, 19 nt, Artificial Sequence
  Description of Artificial Sequence: Synthetic oligonucleotide
gaucacauuuccuccaaau

SEQ ID NO: 2512414 - RNA, 19 nt, Artificial Sequence
  Description of Artificial Sequence: Synthetic oligonucleotide
uugagcuuagcagccacau

SEQ ID NO: 2512415 - RNA, 19 nt, Artificial Sequence
  Description of Artificial Sequence: Synthetic oligonucleotide
uuucgcuccuguaggcgac

SEQ ID NO: 2512416 - RNA, 19 nt, Artificial Sequence
  Description of Artificial Sequence: Synthetic oligonucleotide
uucccucagcucugagugg

SEQ ID NO: 2512417 - RNA, 19 nt, Artificial Sequence
  Description of Artificial Sequence: Synthetic oligonucleotide
auacuccuaaagccaccag

SEQ ID NO: 2512418 - RNA, 19 nt, Artificial Sequence
  Description of Artificial Sequence: Synthetic oligonucleotide
guaggcgacuuacaagcuc

SEQ ID NO: 2512419 - RNA, 19 nt, Artificial Sequence
  Description of Artificial Sequence: Synthetic oligonucleotide
guugggauauugagcuuag

SEQ ID NO: 2512420 - RNA, 19 nt, Artificial Sequence
  Description of Artificial Sequence: Synthetic oligonucleotide
ggagggcuggaucagugcc

SEQ ID NO: 2512421 - RNA, 19 nt, Artificial Sequence
  Description of Artificial Sequence: Synthetic oligonucleotide
gcauauucaccauuaaagu

SEQ ID NO: 2512422 - RNA, 19 nt, Artificial Sequence
  Description of Artificial Sequence: Synthetic oligonucleotide
cugcaucggcugaacagag

SEQ ID NO: 2512423 - RNA, 19 nt, Artificial Sequence
  Description of Artificial Sequence: Synthetic oligonucleotide
gcaaauacguuggucguug

SEQ ID NO: 2512424 - RNA, 19 nt, Artificial Sequence
  Description of Artificial Sequence: Synthetic oligonucleotide
ggcugcaucucaucaaaac

SEQ ID NO: 2512425 - RNA, 19 nt, Artificial Sequence
  Description of Artificial Sequence: Synthetic oligonucleotide
caucggcugaacagaggag

SEQ ID NO: 2512426 - RNA, 19 nt, Artificial Sequence
  Description of Artificial Sequence: Synthetic oligonucleotide
ggggugcuccgcuagaagc

SEQ ID NO: 2512427 - RNA, 19 nt, Artificial Sequence
  Description of Artificial Sequence: Synthetic oligonucleotide
uaucgacaucaaagcacac

SEQ ID NO: 2512428 - RNA, 19 nt, Artificial Sequence
  Description of Artificial Sequence: Synthetic oligonucleotide
ggcugaacagaggaguucc

SEQ ID NO: 2512429 - RNA, 19 nt, Artificial Sequence
  Description of Artificial Sequence: Synthetic oligonucleotide
caugucuguagcuccaucu

SEQ ID NO: 2512430 - RNA, 19 nt, Artificial Sequence
  Description of Artificial Sequence: Synthetic oligonucleotide
ugacaucauucuuccaguu

SEQ ID NO: 2512431 - RNA, 19 nt, Artificial Sequence
  Description of Artificial Sequence: Synthetic oligonucleotide
gcaucggcugaacagagga

SEQ ID NO: 2512432 - RNA, 19 nt, Artificial Sequence
  Description of Artificial Sequence: Synthetic oligonucleotide
caccugacucggcuguugg

SEQ ID NO: 2512433 - RNA, 19 nt, Artificial Sequence
  Description of Artificial Sequence: Synthetic oligonucleotide
caggcguucagugagcgca

SEQ ID NO: 2512434 - RNA, 19 nt, Artificial Sequence
  Description of Artificial Sequence: Synthetic oligonucleotide
gggaggaccauccugggaa

SEQ ID NO: 2512435 - RNA, 19 nt, Artificial Sequence
  Description of Artificial Sequence: Synthetic oligonucleotide
ugggaggaccauccuggga

SEQ ID NO: 2512436 - RNA, 19 nt, Artificial Sequence
  Description of Artificial Sequence: Synthetic oligonucleotide
uggaucagugccaggcguu

SEQ ID NO: 2512437 - RNA, 19 nt, Artificial Sequence
  Description of Artificial Sequence: Synthetic oligonucleotide
ggucguugggauauugagc

SEQ ID NO: 2512438 - RNA, 19 nt, Artificial Sequence
  Description of Artificial Sequence: Synthetic oligonucleotide
ucggcugaacagaggaguu

SEQ ID NO: 2512439 - RNA, 19 nt, Artificial Sequence
  Description of Artificial Sequence: Synthetic oligonucleotide
cuaaagccaccagauauaa

SEQ ID NO: 2512440 - RNA, 19 nt, Artificial Sequence
  Description of Artificial Sequence: Synthetic oligonucleotide
acuuguugccugaucacau

SEQ ID NO: 2512441 - RNA, 19 nt, Artificial Sequence
  Description of Artificial Sequence: Synthetic oligonucleotide
ucugagugggaggaccauc

SEQ ID NO: 2512442 - RNA, 19 nt, Artificial Sequence
  Description of Artificial Sequence: Synthetic oligonucleotide
aguugacaucauucuucca

SEQ ID NO: 2512443 - RNA, 19 nt, Artificial Sequence
  Description of Artificial Sequence: Synthetic oligonucleotide
aaguagaauuucagccuau

SEQ ID NO: 2512444 - RNA, 19 nt, Artificial Sequence
  Description of Artificial Sequence: Synthetic oligonucleotide
cagugccaggcguucagug

SEQ ID NO: 2512445 - RNA, 19 nt, Artificial Sequence
  Description of Artificial Sequence: Synthetic oligonucleotide
gcuggaucagugccaggcg

SEQ ID NO: 2512446 - RNA, 19 nt, Artificial Sequence
  Description of Artificial Sequence: Synthetic oligonucleotide
cuccgcuagaagccuuugc

SEQ ID NO: 2512447 - RNA, 19 nt, Artificial Sequence
  Description of Artificial Sequence: Synthetic oligonucleotide
ggaugacugugcuaucgac

SEQ ID NO: 2512448 - RNA, 19 nt, Artificial Sequence
  Description of Artificial Sequence: Synthetic oligonucleotide
aguagaauuucagccuauu

SEQ ID NO: 2512449 - RNA, 19 nt, Artificial Sequence
  Description of Artificial Sequence: Synthetic oligonucleotide
caccagauauaaggaacac

SEQ ID NO: 2512450 - RNA, 19 nt, Artificial Sequence
  Description of Artificial Sequence: Synthetic oligonucleotide
acguuggucguugggauau

SEQ ID NO: 2512451 - RNA, 19 nt, Artificial Sequence
  Description of Artificial Sequence: Synthetic oligonucleotide
cuaagcuaucuccugggcu

SEQ ID NO: 2512452 - RNA, 19 nt, Artificial Sequence
  Description of Artificial Sequence: Synthetic oligonucleotide
ccagaaauuggaguuguuc

SEQ ID NO: 2512453 - RNA, 19 nt, Artificial Sequence
  Description of Artificial Sequence: Synthetic oligonucleotide
acacugcaucggcugaaca

SEQ ID NO: 2512454 - RNA, 19 nt, Artificial Sequence
  Description of Artificial Sequence: Synthetic oligonucleotide
acaucaaagcacacugcau

SEQ ID NO: 2512455 - RNA, 19 nt, Artificial Sequence
  Description of Artificial Sequence: Synthetic oligonucleotide
cuagaagccuuugcaccug

SEQ ID NO: 2512456 - RNA, 19 nt, Artificial Sequence
  Description of Artificial Sequence: Synthetic oligonucleotide
uacguuggucguugggaua

SEQ ID NO: 2512457 - RNA, 19 nt, Artificial Sequence
  Description of Artificial Sequence: Synthetic oligonucleotide
uuucagccuauuggcaaau

SEQ ID NO: 2512458 - RNA, 19 nt, Artificial Sequence
  Description of Artificial Sequence: Synthetic oligonucleotide
cucuccgagucauuucaga

SEQ ID NO: 2512459 - RNA, 19 nt, Artificial Sequence
  Description of Artificial Sequence: Synthetic oligonucleotide
uggcugcaucucaucaaaa

SEQ ID NO: 2512460 - RNA, 19 nt, Artificial Sequence
  Description of Artificial Sequence: Synthetic oligonucleotide
aggcgacuuacaagcuccc

SEQ ID NO: 2512461 - RNA, 19 nt, Artificial Sequence
  Description of Artificial Sequence: Synthetic oligonucleotide
accugcauauucaccauua

SEQ ID NO: 2512462 - RNA, 19 nt, Artificial Sequence
  Description of Artificial Sequence: Synthetic oligonucleotide
auugagcuuagcagccaca

SEQ ID NO: 2512463 - RNA, 19 nt, Artificial Sequence
  Description of Artificial Sequence: Synthetic oligonucleotide
cuccuagcagcucaacaaa

SEQ ID NO: 2512464 - RNA, 19 nt, Artificial Sequence
  Description of Artificial Sequence: Synthetic oligonucleotide
gcaucucugaaaggcaaug

SEQ ID NO: 2512465 - RNA, 19 nt, Artificial Sequence
  Description of Artificial Sequence: Synthetic oligonucleotide
cuuucccaccugacucggc

SEQ ID NO: 2512466 - RNA, 19 nt, Artificial Sequence
  Description of Artificial Sequence: Synthetic oligonucleotide
agcgcaucucugaaaggca

SEQ ID NO: 2512467 - RNA, 19 nt, Artificial Sequence
  Description of Artificial Sequence: Synthetic oligonucleotide
agcuuagcagccacaugcu

SEQ ID NO: 2512468 - RNA, 19 nt, Artificial Sequence
  Description of Artificial Sequence: Synthetic oligonucleotide
gaguucccucagcucugag

SEQ ID NO: 2512469 - RNA, 19 nt, Artificial Sequence
  Description of Artificial Sequence: Synthetic oligonucleotide
ccaccagauauaaggaaca

SEQ ID NO: 2512470 - RNA, 19 nt, Artificial Sequence
  Description of Artificial Sequence: Synthetic oligonucleotide
gccuaacuguguaacuucc

SEQ ID NO: 2512471 - RNA, 19 nt, Artificial Sequence
  Description of Artificial Sequence: Synthetic oligonucleotide
cugaacauuucgcuccugu

SEQ ID NO: 2512472 - RNA, 19 nt, Artificial Sequence
  Description of Artificial Sequence: Synthetic oligonucleotide
agcagccuccacaccacag

SEQ ID NO: 2512473 - RNA, 19 nt, Artificial Sequence
  Description of Artificial Sequence: Synthetic oligonucleotide
gcuccuguaggcgacuuac

SEQ ID NO: 2512474 - RNA, 19 nt, Artificial Sequence
  Description of Artificial Sequence: Synthetic oligonucleotide
ugcuccgcuagaagccuuu

SEQ ID NO: 2512475 - RNA, 19 nt, Artificial Sequence
  Description of Artificial Sequence: Synthetic oligonucleotide
ggaguuguucugaguaaac

SEQ ID NO: 2512476 - RNA, 19 nt, Artificial Sequence
  Description of Artificial Sequence: Synthetic oligonucleotide
guaccacuuggcauugcuc

SEQ ID NO: 2512477 - RNA, 19 nt, Artificial Sequence
  Description of Artificial Sequence: Synthetic oligonucleotide
acauuuccuccaaauccaa

SEQ ID NO: 2512478 - RNA, 19 nt, Artificial Sequence
  Description of Artificial Sequence: Synthetic oligonucleotide
aggaguucccucagcucug

SEQ ID NO: 2512479 - RNA, 19 nt, Artificial Sequence
  Description of Artificial Sequence: Synthetic oligonucleotide
gagccuaacuguguaacuu

SEQ ID NO: 2512480 - RNA, 19 nt, Artificial Sequence
  Description of Artificial Sequence: Synthetic oligonucleotide
gaucagugccaggcguuca

SEQ ID NO: 2512481 - RNA, 19 nt, Artificial Sequence
  Description of Artificial Sequence: Synthetic oligonucleotide
uagcuccaucuccaaucau

SEQ ID NO: 2512482 - RNA, 19 nt, Artificial Sequence
  Description of Artificial Sequence: Synthetic oligonucleotide
augccccucccauggcucu

SEQ ID NO: 2512483 - RNA, 19 nt, Artificial Sequence
  Description of Artificial Sequence: Synthetic oligonucleotide
uccaugucuguagcuccau

SEQ ID NO: 2512484 - RNA, 19 nt, Artificial Sequence
  Description of Artificial Sequence: Synthetic oligonucleotide
ucguugggauauugagcuu

SEQ ID NO: 2512485 - RNA, 19 nt, Artificial Sequence
  Description of Artificial Sequence: Synthetic oligonucleotide
uucagccuauuggcaaaua

SEQ ID NO: 2512486 - RNA, 19 nt, Artificial Sequence
  Description of Artificial Sequence: Synthetic oligonucleotide
caucagcaggagggcaggc

SEQ ID NO: 2512487 - RNA, 19 nt, Artificial Sequence
  Description of Artificial Sequence: Synthetic oligonucleotide
gacuuacaagcucccuuau

SEQ ID NO: 2512488 - RNA, 19 nt, Artificial Sequence
  Description of Artificial Sequence: Synthetic oligonucleotide
ggcuguuggcugcaucuca

SEQ ID NO: 2512489 - RNA, 19 nt, Artificial Sequence
  Description of Artificial Sequence: Synthetic oligonucleotide
cuggaucagugccaggcgu

SEQ ID NO: 2512490 - RNA, 19 nt, Artificial Sequence
  Description of Artificial Sequence: Synthetic oligonucleotide
cucggcuguuggcugcauc

SEQ ID NO: 2512491 - RNA, 19 nt, Artificial Sequence
  Description of Artificial Sequence: Synthetic oligonucleotide
gccaggcguucagugagcg

SEQ ID NO: 2512492 - RNA, 19 nt, Artificial Sequence
  Description of Artificial Sequence: Synthetic oligonucleotide
cuccuguaggcgacuuaca

SEQ ID NO: 2512493 - RNA, 19 nt, Artificial Sequence
  Description of Artificial Sequence: Synthetic oligonucleotide
cugugcuaucgacaucaaa

SEQ ID NO: 2512494 - RNA, 19 nt, Artificial Sequence
  Description of Artificial Sequence: Synthetic oligonucleotide
cagugagcgcaucucugaa

SEQ ID NO: 2512495 - RNA, 19 nt, Artificial Sequence
  Description of Artificial Sequence: Synthetic oligonucleotide
caggagccuaacuguguaa

SEQ ID NO: 2512496 - RNA, 19 nt, Artificial Sequence
  Description of Artificial Sequence: Synthetic oligonucleotide
agaagccuuugcaccugcu

SEQ ID NO: 2512497 - RNA, 19 nt, Artificial Sequence
  Description of Artificial Sequence: Synthetic oligonucleotide
ggagccuaacuguguaacu

SEQ ID NO: 2512498 - RNA, 19 nt, Artificial Sequence
  Description of Artificial Sequence: Synthetic oligonucleotide
ggaucagugccaggcguuc

SEQ ID NO: 2512499 - RNA, 19 nt, Artificial Sequence
  Description of Artificial Sequence: Synthetic oligonucleotide
caaugccccucccauggcu

SEQ ID NO: 2512500 - RNA, 19 nt, Artificial Sequence
  Description of Artificial Sequence: Synthetic oligonucleotide
cacuuggcauugcucuuua

SEQ ID NO: 2512501 - RNA, 19 nt, Artificial Sequence
  Description of Artificial Sequence: Synthetic oligonucleotide
gcucuccgagucauuucag

SEQ ID NO: 2512502 - RNA, 19 nt, Artificial Sequence
  Description of Artificial Sequence: Synthetic oligonucleotide
cgacuuacaagcucccuua

SEQ ID NO: 2512503 - RNA, 19 nt, Artificial Sequence
  Description of Artificial Sequence: Synthetic oligonucleotide
gcgacuuacaagcucccuu

SEQ ID NO: 2512504 - RNA, 19 nt, Artificial Sequence
  Description of Artificial Sequence: Synthetic oligonucleotide
agccuccacaccacagaau

SEQ ID NO: 2512505 - RNA, 19 nt, Artificial Sequence
  Description of Artificial Sequence: Synthetic oligonucleotide
acugugcuaucgacaucaa

SEQ ID NO: 2512506 - RNA, 19 nt, Artificial Sequence
  Description of Artificial Sequence: Synthetic oligonucleotide
ccaggcguucagugagcgc

SEQ ID NO: 2512507 - RNA, 19 nt, Artificial Sequence
  Description of Artificial Sequence: Synthetic oligonucleotide
ggccagcucaucaauuccu

SEQ ID NO: 2512508 - RNA, 19 nt, Artificial Sequence
  Description of Artificial Sequence: Synthetic oligonucleotide
gcgcaucucugaaaggcaa

SEQ ID NO: 2512509 - RNA, 19 nt, Artificial Sequence
  Description of Artificial Sequence: Synthetic oligonucleotide
ccaggagccuaacugugua

SEQ ID NO: 2512510 - RNA, 19 nt, Artificial Sequence
  Description of Artificial Sequence: Synthetic oligonucleotide
cagcagccuccacaccaca

SEQ ID NO: 2512511 - RNA, 19 nt, Artificial Sequence
  Description of Artificial Sequence: Synthetic oligonucleotide
aggcguucagugagcgcau
